United States Patent Application Publication US 2026/0103690 A1 - sequence listing, part 55

SEQ ID NO: 265401 - protein, 424 aa, unidentified
MDTKDRNSWEQHRYYMGLDWAKQEHAIAVVDGDGRIMVETTIEHTAEGWHRLREKLVDLAGPDLSLVAATIETNRGPVVERLLELGCTVYPINPNAAQCYRSRKAPSGSKTDRLDALSFADALRTDGHGWRPLNPEDPKTQELRLLCRDEMSLIEQRTALVNQLQQALHEYYPAALEAFDDWTSPSSWAFVERFPTPQALKKAGKRHWEKFLHTHRLYRPETYQKRLEIFAGATEFCGSHAVTNAKSMLAVSLAKQLRLLEQQLKAYREHIDKLFQEHPDYTIFDSLPGIGEKLGPRLLSECGEDRDRFEDHEALQCYAGTAPVSFQSGQINRVRFRYACNKNLRNAVHLWANLSRKKCAWAQVYYHQKRLEGKSHACALRCLGQRWLKILWKMWQTKTPYDEQMHTRNQIKHGSWVLALTASK

SEQ ID NO: 265402 - protein, 334 aa, unidentified
MHYIGLDIHKKHTQACVRNEDGEILCEERIRTDAASIGGFFEKLERDAGGPLSVAMEATGFYFWIYDRIAARGHRAIVVHPGKAKPLMRAKAKNDRNDAAALSELLRSGCLEGIYVPPKEVREMRELTRHRESLVRKKGDLKREMLSALMQMGISVPEEFRSNFTKKQMRWMRSLGVFVICERLDLLEQTEAKISNVEKVIAERWGVDEDVALIRSVPGIGMVTATVIKAEIGDIRRFTSPERLAAYVGLTPTTYQSGEKEWSGPTRRGNSRIKHVLIEALLSHVQHCPESRISLYDLRKRDSIGRKKALVASARKLMEALYFMLTRREAFRAH

SEQ ID NO: 265403 - protein, 392 aa, unidentified
MIYVGIDVAKDKHDCFAMNSDGEILIENFSFQNNSDGFNLFFNSISQFNESFENIKVGLEATGHYSNNILNFLTSKGFNVFVINPLQTNLFRKGQSLRKTKTDKLDARFIATMLITDNLKPYSNLSYHISELKSLVRHRFRLVEERSKFKVSLSRLVTIVFPELEKIVWSISQNSVLYLLYELPSVKDISECNLKHLTNLLKKHSCGKYSRDKAIEIRDLAKKSIGTHSPSISFELRQVIQTILFLQSQVDDIDKELKRLVVELNSPILSIPGISYVTSAFILAEIGDINNFGSPSKLQAFAGLEPSTYQSGKFTSTHSVMVKRGSKYLRWALLTATRLVCMRDKNFNDYKNQKLAEGKHYFVALSHTAKKLIRVIYHLLKTNSTYELQKVT

SEQ ID NO: 265404 - protein, 349 aa, unidentified
MGEVSTIGVDIAKSVFQIHGIDADGAVVIRRRIGRAKVLKFFSGLPPCLVGMEACATAHQWARELKKLGHDVRLMPPTYVKAYVKRGKNDAADAAAICEAVTRPSMRFVPIKSIAQQSALMLHRTRDLLIRQRTQLINALRAHLAELGLVAAKGHEGLHQLVMAVTESSDEQLPSNARFACRALVAQLHAVQTQISGLDKRITQAHRANADSKRLEAIPGFGVILSTAVVATMADPKAFRTGREFAAWIGLVPRQNSTGGKERLGSISKQGDRYLRRLFVLGAISIVRTARTRPDKYPWVTELLGRRPAKVAAVALANKMARTAWAVLAKGETYRAPTRSSSLAIAAAA

SEQ ID NO: 265405 - protein, 321 aa, unidentified
MTYVGIDVSKATFIVAYSSAKSSKTKTFKNTTKGVHEFIQTLSANEHHCVLEATGNYSSLLVYLLSRANITVSLENPLKIKNFARVMLSVTKTDETDARLIALYGQRMQPAPYKLRSDAILTLKQKRTVIRQLKKQLIATRNLKGSMEALPFFDPKCKKAIEKTIVFLEKQTKGLEEELAALAQSEYKKQIDLLTSIKGIGVTLAAALIMATGGFTYFDNAKQLTRYLGLSPTYQQSGTSVNVKGHINRNGDSSLRGQLYIAAMASLRCNAECKACFDRLRSNGKPGKVAVVAVANKLVRQAFAVVTQEKPYVDGFKSKKP

SEQ ID NO: 265406 - protein, 328 aa, unidentified
MTMNPALPAFNHVVAFEVSKDSLVIHVLPVGEQSVAANKPKAIRKALLAELRRNAKANLGPLLVVCEATGGYERHILDLCVELGIAVHKAHGSRVRYFAKYLGLLAKSDPIDARVIALYGLKTPDLHLYVPPASEVLALKDLKTRRDQVQEMLFAEKNRLEHARHASVSRSLNAHIASLRKALAALEAEIAAHVKASETLARKARLMQTLKGVGPATVAALLAYLPELGALSRGGIASLAGLAPFDDDSGKFRGPRHIEAGRAVVRKTLYMAALVAIRHSPVMRLFAEKLRRNGKPSKVIITAVMRKLIVTLNAIVRSGEPWSHAKAA

SEQ ID NO: 265407 - protein, 430 aa, unidentified
MKSNTQNAKIEAITEKTLVLGIDVGSKTHYARAFDYRGIEYSKKPFKFSNTEVGFATFKEWILDLKERHEKDKVVPGMEPTGHYWFNLGKFLQDNEMKPVLVNPHHVKKSKELDDNNPTKNDRKDPKVIAGLVREGRYMIPYLSDGVYADLRTASNIRFQLQAELTRIQNRISRWFNIYFPEYKTVYGKPDAKSGMLILKAAPLPEDILTLGIDGVNQIWRDAKLRAVGKARAKTLIKAAEHSIGSKEGTMSARMEIRMLLEDYESQNMRLQEVMVLIEELVKEIPMAEKLLEIKGVGIRTVSGFLAEVGDISRFNNPKELQKLAGLALVENSSGKHKGKTTISRRGRKRLRYLLFEVAMSLVAKNPEFRELHNYYTTRRLNPLKKMQSLMAIAAKLIRVFYAMLTKGVDYDPKKMISDIKRPTVYLQAA

SEQ ID NO: 265408 - protein, 349 aa, unidentified
MMVVGIDAHKRTHTAVAVDEQGRRHGVKTVASTTSGHLELVRWAGCLGEHRFAVEDCRHLSRRRERDLLGAGESIVRVPPKLMARMRASARERGKSDPIDAMCVARAAPREEELPTAHLDGPERELGLLVDHRDDLVAERTRAQNRLHWHLHELDPSLELVPGSLDRYVVLTRLSALCAAHQGVVAEIAAELIERVRDTTRRVKELERRIDAVVKGLAPQLLALRGCGSLTAAKIIGETAGVRRFGTPARFARFNGTVPIPVWSANDVRVRLNRGGNRQLNAALHRIAVTQLRGGLGKDYVEKRMKMGNSKTEAIRALRRRLSDEVYRRLITDELHRAAGEPLAALQAA

SEQ ID NO: 265409 - protein, 351 aa, unidentified
MEAYAGQQYIGIDLHRRRSVIVRTTDTGDVLEAVQITNSPLALAEVMTRAGEHPEVVLEATYGWYWAVDLLQGLSCEPGVHLAHPLGVKAFEYRRHKDDFRDSADLADLLRMGRLPEAWIAPPEVRELRELVRHRAKLVALRSNCKAQVHAVLAKCGVAVAMSDLFGVGGVELLNGLELPKPYAARIASLRRVMDLLDFEIDIFGKLVHGQLAREPGYTAVQTIPGIGPVLGAVMVAEIGDVHRFPTAEQLGCWAGMTPRHHESDTKVRRGRITKQGSRLVRWAAVESVQRLPKHAVLGVFRDQVAARRGTNIGVVAAARRQLEYVYYALRDHHVRALQPRPAAPPAAAVS

SEQ ID NO: 265410 - protein, 338 aa, unidentified
MKITTIGLDIAKSVFHAVGVDKAGKLIKKKMLRRKDLLPFVAKIEPCLIVMEACGGASYWAREFEQFGHVVKLIAPQYVVPFRQGNKNDYNDALAIAEAAQRPNMRFVKPKSVEQQDVQLLHRMRERLTKQSTALINQVRGMLAEYGIVITKSKSAFKAQLPDILVDEANMLTIKGKAIFYQLYDEVIDIEKRLKSCDTQVLNETHNNVICQRLQTIPGVGPVTATAIYAAVGDGKDFSNGRHFSAWCGLVPKQHSSGGKDNLLGISKRGNAYLRTLFIHGARAVLRHSGSKSDKLSCWAIQLAERRGFNRACVAVANKLARMSWVIAAREEEFRLAM

SEQ ID NO: 265411 - protein, 394 aa, unidentified
MQQYIGIDNSSLDHKVRVIDENGNLNASFTITNTFEGFEELNAKLGGLSSSKIGFELPHGPLVDYLHEQGSILYSLNPLKIKRYKESIKVSGNKNDDIDARAIAEYLRMNASRTRPLLYNSSEVERLKTLSIIHTRLTHEHARYMNKLHFAVRQYFPLHDSLFNRFACTVQLELLIKYPTFHQLRALSDERIIEFLKAYKYRKPIYINKVIEKIRNHVQLISADVEFAYKFEVEGLCRILLILKNELKHIEREMNRITDLHPLGKCFKSLPGAGPILACKLLALFGDNKDRFDNSNGAQCLFGTAPKNYQSGPYHKVIMRRACNKSARAVLYAFAFTSLKFSGWARKYYDTQRAKGKTHSVAIRALSNKWVKVIYKLWKDEILYNENEKISSAA

SEQ ID NO: 265412 - protein, 315 aa, unidentified
MPSQIFVGMDVAKAPWDMALRPTGERWALTHADAGIAGLVPRLQAIAPQLMVLEATGSEQRAVVAALAAAGLPVAGVNPRHARDFAKATGPWAQTDALDARALAHLAEAVRPMPRPLPDTQADELRTLLARRRQLVTMRTAAQNRLGSAPPRLQPDIQAQITGLNTRLTTLDDDLDTTRRARPVGQAREELRRRVPGMGPVCARTRLLDWPELGPLNRPRLAALVGVAPVNRDRGTRRGRRTTWGGRAHVRATWSMSTLVAVRYHPVFKAFDARLRATGKAAKVALTACMRKLLTILNAMVKHHAPWPPEAVRSA

SEQ ID NO: 265413 - protein, 349 aa, unidentified
MYYVGADLHKEQTWFYIMDENGIKIDSKSISNSPDSLKSYFATIPTPFTLAVEATYNWYFFIDMAEQFAQTAYLANSYELKAFAKRHKKTDKIDARLIADILRKGFLPTVFIPDQSIRSLKELLHYRINLVRDRCRNIFRLKNTLDKLGADSSGDFTTKKRLWEIPVDSFAERCHYIISGYIGRIVALNQHIHNMKTYLKNELLEDKEIQNLITIDGLDYFSAALIKSEIADINRFASFNRLCAYAGLVPRVSQSGDKEAHHGALMANRRKNLQWILLETVFHFIKATPERQARYEELKGRKGANTAKVIMARQYLKIIYHVLKEQRPYYREEVKRPKDFCQIQSVAAA

SEQ ID NO: 265414 - protein, 386 aa, unidentified
MRNAGIHANSLLEVRRMYNAVGIDVSKGKSTVAVLQPGGTVIRKPFDVSHTSQNLNELADYLSSLDGTTKIVMECTGRYHEPMVKALSEAGLFVSIVNPHLIKNFGNNSLRKVKSDPADARKIARYTLDNWTELRQYSGMDNTRTQLKTLNSQFSFFMKQKVAAKANLIALLDNTYPGVNKLFDSPTREDGSEKWVDYAYSFWHADCVRKIGLKAFTERYMSFCKKHHYIFQQDKPEKLFNASKELVAVFPKEKTYKLLIQQSIQQLNLASEHVEQLRREMNELASTLPEYSTVMGIYGVGKTYGPQLIAEIGDVSRFTHREALTAFAGVDPGVDESGQHKSKSNRASKVGSARLRKTLFQIMTTLLQNAPEADPVYCFLNKKRSQ

SEQ ID NO: 265415 - protein, 412 aa, unidentified
MGQASPASLGIDVAKATFEAALYPVASDCWRMVLCSHDSPLIGMATNDNAPARQGISCRCPQTTTVTPGHSPASSEENGVLTTRLSIACLALSYPIFTPVHRDPILLVDGTMLQRSFAMTVAGFDALHTGMSKQGVERVHACLEAPGAYGAALALSLHEAGHVVVVSLVNPARIAAYAKSRLTRTKTDQADAALIAHVCYTQHPLAWTPPLAEVRELQARVRRVEMLQEMAQQEVNRLQSGLHSPLVRASMEATLTFLRQEIATMQRLVQEQVEQSADLRHKQHLLCSIPEVGRWTAARVLAESDQVRTSVSARQLAAYAGLTPRERTSGTSVHHQPRLAKTGNSRLRRALYLPAIVAMRHNPAVRALAERLRVRSKRPMVIVGAAMRKLLHLIYGVLMADKPFNATRAMPA

SEQ ID NO: 265416 - protein, 371 aa, unidentified
MKDNSTFIGMDVHKNSIDIAIAQKGRRGQVAHYGKIDGTLAALDKVVRKLVSKGDRLHFVYEAGPCGYQIYRHLTAQGFDCSVVAPSRVPKQKGDRIKNDRRDALMLARLHRAGELTAVFVPSAEDEAIRDLTRAREDAKGDEKKSKQRLLAFLLRSGHRYTGRSLWSQAHMRWLADIKMPHGSQQIVLQEYIDTLSQCQARVQRLTDQIRQLLPSWRMFPVVEALQSLRGVSLIVAATTVAEVGDLKRFQNPAELMSYLGLVPSEHSSGQKTRRGSITKAGNGHVRRVLVEAAWAYRLRARVSRALLKRQENVPQHIRDIAWKAQLRLCSRYRHLWAKGKAKQVIVTAIARELCAFMWAIANEIEPPAAV

SEQ ID NO: 265417 - protein, 316 aa, unidentified
MADTYVGIDVAKAQLDVAVDGTSQTESVSNDERGIGRLVQQWHATPPTLVVVEATGGYELALVGALGAAGIPVVVVNPRQVRDFARATGQLAKTDRIDARVLARFVGVIRPTVRHLLAATQLDLDAVLTRRRQLREMLSAEQTRLAHPATRAVRQSLRKHIAYLERELHATDHDLGELIKASPVWREADDLLQSVPGVGDVTARTLIAALPELGTLDRRAIAKLVGVAPLNHDSGQHRGQRRIWGGRADIRHVLYMAALVAARRNPVIRAFYLRLRATGKPAKLVLVACMRKLLVILNTILKTKRPWQPTMATTSA

SEQ ID NO: 265418 - protein, 368 aa, unidentified
MEQDIKFFVALDVHKDSIAVAAAEPGRAPARCVGTIAHEVGKLRKLLARYGDPRQVQVVYEAGPTGYGLQRELTRCGYHCQVIAPSLIPRRAGDRIKTDRRDCVRLAELARAGELRAVWIPDPADEAIRDLARAREDALNARTQARHQLKSFLLRHELRYPHRTSWSKTFYRWLSTLSFPSAGAQTAFTEYWQAVSAADERVARLSTALPSAIVGWRLESVVQALQALRGIDVISAIGLVAEIGDIARFAHPRQLMSYLGLVPSEHSSGERVSRGSITKTGNAHARRLLTEAAWNYRFKPRIGYQAQRRAEALPQAIRDLAWKAQLRLTARFARLKAKGVHVNKVCVAVARELAGFVWAIASLHSKHV

SEQ ID NO: 265419 - protein, 351 aa, unidentified
MIIIGVDYHPSDQYIAFVDTETGEYVERQLNHSEGEAEKFYRELAARGVSVRVGMEATGYSRWFERLLAELGIEVWIGDAAEIKTKRVRKQKTDREDARLLLRLLRENNFPRIWVPSPENRDLRQLLWHRHRMVQMRTRIMNQLQALAMNEGQRRKKKLWSEAGRAQLEKLPLAAWAARRRKDLLELLDRMNPTIEELTAAIEREARKWPEVLRLMTHPGVGPITALAFVLIIGTPERFKCGKQIGSYVGLIPCEDSSAGHQRLGHITKQGSSLLRFLLGEAAQAAARWDADWRRRYMHLALRRQRNIAKVAMARRLAVRMYWMWRNSWEYAEWVKFGSHAGQLGIGHGVK

SEQ ID NO: 265420 - protein, 423 aa, unidentified
MSYRIAGIDVHKKMLAVVVSDVEVDGEYQFERVRYSSSPAHLRFLAEWLIAQQVEEVVMESTAQYWKPVWGALERYWKPSCQEREGAGPRSGTLHLAQAQSNRGRRGRKKDFPDAERLVKRLVADELVLSFVPDSEQRLWRTVTRRKYQLTRNHVRLQNQLEGLLEECHIKLSSLVSDLLGASARRMLKALAEGETNPAALAAMADKNLRATQAQLCDALSACTELKPIYRRLRKMFLEELQFIDQQISQLDQELANLLSRHHDAVVRLAEIPGLGVDSAQQIIAEVGAGAATFPSAKQLSSWVGACPGEEESAEVSKSHRSPKGNRHMRRILNQAANAAAKSKGTIFEIVYRRLVSRLGHNQTIGAIAHRLCRLIWIILYRGVRYEERGPSVNAMTRRHRTHRMIRELRKLGYRVEPLITTV

SEQ ID NO: 265421 - protein, 339 aa, unidentified
MTHTIVGVDIAKNVMQIHWVDPETGEIVNRPVKRAAFLEYFANRHPCLIGMESCSGSQHWARRLIEMGHQVKLMPAKFVKAFNIRNKSDAADARAIWMATQMTSKAVAVKTEAQQAVLALHRMRQQLVKFRTMQINSLRGLLTEYGEVMGVGRAALDKAVAGVLERLSGRLPAILIDTLREQWKGLENLDRQVGQIERRLQEWMKEDHAAKAIAAIPGVGLLTATAAVATMGHAKAFKSGREFAAWLGLVPGQTGSGGKIALQGISKRGDTYLRTLLVQGARSIIYRVKEPGPWVAQMKQRRPLNVVIVAMANKLARIIWAMLAHQRSYRKDYKSVKPA

SEQ ID NO: 265422 - protein, 261 aa, unidentified
MTVTCVGIDIAKEEFVVACRPERPEWAASNDAAGIAATVTGLQRLVPTLIVLEATGGYETALVAALAAAGLPVVVANPRQVRDFAKATGQLAKTDRLDAHLLALFAERVQPTPRPLPEPVLEQLTALLTRRRQLLDMLIAERNRLEHATPPIRRDITQHIRWLERRVADVDRDLDDTLQSSPVWRAKENLLRSVPGVGPIVSRTLLADLPELGHLNRKQIAALVGVAPLARDSGTLRGKRVVWGGRAPVRAVLYMGALVAA

SEQ ID NO: 265423 - protein, 318 aa, unidentified
MSDKTIVGIDVAKNTLEVFIDTTGQLLHLENSASGVHELQEALSGLAVAGVIMEATSRYHCTAELMLSASGLPVAVINPRQIKNFARAMGRVAKSDPIDARIICEYGRRMNPKFRPTKSEQQQDLTILLMRRRQLVQGRVMETNRLKERCGVYIEQGIMRHIRWLDAEIDILDAEIKQRLRRDDTLAMKRKLLDKVKGIGPITQATLLIQLPELGSLTRRQVSALVGVCPYDRDSGQLRGKRAIWGGRSGLRATLFMAMLSAVRFNPQIRAFYNRLLTRGKPKKVALTACIRKFITILNAMFRDKKDWIYEDTNGLNT

SEQ ID NO: 265424 - protein, 350 aa, unidentified
MVEHIKLETIGCDLGDKKSAVCVLGADGKVLERTEVRSTKAGMTKFFARPRAHVVVEVGAHSRWASEVLHSLGHEVTIANPRRVALISQSDSKSDRTDAELLARLGRSDPSLLSPMKHRSAEAQAELAVAKARDALVGARTQLINHVRAVIKSFGDRLPSCTSESFHKRTVDAVPEALKSALGPLYEVLGEIAKQIREHHRSLERIAKKHPDVRVLEQVSGVGTLTAVTFILTLGDKNRFASSRMAGAYLGLRPRKSQSGNDDPQLRITKAGDPFLRRLLVNCANHILGPFGQDSSLRTWGLLLAGRGGKNARKRAKVAVARKLAVLLHRLWVTGEIYEPTGYQTKRLAA

SEQ ID NO: 265425 - protein, 385 aa, unidentified
MYQLSGSTQAALDYNSTIIGALELSKKKWVLAVQLPGVSRHSRHVLEACGDGLASFVERLKARCAAAGRKIARVILTHEAGRDGFWLARFLARRGIEIHVIQPSSLPVDRRARRAKTDIIDVEMLLRTLMAWLRGEPRVCSMVPIPSEADEEARRAYREREDLTGERRSIVNKIDGILATLGVKGYKALRRDRREQLTAVRQPDGDPIPQKARARIERLLDRLDLVLKLIEQVESARDAVLKKDAPADEAERMIRSLTDLRSIGPDFATLLVREAFVRQFRNRRALGGYVGLGGTPFSSGGSEREQGIGKDGNKRVRAAMVELAWTWLRWQSDSALSVWFRARVGAMGGRIKKIMIVALARKLLVALWRYVMDGVIPDGAKMKAA

SEQ ID NO: 265426 - protein, 324 aa, unidentified
MTVCYLKTSDDYSFKQYRLDEIAAFVASLEATDELAVEATGNSRWLVGLVTGRIRRVIVVNPGEVEVIKRSVKKTDKRDALNLARFLAVDMLPAVRVKSARAEAVQRLNETRSKFVGLKTRLLNKIHALAVGRGWKLKKESLGSKKGLAAAMQREWTQIERIELEIITEQIASLKHGIKRLDEQIAELSSELPGFENLITLTGIGARSAGVLLSVIGAVEDFESEGKLASYFGIVPKVSNSNERVCHGRITKRGSKTGRTTLVQCALVAIRYSPYLRKFYQAVKERRGAGKAIIAAARKFLGIIYNTLKNDWVFEDFPNFVLAE

SEQ ID NO: 265427 - protein, 336 aa, unidentified
MRYIGVDLHTTQITVCYLKAEEGFEIRKYQLCEIDKFVLGLMKTDEIAVEATCNTRWFAEQVAEKVSRVVLVNPRQFEVVKNSCKKTDKNDALNLARFLKADLLPEVRAKREEAERVQSLVNTRTKLVRLKTSLINKIHALYVSNGRKLKKTSLASEKGLEKVLLSEWSAIERIELEIIIEQIRSLKVSIRKLDTAIETESGKLNGFENLKSMSGIGSLSAGILLSVIGNIKDFETADKLASYFGIVPRVSNSNETVNHGRITKRGNRTGRTTLVQCSLAAIKKSEYLKKYYDGVKARRGHGKAKIALARKYLGIIYNTLSNGWVFADFNNFELAE

SEQ ID NO: 265428 - protein, 343 aa, unidentified
MQAITTIGFDIAKSVFQVHGVDAAGQVIVRRQLKRRQVIAFFQKLPPCLVGIEACASSHYWSRELHALGHRVRLMPPAYVKPYVKRQKNDMADAEAICEAVTRANMRFVPTKTPEQQSGLVLHRTRHLFIRQQTSVINAIRAHLAEFGVIAPVGRKGVEELLCVVADANDKRVPEVVRACVAALGGQLLSLKKQILDFDRMIMAWHRSNQTSKRLNCIPGVGPLLATALVASVADPKTFRSGRNFSAWIGLVPKQHSSGGRDRLGSISKQGDRYLRSLFVAGALAVIRYAKIHGTKHRPWLTALLARRPTKLAAIALANKLARMAWAMMATGARYNYPASLRV

SEQ ID NO: 265429 - protein, 346 aa, unidentified
MHYIEMDGHITTLEFAVVNEAGRLVKADRVTTSVNGFMGFVRTVPRPRTIYMEEGTLAAWALETCVRFGEKLVITDAKKNHWISSSGQKDDPIDALKLAQLGRGGYIKEIHHPVGQRRRFRELMIAYHDAVRSTTRIKNKIKARFRQNGIQCAGITVYLETYRAEWKAKLPQEPTLLLILEGLWRQLEQSEQTEKELLAAAKAQAKHYPEIKHFQALPGIGFISAATVSAMLETPYRFADKKKVWMYAGLGIMRRSSGGKIYSEKLSTDYNRLLKYTLKQAAEAAINAKDSSFRRKYLDVTLLHGIAPHRAKLTIARDMLATMWTMWRKGEKYNPEIREQAAYKQG

SEQ ID NO: 265430 - protein, 322 aa, unidentified
MNKVIGIDISKQKFDACFLDGKTQTSDVFTNDQDGFKRLTGFITNLDIVVMEATGPYFLKLATYLFERGYQVSVVNPLVIKHYSRMKLSRAKTDKKDAYLIACYGLGENPPLWKAQQEYIMQINQELSVLESFDKQITMIKNQLEALGVLPYCDKVALNALKTALATIEKQSIKLEQHLQGIVATHCQNAYDALKTIPGIGPKASLLLIAITGNFQKFSTSRQLISYLGLSPRIYQSGTSVKGKSHICKMGMAKARKTLYMCSWTAKFYNPQCKELYQRLKEKGKAERVIKIAIANKLVRMAFAVGKNLSTYEKNYRTNVCF

SEQ ID NO: 265431 - protein, 427 aa, unidentified
MTDQSKNKPYCSWIAIDIAKDFNVVMLETVDGVTRRFRMANSGNDHDRLIEVLHGLPQPCHVGFEATGNYHRPLAFRLLTEGFDVSLISSLASARYREAIFNSWDKNDPKDAGILLELLKRGIVQIYTDPIKSGFHDIQELSKTYYHITQSRTRLQHSILTHYLPLYFPEMGKFWNSTRSEWWINFLLHFPTPASITQHTEQEFCAIAFPIIGRKVNKQAKLQELYATAQHSIGLPVAPNSLACQTFKLQLQRYQELTSQRQQLEHQAESILNTHPDYRILKSVPGIGPIIALTILAEGGDLRRFAHHRQFLKYCGLDLAKNQSGNFRGQDKLSKRGNARLRLALFMATINAVRQTENSFRDKFHRYTKAAPNDADCKRKARTAVMAKMARVIHALVKSSTPYQGYFEVSPSGSIPLSRAVGASRTP

SEQ ID NO: 265432 - protein, 369 aa, unidentified
MEKGTTYVALDDSKRKIVAGILRPGDTEPELRELPNDPHHIRRLFERLRREGPVVACYEAGVSGYDLYRQIVGLGVACDVIAPALTPRRPGQRIKTDRRDAAKLVRFFRAGELTAIHVPAEAEEAGRDLIRCRDDIRRDVLRWRHRTLKLLTRHGRNYLGGKNWSRGHWTWLRTQHFALPPLQRAFEATLFALEQALARQAELDKEIETLALTDPYREPVGWLRCFRGLDTLSAMILVAEIIDFQRFRRPRELMAYLGLVPTEYSSGDTQRRGALTKAGNTHARRVLIEAAWHYRHRPTIGPALASRSQGQPPAILAQAWRAQQRLHRRYRHLMGHGKRPPVAVAAIARELVGFIWAAMTGRESRLQVA

SEQ ID NO: 265433 - protein, 416 aa, unidentified
MNAVGIDVSSRKSTVAVLRPLGEVVCLPFDVTHDIAGLASLAEKLKAIDGETRVVMEHTGRYYEAVAKALHEAGFFVCAVNPLLIKEYGANSLRRVKTDKADAIKIARYALDNWADLRDFTPMDAIRYDLKTLNRQFQLASKQRTASANNLIALLEQSFPGIRKCFDSPVRSDGTQKWVDFAHSFWHVDCVRKQPFPAFCERYRKWCKRHAYLFKLSNAEEVYALAKRAVVLTPKSKVVKVLVQEAANQLSSISRSVEVYRAEMDRLAAMLPEYPVVMAMYGVGKSYGPQLMAEIGDVRRFERKQALVAFAGIDPMPNQSGDKNVRSNKSSKRGSPYLRKTLFNVIRTYLQCAPQDEPVFQFLNRKRAEGKPFYVYMLAAANKFLRRYYAKLRDYFASLDTLQPVAPIPTILKAAL

SEQ ID NO: 265434 - protein, 344 aa, unidentified
MDNHTQYSGFAGVDLAKKVMQIHFVTGDGEITDKQVKRAEFLDFFRNRTKCLIGMEACGASQDWARKLEAMGHEVHLMSPKAVKPFVSGQKNDYNDAIGIYKAMFNGVRRVPVKSTEIRDLQTLRRIRSQVTKDKVKEINHVRGLLAEYGIVMGKSITAFNKGISSALESLKERGDVSPLVAEELQTTVESIKTKIERQKRLDREIEQLARGCKNYENFLKTPGVGPFTAAMLCVLLCDPAIFANGRQFAAYIGLAPRSRGSGGKNFIIGIPSKFNCDSESRAVFVECAQALARYKNKSPWVDGILRRKPKKVALIAIANKLARQVWAMATKGESFKQMTILTA

SEQ ID NO: 265435 - protein, 413 aa, unidentified
MFYVGIDYHKDVVAVCVQTGSGRVRAEFETTADHEGMDQIVRSMGGKRFKVMGEASTYSIGLHNYLASRSVDSCLVDPRSLRLITSSDKKTDRHDANVIATFLRLMDRHEIELSLSCVVDGGRRDLRDLCRYREYIGSEKGATLRRMRSHMHLHDQALDDSYGDFSTIKGQTMLRNAFGDDVVLMEMLNDYVYLQAKARRMDCLLGSAEYSSREVDLLTSIPGIGKVTAVQMMSMIVDIDRFESADRMRSYFGMNTIVMDSGGKTCHGHVTKRGDPMMRNILGRVLNVYLVRRPEDTISVYHRAHRDSMGAKKVRMACMNKLLDLVYAILKRGTPYVPRRRHGKNGNGFTGGATGYRRDRSDWKRTRRDGHAPWRKVADCLCTRGAFRKMRRERPWRSVLMSACRSELRRENA

SEQ ID NO: 265436 - protein, 398 aa, unidentified
MISVGIDVSKEKSTVCILKPYGEIVRSPYEITHTESQIAELVSTIKCLDDEVRVVMEATGNYHLPVLSFLKEHGIFVAVINPLIMKKYASIILRKGKTDKLDSIKIANYGLDNWFHLINHESSEEIYVQLRLLGRQYGHYIKLRIESKLSLTTMLDYTMPGIKTMLKSRSDKPEKDKLNDFIEEYWHYDNITKKSENQFISNYKNWAKKKGYQQSEAKAIKIYDLAQQGIPTLSSNAPSTKMLVLEAVRVLREIDKTLALILSQMQELAKSLKEYTVVREMAGVGDIIAPRLMAEIGDIRRFHSGKALIAYAGIDAPPYQSGQFTGTRRRISKRGSATLRKTGFEIMKCLKSNKPESDTVYLFVLKKEAEGKASKVAKIAGLNKFLRIYYARVKEVYK

SEQ ID NO: 265437 - protein, 458 aa, unidentified
MGRNKSKDKDRRTMLVVHPNAAAIDVGATMHMAAVNADCTPEPVRSFGTFTTDLHRLVDWFAECGVNTVVMESTSVYWIPIFELLDARGFAVFLVNARDAKHVPGRKTDVSDAQWLQRLHSFGLLRASFRPKGQIAELRAYVRQRERLLEYGASHIQHMQKALTEMNVQLHHVVTDITGATGLRIIRAILGGERNPAVLARMRDRRCHATVETIEKALAGNYRAEHLFALEQALALYDTYQEKASACDIRIEAVLKELSICRGREAGPLPSPRQRMRRQPNGMDFDVRAALYALLGKDLTQINGLGPHLALRLIAECGDDLSAWPSAKHFTSWLCLAPSNKISGGKVLSSRTRRSGSRAAALLRLAAATVGRTDTALGAFYRRLSARIGKAKAVTATARKIAVLFYNAVRHGMEYVDPGASFYETRYRTRVVANLHRRAKAFGFVLQPMEPKADIVVS

SEQ ID NO: 265438 - protein, 416 aa, unidentified
MKIYPNTRAIQRYIALDIHKEYVLAGGMNTGQEWVLSPHKIEMGKFREWAKKNLCDTDAVVIETTTNVWDIYDIVQPLVGRAVVAHAGAVRQIAEARVKTDREDVKRLIRLLLADIVPEVWVPPQPVRELRGLVSYRQRLVKTGVMIRNRLHSLLHRHNLLLPEEGLADGEWWTQQEKIPALEKLQIRQELSMLQQIETHKAEVDHELGRQSLGETWGKAAVRLMQLPGIGVVIAMTVLSAIGDIHRFESADKLVGYSGLGAGVHDSGKEHIEKRITKSGRKELRWAMVEAAWRAVRMSPYWKEQYEKFLRRMRRPNQAIVVVARKLLVAVWHVLSKDETDERATEEDLAYKMLLWSWSLSEDARQGLTHKQFAKYALMRLGVQTDLTRFVRGKVPRRIASREEVLVRMAELGLSG

SEQ ID NO: 265439 - protein, 332 aa, unidentified
MDNFYFIGGDVSKKKLDFCVLFEGKVLREEQVSNHQQAVARLIGELKNDLEMDNEQFLICAEHTGQYTFPLVCACKSVECKLWLENPSQIKYSSGMQRGKNDKVDAKRIAIYASRFGDKVKYYDRPSEEIERLKQLERERALYVTDLAKYKGQMYDQKDFMPAALYRKKTKRMKGLIQELQAAIDAITAEMEKIIGSTEVLARQMELLMSIDGVGKVVALNVIIETEAFSRFDNPRKFCCHAGVAPFSYTSGSSQHSKNKVSHRANKNIKKLLHMAAVSVTHRKEGELKAYYMRKVEEGKNKMSVINALRAKIVARMFAVIKRNEFYTPIYS

SEQ ID NO: 265440 - protein, 336 aa, unidentified
MTMTTIGLDLAKYVFQVHGVDAEGNVIEKRRLRRSQVIAYFASIPPCLVGMEACATAHFWGRELARLGHEIRLMPPQYVKAYLKRGKNDAADAAAICEAVGRPSMRFVPIKTEVQQAVLVMHRARDLLVRQRTQLINAFRGHAAEFGVIGAQGRWNVTRLLAVIREGQAVPEPARTIVEMLAAQLDAIGERIEEIDARILAWHKANPVSQRLARIPGIGPLIATAIAATVADPAAFRNAREFAAWVGLTPRQKSTGGKQRLGRISRKGDQYIRRLLIIGAQTTLLRSKTARANPWIQSLLARCPRLKVAVALANKTARIAWALMAKGESYRPMASA

SEQ ID NO: 265441 - protein, 387 aa, unidentified
MTARTVNNLPAAAHGETVRCLFAIELSKQSWVIGFNTPLSEKISRRTLSGCDWKGLLELIEEVRARVSREMGRAVAVMSCYEAGYDGFWLHRQLEAHGVRNYVIDPASLQVDRRARRVKTDRIDAERLLRSLMAYLRGEPKVWSVVRVPSVAEEDARRLHRERDRLVSERVQHVNRIKGLCALHGIYDYHPLRPQAMARLEQLCTAQGGELPPRLKSEIKRELHRLKLVVEMIATLEAERDAIVEDETSTHLNAEKIRNLHKLKSIGPEFAAVLVGEIFHRGFNNRRQLASYIGVTPSPFQSGSTAREGGISKAGNRKGRTTGIELAWLWLRYQPDSDLSIWFRARVGTMKGRIRRIAIVALARKLLVALWRYLETGLLPRGAVLKG

SEQ ID NO: 265442 - protein, 371 aa, unidentified
MGWSAPHPGVTLGATTNRKECRMRTKPKPNATAYGIDIGKKVFHVVSLDADGRPLQRAKFSRETLMSFFEAADSALIGMEACAGSQWLARKLAAFGHDAKIIPAKFVKPYAKSNKSDTIDAEAIAEAVTRPTMRFVQVRSEAQVDLQALHRIRDRLIRNRTGLMNQARAFCIEYGLAMRTGAGGFHADIRRHLADSENDLTGTMRALLTDLLDDLAHIEKRVAELTKEIEAIAHSNETVRRLLTIPGIGALGATALVAAAGDGRQFRKARDMAAWLGLVPAEHSSGGKQTLLGISKRGNGYVRRLIIHGARSCFLHLHRETHALGRWLSGLEERTHRNKAVVALANKLTRIAWAILTRPGENYLRTKGAAA

SEQ ID NO: 265443 - protein, 407 aa, unidentified
MDLLKTVFGIDVSSRKSNVCIMVNGQKVNDYAISNDMVGFNRLLGDLKQVTKPQIIFEATGVYSRRLQAFLDMHELRYVMMNPLEAKRKTKDDLHQNKTDKLDALYLAKLQSEHPQRLAYVQNKEYQELMANNRIYEQASHDLITNKNRLHKAVQLTFPEIEHLLANPRGKNYWSIVLRFPHPDIVLETKEADIIDFLKGLTGIGKKRANDIAQSLIRLAKVACPAVKKNSAHIRGLKMAINNILSAEEECQTALQEMAKLAPKRDLEILTSIPGIGENTALRIISELGDIRRFNNPSQLNAFVGVDPQVYESGNLTAHLSISKRGTAIGRKVLYLAINQIQSAKKAGNPCHIADYYEKRKRSSETASHKKAAIASIHKLLRTMFALIKNDQLYSYDVAKHNQRLLS

SEQ ID NO: 265444 - protein, 429 aa, unidentified
MNYTQNDRIEQVTDATLVIGVDIGSQTHYARAFDDRGKELTKRVFTFSNSIEGFNTFNQWAEALRTENNKTKVIIGCEPTGHYWFALAKYVTEHKKTLVMVNPFSVKKIKELDDNSPKKTDAKDPKTIAKLVVDGRYSIPYMPEGIYAEIRDLVYSRDRIVKQHNISANRIQRWLAIHFPEYLGLYTRFDAMSGLAVLEKAPLPKDVIALGVGGIRKIWHDKRMRGRGVTEDRARTLVEAAHNSIGLDGGSGTRSELYMLLEEHRLWISQLGAIEKALEEATMKVKYVENLLAIKGVGIITIAGFIAEVGDVRRFKSPKQIQKYAGLELVENSSGKHKGRTRISKRGRRKLRRVLYQVMIPMLARNREFREIYDYYVTRVKNPLKRRQAMVAVSCKLIRIFYAVLTKGVNYDRFKMMSDIHHESELIAA

SEQ ID NO: 265445 - protein, 356 aa, unidentified
MDRFIGIDVHKDSCTVAVMGPSGKRIRCEVVETNGAALVELIRLIPKERRVCIEESGQSAWLREILQAHVSEVVVEGTTEKKDRSQQKNDEKDAWGLAERLRTGTVKNRVFGAPRELSELRDAVRCYGIVVEDLVRTKNRLQAVYRSRGISVEGDEIYQKGKREEQLAKLPEGRRILAELLTRELDAQEELKTEAEERVEAKAQVHPAVARLMTAPGFGLIRAAQVVAIGITPQRFRSLRQFWSYCGLAVVMRTSSDWVRQDGRWIRSDNVSRTRGLTRKRQPTLKAAFKGAATVVVSRTKEHPLTRKYHQLCDAGTKPSLAMLTIARKIAAAVFAMWRNEEAYDPGHQASRPQPT

SEQ ID NO: 265446 - protein, 342 aa, unidentified
MNNVAIVAIDLGKHSFHLHAQDDRGHEVYRKKFTRAALTHYLANLAPCTVVMEACGGAHFMAQEVAKLGHMPKLIAPHLVRPYVKSNKNDFADAEAICEAATRPTMRFVHPKTQAQQALAMLNSVRDSFIKDRTATVNRIHAALLEVGISLAPGFKSIKTLPALLEASSFSGSIKKILMELHEHFTYLDGKVKALDKDVECQAAEDDLAARLMTMPCVGPITSSALAAELGDGKQFKCGRGYAASIGLVPKQHGTGDKTVLLGISKRGDRNQRRLLIQCARVYLIKLEHQKGALADWVRQLLASRHHSNLVVCVLANKLARIAWAIAAHHTEFDAGSAAMNA

SEQ ID NO: 265447 - protein, 340 aa, unidentified
MEEVAVVGVDLAKLVFQVHGVDGEGRVVLRRRLSRSKLLSFFAGLPRCLVGMETCASANYWARELLALGHEVRLMPPQYVKPYVKRSKNDASDAEAICEAVTRPTMRFVGVKSSEQQSVLVLHRTRLVLTRQRTQTGNAIRAHLAEFGIVAPVGRQGFDRLIAVIADESDDRLPSSARACLAMLVEQYRLVLVHLLETDRAIRAHSRASELGRRLQEIPGVGPLVASALVASVPDPRVFRTGRSLSAWLGLVPRQNSSGGKERLGGITKAGDTYLRKMLFVGAMAVIRHAQRFGTRKPWLIKLLGRKHPRIAAIALANKIGRVAWALMTSGERYREPAVA

SEQ ID NO: 265448 - protein, 352 aa, unidentified
MARTKQQKAIVVATAEDQVYVGLDVHVDTIHVAVWKGGRCEADWVTSGDCGKLAEQLEPLRPGLKQVAYEAGPTGFALARLLASRELPVIVCAPSKMPRTPVADAKTDRLDARKIAEYAAKGLLRGVAVPTEKEEHERALTRYRDDAVKRAVAVKVKIKAVLHFHGLGKLKSWSAADRERLLGIALSDEIRFILEDLFRQLDFQEAAKKRVEAKLREVLADERHAAMAKRLQTHPGVGPVVSACFMLELFRPERFESGAAVVRYVGLAPGRRQTGATCRGGPIMKAGQGKLRSLLIEAAWVWRKCDEKARAIYGRLVANTGNAKKAIVGLARRLLIRLWSMSVYGKEYEPLA

SEQ ID NO: 265449 - protein, 368 aa, unidentified
MKNSITFVGLDAHKKMLAVAMLVPGKEEPLTWQVANEAGAVRRMAKKILREAEGPVRVCYEAGPCGYALQRILKSLALECVVIAPSLIPRKPGDRIKTDKRDARKLASLFRAGLLTEVHPPTLGEEAIRDLSRCREDAKEDLLRARHRLGKMLLRRGMIWESSNWTQAHRAWLRKVQFDHPADRLVFQDYLLAIEHLEERIKNLDEALEAVMQEDRYKKPVGALRCFQGIDTVSAVTLVAELHDFSRFRSARELMGYLGLVPSEDSSSDRRRLGSITKAGNSHVRRILVEIAWHYRHAPRLYKALRERRKGQAPEVIAVADKAAQRLHRKFEKLQTRGKPVTKAVVAVARELAGFIWAALYPMSVRAA

SEQ ID NO: 265450 - protein, 369 aa, unidentified
MCEAKFESYVGVDLHKTTLTIGCLDPDKNIRKVQAIDTKCVDKIVALIADLPRPIACAIESVGMYEWLWELLEDKVDRLVLADAAEVKRARKRGKAKTDRNDALLLARLLLIGEVPTAYVPNKTFRTLRKLGRYYHRVSQMLADVKIQMRWRLNQNNARGPKSINSASAQRWLLAHGHRLDSSSLFAYKQQLGLIERLEIDKISIVREMKLIAKDERFEKDMKLIMSVPGIGPVIGFIIYAEIADFSRFPSGDAIACYTGLTTQTNESAGKYRVGHITKCGNATLRWALVEAATTLIQHDQTFQRMHQQIVLNKGADTSINRHIAKIAIAQRLPRYLRAMMLSGEKFKKGEPTNRQAKLNQARLKKNAG

SEQ ID NO: 265451 - protein, 345 aa, unidentified
MPIVGGMDIHRKQITFDYVDLATGEVVCGQIAPADRRHLRAWLERFEGIPDVAFAFEACTGWRYVAAELARAGVQAHLAEPADTAAARGRKKRAKTDRADSRLMRDLLLQGRLPECWIPPEHVLECRALLETYHALRREHTAWVQRAHAVLFHQGATRLREGGTGTAEGRELLREIAAGQLSPAGQQQIGLYLRMLEVTEAELDALRGQLTGAARRLAGAKALREQLYGVGPVTALALTCWLGGAGRFSSARKAVRFAGLDITVYSSAGKRSPGHLSRQGPPVLRWCAYEAGKVHAHGQAPDHGYYAQVKDRIDGKRAALSEARKIIRQACHLLAELGDDALATG

SEQ ID NO: 265452 - protein, 358 aa, unidentified
MPVYIGVDFHARQQTISYLTTEDGEIQRLRLEHSQEDLRQEGVRRFYAQFTGEVIVGFEAGGYSQWFEAMLERLGHEVWIGDAHEIRLLAKRKQKNDKRDANHILELMVSGRFPRLVRRTAESREVLRQMGYRHKLVKMRTMAKNSLQAIALGAGLSLRSRLHSKRGRATLKELNLTAATACQSDKLIELIDYLTTEIERVERWLIERAKSDERVKLLQTHPGIGLLTSLALVHTLHPVERFSNSRKVTAYVGMDPVEDSSADRKRIGSISKAGSRMVRFLLAEAAQVAIRTDRDLRQLFNRVSKRRNTPKAIVAISRKLLVRSFIMLRDRIDAEEFLRRGVEARSSRIAHRPTMPEP

SEQ ID NO: 265453 - protein, 415 aa, unidentified
MERLYSCCCGLDVHKQTVVACLLRPADGGQRRKEIRTFGTTTEALRHLADWLRVAGCTHVAMESSGVYWKPVYNILEGQCTVLLVNAQHIKNVAGRKTDVADSAWIADLLQHGLLRPSFVPDRAQRELRDLTRTRTTLIDERSAAVNRLQAVLEDANLKLAGVATDIMGVSGRDMLAALLGGESDPAVLAALARGKLRRKRAALEQALAGRMNDHHRRLIALHLEHIAFLDESIAQLSADIAERMRPFEEAIALLDSIPGVDRRTAEVLLAEIGVDMGRFPSAGHLAAWAGMCPGQHESAGKRRKAPAREGNRALRRALTEAARAAARTKTAGRTRLAAQYRRLVVRCGKKKAAVAVGHTILRLVYHLLTHNEPYREPDLSYLDERRRAHTQQRAINQLRALGYEVTITPKEPAA

SEQ ID NO: 265454 - protein, 372 aa, unidentified
MNESSKILYVGLDVHKESIAVAYAPDDRGTEVVSLGAIGPRQSDMDKLIRKLQAKGAATLVFVYEAGPCGYGLYRFLTGKGFACHVVAPSLIPRKAGDRVKTDRRDAMTLARLMRSGDLSSIYVPGVEDEALRDLSRGRDDAMRDLKRSKRRLKSFLLRQDIRYEGRASWNAAHLRWLAGVVCPTAPQQIVFQEYLRAVTEQEERRQRLERELHDAVQGWRLYPVVEAIQALRGVELTGAVILMTELGDITRFDNPRQLMSYLGLTPSEYSSGERRRQGGITKAGNSHARRALVEGAWAYRYPAKVSRHLQLRLEKLPTEIQAISWKAQVRLCKRYRQLSARGKHVNQVVVAIAREMAAFAWAIARLVPRAS

SEQ ID NO: 265455 - protein, 348 aa, unidentified
MAGPITATIGCDLGDRKTSLCIAYADGRTERCKAIPTVREAFEKWFTRPPARVVMEAGTHSRWSSALLTELGHEVIVANPRRLRLISQNDSKSDEADAELLARLGRADPKLLAPVRHRGMEAQCDLAVAKARDTLVATRTRLIGTCRGMVKAMGRRLPKCTAESFHRTARQHVPSELKPALDPIFDALEKVETSIAAEDRSIKELVKKYPDVEVIAQPTGVGELTALVFLLTLEDKTRFKKSRSVGAFVGLRSKKKASGDSDPELRITKAGDPFLRRLLVQCANYILGKCRADSDIRRWGLELAKRGGKNARKRAKVAVARKLAVLMHRLWVSGEEYEPLRRAKRAAA

SEQ ID NO: 265456 - protein, 393 aa, unidentified
MIAACIISSDAGEGQRSEVMEFETFTDDLIKLRDWLLERECPVVAMESTGPYWTPIHNILEGYVQVILVNPRHMKNVPGRKTDISDSRWLSGLLRYGLLKAAFIPPKYQRQWRDLTRMRKNYMETAGHFKRRVHKLFQEANIKIDSVLADLFGTTGRNLMRLLVSKESSLTFSEVENCLRGSLREKGRELYRSVKGFFEEHHRMLLTVLLDTIEKLESQIVELELRISQVLKTSEELIERLKEIPGVGDVSAHAVLAELGPTLEAFPTAAALAAWCGVCPGNNQSGGKRFSGRSRVRNHHLKTIMVEIAWPAVKKSGSYYKAKYYALKSRLGAKKAIIAVAHRILKAIYYVIKHGVCFKDLGEAYLLERSKASKIRYLSKQAALLGFELKPVT

SEQ ID NO: 265457 - protein, 355 aa, unidentified
MNSIKYVGLDVHRDTISVAVLNAEGKLVMQSVIATRATTILDFLRGLSGTLYVTFEEGTHSAWLYDLLVRRVAHLVVCNPRKNALLKAGSKSDSIDARKLAELLRAGLLSPVYHGQNSTAAVKHLGRSYAALTEDTTRIMGRLKALYRGQAIACAGKKPYGSRHREEWLAQLADSGLQRRAQRLYQELDLLQQLRREARQDLIQECRKHNEAKLLRTVPWLGPIRVALLIGRVQTPHRFRSKRQFWAYCGLALETRSSADYQMVDGQLERRKKPVFIRGLNLNHNHDLKNLFKSAATTASGSEGAFGEFYENLLKKGMRAEMARLTLARKIAAITLHVWKKGEPFDAEYLKSQAA

SEQ ID NO: 265458 - protein, 421 aa, unidentified
MIKAVVENCAGIDVGKRFVMVCLMVGAASAEPRTEIRRFGTTVAELEKLRGWLLENGCTDVVMESTGSYWKPIFNVLENSIKVLLANAEHVKNLRGHKTDPNDSRWLAHLLRHGLIRGSFIPPRDIRELRDLTRRRRQLLAEGTSERNRIQKVLEDGNVKLASVLSDLFGRSGQAMLEALLENEKTPQQIAQFALGKLKPKVPQIIASLEEHRLTDHHRFMVRQALQHMEFLEKMISEIDTEILQKLKAYQEQFELLQTIPGIRKDSAASILAEVGPDMKQFATAGNLTSWAGICPGNYESAGKRKSGRIRKGNRWLRGTLSQSAWAAAAKKDSYFRTRYYRLKPRRGSKRAIVAVAHSLLVVVYQVLATGKPYQEPGPGYLDERRRNALVRHHIRRLRELGHAVPETGKTTAAMQPEQTL

SEQ ID NO: 265459 - protein, 341 aa, unidentified
MSSFNPNSCMGVKPVPSKEGSWRMAQKGLLVGIDVSKDKINVAIRSAAAAATFADSADGRRELLEWLTRHGVCKAVMEATGGYEQRWARLLAKAGLEVVIVDPKRVRHFAKSAGRLAKNDPIDAQMIAWFGEVFDDLTGKPQDEERHELEQLVTARHGLVRLQGLIESWGEHELPKLVQKAHQTLLKAAADQLDKLDAAIATRIKDNPQFAQRAEIIRSVPGLGDVSVSAVIAFQPELGRVDRQAAAALLGAAPFDDDSGERRGQRHIKGGRRKLRNLLYMPVMGAATKNNPVLKAYYQRLLAKGKAPKVAIIACMRKLIGILNVMLARGQKWDPSKHAIA

SEQ ID NO: 265460 - protein, 482 aa, unidentified
MKPKPQEKSKRAINHPTQHHWHEMNRKQRRETMRKIQSEDLSLEVIHPDAAGIDIGNESHYVAVPPTRDSHPVRRFGCTTGELKAMADWLKQCGIRTVAMQSTGVYWIAVYDILEQAGLEVYLVNARDTKNLPGRKSDVQESQWLMKLHTYGLLRNSFRPSQEIRIMRTYWRQRNDLVQSAGRHILRMQKALTQMNLQLANVLSDVSGVTGQAIIKAILAGERDPHKLAAFRDCRVKANEEQIARSLEGNWQEDLLFVLQQEQEGYQFCQKQMAECDRQLAQYLQQREDRSQGAPLPEEKRKGRLKKKKGNAPQFDLREGLFHLSGTDLTRIDSIDVMTATTVISEAGYDMSKWETEDHFVSWLRLCPDNRISGNKVIGKGRLPTNNPISITLKIAASTLRLSKTYLGAQFRRFRTRLGAPIAIKAMAAKLARLVYRMLRFGMKYVDQGAAFYEAQHRQLQIKYLKSKAANLGFQIVQAPAA

SEQ ID NO: 265461 - protein, 459 aa, unidentified
MYKELLPLQEIVAEELREHIQVHVLPGMDPEKLLKAYLGQLTLNVGVDVGDATMTAVIVDDAGEILGSLVDFANAPQGFARFKGWVEQMRILHSARIIVVAGECSGVYYEEFWRYLKADTDYARVLYNARTTEHMGEVLSKSVRDDEVDGYLLAEQVRLGSTPEAQVGEDLELLQARTCSRIARDIADEICRKKNQLRSLMRTFNPAFARVFPGAKFWSAPARALLQQYVFPEDFVQLGVDRLAAELDVASNGRLGQAKAEALIRECQACYASPGQRDAVRLRVQDLLEDITRLKKRQNTYLKMGYKLIEHRPETSLVRAIGGAGISNTLAIVSEASDPDRFKSGAHLASFFGLTTSKHVSGTTLYVSKHITKQGTCNGRYAACNLANSLRRTVPKYCQMYERIKNRKPPRKGHWVAVVAVARDFVTNILYDMLINHRPFFVEVDDYRRYRQQQRQAAA

SEQ ID NO: 265462 - protein, 379 aa, unidentified
MKKELYLGLDVHQEVIITAVAEAGHRGEVRETGAISNDLQAVEKWIGRLRKAHGKEVIFCACYEAGLCGFGLARRLRQLGVQCEVVAPSLTPRRPGDRVKTDKRDARKLARLLRAGELTAVYLPEPTDEAIRDLCRSRTDAVDDQRRSRQRLKGFLLRHGYRYQGKNSWSAAHERYLRELVLPHPAMKVILEEYLQAISAAGERIERCEAAMRDLLEKWRLAPAVRALQAMKGFRVIAAMILVSELGEVHRFAHPRQVMAYLGLVPTENPSSDRRRQGHITKCGNSHLRWLLVECAQHYARPPKVSKELSRRQETQPREVRAISWRAQNRLHLRYTRLLARRLQRNKAIVAIARELCGFIWELLRTQPCYHQAQSPPAL

SEQ ID NO: 265463 - protein, 394 aa, unidentified
MFIVGIDIAKRSHMVRVIDSEGRTVCRPFSIRNSCSGYNALLERLRKLTNHKSEFLFAMESTAHYWLALYTRLRKEGYQVVVLNPIQTDAMREMLMEENKTDEIDTLVIAETIRFGRYKASSVPQEKLLALRELSRNRFYLIDMGSDLKRKITALLDQVFPEFESQFSTIFGKTALAVLRQYPTPEKLSRAQTGKLTEVLQTASNGRFGEWKARQLKELARDSFGILDCEGTYSALLLLYLDQFQSLQDAAAVLEKRIAELFSQIDSTLTSITGIGPVLGAVILSEIRDIACFASADKLAAYAGLNPKVKQSGDKKSSAVHMSKRGSPYLRRAIWMAGAIAVQYDPMFKAYYEKKSAEGLRYMNIIGHVSKKMTSVIFAVMRDNKLYEPVLPAA

SEQ ID NO: 265464 - protein, 429 aa, unidentified
MTNPQRTPEAVVWVAIDIAKDRHEALIEAPGWKSRKKFRVQNTAEEFRALAEFLHSQGFPVRIGFEPTGNYHRALAYFLHGEGFHLELVSSLALARTREAQHNSWDKNDPKDAQVILHLLKMGLTQHYHDPIVHHLNDLQELSKTHHPVSLEKTRTQHRLLTHYLPLYFPEIARYHNSSRSEWLWNLLIEFPTPRNMTCLSQQESVRKAWNLVGRKVAKERILTDVYLTAQSSIGIPADENSETVAMLRLVLRQLVTLCQLRDTIEKRADGLLSNNQDYQRLRRIPGIGPISALTILAEAGDLRRFSHHRQFLKFCGLDLATQQSGQFRGLSRLSKRGNARLRAVFWMAASVAVRMRENSFRAKYERYMRTDPGSADRKRKAYVAVAAKIARVAFALVRSGADYRPFHEVAVPSGRTRSVRAVEAIPTS

SEQ ID NO: 265465 - protein, 390 aa, unidentified
MIVIGADTHKRTHALAAVDEGTGRVRGQRQIEAEEQGYLAAVRWARGLGDERVWAIEDCRHVSRAFEQALIAAGERVVRVPPHRMGASRRGEREPGKSDQIDALAIAHAVVKDGLERFPVAHLDERAMEIRLLSDHRKDLVAERTRVQNRLRWHLLELCPELERSLKRGSLAAARQLERIDRRVRRIGGGVRVRVAREQVAQLRVLNRQVDALERELLVLIQTHRPQLLAETGCGALTAALLIGRTAGAARFASDASFARQTGTAPIPCSSGQRTRHRLDRGGDRQLNHALHVIAITRARHDPDTKAYLARKEAEGKGKKGALRCLKRHLARRFHHLLSLPAETPRAIRAPAPPCTPRRPGRATSRSSAPRPHRCAASAEKSATSEDHLT

SEQ ID NO: 265466 - protein, 313 aa, unidentified
MNQPKSNVFVGVDVSKDRLDVAVRPSGERKSFDNDKAGIARMTDDLGRLSPEIILFEATGGWQMNAVNALAARQLPVVVINPRQVRDFAKATGQLAKTDAIDAAILAHFAEAVRPEIRKLKPLELRKLEALNTRRRQIVEMITAERNRLITAPEWTRGDIEEHIAILKKHLAAINKDIDKLIRQSPLWREKDKILKSFPGVGPVTASMMLSDLPELGSLNPKAIAALVGVAPLNCDSGKHQGKRKIWGGRACVRSILYMCARSAVRWNPVIRDFYQRLLGVGKPYKVALTACMRKILIILNAMMRDQICWRAA

SEQ ID NO: 265467 - protein, 437 aa, unidentified
MKVLYERVAGIDVHKEMIKVAIRSPGDKPWTRKTEILEYRTFYGVLQQMARELRRRAVTHVVMEASGVYTEPVYYALVEQDFTQVAVINPAHAKALRGHKTDAKDCARLAELFECGLLRGSYIPAPELKEVRDLTRYRMKTVQARTSEIQRLGKALESAGIKLGSVASSITGVSATAMIEALIDGERRGQVLADLAIGRMRSAGKLADLSMALTGRFTEHHALLCRLHQDRIAGFDVAVAGLDERIAGKVTRWQREADLLRSVPGFGDVVGQAWLGEIGPAPHRYFSSHEKLACWVTLCPGNNISARKRKHGRTGDAGTYIKPMLVQAAWAAIRVRGRLQARYNRLVRRFGGDKNPAAKKKAITAIAHTLLKIAYQVLKSGAPYQELGADFYTRRESPEHKQAWLERQLQKLHPGCTVTITIRPAEAALTPEFNPTP

SEQ ID NO: 265468 - protein, 406 aa, unidentified
MISVGIDVSKGKSTVCAFKPYGEVLMTPRDFKHTKDDLDSLVKQLSRFKEEIHIIMEATGNYHLPVYQYLKSKDYQISIINPLEMKRYRCQGIRNPKTDKIDSMIIAQYGIDYWYRFKPNDDMDEKRQELRLLGKQYTSYMRIRTIRCQDLCHILDRTMPGIYGLLDDFNRDNGRDKLCDFAEKYWHSDNITKYSEKVFTERYSSWLKKKGYRPNEKEARQLYSIAKNAIPTLDSKLPSTKLLVQEAVNVLREVDSSLYDILNQLKDLSKEMPEYETVLSMKGIGTTLAPRFIAEIGDPRRFHSAKALIAYAGIDAPPYQSGQFTGTKRHISKRGSSNLRKLGYELMDSVNKHKSSYIGDPVCEYFMKKRNEGKPYRVAMIAAFNKFLRIYHSRVSEVLNEYDNSH

SEQ ID NO: 265469 - protein, 316 aa, unidentified
MTDFRTFVGVDVGKDFLDVHRHPDGLAFRVANSPAGICRLLKRLGAGPYAIGCEATGGYEDRLLLALGQAGRPAWCLHPADVRAFARLQGVRAKSDAIDARLIAEALVVATARRAPTRRTPIQSKIRQMATVRRRLCAAITQLKSLLSSLDDAAARAPLLALLQAHTAALKALGRDLQQAIQGDPASARMARRITTAPGAGPVLAIELIAAMPELGTLSSRQAASLVGVAPHPRQSGKTTRPGRCQAGRSNIRRVLYMATLSAIKARLHPIYPFYKRLRAAGKPFKVAIVAAMRKQIVMLNAMSKNQTDWKPENAA

SEQ ID NO: 265470 - protein, 317 aa, unidentified
MKQDKIITKIAGVDVGKRHLDVAVHGLEEQIQVCNAAAGLSEMVAWLKAREVGRVGLEASGGYERAAVEALGAAGFEVVLHQPMEVRLFARLKRTRAKNDRIDARIIAAATTQVEAVRAAQDPRLQELAERLTAYEQITDQLAALKTFMEHVTLKDLIRSLRAQIGSLERLKARLAADILNAIKAQPDLLARFRLLLSLPGVGPIVAAALIIRMPELGSMKRGQAASLLGVAPFDRDSGQFKGLRFIQGGRSRPRRLMYLAGLIAKRFDAGFKAFAERLAERGKPPKVITVAVMRKLIEAANLVLGRKQPWIKQPQT

SEQ ID NO: 265471 - protein, 417 aa, unidentified
MVGKDDNGIVNVVHPICCGLDVHKQKISASLITTSVFGGQRVEVKEFGTFTDDLTRMRNWLVEQNCPIVAMESTGIYWRPVHNVLEGYMEVILVNARHIKNVPGRKTDICDSKWLAGLLRHGLLKGSFIPPREVREWRDLTRLRRTYVESLSDYKRRTHKLFESANIKIDSVASDLFGVTGRNLMQLLAQSPCEISPEQMESCLRGKLKGKQEELFRSIQGFFTEHHCYLLSSFLRIVAGLEKEIEALNERLRKVMQSREPLLERIMEVTGISEVSARAILAETGPTMDSFRTTAAICSWSGLCPGNNESAGKRHSGRSPVRKHHLKTIMMEVAWAAVKTKGSYYREKYYRLKARRGARRAIVAIAHRLLKAVYHIVRNGESFRDLGEGYLEQNQEAKLKRLGYQAHKLGYRLVPQA

SEQ ID NO: 265472 - protein, 335 aa, unidentified
MDKREACGIEVSAQELVVALTGKKGEAVLQRFANTVAGQEQLLRTLTRRGKRVSVCLEATGMYGLDVALRLSAEEALEVMVANPRAVRHFARAMMQRSKNDQLDAVVLWEFAARMPFTAWARPGKNTLALWAIARRLEALTKQCTAEKNREHAAGISQAIPECVRRSVARTLRFLQREMKQLREEALRCIAGDARLQRRYELLLSVPGIGKVSAVQLLAELLLLPEDRDVRQWVAYAGLDPREYSSGTSVRKYTRISKVGNRHLRNALYMPALVASRREPHLRGFYEHLLARGKKKRSALMAVARKLLHAIYGMFRSEQPYNGTRVYQLPVPAQP

SEQ ID NO: 265473 - protein, 317 aa, unidentified
MNTLNNQNEINVGVDTGKTQLDIYIRPLDIYFTVENNDGGIKHAIKTLKKHPITRVTIEATGRLEHPFIMACAQANIPFVVANPVNIKRFAGAIGQKAKTDKLDAQLIAHFGEAIKPPLSSLKPEQMRLMSDLLSRRRQLMDMQTMEKNRSQIMPKTISSLIKPILTALKNQIEKVDLKLQKLIKECDEYKVKNDIIQSVPGVGNVVTFNLLSDMPELGCVNNKEAASLVGVAPFNRESGAYQGKRMIRGGRPKIRTAMYMAMMSAIQCNPKFKAIYHRLVAAGKPKKVAIIACIRKLIVIINSMVRDGVMWDPKMV

SEQ ID NO: 265474 - protein, 346 aa, unidentified
MEQISRIGMDTSKRFFQLHGVNTAETVVLRKKLRRKEMVTFFEKLAPTVVGIEACGASHHWARLLQSFGHTVKLIPAQLVKPYVKRGKNDMADAEALCEAMSRPTMRFVPIKTAEQQAALMLVGLRDRLIRNRTQLCNAIRGYAAEFGFTAAKGVANVRPLLERIQADEGVPDLARELFAVQAEEYAQLEEQIAEISGKLMAWHKADECSRRLAKIPGIGPIGAALLMMKTPAPELFRSGRQFAAWIGLTPRDHSTAGKVKLGVITRAGDEALRAVLVSGATAVIKHAVGCKGRASPWLIDLLKRKPPKLAAVALANKLARIAWKLMVTGEAYAATSTPIASAAAV

SEQ ID NO: 265475 - protein, 345 aa, unidentified
MREIIRIGVDTSKYIFQLHGVDAAEQPVLRKRLSRKQMLEFFAKLPPTKVGMEACGAAHYWARELGKLGHEVRLMAPQHVKPYVKRNKNDGRDAEGLCEAMSRPTMRFVPVKTAEQQAALMLTGLREQMVARRTQLSNMIRGYAAEFGITAAKGLDKIEPLLAEIAQDESVPVLARELLAQQGRQYAQLQAELKTIEARLRAWHRANPDSRRLAKIPGIGPVGAPELIMKTPDPGAFTSARHFAAWIGLTPKDHSTAGKTRLGKITRAGDERLRSILVAGATAVIKQARRGRGHPSPWLVALLKRKPPKLAAVALANKNARIAWKLMMTGERYNGARMQAASAAA

SEQ ID NO: 265476 - protein, 340 aa, unidentified
MAIEMKVIGLDVAKNVFQVHGVDRRGETVLRRRLRRSQVAEFFRHQTPCVIGIEATQGAHYWARVLRGLGHEVRLVAPQFVKPYLKSQKNDANDAEAICEAVSRPNMRFVPSKSIEQQDLQALHRIRSRMIGSRTQLGNQIRGLLAEYGIVLPLHLSQVRTALPRLIEDDNPLLSGFGRQLLAALYEELCALEQRINKMEEQVQQIHRSNMLCQKIAAVEGIGPVTATAVVAAIADGRTFHNGRQFAAWIGLVPKQHSSGDKQRHFGITKRGDPYLRMLLIHGARSLVYRAPNKNDSRSQWIAEKQRKLGTAKTCVAVANKNARVIWALLARDEPYRRAS

SEQ ID NO: 265477 - protein, 487 aa, unidentified
MARRKHRSAPATTHTSNAPSAPGPRNRAATPLQPPAAADHYHDSLPVRHRHAAGIDVGSRSHWVAALGKEGTIEVAEFDTYTDGLLALVDWLRQRQVTTVALEATGIYGDPLFDLLQAEGFEVIQVNPAYAAQFKGRPKTDKRDCQWIQRLHAHGLLPASFRPAPDIAVLRSYLRQRADLVRAGARHIHHLQKALELMNVKLTEVVCEVTGLTGLKIIRAILAGQRDPQALARLRDKHCKNPTDTFARALHGSWREEHLLALRQALASWEHYQAQQRDLEEVIARHLQRMKKTTALPPLAPKPRQRGRGANEPRFDVRAALYYVTGVDLTELDGLAEVTALVVVSEIGLDMSRFPSVKHFCAWLGLCPKVKKTGGRVVSSRTRPGKGRAARALLLAARALWHSPTPLGAFLRRLKARLGAPAATTATAHKLARLLYQTLRSGQLPARETAAAYAERRRQQAVAGVLKKARRLGLQVVEPGEVVEPPA

SEQ ID NO: 265478 - protein, 490 aa, unidentified
MVKGDVIGTGESTAIDIPYERLSKDDVPEAVPFLESEYGMTQEISKPKKPRSRRRQVVEVLNPNAAGIDVGGASHHVAVPPDRDDQPVREFGCFTRDLHKLADWLDACGIDTVAMESTGVYWIPIYEILDRRGFKVLLVNARHVKNVAGRKSDVLDCQWLQQLHMFGLVRGAFRPDDQVCVLRSLNRQRATLLRFQARHIQHMQKALVQMNIQLANVISDVVGETGQKILRAIVAGERNPHVLAAMRNVRIKASEEEIVQSLRGNWRDEHVFALKQALELFDFYAKQVADCDALIEQQMAVLHKHDGVPGKARKTSHRNKPKFDLRTRLYQMCGVDLTRIDGIDVSTAMTVLAEVGVDMSKFPTAKHFAAWLGLAPGTKISGGKVLSSKANKTANKAAMALRQAASCLKKSQSALGAYYRRMCAKMDKPKAITAAAHKLARLIYTMITKGQEYVDQGQAYYEERYRQRVEYHLRKRAETLGLRLVPMEAA

SEQ ID NO: 265479 - protein, 333 aa, unidentified
MVEGTEGSHHKEGSRKMSNDSTVCAGIDTGKRKLDVAIDGSAERLQVDNGPEGHQSLSAWLQQRGVERIGIEASGGYEQAVVSSLRADGFVVIVFQPVQVRAYAKFVLQHAKNDNIDAALIARCTAAATDIREPPDARLLPLAQHLTMIEQLTEDVAQLKTRREACRDQRINDFWTQEINRLKTLLNGEFKQLVAAIREHRDLSGRLDLIASVDGIGLRTAVAILVRLPEVGRVTREQAAAIAGLAPYDDDSGSRRGLRHIKGGRQRLRQSLYAATLPAVFYWNAQLKAVYKRLIAAGKTHKLALVACARKLLIFVNTVVARGTPWTATPATT

SEQ ID NO: 265480 - protein, 358 aa, unidentified
MQRNKISFKGQKIFIGIDVHARTWEVAVLTESGFAKRYSQASSAKVLFDFLRRHFPDGEYHAVYESGFSGFSTYYALKEYNIDCAVTHAADVPTTQYEEVMKTDKVDALKLARSLRADEIRPIYIRERENIDDRSVVRIRKIIQKQLGGYKSRVKHMLHCNGVEMPERFAKPSTHWSRAFIKWLKENVTLLSPTRKSLDLLIMQVEALRSTLLTATREVRKLALLDRYKDNYELLRGIPGVGTIVAMSILTEIYDVTRFKNEKQFASYLGLIPTSHSSGDKESHGEMTFRGNKQLGSMIIETCWIAISRDYGLGQAYIAFKQKMTPQEAIVKVARKMSNIIFSVLKNKRTYEPYHWEI

SEQ ID NO: 265481 - protein, 308 aa, unidentified
MSFIGAGVDTSKAFLDVTIYGEKTVQRFPNTPAGFARIVAWLGPYKLKQVVIEATGGYEQAALDALHEGGLPMVRINPRQVRDFAKATGQLAKTDDLDARVLAHMASVLPLVAYRPLSVEALHLKQFHARRGHVIQMLTAEKQRRRQVVEPMLRAMLEESIKRLEADRDRLDAVIATLVTDTLPARVLGSIKGVGQGLLTSVICDMPELGHVNRKAIAKLYGMAPLSRDSGTFKGQRTTWGGRAGPRTATYMATLTAVRFNPDLKAFYQGLLARGKRKKVARVAAMRKLLTILNARMRDALKAQEACG

SEQ ID NO: 265482 - protein, 382 aa, unidentified
MLFIGDDWAEGHHDVVAQDDAGKALARRRLPEGADGIARFHEMVASCLGEDAEPDPARVVVVIETDRGPWVKALAAAGYRVYPANPKQAARHKETIAVSGKKDDFFDAGALADMGRTRRHQMRELAADSDIAEAVKIAARAHQKLVWERTRHLLRMRSALREYFPAALEAYAGLSLTGPDTLELLRKAPDPASAARLTVTQVTAALRRAGRRGALDERARDIQAALRAPHLSQPAVIAEAHAASVQAGAAVIAALNEQCKVMEAKVSEFFRRHPDAWVYLSQPGIGDITGARLLGEFGDAPAGTPRPRSRKNYAGTSPLTIQSGKKKTVHARYIRNRHLIDALRAQALSALIASPGARAYYDELRAHDTGHDDALRRVAGRP

SEQ ID NO: 265483 - protein, 341 aa, unidentified
MNIVTVGIDLAKNVFALLGVDQSGKAVFIKPKVVRGQLLEMVANLPPCLIGMEACSGAHYWAREFSRFGHTIKLMAPKFVAPYRMSGKRGKNDAADAAAICEAVTRPHMRFVPVKDIDQQAILCLHRTRQGFVEERTALYNRLRGLISEFGIVLPQKVERLRREIGAHLEALPGWANRCVGDLLVHADRLNERIEEYSLAIAQAAKQDQRSRCLMQLPGIGPTTASALVASLGGGHDFKNGRQLAAWAGLVPGQYSSGGKARLGRITKAGDAYLRSLLVMGARSVLAGLGDKQDRFSRWARNLVERRGYWKAAVAIAAKNLRLAWAVLRYGDDFRRIDEAA

SEQ ID NO: 265484 - protein, 351 aa, unidentified
MVIIGIDCHTRVHVAAAIDGSGQVCARFTASAKAEELEALTRWACQQGAGLIAVEGARGFGLALTRCLLAAGLEVVDVPTHMTSDGRRKSRRPGKDDESDAVVIARVALREHDLPRLRPTHLDSDLKLLVDARDQVVAEGTRVRNRLHALLLTLSPGYRDQTGALSSKRALIVARRLVLRARATDPVRCRLALAAIRRLATIDAEAAGLEGEIKHAVSARHPKQLLAICGVSTLVAGKLLGEAHDITRFPTAASFAAHAGAAPIPASSGVTRRHHLNRGGNRQLNRALFTIAMVQARWHPGAVAYLERKRAEGKRPAEARRCLMRHLASVVHRAMLLDAVAVSASSAVPAA

SEQ ID NO: 265485 - protein, 341 aa, unidentified
MDHYAGIDVSLEYSSVCVVDASGKIVREGKVATEPEALIGYFGLLGVTVVRIGLEAGPLSQWLYAAMKQAGLAVELLETRHVRKAFEAMPVKSDRNDARGIAQLIRLGWFRPVHCKSIGAQETRAALTARKLVQSKLQDIENGLRGILRGFGLKVGKTTDRSFAGRVRELVAGHPSLETVADALLAVRTVLLCEFKGFEKQVRSMARLDAKAKLLMSTPAVGPIVALTYASAIDDPARFKSSKGAGAHFGLTPKKYQSGETDYTGRISKIGDGSVRTALYEAAHIMLTKPLKGCSQLKSWAMRIARRAGMKKAKVALARRLAVIMHRMLADGTPFNAAAAA

SEQ ID NO: 265486 - protein, 343 aa, unidentified
MVETQAEFVVGERRCIGLDVHREFAQVAVWQGGLVWQAGRFATTPDGVRAFAQELGPADEVALEATGNTWAIATVLASRAGRVVVSNPAKTRAIAEAKVKTDKVDAEILAQLLAADYLPAVWRPDPATAALRRQVLRRAHLVRQRTRLKNQVHAILHRNLIPRCPAADLFGHKGRRWLAEQDLPPDELAAATALLRQLDFHAEELRLIDTDLGQVALGRPEVLRLMTVPGIDATVALSIVAAVGDFTRFRTPEKLVAYLGLNPRVRQSGGQPASHGRITKAGPAHARGMLVEAAWSACKAAGPLRAFYQRVAARRGMQVAVVATARKLTVLCWHLIIKGEDYA

SEQ ID NO: 265487 - protein, 411 aa, unidentified
MQFVVERVCGLDVHQATVVACLLIVAKDRTIKKQVRTFGTTTRELIELREWLQTEGCSQVGMESTGVYWKPVYTILEGAFELIVANAERIKKVPGRKTDVKDAEWIADLLLHGLLKASFVPPQPIRELRDLTRYRRKLVESQSAERNRLIKLLETANIKLASVASDVFGVSGRLMLAALAEGVAQPEEMANLAKRALRAKIPQLELALEGRMLEHHRYLLTVQLRRLAEVEGDITQLDERIQQKLQPYQKQLAWLQDIPGVDRTIMAVVIAELGIEMSVFGSVAKLAAWTGLCPGNHESAGKRKSGRTTRGNVHLKTALVEAALAASRKKGSYLRDKFYRLKARRGHKRAAVAIAHKILASIYHMLSGEVPYHDLGDLYLDKLNKNAIARNLVHRLERMGCKVTIEWQTAA

SEQ ID NO: 265488 - protein, 409 aa, unidentified
MDRLIERCAGIDVHQQTMVVTVRVPGASGERAVITHTFGTMTADLLVLREWLQTHAVTHVAMESTGVYWRPLYYLLEDGFTVRLINMQHLSHVPGRKSDVRDSEWLAHLLECGLLRGSLVPPAAIRDLRDLTRYRKRQIEDRAQEVNRLHRLLQDAGLKLTTVMTDVLGVSGRAMVEALVHGTTDPAVLADLARGRLRSKLPALQQALRGQFRPQHAFLVTQILAKIDFLEETIATLTAEIDRQLAPFEPAVTRLMTIPGLARRNAITVFVETGGDMRHFPTAAHLCSWGSMCPGQQESAGKRQTGKTRDGNRYLRGALIEAGLATTRAKGTALQARYYRIKRHRGHKKAVVAVGHQILEIAYYVMRDEVSYQELGADYFDRRDRERTTRRHIKQLEALGYKVTLETAA

SEQ ID NO: 265489 - protein, 346 aa, unidentified
MQHTTIAVDLAKSVFEIAVSHRPGAVVERKRLSRTQFARLLSQRAPSTVVMEACGTAHFWGREAEARGHRVVLLPPHAVRPYVLRNKTDGADAKALLEAVRNEAIRSVPIKSVDQHVLGALHRLRSAWLATRTARLNTLRGLLRELGFAIPVGAREVVPFVYALVSEADAKLPEALRAVMTEAAREIAELETRIQAVEHQLQALARESALVLRLRTIPGVGLLTATALVAFVGDVHRFPSGRHFASYLGLTPRESSSGLQRHLGRITKRGDPYLRMLLIHGARSVLLHAKKAKQCDRLRRWALQREQARGHNKAAVALANKLARIAWAVWRRERAYGSPIEGTPTA

SEQ ID NO: 265490 - protein, 324 aa, unidentified
MAKRITICAGIDTGKRKLDVAIDGRSLQLQVENTAEGHKVLLEWLRRHKVKRIGIEASGGYELPVVTELRRKRFVVVVFQPAQVRAYAKFHLQLAKNDKIDAALIAACTAAVKKIHAAPDPRLQPFAEHLTLIEQIGEDIKLYKNRIETCRDPRIQKLWKEEISRLAKRERAELKALVAAIRQHRDLAQRLDLIYSVSGAGMPTAVAILVRMPEIGTLSREQVAALAGLAPYDDDSGERSGARHIDGGRKRLRRALYTAALPASFFWNPHLIALYQRLRAAGKVHKSALIACARKLLIFVNTVVARGTPWQEEQLVRATNPAPA

SEQ ID NO: 265491 - protein, 373 aa, unidentified
MPKYSTAFGMDVHLRSTTVCALDADTGEAVTRRFPGNPWGEIAAWMDGFPGPSLAAYESGYLGFAPQRELAGLGVECVVAAVSKIPRSAADSASKNDRNDAARMAKAILAHDISPVWVPSPEVEGIRDLAGAYDGATARLATAKQRLLAFLARRGFVYGGTTPAGNPRKYWTYDFLRWLDKVRPEDDGGVRTLAALRNEVEAAAEARADLLSEYRAAVDASPIAAEAAALQSIKGCAFALAAAFSAEVGDFTRFRSGRQVTAYFGLAPSQRSSGDSVRLGGISGAGNALVRKLAVEGSWCYAAARHQPKLMPRDTGVPLEIRMHGRKGSERLLRRREEMLARGMPAAKANAATAAELVRWLWALGTMCREGAE

SEQ ID NO: 265492 - protein, 352 aa, unidentified
MRTSQNTPDTINTIGIDVGKNTFHLVGLDKRGAIVLQQKVTRHQLGRRLSNIPCCLIGMEACSGTHFVARQLSALGHDVRLIPAQYVKPFLKGHKNDYRDAEAIAEAVQRPTMHFVSIKTPEQMDLLALHRVRSRLVRQRTGVANQIRGFLLERGITVRQGFMPLRKALSEILSSKSDALSPRMINLIGELIQDWRRLDDRIASVSTEIEAMAKQDESCQRLMSIPGVGPIVSSAVVAAIGNGTGFKQGRDFAAWLGLIPKQESTGDRTILGKISKRGNKYVRTLFVQAAHVVLERRPRTARQGLWPWIEQASKRLHRNMLAIALANKLARVAWAVLARGRPYQPRTAANAA

SEQ ID NO: 265493 - protein, 398 aa, unidentified
MQVERAWAGVDIGKGHHHVVVIDAEGTRMLSRRVNNDETVLLELIGQVTALADEVRWAVDVSTGGAALLLALLVAHGQQVFYLSGSQVNRAAGGYRGEGKTDAKDAAIIADQVRMRRDLTPLRVDNELIVELRMLIARRRDLAGDRVRLVNRLHEQLLGISPALERVLDLTNRGPLVLLTHVQTPAAVRQLGAAGLEEWLRTQKVRNATTLAATVATAAGSQQTTLPGERLAAQLVADMAKGVIALDEQLKHTDKLIEGRFRRHRHATILLSMPGIGALLGAEFLAATGGDLTAFASADHLAGYAGLAPAPRDSGRISGNLHRPRRYHRGLQRALYTSALVSIRCHDPSRIFYDRKRSEGKRHTQAVLALARRRVNVVWALLRDQRCFEPAPPQATAA

SEQ ID NO: 265494 - protein, 427 aa, unidentified
MNNVTYKATLCVGADVHLDETVLRAVDKAHGHEVLQRFRVTNNLPGAQSAAATIARTAMDLGYVRIEIGWESTGMLWIPFHRYLSTEPLLQPFELELVCFNPKLVAKFKDGLVLRSPKNDDRDAFDIAARLRFGELPVSYVPSDFWQGLRRLTRYRYRLSKALSQEKNRFQSYAFLKCSDWKRVKAFSDPLGATSVALLTEFTVAEMRDMTHDQLVDLITHRGRGRFDDPTATARAVRQALHSSYPIDPHMDEMVTAALAAGWDHIRFLKRAMKRLDRHIGRYIDLVPNPIITIKGLGAVITAGILAEIVDVLRFPEEKHLAQFMGLTWHKSSSGGFVSQNTRLTKVGNVYLRYYFVMGANLLRQHNLEYKAYYWRKYQEVSKYQHKRALVLTARKLVRLVHALLTKNQPYVRPRMTTFGQEDDGLQ

SEQ ID NO: 265495 - protein, 338 aa, unidentified
MSVYAAIDLHSNNSVLAVLDETDRVLRQRRLPNELPVILRELEPFHDELAGVVVESTYNWYWLVDGLMAHGYRVHLAHCSAVPQYAGLKHGDDESDARHLAHLLRLGILPEGYIYPRAQRGVRDLLRRRFGLVRTATRLLLSVQSIWSRHTGQGLSANRFRQLDAAAIEVALPDPIVRLSVFTQIKAWQGIQEQVEQMEKGVIESAACRRELIALRSIPGVGPILSMTIALETGAITRFAEVGDYASYCRMVKSERLSNGKKKGTGNRKSGNKYLAWAYIEAATFAVRFSPQTKRWYTSKCGKHHKVSALKAVGHKLARAAFYLMRDGGRFDVHRAFG

SEQ ID NO: 265496 - protein, 376 aa, unidentified
MPIKKEVNLRVTSQASSAELNAIAGSEIRAVVGIDLGDKRSSYCLLDTRGGDLGDGVVSTTAEALRLVFAGKGKMRIAIECGTHSPWVSRLLQELGHDVIVANPRRLRLIAESNRKNDKADARTLATVTQAAPGLLKQVHHRSERVQLDLATIKARDTAVQSRSRIVAAIRGIVKSTGGRLTVCSTGAFAKKAFESCPATLRDALTPLMRIIEQLTVEIRQYDRVIERKMKSKYPEAAPILTIPGVGPLTALTFVLLLDNDPNRFSKSRDLGCYFGLQPKQQDSGKFVSQLGITKAGDQLMRKLAVQCSHFMLGRFGRDSALRRWGLALCLRGGSNAKKRAVVAVARKLLILMHRLWKTQTAFVPFPGMQTVPQAA

SEQ ID NO: 265497 - protein, 420 aa, unidentified
MAPLSNQQFKAFVGLDWADTKHDICLQQAGDDRREFDCIPHQVTRIDEWAKALHQRFGGPIAVALELATGPIVSVLQKHAFVTLFPINPAMLAKYREAFKPSRAKDDPTDAELALDLLLRHPERFSPLRPQSAGMRSLLSLIEQRRELVGDKTRFTNRLTNALKQYYPQALEWFDDIDTVLFCDFVTRWPTLPAARRANRKTLETFFHAHNCRRAQLIEGRLESIRCAASLTDDPGIVAPHRLLALMLVTQLRTALAAIDVFDREIAAVARALPDFDLFDSLPGAGPHLTPRLLAAFGEQRDRFRGADELQKYSGIAPVTERSGKKCWVHWRWQCPTFLRQTFVEWAGQTINKSFWAGAYYRQQRAKGSSYQAAVRALAFKWIRIIYRCWQTGTRYDENIYLNALRKRGSPLLGNLGLPG

SEQ ID NO: 265498 - protein, 316 aa, unidentified
MSQFKSFIGVDVSKDRLDVHVLPEAQAWGVSNDERGCSALIERVHALDAPALVVLEATNVFWRLAATRLAAAGLAVAVINPRQVRDFAKCQGILAKTDAIDARVLALFAEAIRPPVRALPDEQSQVAAELLARRAQLMGMRVAEQNRLASAQAKRVRKDIQTTIGFLDKRLKALDGEIDQWLKSTPIDQSRIDLLKSFRGIGDRTAKSLLITLPELGRLTGKQIGALAGLAPFARESGKMRGKRFIRGGRAQVRAALYMPALTAMRCNPIIRALYQRLIKAGKHHHVAITACMRKMLVILNAMIKSNQPWKEPQSA

SEQ ID NO: 265499 - protein, 315 aa, unidentified
MPSQIFVGMDVAKAPWDMALRPTGERWALTHADAGIAGLVPRLQAIAPQLMVLEATGSEQRAVVAALAAAGLPVAGVNPRHARDFAKATGPWAQTDALDARALAHLAEAVRPMPRPLPDTQADELRALLARRRQLVTMRTAAQNRLGSAPPRLQPDIQAQITGLNTRLTTLDDDLDTTRRARPVGQAREELLRRVPGMGPVCARTRLLDWPELGPLNRPRLAALVGVAPVNRDRGTRRGRRTTWGGRAHVRATWSMSPLVAVRYHPVFKAFDARLRATGKAAKVALTACMRKLLTILNAMVKHHAPWPPEEVRSA

SEQ ID NO: 265500 - protein, 317 aa, unidentified
MQDKLFFGIDVAKEWLDIACHGRPGGGRIANSPAAIAAWLGALDPAAVGLVAFEPTGGYERLLRKALCESGIRFVRVHPNEVTAFRRRRGRKAKTDAIDAALLAEFAALELAQRGLAPLVEGDPALRALTVRRRQLADALHAERCRAALADNAIVENTLQQVIAALRGALDAVEEAIARHIAAHPKLAATAVLLRSFKCVGPVTVHTLLAELPELGQLDGKEIAALVGLAPQTRKSGKQQARALTGHGRPGVRRVLFNAARSAIQWNPAMRQFYRRLVDLNHRPGKLALTAVMRKMLVIANAIVRSGQPWHGASTRP

SEQ ID NO: 265501 - protein, 421 aa, unidentified
MSKGRYRTVEVKQADWEAWAAQAAGGTVVFAVDVAKEDFVGRLDIRDGAHLGRVTWRHPEQTSELLAGIARLAAFARVEAVMESSGTYGDALRWQLRALGAEIFRASAKRVHDAAEVYDGVPSLHDAKASDLIAELHGQGHTQVWSEPDAQRRALNAQLQMLYQCKALYQQQLNRLEALLARHWPEALAILGLGSATLHRLIADFGGPLQVHALERQARALMRQTGRTWLAEDKIEAVLKSAGATLGMPCLLEERQRLRWEAKRLLATGEELRRIERLIAAAAGEDALLERMAPVVGAVTGAVLLAAVGNPASYPDAASYLKALGLNLKERSSGKHKGRLKITKRGPSVARFYLYFAALRLIAQEPVVARWFQSKTARPGALKGKQVVELMRRLAKALWHQARGRAFRPERLFDQHAVAGA

SEQ ID NO: 265502 - protein, 344 aa, unidentified
MDAKRSLFYWVGLDVGKKEFSAAIELSTDERRFDIMALPCKKFNHTEKGVGEFLKWVGRTIHGLPFKIVMETTGHYSINLCKLLQARKKGLECCIVNPYLTSNYLKSLDLPQKTDDIDARGIARFGTERQPKATILPSREEEELRELSRHRDVLVKTKTAFGNRKESRSSESVQNLNKAFIKTIEEHIARTEKLMKKLARQIPWVKEQMELMMSVPGVGEITAIGLSVEIGDFKQYTRKGISAASGLSPRLRESGTSVKSAKISKRSPGRIRQLLYLSSNNAINKIPYLSIMYDRLLAKGKTKLQVKCACMRTLIQIIRSVVVHERPYTEELAYQSLEKAVKWT

SEQ ID NO: 265503 - protein, 371 aa, unidentified
MAESSRTFYVGLDVHKDSIVVAYAPEDRGAEVVSLGAIGPRQCDIDKLIRKLQAKGAALVLVYEAGPCGYWLYRYLTRRGFACHVVAPSLIPRKPGDRVKTDRRDAITLARLMRSGDLSSIYVPQVEDEALRDLSRGREDAMDDLKRSKRRLKSFLLRQDIRYEGRANWNAAHLRWLSEVVCPTPPQQIVFQEYVRAVTEQHERLQRLEHELHEAVKGWRLYPVVEAIQALRGVELTGAVILMAELGDLTRFDTPRQLMSYLGLTPSEYSSGARRRQGGITKAGNSHARRALVEGAWAYRYPAKVSRHLQLRLEKLPAEVQAIGWKAQVRLCKRYRQLTARGKHVNQVVVAIAREMAAFAWAIARIVPLAA

SEQ ID NO: 265504 - protein, 417 aa, unidentified
MICAAVERCAGIDVGKEFLAVCVMTGPLQGEARKQTRRFGTIIAELERLRDWLKQEEVTHVVMESTGSYWKPVFNVQEVKVRKGHKTDDKDGWWLAHLLRHAMIHPSFIPPRVIRELRDLTRRRKKLLGAGTGEKNRVQKILEDANVKLGNVLSDVFGVSGQLMLDALLKGKAEPAEIAEFAQRRAKQKIPQIIAALEGHRMSDHHRKMIGYSLEHMRFLEDQIGKLDTDIVAKIKEAGLEREWQLIQSAPGLKETSAANVLAEIGPDMSQFPSVRHISSWGGVCPGNNRSAGKNKSSHTTGGNPWLRAALTECAWAAAAKKGCFLKEKFWRITTKSGGKKAPAIVAVAHTVLGLVYEALRTGEPYQERKVPDLNPGQKDRMIRHHVKRLGKLGVTVRSNPLKREKKAAKTKNAKRT

SEQ ID NO: 265505 - protein, 438 aa, unidentified
MQIEKIAPGYAGIDIGQEQIFVAVKDQAVKVFGTHMADYRLAARYLQEHGVRSVAMEATGVYWIPLHDLLQAAGLAVTVFNGAYARNMPGRKSDVSDCQWHAMLHSHGLLVACFIPTEEIRQLRCFYRLREDHLGIAAAHIQHMQKALDLMNVRLHVVLSQIHGVSGLRIIKAILAGERSALALAALCDAQILKHKREAVLKSLEGNWQAHHLFALQQAVECYEFCQRQAVACDQQIAALLSRLNAAKPPLPPPEPGRQIKVVRHNAPQIDNLHGQLVGLADGRDATRLPGISPLGFLKLLGEIGTDLSGWKTEKHFTAWLGLAPGSNQSGKRRKRLPRKKTVAGQIFREAVLSIAKSKYLALGAAYRRLKARKGAPIAITAIARKLAVLYYRLMTKGLNYVERGIADYEKKYQEQTLRYLNKMAAAHGFSLSPKPAG

SEQ ID NO: 265506 - protein, 369 aa, unidentified
MPHVTSIGLDVHARSVAAAAFNPFTGEVVHRDFGTDAAEIAEWALGFEEPRACYESGPTGFHMARELRALGLDCAVAAVSKMQRPAADARRKNDRRDAEFIARMLATHNIVEVPLPDAAVEAARDLDRALDDATAEYRRARQRLNMFLIRLGYVWDERNADGTRKGSWTRAHWRWISGIRLEGPQRDVLEYYVTAARCAESDRRQLEKKVLALARTDRWRPAVEALSCIKGIDTLTAFRLAAEAGSFTRFRTAPAFASWCGLVPSERSSGETERRGGITKTGNRLARTALVESAWHYLTCTPRPKPPAPGADVPAAIRARADACTARLCRRREALAAAGKSPCKANAAVARELACWVWEIGRRAEGTLG

SEQ ID NO: 265507 - protein, 345 aa, unidentified
MITIGIDPHKSSHTAVALDPTGRVIGQLRVPATKTTLERLLRWAQHWPDRIWAVEGGATGLGHLLAQRLVASEETVLDVPATLAARARLLARGHGRKTDGIDAASVARVAQSQPDLRRVGPEDHSTLLRLLSDRRDELTQERRRVVNRLHRLLRDLLPGGAPTELSTEAAARLLTRVRPTTPVDLERKVMARALVADLRRADRALVENRARCAAAVAASGTTLTTVFGISDVLAAKILGHVGDVSRFASADRFASYSGTAPIEVSSGEVTRHRLSRSGNRALNNALHLAARVQTMHAGQGRDHYERKLVEHKSSREALRSLKRQLAKVVYRQLVADQAHRRALAS

SEQ ID NO: 265508 - protein, 434 aa, unidentified
MQAYYTTLFISLDIGKNVHWCAAYAGYDLKEVVKPFKVRSNQAGFEQVSSLIEGLLASGQYDRVVIGHEPTGLYHENWACALYERYVTGRDPALYPQVAYLFVNPLLSKRKRLELTKGRQRKTDPIDLRAIGYCLRDGQGQPAFVADVQNFAFQLWGRAYRRNRRHSRDLTTKLLAQLDRLWPGLVVNTQRFAAMHPDLEPPVPLVLSKPLERQRLRAIIQHCPNPYDFRALDQAHIQAFFRQHLGRCGQATAQLAFELIQQALLPPPDLASLLADQLQLDFERYLQLERHFEALVDQALVLVPYSPAAVLTGVPGVSPVLAARYLAHLGHPQRFASAAQIWAFAGFDLVTEQSGDFRRLGHISRKGDPGLRDTLFLIGLHTAHQLPAIARAKQRALDRGKGFVGATIHAAHKANRLLHHLLYHQRPFDPDRLR

SEQ ID NO: 265509 - protein, 410 aa, unidentified
MEVLHPRCCGLDVHKQTVVACVRLVIDGKIVKETRTFSTTTADLIALSEWLTETKCTHVAMEATGVYWKPVWHILSAGGFELVLANAAHIKNVPGRKTDVKDADWTSDLLAHGLIRPSFVPDRPTQEMRTLLRTRKQLVHEKTRHILRTQKTLEDANIKLDSVISDIMGLSGRKMIEALIAGEKDPAKLAQLADRRVKASQETLRQALRGRVTGHHRFLLQLHLGQIDAVDAAIAKIDGEVEASIAPFRTAVEQVSSVPGVKTLAAQQIVSEIGTDMSRFATDANLVSWACICPRSDESAGKRRSTRIRKGSPWLKTTLVQCAWAATRTKGTYLQAQFYRIRARRGPKKAIVAVAASILTAIYHMLKDGTMYQDLGPKHFDARAKERQKNRLVKRLADLGYAVELVPHAN

SEQ ID NO: 265510 - protein, 351 aa, unidentified
MVTVGIDPHKHLHVAVAVGSDGRQVGKPLAVRNDALMLPTLLTWIRSITDGTATWAIEDGRGFARRLADGLLLAGQEVVWVPSRLTAAHRKLHAATGAKSDPIDAIAAAHAAMATPGLDRHRIDERVRELRVLVDYRADLVKRRSMVINQLKAQLHLWLGHTPADLTRARHLATVTARTSTARLSPHVRRALADMTAEIAELNRHVTELDSTIRELVTPLAPALLQITGISYNSAAVLITEVGDITRFPTSAKLARYTGCAPIPVYSSGKQRHRLHRGGNRRLNSVLYTAAIVQKRRSPAAQQLLARHEDRKGARGARRILKRHLVDVIHRAMTADQAAWEHPITRHQLAA

SEQ ID NO: 265511 - protein, 333 aa, unidentified
MDSETGELQERRLQHREEAEKFYRDLAAQGMKVRVGMEASGHARWFERLLAELQLELWIGDATVICAKRGRKPKTDRQDAQHILKLMLKDDFPKIWVPSGENRDLRQLLWHRHRMVQARTRMMNQLQAVALNEGLRCKKRLWGETGREQLEAIRLAPWASQRRRDLLELLDRMNPTIAKLTQAIDREVEKCPEARRLQTHPGVGPLTALAFVLIIGKADRFQCGKQIAAYLGLVPLEDSSGERRRLGHITKQGNSLLRFLLVEAAQVTARSLPEWRSKYCHLTMRRGRKIAKVALARKLAVRLYWMMRKEWDYGQLTKFGSHAGKPGSGDGVK

SEQ ID NO: 265512 - protein, 323 aa, unidentified
MDYYMGIDVSKQTLSLFDGKEDGIVANTPKLEEFQSYLQESYGKRWKKVRLIYEPTGPYAYALRRFAAGQGMKVFVLNPKQSAHFKKALGLRSKTDVMDARMLYRFKDLLKEEEAKVPTIDSTTARLSSYLKTYALIQKVRKIVGSHLYAHGYDEHFPAPLAQAMQAEASSLQQLETALVEALKTFAETTEELREDFALLQSIPGVGTLSAAVLLELFRRYPPTNRSRIVALAGLDPTRKESGTSVHGRSRISKAGSDLLRRILYFSCLSAVRSNDRLQAFYGHLLEEHKPKKVALIACMKKMILIAHQIYTKKEGYRPMVLN

SEQ ID NO: 265513 - protein, 413 aa, unidentified
MMIEDIQWFVGIDWATQSHRVCLLDVEGRHVNERDFAHGGAGLTELRDWLLEKTKAVPGQIAVAIETPHGPVVEMLLDHGFCVFAINPKQLDRFRDRFTVAGAKDDSRDARVLGSSLRTDRQAFRRLVVDDPLVIELREWSRLADELQQERTRLANRLRQQLWRYYPQAAELTDDVADDWFLALWQQVPTPATAAKVSEKTITRMLKDHRIRRLDATTVLQTLRKTPLFVAPGTTEAACVHIRSIAARLCLVNQQIKEAHQALDRLCAELEASMESPSGQNCEQHDVTILRSWPGIGRIVLATLLTEATEPLQRRDYHALRALAGTAPVTRRSGKQCFVIRRLACNKRLRNAVHHWSRVAIQHDATARRRYDALRRRGHGHARALRTVGDRLLYALCTPYNPNYQTAQVTAGP

SEQ ID NO: 265514 - protein, 521 aa, unidentified
MESVAAIFSLVARKRFGVFEDPVCETASIFRRLSQAASLSQGNQTMKKHKKTKPNPEAAKPLHEPKPDAAGIDLGATEIWVAVAPDRCQMPVRRFGAFTQDLLAILQWLLECGIRTVAMEATGVYWIPLYQLLADAGIEVCLVNARHVKNVPGRKSDVRDCQWLQYLHSVGLLMASFRPAQIICQTRSIYRFRQNLLTQVGQHLQHMQAALDQMNIKLHHVINDLSGQTGMAIIEAILNGERDPLRLAQYRDRRIKATQETIAKSLEGDWRSEHLFVLRLAWENGKQVQEQIKKCDQELMQYTRQLEAKTMVAQPIVPVKIMSLNVEPGVPELTPAPAVRPAKPRKKTSKNEPDGPWRENLHRFFGVDLTLIPAISVLTGITLMTELGNDLSAFKTVHHFCSWLCLCPDNETSAGKVLHKSTRRSQNRVRQALRMAASSLHHDKSYLGDKYRRLRAKLGAPKAITAMAHQIARIIWYLITHQVAFDMSIFAELEKANQKRHLNRLNSAAHQMGYQLTPIAA

SEQ ID NO: 265515 - protein, 358 aa, unidentified
MKIVGCDLHARQQSIAMLDTETGDFTEKVIRHEGNAVREFYAALEGPTVVGIEATGSMQWFLELLEELGIQYRVGHPAKIRAAETRKQKHDRRDARLILDLLVMEDRFPEIWMPSMEQRDLRTLLRDRHQWVKMRARLQHTMQSMALNHGLRRGPGLWSAAGQSTLKALPLARYTSQRRNALLSLYAQLQKRIQELDKVVEGEAQSRPQACRLLTHPGVGPVTALATEVFLGDPRRFRTGKQVASYIGMIPGEHSSGQRQRLGKLSKEGNSLLRYLWCEATLHAVGKDPELKRFYRRKLIQKGMGKARVAAARKLGIRLWIMLRDQIDYQQFCRRGKLRQEGEAHVGMPDFNSGPAAQ

SEQ ID NO: 265516 - protein, 360 aa, unidentified
MYFDGIDLHKDSAFISTVNERGETALQKRVPNRPEAFRLYFASLPGPHRAVVECTGGWYWLDDLLSELGIELILAHAKYLKAISYAKVKTDKVDSLTLARLLWMDAIPQAHKISRELRPLRDVIRARLRLVQRRTSCLISIHNVGQKLNCSDALDIVARTVPENLSSAHALWIRMLYRQIDLLNAQIQEPENFLHPLLLPNEDMQRMLWVPGMGAVTALSVYLEIDGIERFPSDKRFVSYCRVVPGAKNSNRTKHHKSGCKDGNKYLKIAFTEMAVHAIRHYPEYRRLYDKMRRRANEAIARTVVAKELARIVYHILSNKSEYRGLKGQPISHVKQSTWAHRYGAPVTTPGKPEHITDPA

SEQ ID NO: 265517 - protein, 397 aa, unidentified
MYIVGIDIAKRKHEAAVIDGEGAVIIKPFSFTNNCSGYNRLLAMLAKAKLPLDEVSFAMEATGHYWLALFTRLQKEGFRVQVINPVQTNSIRSFYIRQAKTDPRDALLIAEVIRFGHFSESTLHPENIYELRELCRGRHAIVSMQADVKRKVVALLDQVFPEYETAFTNLFGDTSMAILQTCPTPKELSEMPFEELCHLIEVSSHKRFRMAKAQELQELARNSFGFAMAGDVFSTMIRLYAKHLDFLKQQVREMDRKIAEIMETLDTPITTITGIGPTLGAYILSEIGDISRFSSAAKLAAYAGIDPTMRQSGEYNGVRNRMSKRGSPYLRHAIWLAASSAVLHDPALKLYFQKKRDEGKPYMASVGHACRKMVSIIYAVMRDNKAYTPCIPNEISA

SEQ ID NO: 265518 - protein, 326 aa, unidentified
MKAHPVGIDVSAKELVLTSDRSRNARFDNDPAGHKKLIRFLTKGGRAAQVVIEATGVYSLDLALALHRAPRIEVMVANPRAVANFAKAYLQRSKTDPLDAEVLLEFARRMPFTPWVPPAPEHLDLRALSRRIAALTKTSQQEKNRLHAASQCSEVTPLVRRDIEVNIRHLERRIEHLRHQALALIEEHAPLQEAFEHLVSIKGIADASAISILGELATLPADMTVRQWVAHAGLDPRHVQSGSSIHKPARISKAGNKYLRAALYMPALVAIQHEPNVAAFYDKLVARGKTKMQANIAVMRKLLHAIFGMLKNGANFDGEKFYAINA

SEQ ID NO: 265519 - protein, 451 aa, unidentified
MPNQPTAANEVWTVVNPHAAGLDIGASEIWACVPADRDPTPVRKFGTFTPDLQALAAWLIACRVTTVAMESTGVYWIPIFELLEERGLQVYLVNARHIKNVPGRKSDVQDCQWIQRLHSYGLLSASFRPEAEIVVLRSYLRQRAMLIEHRAAHIQHMQKALQQMNVQLTQVLSDISGVTGLAIIRAIVAGERDPAKLAQLRHGRCQRSEADIAKALTGHYRAEHVFALKQALALYDAYTLQLVECDRQIEQHYSAIKPRYDPDDPAAPLGPDPKFNSHSKNAPDFDVRRQLFRLTGIDLTQVDGLHVSSVQQFLAETGTDMSKWPTVKHFSSWLGLAPHNDITGGRVVRSRTLKNHNRAGQILRVAAQSVGRGKSALGTYFRRMQARLGVEQAITATAHKLARIIYHMLKQHQPYQPLSAEAYDQQQRQREIKRLQRQAAKLGFSLQPQPN

SEQ ID NO: 265520 - protein, 349 aa, unidentified
MEKITTIGLDIAKNVFQVHAINENGDVILRKALRRKQMMTFFDELPPCLVGMEACATAHHWARTLMASGHDVKLIPPAYVKPYLRRQKNDAADAAAICEAVTRPTMRFVPVKSEEQQAILMLHTARDLLVSQRTALINAIRGHFAEFGMVVAQGARNIHLLIAVIHEKDNNDLSASARVALLPLATALLDIDAQITKLAKAIITAHRNNEVSVRLETIPGIGPIIASSLSASIPDVSLFKGGREFAAYLGLVPRQHSTGGKPRLGKITKMGNRRLRKLLVVGACAALYAIKAGKTNTPIGEWARSLLAKKPFKLVAVALANKMARIAWAVMAHKTTYNPIPKGTVSQVA

SEQ ID NO: 265521 - protein, 415 aa, unidentified
MVGIDAHKKSCTTCIFKEDNVLTSPPSETFAFKTTLQGVTEFMGRVPEGSLVVLESSTTGKAISKLLSGRYMVHLVAPPERKLSIKTDKRDAERIIKEDMLGYVRRCYIPSQPIEVLRLIVAKQMEIAAKISAVKNQIHALLERNLLQSEFADLSDVFGVEGLERLSNLSLPLTERLTLVMYLEELNLYASQHRQMEAEVAKIAEADADCRNLMTHPGIGPFVAVAIKARTGDASRFPTKKHFCSYAGVVPKADNSGEHVSEHGRVKHGDDVLKYALTCGVNAAVKAKTYSAVKRFYLKQIAKGKSPQDAEVAAARKLACIVWRMLTSKQPYIEEDVYLTARKMSRLTQTVRRPLKHAAKPEDLPTLIANLKSQTDVLNRYPQMTHAAPGRRRSNRRSPSPVEHISETNSGANVK

SEQ ID NO: 265522 - protein, 319 aa, unidentified
MDNLIHGRIIGIDVSRDWLDLHCLPDDVRCRIPNDPEGHAAVADLARDRDAVVCFESTGGHEWQLWAALEAEDVIARQVAPAQVKAFARSRGTRAKTDRIDAELIARFFAFRPEAGRRLPAEKFRDLRALTSKRTQLVEMRKRLLAQVRAHQKLGTAALFEDIDAELKARLDSLIKCLEERIAVTISNNNALAETVTILRSIPGIGPVASTTLIAEMPELGAITGEEAAALAGLAPVAHDSGTLRGKRAIAGGRRALRHVMFQAALVASHHNPTMKAFADRLRKAGKPHKVIITAVARKLVNLANALCKSRQEWAPLAP

SEQ ID NO: 265523 - protein, 341 aa, unidentified
MSVIAPVFSFGLNGYAGSGLALQDKAEKRLMKITIGIDISKETLDAYRFPDNHHIQVANGRAGHKSLVRWIGKQNGSLVVFEATGAYHRNLEAALAANGTAFAKVNPRQARRFAEATGRLAKTDRVDAIMLAKMGAILGLKAHEPKTEALHILRELITARRALMKDKVAAKTRLQTTRQTLLKNQINARLKQIKIQIQQVDAAITEKVAQDEALSNKLDILTSIPGIAETTAFSMLIEMPELGTLEGKQAASLAGLAPMSRQSGKWQGKERIKGGRAFLRRAIYMPALVATRYNPGLKAKYDQLIRAGKSGKVALTAIMRKLVVMANALLRDGRTWSELRP

SEQ ID NO: 265524 - protein, 319 aa, unidentified
MSTPTESFAGIDVSKSHLDLALHRSQKSWRFANDLEGIHALAEMLQEDEPALIVLEATGGYEQAAFRCLSANQLSVAIVNPRRVRDFARANGRLAKTDRIDAHNLAHFAQVVQPHPRPSSSEVQLQLIGIITRRRQIHRMITAERNRLRNAHPAVRLQLQEHIDWLRQALNELDSEIKALLQSDAELKRKAELLTSVPSVGMVTAASFLADCPELGTLDRKKIAALVGVAPMNKDSGRKSGRRRIMGGRAPLRAALYMAALSASRYNPAIRPFYARLVENGKEKKLALTACMRKLLTMLNAMMRDNKHWSPTTFSHKSS

SEQ ID NO: 265525 - protein, 356 aa, unidentified
MSYDIKYIGMDVHKEAIVIAVQNESGKLVMESVIETKASSILQFLHGLRGELHVTWEEGTWAAWLYDLLQPHVQHIVVCNPRRNALLKEGNKSDKVDAQKLADLLRTGMLRPVYHGENGLRTLRELGRSYQNISKDLTRVMNRLKALYRGWGIPCAGTQVYAARAREEWLNKLPQAGVRRRAELLYQQLDGLQALRREVRPEFLAESRKHKAAKLLRQIPYIGPVRAARLIALMQTPHRFRSKRQLWTYSGLGIETHDSAQYRFVRGQVQRSKKPQQIRGLNRNHNHEMKEIFKSAATRASGGRGPFHDFYAALLAKGMKPEMARLTLARKIAAITLTLWKKEERFDVEQLKTQAA

SEQ ID NO: 265526 - protein, 370 aa, unidentified
MQFIGIDLHTNKFTCSYRDENSPGDTKKGNRTASFELTGEGVAAFCQTLENEAYVLVEASGTTFAFVRLIQPLVKQVIVANTYELKQISLARTNTDKIDAAILSRIIKMQVLSGEQAVSPVEVPPQEIQQLRGLFTTYRLYRKQTTQLKNRIHSLLKEKLYGFTQEAIFDKKSRKMIREIESRTVLSFQLNELFDSLEFMEARIEALKEQILGQAEPYMRQIEILSSMKGISVFIAIAVIADIIRVERFKNSKAFSSYLRSAPRVSNSNTSVSIRGTNKKGRKMAATLVTQALRHVLSASEKLNRWYTRLTEYKKPGLVRTGLRRRVFAEMYQMLKKGEYHYARDERNHQAKLLQYRRFLKKRKILLERA

SEQ ID NO: 265527 - protein, 367 aa, unidentified
MKKVSTVAAQASRKISKQKLTIGLDLGDRTSWYCVLDESGTVVLEQKLSTTAKALREAFGGMPRSRIALETGMHSPWVSRALSELGHEVIVAHARNVRLIGESRKKDDRLDAQTLARLARIDPQLLCPVKHRSAKAQADLTVIRARAGLVRARTALVNTARGLAKSYGERLRGCNVRNMNPEKAEGLSPELQRALQPLLAAIESLSERIREYNERIEQLARESYPQVALLKQVKGVGTLIGLTFLLTLEDPHRFRKSRDVGCYLGLQPGRRNSGQSEPQMHISKEGDPYLRTLLVQGAQHILGPFGVDCDLRRWGLRLAERGGKSGKKRAIVAVARKLAVLLHHLWVSGEAYEPLHNRHRNPLSAAA

SEQ ID NO: 265528 - protein, 343 aa, unidentified
MKVTTVGIDLAKNVIQVHGVDERGKTVLKKQLKREQVAAFFARLEPCLIGMEACGSAHHWARKLASFGHTVKLMAPQFVKPYVKANKNDAADAEAICEAVRRPTMRFVSVKTVEQQGILAVHRARQGFVKARTAQANQIRGLLSEFGIVIPQGIGHIAKRVPDILEDAENGLPGPFRQLLQRLAENLKEMDRQVGELELQIQLWHRQNEASRKLAQIPGVGPLTASALVASLGDAKSFHNGRQMAAWLGLVPRQHSSGGKQMLLGISKRGDTYLRTLFIHGARAVVRVSERKAEADTWLKRVLLRRHKNVAAVALANKNARIAWALLAHDRDYEAHYRSSSAQ

SEQ ID NO: 265529 - protein, 397 aa, unidentified
MSAVVGIDVGAYKHAAAVCRSGEREAERGVFRLSADRVGFNELERWLERQGPVDRVVFESSGHYYWPLASHLHRRGYQVAVVNPLRAKYFAKSRLQRSKSDPADARTLAALGMSEEPRVKDPLLGAEAKEAARFWGGLVKEQGQVRQKLLRLVEIGFPELKECFEDPLCGTALAVLREAPTARAAARRRVTTLADTKKPGGRRRLGESKARRLHELAKDTIAPPELDAQMGFEVGMLIQQFDLLDKQIEIAEQRVAEVLDSELAARLQTIPGVGPALAATFIAEIGDIWRFDDFDQLASYAGVHPKEQSSGTKGQNPETSWHMAKTGNAYLRSAAYKMAVVGIVHNPVIRAHYLRKRAQGKSAMNAIGHCMSKALAVVWGVWRSGHDFDPTLGGPKA

SEQ ID NO: 265530 - protein, 324 aa, unidentified
MSDSILGIDVSKETLDAYCARGQRKQGRSFANSPDGWKLVRAWLKAMGSKQAHVCMEATGRHSLGVALALHEAGHVVSVVNPAQIRDFARTKLGRNKTDKVDAALICEYAELFKPEPWTPPSPAMRRLCELQTMRAGIIRSRAEWKNRIGSGLGDSTATKLAAATIDHFTSQLEAIDRAIGETIEQDAELRGRCDLLLSVIGVGETLAASLMAEMPEPGVLRRSGEMVAYAGLNPSHHRSGTSIDRPTRISKIGNATLRSSLYMPALSAMRFNPAVAILVARLKSAGRLKPKQIVVAAMRKLLVLCFGVLKTGKRFDLAIAMPA

SEQ ID NO: 265531 - protein, 369 aa, unidentified
MPHVTSIGLDVHARSVAAAAFNPFTGEVVRRSFGTDASEIAEWALGFEDPRACYESGPTGFHMARELRALGLDCAVAAVSKMQRPAADARRKNDRRDAEFIARMLATHNIVEVPLPDTAVEAARDLDRALDDAARELRRSRQRLNMFLIRLGHVWDERNADGARKRAWTRAHWRWISEIRLEGPQRDALEYYVTAARCAESDKRQLERRVVALAGTDRWRPAVEALSCIKGIDTLTAFRLAAEAGSFSRFRSAPAFASWCGLTPSEHSSGESERRGGITKAGNALARTALIESAWHYSMCSPRPKAPAPGTDVPPAIRSRADACTARLHRRREALADAGKPACRANAAVARELACWVWEIGCRSEGTIR

SEQ ID NO: 265532 - protein, 418 aa, unidentified
MDKIKTKGRKVVNEKTLLVTVDIGKTMNMGYCRCPDKTEVKPFEFQNGYDGFNKFLDIIFKTKATKKLEHIVVGFESTGAYAEPLMHFLRRKGIQLVQVNPLHTKRLKELQGNSPNKTDKKDPKVIADIIELGHALTVVIPEGAAADLRRLTNARERTLQRRTALLNQLQDIVFICFPEFLKIMKDVKTKTAHYMLKHYPTAADILASGLDRLIFEMKKVSRGKLGIERATALYEAAKTSVGIQEGRIGLALELQEFLLSIEECERFMGRVEEEMSCCLRDIPYSSLLLSMKGIGKITVAGLIGEVGDFKEFHRASEILKYAGLNLYEISSGKRKGNRRISKRGRSLMRKLLFFAAIRTVRKNGIMHGHYQRYLQNGMKKIKALVAVSRKLLEIMFALVRDHNLYQEKYLETRCLKAA

SEQ ID NO: 265533 - protein, 313 aa, unidentified
MTMNSDQRFEHIVAFEVSKDNLVVHTFPADEQRTITNAPAAIRRLIKAEAKRNREQKLGPILIVCEATGGYERHVIEAAFELEIPVHRTNGTRVRHFGRLLAQYGLKTQELRLHVPPPPENEALRALRVRRTEIQQMLIAETGRLDHAQHKSVLKSLKQHIAELKADLAAIETEIHQLVRENSALNKKVALMRTVIGVGPISAMTLLAYVPNIGQLTKGQVARLAGRAPINNDSGKKRGVRHVQAGRTAIRRALYMAAVVAMKANPVLKEFADRLRSRGYPFKYVATAVMRKLVVILNAILRDGSPWRGAQTA

SEQ ID NO: 265534 - protein, 332 aa, unidentified
MKFLETIGIDVSKETLDVIIHTTGLNNQFENSTKGYKTLSKWVVTNVTGPKESLLFAFEHTGLYSFPLSVFLSENGYSFILIPGLEMKRSLGIKRGKNDKIDAKAIALYAFRRKEEVIPYQLPSKELSELRRLLSLRERLVKHRAGYQASLNENERFLKKSDNPVFFEVHKKVISEFNKQIVKIEQELDDLIKRDDQMKNMYDLITSIDGVGPQTAMFMIAFTNAFTLFKDWRKFASYSGIAPFQYQSGTSIKGRTKVSHLANKKCKSLLSNCAASSILCNPEMKAYYHKRLQEGKHKMSTLNIIRNKLLARIFTVIIRNTPYVNTLKYATC

SEQ ID NO: 265535 - protein, 430 aa, unidentified
MKSNTQNAKIEAITEKTLVLGIDVGSETHYARAFDYRGIEYSKKPFKFSNTEAGFVTFKEWILELKERHEKDKVVPGMEPTGHYWFNLGKFLQDNEMKPVLVNPHHVKKSKELDDNNPTKNDRKDPKVIAGLVREGRYMIPYLPDGVYADLRTASNIRFQLQAELTRIQNRISRWFNIYFPEYKTVYGKPDAKSGILILKAAPLPEDILTLGIDGVNQIWRDAKLRAVGKARAKTLIEAAEHSVGSKEGAVAARMEIRMLLEDYESRSIRLQEVMTLIEGLVKQIPMAEKLLEIKGVGIRTVSGFLAEVGDISRFNNPKELQKLAGLALVENSSGKHKGETTISRRGRKRLRYLLFEVAMSLVAKNPEFRELHNYYTTRRLNPLKKMQSLMAIAAKLIRVFYVMLTKGVNYDPKKMVNDIKRPAVYLQTA

SEQ ID NO: 265536 - protein, 340 aa, unidentified
MDITTLGIDIAKSVFQLHGIDADGAVVVQKKLRRGAVLNFLGNVGPCLIGMEACATSHYWAREIAALGHEVRLIPPAYVKPYVKRQKNDAADAEAICEAVTRPNMRFVPIKTEEQQSVLVLHRARDLLMRQRTMILNAIRGHLAEFGIIAAQGPRQVMGMIARLRDDGDASLPEIARSALLALGAHLEALAGEIRTLERQLMVWHRADPTSQRLETIPGVGLITATALAASVSDPSVFKSGREFAAFLGLVPRQNSSGGKDRLGRISKMGDRYLRKLLVVGATSVIRRAGSNSTKTGAWVRSLMERKPARVVTVAMANKTARIAWAVMTRGEAYRASPIA

SEQ ID NO: 265537 - protein, 391 aa, unidentified
MRASSRQVDGLLEWASGWPRRRWAIEGARGLGQLLAQQLIASGERVLDVPPKLAARVRLLDSGQINKNDPNDARSVAVAALRAHELPELAAEDHAMVMRVWARRCLARLRTQVVCRLHAVLCELVPGGVRKYLRASQATDVLDRIVADSPVAQAKLELARELVADLERIDAQRREAKRRTARAVAATRTSINDVYGVGPIVAGTVLGYVRDIRRFPTRDRFASYNGTAPIEVSSGDRKIYRLSRRGNRQLNHAIHMAAISQIRHHDSEGRAYYEKKIAEGMTGKTALRALKRKISDGLYARMIDDARRLAAKDPGGHSGNDSASSAAGSHPETPALRTSHSRATANSKTGTGQRPLTLRPAPDRRRTSRRAAGVQVEPRPGPHRGRGQDRP

SEQ ID NO: 265538 - protein, 411 aa, unidentified
MREGAFYAGVDTHSDFHVLAVVDSSATVVETRRFPSDAASCASVARELAGRWGCAAAAVECCGSYGRGLVEALAGAGVRAMEVPASFRRLMAGKDKSDEADAAAAATFALASAGRPARGPKDSSGPAGQLACLAAARRGAVKEATACVNEARGLLVKAPDPLRSRFKGMPKKRLMEALRRLAPGKGPDRCERLALRSAARRWAACEKERASLEAEMAAIVSERYPSLLELPGVGAVCAAEVAAAAGDNPERFKSEAAFAKAVGCAPLEASSGKTVRHRLNRGGDRRANCAIHRIVVVRMSCDERTRAYVDKRVSQGKTKREAVRCLKRYVARELYRALLAPERRPPDLRLRARREALGETLAAAASAVGLSQGKVSRVERGESRDGRAEALLDGWLSSLEEKPSAREREGE

SEQ ID NO: 265539 - protein, 379 aa, unidentified
MNNYSKYVGLDVHKETIVAAIAKAGRGDAMQYGEIDSTAEAIQKLAKKMSANGERVLFCYEAGPCGYGIYWQLKEMGQECMVVAPSLIPKKAGDRIKTDSRDAVTLARLSRAGELTAVWVPDKEQEAVRDLTRAREDMKVMEHHARQQLGAFLLRHGKRYFGKSAWTQAHFRWMEDLRFEHPCQQIVFQEYVDMVKHAQGRLEALEQQMLAVLETWSMREVAIALMALRGVKLIAAMTILAELGDLSRFESAPQLMAYLGLVPSEHSTGQKKKRGGITKSGNGHVRRVLVEAGWSYRFPARKTAALQRYAEKTSDEVQEIAWKAQKRLCMRYRHLLLKGKLKVEVCTAVARELTGFIWAIACEVMKKRGIKTITKAKAA

SEQ ID NO: 265540 - protein, 369 aa, unidentified
MADRITYVGLDVHKDSIVVAVAAGGLRGEVREYGRIANTSTALDRLLRKLGGDGMRLRFCYEAGPCGYGIQRRLSTRGHECVVVAPSLIPKRAGDRVKTDRRDAAGLAKLHRAGELTAVWVPDVGHEAMRDLVRARLDAVHSLRRARQQLSGFLLRHGCHYGRPAWTRLHRRWLAGLKFEQAVHHIVLEDYIAAVEAAEARRNRLTAQIETMLPDWTLAPVVAALQTMRGMALVNAASLIAELGDLSRFANPRQLMAYLGLVPSEHSSGSSVKRGGITKAGNAAARRLLIEAAWSYRFPARLSRELLLRQESQPRLIRDIAWKGQVRLCARYRRLARTGKPANIVTTAIARELAGFVWAIARQVTVTTD

SEQ ID NO: 265541 - protein, 352 aa, unidentified
MLSVGLDLHKRYSQVEALEENGERRSGSRLVNEFEELEGFFRSLGEPCRVVLEAGWNWGSMYDWLERVENVVEVQLAHPYGVRAIAAAQVKTDRIDARMLGQLLRVGLIPQAYIPGKETRQLREAVRQRLFLVRVRTMLKNRIHALLDRHHVVPPPVSDIFGKRGRDYLSRVELPGWAQDLLSQDLRLLEMLGQEVRQAEMLLARALKGDRRVELLLTVPGLGAILATVVVLEIDRIERFFRPAKLVSYAGLVPTTYSSGGKTSHGGLMKMSNKWLRWALVEAAWIAVRRDPYFRHQYGLRCRTKGAKTAIIAVARRLAEVIWYVLTEDRPYQVRQPASKRREYGLTPAALS

SEQ ID NO: 265542 - protein, 352 aa, unidentified
MNQELRRVIGGVDSHADNHQAAALDERGRLLGSKSFAVSAAGYRELQAWLASFGLIDRVGVESTGSYAAGLTRHLLAEGVRVLEVNQPHAHSRRRRGKTDAIDAELAARHALSLASAVTPKQSSGIVESIRQLRVARGSAVKSRSAAIVQLGDLVRTAPSELREQLVIRSTVKGKAALCRRLRPDTDRLSEPANAAKLALRSLAGRIAGLAEEIAELDRQLALVATAAPRTTALLGISTGHAGQLLITAGQNIDRLHSEAAFAALCGASPIPIASGKRGRYRLNPGGDRQANRALHMIAVCRLRHCAKTRAYAHRRSSEGKTKKEIIRCLKRYIARQTYATLRDDLRSLTIG

SEQ ID NO: 265543 - protein, 412 aa, unidentified
MKVVHEICGGIDVHAKMLVACLLLANGEKEIRTFSTMTDDLLRLRDWLMAAHCTHVAIESTGVYWKPVFNILEDALTVILINPEHAHALRGRKTDVKDAEWLADLLRHGLLKASFIPPPEIRELRELTRYRESLVREQSAVANRIQKLIESGNIKLAQVASDALGASGRTILWALARGETDPVKLAALAQRQLKEKRAQLERALHGRLTVNQRFVLRELLQRWEELEAADRRVSKEIDRYLQDRPKLARARDNLDTIPGLGPRAAEIIVAEIGVEMKANFESEAHLASWAGICPGNKATGGKRLSGRTRKGNTYLRSVLVQAAWGASLKKNCYLSSQFFRLVKRLGRKKALVAVAHSLLVIIFHVLQNDQTYTELGGDYFDRQHVGQQRDYYLRRLQMLGLKVTVEELSVAA

SEQ ID NO: 265544 - protein, 459 aa, unidentified
MRQKGKPTKGIEQAHTFEGMSKVNPHAAGVDIGAEEIVVCVAPNEVTQLVRGFGNYTVDLHAIAAWLAEHRVKTVAMESTGVYWIPLFEVLEQGGFECLLISSRSLRRMAGRKSDISDAQWIQTLHNYELLESSFRPQADLVALRSLLRHRRSLVDHRSPHVLHMQKALLQMNIQLSQAVSDVTGVTGQAIIRAILCGVRDPRMLASLREPGCKKSEEEIGKALTGTWREEHLFVLKQALALYDFYTQQILECDQEIARLYSETRPEWDGGELQPLSSRKRNSHSKNQFYESEKIRGHLKRISGVDISLVDGMGVSLAQTVILECGTDMSKFPTDKHFCSWLGLAPKHEISGGKVLNNKTLKTKNRAGQAFRMAAQSVKQADCAFGVLYRRLRARLGPAQATVATAHAIARVMYRMLKYKVEYEPLSVNQYQKQYEEQQIKYMKKRAAKLGYQLVPAPA

SEQ ID NO: 265545 - protein, 316 aa, unidentified
MTTNAVVVGVDVAKDRLDVAVRPSGETWSAANDEAGITALVARLRPLGPALLVCEATGGFERAAIAALAAAGLPVVVANPRQVRDFARATGQLAKTDQLDAAILALFAERVRPTPRPLPDAAAQLLDAVLTRRRQLLEMLVAEKNRLGFAPKPVHRGIQAHIRWLERQLDDVTKELAALIEASPVWRAKDDLLQSVPGVGPIVSYTLLGELPELGTLSHKQIAALVGVAPLARDSGTLRGKRLVWGGRASVRTALFMAALCGRRWNPTLKVFYERLKAAGKPTKVALIACARKLLTILNAMMRDQSRWTSNVQYSC

SEQ ID NO: 265546 - protein, 451 aa, unidentified
MPKDQTRSKPSGLPIIHPFAAGIDIGSRFHVVAVSPDLCDEPVQTFQAFTADLQRMANWLVATGTKTVVMESTGVYWVAAYEVLESRGLEVVLANAREARAVPGRKSDVNDAQWLQRLHACGLLRASFRPGRDIAELRAYLRCREKHTDYAAAHIQHMQKALTFMNIQLHHVITDITGVTGMRIIRAIVAGERDPHRLAAMRDVRCKESLETIRSALVGNYQPEHVFGLKQALALYDFYQRCIDECDVEIERAVAILNIAHPIPDAPLPKAKHRSKLPSDPNFDVRTAMYQLAGTDLTQIHGIGPFLALRLIGECGTDLSRWPTAKHFTSWLTLSPGCKISGGKVLSSHTRKTSSRITVALRLAAVTVGRSNTALGAFYRRLAGRIGNAKAVTATARKIAVLFYNAMRYGMGYRDPGAAHYEQQYRDRVIKQLHRRAAQFGYSLQPQDSPV

SEQ ID NO: 265547 - protein, 442 aa, unidentified
MDASLNANAKLSLRGFAICPYLAGINMGKQRDNACGADIHKNKIVATILSQSGTKIQADFGTTLPELLKFKAWLINNDCRIMAMESTGTYWIPIYSVLEGSIDIIVANPYMIKHIPGKKTDLVDSDWLAELCLKDLIVPSRIFPKEDRVLRSLTRSREGLVKIRTRLKNKIHRDLSSSHIKLSSVVTDIFGKSGTHILRGLLDNRSIDEIIESIPSRRVKKNADKIKESIENNLDSSQIFLIESSLDLMGSIQDNINRIDADLRKRTSSRLNDLKIAMSIPGIEFTSAVTILAEMRDYRDFRSPEQLASYFGIVPFVNQSADKLRTGYITKHGSKHLRWIMVQVAHAASKKIGSRLRKFYLRVKARRGANVAIVALARKILCILHHLLINQEMYEEPGVTKRTRPVKLDQPSSQSEFTAQEMIDILQRSGYEIRKIERGAFG

SEQ ID NO: 265548 - protein, 315 aa, unidentified
MTTSSRKFVGIDVAKDKLDIAVLGEKKASQVGNDEAGISNLIKKMEVLNPTLIVVEATGGYQRAVVLGLYEAGLPVAVVNPVRVRQYARASGLLAKTDKLDAFNLAEFGKQMKPRRFEAKSEAGRDVSALLVRRRQLEEMLKAEKSRLRTVSPKMRGSVERMIESLKEEIKRLEKDLDQFMKENEEWQAQEQILTSAKGVGRITATTLLAELPELGKLDRKKIAALVGLAPMNADSGKKRGYRKTKGGRMEVRNVLYMSTLVATRYNPLIQAQYQELQRRGKVKKVALTACMRKFLTILNAMMRDQQPFRYTAAP

SEQ ID NO: 265549 - protein, 413 aa, unidentified
MQVYAERVCGIDIGKAELKACVRVPGKRAGSFRQEVRTFSTTTRGVLALREWLLDCGVSLVGMESTGQYWRPVYYLLESVVQCWLVNPAHIKKVPGRKTDVTDAMWIAQLVQFGLVRPSFVPPPPIRRLRDLTRLRTDLIRDRTRQVQRLQDVLEDAGIKLSVVASDIMGVSGRAMLAALIGGERDPERLADLALGRLRVKTEALTEALTGRFEDHHALQCRLLLAQVDGVDHAVAELDTQIQAEIAPFQDLIERLDTIPGIARRNAEVLIAETGGDMSRFASPADLVSWAGMCPGNNESAGRRGNTHTRKGNRYLRAALGEAARAVAHTKDTYLGERHRRLTARRGEKRAVVATGRHLLEITYWITTRGTTYQDLGTDYRQRRLRDPLKEINRLATRLQTLGCQVSLTLPAA

SEQ ID NO: 265550 - protein, 335 aa, unidentified
MHYLYYVGLDVSKETFDASLVAFEDANEMAHRKFANSRKGICSCLHWVEKRHGILLDDVIFCAEDMGSYISEMAVCASDRTLNFNFSLISPLVIKYSMGIARGKTDRVDARRIAEYAITHYRKIALYLPAEKELCQLRTWLILRAHLAKQRVAKLVLLEKLDYKEKFADVSIQRSMLQEEIAYAETHMKTIEREMKELIAADSNICRNYKLLTSIKGVGPITAIVMLCSTLNFTKITDHRKFACYCGLAPFEHSSGTSVRGGCHTSSMANRDIKVQLNRSALIAIRCDPQLKAYYERKVAEGKHKFSVLNAVRAKIAARCFAVVRRGTPYVALQI

SEQ ID NO: 265551 - protein, 391 aa, unidentified
MICVGIDVAKDKHDCFIISSEGVVLSDVFTIPNDMTGFNCLLQRIQACSAGQDRIKVGLEATGHYSYNILGFLLDNGLDSFVINPLHTNLYRKSLSLRKTKTDRVDARTIALMLMSDVGLKPYTDTAYHNEELKSLTRYRFDKVRERARLKQSVARLVCILFPELEKLMPTLHMASVYALLEEFPGAHQIAAAHLTHLKTVLHDASKGRYSRDKAIELREAAKASIGSRMPAKSLELQHTIRLIRELDAEIEEIESAIQHIMDKIHSPITTIPGIGTRMGAMILAEVGDFSRFDSPDKILAYAGLSPSTYQSGQLVNGYAHMEKRGSRYLRFAIFNATKYVCHWDPTFAAYLAKKRAEGKHYNVAISHAAKKLVRLIYALEKSREPYRLTA

SEQ ID NO: 265552 - protein, 352 aa, unidentified
MERYVGVDPHGGTCTFGVMSAAGKRLNSLVVETNGRALVETVRGIGGRVHLCLEEGTQSAWLYELLGPHVAEIAVTVPGKKKGSKDDLRDAFSRANELRTGAIETRVFKAPEHLAGLRNAVRAYGFATTDVVRAKNRLKSVFLSRGISTDASVYDPAKRPGGLKQLSSPHRELAEWLGRQLDRLEPLREEAEGLLLSEAKKHPIIKKLSTAPGMGPIRTAQVVAIVATPERFRTRRQFWSYSGLGVVTESSSDWVRDRAGKLVRAHNVQTRGLSRKRHPRLKAVFKGAATTVIAQLADDPLHADYERMLKSGIRPTMAKLTLARKIAATVLSMWKHQEVYDPKRHRPTPEQK

SEQ ID NO: 265553 - protein, 349 aa, unidentified
MLADQVDYVVGVDTHRDEHVLAVVVAPTGAIVAQRSVRATARGYAQALRFTQEHAAGARVWAVEGAGHYGAGLARYLSDHGETVCEIGRGPREERRLRGKDDSLDAVRAGHAALSSETLRLPRAGPRREALRLLLLARRSAVDVRRQALVQLRSVIVTAPDGLREQLRGLPAGRLIQRCSRLRRSNSRTPSELATILVLRSLARRIEAATAEAAELEAEILGHARALAPQLLKEAGVGPIVAAQLLVAWSHQGRVRSEAAFARLAGVAPIPASSGKTIRHRLSRGGDRQLNRALHTVILHRRQHDAATKDYIARRVAEGKTQREAVRLLKRYLARHLYRLLDHQAALMT

SEQ ID NO: 265554 - protein, 315 aa, unidentified
MRNCIGIDISKSSFDVFVLEENKASEMVNDAEGIKQCIKLCHEIQPELIVMEATGGYEMLLASHLQAEGFAVAIVNPRRIRDFARAMGKIAKTDKIDAQVIATFAATLEPMPHEFIDANSRKLKALVARRKQLLQMHTAEVNRKEHAIEDEIKQSIEAIVTAIENQLEKVDKELDDSIGQAPELKQKTEFLKSIPGIGKITAQMLVTELPELGVLNRRQIAALVGVAPMNRDSGIFRGKRMTGGGRRHIRARLFLPTLVATQYNPVIKKYYQNLVVNQGKCKMVALTAATRKLLCIMNAMLKNNQYWQPDLVKNT

SEQ ID NO: 265555 - protein, 355 aa, unidentified
MNDAKYIGMDVHTATISAAVRDSSGNLVMEATLETKAETILEFVHGLRGSLHVSFEEGTCAAWLHDLLKPHVTEVLVCDSRKNALLRVGNKNDREDARKLSELLFLNKLHPVYHGETGIRTLKELARSYLTITRDLTRVMNRLKAIYRGWGIACAGQQVYAPRYRAEWLAKITEAGVRRRAEIYYQQFDALAALRQEVRRELLAESRKHPAMRLLRQIPSIGPIRAALLIALMQTPHRFRTKRQLWAYCGLALRTYDSGEYRFVGGQLKRSKKAVTIRGLNKNHNHDLKNIFKGAATRAAATAGPLQNFYEARIANGMKPPMARLTLARKIAAITLLVWKKGVRFDAEQLKQQAA

SEQ ID NO: 265556 - protein, 338 aa, unidentified
MSIVAVGIDLAKNVFAVHGVGASGKPELVKPDVKRNKLLELIASLPPCLIGMEACSGAHYWAREFQKFGHTVRIMAPKFVAPYRLGGKHAKNDAADAAAICEAVTRPQMRFVPIKTLDQQSHLFIHRAHQGYVAERTALINRARGLLSELGIVLPQSYKAFKQGVHQVLEDLPGYCNQVIGDMLSEIAHLDERIDQDAKLIAKLAKDDAQSRRLMQLCGVGPTTATAIVASIGNGHDFKNGRQFSAWLGLVPCQNSSGGKTKLGRITKAGDSYLRSLLVLGARSLLLKAPNKTDPVSRWALQLKERTGYGKAVVAIAAKNARMCWAALNLGEGFRVPA

SEQ ID NO: 265557 - protein, 314 aa, unidentified
MANIFYGIDVSKATLEIAFGEDHETQTINNNPASITLWLKSLGESSLIGLESTGDYHSLMATMAYEAGHTVFILQPRHLKNYAQGVGVRIKSDPSDAEVIHRYISREHKDLRPFTPASQLVTQLQKLVKRRAALTKARMSVKQSLKGLDLLDQDLKVFMGDFDRFIGQIDRKMLCLIRKDVELNAQRERLSTIPGVGPVTSVALAALFKRFSFKSADSVVSYVGLEPKVRQSGRWVGKRRISKRGPGELRRLLYIAALTASRKPAWREIYNRHKAKGLPSTACMVILSRKILKTAFGIWNKPEELYDESRIKSA

SEQ ID NO: 265558 - protein, 345 aa, unidentified
MPPPTYRPPYQLFVGIDIAATTFTAVTTTEGPSSERARTFAQNPVGFAALIDQLRATGVAPAHTLIVVEATGSYWVALAVTLHEAGYVVSVVNPAHAHHYAQSLPRRAKTDLLDAPVLAQFAAERKPAPWTPPPQVYHELRQRLIARDALLTMRQQARNQRHALLQWPIVIESVRVQLEGLIADLEMRLATLEVEIAQVLADGAWAESANLLASITGLGLITTAWLLVGTVNFQACASAEAASAYVGLVPLAHESGSSVRGRSQIGHAGHARLRTALYLATLSAARFNPIIKAHYERLRAAGKPAKVARCAAARKLLHLAWAVVTKRQPFDPTYRMRTAEAPLAA

SEQ ID NO: 265559 - protein, 503 aa, unidentified
MNNSAAGENSAGGRPASARTRSREGHRKTVKRRQPGEPEALAKTSNRTAPQEGCNISAMDGRAKRRQEQKRKSPPMNNPEQPSGSWLEQRGFGGLDWASQHHSVVVVDAHGKVLEDFEIEHSALGWKKFRERIRAYGSIPFAIETSQGAAVEQLLEAGMQVYPLNPKSGQSYRERKAPSGVKDDRLDAWSFADALRVDGQDWKALHPEDALIKELRLFCRDEVALIEQRTAFINQLRHALAEYYPTALEAFEDWGSLSAWMFVQRFPTPQALKQAGKRQWEKFLHSRHLWRTESGPRRLELFAHATDLCGSLPMANAKSCLALSVISMLFALEKQLGLYRQRIEELFGRHPDHDLFGSLPGAGPKIGPRLLSEIGDDRTRFGEEPQPLQCLAGTAPVTRRTGKARSQPPRWPCHQRWACDKYLRHAMYLFAEQTLSRCVWAEIYYRLHREKGHSHADALRRLGQRWLKIIFRMWMDRKPYDPMLHNQNQLKHGSWVLQLNPTN

SEQ ID NO: 265560 - protein, 325 aa, unidentified
MQTQTHYTGIDVSKSFFDVAFLQAGHYTYHKFSNDRDGFKALLKVLCSGSWVVMEASGPYYLQLACFLHGQGIAVSVINPLVIRRFSQMRMSRAKTDKKDAKMIAEYGRMEQPVLWQKPEQHIITLQQTEALLSRLQTEHTALINQLESFDNSGMLTKQLRTEISRELLHKSRLIKKLTGQMEQIAQAHYSDMLANLESIPGIGKKTAMMLTVLSGGFTRFDDYRKLSSYIGICPRIFESGTSVKGKARICKMGMSRIRATLYVCSWSAMRCNKACRELYERLLAKGKAKKLALIAVANKLLKQAFAIATQKTKYNENYSNIICF

SEQ ID NO: 265561 - protein, 412 aa, unidentified
MKDLLEISCGLDVHKEKIVACILTGPLGKPTRSEIREFSTLIPDMIALRNWIVSKNCHHVAMESTGIYWMPIYEILEDAFYGDITLLVVNARHMKNVPGKKTDMRDSEWISTLLRAGLLNRSFIPEKRIREFRDLNRYRKSVIRDITSQKNRIEKFLQSSGFRLSSFISDIFGASGRNIILHLMEHGQIDKTALDSCLKTKTRNRIDEILMSVNGTLSEHQKAFLRILMTHYDSLKKHLAEIETSLEEDMAPFTLQVEQLNSIYGISTTASCAIIAEIGIDMKPFKTAEHICSWAGLCPGNNESAGKRKSTSVTKGNPYIKSMLCEIAWVIAGKRNTYLSAWYWRIKQKKGAKKAIVALARKLLVIIYTMLKQGTLFDESCFETRRKHCEQKQLSRYIRELEKHGYHVEAQS

SEQ ID NO: 265562 - protein, 372 aa, unidentified
MPDVSSNAPVDVRLWVSLDVHKLSIVAATLPRTGGQPDVQRIETTRVAIRRFIERLGGPEGLAVCYEAGPGGFDLLRALTELGVACDVVAPSLIPVRAGDRIKTDRRDAKKLVRLYRGGQLSFVAPPTPETEGLRDLMRCRDDLRRARTAARHRVSKQLLRHGRIYRDGKSQWTKMHRAWIARQRLDDQLAQAALEQMLIHLDGLDRQLDQLDRDLELIARSSRWADTVEILTRFRGIATRTALGLIAEIGDFARFAHPRELCAWLGIVPAEYSSGDQRHRGHITKTGNHHARRLLIEAAWAYQHRPRRPDRGPEPDARAWQAQIRLHRRYHHLTTERGKRATVATVAIARELAGFLWAAATNQPLALEATA

SEQ ID NO: 265563 - protein, 433 aa, unidentified
MLKLNYMSTLFVGIDVSSKTNAVYAMDFEENKYISSSFGNNQPGADQLVNMIAECMQKHKNLDTVLIVLESTSVYSVHISNFLSASEVLMPYRPYVFCVNPKAASNYRKSYIGMEKTDPTDAYLIADFGRVGRTKKLEPWRGGQFISLKRLTRHRMHLSECITREKTYMVSNLYLKFSELQLLEGDDKPFGSLYGATSSAVLTEFLSPQEIIDMPEEDLLTFLAGKSRNRISDLSKTSELLRKAARDSYRLDKCMYEPLNVSLASSFNCIHAYQKEIKLIEQAIEKCINGMNPNALLILQSIPGIGPIWASGILSEIGDITVFHSSDALAKYAGLYWPKGDSGDFTSEDNKMSKAGNPYLRCYLGEAANSVRKHIPEYADFYARKYAEVTKHQHKRALALTSRKLVRLVFGLLVKNQLYTGEKLDTEYNIESN

SEQ ID NO: 265564 - protein, 309 aa, unidentified
MDAQYVGIDVSKDRLDVHVRPSGEAFAVARDGEGLAALVARLQPLAPHLVAVEATGGFEITVAAAIAAAALPLAVVNPAQVRHYAQALGRRAKTDRIDAAVIARFAEAVRPQPRPLPDEATQMLADLVTRRRQIITMMVAERQRATRLPKRLKRSCERVVRVLEAELAALDQDIDTIVRGSPVWRAKEDLLASVPSVGEITARTLIANLPELGTLDRRKIAALVGVAPFTRQSGQWQGKSFIGGGRPNVRAALFIATMSAVRHNPTIRAFRQRLLAKGKPKMVVMVACMRKLLTILNAIVRDQKPWQHA

SEQ ID NO: 265565 - protein, 406 aa, unidentified
MAAQAPEDTAGTGQKVFGGVDSHTDTLHVAVISDNGGHLADAEFATTPAGYAAALAFIDAHGQVTAIGVEGTSSYGAGFTRAARSRGHRVIEVNRPDKAERRRIGKSDPIDAYAAARAALSGRASSAPKDDTVTGIRALHNAARSAVKARTAALNQIGSILVCAPEAIRAKYGPLKSTDRADALARQRPAGDAVHTAVLTALRTLARRVKELTAEHEALTKALDTAVTAGNPGLRAAHGVGPDTAAQLLITAGGNPERMRTEASFAALCGAAPVPASSGRTNRHRLSRGGDRAANAALYRIALVRMGSDSRTREYAARQTAAGRTKKEIIRLLKRAIAREVFRCLTTTVNVPEIADLRPLRQSKNITLTAAARHLGVWPNRISDVERGTRRLDDLAHAYRDWLQTA

SEQ ID NO: 265566 - protein, 343 aa, unidentified
MELNAIGIDLGKTLFHLVGLDASGNVVVRKKCSRAQLLKYTANLRVQRIGMEACSGSHFLGRALREQGHDARLMPAQYVKPYVKTNKSDSIDAEAIAEAVQRPTMRFVPIKTEEQLDLQAVHRLRERWVMRRTAVVNQIRGLLLERGVTLPKGRSHVDEALPEILQDADLKLSGSFRLLLAELQLELEQLAEHIQQMDSAIQHTVKENEACQRLTTIPGVGPVTATALIAAIGNGSGFRKGRDLAAWVGMVPREYSTGGKQKLLGISKRGNNYLRTLFVQGARAVMRYRAKQAPGLNHWLTQLLARTHQNVVIVALANKLIRMAWAVLCKNEVYRAPALVASD

SEQ ID NO: 265567 - protein, 320 aa, unidentified
MRNAVGLDISKLTFDASAIVGNAEYSAKFDNDSKGLDQFSDRLKSLGCQNLHICMEATGNYYEEVADYFAQYYSVYVVNPLKISKYAESRFKRTKTGKQDAKLIAQYCRSAKESELVKRQKPTDEQYRLSRMIAAYAQIKSECAAMKNRHHAAKDEEAAKAYAQIIKAMNEQLEVLKEKIKEQTEKPNCKEGVKRLETIPAIGRMTAAVLFHHLTSSKFETSNKFAAFAGLSPQQKESGTSVRGKGKLTKFGNRKLRAVLFMLTMVAYRIRAFPDFIKRLEEKKKPKKVIIAALMRKLAVIAYHVHKKGGDYDPSRYKSA

SEQ ID NO: 265568 - protein, 422 aa, unidentified
MTFYLERGYIGQASLWDETASHNPEAPKEETPMIYAGIDVAKDKHDCLIVDADGTEFYPAFTIPNNRAGFDDLLERLTLCSEDLTKIRVGLEATGHFSDNLLEFLITNGLSTAVINPLLTSLYGKSLSFRKTKTDKVDAHSIVTLLRTQRPKPYSQSSYQIRELKSLTRYRHSLVQDCGRAKTSFARLCAILFPELEKLVATLHSQSVYALLTEFPTARDIASCHLTRLTNLLATASKGRHGKDKAIEIREAARASVGTHSDVKALEVVQTIQLIRLMETQIKQVESRIDPIVDSFRSPIMSVPGISYRMAAVIIAETDNFQNFDSAEKVLAFAGLEPSVYQSGQLTSTHSKMVKRGSKYLRYALFNAARYVCHWDPTFGAYLAKKRSEGKAYNVAVSHAAKKLTRVLFHLVKNDEAFVKQA

SEQ ID NO: 265569 - protein, 360 aa, unidentified
MNATTVAVDLAKSVFQLAVADEHWKIIETQRLTRTQFERWFLNREVNLVIMEGCGSAHHWARWLNGLGIEVRLLPAQYIRAYVKRNKTDAADAAALLEAARASDMRPVRVKSVEQQALQGMHRIRSLWMGTRTSRINALRGFCREFGIAIPVGARTGMEAISRVLADPNTAVPDLIRGTAKLLIEEIRLLEARIAQLERELAAIAKLSPACTTLLSIPGIGLLTATALVAATSGDVSHFKDARHFSSWFGLTPKEYSSGSSRHLGRISKKGDRYLRMLLTHGARSVLRASKVAQDAGREVCGVRRWALDVQSRSNHNKAACALANKLARICYATLRDKEPFGESARLNKKINRESFVMPA

SEQ ID NO: 265570 - protein, 320 aa, unidentified
MQPTIGIDISKDRLDAYRLSDGQRIQVTNDEPGRKALIGWIGKADPPLVVFEATGAYHRQLEARLGATSVPHVKVNPRQARRFAEATGRLAKTDRVDAAMLARMGAVLDLAEQAAPRKILSELRELAVVRRALVKDRTAAKTRLCIAVLPLVRRQLNARIRQIEAQLAQIDAAMSDRVAKDQTMARKRDILVSIPGIGEATALAMLVEMPELGTLGAKRAASLAGLAPMTRQSGKWRGKERIRGGRPMLRRAVYMPALVATRFNPAMKRTYERLIAAGKPAKLALTAVMRKLVVLADALIRDNRKWAKAILRRRSMGTGP

SEQ ID NO: 265571 - protein, 310 aa, unidentified
MEQTYIGIDVSKDRLDVHVRPGGEVFVVSRDGKGLEELIDRLRTLTPMLIVVEATGGFETVVAAAIGGAQLPLVVANPAQIRHFAQAVGKRAKTDPIDAEMIARFAEAVKPTPHQVPDEAARLLGELVARRRQIIEMLVAERQREGRAGNVRVHKSLVRHIKVLERELQDICDDISGLIRGSPVWRETEDLLVSVPGIADKTSSSLLAELPELGRLTRRQIASLVGVAPFTQQSGRWKGKSMIAGGRAAARSAIYMAALSASQHNPVLKAFYRRLLAAGKPKMVALIAVARKLLVIINAMIRDKTPWRYA

SEQ ID NO: 265572 - protein, 372 aa, unidentified
MENIIYIGMDVHKESFSLCALHGTTGEIVREARCASNVSLVKKFVEKLKIKYGEDIKIKAGYEAGCLGDSLHNLLEKNGIDCDILAPTTMYSSSKNKMVKNDRFDAKMIALNLANGTYKEVYVPEEEDVAVKEYIRMLGDFKTSLKKIKQQIKAFLLRHGYIYEGKSSWTIAYMKWLKNLDLQGLFKETLDEYLLQYDVLVDKIERFSLRLEELSHSERYEEPVAKLRCLKGIDTTSAMTVHVEIADFTRFPTAKAFMAYVGLTPSESSSGEKISRSSITKQGNSTVRSTLVECANALVKGTIGLKSKRVKVRQKGQRSEVIAYADQAVERLQRKYHRMIYQGKPRNVAVTAIARELGCFIWGLEVGKIHRK

SEQ ID NO: 265573 - protein, 401 aa, unidentified
MISVGIDVSKGSSAVCIMHHGAITHQFLVQHSQFEMNKLIDLLLSLDEHPRIVLEATGIYHLPLLQSLKMAGFFVAVINPLLLKKYAASSSLRKVKTDKLDAVKIADYGISKWHSLTDYSLSEDSYTQLKELGRNYAHYIKLKVIQKQCLTSLLDKAMPGIKTLIRGCSNDNLAKDKLLDFVEHFHHFDRITAKSEKQFLLDYCRWAKKKGYRPLESKASAIYALAQASIPTSSSKLPPTTALVLEAVKVLRHLCETLQLILSQMRELAQDLPEYEVVRSMTGVGTILAVRLIAEIGDIRRFHSGKSLVAFAGIDSPPCESGNFVGTKRSISKRGSPLLRKTGFEIMMAVMAHKPHQDNAVYLFMVKKEAEGKPKKVAKIAGLNKFLRIYYARVKEVYDAA

SEQ ID NO: 265574 - protein, 380 aa, unidentified
MEYCTTIGADVSDRTTKICVMTKAEGGERRIVLETTCATTKAGFEEAFSKFDRSWPVAFETGTHCRWMDGVFRKMGFKTIVGNPGKIPSITKSNTKNDRNDARELARLAIADPAMLHPVFLRDEVYQQMLRFHHARNMLISQRTQSTNQIRGFAKSMGHRIECSSTEKFHEQGKAGWPRELEECAWPLMGMLKTINLKIKAYDKLIARLAERPEFKSMVERVRVVYGVGIIGSTVFVAAIGGRPDRFAHTRDIGPYFGMIPKQDQSGDDDKQLHITHAGADIVRTTLVECAGVVMMDKSKDTDLKLKGLRIAMHGGKIARKKAKVAVARGLAVAMLALMQHPEREYIPLSEEGKKGFERYRAEMEYLAMQKASRKEKKVA

SEQ ID NO: 265575 - protein, 417 aa, unidentified
MPYRIAGIDVHKKMLAVVVADVESDGEYQFERQRVGTSPGDLRRLADWLVEREVEEVVMESTAQYWRPVGEALEQHWRRLSGTLHLAQAQSNRGAGGRKKDFPDAERLVKRLVAQELTLSFVPDAEQRLWRTVMRRKYQITRNRVQLHNRLEALLEEAHIKLSSLVSDLLGTSARRMLQAIADGETDPAILATLADRRLRTTATQLRDALSACATLHPVYRRLLQLTLEELRLLEEHLDQLDQQMAQLLAQHHAAVQRLAEVPGLGVNSAQQIIAEVGASAATFPSPKHLASWMGACPGTEESAGVNYSHRCPKGNRQMRRVLNQAANAAVKAKGTIFAIVYRRLVPRLGHAQAIGAITHRLCRLIWKILHQGIRYEERGPAVSAEAKKVRARKMIRELRSLGYHVELLSAPSSSPA

SEQ ID NO: 265576 - protein, 409 aa, unidentified
MLFIGDDWSEEHHDVEVQDETGRRLAKAKLEEGIAGIARLHAMIGEHLADGDEAAQVIIGIETDRGPWVQALLAAGYHVYAINPLQVARYRQTERTSGGKSDTADAHTLADMVRTRRHTLRPVAGDSIQAEAIKVVTRAHKTLIWERTRHLLRLRHALREFFPAALLAFDDLSAPEALELLNKAPDPASAARLSIKQITAALTRARRRDVTVKAEIMQATLRSQQLGQPPAVAGAYAVAVRAQIALLSILNMQITTMQKQIEARFDEHPDAVIYLSQPGLGTVLGARVLAEFGDDKSRYTDAKARKNYAGTSPITRQSGKKKTVLTRYVHNDRLIDTLGLQAFAALRASPGARAYYDRQRARGVSHHASLRQLSNRLVGILHGCIKTASNYDEDTAWPPTDEQDTNTPT

SEQ ID NO: 265577 - protein, 344 aa, unidentified
MMTHFVGLDVSQKMTAFCVVDNAGRRLWRGQCPTAPEQIAAMVRRHAGDNSRIGIETGAMTPWLVHELRALGLEVICLDARHARAALKMQINKTDQNDAEGLAQIVRTGWFRSVHVKSFDSHRARALLGARAQLVGMTTRLSNHIRGVLKTFGLLLGAMRGLRFDRKVEVLLEDRSDVAPIVRPMLVAWRQLREQISAFDKAIRVLVKSNSPCRLLMSVPGIGVLSALAYVSTVEDPARFSQSRSVGAHLGLTPRQYQSGDVDRSGRVSKCGDTLARTLLYEAAVVLMTRVKKASELKDWALAIAKRSGIGKARVALARKLSVILHSVWRSGKPFRWTEQAITG

SEQ ID NO: 265578 - protein, 415 aa, unidentified
MEPMHQRVAGIDVHRMKHVVTILIGQEDGAVSSQTREFGGFKRDMRALVAWLQTHHIQQVVMESTGIYWKSVFAHLEAAGIPALVVNAFHVKNVPGRKTDVGDSEWLAQLARFGLLRGSFIPPKDLRELRIVSRYRRKLTGMLAGEKNRLHKLLDDAGIKLGGVVADIDGVCASKMVEGLIAGGKPDELAALGRGKVRATTDILEAAMDGELSARHRLVLDMAYDHLRYLEGKLTALDRYLLAAMQPYAWAWRLLQTIPGIDAISAAMILIEIGDDPHRFGSSARLASWSALCPGNNESAGKRKSGKTRHGNPIVRYLLCEAANAARRTKTVFRAKYESLVIRRGHKKTIIALAHKLVRTIYFVLVRRKPYRDSTVDYEAASVAKNAPRWIRALKKYGYWPQVAAPNPPTAVTAT

SEQ ID NO: 265579 - protein, 367 aa, unidentified
MNNNNTLYVGLDVHKESITVAYAINSEPVELMGKIGTSPTDIQNLCKRLRSKSSQVSIVYEAGPCGYGLYRRLVKSGFDCMVCAPSLIPKKPGERVKTDRRDAIRLVRSLRAGDLSAVYVPGIEDEAFRDLARAWASARDDLRHARQRLKSFLLVHGVHYVGRADWGPAHRRWLSKYSFESPWRQLAFDEHRRTIEDRQAQCERLESALKEAVTEWRLYPVVEALQAMRGIQFITAVGLISELGDLTRFEHPRQLMSWFGITPSEYSLGGSRHQGSITKAGNSYARKLLVEAAWSYRHPARISPAIQKRQENLPRPVIDRAWDAQLRLCKRYRKLQAKGKNVNITIVAVARELAGFIEVVNKNWPPS

SEQ ID NO: 265580 - protein, 343 aa, unidentified
MQVVRIGLDLAKYVFEVHGVDSHGKVVTRKTLRRDAVTQFFANLPRCLVGMEASNGAHYWARVLSDLGHEVRLISPQFVTPYVKSNKNDRNDAEAICEAVGRPSMRFVPPKSADQLAIQAVHRIRRRLVADRVRLVNQVRGLLSEHGIVIARDITQLRRGLAVIVGNEADGLSDMVRSLMRDLQTELTELDRRIRTYDRRIREIFRTNEQCQRLARIEGIGPVTATALIAAVGDRTSFKNGRQFAAWLGLVPKQRSSGGRARLFGISKRGDRYLRTLMIHGARAALGKAAGKQDPRSLWLSKLRARRHPNVAAVALANKNARVVWAMLSTGTFYEPALALETA

SEQ ID NO: 265581 - protein, 465 aa, unidentified
MGKAQKARSKSRAKQNHRAKLKPQDCTLGLQVVHPKAAGIDVGNEEHWVAVPPNLDPEPVRSFGCFTKDLQEMADWLVRCGIETVAMQSTGVYWIALYDILAERGIRVFVVNAQDTKNLPGRKTDIQECQWLWKLHAYGLLRNSFRPEEEILVMRTYWRQRQQHIGDASRCIQHMQKALTQMNVQLANVISDISGTTGQAILGAIVAGERDPHKLAELRDPRIKASEARVAKSLEGNWRSELVFVLRQELESYQTFQTKIAECDQQLHRHYKSMEAKADPKQLPQIPRDKRAHGNIPAGFDLRAELYRATGVDLTAIDGINVLTAQTLIAEVGYDMSRFATEAHFVSYLDLSPRNKISGGKVVGREKRKTKNRAGLALRLAAGTLLESDTYLGAQYRRLRTKLGAPKARKAMANKLARIAYRMLKYGEKYVEKGKELYEQKYRQLQIRMLTKRATELGLQLVQPA

SEQ ID NO: 265582 - protein, 343 aa, unidentified
MKQYIGLDVSMKETAISIRQDGKRIWRGKCASDPQLLAVVIRKRAPYARRVVFETGPLSVWFYHALTAEGLPVICIDARHAKAALDMAANKTDANDADGLAHLAEVGFYREVRVKGFDSMLIRTLITARRQLLKMRLQISNQIRGLMKTFGLVVPKGAGSVFERNVHDLLQGEAKLARIVVPMLRAWSDIRYQIAELSKQLAAMAREDQHCRLLMSVPGVGTVTATAFAAAVEDPANFRNSRAVGAWVGLTPRRYQSGEVDHDGHISRRGDNQLRGLLYEAAAVILNRSTDTSTLRTWALELKERLGFKRAAVALARKLAVIMHAMLRTGELFDPHGGTPAAA

SEQ ID NO: 265583 - protein, 339 aa, unidentified
MSSMVVGADIAKNVIQLHYVDTETGEVINKAVKRTSFLSFFQNRKPCLVGMEASGGAHHWARQLSLLGHQVKLMPGAYVKAFNIRNKNDMADAEAIWRAAQQPGKTVAVKTEAQQAMLALHRVRFLLVKSRQMQVNELHGLLAEYGEVMRKGRASLFSSLPDILVRLEERLPAELIETLREQLAEIERLEHRISALERRIKSLSKDDPGVRAISDIPGVGFLTATAAIAAMGSAGAFRSGREFAAWIGLVPRQTGTGGKVVLKGISKRGDKYLRKLLINGAHSVIQNANEPGAWVTNLLKRRTVNVASVALANKMARTIWAVLAHNKPYIKAPPETVQH

SEQ ID NO: 265584 - protein, 373 aa, unidentified
MNYSTVYVGMDVHKESFSLCCYTNEKEQAEYCQKVDAHYSKVLNYLEAMRFHYGDDAVFICGYEAGCLGFTLYHQLTDHNVKCVILAPTTMSRPAGKKKIKTDKRDAALIARCLAHYDYSPVHIPTDKDEQIREYIRMRDDHKLALKKVKQQISAFCLRHNYRYDATKSQWTQAHLKWLRALEPEGLYQEILSEYLATYDRLADTLERLRQRIKELAADAAYQEKVHKLSCFLGVKTHTALSVIVETGDFRRFGSAGQYASYLGLVPGEDSSGDSQARLGITKAGNSHVRTLLVEAAQSYTRGKAGYKSKGLKERQYGNPPDVIAYADKANDRLRRKYCRMVLNQNKKANVAKTAIARELACFIWGMMTDNMA

SEQ ID NO: 265585 - protein, 364 aa, unidentified
MKIVGCDLHAGQQSIAMMDSETGELTEKVLKHEGNAVREFYGSLQGPVVVGIEATGAMQWFLELLEELNIQCRVGHPAKIRAAETRQQKYDRRDADMILELLLMKNRFPDIWMPSTEQRDLRSLLRDRHQWVKMRARLQHTLQAIALNHALRKGKALWTATGRQALQDLALPDHTAQRRDELLRLYLQLERRIQQLDKQVEKEAQGRPQARRLLTHPGVGPVTALATEVFLGDPHRFRTAKEVASYIGMIPCEHSSGKRRRLGKLTKEGNSLLRYLWTEATLHAAVKDPELKRFYRRKLVQKGMGKARVATARKLGIRLWIMLRDEIDYEEFCRRGKLPQKGKTHAGMPDFNSGPAQAVTGSTE

SEQ ID NO: 265586 - protein, 418 aa, unidentified
MNAELIARLLRRYLALDIHKHYSVVAGVNFEGQVVLEPVRIEHADLEVWLVKNIQPTDYVVIESTTNAWHIYDLLEPLAEKVLVANPIKMKQIAQARVKTDIRDTLILARMLAANMIPEVWVPPVDVRNLRYLLSQRRQLVGMHTQTVNRMHSVAHRHHLSHPRGKRFNEKNTRWQRDEELSDSEQFQLELDMSTKQHLAEQAEKITKKLARMSHRKPWAESMMYLTQLPGFGVITGMTVLAAIGDITRFETSKHLVSYSGLNSGLEQSGMKLRGKKITKEGRKDLRWAMVEVAQRAVKSDPLWKHRFTELCRRMHRNQAIVAIARRLLELVWYVLSRKQPYRHFSHERIAYKYLTWSWQLSETDRDGLTRQQFTRYYLMRLGIGHNLEQIALNPRYKRNLTSEAEVLALRPELKQTE

SEQ ID NO: 265587 - protein, 337 aa, unidentified
MEYFAGLDVSMEETHICVLDRDGTLVREGQARSSPDAINDFLAAGPACAGVVFETGRMAPMLYHGLTECGIPVQCIESRQAYQALKSLAGHKSDRNDARGLAHLARTGFYKPTHVKSLSAHAIRSLIAARKKLVGQRVTIDNQIRGLVVVFGVRLPRALSPAFKDAALKVSDGVPGLHAALNGLFAAREAILAAVAAIDADVKKMARKSKTCARLMTVPGFGPITALAFAAAIDDPMRFKKSRDVGPYLGLVPRRHQSGEIDYIGSISKRGDTRVRTLLYEAANVMLTRYAGQLKLKKWALAVGARSTMRKARVALARRLAIILHAMMRDQTEFQIA

SEQ ID NO: 265588 - protein, 412 aa, unidentified
MQVIAERAAGLDIHQDTVVACLLIGAPEARPRKEIRTFGTKTKDLEELRDWLMTAGVTHVGMESTGIYWRPVYGVLEGLFELIVGNARHIRNVPGRKTDVKDAEWIANLVRHGLIAKSFVPPKPLRDLRDLLRYRRKLVENQAAERNRLLRLLETANIKLASVASEVFGVSGMAMLKALIAGDNSPDEMADLAKGKLRRKRVDLALALRGHVEDHHRFLLAIQLRRLEAAESDVKILDARIAERLAPYDVQMSHLMQIPGVDWLIAAVLIAEIGVDMRVFVSAYHLAAWAGVCPGSHQSAGKQKSVRARKGNVHLRTILVGAAVSASRAKGSYLKDKFYRLKARRGALRAALAIAHKILIAAYHMLARGLGYRELGDAYLDQLDKTRTVGNLKRRIERLGYQVSLEPMKAVA

SEQ ID NO: 265589 - protein, 371 aa, unidentified
MSDGSEFLYVGIDAHQETLSIAVLEEQGTGPEPVVQLPNRLPVIRRWFRKLLQRGSVVATYEAGCLGFVLQRVLDDLGVQCVVAAPSHLPRIPGDQRKTDRIDARRLASFLRAGQIVAVSPPSPELESLRGLTRYRQAMREDVVRMRHRIQKFLLLRGHVHRDGQNWSPSHMRWLRQLQVQIDDDRSTLDSMLDELEHRQTSLALLDQRIEMRGRQQDIEEAVRSLMAFRGVKSLTAVSVIAELGDPRRFRSAKQVSSYCGITPSKHSSGERIKRGPITRAGNARLRRLLVEAVQHYARPYPNNSAVIARRANAPTRVQAIATRAEQRLRRRYRALAVRKHTNVAKTAVARELIGFLWAALLPEKCSTEHP

SEQ ID NO: 265590 - protein, 338 aa, unidentified
MSKVTTIGLDLAKNVFHMVCCDARGKVVSKRMLKRPRVLAFFGNLERCLVGMEACAGAHYWGRELEALGFEVKLIPARYVKAYVRGNKNDYNDALAIAEAVVRPEMRFVATKSPEQQDIQALHRMRKGCIGGRTALCNQMRGLVGEYGLVAPKGVAALRRRIPEWLEDGDNGLSEFFRRLLHEGLERLYELDSHIAFYTRELERLSEGNEACQRLQTLPGFGPIVASAFHGQLGHGEAFRRGRDASASLGLVPRQHSTGGKDTLLGISKRGDRYVRSLLVHGARAVVSRAAHKDDRLSRWVNKIRARRGFNKAVVALANKMARMGWAVLANKTVYQRA

SEQ ID NO: 265591 - protein, 321 aa, unidentified
MITRIYVGADISKDWFDVCMSLDEKAPVERYSNNPVGHAKFIKAVSPLARKVHVCMEYTGGHETPLALACRAANIIVSIIDGGKFSAYRKSFGRAKSKTDKQDAKLLARFASERKPPEWFPVPDEYRTLRELVRHREALIQARTAWGCRAAHTVESELVTAQRRTLREVLALQIKEVGKAISAHIKAFPSLKEARDLLVGIPGIADVSAARIIAETGPISNYKSPKQYAMAAGLCPIVIHSGQKTPPGKLPVYGNAELRCALYFPVVCSISHKVGVWNFMQRVEANGDKVKMTVITAGMRKLAHIIWGVLSSKTKYDKDKM

SEQ ID NO: 265592 - protein, 435 aa, unidentified
MDEVTDEPLYRDRVCGIDIGKAGLVATIRVPSERNPARRAAETRSFGTTRREVLTLADWLRCWQVPAVVMEATGDYWKGPFYRLEAEGLECVLADAKQVKNLPGRPKRDPADSRWLAACFERGAITPCFVATPEFRIIRLHTRYRRDLTEERTREKQRAEKLLESAAIKISSVVTDLHGVTGRDIMDRLIAGERNPKILAQLARRRARRKISQLEEALDGAEFFTTAHAVLLAKVLERIDRLAADIDQLTVVIERLLAPYEEQLQQAESMPGWGRRAAQDTLAETGPDMGRFATGAHLASWAGRAPLDHQSGARAGRAKAKKGNRYLGAVTGETAVAAGRTQTREGARHRRLARRRGAAKACVATGNTQLKVYHKLLSNPGMRHVDLGPDYYERRRDIRRQVAHHVGKLGALGFEVTLCRIPEPQLDGTGQTRAT

SEQ ID NO: 265593 - protein, 385 aa, unidentified
MQAHTIKAPAAIRVDLAAIFVSLELSRSKWLVTSLSPGGGERMSRHIVSAGDIPGLLDHFVELQRRAEVRTGQCFRIVSIQEAGLDGFWIHRILERESIESYVVDPASIATSRRRRQAKTDRIDGEALVRALLAYSRGEPRVCAMLRVPTPEEEDRRRLVRERKALTNERIRHVNRIKGLLFSQGASGYEPLRADRRKCLDRLVTGDGHPLPPALKAQISRELDRIELLLEQIKNVEEARDAMLASADVPTPAMLLNLKGIGPEFAAVLWSEGLSRKFDNRRQVAAYAGLVPTPWQSGQINCEQGVSKSGNPRLRSTLVQVAWLWVRHQPNSALSQWFKARVTQNGGRYKKTAIIALARKLLVALWKYVNAGVVIEGARLTRPSA

SEQ ID NO: 265594 - protein, 350 aa, unidentified
MEYIAFDAHKRYTLASVARPDGGLVREQRIPHERGALQEFLERCEHGSPVAVETIGNWYWIVDEIEAAGCVPKLVHARKAKLMMGEINKTDKLDARGLNRLQRAGTLPTVWIPPGELRDQRDLPRTRMVLVRQRTQLKNRIHATLAKYALHDVEVSDLFGVRGRALLRQRLDRLPPHTAYATEQLLEQVESLDRQVRGFEQRIQTVFKPTPGIQWLLTLPGVGLTLAVVIALEVGDVARFATAEKLAGYAGTTPRVHASGGKTRFGPLRSDVNRYLKWAFVEAANAICLTRGRAPHRHVSRLYERIARRRGHAKAIGAVARHLAEATYWILSKGEGYREPKASGRFVHGG

SEQ ID NO: 265595 - protein, 346 aa, unidentified
MKVLLKQTVGIDVAQNELVVSLGRMDEQISIEVYAYKVFPNTKKGFSSLVSWVNKQTSITTEVRYVMEATGVYHESLAYYLCNIKKQVSIVLPNKISNYARTLDIKTITDKSASQAIARFGLERKLEVWLPPLKIFNDLRQLCREREQLVQERTMLKNQLHAERTSATSSKNSVQRTKKRIALIDLQEKEIREEIAILIKEDQTLVEKMKMVSSIPGIGNLTAVTIIAETNGFELIKNKRQLVSYAGLDVREKISGTSVKSKPRISKRGNRNLRKVMHFPALAAIRTDERFRDIFLRLVSKHGIKMKAIVAIQRKLLELTFILWKNNSYYKSEHQYQIIPFQEVTE

SEQ ID NO: 265596 - protein, 340 aa, unidentified
MSIITVGIDLAKNVFAVHGVDDNGKAVLVKPRVARDKLLELVATLPPCLIGMEACSGAHHWARQFRQYGHTVRLMAPKFVAPYRLSGKRGKTDAADAAAICEAVTRPHMRFVPVKEEHQQIILCLHRTRNGFVEERTAVYNRLRGLISEFGIVLPQKVANLRRQIVEHLEDLPGYANRCIGDLLAHADVLDERIAEYDRAIAQAAREDARSKRLMQLPGIGPTTASALLASLGGGHDFANGRQVAAWIGLTPGQYSSGGVARLGRITKAGDRYLRSLLVMGARAILSGLGDKQDRFSRWARSLVERRGYWRAVVAIAAKNARLAWAVLRYGEDFRLHAGA

SEQ ID NO: 265597 - protein, 338 aa, unidentified
MYYTGIDLHKFTSYLTTVDSSGVIVKQNDIKNINHNFVQYFASIPGQHLATVESTMTWYWLNDLLTSINIPLVLAHAKYVKAIAYAKVKTDKVDSHTLAQLLRMDYIPAAHKISNDNRTLRDALRARIKIVQRHTSVTNSMHLLLAKYNFDSPAQLTGIPEFQYQQLSEVEALLDEQMLALEKQLYPFLILNDDIQRLLWIPGIGKMNAFTILLEVDDINRFPDVKNFFSYSRLTPSARNSGGKSKQRSSKDGNKYLKVAFSDASIHAVQYYPVIRKYHNSLLRKKNKQVAKTIIAKEIAEIVYHVLKNKSNFNNKFRGQELQHKKSLQWPRVVNPYA

SEQ ID NO: 265598 - protein, 439 aa, unidentified
MEDSTTCLNSGLASEQLVAWIGLDWADNQHQISSYDIASGQVEVYALKHSPETLQEWLNDLRKRYNGGKVAVVLEQSRGAVLYALMSCDFVVLYPVNPQALASYRKAFYTSGAKDDPKDATLLREMVSKHPERFRAWVPDDPDTRSLELLGEARRTIVNQLNRCTNRLNSCLKTYFPQALEWAGDLDSRQACDFLEHWPTLEALQHVRPSRLRKFYLNYGRPRVETIERRLEQIKHALPLTQDPAAVLAGSLMVRALAAQIRPLIAAIEEFDDEINRLFQKHPDHQVFESLPGAGAALAPRLLAAFGADRERWQSAAEIQAFSGIAPVTVQSGKKRFVHRRLACSKFVRQTFHEFAGSSIVWCDWAKAFYDHLRAHGKGRHAALRALAYKWIRIIFACWKNRSRYDEEIFLKSLALRGSHLSLLTQATQESKSAKKRAA

SEQ ID NO: 265599 - protein, 346 aa, unidentified
MMIIGCDFHPSWQQVSWLDTETGECGEGKLVHASGDAKVFYQQMVAPLLIGMEATGNSQWFIELVQDLGHEIWIGDAAQIRASYVRKQKTDKRDASHILKLVVEGRFPKLWTPDREQRDLRQLVLHRHKLVEIRSRVKNELQHLSLNKGMQRKAKLWSQAGQKLLRELPLKPWAACRREDLLGLLGMLNEQMGKLDQAVQQAADQHPQAKLLMTQPGVGPNTALAYALTIGDVRRFPRGKQVASYLGLIPREESSGGRQKLGAITKQGNRLVRSLLVEAAQIAVRFDPGMKKQYLHRCHQKPKGVAKVAAARRLAVRLYWMLRTQTAYPEIVRIESSPRVPLVGAS

SEQ ID NO: 265600 - protein, 373 aa, unidentified
MSNDSVVFVGLDVHKDSIMVAYSVGFGDVESLGKIGPRASDIDRLCKRMQSKASHVAFVYEAGPCGYGLHRQLTDKGHTCMVCAPSLIPRKPGERVKTDRRDAAKLVRSLRAADLSPVHVPTVEDEAFRDLVRAWGAAKQDLKQARQRLKAFLLIHDVRYTGRADWGPGHRRWISGYTFDSPWQQLAFEEHRRTIEDRLTQCERLEVALREVAPQWRFFPVVKTLQALRGIQFTTAISLLAELGDLSRFDHPRQLMAWLGVTPSEHSSGEKRRLGSITKAGNSYARRLLVEAAWSYRHPAKISPAIQKRHEALPKPIIDRAWDAQLRLCKRYRRLTARGKHPNVAVVAIARELAGFVWDLARMTPITATVQAT

SEQ ID NO: 265601 - protein, 318 aa, unidentified
MANSTTLTAGIDTAKDKLDIAVHGQTHTFSVDNRRAGWKVLAAELAKAGVTRVGIEATGGYERGVTRYLQDKGFTVLLLQPLQVKAYARLHLRRAKNDRIDAVLIAACACAIDPPSVEPDPRLDALVDQLTFVEQTEEDIARCKTRLEHIHDARLRGRVAADIERLEKRRASELRRIETALRAHADVAKRFDLVLSIPGIGERTAFALILRMPELGKISREQAAALAGLAPFDDDSGKHSDKRHIAGGRGRLRRSLYAAALPASFRWNPALKALYARLIKAGKSHKTALVACARKLLIFANTVVARGTAWEDRAAIPA

SEQ ID NO: 265602 - protein, 446 aa, unidentified
MGEQRLLANATSPERMSIVPNTFISVGIDVGADFSFMSLALPNQTFIGKPFKIVHANLNSLEKAILTIEKAEELYSMKARIVMESTGIYHYPLFCYFRDKGFNVVVINPIISKNSTNINIRKVHNDKFDSRKLALIGLKPDLKTSVIPPEAVLDLRNLVREYYNLMDCRSAYVNKLLGVLKVSFPQYTGIFSKVTVQTSLALLDKFPSPAEFLSAKKSAIINLIRKTARFGTAYAEAKYQAIIEAAEAAETFGYFVPSNSTQIRLCVSFIKKYDEEVASVLALMHELVDQYSDKEFVRYIRLIETIPGAGFLSAVTVICEIGDFSVFKSPKQLFAYFGLDPAVKQSGNFTGTQVKMSKRGSSIARRAIFAISLVSIGVNRKGVANNPVLRDYYLHKCKSKLKMVALGAVMHKVCNIIFAVLRDNIEFVLITPQEHNALYHYNIKVT

SEQ ID NO: 265603 - protein, 467 aa, unidentified
MTDEKRWRNRKEKKEWGRRLQSEDPGLEIVHPHAAGIDVGNGLHYVAVRPDRDPQPVRRFECFTADLNRLADWLQHCGVKTVAMQSTGVYWIPIYEILEERGIQVYLVNARHTKNLPGRKSDVQESQWWLKLHTYGLLSNSFQPPSEIRVLRTYWRQRGDHVHGAATCVQRMQKALTQMNVQLANVISDVSGLTGQAIIRAMVAGERNPRKLAELSDPRIHASGEEVAKSLEGNGRPELLFVLQQELEMYDTYQRRIAECDLQLQKHLASLTDSVPPRPPEVEPEPKKKKRAKPAKNAPRFDLGRELQRITRVDLTRIDGIDVMIAQTLLSEVGVDMTCWKTEAHFASWLGLCPDNRVSGDKVLRRGTRHVVNRAANALRQAANALIRSRGYLGAQYRRLRTKLGAPKAITAMAHRLARLVYRMLKYGQRYVDKGTEYYEQRYRNQQVQLLRKNATKLGFQITEARA

SEQ ID NO: 265604 - protein, 362 aa, unidentified
MDYFCGLDVGMDESAICVVDDKGEVVLQTTAVTDPEAIRTSLKPYLGRLRRLGHEAGALSPWLHPELLKLGLPAVCLETLHVRAALKAQRNKTDKTDALGIAHLMRTGWFRKAHIKSEACYRLRLLLTHRRNLKRKFLDLENAVRHSLKAFGIRLNRVGRGGFARAVRETVAGDALVSELIDAMLNARAALWKEYCRLHDLVVKLVASHELCRRFMQIPGVGPVAALSFMTAIDDPSRFRRSRDVAAYFGLTSRRWQSGASIDVQGRISKAGDGDVRRALYEAASALLTRYKKKDKVKSWGLAIRKRSSHRKATVAVARKLAVIMHAMWIDGTFYCGDPDAPKADVTARTAAKERKLLGVHA

SEQ ID NO: 265605 - protein, 343 aa, unidentified
MNTTQPVMGIDPHLDTFDLVAVDDVDRELVAKHCPNTAQGWAQAAAIADRFDISIVGIEGASGYGAALARDLTRRGLRVLNVPTRVTASGRRSQGGAKNDRIDARIVARAVLADKANPWTDTPELETLRVLTHRRDSLVKAQTRDINALRALLVELDPPKAAQLRRLRSTRAFNQLIDLEPQPEPAAEIVAQLIRDLAADCCRRLSQIRRLEQQMRIHLPPIGHKLIDQIVGCGVITAAIVLGELAGTDGFATEAKYAKWSGAAPLDASSGRQEHHRLNRTGNRQTNRAIHTIVLTQLAHGGQAAHYIERRQREGLTRRSAIRAAKRYVARRIWNILHQHQLT

SEQ ID NO: 265606 - protein, 391 aa, unidentified
MIYVGIDVAKDKHDCFITNSDGEILFPVFSIQNNRDGFDDLFSKIRSISTDLSNIKVGLEATGHYSYNLLGYLIDKGLPTFVINPLHTNLYRKSLSLRKTKTDKVDARTIAMMLMSDVNLKSYSDTSYHNEELKSLTRYRFDKVQERAQLKQSVSRLVTILFPELEKLVATLHIASVYALLSELPSAGKIASCHLTHLTKLLENASKGRYNREKAVEIREAARVSIGSNMPAKSLELRHTLKLIGELDSEISEIESEIKRIMDQISSPILTIPGISYRMDAMILAEIGDFSRFDSPDKILAYAGASPSTYQSGQLESSYSHMEKRGSRYLRFALINATKYVCHWDKTFGTYLQKKISEGKHYNVAITHATKKLVRLIYAMERSGKPYKKMA

SEQ ID NO: 265607 - protein, 336 aa, unidentified
MTIIRIGLDTSKHVFQIHGVDENEKPVLRRQLRRSEVEKFFAQLPPTRIGIEACGASHHWARLLRGLGHAVLLMPPQYIKGYVKRGKNDAIDAEAICEAMSRPTMRFVPVKTAEQQAALTMLGVRDLLVKQRTMLINALRGHAAEFGVAAAKGPNKIVELLQRLAAGEGVPTLAREMLGMLASQLEAVNDKLKAIEARLMAWHRQDQTSQCLATIPGVGPIAGVSFALKIPDARAFRSARHFAAWIGITPRESSTAGKHRPSKISHEGDESLRRLLVLGATAVIQRAKKGRVSPWLLGLLARKPKKLAAVALANKMARVIWAMMISGEVYRRPQEA

SEQ ID NO: 265608 - protein, 336 aa, unidentified
MVYVGVDLHRKTAHVVALDQGGTAILSRRVATRPDELLRVFGELDHQPLEVAFEATFGWGWFADLLADAGIPAHMAHPLATKAISSARVKNDSVDAKTLAHLLRTNLLPEAWIAPPEAREARRLARMRTSLVRVRSQLRCQVHAVLAEHGVHAEVSDVFGKAGRALLEDLALPPVSKARVDANLRLIDAVSEEVVQAERELRALFRGDDRIKRLTAIPGVGLITAATVVTEVWDITRFPSADRLWSWAGLTPSEHSSGEHTRRGHISKQGSRWLRWVLVEAAARPQADPGLRAFVDRIASRRGTKIARVALARRLLTLSFYALRDERGCRAFPVTR

SEQ ID NO: 265609 - protein, 352 aa, unidentified
MKYIAFDSHKRYAFASVEDQESGEVSDKRIEHERGALTAFLSRYEPGCPVAVETLGSWYWIVEEIEAAGMEPRLVHARKAKMMLASSKKTDKLDAHGMNRLQRTGTLPTVWIPDGELRDKRELFRTRMVLSRQCVRVKNRIHSTLGKYGIQIEGTSDVFNKKGRAAIEAALDLLPEQTGFSVKELLAELDSNEESLRTFERRMAEVFNDSQDVQLLRTIPGVGQILSVVIASEIGDIARFPSSEHLAAYSGTTPRVHASGGKCHYGRAPADTNHYLKWAYTEAANTIMRNRHRMCLRHAADLYERVRTRKGHSVAIGAVSRHLAEASYWILKKREPYREPSKKVEAVSSTNG

SEQ ID NO: 265610 - protein, 354 aa, unidentified
MSEHYAGRQIVGMDLHRRRSVLVRMTDMGERLETVRISNDPEYLAQVMARAGEAPEVVLEAAYGWYWAADTLAELGATVHLAHPLGVKMFSYRRVKNDQRDAADLADLLRMGRLPEAWIAPPATRELRGWVRHRAKLVGLRSSLKCQVHGVLAHAGVWVPMSDLFGVAGQQLLAELSAGDRLSIESRSRLDSALRVIGALEFEIELFAKLVNGRLRTDPGYRALQAIPGVGPVLAAVFVAEIGDITRFHRPEQLASWAGLTPKHHESDTTVHRGRITKQGSRLVRWAAVEAIQRVSGHTRLGQHRDRVAARRGRNIGVVAAARELLTLVFYGLRDHHIRALDTPAAPVASTPAA

SEQ ID NO: 265611 - protein, 358 aa, unidentified
MTMIGAERPDTKAEPDPRAEVIMGVDTHLDVHVAVAVDHLGRRLGEASVPTTARGYEKLLCWAQDFGPVRCAGIEGTSSYGAGLARHFKAQGIEVLEVERPKRRQRSSRRRVKSDPSDAESAARAVLAGETSGVPKSGDGLVEMIRALRTARRCAMKARTQAANQLQGLRVTAPEELLNRLRGLSTKELVAVAARLRIGDDLRDVPSATKFALRSVARRYEALSEEIAELDAHLGPLVAQVAPELVSLAGIGTDHAATLLIVAGDNPQRLRSEASFACLCGVSPIEASSGKVVRHRLNRGGNREANRALYMICLARMRRDRRTQEYVARRTAEGKSKREIIRCLKRYVAREVYRVLIS

SEQ ID NO: 265612 - protein, 418 aa, unidentified
MGKRKNRVCGADVHKDIIVATILNSDDTEFQEKFGTTTVELGRFRDWLIAHNCEQVAFEATGVYWFPVYDALSPTIDTIVANPWMIKGIPRNKSDTLDSKWIAGNCLDGKIKRSRVLPKDCRDLRTLTRARSAYTKTRTQLRNRIHKYLALCGITLSSYISDIFGKSGRHILDGLIESKDIDTILDSIPSGKVKKKRELINASLGKGLDGVSRMLVKDTLELLDHLEEKVNDTSLEILGRLQERAKDLAIVMSVPGIGFVSASIILAEIGDYHDFQTSEQLVKWCGLAPGLNESAGKKSPCGITKQGSKSLRTILVEIAQVVAKMSKNKLSRFFHRLRTRKNYNVAITALARKLISIIFHLLINQELYQENNYTPAKTKPIKKDLLCLSKEEQLKDGVAAIVDAFYHLKKKSSLEGGG

SEQ ID NO: 265613 - protein, 342 aa, unidentified
MYYVGMDCHITTLDFAVVNESGQLIKTKSVATGVNSFLEFVKTLPQPRTIYMEEGTLAGWALETCIRYKEKLVITDPMKNRWIGSSGQKSDPLDALKLAQLARGGYIKEIHHSVGQRQRFRELMEAYYDTVKDTVRIKNRIKAKFRQNGIRCTGATVYSKAYREEWKERLPQETTLRLIVDGLWRQLDQFERTAKEILVAARAQSKQYHEIKYFKAIPGIGFINAATISAILETPHRFATKRKVWMYAGLGLIKKSSGGKVYSEKLTRNYNHLLKYTTKQAAEVAIRATDNPFRQKFLNMTLIHGIAPHRAKLTIARDILATMWAMWRKGEKYNPQIRKAAM

SEQ ID NO: 265614 - protein, 346 aa, unidentified
MAQQMIIGIDLAKHVFQVCMVTPQGTLKTNTTVARGKLLTLIARQPPALIFMEACGGAHDWARRFRAMGHEVRLLAPQYVTPFRRGQKNDPNDALALTEAGQRPNIPTVPIKTIEQQDLQALHRVRERLVKHRTAVVNQVRGLLLEYGIVIPQGIARLRKRLPRVLEEADNGLSFQMRDLLQSLQSELSALDTRITDITGQLARLSHEMEACQRLQAMEGMGPLSATALVAALGNGHDFQTGRQVAAWLGLVPRQHSSGGTTRLGGITKGGNSYVRRLLMHGARSVISHVRDKPDAKSAWMRQLVTRIGVNKACVAVANKMARVAWALLHTGQQYRKPAVLSLQIE

SEQ ID NO: 265615 - protein, 423 aa, unidentified
MTVVYPICCGVDVHKTFFVATLITTEGIVPKYRKRRFSTFNNQILAFKAWLLENNCRDVCMESTGKYWIPVFNLLEDSINVTIANPKWVKTIKGNKDDAKDSKWIGDLFRIGLVPGSFIPNKDIRILREYTRYRFKLVSCKSSEKNRYQNVFTVCNVALDAVVSDMFGKSAASITDYIVNSDTFDSEYCVSLLQKSLKKKATEVVESIEGFQMAAPQKERTKMVKEHYDYLLNQIGKLDAAIGELATPFEPAINLLCTIPGIRCYSAITILSEIGTDMSQFDSSKRLCRWAGLTLGNNESDGKKKSVRITRAGVYLKPALVEIAHAAVKSNTTPYYRINYERISKRRGKKRAIIAIARMILTAVFYMLTTGEVWNPVDLSQIDMPHELQEKEIQKSLRRAAKLLVAHGLISSDAIQIPEAVPA

SEQ ID NO: 265616 - protein, 378 aa, unidentified
MGGDSTVVGLDTHKVAIHVAMLLPDAIQPVQWQIANEPAAVRHLARKLRRAAEGEVRCCYEAGPCGYALQRQLEAAGVSCTVVAPSLIPVKPGERIKTDRRDARKLAELFRAGLLTAVAPPTAAEEAVRDLCRAREDAVEDRLRARHRLGKFLLRRGLIWRGGKKAWTQRYRDWVRGLRFEDAADQAVVATYLLAIEQVEERVRTLEGQLETVAQAEPYRERVGWLRCFRGIDTVTAVTLLAELHGLQRFATPRALMAYLGLVPSEHSSGEAQHRGGITKAGNLHARRLLIEAAWHYRHPPAIGKALRQRRQGQPARLLAVADRAQQRLHRRFSRLSARGKMANKVVVAVARELVGFIWAALTPAAAVRTPRRAARTA

SEQ ID NO: 265617 - protein, 358 aa, unidentified
MAKLSLSRLAAFVLGFEATEFRVGIDVHKKSYSLALLRVDNASITWTGPARAETLLEPVKRFGLRIGAVVYEAGPTGFSLARRLERAGLRVIVVAPSRVPRPVRAGAKCDRLDCLKLAEYADHRRVRAIAVPSEREEAERSLLRRRHALADGRRRCKQRIKAHLLYLGVDAPEGLDRWSQASVASLGGLSLKPSARLTLESLMRELAFHNEELRRVEDQLLELMSSGSQGKPLRFLRTVPGVGFLTATSYLLELYRPARFRNARQVASYLGLAPMVHHSGGRTPRGRIAPVGQGRLRSLLIEASWVWKSRDPYAAKLYNLFLSRMGIAQKAIVAVARRLAIILWRLCVEQRAYRVNPV

SEQ ID NO: 265618 - protein, 359 aa, unidentified
MFSERTSVGLDVHARSVVAAAIDGVTGEVFRARLTPDHGQIVRWVRALPGTAAATYEAGPTGFGLYRALTEAGVRCQVAAPSKLQRPSGDRVKTDQRDALHLARLLRLDEVTSVTVPSIDQEAARDLVRAREDCRGDLMRARHRLSKLLLRQGIVYSGGQAWTGRHDVWLRQQHLPGAATRLAFDSDYDAVLTVAARRDRLDAAITTMAAESEFTPVVHRLGCLRGVSTLTGFALAVEIGDWSRFTGTSIGSYVGLVPSEYSSGASRVQGGITKTGNGHARRLLVEAAWHHQARYTVGKTMRDRWDLAPAPARARGDAGNRRLHARWVRFNDRGKRHVVANVAIARELAGWCWSLAVMD

SEQ ID NO: 265619 - protein, 354 aa, unidentified
MKKLVKQIVGIDVAQKELVVCLGRMTDEWCPELFAYKSFTNNVKGFTALENWVKKLANPDVPVRFVMEATGVYHESLAYYLFGQGYAISVVLPNKISNYFRTLEVKTITDQTASQAIALFGLERKLEDWKRPNVVFKRLRQLVRERDQLVQERTIVKNQLHAEKSEAEPGSSSMMRMKKRITLLDKQEMEIKEEIQSIVKKDTSTNDAVKLISTIPGIGLLTAVTVLSETNGFELIRNKRQLTSYAGLDVVQKQSGTSVQGKPRISKKGNKYLRKAMYLPALSVIRCDERFKAIFTRVVVKKGIKMKAGVAVQRKLLEMTYTIFKTNQPYDKDYFKKEVEKQSIKEDKIRAVIN

SEQ ID NO: 265620 - protein, 361 aa, unidentified
MSESMALVGLDVHQAQTVAAVLDPSTGELLVQRLRGEPASVVPVFLEELDRPVAAVYEAGPTGFALARVAEERGLDVRVVAPGSIPRAPGDRVKTDRRDAKRLVRLFAAGEVGFAFVPSETDERFRDLVRCIEDARKDLMRCRHRLSKFLLRRGQRFPSKAWTQPHEQWLGKLSFEDAVSKATFVDYLCAVQGLVQRRRVLIDALEAAVPESSHAKTVARLRCFRGIDTLTAAGLCAEVGDFTRFAKPALLSGFLGVVPSEHTSDEKRTQGQITKAGPPHARRLLVEAAHHYRHQPAVRLGLRARQAGQDPRVVQVAWRCQHRLHERWTHLAGTRGKRTGTVAIACARELACFCWEAATLD

SEQ ID NO: 265621 - protein, 417 aa, unidentified
MNKPLLVGVDVHRKQNVLAMMNSDGVEVAERRSVNNNRPGTRQTIEQLVELMATGDYDAIQVGAEATGYYWLHFFRMLQEDNFLKQWPLKLYPFNPKVIAHYKKTFVDLDKTDGIDAFAIADRLRLKRQLPTPFALDEPYLALRLLTRYRYHLIHDLAREKSYCLAILYLKASEYTHPDRQPFADVFGAASRAVLLEFASIEEIAALPFEQLQAWLDEKGKHRFPDPSDNTRKLRQVAQDSYSLSPTLLPSVNLILSTSFQQITQLQRAINRVDTAIAEQLQAIPQTLASIPGFGPVFTAGIIAEIGDISRFGFDQAKVAKFAGFKWHQHQSADFRAEETPLTRTGNRYLRYYFCEAANLIRVHDVDYKAFYQRKFREVRRHQHKRAIVLTARKLIRLVVRLLTTNQTYRPRRLAIA

SEQ ID NO: 265622 - protein, 423 aa, unidentified
MKIVHPICCGMDIHKNIIVATIASTDSNGITSYEQSTFSTMNRDVIKLRDWLLSHNCRHACMESTGKYWIPIWNILESEIQLTLAHPKYTKAIKGKKTDKKDSKWIADLFKHDLVPNSFIPPADIRQLRDLSRYRYKLTYIKVSEKNRIQNCFTLSNIRIDSIVSDPFGKSARLIIDDILHHPEFKPEDAITSLHGRLKKKEQLIIDALQDIYVSSDQHLKMDIAYQHLDQIDAYIKIIEQSLEKLVQPYDSLINLLCTIPGLQRRSSISIIAETGVDMSQFIDAKHFTSWAGLAPTNNESANKKKSVRISHAGVYLKPLLVQVALNSIRDSSNNYFTLKYNILKKRRGHKKAIIAIARMILVSVYHILLTGQPFHPYDFDEPKYPIFKDQSSSHSLNEEDAINYLKSLGYSVNKPELSSNNE

SEQ ID NO: 265623 - protein, 428 aa, unidentified
MDEVNRNRLEEFRQLRQEVRHSEEYLIVGIDIAKDRHHAFFGTATGKTLLRRLVFSNDHEGFRKLLDQGETLRVRHGLKRVVYGMEPTANYHKPLGEYLITLGRTVVLVSGVTVKRNRESLDGRWDKHDTKDSANVADLISQGKCLYYEYPSAELRGLRGLLSLKRRLKKQEHGYRVRIRNHLIAQYFPEMDRDYERLGAAGLSVVRWCFPTSQITELDVEPFIERVTSRRIRMETRRRLEGVWEKAGASIGCEGVPGVEHEAKVMVEGLRQIREVIKETEDKIEELCNRFPEYPYLLTIPGYGPDVSAKVLGAIGDPDRFQNGKQVLKLAGLDLSADRSGKDSDKAIPEISKRGKADLRYALYQAALIASTKNPDFMRYYASKLEGRQKEKGIQTKMWVKLSAKMLLIAWTLMKKKEAFDPAYLTAE

SEQ ID NO: 265624 - protein, 434 aa, unidentified
MNNTSPPYDLLIGLDRSDRKADLHLISVVDHQRRSQTIDTSPEALWEWLLQLRQEHPQGRIALCLEQPAAHLMAYLEAYEWITLYPINPITLQKYREAFVTSRAKDDAKDARYLAELLLAHHDKLKAWAPEDSQTRAIQQLVFHRRSVVNERVGLANRLKDLLKQYFPQALVLCGEDLWRPLATRFLLKWPSLQAVRKAKTEKLKEFYYLNGSRSAKLMEQRLALIEKAVPVTDQTAILDSFILRVQLICRQLQDVVATIKTFDQRIAEAFKEHEDHEIFSSFPGAGPVLAPRLLATMGAQRERFQSAGNVQNYTGVAPVTKQSGGKCYIHRRYLCPKFHRQSFHEYAKESILWSRWAAAFYLQQRNKGSYHHAAVRALAYKWQRIIWRCWQSRKPYEEKTYEAALRKSKSPLVKLFDQVDLGKSPFKNKVNKN

SEQ ID NO: 265625 - protein, 465 aa, unidentified
MSKLRKRNRARSSQGETRPFEGMRQVNPHAAGVDIGAHEIVACVPDGDDQQIVRTFGTDTVDLQTLADWFVDRGIQTVAMASTGVSWSPLCEEREARGLPCCLISAQSIKRVLGRKSDVLDCQWIQTLHSYGLRAASCRPAADLVALRTLLRHRAQLLEHRAPHVLHMQQALLQMHSPLSHALRDITGATGQRLIRAMVAGARAPQHWAALRNDRCKKDAHEIAMALTGTWREEHLFVLTQALALFDFSTTQLSACDAQVEHAFAVITPHVESTAAASVPARAAVPPRRKPHSPSKNAPEGNTRAHILRITGVDLVAVHGMSDSLAPTIVAEIGTDMSQWPDDTHFCSWLGLAPNNDISGGKVLKSRTMKHRNRAAQAFRMAAQSVIRSHCAFGAFYRRLTGRLGPAQALVATAHKIARTVYHMLKHRVPYYDIGAAEYNKRFREREMHSLQKQAAKLGYKLSPG

SEQ ID NO: 265626 - protein, 403 aa, unidentified
MNAVGIDVSKGKSMVAIMRPFGEIVSTPFEIKHTSSDINSLIELINSVEGESRIVMEHTGRYYEALAHELSAANLFVSAINPKLIKDFDNDSLRKVKSDKADSVKIARYALDKWQNLKQYSVMDELRIQLKTMNRQFGFYMKHKTAMKNNLIGILDQTYPGVNSYFDSPARSDGSQKWVDFASTYWHVDCVRKMSLNAFIDHYQKWCKRKKYNFSQSKAEEIYGKAKELVPVLPKDEITKLIIKQAVDQLNSASSTIEELRTLMNETASKLPEYSIVMNMKGVGPSLGPQLMAEIGDVSRFTHKGAITAFAGVDPGVNESGTYEQRSVHTSKRGSADLRKTLFQVMDVLIKTMPQDDPVYQFLDKKRAQGKPYYVYMTAGANKFLRIYYGRVKEYLATLPESN

SEQ ID NO: 265627 - protein, 372 aa, unidentified
MNYNTVYVGMDVHKESFTLCSYTIDEEKGSHFQRTEADYKNVLKYLEFLRTVYGNDANFICGYEAGCLGYTLYHQLTEHHVNCVILAPTTMLEQRSKRRIKTDRRDAEIIAKCLAQHNYSPVHIPTATDEETKEFLRMRDDHKLALKKIKQQILAFCLRHNYRYDGNSHWTAAHIKWLKSLKPEALYKEILDEYLLTYTTLSDKLERLDKRIEELASKDEYRESVKKLCCFIGIKTHTALSVLVEVGDFQRFASAQKFASYIGLVPGEDSSGDEQTRLGITKAGNRHIRMLLTEASQCYARGQIGFKSKELKSRQSGNSSQVIAYADKANERLRRRYYKMVLGKSKKHNVAKTAIARELACFMWGMMTDHIA

SEQ ID NO: 265628 - protein, 316 aa, unidentified
MPAPAFVGIDVSKARLDVHVRPAGTAFAVPNDPDGIADLVARLTPLGCGGIVLEATGGLEVPALAALAAAGLPVSAVNPRQARDFARACGRLAKTDAADAHTLALLADRLPPPVRRLPDDQTQALQALLARRRQLLEMRVAEQNRLATARGAAVRKDITDHIAWLTRRGDALDADLTAAIRASPVWRAKDDLLRGAPGVGPVVARTLLADLPELGALTGKQITALVGLAPVARDSGARRGRRHIAGGRATVRSALYMAALSAARYNPALRAVRDRLRAAGKAAKVVLVAVARKLLVLLNAMLRDGRPWNPELAKTA

SEQ ID NO: 265629 - protein, 300 aa, unidentified
MVWTSTKPRWWRAVSRQGKRRCARFRRRRVACLAADWLAAAGITDVAMESTGVYWKPVFNVLELTDLEVMVVNAQHIKAVPGRKTDVKDAEWIGDLLKHGLLKASFIPDRGHRELRELVRYRKSLTQQRNNLVNFIQKLLEGANVKLGDVVTDVMGKSGRAMLRAMVAGKTDSAELAELAKGSLRGKRAILEEALEGSIGAHQRFLLSYQLDAVDFFEQQIEGLSMEIEERMRPFEPAIQQIMRLPGIGRRSAEQILAEIGTDMSRFPTHRHISSWAKICPGNNESAGRSRSGWTGKGNP

SEQ ID NO: 265630 - protein, 421 aa, unidentified
MKQGAHEEFAAFIGIDWADRKHDVCLQAAGSAQRECFSLTHTPEAIDSWVRTLRTRFNGQPIAICLELNKGPLVSALCPYDFLVLFPINPLTLARYREAFTPSRAKDDPTDAALQLELLLTHRDKLQPLEPQSPTMRALAQLVEHRRRVVGDKVRITNRLTSTLKHYFPQVLQWFQDKDTPLFCDFLHRWPTLKAVQLARRSTLETFFRAHHMRYADVITQRIQAIKAATPLTTDDGVIAPHALLVQALVAQLRVTLQAITDFDTAIAQYAQSHPDFPLFQALPGAGPVFAPRLLVAFGEHRERYASAAELQKYAGIAPVTERSGKKAWVHWRLQCPKFLRQTFVEWAAESIRHSFWAQVYYQQQRDKGTAHQAAVRALAFKWLRILYRCWQERTPYDESVYLQALKRRGSSLIQQLAKAS

SEQ ID NO: 265631 - protein, 408 aa, unidentified
MEVLYPRCAGLDLGKDTLVACVRIHGREVQQECRTFGMTTRELLALSDWLSTHAVTHVAMEATGTYWKAVWHLLETAFTLVLANAAHIKGVPGRKSDVNDAMWIADLLAHGLIRGSFVPPEPIQDVRDLTRTRTQLVREIAQHTQRIQKTLDIANLKITGLISDVLGVTGRSILRALIAGETDPVRLADWARGTLKAKRAALIEALTGRVTAHQCRLLKLHLHLIEQLEAAVAELDQQLGDALAPFRDAVTRLDAIPGINTIVAQAIIGEIGLDMTRFPTHEDLVSWACLCRRLNDSAGKRKSTRTRKGGGWLKTVLVQAAWAASRTKDSYLRAQFLRLRARRSPKKAAVAVAASMLTAIYYMLRDGTEYRDLGANYFDTLDHSHLTKRLVTRLEHLGYRVELRKVAA

SEQ ID NO: 265632 - protein, 350 aa, unidentified
MKRILKQSVGIDVAQRELVVQLGRLYEDLSTEVYAHKCFPNTAKGINTLKQWVLRLTEPTVSIRYVMEATGVYHESLACYLTDHGYSVSIVFPNKISNYFRTLSVKTITDKLASEAITLFGLERNLEDWKRPKPVFKYLRQLTRERDQLVQERIMIKNQLHAEKAESDPNPSALRRKKQRIDWLKKQEGIIKEEIETLLKREKELKAELALLRTIPGIGTLTAARILAETNGFELVRNKRQLASYAGFDVQEKQPGTSVKGKTRISKKGNKNLRKAMQLPALTAIRYDQRFKAIFARLVSKHGIKMKAAVAVQRKLLEMSYTIFKTRTLYNKNYLVKEKVSEKEYQIQQV

SEQ ID NO: 265633 - protein, 404 aa, unidentified
MIFVGIDWSERHHDVCVMDAQGRVLEQGRVKDGVEGVAHLHEMVASRAKDPSEVAVGIEIDRGLLVGALVAAGYAVHAVNPLSVDRNRDRHRTSGAKSDPGDARVLADLIRTDRHLHRVVAGDTELAEGVKVLARAHQSLIWSRQRHLNQLRNALREFYPGALEAFGTDLASADALAVLGIAPTPAAGRSLSRARIAGALKKGGRERRVSERTEEIQTALQSSQLEGPATISRAYGEVVRSTVRIVAEMTSQIEALARELEARFEEHPDAEILRSLPGLGSVLGARVLAEFGDDPDRYADPKARKNYAGTSPITKASGRSRVALARFARNQRLADALQMWAFCSLTLSPGARAYYDAHRAKGQTHQRALRSLANRWVGILHGCLGHREHYSETTAWPAARDAAA

SEQ ID NO: 265634 - protein, 491 aa, unidentified
MSKNVSSDNGVEVIVQSEGNQGVEVQVLKSYGVGLDVHSRFVAVCVHVRNNNHVFRYMSDFDTDWNSLVAAKKWAIDIIREHSDPVPDLSQPLHYVLEATSTYHMPVLRAWSGIPSVINPMIAGATQKKTDDLDAERLSFHDLTGVWPESFIASDDLSELRVLIAERNRYSKLATQCSNRINNILVRFGITIGRGSSVTKNGDVRAIVENLASDSPSVFENICPDPLPVEIKNLIRKEYILYDHYVSEAISYLSRVRQKVYSMEWETKDGTIPGTEMVRILCTTPGIGEITCFTWLAYIGTPRRFPNSKAISAYCGLDPSLKVSAGKVTSVKKRSGCRTLHSILVTSADRIIRAHSEAFGRWGYLMAQSSGKWKKATNAVGRKLCTAMYHMMMTGKEFTYENYTMLQQASIFEIPVDELPLLNPDFKRYIKILKENDIHTSTDMITAYLSCTLGSTKGLGRKFFVTIRDYIQRQHHYQNEYKKLQQSVCSR

SEQ ID NO: 265635 - protein, 356 aa, unidentified
MQSKAISFKGQKVFIGIDVHKKTWSVTTLLEVGMPKTHSQKASAKELFDFLNRHYPEAEYHAVYEAGFSGFSTYYALKEYGIECSVVNAADVPTTQYESVMKSDPIDSDKMARALRAGMIRGIYIREKDNLDDRGLVRLRKSIQQDLTRYKNRVKHLLHANGVEIPEQFDRSPNWSKAFINWLRDDVVLLSSTRASLDMLIDQVETLRQNLLNVTKKVRNLRCKDEYAEKYDALTSIPGIGPICAITLLTEIYDIKRFKNERQFASYLGLVPTCHSSGEKASFGEMTFRGNKHLGPLLIEASWVAIHWDDALSVAFTNYRRKGLMPQESIIRVARKLSNIIFSMLKTGNHYAPANA

SEQ ID NO: 265636 - protein, 347 aa, unidentified
MRFYTKQHKFYCGIDLHARKMYLCILDETGEVRLHRNIITDREVFLKVIEPFREDVVVAVECMFTWYWVADLCTEHGIPFVLGHALYMKAIHGGKAKNDKIDSRKIAVLLRGGMIPMAYTYPAKMRATRDLLRRRNHLMRKRAELYAHIQNTKSQYNLPESLGCIAKPRNRQGIVERFEDPSVQKMIDTDLAVIQAYDPIIAKMERDIIRMANHHDPIAYALLKSIHGIGRILGLVILYEIENINRFPSVQDFASYSRLVKCAKESNGKKYGSSGKKIGNAHLKWAFSEAAVLFLKGNEPGKRYLDRLANKHGKGKALSILAHKMGRAVYFMLKNKKPFDQNKFLGL

SEQ ID NO: 265637 - protein, 416 aa, unidentified
MKKNSNSQTKSGQKTKPTKARGPVQRDSKEVMAELVAKLSERLEQKPAQEKAAEGKPKGAPAPNRDRLTVGVDLGDQWSNYCILGLEGETLAEGQLGTTREDVATFFRVLAAARVVIEVGTHSAWVREVVVGCGHEVLVANPRLMEGTKRRKRKNDRLDAQKLARLGRIDPQSLYPIEHRSPEVRQDLVVLRARDALVSARTQLINTTRGLVKSMGARLPKCSSPSFPDKVEETLPAEVREALLPLVRLAEELSDCIKDYDKRIEKLGREKYEHTELLRQVKGVGPLTSLAYVLTLENPDRFRKSRDVGPYVGLVPKQEDSGDSQPQLGISKAGDMMLRRLLVGSAHYILGPFGPDTDLRRYGLRLCERGGKNAKKRAAVAVARKLAVLLHRLWVSGEVYEPLRHGAPTAEVGEAA

SEQ ID NO: 265638 - protein, 347 aa, unidentified
MRFYTQQHQYYCGIDLHARAMYVCIKDQEGNILVHRNLPTKPERFLKVIAPYRDDIAVSVECMFAWYWLADLCAKENIPFVLGHALYMKAIHGGKAKNDRIDSQKIAALLRGGMIPMAYVYPPEMRSTRDLMRRRNHLMRKRAQLLAHIQNTNTQYNLPPIIENLSRKHNRTGIAERFHDDSVRKSVETDIDLINYYDRLLKELEYFIGKTAKKHDVNAYYWLRSVPGIGEILSLVILYEIHDINRFPRVQDFASYCRLVKPAKESAGKRYGGSGKKIGNAHLKWAFSEAACLFLRGNPEGKKYLAKLERKHGKGKALTILAHKIGRAVYHMLKRKAPFDMKKFFGS

SEQ ID NO: 265639 - protein, 343 aa, unidentified
MKIAILGIDLGKNSCSLVGLDGRGKAVKRRHVRPASIVGFTKSLPPCIIAMEACCGAHHLGRLLKAQGHEVRLMSPEYVRPYVKAQKNDDRDAEAIAEAATRPTMRFVELKSEEQLDMQTLHRARDRLVGERTALINQLRAILLERGIVIAQGRRNLERELDAMLFEEDGLAVSPRLRKLIEGIREEWRDLDRRIAAFDDEFAARAKTDEVARRLATIPGIGVLNATALAAAIGEGQTFARGRDLAAWLGLVPRQITTGGKPRLVGITKRGNCYLRKLLIHGARAVLPTLCKSETPLGGWLCALLARVHKNAVVVALANKLARIAWAVLRRKETFNPSATALA

SEQ ID NO: 265640 - protein, 343 aa, unidentified
MDPNSLYYVGLDVHKKSISYCVQRYDGTRVAEGTLASRRAALSTWAESLPGPWMGALEATLFSEWIYDHLKPLAFQLQVAHPARLKALVAGKKKNDRIDARILAGLLRCNLLPQVYLIPPQLRQLRQLLRYRHLLVRQSTQLKNRVAGLLMQSGVEYDKQKLHAQRYFHQLMEQLQDVPDSVVQLLQTSRHSLDFLKGLEQKIRQGLLEHESLKQRVECLQSIPAVGQITALTWALEIGEVERFTSISRACSYCGLTARLYQSAGKEHRRPLSKQRNKYLQTVLVEAAKMAPRWYPPFREISQTQQRRGHHNRATLVIARKLVAYLMAVDRRQQPFRIPASES

SEQ ID NO: 265641 - protein, 392 aa, unidentified
MIYVGIDVAKDKHDCFAMNSDGEILIENFSFQNNSDGFNLFFNSISQFNESFENIKVGLEATGHYSNNILNFLTSKGFNVFVINPLQTNLFRKGQSLRKTKTDKLDARFIATMLISNNLKPYSNLSYHISELKSLVRHRFRLIEERSKFKVSLSRLVTIIFPELEKIVWSISQNSVLYLLNELPSAKNISECNLKHLTNLLQKHSCGKYSRDKAIEIRDLAKISIGTHSPSISFELRQVIQTILFLQSQIDDIDKELKRLVVELDSPILSIPGISYVTAAFILAEIGDINNFDSPSKLQAFAGLDPSTYQSGKFNATHSVMVKRGSKYLRWALLTATRLVCMRDKNFNDYKKQKLAEGKHYFVALSHTTKKLIRVIYHLLKTNTTYQFQKVA

SEQ ID NO: 265642 - protein, 375 aa, unidentified
MEKLIRIGMDTSKSVFQLHGVDVLEQPALIKKLHRGQVIAFFKKLPPLKIGLEACGGAHCWGRELEALGHEVFLIPPQHAKAYLRRGKHDAADAEAICEAMSRPRTRFVPLKTSEQQAAQMLIGVRDQLIRRRTQLSNTIRGYAAEFGLIATTGLAKIEPLLIRIATDDTVPALAKELFDVLADDYRAVGLRIEKVEAQLMAFHRQDEVSRRLAQVPAIGPIGATLLSIKVPDAKAFRSGRDFAAWIGLTPKNHSTAGKYRLGAITRAGDAMLRRVLVVGAMAVIQQQKRRKEAPACWLGELLKRKSAMMAAVALANKTARIAWKLMVSGERYEPRPNQASVARCSAPSRPLRAANRGGLRPALTAPALRAPAYR

SEQ ID NO: 265643 - protein, 393 aa, unidentified
MPRKRILVKSIDTSISYQVIGIDLAKHLVSACLITGAGEIFGIDRLTYDDLLKSAERMSPTLFCMEPCPEVHYLAEKLQGYGHHTKVIDGAAVKEYIKTHFGGQKTDLNDAQAIAFLSLDTNLPEITPKNTSNSVLSSIQAVREQFRKEYIQSFVSLKGICQRWGLPISKGVMNKNKVEELVSESKKIPQEVKDWLLELLQSCRELQKRLNKISKYLKEYADNDEICQKIMSVPGIGPITATRLKATIGDIQRFEKPKSIVAYYGLVPKSKATGHNEKKGGITRRGDRVARSLLIEGAGVVLNLAAKGFLRSKPLNKWIEKKRKLKMPWGKLCCALAAKMLRIVRAILIQGTSFNAKIAGVARCSSPKESRNNVMGNNKLSEIPSPNGSVYIH

SEQ ID NO: 265644 - protein, 342 aa, unidentified
MSISYVGVDLGSSNFHQVAVNHSGRPTRNREFTTSEANLIKAFADLHGEIHVHLEAGELAPWASEIIRPLVTRVVCSHPQTNAWIARDRDKCDRIDAYKLASLLRLNEFKEVHYPREPLRRDFKTLVQHYDELTQQQARWKTKLKARLRMQGIIVRGEEVFSARGRQAVLEQVKSPVVRTAIKQLYAVLDQSVASQTEAQMLMLRAAQALPEMKILRTAPGVGPIGACRFSAYVHTPQRFSSTRKLWKYCRLSVSHRSSNGKPLRRPRLDRMGCGLLKDVSRKTFEAALRRRDNNGFKRAYYRALETTHDATRARLTVQRKIVSTLRAMWINQTPYCDELMR

SEQ ID NO: 265645 - protein, 385 aa, unidentified
MSELNDLSRSLTSLEQDKTIIAVIEMSQSSWLVAGIIPGIERHPLKKLEPSEEELVRLLMRWRTEATKNGHTITRFAVAFEAGRDGFWLARWLRARDIETYVIHPTSVAVSREHRRAKTDRLDTGLLKRVFIGWLRGEPDHCHMAAIPTLAEEDAKRPNREREGLVRERTRIVNRMKSCLARFGIRNFKPTLRKAPERLATLATPEGVPLPPNTLLELRRDMARLRFVMDQIKEVEETRAQRLEQAPQEKTHAMVRLIARVIGVGIETADMLVHEILSRQLRDRRAVARYAGLTGAPDESGNKRREKGLAKAGNARVRRGMIQLAWRFLVFQKDSALARWYRTRTESAGKKRKTMIVALARKLLIALWRLVTIGEVPAGVVLRAA

SEQ ID NO: 265646 - protein, 398 aa, unidentified
MTRKNTLKSLPTDTEFRVVGLDLAKSDVSVAAIPVDDNTPSLVDRMTYADLLDWAGKISPTLFAMEPCNGYSLLCLQLENLGHEIKVISGSTVSMWINTHLSGQKTDLNDAIALARLAVSDAELTPIRHKSITEIRIQTVQAVRQQLMSQRSKSIVSFKALAQQWGIPCAAGHRNLKKLRESIEAKVDLITRPVANAMLFLLDAVKSLDRQIGQLNQTLQELVMSDERRRLLQSVLGVGTQISARVITVVGNVERFNSPRSLVAYVGVAPRNFITGHKNLTKKKHGNCPDLSHKGQGKISRRGDKLLRSLFIQGAACLYMQFCKDQLPECQLKRWILKQLAMQKPYGKLIVSLAAKLIRIVWAVLTYREKFNIQKAGMTRSMWSEMALETPLNKEVPA

SEQ ID NO: 265647 - protein, 456 aa, unidentified
MRKPQVVPDEDHVVVYERVAAVDIAKASGVVCLRTPDPARPGRYLNQVWHDVTATRARITEAGRELLRNKVQMVTLESTSDYWRIWFYVLEGMGLAVQLVSASQAKNLKGRPKTDKLDAMWLARLTQWGMLRPSFVPPAAIRALRDFTRARLDLVRERTRCMQRLEKLLEDAMIKITSVASDGMKAKSVVAMVAALIAGERDTAAIADLARGPLRGKRAQLAEALDGMFDSHHGVIAQALLDQVAFLDQRITQMEDGAIEALAKIPESWGVDATGETGPRAGRAPDSPVLAAAWRLAEVPGISLMLAIALIAEIGLDMTRFRTADHLVSWTGLCRAASQSGTRQGKGKQKKGNSYARCLAGQAAIGASGTATFLGERYSRIARRRGGAIAQVAVARSIMIIVWHLLSDPQARYHDLGADWHQRRTSKDKKVRNHIRQLEALGLTVTVTADPEATAA

SEQ ID NO: 265648 - protein, 391 aa, unidentified
MIYVGIDVAKDKHDCFITNSNGEVLFKAFTISNNQDGFNILYQRIESVMEDVTKVKVGLEATGHYNYNLLGYLIDKGLTTYVINPLHTNLYRKSLSLRLTKTDKVVARTIAYMLMSDVNLKSYSNTSYHNEELKSLTRYRFDKVKERSKLKTSVSRLVCILFPELEKLVPTLHMASVYALLSEFPGAKHVAGAHLTRLTNLLSDASKGRYGKDTAITFREAARASIGSNMPAKSLELKHTIKLILELGSEIDEIENEIKIIMDEINSPILSIPGINYRMGAMIIAEIGDFSRFDSPDKILAYSGFSPSTYQSGQLDSAYSHMEKRGSKYLRYALYNAAKYVCHWDSTFAGYLAKKRAEGKHYNVAISHAVKKLVRVIYHLVKSNQQYIKVA

SEQ ID NO: 265649 - protein, 370 aa, unidentified
MKKNSSQKQNSGKSNPPREKEGFASYIGIDLGDKYCDVCVLDGQGEVHEQFRLRMKGPELEGYFTSIRRSRVAVEAGGQSRWVAEIIQRCGHEVYVSNTRKVAYIHQSDDKNDPGDAYKLAELVHFKPRLLHPIQHRSLEAQADLSWIRAREVLVESRTQLVNAVRGMSKAFGERLAKCSVESFTAKMAGQVPEAIRKAMAPLLETIDHLNEQIYYYDLMEAHIARERYPKYRLLEQVNGVGVHTALAFMLTIGDAERFAKSRQVGCFLGMRPKKQESGESKPQLGITKAGDVYLRKTLVNCAHYILGPHGKDSDLRRFGLRLCARGGKNAKKRAVVAVARKLAVLLHRLWVSGEVYEPLRNSKAREVAA

SEQ ID NO: 265650 - protein, 387 aa, unidentified
MRKPNDMSKCLAAFDQDSTLVAVIELGLKNWLVAGIVPGIERHPLKKMEINERALIELLYRWRDQARKAGHPIKRICVAFEAGRDGFWLARWLRSQGIECYVIHPTSVCVSREHRRAKTDRLDAEVLKRAFIGWLRGETNHCSMAAIPTLEEEDAKRPSRERETLIGERTRIINRVKACFVRLGIRGLKLNWRKAADVLAKLRTPEAKPIPPNTLDELKRDLARLLFVSDQIKEIEKTRLARLRTAPKSGPGAMVRILANVLGNGVETADMLVHEVFSRKLRDHRAVARYAGLTGSPDESGRKRREKGLAKSGNARVRRGMIQLAWRFLWFQPTSDLAKWYEARTSDGRKDTRKRMIVALARKLLISLWRLATLGEIPAGVVMRAAA

SEQ ID NO: 265651 - protein, 401 aa, unidentified
MEEFTEEEAEPVARVAALDIGKAELVCCIRVPHETIPGRRRQEVRTFGTTTRSLLELRDWLICLGVSLCVMESTSTYWKPPFYLLEDAIECWVVNARDVKNVPGRPKTDKLDAAWLCKLAERGMLRPSFIPPPWQRELRDLCRYRRTLVQERTREKQRAEKLLEDTQIKLSAVISDIFGKSGRDMLEALIAGQRDPAVLAELAVGRMRGKTSLLREALTGHFREHHGYLLKMMLERVDALTAQIDDLTRRIEEAIAPFARQVAQLDEIPGIGAIAAQEIIAEIGVEMARFPTPGHLVSWAKFAPQARQSAGKSKPGSTGKGNPWIGGTLGDAGIGAARTKTFPGSRYHRIARAAASSAPWSPSATPSWSSPGTCYLTPAPGSPTWAPSGTTASPRCAANAS

SEQ ID NO: 265652 - protein, 351 aa, unidentified
MIIIGVDYHPSDQYIAFVDTETGEYGERQLKHSDREAEKFYRELAARGVSVRVGMEATGYSRWFERLLAELGIEVWIGDAAEIKTKRVRKQKTDREDARLMLRLMRENNFPRIWVPSPENRDLRQLLWHRHRLVQMRTRIMNQLQALAMNEGQRRKKKLWSEQGRAQLEKLPLATWASRRRKDLLELLDRMNPTVEELTRAIEQEAKKWPEVLRLMTHPGVGPLTALAFVLIIGTPKRFKCGKQIGSYVGLIPSEDSSAGHQRLGHITKQGSSLLRFLLGEAAQAAARWDSDWRRRYVHLAMRRQRNIAKVAMARRLAVRMYWMWRNGWEYAEWVKFGSHAGQLGTRHGVN

SEQ ID NO: 265653 - protein, 349 aa, unidentified
MQQQSYVGLDVSLAETAVCIVDGTGKKLFEAKVPTDASIIARAVRKHALGKLERVGMETGTTAPWLWRELQAQDLPVVCLDTRHAHRALSLRVQKTDRNDAHGLAELVRLGWYREARVRSMDAQFMRALLLSRRQLMQVVRNVSNQLRGALKVFGLARTSTAGKGFRAKVQALAAEHEWARPVLDPLLAVLVATEEQLKAITTKLVRLARDDQDVRRMMTVPGVGPISALAFKAAIDDPKRFTRSQAVGPYLGLVPRVHQSGESEWTGRISKTGDELARTYLYEAAGVLLHQVPSWCALKAWGVRLARKNGLKRARVAVARKLAVLLHAIWVDGTQFEWRSGPPVPAAA

SEQ ID NO: 265654 - protein, 315 aa, unidentified
MDTQVFVGIDVGKDVLFVAIRPFGDNLEIANREDGIADLVKRLRFLRPTLVVMEATAGYETPVAVAIYRSGIPVVISNPRLVRSFARATGHLAKTDKIDAGVIAHFAELIRPEPRRLEDPDEERLGRLVKRRKQLLRMIVMEKNRVAKGVPEVRKEIQKHLDWLAKDLERIDQALNDFIQSSPIWSAKNDLLQSVPGIGKIGAQAIISDLPELGTLNRKQIASLVGVAPLNRDSGNFKGRRSIWGGRAHIRTVLYMVAVVASRCNPVIKEFYERLCKAGKPKKVALTACIRRLLAILNAMMRNGTRWGEFKPAIA

SEQ ID NO: 265655 - protein, 401 aa, unidentified
MKDPCIALDVSKGKSHCQGFITQDEPLGRAVMITHDLTGLESLIAMKNRLLKHHERIIFVFESTGIYHKSIQSYLDERHESYIILSPLEAAKIRKSRLRSTKTDVKDCRSIAEAYFLRDHRIHGKLDERDEKARTLNRHYGFIVRQIRHLKIQFRSVLDVVFPRFDLLYENPYRTIPFTLLKHYRHPGLIKSKRIGTIAKTLMKETTHRETFCLAEAQKIKDYAQRTQSGCLPEQQEVIILRNLALELEKKMKEAQSVLDDLEACVKENEVYKRLMTMPGVATNLASRITAEIGNINRFEHKKQLVAYAGTDPKIYQSGQKTGEHLPITKKGNKHLRSLFYMAARAAIDSKKPNTIKRFYASKTTQANPLERNAAIIASSNKMMHVLFSLCKNHQDYRNQA

SEQ ID NO: 265656 - protein, 387 aa, unidentified
MAIYIGFDVHSQHTTFHVINEQKEKVRKGRIPTQAEALVQFSCEMLALDPEVHVAMESGGQSRWVTRTLLGNGLDAHVFHATEVAAKRPKKEYKNDENDAKDLAHGMLQGMYEMEVYMPTDEAQQMRQDTVQRLHFVEMRSKSQILAKALLRGRSLPAPRCMDSHKAWDALVREHAGTELGFFLELHYQSYVHAEKMIDMIEERMHQSVAKDAAVHEDIELLTSIPGVGFLTAYALVGVIGELSRFPSAAQLSSYLGLVPRSYDSGSRRQAGHITRSGPWYMRKLLCQCAQQARKGTNPLAAYYYAVLGRSGSAKKAIVAVMHRITRIAFQLLKTRKRFDAGRLTIHSELDLKTGKLVWRMGHEPEPRRRSSSAATTGSLVAPEERK

SEQ ID NO: 265657 - protein, 412 aa, unidentified
MEVLYPCCCGLDVHKKSITACVLWAGGKGAVRKEKRRFGTFTPELLSLADWLRACGVTHVAMESTGVYWKPVWNILEGQFEIVLVNAQHIKAVPGRKTDQKDSEWIADLLQHGLLRGSFVPPRETRELRDLTRYRVSLTEECNRIANRIQKVLEDANIKLASVATDALGASGRAMIQAIIDGEQNPGLLADMAKGLLRNKISELQSALAGRITAHHRFMLAQLMDDLRHAEAKMERVEEEIKRHTFPFGDDVARLCTIPGIDRVTAWGLVAELGLNMDQFPSAGHAASWAGLCPGNFESAGKRLSGKTRKGNAFLRRCLANAAWAVSTKKSSYLSALFRRIAARRGNKRAILAVAHAMLVIAYCLLKRKEEYKELGVNYFDQLNAEGLRRSLVRRLERLGHQVTLQPRPVTG

SEQ ID NO: 265658 - protein, 344 aa, unidentified
MSEITTVGLDLAKQVVSLCGEDASGRVVMQRTLRREAVLAWFVQRPPCIVGMEACSSAHWFARELTALGHTARIIAAEFVRPFRLSGKNDTNDAAAICAAVRQPHLRFVTVKSVEQQARLVVHRLRQGWQEERTANLNRLRGLLAEFGRVYPNSAAAALAGARVALADETLPPALRRGLAQQLEHLRELDQHIDGCDREIAQDAASDPRARRAARLSGVGVLTASAVAATVIDPQQFRCGRQFAAWIGLTPRQYSTGGKPRLGRITRRGDTYLRGLLVQGARSALQAALRATPTRRTRLATWIVTTYERIGYHKTLVAIANKHARLLWVLLTRDEPLRAHAAVN

SEQ ID NO: 265659 - protein, 328 aa, unidentified
MQKNKEYVGVDVSKESLDMVVYSTGETRSFGNDDAGIAKATTWLKQVNSAIIVMEATGGMEVSLYIALQEANLPVAVINPRQIRDFAKSMGILAKTDKVDAKVLARYAATIQPEARPLPDEEARQVNTLVTRRCQLVEMITAESNRATIIRNKTMKQRIHAHIDWLKQELAGIDKDISQMIKENPVWHAKDELLQSVPGVGPVLSATLIAELSELGILNRKKIAALVGVAPFNRDSGKHRGERSIWGGRCRVRQHLYMATLSAVRFNPTIRIFYERLLANGKEKKVALTACMHKLLIILSVMLKHDSYWSCNYAIFNNICIPDAKTVA

SEQ ID NO: 265660 - protein, 341 aa, unidentified
MERQRHIGIDLHRNNFTCCLRLENGRNYLSEWKLEELERFTKKLRPNDEVAVEVTGNTRLFYEAVAPHVKRVVAVDPNQFHVISHSVKKTDPNDARNLALYLAKDLSPEVRMKDKTQAQLASLTQTRDTLVKLRTSLKNKINNILSAAGINLAKEALSSEKQLNEVLAMQFDPMIRIELKVIVEQIRSLNQSITELEKTIAEEGSKLAGHKNLTSIKGIGPLTGSILLSVIGDINDFADEGKLAAYFGIVPRVSRSNETDHSGRITKRGSKLGRTALVQCGLIAQRYSPYLKQFYERIKAKKGAGKAIIALARKLLGIIYRTLKNNWVFEDFPNFVLAEKA

SEQ ID NO: 265661 - protein, 316 aa, unidentified
MPEVVGIDVAKARLDVGVHPSGEAWAVDHDEAGIGALVERLAALRPGLVIIEATGGLELATVAALVAAAVPVQVVNPRQARDFAKATGQLAKTDRLDALVLARFGAALRPTPRPIPDAALQEVRALVARRRQLQAMVVAEKNRRASAPTRLHAQLDAHLAWLRRAVADRDRDRDRTIRGTPAWQASVTRWRSIPGIGPVVSATLLADLPELGTLTRQQIAALVGVAPLNRDSGARRGTRSCWGGRAHVRTTLSMGTVVATRCNPTIRSHYRRLLASGKPKKLALIACVHKLLTILNAITRHGSVWQPVPASPPVAA

SEQ ID NO: 265662 - protein, 476 aa, unidentified
MKSNRGAATPQGGTTKPRAWTPLLKRIQPDAAGIDCGATSHFAAVPADRDPQPVREFSTFTSGLHQLAEWLVQCGIKTVAMESTGVYWIPLYEVLEERGLEVVLVNPCHLHNVRGRKTDIQDCQWLQELHSVGLLHASFRPADEIVVLRSYMRHRQTLVEASATCINRMQKALIQMHLKLHDVLTDITGITGLAIVRDILAGVRDPNKLAAQRHGNCKASEQQIIAALTGHYRAEHLFALRQNFEGFEFYLRQIADCDHAIEAQLANLAQIRQPPTQTLPPAKSRPKPSKHEPRVELRAPLHRITGGADLSQIDGIGPYGALQLIAEIGTDMSRWPTDKHFSAWLTLAPNNKISGKRLLSSKTQPSANRAAAVLRRAAMSLTRSSTALGAYYRRLAYRLGPPKAITATARKLAVLVYRVLRGDLTYHDCGAAAYLELHRTRVINGLRRRAKELGLSLINLETGEVLDHALVPQPVS

SEQ ID NO: 265663 - protein, 555 aa, unidentified
MLTAPYLRPICLVLSALEKTHGLASRGPDTISTVIHQGPRRAVGSSPQATVNNRAVREKKSCEKLLRRGYNGSGRIAPGGSRSYGPQLTKLNRSEPARLPAPAWKSERTIAREAPGIRLTVGSAAVCGKKKGTPMTEFKELKHFAGFDWAKDHHCVVVVNIQGEIVSEFEFKHTAEGWKEFVDKLASLAGLAVAIETSSGPAVDQLLQRDFTVFPVNPAASESYRQRKAPSGTKTDHHDAWALADALRVDGQGWKALSPMDPLSLELRLLCKDEVALIEQRTQLVNQLQQALLEYYPAALEAFEDWTLGFTWDFVIEFPTAEKLAQAGPRRWQKFLHRHHLWRPGSVEKRLEVFGRARAFQGSAAVIKAKAQLAVSLSKLLRTLEQQLEEYRKQIQALFQSHPDHDLFGSLPGAGEVLAPRLLAAIGSDLKRYGGELSVLQAFAGTAPISFQSGKIHKARMRWACDKFMRSTVHLWAECFWKYSPWGTVYYRKKRQEGKSHACALRCLGQRLLKILFRMILDHKPYDADLHARNQEKHGSWVLSLLNNPAPKLCE

SEQ ID NO: 265664 - protein, 418 aa, unidentified
MADEIMAEETIRWFAGIDWGSAKHQACLLDGAGTVVGERAFAHGGAGLAALCDWLVSMAGDPGSVAVAIEVPHGPVVDALLDRGFAVYAINPKQLDRLRDRISVAGAKDDRRDARVAAAGLRTDPHLFRRVLAGDPSVIELREWSRLAEEVQQERVRQGNRVRQQLWRYYPQLLALSDDVTAEWVLALWNMAPTPAQAARLREATLARLLRQHRIRKLDAPAVLAILRQPAIPVAPGVTEAAVLHLRSLVARLRLANQEFRQAERKLEELCTALSETQPTAQDSGPGDATILRSLPGVGPVTLATLLTEATGPLARRDYPALRTLSGVAPVTKRSGKSCIVVMRYAAQVRLRNAVFHWARVAVLNDRRCRGRYEALRARGHSYGRALRGVGDRLLGVACVLLRRGMLFDPDYGSSASA

SEQ ID NO: 265665 - protein, 360 aa, unidentified
MTSTTVAHTPPVVTVGVDTHSDLHVAVALDQLGRRLGELTIPTTPSGYRRLEQWAQELGDLSALGIEGTGSWGAGLVRHLRAGGHRIVEVNRPDRSARRRQGKNDTLDAEAAARAVLAGMATSVPKAGEGHVEMIRSLQLVRRSAQKARSQATNQLRALLVTAPAGLREELRSLTLTELLRLAARWRSGAEPGTHLAVCKHALRSLARRHQQLTEEITDLDHHLTRLVTEVAPNLIAVKGLGPLTSAALLVAVGDNPDRLRSESAFAHLCGVAPVPASSGKTSRYRLNRGGDRQANYALYILAVTRMAWDPRTRAYAARRRSEGKTTKEIIRCLKRHIVREIYRLLVPLPTTPETATAPS

SEQ ID NO: 265666 - protein, 343 aa, unidentified
MDHFAGLDVSVKETSVCIVDDTGRIVREVKVASEPYALLEVLRKSGYRFKRIGLEAGPLSQWLYSALAEADLPVICVETRHMRAVLQAQINKTDRNDARGIAQMMRAGLYRPVHVKTLRSQKLRMLLTHRKLLQSKAIAIDNDLRGTLRNFGLKVGMVGTVKFEARIRELLGNLPDLAVLVEPLLVVRRVLREQLKILHRRLLGVVRDDDVCRRLMTVPGVGPVVALTYRATVDVPARFRTSKAVGAVFGLTPSKYQSGEINRTGAISRCGDEMMRVMLYEAAQIMLVRSAKWSWLKAWAMKIARHRGMKKAIVALARRLAVIMHRIWVDGTEFRWTREVAAA

SEQ ID NO: 265667 - protein, 346 aa, unidentified
MKINRVGVDLAKNVFQLHGADRRGETVWKRRLSRGKWLAVLCDTVEPGTEIGMEACAGAHHWARQLIQRGYPVKIIPPQFVKPFIKSNKNDANDAEAICEAMGRPNMHPVKVKTVEQQDLQAMHRIRDEIKGHRIAKANQIRGLVTEYGLVAPQQLPALRRAIPDWLEEADNGLTFLFRQLLQGLWGDLYALDQRMTELDKQIAVIAQEDPTARRLQQLRGVGPLIATALVATVGDARQYRKGRDMAAALGLTPRQHSSGGKERLLGISKRGDAYLRCLLVHGARSAVRTAKDKDDRLSRWIIDLQSRRHSNVVAVAMANKMARMAWAMMTKGIDYDPDLAAASVN

SEQ ID NO: 265668 - protein, 354 aa, unidentified
MSQTLKTAIAVGGIDIGKNSFHIVGLDQRGAIALRQKWSRGQVEARFANMPPCLIGMEACVGAHHLSRKLKALGHDARLMPAKYVRPYSKGQKNDFRDAEAIAEAVQRPTMKFVATKTADQLDLQALHRVRERLVSQRTGIINQIRAFLLERGVAVRQGLRFLRAELPRILARPSYVLSPRMVRVIEGLAGDWRRLDERIENLSGEIEAVARQDAGCERLMSVPGIGPIISSAMVAAIGTGDVFSKGRDFAAWLGLVPKQISTGDRTILGKISKRGNRYLRVLFVQAAWVVLIKPKSWERHGLKPWIEAAKKRLHRNVLAIALANKLARIAWSVLAHGRIFEARKIDEAAAQAV

SEQ ID NO: 265669 - protein, 364 aa, unidentified
MKRKVYVGMDVHKETIQIASLTSKTKDLVKEQQIKHEEVQIKKFIQKLKLEKSEIHCCYEAGVTGYPLYRYLKSLGVNCTIVAPGKIPRQSSDKIKTDKRDAIKLARLLRSGELESIHVPSEEDEAVRDYLRSRDSLRLDLGRNRQRLMKFLLRKGIKYSTTKHWTTSHYKWLNNLHFENEILQTTFNDYYSRVRVQEENLKAMDKKIQEIAESEPYREKVGILRCFRGVDYLTAMFLLSEVNDFKRFKTASSFMSFLGLVPGEYSSGSKRKQTGITKTGSPRLRRILTEAAWQHRFSGTGSKVVVARRVGQSALVVSLAEKASLRLHKKFKNLQLRGKSPQVMITAVSRELSGFLWAAMNLVV

SEQ ID NO: 265670 - protein, 343 aa, unidentified
MDHFAGLDVSVKETSICIVDDTGRMVREVKVASEPEALLQVLGNPIYRFKRIGLEAGPLSQWLFSALAEAGLPVICVETRHMRAVLQAQINKTDRNDARGMAQMMRAGLYRPVHVKTLRSQKLRMLLTHRKLLQSKAIAIDNDLRGTLRNFGLKVGIVGTVKFEARIKELVENLPDLAVLVEPLLMVRRVLREQFSVLHRRLLAIVRDDEVCRRLMTVPGVGPVVALTYRATVDVPARFRNSKAVGAVFGLTPSKYQSGEINRTGAISKCGDEMMRVMLYEAAQIMLVRLAKWSWLKAWAMKIARHRGMKKAIVALARRLAVIMHRIWVDGTEFRWTREAAVA

SEQ ID NO: 265671 - protein, 344 aa, unidentified
MTYYAGLDVSLRTVNICIIDEQGEYVTETKLASDVQDIVAYLDELGLDIESLALEAGTLTQYLTYGLQSAGFEVICMEARQVKGALSAMRNKTDKHDARGIAQILRSGWYSQVHVKSIESHHIRMLLSSRRAVLSKCVDLENEVRGLFKIFGLKLPPKLGHGAFDHTVRDIIETDQALSHALLPLLEARLALYRSFRELDNRTRKMANADPVCQRLMTVPGVGYITALTFKAGVDDPSRFKHSRTVGAHFGLTPRRSQSGEIDIDGHISRAGDADVRCALYTAANAMLTRSSRWSPLKAWGMKLAKSRGHRRAVVAVARKLAIILHRIWIDDSQFRWGTEVARS

SEQ ID NO: 265672 - protein, 348 aa, unidentified
MENIGIDVHKTSSQICILSDDGELIERRIKTTRESFAQLLGARLPARILLEASTESEWVAQCLEGLGHEVIVADPNFAPMYATRDKKIKTDKRDARTLCEACRLGAYRAAHRTSERQRRVRAQLSVREALVRTRSRSSSLIGALCRREGLRLPTGSSEAFITRVEQAELPECLRAEIEPLLQVMRAVDEQIEQADQRLAEIVKEDQVVKRLCTAPGVGPVTAVTLAATLDSARRFSGAKQVRCYLGLVPREHSSGERKLRGKISKAGNKRARSLLVEAAWTIMRSKRTETRALREWTAKVAARRGKRIAAVALARRLAGILYAMWRDETEYDPQLLGAKEAGERRMAA

SEQ ID NO: 265673 - protein, 423 aa, unidentified
MKKRIYRRMPVNDFQPDSISSADLGGKLVFAIDIAKVDMVAAIAAADRRVLRIISWKAPHQNRAVLDMLCHFRSQGISVEAVMEPSGTYGDVLRLQLERDGFPVFMVSGKRTFDGRELFDGVPSLHDAKAATIIAKLHADGLSTRLRDEGPDRRQLRAALAIMDLYQERYLQLVHRLESWLARHWPELPTLIELTSSSLMALLARIGGPADVAAAPDKATKVLLGISHRLLADDTVAAVIASAKASVGVPLVGLERDALMAIADDAYRAHRAFTTAKTQVDALAATTPAAALAPAIGHTTAAAVFAEVGDAKSYSCARAFVKAMGLNLKEKSSGRMQGQLKITKRGPSRVRQYLWLAVFRWIQTDAIANAWYQRKKKRDGGRSSRAAVALMRKLAKALFHVGRGAVFDSRRLFDIRRLQISEG

SEQ ID NO: 265674 - protein, 390 aa, unidentified
MLLLGVDIAKLNHVASLVDSSSGELIFSNFKFQNNILGFSSLLEKISKFSINEIVIGLESTGHYGENFINFFFQKGFKIAVINPLQTSHLRKANIRDSKNDRLDSINIAKALLFGEHRYVTQKNLSYFALKKLTRFRKSLIKQKTKTKIQLVSLLDIIFPELQYFFKSGIHSNAVYTLLKKYPSTEKIAALREKSLFSILNKASKGHYKEEHALQLKSLAKSSVGIKDTSVSMHIPQLIELIEMLDSQIKSIEKEIDSSIDEESPILTIPGINTVAAASILGEINDIDNFDSSSKLLAFSGLDPKIRQSGNFSASSCRMSKKGSPYLRYALIFTAWNLVRNSETFNRYYLSKRAQGKSHYSALGHTAHKLVRMIYTLLKKNISYQENLIS

SEQ ID NO: 265675 - protein, 354 aa, unidentified
MVAQISMRSIPSTPVRRVPSGATGKRIIAEPLACLPLSPETFLADPVFVGVDVSKSWVDFADTKGRKARVANEYSALKAVLAGPWGTCANMVCEATGGYERVLMRVASEVGAPLRRVHPNRARAFGQATARLARTDPLDARTLSKFAAFTVDEPWAPLPDPRAQELADMVSRLTQLTDLHQSEACRVKMIVGPAIKKSILAVMKAVKAQIDAMQDAIDAFVAADPMLSENAKILRSCKGVGPKSAQAILGMLPEIGQLNRRKVAALLGVAPIDKSSGSSINHASIAGGRKALRDILFMAALTASKHNPTLKAFYDRLRANGKPHKVALIAVLRKMITTLNAMINSRQMFNPDLT

SEQ ID NO: 265676 - protein, 278 aa, unidentified
MLYAGLDLSRKRLDVEVRDGDGAVVAVTAVSPDADGLRTLVERLEPFGRVRCAIESMNGARFVHDELELLGWQVEIADAQKTKGLAPLACKTDKIDAGVLAELCRLALVPAIWLPDPAVRGERERARFRLHLVRHRVALKNRIHATLIAFGKPCPVSDLFGVGGRRLLAQLALPEPWSHTVEASLRLVDQLDQQISECERDLRRRGADHPYVELLTTMPGVGWVLGYTIAAEIGTITRFSSPTKLCGYTGLCPRVYQSGSVDRRGPLAKNGPRYLRWR

SEQ ID NO: 265677 - protein, 406 aa, unidentified
MEVLIERCCGLDVHKKSITACIITPKGKEIRSFETLTRRLVDLVDWIKSERCSHVAMESTGDYWKPIDNLLELEDVKPVVVNAQHIKAVPGRKTDVKDAEWIAKLLRHGLVQGSYIPGREQRELREIIRYRRSIIEERSREVNRLQKVLEGGNIKLSSVASNVLGVSGRSMLEAMIQGETDPSTLANFAQKKLKAKKEQLKLALEGSLGPHQLLMLEKQLSHIDQLNELITELDEEVERRMSPFAEDLKLLDTIPGVGKRTAEQILAEIGTDMTRFPSAGHLCSWAGMTPGHDESAGKKRSARTRKGNKKLRSALVESARAAGRKKNTYLSAQYHRIAGRRGKNRAAVAVGHSILAIVYVLLTRRQAYKELGFDYFDQRNHEMVMNRSIKRLESLGYQVNLSEQLA

SEQ ID NO: 265678 - protein, 418 aa, unidentified
MNEEGNTRGARRYVALDIHKHYCVIAAVDRDGRVVLQAVRVEHADLEGWLKKNLRGTDHVVIESTTNAWHVYDLLAPLVERVVVANPIKVKQIAQARVKTDIRDTLILGRLLAANLVPEVWVPPVHVREMRQLLSQRRQLVETHTQIVNRMHSVAHRHHLKHERGKRFNEKTTAWQKDKRLSKIEQFQLELEMENRAYIEKQISRIGKEVAKMSHQKPWAQSMTYLMQLAGFGVITGMTVLAAIGEIQRFDSAQHLASYSGLTPGLEQSGTKHNEKGITKEGRKELRWAMVEVAQRAVKSDPRWTRKFQELEKRMHRNQAIVAVARQLLELVWYVLTRRQPYRHFSQERIAYKYLTWAWQMDEAARDGLTRQQFARYYLMRLGIGHDLTRIALDPTHPRRIATEAELLALRPELDHIE

SEQ ID NO: 265679 - protein, 410 aa, unidentified
MEVLYPHCAGLDVHKDTVVACVRHMVNGSVRREVRSFKTTTKELLALSDWLAGEGCTHVAMEATGVYWKPVWHVLSDGDFTLVLANAAHVKNVPGRKTDVNDATWLADLLAHGLIRSSFVPDEQTQEMRTLLRTRKQLVRECSRHVQRLQKTLEDANIKLDSVISDIVGLSGRRMIEALIAGETEPAALAAMAHRRIKATPDELEAALRGRVTRHHRFLLQLHLQQIDAVNAAIDQIDQEVDAYVEPFRATVRLLTTIPGIDELSACVILAEIGRDMSRFPTAGHLISWAGLYPKNDESAGKRRSTRMRKGAPWLKTTLVQCAAAAARKKASYLQTQFHRLRARRGAKKALGALAASILTSVYHMLISGELYRELGPHHSDQRAKAVNTRRLIMRLQNLGYAVQITPLAA

SEQ ID NO: 265680 - protein, 367 aa, unidentified
MKKISTVAGKQNRNISGQKQTIGFDLGDRWSWYCVLDEAGRVLLEQKVSTTPKAMPEVFGGMPRSRIALETGMHSPWVSRLLSELGQEVIVAHARNVRLIGESRKKDDRMDAQRLARLARIDPQLLSPVKHRSAKAQADLTVIRARAGLVRARTALVNTARGLAKSYGERLRGCNVRNMNPEKAEGLSPELQKALGPLLVASAALSEQIAEYNERIEQMAKESYPQTALLKQVKGVGTLIALTFLLTLEDAHRFQKSRDVGCYLGLQPGRRNSGQSEPQMHISKEGDPYLRTLLVQGAQPILGPFGIDCDLRRWGLKLAERGGRKGKKRAIIAVARKLAVLLHHLWVSGEGYEPLHNSNQRAMPAAA

SEQ ID NO: 265681 - protein, 431 aa, unidentified
MNQFGLVQAVDGLSQGVVVAVAPATHRRLDASFRQPLGIANADFLRAPIGVIDETSVAFGLPGIYGLLQCHDGKCNLSSTRLFHWKGKSMTIVTVGIDLAKNVFAVHGVDAAGKPALVRPSVARSNLLELIATLPPCLIGMEACSGAHHWAREFEKLGHTVRLMAPKFVAPYRLSGKRGKNDAADAAAICEAVTRPQMRFVPHKSIEQQGQLMVHRTRQGFVEQRTATLNRIRGLLSELGIVLPLKAATVRREALARLEELPGWANTVIGDLLSEVTRLDERITEYDRHIALMARHSTQAQQLMQLGGIGQTTAMALISTVGNGHDFACGRSFSAWLGLVPGQYSSGGKQRLGRITKAGDAYLRSLLVMGARAVLAAAMNTRTPKQDPISRWARSLAERRGYWRAVVAIAAKNARMCWAVLQRGDAFKMPA

SEQ ID NO: 265682 - protein, 376 aa, unidentified
MSSMKPPPMKLAEVVDVVIGVDTHVASHAAAAVDARTGGVLDQIIVTADAEGYAELVDFADRVAVEHAALRAWAIEGTASHGRGLAVHLDQAEELVVELDRPERARRRGGEKSDPLDAVRAAREAIARERVGTPRGAGPDPDQAATRQALAVRVAVRRSAVQAAADARRQLFSAILTAPEPVRTRFRGLTSEAIITRVLATRRSARWVSVDVETAHTVACLQIWARRIQDLTAEAAAHEKEITTLVRSWRPDLLDQVGIGPIVAATVLCAWAYPGRIHSEAAFAKLAGTSPVQANSGQVQTRHRLNRYGDRRLNCALHTIVITRQRHHQPTRDYTERRTSQGKNPREIRRCLKRYIARDLYRTLEAGDTQTPLDQT

SEQ ID NO: 265683 - protein, 462 aa, unidentified
MKGNAVKSKRVRRPRSPLALVNPDAAGIDCGLAEHYVAVPQDRDPEHVRRFRTFTEDLHRLADWLVSCGIKTVAMEATGVFWIPVYEILEARGLQVLLVNARHVKNVPGRKSDVADCEWLQQLHSVGLLRGSFRPAADIAALRSYLRHRESLVQAASTALQRMQKALVQMNLQLQVVITDISGTTGLRIIRDIIAGQTDPRQLAKHRNARCNSSEAEIAAALTGNYRPEHVFVLQQNLEIFDALQRQIESCDKRVEAHLQQLTAQAPHASKPIPAARPRRRSRGEPSFDLRIPLHQLTGADLSQIDGIGPYNAVRLISEIGTDMSRWATERHFTSWLTLAPNNKISGGRLLSSRTQPSTNRAAAILRVAAMSLSRTDTALGAFYRRLAGRIGKAKAITATARKLATLVYRCLKGDIVYKDPGAAAYDRHHRDSILRRLRHRAASLGFTLVNQQTGEILEGVS

SEQ ID NO: 265684 - protein, 416 aa, unidentified
MKVVYQTCCGIDVHKSFLVATIIKTTSGVDPSYQKKRFSTFNNSILQFKNWLIENQCRDVCMESTGKYWVPVFNLLEDEMNVTIANPKWVKAVKGNKDDTKDSKWIGDLFRLGLVQGSYIPCKPIRILREFTRYRYKLTSCRTSEKNRYQNALTVCNVALDSVVSDIFGKSATSVIDCLIEQSGNSINHEEIASRLLRSLKKKSDSVIESIEGYQMTDPPKYRMRLVRAHLDYITSTINDIDTMLDSLIAPYENAVQLLCTIPGVDRNSAITVISEIGTDMTPFSNSKRLCCWAGLTPGSNESAGKKKSVRITHAGVYLKPALVQVAHAAVKSDKSPYYKQKYERIMKRRGKKRAIIAIDRMILTAIYQMLSTGEAWNPTDLYKTDMPEPLKEKQKEKAIKQAKKLLIREGILSES

SEQ ID NO: 265685 - protein, 365 aa, unidentified
MSSVASPAGLVHLGMDTSKKTIVIATLWPGEEIPVTERIANEEAAVRRFFGRLGDPLVLRSCYEAGPGGYDLYRLLTSMGVACDVVAPSLIPKGGSDKVKTDKRDACRQARLHRAGELTPVRVPTQAEEAVRDLVRVRAALVDDRKRAQQRLTAVLMRHGSVWTGSYWTAAHRAWIDAQRFGEPALAAAIAHYRGTLATREAELAAIEAELAPWARRDPLAGPVARLGCYRGIAELGGLTLTAEIVDWRRFPAARAFMSCTGLVPSEYSSGERTRRGHITKAGSEPVRTTLIEAAWACQHAPAIGATLRRRQAGADPGALARSWKAQRRLNGRYRHLTSHGKARGEAITAVARELAGFVWAEMTA

SEQ ID NO: 265686 - protein, 339 aa, unidentified
MPLYTGIDLHSSNNYITIIDHQSKKVLKKRLKNDTRVILDVLKPYKEDIAGIAVESTYNWYWLVDELMADGYRIHLANPLAMKRYSGLKYSDDNSDALWLADLLRLNILPEGYIYPKETRPLRDLLRKRGHLVKIRTALLLSLQNIISRNRGIKVVSNELKKKTGNCSGQLLFDNEELSLAVTVSKESIDFMAKQIIRVEKAVEKKAKLEKEYQLLLTLPGVGRILGLTIELETGPINRFAKIGDYTSYCRKVTSQWMSNDKIKGKGNKKNGNKYLAWAFSEAAEYARRYNEACRRFYNRKLNQKNRMVAHNALAHKLARAAYYIIRDKVPFDEKKLFV

SEQ ID NO: 265687 - protein, 343 aa, unidentified
MKAVTTIGLDIAKSVSQVHGTDAAGKAAIRKQLKRARVLLFFSKLPPCLVGIEACASSHYWARELTALGHEVKLMPPAYVKPYVKRQKNDAADAEAICEAVQRPNMRFVPIKQPEQQAGLVLHRTRHLLIRQLTAVTNSIRAHLAEFGIVAPVGRRGVEALIALVTSGADERIPEFVRSCLMALSIQAQALKDQIRVLDRRLVDWHRSDETCKRLDAIPGVGPALATALVTSIADPKAFRSGRDFVAWAGLVPKRNSSGGRERLGNITKAGDRYLRSLFCAGALAVIKYALKHGAKHRPWLASLLNRRPTKVAAIALANKLARMAWAMMAKGERYKEPIALAR

SEQ ID NO: 265688 - protein, 364 aa, unidentified
MNKCHLNTELSSLEGTRFEFNRSTGAIKLGIDVHQDYYVVVKQEDGINPKPAQRFRKETFLHWAAKLKSQGGEIYAVYEACGFGFGLQRQLAALGIHCYVVCPQKLDERNKRVKTDGLDAKALCLKLDRFVQGNRDALALVRVPTEAEEQKRAIHRQREQLVKTRKVLEAQGRSLMVNHGIEPIQQWWKRRAFAQLSVPEWMKEVLSQSQPILLLLEEKIHALTVRLQAAADPKQPRGFGALTSVVIDREVGNWHRFSNRRRVGSYTGLCPGEYSSGNTRLQSCVTKHGNPRLRAALVEAAWRLVRFQPDYQGVKKWRHLLAKGALATGAARKKAIVAVARQLAVDLWRIRTGRVSAAKLGLII

SEQ ID NO: 265689 - protein, 360 aa, unidentified
MQVLGNEISQEQKLTIGVDLGDRWSFYCVLDEAGKIILEQKLATTPEATKQTFGKIPRSLIALETGTHSPWLSRLLTELGHEVIVAHAQKVELITKSNRKDDRHDARTLARLARIDPELLGPVRQRSAKAQIHLTVIRARAELVSARTALVNAARGLVKSYGERLPKCGTYQVNEKLAEGVSAELRDVLAPLLREVESLNERIKEYDERMEKIAKELYPEVFLLKQVKGVGTQIALTYVLTIEDPYRFQKSREVGCFLGLRPGRRNSGQSEPQKKISKEGDRYLRTMMVQGAHYILGPFGADSDLRRWGLKLAERGGKNAKKRAVVAVARKLAVLLHRLWVGGEAYEPLRNSQKAMRAVA

SEQ ID NO: 265690 - protein, 343 aa, unidentified
MDHFAGLDVSVKETSVCIVDEMGKIVREVKVASEPEALLAVLANPAYHFKRIGLEAGPLSQWLYSALAEAGLPVICVETRHMRAVLKAQINKTDRNDARGMAQMMRVGLYRPVHVKTLRSQKLRMLLTHRKLLQSKAIAIDNDLRATLRNFGLKVGMVGAARFEARIKELIQNVPDLAVLVEPLLVVRRVLRQQLGILHRRLLAVVRDDAVCRRLMTVPGVGPVVALTYRATVDVPARFRKSKSVGAVFGLTCAKYQSGEIDRSGAISRCGDEMMRTMLYEAAQSMLFHSTRWSWLKAWAMQIARHRGMKKAIVALARRLAVIMHRIWVDGTEFRWTREVAAV

SEQ ID NO: 265691 - protein, 344 aa, unidentified
MKSTTIAIDLAKSVFEVGISNQPGHVASSHRLSREQIGAFMANQPATTVVMEACSSAHYWGRTFQKLGHEVKLLPPLYVRPYVQRSKTDRADVKGMLEAWRNSAIRVVPVKTESQQQLTSLHRVRSGWIEARTMRINATRGLLREFGFIFPLGASALPGRVQELIEDSDTNLPMPLRELLHLLVLEIGELGKRAKAVEKQLESLSTQTPVVDLLRSVPGIGLLTSTALVGFVGEIGRFPSGRHFASYLGLTPREYSSGSRRRLGRISKQGDVYLRTLLIHGARTVLIRAKACSKPDRFQSWALELQKRSGHNKAAIAAANKLARIVWAVWKSGKPFESGSQALT

SEQ ID NO: 265692 - protein, 488 aa, unidentified
MAARRRNRQKPAPVAGPVEIPDAEHELVIERVAAIDVAKATGKVCVRLPGTSGHRVSRVWDVAATTGAVGELGEQLASLGVGRVTVESTSDYWRIWYYLLEAAGLSVQLVNARDVKNVPGRPKSDKLDAVWLAKLTEKGLLRPSFVPPAPVRQLRDYTRLREDLTRERSRYWQRLEKLLEDALIKVSSVASTLDTLSVRDMLEALIAGERDPRRLAELARGRLKTKRSALIAALDGRFDAHHAELARMLLDQIDTLTAQIGVLTARIEQLIAAMDEPDRGREHRGGVPNVAALTGDTAADVEPEHGGDGRSAGFDISVDTIAECTRLTAIERLDEITGVGERAAQTIIAEIGLDMTRFPTPEHLVSWAKLCPRTIQSGPISRAGRTGKGNPYLKGALGEAAAAAARTDTFLGERYRRIVKRRGKLKALVAVARSILRIVWHLLANPTARFHDLGLDYHTSRAVTERKIRNHIAHLTAMGFHVTLEPAA

SEQ ID NO: 265693 - protein, 415 aa, unidentified
MERILERCCALDVHKDQVTACVHVPDREGRRSELRAEFSTMTAELLALRDWLQGLGVTHVAMEATGVYWKPVYYLLEDDFELMLVNAQHVKNVPGRKTDVQDAQWLCQLLEHGLVRSSFVPPKPIRELRDLTRYRKSLTRERSREANRLQKQLEDANIKLASVATRVLGASGRAMLEELCQGNNDPETLAELAKGKLRRKLPALRQALEGRFSAHHALLVSHLLAHVDYLDETIESLSSEIEERLRPFERELDLLQTIPGVGRITAEVMLAELGPDMGRFPSDRHAASWAAICPGHDESAGKRRSGKTRKGDRWLRTALIEAANSAAGRTRGTYLNAQYLRLKSRRGHSKAIVAVAHSILISAYHVLERDQSYHDLGGDYFTSRVDTEHLTRRLVRQLERLGQSVTLTPMTAEAA

SEQ ID NO: 265694 - protein, 345 aa, unidentified
MQPMYYIGLDVHKRTISYCVKDVSGRVYAEGSVPATRFDLDHWKKTLPQPWTAAMEATVFTGWIYDHLQPHAAALKVAHPLMLRAIAAAKKKNDRIDAKKICDCLRCDFLPECYMAPTAIRERRRTLRYRNLLVRQMVQMKNKISMLLMEAGVSYNKQKLHKAGYFRELLATNPDINEGLGSLLRVCRETVVRLQRTESALVRSLERDSLLMDRVERLMTIPAVGPITALTWALEVGEVQRFSSFKKAISYCGLCGAEKSSGSTVQRTPLSKQRNKHLQTTLIEAAKMAPRNSAELAMLYDKEKQKGNANRATLAVARKLVAYLMAVDRGQRNFQVVETSNCIAA

SEQ ID NO: 265695 - protein, 315 aa, unidentified
MTTIGFDVGKLELVGVRIGKDAKVRERYYIANQPKAIDNLLSILGNKYKHIRIGSEATAEYHRLLALSCIDKNIPFCLINPIVTKQFTRATVRKKKTDVSDALVIAKLIRQGEGRLVSKDDFMASKAILRTANKLSSMHQALSLIKRRFEDNYHNETTTIKIVDHCLSVVEDSIGQIRKQAQAEDEELLKLLCSLPGVGKITANALIAEIGNIGRFKNSKSLIAYAGLDPRVRQSGKLLHHNTRLTKRGSPYLRKVLFTAASIGLRHDKELGDYYTKKRNEGRSYKEAVIATARKLTNRAYAVWKERRVYVKTQT

SEQ ID NO: 265696 - protein, 341 aa, unidentified
MDTTLYGLDIAKRVFQLYWIEPDSGEVCNRRFNRSALIQFLSNRPPGSVALEACGSAHWWARKLTTLGHVVTLLHARFIRPFVQNNKTDAADAKAIWTAAQQPGMRTVAVKTEEQQAVLALHRMRTALVKSRTAQVNQLRGLLYEFGIVLQGGRQAGLAQIRDRMAELETVVPVMLFDAMKDQLGRIRQLDLDLHGIERRIAEWKKQEVGCRAIADIPGIGLLTATALVATMGKAAAFRSGREFAAFVGLVPKQSGTGGKVRLGNISKRGDPYLRTLLIHGARAVLFAAKEKGAWADSLLQRRPINVAVVALANKMARTAWAILAHGEKYDRGYPGRIATY

SEQ ID NO: 265697 - protein, 355 aa, unidentified
MTMLADVVDAVIGGDTHRDTHTLEMTSPTGATISVCTVANTDAGFAEALTWIDDHAPGRRLIVGLEGTRSYGIGLARAAAAAGLMVVEVERPRRAERRRGKSDPKDARLAALSVLRMEPHKLPTPRADGDREALRILLSARRDLTVARTAQINRLRALLLGGDEADRVLAKGRLSEQWLGHIARRRGRAGCTREQAIRLGEARRLALAIRTAAAELVTNKTQLQTLVNILAPQLLAKTGVGPVSAAQTLVSFSHQGRCRNDAAFAALAGASPIQASSGRVKRHRLNRGGDRAMNRALHDITLNRWRVCPRTHAYIAKRRTEGKSDPEIRRALKRYIARELFKSLNRTTLAALDNT

SEQ ID NO: 265698 - protein, 347 aa, unidentified
MKSIKNQQIQQTTWVGIDVAKKSYDAAIYLPLGTDDKPRAVTELPKNSFERTEKSIEAFRYWTYQIRDKAGVPGGQMRIVMEATGRYSQELADWLRKEMPFTEPVIINPKIVSDYRKSLYTGNDTDAIAAAALARFGAERQPEETPESPVEYQHLREITRQRLKMVEQRTAANLRLEEIKDITVIAKIQQTLINVLNKSVEKLDFEIKKCVEKSDELRENIAYATSIKGIGLTTAAAVFAECGRLSNYSSRQLGAYSGLAPFNHRSGTSINYTHISRQGPKQLRQALYTPMTSLLKYNPEMRAFRQRLIDKGRTPMQARCAVMRKILILIRALVVNKTFYQENFHKI

SEQ ID NO: 265699 - protein, 341 aa, unidentified
MDHYAGIDVSLECSSVCVVDANGKIVREDKVASEPGVLIAWFRSLGLSLVRIGLEAGPTSQWLFAAMQEAGLAVELLETRHVCNAFKTMPVKTDRKDARGIAQLIRLGWFRPVHCKSMGAQETRAMLTARKLLQKKLGDVEASLRGILRGFGLKVGKTTPKRFAERIKELVAGHSTLEVLAEALLAAHAVLLREFNGFERRVRTMARHDAKSRLLMSTPGVGTIVALTFASAIDDPGRFKSSKQVGAHFGLTPMRYQSGETDYTGRISKAGDKGVRTALFESAHIILTKPVKGSALKSWAMRLAKRVGMKKAKVALARKLAVIMHRMLVDGTEFDFAAAAA

SEQ ID NO: 265700 - protein, 339 aa, unidentified
MKNKKYYIGLDVHKEKTTYVIRDKIGNILLEGETATLYKELSERLKPYLKPSEIGLEACTSYYTLYQGFLKNNYSIKVANTIQLRQLIAKNDKLDARRLSEMLRLGTFPTSYIPDEKIQHLRSLVQVRHSLMEEKTRCNTRIQAFLDRNGIVMPSYKAFTKKWRYALMQYMGSGDVSLELRHEYDHYVFLEQKTEQLDQELQGYAYKHWKNEYKIIQSITGFGPVLTCYIIANILPINRFLSNRKLRRYAGVIPTFHESGEKTSKGHIPKTSSRKLLRWALIQAANTVGKTDTKLGRYYRMKKRQKKNAGIAKVAVASSMIDIIYKVLTTKKPYNPKNY

SEQ ID NO: 265701 - protein, 411 aa, unidentified
MGTVIIGMDPHKSSATIEVVDQQERLLGGGRFATDTTGYRQMLAVGRAWAQRVWAVEGAGGIGRHLAQRLVADGEAVLDVPAKLSARARVFSTGQGRKTDATDAHSIAVVAVRAANLRPVTVDDAHVALRLLADRRDELAARRTQTVNRLHRLLLELIPGGAKTSLSTGQAKALLAGVRPRDVVGRTRRSLAAELIADLLVLDKKIKAADTELTDLVTASGSTLMALFGIGPSSAARLIGDVGDIARFPTKGHFASWNGTAPIDASSGEHHRHRLSRSGNRRLNRVLHIMALVQLRHDTDGRAYYRRKRAAGKTPMEALRCLKRRLSDAVYHQLTADAQAARRARDDHTEQPPTDVHPPHAAGPGGHPGATTGSSAAGSHPDTGTSEKSLPGPANPMLTTGRRARKSPSLT

SEQ ID NO: 265702 - protein, 347 aa, unidentified
MLVRKVTQHAARGKTRKVPAGVSAEYDHHIALDWSLKIMAIAHMVRRDQAPRVFERPASLKELKTYLGSLKGRVILTFEESGFAHWLYLELLDEVDRIIICDPFKNKLLQHGPKTDKIDARKLCQLLRAELLTEVYHSTSGLYELRLLVSAYDDVVRSGIRLLNQQAALKLTHRDTGKTASFIGGFLTENIDLYRKSKDQYERRFRDSARRNSLVRFQQQLPGIGTIGAVKIVACVVDARRFPYTGKYFSYCGLIKHEKLSGGRSYGRRKPRYSHMLKSVYKTAALAAINGKNPIREYYDHLLIQGVAKHNARHAVARYIARVSLGMLKTETRYEPYRWRNDQNQNI

SEQ ID NO: 265703 - protein, 395 aa, unidentified
MFIVGIDIAKRSHEAIIIAEDGQVVRKAFSFRNNCTGYNLLLEQVRRLTLVKSQIVFAMESTAHYWLALYARLLKDGYAVMVLNPIQSHSLRELYIRKAKTDARDSLIIADLVRFGRCKASNVPQDKILALRELCRSRAYLVDMAADLKRKLIALLDRIFPEYESLFESVFSKASIAVLRKYSTPQKVKNANLRKLTDILMESSNGHFGEWKAHQLKEAACSSFGIDDSGGVYSTLLGMFLEQILSLTAQADSLEKQISVFFQEFNNPLTSIPGVGTVLAATILSEIGDITRFSSADKLLAYAGLDPSVKQSGEFKSNQNRMSKRGSPYLRRAIWLASTVAVHRDPMFQTYYEKKISEGLHYMNVIGHVSRKMTAVIFAVLRDGQPYQPILQSAG

SEQ ID NO: 265704 - protein, 355 aa, unidentified
MNQEKYIGMDVHQATISVAVMDGKGKLIMECILETKADTILEFVHGLRGTVSVTFEEGTSAAWLHDLMKPHVAHLVVCDPRKNALLKDGSKSDRIDARKLAELLRGNQLHSVYHGEHGVRTLKELGRSYQTLTKDVTRVMSRIKALYRSWAIPCSGTTVYAARHRAEWLAKIPQPGVRLRAERLYQQLDLLQPVRQEARRDLLRESRKHEAVKRLQQIPAIGPIRAALLVALLQTPHRFRTKRQLWAYSGFAIETHDSGEYRYVRGKVQRNRERITVRGLNDNHNHDLKNLFKGAALSASTQPGPLHDFYTALVEKGMRPTMARLTLARKIAAITLTIWKKGVSFDAKQLHRQAA

SEQ ID NO: 265705 - protein, 407 aa, unidentified
MEVVYRCCCGIDVHKKVIVACLVNGGKQELREFGTTTSEIKTLANWLTESGCEMIAMESTGVFWKPLYNLFELMDLDAMIVNAAHMKALPGRKTDVKDAEWIADLLRHGLLKASYIPNREQRELREITRYRKSLTEERCREVNRLQKILEGANIKLDSVVKDITGKSARKLLQRIIDDDIPDSDEVSKLVHGRMRPKLEQIVASIEGITTPLQRKLLAQIIDHIDDLNRRIGELDELVQEYMAEYEAAIEAIDEIPGIARRSAEVILAEIGLDMGRFPSAAHLCSWAGVCPGNYQSAGRRKHGKTTKGNKALKTILTQCAKSAKTVKSSYFSAQYQRISARRGKNRATLAVAHSMLIAIYHILKNKTAFHDLGSDYYDSFNRDRKINSYLKRLKALGWEPDAIPSSA

SEQ ID NO: 265706 - protein, 460 aa, unidentified
MERAGYLGCDVSKGYCDFLLLDSKEAVLEASFNLSDTKAGRSDLKKLIEKWLASGITTLYCGVESTGGYENNWYRYLKSLGKNLPVKAARLNPKGVKAVSDATLRRTITDAVSAENIACYLIHFPAKVDYGDQRLTMHESEFKEGRQHVNYINMSNKQKVQLGNQMEKLIYQYFSEVLVYCRHGIPGWLLRLLVKYPCASAVIRAGEKKVAAVFGIGPKKAKSILAKASGSSQMVSFQVQHIISVTAREILHKQELIDEERLYLQGLYQSHKWVKLLCSIIGIGLNSAIALLLEIEDIHRFANAKKMASYFGVHPTYKQSGDGVWGKHMSKKGRGEIRAILYMACLSGIRYNPLLKNMYKRFRTTGMNHYQAMGVVMHKLLRIIYGILKNETAFDAAIDQENVLKAQEKQKQSEQLASELKKESLNSKFRYQTPSEDAPISRRKYQQNKKALSVPIQNIL

SEQ ID NO: 265707 - protein, 360 aa, unidentified
MDKYIGFDIDSKKTIACVVQKGKKEMYSTIGADVKSMRKYLQQQKADGSRAHLTFEISGQAGYIHDSLIDCVDTITVSNPSKMTWIYRTAKKNDRIDSRKQAVLLSIGEIPAVHMPSVEVRQWRNTILHRRNLVNKVTAVKNKIRAVLKSQGFTRAMHRGSLWNRSNRGWLKTLCEAKVSSTGLWCMNLYNSLEQLELLDGQVKRVTMYLDSYLSRQAGGGLLMSIPGVGPRTAEAVLAYTDDVRRFGNSKEYCSYFGLTPRLDESGTRRRLGHISKLGPSVVRWVLCESSWKVVRKSKGLRAFYEQVMSNGQAGRKKIAIVAVCRKLLSIMRAMMLTGEMFNEELVRRECGNERLRKVS

SEQ ID NO: 265708 - protein, 319 aa, unidentified
MKTTKCTVSKLREINVGIDIGKDSLDVCVYESDQYWQESNTEIGIRRLLKQLSRLTITRLLVEATGGYERALVEAAIEQSIPVVIVQPIQVRQFAKAQGVFAKTDKIDARLIAEYGVKLQPEVKTLPGHKVRRVKDLLARKRQLNEMRTQELNRAHRAQKVTATSHRRLLKLLDKEIAEINDKLAQEVTGIDEWQRTYDIIISVPGLGDGVAFTVLGELPELGQLTNRQIAALCGLAPFNRDSGRLKGKRRIRGGRAPIRTELYMAMLSAIRYNPIIKAFYQKLVAQGKHKKVAIIACMRKMMTILNTMIRNDQEWLMH

SEQ ID NO: 265709 - protein, 338 aa, unidentified
MALWSGMDLHSNNNQLTIIDEERRPVYKRKLPNDLEIITRELERFRAELTSVVVESTYNWYWLVDGLMDAGYRVQLANPSAIRPYSGLKHTDDADDARWLAELAQLGILREGYIYPKGDRPVRDLLRKRGQLVQQRTKNLLSIQTQIQRSTAQRLTADAVKQLNIDTLQTLVKNADVGLAITSNLCVLQCLSEQIAVLERTVVERVKVREEFRLLQTIPGVGRILALTNMLEVGDIHRFPTVGDFASYCRCVDSKRLSNGKKKGAGNVKNGNPYLCWAWVEAANFALRCRAPIERFYHRKLAAGHRVLAIKATAHKLCRAGYYVMRDHVPFDLAKAFS

SEQ ID NO: 265710 - protein, 338 aa, unidentified
MNKITTIGLDLAKNVFHAVCCDQYGKQVSKKMLRRSQVLMYFAQKEACLVGMESCASSHFWARELEKLGHQVKLIPPQYVKPYLRGNKNDYNDALAIAEAVTRPEMRFAAIKMQSQQDIQALHRLRERRIQERTALCNQVRGLLAEYGIIIAMGIRSVQRRIPELLEDAENGLSDVFRQFLYQIQKQLQELDAHIGFYNEILQVQNQQNEVCQRLQTIPGFGPIVASVFYSFVGDGEIYRRGRDVSAALGLVPKQHSSGGKDRLLGISKRGDRYLRSLLVHGARSVIIYAANKDDKLSRWANRIKGERGYNKAAVALANKMARIGWAIIAHKTTYQIA

SEQ ID NO: 265711 - protein, 446 aa, unidentified
MGGRAFPELGGRPNQKGVPAMDVRRSTTKALVAIDVAKLHRDVLIESPDGSQRRLRMANTRSDWEHLTAALQALKVPCVVAFEATGDYHRPLACFLDQQGYELRLVSSIAVARTRDALFNSWDKNDGKDTRVILHWLKTGGTQQFHDPLKTGHHDLLEMANTYQHITRRKVALWNVLVTHYLPLYFPEAENYSHSSRAEWFTQLLILAPCRAAVAKYSEAEFRKAARKIGGAKTDKMRWLSDFYHTAMSSVGLPVTEDSEAIRMFRLVLGEYLSICKLRSRLEKDIVERLQGYGDFQRLQTIPGVGPILALIILAESGNMRRFGHHKQFLKYCGLDLCTEQSGQFKGSSKLSKRGNARLRYAFWMAGAVAVRARQNTFRQKFERYIRRDPQNADLKRKAYTAVAAKLARVAYAIVKTGVDYRRFHEAASPGGGVRSPRSVEALATS

SEQ ID NO: 265712 - protein, 428 aa, unidentified
MNEEDRTRLEEFRQFKKEIRKSEEYLIVGIDVAKDKHHAFFGTATGKTLFKRLVFENDLEGFRKLLVQAEAMKVQGGLRKVVFGLEPTGNYHKPLGEHLMRCGHRVVLVSGVAAHENRKTVDGRWDSNDTRDAANVADLISQGKCLFYEFPVGGLQDLRNLLSLKRRLKRQEHGYRVRIRNHLVAKYFPELDRYFEQSEKTSLAVVRWCLDPSVIAGLEYPKFVEMVSSGPRRLSQENRLQAIWKMAVDSVGCEVGPAVAFEVQVMVEGLKQIRERIEDIDEKIYEICSPFPEYEFLLSIPGFGPDVSSKVLGAIGDPFRFQSCKQVLKMAGLDLSAERSGKTSQSAIPVISKKGKADLRYALYQAAFVASTKNQAFIVYYTHKLRGREREPGIKTKMRVKLAAKLLIIAWTLMKKKEPFNPDYLKIE

SEQ ID NO: 265713 - protein, 347 aa, unidentified
MQHYAGLDVSVKETSVCIVDASGRTCQEKKVVSHPEDLVTILSNPALSLERIGLEAGPMSQWLFDGLAKAGLPVFCIETRHTKGFLKASQTNKSDRNDARGIAHMMRVGLFKNVHVKTLTSQKRRALLTARSLLQEKAIALENDMRGLLRNFGLKVGVVSVGTFEEKVRELVEADADLLEIMEPLLAGRRKLREEFAKLDKKVVQEAKRDLVCKRLMTVPGVGPVVSLAYVATIDIPSRFHNSRSVGAALGLTPVLNQSGESKRIGHISLCGDAMMRSLLYEAAQTMLTRLVKWCWLKAWAMNIARRHGRKKANVALARRLAVVMHRMWVDGTEFRWTREAAGPMPV

SEQ ID NO: 265714 - protein, 344 aa, unidentified
MKITTIGIDLAKAVFQIHGVDERGKVAVRKQLKRSEMSSYFANLEPCLIGMEACGSAHHWARKLEGYGHTVKLMAPQFVKPYVKTNKNDMADAEAICESVSRPNMRYVPAKTVEQQAILSVHRARQGFVKARTAQGNQIRGLLSEFGIVIPQGIRSIMKQMSEILEDGENGLPGTMRNLLERLTENLKEMGRQVNELEKQIGLWHRENEASRRLAEIAGIGPITASAMVATVGNAREFKNGRQLAAWMGLVPRQNSSGGKQNLMGISKRGDTYLRTLLIHGARAVIRFAENKAEPGSWLRKRMARRNKNVAAVALANKNARIVWALLAKDRMFHPDYTPAAVAA

SEQ ID NO: 265715 - protein, 482 aa, unidentified
MTPRRQKNGRVVASPEPLRVANPHAAGIDVHAAVHWVAVPPNHVAAAKCMDAGAGDAANLPPHVRKFGTCTADLELLADWLHQCGITSVAMESTGVYWIPLFELLERRGFQVYLVDPRQTKHAPGRPKTDVLDCQWIQRLHSYGLLTASFRPEDQVVVLRGYLRQRHMLIRYAGQHVQHMQKALEQMNVKLPEVVSDITGVTGLAIIKAILAGERAPRKLAKLRDERCKRTEVEIARALQGNWREEHLFALKQALELYQDYEHLLRECDVKLEAHLATFADKSGGQKLEPKPRRCGRRHNEAAFAVRSALHRMSGHDLTVLEGIDDNTALVILSEIGMDMSKWPTEKHFTSWLGLCPQHQGSAGKIKSRRVRRGSNLAARAFRLAAQGCHHAKNALGAFYRRIRARCGGIKAVFATARKIAERVYRLLKYGTEYVRQGIEAYEKAYRERLLKGLTYRAKSLGYALIALPEAPPSTEATPATL

SEQ ID NO: 265716 - protein, 359 aa, unidentified
MMDDTEIATRRVIGGVDTHKDVHVAAVLDEQGRLLETTSFATNAFGYRDCYRWITSFGEVLAVGIEGTGSWGAGLCRFLRARDLNVVEVNRPNRQTRRRKGKSDTVDAEMAARAVLAGDATVTPKAGDGPVEALRQLRLARRGAIKARTAAANQMHSLTDTAPDELRAKLRGLTTLQRARLCTRFRAGDLLTPAGAAKRALRSVAARYLTLHDEIRDLDAAIRQLLNTIAKPVVDRYGFGYETVGTLLCAAGDNPERITTEAGFAALCGSNPVKVSSGKTKRHRLNRAGDRHANAALWTVVMTRLAAKHPPTVAYIERRTTEGLSKREAIRCLKRYVAREIYNDIRAIVLTPEAARTAA

SEQ ID NO: 265717 - protein, 341 aa, unidentified
MKQDISVLGLDIAKRVFHAVGLDDTGKIVFRKPLSRHALMPFIAQLPPVLIGMEACGGAHYWARRFRAHGHEVKLMAPQFVKPYVKSNKNDARDAEGIGEAVTRPTMRFVPTKEVDQQDIQALHRVRDRLMGARTALVNEVHGLLHEYGIVIPKGVSKFRQAVVGKLESEKDKLTPLSQEMFWKLVDEFAVLEKQLAYYQEKLEALATTHPECQRLMTIPGIGPLTATALVAAVSDASAFKNGRQFAAWLGLVPRQHSTGGKERLLGISKRGDGYLRKLFVHGARAVVRGVRDKTDRRSGWIRGLIARRGFNRTTVAVANKNARIVWALLTSHQDYQPATG

SEQ ID NO: 265718 - protein, 365 aa, unidentified
MKLLKSVTQSPSDRKASASRFVYCEQTIKLVFQVHGVDENSRAALKRKLHRHEVVTFFEELPRCTVFLEACGASHYWARLLTALGHEVKLIAPEAVKPFAKKGKKNDAVDAAALCVAGSRPEIQFVPIKSVAQQAVLALHTARSLLVKQQTMLANAIRGLASEFGLVVPQGLHRLEELMVQVTAEASVPAVGRQALIVLHAQLQAAAERIVMLEEQIVVHARQNASARRLATIPGIGPITASLIAATVGDNITAFTSARHFAAWLGLVPRQHSTGGKPRLGRITKAGNTEIRRLLVLGATSMVRRAETWNSAAGIWLRGVLARWPVRLTTVALANKMARIAWALLTRNDVYRAQGRSKVAAGAAA

SEQ ID NO: 265719 - protein, 323 aa, unidentified
MEQKLPTTPEAMKQTFGKIPRSLIALETGTHSPWVSRLLTQLGHEVIVAHAQKVQWITKSSRKDDRHDAQTLARLARVDPELLGPVRHRSVQAQLHLTVIRARAELVSARTALVNAARGLVKSYGQRLPKCGTYQVSEKLAEGLSTELRGVLVPLFKEIESLNEHIKEYDERMENIAKEVYPHVSLLKQVKGVGTQIALTYVLTIEDPHRFPKSRQVGCFLGLRPGRRNSGESEPQKGISKEGDRYLRTMMVQGAHYILGPFGEDSDLRRWGLKLAERGGKNAKKRAVVAVARKLAVLLHRLWVGGEVYEPLRNSQKAMQEVA

SEQ ID NO: 265720 - protein, 386 aa, unidentified
MQKLNDLSRSLTALELDSTLIAVIEMSLSSWLVAGIVPGIERQPLKKLAVDESALLKLLYRWREEAEKAGRRIERTAVAFEAGRDGFWLARWLKAHSIEAHVIHAASVAVSREHRRAKTDRLDSELLKRAFLGWLRGERDHCKMVAIPSIKDEDAKRPNRERESLVGEQNRIINRMKAALVRLGIRGFNPKLKRAAGRLDGLHTPEGEPIPPNTLAELRRDMERRRLVSNQIRQIEEARLERLEQAPGDGPHAMVRLLARVIGVGIETADMLVQEVLSRNMRDRRAVARYAGLTGSPDESGRKCREKGLARSGNARVRRGMIQLAWRLLMFQKNSALAQWFRARTENARGTRKTMIVALARKLLIALWRLVREGVVPDGVVLRPTQ

SEQ ID NO: 265721 - protein, 345 aa, unidentified
MEPMYYIGLDVHKQKISYCVKDPSGKLHVEGWIPATRHDLDCWMKNLPQPWSAAMEATMFSGWIYDHLKPYAAGLKVAHPLMLRAIAAAKKKNDRIDASKICDCLRCDFLPESYMAPTAIRERRRTLRYRNLLVRQMVQMKIKIGMLLMEAGVTYNKQKLHKAGYFRELLAGNPNIDSGLRSLLRQCRETVVRLGKMETALIHSLQQDRLLAERVERLMSIPGIGPITALTWALEAGEVQRFSSIKKAISYCGLCGDQKSSGNSVQRTPLSKQRNKHLQTTLIEAAKMAPRYNSTLAQLYNKERQKGNVNRATLAVARKLVAYLMAVDRGQTHFLVLDRDTCAAA

SEQ ID NO: 265722 - protein, 352 aa, unidentified
MEKNNKLDFGGQHIYVGMDVHKKSWSVSIHTEQFEHKPFTQPPEVEKLTYYLERTFPGATYHTVYEAGFSGFWLHDQLRAKGIDCMVVNPADVPTKDKERAGKRDRVDCRKLARGLRNGEINGIYVPPRVKVEDRTLVRTRQSMVRKQTRCKNQITSILFFYGIVIPEEGRWSRRFINWIESIRMERASGDFALKAHLEELKHLRQIIANLNKAILSLSRTEEYMADVLLLKSVPGISTLTAMILLTELADLSRFSSLDKLASYAGLVPDIRSSGETEYSTGITFRRNAALRALLIESSWVAVRKDPALTMAFNKLSARMKKTKAIVHIARKLLNRIRFVFKNRQEYVPAIV

SEQ ID NO: 265723 - protein, 373 aa, unidentified
MNTIYIGVDFHARQQTICYLTTETGELITTALKHEPKTAVRTFYEQFSGPVIVGLEASGYSPWFERLLEELGHQVWLGDATEIRRRARWRQKNDRRDAELILDLMLHDEFPRLHRPSLQSREVMRMLRYRQKLIKMRTMSKNSLQSLALQSGIARRGRLFTREGKAELEAAVMSPAMQWQRAHWWQLLEALNQQALEAMSWLKGASQNDVSIARLRTHPGIGLLTSLCLVHTLQPVARFRNPRKVAAYAGFDPMERSSAERKHFLGISKAGSRVLRYLLVEAANIAVRKDEELKRFYQRLAQRRGRPKAKVAAARKLLIRAYIMMRDEIDYAEFRRRAVAARLARLRQGPPIPAALIGQPASTARQESPPRGK

SEQ ID NO: 265724 - protein, 484 aa, unidentified
MAKRKKSTFERLTKGPLNRKQRRELERRLVSDDPGLRIVHPNAGGIDVGNESHFAAVPADRDAQPVQEFGSWTADLHRMGKWLQSCRIDTVAVQATGVYWIPLYDILTEHGIRVVLVNAQHTKNVPGRKSDVQESQWLMKLHTYGLLRDSFRLAENLEGVRTIWRLRDRHVKEAGRAVQHMQKALTKMNIQLANVISDISGVSGQAIIEAILKGEQDPYRLADLKHERIQASREEVARSLEGNWRKDVLFELQQAVDSYQFAHRQMQECDGKLETYLAMLPTRVIDVADQPNLQPTAVARKAQKPKKPKGNAPAIDLAAELKRISGVDLTSIDGIDVMGAQTILSELGTDLSAFATENQFASWLGLTPSKDISGGKVIGRSRRKVQNRVAMSLRMSASTLLNSKSYLGARYRHLRKHLPTFAAAVKAMAHYLALLVYRMLTKGQAWVDRGAAKFEQKRTEWELSSLKSKALANGFKLVPIDEAH

SEQ ID NO: 265725 - protein, 308 aa, unidentified
MAAAGNKNFKQKLTVGLDLGDRSSWYCVLDETGSVLLEQRVSTTPKAMKEVFGAMPRCRVALETGMHSPWVSRLLSELGHEVIVAHARNVRLIGESRRKDDRFDARTLARLARIDPQLLAPVKHRSAQAQSHLMVIRARAGLVRARTSLINTARGLTKSYGERLRGCSPRNLNAEKARQLSPELQAALEPLLAAIESLSERIYEYNQQIGKIARESYPQVARLQQVKGVGTLIALTYMLTLEDPQRFRKSRDVGCYVGLQPGRRNSGQSEPQLHISKEGDPYLRTLLVRERTTFWGRLERTAICGAGG

SEQ ID NO: 265726 - protein, 339 aa, unidentified
MAIVGGLDVHRRQITFDWLDSESGEVRRGRIPGDRLGFRAWLDQLEQRPADFAVEGCTGWRFVVEELERAGMGAHLAEPADTQALRGPKRHAKTDGIDARHLRDLLRAGTLPESWIPHTHIQEMRARVRLYKELIELRTAWVQRIHAVRYHQGLPTLSPSAAPGRRRYLDGEEALSPAGRDWVAAALRLLDHVDGELAQLRALFTRFARQQPGCRALSEEYGVGPVTAVAIWAEIGDCRRFSSSREAVRYSGLDITVYSSDAKRARGHLSRQGSPVLRWALFEAAQCGARPSSPDHAYHAAVKERAGSKQAALSVARKLARRAHHRLRSLGDQAMVPVG

SEQ ID NO: 265727 - protein, 317 aa, unidentified
MTKDSTLTAGIDTSKAKLDIAIHGHTECWQVANLLSGWRSLAVQLKKAGVTRVGIEATGGYERGVVLSLRAAGFTVLVLQPMQVRAFARVHLRRAKNDTLDAALIAACSAAIDPPGIAPDARLADLAGHLTFVEQTEEDIARLKVRLEHVDDVRLRRLLIADIARLKARRAAELTRIARAIRIQEDLGRRLDLVLSVPGIGERTALALIIRMPELGRISREEAAALAGLAPFDHDSGTHKGQRCIAGGRARLRRSLFAAALPASFRWNKALVLLYARLIGRGKAHNAALIACARKLLIYANTVVQRGTPWVEKPAAT

SEQ ID NO: 265728 - protein, 369 aa, unidentified
MEQSIIYVGLDVHKDTIAVALAEAGLRGEVREHGTISNTPAALKALTEKLVGKKRGLRFCYEAGPCGYGIQRQLGAMGHECAVVAPSLIPRKPGDRIKTDRRDAINLAKLHRAGELTSVWVPDQAHEAIRDLVRARQAAVRNLRQARQQLSGFLLRHGQHYQRPAWTLLHRRWLASLKFDQAVHHIVLEDCIAAIEAAAARRDRLEAHIEAALPEWSLAPVVEALQALRGVGLVTAATLMAELGDITRFSNPRQLMAYLGLVPSEHSSGRTRRQGGITKAGNGAARRMLIEAAWSYRFPARISREQLLRQERLAKPIRDIAWKAQERLCRRYRALARAGKLPTVITAAIARELAGFIWAIAKQILSAAC

SEQ ID NO: 265729 - protein, 383 aa, unidentified
MALSMTDAGRRRLWGPVEFAMTRRGLVETLDGVCGVLPAGGVAVKVGIEAAGHYHRPLLSPAVWPAGWEVLQLNPAHVAEQRRVQGRRRVKTDAFDLEAITELVLAGRGDPVTVADPVVIELVAWVAHRNRRVQTRSATKNQLLGQLDRSFPGLTLALPDVLGTKVGRLVAEHFADPARLTSLGVARFIRFAATRGLQVSRPVAERLVAAARDALPTEQAAVARQVLAADLVLLGDLDAQITAVDAELGRLVAASPFAILTSVPGWGVVRAAGYGAGVGDPARWPGHRQVYRASGLSPAQYESAGRRRDGSISREGSVELRRALISLGIGLWHSDAPARVYAATLRARGKEGAVIACALAHRANRIAFALVRDQVGYDPTRWV

SEQ ID NO: 265730 - protein, 349 aa, unidentified
MEQIGIDVHKNESQICLQTEQGEILEQRIHTRRDRCAAVLGPRPRARLLIEASTESEWVARCLEELGHEVIVADPNFAPMYATRSRRVKTDRRDAQALLDACVRGSYRRAHRTSEAQRQVRALLTVRENLVRTRARQIQVLRALTRREGLRVRSGEAASFERRLGELDLPECLRAVMGPVLATLEPINQQVEAAERAIQQVVQGNALVRRLRTAPGVGPITAVAFVAALDGVERFAGPHQVECYLGLVPREKSSGERQHKGAITKAGNPRMRWLMVEAAWRVLISRDASGEELRRWAQRIAVRRGRRIAVVALARRLTGILYAMWRDGTDYDPRRSCGRATPGATMAVA

SEQ ID NO: 265731 - protein, 477 aa, unidentified
MAKTKSTAKQSSPRFSSQFKSSRQKKSKNRVPLKPQDWKLGLEVVHPMAAGIDVGNSEHWVAVPPHLDAEPVRTFGCFTADLVALADWLEKLGIQTVAMQSTGVYWIPLADILAERGIRVFVVNARDTKNLPGRKSDLQECRWLLKLHVYGLLHNSFRPAEEILQMRAYWRQRQQHVADAARCIQHMQKALTQMNVQLANVISDISGATGQAILGAILEGERDVRVLAKLRDPGVKASEEEVMRSLEGNWRKELLFILRQECETYQTFQKKIGECDQQLQAHYQTMESKADPKNLPPCPREKRPRGNVPKCFDLRSELFRATGVDLTAIDGINVLTAQTVVSELGNQMDRFETEAQFVSYVDLAPNNKISGGKVVGREKKKKRHRVGLALQQAATSLLRSDSYLGSQYRRLRTKLGTPKAKKAMGNRLGRIIYRMLKFKEAYVDKGKEFYEQKYRQIQLRMLQRKAAELGLQITEAT

SEQ ID NO: 265732 - protein, 437 aa, unidentified
MKSTASSPTEAVAAWIGLDWADQQHVGCLYDVASGQQESFTLESSAEAIPLWLAQLRQRYGGRRVAIVLEQRRGALIHALLGCDFVMLYPINPQSLAKYRQAYFSSGAKSDTEDAPLLMELVRHRPDRFHPWQPDDAETRSLQLLTEARRRWVDQQTALTNQLTQLLKGYYPQALELAGELSSPGACQFLKRWPTLAALQKARPSQIRQHYQKYGRLSAEELDRRLERIRQAQPLTGDSAVVLHGSLMLRAVVAQLLPLFDTLREFEQQIAALFAQHPDRPLFDHLPGAGKVLSPRLLAAFGTQRDRWQQAGEVLTYWGIAPVTEQSGRSRWVHWRLACPKFQRQSWHEFAAHSRQHCGWARAFYQQLRARGKGHHAALRALAYKWIRILFRCWQTRTPYNEQIYLKALKQKNSPLLAAMPALSPDTVASPAAGGSL

SEQ ID NO: 265733 - protein, 338 aa, unidentified
MQVTSIGLDIAKSVFRVHGADAKCNAVIRRQLRRHDLLRFFANLEHCLIGVEACHSSHYWARELIALGHEVRLIPTQYVRPFRRGGKNDANDAEAICYALSRPSINTVAVNSAEQQAIQSLHRSRERLIRQRTTTANQIRSLVAEQSVVCSQGIARLRRCLYDLVADEGRATPLLRRLICQFLEQLSALDQWISELDAKIKELATHSEVCRRLTRLQGVGPVIATAVVGTDGNAHVFKNGRQFAASLGLVPGQRSSGGRVQLLGITKRGDTYLRKLLVQGARAIMRVAGRHDDRLSNWVRELIARRHKHVVAVALANKMARTIWSLLVKGEQFDFVRG

SEQ ID NO: 265734 - protein, 358 aa, unidentified
MEQSARLNFSGEDIYIGLDIHKKNWKTSIFTKDFEHKTFSQDPEPDILVNYLHRNFPGANYHAAYEAGYCGFWIHESLKAQGIKCIVVNPADIPTKDKEKKRKNNRVDARKLARLLRSGDLEPIYVPSREALEDRSLIRVRRNAVKDQTRYKNRIKSLVSSYGIKIPERFEEGNWSGAFIKYLQTVCFHRHTGKEAFDYYIDELKRVRQRIAYLNREIRLLAQEDLYRDKVRLLKTIPGIGTLTAMILLTELVEINRFKSLDHLSSYIGLVPCEDSTGDDDDENITGITPRSNHYLRSILIESAWIAVRKDPGLTMCYNELLKRMKGQNAIIRIARKLLNRIRYVLKNNQEYLMAVIE

SEQ ID NO: 265735 - protein, 423 aa, unidentified
MMKLKYSICCGLDVHKNVIVATIVTTNKDGISEYLQKSFSTINSDIQRFHNWLIENNCYHVCMESTGKYWIPIFNYLENDIDVCLTHPKYVKAIKGKKTDKKDSKWIADLYKFDLVRCSFIPPKDFRQLRELSRYRFKLVCMKSSEKNRIQNCMTVSNVGIASVLSDPFGKTATEIISYLLEHTADSMDEKAVRKLIKKGAKSKSDEIIEAIKGYTIETDQAKKLELARGHLEYLDDMITQTEVELYVRIKPYYEFVEFVSTMPGMTELSSTIVLAETGVDMDIFDDAKHLCSWCGLSPANNESAGKKKSVRIAKAGDYLKPMMVQCALAAIKSKKQPYFAIKYGRIKKRRGHKKAIIAIARMMMVCIYHMVSEKKPFIPTDYEELMNPQNHVERVVLNENNVFAYLESLGYDSSKLVKRNDN

SEQ ID NO: 265736 - protein, 343 aa, unidentified
MDHFAGLDVSVKETSVCIVDETGKVIREVKVASEPEALLAVLANPAYHFKRIGLEAGPLSQWLYSALTEAGLPVVCVEARHMRAVLKAQINKTDRNDARGIAQMMRVGLYRPVHVKTVRSQKLRMLLTHRKLLQSKAIAIDNDLRGTLRNFGLKVGMVGAARFEARIKELVQNVPDLAALIEPLLVVRRVLREQLGILHRRLLAVVRDDDVCRRLMTVPGVGPVVALTYRATVDVPARFRKSKSVGAVFGLTCAKYQSGEIEHSGAISRCGDEMMRTMLYEAAQSMLVHSRRWSWLKAWAMQVAKRRGMKRAIVALARRLAVIMHRIWVDGTEFRWTREVAAV

SEQ ID NO: 265737 - protein, 445 aa, unidentified
MSELMPPAKSEPEWAAFAAIDWADQKHFWRLVPAGSGQPEQGELENTPEAVEAWAAALQQRFGGRPIAVCLEQVRGALVYMLSKYAHLVLFPVHPTMAARYRETFCTSGAKDDPGDTASLLDLLMRHRERLRPLQPDTVETRLMQFLVEERRRTVNEKTRQSNRLTDCLKLYFPQVLRWFDGVDTALVGDLLERWPSLEELRRAHPGTLRKFFHEHNCRSEERNQERIDAIYQAVPASHDAAVLEAGALTARGLVALLRTLRDHIDKLDRRIAELVATHPEGALFASLPGAGSVLVPRLIVAFGTRRERYESAYEMQCYSGIAPVKEASGKTSWVHFRRACPKFLRQTFHEFALHSIGQSEWAKAYYQHLREDKNKSHQAAVRSLAYKWIRIIFRCWKDGKPYDEEVYLNSLRRRGSQLGAALAPATGLGWQTVAGFQKLSENKA

SEQ ID NO: 265738 - protein, 373 aa, unidentified
MPKYSTAFGMDVHLRSTTVCALDADTGEAVTRRFPGNPWGEIAGWMDGFPGPSLAAYESGYLGFAPQRELAGLGVECVVAAVSKIPRSAADSASKNDRNDAARMAKAILAHDISPVWVPSPEVEGIRDLAGAYDGATARLATAKQRLLAFLARRGFVYGGTAPAGNPRKYWTYDFLRWLDKVRPEDDGGVRTLAALRNEVEAAAEARADLLSEYRAAVDASPIAAEVAALQSIKGCAFALAAAFSAEVGDFTRFRSGRQVTAYFGLAPSQRSSGDSVRLGGISGAGNALVRKLAVEGSWCYAAARHQPKLMPRDTGVPLEIRMHGRKGSERLLRRREEMLARGMPAAKANAATAAELVRWLWALGMMCREGAE

SEQ ID NO: 265739 - protein, 370 aa, unidentified
MLDTTTFIGLDVHARSIKAVSLDVMTGEVRAATFGYDAGAVAEWVRSVDPRARCVYESGVTGFDLQKRLSGLGVDCVVGAVSKMIKPSADRRRKNDRNDAEFLARMLSVGNVVEVWVPDDECEAARDLTRALEDARDDLSRSKQRLSKFLLRHGLVFDERTPTGRRKGNWTRAHWSWIESIRFAERADNDVLAYYVDAVRRAAEEKARLEGLVEAEARKPRWRKRADSLRCLKGVDTASAADLVFEAGEFSRFRNARSFAAWVGLTPSEHSSGESDRRGAITKAGNKHLRKTLVEAAWHYLTCSGRPKGLAKGQAPDRGARRHAAKGVRRLVERREALLARGVHGNKANVATARELACWVWAVGLMAEEA

SEQ ID NO: 265740 - protein, 345 aa, unidentified
MLADELDYVVGVDSHRDEHVVAVVTAPAGAVIAGKSVRANARGYRELLRVAERSAPGRRAWAIEGTGSYGAGVARYLAERGEVVLEVSRTPRAERRLRGKDDTLDAARAARAALAADRLALPRSGERREALRLLLVARRSAVDVRREALAQLRGVIVTAPDRLRQELRLLPTTRLLDRCSRLRRSRSTNADELATRPVLRSLARRIKAATLEADELERELLTHVRGLAPGLLDEPGIGPIVAAQLIVAWSHPGRVRSEACFARLAGVAPVPASSGQTSRHRLSRGGDRQLNRAIHTIVLHRVSTTPPPTHTSRDAWPRARAAATPPDSSSATSPASSTDYYSKSR

SEQ ID NO: 265741 - protein, 341 aa, unidentified
MSMTIGIDPHKGSHTAVAIDGDEHPVARLTVTADRCQTERLLAWAEPLGIERTWAIESATGLGRLLAQQLVAAGENVVDVPPTLAARVRLLGSTKAAKSDPNDALATAVAGLRHCGLRAVATDHHTAVVRMLADRHQALISSRTQAVCRLHVLLREMVPGGAPVRLSAERAGVILRSVRVDDLVVLERKRLAREHLGDIRRLDRDITGLKTRITVAVAASGTTLTELHGVGPITAALIIGHVGDPARFRSRGQFASYNATAPIEASSGPRVRHRLNPRGNRTLNHAIHMIAVTQIRNDTPGRAYYLRRQAEGKTRKEAIRALKRRVSHAVWRQLQVDLANR

SEQ ID NO: 265742 - protein, 366 aa, unidentified
MLSISRYQIGEAVKIAVGVDAHKTSFTIVAISAVGGELDSFSVPATPDGFRKAHDRIANLDGDVTWGIEGTYTYGLGLAEFLSQNGVPVFEVPGSVTKRHRRQGTRRGKSDPIDARAVAQAVLLEQDRLSRYDRSEDHETVRLLYDSRDRLVRHRTEAVNRVRAFAHILGVPKVPLDLTRSIGLKRLRAQITSHFSQANVVDALRLDEIEDGLSEIERLNVRVRAIEGKLRPFVERLASKLLEMYGVSTVVAAGLLGHAGTLRNCRNADAFAMRAGVAPVPCSSGKSSAVRLNRGGNRQLNRLLHNIALTQLRSPEQPGRIYYDRKRVEGKSHRAAMRALKRQLATVVFYRLRASQSDVAMALQAA

SEQ ID NO: 265743 - protein, 356 aa, unidentified
MSQKLDNSTAVIGIDIGKNSFHVVGQNQRGVIVLRQKWSRGQVEARLANLPPCLIGMEACVGAHHLSRKLQALGHQARLMPAKYVRPYSKGQKNDYRDAEAIAEAVQRPTMKFVATKTADQLDLQALHRVRERFVSQRTGIINQIRAFMLERGIAVRQGLRFLRAELPGILATRTDVLSPRMLRVIEDLAGDWRQLDVRIEGLSSEIEALARQDTHCERLMTVPGVGPIISSAMVAAIGAGDAFSKGRDFGAWLGLVPKQLSTGDRTILGSISKRGNRYLRSLFVQAAWVVLVKIGPKHWDRYGLKSWIEAARKRLHHNVLAIALANKLARIAWAVLHKGCAFACIKTNEAASQPA

SEQ ID NO: 265744 - protein, 345 aa, unidentified
MKYYSGLDVSVKETAVCIVDETGKLCREMKVVSHPDDLIAVLQDPAWNFERIGLEAGPLSQWLYEGLAKAGLPVICIETRHAKAFLKAQPNKTDRNDARGIAQMMRVNLYRPVHVKTLTSQKRRALLTARQLLQEKAIAIENDIRGLLRNFGLKVGLVGKVKFEERIDELVEDRPDVREIMQPLLIARKLLREELTKLHKKVLDLARDDEICRLLMTIPGVGPVVALAYTATIDISERFAHSKAVGPALGLTPILKESGESKRVGRISCCGDGMMRGLLYEAAQVLLTNVKKWSWLKAWAMNIAKRRGRQKAVVALARRLAVIMHRIWRDGTEFCWTKESLPAAA

SEQ ID NO: 265745 - protein, 347 aa, unidentified
MKQFIRIGVDLGKRYFQVHALLNEDGRAVTRKLRRDGFLAFFAEAAPCLIGMEACGSAHYWGRELRAMGHEVRLIPPIYVKPYVKRGKNDAVDAAAVCEAVSRPDMRFVPIKSAENQASLMLHKTRELLVKQRTMCVNALRGHLAEFGVVGAKGVGHAGELLEKAKNDATLPEIAKAAVKIFVQQLEAISAAIVALDKEIANVHAQSEISKLLAGVPGVGKIVATAIVASVPDPSVFKSARDFAAWLGLTPRQNSSGGKEKLGAITKQGNRYLRKLLTLGATSLLRVAGKRNGVLRDWFVALLARKPARLATVALANKLARIIWAMMTTGEAFRTQIMARATEPSMA

SEQ ID NO: 265746 - protein, 344 aa, unidentified
MSKHSVQAGDIAGLLRRFAQLKEKARARTGRDFPVITIQEAGLDGFWIHRVLQSEGIESHVVDAASILTSRRRRRAKTDKIDGETLVRTLLAYKRGEPRVCSMVKSPTPEEEDRRRICRERRALVAERVQHTNRIKGLLFAQGAFDYEPLKRNRRAQLEDLKIGDGRPLPVNLKAQISRELDRLEVVLQQLQTVEAERDALLEPASEASPAPAAMLSQLKGIGPEFATILYTEGLFRGFDNRRQVAAYAGLAPTPWQSGSVDHEQGVSKAGNPRLRTTMIQLAWLWLRHQPDSALSRWFQDRVQRNGGRMRKTTIVALARKLLVALWKYATSGVVIEGAVLKAA

SEQ ID NO: 265747 - protein, 330 aa, unidentified
MISVGADVAQDKIDICIYDCEKQRVLLEQTIPNSSPGFKQLSSVFKRFDPKRILVENTGGLEEAFCFYFQTKGAQLIVLNPKQVKRFKEACFEDQKTDKIDARVLAHMAILHDLEGAKQLSVEERQAQSLLRQRHFLVKERTRLFLRKNRLQRQVIHELVTKQLTSLIKTLDREISKIEETVLSKIKTDSGAEEHFKKLQMIPCVGKKTAFVLMQYLGQQTRRFENPEKFCAFAGLYPTKRESGAMRGPEKLTSKGCRELRTTLYLVALTSLTRRSKDNLWKKYYKVKLSQGKKPKQILIAIANKIARAAWFVTTKNWEFDPAKCLPSFA

SEQ ID NO: 265748 - protein, 379 aa, unidentified
MRIIGCDLHARQQTVAMLDSVSGEVVNRTLTHEGNSVREFYSALPGPVRVGIEATGSMKWLVNLMEELGIDCQGGHPATIRAAEPRRQKHDRRDAELILKLLIENRFPSIWQPSKELLDLRGLLLHRHQWVRMRTRIQNALQAIALANGLRRGSSLGSQSGQEAIASLPLTTHTAHRRSELQAMYARFEAEIEKLNQQVLEQACQRTTAGLLMTHPGVGPITALATDVFLGDPRRFADGKALASYIGIIPSEHSSGGRQRLGGLSKQGHPLLRFLWCEAAVHAVRRDPELRRFYRRKLVQKGLGRPESPQHENSGFGCGSCCGIRLIIKSSVVVGRCSREAVMPVRECLDRVMVRRVTVRLIRLPASLWGVCITHHGRS

SEQ ID NO: 265749 - protein, 423 aa, unidentified
MDTLHERVAGLDVHKATIVACVRTLIGGQVKRECRSFETTTAGLLGLLAWLKECRCTDVAMEATGVYWKPVWNVLSDGGFELLVVNASHVKNVPGRKTDMNDAMWIADLVACGLLRASFVPDGSQQELRSLMRTRKQLSREQVRHEQRIEKTLEEANIKLGAVICEIMGVSGRRMIEAMIAGVRDPRKLAALADRRIKASPKELYDALHGRLTDHHRFLLELHIGQFDALNAAIERIDRQVSEALVRLDQEVADGQASFRTLITLLCTIPGVSTLSATTILSEIGTDTSRFPTSGHLVAWAGLCPGQNESAGKRKRSRLRKGDPWLKTVLVQCAWAAKRKKDSYYKAQFFRLSARRGPQKAICAVAASILTAIYHMLRNGTEHHDLGVGHFDRRPTEIKAKRLVAQLAKLGYHVELPPLNEAA

SEQ ID NO: 265750 - protein, 345 aa, unidentified
MLYVGVDAHKATSQVTVMDSGGNILRRKRIVSSPIAVRQALAGYDEPLKAVLEASYCWAPMYDWLDEVADEVVLAHPLKVRAIAEARIKTDKIDSETLAHLLRSDLIPRAHASSQDVRARRRVLRQRMFLIRLQTMVKNRIRALLVQHICEQPKVSDLFGKCGRDWLRRVQLPDPDGRLLKEDLGLLEFLQQEISKTDRLIAELAQGDEAVQFLASVPGIGVFLSVLIRWEVDIIERFRQAKKFASYTGLVPSTYASGNRIVHGRLTKQGNKWLRWAFVEAVSPAVRSSAYLHSYYQRIKLRRGVKDARIATARKIAELAWTVWTERRRYQERLPKSLRTATEER

SEQ ID NO: 265751 - protein, 355 aa, unidentified
MSQEKYIGMDVHQATISVAVMESGGKLIMECILETKAATILEFMQGVRGTLAVTFEEGTCATWLHDLLKPHVSRLVVCDPRKNALLKDGSKSDRIDARKLAELLRGNQLKPVYHGDHGVRTLKELGRCYLTITKDLTRVMSRIKALYRSWAIPCTGTTVYAARHRSQWLAKISEPGVRLRAERFYQQLDLLQPLRQEARRDFVVESHKHPAVKLLRQIPSIGPIRSALLVALLQTPHRFRTKRQLWAYSGFAVETHDSGEYRYVRGKLLRNRERISVRGLSDNYNRDLKNLFKSTAISASTRPGPLRNFYLGLLAKGMRPTMARLTLARKIAAITLTMWKKGVDFDANQLDQQAA

SEQ ID NO: 265752 - protein, 344 aa, unidentified
MNKLSRVGIDLAKNVFQLHGVDRHGKAVWRRRLTRDKWLKVLLEKVEPGCEIGMEACAGAHHWARQLRAKGFTVKLVAPQFVKPYVKSNKNDANDAEAVCEAMSRPSMRFVAIKTVEQQDIQAIHRVRSELIGHRTAKANQIRGLVAEYGLVAPQQLARLRAAVPDWLEDAENGLTGRFRALLNGLWNDLKTLDHRAAELDHEINMIAQSDPVAKRLQQLRGVGPMVATALVATVGNAEQFANGRQMAASLGLTPKQHSSGGKDRLLGISKRGDAHLRSILIHGARSVIRTAKEKDDRLSQWVTSLAERRHPNVAAVALANKTARIAWAMLRHGTDYQPDRIVA

SEQ ID NO: 265753 - protein, 343 aa, unidentified
MAYFAGLDVSVKETSICIVDDTGKIVREARMASEPEALLQVLTNNNYRFKRIGLEAGPLSQWLFSALAEAGLPVICVETRHMRAVLKAQINKTDRNDARGIAQMMRVGLYRPVHVKTLRSQKLRMLLTHRKLLQSKAIAIENDLRGTLRNFGLKVGMIGAVKFEERIRELVENLPDLAVLVEPLLIVRRVVREQLGILQRRVLAVVRDDEVCRRLMTIPGVGPVVALTYRATVDVPARFRNSKAVGAVFGLTPAKYKSGETDRTGAISRCGDEMMRMMLYEAAQSMLVRSTKWSWLRAWAMKIARHRGMKKAIVALARRLAVIMHRIWVDGTEFRWTREVTAA

SEQ ID NO: 265754 - protein, 317 aa, unidentified
MKDITQTPILGIDVSRDHLDGYFLPNGKRFRKSNTDEGHAQLIKMLVAYPDVVVCFEATGGQEWRLWATLDVVGIATRQLPPAQIKAFAASRGTRAKTDRIDAELIARFLAFRPDAGRQLPHEKLRLLRALCAKRGQLVEMRKRLLAQIKAHMKNGSGEPFEGMDGELKALLDAQIASLETQIEAAIAADPEMADTARILRSIIGVGPVTSWMLIAELPEIGQISGEQAAALTGLAPIAHDSGAMRGKRAIGGGRRALRHVLFQAALVASYHNPRLTAFADSLRERGKPHKVIIIAVARKLVTTANAMCKSRQIWTN

SEQ ID NO: 265755 - protein, 336 aa, unidentified
MVQIYGIDLGMSSFDVSFLSESGSVRHLSGVKNTVHGISKFLLSLPSSAVLCAEHTGVYGDLLLRLCTLNRTCLCFVPGYQIKHSLGLQRGKSDPLDACRIREYAERFYDLLRPCFYPGEEMSELQELYRTRSLLVESRKRLDTLNIGDNCKSSVSLAADHARRAVLAELNTQISGLDHEIEALIQNSSEFSRNYQILTSIVGVGPVTSCELIIKTENFRKLDTAKKCAAYAGIAPYPKESGKMKCGHKISPMGDKQLKTLLFLCARSAKEHNKEIRLYFLKKHKVEKKHFFVAMNNIANKLLRLIYSLIQKQQTYDRDYIQRDPRCVVISDIYKC

SEQ ID NO: 265756 - protein, 370 aa, unidentified
MSNATTFVGLDVHARSVKACAFVPETGETVRRSFGYEPCEIASWASSLPQPAKCVYESGVTGFHLCRELRSMGVDCVVGAVSKMHKPAADRGRKTDRRDAQFLAVQLALGVVTEVHVPDAECEGARDLTRALADARDDAVRAKQRLSKFLLRHGFAYDERNSAGQRRNRWTRDFWAWVGRIDLGDGAAMATLDHYCVRVREADAAKAALEAKVKALAQQPRWKPTCDALKCLKGVDAVTAVSIACEADGFARFAAASGFAAWVGLVPSEHSSGESQFRGGITKAGNKHLRKLLVEAAWHYKGASRSPKGLAKGQIVDEATRRHASAGVRRLVDRRRAMDDAGKQSSVANVAVARELACWCWAVGRMAEGA

SEQ ID NO: 265757 - protein, 389 aa, unidentified
MFYLGIDIGKNTHVASLIDSRKKVLFKAFSFSNSIDGAESLICKLEPFKNQLEIGMEATGHYWLSLYSYLSEKNFTVRVINPIQTDGWRQGIEIRKRKTDIIDSLLIADLLRYGDFVETSLSNEDYLSLRNLSRFRAYLISSIGDLKRKTIALLDQVFPEYASSFSNIFAKTSKEILANFSSPSDFEDINSEDLQSFLNNVTMKKFAAIKLEELSKKASKSFGVNFCMDSFGLQIKMLIGQISFIQNQVLDVEKEIESLLEKLNSPITTIPGIGTVNAATILGEIGDIKRFSNPSKLVAYAGLDSTVSQSGEFESTSNHMTKRGSPYLRRALFQSALRAEFCDPVFSDYYQKKITEGKHHLVATNAVARKLVHTIFAVLTKDEPYQVQS

SEQ ID NO: 265758 - protein, 412 aa, unidentified
MYYVGIDIAKKTNVSSIINDKDVFIKKSFKFNNDEKGFKEFTNLLSSIDKNIDNFIIAMEATGLLFENLYLYLKGKGYNVILLNPYQTSKFREMDTMKKVKNDNIDAVMIASLIKSGRYSKAYVSEEVYASLRALHRHRASLEEELKKHKRQVSSLLAVVFPEFEQVVKNPFSVSGLALLEKYPTAKHYTYTSPQRILKVFRNIKGNNFNIQKAEKLLELAKSSIYSGNAYDERAFVIQSHIRAIKFLQKEIESIDNEMLKLFNASPSFTKEEEQEVTDIIDNLRSIPGVSDKTLFTIMGECGNLDRFKNINAFIGYLGLYPTLEQSGNKTSYGKLAKRGSKLAKKALYQAAVAAVRHNDEMKKLYCDKVSQGKAKKEALVIVARKLAAIILAIYKNNTPYNSKRVFNQNTA

SEQ ID NO: 265759 - protein, 423 aa, unidentified
MIVVYPICCGVDVHKSFFVATLITSEGITPHYQKRRFSTFNKEILAFKRWLLENNCYDVCMESTGKYYIPVYNLLEDSIRVTVANPKWVRAIKGNKDDVKDSKWIGNLFRLGLVPGSFIPDKGTRVLREFTRYRSRLISCKSSEKNRYQNVFTVCNIALDAVVSDMFGKSASSITSYIVNSDVFDPEHCVSLLRGNLKKKAADVVASIEGFQMSYAQKYRACVVLEHYNFLLDQIEKLDDAINRLAAPLEDAITLLCLIPGIKRQSAISVLSEIGTDMSQFGSSKRLCCWAGLTPDNNESAGKKKSVKISRAGVYLKPALVEIAHAAVKDKENPYYGIKYKRISKRRGKKRAIIAIARMILTAIFHVLSTGEVWNPCDLREIEMPLELRERELQKSLHRAAKLLIAQGVIDSDDVRLPLAAFS

SEQ ID NO: 265760 - protein, 318 aa, unidentified
MKKAFFCGVDVSKDKIDVCFLTSIASEKAKFETLPNNYDLIKVYFNSFKNDEILVVFEATSNYHLALQKALSDLNIRYNVTNPYKTSLFLKHLSAIKTDVNDSYGLAVYARTFKSEILPDKYNAEYLQIKSYNSTLNLLQKLNTQLKNFKQSQKFVKNSVVDEVIENLIKEIAKLQSMLQKLAFDLVKKTIPETEEIIKSNKGFGIDLALNLFPQLHFNRDKSEKQFVSFLGLSPRIFQSGSSVYKSQKINKMGSSNIRRILFMSALCAVRFNEKFKARYDRLITNGKKKMVAIVAVMCAIVRYLKSLFPFNAEIKAI

SEQ ID NO: 265761 - protein, 276 aa, unidentified
MNVTHYIGLDVHKKSISFCIKTADGQITDEGQMAAERYALKKWASQRPQPWRGAMEATLFSGWVYDTLKPYAAQLDMAHPAMMRAITAGKKKNDKMDARTIADMVRCDWLPVCYVAPPEVRELRRLLRYRGLVVRESVRMQNKIAGLLMEVGAPYNKEKLHGRKYFTDLVKNLEQVPESVKDLLRLTRGAMETFEAAQRQLVKRLLANPELGRRVERLASIPGVGEITALTWALEIADPNRFSSSADVMSYCGLTAALQPNGVHERSRPRIRPPGR

SEQ ID NO: 265762 - protein, 388 aa, unidentified
MTKIYVGIDIAKYTHYAAIIDSNGEVLAKPFPFDNNKQGFNLLLSKLKHLSKMSIVFGMESTAHYANNLANFLLSKDFDVVILNPLQTFALRKTNMRDAKNDKIDSIIICRALMMNLGVHASLDDTMTELYDLCKSYQEVTKSNARIKTQLKTFLDILFPEYVKEMGKSVFGKASLELLKQYSTPSQIIKVRIDRLTNVLRIHSHGKFGVDKARKIKELASNSVGIQRESTAVKMRLAISQIELYESQKIELKAQIKAIVESLDSPIMTIPGMGYVEAAMILSSIKDIKAFSSPSKVLAYAGLDPRVRQSGTFRASTTRMSKRGNSMLRYALIWACQNIHKHDSTFNQYYQKKRAEGKAHYCALGHTANKLTRVIYKLLSTGESYKVS

SEQ ID NO: 265763 - protein, 462 aa, unidentified
MAGKHQRERAEGNRRQLQGLPVIRQNVAGIDLGSERHWVCAPSTEGSGREITSFGATTGELIRMAEWLRARRVESVAMESTGVYWIAPHEVLEAQGLVVLLVDTRQLARVPGRDKKTDPTDCEWIQRLHSCGLLQGSFRPKEAVCMLRTLVRDKANLVAERGDWLRRMQKSLDQMNVRVHRAVSDLDGVTGMAILRAIAGGERDAQQLAKLRDPRCSKSEQEIAEQLRGHWREDHVFSLQQALQMYDAVEQRIAAYEKEILRKLGDMEREEQRGQTAPPLNNTNKARAIKQRGQEPMRQALYRMSGVDATHIDAIGVETLEVVFSEYGPDLSRFPTEKQFVSHLTLAPHVPTSGGKPLKKRKRNSASTRLAAALRMAALSLRHSQTALGAYYRKMAQRLGADIAVFATARKLATLIYRLLRWGQPYADEGAAAYETRYRQQRIGRLAATAKQLGYQLAPINA

SEQ ID NO: 265764 - protein, 348 aa, unidentified
MNYNQNHKITQITSETLIVGVDIAKHNHVARAQDFRGLELGKTCFFENTKAGFHSFLDWINQLVKECKLNQVIVGMEPTGHYWLNLAHLLKENNIKFVSVNPLHVKRSKELDDNSPTKNDVKDAKVIAQLVKDGRYAEPTIPQGIYAELRVAKKLRDLLNVDLQVVQGQVHNWLDRYFPEFLTVFKSWEGKAAIHFLKLEALPHQLVNYTDEELLLSLRQVVKRSIGLKKIRALKEAANRSIGIRQGAAMAKLELRALLEKYDFIQVKFEELDHQLDQLLDHIPGVTQMLEVSGIGRDTVAGFFAEVGDLRDYQHPRQIVKLAGLSLKENTSGKHKGQTKITKRGRKK

SEQ ID NO: 265765 - protein, 388 aa, unidentified
MTQAPGGLRTPVVLDYEQALILAIEMCNTSWVLAAQIPGLPGVKAKRSIEPTPEALMAAIASYRARAETAGRNVDRVVTVYEAGWSGFWLVRWLAKYGIETHVIQPSSVPVDRRARRAKSDGIDAELLLRTLLAWLRGEPRVCSMVPMPTEADEDARRRVRERAELVTERFGLVNRIGAILATLGAGEYNPLRRNRRQRLDELRTALGDSLPTHAHAKIARMLDRLELLLIQITELEQSRDAVLEDKAPDRAASMIQQLAKLRGVGVQTATVLVREGFVREFANGKALGSYAGLTATPYSSGGIEREQGIGKAGNARLRTVMVELAWLWQRYQPDSAQVSWFRERIRGTGRRMRKVMVVALARKLLIALWRFATQGVVPEGAVMKPAS

SEQ ID NO: 265766 - protein, 386 aa, unidentified
MPQLNDLSRSLVILKQDATLIAVIEMGQSSWLVAGIVPGVERSPLKKLAVDESALLKLLNRWREEAEKAGHRIERIAIAFEAGRDGFWLARWLRARGIEAHVIHASSVAVSREHRRAKTDRLDTELLKRAFLGWLRGERDHCKMVAIPTLAQEDAKRPNRERESLVGEQSRIVNRMKAALARLGIRGFNPKLKKAVERLDGLRTPEGEPIPPNTLAELKHDMERRRLVRSQIRDIEGTRLERLKQAPGDGPHVMVRLLARVIGVGVETADMLVQEVLSRNLRDRRAVARYGGLTGSPDESGKKRREKGLARSGNARVRRGMIQLAWRFLMFQKDSALAHWFYARTKNAPQTRKTMIVALARKLLIALWRLAREGAIPEGIVLRPAL

SEQ ID NO: 265767 - protein, 418 aa, unidentified
MSNDVRFFAGVDWATETHQVCIVEAQGGKIIGERAFPHGGEGLAELCDWLVSTSGAEPPMIAVAIEVPHGPVVEILLERRFQVDAVNPKQLDRFRDRHTVAGAKDDRRDAYVLADALRTDRHCFRPLAAEDPVVIELREWSRMAEDLQQERNRLANRVCEQLWRYYPQALELGDDLAADWFLDLWALAPTPAKAARLRESRVAGLLKAHRIRRIDATEVLRILRQKPLVVAGGTVEAATAHITAVAARLKLVNQQIKQAHRQLDELSDKLAESREEDASGQKSEQCDVTILRSLPGVGRIVLATLLGEAAEPLRKRDYHALRTLSGVAPVTRRSGKRCVVLMRQACHLRLRTAVYHWARVAIQHDARSRARYAELRKRGHSHGRALRSVADRLLAVACAMLKAQTPFNPKYALEAAAA

SEQ ID NO: 265768 - protein, 366 aa, unidentified
MKKISTVQVLGNEISQEQKLTIGVDLGDRWSFYCVLDEAGKIILEQKLATTPEATKQTFGKIPRSLIALETGTHSPWLSRLLTELGHEVIVAHAQKVELITKSNRKDDRHDARTLARLARIDPELLGPVRQRSAKAQIHLTVIRARAELVSARTALVNAARGLVKSYGERLPKCGTYQVNEKLAEGVSAELRDVLAPLLREVESLNERIKEYDERMEKIAKEVYPEVFLLKQVKGVGTQIALTYVLTIEDPYRFQKSREVGCFLGLRPGRRNSGQSEPQKKISKEGDRYLRTMMVQGAHYILGPFGADSDLRRWGLKLAERGGKNAKKRAVVAVARKLAVLLHRLWVGGEAYEPLRNSQKAMRAVA

SEQ ID NO: 265769 - protein, 343 aa, unidentified
MQVTTVGLDLAKRIFQVHGVDAAGKVVIRRRLQRSEIAAFFADLPACLVGIEACATAHHWARLIGASGHQVRLIPPSYVKPYVRRSKTDAADAEAICEAVGRPSMRFVPVKSAHQQAALLHHRARDLLVRQRTMLINAIRGHLGEFGIIAPAGRHRIADLVNLLQGADDAEVPALAREALQSLFAELSALEARIKAVEAMIMREHRSNVVSRRLATIPGIGPITASALAVTIADPSAFRSGRELAAWIGLVPRQHSSGGKQKMGRVSKQGDRYLRRLLTVGATAVMRRLPGKTDGLSLWVRALLDRRPFRLASLALANKMARIAWAVMVRPEPYRASAMTVTA

SEQ ID NO: 265770 - protein, 354 aa, unidentified
MIIIGVDFHPEFQQIASVDTDTGEVQEKRLAHREEAEKFYRALAVQGRKVRVGMEASGHARWFERLVAELQFELWIGDATVIHAKRVRKQKTDRQDAQLILRLMLKDDFPQIWVPSWENRDLRQLLWHRHRMVQARTRIMNQLQAVALNEGLRCKKRLWREAGREQLEAFPLAPWASRRRRDLLALLDRLSPTIAELTQTIEQQAEKCPEAQRLRTHPGVGSLTALAFVLIIGQAERFQCGKQVASYLGLVPLEDSSGNRRRLGHITKQGSSILRFLLVEAAQVTVRSLPEWRSKYLHLMMRRGRKIAKVAMARRLAVQLFWMWRKGWDYEQVRKFGSHAGQPGHRDGAQSNTE

SEQ ID NO: 265771 - protein, 308 aa, unidentified
MTTLHTGLDIAKLNLQLHLAGRVHDLPNTAAGHRRLLKLLATQPGVHVVCEATGGYERDVVAALHEASVPVSVLNPARVRHFARATGQRAKTDHIDAAVLSAYGQALQPKPTAPRTEQEQHLAELIRRRVQVLEILVAQRQQAQRLTVPALRRQAQSLVRRLERDVKQIEAQLKELRTQATALDERVQKLEAITGVGAITALGVLAELPELGTLNRRQAAALAGLAPHPRESGQWHGRRRIGGGRAPVRRALYMAALFAARSHRQLKEFYQRLRAAGKPAKVALTAVMRKLIVLMNHLLKNPNFALSN

SEQ ID NO: 265772 - protein, 540 aa, unidentified
MSQAFSLQIKFRAMNPGRCPDTFSEVIHSRAERASGAARSEAVNNFAAMNFESNLRPGNNGSGRKARVRTRSACPNPTRIKPRTPAEPGAVIKKSERTTPHEGHRIRTTHDKSQGPRANKPMIETINWETITHYAGFDWAKDHHDVVIVDQQGKIVKDLTFEHTAEGWAKWKELVAAYPHLAVAIETNQGAAIEQLLESGVVVYPVNPKSAERYRDRKAPSGTKTDFLDAWSLADALRVDGHGWRALKPLDPLIQELRLLCRDEVDLIGKRTELVNQLQAALHEYYPAALQAFEDWTATPSWNFVQQFPTPQLLHQAGRRKWEKFLHVHHLYRPELNEKRLEIFAKAHEFCGPAAVTRAKSRLALALVKLLYALENQLEDYRKEIRRLFNEHPDHELFGSLPGAGEKLAPRLLSELGSDRSLFKSAQALQCYVGTAPVSFESGQVRQVYVRFMCNKSFRHAVHLWADLSRKFCSWAQVYYQQLRARGKSHATALRCLGQRWLKILWKMWQTKTSYDPDFHMANQLKHGSWVLTVKPSKSK

SEQ ID NO: 265773 - protein, 319 aa, unidentified
MAQNEVVVVGIDVAKDKVDACIRAFKLRQTWLSTAQGHRKLVAWLRKHQVNKAVMEASGGYERDWARVLREAGIGVRIVDPKRVRSFALSAGRFAKNDAIDAEMIAWFAETFSEAPSQPHDAASEELQALVKARLDLIDFRMRLVSRSEHAAPGLVQKAHAHILKSLASEITKLEAAISAKIKSVPDFAERAEIIESVPGFAQTSSANLVAGMPELGQVSDEIAAALIGVAPYDDDSGKRRGERHIKGGRRWVRNAIYMPCVGAATQNNPVLKAYYQRLLAKGKEPKVAIIACMRKLIVILNTMIARRQKWDPSRYVLS

SEQ ID NO: 265774 - protein, 345 aa, unidentified
MESMYYIGLDVHKKTISYCVKDASGQVLQEGKIGATRGELDSWMKTLPQPWSVAMEATIFTGWIYDHLLPHAAQVKVAHPLMLRAIAAAKKKNDRIDAGKIADGLRCDFLPECHMAPTEIRDRRRTLRYRHLLVRQMVQLKNRVSGLLMETGVSYSKQRLHKVGYFRELLSSNQEIHSNIRPLLKLSRDAIVRLQKTEYALVSSLQRDPLLADRIKRLRTVPGVGPITALTWALEMGEVSRFPSIKQAISYCGLCGDEKSSADKVIRTPLSKQRNKHIQRVLVEAAKLAPKENHELALVYETEKQKGNANRATLAVARKRVAYLLAVDRGKRGFVPAEDHKGVAA

SEQ ID NO: 265775 - protein, 482 aa, unidentified
MKPKPKEKTQKATDHPTQGHWHEMNRKQRREMMRKMQSEDISLEVVHPDAAGIDIGNESHYVAVPPSRDSQPVRRFGCNTAELKAMAAWLKRCEIRTVAMQSTGVYWVAVYDILEQAGFEVYLVNARDTKNLPGRKSDVQESQWLMKLHTYGLLRNSFRPSQEIRTMRTYWRQRNDLVQSAGRHILRMQKALTQMNIQLANVLSDVSGMTGQTIIKAILGGERDPHKLATFRDCRVKASEEEIARSLEGNWQEDLLFVLKQEQDGYEFCQQQMAECDRQLAQYLQQQEDRSHGASLPEEKRKGRLKKKRANKPRFDLREALFRITGTDLTRIDSIDVTTAMTVISEAGWDMSKWETEDHFVSWLRLCPDNRISGNKIIGKGRLPTNNPITIALKLAASTLRLSNTYLGAQFRRFRTRLGAPIAIKAMAAKLARLVYRILRYGIKYVDQGTAFYQAQHRNLQIKHLKSKAASLGYQLIQVPAA

SEQ ID NO: 265776 - protein, 339 aa, unidentified
MVEVYAGLDVSDKATHVCVLDGSGAVLWAGACATDPEVIAKTLKTRAPGLVRVVLETGPLSAFLYHGLAERAIPVICICARHAKGVLSARVNKSDPHDAEGLAQMARTGWFKAVRIKQEATHLDRARLKIREQLIASRLAMAGQLRGLLKLFGLRLGKVTTPAKRRERLAALFVLKPEIEPVLAPLIESLEALEAQIRGASRQLAALAAADPVTGRLMTTPGVGPIVALTYKTSIEDPGRFARGEDAGAFAGLAPRRNQSGERDHKGRISKAGDPMLRSALYEAANNLLVRVKRPCALQTWGKKLAETKGPKRARVAVARKLAILLHRLWQSETEFRWA

SEQ ID NO: 265777 - protein, 403 aa, unidentified
MIFVGDDWAEAHHDVYLMDESGRRLGSQRLPEGLTGIRQLHELIAEHAEEPDQVVIGIETERGLWVGALTGAGYRVFAINPLAVARYRDRHHVSGAKSDTSDAKLLADLVRTDRHNHRLIAGDSPEAEAVKVLARTHQSLIWTRNRHTNALRNALREYYPAALEAFEDLAHGDALGVLGRAPTPQVGAHLDLAAIQSALKRGGRKRNIAARAHEIRAALRTEQLTAPAPVAAAFGATTGATVGIIAELNRQISELEASLDKHFETHPDADIYRSLPGLGVILGARVLGEFGDDPNRYTDAKSRRNYAGTSPLTIASGKKRAVLARHVCNRRLYDAIDQWAFCSINTSPGARALYDQHRAAGDLHHQALRALGNRLVGILHGCLRHHTPYNEHTAWAHRMPAAA

SEQ ID NO: 265778 - protein, 370 aa, unidentified
MLYLAIDQHSKQITVCVRNEEGDTVLSRQVSTRPEKIEAFLQQLTEMDPDFMAILEVCGFNDWLIERLRNWKCQEVVLIHPEKPSKRKTDRRDARKLADLLWLNRERLAANEPVHGLRRVYMVRQREREDRQLTALRKTLGQRRTRTLNKIHRIINCHNLIWDYPTKSFQTQAGRRWLEKVELPEFDRLEMDMLLKEWTTWDEQIAQVGEKIVERANHREPGEIFSAAQILMTAPGVSHYSALTLSSRIGPIERFPRPRSLANYFGLTPGCRNSGKATDRLGSITKEGSKIARFILGQLVLHFLKHDPQMRSWYRRIKKRRGSKIARVAVMRRITTVFWHMLTYKEAYSIGGPPARLHQPNPSATRSDAA

SEQ ID NO: 265779 - protein, 455 aa, unidentified
MLKPQVIPDEDHEVVYERVAAVDVAKASGVVCMRTPDPARPGRFVNRIWDNVPATRARIAELGRELLSCQVQMVTLESTSDYWRVWYYVLESIGLAVQLVSASQAKNLKGRPKTGKLDAMWLARLTQWGMLRPSFVPPAAIRRVRDFTRARTDLVRERTRVLQRLEKLLEDAMIKITSVARDGLKAKSVVAMVAALTAGERDPRTLADLAKGPLRGKRDQLAEALDGMFDSRHGVIAQMLLDQVAFLDQRIKQMEDQAIAALAQVTESWGVDAAGQTGPGCGTGPDSPVLAAAYRLAEIPGISVWLAIVIIAEIGLNMAVFPTPAHLVSWAGLCRSASQSGTRHGKGKQKKGNSYARAAAGQAALGAAGTATFPGERYARIARRRGKAIAQVAVARSIMIIAWHLLSGPAARYRDLGPDWHASRTSRDKKIRTHIHALKALGVTVAITDAEQQAA

SEQ ID NO: 265780 - protein, 392 aa, unidentified
MIYVGIDVAKDKHDCFITNSDGDVLFKSFTIPNNREGFETLFQRIESVSDDLAKVKVGLEATGHYSYNLLGFLLDKGLTTFVINPLHTNLYRKSLSLRKTKTDKVDSRTIATMMMSDMNLKSYSDTSYHNEELKSLTRYRFDKVKERAKLKTSVSRLVCILFPELEKLVPTLHMASVYALLSEFPSAGAIASAHLTRLTNLLSESSKGRYGKDTAVMFRDAARSSIGSLMPAKSLELKHTIKLIQELTTEIEEIEAAIKRIMDEEIQSPITTIPGISYRMGAMIIAEIGDFSRFDSADKILAYAGMSPSTYQSGQLDNCYSHMEKRGSRYLRYALYNATKYVCHWDKSFGTYLEKKRAEGKHYNVALSHATKKLVRLIFAMEKSGQAYIPAA

SEQ ID NO: 265781 - protein, 400 aa, unidentified
MKPSKRYTRYCGIDVAKRKHVACIIDRDGRFLLRSQSFGNDAEGYQRILARLREVGGPAKVLVGMEATGHYWYGLHDFLTRQRYEVAVLNPIQTAQQAKMGIRKTKTDKIDAKHVATLIKNGAHRMALVPGEIGMTCRQLTRLRYSVIGQTTRLKQLLGARVHPVWPEYETFFANRFSVTARALLHAAPTPADVLALGREQVTEIIRGASRGRYGPAMADKILQGAAQSVGMRRGFEGTRLCVRTLLTQIDALAGVRGQLDAEIIQLAERVPSYLLTLPGADPIRAVAFFGETDPIEALQNPSQLVAFAGLDPSVFQTGQRDAPKRRISKRGSPCLRRTLWGMAHRAAYQDGCLRDYFLRKRAQGLHHLAAVTATAAKLCHIAWRISIDQRDYLPEPPSS

SEQ ID NO: 265782 - protein, 412 aa, unidentified
MRRVIGIDLHRTFGEVVIWENGALHHAGRVDMTRAGLEGFGKSLRATDEVVIEATGNCMAVSRVLSPFVKRVVIANPLQVKAIAHAHVKTDKVDAGTLASLYAAGYLPEVWTPDAATERLRRLVARRYQVVRHRTRLKNEVHAILHAHLIPKCPHADLFNRPGRAWLSRQPVPDDERAAIERHIRELDRLGEDLDLLDREIAESVLDDAAIKRLMTITGVNLTVAVGLMAAIGDISRFSSPQKLVSYFGLNPRVRQSGLGAAHHGRISKIGRSHARAMLVEAAWAAAKAPGPLHAFFVRIRARRGHQVAAVAVARKLAVLCWHMLTKEEDYLWARPALVANKLRAMELQAGRAQQKGNRRGPAYAYNIKALRKQEMHLARQAERSYERLVDAWRPRRPRDGARGRLKPARPE

SEQ ID NO: 265783 - protein, 374 aa, unidentified
MGNVIEAFVAFDTSKLRNAVAIAEAGRAGEVRFLGEIENTEVAVAKLVRKLAAKYGRLTFCYEAGPTGYGLYRQIEGLGHECLVAAPSLILKKPGERVKTNRRDAVSLVKQLRGGDLTAVWVPDPHHEAMRELTRAREVAVEDLRRKRQQVSAFLLRQGLHYPGERAWTKTHRDWLASQKLEYAEHRTAFEEMLLAMRQAQERIERLEQAIRLAVPDWSLAEVVTALMALRGIDFISASAFLAEIGDLSRFRTPRELMAYLGLVPSEASTGDTVKRGAITKAGNRRARRILVESSWSYQHPPRVGKEKQEKLAAAPPAVREIAWKAQCRLSARYRALTRKGKLKTVAVTAVARELSAFIWAINRQIANSRAAAR

SEQ ID NO: 265784 - protein, 412 aa, unidentified
MQDILTCAMGLDVHRDIIVACLVKGVVDAELEAETRTFSTLIPEMQKLRDWVIESECRNIAMESTGIYWQPIYEMLESCFDGEISILVVNARHMKNVPGRKTDMKDAQWIATLLRAGLLKGSFIPDKAFRELRHLTRYRKSVVHDITAQKNRIDKFLQSSGFRFTAFLSDTFGASGRNIIRHLIEHGSIDREALDKCLKTKTRNRIDEILVALNGSLSEHQRRFLNMVFQHLEDLEAHKHTVEDEITEEVLKHTDALNLLCSIPGIDVTAAAAIIAEIGTDMSSFPDSQHICSWAGLSPGNNESAGKRKSVHINKGNPYLKSMLCEVAWIMASHRKLYLSGWYWKVKQRKGAKRATIALARKILSIIYTMLKTGTPYNEECFEQRRLRCERKRANRLVNELQKLGYVVVAPD

SEQ ID NO: 265785 - protein, 348 aa, unidentified
MEHVAIDLGSRESQVCVRSSDGTLLVERRVGTLSLEKFLRSRPKSRVVLEACAEAFSVADAATAAGHETVVVPASLAPSLGVGDRGIKSDVRDGRNLSEASCRMSKLPKVHVPREISRDRKAMCGMREGLIQARTKLINTVRGWTRPKGMGVVRSGSPSTFPARVAEHVHKRGATIPEYVIVVLKAIGELTAQIVEADRMLEETANSDPTCKLLMTAPGVGPTTAVRFVSAVDDVTRFPNAHTLESYLGLTPGENSSSQRKRKTGVTKAGPSKVRWVLIQAAWAARRYYKSDPMVLWSMELEKRRGKQVAVTALARRLAGMLFAMWRDGQPYNKDHRRQDTCAATATG

SEQ ID NO: 265786 - protein, 340 aa, unidentified
MINNFLGIDISKDRFDVSLSFISNKGKRETRKRSFKNNDHGFQGLLSFLQKHNVEQVKACMEATGCYSEALAEFLHNTGHFVSVVNPACIRFYAKRKLIRQKNDQTDAEIIADYCQRQEPIRWAPPSPELKKLKHLYRCSAALKDELTLVNNHLEKKERLPKEVANAWEDLAMNIKQKIERIKNSLRELLNKHKELLENFQLLLTIPGIGEESAVAILAEVPNIKAFKDARQLAAYAGAIPRNITSGTSVHAKPRLSKSGSRTLCKAMYFLAIVAKNHNPTIMTFCKRLKEKGKHNMAIVGAAMRKLLHIVFGVLRSKKAFDPDHIKNYRARSLAESLVL

SEQ ID NO: 265787 - protein, 415 aa, unidentified
MLDYNFNSGDAFIMNAVGIDVSKGKSTVAVLRPFGEVVASPFDVAHTGSDLKALANFIKKLPGETKVVMEATGNYYEPIARYLHEQNIFVSVVNPVLISDFGGNTLRKPKTDKKDALKIASYALSYWVDLKKYVPQEDLRKSLKLLNRQYQQASKLKTMMNNNLISLLDLTFPGINKLFTSPSRESDGHEKWVDFVLAFPHCDMISKLTIKFFSRKYKKWCNSNSYHFTEAACKKIYEYSKECISSVSSKESTAFAVIQAARMLNSATENCHVIQLEMNRVAAQLPEYSTVMSMYGVGKAMGPQLMAEIGDPRRFHSRKAITAYFGYDSENNDSGQKVSISNSMTKKGASALRRTLFIIMQVLLQNKPIDNPVYDFLIKKQSEGKHYYSYMNAAANKFLRIYYAKVKEVLTAAET

SEQ ID NO: 265788 - protein, 385 aa, unidentified
MALTTATQTSPYPDSPCLYIGIELSAAKWGLALSAGGQRIREKSIRAGDREQLAREIRAARKRFGLPEDAKVISCYEAGRDGFWVDRLLGQLGIENVVVDAASMKVNRRARRAKTDKIDAKQLLADLIRHARGEKDVWKVVRVPTEEQEDKRRLHRGLERLKKEKTQHRVRILSLLATQGVQPGNLKALLVELDAARIWDGRPLLPGLKVEIEREWVRLRLVEEQIGAIRKEQRDRLKQPNSPDLMMINMLTRLRGVGVDSAWILVMEFFAWREFNNRGEVGGAAGLGGTPFSSGSIEREQGISKAGNPLVRTRMVELAWLWLRFQPHSELSQWFTRRFAGGGSRLRRKGIVAVARKLLIALWHLAEHGAVPKGAVIDLTELCPA

SEQ ID NO: 265789 - protein, 364 aa, unidentified
MVVVGTDAHKYSHTFVATDEVGRQLGEKTVKATTAGHATAIMWAREQFGLELIWGIEDCRNMSARLERDLLAAGQQVVRVPTKLMAQTRKSARSRGKSDPIDALAVARAVMRETDLPLATHDETSRELKLLTDRRDVLVAQRTSAINRLRWLLHELDPERAPAARSLDAAKHQQALRTWLDTQPGLVAELARAELTDIIRLTGEINTLAQRISARVHQVAPALLEIPGCAELTAAKIVGEAAGVTRFKSEAAFACHAAVAPIPVWSGNTAGQMRLSRSGNRQLNAALHRIALTQIRMTDSRGQAYYQRLQDAGKTKRAALRCLKRRLARTVFQALRTVHQPSSEHTQPAAACHRSYCSRSCLSG

SEQ ID NO: 265790 - protein, 347 aa, unidentified
MRPKLLMENDYILRQCVGIDVSKETLVVTMCMFSFAEEAHYSDVKTFKNNKTGFNQLVKWSRKEAYTDKPLRYVMEATGVYHEELANHLVKIGCTVIIMMPNKAREFAIWEGMISKNDTIDSRVLALVGCVKRSMRPWQPSKEIYHELRAMTRFAQDTKKLRLALKNHLEALEHSHQAEKSVVKHYEAMVSYLDKRLEMNLKNMKEKVASDEALNKKVENIITAPSLGFTSVITVIAETNGFALIQNRKQLTSYAGFDVKDNQSGNVEGTSRISKKGNSRIRAILYMPAVQAQLRSKHLKEAYDRIVQKHPDKKMIAVTAMERRLLLLIYALWKSDKPYDEDHNKKK

SEQ ID NO: 265791 - protein, 570 aa, unidentified
MFGRDVALNSALQGAASEAKAVKTLVLKSESSLARLGAWFFPIAMKLLVRLRRLAVAINPERRLKIRSPESRCRQPSQTKATMARATRQQQAKNGSDAQRPASKAKARGRHCHRGKGNRQRSELTITHLDAAGIDVGSQVHYVAVPEGRAEVSVRCFGAYTAQLDELVQWLKDCAIKTVVMESTGVYWIPLFQKIEEAGLEVLLVDARQAKHVPGRKSDVGDCQWLQQLHTYGLLRGAFRPEDSICRLRSLQRHRKDLVECAAMWIQHMQKALNEMNLHLHHVLSDISGQSGLAILDAILAGERDPRKLASLVHYRVRKSQAEIEAALRGDYRAELLFVLSQSLANYRQMQQQIAQCDLSIEKHLATMSDGPKFKPDPEPRQQAQDRAAKPRKIKPKEGGELTLASHLKRILGVDLTTIPGLDVLAVLTLLSEIGTNMAKWRTEKAFVSWMGLSPNNKISGQRVLSSRTRKVVNRAATTLRLAAMLLGRTQTPLGAFYRRKRAQLGAPKAITATARKLGCLIYRLIKTGQAHNELDLHTYELKYKDQILRSLRKRANTLGFDLVEVQKAA

SEQ ID NO: 265792 - protein, 342 aa, unidentified
MQVTTVGLDLAKHVFQVHGIDQNGQVLIRRQLRRGELIGFFRCLPPCLIEMEACSTAHFWARELAALGHEVRLMPAAYVKPYIKRGKSDALDAAGTCEAVTRPTMRYVAIKSSEQQAVLMLHRTRELLVRQRTMLVNALRGHLAEYGIIAPQGLPSVPKLREMAEKARGAAVPDLAWRCVRLIIAQLEEAHVRITDVEQEILVWHRTNELSQRLETIPGVGIITASALAATISDPGSFRSGRHLAAWIGLVPRQSGTGGKVRLGHISKQGDRYLRRLLVLGATTLLRHARGKASAAAGWINALLARRPASIVKIAIANKLARVAWAVLRGNQGYRASTTAAA

SEQ ID NO: 265793 - protein, 359 aa, unidentified
MSEVTRGFIARVGVDLAKRVIQVHAVDATGQVVVAKALPRDGFMPWCAQLPPGTLIAMEACSGAHHWTCKLRALGLDARMMAAHFVTPYRMQGKGGKNDANDAAAVCEAASRPSMRFVPLKTPAQQAMLAIHRLREGYKEERTACINRIRGLLTEFGLVFAQRPEVLRRDLSDVLEDATNELPALLRMALRQAHLHWLELECHMAWCDERIEAHVRTDEQAKAAAQLCGVGPVTASALVAMVGDFKQFRSGNQFGAWLGLVPRQNSSGGKATLGQITKRGDDYLRTPLIQGAKAAMVHAKKRSDRISLWLVSLIDRIGRQKAVVAMANKNARILWAVLTKGTAYDPNHVSINPGLPTTV

SEQ ID NO: 265794 - protein, 392 aa, unidentified
MIYVGIDVAKDKHDCFITNSDGEILFKPFTIPNNRDGFETLFQRIISVSNDLNKVKVGLEATGHYSYNLLGFLLDKGCHTFVINPLHTNLYRKSLSLRKTKTDKVDSRTIATMMMSDMNLKSYSDTSYHNEELKSLTRYRFDKVKDRAKLKSSISRLVCILFPELEKLVPTLHLPSVYALLSEFPGANAVASAHLTRLSNLLSESSKGRYGKDTAVIFREAARNSIGSVMPAKSLELKHTIKLIQELTSEIDEIETAIKRIMDEEIQSPILSIPGISYRMGAMIIAEIGDFSRFDSADKILAYAGMSPSTYQSGQLDNCYAHMEKRGSRYLRYALYNATKYVCHWDESFGTYLEKKRSEGKHYNVALSHAAKKLVRLIFAMEKSGQAYVPAA

SEQ ID NO: 265795 - protein, 345 aa, unidentified
MEQITRIGMDTSKHIFQLHGVTAAEEPALRKKLRRKEMVRFFEKLAPTVIAIEACGASHHWARLLQSFGHSVKLISPQLVKPYVKRGKNDAADAEALCEATSRPTMRFVPVKTAEQQAALMLVGVRDRLIRNRTQLANAIRGYAAEFGLTAARGKAHLDPLLERIQADESLPALARELFAAQAKEYAQLQAQIDEVDARLMSWHRADECSRRLAKIPGVGPIGAVLLKMKTPEPELFRSGRQFAAWIGLTPKDHSTAGKVRLGVITRAGDEGLRSVLVVGATAVIQHVRRGGRSSPWLTELLKRKSPKLAAVALANKMARIAWKLMVTGENYAAKSAPAALAGVA

SEQ ID NO: 265796 - protein, 353 aa, unidentified
MYIGVDTHKKTHTLVGIDDQGRTDSTRTVANTPQGWTSALRWARDHSDVCCWGIENSGSLGKGFAQFLLAQGETNVREVSPQRTAQYRRRGRSQDKTDTADALAIARLLRAEGEQLPLVQADDASTELRLLSDHRDNLVAERTRLVNQLHAQMLQIDPCYAEQSGALTSRTGVHYCRDLEVPDADGVLETRLLIVRQLTDQLLRLWEEIESIETALRQRVATLETPLLQLCGIGMIVAARLIGELGCTPRIRSAAALAALAGIAPVAVSSGGRQGHRLNRGGNRQLNRAFHMIALSQLRCEPLAQAYYAKKRAEGKTARSALRCLKRRLVDVVYRLLPTGKPAALELSLRPAA

SEQ ID NO: 265797 - protein, 312 aa, unidentified
MKSFVVGIDISKDKLDIGIIPGSEKWSIPNEVEGLAELACRLSDLSPKLVVMEATGGLERPVRAVLEQAGLPCAVVNPRQVRDFAKSKNILAKTDSLDAFVLADFGERMEPKARPAKDKDTQELEAIVTRRRQLIRMLTAEKNRLKQEACAKMRTNIQEHISWIDKCLKDLQKDMRKRIKQIPEWRERAKIICSVPGIGPVTMCTLLGLFPELGKLDRKQIAALAGLAPFNRDSGKFRGQRRIWGGRAPVRSVLYMAALSAIRWNRVIKSFHTRLIEAGKKPKVAITACMRKLLIILNSMVRSGNMWQSQAA

SEQ ID NO: 265798 - protein, 322 aa, unidentified
MLYVGIDVAKNKHDVTALNVPGKTVLKPLTFSNNKAGFELLDLSLRQLNQDCLIALENTGHYAFNLLNFLHEQGYKVYTYNPLLIKEFAKSLSLRKTKTDKKDAHGIALKLLSDPNREQFQHDNRQVELKILARHIHRLKRKQSDWKVQYTRCLDIIRCLDIIFPELDKIVGKHSEYTYQLLTCYPNPQKRLEAGFDKLIEIKRLTASKIQDILSVAPHSIGTTSPAREFEIIENIKHYKRLIDKAEKCVNDLMAEFNSVITTVTGIGNRLGAVILAEIQNIHAFDNPAQLQAFAGLDSSIYQSDQIDLAGRMVKRSSPHLR

SEQ ID NO: 265799 - protein, 296 aa, unidentified
MRTIGAERPETTEVAVILGVDTHLNFHVAVAIDHLGRRLGESNVPTTAKGYERLLRWAKGFGPVRCAGIEGTSSYGAGLARHMRTRGIEVLEVERPKHRRRSSRRNLKKSDPSDAERAARAVLAGEASGVPKSADGCVEMIRALRAARRSAVKARTQAANQLQALRVTAPEQLRHRLRGLSTKELVCVAGRFRLGDDLRDVPTATRFALRSVARRYEALSEEIAELEAHLDRLVAQAAPELVSLAGIGTDAAATLLIVAGDNPQRLRSEASFASLCGVAPIEASSGKVVRHRLNLM

SEQ ID NO: 265800 - protein, 516 aa, unidentified
MKQKSIYQNQCPQLRELFSKAQSLDRVLVVPLDFARDKHLALFCNGLGDQLVKPFPVFNDRTGVDLLNERIHKTLKRCRIDSAHVLLGGEDDPPYAKNFLWTLHEDWLVLRVNSFKAKKQRENIQASSDELDLLGIGKMLLNREATVVFNDDGLADQAEHYDALKTLGRTRDGLVRDQTRLSNRIHSHVKILFPGFLSDRKDNPIKPFSEVSLKLMEKSDFTATQYADKKNAPLARTLKKQCLRKPEQQASQLIAQARTALPPAPHMVQAHQDTLGCLVDAYRAIKQNTAQLEHRQAFHLAQVPGALLTSLPGMAIINSSALAGELGPPDQLGCRGQMASYAGIIPRIKQTGGPDSASKTLSVGHHCNHRLKNHVVSAATAIGQQHGPPEIKEHWQRLLDKGQHAGFIHARHLLSTSKALMINGTIWLPESLRRGAVGGKEGAQLYRRQMFEYLQELWPKLRAKWVERKALELAFAPQNPLGKWRQVIEELYRIQLPLENLTPRMEEDRPSASIDH

SEQ ID NO: 265801 - protein, 377 aa, unidentified
MSIVMGIDQHRAQITAEWIDLGTGEVSRARVRPADRAGARRFLARFVGQELEVASEATTGWRFLVEELRAVGAVVHLAEPAETAALRGNKKRAKSDRADARHLRELLLAGRLPESWIPPDHILDLRAQVRLRHTLIEQHCEWQQRIQAVLFHHGCPRRRGLMVGDGRDWLAAQPLPEAARQQITVALAMIDALEVQVAPLSRQLRAYARVQTGCKALIEAYYGIGELCAVTILAELGDCRRFANSRDAVRYGGMDVTVYQSDRHRAPGHLSRQGPPALRWAIYEAAQVARGPRSPDRAYYEQAAEHLGGNRACLALARKLLKRCYHTLRELGEDALAPPVHQTRSGSGSAAARRASSGSPRQTNAPSTIERADALAA

SEQ ID NO: 265802 - protein, 380 aa, unidentified
MDVHSTNFTLCSFEPGYGFEADKIFGQTRIKEDIFNSTVKYINKLKSMRPDVDVVCGYEAGCLGYNLHRKLNAKEIESVILAPTTMAVARNSSKKKNDYRDAITIAKCLASSAYKAVYIPDEKDEDVRDFIRMRDDHKTALKQIKQQLNAFCLRHGHHYDKTKWTGLHLNWLRKLELSKLQRETVEEYLATYEALTSKIAALDIRIEDIASEERYAEKVNKLKCIKGIKTHTALSFVCEIGDFNRFKSADKFAGFIGLVPGECSSGNTERMLGITKAGNRHLRRLVVEISNTYRRGTVGRKSAALKERQKDMPKDVVAYADKATNRCQRKYQRMMFKGKNSNQAVAAVARELCCFIWGMMTGHHSRTAQAEVPVYRSELD

SEQ ID NO: 265803 - protein, 352 aa, unidentified
MNQIKYIGMDVHKAMTVIAVLDSAGKVLAEAIIETKGSTILDFLKSQRGDLHVAFEEGTQASWLYDLIHPHVSAVIVCNPSKIVRHGNKADKIDAKLLAELLRTGALTPVYHGEKSARAVKELALSYISVVADGTRIKNRLKAMFRGRGIECNGAGVYDPDERKEWTAKLDSKAVRARADRQWQELDLVERLIEEAEDDLLAEARKYAATRILRSVPGIGPIRAAVTLGVVGTPHRFRTKKQFWGYCGLAVVTATSAEYELVNGQVRRSKKRPLLRGLNNNYNHAMKEVFKGAAKTVAAGVWKSRFEAMVANGAPESLARLTLARKIAAITLAVWKKGERYDQRKMKTRHAA

SEQ ID NO: 265804 - protein, 375 aa, unidentified
MKEKVRFLGLDVHAETIAIAVAEPDGEVRSLGTIPNRAESIRKMIRKLGPAEKLRACYEAGPTGYVVYWQLAELGVQCEVVAPTLVPVKAGDRVKTDRRDAEKLARCYRSGDLTAVWVPDEGSEALRDLVRAREAAKQDQVRARHRLSKFLLRSGQRPPTGVRPWTRPYLIWVAQLRFPQSAQESTRQDYLHEVEHMRARVARLEQAIMEAVKLASPALQQVINDLQALRGIADISAVTIAAELGQVSRFGSARELMGYCGSVPSEDSSGKRIRRGGITKTGNAHLRRIVGEAAWSYGRPPCIWYGLRRRQESISEEAKEIAWKAQHRLHKRYMRLGAAGKPQGKIITAVARELLGFIWAIGIRAETIASQQAAA

SEQ ID NO: 265805 - protein, 346 aa, unidentified
MAKIIRIGLDRSKHVYQLHGVDSEEEPVLRKKLRRKEMVAFFQKLAPTVIAIEACGGSHHLARSLATFGHEVKLIPPHYVKPYVKRGKNDAADAEALCEAMSRPSMRFVPVKTAEQQAALMLVGLRERLIRNRTQLANSIRGYAAEFGVIAARGLCRIGPLLERIAADVSLPALARELFAIQGKEYALIEAELKVIDAKLMAWHRDNACSRRLSQIPGVGLIGASMLVMKTPDPRLFRSGRQFAAWLGLTPKDHSTAGKVRLGVITRAGDEALRSTLIVGATALLRRVREGSNRKSSAWLLDLLRRKPPKLVAVAMANKIARIAWKLMVSGETYRANAASFVAAAA

SEQ ID NO: 265806 - protein, 454 aa, unidentified
MSKETKNKQKKLSVVGMPIVHADAAGIDISSTMHAVAVPADRDEICVREFGAFTEDLISIAEWLKKCHITTVAMESTGVYWKPLYTVLLEYGFSVALVNARHVKNVTGRKNDMDDAQWIQKLHSCGLLKSSFLPDDMAESLRVLVRHRKRLIEDSSKYVLRIQKALELMNVKIHSVINDITGKTGTAIIEAIIAGERNPENFMQYVDARIKADHDTIRKSLTGNWREEQVFMVSENYELYKYVKQRIVSCEQKIEEYLQKHAALNNEGVIEKIHEEVVSSVKKKKTKNQPAFNVKAYLKRIYGVDVTAIFGISDNTAMEILSETGTDLSKWESENHFVSWLNLCPNNKITGGKLISSMVMKKKAGNATQAFRAAANSIQRSDNWLGDYFRRMKAKGGNKYAIIATARKIAIIYYKMVRFKEEFKPVDADEYRKKYKAARIAYLEKQLTKLKGAA

SEQ ID NO: 265807 - protein, 398 aa, unidentified
MLSIGIDVSKGKSTVCGMKPGGEIVYTPFEVQHTREGMSELVSLLHSSGEEVRAVLESTGSYHCPVVAALLENGIFVSVINSLRMKRFCSQSIRKVKTDRIDAMQIALYGLAYWQELQPARLPEDTYRELQLLARQYYQMTSLLIKAKVDFNAICDQVLPGMQELMNDHAGRHKLSDFVLRYRHTTHILEMGETRFRKDYCKWAEKKGYRNCERMAALIFATAQNGIPVLPNAPSTQIVITEAIRVLHTVEASRDAILTQMQALAKTLPEYSLVREMPCIGDTLAPRLIAEIGDVRRFHSKRALIAYAGIDAPPYQSGKFSANNRHISKRGNRYLRKTGYEVMQSYVMHKPANDPIFTFIEKKRSEGKSGKLAMVAGLNKFLRVYYGKVTELYRSLPQ

SEQ ID NO: 265808 - protein, 341 aa, unidentified
MERTVIAVDIAKKVFQLHWVEMDTGCIERLQLKRAKLLEWFASRAAALVVMEACGGAHDWGRALMGLGHEVRLISPRKVRPFVQRNKTDAADAQAIWTACQQPGMRFVPVKTEAQQIVLSLHRLRAQLMKTRIMQTNELRGLLYEFGIVLPEGHAALLKALPAAMSDAKTRLPAMLVDSLDEQLRRVRQLQADIGLIERRLSQQMREMPACKAVAEIPGIGLLTATAVVACMGTPSAFKDAREFAAWIGLVPRQTGTGGRVRQLGISKRGDAYLRTLLMHGARAVVIRSKDSSTWPWVAALLQRRPYSVAVAAVANKLARTIWAVLARGQAWRPEAWQPAR

SEQ ID NO: 265809 - protein, 420 aa, unidentified
MYYVGIDIAKNFHIACVLGEDGNLLKKNFRVESEISCFDMLYQLLDTIDKDTSKFLIGMEATGLLFENLYIFLQKLGYNVVLLNPYQTTRFREMETMKYVKNDNIDSQMIAALLKSGRYSEGYVSEDIYQAIKSLYRHKATLMEEMKKAKRQVSTTLAVVFPEFEQIIRDPFSVSGMALLNKYPTAKHYKGASAERILKVFRNIKGNNFNLEKADKLLNLALLSIYQGNAKDERAYVIHSNLRRISFLKEEIEQAEAQMFTLLNESDEATKSSISKDEEVYIADLVDNLRSIDGVADKTIFAIISECGNISRFRSGQAFIGFLGLYPTLYQSGNSTKYGKIAKRGAKLAKLAIYQAAVACVRHNAELKKIYLDKKSSGRAPKECVVIIARKLAMIIYSIYKNNTPYNPARVFNTQASLGH

SEQ ID NO: 265810 - protein, 361 aa, unidentified
MKSTTIIAFDQHAATTVAAVLLPGHRAPALQTLASDSPTILKFVERLRRTAPLTCCYEAGPCGFELQRALSARDIRCDVIAPALIPRRAGDRIKTDRRDAGQLAVLYRAGALTAIHIPTEQEEAARDLLRCREDIRADLLRARHRLSKFLLRHGRRFTATKKAWSKRHAVWLRAQTWPIAALDQTHRAYLRAVDEVLARLRDVEQELRTLLDLEPLQPRVQRLRCFRGIDDLTALTIAAELGDPRRFPTAPSTMAFVGLVPSEHSSGTKRAQGGITKTGNAHLRRVLVESAWHYRHHPFVSATLRARQRGAPADVIARAWAAQQRLHRRYQRLAARGKPKQHIVTAVARELTGFVWAALTQ

SEQ ID NO: 265811 - protein, 342 aa, unidentified
MNVIIGIDPHKATHTAVALDGNELELGEIQVRANVTQLKRLLAWAAPFEKRTWAVEGAGGCGYLLSQQLVAAGEHVLDVPATLAARVRVLGSGKSNKNDPNDARSIAVAALRAPRLAQVRPSDHASVLRLLAKRNSQLSSSRTRTACRLHALLAELLAGGSAKKLKANEAERVLASIRPTSPTEVTRHSVALEHLEDLRRVDAQLAESRKRIIEAVAASGTSVTDIVGVGPIVAAMVIGYTGDVRRFQSRHRYASYTGTAPIEMSSGGRVIHRLSRRGNRQLNHAMHLAALSQIRYPDTPGRVYFDRKVVEGKTSKEAFRALKRRVSDAAYRQLLVDAAAAR

SEQ ID NO: 265812 - protein, 329 aa, unidentified
MILGVDVSKDYLDVALETAARKRYERKVNNDAGGFQRLLSWACERTGATPQQLTVVMEATGVYHEAAAQALYDAGCRVIVANPKRVRDYASGVGLLNKTDRVDARALLRYGREQADELVPWEPPPMEIRTLRALYARLSAVELDLRRELNRKQQADLNGQPEPVRQSMELSISHLREDCERLKRAIEDHFDQHPNLRQQRELLQSTPGIGPVSADRMLCLLLRHRFTDARQAAAFAGLVPRMHQSGSSVRKRPRLTKSGDASLKAALYMAAVSACRYNQELRQQYRALLNAGKSKMCALGALMRRLLHIAFGILKYRVPYNPSLLASGG

SEQ ID NO: 265813 - protein, 343 aa, unidentified
MQMITTIGLDIAKSVFQVHGVGAGGQVIVRRQLKRRYVLTFFQKLSPCLVGIEACASSHHWSRELQALGHTVRLIPPAYVKPYVKRQKNDATDAEAICEAVTRANMRFVPTKTPEQQSGLVLHRTRHLFIRQQTAVINAIRAHLAEFGIVAPVGRHGVEELLNVVADPNDTRVPEIARACLSAFGAQLHRIKEQILEFDRLIRAWHRSNEMSMRLEEAPGVGPVLATALVATVADPKSFRSGRNFSAWIGIVPKQHSSGGKNRLGNISKQGDRYLRGLFVAGALSVIRYAKIHGTKHRPWLTALLARRPTKVAAIALANKIARMVWAMMARGERYKEPVALAR

SEQ ID NO: 265814 - protein, 345 aa, unidentified
MKITTAGIDLAKNVFQVHAVDEHGKVAWRKQLRRDQMTAFFVNLPPCLIGMEACGSAHHWARTLQGFGHTVRLMSPQFVKLYVKSNKNEVADAEAICEAVTRPHMRFVPVKSVEQQAVFSLHRARQGFVIARTAQANQIRSLLGEFGLLIPKGICHVAKQVPELLEDASNQLPGTFRRLIARLTEHLKDLDKLVDEFEDQIKAWHRSSELSLRLEKIPGIGPLGASALVASIADANSFDNGRQLSAWLGLVPRPHSSGGKPTLLGISKRGDVYLRTLLIHGARSAIVAAQRKVVNTNVWLAGLLNRRHPNVAAVALANKNVRTVWALLAHGREFRPNYVPPQLAA

SEQ ID NO: 265815 - protein, 377 aa, unidentified
MTSENTVHVAIELSVSSWLVAARLPRAKKLQLHRVEGGDGAALLGWIAELRSRAEAKLGESVELACCFEAGRDGFWLKRLLAAHGITAYVLEPTSVLVNRRARRAKTDRLDAEGMLRVLAAWLGGDRQVCSMVQVPTPEEEDAKRPHREREHLVQEKQRIENRIEALLFCQGSRGRPSLRSWESDLAALRTGDGRALPPLLRAELNRLRRRLVLVLELIREVEAERAAALAAADDATSRKVAALQRIRGVGPNFATVLVREVLYRSFANRRQLASYVGIAPMPYQSGNTDRDRSIGRAGNPRARTTLIQLAWLWLRYQPGSALATWFRARVGKLTGRTRRIAIVAMARRLLITLWRFVETGVVPEGIEIKAEAMLTA

SEQ ID NO: 265816 - protein, 387 aa, unidentified
MKKLLFIGLDVHAKSITIGLAESAGEARVYGTIANDLHALEKVLAKLKKAHPGAELRVCYEAGPTGFVIARRLGQLKVHCTVVAPSLIPVRSGERIKTDRRDALKLARLLRAGELSAVNVPDASDEAMRDLCRARTDAVQDLRRGRAQLKAFLLRNGYRYTGKSAWSEAHRRYLRELVLPHAAQRVVLEDAIQSIGSAEGRIGRLEEQMETLLESWQMRPVVAALMGMRGFALVGAMVLASELGGAWRFEHPAQLMAYLGLVPSESTSSEKRRQGGITKAGNSHARWLLIEAAHHYRLSPKVSKELSVRQRGLGEEVKAVSWKAQTRLHKRTVQLSARGKQKNKVTVAVARELCGFVWHIFVLMRPQMTQAAASPPQLGAGRRKEAV

SEQ ID NO: 265817 - protein, 418 aa, unidentified
MGKRKNRVCGADVHKDIIVATILNSDNTEFQGKFGTTSMELGRFRDWLIAHNCEQVAFEATGVYWFPVYDALSPSIDTIVANPWMIKGIPRNKSDTLDSKWIADNCLDGKIKRSRVLPKDDRDLRTLTRARSAYTKTRTQLRNRIHKYLALCGITLSSYISDIFGKSGRHILDGLIESKDIDSILDSIPSGKVKKKRELIKASLGKGLDDVSRMLVKDTLELLHHLEEKVNDTSLVILGRLQERAKDLAIVMSVPGIGFVSASIILAEIGDYHDFQTSEQLVKWCGLAPGLNESAGKKRPCGITKQGSKSLRTILVEIAQVVAKMSNNKLSRFFHRLRARKNYNLAITALARKLISIIFHLLINQELYQENNCTTVKTKPIKKDLLCLSKEEQLKDGVAAIVDAFYHLKKKSSLEGGG

SEQ ID NO: 265818 - protein, 336 aa, unidentified
MVKPKYSKKMAKTYVGIDVSYKEFWVAFCPDDKKTSLVKSFENNSTGFEALLLWLQTYPNHSFHFVIEATGAYHSRLAVHLWQADQVVSVVNPLTMKRYAQMCLWRSKTDSQDAQLICQYGELHQPPAWQPPSEDSVKIKQVYTLYELLIKQKNQLTNHQHAQSQRAHIDEQVQTVVQQEIEHLEDRIKEMAAYLDQLAQQQAPELYKNLLTIAGIGPKTACLLIAVTAKFENFEQAKALIAYAGLAPRQYQSGTSVKGKAHICKMGMGQLRKLLYMCALTAIKSNKACQQLYQRLRQRGKLHRVALIAVAAKLLRQAFGVAKSGQAYEENLAMGK

SEQ ID NO: 265819 - protein, 309 aa, unidentified
MSSWVGIDVSKNTLAVWVRPSGVNFIVCNSSEGHQALLLNLADIQVERVLLEATGGYERAVMGCLVQAGHSVVRINPRRARAFAQAMGKLVKTDPVDACALAHLAQVIEPSACQPVSLARDELQELVRRREQVVKLRDDERRRLTLARSGVVQESLQTNISQLNEQIARLNSAIEAAAQRTDNQLVKQLGAIAGIGPVTVASLLAYLPELGQLNRRQIAALAGLAPYNNDSGQHSGKRCIKGGRASIRRVLYMATWSVIRCHSSFGARYASLRARGKCAKVALVACMRVLLIRLNAMVRDHSSWRAEAV

SEQ ID NO: 265820 - protein, 422 aa, unidentified
MLEQTQDEQEIIARVAALDIGKAELVCCVRVPDPKGGSRRVQEVMTYSTMTRSLQLMAERLMDLGVTRIVMEATSDYWKPPFYLLEAHGFEVWLVNARDVKNLPGRPKTDRLDAVWLCKVAERQMLRPSFVPPVPIRRLRDLTRYRIGLVSDQTREKNRVEKLLEDSQIKLSVVASDIFGVSGREMMAALIAGERNPQVLAQMARTRMRTKIPQLEEAFVGHFTDHHRFLLTKMLARIDALDVDIADLDTQIEAHLAPFADAVARLDQIPGVGATAAAVIIAEVGLDMTRFPTPAHLSSWARFAPGVKESAGRKKGTGATGHGDRYLARALGEAAVGASKTNTFLGERYRRIARRRGKKKAIVAVGRSILVIVWYLLSDPETRYHDLGSGYYDSRINPERKKRNHIRELEALGYKVTLEPAA

SEQ ID NO: 265821 - protein, 335 aa, unidentified
MTYYAGLDLSMETTQICIVDETGKKVASMKVESRPDMIAYALREVGDVERAVIETGRMSPAICHGLRALDIPIVCIDARQAHQSLKALKANKTDPHDAAGLAQLARTGFYKEVHVKSPAAHGVRSIITTRNHLVESRVRLDNMIRGLCATFGFKPGPGQGKAFIDRVMEAAKTPGLGQSITALLAVRTGLTAQIKEMDRVLRELAHGSQSCRQLMSIPGVGVQTSAAFVAAVDEVRRFRQSRTAGAYFGLVPKRHQSGEIDLTGRITKQGDSTVRKLLYEAANSILTRSRGSFPLKGWAMKIAKRRGLRKARVALARRLAVIMHAMLRDGTLFEA

SEQ ID NO: 265822 - protein, 371 aa, unidentified
MSGSTVPSTSPAPKTRRRRPAGEVVLGVDTHRDAHVASVLSVTGAVLATDEFPATAAGYRDLLKWARKSGAVRRAGVEGTGSYGASLSRYLLAQGVDVFDVNWMDRADRRRRGKSDPLDAQNAARAVLSGRASARAKTGDGPVQIARMYKLTKVSAVKARTQAINQLKAVLVTADPVLREELAGLGNAELFRTCAQFTDARGREEAGAESVVEATRITLGLLAHRIGQLSEEVRDVEARLTRLVEGHAPQLLDVVGIGPDTAVTLLITVGDNPERLDSEASFAALCGVSPVERSSGRRQFRRLNRGGDRQANAALHRIVFTRLRVDPRTQDYYERRIKEGKTRREIVRCLKRYAAREVFHLVKQLQPAPRS

SEQ ID NO: 265823 - protein, 293 aa, unidentified
METAYDGRQVVGMDLHRRRSVLVRMTGDGQRLGMARIINSPQELRREIARAGKNPEVVLEATYGWYWAADTLAAAGAEVHLAHPLGVKGFTYRRVKNDERDAADLADLLRMGRLPEAWIAPPQVRELREVTRYRHKLVSLRTSCKDQVHAVLAKLGIPVTCSDIFGKAGSAWLGGLGLPQPYAGKVTSLRQLTGELSTEITMLTEVIADLLAADRGYQVIQQLPGIGPVLAAVITAEIGDVTRFGNPGQLCSWAGLTPRHRESDIILSSRVDHGCDLGGHVVDSVVDVTGGRS

SEQ ID NO: 265824 - protein, 372 aa, unidentified
MIQRFHGLDRHKKHSTISVLNREGQEVEFVSKCPDLRGYVEQLGPEDAIVMEAATGAFFWADLIESTGATCYILHPYKFKIIRESWNKTDKHDARNMAKALWVYLVTGEFGIPTVYKPSVAIRELRRLFSQYYLLNRQVTLMKNTIQAILGDNGVSLNYRQKTLLSSDTEAKKMVDEFDLSPASLSSIQINLEILWKVEEQKKKLKKEILLAGEPFADEVKLLITVRGITPLTALAFLADVADIRRFKTLRKMNAYLGLVPRVNESGGKSKTGHINRQSRRLTRTLFTQSVMHFADASPYLRLYYSNLISRRGVGRARIALIRKICGMMRRMLLEHQEFRWVQSSNFQRKLKRYECQMKKIKKLKEEERRIA

SEQ ID NO: 265825 - protein, 377 aa, unidentified
MKKNIRFIGLDVHAETIAVAVAEANGEARSLGVIPNRPEAVRRLVKKLGPAESLQVCYEAGPSGYVLYWQLSELGAHCDVVAPTLVPVKSGDRIKTDRRDALKLARSYRSGDLTPVWVPDAEHEALRDLVRAREEAKKDQLRARHRLQKLLLRRGLRPPEGIGAWTVRYLTWVKTLQLEPAALAATLLDYIAEVDHAHERIERLERAIDQAIEAAPEAIRAVIEGLQSLRGVARISAATIVAELGQLSRFGRAKQLMGYAGVVSREHSSGERIRRGAITKTGNAHLRRILVEAAWAYRHRPYLGGELRRRQKNASENVKEISWKAQHRLHSRYARLMGRGKTRQQAMTAVARELAGFVWAVGVEVERQLASRPARAA

SEQ ID NO: 265826 - protein, 352 aa, unidentified
MVILGIDAHKRTHTVVAVDELGRELGSKTTAATTSADHLELLRWAQRFETPRVWAVEDCRHLSRRLESDLLAAGERIVRVPPKLMAQARESARTYGKSDPIDAQAAARATVAGVAATTPKTRDGQVEMIRVLRVARRGALKARVAAAEQLHGVLYSAPDELRQPLLGLKTKTLVKLCSAMRPGPLTSPTAATKTTLRTLARRWQQLQVDLDQLDTQLQALVAAAAPTLLALPGLGVDTAGQLLVTAGDNPQRRRSEAAFAHLCGAAPIPASSGRTHRHRLNRGGDRQANNALWRIALVRMRCHPPTRAEVERRTKQGLSKLDIMRCLKRYIAREVYHHLTDPPAIALPPCPK

SEQ ID NO: 265827 - protein, 453 aa, unidentified
MVQRNRKFPLKPSKSRAALAITHPNAAGIDIGSASHFCAVPPDRDEQPVREFPSFTADLNALADWLTACGVDTVAMESTGVYWIPLFELLESRGFTVMLVNARHVKNVSGRKSDVLDCQWLQQLMTYGLLSGAFRPTDAVCVLRSLWRQRGMLLRSQGRHVQHMQKALTQMNIQLTNVISDVVGETGQKILRAIVAGERDGQVLAAMKNARIHASNEQIAKSLQGNWRAEHLFALKQALDAFDFIGTQLAECDTQIEAQLQMLQAHEGEPAKGKKRGRARNAPKFDLRAQLFKMCGVDLTRIDGIDVTTALAVISETGADMSRFPTVGHFASWLGLCPGTKITGGKVMSGKTKRVANRAAQALRLAAAALRSSKSALGAYFRRMSARMDKPKAIAAAAHKLARLIYTMLTKGEEYTDLGQDYFEERYRERVLRQLTQRATKMGMKLVAAEQPA

SEQ ID NO: 265828 - protein, 329 aa, unidentified
MIAIDLAKDIFHLFGEIKQSGIKVDRALKRNKLLTFTANLPKTLIVMEACGGASYWNRRFTEQGHRVKIISPQHVKAFVGHQKNDRKDAMAIYQAVQKIGINFVAPKSIDQQDMQAQHRVRERYVKQKNMCSNQIRGILLEFGICIPVGVNYISKRVPEILEDADNELSLRTRALIQDLYEEFKQLAERVVNITKAIEVFTNQIEICRELQKLSGVGPLVASAFWMCVGKAGNFKNGRTLSAWVGLVPRQHSSGGKVKLMGITKRGDQYLRKLLVIAGRAQINASTRRMHKSEEDLKLLDFVDRKGSNKACVALANKLGRHMWAVMSAF

SEQ ID NO: 265829 - protein, 341 aa, unidentified
MKYVGVDLHKQSITVCVMVKEGDQRKVEQRRTLKCAETASIRNFFEQLGGFRVVVEATSHYEWFLLLVEDLADRCVLAHPKKLRVIAESKHKSDKIDARILAEFLLLDMLPEAHRPTPRVRQHRVLVRHRQAVQSQITSVKCKLRHKAAFYNSDMAKLFTARGLEYLAKIAMSDADRFECEALREQLLFLQKQLRAAEKQLTSFAQTAPVAERESRAVLATMPTVGTVTVDVVLSETADVRRFRNAKKIVAYAGFDPGFRESAGRGKELHIAKDGSGLLRWALIETAWRLVRKSARWRRLFMKLQGSTGHKKKAIVGVARRVLCVMYAMLRDGKASRPEAV

SEQ ID NO: 265830 - protein, 401 aa, unidentified
MNAVGIDVSKGKSMVSIMRPFGEIVSEPFEVKHTSSEIKALIALINSVDGESRIVMEHTGRYYEVLAHQLAEANLFVSTINAKLIKDFDNDSLRKVKSDKADSIKIARYALDKWTGLKQYSLMDEIRNQLKIMNRQFGFYVKQKTAMKNNLIGILDQTFPGANTYFDSPARNDGSQKWVDFIDTYWHVDCIRNMSLNAFTEHYKKWCKRKKYNYSQSKAVEIYEKAKEVVPVLPKDEITKLIIKQAISQLNNASATVESLRQLMNETASKLPEYPVVMSMKGVGPSLGPQLMAEIGDVTRFSHKAAITAFAGVDPGVNESGTYAQKSVPTTKRGSSELRRTLFLVMDALIKSMPQDDPVYQFLDKKRLQGKPYYVYMTAGANKFLRIYYGRVKEYLVKLEK

SEQ ID NO: 265831 - protein, 462 aa, unidentified
MDDRAHAGWQVQSNVICFKSMKSLPVLDPKAAAIDVGSEKLHVSIAGDVPKVFGTFTGDLENLRAYFKEQQVRSVAMEATGVYWLYLYEVLEGAGLEVIVVNGRHVQNVPGRKTDMADCQWLATLHAHGLLRGGFVPPAEIRRLQDYQRLREDHIRGAASQVQKMQQALERMNVKFHDVISDLTGVSGLKVVGAILRGERDSAKLLELCDQQIQKKKSAAVVESLRGCWKEEHLFALRQALELWEFFQQKIAQCDRELEKLLHQLVPPSSNDSADGGTSKLARAKVPGKNAPVIAKFQQLLARICGGRDATQLPGLSAYLVLQLISEVGTDMSRWPTEKHFVSWLGLGGARKQSGKRKGQIKAHRNRAGRIFCRASAALAQSVDKALGGFYRRLRGRIGGLAANVALARKLAQLFYRLLRYGAEYVERGLKVYEAKVLETEARLLRKLAGKQGFILVSATAK

SEQ ID NO: 265832 - protein, 349 aa, unidentified
MGMLADHVDHVIGVDTHRDSHTAAVLDTAGSVLAELTVPSDAFGYKCVLTFGRSHAQDGRAWAVEGTGSFGAGLTTFLLERGEWVVEIDRPARPARRNGAKSDELDAARAAREALSRTHLAQPRRRGDREAIRVLLTTRHGAVAARTKAVCHLKALLVSAPEQLRNHFRHMRTDEQLTRCARLRTSPSQSAEHRCTVMALRSTARRTLVLQAEADDLETDIERLVMQAAPGLLAEPGVGAISVAQILCSWSHRGRLRSEAAFAALAGAAPIPASSGQTVRHRLNRGGDRQLNRALHTIVLSRLVHHEETRAYAARRRAEGKTPREIKRCVKRHLSRRLFKLLEASASGV

SEQ ID NO: 265833 - protein, 351 aa, unidentified
MKTEHTARPKLFIGIDIHKRSWKIHCSTDISGGKTFSMPPSPEGLKNYVEKYFQDHQVITAYEAGCCGYHAHRSFESYGWRSLVVNPADVHRKGKEKHTKTDRIDAQLIARELKDGRLDSIHVPDMEREQLRSLFRRRNDLVKDYRRIKSLIKSQLLYFGVIVPEQYDNSHWSHGFRDWLDALQFEYCPARATLDSRMRQFRFVDQDLRDVSTQLRRFCKTYYKKDYNLLRSIPGIGGIVACGILCELGDLRRFRSLKHLSGYVGLAPGIYQSGDNLRTTGMTRRAHRLIRSYFIEASWQAIRTDPIMQSYYRKHLGKNVKSIIVKVARKLLSRTLAVIKTETPYVIGVVE

SEQ ID NO: 265834 - protein, 326 aa, unidentified
MMHPAEAFKPAPTDALITIGIDVSKDHLDAARHPSGDSLRVPNTRKGHTELLRWLGNSGSIARVVFEPTGPYHRMLEERLASVGLQIVKVNPRQARRFAEAAGRLAKTDRIDALMLARYGALLEPVTRPVRSDVQNQLAELVAARRGLMRDRTATLNRLKTLTIERLKRHARHRLRQIEAQVASLDAAIDAIVLGDPVLCRRRDVLASIPGLGLITAHTLLADMPELGAMDEGQAASLAGLAPITRQSGTWRGRSFIQGGRASLRQALYMPAIVAMRFNPDLKRVYDRLIAVRKHTKIAITAIMRKIIVLANALLRDNRLWSPKAS

SEQ ID NO: 265835 - protein, 339 aa, unidentified
MQTITTIGLDIAKSVFQVHGVDAEGNVILCRQLKRRYVVAFFQKLPPCLVGIEACASSHHWSRELQALGHTVRLMPPAYVKPYVKRHKNDATDAEAICEAVTRPNMRFVATKTPEQQSCLTLHRTRHLFIRQQTSVINAIRAHLAEFGIVAPVGRNGVEQLLGVVADGSDRRLPEIARACVAVLGTQLQSLKAQILKFDRMIMAWHRSSEASRRLDDIPGVGPALATALVASIADPNAFRSGRDFSAWIGLVPKQNSSGGKDRLGSISKRGDRYLRSLFTTGALAVIRYAKIHGTKHRPWLTALLARRPTKVESQLGQGSTFSFTLPVIVERQVNMEAN

SEQ ID NO: 265836 - protein, 352 aa, unidentified
MTVTIVETRAEIRAITGGVDTHADVHVAAALDPIGGLLGVREFPATAAGYGRLMSWLGGFGTVAVVGIEGTGSYGAGLARHVTTAGVRVVEVDRSDRQDRRRQGKSDPLDAVSAARAAQSGRARGASKGRDGAVEAIRALMVAKRSAAGERTQTINQARALILTGPEDLRARFTGHTAAALVAELASLRPRPGSTVGYATRIALRELGRRAEFLDGQLERLDELIGPLAAARAPGLLALYGIGPHTAALLLIAAGDHPGRLRSEAAWAHLCGAAPIPASSGKTVRRRLNPGGDRQANHALWRIVFTRLGSDPATRAYAERRTAEGKSKKEIIRCLKRYVAREVYPHLRATAG

SEQ ID NO: 265837 - protein, 505 aa, unidentified
MTTATARGKPASSPPPSAQRMQAQAQRQAYHRRKTRAKGKREALRQKEAAHVEALPVQHPHAAGIDVGSRSHWVCVGFTTETPSCVIQEFPAHMAGLKAIAAFLHKHQVTTIGLESTGIYWIPLYELLQAEGFEVLLVDPSYSQQLRGRPKTDRRDCQWIYRLHSVGLLAAAFRPDEKTCQLRAYLRQRGNLVRQASRHVQHLQKALEQMNLKLTEILSDITGVTGRSIIRAILRGTRAPEKLARYRDKQCKASEAEIAQALTGSYREEHLFELKLAYEAWQFTLGQIEKVDGQIALQLGRMKGDRALPPLKPKARPKRRVNSPGFDVRAALYYVVGLDLTEIEGISELTALTLISEIGPGVSQFATVKKFCSWLGLCPNWQKSGGRVKSSRTRRGVNRAAQALRMAAQSLHHSKGALGGFLRRMKGRLGVQAALTATAHKLARIVYLALKHGMTYVRQSQEEYEAQMREKQLKALRRKARQLGMEVIEKTSSSAATAVAAAEQE

SEQ ID NO: 265838 - protein, 446 aa, unidentified
MPLKPDTLPTVPPAQALLVGVDPHRATHTVCIMNQDGHELCARFRVPNNRRGVQLLARRLNDLAQANGYTQVRLAIEATNWYWLGLCYTLPKVCALPVESRAINPRLSANFKKVLMNDEHTDSADAFAIAERLRMGRDLPPPFSPDALYLPLRLLTRYRFHLVQRLISEKAYAANLIYLKASDYTAPDTQPFSDVFGATSRAVLTEFASLEQILDMSLDDLATWLAQRGKRRFADPMATARKLHAVAQASFVLPAPFQHSLQIALDLSLQHIAALEAHLKRLDVAITQQLAALNIPNTLTTIPGIGPVLAAGLIAEIGDVHRFNCDDDKVAKLAGFTWRRHQSADFVAEDTPITQHCNRYLRYYFCEAAQLVRIHEPEYAAFYQKKYTEASRHHHKRALVLTARKLVRLVVHLLATRQAYRPPEVDSHSRATSRRQAANPTEQLNR

SEQ ID NO: 265839 - protein, 404 aa, unidentified
MVTVDIGVASNTGYCATVDGRDIKPFKFENSREGFEKLWHMVVASKSRFACDEIIAGYESTGPYAEPLAHYLMSKPVTIVQVNPMHTKRMKEVNDNSPLKTDDKDPRVIADIIRLGRTLAVVVPEGDAAYLRRLNNARERHVGEQTALLNQLQQLIFVIFPEFKTVLKNMKGKTARYLLTRYTTPEKIGALSRETLGEEMRKRSMGKYRSKDAEILINLARNTIGIKEGVAGIVLDLRHILLQLEAEARYIAEIEAEMVVTLQRIPASGRLLSIKGLGVVSVAGLIGEVGDFSKFKTRSEIMKLAGLDLYEISSGKRRGQRRISKRGRSLLRKILYYAAIQMVKKNGIMYDYYTRLTNRGMLKMKALIAVARKLLGIIHAIVRDNRDYIGAYHAPKRRMIKKAA

SEQ ID NO: 265840 - protein, 316 aa, unidentified
MSEPILGLDVAKKKMDVALVFDEKTLKHKFDNSPNGFRLLQGWLTSLRIERVHACLEATGIYGEPVAEFLHERGHRVSVVNPLRIKGYAKSELRRNKTDPADARLIADFCRVKNPKEWHPLPAEMKHLQALTRRIESLERMLLAEQNRLEAAPREVHPSIKRIIKTLKTEIENVQRLIKEHIDDHPDMERQNKLLRTIPGIGPKTAQLLLGELEFSRFDSARSLAAQAGVTPGKDQSGSSLDRTRLSKLGNGRIRKALYFPAMVAIKRNQIIKNFASRLSQKGKSPMQVICASMRKLLHIAFGVIKHNRPFDPNLA

SEQ ID NO: 265841 - protein, 371 aa, unidentified
MGNNLRTKFVGMDVHQKSISIAIADDGPDGEVRLYGTTKNTVEAIDKVIRTLVSTGAELHFVYEAGPCGFALYRHLTGNGFCCIVAAPSMIPKKSGVRIKNDNRDAIALARLLRAGEITPIYVPDTEDEAMRDLTRARNDARIAARKAKQRLHSFLLRNECIYNGKKKWTKSHFNWLAKLKMKHPAPQVAFQEYIDAVNECTERMARLDEQILKAADEWRWAPTVKALQALRGVSLLTAVNMVAEIGDFNRFQNPKELMAYLGLVPSEHSSGDRIRRGGITKTGNSHARRICVESAWSYRYQARVTQLLLKRHEGLPKDILQIAWKAQLRLCTRYRRLRARGKASQVVVVAIARELVAFMWAIARRVPAVA

SEQ ID NO: 265842 - protein, 345 aa, unidentified
MRYFVGLDVSVQETAVCVVDEVGKVICERNVPTEPDDIAALLTTIGGDYVRVGIEAGPLSQWLVNGLAEADLPVVCVETRHMKALLKAQQINKSDRNDARGIAHMMRVGLFKPVHVKTLAAQEQRMLLTSRKLLQRKLLDIECDMRGTLRNFGLKVGVVSTKNYEERIRELVDGFPRLAAIVDPLLTVRQVMRQQLATLHKMLLNMVRDDPVCRRFMTVPGVGPVVALTYRASVDQPHRFVHSRDVGAHAGLTPKRYQSGEVDYDGGISKCGDAMLRTMLYEAAQSMLSHSRKWSWLKAWAMRVAQRRGLRRATVALARRIAVILHRMWIDGTDFRFSNSAAKAA

SEQ ID NO: 265843 - protein, 400 aa, unidentified
MNAVGIDVSKGKSMVAILRPYGELVEAPFEVKHTSSEAQSLIQTIQSIDGESRIVMEHTGRYYEPLFCQLTQAGLFVTAVNPKLIKDFGTNSLRKVKSDKADAIKIAKYALDSWSDLKQYSVMDKIRKQLKTMNRQLDFYMKHKTSMKNNFIGLLDQTFPGVNNYFSSPAREDGSQKWVDFATTYWHVDCVRNMSRNAFISHYQNWCKRKEYNFRQSKAEEIYETAKELVPVLPKDNVTKFIVKQAASQLADASETVAQLKAKMDEAASRLPEYPVVMAMYGVGSSLGPQLMAEIGDVSRFTHKGALTAFAGVDPGVNESGSYEQKSVHVSKRGSAQLRKALFQVMDCLIKNMPQDDPVYRFMDKKRKEGKPYYVYMTAGANKFLRIYYGRVKEYLLSLQ

SEQ ID NO: 265844 - protein, 402 aa, unidentified
MRHDPPSPAITPVHPGSVVDDAGRQVHRFAVAHSAAGLRELARRLRAVGVTEVAIERPDGQVVDRLLETGFTVVVISPKQIKHLRSRYGSAGNKDDRFDAFVLADTLRTDRARLRPLVPDTAATVALRAAVRARKDLVIHRVALCNQLRAHLQVFFPAPVGLFHELDGDTSLKFLARFDCQDRADWLSPKRLTGFLKGIRYSGATTGEVMHARITAAPRGASGDLGAATVHVTRALVAGLLGLVAQIDALSDVIREQLAVHVDGHIFTSLPRAGTVRAARLLAEIGDARGRFPTPEALACLAGVAPSTRQSGKVTVVAFRWGVDKQLRDAVVEFAGDSRLSNPWAQDLYRRARDRGHDHPHAVRVLARAWLYVIWHCWQDGVAYDPLRHGALQRLVAPPGAA

SEQ ID NO: 265845 - protein, 387 aa, unidentified
MTTDHPAAEVQTTAHPNNSKLFVSLELSRSAWLVTASAPGSDKFSKYAVAGGDRRALVDLLDRLRRTAERRAEVSVEVVAIQEAGLDGFWIHRLLANNGVESHVVDAASIAVDRRHRRVKTDAIDGETLLRTLMAWARGERRVCSMVRPPSPAEEDRRRLTRERGTLLKERIQHTNRIKGLLSGQGITDYDPLGKNRHTRLDALKTGDGRTLPDRLKMEIRREIDRLDLVNAQIATVERERDALVKTTVDVDAQNAAAVLSRLKGIGAEFSSLIWLEALFRSFANRRQIAAYAGLAPSPWQSGSTDRDQGISKSGNRRLRHTMIELAWFWLRHQPDSALSVWFRARVGQARGRLRRIAIVALARKLLVALWRYATQGVVPEGAVFKA

SEQ ID NO: 265846 - protein, 269 aa, unidentified
MTMNYIGLDVHKKTISYCVKDVSGRIQQEGKVGSTRRELDCWMKTLPQPWTGAMEATIFSGWIYDHLLPHAAQIRVAHPLMLRAIAVAKKKNDEIDASKIADCLRCDFLPECHMMPAELRDRRRTLRYRHLLVRQMVQMKNRVSGLLMETGVEYNKQRLHRGSYFRELLSANEEVHPSIRPLLKLSRETIERCQKTEYALVSSLQRDPMLVDRIKRLKTIPGVGRITALTWALEIGDVSRFRTIKQAISYCGLCGDERSSADKAMRMPL

SEQ ID NO: 265847 - protein, 356 aa, unidentified
MNSRGCLYVPGIIVGVDTHKDEHVAVVVDKLGVRIGQRSLPTTNMGYVSLERWASGLGEIDAFGVEGTGSYGAGLARFLRGQGHKVVEVNRPDRSTRRRLGKSDPTDAEMAARAVLAGVARDRPKSGVDKVEMIRMIKSTKDSAMKGRTQAINQMKAIIVTAPGELRAVLRGLTTNQLVARCARWCHGQLGTPTAAAKYALRSLARRHIQLTREIEALDTQLARLTAAFAPALIESFGIGPDTAAAILVTAGSNPERLKSEAAFAALCGVSPIPASSGKTNRHRLNRGGDRKANAALYRIVIVRLRYHDRTRTYFQRRIEEGKTKTEVIRCLKRYVAREVFGILHDIGKRSTAYNA

SEQ ID NO: 265848 - protein, 340 aa, unidentified
MGETPVFARLGNAGGTRGRKRDLVSSEKVFVGIDVGKYHVDIALSDESEVSRFKNDDSGIEEILRLLDARPVALVVMEASGGYERQLLASLLGAGIPAVAVNPRQVRDFAKALGMLEKTDAIDARVLSRFAQSVRPAVRPRPTQELAEVQDWLTRRRQLVEMMVAEKNRSQQARGGVLKSIRSHIDWLKKRIRDSEKELGDMLKNAPEWNAEVEVLDEVKGIGRVMALMLLGAVPELGSLNRKQIAKLVGVAPLCRDSGTLRGQRTCWGGRADVRACLYMAALAATQFNATIKAFYRRLLAAGKPKKVALVACMRKLLTILNARIRDYRAALPVSRTALS

SEQ ID NO: 265849 - protein, 345 aa, unidentified
MGPMYYIGLDVHKQKISYCVKDSSGCIHSDGWIPATRHDLDCWMKNLPRPWSAAMEATMFTSWIYDHLKPHATALKVAHPLMLRAIAAAKKKNDRIDANKICDCLRCDFLPECYMAPTAIRERRRTLRYRNLLVRQLVQMKIKISTLLMEAGVSYNKQKLHKAGYFRELLASNPDINESLRSLLRQCREMVVRLSKMEAALIQSLQQDRLLVERVERLMSIPAIGPITALTWALEIGEVRRFSSIKKAISYCGLCGAEKSSGDTVRRTPLSKQRNKHLQTTLIEAANMAPRYSPTLALLYDREKQKGNANRATLAVARKLVAYLMAVDRGQTHFFVIDQETRTAA

SEQ ID NO: 265850 - protein, 317 aa, unidentified
MRAPAASFVGIDVSKQQLDIAVRPRGETWTAAHDEAGVSGLVTRLRDLTPTLIILEATGGLEVALAGALAAAALPVAVVNPRQVRDFARSTGTLAKTDRLDAQMLAQFAEAVRPEPRPLPDAQAQELTALLQRRRQLVEMLTAEKNRLPLAARRIRPQLQAHIAWLHKQIAQFDEDLRQLLRSSPLWREKDDLLRSTPGVGPVLATTLVAALPELGTLSRRQIAALVGVAPLNRDSGTRRGRRTVWGGRAQVRAVLYMSTVVAVRHNPVLIAFYQRLRAAGKAPKLALTACMRKLLTILNAMLKHHTRWAPVMAQHA

SEQ ID NO: 265851 - protein, 383 aa, unidentified
MNYKQNEKINQVKESTLVVGIDIGSTTQYARAFDWRGIELGKVFTFSNSREGFEAFKAWMQHLQDKYRKSDVIVGIEPTGHYWFDLGAYLEDEGILLVMVNPYAVKQTKELDDNSQSKNDRKDPKVIAKLVTEGRYSAPYTPDGVYADLRIMVANRKRLIREMTQIKNRFARWFAIYFPEYTDVFGDYEAQSSMLLLKKVCTPEAIVELGAEKINQIWRDAKLRAVGMKRATTLCETAKRSIGLKKGSSAARYEMKLLLEDYEYKKAQLDAVMEEIEKLCRKIPESEQMLAIKGIGVITVAGFLAEVGDVRRIESPRQIQKLAGLSLRENSSGKHKGQTTISKRGRSKLRAVLFNAAIPLIAKNPEFKSYIFSFSFSTRCISR

SEQ ID NO: 265852 - protein, 315 aa, unidentified
MAMPVPVSTPIVGVDVAKSELVIYQAELDLLESIPNTKAAIKQWLKALPGKVAIAIEATNIYHLEFADLAYGAGCVIYMVGGYELSHYRKGVNIRAKTDALDAKLLARYLKNEAAELHPWTPPSPLYRQLLSLFRRRAALVQARVGLVQSWANEPLLKAAFAEQVRSMQQLEVLIEKTINDHLKEAGLLGQLKRCLKVEGIGFLTGARLLTAFQRGEFRNADAFIAFLGMDLRVSKSGQKDGRRSLTKRGDPEARRLLHNAAMSASRTAAWKAFYEEQRTRGFSTTQALVILARKLARVVFALLKGQSEYQPKVS

SEQ ID NO: 265853 - protein, 337 aa, unidentified
MKVTLIGIDLAKNIFQVCGVNQAGKSVFNRSIKRAQLLTFLRTYPDATIAMEACSGSNYWGRELLSLGHDVKLIPPQHVKPFVKGNKNDRNDAFAICEAAQRPNLIFVQPRTLSQVDIIITHRIRERRIRIRTALTNQIRGLLSEYGIALPKGRNPLNLLLPELLEDVSNQLTTIARQYMRELMEELRAINVAIGSLEKDIKLQARTHPDAKRLMGIRGVAEIIATAAVSFAGDGSGYHGARHFSANLGLVPKEFSSGGKQKLGGITKRGNSYLRRQLIQGAWSIIRYASKSNDRISVWALKVIERRGKQKAAVAIANKLARIIWAMLFHRSEYRPC

SEQ ID NO: 265854 - protein, 313 aa, unidentified
MFKSFVGVDVSSLWFDVAVTPDPSSWQFPYTEDGIAAFLSQLARLDVGLVVMEACGYLERPLARALQQTGIPVAVVNPRNVRHFARSIGQLAKTDALDAQVLARYAASIRPQPCSLPDPDEESLRALVARRRQLVGMSAAEKNRLRRADPELVSSINRHLEWLQDEISAISQQIAERQKNHPVWQERKRILETAPGVAATSSATLTAYLPELGQLDRKKIAALAGVAPLNRDSGQQQGARSIWGGRREVRTALYMCTLTSIRCNPAIRDFYRQLRARGKKPKVALVACMRKLLVTLNAMVRDGTEWQPQPSSP

SEQ ID NO: 265855 - protein, 323 aa, unidentified
MNTNTLQNINIGVDTGKSQLDIYIRPLDVFFTVPNNEKGIKQALTTIKKHNPQRIVIEATGRLEMPFVLACTEAKLPIVRANPVHIKRFAGAIGRRAKNDRLDAQLIAHYGEAIKPDLTVIKAKNIRLMSDLVIRRNQLLAMQTMEKNRIQILPKHLHSTITPILTAIKNQVSKIENKLVKLIEDCPEYQTKNTLLQSVPGIGNIAAASIISNVPELGYITNKQAASLIGVAPITRESGRYKGKRVIQGGRAQVRTVLYMAMMSAMQCNPVFKDTYARLLEAGKPKKVAIIACVRKMVVILNSMLRDGIMWDQNIAQNKGLTP

SEQ ID NO: 265856 - protein, 424 aa, unidentified
MSSIRKCCCGVDVHKSFIIAVIAKFENGEVTFTKYMRFSTFTGGLRDFKEWLRRHNCYEICMESTGKYYIPVYRIVADSEFHVDVVHPKYVKAPRGKKNDKRDAKRIADMYMRDHIAEYSIIPPAEILAIRDLTRYRRKTVNTITAEKNRMSNCLTVSCIKLDEVLSDTFGKTGQALIGQIIERGTCNFNPAPYIDRRVKAPIEAFEMALDGDVTFSTLTNMKIIQERLDYLDKQKTELESKMESSSEDFNRQLELLVSAPGIDTISAISIISEIGVNMSVFGSVKKFLSWVGLVPQNNESAGKKFSTRIGKGNTWLKPVIVQCALAAIKDKKHPEMREKYLAIKKRRGHGKALIAIAKRLMTAVFYMLLKDEVYTPQSGIAHAPNRGKLHLEKVIAYFQLKGYTIVTDDGLLIPQATTQTTSA

SEQ ID NO: 265857 - protein, 405 aa, unidentified
MLFVGDDWAEDHHDVELMDSAGRKLAKARLPEGVAGIARLHAMIGAQLSDAEAAEVAVGIETDRGPWVAALVAAGYTVYAVNPLQAARYRERHSVSGAKSDAADAHILADMVRTDAHQLRPVAGDSPGAEAVKVVARAHKTLIWERTRHTQRLRHSLREYFPAALEAFEDLDAADTLELLGKAPDPTSAAKLTLGQIRAALKRARRRDIDAKATRIQSVLRGEQLGRAAVITAAYAVTTRSAVAVLATLDEQVKLLQKQVEESFGRHPDAEIILSQPGIGPVLGARVLAEFGDAPKRYASAKSRKNYAATSPITRASGKRKVVFARFVHNDRLVDALMSQAFSSLQASPGARAYYDQLRARKVGHPAALRQLANRLVGILHGCLKTRTLYNEATAWSHRTEKAAA

SEQ ID NO: 265858 - protein, 315 aa, unidentified
MAMRVTLEKPIIGVDVAKNELVIYHDQYDRLEAIPNTKVAITQWLKALASSCAIAIEATNVYHVLFADAAHEAGCDVYMVDGYQLSHYRKGVNIRAKTDAQDARLLARYLKNELDELRPWIPASPLYRQLLSLFRRRAALVQARTGLVQSWTNEPFLRTAFANQVNSMKRFEALVEKKIRDVLQEAGLMRQVNRCMKVEGIGFLTAARLVTSFQRGEFSGANAFIAFLGLDLKVSKSGQSDGPRRLTKRGDPEARRLLHNAAMSGSRTPAWKPFYEEQRKRGFSTTQALVMLSRKLARVVFALLKNQSEYQTKVA

SEQ ID NO: 265859 - protein, 392 aa, unidentified
MHQAKITACAITEDGAGNVSVELAEFGGFKRDRKALARWVAGHLPEVVVMESTGIYWKSPYAALEDVGIAATVVNARHVKTVPGRKTDWADAQWLAMLARAGMLRASFVPPARFRALRLVGRQRQKLVGIVSGEKNRMHKLLCDGGIRLSVVVSDIHGVAARRMIKALLEEKSPTEVLLLSGTRLKADRTQLLDALDGDLTAEHRFVLQELMAHIEELEHRIARFDLHLLSELAPYRTTLALMQTIPGIDAIGAALLLVEIGNDMDAFGSVDRLASWVGICPGNNESAGTRKSGRIRKGNPWIRRLLCQFAHAASRTQCAFKSKFEALRLRRGHKRAIVAIAHKILKTVFLLIHRQTHYRDSAVDFETMSVARNAPRWLKMLKKHGFIPVAA

SEQ ID NO: 265860 - protein, 344 aa, unidentified
MRITTIGLDLAKNVFQVHGIDAAGKVVVRKALRRVQVLPFFAKLPPCLVGMEACGTSHHWARELIGLGHEVRLMPPAYVKPYVKRGKTDAADAAAICEAVTRPTMRFVPVKSREQQAALSVHRARHLLVKQRTQLVNMMRGLLAEFGIDIPQGLERALLMARQMVDGETPDVPLEAVGIVGILAQRAPATHAQLREIDRALAAAARTDDVARRLATIPGIGPVGATALAASVTDPDQFRSGRQFAAWLGLTPLQNSSGGKERLGRISKMGDRYLRKLLVVGATSLVRRARHKPEAVDRRLADLLARKPVRLATVAMANKMARIVWAVMTRGETYRKCHAPMLAA

SEQ ID NO: 265861 - protein, 416 aa, unidentified
MSLALPPAEFFVGVDWAAEVHAVCVINIEGKVLSQFTVKHSADGIALLVHRLAKFGEPIDIPIGIERPDGRLVDLLLEAGHPVVPVSPNAIKTWREGEVLSGAKSDAADAAVIAEYLRLRRHRLTAAAPYSSETKAVRTVVRTRDDLVHMRVAAVNQLAALLEAYWPGANAIFADLESKIALEFLSRYPTPTAAAHLGEKRIAAFCAARGYSGKRPAAELLTRLRAAPAGTTDPHLSVALHDAVLALVEVVKAVNTAVKDLDKSVAARLGEHPDGKIFTSLPRSGQINAAQMLAEWGECRQAYETPDSIAALAGCTPVTKASGKRKAVHFRWACNKRFRVAITTFADNSRHASPWAAKIYNDARTAGKDHPHAVRILARAWIRVIWRCWQNNTPYDPTRHGAARALSGQSSVDLAA

SEQ ID NO: 265862 - protein, 372 aa, unidentified
MPRISRVFVGLDTSKLKISVALAEEGRQGEVRFLGEIDNTPEAVRRLVSKLASRHSEVLFCYEAGPTGYGLQRQIAALGHECAVIAPSLIPKRPGERVKTNRRDALTLARLHRAGELTAIWVPDPGHEAVRELVRAREAAMADLRAKRQHLQSFLLRHGRLFPGRKPWTRAHARWLSELVFEHPAQYLVLREYRQAIDDGEARLERLTQQVADVLTTWSMAPVVEAYQALRGVALLTAVTFVAEIGDVRRFESPRQLMAYLGLVPCESSTGERVRRGSITKAGNTRVRRVLIEGAWTYRFPARMSRLLQERQANLPQIVRTIAWKAQVRLCARYRRLMAAGKRQTVVTTAIAREMAAFLWAIGREVNPSPAA

SEQ ID NO: 265863 - protein, 354 aa, unidentified
MKYFVGMDVSLEETAICVVDETGQMIKEARTTSEPDALHALLASFNLPFERVGLEACSLTAWLHGELTSAGWPAICIESRHAKAAMGAMPNKTDRNDARAIAQIMRTGWFKAVHVKTPTCRSWRSLLVARRAVLNQMRTIENVVRAILRETGLKLGTPARKDFVVRAREFVAGEKGLAMMIDPLLEILATMLREFTRLTKQVLVIVRDEPVCRRLMSTPGVGPMTALAFRATIDQPERFKKSRDVGAHLGLTPRRYQSGETDIQGRISRCGDELARTALYEAAHSLLIRSKKWSALRAWGMKIAKRRGMARARVAVARKLATILHRMWVDNTEFRFGREQAANPTIKAITVVAA

SEQ ID NO: 265864 - protein, 379 aa, unidentified
MKKNSKQTASIETVKKNSKETAKVETVPANRWGEKPKVTVGLDLGDRYSYYCMINADGEVFEEGRIQTNEEGLHRHFHGQGRWRIALEAGAHSPWVSRKLRAWGHQAIVANPRQIPALTETDSRNDRNDAENLARFAYCDPCLLKPIEHRSVERQRDLNLLKVRDTLVRARTMMINCLRGLVKSEGQRLPKCDADNFVSRTELFIPAGLRPASQPVLEQIQQLTQHIQDLEKQIKKLAEHYPEMELLQTAQGVGPIIAAAYVLTLDRPEAFPSSRQAGAFLGLRPRQKQSGNSDVQCRISKRGNQYLRRLLVQGAQRILGPKGEDSALRRWGLKLASTGGKRGKKRAVVAVARKLAVILHSMWKNNEPFRPFPETAAAA

SEQ ID NO: 265865 - protein, 339 aa, unidentified
MVEGTVGSHHKEGSSKMRKHITVCAGIDTGKYKLDVAIDGSLEQFQIDNTADGHAALSVWLKRHKVNRVGIEASGGYEQQVVVHLRRDGFVIVVFQPAQVRAYARFLLQKAKNDKIDATLIAACTAAIKKIHAPPDDRLAPFAARMTLIEQLTDQVARCKCYREGCREAPIQQFWKAEIARLNKLLRAELKDLAAAIRQHRDLAERLDLIESVDGVGLKTAVAILVRMPEIGRVTREQAAALAGLAPFDDDSSTHLGIRHIGGGRERLRGSLYNAALAAAFHWNPQLIALYKRLTRAGKPHKLVLVACARKLLIFVNTVVERGTPWTSTAPPLVVGKVA

SEQ ID NO: 265866 - protein, 413 aa, unidentified
MNGDVVHPRCCGVDVHKDSIAACVRWTDDQGTVGKESRKFGTTTQEITEFAAWLRGRDIRLVAMESTGVYWRPVWNLLEGQFEVKLANSEHIRNIPGRKTDKKDGEWIAKLLQHDLVPTSFIPPKEIRELRDLTRSRTKLVQGRSAVANRIQKVLEDANIKLASVATDILGHSGRAMLEAMIEGQDDVAVLADLARGRMREKISRLQLALAGRLTAHHRMLLRELLDQIDFLDGKIFTLESEIWQRSELFEEAIQLWSTIPGVNRLSAATLVAEIGINMEQFPSASHLASWAGLCPGNNESAGKRKSGKLRHGNPWLRSLLCQAAWAASRTKNTYLSSQFHRLVARRGGKRANIAVAHTILVIAYHVLKEKRPYQELGGDYFDRIRADGLQRYYVRRLQALGLEVTLAPRSLN

SEQ ID NO: 265867 - protein, 311 aa, unidentified
MNDTIGIDISKDRLDAYWLSNHEHRQFCNDQAGVKALALWAREVGIAQVIFESTGVYHWLVETGLAQHGISFARVNPRQARRFCEGAGQLAKTDRVDAAMLAKMGALLELKADVPRSETQHDLKQLATARQGLLKDRTAEKARLAATTHSLLTRQIKRRLKQIERALSQVSETIDDIIAADEDLRVRSDILTSIPGIAKVTACAILTDLPELGHLSGKQAAALAGLAPISRQSGTWQGKERIQGGRASVRRAIYLPAVVATRFNPDMRAKYEQLTSAGKCKKLAITAVMRKLIVMANALLRDGRKWNEYPA

SEQ ID NO: 265868 - protein, 413 aa, unidentified
MEILYRICCGLDVHKKTVAACLRFLSPTGTRAEEIRTFGTTTRELLRLADWLATAGCTHVAMESTGVYWRPVYQILEGSVELLLVNAQHIKTVPGRKTDVKDCQWIARLLEHGLLRASFVPPAPFRELRELTRYRRQLIEERAREANRIQKVLETANIKLGDVATDVLGASGRAMLKALIAGERDTEKLAALARGLLRKKEAQLREALVGRVTDHHAFMLQGLLSHIEFLDRQIALFDARIEAQTRPFIAALERLDTITGVARRSAEQILAELGDDMSRFPTAAHAASWTGICPGNNESAGKRKSGKTRKGNRWLRATLVECARGAVRARDSYLAAQYHRIARRRGDKKGIVAVGHSILVVAWHLLRNGGSYRDLGHDYFDRLDRDRLVRYHTRRLTDLGVVLPPPSSASATV

SEQ ID NO: 265869 - protein, 351 aa, unidentified
MKFYRCESEYSCGIDLHSRQMYVCVMDHEGNKMLHTNVTGNDWDYFLSRIEPFRHDLTVCCECTFNWYWLADACAAENIEFVLAHALYVKAIHGGKNKNDRIDSEKLAHLLRANLIPPAYVYPAGKRSVRDLLRRRTSFVWKRTELLHHLTCMPLVQGQEPVKKCQHRVRERWFEQLRPRFDEPMRKISAEADMYLIKEFDKIIDRLERVIVKETKKEQGRDFALLKTIPGVGDILALTILYEMDTVERFPRVQDFLSYTRLVKGSVSSAGKIKGLRGAKLGNPYLRWAFGEAAVIGKRSNRDLNRYGKKLDTHLKKPQVNAILASKLARSVYFMLKHGKGFDPKLFAKGM

SEQ ID NO: 265870 - protein, 344 aa, unidentified
MDKIIRVGMDTSKNVFQLHGVNAAEKPVLRKKMRREEMVDFFTKCPPTVIAIEACGASHHWARLLTSLGHEVKLIAPQLAKPYVKRNKNDAADAEALCEAMSRPTMRFVPVKTVDQQASLMLVNMRERAVAEQTRLVNTIRGHAAEFGLTAAQGISHIPQLLERIMVDETVPAQARDLFASLAEEFAQLSERLKELEAKLMTLYRGNECCRRLAKIPGVGVIGAVLLVMKAPSPELFASGRQFAAWMGLTPKDHSTAGKVRLGVITRAGDEALRKTLVVGATAVLQQARVGRGRNASLWLTELLKRKAPKLVAVALANKIARIAWKMMVTGEAYRQAAQPACAA

SEQ ID NO: 265871 - protein, 326 aa, unidentified
MVGQSQWSGTGSFLRATDQDKAKRKSCQNKLSCFDSLLAWVDTLSGIPSQSLAFVIEPTNIYHEQLVQFLHSKGATVYLVNPGRVRKFAEGIGILSKNDVIDADLLARYGLMAKKLIDFEHAPQEVNDLRSLLNRLDVLEKNLRRELNRREKAGKSLMFHRLEQQSITRSTKRHKAEIVSFKNAARDCVNASPWLQRCVKLLRTVPGVGERAAWLMMVVLSSRQFQCAAEVASFLGLNPIEKRSGKSEYRKPRLSKSGNSHYRQALYFPAMVATRRNPGVQALYERLVVAGKPRMCALGAAMRKLVHICYGVYKSQQPYQPQASLR

SEQ ID NO: 265872 - protein, 460 aa, unidentified
MARSAFDAREIDTNLGWWTGGTRDCCPARREHVDENLFEAVRPPTEKRLEVVVVRVVHERCCGLDVHKRNVVACVLTSEGEEVRTFGTMTRELLDLLDWLQDRGVTSLAMESTGVYWKPVYNLLEGHGIELMVVNPGHMKAVPGRKTDVKDAQWIADLLRHGLLRASRIPERPQRELQESIRYRRSLVEMRADEVRRLQKVLEGGNIKLGDVATDVMGKSGRDMLEALAAGVTDSNQMAELARGKLKKKRPALRLALEGSIDQHQRSMIERLLQHIDFLEQGIEQISTEIEARMRPFESAVAAVQAIPGIGPITAQTILAEVGTDMSHWPNHKAFASWAKICPGNNQSGGKRRSSSVGHGNQALRGSLVEAAQSAVRVKDSYFAAFYHRVKARRGARRALVAVAHAILVVIYHMLKDGTVYQDMGSDYFDRFDRETITKRTVRRLENLGYRVTLEEAAAA

SEQ ID NO: 265873 - protein, 323 aa, unidentified
MNKDIKHFGIDISHLVFDVTDSDGNYYQFKNNVIGFKKFIKHLDNASHCVMEATGYYHYQLAYYLQENSIKISVENPLAVKRFIQMKLSKIKTDKSDSKLICEYAQQVELKLWQGNSKHQIECLQMTRLLSVYTKQSTMLKNKLHGESVLGNPSKAVVSSLKRSLKQVKKEIETIEVKLLLLVKQAHQDVLTRIKSIPGIGNKTAVMLVVLTDGFDRFNSGSELCSYAGLTPIIRQSGSSVKGRPRISKIGNQKLRNLLFMCSFNACKYNKACREIYERIVAKGKSKKLALIAVCNKLLKQAFAIAKSGLIYDDSYRSVLVKN

SEQ ID NO: 265874 - protein, 433 aa, unidentified
MENVEDEPLFAERVAGIDIGKTAVMVTIRVPSDTRRGRRQQETREFRAVRKDLLALADWLRCWSVTKAGMEATGDYWKPVYFLLEQEGFDCVLYHAAQVKALPGRPKTDKLDSVWLAKITEQGSLPGSFVPPEDIRRLRTHTRYRRHLVQARTAEKARCEKLLEDAHLKLSSVITDIHGVSGRNMLTAVIAGERNPKVLAQMAQTRMRAKIRQLEDALDCSFFTEQHAFILQMMLANIDHLTAQASELTVKIDELCEPYARQIAQLDAIPGFGIITAQDIIAETGVDMAVFPTAGHLASWARQAPRVRESAGKRKGKNATGRGNPYLGGALGEAAVNAGRTQTFLGTKYRRLCRQMPKKKAQGAISRTQLVITHALLSDPEAVYTDLGTDYYEQRQDIRRQVRSHARAIERHGYKVTIQAINPDTGELLAAAG

SEQ ID NO: 265875 - protein, 341 aa, unidentified
MNIKRIGIDLAKLVFQVHGVDYQGKVVLRKQLRRNQVLAFFSKLPPCLIGMEACGGAHYWAREIQKQGHTVKLMAPQFVKPYVKSNKNDANDAEAICEAVSRPNMRFVAIKTIAQQDLQSAHRIRTVLVQQRTAKVNHIRGLLAEYGIIVARQVEKLRNALPRLLEDAENGLSFDFRELLQELQQDLAGLDDRVGEMDKKIRLEANNNAAAKRLQQIPGIGPITATALVCAIGDGKQFKRGRDLAAWLGLTPRQHSTGGKDCLLGISKRGDTYLRTLLIHGARAVLKVAAKKDDPRSCWIQSLCSRRNKNIAAVALANKNARIVWALLTKEIDFLPEGKPA

SEQ ID NO: 265876 - protein, 319 aa, unidentified
MSGHRAEQFVGVDVSKASLEVAVRPGGERWSTANDEREMPSLVECLRQIGPTVIVVVATGGVQTFVVAEVSMVGLVVAVVNPRQARDFAKATGRLAKTDPIDADVLAHFAQAIRPEVRELKDEETQLLTALMSRRRQIVDMLTAEKNRLSVSPKGVRKEIQKHIEWLEARVQLMNRQISDAIKKSPVWREKDRILRSTPGVGPVLSVSLLAGVPELGKLNRQKLAALVGVAPLNRDSGLFKGTRKVWGGRAQVRAVLYMAAVSATRANPVIRAFYQRLIAAGKKPKVAITACMRRLLSILNVMIKNGTRWQEREAAASV

SEQ ID NO: 265877 - protein, 418 aa, unidentified
MTATHSIAPTLLVAIDISKHRHEVLIGIPGKTRRRRLTVLNTLEDFQRLSATLASYGLPVRIGFEATGNYHRALAHHLGRAGFELKLVSSIGLARTREALHNSWDKNDPKDAQVILHMLEIGAVQFFHDPLVVGTADIQELSKTHEIVSRSKTELWHRILTHYLPLYFPEAERFHRSSRTDWFLAFLEKFPSPHMVSAMSREAFIADAWEVVGRKVSKEQLLSDIYATAVDSVGLPVHADSDAVRMFRLVLAEGRSLVRQRDEIEARAVALLSDLSDYQLLTTIPGIGPINAMTILAEAGDLRRFRHHRQFLKFCGMDLATVQSGMFRGQSRISKYGNARLRRTLWMAGQTAVLKRTNSFRDKFERYISKDRHNAHLRRKAYTAIAAKMARTVHAVVNHGEPYRPFFEGVSPGGRTSL

SEQ ID NO: 265878 - protein, 411 aa, unidentified
MISAAIERCAGIDVGKKFLAVCVMVGPLQGEPQVEIRKFGTIRSELEALRNWLKEQEVTHVVMESTGSYWKPVFNVLEDAVKVYLANPQEVKNRKGHKTDNKDGWWLAHLLRHAMIHPSFIPPRPIRELRDLTRRRKRLLGAGTSERNRVQKILEDANVKLGNVLTDLFGVSGQLMLEALLKGQATPEEMAQFAKGRAKQKIPQIIAALEGHQMSDHHRRMIRYSMDHMRFLEEQIEQLDQDIVAKIREAGLEPQWQLVQSVPGVQETSAAAILAETGTDMTQFPSEKHMSSWTGICPGNNRSAGKNRSSHTTGGNRWLRGTLTECAWAAAAKKDCFLKEKFWRITTKSGGKKSPAVIAIAHSLLILTYQVLRTGQAYQEKRVPVSDPRHKQRMIRHHIRRLGKLGVRVHG

SEQ ID NO: 265879 - protein, 409 aa, unidentified
MEVVHPKCAGLDVHAETVVGCVRICEKARASYEVRTYSTTTSGLEKLREWLTQQGVTQAAMESTGVYWKPVWHVLEGAAELVLANAMQVRNLPGRKSDVSDARWLADLLAHGLIRGSVVPPTAFQDLRELTRTRSQLLAERGRHIRRIQKVLEDANVKLTEIVSDVMGVTGRALLEALMAGKPIDAALVTACRRGRMKSTTDEMVEALRGCVRSNHRFLLQMHIRQYDALTEAVGQIEQRLKGLIEPVRSDFERLTTIPGVKEATAYILLAEIGPDVSRFPTSGHLVSWAGLCPVNDESAGKRRSTALRKGRRWLKTALIQAAWPASRKTDSYLRAQFLRLRVRRGPKKAIVAVAASILTAAYHILSRHVPYHDLGPRHFDDRDRDRTARRLVRRLQDLGLQVAIKPAA

SEQ ID NO: 265880 - protein, 342 aa, unidentified
MKNCNVLGIDLAKHIIQVCVISKQGELVSNKAMSPDRFREVLATSSPSIVAMEGCGACHYWGRLAEQYGHDVRVISPKRVKAFLQGQKTDANDALAIAVAAIQCGMVFSRLKTVDQQTLQTVETSRKLLDKELVSLGNHLRAFVYEYGIIVKRGRKSLNQIMLRVLDDIEFGLPHCLKVSLRVLWDRYKSTELQISELEKTRSGLVKQLDPCKRLLALEGVGDVCAAKLYASLGDGKAFKNGRDASVYIGLTPKQHSSGGKTFMMGINKGGGDKELRAALYQGALSVISTLPVEPKTVKQAWLIALVHRAGIKRACIALANKTVRTAWALLSSGQNYKSVPI

SEQ ID NO: 265881 - protein, 457 aa, unidentified
MGRKGKRTEGLEEAHPFTGMSQVNPNAAGADIGAVEIVVCVSGDESTQVVRAFGNYTVDLQAIGKWLGEHGVRSVAMESTGVYWIPLFEELERQGFECLLISSRSLRRVAGRKSDITDAQWIQTLHRYGLLESSFRPQAELIALRTLLRHRNQLVEHRSPHILHMQKALLQMNVQLSQAVSDITGVTGQAILRAILGGERDPQELAAMREPGCKKSAEEIGKALTGTWREEHLFILKQSVEMFDFYTRQIQACDEEIERVYGLTRPDWAAGEVKPLEQRKRNSHSKNRPHNPEGIRKHLKRISGVDLSVVDGFGVSLAQTVIMEVGTDMSKFPSEKHFCSWLGLAPKHEISGGKVLKNKTLKTKNRAGQAFRMAAQSVKQADCVFGVTYRRLKARLGPAQATVATAHAIAKVVYRMLKYKVEYETVSVEEYEKKYQEQQLKYMSKKAAKLGYQLTPA

SEQ ID NO: 265882 - protein, 407 aa, unidentified
MEVLYPCCAGLDVHAGSVTACVRVAKGAEVTYHHRTAPATTRGLLGLDAWLTTHGCTHVAMEATGVYWKPVWHVLEAHFALVLANAMHIRNVPGRKSDMNDATWIADLLAHGLIRSSFVPPAPIQNLRDLTRTRKQLVGEISRHTLRIQKTLEDANLKLTRVITDILGTSGRAILTALVAGETDPERLADLTRCRLKAPRADLIDALHGRVTEHHRFMIQLHLTQIEALDAAVATIEARIGDALGPFRAAVRLLTTMPGLSDTTARVLIAEIGTDMTRFPTVGHLISWAGLCPRLDESAGKRRSNRTRRTAPWLKTTLINAAWAATRKKDSYLRAQFLRIKSRRGAKKAILAVASSMLCAAYHMLRDGAEYHDLGHQYFAQRDKEQVTKRLLQRLRDLGVVVEVKAA

SEQ ID NO: 265883 - protein, 274 aa, unidentified
MKYYAGLDVSPKETSICVVSENGQIYGEGKTQSDACDLAAWLIDLGFSLDRVGLEAGPLSPWLHEGLVAAGISAVCIETRRMKGATAAMAVKTDRNDARAIAHAMRVGWFTAVHVKSSKSQELRLLLTNRKTLLNAQLNLENEVRGTLKAFGVKAGTLKAAGFEKRILELISDRPTLLQFVRPILVARNELRRQVAALHGLVLKACRRDPVCQRLMTAPGVGPIVALTYATAIDDPDRFRKSRDVGPHLGLTPRKYALATTTAWSRTIKARLSP

SEQ ID NO: 265884 - protein, 346 aa, unidentified
MLADALDFVLGVDTHRDAHALAVVAAPAGTVELETTIAASGLGYRAALRLALRQAPGRRVWAIEGTGSWGAGLCRFLQAEGERVLEVDRPRRLGRSSAKSDPLDAIRAARTALAGERLPEPRSAGKREELRALVTAREGALTAKRAGLCQLRALIVTAPEPLRTELRGLSRARLLARLRALCPDRDRRRPRGLLLALKSVASRVSELTREERELASEIRALVTELVPNLLDQAGIGPASAAQILLAWSHPGRLHSEAAFARLAGAAPIPASSGQTIRYRLDRGGDRQLNRALHTIILSRRKTDPETNAYIDRRTSEGKTVREAIRCLKRYLARSLYRMLEGAPMAA

SEQ ID NO: 265885 - protein, 363 aa, unidentified
MDTFAGLDVSVQETALCVVDGEGNVLLETTVITEPQRIAKALAPYQASLRRVGHEAGALSPWLHPALQALGLPVTCLEARRVRAALSAQRNKTDAADARGIAHVLRTGWYGTAHIKQESTYRLRLLLTQRRNLKRKFLDLENTIRHSLKAFGVQLHKVGRAGFDEAVRKAVADDALTRELMDSMLTARAALWKEYLRLHNLVVRTVAQNPVCRQFMAIPGVGPVTALSFMTAVEDPARFKRSRDVAAYFGLTSKRWQSGTSIDIQGRISKAGDPDVRRALYEAATVMLKRYRGQDKVREWGLQLARKSCHHKAAVAVARKLAVVMHAMWRDGTTYVGNASDDEATRAARQRDKDVRLLGAALA

SEQ ID NO: 265886 - protein, 334 aa, unidentified
MKQAIIKQNVGVDVSKDDLKVALSALTADYRIVVRASRTFANTLQGFKQLHEWIILKKDPELMLRFTMEATGVYYERLAFFMYEQEHALHIVLPNYAKKYAESLGIKSKTDKLDAKALSQMGLERDLRLWQPISTALLGLKQLTRERETLVCTRTSVANQLHAYRHQGKPNKESIKRSQQHIAFIDKQVKQIEKEITLFINKDEKLKTKIGYLDSIPGVGLITAAVVVAETNGFSAFDSIKQLTSYAGLDVRIQESGKWKGKSRISKRGNSHIRKALYMPSIAKKTHDSTTKQFFERIKEKKGVGMIALVAVERKLLGLMFSLWKKEEMYNKTI

SEQ ID NO: 265887 - protein, 341 aa, unidentified
MLEVSTIGLDLAKNVFQMHGADGSGAVAFRKKLRRGQVLKFLAAQPACTVAMEACAGGHYWAREIAKLGHDARLIAPGYVKPFVKRQKNDAADAEAICEAAQRPTMRFVAAKSEEQQAAAMVFRVRDLMVRQRTQTINAIRGHLAEFGLVAAQGLFHAAKLVAAIEDKGTAIPEAARPILSLLVAQLRSLDERVAVLDREIARRAKEDAEARRLMTIPGIGPITATALAALAPSATTFKSGRDFAAWLGLTPLQRSSGGKQKLGETSRMGERTLRRLLIIGASAAVRWAMRKGSTGDLWLSRMLERKPPMLVIVALANKTARIVWALMAKGGTYRAPAVAG

SEQ ID NO: 265888 - protein, 386 aa, unidentified
MEVVVERCCGLDVHQKTVVACTLVGNLSTNRPKKLIKTFGTRSFELQELASWLHEQEISTVMMESTGQYWCPIWNVLEKEGFKLILANPQRIKGIPGRKTDQKDAEWIAQLGRVGLVPQSYVPPTAIQELRSLTRTRTHLIAERTQHKNRIHNILQQGNIKLTGFLSDIYGKTGRKLVDLLLSGEKIEEENILGCLHSRVKASSKDIVESLKGTLTKAHRFEMQIHFDIIDCLEEQITELSKEIRIRIAPYQEIIDELIKIPGVKESCVEVILSEIGPDISAFQTQSHLASWAGLCPGSYESGGVRKKAHIGRGNKYLRTDLYHAGRAAAHSGSPVFSEFYHRIASRGSKQKAVIATAHKILRVIYRTLESTNKKSYCDGLGLTSQ

SEQ ID NO: 265889 - protein, 459 aa, unidentified
MRKKSPKYKNGKKRISVDQAWPLINPNAAGVDLGSREHWVAVPADRAQQNVRCFGTFTSDLEALADWLKACGVTSVAMEATGVYWIPLFQLLERRGLAVLLVNARQIKNVSGRKSDVLDCQWIQRLHTYGLLGGSFRPADPYCVVRSYLRYRDELVTARSTQTQHRQKALQQMNLQLNQVLSDVNGLSGLAIIEAILQGQRNPLQLAALADRRVKSTQSQMAKALIGDYRAEHLFQLQTAFDLYHTYEAKIATCDEELARVLVKLPDRVDVKLKPLPDKTGRKKMDEDLRLGLYLKLGIDLTAIEGIGPLVALTVLTEVGPDLSRFKTEKHFTSWLGLCPDNRISGGKVLSCRTRRVVNRLSDVLRLAATTLERSQTALGAYYRRMKAKLGAAEGITAMAHKLARILYRLLTHGEAYVRQGMADYEEKYQARKLKSLQKIAESIGFELIQKQTVAEVVS

SEQ ID NO: 265890 - protein, 337 aa, unidentified
MGEVIRIGLDTSKHVFQMHGVNAAEQTVLRKRLRRGDIERFFAALPGTLIGLEACGAAHHWARVLGKLGHEVRLLPPQYVKPYVKRGKNDAADAEAICEAMSRPSMRFVPVRTAANQAELMLHGARDLLLKQRTMLMNAIRGHAAEFGITGAKGVGRITTLLERIGAHESVPDLAREIFARLVEQLVSLERQVSELEKKLLAWHRTNERSRRLVTIPGVGPIGATALTMRVPDPSVFKSGRHFAAWLGLTPKDHSTAGRQRLGVITRAGDETLRRLLVSGAMAVIKCAKSGRSSPWLLELLARKPKKLAAVALANKTARIAWAVMMRGEVYRRAMPT

SEQ ID NO: 265891 - protein, 344 aa, unidentified
MKITTIGIDLAKNVFQVHGVDERGNPLIQKKLKRNQVLTFFIQQTPCLIGMEACGGAHYWARRLQAQGHTVKLMAPQFVKPYVKANKTDAADAEAICEAVTRPSMRFVPIKNSDQQAVLSLHRARQGFVKARTAQANQIRGLLTEYGIVLPQGISHVAKRIPEIVEDAENDLPDVFRQLLVRLRAHLVELDRQVQELEQQIIAWHRSNEDSQRLEKIPGFGPLTASALVASIGDAKSFKNGREVAAWLGLVPRQHSSGGKPFMLGISKRGDAYLRTLMVHGARSVMRVAENKETPTDRWSTNMLVRRHKNVVAIARANKNARVAWALLAHGRDYDVEYECSASR

SEQ ID NO: 265892 - protein, 346 aa, unidentified
MTMLETRPVTGGVDTHLDIHVAAALDANGGLLGVESFATTPQGFTALYRWLASFGSVARVGVEGTGAYGAGLARHLRRAGIAVIEVDRPNRQLRRVAGKSDTVDAVEAARAVLSGRARGVAKTADGNVEAMRALLIAKRSGREARVTCLNQLRHLGFCAPDELRERFRGVSRTQLADVAAALRPRLDSDPVTYATKLAMRALARRVLSAVEDTDHIDTVLAHLVTATAPGLLELYGVGIDTAAILLVAAGDNADRLHSEAAWAHLCGAAPLPATSGKVTQRHRLNRGGNRQANHALWRIVFTRMSSESRTRAYVTRRLDEGLSKPEIMRVLKRYVARETYRHLRPT

SEQ ID NO: 265893 - protein, 345 aa, unidentified
MKKVIAGMDLHSNNVVIGIMDMDGKRLASRKVACEIEEVVKVLAPYKKRLEKIGVESTYNWYWLVDGLRALSYPVVLANPAGMQQYNGIKHADDTNDAFFLAELLRLKILPTGYIYDPKMRPVRDLLRRRLMLVHQRTALMLSFKSLYTRTTGQEMTLAELKALEIKEAQELYDHPANQLIAGMQIKHIEQLSESIEKIEKVMLASARELPCYAKLATLPGVGKILGMTITMEVGDIKRFADAGNFASYCRTVEAKCTSNNKKKGENNSKCGNKYLAWAFIEGANFARRYDEPCRKWYDRKEAKTSKVIATKGLACKLAKAAWHVMSAEVDYDAKRVFGQPAPIK

SEQ ID NO: 265894 - protein, 391 aa, unidentified
MVCVGIDVAKDKHDCCILDSDGMVRADCFTIPNNMDGFKQLLQTIRNCTKKSDKIKVGLEATGHYSYNILGFLLDNDLAVYVMNPLHTNLYRKSLSLRKTKTDRVDARTIATMLLSDVDLKSYTDTAYHNEELKSLTRYRFDKVRERAKLKQSVSRLVTILFPELEKLVPSLHIASVYSLISEYPGAKQVSEVHLTKLTNLLTTASKGRYGKDKAIQIRDAAKTSIGSVMPAKSLELKHTIKLIRELTSEIDEIEDSIQQIMDELHPPILSIPGVGIQSAAMILAEIGDFSNFESPDKILAYAGCSPSTYQSGKLTNCYAHMEKRGSRYLRYALYNATKYVCHWNPVFAKYLAKKRAEGKHYNVALSHATKKLVRLIYALQKSGKAYLTAA

SEQ ID NO: 265895 - protein, 375 aa, unidentified
MKEKVRFLGLDVHAETIAVAVAEADGKVCSLGTIANRFEAVRKLVKKLGSVEQLRACYEAGPTGYVLYWQLTQLGVDCAVVAPTLIPMKAGDRVKTDRRDAERLARSHRSGDLTAVWVPDEGSEALRDLVRAREAAKQDQLRARHRLSKFLLRSGRRPETKIKIWTGLYMTWVRQLRFAQPAQESTRLDYLHEVEHMAERVQRLEESIREAIKLASPQMQQVISGLQALRGIAEISAVTIASELGNVSRFQSARQLMGYSGAVPTENSSGTRTQRGSITKTGNAHLRRIMVEAAWSYRLRPGIGPELRKRQQGVPEEIKEIAWKAQIRLTKRFARLAAAGKDQRKIATAVGRELLGFIWAIGIKAEAASKQKIAA

SEQ ID NO: 265896 - protein, 443 aa, unidentified
MEPKVKEKQVFNLLRPNAAGIDIASNMHYVAVPADRDEQCVRKFGSFTQDLHDMANWLKLCKIDTIAMESTGVYWIQPFLVLEEYGFEVFLVNAQHIKNVSGRKSDVKDCQWIQQLHSYGLLNRSFQPDDMIRELRTYQRHRKDLTHGYSSQVQLMQKAFEQMNIKLHNVLSDITGKSGSLIINAILGGERDARVLAELADKNVKASKEDIIKSLQGIWRQDNLFELKQAYELFLFYREKIKACDIQIESVLQKITDTTGRQVSKTKSRKASGKNKFNFDASSYLTSMVGANITDIFGISEITATDILSETGTDLSKWPTEKQFTSWLNLAPNTRISGGKNLKNKHIKKKNHAGQAFLMAASSLKASNNWLGEFYRRLKSKSGAPTAIKATARKLAIIFYKMVRFNQLFEPLDVQKYNQYFKERRLKYINNQALNYGYKLIAV

SEQ ID NO: 265897 - protein, 423 aa, unidentified
MNTTDDYAAFVALDWADKTHAFARHFAATNTTDNGTLAATPEAVHAWLEELHTKCGAGRVAVALEAGRKGLLHALVEHPWLDVFPVHPAACHRFTSAFRPSGAKDDIPDAQTLLTMVMHHRAKLRQLRLDSAQTRELAALVLARRQAVNRRTQLGSQLRTALKGYFPQALELIGDNLECSAALDFLQRWPDLTSAQKARPATLRGFYHQHAVRRPQVIEERLALIAGVRPLTSDPAVIGPAVLQVTMFVELLRVLQKHVERFEARVAEIFAVHPAAAFFRQLPGAGPTLAPRLLVAFGDDLGRYQEASDLQMFSGVAPVQQKSGTQLWVHWRWNASTFLRQTFVEWAGQTVLYSTWARAYYFRQKQHGKHRQSILRALAFKWIRILWRCWQDHAPYDEARYLESLKRRRSPLAAEIERGLAAA

SEQ ID NO: 265898 - protein, 339 aa, unidentified
MTAVYGGIDLHSNNSVVVVMDAAGKVLYRRRLDNDLVRIERALAPYRTELSGVVVESTFNWYWLVDGLMAAGYPVKLANTTAIQQYSGLKHTDDESDAEWLAEMQRLGILPTGYIYPPAERGVRDLLRKRTQLVRQRTANVLSIQNLVQRNTGARMKGDVIKGLAPEAAPQLVEHPDVALAIAASIRVRQCLDAEITALEKVVLARVKLRADFLKLKTIPGVGDILALTIMLEAGAIGRFASVGDFASYCRCVGSTKLTNGKRKGAGNVKNGNEYLAWAFVEAANFAIRFSVPIQRWYQRKKARTNGIVAIKAVAHKLARAAYYILRDQVVFDVSKAFA

SEQ ID NO: 265899 - protein, 336 aa, unidentified
MSHYCGIDLHSNNHVVAVIDDEDNRVFDKRLNNDLSSTLRVLEPYRETLQGVAVESTFNWYWLVDGLQDKGFICQLVNTAAVKQYDGLKYSGDHQDAFHLAHLMRLGILPTGYIYPKEQRAIRDLLRRRLSLVRSASTQLISVQSQIWRSTGIRIRSGELRKPDFTPPKLDHYTLQAIQAGLAVYQAMQQEINVLEQSAYQAVKLTPAFKVLQTITGIGKILGLTIMLETGDIHRFASAGNFASYCRCVDATRTSNGKTKGQGNAKAGNKYLSWAYSEAAHFAVRFEPLAQRFYARKMAKTNGIIAIRAVARKLARASWMMLKHQVPYDARLMFPN

SEQ ID NO: 265900 - protein, 338 aa, unidentified
MYYIGLDVHKKTISYCVKDASGQVHQEGKVGATRWELDDWIKTLPQPWTVAMEATIFTGWIYDHLLPHAQQVKVAHPLMLRAIAAAKKKNDRIDAGKIADCLRCDFLPECHMASTAIRDRRRTLRYRHLLVRQMVRNSGLLMETGVSHNKQRLHKVGYFRELLASNEEVNESIRPLLRVSRDSIVRLQKTEYALVSSLQRDPLLAERIKRLRTVPGVGPITALTWALEMGEVSRFPSIRQAISYCGLCGDEKSSADKVTRTPLSKQRNKHIQRVLVEAAKLAPRQDHNLALVYEREKQKGNANRATLAVARKMVAYLLAVDRGQRDFVPFADSQSAAA

SEQ ID NO: 265901 - protein, 403 aa, unidentified
MNMNAVGIDVSKGKSMVAILRSYGEIISKPFEVKHTVSGIRSLIEQIQSIDGESRIVMEHTGRYYEPLVRELSKADLFVSAINPKLIKDFGDNSLRKVKSDKADAVKIARYTLDSWTELRQYSLMDEIRNQLKTMNRQFDFYMKHKTAMKNNLISILDQTYPGANTYFDSPAREDGSQKWVDFSATYWHVDCVRKLSLNAFIDHYQKWCKRRKYNFSRSKAVEIYEASKELVSILPKDDLTKLIIKQAVEQLNTASQTVEQLRTMMNEAASKLPEYPVVMAMKGVGKSLGPQLMAEIGDVSRFTHKGAITAFAGVDPGVNESGSYEQKSVPASKRGSSTLRKTLFQVMDVLIKTKPQDDTVYLFMDKKRAQGKPYYVYMTAGANKFLRIYYGRVKEYLSSLPE

SEQ ID NO: 265902 - protein, 388 aa, unidentified
MNVTADQPEAPTAIRTDLGAIFVSLELSRSSWLITSLSPGGGEKMSKHTVPGGDVSGLLQRFAQLREKARVRTGKVFPFIVIQEAGLDGFWIDRVLQNEEIESHVVDPASIATSRRRRRAKTDKIDGETLVRSLLAYKRGEPRVCSMVKAPTPEEEDRRRLCRERKVLTAERVLHVNRIKGLLFCQGISGYEPLRRDRRERLEELQTGDGRPLPQHLKAQVDRELDRLELLLKQIKTVEGERDALLAAAQTAMPAPAAMLLDIKGIGSEFAAVLWSEGLFRHFDNRRQLAAYAGLAPTPWQSGAVDREQGVSKAGNPRLRTTLIQLAWLWLRNQPQSALTIWFHERVRRNAGRLRKTTIVALARKLLVALWKYVTTGVVIEGATMKAA

SEQ ID NO: 265903 - protein, 346 aa, unidentified
MHDSTTTVAVGLDVHARSIRLAAVRADELLEERTLPYDEEALERILGRWPGAPCCYEAGPTGFGLQRHLVERGIDCLVVAPGLVPRRPGDRVKTDSRDARKLARLLAGGLLEAIYVPSGELEAARDLVRAREDARLDRMRDRHRLSKFCLRHGRMLPSSSWTVVRRKWFSEQRFEFVAQQITFDAYLHTVDLVDARIEQLERAIRETADQEPWRELVARLRCLRGIDTLTALALVTEIGDFGRFRSAAEFMAFVGLVAFGALQRRAAPPRVDHQGRQQPRASAAGRSSLARAPAAEGRLQARPPPTRPRRRRDRTRLALPTTAVRTLAADGRPRQTPPEDRRRLRA

SEQ ID NO: 265904 - protein, 387 aa, unidentified
MFFVGIDIAKNKHFASVMSSDGELLAEPFPFSNDITGFNFFLSKISSLEKQKVLIGLESTAHYGENIISFLFNLDYKIGFINPIQTASLRNSNIRKTKNDKVDTLLIIKALTLGNYNLVQKRDVNILKLKSLCLSRRNLVTLRSRSKIQLATYVDQLFPELNSFFRSGLHINVSYQLLTLYSSPNEIKDLHLTYLSNLLSKASRGKYSKNDAIRLKDLAVNSVGIDNPTLSVQIKHAIKQIELFSKQINEVESLCKTIVDELKSPIMTIPGMSYIQASVILAVIGDISRFEHPSQILAYAGLDPSVIQSGNFNARSTRMSKRGSSMLRYALVYAAHNVTLHNYTFKKYYDLKVSQGKSHYCALGHVAHKLVRVIFYLLTKDVSFNLA

SEQ ID NO: 265905 - protein, 423 aa, unidentified
MEVMHERVAGLDVHKAMIVACVRIMAGGKISRECRTFETSTAGLEALLGWLTQSGCTDVAMEATGVYWKPVWNILSDGEFKLIVANAAHIKNVPDRKTDVNDAMRIADLVACGLIKASFVPEQEIQELRSLLRARKQLTREQTSHIQRIQKTLEEANIKLDSVISDILGVSGRRMIEAMIAGVRSPLRLAELADRRLKVSPKALYDALHGRLTDHHRFMLELYLGQHDALSGAIARLDQAVEALIARMDEEVAAGQATFLSLIMLLCTIPGVSILSATVILSEIGRDMSRFATAGHLLAWAGLCPGQNESAGKRKSSRLRKGAPWLKTMLVQCAWAASRRKDSYYKAQFNRLRSKRGPKKAICAVAASMLTAIYHMLKDGTLHQDLGADHFDRRSTEVKAKRLVAQLTKLGFQVELQPLPQAA

SEQ ID NO: 265906 - protein, 451 aa, unidentified
MKKKKVSLEVVNPYAAGIDIGSRSHFVAIGQDADEVREFGVYAEDLQKLAAWLLEHGIKTAAMESTGTYWQKIFSTLQAFGIEVFLVNGKFTKNMRGKKSDDMDCQWIQKLHTMGLLSSSFLPDSTTETIRTYTRHRLSLIQLAADTSKKIQKYLRLMGFRLDVVVNDICGLTGIAIINDICNGNLNPKLLSVHRHYNCRKSIEEIEKALHGNGRKDYMFALIDEFEMYQILKTKIEKCDKEIESLLKEIIEKNENKKYHIAEAKPHKRITKNTNKQLDLNQVAFQYFEGIDLMKIEGVSHATVMTIISEIGLEGFSKFHTSKQFVSWLRLSPNNKISGGKVLSNQIARGSNRLKIALRQAANCIGNLKETHLSDFFRRICIKRGRASAVSATARKLGVIIWTMITKKIQYAPPKEYLMLDQKRKLGLVSRIRKSIAKFDLKPDDLGFATV

SEQ ID NO: 265907 - protein, 363 aa, unidentified
MEHLAIDLGGRESQICARSSDGTIVEERRVATGSLRKLLAGRPASRVVVETCAEAFAVADAALALGHEVRVVRVVPASLVKSLGVGARGVKNDRSDARVLSEVSCRIDLPSVHVPSQEARERKTMCGMREGLVGCATKLVNTVRGWLRGRATRVRPGGVETFPARVRVAVRERPAYVERLLCAIEELAQQIAQADREIKEVAKQDAVCQRLMTVPGVGPVTSVRFVATLDEVGRFASAHELESYLGLVPGERSSGERKRLTSITKAGSTKMRWALVQACWVARRWRPHDPMVQWSLEVERRRGKRIAVVGLARKLAGILYAIWRDGSSYDPRRGAAQVTRALTEPDVAPTFTPPAEAVPPARA

SEQ ID NO: 265908 - protein, 370 aa, unidentified
MLDTTTFVGLDVHARSIKAVSLDVMTGEVRAATFGYDAGAVAEWVRSVDPGARCVYESGVTGFDLQKRLSGLGVDCVVGAVSKMIKPSADRRRKNDRNDAEFLARMLSVGNVVEVWVPDDECEAARDLTRALEDARDDLSRSKQRLSKFLLRHGLVFDERTPTGRRKGNWTRAHWSWIESIRFAEGADNDALAYYVDAVRRAAEEKARLEGLVEAEARKPRWRKRVDSPRCLKGVDTASAADLVFEAGEFSRFRNARSFAAWVGLTPSEHSSGESDRRGAITKAGNKHLRKTLVEAAWHYLTCSGRPKDLAKGQAPDRGARRHAAKGVRRLVERREALPARGVHGNKANVATARELACWVWAVGLMAEEA

SEQ ID NO: 265909 - protein, 403 aa, unidentified
MIFVGDDWAKDHHDVWVMDEHGHRLASTRLTEGIEGLAQFHQLLAGYVDEPDLVVIGIETDSGLWVAALDAAGYQVYAINPMAASRYRDRHAVSGAKSDPGDAKTLADLVRTDRHNHRRLAGDSAAVEAIKVLARAHQSLIWARTRHTNTLRAGLSQYYPAALAAFTDLDSPEALTVLQRAPSPAQGAALSVSKISGLLKTAGRQRYIDQRARQIQAALRANHLSAPAPIATALATSTVATLAVLATLNTQINHLHAELADHFEQHPDADIYLSLPGLGVVLGARVLGEFGDDPNRYTDAKSRKNYAATSPITVASGRKRAVVARHVKNRRLYDAIDAWAYASLRSSPGARTYYDQRRTANDTHHQALRALGNRLVGILHGCLRHHTHYNEHTAWAHRTHTAA

SEQ ID NO: 265910 - protein, 364 aa, unidentified
MKRKLYVGMDVHKETIRIAYLTSNSKEILKEQQIKHEEVQIKKFINRLKLEWDEIDCCYEAGVTGYPLYRYLKSLGVNCILVAPGKIPRQSSDKIKTDKRDAIKLARLMRSGELESIHVPSEEDEAVRDYLRSRDSLRLDLGRNRQRLMKFLLRKDIKYSTTKYWTVSHYKWLNNLHFNNEILQETFNDYYSRVRVQEENLKAMDKKIQEVAESESYREKVGILRCFRGVDYLTAMFLLCEVNDFKRFKTAGSFMSFLGLVPGEYSSGSKRKQTGITKTGSPRLRRILTEAAWQHRFPGTGSKIVTARRSGQPALVVALAEKASLTLHKKFRNLQLRGKTPQVMITAVSRELSGFLWAAMDLVA

SEQ ID NO: 265911 - protein, 388 aa, unidentified
MLQPFDASKSRTAFEQDSTVISVIEMSQSKWLVAAVVPGIKRQPLKKIEANEEALLKLLHRWRAEAGQAGRMIKRVAVAYEAGRDGFWLARWLRARDIEAYVIHPASIAVSREHRRAKTDRLDTELLMRAFLGWLRGEKRHCSVVAIPTVAEEDARRPNRERENLVTERTRIVNRMKAALTRFGIRNFKPTLRKAAEKVDNLRTAEAMPLPENTRAELRRQLARLHVVREQIREIEHERLRTLKAAPVTEKGPHAMVRLLARVLSVGIETADMLVNEVLSRHLRDHRAVARYAGLTGSPDESGRRRREKGLARAGNARVRCGMIQLAWRFLRFQKDSALAKWFDARTADGRAGTRKTMIVALARKLLIALWRLVTTGEVPQGVVLRPA

SEQ ID NO: 265912 - protein, 431 aa, unidentified
MSKYANNPVVGIDISADFSMVAILKPNGDLYRKPFRINHDAEGFNYLYGQIKKVEEEFNMIAPVFMESTGMYHLNLLYFLKNKSLEVYTLNPLITNSNRNTDIRKEKSDKKDSINIAKIGKFENIKVSTTFDKVTFTLKGLCREYFDLIDSRSQYKNKLTANLRVFFPGYLKVFSNITGPTSIAVLSKYISPKAILDAPKEDIMKLLALSKRPTDWCRKCYNKLIKAASEAIEIGIQSPLFAAKIKSSLAMIKEINNQIDAITTEIKNIVKSNDTPEALKKNISLIESINGTGFITAVTLASEIGDINNFIKPKHLVAYLGIDPSTMQSGKFVGSKNKMSKRGTPYGRRALYIIALANIRKNSNGKAINDVLRDYYQEKLKSKKKKVALGAVMHKLVNYIFAVLRDQKEYQQRDPKLHERMYLNNQCKSVA

SEQ ID NO: 265913 - protein, 361 aa, unidentified
MSWTALHLTGSFAGKCGEEDTMEGVAVIGLDLAKSVFQVHGIDAEGGVVLRRRLTRAKLVPFFAGLRPCLVGMESCASANYWARELAALGHEVRLMPPRYVKPYVKRSKNDASDAEAICEAVTRPTMRFVGTKSREQQGVLVLHRARLMLTRQRTQVGNAIRGHLAEFGIIAPVGREGLDRLVAVIADESDHRLPPCARTCLAMLVQQYQIVVANLLETDRAIRADSRSSELGRRLQEIPGVGPLVASALIASVPDPHVFKTGRCLSAWLGLVPRQHSSGGKERLGGITKAGDTYLRSMLFVGAMAVIRHAERYGTRKPWLIKLLSRRTPRIAAIALANRIGRTAWALMTSGERYREPAVA

SEQ ID NO: 265914 - protein, 337 aa, unidentified
MSSIHILGIDLGKHCFHAIAHNRSGAEVLRRKFSRNQLQHFLCKTEPTTIAFEACGGAHWLARKCGEYGHQVRLIPPQYVKPYVKGNKNDFIDASAIAEAAGRPTMRFVAVKSEEAQVIAAIHRVRDGYIKERTAAMSRIGAILLEFGLSFPKGHAKMKSLFQWLAEQKASLPESLLVELVSIHEHYKYLNERVKVQDSKLQVVVNNNESAQLLKTIPGVGDLTSTLCVADVSSPSNFTNGREMAAWLGLVPRQFSTGGKTKLLGMSKRGNKHLRTLFIHGARAVLSRPETTGKVFGEWLIKLRATKPFNVVVVALANKLARIAWAVLYHRQAFKAV

SEQ ID NO: 265915 - protein, 373 aa, unidentified
MKKSTKPSTPRARTTARVKEQRIDWKRVVTIGIDLGDRFSHFCALDNDGAVVAEGRVATTPGAIELLFKTSRKRMAIEAGTHSPWMSRLLARLGHEVIVANSRKLRLIYENQHKSDRVDAEYLARVARLDPKLLGAIEHRSEVGQCHLSLIRARDTLVRSRARLIQHVRSAIKSLGERIPSGTAEAFHKRAGTCIPEGLQEALMPLVAVIEQLTTRIKEYDRKVEQLAEDRYPDTAALTHVCGVGSLTALAYILTLEDEQRYRRSRSVGAWLGLVPGQHDSGDSQPQRRITKEGDAYLRRLLVGCAQYILGPFASDSDLRRHGLLIAARGGSNAKKRAVVAVARKLAVLLHHLWRTREVYEPLHNAGAQDAAA

SEQ ID NO: 265916 - protein, 356 aa, unidentified
MSTLETVHSGHVVIGVDTHKHIHVAAVLDTIGGILATLTVPTDSGGFKQLLSWADSFGKILAFGIEGTGSYGATLTSFLRRHGHKVVEAGRPDRRQRRMDGKSDTLDAENAARSVLAGFATVIPKTADSGVEMIRQLKIAHDSAVTDRSAAMISMKAMLVHADDTLRRETNRMTPIKLARHLAALRPRNLETPSDSLRHSLRSLARRWQHLDSEAKELRESIEALVLRTAPQLLEQFGIGVDTAAEILIVAGDNPERIHSEAAFAKLAGISPVPTGSGMTSGRHRINHGGHRHLNAAIYRTVIVRMRFHEPTIAYVARRTAEGKTKRDIIRCLKRYVIREVYHLIKVNPRTGEIAS

SEQ ID NO: 265917 - protein, 433 aa, unidentified
MLKLNYMSTLFVGIDVSSKTNAVYAMDFEENKYISSSFGNNQPGADKLVNMIAECMHKHKNLDTVLIVLESTSVYSVHISSFLSTSEVLMPYKPYVFCVNPKATSNYRKSYIGMEKTDPTDAYLIADFGRVGRTKKLEPWRGGQFIALKRLTRHRMHLSECITREKTYMVSNLYLKFSELQLLEGDDKPFGSLYGATSSAVLTEFLSPQEIIDMPEEELLTFLAGKSRNRISDLSKTSELLRKAARDSYRLDKCMYEPLNVSLASSFNCIHAYQKEIKLIEQAIEKCINGMNPNALLILQSIPGIGPIWASGILSEIGDITVFHSSDALAKYAGLYWPKGDSGDFTSEDNKMSKAGNPYLRYYLGEAANSVRKHIPEYADFYARKYAEVTKHQHKRALALTSRKFVRLVFGLLVKNQLYTGEKLDAEYNIESN

SEQ ID NO: 265918 - protein, 344 aa, unidentified
MGEVSTIGLDIAKSVFQVHGVDVDGAVVVRKRISRSKMLEFFAGLPPCLVGIEACPSAHHWGRELARLGHTVKLMPPSYVKAYLKRSKNDANDAAAICEAVTRPSMRFVPIKSEQQQSGLMLHRSRQLLVRQRTMLSNAIRGHMAELGIISAKGRNGTAELLEAIANADDDRIPAVARLSLDALARQYANTTAEIIAIEKHIHAWHRSCEESRRLEDVPGIGPIVATALVAEVGDWKAFSSGRNLAAWIGLVPKQHSTGGKDRLGGISKQGNRYLRWLLVTGAMAVIRYARQHGTKRLWLARIMERRPIRVAAVALANKIARIAWAMMVHGERFKEPKLLPVAA

SEQ ID NO: 265919 - protein, 350 aa, unidentified
MTTVAAPAPLVAGGVDTHLDVHVAAALDPLGALLGTAQFHASAAGYRQLLEWLRSFGDIGRVGVEGTGSYGAALARHLTSSGVDVIEVSRPNRQVRRRHGKTDTVDAIAAARAVMSGEASATPKTHDGSVESLRVLKVLQRSANKSRTQAINQLKSLLVTAPPELRAKLQHLSMRDLLTACAAFRVAADDDTLAGLTRFALRDLAQRIQFRDERLNQIERRLRRITIAVAPELVALHGVGPDTASTLLITAGDNPERLASERSFAALTGCSPIPASSGKSHRHRLNRGGDRQANSALWRIAIVRMASDERSKKYIAKRVSEGKSKIEAIRCLKRYIAREVFAALPRPAAA

SEQ ID NO: 265920 - protein, 386 aa, unidentified
MLALGDSALRKGADAMTFVGCDLHTRMQQVAVLDTETGEVSERQLAHDGSAVEEFYAALPGPVTIGIESTGYATWFHTLIQRLGHTLLVGDAAKIRAMVVRKTKTDRRDALHLLDLLRHDRFPTTWVPDPATRDLRALLMHRMRLVRIRTMVKNGLHAIALNYRLTRGSTLLRQAGLAQLHALALPPHTAQRRDQSLELLAGLTTQIRALDDAITAAALAHPDAPRLITHPGVGALTALATVVVLGPVARFHDSKHVVSYVGLAPALHASADKYHLGRITKQGSPLLRFVLGQAAAHAARMDPDLTRTYGALVHRRGRPKAKVAIARKLLVRLFRPPTDWAAPPRRSALVEIEHDFMRRVREWMSGGRLPPGTSSCRVRPGSERPR

SEQ ID NO: 265921 - protein, 342 aa, unidentified
MDYYAGIDVSLEASSICVVDASGKIIKEAKVLSEPEALIAWFQALPFTLARIGLEAGPLSQWLYAGLKDAGFAAELLETRHVRDAFKAMPVKTDRNDARGIAQLMRLGWFRPVHCKSVPAQETRALLIARKLVQAKLYDVQMSLRGILRGFGLKVGHTTPVGFAVRIRELTEHHPALSAIAKALLAVHEVLLRELNGFEKQVRKQARCDSRVRLVMTAPGVGAIVGLTYVAAIDDPGRFSSSKKVGAHFGMTPKKYQSGETDLTGRISKSGDKGVRAVLYEAAHIILTMPVKGGALKSWAAKLAKRAGMQRAKVALARKLAVILHRMLADSAPFDAAKAAAA

SEQ ID NO: 265922 - protein, 350 aa, unidentified
MNHPEISHGNVVGIDTHKHLHVAALLDGLGRVLGTLAFAATDAGTAELVVWLSEHGTTLSAGIEGTGSYGYRLTRGVQAAGISVFEVNRPDRANRRRKGKSDPVDAEAAARAVLSGQASAVPKDREGAVGSLRALRIARNSAVKATTTASNQIKALLVGADQELQDTMKVASLLQLATLCSDLAPITGERTALRNLGRRWLYLHAEVLELDTMIRALIRQTAPALLERPGIGIHTAAQLLITAGANPERLHSDAAFAALCGASPVQASSGQTHRHRLSRGGDRAANNALWTIANNRLIHDPGTREFAARRKSMGDSRNHTLRVLKRYIARETFTIIRTALRNDGALEHVA

SEQ ID NO: 265923 - protein, 385 aa, unidentified
MKKNSTAKKSPKKAVTKGEKTQIHRMAAEQRLTVGLDLGDQTTPYCIWDEAGEVVSEDQLPTTKTGLDGLFAKMAASRVALEVGTHSPWMSRHLASLGHEVIVANSHKVKLIPQSVRKNDRIDARQLARLARVDPKLLSPIRHRGEGAQMDLAMIRARAELMTARTQLINSARGLVKPMGERLAKCDADQVREGLGESVSEGARAVIGPLLKAVERISEQIGEYDKQIEGIEKRYPEVKLLRQVYGVGPLIGLTFVLTLEDAGRFAHSRDVGPYLGLTPRQHESGESQPELGISKAGDGLLRSLLVQGAQCILRKKAPESDLRTWGTGKMGKGGKRAKKRAVVAVARKLGVLLHHLWATGEVYDPQYNRKAAEGAAAKGKGKAAA

SEQ ID NO: 265924 - protein, 355 aa, unidentified
MNSIKYVGLDVHRDTISVAVLNAAGKLVMQCVLATHAPAILDFFHGLHGTLHVTFEEGTHSAWLYDLLVRRVAHLVVCNPRKNALLKAGSKSDAIDARKLADLLRAGLLSPVYHGQNSTAAVKHLGRSYAALTEDTTRTMGRLKALYRGQAIACAGKKPYGSRHREEWLAQLRDSGLQRRARRLYQELDVLQQLRREARRDLILECRKHREAKLLRTVPWLGPIRVALLIGRVQTPHRFRSKRQFWAYCGLALETRSSADYQMVDGQLERRKKPVFIRGLNRNHNHDLKNLFKSAATAAGGSDGAFGQFYENLLKKGMRAEMARLTLARKIAAITLHVWKKGEAFDAEYVKPQAA

SEQ ID NO: 265925 - protein, 394 aa, unidentified
MGIWVGIDIAKHIHWATAIDDLGQVVLDQRVANEPAGLQQLIEALAGLGDEPVIGLDVVGGIAALAEAMLGAAGLRLVHVSGLAVNRARQGMTGGEHKSDPRDARVIAEQVRTRRDLRPIQPVSELDLELRLLVGRRSDLQVEQTRRLARLHDLLVGIHPGLERVLDLTTKGGLWLVSRYVTPAEVRAAGRHGLIEHLQAAGGLPARQIQALADRALAAAVAQQLAVPGERLAASLVRELAAEALACRRRVGELDRDLAVLLERHPDAALIRSLPGMGAVLTAEFIAMAGPLARFRSADALAAAAGLAPVLRQSGKVRFQRRPSGGNKALKRVFYQSAFCSLGSPDSRAFYARKRREGKRHHQALIALARRRIDVLWAMLHTRQPFQPNYPKAA

SEQ ID NO: 265926 - protein, 344 aa, unidentified
MDHFAGLDVSVKDTSVCVVDDTGRIVREVKVASEPEALLAALRNPAYHFKRIGLEAGPLSQWLFSAMAEAELPVICVETRHMRAVLKAQINKTDRNDARGIAQMIRVGLYRPVHVKTLRSQKLRMLLTHRQLLQSKAIAVDNDLRGTLRNFGLKVGMVGATRFEARIRELVEGLPDLAVLVEPLLVVRRVLREQIAVLHRRLLAVVRDDEVCRRLMTAPGVGPVVALTYRTTVDVPARFRKSKSVGAVFGLTCARDQSGERERPGAISRCGDKMMRAMLYEAAQSMLVRSTRWSWLKAWAMQIARRRGKKKAVVALARRLAVILHRIWVDGTEFRWTREAVPAA

SEQ ID NO: 265927 - protein, 394 aa, unidentified
MGKLYVGIDISKDRSSANGIDDRGKSRFEISFDMDGTGVGELLKAIEADSDSHEDVVAAMESTACYHINLYSFLSAKGIEIVVINPLLIANFAKLSLRKTKTDKKDASTIAQFILAHKDSVTQLAVSQDLQDIRDMARERESLCHQTSATKVEIRRLLHTTFPELEAMCNPFTKVMLHFIQRFPSARLVNMAKPNIIAKTLKEKPCSCRIRFTPAELINIARTSIATVSPGKEIILSGKIETLLHLQKRRDEMTKALTKYCESSIVEDLKIVTSIDGIGNNTATTFLSEIGRIDNYASHKNLIAFAGIDPTVYQSGKYEGASKISKRGNRHLRRVIWLMTVRVINHNPTFRKYFFKKRNEGQPFKKAVFATAHKLMRVIFAMLSHRTYFQAECI

SEQ ID NO: 265928 - protein, 341 aa, unidentified
MQITTIGLDIAKHVFQVHGIDAEEKVVVRKQLRRGQVIKFFEGLSPCLVGLEACATSHYWARELSKLGHEVRLMPAKDVKAYVKRNKNDAADAEAICEAVRRPTMRFVQVKSAEQQAHLMQHRARDLLMHQRTQLINSMRSHLAELGIIASQGREGVKELLAIVAKDANPHLPDDARASLVVMAAQLQALQTTIGAIEKRIIVQHRTNKESRRLQTVPGIGPIGASAIAATVTNPKIFRSGRDFAAWIGLVPRQMSTGGKAKLGPISKQGDRYLRRLLVVGAVSTLRRAKLNPQRYPWVTRLLARRPFKVVAVALANKMARIAWALLMSGKTCRSARFAAA

SEQ ID NO: 265929 - protein, 387 aa, unidentified
MTARTVSNLPAAMHVETARCLFAIELSKQSWVIGFITPLSAKISRRILSGGDWKGLLDLIEEVRARVSRETGRTVDVISCYEAGYDGFWLHRLVEAHGIRNYVIDPASLQTDRRARRAKTDRIDTERLLRSLMAYLRGEPKVWSVVRVPSVAEEDARRLHRERDRLVSERVQHVNRIKGLCALHGIYDYQPLRPQAMARLEQLRTAQGISLPPRLKSEIKRELQRLELVVEMIATLEAERDAIVEDEASTHVNAKKIQNLHQLKAIGPEFAAVLVGEIFHRDFNNRRQLASYVGYAPSPFQSGNVAHDQGISKAGNRKGRTTGIELAWLWLRYQPDSDLSVWFRARVGTTKGRIRRIAIVALARKLLVALWRYLETGVVPRGAVLKG

SEQ ID NO: 265930 - protein, 397 aa, unidentified
MYIVGIDIAKRKHEAAVIDGDGTVIIKPFSFTNNCSGYNRLLAMLTKAKLPLDEVSFAMEATGHYWLALFTRLQKEGFRVQVINPVQTNSIRSFYIRQAKTDPRDALLIAEVIRFGHFSESTLHPENIYELRELCRGRHAIVSMQADVKRKVVALLDQVFPEYETAFTNMFGDTSMAILQTCPTPKELSEMPLEELFHLIEVSSRKRFRMAKAQELQALARGSFGFAMAGDVFSTMIRLYAKHLDFLKQQVREMDRKIAEIMETLDTPITTITGIGPTLGAYILSEIGDISRFSSAAKLAAYAGIDPTMRQSGEYNGVRNRMSKRGSPYLRHAIWLAASSAVLHDPALKLYFQKKRDEGKPYMASVGHACRKMVSIIYAVMRGNKAYTPHIPNEISA

SEQ ID NO: 265931 - protein, 404 aa, unidentified
MFYAGIDWADQKHDGLVLDETGRKLGSIRVAHTPEGLIKLDEWLTQVLGQQSKEQMACIIETTHGLLIAFLLEQGWPVYPVNPRTVDRRRSASGAKTDQIDAYLLAKTGRADFADLHRLVPDSEKVTELKGLTRDQDSLIQMQTRLVNQLTACLKAYYPVALDLFAKLQQHSTLVFLQTYPTLEAAQTASVEQICHVLKSAGHTTASKVAPKIFAQLHQPSLRANAVTTRTKSRLALALIAQLLSLVEQIAVYDKEIEQLFLSHEDNEVFRSLPGAGKRLAPRLLAEIGDDPSHYETAASLQALGGTSPVLFQSGTYSKPHRRQGCIKPLRNALHSFAWQSTQQEPWAAAYYERKRAEGKSHSAAVRALSNIWVRIIFAMLSANQPYNRATFEGARHQHAPKAA

SEQ ID NO: 265932 - protein, 406 aa, unidentified
MTPMPATPPNVFGGADTHADTIHVAAVDAVGRELGDREFPTTSEGYQAALEFVTDFGTVEVFGIEGTSSYGAGLARTATAAGLVVVEVNRPDRAHRRRRGKSDPIDAYQAAYAAMSGRASAAPKHECIEAIRAVHNARNSAVKATTATINQIHQLLITAPAEIRDRYRHLKDKTLVKALAGARPHAGASTLTPAARTVAGVLRTLARRHQLLTTEAAELEQQLHNLVRAANPALLAAYGVGTITAAQLIITSGGNPDRLRSEASFAALCGTAPVPASSGKTIRHRLSRGGDRAANSALHTIALVRLSSDPRTRDWATRQRAAGRTGLELLRLLKRAIAREIYRYLTQTITVPTITDLRPLRQSKNLTLTAAANHLGVWPTVISNLERGTRRDDQLAQTYRQWLQTA

SEQ ID NO: 265933 - protein, 362 aa, unidentified
MHVVYAHCCGLDVHKKTIPACLLISGARGKEQHEIRRFGTMTRDLLALADWLQSQQVTPVAMESTGVYWKPVWNILEGQFEVVLVNAQHIKAVPGRKTDTKDCQWIAELLQHGLVRGSFLPPTPIRQLRDLTRMRASLRQDHTAVANRMQKVLEDANIKLAAVASDWLGVSGRAILAQLLAGEEDAEKLAQLSRGRLRSKLPAMQLALAGHMTAHHRWMLRVLQEQLVFLEAQIAKLEAKIQDQVRADREALELCTTIPGVEEVAAANLIAEIGVNMDQFPSAQHLASWAGICPGNHESAGKRLSGKPRKGSPWLRRSLWQAAWAASHTKETYLAARFRRLAARKGKQRAIVAVAHTILGSL

SEQ ID NO: 265934 - protein, 414 aa, unidentified
MLYVGIDWAVESHTVTLLTSPGEVLKSLVIANTLKGFLTLLDAIRRHIGKDKPAPSPKDVLFIIEDRNQRLVDFLLAQDFIGYLMEPSRMPGYRLRYRSSGNKTDPDDAFIMADVLCRDRDQLPTINPMNATVQTLKTLLLDREGFVRDQTRLINRLTACLRQYYPEALELFSDVAGKTALAFIAAYPDFAAAHRLSREQVQQFLTEHHCPRTKRLERIVELLAQEPIAVPAAVIETKRRLALHIIQQLQAVQATVAEYDAEIQRIGAENKEVQRFRGLPGAGSQIAGGLYTLFGDDRTRFGSAMAVQSLVGTAPRTIQSGKMRVVCFRFGCNGFYRTQAQQLALSALRVSAWAKQYYRGKRAEGKRHQHALRCLANLLMKIAFAIWRDQTTYDENRHLAQIMRHQLRQKSSMA

SEQ ID NO: 265935 - protein, 315 aa, unidentified
MSEEEKRVFIGIDVSKEKLDVAVRPAETGMTFSNDEDGISFLVNFVKSLSPSLIVLEASGGLETAAVGALAVVSLPVVVINPRQVRDFAKATGKLAKTDAIDAHTIARFAELLQPEVRQLKDEEAQRLTAVNTRRRQIVEMITAEKNRLNSAPIWTRKDIKTHITWLEKCLKKVDNDLSNFLKKSPVWQEKNNILRSTPGVGPVTAITLLSNLPELGKLSRKKVAALVGVAPLNRDSGLFRGKRTTWGGRQSIRSVLYMSAVSAIRCNPVIKEFYRRLCEAGKPPKVAITACMRKLLIILNTMIKNRTLWSVAPT

SEQ ID NO: 265936 - protein, 325 aa, unidentified
MQTKKLCCGIDVSHLTLDVSYENNLGEIFHLKVGNNIKGFEKILEHTNSQYHFVMEATGVYYIRLAFYLHEKGCCISVVNALSIKRFIQMHLERNKSDKKDAAWICRYAIEQEPEFWQMPDSAYFESKQVYNTIREYAEQIKRFNNQLHSLQLLPVPSKTAIASLKKIKNELEKEIKKLEVKLDEILQQWQPQQHQNISSIKGIGKRATAMLIVFTQGFKYTHSYRQLISFSGLSPTEFSSGSSIHGKPRIYKRGGKNIRDVLYMCAMNAIKTNTACKTLYERLRSNGKTGKQALIAVCNKLLKQVFAVVKNNTLYQPNYCSARP

SEQ ID NO: 265937 - protein, 338 aa, unidentified
MLHIGLDLHKRFSTVAVMDEDGKVLLEDKLYHEDQARLREFFSAYAGKAVVTVEATRNWYWMYELLEKLGVTVKLANARKVRLIAEARLKNDKVDPQALAQLERTGFLPEAYIPPLSIRDNREYLRYRLTLVVLRTGLKNKVHALVDKLGIRHQFADLFCPSGRQFLGQLKLRPVYQEELTNYLALTDDLECRIVVATKAIKRQLKPDARAKLLMSIPGIGHLTAYLLLNEIGDIRRFVTPGKLSAYGGVVPIVRQSADHRWQGHITKEGNRYIRWALTESACKAPSKDYTLGSFYRRVAFRHGPLKARVAVARKLLVAVWYVLTYGEPYKVTQIPTI

SEQ ID NO: 265938 - protein, 393 aa, unidentified
MMTTNDSQPTPSAAAPQGIKPHRVIKLGVDVHWREHVVVRQIDGSSPQPPQRFSPEAFVAWVAKQVQVADEVYCCYEAGPFGFVLHRRLVGLGVKSLVVRPRNWDEYSKKVKTDRRDALALLSCLDRYVAGNTAALTSIRVPSEDEEQSRSISRQREQLLEHRKRVAAQGLSCARYYGHDLPDEWWRAKKFEALRRDLPEFLFTLLEGFHRIALVVNEQLDARSEQIESAQTRELPTGLGALSAQILDREIVDWTRFENRRHVASYTGLVPSEDSSGERRHRGAITKHGNPRVRHILIEASWRLQQFQPDYKAVKSRRAALDAAKRKGDKATRKKLCVGLARQFIVDWWRIRTGRTTAEQLGLQMSWPSAYVLRGKAPNPAAAPATASQPVAA

SEQ ID NO: 265939 - protein, 330 aa, unidentified
MKKWNVILGVDVSKLTLDICCAERNLHIKIDNCSKGFAVLKKWCKEKQIDLNTTLIIMEFTGGYEYRFIQFCQSLSIDYLRVPGLEIKNSMGMVRGKSDQADAYRIGLYGEDKSRRLEPSHPLNDNILTLRQLLSFRKRLVREKAGLQSTLKEREHMYGVKKNDHITRIAKEKIKANDKHIRQIEEEIMGTIKNDEAMWWNYRIITSIKGIGKVNGWMTIVYTENFTSFTDPRKYAVFVGVIPFANDSGTSIKGKKRVSHLAHKEIKQELNQAAKTAMIHDAEIKAYAERKLQNKAYPLVLNNIKFKLILRMFSLVKRGTMYVDNYKQAA

SEQ ID NO: 265940 - protein, 345 aa, unidentified
MTEAYDGRQVVGMDLHRRRSVLVRMTEDGRKLETVRIANSPAALRAVIARAGEHPRVVIEATYGWYWAADVLAAAGAEVHLAHPLGVKAFSYRRVKNDERDCTDLADLLRMGKLPEAWIAPPEIRELREVTRYRHKLVGQRTSCKDQVHAVLAKAGIPVTRTDIFGSGGGIWLDGLPLPQPYAGKVASLRALIAVLDGEIGRLEEQAAAMLAGDRGYAAIRQLPGIGPVLGAVIAAEIGDITRFRKPGQLCSWAGLTPRHYESDTRVIRGHVSKQGSRMLRWALVEAIQRAPAETRPGLVKDAIIARRGDDARGIAKTAAARTLLTQVFYAMRDGYLRHATSAAA

SEQ ID NO: 265941 - protein, 397 aa, unidentified
MYIVGIDIAKRKHEAAVIDGEGAVIIKPFSFTNNCSGYNRLLAMLAKAKLPLDEVSFAMEATGHYWLALFTRLQKEGFRVQVINPVQTNSIRSFYIRQAKTDPRDALLIAEVIRFGHFSESTLHPENIYELRELCRGRHAIVSMQADVKRKVVALLDQVFPEYETAFTNMFGDTSMAILQTCPTPKELSEMPLEELCHLIEVSSHKRFRMAKAQELQALARNSFGFAMAGDVFSTMIRLYAKHLDFLKQQVREMDRKIAEIMDTLDTPITTITGIGPTLGAYILSEIGDISRFSSAAKLAAYAGIDPTMRQSGEYNGVRNRMSKRGSPYLRHAIWLAASSAVLHDPALKLYFQKKRDEGKPYMASVGHACRKMVSIIYAVMRDNKAYTPCIPNEISA

SEQ ID NO: 265942 - protein, 307 aa, unidentified
MDYKTIGIDVSKTSLDICFLPTGEYLQISNDINGFKQLKKHIGSVKVDKILMESTGSYHRSLQKFLNIAGFKVFVINPKQIRDFAKACGILAKTDKIDAQVIAQFGERMPLQDKIKKDLFSEELKDLITRRRQIVYSLVNEKNHLEKTNNKFILKSVKSSIAFLQKQLTQIDNLIFNCIHSHDFYKKIYDKLLSVKGMGKVTASVLLAELPELGQVNKRKIAALVGVAPMNCESGTTRGQMHIRGGRMSVRNTLYMAAGASVRGNDILKNYYNRLRNNGKTPKMALTAVMRKLLIFLNSLIAKEFFA

SEQ ID NO: 265943 - protein, 402 aa, unidentified
MDGIRRYAGIDWAKASHAVCIIDERGSAVARFEVAHSDAGLGELVRRVRDVDGVAIERPDGPVVEVLLEAGLPVVVIASRQVKALRARHGLAGNKDDRADAYILADALRTDGHRLRPLRPDAPETVALRATVRARKDLVRHRVALVQQLEAHLALVFPGAIGLFGDLSSDIARAFLLRFPSAERAAWLSPRRFDHWLAAQGYSGRRTGAQLHARLAAAPRGTTGGSAEAMAAVTLALVRAIGAIREQVEGLEQRIAELLQVHPDGHIFTSLPRAGRVRAAALLAEIGDCRERFPTPESLACLAGATPSTRQSGQHRAVTFRFSCDKKLRDALVDFVDDSRQSSPWAADLYRRARARGTTHPHAVRILARAWVHVIWRCWQDRVPYDPARHHALQRLLLAPAA

SEQ ID NO: 265944 - protein, 357 aa, unidentified
MTQSKGISFKGQNIYVGIDVHLKSWSVTILSETSVLKRMSQGADPDALHRFLTSHYPEAEYYSVYEAGFCGFWIHDRLTELGIHNIVVNPADVPTMSSEKLRKTDAVDSRKLAVSLRAKQLKGIYTPDSETLEIRSLIRLKNSITKDMTRQKNRIKSHLRYLGVEIPVEYLEPHSNWSKRFLNWLKQVGMRTPSGRQALDILIMQFEALRKQKAEMTRKLRMLSHTERFEETLNLLMTVPGIGQTTGLALMAEVVDVTRFANAEQLAAYVGMIPMCHSSGEHEGVGDITLRKHAILRSNIIEAAWVAIRKDEAMQLCYLNNCKRMVPSKAIVKVARKLVNRIYFVLKRHQPYVNAVA

SEQ ID NO: 265945 - protein, 301 aa, unidentified
MEIHTIGIDLAKTVFHLVGLNAHGDVVVQRKCSRSQLLRFTSNLRVCLIGMEACGGAHFLGRALRDQGHDVRLMPAQYVKPYVKTNKNDYIDAEAIAEAVGRPRMRFVPIKTDDQLDLQSLHRIRERWVVRRTAVINQIRGLLLERGITIRKGRLYIEASLPAILEDADNRLSGILRALLAQLQLEMQYLGRQIEESDKLILEIAKGMDSCRRLIAIPGIGPLTATATIAAIGNGVAFKKGRGFAAWLGVVPGEHSTGGKQKLTGHQQAWEQVSAQTVRAGSAHGLATEEQAIGWPEYVVG

SEQ ID NO: 265946 - protein, 410 aa, unidentified
MELLHRRCCGLDVHKETVVACLRLVSDGKVTTEVRTFQTTTADLLRLSEWLAANECTHVAMEATGVYWKPVWHILDDGEFALVLANAAHVKNVPGRKTDVNDAIWLAELLAHGLIRASFVPDAQTQEMRNLLRTRKQLVREQTSHVLRVQKTLEDANIKLDSVLTDLMGKSGRAMIEALIAGETNPAKLASLASRRVKASPEDLREALRGRVTKHHRFLLRLHLNQIDALDAAMATLDAQVEADLGPFRTAVEQIISIPGVKNLGAHVIVSEIGIDMSRFPSAAHLISWTGICPRNDESAGKRRSNRLRKGAPWLKTTLVQCAWAAVRKKDSYLQAQFYRIKARRGPKKAIMAVAASILTAIYHMLKDGTIYKDLGCNHFDRRSTDQQKKRLIKRLADLGYAVEIKPLTA

SEQ ID NO: 265947 - protein, 354 aa, unidentified
MKNGNKKIAKEETIFIGIDLHKKRWHVTIRTTDVELFCSSIPGAWASLEKQLLKYREHPIYAVYEAGYFGFWLHDYLINFGADCVVTPPSLIPLEYGNKVKTDKRDSRKLALLLAKGMLKRVHVPTEKERYHRQVVRRRRQLVNDRVRTQGRIKAELQLYGIDLPNPSGKWTQIYLENLSRIRFKDRWMQKSFSHLLEQYRFLDTQIAQQTALIKELSETPRYKEKVKILSTIPGVGILVAMELLLELQDVRRFQKADQLAAYVGLTPSQYSSADKVRMGRITCIGKKALRAMLIQASWQLIRKDGVMREKYDKIKVRAGGKRAIVAVARTLLIRMRRLLLDNVPYVPGVISSI

SEQ ID NO: 265948 - protein, 466 aa, unidentified
MPENREKTNPADRDMEIEGLPMVRANVAGIDLGSQKHWVCAPKPGGQGREIKSFGATTPELEKMAAWLKERNVASVAMESTGVYWIAPHEVLEGHGLEVVLVDTRQLARVPGRTKKTDPVDCQWIQRLHSCGLLMGAFRPAEQVCMLRTLVRDRAVLVAETGDWLRRMQKSLDQMNVRVHRAVSDIDGATGMAILRAIVGGERDARQLAKLRDPRCRQSEEAIAEQLSGHWRADHLFSLEQALKMYDGIQERMAAYEREIMRMLAEMEREDCRGKEAPQLHNANKAKAIKKRGEEPLRQALYRASGVDPTGIDAIGVETVLLVQSEYGADLSMFPTEKQFVSHLTLAPHKPTSGGKPVKKQKNRRGSASTRVAAGLRMAALSLRNSKTALGAHYRHLAARKTADIAVFALARKLATLIYRLLRWGQPYVDEGAAAYEQRYQESRLKRLTASAKDLGYQLTPKAATA

SEQ ID NO: 265949 - protein, 453 aa, unidentified
MGKQAGKGRSLSLECIEPNAAGMDVGATEIYVAVALDRDAEPVRHFPTFTGDLREMAAWLMRCGITTVAMESTGVYWIPPYEVLEEAGIRVCLVNSQHVRHVPGRKSDVSDCQWLQYLHSVGLLRPSFRPDAAICALRSLSRHRASLVESAAVHIQHMQKALTQMNLQIHHVLSDITGRSGMAIVEAIVAGQRDPIQLASLCHSKVHADQQTLVKSLTGNYRPEHLFTLKQSLAAYRNYQHLLGECDQEIQRLTGTMSGKIDRGGPAPHPQRQKRRKNQFHFDMGSELHRLFGVDLTAVPGINALTAHVLLSEVGPDLSRFPSAAAFANWLALCPSNKKSGGRVLSSKTRPTNSRLSHALRLAAQTLARSHSHLGNFYRSMRARLGAPQAITATAHKLARILYRLLTTGATYDETVFTTEQQKHQLRLHKRIAKQAQNLGFQLVPIAPIAPCS

SEQ ID NO: 265950 - protein, 484 aa, unidentified
MVIETVFTREMLPEIVKQNLFVMKLYLGGDVSKGYTDWVILSEKKQTVLDNFQLDDTYAGHCKLYSTLEGYFGKHPGLEIFAAVESTGGYENNWFSTLKSYQKVFNLKVARVNPSGVNFNRRAGLKRNVTDAISANSIAEYLINHPDNIKYDQDDQWKSLCRHWNFVEMQKHQRVQTINQLETILYSANPTLMRFKKDNLPNWLLELIIQCPTAATLAKARPEKLARIPYLTLARAKTLVAEAKQSIASATDKNAEILVSQIARQIKSFDQNIKTQMQLIERDLICPEIELLKSFKGIDTISAIGLLLEIETIERFPTVKGFSCYFGLHPKFKQSGDKVIGVRMSKQGSKNMRKILFNSAKGAITYNPLITAVYEKKLSQGMAKMAAIGVCMHKILRIIYGMLKNKQTYNPLIDKQNCERSKEKQQEKQQQENANIDKNRRYQEFDIKAPISRKQTKKRKEHDLSQCEITSQSTGSKCSSETKL

SEQ ID NO: 265951 - protein, 406 aa, unidentified
MQEPDCVYIEVFVGVDIAKSDHYACAATADGREVLARSVPNDEAAIGRLIDDAAAHGAAALVIDTTSSAAALLLEAAARREVPVAYVTGLAMRRAADLYAGAAKTDPKDAFVLADYARRNADRLSWTAPSDELLARLRILNGRDADLAADATRAANRLRDALVAISPALERAVGDKLATSAGARDALARWGTPTALRSAGKARVRARIAKRSPRAAGRLTEAIWAALDAQSLTVAAEATWGDTISELAADLDRVCARRDQLAGDIEEAFLAHPLGKVLASLCGFGPRTGARTLAEIGDPHRFADGGRLAAYAGLAPVDWQSGRSATSRKPRGGNHRLKNALFTAAFVAAQHDPDARAYYQRKRAEGKRHNAAVICVARRRCNIILAMLKTHTPYQPPHPQNLPQAA

SEQ ID NO: 265952 - protein, 423 aa, unidentified
MEFTLTLEFTFSSQPLIVGVDIGSKTHFCRAFDWRGFELSRKVFRFSNTGVGFLTFLRWTEEVMNKTGMKNVIVGCEPTGCYWLTFQKFLQDHEVQLVTVNPFTVNRSKELDDNSPEKSDLKDPKTIALLVKDGRYSTSYLPRGVYAEIREASVCRDQIMKQHVRLSNQIQGWLQKFFPEYLECYADWDSTSGLLLLKEAPLPQDILKIGAGGINQIWRNAKVRAAGIKRAQTLIEAAQDSVGLEAGEAARLEIWVLVNDYLLKAEQLKRLDEYLEEKVKEVPNVEKLLAIKGVGMSTVIGFVAEVGDIGRFTDPKQIQKLAGLEIVKKSSGKKKGQPRISKRGRRKLRRTMYESARALMNWNPAFQDVFLYYRNRKKNPLGGMQAKIAVACKAIRIFYVVLETGCDFDEEKFRKDIIRQEAA

SEQ ID NO: 265953 - protein, 385 aa, unidentified
MMNLDRTNTPAGDNYATVYVAFELSNAKWRQGIILPGAKKMSRYTIDGGDTAGLSARLSQARAKAATCGKPVRIQSCYEAGFDGHWLHRWLTEQGVISYEVDPSSIEVNRRARRAKTDRIDLDKLMRTFLAYIRGEPRVCSMLHVPTVEDEDRKRLTRERERLLKERTAHTNRIKGLLHAHGIRDAMPMKRGFIESLATVRTADGRPLSRWLKEEITREHERLCLVEKHICALEKTSTAELRAAAPGSADAKVIQLAELKGIGLTSGQKLVNEVFYRSFDNRRQVGSCFGLTDTPYHSGTSRHDQGISKAGNRRARTLAVELAWLWTIHQPDSELTRWFRERVGKIKGRIRRIAIVALARKLMVALWRYLTTGVVPAGAALHRAC

SEQ ID NO: 265954 - protein, 346 aa, unidentified
MYYAGIDYHKRYSFVSIQDDRGQIVLERQVDHNNPFVFDETFREVGGPVSVVFEVGLNWSWLYETLEKIAEVKAITLADVYKVRLIAEAQIKTDKIDARKLALLLRLGVVPACHIPDRKTRERKDVLRQRAYWVRQRTGLRNRVHRLIGRQHNLQMPQVSDMFGKKGKDALKKAVLPEPDSILLKQDLAVLEQLDAVIKNSEDKIKTQSKPDRAVEVLSSMPGVGLIIANIMATETDGIERFPSPERYTGYAGLSPTTHSSGGHTYNGRMMWMCNKWLKWAFIEAAWVAVGCSTYFGGLYRYHRQRGKKANTAITTVARRMCRIAYQLLKENRCYEERTFFPAALV

SEQ ID NO: 265955 - protein, 532 aa, unidentified
MSSKNYGGIDVAKQNVVIGIFGYPKTKTEANNPNGHTNTVEYLKKHNVNLVVLESTGGLEVPLANALYAAGMRVVIANPQRTHKYAESFSLGKTDHLDAKMLADYAQALDARKMVDDILYVPPSAEIQELEALVKRRSQLVEMRKMEKNRLEQTHASQKASVAALIAHLGELIVALDKDIDRYNKSGFNGKGTILSEMKGVGNTTCATLLSMMPELGKVAHKRAAALAGVVPLPHQSGDKEKKTGCIGGRKMVRNALYMAALTATRFEPKIKEFYERLMNRGKPFKVAINACMHKLLRILNARMRDYLASLEQNAMIELWEVDLRGLKDSNGINGELYRFYAGTNEMRKPIVWQGHSYEAYGVSADGFEMSGQGPSNRPTLNLMNLDGFVTALLIRFDQCLGAIVRRRMVYMQYLDAVNFAGGNKQADPTQEALSLFVIEQVATHKRDVISFTLALPMETDNAYISCRTITTICSWLYRGVECGYNGAAVADEKDQPTNDPKKDKCSGLVSGCALRKNLLNFGGFPSVDKLG

SEQ ID NO: 265956 - protein, 470 aa, unidentified
MCFASSNEHSDVAWELPTLSIRVSREQSRPGAMQREKEVNKSAMSEAGSIQPEPEFAAFIGIDWADQKHIWCLQAAGSARRETGELEHTPEAVESWVAHLYQRFAQRPMAVAVEQSRGALVFLLSKYEPLHLFPVPSQMASSMRQALYPSGAKDDPRDADLLLVIVLQHRNRLRRLSPDSEATRRVQNLVEERRKLVDEKTAQINRLTDHLKVYFPQMLEWFGRLDSDVVCALLERWPSLEELQKAPPASLRAFLRKHRCRDRERIEHRMEAIRQSIAAIHDRAVIEAKSAAVRVIVRVVRVLGEGIEDLDGQIEEAAAAHPDFFIFNSLPGAGPVMAPRLLAAFGSQRERYRSPDELQSFSGIAPLTETSGKRKWVHFRWACPKFLRQSFHEWAGHSIVQSEWARAYYQQQRRKGHTHHEAVRALAFKWIRIVFRCWQDRVAYDENTYLAALVKRGSPLGAIAATGKTL

SEQ ID NO: 265957 - protein, 464 aa, unidentified
MTAGKQLWRNRNEKKEWARRLQSEDPGLEVVHPHAAGIDVGNSTHYVAVRPDRDPEPVRRFECFTADLHRLADWLQSCGVKTVAMQSTGVYWIPLYEILEGHGLEVYLVNARHTKNLPGRKSDVQESQWLLKLHTYGLLNNSFQPVSEIRVLRTYWRQRGEHVRGAATCIQRMQKALTQMNVQLANVISDISGLTGQAIIRAIVAGERNPLKLAMLSDPRVHASHEELAKSLEGNWRPELLFVLHQEVDMYDTYQKRIAECDQRLQKHLASFTRPLPIQPPTQKLKTKKPAAKNAPRFDLSSELQRVTGVDLTRIDGIDVMVAQTLLSEVGLDMSRWITESHFASWLGLCPDNRISGDKVLSRGTRRVVNRAATALRQAANTLMRSRSYLGAQYRRLRTKLGAPKAITAMAHRLARLVYRMLKYGQTYVDKGTEYYEEKFRQQQIQLLRKRAAKLGLQVAEIHA

SEQ ID NO: 265958 - protein, 343 aa, unidentified
MKITTIGIDLAKNVIQVHGMDERGRAVLKKQLKREQVASFFANLPPCLIGMEACGSAHHWARKLTELRHTVKLIAPQFVKPYVKTNKNDAADAEAICEAVARPNMRFVPIKNGGQQAVLALHRARQGFVKARTAQANQIRGLLAEYGIVIAQGIGHIAKRLPEILEDGENNLPGTFRQLLDRLGDHLKELDRQVGALEVQIQSWHRENEASKKLAKIPGIGPITASALVASIGDAKSFENGRQLAAWLGLVPRQHSSGGKQMLLGISKRGDTYLRTLLIHGARAVIRVAEGKVGHADSWLARLMDRRNKNVAAVALANKNARTVWALLAHARDYQASYAPTAA

SEQ ID NO: 265959 - protein, 389 aa, unidentified
MKIFVGIDIAKLNHFAAAISSDGEILIEPFKFTNDADGFQLLVSKLESFDKNSIIIGLESTAHYGDNLVRYLVTELYQVCVLNPIKTCQMRKNNVRKTKTDKVDTYVIAKTLMMQDNLRFVSFFDLDMMDLKALGRFRQKTIKQRTRLKIQLTTYVDQVFPEIQYFFKSGLHQHAVYALLKEAPSPKEIASMHMTHLANLLKVNSHGHFTKEQAKELRVLAQKSVGANDSAISIQITQTIQQIELLDSQLEKIEAEMTDIMKFNDSVIMTIPGIGYINGGMILGEIGDIHRFSNPNKLLAFAGLDPSVYQSGNFQAKTTRMSKRGSRVLRYALVNAAWNVVRNNATFKAYYDAKRAEGRSHYNALGHCAGKLVRVIWKMLTGEVEFNLE

SEQ ID NO: 265960 - protein, 349 aa, unidentified
MNKKLFVGIDFSKETFDAAILKVSEESSIDLRIIGNEQFKNDVPGCKRFVKWLNKTCALSGDYSSVLVGGEDTGNYSTTLPKQLYVLGIDCSLQNAYSIKCGSGKIVRDKTDKMDAEKIAYYFYRFRDQIRLYKPLSKDMESLERLYSYRYGQVRESARLQCQIKEYEHILKSEPNDETLKFMIQRLEKQERFLKKEIKAIEAKMVEIIKANEELNEIHKCLLSIPGVGKITSLLLIVVTRGFTRFDNPKQLACFLGVSPHPNQSGTSVQNGNHRSWFADPYFASLLHMTALTASIHNPKFKAYDERLKSKGKPKLLIMNNIKNKLLTVAFTIATRRTKFYSDYDAKLA

SEQ ID NO: 265961 - protein, 342 aa, unidentified
MEKASIIGLDLAKNVFQLHGALADGSVAFRRTISRAKLLSFFTRIPRCLVAMEACASAHHWARQIAALGHDVRLIAPIYVKPFVKRNKNDVVDAEAIAEAASRPTMRFVAVKSVEKQAAGVAFKARDLLVRQRTQAINAVRGHMAEYGIVAPNGPVHVERLAAATQDPESGLPVSILGVCRLLLQHIATLSEQIELLERELRERARADETARRLMTIPGIGVICATAMEALAPPPESFAKGRDFAAWLGLTPKQNSSGGKTKLGGTSKMGQRDLRRLLVSGAITQVRWAARKGPPEGSWLARMMARKPRLVVAVALANRTARIAWALMINGGVYRASCLAGA

SEQ ID NO: 265962 - protein, 401 aa, unidentified
MKEFNPEQHRIETASALEIVRTAENVDVYAAYVGLDVHKETIAVAVAEPGRGEPIYRGEIANKPKSIAKLLTKLSADYDGGLLLFCYEAGPCGYVLYRQIIASGHDCQVVAPSRIPKAPGERIKNDRRDALKLARLLRGGDLTAVWVPDQEQERMRDLSRARDDMKGQERKARQQLNAFLLRHGYHWPRGKSRWTPAHENWLAGLKMEHPWQQVVLEEYIAAERAAGERVAQLNDHLMRALPEWSLAPVVDSLIALRGVDKLAAIVLLAELGDISRFDSPRQLMAFLGLVPSEHSTGTRRRQGGITLTGNAHARRMLVESAWSYRFPARQTKHLKGKARNASAKAKQIAWKAQTRLCGRYRTLTRAGKNTKLVCVAIARELAGFIWDIVRQEMPRLGPQQG

SEQ ID NO: 265963 - protein, 395 aa, unidentified
MYRLLVGVDVSKDFFSAAGLDEEGKEHFSGTYEMNSQGFSEFLKNLSSQGERLDQMIVGMESTGCYHINLFSFLSSQAIRTVVINPLLISNFAKLSLRKTKTDKKDALTIARFLLDHHEEISQLPLSQDHQDLRDLSRERESLCHLISATKVEIKRVLRTIFPELESIGNLYTGVMLRFLQQYPSARLVRGAKLRAIAKALKGPYVGDKLTFTAEDIVKAAQSSVAVVSPAKEIIVQGKIATLLHLQERQEELTKLLTNLCKATRVEDLKILQSIKGVGPNTAVPFLAEVGEVKNFTSSKKLIAFAGLDPSIHQSGKFVGASKLSKRGNRHLRRAIYLMTSSVVSQNGFFKAYFLRRKKEGLPPQKALFAVAHKLIRVIFAMLSQRTYFKVKEAI

SEQ ID NO: 265964 - protein, 488 aa, unidentified
MKKKNIFQNQSQEILTLFEMAENRSKVMCVPMDYAKKDHMIFFCNGNGKILRKPFSIKNSLDGKRYLIEQVTKSCHHHGINLQHVLFGGEDCGSYADNFTCDLKVITALRSDKWLVAGVNAHDAKTYRENMQASTDSLDLLGISKMLINCRGNCSPAQSGIYLDLRTFVRQRRKLVNMATGMKNRIHTTVDRILPGFLDENKSGIAPFSKCSLLLMEDRFSAPQIHRRQGPTLTKLLSRQGVQRPDHCVEKLQKLSAQALRPPEQHIATLQISLKQQVKLFTCLQESIQQLCEEIAHNLAQTQGAFLTSIQGIGIVLAAGVTAEIGNPDKQKSLSNIVSYSGIIPKVKQTGGIQGKTRTKKVGKRCNHILKDYVVQSASHMGLHGPEDLISDYKRRDAQGQHADFGMARRYLRMAMGMMRTYQTYLPKRLRSTKINMKERAAYYLISWPKLREKWHKASSLDIAFDNDMPLGQWRNIIQELYGIELKL

SEQ ID NO: 265965 - protein, 341 aa, unidentified
MVIKAIGIDLAKSVFSLYGIDDHGKCVLRKTVKRHQLLNEIAKIPKCLIGMEACSSAQHWAREFIKLGHDARIMPARFVIPYRKSQKNDSNDAEAICEAVTRPNMRFVAIKSAEQQAVLCLHRLRRGLIKDRTARINRLRGLLAEYGFAAPKGRYPGQTTMYALLEDAENSLPDLARRLLKECWDSIEALSKEIQSYDRQLSELAKQSESAKRLMTIPGIGEITATGLVATISDGKQYDNGRQLAAWLGLVPRQYSTGGKPRLGRISKQGDSYLRTLLIHGARAVVSTCKDKEDKLSLWIKSLLARVGFAKTTVALAAKNARIAWALLTRETEFKTEIVTS

SEQ ID NO: 265966 - protein, 429 aa, unidentified
MNNRKIIRLEQFRQLKKEIRGSKEHLIIGIDVAKQKHNAFLGTATGKTLLKRLVFENNKEGFEKLLMHVESISASNGYKKVAFGIEPTANYHKPLAEFLINKKHDLVLVSGVAVKRNRELLDGRWDKNDMKDSANVADLISQGKCLFYEYPIHVLRDLRGLLSLKKKFKKIEHGFRVRIRNHLLAQYFPELDRYYGHSESENLAIVRWCLSPSKIAEMKYEDFFQLVTTRDRGFTQHQRLKAIWDRAHCSIGCSTGTAAEFEAEVLVEALKRTRETIGSINEKVIKICVLFPEYKYLLSIPGFGPVVSAIVLAAIGDPFRFESGNQVLKTAGWDLNANRSGKRSDSVIPVISKRGKSDLRYALYQAALVASTKNKHFTSWFIEKLKGREKEQGIKTKMRVKLAAKLLIIAWTLMKKKEPFNPELLNIKK

SEQ ID NO: 265967 - protein, 378 aa, unidentified
MDKLIRIGMDTSKSVFQLHGVDSAEKPILRKKLRRRQLLEFFGRLDPTKVGMEACGATHHWARELKTLGHEPVLLPPQYVKPYVKRGKNDAADAEAICEAMSRPSMRFVPVKSVGQQAALMLAGTRDRLIRQRTQLSNSIRGYAAEFGLTVAKGLDKIEPLLARTAIEAALPGLAKDLFAEHGKEYGQLNVQIRKIETRLMAWHRDNELSRRLVEVPGIGPIGATLLAMKITNPHAFSSGRDFAAWIGLTPKDHSTAGKTRLGVITRAGDEALRSVLVVGATALIQQVRQGRGHPSPWLVELLKRKPPKLAAVALANKMARIAWKLMISGERYNRAHQPPKIVSRKGRSAPLCEGSAQRPLLTPRTTSPEKGTAMINA

SEQ ID NO: 265968 - protein, 411 aa, unidentified
MDVLIERCAGLDVHRDTVVATVRRPGPGGARRSQTRTFRTVTGQLQELSDWLASEKVTLVGMESTGVYWKPVYYVLEDRFPVWVINAEHLRNVPGRKTDVADSVWIAQLLEHGLVSPSFVPPRRIRLLRDLTRHGRRLTEERTRTIQRLEKVLQDAGIKLTSVASTILGKTGRAILAALLAGEEDPAVLAELARGRLRPKIPALREALTHRFRIEHHGLLIAQMLAHVDFLEDSIADTYRQVDVLLRPVAELVELVMTIPGVGRRVAEVLIAEVGLDMSAFPTAGHLASWAGICPGNNASGGKRRAGRTRHGSMWLRIALTEAAQAAARTHGTYLAAHHAQIRGRRGTQKAIGATRHDILLAYYHIVRDRVPYHDLGPDWNDRRRSTQQQARRLVRQLERLGLNVVIEPNG

SEQ ID NO: 265969 - protein, 426 aa, unidentified
MKEHIDYLSTLFVGIDIASRIHVISALDFNQDFYIKMKPFENTKEGAGIAEKMIADVLAENHQFKYVVIGMESTGFYGVHLANYLSTSDLLTPFSVRVYCLNPKEVKNYKKSFNDIGKNDGIDSFVIADFARVGRIAIKPWRGSQYLALQRLTRHRMHITECITREKTYMLNNIYLKFSEYALLRDGQHPFSNKYGATAEAILTEYTTNEDIVNSSIEELVEFINSKSKGRIADPEETAKIVQAAARNSYRLDKCLYEPLTISIASSFNCISSFEKELKAIDKAILQTVQGLNPDEYTVLNSIPGIGKVYSAGILAELGSIKAFQNANQLAKYCGIVWNDNDSGDFESEDSRMSKAGNRYLRYYIIEATGSVINHCPEYKAFYQKKYAETRNHQHKRALALTSRKFIRLLFGLLDKGQLYSPEKSR

SEQ ID NO: 265970 - protein, 360 aa, unidentified
MTGTMTWAAMDVHARSTYAASLDVVTGELSRQRFDTGAVEPVVGWLAGLPGPVRCCYEAGPTGFGLYRAAVAAGIDCQVIAPSKTPRPSGDRNKSDRRDTDLLLRQLMAGGLTAVVVPSATCEAARDLARAREQVRVDLMRCRHRLSKLLLRHGRVWDRSAWTKVHREWLSAQTFEQVNTELAFIDNLAACDGLTARKDALDERLSWVVSDPEFWPLVRRLRAFRGIDTLSALIVTLEVCDFARFSRAVQLGSWLGLVPSREQSGESDHHGSITKTGSKYARRILVEAAWHYARPPRIGRTLYERQEGLPDHVLQIARRAQSRLYRIHRRMRDRNKPGNVIVVACARELACFLWAAATAP

SEQ ID NO: 265971 - protein, 333 aa, unidentified
MVEGTEGSHHKEGSKKMSKDSTVCAGIDTGKYKLDVAIDARADRLQVDNSPEGYRSLAAWLQQRGVERIGIEASGGYEQAGVSFLRADGFVVIVFQPVQVRAYAKFVLQHAKNDNIDAALIARCTAAATDIHEPPDTRLAPLAQRLTMIEQLTQDVAQLKTRREACRDQRIREFWKQEIDRLKRLLQAELKQLVAAIREHRDLSTRLDLIASVDGVGLRTAVAILVRMPEIGRVTREQAAAIAGLAPYDDESGQRRGLRHIKGGRQRLRQSLYAATLPAVFYWNAQLKALYKRLITAGKTHKLVLVACARKLLIFVNTVVARGTPWTSAPATT

SEQ ID NO: 265972 - protein, 484 aa, unidentified
MATSNFKLSGKPAEVTIAAGIDVHKYKLQVFILGRFGRENKPLGEQAFGNNATGRTELCRYLQAYYPDEIVMEKTGKLSDPVLNAINKFHDWKKGVPRVSVVQPDTIKRFAGEKHTDPNSAFQLARLGISGLMNVTHIPTEVGQRLKALTRESERYTSQSTALINKMKDQLAGLGYTLPDFTLTSTWGLALFKLLLADGIDGNIVKVYELLEAGHVDIHAFSRQALLDRKSEYLQYSYLSIPPFDTRYLQRQLVALEMIEALKASNLKQIEDTVNETPIVKSRVQAIEHVGCISSPGAAAIIAEVDDIERFRSWKQLALYAGRAIAADESGEHVGKPHMTKRCNHHLKKIFKQAGINTCFTLKEDSDLRRYALRQLGKHSQHQMVACANTSTKIVKIVYKILHDNVIYDPFHDTTKKLGDSPSPTIQLKNEEAFRLGEARKRANRFRKFTRRTIEELPPGEMKAMLSRVLELMDKGLDEGEVKK

SEQ ID NO: 265973 - protein, 393 aa, unidentified
MFFVGIDIAKNSHEATVIDCDGKFIVKPFKFQNSIQGFQKLLSALTPLSESVSDFEFGMEATGHYWLNLYTKLIESNYNVHVINPVQSDALRGLYIRQTKNDAKDAFIIAELIRFGRYSETTLSDSEILSLRELTRQRYYLVDCISDAKRKVISCIDKVFPEYQGVFSDIFGATSVELLSTYTSPDVIAELDTELFSQFLKSVSHGRFGKAKAEELQNLAKNTFGSFLFVDSASLSIRQFIQQIKLLESQVEELEEFIKEKFSRFDNQLTSIIGIGTTLAASLFAEIGDINRFDAPEKLAAFAGIDPSVKQSGEFNGTKCRMSKRGSPYLRRTFWLAAVAGIRFNPAFRAIYDKKREQGKAHAVALSVVMRKICNIVFVILKTNKPYEIILPN

SEQ ID NO: 265974 - protein, 387 aa, unidentified
MPQLNDLSRSLVALDQDSTIIAVVELSQSSWLVAGVLPGIERQPRKKLEPSAERLLGLLHRWRDEAVRAGRNITRIALAFEAGRDGFWLARWLNARGVEAHVIHPSSVAVSREHRRAKTDRLDTELLKRAFLGWLRGERGHCSMARVPTIAEEDAKRPNRERECLVGERTRIVNRMKGALARLGIRNFKPTLRKAADRLATLHTPEGMPLPPNVLAELQRAMARLGFVVSQIREIEQARQKRLEQQPETGPHAMVRQLARVVGVGIETADMLVHEVLSRPMRDRKAVARYAGLTGSPDESGTKRREQGLARAGNARVRRGMIQLAWRFLLFQKDSALALWYRARTADSRVGTRKTMIVALARKLMIALWRFVTTGETLEGVVLRPAG

SEQ ID NO: 265975 - protein, 447 aa, unidentified
MHERRIIGLDLGIASEHTARILTSNGTLVAKRKAVPTVESLERLEQAALEGAEPGTVIEVVMEPTGPAWLPIAVFFLSRGHQVFRVSSAKASALRKVLSKNAKSNGIDADALARLAIIDRLGLHPLELRTADEAALDRRVRACSRLTEQAGRHKVRIKNLVQQLYPMTPLTGFLGAADLAVLERWADPRDLVKAGKARITKVVATASRGQQKAPRVAEWLTAATLSLELYGDHPAVAFAELAAEVKTEVRLLQAIQAELAQHEEAREVSYQSVDPEGLARSLPGIKQVSGPVLVATMGRAQRFPSAAHFRSFTGLAPKASETGNTDRKGQPMSKAGNNLLRTMLVQAADVARKQDPQLARIYHVQMAERGKNHLGANCVVVAHLAERAWLVMRRGTPYVVRDIDGTPVAEEEAKATIAERYNVTELIRQRRRSNKGGRPLKKSSRDS

SEQ ID NO: 265976 - protein, 349 aa, unidentified
MKYYVGLDVAMEETAICIVDDERRIVREGKAASEPEAIAAFLSATGLTFERVGIEAGPLAPWLCDGLAAAGLPVICIDARHMKAAVSAMPVKTDRIDARNIAFAMQVGWYRPVHLKRPEARKLRLLLSSRQMLLRARIDLDNHIRGVLKAFGLKVGKVATGQFEARVWELIDEGDAQIRWIVGTLLTTRAAVVSQLALLHRAVLAVVKQDQVCRRLMTVPGVGALTALAFRTAVDEPERFASSAAVGAYFGLTPSKYASGETDYTGHITKCGDKAVRVLLCEAANALLTRVSRWSWLKRWGLEVLKRRGKMRAQVAVARRLAVIMHRMWLDGTDFRWQREPDAPAGAAA

SEQ ID NO: 265977 - protein, 338 aa, unidentified
MELYAAIDLHSNNSVLVVTDAEDHMVFAKRLRNDLELIVTALRGCPGDIRAVAVESTYNWYWLVDGLRSAGFDVRLANTAAVKQYDGLKHGDDFSDAKHLAQLLRLGILPQGYICPPELRALRDLMRKRAQLVRQRTAQILSIHNLFARNLAKSVKGDDIKRLEDGEIDALALLEDQKCALRANVAVMRCLEEQIRLLERGILAKGKLRQEFHALKTVSGIGDVLALTIALETGDVHRFASAGKFASYARMVDSRRESNGKSKGVGNRRCGNKHLSWAFIEAAHCAVRYDPSVRRFYQRKCAKGLSVVAIKAVAHKLARACYHIMREGVPYDGTRAFA

SEQ ID NO: 265978 - protein, 343 aa, unidentified
MYFIGVDHHKQVSVMTVLDEDGQERKNGRVPNLRRYVERFLEDCRPFTAVLEAGRSSYVMADLLRELGGEVKIANALQVKAIAHARIKTDKRDSRTLAHLLRADLIPEIYQRGEWNRRAQRVMRMRAYWVRKQTEVKNKIRALLAQQREEVRLEVEKRESGLFSLKGLEFLAKLLLEAREKEVLDDLLQGYHEMQGHIKKSDGLVRALYGEIEEASRIDTVPGFAATLSVLVAVEIADVRRFSRAAELHSYAGVIPSTYSSGERSYHGHITKQGNVWLRWAALEAVYPAIKKDLGLRVLYSRLARRKGANVAKVAVARRLLTIIYRVLTEKRDYIPDMKQSAA

SEQ ID NO: 265979 - protein, 344 aa, unidentified
MKISRVGVDIAKSVFHVHGVDRRGQKIWQAKLRRAQWLDKLCEHVEPGAEIGMEACASAHHWARELQKRGYVVKLIAAQFVKPFVKSNKNDRVDAEAISEAMSRLSMRFVTPKSVEQQDTQAIHRIRSELICQRTAKANQIRGLVGEYGLIAPMGIAQLRRALPCWLEDADNGLTHGFRASLWGLYEDLQQLDNRIDDVDKQIAESVKSSPVAQRLSELRGVGPLTASALSVALGDGKSFRKGRDFAASPGLTPKQHSTGGKDRLLGISKRGDAYLRTLLVHGARAVLRHVANKDDALSCWLKELSSRKHSNVVTVALANKTARVAWAMVFNNVHYDPMMAAQR

SEQ ID NO: 265980 - protein, 359 aa, unidentified
MHNKFTKTLDFTGHNVYVGMDVHKASWAVNIMVDGIEHRGFTQPPSPDALHNYLTENFPGATYHSAYECGFCGYHHHRKLLELGIDNIVINPADLPITDKEKNNKRDPLDSRRISRALQKNELNGIYVFEPVHEQFRTLSRLRINASRENRKAKNKIRSFLYYYGINPPSEINPDNWSNQFVEWLKHLTFPSEAGAISMQYLLSSYHETKTQMLQLSKELRHQVKKLYPDIYKRLLTVPGIGPTNAICLIAEIGEMRRFKTYRQLASFAGLVPRSHQSGETDHTGSLTYRNNKYLLSSLIESSWMALRYDPALMIYYKERVISHKSQVVITKVAHKLLNRIRSVWISGNVYQLRVKCNN

SEQ ID NO: 265981 - protein, 389 aa, unidentified
MPYHVGIDVSKWKHDVFAMDQDGAVALKPFQIRNDAEGFSDLLKSLEALGDKAGVRICMESTGHYHKAVYGFLVDNGYSPSVVNPYLVSAFARGQTLRKEKNDRADAIALARYSLERKPSAGASQPDALEQLKSLTRARDRLVRERSDKIVVLTNCLDRIFPEFSGFFEVKSAVARLILSKRADAKSIAAMTPAFMERARKLSRCASALKIQALKEAASKTVGRPDPAASGIISATIPVLESVDKAIDRIDGEIKAIMSGLEEHVSSIPGISVISAAAILGEYGDISRFGNPGKMLAFAGLESSHSQSGQTDAHGKMVKRGSPHLRYVLMNVAITAKNWNQALAEYYSKKHVTEGKKRRVALNHVAKKLIRIIWKLQTEGIDFDASKLR

SEQ ID NO: 265982 - protein, 422 aa, unidentified
MKKRIYRKMPVNQFQPSSISRDDVGARLVVAVDVAKVDMVAAIAAGDGRVLNTIAWKAPAENATVLGVLRSFRAAGFLVEIAMEPSGTYGDVLQYQLEKEGFPIFMVSGKRTFDAREIFDGVPSLHDAKSAAIIARLHVEGLSKPLSAPCPERRQLRAAITIMDLHQRRYLQLVGNLESWLARHWPELPALVELTAASLMALLARIGGPADVAAHRSGAGKLLRGMSHGLMAEDKITAVLDSAGTSVGVPLVGLERDALITIAAEAHRALRNFKVAKTEVEKLSAHTPAVVLAPVIGRTTAAVVYTEVGDARSFSSAGSFLKAMGLNLKEKSSGTIKGQLKLTKRGSSRVRHYLWLAVFRWIQKDPIANAWYQRKKERDGGKSSRAAVALMCKLAKALYHVGRGATFDSSKLFDARRLALAA

SEQ ID NO: 265983 - protein, 427 aa, unidentified
MKYTQNEKIMQITENTLIIGVDIASDVHYARAFDYRGIELDKVIKFNNDIQGFKVFSDWITKIATNNHKQHVMVGMEPTGHYWFTFAQYLEENNIKIVLVNPYHVKTTKELDDNSPTKNDRKDPKTIAMLMKDGRYMEPYIPKGIYSELRNATNTRWQLVKKLNSIKNQVKRWIKIYFPEFNNVFADWEGKAALMILKHFPTPEKITKLDEPEIIATWRKEISRAVGIKRATKLIKAAKASVGIKEGLIAAENELHILLEEYELLMKQHQNTMNLIEKLTMQIPGVKEILKIKGVGLKTLSGFIAEVGDIERFDHPKKVQKLAGLNLKENSSGKHKGQTTITKRGRKRLRSILFSTIMPIVAKNKEFQQLHKYYTTRKENPLKKKQSLIVLCCKLIRVFFVILKTGVKYDPVKMMNDIKRPTLQEVA

SEQ ID NO: 265984 - protein, 361 aa, unidentified
MEELHPRCAGIDIGKRTATVCVRIPGPNPASRRAKERVSETVTTWSSMSRQVLALREHLLTQKVTCVVMEATSDYWKPFFYLLEDAGFEMMLVNARHVKNVPGRKSDVNDATWLAQLGAHGLVRSSLVPPPAIRELRDLTRTRTQIGRDQTREFQRLEKLLEGAGIKLSAVASNLGGVSSRKMLTALADGERNPYILADLAHFTMKAKRPALVEAMTGRFTEHHGFLVKAHLAMIDQQDRIIADLTERIEVVIEPFRSFRDLICSIPGISTKVADVITAETGADMTPFPTSKHLASWAGVCPGNNESAGVIKSTKTRAGNAYLKGALGIAAMSAAHTKNTYLAAKHRRIMSRRATTDPSSR

SEQ ID NO: 265985 - protein, 480 aa, unidentified
MRPHIPLMEDAMDKNKKQKRKNKKHRKVNTSHLEQLNINAAGIDIGAEFHYVAVPNGRDAEGQDVRHFSTFTADLHQLADWLRQCNIDTVAMESTGIYWIPVFEILDSQGFDVRLVNPRNVKNAPGRKTDVLDCQWIQQLHTYGLLQSAFRPEDRICELRAYLRQRAMLVSYASHHIQHMQKALEQMNVKLTQVISDITGVTGMKIIRAIISGERNPVKLASMRDARCNNSETIIAKALEGNWRSEHIFALQQAVELYDFYENQIIECESRIQGHLESFDDRSNGTPLEKPRRKSRGSSNQFHFDARRYLHRMTGVDVTRIEGIEAPTALTIIGEIGIDMSPWPSEKHFASWLGLCPGSKITGGKVLSSKTKPSANRAAYAFRLAAYSLQRSKSAIGAFLRRKKAQKGAPKAITATAHKIARIFYNMLKYGTEYVDLGQEYYEQRYQDRVIANLKRKAKQFGFELVNIKEHKLLTGLPAN

SEQ ID NO: 265986 - protein, 323 aa, unidentified
MSPIVGIDVAKHSVDLAIELDNGKHRTKAKLSNDPKGFATLHAWLCTHAQPDSWVVMEATGIYHQALAEFLYAHGYRVCVLNPAQVALYARRQLQRVKTDRSDAKLIASYGFRHRDQLRAWHPDPPALKTLKALVRRRDDLLQMLQMERNRLEVAQANVQLSIQGLIDHLHARISEIQQAIDDHIDQDPDLRRQRSLLTSIDGIGDISAALLLAELGPVKRFADAAAVTAFAGLNPRLHESGRYQSKVCISRTGSARLRAGLYMPALVAMRHNPVVTALKQRLHARGKHGKQIVCAAMRKLLHLAYGVLKSGTAFDPHKALAR

SEQ ID NO: 265987 - protein, 322 aa, unidentified
MSNVDCCGIDIAKSKFDCAIRLENGKYKNKVFKNDVSGFVIFISWITEQNIKNLHVCMEATGIYWEALAEYLIHRGFTVSVVNPAQIKAFSMSLLIRSKTDRGDARVISDFCFERQPAVWQAPSVEEQELRALVLRLESLQKMRTQESNRIQVARTNVIKNIKDHIVWLDNEIATLLKEIQLYINRNTEMKNMKKLLESIPGLGAKTAAVLLSFGIHLGRFINARQATAYAGVDPRLNESGSSVRGRPRLSKTGHAFLRKSLYMPAMTTLFRTEWGKQFYARLSAAGKPPKLIIGAIMRKLIHVAFGVLRISEKFDKSLHCV

SEQ ID NO: 265988 - protein, 409 aa, unidentified
MEVVHERCCGLDVHKKTVVACLVTPGRGGQPTREVRTFSTMTRELLALSDWLRDAGCTHVAMESTGPYWKSVYNLLEGSFTLLVVNAQHIKAVPGRKTDVKDAEWIADLLRHGLLRPSFIPSRPQRELRELTRYRTSLLQEKAAEVNRLQKVLEGANIKLASVATNVVGLSGRTMLAAMLAGEYEVEAVAGLARGKLRNKIGALKEALEGQLQSHQRFMLAAQLKHIDSLESLIEEVSGEVERRLATLQVELQRLSTIPGVSTRISQAMLSEMGANMHRFASAGHLASWVALCPGHDESAGKSRSGRTRRGSPWLRSSLVQAAKAAGRTQTYLGAQYRRIAARRGANRAAIAVAHSIIVIAYYMLKRGEDYRDLGRNYFDDRQHDQVKKRLTRRLEALGYSVQLAPGRA

SEQ ID NO: 265989 - protein, 373 aa, unidentified
MFHFTTLFIGMDVHKESFSLCYYDMMTNQFKHSTKVGPNVSYIVNYVNELRRLYGQDAEVLYGYEAGCLGFTLYHQLQAHGLPCIVMAPTTVMKEGSKRVKTDKKDAAQLAKALAFHSYRPVHIPTVEDEQVKEYIRMRTDHKVALKKIKQQILAFCLRYDFRYTEGSSNWIQKHVRWLHSLNLDGLYAEILTEYLLTYEKLVDQIERYDARIEQLGQSDSYQEKVSQLSCFIGVKTLTALSIVTEIGDFNRFATAQHFASYLGLTPSENSSGDKERRGAITKAGNSHVRRLLIEAAQSLAKGTVGYKSKELKRRQSGNRVEVIAYADKANERLRRRYRTLVLGKNKKQNVAKTAIARELSGFIWGMMTGRIA

SEQ ID NO: 265990 - protein, 402 aa, unidentified
MIFINCLGIDIGKSESVVAHYKDEVLVKEMVIQNNQNGYRYLKNYIKHLDSLFILFESTGIYSRGMKRFCEIHKIDYLEMNPLEAKFKTSSLRSWKTDKSDAHKLALLAFRMKDSKVQRQSEEIYFELRERARFHLEMEINQNRLKVELVETLHQTFPGLEKLFTNRYSKIALSIAKAFPHPDFVSTLTHDELVEKVLHSTDKGISVNKAHKYVQKLIEIKNNSFPNVDKSSFLLQKVQYLCDKLLIGIEEMKEFDQEMIDLAKNTTEFENIISIPGIGELTAALLIGELGNIREFKTNKQLNAFVGIDIKRYQSGTSKSRDTINKRGNKKARRLLYLIIMNIIRGRNHYQSHIVDYYYKLREQPHGKTHKTAVIASINRLLKTIHYLIVNNKLYDYQKAPH

SEQ ID NO: 265991 - protein, 417 aa, unidentified
MRVDHGDLPEGAVFAGVDTHADEHWLCVLDAVGRVLLSERFPAAPEGYDALAAAVRRAGEPVAVGVEGTATYGAGLARRLSELGLPVWEVLQPERRGRPRGSRKSDPVDAERAARKALSGEGLSVPKSRDGWVESARALLAARDRLVSSATAAANAAIAIARSAPEEVAGPLRGMRADRAMPAALGMAEPDDPVAASALRAVRALAESWRASREAAARLLAEIEGLVRGGCPALLAMYGCGAVSAARLAVAAGDNPGRMASEAAFAALCGASPVEASSGRTVRHRLNRGGDRRANSALHQIARHRLDHDPRTRAYAARRRSEGLSDREVMRCLKRYIAREAYRALTGPRGAAPGFDPGGLGSARRAAGISQEAAGAALGVSRGLISLIELGRGGSPSMRERYRAWVEDGFPIPADQG

SEQ ID NO: 265992 - protein, 345 aa, unidentified
MQTMYYIGLDVHKRTISYCVKDASGRVYAEGSVPATRCDLDRWMKTLPQPWTAAMEATMFTGWIYDYLQPHAAALKVAHPLMLRAIAAAKKKNDRIDANKICDCLRCDFLPECYMASTAIRERRRTLRYRNLLVRQMVQRKNKTGMLLMEAGVSYNKQRLHQAGYFRELLATNPDINEGLSSLLRLCRETMVRLQKTESALVRSLERDSLLMDRVERLMTIRAVGPITSLTWALEIGDVQRFRSIKKAISYCGLCGAEKSSANTVPRTPLSKQRNKHLQTTLIEAAKMAPRFSPALAMLYDKEKQKGNANRATLAVARKLVAYLMAVDRGQRNFQATETMNCVAA

SEQ ID NO: 265993 - protein, 438 aa, unidentified
MTNDSPQTNCSPTTQSPQSPAPAPILCWVGLDWADKKHCLVVRTAGVAKPETHLVEHKPEALDAWFLKLRQDHPQGRIAVAIEQSRGPVLYALMKYDFLALYPVNPRCLADYRRAFKVSGAKDDPLDADLLSELVYLHADRLRALTIEDLPTRQLRLLVEARRGFVDDRTGFSNRLGATLKCYYPLALELLGEDLTTPMALDFLRRWPNLAQLKSARPGTLRGFFYSHNSRSEDKIAQRLKTINQAAPLTEDPALVEPLQLQMERLVQQLHQYDARIAAVFAQHTEGWLFKPLPGCGEVLAPRLAAAFGTIRANFESSDDLLCFSGVAPVKKESGGLKIVHFRYARPIFLHQSIVEFAKCSIGHCEWARLLYEHQLGKGKSRWAAIRVVAFKWLRVLWRCWQERQPYDEITYLRSLQRDGVELYRSLYEGLPPVKTSV

SEQ ID NO: 265994 - protein, 340 aa, unidentified
MNIKRLAVDLAKDVFQLYGVDVNGHKVLEKRISNREKFSEFVAKLSPCEIVMEACGSANYWARKFIAYGNDVKLISPQYVKPYIQRNKNDFRDSKGIMEASFWSGMPYVKPKTIEQQDIQSLLRIRNNYLEMRISVSNQIRGLMKEYGVFVKEGYKNLCIALPNIIARDNENGLSSIMKDLIEGQYVMLLMFDEKIDELDIQIKHQANNNPTCQRLQSIDGVGPITALAIIALVGDGEGFKNGRHFAAYLGLVPKQHSSGNRECLLGISKRGDNYVRELLIHGGRAVARTCGKKTDTRSCWINRIKDQGSFNKAAVAVANKNARIAMAMLLSGQEYKKAA

SEQ ID NO: 265995 - protein, 347 aa, unidentified
MAIVEVPRSIVGGVDTHLDVHVAAAVDSVGGLLAVRSFPTTPAGHHALLSWLGSFGVIDRVGVEGTGTYGAGLARHLAAAGLTVVEVDRPNRQERRRNGKSDELDAIEAARAALSGRARGQAKGGTGKVEALRALLVAKRSARSIRIRTTGQLRHLVITAPDDLRERLEGLTTTRLIAEAAVLRPRAGNDPVRHATKTAIVTLARRVQTINAEISVLDRHLETLVRATAPQLLEIYGVGVDTAAILLVAAGDNVSRIRSEAAWAHLCGVAPIPAGSGKTNKRRRLNPGGNRQANHALWRIVLTRLGQGESRTAAYMRRRLAEGRTKPEIIRSLKRYVAREIYHQLFA

SEQ ID NO: 265996 - protein, 368 aa, unidentified
MAGKSSKLYIGMDVHKASIDIAVAEEGGEVRHQGQIGGDANALWRAVRKLEASRRRLIFVYEAGPCGFAIYRGLIERGHECWVVAPSNIPRRGRDRIKTDRRDSVKLAGLARAGELTPIYVPDVTDEAMRDLVRAREDAVVMQRQARQRLAALLLRNDVRYGGKTAWTAAHRRWIADVRLPQPAQRLAFEEYVQTVEEATVRVERLTSYIAQEVAQWRWLPVVNALQACRGIQLLHAVRIVAELGDLSRFCHPRQLMSYLGLIPSEDSSGERRRQGSITKAGNGSARRALVEAAWAYQYMAKVSGLIARRQVKAPKAALAIAWKAQVRLCARFRRLAARGVSRNKIVVAIARELAGFVWAIGQQVKPI

SEQ ID NO: 265997 - protein, 375 aa, unidentified
MATTRSEFRSVREATLYVGLELSKKTWKLGLSGGFGTCPYVRSVPSGDFAAIDRVLARARQQFGIGPEAAIVSCYEAGRDGFWIHRALTARGWANRVVDSASIEVNRRQRRTKTDRVDAQKLVTMLVRACCGEPDVWREVRVPTAAAEAARHRSRERTALTKEHSRAWNQINSWLATCGCQVSVRQRTGAWWTTARDWQGARLPAPVQQRIARAIARLRVIEEQIATVEATQAAAVAAAPADSALERLVRVRGVATTSASVLLDEGLIWRDFQNRREIGGLLGFAPAKYNSGAAERDQGISRAGNRRLQSISIQLAWNWLRWQPTSALTQWYLAKFGVHRRSRRIGIVALARKLLIALWRYATTGVVPEGAVLKA

SEQ ID NO: 265998 - protein, 415 aa, unidentified
MALKIVYKICCGIDVHKNFVVACIAKTDKQGVTTYERHHFSTYTKGLKQLLKWLLDRNCKDVCMESTGKYWIPVYNVLEHDCSIVLAHPKYVKAIRGKKTDKKDAKWIADLFKHDLVAGSFMPPADIRQLRDLMRYRFKLTCFKSSEKNRYQNCLTVSNIQLGNVVSDTFGKSSQKIIAKILENPDDTSFDIGSLIHGSMKDKLPELELAIDGYINTEQAAKLKIIKEHFDNLEARKAELEELILALANPYQQEISIILTAPGFKNTFTAIGIISEIGTNMEAFPSAKHLCSWAGLTPTNNESAGKKKSVRVSKAGCYIKPLLVQCANSVVKSEKHPEIRNRYLRLRKRRGHKKAIIAIARMLLTALYNMLKNKEPYNAELYRKSDVLPVNREITIEQAILMAQFQGYKIKSAAE

SEQ ID NO: 265999 - protein, 419 aa, unidentified
MTDPPLQVWTRSIAIDIHKHYLMIGGIDAHKRIVLQPRKVELHHWSEWAHANLHPTDAVVIEATTNAWLIYHVLVTLVGRAVVVHPAKVKLIAEARVKTDKVDVLTLAQLLRADMLPEVWVPPPHVRDLRALLSHRRRLVSLQTSAKNRLQSVLHRLNLRPPDGELFANKQRGWWEALELSATERLRVDQDLATRDHIGEQIGVIEAELRRLSTSEVWAEQVPYLLQLPGIGLLTAMTLLGAIGDVTRFGAAKQLVGYAGRGAGVHDSGKSHRDKGSTKQGRRDLRLVLVEAARTAVQTHPYWKREFARLAKRIGEHKAVVAIARKLLIVVWHVLMAKSADRRADAEQVAFKLMVWSWKLSDEQRGGLTSRQFIRAHLIRLGLGEDVTHITRGGTKRPLATIEEVLALRPELRGPPDSA

SEQ ID NO: 266000 - protein, 389 aa, unidentified
MQVIADRPEAPSAIRSDLGAIFASMELSCSRWMITSLSPGSGEKMSKHSVPAGDICALLTRFSVLRQKVFARTGKLFPIIVIQEAGLDGFWIHRVLQKEGIESHVVDPASIATSRRRRRAKTDKIDGEALLRALLAYKRGEPRVCAMVKAPTPEEEDRRRLCRERKVLIAERVSHVNRIKGLLFCQGVSGYEPLRRDRRQQLDEIKTGDGRPLPNHLKVQISRELDRLELLLEQIKAVEGERDALLDAQRIVATSPAAVLLDFNGIGPEFAAVLWSEGLFRHFDNRRQVASYAGLAPTPWQSGSIDREQGVSKSGNPRLRTTLIQLAWLWLRHQPQSALALWFEERVKRNGGRHKKSAIVALARKLLVALWKYVTAGVVIEGAEMKTPR

SEQ ID NO: 266001 - protein, 337 aa, unidentified
MPLVQPTQPPVVLVAIDIAKLRHDVLIEAPGWKSRKRLILPNTAAEFRLFADYLHGLKHPVRVVFEATGNYHRPLAHFLMAEGFHLELIASLAVARTREAMHNSWDKNDPKDAQVLLHLLKTGVTQHYHDPLANHIHDLQELSLTYAQISLEKTRTQHRLLTHYLPLYFPEIERHYHASRSEWLLSFLQVFPTPAMIARLSMEDFVQQAWPVVGRKVGKQRLLEDIYRTAQSSIGIPVQEDSEAVAMFRVVLGEMIRLCQLRDQLEQRAALHLKDNGDFQRLQQIPGIGPILALTILAEAGDLRRFSHHRQFLKFCGLDLSPDREQLSGQVRTISPA

SEQ ID NO: 266002 - protein, 345 aa, unidentified
MKDLKVIGLDLAKNIFQVHGVDGHGRKVCTARLKRKDLLAYFANLAPVLVGLESCGGAHHWARQLSKLGHRVKMMAPQHIKPYVQGNKTDARDAAGIAEAAARESVPEVAVRDEDSQQMQALHRARELLMGQRIALANQMRGLLAEFGEAMPLGMKQLRAHVAQWQAKDTGLDILRRTIGELLEALGQAEERISRLEADIKQAHRGNDLSQRIETVPGVGLLTATAVIAAYGRCEHFTTSRKFACCVGITPREHSSGGSQRLMGITKRGNGYVRKLLIHGARAVLKARMNKPAHAEDWEIRLARRRGHNIAAVALAAKNARRIWALLRSGEKFRANYAPAKGAGA

SEQ ID NO: 266003 - protein, 383 aa, unidentified
MKSVCGLDVHKDSVYLCILSEFGELIEKVFGVLTYELEEMRDLMLHHHVVEVSMESTSVYWIPIWRVLFPHFKLNLANPYFIKQLPGRKSDVKDAQWIAECTMKELVRSSFVPPEIIQQLRQYDRRIFDLNEEIVRKLSKLDAVLQRCNIRLSNYVSNVDSKSYKAVVRAISQGITDPEELVKLIHGRIIKHHGMDVITASLKGVVSLAEIDMISQLRDELDMAEAHKEKCQARMLEICEREFPEELKRLQTIPGIKERAATSLIAEIGTDMNKFETANHLASWSGLKPRNDESNKKIKSRSITHGNVYLRKTIIECAWAASRTKDCFFSRFSFHQTQVRKKNKMKVLVAVARKMLIAVWHVLHDNTIYIDFTTDRKTSRIKG

SEQ ID NO: 266004 - protein, 458 aa, unidentified
METRIIGIDLAVTAAHKAIVLDQASNRYVSKLLSFHTDPAQIEEVLHIARAGAATEVRLIAVLEATAMAWYTVGVFLERHGVEVYRVSGQQVAALRRVFRRHAKSDRIDARVLARLPLVHPERLHRCVFPSADQMILQRACREVKRLTDQITASKNRLLATDQFAWLGLPSPLPPYSEAALWLRNNWYDPWRVVEAGETLLTDAWLQAASEQPTDCTWIPALLQRAERVLALYGDPAQIDYAQLQASLQREQERLRETETQVHQLRLHTVRPLYRQLHPQRHLESIQGIGQDSAAIYIAFIGDLQRFPSLREFRGWSGLIPFSRQSGHAQARGLRITKAGPDLVKATAFLNAQVARLWDPQIAAIYHKQMVDLGKHYLQAVCACATHLLDRIYAVLRENRPYQLRDVDGSPVDKRTARRICQERFHVPDAVRRRNNHRVRKARSEAHVERRYNRRRNK

SEQ ID NO: 266005 - protein, 494 aa, unidentified
MKAGQQNKPQKASCRPEQGNWQQMNRKQRREMTRKMHAEDLSLEVVHPHAAGIDIGNEVHYVAVPPDRDNKSVRRFGCTTAELKEMAAWLKQCGIRTVAMQSTGVYWIAVYDILEAATLEVYLVNARETKNLPGHKSDVQESQWLMKLHTYGLLRNSFRPPQEIRTMRTYWRQRNDLIRSAARHIQRMQKALTQMNIQLANVLSEVSGVTGQAIIQAILAGERDPRKLAAFRDKRVKAREEEIARSLEGNWQEDLLFMLKQEQDGYEFCQKQMSECDERLQQYLRQREDRSKGAELPEENRKERLRKNKTNKPRFDLRMELFRMTGTDLTQIDGIDVRTAATVISEAGWDMSKWRTEDHFVSWLRLCPDNRVSGDKVIGKRRLPINNRLNVAFKIAASTLRQSNTYLGAQFRRLKTRLGPPIAIKAMAAKLARLVYRMMRYGMRFADRGAEFYEAQHRRRQINSLKRKAANFGLKIIDAPAASEEFLERGKKLS

SEQ ID NO: 266006 - protein, 309 aa, unidentified
MFAGIDVSKDHLDLHVRPTGEAARFPNDPDGIAALAGRLAAVAPALVVLEATGGYEHPAAAALAAAGLPVAVVNPRQARRFAEATGRLAKTDRLDAAALAHFAEAVNPPARPLPDADAVALAALLTRRRQLIGMRTAEVNRLDTAPPAVARGIRDHVAWLDRQLDRVDRDLGAAIEASPVWRATDDLLRGVPGVGPVVSRTLLTELPELGRLSARRIAALVGVAPVARDSGRHRGARAIAGGRAGVRSALYMAILSAVRYNPAVRAFYARLRAIGKAVKVAQVAAMRKLLVILNAMVRDNRPWDPATVA

SEQ ID NO: 266007 - protein, 324 aa, unidentified
MIDGILGIDVSKNTLDASMSSCNKVRTRSFANSSDGWRHLLDWLISQKIRRVHACLESTGRYSLGIACKLNEAGHVVSIVNPAQIRDFARTKLGRNKTDGVDASHIREYCELFKPSPWAPPSHAHRQLGELQTIRAGIVAGLTEWKNRKNSGMVDAVAQSLADATISHFTSQLGAVEKAIAQTIDNDSDLRRKRDLLLSISGVGETLASAVLAELPGPDVLRSSAEVVAYAGLNPRQHQSGTSIDRPTRISKIGNVVLRTALYMPAMSAMRYNPAIVALVTRLKARGRLKPKQIVVAAMRKLLVLCFGVLKTGKPFDPALAMGC

SEQ ID NO: 266008 - protein, 346 aa, unidentified
MNEIIRIGMDTSKSFFQLHGVDAAEQPVLRRKQGRRQMVEFFRQLPPTVIGIEACGGAFHWARLLQGFGHEVKLMPPQFVKPYVKRGKNDAADAQALCEAMSRPTMRFVPVKSAEEQAALMLVGLRDRLIRTRTQLTNAIRGQAAEFGLVAPKGLDKIEPLLARLRAEATIPAVARELFALQAKEFGALQARLKTVEAKLMAWHRQNERSRRLAKIPGVGPIGAAMLTMKTPDPKAFASGRDFAAWIGLTPRDHSTAGKVRLGVITKAGDEDVRRVLVAGASAVIQQLQRGRGRPSPWLAALLKRKPRMLAAVALANKTARIAWKLMVSGETYDATRGRPALAPAA

SEQ ID NO: 266009 - protein, 424 aa, unidentified
MLGVGIDWAETFHVVALGRPGEGVVQVLRVEHSKPAPDGLLERLRVLEPDPGEVRVVLETRHGLLVDCLVEAGFVVVPVNPDLIARRRGPAKKKDDVEDARIACLLALDRFQPLRPLIPHGELAAELRLLGRDDARACQDERRLLNRLRADLLAVFPAAVQIAGPDMGAPTFLRMLQRWPTATALAAASRQELVAFARAAHSGYPERFADRVGQALGREHFTARQTLAQAKVDTIQLMVAQLLLIGAQRRTWERRMGQLLLGAPRRRGGVLPAQAERDQGQAVPGGEIYLSFPGLGDRLAARSAGEIGDHPEQFQTPNSLQCCAGQAPVTRRSGKRELLITRRLACNRHLADAVHQWAFASLRRSIWAKDYYDSQRARGKDHHAALRTLGNRWLGILWHCLQRETLYDEAVHVANRTRALHPAA

SEQ ID NO: 266010 - protein, 462 aa, unidentified
MPGREERETWEKSRRQLEGLPVIRRGVAGIDLGSEQHWVCAPTLDRSGREVARFGATTAELIRIAEWLKARQVESVAMESTGVYWIAPHEVLEAQGLQVLLVDTRQLAQVPGRDKKSDPTDCEWIQRLHSCGLLRGSFRPEEAVCMLRTLVRDKANLVAESGDWLRRMQKSLDQMNVRVHRAVSDIDGVTGMAILRAIAGGERDAQKLASLRDRRCSKTQQEIAEQLSGHWREDHLFSLQQALKMYDAVQERIAAYEQEILGKLGEMEREEPHEPTAPPLQNTSKARTIKKRGQEAKRQALYRMSGVDMTQIDAIGVETVEVVVSEYGSDLSRFPTEKQFVSHVTLAPRVPTSGGKPVKKKKRNSASTRVAAALRMAALSLRHSQTALGAYYRRIAQRRGGDIAVFAAARKLATLIYRLLRWGQPYVDEGAAAFENRYRQHRIGRLAATAKELGYQLTPVPA

SEQ ID NO: 266011 - protein, 315 aa, unidentified
MTEKTERFVGIDVSKQTLQVCVLPDSVQRCFDNSPSGHLELRQYLASVGPQLVVLEPTGGYELEPLCALWQSAIPVAVVNPRQIRDFGRSLGKLAKTDLLDAELIARYAQTVRPPVRPIPDEESQQLQALVVRRRQLVENRATEQARKHLAKSRVRASIESLIAYLSAQIDELDGELQKLVESHPAWHKHDEILQSVQGVGEVTSATMIALLPELGTLNRKQISALVGVAPLNRDSGRKQGKRQIWGGRAAVRAGLYMATLAATRFNQQMSSYLQALRQRGKPFKVAMVACMRKLLCILNAMLRDGRPYNPQLQT

SEQ ID NO: 266012 - protein, 430 aa, unidentified
MKSNTQNAKIEAITEKTLVLGIDVGSETHYARAFDYRGIEYSKKPFKFSNTEAGFATFKEWILELKERHEKDKVVSGMESTGHYWFNLGKFLQDNEMKPVLVNPHHVKKSKELDDNNPTKNDRKDPKVIAGLVREGRYMIPYLPDGVYADLRTASNIRFQLQAELTRIQNRISRWFNIYFPEYKTVYGKPDAKSGMLILKAAPLPEDILTLGIDGVNQIWRDAKLRAVGKARAKTLIEAAGHSVGSKEGAVSARMEIRMLLEDYESRNMRLQEVMVLIEELVRKIPMAEKRLEIKGVGIRTVSGFLAEVGDISRFNNPKELQKLAGLALVENSSGKHKGETTISRRGRKRLRYLLFEAAMSLVAKNPEFRELHNYYTTRRLNPLKKMQSLMAIAAKLIRVFYAMLTKGVDYDPKKMVSDIRRPEAYLQAA

SEQ ID NO: 266013 - protein, 462 aa, unidentified
MQCYYGVVMSKKKVKNSKLPAELQKINLNAAGIDIGAESHFVCVPDGRSETTVREFKSFTNDLYKLAYWLVECKITTVAIESTGVYLIPLYEILEERGIEVRLVNARHVKNVPGRKSDVLDCQWLQRLHMYGLLEGSFRPTQDVCVLRAYMRQRDMLVKCSATHIQHMQKALMQMNVQLHHVISTITGVTGMNIIRAIVAGERSAKTLAKLRNECCKNSEEVIEQALVGNYREEHIFALRQALDLYDIYQTKLAECDAEAQKALEKFDCKINEKSKPLGEKKKKKRRDNEPYFDTRKYLYQITGVDLTLIDGIEGFSALKIISEIGLDMDRWKSPKQFGSWLGLAPGTKISGGRRLSSKTKPCANRAAAVFRMSANTLYRSDSAVGAFYRRQKARLGAPKAITATAYKLARLFYTMLKHGKDYNDAGANYYEEQFHKRVLSNMQKKARALGYELVKTASEIT

SEQ ID NO: 266014 - protein, 371 aa, unidentified
MKKNSTRQQSSKRSEKLTQGSITIGMDLGDKKSHYCMLDSCGEVTKEGTVATTRQAMAEEFGKLDRCRIAIEVGTHSRWVGRLLSEAGHEVIVANPREVQAISGSSRKNDRVDAEMLARLARVDPKLLHPIRHRSERAHGHLMKIRVRSSLIEARTGLINAARGLVKAVGERLAKCDTDQMGTEQLQGLPESVQVTLKPLLEQVESLTKTIKECDAEIEQIARSEYPETALLKQVSGVGNLIALTFVLTIDDPGRFRKSRDVGCYSGLRPERRESGEKKPELGISKEGDSYLRKMLVQAAHHIVSHRGPDTDLKRWGLQLAGKSGKNAKKRAIVAVARKLAVLLHRLWVTGEVYEPLRNSQVREALKQRAA

SEQ ID NO: 266015 - protein, 337 aa, unidentified
MKYCGIDLHSNNSVVIVSDDEDRIVLQKRLANDLGQIRAVLEPYRSELVGVVVESTYNWYWLVDGLMDAGYRVHLAHPSAIKKYEGLKHSGDVADAAYLAQLLRLGLLAEGYIYPRGQRGVRDLARKRMQLVRYRTAQVLSIENILLRQTGARMKGAAVKRLTAQQVDELGFAPDVALAVEANRAVSQALGQQIEALERRLEERVSLRAEYRLLKSVPGIGEILATTIMLETGCIDRFARVGNFSSYCRCVDTLRESNGRKKGEGNAKNGNKYLAWAFIEAANFALRCCPQAKSFYDRKKSKTNRVLALKALAHKLARACYYILRNQEPFDVSRCFG

SEQ ID NO: 266016 - protein, 357 aa, unidentified
MRLADHVDFVIGVDTHKHSHTLGVINRTGAELGDVTLATDAFGYRRMLAFARQHTTGSDRRVWAIEGTGSFGAGLMTYLLQQGEWVVEIDRPARPARRNGAKNDTLDAYRAAREALARAHLTQPRRRGTREAIRVLVCTREGAVRARSRALCHLQSLIVSAPAQLRDQLRRDPVELQVERCAHLRVMANHSVEHRATVRALRATARRIQALTAEADDLEAELELLVHDTAPELLAEPGVGTITAAQILNAWSHAGRIRSEAAFAMLAGVAPIPASSGQVVRHRLNRGGDRQVNRALHTIVLSRMRFHPETRAYAARRAAEGRTPREIKRCLKRYVARRLFRLLEATHHPNEDLQRAA

SEQ ID NO: 266017 - protein, 329 aa, unidentified
MLYENYVGIDVSKLSIDAFIRESRIHRQFRNEESGFKQLIQWIKKHIGETWESLLVCFEHTGLYSLSLALFLEREHITYAMVPALDIKRSLGITRGKNDQIDAKRIAEFAYRFNDRVMPTSLPAEDIRKLHSLLAMRDKMMRNMGGYITSRNELFRVIPDRELPVLPSVYENIISTLKNEVHELEREIRSIIMANKELKTTFELITTVKGIGFIVASFLIVYTCNFTRFENWRKFACYSGIAPFEYQSGTSVHARTQVSFIANQQMKRLLHLAAIHFDAELHNYYVRRQAEGKSKMATINIVRNKLIARVFAIVKRGTPFVDIQKYVYL

SEQ ID NO: 266018 - protein, 327 aa, unidentified
MYLCVLNQEGEILLHRNMPAGPEPFLKAVAPYRADQVVCVECIFTWYWLADLCARERIPFVLGHALYMKAIHGGKAKNDRIDAQKIAVLLRGGMLPQAYVYPAERRATRDLLRRRMHLMRKRAELLTHIQNTNSQYNLPEIGKKIAYKANRTGVAERFPDPAVQKSIEVDLALIDHYDHLLRDMALAILTTAKQHDTNTLYRLRTVPGIGEILSLVLLYAIHDIQRFPRVQEFVSYCCLVKCAQESAGKRYGTSGSKIGNAYLTWAFSEAAVLFLRANPAGQKYLGRLEKKHRKGKALTVLAHKLARAVYDMLRRETTCDLPTFLRG

SEQ ID NO: 266019 - protein, 358 aa, unidentified
MASIPPTSRVVIGGIDTHKDLHVAAVLDTAGVLLGTEAFSTTRAGYRALVRWLRGFGDVRLVGIEGTGSYGAGITRHLGEAGIEVAEVDRPDRSDRRRRGKNDTIDAENAARAALTGRRTSTPKTKDGKVEALRVLRLTRTTAVKSRRAALQLLGNHIVSAPEELRDQVRNLTRMQLLRTCASWRPDTTGFRDPVVATRVALKSLARRILDLNDEIADLDQLITTLVGELAPQLVAATGIGVETAGQLLVTAGDNPQRLRSEPAFAMLCAAAPLPASSGKTQRHRLNRGGDRQANSALHLIVVTRMRVDPRTKDYVTRRIAEGHSKLEIIRCLKRYVAREIYYLLKPPHNENVKSRPA

SEQ ID NO: 266020 - protein, 341 aa, unidentified
MKVMIGVDPHKGSHTAVAVDDGEIELGTLRVPASGGQLDELLAWAEPFEARTWAVEAAAGWGYLLSQQLVDAGEIVLDVPATLAARVRVLGTGRSNKNDPNDARSVAIAALRAPRLASVQRPDHNNVLRLLAKRNLDIGRAKNRTACRLHSLLAELVPGGIPNRINVSRAQQLLDQVHPATPMEAMRLEIAFEHLDDLRRLDDQLAASRKRITAAVAETNTTVTDVFGVGPIVAAMLLGYSGDIARFPTRHHYASYNGTAPIELSSGGRIVHRLSRRGNRQLNHALHIAAVTQIRHAHSEGRVLYDRKRDEGKTRKEALRALKRRISDTVYRHLRADAGLD

SEQ ID NO: 266021 - protein, 529 aa, unidentified
MAYSARTTHRRRRKPNSKTGHKQRSLQKPNGVISGRVQKVGGERFAIVCIDPAKHRSEWMMADYFGNLLIEPQTVEHQAAFFKLALEQVRDAQKQHDIQDTIVVVERTGNYHLPPKRAFASAGFETRVVHPFATKQYRVPADPGNKTDETDLYAQHRAAVAGFGLCEFELQSPYREVQLRARHRRNLVEKGAATACQIRDHLHLAMPGYANLFDRLFESRPAMAIARRCDSPGAVIELGHAGLRQYLREKKIAHRAPTIDKVLTWAAQAVYDNIQDGPLHHAIWTDLHELYQHFQGKITTLEQQLASDVVQTPYVRLLAIPGINVVSAAELAAEMGPASRYANANAITGRSGLYPSRHQSDQKDHDRGPMIRQANRRLRGVLMRVADNLACHCSYYRGQAEVDQSRGVDKRVSRVKIAKRFSRLALACVASDEPMRHTCFKQPDSILEKLRHFHHEHKTPMDRLLADLEATVDQLPYNTRGHEAAVVAKVLEQQTHRRRGSVAIGELLPAVLARLGIHTTNTTESRDRP

SEQ ID NO: 266022 - protein, 373 aa, unidentified
MNTIYIGVDFHARQQTICYLTTETGELVTTALKHEPKTAVRTFYEQFSGQVIVGLEASGYSPWFERLLEELGHQVWLGDATEIRRRARWRQKNDRRDAELILDLMLHDEFPCLHRPSLQSREVMRMLRYRQKLIKMRTMSKNSLQSLALQSGIARRGRLFTREGKAELDAAVMSAAMEWQRAHWWQLLEALNQQALEAMTWLKAASQNDVSIARLRTHPGIGLLTSLCLVHTLQPVARFRNTRKVAAYAGFDPLERSSAERKHFLGISKAGSRVLRYLLVEAANIAVRKDEELKRFYQRLAQRRGRPKAKVAAARKLLIRAYIMMRDEIDYAEFRRRAVAARLARLRQGPPIPAALIGQPASTARQEPLPRGK

SEQ ID NO: 266023 - protein, 421 aa, unidentified
MKELRARSIRMVKEGTLIATVDIGITNNTGYCTTLDGRSTKSFRFDNTKEGFEKFWYMTVASKNRFGCDEVLVGYESTGPYAEPLVHYLANKQVKIVQVNPMHTKKMKEVNDNSPLKTDDKDPRVIADIIRLGRALSIVVPEGDAAYLRRLNNARERHVGEQTALLNQLQQRVFLIFPEFKTVLKNMKGKTAQHILKRYTIPGRIGTLSKEVLGEEMRKRSMGKFGIKEAESLIGLARETVGIKEGLAGIFMDIRHILMQLEAEVRFISEIEAEMRATLERIPYSVRLLSIKGLGTVSVAGLIGEVGDFSKFSTQSEIMKLAGLDLYEISSGKRKGQRRISKRGRSLLRKILFYAAIQMIRKNGIMYDYYARLTGRGMERMRALIAVSRKLLRIIHAIVRDNRDYVRQYQALERRVIKMAA

SEQ ID NO: 266024 - protein, 348 aa, unidentified
MAHFVGLDVSVKETSVCVVDDTGKVILEQKVPTEPADIITLLSSLGVSYGRIGIEAGPLSQWLVNTLTVAELPVICVETRHMKALLTAQQINKTDRNDARGIAQMMRVGLFKPVHVKTLVAQEQRMLLTSRKLLQRKLLDLESDLRGTLRNFGLKVGVVSGGRYEVRVRELIAGFPRLAAIAEPLLKVRQVMRQQLAVLHKMLLDTVRDDPVCRRLMTAPGVGAVVALTYRATVDQPQRFVHSRAVGAHVGLTPKRYQSGEIDYDGGVSKCGDALLRTMLYEAAQVLLTHGSKWSWLKAWGVRVVQRRGMRRAIVAVARRLAVVLHRMWVDGSEFRWSKDSAAVPTAA

SEQ ID NO: 266025 - protein, 344 aa, unidentified
MQDINRVAIDLAKNVFQVCALNIHNKVLFNKKLSRKKFIEFMVQLPISTIYMEACYSAHYWGRTLKEMGHTPFLIPAQHVTPFVRGNKNDNNDALAIAEAANRPGIRFVPIKTVQQQEIMAMHRLRTRLVKSRTQVSNQARGLLSDFGIIFPLGTKAFIGAIISLQDDERLSPAFRQLMLDMRIEFGEISNRINLIEEQLKAYIQETNHCAIVSSVPGIGIINASAIVASIDKGQAFKNPREFAVWLGLTPRQYASGDKSRLGGITKRGDRYLRTQLIHAARAAKKWSRKRDDQLSLWIRQLEARVGTHKATVAIAHKLARIIWVLLQKQQPFTQQYTQEKVAM

SEQ ID NO: 266026 - protein, 343 aa, unidentified
MQTVTTIGFDIAKSVFQVHGVDAVGQVVIRRQLKRRHVLGFFEKLPPCLVGIEACASSHHWSRELQALGHTVRLMPPAYVKPYVKRQKNDMADAEAICEAVTRANMRFVPTKTPEQQSCLMLHRTRHLFIRQQTALINSIRAHLAEFGIVAPVGRRGVTELLHIVADPKDKRVPEVARACLAALGAQLLSLKEQILEFDRMILAWHRSNQTSKRLHYIPGVGPMLATALVASVADPSTFRSGRNFSAWIGLVPKQHSSGGKERLGSISKQGDRYLRSLFVAGALAVIRYAKIHGTGHRPWLTALLGRRPTKVAAIALANKIARMAWAMMAKGERYRNPVALAR

SEQ ID NO: 266027 - protein, 378 aa, unidentified
MIATTRPEMSVSEPTLSVAFEVGKKEWQLAMTSGFGVDPWVRTVVSGDLPAVAGALRQGRMRFALPAQARVVSGYEAGRDGFWIHRALTQLGLDNRVVDSASIEVNRRARRAKTDRLDALNLVRMLVRVCAGERKVWSEVRVPTVAVEAARHVSRERTALRQEQTRLSNQLRGWLATWGCRLPRYRKPGWWTAVRDWAGAPLPLEVQTRLARAEARWAVLERQLTELEAQQQAAVTAAAPASALRQLVQLKGVATTSASVLLDEGLVWRGFRNRRQIGGLLGFAPTPFDSGESEREQGISRAGNGHLQSISIQLAWNWVRWQPLSALTQWYRARFGTGKRARRRGIVAVARKLLIALWRYVTTGVVPAGATLKVAAIA

SEQ ID NO: 266028 - protein, 351 aa, unidentified
MSKSLFCGCDVASDNNTIWLMLDDGSQPVKLFSVDNNQPGAEILVERVYSIAKEHCVSDILIGTEATSMYDWHLLEYLAESKLALEFNFKLYRFNAKWIKNFKKSLTPRGKTDPIDSFAIAERLRMGRLPKEYVPDIKYQPLRKLTRFRFHLMQQIAREKDFFLANLFLKASAYSQIKPFGSTFSATSLSIINDFFSVDELAAMPIEELTEFILEKGKAHFSKPDEIVDNLKRVARESYRLKPELAPTVNLILASTFNNIRCYKEQVKLVDSAITENLKAFKHTLESISGIGPVYAAGILAEIGDVHRFQDDSALAQFTGLTWPKHQSGKFQAEETRMSHTGNQYLRYYFV

SEQ ID NO: 266029 - protein, 419 aa, unidentified
MTRKDDSKVIRIVHPICCGLDVHKESVSACVIFPDDRGEEQYEIKVFGTFTDDLTRLREWLLEHACPVVAMESTGIYWRPVHNVLEEAVQVVLVNARDMRNVSGRKTDIGDSRWIAGLLRHGLLKSSFIPPQTVRQWRDLTRLRKKYVQSAGDYRKRTHKLFESANIKIDSVVSDLFGVTGRNLMQLLVADRKLALADIQSCVRGKLKGKETELFRSIQGFFTDHHRFVLKTILETINMLEAQIGTLDHEIRRAMKGHEALLDRMKAAPGISDISSCDILAEIGPTLDSFPTDTALVSWSGLCPGNNESAGKRKSGKSPVRKHHLKTIMLEVAWAAVKKKGSYFKDKYYRLKARRGAKKAIVAIAHRILLGIYHVIKDGVVFRDLGEDYLPRRNKSQKVFHLRKQAQMLGFDLVPQAAQ

SEQ ID NO: 266030 - protein, 359 aa, unidentified
MFSERTSVGLDVHARSVAAAAIDGETGELVQARLTPSHDHIRSWIGELTGPVAVTYEAGPTGFGLYRSLTQAGIRCVVAAPSKLQRPAGDRVKTDAKDAVHLARLLRLGEVTAVAVPTVAQEAARDVVRAREDCRGDLMRARHRLSKLLLRQGIVYSGGQAWTGVHDRWLRQQRFDNPATTTAFESDYDAVLTVAARRDRLDTAIVELAAASEFTAVVRRLACLRGVSTLTSFALVVEIGDWHRFTGNTIGSFLGLVPSEHSSGASRVQGSITKTGNTHARRLLVEAAWHHRLAYRPGKTMRDRWELAPPAARARGDAGNRRLHARWISFNLRRKRAVIANVAIARELAGWCWSLAIMD

SEQ ID NO: 266031 - protein, 338 aa, unidentified
MNYVGIDHHRQYSHMTLMDQEGQVLRSGRVPNLRAEIEKFFEGFESIEAVIETGRSSYTMVDVLEEMGVAVKIAHPNEVKAIARAKIKTDKRDSEVLAHLLRMNMIPEVYRRSTENRQAQRVLRQRAFYVSAMTALKNRVHAFLAQQREEVREVVARETNIFSEKGQKMLLGLDLAPREKKLLEALLKTYRHLETRIGESKAFVEKLYEESREAQFIRTIPGFGKYLSVLVAVEIADLTRFTDAAHLHAYAGVIPSIHSSGDRTHYGKIIKAGNRWLRWAAVEAVWPGIRADFDLRCFYERLARGKGANKAKVATARRLLTIIYKVLKEGRNYIAYRR

SEQ ID NO: 266032 - protein, 408 aa, unidentified
MNCVGIDVSKGKSMIAVMRPFGEVVVSPFEVRHTANELSELAGLLKSLDGETRVVMESTGNYHAPVAWLLHDAGLYVSVVNAMLVHDYGNNSLRRAKTDKKDAVKLANYGLDHWLTLPRYIPEEDTRLMLKICYRQYQQYSKVQTMLKNNLISLLDTTFPDANRLFTSPPRADGSEKWVDFVATFWHCECVCGRSEKAFTTQYQKWCRKHGYNFSEDKALDIYASACRHFGVIPKTDTAKLLVEQAISQLQTTSSALAALKQEMQSLAASLPEYPVVMGMFGVGPTLGPQLLAEIGDVRRFHSKKALVAFAGIDAPPYQSGQIDVRSRSISKRGSASLRRTLFLVMSVILQCAPIDEPVYQFLDKKRAEGKPYFVYMTAAQNKFLRIYYARVKECLETFDAHQKNTQG

SEQ ID NO: 266033 - protein, 392 aa, unidentified
MRLFVGDDWAQDHHDVELMDAAGRVLARRRLPEGVAGMARLHELIGQQLDADAEDAEVVIGIETDRGPWVAALVAAGYTVYAVNPLQASRYRERHGVSGAKSDRGDAHMLADMVRTDSHQLRAVAGDSPDAGAVKVVARTHKTLIWERTRQVQRLRYQLREYFPAAVEAFADLDAPDALELLGKAPDPARARRLTRAQVSAALKRALRSDQLGQPEAVTAAYAVTARSLIAVITVLNEQVKTLESQVDADFGRHPDAEIYLSQPGLGPILGARVLGEFGDDPHRYSSGKARKNYAATSPLTRASGKKKVVVARFIRNDRLTDALMAQAFTALSVSPGARALYDAERARGTEHNPALRKVANRLVGILHGCLKTRTLYNEATAWSHHEINLAA

SEQ ID NO: 266034 - protein, 409 aa, unidentified
MYYVGIDIAKNFHIVTIIDDSEKKITTKPIRVTNCIDGFSKFIVKLEAISSNPNDFIIGFEATGIYGENLWEFLNSHGFNVKLLNPFQTTRYREQHTMKKVKNDNIDSWIIALFLKDGKFSSGYVTDDEYQSLRTLYRNRASIQSDMKEVKKRILTQVTVTFPELENFIDIFSITGLALLDKYPTAHHYKHSSVDRILKIFRHIQGNSFNNQKAIEVLELAKNSIYSGKAKDARAIAIKSSIRLLKIYQEELSILEEEILALLEKNGIKEEKDVPTNSLIENLKTIPGVSSKTIAAVISECGDLSRFKTPIKFIGYLGLFPTENSSGNSKSTGHLSKRGSSLAKHALYMASVSCLLHNKELKQYYDTKKSQGKSKQEGIIAVARKLATIIYSIFRYNTPYDPSRVFSKS

SEQ ID NO: 266035 - protein, 355 aa, unidentified
MTSTKYIGLDVHKESISIAVLNSAGKVVMECVIETKASTILQFIHGLGGDVHLTFEEGTWAGWLYDLLKPHVTELVVCNPRKNALLKEGSKSDRIDARKLAELLYMSKLSSVYHGEHGLRMLKELSRSYLTITKDLGRVMNRLKALYRGWAIPCAGTQVYAPHYRSEWLAKIHEAGVRRRAELYYQQLDALRLVRQQARKELLAEARKHRATKLLRQIPGIGPLRAAHLVAVMQTPHRFRTKRQLWNYSGLGLETHDSAQYRVVEGQLQRSKKPVTLRGLNDNHNHDLKDIFKGAAMRASTAAGPLHDFYEALLAKGRKPTMARLTLARKIAAITLIVWKKEVRFDANYLKQQAA

SEQ ID NO: 266036 - protein, 316 aa, unidentified
MSKRKNNVGIDVSKQLLEVAVHESDFHYCCPNHSRAFPELLAELIALQPARIVLEATAGLEKPVVAALHAAHLPVVVINPRQGRAFAKAIGQLAKTDRLDAAVLAHFGAALKPPLRPLKSKEEQELEALMGRRGQLVDMLVAEKNRRHSTTDEAVRKTIKEHIDWLEDRIAELDEQLQARLLSSAVWQNKDAILQSVPGIGPVVSLSLLAELPELGTLNRQRISKLVGVAPLNCDSGQQRGVRHIFGGRARVRSMLYMAALTALRFNPVIKEFYQRLVGKGKPHKVALTACMRKLLAILNLMVRNQTTWQTDLVLA

SEQ ID NO: 266037 - protein, 366 aa, unidentified
MRKVTQIISKRKRKRTEKQIQLLEDEKLHVGIDAHKNSYYLAIWSVDRNILISTWRQPANMALLCRKLEPYRQNIVHIVYEASFCGYTLVRTLQEAGFDTDVISPSRMPRENSKRPKTDRIDCKKLAMFDAKGMLHTVYVPTLQEDADRQVVRLREMVKKKLARVKQQIKCFLMYNGIPEPEGVKRFAKKGVQALHDLELSKELRFCLDELLDEYHYLTQRLKPVVKKVNEIAATERHKEAITRWRTIPSVSVLTAMTFRTEMMDLDRFDKGREIGMMLGLAPQIQSSGESRREGPITKTGNQRLRTMLVVTAWKWIMFDLSAEETFLRIYNNTRSKKKAIVAMARKLGIIMWRMYVRKENYRQAA

SEQ ID NO: 266038 - protein, 394 aa, unidentified
MRFAGVDIASETHVIAVLADDGAVVVRPTPFAEDAAGYDKLFGLLGEPADVLVAMEATGHYWKNLFAALVARGFAVALINPLRTRRFAQEELQRTKTDAVDALGIARFAAEKRPAVARLPDAATEELRELVRLRERLLQDFGDRVRQLHRLVDLGFPEFTRHVRSLDSELASAILHDYPTAAAFRSVSVKRLAALRYDGRHQVGMDLARTLIDVARHSVGQHHSAAYRVQVRYACEDLDLLRRRLRELDRDIDGKLNEHEIGPLLITIDGIGPTTAARLIAELGNPADFSSVGTLAAYIGVIPGLRQSGKRKFIRAGLTSLGNARLRAALWMPTLTAVRKNAWLRAYYQRLRARGKLPKVALVACMHKLLFAIYSVAKHRRAFIPKPVAGDFTQ

SEQ ID NO: 266039 - protein, 343 aa, unidentified
MQTITTIGLDIAKSVFQVHGVDAGGQVIVRRQLKRRYVLTFFQKLSPCLVGIEACASAHHWSRELQALGHTVRLMPPAYVKPYVKRQKNDATDAEAICEAVTRANMRFVPIKTCEQQSGLVLHRARHLFIRQQTSVINAIRAHLAEFGIVAPVGRHGVEELLNVVADPNDKRVPEIARACLSAFGAQLRMIKEQILEFDRLIRAWHRSNEMSMWLDEAPGVGPVLATALVAAVADPKSFRSGRNFSAWIGLVPKQHSSGGKNRLGNISKQGDRYLRGLFVAGALAVIRYAKIHGTKHRPWLTALLARRPTKVAAIALANKIARMVWAMMARGERYKEPFALAR

SEQ ID NO: 266040 - protein, 359 aa, unidentified
MAKFIKMISTVMSAIGLDLADVWSDWAGLDESGTVVRRERVKTTESELRRVFGEIAPTTIAIEVGTHSAWISRVLSSLGHTVVVANARRVALIHRNKRKNNRIDAEFLARLVRADKELLFPIQHREERGQADLAVLRSRDVTVRSRTKLINHVRGTCKTFGVKLPRCSAEAFVVRCSGLVPVALHSAVNDVLALIADMTAKIKSYDSTIAAMIKRHPAAQLVGKITGVGPLTSLAYVLTIEDPHRIVRSRSAGAYFGLVPGSDDSGEKHEQRRITKEGDQFWRRLLVNAAQYILGPFGAKVDSDLRRHGEAIASRGGKNAKKRAVIAVARKLAVVMHHLWVHNEDYVPLFNAAQKPVAA

SEQ ID NO: 266041 - protein, 416 aa, unidentified
MTFKVVRFICGGMDVHKNLIVATIGTTDRQTLITEYIQQSFSTFYSDLIRLKEWFISHDCYDVCMESTGKYWIPIYNVLETELNICLTHPKYVKAIKGKKTDKRDSKWICDLYKCDLVKHSFIPKKEIREMREIARYRCKLVYMRSSERNRYQNCLTVSNISLASAVSDPFGKTATNIMKELMQSEVIEDDKILKLIHKNCKDKDKILDSLQGYHIESDQRFKMDTVMNHIEYLDKQIQACEAELIKRAYPLRDYFQHITHIKGISALSAILIVSEIGTDMNQFESDKQLVNWAGLSPANNESANKKKSVRISKAGQYLKPLLVQCALSSIKDKNSYFGIKYCRIKKRRGHKKAIIAIARMMLVCIYHMILTGEEFNPCDYESLTNPKPKKERIMTVESALQFLKDSNFDFSSIQL

SEQ ID NO: 266042 - protein, 311 aa, unidentified
MTLSTIGIDISKETLDVHRMSDGASRRFSNDKAGHKALIVWIGGDAARVVFEPTGPYHRAFEHALAKAGLPLVKVNPRQARRFAEATGKLAKTDRLDAALLARMGALLAIEPRPARSKALAELKELHIAREALVKDRTAAKNRAKIRTLALLKRQNAQRLDQIERQIAAIDAAILAFIEANAELAKRFAILTSIPGVSQITAFALLIEMPELGTLEARQAASLAGLAPVARQSGRWTGRAFIRGGRASVRQALYMPALIAARFNPELKAKYTQLVKAGKPAKLALTALMRKLIVLANALLRARRTWTPKLA

SEQ ID NO: 266043 - protein, 410 aa, unidentified
MTMKVLYSQCAGLDVHKDEIVACMRITTGSKAMHEVRRFSTMTSGLLELSEWLSTGKCTHVAMEATGVYWKPVWHVLEPGFELVLANAGHIRNVPGRKSDVNDATWIADLLAHGLIRSSFVPPQTIQELRDLTRTRKQLRREIVQHTQRIQRVLEDGNVKLSSVISDILGTSGRRIIRAIVEGESDPGKLADMGHSRLRCTRQELLESLRGRVNSHHRFLLGQHLRMIEELERIVGEFDAQIERALLPFRDEIDRLTTIPGISRLAAEVIVAEIGLNMEQFPTVGHLLSWAGMCPRMDESAGKHRSNRVRKGDVWLKQILVQCAWGAAHSKNTYLNAQFLRLKSRRGPKKAAMAVGGSILTATYYMLKNGTSYNDLGPDYFTRRNEAFVALRLTQRLKELGYKVEIHKVA

SEQ ID NO: 266044 - protein, 348 aa, unidentified
MKELSAQVRVVAIDLSKHVFHVAGEDARGTVIYEDSCKTRESFAAFLKTLRSDQSVLMETGPGAQAWARELLSRQIDAKVLPAQLVGQHRSGAKNDRNDALAILRAGRDTTIHAVPIKSAERLALQALHRVRSRYVRNRTAVSNEIRGLLLEHGVALAKGESALEVGLTRILEGTRVPLPRRLRELLAELSAEWEQLGRRIERLTAELTASAHADPVARRLMTVPGIGPISAAAMVCKDPQPERYASARHFAASFGLVPDQHSTGGKTRLGGLSKRGDPYIRSLFIQGAQAVLRQVKQPAESAAENRLQRWLRHHGRKGAAVRLANRHLRIVWRLLRDGTDYHTEVHA

SEQ ID NO: 266045 - protein, 343 aa, unidentified
MEHYAGIDVSLERSSVCVVDATGKIVREAKIASEPDALVRFFRELGLPLARVGLEAGPLSQWLHAGLTGAGFEAVLLETRHVKAALSAMIVKTDRKDARGIAQLLRMGWYRPVHRKSPPAQEVRALLVGRKLLQGKLVDVELGIRGILRGFGLKLGDVSKGRFAARVRELVAGQPMLEQVAEPMLEAREALRREFHALHRAVLAIVREDAVCRRLMTVPGVGALVAVTFASAVDDPARFRRSRSVGAHFGLTPKRYQSGETDVSGGISKAGDAMVRAALYEAANVMLTRAGKFSAVKRWGLEVAKRRGMRRAKVAVARKLSTVLHRLWVDGSEFRFGKEVAAA

SEQ ID NO: 266046 - protein, 312 aa, unidentified
MIMPQNVIGVDVAKDWIDAYWPASNTAVRIETTPASLKRFARNAAGALIVFEASGGYERPLVDALEARSAAYVRVNPRQAREFARATGRLAKTDKVDARVLAEMGAALDLQLTSQPSPEQRRLADLVARREDIVTMIGQEKNRLQQATDAFIRRDLKSLVLVLEGRKGRLDDEIADHIERHAELRRLNARLRSVPGIGPAIAPALIAGLPELGTLDRRKIAALAGLAPHASDSGQRTGKRRIWGGRANVRRALYLAAFIASRCNPELKTYRKRLEENGKCAKAAIIATARKLLTHINAIIKDDRDYQVRASA

SEQ ID NO: 266047 - protein, 398 aa, unidentified
MRFAGIDIGGERHAVAVVNEDGALLVKSTFFGEDAAGYQRVRDLLGDPHDCLVAMEATGHYWRNLFAFLVGQGFKVALLNPLRTRRFAEEELERTKTDSVDALGIARFAAQKRPVPTPVADEVTAELRELVRLRTRYVDEHSDRVRQLHRAVDLGFPEFTCHVRMNTVLATAILARYPTARSYSGVSVRKLARLAYDGRHQVGEILARALIETAKISVGSHHSEAYGLQVKYTCSDMELLRNRVKQLDQEIEGKLQTHEVGKLLTTIDGIGSRTAACLIAELGDPSRFRDAAALASYVGVVPRLRQSGKRAFSGARGLPLGNARLRHRLWMPTLVAVRKNPWLRAHYDRLLAAGKRPKVAIVACMRKLLGAIYSVARNRRPFVPRLATAGHEQPMTAG

SEQ ID NO: 266048 - protein, 466 aa, unidentified
MARSKPKASRPAPPAPAFPPQLAAANLHAAGIDVGAEAHFVAVPPSDDPQPVRGFGAFTADLEAIAAWLVACAITTVALESTGVYWLPLFELLEARGFEVLLVDPQQVQKIKGRPKSDVHDCQWIQRLHTFGLLASAFRPADQVCVLRSYLRQRAMLLTYAAHHIQHMQKALTQMNIKLQHVVSDITGVTGLAIIRAILVGERDPAKLAQLRDYRCKHDEATIARALQGTWRDEHVFALAQAVALYDVYHQKITECDRHIEAYLQTFADRREGQPLPPAPRPRKRGRNQPGFAVREPLHRITGVDLTQIEGLDETTSLVILSEIGLDMHRWPTVKHFTSWLGLCPHHRVSGGKVLSRRTKPCANRAATALRLAAACLHHSQSALGAFFRRMKARLGAPKAITATAHKLARLVYSMLKHGMAYVRQGMDEYEQQYRDRTVKNLTRRAKTLGYTLVQTPEGTLKGALV

SEQ ID NO: 266049 - protein, 400 aa, unidentified
MRFFVGIDWASRAHAVCIVDQPGRVRWQGSVPHTTEGLTELVGRLRRFRGRLRVALERPSGLLVDTLVAAGVELVPIHPNALKATRPRYSAAGSKSDPGDAFILADLLRTDGHRFPALRPPSDDTRALRALVRGRDDLVRQRLALANQLRALLERFWPGAAAIFADVDSPIALAFLARYPTPLSAARLGEKRLAQFLGQHAYCGRRPVGELLARLRTAPASQVGEAEAEASGDLVRALVAVLTPLVGQVQHLSAAVTAALAQHPDGPLVQSLPRSGAVNAAQILAELGDDRARFPSDEHFAAEGGLAPVTHASGQHHAVVFRWACNKRLRRALTTFADNSRHASRWAALVYQRARGRGCRHQHAIRILARAWARILWRCWQDRAPYDVTRHRAAQALAAA

SEQ ID NO: 266050 - protein, 368 aa, unidentified
MDERITAYVGLDAHAESTAIGVAQADRTAPRFVGTVGAKFGELARALSRLGKPEALQIVYEAGPCGFTLARQLRQAGYHCEVVAPSRIPRRAADRVKTDRRDALLLAGLARAAQLTYVIVPDERDEAMRDLSRARIDAVRARLKARQQLKALLLRHDRRYSGKSSWTAAHERYLSTMSFAHRAQEIAFAEYRRAVGEGQARVDLLTQELAGELEHWRMCPLVRALMTLRGVDSVSAITLVAEIGELKRFAHPRELMGYLGLVPSEHSSGKTRSLGAITKSGNTHARRILIEAAWNYRFPARISAPLQRRQEGQATQIRDIAWRAQVRLSHRYRRLSARGLQYNKICVAIARELAGFIWSIGQHVSISS

SEQ ID NO: 266051 - protein, 344 aa, unidentified
MPTYAALDVSMKTTSIHVVNEAGACLWRGKVSTDPKLIAEALSVHAPELARIGLETGCWSTWLYHGLVDLGLPVVCMDARQAKAALSMKINKTDANDAEGLAQLLRTGFFREVRVKGWDAMRVRTLVRARSGLLRAQLDLANQLRGGLRIFGLMLGTGAAGRFESQVSKHLAERPDLNLILFPLLVAWRAIRQQVSELDRVIRAIVRRDQRCRLLMTAPGVGCMTAISYVATVESPDEFTSGRAVSAWIGLTPTRYQSGNIDVPGRISRRGDKLLRSYLYEAACHLLTRSRSDSVLKQWGTDLRARVGFKRAVVATARKLAIILHAMWSKNAPFDPGMTPAEAA

SEQ ID NO: 266052 - protein, 328 aa, unidentified
MSKVFVGIDVSARELAVARQDEPRLRRFANDRQGHKALIKHLAKKGRTARVCLEATGVYSLDVAVALSKAKGIEVMMANPRAIKDFAGAIMRRSKDDQIDAVILAEYAARMPFVSYVPHSAQALKLRAISRRIAALTSEMVAEKNRLHAASATEIWGTAVDIKVHIRFLKKRIEVLRTRALNQIRADEELSWKYDCLVSVKGIAKASAIQILGELVGLPEDMDKRQWTAHAGLDPKHYTSGSSVNKKSRISKRGNCYIRRALYMPAVVAARREPSIKEYYLHLLDAGKKPLQALVAVMRKLLCAIWGMFSTRQPFDGSRFYQAAAIAA

SEQ ID NO: 266053 - protein, 379 aa, unidentified
MEAQVKKIDFTGQNIYVGFDAHLKSWKVTIMAEDCVYKTFTQPPVPEVLNNYLKNNFPGGTYHTAYEAGFCGYWIHNKLLSFGIKSIVVNPADIPTTDKERVQKEDKRDSRKIARSLSSGTLMPIYVPSIQTQRDRSLLRTRTMLVRDLARYKNRIKSFLYFYGISIAPLFSDPQSHWSNRFMIWLESLEIDNGSGKEALMVLITECKNLRISILSMNKQIRQLSNTDRYKDKVKLLKSVPGIGLLTAMIILTELEEIERFSTIDKLCGYIGLVPSTKSSGDKERTGDITPRGHNVLRTAIIESSWTAIRNDPSLMHSYLTFTRRMESNKAIIKIAKKLISRIRYVLLNKKTYVCLVENENYKNIKMSETVTKSLQSIN

SEQ ID NO: 266054 - protein, 340 aa, unidentified
MRQLYVASDLHSNNNLVGIIDGEGKRIFKKKLPNDPLLISDVLKPFKEEIIGIAVESTFNWYWLVDALMEEGYKVHLANPAAIQQYSGLKHADDQHDAFWLAEMLRLGILPEGYIYPREERPLRDLLRKRGHLVRLRTSLIISLGNIISRNFGSKLDVNQVKGLRKDRVSPLFEGNEDLALAGKVSKETIDFLTHQIRQIEGVVEDRITLKEPYRYLLTIHGVGKILGLTIMLETGPIGRFETVGDYVSYCRKVPSQWTSHGKRKGSGNKKNGNKYLAWAYAEASDFARRYHPEPRAYYNRKMQKSNPAVAHSALSHKLARAAYYIMRDQVAFRPEILFG

SEQ ID NO: 266055 - protein, 440 aa, unidentified
MSRVIVGVDPHKKSVTIEAVDERGKKVATGRFGTDSTGYRLMLRYVRDQWPQRLWAVEGANGVGRPLAQRLLAQGETVLDVPAKLAARVRVFDTGNARKTDATDAHAVAMVALRTPRLNQLTFDEELIALRLLTDRRDELSHLRVQTVNRLHRLLAELIPGGAKRDLSALQAKRLIASVRPRTLVGKTMRRMAVEEIGDLVAVDAKLKAIKKELRAAVRARGSHLMDLYGIGPAGAARILSDVGDVARFPDRNHFASWTGTAPLDASSGDQIRHRLSRAGNRRLNHVLHIAAIVQIRHDTEGRAYYRRKLTESKTPMEALRCLKRRLSDAVYRQLVADAVPTAAAVIEREAGPGGHSGATPQSGAADLSTPVIGSSDKPQPGPAHPTLPAQRSRSNPHAASAASPSRRRAGAVKVERPTGRTTLTATSVGAHSEATSPRP

SEQ ID NO: 266056 - protein, 366 aa, unidentified
MKKLTTKGICRTGKLQDQQLTIGLDLGDRSSFYCVLNGAGEVIAEQKVSTTPDAMKKTFGKMARSRIALETGTHSPWVSRLLADLGHEVIVAHARNVRLIGESRRKDDRLDAQALARLARVDPQLLSPIQHRSAQAQADLSVIRARHALVRARTALVCAARGLTKSFGERIRGYSAKGFRQATGEALSPQLQVALAPLLSALETINERIREYNVQIEKLAEESYPEVALLKQIKGVGTLIALTYILTLEDPKRFRKSRDAGCYIGLQPGRRNSGQSEPQLHITREGDSYLRMVLVQGAHHILGPFGEDCDLRRWGLKLAERGGKNAKKRAIIAVARKLAVLLHHLWSSGEEYQPLHNTQKRTLAAA

SEQ ID NO: 266057 - protein, 355 aa, unidentified
MTSTKYIGMDVHKESISIAVMSSGGKIVMECVIETKASTILQFIDGLRGDLRVTFEEGTWAAWLYDLLKPHATEVVVCNPRKNALLKDGSKSDRIDARKLAEQLYMNKIKSVYHGEHGLRTLKELARSYLTITKDVTRVMNRLKALYRSWGIPCAGSEVYAPRHRSEWLGKITEAGVRRRAEHSYQQLDVLRLMRQEVRRDLLVESQKHKAWKLLRQIPGIGPIRAALLVALIQTPHRFRTKRQLWTYSGLGLETHDSAQYRVVEGQLQRSKKSVTLRGLNKDHNHDLKDIFKGAATRVSSSSGPLRDFYEHLLAKGRKPTMARLTLARKIAAITLIVWKKEVRFDANYLKLQTA

SEQ ID NO: 266058 - protein, 343 aa, unidentified
MARFVGLDVSQKLTSICVVDDAGRRLWRGQCHSEPEPIERAVRRHAGEDASIGIETGPMTPWLVHELRGRGLNVVCLDARHASAALKMQMNKTDQNDAEGLAQIMRTGWYRSVHVKSLDAHRTRALLGARAQLVGMTTRLSNHIRGVLKTFGMLPGAMRGAPFDRRVEALLADRDEVAAVVRPMLTAWRQLREQIAVFDKAVRTLAKNDPTCRLLMSVPGIGVVTVLAYVSTVEDPARFARSRSVGAHIGLTPRQYQSGEVDRSGRISRCGDTLARTLMYEAAVVILSRVKKASAMKDWAQAIARRSGIGKARVALARKLCTILHSIWRSGQPFRWSAELATA

SEQ ID NO: 266059 - protein, 399 aa, unidentified
MNERIFIMYIIGIDIGKNHHEASIVSPEGKQIGHSLRFATTHKGADSLMNFIFKNIGNSPCVFGMEATGHYWYPIYSFLKARGYTIYVINPIQSDSLRKMYIRQTKNDSIDSFLIAEVIRFGQFTTTSMADENILAMRQLCRYRDSVISSRTEIKLRISTIIEQIFPEYEKQFSSLWLSTSMGILEKYLTPENIENAPIDELFEIIKDKSHNRLTKAKAISIKEAAADTFGIKIAQDTFSFQLKQLIDRMNFLDKQIEALDIEIMKYYEQFDCYLHTIPGIGIIGAATILAEIGDISRFKNSSALVAFAGIDPTIRQSGEFNSTHNHMSKRGSPYLRHAIFLAATTCSFHNSPLNAYYKKKRDQGKHHLTATGAVARNLTTVIYAVLRDSKPYEPKKFC

SEQ ID NO: 266060 - protein, 452 aa, unidentified
MKKAKKIAKLPIINPNAAGIDIGATQIFVAVPPDRDAESVRCFATFTADLEKLADWLAACKIQTAAMESTGVYWIPLFQILEKRKIEPVLVNAQPLKNVPGRKKTDVEDCQWIQHLHAVGLLRGSFRPADEICTIRSLWRHRENLIQLASIHVQHMQKALDQMNIQLHHVISDLTGTTGLAIVDAILSGERDPAKLAQLRNPHIRASQQTVRESLVGDYREEHLFVLRQSLESYRHFQRLIHEVDLEVKQMVKELPSKVGVQDPPLPKAKNPRKTPWRNEPPELREDLYQAFGVDLTQVPGLNTLTTQILLTEIGPDFSRFPTSGDFCSWLRICPDPKITGGKVISSKTRPSKNRAALALRMAAQGLHRSQSFLGNYFRRMKARLGTPKAITAAAHKLARIVYHMVTSRQEFDATIFEALERRSRDHKHLRLCAQARELGFDLVKINPEAAN

SEQ ID NO: 266061 - protein, 476 aa, unidentified
MTSRSVGLDIHKHEATAKILDPQGREVLSRRFELTRLSLHAFARTTLRPTDRVALEATTNCWAVAEILRPYVAEVIVSNPMATKAIASAKIKTDKVDAHVLAQLLRCDFLPQVWPPDPQTQQLRQLTGRRATLVQQRTALQNRIHSVLAMRLIPVPVERLFSLAGQRWLQSLLQSDALEEVERPANALDAVERPANALDAVERPANALDAVERSASALDDEGKLLIESDLTLLAGVQQQIDRFERVLAERGWSDDRVKLLMTLPGVDVATAETVLAALGDINRFATPEKAAAYLGLVPSTRQSAQKCYHGPITKRGNVQARWMLIQAAQSIARHPGPLGAFFRRLKQKKNHNVAVVAVARKLVMIAWFMLTKNEPYRYALPRSTETKLSRLRVTATGEKRRTGPRKGERCVAKLPGGSRTVKSLDQVYAVEDLPARQPLTIGEHRTVRATGTAEFVQGLDREHVIPRRHVVTVETE

SEQ ID NO: 266062 - protein, 366 aa, unidentified
MSSFTHNIDAVFIGLDVHKDSISVGVLNPSHDRADVEKIFNDPESMRRLIGRFDDPGRLRVCYEAGPTGFDLARDLRRMGVACEVIAPSMIPKAPGDKVKTDTRDCRRLARLHRAGELVAVRVPAPIEEAVRDLCRTRGDMVEDLSRARHRLSKFLLRHSRIWRGGSAWTFKHEAWLAAQAFEEAALQTTFDHYRAVVLSRDAQLAAVEADLKLWVARAPFAEPVRRLAAYRGVTALGALGLQAEVCDWRRFGRAAQMMGFVGLVPTEYSSGASTRRGHITKAGNVHLRTQLVESAWAYQYRPFVGSQIAQRQQGLPPEVIARSWAAQLRLCGRFRHLAARKNNKSIVAAAVARELAGFLWAEMTA

SEQ ID NO: 266063 - protein, 426 aa, unidentified
MFAESGDDEQIIERVAALDIGKAEIVCCIRLPAPEGKNRRVQEVSTHSTMVISLSELANRLVTLGVQRVVMEATSDYWRPVFYLFQAHGLDPWLVNAKDVKHLPGRPKTDVLDAVWLCKVAERQMLRPSFVPPADIRRLRDLTRYRIDLVGARTAEKNRVEKLLEDACIKLSVVASDIHGVSGRDMLNAIIAGERDPEVLAELARSRMRAKISQLREAFAGLTIGTFTDHHAFLLAKMLTRIDAVDADIAELDTQIEAYLAPFADTVERLSEIPGIGHDVAAVIIAEIGIDMSHFPTPGHLASWAKMAPGIKTSAGRNKGNGTTGHGNRYLARALGNSAIGAARTNTFLGARYRRIARRRGKKKALVAVGRSQLVIIWHILDNPKTRFKDLGPGHYDQQRSTAANRRSHIHALEALGYKVTLQQAA

SEQ ID NO: 266064 - protein, 411 aa, unidentified
MRMAGIDVHKKVLMVVVIETTRPEEKPERQRFTTLRGDLSRLSSWLRAQDVQEAVMESTAQYWRSVWLELEPHMLLHLAHAFSNRAPRGRKHDFRDAERLVRRLFADELILSFVPDGEQRIWRNLTRMKMQLTRDRVRLQSQMECLLEEMRIKLSSVVSDLLGASGLRILRALAAGETEAKRLAALGDDRLKCTEEQLLDALTGSSQPMHREMLALQLERLQLIDTQIDKLNHLIAQAMKPHQEAVMRLAEVPGLGVDSAQQIIAEVGAQAGTFSSAAELTSWVGTCPGKDESAEQNHSSRSAKGNKYLRRVLSQAAHAAVKKRGSYFQALFRRLLPRLGYQSAIWAIAHRLCRVVWKILHEGVRFIEKGREPDAQAKKKRARILVQALRRLGYDVAITATHLGTQNATQA

SEQ ID NO: 266065 - protein, 424 aa, unidentified
MRYQEPPFDIVIGLDRSDRKVDLHRIDLSTGLEETQSLRSEPETLQDWVTDLRERFPHRQVAVVFEQPANNIMAFLSVYDWITLYPINPISLQKFREAFVVSRANDDAKDAFYLAHLLAHHWVEFRAWQPEDRQTRLLQRLVTDRRAVVDHRTGLGNRLQSLLKDYFPQALHLIGEEVWRPLATSFLKRWPTLQVLRRAKPQTIRKFYYGQSSRSESLIKNRLDIIEHAVPLTDDESILASYVLQVQLTVAEIELATRTVKAYDRQIALAFASHPDRAIFANLPGAGPTMAPRLLATLGTRRERYPSAFNLQCASGIAPVTKSSGKKHQVHRRYRCSNFFRQSFHEWAGQTRFHSLWSAAYYQMKRAGGMGHHAAIRALAYKWIRVVWRCWHDRTIYQEEHYLAALRKAGSPIITWIENHPQTP

SEQ ID NO: 266066 - protein, 345 aa, unidentified
MNKLKVPSTDLAFCGIDVSAATVSVALIQPDRNLVQREFSNTASGHRSLLAWLSQGGALVRVSLEATGVYSLDLALALDAAGHCEVAVLNPKLVNRFAQTLSRTKTDAADAVVLAEYSLRMPFTPWSRPSVDQLRLRALGRYIESLTSELTGVKNQLHAAEISSVTPRVILLDLKRAQTALERRLARIRQEARKLVAANQLLERRFELLTSIPGIAGTSALAILCELVLLPPEMTVRQWVAMSGLDPSHRESGTSVHKPARISRAGNRHLRRALYMPALSAARYDPHLRAFYRALRQRHKTGMQALMAVARKMLHAIYGIFKNGKPYDGQQLFPQLEPEVESIAG

SEQ ID NO: 266067 - protein, 349 aa, unidentified
MLIIGCDYHPSVQQIAWVDTESGECGEQRLAHSGGEAERYYRGLNGQRVRVGIEATGHARWFEGLLTELKYELWVGDPAQIRAKRVRKHKNDREDARLLLKLLVEDRFPRVWVPSAENRDVRQLLWHRHRLVQMRTRVMNQLQAIALNEGVRRRKGLWSQRGREQLESLTLANWATRRRKDLLDLLDRLNPRIEGLSEAIEQEAVQRPEVKRLMTHSGVGPLTGLAFVLIIGSPERFRGGKQIGSYLGLAPCEDSSADRQRLGHISKQGNALLRFLLVEAAQAVVRFDPEWRRHFLHLAMRRHRAIAKVAMARKLAVGLYWMWRKGWDYQQMAQFGSHVGEPVTGHGVQ

SEQ ID NO: 266068 - protein, 331 aa, unidentified
MAQIYGIDLSQEKFDVNFKDQNGILKSFIVKNTLSGIEKFLNKIEPESILCAEHTGVYGEFLIYLANLRNIKISLVSGYQIKHSLGLKRGKSDKLDAMKIREYAERFFDKLHFLDLETEDLKELRELYSFRALLVQERKMILTRERGKEFLPYNSLFVKHVTNEMLLKMDEQIDKLEKEIQAIICSNEALNKSYSLITSIVGIGQVTGCELIIKTGNFNRIPTARTAASYAGVCPFPNSSGKMVKKSRVSPLSDKSLKSLLFLCARIAVKYNKEYKLYYTKKNIDKKQYYLIMNNVANKLLRTVYAVIRSGQPYDPNYICLDPREVMKKVA

SEQ ID NO: 266069 - protein, 315 aa, unidentified
MMLIGCDFHPSWQQVSWLDVETGETGEQKLVHAGGEAKQFYEQLAAPVLIGMEATGNSQWFIELVEDLGHEIWIGDAAQIRASYVRKQKTDKRDAAHILKLLVEGRFPRLWTPDREQRDLRQLVLHRHKLVLIRSRVKNELQHLSLNKGMQRKRRLWSQAGQQLLRELPLKKWAACRREDLLGLLTMLDEQIGKLDGAVQHAAEENPQSKLLMTQPGVGPNTALAFVLTIGDVGRFPRGKQVASYLGLIPREESSGGRQKLGAITKQGNRMLRSLPCWWKRRRWRCSTIPDCASSIATRCHQNPKPWPKWPWPAN

SEQ ID NO: 266070 - protein, 312 aa, unidentified
MYYIGIDVSKKDLSVFDGKKDLKFINKEGLRSFKKYLKKKVNFSDLVIIFEPTGVYSLYLKEFCAENNIKAYIVNPKKSHNFTRALGKRSKTDKIDARILYQFHKLIEAKDIKIPRIDQQAKALASYLTSYEFALKQRVALSNHLESLRDKELIALIKKDLKRAKKLEDKIFNDILEYVSKNQNLKEDYQRLSTISGVGDKTAIALLTLFKTYQGTNRAQITALAGLDPVRRESGTSVKGKVKISKNGKGIYRKIFYLPTVCATVHNQKIRVFYQRLLAHHKIKKLAVIASMRKILLIAHAIYRDKTEYVAV

SEQ ID NO: 266071 - protein, 346 aa, unidentified
MEKSITDLSSVTTVGLDLAKHVFQVHGVDASGRVVVAKAIRRNKLLEFFASLPPCLVGLEASGSAHHWARELIKLGHDARMMPPAYVKPYVRRQKNDAADAAAICEAVTRPSMRFVGVRSLENQAALMRHKAREMLVSQRTQLLNGLRGHLTEVGVIAAQGPRHARELAELIEACDETIPFEVCEALAPLVVQLRNLDDAIARLERTIAKLAQKDETARRLMSIPGFGPITASAMAATIQDTSSFAGPREFAAFLGLTPKQNSSGGKQKLGRISKMGNRNLRKLLVVGAHAVLFHRATHTDPLRMWAKKLIEKKPFKLVAVPLANKMARIAFAIMRGKTTYREISA

SEQ ID NO: 266072 - protein, 343 aa, unidentified
MDQYIGLDVSLKETAISIRQDGKRIWRGKCASDPKLVAEMIRKHAPHARRVVFETGPLSTWFYHELTREGVPAICIEARHAQKVLNETLNKTDANDADGLAHLAEAGFYKAVRVKAFDSMLTRTLVAARNQLLSISTQLSNQIRGVMKTFGLIVAQGKGRVFDNNVRQLLDGNDGLAMIILPLLEAWRGIRMRAADLGRQLVAVARESQATKRLMTIPGIGAVTAISYVAAIEGPDNFKTSRSVGAWLGLTTRRYQSGEVDYDGHISRRGDPHLRGLLYEAATVILTRTSARNESRLKSWGLKLRERLGFKRAAVAVARKLAVIMHSMLKTGDVFNRLAGATA

SEQ ID NO: 266073 - protein, 420 aa, unidentified
MSQSSVTDQPVLYFGLDVGDRHTHVCCLDDGPKPVRRLKFPTTREGLAKVFGGAPRARIALEVGSQSPWMSRFLRGLGHDVVVADARRVAQLVRGSRKTDRRDAETLAQLLRGMPQFLGEVHHRSEAGQADMAVIRARDVLVKSRTKLVQHVRGVLKSVGLRVRACSAESFDKVARPEIPGVLKPALEPLLDLLEDLRKRIRAFDKQVVEIGRKRYPETLRLRQISGVGSLTSLAFVLTLGDALRFSKSRKVGSWLGMVPRVQASGDKDPALPISKAGSIYMRSLLTQSAHYILGPFGEDCDLRRFGLRLCERGGKAQKGRAVVAVARKLAVLMHRLLLSDKPYEPLRNSPTTTEPEIRPDEVLDLKTGEVKPADSLLREAREPRRQPRRPASSRAAARPATDLAGPEKRKTTRRPPPPT

SEQ ID NO: 266074 - protein, 330 aa, unidentified
MNFCGIDVSAHELVVALRQSDHDHPQQGFPNTPTGHRRLLAWLRRQGPAVRISLEATGVYSLDLALFLSGCPAVELAVVNPKLIRRFAESLDERSKDDPLDAWVLLEYTARMPFRAWQPPTSAQLALRDITRHMLATTEVRTATRNRLHAARSTRSTPACVRHELERSLRQIAASLLRLQSQARAVVAQDPTLQSQFQLLLTVPGIAELSALQLLAEVALLGDRNVRQWVKHAGLDVRHYRSGSSVCRLPHLSKCGNRYLRRALFMPALVAARFDPTLRACYQQLLARGKRKRQALVALMRKLLHAIFGIFRHQQPYCGERLCPVLAQPA

SEQ ID NO: 266075 - protein, 388 aa, unidentified
MRRSNQDRIVGLDVHPDSFAGAILQGADPWKARVVSTSTRVVLPLLEKWALRHTREEDILVMEASGNAFCVAERLRALKRKVVILDSHRAGKVGKTYCATDRVDAIKIARIYLSALSPVVWQPDAKTRERREVFSAYQAVVKEGMRLKQQLKSMLNEHCVRLEKGFRVSHHSSIGRLLQRRKWSEAQKMLLSQLHAGLVGARVRRQRLRHYMAQEILAEKELLRLTRLCGINLITLYGLIAAIGDIQRFANARKLSTYFGLNPTVEQSGNYEGSGALKRHGRGAIRALLVQSAKKLLQVDNPLQKWGLALAARRGRNKATVAVARKLCVAVWHVMQGHVIGAIERMDTLHTKLHKLATELGVPTIKQLGYETKEAFVQKKLYVLRSYA

SEQ ID NO: 266076 - protein, 381 aa, unidentified
MDTKTVQSTLQSPISQQLYLAFELSQKQWKLGFTVGMGQRPRIRTIQARDLQALQWEVQEARHRFRLPDTVTTLSCYEAGRDGFWLHRYLHDHGITNLVVDSASIEVNRRSKRAKTDMLDVDKLLEMLIRYHSGERKLWRVVHVPSLEVEDRRHLHREMATLKAERTRYINRIKGLLIGQGVCMPVIEDLLERLETVRLWDGCGLPEELHTRMEREYQRIQLVNQQIQQLEVQREEQLRTSDHPSIEQVRQLLRLKAIGVNSAWLFVMEFFSWRDFHNRREVGALAGLTATPYTSGGASREQGISKAGNRHIRAMIVEIAWIWLRYQPNSQLSRWYQQHFGQGSNRLRRIGIVALARRLLIDLWRYLETGIVPEGAVLKSS

SEQ ID NO: 266077 - protein, 343 aa, unidentified
MNACLYVGLDVHKKSISWCAKRQDGKVFGEGSVKATRQCLTEWVSTFNEPWIGALEATIFSGWIYDFLKPHAEELKVAHPLMLKAIAASKKKNDRIDASKIADCLRADLLPECYMAPSEIREMRRELRFRNLLVGQAVKMKNKISGVLMEVGADYSKEKLHGKKYFNELLGSLDSAVAPESVKRMLRVSRGHLDLFTMGQKSLIRSLQADARLHERVKRLQTIPGVGEVLALTWALEVGEPGRFTALANAQSYCGLTSAQSESGGVSKRMPISKQRNKHLQKMLIEAAKIAPQWNSQLRALHERELKKGNRNRATLAVARKLVAYLLSVDKSGKDFEVREMID

SEQ ID NO: 266078 - protein, 340 aa, unidentified
MKLYGAIDLHSTNNVTVVIDEQDRVVYQKRLPNELALIRKELSVYQSELQGIVVESTYNWYWLVDGLMEQGYRVHLANTAAIQQYEGLKYTDDHSDARWLAHLLRLGVLPEGYIYPRAERPVRDLLRKRSQLVRQRTTNLLSIQNLLTRNTGRSLSANRVKGLDAQQVDELLPDRDLALAVKANLAVLSSADQQAQLLEQTVMQRVKLRPQFCFLKSVLGIGEILALTIMLETGDIRRFASVGNFASYCRCVGSQKISNGKKKGKGNTKNGNKYLAWAFIEAAHFAIRYNAKIKSFYERKKAKTKIVVALKAVAHKLCRACYYIMRDQVAFDVTKAFGPK

SEQ ID NO: 266079 - protein, 392 aa, unidentified
MDSKVWAGIDAGKEIHWAHVLDASGTQILSRRVENDEADLSGLIDEVLALAEEAVWAVDQPGGGAALLLALLWERDQRVVYLPGLAVDRARDAYPGESKTDARDAHVIADQARMRPILAELAPGEGDLAELQLLLARRRDLVTDQTRSINRLRDALVSLFPALERALDFNNKGALTLVCHYQTSAALRRMGRSRLASFLKNRGVKGADALARRALSAARAQSVSLPAETVASRIVAEIAEEVLALKERLTALDKEIASRFFVRQEAQILASLPGIGQILGSEFLVAAGDLCAFESADKLAAYAGLVPAAHDSGKRVGNDRRMRGGNKVLKRVFYQSAFASLRSSPQSRTFYDRKRREGKKHTQALIALARRRVNVLWAMLRDGTTFKAPSSA

SEQ ID NO: 266080 - protein, 374 aa, unidentified
MKYYSTLYVGMDVHRDSFTLAHYALDMKQPTGIVKTDNDYRRIVAYVHRLREKYGQETRIVCGYEAGCLGYTLYHQLTKMNLKCVILAPTTLPSPRGGKRVKTDGRDAANIAQCLAYGTYSPVHVPSAEDEQVKEFIRMRNDHCQMLKKLKQQILSFCLRHGYQYSGTRSNWTQAHMKWLDALQPEGLLGDTLEEYLTSFRYHQNKLERLDRRIEEISREETYREPVGKLCCLIGVKSLTALSVISEVGDMHRFATAEKFAAYLGLVPGEHSSGNSVRRGGITKAGNVHVRTLLTEAAQSYTRGKVGYKSSALKKRQSGQSETVIAYADRANERLRRRYYQMTLQNGKRHNVAKTAIARELACFMWGLLTEHVA

SEQ ID NO: 266081 - protein, 351 aa, unidentified
MSQNLNSAVAVIGIDIGKNSFHVVGLDDRGAIVLRQKWSRGQIEARLTNLPPCLVGMEACVGAHHLSRKLKAFGHDARLMPAKYVRPYSKGQKNDFRDAETIAEAVQRPTMKFVATKTAEQLDLQALHRVRERLVSQRTGIINQIRAFLLERGIAVRQGLRFLRAELPRLLAAPPDVLSPRMVGVIEGLAEDWRRLDERIEHLSGEITALAHQDAGCKRLVSVPGIGPIISSAMVAAIGTGDAFSKGRDFAAWLGLVPKQISTGDRTILGKISKRGNRYLRVLFVQAAWVVLIKPQSWERHGLKPWIEAAKKRLHRNVLAIALANKLARIAWSVLARGRSFEARPVMASAA

SEQ ID NO: 266082 - protein, 346 aa, unidentified
MDYFAGLDVSVKETSVCIVDDTGRIVREVRVASEPDALLAVLTNPAYHFKRIGLEAGPLSQLLFSALAEAGLPVICVETRHMRAVLKAQINKTDRNDARGIAQMMRAGLYRPVHVKTLRSQKLRMLLTHRKLLQSKAIAIDNDLRGTLRNFGLKVGMVGTVKFEARIGELVESVPDLAALVEPLLVVRRAIREQIAILHRRLLAIVRDDEVCRRLMTIPGVGPVVALTYRSTVDVPARFRNSKAVGAVFGLTPAQYQSGEIDRTGAISRCGDEMMRVMLYEAAHIMLVRSTKWSWLKAWAMQIARRRGMKKAIVALARRLAVIMHRIWVDGTEFRWTREQHAAAGA

SEQ ID NO: 266083 - protein, 343 aa, unidentified
MQTITTIGLDIAKSVFQVHGVDATGQVVVRRQLKRRSVLAFFEKVPPCLVGIEACASSHHWSRELQALGHTVRLMPPAYVKPYVKRQKNDMADAEAISEAVTRANMRFVPTKTPEQQSCLMLHRTRHLFIRQQTAVINSIRAHLAEFGIVAPVGRKGVTELLHIVADPNDKRVSEVARACLAALGGQLLSLKQQIVEFDRMILAWHRSNQTSKRLHYIPGVGPILATALVASVADPSTFRSARNFSAWIGLVPKQHSSGGKDRLGSISKQGDRYLRSLFVIGALAVIRYAKIHGTGHRPWLTALLARKPAKVAAIALANKMARMVWAMMARGERYKEPVALAR

SEQ ID NO: 266084 - protein, 348 aa, unidentified
MRFYTETHQHYCGIDLHAKTMYLCILDREGQVLLHKNIRSCPEAFLAAVAPYRDDLVVAVECMFTWYWLADLCRSEGVEFVLGHALYMKAIHGGKAKNDKVDSFKIATLLRGGNLPKAYVYPPEMRATRDLLRRRLHLVRRRANLLAHIQNTHHQYNLPAPTAKVAYKANREGVAEAFAEPDARKSMEINFTLIEHYDQVIRDLQLHLERRAKQHDPQAYHRLRSVPGIGKILALTILYEIHEIARFPRVQDFLSYSRLVKCEHSSAGKKVGTGGAKIGNVHLKWAFSEAAALFLRNNPTGQKYLRRLAGRHGKAKALSILAARLGRVVYLMLSKERAFDMARFLART

SEQ ID NO: 266085 - protein, 362 aa, unidentified
MEYFCGLDVGMDETAVCVVDDKGEVALEVAVVTDPETIRAALAPYQGRLRRLGHEAGSLSPWLHPELLKLGLPAVCLETLHVRAALKAQRNKTDKADALGIAHIMRTGWFRRAHIKSAACYRLRLLLTHRRNLKRKFLDLENAIRHSLKVFGIRLNRVGRGGFAQAVREAVAGDALVSELIDAMLNARAALWKEYCRLHDLVVRLVAGHELCRRFMQIPGVGPIAALSFMTAVDDPSRFKRSRDVAAYFGLTSRRWQSGSSIDVKGRISKAGDGDVRRALYEAASALLTRYRKKDKVKTWGLALAKRSSHRKATVAVARKLAVIMHAMWSGGTFYCGDPDVAAADVSARAAAKDRRLLGVYA

SEQ ID NO: 266086 - protein, 317 aa, unidentified
MSTSDLFIRIAVSKAFLDVAMRPTGESERVVSEADKLSALASALALRHPTLIVLEATGGFQAVVVAELAAKQLAVVVVNPRQVRDFARSLSKLAKTDALDAAVLAHFAQTVRPAVRPLPDAETQQLEAWLVRRRQLIEMITAERNRLLGCRSAAVRVGIQASIDWLKKQLAKIDGDLDRAGRKSAVWREKEDLLRSVPGVGRIAATTLIAELPELGALDRKQIAALVGVAPFNRDSGQWRGTRSIRGGRSSVRAALYLAALVASRRNPVLQKFYQRLLAGGKAKQLALVACMRKLLTILNSMVKANTRWQPAAAQSA

SEQ ID NO: 266087 - protein, 387 aa, unidentified
MYYIGIDISKFKHDCAVIDDVGDVVTPSWSFANDHEGFLQFKALLDSLGTETRIGLESTGHYGTNLKLFLESCSTTFMEFNPLLINRFIKSKSLRKTKTDSIDCEMIARYLMTVEYKPYPPSFYHTEKLKSLTRFRDSLVRQRSRQLVELTNILDKVFPEFKPFFKGRFSTTAFHILINYSSPERIANMNAKSYETLRKLSRGRFSLADFTTLKHLARNTIGHPDDFLLNEMAMVIDIFSQLDSKVGETETLIEECVLEIDPPLLTIPGIGPLSAAVILAEFGDFSKYETSAQLLSFAGMEPGYFQSGTAESNGKMVKHGSSYLRYALMNCARTVVNYEPTFAEYYAKKRAQGKTHRVALSHTAKKLVRVLFTLQTKNLVYDPDAMR

SEQ ID NO: 266088 - protein, 347 aa, unidentified
MDQYVGLDVSQDETHICVVDRDGNKLWEGDCASTPEAIGKTVKKHAPDVIKIGLESGHLSTWHWHGLRDLDLPAICIDAYHAHGVLRLQMNKTDKNDAQGIAQIMRCNWYKEVTIKSFENHESRALFRTRSNLVSMRTDVVNQIRGMLKTFGILIKGIAGVSFENRVQEIIDEYTAIAAPLQVQLDMLQMIKHKIDELDELVLDHAYACQKCRILMSIPGVGPMTAANFVLAVYDADRFKNSKSVGAYFGLTPRRRQSGEMDYNGRISKRGDRVIRHQLYEAANSILTRVKKPSSLQAWGLRIAKRSGMKKARIAVARKLAVIMHQMLQTGELFCFDPATGERAIYA

SEQ ID NO: 266089 - protein, 254 aa, unidentified
MSTSQSAHVGVDVSKQSLDVGIRPGNTLINLTNDEAGHEALLSALKSYSVQLIVLEATGGWEAAIAAKLIQAGFPVAVVNPRQVRDFARALGRLAKTDRIDAQVLAHFAEAIQPPPRELPDANAQRLAALITRRRQLVEMRTAEQNRQAAAHASLLKDLKQHTEWLSARIKDVDHDIGQALKDSPVWLERATLLESVTGIGTTTSATLMALLPELGQLGRRQIGALVGVCPFNRDSGKMKPNYILYKRSKLVNN

SEQ ID NO: 266090 - protein, 344 aa, unidentified
MEYFAGLDVSLRSCAICIVDTKGTVMFERELTCEIEDIADCLNSFGCPIERVGFEAGTLSQHLFYGLSGEGFDVVCMEARQVNAALSAMRNKTDKNDARGIAHVLRTGWFSPVHMKSREAHGVRALLSTRKALLNKTIDLANEVRGLLKIFGLRLPKTVQHGSFDGLVRPMIEMDEILAHAIIPLLDARRVLYQHFLELDRRVKRAAAQDEVCLRMMTVPGVGPIAALTFKAAVDDPARFKRSRTVAAHFGLTPRRYQSGEHDNLGRISKAGDRDVRSTLYAAANALLMRTMAGSQIKSWGMRLVRTKGRRRAVVAVARKLAVLLHRMWVDGTEFRLAEVEGTA

SEQ ID NO: 266091 - protein, 367 aa, unidentified
MSHIIYCGVDFHARQQTICCLKTETGELTSHELKHEPKEGLRKFYSELGGPVIVGLEASGYTPWFEELLEALGHQVWLGDASEIRRRARRRQKNDRRDAELILDLLIHDEFPRIHRPLPQSREILRMLRYRHKLVKVRTIIKNSLQSLSLQAGLSLQARLFTRQGTQQLKDLALSPVMGQQRQQWLELLQELNQRITETEGWLKQQALSDPRIQLLRTHPGLGLLSSLGIVHTLIPVSRFPNTRKVAAYGGFDPMERSSADKKRYLGISKAGSRLLRFLLIEATQTAVKTDPDLKRFYHRLVQRRGKPKAKVAVARKLLIRSFIMLRDEINYAEFQQRAVAARLAREFARPNVPVPLIGQPASPAKG

SEQ ID NO: 266092 - protein, 344 aa, unidentified
MELYVINNFLGIDISKDRFDVSLSFISNKGKRETRKRSFKNNDHGFQGLLSFLQKHNVEQVKACMEATGCYSEALAEFLHNTGHFVSVVNPACIRFYAKSKLIRQKNDQTDAEIIADYCQRQEPIRWASPSPELKKLKHLYRCSAALKDELTLVNNHLEKKERLPKEVANAWEDLAMNIKQKIERIKNSLRELLNKHKELLENFQLLLTIPGIGEESAVAILAEVPNIKAFKDARQLAAYAGAIPRNITSGTSVHAKPRLSKSGSRTLCKAMYFPAIVAKNHNPTIMTFCKRLKEKSKHNMAIVGAAMRKLLHIVFGVLRSKKAFDPDHIKNYRARSLAESLVL

SEQ ID NO: 266093 - protein, 387 aa, unidentified
MPKHFDPRHAATAFDHDSTLVLALELSGKCWEANAVVPGVERRPRRRLAVGDLAELLRSIERWKAVAAKANCVVQRVVLTYEAGRDGFWIARYLLAQGIEVHVMHPASIPVERRNRRAKTDRIDLDMLLRTLLAWLRGEPRVCSMVRIPSEAEEDLRRPGRERERLLNERLQLENRLENLLCLHGVSNFKPRLKKAAERLEQVRSFAGTPLPPQTMDELRRLMVRHRLVSDQLRGLEAARDRVMAVAEPDEAERMIQILIRIVGLGTETATLLVRELFCRSFRDRRALANFVGVTGTPFRSGGMDREQGIGKNGNAHVRRIMVQLSWRWLRFQPDSALSRWFDERTGGAKGRIRKVMIVAMTRKLLIALWRYVETGEVPAGARILPA

SEQ ID NO: 266094 - protein, 416 aa, unidentified
MKKHNNSIKKSEPTSKRAKSRGLVQLDPKEVLAELLGKLREKLDSKVVAASAGEQDQRGELRPNFDRLTVGVDLGDQWSHYCILGLEGETLGEGQLRTTPQDVAEFFEALNAARVVVEVGTHSAWVREVICGYGHEVLVANPRLMEGSKRRKRKNDRIDANKLARLGRVDPQSLHPMQHRRAEVRQDLVMLRARDALVAARTELINTTRGLVKSMGARLPKCSSPSFAQKVEEAVPAEIQEALLPLVRMTAALSDSIQGYDEKIEKLGREKYGHTALLRQVKGVGPITALAYVLTLENPERFVKSRDVGPYLGLVPKQEDSGESQPQLGISKAGDTMVRRLLVGSAQYILGPFGPDTDLRRYGLRLCERGGKNAKKRAAVAVARKLAVLLHRLWVTGEVYEPLRHGRSERMVQTAA

SEQ ID NO: 266095 - protein, 332 aa, unidentified
MIFVGIDVGCKELVFVIRHQGKSSKAEIVTNTFKGHQAIIKKLKKLSDSVRICVEATGVYHLDLVLALSRAHLDVMVINPKASHNFAKVLMKRTKTDNVDAEILAQYAERMDFTPWQCPSNKALEIRACSRHLEELSYQCTRLRNQIHAMKSNGTTPVYLLKDNQQALVSLEKRIVSIRNKAVQVIGQDELIKMRYELLLSIKGIAQKSAVQILGELLVLPKDMSARQWVAHTGLDPRQFSSGSSVNKKPHLSKAGNQHLRRALFMPALSGVHWEGNVKAYYMHLVNDNGLKKIQAVCAVMRKLLHAIYGMFKVGKPFDGTRFYKFPSGKAA

SEQ ID NO: 266096 - protein, 402 aa, unidentified
MNAVGIDVSKGKSTVAAMRPFGEVVLSPYEVSHTNEDLHDLAAMIKSLPGETRVVMEYTGCYHAPVTKVLCKAGIYVSVVNPLLVKDYGNNSLRRAKTDKKDAVKLASYALDRWLSLPRYYPDEDARLMLKTAYRQYEQVVGIQTMQKNNLISLLDSVFPAANRLFSSPPREDGHIKWVDFLERFWHCECVCGLSQKRFTECYRTWCRKQGYHFSEDKAHDIYSEACSHVSVMPKCEGTEFIIKQAIAQLQSTSAAVAALRKQMQALASTLPEYSVVISMYGVGPVLGPQLMAEIGDVRRFHSKGALVAFAGLDAPAFQSGQLNVRSRSISKRGSPSLRRTLFLVMSVILQNSPEGEPVYQFMSRKRAEGKPYKVYMMASAGKFLRRYYAIVKKHLNELEED

SEQ ID NO: 266097 - protein, 349 aa, unidentified
MTNIVKQTAGIDVALNELVVSLGQMSHDTGVEIFAFKTFANNVKGFNDLVAWVKKLAMKEMKVRYVMEATGVYHEKLAYYLSDQGQEVSIVLPNKISNYFRTLDIKTITDKTASQAICRFGLERKLDVWQKPKKIFKDLKQLTRERDQLIADRTVLKNQLHAEQAEAFPNESSIKRITKRIQLINKQELEIKAEIAELVKKDAELVKKINTITSIPGVGKLTAVIVLAETNGFELIKNKKQLVSYSGLDVKLKDSGTSVKGKPKISKKGNRHLRKAMHMPALSAMRYNDQHKAVFVRLVSKHGIKMKAAVAVQRKILELIYTIYKTGKDFDKNYMQTSVKKEAEEVQNS

SEQ ID NO: 266098 - protein, 341 aa, unidentified
MDITTIGLDLAKNVFQVHAVDKEGRVIVRKQLRRTMVVAFFAKLPPCLVGMEACGSAHHWARELKRLGHDVCLMPPQYVKPYVKRGKNDATDAEAICEAVTRPSMRFVPVKATEQQAVLMLHRTRDLLVRQRTMLTNAFRGHLSEFGIIAATGMENISKLITIVKENKDNHIPKAARTALRMIIGQLRDLKTRIDRLEKEIIACHQKNPESKRLATIPGIGPITASALSATITDASQFSSGRQLAAWLGLVPRQNSSGGKDRLGSITKQGDRYLRQLLVIGATSMLGVVSKRKTPDDDWVLALLQKKPPRLVTVALANKMARIAWAIMTRKETYTPREIRA

SEQ ID NO: 266099 - protein, 338 aa, unidentified
MRSYAGIDLHATNSYLGIIDTDDKRLFGKRLPNQLDTIRSALKPFGKGLAGVVVESTYNWYWLVDGLQSVGFKVHLANPSAIKQYEGLKHTDDQSDSFWLAQMLRLGILPEGYIYPRKDRPIRDLLRRRLLFVKQRTSQILSLQSMASRNLGINISSNEIKKMKEASAQHLFDDPDLAFTAMNNISTINFLKTKIKNIEKRILSKTRLSPQIEVLTTIPGVGNILGLTITLEVGDIGRFVKAGNYSSYCRCVKSERTSNKKKKGEGNRKNGNKYLSWAYVEAAHLATRFCPEAKRFYQRKMAKSNGAVATKALANKLARASYYMMRDQVPFDKDKLFC

SEQ ID NO: 266100 - protein, 367 aa, unidentified
MADDEPELLKLIGDVLDLADGRDVTWALDMAGGGPGLLIALLVNHGQELVYLPGIAVNRASDSYRGAGKTDARNAPVIADQARIRRDLQPIRPGDDASIELKLLTERRVDLVAGRTRTTNRLKGLLNSMFPALERALDIGTSGALLLLTGYQTPAAIRRTGRARLTTWLRNRKARNPEALAARAAEAAERQHTAVAGESAIATMVHTLAKEVMALNEKIAETDKLIEGRFREHELAEVIQSMPGIGAVLGAELLVGIGGSLDAFPTPDRLAAFAGVTPAPRDSGKISGNLHRPQRYHRRLQRVFYTSALVSIQFDPNSRKFYDRKRAEGKRHVQAVLALARRRVNVLWALIRDRRCYQVAPPGPAAA

SEQ ID NO: 266101 - protein, 393 aa, unidentified
MLYVGIDVAKSKHDCFITNSDGEHLRDSFCIENSMKGFNELYSAIRFFEPNPTFKNTKVGLEATGHYSNNIIDFLLTKNLNLVVLNPLQTNLYRKGQSLRKIKTDKSDARFIAKMLITEQLPSYSPVSYHISELKALTRHRFRLVQERSKFKVSYSRLIDIIFPELAANVWSTTQKSMLLTLSELPNTKAISECHLTHFSSVIIRNSHGKYGKEKASDLKQLARNSIGSNSPSLAFELQQIIRTILFLEEEIASLDKEIKKQVIALDMPLMSIPGISYVLASIIISEIGDIGKFDTPAKLLAFAGLEPSTFQSGNFTSDHARMVKRGSKYLRWALLTATRLVCMRDETFRSYRDKKLSEGKHYFVALSHTSKKLNRVIFYMLKSGETFISKAS

SEQ ID NO: 266102 - protein, 410 aa, unidentified
MNPLYVGIDVASHSNVAYLMKPDGSKHSVFPIANSKAGCQQLVKRIVSAMTGNGLSEMKIGMEATSIYGSHLVYTLKEDFSLSAYTKEIHVLNPKQVAKFKESYDDLPKNDYVDAYVIADCLRFGRINNEVYLGDYRHEALKKLTRARYTAVVNLSREKQRFLNTLFLKYSTFAQEKVFSDTFSTTALAVYEEFESADQLALMDLHELTEFIKEKGKNRFPDPDAVAKAIQKAARSSYRLPKTVNDSVNQVLSISISSMRALEASIKQYDKAIAEQMNAISNPLISIKGIGPVYSAGIIAEIGDIHRFKNQASLAKYAGLAWKQHQSGGFEAENTPLIHTGNRYLKYYLCEAVMSLVRCDTEYNSYYHLKYKEVNRAQHKRALVLTARKFVRLVYCLLSENRMYIAPEER

SEQ ID NO: 266103 - protein, 419 aa, unidentified
MSFKILKNNCCGLDVHKTWIYACIGITDSNRRTEYKQARFSSFSKGLNELCSWLAKYNCNDVCMESTGKYWIPVFNILEKNNIWVTLSHPKYTKPQKGNKTDRKDAKWICDLYMCGMVKPSFIPPADIRELRDLVRYRFKLTCMITGEKNRAQNCLTVSNLKLDDVFSDVFGKSSRSITEQILQHPGETFDVAPFVDGRCKTPIEEIQAAVDGAISTEQAVKLRQCLNHIDELELHKTEIEREIFRITDKYESILSLIRTVPGFDKNPMTAIQVLSEIGGDMSVFPTAKNLVSWAGCCPRNDQSNHKIKSTRISRAGSYFKPVLVQVANALIKSKKNPEFATRYRRIKARRGHKKAIIAICRMLLTAIWHILTDLKPYTPEGFLESHPVNKEKVLTTSQALNLLKQRGYTIKDDAVPVT

SEQ ID NO: 266104 - protein, 404 aa, unidentified
MAVCAGVDWAKDAHEVWVADGDGERLWAGAVAHDEAGITRLCDTLVTLKVDRVAIERPDGLLVERLLDAGLTVFALHPNQVHAARARFRPAGGKSDRFDAFVLCELARTDYHRFRALIPDRDETKALRALTRGREVLVEQRVALCNQLRAELERFWPGASQIFSDLDSPISLAFLERYPSPLDARSLGERRLAQFLARNHYCGRKPASELLERLRIAPTGRAAQLEADARRGIVLALVAALKPIVEQIRLLTSEIAHTVHAHPDGPIFLSLFKDPQSVICAATLLAEIGDCRARYPTAEHLAADAGMTPVAVESGKRKVATFRRGCDHRLRNAFVTLADSTRHWHPWAHRHYADATARGHDHPRAIRTVGRAWSRVLWQCWQDQQPYQPERHNALQRQLTITQG

SEQ ID NO: 266105 - protein, 346 aa, unidentified
MSQYVGLDVSVKSVSICVVDVEGAVIARGETSADPDQISSFIGEHAPRAERVVHESGILAIWLTRELEARGLPIFCIDARLAHKALSGRINKSDAGDAEGLAHLARTGWFSTVHVRSEASERVRVLIGTRERLIRMRKDLEGHVRGVLKVFGVCMGTVHRTKLRQGFRDQLAEAAGTDPAIAVMAEMFNPVHEALCAATDAMDDELKAIARTSALARRLMTVPGVGPVVALSFIATLDHAGRFRRSRDVGAFLGLTPRRHQSGEMDWSGRISKCGDRDLRRLLYSAASTLITQVRKPSPLLAWAKRLQERKGFKKAAVATARKLAVILHCIWRDGTLYDPRLEATT

SEQ ID NO: 266106 - protein, 342 aa, unidentified
MREKRYIGIDLHRKRFTCCVRLEAGRNYLSEWSLEQLPRFLQKLRRTDEVAVEMTGNTRFFYEAVAPYVARVVVVDPNQFHVISHSMKKTDPHDARNLALYLAKGLLPEVRMKEKEEAEVASLTQTRDRLVKLRTALKNKVNNLLSARGIELEQESLSSEKGLTRVLEQKVEKLAQLELDVIVEQIRSLNRSVARLDRAIEEAGQKLEGYRNLTSIKGIGSLGASILLSVIGDVEDFTHEGKLAAYFGIVPRVQDSNETEHRGRITKRGSKLGRTALVQCALIAKRYSPYLHRYYERIRARRGTGKAIIALARKFLSIIYCTLKNNWIFEDFPNFVLAQAET

SEQ ID NO: 266107 - protein, 365 aa, unidentified
MYGLHQPNQVGWSYPNKGAHTMNDFNVIGIDLAKNILQVCVITKDGELLSNKAMKPAKLTEFLAKSKPAIVAMEGCGSCHYWARLAQKLGHQVRVISPKKVKAYLQGHKTDANDALAIAVASMQVGQVFSQILSEEQQILQTLESSRRFLTKEVTALSNHIRAYLYEYGITTPQGKKGLREKIATIVDPQDQQLPVSLKNTLTLLWERYKQTGIELKQVQTTMAGLVKQIEPCKRLMALEGVGSVCASMLYAHLGDGRGFKSGRDASAYIGLTPKQHSSGGKVHLMGIGKHSGNVPLRSLLYVGALAVVSRLPSTPRTEKEAWLLSLLDRVGLKRACIALANKTVRTAWALLVTGNEYEPKLITQ

SEQ ID NO: 266108 - protein, 343 aa, unidentified
MDHYAGIDVSLELSSVCVVDAAGRIVREARVPSEPDALIAWFRGLGLQVSRVGLEAGPLSQWLYAAMRGAGLAVELLETRHVRDAFKAMPVKTDRKDARGIAQLMRLGWFRPVHCKSLPAQEARVLLTTRKLLQAKHHDVEMSLRGVLRGFGLKVGPTPPRSFSGRIREPVEGHPTLTAVAGALLAAREALGEQLRGLERRLRDQARGDERARLLMTTPGVGVVVALTFAAAVDDPARFRSSKAVGAHFGLAPRKYQSGETDVTGRLSKIGDAGVRTALYEAANVILTRPVKGSALKSWAARLANRAGMRKAKVALARKLAVVLHRMLADGKPFAAERAAAAA

SEQ ID NO: 266109 - protein, 320 aa, unidentified
MIFVGIDISKLTFDVAVLIDGKYMSRQFENKQSSFLKLSQWIKSFKNPAYFCLEATGIYGLALAKHLYQTNQKVIVANPLQTHAFAKMEMARNKTDKADAMSIARYCQYLFNRGEIDKGLFIPRSAAFERVQFLVTRLDQLSKMKSQENNRSGVSLDKAAARSIQSVLTFIDKQIVVIKKEITMIIKQDEQLTVQLKLLVSINGIGDKTAWALLAYIGDISLFENSKQISSYAGLNPSIDQSGTSLNRSSLSKTGSTRLRKSLYMPAMVAVRYNPLMLAFYNKLLTKGKPKKVALIAVMRKLLVLAFGVLKSGKPFDVNY

SEQ ID NO: 266110 - protein, 329 aa, unidentified
MKKKDVIGIDVSKLTIDTYVKIAQVHAEFSNDNKGFRQLVKWIKKHTDCQIEELLICFETTGLYSLQLASFLSQINIDFVMENPIQIKRSMGVVRGKDDHVDSQRIAEYAYMRKENLKHTKLPCEELIKMQNLLAMRERMVRQKAGYQASLGEYKRVLVQQQQKDLFLLLNNMISALKKQILKADKTLIEIIQSNKKLKSTYTLLTSIKGIGVILAANIMVTTICFTKFNDSRKYACYCGTAPFKYSSGTSIKGRTKVSQMANKKMKALFNLAALSAIQHDPELKLYFDKRKANGANGMSTINIIRNKIIHRVFAVIKRGTPYVAKYAA

SEQ ID NO: 266111 - protein, 420 aa, unidentified
MKIFVPVAGVDVSKRFSDLCVLSPDNNVLLRQKIYHDMVSMKLAEKKLHEIELECGARPVVVMESTSHYHLILFQFFTDAGFEVVVVNPIQSGALKNINVRKVKNDRVDAYRIAMLYRLKVLRPSQIPTSSLRGLRLLTRQRSELKGDVARFKNRMTAYLDQIFPGYGEVFSDVGGSASRAVLHMCPTPEKLLNADGSLLAKAICEAGNKGPKFGAEKAAKLREAAGSAQVIGVRSASNASLIKNVLDIIEGLLAAIQRIEREIKELVTQDTRLDEDVKLLCSIPGIGFSSAVVIAAEMGNISLFRKPKQLAAYLGLDPGERQSGTFKGRKNKLSKRGSPQVRAALHMAAVSSVSRKRDGTYRNPVLAEYYERKCAEKPCKVARVAVMRKLSNIIYAVLRDRKPFELRTPQEHMALLAAA

SEQ ID NO: 266112 - protein, 414 aa, unidentified
MKSWQDHTHYAGLDWAKDHHSVLIVNRDGSIVADFEFEHSLEGWKSFAQKTSAWPNLAVAIETSQGAAVDQLLQRDYTVYPVHPVAAQSYRQRKAPGGTKTDHLDAWALADALRVDGHGWKTLQPMDPMTQQLRLLCRDEVVLIEQRTAMVNQLQQALLEYYPTALAAFDDWTDSFSWEFILAFPTPQALVEAGKRRWEKFLHTHKLWRPETAQKRLKLFAQADQFKASDPIVRAKNQLAVSLAKLLCTLGQQLKLYRKQIEALFGEHPDHDLFGSLPGAKKVLAPRLLAAVGGDPKRYGSHEVLQCIAGTAPISYQSGKLNKVQVRWACDKFLRHTVHLWADCFRKASTWGQTYYQQKRDEGMTHACALRCLGQRLLKILFCMLKNQTPYDAELHTRNQQKHGSWVLKLVREV

SEQ ID NO: 266113 - protein, 347 aa, unidentified
MNFYNNMHPYYCGIDLHARILYVCILDQDGNTCVHKEIPADPAKLQELLNPYIGSVVVGVECMHCWYWVSDFCHEIGVDFILGHALYMKAIHGGKAKNDRIDSYKIANLIRGGNFPLAYVYPKEMRATRDLLRRRTKIVQHGADLKAHVVNTTSQYNLPPNKVNLKNISAREQLKSTFPDISVQKNINLDMEILDCYAEQLSKVEWFIEQQAKQHKPVHLHVLKSITGVGRILSLTIIYEIGDIDRFESVQNFSSYARLVKCKAESAGKSYGTQGNKIGNAHLKWAFSEAAVLYLRGNDKAKKYLLNLQKRMSKAKALSALAHKLGRCIYFMLKNETVFDESKFLKS

SEQ ID NO: 266114 - protein, 358 aa, unidentified
MEKDTTYVALDDSKRKIVAGILRPNDTAPELREVANDPHHIRRLLTRLQRERPVSACYEAGVSGYDLYRQLRALGVACDVIAPALTPRRPGRRIKTDRRDAAKLVHLYRAGELTAIHVPDEVEEGGRDLIRCRDDIRRDVLRWRHRLLKLLTRHGRMYVAGRNWSQVHWRWIREQRFDVPPLQRAFEATLFTLEQALARQAELDKEIEALAATVPYREPVGWLRCFRGIDTLSAMILLAEVIDFQRFHRRRELMAYLGLVPSEYSSGETQRRGALTKAGNAHARRVLVEAAWHYRHRPTIGHALATRSQGSRPPSSRRLGARNNGSIGAIAISSATGNVRRSLWPPLPASWWDSSGRR

SEQ ID NO: 266115 - protein, 425 aa, unidentified
MRSIALDVHRDFCEVAIKDQSGLRLAGRIKTSLAELERFAHSLAPDDQVALEASGPARAIARVLEPHVGRVVIANTRKLSAIAESKVKTDKVDAQTLCELLAAGFLPAVFSPDEFTRALRRRLQRRSKLVRSRTRAKNECHAVLARNLKGRPPMTDVFGKAGREWLAALALPADERETVEGCLREVDFLDSEVGLIERELAAQGLSSQQIRRLMTVPGVSLVSAAAFVAAIGEIQRFSSPKKLVSYVGLDPRVRQSGAAPARHGRISKQGPAEARHMLCEAAWVLIRTPGPLRAFHERVRARRGAQIALVATARKLSVLFWHLLTKEEDYAFQRPTLTRRKLRGLELKAKDGRRSWPSGHALSTKQDRAREAEFALQVETAYRRLAADWQPSGPRSGAGATRGRASSRPTSGKQRGKATVPNPAL

SEQ ID NO: 266116 - protein, 356 aa, unidentified
MAMLADTVDGVIGVDTHRDTLAAAAVTQVGGVLAQTTTSADAAGYQHLLGFACSTVPGRRVWAVEGAGSFGAGLAVFLQQRGEHVLEVGRPKRPASRTGAKSDALDAIRAAREALGQEHLATPRRRGQREALRVLLTTRRCATLARVAAIGQLKALIVGAPEELRAELRGRNTASQVHYCASLRPRPTRSLEHQATVRALRATAARIQLLQAEADQLQAELTTLVGAIAPWLLEVPGVGPLSAAQVLVSWSHAGRLRSEAAFAALAGTNPIPASSGQVTRYRLNRGGDRQLNRALHTILLVRLRTDPDTRAYMARRTTEGKSRRDAKRCLRRIIARQLFRLLERYDQPEVEILRAA

SEQ ID NO: 266117 - protein, 523 aa, unidentified
MATRFRSRTRRSGRFLTVAKPSGSLHPRVQKVGPEHFGIVAVDCAKARSKWMLADFYGRILIEPTVVEHNKRGFDSAIAQIRRARESHALGDIIVAIERTGIYHLPVKRVFSSNSFETRIVHPLTTRQYRLPADPGNKTDDTDLLAIHRATTNGFGLIEPQLDEVHGPLRLLARYRRTLVRKNASSRNQLITLLDVVLPGYTGLFHDIFNNPAALAIARTVTSAAEVQALGVDGLAQVLKTLGVRAQRRTLEKILAWTKGIENTADYAAMSNTIIVSLDDDRCARLQQIGMMEQKMAGLLARTPYVVLLSIPGIGVVTAGEFAGEMGPIANYASDQAITGRAGIYPSRYQSDKVDRCDGPLVRRANRSLRGVILLIADNLLLINRFFQGLKMRWQAEGMDYRDMCVHAAKRFCRIAFQMVAGRQVFRHPSCQKRDAILRKLTCFHVDHGTSMAQVLTDLQAAIDHIPKSEHTPEAKSLFDAMQPRNRRQQTGLRRLGEILPGVLAKVGVTAVELSSKGENDLT

SEQ ID NO: 266118 - protein, 345 aa, unidentified
MSHFVGLDVSQKMTAICVVDKDGRRIWRGQCPSVPEQISVALRRYAGDKARIGIETGAMTPWIVHELRNLGFEVVCLDARHARAALKMQINKNDQNDAEGLAQIVRTGWYRSVHVKSFDSHRARAILGARTQLVGMTTRLSNHIRGVLKTFGLLPGAMRGLPFDRKVEVLLEDRSDVAPIVRPMLVAWRQLRVQIAAFDKAIRAMVRMSGASRLLMSVPGVGMLSALAYVSTVEDPSRFARSRSVGAHLGLTPRQYQSGEVDRSGRISKCGDTLTRTLMYEAAGVILTRVKKASGLRDWAAAIAKRSGPGKARVALARKLSVILHSIWRSGEPFRWSEPKHAVVA

SEQ ID NO: 266119 - protein, 280 aa, unidentified
MAGPVRTVIGGVDTHKGTHVVAALGEQGALLGTASFPTNLAGYAQLHDWLQDFGAITSVGIEGTGSYGAGLCRFLQAAGVPVSEVSRPKRLWRRRYGKSDPRDAEAAGRAVLSGEALGIPQQRDGMVEAIRMLRMARRSAIKARTQTINQLRAVLDTAPDELREPLRSLSAHALVAIAQRWRPGAPTGPLAAARVTLKLLAERWTTLSAELNQLDAQLAPLIAAAAPELLATHGVGPDTAAALLVASGDNPERLGSEASFAALCGVSPVDASSGRQHATA

SEQ ID NO: 266120 - protein, 311 aa, unidentified
METYAGIDVAKAHVDLYDDNTRKHCQFENKRSGISKCVKRLAKLQPQLIVIESTGGYERHLVVALAEASLPVAVVNPRQVRDFGRALGRLAKTDQIDAVLLAQYAATIKPSCRPLPDKHSRQLKDLVARRRQLVKMRQAELNRCEHADERMVIQSLRSVIRMYERLQKKIEQAITDLIKQRPELQQTKQRLVTVPGIGQTTADMLVSEVPELGRLNRRQIAALIGVAPINRDSGNFRGKRMTGGGRRAVRTRLYMPTVVACHHNPLIKSFYQRLLDKGKTKMTALVAAMRKLLTILNTMIAKGENWKPNLT

SEQ ID NO: 266121 - protein, 308 aa, unidentified
MKDSIGIDISKAHLDVCRPATGQTARFENSAAGLTAFKRWVGSSQPDLVIYEATGAYHGLLEKRCSGDLPLVKVNPLQARRFAQARGTRAKTDAVDAHVLALMGEALDLQPDSPASEDHHDLKQLQVARTAMIKARTRLKNRLATQTLSLLRRQAKVQLALLDRQLKAIDAEIASRLSRDQARSLDILQSIPGLGSVVAATILIECPEIGAMDRKQAASLAGLAPMTRQSGQWRGKAFIQGGRKFLRDALYMPALVATRFNPDMKQKYNAMRKAGKPAKVALTAIMRKLIELANTLIKQDRKWAPNPA

SEQ ID NO: 266122 - protein, 333 aa, unidentified
MNKPALYYGVDVSKDTLHISYQSGTDPKDLPQWHYLTLPNQLPELESWADQLPDNAHLIFEHTGSYSARLGWVLALKSRPFSILTPNQSKGFAATLKSISKTDRNDATLLARYGQVFQPPSSQLADESLHQLRQQHKHLNDLRISQQAVANQLHALSYDPRASQKVKASLLVLQQSYLAQIALFEADIDQLSQQELQTIAERMQRVKGIGPASAQALSTATNGLTGFESAKAVAKFVGIAPTQVQSGSSVRRRGRMARTGLGYVRGVLYMAARSARRYNLSCQALYDRLRARGKCHRVAMVAVMNKLLHQVFAVVKQDVEFVNGLGLPKQNLA

SEQ ID NO: 266123 - protein, 453 aa, unidentified
MSRKRMSNNRKVALPMLNPDAAGIDIGATEIYVAVPPERDPEPVRMFASFTEDLNALADWLQQCGVGTVAMESTGVYWIPLMQILETRGLVVYLVNAKHVKNVPGRRTDVSDCQWLQYLHSVGLLRASFRPAQDVCAIRSLARHRDSLVGMATCHVQHMQKALDQMNLQLHHIIADITGTTGLAILDAILLGERDVEKLALLRDPRIRASHETIAKSLVGDYRQEHLFTLRQSVALYREYQGKIVDCETETQRLMKLLETKADPSMPLPAAKDSVKKCKVMKPVKALALREEAYRILGVDLTTIPGISVLHVQTILAELGPDFSKFRSSGAFSSWMGLCPDNDISGGKVLWSGTRKVKNRVAATLRIAAQSLQQSESALGEFYRRMRAKLGAPKAITATAHKLARIVYHLLATKEAYDDSVFSKAEDKYRHRTEIRLKAQAQALGFKLVPAKS

SEQ ID NO: 266124 - protein, 466 aa, unidentified
MKHNRRRRPGKPRVSPSVLERINPNVAGIDCGSAEHFVAVPPDRDPNPVRSFPTFTSDLQRLADWLSTCRVTSVAMEATGVYWIPIYEILEARGFEVHLVNARHVKNVPGRKSDVSDCEWLRELHSVGLLRGSFRPTDAIVALRAYLRHRQTLIESAGAHIHRMQKALVQMNLQLPLVVSDITGVTGLRILRDIIAGRRDPSQLAEHRDHRCRASKAEMVAALTGNYRPEHVFVLQQNLELFDVCQTQLAACDSAIEAHVQTLTASMSAPATPLPPPRVTKKPRDNEPRFEIRTPLHQLTGGVDLTQIDGITSYTALKLLSEIGTDMGRWPSEKHFTSWLTLAPKNKISGGRLLSSRTQPSANRAAAILRMTVMSLGRTQTALGAFYRRLAARIGKPQAITATARKLAILIYRTLKGELVYRDPGADAYEAQQRTRVLRRLRQRAATLGFELVSRATGELLDGVVS

SEQ ID NO: 266125 - protein, 345 aa, unidentified
MDQQHYVGLDVSLETTSICVIDEGGSVVWRGKCGTDPDAISQTVRARAPALARAGLETGQLSNWLTLGLRRLGLPVVCLDARHAKAALSLQVNKTDANDALGLAQIVRTGWFREVAIKSMDAQTLQLLLTARAQLISQRQAIANNIRGLLKTLGHVIRRGCKGPFATRVREAIDGNPALAAIVEPLLVAWQALRDQAAVFDRKVTMKAKSDAAARRLMSVPGVGVIVALAYKAVIDDPARFKRSTSVGAYVGLTPRRYQSGEVDMAGHISKCGDGLLRSYLFEAANVLLTRHPKPCKLKAWGLALAARIGMRRAKVAVARKLAVIMHRVWKNDRDFDWGDASAST

SEQ ID NO: 266126 - protein, 429 aa, unidentified
MTRISAGVDVSKNRSTVCIIDQDGKVIMRPFLVWHSTEELDFLADTLKRLNGEVRVIMESTSVYQYPIALQLKERGLFISIVNAYKVKKFANTDFRGGKTDKKDSRTIASYGISYWDKLVEWQIPKDTYFNLDLLNRTYMNAKKHRQIILQELQHYIDCAMPGMDKELHPLNLSTKKDFMLDFVEKFWHRDEIVNMTEAEFTEVFTAWAKKKGYRPVEGKAAKIYAIAKSCIPYYPANPTVKTILQCIVDKLSGVNRTLVTIVTQMIEEAKKLPEYQIVREMPGVGDPLAARFFGSAGDIRRFKNSKALVAYAGIDSPPDESGDFSSTHRHITKKGSKVFRDTGYEIMMALRAQKRTWEKVRKNPEVYDYMLRKEAEGKPPKVAKIAALNKFLRIVYARIKELYDNMALAERAKAKTKSKTKAKTKATA

SEQ ID NO: 266127 - protein, 469 aa, unidentified
MLDMGSEGCCLIGTLIPTHKLTMFTSRRQACVLNANGKFVPRGIVSSAHIRTASVMSKELDKGGGLDIHKKSVAAAIASEDGSILEAEFGMTIDQIYQLKKWLLENGCKRVLVESTASYWYRIDQVMRDEINVIVVNPRDIKSPSSKKTDKIDARKLASRCLSNYEIHPSRKFTSEQLSLKRLTRSRQQYVQTRSKLKNQIHKVLDAAGITLSIFISDIFGVSGRYILNCLVARKSLKELIPGIPTNRIRKRAQELPEHITVQLDDTQVFLIRKALHTMDDIQKTIDEIDAILYERADAYIEDLKILMSVPGVKFIAAITILAEIGNYKDFGDGDQLACYAGLTPDVNNSAEKNIIGKITKHGPKGLRWILNQVAHGASKTNKSRLKKVYLRLLRRKGKPKAITALSRKILSIIHHLLVNREMWEEEGFKKKRLDFDFDRKSSPLQLTWLDLVVNNVVLVGKGKPGGGG

SEQ ID NO: 266128 - protein, 346 aa, unidentified
MLHAGLDLSRKRVDVCLLSDAGELVGQFPAPVDRDGLYGLSSRVAVYEQPVRGVVESMNGARFVHDELSRYGWEVLIADAQKVKGLAPLACKTDKVDARVLAELSFRDLVPAIWLPTPQLRQEREQARFRLYLVKHRTSLKNRIHATLIAFGYQRQMADLFGTQGRRLLESLDIPEPWLSTMRASLELIDDLDRRIAHIERELQQAGADHKYVPLLLTAPGIGWVLAYTIAAEIGDIARFPTPVKLVSYTGLCPRVKQSGESDLRGPLSKHGPRYLRWALIEAAIHAAAHPVYAERYQRTRRRLGKQRGPKVAKIELARRLAEAIWHMLTRNQPFAPAGAVIRLAA

SEQ ID NO: 266129 - protein, 446 aa, unidentified
MSKGAKKSKKGHVSMPLVNLNAAGIDIGDSLHVVAVPSDRDPVNVRRFGAFTEDLENIANWLEECRIDTVAMESTGVYWKNLFAVLIQRGIDVYLVNAKHTRNITGKKDDESDAEWIQKLHSCGLLKSCFLPDDRTETLRTLVRHRRSLTQDSSRYVLRMQKALELMNIKIHTVIADITGKTGIAILKAIIGGERNAQNFLPLVDNRIKANPETILKSLQGHWREEHLFLLKQCYNLYQHMQLQIELCEREIEKVLQLMANVKDKEVAQQGVGKKRKSKNQPRFNTVSYLKGIHKVDVTQIYGISEISALEILSETGSDLSKWATENRFVSWLNLCPNNKITGGKLISSQLLKKKPNAACQAFRMAANSLKQSQHWLGDYFRRMRSKGGQKYAIVATAHKLAIIYYKMVRYKEPFIPFNLDKYREKYRLARIKYLEKVLHQLKQAA

SEQ ID NO: 266130 - protein, 455 aa, unidentified
MPKPKRIRNARTSPVPRILEPDAAGIDIAATEVYVAVPTDRDPEPIRCFSTFTDDLHRLADWLRACNVQSVAMESTGVFWIPLFQILEDRGFRVCLVNARHVKNVPGRKTDVSDCQWLQYLHSVGLLRASHRPAQTICAVRSIWRHRESLVQMAAAHIQHMQKALDQMNLQLHHVISDISGTTGLAIIDAILDGERNPETLAALRDPRIVASRKTIARALVGDYRTEHLFTLQQSLRAYRQHQQWIAACDVEIERQLRVLPNNLADDQKPLSKSKDHHKPRRNEPSFDLRSQLYRIFGVDLTEVPGVSSLTAHALLTEVGPDLRRFPNAAAFASWLGLCPDNRISGGRVLSVVTRKVKNRLTMALRMAAQSLHRSQSHLGQYFRRMRVRLGTPAAITAAAHKLARILYHLITTRQPYQESTFAAMEERSRHRQLLRLKKQAASFGFQLVPGSSVP

SEQ ID NO: 266131 - protein, 410 aa, unidentified
MLFLGDDWAEAHHDVELVDESGWLLARRRLPEGLAGITTLHELIAEHLDPTAEPNQVQVGIESDRGPWVQALLASGYVVFAINPMQVARYRERHSASGAKSDAADAHLLAEIVRLDRAHHRPIAGDTEIAEHVKVATRAHQTMIWSRVRQVNALRSLLREYYPAALAAFGTDLASRDALAVLSAAPRPDLGRRLSQARIEALLRKAGRQRNVSTTAAKIRAALNSEQLSARPGVIPAYAASASALLAVLGTMVTQTEVLARQVEQGFGQHPDAEIYLSQPGLGVILGARVLAEFGDDPDRYVDAKARKNYSGMSPITKASGTKRVVLARFARNRRLGDALFLQAFAALNNSPGARALYDRQRAHGATHYQALRTLANRLVGILHGCLRCHTRYDEHLAWHSEPDKLSPAA

SEQ ID NO: 266132 - protein, 378 aa, unidentified
MKRESHEEFAAFVGLDWADAKHDIGVQATGTERREVLILEHRPEAIDAWVHTLRTRCNGQPVAVCLALHNGPIVSALRQYAFLVLLPGNPLLLAKSRKDVTPNRTQTAHPDAELQVALLRKHRATLTPLTPQSPTMRALAQLVAPRRRVVGDNVRLTHRLTRALTNSFPHVLPWFPDKETGLFGDFLRCWPTRKAAHLARRTTLAAFFRAHHLRAADVIDSRIQAIKRARALTTADGVITPNVLLVHALIAPLRVTLQAMADFATAIAQRAQAHPDFPLFDALPGAGAVFAPRLLVAFGEQRERFTSAEALQKYAGIAPVTERSGTQSWVHWRLQCPTVLRHTFVEWAAESTRHACWAQVYYPQQREKGKAHQAAVRA

SEQ ID NO: 266133 - protein, 387 aa, unidentified
MSVIIGMDPHKRSATIEIIDLNGEILATGRYGTDNAGYNEMLTTAQRYNERVWAIEGCNGIGRHIAHRLVHDRETVIDVPAKLSAQIRVFATGNGRKTDPVDAHSVALAALRVPDLRRVQADSELIALGMLADRRDELGRARTDTVNRLHRLLLELLPGGAKKFLTAMQARKLVATVKPRDPAGKVRRRLVVELIGELETIDRKIKAANKELRQLVNERGSSLTDLNGIGPAGAARLLADVGDIHRFRDRNRFASWNGTAPLDASSGQQQRHRLSRAGNRKINRVLHTMAIVQLRNPSAGRTYYDRRRAAGKTSMEAMRALKRRLSNVVYRRMLADQRRGETASPGGQSGTTIDSSATGSTPHTGTSDKPQPGLTTNQNSPDLQTAS

SEQ ID NO: 266134 - protein, 310 aa, unidentified
MEQTFIGIDVAKDQLDVHVFPSDDAFAVARDSEGLAALIERLSPLDPHFVGLEATGGFELTVAAALVSAAIPLAVVNPRQIRDFARATGQLAKTDALDAKVIARFAAKVQPEARPVPDEQARALGELVARRRQVIEMMTAERNRRRQLISRRLLKSVDRLLAVLQKELTELDHDIGEGIRGTPAWRERDELLRSVPGVGDVVARTLIADLPELGRLDRKQIAALVGIAPINRDSGKMRGKRTTWGGRAKVRSVLYMAALVASRRNPVLAAFYRRLVAAGKPKKLALTAVMRKLLTILNAMVRNKTRWQTA

SEQ ID NO: 266135 - protein, 360 aa, unidentified
MISVGIDVHKKRCQACLKDEKGRLIEELSIPNTTEGAEQLARMLTTYGEAKIVLESTGNLWTRIYDTLNQHEPTFKVTLANPNKTRIIAEAKIKNDRMDARVLADLVRADLVAESYVPTKDIREQRALLRQRRSLANDTVAVKNRIHNQLDKHDLQPHYSDLFGKQGREWLRSIQLPPIERTILDVNLKQLQSLEESIQAITVKTAQEAIGRPDVKLLMGFTGIDYYSAMLLINEIGPVTRFPSAKKLVSYAGLAPGIRQSAEHTVHGRITRDGNKYVRWILIEAAQNASRFDPKLRPFCLRVAARRGHQKAITAVARKMLVSIYYVLKRQEEYQGQRDELLERKINRLQRTVDSSLQAE

SEQ ID NO: 266136 - protein, 369 aa, unidentified
MGKYIEVFVAFDVAKKKHAVAIAEGGRTGEVRFLGDVENSPLPIERTIKRLAGRYDRLHICFEAGPTGYGLYRQIQALGHECMVVAPALIPKRSGERIKTNRRDAVTLARLHRAGELTGVWAPDAAHEAVRDLVRAREAAADDLRRKRQQLLSFLLRHSRIYSGGGHWTMAHRRWLASQKFEHAAQQIVFQEAIDAIEDALQRLRRLEKQLALIVPEWSMAPVVEAYQAMRGASFLVAVTFAAEIGDVRRFDTPRQLMAFLGLVPAERSTGDTIRRKGLTLAGNRRARRALIEAAWTYRYPARVSETLRARLEGLPKPVRDIAWKAQVRLCARYRRLSATGKKLPVVVAAIAREMAAFLWAIGREVAPA

SEQ ID NO: 266137 - protein, 394 aa, unidentified
MFYLGIDIGKRTHVASVMNDEGKVLLKGFSFANSLDGTHALLERLTSFSDSTEDFLVGMEATGHYWLALFSFLDEQQFLVHVINPIQTDGWRKGTEIRKRKNDSIDSVLIADLIRYGSFNETALADETMFSLRQLTRYRSYLVGTAGDFKRKVIAILDQIFPEYEKVFSKVGIFGKASKAVLSEFSSPDEFNQVSAETLAETLRVASRSRVGQSKAEALKTAAAHSFGVRFAQDAFVFQLRSMIDQLSFLEEQIKRTEEEIAQLMASLHSVIETVPGIGTVLGATILGEIGDIQKFSTPKKLVAYAGIDASVSKSGEYEATHNVMSKRGSPYLRKALFQAALIASRCDPVFKAFYDKKRAEGKHHLTAIGAVSRKLCSIIHAILTKNEPYEIRQ

SEQ ID NO: 266138 - protein, 391 aa, unidentified
MTPDGNKHSSFSVPNNRKGATTLVENVASALSQSNTTGVVIGMESTSVYGDNLMYFLREDGRLGKYERKLHMLNPKQVRKFKESYSELPKNDFTDAFVIADHLRFGRIKSEVYMDDYRYQALKTLTRARHQTVEELTREKQRFLNHLFLKFSGLTQEKVFSDNFGAASLALIDEFESIDELAYMDTGELADFIRIKGKSHFDDVEKIAKAVKTAAKVSYNLPKTVAGSVNQVISISMATIRFMQKQIKEYDRAIEKQLETIPNTLTSIKGIGQVYAAGIIAETGDIKRFSGQAALAKYAGLSWTQNQSGDFEGEDTHLIKTGNRHLRYYLCEAANSLRKCDLEFKRYYSLKFKEVNKHQHKRAIALTARKLVRLVYTLLKTNRLYIPPEEY

SEQ ID NO: 266139 - protein, 410 aa, unidentified
MEVLHPRCAGLDVHRDSVVACARLVRPGGVERHVETFGTTTSELERLARWLDGHAITHVAMEATGVYWKPVWAVLAEMFEPVLANAAHVKNVPGRKTDVSDAMWLADLLAHGLIRSSFVPPLAIQALRDLTRTRKQLTREKASHVQRIDKLLQAANLKLGSVLSDIMGESGRAILDALAGGESDPERLAGLVRARLRASRADLVEALRGRLAAHQRLLLSLHLGQVDAIDAAIARIDAELGDRLEPFRDAVARLTSIPGVGALSAAVIVAEIGLDMGRFPTAAHLISWAGLCPRHDESAGKRRSTRLRPGDPWLKTLLVQVAWCATRAKDTYLRALFGRLRARRGPRKAIVAVAASILTAIYWMLRRGVAYQDLGADHFERRDRARLAARLTRKLRELGFDVTLAEPAPA

SEQ ID NO: 266140 - protein, 390 aa, unidentified
MLYIGIDIASKKHDCCIIGENAEILAPIFTFENNVEGYDILLRNIAAFECDFSQVRIGLESTGHYGSNLITFLKAKGFDLAVLNPLQVDLYRKAQTLRKTKTDKADAHFIAQMLLTCENSSYVGIKPEISELKALIRHRSRIKSMRTKLKVSVTRLADILFPELHEAVSNIHQASCYALLLELPAAKAIADCHLTRLTNLLAQASKRRYGKEKALEIKVLATKSIGSNSRAVGFELQQTIRLIDNINSEMNLLDRQIKDLMLEINSPILTIPGISYNLGSIILAEIGNIENFANPSKLLAFAGLEPSTYQSGKYTATKTSMVKRGSSYLRWAILQAARLVARFDPTFKEYAEKKKREGKHYFVVMNHVGKKLIRVLFHLLKSGDDFVAMA

SEQ ID NO: 266141 - protein, 343 aa, unidentified
MKYIGLDLHKKNIFATVLDGDGKILSRANIRSKKEDISYYLKSQGSSENLSIAIEASYNWLYYYRILEGITDNIVVAHPLKTKIIGESRVKTDKIDSEALAYMLKADMLPRVYIPTRISMENKLLLRSRISLVRLRTSIKNKVHAIIDRNRDSYLSLENKSDIFCKTGMLVLRDTKIPEPDYMIITNYLDLIDELNKKIKEIEAEIDKRVVCDKDVELLKTIPGVGRFISFLLKSEIDSIDRFSSKEKFTSYAGLTPSVHQSGNKSYTGKITKQGNKFIRWALTEAAQVAIVHSEYFRYYYSKAKAKKGTNSAIVAVARRIAEIAYVILKEKREYIEKPINYS

SEQ ID NO: 266142 - protein, 407 aa, unidentified
MIFVGVDWAEAHHDVYVQDEAGQRLGGGRLPEGADGIAHFHELVARHVGEPDEVVVGIETDRGLFVAALVAAGYEVFAVNPMSTSRYRDRHSTSGAKSDPGDAKVLADMVRTDRHNHRRVATDSEAVQAVKILARAHQSMVWSRVRQTNGLRSTLREFYPAALGAFDDLSCGDALEVLRVAPTPELGRALSRSKIAAALRRGGRQRRIEERAIEIQTALRTDQLASPAAISTAMGASVAASVAVIATMADQIAGLAAELEAGFEQHPDAEVVRSLPGLGTVLGARVLGEFGDEPNRYASAKSRKNYAGTSPITRASGTKRVVLARYARNHRLADAIYLWSFASLSASPGARAFYDARRGGGDTHHAALRALGNRLVGILHGCLEHHTAYDEAVAWGHRSAQPIPEAA

SEQ ID NO: 266143 - protein, 363 aa, unidentified
MKIERTFVGLDVHARSVVACALDDVTGELSKARLVPDHETIMTWLRGLNGPVVVVYEAGPTGFGLARFLTGQGVRCVVAAPSKLHRPSGDRVKTDARDALLLARLLRLGEITAVTVPSLAQEAARDLVRVREDVRADLMRARHRTSKLLLRQGIIWSGGTAWTGAHHSWLGRQHFDLPGLQAAYDTTLETVLLAQSRRDRLDKTINEMAHEAQWWPTVSRLQCLRGISTLTAFGLAVEVGDWGRFTGSTIGAFLGLVPTEDSSGEGRHQGSITKTGNTHARRLLVEAAWHHQRPYRPSKTMRDRWELAPAAARARGHAGNQRLHERWIGFQQRKKRPVIANVAVARELAGWCWSLATLPETTS

SEQ ID NO: 266144 - protein, 343 aa, unidentified
MQTVTTIGLDIAKSVFQVHGVDAAGQVVIRRQLKRRYVLAFFERLPSCLVGIEACASSHHWSRELQSLGHTVRLMPPAYVRPYVKRQKNDATDAEAICEAVTRPNMRFVPTKTVEQQSCLMLHRARHLFIRQQTAVINSIRAYLAEFGIVAPVGRRGVEQLLEVIADTADRRLPEVARACLAALGSQLRALKAQILEFDRRIMAWHRANATSKRLDAIPGVGPALATALVASIADPKVFRSGRDFSAWVGLVPKQNSSGGKDKLGSISKQGDRYLRSLFTAGALAVIRYAKIHGTGHRPWLTGLLARRPTKVAAIALANKLARMAWAMMARNERYKEPAALTA

SEQ ID NO: 266145 - protein, 342 aa, unidentified
MNITTIGLDIAKNVFQIHGVDANGKVVLRKQLKRNQVLAFFANLLPCRIGLEACAGAHYWARELIKLGHDARLISPQFVKPYVKGNKNDANDAEAICEAVGRPNMRFVPVKSIEQQDIQMLHRVRSGLVKERTALANRIRGLLGEYGIIIALGLVKLRQQLPEILEDAENGLTMAARQIFADLQEQLIELDKQVSAYGEKIQVLHRASEVSQRLGEVPGIGPITATALLASLGDGKAFESARQVAAWLGLVPRQDSSGGKPKLLGISKRGDVYLRTLLIHGARAVVKAAAKKDDAQSRWINDLVKRRNGNIAAVAVANKNARIVWSLLTKSETYNPPTPASV

SEQ ID NO: 266146 - protein, 416 aa, unidentified
MTVDLVHPRCAGIDISKRDAKVCVRVASAGRAKATSTVTTWGSVTNQVLALREHLVAEQVTLVVMEATSDYWKPFYYLLEDGPFEVMLVNARHVRNLPGRKSDVSDAAWLAQLGAHGLVRGSFVPPEPIRQLRDLTRTRTAIVRERAREIQRLEKLLEDAGIKLSAVATDITGVSGRAMLEALIEGQRDPVVLADLAKRRLRSKIPELTEALTGRFGEHHGFLARLHLDLIDNHTHAISELTARIEVVIEPFRGVRDLIVTIPGISTNVADVIIAETGADMTRFPTAGHLASWAGTCPGSNESAGRIKSTHTRPGNPYLKGALGVAAMSASRSKNTYLAAKFRRIASRRGPIKAVVALEHAMLVAVWNMLDTGTYYGDPGEDFFTRLNPDRAKSRALEQLRKMGYAVTLSSLAASA

SEQ ID NO: 266147 - protein, 361 aa, unidentified
MGLKGPVPLMRDQRAHPLRVAQIPLYGGAAMYIGVDYHKKYIVATKMDESGTIMEQVRLNNDPDTLLGYAHTLPTGSKIALEATEGWYHFYELLENQCPDIYLAHPLKTRAIAEARIKTDKVDSTMLAHLLRTNLLPHSYIPPREIRDMREILRYRASLVSLRASIKNKVHAILSKNGIRMEYADIFGKKALSSLGSLSLRSCYTIELMGYIQVGETLNALIDKVSEVIEHQVKENPKARLLLTIPGISYYSALLVISEIGDITRFPSAKKLCSYAGLVPQVYSSGGKTRYGSITKQGSKWLRWILVELSHHFIHADTKLEEMFRRVMLTHGKNTARVAVAREMLKIIYYMLRDNRPFMRR

SEQ ID NO: 266148 - protein, 370 aa, unidentified
MSVRRILAKTIDTDLEYEAIGIDLAKNCVSAALLTTDGEVVCIDRLDYSELEKSAQALSPTTFAMEPCTEMNYLVQKLEAWGHRCLVIGGKNVQNYVENHYSGQKTDLNDAQALAFLAQDTQLRTIKAKDVEQQKYASLTTLREQYIKQYRQTIVSLKGICQAWGLNISKGISGKARLKDLIENHAAFPEELKESLVDMVTHAQTAQKALNKITKTLEELAKSDKVCQLIQTIPGLGSICSCRLRATVGDIKRFKSPKDFPAYYGLVPRSIATGHNERKGKITHRGDRTMRSLMVQAAGSLVNMATKGKLKSKQLTKWILKKQKEKMPWGKLVCAVAAKLLRIVRAVLISNKPYNSKIAGVAKCSLSKGS

SEQ ID NO: 266149 - protein, 422 aa, unidentified
MSYCPVAGIDVSKRFSDMCILSPDNKIFAQEKIYHDETSINRANALLQKAERLFFSKPVIVMESTSHYHLILFQFFSEHGYDVIVVNPLQSNSMKDFSIRKRKTDRVDAFKLAMMYRTKTLRPSQIPQTATRALRQLCRHRAELLNDVSSYKNRLTALLDQTFPGYDKVFSDVGGVTSCAVLVRFPTPTILLVEEESELVEVIAAASKSGYSFAKKKAGLLISAAQKAQTLGIHSCADETLIVCTIQMLRTLSESVLQIETAIDNLLAQIKEMRNNVSLLQSIPGVGSHSAALLLGEIGDISLFKKPKQLAAYFGLDPTERQSGSFGGTKNKLSKRGSPYARAALHMGVVNSICKRGKDSAANPVLLSYYEKKCKNKPAKVAQAASMHKLVFIIFAVLRDQKPFELKTPEQHAFEQGFVKAA

SEQ ID NO: 266150 - protein, 320 aa, unidentified
MRNAVGLDISKLTFNATAIVGKTEHSAKFDNNAKGIVRFKDWLGGLGCPDLHVCMEATGNYYEAVADSLAEAYKVYVINPLKISKYAESRFARTKTDKQDAKLIAEYCRSVEEYELVRRNKPTEAQYRLSRLTAAYAQIGRECSAMKNRRQSAKDKDVEEAFENIIVAMQEQLEVLKAKIKEQTEKPNCKEGVKRLETIPAIGRMTAAVLFQYLTSSAFETSNKFAAFAGLSPQQKESGTSVRGKGKLTKFGNRKLRAVLFMPAMVAYRIRAFPDFIARLEAKKKPKKVIIAALMRKLAVIAYHVHKKGEDYDPSRYKLA

SEQ ID NO: 266151 - protein, 450 aa, unidentified
MELLYPRCAGLDVHKKTVVACRVYTPEHGPKQEEVRTFGTTTPELLLLLDWLKEGDCTHVALESTGEYWKPVYNVLEGNVEILLVNAKHVKTVPGRKTDVGDAQWLADLLRHGLLQGSYVPPKPQRQLRALTRQRSNLVAQRAMVVNWLQKVLEDANIKLAAVATDLTGVSARAMLAALVDGEAAPGAIAELARGRMRTKRDALEAALTGRVEEHHRFLLTQHLLLMDHLEEQIELFSERIAAQVAVLSAPAPPAEPPAASAPPPAGPPAAGTGPASLPSYEQALALLDPIPGINRRVAEAILAEIGTRMEQFPTAAQLCSWAGVAPGNRESGGKRYAGKTTEGNPALRKALVQAAHGAIRTKGSSFGAVYHRLASRRGKQKAVIAVARKLLIVIYHVLRTGTPYRELGASYLDERKRESLVQQLIRRLEKLGHRVSLALQPTATTPAAA

SEQ ID NO: 266152 - protein, 400 aa, unidentified
MSFHAGLDWGGASHAVCIVDGTGRIVGRLDVRHDTNGLADMAARLKRIASPAELPIAIERPSGLIVDALLAAGHPVIPIHPNVVKACRPRYRAAGGKSDADDAYMLADILRTDGHRFRPLTAASDEIKALRALVRGRGDLVAQRVALANQLRSLLEGFWPGAAAVFSAIDSPIALAFIGRYPTPNSANRLGEKRLASFLAQHGYSGRYSAAELLARLRAAPIGLPGDAEVEAKGELVSALVAVLGRLVAQIARVSSRIEHAVAEAADGRIVMSFPRAGRINAAQILAELGDVRERFPTEDQLAAEAGVCPVTHASGKSRGVVFRWACNKNLRLAITCFADNSRHACAWAASIYQKARERGCKHPHAIRILARAWIRVLWRAWHDRKPYDPSLHRAAACMT

SEQ ID NO: 266153 - protein, 332 aa, unidentified
MKDITVVSIDTAKQTFYLVAFSRSGKVEGRRKLGRSALKRWMAKQAPLTVYMEACGGSHEWARVFKEQGHIVKLIAPQFVKPFRQGQKNDWNDALAIGIAGQQPTMRFVAAKSEDQQALQAVHRVRSRVQRDRVATANQLRGLLYEFGIVLPRSIPILRKRVPEVLETDKLPGMMADLVRDLLRELRALDDRVKYYTEQIERMVKVDPVACRLMKLSGIGPITASALVADIADARVFRNGRQLSAYLGLVPRQFSTGGRSSLGSITKRGDRYLRQLLVHGARSVIRHLGDKQDRTSCWLRELIARRGINKATVALANKQARWAWAVMVAAEV

SEQ ID NO: 266154 - protein, 353 aa, unidentified
MQQYVGLDWGYGRARWCAKASDGAVLAEDWTPADEDGLSRLAARLGPDVKACVEMMSGAAWVRERLEGAGWTVEIADARKVKALAPLAAKTDKVDARVLAELVRRDLVPALWVPSLDERALKERLLRRMHLVRLRTSAKNRSHGVLSQFGVKLPLSRLRQADALELLERRGVPEVWRRSVAEAIAVVDLLDERLAPLERELGPLARDDRRVVLLTTIPGVGDLLGLTIAVVIGDIERFADARKLVGYSGLTPRVKQSGQSSRTGKLSKSGSKLLRWAAIEAAQQAWRPSNPWHQLYLDVKARNGDEGNPAKAAVARKVLIAAWHVLALEQPFKPSRPRGANPVPANSGCVMAD

SEQ ID NO: 266155 - protein, 338 aa, unidentified
MEAYAGIDLHSTNSYIGIIDEQDQRHFAKRLPNSISQILVALEPFKENLKGVVVESTYNWYWLVDGLQEEGYQVHLANPSAIKQYEGLKHTDDKWDSFWLAHMKRLKILPEGYIYPKEERPVRDLLRRRLLFVRQRTSQILSLQSTIERNLSLKMSGNAIKKLKEEDVEDLFDSPSLVLTAKSNISVIQFLTQRIKVIEKAVKSGVKLRKEFQLLKTIPGIGDILALTIMLEVGDISRFAEVGNYSSYCRCVSSKRLTNGKKKGENNRKNGNRYLAWAYVEAANFAIRFSQEAQRFYQRKMAKTNGIVAIKALSNKLARASYYVMRDQVAYDVNKLFG

SEQ ID NO: 266156 - protein, 387 aa, unidentified
MIYVGIDIAKETHVAAAVDSDGVIIIEPFSFTNNHEGFKLLKSKLDTLDRSNLLIGLESTAHYAENVIFFLHSCGFDLAVINPVQTAAMRKTGIRKTKTDKVDSLLICKTLMVNSFRRYSENDIKTLKLKSLCRFRQNLKKSKARLKIQLTSYVDVIFPELQSFFKSGLHIRTCYELLKAYSSPDDIAALHLTKLSNILSKASRGRFGKQDAQSLKSLAMSSVGVKNTYISIQITQTIAQIELIESQLAELETVIEAAVDELDSVIMTVPGIGKLNGAMILGEIGDIKRFSDSSKLLAYAGLDPVINQSGKFNAKRTRMSKRGSKLLRYALMNAAWNVSLNNDTFKHYYDSKIAQGNSHYSALGHTAHKLVRVLFKLLNDNIPFALA

SEQ ID NO: 266157 - protein, 453 aa, unidentified
MSKDTLYVGLDTDKKSIAVALAEALPGGEVRAWGKLANDATSVLRLVKRLQAGGRDLEMCYEAGPCGYGLDRLLNGQPGVRCTVVAPSLTPRRPGDHVKTNRRDAVMLARLLRAGELTAVWVPDPAHEAMRDLVRARGAATGDLVRCRQRIGGFLLRQDIRYAGKLWTRKHRAWLGQLVATLPLAAHRLMLGEALQALDEATARRDRLTDHIAELVPGWSLAWLVDALQALRGFALINAATLAVEIGDPRRFATPRQLMAYLGLVPSEHSTSDRVRRFGLTKAGNGRTRKALIEAAWTYSRPARAPSDTARHAPAVVAIATKARHRLSQRYRRLTARGKRPVIAVAAIARERRARRPAATASSAQGRGQGRLGLGGCARVSASRNRTFLPSRRSSTPSPCNSRNAFGRRAACRNGRGLVSTWIAAGRPPRRRTWRATARPACRRGLMRRQIVP

SEQ ID NO: 266158 - protein, 412 aa, unidentified
MYYVGIDIAKRTHVAVIMNEDNSLKVKPFSFKNDRTGFKKLLIHLQTLCCELSDIVIGMEATGLLFENLYRYLQSLDYNVVLLNPYQTAKFREMDTMKRVKNDNIDSVMIAALLKSGRFSEGYVSQEQLQSLRELYRHRASIENQLKALKRQTSTILTVVFPELESVIRDPFNVTGLALLDKYPTSKHYTNASVDRILKTFRGIKGNNFNRTKAQALLDAAKRTVYSGIAKDARAFNIRTNIEQIRLLQKQLERTLEMMQLLFTSKEAKQEDQEVMEDLIDNLRTIPGVADKTILALLAECGNLDRFYAPKALIGFLGLYPTLSQSGDSTRNGHLAKRGASLAKKAIYLASISAIRHNDEMRTIYMNYRSKGRAKKEAIIIVARKLLTIIYTIYTRNVPYDPQRVFVAKPNQ

SEQ ID NO: 266159 - protein, 402 aa, unidentified
MNAVGIDVSKGKSMVAIMRPFGEIVSAPFEIKHTASDINSLVELINSVEGESRIVMEHTGRYYEALAHQLSEANLFVSAINPKLIKDFDNDSLRKVKSDKADAIKIARYALDKWQNLKQYNVMDELRNQLKTMNRQFGFYMKHKTAMKNNLIGILDQTYPGVNTYFDSPARSDGSQKWVDFASAYWHVDCVRKMSLNAFIVHYQNWCKRKKYNFSQSKAEEIYGKAKELVPVLPKDDITKLIIKQAVNQLNSASTTVESLRTLMNETASKLPEYPIVMAMKGVGASLGPQLMAEIGDVSRFTHKGAITAFAGVDPGVNESGSYEQKSVPTSKRGSSDLRKTLFQVMDVLIKTHPQDDPVYQFLDKKRAQGKPYYVYMTAGANKFLRIYYGRVKEYLSSLPES

SEQ ID NO: 266160 - protein, 417 aa, unidentified
MSKLLARPLGRCVGLDVHLDFCEIAICEEGKVFWAGRVPSTPEGMETLAESLQPSDRVALEVTGSSWEIVRLLEPHVSRIIVVSPGDTGISGARANTDRLDARVLARLLWTGELEAVWVPPEWVSRMRRRLHRREQLVRARSRAKNEIHAVPMRRLQGRPPVSDLFGVKGREWLWGLQLPLEEAETVQAGLRHIEFLDTEIEQVERLIATEALKSRQVRRLMTVPGVNVICAAIFLAAVGDIRRFKGSRPVVAYLGLDPRVYQSGSGPARGGRISKQGSPQARWALVEAARSVVLQPGPMHAFYERIRARKGHNAAIVAVARKLAVLFYCMLTREEDYAHQQPSLTAQKLRRLELKAGAPTRKGNPSGTRATREKMRQAEKRLAAQAEASHKRSVADWKAASPKNKDAGASVTAGRA

SEQ ID NO: 266161 - protein, 441 aa, unidentified
MLRFVGCDVHKRTAVFTILLEDGTLFANYTVAVSREGLTAFAERQLSAGDHLAMEATTNTWAVAGILRPFVEEIVIGNPLRIRAIAEAKIKTDKIDARVLAELLRVGYLPAVWQPDPETQRMRRLTHRRAALVSDRTRLKNRLHSILHHKLVPLPAYDLFSRKGLDWLREIPLAEEEDLARKSDLRLLRLVEEEIAELDGLLAREAWPDEKVRLLMTIPGIDYTIAQTCLAAIGGISRFANAKKLSAYLGLNPSTRQSGGHCYHGRITKQGNAHARWLMVQAAQHMSKFGGPLGHAFRQLLRRKNRSVAVVACARKLTVVLWHVLSSGEPYRYAQPKSLEAKLSRLRVRVTGERRRGGVPKGTPRSERYGKGRTRAVPALPQVLERNRLPLAPSLKNGEMKMLERKELVRFYQELQTASRIQANTGKVKSEENAEIQLTQS

SEQ ID NO: 266162 - protein, 313 aa, unidentified
MYPDPVAVGIDISQDALAIAVTPSGEAWTSSTTPDALERTMTRIRALAPAVVVLEATGGYEAPVAAAGAAAALPLVIVNPRQVRAFAHALGRTAKTDAIDAHVLAAFGARVQPAIRPLPDAATQALAALVTRRRQLLDMLTAERQRLAQARTAPVQRDLRTHIRWLERRVTDVDDDLTRSIQRSPLWRAQEDLLRSVPGIGPIVARTLLAELPELGTLERRAIAALVGVAPMNRDSGHARGRRMIRGGRTSVRNALYMAALVASRHNRPLQHFYARLRAAGKPPKVALVAVMRKLLAMLNAMVKHHTAWQPAV

SEQ ID NO: 266163 - protein, 442 aa, unidentified
MQFSNLQMKRHFISGKVVVGIDPSKEKSDAAVIDPHGLLQGKTFTFQNNHEGFKNQLWNCLNERVPQSSKETTVFAIEAACNLWQKLADYIIHQGFTVVIINPLCTYKARSLINHSFSKTDAKDALVIANSAREGYFDFYRIHSDTIKAMHDLAVTYDKLKRTLTQTKLRLRSLVELTFPEFPKIVKLSTNTALYLLEHYITPQEFLDANVFKAIKGMEQVSRKKKGVKEFKKLQEAARTSIGLDLDEEQIKAAHIARDAWIAMIKLLLIQIEDVQEQIVSMAKKRPYFDILTSIKGISDISASLFIAEVRDLYNFHHYKQIEAFAGLGLKNNDSGKYKGYRHISHIGNNRLRSIIYRMTTETKNHIPEIRIRFLKRKMTHDRYRKNVIACSSNLLKLIMVLVQENRPYEFREEKVKELQELELKIEQLKEKKTKKSYKKAS

SEQ ID NO: 266164 - protein, 425 aa, unidentified
MTARKDATPAATWVAIDIAKRNHAVLVETPDGKQRRFRMASSMDDHDRLVSLLHDSPQPVRIAMEPTGDCHRTLAFRLLNEGFDVCLISSVAGARLREAMFNSWDKNDPKDATVILAMLKQGMTMRLVDPLIAGHHGLQELSKTHYQISLARTRLQHSLLTHYLPLYFPEVEQYFDSAHAEWFARFLIRFPTAESIRHISYDAFREAAWELVGRKVNKNAWLQALYNAALRSIGLPVDENSVEIQSFRLQLRRYQDLIQQRDDLAAQAHELLAGRQDYESLRSLPGIGPVLALTILAEGGDLRRFAHHRQFLKYCGFDLAKCQSGQYRGQERLSKRGNARLRFAFWFAATVAVRMRENSFREKYERYIQNDPKNADRKRKALTAVAAKMARVAFGVVKQQTLYRSYFENALPRGSIPFRRAVGTS

SEQ ID NO: 266165 - protein, 348 aa, unidentified
MRFYTKQHKFYCGIDLHARTMYLCILDQEGKIVLHRDIKTDPDIFLKTIAPYREDIVVAVECIFTWYWLADLCSKENIPFVLGHALYMKAIHGGKAKNDKIDAYKIAALLRGGMMPMAYVYPSDMRSTRDLLRRRTHLARKRAELIAHIQNTNHQYNFADMGRIARKCDRIKIGVADRFTDPSVQKSIELDIALIEHYDKLLNHLEHELSLIAKVHDADSYFRLRSIPGIGRILGLVILYEIHNINRFPSVQDFVSYCRLVKSAKESAGKIIGSSGKKIGNAHLKWAFSEAAVLFLRRNPEAVKYRAKLERKHGKAKSLTILAHKLARAVYNILKKKEVFHPTIFFAK

SEQ ID NO: 266166 - protein, 444 aa, unidentified
MQIVYARCAGLDVHKKTVVVCVRLVGDDGTLTTYTRTFGTTTSELLHLSAWLLTLEVSHVAMESTGEFWKPVYNLLEGSFTVLVVNAAHIKYVPGRKTDVKDAEWIAELLAHGLLRPSFVPPAPQRALRDLTRQRTHLVQERASVVNRMQKVLEWANIKLSAVVTDITGVSARAMLQALVDGQTDVTALAQLAKGRLRSKLAELEQALRGTLEPHHAFMISQHLALLDVFDEQIAAFDDRISAAIEATRTPDTRDGGSTAGDSTAAGRDAAAASAPDGAWTAQAILDAIPGIGLRVAETILAELGTDMSRFPNAAHASSWAGLAPGQHESAGKRKSTRIRDGNTYLRSALIQAAWAAVKQPDTFLTAVYRRLAARRGKKKAIVALAHKILVLIYTLLSTGQIYQERGAAALDERQKDRIVHRLERRIAQLGYTVHLEPIIPAVP

SEQ ID NO: 266167 - protein, 340 aa, unidentified
MEYKFCIGIDVSKNTLDIGLLISQYPESVNHKQVSNNDIGIASMLSWLSEHDGFSIESSLFCLEHTGMYNYPLLQFFSQNHASVWVENPIQIKKSLGLQRGKNDKIDAIRIAQYAYRSKDKVKLWRPSRDVVDKLKHLSALRERLVETKKRLETPVQELLQIGNEAIAKVLEKSMRKTMNGLDKDLKAIEVQMKEVIDRDDDLKRLYQLVTSVVGIGFVTAVNLIVYTNEFKLFSNHRQLACYSGIAPFEYRSGSSIRGRTKVSHMANKKMKRNLHMASLTGVKLDEGLKAYYERKVASGKNKMSVLNAIRNKLLARVFAVVNRGIPYQKINYQNQFVLS

SEQ ID NO: 266168 - protein, 351 aa, unidentified
MSNPTRWVGVDLHRRRSQIAIIDEQGELALSRRIVNDRDTFKDLLGDPEGTHVAIEATYGWEWLAELLEEAGYDVHLAHPLRTQAIAAARVKTDAVDAKTLAHLLRTGLLPEAYIAPPELRDVRELLRHRAVLTRMRTAVKNRVHALLARQGIRQEHADLFGKAGREFLAALELPDGSRRRLDSLMSLIGDFDREITATTREIDARAKADERVPVLCQIRGVGRYTAMLIIAEVGDVKRFPTARHLCAWAELAPTVRSSDGKARLGHISRQGSPALRWALTEAAQKIPTGGGPLRAMFERIAKRRGRNIAKVAVARQILTLCYYGPRDGEIRCLKQQPIDDHDNHELAQAA

SEQ ID NO: 266169 - protein, 327 aa, unidentified
MTTEITATLGIDISKKDFDVALLRNNKFKNKKFANNPKGFSALLNWLEGLSVIAADTHACMEATGVYGESLATFLHDSGFTVSVVNGARIKGYAQSELSRTKTDKKDACVIARFCDALKPDSWAPAPQEVRELKALYRRLEALQEMLQQEENRVTVSDSILLPELQGHIADLRLRIQRTKQAIDGHIDNYPDLKKQRELLESIPGIGSTTSAMLLSAFSNIEDFASAKKMAAFCGLTPKQRQSGSSIRGRAKLSKIGNSRLRKSLFFPAIVAMQYNPVIVCMKKRLLKAGKCKMLIVGAAMRKLVHIIYGVLKTRTPFDENLSAATA

SEQ ID NO: 266170 - protein, 385 aa, unidentified
MTHPAHDTTFIPRNYDIFGGLDIDKKSMAVTFRDHGTMRKSLKLPYSGTQLLNYTRKHFPGQRVAFVYEAGPTGFGLYDELRAANHPCLVVSPAMVPRAPGQRVKTNRLDSNKLSEGLRGGQLRSIHVPATSYRELRHLVQLRDTQVAQLRATKCRIKSLLLYEGIPFPAANGQWSGQVLRQLAALPCSRAVRFKLDQLIDALQFHFQSAAKAQKEIRHYCQNDPELRQSISFLTSLPGVGSITAMHALARLGDWREISNVRQIAGFLGLVSSEHSTGDKENRGEITRSGDSRLRNKLIQCAWTAIRKDPELRAFYRRIYERQPKKVAARKAIVAVARKLTTRMYAVLKEQRPFVIRPDSSVTPLTAEETVGPRERLDTAQNEQP

SEQ ID NO: 266171 - protein, 348 aa, unidentified
MKNADNRAEIAWAGIDVAKGSFEAAVHPAWVPGRRMPLADLPKAGFARTVEGVAEFLGWLDGTNPPAGVRAVMEATGRYSTELADLLAAARPSLAPSVADPKTVCHFARSLRLRNKTDRADAAALARFGAERCPEPWRPPTPEYAALREMVRQRTFLVGELTAARNRLAEIDGMPAVAKVQQRVVADLEKALAKTEELMRGHVAKHPALAEAVAHLDSMPGVAFVTAATVLGELGDITRFPTSRALAAFAGLSPRRFESGTSVHGRTRMCKQGSPEVRRVLYMAAMTAVGRPGNRFARGYDAMVAAGKPRMVALGAAMRKMLVAMRAMLLSGADYRDEGTGKKTEKIA

SEQ ID NO: 266172 - protein, 326 aa, unidentified
MDDLNYTFESFVGIDIAKEKFDVFFLATDTSFTLSYDATSIQTLVERLTSLPRSLIVMEATGGLERHLAAELLAAGFVVAVVNPRLTHHFAQAFGKIAKTDRIDARTLALFAQHVKPRALEKTPEKLAELEQLVGRRCQLITMRTMELNRRGPCDSKIARKSIEKVLAFLQRQIDSVDSEIQRLIRCDDDWRRKDELLQSVPGIGPTTSAAIIAELPELGQLNRQRIAALVGVAPFNDDSGTSQRKRSIFGGRAGVRSAIYLAAFNLVHNRHIKPTRIRHFANRLTTNGKATKVVLTACTRKLLVAINTMLKNDTSWNSKIVTVSS

SEQ ID NO: 266173 - protein, 346 aa, unidentified
MDFYKGQHKFYCGIDLHARKMYLCILDEKGEVKLHRNMDTDREAFLKAIEPYREDVVVAVECMFAWYWIADLCRKEGIPFILGHALYMKAIHGGKAKNDKIDSQKIAVLLRGGMIPMSYVYPEKMRATRDLMRRRNHLMRKRAELLAHIQNTNSQYNLDETFGCIAVPSKRGNIIDKFDHPAVQKSMEADLEVISIYDTTITDLERTILKLAQYHDPVSYALLQSVYGIGRIGALTILYEIENIKRFPTVQDFASYARLVKCEKQSAGKKYGTSGSKIGNAHLKWAFSEAAVLFLRGNDPAKKYYERLVRKHGKGKALSILAHKLGRAVYFILKNKEAFDQKKFLR

SEQ ID NO: 266174 - protein, 345 aa, unidentified
MHIASIGIDLGKTTFHLIALGERNKILLRKKFSRPQLLAYTAKLPRSLIGLEACAGSHFLGAALREQGHQVRLIPAQFVKPYRKSNKNDFLDAEAIAEAVTKQNMRFAQLKTQEQLDWQAMHRVRDRLVQRRTALINEMRGFLLERGITFAAQPIHLRKNLPGVIEDAEQNLSPRLRWLLDRMWQEWKQIETDVQAVTDEIERISNDDTRCRQLRQIPGFGPLISTATVAAIGNGAAFRRGRDFAAWVGVVPRQHSTGGKQKLYGISKRGNVYLRRMLIHGARSVLFRVKYDTGGFGQWVRRLAQRAPSNKVVVAIANKLARIAWAVLSSGRDYRHQPLRQLAAA

SEQ ID NO: 266175 - protein, 423 aa, unidentified
MEVMHERCAGLDVHKKVIVACVRLAIGRKVERECRTFDTTTTGLLALRSWLSASGCTHVAMEATGVYWKPIWNILSDGPFELVVANAAHIKNVPGRKTDMNDAMWIADLVACGLIKASFVPDQPTQELRSLLRTRKQMTREQTSHVQRLQKTLEEANIKLDSVISDIVGVSGRCMIEALIAGETNPVRLADLADRRIRAPRQALREALHGRVTNHHRFLLQLHLGQYDALAAAIAEIDHQVGVLIERLDERVEGGQATFRALIRLLCSTPGVSTLAAVVILSEIGRDMSRFPTAGHLLAWAGLCPSQNESAGKRRSSRLRKGAPWLKTLLIQCAWAASRKQDSYYKAQLNRLKSRRGPKTAICAVAASMLTAIYHMLKDGTEHRDLGTNHFDRRSVDTKAKRLVNQLTKLGFQVRLEPLTQAA

SEQ ID NO: 266176 - protein, 354 aa, unidentified
MVRLRGASVDKRRSAMGLHCAVDLHGNNGYYGIVDETGKRLLSKRLPNSLETVLEALEPFREQFEDGVVVESTFNWYWLVDGLNENGYRARLANPAAMEQYNGLKNTDDETDAFFLTEMSRLGILPEGFIYPKEERPVRDLLRRRLLLLGQRTAHILSFQNLVARERGEQMRSNQIQKLWPEEVKEYFADERLVLMGQTNIEMIRFLTKQIRAIESAVLREVKLKPEYEKLLTVPGIGKILALTIMLETGDINRFKKVGNYSSYCRCVRSSRTSNEKKKGENNRKNGNRYLNWAYVEASHFMRRHCPEAKRWYQRKLSRSKQVVATKALASKICKACYFIIKDQVDFDVKRIFG

SEQ ID NO: 266177 - protein, 343 aa, unidentified
MGIDVHLKSWSVTVLSQTSVLKKFSQPPQPEALHKFLAANYPGASYHSVYEAGFCGFWIHERLTALGIDNMVVNPADVPTKSSEKLRKTDAVDSAKLARSLRAGELKGIYTPDSETLEMRSLIRLKNSITKDTTRQKNRIKSQLRYLGIEIPTEFVEPHSCWSKRFIAWLREVQTLTPSGRRAIDILIAHLEELRKQKLEMTRALRALSRTERFAEPLRLIMSVPGIGQTTGMIFLSEISDIARFKNSEQLAAYIGMIPMCHSSGEKDRNGNITVRGHASMRWNLIEAAWVAIRQDPAMTLFHSENCKRMDKNKSIVKVARKLVNRIYFVMKHRQAYVNSIVS

SEQ ID NO: 266178 - protein, 483 aa, unidentified
MKNQPPKSSKKGSRQRTSQKPWSEMNRKQRREMQRKIRSQDLNLEVLHPDAAGIDIGNEVHYVAVPPNRSSEAVRRFGCTTAELRAMVDWLKQCGIQTVAMQSTGVYWIAVFDILEEAGLEVYLVNARETKNLPGRKSDVQESQWLMKLHTYGLLRNSFRPPQGIRTLRTYWRQRSDLVRAAGRHIQRMQKALTQMNIQLANVLSDISGKSGQAIIQAILQGERDTGELAALCNCRVQASQEEVAGSLEGNWQDDLLFVLQQEQDGYEFCQTQMAECDRHLEQCLQQRADRSQGASLRADKRKERRKKKKGNKPQFDLRTALFRMAGTDLTLMDSIDVMTAMTILSEVGWDMSKWKTEDHFVSWLRLCPDNRISGDKIIGKGRLPTNNRVTIALKMAASTLRTSQTYLGAQFRRLRTKLGSPVAIKAMAAKLARLVYRMLRFGMQYVDQGAEFYEAQHRKLQISHLKRKASQLGFQIIEASAA

SEQ ID NO: 266179 - protein, 430 aa, unidentified
MKSNTQNAKIEAITEKTLVLGIDVGSEMHYARAFDYRGIEYSKKPFKFSNTEAGFVTFKEWILNLKERHEKDKVVPGMEPTGHYWFNLGKFLQDNEMKPVLVNPHHVKKSKELDDNNPTKNDRKDPKVIAGLVREGRYMIPYLPDGVYADLRTASNIRFQLQAELTRIQNRISRWFNIYFPEYKTVYGKPDAKSGMLILKAAPLPEDILTLGIDGVNQIWRDAKLRAVGKARAKTLIEAAEHSVGSKEGAVSGKMEIRMLLEDYESRNTRLQEVMVLIEELVRKIPMAEKLLEIKGVGIRTVSGFLAEVGDISRFNNPKELQKLAGLALVENSLGKHKGETTISRRGRKRLIYLLFEVAMSLVSKNQEFRELHNYYTTRRLNPLKKMQSLMAIAAKLIRVFYAILTKGVDYDPKKMVSDIKRPAVYLQAA

SEQ ID NO: 266180 - protein, 344 aa, unidentified
MEHFVGLDVSVRETSLCVVDHAGKIVKEARVPTEPEAIVALLGKGNFTPKRVGLEAGPMSQWLYAGLAEAGLPVICVEAQHMRSALAAQRNKTDRNDARGIAQMMRVGLYRPVHIKTLASQERRLLLTARKLLQAKMLDLEAEVRGTLKNFGLRVGVVGKGGFRQRVRELIEGREALDMVITALLEAHAAVRTQYDLLHKRLLETVRDDPLCRRLMTTPGVGPVIALTFQATVDVPERFPKSRLVGAHFGLTPKRYASGETDHSGRISKCGDEMMRTALFEGAQALLVCTKKWSGLKAWGMAIARRRGLKRAIVAVARKLAVILHRMWLDGTEFRWGKEASATA

SEQ ID NO: 266181 - protein, 331 aa, unidentified
MQSGVLTRALSLPDGGFMSKAIVGVDVSKGWLDIARADSSEVVRIANTQAAIAAWVLEARVDGLQLVAFEPTGGYERDLRDVLRAHGVVFVRVHPNQVVAFRKSRRIKAKTDRIDARLIAQFAAEELLRRGLPIAIAGDEALRELAARRRQLVDTLQAEKCRLAIARSAVVRASLTASISGLQASLEAIQVALLSHITANPELAQQHALLQTLKGIGPVSAMTLIAELPELGRLSGKQIAALIGLAPQTHESGKSTHRAATGKGRGDIRRVLFNAARCAIRHNHIMRDFYRRLVEQNKRAGKVALVGVMRKMLVTLNAIARDQQPWKHHAA

SEQ ID NO: 266182 - protein, 380 aa, unidentified
MSIRNSAPAAGAENSAVMFVAIEMSGKRWDVVVHTPVSDKLSRHTLEAGDGAALLEFIARIRGAVARRLGAAVRVLSCYEAGYDGFWLDRLLRRHGIENHVVDAASIEVNRRARRAKSDRLDGEGLVRTLLRWWRGDRQACHMVRVPSVAEEDAKRPSRERERLVKERVQHVNRIKGLLATQGHYGFHPLRRDREARLAQLTLPDQLRAELQREFARLALVVQQIAGLEAARDAVLKPGVVAADRATTRIRKLFTLKSMGPEFSTGLVCEVFYRDFTNRRQVGSYFGLTGSPWRSGRLAVEQGISKAGNPRARTLMVEAAWMWLRYQPGSALARWFRERVGEQKGRMRRIAIVALARKLAVALWHYLEHDILPEGAVTKS

SEQ ID NO: 266183 - protein, 330 aa, unidentified
MDLGIDAHTRYAQVAVVDTDGNLQHEFRLPNDRLDELAEEYAGSDAVIEASGNYRPIYETLNEHLSVTLANPSKNRLIADATVKTDRLDAKRLAHMLHAGMLAEGHVPADEIRELRDLVRTRKGLVEKRTAEKNRVRAVLKRTDNAYDSELSGPNGREFLTELSLSEAGRTIIEAHLSAIDVYDEEVASLEEQIERHVLESAAAQRLLSIPGVGQFTAAVVVAEIGENERFDSDKELVSYAGLDPVVHQSGEKEIQGSISKEGSAPFRWTLVQAAHTAVRCDDYFGNFYTRLKRRKNHQIAIVATARRMLVSIYYMLTREEVYDPPEVSA

SEQ ID NO: 266184 - protein, 370 aa, unidentified
MSQSSTLFVGMDVHKDTIAVAYVAQEHGADVTYLGTIGTRQCDIDTLIRKMQSKAQHLIFIYEAGPCGYWLYRYLQKKGYDCWVVAPSLIPKKAGERVKTDRRDAVQLARLARSGDLTPVYVPKVDDEAIRDLTRAREDVISDLKDAKFRLKAFLLRQDIRYAGRANWSPAHLRWLAEVVCPTPAQQIVFQEYVRTVTEHTERLGRLEQELRAQATTWRLHPVVDALQALRGVQFTVAVTMVAEIGDLTRFDHPSELMKFLGLVPSEYSSGQRRQQGGITKTGNTHARRVLVEGAWAYRYPAKVSRHLQLRLENQPKVIQDISWKAQVRLCKRYQRLVAKGKHANVVTVAIARELVGFVWAIAKEVPLTL

SEQ ID NO: 266185 - protein, 401 aa, unidentified
MWDVGLDWADTHHDVEVPYLAGKRVGARRFAHSHAGLNELKQFVLGFAAHPEQLACIVETNHGLLISFLLDAGIPVYPVNPKTANQLRKAAGAKTDQIDAHLLARIGRLDLAELRRLEPDSPIVAELKTLTRDQDALVQTQTRLAKGLTACLKAYYPAALKLFAKLQQRSTLLFLQAYPTPQAASVEEITATLRTGKHTNPRRVAPKIFEELHRPHLVANEVMVRAKSRLMLSLVKQLLVVIEDIANYDQEVRTLFLTHEDHGLWRSLPRAGKRLAPRLLAEWGDDRTRYTDATSVQTLAGTAPVPFQSGNYAKAHKRFACSKPLRNALHQFAWQSTRAEAWALAYYQRKRAEGKTHSMAIRALANVWVRIIHRMWVSHPCYQTATFEAAKLAHAPRQHAA

SEQ ID NO: 266186 - protein, 337 aa, unidentified
MKLYCGIDLHSNNHYISIIDEENNRLKGKRISNDLSQTLTILEPYKHDLQGIAIESTFNWYWLVDGLMDADYSVALVNTCAVKQYEGLKHTDDQYDAYWLAHLMRLGILPTGYIYPKEKRSLRDLLRKRMQLVQCRTSHVISAQAQVWRSTGIRLKSQYIKKGTDDLLSGITDQNLLLSIQSNLTVIQLLNAQIDTIETAVQSQCKDRVEYTQLKTVFGIGDILSQTITLETGDISRFQKVGNYTSYCRCVDSKKTSNGKKKGSGNKKSGNKYLAWAYMEAANFAIRFYEPANRFYQRKCSKRNAIVARKSLAHKLARASYYVMKDHVPFKSERLFS

SEQ ID NO: 266187 - protein, 307 aa, unidentified
MSDVPCFVGIDVAKAQLDIALRPCGERWAVPNDASGVTMLVDRLQACHPTLMVLEATGGLERLVTSALATAGLPVVVVNPRQVRDFARATGQLAKTDALEARALAHFADVIRPPPRPLPDTQTQELRALLGRRQQLSVMRTAEQNRLTGTSGRLQTDIAAHITWLNERLATLDDDLETVLRGSPLWRENDDLLQSAPGIGPVCARTLVLELPELGTLTRQQIAALVGVAPLNCDSGTLRGRRTIWGGRAHVRTVLYMGTLVATRYNPRIKAFYERLLTAGKVKKVALTACMHKFLTILNAMLKHRTP

SEQ ID NO: 266188 - protein, 376 aa, unidentified
MTEAYDGRQVVGMDLHRRRSVLVRMTEDGRKLETVRITNSPAALRAVIARAGTNPRVVIEATYGWYWAVDVLEAAGAEVHLAHPLGVKAYSYRRVKNDERDSADLADLLRMGRLPEAWIAPPEIRELREITRYRHKLVKARTSYKDQVHGVLAKLGVPVTHSDIFGVHGQDWLDELPMPQPYAGKVASLRQLAGALTAEITLLDKVLADLLDGHEGYHAIQALPGIGPVLAAVIVAEIGDIRRFPGPGQLGSWAGLTPRHYESDTKVIRGHVTKQGSRMLRWAVTEAIQRQPAGSRPREVKDAIIARRGKEAKNIAKIAAARELLTLVYYGMRDGRVRRLARQQRTSALSLRPSRIAANDARAASGARSGGPVWLW

SEQ ID NO: 266189 - protein, 340 aa, unidentified
MRIIGCDLHAAQQTIAMLDGDTGEVVERTLTHDGDTVREFYASIPRPAVVGLEATGSMGWFLRLLEELAIPCRVGHPAAVRKAETRRQKHDRRDADLLLKLLVEDRFPAIWMPSTEQRDLRALLLHRHQWVRMRTRVQQALQAMALSHGLRRGPTLWSRDGQAALAALPLPPHAAHRRTELVALYQHLAAQVDQLDARVADAVLPRSGATRLMTHPGVGPVTALATEVFLGDPGRFADGKALASYVGMIPSEYSSGSRQRLGALSKQGNPLLRFLWGEAAMHAVRRDPELQRFYRRKLAQKGLGKARIAAARKLGIRLWIMLRDQIGYEEFCRRSPRRPA

SEQ ID NO: 266190 - protein, 409 aa, unidentified
MAQIERVVHPRWTRFNGLPHGEVVLSIVDYMTMSAPTTRVDLVDVKPNQGSGRKEPNMLIIGCDYHPSMQQIALVDTETGERGERRLMHRDGEAERFYRELKQRRVEVRVGMEATGYARWFERLLAELSFELWIGDPARIRARRVRKQKTDRQDAQLLLRLLLEEDGFPRIWVPSPENRDLRQLLWHRHRLVQMRTRIMNQLQAVAMNEGLRRKRALWSEAGRKQLESFLLAPWATRRRKDLLELMDRLNPTIRELTGAVEKEAENKPEVQLLMSHPGVGPLTGLAFVLIIGTPQRFHCGKQMGSYLGLIPCEDSSADRQRLGHISKQGSSLLRFLLVEAAQVAARVDAEWRRRFLHLAMRRGRKIAKVAMARRVAVGLYWMWRKEWDYQQVVKFGSHVGQLELRHGVQ

SEQ ID NO: 266191 - protein, 412 aa, unidentified
MEVIIENCCGIDVHKKTIVACLMKGKPHEKPKTTIKTFTTMSRDILACREWLESEGCTHVALESTGVYWKPVFNILEESMEVILANARDIKNVPGRKTDVKDSEWIAQLLRHGLIKGSFIPPKPIRQLRDLTRYRQKLIQQRSSELNRLQKFLEDANIKLASVVADINGMSAQEMIQHLIQNDLSPREIANLAKGRLRNKLAELEAALEGHLTDHHRFMLRVSIQMIASYDEAIEKLNTEIDKKMEPYRNNSEKLQTIPGVKKKTAETIIAEIGVDMTQFPSHAHLSSWAGVSPGNNESAGKRYSGRVSPGNKWLKSSLTESAWGASRTRGTYLKARYHRLASRRGKKRATLAIAHTILIMAYHIIKEQCTYKELGADYFDRLNEQYLIKRLTSRIRTLGYQVEVKKEPAIA

SEQ ID NO: 266192 - protein, 310 aa, unidentified
MIIHPGYVGIDISKAHLHIFDASRGRQQRCANAAKDIASLIRSWKRQPPFILFEATGHYDALLRRRLAKAQIPFARVNPARARDFARAAGYLAKTDSIDAKMLAAMAQCLHPEPAQPVDIDRERLARLHKRRDQLVAMRQQERTRASECACPHTNADISRHLTWLDREIDTIEARIQTLIAASTNLAAAADLMRSVPGVGPVTAAALLALLPELGARSPKTIAALAGLAPFNVDSGQCRGLRRISGGRKRVRDALYMAAVAASRSKSRFATFYKTLRNAGKPPKLAFIALARKILTTLNAILRDQIAFQP

SEQ ID NO: 266193 - protein, 489 aa, unidentified
MDLLVERCAGLDVAKREVVACVRTPEPGTGGQRRQVVRTFATFSAELEALADWLQAEGVTQVVMEATGQYWKPIWYVLEERGFALLLVNARHVKILPGRKTDVADAAWLCELLECGLLRGSFVPPPAIRRLRDLTRYRKKLVQAHTAETQRVHKTLEDAGIKLGSVAADVLGVSGRAMLAALVAGERDPAVLAALAKGKLRKKLPQLRQALAGRFSEHHALLVELSLGHLEHLEGAIARLDGRVDEVIAPFAVARDRLDTITGVGKRAAETIIAEIGADMRVFPTAAHLASRLRAAARATTSPAASAAPASPPRATAGWARYWSSAPGRPPTPARPTWPPSSGGWPAASAGRRPPAPSATRSWSSPGTCSATTATTTSLVVTGLPAAATTIGTRPTWSSSSRRSATRSPSNPPPRLHDRGFSLQSAGHRLLHRPAAGHDRGLRRRARPGHPGQLPARPRLDRRRPPGQGPTGPRPRAGEDLGVRRAPRG

SEQ ID NO: 266194 - protein, 396 aa, unidentified
MRYAGIDVGAERHMVAMVGEEGEVLCRSSPFGEDASGYAHLFELLGPAEGCLVALEATGHYWRNPFVALLGKGYAVAVLNPLRTRRFAEEELQRTKTDAIDALGIARFAAQKRPPATQLPDIATEELRELARLRERLQEDFASRLKEVTYRAVDLGFPEFTRHVRTLESQLAATILSRYPTAASFRGASVKKLARIVYDGSHKIGEELARALIEAAAKSVGSHHSEPYRLRIKYLCEDLDVLRRRLKDLARDIERKLHDHEVGKLLTTIDGVGPLTAACLIAELGDPARFRSAGAIASYVVAPRLRQSGKKRFFSGSPTIPLGNARLRKALWMVVLNAVRCNPWLRQYYERLRAAGKPGKVAVIAAMRKLLVAVWSVATHRRPFVPIMPAPITKNT

SEQ ID NO: 266195 - protein, 438 aa, unidentified
MLKVIHPNAGGLDVGAEEVYACVPEDRDGQPIRRFGTTTPDLHDLAKWLVRCKVDTVALESTGVYWIPIYLILSDYQIEVQVVNAQHVKGVPGRKSDVKDSQWLQELHSVGLLRGSFRPPNDIVILRSYLCHRDSLIEHRAVHIHHMQKALLQMNVQLTQVLTDVTGMTGMAIMRAIARGEQDVDTLLTLRNKRCQHSPEDFVKALTANYRVEHVFALKQSLVLYDAYTNQIGLCDAEIAQHFAVIKPSHDQDDLPPLDDSRKRNTHSKNTPGYDARSQMYRITGVDLTEIDGLHDSTAQTILSEIGTDMSKWKSAKHFASWLGLAPRNDITGGKVKRSRTLHGNRRANQAFRMAAQAVGKTRTALGAFYRRRRAVAGPQQAIVATAHKIARIVYHLLKHRQPFHPLSAADYDQHQLDRERKSIERRATKLGLKLIPA

SEQ ID NO: 266196 - protein, 395 aa, unidentified
MAIDVGKNEFAVSVTDAARSKLLKPRLGCPMTASSLRQVVGAIGQLLPVDARVKVGIEAAGHYHRPPLAPQAWPAGWELLELNPGHVTEQRRVLGKRTVKTDAVDLEAMTELLLAGRGLPIRSSDTVLSELAAWSAHRTGRVALRTATKNQLLGQLDRSFPGLTRALPDVLGTKVGRLVAAEFPDPTRLAALGRTRFIRFGATRGLQIPRTTADKLIAAAKDALPMPDAAVARAVLAADLALLADLDAQIDAATAELARLVPLSPFRTLLTVTGWGAVRAGNYGGALGDPARFSTSRQVYRTAGLNPIQYESAGKRRDSVISREGSVELRRALIDLGLGLWLNDPAAKQHAAALRARGKKGLVIACAMAHRANRIAFALVRDQAPYDPTRWAREE

SEQ ID NO: 266197 - protein, 379 aa, unidentified
MVKVSIKYSFISDDMLILGCDVGSETHYMRAIDTRGRELSKSAHSFNNNQEGFRSAKEWAVRIAAEHDKSQIVLGLEPTGHYWFCLATWMITNGISVVQVNPYAVKQTKEVEDNSQLKDDRKDPKLIANLVKDGNFGMPYLPEKIYAELRRLSMFRDQLNEDRIRTINRMHREMKIYFPEYKDALGKVDGAFSLELLKEAPFPEELTALGEEGIRQIWHAAKLRGRGYSRAGEILQYAKASVGIKDGSIAGKAAVKWFVQKILELDAELAVIENQINRKCQEIPHTGNVLEISGIGENTLSVFLQRWGDISRFDDVKEIQKLSGLGLVACSSGKHKGETKISHRGRKRLRYWLFQAAKVSSGPCRGIQRTPYVLYDTSR

SEQ ID NO: 266198 - protein, 349 aa, unidentified
MGPCNHGEPQDVSLKMTAICIVDRTGKIEREGMVASDPAAIAAFVRLHAPHVARIGLETGATSTWMWTELNKMGLPVICIDARHAKAALKMQINKSDRNDAVGIARIMQCGWYKEVRVKGLDSHAIKAVLVSRALLVKIKRDLENQIRGLLKNLGLVIGRAKMNMFVVRAAELIEDRPELGAAVEPLLKAREAVEKQIADLDRKVMRLARNDVQVRRFMTAPGIGPITALCYLATIDDPTRFKRSRSVGAYVGLTSRRYASGEVDWTGRISKCGDPMLRSYLYEAAGVLLTRVAKWSVLKAWGMRVAKRSGLRKAKVAVARKLAVILHRMWIDGTEFKWSSKEDATQPA

SEQ ID NO: 266199 - protein, 335 aa, unidentified
MDRQYVGIDFHRRRSVIVRKDSAGKKLSSVRVPNDAAAIAAVVAEAGPGPEVVIEATYGWYWIVDWLQEQGATVHLANPSGLNWGTRRVKNDERDAIDLIDMLRLGRLPEAWIAPPATRELRELVRYRAKLVALRSGLKAQVHAVMAKEGVLPSVTDMFCKAGSVQLDDMALGDAYTIRVESLRDLIEVYDREVTMLEGRIRQRLRGHRGYRAIQAINGIGPTMAAILVAEIGDVTRFRSAPALCSWAGLTPKHKESDTTVHRGQLTKQGSRLVRWAVIEGTVRYHGGGKLAADYRKVAERRGKNKATVAIARKVLTLVYYGLRDGEIRCLAKAA

SEQ ID NO: 266200 - protein, 363 aa, unidentified
MVEFMTVTVGLDVHARSIRLAAVRADELLEERTLPYDEEAVERLLHRWPVVRCCYEAGPTGFGLYRHLVERGIDCAVVAPGLVPRRPGDRVKTDPRDARKLARLLAGGLLEPIHVPSRELEAARDLVRAREDARLDRMRDRHRLSKFCLRHGRLLPTTAWTITRRKWLSEQRFDYAAEQITFDSYLHAVDLVDARIEALERAIRETAEQGPWRQLVARLRCLRGIDTLTALALVAEIGDFSRFHTAEEFMAFVGLVPSEHSSGEHRRQGAITKVGNSHVRRLLVESAWHARRRPKVGYELARRQRGQEAVVIERAWRCQQRLYQRWQRMAGRGKPQQKIVVACARELAGFVWAIATEQPLRTT

SEQ ID NO: 266201 - protein, 383 aa, unidentified
MKAVCGLDVHKDSVYLCILSEFGELIEKVFGVLTYQLEEMRDLMLHHHVVEVSMESTSVYWIPIWRVLSPHFKLNLANPYFIKQFPGRKSDVKDAQWIAECTMKELIRGSFVPPETIQQLRQYDRRIFDLNEEIVRKLSKLDAVLQRCNIRLSNYVSNVDSKSYKAVVRAISQGITAPEELVKLIHGRIINHHGIDVITASLKGVVSLAEIDMISQLRDELDMAEAHKEKCQAKMLEICEREFPEELKRLQTIPGIKERAATSLIAEIGTDMNKFETANHLASWSGLKPRNDESNKKIKSRSITHGNVYLRKTIIECAWAASRTKGCFFSRFSYHQTQVRKKNKMKVLVAVARKMLIAVWHVLHDNTIYIDFTTDRKTSRTKG

SEQ ID NO: 266202 - protein, 425 aa, unidentified
MNERDRSRLEAFRQLRQEIRGSQEYLIVGIDVAKDRHHAFFGTATGKVLLRRLVFKNDRQGFERLVVQTEALGVAHGLGKVVYGMEPTADYHKPLGEYLIRQGHQVVLVSGRSVRRNRELLDGRWDKHDVKDSANVADLISQGKCLYYEYPDGRLRDLRGLLSVKRRLKKQEHGLRVRIRNHLLAQYFPELDGYFGPEGLAIVRWCLFPSRIREVGYEEFVRVVAPGRRHLSQERRLRAIWEKASISVGCKGGEAVVFEARTMVEELRRTRGVIKETDQQIQTICQGFLEYAYLLTIPGFGPDVSSKVLGAIGDPFRFEKASQVLKTAGLDLSANRSGARSDQAIPVISKNGKSDLRYALYQAAFIASTKNRDFMMWFTHKLQKRQREKGIRTKMRVKLAAKMLVIAWTLMKKREPFDPSYLGVA

SEQ ID NO: 266203 - protein, 348 aa, unidentified
MNYIGIDLHKKFSQVTVLGEGGEIKERVKIDNREEVLNRHFNNFDEPSKAVIEATFSWGWLADYLQSRKIEVVLAHPQKVKAIASSQIKTDKVDSLILARLLRADMIPTAYFCPKPLREVKEVLRSRASLVGLKTQVKNKIHSLLHKYNIREDEKFSDLFGKRGKEFLNSLELGEYTTPVLKRYLETLSFLEEEIKKTSVDLKQVFEKDEVARFLERLPGIGFYTALILSKEIGNIDRFFSAKHLCSYAGLVPSTYQSGEHTRHGKIKQGNKYIRWVLIEAVPKTIGKDKVLNAFYQKIKAKKGHNKAKVATARKMLGQIWYLLKTKQSFVDPETGSPVFFSGAFPHH

SEQ ID NO: 266204 - protein, 348 aa, unidentified
MIVLGADMHKCSHSIAAVAGETGELLDDKLVKVGERGFDAALAWARALAGERVWALEDCRHVSGAFERFLLARGERVVRVATRLMAGERRGGRERGKSDLIDALAVARAALREGLERLPLAELAGVELDIRLLVDHRERLVRMRSALNNDLLWHLHDLWPEQTLPGGALLSNKWATRMGRRLQRHEQSARVRIARNELRQLRELSRTIDALEREIAELVAKVAPQLLAEPGFGPLTAGKLIGEIAGVERFSSDAKLARAGGIAPIPVSSGKTNRHRLDRGGNRQINTAIHRVAVTRARCHPETRAYIERRRSEGKTNRDAIRCLKRHLARRVWLLLQPQDPRPSPSTI

SEQ ID NO: 266205 - protein, 397 aa, unidentified
MTHSSPQSPLDPSVYRFIVAIDIGSEQCSFCVFRPDKSLLVKATEMANASAGFAQLHERLSRLGGSPEQVLVGMEATSRYGENLFQFLVQRGYHLCLLHPAQTHWFAKRRGLRAKTDRLDAQTIGHVLLSGEARVGYVPNDLITSYRELVRLHGQLSEDLTRHKNEIHALLQVAVLTRYPSAQAIRAAGVETLTQLLRRFAPRNYGRETAERLVYLAQHSVSSPMALEARQLSLQILCQQLTQIQSHLAQLDEELEKLRVRDPESQLLQAIPEFGPQTVAVLRAELGDVARFHRTDQAVAYAGLDIAIKESGKWQGQAKLSKRGSGLLRQMLYLAAVRSVRFEGSAFGIYYRRLVARGMPKGAALVAVMRKMLIVAVHVLKTKEVYDPSKVAAACAG

SEQ ID NO: 266206 - protein, 326 aa, unidentified
MSASVILGIDVAKQKFDVALLRGGKFKNKVFKNTKEGFEDLSLWLQKQDVSHVHACCEATSTYGEGLALYLHGAGHMVSIVNPSRIKGFAQSELLRTKNDKVDAGLIARFCLAMRPAAWMPPAPAIRDLQALVRRADALIAMRIQEENRLGVCHVSIEPSIKEHIAYLEQEIEKIKDQIRKAMKHDPELKSKRDLLVSIPGISDTTIAVILSELNGLEYFDNPQKVVAFIGLAPKDTLSGISVKGKPRICKIGNSRLRRALYMPALAAIRHNPIISIFYNRLKEKGKKGKVIVCAVMRKLVHMIFGILKSGMPFNLNYHANKINFA

SEQ ID NO: 266207 - protein, 412 aa, unidentified
MEVLYARCCGLDVHKETVVACVRIQEPRGRAKTTVRSFGATTAELLELHQWLTEQGCTHVAMESTSVYWKPVFNLLEGSFEVLLANARHIKAVPGRKTDVKDCEWIADLLAHGLIRASFIPPAPIRELRDITRHRKSLIRDKATLANRVGKLLETANIKLSNVVSDVLGVSGRAMLAALIAGERDPKKLAALARGRLIPKAEQLAEALRGGFSSHHAFLLEQLLKQIDHLAELIAACDARVVDLCQAHREPLQRLRTIPGVAQRTAEVLLSEIGLDMTRFPTAGHLASWARMCPGNNESAGKRRSGATGTGNNWLRTTLLESAWAASRSRKTYLGAQYRRIARRRGPKRAATAVAHSILVIAFYVLRDGVEYRDLGPDYFDRANAAKLTKYHLRRLAELGYELPQPRAQPGA

SEQ ID NO: 266208 - protein, 346 aa, unidentified
MEQISRIGMDTSKRSFQLHGVNTAETVVLRKKLRRKEMVTFFEKLAPTVVGIEACGASHHWARLLQSFGHTVKLIPAQLVKPYVKRGKNDMADAEALCEAMSRPTMRFVPIKTAEQQAALMLVGLRDRLIRNRTQLCNAIRGYAAEFGFTAAKGVANVRPLLERIQADEGVPDLARELFAAQAEEYAQLEEQIAEISGKLMAWHKADECSRRLAKIPGIGPIGAALLMMKTPAPELFRSGRQFAAWIGLTPRDHSTAGKVKLGVITRAGDEALRAVLVSGATAVIRHAVGCKGRASPWLIDLLKRKPPKLAAVALANKLARIAWKLMVTGEAYAATSTPIASAAAV

SEQ ID NO: 266209 - protein, 326 aa, unidentified
MVGRVVATTSVPTTALGYEQRIEWARGFGRLIRAGIEGTGTYGAALARRVQEHGVPVLEINRADRSRRRLRGKNDSTDAENAARAVLAGEAKAIPKAQSGVVEAMRAVSMARRSAVKAKTQAINQLRALLVTAPASIRATLWKVKPEQCVARCARLQSLGDTPLLKALTSTLRLLARRWMSLAKELHQLDAALAELTQRAGRRLLARFGVGPQTAATLLVTAGDNPDRLRSEAALAALCGASPLEASSGKTTRHRLNRGGDRAANNALWTISMVRMRSDPRTRAYVARRTAEGLSTKEIQRCLKGYIVRELYPLILADLADPIRES

SEQ ID NO: 266210 - protein, 357 aa, unidentified
MKIVGCDLHARQQTLAMMDTETGEFTEKTLLHEGNAVREFYAALGSPVLVGIEATGAMQWFLELLEELGIQHRVRHPAKIRAQETRKQKHDRRDAGLLLKLLSEGRFPEIWMPSSEQRDLRTLLRDRDQWVRMRSRVQHTLQAIALNHALRQGRGLWSAQGQSALQALPLPAYTGQRRNELLGLYRRLQERIQELDKEVEGQARQRPQSGRLMTHPGLGPITALATEVFLGDPNRFPTGKDVASYIGMIPCEHTSGKRQRLGKLTKEGNKLLRYLWTEATMHAVEKDGELKRFYRRKLIQKGMGKARIAVARKLGIRLWIMMRDQIDYQEFCRRGQLRQKGKAHAGMPDYQHGPAMQ

SEQ ID NO: 266211 - protein, 375 aa, unidentified
MATIARLGIDTSKSLFQLHGVDEREEAVLRKQVRRGQFLGFVAKLAPTKIGVEACGASHYWARQLQALGHEVVLLPPQHVKPYVGRNKNDKIDAAAICEAMSRPRVRERFVAIKSAEQSAAQMLLGTRDGLLHRRTQLSNTIRGHAAEFGLVTPKGLAHIKPLLERIAADDTVPALAKELFATLDEEFAELAPRIARLDKKLKAFQRADELCRRLVEVPTIGPVIASSMVIKIGNPAAFRSGRRCAAWLGLTPKDHSTAGKMRHGGITRAGDEGLRAALVSGATAYIQQVKRGRTRPSPWLAQLLKRKPEKLAAVALANKTARIAWKLMVSGERYDRARAEAREGLGATQHRGSTPSPSLHPHTADHGASTMTVA

SEQ ID NO: 266212 - protein, 416 aa, unidentified
MRRVIGIDTHRTFGEVVIWEDGLLRHAGRIGMTRTALEGFGKDLLATDEVVIEATGNCMAVSRVLTPFVKRVIIANPLQVKAIAHSQAKTDKIDAGTLANLYAAGYLPEIWTPDARTERMRRLVGRRYQVVRHRTRIKNEVHAILYAYLTPHCPHADLFSRVGRAWLLKQPFPDDERIAIERHMRELDRLGEDLAALDKEIAGSALTDPAIKRLITITGVNVTVAAGLVAAIGDIRRFVSPQKLVSYFGLNPRVRQSGLGAAHHGRISKVGRSHARAMLVEAAWAAAKAPGPLHAFFVRIRAKRGHQIAAVALARKLTVLCWHLLIKETDYLWMRPALLANKVRNMELQAGHPQKKGNRRGPTYAYNVKELREREMNVARRAEAAYENFVGQWQPRGPKNGARAPQNGKARNNQAT

SEQ ID NO: 266213 - protein, 346 aa, unidentified
MAIAVLGIDLGKNSCSVAGLDGTGRVVLRRRLTRESVVRLAGTLPACVMAMEACCGAHHLGRVLREQGHEVRLMPPEYVQPYVKAQKNDERDAEAIAEAATRPTMRFVELKSEAQLDAQILHRARSRLVGQRTALINQLRAVLLERGIMVAKGRRRLEEYLIGLLDEDGDRPATLSPRTCLLIEDMRLEWSELDQRIAALTAEFVARAREDQAARRLATIPGFGALNATALVAAIGTGETFRRARDLAAWLGLVPRQATTGGKPRLLGITKRGNTYLRTLLIHGARAALPSLSASQSPTGEWLRGLIGRAHKNKVIVALAGKLARIAWAVLRSGESYVKEGRPVAA

SEQ ID NO: 266214 - protein, 392 aa, unidentified
MYIVGIDIGKNHHEASIVSPEGKQIGRSLRFATTHKGADSLMSFIFKNIGNSPCVFGMEATGHYWYPIYSFLKAKGYTIYVINPIQSDSLRKMYIRQTKNDSIDSFLIAEVIRFGQFGTTSMADENILAMRQLCRYRDSVISSRTEIKLRIGTIMEQIFPEYEKQFSSLWVSTSMGILEKYLTPENIENTPIDELFEIIKDKSHNRLTKAKAISIKEAAADTFGIKIAQDAFSFQLKQLIDRMNFLDKQIEALDIEIMKYYEQFDCYLHTIPGIGIIGAATILAEIGDISRFKNSSALVAFAGIDPTVRQSGEFNSTHNHMSKRGSPYLRHAIFLAATTCSFHNSPLNAYYKKKRDQGKHHLTATGAVARKLTTIIYAVLRDSKPYEPKKFC

SEQ ID NO: 266215 - protein, 355 aa, unidentified
MDSVKYIGMDVHKEAISIAVLNSSGKLVMECVIETKAITILQFVQGLRGSLQVTFEEGTWAAWLYDLLKPHVTKIVVCNPRRNALLKEGSKSDRIDARKLAELLRSNLLRPVYHGEQGVRTLKELARSYLTISKDLGRVMSRLKAIYRSWGIPCTGKQVYAPRYRSEWLGKIAEVGVRRRAELYYQQFDALRLLRQEARRDLLAEAKKHSAWKLLREIPFIGPIRAALLIALLQTPHRFRTKRQLWTYSGFGIETHSSAEHRYVDGELQRSKKQPSIRGLNRNHNHDLKNLFKSAATIAAAKAGPFQEFYAALIAKGIKPEMARLTLARKIAAITLVVWKKGVRFDAQYLKPQTA

SEQ ID NO: 266216 - protein, 328 aa, unidentified
METVGIDISKLTFDARVHTSQAYQSFDNENKGYQDLISWAYENSSFSKEKIIFVFEHTGLYSHQLSVYLTSQGIPFLMVPGLEIKRSLGMARGKDDKKDATKIAQYAYRLRDEIVPSKLATEEVMSLKRLLSLRERLVKQRSGFKSSLKEQKRVLPKKGNETLLSTQEKMIRYLSKQIDSVEKQMEGMIEENESMSRNFRLLTSIKGVGPQTALFMIAYTANFTKFKNWRKFASYCGIAPFPNSSGTSIRGRTKVSNLANKKIKSLLDLCAKSSIQHNPEMKQYYNNRIETGKNKMSTINIVRNKLVSRMFAVIARNEPYINLMKYAA

SEQ ID NO: 266217 - protein, 384 aa, unidentified
MVTGITTLQKEVTAMSSIIYVGMDVHTTNYTICCYGITTGEIFARATMDPDYMNIVKYLDRVDRELGGDIQFKCGYEAGSLGYSLYHQLTRQQVECTILAPTTMATTRNKKRKKNDKRDAADIAKCLAFNTYSPVYVPTGEDNAVKEYIRMRNDAKDMLKRIKQQLLAFCTRNGKRFTEGSTWTQKHLVWLMKLDFGDAILNETLREYLTLYHQAFDKVELFDRRISEMSKTERYEVNVKKLECFIGIKDHTALATIVEIGDFARFPTAQNFSSYLGLVPGEDSSGSSVQITGITKAGNSHVRKLLIEAAQCYSRGAVGAKGKALKARQEGNDAKVIAYADRANERLKRKCYRIMFKSKRNIAVTAVARELACFIWGMMTDNIA

SEQ ID NO: 266218 - protein, 411 aa, unidentified
MEAAVITAVGIDVSKSKSTVAVRRPGGEIVLRPFEVHHTNSDLKKLASTLKKLGGDIRIVMEHTSTYWRPIALTLKEAGFFVSVVNAMLIHDFSDNTIRKLKTDRADALKIANYALTFWDTLPPFNNEEETRLLLKMQSRANERITATATALRNGLIALADQTFPGVNIAFDPNTKNANGHEKWVDFFLRYWHKDCVCQYSMEAFTESYRGWCKRKNYKFRTDTAHKIYLLAQEGMATLPKCESTKMLITQACKSLNAVCEAKQSTQLEMQRLAAMLPEYEVVVQMEGAGPITGPALMAEIGDVRRFKNKKALVAFAGIDAPPFQSGAFESKSRHVSKRGSPHLRRTIFIISNIILTRSNPENAVYCFMDKKRSEGKHYYVYTVAGSAKFLRVYYARVTEFLRSQPSSDAC

SEQ ID NO: 266219 - protein, 298 aa, unidentified
MQIKSIGIDLGKTTFHLIALGTRAQVVIRKKFSRSQLLEYTANLPSSLIGMEAGVGSHFLGRALREQGHQVRLIPAQFVRPFVKSNKNDYRDAEAIAEVVERENMRFVPIKTEDQLDLQALHRVRDRLVARRTSVINQIRAFLLERGISFRKGPASLRRQMPEILENADAKLSTAMRRLLDFLWQEWKGLQLQIESLNVELEQVASSNPSCVRLRQIPGVGPLISTAVVSAIGNGAAFKRGREFAAWLGLVPRQWSTGGKAKLLGISKRGNPYLRKMFIHGARAAVLRVKREGSSLGK

SEQ ID NO: 266220 - protein, 466 aa, unidentified
MRQRAQADKRSMSTTSSSPLELLNANAAGIDIGAAEHYVAVPPGRDRQGQDVRSFKAFTADLHALVRWLKACGIDTVAMESTGVYWIPLFELLEAQGFEVHLVNPRSVKNAPGRKSDVLDCQWIQQLHTYGLLSGAFRPEESICVLRSYVRQRAMLIRSAASHIQHMQKALDQMNIKLHQVVEDITGATGMRIIRSILEGQRDALSLAQLRDARCKQSVATIAAALQGNWRKEHLFALKQAVALFDFYQSQISACDSAIEEHLHSFQADDSRPPKAPGAGGRGGKHPFAFDAHAHLQRISGVDLTRIEGINVTTAMGIIAETGLDMNRWRSEKHFGSWLGLCPGTKVSGGKRLSSRSKPTANRAAHLFRLAAYGLHRSKGAIGAFLRRKKAQLGAPKAITATAYKIARIFYTMLKHGTEYAALGQDYYEKRYRNRLLNNLKRKAQLLGYQLVQQTEINDKSVNTPA

SEQ ID NO: 266221 - protein, 316 aa, unidentified
MTEEAVCIGVDVAKGTLDLAVSNSTETRQFENNHEGITSAATYIAGLKPTIIILEATGHFEMPLAAVLQTNHLPVVIVNPRQVRDFARATGVLAKTDKIDSRILALFGLQIKPQVRLLPEQKVRDMESLLSRRRQLIEMLTAEHNRVLQADGSIRKGIKIHIRWLEKAISAINDDLDSQIKNSPSWREKDDLLKSVPGVGKVVSTTLLIELPELGQLNRRKIAALVGVAPLNRDSGTMRGKRTVWGGRAKLRAVLYMAALVGVRHNPVITSFYERLLKVGNAKKVALVACMRKLLTILNAMIRSNTVWQEAAMETK

SEQ ID NO: 266222 - protein, 318 aa, unidentified
MNTENVWVGADICQATLDVYILPLGKLCQYANTAEGIEAFIKHLKTLSPKCVVFEATGGLERLLALSLQSHDIPMAQVNPRKIRAFATALGKAKTDTLDAQVIAEFARSIRPTPQKLPSQAARKIRDLVTRRRQLVTIKVAEQNRLSRSPESIKADIDEHIKQLEARIKKLSEQIQKLTTQQTDWQRKRKILLSVPGIGPVTCAVCLAELPELGLLTDKQIARLVGVAPINRDSGQYKGKRMIQGGRAQVRCGLYMAALVATQHNPVIKAFYQRLLERGKLPKVALTACIRKLVVILNAMVHHNQLWQMPISTEPQPS

SEQ ID NO: 266223 - protein, 463 aa, unidentified
MARSNKSKKQKMPVRSLKTIQPYAAGIDLGSREHWVACPPLKDNTPNVQRFGTTTPELLRLADWLKEQKVKTVAMESTGVYWIPLFEILDSRGFEVILANARQVSHVPGRKTDMLDCQWLQLLHACGLLRGSFRPSDDICRLRALFRERNTMIGQRSDWVRRIQKSLDQMNVCVHHAVSDITGVTGMAIIRAIVDGERDPRTLAQMRDRRCKKSEKQITEELTGNWRPEHLFNLRQALKMYDQFYQIVTEYDTEIFAYIKTLQPDVDDDQCVPPPASKAKARNIAKKGQEPMRQALYQLTGFDMTIIDGIGVDTASVVLSELGFDYSAFPDEGHFVSFLRLAPNLSISAGKKVPSKLKGTTTTRVATALRMAALALRNSKTALGAFYRRISRRKGASVAVFATARKLAQIIYRFVCHGQAYIDIGAKAYEAQFNNRRLKYYTMALKDMGYKVKPLAAAETQTA

SEQ ID NO: 266224 - protein, 394 aa, unidentified
MRSVGLDLGVRHIAYCEVADGKVVDRTTVKSLSQLVSRIGPDCPAARVAFEACREGWHVHDKLVEWGHDPRMLDTTRVRQIGVGQHKRKNDAIDAEVIALAVDARRIPEAHVLSPDRRTLRAQLSVRGALVETRSQYVTTIRGLARAAGVLLPSCDPENFVAKLEKSALDDSTRTLVAPLVTILRTLETELDRVEQTLSGFAERDPILNLCATVPGVGLIVAATYVSVIDDAKRFKNAHAVGAYLGLVPSEATTGGPDKRRLGSITKHGNRMARAMLVQAAWTILRLRDRDDPLKRWAEQLVKTRGKRIAVVALARKLAGVRWANWRGGNLYDCAMQAEQTAGGVRLSARQQQHRADVLERAAKKLQRKAGVTDPQRPARRVKRRAASSEMSLV

SEQ ID NO: 266225 - protein, 474 aa, unidentified
MKKHKKTKPKETKPFHEPIANAAGIDLGATEIWVAVPPERCQLSIRRFGAFTQDLKALVAWLVECGIGSVAMEATGVYWIPLYQLLSDAKVEIYLVNARHVKNVPGRKSDVRDCQWLQYLHSVGLLQPSYRPDQAVCELRTIFRCRGNLLKQGAENLQHMQAALDQMNIKLHYVIDDLSGQTGQAIIQAILNGEREPLRLAKYRNKRIKASEETIAKSLEGDWRKEHLFVLRVAWQNAKHLQEQIKKCDQELMEYARKLEANPVVTQPTRPLRILGLNPEPRVAPLNPVSALRPVKPRRKTSKNEPDGPWREELHRFFGVDLTLIPSIGVLSGITLMTELGNDLSAFKKSHHFSSWLCLCPDNETSASKVLRRSTRHSQNRVRQTLRMAASSLHHDKSYLGDKYRRLRARLGAPKAITAMAHQLARIIWHMLTYRVPFDIGIFAAQEKANQTRRLNRLHSNARQMGYQLTPIPA

SEQ ID NO: 266226 - protein, 400 aa, unidentified
MKGFLHMKLIGIDIGKNKHFFCIMDQQTGEIISQPISFSNDKEGFDFLIQKIKSYSKDSVLIGMEDTGHYHFALLKYLLDLQYTVALINPKTTDFNRKMQGGITKNDKLDTINICDVLDTPERKKQYRISKVNSFDLYEQKQLTRHHHNLKEEENVYKNRLQKCIDIVFPEFNKLFNSKYGTVYMNILKTFGSAENVANTDIRTIRKCFEIEGRGNRISLTPERLKECARSSIGISSSAEVIQIKHLTAQIELIEEQLTEIDKKIEEFSIQNNSPILSIPGISHFSGTSIQAELGDISNYSKPSQIIKFAGVAPLHYESSQFNAQHTAITKKGSKYLRKTLYQIILPVIRHNQVFYKYYQLKISQGKGHRCAQGHCVRKLLRIIYHLLKKNQQFDPQLLR

SEQ ID NO: 266227 - protein, 412 aa, unidentified
METIHERVAGLDVHKDTVVACVRVPGGRGRRESHVHEFSTTTPGLMALRDWLVSHQVGLVGMEATGNCWKPVYYALEDASECWLLNARHLRNVPGRKTDLADAAWIAQLLEHGLVHPSFVPPPEIRELRDLTRYRKAQIEERVREAQRLDKVLQDAGIKLSLVASHLMGVSAQAMLRAMVAGERDPEILAELAKGKLRRKLPELAEALEGRFRGHHALLVGEILAKLDHLDEAIERLSDEIERVLGPFAPQVELLRTIPGVDRRMAEALIAEIGVDTSRFGSSARLASWAGVCPGQHESAGRQRHGTTRKGSKWLRMHLTQAAKAAARTKGTYLAAQYARLRGRRGGSRATIAVAHSILVAAFHILERGTPYEDLGADWFIRRHSPERHARRLVHQLETLGFDVRLQERAAA

SEQ ID NO: 266228 - protein, 401 aa, unidentified
MKTVLSVDVAKNKSMIMLMNSDGEIFIDTKEINHNLEDFEKVKEEIKEINPQNLTVFMESTGTYHLPVERYFKENGFNTLVINSLTTKNNYDTIRKTKTDKKDCYRLAKLFFVNEVEYHDLSKKDLYANLKAMTRQYFYLLQNNVSCKNRYKRLINICFPELEKIFKSTRIYDDTALNFIKEFPHAEIVKEKRIDALYNNLYKTNGRNLNFYKKLATTIKTASINSYPGVDKQHEDVKNLSYMAKIVQNNNNIINELREKMIETAKQSPYYKIINSFYGIGDTLTAEILGELGDITRFDSPKEIIAFCGLDPTIKQSGKSINVKGAISKRGNKYARYILFNCSQMVVKLGASNYPEHPVYIYYQNKKAEGKHYYESLTACSTKILRMLYSMCKNNKQFLEN

SEQ ID NO: 266229 - protein, 361 aa, unidentified
MSESMALVGLDVHRTQTVAAVLDPVSGELRVERLRGEPAGVVPGFLEALDRPVAAVYEAGPTGFGLVRVAEERGLDVRVVAPGSIPRAPGDKVKTDRRDAKRLVRLFAAGELSFAFVPSEADERFRDLVRCIEDARKDLMRSRHRLSKFLLRRGLRFPRKAWTQPHEQWLAKVRFEDALSQAAFLDYLYAVQGLVQRRRTLMCALEEAIPHSSHAEAVARLRCFRGIETLTAASLCAEVGDFTRFAKPALLSGFLGVVPSEYTSDDKRVQGQITKAGPPNARRLLVEAAHHYRHRPAVGLGLQARQAGQDPRVVQIAWRAQQRLHERWMHLGGRRRKHTGTVAIACARELAAFCWEAATLD

SEQ ID NO: 266230 - protein, 401 aa, unidentified
MKYVLVLDVAKGKSMFMLSSDVGEVLLEPTEYTHNKSNFELINSNINKLNIKDNLSVIMEATSIYHKQPERFFKENNYHVIVFNPLIGKEITNTIRKTKTDKQDCIKLTNLFWKGSIPDRNYTEDEIYTKLNELSRQYYHLDEGLTRNKNRYKELLHLCFPEFELCFKDGKIYDLTALNFIKEFPHAYIIKEKRVDALAYNMANTNGRHINYYKRKANTIKEYAQNSYPGVNENSKDVNNLKQLVEIIIELNTQKELVKKQMIELAKQTKNFEFINSLFGIGELSTSLIIAELKDVTRFNNIKQINASCGLDPTIVQSGKSINYHGPISKRGNRYARKVLFNCSRNIVTLSAKSDKENPIYIYYQKKKQEGKHYYACLTACSTKLIRIIYALCMNNSTQQN

SEQ ID NO: 266231 - protein, 331 aa, unidentified
MNYSHFVGLDVGKKTFDASLMSADEKELSHKSFDNTPTGIQSLLDWIAGYHLSLSKLLFCAENMGSYVTELSVSSVSMGFSLALVCPLTIKKSIGLQRGKNDRIDAKRIANYAVLHYRKLELYKLPDKDLVRLRGWIIIRDNLVKQKVSSIKLLETFSWMAKLADVTESISFLEEQLKSIKERILEVEEDMEQLIAASTSLYTNYLLLRNIKGIGIINAIVLLCTTDNFQRFDNPRKFACYCGVAPFEHTSGISIWGKTQTSSLANKEVKVYLTRAAITAISWDPQMKAYYKRKIAEGKHKASVINAVRAKIIARSFAVIRRQTPFVTLAV

SEQ ID NO: 266232 - protein, 345 aa, unidentified
MENMYYIGLDVHKKTISHCVKDGSGRIHAEGKIPATRFDLDRWMKTLPQPWTVAMEATIFTGWIYDHLRPHAAAVKVAHPLMLRAIAAAKKKNDRIDAKKIADGLRCNFLPECYMAPTAIRERRRTLRYRNLLVRQTVQLKNRISGLLMEAGVNYNKEKLHKVGYFRELLKSNPDIDESLRPLLQLCRETLVRLQKTESALIRSLARDRFLVERVEHLMTIPAVGPITALTWALEVGEVSRFSSIKKAISYCGLCGAEQSSGEHVKRTPISKQRNKHLQCVLVEAAHMAPRLSPELALLYDREKQKGNANRATLAVARKLVAYLVAIDRNQRDFLLVEKENQAAA

SEQ ID NO: 266233 - protein, 358 aa, unidentified
MKYYTSTTEFNCGIDLHSRQMYICVMDRAGNKLVHTNIQGNDFAYFLKRIEPYRQSLTVCCECTFNWYWLADACQREGLTFVLAHALYLKAIHGGKNKNDRIDSEKLAHLLRANLIPPSYVYPGTKRPVRALLRQRLFYVWRRAELLARIQSHQLAEGHTPVKQSRPNRDPWEERLLAQYENPLHKSTLEIDLHMIRAYDEMLLRLERELLAATRELASRDYALLNTVPGIGRSLALTILYEMDSVERFPTVKDFTSYCRLVKGSVASAGKIKGTRGAKLGNPYLRWAFGEAAVIGKRDQPLLHAYAQQLEAAHGKFKGNAILAHKLARAVYFMLKNGTGFDVEKLVATSTGGAMKVA

SEQ ID NO: 266234 - protein, 457 aa, unidentified
MAKQRSKEKKTTAKADATQGLPPLNLHAAGIDVGSAEHYVAVPPDRDANPVQKFGSFTADLHRMARWLKDCRIQTVVMQSTGVYWTALYDVLESYGLEVNVANARHTKTLPGRKTDVQECQWLQKLHTFGLLNNSFRPAEEIRVLRGYLRQRENLVAAAATCIQHMQKALTEMNIQLANVISDISGTTGMAILRDIVKGERDPEKLAMHKHSRIRASRQEIAQSLEGTWRQELLFVLEQSLDLYQTYQNKIHTCDQRIDEQLRSMEAKIDPLSDPIPEPRRGKDARRHQSGFDLRSQLYRITGVDLTQIDGIEVQTAQAIVSEVGVDMSRWKTEKHFASWLGLCPDNRISGGKVLKRGTRQVVNRASTALRLAASALLRSQSALGAKFRRLRSKLGAPKAITAMAHVLARLVYRMLKFGHEYVDRGIQFYETKYRHQQLQWVAKQAAALSMQLVPTT

SEQ ID NO: 266235 - protein, 343 aa, unidentified
MTQYVGLDVSLKETKVHVLDEAGNRIWRGRCATEAAAIAAAVRRYAPTAVRIGLETGPLTTWLWTALTAEGLPMICLDARHAKKALDMKVNKTDANDAEGLAHLVRAGWYREVRVKSRRAMLAKALLGARSQLLSMSLALENQIRGILKTFGRIVPKGAGGLFEKNVRALITDDAEIAAVIMPLLQARGMGRSKCAALDRRLIGSVQADVTCRRLMTMPGVGPLTAVAYVAALEKPDTFKRSRAVGAWLGLTPRRFQSGEVDYDGHISRRGDRQLRALLYEAAAVLLTRVRRESALRRWGLLLWKRLGFKRAATALARRMAVVLHAMWKSGTSFDPTLGAATP

SEQ ID NO: 266236 - protein, 441 aa, unidentified
MTLQERASTLFVGVDVHKDTHTVVGLSPFGERLFEKTIGNYEKNFESLLAEVDECAAAQGLTPCFGLEDAHGYGERLATFLTHARRSVMYVPPVLVDRERGRMTHPEKNDALDAQGVAKVMIQGIDRLPHVIVSEKMKRASVIKELSQDREYLVKEQTRLKNQLHGILHRIWNTAYQGKFKNPFGKKALRHWPRAVPKSVPSFLVSSLKRKVRRLSSIQEEVAEIEKELNELMERECYTLSTASGCGTVIAAVIIGEIGDIARFDSPAALAKYAGCAPREHSSGKTIRHRKTRGGNRRLNYALHRMALSQISGTGNEKAREYFQRKVSEGKSKVQALACLRRQMVNIVWMMLKTNTPYDACWKEKREERAALCDEHTAQEKSEERKKAVLTEQPKKRGAPMLCERRLILEMTHGSSRNVLQREDRVDKNTMMEFQCEMNMP

SEQ ID NO: 266237 - protein, 391 aa, unidentified
MYIVGIDIAKRKHEAAVIDGEGTVIIKPFSFTNNCSGYNRLLAMLTKAKLPLDEVSFAMEATGHYWLALFTRLQKEGFRVQVINPVQTNSIRSFYIRQAKTDPRDALLIAEVIRFGHFSESTLHPENIYELRELCRGRHAIVSMQADVKRKVVALLDQVFPEYETAFANMFGDTSMAILQTCPTPKELSEMRLEELCHLIEVSSHKRFRMAKAQELQALARNSFGFAMAGDVFSTMIRLYAKHLDFLKQQVREMDRKIAEIMETLDTPITTITGIGLTLGAYILSEIGDISRFSSAAKLAAYAGIDPTMRQSGEYNGVRNRMSKRGSPYLRHAIWLAASSAVLHDPALKLYFQKKRDEGKPYMASVGHACRKMVSIIYAVMRDNKAYCLCA

SEQ ID NO: 266238 - protein, 409 aa, unidentified
MSTNACSNVFVGLDWAVHIHAVCVIDITGRVLERFEIAHDREGLAELMRRLARFGARVRIAIERPSGLIVDALVEAGHHVFPIHPNAVKASRPRYRSHGAKSDASDAYLLADLLRTDGHRWRQLSPQSDSIRALRALVRSRDDLVATRVALGNQLRGTLEAFWPGAACIFCDITSPIGLAFLARYPSAVSAARLSEAALNRFCRSQHYSGRRSPAELLARLNSAATGLAGPLANEAAGQLVRSMVAVLQPLVEQIAELTRRIEGFVKSLPDGQIIMSFPRAGRICAAQILAELGDVRERFPAFDQLASEAGAVPVTYQSGKTRSVAFRWACNHRLRQAITCLADNSRHANDWARSIYAAARARGCDHPHAIRILARAWLRVIWRAWTDRIPYDPGRHLGALKLASSEGG

SEQ ID NO: 266239 - protein, 419 aa, unidentified
MSFKILKNNCCGLDVHKTWIYACIGITDSFKRTEYKQARFSSFTKGLQELCLWLAKYNCTDVCMESTGKYWIPVFNVLEKNNIFVTLSHPKYTKPQKGNKTDRKDAKWICDLYMCGMVKPSFIPPADIRQLRDLVRYRFKLTCMITGEKNRAHNCLTVSNLKLDDVFSDIFGKSSRSITEQILQHPGEVFDVAPFVDSRCKTPIEEIQAAVDGAISHEQAVKLRQCLKHIDELEMHKAEIEREIFRLSQKYESVLDLIRTIPGFDKNPLTAIQVLSEIGADMSVFPTAKNLVSWAGCCPRNDQSSRKIKSTRISRAGSYFKPVLVQIANALIKSKKHPEFTTRYRRIKARRGHKKAIIAICRMILTAIWHILTDLKPYTPEGFLESRPVNKEKVLTISQALNLIKQRGYIIKDDVGPVT

SEQ ID NO: 266240 - protein, 401 aa, unidentified
MERVNPHCCGLDVHKASVSACIRVAQGAKVHQEVRTFRTDSAGLMELREWLQAHRISIAAMEATGVYWKPVYHALEDAMEVLLVNAAHVKQVPGRKTDVKDCVWLAQLLEHGLLRASFIPPQPIRELRDLTRLRKSLADEHTRVANRLEKVLQDAGIKLSSVVSDILGVTGRQILAALVSGKTDPAVLAELARGKLRKKRRELSAVLSGHFNEHHAFLIGLLLVQLDNAETALAELAARIERALQPFGQELEIVRTIPGVKQIVGPIIISEIGVDMKYFPSPGHLSSWAHFCPPNNQSAGKRRRGKWAGENRWLRTALIQAANAAVHTNNCALAALYHRIRARSGHNHAIFVVARHILELAWLLLKRCTRTMNWGPTTWRAAAANRPSAVASTSSSAWATR

SEQ ID NO: 266241 - protein, 379 aa, unidentified
MQQDSEIYVGLDTSKLKISVALAEAGRSGEVRFFGDIDSTPEAVARLVAKLEKRHVRLAFCYEAGPTGYGLHRQITTLGHACTVVAPSLIPRRPGDRVKTNRRDAVTLAKLHRAGELTAVWVPDPGHEAMRELVRAREATMAELRRARQQLQSFLLRQGRIYTGRAAWTKAHARWLSEQAFTQPALYLVLQEHRQAIADAEKRLERLTRQVTEAAETWSMAPVVAAYQALRGVAFLTAVTFVAEIGDVRRFDSPRQLMAYLGLVPSESSTGEQVHRGRITKAGNSRARRVLIEGAWTYRHPARMSRLLQERQADLPPAVREIAWKAQVRLCGRYRKLMARGKRQTVVTTAIAREMAAFLWAIGHEVEPTAAAPADGQLH

SEQ ID NO: 266242 - protein, 390 aa, unidentified
MIYIGIDVAKDKHDCCILGSDGEILFSPFTIQNSLQGFDELYEKIWPLTSDLTEIKVGLEATGHYHINLLRSLLDNGLPSFVINPLHTNLYRKAQSLRKTKTDKVDAASIAMMLLTDRTLKPYSDTSYHNEELKSLTRYRFDKVQERARLKTSVVRLVSILFPELEKLVPTLHMASVYALLSEFPGASFVASAHLTRLKHLLYDASKGRYGRDMAVSIRDAASSSIGSILPAKSLELKHTLHLIDVLTEEIDEIEVAISSIMDTINSPITTIPGIKNRMGAMILAEIGDFSRFDNPDQILAYAGLSPSIYQSGQLTSSYARMEKRGSRYLRYALFNATQYVCMWDPVFKAYLSKKRAEGKHYYVAISHACKKLVRVIYRMQLTGEPYRTA

SEQ ID NO: 266243 - protein, 416 aa, unidentified
MKKHNNSGKKSEPTSKRTKSRGPVQRDTKEVLAELVGKLKEKLDPTKVAATSAGEKHQRGELRPNLDRLTVGVDLGDQWSHYCILGLEGETLAEGQLRTTQEDLATFFQGLNGARVVVEVGTHSAWVQEVISGCGHEVLVANPRLMDGSKRRKRKNDRIDANKLARLGRVDPESLYPIQHRSREVRQDLVMLRARDALVAARTEIINTTRGLVKSMGTRLPKCSSRSFAQKGEEAVAVEMREALLPLVRLAATLSADIKEYDKKIETLGQEMYGHTALLRQVKGVGPITALAYVLTLENPQRFAKSRDVGPYLGLVPKQEDSGESQPQLGISKAGDTMVRKLLVGSAQYILGPFGPDTNLRRYGLRLCERGGKNAKKRAAVAVARKLAVLLHRLWVSGEVYEPLHNAMSAPIAAAA

SEQ ID NO: 266244 - protein, 351 aa, unidentified
MRTSQKTPATISTIGIDVGKNTFHLVGLDKRGAIVLQQKVTRHQLGRRVSNIPRCLIGMEACSGTHFIARQITALGHDVRLIPAQYVKPFLKGHKNDYRDAEAIAEAVQRPTMHFVSIKTPEQMDLLALHRVRSRLVRQRTGVANQIRGFLLERGITVRQGLMPLRKALPEILSSKSDVLSPRMINLIGDLSQDWRRLDERIVRVSTEIEALAKQDAGCQRLMSIPGVGPIISSAVVAAIGNGAGFKQGRDFAAWLGLIPKQESTGDRTILGKMSKRGNKYVRTLFVQAAHVVLERRPRTAKQGLWPWIEQTSKRLHRNMLAIALANKLARIAWAVLARGHAYQPRITASA

SEQ ID NO: 266245 - protein, 425 aa, unidentified
MSSSDAHSSPVDASGFAYVVGIDMGSQAYVYSVLQPDKRPVSKPTELANSRVGFEQLHGCLRQLAVPPQRVLIGLEATSRYSENLYQFLKEQGYALCLLHPRQTHQFAQQRGLRAKTDRLDATTMARLLLSGEARRGYVPDELIATYREVERLHSQLTDDSARYQNEIQALLVVLFPEFVQVFADPCRPTALGVLKRYPSAQAIVAAGVEALTTTLRELAPRHYGRPTAQELVRLASQSAASGLATPARALSLRVLCDQLEHTLANLAQVAQELDQLLDRDQGASGLKSTPEFGRKTVAVLRAELGDVTRFQRVDQVVASVGLDLQVRQSGQWKGQVKLSKRGSGRVRRVLSMAALRCICLPASAFGAYYRRLVARGMKGRRALMAVMRKMLIVAYHLLRSHETYDPTKVCALACTPARTPSSGS

SEQ ID NO: 266246 - protein, 422 aa, unidentified
MQTLLSQKFTAYVGIDWADIKHDVCLQVAGETRQHFSVIAHTPQSIDRWAKSLFERYGAPIAIALELNKGPLVAALQKYEFFCLFPINPSTLAKHRKTFVRSGAKDDPTDAQWALELLLNYPERFPQLMPQSPAMRSLASLTEHRRALVDERVKVSNRLICTLKQYYPLALELFSNHDTVVFCDFLMRWPTLEHIKRSRQSTFLKFFSEHNARHPQLNQARWEIITQAMPLTQDPGVIRPSQLYATALASQLKGLISTLKDFDREIEETANTLADYPIFKALPGAGQQLAPRLMVAFGEQRDRFSDANAMQRYAGIAPVTQRSGKKKVVYWRFRCSTFLRQTFVEWAAHSITQSSWAEAYYRQQRAKGCSYQAALRALAFKWIRIVYQCWKTSTVYDEKAYLQALTRRGSTLVEAPMEIVTG

SEQ ID NO: 266247 - protein, 348 aa, unidentified
MALTIVETPAITGGVDTHADVHVAAALDPVGGLLGVAEFPVTPAGYARLLSWLSGFGTVALVGIEGTGSYGAGLARHVATAGIRVVEVDRSDRQDRRRQGKSDPLDAVSAARAAQSGRARGAPKGRDGSVEAIRALMVAKRSARAERTQTINQARSLIVTGPDDLRTRFARHTVAALVAETASLRPRPGSTVGYATRIALRELGRRAQFLDGQLERLDELIVPLVTARAPGLLALYGVGPDTAALLLIAAGDHPARLRSEAAWAHLCAAAPIPASSGKRTRHRLNPGGDRQANHALWRIVITRMSSHPPTRAYVERRTAEGLSKPEIIRCLKRYVAREIYPRLRAAAD

SEQ ID NO: 266248 - protein, 422 aa, unidentified
MLAKTQDNEEIIERVAALDIGKAELVCCVRVPDEDHRGRRLQEVETYSTMTRPLLCMADRLACLGVTRVVMEATSDYWKPVFYLLEAAGFETWLINAKDVKHLPGRPKTDKLDCIWLCKVAERQMIRPSFVPPPPIRKLRDLTRYRADLVAARTAEKNRVEKLLEDAQIKLSVVVSDIFGASGRDMLAALVAGERNPKVLAQLARRTMRKKITVLEEAFTGYFTGHHAFLLRQMLGRVDAITADIAALDARIEQEIAPFATAVGKIDEVPGINLAAAHAVIAEIGLDMARFPTAGHLVSWAKYAPGVTESAGKKKGKNSTGHGNSYLARVLGNAAAAAAKTDTFLGERYRRIARHRGAKKANVAIGRSILVIIWHLLSDPDARYIDLGSGFYASRTDPDRRRRNHVRQLEALGYTVILERTA

SEQ ID NO: 266249 - protein, 349 aa, unidentified
MVMLGIDAHKRTHTVVAVDDLGRQMGVYTTAATTTEDHLGLLRWAARFGVERVWAVEDCRHLSRRLERDLLGAGERIVRVPPKLMAHARDAARTYGKSDPIDALAVGRAALRHPDLPAAQLDGPAPKLRLLVDHREDLVAERTRCLNRLRWHLHDLDPTWDPPARSLSRLKNLDAIAARLSGIEGMTARIAADIVVHTRDLTVSERALEREITTRVRELAPTLLEIPGVGALTAAKIIAEVADIRRFRSKDAFARHNGTAPLPVWSSNHQRHRLSRTGNRQLNAAIHRIAVTQKRCHDDAKTYLQRRSALGNSNREALRALKRRLSDVVYRALITDAHASTATCLPQAA

SEQ ID NO: 266250 - protein, 403 aa, unidentified
MNAVGIDVSKGRSMVAILRPGGEMIARPYEVSHTEDGLAQLVTRLKGLPGETKVVMEHTGHYFEPIARSLHEAGIFVSVVNALLIHQYGNNSIRKVKTDRKDAVKLAKYALDRWAELPAYTAEDENRRMLRIYNRQYNQYTKIKVMLKNNLIALLDQTFPGVNTLFSSPAREDGHEKWVDFAAKFWHCQEVTKLSERAFKERYAKWCKRNGYRYADDAAGRIYAAAQSQVGVLPANAATKYLVAQAIKQLNAVAGTLAAVGREMRRLASLLPEAAVVEQMYGVGPTLGPQLIAEIGDVRRFHSKKALVAFAGIDAPPYQSGNFDAKKRAISKRGSPALRKVLFQTICGILRLGSPDSEVYQYLAKKRAEGKHFYVYIMAGANKFLRIYYARVTEYLRGLDSAA

SEQ ID NO: 266251 - protein, 485 aa, unidentified
MSKRKLSTFERLSQGKMNRKQRKELARRLYSDDPGLEVVHRNVAGIDVGNESHFVAVAPGCDSPAVREFGSWTADLMRMAEWLKSCGVKMVVMQSTGVYWIAVYEVLEKAGFQVWLTNARDTKNLPGRKSDVQESQWLLKLQTYGLLRNSFRPPEEIRRLRTVWRLRNRHVQEAGRAIQHMQKALTTMNVQLANTLSDVSGVSGQAIIRAILKGERDPYQLARLRDYRVQASEEEIARSLEGNWQEDVLFELQQAVDGYDFCQQQIRECDLRLQKYLGAVSSHPRSQPESGQTVGSAQSQPAEKSPKKKSSKPRKNQPQFDLDAELQRLCGVDLRTIEGVDVMTILTFVSELGTDMTPWRSEDHLVSWLKLSPRRQVSGGKLIKHERIKVKNRTAEALRMAASTLAHSQSYLGARFRSLRGRMGPGKAIKAMAAYLARLIYRMLTHGQAWVDRGVQQYEAKRQARETQSLQCRAAALGFRLVPAA

SEQ ID NO: 266252 - protein, 347 aa, unidentified
MNANAIVVGLDIAKHVFVAVGLDRNGKVVWKHKMNRNEVLSTFRNMQPVAIGIEACAGSHYWARELTALGHDVKLIAAQHTRAFVTGNKNDTNDAAAIAEARSRSSTKYVPINTPAQQDLQMLHRARSALMSERIAMINRIRAFAGEYGQIFAVGVAKFKSGLLAWLADPENGLTGSALATFRELKEQLDDTEQRIQAYERKLNQAAKSEVAQKLMEVPGIGPLTATAVMASVADPHHFRSGRDFAANLGLVPREHSSGGKQRLYGITRKGDSHLRTLLIHGARSALRSAGDKTDRQLRWASNLAQRRNFNVAAVGLANKMARVIWAILAHGRSYVPIWSNSTTRPA

SEQ ID NO: 266253 - protein, 467 aa, unidentified
MHQSITYKSVPVKSASLHFLKHISRNAIVHVGIDIGKNKIFVVCRWSPSRSKRVMYENPWLVQNPDDLPILIKKLLKIKAQIRLFVAFESTGSYGDPLRQSLDDAGIICHQVRTKLTHDYAEVFDGVPSQHDGKDAAVIAELLSQGKASAWEFPKHNETESEIKYIVANLIDGGKDLQRLQGKLEGLLARYWPGITKIIPLTSKTLLKLLYHYGGPEGLRNDKESAAMIRKFSCGRMTAERTGKIVVSARTTSGVRQGQWDIQYVKDVVEKMIEIHKMTSRHKKRLADLIDVSSLELQRLAKILGVATASVVWCRVGNPLRFHCADAWVKAMGLNLMERSSGEYQSRLRISKRGDSETRRWLFLSALRWTQDTNIKPWYERKKLRTGSPIRGEATKRTAGKAVIAVLRKLLKGIWHAIVKEEPFDTKILFQERSSRKKDRKVGIKNRRKRSVKSSKSQNTRTQQAFR

SEQ ID NO: 266254 - protein, 379 aa, unidentified
MKKVNKSASAKQKQQRNKARGKIRGVVGMDLSDKSSTIWRLGRQGERVEQRRIATSQAALTNYFGGQPRLRVVIETGVQVYWVARLLEQLGHEVIAANARKLQLITKSVSKNDRNDSRLLAELGWTNPKLLSPVRLRSQTSQQHRTLLRAREAAVESRTMLINAVRGLAKSHGHRFAKTSSAAFARRATKDCPGELQPALSPLLQMIEMATAQIKLYDRQIEKLCEQYEATQRLMSIRGVGRQTALAYVLALDNDPQWLRRSRDAGAFVGLRPAQQESGDSSPELSITKHGDRLLRKLLVQCAQYILGHWGEESQLRSWGLRLAQGGKRAKRRAVVAVARKLAVILHVLWKRDEDYLAFPRGNPPGQPGCTLAAGAASR

SEQ ID NO: 266255 - protein, 316 aa, unidentified
MPTSTTICAGIDTAKDKLDIAVHGGPAFTVRNDPGGWKLAAMRLGEAGATRIGIEATGGYERAVVRHLQAAGFTVAVMQPLQVKAFAKLHLKRAKNDRIDAVLIAACTQVLGEAAKLPPDARFDALAEHLTGIEQWEEDIVRLKTRLEHVHDSRLRRVVESDIKRLTKRRDAELWRLRAALGAHADLAERFDLVASVPTIGERTALSLVIRMPELGQVSREQIAALAGLAPFVQQSGQQKGQAHIGGGRARVRRALYAATLAGVFRWNPQLKAMYQRLTERGKSHKQAMVACARKLLIFANAVVARGTPWQSPEAT

SEQ ID NO: 266256 - protein, 412 aa, unidentified
MLDSSAVESIAVEGVFVGIDWGNYHHQLCVLDAAGRLLGQGKIAHTVAGMVELLARLRRRGPIVGIAIERSEGLLVEALQDQGHRLFCVSPKMSARARERYRAAPTKSDAFDAFVLADSLRHEYRHWRSLAVPSPLLAELRALTRDRERLIVNQRDVENQLRAILLTFHPAVLHLFSSLDRDITLAFLRDYPTPRHAHHVGAARMAAFCTRHGYSGRTRPELLVQRLRTNLLSASEGTTVGKAFTAQLFLAQLELLNTQVRTITKRIRERLSQHPDAVIFLSFPGMGEVTAAIMLAEMGEDRARFPTADVLLAETGTAPVTRSSGRSRHVSFRYAANKRMRHAIDWWTFVAVRENDWAHDAYQQARARGQLHNRALRGIGARWIRILWRCWQNGTTYDPQLHLKNQPIAITA

SEQ ID NO: 266257 - protein, 401 aa, unidentified
MNAVGIDVSKGKSMIAIMRPLGEVVATPFEVGHTATELNELAKFILKISGETRVVMEYTGVYFEPIARALYDAGLTVCVVHAQLIHNYSNNTIRKIKTDKADAIKIANYALDNWSKLKPYTPIDEVRRQLKAYSRQYRKFNKLKTMLKNNFIALTDSTFPVVNELFTSPPRKSDGHEKWLDFAMKFWHAECVCSLSQKAFTERYKKWCHKAGYYFLESKAEEIYAASCGHIGLLPKDEHTEQLVQQTIIQLTNICSSLSVIENKMTELAGLLPEYPVVMEFRGVGRILGPQIMAEVGDVLRFEKKESLVCFAGLEAPPYESGKFESHNRTISKKGSPRLRAALFQVMDCLLKTQPVNDPVFQFIDRKRSEGKHYYSYMCAGSAKFLRIYYARVKEYLTALE

SEQ ID NO: 266258 - protein, 315 aa, unidentified
MTKHLPPVNVGVDVGKNQLDLYLLERDRALTVPNEEQAILVLVRSLSRYRVERIVVEATGRLEQPFVRAALAAGLPVIVVSPLKIRRFADVIGQLAKTDQIDTRLIAQFAATVKPLPRPASDANAQAIKDLVVRRRQLTSLRTMEKNRREVMPNDLKPSFDRILKALDRELKSLEQLINHAIDQHASSRHKRELLTSTPGIGNCVAATLIGDLPELGSLDRRQIASLTGVAPFNRDSGTLRGKRRIRGGRTHSRTALFLSAMVATRFNPDIKRFYQRLLTAGKHKKVALTACIRKIVTALNAMLRDNLPWRSAIA

SEQ ID NO: 266259 - protein, 340 aa, unidentified
MTITSLASIGIDIGKEVFHVVGFDANGKIAFRRQIKRLALVETFKRLPPSIVGMEACLSAHFVSRTLRQLGHQPRIIPAIYVKPFVKGQKNDYNDAEAIAEAALRPNLRVVREKTQDQLDLQALHRVRSRLVSRRTATINQIRAFLIEQGIAVRTGAMALRNSLMAILETRQDEISPRMRGLIAGLNEDWLCLDERIETLADEIQTIGENEANCRRLKSIPGIGPLISTAIVAAIGTGEAFERGRDFGAWLGLVPRQYSTGGRSILGRISKRGSKYLRTLFIQAANVILMRPHNWERFSFGAWLQNAAPRLHRNKLARIAWSILRNEKTFDTPHQEALAI

SEQ ID NO: 266260 - protein, 317 aa, unidentified
MSFVGIDVSKTRLDIAERPGNKRWSAVNAEADIGKVVETVGALSPQVIVIEATGGMEVPLVAALSQARLPVVVVNPRQVRDFAKAVGRLAKTDRIDAEILAHFGEAVKPKVRALKDEDTQILTALVMRRRQVIEMLTAEKNRLGISPKVVHKDIEQHIDWLQTRLEDIDRHLDSAIRKSPVWREKDDLLRSVPGVGQVLSVSLITGLPELGTLSRRQIAALVGVAPLSCDSGLFRGKRTVWGGRSHLRSVLYMATLSASRFNTAISRFYRRLVEAGKKPKVALTACMRKLLIILNAIMKNRIPWQADYSTCSTPQIP

SEQ ID NO: 266261 - protein, 421 aa, unidentified
MVHVHGVRAQELSSRSVGIALDRLVAVPVDVGKPKAMAMVCDFTGRRLAAPFEFRQDRTGLAELLQRVRAVLPADVALVRVGVEACGHYHRPVVASGMLPDDWQLVELNPAWVTAQRKVNGTARRKTDPIDLIAIADLLLAGRGYEVAAGDEPLLELCAWVAHRRRRVHVRSGLKNQLLGQVDRCFPGLAGAVSDVLGTKVGRLVVAEFADPDRLAKLGVGRFRAYAARRDVRVNVTIAERLVAAARQALPLPEAAVARQVLDADLQLLADFDAQVAAADARISALIPATRYAVLTSGPGWGEVRVGAYGAAVGDPARWASHAKIYRAAGLNPAQYESAGRRRDSGISREGSVELRRALLDLGVGLWHRDPAARDYAAALRERGKPGGIIATALARRANKIAFAMVRDQTLYEPTVWRQED

SEQ ID NO: 266262 - protein, 356 aa, unidentified
METKMLCCGIDVSHLTLDVTYQNNLGELFHLQVGNNMGGFKKILEHTGTDYHFVMEATGVYYIRLAFYLHGQGCKLSVVNAMSIKRYIQMHLERNKSDKKDSGWICKYAIEQRPGFWEMPDSAYFESKQLFNTIREYAEQVKRFTNQLHSLKLLPVPSKETIQSIEKMKAYLEKEMAVLEKKLEACLKQWQPDQYKSINSIKGLGKRATALLIIFTQGFRHTKNHRQLISFAGLSPTEYSSGSSIKGNNRIYKKGGKTIRDVLYMCAMNAKQTNVACKQLFDRLKANGKTGKQALIAVMNKLLKQVFAVVKNNSLYQLNYCSAKPKKNRKLLGFLHSSCWLSGLFFYDCYAACLYF

SEQ ID NO: 266263 - protein, 356 aa, unidentified
MSYDVKYIGMDVHKEAIVIAVQNESGKLVMETILETKASSILQFLHGLRGELHVTWEEGTWAAWLYDLLQPQVQHIVVCNPRRNALLKEGSKSDKVDARKLADLLRTGMLRPVYHGENGLRTLRELGRSYQTISKDLTRVMNRLKALYRGWGIPCAGTQVYAARSREEWLSKIPQAGVRRRAELLYQQLDGLQALRRDVRPEFVAESRKHKAAKLLRQIPCIGPIRAARLIALMQTPHRFRSKRQLWTYSGLGIETHDSAQYRFVRGQLQLSKKPQQIRGLNRNHNHEMKEIFKSAATRASCGRGPFQDFYAGLLAKGMKPEMARLTLARKIAAITLTLWKKEERFDVEQVKTQAA

SEQ ID NO: 266264 - protein, 320 aa, unidentified
MNKEQKYVGVDISKEYLDMAVVEPDNKWRFTNNPNGISKAVEMLKGRSSVFVVFEATGGLELSFWEGLTEAGIEAAAINPRQIRDFAKAKGKLAKTDEIDAGVIAHFGQAMQPRSQPFPTTQEIKEMMSRRSQIVEMITAEKNRLNWARSRRIKEDIQLHIEWLERQKDDVDKTLKQAINIDPSMREKSKILQSTPGVGPTVSASLLTQVPELGTLNRHQIAALVGVAPLNRDSGHWRGKRSVWGGRSRVRSALYMATLVATQHNPVITAFYQRLIGEGKPAKVALTACMRKLLVILNAMLKNKTTWSVSETAATLTPCL

SEQ ID NO: 266265 - protein, 428 aa, unidentified
MPYKIAGIDVHKRMLAVVVSDVEVDGEYAFERRQFGSNPAQLRLLADWLLEQQIEEVVMESTAQYWKPVWAALERYWTPTCKKREGAGAMSGTQHLAQAQSNRARQGRKNDFADAERLVKRLVANELTLSFVLDPEQRLWRTVTRTKYQLTRNRVQLQNRLEALLEECHIKLSSLVSDLLGVSARRMVKALADGETDPAALAALANYHLRATQEQLRDALGACQELNPVYRRLLKLALEELQLIEKQISQLDQEIADLLRPYQDQVQRLAEVPGLGVDSAQQIIAEVGPIAATFPSAGNLSSWVGACPGDDESAGVSHSHRSPKGNRQMRRLLNQAANAAVKYKGGIFEILYRRYVPRLGHKQTIGVIAHRLCRLIWKILYQGVRYEERGPDVRKKSQRYRAARMIRELQSLGYRVEQANSQSADVPA

SEQ ID NO: 266266 - protein, 389 aa, unidentified
MGHPMSQLNDLSRSLTSLEQDNTIIAVIEMSQSSWLVAGIVPGIERHPLKKLEPNEGELLRLLMRWRAEATKMGCTITRIAVAYEAGRDGFWLARWLRARDIETYVIHPTSVAVSREHRRAKTDRLDTGLLKRVFIGWLRGEPDHCHMAAIPTLAEEDAKRPNREREGIVRERTRIVNRMKSCLARFGVRNFKPTLRKAPERLATLVTPEGVPLPPNTLLELRRDMARLRFVMDQIKEVEEARAQRLEQAPQEKTHAMVRLLARVIGVGIETADMLVHEILSRSLRDRRAVARYAGLTGAPDESGSKRQEKGLAKAGNARVRRGMIQLAWRFLLFQKDSALAQWYRTRTERGGKKRKTMIVALARKLLIALWRLVTTGEVPAGVVLRAA

SEQ ID NO: 266267 - protein, 390 aa, unidentified
MILVGIDVAKDKHDCCIINSDGEFPEEVFSILNNREGYETLYKRICSLAVDFTKVKVGLESTGHYSSNLLAFLLDKHLTAYVINPLRVNLFRKGQSLRRTKTDKIDSRNIAHLLMTDSSLKPYSLSSYHMEELKSLTRYRAFIVRERTKLKTSIARLVTILFPELEQLVSSIHIHSIYAMLEEFPGSAYIAAVHLTRLTALLLKASRGRFGRETAIRIRDTARRSIGAVSPAKSMELQHTIAHLRVYDQEIGEIESEIEKIMDDVNSPITSVPGIGMQMGAVILAEIGSFRRFDSPDKILAYAGMSPSMYQSGKLTGSYSRMEKRGSRYLRYALFNVTRYVCHYDPGFTAYLSKKRKEGKHYYVAISHAVKRLVRVLYAMEISGNRYKTA

SEQ ID NO: 266268 - protein, 405 aa, unidentified
MKGTQNQKISQIKFETLVVGIDIGKETHYARAFDYRGIELARLLKFSNTDQGFQRLDQWMRDICKQQEKTEIIAGFEPTGHYWFTLGDHLKRQGYKLAIVNPFHVKRTKELDDNSPTKNDRKDPKTIAMLVKDGRYREVYIPDDIYQELREAVSERERLQEQLTSIYNRVVRWLDIRFPEFTTVFKDWRRNAALITLRSFPTPKKVMEMGVDKIVETWRKQMKRASLKRAERLVKAASRSVGRTSGKVASEASLQNLLAEYDLYCQQYDKQEQLMQELLMQVPNADKLLDIKGVGLITAATFVGEVGNISRFQDPRQIQKLAGLNLVENSSGKHKGKTTISRRGRKRLRHSLFFSMIAMLGKNQEFRLLHQRNLMRENNPLNKMQSIIALCGKLIRVFFAILTKG

SEQ ID NO: 266269 - protein, 343 aa, unidentified
MHTITTIGLDIAKSVFQVHGTDAAGQVVIRRQLKRRAVLAFFQKLPPCLVGLEACASSHHWSRELQALGHTVRLMPPAYVKPYVKRQKNDATDAEAICEAVTRANMRFVPTKTPEQQSGLVLHRTRHLFIRQQTSVINAIRAHLAEFGIVAPVGRHGVEELLNVVADPNDKRVPEIARACLSAFGAQLRMIKEQVLEFDRLIRAWHRSNEMSMRLDEAPGVGPVLATALVAAVADPKSFRSGRNFSAWIGIVPKQHSSGGKNRLGNISKQGDRYLRGLFVAGALAVIRYAKIHGTKHRPWLTALLARRPTKVAAIALANKIARMVWAMMAKGERYKEPVALAR

SEQ ID NO: 266270 - protein, 317 aa, unidentified
MDHFAGLDVSVKETNVCIVDDTGSIVREVKVVSEPEALLQVLGNPIHRLKRIGLEAGPLSQWLFSALAGAGLPAICVETRHMRAVLQAQINKTDRNDARGMAQMMRAGLYRPVHVKTLRSQKLRMLLTHRKLLQSKAIAIDNDGTLRNFGLEARIKELVEDLPDLAELVEPLLIVRRTVREQIGILHRRLLTVVWNDEVCRRLMTVPGVGPVVALTYRATVDVPARFRNSKAVGAVFGLTPSRYQSGEINRPGAISKCGDEMMRVMLYEAAQIMPVRSTKWFWLKAWAMKIARHRGMKEGDRGAAAPVGGDHAPHLG

SEQ ID NO: 266271 - protein, 351 aa, unidentified
MNVTKYIGMDVHRAMTVSAVLSATGKVVAEAIIETKGSVILDFIQSQRGTLWVTFEEGTQAAWLYDLIQPHVAKVVVCDPRKISTQGNKADRPDAKRLAELLRTNALTAVYHGERSTRALKELARSYSAIVGDSTRIKNRLKAVFRARGIDNSGAGIYTTEERECWTSKLEAGAVRLRVQRLWRELDTLDVLRAEAEKDMVVEARKHPSTRILQTVPGIGPVRAALILAFALTPHRFRSKRQFWGYSGLAVVTRITAEYELVKGRIRRTKKRPALRGLNPNCNRVLKDVFKGAAGTAANGPWRAYFESKVASGNKPELVLLTIARKIAAITLALWKKGERYDETKLTMHAV

SEQ ID NO: 266272 - protein, 431 aa, unidentified
MPRPVPLPIAPVPAPPSGSDASTGAAVRPAPTPPRGVRGALSRVPLAGKLIGANALVAVVATAAMMATSTRAGRPTEPGVVALVVAALGAALVAGLVLVRVALGPLHTLETTAARVWRGDLDARVPETPSADPAVARVGRTFNLVLDGLAGVRKLVALCAELAPERIVTDATGGLERVLVDALRKADLPVVVAGPDRVRHFARALGVRAKTDRIDAAVLAQYAERVRPEVRPGPTVEARALAALVGRRRQLTAMLAAEKNRLTIVPATVAADVRLHVRWLARRIVRLDAQIATAIAADADRAAEAARLQTVPGVGPALAHTLAAELPELGHLGRRQVAALVGLAPFPRDSGTLRGTRAIGGGRAVVRTALYLAAMSSVRCNPPLRTYYRRLVDAGKPKKAALTATAHKLLTILNTMARAGTSWSASPPAPA

SEQ ID NO: 266273 - protein, 405 aa, unidentified
MYYVGVDIAKDKHYVCILDESKELACKPFWIYSDILGLRELLKRLAELSLDMDDFIIGIESTGAFSENFYSYITDADYKVILLNSYQTAKYRDFSTLKKIKNDSIDAYVIAELIASGKYKASYISNEAYHDLKVMNRLKKSLDDKIKTIKREISTVIATVNPEIEKVFPNIFTKTSIAIIKAYPTAVDISKTSPEKLSKLFRHIKGNNFSDEKAKYLIELAKSSIYTGRALESRALMIKTNIKILELYIQEKDEVEKQIQDLIDNQLNDDSTNIDNVKSIPGVADKTIAAILGECGDLRRFESAKAFIGFLGLYPTLYQSGKSSSTGTLAKRGIPIAKHALYMAAVSAVRHNTELHKLFRDKVSSGKSKKEALIIIAKKVASIIYSLFKYDQPYNPSRVLIQHKR

SEQ ID NO: 266274 - protein, 419 aa, unidentified
MTQTSHTTFAAFVGIDWADAKHDICLQAAGTAKRECFQLEHTPEAIDAWVTTLRTRLHSQPVALCLELNKGPLVFALRKYDFLVLFPINPLTLARYREAFTPSRAKDDPTDAELQLELLLTHRDRLSPLNPQSPTMRALEQLVAHRRRVVGDKVRLTNRLTSTLKNYFPHVLQWFQDKDTTLFCDFLSRWPTLKAAQLARRTTLETFFRAHHVRSADVIAPRLQAIKSATPLTTDEGVIAPHTLWVQALVAQLRVTLQAITDFDTAIAQRAQSHPDFPLFQALPGAGPVFAPRLLVAFGEQRERYATAAELQKYAGIAPVTERSGKKSWVHWRLQCPKFLRQTFVEWAAESIRHSFWAQLYYQQQRDQGKAHQAAVRALAFKWIRILYRCWQDRTLYDESTYLHALTQRGSSLMHNLAK

SEQ ID NO: 266275 - protein, 411 aa, unidentified
MNPVIGLDVAKGESQVQAYLDRREPYKSSFKVAHTQDGLNCLHDFLLEVERVSGVRPPVVLEATGHYHTPVVQYFEERNYLIIIVNPLISYRAKSSSLRKVKTDIIDAHHLCELYYKEELEPYKKRGIQLLDLRNLTRQHENLTNIYVQTKLQFQAILDQVFPEYRGVFGDLYSTVSLLTLVDFPTSNDVLTADEQEISNTIYELCKSRSYSWAVARSQNLIDAAKRNPFQNNLYQSHILTMEMYIKVLLEYQKHLSSLEKEIDASAKEIEEYKIIQSIPGIGEKIAATIISEIGEIDRFNHPKKLVAFAGIDPSIFESGRFKGTVNRITKRGSSRLRHALFMAVKCAIRDSRKMKTTDEVIPRNKKMRAFYDKKREEGKPYKVAVIACANKLLHWIYALLRTNSTFVDIA

SEQ ID NO: 266276 - protein, 339 aa, unidentified
MNSMAVGVDIAKNVFQVHYVDQASGEIVNKAIKRAKFLEHFANRERCVIGMEACGGAHHWARALKRMGHEVRLMPAEFVKAFNIRNKNDAADARAIWLAVQQPGKPIAVKTEMQQAMLALHRMREQLVKFRTMQINGLRGLLTEYGEVMSRGRAALDKEIPAALGRVAERLPAALIDTLREQWNGLARLDEQIAEIERRMRDWKKEDRAVQAISEIPGVGLLTATAAVAMMGDPKGFRSGREFAAWAGLVPKQTGSGGKVNLHGISKRGDTYLRTLLIHGARSVLTHAKEPGPWVEQIKKRRPTNVVIIALANKMARTIWAVLAHERAYRKDYVSMKPA

SEQ ID NO: 266277 - protein, 411 aa, unidentified
MEVIHARCAGLDISKKDAKVCVRVAGAGWRKTVETVTTWGSMTSQILALREHLIAERITCAVMEATGDYWKPFYYLLEGAGFEVLLVNARHVKNLPGRKTDVADATWLAQLGAHGLVRGSLVPPEPIRQLRDLTRARTAITRERSREVQRLEKLLEDAGIKLSAVASDILGVSGRAMLESLIAGNRDPAALADLAKRRLRSKIPALTEALTGRFTDHHAFLARVHLDLIDQHTAAVADITARIEATIKPFHWFRDLICTIPGISTLTADVTIAETGADMTRFPTAGHLASWAGTTPGNNESAGKVKSSRTRPGNPYLQGALGAAAMACAQNPVTYLGARYRRIAARRGPQKANVAIQHSMLIATWHMATNGCLYHDPGADYFNQLHPERAAKRAISQLEAMGYHVTLTRAS

SEQ ID NO: 266278 - protein, 342 aa, unidentified
MSNLNNFQATIGIDIAKNVFQVYCVDNVTGEISNKQLTREEMHEYFANRQPCLIGMEACGGSQYWARQLTDQGHTARLMDPKLVKPFVSHYKSDKADAEGIWIALTHGVRTVTVKGKTERDIQTLLRIRERLVCLQTGNMNHVRGLLLEYGVTIPKSVAKFELTVDKAINDLEGDSVALIIDSLRDIVAQIRDSRKRIDTLTKEIKRLVEQTKYAKYFSSVPGVGVITTAHMCVLLSDPSSFKSARQFAAFLGLVPMHTGSGGKTITTHIPGRCNKALRALMVECAQSVARGRNPEDWVRKILSEKPKKVALIAIANRIARQCWAVASKGQKWRRMPVVGQQ

SEQ ID NO: 266279 - protein, 368 aa, unidentified
MNHITSVGLDVHARSIKACAFNPLTGEVVRRSFAYSPAEVAEWILAFEAPKAVYESGVTGFHLQRELEALGVDCVIGAVSKMDRPAADKRKKTDRRDAAFLARQLALGTISEVHVPDPACEAAHDISRALADARDDVAASKQRLSKFLLRNGYVWDETNGRGQRKKTWTRDHWAWIESVRMADPAAQEALDYYIDRCRRAIEDKRELEAKVKAHAEEGRWKPTVDALSCLKGIDVVTAFALAVETDGFSRFRNASAYASWLGIVPSEHSSGEGRRRGGITKSGNKHLRKLLVEASWHYLGASRHEKSLRRGQEVAPEVRRHAAKGVRRLVDRRSALLGSGKRSVVANCATARELACWAWAIGRMVEAA

SEQ ID NO: 266280 - protein, 402 aa, unidentified
MNAVGIDVSKGKSMVAIMRPFGETVSPPFEIKHTASDIHSLVELINSVEGESRIVMEHTGRYYEVLAHQLSEANLFVSAINPKLIKDFDNDSLRKVKSDKADAVKIARYALDKWHNLKQYSVMDELRNQLKTMNRQFSFYMKHKTAMKNNLIGILDQTYPGVNAYFDSPARSDGSQKWVDFASTYWHVDCVRKMSLNAFTCHYQNWCKRKKYNFSQSKAEEIYGKAKELVPVLPKDDLTKLIIRQAVDQLNSASTTVESLRTLMNETASKLPEYPIVMDIKGVGPSLGPQLMAEIGDVSRFTHKGAITAFAGVDPGVNESGIYEQKSVPTSKRGSSELRKTLFQVMDALIKTKPQDDPVYRFLDKKRAQGKPYYVYMTAGANKFLRIYYGRVKEYLATLPES

SEQ ID NO: 266281 - protein, 411 aa, unidentified
MHNRQNYLYVGVDLHKEHHTAVIINCWQEKLGEIQFENKPSAFSKFLLEVETYVSAGVSVVFGLEDVGGYGRALAKYLVDHEQVVKEVNPALSFLERKSHVTTQKSDSWDAECVARILINKLNQLPDAKPNDLFWSIQQLVSRRNALVKAQSALKNQLHIQLNHHYPSYKKFFSELDGKTALAFWQQYPSPSCLEGANIKQLTAFLLDVSNNTCSVKKASDILKLVKEDGHTMKEYQDTRDFLVRSIVREIEFKKKEMKYIERELKQLVNLLDYQLETMPGIELVTASALIAEIGDIRRFLNANKLARFAGIAPVYFGSGGKGKTHKSKQGNRALHALFYNLAVQQVQVAKGSKKPRNPVFHAYYQKKLKEGKTKGQALVCIMRRLVNIVYGMMKYKIAYELPVVEEKEVV

SEQ ID NO: 266282 - protein, 405 aa, unidentified
MEMEKCAGIDWASEEHALCVVDESGRSLAGEMHSHDEVGVRELIARMRALGVVRVAIERPDGLLVDRLLEAGFTVLPIHPNKLKATRPRYEAAGGKSDGFDAFVLAELARTDSHRHRALAPNSDETKALRSLTRAREDLVGARVRLANELRAQLDAFWPGAARVFADVDSPIGLAFLERCPAPEDARGLGGKRLEGFLARNGYCGRRPAAELLERLRCAPAGRAGAMEAEARRGAVLGLVAALKPIVTQIRELTSQIAGAVRSHPDGQIFLPLFKDPKSVITAARLVAEIGDDRGRYPTQEALAADAGMAPVARESGKRKVAGFRWACDKRLRDAVACLANSTRHTHPWARSVYLDARSRGLEHPHAIRVLGRAWLRVLWRCWQDEVAYDPAKHGNLRRLQPQGG

SEQ ID NO: 266283 - protein, 348 aa, unidentified
MSKSSQYVGLDVSLKETSICIIDDAGKIVLRGRVDSTPEAIATAVKQHAPNAVRIGLESGQLSSWLFHELKEAGFPVICVDARHAKAALSLKVNKTDANDAFGLAQIMRVGWYREVTVKGLDCQAVRALLVARAQIVSQITTLKNCVRGILKTFGRVLPKGLRSQFPGRVRAAIDGHPVLGAIIEPTLRVLEAMRAQLLVYDRAVIQRARSDDTARQLMSAPGVGTVVALAYMTGVEDPARFKRSSSVAAYFGMTPRRYQSGEVDHAGRISKCGDGMVRGLLFEAAKVLLSRSARPSALKTWGEALGKRVGAKKATMAVARKLAVILHRMWTTGKTFQWNAEAASPAA

SEQ ID NO: 266284 - protein, 338 aa, unidentified
MKNTKYFIGLDVHKERTSYCVRDKLGNILTEAEAATLYSELEPRLKPFLTASMIGLEASTSYYTVYQNFLKNGYHIKVANTIQLRQLIAKNDKLDAQRLSEMLRLGTFPCSYIPEEKIQHLRSMVQMRHAFMQEKVRCNNRIQAFLDRNGVVMPPQKAFSKKWKHALMQYMGSGDVSIELRYEYDHYVYLEKKNEQADQEMIGYTRKHWNKEYQLIRSITGFGVLLPCYIIAFVHPIERFLSNRKLRRYAGVIPVAKESGGTTSKGRIPKTSSKALLRWALVQAANTIGKTNTNLGRYYRRKKNQKKNTGIAKIAVASTLVDIIYKVLTTKNPYVAAC

SEQ ID NO: 266285 - protein, 352 aa, unidentified
MDATTVAIDLAKDVFEVAVANRTGRIVARKRLRRRPFERFLEELSPGTEVVMEACGTAHYWGRRCQARDLPVRLLPTQYVRPYVRRNKTDRTDTEALLEAARCGGVPPVGVKSAEQQTLQGLHRVRAQWQMTRTARINLVRALLREQGLPIPLGARTLLARVTSLLEDAETALSNRLRSTVALVVEEIHALEGRLATIDSQLAEVARTDPIAIRLQQIPGVGVLTATAMIAAVPHIHAFRRGRAFASWLGLTPRESSSGMRRHLGGISKRGDVYLRCLLAHGARSVLWTSRRRIQAGRIPPTPFQHWAVTLAARRGQNKAVIGVANKLARMIWAVWHHDVDFRQPLRGADAA

SEQ ID NO: 266286 - protein, 314 aa, unidentified
MTENTSERFAGVDIAKHSLELHIEGQPVLHLTYDDAGIQEACSRFRAAAPTLIVMEATGGLETRLATELGALGLPVAVVNPRQVRDFAKASGRLAKTDRVDAQVLSAFARAIRPQARPLKEDEVRELDALVTRRRQLIGIRVQETLRLGTASRLQAKSLKEHIAWLDRRIARLDIDLTAKLRQSAAWRAKEDLLKSIPGVGQVTCTTLLAKCPELGQLNRREIASLVGLAPLSHDSGRRRGKRFVWGGRAEVRAVLYMATMSAMRSNPLIQSFVKRLKQAGKPAKVVIVACMRKLLTIMNAMIKHNAPWNPNLA

SEQ ID NO: 266287 - protein, 354 aa, unidentified
MSQKLNAAIAVIGIDIGKNSFHIVGHDHRGAIVLRQKWSRGQVETRLANLPPCLIGMEACVGAHHLSRKLQMLGHDARLMPAKYVRPYSKGQKNDFRDAEAIAEAVQRPTMKFVATKTADQLDLQALHRVRDRLVGQRTGVINQIRAFLLERGIAVRQGLRSLRSELPGILATRTDVLSPRMLRIIEDLAGDWRRLDARIEGLSSEVETLARQDKACERLMTVPGIGPLISSAMVAAIGTGDVFSKGRDFGAWLGLVPKQISTGDRTILGKISRRGNRYLRSLFVQAAWVVLVKVKCWERYGLKSWIEAAKKRLHHNVLAIALANKLARIAWAVLNKGRAFECVKTEETASRPA

SEQ ID NO: 266288 - protein, 326 aa, unidentified
MNSTCSSLAILGLDVAKASVQAELQSASGSKVRFAFANNPTGFKKLARVLEQHPPAMLHAGLEATGPYSQALARWLQEQGYRVSLLNPRRVKDYARSAGLRNKTDALDAGVIADFVRAHRGRLPGWRPPVAEVQQLQELVRRRHQIEVMLLAEKNRLEASADTVRCSIERLISMLRAEKASLERALAQQIDSHAQLARNHQLLRTIKGIGPLSATVLLAEMAGPDQVQRARQAAARAGLSPRRQQSGTSVRRNKGIGKEGSRYLRKALYMPALVAIKHNAPLRHFARKLQAAGKPKMAIVCAVMRKLIHISFGVLKHQQPFNPSLA

SEQ ID NO: 266289 - protein, 351 aa, unidentified
MIIIGVDYHPSVQQIAYVDTETGETCERRLNHSDGEAEHFYRALERRQVSVRVGIEATGHARWFERLLAELKFELWIGNAAEIKAARVRKQKTDRQDALLLLKLLVEDRFPRLWVPSPENRDLRQLIWHRHRLVQMRTRAMNQIQATAMNEGVRRKKALWSKSGRQQLESLLLAPWATRRRQDLLELVDRLNGTVAELTTAIEQEAHKRPEVLRLMTHPGVGPITALAFVLVIGSPDRFACGKQIGSYLGLIPCEDSSANRQRLGHITKQGSSLVRFLLAESAQAAVRWDSDWRRRYAHLSMRRDRRIAKVAMARRLAISLYWMWRKGYDYQQSLKFGSHAGEPGYRHGVK

SEQ ID NO: 266290 - protein, 351 aa, unidentified
MSHKTAATVAHTIGIDTGKNTLHLIGLDDQGAIVLREKIARGRIAARLANVPRCLIGIEAGMATHYVARELGALGHDVKQVPPAYSKPFRQGHKNDFRDAHAIAEAVQRPSTRCVPVKTDDQLDLQALHRVRSRLVGQRTAVINQIRGFLLEHGIAVRQGLRFLRQQLPDILAKRSDVLSPRMIRIMEDLSGDWRRLDERIEHITKEIEVLAGTDVNCGQLMTVPGIGPIIASATVAAIGNGAAFARGRDFAAWLGLVPKQMSTGDRTILGRITKRGNRYLRMLFVQGARAILLRPKSWVKHSFGPWLTTAARRLHRNILTIALANKLARIALSVLIQGRSYETRIVPAAA

SEQ ID NO: 266291 - protein, 344 aa, unidentified
MEHFAGIDVSLKDSSVCVVDAAGRIVREAKVASEPEALVAWFRGLGLKVTRIGLEAGPLSQWLHAGLSEAGLETVLLETRHVQAALSAMVVKTDRKDARGIAQLLRMGWFRPVHRKSADAQEVRALLVGRKLLQSKLRDVELSIRGILRGFGLKVGEISKGRFAARIRELVAGHAMLETVTGAMLAAREALLAEFMRLHRRMLAIVRADAVCRRLMTAPSAGALVSITFRTAVDDPGRFRSSKAVGAHFGLTPKRYQSGETDVIGGISKVGDAMVRTALYEAANAVLSRPTRFSTLKRWAMDVAKRRGLKRAKVALARKLGSVLHRMWIDGTEFRWGKEAPVAA

SEQ ID NO: 266292 - protein, 345 aa, unidentified
MSESYSGRQFVGIDLHRRRSVIVRMTTDGDPLECIRISNDVERLSTVMARAGEAPEVVLEATYGWYWAVDALQELGAHVHLAHPLGVKAFEYRRVKNDERDARDLADLLRMGRLPEAWIAPPATRELRELVRHRAKLVGIRSNCKAQIHAVLAKCGIQISMTDLFGLAGTELLDRLQLPKPYAARIASLRRIITALDFEIDAFAGQVRARLARDPGFVAVQAIPGIAPILGAVFVAEVGDVHRFTRAEELTCWAGLTPKHHESDKHVHRGRITKQGSRLVRWAAIESVQILPKTSVVGRIRDRVGDRRGRNIGVVAAARRQLEFVFYALRDHHVRALQGTRPVAA

SEQ ID NO: 266293 - protein, 409 aa, unidentified
MELIFMTKEDFIYVGIDLHKETHTAVIIDCYNNKLGEITFANRPADFPKLVTKVKKCNTDGKAVVYGLENAYGYGRPLAVWLIDKGDLVKDVNTAISHRQAKHRGAMYRKSDSDDAEAIALATLNMIDKLPDACPNDTYWSLDQLVHRRDNIMKQRTRLVNQLHEQLCIAYPSYKSFFNDISRPTALYFWEHYPSRKFLKGKTVEDLREELVPASHNKCSTKTCEKILDAVASDKVKNNDFQDARDMGTLSIVSDLQHYDKQLAEVDKMLGCTLTTIPGVNVITAVKILSEIGDIERFANANKLAQFAGIAPLHLSSSGKGKDFATKQGNRRLQATIYFLAVQMIQVSSKGTPRHPAFRAYYEKRKAEGKTSQQALICISRRLISIIYGMLKNGTEYRMPVVENAGENR

SEQ ID NO: 266294 - protein, 391 aa, unidentified
MKLTKDNRIIGLDMHPDVFAAAALVSDGKSDPRIAWVHDREATAELETWSKKHLKKNDIVVLEASGNSFEVAARLHAHGHTAIVLESAQAGKIRDNYCNDDRHSAAKLARVYQSGLAKEVWQPEAKTREYREVHFAHRNAAKDATRSRNRIHSHLNEHCVRLKKGTRLTEQSGEKTALAAKTWTPLQAELLRQKFAQLRETEARRKQLERLMVLELAANPRWASLWRLMGVRHRVAFALMAMIGDINRFPTAKKLVGYLGLAPGKEQSGNDAKGREKGLGHHGRGDVRALLIQSAQSVLNQRTSPLHKWGWKLLVKKHRNHAAAAIARKLAVSIWHLLKGHYTPLEEAGKHLHTKLLKLSTVIGKEGLKNLGFKNRESFVDDQIKKIQLIT

SEQ ID NO: 266295 - protein, 368 aa, unidentified
MLKQSHYKVGCDAHKHYSLFAVLDHQGRPVERTRVNHEPGAIRAFLSRFPEGTPVALETVGNWYWIVNEIEQAGCAPFLAHAQMAKKMMGHVHKTDKLDAEGLAILQHLGSLPTVWIAPGEIRDERELPRTRMALSKMRTALKNRMHSTLAKYALSLDTQSDIYAPKWRPQLVQLNCSLPDETRRCMQQELELLDQVQDQIHRLEARILERVQLTPTIQLIQSVPGPAKILSIVIDREVGCIDRFPSPHHFASYCGLVPKVKASGGKTHYGKMIKAANNYLKWAFIEAANVVVRQQQHPSWRQKYVVTLFERTRQRKGHAVAVGTVARYLAEATYWVLKKGEPYREPASRRPAGSKSAASHRQGQARA

SEQ ID NO: 266296 - protein, 366 aa, unidentified
MSEIITTFVGLDVHKESIAVAVAAAGREKPQFIGTNGPTLKELLKTLAHLGRREQMLLVYEAGPGGYVLVRELRAKGYRCEVVAPTKIPRRSGERIKTDRRDAVALAHFARAGDLSTVTVPDEADEAIRDLSRAREDALRARMTARHQLKAMLLRHGRHYAGKVGWTQAHERHLSTVKFAHPAQNIAFTEYRIAVSSANERLERITQALRQALSEWRLRPTVEALMSLRGIDFVGAITLVAELGDLRRFAHPKQLMSFLGLVPTESSSGQSRTQGGITRTGNTHARRILIEAAWSYRHPARIGREIQVRQERLPRELREISWRAQLRLCQRYRRFAVRGVHQNRACVAVARELTGFIWDLARHVPP

SEQ ID NO: 266297 - protein, 412 aa, unidentified
MTSLKQGIIQDNMRVVFGIDVSKASSEVAILVNGEKVHGYTISNDAIGFARILGDLRTVYKPEIIFEATGVYSRRLQTFLDDNGYAYTRLNPLEAKKQLDSLRVRKTDQIDAEKLAQSQFVLNRKPTYVQEEVYQNLRDLSRFYQNLTEDIVRAKNRLHKVLQVTFPELENILSTPSGEQYWNLVIAFPCKDCVLELSNDELSKSIRLSTSKRISDKRVAYLAEKLIALANQSYCAVKKTSPILEEVRYYAKELLRLYEQRQAVLDEMVELAQPLPEYDILLSIPGIAETTATSIIGELGDIRRFQSANQINAFIGIDLRHYESGNFLAKEHITKRGNPYARKILFKCIHNIASASHTNPCHIADFYEKRKRQSQTTSTKPHTIASIHRLIRTMYYLIMHNKLYDYASTQNR

SEQ ID NO: 266298 - protein, 322 aa, unidentified
MYANSSVGIDVAKAHLDVHLLPAGSRLRVSNDPAGHRQLLGLIGPARPERVIVESTGGYERPVLFHLVDHGFPAALVNPADVRSFARGARIWAKSDRQDAWLLAEFGRRVATRVVDPSCKMLHVLRQLVALRRQLVCQRTRLRNQLEHADAVVVRQSIQRSIKSVEEERKQVQKLIQQQIDADPRLAERQKKLQAAAGIGQVVSAVLVSELPELGTLHRRKLAALVGVAPFDNQSGQADLKRSIKGGRATVRGALYMATLVAIRRDPLVKAQYQRLVGNGKPKKVAIVACMNKRLCYLNSLVRQPAPAAERNEAGVWGQSPQ

SEQ ID NO: 266299 - protein, 413 aa, unidentified
MEGLSPLYRRVAGIDVHKMLHVVTVVVEHADGSIEQQNREFGGFKRDCRALSTWLVELGVELVVMESAGIYWKSLYAHLERAGINAWVVNAHFVKHVPGRKTDMNDSQWLAVLARFGLVRGSFIPPQDLRELRLVSRYRCKLTAMRASEINRLHKILDDGGIKLGGVVSDINGLSTREMVAGLIDGKPINALLDMARGRLKLRREELQAALDGDLTARHRFILEHIKVHIDVLEQSLTELDTYILRAMAPYQWAHRLLQTIPGIDQIASALILIEIGDDMARFGSADRIAAWAALCPGNNESAGKRKTGRIGKGSSVIRYIMCECANSAWKTKSSLAAKYKSLMVRKSHNKAIIAIAHKMIRLIFLLLTRKVAYHDPQIDYQAMSVKKNAPRWIKQLKAIGQWPDKAATPTGA

SEQ ID NO: 266300 - protein, 372 aa, unidentified
MTRILAIDLGKFKSVTCLLDTTTNETEFWTMSTDRHYLLTVLKNYTPQLIVIESCGLAGWVHDICTEEGYEVLVCNPNQEAWKWKNVKRKTDRDDALKLAKLAALGQLVPVYIPCQQQREYRRLVKYRKVLVGRVNRVQNNIRAIFAQRGIEMVRGQKAWALERHDQIAQHRKPLAECSLDELWRGELDLELQQFASLRECQHEVHKKLKVLAAADERVRLLQTIPGVGRKTAEVVVAYIDDPHRFQNARQVSSYAGLVPRRYQSGEMDRQGRINKRGPRQLRSALVEAAWVMLRYNPWAKSVYDRLTSGQKTRKKKAIVAVARKLLVRCWVMLLRKEPWKETLTTKTLAAHAASRITAIAGSRLGLPRRPG

SEQ ID NO: 266301 - protein, 351 aa, unidentified
MDAMTIGVDLAKSTFQVAMRMGVDGPVKGQRFTRHQFERFLRTHRSAHVVMEACGTAHHWARVAHTCGHRVSLLPPQYVRPYVRRHRKTDRTDAAGLLDAVRNPDIHPVVPKTVAQQELLALHRIRRQWMTSRTARINAVRGFFQELGIPMARGAKTACRTAAHLLADATTPIPFALRTALHELLCEVHDLETRVHTIERQLAHMVAEHPVIQRLQRIPGIGFLTATALVATVGHIHAFRTGRRFASWIGLTPSERSSGERRRLGCISKAGDVYLRTLLTHGARSVLRAARYHQRCGRPLARLPRWALAVEQRRGYNKATVALANKLARVVWVVWSRDVEFCAEPPQAVAA

SEQ ID NO: 266302 - protein, 322 aa, unidentified
MSKIFFGIDISKSNFDASLLLEQKIKTKKFSNNRSGFENLEDWLKVCNISIENVHACMEATGIYWEELANFLYNINCTVSVVNPTKVKGFGMSELSRTKTDCADSRLIARFCKAMHPPAWQPIKPEYKELQQLVRRLEDLQNLLQMEKNHLEAASSNNTKKSIESVIESLNKHIEEITTLINNKINKDPELKKKQKLLETIPGIGEATIMQILSFINVENFSNIKQLDAFLGLNPKQRQSGTSINGRGSISKIGNSSLRKTFFFPAIVAKKYNPIIKVFCERLKIKGKPTMVIVCAAMRKLVHIIYGVLKSGKAFDATLIKI

SEQ ID NO: 266303 - protein, 403 aa, unidentified
MNSVGIDISKGRSTVAVMRLFGEVVISPFEVRHTDSELSALARRLKSLDGETRVVMEATGNYHAPVAKLLHDAGLYVSVVNAKLVHGYGNNELRRVKTDKKDAAKLANYGLDRWLTLPRYVPEEGARLLLKNCYRQYRQYSKVQTVLKNNLISLLDTVFPNVNRLFSSPIRGDGSKKWVDFVAEFWHCRCISEKSEKAFTNKYQRWCKKHGYNFSVAKAHTIHTEASGHIGVMPKSETTKLLVEQAVSQLRATSAALAALKQEMQTLASQLPEYSVVMDMFGVDPTLGPQLIAEIGDVRRFYSKKALVAYAGLDAPPNDSGDVTGKHKSMSKIGASSLRRTLFLVMSVYLQNAPLDEPVYQFMDKKRAEGKPYRVYMMASANKFLRIYYATVKAYLESLEHTA

SEQ ID NO: 266304 - protein, 387 aa, unidentified
MSKNKGRVIGLDVHPDSFAGAVLEGSDPARAKVLSSSTRVELEQLEQWTLRQTKAEDTLVLEASGNAFAVAARLRAIGRKAEILDSHRAGKVGKVYCANDRVDAVKIARIYLSALSPIVWQPDQKTLERREVFSAYQAVVKESTRAKQQLRSMLNEHCVRLEKGFRLCHPRAITRLLKLREWTPARSMLLQQLHSTLVAARTRRTLLRRHMAQEIVAEEALLRLTRLCGINLITLYGVVAAVGDVRRFTQSKKLVAYLGLNPSVSQSGNFQGSGALKRHGRGALRALLIQSGKKLLEVNNPLQKWGLAVAARRGRNKAAVAVARKLCVALWHVMMGHAIGTLERLDTLQTKLSKFATEIGPAALTAFGYHNKADFVQKKLYVLRSYP

SEQ ID NO: 266305 - protein, 320 aa, unidentified
MTAVLGIDVAKAKCDVTLQFPDGRRRRKVVPNTAVGLRTLIAWLPQQGAGLVHAGLEATGTYGDLFATGLHDAGHVVSLLNPATIHAYGQATLTRTKTDRADADLIATYLATQQPAAWTPPAREVRELQALVRRLDALLTMQTQEKNRRAAGALVPAVQQSIETILAGLTAEIAAVRRLIADHIDRHPGLRTQRDLLASIPGIGETAAAILLGDLLAKSFGSARQAAAFAGLVPRIVESGTWKGRTRLSKLGSGRLRKALYLPALAALRYNPSIRALRTRLEQHGKPPMVIVGAAMRKLIHLAYGVLRSQRPYDATWVRA

SEQ ID NO: 266306 - protein, 359 aa, unidentified
MASIASDPADVIVGVDTHKDQHVAVALDGLGRRLGERFAPATPSGYADLLAWAAGLGRVAAFGVEGTGSYGLGLARFLRRHGIVVLEVARPPRKGQRRRQGKSDPVDAEHAARAVLAGSGPVTPKTGEGSVEAIRLLKVARDTAVVAHSQAMITLKATLVTANDALRAELEPRTDFALVTACAALEVSGDLADPDVAMRHALRALACRWLELHEEIKAHTRHLKTLTTRTAPELVATFGIGFDSAAELLCAAGDNAGRVRSEAAYAKLCGACPIPASSGKTSRHRLNRGGNRQANAALFRIVVVRMRWHPATIAYVQRRTAEGLSKREIIRCLKRYVAREVYQLLPVPATATAEPLQAA

SEQ ID NO: 266307 - protein, 340 aa, unidentified
MNIKTIGLDIAKTIFHLICLDQYGNQFFKKKLRRGQLLSYFANLEPCIIAIEGCASSYYWQRELTKLGHTVKLLPAQHVKAHLRGNKNDYNDALAIAEASRVPTMREVTPKTIDQQSMQALHRLRDKAIGERTALSNQLRGLLAEFGIIFPQGLSKIREGLYSVLEDAENDLTHTLRAALALKHSQFTQQDDLVAELSRLIKEAGNEQTQVDLLQSIPGYGEILSTAYYSVIGDGKAFAKGRDASASLGVVPKQHSSADKTKQLGISKRGDKYLRKMLINGARSVVNHAHKKDDALSVWVTRLIERRGKNKATVALANKLARIGWAVTVSGKPYQVNYGH

SEQ ID NO: 266308 - protein, 331 aa, unidentified
MEKREFVGIDVSKLTLDVCLFSKKSHSQFQNNDKGFKKLTKWIEKATSKRISELAFCFEHTGLYSLPLSIYLEQNKVSFYVVSGLLVKRSLGLKRGKSDRIDAFDLARFVYLHQAELKQYTLPSQNIIKLKQLLSFRTRLIRQRGAYLANVKETKLLLGYDNKDLIISTSVELIRVLSENIKVIEHEMMQYIKVDEDINITYKNLTTIKGVGMIVAIALITSTNNFQSFDNWRQFACYAGIAPFEHQSGTSYRGKTRISTLGNRHLKTLLSQAAASSIQFNPEMKIYYQRRVSEGKNKMSTLNIIRNKIVSRMFAIAKRQTPYVDTYKFAA

SEQ ID NO: 266309 - protein, 400 aa, unidentified
MLSIGIDVSKGKSTVCGMKPGGEIVYAPFEVQHTREGMSELVSLLRSSGEEVRAVLESTGSYHCPVVAALLENGIFVSVVNSLRMKRFCSQSIRKVKTDRIDAMQIALYGLAYWQELQPTRLPEDTYRELQLLARQYYQMTSMLIKAKVDFNALCDQVLPGMQELMSDHAGRHKLSDFVLRYRHTTHILEMGETRFRKDYCKWAEKKGYRNCERMAALIFATAQNGIPVLPNAPSTQIVITEAIRVLHTVEASRDAILTQMQALAKTLPEYSLVREMPCIGDTLAPRLIAEIGDVRRFHSKRALIAYAGIDAPPYQSGKFCANNRHISKRGNRYLRKTGYEVMQSYVMHKPANDPIFTFIEKKRGEGKSGKLAMVAGLNKFLRVYYGKVTELYRSLPAIE

SEQ ID NO: 266310 - protein, 362 aa, unidentified
MSDEKYLAFDVHKATSSFTVRDHKGRVCQEGIIPTTGDTFLRLIASIPGHLHVTVEEGLHAEWLFDLLAHRVHRFLVCNPRKSKLLASGSKSDRIDCRKLSKLLFLGELSAVYHGERSLRALQQLVSSYETLVSDCTRSRSRLKALYVGRGIACPRRTVFHPAQRQLWLSKLSEPGARLRAELLFDELDAQTVLRKKAKAAMLAECRTHAAEVKVLRSVSGFGPVRVAQLLASVRTPHRFPNASAFHKYVGLAVETSSSSDYEFGPEGLRKRTRHVATRGLTRDFNRRLKNVFKGAATNAAHHGPLVPYYARLLERGSKPELARLTLARRLASAVLSIWKRGELFDPRRFLAKANQTDTARR

SEQ ID NO: 266311 - protein, 356 aa, unidentified
MKKYIGCDMHKKYSVFVTMDEHGHLSEPRKVANDSLELDSYLKTVEEATPVAVEASGSWYWFVDRLEQAGLDVRLVNPLEAKKRMAGRHKTDPRDAAGLAMLLRNGTLPEVWIPPAELRDLRGLLRTRLALRRHTTILKNRVHGAVRRYGQWEPGEAKNLFAGKGRVQLSVYVGALPPETRIATRHEWQLIDEVEQHIQELEKRIRLGLGQLGYVRLLRSLPGVGEILSAAIYLEIGEVHRFGCAAQLASYAGLTPTVHSSGGKTRMGPTSSIANHYLKWAFVEAANCIVMQKHRFAGRHVVQLYERLRAAKNHGKAAVAVARHLAEASWWMLQKKQSYREPAPASRSSSENGSAR

SEQ ID NO: 266312 - protein, 408 aa, unidentified
MEVVYRCCCGIDVHKKIIVACLNQGGEQSLREFGTTTSEIKSLATWLTESGCEIIAMESTGVFWKPLYNLFELMDLDAIVVNAAHMKALPGRKTDVKDAEWIADLLRHGLLKASYIPSREQRELREITRYRKSLTEERCRETNRLQKILEGANIKLDSVVKDINGKSARKLLEKIIEDDVPTSEEEISKMIHGRMRSKLGQLVTAIEGITTPLQRKLLAQVIDHIDDLNRRIADLDKLVQDYMDEYEAAITALCDIPGIARRSAEVILAEIGLDMSRFPSAAHLCSWAGVCPGNCQSAGRRKHGKTTKGNKPLKTILTQCAKSARSVKGSYFSAQYQRIAARRGKNRATLAVAHSMLIAIYHMLRNNVPFRDLGSDYYDSFNRDRKIHGYLKRLKALGWEPDALPGSA

SEQ ID NO: 266313 - protein, 338 aa, unidentified
MPMLSIGIDVSKGKSTVCGMKPGGEIVYAPFEVQHTREGMLELVSLLRSSGEEVRAVLESTGSYHCPVVTALLENGIFVSVVNSLRMKRFCSQSIRKVKTDRIDAMQIALYGLAYWQELQPTKLPEDTYRELQLLARQYYQMTSLLIKAKVDFNALCDQVLPGMQELMNDHAGRHKLSDFVLRYHHTAHILKMGETRFRKDYCKWAEKKGYRNCERMAALIFATAQNGIPVLPNAPSTQIVITEAIRVLHTVEASRDAILTQMQALAKTLPEYSLVREMPCIGDTLAPRLIAEIGDVRRFHSKRALIAYAGIDAPPYQSGKFCANNPAYLQAGKSLSA

SEQ ID NO: 266314 - protein, 313 aa, unidentified
MIIALRYVGIDISKKHLDIFDEADGVPRRIANATQAITQQVARWQCDALVVFEATGIYDLALREALRQAGIQFARINPARARDFARASGLLAKTDPIDARMLAAFARAMQPAPEQVADPARGALARLAKRRDQLVLMRAQEKNRRSEADDRAMAERIGRLIEVLDSEIAEIEADISALIKAEAQIADDAKLMRSLPGVGPVACMQLIAQMPELGRVGPKQLAALAGLAPFNVDSGTFRGKRKIAGGRKRIRDALYMAALNAVRRADPFKAFYARLRQAGKPAKLALIAVARKLLTVLNAMMRDRKPYLQTKPT

SEQ ID NO: 266315 - protein, 400 aa, unidentified
MKGPIVSIDVSNGNSHFQCFTQRGTKMGKVHRISHTVEGFNFLKSKIEELEKKTNEEVVAVYEATGVYTKPLERFLEKNEIKQYSISPLQSAKQRKTEIHNKKTDKKDPESIAEVYYIKELRENEKEADLYHELRTANRVYEDCLVHLRKYKVTFQSHLSIVFPGYMKLFQDGYSQISLQLLEMYPHPDRLKNKQPEKVAKKLNKHTDHSFEVCLKTAEKVIEFANKTYPGCDKEDAWVAVLVDDIHHLQDTMEEAEAKLDKIIELAKATPYYSIILSIDGIGPNLASRIIAEFGDISKFKTRGAMVAYVGNDPNRAESGDIEGYHLSISKKGNKRLRCILYLAVTCSIRSRKENPINAFYQKKRQQSTPLKSKAAKVACITKLIRTIHGMCKTGTVFTS

SEQ ID NO: 266316 - protein, 344 aa, unidentified
MKITTIGIDLAKNIFAVHGVNEHGRAVLKKVLKRNHVTEFFANLPACVIGMEACASAHHWARKLQAMGHTVRLIAPQFVKPYVKTNKNDAADAEAICEAVTRPNMRFVPVKTVEQQSVLSLHRVRQGFVRARTAQANQIRGLLAEFGIVVPKGIGHLERQVPELIEDAENELTGSFRLLIQRLMDQLKELDRQVKELEAQIQAWHRSDETSRRLARVPGIGPLTASALVASVGDAKSFTSARQLAAWLGLVPRQNSSGGKNVLLGISKRGDVYLRTLLIHGARSLLQVAKRKECRSAWLDGLLQRRNANVAAVALANKNARIVWALLAHGREFHPDYHASAATA

SEQ ID NO: 266317 - protein, 356 aa, unidentified
MSHDVKYIGMDVHKEAIVIAVQNESGKLVMESVIETKASSILQFIHGLRGELHVTWEEGTWAAWLYDLLQPQVQHIVVCNPRRNALLKEGNKSDKVDAGKLADLLRTGMLRPVYHGENGLRTLRELGRSYQTISKDLTRVMNRLKALYRGWGIPCAGTQVYAARAREQWLSKIPHTGVRRRAELLYQQLDGLQALRRNVRPELLAESRKHKAAKLLRQIPCIGPIRAARLIGLMQTPHRFRSKRQLWTYSGLGIETHDSAQYCFVRGQVQRSKKPQQVRGLNRNHNHEMKEIFKSAATRASCGRGPFYDFYAALLAKGMKPEMARLTLARKSAAITLTLWKKEERFDAEQLKTQAA

SEQ ID NO: 266318 - protein, 407 aa, unidentified
MEVLYPRCAGLDVHQQTVVACARIASGSTVQQDVRTFGTATGDLLALADWLTAHGCTHVAMESTGVYWKPIWHVLDGQFDLILANALHIRSVPGRKTDVNDAMWIADLLAHGLIRSSFVPPAPIHELRDLTRTRKQLVREVSQHTLRIQVLEDANLKLTSVISDIMGMSGRAMIEAIIRGEQDPQRLADLSQGRLRASRPAVIAALQGRVTPHHRFLLRVHLTQIDALEVAVRDVEARLGDALAPFQAAVDHLMTIPAVGRTVARVIVAEIGVDMSRFPSAGHLVSWAGLCPRQQESAGKRLSTRTRPGNPWLKTTLVQVAWVAARTRNTYLRAQFLRLKSRRGPKKAILAVAASILTAAYYILKDDVTYHEPGADYFERRDKAHIARRLIRRLEELGLSVEIRPAV

SEQ ID NO: 266319 - protein, 349 aa, unidentified
MVVIGVDSHKRTHTAVAADENGRRLAEITVAATEAGHLDLVRWAARFPDRRFALEDCRHLSRRLSADLLRAGETVIRVWPKLMAGARRSSRESGKSDPIDALAVARAALREPNLPVATLDGEERELRLLVDHREDLVAERTRAQNRLRWHLHELDPGTEPAARSLDRRVVLDALEARLTGVNGTVARIARELVVRIRELTQAIDALEREIGRLVATVAPMLLALPGCGSLTAAKLIGETAGIGRFRSAAAFARHNGSAPVPVWSANNERHRLNRKGNRQLNVALHRIAITQIRIDERGRTYLEHRRAAGDTKAEAIRALRRRISDEVFRRMRHDEHLRATPRAVLAAAA

SEQ ID NO: 266320 - protein, 320 aa, unidentified
MNQKSSFIGIDVAKTRLDVAVRPTDQQWQVTYTEKGIQELVEQITELHPTLVLLEASGGLELPMVAALAVANLPVVVVNPRQVRDFARATGKLAKTDALDAQVLAHFAEAIRPCPRSLPDTETQSLTALVARRNQVMSMLVAEKNRLRTSRPPVNQRIQLHIDWLEQELDEIDRDLKEMLRNSPVWREKENLLRTVPGVGPQLAISILAYLPELGTLNRKRIAALVGVAPFNRDSGALRGKRAVWGGRSRIRAALYMAALVASRHNPVISAFYQRLLAAGKAKKVALTACMRKLLVILNAMLKHHSSWQSLNPQLLGPCS

SEQ ID NO: 266321 - protein, 346 aa, unidentified
MNITTVGIDLAKSVFQVHAVDARGKVVLRKQLRRSEMGGFFTNLPPCLIGMESCGSAHYWGRKLHSQGHTVRLMAPQFVKPYVKSNKNDMADAEAICEAVARPHMRFVPLKSIEQQSVIALHRVRQGFVRARTAQANQIRGLLGEMGLVIPQGIWHIAKRVPVLLESARNDLPASFRALIERLTEHLKLLDRQVDEIHRQILAWHRSCSLSQKLQQVPGVGPLTATALIATVADAHTFKNGRQMAAWLGLVPRQSSSGGKPKLLGISKRGNSYLRTLMVHGARSAILAARSGRAIRANPWLAKLLDRSHTNVACVALANKNARILWALMVHGKDFDPGYVASRSLA

SEQ ID NO: 266322 - protein, 337 aa, unidentified
MEYFAGLDVSMAETHVCVMNRDGAVVYEVKVPSTPADIAAGLAKAPACGRIVFETGRMAPMLYHGLRQLGLPIFCIESRQAHQALKSLATHKTDRNDARGLAHLARTGFFKPVYVKSLPAHAVRALIIARKKLVGQRVTLENQIRGLAVVFGVRLPRALRPAFVRQALQASEGIPGLSAAMRGLVAARAAVLAAVSAIDADIRQLVRASAACRRLMTIPGVGQLTALAFTAAIDDPSRFRRSRDIGAYLGLVPRRYQSGEVDYTGSISKCGDRRVRTLLYEAANVMLTRYKSALKLKDWALAIAKRSTMRKARIALARRLAIIMHAMLRDGTEFNPA

SEQ ID NO: 266323 - protein, 334 aa, unidentified
MKQVSQVGVDVDSEALVCAMQRAGQRLPLATFANTPTGHKKFIGWATKGARPARVCLEATGIYSLQFALALHDARNVEVMVVNPRAIKDFARACMQRAKTDAVDAAGILEYLERMPFTAWQPPAPEILELQAINRRIDQLHTELTREKNRRHAAEFAGASAEAIAHDIEINIHHLERRIARMHDSGLQLVRRVPALATKLAHLVSTKGIGEVSAMRLLAELLVLPDDLAAPQWVAHAGLDPRPYESGTSVHRPRRITKVGNRHLRAALYMPALVAIQHEPNVKAFYNKLVTAGKKPMQAVVAVMRKLLHAIWGMLKHDQDFDGNKFFKLAESIA

SEQ ID NO: 266324 - protein, 344 aa, unidentified
MEHFAGLDVSVKETSICIVDDTGKIVREVKVASEPDALLQVLKNSAYCFKRIGLEAGPLSQWLYSAFAEANLPVICVETRHMRAALQAQINKTDRNDARGIAQMMRAGLYRPVHVKTLRSQKLRTLLSHRKLLQSKAIAVENDLRGTLRNFGLKVGIVGKLKFEARIKELVESHPDLAVLVEPLLVVRRVLREQTAVLHRRLLAIVRDDEVCRRLMTIPGVGPVVALTFRTTIDGPARFRNSKAVGAVLGLTPCKHQSGESDRTGAISKCGDEMMRVMLYEAAQSLLVRSTKWSWLKAWAMQIARRRGMKKAIVALARRLAVIMHRIWVDGTTFRWTRQEVAAA

SEQ ID NO: 266325 - protein, 371 aa, unidentified
MNDFSKYVGLDVHKETIAVAVADANGGEVRYYGEIPNTPEEVVKFVRRLRKEGARLSFCYEAGPCGYGLHRQLKDLHQDCQVVAPSLIPKKPGDRVKTDRRDSLTLARLLRAGELTSVWVPDEAQEALRDLTRAREDMKHLQRVAKQRLLAFQLRHGKNYPGKKNWSQAHFRWLETLKFDQQVQQIVFQEYIDTVQALTKRVAIFDAQIETAGVESAFSLQIEGYMALRGIDRLTATTIVAEIGDLRRFPDAPALMKYLGVVPSEHSSGATRSRGGITKTGNGHVRRVLVEAAWTYRHPARKSPLLQRRAERTSEAVQEIAWAAQKRLCVRYRMHEGRGKKKVQACTAIARELTGFIWAIGQVLPPPAVKA

SEQ ID NO: 266326 - protein, 367 aa, unidentified
MEKSSTAFIGMDVHKESIDIAIADAREARHYGRIGGDAASVDRAIRKLRSAHRDLVLVYEAGPCGFWLYRRFSEQGLRCMVVSPSMTPRNAADRIKTDRRDAMKLARLARAGELEPIYVPDALDEAMRDLVRAREDAVCMQRQARQRLQALLLRNEIRYVGRSSWTQAHRRWIAHLKLPNPAQQIAFEEYVQAVEEGGQRLERLAAAIGAQLEHWRWRPALEALQALRGISAIHAVRIVAELGDFQRFESPRKLMGYLGLIPSEDSSGARRRQGSITKAGNSSARRALIEAAHAYMHPARVSWVIARRQTGLSKSTCDIAWKAQLRLCARFRRLAARRVPRNKVIVAVARELSGFVWAIAREIKPAL

SEQ ID NO: 266327 - protein, 389 aa, unidentified
MQVMIEGQSHFQPFGLSYWGFEDLNKGVGSMTASYEYHIGVDYHKSYSHLVVQDSSGKTLRSGRVKNDRQSLGGFLERYRENSHAVVEATRNWMVMYDWLDDICDDVVLAHPWKVKAIADAKIKTDKIDATVLAHLLRADLVPEAWAPGERARELRIALRERMFYVRLRTMTKNRIVTVFDRYPEQTAQLKKLGDLFGKAGRVQLAQVNVSEIDRIQIDRGLDFIADIDVRIKQSEATIRTMTKANGNVKLLKTIPGIGEFFARLIDAEIDDLSRFRNPKKLAAYAGLVPSTYSSGGKTFHGKIIKQGNKWLRWAFVEAVSPAIATDAQLRAQYEHLKFRGTNKARVAIARKLLTIAFQILRDQRAYEPRGENTMEGTSTDIPVVLMAV

SEQ ID NO: 266328 - protein, 434 aa, unidentified
MEDVTDEPLYRDRVCGIDIGKAGLYATIRVPSDSNPARRASETRSFATTRRGVLALADWLRCWQVPAVVMEATGDYWKGPFYRLEAEGFECVLADAKQVKNLPGRPKRDPSDSSWLAQCFERGAVTACFVATPEFRVIRLHTRYRRDLIEERTREKNRTEKLLESAAIKISSVVTDLHGVTGRDIMDHLIAGERSPKVLAQLARRRARRKIAELEEALEGAEFFTGYHAGLLKTMLARIDQIDAEITRLTGVIEQLLAPWEEQLQQAESMPGWGRRSAQDVLAETGPDMTRFPTGGHLVSWAGRAPLDRQSGKRTGRSRHKKGNKYVAAATGETAISAGKTGTREGARYRKLARSRGKAKACVALGNTQLKVYHKLLSNPGMRYEDLGPDYYQRRAQTRRKVAYHVRELEELGLEVTLCRPGPAQDDPEPTQAA

SEQ ID NO: 266329 - protein, 398 aa, unidentified
MDLPVYYELETNNGNRDYRIQIGGHYMNYNTVYVGMDVHKESFTLCSCKYEDEKASHYQRTPASYKNVLRYLAFLRTIYGEYTRFVCGYEAGCLGYSLYHQLENFNVECVILAPTTMLEQRSKRRIKTDKRDAEIITKSLAQHNYSPVHIPTKMDNQTKEFIRMRDDHKAELKKIKQQILSFCLRQGYQYDGSGNWTAKHVKWLRSLKTEGLYKEILDEYLLTYTILTDKLNRLDQRIEELASKEEYKESVSKLTCFLGIKTHTALSVIVEVGDFQRFVSARKFAGYLGLVPGQHSSGDDRNGLGITKAGNTHVRRLLVESAQSYTRGKIGYKSRVLRSRQAGNSPQIINYADRANERLRRRYYKMVLKDGKKYNIAKTAIARELACFIWGMMTDNIY

SEQ ID NO: 266330 - protein, 377 aa, unidentified
MQMEHNMESIVYVGIDVHKDTYSICCYKSREDRFYYEKKLVAESKRVIKYLESVEKEFGEDTLFVCGYEAGPTGFGLYRDLQKAGYSCVVMAPTSLKHSANQKIKNDRVDAKFLAKTLFTKDYSSVNVTTEHEEAIKEYCRMRLSLKAELKKAKLVMQSFLLRLGKVYTEGKTWTVRHREWLQKVHFEEEYLNEAFNEYMISINTYENRIKSIENRLTEIAQDKCIKEKVEKLVCFCGIETVSAVSIVSKVGDFNRFEKAYHFSNYVGLTCGEESSGKKEQRLGITKTGDKELRRLLTESAKSIKQTNSQGRKSKRLRDRQKDKDPLVVAYADKCRQRLKNKITHLELRGKSPNVATTAAARELACFIWGMMTNHIA

SEQ ID NO: 266331 - protein, 316 aa, unidentified
MSEPVYVGIDVAKNSFEVAVTGESVTLNLSNDEGGQGELCRLLIPLAPRLVVLEATGGYEQELALALAGAGLRVSVINPRQARDFARCMGKLAKTDRIDALALRSYAALLDSQGHEPRALADEQQRELTALVARRRQLVAMLVAERQRLKVAHPKAKGSILAIMDAIAAQLHDVDGQLKEHVQAHHADLAKLLTSVKGVGPTTASTLLAQLPELGKLNRKQITSLVGLAPMNRDSGTLRGQRHIFGGRADVRRVLYVAALVGTRFNPVLKAFYLRLQGAGKSKKVALVACMHKLLVILNAIARTRAPWNSDIATVV

SEQ ID NO: 266332 - protein, 367 aa, unidentified
MKKISSAAAQKIEKVEGQKLTIGLDVGDRSSWYCVLDEAGDVLLEQKVATTPKAMKEVFGGMPHSRIALETGMHSPWVSRLLSEVGHEVIVAHARTVRLIGESRRKDDRFDARTLARLARIDPDLLGPVQHRSRKAQVDLMVIRARAGLVRARTALINTARGLTKSYGERLRGCSPRKMNRELAEGLSPELQSALQPLLDEIESLSERIREYNERVQQIAEESYPEVARLEQVKGVGTLIALTYVLTLEDSRRFRKSRDVGCYLGLRPGRRNSGQSEPQLHVSKEGDPYLRTMMGQSAQHVLGPFGADSDLRRWGLRLAERGGKNAKKRAVVAVARKLAILLHRLWVSGEIYEPLRNSSQALLPAAA

SEQ ID NO: 266333 - protein, 460 aa, unidentified
MGKAKRKKKELDFDVLEQIQPNAAGIDIGSEEIYVCIPAGRDEQRIRVFSTFTSDLHVLADWVVASGVESVAMESTSIYWVPLFDILEDNGIEVCLVNARHLKNVTGRKTDVSDCEWIFQLHTYGLLRGSFHPPDEIRVLRSLARHREMLVRYRAAHIQHMQKALDLMNVKLTTVLSDITGATGMTIIRAIVAGEHDPHVLAQYRHGRCKRSQEEIAKALTGHYRREHLFALQQAVELYDMYGQQIAAVDAELETLYAEMAKTSPTSEGEVSTTAPPQPRKQKRRKNQAHFDLAGALYHMVGVDLTQIDGIDALTAQVVLTEVGMDMNKWRTVKHFTSWLGLSPNNEITGGKVKRRRTRKTDNRANHALRVAAQSLARSDSALGAFYRRIKARHGAPKAVVATAHKLARIIFHMLKHRVDYHDPGADQYIAQQRERAIKRLHKQASRLGFRIESQLAIST

SEQ ID NO: 266334 - protein, 355 aa, unidentified
MESLKYVGLDVHRDTISVAVLEENGKLVMQSILATHAAALVDFVRGLRGSVHLTFEEGTHSAWLHDLLSRHVARVVVCDPRQNALLKAGNKSDRIDAHKLADLLRAELLSPVYHGESGTVTLKHLSRSYQALTEDTTRVKGRIKALYRSQAIASAGKKAYGRRHRGQWLGQLTQAGMHRHAELLYEELDALLSLRREARRELIVESHKHDAVKLLRTVPFLGPIRAAVLIARVQTPHRFRTKRQFWAYCGLALETRSSANYGFQGEQLVRAKKPVFIRGLNVNHNHDLKNLFKSAATSAGAMPGPFHVFYETLLAKGMQPAMARLTLARKIAAIALCVWKKGEPFDAEYLKPQAA

SEQ ID NO: 266335 - protein, 350 aa, unidentified
MSTATLYTGLDLHKRSLTAATLDTDGTLIDEQKLPCHPDALRLYFAEHAAGPGGQHRAVVECTTGWYWVKDVLATTDVDVHLAHAKGVKAIAAAKVKTDSADARMLAHLLRADLLPEAHMISDEMRPLRDVLRTRLTLVERRVGALNSVARLLEKMNVQDVADLPELMQLQARCHLDQVDLLQRQIKELEKALHPHLVPDADVQRLLRIPGIGKVCAFTLKLEIDDIDRFASDRAFFSYCRLVPGADNSGERIRHKRSREGNRYLKLAFSHAAVRSVQYYPEVRAWYRRKKRRKPDPVARALVAKEIARIVYHVLRKQEDFNGTFKGAVLSRVKQEQWPLLPSPASITDG

SEQ ID NO: 266336 - protein, 336 aa, unidentified
MAGIDLHSNNLTIGIVDQDGRRLKHQKLDCDLAEVDRFLRPLKPRLKSVAVESTYNWYWLVDGLRALSYPVVLANPAKIDQYSGIKHADDKNDAYFLAELQRLNILPTGYIYDPVLRPVRDLLRRRLSLVHQRTALMLSFKSLYVRTTGQTMSLSRLKGLRVSEAIGLYEHPANQLIAKVQKEHIEQLNRSIERIEKVVLQSARELPYYERLNTLPGVGKILGMTITMEVGEISRFKTAGDFASYCRAVDSQRTSNEKNKGQNNRKCGNRYLSWAFVEAANFARRSDERCRRWFDRKAGRTSSVIATKALACKLAKAAWHVMAQNVDYDEQRVFPQ

SEQ ID NO: 266337 - protein, 324 aa, unidentified
MEFQHYIGIDWSMNNVAIARHTLKSKKATVTEFDDSNIYNVKRYLKQLKGTKIVSLEESTASQWLYTELKPHCDDLIVCNPYYNHLLKYGPKNDRVDAEKIALLLRIGHLRPVYHSGEDFIYLRKLTSGYEDLIKATVRSKNQLSSLHRAFNNTELDESSTFVAEGLERTIELYSKEKDRYLERFQSIRDKYPQIALLEGVPGIGMINAVKAMATIVDIKRFSSSAHFISYCGLLRHELISGGKSYGRRKPRANTTMKSIFKQATMVNIIKGDLKSPFSRYYNYLIKEKNYPEFKARHATARKIAKIVYGVLKNEKKVDLRNMH

SEQ ID NO: 266338 - protein, 367 aa, unidentified
MKKISTAAAKQSRNILQPKLTIGLDLGDRNSWYCMVDEAGQIRLEQRVRTNAKGLQEIFGALPRCRIALETGTHSPWISRLLHGLGHEVIVANARRVRLIGESRKKDDRLDAQTLARLARIDPKLLCPVKHRSAKAQADLTVIRARAGLVRARTALVNTVRGLAKSYGERLRGCNVRNMNPEKAEGLSPELQAALQPLLVALESLSEQIAEYNERIEKLGQESYPQVALLKQIKGVGTLIALTYMLTLEDPHRFRQSRDVGCYLGLQPGRRNSGQSEPQMHISKEGDPYLRTLLVQGAQHILGPFGVDCDLRRWGLKLAERGGKSGKKRAIIATARKLAVLLHRLWVSGEVYEPLHNSNQREMPAAA

SEQ ID NO: 266339 - protein, 371 aa, unidentified
MSNVRFVGLDVHAETIAAAVAEPDGEVRSLGMIPNHADALRQLITKLGPVEHLRVCYEAGPTGYVVYWQLAQLGVRCEVIAPTLVPVKAGDRVKTDRKDALKLARCYRAGDLTPVWVPDAAHEALRDLVRAREAAKKDQLRARHRLGKFLLRHGRRPAVKLKPWTDRYLRWVDTVRFDYPAQETVRLDLHHELTHVAERIARLERAIEEAVRTAPPALRDVVQALQALRGVAQLGAVTIITEVGVLSRFATPRQLMGYSGTVPSEDSSGARTRRGGITKTGNAHLRRVVIEAAWAYRHPPRLGALLRRRQANIAPAINEIAWKAQHRLYGRYRALDRRGKCHQQIVTAVGRELLGFIWAIGVSAEAAARIA

SEQ ID NO: 266340 - protein, 457 aa, unidentified
MGHARGRKIPAALVEDEDYQLRHERVAGIDVAKAKADVCTRLPPGRPGGRRRSRTEEFPATVAGVQDLAGRLLADGVQLVSMESTSDYWRLWFFVLEAAGLNVQLVSSSQARQLAGRPKTDRADAQWIARLTEMGLLRPCFVPPAEVRELRDWARARLHLVQDRTREWQRLEKLLEGALVKVSSVVSALAGNKTARAIVEGLIAGERDPQNLAALALGSLRGKRGELAAALQGAAFGPHHARLARVHLDRIDAMDRHVAMLDDEIAACLDAIPAAQGVTAAGDRSPDPGQDAVALPAAQRLAEIPGVTVKLAMSIIAETGLDMSRFPTAGHLASWAGLAPSARQSGSLSRKPAKKQGNAYLRGHCTQAASGAARTDTFLGERLRRLSRRSGGARARCAVARSILVIVWHLLNDPAARYTDLGPGWHQKKTDRDKKIRGHLRQLQAPGLQVTVTDTAA

SEQ ID NO: 266341 - protein, 352 aa, unidentified
MIVIGIDPHKKTHTAVAAAENGRPLDDVTVAARHKGHERLLEWARGLDVERVFAIEDCRHVSGSLERLLIERGEKVVRVPPKMMAGARRSAREAGKSDPIDALAVAQAALRTPDLPEAHLEGPERELRMLVDHREDLVAERTRIQGRLRWHLHDIDPTIHVPLRSLGCFKWLDKLEELLAKREQTVQVEIARELVDDCWRLARRANRLQKRIERLMAENHASLLEIPGIAALTGAKLVGEIAGIERFASDGKLAVHAGVAPLQASSGNRQRHRLNRRGNRQLNAAIHRIAVTQIRCHGPARDYVERKMSEGKSKREAIRCLKRQLVRVVFNTLRSDELASTESLPDLHPAAA

SEQ ID NO: 266342 - protein, 343 aa, unidentified
MAQYIGLDVSLKDTSISVRQEGKRVWRGKCASDPKLLAEVIRKRAPNAERVVFETGPLSVWFYHALTAEGLPAICIDARHAKAALDMAANKTDANDADGLAHLAEVGFYREVRVKGFDSMLMRTLITARRQLLKMRVQMSNQIRGLMKTFGLVLPKGAGSVFERNVVTLLEGEDDLARIILPLLQAWRDIRLRAAELTKQLVAMAGSDQRCRLLTSVPGVGTVTATAFAAAVEDSINFKNSRAVGAWVGLTPKRYQSGEVDFEGHISRRGDAKLRSLLYEAASVILNRLSDTSTLRTWALALRERVGFKRAAVALARKLAVIMHAMLKTGELFDPKAGVALPA

SEQ ID NO: 266343 - protein, 318 aa, unidentified
MQAQAAAVYVGIDISKASLDVDSYPVAQPACFTNDEPGRAAAASFLRGLQPSLIVVEATGGLEAPLVGQLATAGLSVAVVNPRQARDFAKAIGVLAKTDRVDAQMLARFGQAVKPAVRPLKPEETLALEAVLTRRRQIIEMITAESNRLSSAAPRIAKQIRQHIAWLEKRLDEADQDLDGMLRQSPVWQHKAQLMTSVPGVGRVTAVTLLAELPELGTLPRREISALVGVCPYSRDSGKYRGRRSIWGGRAVVRAALYMAAIVASRHNPVIRAFYQKLVAAGKLKKVALVACMRKLLVILNAMLKHDTPWHHQPQLAA

SEQ ID NO: 266344 - protein, 382 aa, unidentified
MPALAATIRLVVGVDVAKRRHVACALDAGTGAVHQKGIGIAATADGDAQFQHVLARWAHPVETLVGMEATGCLWGPLDDALQQAGYQVIVLNPRQTAAWATSLGLRAKTDGIDATTLAQGLRAGYGRASALPGETVQALRELMRARRDLVQTRTAARQRLLDELVVVFPELPTHLPPGADLVHPAVLHLLGRYGSAQALAAAPAAVVATLLREHSQARWGEAEATALQHLARTSAAHRRAVAARAIVVRTFAQHLSDLQARIAELEAAITEVLRDDAEADRLRQTPGIGPIGAATIRAELGEVTRFTTVDQVVAHAGLDPRVHRSGTFVGQAKLSKRGSGALRHALYLATFVAVRSRTEWRDRYDRLVGQGRLPAPAHRRRL

SEQ ID NO: 266345 - protein, 348 aa, unidentified
MSISMIGLDIAKSVFQLHGIDASGMVRLKRKLRRSELIAFFEQQPRCIVVMEACGAAHHWARVLSGLGHEVKLIASEAVKPFVKRGKKNDAADAAAICAAALKPDAKFVAPKSLEQQGALTLHSARALLVKQQTMLVNAIRGLATEFGLVVPKGMSKLEELAALVEADTAIPQQARGAFSGLLEHWHATADRIKALEVEIVAHARQDDMARRLATVPGIGPITASLIAATVGDSIKSFKSARHFGAWLGLVPRQHSTGGKTRLGRITKTGNREIRKLLVLGATSMVRRAEQWNSAAGAWVRGLLVRRPVRSVTVALANKMARVAWALMARNEVYRAKGGIAAVAAATA

SEQ ID NO: 266346 - protein, 346 aa, unidentified
MLYAGLDLSRKKVDVHVLNQAGQTITTTWAPPTADGLRGLAARISLYGEPVVGVVESMTGARFVHDQLELAGWDVELADAAKAKALAPLTAKTDKIDARVLAELARHDLVPAIWLPDPSVRAERERARFRLHLVRHRTALKNRIHATLMTFGQEVPVTDLFGQTGRELLARLDLPEPWATTVGRSLELVDDLDRQIDRCAADLRAMGADHRYVPLLVTVPGIGPLLGYTIASEIGDIGRFASPKRLVAYTGLCPRVYQSGDTDRRGPLTKDGPKYLRWALIEAATHADRHARFASRYERTKRRLGKQRGSRIARVELARELASVIWYVLTRQEPFRAAGPATCLVA

SEQ ID NO: 266347 - protein, 317 aa, unidentified
MVNNSMVCAGIDIGKRKLDVAVCGARTSLQVDNTSAGHEKLVRWLQRHKVERAGVEATGGYEQGVVQALRRESIPVVVFQPIQVRAYARFRLKLAKNDKIDANLIAACVASVDNVRAPPDPRFEAFAAAQTLIDQLTDDVVLYKTRLETARDEFSRAFWKGEIAGRKAQLRGVFKTLRTDMRAHADIAAKLDLITSVEGIAEKTAIAILIRMPEIGTLSREQVAALAGLAPYDDDSGRRAGSRHIQGGRSRLRSTLYAAALPAAFFWNPQLVTFYKRLRENGKTHKMTLVACARKLLIFVNTVVARASPWQPKSALI

SEQ ID NO: 266348 - protein, 340 aa, unidentified
MQVTTIGVDLAKNVFQVHGITASEEVVFNKPLRRAQFLPFFAKLDPCLIGMESCSSAHHWARELTALGHEVRLIPPMYVKPYVKRGKSDAIDAEAICEAVTRPTMRFVATKTVEQQSLLSLHRARDLLVRQRTQLINNLRGLVAEFGIFIPKGLARVIGFAEDITLGEVLDLPDIANEVIRNLSEQLMALHKQVRWYEERLKQVAKEDARVRLLRTIPGVGAVTASAIIASIGDVHQFKNGREFAAWLGLTPADKSSGGKEKLGRITKMGDQYLRSLLVVGMTSLVRQTRSHPERASKWLTSLLEHKPARVATVAMANKTARIVWAVLTRNEPYSPRTVA

SEQ ID NO: 266349 - protein, 337 aa, unidentified
MTEITRIAIDTSKSVFTLHAVNAAGSAVMRRNLRRQDMVPFFEKLPAVEVAMEACGGSHYWGRVLQAMGHRVRLIPAQYVKPFVKRAKNDRNDAEAICEAAARPGMQTVAVKSAEMQAQAMLLSVQELLVRQRTQLVNALRGHAAELGVVAAKGDKGFATLRAEVASDAALPAAAVEALRMLGSEIDRVEARLAEIEARMKALHKASADSRRLAAMPGVGPVSALNFSLRVDATQFKSGRHFAAWLGLVPRECSTGGKQRMGGISRAGNERLRQLLVLGATAVVQHAKPGRAGVSPWLLKLLERKPRKVAAVALANKMARVIWAMLTSGQAYRPSAV

SEQ ID NO: 266350 - protein, 387 aa, unidentified
MKLFVGLDVSSEKLDACFMTDDSTCSVLKEASYGNSQLGASQIKEYILEFSQKFEIESLVIGMEATSLYSFHPAMFFKEDLELNQLNLMVSVEQPNKIKKYRDIFEENKNDQIDAFYIADYFRIQRQVNSIIKEEEYLALQHLTRTRYQLIKQLVRTKQHFIENIYYKCNTLSKELKAEGGSVLSATLVTLMTEDYTMDQLAELSLEEFANLIQKLGKYRFKNPEGIAKAISKAIRSSYRLGKVHQDSVDIVLGVLAKEIRSLEKLIKDLDKAIDDLVVVLPEYQCLTSIPGIGPVYAAGILAEIGPINRFSDESKLAKYAGLYWRQNQSGNSEYENTPMAKRGNRYLRYYLVEATNSVRRYEPEYHAYYKKNTLKHPSINTNEPSY

SEQ ID NO: 266351 - protein, 350 aa, unidentified
MNNSVIAFDPCGIEVSYLILVVALRCGDHDQPLREFPNTPEGHQTILRYLARSGRGVRVAMESTGLYGLDLALCLQGAGVAVMVANPRAVRHFGQAMLQRSKNDPLDAVVLREFAARMPFQPWHPPSAAALKLVSVARRLEALTDMMTAEKNRRHAASLSQALPAIIRRDLQRSIQTQQRAIDRLTRAAQDFIAADPELTRRFALLLSIPGFGTTSAVHVLAELTLLPPHMDVRQWVAYAGLDPRQYSSGTSVQKKVRISKAGNKHLRRALYMPALVAVQHQPQVRAYYDHLQARGKTKMQALVATMRKLLHAIFGMFKHDQIFDGHKLYAAPDLAPISPAPQPQEVLCP

SEQ ID NO: 266352 - protein, 410 aa, unidentified
MERVIERGAALDVHKKSVTACVRVPGPEGGRQQEVQTFGTTTAALLTLRDWLRAHGVTHVAMESTGVYWKPVYYVLEDEFTCLLVNAAHVSKVPGRKTDVRDCEWLAQLLEHGLLRGSFVPPVAIRELRHLTRYRTVLVQDRTREANRLHKVLTDAGLQLASVASDVLGKSGRAMLTALVEGTTDPAVLADLAQGKLRRKLPALREALTGRFRKHHALLVSQLLAHLDYLDEALEDLTAQIEAALGPFASDAARLDAIPGVGPRTAEVLIAEIGVDMRQFPTARHLASWAGLCPGTHESAGKRRPVRTRKGNHWLRAALIEAALAAVNVRDSALAGRYRRLVRRCGHKKAIVAVAHKMLATAYLLLADGRTYQELGAGYYDAKHKDHDVRRALQALERHGYRVSLEPVAA

SEQ ID NO: 266353 - protein, 342 aa, unidentified
MYYIGLDVHKKTISYCVKDASGQVHQEGKVGATRWELDDWIKTLPQPWTVAMEATIFTGWIYDHLLPHAQQVKVAHPLMLRAIAAAKKKNDRIDAGKIADCLRCDFLPECHMASTAIRDRRRTLRYRHLLVRQMVQMKNRISGLLMETGVSHNKRRLHKVGYFRELLASNEEVNESIRPLLRVSRDTIVRLQKTEYALVSSLQQDPLLAERIKRLRTVPGVGPITALTWALEMGEVSRFPSIRQAISYCGLCGDEKSSADKVTRTPLSKQRNKHIQRVLVEAAKLAPRQDHNLALVYEREKQKGNANRATLAVARKMVAYLLAVDRGQRDFVPFADSQSAAA

SEQ ID NO: 266354 - protein, 315 aa, unidentified
MLHKEVKARPESLLALLEPFRDDLVVGVECMHCWYWISDLCEEHGINFILGHALYMKAIHGGKAKNDRIDSFKIAMLMRGGNFPLAYVYPKEMRATRDLLRRRTRIVRHGAMLKAHAVNTLGQYNMPPSKANLNNPGGRSQLTAAFTDPDVQRNVDLDLAIVDCYQHELKKLEWHLEQQAKKHDPASLNVLKTIPGVGRILALTILYEVGDIQRFESVQKFASYARLVKCKAESAGKVYGTQGNKIGNAHLKWAFSEAAVLFIRNNDKAKRYVEKLQRRMNKAKALSALAHKLGRAVYFMLKDKRVFDEQRFLKG

SEQ ID NO: 266355 - protein, 348 aa, unidentified
MICVGIDVAKDKYDCFILSSEGEVLADVFTIPNNAEGFDTLLQTIRRCARPEDKIKVGLEATGHYSYNILGFLLNEGLDTYVINPLHTNLYRKSLSLRKTKTDRVDARTIAAMLMSDVNLKSYTDTAYHNEELKSLTRYRFDKARERAKLKQSVSRLVTILFPELEKLVSSLHLASVYALLSEFPSAKQVADAHLTHLKAVLNGASKGRYGRDMATAFRDAARCSVGSVMPTKSLELRHTIRLIHELDAEIEDIEAAIQSMMDEIHSPITTIPGIGVRMGAMILAEIGDFSRFDSPDKILAYAGMTPSTYQSGQLSLSGAYVTTAAPTITPAMPIPPPTITPAMAEPK

SEQ ID NO: 266356 - protein, 338 aa, unidentified
MKHSVIGMDIAKSVFQLHAVDPETGEIERIKLRRHEVLPFFAQRKPALVAMEACGGAHWWARKLAELGHTPRLLPAKAVRPFVLRNKTDAADARAIWTAVQQPEMKTVAVKTELQQGILALHRLRAQLMKFRNMQSNAIRGLLLEFGSTLPEGYPALRKAFPVALASMDGNLPGMLIDTLREQWARIQSVDKEISTIEARLKLALSETPACKAIAAIPGVGLLTATAAVASMGDPHTFKTGREFAAWLGLVPRQTGTGGRIRQLGISKRGDVYLRTLLMHGARAIIATGKRSDWVTGLLARRPYSVVVAAIANKLARTIWAVLAKGRSYEAAAFRAAM

SEQ ID NO: 266357 - protein, 421 aa, unidentified
MYNTRVKHQKRSFVNDKALISTVDIAKDELMVYIRCPFGEEVKPFNVTNNYQGLKEYWATIMLYQKRYHLQDIIVGFESTGIYSEPLKNFMMDKAVKLVQINPMHTKKMKDITDNSPGQTDRKDTRVIADIIQLGHYLSLIVPEGAAAQLRELAHARENQMVHQTRLINQLEALIFKIFPEFVQIIKNLSTKTAQYLMSKYPTPQRLKGVSLEQLTSEIKMVSRGQLGKDLAQRIYQASRESLGTKEAQESILLEVNYLLGQLIQTAQFIKVLEKKMATALDQIPYAGNLLSIKGIGVVLLGGVIGEVGDFRRYRRQSDLVKLAGLDLYEMSSGKYHGLRRISKRGRWFLRKLLFYGALNTVRTGGILRDYYQGLIGRGMKKIKALIAVSRKLLRIMFALVRDNTYYHQKEAQINSIKVPA

SEQ ID NO: 266358 - protein, 459 aa, unidentified
MPDGKKSRKKRQNQKVVKLDSLKQLNLNAAGLDIGSAEIWACVPEDRAEVSVRPFETFTPDLHALADWLAACGVETVAMESTGVYWIPIYEILEERGFEVYLVNARHLKNVPTKKTDVLDCQWVQQLHTYGLLNASFRPREEMVALRAYIRHRDNLIRYRTGHVQHMQKALQLMNIQLTNVISDITGRTGMQIMRAIVAGEHDPVTLAQYRDGRCHSSHAEIAKALSGHYRAEHLFALQQALELYDFYNQQIQACDAEIERKYAAIKPVTEPNNQPPLPKKGRSKNEPDFDLHRYLYQICGVDLTQIKGLDVLTVQQIITETGVDMSPWPTVKHFASWLTLAPHNAITGGKVIQSKTQKSTNRAAQAFRMAAQSAGRSDSALGAFYRRMRAKHGGPKAITATAHKIARIFYHMLKYKQEFKDPGRDFYEQQYRDRVIKNLKRKAKALGLELVPLQPSVS

SEQ ID NO: 266359 - protein, 422 aa, unidentified
MHKYRRYVGIDWATQAHEMCVIDPDRHVLEERSFDHAGSAIAQCVEWLTRISDGDPSSTAVAIETPRGAIVEVLVERGFHVFSLNPKQLDRFRDRHTVAGAKDDRRDAFVLADSLRTDEPCFRRVVLDDPLVIEIRELSRMDEDLREEAGRLQNRLREQLHRFFPQMLKLSPAADEPWVWTFLEQLARTPAAAARLHEGTVEKLLRSHRIRRLSAKEVLAELKTPPLPVAPGVVEAATRHIAQLIPRLRLVHQQRADCGRNIDTLLDQLAPAGEPEGQKCEHRDVQILRSLPGVGRVVAATMLAEASQPLAERSYHALRAHAGVAPVTKQSGKRAQVIMRRACDTRLRNAVYHWARVSTQLDPHSKAQYAALRKRGHTHGRALRSVADRLLRMLVAMLKNATLFDPDRARRVPALAPSPVAA

SEQ ID NO: 266360 - protein, 404 aa, unidentified
MKSPCIAVDVSKGKSYYQGFIEIDKPASRATPMMHDLEGFKSMYQLGQVLKQTYGDVIYVFESTGIYHKALETFLMNQEEKCIILNPLEASKIRKTDLRSTKTDARDCKSIAKAYFMKDYRLHNQKDELYGNLQRMNNHYNFLVQQLREMKVHFRNVLDIVYPRFDEMYQDPYTDIAMSILKRYAHPDELKGRRVETMMKYIMKDTIYRENRSMDEAKRLKTYIENVSSGCRSNSSEVSILKTMVSKISEQMVEIELCLDDMRNLVIDLPMYHQLMSIPGVGDNLAIRLIGELGDLDRFDKSEQLVAYAGIDPRVYQSGQMTGEHLHITKKGNKRLRTLLFLAVSSNVRIGKTNSILDFYNKKRQQTNPLVYKAALIACANKLLRIIYGMYKSGLKYRISNLVF

SEQ ID NO: 266361 - protein, 427 aa, unidentified
MNYTQNQKISQITQSTLIIGIDVAKDKHVARAQDDRGLEFGKRLIFENRIHGFQKLLDWMERHRKQNGKNHVIFGVEPTGHYWLSLAYFLRAKGYDFVLVNPMHVKKSKELDDNSPTKNDTKDARVIAQLIKDGRYSVPNLLDGIYAELREGVKLRDQLTKQLMIIEGRIQNNIQRYFPEFFDVFGDWEGKAAFCTLRMFPFPSQIKEMTPEEVLKSWKPFVQRGVGIKRATKLVEAAKKSIGIQIGIKFAKRELECLLEQYELYKQQLEQLDTELETLVEKLPGAKQMMDISGLGSTTIALFFAEVGDITKYNHPQQLVNLAGLSLREHSSGKFKGQTRITKRGRSRLRRALYLAIRPLVAHNPIFKALHKYYTTRSERPLKKQQSLIALCCKLLRVLFVIGQKQCEFDGSKLLKGLTQNLSLQAA

SEQ ID NO: 266362 - protein, 355 aa, unidentified
MNEIKYIGMDVHQSSTSIVVLNAAGRMVTSAVVETRASALLAFIQGQRGTLHLTFEEGTCAAWLYDLLLPHVSRLVVCDPRHNALLKAGSKNDPLDARKLADLLRLNALRPVYHGQNSLDTLKELSRSYTTLVRDGTRVMNRIKALYRSRAIPCPGTKVYSPSHRASWIEQLKSAGVHQRAQLLYQHLDVLSLLRRQAKRALLTESRKYSVSRLLRPVPGLGPVRIAVLLATVQTPFRFRSKRLFWAYVGLGLVTRVSAEFAVVNGQLQRSRKAPAIRGLNPNHQRELKEIFKSAASAAVHRPGPWQQFYAQRVDAGRKAELVRLTVARKLAAVTLHLWKKGERYDVKHLKSTAV

SEQ ID NO: 266363 - protein, 396 aa, unidentified
MDIETDHSSTATAAETATLLVSFELSQSRWVLSIRAPGGVKLSRYTIPARDTGKVLGLLTTQRHQAARRIGCLVRIVSIYEAGLDGFWLHRWLESEGIESHVVDPASILGPQRKRRAKSDGIDGVKLLRSLASWLGGERDVCSMVVPPSVAQEDLRRLSRERSELVAERTRLSNRIGGLLASQGIAGFKPLKTAAWQALDALRTGDGHELAPHLRTTIERILQRLALLAEQIKAAETERDAVLRAAAADARGDAATSASHDTTSAPLLLRLRGIGPEFATVLPVECLYKQFDNRRQVAAFAGLAPTPWSSGSVDHEQGISKAGNRRLRKTLIELAWSWQRHQPASALAQWFHRRIKGQGKRAKRIAIVALARKLLVALWRYVKHGVVPDGAVLKAA

SEQ ID NO: 266364 - protein, 481 aa, unidentified
MNEILEKLNAEDGAEVRPLYDYGVGIDTHRDFIQVCVLVRSGAAIRKYESEHRTTWNGMVGAGEWIKDTIKEKSIPTIEPEALRYTIESTSTYHLPVIKAIKGKPCVVNPVLAGSTKKKTDVLDARLLSYQGLTGLWPESFVVPPEIEEFRLIMKQRQYHSRECTAITNRINNYILRFGHTLGSYKSIRSIENRAVIEDMCADGYVYKDNYPGIDAGRFICPDGLPHEVRNILKDMFSEYDVHNEKVKHYQKLAMDTAKKISWETDSGYVKGESLIKNLLTVPSVGDLTALIWLCEVMTPLRFETASHLAAYCGCDPSLKVSAGKVTSQTKRKGNANLHFQLSEIAGSCINRHSEPFGQWGYAISKRHAKGGYKKASGAVARRIAVSLYYVHKQNAPFSYDKYNFFKIDVPDVPLCDMRFSKRLVNLLTSNGLINSKAITESYIIGNINEIKGLGKKCSNEINTWIQSNKIIGQRRSNHID

SEQ ID NO: 266365 - protein, 388 aa, unidentified
MIYVGIDIAKLNHYASAIDSDGVVLIEPFEFLNDNAGFYTLLSKLNSFELDDIIIGLESTAHYGNNLVSFLVTKGLHVCVINPIQTATLRKNNIRKTKTDKVDTLVIAKAIALMDHPRFVTLYDIALMQLKNLGRFRMNLVKQRSRTKIQLTAYLDQVFPELQYFFKSGIHQKTVYAILKEAPSAIQIASMHLTHLKNLLVSNSHGHFKNETALELRVLAQKSVGAADRSLSIQITQSIAQIELLDSQIDAVESEMKDIVTSLDSVIMTIPGIGPINGGMILGEIGDINRFSKPRKLLAFAGLDPSVYQSGNFTAKKTKMSKRGSSALRYALMNAAHNIVKYNQTFKEYYDSKRAEGRGHYNALGHCAGKLVRIIYKMLKDDVEFNLD

SEQ ID NO: 266366 - protein, 439 aa, unidentified
MLQTLPMLDPLAAFVDIGSEHMHVSVGGNRPEVFGTVTSQLHALRDWLLAQGVHSVAMEATGVYWLPLYGVLESAGLEVRMVNGRQTRNLPGRKTDMADSQWGATLHMHGLLHAGFVPPADIRRLQDYLRLRADHVAAAAGCVQLMQKAFERMNIKLHDVISSLAGVSGMAVTRAVVAGERSPEALVALCDVQIRRKKEQAVIEALRGTWADEHIFALGQALQSWDHYQKLIADCDERIATVLPPHDDTQPPLPRSTRQTGINAPEISRLREILAQMCGGRDLTKLPALSSYGVLQLISEVGTDLSVWPTEKHFTAWTGLAPGSSDSGKRRKGVKRGRNRTGRLFCMMAQSLVRSRDIALGGFYRRLAARRGGLVATKALARKLAAWFWRVMVKGDDYVEKGLARYEEQVRKTREQALRRLARELGRELVPVPVVPETP

SEQ ID NO: 266367 - protein, 389 aa, unidentified
MIYVGIDIAKLDHYASAIDSDGVVLIEPFKFRNDADGFHTLSSKLDSLPAGDKVIIGLESTAHYGNNLVRYLVCRSYDVCILNPIQTATLRKNNIRKTKTDKVDTFIICKALAMQQSYRFVSFDDLDLMDLKSLGRFRQKAIKQRTRLKIQLKASLDQTFPELQYFFKSGLHQKGVYALLKEAPTAKDVASMHLTHLAHLLDVASHGHFKKDQAKELRVLARNSVGYPDSAIAIQIVHAVEQIELLDSQIAHVEAEMTDIMKVRDSVIMTIPGIGYINGGMILGEIGDIHRFSSPKQLLAFAGLDPTVYQSGQFQAKKTKMSKRGSKVLRYALVNAAHNVVKNNATFAAYYDAKMAQGRTHYNALGHCAGKLVRVIFKMLTDNVDFSLD

SEQ ID NO: 266368 - protein, 409 aa, unidentified
MADSYDFYIGIDWGTERHQVCVLDAAGRRVAEQTIAHSGAGLAAWLAELAGYAPAERLAVAIEVPRGAVVDALLAHGCHVYALNPKQLDRFRDRQTVAGAKDDRRDAFVLATAVRTERSAFRTPPPEDPRLAPLRELTRLTRELGTESLRLTNRLREQLVRVFPQVLTLCPAADEPWLWTLLEQAPTASQAARLRPQTLRALLAAHRVRRFTTEELYACLHAPPLPAAAGTIAAASEHIAFLLPRLRLAFQQRGRCHRRLEKLLDALAAEAPGQPLEHRDVTILRSLPGVGRVVAATMLAEAWPALATRDYQRLRTHSGVAPVTRQSGKTRVVRMRRSCNGHLREAVFHWASNSLRLDPRCRAHYDRLRQQHGHARALRGVADRLLGLLVTLLRAGTLYDPARRHVAAA

SEQ ID NO: 266369 - protein, 354 aa, unidentified
MKCMTKYVALDVHQATTVASVRGESGRVLARAILPTEGPAIVEFFRGMRGAIHTTFEVGTQSQWLYELVSPLVDRVVVCDPRQVTRRGNKGDRVDADRLSELLRLGGLRAVYAQSANRSDLKELTRTYRTLVEDSTRVMLRIKALFRARGINTPGAAVYHPTKRAQWLAQLTDRGVRFRAEVLYAELDVLRELRPKAKAMMVAEARRDPAWPVLQTIPFFGPVRVALLLATMQTPWRFRTKRNLWAYSGLAVRTSSSADHKFIEGQVVRRRRAPLTRGLNRNHNRVLKDVFKGAATAAASQPGPLQEFYAVLVARGTREEMARLTLTRKLAAITLRLWKRGEQYNPEKLTRQAS

SEQ ID NO: 266370 - protein, 342 aa, unidentified
MVKVTLTGQVRKSTVYVGLDYHQAFVQVCVMDASGQVLSNRQCANTAKAVRDAVQRCGVIVSAAIEACCGAADLAEELIAAGWQVSLAHALYVHKLKQSPDKTDWSDARLIADLLRVGYLPKVWLPPKELRQLRHVVRHRQQLAERRRATKLRVTALLRSERIVFTGSRWTKSWIKAVRNCADLGDQGLWVVHELLDEVVHLQTQLDRVEVRLEELTKDDPFAQQLRSDSGVGLITAVTLRAEWGTMSRFRSGKQLSRFSALSPRNASSGNKVADAGVIQAGNRELRRVLIETAHRLMRCDERWAKLGASLKARGKPGSVAAVAVANRWVRWLYHQLLPLAV

SEQ ID NO: 266371 - protein, 414 aa, unidentified
MEKLPFRTFVGVDWGDREHQVCAVVEDKPRQRRFEHSGGGIAALVSWLMDLCARHSDEVAIAIETPHGVLVDALLEHGFAVFAINPKQLDRFRDRFSVAGAKDDRRDALVLASSLRTDPHAFRRLSPENPLILQLREFTRAYRNLEKENRRLSNQLRAQLNRFFPQVLRLSKAADEPWVWSLLERFPSPNKIRHAHHRSVERILREHRISRVTAVEALAILKSPPLPVTEGVVEAATQHVALLLPRLRLVSQQRRHCEQHMARLVNKVAEAEDAQPGPKHEHRDVEILLSQPGVGDIVAATVLAEAYQPLVQRNYHALRTSGGIAPVTRQTGSSHTVGMRYACNQYLRQAFHWWGSSVCFHETRARTLYKAHREKGQSHARAVRAVMDRKLNILVACLEGGHLYQADYASQERP

SEQ ID NO: 266372 - protein, 346 aa, unidentified
MSKIKLVAIDLAKRCYQVVAIDVHGNVLYNRKLSASKFKLAMQQLEPTIVAMEACSAAHHWGRRLQALGHEVRLVPPQHAKAFRRVHKSDAHDALSIAEAAQRPNIHFVPVKTIAQQDLQLLERVRERQVALRTTIINQARGLAREYGVSLAKSRQSFLAQLPDALADANNELTPIAREALAELMQEVKHITEQLLHLMRRIAALASQNPAYERLRTIPGIGPVTAPVLIASLGSGRQFTKARSCSAWVGLVPKQNGTGGKVQLGSITKNGNRSLRVMLIHGARSVIQWAAKHDHAQSRWIKALVARRGKNKAIVALANKLMRIAWVVITQEVEFDMRKAFRPQSI

SEQ ID NO: 266373 - protein, 370 aa, unidentified
MAKSTPLFVGLDVHKDSIAVAHALGQSADPPVFVGTIGTRQADLDKLLRRLRAKTPALVFAYEAGPTGYGVHRYLTGQGVACHVIAPSLIPRKPGDQVKTDRRNAVDLARLLRSGDLTRVYVPTVEDEAIRDLCRARDAARLTQKNAKLRLKAFLLRLGLHYVGRADWNAAHLRWLAKVVCPTAAQQIVFQESVRAVDEQVDRLGRLEAELRERAPAWRLHPVVQALQALRGVQWLVAITVVAELGDLTRFDSPRQLAAFVGLIPSEYSSGPTRRQGGITKAGNGRARRALIEAAWAYRHPAKVSQHIQTRIDVLPKPIQAIGWKAQVRLCKRFRRLTARGKHPNVAVTAIARELIAFMWAIAKEVTVVG

SEQ ID NO: 266374 - protein, 356 aa, unidentified
MNSFQDTEKFIEGKEVFCGIDVHLNSWSICFFCDGEVVEKHRIFPKYEQLFHILKTHFGTARSISLVYEAGFSGYWLYRKLTADGYRCMVTPPNRIPRQDDRVKTDRRDAEKLARYLAAGILKTVVVPSTVAESDRRLLRRRSRLVRKQTQIKNQIKSFLNLYGFEKPASIRSFWSKVYMDWLQNLRFEMESDDYILKGMLRDFRRSREDLVELTRHIKHLAHGSQYCDSYRKLTALRGVGLITAMTFLLELFDISRFANAAKFTSYLGMSPSQHSSGEQVHMGPISRQGNSYLRYVLVESAWTVIRHDPSLKDKYNRIRARGTNGNKAIVAVARTLAIRLRRCLLDGVDYQVSAV

SEQ ID NO: 266375 - protein, 350 aa, unidentified
MKKICIGIDVSKETLDVTVIHIESYELMEKLGYSKFENRPSGFRSMTAWVRKVIKSRGQMDEALFCMETTGSYDLPLCHWLHKNGLNVWRESALQIHCSKGFQRGKSDKEDSEIIAQYAARHQNRYTAFVPDAEAIADLKELICYRDSLVERRKECKVRLANKKETLVNKNSKAWKCIERLSKAEIKRLDKVIGECDEEIRNLMKEDEQMEKNYQHLTSIVGIGLINGAALIAYTGNFKKITTPNKMSCYCGCFTFYEDSGTSVHRKSPYRNACCKMLKGYLRMAAKSAMLANTELRKYSERLREKGKPYAVILNNVANKLLHIMFSLVKHDYDYEYNHEVVRRMEREIA

SEQ ID NO: 266376 - protein, 407 aa, unidentified
MLFLGDDWAEAHHDIELQDDQGRVLARRRLPEGVTGLTQLHALIADHLDHDDEPESVLVGIETDRGGWVHALVAAGYAVYAINPKQVARYRERHKTSGAKSDPGDAHVLAEIVRKDREHHRAVAGDSEQAEVVKAVARTHQTMIWTRQRQANQLRSMLREFYPAALAAFGEDLAGRDALAVLAIAPTPAAGRALTRSRVVSVLRKAGRQRNLQTRAEEILSVLRAEHLGLSDALTDAYGVSARSLVAVLTTIAAQATALEGEVEQCFGQHPDAEIITSLPGLGVVLGARVLAEFGDDKDRYADAKARRNYAGTSPITKTSGTRRVVLARYARNKRLYDALHQQAFAALTCSPGARAFYDHHRARGATHHQALRALSNRLVGILDGCLRHRTPYDEATAWAHRQPAAA

SEQ ID NO: 266377 - protein, 355 aa, unidentified
MNDAKYIGMDVHQATISAAVRDSRGNLVMEAILETKAETILQFIRGLRGSLCVTFEEGTWAAWLHDLLQPHVTRVLVCDPRKNALLKVGNKNDRIDARKLSELLYLNKLSPVYHGEPGIRPLKELARSYIAMTRDLTRVMSRLKAIYRSWAIPCAGKQVYATRYRAEWLAKISEAGVRRRAELFYQQFDALAALRQQARRELLAEARKHPAMRLLRQVPSIGPIRAALLIALMQTPNRFRTKRQLWAYCGLALRTYTSGEYRFVGGQLKRSKKVLAIRGLNINHNHDLKNIFKGAATRAASTVGPFQDFYQACVARGVKPHLARLTLARKIAATTLLVWKKGVRFDAQHLKQQAA

SEQ ID NO: 266378 - protein, 413 aa, unidentified
MKTCGLDVHKDMIFCAIYDGKDSEVKKYDTFTPDLEEMCDHIKSQGVETVAMESTGIYINAIRTVLRQRGMRAVVVNPYLIKQMPGRKSDVKDSVWIATLMYNGMLNDSFIPDGVLAQLRVYTRDYRRSVQRRDCTLTLIDQLLVGMGIRLSSCLSKITTKSFRRVAEAVAEGETRPEELEKKVHGCLRRKKDGTLRKALTGCCEAKDTWRLSRKMEELRLYEGQIEDALKHMEELADANYREEVALLCTIPGVSRISAICVIAEIGTDMSQFGSSARLSGWAGLRPRNDESAGKYKSTAITKGDKHLKAMLVQCAWGAVRAKNSRFAAVFSRLSSRKSTKKAIIAVARKLLSTIHAMLKNREKYCPQKTGRTMTASQFEKLLKLRTKQYNKLRLQASQAGVSAEKLTEISQS

SEQ ID NO: 266379 - protein, 312 aa, unidentified
MREHCYGGIDVSKDRLDVMVLPDSKSFSVDNNAAGYSELVKRLRDLPIAAIGIEPSGGYERAVIRTLLAAGLSVRRINPNKLRQFARARGVLAKNDRLDARLIAEYVTIMPTRLVQRDPAAEQLAEVVTMRRQLCDEHVAVENQTTHLEDAMLRRLNKRRLARLEADILLLDTRMAQIVTSHANLTRRYQLLTSMRGVGPTLAFTLIALLPELGQMSRKQIAALVGLAPYDFDSGRLKGHRCIYGGRLPVRNVLYMAALSACRYNPALKIFHNRLAATNKKPKVIIVAVMRKMITTLNAMLRDNVAWQPKSA

SEQ ID NO: 266380 - protein, 354 aa, unidentified
MIYVAIDYHKKYSQVEAMNREGKVLGRARLVNDEPTLKRWFSSLGEGCEVVLEACRNWQVMYEILESMDEVERIHLANPSKVRAIAEAKIKTDTIDTHTLAHLLRCGLIPAVHVPSRETRRTKEVLRQRMFLVRVRSQFKNRIHALLDRYRVSLPSFSDLFGRNGLSYLRKLKLPYPGDFLLAQDLNLLEALDLCIREAEGEVKSLLSGDERFEIARSLPGLGPILAGVSVLEIDRVERFSRPEKLVSYAGLVPSTYASGGKVYSGHLIKQSNKWLRWAMVEASWAAQRSSPYFQAYYRRHLSKGHNTAIVALARRMLEILWHLLTDKRFYEERPIRTFSSPPPSQKTSHLGSF

SEQ ID NO: 266381 - protein, 421 aa, unidentified
MHKSEDEVYAAFVGIDWADRKHDVCLQVAGSAKRERLVLEHRPGAIQAWAEQLRERFGGAPVAVSVELSRGPVVSALLEHDFFRLFPVQPTTVANYRKAFAPSGAKDDPTDAEVILELLVRHRDKLKPLQPESADMRALRRLVQWRRDLVQDRTRLTNRITDALKAYFPQVLEWFADKEAAIFADFLERWPTLRHAQRARRETLEAFFRAGNVRSASSIEKRIKAIAEERSLHTDEAVIGPARLLVEALLPQLRVLSEGISRFEAEIAELATRQPDYQLFDDLPGAGPTFAPRLLVAFGEHRDRFPTASSLQKSSGIAPVMERSGNKAWVHWRYGCNKFVRQTFVEWAAQTIPRSFWAKAFYDSHRARGARHQAALRALAFKWIRILHRCWHDRVPYDESRYLMALQKRGAPLLKHAAQSP

SEQ ID NO: 266382 - protein, 401 aa, unidentified
MKFVGWDWASTSHDVTVLNEQARVVERWALRHTEQGLGQALARLARHGQPAELPVIIERSTGLVVDRLLAAGHPVVPVHPTAFHAARPRWGAAGAKSDPGDSYKLADYLRTDGHRLRRLQPLDPGLRELQALVRLREDHVRARTAASNQLGALLDAYWPGPKAMFCKLASDIALAFLTDYPTPQAAARLGQARLAAFCRRHAYRGGKPPAELLARLRAAPIPPAGLAPAVLAQLIGAQVQLLRSLQATIGELETAITQRIAQHPRAKLLRELPGVGTINLAQLLAEVGPILDRVSTAEQAAAECGAVPVTRASGKSSGSTFAGPPTPRPHRPHRLRPQPSHAVTLGRPALRRRSGPRQTQPTRHPDRRPRLASRHLGLLAHRHALPPPRSSRRAAPRGRLT

SEQ ID NO: 266383 - protein, 344 aa, unidentified
MGEAGEIVSEGQLPTSKAGLDSLFAKMPSSRVALEVGTHSPWVSRHLAGLGHEVIVANPHKLKLITQSVRKNDRIDAQTLARLARVDPQLLSPIRHRGEQAQADLAVIRARAKLMEARTELINCARGLAKPMGERLKKCDADQVSEPLADGLSEALQNVIRPLLKGIEAISQQLAVYDQKIAAIAKRYPEIELLTPVYGVGTLIALTYVLTLEDAQRFGHSRDVGPFLGLRPKQRDSGQSQPELGITKAGDGLLRSLLVQAAHCILRKGAPESDLRDWGIGHLGNGGKNAKRRTLVAVARRLAVLLHTLWANGVVYDPLYNRKAAEAAKAKAAAKARTKGKAAA

SEQ ID NO: 266384 - protein, 336 aa, unidentified
MSHYCGIDLHSNNHVVVVIDEEDKRVFEKRISNDLSLTINALSPFQESLQGIAVESTFNWYWLVDGLQEQGYDLRLVNTAAVKQYDGLKYRGDHHDAFHLAHLLRLGILPTGYIYPKKQRAIRDLLRRRLLLVRAASTQLVSVQSQIWRSTGLRIKSADLRKADFISPRIDDYTLQAVHAGLAVYQAIQREIDGLERSAHQAVKLTDAFQILQTVTGIGKILGLTIMLETGPIERFAGPGNYASYCRCVDSTRMSNGKKKGVGNAKAGNKYLSWAFSEAAHFAVRFEPLAQRFYDRKKARTNGIIAIRAVARKLARATWMMLKHQLPYDARLMFPG

SEQ ID NO: 266385 - protein, 357 aa, unidentified
MRIGVDLHTRQQTIAMLDTETGELVEKTLQHDGDEVRRFYSALPGQVLVGMEASGSMHWFLELLDELGIDHQVGHPSEIRKAEARKQKHDRRDAVLLLKLQVENRFPSIWMPSTALRDLRTLLLHRHQWVRMRTRVQNALQAIALSRGLRRGKTLWSQGGQHSIESLSLPPNAAHRRTELQRLYRNLNEQIDERDKGVNDQALQRPGAKLLMTHPGVGPVTALATDVFLGAPARFEDGKAVVSYVGMIPSEYSSGGQQRLGGLSKQGNPFLRFLWCEAAVHAVRRDPELQRFYRRKLAQKGLGKARVAAARKLGIRLWIMLRDQIDYQEFCRRGQMRQKNGGACARMPELGHSPAMQ

SEQ ID NO: 266386 - protein, 355 aa, unidentified
MTIISHLYAFVVGVDTHAKNHVYSVLTKSGEHVDTATFPTTKAGIKRALTWAGRRTGGDLETLWVIEGIGTYGAILADHVAEAGYTVAEAASMNARDRHATGKDDRIDARRIAGAVLSMDESRLRFPRQADGPRQGLRILVKARESMTREKTRTINALTALLRGQDLGVDARRKLSMVTIQTVAKWRIRDESVALTEARREAIRLAKRVVELDAEIRDYAARIEALVKASPGAVLLAEPGIGPITAAVFYLAWSHHGRVRSEAAFAKLAGVCPIPASSGNVVRFRLNRSGDRRLNSALYMVAVTRLSHHKKSQAYMARRLSEGKTKKETIRCMKRALARSVYRILEATNPIGQAA

SEQ ID NO: 266387 - protein, 345 aa, unidentified
MKTFIGIDVSLASSAVCVLDERGQIVKRAQLDSEPEAFIAFLRELPWRIEAIGLEAGPLSQWLHRGLREAGFEMILMETRQVKAVLKAMPVKTDRRDAEGIARLLRMGWFRPVHCKSVSAQEVRVLLSARKAVQKALLDIEQSLRRVLRNFGLKLGPVGKSRYEARIRELVAGNSALEAAAAAILSARTALRSELSAFERRVLALARQDDACRLMMTMPGVGAVVALTVRSAIDDPGRFRSSRDVGPWAGLTPRREQSGERDVSGRITKAGDASLRTALFNAATVLMHRARPCWLKAWGLQVARRRGQKRATVAVARRIGVALHRMWLDGTEFRMTRVPDAAVAA

SEQ ID NO: 266388 - protein, 390 aa, unidentified
MADYREAFVGIDVAKLKNAIAVAESGREGEVRYFGEVDASYASMRRIIQRIAAKFDRVHFCYEAGPTGYGLHRLIQSLGHECMVVAPSLIPRKPGDRVKTNRRDALALARLLRAGELTAVWVPDEGHEAMRDLVRARAAAVETLRVHRQQISAFMLKAAVETLRVHRQQISAFMLKHGRIYPRKKGWTMRYLCWLQEQQFDHPAHQIALQEMVEAVRVSKERVERLEKVIEEFVPNWSLAPVVRSLQTLRGVDLIVAVTFATEVGDVSRFESPRQLMGYLGLVPGERSTGETVRRGAITKAGNGRVRHMLVESAWTYRHPPKVGARKLYRLEQAPPKVREIAWKAQNRLTARYRMLTGRGKRTTVVCTAIARELTGFMWAVAREAQAIRS

SEQ ID NO: 266389 - protein, 410 aa, unidentified
MLFLGNDWAEAHHDIELVDESGRRLVRRRLPEGVAGLAALHALVADHLDEDAEPDQVVVGIETDRGPWVQALIAAGYTVYAINPRQVARYRERHGTAGAKSDPGDAHVLAELVRLDRAHHRPVAGDSALAEHVKVLTRTHQSLIWSRQRQTNALRSMLREFYPAALAAFGEDLASREAMAILALAPSPEAGRRLSLSKIASALRRAGRQRGIDASAERIQAALRAPQLEAHPGVVSAYAAAVRSLVAVIDALVTQVEVLRDEVEAGFGRHPDAEIYLSQPGLGPILGARVLAEFGDDPHRYADAKGRKNYSGMAPITRASGLRRVVLARPARNRRLADALYWQAFAALTSSPGARAYYDAQRTRGATHHQALRSLSNRLVGILHGCLRHHTRYDEAIAWHTNSTSQEAAA

SEQ ID NO: 266390 - protein, 344 aa, unidentified
MNRIVVGVDIAKRVFQLHWVEPETGEIVALQLKREKFLEHFGNRSKCLIGMEACGGSQHWARSLQKLGHEVKLLSARMVKPFVGGNKNDAADARGIWTAMQQPGIKAVAVKSEEQQAVLALHRMREQLVKFRTAQINGLRGLLTEYGEVMPQGRAGIKRDIPGALGRLSDRLPAIVIETLREQHARLGELDEQISQIERRLRQWQREDSASQRIAAIPGVGLLSATAAVATMGDAKAFKSGREFAAWLGLVPRQTGTGGRVRLLGISKRGDKYLRTLLIHGARAVLTHSKSPPEWLTELVKRRPKNVAVVAMANKMARTIWALIAHERAYQSAYVSRPALGLKE

SEQ ID NO: 266391 - protein, 355 aa, unidentified
MNSEKYIGLDVHQATIAVAVMDSRGKVVMESILETKAATLLEFLAGLRGTLSVTFEEGTWAAWLYDLLKPHVQKLVVCNPRKTALLKDGNKNDRIDARKLAELLRLDNLKPVYHGETGVRMLRELARSYLTLVKDLTRVMNRLKAMYRSWAIPCAGRDVYYTRHRAAWLSKIREAGVRRRAEHLYQQLDMLQHLRQQARRELLAESRKHAITAKLRQIPSLGPIRAALAVALIQTPNRFRTKRQLWAYSGLALETRTSGEHCYVQGQLRRSKKQVSIRGLNKDHNHDLKGLFKAAATRASVQPGPFQDFYQRSLAKGIEPTMVRLTLARKIAAITLTLWKKGENFDAEKLKSQAA

SEQ ID NO: 266392 - protein, 347 aa, unidentified
MENATRLFLGLDVGKSEILATLMDDTEAELFRGSFKNQLSGFRKMMKAVNKETSKVSGKHMIHAGMEATGTYYLKLVKFLYEKEEEVIPYVINPGSVKKYMEYRGSRTKTDLQDSRIIAMCVKDGMEKKIFRPWFPARKEHEELKQLVRLREDLLTMRTMEKNRIEGLSQDPDHSEPVMKILQDHVEYLSNQIREIEDILKENIRHGNFPDIGEDIELLKSIPGISDLTATSFISEIGDIDRFDGIKQIVAHAGLAPMERQSGTSVRGRTRICKRGSKKLRQLLYMPTLAAIRCNPAIKSFYERMIEKGKRKMVAVTACMRKLLHIMYGILKNRTPFDPVICIGYLK

SEQ ID NO: 266393 - protein, 332 aa, unidentified
MEIFYFIGVDVSKKKLDFCVMFEGKVVHEEETVNHQGAIISLLHQLEEDYGIVGCQMLVCAEHTGQYTFPLACACKAVECKLWLENPAEIKYSSGVQRGKNDKVDAKRIAIYAKRFQDRVQYYERPTEDIERLKLLESERTLYVTDLAKYKGQMKDQKDYMPRKLYERKMKRLQVLMDDLEEAIQAITDEMDEVIASCPVLSRQRELLMSIDGVGRVVATNMIIITEAFTRFDDPRKFNCYAGVAPFSYSSGSSQHSKARVSHRADKVMKRLLHLAAVAVTHRVGGELKKYYERKVAEGKNKMSVINALRAKIVARMFAVIKRNEKYKPILS

SEQ ID NO: 266394 - protein, 436 aa, unidentified
MEEVTDEPLYRDRVCGIDIGKAGMAATIRVPSDENPARRASETREFATAKRGVLALADWLRAWQVPAVVMEATSEYWKPVFYRLEAEGFECVLADARQVKNLPGRPKRDPSDSSWLAQCFERGAIRSCFVPTPEFRVIRLHTRYRRDLTDERTREKNRTDKLLESAAIKLSSVVTGLHGVTGRDIMEHLIAGERNPKVLAQLARARARRKITELEHAPDGAEFFTPEHAALLTTMLERIDRLTGDITRLSGVIEQLLAPYEEQLQQAESMPGWGRRSAEDAVAETGVDMSKFPTGGHLSSWAGRTPLDSQSGKRTGRARHKKGNKYLAAVTGETAVAAGKTATRDGARYRKLARSRGKGKAQVALGNTQLKVYHKLLSSPGMRYQDLGPDYYERQAAIRRKIAYHVREIEALGLDVTLTRPAPEPGPDEPANTPAA

SEQ ID NO: 266395 - protein, 355 aa, unidentified
MNSIKYVGLDVHQSTISAAVLNGDGKLVMQSVLPTQARAILDLFDGLRGTLHVTFEEGASAAWLYDLLVRRVARLVVCNPRKNALLKAGNKSDAIDARKLAELLRADMLSPVYHGQNSTAAVKQLGRSYSALTEDTARTMGRLKALYRSQAIACAGEKPYGTRHRENYLAQLGEPGLQRRAQRLYQELDLLQQLRREARRDLLLESRKHAADKLLRSIPWLGPIRAALLMACVQTPHRFRTKRQFWAYCGLALETRSSADYKLVNGEPRRRKKPVFIRGLNLNHNHELKNLFKGAATTASGSRGVFGSFYENLLLKGMKPELARLTLARKMAAITLHIWKKGEPFDADYLKLHAA

SEQ ID NO: 266396 - protein, 388 aa, unidentified
MHVYVGVDIAKELHYAAIMDSDGVVSKPFSFENNDKGFNLLLSHLAPYNKESILIGYESTAHYQENLAYFLKSLGYRTAEINPLQTAALRKANIRNTKTDSVDARLICLALMNHHIQGDQRDSVRLDDLYQLCKMRMDTMKKRTTCKIQLVATMDRIFPELASFFDNNLHTNTIYRLIDSFPLPSQIKKTRIDILTKLLHKASRGHFKKEKDQKLKDLADISVEIPSDIFAFQAQQLVHQIEFYTDQIQTIEERINTNPDVMSSPLMTIPGIGTFCVACILSAIKNINDFGAPCKILAYAGLDPVIRQSGKFNASHTRMSKRGNSLLRYALVWSAGNVVKNNHTFAEYYRHKTEDQGKSHYQALGHCAKKLVKSIYHMLKYNESFNLD

SEQ ID NO: 266397 - protein, 515 aa, unidentified
MRTHAWTARYAQVRDALWTENLALTTPQAGTERAAAASLPPIAAARSVPAYDSPKPSRMERSLVSHDHRNGKPRLDVPVAETSDAHACRAKETSLPPTVAEATDDTPACSKAQVARRLGAQGRLVMRSVGLDLGVRHIAYCEVVDGKVVSRATVKSLSQLESRLGPASPPARVAFEACREGWHVYDKLKAWGNEPHMLDTTRIRQLGVAQHRRKNDPIDAEVIAQALDTGRIAEAHVLSPERRKLRAQLSVRGALIETRSQYVTTIRGLARAAGILLPACKTENFPRTVDAAKLDEETKTLIAPLMTVLRSLETELAVVEELLARMAQADSILQLCATVPGVGLIVAATFVSVIDDARRFKNAHAVGAYLGLVPSETTSGGPDKRRLGSITKQGNRMARAMLIQSAWTILRLRDTSDPLKRWAEGVAKARNKRIAVVALARKLAGVLWAMWRDGTVYDPKTEAQAAAHGVRVAARQHERRADALERAARKLRREPKMLAPAKSPKRRKTSQEIAM

SEQ ID NO: 266398 - protein, 351 aa, unidentified
MKYYTSTSEYNCGIDLHSQQMYVCIMDREGEVRVHRNIRGNDFEYFLKIAKPYLHDLTVVCECTFNWYWLADACFAAGIGFVLAHALYLRHISGGKNKNDRIDSEKLAHLLRANLIPPAYVYPAARRPIRSLLRQRMSYVWQRAELLTHLSMNQMAQGLVPAPKFGRNREVWEERILEQVEHPLHRMGVACDMQIVRAYDRQIQLLGQEVTRQARKHEGRDHQLLLTVPGIGKILSLTILFEMDTVERFPTVKDFISYCRLVKGSVASAGKIKGLCGGKMGNPYLRWAFGETAVLAKRSNPLLKTYAERLVSKHGKYKGNSILAAKLARAVYHMLQKGTGFDVECVLATSA

SEQ ID NO: 266399 - protein, 664 aa, unidentified
MSRSCQNRRRAAARTATNQDAGGAVHAAAMPTEGPVPSTTDPKTSRSRAAPGDTPAATPVAIGVGIDTSRYGHHAIFLDADLQPAAPELKFVESAQGYQQLQSRLAALRHKHGPVHFHFRLDVAGSYADNLLAFLHGLPEPRTISCGDPQRNKNYRAAIFGHKKSDATEANATARYALTEKPKPMPVVAPAVQQLCQIASRLESQARHCTRVVNQLHNLLGRTFPELALLVKDLSAGWVLTLLDRYPTAAKLAAARPSSLEKIPYLPHEHIARLREQARTSIAALTGPVTEELVRELVGQLQDAHVRHKALEKLLVSAYRQLPEPNHLDSIIGFGEVTAAILTAKMVTTGRFVEPAKLTGYFGIYPVEASSGIDRDGQSRLPLRMVMSRRGNDLVRRYLWMAALSAAQHNPAVRPLYQRVRAKHPDQPGIAIGHAMRKLLHLALAVWQTGKPFDPEHYPWDQAAHLPGSQQPATAEPVAPSPTHEHTGPHAQAAGHKNPVTTPVRSVVTAACVPTSVTEAASAGNDSTRSVASEHPEATACDMPMSQDAQAEATALAWIDFAHLKTQLPLQRVLEHLNLLTDLRGRSSQRKGPCPVHAPSGKSRTFSVNLDKNLFQCFDPHCGSKGDVIDLWAALHKLSLRDAAADLIQTFNLEPASRTEKRHG

SEQ ID NO: 266400 - protein, 430 aa, unidentified
MKSNTQNAKIEAITEKTLVLGIDVGSETHYARAFDYRGIEYSKKPFKFSNTEAGFATFKEWILDLKERHEKDKVVPGMEPTGHYWFNLGKFLQDNEMKPVLVNPHHVKKTKELDDNNPTKNDRKDPKVIAGLVREGRYMIPYLPDGVYADLRTASNIRFQLQAELTRIQNRISRWFNIYFPEYKTVYGKPDAKSGMLILKAAPLPEDILTLGIDGVNQIWRDAKLRAVGKARAKTLIEAAEHSVGSKEGAVSARMEIRMLLEDYESRNTRLQEVMVLIEELVRKIPMAEKLLEIKGVGIRTVSGFLAEVGDISRFNNPKELQKLAGLALVENSSGKHKGETTISRRGRKRLRYLLFEVAMSLVSKNQEFRELHNYYTTRRLNPLKKMQSLMAIAAKLIRVFYAMLTKGVDYDPKKMVSDIKRPAVYLQAA

SEQ ID NO: 266401 - protein, 325 aa, unidentified
MQNQTIIGIDVSSATLDIYVSSKEQRSIVIKNDPAAIGKFFSTYKNEYLLIGMENTGRYNWALYEVLKDLHHQVYVVSPLHLKKSMGLVRGKTDKIDAIRIASFIRKNVADLPQWKPSSPAIQKLKILLTERNSRIKSRRQLLKQQYDYAKMKHLGLDKPLQKLNVQQLTLIDAQITYVEQEIELLIKADEQMSQQAKLIRSVPGAGKVLCWMMLAKTENFTTITEPRKMACYSGVVPFANQSGTSVRGKQRISSYADKAIKAILHLAAMSAVRQKNELREYYLRKIAEGKNKMSALNAVRNKIIHRIFAVVKNQIPYQSNLLLP

SEQ ID NO: 266402 - protein, 347 aa, unidentified
MNFYDNTHPYYCGIDLHARLLYVCIIDQSGKVIVHKEISASPEQLYDLIEPYLADIVVGVECMHCWYWVSDFCEKIGVDFILGHALYMKCIHGGKAKNDRIDSHKIAKLIRGGNFPLAYVYPKEMRATRDLLRRRMKIVRHGANLKAHVSNTTSQYNLPPNKVNLKNVEAREQLRSTFSDPAVQRNIDLDISLLDAYAKELSKVEWFIEQQAKQHNPLHLKLLKTVHGIGRILSLTILYEIGYIERFGTVQNFASYSRLVKCKAESAGKSYGTQGNKIGNAHLKWAFSEAAVLFLRGNKEAQNYLLKLQKRMSKGKALSVLSHKLGRCVYFMLKNETVFDDKKFLKG

SEQ ID NO: 266403 - protein, 338 aa, unidentified
MNDPYYIGLDIHKKSITFVIKTSSGQLVRQGSLAATRPALEAWAAALERPWIGALEATLFSGWVYDQLRGSAQRLEVAHPQMLKAITCAKKKNDRLDADKICDLLRCDLLPRCYLAPTEIRELRRVLRYRNLLVRQAVRMKNKVAGLLMEVGQPYDPQRLHRKKYFHPLVEQLSDVPPSVRELLSISRSQMEVLAQCERRLLGALGKHPLLCRRVTLLRTIPGVGVVLALTWALEVGEPWRFESMARALSYCGLCAAQRQSAGRDQRGPLSKQRNKHLQTMLVEAAKLAPRYHPALRQVYERELRRGSRNRATLAVARKLVAYLLAVDRRQGAFELRG

SEQ ID NO: 266404 - protein, 340 aa, unidentified
MTITTLGIDIAKSVFQLHGVDAGGAVVLQKKLRRGAVLDCLAKLDPCLIGMEACATSHHWAREIAALGHDVRLIPPAYVKPYVKRQKNDAADAEAICEAVTRPNMRFVPVKTEEQQGVLVLHRSRDLLMRQRTMILNAIRAHVAEFGTIAAQGPRKVGELVGRLREDDSLGLPEVARSALLALAVQLDSLATEVRNIERQLMAWHRQSAASQRLETIPGVGLITATALAASVPDPTVFKSGRQFAAYLGLVPRQNSSGGKDRLGHISKMGNGYLRRLLVVGATSVTRRAPTTDTRTGAWVRSLLERKPTRLVTVAIANKTARTAWALLAKGQTYKATPAI

SEQ ID NO: 266405 - protein, 375 aa, unidentified
MTKIIRIGIDTSKSVFVLHGVDAAEQPVLRKKLRRSQVLEFFAKLEPTKIGLEACGAAHYWARELTALGHEVVLLPPQYVRPYVKRGKNDAADAEAICEAMSRPTMRFVPVKTVEQQAALMLAGTRDALIRRRTQLTNAIRGYAAEFGLTAAKGLDKIEPLLARIAAAAELPRLAQELFAGYGKEYAQLKVQIQKIEAKLMAWHKDNELSRRLVEVPSIGPIGASLMAMKVTDPHAFRCGRNFSAWIGLTPKDHSTAGKTRLGVITHAGDESLRSILVVGATSVIKQVRRGKGHPSPWLVELVRRKPPKLAAVALANKTARIAWKLMVSGERYNPAAAARAGRGSPLTRGCAPRPALAARIRSRSAALPAAGTEA

SEQ ID NO: 266406 - protein, 348 aa, unidentified
MRGLKDYVAGGEELFVGIDLHKHRWHVTIRTFDVELFSASIPGTWEALYRVLARYAGHRLAAVYEAGYFGFRLHDRLVDHGIPCIVTPPSLVPQEYGNRVKTDRRDSRKLAHLLAKGLLKRVWVPSEEELYHRQVIRRRRQLVRDRVRTQNRIKAELRFYGIHLEEPRGRWTQIYFETLRRIRFGNRWMQASFNRLLEQYEFLSAQIDKQTQLLRELSETALYRERVEILQSIPGIGIISAMELQDVSRFRRAEQLAAYVGLTPSQYSSADKVRMGHITGIGKNTLRAILVEASWKLITKDQIMREKYERIKIRSGGKRAIVAIARTLLLRMRRMLLDKQVCALDLAA

SEQ ID NO: 266407 - protein, 340 aa, unidentified
MSNYNLYVGVDISAKTATVSWGCKSDDLSGPITIKQHRTGWQKLVDKLVSQVDTPETCLVVMEATGTYWMQMALYLYESGLTLSVINPIRSKYFARMMLQQTKTDEVDARLLARLGMMMKLSIWTPPPAIYHELQQRLAYRDDLVAMRLQERNRLHALSHQSTIIASVQHRLEAHIQIISQQIKELDQEIKALLESDHEWAQSAIYLQSVPGIGTNTAAWILTATLNFSACDSPEQAVSFAGLAPHARQSGTSLHSKQSIGHGGHERLRRAMYLAAVPAVRFNSMIQAFYQELLARGKPKKVALCAAARKLLHLAWALVTKQCSFDPKYRQHPAIAYISA

SEQ ID NO: 266408 - protein, 355 aa, unidentified
MNQEKYIGMDVHQATISVAVMDAGGKLIMECLLETKAATIVEFIRGLQGTLSLTFEEGTCAAWLHDLLKPHVSRLVVCDPRKNALLKDGNKSDRIDARKLAELLRGNQLHPVYHAEHGVRTLKELGRSYLTITQDVTRVMNRIKALYRSWAIPCAGTTVYSSRHRAEWLAKIAEPGVRVRAERLYQQLDLLQPVRLEARRELLVESHKHSAVKLLRQIPSIGPIRSALLVALLQTPHRFRTKRQLWAYSGFAVETHDSGEYRSVRGKLQRNRERMTVRGLNDNHNRDLKNLFKSAAISASTRPGPLRDFYVARVEKGMRPTMARLTLARKIAAISLTIWKKGAEFDAQQLQRPTA

SEQ ID NO: 266409 - protein, 359 aa, unidentified
MTHCNPLSFPAKTIGIDLGDRISAFTIRDAAGEVTERGKLPTTRIACHEFFSLHPGARVVYEVGTHSPWLTWLLRELGHETVVANPWRFKLISQSVTKSDAKDADLLSDFGYLKPSTLSPITHRGPEVNAARAVITARSTLVRARTKLINCVRGLVKSIGERIPASSTESFHKKLWLPDSLRPALEPLREQIRMLTEQIRDFDKHIERLGREQYPETGRLRQICGVGPITALSFVCLIEDPNRFSNSREVGSYLGLVPKLRQSGNRDPQLRITKAGDRTTRALLVQCAQYILGPFGKDCDLRRFGLRLAERGGNAAKKRAVIAVARKLAVLLHALWVSGEDYEPLRAATKTQPRTRKAG

SEQ ID NO: 266410 - protein, 393 aa, unidentified
MLFIGIDIASDKHDCCVLSSEGKVLCDGFTFLNSRDGFEEFVNLIERYRLFPCGNEIKIGLESTGHYSANLLAFLRLKGFNITVFNALSVNRFRTAGTLRRTKTDKSDAQYIARLLAAGGTNSPCRQHNPLEHLKSLSRARYRLVKEIQPLKNRYRRLIRLLFPEFIGFFCDIYSTTALCLFDALPSAHDIAGCNILKLTSVLSTASRGHFKRSKADVLKLLAQKSIAAYDPGAAFELRQIANRIRFIEDQQADLETEIHSFMLTLNSPITSITGIGYILGATIISEIGDIHAFSNPNKLLAFAGCEPSTYQSGKFTATNTPMVKRGSRYLRNALYLATGKAYMHSPSFRSYINRKAAQGKHFYTAMSHGMKKMCRVIFAVLTSNTPYSEPAI

SEQ ID NO: 266411 - protein, 414 aa, unidentified
MRGGEIVNPLFVGIDVSSKNNVAYLMKPDGSKHSSFSVQNNLGGAKLLSERIVSALCSMQLSNVVIGLEATSIYGDSLVYALREDGSLGRFQRKIHVLNPKQVRKFKEAYPDLPKNDFVDAFVIADHLRFGRIAKEVYMDDYRYQALKTLTRARFDVIQNLTREKQRFANYLFLKCSGIAQDKDIQNTSATTIALMERFETVDDLANADLEELTAFITETGRGRFADPDAAAKAVQAAARGSYRLPKTVNDTVNQAMAVSIASMRALKEQVKVLDKAIEQQFEIIPNTLTSIPGIGKVYSAGIIAELGDIRRFKSQASVAKFAGLVWHKDQSGEFEAEHSRMIKSGNRYLRYYLLEAANSVRRCDSEFRRYYDLKFKEVNKYQHKRALALTARKLVRLVFRLLKDNRLYIPPEG

SEQ ID NO: 266412 - protein, 409 aa, unidentified
MRIISKRCLGLDLHKKQITAHLRVQRRANQLPTGEDLRFGTMPDELQRLRQWIVEQKVEDVVMESTSVYWMYLYELIEDVTRPLVANASHVKKVPGRKTDVGDAQWLAELGAHGLLRPSFIPAKEIRALRSVARYRTRCVAMQTGIRNRTIKLLEMAGIKLSSVVSDCFGVTGRAILNALAKDKPVDVVKLAKMSLRKKTDELDRCLGNGLLSALQCRLLKMHLEAYDAIDAQIAQSDAELELLSAPYGKAIAALDAIPGINQLGAITLIAEIGLDMKAYRNDAHLTALAGLAPGNAISADKRRRIGVRKGNHHLKRICVQFAWAASRKKGSFLQVRFRRLQNRIGRNKAVVALARQMLVLVYHVLSGKPYTDLGPTFYDERDKVRAVDRYARKLADLGYTVQLVKKPT

SEQ ID NO: 266413 - protein, 341 aa, unidentified
MELFVGLDVSVRTTSVCVMDTGGKLIRESKVETEPEAISALLHAIGGPYKRVGLEAGPLSQWLYSGLSAAGYPVICVETRHMKAALSAQINKTDRNDARGIAQMMRVGLYKPVHVKTVRSQEIRMLLTARKFVQTKILDAENNLRGLLRNFGLKVGAVTRLQFERRIIELLEQSPHLQLVIDPLLEVRRVLREQFQRLHKAMERLAESDDTCKLLMTAPGVGPMVALSFRAGVDEPARFSRSRSVPAHFGLTPSRYQSGEIDQDKGISKCGDAGIRWALVETAGILLRISKRSSPLKAWGLSVARRRGMAKATVGVARRLAIILHRMWVDNIPYRWEANAA

SEQ ID NO: 266414 - protein, 431 aa, unidentified
MKNRTNQRLEEITVGTLIVGVDVAKSVHWARFVDYRGVEIGKALSFQNNRRGFESIVARIREICGIKTLQYPVETVVVGMEPTGHYWKPLASYLPEKGYRVVGVNPYHTKKSKELDDNSPTKSDKKDALTIARLVKDGRFFDSYLPPEVYGELRILTNARASVMRRNSAVKNTITAILDEYFPEIWTVFKKPLSGKASRQVLRSCPFPALILALGEDSVLAEIRKTVKRTVGMKKVRQLVCAAKDSIGVRFGLEAAKLRLQWLLNELELVEKQLCEIEQAMETALTKTGYAAQMIGIKGVRVVTAASFLGEVGDPLRFQNARQIARYAGYNLVEDSSGKSKSGTCISKRGRRGLRNVLYQMAYTLVGNNAEMRTLYRHLIMRKENPLKKKQALVVVSKKIITIIYSLLKKKETYNPDLVFGSVRKEMLLAA

SEQ ID NO: 266415 - protein, 407 aa, unidentified
MKNKTKKKLYVGIDVHSREHRAAIIPIALLEQTNAAWKSVKTISIKNERDSFNYFEKTIRSQVLDPSEVVISVDHTGGHYSEPIIFFLLSRGYEVYFLESKGIKAARATLLDQECKSDAIDSVSAAYMLYLRDTQGLSFRISLMKYELGSMATVLTSLILQRMQFIKLITQATNRLHQLLIATFPEGEARYFKKLLNIITRYPTPQEIQNSNGLEGIKRINLKDREIIIQLATNSVGVPGDLYAWLIKELGILRMDFISKREVIASMIREHLDRHPYTEILYSFPCFGEIAAATIIGIMKDINNWPNKKKFKKALGVYSTVAQSGMKSRTKRGKEGSRHGRRVLFQVCLGCIREKVPDNDFKDYYLRQVSNGKIRIKALVSTMGKLAEIIYHCLRTGELYEYQGIYR

SEQ ID NO: 266416 - protein, 401 aa, unidentified
MNTTTILYVGIDVSKGKSDICIKDQSGNDLIQRFKIANTKADLGKLYETIERIKSKTQGNSDVVFGMEATGIYSLPLYSALRRDGYKVKLYNPIQTNGFRKMNVRKTKTDPIDAAIIADMLRYSEPPQVNEIKDLNLYQLRELVRIRHRLIEKQTVCKIQMIRNIDMIWPNYVSLMPKVFGTTSITVLKKYTVPSKMIRKSFEVFYELVRKTSRSKISRTKAEEIYANAGNILTIPEIEPIVSIEIKTLITQLELYDGQIQSVDDKIDQMMKLIDSKIMSIPGIGGILGPIILGEVGNIDRFSNAKKLVAFAGLDSVVSQSGRFENKSGKISKRGSPLLRQALFLAANVARMNDDVLKQFYDKKKSEGKHHYSALNAIAAKLLRIVYSVLKSNKEYQPQPN

SEQ ID NO: 266417 - protein, 351 aa, unidentified
MTNDITIGMDMGDKTHRTCVLNAKGEVTAKHSVANTAKSISKHFGKYKPCLIAIEAGTHSGWVSRLLDELGHKVLVGNPRKLRVIWDSDEKDDDRDAEMLARIARFDPHLLHPIHHRGKEAHADLAVIKARDMLVKARSRLVAHVRGSVKSAGERISTCSAACFHTRAIDEVPTELRDALTPVIRSIEELTVRIKHYNNLIKQLSEEKYPESQVVGAIPGVGPITSLAFILTLEESARFKKSRDVGPYLGLTPKRDKSGQTDKQLGITKAGNAHLRRLLVGCSQYILGPFGPDCDLRQFGLKLAERGGQNAKRRAVVAVARKLSVMMHHLWMKNSEYDPFYKENRKRQKVA

SEQ ID NO: 266418 - protein, 370 aa, unidentified
MSNATTFVGLDVHARPVKACAFVPETGETIRKSFGYEPGEIASWVSSLPQPARCVYESGVTGFHLCRELNAMGAACVIGAVSKMRKPAADRGRKTDRRDAQFLAVQLALGVVTEVHVPDAECEGARDLARALADARDDAVRAKQRLSKFLLRHGLVYDERNAAGQRRNRWTGDFWAWVGRIDLGDAAAMATLDHYCERVREADAAKAALEAKVKSLAQQPRWKPTCDALKCLKGIDAVTAASIACEADGFARFATASGFAAWVGLVPSEHSSGESRFRGGITKAGNKHLRKLLVEAAWHYKGASRSPKDLAKGQVVDAATRRHANAGVRRLVDRRRSMDDAGKQSSVANVAVARELACWCWAVGRMAEGA

SEQ ID NO: 266419 - protein, 418 aa, unidentified
MNQLKYDFFVGIDLGQWLHMASVVDAKGEFLGETSFPHSREGLSGTIDWLLEVTSQDTARIAVAIEKPHGAVVELFLDNAIAIFSINPKQVDRFRDRHSMSGAKDDRRDAFVLADSLRTDGHRFQRLHLPPPEILAMRGLLSTRDQLVKNHVALSSQIRELLTRCWPHLVSLAPKDKALDAFFCELLQLFFESSPNPLSSHTIETLAQKHRIRRLKPEKILDTLKQKPLRVAPPTTQVTSEHIELLLQQLLLVRQHRRASDQHLDKWFKRVKALTDEPCSDPAILASLPGVGAYVLACVLCYAHHPIRLRNLNASRTLGGIAPVTKKSGKRGQLRPTILMRRARSLPLNNALHHWARTAVLHDSHFKEHYDRLRDRGHSHARALRGVMDRILPIAIAMLRQGTLYDPSRWTTQKANRG

SEQ ID NO: 266420 - protein, 450 aa, unidentified
MLVQSSDPPRLVRVGIDAAVVAQHEVCLRVIEADGRVRTDRFRVPPTLAGLRSLTDRLAQTPGVMAVAEPTSMTWLGLSVALADAGCDLSLLGARHAARLRGAISGKHKSDVIDADVLARAGEVFDLHPLRPVDPAQLALRRACVRRGAAVIDGNRYLRRLISLARWAFPDVWNGFRGSRPTAVAVLERWPHLAQLATARRSTLTGVVALHTRGVADVPERVEAIRSAAGAWAQFWDGHLDLDALAFDVTEHLSDMADAKSRTERATGQAQRYWRQLYGDDGLLMSIPGMGPVTACVVRGFLADGTGFASAKAAASYAGLNPSTWSSGTVSQPSRAITKEGPAVLRLAFFQAANGARRTDPQLAGFYHRLMTEHAHCHTQACVAVARKLVERTWTVLTRGTPYQLQDVDGEPIGHLEAKRVITDHYTVPDDVRARARAHSAATNRAKLTR

SEQ ID NO: 266421 - protein, 394 aa, unidentified
MLYLGIDQHHRQITVSLRDDHGSVILRRQVSTQPGKVRVFFGQLCGQAGADGFMAILEVCGFNDWLIKMLGEFGCREVVLIHPDKRSKRKTDRRDAAKLSEILWINGERLSNGQKPQGIRRVCIPSTDEQADRQLTSLRKRIGSQRTRTINKIKNILRRHNLSWDQPTKTFQTQGVRRWLQELELSEMDRLEMHHLLAQWTLWDEQLKELEQRIGQRFAQSATAQQLSTTPGVSAYSGLSLASRIGNIDRFASPRSLSNYFGLTPGCRNSGEATDRLGSITKEGSGMARFILGQLVLHVLKKDPWMREWYRKLRRRRGSKIARVAVMRRLVTIFWHMLTHHEDYIIGGPPRLRHRPDRSTGRPSRRSGSPQKTEPAMKKPATKKPTQQEQPVMS

SEQ ID NO: 266422 - protein, 349 aa, unidentified
MKIIGCDFHPIYQQIVVWDQATGEVVEKALSHERKEEVRAFYAGLPGPVRVGIETSGQSQWFERMLSELGHEVRIGDAAKIRAATDRKQKTDRRDAQLLVKLLAEGRFPQIWVPTPAERDVRQLLLHRHKLVRMRTQVKNQLQALALNQGLQRKWKLWSATGRKQLEGLPLLPWASRRRAELLQLLDQLEKSLEELDRATTEQANTRMEVRRLMTHPGVGPVTALAFVLTLGPAKRFRRGKQVASYFGLIPSEYSSGEGKQRLGHISKQGSSLVRGLLVEAAQSAVRHEPQMRREYQRLAQRRCRALAKVAMARKLAVRLYWMLREEVDYAQLIQGSRAGQPESFRGRS

SEQ ID NO: 266423 - protein, 341 aa, unidentified
MSDYYYFCGIDLAKNHFSLHAVDQNGKVILHKSVTRSKLLTTIANMPLMRIGVEACGGAHYWARTLNKLGHDARIMAVKYVVPYRTKGKNDLNDAVAICEAVQRPSTRFVPIKSPEQQAILSVHRIREHWVRERTALMNRMRALLSEFGLIIPVGRSSLLKQVPLMLKDAENELPHLARTVIADAYHHLGELNQRIADTEQVFDSFAKVSANVQRVMKVRGIGPQTATAILASIGNGSQFDKSRDFSAWLGLVPKQYSTGGKPRLGRITKHGDKYLRTLLVHGARTVIANLGDKQDKLSQWCRGVLERRGMNRAIVALAAKNARIIWSLLHNQTEYENYAA

SEQ ID NO: 266424 - protein, 316 aa, unidentified
MAPDASPGRPVTLDQTLQGFAVLQARLRAAGHVAADMLVVLEATGSYGVSLATTRAHAGVAVAVITPDQAHHVATAVLQRAKTDALDARTLARLAATLQPAPWTPPPAIDTALQQRLSARDTLIGLRPQVRNQRHALVQVPVVIPAVRARLEEVIATVDAQSAASEREMTQVLPQDADWAAVAALLVGRAGVRVLMAAWLLVTTLTVTIGVTPAAVTAYAGLVPVPTESGTSVRGRGASGHGGNTRLRTALSRATLSATRYTLPINAFYERLRAAGTPTTVARCAAARTLVHLTWAVVRKGRSCDPFYAQQRQETA

SEQ ID NO: 266425 - protein, 335 aa, unidentified
MEFTYFIGIDVSKNDLDFAVMKKKNFLFHKRISNSPSAIISLLKELVQLPEFSIRQAIFCMEHTGIYSNHLLSILFKKQFSVCLEAALHIRNSLGNIRGKNDKIDAIRIAEYAYKNRDQLRLWQPKREVIIRLAQLSATRSRLIEVQKVLNVPIKESKEFIPAAVTKENSMVCQSTLKAIKADLVKVDKAIQKIIALDSELSRLFNLITSVGGIGKATATQIIITTNEFKNINKPEKFACYAGVVPFTKESGLFKSRPRVSHLANKKMKTLLHLAALSAIRYNDDMRAYYERKVIQETKNKMSTLNAVRNKLIHRIFACVNNNRPYEKNYQRLVA

SEQ ID NO: 266426 - protein, 351 aa, unidentified
MTRKTDAVVASTIGIDTGKNTLHLIGLDDKGAIVLREKLARGRIAARLANVPKCLIGIEAGMATHCVARELIALGHEVKQVPPVYARPFRQGHKNDFRDAHAVAEAVQRPSTRCVPVKTDDQLDLQALHRVRSRLISERTAVINQIRGFLLEHGIPVRQGLRFLRQQLPDILAKRIDILSSRIIRIIEDLSGDWRRLDERIENVTEEIEELAHGTEGCRQLMTVPGIGPIIASAMVAAIGSGTAFARGRDFAAWLGLVPKQMSTGDRTILGRISKRGNRYLRTLFMQGARVILLRPANWAKHSFGPWLAAAAKRLHHNVLATAVANKLARIAWTVLVQARSYETRVTSEMA

SEQ ID NO: 266427 - protein, 313 aa, unidentified
MSEQQWIGIDVCQKYLDIYVRPQGKLFQVTNDEVGISTLVQTLKNIQPELIVIEATGGMEIDAVVKLNGAGLAVAIINPRQARDFAKATGQIAKTDVIDAKILAHFADAIRPEVRPISDESARQLEDLVARRRQISDMITAEKNRRRGKTNSVQADINEHIEWLEKRLQEIESQISSAIANNRDWQQKLKLLTSVPAVGEVVAVTLISFLPELGTLSHKSISYLVGVAPLNKDSGKFRGQRRIWGGRAKIRCVLYMAALVAIRFNPPIKAFYERLIQKGKLKKVAITACMHKLLIFLNAMMKNNQTWRHEVNP

SEQ ID NO: 266428 - protein, 301 aa, unidentified
MPAFTVNNAQPGFDFLVQKLDEINVSLILMEATGGLESGVAYYLQTKGYDVVVINPRQARDFARSMGYLAKTDRIDASVLAQLAQVIDRSPERARFVKPLPEITRQELTAIVVRRRQLNQMLVAERNRLYPSHPGSRESIGIIIDVLERELKRITQQINQYVKAHFRHQADLLASVKGVGEATIATLLAELPELGKLSRREISALTGVAPFNRDSGKMRGKRTTFGGRGTVRVTLYMAALTATRFNPIIKEFYLRLLSGGKAKKLALVACTRKLITILNAIVRDNQQWNTSFNKQRASPIN

SEQ ID NO: 266429 - protein, 439 aa, unidentified
MILIREVADAPVIMGISKPAGLKSPCGEGKIMNPLFVGIDVSSRNNVAYLMKPDGSKHSSFSVQNNLGGAKILSERIVSALESVPLSDLVIGLEATSIYGDSLVYALREDGSLGRFQRKIHVLNPKQVRKFKEAYPDLPKNDWVDAFVIADHLRFGRIAKEVYMDDYRYQALRTLTRSRFDIIQNLTREKQRFANYLFLKCSGIAQAKDIQNTSATTIALMERFETVDDLANADLDELTAFIAETGRGRFADPDAAAKAVQAAARGSYRLPKTVNDTVNQAMAVSIASMRALKEQVKVLDKAIEQQFEIIPNTLTSIPGIGKVYSAGIIAEIGDIHRFDSQASVAKFAGLVWHRNQSGDFEAEHSQMIKSGNRYLRYYLLEAANSVRRCDSEFRRYYDLKFKEVNKYQHKRALALTARKLVRLVFRLLKDNRLYIPPED

SEQ ID NO: 266430 - protein, 324 aa, unidentified
MNPTVSPTPEQQIHVGIDVSKRTLDVCLLPEEESFTLANDQEGVEELLFRLQKVAPKLVVLEATGRYERLPATSIASAGIAVAVVNPRQARDFAKAMGRLAKTDKIDAFVLARLARAVEPSPSALPDAQAQALQAILARRRQLLSMLTAENNRLQMAREEALAKRIRAHMKWLEKEIERTDSDLEEAIEASAAFKENEALLKSVPGVGPVLARTLLAELPELGKLTHKRLSALVGVAPFNRDSGERRGKREVWGGRASVRVALYMGALVATRHNAAIKEFYERLLASGKPKKVALVACMRKLLSILNALMRDRTVWRCPHTLTP

SEQ ID NO: 266431 - protein, 340 aa, unidentified
MSEITTIGLDLAKHVFQVHGIDAQGTTVLRKRLRRGQLLAFFSRIPRCVVGLEACATAHYWARELGALGHEVRLMPAQYVKAYIKRNKHDAADAEAICEAVQRPTMRFVPVKTAEQQATALLHRGRERLVRQRTMLVNALRAHLAEFGIVAAQGLRHVGDLIAIVRDDCDTRLPDVARQVLQVLANQIEQIETAVAALERQLLAWHKSNPVSQRLASIPGIGPIIATAIATTVADPKVFRSGREFAAWLGLVPRQNSTGGKIRLGGITKRGNRYLRRLLINGASANLLRSKATKADPWVIGLRRRRPPLVVAVALANKTARIAWAVMLREKEYQPRAVAA

SEQ ID NO: 266432 - protein, 424 aa, unidentified
MKVTYQTCCGVDVHKSFLVATIVKTTGGIEPSYQKKRFSTFNNSILEFKQWLLNNNCHDVCMESTGKYWIPVFNLLEDQINVTIANPKWVKAVKGNKDDTKDSKWIGDLFRLGLVKGSYIPCKAIRILREYTRYRYKLVSCRSSEKNRYQNALTVCNVALDSVVSDIFGKSSTSIIDYLLEQSGTTINHEEIASKLLRRLKSKEDAVIESVEGYQMTDAQKYRMRLVRAHMDYITAEINDVDKMIENMISSNPDFENAIQFLCTIPGVKRDSAITIISEIGTDMSQFSSSKRLCCWAGLTPGSNESAGKKKSVRITRAGVYLKPALVQCAHAAVKSDKSPYYKKKYESLVKRRGKKRSIIAIARMILTAIYQMLSTGEQWNPSDLYKIDMPVALVEKQKAKAIKQAKKLLQREGLLPPDEPLAS

SEQ ID NO: 266433 - protein, 368 aa, unidentified
MNTVKFIGMDVHKKTITIAIIDQGRKEQPRIYGAIANQLEALDKFCRKMVSTAARLHFVYEAGPCGYGIYRHLTQKGFDCMVAAPSMIPKKSGDRIKNDRRDATMLARLHRAGELTAVYVPDAQDEAMRDLTRAREDAVVAARKSKQRLNAFLLRNGLTFAGRTKWSKAFFNWLSDIAMAYPAQQVALQEYIDTVHENLRRVNRLTDQIQQLVPAWRLAPVVSALQAARGVSLIVATTVLAELGDLSRFDNPSQLMAYLGLIPSEHSSGESIKRGAITKTGNGHVRKALVEAAWAYRMQARVSRLLLKRQQGVPERVCQIAWKAQLRLCARFRKLTARGKTKQKVVTAIARELSAFLWAMAKQLQPVV

SEQ ID NO: 266434 - protein, 359 aa, unidentified
MAKSNVTSLNNFVEKFSGHEFWVGADVHKRSYHIAIYRVDGEVRTFVCPACPARLLRKLQSLNVTIAGLAYEAGPTGFSLARIIQSAGIRVIVAAPSRIPRPVLCGAKTDRLDCIKLAEYGAKGMIKSIVIPTEKEEAKRSLIRRRHLVVDSIRKCKQRIKGKLLFLGIQEPQEVRNWTKNAPEVLLALPMDDVAKLALESFLREFAFLQEELKTILKKLNNILKEEGIRKTMTCLKSVPGVGMVVASTFCMELFRPERFTRAEEVTSYLGLAPMVYHSGENNPSGRLKPVGQRRLRSLLIEAAWMWRSRDEYARKTYNRLLGKTGIPQKAITALARKLAVILWRLSVEKRTYRKIEAV

SEQ ID NO: 266435 - protein, 356 aa, unidentified
MVTELVDYVVGVDTHQDEHTLALVQAATGAVLAERTVTSKCRGYAEALRFASQQVDAARLWAIEGAGHYGAGLARYLSERGETVLEVGRSPRGERRLRGKDDQLDAVRAARAALRSEPQRLRSEPLPRPRSGECREALRLLLVARRSAVDVRREALVQLRSVIVTAPDRLRQELRGLPVQRLLERCSRLRRSTTATPDEVAVRLVLRTLARRIEAATVEADELEGEILVHVRALAPRLLDEPGVGPIVAAQLLVAWSHRGRVGSEAAFARLAGVAPVPASSGKTTRHRLSRGGDRQLNRALHTVVLHRRQHDPATREYIARRTAEGKSRREATRLLKRYLARHLYRQLQNQEPLLA

SEQ ID NO: 266436 - protein, 319 aa, unidentified
MMSVYVGIDVSKQTLDVATYPIAQSLHVSNTATGHQQLHKWLQQHDEVVQIALEATGRYGEAVRDFLVAEGYAVSYLNPRQIHAFAQIELHHHKTDRQDAQLIARYCALFEPDLYRPRPTLRKRLQQQSRRLDQLKKMRQQEVNRLQSGLQDTFVREQIETVIAYFDSLIQQTQQAIHTMIASDDALTAQQRLLCSIPGIGKTTADLILAEIDIDNFDDARQLAAYIGITPQHFESGTSVRKRATISKQGNARLRCGLYMPAIVAKRYNPACQRLAARLTDKRKHGKVIVIAVMRKLVHQVYGILNSGRPFDPNFEQIA

SEQ ID NO: 266437 - protein, 328 aa, unidentified
MNETGKVELRRKLRRSDLIAFFEKQERCTVVMEACGAAHHWARILSGLGHTVKLIAAEAVKPFVKKGKKNDAADAAAICEAASRPDATFVPVKSVAQQGILALHTTRSLLVKQQTMLANAIRGLASEFGLVVPKGLHNLEPLVALVEADEAVPAQARRAIAELYKRFGELATGIQAFETAIVAHARSDATARRLATIPGIGPITASLIAATVVDISRFKTARQFAAWLGLVPRQNSTGGKTRLGRISKAGNREIRKLLVLGATSMVGRAEGWHSAVGSWLRDILQRRPVRLVTVALANKMARIAWSVMTRNEVYRPQGGVAAKAQAAE

SEQ ID NO: 266438 - protein, 456 aa, unidentified
MKIPQSTIRLLTGRLVKILLYREVSTMKSNTQNAKIEAITEKTLVLGIDVGSKTHYARAFDYRGIEYSKKPFKFSNTEVGFATFKEWILDLKERHEKDKVVPGMEPTGHYWFNLGKFLQDNEMKPVLVNPHHVKKSKELDDNNPTKNDRKDPKVIAGLVREGRYMIPYLPDGVYADLRTASNIRFQLQAELTRIQNRISRWFNIYFPEYKTVYGKPDAKSGMLILKAAPLPEDILTLGIDGVNQIWRDAKLRAVGKARAKTLIKAAEHSIGSKEGTMSARMEIRMLLEDYESQNMRLQEVMVLIEELVKEIPMAEKLLEIKGVGIRTVSGFLAEVGDISRFNNPKELQKLAGLALVENSSGKHKGKTTISRRGRKRLRYLLFEVAMSLVAKNPEFRELHNYYTTRRLNPLKKMQSLMAIAAKLIRVFFAMLTKGVDYDPKKMVSDIKRPAVYLQAA

SEQ ID NO: 266439 - protein, 331 aa, unidentified
MKNKELIGIDVSKKVLDVFILGVSYHFIVENSPAGFAKLLETCCFKLSCNKDHLFFCFEHTGRYSWLLSIFLSESSITFAKVPAMDIKQSRGLIRGKSDKKDAQMIANYAHRRRDELIPTLLHKPEVGQLRQLLSLRNKLLRHRTAYKNSIKDLQDYFIEGESEFIRTTQERLIEQLNGEIDNVEEQIDTIITSMPDWENNFKLMQSVKGIGPVVSRYIIIYTENFTRFTDPKKFACYCGIAPFEYSSGSSIKGKTRLHPCANKQLKSLLNIAAMGAVRLKGEYKTYYERRTEEGKNKMSTLNIIRNKLLFRLFAVVKRQTPYVDLTMFAA

SEQ ID NO: 266440 - protein, 343 aa, unidentified
MEQYVALDVSLQKIAVCVLNASGRVVIEAEVASEPGVLISFIRTKAPHAVRIGLESGPTSPWLWHSLKSAGLPVVCMDARHAHAALSVRPTKSDRNDARGLAEMVRMGWYKEVQVKSLAAHERMALLGVRRRLVDMRVEIDGQIRGILKTFGLVVGRGNKNAFAQRARMLAQDHPVLSALIDKLIEVREVAVAKVAVLDKEIRSFVRADPTLRRLMTVPGVGPVTALAFRSTIDEPDRFKRARDVGPYLGLTPRRYQSGETDRQGKISKCGDRFTRTCLYEAASVLLTKVQRWSPLKAWGTRLARRIGSKKARVAIARKIAVILQCIWTDGTEFWWTKEAAQA

SEQ ID NO: 266441 - protein, 420 aa, unidentified
MKVVYQTCCGVDVHKSFLVATIIKTTSGVQPSYQKKRFSTFNNSILEFKKWLLDNSCRDVCMESTGKYWIPVFNLLEDELNVTIANPKWVKAVKGNKDDTKDSKWIGDLFRLGLVPGSYIPCRPIRILREFTRYRYKLTSCRSSEKNRFQNALTVCNVALDSVVSDIFGKSATSVIDYLLQQSDNSINHEEISSRLLRSLKKKSESVIESIEGYQMTESQKYRMRLVHAHMDYITSTISDIDSMIDSLVEPYENAVQLLCTIPGVDRNSAITIISEIGTDMTQFSNSKRLCCWAGLTPGNNESAGKKKSVRITRAGVYLKPALVQVAHAAVKSNKSPYYKAKYERIMKRRGKKRAIIAVARMILTAVYHMLSTGESWNPTDLYKIDMPEPLKNKQKEKAVKQAMKLLIAEGLIKESQLTS

SEQ ID NO: 266442 - protein, 326 aa, unidentified
MHYVGIDVAKATFEVSDAEGQRRRSCKNTAAGIGRFIAWLDRSFQGEVQLVIEPTGRYHHLLLDRLQAHGIPRTVINPARTKAYGVLAGKRAKTDRIDAQLLARMGGSERPEPSRDADPDQERLKSLRRHRDQLEEEMRATRNRLESASHSPWISPQVARSLRRTIAHLEGEIADASEKLDEAVEADEMLSTAAALLESVPGVARRTALLILSELPPAHTCRGPRSWVAFAGLCPEPRESGKAKWSRLSRVGSGRIRKQLYMAALAAMRWNPAVAAYVARLAERGKTGKLAVVAAMTKLVRICFGVLKNRRPFDPQLHLRYTTPAP

SEQ ID NO: 266443 - protein, 424 aa, unidentified
MNDTLNKKIEQVTDKTLIVGVDIGSEIHYARAILVRGYEVSKRPYRFENTDDGFSGFITWAYNLAIENKLTKIMIAVEPTGHYWFNFAEYLKKYDVQLVLVAPQHVKHSKEMDDNTQEKNDRKDPLVIAKLVPEGRYLIPYIPEGIYADLRTAFNRRCELVDAQVRNSNRMNRWFDVYFPEYKTVYDRTDAISGLAVLKRAPLPADILALKEDGIYQIWREERIRSVGINRARKIVAAAENSVGVKGGAAARWEFWQLMEEHDLIVRQLHDIMLLIEEYLRQIPGADRLLKVPGAGIVTVAGFLAEVGDIKRFTDPKQIQKLAGLAVVENSSGKRKGMPGISRRGRGRLRWILFQLARTMVKFNKEMRTYHLYYTTRKENPLKKMQSIMAIAARIARVFYGILKNGTEYDPAIVMKDFNKAVAA

SEQ ID NO: 266444 - protein, 326 aa, unidentified
MEQELHYIGIDVSKAKLDVDVLRPDGRHRSKKFANTPKGHDELVRWLNSHQAAPAHICMEATSTYMEDAAARLSDAGFTVSVINPALGKAFAQSEGLRSKTDAVDARMLAEFCRQKRPAAWEAPHPVERALRALVLRHQSLTDMHTQELNRQDTARDVQRPSIDAHLLWLEAELKRLEKQIKDLTDDDPDMKYRRRLLNSIPGIGERTSAVLLAYIGLKERFGQARQFAAFAGLTPRQHESGSSVRGTSRMSKAGHVSLRRALYMPAIVALYKTAWGRAFRQRLENNGKGARLIIGAMMRKLAQVAWGVLKSGEPFDASRHCGVTA

SEQ ID NO: 266445 - protein, 459 aa, unidentified
MGREKSSASNWEGLKVIHPNAAGLDIGSAEIWAAVMPGRSAEPVRKFGTFTPDLNALADWLTTCGVDTVAMESTGVYWIPVYEILEARGFQVQVVNARHVKNVPGRKSDIQDCQWLQGLHSVGLLRGSFRPAGEIVTLRAYLRHRATLIEHRAAHIQHMQKALQQMNVQLPQVVSDITGVTGLAIVRAIVAGQRDAQQLAALRQPGCKKSAQEIAKALSGNYRREHLFALQQALALYDFYTEQMAACDAEIEGQFANLKPIRDDLPPLPPSNKPESHSKNAPSYDARSYLYRIAGVDLVAISGLNESSVQIIVAETGIDMSHFPTEKHFCSWLGLAPHNDVSGGKHLRSRTLPTNNRAGQAFRMAAQSVSRSPESAFGAFYRRMRAKLGPSQAIVATAHKIARAFYHILKHRVPFHDMGGAEYERRARLRELKNLQKRAAKLGLVVVEKPQAAALAGSF

SEQ ID NO: 266446 - protein, 356 aa, unidentified
MSQEKYIGMDVHQATIAVAVLDSRGKLIMECILETKAATILEFLRGLRGSLSVTFEEGTSAAWLHDLLKPHVTNLVVCDPRKNALLKDGSKSDRIDARKLAELLRGNQLSPVYHGEHGMRTLKELARSYLTISQDLVRVMVRVKALYRSWAIPCSGQQVYSVHYRALWLDKIGEAGVRRRAEFYYQQLDALRWLRQEVRRELLAESAAHKATKRLRQIPSIGPIRAALLIALLQTPHRFRTKRQLWAYSGFGIETHDSGEHRYVEGELRRAKQKATVRGLNRNYNRDLKNLFKGAATQAAAQPGPLREFYSALLTKGIRPEMARLTLARKLAAITLTIWKKGVDFDAQQLHRQVVA

SEQ ID NO: 266447 - protein, 370 aa, unidentified
MKKHSTTPKSPKQASACKGGPITIGLDLGDKTSRYCVLGANGEVMSEGSVGTTRKAMAEKFAKMRRCRVAMEVGTHSPWLSRWLSSLGFEVIVANARQVQLISASSRKNDRLDARLLARLARVDPQLLRPIRHRSETAQADLMRIRVRAALVEARTRLVNAARGFAKAMGERLPACDTDSMGVERMESLPEGMRDTLKPLLEQVESLTEKIKESDVKIEQIARTQYPETELLRQVSGVGTLIALTFVLTLEDRERFRKSRDVGCYVGLRPKQSESGQSQPQLRISKEGDVYLRTLLVQAAHCILSRRGPDTDLKRWGLKLASRGGKNAKKRAVVAVARKLAVLLHRLWVCGEVYEPLRNSQAAGSSKKAA

SEQ ID NO: 266448 - protein, 357 aa, unidentified
MTEKRRRIGQLIGCDFHPGYQQIAMWDKATGEVLEKALSHERKEEVRAFYAGLEGPVRVGIEASGQSQWFERLLAELGHEVWIGDAAKIRASCERKQKTDRRDAELLVKLLDEDRFPRIWVPTPAERDARQLLLHRHKLVRMRTQVKNQLQALALNQGVQRKWKLWSEAGRKQLEAVSLMPWASRRRAELLVLLDQLEASIGELDRAAVEQANARPAARRLMTHPGVGPITALAFALTMGPAERFRRGKQVASYLGLIPTEHSSGGRGQRLGHISKQGNPFLRGLLVEAAQSAVRHEPEMRRAYQRLAQRKCRALAKVAMARKLAVRLYWMLREEVDYAQLIQGSYAGQPESFRGRS

SEQ ID NO: 266449 - protein, 441 aa, unidentified
MAGQRDDNIKKKHITAMSSPSDQESVGWLESRGFGALDWASEKHSVVVVDPQGKVLEDFEIEHSALGWKKFRDRMRPYGSIPFAIETSQGAAVEQLLEAGMHVYPLNPKSAQAYRERKAPSGVKDDELDAWSFADALRVDGQNWKPLRPEGSVIKELRLLCRDEVGLIEQRTAFINQLRHALAEYYPTALEAFEDWGAMSAWMFLQRFPTPHILEKAGKRQWEKFLHSRRLWRTKSGPQRMELFSKATEFCGSEPTAKAKSMLALSLVKMLFALENQLSEYRKRIEELFESHPDHDLFGSLPGAGPKLAPRLLGEIGDDRERFDGDAQNLQCFAGTAPVTKRSGKHRECHQRWACNKHLRYAVHLFSQHTITRCAWAEIYYKAHRAKDHSHATALRCLGQRWLKILHKMWMDRTPYNAELHHLNQVKHGSWVFQLKTVNCK

SEQ ID NO: 266450 - protein, 344 aa, unidentified
MQIVRIGLDLAKYVFEIHGVDAHGKTVVRKTLRRHAVSAFFANLPPCLIGMEASNGAHFWAKALSDLGHDVRLISPQFVTPYVKSNKNDRNDAEAICEAVGRPNMRFVPVKSAEQLAVQAVHRIRSRLVADRVRLVNQVRGLLGEHGIVVAKDIGNLRRALARIVGDNEDHALHDLVRALMAELREELTELDARIAGYDRKIRELYRNSEICQRLGKVEGIGPVTATALVAAVGDRSSFKNGRQFAAWLGLVPKQRSSGGRARLFGISKRGDRYLRTLLIHGARSALGRVRDKQDPRSLWLGRMRQRRHPNVVAVALANKNARIAWSLLANDSAYDASLSVGAA

SEQ ID NO: 266451 - protein, 466 aa, unidentified
MKRRPNASKKNRRNRQKRVAKLLEMVHLNAAGIDIGSASHWVAVPEDRDDQPVREFRSFTPNLHALADWLDVCGIETVSMESTGVYWIPLFEILQERGFEVLLVNARHVKGVPGRKSDVSDCQWLQRLHTFGLLRGSFRPDAEITAIRTLVRHRGTLVQEAAAHIQRMQKTMTLMNLQLHNVISDVTGVTGMAILRDIVAGHTDPAVLALHRDYRCKASNEEFVASLTGHYRGELVFALRQSIELYDVYQDKIRACDEQIEALIRALEAQCPTPERELTTQPRSKRPRRHEPHFDIRSPLFKLSGGVDLTEVPGIGPYAALQVISEIGLDMSRWPSPDHFASWLTLAPHNKISGGKLLGSATQPSANRAAKTLRFAVMSFTRSDHALGAFYRRLAGRIGKAKAITATARKLAIIIFCMLRDHTPYRDQPAAAYDERQRKRVLHGLRKRAQSLGFDLVQLDTGLVLE

SEQ ID NO: 266452 - protein, 354 aa, unidentified
MLIIGCDFHTRYQQIAMAREETGELLVERRLDHASGEAHAFYRSLQSSQEPVRVGIEATGPIHWFERLLADLGYELWIGDSAKIRASEVRKQKTDERDAALILDLLLAKRFPRIWVPTPAQRDLRQLLWHRHKLVSMRTMLGNQLHALAMSQGLCRKKKLFTKKGRVELVSLGLAPWASRRREELLKLLDQLELPIAELDRAVLEEAKRHADAVRLMTHPGIGPVTALAFVLAIGPITRFRRSKKIASYLGLNPSEESSGGRRRLGAISKQGNTMVRWLLIETVHHAVRQDPELRQDYQRLKFRRGHAVAKVAIARKLAVRMYWMLRSGADYARLVRRQGSPGGTLVGASPSLA

SEQ ID NO: 266453 - protein, 463 aa, unidentified
MAGSQKETRTAGVEAAVQGLPVLRPNVAGIDLASEIHWVCAPNMDGTGREVEKFGATTPELKRMAEWLKQRQVESVAMESTGVYWIAPYEVLERYQFEILLVDTRELARVPGRKKSDHVDCQWIQRLHSCGLLTGSFRPAEQVCRIRTLVRDRGNLVAAAADWLRRMQKSLDQMNVRVHRAVKDIEGATGMAIIRAIVKGERDARKLAELRDPHCQKSVEQIAEQLSGHWRADHLFSLQEALKMYDAVQSGIADYDQEILRQLAEMEREECRGQQAPKLKNVNKAQKIKSRGEETMRQALYRMSGVDATAIDAIGVGTVQVILSEYGPDLSRFATEKQFVQHATLAPHKPTSGGKVVRKKKRGSASTRVAAALRMAATSLEHSPTALGAYYRHTARRKGGSVAVFATARKLATLVYRLLRWGQPYIDEGAAAYEKRYQESRIKRLTATAKELGYQLMPKASQA

SEQ ID NO: 266454 - protein, 348 aa, unidentified
MRFYTQQHQYYCGIDLHARSMYVCVLDAAGTILVHKDLRTDPDSFLRVIAPYRQDVAVAAECIFTWYWLADLCAREGIAFVLGHALYMKAIHGGKAKNDKIDAHKIAVLLRGGMLPMAYVYPPAMRATRDLLRRRCHLVRKRAELLAHIQNTASQYNLPTFGKKIAYKANRAGVAERFADPAVHASIAMDLALIDHYDQLLTEVELTIVRTAKQHDANAFYRLRSVPGIGKILALVILYEIHDISRFPRVQDFASYCRLVKCAKESAGKRLGSSGKKIGNAHLKWAFSEAAVLFLRQNLAGQRYFAKLERKHGKGKALTVLAHKLARAVYHMLTRTQAFNLERFVSAH

SEQ ID NO: 266455 - protein, 406 aa, unidentified
MMEVVYERCCGLDIHKASVTACVVVGNQKEIRTFATMTDDLLQMTAFLKSRGVQMTAMESTGSFWKPIFNIMEMEGVPAILVNAAHIKTVPGRKTDVKDAEWIADCLKHGLLKSSFVKPRDQRELCELIRYRTSLIEERAREYNRMGKVLEGANIKLTSVASKMDTVSGMNMIRSLIDGVDDPEVLASMAKGRMRSKTHDLKRALNGLIAPHQKMILKAMLYHIEKLGILIAGLDSEIETRMNQDVELIEALDDITGVGKISAQTILAEIGTDMSRFPTAEHLASWACMCPGNNESAGKKKSGKTKKANSTLKKTLVQCGRSAANSKNTYLSALYHKIAARRGAKRAVVAVGHSILVTIYHMIKNRTRYRDLGADFFQNRNKEALVKQNIKRLQALGYNVVLEEIA

SEQ ID NO: 266456 - protein, 397 aa, unidentified
MISVGIDVSKGKSTVCFLAPYGKLLKKPFDVTHDKEGLSVLVTMLKELDGEIRLVMEATGVYHLPILLYLKEYDFFISVINPYEMKAYCTCGLRRAKTDKQDAIKIADFGINNWYRLKNYEVSDDVYSELKLLVRRYNHYMRMHVESILELTHLLDYTMPGIKKLLQGWNEATNKDKLSDFVETYWHYDNITKFSEEEFVEEYIEWAKEKGYQSSQSKAVKIYAVAKTSIPTVTSNTSSVKMLVQEAVRVLREINKTLKKILTQMQQLAKRLPEYSLVRKMGGVGDVLAVKLIAEIGDVKRFHNGKALIAYAGIDAPPYQSGQFTAKERKISKRGSASLRKIGYEVMRCLKSHAMPEDSAVYEFILKKELEGKSKRAAKIAGLNKFLRIYYARVMEL

SEQ ID NO: 266457 - protein, 426 aa, unidentified
MHRTTDRSRFHAVPRVLDACFDVGGSELHLYSVIDGLKHQRCIQNRTEEIEQLLTWLAARAKLEGYSNVRVVVEATGVYHELLLRMARMRGMETCFVSAEAASKNRVVLFGDTGKTDKRDPVAIADLAARDIVIRDRDLSDEYLALRSAGVLYARAEKNGIRAKNQVHRAMRRLFPDFDFSPSFLFGHSGRAVFQSTGFDPFRIARSGKKRLTRRLKKIVRRIRHQSIDRLLETAKASIESASPPNTHEVYVLDMKYAWQDFLAAEQRKFEAQVILEDLYDRLRELDPSLPAPQKGLASKLSLARFVGETGSFSDFSSWREVLKYIGLNLRERQSGRYRGKTKVSKKGRSLARHVLNQMVVPLVRRTRLMGPWYRHLIDVEKKPGPVAITAAARKLVKILWGWSKSDQEFDEARVFSCAGDYKAAA

SEQ ID NO: 266458 - protein, 457 aa, unidentified
MPARGKQPRSGAGSPAHTIDPNAAGVDIGATEIYIAVPTDRDPHPVRKFSTFTEDLLAAADWLKQCGIKTVAMESTGVYWIPLFQILEAGGMKVCLVNARHVKNVPGRKSGVCDCQWLQHLHSAGLLRASFRPEQQICAVRSLVRYRDSLVQLSAMHLQHMQKALDQMNLQLHHVISDLGGKTGMAIVEAIVAGERDPHQLATLRDPRTRASKETIAKSLVGDYRREHLFTLRQSLTGFRQNGQLIADCDVEIESLLKEFSSGDGPGAEAVPEPQAELKRKPRRNEMNFAPRTQLHRIFAVDLTEIPGIDTLTAHTLFSEVGRDLSKFANVAAFTSWMGLCPDNRVSGGKILHAQTRRVNNRVAKALRMAAQALSRSHGWMGQYYRRMRAKLGGPKAITATAHKLARIIYHLLTTGQAYDETVFAQQEAQNNQRNEKRLRRQARKLGFELTLIPTEV

SEQ ID NO: 266459 - protein, 342 aa, unidentified
MQITTIGLDIAKNVFQVHGIDANEKVVVRKQLRRSQVIAFFKALPPCLIGMEACATAHYWARELTKLGHEVRLMPAKDVKAYVKRNKNDAADAEAICEAVRRPRMRFVRAKSAEQQGRLMQHRTRDLLMRQRTQVINALRAHLAELGITAAQGREGLKELLKIIASDADERLPADAHASLIVLAAELQAMQTLIGSIEKRITAQHRGNEASKRLETIPGIGFIGATAIAATVTDPTVFRSGRDFAAWIGLVPRQDSTGGKQKLGPISKQGDRYLRRILVVGAIAVLRYAKQNPEKYPWLTQLLARRPFKVVAVALANKMARMAWALLAKGGTYRAPALVAAV

SEQ ID NO: 266460 - protein, 405 aa, unidentified
MAQTARTDVTTSLPTLHPPAPTLYVALELSKDTWKLGFTTSRTKKARIRDVKARDLPGFLAEVLAAKKRLELPDDAPVRSCYEAGRDGFWIHRFLEANRISNLVVDPASIEVNRRSRQAKTDRLDAQKLAQLLARHSEGEGVLRVVRVPPPKAEDERLLPRQLKTLKRKRTQVTNQIRAALFQHGVDLDPRKGDFKKREFLRELRSARQWDGSRLPAELLRVVRMHWDQYALLVRQIKQLEQRQRQALREARRGSPKATIAQRKAARLSQLRGVGDTGSYVLATEFFGWREFRNRQEVGALAGLTGTPHQSGGSAREQGISKAGNPRVRTLMVELAWLWLRWQPESRTTRWFHEHVGKAGSRGKRKAIVAVARKLLVEFWHFVEHGVVPEGAQLKADGAQARSAA

SEQ ID NO: 266461 - protein, 282 aa, unidentified
MNYSHFVGLDVGKKTFDASLMSAAEKELSHKSFDNTPEGIQSLLDWIAGYHLSLSKLLFCAENMGSYVTELSVSSVSMGFSLALVCSLTIKKSIGLQRGKNDRIDAKRIANYAVLHYRKLELYKLPDKDLVRLRGWIIIRDNLVKQKVSSIKLLETFSQMAKLADVTESISFLEEQLKSIKEKILEVEEDMEQLIAASTSLYTNYLLLRSIKGIGIINAIVLLCVTDNFQRFDNPRKFACYCGVAPFEHTSGISIRGKTQTSSLANKEVKVYLTWAAITAIS

SEQ ID NO: 266462 - protein, 342 aa, unidentified
MQVKTLGIDLGKTVFHVVGLDERGAIALQRRVSRTQLAVLVANLPRCVIGMEACPGSHYMARRLADSGHTIRLLPPQYVRPYVKTNKNDFRDAEAIAEAVDRGTMRFVPPKTTDQLDLQALHRVRQRLVGQRTALVNQMRAFLLEQGRPLRPGRIAMQGEIRRLLAAAPTELSPSLERLLAQLAEEWRQIEERIERITVEIAAIAKVDPACQRLMHVPGIGPICATALVAAVGNGAAFSKGRDLAAWLGLVPRQHTTGGKPRLLGVSKTGNTYLRRLLVLGAQSVMRSKVRERQRFGPWLQRLELRVHRNVAVVALANKLARIAWAVLATEMPYRPQLTEAA

SEQ ID NO: 266463 - protein, 430 aa, unidentified
MSYKIAGIDVHKKVLAVVVSDVEIESEFQFERRMFGSNPEQLRSLAAWLLAQEVEEVVMESTAQYWKPVWEALERYWKPIREKREGAGRRSGTLHLAQAQSNRGRRGRKRDFPDAERLVKRLVARELTLSFVPDAEQRLWRTVTRRKYQLRRDHVRLQNQVESLLEEAHIKLSSLVSDLLGASARRMLKALAEGETNPAALAALADWKLRATPEQLCDALGACTDLKPVYRRLLKMALEQLQFLEQQIDQLDQELASLLHPHQDAVQRLAEVPGLGVDSAQQIIAEVGPTAATFPSEKCLSSWVGACPGDDESAGVNYSHRSPKGNRHMRRVLNQTANAAARTKGSIFEIVYRRSVPRLGHNQAIGAIAHRQCRLIWLILHQGVRYEERGPAVTKQSKQRRTARMIRQLRSLGYRIEPPNPQHPSPAQGR

SEQ ID NO: 266464 - protein, 396 aa, unidentified
MLTVGIDVGGRSHAVARCREGRLKADREVVRVSQSRAGFAALDAWLARQAEPVGLVTMESSGHYWMPLASHLRRRDVPVAVVNPLAAKYFAKSRLARTKSDPADARSLAEMGMRDQPAVRDPLADVELRRAARFAMTLVTEQAKVCQRLIRLIELGFPELGGLFDDPTCRTAREILRVAPTARAATRRRTTTLADANAGPGHRRLGRAKAERLQAAAAESIAVPELDAEVAFEVGLLLDQYDLLERQIDAADRRVAALIDGETARRLRTIPGVGPSIAATLLAEIGDIGRFSDFDQLLAFAGVHPAERSSGRKGANPETAWHMSKAGDSHLRAAAYRMAVVGVQHNPVIAAHYARKRAAGKSKMNALGHCMRKALSLVWGVWRNGEDFDPRWGLEA

SEQ ID NO: 266465 - protein, 327 aa, unidentified
MLKNQKILTDKNQIRDFMRSLGSTASIVLEPVSQWYTYADMLEQLGHDVHLAHPMKVKAIASARIKTDKIDASVLADLLRSNLLPEAYFANKEVRKWKEIVRFRASLLNLRTQVKNKIHAILHKHALKHNFSNLFGKSGRIWLSNLSLGEPFASNLAQYLSLLDFLTKQIDEAEAQVEKQVSNHPHAKLLTTIPGVSFVSALTIMAEIGDINRFPSAKQLMGYAGLVPSTYSSGDIARHGRITKTGSKWLRYIMVEVAHHQVLCKKIPGFGSYYLGMKKRKGTGTAAVATARKLLAVVWRLLKDNRPYQETPPHRGKSGPLAQIISS

SEQ ID NO: 266466 - protein, 419 aa, unidentified
MKCFVGLDISSTKLEVCIMTNDIEMKVLFSATFGNDIIGASEIKEQVLRFNDIYHFERIVIGMEVTSLYSFHPAMFFYEDSELKQLRVEVMIEQPAKIKKYREAFEENKNDTLDAFYIADYFRIERFTKSYLKEEKYNALQHLTRTRLQLIEQLVRTKQHFIENIYYKCNTLSIELKNHQLNTNIWSATIMTLMVEDYTLDELASLPLEKFVELIQKLGRGKFKAPDKLAKVIQAAITGSYRLSHVQQDSVNTVLSLLAREIRSLEKMIKEIDRAIENMVEVLPEYQCLTSVPGIGKVFAAGIIAEIGQIDRFKDHPQVAKYAGLNWKENQSGNTSSQNTSLVKRGNRYLRYYLVEAADSVRRHNVEYAEFYKKKKDEVPKHKHKRAVVLTARKLVRLVDVLLRNHQPYTPPRRFMEDN

SEQ ID NO: 266467 - protein, 388 aa, unidentified
MMADPSATPIEATTRPDAGRLFAALELGKSRWLVTVDAPGSDKLSRHAVAGGDGAALLDLLARLRTTAERRTGRPVEVLVIQEAGLDGFWLHRLLERNGISSHVVDPASIAVNRRHRRAKTDTIDGEMLLRSLMAWARGERRVCSMVRPPSPEEEDRRRLTRERATLLKERTQHTNRIKGLLYGQGIIDYDPLRKDRLARLDALETGDGRPLPERLKAEIRRELERVELVASQIAAVERERDALIEAPSEAAGPGTPAAALARLKGIGGELGALLWLEALFRRFDNRRQIAAYAGLAPSPWQSGGTEREQGISKSGNRRLRHAMVELAWFWLRHQPDSALSAWFRERVGPGRGRVRRIAIVALARKLLVALWRYTTQGVVPQGAAFKA

SEQ ID NO: 266468 - protein, 476 aa, unidentified
MRHHGRGQERSTLAEEQFELFVGIDWASESHEICVLDAERRVIDRKTIEHSGAGMTQLCELLLKLSSQQPSRVAVAIETPRGAVVETLVERQFKVFAINPKQMDRFRDRHTVAGAKDDRKDAFVLADSLRTDLHLFHPIQLDEARVIRIRELSRTEEDIVQEQTRAGNQLRELLRRYYPQMLQLCPGMDEGWFLELIELAPTPEAAQKLTRSKVEQLLKEHRIRRLSAEEILTELKAPPLQLAPGAVEAASEHVLLQLPRIRLLQQQRNDVAGRIQSILDEMSEPGQNGEHRDVAIILSLPGVGRVVAATMLAEASQALAQRDYHALRSYAGAAPITRQSGKKKIVIMRQSCNPRMRNALYHWSRVSVQRDDQSREHYAQLRKVGHKHGRALRGVVDRLIPVLMAMLKSGTLYDPQRRANRRTPTIGSPTGTFRYNQNARAEDRATQGCDLSAVASADSRGGHRRLVPQDQSAQKR

SEQ ID NO: 266469 - protein, 347 aa, unidentified
MDHIGIDVHKKDSQICILAEGGELIEQRIRTELECFAAVLGARPRARIVIEASTDSEWVARCLEGLGHEVVVADPNFAPMYATRTRKVKTDRRDARALADANLLGAYRPAHRLSDPQRHVRGRLAVRDAIVRTRTRYISLIRALLRQQGYRVPSGSAEGFLSRVRALTLPGRLVSTIAPLLAVMRHLNAQLAYSDETIARVTAHDERIQRLRTVPSVGPVTAAAFVATLDDAQRFRHAHEVEAYLGLVPRELSSGETQHRGHITKAGPTRMRWLLVQVAVSILRRRPPQAEALHAWALHIAARRGKHIAAVALARRVAGILYALLRDGTTFDPRHCRPRAMATSLSA

SEQ ID NO: 266470 - protein, 340 aa, unidentified
MAIVAGFDVHRAQITFDALDQETGEVTSGRMAATPAAVRKWLKRFDGEDVHVAVEACTGWLFVCEALVAGGATPHLAEPTETSARRGKKRRAKTDRTDARWLRTLLLEERLPEAWIPPEHVRQWRTRTRLRKTLIDERTTWLQRIQATLFHHGISGVPDKLLSAKGHEFLAALDLPPDALERIEVALQMIEAVDRQLAPLERELRLIARRQPGCRALRRHYGIGELTAPTILCELGDVARLSSSRKVVRWSGLDIGIHRSDRRSRTGKLTKQGSPHLRWALYESAQAACRPTSPDRADYLELKERGLTHTRASLTIARKLARRCFHTLRELGPEALEPID

SEQ ID NO: 266471 - protein, 482 aa, unidentified
MKKRTIYQNQSQELLHLFEEAGSSAKVMCIPMDYAKKDHLAMFCNGHGDILRKPFSVKNSPDGIEYLVDQVTRSCRRRGIKKKHVFFGGEDVNSFAENFVSTLRCQGWLVAGVNAHDAKKQRANLQASTDRIDLMGIATMLLNYRANCCPAQSGVYRNLRTLVRHRRKLVVMLTEVKNRVHGIVDRLFPGFLNENKCGIVPFTQSSLYLMEDRFSPKQVRRRKREKLIEILKRFSTSRAEKTAFKLQQYAAQVLHTPVEYVDTLQLSLAQHVKHIRCLQESVAQLENEMAVNLAQTQGAFLTSVRGIGIVLAAGVTAEIGDPSEQKPLNNLVSYSGIIPRVKQTGGTDGKTYTGKVAKRCNRILKDYVVQSAHHMGLHGPENLMTDYKRRDASGQHADFGIGRRYLRMGMSLMRTSQIYLPPWLRKADATLEERAGYYLMIWPKLREKWLKFGVLEVAFAKDRPLGLWRQIVQELYDIKLKL

SEQ ID NO: 266472 - protein, 340 aa, unidentified
MNKFMKKKAFLGIDISKDELDFSLLTTTHPTLFKDKKVANSFTGFSHIEMWLSSLGLDLEDCLFCMEHTGTYGLLLFAWLSQMGADYVVEPALRIKKSIGMTRGKSDRIDARRIADYAYTNKAKLELYSMPSATLLKLKQLLTYRDQITRMVTGFKNSIKVHKQYEQISGSDIVSDSISQHIREFEAEKRQIEQQIKTLLTSEQTLKKNYKLATSVKGIGLIIAAYMIATTQNFTSFENGRKYACYSGVAPFEHSSGTSIQGKTKVSHLANKKMKALLSNGANSACTWDPEMANYYARKTAQGKEHKQIINAIRCKLINRVFAVVKRQTPYVTLYQQNFA

SEQ ID NO: 266473 - protein, 347 aa, unidentified
MRFYTQQHPFYCGVDLHAKTMHVCVVNQAGETLVHRNLPSRPDYFLNAIGLYRKGLVVGVECMFAWYWLADLCTREKLDFVLGHALYMKAIHGGKTKNDKIDSHKIALLLRGGMMPMAYAYPNAMRATRDLLRRRMQLMRARAEAMAHIQNTVSQYNLPPLAKKLGFAANRQGVAEQFLEESVRRSVQVDLSLIDHLDEQLQAVELYLMRHAKIDDPLTYQLLQTVPGIGKMLALVLLYEIHDIRRFADVGNFASYCRLVKCAHESAGKKSAGKGKKIGNANLKWAFSEAACLMLRELPQAESLVARKEKKFGKAKALSILAAKIGRGVYWMLKRKEAFDVNRFFNH

SEQ ID NO: 266474 - protein, 377 aa, unidentified
MGSKQRDERIEQLSVGVDLHKSQLTICVMREDGELVQQGMYRTTEDGYQAFVQKMHEWEQELGCSVAMAVETTGNARYFKNRMEAEGFCVVVVNTNKFKVISQSTKKNDSNDATTLAYYLGKGMLPESHLADQSSEELRRMIKCRSLLVGSTVKMKNQIHGMLLGYGITTKAAQLQSKKKRQALVKDLVDQGFTEAAASLEVMLGIIECVQEQIKVLEKRLHEMVGDNEDVDLLMSIPGVGFLTASTIAAYTKDLDRRFCGDFKRFASYVGIVPSVHNSNERVHMGRITKHGPQELRTAFVQATMGMIRLSKVTGDWRLMTDYRAMKTGKGSGKSIIATTRKLARIIFAMLHNREPFNPSLMVRDKCLFTVEEVIGA

SEQ ID NO: 266475 - protein, 343 aa, unidentified
MKLFVGLDVSLGKTAICMISEHGKIMKEAQVASEPEALLRWLCRQDGTIAAVGLEAGPLSQWLHRGLSEAGQPVVLMETRQVKGALKAMPIKTDRRDAEGIARLLHLGWFRPVYCKSVSAQEVRAVLSARKAVQQGFITLEMSLRGLLRNFGLKVGAISRGRFEQRIRELAAGNPMLEAATEPMLRARSALRQELAGLERHVRQLSQADPVCRRLMTMPGIGAVVALTYRSAIDDPARFTSSKKVGPWVGLTPSRNQSGERDISGGITKAGDVNLRRALCQAATVMMHRGRASWLRTWAAKLARRRGPKRAMVALARRIAVILHRMWKDDADFRLDIPVLHAD

SEQ ID NO: 266476 - protein, 421 aa, unidentified
MKNSAAMKLRQVPAGYLVVGIDPHKKKHAAVAITEDLMVRVRFKFTNSGAGFEQALENARAEMIKSSCRGIMFAIETGGHYWRNFAYCLEERGIPFRLISQFTLKRMRDGRDLNRRKNDFRDAEMAAGVFRTGDFTETKLPQGVYAELRSTYSAYFRLVKERSSLINLLKGLLDGLFPEFTQIFKDPCGRTALTVLSVYPSPASISNLNKGIFVAAIRTERQGRLMVKKLKTLHEAASISIGIKPGADGVAMEVTQLVSRYHLIEQQVDRLVKSLILLVDKTNEGKYLLSIPGINYLSAASLLAELGPFSSYKNGKQLVKMAGTNPIEAESGGKRLGKTPMSKKGRPRLRYSAWSAVIPLFRHNPDFRAWAKRLRERPAHANPLNGKEVVGAALNRLLRLVYALVKKQEFYRSPQIILAVN

SEQ ID NO: 266477 - protein, 420 aa, unidentified
MKAWPEITHYAGFDWARDHHHVVIVDRPGQIVADFQFDHTSEGWKSFSDKTAPFGNLAVVIETTQGAAVDQLLQRDYTVFPVNPAAAAGYRQRKMPSGTKTDQIDAWSLADALRIDGQGWKPLHVMDDVTCQLRLLCRDEVVLIEQRTLLVNQLQQALVEYYPAALAAFDDWTQSFCWEFIIQFPTPERLVKAGRYRWQKFLHTQRLWRPETAEKRLAIFAQADQFQGSAAIRKAKSQLAVSLCHCLRTLQGQLDIYRQQIEALFANHPDHDLVGGLPGAGRTLAPRLLAAIGADPARYGSSQVLQSFAGTAPISYKSGQISKVRLRRSCDKFLRTTVHLWANCFRKNCVWGQAYYAKKRKDGMSHACALRCLGQRLLKIIYRIITDKKPYDAELHARNQQKHGSWVLTLLDKPITQTSE

SEQ ID NO: 266478 - protein, 370 aa, unidentified
MEKQTTYVGMDVHARTIRVAVLGPGGAQREEWGLANEPRAVASLARRLLRGTPGSVVACYEAGPTGFALMRQLRAKGIDCRVIAPALIPRKPGDRVKTDRRDARNLAELLRAGLLTEVHAPTPEQEAVRDLSRAREDAVADRKRAQHRLAKLLLRRGLSYGRRNWTLEHRAWLRRLSFDHPAAQATFDGYLRTLEAAEERARTLEQELLACAEGDDYREAVGLLRCFHGVDTVTAMTLLAELGDVSRFGSARQLMSYLGLTPSEYSSGARQRRGEITKAGNNHVRRVLVESAWHYRHPPRVGVGLRRRREGQPGWAVSMAEGAQRRLHRRFRLLTEQGKRSPVATVAVARELVGYLWAVLRIGAEHRMAA

SEQ ID NO: 266479 - protein, 343 aa, unidentified
MQTITTIGLDIAKSVFQVHGVDVQGQVVIRRQLKRRYVLAFFQKLAPCLVGIEACASSHHWSRELKALGHTVRLMPPAYVKPYVKRQKNDAADAEAICEAVTRVNMRFVATKTPEQQSCLMLHRTRHLFIRQQTSVINVIRAHLAELGIVAPVGRKGVEELLDVVADPSDKRVPEVARACLAALGAQLRRLKEQILEFDRIILAWHRSSETSRRLDAIPGVGPMLATALVASIADPQAFRSGRNFSAWIGLVPKQHSSGGKDRLGSISKQGDRYLRSLFMAGALAVIRYAKINGTKHRPWLKALLARRPTKVAAIALANKIARMVWAMMARGERYKEPVALAA

SEQ ID NO: 266480 - protein, 316 aa, unidentified
MTKRYEPELIGIDTGKSELVVCRHDGQMQSLANRDTDLRRWLKSLSGPACIAIEATGTYHLRLLELAHAAGHHLYVVDGMRLSRYRESVGGRAKTDLADARLLQRYLQRERDQLRLWEPPAPGYLRLQRLLHRRARLVRMRTALNQSLAEVPDLRKTCRALLSQLDTVLRRFDRALHQLAVQTGLQPDLARLQAVEGLGPLSCVALANVFRRGHFRSSDAFIAFLGMDVRVRDSGRSRGRRKLTKQGDPELRRLLHNAAMAAARKGRWKLLYEAYQARGLSKTQALVILARKLARLAFSLLKFQSDYCPSRHCMQT

SEQ ID NO: 266481 - protein, 348 aa, unidentified
MIVIGVDTHKRSHTLVAVDAATGGVLGERTIVANDDGTLAALRVAAALGDERVWAIEDCRQVSGRLERALVAAGERVIRIPPALTANARRAARKPGKSDPIDALAIAHAALREGLERFPTAFLDEQAVEIRLLCDYRDQLVNERTRVANTLRWHLLAIEPELEASLRPAGLLGPRIRARVARRLARLGDGTQVRIAKALLRRVSELTRQELALRAELNTLIEAHSPQLLAEHGCGTITAAILIGHTAGAERFPTDATFARHAGTAPIPASSGNTTRHRLHRGGDRQLNRALHTIALSRARTDPLTRAYLDRRATQGKTKLEALRCLKRHLARHFWKLLYRTPQIPKLA

SEQ ID NO: 266482 - protein, 401 aa, unidentified
MPKLWAGIDAGKREHHCIVIDETGKKLLSERVENDESSLLGLIATVVDLGDGEPVIWATDLNTGGAALLISLLADNGQDLLYIPGRIIHHASATYRGDGKTDAKDAAIIADQARMRRDLQPVRHGDETSIDLQLLTSFRTDVMCDRVRTINRLRAVMLEYFPALERAFDYSKNKAALVMLSTYQTPDALRRIGRTRLQAWLKARGCRNSAGVASKALDAADAQRTTLASQTMGAVLVARLAAQLQTIDITLADLDRQIADLFQQHADADVILSMPGFGPLLGATFLAATGGTMDAFDSADRLATVAGLAPAPRDSGRISGNLHRPRRFNRRLLRTCYLAALSSLKNSPASRTFYDRKRREGKSHKQALLALARRRINVLWAMLRDHTPYQEPALIRTSITA

SEQ ID NO: 266483 - protein, 372 aa, unidentified
MTSIIYVGMDVHTTNYTLCCYSMEDDRFFAEVQVEPDAKNILKNLARIEKQQSRDCRIVCGYEAGCLGYSLYHQLHAHGIDCVILAPTTMMTKPGKRIKTDRRDARLISKCLAFHTYSPVYIPTEVDDAVKEYIRMRDDANSALARVKQQIIAFCIRHGKIHDGKSYWTNKHLEWLSSLDLGNKILSEVLQEYLIRYYQLREQVDVYDMRINELAQAEPYRQKVEKLGCFRGIAAHTALSFCVEVGDFRRFATAQQFASYLGLVPGECSSGDKQQYTGITKAGNSHLRKLLVETAQVFGRSATKSGKSVALKERQAKCDSLTVAYADKANARLKKKYFKIAMRSKVNIAKTAVAREMACFIWGMMTDNISCA

SEQ ID NO: 266484 - protein, 408 aa, unidentified
MKTLGLIGLDIAKDTFTAAFLVVDLDTPTLLDEHIQTFPYDRQGWQAFLATWQRFAAPDFWLLGLEASGPYSALLEDHLLSLHRTDMALHRLSPAQVRDFAQSRSRRRTKTDRLDARTLALFLLQQWTIHSLPQPLSPDAPTPLASLARLYDHLTQELTRIQNQVRQLLHYLFPELERRSPRFPKTLRTLLLAFSSAQALAQASLADLQQALSPAQARHLPLQELHLLAQTSFGRHDPYRAQSLRFLLHLWEHLEQQRQRLLRLLVQAVQQRFPRAWHLLTAIPGIGPTLAALFLALVGDIRRFPSPKALVAYAGLDIIQHQSGKFLGRPRLSKRGSPLLRHVLYLMAVALKRYTHRFAQAYAYYRQQGRAVRETLVILARKALIMLYHLLSRQIPFRDSPPPARAPL

SEQ ID NO: 266485 - protein, 412 aa, unidentified
MEVLHRRCAGLDVHQAQVAACVRVTPESGQPWAQAQRFDTTPSGIAALRDWLTRLDVTHVAMEGTGVYWLPIYTALEPGFDLTLCNAHHVKNVPGRKTDQSDAAWLAQLLASGLLRKSFVPPADVRQVRELTRARVHRVEDRARTVNGMHRLLERAGVKLCSVVSDLQTKSAIKIMEALVAGEADPRSLAELARGSLRGKRVELAAVLAVTLTGVERMMLGQLLDQLSLYDRQVDAIDKEVAELVRPWQAAVDRLKSAPGIDDIAAMAIVGELGPDVAAFDDPHRLAAWAGLAPGQRESAGKRKKAGTRSGNAYLRRILVQSAVAISRSKKNPSDLTEFFRKKMPVLGFKKAAVATAHKLLVRVWTMLHRGQDYLPPAPRPISERQRLRRAQRARDTLESLGYTVLIRPAAA

SEQ ID NO: 266486 - protein, 409 aa, unidentified
MKLFVGLDVSSQDAKICFLNGEGDCLQSFTITNDLPGALILKKKILETASKSNCKIIKIGLESTSIYSYHPAMFLHNDKELRTYGSQVFMINPKQISNFKKSYPEMDKTDTIDAFVIADYVRFGRHTMSIVKEEQYMALQQLTRSRYQLVHALTKEKQHFLQHLGLKCSQFTQDVESSVFGNAMMELFLERFSLEEMAQMPLQELVFFLQEKGKKRFGNPEDVAKSIQKAVKGSYRLSKVVEDSIDLLLSTSIQIMRTYQAQIKEIEKGIESLMSTLPQTLDSIPGVGPVFAAGIVAEIGQIDRFADETRIAKYAGLFWKKYQSGRFTAENTSLTKSGNPYLRYYLVEAANSVRRHVPEYRDYYTKKSAEVPKHKHKRALVLTARKFVRLVDALLRNNQIYAPGRGVDR

SEQ ID NO: 266487 - protein, 346 aa, unidentified
MGYFAGLDVSLEETAICIVDDAGLIVREARAASEPEALVAFFGASGMAMERVGLEACSLTAWLHQALTEAGIVAICIEARQAKAAMGAMPNKTDRNDARGIAQIMRTGWYRAVHVKTPSCRTWRALLTARRMVVNKRRDVENGVRALLREAGLKVGTPSRKNFAQRVGELVADDPVLAVLAKSLLSVIDVMTREVDRLTKRVLDEVRIEPTCRRLMTVQGVGPFTALAFRARIDRPDRFRRSRDVGAHLGLTPRRYQSGETDMQGRISRCGDELARTALYEAAHSMLIRSTKWSALRAWGMNVAKRRGMARARVAVARKLAVILHRIWADGSEFRWGKRAAASVTA

SEQ ID NO: 266488 - protein, 456 aa, unidentified
MAQRAKSIKNAKRRELVIVNPDAAGVDVSSTNHQVCVPEDRDENHNQSFGCFTEDLHKIARWLLQCKISTVAMEATGIYWVQLYMVLEEYGLEVILVNARHIKNIAGKKTDVVDAGWIQLLHSYGLLTASFQPENMIRQIRQLTRQRESLIKSSSREVLHMQKALEQMNIKLHKVISDLLGKSGMAILKAIIVQGIRTAPELAQYADHRIKASQQEIIKSLEGNWTEDQMFILNQSYELYNFYQQKIKECDEKIDQFMEVYVQHKASADTDYHPSGKRKKQKNDLRFDGERYLVRAFGVNIMRIPGICQLSGIKLLAELGGDFVQKFPSFKQFTSWANVVPNNKKSGGRLLSSYVPKKKNKVGSVLRTVSSALKQNRSPLGEYFRRVQARHGYAQAVVATANKIARILYTMVKEKNEYDPAKHARSSASLSKQIRSLEMRLQMLKMHQTEYQQTTG

SEQ ID NO: 266489 - protein, 324 aa, unidentified
MNPVTDKFIAAIDVAKESFQVCVMDAQEQCLENLNVTYDAQGIAQLQTLLGKYQVTAVILEATGGLERRLTAEIATAGIRVVRVNPRQARDFAKALGRLAKTDAIDAPTLGLMLLRLRPQAKPLPSAEQQELIDLTSRRQQLISMRTAELNREQQAVLKTVRQDIRDHIKTLDRKIAKLDKRLVELVDANSDWGHKAKIMDSVPGVGSITAHALVAQLPEIGTLNKRQIAALAGLAPFNHDSGSFCGSRSIWGGRASVRCTLYMAALSASRSNPKIKPFFDRLIAKGKRPKVALTACMRKLLVVLNTIVKNGTLWNQAKPALTT

SEQ ID NO: 266490 - protein, 389 aa, unidentified
MFKYFIGIDVSKSSFNFCVVDEKLKTVEKGVSKMNEEGFNSFLNIINRFPDSVIALESTGSYHLNILSFIICHKKEVCLVNPVLVKKFIQTISLRKTKTDEIDANIIAKFIFHHHRQVSFFIPDNMDEITSLARVREDISREVAKMKTKLKQDVNIVFPELAEHFNIFTKTILDLLESFPTAQSIKDAKIKEIENALNSNKKGKKSTCTAKVLKKLASESISIKSSIFNKIIEHDVKTLKFFINQLDDITKNLINEIKKSKSEEIKIVTSINGVSDITAAHFIAEIKDIKRFDNRNKLIAYAGTDPAVKESGTSLHSKGRITKKGSKSLRRTIYLMASGVMKYAPHFRQYYDKKRNQGMQHRKAMIALGNKLLRVIFGLLKKGEMYVAK

SEQ ID NO: 266491 - protein, 379 aa, unidentified
MQTKYYVGLDLHSNNTVIGVLDEQECRVLKGKFANRIGVIRAVLEPYREHIVGVVVESTFNWYWLVDGLIDNGYKVHLAHPAAFHPYSGLKHTDDQHDAFFLAKLLKLGILPEGHIMPQKERQLRDLLRKRMKLVRQSSAHILSFKSLVSRNLGVSVPSNEIKKFEEDEVDDLFDNEHLALSARVNIAAINHLKWLVYEIRSTLLKAIRIRPQFEKLLTVPGIGNILAMTIALETGDISRFNGVGPYASYCRCVPASRISNEKRKAPGNRKNGNKYLAWAFVEAAQKMRRFCPPAQAFFLKKSLKTNKIVATKALAHKLARACYYIMRDQVEFDPIRIFGKPIKVDKGCASEPKRGLALKPSAPIGTTGTASTNTILSK

SEQ ID NO: 266492 - protein, 375 aa, unidentified
MKEKLRFLGLDVHAETIAVAVAEPEGEVRSLGTIPNRAESIRKLIKKLGPAEKLRACYEAGPTGYVVYWQLAELGVECEVVAPTLVPVKAGDRVKTDRRDAEKLARCYRSGDLTAVWVPDEGSEALRDLVRAREGAKQDQMRARHRLSKFLLRSGQRPPSGVRSWTRPYLIWVAQLRFTQIAQESTWQDYLHEVEHMRERVGRLEQAITEAVKLASPELQQVINDLQALRGIADISAVTIAAELGQVSRFNSARQLMGYCGVVPSEDSSGKRTRRGGITKTGNAHLRRIVVEAAWSYRRPPCIWYGLRRRQESISEEAKEIAWKAQHRLHKRYMKLGAAGKDQRKIVTAVARELLGFIWAIGTRAETISRQQIAA

SEQ ID NO: 266493 - protein, 360 aa, unidentified
MFTERTSVGLDVHARSVAAAAIDGVTGELVQAKLTPSHEHIQAWLRGLPGPVAVAYEAGPTGFGLSRSLNGAGIRCAVVAPSKLQRPSGDRVKTDAKDAVHLARLLRIDEVTTVVVPTVEQEAARDLVRAREDARGDLMRARHRLSKLLLRQGIVYTAGKPWTGVHDVWLRSQRFELAGRQTAYEAAYETVALTTDRRDRLDTAIETMAADSAYTAVTHRLCCLRGISTLTGFGLAVEIGDWTRFTGSTIGAFVGLVPSEHSSGGSRSQGSITKTGNTHARRLLVEAAWHHAKPYRTPGKVMRDRWAQAPAAARVRGHEGNRRLNQRWQTFNARKKKPTIANVAVARELAGWAWSLAIME

SEQ ID NO: 266494 - protein, 360 aa, unidentified
MKIIGCDFHPSFQQIAMVDTEAGEHTERRLTPTEAVQFYSQLQGSVLVGMEACGNTLWFQRLLAQLGHDLWLGDAGKIRAQEVRKQKTDRRDAELLLRLLLENRFPRLWIPNLEQRDLRQLLLHRHKLVSMRAQVKNQLQHLAMNQGVQRKSKLWSQAGRKLLEELPLSGWTARRREELLLLLDDLDPKIRELDVAVEQAVERDEVAQRLQTHPGVGPITALAFSLTLGQIERFAHSRKVVSYLGLNPSEHSSGGRQRLGSISKQGNVMLRSLLVEAGQSAARLVPELKRAYQRLKHRKHCAVAKVMVARKLAVRLYWMWKTQQPYSATRMQGSPVGPMAERSGRWLEWAPCLPEESLGA

SEQ ID NO: 266495 - protein, 347 aa, unidentified
MLHAGLDLSRKKVDVCLLSEAGEHLDQLATPPDADALRTLARRIEETHREPVCAVIESMTGARLVHDTLEQEGWKVEIADAQKVKGLAPLACKTDKIDSQVLATLSQRDLVPAIWLPDPRVREERELARFRLHLVKHRSALKNRIHSTLINFGKPCPVTDLFGVEGRELLARLQVPEPWRGNVTASVELIDDLERQIAEINTRLREGHADHPYIPLLLTAPGIGWVLAFTIAAEIGEIERFASPEKLTGYTGLCPRVNQSGDKDRRGPLTKHGPTYLRWAMLEATMHALKHPAYSERYQRNKRRLGKQRGAKVAQVDIARRLTHAIWHMLSRQQKFAPRGAAFRLAA

SEQ ID NO: 266496 - protein, 336 aa, unidentified
MNKIKMVVGIDVSMEDFHACINVRSEDGVVKIKGTRTFQNTSVGFKELIQWVLGRKKDDCTLSFVMEATGVYYEDLADFLYTSKEQVSVVLANKIKNYAKSINVKTKTDKVDSKIIADFGMERKLDTWKPMSPVYKESRDFCRELLSIKKEMTRAKNQKHAMIKSHGKSEIILNFKNDQITFYENSIKNIIKELRRIVDMDPQLKEKLNKVQTIPGIGFETAVILASETNGFELFKSIRQLVSYAGLDIEFKESGKFKGKTRITKRGNSCIRQALFMPALAATNHNESIKALYERVCERNPNIKKKGVVAGMRKLLIFAYVIWKKDEEYDKSHVWC

SEQ ID NO: 266497 - protein, 418 aa, unidentified
MIDDMQWFVGIDWATQSHRVCLLDVEGRHVNERDFAHGGAGLTELRDWLLEKTKAAPGQIAVAIETPHGPVVEMLLDHAFGVFAINPKQLDRFRDRFTVAGAKDDSRDARVLGSSLRTDRQAFRRLAVDDPLMIELREWSRMADELQQERTRLANRVRQQLWRYYPQAIELTDDVADDWFLALWQQVPTPATAAKASEKTITRFLKDHRIRRLDAATVLQTLRQTPLFVAPGTTEAACAHIRNLAARLCLVNQQIKEAHRALDGLCTKLEAPTESSSGQNREQHDVAILRSWPGIGRIVLATLLTEATEPLRTRDYHALRALAGTAPVTRRSGKQCFVIRRLACNKRLQNAVHHWSRVAIQHDAAARRRYDALRRRGHGHARALRTVGDRLLYALCTTLKRRMPYDPNCQTAQVTAGQ

SEQ ID NO: 266498 - protein, 364 aa, unidentified
MHAPKTFMVGIDVSKAHLDVAIEGKAAVVRFDNDAAGCAALAAAVIGAELVVVEATGGYEMAIVRTLMAAGIAVAVVNPRQIRDFARASGRLAKTDQVDARVIRHFARAMRPAQIPHIDDGRIALAALVTRRRQLVDMAVAEKNRLEHAPQAVAVLIAETLAALKAQLARVDAAIALAIDAEPDMTARRDLLLTIPGIGEVGAAVLIAELPELGAIDDKKLAALVGVAPMAHDSGTWRGQRHIAGGRATVRCALYMATLSAIRCSPAIKAFYTRLRDAGKPPKVAIVAAMRKFIIMINTILKRSTPWNEPNNTVAEVPRRSLERRGGNPPVRQAAPCRPLGKGGRIAEPGRSFPGERLPALQSR

SEQ ID NO: 266499 - protein, 343 aa, unidentified
MEYYAGLDVSLKQTSICVVDRAGLVVREGVIDSDPEAISGYVRSKAPNAVRIGLETGPTSTWLWTELKRLGLPVICIDARHAKAVLKMQINKSDRNDAIGIARIMQTGWFKEVHVKDIDSQSIRALLASRALLVKMKRDLENHVRGLLKNLGLVIGRAKFNVFAVRAEELIEGRPELIAAIRPLLEARNAVEQQVSELDRKVMKLARRDAQVRRFMTAPGVGPITALAFKATIDDPARFARSRSVGAYVGLTSRRHASGEVDWTGRISKCGDAMLRSYLFEAAGVLLTRVPKWSAVKAWGVRLAKRSGLRKAKVAVARKLAVILHRMWIDGTEFSWSKKEIAA

SEQ ID NO: 266500 - protein, 355 aa, unidentified
MRRYIGMDVHAASCTLAVISEKGRKLRDFPVETNGQALVEAVRMIPGHKHLVFEEGLQSAWLYETLSPHVDEIVVAGITESRGPKSDKRDAYGLAEKLRVGNLDKSVFKAPREFTRLRELSRIHMTLVGDVVRVQSRIKSLYRARGIFVTGVNVYRVRHREEWQRQLCSSAQTRATRLYDHLDFLLEQKKQAEADLLREAKKHPIVRILETAPGFGPVRAARLVPIVVTPHRFRTKRQFWSYCGLGIVTRSSSDWVRTADGGWIKTRVPQTRGLSRQHNRFLKHIFKGAATTIVTQRNKDPIYERYQRLLDGGTKPTLAKLSLSRMIAATVLRMWKNEEEYDPARGGPSTTTREG

SEQ ID NO: 266501 - protein, 315 aa, unidentified
MYVGVDVAKGMLDIAVEPTGETWRTANAPEGIGELVAQLTARQPTLIVLEATGGFEAALAAQLAAAALPVAIVNPRQVRAFAKSLGRLAKTDRLDAQVLARFADAVRPEPRALPNEAAQRLSALCARRRQLVEMLTAEQNRLPRAESAVRSSIESHIRWLRQQLSDLDRDLGAAVRESPIWRQKDELLQSASGVGRVLSATLLAELPELGTLNRKQIAALVGVAPLNRDSGTFRGKRSTWGGRAQVRRPLYMAALVATRCNPTLRAFYGRLLATGKPKKVALTACMRTLLVILNAMVRDNRRWSSEMLVPADSCC

SEQ ID NO: 266502 - protein, 342 aa, unidentified
MTLYIGVDIHARQQTLSYLETEDGTTGQVVLDHEVDDVAGFYRQFQGEVIIGIEACGYTNWFEELVERLGHQLLVGDAAEIRRLARRRQKNDRRDADLLLDLLVHDEFPALYRYCQESREVLRQLRYRHKLVKLRTMVANTLHALALNAGLSLRAKLLTKGGRQQLSALPLSAISQQQRNELLSLADELTRRIQLVEQWLAVQAASDGRVQRLQTHPGVGLLTSLCVVHTLGEVQRFSSTRKVAAYVGFDPMEDSSAERKAYGGISKAGSRLLRYLLIEAGQTAAKDDEQLKQFYRRLLPRRGKARAKVAVGRKLLIRCFIMWRAEIDYAEFLRRGQKAETE

SEQ ID NO: 266503 - protein, 346 aa, unidentified
MIHYAGLDVSLKEVSICVVDADGKTVARGISPADPEGVAGWFRAKSLSPRLVVHESGQLSIWLQRSLERLGLPTVCIDARKAHKSLSARPNKSDAADAEGLAQLARTGWFTPVHVRSEDSDLLRCLISARAHLISLRKDLEGHIRGILKTFGVRLTGIGKGGQRQGFRDQLADAGERNAVLRSIADGFIAAHSTLCQAAADLDRAVKEKAKTHPVARRLMTVPGVGPVVALNFIALVDDPSRFRRAENVGAFLGLTPRRYQSGEMDWSGRISKCGDGTMRSLLFEAATTLIGRVQKFSALKSWAVRLAGRRGFAKAAVATARKVAVVMLTLWKTETEFKWKKEAKA

SEQ ID NO: 266504 - protein, 465 aa, unidentified
MKSKTYKPKKRKQKISIDQGWATINAHAAGIDIGAKEHFACVPPGSAPNNVRSFGTFTADLEALADWFQECGVSTVAMEATGVYWIPVFQILERRGLEVILVNARQTKHVAGRKTDVQDCQWIQRLHTYGLLQGSFRPADAYCVVRTYLRYRDELVSARSTQCQHMQKALQQMNLPLTQVLSDVTGVSGLAIIGAILQGERDPVKLSQLVDRRVRATPAAIQKALVGDYRPEHMFVLQQAFALYHTYEEKIQACDEQTVRAIAQLPDKVDLSRQPLPARKEGRKPRLDQMAGVDMRECLYRKTGLDLTAIEGIGVLTSLVVFTEVGPEVSQFPTEKHFCSWLGLCPDNRISGGKVLSSRTRRVVNRASDALRMAATTLERSPSALGGFYRRMKARLGAAEAVTATAHKLARIIYRLIKHGEAYVRQGLEAYEKQFQHRKLRALQKTAKTMGFELIPTQAVPSGVS

SEQ ID NO: 266505 - protein, 364 aa, unidentified
MFKLDRRRYRVGEPEPAYCREADLDKPDVCGIDVSAKELVVMVERCGRREGARNFSNTASGHQQLRDYLAAPGRPVRVCLEATGLYGLDVALWLERDARFQVMVANPRAVKNFAQALFQRSKNDRLDAGVLLEYAARMPFQAWQPPSRAALQLTAVTRRLQTLTEQATAEKNRGHALAATAASSTVVVADVKRSLRAIEKAQARLARAAEKIIADDEPLQRRYQLLRTVPGVGETSALQLLGELVLVPANADVRQWVAYAGLDPREYSSGSSLKKRTRISKVGNRHVRRALYMPALTAAHHSPVFRAYYQHLLAAGKCKMVALIAVMRKLLHAVFGMFKHNAAFDETKVYPGFPPPELAASFAS

SEQ ID NO: 266506 - protein, 443 aa, unidentified
MNTHDTHPNSSPTLRPDPAEAPAAAEPAFAAFVAIDWADKQHAVVLRVAGQNQNERRLLPQTPEALSEWIAQLRERFGGRPVAVILEQKRGALLYALQPHEHLVLYPVNPQMSASFRQAFYCSGAKDDPTDAELQLDILLHHRDRLQAWHPEEPITRQLTLLVEGRRRFVADQVRLGNRQTQALKTYFPQALELVGKDVTSPMACAFLQKWPTLEAVQKVKPATLRNFYYAHHCRSENLIQERLQLVAKAQPLTTDKAIIAAQSLLVQCNARELAGLNPLVALYEKQIAQLFAQHADFAIWDSFPGVGEALGPRLAAAWGTQRERFAQALDMSCYSGIAPVKEQSGKGLWIHMRWACPKFLRQTFHEMAKCSLNKSQWARCYYHKQARLGKGHHTIIRALAFKWQRIMWRCWFDHVPYDNDKYLQSLQRTGSHLHAALQLTPT

SEQ ID NO: 266507 - protein, 344 aa, unidentified
MNSSNSVQRMGIDLGKNSFHLCGVDEAEQIVLRKKVKRGRLLQVMANLPQCLVGMEACGGAHHWAREIGKLGHEVRMMAPQFVKPYVKSNKNDFNDAEGICEAVGRPRMRFVGIKSVEQQNLLSLHRIRQATVKARTAQVNQIRGLLAEYGIVVAKGVGHMRRCLPTILEDAENRLPDLFRELLAELYDQLRQLDARISGYDRRINALFTGQEACRRIEAVEGVGPLSATAVVATFGDGRQFHSARQFSAALGLVPRQHGTGDKVQLLGISKRGDRYIRTLLVHGARAVVNAVLRQDKGDARSRWIKRLATERGVNRAAVALANKNARIIWALLSRGHSYRVAA

SEQ ID NO: 266508 - protein, 323 aa, unidentified
MDLHILGVDIAKLKFNVCLIRDDGRLRHRVFANNSTGFSQLSEWLTKNQVIQVHACLEATGTYSEALATYLYDTHHQVSLVNPAATKAYAGAQLSRTKTDRVDAELIARFCLTQQPQLWTPAAPEMRELQALVRRLDALIEMHTMEANRLSSGVSTPEVRDSMESLISHLEEQIKRTEKLIRQHMGNHPQLKADRDLLLSIPGLGEATVARLMSEINFHQYENARQVAAFAGLVPRLRESGKSVRGRARLSKMGTPRIRRSLYFPAITALRCNPVIKEWAAGLRERGKCEMQIIGAVMRKLLHLAYGVLKSGKPYDPLHAQNA

SEQ ID NO: 266509 - protein, 348 aa, unidentified
MDHIIRIGMDTSKHVFQLHGVNAAEEPVLRRKLRRNDMVVFFERLAPTIIAIEAAGASHHWARLLRSFGHEVKLIAPQLVKPYVKRGKNDAADAEALCEAMSRPTMRFVPVKSAERQAALMLLGLRDRLVRNRTQLANAIRGYAAEFGLAAAKGIAHLAPLLARIQSDESLPGLARELFAAHAQEYAQLQAQIDEVEEKLMAWHKTNPGSRRLAQIPGIGPIGAAMLIMKTPAPEMFRSGRQFAAWIGLTPKDHSTAGKVRLGVITRAGDEGLRSALVVGATAVIRHLRNGKGRSMLSAWVEQLLKRKPPKLAAVALANKLARIAWKLMVTGETYAAKPRPVASAGIA

SEQ ID NO: 266510 - protein, 342 aa, unidentified
MTLYVGLDVSQKTTAICVVDDGGRRIWRGECRTHPDEIAALVRRHAGDDARIGIETGSMTPWLVHELRSRSLAVTCLDARHARAALKMQINKTDRNDAEGLAQIMRTGWYRAVHVKSFEAHRARALLAARLQLIETTTRLSNHIRGVLKTFGLLPGTVRGLRFDARVELLLEGRPELAMIVTPLLVAWRQLREQIAVFDKSILAIVRASPACRLLMSVPGIGVLSVLAYVSTIEDPSRFSSSRSVGAHLGLTPRQYQSGEVDRSGRTSRCGDSLARSLMYEAAVVILTRIKRELPLKSWALAIARTSGAGKARVALARKLSVILHAVWRSGEPFRVGTEVAA

SEQ ID NO: 266511 - protein, 383 aa, unidentified
MDKESSSQQKLYLGFDVSEKSIEVFGVCGTQSTEKAIRIENSRSSIQSLLTHFKDKEQVCIVMETGTHSTWMSRYIREIGFEVIVAHARDLALIYGASKKNDRIDAEKLARLAQADRKLLHPIEHMSEERQQDLMIIKCRALLIKQRTQLINTIRGMLRTFGIKDHSTSVRNVKNFELSNLPSQVITALSPLLQQIRFIEMQIRYYDREITKLCRKYQVTEILRQIRGVGPAISLTFVLLVGDISRFPDPKRLAAYFGVVPKQDQSGETDKQTNITKAGNSLMRVLLIQGTQYILGPFGTECDLRDYGKRIEARGGAIAKKKARVAVARKLIILMHRLWSNPEKEYIPCFKAQNREKHIKLRKVLEQQGRRQRIIYNPLTNLV

SEQ ID NO: 266512 - protein, 341 aa, unidentified
MKNTTTISIDLAKTVFQVALFNKYGVLKSNNKMSQAKMVQFIAQYPEAIICMEACGTAHYWGRRFQQNGHKVFLVPAHIAAKYRTGNKNDANDALAIYEAIKRPKTYFVQVKNLDQQDLASLLKLRQGYIKQRTQTVNRMRGLGLEYGVKIPQGIAKARKHLPYFLEDAENELTTSSRFILRDLLDQLLLLDIQVDNATNALVARAKEVPVCSRLTALPGVAWIIASALYARLGDGSAYKCGRDASASVGLVPAHSGTGGNNKLLGITKRGDRNLRSLLVHGARSIVSRIKDKQDGLSCWIREQLLKNHLNKTTVALANKLVRMAWAILKSGEDYRTPLAQ

SEQ ID NO: 266513 - protein, 330 aa, unidentified
MKHNHVGIDVSAKTFTIIIDHEGERTEAFDLPNDSKGFKKLIRMITKKGFTAQVVLEATGNYSLDLALALHRAKRIEVMVANPRAIALFAGAYLRRSKTDALDANVIVEFSIRMPFAAWKPPEAHCFNLRAISRRIEALTKSATQEKNRLHAATTFSEMSEVVQNDIEVNIRHLERRIERLREQARELIHEYPDLERAFLHLTSVKGIAQAAGIQILAELSILPKDMDVRQWVAHAGIDPMQFQSGTSIDKPSRISRRGNVHLRRALFLPALVAAQHEPHVAAFYQKLLGRGKTKMQANVAVMRKLLHAIYGMLKHDRDFEGEKFYVIGA

SEQ ID NO: 266514 - protein, 343 aa, unidentified
MAHYVGLDVSLKQTSICVVSDTGSIVREGVVGSDPEAIAAFVRSRAPDAVRVGLESGPTATWLWTELRRLGVPVICIDARHAKAVLKMQINKSDRNDAVGIARIMQTGWFKEVRVKDLDCHVVKALLTSRALLVKIKRDLENQVRGLLKNLGRVIGRAKFNGFAARAAELIEDRPELVAVVAPLLKAREAIEKQIDDLDRKVLKLAHHDAQIRRFMTVPGIGPITALCFKATIDDPARFKRSRSVGAYIGLTSRRHASGEIDWSGRISKCGDAMLRSYLFEAANVLLTRVPKWSALKAWGMRLAKRNGLRKAKVAVARKLAVILHRMWLDRTEFTWSNKEAAA

SEQ ID NO: 266515 - protein, 383 aa, unidentified
MKKTQETLRKHVSTKTAVLHVAFELSNSKWKLGFSDGNKMRFKSIDARNLEQLGEEIQKAKSRFRLDDDVRIVSCYEAGRDGFWLDRYLLSHGIENVVVDSSSIEVNRRKRRAKTDRIDARKLLRMLMRYHGGERKLWSVVRVPSVEAEDGRQLSRELESLNKERTRHRNRIRGLLIREGLEVKNPSGKTFLEELDSLCTWDGKGLPGDFKARIVREYERLRMVEEQMGTLRKEREKRVGSAETLSMRKVAQLRTLYGIGVTSSWDFVMEMFGWREFRNRREVGAFAGLTPTPYDSGGSQREQGISKAGRGRIRALNIQIAWGWLRFQPQSKLSQWYQERFAGGGSRMRRIGIVAVARKLLIDLWRYLEYGVVPEGARMRPVK

SEQ ID NO: 266516 - protein, 346 aa, unidentified
MLHAGLDLSRKRLDFCLLDESGEQVEVGAAPPDADGLRSLARRLARHDQPVRAAIESMNGARFVHDQLELAGWQVEIADALKVKGLAPLACKTDRIDAWVLAELSRRDLVPAIWLPDPSVRAERERARFRLHLVRHRSSLKQRVHAVLLAHGKPCPVSDLFGVAGRALLERLALPEPWAGTVAASLRLIDELDLQIATGEAELRRLGADHHYVPLLMTVPGIGWVLAYTIAAEIGDIDRFGSPRKLAGYSGLCPRVYQSGESDRRGPLAKQGPKYLRWALVEAAVHASTHPAYRERYQPTKTRLGKQRGAKVAQVDLARRLAEAIWHMLTRNQPFAPAGATDPLTA

SEQ ID NO: 266517 - protein, 327 aa, unidentified
MQAITAVGLDIAKSVFQVHAVDAAGSVIIRRQLKRRHVLTFFQKLPTCVVGIEACATSHHWSRELKAFGHTVRLMPPAYVKPYVKRQKNDAADAEAICEAVTRANVLFVETKTREQQSCLVLHRTRHLFIRQQTAVINAIRAHLAEFGIVARIGRNGVMDLLEIIADSSDSRLPEVARGCLAALSVQLRMLKAQILEFDRRIMAWHRSHEMSKRLDEIPGVGPALATALVASVADPKAFRSARNFSAWIGLVPKQHLSGGKDRLGSISKQGDRYLRGLFTAGHSRSSATPRSTAPSIDRGSGRYWLGGRPRLLQSRWPTRSPEWRGR

SEQ ID NO: 266518 - protein, 341 aa, unidentified
MQITTIGLDIAKNMFQVHGIDAAEKVVVRKQLRRGQVIKFFEAVPPCLVGMEACATAHYWARELTKLGHQVRLMPAKDVKAYVKRNKNDAADAEGICEAVGRPTMRFVGVKSAEQQGRLMQHRTRDLLMRQRTQAINALRAHMAELGIVAAQGREGLKELLAIIADERDERLPIDARASLIVLAAQLQALHTMIGSIEKRLIVQHRANEASKRLESIHGIGIIGASAIAATVTDPKAFWSGRDFAAWIGLVPREASTGGKQKLGPISKQGDRYLRRILVVGAHSVLRRAKQSPQKYPWLTQLLARRPFKVVAIALANKMARIAWALLASGGIYRAPRLAAA

SEQ ID NO: 266519 - protein, 407 aa, unidentified
MELPAIFPCVVGLDVHQAKISACAMIEQPDGTLTVEHREFGAFKRDRRALAEWVRTLGPDLVVMESTGIYWKSPYAALEQVGIAAWVVNARHVKNVPGRKTDVADAQWLATLARAGLLRASFVPPADIRHLRLIARQRQKLSGMLASEKNRLHKLLADAGIRLNVLVSDIHGQAGRAMVKALIEGQPLPEILDLAGRLRASREELFEALQPEQLSDAHRFVLSEIMAHIEELEARMGRFEQTLLAGLPAWEPQLVLLQTLPGVDRIGAAMLLVEIGTDMASFASAEKLASWVGICPGNNESAGKRKSGKIRKGNAWVRRLLCEFAQAASRSRCGLKEKFKALSIRKGHKKAIVALAHKMLRILFAMLKNHTPYQDQAVDYEALLVQRNAPRWIKMLAKHGFISPAST

SEQ ID NO: 266520 - protein, 410 aa, unidentified
MERQVERCCGLDVHKDTVAACVRIGGGPGQRTQQHVQTFRTTAGDLVVLRDWLAAHEVTHVAMESTGVYWKPVYYALESDFTCLLVNAAHIKQLPGRKTDVKDCAWIAQLLEHGLLRGSFVPPAPIRELRDLTRYRKAVIQDRTRVVNRLHKTLEDAGIKLASVASDVLGISGRAMLEALVQGTTDPALLAELARGRLRGKLPALRQALAGRFRGHHAFRIGQLLAHLDYLDEAIGILSGQVETVIAPFADALTRLDSIPGINQRTAEVIIAEIGVDMSAFPSAGHLASWAALCPGNHESAGKHKSGKMRKGNRWLRTALIEAAAGASRVKNSALQARFRRVLRHRGPKKAVVAVAHALLRAAYHVLADHAIYRELGADYYDRQHGQRVTRRAIQLLERQGYRVTLEPAA

SEQ ID NO: 266521 - protein, 341 aa, unidentified
MDEYIGLDVSMKETAVSIRRAGERIWRGKCASDPSIIAELIRKRAPSVKRVVFETGPLSVWFYHSLRTEGLPAICIDARHAKAALDMATNKTDANDADGLAQLAEVGFFREVRVKGFDSMLTRTLVAARTRLVRITTELSNQIRGVMKTFGLLVPAGKGSTFEKNVRSLLADRDRLASIVLPMLEAWRGIRVRAAELGRQLVRDARQSRACRILMTIPGIGAITATSFTTAIEEPDNFRKSRSVGAWIGLTTRRYQSGEVDYDGHISRRGDRPLRGLLYEAAAVILTRSSTHSTLRTWGLQLRERIGFKRAAVAVARKLAVIMHTMLKTGQLFNPNAGAAA

SEQ ID NO: 266522 - protein, 348 aa, unidentified
MNTNTTTHTIGLDLSDRKVAVCVLDDKGAIVEERSLPNEPGSYKLLARTYPKSDAILETGSHSPWVSRLLEAEGLRPIVANARKLRSIYQNDRKSDRNDARMLARIGRVDPSLLHPVKHRSEDAQRDLVRIKARDALVGARVDMMNSVRFLLKSLGVRVPGGVNAACFVRKTRAAVDPADAELVEPLLLSIDALTARIKEQEKLLRELAEQKHPVTRLLETVHGVGPITSLFFAVAIEDPSRFARARDVGPFLGLTPKADQSGESEKQLRITKAGNADLRRLLVNCAQHALGRFGRDSDLRESGLRICERGASIARRKAVVATARKLAVTMIAVWKSGKPYEPFRQAA

SEQ ID NO: 266523 - protein, 413 aa, unidentified
MDVIHPRCAGVDISKKDAKVCIRIQGVSGKRATSTVTTWGSMTNQILGLRQHLLAADVTMVVMEATGDYWRPFYYLLEADIPVMLVNAHEAKNVPGRKTDVSDAAWLADLGAHGLVRASFVPPKPIREIRSLTRARTVITRERSRELQRLEKLLEDAGIKLSSVATDISGVSGRLMLKALIDGCQDPSAMAEMAKGAMRSKIGVLTEALTGQFSPHHAFMTQLYLDRIDADNAQITSLDSRIDGLIEPYRPIMALLESIPGISKRVAEIFIAETGADMRQFPTAGHLASWAGTSPGSNESAGHIKSAKIRPGNRYLKGALGMAAISAARTKDTYYSAKYRRITNRRGPMKAIVALEHSMLIAAWHMLTNGAFYREPGADYFSQRQPAQTKARALAQLKALGYQVTIEPNEATA

SEQ ID NO: 266524 - protein, 343 aa, unidentified
MGEVTIIGIDLAKNVFQVHGAAADGSVVFRKKLTRPQFARFMAEQPPCLVVMEACASAHHWAREMSRHGHKVRLIAPHYVKPFIKRQKNDAADAEAIVEAALRPTMRFVEPKTQEQQARAVAFRTREQLVKQRTEAVNALRSHLYEFGHVAPVGIGYLPRLERVIADPDADIPDLAREICQMLLDQINQLTGRIDALKARIAALSNEAEMPRQLQTMPGVGPITALAVETFAPPMEQFKRGRDFAAWLGLVPRQASTGGKQRLGKTSKMGQRDIRRLLVTGAMAVIRWALRRGAPYNSWLARLLERKPPMVAAFALANKMARGIWAMLTRGEGYRDPVIASAA

SEQ ID NO: 266525 - protein, 338 aa, unidentified
METTVLGIDLAKNVFQLHGVDVKGRVVLKRRLRRAELGTFVARLPPCVIGLEACASAFYWTRQFQQAGHAVRIISPQFVKPFIRGNKNHGNDAAAICEAVQRPTMRFVPLKSVEQQDVQSLHRARQRLVNHRTALISQMRGILLDRGIVFGKSASRARRMLPAIVADPAADISELIRDTLNSLLALLHELDTRVKAFDRQIAKVFQQSTVCQRIACIEGVGPKTATAIVAAIGDGRDFQNGRHLAAWLGLVPRHRASGDRRTLGRISKRGDQHLRTLLVHGGRAVVRTAVRKTDAKSRWVNALVERRGVTRAIVAVANKNARTIWALLARGESYRHAA

SEQ ID NO: 266526 - protein, 331 aa, unidentified
MNYSHFVGLDVGKKTFDASLMSADEKELSHKSFDNTPTGIQSLLDWIAGYHLSLSKLLFCAENMGSYVTELSVSSVSMGFSLALVCPLTIKKSIGLQRGKNDRIDAKRIANYAVLHYRKLELYKLPDKDLMRLRGWIIIRDNLVKQKVSSIKLLETFSWMAKLADVTESISFLEEQLKSIKERILEVEEDMEQLIAASISLYTNYLLLRSIKGIGIINAIVLLCVTDNFQRFDNPRKFACYCGAAPFEHTSGISIRGKTQTSSLANKEVKVYLTRAAITAISWDPQMKAYYKRKIAEGKHKASVINAVRAKIIARSFAVIRRQTPFVTLAV

SEQ ID NO: 266527 - protein, 312 aa, unidentified
MNKTICGVDVSKEWLDAHIEPSGAAGRFRNDAAGIAELAAWCQGHGVELAVMEASGGGERLAFLLLWELSLPCALVNARNVRRFAEAMGFLEKTDRIDAAMIVGYAQAKRVQATPPPSAAEQRLKALVARLGQVTGDLTIQKQRKSAAANAEIIASLDEVMALLVRQSRRLEGEIASLIDDDPLWACLDRAFRSLKGVASRSVARLMAELPEIGILSNKAIAKLAGLAPIANDSGKRSGRRPVRGGRAGPRSLLFLIARIVAKYDPHLAAFHQRLQAAGKEKMVIRIALARKLLVILNAKARDARSEFANAT

SEQ ID NO: 266528 - protein, 353 aa, unidentified
MELDKYIGIDVHSSTLVVNARDAFGKVVLQSVVPTRADAILQCIGGLSGRLHVTFEEGTQAQWLYEVLRRRVDDVVVSDPRENRLIQDGSKGDGIDAGKLSHLLRMGAVKSVYHGRHGTATLKELVRSYDGLVEDSVRAMNRLKAIYRSRAIVTERKSVYQPKERERFLAQLTEPGAGKRAGSLYEQLDTLLKLRGQSERAMVTEARRQGAYRLLRSIPQLGPVRIAQLIAIVDTPHRFRNKAAFWNYCGFAVVTHTSAEQKFIDGKLVRSQKPVATRGLNKDHNPKMKQIFKSAAIKARARGPFAEYYASLVDGGMKPELATITLARKMSAITLSIWKKGEAFDAKKLKKTT

SEQ ID NO: 266529 - protein, 329 aa, unidentified
MQNKVIIGTDVSKLSLDNAIQTAQVHSRVANTPKGFKQWLTWVLSFGKKEALHVVMEHTGYYSYQFELFLQSHRIAYTKVNALEIKRSSGLVRGKNDKTDAMMISLYGWLRREQLKEEKIPAAVITELKDFISLRDKLVRDRSGYKARLKEQNATRKYAKSHLQNKIQNKKIKELSEDIKQVEKAMKQLIKQHAELQNNYDLLVSIKGIGFVIAAYMLAYTNNFTKFDDSSKFNCYAGLVPFEHTSGTSIRGKSRVSHFANKKAKRLLNLAASVAIQHNQELRGYYQRRVTEGKSKIGTLNIIRKKLVDRMFAIIKRQTPYQPNLNIAA

SEQ ID NO: 266530 - protein, 339 aa, unidentified
MGLYTGFDLHSTNTYVGIIDEDGGRLWKKKLRNDPNLISETLRPFKKDIKGIVVESTYNWYWLVDLMMEEGYQVHLANPSRVQQYSGLKHGDDEDDAFWLAEMLRLKILPEGFIYPREQRPLRDLLRKRGHLVRLRTSLITSLQNILARNIGAKMNANHIKALRKDQVTPLLTGSDDLSLAGRVSKDAIDSLTRQITAIEVALEKKMNLKRPYDLLLSMPGVGRVLALTIMMETGPIERFADAGNYVSYCRKVPAARFSNDKKKGTNNRKNGNKYLSWAFAEAGELARRFDPEARAYYDRKRRRTNAPIAHSALSHKMARAAFYIMRDGVPFMPEKAFA

SEQ ID NO: 266531 - protein, 391 aa, unidentified
MAMYFVGIDISKYKHDCCIINAADQNIVAKFSFSNDAEGFSFLLSSLQSLSIPEDIRIGFESTAHYALNLELFLEKAHHSFMEVNPVLISEYKKSTTLRRTKTDSVDCESIARWLMTVEYKPHPIGFYHNYSLKSLTRLRDRLIRQRSFYLVKLTNVLDHTFPEFKPFFQERFSKTALYLLENYGSAEKMSHMNSASYDNLKRISRGKFTPQKFMELRHLAANTVGVNNSIFDTELKCLLTLYNEAVKQISTLEEQIINLIEDVNPHYMSIPGIGPISAAVIYAEYGDLSNFSSASQMLAFAGLEPGINDSGTESHKGRMVKRGSSQLRYVLMNCALPLIRFDMTFASYYAKKRSEGKPHRVAMSHVTKKLIRVIFALERQNTDYNKQSIR

SEQ ID NO: 266532 - protein, 394 aa, unidentified
MFKIWYYLFYNRKVEERDRPTVPWVSKPVKEHGSSRSYLYATRTVAWDKDPVFLQGRVSREKKKKEEKKGGKGMSKLEVFVGIDVSMAKLDIAVRPTSEVWQVSNDKTGIELLVGKLKALNPSLIVVEATGGIEIPVVGELGKEGLPVVAVNPRQVRDFAKATGRLAKTDVIDAGIIAHFGEAVRPELRPLKDEQTLKLDGLISRRRQIVEMIVMEKNRFTSAPVHIRKGISEHIKWLEKRLSGIDKELGDLIKSSPMWLEKVELLQSVPGVGPVLCATLLAELPELGRLDHKRIAALVGVAPLNRDSGTMHGIRAIWGGRAGVRYVLYLSTISAIRYNPVIKGFYKRLRSAGKKPKVAIVACMRKLIIILNAMVKNGTAWDMSFGKLENGVAQ

SEQ ID NO: 266533 - protein, 347 aa, unidentified
MKVLIGVDPHKASVAIAAVDEALGELVERAAFPQNRDGLRALERWAKQFPERRWAVENAGGLGRHLAMRLAAGESVVDVPPKLSARVRVLSSFAGNARKNDGLDALATALAASRNERLAAVDPEAVSEALRLLSERREDLVAERTRALNRLHALLRDLVPGGVARTLSADRAARILRGIRPKGASARLRRRLASEILRDVRTLDRKIADLERRIEAEVEASGTTLTEIFGVGPILAARIIGTVGNVARFPTKAHFASYAGTAPLEASSGKVVRHRLSLAGNRKLNYALHMVAVCQARSDARGGAYYRKKIGEGKSRKEALRCLKRRVSDAVFKSLLADSKTSSHSAA

SEQ ID NO: 266534 - protein, 339 aa, unidentified
MYYTGIDQHKLTSYLTTVDNKGVIIKQANLKNNDFDILNYFHQLEDQSIATVETTGGWYWLSDLLKENNIKLKLAHAKYVKAIAYAKVKTDKVDSHILAQLLRMDFIPEANKIDEDLRPLRDTLRARLRLTQKRTSALNFMNRMLEKFNVQNPSELSEQYQLQYGQFSDQAEFLKEQILTLEKSIHPELLPNEDIQRILWIPGIGKMNAFTSFLEIYDINRFETVKNFLSYCRLAPQASNSGGKTKQSKTPKDGNKYLKIVFSDAAIHAIQYYPVIKKYHNSLLRKKNKQIAKYIISKEIASIVYHVLKTKKSFNNKFKNIDLERIKSFQWPRITSPVV

SEQ ID NO: 266535 - protein, 330 aa, unidentified
MKTASLSNHSYSYGIGIDVGKEEMVASCRSSLNGLRGFNQISFPNNSIGFNRFIDHINKAKLPTDTPILLESTGPYHWQIANFLTKQGFDAKVVNPLHTRQAIRYSIRKRKTDKVDADHLAMLAYQNYGYAFRDTKELATLKALIRHHWYLKTSKTNNLRHENYLKDYRQIKKYGVSNIIDKQLKILEKKIVESFQKGNDLHYVDSIPGVTPIIAATILVELYPLDRFRRVEQIIALAGLDPQVKQSGGKVARYGKLSKRGSITLRRVLFQAAFGAFSRQPFAQLYRKYKNRGLHHTAILNIIARKILKISWYLLRKREIFKVQYMKSDT

SEQ ID NO: 266536 - protein, 430 aa, unidentified
MARVPNLHYLQLLHSLQGGINIQPILESCCGLDVHKSMIKACIAKGPLDKPPKFEIRTFSTMTSDLIKLKEWLMKNEVEAVAMESTGVYWKPIFNILEDCFDIVLANPQYLKKVPGKKSDVKDCQWIATLLRNGLIPNSFIPPREIRELRDLNRTRRKHIEIMTSEKNRLQKVLEDANIKLGSVVSKIDGKSSMKMIHAILERDVLSKEDISEMACGKLKSKVPQLVEALNGRVTEHHRFLLRFHLENIAFQLDQIRELDEEIQKRMIPFQKEYRLIQTLPGISKTSAAAIIAEIGTDMSQFPDEAHLSSWAGMCPGNNESAGIKKSGKVRKGNGFLKGILTEVAWAASRTKGSAYSAIYNGIAKRRGKKRALIALGHRILCDIHNVLTIGEAYVDEGAEAVFQRNSKAREGAMIRALERSGYTITKFLA

SEQ ID NO: 266537 - protein, 427 aa, unidentified
MNKHRLEIFRTMQSSVRGSDKHLLVGIDVAKNSHHAFFGTANGKTLRKNLVFDNSIKGFEGLRQCVVDMQAQYGLVEIVYGVEPTASYHKPLAEYLIRQNEQVVYVSNVAVKRNREMLDGRWDKNDKKDAANVADLVGQGRCLYYDVPEESLRELRSLVAFRIRLKKQEHAFRMRLRNNVFAQYFPELDRLYIKAGQPDDMILSIAEHCLDPREIAQLEFNDFLKLIVRRKIRIEQEKRLREIWEAAGNSAGCQVHDAARWEAKSLVSQLKAIREVVKDNERRMVTAAQQFPEYQCLLSIPGFGPVVSPMVLAAIGDPSRFENQRQVLRLAGLDLCASRSGKNSDSATPVISKQGKAALRYALVQAAIVASALNPVIRSYFSGLIKGRELERGIKLKMKVKLAAKLLVIAWTLMKRREKFKPSCFPG

SEQ ID NO: 266538 - protein, 355 aa, unidentified
MSLEKYIGMDVHAATISAAVKNAEGKLLMECVLETKAATILEFIQGLRGTLALTFEEGTLATWLHDLLKPHVSRLVVCDPRKNALMRDGNQNDRVDARNLAELLRTNQVHPVYHGKHGTRALKELGRSYLTLTKDSTRVMNRIKSVYRSWAIPCAGTSVYSRRHRAEWLAKLVEPGVRIRAEHLYEQRDCLQPVRQAARHELLRESRKHAAVKLLCQIPAIGPIRSALLVALLQTPHRFRTKRQLWAYSGFAVQTYDSGEYRFVRGKLQRNRERITVRGLNHNHNHDLKNLLKGVAISAIERRGPLQDFYAALVDKGMRPSMARLTLARKIAAITLTMWKKGVSFDPKQLQRQAA

SEQ ID NO: 266539 - protein, 425 aa, unidentified
MSRSDTHDKDLVAMIGIDWADKKHDVAILDIATGQRDQLQIEQKPEALIAWVRTLQERYGDGPIGVCLEQSRGPLIYSLMQHGLFRLYPINPKAFKNFRKALRPSGAKSDKSDAKLLLEYLQKHREYLKAWIPDDVQTRLLGLLVEDRLATVRDRTRLANRLTAVLKGYFPQALDWAGEMIFTPLACRFLTRWPRLDSVQRADEKTIRAFYYAHKSRRADLIEQRIQQIKAAIPLSTDEAILEASIRRVQAIVPQIQQLNKVIAEYDKRIYDLFVQRQDAPLFRDLPGAGKQLAPRLLVAFGTQKDRFESAMELQSYSGIAPVTEQTGQPAPWIHWRLACPEFLRQTFHEFSAASRRRSLWANVYYEQQRAAGKNHHAAIRQLAYKWIRILYRCWIDNVPYDEQRYLKALERRGSPLVKLIQAAV

SEQ ID NO: 266540 - protein, 403 aa, unidentified
MDVHKSFVVACIAATNEQGVTTYKSKRFSTFTGDLRRCAAWLAENNCKDVCMESTGKYWIPIYNILEHTCNIVLAHPKYVKAIRGKKTDKRDAKWIADIFKHDLVAGSFIPPPDIRQLRDLVRYRWKLTNFTTGEKNRAQNCLTVSNFKLDDVFSDVFGKAASAITARILEDPTEKITDISGFRTKGMKATDEQVLAAVDGEMCAEQAEKLRIIRSHMDSLELCKLNLESLILSTAEKYLPQFNLVMSAPGIQSFAAIGIISEIGVDMSVFPTSKHLCSWAGLTPQNNESAGKKKTTRISRAGAYIKPLLVQCALCAIRAKQFPEVRNRYLALKKRRGHKKAIIAIARMLLTAIYNMLKKNEPYNPELYRQADRPPTHREVSVEEAIFILQRQGYLVTAPSVT

SEQ ID NO: 266541 - protein, 414 aa, unidentified
MLKIVYRICCGMDVHKSFVVACIASTNENGVTTYKSKRFSTFTGDLRRCAAWLAENNCKDVCMESTGKYWIPIYNILEPTCNIVLAHPKYVKAIRGKKTDKRDAKWIADIFKHDLVAGSFIPPADIRQLRDLFRYRWKLTSFTTGEKNRAQNCLTVSNFKLDDVFSDVFGKAASAITAHILENPTEKITDVSGFRTKGMKATNEQVLAAVDGEMCEEQAEKLRIIRSHMDSLELCKLNLESLILATAEKYLPQLDLVMTVPGIQSFAAIGIISEIGVDMSVFPTSKHLCSWAGLTPQNNESAGKKKTTRISRAGAYIKPLLVQCALNAIRAKKFPEVRNRYLALKKRRGHKKAIIAIARMLLSAIYNILKKNEPYNPELYRQTDRPPAHRQVSVEEAIFILQRQGYLVAAPSTS

SEQ ID NO: 266542 - protein, 420 aa, unidentified
MNNSTAFKLAQLPTNSLRVGVDPHKHRHAVVLRTAQAHTLTKFTMVQDRTAFEELLRRCEQFRQRGAADSVVFAIEPGGHYWRNLGYFLVDHGATFRLINPFTLKRQRDGDDLTHRKTDYRDAEMAADLLGQGRYTWTALPQGNYAELRQAHATYEQLREEITRTKLQLTTALDGLFPEFRRVFKQLDGRTALTILRTGAQPAQLATLGVDDWLARLRREHGPHPLMQAKARALHALAARSLGVPAGAEALTCQVQLLAERLTFLLTQGQQAEAELIRWFGGFAESRFLLSLRGLGVIHAAGLLAHIGEIRQYSGVKQLSKLAGITPTEDTSADHHAARTPMSKKGRRGLRAVLWRAVIGLLRHNETFAQYVHRLTSRPAHAHPLKKREAIGAAMNKLLRIVYALLKKQTLFDPATAQGR

SEQ ID NO: 266543 - protein, 340 aa, unidentified
MGPVVTIGLDIAKSVFQVHGVDAEGGVVIRQKLTRARLLNFFGKLDPCLVGIEACGTSHHWARELIGLGHDVRLMPPSYVKPYVKRQKNDMADAEAICEAVTRPTMRFVPVKSPEQQGVMVLHRTRLILTRQRTQLSNAIRGHMAEFGLAAPIGRQGLQTLVAVINDSSDERVPVDARGCLTMLAAQMRLVNEQILETDRLIRTNARSTEVGRRLMEIPGVGPLLASALVGTIADPKAFKTGRNLAAWIGLVPRQNSSGGKERLGGITKQGDRYLRQMLVVGALAVIRYAVRNGTRRPWLVQLLARRTPKVAAVALANKTARMVWAIMTSGERYREPLAA

SEQ ID NO: 266544 - protein, 355 aa, unidentified
MNQEKYIGMDVHQATISVAVMDSSGKLIMECILETKGATILEFIAGLRGTLSVTFEEGTSAAWLHDLLKPHVSHLVVCDPRRNALLKDGSKSDRIDARKLAELLHGNKLHAVYHGEHGVRTLKELGRSYLTITKDLTRVMSRIKALYRSWAIPCSGATVYAPRHRAEWLAKILEPGVRLRAERLYQQLDLLQPVRQEARRDLLVESPKHHAVKLLRQIPPIGPIRAALLVALLQTPHRFRTKRQLWAYSGFAVETHDSGEYRFVRGKLVRNRERITVRGLNHNHNHDLKNLFKGAAISASTRPGPLCDFYVALVEKGMRPTMARLTLARKIAAITLTIWKKGVEFDAKQLNRQAA

SEQ ID NO: 266545 - protein, 355 aa, unidentified
MTMLADEYEFVIGGDPDRDTVDLAIVDTATGGVRAHLVSSADGMGYAHMLGWVRHHAPGRRVWALEGTGSFASGLADALARAGEDVVEVGGLKRIRGPKNDRLDAVRAARTALGREHQASPRARGLREAIRALTATREAVLVSRTKAINELKSLIVVAPEHLRATMRGLSLTKQLARIEAVGTVESATIEHRITVLTLQSITTRIRFLTRQLAELDPELFRLLRQHPAGPALLAQPGVGPVVAAQLLLSWSHPGRVRNEAAFASLAGVAPLEASSGQRTRHRLNRGGDRALNRALHTVAITRMRCHPETRAYEIKRTAEGKTHRDIRRCLKRTLARKLYRVMEAATRTNTLPATA

SEQ ID NO: 266546 - protein, 361 aa, unidentified
MAKVRSWAGLDVHARSVLAVTLDADSGELRSARLPGESVKVVEFLAKLPGPTRVAYEAGPTGYGLARALVAAGMGCVVAAPGKIERPAQDKIKTDQRDAERVLRLLMIDALHAVRVPSVEEEALRDLVRAREDLRGDLMRARQRLSKLLLRHGIVYEDTSSTWTQRHRAWLRAQDLGGGAQATLLDYLGGIDTLECRRGQLEATIAELVPSSPYAQTVARLRCLRGIDTLSAVGLAAEIGDFGRFDRPGKLMSYVGLVPSESSSGETRRQGKITKTGSKHARRLLVEASWHYRKTPARGVTLQRRQDGQPAQVIAISWQAQRRLHNVWQRLAEQRGKRRTIVAVAVARELAGFCWALDRAD

SEQ ID NO: 266547 - protein, 402 aa, unidentified
MIFINCLGIDIGKSESVVAHYKDEVLVKEMVIQNNQNGYRYLKNYIKHLDSLFILFESTGIYSRGMKRFCEIHKIDYLEMNPLEAKFKTSSLRSWKTDKSDAHKLALLAFRMKDSKVQRHPEEIYFELRERARFHLEMEINQNRLKVELVETLHQTFPGLEKLFTNRYSKIALNIAQAFPHPDFVSTLTHDELVEKVLHSTDKGISVNKAHKYVQKLIEIQINSFPNVDKSSFLLQKVQYLCDKLLIGIEEMKEFDQEMIDLAKNTTEFENIISIPGIGELTAALLIGELGNIREFKTNKQLNAFVGIDIKRYQSGTSKSRDTINKRGNKKARRLLYLIIMNIIRGRNHYQSHIVDYYYKLREQPHGKTHKTAVIASINRLLKTIHYLIVNNKLYDYQRAPH

SEQ ID NO: 266548 - protein, 310 aa, unidentified
MDATVIGIDVSKDRLDVAIRPSGEAFSVDRNAAGLEVLAGRLAALSPLVVALEATGGFETVAAAALAAAGLPVVVVNPAQIRAFAKAIGKRAKTDLIDAAVIAHFAEATRPEPRPLPDEATRLLSDLVARRRQIVEMMAAEGQRERRLTDKRLKKSIARLRKALEKELAELDSEIDDSMRGTPAWREKEDLLTSVPGIGPVIARTLIAELPELGSLSGKQIAALAGLAPYTRQSGQWKGKSFIGGGRVVVRTALFMGALVAKQHNPVLKVFFERLIATGKPKMVALIAVSRKLLVILNAILRDRRPWQTA

SEQ ID NO: 266549 - protein, 358 aa, unidentified
MNVIHYIGLDVHKKTISYCIKTAAGQIVKEGTLAAERSVLRNWAQSLEQPWHGAMEATIFSAWVYDTIKPYAARLEMGHPGKMKAITAGKKKSDIIDARTIADLVRCDLLPGCYVFPPDLRDLRRLMRYRQMMVQQSVRMHNKTAGLLMESGVSFLKTKLQGKKYFADLIKSLEEVPESVKDLLRLSRASKELFERVQNQLVRRLLADAALKQRVERLSSIDGVGVVTALTWALEVGDPHRFASIADAVSYCGLTAALHSSAGKQQRGPLSKQRNAYLQTTLIEAAKLAPRWNPQLAQLHTQQLERGHANRATLQVARKLVAYLLAVDKSGQPFQVRTPPKKTLSKRKKASRSLVPAA

SEQ ID NO: 266550 - protein, 458 aa, unidentified
MGRNKSKNKDHRAMSVVHPNAAAIDVGATMHMAAVNADRTPEPVRSFGTFTTDLHRLVDWFAECGVDTVVMESTSVYWIPIFELLDARGFAVFLVNARDAKHVPGRKTDVSDAQWLQRLHSFGLLRASFRPKGQIAELRAYLRQRERLLEYGASHIQHMQKALTEMNVQLHHVVTDITGSTGLRIIRAILAGERDPAVLARMRDRRCHATVETIEKALAGNYRIEHLFILEQALALYDTYQQKAFACDARIEAVLKELSVRRGREGGQLPAARQNRSRQQNSLLFDVRAALFALLGKDLTQINGLGPYLALKLIAECGDDLSAWPSAKHFTSWLCLAPSNKISGGKVLSARTRRSGSRAAALLRLAAATVGRTDTALGAFYRRLSARIGKAKAVTATARKIAVLFYNAVQHGMDYVDPGASFYEARYRARVIDNLRRRAKAFGFVLQPAGPTPGIAVS

SEQ ID NO: 266551 - protein, 410 aa, unidentified
MPNSLLVGIDVSADENKVRLLHPDGSSITRFKVPNNLPGAKSLSDKISGAMAKNGFDSLVIGLEATSVYGDPLVYFLKQDATVNSFKPKFHVLNARQVKKFKESYPDLPKDDDVDAWIIAEFLRFGRINKEVFMDDTMDALQKLTRARFYVAQNLTREKNRFLNHLFLKFSSLRQEKIFSDIFGATSCGIIEEFFSVDDIAYMSVEELADFINKKAKGHFSDPSEVARLVQKAAKSSYRLPKTVNDSVNQVLAISYSAIRALKGQLASFDKAIEELFKLIPNTLISVKGIGPVYSAGIIAEIGDIHRFKDQAALAKYAGLAWTKYQSGKFTAENTHMIRSGNRYLRYYFLEAANKVRMHDHEFKRFYDLKYSQTPKTPHKRALALTARKLVRLVYALLHSNRLYIPPKGK

SEQ ID NO: 266552 - protein, 353 aa, unidentified
MFSYYQVTTEYSCGVDLHSRQMYICIMDKNGKVQVHRNVRGNDFDYFLKLVEPYKRSLTVCCECTFNWYWFADACIDAGFEFVLGHALYMRAIHSFKTKNDRQDCWQITHLLRSNLIPPAYVYPREKRATRALLRQRTTFVWKRAEILTQMSMSVMANGHKPLNSNNRPRDTWIEELRDLYSDPMDLLAVDASVQMVKQFDETIGKLDWALHKHTNDHFGVEYNTLKTTPGIGKTLALIILYEIDDIGRFKSVQDFLSYCRLAKGTVASAGKIKGTQGSKIGNGYLKYAFHEAAVLGKRRNPELKKYFQRLEAKKGKHLANGILACKLARAVYFMLRDHKVFDVSKVTRQRAA

SEQ ID NO: 266553 - protein, 359 aa, unidentified
MDNIGLDLHKRETQLCLLTDAGELIEQRIATTRARFTAVLGPRPRSRILLEASTESEWVARHLERLGHEVIIADPGYAPMYATRSRRVKTDRRDARTLAEACKLGAYRAVHRASDAQRHVRAALAVREALVRTRTRYVAVIKALVRRDGLRLAQGEPERTAAKLATLELPSALTAELAPLLVLLEPLNAQIDAADRDLATLAAGDPVVARLRTAPGIGPVTAVAFVATLDAVERFASAHQVEAYLGLVPSEQSSGERRHRGRITKQGNTRMRWLLVEAAWRILRSPRPEAVALRAWTEQIAVRRGKRVAVVALARRLAGVLYAMWRDGSTYRVPRLRPPRQGPPPNPATRPGHGVSTER

SEQ ID NO: 266554 - protein, 392 aa, unidentified
MYIVGIDIGKNHHEASIVSPEGKQIGRSLRFATTHKGADSLMSFIFKNIGNSPCVFGMEATGHYWYPIYSFLKAKGYTIYVINPIQSDSLRKMYIRQTKNDSIDSFLIAEVIRFGQFGTTSMADENILAMRQLCRYRDSVISSRTEIKLRIGAIMEQIFPEYEKQFSSLWVSTSMGILEKYLTPENIENAPIDELFEIIKDKSHNRLTRAKAISIKEAAADTFGIKIAQDAFSFQLKQLIDRMNFLDKQIEALDCQILEYYEKFDCYLHTIPGIGMIAAATILAEIGDINRFKSSSALVAFAGIDPTVRQSGEFSSTHNHMSKRGSPYLRHAIFLAATTCSFHNSPLNAYYKKKRDQGKHHLTATGAVARKLTSVIYAVLRDSKPYEPKSFC

SEQ ID NO: 266555 - protein, 356 aa, unidentified
MEKVTRGQAVRVGVDLAKRVIQVHAVDARGRVVTSRALARDKFIEWCVMLPAGCVVAMEASSSAHHWARKLIGLGLDARIISAQLVSPYRSEGATGKNDANDAAAICEAACRPTMRFIAVKSIEQQSMLCVHRLREGIKEDRTACISRIRGLLAEFGLVFPKGASELQGVLSDVLEDAGNELGALARLSLQRAQSQWHELDAHLAWCDERIAAHAKGNDAVKAAATLLGIGPVTASAVVATVGDFKQFRCGAQFGAWIGLTPRQHSSGGKSKLGGITKRGDTYLRTLLIQGAKSAVLTAHRRQDAISAWALALRERSGWQKAVVALANKNARILWAVMTRGEAFDANHLSVKPVST

SEQ ID NO: 266556 - protein, 317 aa, unidentified
MAMPVVTTQSIIGVDVAKDELVIYHAESDQLETISNTKAAIKKWLKTAAKPVAIAIEATNIYHQEFADLAYADGCVIYMVGGYELSHYRKGVNVRAKTDALDARLLARYLTNEGDHLRPWTPPSPLYCRLISLFRRRAALVQARVSLKQSWENEPLLKTAFKNQINAMQRLEILLEKTILAQIDEAGLGAQLKRCMKVEGIGTLTGARLLASFQRGDFRNADAFIAFLGLDLRISDSGKKKGRRCLTKRGDSEARRLLHNAAMAASRTSAWKGFYEALRERGLSTTKALVALARKLARVVFALLKNRANTHLKPFRG

SEQ ID NO: 266557 - protein, 338 aa, unidentified
MKLYGGLDLHSNNVVIAILDEHGVVKARKRINNELHQILLFLSSFKSDLLGLVVESTFNWYWLVDGLMEADHQVHLANTTAIQQYSGLKHADDNSDARWLAEMLRLDILPEGYIYPKAQRAARDLMRKRMQLVQQSTSNLLSIQGLYQRHLSHKLSNNKIKQLTHEQVARDFSAANVVLAVNSNLGVMHCLKGHIKGIEKTLLAQVKLAPEFQQLTSIDGIGDILALTIMLETGDMKRFEKVGDYASYCRCIKGAKYSNGKKKGNTNAKNGNRYLAWAYVEAANFAIRHNQTIKRYYQRKAAKTNQIIAIKTVAHKLARACFYMLRDQVPFEVGKAFC

SEQ ID NO: 266558 - protein, 370 aa, unidentified
MKEFSKYVGLDVHKDTIAVAVAEAGGGEVRYVGEITHTPEAITKLLRQLKKGAGRISWCYEAGPCGYGLYRQLSSAGEDCQVVAPSLIPKKAGDRVKTDRRDALLLARLHRAGELTGVWVPDQAQEALRDLTRAREDMKHLQQQARQRLSAFLLRHGRRFAGKCKWTQVHSRWLETVKFEQPVQQIVLQEYVDTVDACSKRVRGLDEQLERVARESVFWPVIEALMALRGVNLLSATTIVAEIGDLHRFASAPQLMAYLGLVPSEHSSGAKQSRGGITKTGNGHVRRLLVEAAWTYRHPARKSAPLQRRAERTSEAVQDIAWKAQKRLCQRYRHLSARGKQSVQVSTAVARELAGFIWAVGQAMPRPAAA

SEQ ID NO: 266559 - protein, 388 aa, unidentified
MKDVADQSAAPTTIQADLRAIFVSLELSRSTWLVTSLSPGRGEKMSKHTVSAGDIAALLARFSELRKKACARTGKSFPLVVIQEAGLDGFWIHRVLLSEGIESHVVDAASIATSRRRRRAKTDRIDGETLLRALLAHKRGEPRVCSMVRAPTPEDEDRRRICRERKVLIMERVQHVNRIKGLLFSQGASEYEPLHRDRRARLDALQTGDGRRVPQHLKAQICRELDRLELLLEQIKAVEAERDALLDAEQTNMSAPPPMLLGVRGIGPEFASVLWSEGLSRHFDNRRQVAAYAGLAPTPWQSGSVNREQGISQSGNPRLRTTMIQLAWLWIRHQPGSALALWFKERNERNGGRRRKTTIVALARKLLVALWKYVSAGVVIEGAMTGAA

SEQ ID NO: 266560 - protein, 468 aa, unidentified
MGCEPGLFGGRPCDSPGLCCEHVSVCVVVPLRLPFVYPMREVIAVPQVQPLKRWLGRAVGLDLHRDFIQIAICEEGLTYNAGRVPMTAEGLESLVASLQPTDRVVMEVSGSAWEVARRLEPQVNRVVVVSPDDTGIAQARTKTDKLDARTLAYLLWKGQLESVWVPDERARVLRRRLARREQLVHARSRVKNEVHATLMRRLQGKPPCSDLFGVKGRKWLQTLERDLPVDEAETIQAALRQVAFLDKEIEQVEQLIAKQLLTWPEAKRLLTVPGVNLIAAATFLAAVGDITRFANSKRVVAYLGLDPRVRQSGETPARSGSISKRGSVSARWALVEATWSVVHQPGPLRAFYLRVRSRRGHGKAIVATARKLAVLFWCMLTRQHDYAHQQPSLTAQKLRRLEIAAGAPVRPGKPSGVWVTHQQMRHAEKQLAAQAQASYERTVRDWKATGPQKRKAEEVGASVTAERA

SEQ ID NO: 266561 - protein, 567 aa, unidentified
MTQTLRIRVINERNLLGNRPLRYKGTIKRYTAIWQSRPIPQWCHWTRYSAWFRAYSVVTLATWPPLFWRYTIPFRRVQRKTDPGQSAAICNPQQGDSTMSKHSNKQNQTQRKKHYRKKQSDSFPVINTNAAGIDVGSTEHWVAVPKDRDEQPVRNFKCFTADLHAMADWLKECAIQTVVMESTGVYWIPLYQILESQGFEVKLVNARHVKNVPGRKTDVSDCQWLQRLHTYGLLSGSFRPEDSICVLRSFWRHRDTLIRYASSHVQHMQKALTEMNIQLHKVISDITGLTGMRIIRAILAGERDLVTLAHMRDPRIKSSAEDIAKALEGDYRKEHLFALQQAVELYDVYQQKIQACDQQIEHYLTQLDSKIDLESNPLPSSTKSNKTPKGNAPHFDLRTHLYRISGVDFTQIDGLDAVSVHTILSEVGLDPAAFHTEKHFCSWLGLSPNNRITGGRIKSSKTRKVINRATSAFRMAAQSLTYSSSALGGYYRRMCARLGAPEAITATAHKLARIFYHLWKNGGIYQDPGPLYYEQKYKERVINNMIRKAKQLGFQINIEPLNELQVF

SEQ ID NO: 266562 - protein, 382 aa, unidentified
MQASTADTPTAGHCGTIFVAIELSQKSWLVTLHSPDRDRISRHRVAGGDHAELLALIERIRGRAAEKLGSAPRVVSCYEAGYDGFWLHRLLTEAGISNFVFDPASIAVEQRSRRAKTDRIDGELLLRTLMAHLRGEPRVVRIVQVPSVEQEDARRASRERDRLVTEQTAHTNRIKALLRLQGMAVGYARRRDWLHWLARQRDWQGQPLSSHLLAEVTREHARLMLVREQLAALEQAQAAQASAIPAPMAERRDLLQRLKALGPAFAATLTNEVFYKDFRNRRQVGAYCGLTPSPWQSGGIDREQGISKAGNPRARLKAIELAWLWLRHQPESELSRWFRIRTANVGKRARRIAIVALARKLMVALWRYLTTGLLPAGAAMKA

SEQ ID NO: 266563 - protein, 434 aa, unidentified
MEEVVALIGIDWADESHEVCVYKIGSDRVEHQNVEQKAEALHDWVNALRKRFQGGKIAIAVEQSKGALIHALMRYDFLLFYPLNPKSLSSYREALRTSGAKDDPSDAELILNFLRTHRDRLRVWVPEDEVSRHLGMLVEFRRKIVADIVRVTNRLGSLLKGYYPQALEMMGELDSRMACDFLSKWPSVLELKKAKAASLRRFYAQHNSRSAEAIERRIVLAQAAQPFTEDRAIIEASLLMVRMLVRHLRELLDSIREMDAEIGEVFSLHPDREIYESLPGAGKVLEPRLAAAMGTNREKYDTALELQQFVGTAPVTVRSGKSQWVHRRLARPRFVMQTHVEFAAQSIPYSRWAAAYYQHQRNNGSGHYAAVRALAYKWDRIIFRCWKDRKRYEEERYLEALKRRNSPLVKLLNLPKPPKAPSQPIQVGPALARS

SEQ ID NO: 266564 - protein, 454 aa, unidentified
MPKKAKIEKTATGKILKVVNPNAAGIDIASSEMQVCVPEDRDSECNRTFGCFTQDLKQIADWLKSCRIDTIAMESTGVYWLPLYFILKERGFEVILVNARDVKNYSGRKTDEADAEWLMMLHSYGLLKCSFQPENEARAIRNLTRHRSNLLQSSSREALHMQKAMEQMNLKLGNVISDLLGKSGMSIIRAIISGNHDPRELAALAEENCKASKEEIAKSLEGSWAEDHLFELEQAFDLYNFIQEQVNKCDRQIEMHLIRYRAKLDHPSDDNFQRCKKKIGKKNAVDFDVEKYAFDIWKVNIMAIPGMSAISLLQLIGELGHNFADKFETCHSFCSWLNLVPNNKVSGGKLLSSKVPKKTNICGQVFRLCANSLKRNKTTLGYYFRRIQSRCGYSQAIVATAHKIAKIFFTMIKNRTEYDESETGINERDLLERKITMTQRRLDKLNRQLEVALV

SEQ ID NO: 266565 - protein, 326 aa, unidentified
MMHPAEAFKPAPTDALITIGIDVSKDHLDAARHPSGDSLRVPNTRKGHTELLRWLGNSGGIARVVFEPTGPYHRMLEERLASVGLQIVKVNPRQARRFAEAAGRLAKTDRIDALMLARYGALLEPVTRPVRSDVQNRLAELVAARRNLMRDRTATLNRLKTLTIELLKRHARHRLRQIEAQVASLDAAIDAIVLGDPVLSRRRDVLVSIPGLGLITAHTLLADMPELGAMEEGQAASLAGLAPITRQSGTWRGRSSIQGGRASLRQALYMPAIVAMRFNPDLKRVYDRLIAQRKHTKIAITAIMRKIVVLANALLRDNRLWAAKTS

SEQ ID NO: 266566 - protein, 360 aa, unidentified
MAIVAQTHPFVIGVDTHARNHAVSILACPHGEILDEAEFPATSAGLARAVSWAGRRTGGDLGALWVIEGTGTYGARLARAAADAAYAVVEAPRMNARANRGIGKSDPLDARRIAGAALPLHETQLRQPRADDGIRAAVRVLLASRDHMSTERTATINALTALLRVSDLGVDARRPLTAGQITTIAAWRSRDEALATATARWETIRLAKRVAALDNDLKEITKRITDLVHQSPARTLLEQPGIGPVTAAVALTTWSHLGRIRSEAAFASLAGVNPIPASSGNTVRHRINRGGDRRLNRALHMAVVTRMRMDPATRAYVERRTAEGRTLREIRRCLKRYLARQIYRHLNSAAATEERQPATT

SEQ ID NO: 266567 - protein, 353 aa, unidentified
MHTHRQLSEPVATIGLDIGKNTFHLVGLDRRGAIAMRIKVSRNQLVRRLVNLPPCLIGLEAGSGSHHIARQIQSLGHDVRLIPAQYVKPFLKGHKNDYRDAEAIAEAVQRPTMNFVAIKTPEQSDLLSLHRVRSRLVRQRTAIINQIRGFLIERGITVRQGPGPLRKVLPEVLSSPPEALSPRLLHLISELDQDWRHLDDRLEVLSGEIESLSENDAACQRLMTVPGIGPIISSAVVAAIGTGSGFKQGRDFAAWLGLVPKQESTGDRTKLGRISKRGNKYLRTLFVQAAHVVLERRPAAAMRALWPWIAQASKRLAHRNLLAIALANKLARIAWAVLARGRDYEPRITPNAP

SEQ ID NO: 266568 - protein, 388 aa, unidentified
MKLFNSSIEQTAIRTDLGAIFVSLELSTTNWVISSIQPGRQRVSKHMVEAGATGALWELFGKLQAQALARQKMLYPIVTIQEAGLDAFWLHRALVNNGIESHVVDPASIAVPRKKRNAKTDKVDGLALLRALLSFKRGEPRMCSMVVPPTPEQEDRRRISRERQVLKGECTEHCNRIKGLLSAQGIRGYDPKLRNRRARLDEIRTGDGRRLPAHVKAQIVRELDRLELVLEQIKTVEQGRDAQHAACGDTDVPAMLLTLKGIGAEIAEILYAEAFYRQFANRRQLGSYAGLAPTPWQSGKVDREQGVSKAGNPRLRRILVQLAWLWLRHQPDSVLSRWFHDRVKRANGRQKKTLIVALARKLLVALWRYVAHGVVIEGAVVKNAPATR

SEQ ID NO: 266569 - protein, 422 aa, unidentified
MLTESHDEEQIIARVAALDIGKTEVVCCVRVPAGAEAKKRLQEVSTHSTMTRALTELANHLVDLGVQRVVMEATSDYWRPVFYLLEAHGLDPWLVNARDVKHLPGRPKSDKLDAVWLCKVAERQMLRPSFVPPKPIRQLRDLTRYRIDLLGARTAEKNRVEKLLEDACIKLSVVASDIFGVSGRAMMAALIAGERDPKVLAQLARARMRAKIGLLEEAFNGHFDDHHAFLLTRMLGRIDAIDADIAAVDAQIEAQLAPFASAAARLDDIPGVGPVAAAVIVAEVGIDLSRFPTAGHLCSWAKFSPGICSSAGKSKGNRSSGHGNRYLARVLGESAVVAGRTDTFLGERYRRIAKRRGKKRAIVAVGRSILVIVWHLLSDEQAVFTDLGADHFTRHVNSETKKRNHIRQLQALGYTVTLTPAA

SEQ ID NO: 266570 - protein, 343 aa, unidentified
MEHYAGIDVSLELSSVCVVDATGRIVREAKVPSEPDALVAWFRGLGLRVSRIGLEAGPLSQWLYAAMHGAGLAVELLETRHVRDAFKAMPVKTDRKDARGIAQLMRLGWFRPVHCKSLPAQETRVLLTTRKLLQAKHHDVEMSLRGVLRGFGLKVGPTTPRSFPGRIRELVDGHPTLTVVAEALLAAREALGDQLRGLEKRLRHQAREDERARLLMTTPGVGVIVALTFAAAVDDPARFRSSKAVGAHFGLAPRKYQSGETDVTGRISKAGDGGVRTALYEAANVILTRPVKGSALKSWAARLANRAGMRKAKVALARKLAVVLHRMLADGAPFAAERAAAAA

SEQ ID NO: 266571 - protein, 411 aa, unidentified
MGYFIGIDISKGSFNYSVVDEGCKQIESNKLSMDRNGFDEFKKVTEKYKGSVVACESTGSFHINLISFLLTFKREVAIINPSLIKRFSWSVSLRKTKTDEIDAYMIATFVCKNKENVNYLMLDDIDSIVPIARLRESIAKDIAKTKTQLRQHLNITFPELEKNYNIFTYSILNLLKSFPSAKAIQEASNMKIYRAIKHKSAGRDVNITPKQIKELAKNSIGHASSEYEALVEYDVEHLLFLSKKIEKIEKQFIDKINKSKKDDVDILTSIKGIGDVTASYFIAEIGNIDRFKNKKKLIAYIGTDPSIAQSGSSINRRGRISKKGSKSLRRTLYIMAMGTIRSNEYFKSYYLKKRQEGMQHRKAIVALMNKLVRVIYALLKKREKFSLKKAKSFSSSCANPSACSCSGVSYP

SEQ ID NO: 266572 - protein, 339 aa, unidentified
MNSMAVGVDIAKNVFQVHYVDQASGEIVNKAIKRAKFLEHFANRERCVIGMEACGGAHHWARALKRMGHEVRLMPAEFVKAFNIRNKNDAADARAIWLAVQQPGKPIAVKTEMQQAMLALHRMREQLVKFRTMQINGLRGLLTEYGEVMSSGRAALDKEIPAALGRIAERLPAALIDTLREQWNGLARLDEQIAEIERRMRDWKKEDRAVQAISEIPGVGLLTATAAVAMMGDPKGFRSGREFAAWAGLVPKQTGSGGKVNLHGISKRGDTYLRTLLIHGARSVLTHAKEPGPWVEQIKKRRPTNVVIIALANKMARTIWAVLAHERAYRKDYVSMKPA

SEQ ID NO: 266573 - protein, 392 aa, unidentified
MYIVGIDIGKNHHEASIVSPEGKQIGRSLRFATTHKGADSLMSFIFKNIGNSPCVFDMEATGHYWYPIYSFLKAKGYTIYVINPIQSDSLRKMYIRQTKNDSIDSFLIAEVIRFGQFGTTSMADENILAMRQLCRYRDSVISSRTEIKLRIGTIMEQIFPEYEKQFSSLWVSTSMGILEKYLTPENIENAPIDELFEIIKDKSHNRLTKAKAISIKEAAADTFGIKIAQDAFSFQLKQLIDRMNFLDKQIEALDIEIMKYYEQFDCYLHTIPGIGIIGAATILAEIGDISRFKNSSALVAFAGIDPTVRQSGEFNSTHNHMSKRGSPYLRHAIFLAATTCSFHNSPLNAYYKKKRDQGKHHLTATGAVARKLTTVIYAVLRDSKPYEPKKFC

SEQ ID NO: 266574 - protein, 400 aa, unidentified
MLSIGIDVSKGKSTVCGMKPGGEIVYTPFEIQHTREGMSELVSLLRGSGEEVRAVLESTGSYHCPVVAALLENGIFVSVINSLRMKRFCSQSIRKVKTDRIDAMQIALYGLAYWQELQPTRLPEDTYRELQLLARQYYQMTSMLIKAKADFNALCDQVLPGMQELMNDHAGRHKLSDFVLRYRHTIHILEMGETRFRKDYCKWAEKKGYRNRERMAALIFATAQNGIPVLPNAPSTQIVITEAIRVLHTVEASRDAILTQMQALAKTLPEYSLVREMPCIGDTLAPRLIAEIGDVRRFHSKRALIAYAGIDAPPYQSGKFCANNRHISKRGNRYLRKTGYEVMQSYVMHKPANDPIFTFIEKKRGEGKSGKLAMVAGLNKFLRVYYGKVTELYRSLPAIE

SEQ ID NO: 266575 - protein, 369 aa, unidentified
MTHRTASTVLLPIHSAVQLPTTVGLDLSDRVSHFQVQRGDGVVLAAGKVATTRNDLTSLFESWRGCRVVIEAGGHSPWISRLAGACGMNVVIANPRRVELISKSDRKTDRTDAALLTELGRTNPHLLAPITHRSEAAQLDLTLLRARDELVCARTSLINHVRGVLKSHGLRAPRCSADCFAQRAGAVLSCALADALSPLLELIRSMTKSIRSLDGKIERLCVERYPITQTLQQIAGVGPLVSLCFVLTLDDCRRFRSSRDVGAYLGLIPRKRSSGASDPQLHITKAGDRGMRRLLVIAANYILGRFGPDCDLRRYGLKLAGDGKNSIAKKRARIAVARKLAVLMHQLWRTNGVYDPLHAQKKRGELAVA

SEQ ID NO: 266576 - protein, 322 aa, unidentified
MTSVDNTPVSYLGIDVSKETLDLAVDGQEGVWTFANDAAGIAQLIERIRPLRPRLIVVEATGGYERAVLNAILEAALPIARVQPGRVRHFAKAQGLLAKSDGIDAHLLALYARCLQPAVSEKRSKNQVELGALLVLRRQLIDTRTAHGNQLPMADSSFVRATLAKLLRQIHDRIKQVDKRIARLIDSDEGLAGRRDLLLSVPGVGKTTAATLAAQLPELGKIDRCQISALVGVAPYNRDSGGWSGKRAIFAGRAAVRSVLYMATITAIRCNPTIRLFAERLQKAGKMPKVVITACMRKLLTILNAMARDGLTWSPKCQLQTT

SEQ ID NO: 266577 - protein, 468 aa, unidentified
MKPKHTKSSHRRRTKQTASAAGPVLNLLTHPHAAGIDVGAAEFVAAIPPGPDGEDGEKYVRTFPSFTSGVEALRDWLLANGIKTASMESTGNYWITLYDTLVQAGIEVYLVNARHVKGVPGQKTDVKDARWLQQLHGAGLLRKSFRPAQDIVPLRFVMRHRAEMSADASRQLQLMQKALTEMNLKIHHVFSDIDGASALAIIEAILAGERDADRLAALRDQRCKSPLETIKEALRGDYRPEYLFVLRQSYRSWQQLRAAMAECDTQIAALSAQVARTVDTPLPPPAGKHQHQTHKNSPQMAIFHEAWRFYGVDLSLAPGAGASVLTMLMSEIGTREQLLTAFPTAAAFCSWMGLCPDNRISGGKVLKARTRKVPNRLTAALRLGVFGLNNARNAMGDYYRRMKARLGKAEGTVAAAHKLARILYTMIKNQTAYDEKEAFKITPSAAARRRRHLERQAAALGLVLRPAA

SEQ ID NO: 266578 - protein, 348 aa, unidentified
MSILAERVDVVIGVDTHTDTHSAALLSNAGAVLAETTVVADDVGAAGLLAWADQHGSAGDRREWIIDGARSHGVGLARVLLAAGEVVREAARRPGTARRRAGKSDELDAIAAARTALTAAQVATPRSDGDREALRVLHVCRRHYTDTRTATVNLLKSLILTADDDLRGQLRRLNTTKQVRHLIRDTTEPAGDALTHIRRQQLHALAHQIAALDRTLADNLKQMRSLIKALCPALLDQPGIGPVSAAIALTAWSHHGRLRHEAAFAALAGVNPIPASSGRNQRHRLNRGGDRNLNAALHTIAVNRSRHDPTTRAYIARRTAEGRTPNEITRCLKRYLARQLFRIMQATP

SEQ ID NO: 266579 - protein, 341 aa, unidentified
MTLVMGMDQHRAQISAEWIDTMTGEISRARVAPADRAGVRKFFAQFKGVGLEVALEATTGWRFVVEELERIGADVHLAEVVQTSGLKGRGKRAKSDWADARHLRELLLIGRLPESWIAPAHLLDLRARVRCRHTLLHQRTEWQQRMQAVLYHHGAPHARGLLKLENRERVAALKLPDSAREQLTIALSMINAIDLQLAPFDLALRAYARKQPGCRTLMDEIYGIGELTSVTILPELGDTRRFQNSRDAVRYSGLDVTVHQSDQRRAAGHLSRQGPPALRWALYEAAQAARRPGSPDRDYYEQLAARIGGNRACIAISRKLLKRSYHLLRALGDQALQPVTA

SEQ ID NO: 266580 - protein, 336 aa, unidentified
MTIIRVGLDTSKHVFQMHGVDENEQPVLRRQIRRGAVEKSFAKLPSTRIGIEACGASHHWARLLRGLGHEVLLMPPQYIKAYVKRGKNDKIDAEAICEAMSRPTMRFVPVKTAEQQAALTMLGVRDLLVKQRTMLINAIRGHAAEFGVTTAKGPKQIAELLARLASDEDVPVLAREMIGVLASQLNGLDIKLKAIEARLMTWHRQDQTSQCLATIPGIGPIGGVSFALKVPDAKAFRSGRRFAAWLGITPREDSTAGRQKLGRISRAGDADLRRLLVIGATAVIRAAKPGRTAPWLMGLLARKPKKLAAVALANKMARIVWAMMVSGETYRRPAQA

SEQ ID NO: 266581 - protein, 483 aa, unidentified
MKPKPQEKNKRATNHPTQHHWHEMNRKQRRETMRKIQSEDLNLEVIHPDAAGIDIGNEFHYAAVPPSRDNQPVRRFGCTTAELKAMATWLQQCGIGTVAMQSTGVYWVAVYDILEQAGLEVYLVNARDTKNLPGRKSDVQESQWLMKLHTYGLLRNSFRPSQEIRVMRTYWRQRNDLVQSAGRHILRMQKALTQMNIQLANVLSDVSGATGQAIIKAILAGEHDPYKLAAFRDPRVQASEEQIAQSLEGNWQPDLLFLLKQEQDGYQFCQKQMAECDRQLAQYLQQREDRSQGAPLPEEKRKGRLKKKRANKPRFDLREGLFRMTGTDLTRIDGIDVMTATTVISEAGYDMSKWKTENHFVSWLRLCPDNRISGNKVIGKGRLPTNNPVSIALKMAASTLRLSKTYLGAQFRRFRTRLGAPIAIKAMAAKLARLVYRMLRYGMKYVDQGAAFYELKHRQLQVQQLKWKAAKLGYKVTPIPAAA

SEQ ID NO: 266582 - protein, 409 aa, unidentified
MWMTTVGVDVGCHKHRVAIADPGGKIVEEFDLPARWDGFQDFFARLEHYRTIYGAPVVVAMEGYNGYARPLDREIQERGYTLLNVNNFKLRRFKELFPSPAKTDAIDARKIVELVRLQGSLPRSREILQEVSEVPEAHRMLKRLTRRRRQLVDEKVCLLNRMQTDLQAVSPGLADLVEYKDGVAFLRFLSCRNRLEQLKSIRMESLLKIRGVGKSFAGKVQAWQKKACFSAEAPYVGPMIIEDAKRILELKERITELEEQIRELSESSPLGRRIGSIPGFGVVSTGELVGEIGTMDRFDSEGSLAMYLGMAPLDNSSGSYQGTKTARQVNRRARMAMLTATMRHIPQVEESRSYYERKRNEGKTYHQAVRATGRHLVRVIWSMAKRGEDYHIRQLHHLTENLPESVATS

SEQ ID NO: 266583 - protein, 360 aa, unidentified
MAKARSFVGLDVHATKIVAAVLDAETGQLQTFVMSGETTKVAGFCAGLPRPVRVAYEAGPTGYGLARELAKREIECVVAAPSKIPRASGDRVKTDRRDAEHLVRLLLAGKLHAVRVPGPEEEALRDLVRARDSVRADLMRCRHRLSKLLLRHGIRFDDGQAWTARHRDWLATVALEWPAAQTTMLDARGAIDALCHRREQLEREIVAMLPSSPWVVQAGRLRCLRGIDTLSAVGLCAEIGDFERFARAEQLMSYVGLVPSEATTGQQRRLGAITKTGSGHARRLLVEAAWHYRSRPSIGRALTDRQDSQPPEAIAVAWSAQRRLHRTWTRLEACAKRRTIIAVAAARELAGFAWAITRIE

SEQ ID NO: 266584 - protein, 324 aa, unidentified
MIDGILGIDVSKNTLDASLSSRNRVRARSVANSSDGWRDLLDWLTSEKIRRVHACMESTGRYSLGIACALYEAGHIVSIVNPAQIRDFARTKLGRNKTDEVDAAHIREYCELFKPQPWAPPSEAHRRLAELQTIRSGIVAGLTEWKNRKGSGMVDSVAQSLADVTISHFSSQLEAVDEAIAQTIDNDSGLRRKRDLLLSISGVGETLAGVVLAELPGPDVLRSSAEVVAYAGLNPRQHQSGTSIDRVTRISKIGNAVLRAALYLPAMSAMRYNPAIVALVARLKSRGRLKPKQIVVAAMRKLLVLCFGVLKTGKPFDPAIAMGC

SEQ ID NO: 266585 - protein, 353 aa, unidentified
MKKIIIGIDVSKEKCDATAISVEKGIPEVSKLDYICIENRPCGFRKLLSWSRKLAKDTADEEILFICETTGAYDHSMCDYLYAKGMDIWREAALRIKWSSGVRKGKDDTADSLMIAEYAMRHMDKMQLYESPDKRISEIRAAFLYRRSLEQDKVSRLVRVRELEATAGKSKTNTSILRDVKKHIRNIEKSIRECEEMIRSLIGEDEALSRSYSHLDSVKGLGIVNITALIVYTNNFRSFRTSRQLASYWGVAAFRCKSGTSMDKRSNVGYLSNPMLKAYLTQAALHTIAVNGIFHEYYQRLIDAGKPRPVAFNNVKNKLLHLAMSLIRNDMDYEENHTHKWTRRDTLQPRLIH

SEQ ID NO: 266586 - protein, 345 aa, unidentified
MKDTNILAIDLAKNIFQVCKRDPKGKVLFNRELSRAKLKEMLVKQPRSLVAMEACGSAQYWARLARALGHEVKVISARTVKPFQTKQKTDRNDALAIAIAASQEHIHGARVQSAEEQALQSLERARHLAKTHQIAQSNQIRGLLGEFGIIVPPSLSQLRKHIPFILEDAENSLPQSFRKTLNYLWQHLLQQIEHVAILERQLEGAVKYDTTCQKLMKLEGVGPIGALGLAVRLGQGENFTNGREASANIGLTPKQHSSGGKERIGHISKRHADKRLRSTLFQGALSVITQVSKRPARTSKERWLQALVERRGKKIAAVAFANKTVRTAFAMLTQGTEYKAELLAA

SEQ ID NO: 266587 - protein, 346 aa, unidentified
MLYAGLDLSRQRLDVHVLDEDGRTIEVTAVRPDADALRTLAAHVLRQGQEVSAAIESMTGARFVHDTLERYGWDVAIADAAKVKGIAPLAAKTDKIDAWVLAELARRDLVPEIWLPTPEVRAERERARFRLHLVHHRTALKNRIHATLMTFGHPVAVADLFGVAGRELLARLALPEPWMTTLSTSLRMVDRLGAEIDACEGDLRRLGADHPSIPLLLTIPGVGWVLAYTIASEIGDIGRFSSPKKLTGYTGLCPLVRQSGNRDVRGPLAKNGPKYLRWALIEAATHAARDAHYRERYERTKQRLGRQRGAKVARVDIARKLAEAIWHILTKNEPFAPAGPAMLLVA

SEQ ID NO: 266588 - protein, 341 aa, unidentified
MTIGIDLGDVWSHYCTLNEDGEVVDRGRFRTTPSGVEKWFTDLPKARIAMEAGTHSIWVSEQLQEMGHEVIVANVRELRAISHSDRKSDTVDAEKIARYARLDAKILRPISHRTVAQQEALTLIRARNLIVRLRTAAVNSVRGLAKPCGYRLPASSTLCFAKRCMAVLPPGLAQALGPILQQIAAMTVKIKHYDRTIQRLTETEYPETQALIQVYGVGQLTALTYVLTLGSKERFERSRDVGCYLGLRPRRSQSGDHDPQLGITKAGNIYLRSLLVECANHVLGPHGRDSTLRQWGLHLASRGGKQSRNRAIVAVARKLAVLLHRIWVTQEPYIPFYAVAA

SEQ ID NO: 266589 - protein, 342 aa, unidentified
MYYIGLDVHKKTISYCVKDAAGCVYGEGRIGSTRQELDAWIRTLPQPRTIAMEATIFSGWIYDHLLPHAEAVKVAHPLMLRAIAAAKKKNDRIDASKIADCLRCDFLPECHMASTEIRDRRRVLRYRHLLVRQMVQTKNRVSGLLMETGVEHNKSRLHKAGYFRRLMTTSSEIDDSIRPLLRISRENIERCQKTEYALVSSLERDPLLKERIRRLRTVPGVGPITALNWALEMGDISRFRSIKEAVSYCGLCGDERSSADKVMRMPLSKQRNKHIQHVLVEAAKLAPRQSPELALIHQKAMEKGNRNRATLAVARKMVAWLLAVDRENREFIPAEQRETRAA

SEQ ID NO: 266590 - protein, 443 aa, unidentified
MLQLASVCDPAALKTKRARPSVGRECQRSKQEYTPMNDSRKRYLGLDVHKHYLIALGVDADLNVVLPARRVELFRLEAWMKKNLTRQDEVVLEMTTNTWQLYDELVAYVGSVMVVHPPHVALITRSQVMNDKIAASILARLLAKGLLVGIWIPPQEIREARSLVAQRQKMVRLATQAKNRLHAVIQRHHLIPPEGNPFGASNKEWWQELPLGKLEKLNLQSDLETLQFAEKQVKRMTEMMEGMACEQEPIGRLLHLAGFGVVTAVTVWAAIGDIRRFAEPRYLVGYAGLGTRVHDSGMTTRTGKITKAGRRDLRTVLIEAANVAANNHPHWKAELARLEPRLGRNKAIVAIARKLLIAVWYVLQGQTDKYAEPEAIAQKMLKFAYQVGKANRPKQQTAAQFARLRLDALGLGQDLTSIPWGSKKPIPLPPSILNERSDVPNTK

SEQ ID NO: 266591 - protein, 423 aa, unidentified
MKNSAAKKRRQVPAGYLVVGVDPHKKKHAAVFMTQDFTTHSKFKFDNSREGFEMVLERAKAEMLKTGCRGAIFAIETGAHHWRNLAYFLDERGIPLRLINQFTLKRRREGKDLNHRKNDYRDSEVAAQLLCTGEFNTARLPQGVYAELRGAYGSYRRLVKERTRIVNLVKSLLDGLFPEFTQVFKNPCGQTATTVLLTRAVPRDIAGITKAEFVNAIRAAHHGRIIETKLRALHCAAKTSVGIEAGARSISLEIAFLIEKHRLIQKQLGQINGAFVKMVDETKEGKYLLSITGLNYVSVAGILAELGSFSSYQNAKQLIKMAGSNPTESESGGKRHSHTPISKQGRPVLRHCVWTAVFPMLHFNSDFRDWARKLRERPAGANPLNGREIVVAAVNKLLRLSFALVKKQTFYQIPVPQPIGVPT

SEQ ID NO: 266592 - protein, 455 aa, unidentified
MSHGSGVSRGDRNRNARLSRLREAVPTANAIVGIDLADRKQMLVVTDHDSKVLARRTFRCKAWDLGTALDWAADRATRAGFAGVTVACEPTGHRWMVLAQLAAERSMPFVCIQPALSSWVRKTEDLTTDKTDEKDAVLIARLTVQLRCYLPEPVDEAHATWARLRHLGARREELITEHVSCVQTIRDLLECVWPAALEVAAQPFKSTTWVAALSVVVRRDGGDLDRTRRLGLARFERAVRAEVTRRGRVRPCLRIVRRLFAALTDPAGVIAHRPAVFERLEWTLTDWDDARAKLANVEARMVSVLDELGLATLVTSIDGLSPVGAAAILAQTGDLTRFTSARAVVKHAGLAPRERKSGTFTGKARVTGAGRPGLRVAAWRAVWGCLQTNRVYAARYRYLTTREHNRLTPTQAQTAVAGAILRQLYAVITQQRAWDPVIATHGTPGWKGAAATAAA

SEQ ID NO: 266593 - protein, 351 aa, unidentified
MSQKTDAVVASTIGIDTGKNTLHLIGLDDQGTIVLREKLSRSRIVSRLANVPRCLIGIEAGMGTHYVARELIALGHDVRQVPPVYARPFRQTHKNDFMDAYAIAEAVRRPSTRCVPVKTDDQLDLQALHRVRSRLISERTAVINQIRGFLLERGIPVRQGLRFLRQQLPEILAKRIDVLSPRMIRIIEDLSGDWRHLDERIEHVTKEIEVLAYGTESCRHLMTVPGIGPIIASAMVAAIGNGVAFAKGRDFAAWLGLVPKQMSTGDRTILGRISKRGNRYLRMLFMQGARVILLRPANWTKHSFGPWLTAAAKRLHPNVLATALANKLARIAWTILTERRSYETRVIADAA

SEQ ID NO: 266594 - protein, 349 aa, unidentified
MRFYTTQHQYYCGIDLHARSMFLCIMDRSGEILLHSNHRANPDALLRAITPYREDLVVAVECIFTWYWIADLCSREGIAFVLGHALYMKAIHGGKTKNDKIDSQKIAALLRSGMLPMAYVYPQGMRSTRDLLRRRLYLARQHAELQTHIQNTNTQYNLPYFEKRIDRRSNRAAIGTRFTDPVVRTSVEVDAALMDAIHEQILTIERQINAQVPEHDPVALHLLRSIPGVGKTLALVILYEIHDISRFPTVGNFISYARLVKCTHESGGKRKTGPNNKIGNVHLKWAFSEAACLFLRRNERARLYHQRLVSRYGKAKALSIIAQKLGRTVYTILKRRTPYDARRFFETLP

SEQ ID NO: 266595 - protein, 370 aa, unidentified
MLYIGIDVHKDMCTACLQDEKGQVLREWKFKNKTSGFNELLALVEGKETEAVMESTGNLWIRLYTYLEEAGIKPVLANPSKTKIIAESSIKTDKVDAKTLAHLLRADLISPCYVPTDPIRQLRQFLRHRITIVQNQTRAKNRAHAIFHKYELPEFEGTDLFGKAGLNWIKEQLPKLDEADQFILRSLIYEIRTLNLLCEETEKEIARHIKIAEEVYLLMSIIGVSFFTAMLFLAETGDINRFSSPSKLTSWIGLTPRVHQSGNTCYHGKITKKGSSRLRWALIQAAHSAVRFDPHWKAVFNRISARRGKQKAYVAVARKLVETMYCMLRNNEPYRYGREKTYDEKLKKLERLMRKAQTNEGGVLLECFSF

SEQ ID NO: 266596 - protein, 331 aa, unidentified
MKKTSVSIVYLGIDIGKSEHSWTLVDEHGSVLEEGTVANKPKRLQGFARRIVKDFQTLIVGCEATGSYYEKIAIAFSELDVVVRVINPALTSTKALRSSMRMTKTDKQDARGIAVKLREKKGDIGTVFSWNTEERRLQAMARHLRFLKKQRSALQVRIKDMNSRPFDVIAVDACLFDKEIERLEQELTQGVRQLYPEAMQILVAIRGVGEKSTAVLLSETMCMKRFSTSKAFAAFVGLDPTLKLSGTSVRGRSRLSKAGSPHLRANITWSAKLLVRWNDTFRTCFENAISRGKAPGVAYGIVARKFATVVHQCVTNGEAFNPEKVGLGTAA

SEQ ID NO: 266597 - protein, 412 aa, unidentified
MRRVIGMDIHRTFGEVVFWEAGRLRHAGRIDMTRTALEGFGKKLLATDEVVIEATGNCMAVSRVLTPFVKRVVIANPLQVKAIAHAHVKTDKVDAGTLASLYAAGYLPEIWTPDAATERRRRLVARRYQVVRHRTRIKNEVHSILYAHLIPRCPHADLFGHLGRTWLTSQPLPDDERAAIERHLRELDRLGDDLRVLDQEIAQSALDDAAIKRLITITGVNLAVAAGLVAAIGDIGRFSSPQKLVSYFGLNPRVRQSGLGAAHHGRISKVGRSHARAMLVEAAWATAKAPGPLHAFFVRIRARRGHQIAAVAVARKLAVLCWHMLTKQTDYHWARPALIANKRRAMELQAGRPQKKGNKRGSTYAYNVKALRDQEMRLAQQAEQSYENLVAHWQPRPAKKQARGRLKPAGLE

SEQ ID NO: 266598 - protein, 446 aa, unidentified
MGNGSGLSRGDRNRNARLARLRELVPLSNAIVGIDLADGTQAAVVTDHDSRVIARRRVSVRAWELGDLLDWAVARASEAGFASVTVACEPTGHRWRVLDQLAAGQGLALVCVQPLLVYRAREGEDLTRDKSDPKDAVLIARLASELRCYEPERADAVWARLRHLGARRSQLTTEATAAVNQIRDLLECAWPAVLAAAGSPFRSVSWCASLAVVLDRCAGDLSRVRRLGLDRFTAAVRRELPRWGGIRPRLRIIRAVFAALADPAGVTAHRPGALERAHLALGDWRDTRARLADTETRMGAVLDDLGLTGLVTTIDGLTVTGAAAILAETGDPARFATARALVKHAGLCPRDNSSGAAQGKTSISGRGRPALRVAAWRAVWAAMPNNPVMAARFAHLTTRQDNRLARQQARTACAAALLRWIHVVVTRRVTWDPAIAAGGTPLRQAA

SEQ ID NO: 266599 - protein, 317 aa, unidentified
MAQNRTIVGIDVAKDKVDVALRSGAEATFANTPSGRRQLVKWVKQHQVSKAVLEASGGYERSWARLLQDAGLEVWIVDPKRVRRFAQSAGQLAKTDRIDARMIAWFGETFADGIGRQPDAAREELDRLVSARTDLMDLRARLAHLGEDDQPDEVRRCYRKIEKDVKEQVSVLEAAIEARIEANAQFAERARLICSVPNMGKISYAGLLAFLPELGLVSNKQASALVGVVPYEDSSGKHQGRRFIQGGRRKLRNLLYLPIVGAATRGNPVLKAYYKRLRENGKEPKVALIACMRKLIVILNTMVARGQTWDPQKHAIA

SEQ ID NO: 266600 - protein, 355 aa, unidentified
MSDINYIGLDVHKETISIVVLNGRGKLVMESIIETEAATILQCIQSLRGQLHLTFEEGTWAAWLYDLLKRHVYKLVVCDPRRNALLKEGSKSDKVDARKLAELLRAGLLRPVYHGENGLRTLRELARSYSTLGKDMTRIMNRLKALYRGLGIPCGGVQVYDPRHRQQWIQKIPEAGVRRRAEIFYEQLDAVRPVRQRARRELLNESRKHQAATLLRKIPCIGPIRAALLVALIQTPHRFRSKRQLWAYSGLGIETHDSAQYRYVGGQLQRSKKPQQLRGLNKNHNCQMKDLFKSTATNAARCGGPFQDFYATLLAKGMRPEMARLTLARKIASITLTVWKKGERFDPNHLKAQAA

SEQ ID NO: 266601 - protein, 348 aa, unidentified
MAVYIGVDFHARQQTISYLTTEDGEIQHLVLGHEKAAQVRVFYEQFAGQRVVVGFESSGYAAWFEELLEELGCEIWIGHATYIRQYAKRRQKNDRRDADLILELLLSGDFPRIHRYSRSTRQMLQQLRYRQRLVKMRTMIVNMLLFMAGSRGHSLRTQLQSKRGQARLAELPLPEPLAQQRDELLSLLGQLDQKVKTIEGWLAEATAADVGVQRLRTHPGIGLLTSICVRYTLEEVTRFATTRKVSAFAGFDPMEDRSDERRRMGAISKQGSRWLRFFLVEAGQVAMRKDADLARVYQRVSRRGGHAKAKVAVGRRLLVRAFIMLRDEIDYAEFQRRGVAARSSRGSA

SEQ ID NO: 266602 - protein, 447 aa, unidentified
MATKRAHAPRNQRAVLNRINYNVAGIDLSSEDMFIAVIEKNVCQFSTFTKGLEDAAVYLKSEGIEKIVMEATGVYWIPVFEYFEKQGFNINLVNGAHAKNVPGRKTDVLDSEWLRELHTYGLLRASFIPDEKIRELRYYVRLRDDHISMGATHINIVQKNLDMMNIKLHKVIDSIMSVSGLLIVQAILDGERDPERLWNLCERNIDNKKKDGLICSLKGNYREEYLFGIKQALEMWQHYQELQKQCDAEIEKILRKMTSDIEEPKNQGTEKPIKKRNKPVIEDFHLLMTKLTLGKDTTAIAGINDYSALKIIAEIGTNLDKFKNEKHFTSWLGLSPSAHQSNKKKRKKGRRHCNRAGMIFRQIAVNVGNGKHTALSSFYKRIRARAGKMVAIKATARKIAIYFYNLLTKGVQFVEEGIRRYEQRYTEQQEKYLQRKASEMGYMLVKA

SEQ ID NO: 266603 - protein, 384 aa, unidentified
MKKTKGTLSKDDNRKGIILHLAFDLGHSKWKLAFSDGEKKRTVNIEARDLEAFQEEIRKARIRFGLERDAKILSCYEAGRDGFWLHRYLLSCGIENVVVDSASIEVSRRKRRAKTDRIDAMNLLKMLLRYHGGEKGLWSVVHVPSVEDEAGRHLHREMDCLKKERTMHRNRIKSLLIQQGIAVKNPSRMKFLEDLKTFKMWDGHALPGDLITRIMREHGRLRMVEDQLYSLTREQATRLEEADTVSLRKVSQLMTLRGIGMNSSWKFVMEFFGWRNFKNRREVGSLAGLTPTPYDSGGKRREQGISKAGNKRIRTLAIEMGWVWLRYQPQSKLSRWFLKRFASGGSRMRRIGIVAVARRLLVDLWRYLQYGLIPEGAVLKAAGS

SEQ ID NO: 266604 - protein, 344 aa, unidentified
MMVIGIDAHKRTHTAVGVDQTGRQLSTKTVGTTSKDHLTLLRWATEQSGDRLWAIEDCRHLSRRLERDLIAAGERIVRVPPKLMANVRDGARTYGKSDPIDALAVARAALREPDLPEARLDGTERELRLLVDHREDLVAERTRIIARLRWHLHELDPGWKAPTKMDRTSAFDKVQAHLSNCSGLVAELAARLVEHLRRLTVEIDELKGEITSRTAVLAPSLLAIPGCGPLIAAKLVGETARVDRFHSKDAFARHNGTAPLPVWSSNRARHRLSRTGNRQLNAAIHRIALTQARCHPDARALLARRKASGDGGMEALRILKRRLSDVVFKAMAADLSLMVAAAAA

SEQ ID NO: 266605 - protein, 310 aa, unidentified
MDRNIVGIDVSKDRLDVEVRPSGEAFAVGRKAVGLEQLIARMLELSPHVIALEATGGFETVVAAALGAAGLPVVVVNPAQVRAFAKAIGQRAKTDPIDAGVIAHFAEATNLEPRPLPDEQTRLLADLVGRRRQIVAMIGAERQREQRVTAPRPRKSIARLIKALEKELASLDADLDDAMKGSPAWRAKEELLTSVPGVGPVITRTLVAELPELGQLGHKQITALVGLAPFTRQSGKWRGKSFIGGGRTAVRAAIFMGAMVAKKHNPVLKAFFDRLVAAGKPKLVALIAVARKLLIILNAIVRDNRPWQTA

SEQ ID NO: 266606 - protein, 428 aa, unidentified
MEEITEEPVQVVARVCAIDIGKAGLVACVRVPHASRPDRRVQEVREYATVTPALLALADWLRVERVELVAMEATSDYWKPVFYLLEAEGFTCWLLNAKHVKNVPGRPKTDRLDAAWLAKVVERGMCRPSLVHPKPIRQLRDVTRYRRSLVREQTREKQRLEKTLEDAQIKLDSVISDLHGVSGRQMLQAMIDGQRDPKVLAELARTSMRRKIPQLREALTGHFDDHHAFICATMLRRIDALGDDIAELDARIEQMIAPFAQAVAKLDEITGVGVRSAQETVAELGVDMSVFPTAAHLVSWAKFSPIDAKSAGRKKGNSTGKGNPWLAGALGEVVAGLARTDTFLGQRYRRLVRRRGKKRAIVAVGNSVLTIVWHLLSDPNARYQDLGPGYYESRISKQRRQRDLIRQLEQLTGQKVNLQPQPGLPAAA

SEQ ID NO: 266607 - protein, 398 aa, unidentified
MTSGFGVFLGLDVGKGEHHAVGLDPTGKRLHDGPLPNSEPKLRALFDKLAAHGRLLVVVDQPATIGALPVAVARAAGHQVAYLPGLAMRRIADLYPGRAKTDARDAFIIADAARSLPHTLRPVDVGDDALAELDVLVGFDDDLAGEATWIANRIRGLLTGIHPALERAIGPRISHPAVLEILSRCGGPTGIAKAGRRKLTAIASAHAPRMGDKLIAAIMTALAEQTVTVPGATAADSVLPRLADSLKTVLQQRKQVAAEVEEILDAHPLAGVLTSMPGIGIRTAARILLEIGDATGFKSSGHLAAYAGIAPVTRSSGSSIKGEHPARTGNRKLKRAFFLAAFAALSDPTSRTYYDRKRAEGKKHNAALICLARRRCDVLFAMLRTKTFYRAPETAIAA

SEQ ID NO: 266608 - protein, 325 aa, unidentified
MRQPQSAVKPKTQVALDVSSQMLDVHVWVDKKAFSVPNTDEGFEQLSDVLFAYDVTMILMESTGGYEDNAACYLQLQGYDVVVINPRHARRFAQSMGKLAKTDRIDAAVLAHMAFMIDSGPDRDRYIKPVTNEQRKQLSRMSSRRRQIVDLITTEKQRLTHSDAYMRASINAIVSLLRAELKRIEADIIRYVKKNFSELATRLLAIPGVGMQAVTVLIADLAELGYVNRRRISALLGVAPFNHDSGKFKGQRRIRDGRQSVRNVLYMGIISATRFNPVIKTFYDRLIGRGKPKKVALIACMHKLVNIINAMMRTGKPFDMTLHGV

SEQ ID NO: 266609 - protein, 339 aa, unidentified
MESFVGVDLHKKVSQLAALREPKPASQLRFPNNTVTVEKVLKKLPQGSKIALEATGSWWWFVELAQKTGHEVVMSHPKQTKAIASARLKSDKVDALMLAKLLKADLLPTVWIPPATQRYVRELLTHRARLVRQRTAVINEIHALYAKRNIDPGMIFHRVRPPAFMAKELSGYGPRIVEEDAELLAFFNRQLRGLDNELQKIAEEDVESKRLMTIPGIGPLSAVAVNCWIGTIERFSKAKKLSSYFGLAPRVRQSGDRERHGHITKEGNRMVRSLLIQAALWHIRLGKGASRKHYLGVLKRRGKQIARVAAANKLLGIMFHMMKGRIDYQEFLRRGSSAQ

SEQ ID NO: 266610 - protein, 340 aa, unidentified
MQISTIGLDIAKNVFQVHGIDAAENVVVRKQLRRGQVIAFFEALPPCLIGMEACATSHYWARELAKLGHEVRLMPAKDVKAYIKRNKNDAADAEAICEAVRRPTMRFVQVKSAEQQAQLMQHRARDLLMHQRTQLINAMRSHLAELGIIAPQGREGVKVLLAIISNEDNKHLPNDARASLIVLAAQLQALQTTIGAIEKRIVVQHRANKESKRLQTVPGIGVIGASAIAATVTNPKIFRSGRDFAAWIGLVPRQMSTGGKPKLGPISKQGDRYLRRILVVGAVSVLRRANLHPEKFPWITQMLSRRPFKVVAVALANKMARLAWALMMSGKTCRAARFAA

SEQ ID NO: 266611 - protein, 351 aa, unidentified
MVYQNYWVGLDAGHLETAVCLVDTDGQIIFEAICETKSGPIRDILRRHGVEAVQRITIEAGNGTQMVRELMSFGFPVQVVDVRKSSKFLAIRRQKTDVHDARGLAEMGRIARTMGSSVYLKPLEHQNIRSLMNVRRTLLKNRTRTDAVIQSIIRLHGGDIKLLTGQGALLAEVKNQIRLMKREGLEIGIDLHPIVEIAEALRVQISVLDRQLRDLASSIPACSSFMTVPGVGTIVALSFYSAIGDPNRFKHNRDVGAYLGLTPTLHQSGITSRRGRISRHGNKLTRMHLITAATVILCRIETESHLRTWGLRLANRIGLLKARVAVARKLAVIMLSMWKSGLAFRPFGSFS

SEQ ID NO: 266612 - protein, 411 aa, unidentified
MEVIHARCAGLDISKKDAKVCVRVAGAGRRKTVETVTTWGSMTSQILALREHLIAERITCAVMEATGDYWKPFYYLLEGAGFEVLLVNARHVKNLPGRKTDVADATWLAQLGAHGLVRGSLVPPEPIRQLRDLTRARTAITRERSREVQRLEKLLEDAGIKLSAVASDILGVSGRAMLESLIAGNRDPAALADLAKRRLRSKIPALTEALTGRFTDHHAFLARVHLDLIDQHTAAVADITARIEATIKPFHWFRDLICTIPGISTLTADVTIAETGADMTRFPTAGHLASWAGTTPGNNESAGKVKSSRTRPGNPYLQGALGAAAMACAQNPVTYLGARYRRIAARRGPQKANVAIQHSMLIATWHMATNGCLYHDPGADYFNQLHPERAAKRAISQLEAMGYHVTLTRAS

SEQ ID NO: 266613 - protein, 443 aa, unidentified
MARKNQKRFEIIHHDCAGIDVGSREHWVAVNPDRADPPVRKFLTFTDDLIALADWLASLQIKVVAMEATGVYWIPLFEVLDARGFEVYLVNSRATRQTSGRKSDVLDCQWIWQLMTHGLLSGAFRPADEVCSMRSLVRQRANKVADQAKTINRMQKALSQMNIQLANVISDITGVTGMKILQAINHGERDPHALAALRDRRIKADHATIARSLHGNWRVEHLHSLRQELACYDFLETQIADCDHAIAQALGLLPMRQEEVPAARKVLRSAHRSVTEQTVLHQALGRVMGVDLTAIPTIGVDTDLVLASELGPDLSRFPTSQHFCSWLGVAPPTRISGGKSLPGRGPKVINRAAQALKQSASNARNDKSFIGASHRARLSRMDTGCAVKATAHQLARLIYAMLTKGQPYVEQGLEAYEEKSRSRQLRALERKAHKLGWRLEKVG

SEQ ID NO: 266614 - protein, 344 aa, unidentified
MRNITTIGLDIAKNVFQVHAEDANGNTVFNRKLRRVELAAFFGKLPPCTVAMEACGSANHWARTITARGHEVRLLPAQLVKAFIPRGKTDANDAIGISEAMKRKDIRFVPVKSAEQQGAAVVLRTRSLMVRQRVMAVNAVRSHLSEFGVIGPVGIANVGKLMAALDQLDESIIPPAARFALNEIREEITRLDDRIDRIDREIAAHAKRDEDIQRLLTIPAVGAITASTIKALVPDPAGFKSARHFAAWIGLTPKANSSGEKIRDGHISKMGNRELRSLLFLCSLSAIRVARRADTMLPWLKNLLKRRPVKVAAVALANKMARIVWALLTKGGTYNPALPDATHI

SEQ ID NO: 266615 - protein, 347 aa, unidentified
MRFYTSQHKFYCGIDLHARTMYLCILTQEGKVVLHRDIKTKPDVFLKTIEPYREDIVVAVECIFTWYWIADLCSQENIPFVLGHALYMKAIHGGKAKNDKIDAYKIATLLRGGMMPMAYVYPSEMRSTRDLLRRRNHLARKRAELLAHVQNTNHQYNLPAIEKNLGKKGNREGVAKRFPDLCVQKSIELDLGLIDHYDQLLHRTEHEISLIAKEYDADSYFRIRSIPGIGRILGLVILYEIHDIDRFPRVQDFVSYCRLVKCAKESAGKIIGSSGKKIGNAHLKWAFSEAAVLFLRRNPEAVKYRAKLERKHGKAKSLTILAHKLARAVYNILKRKEVFHPKVFFAK

SEQ ID NO: 266616 - protein, 374 aa, unidentified
MYYVGLDVHAQRSSMCILDDNGRRVKHLEVKGAWPRLLEVVDQQVPKPFVICYEASCGYGHLYDQFSRRAERVRVAHPGQLRLIFRSKKKHDRVDGEKLAKLLYLDEVPVVHVPDVDVRAWRGLINYRRKLVARRAAVKTQVRALLRGLGITVGVTGGLWTKKGIAWLTGELALGSAADRVRRDVLADDLAHLEAKVATVEKELDRIATDHPGVALLRTIPGVGPRTAEAFVAHVDDVGRFARVKQVGSYFGLVPCQDASADRNRLGHITKDGPAGARWLAVEAAWQGRRRSPRIRAYFDRVMRNDPARKKVALVATAHYLVRVMAAMLRSGEVWREAQQQQQQPKQQQTSALDQQVAATTKETKAKAKTSDKE

SEQ ID NO: 266617 - protein, 343 aa, unidentified
MKSTTIAVDVAKSVFEVAISQRPGRVRERHRLSRARFARFMGEHHPATVLLEACSSAHYWARRLQDLGHQVVLLPPHQVRPYVPRNKTDRTDAKAILEAYRNEEIHPVPVKSVDQQTLAALHRIRATWFATRTARINTVRGLLREMGVVIPVGAHHVVPQLRTLIEDAESPIPHALRESLHGSAEEIRRLETLIAGTERELRSLARQMPLVTRLQTIPGIGLLTATALVAFVGDVKRFPSGRHFASYLGLTPRERSSGNIRRLGRISKRGDTYLRMLLTHGARSVLWSGRRTKKPEPLRAWALQLQDRRGHNKAAIALANKLARIIWAVWKEDRMFQSTPRAA

SEQ ID NO: 266618 - protein, 355 aa, unidentified
MSQTPNTAIAVIGIDIGKNSFHAVGHDARGAIVLRQKWSRGQVEARLANIPPCLIGMEACVGAHHLSRKLASLGHDARLMPAKYVRPYSKGQKNDFNDAEAIAEAVQRPTMKFVATKTAEQLDLQALHRVRERLVSQRTGIINQIRAFMLERGIAVRQGIGFLRTELPTILATRTDALSPRMLRVIEELAGDWRRLDQRIDGLSGEIEALARQDQACSRLMTVPGIGPIISSAMVAAIGTGEVFSKGRDFGAWLGLVPKQISTGDRTILGKISRRGNRYLRVLFVQAAWVVLVRIKNWERYGLKSWIEAAKRRLHHNVLAIALANKLARIAWAVLAKGRAFELTRTDDAGVVRPA

SEQ ID NO: 266619 - protein, 401 aa, unidentified
MVNVGIDLHKTQFTTCARIGGGEVFGKYPTTEEGYQAFAKEAAEWRKSGEDVRAAVESTGNTRYFKNRLEAEGIGVTVINPQKMKVVTESVKKTDKHDAATIAEFLEKDMLPQSRLCSRESEQLRRLLKARAALVRAEVVMKNQIHALLSSEGKEDVKSADLQSKRGRKRVLDALKQWENGLVAQPLLETIDRLAENVKEIEQQLRSLTDGDRMVELLKSIPGCGEIGAWTIRAYTDDIHRFSSAKKYCAYAGLVPWVQNSNETIHHGKITKRGPKELRTALVQVVMGLRRMKAKTLAWRLMQRYEAMKQGKGSGKAIIAAARKMATVIWHMLTDDVEFDLGKMVDRKLAKKAEAMSKSEVQVQNALVEKQENPIRMRKEKKEVKKTGVASKKNNIKKKVG

SEQ ID NO: 266620 - protein, 341 aa, unidentified
MSYLGVDLHTNSFTVCRQTNHGKRTIMTFALSQIDKFAKTLRKRDKVAVEATGNTSWFIEQIDERVKKVVVVDPNKFKVILKSVKKTDKNDAKTLAYFLSKDMLPEARMKTKENAQLHSLATTRDKLVRQRTALINKIHNVLNSEGIKFKKETLGTEKGLKAVFTYDWDEVVQIELEVLADQIRHLKNSIKKLDEQISDKGKGLKGHDNLVSIKGIGSNSATILMSVIGDINDFATPGKLAAYFGIVPRVRDSNETVHHGRITKHGSKLARTTLVQCTLAAKRFSPYLRQYYERIKSHRGSGKAIIATARKLLGIIYDTLKNDWVFEDFPNFVLASSCVKK

SEQ ID NO: 266621 - protein, 332 aa, unidentified
MKPSPPLGIGIDVSKNTLDVVFLFPEKHVHFVVPNNRSGIRTVIKKSSSFSSPLAKIVLESTGRYHLLCALLLSSAGLDVRVINPLLARRYLSSSVRKVKTDKADALVLAQVAQFEKRLPKPFSATKTDILIRQKMGLLASLEKQLQMFQAVLSNYSDFQITLEGSQSTAERNLLDSLKTIKKQKELLETEISQLIIHQKNSSLPRDILQSIPGISTLTASLLLFLLDASCQSPKQWIAFCGLDVSVRQSGVWRGRGKLTKRGNPYVRKRLFHSAWGAMMTNPDFRSYYDSLRQAGHSYVESLLIISRKLLRIAFALLQKNQLFDSSFPLFS

SEQ ID NO: 266622 - protein, 321 aa, unidentified
MTYIGIDVSKDSFVVAYSPEKNSKTKTFKNTTKGIREFIRTISKDEHHCVMEATGNYSALLVYLLSEAGITTSLENPLKVKNFARAMLSTIKTDEIDARLIALYGEKMQPVPYKLRSDAILTLKQKRTVIRQLKKQLIATRNLKGSMEALPFFDAKCRKSVEKTIAFLEKQIKDLEEDLSNLARSEYKKQMDLLTSVKGIGITLAAALIIATGGFTYFDNAKQLTRHLGLSPTYQQSGTSVNFKGHINRNGDSSLRSQLYVAAFSSIRCNTECRACYDRLRSKGKPGKVAVIAVANKLIRQAFAVVTQEKPYVDGYVSSKK

SEQ ID NO: 266623 - protein, 414 aa, unidentified
MEIVHGRCAGMDVSKRDAKVCVRVAGRGRRKTVETVRTWASTTNAILRLREHLITEQVTLVVMEATGDYWKPFYYLLEDAGFEVMLVNARQVKNLPGRKSDVSDATWLAQLGAHGLVRGCFVPPAPIRELRDLTRARTMLTRERGREIQRLEKVLEDAGIKLSSVASDITGVSGRLMLQALVEGQRDPARLAELAKRRLRAKIPALTEALNGRFSEHHAFLTSMYLEVIDQRTRQIEELNARIEVAMEPYRSFCGLIGTIPGIGPRCMEVIVAETGGDMSIFSTAAHLASWAGTCPGSNESAGRVKSTATRPGNAYLKGALGAAALSVSHTHGTYLSAKYKRIAARRGPKKALVAVEHAILTAIWTMAHTGALYDDPGADYFTRRDPERLKRHALSQLQRLGYDVTLNAAAPTA

SEQ ID NO: 266624 - protein, 438 aa, unidentified
MSNKVIFNLDELFISVGIDVGADFSWMSIALPNQQFVGKPYKILHNSIDSLTTAVSKIKEAEELYSLESRIFLESTGIYHYPLFCYLRDKGFNCSVINPIITKNSTNINIRKVHNDRFDSKKAALVGLKPDLKVSLMPSDLALNCRNLCREYYDLMDNRNAYVNKLQGELRMAFPQYLGIFSKVTINTSLTLLETYTSPSAFLKADKQEIIDIIKSTARFGLTYAQNKYNAIIQAATDANQFGYIIDSNIKRIRLYISFIRKYDEEINSILESLHELVDANEDSDFVKQIHLIETFKGAGFLSAVSIMGEIGDFSAFSKPKQLFAYFGLDPAVKQSGKFEGTKVQMSKRGSAIARRVIHTLTLQSISISRNREAKNPVLREYYLKKCDSKPKLVAMGAVSHKVCNMIFAILRDNKPFKIIAPQEHIKQYNSAKCDIAA

SEQ ID NO: 266625 - protein, 346 aa, unidentified
MNQIARIGLDIAKRWFQIHAVDETGREVLNRKLPRDKILGFLAALPDCDVALEACSSSHYWGREIGRLGHRVNLISPNYVKPYLKRGKSDAHDARAICEAALRPDMRFVRVKSEEQQAALMQHTSRQLLIDQRTAVANSIRGQLAEFGVIERKGIENVGELVRMLDENDEELAPIPAGALMVMKILADQLRAVDAHVSAIDEQIEAWQRESAAAQALKTIPGIGALISAALAAHVPDPSIFRSGRDFAAWLGLVPRQNSSGGKERLGRITKQGNPYLRRLLVLGATASLRWLDKRMDPLADWTKRLLQRRPARLVTVALANKLARIAWAIMTTGELFRSVGATATT

SEQ ID NO: 266626 - protein, 321 aa, unidentified
MPTPVLIPLLNPNEPEALLATLSVVEGQRVEIGDILCALETTKAQVLFVGMEPTGHYFENLARHLRERYPLVRLVNSFAVKENRHQHSQRSLKDDDLDVASIADLVLRNACFPYQPLDGHYLQLQEWVRYRASKVKMRTSLVNQLTVHLDRIFPGLVRPRREGLGDHPALFANFWQNQTAQHLIRLCPNPRDLVQKRPEQLVDLYHARGWRMGIKTAARIIGFAEQVLLPDAETIAARLPLLEADLQLLDSVNQVIAQAEEQITEHLAHTKGQILTQIKGIGDLLAASYVAGIGNPGHYEHAGQVFKRSGLISGRNDSGLH

SEQ ID NO: 266627 - protein, 411 aa, unidentified
MLSVGIDWADDHHDVCCTDDTATTLAQFQIAHSTEGFAALHAQIAQHQADPAAVLVALETTRGLLVYDLLCQGYQVYAVNPKAVNRYKDRHVLSAAKDDRLDAMAMAHLLRTDRHRFTPLAPAPEHYRLLDRLCLDLRKLIDDKTRLSNQITSCLKEYYPQAVGLFRDVASPITLAFLQAFPDPETVQQTDRNAFAAFFRAQHYTQPQRVEALYERTHAPAPVADPVVVRAAKIRLAALVDQLAIVRTHQGTYEHTIPTILEEVPEAQPLATLPGIDTRLIPELVAALGPHRPEEPKRFAAASDLAKLSGCAPITRASGKRRTVLRRRACDKRLRRTFYDWAMASLSWSRWARAYYDHHKAQHQAHATILRGLGQKWAKIVYAVWSSGAPYDEARHIEQLKRHKVVWALSL

SEQ ID NO: 266628 - protein, 392 aa, unidentified
MQGYDVVVGLDVGKSFHHLYALGSDGSELANRRIDQSERALTETFTAIKEYGSVLVVVDQPNNIGSLAVACARRSGCSVAYLPGLAMRRAAGILPGDAKTDERDAFVIAMTAHSMPQALRAMPEESALRADLIALASCDDDARCDMTRESNRLRSHLVEAHPAFERALGSDVTSPFALKLLARFGGPWGMRKAGTGTVMRWARAQKRPALKLLERLLASLEEMVETPPGAHLREQVGIPACARRIAELAAIRQDIERRAIHLLKDCPTFQLLTGMPGVGTKTAIAFIIHVDIACFDSASKLASYAGIAPKTHQSGTSIKGESAGRAGNKALKNALFLSAFASLRTDLLSRKYYDKKRAEGKKHNAAVICLARRRLKIMFAIVRDQRPYRLAA

SEQ ID NO: 266629 - protein, 376 aa, unidentified
MTQSNGMDSSSPNRHLSAKLVSDTTSERKGGVTMKLSRVGIDLAKNIYQLHGVDRSGKTVWKRRLKRHQWLKVLLDTAGPECEIGMEACAGAHHWGRELQSRGYTVKLIPPQFVKPYVKSNKSDAKDAEAICEAMSRPNMRFVTVKRVEQQDIQATHRIRAELMTQRTAKANQIRGLVAEYGLVAPKHLSSLRAAIPCWLEDAENGLTGDFRRLLHGVWEDLRLLDDRVGEMDKTIKRLADNNEDCVRLQQLRGVGPMISTAMIATVGDARQYHKSRQMAAAIGITPKQHSSGDKHRLLGISKRGDVYLRTLMIHGARAVVARATYKDDRLSRWVTNIANKKHPNVAAVALANKTARMAWAMLRNKADYDPDFAMS

SEQ ID NO: 266630 - protein, 359 aa, unidentified
MEAQRKALSFKGQNIYIGIDVHLKSWSVTLMSEATQLKRFSQSPDPDALYAHLVRNYPEAEYHSVYEAGFCGFWIHYRLVGLGIHNIVVNPADVPTTTSEKLRKTDAVDSAKLARSLRAGELKGIYVPGSESLETRSLIRLRDSITKDQTRLKNRIKSHLRYLGIEIPEEFSGPGRCWNRRFVVWLKGAETGTAYGRQTLDFLVRQYEALRGQRLEMLRAVMALSMTERFEKPLENLMTVPGIGQLTGMSLLSEIDDIRRFKSADQLAAFIGMIPMCHSSGEREGVGDITVRRSARLRSVLVEASWVAVRQDPALSMAYGNYCKRMAPGKAIIKIARKLVNRIYFVMKRNQPYVKRVVA

SEQ ID NO: 266631 - protein, 419 aa, unidentified
MFKIFYKNCCGLDVHKTWIYACIGITDADGKTVYHEARFSSFSRGLRSLAEWLQKYSCKLVCMESTGKYWIPVFNILEKTCDVTLAHPKYTKPQKGNKTDRKDAKWICDLFMCGMIKPSFIPPAAIRQLRDLVRYRAKLTNMLASEKNRAHNCLTVSNLKLDDVFSDIFGKSSRSITEYILEHPGETFDVAPFVDGRCKTPIEEIQAAVDGSVSKEQAAKLRQCLEHIDELTAHKQKIEEEILQIAAPFSDYLDLLRTVPGCSSDKMTAVTILSEIGYDMSVFPSSKNLTSWAGCCPRNDQSAKHVKSTRISRAGAWIKPLLVQISNALIRSKKHPEFSERYRRIKARRGHKKAIIAICRMLLTAIWNILSKLEPYTPDGFINDRPVDKKKTMSTAEAIKLLKSRGYIITDLPGDTVTA

SEQ ID NO: 266632 - protein, 354 aa, unidentified
MQSQIIATPKLFIGMDIHKKSWSVHLRTDLFDHKGFSMPPQPEKLSDYVASHFADHEVSLTYEAGCCGFSAARFFLNMGWTVKVVNPNDVPRSDKQLYQKTDKLDCRNLCKQLQQEQLHSIYIPTEPEEQLKSLLRQRNQVVKQLRKAKSHIKAMLLFHGIAIPDQFDNPNWSRNFLTWLNTIQWSHSTGTACMNSKLRILAMLKNEYLQTSNELRAYCRRHHKKDYYLLKSIPGIGGLLAAAILAELGDIRRFNNEREFRSCIGLVPGIHQSSETAIKMSLTPRCKALLRSYLIESSWVAIRTDPEIQAYYRKHAGKNSKNIIVKVAHKICCRILSVIKNETPYQINYKSTKK

SEQ ID NO: 266633 - protein, 326 aa, unidentified
MNDTGRIVREVKVASEPEALLAVLKNPAYHFERIGLEAGPLSQWLFSALAEAELPVVCVETRHMQAVLKAQINKTDRNDARGIAQMIRVGLYRPVHVKTLRSQKLRMLLTHRKLLQSKAIAIENDLRGTLRNFGLKVGMVGKVRFEARIQELVENFPDLSVLVEPLLIVRRALREQVVILHRRLLAIVREDEVCRRLMTTPGVGPVVALTYRATVDVPARFRKSKSVGAVFGLTCSRYQSGEIDWSGKISRCGDEMMRTMLYEAAQSMMHSKKWSWLKAWAMQIARRRGMKKAIVALARRLAVIMHRIWVDGTEFRWTREQAAAAA

SEQ ID NO: 266634 - protein, 347 aa, unidentified
MKVLIGVDPHKASVAVAAIDEALGELLERASFPQDRTGLRALERWAKRFPERRWALENAGGLGRHLAVRLAASGESVVDVPPKLSARVRVLSSGNARKNDGVDALATALAASPNECLAAVDPEAASEALRLLSERREDLVAERTRALNRLHALLRDLVPGGVARTLSANRAARILRGIRPKGGASARLRRRLASEVLRDIRTLDRKIADLNGRIEAEVEASGTTLTEIFGIGSILAARIIGTVGDVTRFPTKAHFASYSGTAPLEASSGEVVRHRLSLAGNRHLNYALHMVATCQARSDARGRVYYRKKMAEGKSRKEALRCLKRRISDAVFRSLMADSQAPSRSAA

SEQ ID NO: 266635 - protein, 412 aa, unidentified
MDVLVERCAGLDVHRDSVMATVRIPGERRRQRERHTRAFATTIAQLEALGDWLAGFGVTLVGMEATGIYWRPVFEVLESRFECWLLNAQHLHNVPGRKSDVIDSAWICELVEHGLVRPSFVPPLEIRRLRELTRLRKAEIQERTRTIQRLEKLLQSVGVKLTSVASQAYSVSARAMLEALLAGTTDPNELAELARGRLRAKIPQLREALANRFDLAHHGVLVAQLLAHIDALDQAIAALDERTAAATEPYAELIELVSTIPGVKQRTAQVLIAECGTDMSVFPTVAHFASWARICPGTNTSAGKHRSGKTLRGSRWLREALTEAAKAAARTKGTYLASHYWQIRGRRGEPKAIGATRHDILVAYYHIVRDRLPYRELGPDWLARRYSPEHRARRLLRQIEALGFNATIEAAA

SEQ ID NO: 266636 - protein, 428 aa, unidentified
MTVRDCTSVKEFWQLKKEIRGSEKHLIVGIDVAKDEHKAFFGTAYGKTLLKRLIFKNDIEGFENLLSRVKALKVKHSLKEVVFGLEPTANYHKPLGDFLIKCGHMVVLVSGVSVKRNRELLDGRWDKNDTKDSANVGDLISQGKCLYYEYTPVLFRELRSLLSLKRRLKKQEHGLRVRLRNNLLAQYFPELDRYYGQWEKEILSVVRWCLDPSVIAVLEYDQFVNLIAPGSKNIRQQGRFEWIWKKAVDSIGCDVGEGVEFEAKVMVEELRHIREVIEETNAKIKDICMRFPEYKYLLSIPGFGPDISSKVLAYIGNPFRFNNQNQVLKMAGMDLNAQRSGKSSETAVPVISKKGNAHLRYALYQAAFVASVRNKYFIVYYTNKLMGREKEKGIKTKMRVKLAAKMLVIGWSLMKKKEPFDPAYLRID

SEQ ID NO: 266637 - protein, 385 aa, unidentified
MKKNNIAKQTVRKPHHRKTSKARQAERGSSAGLVKQVIGVDLGDKSSRYCVLDGEGTVQVERSVATTRQGFSQVFAKMVRSRIALEVGTHSPWVSRLLESLGHEVIVANARRVRLISESSGKDDRMDARTLARLARVDPALLYPIRHRGEQAQQHLAMVKARAGLVDGRTALVNTARGLTKPFGERIGKCDADQMRVDKIEKLAPGVQAMLRPLLVVVEAMTEQIQSYDKELAEIARKHYPETALLEQITGVGLLIALTFILTLDDANRFQHSRDVGCFLGLRPKRRESGQSQPQLGITKEGDVYLRRLLVQGAHYIVSKRGPDTDLKRWGLKLAGSGDKRAKKRAVVAVARKLAILLHHLWVSGEEYEPLRHSRAQAIESAPAA

SEQ ID NO: 266638 - protein, 456 aa, unidentified
MAGSKQKRRKSAGQLATVYPLAAGIDVGATAHVVAVPPDRDARPVRTFRTFSGDLHRLAQWLKEVGITTIAMESTGVYWVPVFEILEAHGFEVLLVNARDVKNVPGRKTDVNDAQWLQQLHQHGLLRGSFRPRDGVVRLRAYLRHRERLVEYAAAHIQHMQKALMQMNVQLQHVVTDITGVTGMRIIRAIVSGTHAPEKLAEYRDVRCAASPQTIAAALTGNYRSEHIFALRQAVELYDFHQAKIAECDVEIEAVLRRLNQEREVPEKPLPEVRHAKGRNEPRFDVRPALYTLLGADLTQIHGFGPYTVLRLVAECGDDMSKWPSAKHFASWLSLAPGNKISGGRLLSSKTRRSSNRAAALLRIAAVNIGRTQTALGAFYRRLAARTGKAKAVTATARKLAMLFYKALRFGLTYEDPGTSYYEQRYRQRVLHNLQRRAQSLGLTLVAKTTTTEAVS

SEQ ID NO: 266639 - protein, 344 aa, unidentified
MDHFAGLDVSVKETSVCIVDEIGKIVCEVKVASEPDALLRVLRNPAHHFKRIGLEAGPLSQWLYGSLAEAGLPVICVETRHMRAMLKAQINKTDRNDARGIAQMIRVGLYRPVHVKTLLSQKLRMLLTHRKLLQAKTIAIENDLRSTLRNFGLKVGMVGKVKFEGRIKELVENLPDLATLAEPLLIVRRVLHEQLSILHRRLLDIVRNDDVCRRLMTVPGVGPVVALTYRATVDVPARFRNSKAVGASFGLTPSRYQSGESDRPGAISRCGDEMMRVMLYEAAQVMLTRTSKWSWLKAWAVRIARRRGMKKAIVALARRLAVILHRIWVDGTEFKWTREAVPAA

SEQ ID NO: 266640 - protein, 337 aa, unidentified
MEIHVGVDLHQRFCYATALDASGKCVAQRSMVNETEVLQGWLRSLPGTTQVVVEACGFWPAFARAVAPVAGRVVMVHPARVKAIATARLKNDRVDSETLAHLSRCDLLPEAWMADEATQQLRLRVRLRITLGRERARLKNLVQAVLHQQGLRKPVTDLFGKKGRQWLGEVEMSPAGRVVVETYLQLIAVLEILIAEQEQALSELATEDARARWLQSVPGIGAYSAMVIVAEVGDVARFRDKKALASYAGLVPRVRESAGKRSYGGITHAGSETLRWIMLQVAQVAVQHSPAARAYYERLKQKKRAQVAKVALARKLLTCCWALLRHGVCYDDEVFAA

SEQ ID NO: 266641 - protein, 411 aa, unidentified
MLSVGIDVSKGESMVCALNQFGKVVLTPRRYKHVKSALGSLVERLRSFGDNDIRIIMEATGIYSLPVAKYFKEQGFFVAVINPYAMSRFRIGGQGSLRNVKTDKADSMTIAGYGRQCWDTLMEYNPAAETYWKLDYLLRLYQKILAYRVSILQELYGIIEQTMPGIKEIGIKSPQVSTAKDILLDFAKTFWHYDQITGMSEKKFISRYLVWAKKKGHRPDVGKAAAIYAMAKDGIPCLPADPIVKQSIHTNIEALERVGTTLRDILSQMSGLAKTLPEYDIVRAMGGVGDVLVVKLIAVIGDIKRFRKAKSLVAYAGIDPPPYSSGKFEGNKRRISKRGSTLLRKIGYEIMKSLTRNKRPEDGAVYDFIRKKEEEGKAKKQAKIAGLNKFLQIYYARVKSIYKKTMEGKAA

SEQ ID NO: 266642 - protein, 355 aa, unidentified
MEYFKDIKNFVASKHVFCGIDIHFGHWNLCFVCDGEVVEKAKIPNSYETLNMRLSKYSQARKISIVYEAGFSGFWLYRRLTSDNYDCIVTPPSKMLKSENKVKTDKRDAQKLAFYLSAGLLKVVYVPPADIESDRRVVRRRAQLVKKQTRAKNHIKSFLHLHGLKTPEEIKTNWSNLYLAWLEKLHFDHESDNFTLSQLIKNYRYIRENLAEVTRYLRMFSRSEKYQEDYKRITSARGVGLITAMTFLLEIFDFGRFAKEEDFSSYLGMTPSQFSSGDKVRLGHITRQGNSNLRRVLIESAWTVIKHDPHLRDKYDRIRARGTNGKKAIVAVARSLAVRLRRCILDETEYVIGVC

SEQ ID NO: 266643 - protein, 349 aa, unidentified
MEKYIGLDVHSASCTAAVLDARGKRLGSHVIETNGQALVEFFGTQAGTLHVCLEEGTQAGWLVEILSPHVAEIVVAMVLDSRGQKSDEHDAFALAERLRAGTIETSVYKPVGSFATLRQLVKAHGMLVQDSVRVQNRIKALFRARGVRVVGSRVYSKKSRAESLRQLPASSRTAAELLLEQYDALCETRDRAHKELVAESHKHPVTKQLESCPGVGEVRAAQIASVVVTPDRFRTRQQFWSYCGLGIVMRSSSDWVQTPKGAWTRATIQQTRGLNRNHNSLMKHVFKGAATTVIQQHPDDPLHKDYQRLVAAGTKPNLAKLTLARKIAAITLAMWKTKEEYDPRKISKS

SEQ ID NO: 266644 - protein, 404 aa, unidentified
MGLDVHRDIIVACLVKGAVDAEPEAETRTFSTLIPEMQKLRDWVIEAECRNIAMESTGIYWQPIYEMLESCFDGEVSILVVNARHMKNVPGRKTDMKDAQWIATLLRAGLLKGSFIPDKTFRELRHLTRYRKSVVHDITAQKNRIDKFLQSSGFRFTAFLSDTFGASGRNIIRHLIERGSIDREALDKCLKTKTRNRIDEILVALNGSLSVHQRRFLNIVFLHLEDLEAHKHTIEDEITEEVLKHTDALNLLCSIPGIDVTAAAAIVAEIGTDMSAFPDSQHICSWAGLSPGNNESAGKRKSVHINKGNPYLKSMLCETAWIMASHRKLYLSGWYWKVKQRKGAKRATIALARKVLSIIYTMLKTGTPYSEECFEQRRQRCERKRANRMVNELQKLGYTVVAPD

SEQ ID NO: 266645 - protein, 412 aa, unidentified
MDIVHERAAGLDISKRDAKVCVRVPGPRAGTYTSTVTTWAANTHQILELREFLEREHVSTVVMEATSDYWKPFYYLMEETLPVMLVNAKAARNVPGRKTDVSDAAWLAQLAAFGLLRASFVPPEPIRELRDLTRARAIATRDRAREIQRLEKFLESSGIKLSSVVSDLTGVSSRNILEALINGERNPEVLAGMARGMLRSKIPALIDALTGRFKPHHAFMVRLHLDQIDTHTRVIEALTARIEEAMEPFRDAREALAAIPGVSRRVAEVIIAETGADMAVFETPARLASWAGVCPGANESAGRIKSAHILPGNKYLKGALGIAAMAAARSKNTYLAARYHRITARSGRNKALVAVEHSILTAAWHMLANGECYNEPGADHFTRINPTRAKNNAIKQLNSLGYDVTITPVTAA

SEQ ID NO: 266646 - protein, 339 aa, unidentified
MQLYAGLDLHSTNTYIGILDQEFNRIFKKRVANNLELILQTLNPFGSQLKGLVVESTYNWYWLIDGLMDNGYQCLHLANPSAIKQYEGLKHADDQHDAFFLAHLLILGILPQGYIYPKKDRPVRDLARKRMFLVQHKTAHILSLQSLIARCCAKKISSNEMRHLTLDDLQYLLEEEHLVLSAQSNLDNIRFLAQQIKQIEKTINKKIKLNKAFQNLLTVPGIGNILAMTIMLEVGDISRFAKVGNFASYCRCVPSQRLSAGKSKGHGNRKNGNRYLSWAFVEAAHLTRRHCQQFRRYYNRKVAQANTSLATKALSNKLARICYYIMRDNVPFREELSSQ

SEQ ID NO: 266647 - protein, 330 aa, unidentified
MKKDRITLGVDVSKKTLDICHWGTHDFIKIENNSSGFKQLAKWMRGKGFVSSQVFFIMEYTGGYEYRFLQYCESKGLSYTRKSGLEIKKSMGMVRGKSDKQDSFRIAQYGEEKAYMLEPSGKLNSTIFDLKQLISFRKRLVREMAGYKASSSERKAMYGKDAGKAILKVSKTMIDVYKKEIYRVEREILQLIESDESLNRNYQILKSVKGIGPVNAWMTIVYTENFKAFTDPRKYAVYAGVIPFEHTSGTSIRGRKRVSHMANKAIKQELNQAAKIAITHDKTLREYAQRKLTTKAYPLVLNNVKFKLILIMFSLIGRQEMYREDYHYAA

SEQ ID NO: 266648 - protein, 307 aa, unidentified
MSNSTTWVGMDVHKENIVTVSISGDSGTVLTRWETPNTAKGKERLAGGIAPLGKARCVYEAGPCGYDLRRFLDGKGIPCDVIAPSLIPARPGDRIKTDRRDAEKLARMHRMGELTAICVPTPAQEALRDLVRAREDANEDLVRCRHRLQKFLLRQGRRFEGKSWTREHWRWVRALTFDDANAGTVLAEYVLAVDQQLERVARLDARIEEEAQNPGIAPAVARLKTLRGVRTLTAMTIHSELVDLSRFASPRDLMSFIGLVPSEYSSGGKQRRGSLTRAGNAHLRRVLVEAAWHYRHPELPPVQWTRS

SEQ ID NO: 266649 - protein, 402 aa, unidentified
MTESPTRFIGLDIHKQYFVAVGVNQQREVVFGPRRASVYQLEDWVLRHLTKEDAIVLEMTTNAYLFYDILLPHVHSVLVVHPPHVALVTKASVKTDKKAALALAQLHAVGMLEGVWIPPHAVRDLRALLAQRAKMVRLSTMAKNRLHSLLHRNHLVVPGKAFSPEQREWWHDLNLSETEQVMVSSDLDTLEFAQKQIGKIEECLKKKSAEDPRIPLLIQLPGVAMLTAITILAAIGEIERFPNAKQLVGYAGLGTRVHDSGMKHSAGRITKAGRKDLRRAMVNAANHAVLHHVHWKRELQRLEPRLGRSKAVVAIARKLLVAVWHVLHEEVADRFADPHAVAVSFLGHAYRLGVRKHLKGKSALVFTREQLDRLEIGQELEVVRWGSNHYKLPPSQPLSQKE

SEQ ID NO: 266650 - protein, 370 aa, unidentified
MKQFIGCDAHKSYSVFVAMNEAGQASRAVRVMHDGDCMREFLEGLPAGSEIAVEAGGSYYWIVDAISGAGHVPHLAHPTASRRRIGGRHKTDERDALGCAELLRSGLLPEVWIPPRPLRDQRELLRWRMFLAVNRTQYKNRIHGVLRQYNLQIDVSDVFGVRGRQALTERLGELPPYTRESLSHQLRALELCEGQLEECERQLEAMLHDDPATQLLQTLPGVGRILSKVLALEIGAVERFGGAAQLASYAGLVPRAYNSGGHCWQGRCGKDVNHYLKWAYVEAASVVVRQFRRRAGTHVLRLYERVRGKTDSYGKAAVAVGRHLAEASYWMLMRQQRYQEPPVRRKPSRPAESRRCQGKRVLPLALEASR

SEQ ID NO: 266651 - protein, 379 aa, unidentified
MQTTAATEEYSEERMLFLALELGDALWKLGMTVGRGQKPRVRTIRAGDVCQLLEEIGAAKRRFGLPGLARVVSCYEAGRDGFWLHRMLVAEGIANVVVDPSSMEVNRRRRRAKTDRLDVHKLLRDLMRWHDGDRRVWSVVHVPSEEAEDQRHLHRELGALKGERTRHTNRISSLLLTQGIRLSVDREFLARLSTARTWDGSPVAPQLRCRLEREYQRWELVCAQIRELERQRRVALREGEGEGVQVARALYRLRGIGENFAWLAAMEVFAWRRFQNRRQVGGLAGLTPTPYDSGSSTREQGIGKNGNRRLRAMAIEIAWGWLRFQPESELARWFEKRFGSGNQRSRRVGIVALARRLLVALWRYLETGVVPEGAVLKAY

SEQ ID NO: 266652 - protein, 353 aa, unidentified
MAWLPLFPPGTFCQRMVGLNPTGGRVEGWQHDIRHDDRDRSGEERFPGHGALLFGEVKFRRKLSRQHFRRFMAGQGASIVVMEACGSAHCRSREMTKLGREVWLIASQYVRPFVKRQKNDAADAEAIVTAAQRPEMRFVTPKLEEQQTQALLFRGRERLVRQRTELVNALRSVLYEFGHPVPPGIGQLTRIEAMIEAENSDLPKLVRDECRDLLLQIAEKTQRIEVKSKQIGALAKITDTARRLQTMPGVGPMSALAVEAFAPPMESFRRGRDFAAWLGLVPRQHSSGGKERLGRISKAGQADIRRLLIMGAMSRLNWLGRRTIPERSWLSGMLARKPRMLVAIALANKMAST

SEQ ID NO: 266653 - protein, 422 aa, unidentified
MIKILNVGIDISLNKACCCLLSQEGEYLCPVFEVENNPTGFGRLKARILEATKERGFELIRMGFEASSMYGYHLAEYFKETSLPAEVKVYMINAKYIHRFKKAFPEKEKTDLADAQFVAEYLRFGKLPVEYEPDSLYLPLKRLIRYRYHLVKPIEREKKLFIANLFLKFPGWVQARPIKTLNKTSFDVLAEFSLDELTRMPLEELTLFVAQAGKNRSPDPQAIAAEIKKAARESYRIREDLSSSVTFILASIHRSITALSKALKELNRAIEAQSGGFVNPLISVKGIGPVYAAGILASIGDIRRFSRHDKLARFAGLVWKKRQTGKSESEETHMVKECDKYLRYYLVEAANSLRVHNEVFRSYYQKKHQEVKKHRHKRALVLTARKLVRLVFALLSKNQYYSQHRVCQSSKPGNIFNFQRAV

SEQ ID NO: 266654 - protein, 367 aa, unidentified
MRNSKVLYVGLDVHAEKTAVSVMERTGRDVIGERMLPNVNGALDRYMLELRKTGAEIQACYEAGFCGFELARRLRGLGIECTVAAPGMLPKMPSDRVKTDRRDARALARALRNGDVHEVVVPPERDEVIRDYLRMNEDRKKMLKQVKQQLLHFLHRRGLRYTEGGNWTAGHRRWLTALAFSDPIEKETLDEYYVQITELEEQCARFTVRIEEMAKEERYAEPVRRLKAFKGIETLIALSLIVEIGDFRRFATAERFMAFLGLVPSERSSGGKRRQGGITKSGNTHLRKLLVEAGWHYRSYLPVSRRLAKRREGLPAELVAYAHRAGRRLNRKFVRLLYAGKPSQVAAVAAARELSGFVWGAMTENVT

SEQ ID NO: 266655 - protein, 310 aa, unidentified
MEITVGIDVSKARLDVHLHPLGEHFVVDNDEAGVAGLCVRLLGLKGVQTVGLEASGRYERLAVAALADAGLPVMVLNPAQVRAYAQAIGQRGKTDPLDARLIALFLEATRPEPRPLPDAATQELAALMARRRQLVGMLVAERARYKQAGPGVVRVSLLRIITSIEDALKELDRDIDTHVRGTPVWREREDLLASVPGIGKTISRTLLAELPELGRLNPRQIAALAGLAPFTRQSGKWRGRSFIAGGRAPVRAALFMGAMVACRHNPVLKTFKDRLVQAGKPKLVAIIAVARKLLTTLNAILRDQKPWTTT

SEQ ID NO: 266656 - protein, 341 aa, unidentified
MSIMTIGIDLAKNIFAVHGVDQNGKAVLIKPKVLRDQLLALIAQLPPCLIGIEACSGAHHWARLFRTYGHTVKLIAPKFVTPYRMSGKRGKNDAADAAAICEAVGRPNMRFVPVKEEHQQVILTLHRTRQGFVEERTATYNRMRGLMSEFGIVLPQKVACLRKSIGAHLEDLPGYTNRCIGDLLSHADQLDARIADFDKLIAQAARDDARSKRLMQRPGIGPVTASALLASIGNGHDFKNGRQVAAWIGLVPGQYSSGGKARLGRITKAGDNYLRSLLVMGARAILSGLGDKQDGFSRWARSLVERRGYWKAVVAIAAKNARLAWAVLKYGEDFRLNASAV

SEQ ID NO: 266657 - protein, 417 aa, unidentified
MNQYAACLGIDWADKKHDLCLFDATTGKKTKQVLPHTPQAIAEYFTSLRARYPGQQIAVGLEQSRGPLLFALLQYDFLVIYPINPTTLAKYREAFSPSRAKDDPTDAEYAAELLMQHSDRLKAWHPDDDQTRTLRYLVEHRRRLVGDRTRISNRMTSLLKCYFPQVLSWFPDLATVLVCDFLCRWPALEQLRGVKRTTLLNFFRAHHSVRSDTLEKRLAAIKDSMPLTTDRAIINSSVLMITALAAQLKTTIAAVRQFDLEIEKLCAAHPDFPLFQSLPGAGEVYASRLLAVMGTKRDRWTTAQELACLSGIAPVIERSGQSTWIRWRYFCPKFMRQSFHEYAGESVKHSFWARAYYEQQIGKGKSRQAAVRALAFKWIRIIWKCWQTSTPYSEVKYLEGLRKKGSPLLSYAAKNAA

SEQ ID NO: 266658 - protein, 343 aa, unidentified
MAAQITGGVDTHLDVHVVAALDELGALVGVESFPTTPAGYRALLGWLGSHGEVVLVGVEGTGSYGAGLARHLQREGVAVVEVDRPNRQRRRRQGKSDPHDAVTAARAAQAGDALGAAKLRDGNVEAIRVLRVVRCGAKRDRTRAINQMRSLVSTAPDDLRQQLRGLTITKLVRRAAAFRPGGRSDVTSATRLALRTLARRVLELDTEVAALDKVLEPLVAATAPELVAQVGVGTDTAGALLVAAGENTTRLRNERSFARLCGAAPLDASSGKQHRHRLSRAGDRQANSALWRIVISRLSHDPNTRRYLQRRLTDGKTKTEAIRCLKRYVARELYYRLPQQPLA

SEQ ID NO: 266659 - protein, 401 aa, unidentified
MEGPIVSIDVSNGNSHYMCFIKNNKRFGKVKKIDHDIEGFKRLLEDIQKLEAETNEKVCAVFEATGVYTKPLERFLSKNSIKTYIINPLESARKRKEEIHNKKTDKLDPISISKVYYDKEDMMELKKKDETYNWLRKKNRLYEDQLNHLRKYKVTFQNQLSICFPGYLDLFRDGYSDIPMTILKKYPHPDLLKNKKAETVARYLEKNTCHTHKISLEYALKIIGFAKKTYPGCEKDDVEVEIFKILLDKVIETQRECEKTLNEMITVASTLEEYRYISSIDGIGPNLAARIIAEIGDIEEFKSREALVAYAGLDPHIYQSGDQDGKHLKISKKGNKYLRCLLFLAVGCSIRGAKDNPVNRFYQKKKQQSNPLNSKAAKTACTAKLLKIIYGICKNKTTYER

SEQ ID NO: 266660 - protein, 350 aa, unidentified
MRTEYIITMDTHCSTTDVCIKTAGGKLVKRAHLTTGIPQLRELIGSVPRPRRVIFEEGSLAGWLYRNLKGHADEVIVCDPRRNAHVAKDGDKDDAIDAQKLNDLYRGGFIKVVHQQASAAKAAAKQVVGMYHDRVARRISEGNQLLALAKRWGVMLRSQSLLDGKGEQWLKSQLEAAEVAAEVVEIAQDLWKMFERALEQEHKLHGQLCQMVRGDKVMSRVAELPGYGPVRAATLVTYLDTPWRFKSKAALWKYVGIGLRRKKSGDGLDVLGVEQECNRLLRNVVIGAAQSAIGQQENVFARRYARWMMSGLSSRNARRNVAREQVSAIWGMWKSDKAFDAGLLHDPSEK

SEQ ID NO: 266661 - protein, 342 aa, unidentified
MQPTTIAVDLAKSVFEVAVSQRPGRVASRHRLSRRGFARFLREQEPATLVMEACGTAHYWAREARARGHQVRLLPPRDVSRYRRGNKTDRNDAKAILEADRNEDLHSVAIKSVDQQALVGLHRLRSAWVSTRTARINTLRGLLRELGETIPTGARNVIPHVHALLADEKLPPTLRPVLAGATEEIRDLEHRIKEVEAQLEAMARESELIRRLRTIPGIGLLTATAIPATLDLPSYPSGRHFASSLGITPREASSGQTRRLGRITKRGDPYLRTLLIHGARSVLHHAKRRKDPDRLQSWALERERTRGHNKAAVAVANKLARIVWAVGVRDAAYQPTPSASDH

SEQ ID NO: 266662 - protein, 315 aa, unidentified
MEAAPVYIGIDVSKAQLDIAERPSGERAVVPHTEESITTLVERLRRHQPARLVLEATGGLEVPLASALAVAGIPVAVVNPRQVRDFAKATGQLAKTDAIDAQTLARFAEAVRPAPRPLPDEATQAFSALLTRRRQLMEMLVAEQNRLQRAPRPIQRQIQIHVTWLKKQLAALDEDLTQRIQATPIWHEREDLLRSVPGIGPVVSRTLLAELPELGMLSHKQIAALVGVAPLNRDSGTFRGRRMIWGGRAVVRGVLYMSALVAARHNPVIKAFYRRLRAAGKAPKVALVACMHKLLTILNAMVKQRTPWRLSAQGT

SEQ ID NO: 266663 - protein, 351 aa, unidentified
MTLYVGVDLHSNNNYIGVVDQANEVLFQKRLPNDLEKVLAVLEPFKKDVEAVAVESTFNWYWFVDGMMENGYTVRLANPSAIQQYEGLKNIDDKRSALWLANLLRLGILPVGYIYPKETRPLRDLLRKRLQLVRHRSSHILSVKNIISRSLAMKMRSEDVKKLDERHVRMLFPEERLFLAVNASVKIIRTLSGEIEGIEEVVVREAKLRKEFKGLLSLPGIGQILALTIMFEVGDIRRFPKVGDYSSYCRCVASTRSSNGKKKGEGNRKNGNKYLSWAYVEATHAAKRFYPIIHGYHQKKMSQTNKAVAVKAISNKLARASYYIMRDQAVYDEKKLFGGRADPETGVGSQP

SEQ ID NO: 266664 - protein, 383 aa, unidentified
MDTAATRTREYSVEGPVLYLAFELGNAEWKLGFGVGFGQRPRVRTISARDLEGLQREIELAKRRFGLADTARVVSCYEAGRDGFWLHRYLVEAGVENLVVDSSSIEVNRRFRRAKTDRMDVAKLVDQLMRFERGEKKVWHVVRVPGAEAEDRRQLHRELEDLKSERTQHINRMKGLLAGQGIQLEIEAGFLERLSAIRLWDGRPIAEGLNTRLEREYERLQFIQGQIHELEAKRMEAIRRSTDPEVEMVRQLLRLKGIGLNSAWVDTMEFFAWRDFRNGKEVGGLAGLTPTPYQSGDSSRERGMSKAGNRHVRALAIEIAWGWLRYQPESELSQWYQRRFGDGSSRVRRIGIVALARKLLVALWRYLETGLIPQGAVLKTRLI

SEQ ID NO: 266665 - protein, 343 aa, unidentified
MQTVTTIGLDIAKSVFQVHGVDAEGNVVIRRQLKRRYVMTFFRKLPPCLVGIEACASSHHWSRELQALGHTVRLMPPAYVKPYVKRHKNDATDAEAICEAVTRPNMRFVATKTPEQQSCLTLHRTRHLFIRQQTSVINAIRAHLAEFGIVAPVGRNGVEQLLGVAADASDKRLPEVARVCVAALGAQLRMLKAQILQFDRMITAWHRSSEASRRLDDIPGIGPVLATALVASVADPKVFRSGRDFSAWIGLVPKQNSSAGKDRLGSISKRGDRYLRSLFTTGALAVIRYAKIHGTKHRPWLTALLARRPTKVAAIALANKIARMAWAIMAKGERYKEPAALAA

SEQ ID NO: 266666 - protein, 319 aa, unidentified
MDRYIGLDAHSQTCTFAVMGSAGRQLREQTLETNAKVLIDFVRTIPGQRRLCMEEGTLSEWLCEVLEPHVAELVVVQPDKHAGAKNDSIDAWNLASKLRKGDLENVVFKARGRFTQLREAVRAHRVTTADVVRTKLRLNALYRSRGIHGMGDEIYDPDTRDQWLPKLPPARARMAQLLSTELDGLCEVREQAETWLLEQAREHAEVRRLTTLPGIGPVRAAYIVAIVVTPFRFSTKRDFFGYCGLGIVTRSSSDYERDERSQRWVRRQVAHTRGLNRNRNPLLKAIFKGAALSVIAQTDHPLRRDYDRLLQNSSHRSPA

SEQ ID NO: 266667 - protein, 412 aa, unidentified
MHVLYVRCCGLDLHKKTVVACVLISHPTGKVDKSLRIFPTTTTGLLALCAWLASLGVRQVAMESTGIYWRPIYNLLEERFELILANAYEIQALPGRKTDLKDCEWIAELLRHGLIRPSFIPAKGVRTVRDLVRYRKSLVYQRTQQINRLHKVLETANIKLTSVVTDVLGKSGRSMLKALMAGESDPETLAQLARGTLRSKLPQLQEALEGCVESHHRLLLQQIWAHIHFLEAAMEQLLQDIEGHMAPYEQVLTLLRTHPGVQKLSAMSFVAEVGVDLSSFPTAKHFASWIGVCPGNHTSAGKRKHGHTTRGNVYLRALLAEIVWCISHTKDNYLSAQYHRLARRIGKAKAVVAVSHTVAVNFYHMITKHQTYRELGADYFDRVDRERITKQTVTRLEALGYEVSLTPKEVGA

SEQ ID NO: 266668 - protein, 338 aa, unidentified
MKLYGAIDLHSNNNVTVLTDERDKVVYQKRLTNHLPLILEQLSPYASSIEGIVVESTYNWYWLVDGLMEKGHRVYLANTAAIQQYEGLKYTDDDSDARWLAHLFRLGVLPEGYIYPKEERAVRDLLRKRCQLVRQKTANLLSIQNLYSRHTGQSISANRIKQLTSEKVDALFTSSDLALAVKANLTVMRSLETEIAVLERVVRERVKLKPAYRYLLTVSGIGQILALTILLETGDIRRFPKVGNFASYCRCVGSEKLSNGKRKGIGNTKNGNKYLSWAFVEAANFAIRFEPLIARYYERRKAKTHRVVAIKAVAHKLARACYYVMRDEVPFDVNRAFA

SEQ ID NO: 266669 - protein, 342 aa, unidentified
MEHYAGIDVSLEYSSVCVVDANGKIVREAKVASEPQALIAWFGSLGFGLERIGLEAGPLSQWLFAAMREAGLAVELLETRHVRKAFEAMPVKSDRNDARGIAQLMRLGWFRPVHCKSMSAQETRSLLTARKLVQSKLHDVENSLRGILRGFGLKVGKTTGQKFAGRIEELVTGQPHLQMIAKALLAVRAVLRTEFAAFEKQTRRMVRSDMQARLLTSIPAVGPIVALTYASAIDDPARFKSSKQAGAHFGLTPKKHQSGETDYTGRISKIGDASVRTALYEAANVMLTKPVKGCSQLKSWAMRIKRRAGMSKAKVALARRLAVIMHRMLADGTPFNAAAAAA

SEQ ID NO: 266670 - protein, 332 aa, unidentified
MNQKEVSMSTYYYIGLDIHKRTISYCIKAINGSLIGQGKIEADRKSLDAWAKGLPGPWVGAMEATIFTGWVYDFLKPYAVDLKVAHPEMLKAITAAKKKNDRADAEKIADLLRVNLLPECHMLSEEIRELRRVLRYRNHIVRTAVKMQNKISGLLMEVGVNYSKRRIHGKKYFHEILERVEEIPPSVKELLKLSRSSYEMFRTFQKRLVETLHTNNLIHDRVQRLMTIPGVGELTALTWVLEIGDSGRFTSIRKAVSYYGLCSAQRESAGKEQRGPISKKRNKHLQTMLIEAAKLAPHWNEQLAIVHERELKRGDRNRATLAVARRLVYAGS

SEQ ID NO: 266671 - protein, 410 aa, unidentified
MSESPYAFYVGVDWASETHQFTVLTPERRLEAERRIEHTGRALGEMADWLTALADGEPARIAVAIEVPRGPVVETLLERGFHVFAINPKQLDRFRDRHSPAGAKDDRRDGFVLADSLRTDRPAFRQVHVDDPLLIQLRELSRAEEELQTELRRLSNRLWEQLQRFYPQVLRLSPAVDEPWIWALLQLAPTPVAARALRRATLARLLARHRIRRVTAATVLAELHSPALRVAPGTTEAAREHIALLLPRLQLLHEQRGRCARRIEQLLDALEGSDAEHRDVTVLRSLPGVGRVIAATMLAEAARPLAERDYHAVRTQGGVAPITRQSGKSVLVSMRYACNHRLRNALYHWGRVSAQHDPSTRRHYRALRQRGHGHARAIRGVIDRLLVVLMAMLRTGTTYDPARRRVPAAA

SEQ ID NO: 266672 - protein, 352 aa, unidentified
MPRTTRFHSVTTTIGIDMGKNTLHMIGLDSNGAIVLREKVSRGRIASRLANLPPCLIGIEAGMATHYVARELAALGHNVKQVPPTYAKPFRQGHKNDFRDAHAVAEAVQRPTTRFVPAKTAEQLDLQALHRVRSRLVSERTAVINEIRGFLLERGIIVRQGLRFLRQSLPDFLAKRTDVLSLRMVRIVADLADDWRRLDQRIEAVTDEIETVVKSDDNCRRVMTVPGIGPIISRAMVAAIGNGVAFARGRDFSAWLGLVPKQMSTGDRTILGRISKRGNGYLRMLFVQAARVILRRPTNWSKHNFGGWLVCAAQRLHPNVLAAALANKLARIAWTVLAQQRCYEARVTKAAA

SEQ ID NO: 266673 - protein, 368 aa, unidentified
MKDVTTYVGIDAHKKDLFIAMLVGTQATPLTWTVANEPNAIRRLVRKLEREAPGPVRSCYEAGPCGYALQRRMTTTRVVCQVIAPALIPRKPGERIKTNPRDARKLAELLRAGLLTEVQPPTPEEEAVRDLCRARDDAREDLQRSHHRLGKLLLRRGLHYSGHNWTRAHRQWINTLEWVHAAERVVVDDYLLAIDHLEARLIELDARLTAIAATEPYREPVAWLRCFRGIDTLTAILILAELHDFRRFQSPRALMAYIGLVPGEDSSGEKHRRGRITRTGNALVRRLLVETAWHYQHRPSVGVALTRRRKGQPTRVIAIADKAQQRLCRRFRRLAEHHKQAPKIAVAIARELAGFLWAVLQPASVSAS

SEQ ID NO: 266674 - protein, 343 aa, unidentified
MQVTTIGLDIAKNVFQVHGIDAAEKVVVRKQLRRSQVLEFFKALPPCLVGMEACATAHYWSRELTKLGHQVWLMPAKDVKAYVKRNKNDAADAEAICEAVRRPTMRFVQIKSAEQQGQLMLHRTRDLLMRQRTQLINALRAHMAELGIVAAQGTAGLKELLKIIAGERDARLPVDAHASLVVLAAGLHAVQTMIGTIDKRIIVEHRSNEASKRLRSIPGIGLLGASAIVATVQDPKAFRSGRDFAAWIGLVPREDSTGGKHKLGPISKQGDRYLRRILVVGAHAVLKLARQKPEKYPWLTQLLARRPFKVAAVALANKMARVAWALLAKGGTYYRARTVTAPI

SEQ ID NO: 266675 - protein, 371 aa, unidentified
MVWTAPKRHLCAKVVCAVTNTRKEPSNMQVSTIGLDLAKQVFQVHGVDAEGTVVLRRRLRRSEVAQFFSTLPVCLVGIEACATAHHWARELSSLGHEVRLIPPSYVKPYVKRGKTDAADAEAICEAVSRPSMRFVPLKSAEQQAALMLHRSRDLLVRQRTMLVNAVRAHFAEFGVVAPQGIRRVGDLAALLIEEDAPMLPPYARQALRALLAQLEAQDEQIASLEAAIVASHRNNEASRRLASIPGVGPITASAVVASVADARQFRSARHFAAWLGLTPRSHSTGGKERLGGISKQGDPYLRRLLVIGATCVIRYARRKAPGESGWVKALLARRPARLVSVALANKMARIVWALLVRGSVYRAPAVSVATT

SEQ ID NO: 266676 - protein, 356 aa, unidentified
MTIMAEKYDFVIGVDTHARNHVLAVVACPTGNLVATKDFRNTTAGIASAIRWTNKITQSTNILWAIEGCGSYGSTIAKTVMDTNTHVIEAPRYQTSGRGGNTGKTDQLDALRIASAALAITDQQRRLPRQDTGIPAALQTLITAREMMTKDYTAHINALTALLRSNDLNIDARRPLTRTQITTISTWRKQPNSPVEIAIARSEAVRLATRIITLISELKDNQLHIEILVQQSPAATLTKNPGVGPVTAAVTLAAWSHHGRLRSEAAFASLAGVNPIPASSGNTTRHRLNRAGDRRINRALHSAVISAMRCDQQTKAYVEKRTAEGKTTREIRRCLKRYLARKLYRQLNHAATTTPA

SEQ ID NO: 266677 - protein, 352 aa, unidentified
MNISHYIGFDVHKKSISYCVKSADGTIVEEGKLPATHRALREWAGKRSEAWHGAMEATLFSGWIYDTLKPFAAKLEMGNPSMMKAIGAAKKKNDQLDARKIADLVRCNLLPACYVAPAEMRDLRRLLRYRNLVVGQAVQMKNRMSGMLMEVGAEYSKQRLHGQQYFSALLDRLEEVPESVKDLLRLSRGALETFTATQQQILDRLQKEPLLSKRVKLLKSIPGVGEVTALTWALETCDPRRFPSIADAVSYCGLCSALVASADKAKRGPISKQRNAHLQTGLIEASKLAPRWNQQLAEVYNRERGGGGDRNQATLAVARKLVAYLLAVDKSGQPFEVRSLPPAAPEEVAKMA

SEQ ID NO: 266678 - protein, 401 aa, unidentified
MFYVGIDIAKNKHEASLIDVSGKALVDSISFSNSKEGCEKLLALMERFQVDKSDVVIGMEATGHYWLSVHAFFFELEYDVKVINPIQSEAFRKMYIRQTKNDSKDSYIIAQIMRFGQFSTTSLSEEGTVALRQLSRYRLALVDSCGDCKRRVIALLDQVFPEYGKFFSDTFGVTSKEVLLNYPTPEDMITVSTDELAGLLNKASRGRFREDKAKELQSLADNTFGVHFAKDAFAFQIKQLIEQLVFLENQISELEDKIALLLEQMGSFITTISGIGDTLGAIIVSEIGDIHRFDAPGKLVAFAGLDVKVNQSGEFSSTRNKISKRGSPYLRRAIWLAAGRAVFCDPILSEYYQSLRARGKHHLTAVGAVARKMCNIIFAILKENRPYEPQPPKKQNSENRC

SEQ ID NO: 266679 - protein, 346 aa, unidentified
MQYDAGIDVSLEQSSVCVVDAAGKIVKEAKVATDPHVLVTFFKGLGFPVTRIGLEAGPLSQWLYAGLIQAGFDVVLLETRHVKAALSAMVVKTDRKDARGIAQLIRMGWFRAVHAKSASSQEIRALLTARRLLLDKLRDVELSLRGVLRGFGLKLGKVTQRAFETRVRELVANHPMLQQITRSMLLARATLQREHNVLHKALLKIVRRDKICRQFMTAPGVGPIVAITYKTAVDDPQRIKKSKGAGPLFGLTPKRYQSGETDVIGGISRIGDAMVRAMLYEAANSLLSRTMRFSALKRWGLAVAKRRGMKRAKVAVARKIAVILHRMWIDGTSFRWSNKEKADAHA

SEQ ID NO: 266680 - protein, 346 aa, unidentified
MTDIIRIGLDTSKSLFQLHGVNTAEQPVLRQRLSRREMIKFFEKLPPVVVALEACGASHHWARLLSSFGHEVKLIAPQLAKPYVKRGKNDAADAEALCEAASRPTMRFVPAKTADQQAALMLVGMRTRLIHRRTQLANAIRGFASEFGVTAATGMCRLEPLLERIATDATIPELARDLFALHGQEYSALQREIKRVEEKLMEWHRGNECSQRLAQIPGVGPLGASLLMMKTPDPRLFKSGRDFAAWMGLTPKDHSTAGKSRLGGITRAGDELLRSTLVVGATSVIHHLRRNQGKQASPWLLGLLERKQPKLVAVALANKIARIAWKLMVSGERYQRAMMPSPTVTF

SEQ ID NO: 266681 - protein, 353 aa, unidentified
MLIIGCDFHPGFQQIAIFDNQTGAYEERRLSHRAEAEQFYRSLAGQEVRVGMEACGHYPWFERLLAELGFELWLGDAAKIRASVVRQQKTDRRDAEHLQMLMREDRFPRIWVPSLEERDVRQLLVHRHKQVQARTRTKNQLHALALSQGVQKKWKLWTAAGRAELESLELLPYAAQRRRQLLHRLDALEAEIAGLNRQVEEEVKGRPAAVKLMTHPGVGPVTALAMVLTLGPAERFRDGRKVGSYFGLIPSEYSSGGRQRLGHISKQGSSFVRFLLVEAGQSAVRKDAELGRFYRRLGARKHRALAKVAVARKLAVRLYLMLREDWTYAQLCRAVVQASPSHSVAASKSRPLE

SEQ ID NO: 266682 - protein, 414 aa, unidentified
MEVLYPRCCGLDVHKASVTACALLCEQGRMRKVHRRFTTMTEDLRNLADWLSQLQVTHVAIESTGVYWKPVWNVLDGQFTIILANAQHVKNVPGRKTDAKDSEWIAELAQHGLLRSSYVPPVIIRDLRDLTRARASLSQEASRIGSRIQKVLEDANIKLSSVASNTLGKSGRAMLDAIVVGQADPEQLADLALGHLRAKIPELQLALAGTVREHHRFLLKRLLQQLRFVENEIDVLDQHLEHIGQQEPGLAAAVARWTTVPGVDRVAAWSLAAEIGIDMEQFPTAAHLASWAGVCPGNCESAGKRLSGKTRKGSPWLGRMTCQCAWAAARTKNTYLSMQFRRLAARRGKKRAIIAVAHSILVIAYSLQKNERDYCDLGSDYFDRLNADGLKRYLVRRLEALGHKVTIEPHGEAA

SEQ ID NO: 266683 - protein, 375 aa, unidentified
MAEITRAVIARVGVDLAKNVIQVHAVDGAGRRVVARAFKREAFLAWCAQLPAGCLVAMEACSGAHHFGRRLRAMRLDARLIAPSFVSPYRMEGKGGKNDMTDAAAICEAASRPTMRFVPIKSCEQQGVMSVHRVREGFKQERTACINRIRGVLAEFGLVFAQSPKALRAVLAEVIEDASNELSTTARLVLQRAFDHWRELDEHMRWCDAQVGQHVRTSAAAKRAAKITGIGELGASALTAGVGDFKQFKAGRQLGAWLGLVPGQNSSGGKTSLGRITKRGDDYLRTLLIQGAKAAVMSAGKRDDPTSRWLVQLTARVGWQKACVAMANKNARILWAVMTREQGFEAKHVSDKPPAKRPAHERIAAPAPSQSACAA

SEQ ID NO: 266684 - protein, 312 aa, unidentified
MEAKFVGIDVSKATLDVDCLPVSTPRQFSNDASGIAGLVEWLVGSGVERIVLEATGGYEVAVASALAAAGLPVVVVNPKRVRDFAKAQGILAKTDRLDARVLALFAQQVAPRVRALPDAAQRDLAELLDRRHQLVVMRTQEQARLATVLPVARSDVKQHIAWLDKRIRKHGGVLLKRLRANEIWDAKVTLLDTVPGIGPVNLFTLVGRLPELGALNRQQIAALVGVAPFNDDSGKRRGQRYIRGGRADVRCALYMATLAAKLWNPVIAQMYDRLIAKGKPFKVAMTACMRKLLTILNAILRSKKPWENLLAT

SEQ ID NO: 266685 - protein, 350 aa, unidentified
MKITTSGIDVAKSVFQVHGVDEHGKVVLRRQLRRSQLLVFFSNLEPCLIGMEACASSHYWARKIAALGHTVRLMAPQFVKPYRKNDKNDGNDAEAICEAVQRPSMRFVPVKSPEQQAELAVHRVRRRLMGQRTALINQLRGLLAEYGLVLAQGANHVRSKLPALLEDASESLPALALELFRDLYEELIALEQRIGACDRRIERLYRANPVCQRLGQQEGIGALTATAFVATVAHAAQFKNARQCAAWLGLVPKQDSSGGKNRLLGISKRGDVYLRTLLVHGARSAMRHTPKRNDPKSRWVEQLRKRRGENIAAVALAAKHARILWALMIRGQSTDQPVDPGLDRLEQPTV

SEQ ID NO: 266686 - protein, 407 aa, unidentified
MEVVYRCCCGIDVHKKVIVACLVNGGEQELREFGTTTSEIKTLANWLTESGCEMIAMESTGVFWKPLYNLFELMDLDAMIVNAAHMKALPGRKTDVKDAEWIADLLRHGLLKASYIPNREQRELREITRYRKSLTEERCREVNRLQKILEGANIKLDSVVKDITGKSARKLLQRIIDDDIPDSDEVSKLVHGRMRPKLDQIVASIEGITTLLQRKLLAQIIDHIDDLNRRIGELDKLVQEYMAEYEAAIKAIDEIPGIARRSAEVILAEIGLDMGRFPSAAHLCSWAGVCPGNYQSAGRRKHGKTTKGNKALKTILTQCAKSAKTVKSSYFFAQYQRISARRGKNRATLAVAHSMLIAIYHILKNKTAFHDLGSDYYDSFNRDRKINSYLKRLKALGWEPDAIPSSP

SEQ ID NO: 266687 - protein, 358 aa, unidentified
MGYGAIDLHKKESQIRIVRDSGEVLDRRIATTRDRLTAMFGEQPPMRVLVEAATESEWVAQHLETLGHEVIVADPNFAPMYGHRSRRVKTDRRDVAALAEACQQGWYRAAHRRSATQRTVQIELNVRRELTDSRTRAISVVRAVIRGAGFRVRSGSTGSFLARVSELDLPPSMLETLSPLRTMIEVLTEELARADERFTTIAADNPDVTRLMTVPGIGAITATAYVAALDDAARFSRAGQVASYLGLVPSEYSSGEQQRRGRVLRSAHPQVQSLLVQAAWRLSRSKDPRTASLRAWAQGIARRRGQKIAMVALARRLARILFAMWRDGVAYDGARIRLTPRHGTAPIGEDATKLAVTR

SEQ ID NO: 266688 - protein, 348 aa, unidentified
MSQIKRIGLDTSKAVFTLHCVDANGQAVLRTNLRRAQMAIFFKNLAPAEIALEACSSSHHWGRNLAALGHEVRLIPPQYVKPFVKRAKNDRNDAEAICEAAGRPGMRFVPVKTTTQQAQGMVLKVRETLINQRTQLVNALRGHAAEFGIIAAKGISQITPLLEAIEAETVIPSDAKDMLGLLGQEIEHLDTRLDEIELKLTAAHKANALSQRLATIPGVGRIIALTLATEVDPMAFQSGRHLAAWIGLTPKEHATGGKQRMGGISRAGNERLRRLLVTGATAVIRFAARPGNQHASEWLLKLLQNKPRKLVAVALANKIARIAWAMMKSGEAYRRAPTARTVTATLAA

SEQ ID NO: 266689 - protein, 341 aa, unidentified
MKQSVIGMDIAKKVFQLHTVDQRSGKIERFKLRREEVLAFFAERQPYLVAMEACGSAHWWARQLQQLGHEVRLLAPRSVRPFVLRNKTDVADAQAIWTAVQQPDAHQVAIKQADQQAILSLHRIRAQLLKFRIMQSNALRGLFYEFGIVLPEGYTPLTKAVPNAFVDAENQVPHVLLESLREQWARVIRLDEEIQAIELRLKHCMRERLDCQKIAEIPGVGLLTATAAVASLGDAKTFRSGRQFAAWVGLVPRQTGTGGRVRQLGLSKRGDTYLRTLFMHGARSIIARGQKSEWVERLLARRPYNVVVAAVANKLARTVWAVLVKGSRYRAELFTACPVGH

SEQ ID NO: 266690 - protein, 464 aa, unidentified
MSKKRKKGLCFEDRPMEQPCAAGIDIGAREIFVAVHHDPDNQPVRRFGTFTEDLQQMADWLERCGVTTVAMESTGVYWIPLFEILDRRGLQPCVVNARHMKNVPGRRTDWHECQWIQFLHSVGLLRAAFRPADQVCAVRAIMRHRQQLVEMAAQHVQHIQQALTQMNLQIHHVISDITGTTGLAILDAIVAGQRDPRELAKLRDPRVKASRETIEKSLLGNWRDEHLFTLQQSLELYRSYLKQIVAAEQKIESLLGAFTARVDPEQKPLPTDAKKNRSGAKRRKKAGHSGNFDLRREAYRLFGVDVTQIPGLESNVVPLFGEVGRDMTRWPTAAHFVSWLALCPDNDISGGRILWRGVRQSNNRAGQIFRLAAQSLHRSQTPMGHYLGRLKAKLGPAGAITATARKIAILFYTLVRQQVEFDNSIWQASDAERQKRLQYKLSNQARRLGYQLVPIRPSTGAVDA

SEQ ID NO: 266691 - protein, 358 aa, unidentified
MKKHSKTEAAQQLTIGIDVSDRSSCYCILDQTGEIQGEGRLRSRPEAFRQQFEGMARAVVALEAGTYSRWMSALLRECGHEVIVANPRRLRLLTTSDKKNDPQDARTLAEMAWAKPALLAPVRHRSAEAQRDLNLVRARDLLVEARTKLINGVRCLVKGFGARVPKCASLQFCQQAHLHMPEEARGAAAPMLEVIDELSEKIRYYDELLEHVARTRYPHTALLKQVCGVGTLTALAFVLTIEEPCRFQRSRDVGCYLGLRPKQQDSGDRSPQLRITKAGDSYLRKMLVSCAHYILGPFGPDTDLRRWGLKLCERGGRNAKKRAVVAVARKLAVLLHRLWVTGEVYEPLRNQATVNFAA

SEQ ID NO: 266692 - protein, 421 aa, unidentified
MGKLIERCAGIDIGKRFLVCCVMTGAAHEEPRSETRRFDTTVPGLKRLRNWLNEERVTDVVMESTGSYWIPVFNLLEGHVTVVLANPEEVKNRKGHKTDRKDAGHLADLLRHNHVKSSYIPAEPVRQLRDLTRRRVQLTQDATRERNRVQKLLEQVNVKIGSVLTDVFGVSGLHMLLALLDGRAAPEEIAGLARGSAKRKTPQLIEAIEGNRMSDHVRFLIRGCLRHLACLEEEVEELDAEILRRMQLSTFQKAFTLLQTIPGVGQLSAATILAETGPDLDSFPTIEQMASWAGLCPGNRESAGIQKGPQTTHGNPYLCTALVQCAWAATRKRDSVFRSRFQRLAPRRGEKRAIIAVAHHMLIILYCMLKRGVPFLGAEHAPKQRRRERRAHHHLRCLRRLGFSVEIRLSSESTPPDTISR

SEQ ID NO: 266693 - protein, 318 aa, unidentified
MPTAAPAFVGIDVAKAELVIAIRPSGERWTLANDGAGIQTLVQRVRGHAPTLIVLEATGGYERAAVAALAAAQLPLVVANPRQVRDFARATGQLAKTDRIDAAILALFAERVRPAPRALPDDAAQALDALLTRRRQVLEMLIAERNRLEHAVPAVRRGITQHIRWLERQLADVDRDLDDTIQASPVWRAKEDLLRSTPGVGPILSRTLIGELPELGTLPRKQIAALVGVAPLARDSGTLKHKRLVWGGRAPVRAALFMAALVGTRCNPVLRAFYRRLLAAGKPKKVALTACMRKLLTILNAMMRTNTTWRHVDPSRTT

SEQ ID NO: 266694 - protein, 362 aa, unidentified
MSITMIGLDTAKSVFQIHGVNETGKAELKRKVRRSELIAFFEKQERCTVVMEASGAAHHWARLLGGLGHTAKLLAPEAVKPFVKKGKKNDAADAAAICEAASRPDVKFVPAKAVEQQGILALHTARSLLVKQQTMLANAIRGLATEFGHVVPKGLHNLEPLVELVNADEAMPEQARQAIAELHERFGELAKSIKTFEVAIVAHARSDATARRLATIPGIGPITASLIAATVVDISLFKSARQFAAWLGLVPRQHSTGGKTRLGGITKAGNREIRKLLVLGATSMLGRAESWHSAVGSWLRDILQRRPTRLVTVALANKMARIAWARLAKVPASRLRLVGRPGEGVMTRNEVYRPQGGVAAKA

SEQ ID NO: 266695 - protein, 364 aa, unidentified
MGWMAPSRHQCAKVGLLNSNLRGPSVKEVTTIGLDVAKQVFQVHGVDASGQVVMRRTLRRKQLVPYFAKLSRCLIGMEACATAHHWARELRKLGHEVRLIAPAYAKAYVRRNKNDAADAAAICEAVSRPSMRFVPIKTAEQQGAAGLHKVRDLLTKQRTMLINALRGHMAEFGIVVAQGPQHVKELLAALADPQEKRIPELIRGPLVHLAEAMGNLERRIAMLDKQIVKWTRDNPTCRHLMTAPGYGPILSSAMAAMVPDPSVFRSGRDFAASLGIVPRQTGTGGKVLLGPISKRGNGYLRRLLVNGAMAVLTSKRARQDPWLAKLLAIKPRKVVAVALANKMARLGWALMVRQEDFRTAPAAA

SEQ ID NO: 266696 - protein, 318 aa, unidentified
MNTLPENSRVVHLGVDVAKHELVLDLQGSIRRFANTPKGIAELINAISSRTDFPPHLVCEATGGYERALTAAALQRGVPISVVQPQRVRHFAKAIGLHGKSDPLDAGLLSRYGSQVLPLPLMPKDSARQRLDALLRARTELLDSMHRELNRSENDVSPVVIRIRKDLVKRFEKHLATLDDEIAKLVADDSTLARADAMLREVKGVGPQTSRTLLAFLPELGRIGRRAIAALVGLAPYDRDSGKTKGRRFIQGGRAHVRQVLHMAAVVAARHNPVLKAFYQRLREAGKPFKVAIVAVTRKLLLHLNTRMAIFLGNPLVD

SEQ ID NO: 266697 - protein, 434 aa, unidentified
MKQIRKNAGGIDIGAKHIFVGLASKEVKIFETFTVDLERCALYLLENKINTVAMEATGVYWVILFDILTSHGIDVWLVDGRSTKQVPGRKTDVKDCQWIQQLHSYGLLNRCFIADELVQELRSYQRLREDHIRSSSMHINHMQKALILMNIRLKEVISQVHGVSGMRIIRAILQGEREASVLASMCDIRILKTKKVAVEKSLNGHYNESGIFALSQAVKCYDFYQKQLKECDKKIGEVLRKMSSGKKIPNQLKKRTARKAIRHHKPNVHNMDIHLLKIFKGKDATVLPGITDYSWLQLLSELGTDLEKWKTEKHFTSWLGLAPKQHNSGKMMRNYSPKGSPKAGGIFKQAAVSLINSKNIALGAFGRKIRAKKGGLVAIKAVARKLATLYWKLFVKGLDYVEKGIKAYEEKVIQNKQRAVVRMAKELNLQLVEI

SEQ ID NO: 266698 - protein, 426 aa, unidentified
MEVIHPRCAGVDVSKKDAKVCVRVQGAGRRATSSTVTTWTSMTGSIVALREQLIAERVTCVVIESTAAYWKPFYFVLEDALNVMLVNARHVRNVPGRKTDVSDAAWLAELGAHGLVRASFVPPEPVRVLRDLTRSRATIAAARTKEIGRLETLLEDTGIKLSSVACEITGVSGRAMLEALIAGQRDPAVLADLAKQRLRTKIPALTEALAGRFTDHHAFMVRLYLDRIDAHEADIARLDARIERVIEPFRFARELLISIPGWSHVVADVFIAETGADMSVFPTAAQLASWAGVCPGSNESAGRIKSAKTQPGNRHLKAALGVAALSASRSTNTYFGARFRRIAGRRPTQPAKTSRRQSAAGQTAVVALQHKMLTCAWHMLTNGAFYQDPGPNYYTRQHPDQTKNRAIKQLQALGYDVTLQPHTHAA

SEQ ID NO: 266699 - protein, 337 aa, unidentified
MKYSGIDLHSNNSVVTVTDEEDRVVAEKRLPNDLAKILRFLEPWREEIAGVVVESTFNWYWLVDGLQAAGFEVHLANTTAIKKYEGLKHSGDEADARYLAHLLRLGILPTGTILPPEQRAVRDLARKRMQLVRSRTTHILAVENISARQHGARISSNQVKRLTTESIDQMGLPDDVALAIKTNVAVIATLSVQIDLLEKRLQERIGERPEYELLTSVPGIGRVLATTILLETGTIDRFAAPGNFASYARCVDSVRTSNGKKKGEGNTKNGNKYLAWAFVEAANFALRYCAEAKRFYERKKAKTSNVVATKALAHKLARACFHILKERKPFDVTRCFA

SEQ ID NO: 266700 - protein, 342 aa, unidentified
MRVTTIGLDIAKNVFQVHGIDAAEKVVVRKQLRRRQVLEFFKALPACLVGMEACATAHYWARELTKLGHRVRLMPAKDVKAYVKRNKNDAADAAAICEAARRPTVRFVQIKSTEQQGRLMLHRARDLLMRQRTQVINAMRAHLAELGIVAAQGRDGIKELLKIIASEVDARLPVDAHTSLVVLAAELQAMQTLIVSIEKRIMVQHRLSEASKRLKSIPGIGLIGATAIAATVPDPKVFGSGRDFAAWIGLVPREDSTGGKHKLGPISKRGDRYLRRILVVGACAVLRYARHKPEKYPWLTKLLERKPFKVVAVALANKMARIAWALLAKGDTYRVPALAAAT

SEQ ID NO: 266701 - protein, 419 aa, unidentified
MLSSNTYVGVDIGSESSMVFIDIKDLDKRLKKPFLVIHDVSGFNLLLERLNSVESEYNSKCILIVENTGNYSTVFAHFFSSKGFPVKLINPIQTNRISKAGMRKAKTDKLDSILIAGMKSYNWVKSYDYKTVSTDYLKKLCRKYDSFVKQRALIKNQLSDDLDLVFWGYNKIFKDITCKTSMYILKEFTSPEDFLKSDPNKVINSIKQFSKRSLKFAREKYELIEKKAREALILSPNSNFKPIILPSINIIHELDESIASLEKEIIKLSKSNEEIKLVNSITGFGIVGSATIISELRDPYRFSNAKQMVAFAGLDPKVFESGKFKGNDNKITKRGSRLIRYWLFIAALTCVRKVNGKYVNKTIYDYYHKKLKEGKPKKVALIAICSKLMKIIFAVLRDRKEFVIIDNETHCLNHSQKAA

SEQ ID NO: 266702 - protein, 359 aa, unidentified
MKAQVKQIDFTGQNIYAGFDVHNNSWKVTIMAEDTFYKTFTQPSNPEVLYNYLKSNFPGGNYHSAYEAGFCGYWIHDKLTSFGIKSIVVNPADIPTTDKERVQKEDKRDSRKIARSLSAGTLIPIYTPTIQTQRDRSLLRTRAMLVKDMARYKNRIKSFLFFYGISIDDAYAQSKKHWTKRFMNWLESLEIDGESGKEALLILISECKNLRTSILKVTRQVRELSQTATYQEQVTLLESVPGIGLITAMTILTELETIDRFNNIDKLCGYIGLVPSTRSSGEKEKSGDITPRGHGVLRNAIVESSWTAIRNDPSLMKSYVVLCKRMDSNKAIIKIAKKLLSRIRFVLVNKKPYECLIEK

SEQ ID NO: 266703 - protein, 321 aa, unidentified
MAMSTFPIEAGVDVAKNELMIQSSLDTKPFPIPNTPKSIKAWLKTVPQGSALAIEATSTYHMELAEQAYASGLTVYVIDGFRLSKYRESVAVRAKTDAHDAVLLARYLNKERSSLKAWTPPPAGHRQIQVLLRRRAKLVEIRGMLRMSWSGDKLFASELKQIEQMLKRIEGSLEKQLRNTIREAGFLDHLRRVQQLPGIGFLTAVGLVMSFMRGEFANSDAFVAYLGMDVTVAQSGRWAGRGRLSKRGDSEVRRLLYNASMSGSRTETWKQFYAHHLGRGKKTTQALVILARRLARLAFGLMKHQADWSPQIYAGGGKLPN

SEQ ID NO: 266704 - protein, 341 aa, unidentified
MQITTIGLDIAKNVFQVHGIDAAEKVIVRKQLRRGQIIAFFEALAPCLVGMEACATSHHWARELTKLGHEVRLMPAKDVKAYVKRNKNDAADAEAICEAVRRPTMRFVRIKSAEQQGQLMLHRARDLLMRQRTQLINALRAHLAEFGITAAQGREGIKELLAIVAQEEGSRLPVDAHASLTVLAAQLQAVQTTIGSIEKRIVAQHRSNEASKRLETIPGIGVIGATTIAAVVPDPRAFRSGRDFAAWIGIVPRQDSTGGKQKLGPISKQGDQYLRRILIVGAHAVLRRARQQPENYPWLTQLLARRPFKVVAVALANKMARIAWALLAKGGTYRAPQLVAA

SEQ ID NO: 266705 - protein, 351 aa, unidentified
MSRLSMPSTVTTIGIDIGKNTFHLVGLDQRGAIVLQLKTSREQLARRLANLPRCLIGMEACSGAHHIGRQLAALGHDARLVPAQYVKPFLKGHKNDYRDAEAIAEAVQRPTMNFVTIKTLEQMDLLALHRVRSRLVGLRTGVINQIRGFLIERGITVRQRPAPLRKALSDILSSSSSALSPRMVRLIADLSEDWRRLDDRIAIVSAEIEALVEEDRHCQRLMTVPGIGPIISSAVVAAIGDGAGFKQGRDFGAWLGLVPRQESTGDRTILGKISKRGNKYLRTLFVQAAHVILARRPSAAMRGLWPWIAQASKRLHRNMLAIALANKLARIAWTVLARGHEYQPRIMPHAA

SEQ ID NO: 266706 - protein, 408 aa, unidentified
MEVVHPRCCGIDVHQASLAVCVSIKEGAESQKHKLRCGTTTAELLRLADWLHGHQVTHVAMEATGVYWKPVWHMLEGQFELLLANPTQVQALRGRKTDLKDGERIADYLQHGLLQGSFVPPPPIQQLRDLTRSRTTLKQEQVRIGNRIRKVLEDANVKLSSVMSDVMGVSGREMLRAMVRGETDPAALAQLARKRLRGKIAVLQQAATGTLNQHHRFLIEQWLGLWDELVARIGQFEQRIEEQMLPFAPAVKTLTSLPGVDRITAWTIIAEMGADMAQFPTAAHAASWAGLCPGQEESAGKRQSGRTRKGNVWLRRALTQAAWGASMKKGSYYKALYHRLAGRKGKKRAIVAVAHALLVTGYMLLWTGKTYADLGADYFDRLDRNRLTKRLVKRLEKLGHQVSLQPAA

SEQ ID NO: 266707 - protein, 431 aa, unidentified
MSKYLNSLVVGIDVASEFSFASILAPDGSQYRKPFKFFHTALGFNYLIEQIKKAEKEFSTTPVFFMESTGVYHLTLFHFLKDKKFETFVINPLVTNCNKNKNIRKVKNDRNDALSIAQLGKFQDIKVSSDSDIKIFTLKLLVRDYYKLIDTRSGFKKKLSNSLYMSFSGYQKVFSNTCGLVSIKILKKYPTPQAVISAQKQDIIDILLNSRKGIKWAEKKYNSLIEASENAQFVSLSSPWLSVSITTSISIYEAIDAEIATLLKQIKCFIDSDEMSTIFRKNILLLMSIPGIGYNTAITILAEIGGIDKFVTPKQLVAFFGVDPAVNESGNFKGDKVKMSKRGTRFGRRALYAAALASIRMKRNGEATNHVLLKYYKENLKGKKAKVALVAVMHKLIKYLFAVLRNQEEYQVRDPKLHQKMFLENKTIIAA

SEQ ID NO: 266708 - protein, 336 aa, unidentified
MTEITRIAIDTSKSVFTLHGTDADGRAVLRRNLRRQDMVPFFARRPPMEVVLEACGGSHHWGRVLAGLGHTVRLIPPQYVKPFVKRGKNDRNDAEAISEAAARPEMCEVAVKSARQQANAMLLSVRELLVRQRTQLVNALRGHAAEFGHVGRLGRQGVAKLLADVAEDADLPTPAKDALALLGAEIGRLDARLAEVDARLVAQHKQTPTSQMLAEVPGIGPIGALSLVLRVDFSQFKSGRHFASWLGLTPREHSTGGKTRLGGISRAGDERLRQLLVLGATAVIRQAKPGRASAWLIALLARRPRKLAAVALANKMARIVWAMMTRGEAYRQPATA

SEQ ID NO: 266709 - protein, 313 aa, unidentified
MDAIYVGIDVSQDRLDVAVRPGGESFAVGRNGVGIDELIERLKMVSPQRVAVEATGGFETVVAAGLAGTGLPVVVVVNPAQVRAFAHALGKRAKTDPIDAMVIAHFAEATKPQLRALPDDMTRLLADLVARRRQIVEMIAAESQRARRAGNPRLKKSIARLHKALEKELSELDGDIGDHVRGSPAWAEKEDLLASVPGIGPTIARSLIAELPELGMLDHRQIAALVGLAPWTRQSGQWRGKSVIGGGRASVRGVLFMGALVAARFNPTLKAFRDKLVAAGKPKLVAIIAVARKLLTILNAILRDKTPWQPKNA

SEQ ID NO: 266710 - protein, 356 aa, unidentified
MSRDIKYIGMDVHKEAIVIAVLNSSGKLVMESIVETKASSILQFIHGLRGELHVTWEEGTWATWLYDLLQPRVHQVLVCDPRRNALLKEGNKSDKIDAQKLANLLRTGMLRPVYHGEHGLRTLRELARSYQTISQDLTRVMNRIKALYRGWGIACGGTQVYAARYREEWLHKIEHAEVRRRAELLYQQLDGLQGLRRTLRPELLAESRKHKAAKLLWQIPCIGPIRAARLLALMQTPHRFRSKRQLWTYSGLGIETRDSAQYCFVRGHLQRAKKPQQIRGLNRNHNHEMKDIFKGAATRASCGVGPLRDFYVALLDKGMKPEMARLTLARKIAAIALILWKKEERFDAQQLKTQAA

SEQ ID NO: 266711 - protein, 381 aa, unidentified
MKKNSIAKLQVTKSQIRSMAAKQRLTVGLDLGDRSSRYCILDEAGEKASEDQLPTTKAGLDSIFAKMAPSRIALEVGTHSPWVSRQLAAMGHEVIVANPRKVRLITQSVKKNDRMDAEQLARLARVDPRLLAPIRHRRPEAQADLGVIRARAELLEGRTKLINAARGLTKPMGERLKSCDADTVKESMADGLSEATQKVIRPLLKSVEAITQQIKVYNEQIQEIEKRYPETELLKQVHGVGPLVALTFLLTLEDAERFEHSRDVGPYLGLTRKQRESGKSEPELGISKAGDELLRWLLVQAAHCILRRGAPDSDLRAWGLMKVGAGAGKKGSKSRKKKAAVAVARKLAVLLHHLWVTGEVYDRQYNRKAAEASQASKRAAA

SEQ ID NO: 266712 - protein, 361 aa, unidentified
MHDSITWIGMDVHKESIVVAAVNGAGGTAARWETPNTLKGKERLAKRLSEFGTIRCAYEAGPCGYDLRRFLTGKGISCEVIAPSLIPKKPGDRVKTDKKDAEKIARMHRMGELTAIRVPTPAQEALRDLLRAREDANEDLVRRRHRLQKFLLRQGRRFEGKSWTRDHWRWIRAQKFEDRNSETVLSEYTAAIDQEIERIGRLDAQIEQESKNPEIAPSIARLKALRGVQTLTAMTILSELIDLNRFPSARKLMDFVGLVPGEYSSGQKQWRGSITKSGNSHVRRVLVEAAWHYRHSPRSTGAAIKKRREGQPPEVIETARKAELRLYKKFTRMVMRGKKTTVAATAVARELVGFVWAIGRI

SEQ ID NO: 266713 - protein, 631 aa, unidentified
MTVEDEVAEVYAGIDTHDDSIHVAVISAQGRDLDDREFPTSTDGYRRALAFIASHGDTICIGIEGTSSYGVGITRAAISEGFDVVEVMRPERAERRRLGKSDPIDAYQAARAAMGSHRTAPVKDGTIDGIRALHNARRSARKARGAAMVQIHHQLVTAPPAIRERYRTMGAEKRITVLARIQIRPDRDPVERAIMLALKTLAQRCVELTRERDKLEAELDQLVTAANPGLRAAYGIGPDTAAQLLLTAGGNPDRLRSEAAFAALCGASPIPASSGKVTRHRLNRGGDRMANSALYRIALVRMSSDQRTKDYVARQRQAGRSTGEIMRLLKRAIAREVFRYLTTPVTVPAVDDLRPLRQAKNITLTAAANQLGVWPITISELERGIRRNDELADNYRGGSSAHDPYRLASARSRGPWGSKPRSGMDKIDFKKTLDSYRASAGDFRVVHVPEMRYLMVDGHGDPNVSSAYVAALESLYPVAYKMKFASKQDQGRDYVVPPLEGLWWAEDMAVFTTARNKSHWDWTMMLMVPSWVDQTMFAAAVKKVGTKKPPPRLDDVRLESMTEGQCVQTLHIGSFDNEAETLATMHDDFIPSHGLQLSGKHHEIYLSDPRKAAPEKLRTILRQPVSGDYQA

SEQ ID NO: 266714 - protein, 318 aa, unidentified
MSFIGIDISKQTLDWAMVETSEGSVVAEGSVKNTEGEIAAWVATLPAHEPTLIVLEATGAYHRPVLNALLAAGLSATLVNPLQIVGFRQVRLGRAKTDRQDARLLARFGATYVTELRTYVSPSTVQAQLRDWMRYRETLIRRQTRLAGQREANHWQGDTQVQHWLLEDKQIVDAKLAVVDAAIADLLDQVPEAAVVRAIKGVGPVVTAAVLGSLPVTIWGDAKKASAYFGLVPKLAQSGKRSQSRMSKAGPGDVRRVLWLAARSAIDHDPAIRAWYDALLARGKSKQLAQCAVMNKLVRHMMGRLKAWRAAQIGAAMA

SEQ ID NO: 266715 - protein, 387 aa, unidentified
MTVRTVNNVPAATHGETVRCLFAIELSTMSWVIAFNTPLSEKISRRTLTGCKWKRLLELIEEVRARVSRETGRAVEVVSCYEAGYDGFWLHRQLEAHGIRNYVIDPASLQVDRRARRVKTDRIDTDRLLRSLMAYLRGEPKVWSVVRVPSVAEEDARRLHRERDRLVSERVQHVNRIKGLCALQGIYDYHPLRPQAMARLEQLRTTRGDAFPPRLKSEIMRELQRLEMVVEMIATLEAERDAIVDDEASTHLNAKKIQDLHKLKAIGPEFATVLVGEIFHRNFNNRRQVASYVGFAPSPFQSGNVAHDQGISKAGNRKGRTTGIELAWLWLRYQPDSDLSVWFRTRVGTTKGRIRRIAIVALARKLLVALWRYLETGLVPRGAVLKG

SEQ ID NO: 266716 - protein, 372 aa, unidentified
MASIIYVGMDVHTTNFTFCCYTADSDRGFAVAQTEPDYRQVIKYMERVQKQRGEECKFVCGYEAGCLGYSLYHQLTRCGVDCVILAPSTMHQEKGKRIKTDRRDAENIAKCLAFSLYSPVYVPTTEDDAVKEYIRMRDDIKADLKRVKQQIIAFTTRHGFAFDGKSYWTQKHLKWLETLVFEHPLYKKTLQEYLILYYMLDEKVAVYATRIEEMSHLEHYEENVQKLCCFRGVAAHTALSLLVEVGDFQRFRSAKHFAAYLGLVPGEHSSSDKQIRTSITKAGNTHLRRLLVEAAQSYNRGAIGKKSAALKARQGGNPAEVIAYADKANERMQRKYYRIAFKSRHNIAKTAIARELACFVWGMMTGNISNAA

SEQ ID NO: 266717 - protein, 392 aa, unidentified
MFSACAPPVPVAGGVTQKRYVHSTKSECPSRTPQVEIRPKRRCAPMKVLIGVDPHKGSVAVAAVGEAKGELLERATFSQDRTGLRSLERWAKRFPERRWAMENARGLGRHLAGRLVAAGESVVDVPPKLSARVRVLSSGNARKNDGLDALATALAASRNDRLATVDLEAASEVLRLLSERREDLVAERTRALNRLHGLLRDLLPGGAAGKLSADRAARILRGIRARGGASARLRRRLASEVLRDIRTLDRKIADLNGRIQAEVEASGSTLTEIFGVGPILAATILGTVGDVGRFPTKAHFASYAGTAPVEASSGKVVRHRLSLGGNRKLNYALHMVATSQARSDAPGGAYYRKKLAEGKSPKEALRCLKRRVSDAVFRSLTADLQAPSHRAA

SEQ ID NO: 266718 - protein, 351 aa, unidentified
MIVAHHYDHVVGVDTHARTHTYAIVATKTGEILGTRAFPVTTAAIDRAISWVRGVAGGTVLFAMEGTGSYGASLSRALQRDGIVFCEVRPPRKSSRVRGKTDEIDAIAAATSAMGIELDALTRPKADGLRNALRVTLDARRDMEIRRTSARNQLNALVRTADFGLDTRRALTDRGVQRLATLDPQRSDVAERIIRAEAIRLASTVIELGRQMRENREALAELVELLAPGLQQIYGVGPVTAAAAIAAYSHPGRVRSEAAFAALAGVNPIPASSGNTTRHRLNRGGDRQLNRALDVIARVRMVSEARTRAYVERRTSEGRTSREIRRCVKRYIAREIFKALELRMGTALVMV

SEQ ID NO: 266719 - protein, 394 aa, unidentified
MKLVGIDVGKNSHHFCVMDKETGELNVTPSSFPNNKEGFDFLINSLKPYSKKSILIGMEDTGHYHVALLKFLLSNGYTVALINPKTTDLTRKMEGGITKNDKLDTITICDVLDTPERKKQYRITKVDRFDLYEQRQLTRHHHNLKEELNLYCNRLQKSIDLVFPEFNTLFSSKYSIVYMNLLKTFGSAEAIASTDIRTIRKCFEVKGRGGRISLTPEKLKECAKNSIGISSEVETIQIKHLVNQITLIKEQIAEIDKKIEEFSIKNNSPILSIPGISHFSGTSILAELGDIGNYSKPSQIIKFAGVAPYHYESSQYNAQHTAITKKGSKYLRKTLYQIILPVINNNPVFKKYYRLKISQGKGHRCAQGHCIRKLLRIIYHLLETGQSFDPALLR

SEQ ID NO: 266720 - protein, 425 aa, unidentified
MDFNENQKINQVTENTLVVGIDIAKRKHFACFVDDRGRVLQKSFPVLQSSDGFQWFYQRILTAMKEYEKTEVIVGIEPTGHYWLNLAYFLEERGIPLVMTNPLHVKKSKELDDNLPTKHDRKDALVIARLIKDGRFSYPRILKDMEAELRVGSTFRGKLTEELSAVKNMIIRWLDRYFPEFTQVFPSFGKMAMAVLECTPFPSDLHQKQADEVLSLYRKIEGLKSPQRPKAVRLIEVAAYSIGVTEGREMARIEIATLVRRYHQLEQDIERITGHLVELVKTSVEYEWLSTVPGLGDTTIVDLLAEIGSFSYYEDPRQLIKLAGLTLRESSSGQHKGQKRISKRGRRKLRALLFRVMMPMIRHNEAFRKLHEYYTNRQVNPLRKKQSIVVLCGKLLKVLHGISTKHKAFDAQRMMKDIPSLAETI

SEQ ID NO: 266721 - protein, 319 aa, unidentified
MAQNDLVVAGIDVAKDKVDVCLRAPSLRRTFANTAEGRRELTAWLRRQKVGKAVMEASGGYEREWAKVLRNAKIEVRVVDPKRVRSFAQSAGRLAKNDTIDAEMIAWFAETFDEVRGQAYDAAREELVQIVNARQALLEQQTQMQNRSGHTVPVPVRKMHERLLNVIILEVARLEAAIAALIKATPHFAGIAAIIESVPGLGKITSAGLIAAMPELGQVSNEAISALLGVAPYDDDSGKRRGERQIKGGRRKVRNLFYMACLGAATRHNPVLNTFYRRLITNGKKPKVALVACMRKLIVILNIMIARGEKWDANRYAVD

SEQ ID NO: 266722 - protein, 328 aa, unidentified
MTNAREPTSLPLQFIGVDMAQQVFEWALHGVPGTHTVANNDEGFETLLETLKSLRVGLIVMEATGGLERRLAGFLLRHDLPVAVVNPRAAREFARSMGHLAKTDAIDAVALAHLAQTLAAKADQAGVAFCPPTAEVEQLQLMMTRRAQLISMRTAEKNRLVSAGRVLHRSVTTVLKTLDKEIARLERDIDAHLEQHFKEQARRFQAVKGLGPITCAAMLAFMPELGTVSSARVAKLAGLAPLNRDSGKERGKRHIWGGRSAVRSALYMATLSAMRFNPVIKTFHNRLIAAGKPKKVALTACSHKMLRILNAMARTGQPWNETLHAIAP

SEQ ID NO: 266723 - protein, 448 aa, unidentified
MKQEPEEIPDTEHELVLERVCAIDVAKDSGKVCVRVSGRASKRVSKVWDVPARTGAVAELAEHLLVEGIEKVTVESTSDYWRIWFYVLEAAGLSVQLVNARDVKNVPGRPKTDKLDAVWLAKLTEKGLLRPSFVPPAPIRELRDYTRLRIDLTRERSRYWQRLEKLLEDALIKVSAVASTLDTLSVRDMLEALIAGERDPRRLAGLARGRMKPKQAALVEALTGRFDDHHAELTRMLLDQIDALATQIGTLTTRIDELLTAMEPQARADEPDTRGGAGAGADGARESTTIERLDEIPGISPGLAQIILAEIGLDMSRFPTAAHLVSWAKLCPRTIQSGAIQRSGKTGRGNPYLKGALGEAAAAAAKTNTFLGERYRRIVKRRGKLKALVAVARSILVIIWNMLNDPTARYADLGADYHATRINTERRTRNYVTQLMAMGYRVTLEPAA

SEQ ID NO: 266724 - protein, 388 aa, unidentified
MFKNFIGIDVSKGSFNFCVIDETGKTIYKGLHEMNEKGFEDFRQILESFPVSVVVLESTGSYHINILSFIASFKKDICLVNPVLIKRFIQTVSLRKTKTDEIDALSIARFAKVHHAELKNYAPAEFDEIRAIARIREDVAQDLAKAKTRFKQDVCTVFPELESACDIFTQSMLNLLNSFPTAESIAKTDVRTIEKALLCTRGRKTIFSAKEIKELAKSSVGHRSKIMETVIRHDVETLLFFLERLDELTKCLVGEVEKNSSRQLQILTSVKGISEITASHFIAETGDISRFDTREKLIAFAGTDPAVRESGTSIHARGKISKKGSKSLRRTVYLMAMGVMKYDPKFKEYYYKKREQGMQHRKAMIALCNKLLRVLFAILKKEEFYVAA

SEQ ID NO: 266725 - protein, 454 aa, unidentified
MEKDREDKKIFLGIDIGKTLNWVSFLSLYSKDEIRKRIKITNNIYGFLKLESILKELLREEKITKEEILIGIESTGHYWINFYEFFTKRDYEVVMVKNRVVKLKREAKYSQKGKNDSIDCHCIGLVLKDWDYFNIQKTDRNFSALKRLTRSKEDYTKIKVQNKNRLRAWIDVNNPIYFMIFTKMDSKTGLAILREYPSPHDVVNKDMEEIKGILKKDGKNKGIDLRIINEYVMLCKDLYKDIIVLNNGDRRELECYLDQVASIEKQLEQLDLAIQELAMETIPAYEKIIKIKGMGDTQIVNFLAEIGLIENFPSARALQAYFGLSIRADMSGNMVKQSRITKAGNRVGRKILYNIAMMLVNHNKDWRKLYCYYKSYNRKNANSNNEMLVAVACKLLRVLYGMLKHNKDFDPDELLRHFDFRDCNKEKFIKEYIGDKKKLAIPKEELEALFKEKY

SEQ ID NO: 266726 - protein, 386 aa, unidentified
MQLNNNEQANTPMKKELYLGLDVHKDCIITAVAQEGRQGEVRDTGVISNDLHALEKWVGRLRKAHGSDVVLRACYEAGPCGFGIARRLKQLGVECEVVAPSLTPKRAGERVKTDRRDARKLARLLRAGELSPVYIPESTDEAIRDLCRARTDAVDDRCRSRHRLKGFLLRHGYHYQGKSSWSAAHERYLRELVLPHPAMKVILEEYLQGIAAAGERIARCEEAMRSLLEKWHLRPAVEALMAMKGFRTVAAMILVSELGEVHRFSHPRQVMAYLGLVPTENTSSDRRRQGHITKCGNAHARWLLVECAQHYATLPKVSKELSRRQEGQPREVRALSWKAQNRLHGRFARLSARRLQRNKALVAIARELCGFIWELLRMQRCYQTPH

SEQ ID NO: 266727 - protein, 328 aa, unidentified
MENEIHFIGIDVAKAKLDVDMLRPDGRHRSKKFANTPGGHDELVSWLQGHQVIHAHICMEATGTYMEDVAAHLSDAGYQVSVINPMLSKAFVQSQGIRSKTDTVDARQLAYFCREKRPAIWEAPHPVERALRALVLRHQALTEMHVQEQNRRESARDVQLPSIDMHLLWLDTELKRLEKQIKDLTDDDPDMKHRRKLLDSIPGIGPKTSAVLLAYVGLKERFREARQFAAYAGLTPRQHESGSSIRRVSRMSKMGHVSLRRVLYMPAMVTLYKTEWGREFRERLEKNGKNAKLIIGAMMRKLAQVAYGVLKSGRPFDATLHTKNACMA

SEQ ID NO: 266728 - protein, 397 aa, unidentified
MVVVVDARTPEEKPARRRFVTMPSELHRLLTWLREQGVEEAVMESTAQYWRSVWMELEPHMRLHLAQAFSNRAPRGRKHDFKDAERLVRRLIANELILSFVPSGEQRIWRSMTRMKLQLTRDRVRLQNQIECLLEEMRIKLSIVVSNLLGASGLRILHALANGETDPNKLAQLGGERLQCTEEQLVDALTGRAQPVHGEMLALQLQRLQLIDQQMARLNSMIAAAMKAHQDAVIRLAEVPGLGVDSAQQIIAEVGAQASTFPSAAELTSWVGTCPGKEESAEQNHSSRSAKGNKYLRRVLNQAAHAAVAMKGSHFQAVFRRLLPRLGYQSAIWAVAHRLCRVVWKILHEGVRFIEQGHEVGPREKKKRAQMLARALRKLGYEVTITAIKQPAANPAV

SEQ ID NO: 266729 - protein, 474 aa, unidentified
MIDLKKIISENETKEEDRKEMKRLFIGIDIAKEKNFAVILMNENNNKILMKNKFENNPYGFRMFLLEVEKLMKEKEILIDEVIIGVESTGHYWEGLHYFFNKRNFEVGIVKNNLVKLKREAKYPNKGKNDLIDSHCIALNLVDKDYVFVKERDRLMISLKRLTRTKYNLLKSSTQNKNLLRAWLDSYNSVYLGVFTEPFCKTGRSILREFPSPRDIIDKNMEEIKEILKKDKRNKGIHYRLIQEYLYRVKEVYMDIQEVEAGSRKQVELYLKIYENLEMEIENIKINIKEVAEKANLDYEKIIKIKGIGEQDIISILAEIGDINNFNNPRELQAFLGLGITGKSSGTGIIKKPKINKAGNRRARSILIFMTINLIDKNSDWKKVYCYYKAYNRKSPKANKKMVVAVACKLIRVIFGMLKNASEFDRNIVFKNLDFKKCNKEQFIEEYTGGKRKSILTAEELEELFDRANIDKLF

SEQ ID NO: 266730 - protein, 355 aa, unidentified
MDQQNNTTISFKGQHFFTGLDVHKKSWKVTIRINKTVIKRFSMDPSPEQLAKFLNTHYPDGMYHSVYEAGFCGYWIHRRLLELGINNIVVNAADIPTKHKEKDRRDDKVDSAKLARELENGSLIGIYIPSPQQQSLRSMSRLRYQHRNHTTRIKNRIKMFLHLHGIKIPEEYSESYWSLAFINWLKSLQFEFPYNNQYLWHHIRALEYQQTMMNDIIAQMRDHCKQNNILKCIHSVTGLGVISAFTIYAELIDMKRFKDLDHLASYVGLVPSKDSTGDRKGVKGLTPRYSRYVRYLLIECAWRAIGADPALTQAYATLTSKMSKQKAIVRIAKKMLNRIRYVWLNEKIYVTAVAK

SEQ ID NO: 266731 - protein, 349 aa, unidentified
MGEVSTIGVDIAKSVFQVHGVDADGTVVIRRRVGRAKILEFFSKLRPCLVGMEACATAHHWARELKKLGHDARLMPPTYVKAYLKRGKNDAADAAAICEAVTRPSMRFVPIKSVEQQSTLMLHRTRDLLIRQRTQLINALRAHLAELGLVAAKGREGLCQLVTVVTECGDERLTSNARFACQAIVGQLHAVQTQISGLDKRITQTHRANPDSKRLDAIPGFGVILSTAVVATMTDPKAFKTGREFAAWIGLVPRQNSTGGKDRLGSISKQGDRYLRRLLVVGAISIVRTARMWPDKYPWVIELLGRRPAKVVAVALANKMARVAWAVLAKGETYRAPTRLSSAAITVAA

SEQ ID NO: 266732 - protein, 362 aa, unidentified
MRIIGCDLHARQQTLAVLDTATGEVMEKTLTHSGSNVQEFYAALPGPVRVGIEATGTMQWFLSLMEELGIDCQVGHPAKIRAAEPRKQKHDRRDADLILKLLVENRFPSIWRPSKELVDLRALLLHRHQWVRMRTRIQNALQAIALANGLRRGPGLWSQTGQCTIASLPLAPHTAHRRSELQAMYAKFDNDIEKLNQRVQEQAGKRPGATLLMTHPGVGPITALATDVFLGNPKRFADGKALASYVGIIPSEYSSGGRQRLGGLSKQGNPLLRFLWCEAAAHAVRRDPGLQRFYRRKLVQKGLGKARVAAARKLGIRLWIMLRDQIDYHEFCRRGQMQQNSGDACAGMPGTRYGANSHRPID

SEQ ID NO: 266733 - protein, 344 aa, unidentified
MEEYIGLDVSLKETAISIRRGGKRIWRGKCKSDPNCIVTLLHKHAPDARRVVFETGPLSIWFYHALTDAGVPAICIDARHAKAALDMAANKTDANDADGLAHLAEVGFYREVRVKGYDSMLARTLVAARTRLVTICTELSNQIRGLMKTFGLVMPGGKGATFGNNVRMLLDDHQSLSRIILPLLKAWYSTREQAAELSRQLIAVARASQSCRLLMSVPGVGVVTATSFVTAIEDPENFKKSRSVGAWLGLTTRRYQSGEVDYDGHISRRGDAHLRGLLFEAATVILTRSSADSGLRRWGLKLRERLGFKRAAVAVARRLSVTMHAMLKTGQLFDRAVGMDATNG

SEQ ID NO: 266734 - protein, 392 aa, unidentified
MLFVGIDVASKKHDIAITSSEGDIIVRPFTISSDLEGFKKLRMVITSHTESVEDVRIGIEETGIYSKNISEFLALHGFIVHMINPVLTNYSRKSQSLRPAKTDKIDALAICRYIQSNFKRLNSYTPSLYIHMELKSLTRARFDILKNQIKAKTEWTRLLDLVFPEFRQHFKQHSKWVYNLFSRYPTVEQISRMHLCTLQRIIKVQGDRVLAAQTIKLLAMNTIGHPSDTNGVLLTNTLCDIIHYASQLKRIEKQIKSVVNENFAFLLTVPGIGDITGATIIGEIGDINRFHSSSALVAFAGMDPAIHESGDFRANTMHISKRGSRYLRAAVFLSTRAAIINPNIQDNKFREKYLKKIAQGKHHNSAICSASKNMINVIYSLMKSHESFNYFV

SEQ ID NO: 266735 - protein, 339 aa, unidentified
MNITTVGLDLAKNVFHVVCLNEHNKEVRKKMLRRNQVRQFFAQLPVCTVAMEACATSHYWGRELIALGHEVKLIPPQQVKPMVQGNKNDYNDALAIAETVNRPKTTFVAVKTVEEHDIQAIHRMRSQCIRDRTALSNSTRGLLGEYGISFSKGLATLRKKIPELLEDADNGLSFRFRNLLARRYDQLVELDEHIAFYTKELEILSRQDEACQRLQTIPGFGPIVASAFRSTVGDGSAYARGRHAAASLGLVPRQHSSGGNNFLLGISKRGDRYLRKLLVHGARTVVRHAVDRDDPFSRWINRVSERRGKNRAAVAVANKLARVGWAVLRYNTEYDPAMA

SEQ ID NO: 266736 - protein, 386 aa, unidentified
MKTIKQSVGADIAKDKFDACFSVLTHEQRVVVKASRKFPNSPKGFADLSKWVSKWADPSVELLFIMEATGVYHENLAWQLHQAERKVIIVLPNRVKQYTRSLGHKSKNDKVDAKALAHMGAERNLAPWQPMSCQLYLLRKLTREHEQIHQMRTEVSNRLHAETHSMLASKTTQRRLQKTLKLYDMQLQAIEEEIKATVEEDPLLSDKVEKVTTIKGVGLLTAATVIAETNGFALFTSQKQLVSYSGYDVVENQSGKRNGRTRISKQGNSHIRRILYMPALHAVRRNVPVFRALYDRLTGKGKKKMLAYVAVQKKLLILIYTLWKKNEVWNQDRYAQQTPKGDIQSLEAGASLSGVSGADKNTVAPTLARATQDEHPAPIGQELFFR

SEQ ID NO: 266737 - protein, 393 aa, unidentified
MKVWDFCERIDIRKISLESSAVEKIGNSEFQQKAPNYYNFDVIISISLSDEMTIKATTKAVIKYLEVIKKKHKEEILFACGYEAGPTGYGLCRGLQKAGYGCVVMAPTTMSNPDGKKRVKTDRIDARAIARILAYKSYSQVHLPSEEMEALKEYTRARDAKKRMFKKAKQELLSFLLRNGKSYPESGNYWTEKFFKWIKTVQFSEKWMQEAFNEYLAEVYSLKAKIELTDTKIREIAELEIVKDKVDKLICFSGIDVTTAVETVVEIHDFTRFATAAQFVSYLGLCPGEDSSGKTKNMLPLTKAGNKRVRALFCESAKAIKRTNPYGQKSKRILERQKNASPEIVAYADKATKRIRTKMRHLEERGKNYNVSSATGARELACFVWGMMNGKTA

SEQ ID NO: 266738 - protein, 372 aa, unidentified
MNTCERSKTLFVGIDVHKDTHTAVGLSPFGEKIFEMKIGNEATDFVSLVERTQGEAERAGLSPSFGLEDVHSWGERLSSFLVGEGLPVRAIAPILVDHARKHATHPEKNDSLDAQGVAEVMIRKIDSLPAYTLTKDGGTAKNIRDISLDREHLVKERTRLKNQVHILLYRIFNTAYAQEFKDPFSVKALRYWMKSHPKGISPFLIRSMKRKVRRLMDIRKEIKELEQELETLITESGHTIQTASGCGIVIAAEIIGEVGDVSRFHSPAQLAKYAGCAPRECSSGKTVRWRKTRSGNRRLNRSFHRMALSQISRMGNTAAHAYFKRKVSEGKSKSQALVCLRRQMVNIIWMMMKHKTEYRSPVGEAGYPQKDD

SEQ ID NO: 266739 - protein, 408 aa, unidentified
MRVIGMDIHRTFAEAVMIDGDRLMRLGRINMSRDHLAAFAAKLTSEDHIVIEATGNAHAVAEAVAPFVGRVIIANPRQVHLIAKARIKTDVIDATVLARLYASGFLPEVWVPDQRTLSLRRQVTRRNQIVRQRVRLKTMVQAILHAHLVPQCPHADILGPKGRAWLLAQLLPDDESTAIERHIREYDRLTDDLRVVERELARDALGSAETKRLMTIPGIDMVVAVGLLAAIGPIDRFTSPGRLVAFLGLNPSVHQSGNSPARHGRITKQGPCHARTMLVEAAWQAVRGPGPLRAFYERVRGRRGTHVAAVAVARKITVIVWHLLTRGEDYAWVRPALHAKKLRDLELRSGQPARRGQRGTGYAYNLTRSRREERQRGERAEAAYKRLTEGWTKRGRRVSADASKEERQ

SEQ ID NO: 266740 - protein, 429 aa, unidentified
MNYTQNEKIMQVKVSTLVVGVDIAKNKHAARFFDFRGIEYDKAIFFENNEAGFKKLLNWISKVSEKENKTSVIVGMEPTGHYWLPLEEYLRRKTDFLRVVVNPAHVKKSKSLDDNSPTKTDRKDAKVIAKLVIDGRYSVPHMPEKEYADLRVAMTHRERLVKDIINLSNKIQQLIDKYFPEYQTVFKKWSGKASVAILKELFLPYLILEKTDEEIVGIFKKGANRGVGIRRARKLKKAALNSIGIKEGGEFTRYELRNLLEQYELLNDQKELLEEKVEKLFNSMEEAKYMESVKGVGIITVAGFIAEVGDINDYDHPKQIQKLAGLNLKEHSSGKHLGQTRITKRGRPRLRALLYRVMLPILAKNQEFRQLHEYYTTRRDNPLKPKQSMIALACKLIRIFFALGQKHVMYDGEKLMNDIDRNLDLQEVA

SEQ ID NO: 266741 - protein, 374 aa, unidentified
MSKIARIGIDTSKGSFELHGVNEKDEVVLRRTVRRRQFLEFMANLEPTMIGLEACGASHHWARELGRLGHRVMLIPPQAVKPYVSPGRKNDKNDAEAICEAMSRPRVRARLVPVKSVEQSASQMLMGVRDSLLKRRTQLCNTIRGHAAEFGLVAAKGLDKIEPLLVRIAGDEGLPALAREMFADLGQEHAELSKRIAQIDRKLAAFHRSNELSRRLMEIPIVGPVGAGLLITKIVNSHGFRSGRLCAAWVGLTPKDHSTGGKQRLGGITRAGDESLRAVLVSGATAYIQQVRRGRIVPSPWLAALLERKPPKLAAVALANKTVRIAWKLMTSGGRYDPTHRVDREGPGASLYGGLRAEPLAPSPTAGHSHAVAA

SEQ ID NO: 266742 - protein, 335 aa, unidentified
MDKMEACGIEVSAAELVVAWGGEKKEVREQRFANTAAGHKMLLRALTRGGKRVRAVMEATGLYGLDLALMLSAQAGVELMVANPRAVRHFAQAMMQRSKNDRLDAAVLREFAARMPFQRWERPAANTLALWAIARRLEVLTRQRTAEKNRQHAAQISQAAPAIVRKEIARSLLELQRAILRLRREALRCVAAEAQLQQRYELLCSIPGVGSVSAIQVLAELAMLPEDRDVRQWVAFAGLDPREYSSGTSVRQHTRISKVGNRHLRHALYMPALVASRHEPHLRGFYERLLARGKKKRQALVAVARKLLHAIYGMFRSGHRYDGSRVFALPTAKIA

SEQ ID NO: 266743 - protein, 420 aa, unidentified
MKIIYPICCGVDVHKSTIVATVALTDKNNITRYVTKTFSTLNADLIRFRTWLLEYNCFHVCMESTGKYWIPIFNILEEANFFVLLTHPKYVRAIKGKKTDKKDSKWIADLFKFDMVRSSFIPPKDIRALRELSRYRFKLVAMRSSEKNRYQNCMTVSNIALASVLSDPFGKTATDIMQHVLSSNVFDEDHCKRLIRKSAKKKTELILASIRGLKIEPDQRFKMNEASAHMNYLDQAILRTEAQLYVRIQTHWHLVEWLSKQLPGISKLSAALIIAEIGADMTQFESSKHLTSWAGLTPANNESAGKKKSVRISKAGQFLKPLLVQCALAAIRDKKETYFASKYQKIKKRRGHKKAIIAIARMLLTCVYHMIKTGEVFNPSDYQELYASISQKRVVLSDETAIAFLAAQGYDVSSLMKKAL

SEQ ID NO: 266744 - protein, 419 aa, unidentified
MFKIFRKNCCGLDVHKTWIYACIGITDANGRTEYKQARFSAFSKGLRELAEWLAKYDCVFVCMESAGKYWIPVFNILEKTCFVTLAHPKYTKPQKGNKTDRKDAKWICDLFMCDMIKPSFIPPLDIRNLRDLIRYRFKLTNMLTGEKNRAQNCLTVSNLKLDDVFSDVFGKSAMSITKYILEHPGEYFDVSPFIHKGCKTPIEEIQDAVDGSISREQAAKLRECLKHIEEIETHKESIESEILRLTMPYAHSLELIRTVPGFSANPMTAIALISEIGVDMSVFPTAKNLCSWAGCCPRNDQSGGKSKSTRISRAGAYIKPLLVQVANAVVKSDKYPEFKERYRRLKARRGHKKAIIAVCRMLLTAIWNILSKLEPYSDTGYIVDRPVNNSMIISTSQALTLIRLRGYTIKDDAVPEPSG

SEQ ID NO: 266745 - protein, 423 aa, unidentified
MTGVSTESSSFVALIGIDWADQHHDMALRELSTGGVERMRIEATPEALAEWLSELRKRFQGRRVGICLEQARGALIHALLEHDFLVLYPINPATLDRFRKAFSSSGAKSDPRDAHLLLELLEKHRERLHAWTPDDPDTRALTRLVEARRKAVDLQTQFVQRLTAELKGYFPQALEWAGSLTSPMAHDFLRRWPTLQAVKRARESTLRRFYSTHHSRSAEAIQMRLQQIRQAVPLVNDRAIVDTSVLTVQLLVEQLSVLVRSIRTYDAEIQILFERHPDAPLFEGLPGGGSALAPRLLGAFGTDRSRFGSARDVQQYMGIAPVTEASGKSRWVHRRWAAPKFLRQTFHEFAGHSIRYSGWARAYYDQMRARGLGHHAAVRSLAFKWIRILWRCWQDRTPYDESRYIEALRQRGSPLVTRLAAAA

SEQ ID NO: 266746 - protein, 368 aa, unidentified
MKHVTTYVGVDAHKKDLFIAMLIGDRSTPVTWTVANEPNAVRRLVRKLEREAPGPVRCCYEAGPCGYALQRQVTTPRVSCQVIAPALIPRKPGERIKTNRRDARKLAELLRAGLLTEVRPPTLAEEAVRDLCRARDDAREDLQRCRHRLGKLLLRRGLHYSGRNWTRAHRRWIDSLEWTQPSERIVVDDYLLAIDHVEARLIELDTQLTKLAQTEPYREPVGWLRCFRGIDTLTAMLILAELHDFRRFPNARALMAYLGLVPSEDSTGEHHRRGPITRTGNALVRRLMIETAWHYKHRPSVGVALTRRRKGQPGRVIAIADKAQQRLCRRFRSLAEHHKPAPKIVVAIARELAGFLWAALQPAPTLTS

SEQ ID NO: 266747 - protein, 383 aa, unidentified
MACVVGDGGGVIDRFDISHDATGLTEMARRFRAAGVQRVAIERGDGPVVEVLLDAALAVFVVPSRQIKSLRGRYGSAGNKDDRFDAYVLADTLRTDGHRWRALREDQDDTRALRALCRARKDLVETRVQVLNQLRGNLELALPGAIGLFSKPDSKITLAFLRRFPTAEKVDWLSVKRFGSWLASMGYSGGVSAAVLFQRLTDAAPGLLGAEGQARGRITLGLVTMIETLNAEVEAIEQQMSLLLSAHPDQHIFTSLPRSGMVRAASLLAEIGDCRERFPTDDALAALAGASPSTRQSGKRKQTVFRWACNKKLRAAVMDFANGSRMADPWAADIYQRAVMRGYRHPHAIRILARAWIRIIWRCWQDGQAFDPARHRGRHTLAA

SEQ ID NO: 266748 - protein, 289 aa, unidentified
MEGFETLIIWLEKQGIQKVHACLEATGNYGEDVAIYLHEGGHTVSIVNPARIKGFAQSELIRTKTDKIDTGIIARFCLAMKPEPWIPPAPEIRSLRALVRRVDSLIDMRSQEKNRISTAHESVMHLIKEHIAYLDKEIEKIRRQIADLIDQNPDLKQKKDLLDSIPGLGKATIPHLLAELNDLEKFRHVREVVAFIGLAPKETLSGSSIKGKPRLCKIGHVRLRKALYMPALVSIQCNPMMIAFYNRLKEKGKNGKVIVCAIMRKLVHVIFGVLKSGKMYDPNYKPTFA

SEQ ID NO: 266749 - protein, 348 aa, unidentified
MLADQLDYVVGVDPHRDLHALAVVHVLSGAVVFEKTVAANGDGYALALKLVDAHASGRRAFAVEGTGSFGAGLTRFLSGRGERVLEVSRLRRERRSGGKTDALDAVRAARSVLAQERPATPRAGGERQALQALVAAREGAVNARCAGLGQLRDLLITTPEPLRSELRPLTQARLLRRLAATRPDTRRDPELRGSMLALRSIARRVLELTAEERALGREIEALTRKLAPQLLEQPGVGPHAAAQLVLSWSHQGRIRSEAAFARLAGAAPIPASSGQTVRYRLDRSGDRKLNRALHMILVTRKRLHPPTIAYIERRLQEGKTRREANRCLKRYLARNLYRLLEHGAPLAT

SEQ ID NO: 266750 - protein, 343 aa, unidentified
MAIVNRIALDLAKDFIQVLALDENEQEVFNKKLRSNKVLAKLATLKRTDDCEVAVESCGMSHYWRRECEKLGYKTVALPPRFVKAYLQGEKNDANDARAIAEAASRPNRQTIRLKSIEQQDLALMVNQREGFVQTRTQFSNRLRGQLAEYGIILPKRVSTILQRVPEILEDDSNALTLQSRDLINRLYQMLRTVDEEVKALDKRLAAQADNNEDSRRLMTIPGIGPITATSLLALIGDVNEFKRGRNLSEYLGLVPRQNSSGGKDRLGGITKKGNTKLRTLLVHGARSALRVAQQRDDRLSLWAQDIAKRRGNNVAAVALANKHARIIWAMLKNQEDYRMTAA

SEQ ID NO: 266751 - protein, 323 aa, unidentified
MSVVVGVDVAKRSFDIATPLPNGKVRTKAKLANDPSGFAQFEAWLERHAEPRAWVIMEATGTYHEALADCLHAKGYRVCVLNPAVIAKFAEADLRRVKTDKADAKVIAAYGQQKTAALRQWEPEPPAQRRLRALVRRLDDLKEMQQMEQNRLEVAQTAVQASIKAVIGHISEEIEKTHKAIEQTIDDDPDLRQRRELITSIDGLGDTTAALILAELGDPLKYESPSAIVAFAGLNPMIHQSGEKTGQSTISRTGAPRLRAGLWMSGTVSIRHNPVVKALAERLSSRRKAYKQIVCAAMRKLLHLVYGVVKSGRPFDPQIALAG

SEQ ID NO: 266752 - protein, 325 aa, unidentified
MNLSVVLGVDIAKLKFDVCLVKENQKVKHKVFANTTHGFRQLIAWLDSHQVGSLHICLEATGSYGEALALHLFDEGYQVSVVNPAAVKAFAASRLTRTKTDKVDAELIARFCLAQQPEAWQPPLPQVRRLQALVRRLESLIEMRVAEENRLSSGVAVDAVRHSLEDHIAYLVEQIKQTEQMIREHINNHPDLKEQSTLLDSIPGIGQTTAALLLAEIVNIKEYKSARQVAAYAGLVPRERRSGSSVRGRVQLSKIGNARLRKALYFPAMTALRCSSFFQQWASGMRERGKCKMSVIGAAMRKLIHLVYGVLKTGKPFDPNWAKTA

SEQ ID NO: 266753 - protein, 349 aa, unidentified
MVTIGVDPHKKTHSAVAVDAVGAVLDGRSEPAKRDGFGELLTWARGLRDGERVWVIEDCRHVSGPLERFLLDRGEMVVRLPPGLMAGARHSVRERGKSDPIDALAVARAALREGIDTLPAARLAGVELEIRQLAVHRQRLVDARTRLINELRWQLHDLWPEWEIPKGVLIGAGWQQQVAGRLQQAEPTVRVRIARDEIRRIADLTRTINELHDELALLVAQAAPQLLAEHGLGVLTAAKLIGEIAGIDRFTNDAQLARLAGCAPIPVSSGRTDRHRLDRGGNRQLNHAIHMLALSKIRHDPQTALYIAKQRQRGKTNREAIRCLKRHLIRRVYNLLRDPDQAPTTLCLT

SEQ ID NO: 266754 - protein, 408 aa, unidentified
MVYIGIDIAKRSHVLSAVDDDGKAVIESFKFANTDRGFEKLLERLKKAGVEPGGSLSGMEATGHYWIALFDFMTSHGYDVAVINPIQSDAFRDVWTVRKVKTDAIDAAMIADLVRYKRYEPSALGEEATDELRSLARYRMSLVERSTMLKNRATAILDRVFPELDGLFSGSFGSTQRALLEHCSTPSQVLSTNVRTLERILREASGGKCGREKAEKLKAAARSSVGVGFGSRTLAFEIRLLMEELDFVRGQIDEVDGELARLLDETDGRWLLTVPGIGLVLAATIAGEIGDANRFDDAHQLMAYAGMDPTKSESGETVASDGNMSKRGPAALRWAFMQAADSARKYDPYFGDYYAKKKGEDKKHHYVALSGVARKLMGVSLALMKEQRPYEPTPPKHHLPGHLQEAAK

SEQ ID NO: 266755 - protein, 421 aa, unidentified
MKNNAARKLKQVPSGYLLVGVDPHKRKHAAVVITQDLMVQSKFKFANSRRGFEETLERVRSEMKRTSCRGIMFAIETAGHYWRNLAYFLDERGVPFHVINQFALKRRREGMNLNRSKNDYRDAEVAAKLLCNGEFTETKLPQGVYAELRASYNAYRRLVKERTRITNLLQGLLDGLFPEFTQVFKDPLGQTALSVLSTCPIPKTIAGMAEEEFVSTIRARHQGRLMRKKLRALHYAARTSIGIEAGAQSVSHEVSFLIGKLQLIKWQVRKIEGVLTRLVDETEEGKYLLSIRGLNYIAAAGMLAELGSFKSYRNARQLIKMAGSNPIESESAGKRATRTPMSKKGRPGLRYCTWTAVIPLLRHNPDFRSWAKRLRERPVHANPLNGKEIVGATLNRLLRLAFTLVKKQTFYRLPQLVEVTN

SEQ ID NO: 266756 - protein, 399 aa, unidentified
MNDGYGVYLGLDVGKGDHHAVGLAPDGKRLHDAPLPNTETRLRQLFGKLARHGQVLVVVDQPASIGALPVAVARACGHQVAYLPGLAMRRIADLHPGSAKTDARDAYVIADAARTLPHTLRRVDTGDEALAELEVLVGFDDDLAGEATRVSNRIRGLLTQIHPALERVLGPKVHHKAVLELLSRCGGPAGLRKAGRRKLLSIAAVHAPRMGERLVEQIMTALDKQTVTVPGTQAAETILPRLADSLRDVLRQRDQVAGEVEGMLDAHPLASVLTSMPGIGVRTAARILLEVGDGTAFATPGHLAAYAGLAPVTRRSGSSIRGEHPPRGGNKNLKRAFFLAAFAALADPVSRAYYDRKRAEGKRHNAALICLARRRCDVLHAMLRDKIPYQPRPTSPVPA

SEQ ID NO: 266757 - protein, 346 aa, unidentified
MTNVTIGMDLGDKNHEVCVLDQKGHLMDRFVVGNTRKQLRKVFQPYAGALVAMENGTHSPWISRDLKALGCKVLVGNARKLRMIWARSQKTDVKDAEMLARIARFDRQLLYPIRHRSQQAQIDLEQIKARDLLVSLRTDLINHVRSTVKAIGERLPKCSADCFHKRAQTFMPDSLRTALMPLVEQIASLTQQIRGYKCKIEQLALTVYPETACLRQIQGVGLITSLAFILTLESPDRFDKSRAVGPHLGLTPRQDQSGSCNKQLRISKEGDVYLRRLLVSCAQYILGRYGQDSDLRRYGERLIARGGRGAKRKAVVAVARKLAVLLHRLWSTGEVYQPLYNARKVA

SEQ ID NO: 266758 - protein, 341 aa, unidentified
MHNFNAVAGLDLSLNSFTTSLISSNEKFKSKIKTFKRTKEGLEEFVKWIENQGFPKEKVLVVMEATNNFWEEVAVKLAENKIAVSVINPRVIKDFARSLQRKAKTDKIDAEVIALYGVRMKPKVLDISKSKRFGKLRNLVREREFWLREKVRLENYERTLKSGVFVSEEGKERVKEMIEKVLLYIEEIEQEIKREIEKEEELREALKIVGSIPGIGEVNGVVILVETGLFKGFRRGKEVVSYAGIVPRVYESGTRKGSKGITREGNRRLRQAAYFAAVASLRSKCGVFKEFYDRLKERGKAKKVALVALAGKILRIAFALVKKREYFDARKLQSQISSVGA

SEQ ID NO: 266759 - protein, 414 aa, unidentified
MEKLLERCAALDVHKRQVTACAHVPDRKGERAELRAEFETMTPDLLALRDWLKGLGVTHVAMEATGVYWKPVYYLLEDDFELLLVNASHVKNVPGRKTDVADAQWLCQLLEHGLLRGSFVPPKPIRELRDLTRYRKSLVWERQREANRLQKLLEDANIKLASVATRVLGASGRAMLAELCEGRNDPEALAELARGKLRRKLPELRKALTGRFSSHHALLVSHLLSHIDYLDETIAALSAEIEERLRPFEREVQLLTTIPGVAQRTAEVILAELGPDMRRFPDHRHVAGWAAICPGNEESAGKRKTGKTRKGDSWLRTALIEAANSAAARTRDTYLNAQYVRIKRRRGHSKAIVAVAHSILVAAYYILRNAKPYEDLGGDYFLRRETPERLTRRLVRQLERLGQSVTLEPALEAR

SEQ ID NO: 266760 - protein, 354 aa, unidentified
MKVITNEVRFVIGCDFHPSFQRIAVLDRETGEISKRTLLHGDGEARRFYQSLLGCKVVVGMESCGNSLWFEQMLAEMGHGLAIGDAARIRATVVRRQKNDDRDALHILELMETGRFPALWVPSPEERDVRALLLHRFKLVQMRTRVKNQLQHIALNYGFQKKRKLWSEAGRKFLKELELPTWTRRRRDDLLQMLGPLDAIIEELSAAVEAEVEKNAGAQLLKTHPGVGPITALGFVLIMGPVERFAGSKQVASYLGLIPTEDSSGGRYRWGHISKQGNTFLRTMLVEAGQTAARRDPELRRAYQRLKHKKQFSGIAKVMVARKLAIRLYWMLRTNQSYPPARMQGSPSHSVVER

SEQ ID NO: 266761 - protein, 338 aa, unidentified
MNMKRVGLDLAKQVFQVHGVDTHERVVCRRQLKRAQVLDFFRQLTPCLVAMEACGSAHYWARELRKLGHEARLIAPQFVKPYVKGDKHDAHDAEAICEAASRPGMRYVSVKCAEQQAAQAVHRIRSRLVRARTALSNEVRGLLGEFGIVSSRHGRAASSELLNLVVAGEHDQLPAPMGTLLTDLKEELQALDLRIAKLNQLILNNVRSDVRIQRLLAVEGVGPISATALVAAVGDARQFRTARQFAAWLGLVPRQHSSGGQQRLGKISKRGDTYLRTLLIHGARAVIRTCATKTDARSRWLQGLLQRRNQNTATVALANKNARILWALLSRETSYQPG

SEQ ID NO: 266762 - protein, 395 aa, unidentified
MFIVGIDIAKRSHEAIIIAEDGQVVRKAFSFRNNCTGYNLLLEQVRRLTLVKSQIVFAMESTAHYWLALYARLLKDGYAVMVLNPIQSHSLRELYIRKAKTDARDSLIIADLVRFGRCKASNVPQDKILALRELCRSRAYLVDMAADLKRKLIALLDRIFPEYESLFDSVFSKASIAVLRKYSTPQKVKNANLRKLTDILMESSNGHFGEWKAHQLKEAACSSFGIDDSGGVYSTLLGMFLEQILSLTAQADSLEKQISVFFQEFNNPLTSIPGVGTVLAATILSEIGDITRFSSADKLLAYAGLDPSVKQSGEFKSNQNRMSKRGSPYLRRAIWLASTVAVHRDPMFQTYYEKKISEGLHYMNVIGHVSRKMTAVIFAVLRDGQPYQPILQSAG

SEQ ID NO: 266763 - protein, 387 aa, unidentified
MAQMALQANDSGLVGVLYMALELSKSTWKVGFEYQGKRRIKNVTGGEVGELRQALDEVMQKLGVTAEALVRCCYEAGRDGFWLHRLLEDWGVENVVVDPASIEVSRQARRTKTDRVDLLSLLSKLRQYHAGEFGVWKVVKVPSEQDEEGRLLHRELERLKKERTGHVLRIKALLFAQGVRVEQVGGKKWAGYLMGLTRQDGRALPADLMAQVRRESERLAMVQEQIQAIEKEQERRVREAAEVGGVMAMVQALRQFKGIGSVAAWVFVMEFFGWRQFKNGKEVGALAGLTARRTRAVRCSASRASARRATGGCGRWRSRLRGCGCATSPTARSAAGTPSALPARASATSGWASWRWHASCWWRCGATCKQASSPRAPGSSRPRREAE

SEQ ID NO: 266764 - protein, 417 aa, unidentified
MSRSHSPRLDVDGTVEVFCGVDVARETHHAVAVDRSGRSLADRALPNDEAALRKLFTELAEHGRLLVVVDQPASIGALAIAVARSMGVQVGYLPGLAMRRIADLYPGEGKTDARDAFVIADAARTLPHALRRVGPDEQTVTALGVLAGYDADLAAEATRLTNRLHDALLHVHPALERLLGKHFRRRGILELLAAAGTPSRLRALGEDGLRAAMIARSPRMALALPPQILAALDEQTVVVPATEQYGRVISGVAAQLLAVLDQRVTVAGELDALLADHPLAEVLTSMPGVGARTAVALLLTLGDGSTFATAGHLAAYAGLAPVTRQSGRTIRGERQPRRGNRELKSALYLSAFASLKDPTSRTYYDRKRAEGKNHPAALLCLARRRTDVLYAMVRDRRPYQHPAPGSPPEAAKTAPAA

SEQ ID NO: 266765 - protein, 379 aa, unidentified
MQAIKTWAGIDVSAKTLAVCRWRDGNQEERQLANDAAGHGELVKWLGRNARACVEATGVYHVQLALSLRTAGVELMIVNPRVAKDFARASSKRSKTDRVDAQVLLEFVRRMPFQEWEAPGQATLELRELGRRIGELTHTLVDEKNRLHARKAAGISAAVVTDVKEHVAQIEKRIRQVERAAYEVVQSDEDLREQYAGLMAARGIAKRTAILLLTELAVLDPSMTVRQLVAYAGLDPRVFESGTSVQKPPRISKRGNPRLRAILYMSALSAIRHDRGARLFYARLVVRGKKRKQAIVAVMRKLLHGIWIVLQRRVSFDNSLLFAASLAQAESSDSAVAAHQPEPSQDHPKGRSVAEELPQQLDPGSAEATHSRRKRSKAA

SEQ ID NO: 266766 - protein, 309 aa, unidentified
MKEQLVYLGVDIAKSYLDAALGNEKRRFSNDTIGHREMIKWVKQLQTPVQVICESSGGYERALVQGLARARVKISLVQANRVRQFARAAGILAKTDRIDAKVLCAFGEVIRPGIIGAVQLEQEHLRELESQRRHLTHLLVMEQNRAARVSDGCVRRLNRSLLNQIKKQIDKLDLLIKEHIEASPELSTKARNLTAINGVGARTAALLLARMPELGQLNRREVAALVGVAPFNRDSGRMCGKRAIYGGRKPVRHGLYMATLVAAQHNPTLRTFYLRLRAAGKPAKLALTASMRKLLIMLNSALKPDLNFA

SEQ ID NO: 266767 - protein, 421 aa, unidentified
MGKLIERCAGIDIGKRFLVCCVMTGAAHEEPRSETRRFDTTVPGLKRLRNWVNEERVTDVVMESTGSYWIPVFNLLEGHVTVVLANPEEVKNRKGHKTDRKDAGHLADLLRHNHVKSSYIPAEPVRQLRDLTRRRVQLTQDATRERNRVQKLLEQVNVKIGSVLTDVFGVSGLHMLWALLDGRATPEEIAGLARGSAKRKTPQLIEALEGNRMSDHVRFLIRGCLRHLACLEEEVEELDAEILRRMQLSTFQKAFTLLQTIPGVGQLSAATILAETGPDLDSFPTIEQMASWAGLCPGNRESAGIQKGPQTTHGNPYLCTALVQCAWAATRKRDSVFRSRFQRLAPRRGEKRAIIAVAHHMLIILYCMLKRGVPFLGAEHAPKQRRRERRAHHHLRCLRRLGFSVEIRLSSESTPPDTISR

SEQ ID NO: 266768 - protein, 396 aa, unidentified
MKAVSGLDVHKDTIFACILQKGKAPFIKEYTTLTCGIEELREDLKTRNVSMVAMESTGIYWIPVWKILEAHFKMILVNPYYIKQVPGRKTDVKDAQWIATLLQKGLLKESFVAEGLLAELREYTRGYERLCRQELRLEQSIERQLIKCNIRITSFVSKVGSASVMRIIKAICEGETSTKKLEGLVHGRIRNKHKAKIFQSLEGDIRSYDRLILKQLYQQYLLIKEQQNELVEHMDQICREHFKKEMEILCTIPGINTLSSMQIIAEIGVNMQNFPSDKHLVSWAGLRPRNDESAGKIKSKKITHGNKYLRRVIVQCAWAASRTKGSWFQGKYHQLCVRKSGKKALIAIARKQLMICYHLLQTKQNYITPVRVISEKQKERKIKYLHKQLEELLNMG

SEQ ID NO: 266769 - protein, 349 aa, unidentified
MLSVGIDAHHQLYAMCILDDNGKLVKERTIEGSAQNVASWLKRLKEPFEVCYEASLGYGVLHDELTPIAHRVRVAHPAHVRAIFNSKRKNDRIDARKLAKCLYMDEVPEVHVPKHEVREWRVLIEHRRRMVDKRVATKNGLRAILRGQGIASPRGRTLWSSKGMQWVKGVQFKSPLTTLRCNQLVAEILHFDAVIKEVEKLLNAIAQRQPGVALLRTIPGIGPRTAEAIVAYVDDPQRFSSTRKAASYFGLVPCLDESAGVSRYGRITRQGPATVRKLVAEASWRAVVCSPTIRRFFDRIKGEKKERTGKALVATARHLVKVMVAMLKSGEEWRESPPEEAQRQKILAG

SEQ ID NO: 266770 - protein, 342 aa, unidentified
MEHYAGIDVSLESASVCVVDASGKIIREGKVMSEPEALIGWFGAFGLSVARIGLEAGPLSQWLYARMQQAGLAMELLETRHVRTALETMPVKSDRNDARGIAQLMRLGWFRPVHCKSIGAQEMRAVLTARKLVQSKLRDVENSLRGILRGFGLKVGKTTNRRFAGRIQELVVNHARLQMLAEALLSVHAVLLRQLQAFEKQVRSMARTDANARLLMSAPAVGPIVALTYASAVDDPSRFKSSKQVGAHFGLTPKKYQSGETDYTGRISKMGDATVRTALYEAAHIMLIKPIKGCTALKSWAIRIARRGGMKKAKVALARKLAVILHRMLANGTPFNAAMAAV

SEQ ID NO: 266771 - protein, 323 aa, unidentified
MAFLEHAPSHVVGIDVSKLTLAVCSAPGTAACTVARTVASTVANTARAIRKLVAGLPSGTLIVCEPTGGHEALLLAELAAAGIACHRADTLKARAFARSFGRLAKTDAIDAALLAAYGQERWRHLPLHRPADRTQAQLAALVARRHDLMAIRGAELNRAKSPGCTLVSASCRSLVRTLDRQIETIDTAIAGLCAQCTLLARRIALYRSLPGVGPRTAISLAAAMPELGTMTGKQAASLAGLAPHPNDSGTLKGYRKTRGGRPQIRSILFMAALSAARCKGPLRPVFQRLIANGKKPIVALTALMRKIVVILNARMRDHLNDMS

SEQ ID NO: 266772 - protein, 345 aa, unidentified
MAAPGVEYQLYVGVDIAADTFTAAWRTPTGAVAAPFTGEQSPTGHAALQRRLAGTRAAPGATLVVLEATGSYWVALAVALHEAGYRVAVVNPRQAHHFAKAQLRRAKTDALDARDLAELAAALRPAPWTPPPAIYHEVRQRLVARDQPLGMRTQARNQRHALLQWPVVVAGVRQHLDELIADLERRVADLDREIAATLKRSEWAEALACLTSAPGIGLVTAAWLLVGTANFALCAGPEALVAYAGLAPVPRESGRSIRGRAAIGHDGNGRLRTALYMATLSAARYNPAIRAFYQRLRAAGKPKKVARGAAARKLLHQAWALGSKLQRFDPEHKQQQHDALSDPAA

SEQ ID NO: 266773 - protein, 343 aa, unidentified
MQTVTTIGLDIAKSVFQVHGVDAAGQVVIRRQLKRRYVLSFFEKLPPCLVGIEACASSHHWSRELQALGHTVRLMPPAYVKPYVKRQKNDAADAEAICEAVTRANMRFVPTKTPEQQSGLVLHRTRHLLIRQQTSVINAIRAHLAEFGIVAPVGRKGVEELLRVIADASDKRVPEVVRGCLAALGSQLLGLKKQILDFDRTILAWHRSNQTSKRLNCIPGVGPLLATALVASVADPKTFRSGRNFSAWIGLVPKQHSSGGRDRLGSISKQGDRYLRGLFVAGALAVIRYAKIHGTKHRPWVAALLARRPTKVAAIALANKLARMAWAMMSTGAPYNYPAALKV

SEQ ID NO: 266774 - protein, 366 aa, unidentified
MKKISTVEIDRVQIFKENQLTIGLDLGDRASHYCILNEAGEVILESKLPTAPKGIEEVFSRIPRSRIALETGTHSPWVSRQLTQLKHEVIVAHARNVRLIGESSRKDDQLDARMLARLARIDPGLLGPVRHRSAKAQIHLTVIRARAALVSTRTALVNAARGLTKSYGQRLRKCGTEQMNRETAQGLSQELRDALDPLLGEIESLNERIAEYDKRIERIAKEVYPQVAVLKQVKGVGPLIALTFVLTLDDPHRFRRSRDVGCFLGLRPGRRNSGMSEPQLHISKEGDRYLRTLLVQGAHYILGPFGEDSDLRRWGLKLAERGGKNAKKRAVVAVARKLAVLLHKLWVSGEVYEPLRNNHKVETAVA

SEQ ID NO: 266775 - protein, 344 aa, unidentified
MDHFGGLDVSVKETSVCILDDAGRIVKELKVASEPQALLKVLGNPTYRFKRIGLEAGPLSQWLFSVLAEAELPVICVETRHMQAVLKAQINKTDRNDARGIAQMIRVGLYRPVHVKTLRSQKLRMLLTHRKLLQSKAIAIENDLRGTLRNFGLKVGMVGKVRFEVRIQELVENIPDLAVLVEPLLIVRRVLREQIVILHRRLLAIVREDEVCRRLMTTPGVGPVVALTYRATVDVPARFRKSKSVGAVFGLTCSRYQSGEIDWSGKISRCGDEMMRTMLYEAAQSMMHSKKWSWLKAWAMQIARRRGMKKAIVALARRLAVIMHRIWVDGTEFRWTREQAAAAA

SEQ ID NO: 266776 - protein, 355 aa, unidentified
MDSVKYIGMDVHKEAISIAVLNSSGKLVMECIIETKASIILQFFQGLRGSLHVTFEEGTWAAWLYDLLKPHVTKLVVCNPRRNALLKEGSKSDRIDARKLAELLRSNLLRSVYHGEHGVQTLKELARGYLTISKDLGRVMSRLKAIYRSWGIPCAGKQVYAPRYRPEWLGKIAEAGVRRRAEFYYQQLDALRPLRQQVRQELLAEAKKHDAWKLLRGIPSIGPIRAALIIAILQTPHRFRAKRPLWTYIGFGIETHSSAESRFVHGKLQRSKKQISIRGLNRNHNHDLKNLFKSAATIAAVKPGPFQEFYAALVAKGIKPEMARLTLARKIAAITLTVWKKGVRFDANYLKPQTA

SEQ ID NO: 266777 - protein, 391 aa, unidentified
MSMYFVGIDISKYKHDCCIISAADQQIVSKFTVKNDKDGFEHLLTTLNSLSNPEDIKIGFESTAHYALNLELFLENAHHSFMEVNPVLIKEYKKSTTLRRTKTDSVDCESIARWLMTVEYKPHSKGFYHSYSLKSLTRLRDRLIRQRSFYLVKITNVLDHTFPEFKPFFNERLSKTAIYLLENYGSAEKMAHMNSASYDKLRCASRGKFSIQQFLRLKELAANTVGVNNSIFDIELNSLLTLYNSLCKEIKTLEAEITKLIEEVHPHYMSIPGIGPISAAVIYAEYGDISNFSNPGQMLAFAGIEPGINDSGTESHGGRMVKHGSPQLRYVLLNACLPLIRFDITFATYYAKKRAEGKKHRVAITHVAKKLIRVIYALERQDVDFNVQKLR

SEQ ID NO: 266778 - protein, 344 aa, unidentified
MEVAIGVDPHKGSLAVAAVDPLGKVIDAREFSNDPPGHGALLGWVRECSPDRVIGIECSLSYGASLSRLLLGAGEDVREVPTTLTHRERRRRRSHGKSDLVDSVAIARIVASGEVLPSAHRVEVLSDLRALVDYRDQLVRARTQVANRAHADLLNIRPGYGRAVPNLRAKVHRAKARSLLRGDRSVRAELLRRRLGELSRLDGEIAAMDRRIEATVRETGTSLTDIPGVGPFVAAKILGEVGNPSRVRSKAAFAVLSGTAPLAASSGQTHRHRLNRGGNRQLNWALHYIALVQCRISSEAQAYMARQREAGKSHKEAMRCFKRQLSNVVYRHLLADARGAELAA

SEQ ID NO: 266779 - protein, 353 aa, unidentified
MIHLPEEREVILGVDTHLDVHVAVLIDVVGRIVATTSVPTTALGYEQLIEWARGFGRLTRAGIEGTGTYGAALARRMHAHGVQVLEINRPDRSRRRLRGKSDPTDAENAARAVLAGEANAIPKAQSGLVEAMRAVSMARRSAVKAKTQAINQLRALLVTAPASIRATLWKVKPEQCVARCARLQSLGDTPLLKALTSTLRLLARRWMSLAKELHQLDAALEELTKRAGRRLLTRFGVGPQTAATLLVTAGDNPNRLRSEAALAALCGASPLEASSGKTTRHRLNRGGDRAAHNALWTISMVRMRSDPRTRAYVTRRTAEGLSTKEIQRCLKRYIVRELYPLILADLAESIRKT

SEQ ID NO: 266780 - protein, 360 aa, unidentified
MTATMTWVGLDVHARSTHAAAIDRESGELTRARFGAGADPVVEWLSELPQPVHACYEAGPTGYALYRAAETAGLRVAVVAPSKTPRAAADRVKTDRKDAELLVRLLLAGALTVVAVPPASFEAARDLARAREQVRADLARLRHRVSKLLLRYGRVYDGGSTWTQAHRQWLAGQRFEHVATELAYLDALAAIEGLLARRAALDERLSLLATEPDHRRTVARLRCFRGIETLSALVLHLEVGDFARFQRPGQLAAWLGLVPSLHQSGESETRGPITKTGSGFARRILVEAAWHYLREPRIGVTLHNRQSGQPDQILQIAWRAQHRLYRLHQRLRERGKPGNVATVACARELACFLWAAAIAD

SEQ ID NO: 266781 - protein, 343 aa, unidentified
MGEISMIGLDLAKNVFQVHGVDASGAVVVRRQLRRGQVEKFFAQLPACTVGLEACGSAHHWARVIGRYGHQVRLMPPAYVKPYVKRNKNDGRDAEAICEAVNRPTMRFVPVKSVEQQATLAVHTARALLVRQRTMLANSLRAALSELGIVAAQGIKGLRELMVKLEAPNQEIPEMMRGALLMLAQHWQALDVDERALEQQIAKAARSDREARRLMEVPCVGPIIASTVLAKVPDATVFRSGRDFAAWIGLTGRDHGTGGRHRPGRISKQGDRTLRALLINGASAYLRHQRVRGVSNPWLRGLLARRPYKAVMVALAAKTARILWAMLVKGEPYRDRASAPAAA

SEQ ID NO: 266782 - protein, 378 aa, unidentified
MRFYNQPHEFYCGVDLHARSMYLCILDHAGNIVLHEDLPAEPAAFLEAIAPYRNGLVVACECLFCWYWLADLCHAENIAFVLGHALYMKAIHGGKSKDDKIDSKKIAQLLRGGNLPMAYAYPKGLRETRDLLRRRMYLVHKRAEVVAHVVNTNSQYNLPPFGKKLIYARNRQALQIAERFADASVRQNVELDLRLLDSLDELIGDVELYLDRTVKVDDADTFYRLRSIPGVGKILALVLLYEIHDIRRFAGEGEFLSYARLVRPKKTSAGKVTGGGGGKIGNAHLKWAFSEAACLLARESDQAKRFLARKEKQHGKAKALGILAARLGRAVYHMLRQKRAFDAKRFWNGEPKASPSNAKKSAAKPRRRAKPSRCVLQV

SEQ ID NO: 266783 - protein, 427 aa, unidentified
MKYALVRVLPDVPPGGVCAGIDWAAADHVVCVVDMAGRVTDRFGAAHDKAGIAAMIARLRRAGAGEVAIERSDGVLVEALLAAGLTVVVITSRQVKNLRARYGAAGAKDDRFDSFVLADTLRTDRARLRPLTADTPATVALRMAVRTRKDLVAHRVAACNQLRAHLAVAFPGAVGLFCELDSRLSLAFLGRFGSQDAADALDEQQLASWLATLPARGFPAPASVLCARLQAAARGTAGPAGAAQAGVTAALTGTLTALSGQIKALETQIAAQLPAHPDGHIFTSVPRAGTVRAARLLAEIGDCRSRFPDSGALASLAGVTPVTRQSGTHTARTYRWAVNRQLRDALCDFAADSRPASPWAAAIYADARARGKDHPHAVRILARAWTGVIWRCWQDGTAYDPAKHNALQRSLDRQQASSTSPARPEDR

SEQ ID NO: 266784 - protein, 424 aa, unidentified
MKVTYQTCCGVDVHKSFLVATIVKTTGGIEPSYQKKRFSTFNNSILEFKQWLLDNHCHDVCMESTGKYWVPVFNLLEDEINVVIANPKWVKAVKGNKDDTKDSKWIGDLFRLGLVKGSYIPCKKVRILREYTRYRYKLVSCRSSEKNRYQNALTVCNVALDSIVSDIFGKSSTSIIDYLLEQSGTSINHEEIASKLLRSLKSKEDAVIESVEGYQMTDTQKYRMRLVRAHMDYITAEINDVDKMIENMISSNPDFENAVQFLCTIPGVKRDSAITIISETGTDMSQFSSSKRLCCWAGLTPGSNESAGKKKSVRITRAGVYLKPALVQCAHAAVKSDKSPYYKKKYESLVKRRGKKRAIIAIARMILTAIYQMLSTGEQWNPSDLYKIDMPVALVEKQKAKAIKQAKKLLQREGLLPPDEPLAS

SEQ ID NO: 266785 - protein, 371 aa, unidentified
MEHTRFIGLDVHKERISVAVAQSGRSGAVEYLGEIINEPGAISKLCDRLRRPGKLLVFCYEAGPCGYGVHRQLTSLGHRCDVVAPSLIPTKAGDRVKTNRRDATMLARLHRAGELTPVWVPDADHEAMRDLIRLRSVVRQIVTRARQHLQGFLLRHGRKHGGGTAWRMAYRRWLSTLAFDHPAQQIAFQDYVDAVTDAEGRLKRVEEQIFSLLPDWTLRPVVDGLQAMRGIALINAVVLVTEVGDFTRFSNPRQLMAYFGLVPVERSSGETTRRGAITKTGNAHARRALVEGAWAYRMKARIGRHKVDRIEALPKVIRDIGWKAQVRLCARYRRLSARGKTANVVNVAIAREMVGFIWSIACTIQSTPKAA

SEQ ID NO: 266786 - protein, 355 aa, unidentified
MTSTKYIGMDVHKESISIAVRNAAGKIVMECVIETKASMILQFFDGLRGDLQVTFEEGTSAAWLYDLLKPHVRKLVVCDPRKNASMREGNQNDQIDARRLAELLRLDHLSPVYHGEHGLRSLKELVRSYLTLTKDLGRVMSRVKAIYRSWAIPCSGKQVYAPRHRAQWLAKITEPGVRRRAEFYYQQLDALRTVRKEVRRELLAEAKKHPAWKRLCQIPAIGPIRSAVLLGILQTPHRFRSKRPLWTYSGWGIETQSSADHRRVDGQLERVKKQNSLRGLNRNCNHDLKNLFKGAAIVAASKLGPFEEFYTALLSKGMRPEMARLTLARKIATIVLIVWKKGVSFDAQHLKPQTA

SEQ ID NO: 266787 - protein, 343 aa, unidentified
MVNYYIGADVHCNNVELAIERNQQIVQQHSLPMSIRDIREVLDAIAGRKHLTFEEGPLAGWLCRQLKDHVDTLIVCDPRRNRLVSVDGDKDDCIDAAKLAALLRGQFLRPVHHSDDLQRLWLKRWVALYHDRVRVATQAINKLRALARLEGRRIPGAALRDKRIRQSWLDGLETNLAEALRLLWASYDRQRAEADQAKRQMIRRSRAFPIIGYWQALPGVGPVRSATLFAYLDTPWRFKKKSKLCKYCGVGLERAGSGKDRRGRERPARLELFWKVNRRLKNAVMGMTMSAIRSRANVFRDYYEERIGHGTLISHARHDTARKMLTVMWGMWKSQRPFEAAWC

SEQ ID NO: 266788 - protein, 392 aa, unidentified
MYYIGIDIGKNHHEASIVDSYGNKIGKSFRFPSNHKGADRLLSHIANLIPNNDFVFGMEATGHYWYTIYSFLIEHGFTIYVINPIQSDCFRSFYIRQTKNDSKDSFLIAEVIRFGKFTTTKLADEDILSMRQLCRHRAVTISERTKVKLHINTILEQIFPEYEKIFNEVWGSSSIAILDKYLLPENIANADTDELLAILKENSHNRFSLKKACEIKEAAKTTFGIRIAQNAFAFQLKQLLEKLKLLNEQIKQLDDEIISYYEKFDCYLHTIPSITPISAACILSEIGDISRFRNSSALVAYAGIDPTVRQSGEFNSNHNHMSKRGSSYLRHTLFLAASCCVFHNSPFYEYYQKKRSQGKHHLVAVGAVSRKLTTVVYAILKSGKPYEPVKFV

SEQ ID NO: 266789 - protein, 481 aa, unidentified
MAAEKRNRKQRKDLARQLQSANPGLAVMHPKAAGIDVGNSAHYVAVRPEADPQPVRRFQCFTADLHRLADWLEACGVETVAMQSTGVYWIPLYEILEERGFEVYLVNARHTKNLPGRKSDVQESQWLLKLHTYGLLNNSFQPTSEIRIARTYWRQRAEHVRGASTCIQRMQRVLTQMNVQLANVISDLSGLTGQTIVRAILAGERDPKKLAELSHPQIRASREEITRSLEGNWRSELLFLLKQEMKMFDTYHRRIAECDKELEAHLKSFADRVLSKLSEEESASEQRPERKVRISKKSALLRKGKTTAGNRPQFDLRSELYRISGVDLTRIDSINVLVAQTVISEVGLDMTRWNTEAHFASWLGLCPDNRISGDKVLSKGTRHVVNRAATALRIAATTLLRSHTYLGAQYRRLRTKLGAPKAITAMAHKLARLVYRMLKYGQEYVDKGMEHYEERNRLQQLEQLKKKAAMLGLQIIEAHPA

SEQ ID NO: 266790 - protein, 353 aa, unidentified
MKKYIGCDSHSRYSVFVSVDEHGRVSPAVRVEHGSRELRDYLSTLEPGTPVAVEASGGWYWFLDELEAAGMDARLVNPLEAKRRMGGKNKTDKLDARGLAILLRNGTLPEVWVPPSELRDLRGLMRARLALRSHTTVLKNRLHAAIRRYGTLDGEPPSDLFGQRSRRRLALAIGRLPEETRTAAWHECELLDEVERHIGELEVRIRTRIGCIGWVRLLKTLPGVGEILGATMHLEIGDVRRFPTAAHLASYAGLVPTVHASGGRSYHGPTSPQANHYLRWAFVEAAACVVSHKHRWAGRHVVELYERLKKQKCHGKAAVAVARHLAEASWWILSKKEPYRQPHAAVVSSSKNG

SEQ ID NO: 266791 - protein, 409 aa, unidentified
MIYCGIDWAEWTHDVALVNDAGELLAKRHVTDDVAGYKILLDLLAEFGDTEDDPIPVAIETSRGLLVAVLRQGKRQVYAINPLAAARYRDRHSVSRRKSDPGDALVLANVLRTDMHAHRPLPDDSDLVRAIAVLARAQQDATWNRQQMANQLRSLLREYYPAALDAFAAWQNGLCRPEGRELLRLAPTPAKAARLTRTQIQAALKRAGRKRGIEAEAERLRKAFRTDWDHQPMLVEDALGKQMLALLGQLEAACTAADDLAKAVEEAFPQHPDAEVILSFPGLGVQLGARVLAEIGDDHTRFSDARGLKAYAGASPITRASGKKSSITRRRIKNDRLNHAGYLWAFAAPNGSPGAKAHYRRRRDERGDWHAAALRNLFNRLLGQLYHCLQHHKLFDELTAFPAPLTAAA

SEQ ID NO: 266792 - protein, 395 aa, unidentified
MPSTTVSERVVIAVDPHKASWTAAAVGSALAPLATLRTPVSRQGYRQLRRFAARWPDAEWAIEGATGLGAPLATWLSGDGIEAVDVPAKLATRVRMLSTGHGRKNDDADAVSVGIAALTAPGLRSAAVEDAIITLRALVEHRDDTVRTRTQTINRLHVLLTGLLPGGAPRQLDADTAARLLRTVRPRATGPATLRRLAAELIGEVRHLDRRIATASTQISDAVTASGTTLTQLRGIGDLTAGKIIGRVGDITRFRSPAAFASYTGTAPIEVSSGDVVRHRLSRAGDRQLNYCLHVAAITQLRHDCPGRDYYLRKRACGKGHKEALRCLKRRLSDVVYRQLLRDAQAAQAAGPRGQLGATTNSRAAGSTPHTSSSGKSLPGPAGTDPTTPDEDRLD

SEQ ID NO: 266793 - protein, 362 aa, unidentified
MAKMIWLGMDVHAASITVAQYEDQAPSATVQTIANDPAQVRRLVRRLPAGSDVRACYEAGACGYGLHRQLTALGVHCDVIAPALIPRRPGERIKTDRRDAEKLGRFYRAGELTTITVPTPSQEGVRDLVRAREDVRRDRTAARQRLAKFLLRHGHRYPASHWTKRHWEWVCGHTFDGPARTVFVHYCDHVLALNERLAHLERELRTLAESAAYQPVVTRLSCLRGLATLSALVLIAELYDLRRFRTPRELMAYLGLVPSEHSSGARERRGRITKTGNALARRLLIEAAWAYRHLARQTRRVHQALTTQPPAVHAISDRALHRLTARYRRLLSRGKTPHHAVTAIARELCGFVWAIALVPDLA

SEQ ID NO: 266794 - protein, 349 aa, unidentified
MATACSVTLGVDTHKDLHVAVTLDQVGRRLGVATFGTDDAHHARLWAWASDFGPIVQAGVEGTGSFGYRLAQFLTGSGVQVFEVNRPNRVTRRRRGKSDPVDAEAAARAVLAGDATATPKDRSGPAGQLRALLVARRSAVKARTQAEQQLRSLILELDDDQRARVDRRRIVELTTACAALAGTDGTSLALRALARRWQHLDQEVRDNDQDVTIIVRRVVPGLLARPGIGPVCAAQLLVTAGDNPDRLRSQGAFAALCGASPVEHSSGKTQRHRLNRGGDRAANSALWVIANNRLMHDPQTRAYAARRTATGASRKEILRLLKRYVARQVFAEIRHALSPPAALPDSPLT

SEQ ID NO: 266795 - protein, 479 aa, unidentified
MTPHKDFCLDPGPPTPPPMVPPSPALSDALQICHPHAAGIDIGEAEHWVAVPPGCDPQPVRRFGTFTADLDALADWLIDCGVTTVAMESTGVYWIPLFELLEARGVQVLLIDPRQAKRAPGRPKTDRLDCKWLQRLHTYGLLAGAFRPEAHVCVLRGYLRHRQMLLTYAAHHVQHMQKALEQMNLKLTQVVSDITGVTGMAILKAIIAGERDPQHLAKLRNPHCHHTEDDIAKALQGTWRAEHLFALRQAVELYAFYHQQITQCDQQIKAHLETFADKSAGRPLPPKARRSKKTNEPRFEARTPLYRMAGVDLTTIEGIEEGTALVILSEIGTDMHRWPSVKHFCSWLGLCPQHKISGGKVLSRRVRPGAHRVAVALRLAARTVQHARTALGAFYRRMRSRLGAPKAITATAHKLARLVYSLLKHGSAYVQQGLDAYESQYRERKVKAMARQAQALGYTLVALGTPEVPHFNALAAPTP

SEQ ID NO: 266796 - protein, 344 aa, unidentified
MLYVGVDLHKHSISLCVVDLVGRERKVIERKRFCCDDEEAILAYFARLGPYEAVVEATASYEWFVQLIEPTAARIVLAHPGKLRVIAESKNKTDKLDAQTLAEFLALDQVPESWRPTPRVREHRALVRLRSYVQGRITSAKNKLRWIVANYNADRTDLFSRAGRAYLEKIDLSAADLFAADLLCEELDQHAARLRTVDQRLKEFAQGAPLPEQEARAVLASIPCVGPVTTEVVLAEAGDVRRFGSQRKATAYAGLAPGIRQSSQRTKQLGITKAGSRLLRTALVELAWRLTNKTRRWGLLYERLKKRCGAKKAIVAVARRAWCVIVSLLHSGQAYRPISETAAG

SEQ ID NO: 266797 - protein, 409 aa, unidentified
MKIFCGIDWAEDHHDVALVNERGDLVAKQRISVDLAGLETLQHLLAEAGDKPGDPIPVAIETSRGLLVACLRATGRPVYAINPMAVARYRERRSVARAKSDHADALALANVLRTDADHHHPLPADSELIQAIAVLARAQQDAVWNRQQLANQLRSLLREFFPAALAAFQVKNVGLAHPEARAVLAAAPTPAAAAALSRARLRSLLRRAGRQRRIETRAEHLAGVLREPHMRQLPRVEEALGQQVRALILQLDAAAQAADDLAAACAERFTEHEDAEIITSFPGLGELTGARILAEIGDDRSRFADGRALKAYAGSAPITRASGKSLIVHHRKVKNQRLAAVGYVWSFAALSGSRGARGHYDRRRSIGDRHTAALRNLFNRLLGQLHHCLITRQNYDENTAFPTPLPVPA

SEQ ID NO: 266798 - protein, 418 aa, unidentified
MSESKIAFYVGIDWGTTAHQVCILDATSQPVAEFSAAHDAAAVRRLCTRLQALAESGAVAVGIESPASPVTEPLLEAGLTVFSLNPKQLDRFRDRYFPAGAKDDRRDAFVLATSLRTDPRCFRALTIEDPRLGELRALSRLNQTLKQDRLAYSNRLRDLLVSYFPELLTLCSAADEAWLWGLLEFAPSAPRAARLSLARLRSLLQRHHIRRFSPEDLYQQLRQPALPLSASSFQRGAHQIQALLPILRALDVQQRDLLGQIEVLLEQLATAENDAAPGPGQHRDVNVLLSLPGVGITVAAAMLSEAHEALASRDYHALRAHAGVAPITRQSGKSCSASIRRACNQALRNAVYHWSRVSVIHDPRSKAHYARLRQKGHSHGRALRGVADRLLQLLCSMLRSQTCFDPSRRLPPPTPAPA

SEQ ID NO: 266799 - protein, 323 aa, unidentified
MQGKIMSEQSAAQPVYVGVDVCKERLDVYVHPTGQRLSVANSRDGLKRLKQALAGVEVALVVMEATAKYHRLAQRTLTQAGLLVAVVNPLRARLFAEAAGALAKTDRIDARMLAVMGAALDPQARPPAPAAMEALQELVRAQSAATTDLTGLKNRRGTAQTAFLKLELRRQIGNLERSTARLSAEIERRIANDPALARRRQVLLSIPGLGPRVTAVLLADFAELGALSAKAAALLAGLAPIARDTGDTSGQRHIKGGRKAVRNALYMAALSASRTNPDLKVFYQRLRTEGKKPKVALTAVMRKLIILANTLIKEDRQWQTSPP

SEQ ID NO: 266800 - protein, 410 aa, unidentified
MQVLYLRCCGIDVHKKFVVVCVLLTTPDGQVQREVRTFSTMTHDLLALVDWVYAIGCTHVAMESTSSYWRPVYNLLEGQFTVLVGNAYYMKTVPGRKTDVKDAEWIADLLRHGLIRGSFIPTPAQRQLRDLTRYRTHLVEERARLTNRLQMVLEDANVKLASMVTDIRGASARAMLAALVAGETNPTLLAELAQGRMRAKREMIAQAVVGRFTAHHAFLLTEHLSQLDYLEDAIARVSAEITQRLADEQEALALLDTIPGVGQRAAEIILAEVGADLSRFPSAKHLASWAGICPGNTESGGKRLSGKTRKGNIWLRHVLFEVAHAASKTKDTYLSAQYRRLATRRGKQRALIAVGHSILVMAYYLLTRRVPYREVGPLYFDNLDRQRVQQRLVQRLERLRYSVELQPTAA

SEQ ID NO: 266801 - protein, 354 aa, unidentified
MDVGIPYKGFSQSNHFNSLKYKVMRIKQTIGIDISKLTFDVRIHSNQMFNQFENTNKGFKKLMKWVNSNNPFLKDETIFVFEHTGIYSYLLSVFLTEQKLSFALVPGLEIKRSLGISRGKDDKIDATKIAQYGYRLRDEIKLYNMPCKDIINLKRLLSLRDRFVKQRAGYKSSLKEFSRILALKNNKVLLETQEKIIRYLTKQINIIEQNLDSIINSNDTLKNVFKLITSVKCVGRQTALFIITYTEAFAKFKTWRQFASYCGTAPFPNSSGTSLRGNTRVSHLANKKVKSLLDLCAKVAIQHNPEMKAFYKRRVTEGKNKMSTINIIRNKLLSRIFAVVNRETPYVDFMKYAA

SEQ ID NO: 266802 - protein, 346 aa, unidentified
MNATTYGMDIAKNVFQVHWVDGNTGEICRKKLPRGKVTEFFAVRPAGRIAMEACGGAHHWGRTLGPLGHQIELLPTHQVRPFISGNKDDAADARGIWLAAQHGDIRRVAVKSSEQQAMLSLHRMRTHWVSVRTATVNALRGLLYEFGVTLPRGRHSGLRQLAQQRAEINDAVPAVMVRLVDDQLLALADIERHVQAMEEEISLMLKSQESARRLRDTPGIGVLGATALAATLGDGTSWRNGREFACCLGLAPGHRGTGGKVRIGSISKRGNAYLRTLLINGARALASREHPAPWIVALLGRRPFNVVVVAIAHKLARIAWALVAHGRAYEASWKASAPPAASAGAA

SEQ ID NO: 266803 - protein, 437 aa, unidentified
MKQFLECCAGIDIGKREMTVTILTGSVEVEPIPQMGTFGTTVQELNRCLEWLLGNHCSTVVVESTGTYWVPVWNVLHERVAVIVANPEHVKARRGEKTDPEDSCRLAERLRVGDVRGSFVPSAQIVELRDLTRRRKRLLSAANSERNRIQKLLEQANVKIGNVVTDVFGVSGQRILHALLQHPQLPPAALADLAKGRLRHKRQALIETLQGHRLNDHVRWMIQHSLDHLVFLENQLTELSQRTLLKLQPFEREYELLQTIPGIAAETAAVILAETGGNMAQFPSPKHLTSWAGVCPGNNRSAGKQKSASIKRANKCLLAALVQSAWATVRQRGSIFKKRFYRQMQHRGRKRALIAAARSLLEVVWQVLQRMTPYNEPANEVWQEQERGKKIRHHLQRLRQLGIDISALQVPPLSPSDGTRLLTGTPHPLGVLGIHAR

SEQ ID NO: 266804 - protein, 430 aa, unidentified
MKSTQNKKIQQVKESTMVVGIDVGSEKHYFRAFNWRGIELTKKPVPFSNSMMGFNAFYEEVTRLKEQNGLEEILVGFEPTGHYWFNLGQFLSGKNIRFVMVNPLHVHRTKELDDNSPSKNDRKDPRVIANLVRDGRYFYTYMPTGVYAELRNASNRRFVLTEELIRSKNRLQKWIAVYFPEYKGIYTHIDSKGGLMVLNSAPTPEEIIKLGVEGIIQIWKDAKLRGNGHKKAMLIVNAASQSIGLTEGLEEARMEIHDLIEDYELQLKRLEKVNGLIENLCKQIKYVDKLLEIKGIGMITIAGFIAEVGDITRFDNAKELQKLAGLELVADSSGKHNGKTRISKRGRKRLRYLLVQAAVSVIGKNEEFRQIHEYYTTRDNNPLKKMQSLIAVACKLIRVFHVILTKGKSYDASKMLEDIKRPVTTKTKAA

SEQ ID NO: 266805 - protein, 356 aa, unidentified
MTKVTANFENQTVYVGLDVHKRSWNAAIFLGNQYLRNIHQPPSPQALHHFLVTHYPGALYTCAYESGKFGFWIQRHFKQMGIECLVVNPADIPSTHKDEVYKTDSRDARGIGHALSSGQLKSIFVPHYDQEADRQLVRQRKKLWSDLVRCKNRIKAFLDFLGITVPERFDNPNWSNNFMLWLHQLEFEQPSNRVTLNYMLHELEMMRKQMLSICNTIRKLMRSKKYNKLYYLLRSVPGIGPLTAASLITEIGDINRFTDFYHLNSFIGLLPMEHSSGEKEIRSRITIRKHRQLRSDLIECAWTAKRSDPALALYYTEQLKRGKNGKAAIVKVARKLVSRIRYVWRNQQPYQCAIVK

SEQ ID NO: 266806 - protein, 344 aa, unidentified
MSKHAVRGGDVARLLERFAQLRKKALARTGKVFPFVVIQEAGLDGFWIDRVLRKEGIESHVVDPASITTSRRRRRAKTDGIDGEALVRALLAHKRGEPRVCAMVKAPTPEEEDRRRLCREPKVLIGERVRHVNRVKGLLFSQGISGYQPLRHDRRERLDTLQTGDGRLLPDHLKAQVRRELDRLELLLEQIKAVEAERDVLLAVQQGAAPAPAAMLLNIKGIGPEFAAILWSEGLFRHFDNRRQVASYAGLAPTPWQSGSVDREQGVSKAGNPRLRTTLIQLAWLWLRNQPQSALALWFKERVNRNGGRLKKTTIVALARKLLVALWKYVTTGVVIEGAVMKPA

SEQ ID NO: 266807 - protein, 349 aa, unidentified
MQENQEYVGVDVSKDTLDMLVYSTSEIRSYTNNDAGIAGATTWLKQLKPAITVMEATGGMEVSLYIALQEANLPVAVINPRQIRDFAKSVGILAKTDKVDAKVLARYAATIQPEARPLPDEEARRLDTLVTRRRQLVGMITAEGNRFATTRDKMMKQRIHAHIDWLKQELAAIDKDMSQMMKDNPRWRAKDKLLRSVPGVGPVLSTTLIAELSELGRLNRKRIAALVGVAPLNRDSGKHQGKRSIWGGRCSVRQPLYMATLTAVRFNPKIRSFYEHLLANGKEKKVALIACMHKLLTILNAMVKHGSYWSCTYSDLNNSVIPVPAKTVARRERPHHKIPSPSYLNNMLL

SEQ ID NO: 266808 - protein, 404 aa, unidentified
MKGPIVSIDVSKGKSDYQEFKNLNVKYTGSRSIKHTKEGFDEIVNLVREMEKKLETEVCVVYEATGVYHRVLKKVLEDNNIKQFIINPLLSAKTRKNDSLRCPKTDKLDPKSIAKTYYSHSLHNSHKQETIYHELRELSRYYEDILVHIRKDKVAFRAQLDIVFPGYDALYDDLYGPVALAVIEKYPHPEMLQKKKINTVSKVIQNKTCHRQAASDTMADKAIEYSKTIYSGCDKDDIEVLILQRFIKKLNEDMAEAERTIGEMIKLAQELPDFSIIKSIPGIGDNLAARIIAELGDMTRFKKKNELVAFAGLDPRISESGKNDGDHMHITKKGNKRLRCLLYLAVTCSIRLKRDDNSIKDFYIKKKQQSNPMCSKAAKTACASKLVRIIYSMCKTGELYQYNK

SEQ ID NO: 266809 - protein, 334 aa, unidentified
MLYAAIDIHKHAFQAAVLDPEGGEVVEARFSADRESLARWAEEWQGRVAAVAIEATTGWRWVWRELSARGFDVRLAEPVQARALRGRRRSAKTDRLDARWLARLLAKEMLPESWIPPEEIQRLRDRTRLRKTLAEDQRRWGQRLHAFLLHEGWPCAKSRLLTPEGMRWVAALRLDAHARLQVDSLLAIIAALEVQLDTVDAELRRFARGDARCQALQSIYGIGPILACHLLAEIGEACRFRRAKQITRLAGLDPVVDESGETRRRGHLAKAGSPQLRWALVEAAVHANRPNAPDLELYQAVRDRRDTTVARLSVARKIGKRAYHVLRELELAAA

SEQ ID NO: 266810 - protein, 411 aa, unidentified
MFCGIDWAEDHHDVALVDRDGTLIAKRRITDDAGGFTLLLQLLAQAGDNPDEPIPVAIETSRGLLVSSLRATGRPVFAINPMAVSRYRDRHTVARKKSDAGDALVLANILRTDLAAHRPLPADSELAQAIAVLARAQQNTVWDRTCAHNKLRSLLREYYPGILAAFAGKRDGLLRAEARAVLAAAPTPRAAATLTRAQLRAQLGRAGRQRGLDAEAGRLQAVFRGQYLHQLPLVEDAYGRQALALLRQLDTACTNAEELAAAAAEQFDQHPDAEIITSLPGLASLTGARVLAEIGDDRSRFADSRALKAYAGSAPVTRASGKSITVTHRKVKNQRLAAVGYLWAFSALTASPGARAHYDRRRATGERHTAAQRNLFNRLLGILHHCLHTRQPYSETAAFSTTEDTPARTAA

SEQ ID NO: 266811 - protein, 321 aa, unidentified
MAKIICGVDVSSQFLDVFLNPRCQRFPNTVAGIADLLALCQQHHVDRVAVEASGGYERRMYRQLWAAGLPVALCNARAVRDFAKSMGRLEKTDPMDAALIAEYAAANQKLVAHPPQSSAHDQLRALVTRLRQLTETRATQLQQRLLVTDPVVLETFTRLLAFLTSEIRQLQDRIAQLIDADPLWHHLEHAFRSIKGVADRTVACLMAELPEIGTLSHKAVSKLVGLAPLADESGRRHGRRSIRGGRATVRHLLFIVASVVRRYHPDFAAFSQRLAAAGKAKKVILVALAHKLLIRLNAKARDARRQLLPMASLPLTTTIPS

SEQ ID NO: 266812 - protein, 335 aa, unidentified
MKRYTYFVGTDVSRNKLDHAVKKNDTLLFHKETANNSTAIGDFISELKALEGFKIGKTLFCIEDTGFYSNHMLNGLRKVKANFISESSTKIRNSMGNVRNKSDKIDAIRIAEYAFRFQDKVTLWKPKRPIIAQLAYLNTLRERMSGLHLTIKMPLKEQSSFMKKTDCIKCESLCNASIQATKADIERIEKAISTLVESDSSINHLMKVITSIPAVGPVTALNIIIATNEFKDINNPKKFACYSGVAPFVKESGKFKGKPRVSHMANKRLKGLLHLCAMVAKKVVPEIAAYYKRKTGEGKNPMSVLNAIRNKLIMRIFACVNKNKSYTNFCPVPSN

SEQ ID NO: 266813 - protein, 412 aa, unidentified
MTATNQFAAHVGLDWADKKHDVCVQFKNGERTFHVIEHTPEALDVWLTELHQKVKGRIAIAVELKKGPVVYALQKYPFITVFPVHALSLARYRQAFSPSGAKDDPQDAELALELMLRYPQKIKAIEPDNADIRLLQQLVEQRRQLVEDKRRFVNRIINTLKQYYPQPLEWFSHRGSLLLCELIIRWPSLQQLKRARRDTIRNFLNAKGGRAMALTEQRVASIDNAIPLTTDPSVIEANALMATALATQIKVVSEIIKTYDERIETLFDTLPDSGLFKSLPGMGPCLGPRMLAALGDNRDRFNSAEEIQNYAGIAPVTERSGQKSWVHWRWQCAKFVRQTFVEWAAKTVNSSYWARLYYRGLREKGKSHQSAIRALAFKWIRIIYRCWKTKTQYDEAKYLLALEARKSPLLKP

SEQ ID NO: 266814 - protein, 404 aa, unidentified
MYNAVGIDVSKGKSTVTVLQPGGTVIRKPFDVSHTSQNLNELSSYLESLDGDTKIVMECTGRYHEPILKALSEAGLFVSVVNPHLIKNFGSNTLRKVKSDPADARKIARYTLDNWAELRQYSSMDNTRTQLKTLNSQFSFFMKQKVAAKANLIALLDNTYPGVNKLFDSPAREDGSEKWVDYAYSFWHVDCVRGIGLKAFTERYQAFCKRHHYNFQADKPEKLFNASKELVAVFPKEKTYKLLVQQSIQQLNLASGHVERLRREMNELASTLPEYNTVMGIYGVGKTYGPQLIAEIGDVSRFTHREALTAFAGVDPGVDESGQHKSKSNRASKVGSARLRKTLFQIMTTLLQNAPEDDPVYRFLDKKRSEGKPYYVYMTAGANKFLRIYYGKVKECLRNLEQES

SEQ ID NO: 266815 - protein, 343 aa, unidentified
MQAITTIGLDIAKSVFQVHGVDAEGHVVIRRQLKRRYVLAFFQKLPPCLVGIEACASSHHWSRELQALGHNVRLMPPAYVKPYVKRQKNDTTDAEAICEAVTRPTMRFVATKTPEQQSCLMLHRTRHLFIRQQTAVINAIRAHLAEFGIVAPVGRNGVEQLLGVVADSNDKRLPEVARACVAALGAQLRMQKAQILEFDRMIRAWHRSSEASRRLDEIPGVGPVLATALVGSVADPKAFRSGRDFSAWIGLVPKQHSSGGKDKLGSISKQGDRYLRSLFTAGALAVIRYAKIHGTKHRPWLTALLARRPTKVAAIALANKIARMAWAMMARGERYKEPVALAA

SEQ ID NO: 266816 - protein, 310 aa, unidentified
MDVFIGIDVAKDRLDICLRPSGETFVVTRDDQGLERLVERLRAVAPVLVALEATGGYETVVASALAAAHLPLAVVNPRQIRDFARSTGKLAKTDRLDAAAIAHFAEAIRPPARRVADGEAQALGELVARRRQVIEMIVAEKNRRRLAGQPRVLKAIDRHVDLLQAELSELDRDIDGAIRKSPAWQADADLLASVPGVGKATLRTLIAELPELGRLDRRKIAALVGVAPINRDSGALRGRKTIAGGRAPVRTALYMAALVASRSNPVIAAHYQKLRAAGKAAKQALTACIRKLLVILNAILRDRKPWSLPA

SEQ ID NO: 266817 - protein, 339 aa, unidentified
MLYVGLDLSRKRLDWQALLPSGERLGIGAVPPDTNGLEKLVGKLGDAEILAAIESMSGARFVHDQLERRGWEVKIADAVKVKGLAPLACKTDKIDSGVLAELARRELVPEIWLPDPEVRAERERARFRLHLVKHRSALKNRVHAILFQHGVPSPGSDLFGVGGRALLERLRLPEPWASTVAASLSLIDTLDEQIAGCERELRALGAAHRYMPLLLSCPGIGWVLAFTIASEIGDIARFASARKLVGYTGLCPRVEQSGERDRRGPLRKNGPNYLRWALVEAAHSAARHPCYRPVRERFRARHGNKRGTKLAAIEIGRRLTEAIWHMEQLLPNSSPPTVP

SEQ ID NO: 266818 - protein, 311 aa, unidentified
MKTQTDQETIYIGLDVAKTHLDLAGPGIKEQRFANDAPGWAALMAALAAIKERAQVICEASGGYEKSVLEALAAGEVKASRVHAEEVRHFARSRGQRAKNDRLDAKLLAEFGRERRPRLWQPVEAAREELRALHDRRRQLVELRTKESNRLENASPRLAGLLEKSIAFIDTQIVEVDHLLAQHLDSDPGLKAQAKRLTSVQGVGAVTVTALLSHLPELGQVSDKEIAALVGVAPFAKDSGTLQGRRTIRGGRAAVRNVLHEVFAQALEILSANRDILDVAATRLLEVETLDEAALRELTRDLRRPEPVPTH

SEQ ID NO: 266819 - protein, 339 aa, unidentified
MKLYVGVDLHANNNFIAMVDRKGKRVEQQKLPNDIFVILDFLKPYRKDIVGIAVESTFNWYWVVDGLMDSDYQVHLANPSAIQQYSGLKHLDDKHDAFWLGQMLRLGILPEGYIYPKEDRPIRDLLRKRRHLVKLRTSLMVSLQNIISRNCGVSFRANEIKRLKEDRVSPLLESNQDLALAGQTSKEMIDQLTRQIHKIEGTVVQRVKLKEASRYLVTLPGVGKILGLTIMLETGPIGRFADVGRYASYCRKVPSRWTSNEKTKGKGNQKNGNKYLAWAFSEAAEFARRYDDQARSYYTRKMRKTNFMVAHSALAHKLARAAYDLMKDQVPFMPEKLFS

SEQ ID NO: 266820 - protein, 461 aa, unidentified
MSVNGKKKMSRISKLPREFEQINTNAAGIDIGAQKHFAAVPQGRDPQGRDVRHFDTFTTDLYALADWLKHCGIDTVAMESTGIYWIPLFEILEQKGFDVRLVNPRSIKHAPGRKSDVLDCQWIQQLHAYGLLSSAFRPEANISVLRAYHRQRTMLVNHAATHIQHMQKALEQMNLKLTNVISDITGLTGMKIIRSILDGERDPQKLAGHRHARCKKSAQEIQKSLHGNWRDEHLFALRQAVELYDFYQTQIQACDQKIQAQLLQFEDRSGTGKRPPPSGKRHRGAKKLRFDAREHLYRMAGVDLTQVVGLDTPTVLTLLSEVGLDMSRWPTAKHFASWLGLCPGSKVSGGKNYSSKSKPSANRAAHAFRMAAYSLHRSPSAIGAFLRRKKAQLGAPKAITATAHKIARIFYTMIKTRTEYKDLGVDYYQNRYKERMLRNLKRKAKAFGLTILDQNQLVMEN

SEQ ID NO: 266821 - protein, 304 aa, unidentified
MFGIGIDVSGENLDVAVHEQAFRQFKNNKRGWASLIRWLQQWPAKQVVLEASGGYEQKALDALHGAGLPMVRINPGRGRSFASATGKQAKTDRMDAMVLAHMADALKLTRYVPPAAWQRRLGELCQRRRHLVQMRVSEHQRMRAFSEPSLISMLNQHLREIQRNIKQLDSIIAALLAEQDGWRDFAKLKGAGPVLLATLACELPELGKLSGKAISALVGVAPMSRESGTWKGRRSITGGRAVVREALYMAALTAKRYEPRLKEFFESLVNQGKPGKVALVAVMRKMLVILNARKREAEAQMASA

SEQ ID NO: 266822 - protein, 402 aa, unidentified
MFYIIYKDMKKICGLDVHKDTIFLCILAENGQTFLKEYTTLTPDIASMRDLIKEQHVSEVAMESTGIYWIPIWRILQGHVEMKLVNPYFIKQLPGRKTDVKDSQWIATVLQKGLIRGSYIPGQHIQELRQYERRYVRICEHISRIEQALDRQLHRCNIRITNFTSKVCSASVMGVVRGLIKGESSPEELIKHIHGRITNKHKEKIAASLQGFVSDSDRFILSRNYEELELLTEQQKECVNGMETICDALYNEELKLLCSIPGIQKLSAMSIIAELGVDLKMFATAASLVGWVGLRPRNDESAKKIKSRKITNGNKYLRRILVQCAWAITRSKSCWLSGKFNELAKRRSQKKALIAIARKLLVIIWHVLSKHEAYKEYKPKLSKEQKQKRIARLEKQIIELQS

SEQ ID NO: 266823 - protein, 430 aa, unidentified
MKSNTQNTKIEAITETTLVLGIDVGSETHYARAFDYRGIEYSKKPFKFSNDEAGFVTFKAWILDIKEKHGKDKVVPGMEPTGHYWFNLGKFLQDNEMKPVLVNPHHVKKSKELDDNNPTKNDRKDPKVIAGLVRGGRYMIPYLPEGVYADLRTASNMRFQLQAELTRIQNRISRWFNIYFPEYKTVYGQPDAKSGMLILKVAPLPEDILTLGIDGVNQIWRDAKVRAVGKARAKTLIEAAEHSVGSKEGEISARMEIRMLLEDYESRNTRLQEVVALIEELVKKIPMAEKLLEIKGVGIKTVSGFLAEVGDISRFNNPKELQKLAGLALVENSSGKHKGETTISRRGRKRLRYLLFEVAMSLVSKNPEFRELHSYYTTRKLNPLKKMQSLMAVAAKLLRVFFAMLTKGVDYDPQKLVGDIKRPAVYLQVA

SEQ ID NO: 266824 - protein, 349 aa, unidentified
METAYDGRQVVGMDLHRRRSVLVRMTEDGRRLGTARITNSPAELRKAIARAGKSPKVVLEATYGWYWAADTLAAAGAEVHLAHPLGVKAFTYRRVKNDERDAADLADLLRMGRLAEAWIAPAEIRELRELTRYRHKLVHLRTSCKDQVHALLAKLGVPVTCSDIFGKAGSAWLDSLALPRPYAGKAASLRQIIAVLDAEITLLTQVIADLLAGHHGYQVIQQLPGVGPVLAAVIVAEIGEVTRFKTADRLCSWAGLTPRHRESDTKVTRGRVTKQGSRMLRWALIEAVQRAGGDTVTGATRDAIIARRGKQTRNIAKVAAARKLLTLVCYGLRDGQIRCLSSTPAGQAA

SEQ ID NO: 266825 - protein, 389 aa, unidentified
MLLDHPSDGPTAIRTHIAAIFVSLELSRSTWLVTSLSPGKGEKMSRHSLTAGHVAELLTLFAELRRKAEVRTGQSYPIITIQEAGLDGFWLHRVLQQKGIESHVVDPASIAVPRRQRRAKTDRIDGETLLRTLLAYKRGEPRVCAMVVAPSPEEEDRRRLCRERRTLIEERITHVNRIKGLLFAQGIFDYTPLRRDRRARLEALRTGDGRELPSHLKAQIGRELDRIELLLGQIKAVEAAQEALLAAARSPAGETAAPDPVTMLLALKGLGANFTTVIWSEAFYRQFANRRQVAAYAGLAATPWQSGGIRHEQGVSKAGNSRLRTTMIQLAWLWIRHQPQSALTRWFKERSPQGRKRAIVALARKLLVALWKYVTQGVVIEGAVMKPAA

SEQ ID NO: 266826 - protein, 341 aa, unidentified
MKFRTIGIDLAKNVFQACGVNEHMKSQFNKRLKRNELLDFMRQQAPTMVVMEACYSSHYWGREMAKLGHDVKLIPAQHVTPFVRGNKNDPNDSFAITEASQRPYIRFVPVKTEFQQEILCLHRIRERLIKNKGALSNQARGLLSEFGVVFPCGHKALLSGLSSVIDNPQYSHRLQDMVIDMLSEYNVTLKRLKSIEKQLGEFVDGSESGRILLSIPGIGIINASALLASIDKGQAFNNPKEFAVWLGLTPKQHASGNISKMGGITKRGDRYLRKQLVHGARSVVSRAAKNTDSLSLWATKLRVTKPFNKMAVAMAHRLARLIWILLTRQEHYSATPTGVSA

SEQ ID NO: 266827 - protein, 355 aa, unidentified
MTITKYIGMDVHKESISIAVMNSAGKFVMECVIETKGSMLLQFIDGLRGDVRITFEEGTWAAWLYDLLKPHVSEVVVCNPRKNALLKDGSKSDRIDARKLAELLRGNHLKPVYHGEQGLRTLKELARSYLNISKDVTRVMNRLKALYRSWGIACVGTKVYARRHRSEWLGRISEAGVRRRAEHCYQQLDALRLLHQQVRRDLLLESKKHQAWRLLGLIPGIGPIRAALLIALIQTPHRFRTKRQLWTYSGLGLETHDSAQYRVVEGQLQRSKKPVTLRGLNQDHNHDLKDIFKGAAARVSSSSGPFHDFYEHLLAQGRKPTMARLTLARKIAAITLIVWKKEVRFDASYLKSQAA

SEQ ID NO: 266828 - protein, 348 aa, unidentified
MILGLLQQVVNAHSQFKPIQIYKMKSQQLIAGVDVSKDTLDIYFNDASGEEHYLKVSNDKKGHDLLIGKMGVQRTYLMESSGPYYLRLAFAIKKLNGDVRIENPISVKRFIQMHLERNKSDQKDAKWLYVYATQRETNEWKLPPKEQLYAMQVMGSIDLYSRQLVMLTNQLHSLEQVPIQMKEVRMSLEKMKQKLQIELRKLELQLHHLLQSWQGEQVKNITSIPGLGKRAVALLIVYTDGFKKISNHRQLIALAGLAPREHTSGTSVRGKKGICKMGNGHLRNVLYMCSLSAIKHNHACRALYERLKAKGKQSKVALIAVCNKLLKQAFAIATKGTTYQATYKSSLL

SEQ ID NO: 266829 - protein, 345 aa, unidentified
MTEAYDGRQVVGMDLHRQRSVLVRMTGDGRKPETARIENSPAALRAVIARAGKNPQVVIEATYGWYWAVDVLEAAGAEVHLAHPLGVKAFSYRRVKNDERDCADLADLLRPGRLPEAWIAPAEVRGLREVTRYRHKLVGQRTSCKDQVHAVLAKSGIPVTRSDIFGRGGGIWLDGLPLPQPYAGKIASLRALIAVLDGEIARLEEQAAGMLAGNRGYIAIRQLPGTGPVPGAVITAEIGDITRFRTPGQLASWAGLTPRHYESGTRVIRGHVSRQGSRMLRWAVTEAIQRQPAGTRPQQVKDAIITRRGAEARSIAKTAAARVLPTQVFYGMRDGHTRRAASRAA

SEQ ID NO: 266830 - protein, 346 aa, unidentified
MNQIIRIGMDTSKHFFQLHGVDTAERPVLRRKLRRNEVLGFFAKLPPTVIGMEACGAGHYWARELRKLGHEVKLMAPQHVKAYVKRSKNDGRDAEGLCEAMSRPTMQFVPVKTEEQQAALMLAGVRQQLITRRTQLSNAIRGYATEFGLIAAKGLDKIGPLLGRIAQDERLPELAREMFAMQGRDYARLQIELKAIEARLLAWHRANADSRRLAKIPGVGPVGATALVMKAPDPRLFPSGRHFAAWIGLTPKDHSTAGKTRIGKITRAGDEMLRSVLVAGATAVIQQARNGRGRPSPWLLALLMRKSPKLAAVALANKIARIAWKLLTTGESYDGARMPGASALAA

SEQ ID NO: 266831 - protein, 400 aa, unidentified
MKQSNATQPAVDQRAIAERLNAASDTHAAYIGLDVHQASISVAIAEAGRQAPESRGEIPNDPKAIGQLIRQLSQRFEGQPLLFSYEAGPCGYGVYHQVQLSGHDCEVVAPSLIPQRAGDRVKADRRDAQMLARLSRSGELTPVWVPTPEQEAIRDLTRAREDMKAIELKARQRLGAFLLRHGKVYPGKSKWGQAHFRWLETVRFDTPVQQIVLEEYVDAVKDAQRRVAGLEEQMEAALPGWSLAAVVEAVQAMRGVSLITAMTVLAELGDISRFDSPRQLMAYLGLVPSEHSSGGSRRQGGITKTGNGHVRRVLVEAAWSYRFPARKTRIIQRRAEKTSPAVQAIAWEAQKRLCGRYHRLAATGKVAQQVTTAVARELAGFLWAIVCEAMSKPHGSRATA

SEQ ID NO: 266832 - protein, 353 aa, unidentified
MDKYIGLDMDCKKTVGCAIVPGHSERSATFGPDVASIRRYLRQERQGGYRVHAAFEVSGQAGFLYDALVDEVDSLHVANPSKMTWIYRTAKKNDRIDARKMAVLLSINELPTVYMPSKEVRQWRQTILHRQKIVRDIGQVKNRIRAALKSEGHSKPAYRGGWWKRANRLWMARLCEEQEMADALWRLHLRNLLDELAFLESQRDRVTVYLDAYLANQSGATLLMSIPGVGPRTAEAVLAYTDDVERFDNYKQYCAYFGVTPKLDESGSVRRLGHISKQGPSVVRWVLCESSWKVIRYCPGLKAFYDRVMAGQQSRKKIAIVAVMRKLLCIMRAMLTTGELFNQKLLQDALKAA

SEQ ID NO: 266833 - protein, 355 aa, unidentified
MDNKKYIGMDVHQASISIAVGDAAGKVLMECTLETKAATVLEFIQGLRGSLWVTFEEGTSAAWLYDLLKPHVTKVVVCDPRRNALLKAGNKNDRVDARKLSDLLRAGLLTPVYHGESGVRTLRELSRSYLAASKDLTRVMNRLKAIYRSWAIPCAGQQVYSPRHRAAWLEKLREAGVRRRAEQTYQQLDFLMRIRKETRKELLAESRKHPARELLEQIPRLGPIRVALLIALLQTPHRFRTKRQLWNYCGLGLRTRSSGEYRYKEGQLQHARKPPALRGLNVNHNHDLKHLFKSAATQAGTKDDPLREFYQNLLAGGMEPPMARLTLARKIAAIALKIWKKGERFDPAKLNQQAA

SEQ ID NO: 266834 - protein, 351 aa, unidentified
MSKRTNSIAVSTIGIDTGKNTLHMIGLDEKGVIVLREKVSRSRIAARLVNMQPCLVGIEAGMATHYMARELVALGHVVKQVPPAFAKPFRQGHKNDFRDAHAVAEAVQRPSTRWVPIKTDDQLDLQALHRVRSRLIGDRTAVINQLRGFLLEHGIAVRQGHRFLRQQLPRIVATRTDVLSPRMVRIIGDLIEDWAHLDERIERVTDEIEGLARTNVSCGRLMTVPGIGPIIASAMVAAIGDGAAFAKGRDFAAWLGLVPRQMSTGDRTILGRITKRGNRYLRMLFIQGARAIQLHPASWAKHSFGPWLAAAARRLHCNVLTVALANKLARIALTVLVQGRNYETRIEPIPA

SEQ ID NO: 266835 - protein, 278 aa, unidentified
MGEVSTIGVDIAKSVFQIHGVDADGTVIVRKRVGRAKVLEFFAKLPPCLVGMEACATAHQWARELKKLGHDTRLMPPTYVKAYVKRGKNDAADAAAICEAVTRPSMRFVPIKSVEQQSALMLHRTWDLLIRQRTQLINALRAHLAELGLVAAKGHEGLQQLVTAVTESSDERLPSYARFACQSIVAQLHATQTQINGLDKRVTQAHRANADSKRLEAIPGFGVILSTAVVATMTDPKAFRTGREFAAWIGLVPRQNSTGGKERLGSISKQGDRYLCLS

SEQ ID NO: 266836 - protein, 355 aa, unidentified
MNQEKYIGMDVHDASISAAVMNAQGKVLMECVLETKAATILEFIQGLRGTLAVTFEEGILAAWLHDLLQPHVSRLVVCDPRKNALLRDGNQNDRADARNLAELLRTNHVHAVYHGNHGTRTLKELGRSYLALTKDSTRVMNRIKSVYRSWAIPCTGTSLYSRRHRAEWLAKLVEPGVRMRAEHLYQELDGLKPLRQAARRELLREASKHTAVKRLRQIPVIGPIRSALLVALLQTPHRFRTKRQLWAYSGFAVQTYDSGEFRFVRGKRQRNRERITVRGLNRNHNPDVKNLLKGAAISAIGRPGPLQDFYAALVEKGMRPSMARLTLTRKIAAIALIMWKKGVSFDPKQLPRQAA

SEQ ID NO: 266837 - protein, 419 aa, unidentified
MYSSWLEVTEGREEEVIFVGIDWSEHHHDVCVIDDEGMVLAKSRVPDGVVGVRELHEMLATHAEEPDEVIIGIETDRGLLVAALVADGYRVFAINPLSVDRYRDRHRASGAKSDPGDAKVLADIVRTDRGNHRPIAGDSELADGVKLLARTHQNFVWERQRHVNRLRSALREFYPAALVAFGTQLASPDAVAILSIAPTPELGRRLSRSKIAAALRRAGRRRNIEARTERIQAELRSEQLRVGAHLEETYGVITASLVRLITGLNDQVAGLEQDLHGAFEQHPDAEIILSLPGLGSTLGARVLGEFGDDRTRYPDARARRNYAGTSPITKASGTHRVVLARFARNERLYDACHLWAFASLSASPGARGHYDAKRARGKTHSQALRALANRLVGILHGCLMRGELYQEHLAWPVRETDAA

SEQ ID NO: 266838 - protein, 373 aa, unidentified
MPKYSTAFGMDVHLRSTTVCALDADTGEAVTRRFPGNPWGEIAGWMDGFPGPSLAAYESGYLGFAPQRELAGLGVECVVAAVSKIPRSAADSASKNDRNDAARMAKAILAHDISPVWVPSPEVEGIRDLAGAYDGATARLATAKQRLLAFLARRGFVYGGTTPAGNPRKYWTYDFLRWLDKVRPEDDGGVRTLASLRNEVEAAAEARADLLSEYRAAVDASPIAAEVAALQSIKGCAFALAAAFSAEVGDFTRFRSGRQVTAYFGLAPSQRSSGDSVRLGGISGAGNALVRKLAVEGSWCYAAARHQPKLMPRDTGVPLEIRMHGRKGSERLLRRREEMLARGMPAAKANAATAAELVRWLWALGMMCREGAE

SEQ ID NO: 266839 - protein, 354 aa, unidentified
MEYIAFDAHKRYTLASVVRSDGLQVREQRIAHERGALQEFLERCERGSPVAVETIGNWYWIVDEIEAAGCVPKLVHARKAKLMMGEINKTDRLDVRGLNRLQQAGTLPTVWIPPGELRDQRDLPRTRMVLVRQWTRLKNRIHATLAKYALHELDVTDLFGVRGRTLLRQRFERLPPHTAYASQKLLEQVEALDGHVREFEQRIQGTFKPTPVIQRMLTLPGVGLTLAVVIALEVGDVTRFASAEKLASYAGTTPRVHASGGSTRFGPARPDVNRYLKWAFVEAANAICLTRGRTAPRHVSRLYERVARRKGHAKAIGAVARHLAEATYWVLRKGEAYREPTAPFRPRGISAEAP

SEQ ID NO: 266840 - protein, 393 aa, unidentified
MEVIHMYLVGIDISKYKHNCFIATESGVPLKEFVFENNSEGFKLFHKVLSELDQGQEIRTGLEATGHYGTNLKQFIMASGYTYLEFNPYLTHQFSKAMSLRRIKTDKVDAKTISNMLGSVDYKTLHTQFYHINELKQLVRDRDEILTNRSKTLVKLTNSLDIVFPEFKSFFNNRLGSTALFILKKYKSPAKISKLIMKDYECLRSASNGRFTYPKFSRLKSLAKDTVGVQSTIYNKRMLALISDYEYFDQSLDEIDQEIIQLFSEAKTKLRTIPGLGIIQAATIYAEIGDIHLFSNPQKLIAYVGFDVSINQSGISEHYGHIVKRGSPLLRKAIWIYALPSLRFIPTLNDYYHKKKAEGKHHKVALTHVCRKLIRMIHHIEYNQIDFDDKEIK

SEQ ID NO: 266841 - protein, 401 aa, unidentified
MNAVGIDVSKGKSMVCVMRPFGEVVLEPFEVLHTAQNLNDLAGKLKALDGETRVVMEATGNYHKPVAFVLHDAGLFVSVVNPVLIHDYDNNSLRRVKTDRKDAVKIANYTLDKWTRLRQYLPEDDTRLALKNCYRQYQQAVAVRTMLKNNLISSLDLTFPDANKLFSSPAKSNGCEKWVDFIGDFWHSECVSSLSSDAFAKKYLKWCQKHGYNFIRSKSDTIYACAVNAASLPKSPTSKLLIQQQVAQLKAVSQSVAAFQQEMLRLSQQLPEFDTVMEMYGVGPSLGPQLMAEIGDVRRFSSKKLLIAFAGIEPQPNDSGKIVGNDSGISKVGSAVLRRTLFLIMTVILKTQPQDEPVFQFMNKKRSEGKPYKVYMMASANKFLRIYYARVKAVMDSKHSK

SEQ ID NO: 266842 - protein, 348 aa, unidentified
MTEQLMAGIDLHSNNLVIGIVDQNGRRLKHQKLDCNLKQVDDFLSPFKSQLTSVAVESTYNWYWLVDGLRARSYPVKLANPAQIDQYSGIKHADDKNDAFFLAELQRLGILPTGHIYDPVLRPVRDLLRRRMSLVHQRTALLLSFKSLYARTTGQTMSLSRLKSMEMAEAKRLYEHPANCLIAKIQKEHIEQLDRSLETIEKAVLQSARELPCYDKLNTLPGIGRILAMTITMEVGQISRFKTPGDFASYCRTVESRRMSNGKKKGDNNQKCGNKYLAWAFVEAANFAKRYDEPCRKWFDRKAAKTSTVIATKALACKLAKAAWHVMSETTDYDSKRMFPELAMKNAK

SEQ ID NO: 266843 - protein, 349 aa, unidentified
MTVYVAVDFHARQQTISYCDLADGEIHRRELRHQRDDVRGFYAALTGEVIIGFEASGYSAWFEQMLAELGHTYWLGNPAEIRRKAPRRQKNDRRDADLMLDLMLKGDFPRLHTFSEESRLVLRQLRYRHKLVKVRTIAKNSLHAIGINAGLPLKRQLLTEKGIRQLQALPLSPVLAQQREEWLQLIAFVNQRIAKVEAALQLLADKDAAVVLLQTHPGIGLLTSLALRYTLMPVSRFRTTRQVTAYAGLDCMEEQSSERRRMGSISKAGSRLLRYLLNEAGQTACRKDPELKRFYQRLSQRRERPKAKVAVARKLLVRSFIMLREQIDYAEFVRRGVAARVARQPHSLS

SEQ ID NO: 266844 - protein, 404 aa, unidentified
MSNIERVVIGGVDTHKDVHVAAVIDERGKILDVGHFATTRSGYGQLLAWLRSYGELLRVGIEGTGSYGADLSQHLAGEGVEVIEVNRQNRQNRRRRGKSDPIDAEAAARAVLNGEASGAPKSQDGVVESIRALRVAFTSARDARTRVALQIRDLLVNAPSALRAEIEPLSSEQRAKRCARFRPGDPTDPREATKLALRSLARRYESLTEEMMGLSRVLDRLTLEANPALRAARGVGPDFAAILLVAAGDNPERLRSESAFAALCGVSPVQVSSGKTVRHRLNRSGNRQANNALWRIAVVRIAHDEETRVYAARRTAEGKTRREIIRCLKRHIAREMFAHLTHPQVVPVGTTLRADRNAAKISLTTASTELGTYPLRISRIERGLDHDREFAEQYQAWLVQKIAA

SEQ ID NO: 266845 - protein, 310 aa, unidentified
MEQIFVGIDVSKERLDVHVRPSGEAFAVARDGEGLAALVERLRVLAPALIVSEATGGFEQVLAGALGSAGLPVVVVNPRQIRDFARALGRLAKTDRLDAEAIALFAERVRPELRPLPDEQARLLGELVARRRQVIEMIVAEGNRARQLESRRLKKRIERHRAVLQEELSEIECELDDTIRGTPIWRESEDLLKSAPGVGNILARTLIADLPELGTLDRKKIAALAGVAPFNRDSGTLRGRRTIWGGRAAIRTTLYMAALVATRHNPVIASFYRRLLAAGKPKKLALTACMRKLLTILNAMIRDGKPWQHA

SEQ ID NO: 266846 - protein, 344 aa, unidentified
MEITTVGLDLAKNVFQVHAISSTGEVVVRRALRRAQVIPFFSKLPPCLIGMEACGTSHHWARELVSLGHQVRLMPPAYVKPYVKRGKTDAGDAEAICEAVTRPTMRFVSIKSVEQQAALALHRTRDLLVRQRTQLVNMIRGLLAEFGIDIPKGITHALAFVRRAVAGQADDVPDLAAKVIGALAEQAIEVQGRIRQLERDLLAWYRSNEVARRIATVPGVGLLGATAMAATVTDPTRFRSGRQFAAWLGLTPLNNSSGGKERLGRISKMGDQYLRRLLVTGMTSLVRRNRHHPSSADPRINALLARKPLRLATIAMANRAARAIWAIMVRGEVYRAPALGSAAA

SEQ ID NO: 266847 - protein, 344 aa, unidentified
MIYYAGLDVSLRTVNICVIDDEGKFFAETKLASDVQDIVGYLDELKLDIESVGLEAGTLAQYLTYGLQSAGFEAICMEARQVKGALSAMRNKTDKHDARGIAQLLRCGWYSRVHVKSMQSHHIRMLLSSRKAVLSKCIDLENEVRGLFKIFGLKLPPKLGHGAFDVTVRDIIEADEALSHALLPLLDARLVLYRTFRVLDNRTRKMSHTDPVCERLMTVPGVGFITALTFKAGVDDPHRFKRSRTVGAHFGLTPRRFQSGELDIEGHISKCGDADVRATLYTAANALLTRSAQWSSLKAWGMKIAKTRGHRRAVIAVARKLAVILHRVWIDDTQFRWGTEGARS

SEQ ID NO: 266848 - protein, 429 aa, unidentified
MSYRIAGIDVHKKMLAVVVSDVEIESEYQFERRMFGSNPEQLRSLAAWLLEQEVEEVVMESTAQYWKPVWEALERYWKPIREKREGARRKSGTLHLAQAQSNRGPRGRKRDFPDAERLVKRLVARELTLSFVPDPEQRLWRTVTRRKYQLTRDHTRLQNQLESLLEEAHIKLSSLVSNLLGVSARRMLKALAEGETNPAALAALADERLCATPEQLCDALGACADLKPVYRRLLKMMLEQVQFLEQQITKLDQEMAGLLSQHQDAVERLAEVPGLGVDSAQQIIAEVGPTAATFPSEKCLSSWVGACPGDNESAGVNYSHRSPKGNRHMRRLLNQAANAAARTKGSIFEIVYRRSVPHLGHNQAIGAIAHRQCRLIWLILHERVRYEERGPAVTKQSKQKRTTRMIRQLRNLGYRIEAPNPQPTRAQGQ

SEQ ID NO: 266849 - protein, 314 aa, unidentified
MTITPRCVGIDVSKHMLDIFDDGIGTPERIANAPRPITQQVARWRCANVFVVFEATGVYDRALAEALCQAGIRFARVNPARARDFARASGRLAKTDAIDACMLAAFARAMAPVADQAPNSARNALALLAKRRDQLVQMRAQEKNRRSEAYDRAMIEDIGNHIDFLNGAIKTIEARIKALIKAEPEISEQAHLIRSAPGIGPVACMQLIAQMPELGCIGPKQVAALAGLAPLNVDSGAYRGRRAIGGGRKRVRDALYMAALNAVRRDDTFRAFYQKLRTVGKPAKLALIAVARKLLITLNAMLRDRKAYLQHPPS

SEQ ID NO: 266850 - protein, 365 aa, unidentified
MSSVPPAAGLIHLGMDTSVKEIVAGVLRPGEEVPVITRISGDEESVRRLIGRFPDRRLVSACYEAGPGGYELYRLLTSMGVACDVVAPSLIPKGTSDRVKTDRRDAARLALLHRAGLLTPVRVPSPAEEAVRDLVRARGDLLDDRKRTQQRLNAMLLRHGRVWRGSKWTCEHRAWVARQVFEEPALAETFALYLGALDAREAELAAAEATMAGWAARDPLAAPVGRLGAYRGIAQLTGLTLAAEVVDWRRFASARAFMGFAGLTPAEYSSGGRDRRGHITKAGPEAVRTALVEAAWAYRFRPAIGVTLRRRQGGQPPETLGRSWKAQQRLHAKYAKMTARGKPAGVAVVAVARELAGFVWAEMTS

SEQ ID NO: 266851 - protein, 344 aa, unidentified
MLFYCGIDLHAKESVLCIIDAQDTIHFRNKVPNQINHILEVLNSFTPKPKVALEATLNWYWLVDGLQEAGFEVKLAHPFGLQVIKKAKVKTDNRDAFHLARLLRLDALPESYIYPKETRPLRDLLRKRQKIVSLRAAEYTSLPRTLLQHGIVDIPAKQAKEFKSKEIEQYFKHPVIQYRCAMELERIRFYTRQVKILEEIIFGNAMEHQDFLLLQTIPGVGKLLASIILYETGDVNRFPTAKQYCSYSRVVPGIAQSSNTIRRGKGSKQGNPYLKFAFMQAASLAVRFDGPIRRFRLKHMGRRRSKARKLISVSIVAHKLAVAAYQILKDKKIFQVESMFAPYV

SEQ ID NO: 266852 - protein, 389 aa, unidentified
MPTVADRPEAQTAIQTNLAAIFISLELSRSIWLITSLSPGGGEKMSKHSVPAGDIAALLARFSELKQKALARTGKSFPIVTIQEAGLDGFWLHRVLQSEGIESHVVDPASIATSRRRRRAKTDRIDGEALLRALLAFKRGEPRVCAMVRVPTPEEEDRRHLCRERKVLIAERVKHVNRVKGLLFSQGVSGYEPLRRDRRQRLDELTTGDGRPLPTHLKTQISRELDRLELLLDQIKAAEAERDALLAAQQAATPAPAGRMLLDLKGIGPEFAANLWLEGLFRHFDNRRQLASYAGLAPTPWQSGSVDREQGVSKAGNPRLRTTLIQLAWLWLRHQPQSALAQWFKERVSRNGGRLKKTTIVALARKLLVALWKYVTAGVVIEGAVMKAA

SEQ ID NO: 266853 - protein, 340 aa, unidentified
MDTIGLDLHKRESQLCVLTEAGEIVERRIVTSRERFTAVLGSQPSARILVEASTESEWVARHLESLGHEVIVADPNFAPMYATRRRGVKTDRRDARTLAEACRLGAYRPVHRASAPQRHVRAQLAVRDALIRTRTRYVSVVKALARRDGLRLPPGNPVHTDAKLAGLPLSALLAGELAPLRALLAPLNQEIAGADERLAAVAAADPVVRRLQTAPGIGPVTAVAFVATLDDVTRFASAHHVAAYLGLTPREYSSGEQQHRGRISKTGNARMRALLVEAAWRVLRSPDPAAASLRAWAERIAQRRGRSIAAVALARRLAGILYAMWRDGKDYRAPPSAAVA

SEQ ID NO: 266854 - protein, 384 aa, unidentified
MNKHNILFIGLDTHKEFVEVAYIEDQRGAQAVHFGRVSSAKASITKLARQFQSKYPEATLHFVYEAGPCGYWIYRLLTSLGHCCYVIAPSLIPKKPGEKIKTDKRDALKLAKLLKSEDLTAIYVPEPEDEAIRDLSRARETAMKDLKDAKYQLKALQLRNNINYRGTANWSLKHLRWLTELILPHPSQQIVLQEYLQTISERIARLKRLDNELEHHVKKWRYYPVVKAIQALRGVRLLVAAGVIAELGDLTRFDHPRKLMSYVGLVPSEHSSGGKRHVGAITKCGNGRARRLLVEGAHSYRYPAKISTEMQIRQEGLPKDIVDIAWQAQLRLCRRYQKLMHKGKHNNVVVTAIAREMIAYIWAISREVVLTKVNPKLRLSRVPA

SEQ ID NO: 266855 - protein, 342 aa, unidentified
MEEVTIIGIDLAKNVFQVHGAAADGSVVFRKKLTRPQFARFMAEQPPCLVVMEACASAHHWAREMSRHGHKVRLIAPHYVKPFIKRQKNDAADAEAIVEAALRPTMRFVEPKTQEQQARAVAFRTREQLVKQRTEAVNALRSHLYEFGHVAPVGIGYLPRLERVIADPDADIPDLAREICQMLLDQINQLTGRIDALKARIAALSNEAEMPRQLQTMPGVGPITALAVETFAPPMDQFRRGRDFAAWLGLVPRQHSTGGKQKLGKTSKMGQRDIRRLLVIGATAVIRWASRRGAPKGSWLARMLERKPVPVVAVALANKMARGIWAMLTRGESYRGPVLIGA

SEQ ID NO: 266856 - protein, 351 aa, unidentified
MNSIDYIGFDIHKKTISFCAKAQDGRILDEGTIPARRTDLSAWAERRSRPWWGAMEATLFTGWVYDHLKPLAQELKVAHPAMLKAITASKKKNDKVDARKIADLLRCDLLPECYMAPSGVRDLRRVLRYRNLVVRQATRMKNRIAGLLMETGTLYNKERLHGKAYFCELLGSLRETPASVIDLLKLSRAQLELFVTIQQRLVKGLRADAGLRERVERLQSIRSVGEILALTWALEIGEVNRFTSIADAVSYCGLTSAQHNSAGKEHRGPISKQRNKHLQTILIEAAKLAPRYNPQLAAVHERELKRGNRNRATLAVARKLVAYLMAVDKSGKPFQVRASAGEANQDEQPVG

SEQ ID NO: 266857 - protein, 467 aa, unidentified
MENRMPGNDKKNRQVNNEVEVEGLPVIRPRVAGIDLGSQEHWVCAPGVDGQGRDVEKFGATTPELERMVEWLQQRGVESVAMESTGVYWIAPHEILERRGLEVVLVDTRELARVPGRKKTDRVDSKWIQRLHSCGLLAGSFRPAEGICMLRTLVRDKSNLVAEAGDWVRRMQKSLDQMNVRVHRAVSDLNGATGMAIVRAIVGGERDARCLARLRDRRCHKSEEEIAEQLSGHWREDHLFSLRQALRMYEAVQERIGEYEREILRKLAELAREQCRGQEPPSPRHPQKAKAIRKRGEEPLRKALFQMSGVDLTAIDAIGVGTVEVVLSEYGADLSRFPTEKQFVSHTTLAPHKPVTGGKPARKKKRGSASTRVSNALRMAALSMRYSQTALGAYYRQMARRIGADVAVFATARKLATLIYRLLRWGQPYVDEGAQAYEKRYEEVRIKRLAATAKNLGYQLTPQIAGA

SEQ ID NO: 266858 - protein, 351 aa, unidentified
MPRRSTVRAVTTIGIDMGKNTLHMVGLDLYGAIVLREKVSRGRIVSRLANLPSCLIGIEAGMATHYVARELAALGHDVKQVPPTYAKPFRQGHKNDFRDALAVAEAVQRPTTRFVPPKSNEQLDLQALHRVRSRLVSQRTAVINQIRGFLLERGIIVRQGLRFLRQLLPDILAKRTDVLSPRMARIVSDLAGDWRQLDDRIETVTDEIETLAKNDDSCRRVMTVPGIGPIISSAMVAAIGNGSAFSRGRDYSAWLGLVPKQMSTGDRTILGRLSKRGNGYLRMLFIQAARVILVRPANWPKHGFGAWLIRAIQRLHPNVLAAALANKLARIAWTVLAQERSYEARVTTAEA

SEQ ID NO: 266859 - protein, 319 aa, unidentified
MTTSSIVVGVDVAKERLDVAVRPSGEVWSAANDEAGVTALVARLRPLNPVLIVCEATGGFERAAIAALAAVGLPVVVANPRQVRDFARATGQLAKTDALDAGILALFAERVRPTPRPLPDAAAQLLDAVLTRRRQLLEMLVAEKNRLGFAPQPLHRGIQAHIRWLERQLDDVTKELAALIEASPVWRAQDDLLQSVPGIGPIVSYTLLGELPELGTLSHKQIAALVGVAPLARDSGTLRGKRMIWGGRASVRTALFMAALCGRRWNPALKVFYERLKAAGKPTKVALIACARKLLTMLNAMVRNKTRWMNQRATIQYSC

SEQ ID NO: 266860 - protein, 366 aa, unidentified
MKKTSTVQVFKNEFFKELELTIGLDLGDRWSFYCVLDEAGQVILEQKLPTTPEAMKQTFGKIPRSLIALETGTHSPWVSRLLSELGHEVIVAHAQKVQLITKSNRKDDRHDARTLARLARIDPALLGPVRHRSVQAQLHLTVIRARAELVSARTALVNAARGLVKSYGQRLPKCGTYQVSRELAAALSTELRDVLEPLLKEIESLNERVKEYDERMEKIAQEVYPEVALLKQVKGVGTQIALTYVLTIEDPYRFAKSRQVGCFLGLRPGRRNSGESEPQKGISKEGDRYLRTMMVQGAHYILGPFGEDSDLRRWGRKLAERGGKNAKKRAVVAVARKLAVLLHRLWVGGEVYEPLRNSQKVMREVA

SEQ ID NO: 266861 - protein, 471 aa, unidentified
MRCADRKQGRTARIRAAAHTRPGGKPPARKQGVQTRGERWKFSAWSGTGLELEVEVEEADSELGCTKLPRKRTQKVQKGRNRPMKKNSKNETMKSKRETKKVAELEAGWTRLDEREANTLVIGIDLGDRTSAYCVRTLGQQIVKEATVATTATAMREAFQGLRRQRVVIETGTHSRWVAQLLELMGHEVIVANARKLKLISENNQKSDKVDARLLSELGCMNVEWLHPVYQRSQAAHSDLLLARARQALVDARTALINHVRGSVKSFGSRVVKCASERFVEVARGALPEALKPALSGVLATLEELNEQIYGYDCQIEHLCHTKYREAAKCLLQVNGVGPVTTLTFVLTIENKDRFEQSRDVGPYLGLIPKKRQSGQRDPQLGISKEGDEMLRKLLVNCAHHILGAKGQDSDLRRWGLELVRAVERKGKKGARKLAAAAVARKLAVLLHRLWVTGAAYEPLRNRGAQQAPAA

SEQ ID NO: 266862 - protein, 405 aa, unidentified
MLVEADRSNAPSAVRTELTAIFISLELSQSKWLITSLAPGNGEKMSKFIVAARDVAGLLACLAELRRKAETRTGRHFGFVAIQEAGLDGFWLHRFLEAEGVESYVVDPASIAVPRRARRVKTDRIDGEMLLRTLLAYMRGDPRVCAMVRAPTPEDEDRRRVSRERKALTNERIRHVNRIKGLLFGQGITGYEPLRRDRRKQLDQLVTGDGRPLSVYLKAQIGRELDRIELLLEQIKVVEEIRDALLTAALPEAITTRNTPQHTGAAVISQPSVPAMLIRLKGIGPEIASVLWLEGLSRQFDNRRQVAAYAGLAASHWQSGNINNDQGVSKAGNPRLRTTLVQLAWLWVRHQPDSALSRWFITRVTERGPRSKKPAIIALARKLLVALWKYVTAGVLLEGAIMHSA

SEQ ID NO: 266863 - protein, 343 aa, unidentified
MKLSRVGIDLAKNVYQLHGVDRSGKTIWKRRLKRHQWFKALLDKTEPGCEIGMEACASAHHWGRELQSRGYTVKLIPPQFVKPYVKSNKNDARDAEAICEAMSRPNMRFVTVKNVEQQDIQATHRIRAELITQRTAKANQIRGLVAEYGLVAPKHMSSLRAAIPCWLEDAENGLTGDFRTLLHGVWNDLLGLDDRVCEMDKLIKQLAENHEECVRLQQLRGVGPMISTALIATVGDARQYRTSRQMAAAIGITPKQHSSGDRDRLLGISKRGDVYLRTLMIHGARAVVARAAHKDDRLSRWMTGIATKRHPNVAAVALANKTARMAWAMLRHETDYDPDYAIS

SEQ ID NO: 266864 - protein, 352 aa, unidentified
MIIGCDFHPSFQQIAYVEQETGEYEERRLSHRGEAEAFYRSLAGRSVRIGMEATGNDRWFHKLMSELGHELLVGDASAIHASAPREQRTDKRDARHIFKLLVENRFPSIWQPPVGNEEQRQLLLHRCRLVRMRTRIKNQLDSIAKNEGLTGSRVWKAKRRQQIEALPLTGWYAERRKDLLELLDEMDKRIEPLDKAVKLAAEQNAEARLLMTHPGVGPVVSLSYVLILGDWRRFPRGKQVGSYLGLIPSEASSGKHQQRMGHITKQGNTLLRWMLVEAAVKAQSKDPSWHRQYVRLSMNKHHGVAKVAIAHKLAVRLYWMLRSGQNYTKIVERGSHAGQSELAGGCGLGPIN

SEQ ID NO: 266865 - protein, 305 aa, unidentified
MSTIQTIGIDLAKNVFSIHGVDAYGKCVLRKTVKRNRLLEIFANLPPCLVGMKACSGAHHWARELSKLGHTPRIMASKFVIPYQQNEKNDANDAEAICEAVSRPKTRFVAIKSAEQQAVLTLHRIRHGLIKNRTATINQLRGLLSEFGIIIPQGRYPLQNTISSTLEDAENGLPMLARELLYDLVNRIHDINIEVLRYDRKIYTLVSHMKEAKKLMTIHGVGEHSATAIVTTVSDGKQFRSSRQFAAWVGLVPRQYTTGGHVQLGRISKRGDKHIRTLLIHGARAVIARCKDKTDRNSLWLQQVV

SEQ ID NO: 266866 - protein, 354 aa, unidentified
MPKTASAEIAVVGIDIGKNSFHVVGHDSRGAIIVRQKWSRGQIEARLANLPPCLIGMEACVGAHHLARKLTALGHDARLMPAKYVRPYAKGQKNDFNDAEAIAEAVQRPTMKFVATKTADQLDLQALHRVRERLVSQRTGIINQIRAFMLERGIAVRQGVRFLRAELPIILASRTDVLSPRMLRVIEDLAGDWRRLDERIDNLSREIETIARQDAGCDRLMSVPGIGPIISSAVVAAIGSGDVFSKGRDFAAWLGLVPKQISTGDRTILGKISKRGNRYLRVLFVQAAWVVLVKPMSWERHGLKSWIEAAKKRLHHNVLAIALANKLARIAWAVLARGRGFEVTRTIDGSTQPA

SEQ ID NO: 266867 - protein, 434 aa, unidentified
MFIIPIYLNRTVIGIDVASAFSFASILCPDGSQFRKPFKINHTVEGFNYFLEQIKKAEKEYSMKPVFFMESTGVYHLTLFHFLKDNKFDAFIINPLVTNCNKNKDIRKVKNDKNDSLSIANLGKYEDIKVSSDIDFNIFSLKLLIRDYYKLIDDRTSYKKKLSSSLTLSFSGYQDVFANTCSNASIGILKTYPTPQLVISAPKKDIIDILLCSRKGIKWAEKKYDKLIECANAAKYISLSAPRLSVSITTCISLYGAIDNEITKLLNEIKSFIDSDDLPATLNKNIDLLMTLAGLGYITAITVLAEIGAVDNFLKPKQLVAFFGVDPAVNESGKFKGDRVKMSKRGTRFGRRALYAVALASIRRKRNGEPTNPILLKYYQENLKGKKAKVALIAIMHKIIKYIFAILKNQEAYQLRDPKLHQRMYLENNSRSVA

SEQ ID NO: 266868 - protein, 335 aa, unidentified
MDRQYVGIDFHRRRSVIVRKNAAGEQLSSVRVANDPLVIAAAVAEAGPSPEVVIEATYGWYWIVDWLQEQGATVHLANPSGLNWGTRRVKNDERDAIDLIDMLRLGRLPEAWIAPPATRELRELVRYRAKLVALRSGLKAQVHAVMAKEGVLPTATDMFCRAGNVQLNEMQLGEAYTIRVESLRDLIEIYDREVAMLETNIRDRLRGDRGYRAIQAINGIGPTMAAILVAEIGDVTRFRSAAALCSWAGLTPKHKESDLTVHRGQLTKQGSRLVRWAVIEGTVRYHGGGKLAADYHQIAERRGKNKATVAIARKVLTLVYYGLRDGEIRCLTKTA

SEQ ID NO: 266869 - protein, 447 aa, unidentified
MQGTKQEGVKAAQSALAPKAGKPKPLNRKQRKELARRIEAGDVRLDVVHPQAAGIDIGNEAHYVAVPGGPVRRYGCTTAELKDMAGWLQEYGVQTVAMQSTGVYWIPVYDILEEAGLEVYLVNARETKNLPGKKTDVQESQWLMKLHTYGLLRNSFRPSPEIRMLRTYWRQRNDLVQDAARYIQRMQKVLTQMNVQLANVISDLSGVTGQAIVSGERDAHKLAQLRDGHVKASDEEIARSLQGHWQDDLLFVLKQELAGYEFCQQQMAGCDQQLEQYLKERPDRANGAPLPEEKRKHRRKAKRGHAPKFGLRESLFAMTGVDLTGIDGIDVMTATMVISEAGWDMSKWQTENHFVSWLRLCPDNRISGDKIIGRGRLKTNNRLTGALKMAATTLLRSDTYLGAQYRRLRTRLGAPKAIKAMAAKLARPGLPDVALWDGVRGSRSRIL

SEQ ID NO: 266870 - protein, 395 aa, unidentified
MKHILSFDIAKGKSVYCFIDELRNVIIDASLIEHKKDEFDNLFNLIKDYPNLIVVMESTSVYHLPVETYFRSKCVDTVVINPKLVKQFKDTLNKSKTDKLDCFKIARCYLGTIDNFYQKQDEYFMYSPLARQYWSLIEGQTRLKNRYKQLIEIIFPEFNLIFNDLYDDLALNFIHDFPHPVLFVNRRIDYLMNYLKEKNGTTQAYRFKNKVLKMKKLASNSLCFVAFDSYQVQNLVQVIEMIQYHKSEINKIKKQLINDMKGKELFKIINSIPGFGEFSTALFLAEVGDITRFDDKYQFISFIGIDSVTSQSGVSAYHGPISKTGCKFGRTILFNIVTTILQISAHTDKTNPIYLFFRKKQSEGKHHYKCIIACETKLCKIIYKLCSSNCLYENK

SEQ ID NO: 266871 - protein, 341 aa, unidentified
MDHIAIDLGGTESQICVRAQDGSILEEVRVGTLRLASYLKKRPPSRVILETSSEAFRIADAARELGHDVRVVPATLAPSLGVGARGIKTDARDARVLSEVSLRIELPSVHIPSEISRTWKSCCSARESLVTARTQLINAVRGWMRRELLKIPSGGIGTFPRRVRLRAQAAECGLPEFIDSLLCVIDLLNDRIAYADKELKDLATEHPVCKRLMTIPGVGPVTALRFVAAIDRVERFPNAHALECYLGLVPGENSSAKRKYRTGITKAGPPRVRWALGQAAWVLVIKRPLDPLALWAKEVEKRRGKLIANTALARRLAGVMYAIWRDGTRYEPSRLRPRSAA

SEQ ID NO: 266872 - protein, 324 aa, unidentified
MQTIPIGCDVSKDKIDLCVWLNDGKQEYLLIGNNQKGYLKALAEIERLNIKPHICMEATGIYYEGFADFMAENGHLVSVVNPLKIKKFAESEFQKTKTDKQDARLIACYCLKMQPKADYIKPNPEQYAVRRNIALLKQLNADLNGIKNRIKVAKDEFVRQILTNQQKEIKKHIKEVRQHLAKITEQTAAGQVAEKLESIPAIGQTTALILAHYLNMYQFDSENKFVAFAGLAPGKHESGSSVRRPGKLTKYGNRTIKGALYMPAMVAYRFGYFGAFVNRLKNKGKPPKVILIAIMRKLAAIAWNLWKNGQTFDPARYGLNSKTV

SEQ ID NO: 266873 - protein, 317 aa, unidentified
MKQYTSIFAGIDVSKEHLDVYLHPTGACRCFDNDTAGWRSLCRWLTDAHPQGVVYEATGSYHKGVERYLGEQGFPIARLDPRRARRFAEALGVNAKTDPVDARVLAEFGAFLKPATRDLLEPALEQLKELVAARRGLVQQATRTANKSKTVTSRLLKRQFRQSAKQIKSQIAEIDAECRDVISSDTVLAGRQEILLSIPAIGTITAMTLLADMPELGKLNDKQAASLMGVAPVARDSGSFHGKRHIRGGRAQVRQAVYMAALVATRFNADMKRKYDTLVENGKPPKVALTAVMRKLIILANALIRDNRNWSENRPCT

SEQ ID NO: 266874 - protein, 422 aa, unidentified
MSYCPVAGIDVSKRFSDMCILSPDNKIFAQEKIYHDEASINRANALLQKAERLFFRKPVIVMESTSHYHSILFQFFSEHGYDVIVVNPLQSNSMKDFSIRKRKTDRVDAFKLAMMYRTKTLRPSQIPQTATRALRQLCRHRAELLNDVSSYKNRLTALLDQTFPGYDKVFSDVGGVTSCAVLVRFPTPTILLVEEESELVEVIASASKSGYSFAKKKAGLLISAAQKAQTWGIHSCADETLIVCTIQMLRTLSESVLQIETAIDNLLAQIKEMRNNVSLLQSIPGIGSHSAALLLGEIGDISLFKKPKQLAAYFGLDPTERQSGSFRGTKNKLSKRGSPYARAALHMGVVNSICKRGKDSAANPVLLSYYEKKCKNKPAKVAQAASMHKLVFIVFAVLRDQKPFELKTPEQHAVEQGFVKAA

SEQ ID NO: 266875 - protein, 410 aa, unidentified
MEVLHQRCAGLDVHKKTVVAAVRLAVENKLITEVKTFTTTTAGLLALSDWLAENGCTHAAMEATGIYWRPVWHVLSDGEIELILANAAHVKNVPGRKTDVSDAAWLAELLAHGLIRPSFVPDGQTQELRALLRTRKQFVRERTRHAQRIHKTLEDANIKIDSELSDILGRSGRAMLEAMIAGESDPVRLAALAHRNVKASQGELQQALRGRVTPHHRFLLKLHLEQVDHLDAAIAMLDGQVEENLAPFRTAVELVSTIPGVSTLSAEVIVSEIGLDMNRFPTVGHLISWAGLSPRNDQSAGKRRSTRLRKGAQWLKTTLVQCAWAAKNKKGSYLQAQFRRLLARRGPQKAICAVAASILTAVYHMLKDGTVYEDLGPDHFSRRSKTTHAQRLVRQLQRIGYAVEIKPMTA

SEQ ID NO: 266876 - protein, 347 aa, unidentified
MTLVGCDLHSRKQQVAALDTTTGEVLEQELVHEGDAVERFYRALRPPVTIGIEATGYTRWFQTLMHRLGHTVLVGEAAKIRAMVVRKTKTDRRDARHLLDLLRHDRFPTVWIPDPATRDLRALIAHRVRLVRMRTMVKNGLQAIALNQRLTLRSALWTQRGLAQLEALSLPAHAPRRRDDSLELLAWLTTRIDDLDDRIAASADADPRARLLLTHPGVGPLTALTTVVVLGPTTRFPDSKHVVSYVGLAPAVNASADKHHLGKITQQGSALLRWVLSQAAPLAARADDDLRRRYFAILHRRGRPKAKVALARKLLVRLYVMLRDRVDYDEFCRRGRARHQRRAISVM

SEQ ID NO: 266877 - protein, 378 aa, unidentified
MALRTAAHDGPVLFLALELSKSAWLLAAHLPGANKPKLHRIEAGDTAALLATITALRARVAGKSGTAADVACCFEAGRDGFWLHRLLTANGVASHVLEPTSILVNRRARRAKTDRLDAQGLLRVLMAHCRGDRQACSMVRVPTPEEEDAKRLHREREHLVQERVRVENRIEALLATQGIRGRPSLRSWERDMAALRTGDGRALPTQLRAELDRLRRRLVLTPEMIREVEAERAAALAAEPQDDTCRTIAALCRIRGIGETSATVLAREVLYRPFANRKQLASYVGLAPMPYQSGGMDRDRRISRSGNPRARTTIIQLAWLWLRYQPGSALAGWFRGRVGVLAGRTRRIAIVAMARKLLIALWKYARTGLLPEGVEIGA

SEQ ID NO: 266878 - protein, 315 aa, unidentified
MTESFVGIDVSQEQLDLHERPGERLQRYPNNADGIQAIVARMAELQPTRIVVEATGGLELPLVLALAERQLPVVQINPRQARDFAKACGRLAKTDVIDAATLAHFADAIRPPVRPFPSQEMQALREFLDRRQQLIGNRVMEQNRLSSTTLPAVRRDIEAHIRFLNRKIVDVEKQMKKLIDASDALRHKDDILQSVPGIGAQVSRTLLVRLPELGTLDRRRLSCLVGLAPVNWDSGAMKGSRHIRGGRATVRVALYQAAICAVRVNSSMKAFYARLRASGKKAKVALIAVARKLLVLVNALVAKDEKWRANSILPA

SEQ ID NO: 266879 - protein, 407 aa, unidentified
MARTLYVGIDLGKGFHQVAVVDERKERLGEPFKIGRGRSGIELMLKRLGLWGAKPEDLVVTIEATGGYWNELVWALVNRGCRVYLAQPKKAHDLRKFYADHTKTDITDSEALARMPLVDEGLRPVWVAPPAEQMLLRMCRLRWKYRCRIADLKRRLSTLSEMVMPGIDGVMPVRYSKSARLFLRRYLAPSRARRLGRRRLVELLTKSAWGKFSERKAEDLWACIENAPDLGWQTDDLLLEVNVQLDELEMLERQVERLDERIAELYSEVDPEQRLMKIGGLGEFLAAALTASLGVDVRRRFPSTKHVVSFAGLAPRVKSSAGHTKAGQGITKRGNPFLRAWAYLGASCARQYDPELEAYYHRMRDRGKHYNLVICATAARLLERCYEALSQGGVAEMENQEHEVRTG

SEQ ID NO: 266880 - protein, 425 aa, unidentified
MNFKQNQKINQVTEETLVIGMDIAKHTHYACFVDERGRVLKKSFAVYQSHDGFQIFYQRILKAMKEFGKTEVLVGIEPTGDYWLNLAYYLDDLGIPLAMVNPMHVKRSKELDDNSQTKNDRKDALVIARLLKDGRFSYPRILKGMDAELRAGSTFRERLTEDLNAVKNQMIRWLDRYFPEFTQVFPKFGKMALAVLQCTPFPIDLVNRQPEELLALYREVEGLKSPQRPKLIRLMQVAETSIGVTEGIEMAHIEITTLVRRYRQLEQELEYITSRLTEIVKTSVEYEWLSSVQGLGDVTIVDLLAEIGSFSNYNDPRQLLKLAGLTLRENSSGQHKGQKRISKRGRRKLRAILFRVMIPMLRHNKAFKRLHEYYTNRTVNPLRKKQSIVVLCGKLLKVLHGICTKQTTFNAERMMKDIPCLEEAA

SEQ ID NO: 266881 - protein, 393 aa, unidentified
MVCVGIDVAKDKHDCFIISSEGEILADVFTIPNNAEGFDTLLQAIRRSTRPEDKIKVGLEATGHYSYNILGFLLNEGLDTYVINPLHTNLYRKSLSLRKTKTDRVDARTIAAMLMSDVDLKSYTDTAYHNEELKSLTRYRFDKVRERAKLKQSVSRLVTILFPELEKLVSSLHSASVYALLSEFPGAKQISSTHMTHLKAVLKNASQGRYGQEMAETIRNAARSSVGSVMPAKSLELQHTIRLIRELDAEIEDIETAIQAIVDEMQSPITTIPGMGVRMGAVILAEIGDFSRFDSPDKILAYAGMSPSTYQSGQLSLSGAYSHMEKRGSRYLRYALYNATKHVCHWDPTFAAYLAKKRAEGKHYNVALSHAAKKLVRLIFAMEKSQRPYCAAA

SEQ ID NO: 266882 - protein, 440 aa, unidentified
MRLGTRMGNCRVQESAAHRISMSTEKRKVCGIDVHKAFLVATVVDREGKSETRRIQQNSESLLELRDWIQSENCDSVAFESTADYWRSLYLVLESRVPVTVANANHIKHVPGRKTDVTDSRWIAQLELNGLITPSRIFAGEMYDLRSLTRSRELLVQNRTELKNKIHHILDSASIRLSSVLSDLFGKSGTIILQGLVQNKPLEEIIKSLPKKMRGSADAISAALPASIPPVTLVLLQSYLKLVDDLDNEIKLIEGRIRESLTGKSREIQILTSIPGIGFIGASTLIAEIGNVHDFEDADKLTKWAGLTPSVYQSANVTRTGSITKQGSRHIRWILVELAHVAIRSPGRIKTFFERLMPKKGYKKAIVAVARKMLRIVWHLLVHDEVFVDDFPRSKQVKLPKMPKKVQAVGINRIIELLSKASEVIIRDHDQEIFRLGLSD

SEQ ID NO: 266883 - protein, 347 aa, unidentified
MNFYNNTHPYYCGIDLHARSLYVCIIDQAGNTCLHKEISADQGKLHKLLEPYIGNIVVGVECMHCWYWVADFCEDTGIDFILGHALYMKAIHGGKAKNDRIDSFKIASLIRGGNFPLAYVYPKNMRATRDLLRRRMKIVRHGADLKAHVVNTTSQYNLPPNKVNLKNPGAREQLRNTFSEQSVQKNIDLDMAILDCYAEELSKIEWYIQQQAKQHKPNHLHLLKSVWGIGPILALTIIYEIGDIERFDSVQKFASYARLVKCKAESAGKSYGTQGNKIGNAHLKWAFSEAAVLYLRGNEKAQNYLLKLQKRMSKAKALSALAHKLGRCVYFMLKNESVFDETRFLKG

SEQ ID NO: 266884 - protein, 343 aa, unidentified
MPHYVGLDVSQKTTAICVVDEQGKRLWRGVCATDPGAISARVSQHAGVDAKVGIETGSMTPWLVHCLRSAGLDVQCLDARKVKAALQMQLNKTDENDAEGLAQIMRTGWYRAVHVKSLDAHRARALLGARAQLVGMTTRLSNMIRGVLKTFGLLPGAGRGLRFDRKVEALLEGAPEIALVVRPLLATWRQLREQIAVFDKAVLQQVRADPICRLLMTVPGIGALSSLMYVSTVENPSRFSRSRAVGAHLGLTPRRYQSGETDRSGHISRCGDGLARTLMYEAAIVILHRVKRPLHLKDWAEAIERRSGSGKARVALARKLSVILHSVWRSGEPFRWSAPVMAA

SEQ ID NO: 266885 - protein, 314 aa, unidentified
MSEEAWSGIDVAKAWLDVATSDEPVWRVANDVAGIATLVAQLTAQRPRLIVLEATGGYETAVTAALVAAGLAVAVVNPRQVRDFAKATGHLAKSDALDARVLALFAARVQPTPRPLPDAVAAELAALLARRRQVLEMRTAEQHRRPTLAPRLRPALDAHVVWLSQQLAELDGELDRTLRDSPVWRAKEDLLRSIPGIGPVVARTLLGELPELGCLDRGEVAALAGVAPLNQDSGRRRGKRRTWGGRAPVRAALYMAAVTATRCNPTIRALYTRLRAAGKPAKVALVACMRKLLIIANAILRDATPWSADVALAP

SEQ ID NO: 266886 - protein, 415 aa, unidentified
MRFVGLDVHRDFCEIAVVENGAVRSAGRIETTPEKLVVLGDSLGPDAAVVLEATFNAVAIAAILRPRVGRVMLCEPAAVSDRGGVKTDKLDARALAKLLASGFLREVWAPDEGTVALRYRLSRRRQLVKQRTREKNQVQAVLMRNLKPRPPMSDLFGVKGRAWLAEQTLPANEREMVDACLRHLDFLDGEIKLLDQVIAQTVLASEEMLRLLQLPGVSVTTAATLMAAIGDIRRFPTDRHLVGYFGLNPRVRQSGSEPARHGRITKHGPGAVRAVLVEAAWVAARTPGPQKAFWERTAAKRGSKIATIALARKLAVLAWQLLTKQQDYAFKRPAALSEKLRTLELLAGAPPRRGHRAHPRVRVTPEQRELDREIARQAETAYRRLVADWQLSGPGAKAGTDGNSSPREAVLTQGT

SEQ ID NO: 266887 - protein, 457 aa, unidentified
MTRKSPSRLQRDLAPVHPHAAAVDIGARMHVAAVSPRCDSEPVRTFGTFTGDLQRLADWFEQCRVATVALESTGVYWIPLYEILTQRGFAVGVVNAREVKQVPGRKTDVCDAQWLQRLHEYGLLRASFHPQGEIATLRSYLRQRERLLEAAAAHIQHMQKALIQMNLQLQHGVADITGQTGLRIIRALVAGERDPDRLAALRDGRCKTPLVTLRAALVGNDREEHVFALAQALELDEIYQTKVAACDERIAAVLERLQAQNPPPAAALPLPRRAQPQANEPAVPVRAALHAILGVDLTQIDGIGPSLALKLASECGTDLAAWPSAQHFTSWLGLAPHNKISGGKVLSSRTRRSGSRVAALLRLAAGAVGRTQTALGAFYRRLAARVGKAKAITATARKIAVLVYNTLSHGMTYADPGASYYEERYRQRVLSNLRRRAKSLGYVLEKAEPASTAVVVS

SEQ ID NO: 266888 - protein, 345 aa, unidentified
MKKIAIGIDFAKEKFDVTVKNVTNGTSVYGQFPNTRGGGRDMVRMVKKFAKGTTSEDWIFCGEDTGYYSQTIARYLTEKGHFMWLQNPYCIKHSEGGIKRGKNDKADSVSIADYAHRYEDKARKYELPSKVSEELHLLLTRRDAYVRAKRVIQSGAMEIPKRDKQGDTITLIKASNKHLLKEIDDEIERLEARMEEIVAEEEAMQKNYEILRSFPGIGIVNAMCFIAYTDNFTKFGLKSRRIATYWGVAPFGEDSGTSVHKDPHVSHFCNHWLKAILSNAANSSILCNPFIKPYYDRLLKAGKCEGICRNNVKNKIIHIITAMIRKGKKFDPEFNFTNQKAVAQC

SEQ ID NO: 266889 - protein, 436 aa, unidentified
MPFFLTYITLEGGYPLKLVYPICCGVDVHKTFFVATIITTEGITPRYQKKRFSTFNKQILAFKEWLLENDCRDVCLESTGKYYVPVLNLLEDSINVTVANPKWVRAIKGNKDDVKDSKWIGDLFRLGLVPGSFLPSKPVRILREYTRYLFKMVNAKSSEKNRYQNVFTVCNVALDAVVSDMFGVSATNITDYITNSDTFDPDYCVSLLRGSLKNKAESVVESIEGFQMTEAQKVRARFIREHYLFLMTHISALENSIETLAAPFQGAIRLLCTIPGIRERSAISILAEIGDDMSHFASAKRLCCWGGLTPGNNQSAGKKKSVHITRAGVYLKPALVEVAHAAVKDLKNPYYGIKYERIMRRRGKKRAIIAIARMILTAIYHMLSTGEVWNPCDLPQIDAPPETREKQLKRDIRQAANLLVANGVINLSDIRLPETA

SEQ ID NO: 266890 - protein, 322 aa, unidentified
MSVTVLGIDIAKQKFDVALLIDGKTKHKTCKNSAEGFETLMIWLEKQGIQKVHACLEATGNYGEDLAIYLHEAGHIVSIVNPARIKGFAQSELIRTKTDKIDAGIIARFCLAMEPSPWSPPSPEIRSLRALVRRVDSLVDMRSQEKNRIGTAHKSVILLIKEHIVYLDQEIEKIRQQIAELIEQNPKLKQKRDLLDSIPGIGKVTIPTILAELDDLGKFTHVREVVAFIGLAPKETLSGSSIKGKPRLCKIGHARLRKALYMPALVSIQCNPVMIAFYNRLKEKGKNGKVIVCAIMRKLVHIIFGILKSGKKYDPNYKPAFA

SEQ ID NO: 266891 - protein, 336 aa, unidentified
MNDCGIDLASETSAVCLINEQGTLLREQMVATEARELGEALTGLGRLRCVVEAAPLAEWVAQLLETHGHEVIIIDPRRAKAVIQTKNKTDKLDARNLAKLAQVGWYTAVHRKTPAARLQRTHLQARNGLVETAKAQAARMRGLLRAHGVKVGAVSAGQFVPTVQALVAEHVPALATALEPLLLIYRQAHEGAKTLARHVTTQVQQDPLCQRLMQVPGVGPLVAGTYVATLDDPTRFRTSTQVAAYLGLVPRVHQSGAANYHGRISKEGDKLLRWLLVEAAHVLLTRTKRSCALKRWGLKLAKKRGQGKANVAVARKLAILLHRLWVTDAAYMPEPG

SEQ ID NO: 266892 - protein, 335 aa, unidentified
MQIKNFIGIDVSKLTLDFSLVKNGKQLLYEKVPNQNRNIMRIIRKFMEQAQGDYTDTVFCMEHTGIYNAKLVKCLQQTGALIWIESGIQIKLSQGATRGKNDKVDSFRIAMYAFTNRHNMKLWKPRREAINNLSELLALRTRLLKAKNALLVPLNERKVFSDKLVYRLLKEKTAPVIKTLEKQIVQTEISIKQTIEQDEELNQLFRNICSVDGIGMITAIHIIVSTNEFITINDPRKFACYSGVAPFEHSSGTSVRGKNRVSHRANKTVKTILHMSALGAIRKKGELQDYYKRKVEEGKNKMSVLNAVRNKIIHRVFACARENRSYKKIFSNALA

SEQ ID NO: 266893 - protein, 406 aa, unidentified
MKITCGIDWAEKHHDIALIDENGALIAKRRISETVDGFNELLSMLAEAGDSPQTPIPIAIETPRGLLIAALRAAGRQIYPINPMAVARYRERHPASGKKSDHADAMVLANILRTDAHVHRPLPADTELARSIKVLARACQDATWRRTRAGNELRSLLREYYPAMLEAAANRSGSLHAPLTRALLQLAPTPAAALKVSQAKIAAALRRAGRLRHVEEVAAELHAILRRPHLRQDPLVEHAMGVQALRLLATLSTECESIEQLSQATEEAFRQHPDYEIITSFPGIADQAGARILAEIGDDRTRFTSARSLKAFAGSAPVTRASGRSLVVSCRRIKNDRLAAVGFTWGLSTLNLSPGARAHYDRRRATGDGHAAAFRNLFNRFLYHCLHKRLHHNETLAFPPTVPAAA

SEQ ID NO: 266894 - protein, 382 aa, unidentified
MTGTEPHAWGTGLMDDIIFVGLDVHKATVCIAVAEGGRGGDVRQLGVFENRPEILNKVVSRLSKGGRRLSFCYEAGPCGYGLHRLLTGYGHECVVIAPSLIPMKAGDRVKTDRRDALMLAKLHRAGELTAIWIPDAAHEAMRDLVRARATAVRVLVKARQHLQGFLLRHDRIYRGARAWTLAYRRWLSTVRFEHPAQQIVLQDYIHAVQEAETRRDRLTQQIEELLPNWSMAPVVAALQSMRGVALVVAVTVVAEVGDFRRFANPRQLMAYLGLVPSEHSSGSSVRRGGITKAGNALARRVLIEGAWTYRMSARVSRKLHERVEGLPVAVRDIAWKAQLRLCARYRRLAAMGKSKVVVTTAIAREMVGFIWAIARLAQPALV

SEQ ID NO: 266895 - protein, 433 aa, unidentified
MSSLNNERRAAAMKIVYPICCGIDVHKSFLVATIVSVTKLRTLTYKKERFSTFNKDLLKLKKWLIENNCYDVCMESTGKYWVPVLNVLEPDLHVVIVNPKWVKAVKGNKDDVKDSKWIGELFCFGLVRSSFIPSKDIRILREYTRYRYKLVNMRSSEKNRFQNGFTVCNIALDSVVSDMFGKSASEITNYLLTDENPNAEHCATMLHRSLKKKAVAVVESIEGFQLTEEQKFRMRQVLHHKEYLDLAIELLDTKLESLTKPYTAAIKLLCTIPGLDSDSATTIISEIGTDMSQFDSSKRLCSWAGLTPGNNQSAGKKKSVKITRAGVYIKPMLVQAAHAAVKCTSQPYYKIKYENILRRRGKKRAIIAIARMILTAIYHMFQTGEVFNPSDLRQIDMPEELKTKQKQQEIHKAIKLLKQQGVLAEDFAASTCA

SEQ ID NO: 266896 - protein, 400 aa, unidentified
MKEKIDYLSTLFVGIDIASRIHVISALDFNQDFFIKMKPVQNTQEGAALLESMIVDVLKVNHQFKYVVIAMESTGFYGVHLANYLSASDLLTPFSVRVYCLNPKEVKNYKKSFNDIGKNDGIDSFVIADFARVGGISIKPWHGSQYLALQRLTRHRMHITECISREKTYMLNNIFLKFSEYALLRDGEHPFSNKYGAAAEAILTEFTTNEDIVNSSVEDLVAFINTKSRGRIADPEKTAKIVQAAARNSYRLDKCLYEPLTISIASSFNCISSFEKELKAIDEAILQTVQGLNPEEYTVLNSIPGIGKVYSAGILAEIGSVRAFQNANALAKYCGIVWNDNDSGDFEAEDKRMSKAGNSYLRYYIIEATGSVIRHCPEYERFYQKNMLKQETIRINEHSR

SEQ ID NO: 266897 - protein, 349 aa, unidentified
MGEVSTIGVDIAKSVFQVHGVDADGTVVIRRRVGRAKVLEFFSKLRPCLVGMEACATAHHWARELKKLGHDARLMPPTYVKAYLKRGKNDAADAAAICEAVTRPSMRFVPIKSVEQQSTLMLHRTRDLLIRQRTQLINALRAHLAELGLVAAKGREGLCQLVTVVTECGDERLPSNARFACQAIVGQLHAVQTQISGLDKRITQTHRANPDSKRLDAIPGFGVILSTAVVATMTDPKAFKTGREFAAWIGLVPRQNSTGGKDRLGSISKQGDRYLRRLLVVGAISIVRTARMWPDKYPWLIELLGRRPAKVVAVALANKMARVAWAVLAKGETYRAPTRLSNAAITVAA

SEQ ID NO: 266898 - protein, 440 aa, unidentified
MNEVDRIRLEQFRQFRKEIRGSKEYLLVGIDVAKDKHYAFFGTATGKTLFRRLVFENNLEGFRKLLVQAEAMKVQAGLTKVVFGMEPTGNYHKPLGEHLIRCGHGVVLVSGVAAHENRKTLDGRWDTNDTRDAANVGDLMSQGKCLFYEFPVGALQDLRNLLSLKRRLKRMEHGHRVRIRNHLVAKYFPELDRYYEQSEPTALAIVRWCLDPSEIAGLEYKEFAGMVGSIRGRSSQERRLEAIWKMAVDSVGCEAGPVVEFEAQVMVEGLKQIRGDIRAIEEKIQEICSPFPEYEFLLSIPGFGPDVSSKVLGAIGDPFRFQNGRQVLKMAGLDLNAERSGKNSESAVPVISKKGKADLRYALYQAAFIASIRNQDFIVYYTNQLRGREREPGIKTKMRVKLAAKLLIIAWTLMKKKEPFHPSYVRVEFQSLSAGAGREQ

SEQ ID NO: 266899 - protein, 338 aa, unidentified
MKVQILGIDLAKNVFQLHGVDRKGSAVMVRRVRREQLLKVIGELDPCLIGIEASTGAFYWQRQFEKLGHTVRIMAPQYVKPFVRRQKNDTNDAEAICTAVQQRNMRFVPKKTLEQQDIQALHRARQRLVNHRTALISQMRGLLLDRGIAIAVSATRARQLIPKILAAANDELTVLVREIVSSLYAFMLQIDERIRVFDRKIDAIFKSSEVCQRIAKIRGIGPKTATAVVAAIGDGSDFKNGRHLAAWLGLVPRQHSSGDRRVMMGISKRGSQHLRTLLVHGARAVVRTAVRKTDSRSIWVNELRQRRGYNRATVAVANKNARVIWAVLTSGEPYRSAA

SEQ ID NO: 266900 - protein, 460 aa, unidentified
MEKKSAAVFEEIRRNVAGIDLAWRADNYVCGPRRENGLCEIEPFGTTTCELQRMVQWLKERQVESVAMESTSVYWIPATDLLEANGIEVVLVDAREVRMVPGRKSDVQDCQWLQKLHSCGLLRGAFRPPEAVAAVRSILREKESLQGMRTQAIQQMQKSLDQMNIRVHHAVSDIDGKTGTLIIKAIVEGERNPAKLAALRDNRCKKSEKEIADHLTGTWREEHLFNLGQAFKTMQFFDERLAEYDEKASQIFSSLAAAADTPDRLPPPSPLPDKKPTAKERANAADKANVQQFMGFDLTSIPGIGYDTAAVISSELGSNLDCFPDESHFASYIGLAPSLGKSAGKNVRQKRYKNTSRAGQALRMAASTLYRSRTELGAFMQNVARRTDKKTAIKATARRMAHMIYRGVRYGKEYVDCGAEAYNARLRERTVRTVNRLIKSFNISSSEIAGAEALATLAAV

SEQ ID NO: 266901 - protein, 311 aa, unidentified
MTKSVVGVDVSKGKLDVGVSDEKRVRTWSNDATGCAELGEWVVEQGVSLVVVEASGGYEAAVVSELVSRGQAVAMVNPTRVRAFARAEGILAKTDKIDAQVIARFGATMKPQATARRDEAQVVLTEQVTRRRQLILILTGEKNRLQTASPTIQAHIARHITWLQTEIEMLEQQISQAIAVNPEWTETAQRLDSVPGIGFITAATLVADLPELGQLNRQKIAALVGVAPFNHDSGKHRGKRRIFGGRTSVRSVLYMATLSAIRYNPVIKEFYQRLLDKGKLKKVALTACMRKLLVILNTMVKSGQDWNPAIS

SEQ ID NO: 266902 - protein, 344 aa, unidentified
MNVTTVGLDLAKNVFQVHGIDSTGRVTVRRSLRRRQMMPFFGKLEPCLIGIEACGTSHFWARELRALGHEVKLMPPIYVTPYVKRGKTDAGDAAAICEAVTRPTMRFVAIKSAEQQSILALHRTRALLVRQRTQLINMIRAQLAEFGFVLATGIQHALKLVDQLVEGRAPDIPALACKIVISLAEQIRALQARIGTLEKDMKVWFRGNDLAKRLQTIPGIGVLTASALAASVTDPHQFTSGRQFAASLGLTPKADCSGAKQRMGRISKMGDRYLRRLLVIGMTSQLQSARRKPDDYPRVAGLLANKPNKLVAVAMANKAARIAWVVMTRGEVYRAHHPVTEVTE

SEQ ID NO: 266903 - protein, 399 aa, unidentified
MISVGIDVSKGKSTVCILKEYGEVISEPHEINHTEADLKALVESISELNEETRVVMEATGAYHLPLLTYLKNHGIFVAVINPLIMKKYSAIGLRKGKTDKLDSIKIANYGIDNWFKLTDYEATDEVYSELKLLGRQYSHYIAMRIESKLVLSNLLDRTMPGIKNLLKDRSDKPEKDKLNDFVKEYWHYDNITKKNEKQFINSYFKWAKNKGYHQSETKAKQIYALAQEGIPTLSSSTPSTKMLVLEAVRVLSEIDRTLSMILSQMQELASSLKEYNVVRNMPGVGDTLAPRLIAEIGDLKRFYNKKALIAYTGIDSPPFESGQFVANKRRISKRGSALLRKTGYEIMKCIKSAKPKDDPIFLYMLKKEAEGKPKKVAKIAALNKFLRIYYARVKEVYNT

SEQ ID NO: 266904 - protein, 353 aa, unidentified
MYKVMNKKLFVGIDFSKETFDAAILKVSEESSIDPKIIGNEQFKNDVPGCKRFVKWLNKTCALSGDYSSVLVGGEDTGNYSITLPKQLYVLGIDCSLQNAYSIKCGSGKIVRDKTDKIDAEKIAYYFYRFRDQIRLYKPLSKDMESLERLYSYRYGQVRERARLKCQIKEYKHILKSEPNDETLKFMIQRLEKQERFLKKEIKAIEAKMVEIIKANEELNEIHKCLLSIPGIGKITSLLLIVVTRGFTRFDNPKQLACFLGVSPHPNQSGTSVQNGNHRSWFADPYFASLLHMAALSASRFNSKFIDYKKKLKSKGKPHLLIMNNIKNKLLTVAFTIATRRTKFYSDYDAKRA

SEQ ID NO: 266905 - protein, 345 aa, unidentified
MIIVGCDFHPSWEQVAWLDTESGETGEQKLVHSEGAAERFYRQLPVPALIGLEATGNCHWLQDRLAEMGHEVWIGDAAQIRASYVRKQKTDKRDAAHILQLLVEGRFPRLWVPDREQRDLRQLLIHRQKLVEIRTRVKNGLQHLALNQGVQKKSRLWSRAGLEVLRALRLAPWASQRREDLLGLLRSLQEQITPLDRAVAEAAQHNANARLLMTQPGVGPITALAFVLTIGDVGRFPRGKQVASYLGLIPREHSSAGRQKLGAITKQGNRMMRMLLVEAAHQAVRYDPEFRQQYWHRCHSMPKNVAQVAAARRLAVRLYWMLRTQKPHPEIVRIESSPRVPLLGQ

SEQ ID NO: 266906 - protein, 346 aa, unidentified
MEYIAMDVHKKYTWARVENEKGDKLYECKLSHSHGTIENFVKRWTGGSAVAVETVGNWYWVVDEIEAGGGKPQLVNARLAKLMMGSVNKSDKLDAKGMNRLQRTGTLPTVWIPPSSVRDARELPRTRMVLSKQRTQLKNRVHATLGKYGFVVEGASDAFGKRGREILTELMAKLPPHTEQALGRVLDQLDHVCENLKWIEEKMMEVFAPCPQTTWLKTLPGVGDILAVVIWSEIGTIERFSRAEQLASYSGLVARENSSGGKVRFGPVRRDVNVYLKWAFVEAANSSVLNRERCGYDHISRLYERIKARRGHGKAKVAVARHLSEASFWMLKKGEPYREPMSSTQR

SEQ ID NO: 266907 - protein, 342 aa, unidentified
MEVRHYGKIGGTMDALDKTVRKLRSNGSPLRFVYEAGPCGYELYRHLTEQGFVCKVVAPSKTPRKSGDRIKNDRRDAETLARLERAGELTAIYVPHEEDEAMRDLTRAREDAVKALRTARQQLGAFLLRYGKRYPGKASWTPAHRRWLSDIALAHPSQQIVLQEYIHTVEACTERVARLTDQILRLLPEWRMAPVVKAFQALRGVAPIVAVTTVAEVGDMSRFETPRQLMAYLGLVPSESSSGESIHRGGITKTGNGHVRRTLVEAAHAYSFPARVSRHLLKRQEGLPQPVLDLAWKAQVRLCGRFRRLMARGKPKTKVITAIARELAGFMWAIAREVTVQG

SEQ ID NO: 266908 - protein, 328 aa, unidentified
MIYVGIDIAKLNHFASAISSEGEILIEPFKFTNDADGFHLLASKLDSFDKTSTNIGLESTAHYGDNLVRYLVAELYKVCVLNPIKTSQLRKNNIRKTKTDKVDTYVIAKTLMMQDDLSFVSFYDLDMMDLKALGRFRQKTIKQRTRLNIRLTTYVDQVFPEIQYFFKSSLHQNSVYALLKKAPSPNEIASMHMTHLANLLKVNSHGHFTKEQAKELRVLAQKSVGANDSAISIQITQTIQQIELPDSQLDKIEAEMTNIMKFNDSVIMTIPGIGYINGGMIFGEIGDIHRFSNPNKLLAFAGLDPSVYQSCNFQDKTTRMSKCDSRVL

SEQ ID NO: 266909 - protein, 347 aa, unidentified
MSMHGQRVLGIDTHKHTHVAVVLDGLGRREGVLQFPSTDAGVARLLAWSRDHGTPRAAGVEGTGSYGYQLTRALQAAGMTVVEVNRPDRANRRRRGKSDPVDAEAAARAVLAGQATAVPKNREGAVEALRALTIARNSAVKATTTAINQIKALLVGADQQLRDQLRVRSLLRLATRCSQLPPGSGLHAALASLGRRWLQLHEEILELNRLIRDQVRRTVPKLVERPGIGIHSAAQLLITAGGNPDRLGSDAAFAALCGASPVQASSGQRQRHRLNRGGDRAANNALWTIANNRMIHDDRTREFAHRRRQLGDSRNDTLRVLKRYIARETFAIIRDALLSEQALADTA

SEQ ID NO: 266910 - protein, 345 aa, unidentified
MKQYAGIDVSLEYSSVCVVDADGRIVREAKILSEPDALIAWFGAHGVMMERIGLEAGPLSQWLHAGMVKAGLSVELIETRHVRAAFKTMPVKTDKKDARGIAQLMRLGWFRPVHCKSLAAQEVRALLTARKLIQGKLHDIEMSIRGILRGFGLKVGPTTRCTYAGRIRELIAGHSTLEAIASSLLKVRDALVQEFAGFERTLRAIARQDDNALRLMTTPGVGVLVALTFVAAIDAPERFRSSRAVGPHFGLTPRKYQSGETDHSGRISKIGDGSVRTALYEAAHVILTRPVKGSDLKGWALAVARRAGPKKARVALARKLAVVLHCMLRDGTTFIAHQGAPTLAA

SEQ ID NO: 266911 - protein, 425 aa, unidentified
MLGVGIDWSEEFHLVAVGRTGEGVIEVIRVEHSPKAVDALVARVAELEPDPGEVRVVIETRHGLLVERLVDAGYVVVPVNPDLVARRRGPAKKKDDAEDARIACLIALDRHERLRSLIPHGEIAGELRAIARDDERAARDERRLANRLRQDLISTFPAAVQIGGEDLGAPTFLRLLERWPTANALAGVSRAELVAFARSCRHARPERFADKVEASLVAEHFRPKDYLVRAKADAIRLAATQLVLIGQQRGTWEQRMGELLLGAPRQGRDHQPKGDGLGKGFPGGEIYLSFPGLGDRLAARIAGEIGDHPEQFDTPNSLQCYAGKAPVTRRSGKSELVVACRLAHNRYLGGAVQQWAFCSLLRSGWGREFYDLQRARGKGHHAALRALGNRWLEILWHCLHKGVLYEEAIHVANRDRALGRTTQAA

SEQ ID NO: 266912 - protein, 339 aa, unidentified
MNQVYAGLDVSDKTTHVCAVNGDGKVLWRGECATDPAALATTLNKRCRGVMRVVLETGSLSSFLYHGLIERGVPVVCVCARHAKGVLSARVNKSDAHDAEGLAQMARTGWFKAVHIKDGATHLDRAQLKVREQLIKTHRAMANQLRGLLKLFGLRMGKVTTPGKRAERLEALFQQRPDLRPILNPLIEGLAGLEVQIRASSRAIKARAAADAVCVRLMTTPGVGPITALSFKSSIEDPARFAHGQDVGAYAGLVPRRSQSGERDVKGRISKAGDPMLRSALYEAANNLLSRVKRPSPLQTWGKALAQAKGAKRARVAVARKLAILLHKLWRTDTTFEWA

SEQ ID NO: 266913 - protein, 378 aa, unidentified
MRKHTTAKKDQKALSKTQTNPIREMATKQRLTIGLDLGDRHSRYCILDAAGEVVSEGKVPTTQTGLGSVFEKMPSSRVALEVGTHSPWVSRHLGSMGHEVIVANPHKVKLITQAVRKNDRIDARQLARLARVDPKLLSPIRHRGEQAQADLAVIRARAELVEARTALINCARGLAKPMGERLKQCDADQVKEALADGCSAALQTAIRPLLKSIEAIGEQIRVYDQQIEEMAKQYPVDLLTPVYGVGTLIALTFVLTIDDPERFVHSRDVGPFLGLQPKQHDSGDSQPQLGISKTGDRLMRTLLVQAAHCILRKGAADSDLRAWGMRKMGNGKNAKLKRRAIVGVARKLAVLLHRLWVTGEVYDPLYNCRAKQAAGVAA

SEQ ID NO: 266914 - protein, 319 aa, unidentified
MAQNGLVVAGIDIAKDKADVCIRALSQRQTFPSTAEGRRQLISWLRKHKVTKAVMEASGGYERDWAKALREKDIEVRIVDPKRVRHFAQSAGRLAKNDVIDADTIAWFAEIFGEAPSQAHDAAREKLQQMVNARQGLLDMKTMLSNKGEHDVPEPVQKSHARLLKTIAVELANLEAAITATIKATPDFAARAEIIESVPGLAGTTSAGLIAAMPELGQVSNQAISALLGVAPYDDDSGKRQGGRQIKGGRRKVRNLFYMACLGAATRHNPALMAFYRRLIAKGKKAKVALVACMRKLIVILNIMIARGEKWDASRYAVD

SEQ ID NO: 266915 - protein, 327 aa, unidentified
MRAPGFTVLTTAEVIVAKRVEEIILGIDVAKDTLEVFDWTHERRQVIPNEAAAIRAWLKGFPGPLALSVEATSDYHFTLVDEAHALGHTVYLINGLQLKKYREAVHRGHKSDPDDAWLLARFLDAERKNLRPFTPPCAKARRLWQEIKRRGSVVTKRQDLQQSLKGTNIAHRGLLREFAQVLLQIEKNIQQLIQSLGWAEDYRRCLTIPGVGPANAAALVCAYHRAAFASADQFIAFLGLDVRRRTSGRFKGQQKLTKRGEPELRRLLYCAHKAARSYAPFALYRERLLEKGLSKIAANMALGRKLARIAFALISHQQTFTKQATAY

SEQ ID NO: 266916 - protein, 557 aa, unidentified
MFGLKFVIASNSFPETAGNLSIRNLVSEKECGMLSSGYVLAAKADRAVVSSNPFASMVKGCFDSFIGDVTSTIPFRRLSQVINPLQNVSHYLTEGCSMTKKLRLEQAKEIRRSGKSTGFELINANAAGIDIGSEEHWVAVPEGRDEHSVRKFGCFTADLHEMANWLKQCGVKSVAMESTGVYWIPPFQILEQHGIEVKLVNARQARNVPGRKTDVSDCQWLQRLHTYGLLSGSFRPEDQVCVLRSYWRHRDNLVRYASAHIQHMQKAMTEMNIQIHKVLSDITGVTGMRIMRAILSGERNGEVLADMRAPGVKRSEEDIIKALQGDYREEHLFALRQAVELYDFYHDKIRACDDKIERCLKGFETVVGSDKIAPKKGKHKARKNECIADLQTELYRITGVDFTEIDGLDVLSVNTILSEVGLKSEAFPTVKSFTSWLGLCPNNRITGGRIKSSSTKRVSNRAATAFRIAAQSLANSKCALGGFYRRLRARLGSPKAITATAHKLARIFYVLWSTKQRYQDVGVEYYERKYKERLIRNLKKKAHELGYKITLQEVGVS

SEQ ID NO: 266917 - protein, 485 aa, unidentified
MNVWQASSSLPSRPALASEEEESVDQMTLGIDVACRAAHQASLADERGGFAWTGRRFRTTAADLERLWAQVPAGAKLTVVMEPTRNAWVPLAAWFRRRGAVVILVPPEQSADLRDYYSKHAKSDHLDSRMLARLPLLHPEGLRPSPGLGPADGLRRATKLRASLVKRRSTILARLDAYLELLGPAWHAALGGDLALNTPLRFLAAGYADPHALRRLGKTRLARFIWRYSHGAWGEQHATRLLAAAAETLQLWDGELSYPDLAEDIATEARLALQITTEIRDLEQKIAALLHDRDPAGIMTSAPGVGVINAAQILARLGDPARFQSLAGARSFTGLIPSLSASGTSGHHGPPTKSGDAPLREALFMAADQARRTDPTLAARYHRLMVHQGKHHNSALCHISTVLLTRIIACWRAGTPYQLRDTDGTPITPTQGRQIISQRYQISAELRAQRRTSHTSTRRRTGEERSRQALRHQPASPHATTRPPA

SEQ ID NO: 266918 - protein, 346 aa, unidentified
MRRRPAVDHIAIDLGGRKSQICVRSGDGAVIEERRVPTAELSLYLAKRGPAPRRVILETCAESFAVADAAKQLGCEVRVVPATLARALGVGARRTKTDERDARCLSEASCRMDLPSVHIPSLVSRQRKTQCGMRDALVASRTQLINTVRGWMRGQGIRVRSGATETLPARVRHAVPTPPSYVERQLKMIDELTSSIREADKELEREARADLATRRLMTVPGVGPVTAIRFVSAIDQVERFADVHSLQSYLGLTPGEHSSGERRHRTGINKAGCTQTRRVLVQAAWVHKTRRPNEPASIWATKVEKRRGKLIAIVALARKLAGILYALWRDGTTYNPARGALPAMPA

SEQ ID NO: 266919 - protein, 335 aa, unidentified
MPGMTTTTTAGIDVAKSTLDMAIHGRTELSRVPNTAAGWETLAATLAAAGVARVGIEATGGYERGVAGRLRGHGVAVTLLRPVQVKAFGVLHLKRAKTDRIDAILIAACAHVLGEQGKAPPDARFQALGDHLTFIEQIEEDIARFKTRLEHVGDKRIRRSVEAGIRREQMRRLVEIKRLAAEVRAHGDLGKRFRLVLSVPSVGERTALALLVRMPELGQVSRGQAASLAGLAPFVRQSGKWQGQARIGGGRSRLRRSLFAAAFPGAHHWNAPLMRLHERLRARGASHASAIVACARKLLVQVNAVVARGTPWEASDYPQLGRTRALDGAVLNVMA

SEQ ID NO: 266920 - protein, 292 aa, unidentified
MNSPPATAPRFVGLDVHKGSVVVAAIDAAQHVLLPPRRVPRERFVAWAEAHLTPTDVVVLEATTDAWQVHAELRPLVADVTVAHPLLVQRIAATKVKTDGRDAVHRARLLAAGRIPAVWVPPVEVRELRGLLSHRQRLVRQRTQARNQLHAVLQRHQLAPPEAALFAAARRGWWAALSLGATEQLRVRQDLALLERLDTLVGEVERELARLSTVEPWASQAAFLRQLPGIGVVNAMALLAASGASARFPTAKKLVGYAGLGAGVHQSGQTRRTGGITKQGRRELRAALVEAA

SEQ ID NO: 266921 - protein, 357 aa, unidentified
METKNTKTDFSNQTILAGIDVHKKQWKVTLRGCRMELKTFSMNASAEELYKYLRSNYPGAKYKSVYEAGFCGFGIHRELRQLGVENIVVNPGDIPTRNKEREYRTDKIDSRKLARELENGTIICINIPNEQQEELRSLSRLRQQLVKDQTRIKNRIKGLLLYYGKKIPDNCEMLHWSGNFIKYLEGIEFHTETGKQCLGTYIADLRDKREKISQTLKKLRQAVKCTSHQKTIKNLCTIPGISFITAITLYAELMDIKRFNNMDRLCSYVGLTPSVSSTADHTLVRGLTDRHNRYLRNLLIESAWTAARTDPALTEKFGKLSVRMSKQEAIIRIAKKLLCRMKFVWQNEKPYQFNKKD

SEQ ID NO: 266922 - protein, 397 aa, unidentified
MYIVGIDIAKRKHEAAVIDGEGTVIIKPFSFTNNCSGYNRLLAMLTKAKLPLDEVSFAMEATGHYWLALFTRLQKEGFRVQVINPVQTNSIRSFYIRQAKTDPRDALLIAEVIRFGHFSESTLHPENIYELRELCRGRHAIVSMQADIKRKVVALLDQVFPEYETAFTNLFGDTSMAILQTCPTPKELSEMPFEELCHLIEVSSHKRFRMAKARELQELARNSFGFAMAGDVFSTMIRLYAKHLDFLKQQVREMDCKIAEIMETLDTPITTITGIGPTLGAYILSEIGDINRFSSAAKLAAYAGIDPTMRQSGEYNGVRNRMSKRGSPYLRHAIWLATSSAVLHDPALKLYFQKKRDEGKPYMASVGHACRKMVSIIYAVMRDNKAYTPCIPSEISA

SEQ ID NO: 266923 - protein, 269 aa, unidentified
MSKHSHYKVGCDAHKHFSVFAVLDHRGRVVKRDRVNHEPGAIRTFLCQFPAGTPVGLETVGNWYWIVDEIEAAGCVPHLAHAAKAKVMMGYVHKTDKLDAEGLGTLLHNGTLPSVWIPPSELRDERELPRTRMAFSKIRTKLKNRIHATLAKYALSLDTDSDIFAAKWRPQLLALVSRVPAETQRCMQQELELLDLVQGHIDRLEARILERVRVTRTIQLIQSVPGPAEILSIVIDREVGSIDRFSCPKHFAGYAGTVPKTKSSAGKTH

SEQ ID NO: 266924 - protein, 340 aa, unidentified
MGRYVGIDLHKNMFVACFWEAEDLHPVVRYPMEQIGQFVKALRADDEVGVESTGNTAYFVRKVEGHVASLKVIHPGKFKVIAESTSKTDAKDARTIAWYLAKGMVPEVRMKDQAHAELASLAQTRDRLVKLRTALMNKIHNLLSAQGILLRRESLGSQKGLEEALKTPVSEVAAIELKVLGKEIRSLNESIAELDRELAERGKNLPGHRNLSSIKGIGDKSATILLSVIGDIQDFASAKKLAAYFGMAPRVEVSNDTRHYGRITKKGTKIGRTTLVQCTWVAIRYSSYLREFYERIKAGKGSGKAIIATARKLLGIIYDTLKNDWVFKDFSRFEIEPEVA

SEQ ID NO: 266925 - protein, 383 aa, unidentified
MDTAATRTREYSVEGPVLYLAFELGNAEWKLGFSVGFGQRPRVRTVSARDLEGLQREIELAKRRFSLADTARVVSCYEAGRDGFWLHRYLVEAGVENLVVDSSSIEVNRRFRRAKTDRMDVAKLVDQLMRFERGEKKVWHVVRVPAAEAEDRRHLHRELEDLKAERTQHINRMKGLLAGQGVQQEIDAGFLERLSAIQLWDGRPIAEGLKARLEREYERLQFIQEQIHELEAERVEAIRRSDSPEVEMVRQLLRLKGIGLNSAWVDTMEFFAWRDFHNGKEVGGLAGLTPTPYQSGDSSRERGMSKAGNRHVRALAIEIAWGWLRYQPESELSQWYQRRFGDGSSRLRRIGIVALARKLLVALWRYLETGLIPEGAVLKTRLI

SEQ ID NO: 266926 - protein, 461 aa, unidentified
MAKQPGKRTKDGTKVDATEGLPPLNLHAAGIDVGSAEHYVAVPPDRDAEPIRKFGSFTADLHRMARWLKDCRIKTVVMQSTGVYWMALYDVLESHGLEVNVANARHTKTLPGRKTDVQECQWLQKLHTFGLLNNSFRPTEEIRTLRGYLRQRENLVAAAATCIQHMQKALTEMNIQLANVISDISGTTGLAILYDIVRGERNPYKLAMHKHSRIRASRQEIARSLEGTWRQEHLFVLEQSLDLYQTYQQKIQTCDERIDGQLRSMEPRIDPMSKPIPEPRRGKDARGHQSGFDLRGQLYRITGVDLTRIDGIEVQNAQTIVSEVGVDMSRWKTEKHFASWLGLCPDNRTSGGKVLKRGTRHVVNRASTALRLAASALLRSQSALGAKFRRLRSKLGAPKAITAMAHMLARLVYRMLKFGHDYVDRGVEFYETKYQQQRLQWVTRQAAALRMQLVPLTTVTH

SEQ ID NO: 266927 - protein, 412 aa, unidentified
MAESEKVFYVGVDWGAERHQVCILDAAGAVVGELSVAHQGAAVQALCERLLQLAPAAGIAVAIESPVSPVTEPLLECGLAVYALNPKQLDRFRDRFFPAGAKDDRRDSFVLAASLRTDRPCFRSLEPQEPALLDLRALVRLDQTLKADLRAYANRLRDSLLLSFPQVLELCPAADEAWIWALLELAPAAPAAARLSLARLRSLLRRHHIRRISPEDLYRTLRQPALPLPAATFQRSARQVRSLLPLLGALARQQRENAQAIADCLEQLTLPAAGPDSQGQHRDAAILLSLPGVGTMVAATMLAEASTALRDRDYHALRAYSGVAPITRQSGKSRSVAMRYACSRPVREAVYHWSRSSAIYNPAAKAHYARLRARGHSHGRALRGLADRQLRMLCAMLRRRQLYDPNRCLPAA

SEQ ID NO: 266928 - protein, 367 aa, unidentified
MEKSSKVFVGMDVHKESIDITLAEQGGEVRRVGRIGGDRGSLLKMARKQQSKGGERVFVYEAGPCGLWIYRELAALGERCMVVSPALVPKRAGDHVKTDRRDSERLASLARAGELEAIHVPEIRDEAIRDLVRGRNDAVIAQRRVRQQLKALLLRNDIRYVGKTSWTGAHRRWLSDLKLPEPAQQIVFEEYVDAITVATGRIERLTRAIETEVLTWRFAAVVAALQAMRGIQFVHAVTLIAELGDLTRFGSARQLMGYLGLVPREDSSGEHRRQGSITKAGNSDARRALIEAAWAYRHPARVTRIIATRQAGIPKAVCDIAWRAQLRLSTKYRRMNARRLHHNKIVVALARELSGFVWAIGQSVKPQ

SEQ ID NO: 266929 - protein, 339 aa, unidentified
MEVYAAIDLHASNSFLAVVDREGKRVFKRRLVNDSAILLNALEPYKEGMQGIAVESTFNWYWVVDAMMEAGYRVHLANPAAIQKYSGMKHSDDNSDAVWLAEMLRLGILPEGYIYPREERPVRDLLRKRMHLVKLRTSLINSLQNILARNTGVKVGAAKIKQLTYDLVSPLLEQDEDLVVTGRVSKQTIDFLTRQIKKVEKQVQRKIELKKGYTCLTTIPGVGSILSLTIMLETGPITRFPAPGNYASYCRKVPTRWTSNGKSKGNGNKKNGNKYLAWAFSEASELARRFDPAIRAWFDRKVSRTSRMCAHSALGHKLARAAYYIMRDQVPFDNKRLIG

SEQ ID NO: 266930 - protein, 421 aa, unidentified
MTPTSHDTFAAFVGIDWADAKHDICLQAAGTAKRECFQLDHTPEAIEAWVTTLRTRFSGQPVAVCLELTKGPLVSALRKYDFLVLFPIHPLTLARYREALTPSRAKDDPTDAELQLELLLTHRDKLQPLQPQSPAMRALEQLVEHRRRVVGDKVRITNRLTSTLKNYFPQVLQWFQDKDTHLFCDFLSRWPTLKAAQLARRSTLEPFFRDHHVRVGDVLATRIHAIKTATPLTTAEGVIAPNALLVQALVSQLRVTLDAIEAFDHAIAQRAQRHPDFPLFQALPGAGPVFASRLLVAFGEQRERYTSATALQKYAGVAPVTERSGKKAWVHWRLQCPKFLRQTFVEWAAESIRHSFWAQVYSQQQRDKGNTHQAAVRALAFKWIRILYRCWQDRTPYDESVYLQALHRRGSSLIHNLAEAS

SEQ ID NO: 266931 - protein, 407 aa, unidentified
MVNVGIDLHKTQFTVCVRSGDGKKFGKYPTTNEGYEKFLEHVGRFRRGKEGIRVGVESTGNTRYFKNRMEDAGIGVTVINTLKLKVVTESVKKTDKHDAATIAEFLEKDMLPESKLCSRESEQLRRLLKARTTLVKAEVVMKNQIHGLLTAEGMEDVKGSLQSKKGRQQVLDALNQCKNGLVAQPLFETIERLEENIKGIEKGLRGLVEGDRVVELLLTIPGCGEICAWTIRAYTDDIKRFSSEKKYASFAGLAPWVQNSNEVVHHGKITKRGPKELRTALVQVVMGLRRMKAKTITWRLMERYEAMKQHKGSGRAIIATARKIAVIIWHMLTEDIEFDMGKMMDQKLAKKSVLMGGLRLAKTATVEEKEKPVAVKQVSNYGKKTTGVARIKREKKPTKVQLGVDFL

SEQ ID NO: 266932 - protein, 337 aa, unidentified
MKNYIGIDVAKATLQIYIPKSDSDIEITNSSEGLKKLYSKLKKQYKKEIKDIVFVYESTGAYSTILEQFSQEKEILCFKVGAYQSASFSKVIKNRSKTDKIDARMLSQMYILAKEKDIKVPKRDEKAHQIRSYIKYYQSLVKEHRRQSNYLEASTYNLEDKFILKQVKKKITSIEKEQAMIIDKILEIIKANPTFKQAYENITSIKGVAEKSGIILLYLFLKYPNASRQQITALCGLDPIQRSSGTSVQHKERISKQGLSLVRAILYMPTLNTIVYNPEMKLIYDRLVERGKPKMLAQMAVMRKVILLAHSLYKNNQKYDENRYLNFTQIKEVDMVE

SEQ ID NO: 266933 - protein, 394 aa, unidentified
MIYVGIDVAKDKHDCIIVNSDGKVVFDVFTIQNNIDGFEDLLFKIKATEKCPDKVKVGLEATGHYSCNILGFLKNKGLSTIVINPLYTSLSRKSISLRKTKTDKVDARTIACMIMSDVNLKPYSDTLYLNEDLKSLTRYRFNKVAQRAKLKQSVSRLVNILFPELEKLVSTLHGKAVYVLLSEFPSAQHIASANLKHLTNLLHTASKGRFQRASAEEIRQAARKSIGSYLPAKSLELKHTIKLIRELNSEITEIEAEIKKIMDVIDSPIISIPGIGQNLGAVILAEIGDFSRFESPDKILAFAGCSPSTYQSGQLYSSHAKMEKRGSRYLRWALLNAAAYVCKWEPTFATYLAKKLAEGKHYYVALSHAAKKLVRVLYHLETTGKTYQPTSILS

SEQ ID NO: 266934 - protein, 427 aa, unidentified
MVRSVGLDVHLDFCEVALVEDGELRSAGRIATTPERIELFAGSLGPDDRVALEVTGNAWEIARIIEPHVAQVLVVSPSDTGIRQARAKTDRLDARTLARLLAAGSLDAVWMPDRATWVMRRRLARRGQLVRARSRAKNQVHAVLMRQLVGRAPVSDLFGVKGRCWLAGLGLAFEERETVDAAMRQIEFLDTEIAAVERLIAQAALDSAQIKRLMSVPGVNVIVAASFLAAIGDIGRFENPRKLVGYLGLDPRVRQSGPGPATHGHISKQGSVRARHALVEACWTAVRQPGPLHAFYERVRARRGHSVAVVAAARKLACLFWCLLTRETDYAYAQPSLTKKKLRRLEITAGKPRYAPEAAGIWRANDAIREAERELARQAETAYARTVRDYHATQANKAGASATPGRASSGRQSGKQRGRASVPDPAL

SEQ ID NO: 266935 - protein, 345 aa, unidentified
MGPMYYIGLDVHKQKISYCVKDSSGKLFAEGWIPATHHDLDCWMKNLPQPWTAAMEATMFTGWIYDHLKPHAAALKVAHPLMLRAIAAAKKKNDRIDAKKICDCLRCDFLPESYMAPTAIRERRRRLRYRNLLVRQMVQMKIKISTLLMEAGVSYNKQKLHKAGYFRELLASNPDIDESLRSLLRQCREMVVRLGKMEAVLVHSLQQDRLLAERVERLMSIPGIGPITALTWALEIGEVQRFSSIKKAISYCGLCGAEKSSGNTVQRTPLSKQRNKHLQTTLIEAAKMAPRYSPTLALLYDREKQKGNANRATLAVARKLVAYLVAVDRGQTHFLVLDRDTCAAA

SEQ ID NO: 266936 - protein, 356 aa, unidentified
MRFYTNQHQFYCGIDLHARSMYVCIVSQDGEILVHRNMKAAPEPFLKTVAPYRDGLVVAVECIFTWYWLADLCADQGIPFVLGHALYMKAIHGGKAKNDKIDSQKIAALLRGGMLPKAYVYPAEMRATRDLLRRRTHLMHKRAELLSHVQNTNSQYNLPEIGKKIAYKANREGVAERFDDAAVQKNIAVDLALITYYDELLRDLELYMVKTAKQHDATTLYLLQTVPGIGKILSLVLLYEIHRIDRFPSVQEFASYCRLVKCSKESGGKRLGTSGHKIGNAHLKWAFGEAAALFLRNNEAGQKYLARLEKKHDKGKALSILAHKLARAVYYISHSAPRKLRSIAFFSDGILTSKRP

SEQ ID NO: 266937 - protein, 384 aa, unidentified
MNKHSILFIGLDTHKEFNEVAYIEEHRGAQLVHLGRIPSSKVAVQKLVRQFESKYPGATLHFVYEAGPCGYWIYRLITSLGHCCYVVAPSLIPKKPGEKIKTDKRDALKLAKLLKSEDLTPIYVPEPEDEAVRDLSRAREVAMKDLKDAKYQLKALLLRNNINYKGTANWSQKNLRWLTELVLPHSAQHIVLQEFLHTINERISRLERLDNELTHHVHQWRYYPVVKAIQAMRGVRLLVATGVVAELGDLSRFDHPRKLMSYLGLVPSEHSSGGKRHIGAITKCGNGRARRLLVEGAHTYRYAANISTDMQKRQEGLPKSIIDIAWKAQLRLCKRYKKMIAKGKHYNLVVTAIAREMIAYIWAIAKEMVLTPVNTKLRLARVPA

SEQ ID NO: 266938 - protein, 399 aa, unidentified
MTFHKKSLTRVSATKRQSRIRKEVGHMVHSTTYVGLDVHKASISAAIFLPDRDKALDRRYDNDPKSLRRLAKDIQDLAPGPILSCYEAGCLGFALQRKLESLEIPCQVIAPSLIPEKKSDRLKTDKRDARKLGSLLRAGQLTKVQAPTAEQEAIRAVCRAREQLKSDVNSVKHRISSFLLLHAINDNGCEKWSRDYLAWLKKLQFEEPADQTVFEIYLKQLWLAEELYQEILANLKEYAEIEPFKTAVDYLKCLRGIDVVTALSIVAELYSFWRFESPRSLMAFLGLTPGEHSSGERCFRLGMTKTGNRRVRRLLIQAAWQQRRPVRFSQRVSQRRQLQPGWVVAVAKRAESRLHRRFWHLLNKNKPSQKAVGAVARELAGVVWALLHQLELDRISKAA

SEQ ID NO: 266939 - protein, 370 aa, unidentified
MLDTTTFVGLDVHARSIKAVSLDVMTGEVRAATFGYDAGAVAEWVRSVDPGARCVYESGVTGFDLQKRLSGLGVDCVVGAVSKMIKPSADRRRKNDRNDAEFLARMLSVGDVVEVWVPDDECEAARDLTRALEDARDDLSRSKQRLSKFLLRHGLVFDERTPTGRRKGNWTRAHWSWIESIRFAEGADEEVLAYYVDAVRRAAEEKARLEGLVEAEARKPRWRKRVDSLRCLKGVDTASAADLVFEAGEFSRFRNARSFAAWVGLTPSEHSSGESDRRGAITKAGNKHLRKTLVEAAWHYLTCSGRPKDLAKGQAPDRGARRHAAKGVRRLVERREALLARGVHGNKANVATARELACWVWAVGLMAEEA

SEQ ID NO: 266940 - protein, 371 aa, unidentified
MEEASTWVGMDVHKERIAVAVVRGSAERAVEWEVVNEAGAVRRLARRLARERGAGVSCCYEAGPCGYAVQRVLQETGVRCAVVAPSLIPVRTGDRIKTDRRDARKLAELWRAGMLTEVVPPDEAEEAVRDLCRWREAVGRDLVRSRHRLTKFLIRRGMRWQGGSRWTGVQRTWVRGLEWDHEADRVVINEMVLAIDQHEARLSSVDSVLVELASQPPWAERVGWLRCFFGIDTLTALTVVAELHGVERFGRARHLMAYLGLVPSERSSGARVRRGGVTKTGNARVRRVLVEAAWHYRQRPAVYRGLQKRREGQPAWVIALADRAHQRLWRRYWRLTRAGKTPQVAVTAVARELVGFIWAVLSAPHQLARTA

SEQ ID NO: 266941 - protein, 369 aa, unidentified
MVYFVCPEQKHTQRRLAMAKGTRLDFTGQHIYIGMDIHKKSWSVSIHTEQFEHKTFNQPPEVEKLTNYLQRNFPGATYHCVYEAGFSGFWIHDRLTEEGIHCMVVNPADVPTKHKEKAGKADKVDCRKLARNLRSGDIKGIYVPSRVQAEDRHLIRTRQSMVRKQTRCKNQIKAILFFYGILIPEEGHWSRNFINWIETIHMEKTSGDLALKAHLEELKHLRQIIASLNKAILALSRSDSYREKVLLLRSVPGISTLTAMTLLAELCDIKRFSSLDKLASYAGLVPDIKSSGEKEYTVGITYRRNPALRAVLIEASWVAVRKDPALIMAFNKFSLRMKKTAAIVHVARKLLNRVRFVLINQERYVPAVV

SEQ ID NO: 266942 - protein, 425 aa, unidentified
MTEYTLASRTVGLDVGDRETHYCILDMGGDSLDEGRFRSTRKGLAERFQKMDQARVVLEVGGMSPWMSRDLESFGHEVIIANSYQVGRIYKGQDKTDRKDAETLARLGRSDPKLLRPLKHRQESAMLDRGLLHARHILVRSRVRLINHVRGVVKTVGARVPSSASPQFAKKAGPALPEALRPSLDPLLETIQRLSDQIKEFDQKIEDVAAQKYPETELLNAVHGVGTLTALAFVLCIDDPHRFKKSRDVGSYLGLRPAQHQSGSANPQLRITRCGDKELRCLLVQCANYILGPFGRDSDLRRFGLKLIERGGRFARKRAVVAVARKLAVLLHSLWVTAQEYDPLYQSNRSTWPCSVWWTPEMRGYSPSRSPHGTEDTKNTKTVYRRVQGGDCEADPRKRPLGRGDLQGSRSVADGGSSLVETSRG

SEQ ID NO: 266943 - protein, 347 aa, unidentified
MNFYTQQHKHYCGIDLHAKAMYVCILDQSGTKLVHKNLPTTPEAFLRLIAPYREDVVVGVECMFTWYWVADLCQKEGIAFVLGHALYMKAIHGGKAKNDKIDAHKIAVLLRGGMIPQGYVYPAEMRATRDLLRRRCHLVRKRAELLAHIQNTNSQYNLPEIGKKLASKANREGVEDHFPDPSVRKTIEVDISLIDHYDKLLGEVELYLTRSAKAQDGQTFMRLQSVPGIGQILALVILYEIQDITRFPRVQDFVSYCRLVKCAKESNGKRLGTSGKKIGNGHLRWAFAEAAILFLRHNQPGKEYFTKLEHKHGKAKALTVLGHKLARAVYYMLTREQPFDLQRFVSA

SEQ ID NO: 266944 - protein, 462 aa, unidentified
MMNVQEQREMVEKANRILSEMKSFTWRDLETQGKFSKNDKLSFISDDMLILGCDIGSETHYVRAIDTRGRELSRKALAFDNNAEGFQKAHDWAVQLAAANDKKQIVLGLEPTGHYWFCLAAWMVSNGISVVQVNPYAVKQTKELEDNSQQKDDRKDPKLIANLVKDGNYGMPYLPEKVYAELRRLSMFREQLTEDRNRNMNRLHREMKIYFPEYKDAFGKIDGAFCMAVLKEAPFPEDILRLGTEGLREIWHEAKLRGRGYSRAAEIVKYAEKSIGLKEGTAAGKEAVRWFAEKIMELNEELEKTENSLSEKCKEIPHAENVLEIPGIGGKILSGILAEIGDISRFDDAKELQKLSGLGLVSCSSGKHKGETRISHRGRKRLRSWLFQAARSAVSHGEEYKRIHVHYTTRAGNPLQKMQSLIVIACKILRVIYTMQKTGKRYDPEKLQKDIRYPENVQTAAA

SEQ ID NO: 266945 - protein, 363 aa, unidentified
MASTKARRLSVVRTSSDIRLGEGEPAYVGVDVHKATYHVAVYGPQRGLISTWVQPADPEALIERLRPIRGQVAEVVYEAGPTGFALARRLRAEGLTAQVIATSKVPTPVCPEAKCDRLDCRKLALLASKGMLHPVRVPTPQEEADRQVLRLREQLIRKSRSIQQQVKAFLLQHGIAEPDGLAHWAERAVEALRRLELLPELRYCLDVMLDELDHAVRQVKRVTRRLEELAQAERHRVAAEAMRSVPGVGLVTAMTFRLELPEPDRFDDAGQVARMAGLAPMVRQSGETRREGGLIRSSSARLRTALVEAAWRWVACDEAAKATYRRLVGNTGSGKKAIVGVARRLGVLLWRLSCRGQPYHAAA

SEQ ID NO: 266946 - protein, 350 aa, unidentified
MEKGTTIGMDLGDKTHEVCVLDATGKVIVRKQIVNTKDSVVKFFKPYAGALVVIETGTHSPWIARELEALGCIVLVGNARRLRAIWTAKDKSDVHDAEMLARIGRLDPELLHAVHHRGEVAQQDLAVLKARDMLVATRSDLVNHVRSTVKASGHRIRQCSTDSFATRARESVPAGLMPALLPLLEEIESMTTRIRAYDKQVLDLVEQRHPDAKRLSQVPGVGPVTSLGYVLSLEEPGRFKKSRSVGPYLGLTARRDQSGETDKQLRITKAGDEFVRRLLVGCSHYILGAFGPECDLRRFGMKLAARGGKNAKRRAVVAVARKLSVLLHRLWVTGADYDPDYREHTMKKAA

SEQ ID NO: 266947 - protein, 320 aa, unidentified
MTYIGIDVSKDSFVAAYPKMDGYTTQTFKNSTDGVRKFINTLPDDSHCVMEATGNYSMLLLYLLQQRNIPVSMENPQKIKHFSRAMMSVTKTDEIDAKLIAMYGEKMNPAPYKIPSESIMLLKQKRTVLRQLKKQLTSMKNMQKSMDCLPMKDPVAQASMKQTIKFLEKQISKLEEDITHLSKKEFTRQMELLTSIKGIGENIASALIMATGGFTYFSSAKQISRFLGLCPTYQQSGTSVNVKGHINRNGDTHLRSQLYVVAFSSIRYNTACKEAYERLRARGKSGKLAVIAIANKLIRQAFAVVKSDKPYIDGYVSCLA

SEQ ID NO: 266948 - protein, 350 aa, unidentified
MKIVGCDFHPSYQQVAVFDTLTGEVEERKLIHADGQAEQFYRELEAPALIGMESVGNAQWFVRLVESLGHQLWIGDAAKIRASYVRKQKTDKRDAGHILKLLLENRFPRIWVPNQQQRDLRQLLLHRHKLVGVRTRLKTELQHLALNLGVQKKRQLWSVRGRAELEKLPLQGWTKRRRQDLLALLKVVEPQIEELDKAAAEAAAAHPQARLLMSQPGVGPLTALAFVLTIGEVARFARSKQLASYLGLIPSEHSSGSKRRLGSISKQGNVFLRTLLVEAAQSAVRHDPLFRKEYKHRCHHKPKGVAKVAAARKLAVRLYWMLKTSKPYPEVLHIEGSPRHPVAAKASPSC

SEQ ID NO: 266949 - protein, 359 aa, unidentified
MAVAEAGRQTPEFRGEIPNEPKAIDKLIRQMNERFDGQPLLFSYEAGPCGYGVYHQVQASGHDCEVVAPTLIPRRAGDRVKTDRRDAQMLARLSRSGELTPVWVPTPEQEAIRDLTRAREDMKAIELKARQRLNAFLLRHGKAYPGKSKWIPAHFRWLETVRFDTPVQQIVLQEYIEAVREAQRRVAGLERQMEAALPDWSLAPVVEAIQAMRGVSLITAMTVMAELGDISRFDSPCQLMAYLGLVPSEHSSGGSRRQGGITKTGNGHVRRVLVEAAWSYRFPARKTRIIEQRAERTSPTVQAIAWAAQKRLCGRYRRLAATGKAKQQVVTAVARELTGFLWAIACEAMGKPHGSRATA

SEQ ID NO: 266950 - protein, 314 aa, unidentified
MSAEIFVGMDVSQACVDVAVHPGTAFQIAHDERGIAQAVEQLHALQPTLIVLEATGGLEVPLTGALAAAGLPVVVINPRQVRDFARATGQLAKTDRLDAQILARFAQAIQPPVRPVPDEQTQALAALVARRRQLIEMLTAEKNRLRLAARPIQKRLQAHITWLERELATTNTDLSTTIRESPVWREKEEVLRSVPGVGPVLVTTLFANLPELGTLTRKEVAALAGVAPFPRDSGTLKGRRAIWGGRAHVRAALYMAALVATRRNPVIRMFYQRLCQAGKAKKLALTACMRKLLTILNAMLKSGTPWRVAANPPA

SEQ ID NO: 266951 - protein, 364 aa, unidentified
MLGGVYVIYDDGRPLVEAYDGPQIVGMDLHRRRSVLVRMTEDGQKLGTARITNSPARLAAEIARAGLHPKVVLEACYGWYWAADALAAAGAEVHLAHPLGVKAFSHRRVKNDELDARDLADLLRMGRLAEAWIAPPEIRELREITRYRGKLVQLRTSCKDQVHGVLAKLGIEVTCSDIFGAWGTQWLDELRLPQPYSWKVASLRQLIGWLTSEITVLEQVTADLLAGHDGYRAVQELPGIGPVLGAVIVAEIGDITRFRHPARLSSWTGLTPRHYESDTKVIRGRITKQGSRVLRWAVIEAVQRTPAGTPVHELKDAIIARRGIQARNIAKVAAARKLLTCVFYAMRDGHVRSLAACPAEQEAG

SEQ ID NO: 266952 - protein, 342 aa, unidentified
MNLPIRIGMDTSKSVFQLHGVDENEGVVVRRQFRRAEMIRYFERLPPVLVAIESCGSSHHWARLLQSFGHEVKLIPPQYVRAYVKRGKNDAADAEALCEAVTRPSMRFVPVKSKERQAACMLMTVRERLVSVKSQLSNAFRSYAAEFGIVGPAGRQNVTALIKRVLEDDSLPEMARDLFRLQAEEYAAVQARLAKIEAKLMKWHREDDVSRRIATIPGVGPIGSSMLSMKAPPPETFRSGRDFAAWLGLTPKDHSTGGRQRHGGITKAGDSVLRSTLIVGATALLRHIRKGRHKPTLWLASLLERKPPKLVAVALANKFARIAWRLMISGGVYNRPVAATPI

SEQ ID NO: 266953 - protein, 421 aa, unidentified
MLIRAKKSKRNKPDSESLLVTVDVSKNIHTGYFLCPDGKESTVFKFGNSRHGFEYLYQTGCSFAKSHGLSKIVVGYESTGSYGKPLAHFLLKRGVELVQVNPMHTKRVKELDGNSPNKTDLKDPRVIADIIKLGHALKVIIPEGAAAELRCLSTARERQSKDLTAHSNLLQDLIGTIFPEFFSVFKDITGVTARYILDKYPDPASLVKLGEKKLLKIMETKSRKRFGTLQANMLYQGACETIGVCEGKASVLLEIAQRMKMMEQGQEFLNDIEAKMESFLKEIPYASYILSIKGIGVITAAGLIGEVGDFRKYRTLPELIKVAGLDLYEVSSGKHTGQRRISKRGRPLMRKLLFFSALRLIKEGGIFHEKYQQHLSSGMVKMKAVIAIAKKLLGVIFALARNSVNFDMDYNTEKVELEIAA

SEQ ID NO: 266954 - protein, 361 aa, unidentified
MFIERTSVGLDVHARSVVAEAVDWDTGQVFSERLVPASEQVVAWVGRLPGPVAVSYEAGPTGFGLARAFERAGVRCLVVAPSKLERPGGDRVKTDRRDARRLARLLHIGELPGVRVPTVAEETARDLVRAREDTRGDLMRARHRVSKLLLRQGIVYCGGTAWTAVHETWLRSQHFEQAGLRVAYREALDAVMACADRRDRLDAAIAEMAYQQPWAETVARLECVRGIATLTAFGLTVEIGDWHRFTGATIGAYLGLVPSEFSTGASRSQGPITKAGNTHARRLLVEAAWHHRRPTSGPSRTLRARRAAVTPAIRARARAADARLHQRWVAMQARKKRPTVTAVAIARELAGWCWSLAVMDP

SEQ ID NO: 266955 - protein, 346 aa, unidentified
MKQIIRIGMDTSKYIFQLHGVDATEQPVLRKRLRRKEVLAFFAQLPPTVIGIEACGASYYWARELAQLGHQVKLIAPQLVKPYVTRNKNDGRDAEALCEAMSRPTMRFVPVKTAEQQAALMLAGIRERLIARRTQLSNAIRGYAAEFGVTAAKGLDKIEPLLAQIAQDESLPALARELFAMQGREYARLQVELEAIEARLMAWHRANACSRRLAQIPGIGPIGATALVMKTPDPHAFPSGRHFAAWLGLTPKDHSTAGKTRLGKITRAGDEVLRSLLVAGATAVIQQVRRGRGRLSPWLLALLKRKPPKLAAVALANKIARIAWKLMVTGESYDGARMPGASALAA

SEQ ID NO: 266956 - protein, 401 aa, unidentified
MGILCVGIDVSKNKFDGIIKNEENEIIMKSRVYRQSRKDMVRIISDIKSNKKANDDVIIGLESSGKYHRNLMNFLIHNGFKVREFNPLEIKALRQGRIRKTKTDKIDAEVIANAVRWDLKTNTERYLTDENYLKMKELSSVHRGIVEKIADLKVDLRLALSSLCPGYDELFKNILSSTSIEILKKAVKQTKLFMISEKEIERILKSNYSRTTDTKKLAGTVKEIFETSTCPEYNKEPLVFEIKFILAQYEVLMTQRKRIEKRISRSIKEIDPVALSITGIGEITCSTILGNLGNVKRFKNDRAVTAYAGLDPIVVQSGKSINHAGHISKRGNRELRTALINSAMVGVMYNPVLKHMYHRLRSRGKSHWVSLVACARKLLLIIYSVEKNQKRFYVPDYIMKN

SEQ ID NO: 266957 - protein, 321 aa, unidentified
MTYVGIDVSKVTFVVAYSSVKTNKTRTFKNTVNGVHEFVQTISASEHNCVLEATGNYSALLVYLLSEAGITISLENPLKIKNFARVMLTVTKTDEIDARLIALYGEKMQPAPYKLRSDAILVLKQKRTVLRQLKKQLVATRNLKGSMEVLPFFDPKCKKTIEKTITFLERQIKEMEEELASLAQGEYKKQMDLLTSIKGIGVTLAAALIVATGRFSYFDNAKQLTRYLGLSPTYQQSGTSVNVKGHINRNGDSSLRSQLYVAAFSSLRCNTECKACFDRLRSNGKPGKVVVIAVANKLVRQAFAVVTQGKPYVDGFKSEKP

SEQ ID NO: 266958 - protein, 364 aa, unidentified
MTTIAPTRDAVEDPTGPVVVAGVDTHRDTHTAAVLDGLGQVLGTAQFPATGPGYRALLGWVRGHGRPDRIGLEGSGAYGAGLAEYLQRAQIRLIEVDRPDRRTRRAQGKSDPIDAVAAARAVLAGTATGTPKQRASAIESVRVLRVSRHDASDARARAMTRLKALLVTAPDGLRAQLRELSDRQLITACARLRPGIGDPGALHAADPAVATRRALRDLARRYIDLTEQITELDTILTPLVRSLAPALLDTFGVGTEIAGQLLVTTGANPDRIHTDAAFAALTGTSPVPASSGRTTGRHRLNRGGDRQANCALYRIALVRMRHDPRTRAYVQRRTAQGRTKKEIIRCLKRYIAREIWTTLRPLTT

SEQ ID NO: 266959 - protein, 353 aa, unidentified
MNAITRVGIDLAKNVMQIHAVDQAGHVVLRKTITREKFLSWFANLPRCRVAMEACSTAHYWARRLSELGHEVRLIPPQFAAPYRKGGAHVKNDALDAEAVCEADSRPQMRFVPVKSPAQQGVLTLHRMRTGYVEERTALVNRLRALLAEFGIFIPQGIDRLRRHFVAQVEDGASELPGTAREALMRAWTQWQTLDQEIAWYDRQIAAHACHDGAAKRCMDMCGVGPLTASAAVATIVNANQFKNGRQMAAWLGLVPRQNSSGGKQRLGRITKQGNDYLRMLLFQGARSAVFTAHRRDDRVSRWIVQLQTRVGYYRTLVAVANKNARILWAILAKGEKFNPAHAPARPNPASDA

SEQ ID NO: 266960 - protein, 340 aa, unidentified
MEYIGFDYHKQYSFATSINSESGLIRTVKLANTPEAMDSFIKNPESTHAVLESSRTWSALYELLRNRVSSIKLAHPLRVKAIASARIKTDKIDSRILAELLSHDLIPEAHIRVGENREKQSVLRQRAFFVATRTRVKNRIHVLVDHQPYQIRKIVINLTDLFGKAGMDWLRNVKELSKNDRILLDQMLELLDNLNSLIEKTNKMIKEFFNNDNNAQLLETISGIGKFLAVLISTEIDDIERFTSAKKLASYTGLVPSTYASANITRHGRIIKQGNKWLRWAFVEAAKSAKKYNAQFNDYFNQISKRKGINSATVALSRRIVTIAFSILHYQRPFEIYKTS

SEQ ID NO: 266961 - protein, 359 aa, unidentified
MHERTVVGLDVHARSVVACAIDGDTGELHRARLSPDHGEIHRWLAGLEGPVAVTYEAGPTGFGLARYLAGVGIGCVVAAPSKLTRPPGDRVKTDARDALHLARLLRLGEIPAVTVPSVDQEAARDLVRAREDARGDLMRNRHRVSKLLLRHGIVYSGGNPWTAAHEQWLHAQRLDSPAVQLAFDSSLEAMLLTADRRDRLDMMIEEMAADSEFTPVVNRLCCLRGVSTLTGFGLAVEVGDWSRFTGSTIGAFLGLVPTEHSSGTSRSQGSITKTGNSHARRLLVEAAWHHQRNYRTPSKAIRARWEKAPPAARVRGHEGNRRLHDRWELFHTRKKRPVIANVAIARELAGWCWSLAILE

SEQ ID NO: 266962 - protein, 343 aa, unidentified
MDQHIGLDVSLKDTSISIRQEGKRIWRGKCASDPKLLAEVIRKRAPNARRVVFETGPLSVWFFHALIAEGLPAICIDARHAKAALDMAANKTDANDADGLAHLAEVGFYREVRVKGFDSMLMRTLIAARRQLMKMRVQMSNQIRGLMKTFGLVVPKGAGSVFERNVFTLLEGEGDLSRIILPLVKAWSDIRLRVAELTKQLVAMAGTDQRCRLLTSVPGVGTVTATAFAAAVEDSMNFKNSRAVGAWVGLTPKRYQSGEVDYEGHISRRGDAKLRTLLYEAASVILNRSTETNALRTWALALKDRVGFKRAAVALARKLAVIMHAMLKTGELFDPNAGATAPA

SEQ ID NO: 266963 - protein, 316 aa, unidentified
MGKMMIGIDIAKEWIDIAVAGEGRVRRIKNNELTIDSWLAETGPGSIALIAFEPTGGYERPLRRCLSRAKLAFEQVHPNEVVAFRGRRGIKAKTDRIDARLLADFAAEELVRRDRLAVPEADEALRELAARRRQLQELLHAETCRRDLADSAMVRKSLRTVIAALERSLAAVETAIAEHIAGSIHAETSRRLQTFCGVGPGIAETLIAELPELGHLSGKKIAALCGLAPRTRDSGKQRGHASTGHGRPGVRKALFNGARSAIQHNPVMSAFYRHLIQDNHRLGKVALTAVMRKMLVTLNAMVRDGADWKHAANPAA

SEQ ID NO: 266964 - protein, 347 aa, unidentified
MDYFAGLDVSLETVSICIVNATGDILVEKKVEAEPSAIITVLKHFARPLKRVGLEAGPTSSWLYSELRGNGYPAICLECRHVKAGRSAMRNKTDRNDARGIAQLVRLGWFRQVYVKSEEAQRIRMLLVNRQQLLTKALDLENSVRGSLKVFGLRVGTVTRRTFESRVLELVAVDRVLTAITEPMLRVRRALIEEFERLDRLCRRLARGDIVCRRLMTVPGVGTVVALTYRTGIDAPERFSRSRDVGAHFGLTPRRYSSGQTDYDGRISRCGDAMVRTALYQAANVLLHHGRWSSLRSWAMRIAKRSSVKAAKVALARRLAVVMHRMWVDGSDFRWSSAATAVPTSRQ

SEQ ID NO: 266965 - protein, 332 aa, unidentified
MENFYFIGVDVSKKKLDFCVMFEGKVVHEEETANHQGAIMSFLHHLEKDYGIASGQMLVCAEHTGQHTFPLACACKAVECKLWLENAAEIKYSSGVQRGKNDKVDAKRIAIYARRFQDKVRYYERPTEEIERLKQLESERTLYVTDLAKYKGQMKDQKDYMPKSLYERKMKRLCALMDDLEEAIQAITDEMDEVIASCPVLFRQRELLMSIDGVGCVVATNMIITTEAFTRFDDPRKFNCYAGVAPFSYSSGSSLHSKAKVSHRADKVMKRLLHLAAVAVTHRIDGELKKYYERKVAEGKNKMSVINVLRAKIVARMFAVIKRNEKYKPILS

SEQ ID NO: 266966 - protein, 411 aa, unidentified
MADDYDLYVGIDWATEAHQVCLLDATGGLLDEQPVAHTGSALAALADALTRRVPDVSRIAVAIEIPRGAVVDTLLERGLHVFVLNPKQLDRFRDRFTVAGAKDDRRDARVAADALRTDRAAFRRVHAEDPRLIQLREVSRMHEELAQEHVRLSNRLRDQLLRFYPQALEWCPAADEAWLWTLLDQAPTPAAARRLSPAALRALLRTHRIRRFTADALHTALQAAPLRVAPGTAEAASEHLALLVPRLRLVHDQHARCGRRLEALLAALAAPAPGDPREHRDVEILRSLPGVGSVVTATMLAEASQPLAARAYQTVRAQTGVAPVTRQSGKRAGVLMRYACNNRLRNAMYHWALNSLRGDAACRAHYDRLRQRHSHARALRSVADRLLRILIAMLRAGTLYDPTRHAAKIPA

SEQ ID NO: 266967 - protein, 434 aa, unidentified
MLVQEPDGTTVLAATFAHDERGIEQLCRTLVRLRVGLVAIERPDGLLIERLLDAGVRMMAIHPNQVAATRARFRASGGKSDRFDAFVLCELARTDSHRYRVLTPDGDQTKALRALTRAREDLVETRVALANQLRAELERYWAGAAVLFKDIDSPISLQFIKRYPSPSDARGLGAQRLGWFLARHAYSGRKTPEQLIKKLRAAPEGRAGEHEIEARRQSVLALVAALEPLVAKITELTSEIGHCLRAHPDGPIFLSLFKDPNSVITAAELLAEIGDCRERYPTAEFLAADAGMSAVALESGKRKVASFRWGCDKRLRSAFGVLADTTRRWHPWAGDHYARAIARGHDHPRAIRTLGRAWCRVIWRCWQDRVPYDPARHRGLQQHITVTIPSSSGPRPDLTATQRMAGAAVTEPAARRVEREALDGTPTSANTPGG

SEQ ID NO: 266968 - protein, 364 aa, unidentified
MYQVTNTTELSSLEETRCQFNGGSGAIKLGIDVHQDFYVVVMQEGGTNPKPPQRFPKQGFLRWAEQLPRRGQPVHALYEACGFGFGLQRQLSSLGIHCHVVCPQKLDEQNKRVKTDGLDAKALCLKLDRFVEGNRAALALVRVPSEAEEQARALHRQREQLVKVRKQLEAQGRSLMVNHGLEPIQQWWKPRAFAALDVPPWMKHLLSNTQPTLIGLQQKIAALSLQLQAAAEPRQPRGLGLMTSVIIDREIGDWHRFRNRRQIASYTGLCPGEYSSGKSRLQSCITKHGNPRLRAALVELAWRLVRFQPNYKPVQKWRAILAKGALTTGAARKKAIVAVARQLAVDLWRIRTGQLTPEQLDLTF

SEQ ID NO: 266969 - protein, 279 aa, unidentified
MSLYNNFIGMDIGKRNFVVTVNDQKETKEYNNTTQGIKEFIKDYKNIFGQSLCILENTGGYELELLYTLCGHKIAVHRADTRKVKNFIRSYGNSAKTDELDAKALAKYGAERKSLLELFTPQSKQALNLFELVSRRQDLKQILVAEKNRLQTPSVSIIKSSCKKIIKAITRQIEVITKKIKELIDYDPILKEKQEILKTIPGIGNIIAFELLILLPELGSLDRRKIASLSGLAPMSNDSGKHQGYRKTYHGRNEVKPILFLAAMAARCSKSELRGFYKT

SEQ ID NO: 266970 - protein, 337 aa, unidentified
MQYYLGLDIHSASFTLACLTKEGSLVKCLTRPTSAHELIEAVTSFKGKRSLVVEECHMAGWTLRVLKSYCDELVICDPKHNKWIYKADHASDKSDAIKLAKLLLGGFIKAVRHAEGHKADLRALFLHYYDLTRECSRIKFKLKAEFRMLAIKASGTGIYKETNRLEWLGKLKDETATKIQAEHYYQLIDNLEALRKKTMQIITRESKKDPAYPILDGFPGIGSTLASGYLAIIDTPERFSRKNKLWSYAGFGVRHLESDGCVQTQSSKQGNRVLKWIVSENFRGAMRTLKKNKFQRRFESLSTKGFNAKQARRVVCRDILSSVRACWIKKEAYKDLI

SEQ ID NO: 266971 - protein, 341 aa, unidentified
MEEYIGLDVSMKETSVSIRRAGERIWRGKCASDPRTIAELIRKRAPAVKRVVFETGPLSIWFYHSLRTEGLPAICIDARHSKAALDMAANKTDANDADGLAQLAEVGFFREVRVKGFDSMLTRTLVAARTRLVRITTELSNQIRGVMKTFGLLVPAGKGSIFEKNVRSLLTDQDGLASIVLPMLEAWRGIRIRAAELGRQLVRDARQNQACRILMSIPGIGAITATAFTTAIERPDNFKKSRSVGAWIGLTTRRYQSGEVDYDGHISRRGDAHLRGLLYEAAAVILTRSSTDSTLRTWGLKLRERIGFKRAAVAVARKLAVIMHTMLKTGELFNPNAGAIA

SEQ ID NO: 266972 - protein, 372 aa, unidentified
MEERTKFHVGLDVHKDSISVAAAEPGRGAARLIGKVTHDVNKLLKVLTKVGTAEQLHIVYEAGPTGFGLQRALSQRGYLCEIIAPSQIPRRPGDRVKTDGRDCIQLAECSRAGQLSAVWIPDPSDEAIRDLSRAREDAVNSRVQARHQLKGFLLRHDIRYTGKTSWSIAFYRWLATLNFGAGATQTAFTEYWQAVKSADDRVERLTKALEGSIAGWRFEPAVGALQALRGVAAITAIGLMAEIGDLARFPHPRKLMGYLGLVPSERSSGERTSRGSITKTGNAHARRLLTEAAWNYRFKARISREALARQEALSESIRTTAWKAQLRLTQRFAALRGRGVQVNKACVAVARELAGFIWAIGLQAQRERGQAS

SEQ ID NO: 266973 - protein, 328 aa, unidentified
MKSNYLGIDISKDKFDVCLLREGGRRTRQKVQGIRAVFNNTPEGFALFLKWLEGMDVKELHACMEATSRYGDALAYFLYELGFTVSVVNPYQIKHFAKSDGIRGKTDRIDARVIAQFCQSNNPISWKPLKAENRKLSDLTRRRLELEKMLVQEKNRLKTPGGDKDVRKSIDALIEALEAQIKAIDEKMKGVISSDDELKMCRELVDSVPGIGEKSAMMLMGMVGDFNRFEDSRKFVAWAGLVPCENQSGNKRGKPYLTKQGMNIVKKLLFLPTMAALRSNEPIRMFASRLKTRGKSKMQIIMAAMHKLLSQVFGVVNSQKPFSINYCH

SEQ ID NO: 266974 - protein, 351 aa, unidentified
METKNYIGIDYHKKYTQITVVNARGEIQLEKRVLSEKEDLQRVFRQIKGPKEAVMEATYSWDKLYNILEEEVDRLILAHPLKVKAIASAKIKNDKIDSKVLAQLLRADLIPEAYIPSQETRLKKNILRQRMFFVRLRTMLKNRVHSLVDRNNVPGEELKLFSDLFGKKGKEYLRNLEFSDKSEKILLHEQLNVYEVIEERIKLSDKLIEDIASKDERVARLRSIPGIGKFFSVLILYEIDNVARFTEPRKLFSYAGLVPSLYSSGEKSYNGKLTREGNRYLRWACIEAVVPAISSSLRLKMHYEKVKLRNGANAAKVAVARKILELVWIILKKKCRYEERTKINKVESKAA

SEQ ID NO: 266975 - protein, 407 aa, unidentified
MLARARLPEGIAGITRLHALAGQFAGPDAEPGEVAVGIETDRGLWVAALCAAGYTVYAINPRQVARYRERHSTSGAKSDKTDAHTLADMVRTDSHQLRAVAGDSPEAEAIKVTARAHQTLTWERTRHLQRLRAALREYFPAALEAFDDLAAPDTLKLLAKAPDPASAARLTRGQITAALTRARRRGIPAKAAAIAAALRGEQLHQRQPVTDAYAAAVRSQTVIIAALNGEIATMERQVTDCFRRHPDAAIYLSQPGIGDILGARQLGEFGDDRHRYATAKARKNYAATSPITRQSGKKKTVLARFVRNDRLADALHRQAQSALISSPGARAYYDEQRGRGLDHDAALRALSNRLTGILHGCLKTGTLYDEATAWSHRVKFPQPLDNQNPGVSLTCYLRPATSELSSC

SEQ ID NO: 266976 - protein, 312 aa, unidentified
MDQVTIGIDISKDRLDVHRHPDGAAQQFANTRGGLTQLIRWIGTTRVERVVFEATGRYHRDLERRLGEAGLPLAKVNPRQAKRFAQSLGVRAKTDKADAAMLARMGAALALVPHPAKPEILHHLNDLGVARRALIQDRTAEKNRAKGLRLALLGRLNRARLAQIDADLETIDNAISQIIAANPELRARRAILVSIAGISEVTAAAILTMMPELGHLDRKQAASLAGLAPVTRQSGRWHGKAFIQGGRAALRQALYMPAVVACRFNPDLKAKYDQLIAAGKPAKVAITAIMRRLIILANALIRDKRLWEKSRP

SEQ ID NO: 266977 - protein, 411 aa, unidentified
MQVVYERCCGLDVHKKTVVACILIALASGEVQRHIRTFSTMTVGLLALSDWLESMSINVIAMESTGVYWRPVFNLLEEGRTVILVNAQHMKAIPGRKTDIKDSEWLADLLRHGLLKASFIPPAPIRELRDLTRYRKTLVQERADEVNRLHKVLETANVKLTAVATDVLGKSGRAMLDALVKGTTDPEILAELARGRLRQKLPQLQEALDGRVEAHHRLLLKHILAHVAFLEQTLEQLQQDIEERLPPFEDAMTLLMSIPAIAELAAATILGEIGDDMSRFPSAKHLASWAGVSPGNKQSGGKRLNGKTTKGNNTLRAILTEVVWVLSHMKDNYLSAQYHRLARRLGKKKAAMAVAHSLLVIIYHILSTKKPYHDLGADYFEQRDSTRLTHRSVRQLEALGYTVTLVPKEVA

SEQ ID NO: 266978 - protein, 358 aa, unidentified
MNFYTQQHKHYCGIDLHAKAMYVGILDQHGTKLVHKNLPTTPEAFLRVIAPYREDVVVGVEGMFTWYWLADLCQKEGIAFVLGPALSRKAIHGGKAKNDKIDAQKMAVLLRGGMIPQAYVYPAEMRATRDLLRRRCHLVQKRAELFAHIQNTKSQYNLPEIGKKLASKANREGVEEHFPDPSVRKTIEVDLALLDHYEQILRDMELYITRSAKAHDGQTYARLQSVPGIGQILALVILYEIQDITRFPRVQDFVSYCRRVKCAKESNGKRLGTSGKKIGNSHLRWAFAEAAILCLRQNQLGKEYFLKLEHKHGKAKALTVLGHKLAHAVYYLLTREQPFDLQRFVAASPLRGEREPTA

SEQ ID NO: 266979 - protein, 344 aa, unidentified
MTYYAALDSSLESTAICVLDERGRIVKEAVCATSPAAIFAVLEGFLPSLTRVGLEAGAQSAWLYGGLRDRGLPVVVIDAVHASAMLKGGFRNKTDRNDARGLADMMRVAKYRPVWVKSPAGRQGRALLAAREQLVKTRTALANCLRGLLRGAGLELAADGGDFAARVRAAAGGERALRATVEPLLATLATVERQVARYDLWIKQLAERDEVCRLLMTCPGVGPQTAFGFRVTIDDPHRFRRARDVGAYLGLTPRRHQSGALDYSGRISRMGDAAMRRLLYMAALGCQNEGPRDSLRAWALNLAKRRGAKRARVALARRLAVILHRMWCERVPYHATVRGTAKAA

SEQ ID NO: 266980 - protein, 349 aa, unidentified
MILVGCDLHTRKQQVALLNTDTGELREQELSHVGDDVERFYAALSSPVTVGIESTGYSLWFHALLQRLGHTLLVGEAAKIRAMVVRKTKTDRRDARHLRDLLKDDRFPLVWIPDPTTRDLRALIKHRLRLVRIRTMVKNGLHAIALNQRLALGPSLWSRQGLAQLQALVLLPHTRRRRDDSLDLLQWLNRHIDELDLQVATAAAADPDARRLMTHPGVGPVTALATVLVLGPVGRFPGSKHVVSYIGLAPTVNASADKCRLGHISKQGSALLRWVLGQAAPLATRGDAGLKRVYFAVLRRRGRPKAKVALARRLLVRLYVMLRDQIDYDEFCRRGRAQHGGLELARTPV

SEQ ID NO: 266981 - protein, 346 aa, unidentified
MLYAGLDLSRKRLDFHALRGDGTLVEQGAVPPDTDGLAKLVYRLSAHDREVVAVIESMNGARFVHDQLELAGFEVEIADAQRVNGLAPLACKTDKIDAWVLAELARRELVPAIWLPDPEVRSERERARFRLHLVRQRTRLKNRIHATLIAHGHACPVSDLFGRSGRALLKRLEIPEPWRGTLEASLRLIDALDQEISGCERELRRLGADHRYVSLLQTCPGIAWVLGYTIAAELGDIARFVSPVKLTGYTGLCPRVNQSGEHDLRGPLTKNGPRYLRWALIEAAQHASSSRHFRELAARKRAQYPRPRGRKIANICVARKLAEAIWHMLTRDQPFARAGATPPLAA

SEQ ID NO: 266982 - protein, 387 aa, unidentified
MAQVNDLSRSLTAFDAISTLVVVVEISKASWLVSGAVPGVERQPLKKLEPDATALLRLIERWRNEAVRAGRPISRIAMAYEAGRDGFWLARWLIARGIEAYVIHSASVAVSRERKRAKTDRLDAAMLMRVFLGWLRGERGHCGMVAIPTMEEEDARRPSRERESLVNDRSRITNRMKSALARLGVRGFKPHLRKAPERLAALRTAEGTGLPANIIEELRRDMARLALIREQISSIEKTRAERLERAPDTGPHAMVRLLARVIGIGIETADMLVREILSRRLRDRRAVARYAGLTGSPDESGLKRREKGLAKAGNARVRRGLIQLAWRFLVFQKDSALTRWYRTRTEGPSGARKTTMIVALARKLLIALWRLVTTGEVPDGVELRPAA

SEQ ID NO: 266983 - protein, 355 aa, unidentified
MSQEKYIGMDVHQATISVAVMDGRGKLMMECVLETKASTVVEFIRGLQGTLAVTLEEGTSAAWLHDLLKPGVSRLVVCDPRKNALLKDGNKSDRMDARKLAELLRTNQLHSVYHGEHGVRTLKELGRSYLSITQDVTRVMNRIKALYRSWAIPCSGSAVYAPRHRAEWLAKIVEPGVRMRAQRLYQQLDGLQPVRLEAGRELLGESPKHPAVKLLRQIPSIGPIRSALLVGLLQTPHRFRTKRQLWAYSGFAVETQDSGEYRCVRGKLQRNRERITVRGLSNNHNNDLKNLFKGAAISASTRPGPFRDFYVALLAKGMRPSMARLTLARKIAAITLTMWKKGVQFDAQPLHRQAA

SEQ ID NO: 266984 - protein, 337 aa, unidentified
MTYFGIDVHKSSSTLSWHCPLTGERGHKRIDTTEKAFCKLLKSLPTPWTIAYEATRQAPALTKLLRGLDADELHLAHPRGIRAIGELQKAKTDMKDADLILALLEADMLPESYLAPPDVEDKREVSRGYQNFRHTCTQYQNALRCLFNKAGLSCDASKMLSKKGRKQVAELLGQLAPLAAVMGTMYWQLVQQLDEICNALLALMKQETKQHPAGPALLEIDGVGAVTAFGFLAEIGEHERFANCSRLHSYAGLVPRVSQSDTRYSTGHLSQDCNKHLRYLAVCAAQAAVRCKGWNKAKEAYSRVKGGEKRRANVGKIAAARKILTDVLWAWRQAPEH

SEQ ID NO: 266985 - protein, 355 aa, unidentified
MIIVGCDYHPSFQQIAYVDTETGEWKEQRLEHRESAEAFYRELASRGAKVRVGMEASGHARWFERLLAELGIELWLGDAAVIRAKRGRRKPKTDRQDAQHILHLLLKDDFPKIWVPSWENRDLRQLLWHRHRMVQARTRIMNQLQAVALNEGLRCKKRLWREKGRKQLEAIRLAPWASRRRQDLLQLLDGLNPTIAELTQAIDQEVEKSAEAGRLMTHPGVGPLTALAFVLIIGKAERFQCGKQIAAYLGLVPLEDSSGERRRLGHITKQGSSMLRFLLVEAAQVAARSIPQWRNQYFHLALRRGRKIAKVAMARRLAIRLFWMMRQGWDYEQMKKFGSHAGQPGNRHGVQSNIE

SEQ ID NO: 266986 - protein, 376 aa, unidentified
MHTSPFEFHHTQPELDAFIKYILNSNQSATILMENTGHYHYPVLKAFREAGLPVCMVNAYQIKKFGDMDLRKAKTDKKDAVRIARYALEKSYSLVPYTSMEQKYEDLKFLARQYNQRMLTLKTNKVFLLNLLDETMPGITNILPLTTRTPETSLSVLFINRFKSYDRIKKMGKSRFLDAFEKIARKSRNHQTKTYGLAIYEAALRNITTRGENEYTLAAQDQCLELVCESQKAADSIIPKMQTLAETLPEYAVLRSLAGVGDRLGPLILAEIGDIRRFHSGKALNAYAGNDAPPYQSGTFESHNRHISKRGNAALRKYCFEVMQALKLTRSQNDPVYLFLLKKEQEGKPYNVAKMAGVNKFLRIYYARAMETLKQQ

SEQ ID NO: 266987 - protein, 347 aa, unidentified
MRFSNRQHRHYCGIDLHVKTMYICILDAAGQVLVHRNLKSTPEAFLEIVAPYRDDLVVAAERMFTWYWLADVCAAEGITFVLGHALAMKAIHGGKSKNDKIDSHKIASLLRGGLLPQSYVYPALMRSTRDLLRRRLHLVRKRGQLLAHIQNTRAQYNLPEFERRLAYPANRDGVPNHFPDASVHKSIEVDLALLERYDTLITDLELTLVGDAKRHDGDAFPRLRSVPGIGKVLALTILYEIHDIHRFDRVQEFASYARLVKGRKQSGGRMLGTSGAKMGNVHLKWAFSEAAVLFLRHATGGKKFLATLEKKHGKGKALSILAHKIGRAVFYMLSRDPVFSLEKFMAA

SEQ ID NO: 266988 - protein, 342 aa, unidentified
MQISTIGLDIAKSVFQVHGVDAAGQVVVRRQLRRRYVLAFFQKLPPCLVGIEACASSHHWSRELQAVGHTVRLMPPAYVKPYVKRQKNDTTDAEAICEAVTRPNMRFVPTKTAEQQSCLMLHRVRHLFIRQQTAVINSIRAYLAEFGIVAPVGRRGVEHLLEVVADPTDPRLPEVARGCVAALANQLRALKVQILEFDRRLIAWHRSNATSKRLDAIPGVGPALATALVASIADPAAFRSARDFSAWVGLVPKQNSSGGKDKLGSISKQGDRYLRSLFTAGALAVIRYAKIHGTRHRPWLTGLLARRPTKIAAIALANKLARMAWAMMARDEPYKEPAALTA

SEQ ID NO: 266989 - protein, 360 aa, unidentified
MFYLGIDIGKYNHVASLLDEHSKVIFKGFSFPNTTAGADSLLAKIASYPLDDVSIAMEATGHYWLALFSYLTSQGFSVHVVNPIQTDGWRKGTEIRKRKNDKIDSVLIAELLRYGDFMETALTDEIIFSLRTLTRFRHYLVCSMGDLKRKTICVLDQVFPEYQSVFSDVFGQTSKELLMHFQTPESFQNITVEQLAAALENIRQKQFARQKLEEISALAAASFGLTFAAESFSFQLRLLLEQIMFIEAQVDDLEAQIAGLLEQMDSVITTIPGIGPVTGATILAEIGDINRFQTAAKLVAYAGIDASVSQSGEYESSHNSMSKRGSPYLRKALFQAALAASNSQSSVPITRRSGPKVSII

SEQ ID NO: 266990 - protein, 416 aa, unidentified
MTPLYRCIAGMDVHKMLYVLTVLTELDDGTVEKHQRAFGGFQRDRRALVAWLLELGVTLVVMESTGIYWKSPYAALEHAGVPVHVVNARHVKNVPGRKTDLSDSEWLAQLGRFGLVKPSFIPPQDLRELRLVSRYRQKLAQTLAGEKNRLHKVLDDAGIKLGSVVSDSHGVSAHAIIDGLIAGIPIQELPKLAQGALRKQQADLELSLEGELSPRHRFGLQHIQQPIQALETQLAQLDRYLIEAMTPYADYWHVLQTLPGLDHISAAMILVEIGTNLSGFPGVAHFASWAALCPGNHESAGKRKTGKTRKGNHAIRYLLCEAANAARRTNSAFRSFYQSLVGRKGHKKAIIAVAHKMLRVIYFMFTRRQAYRDAGIDYQALVVDRNAPRWIQALKKYGYWPKSGQAETSVPAPVPA

SEQ ID NO: 266991 - protein, 338 aa, unidentified
MELYAGIDLHGNNSVVTVLDEQDRTIYAKRLANDLDLIVAALRSCVGTLHGVAVESTFNWYWLVDGLQAAGFSVHLVNTAAVKQYDGLKHGGDFSDARHLAHLLRLGILPEGYIYPREDRAVRDLLRKRSQLVRQRTSQVLSIENLVARNLGARVGGNEVKRWTAQHVDTMELLDEQKQALKANVAVMHCIDDQIEQLERSILAKAKLRADYKALKTVSGIGQVLALTIALETGDVGRFAGPGNFASYARMVDSRRESNGKKKGVGNTKCGNKYLAWAFIEAAHFAVRYDAAIKRWYQKKSANSLSVVAIKAVAHKLARASYHVLKDGTPFDAAKAFG

SEQ ID NO: 266992 - protein, 407 aa, unidentified
MKKVSTAAGKATKNFSQPKLTIGLDLGDRSSWYCLLDEVGEVLQEQRLGTTPKAMREVFGKMPRCRIALETGMHSPWVSRVLHELGHEVIVAHARNVRLIGESRKKDDRLDARTLGRLARIDPQLLCPVKHRSAKAQADLTVIRARAGLVRARTALVNTARGLAKSYGERLRGCNVRNMNPEKAEALSPELQAALQPLLAALESLSERIVEYNERIEELAQESYPQVELLKQVKGVGTLIALTFLLTLEDAQRFRKSRDVGCYLGLQPGRRNSGQSEPQMHISKEGDPYLRTLLVQGAHHILGPFGADSDLRRWGLKLAERGGKNGKKRAVIATARKLAVLLHRLWVSGEVYEPLRYNTESDAGSSLVEDPRKQKQSPKPSFGDCVNRLAHFRREMERGRQSGGSTG

SEQ ID NO: 266993 - protein, 343 aa, unidentified
MKLIRIGVDLAKNVYQLHGVDKSERGIWQRRLKRDNWVKVLVNNAEPGCEIGMEACSGAHHWARLLEDKGYKVKLIAPQFVKPYVKSNKNDARDAEAICEAMSRPSMRFVSIKTIGQQDIQAIHRIRRELINHRTAKGNQLRGLVSEYGLVAPQRLDLLRRAVPCWLEDGENGLTGLFRRLLQGLWQDLKTLDKRVSELDREIDQIAQSDEDAKRLQQLRGVGPITATALVAAVGTGEHFSRGRQMSASLGLTPRQHSSGSKDRLLGISKRGDPYLRSLLIHGARSVIRQAKNRDDHLSQWVMRLARRSHPNVAVVAMANKTTRMAWAMLRHGADYQPDRVTM

SEQ ID NO: 266994 - protein, 344 aa, unidentified
MAIVGGLDIHRRQITYDWIDTDTGETRRGQLSPATRTELRGWLEQFHSQQADFALEATTGWRFVVEELQEAGAVAHLAEPADTRALRGPKRRAKTDRTDARHLRDLLRAGTLPESWPPPAHIADARTRVRLRRGLVGERTGWYQRIHAILFHHGLPERSQLLTADGRAWLARVELPTVARQAVDLALRMIDHLEVELDRLDTQLAGIARTQPGCQALMGRYGIGWLTAVSIWAEFGDVRRFANSRQAVRFTGLDITVSESDGKRARGHLARQGSPVLRWALHEAAMCASRPGSPDHAYYLQVKQRLGGKRAALSVARKLAREAYHLLKELGDQALVPAEFSTAA

SEQ ID NO: 266995 - protein, 403 aa, unidentified
MNNVAGIDVSKGKSMVSVLRPFGEVVTKPFSVGHTGSELKELADYLKSLDGETRVVMEHTGRYYEPVARFLHDEGVFVSAVNPKLIKDYGNNTLRKVKTDKADARKIARYGLDNWVELRQHTPMDTIRMQLKTLNRQQSLYTKTKTMMKNNLIALLDQTYPGVNALFDSPVREDGSQKWVDFATAFWHVDCVRNMSLTAFAERYRKWCKRHGYNFSQSKAVEVHAGAQDLIAMLPRDALTKTMVRQAIDALNAISASMERLKAEMQALAAQLPEYPVVMAMHGVGDSLGPQLMAELGDVTRFTHRNAITAFAGVDPGADQSGTHEAKSTRVSKSGAPELRRALFLVMDCLLKTQPQDDPVYRFMDKKRAEGKPYLVYMTAGANKFLRIYYGRVKEYLASLEGN

SEQ ID NO: 266996 - protein, 339 aa, unidentified
MGTSTTTSTAAAVGLDVSKDTLDCCRLAADGTARQKVFPNTPAGFAALVAWADRPAGGRPLHFACEATGPYSHGVAALLHAAGRTVSVVNPTRIEHAGLMRGRGNKTDKADAKLIAEYALRECPPAWSPPPPDVQELQALTRRADDLTALAAREKGQLASPALAGAARASVARAVRFLEREAGKVRAAADAVVAGSGRLADDRRLLESIPGVGRQTATTLLAELPAVDRLPSAQSAAAYCGLAPREFRSGTSVRRRTRLSKAGNARLRKALFLPTQTAVRFNPILRGFFVRLTDPTRKGGPKPKMQAVGACMRKLVMLCYGVLKNRAPFDPNWASRIPT

SEQ ID NO: 266997 - protein, 312 aa, unidentified
MTDQIFVGVDVAKDWLDIHHASHGPIRINNSPPAARSFAARCAKEGAWVVFEASGGYDHQLRDALESAQVRFSRINPRQARDFAKAMGVIGKTDRVDARMLTELGARLTPAPTQPLPPERRALQAQATRRRQLVEMRKQEATRLQQTADPMARADIRGVIALLDRRIAKIEARMTNLVAANPELAAIDRRLRTAPGVGPIVAATLIAELPELGQIDRRSIAALAGLAPIARDSGRRSSPRSIGGGRPIVRTILYLAALQASRRAPEFIHFREHLQAAGKPVKAAIIATARKLVVTLNAMLASGTDYRPAAVV

SEQ ID NO: 266998 - protein, 317 aa, unidentified
MGMSESKAQVFVGIDVCKSALEVRVEPLGEWFQVSNDDVGIRGLCARLSELAPTLIVMEATGGLETRAAGELAARGLCLAVVNPRQVRDFAKASGQLAKSDRIDTHVLCAFARAIRPAARPMKEALTQELDDLVTRRRQLVEMRVQESLRLHGASAVQAKSVKAHIAWLDKRITQIETDLGTRLRSSQAWRVKDELLLSIPGVGEITSRCMLSRCPEIGQLTRRQIAKLVGIAPLNNDSGKYRGQRHIWGGRADVRSVLYMAAVSAMRCNPLIKAFAERLKRGGKAPKVVIVACMRKLLTIMNAMIKSNTAWIPKIA

SEQ ID NO: 266999 - protein, 343 aa, unidentified
MQIHSIGIDLGKTNFHLVALGIDGKVLIRKKFNQKQLITFTANLQTTLIGMEACSGAHFLGRVLRSQGHDVKLIPAQFVKPFVKANKNDFLDAEAIAEAVDRKNMRFVPIKTDDQLDLQALHRVRDRLIARRTAVINQLRAFLLERGMTFAKMPAKLKIAMPEILENAEANLTPRMRSLVSLLWSEWKELDQQITVMNTEVEQIAASDPACERLRKIPGIGPLIATAVVASIGNGAAFRKGRDFASWLGLVPRQYSTGGKARLLGISKRGNPYLRKILIHGARAAVVRMKRERSSFGPWMDALQTRAPFNVVVTATANKLARIVWAVLSTGEEFRPGGRLLVS

SEQ ID NO: 267000 - protein, 405 aa, unidentified
MKTWNEITHYAGFDWAKGHHQIVIVDRQGQIGAEWEFDHSLEEWNQWRERTASYPGLAVAIETNQGAAVDQLLQSGSTVYPINPRSAKAYRERKVSSGNKTDHLDAWSLADALRTDGHAWRALAPVDPLLQELRLLCRDELNLIGQRTALVNQLQAALGEYYPAALQAFEDWTMPTSWKFLERFPTPQALARIGPRKWENFLHCHKLYRPQTQARRMEAFQQATQFCGSPAVTRAKSMLVLSLVKLLKVLEEQLEQYRAQIEQLFARSGPKLAPRLLSQIGDDRQLFPDAQSLQCYAGSAPVSYQSGQVHKVYMRRQCNKHLRCALHLWANLSRRTCQWAQVYYQQLRQRGKSHAQALRCLGHRWLKILWKMWQTRTVYDPELHTRNQTTHGSWVLQLIQAQPGE

SEQ ID NO: 267001 - protein, 327 aa, unidentified
MRKENIIYVGIDLHKETHTAVMLNCWNQKLGEITIENKPAEFHKLTRKVSRFVTEEKTSIYGLEHAYGYGRILAVWLIEKGNIVKGVNTAMSYAQRKSVPMYQKSDSYDAEAVALVLINMLDRLPDAIPDDKYWTLSQLVNRRDNINVHQQKLKNQLHEQLCMAYPSYKKFFEDIGRLTALYFFGEYPSTVHLRGKTAEGLAGELRPVSHNNCSVKKAEKILELVRTDGETLRDCQESRDIITRGLVRDLQHYREQMLEVETAIKELLPYFHCTLMTMPGIDIVTAAEILSEIGNIERFPNASKLAKFAGIAPVNFSSAGKGKDVCP

SEQ ID NO: 267002 - protein, 339 aa, unidentified
MNAVTVIGIDLGKHSFHLHAQDAVGRMVFRKKLSRQQLLRTLANVPACRVVMEACAGSHWLARRLAGMGHEARLISPQFVRPFVAGNKNDFGDAQAICEAACRPSMRFVSPRNEAQQTVSALHRIRERLVRERTATVNQIHGFLLEFGISLPRGAALMGRLPAVLSHEPLPPRLVALAVRLRDHVHYLEEQIKQVEQELMTALREDDRSRRLLEIPGIGPITASALAVELGDAQQFANARQFSASIGLVPRQYSTGGKPTLLGISKRGDRNLRRLLVQCARAVMQRADSRTDALGAWVKALSTRRHSNVVACALANKLARIAWAVLARGTHYEARPQLA

SEQ ID NO: 267003 - protein, 400 aa, unidentified
MRSIGMDVHRSFAQVAIHDDGAIVANFRVAMEHDAVVAFGRSLQADDEVVLEATGNTATIVRLLTPFVARVVIANPLQVKAIAHARVKTDKVDAKILAQLHAAGFLPEVWAADDETLALRRLVSERAAVVRSIRRSKSRVQAILHANLIPKYAGHLFGKGGRRWLAKAPLPKTERDLLERHLDELNWLAGRLETLERDLIHISLDDPQMRKLMTVAGISSIIATAVIASIGDISRFATPQKLASYFGLTPRVRQSGDRGAIHGRITKQGNATARTMLVEAAWGAASVPGPLRAFFLRIKDRKGANVAAVATARKIATLIWHLLTKDAPYQWARPAFVAMKMRKLELRAGAPKAHGKAGPGRDYWIKEIRHREMELVANAENAYARMVEAWREKPPKPKTG

SEQ ID NO: 267004 - protein, 339 aa, unidentified
MTVKTVGLDLAKDVFQVHCVSPTGRKILNKKIKRAKLLALFETLPRCVVGMEACGSAHHWGRELRKLGHDVRLMPAAYVKPYVKRGKTDAADAEAICEAVRRPTMRFVEIKSEDQQAVLAIHRVRDLVVRQRTQVVNMIRSILREFGHILPTGIEAVSKFAREHGTEEQLEMPEIADGILGVMCHQLNGLNARIEGLTKLIEQHAWLDADARRLMRMPGVGPITASAIVATIGDAKQFKTGRDLAAWLGLTPLNKSSGGKERLGRITKKGDRYIRKLLIVGMTSRALMARNKPGKADTWTAKLLAEKPFRLATVAMANKSARIIWALLTKREEYRQPIA

SEQ ID NO: 267005 - protein, 457 aa, unidentified
MPKKAPKKAKDSGFIPMAVVNPHAAGIDVGDTLHAVAVPADRDEQSVRTFGTMSADLEEIVIWLEKCGVDTIALESTGVYWKPLFNYLIRHGFEVYLVNARHVRNVTGRKTDQSDAQWLQQLHSCGLLKSSYLPDNEQESLRTLVRYRRTLTGESSRFVLRMQKALELMNIKLHTVISDLTGKTGTAIVEAIIAGERNAVNFLPLIDGRIKADHGVIVKSLEGNWRAEQLFTLEENYTCYKFFQERIAKCDQAIEAQLQQYAAVQNEGEVPLTQAKNDREQAAVKKKNKRAPAFDTRSFLAGILGVDVLAIYGLSEISALEILSETGTDMSKWASEKHFASWLNLCPNNKVSGGKLISSRLLKKKPNAASQAFRMAANAVQRSDHWLGDYFRRMKAKGGNKYAIVATANKMATIYYKMVSNQVAFNPLDLKQYQEKRQQAKIAWLERKLEQLRKGVA

SEQ ID NO: 267006 - protein, 339 aa, unidentified
MYYVGLDIHIKRIAICILNETGQLVRRSQARGIEEMLRLLKGLPDRFEVCYEASCGYGHYHDLLRPLAARVLVAHPGQLRLIFRSKNKNDRNDAERLARLLYLGETPTVHVPALEVRTWRELINCRSQVIAKRTRAKNTVRALLRSAGVVPPKQPGLWTKKGLAWLRQLALPTTSQQLRRDLLLEEIEKLLRQGRRSEQQLNRQAQQTSAVGQLRSIPGVGVRTAEAVAAFVDDPQRFATAKAVGRYFGFTPCQDQSGDRNRLGHITREGAPVVRQLVAEAAWQAQRRSPTVRAYFERVQRGDPQRKKIALVATAHYLVQVMWALLKRGTVWEERAPGK

SEQ ID NO: 267007 - protein, 333 aa, unidentified
MYYLAFDVSKGKLDGVLTNFRTKNKYFQINNDYQSIIDWLNNVKLPKKMFCGCESTGGYHLLVLRVFVERGFAFKLINPLLVKQFTRTTIRKKKTDTTDSLIIAKLLAQGEGYQINSQELDLTAKTLQRGLEKLIEERHKFSLMGQGLGFQKQNEDLISLNNKFKGIENKIGETIKEHVSSLKERYSKEPVIELLESIPGIGFKLAFTIWTEIGDVKKFDSYKKIVAFVGLDPRIRQSGHCLNNQGKLTKRGSPHLRRALFVAASVARRYDPELKLYYEKKRSEGKRYTVAICAVARKLVSRIYAVWERGTPYLKKEIPSLNILKAVTTMATA

SEQ ID NO: 267008 - protein, 389 aa, unidentified
MERQTQYVGIDLHRRRSVIVRRNQAGETLDTVRIDNDPVTLVAELAKAGEHPEVILEATYGWYWAADVIKECGGNIQLAHPLGNNWGNRRVKNDERDATDLVDLLRLGRLAEAWIAPSPLRELREHIRYRAKLVHLPSNFKSQIHAVLAKEGAAVPMTDLFGVGGQRLLDEVHPGDAYRVRVESLRDLIEHVNREIAMLEKQAAPCFAGDLGYHAVQTIPGVGPVLASVFVAEIGDVSRFKSARHLCSWAGLTPTHKESDVAVRRGHITKLGSRLVRWAPVSCAGPPSRRWPANVATPPFGPTIDGWANAGAPRSGEWRRPANFSFSSTTACATARSIAWLRRGESRDGRNPMRARNESRSPDDGDTEALIEPTRLRPNHTMSPRATNR

SEQ ID NO: 267009 - protein, 345 aa, unidentified
MDHYAGLDVSLDTTSLCVVDQDGEVVCERKVLSDPASIGQALRDLGCQFKRVGLEAGPLSQWLYDGLWAQGWPAICVDPRQMSASLSAMRNKTDKNDARGIAQMMRVGMFRAVHVKSPESHELRLLLTNRSVLRRKGIDIENEIRGALKIFGLKIGRVTKYTYVKRVRELVEDHPRLAAAIEPMLRAQQVLFAEFTRLHRIVLNVVRDDNVCRRLTTVPGVGPITALAFKTAVETPERFAKSKTVGAHFGLTPRRYSSGQIDFQGHISKCGDAMVRTALYEAANVLLSRVRAPSALKSWGLRIAKRCGAKRARVALARKLAVILHRLWVDGTEFRPVALATAQAA

SEQ ID NO: 267010 - protein, 425 aa, unidentified
MKKTDYLSTLFVGIDIGSRTNVVSAIDFNREYFVRMKPVPNAKEGAEILESLLVDVLSAHHEFKHVIIGMESTGFYGVHIANYLSASDMLSPFGTEVYCLNPKEVAKYKESFNSINKNDGIDSFVIADFARVGRITIKPWRGAQYLALQRLTRHRLHIAECIAREKTYVLNNIFLKFSEFAMLKSEDHPFSNKYGATAEAIIEQYVTNDDIIRASIDELVELIESKSHGRITDPEETAKLLQSAAKGSYRLDKVVAKPITLSISSSFNCIRAFEKELKAIEKAIEQTVQGINPLEYQVLKSIPGIGPTYAAGILAEIGTIKAFPNNDALAKYSGIIWKENQSGNFRAEDTKMSKAGNRYLRYYIIEATGSVINHCPEYKAFYGKKFAETTTHQHKRALALTSRKFLRMLFGLLDKTQLYSLEKSR

SEQ ID NO: 267011 - protein, 411 aa, unidentified
MKFTGLDWKDKGYTTRIVNEEGNDLSGSFEVKKDREGFSEFIHKVRRYCGDDNDIIFGIERERDPIVEYLLALGYKVYLVCPNMMKSLRKRYSSTGKYNDDFDSYIIADTVRTDRNRLTRIKPRNDKIRKIEFLLRHRDKAVDDKRRLTNRLTCYLKEYFPAFLDCFSDITRPTALSFLKAYTTYDSAKELNKEDIRAFLKKNNYHKDSGVLRIWKAIKKGQVKIDPIVIRERSKSIIHLIKRIEILDEEIEEYENDLKETTKGDKDKEVFKSLPGSGDTLAPGLMTIFGKDRSRYKNAQEINSLSGIVPFTKQSGNWESHLFRFGCNLFYRNTITRLAYCSLTKSEWARDYYNEKRAEGKSHYHALRCLGRIWINIAFSLWKKGEKYNEDKHMAAVQRHNIRNRLSQKSA

SEQ ID NO: 267012 - protein, 419 aa, unidentified
MNQRSDQPGLFIGIDWADQKHDCHVIDRDGKGFHQEISHSPEDINIWIGEMLKLADGKPIAIMLEQSRGPLVYALMFRENVLLYPVNPKQLVRYRESYPGGGKDDPTDARYLARMLRERIATLTCWQPDDENTRLLANLSQQRRKLVDGQTKLRQQLIAQLKSYFSVVLELFGKESQLPLLLSVLGRWTDPRKLRRADRRLIRRVLSDHSIRNQEQQDEIIDRIRSAQLLCSDEALITPSAMAAKLLASQIQQSRKTIQEFDTKIAEVMKKHPDAHLFTSLRGAGPALAPRLLCAFGSQKDRWEDADSLASFSGIAPVTRKSGKQCKVQRRYACPKYLRQTFHEFADSARKYCPWTKARYRLLRDKGMKHNAALRKLARSWIRILFRVWQTGVPFDCERYIVQLQKRCPEITPYLEQEK

SEQ ID NO: 267013 - protein, 412 aa, unidentified
MEVLYPHCAGLDVHKDTVVACVRHMANGSVEREVRTFKTTTKDLLALSDWLAEHGCTHVAMEATGVYWKPVWHILSDGDFVLVLANAAHVKNVPGRKTDVNDATWLADLLAHGLIRGSFVPDEQTQEMRNLLRTRKQLVRECSRHIQRLQKTLEDANIKLDSVISDIMGLSGRAMIEALIAGESDPERLAQLAHRRIKAPPEALCEALRGRVTRHHRFLLRLHLKQIDAVNVAIDDIDQEVDAQIEPFRTAIQLLITIPGVSELSACVILAEIGHDMNRFPTAAHLISWAGLCPKNDESAGKRRSTRMRKGAPWLKTTLVQCARAAARKKASYFQAQYHRLRARRGDKKAIGAVAASILTTAYHMLKYGTLYEDLGPDYFDKRGKGKHVHRLINRLQNLGFAVQITPVEAAA

SEQ ID NO: 267014 - protein, 378 aa, unidentified
MDRPRSSGVNGNAAEAQLIRKKEPAMTDIATHDDRIATIGMDLGKRSFHLIGMDARGKVIMRQQLSRGRLERHMANLQPCLVGVEAGAGAHHIGRRLSAFGHNVRLIPGQYVKPFRKGQKNDYRDAEAIAEAVQRPTMRFVPIKSAEQLDLQALHRIRSRLVGHRTAVINQLRGFLLECGVIVPQGPARLREILPSVLAQRTDVLSPRMIRLIEELADDWRRLDDRVDAVTSEVQALARQDECCRRLISVPGIGALTASAVVAAIGNGAAFTKGRDFGAWLGLVPKQLSTGDRTILGRLSKRGNKYLRTLFIIGARAVLAKPGSWAKFGLEGWLAAATKRLHHNVLAAALANKLARIAWSVLYHGRSFARGFEPQSVS

SEQ ID NO: 267015 - protein, 412 aa, unidentified
MIVGIDVGSETHYARAFNWRNYEYSKKPFAFSNDEAGFPSFKDWMDDIAEKHGMETVIPGKEPTGHYWLNLGAYLQEQGMKPVHVNPHHVKKSKELDDNNQSKNDRKDPKTIAGLVNEGRFSYPYIPTGIYAEIRNLSNLRIQTQEEITRIKNRIARWFSIYFPEIKDVYRNPDAVSGLMVIKQAPLPCDIKELGVDGVNKIWRDARLKGAGIKRARTLVTAAEHSIGNTEAPRSARKEIRNLLEDYEGYKKRMDELMEEIEKTLSEIPYIDKLMEINGIGIKAVSCFIAEVGDIGRFDNPKQVQKLAGYSIVADSSGKHKGESRISHRGRTRLRYALYEATISVIGKNKEFKEIHSYYRTREKNPLKKMQSVIAVACKLIRIFYTILTKGVDYDGQKMLNDIVRPEIQPAA

SEQ ID NO: 267016 - protein, 409 aa, unidentified
MLEPIVKRCAGLDVHKMVVVATVLVEQPDGQVSQQTRSFGTFRSDRDALCGWLGEAGVELAVMESTGNYWKSIYAALETASIETYVVNARAVKQVPGRKTDVNDSQWLAALARCGLLKPSFIAPVDLQQLRLIGRHRLKLKGIAAGEKNRLHKVLDDAGIRLGGVVSDIHGASAQAMIEGLIRGKPPQQLVQQARGRLQAKRDQLLQALDEPLSERHRLLLQEIRDHLGFLEPQMQRLEEQLLAGMAPYQRYWQLLQTIPGIDAIGAAMLIAEIGVEMERFGSAERLASWAGICPGNHESAGKRKTTRIRQGNRVLRQLLCEVANAACKTHSQFRSKYQALVIRRGHKRSIIAIGHKLLRVVYTVLKEQQPYRDPEIDYEALVVAKNAPRWLKALKKYGYLAEARQVAA

SEQ ID NO: 267017 - protein, 402 aa, unidentified
MAYDFVIGVDVGKYFHHACVLDPQGRQVLSKRINQHEGSLRKLFGQFLADDASVLVIVDQPNNIGRLTVAVAQDMGVDVRYLPGLAMRQLSRIHVGNSKTDVRDAYVIAHAGLNLPDSLRSVDRVEEVFIQLKVLNGIDEDLARAYTRLINQMRSALVGTYPAFEHVLRGQMIHRKWILHLLAKYGGPTKIRRIGRTRLKAFARKHRARNPEPVIDAMLAAIHEQTVSIAGAEYAELGVAMSATDALTKLEHRKEIEAQVLKLIQDIPQTEILLSMPGIGPRSAAQILMTVGDMSDFPDAAHLASYAGLSPRTNQSGTSIMSNSPNRAGNKKLKNALWQSSFASIRFHERSRQFYERKRKEGKRHNAAVVALARRRLNVLFAMMRNGELYRDISTVQEAAAA

SEQ ID NO: 267018 - protein, 405 aa, unidentified
MQMNSVGIDISKGRSTIAVMRPFGEVVISPFEVRHTGSELSKLAKQLKSLDGETRVVMEATGNYHASVAKLLHNAGLYVSVINAKLVHGYGNNELRRVKTDRKDAVKLANYGLDRWLTLPRYIPEEDTRLLLKNCYRQYRQYSKVQTVLKNNLISLLDTVFPNVNRLFSSPIRGDGSEKWVDFVAEFWHCRCVSEKSEKAFANKYQRWCKKHGYNFSVAKAHTIHAEASGHIGVMPKSETTKLLVEQAVAQLRATSVALTALKREMLTLAAQLPEYPVVMGMFGVGPTLGPQLIAEIGDVRRFYSKKALVAYAGLDAPPNDSGDVTGKHKSMSKIGASSLRRTLFLVMSVYLRSAPLDESVYQFMDRKRAEGKPYHVYMMASANKFLRIYYATVKAYLESLEHTT

SEQ ID NO: 267019 - protein, 391 aa, unidentified
MSMYFIGIDISKYKHDCCIISAANQKVVSKVIIKNNKAGFNELLTIIHSLANPADIRIGFESTAHYALNLELFLENSLLTFMEVNPVLISEYKKSKTLRRTKTDSVDCESIARWLMTVEYKPHSKGFYHAYSLKSLTRLRDKLIRQRSFYLVKITNVLDHTFPEFKPFFNERLSKTALYLLENYGSAEKMARMNSASYEKLRSVSRGKFSPQQFLRLKELAANTVGVNNSIFDVELNSLLSLYKSLVKEINTIEKEINKLIEEVHPHYMSVPGIGPLSAAVIYSEYGDISNFTNPGQMLAFAGIEPGINESGTESHGGKMVKRGSSQLRYTLINCCLPLIRFDMTFATYYAKKRGEGKPHRVAITHVAKKLIRVIYALESQDIDFNAQELR

SEQ ID NO: 267020 - protein, 312 aa, unidentified
MENEVFVGIDVAKDTLDVAATSGAKGSFPNTREGYEELERLVRPLTPVLVVFEATGGYELAAVEYLALEGLPVAVVNPRQVRDFAKALNILAKTDRIDAGVIARFAAAVKPEPRPLKDAEAQKLDALVARRRQLVEMIAAEKNRLPLAKEWVREDIVATIAWLTKSVEKINKEIEDLIRKSPLWRAKEALLRTATGVGKVTAFSLLCDLPELGTLNRQKITALVGLAPFNRDSGKMKGKREIWGGRGHLRSVLYMAALAARRSNPLIKPLYDRLIARGKLPKVALVACMRKLLTILNAMVKTNTPFQVRTCS

SEQ ID NO: 267021 - protein, 410 aa, unidentified
MLFVGDDWAEAHHDVEVVDDSGRVLARRRLPEGVEGLERLHGLIADHLGPEDEPGQVVVGIETDRGPWVQALIAAGYLVFAINPLQAARYRERHGVSGAKSDPGDAHVLAEVVRLDRAHHRLVAGDSDIAEHVKVVARAHQSMIWSRQRQVNTLRSMLREFYPAALEAFGEELAGRDALAVLRIAPTPETGRALSLSKLATTLQRAGRQRNIDARAAEIQQALRSPQLAARPGVVAAYAASTRALVSVISELVAQTLVLQGEVEAGFGQHPDAEIYRSQPGLGAVLGARVLAEFGDDPHRYADAKARRNYAGTSPITRASGTRRVVLARHVRNKRLADALYLQAFAALNASPGARAFYDKQRDRGATHHQALRVLANRLVGILHGCLTHRTTYNETTAWQVQTKIQTTAA

SEQ ID NO: 267022 - protein, 390 aa, unidentified
MIYVGIDVAKDKHDCCILGPDTEELFQVFTIRNNSDGYGELFHKIESVSKDKSQIKIGLEATGHYSYNILGSLLDHGYHTFVINPLHTNLYRKGQSLRKTKTDKVDARSIAEMLVTDKTLKPYTDTSYHSEELKSLTRYRFELVKERAKMKTSVSRLVNILFPELESLVPTLHMNSVYRLLQELPGAYFIASSNLTHLKALLADASKGRYGREKAIEIRETAKSSIGSLMPAKSMELRQTIHRIDTLTSDIKEVEQSIQKIMDECGSPITTIPGIKHRMGAMILAEIGDFTRFSNADQVLAYAGLSPSTYQSGQLISSYAHMEKRGSKYLRYALFNAAKYASAWDERFRLYLSKKRAEGKHYYVAISHVVKKLVRTIFRMEITHTSYQPL

SEQ ID NO: 267023 - protein, 382 aa, unidentified
MMCPDWYRPRNGRIDQILHIERCNHRLSIVAKTHPYLVGVDTHARKHVYTILVANTGEKIDARDFPTTTAGITRAIAWVARRTEANADTLWVIEGAATYGAILTGTVASHGYPVAEAPRIEAKQHYGIGKSDALDAHRIAAAALPLPVNKLRRPRLNDGVRQAIRILVTARQSMTKDRTRTVNALTALLRSNDLGCDARKALSKTQIVEVSKWRSRNEELSLSIARGEAIRLAKHVLELDTQLADNERQLTELVHISEAAPLLEETGFQAISAAKCLAAWSHHGRITTDAEFASLAGVNPIPASSGNTIRHRLNRGGDRTLNSALHMVAVTKMTHDPETRAYVEKRRQEHKTDREIRRCLKRYIARRIFRTLNASATAMQPA

SEQ ID NO: 267024 - protein, 326 aa, unidentified
MEHELHYIGIDTAKEKLDVDVLRPDGRHRTKKFANTTKGHDELVSWLKGHKIDHAHICIEATGTYMEPVAECLYDAGYIVSVINPALGKAFAQSEGLRNKTDTVDARMLAEFCRQKRPAAWEAPHPLERALRALVVRHQALTDMHTQELNRTETAREVQRPSIDAHLLWLEAELKRLEKQIKDLTDDDPDMKHRRKLLESIPGIGEKTSAVLLAYIGLKDRFTHARQFAAFAGLTPRRYESGSSVRGVSRLSKAGHVSLRRALYMPAMVATSKTEWGRAFRDRLAANGKKGKVILGAMMRKLAQVTYGVLKSGVPFDAARHNPVAA

SEQ ID NO: 267025 - protein, 320 aa, unidentified
MSKKKSKSYIGIDVAKQQLEVAAHESDYQFRCANKVGAFGELIAELMALRPTLIVLEATGGLETRVVGALHRAGLPVVVVNPRQVRDFAKALGQLAKTDRLDARVLAHFAAAIKPPVRPIKAKEQQELDALTGRRGQLVEILADEKNRRASAASDTVRDQIEQHIDWLEDRLAELDKQIKALLQTSPSWQVKDQILQSVPGIGPVAAFSMIADLPELGTLNRQQISKLVGVAPLNRDSGQQRGSRHIYGGRAQLRRVLYMAALTATRHNAVLKEFYQRLCANRKPFKVAIIACMRKLLAIINVMMRDGTCWNFKQVPVQA

SEQ ID NO: 267026 - protein, 356 aa, unidentified
MSLPIEEREVILGVDTHLDVHVAVLIDVVGRVIATHSVPTTAIGYEQLIEWAGSLGRLSRAGVEGTGTYGAGLARHMRERGVQVLEINRPDRSRRRLRGKSDPTDAENAARAVLAGDANAIPKAQCGVVEAMRAVTMARRSAVKAKTQAINQLRALLVTAPAAIRATLWKVKPEHCIARCARLQSLGDTPLLKALTDTLRLLASRWLSLAKELRQLDAALEELTKRAGHRLLAQFGVGPQTAATLLVTAGDNPDRLRSEAALAALCGVSPLEASSGKTTRHRLNRGGDRAANNALWTISMVRMRSDSRTRAYVARRTAEGLSTKEIQRCLKRYIVRELYPLILADLTDAARCPSLT

SEQ ID NO: 267027 - protein, 339 aa, unidentified
MSIVFVGIDLAKNVFALHGVDEHGKAALVRPAVRRDQLMEMVAKLPPCTIGMEACSCAHHWAREFEKFGHHCRLMAPKFVVPYRMSGKRGKNDAADAAAICEAMQRPTMRFVPVKSELAQSRLSVHAVRQGWVEARTACINRLRGLLSEFGVVLPLKAQTVRREAAAHLERLPGWMKTAGMDLLDELHRLDERVDQYDAHIKMMAKAEERSDRLMQIPGIGATTASALVASVGNGHDFANGRQLAAWLGLVPGQYSSGGKQRLGRITKAGDAYLRTLLIMGARAVLAAATKKTDRLSRWATTVADRRGYWKAVVAIAAKNARMAWAMLAKGEEFKPLTS

SEQ ID NO: 267028 - protein, 321 aa, unidentified
MQTIPVTVYAGVDVAKATLQLHLQGRQAEFSNQPAGLVQLCQQLKTIPHIHVVCEATGGYERLLVQAMHQAQIPVSVTNPAQVRAAAQAQGQRAKTDRIDAALLTDYGQRYQPKPTSPTTASQDQLVALTQWLMQLVQAQALAKTQAEHHEAAFVCGRHAKLMAHYQSQIVAVEKQIRALLAQDAQLQQRVDCLDEIKGVGARTAWLVLAHMPELGQINRQQVAALAGLAPWTRQSGTMKGMRCIGGGRPEVRLALYMAALSAARCNSVLKPFYQRLRAKEKPAKVALTAVMRRLLVYMNHQLKALQATQTDTKLQNSKIP

SEQ ID NO: 267029 - protein, 593 aa, unidentified
MKVLHEHVAGIDVHKDMIKVAIRSPGEKPWTRKTEVLEFRTFYGVLQEMARELRRRGVTHVAMEASGVYTEPVYHALCEQDFTEVIVVNPAHVKALRGHKTDARDCARIAELLECGLLHGSFIPSAEQKEVRDLTRYRMKTVQARTSEIQRLHKALESAGIKLGSVLSDITGVSGRLMIDALIDGERRAQVMADLAKGTLRQAGKQADLSMALAARFTDHHAMLCRLHRDQIKLADHAIAGLDAQIADRAGRWPRELGLLDSVPGFGDVVSAAWLAEIGPAPHRWFPSHGKLASWVTLCPGTTSAPASASTAGPGTPAPTSSQCWSRRPGPRSGSAAGSRPGTAAWSAGSAETRTPARRRRRSSRSRTPCSRSPTRSSRPGSPTPTSARTSTPAGNHPSSSRPTWHAGCKSSTPAAPSPSPSARHQAVPRQAPPRRPPDRPAAHQTLTRQLPEPPPIRQPGYRRTIHHRPTLAAAPATVRCRAPTGTQFPCQVVLRRRSAATGALVRWLVADRAPKLCPEYSGQLVNGSSMWLKSQVFWVMPEQVLLSAVPGQPPLSRWIAQPLAKAHSAWIPGRTRFRVAFGGGPRGRPPSS

SEQ ID NO: 267030 - protein, 455 aa, unidentified
MSKSNRTDTPLRAARAQISNPEITVHAMYRSAIGIDVHLNLLVCCHQKQVAGHREQSESRDFNTDRASIDAFAAWCRECNPDIILMESTGSLWQSPYEALERAGFTSEQLALINARDAKAAAGRKTDRKDASRLASLARTGNFKKSFVPEKAFRLQRVIPRDLQKNRNDISRTSNRFGKSLNLTGCRPTTVFSDIRGGKAASLILMAKLRDDPHLFDVIKQNSRRLRASPEQIMQALDFEIEPMMKEQILALRKKIDQLEEYDRSTFERLRQLQAPYEKDIQLLITITGIQERSARMIYAELCPDLKEHFPTSEQFASWLGICPGDNTSAGKQKSGKCPKGNKHLRRTLIEAARGLAVGGTAALKEKFQVLKMRRGYRRAMVAFAHLLARIIYSVLTHQKGFEPYLSTAFRDALIERAKNGVKQLLKLKGTKYVIADGLVVETKTGAILGAVVSS

SEQ ID NO: 267031 - protein, 320 aa, unidentified
MMYIGIDVSKDSFVAAYPGKNGYTTKSFKNDTKGVRCFITSLPEECHCVMEATGNYSMLLLYLLQQAGIPTSMENPQKIKHFSRAMMTVTKTDEIDAKLIAMYGEKMTPEPYKIPAESILLLKQKRTVLRQLKKHLVATKNLQQSLAVLPKQDLASKHAVEKTIKFLSRQIAELEDEITNLSNKEYKRQMDLLTSIKGIGKTLASALIVATGGFTYFSNAKQISRYLGLCPTYQQSGTSVNVKGHINRNGDTHLRSQLYLVACKCTQCNAACKETYDRLRANGKSGKAAVVAVANKLIRQAFAVVTKNQPYVDGFVSSIA

SEQ ID NO: 267032 - protein, 401 aa, unidentified
MTTLRDNAMRVKRFRELKSTLRTKRHRLLVGLDIAQAEHVAHLRHAHTRVVVPTLTIPNSTRGFAELWARIEQAQRATGCREVICGLEPTGTYHQAVATFLEAQGADVVLVSSAVAYWNRRTQDGTWDKHDPKDAANCADLLEQDKVLFYSQPAGPLAELRYLVKCLRRARTELAACKARWRTTLRPALGPMGEPLPNRLRAELPAVLQAWERAAPGRPALAKGRLPLGLATACADLGAQVTAVQARIRGIEEALTPLAERLPAYALLRTIPGIGPTVAAILLAEIGDIGWFTRFSQLRKLAGLDIIRVQSGQFAGQARISKCGRGLLRWALYHAAMGLARTTAGRARLAALKAKRQGDRYAGFKSIVELAAKVLRIVWGVWRSGRPYDPLRTGGLKRQAR

SEQ ID NO: 267033 - protein, 385 aa, unidentified
MQKLNDLSRSLTPLKPGGTLIAVIEMSLSSWLVAGIVPGVERQPSKKLEVDENALLKLLNRWREEAQKAGHGIERISVAFEAGRDGFWLARWLRARDIEAHVIHASSVAVSREHRRAKTDRLDTELLKRSFLGWLRGERDHCKMVAIPTIKDEDAKRPNRERESLVGEQSRIVNRMKAALIRLGIRGFNPKLKKAAERLDGLRNPEGEPIPPNTLAELRRDMARRRLVGDQIRQIEDARLERLTQAPSDGPHAMVRLLARVIGVGVETADMLVQEVLSRSMRDRRAVARYAGLTGSPDESGRKRREKGLTRSGNARVRRGMIELAWRFLRFQKDSVLAQWFRTRTENARGTRKTMIVALARKLLIALWRLVREGVVPDGVVLRPA

SEQ ID NO: 267034 - protein, 428 aa, unidentified
MHVCAPASEDGGTQVRIFATTTDEIAACAQWLRQLQVESVAMESTGVYWIPVLEILESSQFECLLVDTRPLSRVPGRKTDVTDAEWIQTLHSHGLLQGCFRPTEEISQLRSLIRQKAVLVAEQADWTRRMQKCLDQMNVRVHHAVSDAQGVTGMLILRAIVAGERDPQKLAEFRDASCRKSKEQMAALLSGHWRPDHLFNLEQGLRMYDTITERIAAYEGEIQKRMKNLTPAGRTEQNAPPLLNREKRKAMKRRHQEDKRQTLYRLIGTDLTTIDGVGTETAEVVVSEYGIEMNRFASEKAFVAHLKLAPRQAISGGKQLKKRGSKTKGTRAGRALRNAAVAVGKGATALGAYYRRISFNKGASVAVFATARKLATLIYRMLRWGQAYVDIGQKAYEEQYQTRRLRSLNSTATQLGYQLIKKTQAASA

SEQ ID NO: 267035 - protein, 375 aa, unidentified
MKKNSSGCKSPKARMKATRATNVTVGMDLGDKTSRYCMLDENGEVSREAGVATTKKAMTQVFATMKPCRVAIEVGTHSPWVSRLLQSCGHEVIVANARQVQLISKSSRKNDRMDAQTLARLARVDPRLLRPIQHRSEQAQGHLRVIRVRAALVEARTMLVNAARGLTKATGERLPSCDADQMGVELMESLPAGLQNSLRPLLEEVGSLTEKIQALDQQVEQIARTDYPETDLLRQVSGVGPLIALTFVLTVEDRERFQKSRDVGCYLGLRPRQSDSGESEPQLRITKEGDPYLRKLLVQGAHCIMGRRGPDTDLKRWGLKLSARGGKNAKKRAVVAVARKLAILLHRLWVTAEVYEPLRNSQSGPPVKKSRKAAA

SEQ ID NO: 267036 - protein, 348 aa, unidentified
MTASHYIGFDVHKKTISYCVKTAAGEIVEEGCTPAERGALRQWAAARPQPWRGAMEATLFSGWIYDTLKPYGEQLEMAHPAKMKAISAGKKKSDTIDARTIADLVRCNLLPACYVAPPRIRELRRLLRYRSLVVSEAVRMKNKMAGLLMETGAAYVKEKLHRKKYFARLLEELEEVPESVIDLLRLSRGALEMFESTQKRLVRELLADPELAERIERLMTIPAVGEVTALTWALEVGDPQRFRSSSDAMSYCGLTAALKSSAGKQQRGPISKQRNHWLQTTLIEAAKLAPRWNPQLAALHARESERGNRNRATLAVARKLVAYLLAVDKSGQAFQVRAPSEEPTPKAS

SEQ ID NO: 267037 - protein, 423 aa, unidentified
MTKLSSTSAGAVLVAIDMAKNRQEVLIERPEGGRRRRMTVLATKADYDALAEQLAAIGRPIVVGFEATGNYHRTLAHRLLTAGFELRLISSVAMARTREALHNGWDKNDPKDAQVILHMLRIGATQRYVDPLAAGINDLQELSKTHEVVSKMKTQTWHRILTHYLPLYFPEIARCAGNSRSDWFLAMIERFPTPASITSLDREAFSAEVWPLIGRKVSKARLINDVYETACASTALPVPEDSAAITMFRMVIAQGRSLIQQRDEIERLAHLRLADHVDYQLLRKIPGIGPINALTILAEAGDLRRFNHHRQFLKFCGLDLATCQSGTFRGRTKLSKYGNARLRRTFWMAAQVAARQRDNSFRDKLGRYTAGHADNADRRRKAMTALTAKMARVAHAVVKTGTEYRPFVERPDARWKDPSLQVP

SEQ ID NO: 267038 - protein, 371 aa, unidentified
MSQLLAGTRPATLNVEASPRPPGARKPETELGAASTIAVPHPDSRSGTSPHSQGRVMDEQRAVFVGIDVSKDRLDVHLRPSGEAFCVLRDDRGLADLVSRLQRLPVVLVVLEATGGFEATVAAALAGIGLPLCIVNPRQIRDYARAMGRLAKTDTLDAEVIALFAERVQPEARPLPEPERNHLVELVGRRRQLIEMIGMETNRGRQAAGKHLARRLARHVTYLQKELDAVDHDIGNAVKQSPAWREAEALVKSVPGIGDVTARTLLAELPELGTVSRRQIAALVGVAPINRDSGSMRGRRAIAGGRTSVRAVLYMAALTAIRRRSPFRAFYDQLTARGRPKKVALVAVMRKLLTILNAILRDHTPWRHANT

SEQ ID NO: 267039 - protein, 403 aa, unidentified
MNSVGIDISKGRSTIAVMRPFGEIVISPFEVRHTDSELSELARRLKSLNGETRVVMEATGNYHAPVAKLLHDAGLYVSVVNAKLVHGYGNNDLRRVKTDRKDAIKLANYGLDRWLTLPRYVPEENTRLLLKNCYRQYRQYSKVQTVLKNNLISLLDMTFPNANRLFNSPARADGSEKWVDFVAEFWHCECVSERPLKSFVNKYWRWCRKHGYNFSEEKAHAIYDEASGHIGVMPKSETTKLLVEQAVSQLSATSAALAALKQEMQSLSSQLPEYPVVMDMFGVGPTLGPQLIAEIGDVRRFYSKKALVAYAGIDAPPNDSGDVIGRHKSMSKVGASSLRRTLFLVMSVYLQNSPPNEPVYQFLNRKRSEGKPYYVYMTAGANKFLRIYYGKVKAHLRSLEQNE

SEQ ID NO: 267040 - protein, 318 aa, unidentified
MSHGYDKFVGIDVSKDALDVHGLPAGSPSRFDNTAAGRAKLLSLLPQAGACLSVVEATGGYERDLVAEAVTAGHHIAVVNPRQVRDFAKALGLLAKTDRIDASVIARFAETTRPVPKGYDERQEQLRELIVRRRQLLDHRTAEKNRSEMAHSSLVRKSVLKLIETLNKDIQRIEKAILQLVESNDDWRERFEKLKGVPGVGGQTAATLMAELPELGHLNRQQVAALVGVAPFNRDSGQFRGRRAIWGGRQSVRNALYMAALSAKKHNPVIREFAARLMAKGKPPKLVLTACMRKLLIILNAMLQSGDSWSPRLATLTP

SEQ ID NO: 267041 - protein, 320 aa, unidentified
MLPTLGIDISKDSFHLELSINDKLRHRKFANRKEGFGELCVWLAKHKATQVHACLEATGPYSEALALYLHQQGHTVSIVNPVQIKAFGQSELLRNKDDRPDAGLIRRFCEKQRPAPWTPPPVHLRELQALTRHLENLIETRQQQVNRLETTNTKQVTKSLRKLVTHLDAEIKRTEQQIDDLVDRHPDLKQQSELLESIPGVGKRTAAKLLAEIPNITQYKSARQVAAYAGLTPRNNRSGTIRGKTRLSKTGNARVRKALFFPAIVAKRHNPIVRAFCERLSRNGKNKMQVVGAAMRKLIHIAFGVLKSGRMFDPNHEALA

SEQ ID NO: 267042 - protein, 313 aa, unidentified
MDHDSAFVGIDVSKNKLDSFVSTTGQVEQFFNTPEDIQRLAKHLKAQMPALVVLEATGGYERLAAAELCAAGLPVVVVNPRQVRDFAKATGRLAKTDALDAQVIAEFAQAVKPEIREMPDEHARELADLLTRRRQLIDMIVAEESRLKQAVFKALRRDINAHIVWLQKRLKSTDDDLHEAIKASPAWKANYDLLREVSGVGNVLALSLLAMVPELGKVNRKQVAALVGVAPFNCDSGLYKGRRRIWGGRAEVRSVLYMAVLSSKSHNPVIERFYNRLLAAGKTKKVALVACMRKLLTILNAMVRDQKHFAEMA

SEQ ID NO: 267043 - protein, 403 aa, unidentified
MAPADEHERVYGGVDTHEDSIHVAVISAQGQDLEDREFPTTPAGYRRAVAFIISHGEPIAIGIEGTCSYGVGITGEAIAQGLRVVEVIRPERAERRRLGKSDPIDAYQAARAAMGAHRTAPVKDTAAIEGIRALHNARRSAMKARTAAMRQIHSQLITAPVAIREKYRGMSSDKRITVLARMQVPANRTPVERAVLLALKTLAQRCKELQREHERLGVELDQLVTDANPGLRAAYGVGPDTAAQLLLTAGGNPDRLRSSAAFAALCGTSPIPASSGKVTRHRLSRGGDRAANGALYRIALVRMASDPRTRAYVAQQRDAGFSNREILRKLKRAIAREVFRYLTTPVSVPAVDDLRPLRRAKSITLTTAANQLGVWPATISEIERGVRRDDTLTETYRNWLTAA

SEQ ID NO: 267044 - protein, 342 aa, unidentified
MGRVYVGVDLGSSSFQQVGVNEPGMVVMKREFQTSAAHLVKAFSGLKGEIHVHLEAGELAPWAMEIIRPLVHRVVCSHPQSNAWIAKDADKCDRVDAYKLADLLRVNRFKEVHYPREQLRRDFKTLVQHYDELTQQQARLKTKVKARLRMQGVIVRGERVFSATGRLAVLAAVKSAAVRTAIKQLYQVLDQSLASQTEARLLMLRTAQALPEIKWFKTAPGVGAIGACRFSAYVHTPQRFSSTRKLWKYCRLSISHRSSNGKPLRRPRLDRSGCGRLKDVSRKAFEAALRTHGDNAFKRTYQRALQTTHDQTHARLTVQRKIVSTLRAMWINQTPYSDQMTP

SEQ ID NO: 267045 - protein, 414 aa, unidentified
MLKIVYRICCGMDVHKSFVVACIASTNEQGVTTYKSKRFSTFTGDLRRCAAWLAENDCKDVCMESTGKYWIPIYNILERTCNVVLAHPKYVKAIRGEKTDKRDAKWIADIFKHDLVAGSFIPPADIRQLRDLVRYRWKLTNFTTGEKNRAQNCLTVSNFKLDDVFSDVFGKAASAITVRILEKPATKITDVSSFRTKRMKATDEEILAAVDGEMCAEQAEKLRIIRSHMDSLERCKLNLESLILSTAEKYLPQLNLVMTAPGIQSFSAIGIISEIGVDMSVFPTSKHLCSWAGLTPQNNESAGKKKTTRIGRAGAYIKPLLVQCSLNAIRAKQFPEVRNRYLALKKRRGHKKAIIAIARMLLTAIYNMLRKNEPYNSELYRKSDRPPAHREVSVEEAIFILQRQGYWVTAPSTA

SEQ ID NO: 267046 - protein, 384 aa, unidentified
MAKVVIGVDPHKRMNAVVVVNAKGKVLARQQFSNTARGFRELRTFSRQWRPRTWAVEGCNGVGKHLAQRLVAQHETVVDVSTRRAALVRVYAGGNGRKTDDTDAHSIAMVGLQTPGLPVVRPDDRTVTLRLLANRRHELVGLRTQAMCRLHRDLATLIPGGAPRALTAKKAKELLATIRPRDEVGRLRRQLAVDQLAGLVALDRRLAELERQINMVVAATPTGLVRIFGVGPVSTARILGEVGDVARFRSRHHFASYNGTAPAEEGSGGAPIQRVNLKGNRKINHAIHMVAITQVRNDTPGRAYYLRKQAQGKTQKEALRALKRKISDAIYRQLVEDALAERGPGGQTGTTLRSSVAGPTPTAGSSDKPQPGPKPQATPLPASA

SEQ ID NO: 267047 - protein, 412 aa, unidentified
MEAKLVVAGMDVHQKMLAVVVVDDDHPQQVVDQRKFGSGAKELQHLRAWLGGHGVNEVVMESTAQYWRPVWLALERDFVPHLAQAQSNAAPRGRKSDCVDARRLARRFLAAELRLSFMPDAEQRSWRGLSRSKHQKRRRRVPLQNQMEALLEENQIKLSSVVTDLLGLSGYRILKALAQGESDPEKLVPLAANNLKASPEELADALRGAPIPERYRKVLTMQLEELDLIDRHIAELSRELGEALRSQPEAVVRLCEMPGVREDAAWQVIAEIGPEAAVFETPEQMAWWIGVCPGREESAGESKSNRSPKGNRTMRRLLNQIAWGAVRTKDSYFKELFHRLIPRLGVHKAGWAIAHRIARWIWRVLHERVHYIERGPLAMDALAMKRRVARLTRQMRKLGYTIEVKPVAPATN

SEQ ID NO: 267048 - protein, 338 aa, unidentified
MFVIGIDPHKGSHVAAVLDPAERVVDQVRVRADGQQRDRLLAFAARFEPRCWAVEGAAGVGALLAQQLVAVGEHVVDVPAKLSARVRVLDTECSDKTDSHDARSAAIVALRHPRLRIVQREDHSVVLRLLAKRHHELVAQRTRAICRLHAVLGHFVAGGLPRRLSAARAAQELRRIRPVDAVGIERRRQALELLTEIRRADSDLVQLKDRITDAVAASDTTVTGVHGVGPIIAAYLIGYTGDACRFPTAAHYARYNATAPIAASSGPNPRHRLNPRGNRQLNHAIHMAAVTQVRNDTAGRAYYLRKQAEGKSRKEAMRALKRRISDAVYRQLRADATH

SEQ ID NO: 267049 - protein, 373 aa, unidentified
MSAAKCQLNEAEKKLLKEKQSRGVTVVGIDLAARVIQVCYLQKNGTLYNKPKTRDEFIKFLEEPPFTGKILAGIEACGSCNFWARKIKALGHDCKVMPAFQIKAFLSLDTKTDKVDALAILKAVMSVSIKEIGIRDEKNQVLMQLLTVREQLIKQKVQIQNARRAVLYELGEVCSLGENAIDNCAQKLLVSLEESKSEALSEFRACDEVAKANLNNVNTQLNTIEKHLTEFAKSDPVCQNLITIPGIALLSAAVLRIVMGDPNDYPDSRHFAAFVGFAPKVTGSGGKVSVGRTRKSGNRILKRVLYMCSIVRYGQTKKHDPERTSKVATLIDNEDVSNKRIVCSIANRMARVAWTLAKHGEKFDGKKCRLLEL

SEQ ID NO: 267050 - protein, 450 aa, unidentified
MSRPQVIDDEEHERVHERVAAIDVAKDSGMVCTRTPHPSRPGARRSTVWTVTARMKAIRGLGRQLKKDGIEIVTLESTSDYWRIWFFVLEACGLAVQLVNAAQARNLPGRPKTDKLDAQWLARLTEMGLLRASFVPPKAIRDLRDYTRARTRLVHERTRCWQRLEKLLESALVKVSSVASKLTTLSAQDMIKAMIAGQRDPKVLAGLARGRMKARHDDLVEALDGMFDDHHGELAGLLLDQIAFPGTPIAALTARAAELTAAMPAAWGVDPDGTTGPGAGTTPGAPVLNAVARLAEIPGISEDLARTIIAETGLDMSRFPAAARLVSWAGLCPSARQSGPRTRAGKKGQGNGYLRGALGQAAIGAARTDTFLSERYHRIARRRGKAKAQVAVARSILIIIWHLLADPAARFTDLGPGYYQARTDKDKKIKNHIRQIEALLGHPITITNAA

SEQ ID NO: 267051 - protein, 458 aa, unidentified
MNRNRSKAKIDRTMPMVHPHAAAIDIGATMHMAAVRADRTPEPVRSFGTFTTDLHRLVDWFKECGVETVVMESTSVYWIPIFELLDARGFTVFLVNARDAKHVPGRKTDVSDAQWLQRLHSFGLLRASFRPKGQIAELRAYMRQRERLLEYAASHIQHMQKALTEMNVQLHHVVADITGATGLRIIRAILAGERDPKVLTRLRDYRCHSSAETIEKALTGSYRAEHLFALEQALALYNVYHEKASACDARIESVLKELSIDRGRRSDPLPSSGRPRSDQANALAFDVRAALFALLGKDITQIDGLGPYLSLKLIAECGDDLSAWPSAKHFTSWLGLAPSNKISGGKILSSRTRRCGSRASALLRLAAVSVGRTDTALGAFFRRLSARIGKAKAVTATARKIAVLFYNAVRHGMEYVDPGASYYETRYRTRVVNNLHRRAKAFGFVLQPMEPPPGVVVS

SEQ ID NO: 267052 - protein, 377 aa, unidentified
MARAYIGLDVHKEVIAIGIAFAGKDEAISYGKCSGDIERLLTALRRVLKKHGLTKKDIRLCYEAGPCGFALVRHLLRIGYVVDVVAPSLTPTRSGERVKTDKRDARKLASLLRAGELTAVHVPDEADEVIRDLCRARTDAVTDETRNRHRLGSFLLRNGHHYTGRSPWREAHLKYLRELVLNNPVQKTILEEYLQAIDLSVHRVGVLEDHMRTSLESWTRKDFVSALQGFRGFQMVASMVVTSELGDLWRFKHPRQLMAYLGLVPSEHSSGSSRHQGPITKCGNSHARWILIEVAQHYRMSPKVSKELSARQEGLPRSVKALSWKAQQRLNKRYVKLKMRRLHENKIKVAVARELAAFIWELSRVLPETPAKQQAAA

SEQ ID NO: 267053 - protein, 404 aa, unidentified
MLFVGIDWSEKWHDVCLLDENNKVLGRRRIEGSPAGFTRLQTLIAEHAEDPGQVVVCIEKAQGPLVHALRAAEYVIYAVNPLSASRYRERHTLSGGKSDAADALMLADLVRTDRDRQRPLAENSDLAEAIKVLARSHKRLIWTRQQLSNQLRSALLEFYPGALEAFGDDLCGPGALSLLKQASTPERGRGLSRSKISSTLRRAGGRNVEPRAASIQQALRAPRLGQSEPVAQAYGVTVVSLVGVLEGVIANIKQLEKEMGPWLQRHPDAEIYLSLPGLGTVLGARALAEFGDDPNRFHDGRARKNYAGTSPITRASGIRKVVKARFIHNHWLVDTCQLWAFAALSGSPGARRYYDAQRAQGKRHQEALRILANRLIGILHGCLRHHQLYDENIAWPPPVKAAAA

SEQ ID NO: 267054 - protein, 422 aa, unidentified
MKVSRVKIVGFDCAEEEHSAVSLSQDGEFESHMKVVNRRDMIEAALAKLLLAIPSETELVVVVESKRSHGRLVTDVAKDLGIRILQVNTVALNHFRDVEGPPRKDDEWDAYLAARMVFLRTKGCREVTETTNEERALSRLTRSYARLTDDRIQQVMRLRAVLLELAPEMLHRLWTGPKVGSKAIQYLLERWPGFEGLEKAQLRSIEKILHRCRYGSRAPETAKLLRDMARRISIEGEERSAIILELNFLVQQIQVCDVALKNLSTEISKQVENNPIGVKLMEMPGIGIIIAGVLLSELLPVSRTTTEPKSATYSGVTPLSRKTGKTPDSPRLARGVNKRILNAIYMSSVAAIKCSAVDNAYYQKKLRDYAGHPKSHVAAFIALARQRHKVIFKLMTTDARYDKETLIARHLERMEEARKAAA

SEQ ID NO: 267055 - protein, 221 aa, unidentified
MTVKKYIGMDVHQETISIAVMTADGKLVMESIVETKASTILQFVQGLHGDLHVTLEEGTWAAWLYDLLKPHVTELVVCDPRKNALLKEGNKSDKIDARKLADLLRGGYLRSVHHAVRTLRQAVRRDLLAESRKHGATKLLRQIPYIGPIRAALLIALIQTPHRFRTKRQLWTYSGLAIETRDSAQYRYVAGQLQRSKKPQQLRGLNENHNHDMKAIFKSVI

SEQ ID NO: 267056 - protein, 326 aa, unidentified
MEHELHYIGIDTAKEKLDVDVLRPDGRHRTKKFANTTKGHDELVSWLKGHKIDHAHICIEATGTYMEPVAECLYDAGYIVSVINPALGKAFAQSEGLRNKTDTVDARMLAEFCRQKRPAAWEAPHPLERALRALVVRHQALTDMHTQELNRTETAREVQRPSIDAHLLWLEAELKRLEKQIKDLTDDDPDMKHRRKLLESIPGIGEKTSAVLLAYIGLKDRFAHARQFAAFAGLTPRRYESGSSVRGVSRLSKAGHVSLRRALYMPAMVATSKTEWGRAFRDRLAANGKKGKVILGAMMRKLSQVAYGVLKSGVPFDASRHNPVAA

SEQ ID NO: 267057 - protein, 377 aa, unidentified
MAQLLVGIDPHKRSVTVGVIDPVGVAVATASFDNCSEGIAALLAWVARLPGQVLRVGVEGSAGHGRHAAVALVGAGYDVREVPARRTAQRRRARRRPKTDIEDAVAIARATAAEPSLGPVKPGRSHSAAHEELAVVRAHRTMLVGRRQVMLNHAEAVLAALPHEYTDTLPAAKKVWPRLTALTALAGPTASRLGRSASASASAAVAAQLALLVELHGDIGELDRRIRKLDKRMAELITACGSTLLDEHGIGVVGAAALLVEVDDPTRFRSESAFNRWWGGAPVAVSSGEGHQTPVRHRLDLLGNRTINQVIYTMSITQSRTHPDARDYLARKRGEGKTPKEARRAHKSLLGRRIIRRMWNDHHRQHKTPTTPQPDAA

SEQ ID NO: 267058 - protein, 380 aa, unidentified
MKTEVRRFGTTTAELLRLHEWLSHAACTHVAMESTSVYWKPVFNLLEGSFEVVLANAYHIKAVPGRKTDVKDCEWIANLLAHGLIRASFIPPPPIRDLRDLTRHRKSLVRDRVKATNRVHKLLETANIKLANVVADVLGVSGRAMLDALVAGETDPEPLAKLAKGSLTPKVKPLAEALRGRFTSHHAFLLGQMLTQLDQLAALIARCDVRILEVSKRFEPEIQRLQTIVGVGRRSAEVLVSEIGVDMSRFSSAGHLASWARICPGSYESAGKRRSAGTGTGNNWLKTTLLESAWAAAHSRKSYLGAQFRRISKRRGPKRAGIAVAHSILVIAYHMLRNGVDFNDLGADYFDRMNSAKLKRYHLRRLAELGCDVSALAVSA

SEQ ID NO: 267059 - protein, 325 aa, unidentified
MVPERTEAYAGVDVSKERLEVCVRRGREAREGEHTFGLSNDPAGTQTLLARLLEERPVLVILEATGGFERPVAAALAAAGLPIAVVNPRQARDFARATGQLAKTDRIDAQILARFAQAVRPSPRPVPEEEAQALAEITARRRQVVGMLTAENNRLGVATTKAVRKRLQAHVRWLEKELSRIDRDLEEAIEESPTWRENEELLRGVPGVGPVVARTLLAELPELGNLPPKQLAALVGVAPLNRDSGAFRGKRAVWGGRATVRAALYMGALVATRHNPQIKEFYERLLGAGKPRKVALVACMRKLLIILNAMLKNRTPWRFPQILAP

SEQ ID NO: 267060 - protein, 388 aa, unidentified
MIYIGIDIAKFNHFAAAISSDGEILIEPFKFTNDYDGFYLLLSNLAPLDQNSIIIGLESTAHYGDNLVRFLISKGFKVCVLNPIQTSAMRKNNVRKTKTDKVDTFVIAKTLLMQDSLRFMTLENLDYIELKELGRFRQKLVKQRTRLKIQLTSYLDEVFPELQYFFKSGLHQKSVYALLKEAPTPETIASMHMTHLAHILEVASHGHFGKEKARELRVLAQKSVGVNDSSLSIQITHTIEQIELLDSQLFHTELEMANLVTCLHSVIMTIPGIGVVNGGIILGEIGDIYRFSEPKKLLAFAGLDPSVHQSGNFQAQRTRMSKRGSRVLRYALMNAAHNVVKNNATFKAYYDTKRAEGRTHYSALGHCAGKLVRVIWKMLTDEVEFNLE

SEQ ID NO: 267061 - protein, 377 aa, unidentified
MKNVRFVGLDVHAETIAVAVAEADGEVRSLGLIPNRPESVGRMIRKLGKPEQLRVCYEAGPTGYVLYWQLTQLGVKCEVVARTLVPVKAGDRVKTDRRDAAKLARSYRAGDLTAVWVPDAAHEALRDLVRARWAAKRDQLRARHRLSKFLLRHGRRTPEGVNAWTDKHLQWIKSQVHFAQRAQEITLDDYLHEVDHVAERIARLERSIDTAIESLPVKMRAVIEALQSLRGIAQLSAVSIMAEVGEVSRFEHPRQLMGYSGAVSREHSSGERIRRGAISKAGNAHLRRIVVEAAWAYRHRPAVGKTLAARQRHSSAAVTELAWKAQQRLHQRYVRLMGRGKSKQQTITAVGRELLGFVWAIGVHVEREAKVPLRQAA

SEQ ID NO: 267062 - protein, 414 aa, unidentified
MIKFSVYIGIDWANDKHDVCVQVANSSTRKFAVIKHSPKSINEWITSLHKQYKGQIAVAIELSKGPIVYALQKFDFVTIHPVNTSMLAQYRKAFSPSGAKDDPTDAELALDLMLRYPNKIKALKMESESVRKLTYLVEQRRKLVEDKRRFSNRLIITLKEYYPHLLDWFSHRGSGMFCDFITRWPNLQKLKRARADTLKKFFGSYPGRTAAYSVKRIQSISEAEPLTLDNAVIESHQLLAVALANQMLVAVKVIKVFDREISELFNALPDADLYNSLPGTGPCLAPRLLVAIGENRSRFNSASEIQMYAGIAPVTVRSGQKSWIHWRYQCTKFTRQSFIEWAAKSIRQSYWAEIYYQQQREKGNTHQAAVRSLAFKWIRIVYRCWKTKEPYNEAKYLKALSDRNSPLLFKEKAC

SEQ ID NO: 267063 - protein, 447 aa, unidentified
MKRKQLPAPEEIPDAEHELVIERVCAIDVAKAFGKVCVRTPRERRRVSKVWDVDATTGAVIELADQLTELGIEKVTVESTSDYWRIWYYLLEAAGLDVQLVNARDVKNVPGRPKTDKLDAVWLAKLTEKGMLRPSFVPPQPIRQLRDYTRLRVDLTRERSRYWQRLEKLLEDALIKLSSVASTLDTLSARDMIEALIAGERDPRRLADLARGRMKTKRPALIKALDGRFDDHHAELVRMLLDQIDTLTAQIGTLTTRIDHLLVAAEPGEQDGAGNPTGDTAARSGLSTVERLQEIPGIGSTGAQIILAEIGLNMTQFPTPAHLVSWAKLCPRTVQSGPVTRGGKTGKGNPYLKGALGEAAAAAAKTDTFLGERYRRIVKRRGKLKALVAVARSILVIVWQLLSDPSARFCDLGSDHHVSRINIERRMRNHIAQLAAMGYRVTLEPAA

SEQ ID NO: 267064 - protein, 328 aa, unidentified
MENEIHFIGIDVAKAKLDVDMLRPDGRHRSKKFANTPGGHDELVSWLQGHQVIHAHICMEATGTYMEDVAAHLSDAGYQVSVINPMLSKAFVQSQGIRSKTDTVDARQLAYFCREKRPAIWEAPHPVERALRALVLRHQALTEMHVQEQNRRESARDVQLPSIDMHLLWLDTELKRLEKQIKDLTDDDPDMKHRRKLLDSIPGIGSKTSAVLLAYVGLKERFREARQFAAYAGLTPRQHESGSSIRRVSRMSKMGHVSLRRALYMPAMVTLYKTEWGREFRERLEKNGKNAKLIIGAMMRKLAQVAYGVLKSGRPFDATLHTKNACMA

SEQ ID NO: 267065 - protein, 336 aa, unidentified
MTLYCGIDLHSNNCFLSVINDKDKRLLEKRLDNDPVLIVQTLKRYRARLQAVAIESTYNWYWLADALQDAGFKVRLVNTAQIIQYQGLKQTDDRYDAFHLAHLMRLGILPTGHICPRDERGLRDLLRRRMFLVQDRSRHIISLKGQYQRQTGQTLSTNAIKGKRFVLPIVGDMNVQLAMTSNLNMVKVLTQQIRTLETVILRQVKRVPTFELLKSTSGIGDILAETILLETGDIRRFKRAGNYASYCRCVESKRISNDKKKGVGNRKNGNKYLAWAFIEAANFAKRHNPKARAFYERKKAETNNIIALKALAHKLSRACYHIMKNEVAFDSGKLFA

SEQ ID NO: 267066 - protein, 321 aa, unidentified
MERILGIDVGKAKVHVALLRDGFKIKSHTFENAASGFEQLAKWLGKQNFEQVHACMESTGGYGEALALFLTDRGHKVSIVNPSRIKAFAGSELLRTKTDKVDAALIARFCQAHAPDPWTPPTENERLLQSLVRRRTDLDRIRSQEAARLEAPTLPTTMRTSIEHHLTFLDREICEIENRIRKLVKGDPELRRRSALLESITGLGQTTAATVLGEIPHIEEFRDAKAVAAYAGLCPSHFESGTIQGRSRLSKVGNAHLRRSLFFPALVAMRWNPLLKPFAERLRQRGKRGKTIVVAVMRRLLVLAYGVIKSGQPFNAHYAHA

SEQ ID NO: 267067 - protein, 366 aa, unidentified
MSHSHAPVAPSPTVIVGVDTHKHIHVAVVIDALGARLASHSVPADRSGYAALVAWARSFGTVEAFGIEGTGSYGVGLASHVRRHAMRVVEVSHCDRRKRRNNGKSDTIDAETAARSVLAGIATAVPKTADGSAEMVRQIKVARDTAVKAKSAAIITLKTLIVNAPGDVREALEPLTDRKLIDRCARLLPGAIVDTVASTKHALRALATRWLTLSSEIDTHDEALDIITKAAAPTLREAFGIGPDSAAEMMIVAGDNPTRVRSDAAFAKLCGACPIPASSGITHRHRLFRGGHRQANAALYRIVTVRMRWHQPTLDYVARRRAQGLSKKDIIRCLKRFVAREIYHALISDHRAAVVVAAQHAADCHS

SEQ ID NO: 267068 - protein, 423 aa, unidentified
MSERTIACEAPCISMTTDSAAVRATKGNLMKPWIEMTHYAGFDWARDHHDIVIVDRQGQIVADFRIEHCLAGWQAFRDQVKPYPALAVAIETNQGTAVDQLLALDCAIYPVNPLSAKSYRERKVPSGYKTDRLDAWSLAEALRLDGQQWKALQPLDPLIQQALVEYYPAALQAFEDWTQPFCWDFIIQFPTPEALAAAGRRRWEKFLHTQKLWRPETASKRMEIFQNACQFCGSAAVTSAKSLLALSLAKLLKALQLQLDQYRRQIEALFKQHPDHDLFGSLPGAAQTLGPRLLGEIGGNPQRFEDTEALQCLAGTAPVSFQSGQIHRVHVRYQCNKILRHTIHLWAQCSLRVCPWAEVYYRQKRAEGKSHACALRCLGQRWLKILWRMIQTRQPYDADLHARNQKQHGSWVLALLRPNPKAG

SEQ ID NO: 267069 - protein, 338 aa, unidentified
MNIVFLGIALAKNVFQICGLNQAGKPVYTKRTGRKELLQMLANIPACLIGIEASTGAFYWQREFEKLGHNVKVISPQYVKPFVRGQKNDGNDAQAIAVALMQPTMHFVPPKSPEQQDIQALHRARQRIVNHRTATVCQIRGLLLDRGITIGAAVSRVRRAVPLILEDAENGLSVRMRSTIAELYDLFNDLERRIHFFDKEIETVFRQSEACQRIAKVKGIGPKTATAVVAAIGKGTEFKNGRHFAAWLGLVPRQHSSGDRQVLMNMTKKGDKHLRTLFIHGARAVVRVAANNNDSHMNQWVNQLKERRGFNKTTVAVANKNARIIWSMLRNETEYQVV

SEQ ID NO: 267070 - protein, 390 aa, unidentified
MLLLGVDIAKLNHVASFIDSSSGELIFSNFKFQNNILGFSSLFEKISKFSVSEIIIGLESTGHYGENFINFFFQKGFKIAVINPLQTSHLRKANIRDSKNDRLDSINIAKALLFGKHTYVSQKNLTNFSLKKLTRFRKSLIKQKTKTKIQLVSLLDIIFPELQYFFKSGVHSNAVYTLLKKYPSTEKIAALREKSLFSILNKASKGHYKEQHASQLKSLAKSSVGIKDTSISMHIPQLIQLIEMLDSQIKAIEKEIDSFIDEESPILTIPGINTVAAASILGEINDIENFDSSSKLLAFSGLDPKIRQSGNFNASSCRMSKKGSSYLRYALIFTAFNLFRNSATFNRYYLSKRAQGKSHYSALGHTAHKLVRVIYTLLKKNISYQEDFIS

SEQ ID NO: 267071 - protein, 423 aa, unidentified
MENTAARKRKQVPEGYLIIGVDPHKKRHAAVAITQDFTTRDKFKFDNTREGLETMLSRVRTEMVKSGCRGVMFAIETGGHYWRNIAYYLDEQGIPFRFINQFTLKRRREGKDLNRRKNDYRDSEVAAQLLCTGEFTESKIPQGVYAELRSAHNAYRRVVKERTRITNLVKGLLDGLFLEFTHVFKDPCGLTAVSVLSTCAIPRVIAGMTEDEFVATIEARHKGRLMRRKLRALHYSARTSIGIDAGAQSVATEISFLVEKLELIRRHIRIMEGMLVRLVDETEEGKYLLSIRGLNYIAVAGLLAELGCFKLYRSAKQMIKMAGSNPTESESAGKKRSKTPMSKQGRPLLRYCAWTSVIPMLRFNPDFRAWAKQRRERPAHANPLNGREVVGAALNRLLRLAFAMVKNQTYYRVSKPELTLVAV

SEQ ID NO: 267072 - protein, 357 aa, unidentified
MNTSNSKLLNFSQCPIYVGLDVHKKSWSVTLFSDEFELKTFTQPPKPDVLVNYLNQHYPGAQFKAIYEAGFSGFWVQRELSKLGICCEIIHPADVPTSDKEKRQKTDKMDSRKLSRVCKSKDARGIYIPTEEQQEERNLLRVRQKIIRDTTRVKNRIKFYLMYQGIDTSFFEGRKWTRKYISLLKEIELVTPSGTFALQTYIEELDNLEKQSSKLDLGVRELSKTDSYRENVELLCSVPSIGITSAMIILTEIGEITRFKTFDDLCSFFGLIPNTHSSGDNERVGHMTRRGNQFLKSIIIECAWTAVRKDPALLQYYKELTVRMNGNKAIIRIARRLLSRIRHVLMKKEKYQIGILK

SEQ ID NO: 267073 - protein, 388 aa, unidentified
MQVAADRADASTAIQIDLPAIFVSLELSRSTWLITSLSPGAREKMSKHSIRAGDVAGLLVRLAQLKEKARARTGRDFPIIAIQEAGLDGFWIHRVLQSEGIESHVVDAASILTSRRRRRAKTDGIDGETLVRTLLAYKRGEPRVCAMVKAPTPEEEDRRRICRERKTLVGERVEHVNRIKGLLFAQGVSNYEPLKRNRRARLEELKTGDGRPLPAHLKAQIGRELDRLELVLPQLKAVEAERDALLKPVSEGCSTPASMLAQLKGMGPEFTAILWSEGLFRSFSNRRQLAAYAGLAPTPWQSGSVAHEQGVSKAGNPRLRTTMIQLAWLWLRHQPTSALSVWFRERVQSKGGKIRKTTIVALARKLLVALWKYSTSGVVIEGAAMKTI

SEQ ID NO: 267074 - protein, 479 aa, unidentified
MFHNKGNRWPDVTPIGILTDTPEDKQSAIPLLLYSIKQVDTIIMIAVASPTKMSLISADGRYLLDTFKEVLFIMISVGIDVSKGKSTVCAIKPYGEVLMTPRNFKHTKDDLDSLVKQLSRFREEIHIIMEATGNYHLPVYQYLKSKDYQISVINPLEMKRYRCQGIRNPKTDKIDSYIIAQYGVDYWYRFKPNDDMDAKRQELRLLGKQYTSYMRIRTIRCQDLCHILDRTMPGVYGFLDDFNRDNGQDKLCDFAEKYWHSDNITKYSEKVFIERYLSWLKKKGYRQNENEAHQLYFIAKNAIPTLDSKLSSTKLLVQEAVNVLREVDSSLYDILNQLKVLSKDMPEYNTVLSMKGIGETLAPRFIAEIGDPRRFHSAKALIAYAGIDAPPYQSGQFTGTKRHISKRGSANLRKLGYELMDSVNKHKSSYYGDPVCEYFMKKRNEGKPYRVAMIAAFNKFLRIYHSCVSAVLNDHDKNH

SEQ ID NO: 267075 - protein, 341 aa, unidentified
MNTTPQPTTPSLVSSTAHLGLDVSKDTLDACLLIENKRHEKQFANNPAGHRQLLRWAQSTAKETPCHFCLEATGPYSQSVALFLVEKEQTVSVINPARIRFFGLAQNQGNKTDKADARLIAQYGQRQNPPPWRIAAQEVRVLQERVRRLHALSDLAAQEKNRAQAPGQGKAVLASSKRVVGALEKELLRLKREVRAHVKAHEDLHRDCKLLQSVPGIGEITAWDILAEMPDVQEFESAQSVAAYAGLAPREQRSGSSVRKATTLSKRGNSRLRKAFYFPAVSAMQWNPLVKAHYERLREKGKPKMVALAACMRKLLMICYGVLKHQKPFDPQWVVQPAGTG

SEQ ID NO: 267076 - protein, 397 aa, unidentified
MKEHKKAKAKTKSELSKAIREREPNAAGIDLGAEGIWVAVPADRDANAVRRFEAFTRDLVAIVQWLVGCGVRSVAMEATGVYWIPLYQLLEDAGLKVCLVNARHVKNVPGRKSDVRDCQWLQYLHSVGLLLGSFRPAQVICATRSIYRYRQNLISMAAEHIQHMQAALEQMNIKLHHVIDDLTGVTGQAIIAAILSGQREPVQLAKLRDKRIQACEEKIVKSLEGDWRKEHLFVLAKAWAQYQEVKKQIQDCDRELLEYTSELEACTTVSKPAKVVHLKAELLGAEPVSNPLPKKKARTKTSKNQPEGPWQQELERFFGVDLTVIPGISVLTGLTLMTELGNDLRAFKTQHNFASWLCLCPDKQSTASSDPPQPEPSAASLTHGRLFSTPQQKLLRR

SEQ ID NO: 267077 - protein, 463 aa, unidentified
MGKGSGTTRGDRRRNARRERLRAVLPRDGGVIGIDLAEDKQAIAVVDHDVRVLARKTVRVKAFRLGEALDWAVGQARAKGFAAVTVACEPTGARWLQVQRLCAERGLPLVCIQPLVSHIAREQQDYTTHKTDEADCVLIARLAIELHCYLPEELEEAWAELRHLGRRRAQLITSATASVQRVRDFLSVAWPVAVEACARPFESVTWVAALQVVASRCAGQPEELASAGLEAFTALIREAVPGWGGKRPSGPVCRAVFAALTSTEGVVVTHRRGLLRRCAQELGDLQRTRAQLRDTEAGMAAALAGLGLSRLADIPGLTATGAAAILAETGDPRRYDSSSSLVKHAGLSPSDNASGAFAGQARISRRGRPGLRLAVWRAIWPLLIHNPVMAAKYAAMTEAADAAAAAAGQRPTAAQAAARTRRARARVACAASLLRWIYSMVVHGTSWDPAVASGAASRPAEAA

SEQ ID NO: 267078 - protein, 343 aa, unidentified
MYYIGLDVHKKTISYCVKDAAGCVLQEGKIGSTRCELDVWIRTLPQPRMIAMEATIFTGWIYDHLLPHAEKVKVAHPLMLRAIAAAKKKNDRIDAAKIADCLRCDFLPECHMASTAIRDRRRTLRYRNLLVKQKVQMMNRVSGLLMETGVSYNKRRLHKVGYFAKMMATNEEVSDCVRPLLRLSREHIDRAQRLDYALVSSLERDPLLAERLRRLRTVPGVGPITALTWALEIGDFTRFTSNKQAISYCGLCGDENSSADKVMRMPISKQRNKHIQRVLIEAAKLATRESPELAMIRARELERGNPNRATLAVARKMVIYMLAVERRQQDWVPAEQFSRTAAA

SEQ ID NO: 267079 - protein, 416 aa, unidentified
MSLALPEALFFTGIDWAAETHAVCVMDARGVIVAEFTIEHSSDGIAALIGRLARHGQPGGMPVAIERPNGRLVDLLLEAGHPVVPVSPNAIKTWREGEVLSGAKSDAGDAAVIAEYLRLRQHKLKTAAPYSDETTALRTVVRARDDLVEMRVAATNQLSALLEAHWPGAKAIFADVESPVSLEFLTRYPTPAAAAHLGEKRMAAFCIKHGYSGRRTAAELLTRLRAAPAGTTGAAVTEALRDAVLAAVGVLTALNASVKTLDRSVAAHLGEHPDGAIFTSLPRSGQVNAAQVLAEWGDCRQAYDGPDSVAALAGCTPITSQSGKHRSVQFRWACNKRFRVAMTTFADNSRHASPWAAKTYSDARASGKDHPHAIRILARAWIRVIWPCWLHGIPYDPASHGAAAALAKQTAQPIAA

SEQ ID NO: 267080 - protein, 402 aa, unidentified
MNSVGIDISKGRSTIAVMRPFGEVVISPFEVRHTDSELSELARRLKSLNGETRVVMEATGNYHAPVAKQLHDAGLYVSVVNAKLVHGYGNNDLRRVKTDRKDAIKLANYGLDRWLTLPRYIPEENTRLLLKNCYRQYRQYSKVQTVLKNNLISLLDMTFPNANRLFNSPARADGSEKWVDFVAEFWHCECVSERPLKSFVNKYWRWCRKHGYNFSEEKAHAIYDEASGHIGVMPKSETTKLLVEQAVSQLSATSAALAVLKQEMQSLSSQLPEYPVVMDMFGVGPTLGPQLIAEIGDVRRFYSKKALVAYAGIDAPPNDSGDVIGRHKSMSKVGASSLRRTLFLVMSVYLQNSPPNEPIYQFMNRKRAEGKPYRVYMMASANKFLRIYYATVKAYLEILEQI

SEQ ID NO: 267081 - protein, 347 aa, unidentified
MGAYIGCDAHKRYSIFVAMTDGGRAGSPVRVEHAREMYRAFLRGLPAGSLIAVETVGNWYWMIEEMERAGHEPKLAHAGKAKLMMGQINKTDKLDAKGLATLLRNGTLPSVWIPPGELRDQRELSRMRMSLVRVRTMFKNRIHATLAKYEIVIDEVSDIFGVTGQKILAAHLEELPPYTRESVLTQLAVLDDAAERIGSCEEEIKAIVKETPEMQLLRTLPGVGPILAVVIALEIGDVERFPGPDRLASYAGTVPRVKSSGGKTSFGKVRPDVNRYLKWALIEAANIINMNRAHSAGRHVVRLYLRVRERRGHAKAIVAVGRHLAEAAYWVLKKNAPYREPISSNQE

SEQ ID NO: 267082 - protein, 343 aa, unidentified
MYIGLDVHKKLSYYSMIDGEGTEIKRGRFPTTCEGLDEFANELPEGAKVAIEASTSGIFAYEYLDEGGIEVHLAHPVYVKPFAKKHVKTDKVDARVLAQLLRMDYLPESYVPGKEIRDQRVMIRHHASLVRLRTSIKNRVHALLAIEGIQTSKFSDLFGKRGMEFLKGVKLRQVRREALDNYLEVLKALEERIEEMEAILKERAKITDEAKWLMSIPGIGYHNALLILSELGEIERFSNPRSMVSYSGLAPKVEQSGDYTRYGHINKHSNGFLRWAFIQSARAAVRSSKPNRFQRIYNKIKARRGEKVAIVATARHLAESVYWVLTRKEYYKENRAIRASYFS

SEQ ID NO: 267083 - protein, 409 aa, unidentified
MSVTQQLDGRPPTGGVDWSKDDHAVSVVDSDGRQSLRFTVAHTAAGLREMTRRLLRAGVAEVGIERPDGPVVEALLAAGLTVYVISPNQLKNLRGRYGSAGNKDDRFDAFVLADTVRTDRLRLRALQRDTPATVALRATCRTRKDLVGHRVALTNQLRAHLQTAFPGAVGLFADLDSDISLRFLTRFPSQDKADWLSPVRMTAWLRAAHYCGRRPGAAVHAHLAAAPRGATGEHGAALAHITLALVAAIRAVLAQIDALEAHIAEQLALHPDAAIFQSLPRSGTVRAARLLAEIGDARGRFPTPEALACLAGVAPSTRQSGKIKTVTFRWAADKQLRDAVTDFASDTRHANPWAANLYRQAINRGHDHPHATRILARAWLHIIWKCWQTNTPYNPDKHGALQALQQPAA

SEQ ID NO: 267084 - protein, 340 aa, unidentified
MELYTGFDLHANNSYVGVINADGKREARKRLPNDIGQILQFLEPYKAQMVGIVVESTYNWYWLVDGLMEAGYQVHLANTTAIQKYSGMKHSDDKDDAFWLAEMLRLKILPTGHIYPKDERPIRDLLRKRGHLVKLRTSLILSLQNIIDRNCGTRISVNDIKRLKENKVTPYMEGNQDLEFVGQVSKDTIDFLSAKIRALESFVEDRAKLNDSYENLLTIPGVGKILGLTIMLETGSIDRFEKVGNYASYSRKVSTKWTSNEKKKGRGNKKNGNKYLAWAFSEAAEFARRYDQQARGYYNRKLQKTNFMVAHNALAHKLARAAYHVMKEQTPFIPARLFAS

SEQ ID NO: 267085 - protein, 452 aa, unidentified
MKNKSGFPILYPNAAGIDIASREHYVAVPPEADPQPIRCFGCFTEDLHAIADWLLACKVDTVAMEATGIYWVSLYLVLEQAGLHPVLVNAKHVKNVSGKKTDVKDAEWIRQLHSCGLLRAGFQPDAFTRTLRTLMRHRTNLTQMAATHIRMMQKAMEQMNIKLHQVIADITGKSGQAIIAAILQGERRPEVLVELLDGRIKASRETVLRSLEGVYKAEHLFELQQSFELYEVYRRKVQQCDEQIGAHLTTGIYMVPAQQANNKEQQDKAVKKRKSKGNKNNLGFDATALLEQLAGVDLTEIFGITDTNAVEIISEVGLDMSKWPTPKHFTAWLNLAPNNKVSGGKVLSTRTSKTKNRAGQLFKMAAYAIQRSDHWLARFYHRIKARRGAAKAITATARKIAVIFYKLLREKTAFQPLSIEQYNQAFKEKQIRKLTKQAYQLGLVLVPNQIVT

SEQ ID NO: 267086 - protein, 357 aa, unidentified
MGKATGNLARVTRIGLDLAKTVFQVHGVDAKGEVVIARKLRRGTMLEFFGRLAPCMVAMEACGSAHHWGRQLVALGHAVNLIPPAHVKPYVRRNKTDAADAAAICEAAMRPGQRFVALRSIDNQAAVMRHRIREQLVGQRTALLNALRGHLSEIGVVTAQGAQHAYRLKRMLADGADENGEIVIPEHVRVALAPLAAQIDALDQAIAAIDDKLIETVKADEKARRLMTIPGVGPVIATAVVATVGEVSSFASGREFAAFLGLTPRQHSSGGKERLGRITKMGDRYLRKLLVVGATTVLHHAIGHNDSLRCWARQTLERKGGRAGFKLTAVALANKLARIVFAVLRSGEVYDDRPVAA

SEQ ID NO: 267087 - protein, 366 aa, unidentified
MHDPTTNTVSVGLDVHAASVRLAAVRADELLDEHTLPYDHAAVAGVIGRWPGARVCYEAGPTGYGLYRYLTARGIACEVVAPGLVPQRPGERVKTDSRDARKLARLYAGGLLEPISVPSPELEAARDLVRAREDARLDRMRDRHRLSKFLLRNDRRLPFKSWGAGRRKWLGEQAFEQPARQQTFDSYLLALDLVDRRAEALEREIAEIAETGPWAELVGRLRCLRGIDTLTALGIVAEIGDFSRFRIAEELMSFVGLVPSERSSGEKRRQGSITKAGNAHLRRLLVEAAWHARLRPKVSYELARRQAGQDPAVLERAWRCQQRLFKRWRRMAARGKPNQKIVVACARELAGFVWAIGSNQPLRAEG

SEQ ID NO: 267088 - protein, 406 aa, unidentified
MELTAIHKRVIGLDVHQQQITACAMVEQADGSIETEHRQFGAFKRDRRALAEWAQSIAPDEVVMESTGIYWKSPYAALEHVGIYAKVVNARHVKNVPGRKTDIGDAQWLAMLSRAGLLRGSFVPPEQMRQLRLIARQRQKLVSMLSAEKNRLHKALTDGGIRLGVVVSDVHGKSARAMVKALIEGQPPHDVLRLASNRLKTPRAEILDALHGELSDSHRFVLHELMLHIEDLEARIARFDTQLLAGLEEEQPVLQLLQTIPGIDLIGAAMLLVEIGTDMTAFGSADRLASWVGVCPGNNESAGKRKSGRTRKGNPYVRRLLCECAHAASRTASVFQAKYTSLAIRRGHKRAIIALAHKLLRTCYFMISRGEYYRDSTIDYEEMAVKRNAPRWIKALKKFGYMPQLA

SEQ ID NO: 267089 - protein, 368 aa, unidentified
MNKRITTFVGLDVHQDSIAVAVASVRREEPHFVGTVAPQWAALSKALSRLGKRQELQIVYEAGPCGYTLARQLRTQGYACEVIAPAKIARRPGDRIKTDRRDALLLARAARAGELVSVLIPDERDEALRDLSRTREDAVRARLKARLQLKALLLRHGRRYSGRSSWTEAHERYLAAVSFTHSAQDIAFAEYRAAVRDTHERVERLTEALRAQLEHWRRRPVVEALMTLRGIDLIAAMTLTAEIGDFNRFTRARELMGFLGLVPSEYTSGATRRQGPITKTGNSHARRVLVEAAWNYRFPARISRALQLRQQGQPKSVREIAWRAQLRLARRYRHLAARKLAHNKICVAIARELSGFVWDIARQVKLAI

SEQ ID NO: 267090 - protein, 395 aa, unidentified
MFIVGIDIAKRSHEAIIIAEDGQVVRKAFSFRNNCTGYNLLLEQVRRLTLVKSQIVFAMESTAHYWLALYARLLKDGYAVMVLNPIQSHSLRELYIRKAKTDARDSLIIADLVRFGRCKASNVPQDKILALRELCRSRAYLVDMAADLKRKLIALLDRIFSEYESLFDSVFSKASIAVLSKYSTPQKAKNAHLGKLTDILMESSNGHFGEWKAHQLKEAACSSFGIDDSGGVYSTLLGMFLEQILSLTAQADSLEKQISVFFQEFNNPLTSIPGVGTVLAATILSEIGDITRFSSADKLLAYAGLDPSVKQSGEFKSNQNRMSKRGSPYLRRAIWLASTVAVHRDPMFQTYYEKKISEGLHYMNVIGHVSRKMTAVIFAVLRDGQPYQPILQSAG

SEQ ID NO: 267091 - protein, 368 aa, unidentified
MEKCITYVGLDVHKNSIAVAFADEYGAEVRSYGTIGPDPASLDKVARRLVSQGKQPRFVYEAGPCGYKIYRHLRQQKFECMVAAPSLIPKKSGDRIKNDRRDAMMLARLYRSGELTPVRVPSAEDEAMRDLSRARGDAKKAERKARQQLGAFLLRHGFRYSGLSHWSLAHWRWISDIKMDHEAQQFTLQEYVDTVRSCTERVDRITEQIRLLVGKWRLGPVVEALQALRGVSLVVAATVVAELGDLTRFDNPRQVMAYLGLIPSQHSTGEKIKLGPITKTGNGHARQMLTEAAWSYRMPARVSRRLRDRQQNLPEKVWQIAWKAQVRLCKRYQRLVAKGKLTQVAITAIARELAAFMWAIARTVEVGP

SEQ ID NO: 267092 - protein, 339 aa, unidentified
MKLYGAIDLHSNNNVTVLIDEQDQVVYQKRLPNDLPLIAQQLSGYQDALQGIVVESTFNWYWLVDGLMDQGHRVHLANTAAIQQYEGLKYTDDHSDARWLAHILRLGVLPEGYIYPKEERAVRDLLRKRSQMVRQRTTNLLSIQNLITRNTGSSIRSNRIKTLDTEQVDELLPNPDLALAVKANLAMINCANGQIDILERTVIDRIKLREEFSFLKTVPGIGQILALTIMLETGEIKRFPTVGDYASYCRCVGSQKLSNGKKKGSGNTKNGNKYLAWAFVEAANFAVRYSSRIKSFYQRKKAKSHGVVAIKAVAHKLCRACYCIMKDRVPFDVAKAFAG

SEQ ID NO: 267093 - protein, 433 aa, unidentified
MITTQFTPPQAALVAIDIAKNRHEVLIDPGAGMRRRRLSVLNNRAEHDRLVATLCDLGKPVIVGFEPTGNYHRVLAHRLISAGFETRLISSMALARTREALHNGWDKNDPKDAQVILHMLRIGATTVYSDPGYGRLNDLQELSKTHDMVSRAKTELWHRLLTHYMPLYFPEAERFHGNSRSDWFLALLEQFPTPASITVLSKEAFIEAAWDLVGRKVSKTRLLADIYETARSSTALPVRLNSPAIAMFRMVLAEGRSLLRQRDQIEAHAEALLLDDPDSARLRQLPGIGPIIALTILAEAGNLRRFGHHRQFLKFCGFDLATHQSGTFRGQTKLSKFGNARLRRSFWLAAQVAIRQRDNSFREHYGRYVAKDPENKHLRRKALTAVAAKMARVAHAIVRSGADYRPFFEQRCQVEGLRSVSAVRARFTPLPCR

SEQ ID NO: 267094 - protein, 347 aa, unidentified
MRFYNTQHPFYCGIDLHARMMYVCILDQSGETLVHRNMKTDPEAFLRAIAPYRPDIVVAVECLFTWYWLADLCAEEDIPFVLGHALYMKAIHGGKAKNDRIDSQKIAVLLRGGMLPQAYVYPPEMRATRDLLRRRLHLARKRGELLAHVQNTNSQYNLSAIGKNLAYKANRDGVAERFADPAVQKSIAVDLALVSHYDALLRDVELTLLKTAKQHDANTLYLLQTVPGIGKILSLVLLYEIHPIERFPRVQDFASYSRLIKCAKESNGKRSGTSGSKIGNAHLKWAFSEAAVLFLRDNPEGQKFLSKLEKKHSKGKALTILAHKLARAVYYMLKRKVAFDMKRFLND

SEQ ID NO: 267095 - protein, 354 aa, unidentified
MSRSDDTTPFPSCTIGLDLGDRSHAWCALDAAGQVVGRGTIGATPDAVGALSTAHPGARVILEAGTHSRWVSRQLTAAGHTVVIANPSKCYQGRRRQRNDRRDAEFLARQGRADVMLLHPITHRGPTTDAPLALLRARDQLVAARTQLINTARGLVKPTGTRLPACSAESFGRQAAAHVPAPLRAVVGPLLETVMHLTTQIRAYDRQITHQLLPQYPVAQRLAAELQGVGPLTALAVVLLIDDPTRFRASRDVGAYFGLVPRLDESGAATPQLRITKTGDALGRKLLVSAAHYILHRGPDTALRRHGEALMQRGGPNARKRAVIAVARKLVVLLHRLWGTGAAYDPTRGLAAAA

SEQ ID NO: 267096 - protein, 343 aa, unidentified
MQSISTIGLDIAKSVFQVHGVDAAGQVVIRRQLKRRFVLFFFEKLPPCLVGIEACASSHYWSRELRALGHTVQLMPPAYVKPYVKRQKNDSTDAEAICEAVTRPNMRFVPIKTIEQQSCLMLHRVRHLFIRQQTAVINSIRAYLAEFGVVAPVGRRGVEQLLEVVADPAECRLPEVARACLAALGSQLQALKAQILDFDRRIIAWHRSNATSKRLDAIPGVGPALATALVASVADANAFRSGRDFSAWVGLVPKQNSSGGKDRLGSISKQGDRYLRSLFTAGALAVIRYAKIHGARHRPWLTALLARRPTKVAAIALANKLARMAWAMMARNECYREPAALTA

SEQ ID NO: 267097 - protein, 342 aa, unidentified
MEHYAGIDVSLEYSSVCVVDASGKIVREGKVASEPDALINWFRSLGYELSRIGLEAGPLSQWLFAALRKAGLAVELLETRHVRKAFEAMPVKSDRNDARGIAQLMRLGWFRPVHCKSMGAQEVRAVLTARKLVQTKLLDVENSLRGILRGFGLKVGKTTARSFAGRIHELVKGHPNLEAIGEALLVVRAVLLREFNAFEKRVRAMARSDARTKLLMSTPAVGPIVALTYASAVDDTARFKSSKQTGPHFGLTPKRYQSGETDYSGRISKIGDASVREALYQAAHVMLTKPVKGCSQLKSWAMRIARRAGMSKAKVALARKLAVILHRMLANATPFNAAAAAA

SEQ ID NO: 267098 - protein, 357 aa, unidentified
MKTTTRYHIGIDAHKRFSQVHVLRDDGETVWKGRIDDNDPALFAGLVHQLGGPCRAVFEASMNWHVLYDTLVATPGMVEVIMAHPFKVRLICDAQLKNDKVDALRLAQLLRLDMVPRAHAASAAARLAKELVRQRACWVGMRTRLRNRTHRLLGGIPGGVELPHCSDLFGAKGTAAMRKLELPEPADCQLPQNLEMLAALQVRITELERRLEALCKGNADMTLLRSMPGIGKVLACVIGCEIDNIDRFPCKARFIGYCGLAPTTRGSAGAFHQGRMISHCNRWLKWAFIEAAWVAVGCNGYFGARFKRERERGKKANTAITIVAHRMAQIAWELLTQRRAFQSRVFARHESFPSAPS

SEQ ID NO: 267099 - protein, 399 aa, unidentified
MFYRPPLDIRVSVDVGCKSHQVAVGLSTGEVIDEFSINHQPDGFRTFFAKLEQLEQQYQCPVRVAMEGYNGYARPLDSMVLARGWQLNNINNLKLARFKEIFPGAAKTDVIDARRGLELFQLMDHLPTAKDVLQVVAEPPRENQMLKRLSRRRRRLVNERVRVLNNLQADLQAICPSLLALTGDAGNIWFLQLLTHTDDLRKLSRLHLKTLRTIPGIGAAYASRIRQWQKQAQFSTETEWVGEMIQQDAARILELHGQIKALEAKMAAAVAQSFIAGTLATLPGFGPICTAELAGEIGHEARFVKEASLALYLGMATLDNSSGQYRGTKIPRQVNSRAKAAMMIAVDRHRKQIPASQRYYEKKRAEGKGHNQAVRALGRHLCRVIFKMLKERRAYMPPN

SEQ ID NO: 267100 - protein, 343 aa, unidentified
MQTVTTIGLDIAKSVFQVHGVDAAGQVLIRRQLKRRTVLAFFEKLPPCLVGIEACASSHHWSRELQALGHTVRLMPPAYVKPYVKRHKNDATDAEAICEAVTRANMRFVATKTPEQQSCLTLHRTRHLLIRQQTSVINAIRAHLAEFGIVAPIGRNGVEQLLGVVADANDKRLPEVARACVAALGVQLRMLKAQILEFDRMISAWHRSNETSRRLDKAPGIGPVLATALVATVADPRTFRSGRNFSAWIGLVPKQHSSGGKDRFGHISKQGDRYLRGLFVAGALAVIRYAKIHGTKHRPWLTALLTRRPTKIAAIALANKIARMAWAMMVKGERYKEPVALAA

SEQ ID NO: 267101 - protein, 391 aa, unidentified
MTYFVGIDIAKFKHDCFIQDHNGVVIRHSFSLRNNQDGFNILLDALNGLDHSQEIKIGLEATGHYGSNIKQFLNSNDYSFMEFNPLLIKRFSQATTLRKTKTDKIDAALISSFLMTVDYKPITHTSYHTSALKSLTRLRESLVKERSLTLVRITNVLDIIFPEFKPLFDNSLKSSTCMYILENYSSPDRISRMNVESYNKMKSRLRKTISYDKFLKIRDAAKSTVGTTDEIYVYELQILLGIYKELDSRISDLENKIIQYYRQFNSHIHTIKGVSELSAAAIYAELNGVTGFRNPDQILAFAGLDCSRIQSGESDKNGRMVKHGSSALRCVLMRCADSFALHNPVVYEYKLKKMNEGKFFRVALSHVAKKLIRTIYTLEKNDLDFDQSKLR

SEQ ID NO: 267102 - protein, 403 aa, unidentified
MNNVAGIDVSKGKSMVSVLRPFGEVVAKPFSIGHTGSELKELADYLKSLDGETRVVMEHTGRYYEPVARFLHEEGVFVSAVNPKLIKDYGNNTLRKVKTDKADARKIARYGLDNWAELRQHTPMDTIRMQLKTLNRQQSLYAKTKTMMKNNLIALLDQTYPGVNALFDSPVREDGSQKWVDFATAFWHVDCVRNMSLTAFAERYRKWCKRHGYNFSQSKAVEVHTGAQDLIAMLPKDALTKTMVRQAIDALNAVSASLERLKAEMQALAAQLPEYPVVMAMHGVGDSLGPQLMAELGDVTRFTHRNAITAFAGVDPGADQSGTHEAKSTRVSKSGPPELRRALFLVMDCLLKTMPQDDPVYRFMDKKRAEGKPYLVYMTAGANKFLRIYYGRVKEYLAQLENS

SEQ ID NO: 267103 - protein, 343 aa, unidentified
MHATEGGELYGGADLHGNNVVLALCDNTGRRVFRRRVKANLEAVNAALQPYWPQIKKLAVESTYNWYWFVDGLRAQGRDIRLANPAKMEQYSGLKSTDDESDASWLAEQVRLGILPESYIYPPEDRPTRDALRRRQLFVHQRTQAYLSLDAFMARKGLARPNIAEVKAWTSAEVVALQFDGFDLLQVQSLRQAVQRADELACAIEKEVLAVTRKTEAFERVQQVPGVGKILGLTILLESGTFERFAHAGCYASYCRAVKSLRTSNKKIKGRNNGKNGNPYLAWAFIEAASHATRHYPRIAAWYERKKKRRNTAVAMKALACKLAKATWHVMHGKDFDETMLFG

SEQ ID NO: 267104 - protein, 397 aa, unidentified
MIAVGIDVSKSKSTVAILNGDGSIRAKPFDVHHVADELQALVDYIKRTSEPPTILMEPTSHYHYPLLKAFTEAELPVCLINPYQMKKYGDTELRKAKTDKRDSLRIAQYALEKSYSLIPYTPQDQKYEDLRFLSRQYSQRISTITVAKVQLLSLLDETMPGITTILPLKSRDPDNCVLLRFIKRFKSFDVIRKMGKTRFLDSYQVLVKKTKDRFAGSKGLAIYELVLNSVTTRGENPLSAMTQDQCVDLVSTSQKAADEINLQMRIIAETMPEYKVLRSMAGVGDRLGPIILGEIGDIRRFHSGKALNAYAGNDAPPYQSGQFESRNRHISKRGNPALRKACFEVMQALKLTKPQDDPVYLFLLKKEQEGKPYNVAKMAAVNKFLRIYYARAMELYK

SEQ ID NO: 267105 - protein, 392 aa, unidentified
MVISVGIDVSKDKHDCFIVSSEGEVLADVFTIPNTMNGFICLLQRIRECTTPQDKIKVGLEATGHYSYNLLGFLLDNGLATYVLNPLRTNLYRKSLSLRKTKTDRVDARTIASMLLSDAGLKPYTDTAYHNEELKSLTRYRFDKVKERAKLKSSVSRLVCILFPELEKLVPTLHMASVYALLEVFPGAKQIAAAHLTRLKALLESSSKGRYKRDMALEIRDAARNSIGSRMPAKSLELQHTIRLIRELNAEITEIEEQIQSIMDELHSPITTIPGLGFRMAAMILAEVGDFTRFDSPDKLLAYAGMSPSTYQSGQLKNCYPHMEKRGSRYLRYALYNATKYVCHWDPTFADYLAKKRAEGKPYNVALSHAAKKLVRLIFAIERSRQPYSSAT

SEQ ID NO: 267106 - protein, 461 aa, unidentified
MRKMKSTGPQKGSARAKVDWKALDVVHPEAAGIDVGGSEHWVAISPDRDPEPVRRFGCFTADLREMAKWLIDKGVQSVAMQSTGVYWMPVFEVLEQNGLEVYLVNARHTKNLPGRKSDVQECQWLLKLHAFGLLNNSFQPTHEIRIARTLWRHRGNLVAEAGSAIQRMQKALTEMNIQLGNVLTDLSGVSGMKIIGAILEGERDPWALAALARPEVKATPEDIAKSLEGNWREELLFVLKQEVELYRVYQQKIVDCDRQLRQHLESLKSTVDLQAQPLGPKPKGKTRSRNAPQFDLRTELYRITGIDWTQINGMDVLTAQTVIAETGADLSAFPSEKQFASWLGLCPTNEQSGGKILNRRTRKVVNRATGAFRNAAVTLIRSQSYLGAQYRRLRTRLGAPKAITAMARKLACLFYRLITRGQQYVDKGTEYYEARYREQQIRSLAKRAQKLGLQLVIPKTA

SEQ ID NO: 267107 - protein, 322 aa, unidentified
MVMLSFGGIDVSKDRLDVMVLPEEQSSSVSNDAAGWAELVEQLRSSSIVAIGIEASGGYERGVMRALLAADLPVRQVNPFKLRQFARASGVLAKSDPLDARMIASFVAIMPTRPAPRQAPAAERLTEMLAVRRQLSAEKVAAENASRLLEDAMLRRLSRRRIGRLGTDIDLLDKHLVGIVGTDAALAHRYQLLTSMPGVGAVLACTLLALLPELGRMSRKQVAALVGVAPYAFESGTLKGRRCIWGGRAHVRQVLYMAAMSACNWNPPFKTFHDRLKAAGKLPKVAIVAVMRKMITTLNAMVRDDVNWADRLTGRHSVPTAR

SEQ ID NO: 267108 - protein, 343 aa, unidentified
MQTISTIGLDIAKSVFQVHGVDAAGQVVVRRQLKRRQVLAFFQRLPPCLVGIEACASSHYWSRELQALGHTVRLMPPAYVKPYVKRQKNDAADAEAICEAVIRPNMRFVPTKTVEQQSCLVLHRTRHLFIRQQTAVINSIRAHLAEFGIVAQVGRRGVEQLLALIADGNDTRVPEVACACIAALGVQLRAIRAQILELDRRILAWHRSSEVSRRLDHIPGIGPALATALVASIADPKVFRSGRDFSAWIGLVPKQNSSGGKDKLGNISKQGDRYLRSLFTTGALAVIRYAKVHGTKHRPWLAALLARRPTKVAAIALANKIARIAWVLMTTGERYRQPAALGV

SEQ ID NO: 267109 - protein, 394 aa, unidentified
MCQHYQTEASMIKHNILFIGLDTHKTFTEVAYIEDQRGAKSTHLGKILSNKAAFKKLARQLQSKYPDATLHFVYEAGPCGYWIYRFLTSLNHCCYVIAPSLIPKKPGDKIKTDKRDALKLAKLLKSEDLTSIYVPEPEDEAVRDLSRARETGMKDLKDAKYQLKALLLRNNINSKIKDNWSLQHLRWLAELVLPHPCQQIVLQEAVLTINERLKRLKRLDNELTHQVKNWRFYPVVKAIQALRGVRLLVATGVIAELGDLSRFDHPRKLMSYLGLVPSEHSSGDKRHLGAITKCGNSRARRLLVEGAHSYKHNANISKEMQLRQEGLSKEIIDMAWQAQLRLCRRYQRLMHKGKHRNVVVTAIAREMIAYIWAISREVVLPKIDVKLRISRVPA

SEQ ID NO: 267110 - protein, 322 aa, unidentified
MTPPEIYVGIDVAKEQLQVAVRPDGEAWSVTNDRPGLRDLVKRLAVSKPALVVLEATAGMEMPVVAALAAAGLPVVAVNPRNAREFARATGRLAKTDVIDAHVLAQFGEALKPPLRPLPDAATQELNALVTRRHQLVEMLTAEKNRLAQAAAKAVRAGIREHIRWLERRLANIDQDLADAIRQTPVWREKDELLRSVQGVGPVLSTTLLAGLPELGTLGRKQIAALVGVAPLNRDSGRHRGKRMVWGGRARVRAALYMGALVATRFNPVIGAFYQRLLAAGKPKKVALTACMRKLLTILNAMARHDTPWQIMDPTLASQDGC

SEQ ID NO: 267111 - protein, 517 aa, unidentified
MIAIPVISERCAAIDVGKRGLAVAVALGPADKEAEIKTRASGTTVPALLDLWLVEQGCTTVALESTGSYWIPVKNILEDGFQITLVCARKHHPKKGDKTDFRDAIDMVIHHRHGLLTGSYLPERGIVELRDLTRRRKRLLGNLRAEKNRIQKVLETANVKMGNVVSDVFGVSGQEILQAQLEDKPLTAEELADKAKKRLRDKIPQLTEALEAHQMNNHHRWLIDQSVEHAKFLDRQIEELEKKIDQHLPPYRRQHELRMTIPGIKEAAAANILAEIGADMNQFPDGDHWSSWAGICPGNNQSAGKRKGSRIKKANKFLLAALVEASWAAVRKKDSALQRKFHRWLRAKGEKKTNVAISHSLLKVIWSVLKHDRPYVEPDVLVLKTLEREKQIRHHAQRLRQLGADEQTIATLIKNLLEAPKPDSTDHPPVATHPYPSDSACASRPKCSPQKQGSPPPRRRPLARGVLGFRIRTAEKKQYSAVQDLPDSPSTTTPPEKNTPPKPSATNNKKGQSTTRH

SEQ ID NO: 267112 - protein, 343 aa, unidentified
MDHFAGLDVSVKETSACIVDDTGRIVLEVKVASEPEALLAVLTNPACHFKRIGLEAGPLSQWLFSALAEAGLPVICVETRHMRAVLKAQINKTDRNDARGIAQMMRVGLYRPVHVKTLRSQKQRMLLTHRKLMQSKAIAIENDLRATLRNFGLKVGVVGTVKFEARIKQLVENLPDLVVLVEPLLIIRRVLREQIGILHRRLLAIVRDDDVCRRLMTVPGVGPVVALTYRATVDVPSRFRNSKAVGAVFGLMPSKHQSGESNRTGGISRCGDEMMRMMLYEAAHIMLVRSAKWSWLKAWAMKIARHRGLKKAIVALARRLAVIMHRIWVDGTEFCWTREVAAA

SEQ ID NO: 267113 - protein, 304 aa, unidentified
MNGIGIDVSKRRLDIGTTDGQTLQVCSNRSGFSELDVWLKKRPVSQIVLEATGGYEQTVLDFLHKAGHPVIRANALRARRLAQGLGKVAKTDRLDALVLAQMAALVELPSYQPLEPWQRKLREFVRARRQTMQALTVARQQQEMVTDRELRRQMQGNIIRLQTLVERLGKQISEQVAQQPQLAVLKSMKGVGPALQAVLASYLPELGQISGKAIASLVGVAPISHDSGAMRGRRSIHGGRAEIRQVLYMAAMSAMRHEPRLRDFYRSLRARGKEGKVAIVAVMRKMLVILNARVRDAQGGSIPA

SEQ ID NO: 267114 - protein, 354 aa, unidentified
MQKVIKKVVGIDVSQKTLDVQMGMFYDSLESILFTHRVLANNEKGFERILELCIKDLGGVDNVEFVMEATGVYHEKLAYYLCAKGLKVSIVLPNKISNYMRTLVTKTITDKTCAEALTRFGLERNLDYWSPPKKVYKELRRLVRERDQIVLERSGVKNQLHAEKASKDPLERTVARLEERINFLNSQEKEIKTDIDLIISRDGVLDHEVKLMTSAPGVGVLTAVTILAETNGFELIKNKKQLVSYAGLDVREKSSGTSVRGKARISKKGNKYLRKAMHLPALTAIKWNENYKAVYARQTQKHGIKMKSVVAVQRRLLELTYILFKTQTTYDKDYEKKVAHQKDNALHRLALGCL

SEQ ID NO: 267115 - protein, 404 aa, unidentified
MLVTAVMIGVDPHKGSHTAVAITAAEQPLAELRVRASAAQAGRLVAWAQAWPERTWAVEGAGGLGRLLAQQLVAAGERVLDVQPKLAARVRLLEAGDTNKNDPNDALSVAVAALRSKARREVKAEDHAVVLKVWSKRHRDLARSRNQVACRLHAVLCELRPGGFSKEISAAQAAKILEQIEPCGAVAVARHELAAEFLTDLRRLDAQLRDTKKKLAAAVRASGTTLTGIFGVGPVIAGIIIGDVTDVTRFASRDRFAAYNGTAPVEVSSGNRKVHRLSLRGNRRINHAIHMAAITQIRHAHSDGRAFYDKKIAEGKTHKEALRALKRRISNAVFARLRADARKAAAAVGRGPGGQPGNDSVASAAGSHPEHRLFGPATPEPATTLRPGNPGRRKVAAKATTRSP

SEQ ID NO: 267116 - protein, 342 aa, unidentified
MQVTTIGLDIAKNVFQVHGIDAKEKVVVRKQLRRSQVIAFFKALPPCLIGMEACATAHYWARELRKLGHEVRLMPAKDVKAYLKRNKNDAADAEAICEAVRRPTMRFVRIKSAEQQGQLMQHRTRDVLIRQRTQIINALRAHLAELGIVAAKGDSGVNELLAIVADDRDERLPIDARASVIVLAAQLEALQTLIGSIEKRIKMQHRSNETSQRVETIPGIGVLGATAIVATVADPTIFRSGRDFAAWIGLVPRQDSTGGKQKLGPISKQGDQYLRRILIVGAISVLRRALQNPGKYPWLTQLLARRPFKVVAVALANKMARTAWALMAHGGTYRAPELAEAA

SEQ ID NO: 267117 - protein, 354 aa, unidentified
MVEKNGSGISFEGKHFFCGIDVDSKHWDVVVRTASVEVKKISMDPDPETMVKYLQRTFPGGIYHTVYEAGYSGFGAHRRLVALGCDSRVTHPADVPTTDKEKETKSNRVDARKLARGLEQGDLKANYVPDDRALYLRTLVRHWDRCVRSGTRVQQRIKALLYYYSIDFSRFDKINGPFLAWLETLPLDQGLAKRSLMLHMEELQQHRARIVAIKRELRQWCRTNDDWELIELLDTVPGIGFQTAIILYAELIDMRRFSSFDQLKSFVGLRPSIHGTGDTVTVKGLTRRRNRHLRYILIEAAWSALKTDPALVAYYCACCSRMKKQAAIVMVAKKLLSRIRHVWMHRTPYQRSLK

SEQ ID NO: 267118 - protein, 343 aa, unidentified
MEYFVGMDVSMASISICEIDAKGTVIREGKVSSTPEAVATWLEESGRGFARIGLEAGPLAPWLPAGLSSRGLPVICIETRQMKAFASASPVKTDRRDARLISQAMRTGLYRATHVKTARSQELRMVLTHRETLVHQVRQLSNTVRGTLKAFGLKVGMARGRLFAARVRELTADNPHLSAAAEPLLLARQALLEQLDKLDRQVHAAARDDSVCRRLMTVPGVGPVTALAFRTGLDVPERFQKSVMVGAHFGLVPRRYASGEQDRSGPISKCGDAMVRWLLFEAANALLTRTRRWSWLKHWGLAVAKRRGMKRAKVAVARRLAVIMHRMWIDGTDFQYRKEETAI

SEQ ID NO: 267119 - protein, 397 aa, unidentified
MIYVGIDVAKNKHDCCILDSEGKIASAFTFENNKSGYEKLIAEIAKFSKSKSYADVKIGLESTGCYSLNLAIYLNHKRLSVKVFNPLLVNLRRKAESLRKTKTDKSDCKFLASMLFSEESEPYLQAVLPISELKILTRNRSRLIHMRSKLKQSISRLVDILFPELPSLVYSLHQKSSYALLLEYPTAKSIASAHIVKLTNLLSSNSKGKYGRARALQIRELASNSIGFDSVATGFELRQAIRLIQNLDGEIAVLDDEIKAIMDGLNSPILSIPGIGYTLGAIILSEIGDIRNFSNPAKLLKFAGLEPSVYESGRYRASDTPMVKRGSPYLRWALLQAARLIAMHNPAFRSYQDKKRAEGKHFFVVQSHLAKKLVRVLHKLLSTDTTFDAEALHQVAA

SEQ ID NO: 267120 - protein, 351 aa, unidentified
MRRTTTVHAVTTVGIDMGKNTLHMIGLDSRGAIVLREKVARGRITSRLANLPSCLIGIEAGMATHYVARELAALGHEVKQVPPAYSKPFRQGHKNDFRDAHAVAEAVQRPTTRFVPAKTNEQLDLQALHRVRSRLVSERTAVINQIRGFLLERGIIVRQGLRFLRQTLPDILAKRTDVLSPRMVRIVADLASDWRQLDERIETVTDEIETLAKSDNSCRRVMTVPGIGPIISSAMVAAIGSGAAFARGRDFSAWIGLVPKQMSTGDRTVLGRISKRGNGYLRTLFMQAARVILLRPTSWPKHGFGVWLARAAQRLHPNVLAAALANKLARIAWTVLAQERSYEARITKAAA

SEQ ID NO: 267121 - protein, 343 aa, unidentified
MEQYVGLDVSQEQTSVCVVDGGGKVIWEGKCTSTPEAIAATLRTRAPEAVRIGLESGPLSAWHWHELRKLDLPVVCLDARHAKAALALQLNKSDRNDARGLAQIVRTGWYREVRVKSVDSHLVRSLLTTRAQLVRMRVDLANQIRGVLKPFGLIAGKGGGRLFAERVRALVAGGPLQEVAGALLAAWQAIGEQIAVLGRRLVAVARQDEAVRRLMTAPGVGVLVALAYVSVVDAPERFAKSSSVGAYIGLTPRRYQSGEADYTGHISRCGDKLLRTYLYEAAGIILHRVPHWSALKAWGTRLAKRIGTRKATVAVARKLSVILHRMLRDGSEFRWSAKEAPAA

SEQ ID NO: 267122 - protein, 350 aa, unidentified
MTTLTAKDVVVTGGVDTHQDVHVTAALDQLGRVLGTQSFPTTPAGYRQMLRWLRAFGPVQVVGVEGTGSCGSALARHLTSQGVDVIEVARLNRQLRRRHGKTDVIDAIAAARAVLSGEAAGKPKSHDGPAEALRTLKAVQRSGDKARTQALNQIHQLLVSAPEDLRTKLRGLPRKELHATCCAFRVRPDDDSLPAMTRLALRELAQRVLHLDGQLADVTARLRRITTSIAPELVAIKGVGPDVASTLLMTAGDNPERMTTEAAFAALCGSNPIPARSRKTNRCGHGRGGDRNANAALWRIVVVRLSCDQRTRDYLERRTSEGKSKTEILRCLKRYLAREIHNAMPNLAGV

SEQ ID NO: 267123 - protein, 410 aa, unidentified
MEVMFDRVAGLDVGKESVTVCVRTPGSRRGRHSETRTFKTMTGSLRVMRDWLVESGVTIAAMESTSAYWKPPFYCLEEVMEVWLLNAAHMKAVPGRKSDVRDAEWIAQLLEHGLLAPSFVPPPEIRRLRMLTRYRVQLMADRAREIVRLELMLEDASIKLSSVASSLKTVSARAILTAMINGESDPLRLADMAKGRMRRKIPDLAQALTGHFDANHARLARSMLRRLDLVEQAIVELDAVIVDACRPWQHQIELLQTIPGVGPKVAETIVAETGADMSRFPTAAHLAAWAGVAPAMHESAGRQTPAGKRHGNKWLTAMLVEAAGSVGRMHGKNYLAVQHARLTKRRGMGRAQVAVAHSILVAAYWMLKRDEPYHDLGADWHSRRNDEAHTRRLIAQLEHLGHTVIIDPAA

SEQ ID NO: 267124 - protein, 340 aa, unidentified
MHKSSAEDFLSCGIDVSAAQLVVALEVEGRRYGQRSFPNRASGHQALIAWLQKTGARVRVCLEATGLYSLDLALALHAAAGIEVAVLNPKTVNRFAATLCRSKTDPADAQVLAEYARRMPFQLWQPPTVIALELRALTRHVAALTQQHTRESNRLHAASASAAGSRCVRQDLKRSLRDLEHRMQKLRAVALNLVQQDPELRPRLAFLLSMPGIGEVSALNLLGELALLAPGLSVRQWVAHSGLDPAHHQSGSSVRKPSRISRAGNRYLRRALYMPALVAVRHDPHLRAFYQTLLARHKAKLQALIAVARKMLHAIFGMFRWRSGYDGSRLFPALQLAVAA

SEQ ID NO: 267125 - protein, 341 aa, unidentified
MNQVSTVGLDLAKHLFQLHGADSAGAVVFRKRLRRGQLLAFLATLPPCTVAMEACGSAHYWGREIAKLGHTVKLIAPAYVKPFVKRQKNDMADAEAICEAAQRPTMRFVALKSANQQAAAVVFRTRDLLVRQRTQAINALRGHLAEFGVIASKGLVHTSKLIAALEDPASDLPQAARGILAVLVEELRSLDERVAVLDREIARHAKESAIARRLMTVPGIGAVTAAALTALAPPADTFRRGRDFAAWLGLTPVQRSSGGKERLGKTSKMGERSLRRLLIIGASAVARWAARKGVPAGSWLGRMLARKPPMLVRVALANKMARIVWALLAKGGVYRAPVAAV

SEQ ID NO: 267126 - protein, 387 aa, unidentified
MQASTVDTPTVEHCGTIFVAIELSQRSWLVTLHSPDKDKMSRHKLESGDHAGLLALIGRARERAARTLRAVPAMVSCYEAGYDGFWLHRLLMAAGITNYVFDPASIAVDQRARRVKTDRIDGEKMLRTLMAYLRGEPRVVRIVRVPAPEQEDARRASRERGRLIKEQTAHTTRIKALLRLVGMSVGNPRRRDWLSWLAAQRDWQGQAVPRRMLAEIKYEHARLMLVREQLEALAQASAPTDRAPATAQMVERSELLLRLKCLGPAFATTLTNEVFYKDFRNRREVASYFGLTPSPWQSGGIDRDQGISKAGNPRARCAAIELAWLWLRHQPESALARWFRSRTHNNASKRNKRIAIVALARQLMVALWRYLTTGMVPEGALLKAVKA

SEQ ID NO: 267127 - protein, 457 aa, unidentified
MKIVNTHCAGIDVGSRSHYVAIGQLDSEVREFGVYAEDLKELSKWLNDNEITSVALESTGTYWQNLFVELINSGIHVILTSGRFTKSMNRKKTDVRDCQWIQKLHSLGLLPSSFLPDSSTEKLRTLCRHRANMIDLKADASHKMQKFLKLLNFRLDVVVRDVTGLTGLKIIEDICNGVYDPKHLAKHRHYNCRKSEEEIAKALVSNEREDYIFGLNQEFERHHFYLQQIQKCDQRISEFLNQLLKDSAIDGPDEKPFKRNNKNSINGLDLNKVAFQYFQGVDLYHIPGVSHSTILSIMSEIGYDGFSKFPSAKHFASWLRLAPNNKISGGKTLSNRIPKGSSRLKIAFRNAANAVGNLKDSDLGRFFNKIAYKKGRQAAITATARKIAVILWNMVTKGEQYMSKTPYIFLDEKRKQLAIIRKKISKFGIDPNELGIFSQEKHRIAYEKRMSVNQALT

SEQ ID NO: 267128 - protein, 351 aa, unidentified
MPETAHSAVAVVGIDLGKNSFHIVGLDRRGAIVLRQKWSRGQVERFANMPPCLVGMEACVGAHHLSRQLRALGHDARLMPAKYVRPYSKGQKNDFRDAEAIAEAVQRPTMKFVATKTAEQLDLQALHRVRARLVSQRTGIINQIRAFLLERGIAVRQGQRHLRSALPGILAAPSETLSPRMVRIVEDLAGDWRRLDERIEGLSAEIEDLARKDCGCERLMTVPGVGPIISSATVAAIGTGDVFSNGRDFAAWLGLVPRQISTGDRTILGKISKRGNRYLRVLFVQAAWVVLIKPKSWERHGLKAWIEAAKKRLHRNVLAIALANKLARIAWSVLARGRNFEVRSAATAQPV

SEQ ID NO: 267129 - protein, 373 aa, unidentified
MPKYSTAFGMDVHLRSTTVCALDADTGEAVTRRFPGNPWGEIAGWMDGFPGPSLAAYESGYLGFAPQRELAGLGVECVVAAVSKIPRSAADSASKNDRNDAARMAKAILAHDISPVWVPSPEVEGIRDLAGAYDGATARLATAKQRLLAFLARRGFVYGGTTPAGNPRKYWTYDFLRWLDKVRPEDDGGVRALAALRNEVEAAAEARADLLSEYRAAVDASPIAAEVAALQSIKGCAFALAAAFSAEVGDFTRFRSGRQVTAYFGLAPSQRSSGDSVRLGGISGAGSALVRKLAAEGSWCYAAARHQPKLMPRDTGVPLEIRMHGRKGSERLLRRREEMLARGVPAAKANAATAAELVRWLWALGMMCREGAE

SEQ ID NO: 267130 - protein, 427 aa, unidentified
MSYRIAAVDVHKKMLAVVVTDVAEAGEYQFERRKFGATPGELHLLAQWLVQQEVEEVVMESTAQYWKPVWGALERYWKPARQQREGASKFCGTLHLCQAKSNHGPRGRKNDFADGERMIKRLVAQELVLSFVPDPEQRLWRTVTRRKHQLTRAKVGFKNQLESLLEQAHIKLSSFVSDLLGVSARRMLKALTEGETDPAALAALADYRLQATPEQLSDALGACAQLNGVYRRLLKMTLAELQLIETHIEQLEREALELLQEHQDVVRRVAEVPGFGVDSSLQMIAEVGPKAAMFRSEKALSSWVGVCPGNEESAGESHSTRSPKGNRQMRRLLNQAAQSAVKVKGSIFEVTFNRLLPRLGYKQAIWAIAHRLCRLLWLMLHEGVAYEERGPAVSAKSKRTRAARMVKELRKLGYRVEGGPLAAVTLA

SEQ ID NO: 267131 - protein, 332 aa, unidentified
MNLVSTLGIDLAKSSFSLHGVNANGEVVLRRSLSRAKLSEIVAQLPPCLIGMEACSGAHEWARRFSACGHTVKLMAAKFVAPYRKSGKNDGNDAEAICEAVARPNMRFVPVKSLEQQSDLTLHRVRQGFVEERTSTLNRLRGLLTEFGHVLPLRSIEVRRQVPQLLGKLPARVAACAQDLLAHAARLEAKILEYEHEIRAHVRSNALAQRAQTRMGIGPVTASALVATVGNGRDFHNGRQFAAWLGLVPRQYSTGGKTRLGHITKRGDPYLRTLLVMGARSVLQRAARETDPLSRWALALQQRRGYHRACVAVAAKNARVAWALLAKEAAAA

SEQ ID NO: 267132 - protein, 344 aa, unidentified
MKRKVYVGMDVHKETIQIAILPSNTKALVKEQQIKHEEGQIKKFIQKLKSEGTEIHCCYEAGVTGYPLYRYLKTLGVNCIIAAPGKIPRQSSDKIKTDKRDAIKLARLLRSGDLESIHVPSEEDEAVRDYLRSRDSLRLDLGRNRQRLMKFLLRKGIKYSTTKYWTASHYKWLNNLHFENEILQATFNDYYSRVRVQEENLKAMDQKIREIAESEPYREKVGILRCFRGVDYLTAMFLLSEVNDFKRFKTAGSFMSFLGLVPGEYSSGPKRKQTSITKTGSPRLRRILVEAAWQHRFPGTGSKVVAARRVGQSALVVSLAEKASLRLHKKFKSMQLLIPIKINT

SEQ ID NO: 267133 - protein, 357 aa, unidentified
MAYIGVDLHSDKFTAAFRDKMNKDTIKSYYIDENEIDNFKRSLKKDDYIFLEASTPTFAFTDLLQDTVKKTIVIDPFKFRAIADSRKKTDKIDARQLARMGKYHVETDKNFLPEVYVVEKRIRKLRSLFTTYRLLNKEITMIKNRIHSLFKQNLKPYSKTHIFNEIMTGLEPIDLDEEYKIQVEILFEVLSKLQEKKAEIREKILLTGEPFIADIDILVSISGISVFVALGLISDYATIERFKNAKQFSKYLRSTPRSEESNKKVKTGKTQKNGRKLSIELMLQSINHFRRESLFIDKFYRRLKKGKGGCKARIAVVRKMFVAIYFMLKEKEYYRYMNKKLHDKKMHEYKRFLAKNK

SEQ ID NO: 267134 - protein, 369 aa, unidentified
MTNIIYVGMDVHTTNYTLCCYSVENDQIFAETQVSPDYKNILKYLEQVGKNYDDCHFLCGYEAGVLGYALYNQLIWNDVDCVILAPTSMPKTIKKEVKTDRRDAKKVAKCLAYNTYSPVYVPSEEDNAVREYIRMRNDEKDTLKRIKQRILSFCTRHGKHFTEGKNYWTQKHIAWLKALDFGNAILNETFQEQLVTFNQATDKIGLFDIRIENLAQRENYATKVKKLTSFIGIKTHTALSIIVETGDFKRFPSAENYASYLGLVPGESSSGNSIVRTGITKAGNSNVRKLLIESGQSFSRAAIGKKSKALLSRQAGNEPSVIAYADKANERLKKKCYRITQRSKRNIAIAAVARELACFIWGMMTDNVA

SEQ ID NO: 267135 - protein, 341 aa, unidentified
MSQSFDASRSLTALEQDSTVVAVIEMSKAKWLVAALVPGFKRQPLKKLDADAPALLKLLQRWRDEAGQAGPTIKRIAVAYEAAGDGFWLARWLRTRGIETYAIHPASVAVSREQRRAKTDRLDTELLMRAFLGWLRGEKRHCTMAAIPTIAEEDTRRPNRERESLVGEQSRLINRIKAVLARFGIRSFRLSLRQAEARLANIRTAEGTPLPDNTRAELQRLLERLSLVREQIRAIEQERLRQLAAAPARREGPHAMVRLIARIIGVGVETADMLVHEILSRGLRDRRAVARYAGLTGSPDESGKRRREKGLARAGNARVRRGMIQLAWRFLRFQKDSDLAQ

SEQ ID NO: 267136 - protein, 347 aa, unidentified
MEYFAGLDVSLEETAICIVDDAGRIVREARAASEPEALVAFFRASGMAMRRVGLEACSLTAWLHQGLTAAGIAAICIEARQAKAAMGAMPNKTDRNDARGIAQIMRTGWYRAVHVKSPSCRSWRALLTARRMVLNKRRDVENGVRALLREAGLKVGAPSRKDFPARVRELSAGDAVLTGLVESLLSVIDVMTREVEKLTKRVIDEVRVEPTCRRLMAVPGVGPLTALAFRATVDRPDRFRRSRDVGAHLGLTPRRYQSGETDVQGRISRCGDELARTALYEAAHSLLTRGTKWSALRAWGMQVAKRRGMARARVAVARKLAVILHRMWNDGSEFRWGKQPATKAAAA

SEQ ID NO: 267137 - protein, 347 aa, unidentified
MERTTIGLDIAKRVFQAHAVDPASGQVSRSKLQRGELLPYFAQLRPALIAMEACGAAQHWAREFTKLGHEVKLIAPQFVRPFVKTNKNDVADAQAIWTAAQQPEMRVVAVKSEEQQAVLALHAIRERLKKARTAAVNQLHGLMGEFGTALPKGWRTMLPQAAAVLGQADSGVPALLRAQLRRQLEEVRRLTEQMAEVECQIASWNRRQEECERIAAIPGVGLLTATAAVATMGDARTFRSGRQFAAYLGLVPRQIGTGGRVQLLGISKRGDKYLRMLLIQGARSVLARSRASKDPSTWLGRLIQRRPRNVAAVALANKMARQIWAILAHNRTFEPNYRAPQLSARPA

SEQ ID NO: 267138 - protein, 318 aa, unidentified
MQPAAVIVGVDVAKFCLVSAFLGQPGAARTVDNRSSAIAAWLAELPKGSIVAMEATGAHHRLLAHMAHAAGMQVYVLNARDVYFYAKALGGRAKTDRLDATVIARYAAEHHTRLHVWQPVAGVEQQLHELLQRRACITRLRVSLRQTLADVATLQVARRQLDDGFERFFEQLDAQLQLLVASDAELGCGIARLRAITGFGPQASVAVGALLKRIEFANADALVAYSGLDPRPCDSGQHRGQRRLSKRGPAWLRRQMYLVAFAASHSKALKPLYESIKARGFAPTQALVILARKLLRVAFVVWNDRTTFDASRLQPNSA

SEQ ID NO: 267139 - protein, 338 aa, unidentified
MTCYSGIDLHSNNSVVVVSDETDRVLYQRRLPNDLGTILARLEPYRGELAGVVVESTYNWYWLVDGLQAAGYRVHLANTTAMKRYEGLKHSGDETDAAHLAHLLRLKILPTGYICPPAERALRDLARKRSQLVRTRSAQVLAVETIVARQTGAGISANVVKRLEGETVGALGLPEDVTCAVAANVAVIQTLNAEIAKLEAHLRQRVRPRPRFKVLTTAPGIGEVLGTTIMLETGSIERFAAVGNFASYARCVDSKRMSNGKKKGEGNVKNGNKYLAWAFIEAANFARRYCPAARRFHDRKRAQTNAIVATKALAHKLARACYHMMKDGQPFDVKRCFA

SEQ ID NO: 267140 - protein, 386 aa, unidentified
MPKLNDLSRSLTRLDPDGTLIAVIEMSQSSWLVAGIVPGVERQPLKKLAVDESALLNLLNRWRMEAEKAGRKIERIAVAFEAGRDGFWLARWLGAHGIEAYVIHASSVAVSREHRRAKTDRLDTELLKRAFLGWLRGERDHCKMVAIPTTKDEDAKRPNRERESLIGEQTRIVNRMKAALIRLGIRGFNPKLKKAAGRLEELRTPEGEPIPPNTLAELRRDLERRRLISDQIRQIEDARLERIEQAPGDGPHAMVRLLARVIGVGIETADMLVQEVLARNMRDRRAVARYAGLTGSPDESGTKRREKGLARSGNARVRRGMIQLAWRFLMFQKESALAQWFRARTETARGTRKTMIVALARKLLIALWRLVREGVVPDGVVLRPAQ

SEQ ID NO: 267141 - protein, 394 aa, unidentified
MSMAIQSGMDKVVIAVDPHKASWTASAVDSLLQPLASVRVPVSRDGYQALRGFARQWPTAGCAIEGAAGVGAPLTTWLRTDGIEVVDVPAKLAARVRVLSSGHGRKNDDADALSVGIAALTSPALRTAEIDAATAALRAIVEHRDDLVKTRTQTINRLHVVLTRLVPAGARRHLSADHAAELLRGVRPRDAAAKTLRALAMDLVSEVRQLDRRIAKAAKDIQMAVSTSGATLTKLHGLGALTAGKILGRVGDVRRFRSAAAFASYTGTAPIEVSSGEVVRHRLSRAGDRQLNFCLHVMAIAQVRHDSPGRAYYLRKRSEGKSRNEAMRCLKRRLSDIVYRQLIRDADTKGGPGRTLGGGSIVSRGRLIPRTPALQTSHFPSPPPNPTTRQKPTT

SEQ ID NO: 267142 - protein, 345 aa, unidentified
MKIVGCDLHTRYQQVAMLEQETGEWMERRLEHENGEARAFYAALSSPVRVGIEATGHTRWFERMLAELGHELWVGDAAEIRASMVRKQKTDARDAAHLLDLLISDRFPRIWRPTLQERDLRQLVWHRQKLVWMRNAVGNQLHALAMGEGVCRKKKLFTKQGRVELEGLKLGPWASHRRQELLAMLDQLDESLHELDQAVAQQAEQNADAVRLMTHPGVGPVTSLAFVLTLGPVERFQRSKQVVSYLGLNPREHSSGGRQRLGAISKQGNPMMRSLLVEAGHTAARLDAELRQDYHRLKLRRGSGVAKVAIARKLAVRMYWMLRSQAGYAQLVRMQGSPRGTLVGQ

SEQ ID NO: 267143 - protein, 318 aa, unidentified
MTNTGELPCEVNDIAECLATFPHPVERVGFEAGTLSQYLFLGFKAEGFDVVCMEARQINGALSAMRNKTDKTDARGITQILRTGWFSPVHMKSREAHGVRALLSTCKALLNKTMDLDDEVLGLLKIFVIRLPMTVKHGSFDGVVRPLIEMDEVLAHALVPLLGARVVLYQHFLELDRRVKRAASQDEICVRIITVPGVGAIASLTFKAAVDDPRRFKRSRTFGAHFGLTPRRYQSGEHNNPGRISKAEDRDERTTLYAAANAFLMRKMAGSQIKSWGMRLMRTKGRHRAVVARKLAVLLNRMWVDGTEFRQDQVGGAA

SEQ ID NO: 267144 - protein, 422 aa, unidentified
MKKVTEYTKKVKGQIKNAALNKASWIVGIDIGKTKLSCVLMKKDQTVLCRFNAKSSMSGYKKILDQVKEKTKARGKVVYAMEPTGHYWMVLGQFLEDHNKEYVLIHPLALARSREVVRLNRGKTDPMDARLIGELACRGIATRTQIPEDYWATLRFLAREYMDREKDIVREKLRINSYVETTLPYFLDVFPNPLCLAGRACLRTFANFKGAIKGDFPSFEKQVRKHYTGKRLLISRVRQIYDTLRQSHSMGLRAGRHAMFWRIINSLERLEVAERQQETTEQSLLSQYNQSKYKKYLNSVQGTTSTTNALILGFMGNPTIYDNPKTLIKLAGCDPVLNESGKYRGKTSISHRGRSLLRKAADRTAFSIEKRNVVFRNFFHRLVTRQKNKLTKRQARIACINKYFRIIWVLCNHRVTFNPSLA

SEQ ID NO: 267145 - protein, 442 aa, unidentified
MGINRSLTKGDFEIVHPNAAGIDVASQMHYVAVPSSRDQPSVRKFGSFTQDLHDLAKWLKKCQIDTVAMESTGIYWIQLYLILEEYGFEVFLVNARHIKNVSGRKSDVQDCQWIQQLHSFGLLNASFQPDLYGRELRTYMRHRKNLTEQYAMQIQLMQKAFEQMNIKLSNVLSDITGKSGIAIIEAILRGERNASTLAMLADVRVKASQEDIVKSLQGCWRNEHLFELRQAYDLFLIFKQKIKECDHQIEQTLQQHNNSSSNDDQMKRKAQSNNKFDFNATIYLKKILGVDITEIFGISEISAMQIISEIGIDLTKWPTPKHFVSWLNLAPNNRVSGGKLLRPKKDRKKNKAGQSFLMAAYTLQRSSHWLGATYRRIAAKHGAPVAIKATARKIAIILYQMIKKQIEFNPLPIDAYNQLFKERKLKYIKNQASMLGFQLIPS

SEQ ID NO: 267146 - protein, 316 aa, unidentified
MSASPLFVGIDVAKAELVVALGPSRDLLAVPNDESGIRQILEHLQAASPALIVLEATGGYETAAVAALAAAGLPVVVANPRQVRAFAKAMGILAKTDNIDAHVLALFAERVRPPIRPLPDEALRMLDALLTRRRQLIEMLVAERNRLAHALPPVEKSLKQHIRWLERRLADVDSDMDQAIQQSPVWRAKEDLLRSVPGVGPVVSRTLLADLPELGALNRKQIAALVGVAPLAKDSGTLRGKRMVWGGRAPVRAVLYMGALIASRHNPVIRDFYQRLVAAGKPKKVALTACMRKLLVILNTMVRNNTRWGERYALSA

SEQ ID NO: 267147 - protein, 349 aa, unidentified
MGEHLDGIEYVVGVDTHKASHTAAVVSRAGAELATLKVPSDAFGHKKLLAFADREGDGARLWAIEGTGSFGRGLATFLLENGEAVAEIDRPARPARRNGAKTDDLDAVRAAREARARPYLAQPRRRGRREALRVLVRTRTTAVRAKSVAICHLKSLIVTAPTSLRDQLRHLSDIKLAPRCTRLRTNLKQSAEHRATVTAIRATARRILWLEAEAEDHASAIELLVHEIAPQLLTEVGVGPLTAAELIIAWSHRGRVRSEAAFAQMAGVAPIPASSGLVTRHRLNRCGDRHLNCALHQITLARLAHHPETKAYYQRRTVEGRSPKEIKRCLKRYLARRIFRLLEVPPKAA

SEQ ID NO: 267148 - protein, 387 aa, unidentified
MGRRRKRAPAAVVGFDVGKSFHWAFGVGAGGEAVLSERVDNRPAAIDRVLAEAGAGALVVVDQRRNIGALVLARARAAGMRVAYLPGRAEKQAREMFPATAKTDELDAEVIARTALGMPWALREVPEEDERRASLRMLSSQRAFCVKGRTESLNRLRAVLLEADPALEAALDPSRRWQLEVLAALGSAHGCAAAGVERYRELAGARGGREDAFWEALSASAASRPEVRAEGALASMLAGQVLARDAEVAALDAAIGELLEGDATYEALLTVPGVGPRTAAALVASVDVTMFRSHDELASYCGIAPADSQSGTSARSTRPKRGGSKPLKNLLVFSCNSLVGTKNEFGRYYEECRGRGMRHNKALKAVARKRLKVIYAIMRDRVPYQAA

SEQ ID NO: 267149 - protein, 425 aa, unidentified
MKALKSHVAGIDVHKEMLAITVLIGELDGEPKEYQFESSTFTDDLMALGLKLKEMGVTDVAMESSGIYWKPVFNVFNPLGLKVVVANAAHIKNVPGRKTDMNDSRWIAELHRFGLIRASFIPDGEFQRMRLLSRHRTNLTEDLARVKNRIQKVLEDGNIKLSIVVSDIFGVSGLKVLKQIAGGYTHPNILITEVTTKIKRMEEMKKALTNCLTTEHCFVINVLMKQYEELKNRIEEGENELCKKVEPYAHLVEELDKIPGIDAILAMGIIAEASANMSSFKDERAFAAWSAVASGNNESAGKKKRAKCRKGNPALRKMLIQAAQGAIHCKKSFYRSKYNKLSFRLGSKNKAKVAIANKIARVVYKVLAGDQYKDLGYMRGDPREERIKKLLFELKSLGVEIQNHTHQNIYSKRDVKVEASGIVYS

SEQ ID NO: 267150 - protein, 430 aa, unidentified
MVVAPALQFYSRYRSNFKKGVGSFMDLVYSHVCGLDVHKKNVVACIITPEGKEIRTFSTMTDDLIALKEFIKAKGCSVVAMESTGSYWKPIYNLLELESIKILLVNAKHIKNVPGRKTDVKDAEWIASLLQHGLLQGSFVPDREQRELRELVRYRKSLIEEKSREFNRIQKVLEGANIKLSSVVSDINGASSRSILEAIINGEENPETLAELSQGKLKNKMDELKRALKGLINHHQRMLLEIQLRHIDYLDEEIAKLDEEIKNRMLPFEKDLALLDTIPGVGRRTAEQIIAEIGTNMEQFPSAAHLCSWAGLCPGHNESAGKQKSARTRKGNQKLRSSLIEAARAASRAKDTYLSSQYHRIAARRGANRAAVAVAHSILIIVYHILKQKQPYIELGPTYYEEKKRNMIIRQSLKKLESLGLKVTVESAVS

SEQ ID NO: 267151 - protein, 346 aa, unidentified
MEYYAGLDVSLKEISICVVDRDGKTIARGTCPADPDGVAGWFHNRKFNPLRIVHESGQLSIWLQRGMARLGLPASCIDARKAHKALSARLNKSDAADAEGLAQLARTGWFTPVHVRSEEADQLRSLIGARERMIRLRKDLEGHIRGVLKTFGIRMTGIGQGRQRQAFRDQLAEAGETDPVLRAIADGFITAHATLCQAADDLDKAVKQKAKGHPVARRLMTIPGVGPVNALSFIALVEDPNRFSRTSDIGAFLGLTPKRHQSGEVDWSGRVSKCGDGAMRGLLFEAASCLIRQVKRFSPLKSWAVRLAGRRGFRKAAVATARKIAVLMLTLWKTEADYQWTKEAAA

SEQ ID NO: 267152 - protein, 346 aa, unidentified
MLYAGLDLSRHRVDVHVLDEDGRTVEVTAVRPDADALRTLVSSVARHGHDVSAVIESMTGARFVHDQLELSGWDVEIADAARVKGLAPLAAKTDKIDAWVLAELARRDLVPAIWLPDPSVRAERERARFRLHLVRLRTALKNRIHATLTSFGHSVAVSDLFGVTGRELLSRLALPEPWLTTLATSLRIVDQLSAEIDACERDLRTLGREDRAVTLLCTMPGISWVLASTIASELGDIGRFATPKKLAGYTGLCPFVRQSGNRDLRGPLAKNGPKYLRWALIEASLGASRHPQYRDRYERTKRRLGRQRGAKVARIELARDLCTAIWHMLTKDQPFAPAGPAIHLVA

SEQ ID NO: 267153 - protein, 445 aa, unidentified
MSNYYLGCDISKGYADFIILDSMKKIIEPVFQLDDTFEGHNQLYRFFQEFFKQYPGSILFSAVESTGGLENNWLSLFRRLSDLMDIRSARINPVGPNALHKASLERNSNDAISAKLIAEYLITYPEKVNYNVDDPYVSLRKQWNLIEMYKKQKTQLLNQFNILLYTSMPFLMKYTRNGIPTWMLFLVNKYPSSSNLARVKETTLAKIPYISHKRACAIIADAKQSVGSTDDDITGFVINSAVEQILHLKNKIEQNKQYMTTHCDLPEEKLLESFQGIGKYSAIGLVLNIVSVDRFPSAKHLASYFGVHPVYKTSGDGKSGFHMSKKGRSAPRNILYMVARSSIIHNPLLKEVYINHIKRGNTKSSALGVCMHKILRIVFGILKHQKEFDPEIDKQNRNKTRIIKKNGAGSDSKQRYQEKSEEAPVSRRQSIERRKRKQSQSLLEA

SEQ ID NO: 267154 - protein, 365 aa, unidentified
MIVIGADTHKHSHTVAAVDAATGRACADRTARAKRRSFDDLLRWARGVGAERVWAIEDCRHVSGALERFLLRRGERVVRVAPKLMADARRSARERGKSDVIDAVAIARAAIREGLDTLPVARLAGRELDIRLLVDHRERLVAQRTALINDLRWHLHDLSPELEIPARVLTTGCWQDRVAGRLARAEQTARVRIARDELRRIRELTRSIDALQRELAVLVADLAPQLLAEPGCGVLTAAKLIGEIAGIDRFATDAKLARLAGSAPIPASSGRTTRHRLDRGGNRQLNCALHRLAVTKGRLDPDTAAYLARKQADGKTRREALRCLKRHLARRVWRLLQSPANPLEAGPPVPVTIHCNVPYSRFSLT

SEQ ID NO: 267155 - protein, 374 aa, unidentified
MVDDIALYVGLDVSKEKIAIGLAEAGRKGEVRYYGEIANRADAVRKFVDKLAGRHGRLCLCYEAGPTGYGLYRQLCDLGHECLVVAPSLVPTRPGPQIKTDRRDAVALAALLRAGELSSIWVPDETHEAMRDLCRAREAAVSDLRRARQHLLSFLLRHGRVFEGRSHWSKAHRNWLATQRFDHRAQQIAMEEYIRAIEQIEERRYRLTRQMLELLQDWSLNPIVEAIQALRGVAQISAVTLVSEIGDFRRFSNPRQFMAWLGLVPKEHSTGASVSRGSITKAGNTRARRMLVEGAWTYRLPARVGQEILKRSEGLPEDIRAIAWKAQVRLCQRYRRMQAGGRPTNIVIVAIARELAAFVWAIATTVPITPTKAA

SEQ ID NO: 267156 - protein, 343 aa, unidentified
MQIRSVGIDLGKTTFHLVALGDSGKVLLRKKFTQKQLITFTANLQTAPVGLEACSGAHFLGRALREQGHDVKLIPAQFVKPFVKSNKNDFLDAEAIAEAVDRQNMRFVPIKTDDQLDLQALHRVRDRLISRRTAVINQLRAFLLERGMTFAKTPAKLRTAMPEILENAEANLTPRIRNLVHLLWVEWKGLEQQIVEINLEVEQIASTDAACQRLRQIPGIGPLIATAIVAAIGNGAAFHKGREFASWVGLVPRQHSTGGKARLLGISKRGNRYLRKILIHGARAAVVRMKRERAPFGAWLDALQIRAPLNVVVTATANKLARIAWAVLSTGKEYQALHSPTSA

SEQ ID NO: 267157 - protein, 376 aa, unidentified
MNAVGIDISKGKSMVAAMRPAGEVLVKPFEVSHGEDDLKELSTKILSYGENTRVIMEATGRYHEPVAKTLHEAGIFVCVLNPVVIKQSGAGSVRKVKNDKKDALKIAKYGIDNWRDLRQHSLMDITRQQLKLFSRQYNLHMKTVTALQNNLISLLDATYPNVNRLFTSPARDDGTQKWVDFAMHFWHVDLVAKVKFENFADRYLKWCQRNGYKFSITKAQQIHSASKSLFATLLKSNETKLLVTSAISALNQTMKVRAAVKLEAIRIAKLLPEYKAVSALYGVGEITAAQLMAELGDVRQFENRGAIVAFAGVDPEVNQSGLQNRISNKASKRGSHTCERLCFKWLVHISSAPQKTNLSINFLTRNAGRVSPFTST

SEQ ID NO: 267158 - protein, 408 aa, unidentified
MQVTFGIDVSKSNSTVCELIGESKNELTITNDRPGFIQLLHELAAFSKHPQIIFEATGVYSRRLQAFLEDYGYEYVILNPLKAKKEMDMGLRHNKTDKTDAYHLALIQRLYHHPINQLQSQTYKQLNALSRFYDQLTADLVMAKNRLHQALQSTFPEIENLFSSAKGKNYWQIVVRYPHCDLVRREDKKQLINWLMSLKGIAFKHALRTADKLIELTYQAYPVVSCSSIEVEQVQYYAHRLLNLSDQRENLIARMVKLAKSLPNHDLENLESIPGFAQTTAVRVLAELGDLRRFSNPNKINAFIGIDPGRYQSGEMDSNLSITKHGNAVARKLLYRAIGQIDNAAKTNPCHIADYYESKKLSSQTKGFKKIAIASIHKLIRTIYALIINDQPYDYNVATHNQKDFSCN

SEQ ID NO: 267159 - protein, 398 aa, unidentified
MDLPVYYELETNNGNRDYRIQIGGHYMNYNTVYVGMDVHKESFTLCSCKYEDEKASHYQRTPASYKNVLRYLAFLRTIYGEYTRFVCGYEAGCLGYSLYHQLENFNVECVILAPTTMLEQRSKRRIKTDKRDAEIIARSLAQHNYSPVHIPTETDNQTKEFIRMRDDHKAELKKIKQQILSFCLRQGYQYDGSGNWTAKHVKWLRSLKPAGLYKEILDEYLLTYTILTDKLNRLDQRIEELASKEEYKESVSKLTCFLGIKIHTALSVIVEVGDFQRFVSARKFAGYLGLVPGQHSSGDDRNGLGITKAGNTHVRRLLVESAQSYTRGKIGYKSRVLRSRQAGNSPQVINYADRANERLRRRYYKMVLKDGKKYNIAKTAVARELACFIWGMMTDNIY

SEQ ID NO: 267160 - protein, 364 aa, unidentified
MPPIVAETVAQRFDAVIGLDAHTDTHTAVILDRLGIVLAQIVVSADPAGTDRLLAWAQTHAPGRTLWAVDGTRSHGQGLTTALHTAGQQVAEAARPQGAKSRRGARPGGKSDTLDATAIARSTLATPVSKLAWPRADGTRETLRILLTCRRHLTDTRTATINMFKALVLTADEPTRSLLRGLPAVRQARLAIRWDQPTDCHTGTQAHVTARRAQLAALAADILALNQRINHNLRQLRQLVQQVCHQLLAKPGVGPVTAATALAAWSHPGRLRNEAAFAKLAGTAPVEASSGRIKRHRLNRGGDRTLNSALHTIAITRRRCDPTTRDYIQRRHAQGKTGPEITRCLKRYIARQLFRIMQTSADMG

SEQ ID NO: 267161 - protein, 352 aa, unidentified
MQHFIGNDLHTRYQLVAWIDEQTGEIRKRRLEHTGEEVGKFYAQFPRGTVVGIEATIPAYWFERLLEKLGHTLWVGDAARIRAYEVRDQKYDPRDAENILDLLRTGRFPRIWVPTLEERDLRQLLVHRMKQVRARTQVKNQLHALAISQGVCRKRKLWSAKGRAELERLALLPWAARRRQELLAWLDRLDAQVRDLDRAVEEAGRERPEVALLRTHPGVGMVVALAFVLTVGPIERFLNSRRLVSYWGLNPREHSSGGRQRLGSISKQGNTLMRWLLVEAAQTAARFDPELRRTYQRLKSRRNSGVAKVAIARRLAIRLYWMLRTRHNYAQLVPMSGSPSSAVVPPEAGSRV

SEQ ID NO: 267162 - protein, 426 aa, unidentified
MYFKRSHTTNQRIERITMKTAVVGIDIAKDIHAAQVTDFRGRTLTPRHLSFTNDRMGFEKLLNWIQQVQSKHRLTSVLIGLEPTGHYWFNLTQWLLTHQIPVVLVNPVTTHRNKENRDNSPSKSDPKDALVIAELVSRGYYTEYVPQTETFERIKTLMSDREFWVKMLGSLSNRIVRWIDLYFPEFRQVFEDWTCVRAIATLKAFPLPSELQQRTVEEVVQGWYEQGMRRAGGMTGKAKAAQLLQAASRSIGHSHARDEARRDLARLIEEYERIVQQLHEMQQEVEALLEELPLARQLRSIPGLGTITIAALLACAGDLSQYAHGRQLLRRAGLNLAEHTSGKHKGEVKLSKRGSGMLRKYLYLGTLSLIAQNPEFKRMHERNQSKGMKKMASVFKCIGKLARIIIGMVQRGETYRPERMYLPSAA

SEQ ID NO: 267163 - protein, 316 aa, unidentified
MQTPLNIGVDVAKDQVMVACAESSFAPRAIANRRGALSAWLRSLPTGSRIGLEATGIYHQSLADLAHAMGLSVFVLNPKDVHHYAKGVGRRAKTDRVDAEVIARYVAHEHQKLHAYVPPSPEQRLMEQLLRRRARLVSLRVALQATTAELDVCRAQSQAVLRQLQALIDALEAQLNQLLKHSAVSGQAHQRLQSIPGVGLMVGASLSVALQRLPFKNADAFVAFTGLDPRPRDSGKKIGRRRLSKRGPSELRRLLFNAAMAGSRSKAWKPFYLHHRQRGLSTTEALIVLARKIARTAWSVSHYQTSFDPARIQALT

SEQ ID NO: 267164 - protein, 478 aa, unidentified
MTPRKGKGFAKDVAAARKHAGMELLRPHAAGIDVHSRQHYVAVPIDGVPAEWINPDPHLPVGVRIFGTNTGDLEAIAAWLLDCGVKTVALESTGVYGEVLLVILEQHGLEVVLVNPQQTATAPGRPKSDVLDCQWIQRLHSYGLLRASFRPSAEIRELRSYQRHREMLTRCAVSHIHHMQKALEQMNVKLTEVVSEITGQTGMNIIKAIVRGQRDAYKLAQYRHARCKASEAEIASALLGTWSEAALFDLQQALKAYEFYQRQLQECGERIKTCLQQFADRSEGKPLPKPVRQFGRKKNRGVFDNARQMLYQLAGVDVTLIEGIDETTALVLLCELGYDLSKFPTERHFTSWLGLSPNHRGSGGKIKSRRVRPGANRAARALRVAAQGCHHAKHALGAFYRRIAARCGAPKAVVATARKIAERFWRLLTKGTAYVRQGMDEYEKNYHFKLARRLAQRAAELGYKLVPLALTPEPEPQQ

SEQ ID NO: 267165 - protein, 349 aa, unidentified
MGEVSTIGVDIAKSVFQIHGVDADGMVVIRKRVGRAKVLKFFAGLPPCLVGMEACATAHQWARELKKFGHDTRLMPPTYVKAYVKRGKNDAADAAAICEAVTRPSMRFVPIKSVEQQSALMLHRTRDLLIRQRTQLINALRAHLAELGLVAAKGHEGLHQLVTAVAESSDERLPSNARFACQAIVAQLSAVQTQINGIDTRITQAHRANADSKRLDAIPGFGVILSTAVVATMTDPKAFKTGREFAAWIGLVPRQNSTGGKERLGSISKQGDRYLRRLLVLGAISIVGTARTRPDKYPWVTELLGRRPAKVVAVALANKMARTAWAVLAKGETYRAPTRSSSAAIAAAA

SEQ ID NO: 267166 - protein, 398 aa, unidentified
MSLFNLSHKSEVRLVSTFRYSLMHMTHSFHAIVCHQLNLLVKQLMENITPDFNMVLLHIGIDVHKKQWTVTILVKGVHHRTFSQPPRPDALKTYLDKWFPNARVYCAYEASKFGFWICRELLSYGYECIVINPADIPTSSEERTNKTDSRDSRKIARLLKSGLLRAIHLPDQQTETDRQLFRFRKKLWGDLVRVKNRIKDKFIFAGISIPAEFDTSYWTKAFLQWLKEVDLPNARLRITLNLLLEQYHFLYRHFLKTSIEVRKLQSVERYKVDAKLLRTIPGIGPLTTVQILTELQDIKRFENFKKLNSFIGFKPMVHASGDHDWRGRMTYRRHKALRSALVECAWTSIIKDPAMQQRYADLKKRLTPKRAIIIIARKLLSRIYYVLKNQKPYELGIR

SEQ ID NO: 267167 - protein, 348 aa, unidentified
MSASYIGIDLHRNVIQICVLDERGATLAEENIRYESLEEGLAAVAFVRRFAPGCRVAVEALGLNRWFVNACLAAGIPVLVCDARKLGLRNLGKKTDRRDAYEIARRLWLGDLDRMARTYYPSDAEYGRRKLLRVRHRLVQMRQQTVNQLRAMLNAYQVPAPRTVLYTRPSQEKLASVRLPETELQLAFDALRSVLERLQEQILALARRIEKLPRTEPEIGALVATLPHIGAQSAATLCAELGDPRRFRNARAVAAYAGLVPSVAQSADHAHHGRITKQGNRELRWILSQWAVRLMKDDPLVRAWAAKLRRRVHRNKARMALARRLLVGVWILLSRGEAFDLRRCLGIA

SEQ ID NO: 267168 - protein, 313 aa, unidentified
MQTICGVDVSRAWLDAFVAPGQYQRFANDTDGVAALAGFCRDHGAELVVMEASGGFEQPAFLALWQHGQPSAIANPAAVRHFAKAMGYLEKTDRIDAGIIARYAQAKRIVPTPPPSSDQQKLTAIAARLRQVIADLSVQKQRLHFTRDPQALASLQEAIAFFTRQAKTLTGEIAGLLEADPLWHALDRTLRSVKGVADRSVAIILADLPEIGTLSNKAIAKLAGLAPMANDSGKRQGHRPVRGGRASVRTILFLVANIARKFDQTLDDFHRRLTDQGKPKMVVRIALARKLLVRLNSKARETRAQLANALGNR

SEQ ID NO: 267169 - protein, 341 aa, unidentified
MTRKEWKRKNKKVLEFAEGEGKRKDGLVMGIDVHRDVFAYCIVDEKSILKESELSNNKEGIRKLIRILLKMRVGSVAIESTAQYHLKIVYELIREDIPVLVANPQQTKNTQGKKTDKLDARRIAIAHRDGRLKPSVIPPEELFNLRKATRHKLKLIGEMTKIKQRLDQVFHNKDFYYKNLLKSKRGLEILKLVVSKRMIDEEIVKKIIGNRGANYFNDLFIKDLKKFRDKLDEVQQIDIASDLYRLELLKLTCDMQDQAVYAIAKKNKEFAKNMKILLSIPGVGPFSAAIILAEIADIGYFPSPKKLVKWAGLAPRVYQSGHKKKITGKIHKGGNKYLEEQ

SEQ ID NO: 267170 - protein, 336 aa, unidentified
MTSMHFIGLDIHKKTISYCVKDVSGTVLSEGTVAATRAQLNEWMKSLPTPWTVAMEATMFTGWIYDHLLPHAAAVKVAHPLMLRAIAAAKKKKNDRIDASKICDCLRCDFLPECYMVSSQVRERRRTLRYRKLLVRQNVQLRNKVSQMLMESGVVYNKQKLHKVGYFKELVATNPDISSELKPLLTICRETIVRIGKTEGALVRSLRRDPLLHARVERLMTIPAVGPITALTWVLEVDDVTRFHSVKQAVSYCGLCGAERSSAETFKRMPISKQRNKHLQSVLIEAAKLAPRLSPDLALVYMTRKSRRATPIEPRLLLPGSLSPTSLRSTAVDESS

SEQ ID NO: 267171 - protein, 350 aa, unidentified
MTEAYDGRQVVGMDLHRRRSVLVRMTEDGRRLETARITNSAAELRRQIAKAGQHPKVVLEATYGWYWAADELAAAGAEVHLAHPLGVKAFSYRRVKNDEKDAGDLADLLRMGRLPEAWIAPPEVRELRELTRYRIKLVRLRSSGKAQVHAVLAKLGIPVTCSDLFGTWGSAWLDGLALPQPYAGKVASLRELIGWLTTEIGLLDAVIADLLGSYRPYYAVRALPGLGPVLAAVAVAEIGDISRFPSPGHLCSWAGLTPRHRESDLKVARGHLTKQGSPILRWAMVEAVQHQPDGSPPRELKDRIVARRGAQARNIAKAAAARKLLTCVFYALRDGQVRSLSARSRADEAG

SEQ ID NO: 267172 - protein, 419 aa, unidentified
MAPAVLAEAVNVIDQEVCLLLYRGLRTLVRRATYRTLVSVLCKDHRRQTMHDDTTAFVGLDVHKEAIAIAVADPGRAAVRYLGAVRPALTPLTKALAHLGPPQSLALVYEAGPCGYGLARRLLKLGYRCEVVAPGKIPHRPGERIKTDRRDALTLASFARSAELTPVLIPDERDEAMRDLARAREDAVRARLKARQQLKAMLLRHGHHYSGRIFWSAAHQRDLAKVSFPHPAQQIAFTEYRLAVTEADERVARLSAALREQAETWRLQPLLNALMTLRGLQFLTAAIVLAELGDLRRFPHPKQLMSFLGLVPSEYSSGLSRRLGPITKCGNAHIRRVLIEAAWSYRYPARLSRELQLRQQGQPKAVRDIAWKAQLRLCARYRRMQARGLHQNKTCIAIAREMAAFIWDIARHVPIAPAP

SEQ ID NO: 267173 - protein, 365 aa, unidentified
MSFVFPSTCPKRYLATFDTTTKGLRAYHDFLSQFHVEAVGMESTGVYWRLVWHALCDDFELILAQPAHMKAIPGQKTDKKDAHWIAKLTRIGLLPRSFVPDETIQELRELTRQRKHYVESRNRETNRIHKILQSGGIKLTTYIEDIMGLSGRNLLQLLVDGTPITPRIVHQSVYTSLKKKVPQLLEALDGYFSDHHRFMLKQSLEIYDFYQKQIELLEERITVYLSQYENHVETLDSIPGIDVITASVIISEVGVDMSQFPTSGHLASWAGLCPGNNESAGKKRSTKIRHGNSYLKKCLCQAAFAVKRQKGSPLAERYYQIQSRRGSQKATIALAHQLLKIAYILLKEQMTYPEFLAQKRLLGTS

SEQ ID NO: 267174 - protein, 423 aa, unidentified
MTIVYPICCGVDVHKRFFVATLITTEGIEPKYKKRRFSTFNNEILAFKAWLLENNCRDVCMESTGKYWVPVSNLLEDSINVTIANPKWVKTISGNKDDSKDSKWIGDLFRIGLVPGSFIPSKDIRILREYTRYRFKLISCKSSEKNRYQNVFTVCNIALDAVVSDMFGKSASSITDYIVNSDTFDSEHCVSLLHHSLKKKSDEVIASIEGFQMTSSQKVRARIVKEHYDFLIEHIQKIDAVIDELVKPYEPAINLLCTSPGIRRLSAITIISELGTDMSQFSSSKRLCRWAGLTPGNNESAGKKKSVKITRAGVYLKPALVEIAHAAVTSTQTPYYKLKYERIVKRRGKKRAIIAIARMILTAIYHMLSTGEVWNPSDLDQIDMPPELREKEIQKSLRRAAKLLVSHGLITPDSIQFPATHAA

SEQ ID NO: 267175 - protein, 366 aa, unidentified
MDKVKFYVGLDVHKDSIAIASAAAYSRDDPHFVGTTRYSVISLTKALSRLGAPSELNICHEAGPCGYGLVRALREQGYHCEVVAPSRVARRPADRIKTDRRDALLLARLHRAGELVPVAVPEPQDEAIRDLVRAREDAVNDQRRVRQRLKSFLLRHGHAYTGTRWGPKHELFLSRIKFEDSAQHIVFTEYRMAVRFATELVERLTQSLRAHTETWRWLPMVKGLMTLRSIDFISALTIVAELGDLRRFPHPREFMGYLGLMPSEHSSGNSKQRGRLTKTGNTHVRRILIDAAWNYRLPARIGESLQPRLEGQPGHIIDIAWKAQLRLCQRFRRLRARGLHQNKTRAAIARELCGFIWDIGTRQQPA

SEQ ID NO: 267176 - protein, 371 aa, unidentified
MNESSKTLYVGLDVHKDSIAVAYAPEDRGAEVVSLGTIGTRQSDIDKLIRKLQGKGATPVFVYEAGPCGYWLYRYLTKREFSCHVVAPSLIPRKAGDRVKTDRRDAITLARLMRSGDLTSIYVPGVEDEALRDLSRSRDDAMQDLKRSKRRLKSFLLRQDIRYAGRANWNAAHLRWLATVVCPTPPQQIVFQEYVRAVTEQQERLQRLQCELHEAVKGWRLYPVVEAIPALRGVELTGAVILLTELGDITRFENPCQLTSYLGLTPSEYSSGERRRQGGITKAGNSHARRALVEGAWAYRYPAKISRHLQLRQEALPAEVRAIAWRAHVRLCRRYRQLTARGKHVNQVVVAIAREMAAFAWAIARAVPLAA

SEQ ID NO: 267177 - protein, 432 aa, unidentified
MGACELESGDVALATIPIRKMTIGIAQTLLLIIEWRIAMPKKRTAGDRPELKPVNVGAAAIDIGSTMHMAAVNPACTDVPVRSFGTFTRDLHELADWFKTCGVTSVAMESTGVYWIPVYEILEQRGFEVILVNARYAKNVPGRKTDVSDAAWLRQLHSYGLLRGSFRPDAEIATLRAYLRQRERLVEYAAAHIQHMQKALMEMNLQLHHVVSDITGATGMRIIRAIVAGERNPDVLATYRDVRCHSSIATIRAALVGNDRHEHVFALTQSLELYDVYQAKMLDCDRKLEVLIAALNNKGAKPIGKLSKPRIKTKQVNAPTFDVRTALYGVLGVDLTEIHGLGPSLALKLIGECGTDLRAWPSAKHFTSWLCLAPSNKISGGKVLSARTRRSSGRAPALLRLAATTVGRSDTALGAFYRRLSSRAGKSKAVTG

SEQ ID NO: 267178 - protein, 404 aa, unidentified
MLYTGVDWADQKHDALAVDETGKKLGAIRVPHTAEGLAKLDTWLSSMLGSSDKEQMACIVETNHGLLIAFLLEHGWPVYPVNPRTVDRKRSASNAKTDAIDAYLLAKTGRADFADLHRLIPDSEKVAELKGLTRDQDSLIQMQTRLVNQLTACLKDYYPIALDLFAKLQQHSTLLFLQTYPTLEAAQAVSVEQISQVLKAAGHTTASKVAPKIFEQLHQPSLRANAVTIRTKSRLALALIVQLLPLVEQLSEYDKEIERIFLSHEDNEVFMSLPRAGKRLAPRLLAEIGDDPSRYESAASLQALGGTSPVLFQSGNYSKPHRRQGCIKPLRNALHQFAWQSTLSEPWAAAYYERKRAEGKSHSVAVRALSTMWVRIIFAMLSTHKPSVSAIFETARTLHAVKAA

SEQ ID NO: 267179 - protein, 423 aa, unidentified
MKLATEHRFTALVGIDWGDRKHDFCLQVAGSEHRESGVLVHSPEAIARWATGLYSRFGGPIAVCLEIAKGPLVHALQRHDFIVLFPVNPATLAKYREAFVPSRAKDDPTDAEIALELLLRHRDKLQMLQPQSADMRTLATLVEQRRDLVGDKTRITNRLNSTLKEYFPQMLDWFEDRDTLLFCDFLQRWPSLKHVKRARQATLQSFFSAHNLRRARLIEERIHSIRSASALTNDPAVIAPHQLLVQALVAQLRVTLQAIDDFDAAIIEVAERLPDYQLFAALPGAGSILAPRLLVAFGEQRERYRSAAELQNYAGVAPVLERSGNKCWVHWRLACPTFLRQTFVEWAGSTIPRSFWAGAYYQRQRAKGCSHQAALRALAYKWIRIVYRCWQTRTPYDESVYLNALKRRGSPLIAHLATTTQVT

SEQ ID NO: 267180 - protein, 394 aa, unidentified
MKLIGIDIGKNKHFFCIMDQQTGEIISQPISFSNDKEGFDFLIQKIKSYSKDSILIGMEDTGHYHFALLKYLLNLQYTVALINPKTTDFNRKIQGGITKNDKLDTINICDVLDTPERKKQYRITKVNSFDLYEQKQLTRHHHNLKEEENVYKNRLQKCIDIVFPEFNNLFNSKYGTVYMNILKMFGSAENIANTDIRTIRKCFEIEGRGNRISLTPERLKECAGSSIGISSSAEVIQIKHLTAQIELIEEQLTEIDKKIEEFSIQNNSPILSIPGISHFSGTSILAELGDISNYSKPSQIIKFAGVAPLHYESSQFNAQHTAITKKGSKYLRKTLYQIILPVIRHNPVFNKYYQLKISQGKGHRCAQGHCVRKLLRIIYHLLKTNQQFDPQLLR

SEQ ID NO: 267181 - protein, 521 aa, unidentified
MTGFPMVPACPYRSLVPRPSADPLVKFRGLWRVRGTILFKRLQFFMPLLGRNHNHHMKSKTPKSKKQKKKISIDQGWEAINPHAAGIDIGSKEHFACVPPEATLKNVRSFGTFTADLGALADWFKQCGVTSVAMEATGVYWIPVFQILEARGFAVILVNARQTKNVAGRKSDVQDCQWIQRLHTYGLLQGSFRPEDPYCVLRTYLRYRDELVSARTTQCQHMHKALQQMNVQLAQVLSDVTGVSGMAIIQAILAGERNPVKLAALVDRRVRATPIRIQKALQGDYRQEHLFVLQQAFSLYGTYEERINACDEQIVRETATLPDKVDPALKPLPPRKEGRPASKDKIQDQDMRQALYRKFGADLTAIEGIGVATALVVLTEVGPNMVSFKTEKHFCSWLGLCPDNRISGGKVLSSHTRRVINRASDALRMAAVTLERSQSALGGFYRRMKGRLGAAEAITAAAHKLARIIYRLIKHGETYVRQGMEDYERKFQERKLHALRKTAASLGFNLIAQQEVTSPVS

SEQ ID NO: 267182 - protein, 338 aa, unidentified
MKLYGGIDLHSNNSVLALLDEDERLVYRRRLANEAPSILEALAPYRDGIVGLVVESTYNWYWLVDALMEAGYAVHLANTAALVQYSGLKYSDDDSDARWLAQLLHRGLLAEGYIYPKEDRAVRDLLRRRSRLVQQHTGNLLAIQNLFARNRGRSLSANEVKHLTPETVPRLLPDPNQALAVQATLLPMRGQEAAIDLLEREALAQVRLRPAYRHLQSVSGIGQVLGLTILLETGPIERFAAAGHYASYCRCVGSERLSNGKRKGRGNTKNGNKYLAWAYVEAANFAVRYNAIINRYYQRKRAKSNGVIATKTVAHKLARACYHILREGTDFDVAKAFA

SEQ ID NO: 267183 - protein, 405 aa, unidentified
MYYIGIDWSSSFNDISILDHTGNFIKHFRADVTSSGFACIQTELNLLSKDHSDFCIGIETDKNILADYLITAEHTVYNLNPLCVKRFKDSQSPTPKKNDKYDSIMIATMLFRDKAIYKPVMKSSYNSEYLKSICGIMNDLTSQRTRLTNALRSNLMLYFPAFSEFFTEMDSSVALNILKLFPLPDDFLSVDKSDYNKIVKSVKYLAAKRAEKIYDFMKEKALSLKTPNASACAIKSVMLADQILLLNQQITELDKEIKKLYEHSPMYKIFDSIPGAGLRIGSQLMALFGDNPEKFASYNAVQCYAGTCPSTQSSGKNYHSVKMRKACNKNFRKVLYQLSFARLQKKDEWSSLEYYAHRKNGKSHSAALRIISNKWAKIIYAMWRDKTEYNDANYVDRRKKIMEAA

SEQ ID NO: 267184 - protein, 355 aa, unidentified
MNQEKYIGMDVHDATISAAVKNAEGKLLMECVLETKAATILDFIQGLRGTLALTFEEGILAAWLHDLLKPHVSRLVVCDPRKNALMRDGNQNDRADARNLAELLRTNQVKAVYHGKHGTRALKELGRSYLTLTKDSTRVMNRIKSVYRSWAIPCGGTSVYSRRHRAEWLAKLVEPAVRIRAEHLYQQLDSLEPVRQAARRELLGESRKHAAVKLLRQIPAIGPIRSALLVAILQTPHRFRTKRQLWAYSGFAVQTYDSGEYRMVRGKRQRNRERITVRGLNRNHNHDLKNLLKGAAISAIQRPGPLQDFYAALVEKGMRPSMARLTLARKIAAITLIIWKKGVSFDPQQLQRQAA

SEQ ID NO: 267185 - protein, 388 aa, unidentified
MMADPSATPIEATTRPDAGRLFAALELGKSRWLVTVDAPGSDKLSRHAVAGGDGAALLDLLARLRTTAERRTGRPVEVLVIQEAGLDGFWLHRLLERNGISSHVVDPASIAVNRRHRRAKTDTIDGEMLLRTLMAWARGERRVCSMVRPPSPEEEDRRRLTRERATLLKERIQHTNRIKGLLYGQGIIDYDPLRKDRLARLDALETGDGRPLPERLEAEIRREIERVELVASQIAAVERERDALIEAPSEAAGPGTPAAALARLKGIGGELGALLWLEALFRRFDNRRQIAAYAGLAPSPWQSGGTEREQGISKSGNRRLRHAMVELAWFWLRHQPDSALSAWFRERVGPGRGRVRRIAIVALARKLLVALWRYTTQGVVPQGAAFKA

SEQ ID NO: 267186 - protein, 461 aa, unidentified
MKAFLGTDVSKGYADFVLLNHKGQKLEDTIQLDDTHAGHNLLLGWINELCHQHGIEELYCGLESTGGLENNWLATLKSKPANVPINVARLNPSVVVNASKAELRSNVTDSESAYNIASYLYRFTNKVDFNQQDNLYAGFRSLHNQILMQLKQKTQLSNELKQLIYSAFPELQRYCNKGMPGWVLKLLSIYPTAANLAKAKVDRLVKIKSITKEKATKLIDSAKNSVASRSGETEGYLIKTLVEEIQFKEVKIQQLKAYLEEHCQGEETKLLTTIKGIGAYSAAALMAQIEEVHRFESPQKLASYFGLHPVIRQSGDHKGVSRMSKRGRPGVRTILYMCACSAVMHDMHMKSIYHQHRENGKTHRQAIGVIMHKLIRVVWGVLTKKQPYNPETDKQNQQKRQETKEQKDRKSTERVRRLQSFDQNAPISRLASKKRKVHSLSQSGMAEKARDPEIEPIKTNI

SEQ ID NO: 267187 - protein, 363 aa, unidentified
MRDGICFVGLDVHARKTVGAAVQLGGGEVFRAQIAGAPMEAIGWLQSLPGPVRAVYEAGPTGFGLARAARAAGIEMIVCSPGAIPRQPGDRVKTDKRDALKLARLHAAGQLRAVLVPNLALEGLRDLVRAREDLRGDLMACRHRISKLLLRRGLVWPGPGSTWSQRHLSWLGRVRFDDPLVELVFAEHVACHEVLLARRDRLECAIDQQAADGTWAGLVARLRCLRGVDTLTAVGLVAEIGNFQAFDHPRRLASYVGLVPSESSTGTRRRQGAITKAGSGHARRLLIKAAWHYRRTPRVSLDLRRRQHDQPPAAIDAAWRAQLRLHGRWAALDARRGKKRTTVAAAVARELACFVWEIANQPD

SEQ ID NO: 267188 - protein, 400 aa, unidentified
MRVVFGIDVSKVSSEVAILVNGEKVHGYTMPNDAIGFSRLLGDLKTVHKPEIIFEATGVYSRRLQTFLEDNGYAYTRLNPLEVKKQLDSLRVRKTDQIDAEKLAQSQFVLNRKPTYVQEEVYQNLRDLSRFYQNLTEDIVRAKNRLHKALQVTFPELENILSTPSGEQYWNLVIAFPCKDFVLELSKNELSESIRQSTSKRISDKRVAYLAEKLIALANQSYCAVKKTSPMLEEVRYYTKELLRLSEQRQAVLDEMVELAQPLPEYDILRSIPGIAETTATSIIGELGDIRRFQSANQINAFIGIDLRHYESGNFIAKEHITKRGNPYARKILFKCIHNIASASHTNPCHIADFYKKRKRQSQTTSTKPHTIASIHRLIRTMYYLIMHNKLYDYASTQNR

SEQ ID NO: 267189 - protein, 316 aa, unidentified
MGKMMIGMDVAKKWIDIAVAGDSRVKRIANNEGAIEARVLQIGAGSIGLVAFEPTGGYERHLRRCLSRVKVAFKQVHPNEVVAYRRRRGIRAKTDRIDARLLADFAAEELARRDLAPVPEADEVLRELAARRRQLQGLLHAETCRRDMAASAAVRTSLQAVIAAIERSLAAVDEAIADRVASSAHTETNRRLQTFCGVGPGISETLIAELPELGHLSGKQIAALCGLAPHTRDSGKQRGHASTGHGRPGVRKVLFNGARSAIQHNPIMKAFYRHLVDDNRRPGKVALIAVMRKMLVTLNAMIRDRSDWRHAAKSAA

SEQ ID NO: 267190 - protein, 404 aa, unidentified
MKDTTVRYAGVDWASASHAVCIVGEDGEVAERFEVAHRAGDLTQMCRRLIRAGVSRVAIERPDGPVVDALMETGLEVVVIASRQVKALRERYGSAGNKDDALDAYVLADCLRTDGRRLRPLTPDSPETLTLRAHVRARRDLVAQRVAAANQLRAHLQIVFPGAVGLFADIDSPISLRFLARFPSAASGQWLSERRLGTWLRANGYCGRRNARELYERLAGAPAGLLGDEGRARGAVTGAFVAVLVTLRAQIAELEARIAEQLELHPDGEIFTSLPRSGTLRAAALLAEIGDCRERFPSAESLACLAGAAPSTRSSGKHRAVGFRWAADKKLRNALIDFAGDSRHANPWAADLYARARARGKTHPHATRILARSWCGVIWQCWQDRTPYDPERHNALQRLVAVEG

SEQ ID NO: 267191 - protein, 412 aa, unidentified
MDVMYPCCCGLDVHKKTVAACLITSTEGPEPVKEIRTFRTMTADLLALADWLQQAGCTHVAMESTGVYWRPVYNLLEGQFELLVVNAQHIKTVPGRKTDVKDAAWIAELLRHGLLRGSFIPSKPQRQLRELTRYRSTLVQDHARTLNRLQAVLEDANLKLASVVTDISGVSARAMLEAILAGERDVETLADLARGRLRTKRDQLKEALEGRVTAHHSFLLTEHLSALEYLDEAIARVSGEIDQRLTADQEAIALLDTIPGVGQRAAEILIAEIGTDMSRFPSAKHLASWAGMCPGNHESGGKRLSGKTRKGSRWLRQILVEIAHVASKTKNTYLAAQYRRIAARRGKKRALIAVGHTILTIAYMILTRKQPYQDLGAAYFDQREQHRVERRLVQRLERLGYEVSLQPKALAS

SEQ ID NO: 267192 - protein, 367 aa, unidentified
MIIIGCDYHPGFQQIAFVDTETGAYEEPRLQHCEEAEKFYRDLAGQGMKVRVGMEASGHARWFERLLAELNFELWIGDAAEIETKRVRKPKTDREDARLLLRLLMEDRFPRIWVPSWENRDLRQLLWHRHRMVQARTRIMNQLQAVALNEGLRCKKRLWREAGRQQLEAFRLAPWASRRRHDLLELLDRLNPTIAELSQAIEQAVEKCPEAQRLMTHPGVGPLTALACVLIIGRAERFQCGKQIARYLGLVPLEKSSGNRRRLGHITKQGNSMLRFLLVEAAQVTLRSIPEWRGKYFHLMMRRGRKIAKVAMARRLAVRLYWRWRKEWDSEQLKKFGSHVGQLGSGDGVHQNTEKLIGRPAPLHRGV

SEQ ID NO: 267193 - protein, 341 aa, unidentified
MERTVIAVDIAKKVFQLHWVETETGCIERLQLKRARMLEWFANRTAALVVMEACGGAHDWGRALIGLGHEVRLISPRKVRPFVQRNKTDAADAQAIWTACQQPGMRFVPVKTEAQQIVLSLHRLRAQLMKTRIMQTNELRGLLYEFGVVLPEGHAALLKALPDAMCDAKTRLPAMLMDSLDEQLGRVQQLQADIGLIERRLSQQMREIPACKAVAEIPGIGLLTATAVVASMGTPTAFKDAREFAAWIGLVPRQTGTGGRVRQLGISKRGDAYLRTLLMHGARAVVIRSKDGPTWPWLTALLERRPYSVAVAAVANKLARTIWAVLARGQAWRPEAWQAAH

SEQ ID NO: 267194 - protein, 349 aa, unidentified
MVVLGADLHKRTHTVVAVDEHGRRLAERTVTATREGHLELRRWAAQWPERRWALEDGRHLSRRLEADLLRAGEHVVRVPPKLMAGTRRSAREPGKSDPIDALSVARAALREPDLPTATLDGVEREVRLLVDRREDLVGERTREVQRLRWFLVELEVPEPAPAALDRVVVQTRLAAELASRPELVARLAREILARVVELSHTIRRFEREIEARIRPLAPHLLALVGCGPLTAAKLVGETASVSRFRSKEAFARHNGTAPVPVWSGNTVRHRLSRGGNRQLNVAIHRIAITQVRLGGLAKGYVDHRRAAGDTKTEALRALRRRLSDEVFRRLRLDEEAHVKVAATLTTAAA

SEQ ID NO: 267195 - protein, 380 aa, unidentified
MASMHDSVRFKTTVYAAIELSKKSWVVAIALPDRDRPSIHRIAGGNLADLIGRLRKAAGEKQRIVVCYEAGYDGFWLARSLAKIGIDCRVLDPASIQVNRRARRVKTDRIDSLALLRALIAIDRGERHVCAVVRVPTVEEEDARRSHRERQRLVRERTGHINRIKGLLFAQGIRGIEPKRRRTRIDFGKLTTAEGRPLAERLRRELEREYQRLELVQSQLRIVEKERDTADAQDPAVERKRELLCALQGVGGASAAILAREVFARPFASRRQLGSYLGLTPSAYDSGSTTRCQGISKAGNSWARRVLIEVAWLWRKYQPGSPLSHWYARKTADQSPRIRRIMLIALARKLAISLWRYVETGLVPDGAVMAKTTPHMATAT

SEQ ID NO: 267196 - protein, 400 aa, unidentified
MNPVVGLDISKGESQVQTFLDKGKPYRKSFKVSHTIEGLDLLVEFLEVVKRETGKKPPIVLEATGHYHSSVVQYLEDRGYLMIIINPLISYKAKSSSLRKVKIDAVDAYHLCEIFYKEDLEPYKKRGVHLLNLRNLTRQHENITGVLIQTKLQFQAILDQVFPEYRGVFGDLYSVVSLLTLSEFPSSEDILEASVETISDKIAQLCKSRSYRWANEKAIQLKSAADRNPFEKTLYQSHILSLGMYINIILQYKEHLSKLESEIDALAKEVEEYNIIKSIPGIGEKIAATIISEIGEIDRFTDPKKLVAFAGVDPSVFESGKFTATKNRITKRGSSRLRHALYMAIRCAIRDCRKKKTTDEIIPRNKKMREFYDKKRGEGKPFKVAVIACVNKLYLGYLPF

SEQ ID NO: 267197 - protein, 429 aa, unidentified
MNYTQNEKILQVGEGNLIVGIDVGSKKHYARTFDWRGIECSKKTFVFTNDAEGFAGFLEWTSEMLEKSGKETVIPGMEPTGHYWFDLAKFLQDNGMRPVLVNPLHVKRSKELDDHLPSKNDRKDPKTIAKLVIEGRYAYPYMPEGVYADLRNASNMRFQVEAELTRNKNRIQKWFSVYFPEYNEVYGSFDAISSMMILKQAALPCDIISLGAEKINQIWREAKLKAVGKKRAQTLVEAAQRSIGYTEGLGTARIEISMLLDDYEKLKVRLELIMELIEKLVSKIPYAEKLMNIKGIGMKTVSGFIAEVGDISRFTNAKQLQKLAGQAIVENSSGKHKGKSRISKRGRKRLRYLLFEAALSLAATNPEFKDLHRYYTSREQNPLKKIQSLMVLSNKLIRVFYTILKNGADYDPEKLLNDIRRPEGMSKVA

SEQ ID NO: 267198 - protein, 309 aa, unidentified
MEQVYVGIDISKDNLDVAIHSSNEQWRFPNDNVGITSLCKKLRQFEPALVVFEATGGYEMPLHLGLDSAGLPATPVNPRQIRQFAKSTGKLAKTDSLDARVIAHFGYAIRPTPHPVPQTHDLKIAQSRRVQLLGMITAETNRLKSAPKALKARIDAHIAWLRQDLSETDQELRIMIENDPVWLEKDALLQSVPGVGPALSVTLISQLPELGTLNRRQIAALVGVAPLNCDSGTLHGKRVVWGGRANVRAVLYMATLVATRYNPVIRNFYLRLCSAGKKKKIALTACMRKLLTTLNSMLKYHVPWSYSAG

SEQ ID NO: 267199 - protein, 372 aa, unidentified
MEVLYPRCAGLDVHAGSVTACARIATDAQVTYDHHTVPTTTRGLLALAEWLTTHGCTHVAMEATGVYWKPVWHVLEAQFTLVLANAMHIRNVPGRKSDMNDATWIADLLAHGLIRSSFVPPAPIQELRDLTRTRRQLVHEVARHVLRIQKTLEDANLKLTQVMSDIVGVSGRAILNALIAGEMDPNRLADLTRGRLKATRADLVDALHGRVTDHHRFMIKLHLTHIDALETAVTTIEARIGDALGPCRAAVSLLTTMPGLSETTARVLIAEIGTDMSRFPSAGHLISWAGLCPRLDESAGKRRSTRTRQTTPLAQTHVDQCRVGRHAQEGLLSARAIPADQKPSRRQESHSRRRQLDADRGLFHAPRRRRIP

SEQ ID NO: 267200 - protein, 341 aa, unidentified
MEVKLIGLDIAKRVFQVHGVDGVGEALLVKRLRRDAVIPFFAALPPTPVAMEACATAHYWARELMALGHEVRLLPPRYVKSYVWRNKTDAADAAAICAASRDPRIHGVPVKTADQQALLALHRVRELLVRQRTTLGNALRAHLAEFGIVAPQGQAGLGRLREAIGDCEVLGVPDVARAALEPLAAQWSALNDRIRELERAILRQHRADETSRRLATIPGIGPITATALVATIGDARNFKTGRHLAAWLGLTPREHASGLKRRQGAISKRGDAYLRRLLTLGAQSWLRHHKTSQGGADPWLTALQQRRPTPVAATALANKTARIAWAVMSRGETYRPRPTNS

SEQ ID NO: 267201 - protein, 362 aa, unidentified
MTINAGVDLHKTQFTVFVKQSGNQFEQYSTEEDGYKKFLTRIQRWKKSGMTVRIGVESTGNTRYFKTRMEQAGAEVVVINTLKFKVVNESVKKTDRHDAATIAEFLEKDMLPESRLCSEESEQLRRLLKVRTTLVRTMVTVKNQIHALLTGLGMKDSRATLQSKRGRQKILDALRKADSELVVQPLFETIEQLEKSVKSIESELEKLTEGDRTVELLMTIPGCGKIGAWTIRAFTDDINRFASAKKYSAYAGLVPWVQNSNETVRHGKITKRGPEELRTALVQLVMGMRRCRSTVSWRLMERYTEMKRNKGSGKSIIATARKLSTIIWCMLSTGQEFDPSLMIDRQLIRKADSMRTTASQSA

SEQ ID NO: 267202 - protein, 469 aa, unidentified
MIYSVGIDLHQGSHRARCLDERAQLCDGFTFQTTPEGLAKLEEHIFRDGANPIIVLEPAGLPWLMVAVYLRSHYPDCRLVKAKMQKVAALRRYLRGPVKSDRIDALTLAKMPFIDPEQLIEIYLPPAEIHALQRLTRQRKRMESDVSGRKIRLSAILDGYLPGVRRAFGEAWSSSFRAFLRGRINPFSVVHDGEKALHTYLSKASSRSNVQTHQVFLACQNVAQVCQRSMTAGTLNEEFFIELQDEVARELRLLEASEAESESLARRITELYQKLHPSDNLSTIPGVGPHTAPIFLSSVGDPTRFRNQSAFANWEGVVPGARQSSNVEAKGLRMTKAGPPILRMALYQAGEIGRRNDPNLAAVYYREMVYHGKNHRQAMGAVMSHLGARVLRVLKEDRPYEIRDLEGKPINKSEAKGLILSQYHVSEEIRRERRRRNTKANRKRETATVSIHEAAEAPQTVQVMSASQK

SEQ ID NO: 267203 - protein, 505 aa, unidentified
MGKKVQSYTAEFRAEAVKLVLAQGLTQQEASQRILVPKGTLANWVAKARGGKPVGAPGARTVVEPEGENKQIRKELSLPVVHQKAAGIDIGSRFHVIAVPPDLCQEPVQTFKAFTTDLQKMANWLVSLGIETVAMESTGVYWVPVFEMLESAGIEVILANAREAHAVPGRKSDVNDAQWIQRLHACGLLRASFRPEQNITALRTYLRLRDRFLEYAAAHIQHMQKALNYMNIQLHHVVSDVTGVTGMQMIRAIVQGERDPAHLARFRDVRCKASTEVVIKSLTGNYQPEHVFALEQALILYDAYQERILACDAQIERILADLNQNKPLPKQPLPQTRKRSKQGNAINFDVRTALYQLTGVDLTQIHGIGHYLALRFIAECGTDFSKWRTAKHFTSWLTLSPGCKISGGKVLSAHTRKSANRLTAHLRLAAVTVGRTSTALGAFYRRLAARIGKAKAVTATARKIAILFYNMMRYGIAYEDLGADRHELQYRERIIKNFHRRRGIK

SEQ ID NO: 267204 - protein, 380 aa, unidentified
MQSAGRCHEADRRDEEVQPVGRMVTTTNIRKLNDRILASKCETVKIGADVHARDIVACVQLDGALPERPVKLTAEQLIGLVAGLIKAGRTVHVCQEAGPCGYVLHRRLLAAGAKSLVVVPTALADGRQQKTDGLDATALVDKLDRYLRGNTKAFTVVTVPTPEQEQVRGEVRLREQLKHDRHAWEARGRSLLLAQGHHVTGPWWRAGNWAPLAATLPAWLVERLEVIRKMVLALDAEERALHTQLEACAPAQLPKAVGALTWVMLAREICDWTRFKNRRQVASYTGLCPGGYQSGGTQRDGHINRHGNPVVRHLLIELTWRLVRWQPDYPPIRRLLESGAKGAARRKLAVATARKLAVDLWRLATKQTTPETLHLLVPTA

SEQ ID NO: 267205 - protein, 420 aa, unidentified
MSPLPEQRFTAYVGIDWADTKHDICVQAAGDTRRESGCIQHRVAAIDEWANGLRRRFGGPIAVALELAKGPIVAALQKYDFLVLFPINPATLAKYREAFQPSGAKDDPGDAELALDLLLHHPERFGPLRPQSTAMRSLMSLVERRRELVGDQTRLTNRLGDTLKQYYPQALEWFDDRGTVLFCDFLERWPTLRAVRLARTRTLEAFFGAHHCRSTRLISERIGSIREATALTDDPAIIGPCRLHVLALVAQLRTVLAAITQFDREIAAVARTLPDYALFGNLPGAGAQLGPRLLAAFGEQRERFSSAEELQRYAGIAPVTERSGKKSWVHWRLQCPKFLRQTFVEWAGQTIGRSFWAGAYYRQQRAKGSPHQVAVRALAFKWIRILYRCWQTRTPYDETVYLNALRNRGSPLIANFGVPG

SEQ ID NO: 267206 - protein, 353 aa, unidentified
MEPVSNNLLDLGGAQMKAYAGIDLHSTNNYLGIIDEADRVLFKKRLPNCKDTLVGSLKPFKKKLVGIAVESTFNWYWLVDTLNDNGYKVHLANPAAMKQYEGLKHTNDQTDSLWLAQMLRLGILPEGYIYPKKQRPLRDLLRRRMLLVRHRTTQILSLQSMISRNCGVVSTGRDIKAMLPGITKYIFDHEHLVLAGETSISTIAFLSEKIKVIEKEIRAKARPRHEFKVLQTIPGLGTILALTIMLEVGSITRFPTVGNYSSYCRCVRSERFSNGKKKSAGNRKNGNKYLGWAYVELANFAIRHCPHANRFYQRKRAKTNRVVAIKALSNKLARASYYMMKDLVVYDPTKLFN

SEQ ID NO: 267207 - protein, 328 aa, unidentified
MKVQHIIGADLCKKSIDFVLHGLNSYLKIENSISGFKLLLSWLRQQKISTSKVMIVMEHTGLYSYHLEEFLHQHHISFTKVSALAIKRSLGLVRGKSDRIDAQRIARYGFEKRDQLIAQTRPDKSLQRLQMLHSTRERLVRNKASMSCALKEYQAVLKQQDPIIESHLKLIHELDQHIKAMDQQIKGIIIGQNELKESFQLLTSIKGVGKVLAVATIVKTENFTRFTNPRKFSCHCGTAPFEHSSGTSVRGKTRVSHLADKEMKTLLDLAAKSAIQHDKEIRAYYLRRIEEGKSKRSTRNIIRNKILYRMFAVIKRRTPFIDDYSRAA

SEQ ID NO: 267208 - protein, 348 aa, unidentified
MDKITAVGLDLAKQIIQVHAIDGRGQVVLRKAVRRERLLALLAQLPCCVVGMEACSGAHHWARELVKLGHQPRLMAAEFVRPFRKSLAAKNDANDAEAVCTAVVQPNMRWVTLKSVEQQALLSLHRVRQGLLEERTATINRLRGVVAEFGIVLPQSVALLQRALPAVLADEERLPILVQRSVQVLREHLHDLDARLAEFDRAIAQHAKSSVPAQRLVALSGVGPLTASAAVATVGNAHDYRNGRQFAAWLGLVPRQYSSGGKIKLGRITRRGDAYLRTLLIQGARSALQAALRRAPARRDRLSAWIVQLAQRVGYHKTLVAIANKHARIIWALLARDQTLDCAHLVTH

SEQ ID NO: 267209 - protein, 409 aa, unidentified
MRVIGLDVHRNFAQVAIVENGHVSQRGRFAMDRVAVLKFAETLTKEDDVVLEATGNTAAIVRLLEPFAHRVVIANPLQVRAIAWAKVKTDKIDAATLARLHAAQFLPEVWMPTEEVCERRRVVAERTQLVSQMTRLKNRIHSILHANLMPQETGRIFSAKGRAILEGLPLALDQMRMALRHHDEIRRLAAELALIDQDVARHALDDPEVRRLMTIGGVNVVVAASVLAAIGDIKRFPSSQKLVAYLGLNPSVHQSGDRPAYHGHITHQGNGHARSMLVEAAWVIGMGPGPLSAFFHRISLKRGQPVAAVATARKLAVLIWHMLTKEQDYTWVRPALLQYKLRALELRSGRPSRRGGNTPGPARDYSIKSVRDAERDRVCEAERAYENFVASWKERPPGKGNAHLNGKSS

SEQ ID NO: 267210 - protein, 391 aa, unidentified
MLTAPSGKVRKEVRTFGTTTASLQALANWLASRGATHVALESTGIYWRPVFNLLESHFEVILVNAQHMKAVPGHKTDVKDSEWIADLLRHGLLKASFIPPKPIRDLRDLLRSRKTLVQQRAQAINRVQKVLETANIKLSSVATDVLGKSGRDMLDALLAGVSDAETLAELARGRLRAKLPALREALDGRVDATHRVLLRHLLDLIDFLQGQVDRLSGEIEQLLVPYEGHLARLMQIPGVGRMAAATIVAELGTDMSRFPSAKHLASWAGVAPGNKQSGGKRHRASTTKGNRHLRAVLAEVVWVISHTKDNYLSAQYHRLARRIGTQRAIVAVSHSVLTIAYHLLRTQQDYHDLGPHFFEALDTTRQRDTAVRRLEALGYQVTLQEKMEVPA

SEQ ID NO: 267211 - protein, 416 aa, unidentified
MISFPKRERAQRAAACVGVDAGKFSHTLVVRPQHQPDSRPFGFPTTRAGFDSALAFIRQQTAGAAAETILVGIEFAGNYGFTFAHYLAQLGFPIVSVLPAHTKRWKDVAHNQPLKTDAKDAGTITDLVAQGHFVGFPFLSPAYADLRYLVTARERLSLLRRGAITQLRTLIQVVFPEYEALFPLLTKKTPFAVLRTFPTPQDLLDATKTKVLRVLKSASRGHLGAETYDKLVEAARATLGLPGAQARLKQEILLTLERIALFERQIKALEAELVAALQAVPETPYLLSIPKIAPVTAAIFLGSIGDPRAYESGAQILRVAGLSLVERSSGVLRGTKRISKRGRPLLRQAAYMFAVRSITRGGLFRTEYEALCQRNGGVKMKAVVAVMRSGLRLLYSIARDRRLFTAEPPTRRRAAA

SEQ ID NO: 267212 - protein, 339 aa, unidentified
MQAIRFGIDLAKSVFAIHGVDVAGSAVVRRQLRRGQVLKFFASQPPALIGMEACGSAHYWARELGKLGHEVRLMAPIYAKAYLKRGKNDARDAEACCEAVSRPTMRFVPVKTVEQQCGRSLHRARDLLVRQRTQSGNAIRAMLYEIGLIASKGRCGVGELIERIETAGLEVPAALLASLAPLARQWRALAAEIAALDKQLETEAGADPLARRLMTIPGVGPVTAHAIVAAVGDGRQFASARDFAAWVGLTRLNHDTGGKTRLTGPISKAGDRTLRRLFVLGASSQLRRARAKPEKATIWINGLLARRPVKVAVVAQAAKNARIAWAVLTSAQPYRASAA

SEQ ID NO: 267213 - protein, 377 aa, unidentified
MNKYSTVVGIDVGDKYCHFCVTDHHGVVMEEGRVMTNKLALRRKFEKMDRARIALEAGTHSPWISRALSKWGHEVFVANPSKVALIYANSSKHDALDARCLARLARFDTDLLFPIEHRNAQTQADLAVLRARDAVVKARTQLINHVRGAMKAMGYRAKACSAECFHKKVGAQIPKELYAALSPVIGVIKSLTEQIKGYDSVLNEMIEKRYGVANLLQEIKGVGPVTSLAFVLTIENPHRFASSRSVGAYLGLVPRRDQSGDSDPQLRITKRGDRMMRRLLVGAANYIMGPFGPDTELRRWGFALAEGGSKRAKRRAKVAVARKLSVLMHRMWVTGEVYQPIGYAQNDTQAKPAGSDEIDRKRPFSPAGLACSARSTK

SEQ ID NO: 267214 - protein, 362 aa, unidentified
METIVRRSVGIDIAKATFTACVATQKSSLKLETSEVLQFENRTTGFNQFIKWLRKNKVNLKEVIFVMEATGIYYEPIAYHLDKLGFNVSVVLPNKVKHYAKSLNVKSKTDIIDAKIIAKMGAERMLPLWEPPLPVLKELRDVTRLYSDLKAERTVFENKLQTVKAGNNPLDFIAKSIEAIICGLNKEIEKCEQQIDKTIASEPWLETKVKKLVSIKGVGILTVAIIVAETQGFKLVNNRKQLASYAGYDVVETESGTSIKARTRISKKGNSRIRAALYFPALVASRHNKQLKEVYNRINNKKSSKMIGVTAIQRKLLLLMFTLWKNDTEYDEKATNKTSGNQETKSLLRLNDAVVEKKQADQ

SEQ ID NO: 267215 - protein, 342 aa, unidentified
MTTGLAAGTYELFVGIDIAATTAEVSILRPGAKAGRSCKIDQTPEGFHRLVHTLQATDNEPSHVLVVMEATGSYWMSLATRLVHEGFRVSVIHPSQAHHFAKALLKRAKTDAIDAQTLAQLAMVLQPEPWMPPPQIYYALQQRLAQRDDLLNLRQQVRNQLHALDQHPEVIASVRTRMDRLLVLFQSQIDEVEGEIAAALNQESAWAAAAERLQSIKGVGWVTAAWTLVTTLNFTTCDTVDALTAYAGLAPMPRQSGSSVWHRPSIGHSGNGRLRTAFYMATLTAARFNPPIKTFYSRLLEAGKPEKVARCAAARKLLHIAWAVVKKDQPFDPHYAQGQKNG

SEQ ID NO: 267216 - protein, 380 aa, unidentified
MVWMFREEWPAAACIPRQAAGDRIEPALSRFWLPRSEIAPAPSSDPDGCRNNLVRFTRQGSRKMTQTNITTAGIDTSKAKLDIAVHDRPERWQVANAPAGWRALAANLARTGVTRVGIEATGGYERGVVEHLRAAGLTVLVLQPIQVKAFGRVHLRRAKNDALDAVLIAACAATMNEPRIAPDQRLTELADLLTFIEQIEEDIARLKIRLEHIGEPRLRRMVVTDIARLKARRLAMLRFIAKQLRAHHDLAARLELVLSVPGIGERTALALIIRMPELGYISREEASALAGLAPFDDDSGKHKGQRHISGGRGRLRRSLYAAALPAAFRWNKALISLYGRLIARGKAHNAALIACARKLLIYANTVVARGTPWVDSAPAT

SEQ ID NO: 267217 - protein, 346 aa, unidentified
MKITTIGIDLAKVVFQIHGVDERGKVALRKQLKRAEMSGYFANLEPCLIGMEACGSAHHWARKLEGYGHTVKLMAPQFVKPYVKTNKNDMADAEAICEAVSRPNMRFVALKNVEQQAILSVHRARQGFVKARTAQGNQIRGLLSEFGIIIAQGIGAIAKRVPEILEDGENGLPGTMRNLIERLTENLKEMDRQAKELEAQIQMWHRDNAASRKLAEIPGLGPITASAIVATVGDAREFKNGRQLAAWMGLVPKQNSSGGKQNLLGISKRGDTYLRTLMIHGARSVVRVAEKKAEPGSWMRKLMDRRNKNVAAVALANKNARIVWALLAHDRMFRLDYIPAATAAGM

SEQ ID NO: 267218 - protein, 428 aa, unidentified
MQNYSSTTPLYVTIDVGKNINVFAAYQGQELVEINKPIEVRNNLKGYQCLSCAIHGWLASNQYAPVILGLEPTGVYHEPWAYAIQNDFGDRIQFRLLNPYQTKQQRRKMDSGQNYKTDAVDVKAMAYCLRDGLGNPAWLRQGVELQFDVWAATYRQVNSELFRLHLSLLSQIDRLWPGAIVDVKAFEKAHPTLEPPVPFVLSRPIERRLIQSIFSHEPNPYTWKGRSTEQIQAAIRQFGVRCGPKTAQTILQLLEEALFVPEPMAILLATRMKMDFAQYLALQERMQEIQLQAETLVPNTIAAVLTSIPGISNFLAAQYLAYIITPFRFNHPDEIWCLAGFDVNRDDSGDRRKIGRISKRGDPGLRRLLFQIGLNTSVHCPPIAAAKRRALSHGKDRIGAVLHAAHKANRLCFTLIKEQTLYDPLRHR

SEQ ID NO: 267219 - protein, 438 aa, unidentified
MSNKVIFNLDELFISVGIDVGADFSWMSIALPNQQFVGKPYKILHNSIDSLTTAVSKIKEAEELYSLESRIFLESTGIYHYPLFCYLRDKGFNCSVINPIITKNSTNINIRKVHNDRFDSKKAALVGLKPDLKVSLMPSDLALNCRNLCREYYDLIDNRSAYVNKLQGELRMAFPQYLGIFSKVTINTSLTLLETYTSPSAFLKADKQEIIDIIKSTARFGLTYAQNKYNAIIQAATDANQFGYIIDSNIKRIRLYISFIRKYDEEINSILESLHELVDANEDSDFVKQIHLIETFKGAGFLSAVSIMGEIGDFSAFSKPKQLFAYFGLDPSVKQCGKFEGTKVQMSKRGSAIARRVIHTLTLQSISISRNREAKNPVLREYYLKKCDSKPKLVAMGAVSHKVCNMIFAILRDNKPFKIIAPQEHIKQYNSAKCDIAA

SEQ ID NO: 267220 - protein, 393 aa, unidentified
MVEASPSDRVVIAVDPHKASWTAAAVDASLQPLDVIRVPVSREGYRKLRGFARRWSDPGWAVEGAAGLGAPLTQRLTADGIDVVDVPAKLAARVRVLSTGHGRKTDEADAVSVGVAALSAARLNTATVDAAITALRALVQHRDDLVKTRTQTVNRLHVLLTHLTPAGAPRGLTADRAADMLRQIRPRDPAVKTLRGLAVDLVAEIRRLDRRIAKAATDIQTAVDASGSTLTELCGIGTLNAAKILARVGSVHRFRSAASFASYTGTAPIAASSGDVTRHRLSRAGDRQLNCCLHTMAITQIARDTPGRAYYRRKRAAGKSHREALRCLKRRLSDVVYRQLLRDTTTRAGAGPAGHAGATLTSSAAGSHPFTSTSDKSLTGPANRNNTTGGRDV

SEQ ID NO: 267221 - protein, 331 aa, unidentified
MKIRETVGIDLSKSTLDACIHSNQLFAKFENSNKGFKELVKWVSKHSAHEASETLFVFEHTGRYSHNIGRFLSKHEVKFVIVPGLEIKRSLGITRGKDDKADAARIALYAYRLRDELKPTKLPEKQLTTLKRLLTLRDRMVRQRAGYKASLGEDKRIFCDKEDHCLFECQDNLIEELSKQISQVDKEMMKIIHGTKKLKKIYKLLLSIKGIGTQTALYTIVYTAGFTKFKTWRKFASYCGVAPFPHQSGTSIKGRNKVSNLANKKIKSLLTMCVGTAIQYNPEMKAYYERRLKEGKEKMKAQNIIRNKLLARMFAVVKRGTPYVNTMKYAA

SEQ ID NO: 267222 - protein, 323 aa, unidentified
MDAGTGRAATATSIVGVDVSKDKLEVFVDSTGESFSVDNTAGGVAELARRLLSLPAPAALVVVENTGGYERRCAADLMDAGLPVALVNPRRTRDFARAMQWLAKNDRIDARLLAEFGRRVGPTPAVRVPPERALLDELVGRRRQLVAMRAAEQVRLQQASGKAVVASVEKHLRQLSAQVHDLEKRIAKMVEDDDDWRGRAELLKSVPGVGPAVAATLVAELPELGSVSRQHAAALAGVAPYDDDSGKWHGRRHCSGGRASVRCALYMAALTARRFNPVIKDLSDRLGAAGKPFKLVMVACIRKLITILNAVVRRGTPWVPSPT

SEQ ID NO: 267223 - protein, 384 aa, unidentified
MHKHNIVFIGLDTHKVSTEVAYIEDQRGAKPVHQGKIKTTKAAITKLARQYQSKYPQATLHFVYEAGPCGYWIYRLLTSLGHCCYVVAPSLIPKKPGDKVKTDKRDALKLAKLLKSEDLTPIYVPEDEDEAIRDLSRARETAMKDLKDAKYQLKGLFLRNNITCKVNDNWSNQHLRWLTELVLPHPSQQIVLQEMIQTISERIKRVERLVNELMHQAKQWRYYPVIQALQAMRGIRFLVAVGTIAELGDLRRFDHPRKLMAYLGLVSKENSSGDNRKQGGITKCGNGRARRLLVEGAHSYKHNANVSTELQKRQEGLPKVVIDIAWKAQLRLCRRYKRLMQRGKHRNVVVAAIAREMVAYIWAISREIVLVPIAPKTRLSRVPA

SEQ ID NO: 267224 - protein, 330 aa, unidentified
MLYAAIDIHKRTFHAAVLDVDSGETSERRFGATREELKDWAMPLQGTLAAVAIEATNGWRWVWRELSALGFDVRLVDPAQAKALRGRIKRAKTDRLDARWLCVLLAKEMLPESWLPPAEIQTLRDQTRLRKALAEDRTRWAQRLHALLTHEGWPCQRARPLTVEGRRWVASLSLSPAARSQVERLLRLIEAVRALETELRRFARADRRCIALQTIYGVGPILACHLLAELGEAARFRRARQAVRAAGLDPVVDESGETRRRGRLAKHGAPVLRWALVEAAQHAQRTNSPDRGLYTQAATRVGNKRAVLTVARKIGRRAYHVLNELETQAA

SEQ ID NO: 267225 - protein, 424 aa, unidentified
MEEKELEKPIQAWIGIDWADEKHDVSLYEVATEKQEALIIRQSPEALQEWLGQLRTRYEGGYVAVVLEQGRGGLLNALMGCEFLVLYIINPKSLSSFREAFYGSGATSDPVDAELMRDMVRQNPGRFRAWRPDDVMTRSLRLLTEGRRNLVNQSTALTNQLTALLKGYYPQALAWVGRLDTAWACDFLGQWPTLQSLQASSRRQILRFYEKHPRASLDLTEQLKQIQNARALTQDEAVLESSALMVQALVSQLRPLLVSIGEFDRKIAMIFRKHPDRPIFESFPGAGAALAPRLTAAFGTDRDRFQAAKEMQELAGIAPVTEKSGKKKFVHWRYACPKFMRQTFQEFADHSRRWCKWAKVEYELLRKRGKSHNAAVRALAYKWIRILFRCWKDRKPYQDEVYTKALLLHGSPLSPLLAECVENP

SEQ ID NO: 267226 - protein, 358 aa, unidentified
MEKLIRIGMDTSKSVFVLHGVDAAEKVVLRKKLRRQQVIEFFGKLKPTKIGLEACGAAHHWARELEALAHEVVLLPPQYVKPYVKRGKNDAADAEAICEAMSRPTMRFVPVKTAEQQAALMLAGTRDRLIRTRTQLTNTIRGYAAEFGLTAAKGLDKIEPLLARLAAAVDLPKLAKELFAAHAKEYAQLKVEIQKIEAKLMAWHKHNELSRRLVEVPAIGPIGASLVVMKVPDPHAFRSGRDFSAWIGLTPKDHSTAGKTRLGVITRAGDETLRSTLILGATAVIQQVRRGRGHPSPWLIDLLKRKPPKLAAVALANKTARIVWKLMISGERYNPMRLRDTRSPSARYGSEATALTQA

SEQ ID NO: 267227 - protein, 427 aa, unidentified
MKNSEVLSTLFVGIDVSSRSNVVCALDFSSNKLLTFSVSNNQPGALDMAQRFYDFLTINRQFKTVIFALESTSIYSVHIANFLSSHEQLLAFQPYVYCLNPKMIANYRKSFIALDKTDPIDAFIIADFARVGRINSKPWRGSQFLALQRLTRHRLHLVNCLTREKTYMASNMFLKFSELTILDDSERPFATNYGATASSVLTEFLSTEDIITMPIESLVAFLCEKSKNRFVDPNHTASLLQQAARNSYRLDKCLYEPLTIALASSFNCISAYDTEIKTIDKAIKRSINGLTQSEYQCLLSIPGIGPVYAGGILAEIGTITAFTSQDAVAKYAGLFWKQSQSGNYKADDTNLSKAGNKYLRYYLIEAANSVKNHVPEYTAFYHKKYGEVKTHQHKRALALTSRKLIRLIFGLLANNQLYSATRVNQIS

SEQ ID NO: 267228 - protein, 351 aa, unidentified
MERYIGLDVHRDSCTVAVVGPSGKRLKSFVVETNGSALVEVIRSIAGRRHICLEEGTQSAWLYEILSPHAEEVVVVVPEKRRGTKSDKRDAWTRAEELRTGAILTRVYKAPTHLAALKNAVRGHLMAVRDVVRAKNRLKAIWRSRGIRSTAGVYEAETRGRWIKRLPKAYRPLAEGLGQQLDVLEPLRDQAERSLLEEAKTHPTVRMISTAPGMGRIRSCQVVAIVATPHRFRTRQQFWSYCGLAIVTRSSADWVYVNGHKERRDVRQTRGLTRKRNPLLKQVFKGAATTVITQLSDHPLHEDYLRMIDSGIKPNLARVTLARRISAIVLSMWKHQEVYDPSRHRVVVEQQ

SEQ ID NO: 267229 - protein, 448 aa, unidentified
MKGELSKESPKGLGRVHPNAAGIDLGAREHYVALPPEREAPVRKFGCFTQDLEAMAAWLKTNGVTTVAMESTGVYWVPVYQVLEKRGLEVLLVSTRHMKAVPGRKSDVLDCQWIQHLHECGLLRSSFRPADAICVVRSYVRQRDTLRDESCRHVLRMQKALEQMNVQLHKVVADITGETGMAIIKAILEGERDGQKLATLRNYRCQQSEEQIARALVGDFRDELLFCLRQEFEAYAFVQSQMARCEEEILTRLKAFEPKVRPAPVPQSKAKKNKKQADEVCLALFRAAGADLALIPGLGPRNLPTLFAEVGFDLRKFPTEKAFASWATLAPRNFITGGKRKRAPQAGASRVADAFRVAAQTLANSKTALGAFYRRMRARKGAPFAVAVTAHKLAKLFFRLLKHGESYIERGVDYYQERYKAQQVRAALKTLKSHGFVPTLQLAPAAVP

SEQ ID NO: 267230 - protein, 351 aa, unidentified
MTSVRTRYFVGIDLHKSMAYVYVLDGSGQRVKEFKTTFCTLEGGLGLVGLLEHWKEGGRFVVEALGLNRWFVNACQQRGLAITVANPNKLGLRNSGKKTDRRDAYELARRLRLGDIDRDASTYYPPDEQYSIRRLLRTRHVLVEQRQRLVNQLRGMMNSYYLESPGSQLYSARSIAKLRTLTFPQSHLQLVFHELIDLLERFQRTIDTLTKEIRKCEDQPSVKRLCEEVSSVGPQTAVTLVHELGDLTRFDDAKAVASYAGLAPKVCNSADRQHHGKIHKKGNPHLRWILGQAAVRLMNHDERAKQWAQARLKRMHKNKVRTALARRLLVGIFLALRRNEPFSLEKCLRAA

SEQ ID NO: 267231 - protein, 393 aa, unidentified
MRKPKKQKKPLNDLSRSPTPFDPNRSLIVVIELGKESWLVAGIVPGVERQPLKKLAADESGLLKLLERWRAEAEKAGHEIDRITVAFEAGRDGFWLARWLRARGIETHVIHAASVAVPREHRRAKTDRLDTEHLKRAFLGWLRGERNHCKMCAIPTAAEEDAKRPHRERETLVGEQTTTINRIKATLARLGIRNFNPKLKKAAERLEHLRTPEGEPIPPNTLAELSRDMARKQLLTEQIKQIEKTRLEQLKEAPKAGPNLMVLVLVRVIGIGIETADMLVREILSRNLRDRRAVARYGGLTGSPDESGKSRREKGLARSGNARVRKGMIQLAWRFLDYQKESALAKWFEARTANARGSRKKMIVALARKLLIALWHFVRDGVVPEGVILRPAH

SEQ ID NO: 267232 - protein, 343 aa, unidentified
MEHYAGIDVSLEESSVCVVDATGKLVREAKVASEPEALVRYFDELELPVSRIGLEAGPLSQWLHAGLVVTGRDAVLLETRHVKAALSAMTVKTDRKDARGIAQLLRMGWYRLVHAKSVPCKDSRALLVGRKLLQGKLLDVELSIRGILRGYGLKVGEVSRGRFEVRIRELIAGHVTLETVIGAMLVARMALWNEFTKLHREMLKIARADKICRRLMSTPGVGALVALTYRSAVDDPARFGKSSTVGAYFGLTPKKYQSGETDRDGGVSKVGDTMVRTALFEAAHIMLTRAIRFSSLKRWALDVAQRRGMKRAKVALARKLGVVLHRMWVDATEFRWSKAAAAA

SEQ ID NO: 267233 - protein, 340 aa, unidentified
MEAIAVVGIDLAKSVFQVHGVDARGQVMVRKRLSRAKLLPFFAKLPRCLIGMETCASANYWARELMVLGHEVRLMPPQYVKPYVKRSKNDASDAEAICEAVTRPTMRFVGVKSPEQQSVLVLHRTRSILTRQRTQIGNAIRAHLAEFGIVAPVGRQGLDRLIAVIGDEQDARVPIPARRCLAMLVEQHRLVLAHLLDTDRAIRADSRASDLGRRLQEIPGVGPLVASALVATVPDPHVFKTGRGLSAWLGLVPRQNSSGGKERLGGITKAGDTYLRKMLFVGAMAVIRHAERYGTRRPWLTKLLSRRSPRVAAIALANRIGRTAWALMTSGERYREPVVA

SEQ ID NO: 267234 - protein, 332 aa, unidentified
MNLVSTLGIDLAKNTFSLHGVNSNGEVVLRRSLPRGKLSELVAQLPPCLIGMEACSGAHEWARRFLVCGHTVKLMAPKFVTPYRKSGKNDGNDAEAICEAVARPNMRFVPVKSLEQQSDLTLHRVRQGFVDERTATLNRLRGLLAEFGHVLPVRAVEVHRRVPQLLEKLPARVAACVRDLLEHAVQLAAKIQQYEHEIRLHVRSNALAERAQTRRGIGPITASALVATVGNARDFKNGRQFAAWLGLVPRQYSTGGKTRLGHITKRGDAYLRTLLVMGARAVLQRAASLTDPFSLWALAMRERRGYHRACVAIAAKNARVAWALLSKEPVAA

SEQ ID NO: 267235 - protein, 344 aa, unidentified
MDHFAGLDVSVKDTSVCVVDDTGRIVREVKVASEPEALLAALRNPAYHFKRIGLEAGPLSQWLFSAMAEAELPVICVETRHMRAVLKAQINKTDRNDARGIAQMIRVGLYRPVHVKTLRSQKLRMLLTHRQLLQSKAIAVDNDLRGTLRNFGLKVGMVGATRFEARIRELVEGLPDLAVLVEPLLVVRRVLREQIAVLHRRLVAVVRDDEVCRRLMTAPGVGPVVALTYRTTVDVPARFRKSKSVGAAFGLTCARDQSGERDRAGAISRCGDKMMRAMLYEAAQSMLVRSTRWSWLKAWAMQIARRRGKKKAVVALARRLAVILHRIWVDGTEFRWTREAVPAA

SEQ ID NO: 267236 - protein, 407 aa, unidentified
MDILYERVAGLDVHKDTVVACVRIVAEGKTKRECRTFSSTTEQLIELRAWLEECRCTHVAMEATGVYWMPVFRILGEGPFELMVANAAHIKNVPGRKTDVNDATWIADLLACGLIKASFVPGEDIQELRSLTRTRKQLVREQTRHVQRIEKTLAEANIKLNSVISDIMGASGRRMIEAMIKGVRQPRQLAELAGKQIKATPKELYDALHGRLTDHHCFLLDLHLKQWDGLDGTIREIDREIDQRIGRLHTKRASGEVPFRTLIELLSTVPGISTLSASAIVSEIGCDMNRFPTAGHLVSWSGLCPGQNESAGKRKPSRLRKGAPWLKTMLVQCAWAAKRKKDSYYRAQFFRLQSKRGPQKAICAVAASILTAVYHILKNGTEHHDLGASYFDRRPLELKAKGALGNN

SEQ ID NO: 267237 - protein, 366 aa, unidentified
MKKTITVQASKCEIFKEQKLTIGLDLGDRWSFYCVMDEAGQVILEQKLPTTPEAMKQTFGKIPRSLIALETGTHSPWISRLLTELGHEVIVAHAQKVQLITKSNRKDDRHDARTLARLARIDPALLGPVRHRSVQAQLHLTVIRARAELVSARTALVNAARGLVKSYGQRLPKCGTYQVSEKLAEGLSAELREVLVPLFKEIESLNERVKEYDERMEKIAKEVYPEVALLKQVKGVGTQIALTYVLTIEDPYRFAKSRQVGCFLGLRPGRRNSGESEPQKGISKEGDRYLRTMMVQGAHYILGPFGEDSDLRRWGRKLAERGGKNAKKRAVVAVARKLAVLLHRLWVGGEVYEPLRNSQKALREVA

SEQ ID NO: 267238 - protein, 343 aa, unidentified
MIHVGVDLHKRFCYMTALDSRGKQLNAQAVANETAALRAYFKQFRKPVRAAVEACSFWPAFRAAVGKQVELRMVHPMRVKAIAAAKLKNDRIDSATLAHLLRCDLLPEAWMADEPTRELRQQVRLRATLVRQRTRLKNQVHAILHQHGLKAGGGTDLFGKAGRAWLQQVRVGEKAQDALAIYLKLIDEFTVHVEQQDGEVKEFVSGDRRAQWLMTIPGIGRYSAMLLLAEIGDIERFAHPRALSNYAGLVPWVRESADKRRSGGITRVGSPWRRWIMVEAAQVAVRTSPAVKDYFERLRRRKHRNVAVVAVARKLLITVWALLQHGECFDEARFVCGCVKDGA

SEQ ID NO: 267239 - protein, 479 aa, unidentified
MKLLYRRCAGLDVHKRSVTACVRVRAAGSKQTRVETAVFATFTEDLQQLREWLRRHKVKQVAMESTGVYWMPVWNVLERSQRKFELLLVNPQQVRALPGRKTDQQDCERIAELMQYGLLRGSFIPPPPVREWRDLTRVGLQHDRNRVINRIGRLLETVNVKLGSVVSNIVGKTGTLILKQIAEGVTNPERLAELAQGSLQQRKQDLAVALKGYVSDHFRWLLRQLLSDLAALDEKLAKLDTRISDAVQPHADLIRRLCTIPGVDRLTAWTLLAELGTDMSVFPSAGHAASWSGICPGNCESAGKRQTGRTRKGNRYLRRMLIQNAWAVAHKKDCFLSALFYRVASRRGMKRAAMAVAHRILIIAFHVIRDGTVYREVGGDYYDRLCPERTARRLTQRLERMGFGVTLTRRDTAEQAAAPGARRGRPCKCAERGLTCTHTNTGLARPLRQPPADPAQCPRCARWGIACIHARSQKTDPNF

SEQ ID NO: 267240 - protein, 401 aa, unidentified
MEKEKRQDKTKDNYGRVIGMDIHSEHFSAAAFERIGHQRLVEKPLFVHGKVALKDLKPWLLKHSEPGDIFVIEALQNSFVIAKEIKENGRQAVVLESQRAGKIGKSYLKTDKVDAVKLAKIYMSGLAHEVWIPDQKTIERREIFLRYQKTVKDCTRYSNRISGWLMAHKILKPKGMSFSEQRTKEKILSSYNWSVAQKTIIEQMFADFLFSKSKRKELKRIMANEVTSDPDMIKLLRLKGISVINAYALMAIIGDISRFRNPKKLVAYFGLQPRIKESGKTSIKGSISHYGRRDIRALLVQSGHAILRHGDPEAPITKWGWKLSYRKNTNMAALAVARKLVVAVWYLLKGFFTKLAEIDKSLKIKLTKIAVEIGTELRKEMGILDISNFIEIKGDYLMAGS

SEQ ID NO: 267241 - protein, 347 aa, unidentified
MVYVGIDLHRNRSQIAVLDREGKELLSRRIVNEPETFLELLQGLGDEAQVALEATYGWEWLADLLEEAGYELHLAHPLRTKAIAAARVKTDAVDARTLAHLLRTDLLPEAYIAPRELRDLRDLLRHRVALTRMRSALKQRVGAILAKHGIARPYSNLFGVGGSRFLAELELREAPSRRLDSLLTLIAAFDRQIETTTKEIEQRAQADPYVDVLCQIRGVGRYIAMLVIAEVGDISRFPSARHLCAWAGLTPTVRSSDGKARLGHISGQGSPALRWALVEAAQHAPTGGGPLRAAYERIAKRRGKQVAKVAVARKILTLCYYGLRDGEIRCLAPRAKARTIRTTAVTR

SEQ ID NO: 267242 - protein, 300 aa, unidentified
MDHFAGLDVSVKETSVCVVDDTGRIVREVKVASEPEALLEVLTNPAYHFKRIGLEAGPLSQWLFSALAEAGLPVICVETRHMRAVLKAQINKSDRNDARGMAQMMRVGLFRLVHVKTLRSQKLRMLLTHRKLLQSKAIAIENDLRATLRNFGLKVGMVGTVKFETRIKELVEKVTDLAMLVEPLLMVRRVLREQVNILHRRLLAVVRDDDVCRRLMTVPGVGPVVALTYRATIDVPARFRNSKAVGAVLGLTPSKYQSGEIDRTGAISRCGDEMMRAVLYEAAQSMLVVRRNGPGSRRGR

SEQ ID NO: 267243 - protein, 341 aa, unidentified
MEKYVGLDVSMEETSVCVVDGGGNIVFEGKTSSQPDALSKLLRAKASDAARIVLETGSLASWLWHELRGRNFPVICLDARHARAALSMRVNKTDRNDARGLAELARMGWYREANVKSMESRYTHSLLAARAKLVDLRRDVENQMRGLLKGFGLPPGKGGIKALLEKIVVIMREAPHLHMLFKPMMLAHSALVTQVEFYDVQILKLAKGDETTRRLMTAPGVGPATALAFRSTIDDPNRFKSSNDVGAYLGLTPRRYQSGELDRTGRISKRGDRLTRFYLFEAASVLLSVVKRWSVLKAWGVRLAKRVGIKKAKTAVARKLAVILHCIWVDGTEFQWGKEKV

SEQ ID NO: 267244 - protein, 316 aa, unidentified
MTCFIGVDIGKQFFDASLDGQTGTKRFDNEDKGFEAFLKWIAPFEDCHVAMEATGNYSMPLALFLYDKQIKVSLVNPAQIKYYAQAQLKRVKTDPEDAKVIADFCRTQAPRLWQPSTQVISRLQQWIGFKQLLEQQKVQLQNQMNSLLDPELKQIQASQLADLKQQIKQVEKRLKKWVTADETLGRDVWLLESIDGIGTSSALDVLASIEDINRFDKAKQLACYAGLTPRIRRSGTSINSSSISKTGSHKLRKALYMPAIAALRYNPIIKRFAQRLKENGVRGKKMVVAVMRKLIHIVFAVLKNRKPFDREYEVRA

SEQ ID NO: 267245 - protein, 321 aa, unidentified
MSRTLIGVDVCKDFLDAHARPAGLHQRFDNNPEGIAQLVAWLLPLAPQRVVFESTGPYQKAAVGALLAEGLPAVVVNARQVRDFAKGTGQLAKTDAIDAGILAHFGEVVATVVRPLPPPEVLEFRELCDRRGQLVGMLACEKNHRHAAQGASAKVLKNVDRHVAFLQKQIEELEDRMDGIVAESEAFKAKDEILQSIVGIGPQVSRTLLVHLPELGTGSRQSIAALVGLAPFADDSGTYSRIRHIRGGRGKVRIALYQAAVAAIRYCPSMKAFYACLKGRGKATKVALIAVARKLLVLANALLRDGRPYQARTNSVCLQNA

SEQ ID NO: 267246 - protein, 352 aa, unidentified
MGAWTVGMDLGDRTSHICVLDEAGTVVERGKVQTTREGMRKRFERAARMRIAMEVGTHSPWVSRLLKELGHEVLIANPRKTRLIYQNRGKQDPVDAEALARIARLDPKLLYPVEHRAEGVAEDLAVLRSRDVLVRTRTQLVNHVRGAVKATGHRLKKCSTRTFSEKAVSEIPEEVGEALSSVVATIEAVSRQILQLDKRIAELGKKKYPETALLRQVGGVGPIVALAYILTLEHPGRFRKSRAVGPYLGLVPSRSQSGGSDPQLHITKEGDNLLRRLLVQSAQYILGPFGEDCDLRRFGQALSARGERNAKKRAVIAVARKLAVLLHRLWKSAEVYEPLRKAGTPQDATVAA

SEQ ID NO: 267247 - protein, 385 aa, unidentified
MCSRFVGVDVSKDFFSAAGLDEGGTELFSSSYEMNSDGFTQFLKALSPKGEGLDQVLVAMESTGCYHINLYSFLTSQEIRTMVINPLLIANYAKLSLRKTKTDKKDARTIAKFLLDHRQEISQLSVSQDLQDLRDLARERESLCHLISATKVEIKRVLRTTFPELESIGDLYTGVMLLFLQEYPSARLVRAAKPKAIAKILKQPYVGNKLSFSAEDILRAAKSSVATVSPAKEIILRGKIATLLHLQGRLDEVTKLLTDLCKSTKVDDLEILRSIKGVGPKTAAPFLAEMGEVKNYSSYKKLIAYAGMDPSVHQSGKFIGMSKLSKRGNRHLRRAIYLMTASVVCQNAFFKAYFVKRKREGLPPQKALFATAHKLIRVIFSMLSQ

SEQ ID NO: 267248 - protein, 409 aa, unidentified
MKLFVGLDVSSQDAKICFLNGKGDCLQSFTITNDLPGALILKKKILDTASKSNCKIIKIGLESTSIYSYHPAMFLHNDKELRTYGSQVFMINPKQISNFKKSYPEMDKTDAIDAFVIADYVRFGRHTMSIVKAEQYMALQQLTRSRYQLVHALTKEKQLFLQHLGLKCSQFTQEVESSVFGNAMMELFLERFSLEELAQMPLQELVLFLQEKGKKRFGNPEDVAKSIQKSIKGSYRLSKVVEDSIDLLLSTSIQIMRTYQAQIKEIEKGIESLMSTLPQTLESIPGVGPVFAAGIVAEIGQIDRFADETRIAKYAGLFWKKYQSGRFTAENTTLTKSGNPYLRYYLVEAANSVRRHVPEYRDYYTKKSAEVPKHKHKRALVLTARKFVRLFDALLRNNQIYAPGRGVDR

SEQ ID NO: 267249 - protein, 343 aa, unidentified
MKITIIWRFIVGIDISKKRLDCYLLDRQTGGGYDCQVLNTYEGFEQLADWLVDHGADPSQTKLISEHTGRYGEHLLRWTTTNEWPHAVVKTTALNKVGNEHHRKTDAFDAEDLADYGVRYSDKISLTTAPKPSIGQIKRLQAERRAMVDRRAALRSKLTEANIHDADMERLIDMWTRQVALLTEHITELEARIKEQINEDTAIKNRYQMMRSAPGVGKVLGPLWVSLFAGQQTLDARKISSRFGFAPHPYKSGSSVSRTDQSSGFGNSEVRRVMHQAALSVKTHCPHYQEYYEKKRDEGKEHLLVINNIINKLIRLYCAMWNNRAEYDPNYIQKNKHKWKKSA

SEQ ID NO: 267250 - protein, 351 aa, unidentified
MPRSSAVHAVTTLGIDMGKNTLHMIGLDTRGGIVLREKVSRGRITSRLANLPPCLIGIEAGMATHYVARELAALGHDVKQVPPTYAKPFRQGHKNDFRDAHAVAEAVQRPTTRFVPAKTNEQLDLQALHRVRSRLVSERTAVINQIRGFLLERGIIVRQGLRFLRQALPDILAKRMDVLSPRMVRMVADLASDWRQLDERIEAVTDEIKTLAKSDDSCRRVMTVPGIGPIISSAMVAAIGSGAAFARGRDFSAWIGLVPKQMSTGDRTILGRISKRGNSYLRTLFMQAARVILLRRASWPKHGFGIWLARAAQRLHPNVLAAALANKLARIAWTVLAQERSYEARIMKAAA

SEQ ID NO: 267251 - protein, 413 aa, unidentified
MLFVGDDWAEDHHDVEIVRDDGRRLVTKRLPEGLDGITRLHGLIAGCMPPEEWAELEPGEAAALVKVGIETDRGPWVAALVAAGYEVFAINPKSSAHYRELHTTSGAKSDRGDAHVLAEIVRLDRAHHRPVAADSAHGESLKLVARAHQSMVWERTRHVLRLRSALREFFPAALAAYGDLDEPDTLQLLTIAPDPDSAARLSTAKISAVLTQARRRNVAARAQRMQDVLRAPALRQPGPVQAAFAAIATSEVRMITAINTEIAALGQVVAEHFGRHRDAEVYLSQPGLGVILASRVLGEFGDDPDRYADAKARRNYAGTSPITKASGTKKVVLARYARNTRIADATQQWAFGSLRGSPGARAYYDELKARKIGHRAALRQLANRWVGILHGCLKTQTLYDEKTAWGHRNATAA

SEQ ID NO: 267252 - protein, 341 aa, unidentified
MESYVGIDAHCNTGLELAAIEARNGELLWRDRCRLDAQLLREAVSRAPRPCAVVFEQGELATWLYLTLSGSCDSLVVADPRHNRLISTSPDKDDPFDALALAQLARGRYVREVYQPPVPFLNLRLQVRHHYRLNQHITVLKNQTKALFRQHGIPVSGTAVYSPDNRAAFLKSLPAAARPPGEDLFAMLDVAEERKQAALRLLLQYGRRFPPVRRLVTLPEIGIVTAATFAAFLVTPSRFPSRSHIWSYCGFGLTRRKSGSHTEPVRLRRGFNRHLKRVVKSAVERMVQRQASPFAAAYQLRLERGTLPTRAKLAIARKLIDVLCALWNSKEEYDPERVRVV

SEQ ID NO: 267253 - protein, 414 aa, unidentified
MQKLNDLSQSRIVLKQDSTLIAVIEMSLSSWLVAGIVPGVERQPLKKLAVDESALLKLLHRWREEAEKKGRRIERIAVAFETGRDGFWLARWLRARDIEAHVIHASSVAVSREHRRAKTDRLDTELLKRVFLGWLRGERDHCKMVVIPTIEGEDAKRPHRERESLVREQTRIVNRMKAALIRLGIRGFNPKLKRAAGRLEDLRTPEGEPIPPNTLAELRRDMERRHLIRDQIRQIEDARLERIERAPSDRPHAMVRLLARVIGIGIETADMLVQEVLSRTMRDRRAVARYAGLTGAPDESGAKRREKGLARSGNDRVRRGMIQLAWRFLMFQKGSALAQWFQARTENSRGTRKTMIVALARKLLIALWRLVTTGEVPAGVVFCGEVSSRYLLSARLGLWPGSPVAFTPFCSSRR

SEQ ID NO: 267254 - protein, 348 aa, unidentified
MTVYIGVDFHARAQTISYLTTEDGEIRRAQLDHGQPQEVRKFYEQFAGQQVIVGFESSGYAAWFEELLEELGYEIWIGHATAIRLFARRRQKNDRRDADLILDLLWRGDFPRIHRYSPQSRAVLQQLRYRQRLVKMRTMVVNSLVFLASSRGVGLRTQLKSRRGIERLRQIALPQPLIDQRDEMCQLLQELKTKTERVERWLEAKADSDVRVQRLRTHYGIGPLTGLCLVHTLECVERFANARKVTAYVGFDPVEDSSGERRRIGSISKQGSRLLRFYLVEAGQIEMRKDPDLARVYHRVRLRRGHAKAKVAVGRRLLVRAFIMLRDEIDYAEFQRRGVAAWSSRCTA

SEQ ID NO: 267255 - protein, 415 aa, unidentified
MRPIRERCAGLDVHKKMVVGCAITPEGRELRRFASHHAGLLGLAEWLQGLGVEEVAMESTGVYWKPPWNVLEARAFKLTLVNARAVKAVPGRKTDIKDAEWLAELHQHGLLKASFVPDRAQRELRELVRHRKQLVEQRSTTAQRLQQVLEGGNLKLGTVASDVLGVSGRAILEQLVAGADDVEQLAALAKGRLRSKREELAQALSGSVEAHQRFMLASLLRQIDSVNAEIAILDEEVKARTAGRFRAAIELIDQIPGVGERAAEQILAELGIDMDQFPNAQACASWAKICPGTHQSADSHQRVGIGKGNIWLRCALVEAAKAAVLKRDSYYSALYRRIKARSGSAKATVAVAHSILVTIYQLLKNGCAYQDLGSAHFERLDRDRIQRSSVRRLERLGFRVTLEPTTANTGDVAVA

SEQ ID NO: 267256 - protein, 340 aa, unidentified
MGEITTIGLDLAKNIFQVHGVDEAGEVVVRKQLRRGQVHNFFAGLSRCVVGLEACATAHYWARELKALGHDVRLMPPSYVKAYVKRNKNDAADAEAICEAVKRPAMRFVPMKTADQQAVVMMHRARELLVRQRTMLVNALRGHLAEFGIIGATGIHKVEGLMAIVRDDSDERVPEVARQVLLIIASQLDDANAKIVALEAQILAWHKSNPVSRRLATIPGIGPMIATAIAATVPDASVFRSGREFAAWLGLVPRQNSTGGKARLGGISKQGDSYLRRLLVNGAHAALFWSKAAKTDPWLISLRARKHRLVATVALANKTARIAWAVMSKGEKYRPVAAAA

SEQ ID NO: 267257 - protein, 322 aa, unidentified
MSVVDGLVVKKWQTAAVPEQLVRQLKSYFPEAKLYSAYEAGFSGFVLHRVLERAGIENVVVNAASIETTVHNRVKTDKRDALKLASLLEAGRLKGIRVPSEKEEAQRLLTRTRQQLIEERTAVKNKIRMKCHQIGLIAADEQRKMSHKLVQELLEKSPFQELNLVIEAYWQVWQTLDAQIKKLDEELKQQAGEDPNEKIYRSAPGIGPLGARNLSNELGDMSQFNNERQLFSYTGLTPCEHSSGDITRKGHITRQGNSRVRWVLCEAAWRAIKKDTSLKECFERLYPRTGKKRAIVAIARKLIGRIRSAFRACSEYRMAAVA

SEQ ID NO: 267258 - protein, 292 aa, unidentified
MNDSQVVYVGIDVSKESLSVDAGELFKGDVPNTPKGRAGLVARLRKAARGAVLHLCFESTGPYGAPLFEACCKAGIRASLLNPAKVRHFAKAMSRSAKTDPIDASVIRHFAQTRKPAPSHAPGANERRIRQLVLARDALTKNVVQLSGTLDSLTDAGAKKHAEKAIRMSKGEIRLLDRQIAETVKGDERLEGLTGTLAGIDGVGALTAAKVVALAPELGTLGRRGSAALAGVAPFKRESGKYKGKAFIHGGRASLRQALFMPAMVAIRCNTVLKAAYEKLVKAGKPHKVALV

SEQ ID NO: 267259 - protein, 343 aa, unidentified
MDATTYAVDTAKNVMQLHWVEPSSGQIHRRKLSRAKFVEFFAVLKPARVVIEACGGAHHWARSLGAMGHQVELLPARQVRAFVRGNKDDAADARAIWLASQQSDIRRVAVKSAEQQAVLSLHRLRAHWVSVRTATINALRGLLYEFGVVLPPGKVVGLKVLAARRAQFDAQLPELMQRLVDQQLAALRQMEAQVARIEAELGAVQKTDQCAKRLRKVPGIGLLGATALAALLGDASGWRNAREFSCSLGLTPRHNGTGGKVTMGGINKRGDPYVRTLLVSGARSLANAPSAPEWVRKLMLRRPANVAVVALANKLARTAWALVAHQRDFDRQWVSKPPRAATA

SEQ ID NO: 267260 - protein, 265 aa, unidentified
MNSVKYVGLDVHQSTISVAVLNAEGKLIVQSVLATQAAAILDFIHGVRGTLYVTFEEGTHSAWLYDLLVWRVAKLVVCNPRHNALLKAGNKSDRIDARKLAELLRGGQLSPVYHGEHGTHTLQELVRSYATLTEDTTRVMGRLKALYRGRAIACAGKKLYAAGHRQEWLSQLDEAGLQRRAERLYQELDGLQELRRQARKEVMVECGKHGAARLLRTVPFLGPLRAAPLIGRVQTPHRFRTKRQFWAYCGLGLETRSSADYGFQN

SEQ ID NO: 267261 - protein, 440 aa, unidentified
MPVRKREDEVFPNAAGIDVGASSHWVAVPPHLAEDSVREFGAMTDDLNAMADWLIACGVDTVALESTGVYWIPLYEVLEQRGLKVWLVDARQMKYVPGRKSDVQDCQWLQKLMSLGFLRAAWRPDGEICVVRAVARQREVLLIEQASWVQRMQKSLVQMNIQLTEVLTDVMGMTGQAIIRAIIAGERDPKALALHRNRRVKASAEEITKALTGNWRDEHLFVLGQALAMYDDIARHLAECDTKLQALLRALGQRNVDLGKVPRAGSKTRQDFDARQTLANWAGVDLTRINGLGLAAVMKILSEIGPDLSRFETVKHFCSWLGLCPGTKISGGKVLSAKTKRSANRVRQALKMAAMSLSHSDSALGAFYRRLCSRMDKPSANTATAHKLARMVYFMLTRGETFVDLGQQRYDEQQRLRSIAALRRRAAALGFEINPSPVPV

SEQ ID NO: 267262 - protein, 377 aa, unidentified
MKRIKFVGLDVHAETIAVAVAEQEGEIRSLGMIPNREESVRKLVKKLGPVEQLRFCYEAGPTGYVLYWQLTKMGAACTVVAPTLVPVKAGDRVKTDRRDALKLARNYRAGELTAVWVPDAEHEALRDLVRAREAAKKDQLRARHRLSKFLLRHGRRPPVGITAWTVKYLEWVKRDVHFAVKAQEATLLDYLHEVEHMAARIVRLDSAIEEAVKVAPAKMRAVIEGLQALRGIAKISAVTIVAELGEVTRFSKARELMGYAGIVASENSSGERQRRGGITKTGNAHLRRVVVEAAWAYRHRPAIGFTLRKRQENLSEEVKEIAWKAQHRLHARYGKLMAKGKNKGVVVTAVGRELLGFIWAIGVQVEAQQKESLRQAA

SEQ ID NO: 267263 - protein, 317 aa, unidentified
MNKPLLPDPAGVDVSKDTLQLHLRGRQYLLPNTPAGYAQLLQLVQAGGAGQLICEATGGYEQGLVAACHAVGQLISVVNPARVRHLALAQGQRAKNDPIDATVLTAYGQALRPAPTAPADPIQQEMRALGTWRDHLQENLIRARQTLEHGVPAFVGQQQKKLVAHLEKQLAAVDAAQKAALARAPQLQAQVQALTQLDGVGVRTALHVLSWMPELGTLGRQEATALAGLAPWVRQSGRWQGQRHIGGGRAPVRHALYMPAVVLARMSGTKLGQFYAHLRAEGKPAKVALTAVMRKLLLQMNRVLKALAAPQPAPKIA

SEQ ID NO: 267264 - protein, 501 aa, unidentified
MVDVTTVRGVCQIGVGIDTARYGHHVSFLNEDRQHATVPLEFQESAQGYAKLRQTLVGLRERHKDVHFHVRIDAAGQYATNLERFLQRLPFPMTISVGEPKRNKDYHKALFPKRKSDATESLAMARYAIIERPPAAPQLPEKFSTLREVTSRLQSQVKQTTRAVNQLHNLMSRVFPELAPLTSQFSSGWVLRLLHKYPTAEKIANAQLRSLEKIPHLKPRITQSVRAAARQTVGTSSGPIIESLVRQQVDQVLSSQKAEKQLLGLMTTAYEALPLSNHVQIETITGIGKTTAAVLVAKIVSIERFETPGRLVGYFGIFPEENTSGVNWNGKPHPSRTKSMSKKGNDLVRSYLWNASKSALQHNPAVRALYRRLRARGTRGDVAIGHCMQKMLHLVFAIWKSGKPFDKEHYQWEVLEDAPLPEASSSPNDADENAAGHKREVVPDQKVVTAATTRIDRRPLSIKQQPMEQLCDAAVDQVATVQLPPSPKRDAAINDPIHKPR

SEQ ID NO: 267265 - protein, 353 aa, unidentified
MVYSPNEYDIFIGIDVDQKSFSFTVKNHDTMSNSYKIPANPENLYQHIRNRYNNQRVICAYEVGVTGYHLHDYLTSQNIRCLMVPPQSVPKASNDRTKNNRLDSDRISQHLKNGDMEPIRIPDYDYRELRQLLRSREEYVDLRKVSKQRIKSLLLFAHLHKLLKDTTQYWSYAHIKRIKELPCSPATRKRLDLLLNDLDYSRNQTVIIIKELKSFSDQNASLKRNIHYLRSIPGVGFITAITILASIGDPQRLRNPRELSAFVGLVPSEYSTGERITRGRITHLGSSVLRSLLIEAAWANITKDARLRQFYDRIRSKHHPQVGARKAIVAVARKLTLIIYRVLKEQREYIANI

SEQ ID NO: 267266 - protein, 324 aa, unidentified
MQGKEASEQETKVQSNVGIDISKCWLDAHVLPGDDRLRVANNCAGIRRLKRWLSHYRIALVAIEATGKWHRHLHRSLVASAIPVAIVDPYRVRMFARAQGILAKTDQLDARVLALFAAMMAPPVRPVAPQAMAELAELVVARASAVEAQVALKNQFAAAEGTFLKRQLDRRISRADKDIAALDREILKRIKADASLARRYAILTSIPSFGFAVAATLIACLAEIGSATAKQIGMLAGLAPVADQSGDREGIRVIWGGRPAVRRVLYLAALSASRFNADMKTFYKRLIDSGKPSKVALIAVARKLVVLANALVSEDRTWQPCAPT

SEQ ID NO: 267267 - protein, 341 aa, unidentified
MRKTLFCGVDLHSNNALYVITDQEDRQRFKRRLPNQLPVVLETLEPFRPRLKVVVVESTYNWYWLVDGLLDHKYPVVLAHPGAIDQYDGIKEADDLTDAAFLARLARLEILPTGYIYPKGERPVRDLLRRRSLVVRQRASTILSLQNMALRQTGQNFGWRALRRLSDPERAEVLGDHDCLTFVTTEQLDLIELLSEKIQRFEAKILEHAQLRPAYECLLTMPGVGVVLALTIMLETGDIGRFATVGDYTSYCRCVRATHTSNGKSKGKNNGKNGNAYLAWAFVEAVHHALRTCPPARSFYDTKCAKRNGALATKALAAKWSKAAYYMIKRQESFDLARVFG

SEQ ID NO: 267268 - protein, 370 aa, unidentified
MEEGIKGYVGLDVHKDTIAIAVADVGRSAGRLIGQVAHDVPKLMKALARLGEPAALHVVYEAGPTGYGLQRALAAKGYRCEVIAPGLIPRRAGDRLKTDRRDCLRLAELARAGELRAVWIPDAGDEAIRDLARAREDAVNARTQARHQLKAFLLRHQLRYSGKSAWTKSFYRWLGELNFGDASSQTAFTEYHLAVQAADQRLERLTKALAASVAGWRFEPVVAALQALRGIDVVSAIGLVAEIGDIARFDHPRKLMAYLGLVPSEYSSGDRVRKGSITKTGNAHARRLLTEAAWNYRFAPRIGRQAQARQQNLPEAIRAIAWKAQLRLGGRYARLNGRGVHHNKVCVAVARELTGFVWAIAQASAATPTH

SEQ ID NO: 267269 - protein, 418 aa, unidentified
MRANVRKMEAAVITAVGIDVSKSKSTVAVRRPGGEIVLRPFEVHHTNSDLKKRASALKKLGGDIRIVMEHTSTYWRPIALTLKEAGFFVSVVNAMLIHDFSDNTIRKLKTDRADALKIANYALTFWDTLPPFNSEEETRLLLKMQSRANERITATATALRNGLIALADQTFPGVNIAFDPNTKNANGHEKWVDFFLRYWHKDCVCQYSMEAFTESYRGWCKRKNYKFRTNTAHRIYLLAQEGVDTLPKCESTKMLITQACKSLNAVCEAKQSTQLEMLRLAAMLPEYEVVMQMEGAGPITEPALMAEIGDVRRFKNKKALVAFAGIDAPPFQSGAFKSKSRHVSKRGSPHLRRTIFIVSNIILTRSNPENAVYCFMDKKRSEGKHYYVYTVAGSAKFLRVYYARVTEFLCSQPSPDAC

SEQ ID NO: 267270 - protein, 360 aa, unidentified
MGKIRLEEGTEQATSARPQPGTAVYLAVDLSRTKWVYCARWAGSEQRRLSTPAGLEHLQALVQQYAGYALHLAYEACGFGYEVAWWLQAQQIAVTVIAPSRVERAPGLAVKTDRLDVGKMARKLEERQLKGIYVPARAEHEWRQLARTYAQAVQERQRAQVRVRSLLQEQGRLGPAPRAGWPAYASWVTQQTLAVPVARCLQSLLELRASADRQVGQLKISLAAAAALPAYRAVVRALRAQPGVGPLAAIRFVLELGSLARFRSPAALAHYLGVTPSEYSSGALVQRGHVLKCGPAQLRATLLQCAWVAVRRDGALRQVFEHLAPRLGRKRAIVAVARRLAEQLWHRWHAVTAAPQPPVD

SEQ ID NO: 267271 - protein, 405 aa, unidentified
MSANKKRGPGPSHLLLTPDHAGNVVGVDPHKLTLTATVLDPRGGVLAGEHFRVSGDGHRALEAWARQFGPIARWGVEGAAGWGRHTAIFLARRGYDVRDVCANRTARNDRARQRGKSDALDSERIARETLAHPLLPKAFKRAGADSGPDEQQQLLALWHNRRRSILTSRQHLVNEAESLLCGLPLELREQLPSSKAVRPRLAALARRNRRRRYDAPTSLRLRMLDDYHAQITALDREDKQVVAELRTLVRASGSTLGELCGLDTRSVAELLVETGDPRRFTDGGFARFNGSAPLAASTAEGPDEPVRHRYNPGGNRRINAILHRMAVTQLRCEPRAKKIYANARAEGHTKKEARRILKRHLSDVIHRRMIRDLASLPAQPLLAAQPRAAIAPSRVARQGRAKRAA

SEQ ID NO: 267272 - protein, 415 aa, unidentified
MALKIVYKICCGIDVHKTFVVACIASTNDKGVTSYESHRFSTYTSGLKTLLQWLLKHNCKDVCMESTGKYWIPVYNILENDCSIVLAHPKYVKAIRGKKTDKKDAKWIADLFKHDLVAGSFMPPADIRQLRDLMRYRFKLTCFQSSEKNRLQNCLTVSNIQLGNVVSDTFGKSAQAILDKLLENPADTSFDLEPLVYKSLKKKLPELRDAIDGYITPEQVGKLKVIKAHYESLESRKAELEELILALAAPYQQELAILQTAPGIRSDFTAIGIISEIGTNMEAFPSAKHLCSWAGLTPTNNESAGKKKSVRVSKAGCYIKPLLVQCANAVVTSKKHPEIRNRYLRLKKRRGHKKAIIAIARMLLTALYHMLKNGETYNAELYRKSDLPPVDREITVEQAIIIARNQGYKIKSATA

SEQ ID NO: 267273 - protein, 315 aa, unidentified
MSDAPCFVGIDVAKAQLDIALRPSGERRAVANDASGVATLVDRVQTLHPTLIVREATGGLERAVTSALAAASLPVVVVNPRQARDFARATGQLAQTDALDARALAHFADVIRPTPRPLPDVQTQELRALLGRRQQLIVMRTAEQNRLAGTSERLAKAIVAHITWLNADIATLDNDLETTLRASPLWRENDDLLQSAKGIGPVCARTLLLELPELGTLTRQQIAALVGVAPLNGDSGTLRGRRTIWGGRAHVRTVLYMGTLVATRYNPQIKAFYERLLAAGKVKKVALTACMRKFLTILNAMLKHRTPWHAQEVEG

SEQ ID NO: 267274 - protein, 345 aa, unidentified
MEVSTIGLDLAKNVFQIHGVDASGRIVIRRAIRRSQVLPFFAKLPSCLVGLEACGTSHHWARELLAVGHDVRLMPPAYVKPYVKRGKTDAADAAAICEAVTRPTMRFVPVKSREQQAILSLHRTRALLVKQRTQLVNMIRGQLAEFGIYIPQGLERALMLARQIIEGKEAPDLPGHAVKMLAILCRQTLAGHEQIREIDRDLMVLQKSDEMARRLATIPGIGPIGATAFAAAVTDPGQFKSGRQFAAWLGLTPLQNSSGGKERLGRISKMGDKYLRRLLVIGATALVRQFRNRPDKATPHFASLLARKPVRVATVAMANKMARIVWALMTRGETYRAAHIPILAA

SEQ ID NO: 267275 - protein, 318 aa, unidentified
MNEVYIGIDVSKNTLDVASYPTRKSWQFANDTTGVNKLVSMLLRLSPSLSVAEATGGYETEMAYALMKAGLRCAVVNPREVRDFARATGKLAKTDRLDAYVLAHFAALIQPEPRPLSDEDSREMEAILARRRQIVEMITAEKNRLHHALYPVREDILAHIAFLEQRLQDCDSGLEGRIEQSLVQREKYNLLMTVPGVGPNLARTLLIGLPELGNLDRWQVAALAGVAPFNHDSGNRRGTRHIRGGRSDVRSALYMSTLVATKHNPVIRRYYIRLCATGKVKKVVLVACMRKLLTILNAMIKHHAPWTVSPSEISFACA

SEQ ID NO: 267276 - protein, 333 aa, unidentified
MQYYAGLDIHKKSCQAIICTEKGNTVKQGKIPTEKDKIQEFFSDFENITIAIEACNTWEYIYNLLELDGHKVILAHPMKTRIIAESKIKTDKIDAKILANLLRTGFLPTSYIPSKEIRELRHLVRQRIFLGRYTTKLKNKIYAELLKRGIQYETGGTIFTRKGKKWLRSLNIPFLDTYLSLLESLVDKTAEIEKNLRIQSEKYNEIDLLTTIPGIGIYSAMIILSEIGDINRFTNEEKLYSYAGVTPSVHQSGENTYYGHITKRGSKHLRWILTEVVRVHLIWTKKHTVETKISHYYYRLSKKKPKNVATIATSRKLLQIIYHMLKNKNEFRG

SEQ ID NO: 267277 - protein, 421 aa, unidentified
MLKIVYPICCGIDVHKKFVVATLATTNSNNVTTYQTKQFSTFTDDLLNLASWLKDNNCSEVCMESTGKYWIPIFNVLETSCHIILANPKYIKAIPGKKTDKKDSIWIADLHKHGLVRSSLIHPKPIRDLKDVVRYRRKLVSMRSSEKNRVQNSLTVSNIMIASVVSDTFGKSSSAIINHMISSPEDTNFDYESLLHKKLKSKTSDIGRSIAHHTLSATQASKMSVAFKHFDYINECIDLMDETIAILASPFQSEINHICTIPGIKELAATTIVSEIGVDMSKFDSSKHLCSWAGLTPQNNESAGKKKSVRISKAGSYLKPLLVQCALAAIKDKDSPFRIKYERIKRRRGHKRALIAIARTMLTCIYHMLSKEEDFNHELYLTSVIKEPSVIPSTYQLNQAILLLQQNGYTVNILDPILPST

SEQ ID NO: 267278 - protein, 464 aa, unidentified
MVIKKKNAARSAQKRKTAKLKPADGTLGMEVIHPYAAGIDVGNEQHYVAVPPTLDDNSVRVFGCFTADLMAMATWLKSLGVKTVALQSTGVYWIPLYDVLTQKGIQVFVVNARETRHVPGRKTDILECQWILKLHVHGLLRSSFRPAAEVLKMRTLWRQRMQLVSDAASCTQRMQKALTQMNVQLANVISDITGVSGMAILAAIEKGERNPQRLAELCEPGIKATQEEVMKSLEGNWADDHLFVLKQQLATYRHFQRMIEGCDKELHAHFGTMEQKADPEELPKVERHKRPRGNAVTSFDLRKELYRMTGVDLTSVGSINIMTAQTVLSEIGYNVTAWNTEGQFVSWLNLAPRDRVSGGKVIGRDGNKVINIAGQALRLSANSLRNSDSYLGAQYRRLRGKMDTAAANKAMGAKLARIIYRMLKYGKEYKDKGAEYYERTRKEQELRRITKQAAKLGYTIAKIA

SEQ ID NO: 267279 - protein, 433 aa, unidentified
MGENCVLFALRRGHSHSREEAAVEIVHARCCGLDVHKKSVVACVLISQPDGLIERQVRTFKTMTGDLLALADWLSCLGVTHVALESTGVYWRPVFNVLEDDSRTLLLVNPQHMRAVPGKKTDVRDSEWLADLLRHGLLRGSFIPPAPIRAVRELTRYRKTLVQARTDEINRLQKTLEGANIKLASVASDVLGMSSRAMLTALLDGERDPDVMADLAQGRLRNKLPELRQALAGRIQPHHMILVGQILAHIDFLEQAIAQMQTEIERCLPPFEAALELLQSIPAIKAVAGAAILAEIGTDMSRFPSAGHLASWAGLCPSNKQSAGKRMKGPVNRGNVWLRAIMGEVAWNAVKMRDTYFHAQFQRVARRRGRQQAVIAVAHSLLIVIYHVLRTGRPYSELGGNYFDQLDATRVERHHVHRLEQLGYMVTLTPSAA

SEQ ID NO: 267280 - protein, 425 aa, unidentified
MSRRTQPICPQWQHLQWCAGIDWGRQTHHVVLVDPDGRIRLDMPFDHDAEGWDRLRRAFRQLAGEDLSVVGVAIETRSGPAVEKLLELGCTVFPMHPKAAQRYRDRKAPSGVKDDGLDAWSFGDALRTDGYSWRAMDPEDPLTQELRLVCRDEVGLIERRTALINELRQALHEYYPAALEAFADWTSPAAWAFVKRFPTPQKLRQAGQRRWEKFLHTHRLYRPQTYSHRMEVFSRATGLCGSQPVTQAKSLLAESLVQELRNLQTQIDRYRKRIQQLFDQHPRREVFDSLPGAAEILAPRLLSECSSLPSRFDDADGMRCYAGTAPVQYESGQIRRVRLRRGCNKHLRAAMHLWVNASRRKCAWAQVYYQRKRQEGKSHACALRCLGQRWLKILWKMLETNRPYDEAYHTRNQVRHGSWVLALQP

SEQ ID NO: 267281 - protein, 324 aa, unidentified
MNLPPLGLDVAKLKFNACFVRAGGKLRHKVFANNPQGFSQLSDWLKQHGVIKVHARLEATGTYGDSLATYLHEQAHLVSVVNPAAIKAYAQSHLSRTKTDRVDAALIAGFCGERRPPAWHPPKREVQELQALVRRLESLVEMRTMEENRLSSGIAVEAVRESVAELMAYLAEQIRRTETLIRSHIDNHPGLKRQHQLLDSIPGIGETTAAALLAEVPDITQYRSARQVAAFAGLVPRERQSGSSIRGRVRLSKIGNARLRKALYFPAVTALRCSPFFQAWAKGLRERGKCKMSVIGAAMRKLIHLAYGVLKTGQPFDPEWIKTA

SEQ ID NO: 267282 - protein, 412 aa, unidentified
MQVVYERCAGLDVHKRTVVVCAITSDAQSQRCRERRTFSTMTPDLLRMRDWLKELGISHVAMESTGSFWKPIFNILEGHLEVLVVNAQHLKAVPGRKTDLKDAEWIADLLQHGLLRPSFVPPVAQLEVRELTRYRISLVEERSRTINRLQKTLEDTNIKLASVASDVMGKSARDMLTALLAGEVDPSILAELARGRMRSKRDLLSQALQGQLKPHHRFLLSEQLADIDALDEAIERMSTQIAERLRPYEQQIQRLMTIPGIKRRLAEVILAEIGPDMSRFPSARHLASWAGMCPGNHESAGKRFSGKTRKGSPWLRSALVEAAHAAIHAKDSCLSAQYQRLAVRRGGKKATIAVGHALLVIIYHLLSQDKDYEELGGHYFDDWDRQAVQKRLVRRLEKLGYEVKLEPVSPTA

SEQ ID NO: 267283 - protein, 329 aa, unidentified
MNVCGIDVSKDTLEIVLRKNNQSQKSKTFDNSPEGHLKLIKFLISRKIDFICLEATGIYHLDIAIMIAKTDQLKIMVLNPTAANNFAKAMMQRTKTDAIDAEILAQYADRMDFIEWQAPDTEVISLRVLGRWLEASNKELTRLKNQLHAFEMTQTTPDSVLNSIKNRIATLEQEISDLEKEALDLIKENSAIKEKYELLISVKGIADRTAIKILGELLVLPSDMSAKQWVAHAGLFPQIIQSGSSINKKTRIGKAGNRYIRGALYMSALVAAYREPHVSGFYQHLVNDNGLKKIQAVCAVMRKLLLSIHAMFRTNKPFDGACFYTLKEA

SEQ ID NO: 267284 - protein, 348 aa, unidentified
MKNTITIGIDLGDKFHIAVVFDGEGNELETAQVTNTKAGVSKFFQRYKHARVAMEAGTHSPWISRLLIEMGLTVYVGNPRKLRFIWDSIDKSDARDARILGMVCRIEPRLLHPLKHRSSQAQADLAAIKSRDMLVKSRTQLINHVRGLVKANGERLPKCSTASFAKKCEPLVPAELRSALDAVFQTIFHLNEQIKVLDLQIEQLSMERYPETQYLRQVPGVGPITALCFVLTIEDPACFVKSRQVGPFLGLTPRRDQSGDTDKQLPITKAGNTYLRRLLVGSAQYIMGPFGPESNLRLHGMSIAARGGKNAKKRAVVAVARKLAVLLHRLWVTQDKYQPFYGMNKKAA

SEQ ID NO: 267285 - protein, 344 aa, unidentified
MEQIIRIGMDTSKSVFQLHGVNAAEQPILRRKLTRKEMVKFFQKAAPTSIALEACGGSHHWARLLRSFGHEVKLIAPQLAKPYVKRGKNDAADAEALCEAMSRPTMRFVPVKTAQQQAALMLVGLRERLIRNRTQLANSIRGFAMEFGIVAATGMCRIEPLLERIAQDPSLPVLARKVFAMHGNEYRGLLQEIKKVEEELLDLHRADECSLRLAQIPGVGPVGATLLMLKTPDARLFKSGRAFAAWLGLTPKDHSTAGKTRLGVITRAGDEMLRSVLVVGATSLLQQVRAGRSRHASQWLTGLLQRKKPKLVAVALANKIARIAWKLMVSRQTYRRMEEQPQAA

SEQ ID NO: 267286 - protein, 454 aa, unidentified
MAKLRKNKKAHGLVAAPVMEPNAAGVDIGATEIYIAVPPDRDTQPVRRFAAFTEDLKAAADWLERCRIETVAMESTGVYWIPLFQILETRGMKVCLVNARHVKNVPGRKTDVSDCQWLQYLHAVGLLRASFRPSGQVCAVRSLMRYRESLVGMAAVHLQHMQKALDQMNLQLHHVISDLSGTTGMAILDAILCGERNPLKLAQLRDPRIKASPETIAKSLVGDYRREHLFTLRQSVTAYRSYQQLLACCDVEIEQMLGEFPDGAGPDTPVLADPKDRHRPRRNEMKFDLRGHLYRIFGVDLTEVPGLNALTAHTLLTEVGPDLSAFPNVGAFASWMGLCPDNRISGGKVLSSHTRKVNNRAARALRMAAQSLFRSQSWMGQYYRRMRAKLGAPKAITASAHKLARIVFHMLTNRHAYDETVFAQQEIQNQHRLQQRLMQQAKKHGFQLIPIAQN

SEQ ID NO: 267287 - protein, 383 aa, unidentified
MKAVCGLDVHKDSIYLCILHSDGELFEQVFGVLTFQLEEMCKLLQKHYVSEVTMESTSIYWIPIWRVLSPHFTLRLVNPYFIKQLPGHKSDVKDAQWIAECTMKNLAKGSFVPPEIIQQLRQYDRRIFDLNLEIARKVSKVDGVLQRCNFRLSNYVSNIEGKSYRAVVRRLSEGMTDPNELIKEIHGRIINHHGKETILASLTGVVSQAEIDVLRQLHEEIDIAESHRNECQAKMLEICERHFPDELKRLQTIPGIKERAATSLIAEIGTDMSKFETANHLAAWSGLRPRNDESNKKVKSRKITHGNHYLRVNIIQCAWAASRTKDCFFSRFSYHQTIVRRKNKMKVLVAIARKLLVVVWHVLNDKVNYIDFNPDCDKSANNG

SEQ ID NO: 267288 - protein, 424 aa, unidentified
MKANTIKPQISRNGNGKTLIVTVDVGKVTNMGYYRYPDGEDTKPFEFFNDGRGFDRFWDRICRELEAAGDKIEEVVVGIESTGPYAEPLVHYLRKRKVRLVQVNPMHTKRLKELQGNSPNKTDRKDPKVIADIIELGHALSLVIPEGCAAELRRLTQARERAMGRLTALFNQLYHLIFIIFPEFLQIFKNIKIKSAQHLLKYLTTPQSIVEYGLEALAATLKKISRGKLGQGQAQALYEGAEKSVGVQEGQESIVEEIRHILSLIEESEQFIAEIEEKMSAYLKQIPYSGVILSIKGIGEITVAGLIGEVGDFRQFKTIGEMLKLAGLDLYEISSGKQKGNRHISKRGRPLIRKLLFFAAINVVRKGGILHQTYQDYLSRGMVKMKALIAIARKLLGIIFALVRDQKEYIEGYKEIKTVVEEAA

SEQ ID NO: 267289 - protein, 371 aa, unidentified
MPQTVLFYQSFIGVDLHKTTVTLVAVAPDGTMIAKLTINTKCREKIAAWLLALPRPSHLAVEAVGFVEWFIDEFRHRVDHIDIADATELSNRRGKRRKNDWRDALDMAQRLARGECPLGYIADDELMQLRKLGRHWRQLSSVMARAKQCMKSILLAANLRGPKFDGASAQRWLLAHGKHLKPAQRRAFADFTRIVQLIELEREPLRYAIIMASRSERFDLLTKLLQTVPGIGEIWACIIAAEIGPFERFPNADALEFWSGLTSDVKKSAGRTQSGPITKAGSRTLRWALCSAALTLCHSDAKQEAIRQRLIRKTGGIQAKANTAMGRRLLRILYAMVRDGKPYQVGSPRNRTAAANKARAKRARKNRKEAA

SEQ ID NO: 267290 - protein, 325 aa, unidentified
MKTMFGSSVMVGIDVASAHVDVACVGAALPAELAHVSNDAEGHSALADALAKLQPGLVLMEATGGYEAALACALQAAGLRVAVVNPRMARDFARAMQRLAKTDRIDAATLAEFAAVLAQRPDCERFVRPLSEPEQQDLAALVTRRRQLVAMQLSERQRLRLARPVARPSIDAMLEAIARQIDDVDAKMVSHVKQHHAVMARLLQSVAGIGRIAAATLIAELPELGRLNRRQICALVGVAPYANDSGSSQGRRRIIGGRFEVRRALYMATLTATRFNPSIRTFYERLVAAGKLKKVALIACMRKLITHLNAITRDHLNAQNPPLTT

SEQ ID NO: 267291 - protein, 445 aa, unidentified
MFIQSQDDSHCCYSFFIKVVILMMKLKYSICCGLDVHKNVIVATIVTTNKDGISEYLQKSFSTINSDIQRFHNWLIENNCYHVCMESTGKYWIPIFNYLENDIDICLTHPKYVKAIKGKKTDKKDSKWIADLYKFDLVRCSFIPPKDFRQLRELSRYRFKLVCMKSSEKNRIQNCMTISNVGIASVLSDPFGKTATEIISYLLEHTADSMDEKAVRKLIKKGAKAKSDEIIEAIKGYNIETDQAKKLELAQGHLEYLDDMITQTEVELYVRIKPYYEFVEFVSTMPGMTELSSTIVLAETGVDMDIFDDAKHLCSWCGLSPANNESAGKKKSVRIAKAGDYLKPMMVQCALAAIKSKKQPYFAIKYGRIKKRRGHKKAIIAIARMMMVCIYHMVSEKKPFTPTDYEELMDPQNHVESVVLNENNVFAYLESLGYDSSKLVKRNDN

SEQ ID NO: 267292 - protein, 385 aa, unidentified
MTATTRSFDLTAFENTLFVSFELGEGRWALSFTPGFGEQVLRRSVRARDCEAVADAIQTMKERLGLARDALVVSCYEAGRDGFWLHRFLEAHGVENLVVDSSSIEVSRRRRRAKTDRLDGESLLDLLLRHRAGSRKKVWSVVRVPTVEQEDRRHLHRELASAKKDRTRVTNRMKGLLANQGLTLDLKKDVPLQLSALRSWDGSPLPAGLRSRLSREWERVAFYTDLVERLESERRELLRKAEDPVIEKALQLNTLRGIGVNSAWLYVMELFGWRELRNRKQVGSIVGLAPTPHNSGQSARERGMSKAGNRHVRTMAIEIAWGWLRFQPNSELSQWYQRRFGSGSKRLRKIGIVALARKLMIELWRFLETGVLPPGAELKTDVRIR

SEQ ID NO: 267293 - protein, 334 aa, unidentified
MLGVLTSISTKEAPVSEGYAGQQIVGVDLHRRRSVIVRMTESGERLETVRISNDPEYLRQVMARAGEAPEVVLEATYGWYWAADALAELGANVHLAHPLGVKAFSYRRVKNDERDAADLADLLRMGRLPEAWIAPPATRELRQLVRHRAKLVGLRSNLKCQVHAVLASAGVAVSMSDLFGVEGAKLLARVKLPTAAGARVNSALRLIETLDFEVELFAKLLAGRLRTHGGYTAIQAIPGVGPVLGAVFVAEIGDVARFARPAQLASWAGLTPKHRESDTTVHRGRITKQGSRLVRWAAVEAVHDCLRTPDSAKLVTASAPAAAATSASSPRPVS

SEQ ID NO: 267294 - protein, 351 aa, unidentified
MRTSQKTPATISTIGIDVGKNTFHLVGLDKRGAIVLQQKVTRHQLGRRVSNIPRCLIGMEACSGTHFIARQITALGHDVRLIPAQYVKPFLKGHKNDYRDAEAIAEAVQRPTMHFVSIKTPEQMDLLALHRVRSRLVRQRTGVANQIRGFLLERGITVRQGLMPLRKALPEILSSKSDVLSPRMINLIGDLSQDWRRLDERIARVSTEIEALAKQDESCQRLMSVPGVGPIISSAVVAAIGNGAGFKQGRDFAAWLGLIPKQESTGDRTILGKISKRGNKYVRTLFVQAAHVVLERRPRTAKQGLWPWIEQTSKRLHRNMLAIALANKLARIAWAVLARGHAYQPRITASA

SEQ ID NO: 267295 - protein, 400 aa, unidentified
MKQITIGVDPHKLSATIEVVDQHEKVLGSGRFTTNKTGYAAMLAYVAGWPRRTWAVEGSNGAGRPLAQRLLADGERVVDVPAKLAARARVLDTGHGRKTDAHDAHSVAVAAVRAKELRVLAEDPELESLRMLIDRRDELTRQRVQTVNRLQRLLAELTPGTAKKDITALQAKAILAAVRPRDLAGKTRRRIAADELADLVAVEKKLKVVTRELKTMIAATGSMLTDLPGVGGIVAARVLAEVGDVTRFADRNRFASWTGTAPLEASSGEQIRHRLSGAGNRRMNHMLHIAATTQIRLDTPGRAYYRRKLAEGKTRMEAMRCLKRRISDGVYRQLLTDAQAASPGAGPGGHCGATKKSSAVDLPPHIDTSDQPLPGPAPTTLQLDPRPRKSTNAEPLRTVG

SEQ ID NO: 267296 - protein, 427 aa, unidentified
MNEAKPTRVDEFRQFKREVRSSKQYLIVGLDMAKRKHHAFFGDAGGRTLLKGLIVENSAEGLRHLLTQVRFYMNREGLGQVVFGLEPTSAYHKALAEQLIVNGYLVVYVTNEAIKKNRSLLDGRWDKNDTKDSANVADLVAQGKCHYYDLPEMRLRGLRSLLLVRKRLKKQLHGCRVRIRNNLVAQYFPELDQFWNNAAAENLTIVREYLDPATIRRLSCEQFIARVITHNGGLRQQRRLRHIWEAAGQSIGCRPGPAMKIEAEVMVEMLGAIQAQLDRVEEAIEQEAEGFEEYGYLKSIPGFGPYISAMTMAAIGDPHRFENRSQLIRLAGFDLSASRSGEKSRMAVPVISKKGKADLRYALYQAALVASSLTSHFRAYYSRLLEGRQREVGIRTKMLVKIASKMLVIAWTVMKRKERFNPACISI

SEQ ID NO: 267297 - protein, 309 aa, unidentified
MLSSVGIDTAKATLEICIKPQKIRFEVANNSAGFEVLLERLKDFNISRVLIEATGGYEKDVLIALASAGLETICINPARARKFADAMGKKAKTDKIDAEVLADFAAHLSAPQGQPVSPEREELRELVKQRAQFVQSRDDDKRRRQQCRSATVMAHFDEHIEQLKVLIKRLDEEIDQAMVQLDDTRARQLLAVTGIGRVTAANLLASLPELGQLDRRQIAALVGVAPYNNDSGSHRGHRQIWGGRAHVRRVLYMSSWIIIRHNTEFKARYEALRARGKCAKVALVACMRVLIVRLNAMLRDNTPWREQTA

SEQ ID NO: 267298 - protein, 332 aa, unidentified
MRFYTKQHTFYCGIDLHARTMYLCILNQDGEIVLHRNMKAAPEPFLKAIAPYREDLVVCVECIFTWYWLADLCTQEGIPFVLGHALYMKAIHGGKAKNDTIDAHKIAVLLRGGMLPQAYAYPAEMRATRDLLRRRMHLTRKRAELLAHIQNTNHQYNLPAISKKLAYKANRAGVAERFPEPAVQQSIAVDLTLIETYDHLRTALELSLVQTTTAHDAQTFYRLRSIPGVGKILALVLLYEIHDIHRFPRVQEFVSYCRLVKCAKESAGKRYGTSGTQIGNAYLKWAFSEAAVLFRRNHPAGQQYLARLAKKPGQGQALTVLAHTLARAVYYM

SEQ ID NO: 267299 - protein, 461 aa, unidentified
MANQDRRSLPGRGEGVEGFPVLRADVAGIDVGSEEHWVCAPARTGVGREVAVFAATTPGVEQLAAWLKERGVAAVALESTGVYWIAPHEILERHGFDVVLVDTRELGRVPGRKKTDRHDCEWIQRLHSCGLLRGAFRPVEQVCMLRTLVRDKGTLVAERGDWVRRMQKNLDQMNVRIHRAVADVDGATGMAILRAIVAGERDPRQLATLRDPRCRKSEAEIAEQLSGHWREDYLFSLKQALKMYDAITETIQESEQEILRHLEEMAGADRRGEQAPIPKNPEKVKAIKKRGEDPLRHALYRMSGVDLTAIDAVGVQTVSVVLSEYGPDLSQFPTEKHFVSHVKLAPHKPISGGKVVKNKKKPGSGSARVGAALRMAALSLRHSQTALGGYYRQVARRAGADVAVFATARKLAQLIYRLLRWGQPYVDEGAAAYEKRYQLARVKRLTATAKDLGYKLVSVEA

SEQ ID NO: 267300 - protein, 461 aa, unidentified
MTPEGPCLEGTSMPQPILAVGVDPAKRLHRAVAVLFPDEVVLDVELPNAFDAVANLDLRLCELANQHGADLVYGLEDHRHYGRLFCQVLTERGRDVRVVNPLWTNRQRAFYGQDKDDAIDGRSIAAVVLRRHLQLPLASDFGEVAQAIREAERSLQDLSKVRTQLGNRLHLQLSDTYTAAYEEYFGKLKSPLALRFFRRFPLPQDLVGHNVEMLASLLLDLAGGKVGPHKGGNRLIAMRSKAQAILETSGAMRASPRTLALELKAELIRQLCDELLANHDRIIRLERMLREQLLPATKQTITTIIGISTILAATIIGETGSITRFRSPAAFAVYNGTAPARNSTGGRDRHKARRDCNHRLKRAFYLAARAAVLHDPIAKAYHQSCKSRGLSYVEALKRVARRMSDVVYALLKSGKAYDRSIIEHAIERRREQAAHAARSHAKQSLVHSRPRKSNSPLSQRK

SEQ ID NO: 267301 - protein, 356 aa, unidentified
MSMVAHTHPFVIGVDAHARNHALAILACPTGEVLDEGQFPATGAGLQRAVDWVARRTGGDLDTLWVVEGVGTYGARLARAAADAGYSVAEAARMNPRANRGVGKSDPLDACRIAQAVLPLDVAQLRRPRTDDGVRAAVRVLIASRDHISVERTAAINALTALLRVAELGVDARRALTGGQIALVAAWRTREEALATRVARAEAVRLAKRVLAADQEIASNAKQMTALLNSSPARKLLDQPGIGPVTAAVTLAAWSHPGRVRSEAAFASLAGVNPIPASSGNTVRHRINRGSDRRLNRALHMAVVTRMRIDPATRAYVEKRTAEGRTLREIRRCLKRYLARQIYRHLNAASDTLLAA

SEQ ID NO: 267302 - protein, 438 aa, unidentified
MGALNVGVDLGVKSSHHAVILDEKDKTVKEEFRFKTTLQDLRMFYETVSKHAENGAEIRVITEPTGMAWYPVCQYLMAQGCKVYRPKTQKSHDLRQYFSKHTKSDHTDALTLAKMPLVDGDSLYEVYIRKKDVNTLKRLLKQREKLVAEATRYKQRITDILRFAVPGLSKAIKKLKPKVKREFLKNYTNPHNIKNLGQKRLQKWLSRRMKDENKAKKLAAKIHRICIEAIEIYRKKDTLDFTAINEEVNRYLRLLENLAQEIRELKIKIKKTYQKTSPDKLLTSIPGLGEIAAPLVYALIGDANRFPNEKAQRGWIGLVPGKDSSGFKDRKGVKCTKAGPNQLKHMLYLAADVARQYDPQIAKVYYREMVKKGNCHTKAVCACATRLSNRIRAVLREGRRYDFRDTEGNKISKKKARILAQNRWQVPKEVRKRLRNSN

SEQ ID NO: 267303 - protein, 433 aa, unidentified
MKVLYERVAGIDVHKDMIKVAIRSPGDKPWTRKTEILEYRTFYGVLQQMARELRKRGVTHVVMEASGVYTEPVYYALCEQDFIQVAVINPAHAKALRGHKTDAKDCARLAELFECGLLRGSYIPAPELKEVRDLTRYRMKTVQARTSEIQRLGKALESAGIKLGSVASSITGTSSTAMIEALIDGERRGPVLADLAIGRMRTAGKLADLSMALAGRFTEHHALLCRLHLDRIAGFDDAADGLDKQIAGKAARWQRETGLLTSVPGFGDVVAQAWLGEIGPAPHRHFSSHEKLASWVTLCPGNNISARKRKHGQTGDAGTYIKPMLVQAAWNAIRVRGRLQARYSRLVRRFGGDKNPAAKKKAITAIAHTLLKIAYQVLKSGTPYQDLGADFYTRRESPEQKQAWLQRQLQRLHPGCTITITISPPEAALPPAA

SEQ ID NO: 267304 - protein, 409 aa, unidentified
MFFTGIDWSEKYLDYCVGNKDNNVILRGRVDNNDDGFNSLLKSFAKEKIDLSEVAVAIESPHQRIVDFLLARGVSVYSVNPKAVHDYRKSRFPSGSKSDTADAQLLSDYLREHQAHLRVWHLEEPNLRQLKLLVEDRDKVVQQKVRLQNQLRITLLEYFPQAVDAFCDITTQTALEFLEKFPTFASTQEKTDEEWKKFLDENRCFHPQARKRFLSAIKCQPINVDEAVVCAKSLFVTTIVGQLTIVVASLKEYNTKIDTLLKTFSDGERFRSLPGVDVIISAKLLVSIGTDRERFSNANQLQSFFGTVPYTKGSGQYRSVHFRFACNKTMRAAIEQMAMASLRCSAWAKSYFAKKRKEGKRAYHALRCLANLWLKVIFAIWKNNTNYDENLHLASIARHQLAQPQGERR

SEQ ID NO: 267305 - protein, 418 aa, unidentified
MNLFVGLDVSSEKLDVCFLSDDDNLTILEEITLGNDIDGATIVKEKVIDFQEAYGFHKIVMGMESTSMYSFHPAMFFNQDKELKGLNTVVTIENPFRINQFSRMFDEDKTDRNDAFRIADFLRIQRFTTSPIKEEKYMALQRLTRTRYQLIKQLVRTKQHFLENLTYKCNTLTRELKELDGTTSVFSATVMSLMTDDYSLDELAEMPLEDFATLLQEKGKGRFKNPKNLAKAIKRAIANSYRLGTIAQESIDVVLSILVREIRALEASIKDLDKAIEQLVVILPEYQCLASIPGVGKVYAAGMIAEIGQIERFEDQTKLAKYAGLSWKVKQSGNYQSEYTPLTKQGNRYFRYYLVEAANSVRRYLPEFQEFYSKKFKETPKHQHKRALVLTARKFTRLVDMLLRNHQLYAPPRSVIDK

SEQ ID NO: 267306 - protein, 358 aa, unidentified
MQSVTRVGIDLAKMFIQVHAVDAVGKVVCNKQLSRDKFIAWCNQLPAGCLVAMEACSGSHAWARKLIALGLDAKIIAANHVAPYRLEGKGGKNDANDAAAICEAASRPSMRFVPVKTLSQQGMLCVHRYREGVKEERTANINRIRGLLAEFGIIAPQSPNKLRERLAEIIEDADNDLCGIARLVIQEAFSHWDEIDKQLGWCTQRISAHVKENQQAQTAVQLMGVGPVTASAAVVTVGDFKQFKNGAQFGAWLGLTPRQNSSGGKTKLGRITKRGDVYLRMLLIQAAKAAVMTAHKRDDPISRWLLQLREKSGWQKAAVAMANKNARILWAVMTKGCDFDPRYVSVKPSGGGSIAVAI

SEQ ID NO: 267307 - protein, 339 aa, unidentified
MSKPSNAQQASVFCGIDVSAATLAVAVIEPDQPLQQRQFPNRASGHKALIGWLGKCQARVRVSLEATGIYSLDLALALHAAPDIELAVLNPKVADRFAQTLRRSKTDAADAQVLAEYSQRMPFVAWTPPSLNGLRLRAVGRHIAALVAQHAREQNRLHACQGSQVAPRCVVQDLKRSLASLERRIVKMRREAMALIRADAEIEQRFRLLTGMPGIAETSAVAILGELALLSPHLTARQWVAHSGLDPVHQESGTSVHKRSRISRAGNRHLRRALYMPALAAVRWDPHMKAFYQALQQRHKTKLQAIIAVARKMLHAIYGIFRSKTPSEGSKLFPQFETV

SEQ ID NO: 267308 - protein, 452 aa, unidentified
MGRKKKMEMEIINPNAAGIDIGSRSHFVAVGQSEEDVQEFGVYAEDLTGICEHLKTYGITTVAMESTGDYWQNLFTELIKHGFDVILCNGKFTKHAKGKKTDVKDARWIQKLHALGLLTSSFLPDEQTEILRTYTRQRRNLIQQAASASRKMQKYLKFLNFRLDVVVNDVCGLTGMKIIEDICKGNLDPNELAKHRHYNCRKSEEEIAKALHGNNRKDYLFGLKQEFETYQFMQKQLKACDKQIDRFIKDYFKANPVLKKLKTEDKPYKRENKNAPAIKNFNQLAYQYFGGVDLLAIEGLSHSTVLSIMAEIGPEGFKKFNTSKEFVSWLRLAPNNKISGGKVLSSKVPKGSNRLKIALRQAANSIGNLKETHLSNFFRRIAFRKGHQAAVSATARKLGVIIWNMVTKKEPYNPPIPYLYLDQKRKLGMVKRIRKQIHKFDLKPEDVGFANT

SEQ ID NO: 267309 - protein, 346 aa, unidentified
MILIGCDFHPSWQQVCWLNMASGETNNQKLVHASGDAEKFYRRLAVPVRVGIEATGNCQWFLELLGKLGHEVWVGDAAKIRACDPRQQKHDPRDARLLLQLLVENRFPRIWTPSSEEKDLRQLLLHRYKLVRMRVQVKNELQHLAMNKGITKGRRLWSTAGEKVLCELPLAPWASRRREDLFKLRSMLNEQVAALDEAVKHVAEENDRARLLMTQPGVGPITSMAFVLTMGDVSRFPRGKQVASYLGLIPREYSSGGHQRFGSISKQGNRFMRMLLVEAAQCVVRYDEGFRNEYLHRCHTKPRGVAKVAAARKLAVRLYWMLRTNTAYPEIARVGSSSRVPLAGAS

SEQ ID NO: 267310 - protein, 404 aa, unidentified
MWFAGVDWADTHHDVLVIDEASRQVGSCRVTHTVEGLTQLKEFLLSITGPERQEEMACIIETTHGLLIAALLEAGFPVYPVNPKTVDRRRSASGAKTDQIDAYLLAKHGRSEFADLRKLQPDSSIIQELKGLTRDQDTLIQSQTRLVNQLTACLKAYYPVALQLFSKLQQHSTLLFLQTYPTPQQAMAASSQQISQVLKHAGHPKAEQVAAKISDTLHQPHLTADAITTRTKSRLMLVLIRQLLPLLEEIATYDKEIERLFLTHEDNEVFSSLPRAGKRLAPRLLAEIGDDRARYAHTASLQALAGTSPVPYESGTYSKPHRRYACIKPLRNALQQFAWQSTQQETWAQDYYRRKRKEGKSHSEAVRALANIWVRIIFAIWHARTAYQTRTFETARHLHAPRAA

SEQ ID NO: 267311 - protein, 336 aa, unidentified
MTVPATAANTAAPRTHHPARIIGCDVGKSAVVVFDSLTGRTTEHANDAEALAALAADLARDAPADCLVVCEATGGYESTLLAAAAAAGIPAHRADARKVKAFIRSLGRLAKTDIIDARALARYGQERHAELARWQPAPHVREDLRTLTRLRTQLVRQRVALTNQLQAPGGAIAKHRLQAMRDAATAHIAAIEADMRALVETDPDTAEAVALIEKIPGCGHLTAVTVTALMPELGTLSRRRAASLAGLAPHPHQSGQRDGYRRVRGGRPEVKRALFMAAMAARTHNPTLSAVYNRLLANGKKPIVALTALMRKLITIINARIRDARKTPQTPSPQLS

SEQ ID NO: 267312 - protein, 363 aa, unidentified
MSHGKSVAVGLDVHKSSVRLAAVRGDQLLGELTLPFDHERVERELRVWPGARVCYEAGPTGFGLYRHLTAAGIDCEVVAPGLVPSRPGDRVKTDRRDARHLASFHAAGMLSAIFVPSPELEALRDLVRAREDARLDRMRARHRLGKFLLRHDRRMPTTCWGVTRRAWLGCQTFALPGQQEAFDDYLFASDQVDRRIEALERELERLAKEGPHRELIARLRCIRGIDTLTALGLAAEVGDFERFRTAEQFMSFVGLVPSEHSSGESRRQGSITKAGSAHARRLLVESAWHARRRPAVSYELARRQRGQDPGVLERAWRCQQRLHRRWRRMAGRGKPHQKIVVACARELAGFVWAIATDQPLRGA

SEQ ID NO: 267313 - protein, 356 aa, unidentified
MSRILAIDLGKFKSVTCLLDSDTNQTEFWTMSTDRQYLLAVLKNYHPNLVVIESCGLAGWVHDICTEEGYEVLVCNPNQEAWKWKHIKRKTDRDDALKLAKLAALEQLVPVYIPCRQQREYRRLVKYRQVVLGRINRVQNNIRAIFAQRGMEMVRGQKAWALERLELIAQHRKPLAECSLDDLWRGELDLELIQLEHLRQHQHEIHKQLRALARADERVQLLETIPGVGRKTAEVVVAYLDNPHRFQNARQISSYAGMVPRRYQSGEMDRHGRIHKRGPRQLRSALVEAAWLMLRYNPWAKTVYERLTSGQRTRKKKAIVAVARKLLVRCWVMLLRKEPWNKETMIRQPAGIAVAL

SEQ ID NO: 267314 - protein, 339 aa, unidentified
MSLYCGIDLHSNNHVITIIDENDNRLLERRMPNKLETTLNCLSEYQDDVAGIAVESTYNWYWLVDGLMDAGYSLHLVNTSAVKQYEGMKFTNDEHDAFHLAHLMRLGILPTGYIYPKEQRAIRDLLRKRGFLVRHRTAHTLSAQSLHSRLTGRQANCNVIQGDHAESIYLPGLDDANRRLEMKANLRMIQALHHQIVEIEKTVLNQMKLSPEYIGLKQVPGIGNILALTIALETGDISRFPKAGNYASYCRAVKSCRESNRKKKGEGNRKNGNKYLGWAYVEAVNHMVRFSNDGNRFFQRKLAQKNRAVAVKATANKLAKACFYIMRDKIAYDAKLLFR

SEQ ID NO: 267315 - protein, 310 aa, unidentified
MSSFVGIDVAQDHLDVHVLPSGETFRSPNDPTGVASLVQRLQALPAPLIVLEATGGHESLVAAELAAADLPVAVVNPRQPRELARALGILAKTDRVDARTLALFAQKVQPRCRPPRDEREQRLKALVTRRRQLVIMRTAELNRRPLATAEVRKSIDRVVQLLDRQIEELEHDLDGTIRHMPQWREKDDLLQSVPGVGPGTSRTLLAALPELGTLNRRQIASLVGLAPFSRDSGQWRGSRSIWGGRAEVRATLYMAALAAVRFNPVLRTFYQRLRAAGKKAKVALTACMRKLLIILNALLRTQQPWQPKKA

SEQ ID NO: 267316 - protein, 345 aa, unidentified
MTIIGCDLHTRYQVVAWIDEETGEIKTRRLEHEKGDVKGFYSSLPRGAVVGIEATIPALWFERLLAECGHQLWVGHAAEIRASEVRKQKTDTRDAEHMLDLLRTNRFPRIWTPSVAERDLRQLLVHRMKLVRARTTVKNQLHALAISQGVCRKQKLWTVKGRAELENLHLLPWASRRRTELLAMLDQLDAAIEPLDEAVEQEAKARSEAVRLMTHPGVGPVVSLAFVLTLGPVERFANSRKVVSYLGLNPREHSSGGRQHLGSISKQGNSMMRWLLVEGAHRAVVYDPEMRRAYQRLKFRRVTGVAKVAMARRLAVRLYWMLRARIDYAQLFRTSGSPSSAVVSK

SEQ ID NO: 267317 - protein, 345 aa, unidentified
MEGEASAYQRYVGIDIASDTFTAAWRTQAGKPTLPFTAEQTSAGFAALQRRLAASGVAPAEALVVMEATGNYWVALAVTLHEAGYRVAVVNPRQAHHFAKAQLRRAKTDALDARDLAHLAAALRPAPWTPPPAVYHEVRQRLVARDGLLAMRTQARNQRHALLQWPVIVVGVRQHLDELIADLDRRVAALEAELAAVLKDGAWAESLACLTSAPGIGLVTAAWLLVGTLNFTLCAGPEALTAYAGLAPVPRESGRSIRGRPTIGHDGNGRLRTALYMATLSAARYNPAIKAFYDRLRAAGKPLKVARCAAARKLLHQAWALGAKQRRFDPVHHEHQRDSVPDLAA

SEQ ID NO: 267318 - protein, 343 aa, unidentified
MKHYAGLDVSVEETSVCILDETGRICREVKVTSHPEDLRRILQDPIWHFERIGLEAGQLSQWLFDALADAGLPVVCIETRHAKAFLKAQVNKSDRNDARGIAQMMRVNLFRPVHVKTLTSQKRRVLLTARKLLQEKAIAIENDIRGLLLNFGLKVGVVGAAKFEERIHELIRDMPDLAEIVERLLDARRRLREHFAALHRKLLALARGDAVCRRLMTIPGVGPVVSLAFVATIDTPARFRKSKAVGPVLGLTPVRSQSGNTDRVGRISLCGDGMMRTLLFEAAQTMLRQTTRWSWLKAWALRVAQRRGSRKAVVALARRLAVIMHRMWCDGTEFRWTREAPVA

SEQ ID NO: 267319 - protein, 334 aa, unidentified
MDIAKNVFQVHGIDATEKVVVRKQLRRGQLIKFFEALAPCLIGMEACATAHYWARELTKLGHDVRLMPAKDVKAYVKRNKNDAADAEAICEAVRRPTMRFVAVKSVEQQGRLMQHRVRDLLMRQRTQLINALRAHLAELGIAAAQGREGIKELLAIVAQDGDSRLPVDAHASLIVLAAQLQAVQTMIGSIEKRVVGQHRSNEESKRLETIPGVGVIGATAIAATVPDPKVFRSGRDFAAWIGLVPRQDSTGGKQKLGPISKQGDRYLRRILVVGACSVLRRARQQPEKYPWLTQLLARRPFKVVAVALANKMARIAWALLAKGGTYRAPRLTAA

SEQ ID NO: 267320 - protein, 432 aa, unidentified
MSKYINNPVFGIDVASEFSIVAILAPNGEIYRKSFRINHTLEGFKHLASEIEKVEKKFNMKAVTFMESTGVYHLSLFHFLSDNKFDVFTINPLITNSNKNFDIRKVKNDKKDALTIAKICKFQDIKLSSRFDTDLYALKSLCREYYKLTDTKSTYKKKLSNDLRLIFPGYTDIFSNITSKTSIQILKTYPMPKDILSANKDDLINILLNSKKGIMYAEDKYSKLISTSKSAQIIGIPSSNLFIKLISDINIIESFETQIKLILSEIQNLLSSGKIPENIVVNIELLQSIPGIGELTAITIISEIGDIRNFTKPKHLVAFFGLDPSVNESGKFKGNNNHISKRGTRIGRRALYAVALASIRCKRNGNATNSVLLDYYKNNMNGKSKKVGLVAIMHKLMKYIFSVLRSQKLYEIRNPKLHCKMYVENTTLVNVA

SEQ ID NO: 267321 - protein, 397 aa, unidentified
MTATHKPDCTVASAPVLYMALELSSGTWKLAFTVGLGQKPRLKTVTARSTVGLLFEIKAAKKRFGLSEDAPVLSCYEAGRDGFWLHRFLLAHGVQNQVVDSASIEVNRRQRRAKSDGLDAVKLVEMLIRWHNGERKVWKLVRVPSVAEEDQRQLHRELIELKAERTAVSNSIKGLLATLGLVVIVDETLPKQLENIRQWDGAKLPPSLHQRLLREFARWQLINRQIDDRERERSAKIRDDKTPQIQKVRRLMNLKGLGQNGAWLLVYEFFGWRQFKNRRELGSLAGLTPTPYDSGESRREQGISKAGNRRVRWMMMELAWGWLRYQPASELSRWYQRRFAQGNTRLRKVGIVALARKLLVALWKYVEGGEEPRGAVMVGWENKRGYKGVKARQKKAS

SEQ ID NO: 267322 - protein, 345 aa, unidentified
MPMVGGLDIHRRQITFDYLDTGTGQVCRGQISPANREHLRAWLARFADREDVAFAVEGCAGWRYVAEELAAAGITAHLAEPADTAFARGRKRHAKTDKTDARHLRMLLAEGRLPECWIPPARILECRALLELYNDLRRERTAWAQRIHAVLFHQGAPQLGEGALRTEKGVAGLRATAAGCLSPAGQLQVATALEVIDALEARLHTVRHQLTDAARHLAGAKALADRLYGVGPVTALAITCWLGGAGRFSSSRKAVRFAGLDITVSSSDRKGPPGKLSRQGPPVLRWAVYEAAKTHARTSAPDHRYYTAVKDRKNSKRACLSEARKILRQAHHILAELGDDALAAA

SEQ ID NO: 267323 - protein, 357 aa, unidentified
MTSCIGVDLHLRNATVCHQVDGSERSLHTLELHSAEWHAFWKAIPAGSDVFVEMSRTTWWFTRWVQEQGHHAHVVDPTRSRAMAAGRPKTDRCDARWLAEMGAKDVLHEVYVIEPRTEHLRELVRHRALWVRDQTRIKNRIHYQLAREQRRCPHRSVFTLKGLRWLKNQELPEPYARSIENHRVHFEFVHQELEQATEQLLAAETDGSALTLLLSIPGIGDLTARTLLAEIETIRRFPNPEKLISYAGLAPRVRQSSTMDRRGALTKRGSVWLRTALVESAQIAVRRPNQFQRIFRRVSFRRGRNVGVIAAARRLAEVIWHVWSKGVLYQEPARPESGESHNHELPAATASAPHTSE

SEQ ID NO: 267324 - protein, 340 aa, unidentified
MNATTYGLDIAKTVMQVYWVDGETGEIGQRTLKRAQLVPFFANRPAARVVIEACGSAHYWARTLGALGHEVRLVHARHVRPYVRGNKNDAADARAIWSAAHQPGLRWVPAKSEDQQSVLALHRVRAQYVKTRTQMVNGLRGLLYEFGVVLPGGRQAGLKAIAASRAQLDAALPAPMRELIDGQFGMLATIERRIQEIEAQLQALERQLESARRVRAIPGVGPLGATALAAVLGEDARGYRNAREFAACLGLVPRHTGTGGKVSVGRLSKRGDPYLRTLLMHGARAVIHHAKDKNPWLQQMLARRPLNVVVAALANKMARTAWALVAHGREYKVGGMARAA

SEQ ID NO: 267325 - protein, 361 aa, unidentified
MEKIREYVLKGKEVYVGLEDSKKSWKVCVRSGRLVVHETSMPAEYENLRNYFRNKFPECRIRVMYEAGFGGFELHDQLVGDGWQCVVTPPHMVVQEKCNAQKNDRNDSRRLAKNNENGDYRECHVPDRQRREDRQVSRLYGQLQKDITRVSNRIRKTMDFHGLARFFPGGAWGTRSYKAAEEKVASLELSESLRFAFTSLFAELKSLRSLQAEVLKQLRVLAHSERYRRSTELLTSVPGIGLLTAIRLALEWGDMGRFKTKAAFSAFLGLIPSDYSTGEQDHKGHITRQGNRYVRSWLVETAWLAIRHDPVLLEKYQRVVSHCGSGKKAIVAVARKLGLRLRAILLSGQPYQVGLIECAKA

SEQ ID NO: 267326 - protein, 472 aa, unidentified
MSKGSGNGTTRGDRRRNARRERLRRLLPRDGAVIGIDLAEDKQALAVVDHDVRVLARKTVKVKAFRLGEALDWAVAQATVKGFARVAVACEPTGARWLQVQRLCAERGLPLVCIQPLVSHIAREQQDYTTHKTDEADCVMIARLAVELHCYLPEQLDETWVHLRHLGRRRNQLITAATASVQRIRDFLSVAWPVVTETCAGPFESVTWLAAMQVVTSRCGAQPGKLAEPGLEAFTVLVRGAVPGWGGRRPSGRVCRAMFAALTDTEGAVVSHRRGLLRRCADELGDLQRTRAQLRAVEADMVAVLAELGLARLADIRGLTAVGAAAILAETGDPRRYDSSSSLVKHAGLSPSDNASGAFRGEAHISRRGRPGLRLTVWRAVWPLLIHNPVLAAKYQAMTQAADTAAAAAAAPAEAGSRQVSAAAAAARARRAKARVACAASLLRWIYSLVIHGTGWDPAVASGTASRPAQAA

SEQ ID NO: 267327 - protein, 336 aa, unidentified
METKFIHFAGVDVSKQKIDVCVIVNNQRSDILHNSFEQSSRGFSSLKKWLVQVTGKQTKQLLICVENTGLYDDALLYYLANNELPVSLENAANIKRSVRDNRGKTDKLDSRNIALYALKHHDELRLWERPRKQVAQLQQLLSERSRLVNALKMLRQAHGEKQAFSWGKAVQSKPYLSGIKGLEKDIKQIESDMWELIKSDKELLQMFMLIISIPAVGKITAYHFICYTNEFKEVKSGKQLASYCGVVPFEKSSGSSVKTKPRLSHQANKVLKTLLHLCAITAIKMKGAFAAYYKRKVEEGKNGLVAINGIRNKLALTIAAVIRNNEPYNENHIYQH

SEQ ID NO: 267328 - protein, 321 aa, unidentified
MEPATPEVFVGIDVSKARLDVAIGDEPPFAVDNDPAGHAALAGRLAPRRPRRVVMEATGGLEAAAAAALAAAGLPVMVVNPRQARDFAKAMGYLAKTDAIDAKALAHFAAAIKAEPRPLPDEAARGLDALLDRRRQLVGMRTMEENRKATARGRVLRDLEAHLRWLGEHIEEIDRELDERIRSSPAWRERDDLLRGIPGVGPVLSRTLLAGLPELGTISHRRAAALAGLAPLADDSGRRSGPRRIAGGRGQVRAVLYMAALSARRFNPALRALADRLEAAGKRPKVILVAVARKLLVIANAILKAGKPWDPEIAAKLAQNT

SEQ ID NO: 267329 - protein, 388 aa, unidentified
MEARTVNAVPPAAADHAAIRCLLAIELSKKSWLVAINTPLADKISRHTLPGCDWTGLLELIQRVRTRVARELGRPVEMISCYEAGYDGFWLHRLLEGQGVHNLVVDPASVQVDRRARRAKTDRIDAERLLRSLMAYLRGEPKVWSVVRVPSVAEEDDRRLHRERGRLIAERIQHVNRIKGLCAIHGIYDYQPMRPDRTRRLEQLRSGDGRALPPRLKAEIVRELQRMELVLRMLKEIDAERNAIASARMSAHTNAKKIQDLVKLKAIGPEIATVLTGEVLYRPFNNRRELASYVGLTPSHFQSGSTCRDQGISKAGNPKARTTMIELAWLWLRHQPDSAFSVWFRERVGNLTGRIRRITIVAMARKLLIALWRYLETGVLPTGAVLKV

SEQ ID NO: 267330 - protein, 429 aa, unidentified
MTRISAGVDVSKNRSTVCIIDQDGKVIMRPFLVWHSTEELDFLADTLKRLNGEVRVIMESTSIYQYPIALHLKEKGIFISIVNAYKVKKFANTDFIGGKTDKKDSRTIASYGISYWDKLMEWQIPKDTYFNLDLLNRTYMNAKKHRQIILQELQHYIDCAMPGMDKELHPLNLSTKKDFMLDFVEKFWHRDEIVNMTEAEFTEVFTAWAKKKGYRPVEGKAAKIYAIAKSCIPYYPANPTVKTILQCIVDKLSGVNRTLVTIVTQMIEEAKKLPEYQIVREMPGVGDPLAARFFGSAGDIRRFKNSKALVAYAGIDSPPDESGDFSSTHRHITKKGSKVFRDTGYEIMMALRAQKRTWEKVRKNPEVYDYMLRKEAEGKPRKVAKIAALNKFLRIVYARIKELYDNMALAERAKTKTRSKTRAKTKVTA

SEQ ID NO: 267331 - protein, 312 aa, unidentified
MITLSHAGIDVSKDRLDVAILPHEQAFSVSNDKAGWAELIETLRRFSLAAIGIEASGGYERGTLRALLATGFSVRLVNPFKLRQFAKACGILAKNDRLDARMIARFVATMPTRPAQRNKAVERMAELLTARRQLVEQKVAAENAARLFEDAVLQRLYRRRIARLSADIVLLDKRLAEIVTADAALAQRYRLLTSMPGVGPLLACTIIALLPELGQMSRKQVAALVGLAPYDFESGKLKGARCIWGGRAPIRRVLYMAALIGCRCNPALKVFHDRLATTGKRSKVVIVAVMRKIVTILNAMARDNAEWQRQTA

SEQ ID NO: 267332 - protein, 346 aa, unidentified
MLYAGLDLSRKRLDFCLLDQAGGTVETGAASPDADGLRRLAARLARFAEPVQAAIESMNGARFVHDQLELAGWDVEIADAVKVKGLAPLACRTDRIDAWVLAELARRDLVPTIWLPDPQVRAERERARFRLHLVRHRTSLKLRVHAVLLAHGKPCPVSDLFGVAGRELLKRLALPEPWAGTVAASLQLIDELDQQISGCETELRRLGADHRYVPLLTTVPGIAWVLGYTIAAEIGDINRFPSSRKLVGYTGLCPRVYQSGSSDRRGPLAKNGPRYLRWALIEASVHACTHPLYRDRYQRTKQRLGKQRGAKVAQVDLARRLTEAIWQMLTRTQPFAPAGAASPLAA

SEQ ID NO: 267333 - protein, 485 aa, unidentified
MRRNKQSTARKATKAPKATPSPSGRGWDQMNRKQRREMARKIQAQDLSLEVVHPDAAGIDIGNEAHYVAVPPARDSQPVRRFGCTTVELKEMAAWLKQCGIRTVAMQSTGVYWTPVYDILEEAGLEVYLVNARETKNLPCKKTDVQESQWLMKLHTYGLLRNSFRPPQEIRQLRTYWRQRNDLVQSAGRYIQRMQKVLTQMNVQLANVISDLSGATGQAIVKAILAGERDPQALAALRDVRVKASEEQIARSLEGNWQEDLLFVLQQEQDGYEFCQKQMAECDKRLEQYLQQRADRSAGADLPEETRKGRRRRKKGNAPQFDMREALFRMAGVDLTRIDGIDVMTAATILSEAGWDMSKWPNEHHFVSWLRLCPDNQISGGKVIGKGRLPTTNRLTQALKVAASSLLRSDSYLGAQFRRLRTRLGAPVAIKAMAAKLARLVYRMLRYGMQFVDKGAWYYEQKHRQRQISSLKRKAAELGFQLVAA

SEQ ID NO: 267334 - protein, 364 aa, unidentified
MDVHLRSTTVCALDAETGEAVTRRFRGNPWGEVAEWMSGFPGPSLAAYESGYLGFAPQRELSALGVDCVVAAVSKVPRSAADLSSKNDRNDAARMAKAILSHDVTPVWVPSPEIEGLRDLAAAHDAATARLAAAKQQLLAFLARRGYVYGGTTPAGNPRKYWTYGFLRWLDGIRPADDGGIRALAALRNEVEAADETREAVLAEYRAAVAAGPLSAEVEALQSIKGCGFVLAAAFASEVGDFSRFRSGRQVTAYFGLAPKQRSSADSVRLGGISGAGNALVRRLAVEGSWRYAQAGHQPKLMPKGSGVPLEIRMHGRKGSERLLRRREEMLERGMPQAKANAATAAELVRWLWALGMMCREAGE

SEQ ID NO: 267335 - protein, 318 aa, unidentified
MQIIGCDLHARQQTLAILDTATGEVVNKTLTHEGDSVREFYSTLPGPVRVGIEATGSMQWFLHLMEELGIDCQVGHPATIRAAEPRRQKHDQRDAELLLKLLVENRFPSIWQPSQELLDLRGLLLHRHQWVRLRTRIQNALQAIALANGLRRGSSLWSESGQRAIASLPLTTHTAQRRSELQAMYARFEAEIEQLNQQVLEQAGQRPTAGLLMTHPGVGPITALATDVFLGDAKRFRDGKALASYIGIIPREHSSGGRQRLGGLSKQGNPLLRFLWCEAAAHAVRRDPELRRFYRRKLVQKGLGKARVAAARKLGIRL

SEQ ID NO: 267336 - protein, 344 aa, unidentified
MSKFNLISIDLAKNVFQVGKFLHQKLQSNKAVSRKELLTILTTSPRCKVVMESCGGAHYWARKARSAGHEVVILDPRFVKAFRVGQKTDANDVIAIAAASFSPNVRPCKSLTQAQQSLQSIERMRALAEKQKRQLANQIRGLLLEFGIVIKQSECAFRQAIPEILEDSDNGLTAGLRQCIAQCYELFKAQSTLKETLNELLTGLVKQDEQCERLLALEGVGPITAVGLLISLSDTTHFTSGRNAAANVGVTPRQHSSGGKVRIGHIAKYRGEITLRSHLFLGARAVISQLKHREPKTEKEQWLKALVERRGVKCAAIALANKTVRTAYAMLKKGTSYEPMLLAN

SEQ ID NO: 267337 - protein, 314 aa, unidentified
MKPSDPTYYLGVDVSKSKLDLFDPRSGQYQCYPYTKPGLQRLFRQAHKLPGAFHIVCEPSGGYEKSLIKQSHELGVPVCVVNPRQIRDYARAKGQLAKTDAIDAKLLSDYGATFKPEPQPPASPVQEELSAAVRRKEALTRQLVREKNAMEKATDKFVRADIKASLTHIQKRVALCDKRIKELIASDEQLKAKSKRITAIKGLGIAAAATLIAEVPELGSITDKQAASLVGVAPLNRDSGKWRGQRTIHGGRRIARRALFMPALCSVTHNPILREFYRGLIARNKPHHLAMTAVMRKIVCLVNKTLSNPNFNPA

SEQ ID NO: 267338 - protein, 345 aa, unidentified
MEDMYYIGLDVHKKTISYCVKDGSGHIHAEGAIPATRLDLDIWMKTLPQPWTAAMEATIFTAWIYDHLLPHAVAVKVAHPLMLRAIAAAKKKNDRIDAHKIADCLRCDFLPECYMASTEIRERRRTLRYRNLLVRQAVQMKNKIAVLLTEAGVSYNKQKLHKVGYFRELLATNQDIDDGLRSLLRLCRETVVRLGKTESALVRSLQRDALLVERVERLMTIPAVGPIMALTWALEVGNVQRFSSIKKAISYCGLCGAENSSANIIKRTPLSKQRNKHLQTMLIEAAKMAPRNSPDLAMLYDREKQKGNANRATLAVARKLVAYLVAVDRRQKDFLIVERENRTAA

SEQ ID NO: 267339 - protein, 411 aa, unidentified
MNPVIGLDVAKGESQVQAFLDKKKPYKKSFKVAHTLEGLNSLLDFIREVEDISGGRPPIVLESTGHYHTPIVQYFEGRGYLLIIVNPLVSYRAKSSSLRKVKTDIVDATHLCELYYKEDLEPYKQRGIQLLNLRNLTRQHENITGMFVQTKLQFQAVLDQVFPEYCGVFGALYSNVSLLTLQAFPTSEEVLEAGEEKIANKIKELCKSRSQQWANSQAEKLMAAAVQNPFQKTLYHSLSLSLDMYINMLLEYKKHLSTLEDEIDALTKHIEECKIIRSIPGIGEKIAATIISEIGEIDRFNHPKKLVAFAGIDPSIFESGTFKGTLNRITKRGSSRLRQALFMAVKCAIRDCRKQKTTDEIIPRNKRLREFYEKKREEGKPFKVAVIACANKLLHWIYALLKSKSAFQDLA

SEQ ID NO: 267340 - protein, 316 aa, unidentified
MQQPTTLFVGLDVHKDSISVAHAEAQRTDPPHFVGAIGTRHSDIDKLVRRLQSKAAQLVFAYEAGPCGYVLHRYLTGKGLACQVVAPSLIPKRPGDKVKNDRRDAVELARLLRSGDLTPVYVPSIEDEAVRDLCRARDAARVTLKAAKLRLKSFLLRLGLNTTSDVPIGTRPTSATWPRSSARPPRSRSCSRNPFAPSTSRSNGSGASSKNFSISHRSGACGPLSRPCRHCGACSGSWPSPWSPSSATSPASTTPASSRAAFVGLIPSEHSSGEKRRQGSITKAGNTRARRALVEGAWAYRYPAKISPTSMLILKT

SEQ ID NO: 267341 - protein, 344 aa, unidentified
MALAAISILGVDLGKNVCSVVGLDSSGAVVMRRKMRRETLIGLAEKLPACVVGMEACCGAHHVGRLFAAHGHDVRLMSPEYVRPYVKAHKNDDRDAEGIAEAATRPTMRFVELKSQDQLDMQTLHRSRDRLVGERTALINQLRAILLERGWVAAQGKRKLERFLAVLMDEQGGAELSPRMILLVADARAQWAELDRRIAAFDAEFVRWAKENEEARRLTSIPGFGALVASALVAAVGRAESFDRGRDLAAWLGLVPRQFTTGGKPKLLGISKRGDKYLRRQLIHGARAALPYVAERDTPLGRWAKGLLGRAHRNVAVVAFANKLARIAWAVLRRQERFAATMAA

SEQ ID NO: 267342 - protein, 343 aa, unidentified
MGEVSTIGLDIAKSVFQVHGVDVDGAVVMRKRISRAKLLEFFASLPACLVGIEACPSAHYWSRRLQALGHTVRLLPPSYVKAYLKRSKNDANDAAAICEAVTRPSMRFVATKSEQQQSGLMLHRSRQLLVCQRTMLSNAIRGHMAELGIISAKGRNGTAKLLEIIADEQDDRIPAAARFSLAVLARQYATTRSEIVAIEKRIHAWHRSSEESRRLEEIPGVGPIVATALVAEVGDWKMFSSGRSLAAWIGLVPRQHSTGGKERLGSISKQGNRHLRWLLVAGAMAVIRYARQHGTKRLWLARLMGRRPIKVAAVALANKIARMAWAMMVRRERFKEPKLLPAA

SEQ ID NO: 267343 - protein, 344 aa, unidentified
MNTLYVGIDVSSKSNVVYLMLPNGDKHSNFSVANSHEGSTLLVKKIYSALTSHSLDTVLIGLEATSVYGDNLVYFLREDATLAPFNRKIHVLNPKQVKKFHDTYNDLPKNDYVDSFVIADCLRFGRINKEVYMGDYRYKALQNLTRARFFAVQNLVKEKQRFMNVLFKKYSTMTQEKVFSDAFSTTALAVYDEFESAEALANMDLHELTDFIIEKGKNRFPDPDAVAKAIQKAARSSYRLPKTVNDSVNQVLSISITSMKALESQIKEFDKAIKALMELLPNVLISIPGIGPVYSAGIMAEIGDINRFDNQASLAKYAGLAWKQHQSGGFEAEVTRLIPSGNRF

SEQ ID NO: 267344 - protein, 331 aa, unidentified
MGNVTTVGIDLAKNVFSLHGVDANGAVVLRKTVSRARLMELVAQQPVCLIGLEACSGAHEWARRFQALGHTVKLMAPRFVAPYRKNGKNDGNDAEAICEAVSRPSMRFVPIKTLEQQAVLCLHRVRQGFIEERTATINRLRGLLAEFGFVLPQKAAEVRRRATECLERLPAHAAGAIRDLREHLRVLDERVKEYERSIEAHARDHEAAKLAQQRLGIGPLTASAIVASVGDVHEFKNGRQFSAWLGLVPRQRSTGGKQRLGHITGRGDPYLRTLLVMGARSVLQRASSQSDPLSRWALAVRMRRGYHRACIAVAAKNARVVWAMLNQHASA

SEQ ID NO: 267345 - protein, 368 aa, unidentified
MNKQAIVHHEGAAALAAAATRISLPPAVIKLGLDIHTRTYVVVAQHDHAALRPPRRFGPAEFVPWVEGLLAQGHTVHVVYEACGFGFGLCRALQQAGAHCLVIAPRKLDEQRTGVKTDARDAATLCQRLSRYVDGNTRELAVIRVPSEEEEQQRHIHRQREALVRLRTRLQAQGRGLLVSHSQAAPPHWWRTQTWNRLGKVLPAWLVTRLEVLRPILATLDTQIAALSLELEAAAPPDLPRGLGKLTSVALSREVCDWRRFQNRRQVASYTGLCPGEHSSGNKRVQGSVTKHGNPRLRASLVELAWRLVRFQPTYPPVRTRLGVLAKGARATGAQRKKAIVAVARHLAVDLWRLHTGQGSAQQLGFQN

SEQ ID NO: 267346 - protein, 320 aa, unidentified
MSKSTNFIGIDISQKVFDVWSKEFGHKQFKNNQQGFENFALLLDDKSWCVMEFTASYYQHLAIFLYQNGVKVSIVNPLVIKRFIQMKLQHNKTDKSDAKMMVQYASEQKLVAWQPNPQYINECKDLHTTISLFFKQLTALKNKHHSLVSKGVKGKILTSIKRQVRQLEKEINLLETELEIRIKDNEPEMLTNISSIAGIGKKTAMMLIACTNGFKTFDNPNQISAFFGLAPVETTSGTSVRGKPRISKKGYPLMRNYLFMCSFTACKNNPQCKALYDRIVAKGKSKKLALIAVANKLVKQAFAIAKSGIPYNPEYKPVLN

SEQ ID NO: 267347 - protein, 349 aa, unidentified
MDRTTYGLDIAKNVMQLHWVDAETGEIGRKKLARAKLAAHFAELRPVRIVMEACGSAHHWARVFTGLGHQVELLPAVQVRPFVRSNKDDAADARAIWLAAQQGDIRRVPQKSVQQQGVLALHRTRSHWISVRTASVNSLRGLLYEFGVVLRGGRKAGLKALAEQRAAIDEQIPMPMRSLVDGQLQTLAQIAERIDALECEIAALQKQIKGAPELDQVPGIGVLGATALAATLGDAKAWRSGREFSASLGLVPAHAGTGGKVRVGHLSKRGDPYLRTLLIHGARSVIEHAKHKPKWLEQLLARRPKNVAVVALANKMARTAWAMVAHGRAYQRDWQSARPGSGAAQAATV

SEQ ID NO: 267348 - protein, 382 aa, unidentified
MEKAITGVRRFVGLDVHAETIAAAIAEKEQAARDVGTIPNREESIRKLAKKLTEGGAWAACYEAGPTGYALYWQLTKLGIPCVVIAPTLVPTKAGDRVKTDRRDAQRLASSFRAGELTPVWVPDAEHEALRDLVRAREAAKQDQLRARHRLGKYLLRHGKRPPQQMRAWTENYLQWIKGKVSFDQRSQQVTLEDYLNEVDHAGTRLVRLEKAIDEAVEQAPENMRELIRALQALRGVAKVGAVTIVAEVGTLTRFEHPRQLMGYSGAVSSENSSGGKIRRGAITKTGNAHLRRVIVEAAWSQRHKPVLSLAMRKRQEGVSAEVQELASKARHRLHHRYMHLLGKGKTKQEVVTAVAREMLGFIWAIGVCVERAQAHKGKDVA

SEQ ID NO: 267349 - protein, 684 aa, unidentified
MTMVGGFDVHRQQITFDYVDDDGLVRWGQIRPATLSTLRRWLSERCPDGDAEFALEGCTGWRYVSEELAAAGVRVHVGDPAEIAALRGRKKRAKTDRADARLLRTLLLQGRFPESWIPPAHVLEIGNLGRLYCTLMDERRAWQQRIHAQLFHQGCPPVKALLSARGREALASAPLSPAGRQYVDAALRRIDELTPEIDALRTQLVDFARRQAGCRALQRHYGIGWLCAAIMWAEIGDARRFTSSDQLVRDAGLDVTVHSSDAKRSPGHLSRQGSPDSAATHPRQPARRAPHQSSCHRTSSVDPDKAGRRHARLSSRAPHSRTGGSRWLELQRLSLVPPDREYAADPPRPQGRSSSLRCGRSTLTPTPLHRPMPGMGNEAKPQNNDQRIPTFTGVPDTDKDSSMPQTGTWTGDPVWLVDVLRAEGVNPIEYPGWRDRGHGDFKDIRGVMVHHTGSDSASAASIAQGRPDLAGPLSQLHIARDGTVTVVAVGVAWHAGVGMYPWLPTNMGNWHLIGIECANTGTSPTAPHRQNWPDAQYFAMVNCCAAINRRLAQTSARTIGHKEYAGRAQGKWDPGAIDMDILRRDIQDQIGRVAKPAPTPRPPLPVGEYADILLFRGSEGPQVAQLQRRLNEQGAGLVVDGIFGPNTEAAVREFQRRTRGLKVDGIVGPATAAAPRLKVGPGPE

SEQ ID NO: 267350 - protein, 317 aa, unidentified
MSSEPVFVGIDVGKDFVEVATCPPSVRCTLSNTPAGWRELVEALRGLPVALVVVEATGGYERAVAADLLEAGQQVVVVNPRQVRDFARGVGELAKTDRIDAAVLARFAQVVRPEARPAPTPEQTDLAELVTRRRQLTALLTQETNRLAMVRHPKVRRSVRTVIRTLEHEIAALDALISRHIQSDDQFRDKDRIVRSTPGVGPQTSAMLLAHLPELGRLNRQQVAALVGVAPWDRQSGHWTGRAHIGGGRKEIRSVLYMATLTAIRCNPVIRSFAQRLQQHGKAFKVVITACMRKLLVTLNTMVRNNTLWHPQLVKND

SEQ ID NO: 267351 - protein, 393 aa, unidentified
MTETYYIGVDIGKFSHWAAVMTNHGELKVDSFCFTNDKQGFNTFYQTVKPYLSHDHLIGMEDTGHYADNFRHFLLKKNLNVVMINPLSTDAFRKALLKSTKTDKEDARFICQVIMNPQLYRKVKLSDYDYHQIRELTRYHHNMKEANTRYKTQLQKDLDRVFPEFNSLFSAPYGPTYMRILSEFQSAVIISDTDIRTLRKVLKNTGRGRSVSFTAEELKRLAKSSVGQPNTILEMEIRHLVTLIADIDSCIAEVDKKIEEFSLDLNSPILSIPGISHFSGTSIISEIGDVNRFSDVNKLISFAGVNPIVYQSGNTNLKMTRLSKKGSKYLRKTLYQIITPVIQNNTVFMNYYNKKISQGKSPRCAQGHCVRKLLRIIYHILKTGNSFDPDLIR

SEQ ID NO: 267352 - protein, 412 aa, unidentified
MEVIYPTCGGVDVHKREVKACLITRDASGQRTKEVRTYRTMTQDLLALRDWLQDQGCPIVAIESTGVYWKPVFNLLEGDLEVLLVNPSHIKHVPGRKTDVKDCEWLAERLEHGLLKGSFVPPQAIRDLRDLTRYRRKLVEMRASEVNRLQKVLEDANIKLASVVSDVMGVSGRAMLAALLAGERDPKQLAELAKGRLRQKKEELVAALEGRFRPHHARLLAQMLAHIDFLEESIAECEAQIDEMCRPFAEDIERLDTEPGVDRRAAQDLVAEIGVDMSAFPSHKHLCSWAKICPGNNESGGKRKSGRIGKGNKWVRAILTECVHAAGRTKETYLSAQYARFARRKGKKHAAVVVAHSLLGGAYFILRDKVPYRELGPRHFDEINQAHAIRYHIRRLESLGLQVQIQQLPLAA

SEQ ID NO: 267353 - protein, 579 aa, unidentified
MSTLVSVPQTVCIGVGFDTSRYGHHVTFLREDLQPACPPCEFAESRQGYQRLLRLFANVQQGRAAVHFHIRIDAAGQYATNLEAFLHALPFPKTITVGEPARNHSYRQALFPKRKADPIESLCAARFALVEKPKPSPATAAPFHHLREIVQRLEGQCRQSTRLTNQLHNLLARVFPERGLIVADFQAHSTLQLLDRYPTPAQLARARLSSLTAIPYLSEDKAKKMQAAAADTVASFCGAAAEALVRQLVNQLRDSLAAQAKLHELMTVAYQALPQPNHISSIPGIGAATAAVLTAKMVHCDRFATPDHVVAYFGVFPEENASGIDRDGHAKPARHTHMSRKGNDLVGKYLWNAALAAIRFNPAVRALYQRLRARGTRGDVALGHCMRKLLHLAFAVWKTGKPFDPEHYPWQTGQAASPQAIEKAAGHNQGSSPGSPVVTAAASTVTGQPTPDKATVEPTPSPAAAQQTGGIDYAALRNQISMEQVLAQLGCLMRLKGSGVQRRGPCPIHGATDTRHRCFSVNLDKKVFHCFHPDCGAHGNVLDLWAAVRRLPLYEAARDLAATFQVPLVFLGGTGKRNP

SEQ ID NO: 267354 - protein, 549 aa, unidentified
MPDVVQDQETRTRHERACSGSVHVQRQHAVMLGPGDRDGAWRRIERRELLLGVEQVDACLAAEHVVGDRDQVFSRRALPAHGDVLQRIAARGRSAKQLRHQRPGAADLACSTMKHLAIVDPRAAFVDVGSEHMHVSVAGDEPVVFGTVTSQLHALRDWLKSQGVRSVAMEATGVYWLPLFGVLEAAGFDVRMVNGRQTRNLPGRKTDMQDCQWGATLHAHGLLHAGFVPPADIRRLQDYLRLRADHVASAATHVQHMQKALERMNIKLHDVISSLAGLSGLAVIRAIVAGERSPEALLARCDQQIRRAKAEQVKESLRGTWGAEHLFALRQALQSWEHYQRQILECDREIEATLPPHDPDTTPLARPKAVKRAGVNSPDIPKLREILAQMCGGRDLTQLPAHTHYGVLQLIGEVGTDLTKWPTEKHFTAWTGLAPGSHDSGKRKGRVKRGRNRAGRLFCMMAQCLARSKDIALGGFYRRMCARRGGLVATMALARKLAAWFWRVMVKGDDFVEQGIAHYEAQVLQTKQRALKRLAKELGQQLVPVVETP

SEQ ID NO: 267355 - protein, 347 aa, unidentified
MNFYTKQHLFYCGIDLHAKEMFLCIIDQKGDVLLHRNMPNDSELFLKLIKPFRSDIVVCCECVFCWYWLADLCHDNSIPFVLGHALYMKAIHGGKAKNDRIDSLKIARLLRSNMIPQAYVYPKKMRATRDLMRRRSHFVRERADLLAHIQITNYQYNLPSFEKKINSKGKRLNLVNHFPDTSVQKSMEANSAVLDQLDQTIRKIELFIESQVRYHDIHSYRLLRTVPGIGQVLAFSILYEIDRIERFPRVQEFLSYSRLVKCAKESAGKRYGSSGCKIGNVHLKWAFSEAAILFLKKNEPAKKWLIKKQKKHGKAKALTILAAKIARCVYQMLRTQRRFDSVIFFNN

SEQ ID NO: 267356 - protein, 334 aa, unidentified
MENIALIGIDLGKNSFHIHCQDHRGKAVYRKKFTRPKLIEFLATCPATTIAMEACGGSHFMARKLAELGHFPKLISPQFVRPFVKSNKNDFVDAEAICEAASRPSMRFVQPRTESQQAMRALHRVRESLVQDKVKTTNQMHAFLLEFGISVPRGAAVISRLSTILEDNSLPLYLSQLLLKLQQHYHYLVEQIKDLESQLKRKLDEDEVGQRLLSIPCVGTLTASTISTEIGDGKQYASSRDFAAATGLVPRQYSTGGRTTLLGISKRGNKKIRTLLVQCARVFIQKLEHQSGKLADWVRELLCRKSNFVVTCALANKLARIAWALTARQQTYVA

SEQ ID NO: 267357 - protein, 402 aa, unidentified
MNCVGIDVSKGKSMIAVMRPFGEVVVSPFEVRHTANELSELAGLLKSLDGETRVVMESTGNYHAPVAWLLHDAGLYVSVVNAMLVHDYGNNSLRRAKTDKKDAVKLANYGLDHWLTLPRYVPEEDARLMLKTCYRQYQQYSKVRTMLKNNLISLLDTAFPDANRLFTSPPRADGSEKWVDFVAAFWHCECVCGLSKKAFTTKYQKWCRKHGYNFSEDKALDIYVSACGRFGVMPKTDTAKLLVEQAISQLQTTSSALAALKQEMQSLAASLPEYPVVMGMFGVGPTLGPQLLAEIGDVRRFHSKKALVAFAGIDAPPYQSGQIDVRSRSISKRGSASLRRTLFLVMSVILQCAPIDEPVYQFLDKKRAEGKPYFVYMTAAQNKFLRIYYASVKAYLDSLEHD

SEQ ID NO: 267358 - protein, 346 aa, unidentified
MTKVIGMDLGDKRHVVVVFDETGDEVEVAKITNTSRQVQRYFEGHPGAVVVMEAGTHSAWITRLLESMDHEVHVGNPRKLRAIWDTDDKSDERDARVLGLMYRLEPRLLHPVFHRSERAQADLELIKAREQLVGCRSKLINHVRGVVKSMGERIPKCSTQSFHRRAVEHMPSALAEALGSVVAMIEKLTEQIDDQDKLIKAISESQYSETQWLRQVQGVGPVTALAYVLTLEHPSRLSKSRSAGPLLGLTPKRDQSGDTDKQLRITKAGNSHLRRLLVNCAHYIMGPLASDSDLRRYGERIAARGGKNAKKRAVVAVARKLAVLLHRLWVDQSEYIPLRSARKEAA

SEQ ID NO: 267359 - protein, 461 aa, unidentified
MDETSKGSMEQDDVEGFPVLRTNVAGIDLGSQNHWVCAQTVDGQGREVKEFGATTPELEKMAAWLQERKVVSVAMESTGIYWIPPQEVLERHGLEVVLVDARELARVPGRRKTDRLDCKWIQRLHSCGLLRGSFRPIEQINMLRTLVREKGTLVAERADWIRRMQKSLDQMNVRVHRAVTDIDGKTGMSIIRAIIAGERDADALAKLRDPRCRLSEEQIAEQWSGHWREDHLFSLAQALKMHDAIEERMQAYEKEILRKLAEMEREECRGQQAPKLKNRNKAKLIQQRGEEPVRQALYRMSGVDLTGIDAIGVGAVQAVLTEYGPDLSSFPNEKQFVSHLTLAPKKAITGGKPVKKKRKRGSASTRVAEALRMAATSMRHSQTALGAYYRQIARRIGADVAVFATARKLATLIFRMLRWGQPYVDEGVEAYEKRYREARLRRLTASAADLGYELILKPAKA

SEQ ID NO: 267360 - protein, 339 aa, unidentified
MQVYAGFDLHANNNYLGAVDENGKKIFKKKLPNEPETILNALDPLRQELVGIVVESTFNWYWLVDLLMDEGYQVHLANPSAIQKYKGLKHSNDVHDAFWLAEMLRLGILPTGYIYPKEERAVRDLLRKRGHLVKLRTSLSLSLKNIVARSYGQSVKQSEIIQLKRDLIAPLFEDNEDLALAGKMSKEVIDCLTNRINHIERFVENKLGLRDSYQYLTTMPGVGLILGLTIMLETGDINRFSNVGNYSSYCRKVPSQWTSNGKIKGKGNKKNGNKYLAWAFSEAAEHARRYSPEVQAYYNRKFQRTNRMVAHTALAHKYTRAAYYIMKDHVPFDPKRLFA

SEQ ID NO: 267361 - protein, 340 aa, unidentified
MPLYVGLDLHSNNNFLAVMNKQGKRVDHKKLPNDPELILEVLRSHRAKIGGVVVESTYNWYWLVDALMEAGYPVHLANPSAIQQYSGLKHADDQHDAFWLAEMLRLGILPEGFIYPKEERPIRDLLRKRRHLVKLRTSLIISLQNIISRNCGVQFKVNEVKRLKEDRVSPLLEGNEDLALAGQASKETIDYLTRQIRRIEATIVKRIELRESYRYLLTLWGVGKILALTIMLETGPIGRFAKVGNYVSYCRKVPSQWTTNEKAKGKGNKKNGNKYLAWAFSEAAEFARRHHAEARAYYNRKMQKTNFMVAHSALAHKLARAAYYIMKDQVPFMSEKLFGR

SEQ ID NO: 267362 - protein, 339 aa, unidentified
MDHVAIDLGSRKSQICVRSADGQIIEEKRWDTAELKGYLAKRPKSRVIVETCAEAFGVADAARELGHETRVVPATMVKTLGVGARRTKTDQRDARVLSEVSCRIDLPTVHVPKAESRERKTMCGMRDALVGARTKVINTVRGWLRGQGKRLAKGSRATFTERVRAVCDSQAPSYVERQLQVIEALTIQIVEADEEVECWAEADETCTRLTTVPGVGPLTALRFVAALDDVKRFENAHQVESYLGLVPGESSSSDRQQRLSITKAGPSALRWVLVQAAWALRTRCRKAEAIPLQLWAERIEQRRGKRTATIALARKLAGLLYAIWRDGTVYDGSRGAKMI

SEQ ID NO: 267363 - protein, 346 aa, unidentified
MILIGCDFHPSWQQVCWLNMVSGETNNEKLVHASGDAEKFYRRLTVPVRVGIEATGNCQWFLELLGKLGHEVWVGDAAKIRACDPRQQKHDPRDARLLLQLLVENRFPRIWTPSSEEKDLRQLLIHRYKLVRMRVQVKNELQHLAMNKGITKGRRLWSAAGEKLLCELPLAPWASRRREDLLRLRSMLNEQIAALDEAVEKVAEQNDRARLLMTQPGVGPVTSMAFVLTMGDVSRFARGKQVASYLGLIPREYSSGGHQRFGSISKQGNRFLRMLLVEAAQCVVRYDAGFRNEYLHRCHTKPRGVAKVAAARKLAVRLYWMLRTNTAYPEIARVGSSSRVPLGGAS

SEQ ID NO: 267364 - protein, 348 aa, unidentified
MLHAGLDLSRRKLDVCLLSQDAEIVEEFGAPPDADGLRGLARRVLAHREPVRGVIESMTGARFVHDQLKELGWDVLIADAAKVKGLAPLACKTDKIDARVLALLSQRDLVPEIWLPDPTVRRERELARFRLHLVKHRSMLKHRVHATMITCGHPCPVSDLFGVAGRELLDRLEIPQPWRATVDASLRLMDDLDVQIGQINKQLRALSPEHRYMPLLMTVPGIGFVLAYTIAAEIGDITRFSAPQKLVGYTGLCPRVNQSGDRDRRGPLTKQGPKYLRWAMLEATMHALRHEAYRERYQRTKRRLGKQRGAKVAQIDIARKLTEAIWHMLTRNEPFTPAAGGSTFRLAA

SEQ ID NO: 267365 - protein, 354 aa, unidentified
MKYFAGMDVSLEETAICVVDETGQMIKEARTTSEPDALHALLASFNLPFERVGLEACSLTAWLHGELTSAGWPAICIESRHAKAAMGAMPNKTDRNDARAIAQIMRTGWFKAVHVKTPTCRSWRSLLVARRAVLNQMRTIENVVRAILRETGLKLGTPARKDFIVRAREFVAGEKGLAMMIDPLLEILATMLREFTRLTKQVLVIVRDEPVCRRLMSTPGVGPMTALAFRATIDQPERFKKSRDVGAHLGLTPRRYQSGETDIQGRISRCGDELARTALYEAAHSLLIRSKKWSALRAWGMKIAKRRGMARARVAVARKLATILHRMWVDNTEFRFGREQAANPTIKAITVVAA

SEQ ID NO: 267366 - protein, 353 aa, unidentified
MSQKLNAAIAVIGIDIGKNSFHIVGHDHRGAIVLRQKWSRGQVEARLANLPPCLIGMEACVGAHHLSRKLQMLGHDARLMPAKYVRPYSKGQKNDFRDAEAIAEAVQRPTMKFVATKTADQLDLQALHRVRDRLVGQRTGVINQIRAFLLERGIAVRQGLRSLRSELPGILATRTDVLSPRMLRIIEGLAGDWRRLDERIEGLSSEIETLARQDKACERLMTVPGIGPIISSAMVAAIGTGDVFSKGRDFGAWLGLVPKQISTGDRTILGKISRRGNRYLRSLFVQAAWVVLVKIGPKHWDRYGLKPWIEAAKKRLHHNVLAIALANKLARIAWSVLAHGRTFEAIRIDEAAA

SEQ ID NO: 267367 - protein, 326 aa, unidentified
MWLQYSTTTVVSWVWNHSRRQRPGSAACMTGSRLMARSTRVGVEGTGSYGAGIKRFLQRHDVIVIEVDRPNRQDRRRNGKSDELDAIEAARAALSRRAEGVAKTGDGDVEAIRALLVARRSARDVRIKYLNQIRHLGFTAPETIREQFRDVSRERLAKTAAALRPNPKSDTVVYATKLAIQTLGRRVVALDADRARLDELLEQLVRRTAPTLREVYGVGTYTAAVLLVAAGDNPERLKSEAAFAHMCGVAPLKASTGKSKRMKVNPGGNRQANHALWRIVLTRMGNDERTRKYVARRTADGRPTREIMRILKRYVAREVYPHLINR

SEQ ID NO: 267368 - protein, 400 aa, unidentified
MKQSNATQPAIVERTVAQRISAASSVHAAYIGLDVHKASISVAIAEAGRQAPEFRGEIPNEPAAIDKLVRQLSQRFDGQPLLFSYEAGPCGYGVYHQIQASGHDCEVVAPTLIPQRAGDRIKTDRRDAKMLARLSRSGELTPVWVPTPEQEAIRDLTRAREDMKAAELRARQRLNAFLLRHSKVYPGKSKWIPAHFRWLETVRFDTPVQQVVLEEYVDNVKDAQRRVVGLEKQMRAVLPNWSLAPVVEAVQAMRGVSLITAMTVLAELGDISRFDSPRQLMAYLGLVPSEHSSGGSRRQGGITKTGNGHVRRVLVEAAWSYRFPARKTRIIEQRAEKTSPTVQAIAWEAQKRLCGRYRRLVATGKVKQQVTTAVAREMAGFLWAIACEAMGKPHGSRATA

SEQ ID NO: 267369 - protein, 345 aa, unidentified
MTEAYDGRQVVGMDLHRRRSVLVRMTEDGRKLETVRIANSPAALRTVIARAGEKPRVVIEATYGWYWAVDVLEAAGAEVHLAHPLGVKAFSYRRVKNDERDCADLADLLRMGKLPEAWIAPPEVRGLREVTRYRHKLVGQRTSCKDQVHAVLAKAGIPVTRSDIFGRGGGIWLDGLPLPQPYAGKVASLRALITVLDGEIARLEEQAAAMLAGDPGYAAIRQLPGIGPVLGAVIAAEIGDITRFRKPGQLCCWAGLTPRHYESDTRVIRGHVSKQGSRMLRWALVEAIQRQPAGTKPRLARDAIIARRGDQARGIAKTAAARILLTQVFYGMRDGRVRRAISQAA

SEQ ID NO: 267370 - protein, 385 aa, unidentified
MYQLSGSTQAALDYNSTIIGALELSEKKWVLAVQLPGVSRHSRHVLEACGDGLASFVERLKARCAAAGRKIARVILTHEAGRDGFWLARFLARRGIEVQVIQPSSLPVDRRARRAKTDIIDVEMLLRTLMAWLRGEPRVCSMVPIPSEADEEARRAYREREDLTGERRSIVNKIDGILATLGVKGYKALRRDRREQLTALRQPDGDPIPQKAKARIERLLDRLDLVLKLIEQVESARDAVLKKDTPADEAERMIRSLTNLRSVGPDFATLLVREAFVRQFRNRRALGGYVGLGGTPFSSGGSEREQGIGKDGNRRVRAAMVELAWTWLRWQPDSALSVWFRARVGAMGGRIKKIMIVALARKLLVALWRYVKDGVIPDGARMKAA

SEQ ID NO: 267371 - protein, 335 aa, unidentified
MKLFPFILGVDVSKLTLDVCLLESASHQIYCQTCIDNTPKGVRSLLRLLKTHHIQTQDCMVCFESTGVYSIPLSVYCEQNHWNYCEVAALEIKRASGIKRAKTDTIDAKDIAFYALRNTDKLILSQRAETTIQQLKLLSTERGKLIKAIMLFESTCEDYDFLPKDVSKVVKQTNQRTLCMLKKNLCSIETSMKTLLEENERLQKQSELLQTIPGIGEATAQYMIITTKGFTSFSNSRKFACYSGIAPFEHSSGSSIRGKTRVSPLANKKMKALLHMASLSAIRHDPELRLYYQRKKAEGKHSMLVLNNVKFKLVQRAFAVIKRESPYVVACTFAA

SEQ ID NO: 267372 - protein, 414 aa, unidentified
MSNRTPAYAVTVGIDWADLKHDVFERHPDGSLHHQQISSSPEAITDWLFALRSVSAEGRVAVAVEQRRGPLFHCLSQCLEWMDLYPINPQTLARYRQAFYTSRAKDDPIDSQLLEDLLRSHPDRLRIYQPAPELERKLELFCQQRRKIVGLAVKLENQLCSTLKEYYPVAIDLCAPAALRTSMTLDFLQRWPTFGSLKKARPETLRSFYYAHNSRSESLIKARLEKFAAALPITEDSAVIEPLAFVTKMLVTELRTITRTIDQLDERIAELFRQHPDHQLFESFPGAGAQLAPRLLCAFGADRSRWSDPSQIQKTSGIAPVLERSGKSCWVHRRLFRPKFLCQTFHEFAGESIPRSEWAKTFYQSQRQKGKSHHSAVRILAFKWIRVIFRCWKSHTPYNETFYLDALKKRHKDT

SEQ ID NO: 267373 - protein, 347 aa, unidentified
MVIVDSPRLIVGGVDTHRDVNVAAVVDMNGGVLGIQSFPTTGEGHKLLASWMVGFGTIERVGIEGTGVYGAGIARHFARASVMVIEVDRPNRQTRRQRGKSDQIDAVEAARGALSGRCEAIAKSGDGHAEALRALLVAKRSARSTRIRTIVQLRYLMFTAPDELRARLGGLSAAQLVNEAAKLRPRPGGDVVLRGVKTTAVILARRVQALDAELAVIDAEIEPLVKAAAPELLNVFGVSVDTAAVLLVTAGDNTERITTEAKWAMLCGVAPVPATSGLRDGRYRLNHAGDRQANNAIWRIVITRLGQREPRTVAYMERRLEQGQSKRAIVRCLKRYVAREVFQALPR

SEQ ID NO: 267374 - protein, 411 aa, unidentified
MIKVAVRVPGEKRGTRKTDVLEYRTFYGVLQAMARDLRKRGVTHVVMEASGVYTEPVYYALTELDFTEVLVVNPAHVKALKGHKTDAKDAVRLLDLYECGAVMRGSYIPSPDLREVRDLSRYRMKTVQARTSEIQRLQKTLESAGIKLDSVVSDITGDSSTAMIKALISGERRGQVMADLAIGRMRTAGKLADLPVALAGRFTGHHALMCRLHLDRISMFDTAVKDLDDTISPLVARHAREEGLLRTIPGFGEVVTAGWPVAIGPAPHQHFGTAERLASWVTLCPGNYISARKSRSGRTGDGGSYIKPLLVQAAWAAIRAPGRLQARFHKLVRRFGGPKNKGARKKAIIAIAHTLLKIAYAILRTGTPFQEPGADFYTRRASPQAREDYLMRQLQKLRPGCVITITPAEAA

SEQ ID NO: 267375 - protein, 381 aa, unidentified
MGDHIAAFVGLDTSKLRNAVAIAEEGRTGEIRFFGEIDNTAAATAKLVKKLAAKYERLAFCYEAGPTGYGLYRQITDLGQECMVVAPSLIPKKPGERVKTNRRDALGLARQLRAGELTAVWVPDTRHEAMRELTRARGAAVEDVRQKGQQVSAFLLRLGRHYGAGKRTWTKAHMNWLASQTFDHPEQRIAFEELLLAVRQAQERVGRLEEAIRLAVPEWSLAEVVVALMAMRGIDLITATAFLAEIGDLSRFRTPRQLMAYLGLVPSEESTGDTIVRGPITKAGNRRARRLLIESAWAYRHPPRIGKDKQAKVAAAPRAVREIAWKAQHRLYGRYRALTRRGKLKTVAITAVARELAAFIWAVGREIASTGGAAAQQGLQG

SEQ ID NO: 267376 - protein, 423 aa, unidentified
MNDSSVTTCIPPVPTSLPLPEAWVGFDWGDRRHAFAIQDCSGQKWIGSLDHSPEHLHHWLKELGQKYRSVFLAIEGTPAPVMAVMVQYPWLTLYPINPASSDRFRKAFAPSGAKDDLPDAQVLLDMVRSHADKFRPWEAPDSQTYKLDNLVQARRAMVDRRTKTLQRLTTLLKSYYPQALCLLTDLNTAMALEFLRRWPDLLSLKAARPSTIRAFYYKHNVRSETLVQQRLHAISQALALTTDEAFVSVRVMQVQELVDELAVLQKHIPKFDEAIERTFRQHPEAHLFRELPGAGKQMAPRLCVAFGTDRQRFASAATLQKHAGVAPVVEKSGQQCWVHWRWNAPRFLRQTLVEWAGLSIQWSAWAKRYYHHMAQKKKKHAVILRALAFKWLRILWKCWQTNTPYNEERYLQTLARRNSHYAS

SEQ ID NO: 267377 - protein, 322 aa, unidentified
MFLGLDVSKLNFDAALLGGPDARPRHKAFPNTAAGFERLQEWIGADQVYACLEATGTYGEALARSLHAGGHTVSVVNPARIKAFGQSQMSRAKTDKADAALIARFCALHRPEAWTPPAPEMSELQSWVRRLESLHEMRQMENNRLKAGPAASVQVSFGEHIAFLDAEIQKTEQRIHDHISQNPSLKGQRDLLVSIPGIADATAAALLAELLDVAQFAGARQVAAFAGLVPRIRQSGTSVRGRACLSKMGSWRLRKALFYPAMVALRFNPVLQALNARLLAAGKNKKLIVGAAMRKLLHLAFGVLKSGKPFDATIALATATKA

SEQ ID NO: 267378 - protein, 429 aa, unidentified
MSYRIAGIDVHKKMLAVVVSDVEIESEYQFERRMFSSNPEQLRSLAAWLVEQKAEEIVMESTALYWKPVWETLERYWKPLCEKREGARRRSGTLHLAQALSNRGRRGRKRDFVDAERLVKRLVARELTLSFVPDAEQRLWRTVTRKKYQLRRDLVRLNNQLESLLEEAHIKLSSLVSDLLGVSARRMLKALADGETNPAALAALAHERLRATPEQLCDALGACTELKPVYRRLLKMTLEHLQILEQQIGQLDQELATLLHPHQDAVQRLAEVPGFAVDSAQQIIAEVGPAAATFPSEKCLSSWVGACPGEEESAGVNYSHRSPKGNRHMRRLLNQTANAAVKAKGTIFEIIYRRCVPRLGHNQAIGVIAHRQCRLIWLILHQGTRYEERGPAVTKRSRYQRTWRMIRQLRNLGYRIELPNPQASQAQAQ

SEQ ID NO: 267379 - protein, 487 aa, unidentified
MKKSQKLRRKEVENLLRKQKIRSVEEIEAYKLSVCHPASAGIDLGSRENYVAMNPSIAAEMDLPIVHTFGTTTSQHEACRDLLLACGVKDVCMESTGIYWINLHYVLTQAGIRVSLVNPKMFRMVPGRKTDVLDCQWLQTLHLYGLVRGSFIPDEQTRQLRTYMRLREKLILDRGRYVQRMQKAMVEMNLMLVNVVDDVTGKTGMAIIEAILAGERDPKVLASKRDGHCKHSQLEIEEAMKGIYKEDQLVALSINHAVWKDLQKQIDRLDVEMGKLLQTFSSTPQMEEAPAQTEEQPDADKKQDDKKKRKTRPSKNDVKAGIDVEKELVRICGVDLTSLTGFQANAILQVIAEVGTDMSKFPTKKDFTSYLGFAPHNKITGGHIISSKTDRKKSHAAQAFKKVIPAISKGKSSLSAFYHRIAGKSGTAIAITATCRKLAERFYDSITKGQQYIEYGEESYKQAIKERELKYLQKLAKKHHMELKVAI

SEQ ID NO: 267380 - protein, 397 aa, unidentified
MSQVVGIDVGAYKHAAAVCRSGEPKADKKVFRYAATRPGFNELDLWLERQGQVDKVVMESSGHYWWPLASHLHRRGFPVAVVNPLEAKYFAKSRLQRSKSDPADARTLAALGMAEQLRTREPLLGAEVKEAARFCMRLVRDQANVCQRLTRLIEIGFPELKEAFEDPTCDTALAILRQAPTARTAVRRRLATLADAIRPGGRRRLGETRARRIQELAQETIAPPEMDEQMAFQVGLLIQQYDLLAKQIELAEDRVASLLDSGLALRLQTIPGVGAATAATLIAEIGDIWRFEDFDQLAAYAGTHPKEQSSGRHGEKAETSWRMAKTGNSYLRSALYRMAVVGIQHNPIIKAHYGRKRQQGKAPMNAIGHCMAKSLAIVWGVWRSGQSFDPNKTGPRP

SEQ ID NO: 267381 - protein, 312 aa, unidentified
MAAEVFVGIDVARASLEIATRPSGDRWQVGNDTTGISALVAQLRAVKPVLIVLEATGGLEMAVLAALGSVGLPVVAVNPRQVRDFAKAVGKLAKTDALDAQVLAHFAEAVRPVVRPLPDAATQELSALVTRRRQLVEMLTAEENRRKTALSAIRGDIQEHIAWLRKRLHGVDRELSQAIRSSSLWREQEDVLRSVPGIGPVVSATLLADLPELGTLGRKQIAALVGLAPLNRDSGTLRGKRTIWGGRATVRAALYMGALVGSRYNPVLRAVYTRLVAAGKTKKLALTACMHKLLTILNAMLKYRTTWAPATP

SEQ ID NO: 267382 - protein, 486 aa, unidentified
MHLRITNIRPEHSMFPALVSNLQVRLSSLTNTQGSPSNRLSILASQNSGMHVRICNLPLSEVIMKPQSNPSFTACVGIDWADKKHDFCLQAAGSDQRVFGTIDHSPESIMQWLCSLHERFGGPIAICLELAKGPLVYVLQRYDFIVIFPVHPSTLAKYRDAFVPSHAKDDPTDAEMALDIMLRHPDKLQPLKLQSVAMRTLTALVEERRDLIDSVVGLTNRLTSNLKQYYPQALDWFEHRDTLIFCDFLSHWPTLKHVKRARRSTLESFFREHKANRTYLVEERIQGIRAATALTEDESVIRPNQMAVQAMVEQLRVLLQAIGRFDAEIDAVGKAMPDYGLFAALPGAGHILAPRLLVAFGEDRDRYTNAAQIQSYSGVAPVVECSGNKCWVHWRIACPTFLRQTFVEWAGSTIPRSYWAEAYYRQQRAKGCSHRVAVRALAFKWIRIIYRCWKTRTPYDESVYLKSLKRRGSPLLASVAEAAKMI

SEQ ID NO: 267383 - protein, 340 aa, unidentified
MDEYAGRQYVGVDLHRRHSVIVRMTPAGDRLGAAVRIDNDPFTLAQLVASWGESPEVVLEATYGWYWAADVLAEAGAVVHLAHPLGVKGFAYRRVKNDERDAGDLADLLRMGRLPEAWIAPPATRELRELVRHRAKLVAIRSGLKAQVHAVLAKQGVRVTASDVFGAGGQRLLDELRLDAPYAARVDSLRRLIDAFTFEIDVLAQRTAADLHDHRGYQAIQAIDGVGPVLAAVFVAEIGDVTGFARPQQLCSWAGMTPRHREPDTKVHRGRITKQGSHLVRWAAVEAVQRLHDGPLGTTRARLAEHRGAHIAKVAAARKLLTLVYWGLRDGHIRCLAPAA

SEQ ID NO: 267384 - protein, 345 aa, unidentified
MFTEFVALDAHKRYSLLEREKIADFTTSQKRIEHVKGNISAALQGITPGTPVALESVGNWYWMVDEIERAGLTPRLVHPRKAKLMMGMINKTDKLDVHGLNLLQRNGTLPTVWIAPGSLRDIRELTRGRMVLVVQRTKLKNRVHAIFAKYGVSLDEWSDAFGVNAQIAMKELIGTLPEHAAFMIKMLLPNIESLNQQIEQLEKRLQSVLKETPAMRLLQTLPSFGKILSAVVILEIGDIHRFASAPRLASYSGTTPTVKSSGGKTRFGSLRPDVNRYLKWAFMEAANLVSLHQRHFPQRHVTLLYQRIRARKGHPKAIGAVARHLAEATFYVLSKQQPYQDPVLK

SEQ ID NO: 267385 - protein, 315 aa, unidentified
MAHLVAAGIDAGQKHLDVGFAPSGKAFRVPNTPAGIAKIVERLAALEVRRVVLEAIGPYAQRLVDTLACAGFEVGIVNPRRIKAYRDAEGGRAKTDRLDAGLIARFALKMIDAVRPLPSPTQNRLKALSLRRRQLVEMIAMEKVRLKQALEPLLVDSHRAAIADLGALLARVEAELASDLAADPRRARTLAILTSIPGVGTRIATLLVTDLPELGQTDRKAIASLAGLAPHVSQSGNAPPRAMIAGGRPCVRAAFYMAALVAARHNPDLRPEYEAMRRAGKPAKVALVAIARKLVVLANALVRANAMYQNRSADT

SEQ ID NO: 267386 - protein, 457 aa, unidentified
MTPHAGKRFRTSPPGDDLAVQHPQAAGIDVHAAVHFVAVPAEDVPPGFVNPEPRLPAGVRKFGTNTGDLEALADWLTACRVTTVAMESTGVFWIPLFDLLASRGFHVILVDPRQTAHAPGRPKSDVLDCQWIRRLHSYGLLTGAFRPADEIVRWRGFQRQREMLIRYAAQHIQHMQKVLEEMNVKLTEVVSDIVGQTGMKILRDIVRGVRDPVKLAKHRHELCKATKEQIAAALCGNWRPELLFALRQALKLYDVYQKQLQECEGRIEECLRAMEDKSKGAPLPPPPRKRKSQKNEVRFGARVLLFKMAGVDLTQIEGISATTALVILSELGVDLSAFPHEKNFVSWLGLCPQHRGSGGKIFKRRTRRGANRVARALRMAAQGCHHAKNALGAFYRRIQARCGGAKAVVATARKLAERVYRMLRYGQEYVRQSQEAYQEAYQLRLVKSLAKKAASLG

SEQ ID NO: 267387 - protein, 361 aa, unidentified
MKRALKDNQEAFAGQEFYIGIDVHQKQWTISIQRNQLPLAKPLTIDPSARSLSSYLKRQYPGSKYHAVYEAGYSGFWPARDLLTHEIDTIVVNPADIPTMHKERSTKTDSVDSRKLARSLENKELRAIYIPERKAEEYRLLNRYRSQLVRDETRIKNRIKAILAEFNYRVPVDLEGNRWSGAYLRWLQTITFETPYAQIAYNERLEHLAESRKRLAKVLRELKLMATQEPAIASLVKLLQTVPGVGFLTAILLVVELIDMHRFKRFDNLVSYIGLAPSIHQSDEHSYSRGLTKRQHKELRFRMLESAWIAVRKDPALTMKYGQLCKRMNKNKAIIRIAKMLLSRIRTVWITQTPYVYGVIE

SEQ ID NO: 267388 - protein, 337 aa, unidentified
MDYFAGLDISMDETHVCVLDREGAVVRESKAASTAEAIAGELSKAPSCRRIVFETGRMAPILFHGLNQLGLPVVCVESRQAYQALKSLATHKTDRNDARGLAHLARTGFFKPVHVKSLQAHALRSLISARKKLVGQRVTLENQIRGLAVVFGIRLPRALTTAFIDQALKASEGVAGLSAAMRGLSAARVAVMTAVAAIDADIRRMTRASAACRRLMTIPGVGQLTALAFVAAIDDPSRIRRSRDIGAYLGLVPRRYQSGEVDYTGGISKCGDGRVRTLLYEAANVMLTRYKGQLKLKDWAFAIAKRSTMRKARVALARRLAIIMHAMLRDGTEFAPA

SEQ ID NO: 267389 - protein, 345 aa, unidentified
MNEAYDGQQFVGIDLHRRRSVLVRMSEAGEPLECVRILNERDQLAAAMAAAGEHPEVVLEATYGWYWAADELAALGANVHLAHPLGVKAFSYRRVKNDVRDATDLADLLRMGRLPEAWIAPPATRELRQLVRHRAKLVHLATSLRCQLHAVLAGQGVTVSVSDLFGLAGTELLDQLVLPPAYQHRLDSLRRLIEVFDTEIEAVSKITRVRLRADPGYASVQTIPGVGPVLGSVFVAEIGDVTRFPGPTQLASWAGLTPKHHESDSTVRRGRITKQGSRLVRWAAIEAVQRVSRHSRLGIHRDRVAARRGPNIGKVAAARELVELVYYALRDHTVRRLTQPPAMAA

SEQ ID NO: 267390 - protein, 337 aa, unidentified
MNIVFLGIELAKNVFQLCGLSQASKPVYTKRTGRKELLQTLANIPACLIGIEAPTGAFYWQREFEKLGHKVKAISPQYVNPFVRGQKNDGNDAQAIAVALMQPTMQFVPPKSPEQQNIQALHRARQRIVNHRTATVCQIRGLLLDRGIPIGSAVSRARRAIPLILEDAENGLSSRMRRTIAELYDLFNDLGRRIHFFDKEIETVFRQSEACQRIAKIKGIGPKTATAVVAIGKGTEFKNGRHFAAWLGLVPRQHSSGDRQVLMNMTKKGDKHLRTLFIHGARAVVRVATNNSDGHMNQWVNQLKERRGFNKTTVAVANKNARIIWSMLTNETGYQVV

SEQ ID NO: 267391 - protein, 345 aa, unidentified
MNATTVAVDLAKNVFEIAVANQRWKIVEKARLTRAQFARWFDNRAVALVVMEACGSAHHWARSLRARGIEVRLLPAQYVRAYVKRNKTDAADALALLQAARASDILPVAVKSIEQQALQGLHRMRSAWMATRTRRINTLRGFCREFGMEVPLGAVRGIAQIARLIADDQSAIPGILRTPMRLALEEIRLMEARIDQIERELATLARQSSACRALTSVPGIGLLTSTAMLAAVGDPRSFDAGRRYASFLGLTPREYSSGATRHLGRISKRGDRYIRMLLTHGARSVLRAATVARRSGHELDRLRTWALAVQDRTNHNKATCALANKLARIAWAVWVKHEKYQSAPA

SEQ ID NO: 267392 - protein, 334 aa, unidentified
MTTWILGIDISKRKFDAALSMGEKFKTKAFPNTPSGHRALLEWLARYDADHVHACMEATGSYWEALATFLHDEGHRVSVVNPAQIHAFAKGLLTRTKTDRQDARLIARFCEAMKPGFWQPRPREERELFALIRRLDALKGMRDQERARLQEAHEAVADEIEGHIEGLERAIRELEERIRDHIERHPGLRDKRDLLASIPGVGETTVHQILSRLSVLSLLGSAKQWAAYAGLSPGERSSGQRQAASSGMVRLGDARLRKALYFPAMVAKQHNPVFRRFAQRLRSNGKRPKQIVVACMRKLLHIMYGVLKSGQCFDPSCYGMPAHTISEMRVARTS

SEQ ID NO: 267393 - protein, 353 aa, unidentified
MPRKTDTAVVSTIGIDTGKNALHMVGLDERGAIVLREKVSRLRIAARLVNVQPCLIGIEAGMATHYLARELVALGHEVKQVPPTYAKPFRQGHKNDFRDAHAVAEAVQRPSTRCVPIKTDDQLDLQALHRVRSRLIGDRTAVINQLRGFLLEHGIAVRQGHRFLRRQLPQILATRTDVLSPRMVRIAGDLVADWDYLDERIDRVTDEIEDLAQTDVSCAQLMAVPGVGPIIASATVAAIGNGAAFANGRDFAAWLGLVPKQMSTGDRTILGRITKRGNRYLRMLFIQGARAVLLHPTSWAKHSFGSWLTAAARRLHCNVLTVALANKLARIALTVLFEGRNYETRVAPAPVPA

SEQ ID NO: 267394 - protein, 393 aa, unidentified
MQRISVGIDIAKEIHWITAIDADGVVLIDRKLLNTPTDIAALADQLTALGGAIRIGLDVMGGIAGLAEAMLEAAGFNLVHVPGMAVNRARQGTVGGENKSDPRDARTIADQVRTRSDLRQIEPATEIDLEIRLLVGRRRDLVEAQTQRLSRMHDLLVGIFPGLEACLDLKTKGPLHLLTKFVTPAELRTAGKKRLVRHLQAAGGLPNIEALADRALTAAAEQAIAVPAERMTARLIRELAAEALASRTRLIELDRELEALLDRHPDAALIRSLPGMGVVLSAELIAEAGNLSRFRSADALASAAGMAPILRQSGRSRFLRRPNGGNKGLKRVFYQSAFCSLGHDDSRAFYDRKRREGKRHHQAVIALARRRVNVLWAVVQNRTPFQTGFKTAA

SEQ ID NO: 267395 - protein, 412 aa, unidentified
MELLHRRCCGLDVHKETVVACLRLVSDGKVTTEVRTFQTTTADLLRLSEWLAANECTHVAMEATGVYWKPVWHILDDGEFALVLANAAHVKNVPGRKTDVNDAMWLAELLAHGLIRASFVPDAQTQEMRNLLRTRKQLVREQSSHVLRVQKTLEDANIKLDSVLTDLMGKSGRAIIEALIAGETNPVKLAGLADRRVKASPEEFREALRGCVTKHHRFLLRLHLNQIDALDAAMATLDAQVEANLGPFRTAVELIGSIPGIKNLGAHVIVSEIGIDMSRFPSAAHLISWACICPRNDESAGKRRSNRVRKGGTWLKTTLVQCAWAAVKKKDSYLQAQFYRIKARRGPKKAIMAVVASILTAIYHMLKDGTMYKDLGRNHFDRRSSDQQKNRLVKRLADLGYAVEIKPLAATA

SEQ ID NO: 267396 - protein, 359 aa, unidentified
MLKYSLGMDASMKDIHVCLSVIDSRQQVKVKASSKFSNNVQGFKDLLVWVGRHKKESDIPLFSVIEATGVYYEACALFLFKAGFDVAVVLPNKAKKYLQALGLRSKNDKIDAAGLARMGAEQCLDLWQPMDEFFYTLRAMTRHYQSLQELKTNINNQLHADEHSIYSSKAVMKQLKKLIDTIEKQLKDADQSIHDHLYSNDEVGQRVNHIIDIKGLGYMTVAVVLAETNGFALFKSASQLVKYSGYDVIENQSGGHRGKTKISKKGNSHIRRAMHMPAFNVVRYEKGNFKTFFERIFARHHQKMKAYVAIQKKLLVMIYTLWKKNEAFNRNAKIDTSRKEETVPSFALTAGQLNEVAPA

SEQ ID NO: 267397 - protein, 425 aa, unidentified
MNYKQNEKINQVKESTLVVGIDIGSTTQYARAFDWRGIELGKVFTFSNSREGFEAFKAWMQYLQDKYRKSDVIVGIEPTGHYWFDLGAYLEDEGILLVMVNPYAVKQTKELDDNSQSKNDRKDPKVIAKLVTEGRYSAPYTPDGVYADLRIMVTNRKRLIREMTQIKNRFARWFAIYFPEYTDVFGDYEAQSSMLLLKKVCTPEAIVELGAEKINQIWRDAKLRAVGMKRATTLCETAKRSIGLKKGSSAARYEMKLLLEDYEYKKAQLDAVMEEIEKLCRKIPESEQMLAIKGIGVITVAGFLAEVGDVRRFESPRQIQKLAGLSLRENSSGKHKGQTTISKRGRSNLRAVLFNAAIPLIATNPEFKSLHEYYTTRANNPLKKKQSVIAISCKLIRVFYAVLANGVTYDAQKMLSDIHRQPQAA

SEQ ID NO: 267398 - protein, 341 aa, unidentified
MDHYAGIDVSLECSSVCVVEASGKIVREAKVASEPEALIGWFGSLGLKLARIGLEAGPLSQWLFAAMRQAGLTVELLETRHVRDAFKAMPVKSDRNDARGIAQLMRLGWFRPVHCKSMAAQEVRALLTARKLVQSKLHDMEMSLRGILRGFGLKVGVTTPRRFAGRIRELVAGHANLEVIATAMLAIRDVLLREFVAFEKRVRTMARQDARARLLMSAPGVGAIVSLTFASAIDDVSRFKSSKQVGPHFGLTPKKYQSGETDITGRISKIGDKGVRTALYEAAHIILTRPVKGSALKSWAMKLARRAGMQKAKVALARKLAVIMHRMLADGTPFKFAAAAA

SEQ ID NO: 267399 - protein, 364 aa, unidentified
MQNSITWVGMDVHAENIVLAAVRGSSDAIAFRAEFPNTPKGRERLAGRLAENAPVSCVYEAGPCGYELRRFLEGRGIECDVAAPALIPRKPGDRVKTDRKDAEKLARLHRLGELATVFVPTPAQEALRDLLRTREDAREDLLRRRHRLSKFLLRLGRRYAEGVRWTTRHWDWIRAQTFTDRNAETVFREYIVAIEQEVERIRRIEQQIVEESRSPEVGKAIARLRALRGVDTITAMTILTEVIDLNRFRSPRELMAFIGVVPRERSSGGRERRGSITKTGNAHIRRVLIESAWHYQRLPAGTPKAILARREGQPPEVIETARRAELRLHRKFMKLLGRGKPKGIVAVAVARELAGFIWALGRGQ

SEQ ID NO: 267400 - protein, 400 aa, unidentified
MISPSTLRQPTELPMAKIDDLSRSLTALNQEETLICVVELSRSSWLIAGMVPGVERQPLKKLEPDAAGLMGVIERWRGEAIKADRAINRIVLAYEAGRDGFWLGRWLRTRGVEVHVIHSTSVAVSREHRRAKTDRLDTAMLMRVFVGWLRGERGHCSMVAVPTIDEEDAKRPGRERASLVGERTRIINRMKATLARLGLRGFKPELRSAPARLEFLRTPEDIVLPPNTLAEIRRDMSRLTIIREQIKAIEQARLERIEHAPDEPAHAMVRLLARVIGVGIESADMLVREVLLRSFRDRRAVARYAGLTGAPDESGAKRREKGLAKSGNSRVRRGLIQLAWRFLFFQRDSGLARWYVERTSAKGARKTTMIVALARKLLIALWRLATTGLVPEGILLRSAV

SEQ ID NO: 267401 - protein, 312 aa, unidentified
MADMVRLAGIDVSKDKLDVYVAPSGESRTVSYDRRGLAGLRRWLVGLGVALVAVEASGGYEREVSEVLEDAGLIVHRLNPLRVRRFAQLKGRLAKTDRLDARTIAEFARAHPQERQLRRDPRRERLAEHLLVRRHTQEAILDCINQLEHLRDGRLRRLVAARKASMERTLARLDRCLVELIAEHADLAELSQRLRSVPAVGPVLATTLIALLPELGSLTRRQVASLVGVAPFDRSSGRQIGAKSIQAGRALVRNALYMAAMVASRHNPVIAAFAERLAGKPGKVRLVACMRKLIVTLNAVVRDGTQWQPRST

SEQ ID NO: 267402 - protein, 421 aa, unidentified
MTQTSHNTFAAFVGIDWADAKHDGCLQAAGSAKRACFQLEHTPEAIDAWVATLRTRFDGQPVALCLALNKGPLVFAWRKYDFLVLFPINPLTLARYREAFTPSRAKDDPTDAALQLELLLTHRDKLQPLHPQSPTMRALEQLVEHRRRVVGDKVRMTNRLTRTLKNYFPQVLQWFQDKDTHIFCDFLRRWPTLKAAQLARRTTLETFFRDHHVRSEDVIAQRRHAIKTATPLTTDEGVITPHALLVPALVAHLRVTLQAIADFDTAIAQRAQTHPDFPLFQALPGAEPVFAPRLLVAFGAQRARSASAAELQKYAGIAPVTERSGKKSWVHWRLQCPKFLRQTFVEWAAASIRHSFWAQLYYQQQRDKGKAHQAAVRALAFKWIRILYRCWQDHTPYDESAYLQALNQRGSSLMQNFAKLS

SEQ ID NO: 267403 - protein, 412 aa, unidentified
MEPIYTSCSGLDVHSKSVQACVRQTERDGRIHQEVLSFGTMTRDILAMADWLSSKGVTHVAMESTGVYWKPIYNILEGRFNILLVNARHIKNVPGRKSDVMDCQWLAQLLQCGLLKGSFIPDRPQRELRDLTRHRAQLVNEKTAVANRIHKVLEDASIKLGLVATDVLGKSGRDMIRALIQGDKDPEAMADLARKQLRGKIPDLCLALEGHVTDHHRFVLSELMNHLEYLEGQIERFSRRIEEISGPFEEALREITLLPGFEQRSAENVVAEIGTQMAPFPSAEHLSSWAGMSPGSNESAGKNKSGRTNKGSRWLRTALTQAAWAASRKKGSYFQAQYRRLAGRRGKKRALIAVGHSLLVVIYHVLKTHTAYKDLGENYFDNLNSKRLVPYLVKRLQNIGYEVNLTPCQKAA

SEQ ID NO: 267404 - protein, 338 aa, unidentified
MQVIRVGLDVGKRFFQAHGVDGRGAVALQRKLRRAEVERVFGRLPPCLIGMEACATAHHWARVLRAQGHEVRLVPPAYVKPYLKRGKSDAADAAAICEAIDRPSMHFVAVKSAQQQAALVAHRVRALLVRQRTMTVNALRAHLAEFGVIAGAGMGRIEDLIALVAGGEDPRLPAEARSILLTLVAQYRALATQIDTAERAIMAQHKASPASRRLAQVPGIGPITATAFVATIGDARAFRSGRHLAAWLGLTPRQNGTGGKMQLGRISKGGDRYLRTLLVLGATSALRSAKRGDPRLAWLRALLERKSARLATIAQANKNARIIWAMLTRGEAYRPAAH

SEQ ID NO: 267405 - protein, 352 aa, unidentified
MNKAKYIGMDVHKAMTVIAVQDKMGKLLAEAIIETKAPTILDFIKSQRGTLLVTFEEGTQAAWLYDLIRPHVLDVVVCDPRKIVNQGQKTDKVDAKRLAELLRTNMLTPVYHGEKSIKGLREVVRSYTSMVQDGTRIKNRLKALFRSRGIECNGGSIYKPDERKNWLAKLDSAAIRARAEKLWEELDCVERLCEEAQQELVAEARKHAAIKILKNIPGIGDLRAAMILGVAVTPHRFRTKRQFWTYCGLSVITKTSSEYELLNGHVSRRKKRPLVRGLNQNYNHVLKGVFKGAAKTVTAGPWKSHYDAMVAKGTKESSARLTLARKIAAITLALWKTGGRYDDKKAMIFHAA

SEQ ID NO: 267406 - protein, 428 aa, unidentified
MSDNDTSRIKRFRQFKNEIRGSDRSLIVGLDIGKSMHYAFLGTATGKTVKRGLRVENSASGFEHLLTSTQFYMDRDGFKDLVFGLEPTGVYHKPLAEFLITHDHLVVYVTNAAIKNNRALLDGRWDKNDTKDSANAADLVAQGKCQFYDFPYIQLRDLRALLALRERLKKQHHSCRVRIRNNLVAQYFPELDNCWNQAQEENLAIVRWCLSPQRISHMLFEDFFQMVITRNKGLRQYNRLSKIWEIAPYSIGCQPGIAMQLEAKMLVENIKTIQAQIATVDETIEDICLGYQEYEYLLSIPGFGPYVSAVVLAAIGTAQRFENTHQVIKFAGFDLNAHRSGKKSQSAVPVISKKGKASLRYALYQAALIASSLNTQFKGYYHHLLQGRAREKGIRTKMRVKLAAKLLVIAWTLMKKKQAFDPSYLKAQ

SEQ ID NO: 267407 - protein, 418 aa, unidentified
MKSNKAEKVKIINEKTLIVALDIGKNVHYGYFRTPKNKDIKPFPIYNTGQSFKKFWGKLCRFKEEHMLDEVVIGFESTGPYAEPITNYLRKKPVNLVQVNPMHTKRIKELTGNSPNKTDKKDPRVIADVISLGHSLTVVMPEGAAAQLRRLTHARERAIGRRIAMNNQLQDLVFVIFPELGSIIKPSTKTGMYLIKNYPDSESIASIGIENLSDIIRRVSRGKFDKDRAKELYNAAEQSIGITEGKESVILETSHLVSNIENENRYIESLEEQMIEHLERIPYSHSILSIKGIGHVTAAGLIGEVGDFNKFNTISEITKLAGLDLFEISSGQFKGQRRISKRGRPMMRKLLFFAAINMVKSTGIMHKKYKQMLDRGMLKMKALIAIARKILGIIFVIVHNSTVYIENYTKQNHYKLAA

SEQ ID NO: 267408 - protein, 374 aa, unidentified
MNTIYIGVDFHARQQTICYLKIETGELVTCELKHQDKEQVRAFYKQFQGHVIIGLEASGYSPWFEAMLEQLGCEVWLGHATEIRRRARWRQKNDRRDAELILDLMLHNEFPRLHRPTVQSREVLRMLRYRQKLIKVRTMSKNSLQAIALQAGLAKGSRLFTTAGQQELRTAEMSPVLQWQRDHWFELLKPLNQQLLETMVWCKAQSKGDAAITRLRTHPGIGLLTSLCLLHTLQPVSRFRNARKVTAYAGFDPVERSSAERQHFLGISKAGSRLLRYLLVEATHTAVRHDEDLKRFYKRLAERRGRPKAKVAAARKLLIRAYIMLRDEIDYAEFRRRAVAARLARRGQRPEVPEVLIGQPASAGCQEQTHASEK

SEQ ID NO: 267409 - protein, 343 aa, unidentified
MKLYVGLDVSMKETSICVVDKVGKVFREVKVATEPTAILAVLKDETLAIERIGLEAGAFSQWLYGALAEAGLPVVCVETRHMKAALSAQRNKTDRNDARGIAQMMRVGLYRPVHVKTLTSQKQRMLLTARQLLKAKAIDIESDLRGTLRNFGLKVGVVGEAKFEARIRELIKDDPDLAEIVEPVLIARRTLRQQLGVLHRQLLELARHDPVCRRLMTAPGVGPVVALTFRATVDVPSRFKSSKTVGAAFGLTPRRYQSGETDRMGVSKCGDRMMRVMLFEAALALMVCSRKWSWLKAWGMKIARHRGMKRAIVAVARRLAVILHRMWVDRTEFRWTREQAAAA

SEQ ID NO: 267410 - protein, 531 aa, unidentified
MITIPAVLENCAGIDVGKRGLAVAVMKGPADKEASIQTRWVGTTVPDLEALREWLIQEDVGSVAMESTASYWIPVKNILEKSMKVMLVCPNKHHPKKGQKTDFRDAINLAHLHRHGMLTGSYLPERGVVELRDLTRRRKKLLSHLGSEKNRIQKVLEVANVKIGSVISDVFGISGQEILEALLTDREMEVEQIAEMAKNRLRTKIPQLIETLKGHQMNDHHRWLIQQSIDHIVLLDRQLEELEDRIMVKIEPYRKQFDLMCTVPGIKDMNAACILAEIGPDMSVFPTADDLSSWAGRCPGNNRSAGKTKSGRVKKANKFLSSALSQAATGAVRKKGCIMRRKFQRWVKRMDRKEANVAVGHSLLKVIWCILTRGEPYREPDAGAIHELERQKLVRHHARRLRALGADVEAMEVIVEQLLCPDSNPEGEVTPSNAAAEETGSGDVASEDTGAAEEAPVAAADKRKTTTCKPKRREDVCRGKLGIRARAARYRYSVFIDQPGQRPQPRLVDVPSNNNQKLPSRRRKGSSTDSA

SEQ ID NO: 267411 - protein, 394 aa, unidentified
MILVGIDIGKNQHTFSIIDKGTGEVLSNPSLFNNNQEGFLLLIKKLSSYAKSELLIGMEDTGHYHFALLKYLLDSHYTVALINPTTTDLTRKLQGGITKNDPLDSLTICDVINSNQRKKPYRITKVNRFDLYEQKQLTRHHHNLKEELNIYKNRLQKCIDIVFPEFNSLFRSKYGIVYMNVLKTFASAQKIADSDIQTIRECFEYNRRGKRISLSAEQLKAAAKTSVGIHSVAEEIQIRHLVSQIELIEKQLSETDKKIEEFSLQNDSPILSIPGISHFSGTSILAELGDICNYTKASQIIKFAGVAPYHHESSQFTAQHTAITKKGSRYLRKTLYQIILTVINNNKVFTAYYNKKLAEGKGHRCAQGHCIRKLLRIIYHLLSTGQTFDPDLLR

SEQ ID NO: 267412 - protein, 404 aa, unidentified
MKTKQQSSAQTGNPAIKVQNLVDFSERNLYVGIDVHKRRWQVAVYFEGLILSNTSIEANPGALITHLRKRYGEARFSCVYESGPFGFALCRSLWAAGLDCMVVNPADIPNTNKESRSKSDPVDARKLALHLAAGLLHPIHIPTEKLQKQRSLIRFRKKLWGDLVRSKNRLKGELLFQGIVIPKQYDNKHWSHNFLYWIEQQAAKEEDLKETLLLMLEEVKGLRVLLLKTERKLRELMWSKDFKVKSELLRSIPGVGPLTAMLFLLEVGDVSRFKSFDALNRFVGFCPDSHSSGESVKHSGISLRKHSQLRSMLVEAAWQLIRSDAAMLAHYRELQKRMKGQDAIIRIARKLSRRIRAVMLSERMYVRGIDGRITSSMIGAPQLPKPKKRGRPKKTSTIATAEQN

SEQ ID NO: 267413 - protein, 367 aa, unidentified
MKQQTSATTETIIKGSNIIDFTGKTIYVGIDVHLKDYQVAKVHNGMCLGNHRMTSGSEGLIKHLRSHYPGANFKCVYESSAWGFNLQRKLTEAGIDCIVAHAADVSTSDKERRRKTDKVDALKLARSYASGDIKGIHVPDETIQKERTLIRYRANLTGDITRSKNRLKGLLKYQGIEIPEKYAKNNWSRNFINWVEGQAMKDDLLKDSLLLMLEQMRLLRQLLLKAEKKLRELRNGKYAAQAKLAMSVPGIGPTTAMLFLLEVGDINRFKGFDKLNDFIGFCPDTDSSGETDRDKGITVRRHNQLRSALTEAAWQAIRIDPSLLESYQALTKRMKGSQAIVRIARKLLRRLRAVLLSGNPYQKGVIA

SEQ ID NO: 267414 - protein, 402 aa, unidentified
MFYSVGIDVSMGKSTIAIISTDGEVISEPFEIEHTKSGFNLILEKIKDIPKDNVKFVMESTGNYCKSLLKIIIDNGYFATVENPLTIKKYCDINIRKVKTDKKDALKIACYGSERWHKLIRYTPSDEIYSELRFLSRQYDEQMSLKVMKKIHLSGLIEVTFPGLKKIFNGDSVYMLMLDVYKKYYHPSLVLSKSKSSFIKDVEKISKKTGHRIGTRVAEEMYSLANECIPSSPCNESTQLAVSNCVLLLQNLEEITNNIIAKMDELARKLPEFETVSNMTGVGNKIRARLIAEIGDVRRFKNSNCLIAYAGIDVPPFQSGQFVATNRRITKRGNKHLRKVGYETMKSLKTVKPTKDNAVYLFILKKENEGKGTITAKIAGLNKFLRIYYARVMEVYNNLENT

SEQ ID NO: 267415 - protein, 402 aa, unidentified
MNAVGIDVSKGKSMVAIMRPFGEIVSAPFEIKHTASDIHSLVELINSVEGESRIVMEHTGRYYEVLAHQLSKANLFVSAINPKLIKDFDNDSLRKVKSDKADAVKIARYALDKWQNLKQYNVMDELRNQLKTMNRQFGFYMKHKTAMKNNLIGILDQTYPGVNTYFDSPARSDGSQKWVDFASTYWHVDCVRKMSLNAFIDHYQNWCKRKKYNFSQSKAEEIYGKAKELVPVLPKDDITKLIIKQAVDQLNSASITVESLRTLMNETASKLPEYPVVMAMKGVGTSLGPQLMAEIGDVSRFTHKGAITAFAGVDPGVNESGSYEQKSVPTSKRGSSDLRKTLFQVMDVLIKTHPQDDPVYQFIDKKRAQGKPYYVYMTAGANKFLRIYYGRVKEYLSSLPES

SEQ ID NO: 267416 - protein, 359 aa, unidentified
MTMLAEPNEKIEDPTVLDAVVGGDTHRDTHQLEMLTGAGVMISTISIDNDADGYAAAIAWIAQHAPGPRVLVGLEGTRSYGVGLCRAVQTAGLQVVEVEQPKKGQRRGRGKSDPIDAHLAALTVLRMPADRKALPRNDGDREAIRILLVARNEISTTRTAQINRLRALLLLGDDEDRALSRGAMSKAHLDRIGRRRGRRDETREQAVRRGEARRLAIAIRAADLELTANHKQLKTLVQAFAPGLLDRKGVGPFSGAQAIVSFSHVGRCRDDAAFAALAGASPLPASSGRTDRHRLNRGGDRQLNRALHTIMLTRWRDCTRTKAYIQKRRTEGLSDRDIRRCLKRYIARELFRALTAVGG

SEQ ID NO: 267417 - protein, 354 aa, unidentified
MVTVGIDPHKHVHVAVAVDARGNRIGKPLTVKNDGLLITAVLTWIRAITDATPVTWAIEDGHGFARRLADGLLLAGQEVVWVPSRLTAAHRKLHAATGSKSDAIDAVAAAHAAIATPDLTRHRIDERVRELRVLTDYRADLVKRRTMMINQLKAQSHLWLDHTPGDLARAKVVAALTARLEAAEVGIHVRQVIVTMISELAEANNRIHDLDIRIKELVTPLTPNLLAITGISHNSAAVLLSEIGDIERFSSSAKLARYTGCAPIPVYSSDNERHRLHRGGNRRLNSVLYTAAIVQTRFNPAAQKLIARQEPTKGARGARRILKRHLVDVIYRAMHTDQASWQHQIARCQPLALT

SEQ ID NO: 267418 - protein, 350 aa, unidentified
MEVLIGVDPHKATNVVAAIDEQGELVGQETFAATRKGLRALERWAKRFPERSWAVEGAGGIGRHLAQKLLAAGERVVDVPPKLSSRVRVLSTGNARKNDRLDATFVALAALRNDRLTSVQPEDGPEGHVVEILRLLTERREDLVSERTRALNRLHVLLRDLLSDPVRKQLSTDAAAKLLRRARPKHPAGRVRRQLASELVRDVRTLDRRIAELDERIAGEVKASGTMLTEIFGVGPILAAKILGIVGDVSRFPSKAHFASYAGVAPIEASSGEVVRHKLSLAGNRRLNQVMHMIAVCQARSDPRGGAYHRKKLAEGKSRREAMRCLKRRISDAVFRVLVTDSQLASQTVS

SEQ ID NO: 267419 - protein, 457 aa, unidentified
MSASPKVKKKSTSKTNVQLPALHPHAAGIDIGATQIQVAVPRDVDPKPVRTFTTFTDDLLKLRDWLKACGVRTVAMESTGVYWIALYQILEAAGIEVCLVNARHCKNLPGRKTDVSDCQWLQYLHSVGLLRASFRPPEQICVVRSFLRQRANLVRYASQQVMQLHKALTQMNVQIHNVISDIVGVTGLSILDAVLAGERDGQKLAQLKDHRIKASADVIARSLVGDWRAEHLFALRQALATWRHYQILLTECDTETARALAGFESRVDVQANPPPPSTLRHKKPHANEPRFEARTELYRITGVELTQVPGLQVSTALVLFGELGPDFVTRFPTAKCFASWLGLCPDNRITGGRVISVKTRDVKSRSAEALRLAAQALWQSKTYLGDCFRRWKARLGTPKAITAMAHKLARILWHLLKYREAYAPKVWAAAEEKLRAKKLKRLHQNATALGYKLVTAP

SEQ ID NO: 267420 - protein, 345 aa, unidentified
MAIVETRAITGGVDTHADMHVAASLDPIGGLLGVREFPVSAAGYAGLLGWLGGFGTVCLVGVEGTGSYGAGLARFLAAAGIRVVEVDRADRQDRRRQGKSDPLDAVSAARAAQSGRARGAPKGRDGAVEAVRALMVAKRSARSERTQASSQARALIVTGPEDLRARFAAHATADLVTDLASLRPRPGAVVGSRTRIALRELGRRAEFLDSQIVCLDALIVPLVTGHAPGLLALHGVGPDTAALLLVAAGDHPERLRSEAAWAHLCAAAPIPASGKTTRHRLNPAGDRQANHALWRIVITRMSSHPPTRAYVQRRTAEGLSKTEIIRCLKRYVARQVYPHLRAAAD

SEQ ID NO: 267421 - protein, 354 aa, unidentified
MAVMIGIDPHKRSHTAVALDGTDVVLGQLRVTADRRQLDRLLAFARPWPQRVWAVENANGLGRLLSRQLLSAGETVVDVPAKLSARVRTLSGAGHKTDSHDARSTAVAGRNGTGVTPLAVDDPLLVLFDVVLERRWQLVATRQKTLCRIHEQLTCLIPGGAAKRLSANTTAALLRRIRPTDPVGIRRRLIVRELLAELRATDRKIAPLDADIAWMLDEHGTTLTDIVGIGKTGAAMILAITGDPTRFRSAAAYASFAGTAPIAASSGDTIRHRLNRGGNRQLNKVIHTAAKTQVRLAGPGRDYYERRRGEGKTNAEAIRALKRHITTAVYRTLQIDAIARTARHAQASEEDKRS

SEQ ID NO: 267422 - protein, 482 aa, unidentified
MKKRNIYQNQSQELLSLFEQAANNAKVMCVPIDYAKKDHVVMFCNGYGDILRKPFSVKNSPQGVDYLTDQVLRSCRQRAISEKHVFFGGEQVGSFADNFVSTLRCQGWLVAGVNAHEAKTQRENLQASTDRVDLMGIAKTLLNRRANCSPAQSGIYLNMRTVVRHRKKLVDITTEVRNRIHAVVDRLFPGFLNETNSGITPFSKSSLWLMQERFSAPQIRRRRRPTLIEALRRLGTRNPECTADTLQQYATQVLKPPQEYVHMLQLSLTQHVKHFCCLQESIGQLEKEIAVNLAQTQGAFLTSVRGIGIVLAAGVSAEIGNPYEQKPLNNLVSYCGIIPRVKQTGGPQGETKTGKVAKRCNRILKNYGVQSASHLGLHGPADLMADYKRRDAAGQHADFGMARRYLRMAMCLMRTSQIYLPNGLRKAQSQIEERADYYLMTWPYLRDKWQKLEALETAFKADHPLGQWRKIVQQFYGIKLTL

SEQ ID NO: 267423 - protein, 409 aa, unidentified
MAAGDEGCTIVVCKATNGVARMRKNDLSRSLVAFDQDSTLIAVIELSLSKWLVAGVVPGVERSPLKALGPDPEALLKLIHRWRDEAVKAGKVVRRMVVAYEAGRDGFWLARWLRSRGIEAYVIHPTSIPVSREHRRAKSDRIDVRLLFRAVLGWLRGEAEHCSMVAIPSLEEEDARRPTREHEMLVGERTSIINRVKAAMIRLGIRGFNPKLRKAAEQLTSLRSPEGQPLPPHTLAEVQRDLARLALVRAQLQEIEKQRAQRLQKAPKEGTHPMVLMLAKIMGIGVETADMLVHEVLTRDLRDERAVGRYAGLTGSPDESGSKRREKGLAKAGNGRVRRSMVELAWRWLMYQKGSALAQWFVDKTASGQRGARQKFIVALARKLLIALWRYVRFGEVPVGVVLKAEPAR

SEQ ID NO: 267424 - protein, 376 aa, unidentified
MREKLRFLGLDVHAETIAVAVAEPDGEVRSLGTIANREDSVGKFIKKLGPAEQLRAGYEAGPTGFVLYWQLTQLGVECAVVAPSLVPKKAGDRVKTDRRDALKLARSHRSGDLTAVWVPDEDSEALRDLVRQREAAKQDQLRARHRLTKFLLRTGRRPTLGLKAWTERYMAWLEQIRYTQPAQQATLVDCLNEVEHMSARVKRLEEAILEVVKLAPQSMQEVIRGLQALRGVAHISSVTIAAELGNISSRFESARKLMGYCGLFPSEDSSGKRIRRGGITKAGNAHLRRIVVESAWSYRHLPRVGAKLRKRQQGVPAEITEIAWKAQNRLHKRYMKLTMAGKDQRKIMTAVGRELLGFIWAIGIKAEAACEQQLAA

SEQ ID NO: 267425 - protein, 406 aa, unidentified
MRGPVVTVDVSKGSCHYQPFLEKGKPFRKPKVLHDTIEGFADLNAAIEKTKEKSGEDVVPVIFEATGVYHRCLQKYLDDHDMPYYIISPLLSAAYRKTNLHGNKTDALDCSHIAKAYYDEDSLLPYQKQSDLFTKLQKLNRYYETELCHLKKRKVTFRSYLDIIYPRLDKCFKGHSNLYNPVPMEILKKYPHPSLLLKHREETIVKAIEKKTDHKPAFIQEIIHKMYECAQHCYSGADVNDLEVIKLPQMIEELQEQILLCDSILQELIQEARKVSYFPCIVSIVGIGENLAARLIAELGDMTRFTNRRALTAYAGLNPKIRQSGDVDGIHLRISKKGNRHLRCLLYLGASCNYRLKKHDEIYEFNKKKRQQSVSPLKAKAANIAAARKLLVVIYALSRNGELYRS

SEQ ID NO: 267426 - protein, 411 aa, unidentified
MPHIVVGIDVHKKILAVVLADADQEELRFQRRTFGTGDEELRRLSGWLSEMGAQEAVMESTAQYWKPVWRALERQCHLELAQAQSNRARRGRKSDYRDAERLVRRYLADELVLSFVPDPEQQLWRTFSRTKVRWSRDRSRLQNRLEALLEEMGIKLSSIISDLLGVSGTRILQAIADGEQDCASLARLAEGRLEATAEQLQDALQRVPEVDPRYRIVLKQLLAQVELADKHMAELDRALAEALRPHAAAVERLAKVPGLGVDSAQQIIAEVGPAAERFASAAELCSWVGSCPGENESAGESHGKHSPKGNKPMRRILNQAANAAIKAKGSVFHARYCRMVARDPKAHPVAIWAVANQMCRVVWALLRHGAAYEERGERPNPIAARRRANRLLRQLARLGYTAKLEAVPAPA

SEQ ID NO: 267427 - protein, 313 aa, unidentified
MCTLGIDVSKNKIDLCLLTAGPGGKKKHKVLTNEPAVARKVVDWLNAQKCVPESVTVVLEATGIYHENLAYGLHEAGVSVCMANPCRVREFAHGMDILNKNDAVDAFVLACYGELKSPAVWVPPSPEVRKLRALLRQRDALREDVQRTVNRLEKANSTSTPQEVIRSLERTKSWLNEELARIEKLITDHTDNDPGLKADLDLLKSIKGVKDQVGREMLALLKDGTFKSASQVAACLGLTPVEKTSGSSVRGRPHMSKTGPSGVRAKLYVAALTASRWNKQAKAIYERLVAKGKAKKAALGAVMRKLVIYALAC

SEQ ID NO: 267428 - protein, 368 aa, unidentified
MASVVYVGLDVHKDSIVIAVAREGREPADNWKTIPYDGVRLRKALKSLVKDGEELRVCYEAGPTGFGLCRRLREAEIDCIVVAPSLVPGKPGDRVKTDRRDARKLAHFLRSGDLTQVYVPEESVEAIRDLERARDDAKCAERVARHQLSKFLLRHDRHWEENTWTQKHRDWIRAQRFAYPAQQRVLEDYLKTVEDLAERVERLTEQVAALVQETALAPLVQALQAFRGISVVSAVTIAAEVGNFQRFATASQFMSYVGLVPSEDSTGKRRRQGAITRCGNRHLRRIIVEAAWSYRHGPLMSKELRRRNQGVAEGVRRIAWQAQKRLNKRLYHLLHAGKSAQKAITALARELAGFIWAVGQEPTLLEVR

SEQ ID NO: 267429 - protein, 419 aa, unidentified
MLGVGIDWAEEFHVVALGSPGEGVTEVVRVEHRPRAVSALVERIAGLEPDPAEVRVVIETRHGLLVEALVEAGYTVLPVNPELVSRRRGPARKKDDAEDARICCLIALDRHAGLRRLIPHGELAGELRSIARDDERACRDERRLLNRLRADLLATFPAALTIAGEDLGAPRVLRLLEHWPTAQALAAASREEIIEFGRAHHSGYLQRFADLVQQALAEDHFTAPGHLVRAKVDTIRLLARQLLLIDAQRKAWEKQMGQLLLGTAAGQRDAEDQPGQAFPGGEIYLSFPGLGRRLAARIAGEIGEHIEQFTTPNSLQCYAGRAPVTRRSGKRDLVVAHRLACNRYLADAVHKWAFASLRRSAWAKEFYDAQRARGKTHHAALRALGNRWLEVMWHCLTHHVPYDEATHAANRNRALGLAA

SEQ ID NO: 267430 - protein, 427 aa, unidentified
MSETNCNKQVERRQKISKSTLIVGMDIGSEFNAMALMNEAGEVLGRHPKVYNSREGFGYFERSIEEVKRRKGLKRVLIGMEPTGHYWRKIAYYAKDQGHEVRFIRTTALRHQRELDESSSAKTDIRDAVTIANVVREGKYIDTVIEDGIYRQLRMLAHVRENIQRHNVGTKHRLAAVLDDYFPELKEIFWSMKAKGLWAVLEECPFPEDVIKCSVEQIAELIGKSSKRKGKALEKAKKVYQGAKETIGLKDVSEADRYRLRSCLEEIKRCEGQMKEVEGQMEGLLEQIPATEILMSIRGVGMITTAVFLGELGDPKNFSNPKQIIKYAGYDPQENDSGKSVGRKRISKKGRWLLRKYLYFMGLRVLYRNTFFRKYYERKLKVKNCWGQLLKKKEAICAVVIKLIKVIFALLRDNRKFTSARPVAVAV

SEQ ID NO: 267431 - protein, 333 aa, unidentified
MQTAKKIVGIDVGKGKLDICYPNGQKETVRNIKSCRTKVIKKAAKLGAFIAFEATGPYEEPLADECLARSVRAVRLDAWKTRRFAESQGRIEKTDAIDCEMIRDYAASLKDEKLHFVKPRSEAQKRLKKAVKTRKNLLKARMIIANQFEDDLDPETARHLRSALASLDRNIAKVEAECDSAIASDERLRELDRRFREVKGVGPCLSRMMLAQCPDIGDFNSKGIAKMCGNAPLDHESCTLKGKAKPRRGRSDLKKALYMAAVSASRNNHILREFYQRLVANGKPRKGALTAVARRIAVLLNTIAKHPDFKPAQDPKTAAKTSRAKRGRPRKAK

SEQ ID NO: 267432 - protein, 355 aa, unidentified
MSQQSNCAIAVIGIDIGKNSFHVVGHDQRGAIVLRQKWSRGQVEARLANLPPCLIGMEACVGAHHLSRKLQLFGHNARLMPAKYVRPYNKGQKNDFRDAEAIAEAVQRPTMKFVATKTADQLDLQALHRVRERLVGQRTGIINQIRAFLLERGIAVRQGLRFLRLELPSILATRTDVLSPRMSRVIEELAGDWRRLDARIEGLTREIETLAHQDQHCERLMTVPGIGPIISSAMVAAIGTGDVFSKGRDFGAWLGLVPKQISTGDRTILGGISRRGNRHLRVLFVQAAWVVLVKLPKQWERYGLKSWIEAAKKRLHHNVLAIALANKLARIAWAVLNKGRAFACDKTDAMTSRAA

SEQ ID NO: 267433 - protein, 513 aa, unidentified
MRLRHTTADENPVLFFPYAQQRKVELDWCCEPAIKCDPDARKHHRLLLPPGEARRVDSERWASSVEPLTNIGSQEGTMEIIARCCCGLDVHKKNVVACLRMVDTAGRLHKEVRTFGTMTADLLALAEWVTTAGCTQVAMESTGVYWRPVFNLLHDRCEVLVVNAQHIKAVPGRKTDVKDAEWIAELLQYGLLRGSFIPPQPQRELRDLTRHRTTLVQERARVINRLQKVLEDTNIKLAAVATNVLGVSARAMLEALLAGTTDPTLLADLAQGKLREKRSQLEQALRGIIKPHHRFMLTELLGHIDYLDDAIARVSEAIRIRLEDDEESLALLDSIPGVSRRTAEVLLAEGGTDLQRFPTAKHLASWAGVCPGNHESAGKRLSGRTRKGSPWLRQALVEAAHGAARSKRTYVGAQYRRIAARRGKKRAAVAVGHTILVMAYHVLTRREPYRELGPNYFDEHDRRRVERRLVARLEQLGYSVDLKREARQEHTEQQAVVSQPTDNVSGLPLLSTL

SEQ ID NO: 267434 - protein, 391 aa, unidentified
MFLLGIDIAKLNHVASCIDSSTNEVVFSNFKFKNDFKGFSALLDKIKSFDAKNLIIGLESTSHYGENLINFLFIHDFKVALINPLQTSHLRKANIRDAKNDNLDSLNIAKSLVFTKLNFVSKKNIECFSLKKLTRFRSNLIKQRSKAKIQLTSLLDLLFPELQYLFKSKIHSKAIYSLLKKYPSAEEIAALKDDEISNLLYASSKGHFKKEKSIELKSLAKTTVGIKDTSISLHLIQLIELIELYTKQIKDIEIKITDIVNNLDTRLLSVPGISVIACAIILGETNNFENFSSSKKLLAFAGLDPKIRQSGNFNASSCRMSKKGSPYLRYALIFTAWNIVRHSEKFNKYYSLKRSQGKSHYNALGHVAHKLVRILFTLIKKNISYQEEKLE

SEQ ID NO: 267435 - protein, 406 aa, unidentified
MQEFNAAEQPIETAAALAAVGAGGLPGGHAAYIGLDVHKETIAIAVAEPGRGEPSYRGEIANTPKKVEKLIAKLSEAYGGGLLLFCYEAGPCGYVLYRQLIASGHDCQVVAPSRIPKAAGERIKTDRRDALKLARLLRSGDLSAVWVPDREQERMRDLSRARDDLKAQERKARQQLNAFLLRHGYHWPKGKSRWTPAHENWLAGLKMDDPWQQVALQTYIDAERASGERVAQLTDQLMRALPEWSLAPVVDSLVALRGIDKLAAIVLLAELGDISRFGSPKQLMAFLGLVPSEHSSGGRRRQGAITLTGNTHARRMLVESAWSYRFPARQTKHLKAKASNASPAAQQIAWKAQVRLCGRYRTLTRAGKDTKLVCVAIARELAGFLWDIVRQEMPQLAQAQAAPQGI

SEQ ID NO: 267436 - protein, 448 aa, unidentified
MSKGKTKNEKVKKISQLTVINPTAAGIDVSDTEMMVAYPTNSEQLEIRAFGCFTSDLHSIANCLKENGVTTIAMESTGVYWVPLFLLLQEYGFEVYLVNAKHVKNVTGRKDDESDAEWIQKLHSCGLLSASFQPDNLERTLRSIVRHRKNLVQTSSTYLNRMQKALELMNIKLHTVISDIDGKTGLLIIEAIMNGERNPEVLADLRDRRIKASREEIIKSLEGHWTTEHLFELRQCYHLYCTHRQMIEECESEIEKQLVEQIASKNEGLIPDLPKVKRKVSGKHKASFNLTAYLKELLCVDVTEVFGISELSALTILSEVGTDISKWKTQHHFTSWLNLAPNTKISGNKIISSRIRKKKHHAGQAFRIAANSLYNSKNPLGDYYRRIRAKAGAAKAVVATARKLAIIYYKMVSNKEAFNPKALEVYQKKYKEKKINQLKKKIALLEAA

SEQ ID NO: 267437 - protein, 376 aa, unidentified
MESNTFIGLDVHKASISVAVARGERGGEVRHWGSVPNRPDHIRKLVEKLAASGAQLRFCYEAGPCGYGLHRQLVEMGHDCIVVAPSLIPLKAGDRVKTDRRDALMLAKLHRAGELTAVWVPDAAHEAMRDLVRARATAMRVAGKARQHLQGFLLRHGRVYPGKKGWTGAYRRWLAMVRFTHPAQQIVLQDYIDAVADAEARVERLTGQIADLLPQWSLAPVVAAVQAMRGVGFIVAVTVVAEVGDFHRFDSPRQLMAYLGLTPSEHSTGASVRRGGITKAGSGLARRALIEGAWSYRMQARISVKLLARLEALPQVVRDIAWKGQLRMCQRYRHLVAAGKAKVVVVTAVAREMLGFVWAIARAVTAPPVSPVATAV

SEQ ID NO: 267438 - protein, 492 aa, unidentified
MKPKLKRKSVYRSQNATLRALFERAGDPRKVICVPLDYAKRKHVALVCDGHGDILKGAFPVENNPAGVACLIEQISATARHRKIPKNQIFLGGEDEPAYVANFTAALREAGYLVMRVNAHEAKENRENLVASTDQLDLIGIAKTLLSRRARSSGDASPENPAYHHLRELARCRRSLVRQQTATANRIHALVDQLFPGFLDDSKTGLSAFCNASIELMKDRFSAPEIAKRKPLALAKTLRRLLVHHPDEAAAKIITLARSVLPPAPHRVATLQRTLTVTVDLHQCLSRNANELRTDAALTLATTPYALLTSIRGIGFVLAAGVAGELGDPTTLGTTDSLCCYAGIVPKTLQSGGPDSPPVQGHVSPRCNHILKDWVVQSAQKIHLYGVPEHKDRITRWNAEGRSGLYAGARHYLRLLRSLVKNQVPYLAPAGRTRGAAPEELAAAAQETWKVMQNKWRTIPGGLDLMLDEAHPLGFWRRVVKETHDIQLPIRP

SEQ ID NO: 267439 - protein, 415 aa, unidentified
MEKIYDKCCGIDVHKKLIVACLRSGRKNEIREFGTSTKEILSMTDWLTSEGCEMIAMESTGSYWKPIYNIIESCGLQAIIVNAQHMKAVPGRKTDVKDAQWIADLLQHGLLRASYIPDKAQRELRELVCYRKSLIEDEARELNRLQKMLEGGNIKLSGTVSDINGKSSRNMLEVILSGEVLDLKKLESMVSEKKVSKRLKAPKQKIVDDMDGVLTALQRKMIRELLKHIDELERHIKNLSDDIDRFMDSGEKAAVKAIEEVPGIGKVSAEAIISVIGTDMNRFPTDRHISKWAGLCPGNNESAKKRNSGRTTKGNKTLKTTLVLCAHAAVRVKESYFAAQFARISVHRGKKRAYVAVAHSMLIAIYHMLRYGATFMDLGSEYYNTFNRERKAEGCLKKLKQLGYAANIATIADLA

SEQ ID NO: 267440 - protein, 440 aa, unidentified
MAMRKREDEVFPNAAGIDVGASSHWVAVPRHATDDPVREFGAMTDDLNDMADWLIACGVDTVALESTGVYWIPVYEVLEQRGLKVWLVDARQMKYVPGRKSDVQDCQWLQRLMSLGLLRAAWRPDSEVCVVRAVARQREVLLTEQASWVQRIQKALVQMNIQLTEVLTDVMGMTGQAIIRAIVAGERDAKVLARHRHSRVKASAEEVTRALTGNWREEHLFVLAQALAMYDHIARHLAECETKLQALLGKLGQCQIDLGKVPRAGSKLRAEFDVRQVMANWAGVDLTRINGLGATAVLKILSEIGTDLSRFANVKHFCSWLGLCPGTKISGGKVLASGTKRSANRARQALKMAAMSLSHSDSALGAFYRRLCARMDKPRANTAVAHKLARMVYFMLTRGEAFVDQGQQHYEEQQRQRSIAALRRRAAALGFQVNPIEVAT

SEQ ID NO: 267441 - protein, 342 aa, unidentified
MNHYAGIDVSLEWSSVCVVDGSGKVIREGKVATDPGALIGWFSHLGLAVARIGLEAGPQSQWLFAALRDAGLTIELLETRHVRTAFKTMPVKTDRSDARGIAELMRLGWFRPVHCKSMEAQETRAILTARKLVQKTLHEVEMSLRGVLRNFGLRVGKVAARDFPFRIRELVAEHADLTEVAESLLRVREVLVREFSGFERRVRRMARQSPQAQLLMSTPGVGAIVSLTYASAIDDPARFASSKRVGAHFGMTPKRYQSGQIDYTGRISKIGDSRVRTALYEAANIILTKPIKGCTSLKSWAMRIAKRAGMAKAKVALARKLAVIMHRMLADGQPFNAAAAAA

SEQ ID NO: 267442 - protein, 487 aa, unidentified
MPHPLRVVLGAAKEARQKFKLRQADVVYSEPFEMKSVNDRSVWIRFDDVVKFFDEPFKRLLAADHLISQYDSRGSEAGRRGEVKRGLACCQSRKSVAGATTRRFVSRTEASMNQDSTLYVGLDVHKDSITVAYAMGLNEVELFGKIGTTQVEVDRLCTRLQSKARHVHVVYEAGPCGYGLNRRLVGKGFDCMVCAPSLIPRKPGDRVKTDRRDAIKLVRSLRAGDLSAVHVPTVEDEAFRDLARAWSSARDDLKQARQRLKSFLLSHGVQYSGRANWGPAHRRWLSTLSFDSAWQQLAFNEHRRTIEDRLAQCDRLEAALREAVVSWRFYPVVLALQAMRGIQFTSAVGLISELGDLSRFDHPRQLMAWLGVTPSEHSSGSKRRQGSITKAGNSYARKLLVESAWSYQHPARVSKDIQRRQEGIPKPIVDRAWDAQLRLCGRYRRLVARGKSPQVAIIAVARELAAFIWDIGRMGMTLAVPQSEQPA

SEQ ID NO: 267443 - protein, 480 aa, unidentified
MVPKERASKYGTFFILRIVRLAAFQFKRAFGCKVNLTPLRNMKRIREHAAGIDIGAKKVFVFVEGQEVKNFLTFTEDFEQLRDYLLNLHVNTVAMEATGVYWNILYEILEEAGIDVWLVDGRQTKQVPGRKTDVKDCQWIQQLHSYGLLNRCFVAQADIKELRGYQRLREDHLRSASMHINHMQKALTEMNIRLKEVLSQIHGSSGMAIIEAILKGERNKEKLLAMCHSSIIKNKKEEILKSLNGRYTKAGLFALQQAFDAYHFYQIQIQQCDKMMNEIIKKMGNKHSENQTNTLQNTKRKAIRHNKPDIKELGVNLIKIFKGKDATILSGITDYSWMQLLSETGTNLSQWPTEKHYTSWLGLSPGQHSSGKTRKNKRKAGRPKAGQIFRQIAQSLMASKNIALGSFGRKLRARKGPSIAIKAVARKLAILYWRVMEKGLEYAEKGIEKYEKQLLQQKHKTLLRLATELNMQISDIKLIT

SEQ ID NO: 267444 - protein, 408 aa, unidentified
MNTLYVGIDVSSKSNVIYLMLPNGDKHSNFSVANSHEGSTQLVKRILSALTSHSLDTVLIGLEATSVYGDNLVYFLREDATLAPFNRKIHVLNPKQVKKFHDAYNDLPKNDYVDSFVIADCLRFSRINKEVYMGDYRYKALQNLTRARFFAVQNLVKEKQRFMNVLFKKYSTMTQEKVFSDTFSTTALAVYDEFESAEALANMDLHELTDFIIEKGKNRFPDPDAVAKAIQKAARSSYRLPKTVNDSVNQVLSISITSMKALESQIKEFDKAIKAQMELLPNVLISIPGIGPVYSAGIMAEIGDINRFNSQAALAKYAGLAWKQHQSGGFESEVTRLIPSGNRFLKYYLCEAAFSLVRCDKEYSDFYRLKYKEVNRCQHKRALALTARKFVRLVFRLLKDNRLYCPAK

SEQ ID NO: 267445 - protein, 472 aa, unidentified
MAQAIRRAGRGQQQKRRARRVRAAQLEQLNLNAAGIDVGATEHWVAVPADRDAQPVQRFGAFTADLYALAAWLRQCQIDTVVMESTGVYWIALFEVLEERGFDVKLVDAHQARQVPGRKTDVKDCQWLQELHTYGLLRGAFRPEDEVCVLRSYLRQRSMLVAMASRAVQHMQKALEQMNLKLTEVVSDITGKTGMTIIRAILTGERDPQVLATYRDKRCKHDQGTIAKALTGHWRAEHLFALQQAVDQHDFIAQQLRACDGQIEGCLQAFVPDVEAASPQSTPGRLWRSSRSNPLSFEVQTYRNTMTGVDLTQIDGIDSLTALKVISEIGLDMTRWPTSKHFASWLGLCPGNKVSGGKRYRIRSKPSANRAATALRLAAQGVANSHSALGAYYRRIRARLGAPKAITATAHKLARLVYSMLRYGTAYVDAGQQAYEQKYRDRVLTNLQRKAKAFGYQLVHVEDLDEGVASTL

SEQ ID NO: 267446 - protein, 379 aa, unidentified
MFVGIDVSKKKHDVCIYDKENEKFISFRIPNNREGFEKLASKISKEDVIALEATGIYHEPLYNFLDSNEYKVIILHPYQVKNISKTMNKSKNDKLDAKSIAVIISDFSAKLKKVKMPTDKVRSLREIVRHRNYLSNMLANFERKLRRELFLVMPEIEKYFSKMNSPVLLELLERYPTPSKIISSLDEVKKIVGWKEDKIKEFEADIRKSIGIEDEEGIYALVVVSIVKEIKHLSEELDEIEKKIESLIKGTPESKKLRTMKGIGLITAATIIAEIGDIERFDTKRQLTSYIGLDPVTIQSGQSSKRLHISKKGSRALRKSLYSLALRLIRYDKRFRDFYKRLRERGKNAKLALVAVERKSLEIIFHILKTGEEYVPLTS

SEQ ID NO: 267447 - protein, 447 aa, unidentified
MGRWGRRSLARRPTTGGMTCLEHLTIRSWGTSSGSSKTGQEVAVIFLGVDWAEEHHDVCLLDEQGKLLGKARVANSLEGVSRIHALVADHADESDEVVVGIETDRGLLVQALLAAGYQIYAINPLAVDRYRDRHSVSGAKSDAADAKVLADLVRTDRDNHRPVAGDSQEVEAIKLLARAHQSLVHSRQRQVNQLRSALREFYPAALEAFKDDLGGRDAMVILEYAPTPTSGRSVSQAKLISALRKAGRERNLEVRAVELQGILRQPHLELPATLVAAYAVIVKSCVQMIRELNAQTAALEAELTKSFELNPDAELYLSLPGLGFVLGARVIGEFGDDPNRYLDAKGRRAYSGMAPITKASGMRQVVLARHARNRQLANACYLWAFASLTGSAGAHQYYRALRARGKSHNQALRALGNRWVSILHGCLRHRAPYSEQVAWTVPVAAAA

SEQ ID NO: 267448 - protein, 355 aa, unidentified
MTSVKYIGMDVHTESTSIAVRNSLGKIVMEGVIETRANTILQFLDGLRGDLRVVFEEGTWATWLYDLLKSHVTEVLVCNTRKNAVRKGSKSDRIDARKLAEQLYMNNVKSVYHGERGLRMMKELARSYLTITKDLVRVMNRLKALYRSWGIPCAGTEVYALRYRAEWLAKISEAGVRRRAEHYYQQLDALWPLRQEARRDLLVESRKHKIWKLLRRIPAIGPIRAAILIAVMQTPHRFRTKRHLWTYSGLGLETYDSAEYRAVRGQLERSRKQATVRGLNKDYNHDLKDIFKGAAMRASTAAGPLRDFYDNLLAKGRKPTMARLTLARKIAAITLIVWKKEVSFDANYLKPQQAA

SEQ ID NO: 267449 - protein, 458 aa, unidentified
MGRNKSKNKDHRAMSVVHPNAAAIDVGATMHMAAVNADRTPEPVRSFGTFTTDLHRLVDWFAECGVDTVVMESTSVYWIPIFELLDARGFAVFLVNARDAKHVPGRKTDVSDAQWLQRLHSFGLLRASFRPKGQIAELRAYLRQRERLLEYGASHIQHMQKALTEMNVQLHHVVTDITGSTGLRIIRAILAGERDPAVLARMRDRRCHATVETIEKALAGNYRIEHLFILEQALALYDTYQQKAFACDARIEAVLKELSVRRGREGGQLPAARQNRSRQQNSLLFDVRAALFALLGKDLTQINGLGPYLALKLIAECGDDLSAWPSAKHFTSWLCLAPSNKISGGKVLSARTRRSGSRAAALLRLAAATVGRTDTALGAFYRRLSARIGKAKAVTATARKIAVLFYNAVQHGMDYVDPGASFYETRYRARVIDNLRRRAKAFGFVLQPARPTPGIAVS

SEQ ID NO: 267450 - protein, 430 aa, unidentified
MKSNTQNAKIEAITEKTLVLGIDVGSETHYARAFDYRGIEYSKKPFKFSNTEAGFVTFKEWILDLKERHEKDKVVPGMEPTGHYWFNLGKFLQDNEMKPVLVNPHHVKKSKELDDNNPTKNDRKDPKVIAGLVREGRYMIPYLPDGVYADLRTASNIRFQLQAELTRIQNRISRWFNIYFPEYKTVYGNPDAKSGMLILKSAPLPEDILTLGIDGVNQIWRDAKLRAVGKARAKTLIEAAEHSVGSKEGAVSARMEIRMLLEDYESRNIRLQEVMTLIEGLVKQIPMAEKLLKIKGVGIKTVSGFLAEVGDISRFNTPKELQKLAGLALVESSSGKHKGETTISRRGRKRLRYLLFEVAMSLVAKNPEFRELHNYYTTRRLSPLKKMQSLMAIAAKLIRVFYAMLTKGVDYDPKKMVSDIKRPAVYLQAA

SEQ ID NO: 267451 - protein, 351 aa, unidentified
MMIIGVDYHPSDQYIAFADLETGECGERRLNHGDGEAEKFYRELKQRGVSVRVGMEATGYSRWFERLLAELGIEVWIGDAARIEAKRVRKQKTDRQDAQLLLKLLLENNFPRIWVPSPENRDLRQLLWHRHRLVQMRTRIMNQLQALAMNEGNRRKKKLWSEQGRAQLEKLPLATWASRRRQDLLNLLDRMNPTIEALTMAVEQEARKRHEVLRLMTHPGVGPLTALAFVTIIGTPERFPCGKQIGSYVGLIPTEHSSAGRQRLGHISKQGNALLRFLLVEAAQAAVRYDPDWRRRYLHLAMRRERRIAKVAMARRLAVRLYWMWRNGWEYGRSVEFGSHAGQLVTGHGVH

SEQ ID NO: 267452 - protein, 343 aa, unidentified
MQFFVGIDVSLDSSSICVIDERGVIIKEGKTDSDPTAIARFVRHKGRKIEHVGLETGSLSQWLHAGLSREGFRVTVMEARHVRAAFAAMRVKTDRNDARGIAQLIRLGWFKAVHVKAPSAQETRTLLNGRRFLVDKLTGIENSMRASLRNFGLKMGQVTRSKWAARARELAVGIPALELVIESLLRVRDALRQELRTIDRQLLDEAKTDPVVRMLMTAPGVGAIVALTFKSAVDDPTRFKRVRDVGPWLGLTPSRYQSGRTDIVGHITKAGDAGVRTALYEAATTVLSRVTRWSTIKDWGMRVASRSGAKKARVAIARKLAIVLLTMWRSQTPFRWSATQASA

SEQ ID NO: 267453 - protein, 357 aa, unidentified
MTQVKKLDFRGTTIFCGVDVHKKNWRVNIQDSEFELEDFSQNAEVVLLHKHLKGKYPGAKFKVCYEAGFSGFSAQRWLSEQGVECQVVNASDVATSDKEKRQKNDKVDARKLCEHLQSKKMKGIYIPALHWEHGRSLVRARSRIVSNQTRCKNRIWQLLHFSGLALPKGYEAGQYWSSRFIKELQATDCGSEELKTTLSLYIKDYQQTRTLLLEATRAIRKLCKQPVYEKDILFLRSIPGIGEIIAAIILFELQEVSRFKHFDHLCSYAGLVPNTSDSGETKRTKGITNRSNYNLRTALVESSWIVIRKDPSMLMKYKKYCRKMEKNKAIIRIAKHLLSRINYVLKNKKEYVIGVLA

SEQ ID NO: 267454 - protein, 343 aa, unidentified
MQTVTTIGLDIAKSVFQVHGIDAEGKVIIRRQLKRRYVLAFFQKLAPCLVGIEACASSHHWSRELKGLGHTVRLMPPAYVKPYVKRQKNDAADAEAICEAVTRANMRFVATKTPEQQSCLMLHRTRHLFVRQQTAVINAIRAHLAEYGIVAPVGRNGVEELLGVVADASDKRLPEIARACLAALGAQLRMLKAQILEFDRMINAWHRSNETSKRLDEIPGVGPALATALVASVADPRAFRSGRDFSAWIGLVPKQHSSGGKDKLGGISKQGDRYLRSLFTAGALAVIRYAKIHGAKHRPWLTALLARRPTKVAAVALANKIARMAWAMMARGERYKEPVALAA

SEQ ID NO: 267455 - protein, 402 aa, unidentified
MRFIGLDVHRDFCAIAISENGCVRFAGKIQTTSEQLEMLAQSLGADDQVALEATSTALPIARILEPHVARVVVATKRDLEAIAQSKAKTDRIDAKILARLLSAGLLAGSWLPDETSRAQRRRLVRRAQLVRARTRSKNEIHGVVIRNLKGKPPMSDVFGKAGRQWLAALALPADEREAVDACLRQVDFLTGEIDVIDRAIAVDASKSQDVRRLMSIPGVSIITATTFTAAVGDIRRFRSPSKLVSYLGLDPTVRQSGNEPAHHGRISKTGPSAVRHTLTEAALLATRAPGPMRAFYERVRARRGHQVALIAVARKLAVLFWHLLTSGHDYAFGQPSLTHKKIRQMELAAGAPSLKGHRAPNPTGLPAPERRDQERAAAAHAELAYKRFVSNWQKNGTRPAAT

SEQ ID NO: 267456 - protein, 323 aa, unidentified
MQGKELSKPTTETESSVGIDVGKTWLDGHVLPQGDRLRVTNSAEGIRKLKRWLRRFTVRLIAVEATGKWHRTLHRSLHASGLPVAVTDPFRVRMFAKANGILAKTDRLDARVLAMFAAVMAPAQRAPAPQIVETLQELVRGRQSAVAERTALRNQRAAARTAFLRRQLERRIARLETDIAGLETEIARHIDADPDLARRQAILLSIPGLGPVNAAQLVARMPELGSASAKQIAMLAGLAPIPDDSGDRSGQRRIQGGRKSIRNGLFLAALSAARHNPPLRAFRKHLIENGKPAKVALVAVARKLIVLANTLIAENRNWQPQRP

SEQ ID NO: 267457 - protein, 426 aa, unidentified
MYVAIPPDRDSEPVRVFKTFTSDLECLVDWLIARGITTVAMESTGVYWIPLYQMLEDRGVRACLVNARHMKNVPGRRTDWHECQWLQYLHAAGLLRAAFRPEQDVCGVRTLLRHRNEMVRMAVQHVQHMQKALTQMNIHIHHVISDITGLTGLAIVDAILSGERDVAKLAELRHRSIQADEETIRKSLEGDWREEHLFTLNQSRQMYMNYRNNIEACDEKVAKLLGGFEAQVDIQLQPLPAPPGPSRKRRTKRTGDFRFEVRTEAYKLFGLDVTRIPGLNELAIPIFSEVGRDLAARFPTAGQFASWLGLCPDNDKSGGQVLWTGVRKINNRAAQMFRMAASSLHHNRSPVGDFLRRMKAKLGPAAGITATAHKIAIIFYTLVTKQIEYDDSIWATRDEHRQKRFEQKVKRQARLLGYELVPVQPA

SEQ ID NO: 267458 - protein, 407 aa, unidentified
MIFVGVDWAESHHDVHVADEEGRRLAKARLPEGVEGIARFHELVGAHVEDPEEVVIGIETDRGLFVSALVAAGYQLYAVNPMSTSRYRDRHSTSGAKSDAGDAQVLSDMVRTDRHHHRLVAADSAEVEALKVLARAHQSMVWSKGRQANGLRSTLREFYPAALLAFDDLSSGDALEVLRIAPTPVLGASLSRSKIAAALRRGGRQRRVDERAAEIQAALRSEQLEAPAAVASAMGISVAASVAVLAEMVTQIGHLAEELSSNFEAHPDAEVVRSLPGLGTILGARVLGEFGDEPNRYASAKSRKNYAGTSPITRASGTKKTVLARHVRNCRLADAIYLWAFASLSASPGARAYYDARRAAGDGHHQALRALGNRLVGILHGCLTHHAAYDESIAWGHRPENELATAA

SEQ ID NO: 267459 - protein, 414 aa, unidentified
MDVLHERCAALDIGKKDLKACVRTPSPKSRRSRRQEVRTFATTTNALLELRDWLLAEQVSLVVMEATGDYWRGAFYLLEDCLNVILVNAAHAKGLPGRKTDVSDAAWLCQMGECGLLKASFVPPEPIRHLRDLTRYRATLATERTREAQRLEKELEDAGIKLSTVATDILGKSGRAMLAALIDGERDVHTLAELARGKMRPKIPALVEALTGDFGAHHAFLCRLHLERIDQLSASILQLSERIEAEMRPFAAQLERLATIPGVGQSTAQVIIAETGGDMTRFRTAAHLASWAGVCPGQHESAGKRKSGKTRHGNRWLAGALGTAAMAAARTKDTTYLGARYQRLVPRLGKQKALVAVGHSILTAVWHVLSADVDYHDLGGDYFIRLDPERATRRAVKQLNALGYTVRLDPIQAA

SEQ ID NO: 267460 - protein, 348 aa, unidentified
MVTLGVDAHKRTHTVVAVDEPGRELGQRTIAATSDGHLEALSWAEQWSQRRWALEDCAHLTRQLKIDLLVAGESVVKVPPKMMAGVRRSARERGKSDPIDARAVAQAALREPDLPVARLDGPARELRLLVDHREDLVGERTRIMRRLRWHLHQLAPGQEPPPRSLSRHVVLNELAIRLATDSRPVARLARSLVERLRLLKAEIDALEREIAKLVEDAAPKLRALSGCGPLTTAKLIGEVGGIGRFRSRAAFAMHNGTAPVPVWSGNTARFRLNRGGNRQINVALHRIAITQMQRPGPAQDYIARQRSAGKTKLEAIRALRRYISDEVYRRMVLDAASAVPAAALPVAA

SEQ ID NO: 267461 - protein, 413 aa, unidentified
MSVTDPVEPARPTAGVDWANTEHAISIVDHDGEQIDRFPIAHDAAGLRALVRRLLSAGVGEVGIERPDGPVVDALRQGGLVVYVIPPGQLRNLRSRYGSAGNKDDRFDAYVLADVVRTDRRRLRPLLSDQPGTTALRQTVRARRNLVAHRVAVANQLRAHLQICLPGAVGLFADIDSPISLQFLERFASQDRADWLSAKRWATWLSSVSYSGRTIPDTFHTRLTQAPRGTSGPAADTAAVVTAAFVAVLRTLGAQIEALAASITGQLDLHPDAPIFTSLPRSGRVRAARLLAEIGDARGRFPTADSLACLGGVAPSTRQSGKTKAVTFRWGADKQLRDALCDFAGDSVKANLWAADLYRQARDRGHDHPHSVRILARAWVNIIWACWTTNTPYDPDRHGALQRLLNQDQPMAA

SEQ ID NO: 267462 - protein, 417 aa, unidentified
MDSDKEIVCGADIHRDFLIATMISRSGLKLQERFSMNQDGLLAFRSWILTHRCQRLAVESTGGFWYPIFIILEGHVEFILANAYQIRNIEHKKTDKLDSERIAIYCLNNLITPSRIYPKDYRDLRSITRAREALVNARSKVKNQIHQLLSTCCIKLSSVISDSFGKSGRYIIDRLLEGKTIDQIISGIPSKRVQKKEDKLREAIRNGIDPVQVFLIKANLDVIDDISKKIKILEAEIAIKVKPFEEDLKIALSLPGVGFISAATIIAEMGDYKDFSSADKMAKYFGIVPSVFQSAGKLRTGKITKTGSKHMRRILVEVAKAISKTKKNSRLKRFFQRILARCGKKNIAAVALARKVLCILYHLLMNHENYQEPEVKKTKPRIPSSVSPISMMDIDEMIKIISQAGYFVEKDLKEGCG

SEQ ID NO: 267463 - protein, 391 aa, unidentified
MSMYFVGIDISKYKHDCCIISAADQKVVSKVTIKNNKTGFDELLTIINSLSNPEDIRIGFESTAHYALNLELFLESSLLTFMEVNPVLISEYKKSKTLRRTKTDSVDCESIARWLMTVEYKPHSKGFYHAYSLKSLTRLRDKLIRQRSFYLVKITNVLDHTFPEFKSFFNERFSKTALYLLENYGSAEKMARMNSASYEKLRSLSRGKFSPQQFLKLKELAANTVGVNNSIFDVELNSLLSLYKSLAKEIDTIEKEINKLIEDVHPHYMSIPGIGSLSAAVIYSEYGDISNFSNPGQMLAFAGIEPSVNDSGTESHGGRMVKRGSSQLRYTLINCCLPLIRFDMTFATYYSKKRGEGKPHRVAITHVAKKLIRVIYALERQDIDFNTQKLH

SEQ ID NO: 267464 - protein, 339 aa, unidentified
MNATPVGIDIAKSVFQVHYVAPETGEIVNKQIKRSQFLEYFANRAPCMIGMEACGSAHHWARQLMQMGHQVKLMPAKFVKAFNVGNKNDAMDAQAIWLAVQQPRKAVAVKSEMQQAVLMLHRQREQLVKFRTMQINGLRGMLAEFGEVMGKGRTAMIKAVQDALARAEARLLKLLIDTLREQWARVNKLDEEIATIERRLREWKKDDKAVQAVIEIPGVGLLTATAAVAMMGDPKAFKSGREFAAWAGLVPKQTGTGGKVSLHGISKRGDTYLRTLLIHGARSVLTNAKEPGPWVEGMKKRRPSNVVVVALANKMARTIWTVLAHDRPYRKDHVSVKPA

SEQ ID NO: 267465 - protein, 456 aa, unidentified
MNFEKTDANPYNRNVRDQQKLSTNQKYEEAPNMNFTQNDKIEQIKDETLVVGVDIGKENNYARALDNRGRELKKHIKFANTREGFRAFDKWVSEVSLANDKTDVIVGFEPTGHYWFSFGDHCKKLGHKLAIVNPMHVKRTKELDDNSPTKNDKKDPKTIAMLVKDGRYREVYIPEDIYQELREAVYEKERLTGLVVAINNQVIRWLDIRFPEFTKVFSKWHGHAALMALKNFPTPEKVLKAGVDNIVSKWKEEISRAVGRKHAEKLVKAAEESIGRTTGSISSEVSLKNLIDQYELIMRQIKEQEALMLELLLRVPNADKLLGIKGVGLIAVATFVSEVGDIIRFESPKQIIKLAGMNLKEDSSGKHKGKTRLSKRGRKRLRHSLFKAMITVLAKNTEFKAIHRRNITREINPLSKMQSIFALCGKLIRIFYAILSKGTEYDPNKLMIEIPSMKAA

SEQ ID NO: 267466 - protein, 426 aa, unidentified
MLNSQINKIQAITSDTLIVGVDIAKNIQWAQFINFRGIEVSKHICFENNYSGFNSIMEKIEEIKSKNNFLSVIVGMEPTGHYWKTFATFLHNNGIKVVQVNPYHTKKAKELDDNSQTKSDKKDALVIAKLIKDGRYSAIYFPEGEYANLRNLSNTRLEVSRLLNICKNRIHACVDEYFPEFETVFKSFIKGKVALHILKRIPFPTDILGLALEDIISVIREAAKKSVGKKKAEELIRAAKVSIGVKVGLEGARIRLNNLLEEYELCHNQLEKIEKEMVQELEKTGYKDILTSIPGIGIISAASFIGEIGDPKRFSNPQQIIRLAGYNLVEDSSGKHKSKTMISKRGRKILRTILYKISLIVVCKNQEIKLLYKYLITRKENPLKKKQALIVISGKMVKIMYSLIKKEEVYDKEKVLGIYRKQQIVA

SEQ ID NO: 267467 - protein, 323 aa, unidentified
MSQPNLQCMGIDVAKLSLDIATTDTIEPFTVGNDEDGFAVITDKLKHTKINLILMEATGGLEAAIACKLQSEGYDVVVINPRQARDFARSMGYLAKTDKLDAAMLAQLALVIDRHPDRSRYIRHLPDEARAVLAAMVVRRRQLNHMLVAERNRLYPSHPQSRKSIDNIIDALQNELDRINEQMKQHMTAFFQEQARLIGSVKGVGDITVASLIAELPEQGKLNQREISALTGVAPLNRDSGKMRGKRTTFGGRAGVRATLNMAALVATQFNPAIKLFYQRLLAAGKPKKLALVACMRKLITILNTMLRKGEEWNASFQSQVIS

SEQ ID NO: 267468 - protein, 485 aa, unidentified
MCSGRPRSVYGVTSLCVSLVVEGTVVCPREPWTVAVEHACQSLFLIRPPRNTHPSTGSNPVTPGGRDGKVRCVMEVLHPRCAGIDVSKKDAKVCVRIQGSTRRKTSSTVTTWGSMTNQILALKDHLLGAKVTVVVMESTSDYWRPFYYLLEDDFEVMLVNARDVRSLPGRKTDVSHAAWLADLGAHGLVRASFVPPEPIRRLRDLTRTRTHITRERTREIQRLEKLLEDSGIKLSSVASDITGVSGRLMLQSLIDHQGNSDPAAIADLAKRRMRSKIPVLTEALNGHFTEHHAFMTRLFLDRIDAHTKDIELLSQRIDELMTPFLPARALLESIPGFSQVLAEIFVAETGGEMRQFPTAAHLASWAGVSPGSNESAGRVKSTKTRPGNRYLKGALGVAALSQARSKGTYFSAKFRHLAPTRGPMTAIVAVERAMLVAAWHRLSNSEFYRDPGADYYTRRDPARTKARAVKQLEALGYTVTIQQAG

SEQ ID NO: 267469 - protein, 348 aa, unidentified
MTITIIGLDTAKTVFQVHGVDESGRAALKRKLHRSELVAFFEQQPPCAVFLEACGAGHHWGRLLSGLGHEVKLIAPEAVRPFVKKGKKNDAADAAALCVAGSRPETRFVPIKSVEQQAVLTLHAARSLLVKQATMLTNALRGLAAEFGLTVPKGMHKLEMLMTLVSSDESIPEAGKQVLAELHAHGCAVVERLATLEEQIVRHARQDATARRLATIPGIGPITASLIAATVGDNIGAFESARHFAAWLGLVPRQHSTGGRTRLGRITKAGNAEIRRLLVLGATSMVWRAARWNSRAGLWLQGVLAQRPVRLVTVALANKMARIAWALMTRKQVYQAHGHALTAAEAAV

SEQ ID NO: 267470 - protein, 307 aa, unidentified
MATDIGIDVSKHTLDWCPGPSGKIQQTRNEPRCIASLVQRVIAVEPERIIVESTGGYERKLVLKLAEANLPVIVVNPRRVRSFGEGMGMLAKTDAIDAKLLALYGEKVQPPIRPILQGRDRLLADLVARRRQLIATVVSEKNRRETVARPVQRSIAAVLRVLEREIKRIDQQIDQSIEEDADRSELSELLQTTPGIGPGVTRTLLVDLPELGHLGRREIAALVGVAPFAKDSGQYRGRRSIRGGRASVRTALYLAAMTASRFNPKMREVYQRLRESGKPPKLAFIAVARKLLIALNAIARERRAWQP

SEQ ID NO: 267471 - protein, 341 aa, unidentified
MRRSITHVGLDVHKDSIVVSLADAGLRGSRGEVREYGKIVNTAAAIERLARKLAAKGNELRFCYEAGPCGYGIQRQLSGMGHACDVVAPSLIPRKPGERIKTDRRDAIKLARLHRAGELTPVWVPDQTHEAIRDLVRARLAAARELRRARQQLSSFLPRNSHAYHRTPWTALHRRWLANLKFDQPMHYLVLEDAIAAVEAAQGRRTRLEAQIEAALPAWSLTPVVRALQSLRGVALVSAATLAADLGDVTGFDNPRQLMAYIGLVPSEHSSGRTRRQGGITKAGNSAARRMLIEAAWSYRCPARISREQLLQQEALSKPIRDIAWKAQDRLCRRYRTLARS

SEQ ID NO: 267472 - protein, 322 aa, unidentified
MTRENYVGIDVGKKSLDLAVYGAKKTTTFPNTEEGIEELLLTLQKINSSLIVVETTGGYERPLVVALLSQGFPISVANPTRVRALAKASGKLAKTDAIDAHLIAEYACLMKPQPISSFDEAFLRLQALVKRREQVIGMRTAEKNRLDKSPLFVEEYIERHILQLEEEVALLEKEIQTLAASIPHCREGMELLSTIPGVGFITSVTVLALLPELGTLDNKAIASLAGLAPFNRDSGKKQGKRKIFGGRKRVRRVLYLSTLSAISCNPVIREFYERLIERGKPSKVAITACMRKLLTIMNAMARDNTPWQEFSLPEVEILSSAS

SEQ ID NO: 267473 - protein, 445 aa, unidentified
MEIINPNAAGIDVGSRSHFVAIGQGSGDVREFGVYNEDLTAMAEWLLSNDVKTVAMESTGTYWQSLFAVLQNAGLQVILCNGKFTKNIKGKKTDVQDCQWIQKLHAIGLLSGSFLPDEATEHLRTYCRHRANLLDNAADTTRKMQKYLRLLNLRLDVVVKDVTGLTGLAIIEAICKGEANAEVLASLRHGNCKKSEEEIAKALQTNGRKDYLFALKHEYNMYQGLQSSIKDCDIEIEKMLNEQINNNDDKRQHYIDKKVHKKVNKNSPKNIDINLMSYQYFEGVDLLAIEGVSYSTVLSVMSEVGLEGLKKFETAKQFASWLRLAPNNKISGGKVLSHKVPKGSNRLKIALRNAANAIGNLKDTPLSNFFNRINFRKGRVSAISATARKLAVIIWNMIIKKQPYNNEHGYEFLDQKRKRKVQEMRKLIHKFDIKTDELGLQINSL

SEQ ID NO: 267474 - protein, 318 aa, unidentified
MQTSVVFIGVDVGKFELQVAGSDGDIVAGVLPNNRSSIVGWLKRLPAASVIAMEATGGYQELLARTACERGFEVYVLNPTHVHHYAISLGNRGKTDRLDAAVIAQYIAQHRKKLHRYEPISPELQEIRALQALGSTVVRVGTSLRLSAQRHGCVSSHQKKALASLTAWSEQLEREMIAKIKAQSDWAKTYGLLTGICGIGPITGVALTNLFSRIDFANSDAAVAFCGPDPRPNESGRKVGRRRLSKQGDKAARTLLYNAASSAARTAQFKDYYATLRARGLASTAALVIIARKLLRIAYGVWRTGQPFDPEKLRPATA

SEQ ID NO: 267475 - protein, 314 aa, unidentified
MILPLRCVGIDVSKRMLDIFDDGIGTVERIANAPQPIIEQVARWRCGNVFVVFEATGVYDRELAEALHQAGIRFARINPARARDFARAGGQLAKTDAIDARMLAAFARQMAPAADPPPEPARNTLALLAKRRDQLVQMRAQEKNRRSEARDRAMKESIARVLSYLDGEVEAIEAEIKALIKSEPEISEQARLIRSAPGIGPVACMQLIAQMPELGQVGPKQVAALARLAPLNVDSGSYRGKRAIGGGRKRVRDALYMAALNAVRRDGSFKNFYQRLRAAGKPAKLALIAVARKLLTILNAMLRDRKIFLQPKPS

SEQ ID NO: 267476 - protein, 391 aa, unidentified
MIFVGIDVAKDKHDCFILNSEGTVLADVFTIANNRIGFETLLSRIQSCSQGESKIKVGLEATGHYSYNLLGFLLDSGLATYVINPLHTNLYRKSLSLRRTKTDRIDARTIAMMLMSDVDLKSYSNTAYHNEELKSLTRYRFDKVKERAKLKSSVARLVNILFPELEKLVSSLHIAVVYALLSNYPGASYIANANTEELAEILCTASKGRYTKSKTAEIQVAAGVSIGSKMPAKSMELKHTIALIHELDKEISEVESAIDKITSQMDSPIFTIPGIGRHMGAMILAEVGDFSNFASADKLLAYAGLSPSTYQSGQLQNCYAHMEKRGSRYLRYALFNAAKYVCLWCPTFSAYLEKKRSEGKHYNVAISHAAKKLVRLIFAMQRSGKAFLADY

SEQ ID NO: 267477 - protein, 395 aa, unidentified
MHVTQEGPDGLSRYCPVQAFGRGETANALCSLESRYGSWSNDGGPWRRRWRRYHKDLHVAAVVDALDRVLESRCFATTRHGYQQMLTWMRSFGQLQRIGVEATGTYGAGLLRYMQNAGVEVLEVTTPDTHDRRKRGKNDDLDAQNAAHAAFAGRRTVTPKSRDGMVESLRVLKACRKTAVAARRVALQMIHNTVVCAPDELRETLRRMTRMQLIRTLAAWRPDLTDYRSVVSAYRITLKSLGRRYLELHDEIADLDTMIVAIVDELAPALVARNSIGYGSAAQLLVTAGDNAERLQSEASFAALCGASPVPASSGKTTRHRLNRGGDRAANSALHIIAIGRLRTDPRTKAYIAKRVAEGHSKLEAIRCLKRYIAREVFSLISQRQREINQGRNAA

SEQ ID NO: 267478 - protein, 342 aa, unidentified
MDYYVGLDVSLEATSVCVVDGSGSVIRESKVASEPESLIAWLLGLGLPLCRIGLEAGPLSQWLYAGLREAGLAVELLETRHVRDAFKAMSVKTDRKDARGIAQLMRLGWFRPVHCKSLAAQETRALLTARKLLQAKRHDVEMSLRGILRGFGLKVGKTTPRGFAVRVGELVSDHATLRGIAKGLLAARAVLDREFAVLERQLRAIARGDARARLVMTTPGVGVLTALTFVSAIDDAARFKSSRQVGAHFGLTPKRYQSGEKDVAGRISKIGDRTVRTALYEAANVILTRPVKGSGLKSWATRLARRAGPRKAKVALARKLAVILHRMLTDGTPFEAGQAAKA

SEQ ID NO: 267479 - protein, 343 aa, unidentified
MQTIKTIGLDIAKSVFQIHGVDADGGVVARRQLKRRYVLAFFEKLPPCLIGMEACASAHHWSRQLQALGHTVRLMPPAYVKPYVKRHKNDATDAEAICEAVTRANMRFVPTKTAEQQGGLVLHRTRHLLVRQQTSVINAMRAHLAEFGIVAPVGRRGMEELLRIVGDASDQRLPEVARACLAALGGQLRMLKAQILHFDRMIVAWHRGNETSKRLDELPGVGPALATALVASVADPKAFRSGRDFSAWIGLVPKQSSSGGRQKLGSISKQGDRYLRGLFTAGALAVIRYAKIHGTSRRPWLAALLARRPTKVAAIALANKIARMAWAMMARGERYREPVALAA

SEQ ID NO: 267480 - protein, 346 aa, unidentified
MKNILKQVVGIDVAQKELVVYFGVLNEELSVSMIAYKTFRNQSEGFTNLVEWVDKLRDKSRPVLFVMEATGVYHESLAYFLDTQSFEINIVLPNKIANYFKTLDVKTVTDKTAAETICRFGLGRQLALWKRPEQGFKTMKQLTRERDQIVAERTMAKNQLHAELSEAQPHKKTIERTKQRIDFLDTQENEIRKELEELIKTDKGVKELVKLVCTIPGVGLLTAITVLAETNKFELIKNKRQLASYAGLDVKEKESGTSIKGQPKISKRGNKYLRKAMHLPALTAIRHDERFKAIFDRLVAKHGVKMKAVVAIQRKLLEMIYTIYKTNSPYNKDYLKNNQAMTVIKN

SEQ ID NO: 267481 - protein, 402 aa, unidentified
MNAVGIDVSKGKSMVAIMRPFGEIVSAPFEIKHTASDINSLVELINSVEGESRIVMEHTGRYYEVLAHQLSEANLFVSAINPKLIKDFDNDSLRKVKSDKADAVKIARYALDKWQNLKQYSVMDELRNQLKTMNRQFSFYMKHKTAMKNNLIGILDQTYPGVNTYFDSPARSDGSQKWVDFASTYWHVDCVRKMSLNAFIDHYQNWCKRKKYNFSQSKAEEIYGKAKELVPVLPKDAITKLIIKQAVDQLNSASTTVESLRTLMNETASKLPEYPVVMAMKGVGTSLGPQLMAEIGDVSRFTHKGAITAFAGVDPGVNESGSYEQKNVPTSKRGSSNLRKTLFQVMDALIKTHPQDDPVYQFIDKKRAQGKPYYVYMTAGANKFLRIYYGRVKEYLSSLPES

SEQ ID NO: 267482 - protein, 381 aa, unidentified
MYKRQDCCIISAADQQIISKFTITNDKDGFEQLLTALNSLSNPEDIKIGFESTAHYALNLELFLENAHHSFMEVNPVLIKEYKKSTTLRRTKTDSVDCESIARWLITVEYKPHSKGFYHAYSLKSLTRLRDRLIRQRSFYLVKITNVLDHTFPEFKPFFNERLSKTALYLLENYGSAEKMARMNSASYDKLRCISRGKFSIQQFLRLKELAANTVGVNNSIFDLELNTLLTLYKSLSDEINTLETEIIKLIEEVHPHYMSIPGIGPISAAVIYAEYGDISNFSNPGQMLAFAGIEPGINDSGTESHGGRMVKHGSSQLRYVLLNACLPLIRFDLTFATYYEKKRAEGKKHRVAITHVAKKLIRVIYALERQDVDFNAQKLR

SEQ ID NO: 267483 - protein, 414 aa, unidentified
MKLFVGIDVSSEELEACFMDPEGDTLETLKVENNLHGASHLRDRIVAAADKLPASEIHIGLEATSVYSWHPAMYLHEDASLQERKTKVFTINPKLINKFREAYADMDKTDRIDAWIIAERLRFGRLTTTIVMQEQYIALQRLTRMRYHLVHNLTREKQYFLQNLFYKCNAFRSEVDSSVFGHAIMEMLSEKFSLDEIADMEVADLADYLKEKGKNRFPDPEHVARCIQKAARASYRLSKVVEDSIDLVLGTSIQAIRSIQSQLKELDKAIERILAGIPGAQCLRSIPGIDRVYAAGILAEIGDIERFSDQAAVAKYAGLTWRKHQSGGFEAEDTKRIRSGNRFLRYYLVEAANSVKNRDPEFGEYYRKKYNEVPKHQHKRALVLTARKLVRLVDVLLRNGQLYTPGRKVKPAEH

SEQ ID NO: 267484 - protein, 382 aa, unidentified
MHYRTSSQHTDETVIHAALELSKNSWLLAIEATEHNRPSLHHLKGGDSSALLAKLHTACEQFECRTGNRAKIVLCYEAGYDGFWLARLLENHGIDCLVVDPASLQVDRRARRVKTDRIDVEAILRTVIAWRRGERHVCSLVHVPSRDEEDLRRSHRERDRLVKERTAHTNRIKGLLFTQGIRDINLRRRRKPLVIDFADLVTGDGRCIPPRLKSEVERELQRLALVDEQLAIAEAERDQVAKQCEDSEKKRRQLALLRGVGETGAAILVREVFYRTFSNRRQVGSYLGLAPCPYDSGSSTRSHGISKAGNARARSTMIELAWFWLRYQPDSQLTLWFERRVTGQSKRIRRIMIVALARKLAIAFWRYVETGLVPSGAIVAKV

SEQ ID NO: 267485 - protein, 346 aa, unidentified
MTIGIDVGDRFSHYCALDDAGGVVATGRISTTAGAFELEFASMPRKTIAIEAGMHSPWISRLVTKLGHEVIVANPRKLRLIYENQRKNDRVDAEYLARVAGLDRKLLGAIEHRSELGQSHLSLIRSRDTLVRSRVRLIQHVRAAIKSIGVQVPSYTAHAFHKQIGKVLPELLRDALLPLVETIEQLTARIRELDRRIERLAEDRYPETAVLTQVHGVGLLTALAFMLTIEDARRFARSRSVGAWLGLTPGQHDSGESQPQQRITKEGDHYLRRLLVGSAQYILGPFGADCDLRRYGMAIAARGGKNARKRAAVAVARKLAVLLHHLWRTLDDYEPFHNSESRRRAA

SEQ ID NO: 267486 - protein, 339 aa, unidentified
MMYGAIDLHLRYSEIRVVEADGRVVRERRVVTSRATLTAAFAGLGVLRVLLETGTESEWVAQTLEAAGHAVVVADPNYAPMYGEVRRRVKTDRRDVAALAEANRRGWYRATQRRSRAQRTLQQILRSRRQLVAMRTGSISVVRALLRQEGYRLPSGSAAQVPARLARVPLPDELAATLAPLRQVIDTVTRELAAIDTRVRTTAAADPVVTRLQTVPGVGPVVALTFRATLDEVTRFQAAGQVSAFLGLVPREDSSAERRHRGHITKAGSGELRSLLIQAAWACWKSRGSGTLRAWAERLAGRRGRRIAVVALARRLSRILYAVWRDGTTFDGARVAAGA

SEQ ID NO: 267487 - protein, 405 aa, unidentified
MNAVGIDASKGKSMVTILRPFGEIVSSPHEVKHTSDQIDDLIREIRSLEGESRIVMEYTGRYHEPMARWLSDAGLFVSLVNPKLIKDFDNDSLRKVKTDKADSVKIARYTLDKWHKLKQYGAMDELRNQLKTMNRQFGYYTKLKTAMKNNLISLLDQTFPGANTFFDSPARSDGSQKWVDFVDTYWHVDRIRSMSLVAFTEHYQKWCKRKGYNFQPDKPAEIYESVRNIIPVLPKDEVTKSIVRQAVNQVNTTSAAVEELRTRMNDIASQLPEYPVVLAMKGVGTSLGPQLMAEIGDVTRFEHKGALTAFAGVDPGKNDSGTYSQKSVRTSKRGSAPLRKTLFQVMDSLIKTMPQDDPVYMFMDKKRSQGKPYYVYMTAGANKFLRIYYGRVKEYLAALSEASEN

SEQ ID NO: 267488 - protein, 340 aa, unidentified
MNKSHFCVGIDVGKDELVVAIEPGRSRQGRPRVFGTSTAEVRRLGLWILKQAGERSESGSCGQVHIGMEATGVYSRSVAAVLSRYEQFTVSVINPAQIKAFGRAMLTRTKTDQVDAGVIREFVRSQSPSAWTPPQPMREQLSALVAQADAIQQEIQQWKNRQHAQQHHGNTPKTVTRSTATIIRWLERERQRLDDAINQLCETDTALTDDMALLTTISGVATRSAAQILAYGGDSLITRSRRQLDAHAGLVPAERQSGTSLRGKSHLAKQGNARLRRALYMPTLVAVQFNPVLKPFYQRLLEKGKAKKVALTACMRKLLNIIRAMLIKRTAFNPNYQPLT

SEQ ID NO: 267489 - protein, 390 aa, unidentified
MKKSTTAKKTRQALTKNDQETIRKKAAKQRLTIGLDLGDRSSRYCILDEAGEVVSENSVPTTKGGLDSLFGKMPSSRVALEVGTHSPWVSRQLAGLGHEVIVANPYKVKLITQSVRKNDRVDAQKLARLARVDPKLLSPIRHRSAEGQADLAVIRARAELVEVRTGLINCVRGLVKPMGERLKPCDADQVKESMAESLSETAQVVVGPLLKSVETIREQIGVYDRKIEEIAQRYPEVELLTQVYGVGTLIGLTYILTIEDAQRFQHSRDVGAFLGIQPKQRDSGDSQPELGISKTGDRLLRSYLVQAAHCMLRKGAPDSDLRAWGLSKAGGGKRTKRRALVGMARKLAVLLHRLWVTGEVYEPLYNRKAAQAAARGKAKAAARGKAKAAA

SEQ ID NO: 267490 - protein, 470 aa, unidentified
MPERESKIISHQAKKQSAKAKEFTVADLPRHLRHINVNAAGIDIGSDRHLVAVPEGRDLVSVREFKAFTADLHALADWLSQCGVTTVALESTGVYWIPLYEILEQRGFEVYLVDARRVKNVSGRKSDVLDCQWTQELHTYGLLVQAFRPPEEVCVLRSYLRQKEMLVQAAAEHIQHMQKALQQMNLLLHNVVSDITGVTGLKILKAIIAGERNAQVLAALRDPHCQNSVETIAKSLVGNYREEHLFALRQALELYETYQVKIADCDAAIAAYLLRQDHHTDDEPPAPQKPIPARNRLRAGLDVRDQLYKMSGVDLFRVSGLAADTLLTLAGEVGFDMSPWQSVKHFTSWLALCPGTKQSGKRVLSRKTKPSANRAAQAFRMAAVTQARAKTALGAFYRRIRGRSGGREAVTATAHKIARIYYSLLKHGSAFVEQGEAAYEQQFKERRLKALKKQATALGYQLSPLITTSF

SEQ ID NO: 267491 - protein, 334 aa, unidentified
MDKVTTVGIDLAKSVFSLHGVDGAGRVMLRRTVRRDQLIQTVAALPPCLIGMEACSGAHEWGRRFQGLGHTVKLMAPKFVVPYRKSGKNDGNDAEAICEAVMRPNMRFVPVKSAEQQALLVLHRVRQGFIVERTATINRMRGVLCEFGVVLPLRSKTVRRQAAQAAEAVPELARRAIADLLEQLRLLDERIDGYDREIEAQARLSEPAQRLMEIRGIGATTALAIVATVGNAREFKNGRQFAAWIGLVPGQYSTGGKTRLGHISKRGDAYLRNLLVQGARSVLHSASGHQDRMSRWILELQPRRGYYRTLVAIANKNARIAWALLAKNESLRPA

SEQ ID NO: 267492 - protein, 409 aa, unidentified
MDPLLERCAGLDIHQRTVVATVRVPAADGTRASTTQTFGTMTVDLLALRDWLQAHRVTQVAMESTGVYWRPVYYVLEDGFTLLLVNMQLLSHVPGRKTDVQDSAWLAQLLECGLLRGSLVPPAALRDLRDLTRYRKRQVEDRAQEVNRLHRVLQDAGLKLASVLSDVLGVSGRAILDALLEGAPDPVALAELARGRLRAKLPALREALRGRYRGHHAFLITQILAKIDFLEEAIETLTTEIDRQLVPFAPGVTALTTIPGVGRRTAETILVETGADMARFATAAHLCSWAAMCPGQDESAGKRRTGKTRAGNRYLRGALIESGLAATRAKGTALQARYARVKRHRGHKKAVVAVGHQILEIAYYVMRDGVTYRELGADYFARRHRERSTRRHVKQLEALGYRVTLDTAA

SEQ ID NO: 267493 - protein, 372 aa, unidentified
MSNTVPSITVPSITVPSITVPSTGVIVGVDTHKLTYAAVAISALGARLGAITIPVNGKGYRALKTWAHSMGPVRAFGIEGTGSYGAGLSRFLCEHGHTVLEVNRPNRQLRHQKGKDDPLDAESAARAVLAGQATALPKSGTSTVEMIRHFKVARDTAVKGRTQAMQTLKAIIVSSPHALREQLDCLAGKMTLIRHVAALRPGPLTSTTASAKTSLRAIARRWLALDAEIKGHDAHLEQMTQQLAPELVQAHGMGAGTAAEMLLLVGDNPERIRSEGALAKLCGACPIPASSGKTSRHRLNRGGNRQANAALYRVVIVRMRGHQPTLDYIRRRTAEGKSKPEIIRCLKRFVAREIFGYLCRPPNAAPPGQMAA

SEQ ID NO: 267494 - protein, 354 aa, unidentified
MTLTTTHPIRTVTIGVDTHQLVHHAAAVDQDGRMLGAREFPADRNGYQELLDWAASFGIINAFGVECTGSYGAGLTRHLLAAGIDVVEVNRGHAQVRHRVGKSDAVDAEAAVRKVLSGECSDPAKDTTGAVEAIRNLHLVRDSAIKARSAACVQLRDVLLTAPDHLRTRLTAKTLEGKATQARALRPDLNRIHEPEQAVKYALRELGRRIYELTAEINEVDKHLTQLVSAVAPNTLALPQVGPVSVAQLLITAGENFDRFRNEAAFARLCGVAPIPVSSGKSHRMRLHRGGNRQANRVIYLITICRLRYDPRSQAYRDRKRAQGHSSADAIRCLKRFIAREIYYSLKRDLSPAG

SEQ ID NO: 267495 - protein, 362 aa, unidentified
MESTPLIAFDQHAATTVAAVLLPGQRTPALHTLTSDSPTILRFVTRLQREVGAVHCCYEAGPCGFELQRAMRAQGIACEVIAPALIPRRPGDRVKTDRRDAGQLAVLYRAGALTAIHIPTEQEEAARDLLRCREDIRADLLRARHRLSKFLLRHGRRFTGTKKAWSKRHDTWVRAQTWPLPALEQTHRAYLRTVDEAVARLQAVEHDLRALLTLEPLRPRITRLRCFRGIDDLTALTIAAELGDARRFATAPSLMAFVGLIPSEHSSGTKQARGAITKTGNAHLRRVLVEAAWHYRHHPFIGHTLRVRQQGAPPDTLARAWAAQQRLHRRYQRLAARGKPKQHVVTAVARELTGFIWATLTQ

SEQ ID NO: 267496 - protein, 448 aa, unidentified
MRVDDVRGGRREREAQELLERGPREQHRMPAAAVEGRHDDGRAVRARRGDDRGHRSQLHARMIHRPQQARVDPLGKAAEPALHGGEHAARRIGIDDHADKLTIALFIGAQKQPAKVWEVAPTDAGLRQLVRWLKDLDGPVHCVYEAGPCGYELYRLLVGKKIDCVVAAPSLTTRKPGERIKTNRRDARKLAELHRAGMLTLITVPDRRQESVRDLLRARGDVRKNLLSARHRLSKFLLRQGRRYRDGSTWKAGHWRWIRSQKMTEPYDQIVLDHYIEALEALQEQLKTLDGHVQDAARQPHYAPMVAQLCVLRGIDVLSAMIILAELGDLRRFTSAPQLMAAVGLVPSEYSTGDKTRRFGITKTGNAHVRHVLVQAGWHYQRAPRAGSSVRKRRAGQPERIVAVARRADERLHRKYQRMIGRGRRSTVAVTAVARELAGFIWALGQQR

SEQ ID NO: 267497 - protein, 371 aa, unidentified
MNTVIHIGIDVHKDSYSLSAFNFSSNRNFGQSRIDSKSNLVIKYVERLRKEHQGCEFVCGYEAGPTGFGLYRDLERAGIPCVIMAPTTLPKASGNRVKNDRLDAQELARHLAFGTYSAVQVPTVQDEAVKNFTRLRNTRKESLKKAKQNLLSFLLRMGRTFSEGKSYWTLLHFKWLKGQKFDDMVDQETFDEYLQEVHDQQEKVERYNQRIEELAERDEYREKVAKLCCFRGIETHTALSLVSEIGDFSRFATAQQFSAFLGLVPSEESSGQRERRGTITKAGNTRLRMLLIEGAKSTLRASAFGKKSKRLLARQKGNDAELIAYADRANRRLHRVYGRLTTRGVHHNKATVAVARELSCFVWGMMNNRID

SEQ ID NO: 267498 - protein, 466 aa, unidentified
MKPFYMGIDVSKGYADFMMINSKKQSVAQAFQLDDTFEGHQTLYNTLGSFLAKHDDAILFAGMESTGGYENNWYHSLVQFQGSLNIQTARLNPLGVMHNSKAKLKKNTTDKISAQNIAEYLVAHPEKVVYQQQDTLAGLRKQWGFIRMLTKQCTQFLNQLNSLLYSTYPELLSYCQDGVPNWALKLLTKYPSAANLKKARTATVAKIPYVSIKKAQELIAKAKRSVASATDLTTQQLVVATVQQILHLRKTIAGQTDLMLQECPIPEIELLKTFPGISDVSAIGLIIEIQTVKRFASAKKLASFFGVHPVYKISGDGTGGFRMSKQGRIAPRQILYMASLSAIRYNPLIREIYEKHKRQGKHSRAAMGICMHKILRILYGMLKHNQPFNPHVDLANRLRSVPMQNDSAIDKTSRRLQGYDRTAPVSRRQRIKRLERERSHNVNDTKSGITAPAPLADIIAEILPQL

SEQ ID NO: 267499 - protein, 369 aa, unidentified
MKKHTSKKQAAATESPKAAREGFARFVGVDLGDKNCEVCVLDGEGEIQERVRLRMKESELESYFQGLGRSRVAMEAGGQSRWAAAVIERCGHETYVANSRKVPYIHASDDKNDPGDAYKLAELVYLKPQLLHPIQHRSQEAQADLSWIRAREALVESRTQLVNTVRGMCKGFGERLGRCSVESFTAKRAAEIPEGIRGAVAPLLETIDHLNEQIRYYDGMEAYIARERYPKYRLLTQVGGVGVHTALMYMVTIGDAERFAKSRAVGCYLGMRPRQKDSGESQPQLGITKAGDVYLRKTLVNCAHYILGVHGPDSDLRRFGLRICERGGKNGKKRAVIAVARKLSVLLHRLWVSGEVYEPLRNSGRAMAA

SEQ ID NO: 267500 - protein, 406 aa, unidentified
MKRAKKRGPGPSHLLMTPDHAGNVVGIDPHKRTLTATVVDPRGGILASAHFRVSGEGHRELEAWARQFGPIARWGVEGSASWGRHTAVFLTDRGYDVRDVCANRTPRSDRARQRGKSDTLDSERIAREVLAHSLLPKAFKRAGQEQGPDEQHQLLVLWHNRRRSILTSRQHLVNEAEHLLCELPLALREQLPDAKAVRPRLTALARRNRRRRYDAPTKLRLQLLDGYHAQIQALDREEKEVVAHLRELVQASGSTLGELCGLDTRSVAELLVETGDPRRFTEGGFARFNASAPLPASTAEGPGEPVRHRYNPGGNRRVNAVLHRMAVTQLRCEPRAQRIYANARATGHTKKEARRVLKRHLSDVIYRRMIHDLAASHPAQPLLAAEPRAAAAQSRVARQGRTQRAA

SEQ ID NO: 267501 - protein, 311 aa, unidentified
MRITIGIDISKDTLDAYQLPDNQHIQVANDQTGHKTLVRWIGKYDLPLVVFEATGAYHRNLEAVLTASDTAFAKVNPLQARRFAEATGRLAKTDRVDAIMLAKMGAVLELKGHKPRSEALLILKELITARRALMKDKVAAKTRLQTTTQTLLKNQINARLRQIDIQIRQVDVAIAQKIAQDEALSHKLGILISIPGIAEATAFSMLIEMPELGTLEGKQAASLAGLAPFSRQSGKWQGKERIQGGRAFLRRAIYMPALVATRYNPDLKAKYDQLIGAGRPGKVAVIAIMRKLLIMANALLRDGRKWSEIRP

SEQ ID NO: 267502 - protein, 359 aa, unidentified
MAESQSSKATVVGGVDTHKELHVAAIVDQHNRVLGSEYFPTTRHGYKTMLKWMRAFGQLQRVGVECTGSYGAGLLRYLQRAEVEVLEVTAPDKTDRRKRGKDDTMDAENAAHAAFANIRTVTPKSRDGMVESLRVLIVCRKSAVAARRISLQMIQMNIVSAPDELREVLRKMTRMQLIRTLAAWRPDVTDYRNVTSAYRIAFKSLARRYLELHDEIADLDVMIASIVDELAPELIAKNSIGYQSASQLLITAGDNPSRLKSEASFAALCGASPIPASSGQTNRHRLNRGGDRAANSALHIIAIGRLRTEQRTRDYMEKRQADGLSKLEAIRCLKRYIAREVYFILRNRNRAINQTQIAT

SEQ ID NO: 267503 - protein, 346 aa, unidentified
MMHVGLDLSRKRLDVQLLNEQGDRVQRLGAIPTADGLQDLVSQVATYRQPVHAAIESMTGARFVHDQLELAGWDVAIADGVKVKGLAPLACKTDKIDAWVLAELSRRDLVPAIWLPDPGVRAERERARWRLHLVHHRTALKNRIHQTLITFGHPCPVSDLFSVGGRKLLAGFALPEPWLGSVTAALQLIDDLNRQIADRERELRELGADHPYIPLLRTVPGIGWVLSYTIAAEIGDIHRFPSATNLIGYTGLCPSVRQSGEHDHRGPLTKHGPRFLRWALIEAAQHAARTPAYRTRYQTMKRRLGRQRGAKVATVDVARRLTNAIWHMLIRNQPFAPGGAAVALTA

SEQ ID NO: 267504 - protein, 394 aa, unidentified
MRFVGIDIASETHVVAVVDETDAVLVRPTKFTEDAPGYDRLFGLLGTPADTLVALEATGHYWKNLFAVLVTRGFAVALLNPLRTRRFADEELARTKTDAIDARGIARFAAQKRPAPTRLPDRATEELRELVRLRDRLVQDFGDRLRQLHRLVDLGFPEFTRHVKSLDSELATAILHDYPTAAAFRNVSARRLAGLRYDGRHKVGDDLARALLAAATRSVGQHHGAAYRLQVRYACEDLDLLRRRLRTLERDIERTLDDHEIGPLLTTIEGIGPQTAARLIAELGNPAEFRSAAALASYVGVIPAIRQSGTWTSSRAGLHPLGHAALRAALWMPVLTAVRKNPWLRAYYQRLTARGKLPKVALIAAMRKLLIAVYTVAKTRRPFVSQRAPQEARA

SEQ ID NO: 267505 - protein, 438 aa, unidentified
MSNKVFFNLDDLFISVGIDIGADFSWMSIALPNQQFVGKPYKILHNSIDSLTTAVSKIKEAEELYSLESRIFLESTGIYHYPLFCYLRDKGFNCSVINPIITKNSTNINIRKVHNDRFDSKKAALVGLKPDLKVSLMPSDLALNCRNLCREYYDLMDNRSAYVNKLQGELRMAFPQYLGIFSKVTINTSLTLLETYTSPSAFIEADKQEIIDSIKSTARFGLTYAQNKYNAIIRAANEANEFGYIIDSNIKRIRLYISFIRKYDEEINSILEAMHELVNANEDTNFVKQIHLIETFKGAGFLSAVSLMGEIGDFSAFSKPKQLFAYFGLDPAVKQPGKFEGSKIQMSKRGSAVARRVIHTLTLQSIGTSRTGEAKNPVLRDYYRKKCESKPKLVAMGAVSHKVCNMIFAILRDNKPFEIITPQEHIQQYNAAKYDIAA

SEQ ID NO: 267506 - protein, 351 aa, unidentified
MLVIGCDYHPGVQHIAWSDTETGECGERQLRHSDGEAEKFYRDLKAKGVDVRMGMEATGHARWLERLLAELKFELWVGDPAQIKATRVRKQKNDRQDAEHILKLMMEDRFPRVWVPGAENRDLRQLLWHRHRLVQMRTRVMNQLQAVALNEGVRRKKGLWSQSGRAQLESFPLAPWATRRRQELLQLLDQLTPCIAELTTAIEHEAEQSSDAQRLMTHPGVGPITALAYVLIIGSPERFGCGKQIGSYLGLIPCEDSSAGRQRLGHISKQGNTLLRFLLVEAAQAAVRGDADWRRQFLHLAMRRERKIAKVAMARKLAVRLYWMWRKGWDYQQLLKFGSHVGQPVTGHGVK

SEQ ID NO: 267507 - protein, 417 aa, unidentified
MKKDSNSLKQSEAQSKRRKSGVVVERKPQDVMAELVARLAEQLDVTIVPAVEETKGDRDRLRPNLDRLTVGVDLGDQWSNYCILGLGGETLAEGQFRTRKQETAEFFQGLATSRVVVEVGTHSAWVREIIAGFGHEVLVANPRLMEGSKRRRRKNDRIDAEKLARLGRIDPKSLHPIQHRSTEVREDLLVLRAREALVESRTKLISCVRGLVKSMGARVSKCSSVAFSQKAAAQIPEEVQETLQPLLRLIATLNDEIKTFDQRIEKLAADKYMHTQLLRQVSGVGPVTALAYVLTLETPKRFARSRDVGPYLGLVPKQEDSGDIQPQLGISKAGDRMLRRLLVGSAHYILGPFGPDTDLRRFGMRLCERGGKNAKKRAAVAVARKLAVLLHRLWASGEVYEPLRQSTLTKIPHDVAA

SEQ ID NO: 267508 - protein, 414 aa, unidentified
MDILHERCAGLDISKKDAKACLRTPSAKRRGSFTTETTTWGSTTNAVLALREHLLASQVTLVVIEATSDYWKPFYYVLSEGLNVILVNARQVKNLPGRKTDVSDAAWLAQLGAHGLVRPSFVPPQPVRELRDLTRARTTATRERGRVVQRLEKLLEDTGVKLSAVASDIMGVSGRAMLEALISGEADPQILADLAKRKLRNKIPELTEALTGRFREHHAFLARLHLDQYDQLTKMIDRLTGRIEAAMEPFRGALDLLDTIPGINRATAEVVIAETGGDMTRFASAKHLASWAGVCPGHHESAGRTKSTKVRPGNPYLKGALGLAAFGAVRTKNTYLQARYKRLTARRGPLRALVAVEHSIITAVWHMLTDNVAYQELGGTYFTQRDPERTARRAVTQLNQLGYTVTLNPRENTA

SEQ ID NO: 267509 - protein, 354 aa, unidentified
MNIKYIGMDVHKEAISIAVMNGDGKLVMESIIETKAITILQFIQGLRGDLHVTFEEGTWAAWLYDLLKPHVTELVVCDPRKNALLKEGNKSDKIDAHKLADLLRGGYLRSVYHGENGLRTLKELARSYLTISKDLTRVMNRVKALYRSWGIFCGGQQVYAPHHRAEWLNKIGEAGVRRRAEFFYQQLDALRALRQAVRRDLLAESRKHGATKLLRQIPYIGPIRAALLIALIQTPHRFRTKRQLWTYSGLAIETRDSAQYRYVAGQLQRSKKPQQLRGLNQNHNHDMKAIFKSAATMASSREGGFQAFYQGLLMKGMEPAMARLTLARKIAAITLILWKKGAHFDAEQLKPQAA

SEQ ID NO: 267510 - protein, 310 aa, unidentified
MENITVGIEVAKDRLDVAVRPSGEIFTAERTAAGIEQLVARLLQLAPTIVALEATGGYETIAAAAFASAGLPVVVVNPAQSRAFAKAIGQRAKTDPIDAAVIAHFVEATKPDVRPLPDEETRLLADLVARRRQIIEMIGAERQREKRATAKNLKKSIARLIKALEKEMTSADADIGGAVRASPVWREKEDLLASVPGVGPWIARTLIAELPELGRLNRKEIAALAGLAPFARQSGQWRGKSFIGGGRTSVRTALFMGAMVAKIHNPVLKVFFDRLVAAGKPKMVALIAVARKLLIILNAILRDQKPWQTA

SEQ ID NO: 267511 - protein, 405 aa, unidentified
MPVHAAPVTPSTIVVAVDVGKTTASVSATDTGRHRLFGPVDIAMTRSDLRLLVDRLTQSFPPSPQVKIGIEAAGHYHRPMLDYPGWPAGWEILELNPARVGEQRRIHGRRRIKTDAIDLDAITDLLLTGQGQPVTHPDRVLGELTAWATHRMRRVTTRTATKNQLLGQLDRAFPGLTRALPDVLGTRIGRLVAAEFSDPARLATLGSSRLIRFAAHRGLRVQRPLAERLITAAREALPTSDAVIARRILTADLALLTDLDTQITAAEAELAALLPRTPFATLTTAPGWGVVRVANYGAALGDPQRWPGPRQIYRASGLSPMQYESAGHRRDGGISREGSVTLRRALIDLGVGLWQAEPTAKAYAAGLRARGKHGGIIACALAHRANRIAYAMTRDHNDYDTTCWS

SEQ ID NO: 267512 - protein, 377 aa, unidentified
MQKPSTIDIDPVIYFAIELSASTWLVVSKIPTSEKTGLHRMEAGDSQALLALIADLRKKVAAKLGVEASVMSCFEAGRDGFWLHRLLAEHGVINHVVEPTSILVNRRARRAKTDRLDAQGLLRILAAHAKGDRDVCSVVRVPTIEEEDAKRQHREREHLVQERVRIENRIAALLTTQGVRKRPSLRSWQKDMEEMRTGDGHPIPPLLRAEVNRLRRRLVMTLEMIREVEAEREQALQTQDDTASRTIQALRRIRGIGDNFAAVLTREVFYRSFENRRQIASYLGLTPTPFQSGGMDRDRRISRAGNARARKTLIQLAWLWLRYQPDSSLTCWFRERVGNLQGRTRRIAIVAMARKLLIAIWRYATDGIVPEGAQISI

SEQ ID NO: 267513 - protein, 411 aa, unidentified
MNPVIGLDVSKGESQVQAFLDKGKPYSKNFKVSHTIEGLDLLVEFLEVVKRETGKRPPIVLEATGHYHSSVVQYLEDRGYLMIIINPLISYKAKSSSLRKVKTDAIDAYHLCELFYKEDLEPYKKRGVQLLNLRNLTRQHENITGVLIQTKLQFQAILDQVFPEYRGVFGDLYSVVSLLTLSEFPSSEDILEASEETIADKIAELCKSRSHRWAKEKATQLKAAANRNPFEKTVYQSHILSLGMYINIILQYKEHLSKLESEIDALAKGVEEYNIIKSIPGIGEKIAATIISEIGEIDRFTDPKKLVAFAGVDPSVFESGKFTATKNRITKRGSSRLRHALYMAVRCAIRDCRKKKTTDEIIPRNKRMREFYDKKRDEGKPFKVAVIACVNKLLHWIFALLKNKTTFQDIA

SEQ ID NO: 267514 - protein, 338 aa, unidentified
MKLKRIGVDLAKQVFQVHGVDSHEQVKCRKQLKRHQMLDFFRQLEPCVVAMEACGSAHYWARELGKLGHEVRLIAPQFVKPYVKGGKNDANDAQAICEAASRPTMRYVEVKTVEQQASQSVHRIRGRLIKARTALVNEVRGLLAEFGLIESRKGVAATRELLCRAIDDSDSSMPGTMRELLRGLSEELQGYDERLKKLEQLIQREAREDERVRRLMKIEGLGPISATAIVSAVGDARQFASGRQFAAWLGLVPSQYSTGGKERLGGISKRGDKYLRTLLIHGSRSVLKHCQSKTDKRSDWLSQLICRRNKNIATVALANKNARIIWAILSKGEQYQPC

SEQ ID NO: 267515 - protein, 405 aa, unidentified
MGKIFVGVDVGKEVHWACCLDSAGEILLSRRVFNDEADLRALIAETEALGASEIAWTVDLIAVEASLLLAVLHGADHKVRYLPGSAVHRASAGYRGEGKTDARDARVIADQSRMRSDLIQLESDDTLVREMRILITRRADVVADRIRTINQLRQQLTSVCPALERAAKVADHHGWLILLRRYQDPKTIRRAGVSRLTTMLTNAGLRAATAQKIATTAVDAAKSQTVKLPAADLAAELVAELAQEVSRLDALLAELDAKIDTRFRQHRLAHIVISLPGMGPRLGAEFLAAIGNIDSFASANQLASYAGLAPVSHDSGKTVGRHRRPHRYNRQLRRVMYLSALNSIRYCPESKTYFEKKKSEGKRGTTAVMALARRRTNVLWALIRDGRDWTPRPQLSAPHTATAAA

SEQ ID NO: 267516 - protein, 316 aa, unidentified
MTKAERFVGIDVAQETLEIAVRPTGESWQVANDEVAFGALVDRLRELAPTLIVLEATGGIQLPVVGALAAAGLPVVAMNPRQVRDFAKATGKLAKTDRIDAQVLAHFADAVRPEVRPLPDAATRELAILVARRRQLLEMRVAEQNRSRGVPPRIRAQIREHITWLNRCLAELDRELGQLVRSSPVWRERVDLLRSTPGVGPVLSATMLADLPELGTLSHKQIAALVGLAPLNQDSGKKRGKRVVWGGRASVRGALYMATLVATRRNPVIRAFYQRLLATHKPKKLALTACMHKLLTILNAMVRRQTRWAPPAALAG

SEQ ID NO: 267517 - protein, 413 aa, unidentified
MGAAYGTVAGIDVHKKWLYVVVGREDAAEREFRRCRTGSTSPELAALAEWLHGHGVSTVVMESTAQYWKPVWAALEGEFQVLLAQARSNAAPHGRKSDYADATRLVKRLWAEDLRLSFVPDAEQRGWRLVTRMRVQHTREITRMRNRIESLLEECRIKISGVLSDLLGASGRRMLRALASGARADPQQLAALADSRLRATPEELERALSGQLGPVHRLLLGQLLDQIELLEAQMASLDQCLLDQLESHRETIRRLCAVPGIGIQAAQSMMAELGPRAATFPTAGHCASWVGVCPGRHESAGHSTSDASPKGNRQMRRILNQCAWAAVRSKGTFWQHLCRRLTPRLGVKQALWAVAHRLLRIIWAVLHEGMEYCERGVCGQDSERIRRRIERMIYELRKRGVHFRLMPATPASE

SEQ ID NO: 267518 - protein, 445 aa, unidentified
MVACLREVVVTVDIVHPRVAGIDVHKRVVWVAVRLPGPGLGERTVTVRGFKTFWRQLRQMAGWLAELGVSDVAMESTGVYWWPVYHALMAAGGIEVCVCNAAHMRNVPGRKTDIRDCQWIAELHEHGLLRPSFIPAAEVAALRQRTRYRKKLIEHRAAEGQRLSKVLEDAGVKIDSVASELLGVSGRQMIEALIAGERDPARLAGLAKGRLRAKLDALELACDGRFAASHAQMCRLHLDAYDRLTTQIVTLDVLVAEAAAPFEAVIAKLMTIPGIGRRIAEVIVAETGAQMTRFPSSAKLAAWAGLAPGSNESAGKRKKAAARDGNQHLRAAMVEAAWACSRTATRPGARFRRLAYRFGKLNIKKAAVAVAHTLLSIAWAVMKDDADYAEAGADYYDLRDRRNHEHLARHHQQALTRLGYQVTLTPPGDGPPPGTPPDQPQQPAA

SEQ ID NO: 267519 - protein, 441 aa, unidentified
MPKRKKNLTVIKEDTAGIDIGSKKIFIGIANMPVKSFDTFTSSFQSAIEYLKENNIKSVAMESTGVYWVTLYDMLDQAGFEVCLVKSNAAKNVPGRKTDVKDCQWIQQLYSYGLLKASFIPPSDIRILRSYTSLRRKNIQLASDHIRRAQKALDLMNIKLHFVISEIQGKSGMRILFAILNGERDPNELVKLCDKQILKNKRRMVIQSLIGNYRAEHLFALKQALEGYQYYQTKIFECDKEIEKLLQVMTKDLPEPKNISKPKPIRRNKPNIENLHSMLMKLTNGVDPAKITGITDATHLEIISKVGLDLSKWNTSRHFSAWTGLAPNQNDSGDKKKNKKVKNKSSAGQIFRIAAHSLSNSKHNALGSFYKRIRAKKGKPFAMKAAARKLAVTYYNIMTKGIDYVEEGINLYELKIKEQKIKSLHKQAHYFGFSLLPVNAA

SEQ ID NO: 267520 - protein, 466 aa, unidentified
MKQFYLGIDVSKGYADFMIINSKKQPVVQGFQLDDTFDGHRSLYNILGRFLAEHSNSTLFIGMESTGGYENNWYNSLIEFQGSLEIQTARLNPFGVSHNSKADLKKNTTDKISAQNIAEYLVAHPEKVVYQKQDRLAGLRKQWGFIKMLTKQCTQFLNQLNGLIYSANPELLSYCQNGVPGWVLKLLVKYPSAANLKNVHVKTLANIPYVSRQKAQQLIANAKRSVASTKDITTEQLIVASAQQILHLKKSITDQTTSMLSECSAPEIELIKTFPGISDFSAVGLIIEIQTIKRFAGVKKLASFFGVHPVYKISGDGVGGIKMSKQGRTAPRQILYMIALSAIQHSSLIRELYEKHQKQGKHNKAAIGICMHKILRILYGMLKNNKPFNPTINIANRLQNVRLKNDTPADNKNRRFQKYDQKAPVSSRQKRKRLEREMSQSASDTHSGCTAPVPLANIITNILPQL

SEQ ID NO: 267521 - protein, 327 aa, unidentified
MKRLSGGIDVGSEFHHIIILDEEDNFLYNQKVAHKLNEFTESIKLFRKIEKQEGGKISFALEGKNGYSAPLDRILLDQGFTLYNVDNFKLKRFREAFAGEWRDDERDFLMLSKMLKLKDYINSEKEKVFIKIEKPSPLTESLKLLSRHQQTLIDEGVRLTNRLRKKLLEVCPQILELGKLKNKKIIAILTKYPDFSKYKRITLCSLLKIKGIGKKGVPFLLKRLNNIEYIPGLTDIYKTIILSYAQRILELRKEIKDIDKSLDEIGEKSKEVNHLKTIPGVATKLASRFIGEIGDINRFPSEKQLAIYCGIACVDNNSGKVIKAKAV

SEQ ID NO: 267522 - protein, 341 aa, unidentified
MKLIRVEVDLAKNVFQLHGVDRSEKTVWRRKLVRGDWIKELLERVEPGCEIGMEACSGAHHWARMLQAQGYTMKLIAPQFVKPYVKSNKNDANDAEAICEAMSRPSMRFVAIKTVEQQDIQAVHRVRSGLMDQRKAKANQLRGLASEYGLVALKELLHLRSAIPRWLEEQENGLTERFRRLLHGLWRDLKALDERIEELDREIEQIARQKPAALRLQQVRGIGPLTATALLATAGDASQFASGREMAVSFGLTPKRNSSGGKERLLGISKRGDAYLRSLLVHGARAVIRTAQAKTDRLSIWVVRIATARHPNIAAVALANKTARIAWAMLTKGTDYQHQAA

SEQ ID NO: 267523 - protein, 400 aa, unidentified
MQEQAERVVIGMDPHKRSATIEVMTADETVLGGGRFDTSQAGFAAMVGYVNAIQPDPERRVWAVEGCNGIGHHIAMRLLAGGEQVLDVPPKLSARARVFATGQGRKTDATDAHSVALVATRMAGLRPVADDEQLAVLRVLVDRRRSLGEDHTRIVSQVHALLLELIPGGAKRDLSAAQARKLIATVRPRDAAGKTRRRVAAELIGDLERIHARKKAADKELRVLLAATGTSLLDLHGIGPTGAARLLVEVGDITRFPNRHHFASWNGTAPIDASSGDHVRHRLSRAGNRQINRTLHIMATVQLRNPGIGRDYYDRRKAEGKSSMEAMRCLKRRLSDIVYRELLDDAIARRVTTTGTGPGGQRGDDSDSSAAGSQPHTDSSDKPHPNPPSTHPRTPLPAAS

SEQ ID NO: 267524 - protein, 364 aa, unidentified
MQTQSNKIDFNGQHIYVGIDVHLKSWKVTIMTEKLPFKTFSQDPRPELLHQYLTRNFPNGIYHSAYEAGFCGYWIHNKFMALGIKSIVVNPADIPTTDKEKVQKADKRDSQKIAKALRNGDLKGIHVLALKTLEDRCLVRTRATLVQDLTRNKNRIKSFLNFHGIEMPEKFKLMNHHWSKRFMAWLRSIEMGEHSAKKSLNLFIDEAEHLRVTILDATKGIRQLSEDEPYAGQVLLLRGIPGIGLLTSMIILTELETINRFESFDKLCSFIGLIPTTHSSGEKENIGEITHRGNSFLRGALVESAWIAARMDLALNKSYHDYCKRMEANKAIIRIARKLLNRIRFVLKNNQPYVCSVIKENITQ

SEQ ID NO: 267525 - protein, 430 aa, unidentified
MTTREVTPLDAALVAIDVSKARNDVLIELPGSRRRRRLTVPNTRTEHDRLIENLRGIGHPVIVGFEATGNYHRPLAFRLLEAGVSLRLVSSVALARTREALHNGWDKNDPKDAQVILHMLRIGASQVYLDPLRAGINDIQELSNTHEVISKAKTELWHRLLTHYLPLYFPEIARFAGNSRSDWFLAFLERFPTPASIIALAKEEFVESAWDVVGRKVSKARLLGDIYETARSSIGLPVAMESSAIAMFRLVVSEGRSLIRQRDAIEELADAALAGHPDYHRLRQIPGIGPIIAMTVLAEAGDLRRFKHYRQFLKFCGLDLATYQSGQFRGQTKLSKFGNARLRRAFWVAAQVAIRQRDNSFRSKYERYVARDRDNADLKRKALTAITAKMARTAHAIIKSGSDYRPFVEGPMPSGRTSLSRCREGASATL

SEQ ID NO: 267526 - protein, 338 aa, unidentified
MNYVGIDHHRQYSHLTVMDQEGQVLRSGRVPNLQAEVEKFLEGLEAVEAVIETGRSSYTMVDVLEEMGVAVKIAHPNEVKAIARAKIKTDKRDSEVLAHLLRMKMIPEVYRRSVENRQAQRVLRQRAFYVSAMTALKNRVHAFLAQQREEVREEVARETNIFSEKGQKVLLGLDLARGEKRLLEALLKTYRHLETRIGESTALVEKLFEEIREAQLIRTIPGFGKYLAVLVVVEIADINRFADAAHLHAYAGVIPSTHSSGDRTHHGKIIRAGNRWLRWAAVEAVWPGIRADFDLRCFYERLARNKGPNKAKVATARRLLTIIYKVLKEGRNYIAYRR

SEQ ID NO: 267527 - protein, 350 aa, unidentified
MSVHAAPVTSSTVVVAVDVGKRSVALSVTDAGRHRVLGPVEFEMTRSALASVVGQVRGVLPDDGAWVKVGVEACGHYHQPLLAPSAWPSGWEVLELNPGHVCEQRRVMGRRRVKTDAFDLEAITELLLAGAGVPVTTRELVLGELRAWTAHRTRRVAVRTATKNQLLGQVTAAREALPTADAAVARRVVATDLRLLNELERQICTAEQELAMLLPASPFRTLTSVPGWGVVRAANYAGALGDPRRWPGPAQIYRASGLSPAQYESAGRRRDGAISREGSVVLRRALIDLGVGLWLNDPAAKQYAAGLKARGKRGGVIACALAHRATHIAHALVRDQARYDQARYDPGRWT

SEQ ID NO: 267528 - protein, 421 aa, unidentified
MKGPRRKRMKAVKESTLLVTVDIGVASNTGYCATGDGRDIKPFKFDNTREGFEKLWHMVVASKMRFGCDEVIAGYESTGPYAEPLAQYLMGKPVTMVQVNPLHTKKMKEVNDNSPLKTDDKDPRVIADSIRLGRTLSVVVPEGDAAYLRRLNNARERHVGEQTALLNQLQQLIFVIFPEFKNVLKNMKGKTARYLLTRYTTPEKISTISKETLGEEMRKRSRGKYGHTDAELLIDLARNTIGIKEGVLGIVLDIRHILMQLEAEARFIAEIEAEMVMTLQRIPCSRRLLSIKGLGVVSVAGLIGEVGDFSKFRTRSEIMKLAGLDLYEISSGKRKGERRISKRGRSLLRKILYYAAIQMVKTNGIMYDYYTRLTNRGMLKMKALIAVARKLLGIIHAVVRDNRDYVGAYQAPKRRMIKKAA

SEQ ID NO: 267529 - protein, 367 aa, unidentified
MSRMKRLAVQQLDVSKDYLVIGLDLAKTDTAVIAITTDGELYAIDRLKYSDLLNQARQLGSTVFAMEPCNGMTYLVHELEELGHECRVINGEAVKDYVKSHFAGQKNDLNDAKAIAFLAQDEMLKFIRVKAKSEMTMQTLQVVRQQLIKQRTCSVVCIKGICQNYGLVISKSIMSEAKIRPIIEETQKLPDEIKGPLKRLLRNAARFTIDIKQIDKAIEQGLKGNETAERLLEVPGLGPQCVSRLLTTIGDINRFEGPKNLAAYYGLVPRSHTTGHNEKMGKITKHGDRLMRAFLVQGAHAVLIQHTKGRLPKSALKKWIDKKLSAGMPCSKLSIALAAKLLRIAFAVLKYKKKFDIKKAGVARCSL

SEQ ID NO: 267530 - protein, 465 aa, unidentified
MKKERIFIGIDVSKGYADFIILQENKKVLKENFQLDDDKTGHDIFTKLLKELSTGSQIICGVENTGGYERNWVHLIRKLSHQNKSVEIYKFNPKGVKHQIQSELKTTIDDAVSAKGIATYLINNYELFKSNWEKSISEGKEITEGKMLNNMINSLRKQKTMKTNQLEKLVYQSFPELLRYFRYSAPKWIYYFLIKYPGAAAVKRGKLSGIASIKHITQQKAINLKDLAKKSVGSMQGELVEFMIKQQCEDILYIDKEIEMLKKRLEKFFENDERVEIITSLKGVAQWSAASFLVELGDEKRFKTASQIVGFFGVNPSYKLSGDGIYKVKMSKQGSANMRSILFIIANNLVLHEEYFKSLYAKYRAKGRKHNVVMGIIMNKALRVLWGMLKTNIKFDSKIDQRNIAENNQTEQKSQISKKSRRLQELTTDAPISRSNLKKRKAILEPQSSVSDESTRSSENSSVQI

SEQ ID NO: 267531 - protein, 315 aa, unidentified
MEALITRCAGMDVHRETIVVCVMTGEADATPQTETKSFPAMTRNLFELLQWLESKDVTHIAMESTGVYWRPVYNILEGFFDITLANAQRIKNVPGRKTDVGDAEWIAKLLRHGLIEPSFVPVADLRELRELTRLRKKFVGSLTSEKNRVHKVLECSNVKLGTVISDVFGVSGRNLLERLIDQGYIDADDIEQRVKGQVKKKVSRLADSLFGTLTEHQIFMIRQSWDHIIFLEEAIQKIDSQIEAHLKPYQDEIKLLQTIPGVSQVTAACIVAEIGVDMSQFPTAGHLCSWAGVAPGNHESAGKKKVRERPKVTRI

SEQ ID NO: 267532 - protein, 409 aa, unidentified
MMKIVYPNCCGIDVHKTFVVAVIAITDDQGITQYYRRRFSTFTNQLKELKKWLDYYSCFHVCMESTGKYWIPVYNILESDHDICLAHPKYVKAIRGKKTDKKDAQWIADLYKHDLVAGSFIPPAKIRQLRDLFRYYNKLTSIQTSEKNRFQNSLTWSNIQIASVVSDVFGKSAQKIIKGVLDNPSQMPDIETLVHKNMIKKVDHLKLSVEGEISDEQAEKIRVIKAHYDAIVLCKNDLEQLIKELAQEYQSQIELIQTVPGFKKELTSIRLISEIGVDMTKFPTSGHLCSWAGVVPANNESAGKKHSTKISKGGRYLKPLLVQVANAVVRSEKHPEIRNKYLQLKKRRGHKKAIIAMAHRLLVAIYHVLLNKEHYKPDLYHATNYIPPEKELSVEEAIQFARSHGFKIA

SEQ ID NO: 267533 - protein, 314 aa, unidentified
MAATAVGIDVSNKKLDVHVLPRNERFVVSRDAKGIEELIKRLAPLDPSVIAIEATGGFERVVAAGLAAAMLPVVVVNPAQVRAFANSLGRRAKSDPIDAEVIARFVEATKPPIRPLPDEETQGLSDLVTRRSQIIQMIVAERQREQRAINRHVRKSLGRLIKALEKEINAVDEEIDGMLRNSPVWREKEDLLASVPGVGRITTRTLLGEVPELGTLDRRQVASLIGLAPFTRQSGEWRGRSFIAGGRASVRSVLFMAAMSAKRCNPALKRFYERLVAAGKPKMVALIAVARKLLTILNAIIRDKKPWQPEAIPA

SEQ ID NO: 267534 - protein, 407 aa, unidentified
MLWGGGVDIASIVRYEPMELPMQTLNDFSRSLIALEPASTLIAVIEMSLSSWLVAGIVPSIERQPLKKLAVDESALLRLLHRWRDEAEKAGCRIERIVVAFEAGRDGFWLARWLKGHSIEAHVIHAASVAVSREHRRAKTDRLDAELLKRAFLGWLRGERDHCKVVAIPTLNEEDAKRPSRERQSLVGEQSRIVNRMKAALTRLGIRGFNPKLKRAAGRLDSLRTPEGEPIPPNTLAELRRDMERRRLISNQIRQIEEVRLKHFEQATNAGPHAMVRLLARVIGVGIETADMLVHEVLSRNMHDRRAIARYAGLTGSPDESGRKRREKGLARSGNGRVRRGMIQLAWRFLTYQKESALAQWYRARTENARGARKPMIVALARKLLIALWRFVRQGVVLDGVVLRPAQ

SEQ ID NO: 267535 - protein, 338 aa, unidentified
MKLYGGIDLHSNNSVIALLDEGDKPIYRRRLPNDLSVILSELAPYQGAIHGLAVESTYNWYWLVDGLMEAGYQVHLANTAAIVQYEGLKYSNDDSDACWLGKLLRLGLLPEGYIYPKEERAVRDLLRKRSQLVRQRTANLLAVQNLLARNLGQSMGANAVKRLNSEAVDGLLPEIHLALAVKSNLAVMQALEGQISELESVSKARARPRPEFQLLLSVSGIGEILGLTIMLETGQISRFKRVGDYASYCRCVGSERISNGKRKGRGNTKNGNRYLAWAFVEAAHFAVRYNAQIKRYYQRKCARSNGIVAIKTVAHKLARACYYILRDRVPFDVNKAFT

SEQ ID NO: 267536 - protein, 495 aa, unidentified
MSDQSISPEERLHHLEGHYTDRVTAFRQRLAQLGPHRVLILLLDIGKNVHWATAWTAAGQELVHPHRLPTTYLGLSQFIHMTEALIAQHDPTLVLLGHEPTGVYHEPWARALMDRYAPYLNGLAQPTLEYRFFNPYQVKLARQQAHLRHRKTDPRDLAAMLDLTLRGLGQPAFLPTGAEHLIRQEIGFIRAQSRLLGRLERQLRRQIDCLWPGAIVNVCQFRKAHPDLPLPTPIIQTRPLQRDRLRVLLTHCPNPYDLRAMSDQHILALFREHMGRAGPALLHTLHTWADNAVLLPPAIAAPLADQLQRLFRQYLATETLIQDGRGRLVPLIPATPARHLPAIPGLGDMDAAAYLAGVGSISRFSRATEVWAFAGFDPIADGSGDRPDRSGHLSKHGDPALRDGLYRMGYRTAQNYAPVSITFLDAFDRGLCEVEATIHTAHRVNRICFHLVQNDEPFENRSTPQLEGEKARRWREFKAEKKRRGSRRKRGKRRR

SEQ ID NO: 267537 - protein, 347 aa, unidentified
MDKDSRFYVGMDIGDRISETHVLDGEGELVEHSRVPTTKSALERKFSAMPASRVAIEVGTHSHWVSRSLSGMGHEVLVANARKLRLIHGNTRKSDHADAEYLARLARLDPQLLSPIRHRGAQAQADLALVRSRDSLVRARTLLINHARGLVKSSGQRLARCSPEAFATRAAANIPNELEPALRPILESVAHLTGQIRAHDRQIERVAKDRYPESERLRQVKGVGPVTSLAFVLTLEDPSRFPKSREVGAYLGLVPRRHQSGDMDPQMRISKTGDSHVRRLLVGSAQYILGPFGPDCDLRRWGLTLAERGGQNGRKRAVVAVARKLAVMLHRLWVTGEDYQPQKCPAQ

SEQ ID NO: 267538 - protein, 428 aa, unidentified
MKNRNTQKLEAITPGTLIVGVDIAKETQWAQFVNYRGLELRKFLKFKNHKNGFDSILASIEAICKNRRLDNIIVGMEPTGHYWKPLANYLLKNKVNVVMVNPYHTKRAKELDDNSQTKSDKKDALTIARLVRDGRYYEVYMPQDIFAELRVLSNSRISLMKRSNALKNTITAVMDEYFPEIVTVFKHPLKGKAARQILKSCPFPSLILELGIDGVLVEIKKAVKKTVGRKKASQLVKTAKSSIGVGYGLVSVKLKLGLMIEELELLTKQLKQLEEAMEKALTDTGHDELILSIPGIGVVTAASFLGEIGDPMRFDHPRQICKMAGYNLIENSSGKNKSRTVISKRGRKNLRSILYQMAITMVAVNHEMKELYRYLKTRPQNSLKKKQALVVISKKIITVIYNLIKKQTEYRAELVLGEFRKKQIKQAA

SEQ ID NO: 267539 - protein, 402 aa, unidentified
MNAVGIDVSKGKSMVAIMRPFGEIVSTPFEIKHTSSDINSLVKLIKSIEGESRIVMEHTGRYYEVLAHQLSEANLFVSAINPKLIKDFDNDSLRKVKTDKADSVKIARYALDKWQNLKQYSVMDELRNQLKTMNRQFGFYMKHKTAMKNNLIGILDQTYPGVNTYFDSPARSDGSQKWVDFASTYWHVDCVRKMSLNSFIDHYQNWCKRKKYNFSKSKSEEIYGKAKELVPVLPKDDITKLIIKQAVDQLNSASITVESLRTLMNETASKLPEYPVVMAMKGVGTSLGPQLMAEIGDVSRFTHKGAITAFAGVDPGVNESGSYEQKSVPTSKRGSSDLRKTLFQVMDVLIKTHPQDDPVYQFLDKKRAQKKPYYVYMTAGANKFLRIYYGRVKEYLASLPES

SEQ ID NO: 267540 - protein, 430 aa, unidentified
MKSNTQNAKIEAITEKTLVLGIDVGSEMHYARAFDYRGIEYSKKPFKFSNTEAGFVTFKEWILDLKERHEKDKVVPGMEPTGHYWFNLGKFLQDNEMKPVLVNPHHVKKSKELDDNNPTKNDRKDPKVIAGLVREGRYMIPYLPDGVYADLRTASNIRFQLQAELTRIQNRISRWFNIYFPEYKTVYGKPDAKSGMLILKAAPLPEDILTLGIDGVNQIWRDAKLRAVGKARAKTLIEAAGHSVGSKEGAVSARMEIRMLLEDYESRNMRLQEVMVLIEELVKGIPMAEKLLEIKGVGIRTVSGFLAEVGDISRFNNPKELQKLAGLALVENSSGKHKGGTTISRRGRKRLRYLLFEAAMSLVAKNPEFRELHNYYTTRRRNPLKKMQSLMAVAAKLIRVFYAMLTKGVDYDPKKMVSDIRRPEAYLQAA

SEQ ID NO: 267541 - protein, 351 aa, unidentified
MQIVGALDVHRSQITTKTLDLDSGEVRYGRISPVTRESVREWLSRFAPGEAEFALEGTTGWRFVVEEIHAAALRAHLADPAETAARRGRKKRAKTDKADCDLQLELLVAGRLPESWIPPAHILELRTLVRTRKALLDERTGWQQRIQAQLFHQGVPRGIKLRTAAGRAALAEAGLSAAGRELVTLGLRMLDVLDRELDPLDRRLRAFARRQPGCKALIAELYGVGALLAPAILAELGDCRRFSSSDDVVRHSGLDVTVHESDSRRAAGRLSHQGPELLRWALYEAAQCAARPSSPDYGYFLQVQERIDSDRAFLSVARKLVRRAYHILRKLGDEAIAPVDDPPTGEVALAA

SEQ ID NO: 267542 - protein, 415 aa, unidentified
MAANRGEHPGDGDVRMVDDGSLGRYRLRAHHCVVIDATGRVLLSRRVVNDESALLELIAAVLAVAGGDPAVWATDLNAGGAALLIALLAERGQQLLYIPGRIVHHAAATYRGDGKTDAKDARIIADQARMRTDLQPVRGADQISTDLRLLTARRTDLVYDRVRTINRLRATLLEFFPALEAAFDYSKKAPLILLSGYQTPEAIRRIGATRLAAWLKKRGCRGSTSVAAKALTAANAQHTVLRTETMGAQLVAQLAQQIAVIDAAIAQLDEQICKRFDQHPNAPILLSMPGFGAVLAATFIANTGGDLRAFETVDRLASVAGLAPAPRDSGRISGNHHRPRRFNRRLLRTCYLAALSSLKNSPASRAFYDRKRAEGKNHKQALIALARRRITTLWAMLRDRTTYQEPPRPALAPAA

SEQ ID NO: 267543 - protein, 359 aa, unidentified
MKAINTASLITFINTCNDQNIWIGVDVHKKSWAVALYREDGEIFTFSTTSNLRNFVEQLVPWKDRLQKIVYEAGPCGFVLARALIAAGIKVGVVAPSRVPRPVSHGAKTDRLDCIKLAEYAAKGQFRRYIAIPSESEEALRSLERHRFQLVDRLRQIKSRIKGLLLQFGINEPQGLSHWSNKSIEYLHSLELTDGLRETLHSHLRELEWVTNEKKQIEKQMKDTFQRAGLQKRLNSLKSIPGVGQIVALAFTAEVYRPERFQRAEELTSYLGLAPIVVQSGLSKPHGYIRQVGQSRLRSLLVEASWVWKQRDAKADEFYRLILSRTGCASKAICALARKLAVIMWRIAIELRPFKFVCS

SEQ ID NO: 267544 - protein, 447 aa, unidentified
MSQNNHPPHPPQNNDPLRYAGVDVAKDSLAVDFQDQKCTWPNDAKGHAKLLRLLRAVPRPHVVLEATGGYEQPLVRTLHAAGVPVSVVQPGRIRAFAVAQGQHAKTDPIDAAVIRAFAEAIAPAPTLPPTPQQLRLRELVTRRRQLVEFTTAEANRSAHYQEPLAGRQAAALLKSLRQQIKQCEGALAELIAAEPLWQARARRLQEVPGVGLVTAVSLLAEMPELGSLSDGEAAALAGLAPYNCDSGPFKGTRRIRGGRAPVRTTLYMSALSAARYDPILRAFSQQLLARGKKPLVVLTAVMRKLLILLNRLLKNPSFQLQGAAPQPAPPVTDHTPAPASQPAPASQPLSSAAPVEAAAPADGLARGAANQPLPSSRPVDVPAVPAASSPASPASPAPTPRLVPLSASPARLAPAPSPRKKSKTPIPASPSGARSATPKKTKKLAKP

SEQ ID NO: 267545 - protein, 389 aa, unidentified
MFPKTRAWLLFFALMARLFLLPLKSNTPLVERIKSIEGESRIVMEHTGHYYEPLARELSLAGLFVTAVNPKFIKDFGDHSLRKVKSDKADAVKIARYTLDSWTQLKQYSLMDEIRNQLKTMNRQFGFYMKHKTAMKNNLIDILDQTYPGVNTFFDSPAREDGSQKWVDFATTYWHVDCVRKLSLNAFVGHYQKWCKRRKYNFSKDKAEEIYGAAKELVPVLPKDDLTKLIVKQAIEQLNTASKTVEELRTLMNETASKLPEYPVVMGMKGVGPSLGPQLMAEIGDVTRFTHKGAITAFAGVDPGVNESGTYEQKSVPTSKRGSSSLRKTLFQVMDCLIKTKPQDDPVYAFIDKKRAQGKPYYVYMTAGANKFLRIYYGRVKEYLMSLPE

SEQ ID NO: 267546 - protein, 350 aa, unidentified
MLIIGCDYHPAFQQIAFVDTATGDCGERRLEHREEAEKFYRELAARGMKVRVGMEASGQARWFERLLAELNFELWIGDATVIHAKRVRKQKTDRQDAQLILGLLLEDRFPQIWVPSWENRDLRQLLWHRHRMVQARTRIMNQLQAVAINEGLRCKKRLWGESGREQLEAFRLAPWASRRREDLLKLLDGLNPTIAELTQAIEQEVEKCPEAQRLRTHPGVGPLTALAFVLIIGRADRFQCGKQIASYLGLVPLEDSSGNRRRLGHITKQGNALLRFLLVEAAQVTARSLPEWRSQYLHLTMRRGRKIAKVAMARKLAVRLYWMMRKEWDFGKLTKFGSHAGKPGTGDGVK

SEQ ID NO: 267547 - protein, 319 aa, unidentified
MTQTNDSKGPYIGIDISKDSLHVAFGSRGTVIDVKNTPEGIAGLIEQLQETRPQLIVMEPTGGYEIPLAAALAAAQLPIAVVNARQIRDFARAKGRLAKTDKIDAAVIAGFGEAFEPEPRLLKDEQTMEIDSLVRRRKQLQENQISENNRLRTALHKRERASLERHIEWLGQELKSVEKELQRLIKDSPIWREADKLLQSVPGVGRVLSMTLLAGLPELGKLGRSAIAALVGVAPFNCDSGKMRGERHIRGGRHDIRRALYSTTRAAVSLRYNSTLAEYYARLRAAGKPDKVAIVACMRKLLVILNAMVRTHSRWSALP

SEQ ID NO: 267548 - protein, 318 aa, unidentified
MSHGYDKFVGIDVSKDGLDVHGLPDGSPSRFDNTAAGRAKLLSLLPQAGACLSVVEATGGYERDLVAEAVTAGHHIAVVNPRQVRDFAKALGLLAKTDRIDASVIARFAETTRPVPKGYDERQEQLRELIVRRRQLLDHRTAEKNRSEMAHSSLVRKSVLKHIEMLNKDIQRIEKAILQLVESNDDWRERFEKLKGVPGVGGQTAATLMAELPELGQLNRQQVAALVGVAPFNRDSGQFRGRRAIWGGRQSVRNALYMAALSAKKHNPVIREFAARLMAKGKPPKLVLTACMRKLLIILNAMLQSGDSWSPRLATLTP

SEQ ID NO: 267549 - protein, 353 aa, unidentified
MAHPQPPRITVGVDTHKDLHVAAARDQLGRRLGTTMARATSAGYATLLVWAQALGDVQAWGVEGTGSYGAGLARFLTARGQRVLEVNRPDRAARRRRGKSDPVDADAAARTVQAGEATGVPKAQDGVVEMLRALRVARQTAVKARTQAINAIKALLVTAPAELREPLDGLANPELVAAAAALEPGTLTTPTAATMLALRGLAQRYQHLDAEISLLTSRLDQLTTRTASALRQLLGVGPDSAAALLIAAGDNPGRLRSEAAFAALCGASPVEASSGKTVRHRLNRGGDRQANAALHRVVIVRLRWHQPTRDYVARRTAEGKTKKEILRCLKRYVAREVFAVLPQLGEQLLVAAA

SEQ ID NO: 267550 - protein, 420 aa, unidentified
MKEVSEASLERFIGLDVHKHYAVACAVNVRKEVLLGPVRVEFSRWPQWIAANIQATDAVVLEATTNAWPLYDQLAPLAGRVVVAHAGKIAGIADARVKTDGRAALHLAKLLAADLIPAVWVPPMPVRELRALLAHRRRLVKMRTMTRNRLHSLIHRYSLVPPRGEIFTPKHRAWWEELELSPTERLRVRQDLVILDALEPQVKEVEAELQRLSTEAPWSQDVPYLLQLPGFGIIVVLTILAAIGDITRFPHPKQLVGYAGLGASVKESGESHRRGRITKEGRRDLRFILVEAARIAVLNHPYWKAQYGRLERRMGTNKAIVAIARKLLVVVWHVLTERAADRQAEPEMVAFKLMFWSWELDDTQRGGLTTRQFVRYHLLQLQLGADLTHVHRGGRNRGIASVEEVLELRPELRAELVPAG

SEQ ID NO: 267551 - protein, 355 aa, unidentified
MARSAYQPRNYEAFLGLDVDKNSFSLTVTDHFQTNRSKKMPSNPEHLYNYIQKHFDLNKIICAYEAGPTGFHLFDYLNENGVKCFITSPASIPKASSDRVKNNRLDSIKITDYLMSAKFKPIRVPQGDYRELRDLVKIRENYARDRKAAKQRIKALLLFSNLYPALKDPDIKWSCNYLKELRKLECSFSTHQRLDMLLDDLEYARKKMLTIHRTLKSFCKEHDEINQYMNYLQSIPGIGFVVAVSILGKIGNPKQLQNPRELAGFIGISPSERSTGDSENRGSITHLGDKTLRFMLVQASWAAIRKDTQLEQFFNRIRHKNNPRYASKIAITAVARKLTQIIYRVLKDKRNYIQH

SEQ ID NO: 267552 - protein, 343 aa, unidentified
MPHYVGLDVSQKTTAICVVDEQGRWLWRGVCATDPEAISARVLRHAGVDAKGGVETGSMTPWLVHGLRSAGLDVACLDARRVKAALHMRLNKTDENDAEGLAQIMRTGWYRPVHVKSLDAHRARALLGARAQLVGMTTRLSNMIRGVLKTFGVLPGAGRGLRFDHRVEALLDDAPDVALIVRPLLVTWRQLREQIVVFDKAVQQQARIDPICRLLMTVPGIGAPSSLMYVSTIEDPGRFSRSRAVGAHFGLTPRRYQSGETDRSGHISRCGDNLARTLMYEAAFVIRHRVKRSLHLKDWAEAIERRSGPGKARVALARKLSVILHSVWRSGEPFRWAPKATVA

SEQ ID NO: 267553 - protein, 391 aa, unidentified
MSMYFVGIDISKYKHDCCIISAVDQQIVSKFTITNDKDGFEQLLISLNSLSNPEDIKIGFESTAHYALNLELFLENANHSFMEVNPVLIKEYKKSTTLRRTKTDSVDCESIARWLMTVEYKPHSKGFYHAYSLKSLTRLRDRLIRQRSFYLVKITNVLDHTFPEFKPFFNERLSKTAIYLLENYGSAEKMAHMNSASYDKLRCISRGKFSIQQFLHLKELAANTVGVNNSIFDIELNSLLTLYNSLCKEIKNLEAEITRLIEEVHPHYMSIPGIGPISAAVIYAEYGDISNFSNPSQMLAFAGIEPGINNSGTESHGGRMVKHGSSQLRYVLLNACLPLIRFDLTFATYYAKKRAEGKKHRVAITHVAKKLIRVIYALERQDVDFNAQKIR

SEQ ID NO: 267554 - protein, 409 aa, unidentified
MERVIERGAALDVHKKSVTACVRVPGPDGGRRQEVQTFGTTAAALLALRDWLRAHGVTHVAMESTGVYWKPVYYVLEELFTCLLVNAAHVSKVPGRKTDVRDCEWLAQLLEHGLLRGSFVPPVPIRELRDFTRYRQVLVQDRTREANRLHKVLTDAGIQLASVASNVLGKSGRAMLAALVEGTTDPQVLADLAQGKLRRKLPALREALAGRFRKHHALLVSQLLAHLDYLDEALEILTAQIEEALGPFATEAARLDAIPGVGPRTAEILIAELGVDMRQFPTARHVASWAGLCPGTHESAGKHRAVRTRKGNRWLRAALIEAALAAINVRDSALAARYRRLVRHRGHKKAIVAVAHKMLTTAYLLLADGRTYQEPGAGYYDAQRKDRSVRRALQTLQRCGYRVSLEPAA

SEQ ID NO: 267555 - protein, 561 aa, unidentified
MIGHTGASQAASHSRLRFGALCPPRSMTSVTAINCVVASFRRKSGLDPDGEVVKESLTEPSLADEFIEIKDGWTMARRKKKSTYERLRDGERLKHWEHKEVARQFQSEDPGWEVVHSKVAGIDVGNGSHFAGVDPRLTQQPVREFGSWTAGLQAMADWLKNYGVKRVVMQTTGVYWIAVQEVMEANGFQVAVVDARGTKNLPGRKSDVQECEWLRKLDTFGLLRESFQAPDKIRAIRTVWRLRQRLVTDAGRSIQQMQKALTSMNVQLANCISDISGVTGQAIIRAIVGGERDPMKLAQLRNGMIRASEEEIARSLEGNWREDLLFELEQVLEAYDFQQKQIAGCDERLKKYIGEQPTRELGGGLESAGGEGVAEQKKRGRKKKAQPKPLKNQPAFDLSGELRRVMGVDLTKIDGVKVMTVQTIYAEIGADFSAFRTEKHFASWLMLAPKRDVSGGKVIKHLSFSGNNRVANGLKMAAQSLKESDSYLGARYRSLRGRLGGERAVKAMARYLACLIYRMMTKGEAYVDRGAAYFEKRRQDRDLLYLQGKAAAMGMQLVARA

SEQ ID NO: 267556 - protein, 338 aa, unidentified
MALYAGIDLHSNNNYLAIIDEHSQKVFGKKLKNSMPLILTILEPYKKELAGIVVESTYNWYWLVDGLQEHGYKLHLANPSAIKQYEGLKHTDDKWDSLWLAHLLKLGILAEGYIYPKKTRPLRDMLRRRMLFVNQRTADILSFQSMVTRTTSNQISGNDIKKLKKSDAERIFTDPDLIFTAKRYINIIASLTVQIKIIEKHVKDRLKLSENFKCLLTIPGIGYILGMVIMLEAGDISRFEKVGNYSSYCRCVKSERFSNGKKKGSGNSKNGNRYLSWAYVEAATFATRFCDPARKFYQRKSAKSNETIAKKALSAKLARASYYMMRDQVPFNSDMLFA

SEQ ID NO: 267557 - protein, 359 aa, unidentified
MHTQSNTIDFNGQNIYVGIDVHLKSWKVTIMTERLPFKTFSQDPNPEVLHHYLTKNFPNGNYYSAYEAGFCGYWIHNKFEALGINSIVVNPADIPTTDKEKVQKADKRDSQKIAKALRSGELKGIHVLALQTLEDRCLVRTRSTIVHDLTRNKNRIKSFLNFHGIEMPENFKLMQHNWSKRFVDWLRSIDMSEQSGKKSLNLYVDEAEHLRLSILQATRGIRELSATERYADQVRLLRGIPGIGLLTAMIILTELETINRFGNFDKLCSFIGLIPSTHSSGEKENIGGITHRGNSFLRGALVESSWIAARLDLALNKSYHDYCKRMEPNKAIIRIARKLLNRIRFVLKNNLPYECAVVK

SEQ ID NO: 267558 - protein, 358 aa, unidentified
MADKVTVAAVVGGVDTHKDLHVAAVVDQNNKVLGTQYFATTRQGYRLMLAWMTSFGALKRIGVECTGTYGSGLLRYLQNAGLEVLEVTAPDRMERRKRGKSDTIDAECAAHAAFSGIRTVTPKTRNGMIESLRVLKTCRKTAISARRVALQIIHSNIISAPDELREQLRNMTRMQLIRTLGSWRPDASEYCNVTNVYRISLKSLARRYLELHDEIADLDVMIAAIVDELAPELIKRNAIGYESASQLLITAGDNPQRLRSESGFAALCGVSPVPVSSGKMNRYRLNRGGDRAANSALHIIAIGRLRTDDKTKEYVARRVAEGHTKMEAIRCLKRYISREVYTLLRNQNRQVNSIPIMA

SEQ ID NO: 267559 - protein, 417 aa, unidentified
MNNEVHWFVGFDWAMEQHRACLLDAEGKRVAERDVTHGGAGLLELCSWLIEMTKAQPAQIAVAIETPRGPVVEVLLERGFAVFAINPKQLDRFRDRFTVAGAKDDSLDAYVLGHSLRTDRHAFRRLALDNPLVIELREWSRMNEELKQEQSRLANRVRDQLWRYYPQASELGDPAADWFLDLWEKVPTPAQAVRVREKTIARILKAHRIRRFDAAEVLRILRQQPLVVAPGTLEAATAHIRAVAARLRLVNQQIKEAERRLDELCAAIEAAAETTPGQICEQRDVAILRSMPGLGRITIATLLAEACEPLRLRDYHVLRVLSGQAPVTRRSGKSCIVLRRYACNMRLQNAVFQWCRVAIQHDLVSKQRYTELRRRGHSHARALRGVGDRLLYVLCALLQRQTLFDPNYASSQTAVAA

SEQ ID NO: 267560 - protein, 322 aa, unidentified
MSPTQNPVAAHVGIDVSKERLDVHLLPEGEVFAVANDPEGIDALVERLLQGVVRPDLVVLEATGRYERPAATAIAATGIAVAVVNPRQARDFAKATGRLAKTDKIDAQILARFAAAIEPSPSVLPDHEAQALQAILTRRRQLLLMLVSEKNRLLMAPEAVAKRIRAHIRWLEKELTRTDRELDEAVQESEVWRRNEELLRSVPGVGPVLARTLLAELPELGTITHKRLSALVGVAPFNRDSGKMRGKREVWGGRAPVRATLYMGALVATRHNPTLKEFYERLLAAGKPKKVALVACMRKLLSILNALMRDRAIWRCPHILTP

SEQ ID NO: 267561 - protein, 341 aa, unidentified
MEYYAGIDVSLEASSVCVVDVGGKIVREVKVASEPKVLIGWFSSLGVTLARIGLEAGPLSQWLYAAMRKSGLAVELLETRHVRDAFKAMPVKSDRNDARGIAQLMRLGWFRPVHCKSIAAQEVRTLLTARKLIQSKLRDVENSLRGILRGFGLKVGKTTELRFASRIRALVAGNPNLKMVAAGLLSVHAVLLREFKAFDKQVRVLVRLDAKARLLMSTPAVGPIVALTYASAIDDPARFKSSKRVGAHFGLTPKRYQSGETDYTGRISKIGDASVRAALYEAAHIMLTKPIKGCSRLKSWAMRIAKRAGMKKAKVALARKLAVILHRMLANATPFNAATAA

SEQ ID NO: 267562 - protein, 312 aa, unidentified
MLETRTFIGIDVSKGNLDIASAVLPKVWRVGNDPSGLASLWRRVGKIKAPHLVCEATGGYTRLLVREAGKRNIPISRINPRQVRDFARASGRLAKTDAIDAATILRFAEVMQPAASPPPDQAQTRLTDLVRRRRQLVDMLAMEKQRGAGDEEEIIGSVRQHIEYLTTSVRDMDRLIAEQIGSQQDLAHRAELLSSIPGIGVIAASTFVAELPELGRVGKKQIAALVGVAPMNQDSGLKRGQAHISGGRLSVRCTLYMATLSAIRCNPPIRDFYKRLRDDGKPPKVAIVAAMRKLIIVANFILQSGKPWTLLA

SEQ ID NO: 267563 - protein, 399 aa, unidentified
MLNDTSTPVTASLSNDLSGATEIKNHILDLNHTYHFERIVIGMEATSLYSFHPAMFFHEDSQLKELHVEIMVEQPNKIKKYRDAFEENKNDTIDAFYIADYFRIERFSPSFLKEEKYMALQHLTRTRLQIIEQLTRTKQHFIENIYYKCNTLAYQFKKEELSTNLWSSTMMTLITDEMTLDELANMPLQELADWLQQLGKGHFKDSEKLAQTIQAAIRGSYRLSKLQQDSVNVILGLLAREIRNLEKMIKEIDKAIEDMVETIPEYQCLTSIPGVGKVYAAGIIAEIGQIERFKDHPQVAKFAGLNWREKQSGNSNSQHTSLVNRGNRYLRYYLVEAANSVRRYDDEYKDFYKKKYHEVPKHQHKRAIVLTARKFVRLVVVLLRNHQLYTPPRRLMEDK

SEQ ID NO: 267564 - protein, 412 aa, unidentified
MDVIYPCCAGLDVHKESVVACVRRVTAGKITREVRTFETTTAGLLDLSAWLSEQGVTHIAMEATGVYWKPVWHILSDGEFHLVLANAAHIKNVPGRKTDVNDATWIADLLAHGLIRGSFVPEPATQELRDLMRTRKQLVREQSSHIQRLQKTLEDANIKLESVISDILGVSGRAMVEALIAGESDPVRLAELAHRRIKAPPEKLRAALHGRVTDHHRFLLRLHLRQIDGLSALIGELDQEVDSHLAPFRRAVEQLITVPGIKDLAASTILAEIGVDMGRFPSAGHLLSWARLCPRNDESAGKRRSSRLKKGANWIKTTMIQCAWAAVRTKGCYFQAQFGRLKRRHGPKKAICAVAAAMLTTVYHMLKDGTLYQDLGADHFDRRSKQTKTNRLVKQLANLGYHVQINPLPEAA

SEQ ID NO: 267565 - protein, 312 aa, unidentified
MEKLSYGGIDVSKDRLDVVVLPEGWFFSVSNDTAGWAELVARLRPLAVSAIGLEPSGGYERGIIRALLAAGLSVRRINPNKLRQFARARGILAKNDRLDARLIAEYVAIMPTRVVQRDDAVERLAEIVTMRRQLCDEHVAVENQAAHLEDAMLRRLSKRRLVRLEADIRLLDKRLAEMVATNAAFAQPYELLTSMPGVGPVLAFTLIALLPELGKMGRKQIAALVGLAPYDFDSGKLRGHRSIYGGRMPIRNVLYMAALSASRYNPALKTFSNRLAHANKKSKVIIVAVMRKMITTLNAMLRDNAAWQPQSN

SEQ ID NO: 267566 - protein, 413 aa, unidentified
MQVLHRCCAGLDVHKQVVVACVRTVVAGEVRQQVRTFRTETTALLELADWLTDQGVTHVAMESTGVYWKPIWNLFEDVFALLLVNAEHIKAVPGRKTDVKDSQWIAELLQYGLLSPSFVPAKPIRQLRDLTRQRTQLVRQKVQVANRVQKTLEDANIKLGSVATDVLGVSGRDMLRAIIRGERDPIVLAELARHRLRKKIPQLQEALLGEIEDHHRFLLRMLLEQVEFLEGQIAQLSQRIAEVLPPPFEEALTRLDTIPGIDRKAAEVIVAEMGATLESFPSSGHLASWVGLCPGNHESAGKRKSGKSTKGNQWLRAALVQAAWAASRSKGTYLRDLCGRLAARRGKKKALVAVAHRLVEILFNVLKKGQEYRELTAAERQPGPDKERLARRLLRRLEKLGLKVSVEAEETVV

SEQ ID NO: 267567 - protein, 349 aa, unidentified
MSQTAQTAVAVIGIDIGKNSFHIVGHDERGAIVLRQKWSRGQVEARFANLPPCLIGMEACVGAHHLSRKLNGLGHDARLMPAKYVRPYSKGQKNDFRDAEAIAEAVQRPTMKFVATKTADQLDLQALHRVRERLVSQRTGIINQIRAFLLERGIAVRQGQRFLRAELPRILATPPDVLSPRMARVIEDLAGDWRRLDERIESLSSEIEAVARQDAGCERLMSVPGIGPIISSAMVAAIGAGDAFTKGRDFAAWLGLVPRQMSTGDRTILGKISKRGNRYLRVLFVQAAWAVLIKPKSWERHGLKPWIEAAKKRLHHNVLAIALANKLARIAWSVLAHGRNFEVSKIQTA

SEQ ID NO: 267568 - protein, 345 aa, unidentified
MTVYIGVDFHARAQTISYLTTEDGEIRRAQLDHGQPQEVRKFYEQFAGQQVIVGFESSGYAAWFEELLEELGCEIWIGHATAIRLFARRRQKNDRRDADLILDLLWRGDFPRIHRYSPESRAVLQQLRYRQRLVKMRTMIVNSLVFMASSRGVSLRTQLKSRRGIERLQQIALPQPLIEQRAEMCQLLQELKTRIERVEQWLEAKANSDIRVQRLRTHYGIGPLTGLCLVHTLECVERFANPRKVTAYVGFDPVEDSSGERRRIGSISKQGSRLLRFFLVEAGQIAIRKDQDLARIYQRVLVRRGHAKAKVAIGRRLLVRAFIMLRDEIDYAEFQRRGVAARSAR

SEQ ID NO: 267569 - protein, 398 aa, unidentified
MTRKNTLKSLPTDTEFRVVGLDLAKSDVSVAAIPVDDNTPSLVDRMTYADLLDWAGKISPTLFAMEPCNGYSLLCLQLENLGHEIKVISGSTVSMWINTHLSGQKTDLNDAIALARLAVSDAELTPIRHKSITEIRIQTVQAVRQQLMSQRSKSIVSFKALAQQWGIPCAAGHRNLKKLRESIEAKVDLITRPVANAMLFLLDAVKPLDRQIGQLNQTLQELVMSDERGRLLQSVLGVGTQISARVITVVGNVERFNSPRSLVAYVGVAPRNFITGHKNLTKKKHGNCPDLNHKGQGKISRRGDKLLRSLFIQGAACLYMQFCKDQLPECQLKRWILRQLASQKPYGKLLVSLAAKLIRIVWAVLTYGEKFNIQKAGMTRSMWSEMALETPLNKEVPA

SEQ ID NO: 267570 - protein, 272 aa, unidentified
MRFYTQQHQHYCGIDLHARTMYLCILNPAGAVLLHRNLRATPEAFLQAITPYRAELVVGVECMFTWYWLADLCAAEGIRFVLGHALYMKAIHGGKAKNDRIDAHKIAVLLRGGMLPQAYVYPAAMRATRDLLRRRLHFTRKRAELLTHIANTNSQYNLPAFAKKLTYRGNRTGVSQRFADPSVEQSIAVDLTLIAHYDALLRELENFILRTATGHDAHTLYRLRTVPGIGKILSLVILYEIHDITRFARPQELASYARLVKCAKESAGKVAA

SEQ ID NO: 267571 - protein, 344 aa, unidentified
MIGIDIGKNSFHVVGHDARGAIVLRQKWSRGQVEARLANIPPCLIGMEACVGAHHLSRKLASLGHDARLMPAKYVRPYSKGQKNDFNDAEAIAEAVQRPTMKFVATKTAEQLDLQALHRVRERLVSQRTGIINQIRAFMLERGIAVRQGIGFLRTELPTILATRTDALSPRMLRVIEELAGDWRRLDQRIDGLSGEIEALARQDQACSRLMTVPGIGPIISSAMVAAIGTGDVFSKGRDFGAWLGLVPKQISTGDRTILGKISRRGNRYLRVLFVQAAWVVLVRIKNWERYGLKSWIEAAKRRLHHNVLAIALANKLARIAWAVLANGRAFELRTDDAGVVRPA

SEQ ID NO: 267572 - protein, 370 aa, unidentified
MRKTEEMPRICIGVDLHKLQFTVSAVNEETGELVLNGVFKTNSEGYEEFCEKVHDIEEETEATVEIAVEATGNARYFKNKMEAEGFGVVVVNTSKFKVITMSTKKTDANDAATLAYYLSKDMLPESHLCDQTSEEVRRMLKTRSILVSSTVKIKNQIHGMLLGYGIETKSAQFQSKKKRQELLKDLADQGYSQFTASSLEVTLNILDDIYAKVKMIEEQIKEMVKENEDVELLMTMPGIGFVGATTIASYLSNIERFDGDFKRFSSYLGIVPSVHNSADSVHMGHITKRGPQDLRTAFVQVAMGIIRQPQNTAEWKLMKDYQLMKINKGSGRAIIALTRKVARIVFAMLNNHKPFNPDLMKKSEKDCLIA

SEQ ID NO: 267573 - protein, 464 aa, unidentified
MRAGKQLWRNGKEKKEWGRRLQSEDPGLEVVHPHAAGIDVGNSTHYVAVRPDRDPEPVRRFECFTADLHRLADWLQSCGVKTVAMQSTGVYWIPLYEILEEHGLEVYLVNARHTKNLPGRKTDVQESQWLLKLHTYGLLNNSFQPVSEIRVLRTYWRQRGEHVRGAATCIQRMQKALTQMNVQLANVISDISGLTGQAIIRAIVAGERNPLKLAMLSDPRVHASHEEIAKSLEGNWRPELLFVLHQELDMYDTYQKRIAECDQRLQKHLASFTRPLPIQPPTQKLKTKKPAAKNAPRFDLSSELQRVTGVDLTRIDGIDVMVAQTLLSEVGLDMSRWTTESHFASWLGLCPDNRISGDKVLSRGTRRVVNRAATALRQAANTLMRSRSYLGAQYRRLRTKLGAPKAITAMAHRLARLVYRMLKYGQTYVDKGTEYYEERFRQQQIQLLRKRAAKLGLQVAEIHA

SEQ ID NO: 267574 - protein, 344 aa, unidentified
MSKHSIRAGDVAGLLVRLAQLKEKARGRTGRDFPIIAIQEAGLDGFWIHRVLQSEGIESHVVDAASILTSRRRRRAKTDGIDGETLVRTLLAYKRGEPRVCAMVKAPTPEEEDRRRICRERKALVGERVEHVNRIKGLLFAQGVSDYEPLKRNRRARLGELKTGDGRPLPAHLKAQISRELDRLELVLPQLKAVEAERDALLKPVSEGCPTPAAMLAQLKGMGPEFTAILWSEGLFRSFSNRRQLAAYAGLAPTPWQSGSVAHEQGVSKAGNPRLRTTMIQLAWLWLRHQPTSALSVWFQERVQSNGGKMRKTMIVALARKLLVALWKYSTRGVVIEGAAMKTI

SEQ ID NO: 267575 - protein, 355 aa, unidentified
MDRTKYIGMDVHQASISIAVRDASGKLVIESLIETKAATILEFLQGLKGTLWVTFEEGTSAAWLYDLLKPHVVKVIVCDPRKNALLKTGNKNDRVDARKLSHLLHAGLLTPVYHGESGVRTLRELARSYLTLTKDLTRVMNRLKALYRSWAIPCVGEKVYSPRHRSAWLEQLSEAGVRRRAEQLYQQLDILLQIRRDARRELLRESRKHPAHELLRQIPQLGPIRVALLIALVQTPHRFRTKRQLWAYCGLALQTRSSGEYRFTAGQLQHSNRLPALRGLNTNHNHDLKNVFKSAAMHVSTSPDALGDFYRSLLAKGMKPAMARLTLARKMAAIVLTVWKKGARFDPGELKRQAA

SEQ ID NO: 267576 - protein, 357 aa, unidentified
MAEGSWVGLDVHARSTVAGVLDGASGELRTLPVPPRSNETVDWLQTLPAPVRVAYEAGPTGYGLARACTEAGIACLVAAPSKIPRGAGDRVKTDRRDAERLARLLRLRELVAVRVPDRAEEAARDLVRAREDARGDLMRARHRLSKLLLRHGLVYDGSAWTLAHTRWLNRQRFASRPLARAFEESYTVVVQAKARRDALDREISQLAAEPPFRDVVGRLACLRGVSTLTALALTVELGNWHRFRPQSLGPFLGLTPSEDSSGSRRRQGAITKTGNSHARWLLIEAAWHQRRPPRPSATLERRRAHQPAPVRARADHSARRLHQRWQHLEQRGKPRTLIATAIARELAAHCWALATMS

SEQ ID NO: 267577 - protein, 387 aa, unidentified
MYYIGIDISKFKHDCVVIDDSGEIVTPSWSFTNDSEGFAHLKILLDSLDAETRIGLESTGHYGMNLKLFLESNNFSFMEFNPLLINRFIKSKSLRKTKNDSIDCTMIARYLMTVEYKPYPSSFYHTEKLKSLTRFRDSLIRLRSRQLVELTNILDKVFPEFKPFFGSRFSVTALYILSNYSSPEKIANMNSKSYEALRKLSRGRFSTVDFAKLKQLAKNTIGTTEDYLLLQMQIVLDIYRQLDSKVDETEVSIKECVSDMNPPMLSVPGIGIESAAVILAEFGDFSKFKNASQMLSFAGLEPGYFQSGTSETTGKMVKHGSSYLRYALMNCAQTVVNYEPTFAMFYAKKRAEGKPHRVALSHVVKKLLRVIYTLQTKNIAYDTDFVR

SEQ ID NO: 267578 - protein, 428 aa, unidentified
MKVLYERVAGIDVHKDMIKVAIRSPGEKPWTRKTEVLQFRTFYGVLRETARELRRRGVTHVVMEASGVYTEPVYYALAEQDFTTVAVINPAHARALRGHKTDAKDCARLAELFECGLLHGSYIPAPELKEVRDLTRYRIKTVQARTSEIQRLAKALESAGIKLGSVASDITGKSATAMIGALIDGERRGQVLADLAIGRMRTAGKLADLSMALTGRFSGHHAMLCRLHRDRIEVFDAAVAGLEEQIAAKTVPWQKELDLLKTIPGFGDAVAQAWLGEIGPAPHQWFASHEKLASWVSLCPGNNISAGKRKHGRTGDAGTYLKPLLIQAAWAAIRSQGRLQARYRRLARRFGGDSSPAAKKKAITAIAHTLLKIAYQVLKTGTPYQEPGADFYTRRESSAARQAYLERQLQKLHPGATITITISPPEAA

SEQ ID NO: 267579 - protein, 406 aa, unidentified
MLEAMINSCAGLDVHRRQVVCTLIKDAGRTTREYPTFDRELKELAHWLKGEEVELAVMESTGIYWKAVFACLEQAGIEGRVVNARHVKQVPGRKTDVCDSEWLAELAQCGLLRSSFIPPRDLRELRLLTRYRRKLSGMLSGEKNRLHKVLDDAGIRLGCVVSDIDGVSARAMVEALIQGGSTPEEIAEKALGRLKEKKDALQLALEGEISDRHRLVLQKVLGHVKWLQRQIAIIDGQIVAAMKPYQEEWKLLQTIPGLDVVSAAMLIAEIGVDMTRFGSKDRLCSWSGICPGNNESAGKRKSGRIRKANPYVRSLLCEAANSARKTQSQFQGLYKGLVIRRGHKRAVVAVGHRILQLVYIVLSRKEPYKDPEIDYEALVVHRNAPRWLAALDKYGYLNNIKAQAKQ

SEQ ID NO: 267580 - protein, 428 aa, unidentified
MNCTQNEKLNQVTPHTLIVGVDIAKFKHVARAQDDRGKILGKALVFTNTKEGFEAFFSWLEEMQHKHEKSDVLVGMEPTGHYWLNLAYTLKERLVSFGVVNPLHVKRSKELDDNSPTKNDIKDARVIAQLIKDGRFSYPRLPMDEDAEIKAGITIRNQIVGDLQVLQGRVHNWLDKYFPEFLTVFKDWSGKMALATLEHIPLPGQLNQTTPERVAEIWSIYGGVQRPSLKRIQRLQEAAARSVGLNVGLQMAQREIATNIKRYKMLKEELRALEKELETLVLTLPGIAEMLTVPGVGMVTVIELYSELGDIKNFKNPRQILKYAGLNLRESSSGKHKGQARITKRGRAKLRALLFRTVMPLVRHNRAFKALHQYYTTRQENPLRKKQSLIVLCGKLVRVLHTVGQKQCPFDEERMIQDIPHLSLALKV

SEQ ID NO: 267581 - protein, 362 aa, unidentified
MNYVGVDIHKKYSVLCAVDERGRKLREARVEGNAPFGFAQFFSGLGGPSKAVVEACWNWGRIHDELEELEGIEEVVLAHPYKTRLIADAQIKTDRLDAYALSTLLRGNLVARAHVPRRETRMRKNLLRQRLYWARLRTMLRNRIHALLDRQRSLELPQCSDIFGVRGLSFLRRLELPETDAALLREQLALHDLIAQQMKAQEKRIGLEFGSEAMHRQLMSVPGIGPTLAAVIACEVDSIERFSSAEKLCAYAGVVPTTHSSGGKTSHGQLLPFCNKWLRWALIEASWVAIGCSPYFGALYKQHRARGKKANSAVLIVARRMCRIIWQLLHEKRDFEKRPLRPNFNFPGCSVVRLTAATAARP

SEQ ID NO: 267582 - protein, 281 aa, unidentified
MVALDVHKFSIVAAVLLPGGGRPDVSRIETTEKAIRRFIKTLGGPQGLAVSYQAGSGGFALWRLLTSIGVACDVIAPSLVPVRAGDRVKTDRRDAKKLVGLFCGGLLRLLQPSTPETEGLRDLLRCRDDIRCARTAARHGVAKQLLRHGRIYRDGKKAWTLQHRAWVCRQQLDDPLAHEALSQMLTHLDSLDRQLAAVDAHLEDVAGQDRWAWQVDRLRAFRGIATLTALGLIAEIGDFARFAHPRELASWLGSAPASTPAAISSTAGTSPRPATATPAGC

SEQ ID NO: 267583 - protein, 399 aa, unidentified
MLNPLSLQLRVGVDVGSRCHCVAVGLSDGSLLEEFEIPHTAEGFRDFFSRIEGHAKTHPHPIAVAMEGYNGHVRPLDSLVRARGWRLFNVNNLKLARFKEIFPAAAKNDSIDTRKTLELFQLRDHLPMAGDVLQEVMATPEENDILKRLSRRRRRLVNERARLLSSLQADLQAACPGLLEITRDAGNLWFLNFLTCRKGFTKLARIRRASLLKIPAIGPHFADAIRAWQSCAFFSHDARLVGDMIQQDAARILELRRQIRALEDQMAGIAERSRIACQLASIPGYGAICAAELAGEIGTIERFRNEASLALYLGMATLDHRSGKLRGSKPPKHVNARAKAAMMTAVDHHRKSVPQSRRYYEQKRAEGKRHNQAIRALGRHLCRVIFKMLCQERPYRIET

SEQ ID NO: 267584 - protein, 345 aa, unidentified
MKKGITIGMDLGDKKHQVCILDETGKIMVEEAVIGNRTAMTSFFKRYRGAVVAMETGTHSRWVSQIAEAEGLKVLVGNARQLRMIWQSRRKSDPRDAVMLARIARMDPELLYPIHHRGQQVQMDLEIIRARDLLVRERTRMVNHVRSVVKSLGERLAPSSADSFGRKAQIPEALNESLPPILDLILELTKKIRGYDLLIRKAALNKYPETERLRQVVGVGPLTALAYVLTLEEPERFAKSRMVGAYLGLAPRLDQSGQTDKQLRITKHGDGYLRRLLVGSAHYILGPFGPDCDLRTHGQKLMQRGGKNAKKRAVVAVARKLAVLLHALWRNGEKYEPKRQQPLAA

SEQ ID NO: 267585 - protein, 433 aa, unidentified
MHGPGRRRGADKEYVVPKKRNKVGILPVIEPNAAGIDIGATEIFVAVPGDRDAEPVRCFPTFTVDLERLADWLQQCQIRTVAMESTGVYWIPLFQILEKRKVDVRLVNAHHVKNVPGRKTDVQDCQWIQHLHSVGLLRGSFRPDDEICAIRSLWRHRDNLIQLATLHLQHMQKALDQMNLQIHHVISDLDGTTGLAIMDAILAGERDPHKLAQLRHPRVRASEETIMKSLVGDYREKHLFTLRQSLNAYRYYQQLIQEVDLQVKQMMQRLPSKVADGEKPPKGDKPRPRKIPWRNEPPQLRDDLYRAFGVDLTEVPGINTLTAQMLLTEIGPNLARFPIAAAFCSWLRLCPDPKISGGQVLSSRTRPTKNRAALALRMATQGLHRSDTFLGDYFRRMKARMGVPKAMTATATSVGSGLMRYAAVEVGSWPLAR

SEQ ID NO: 267586 - protein, 407 aa, unidentified
MTAVMIGVDPHKATHTAVVIGAAEEPLGELRVRASAGQAEKLVAWAADWPERTWAVEGAAGLGRLVAQQLVAAGERVLDVQPKLASRVRLLQAGDTNKNDPNDALSVAVAALRSKAARPVMAEDYPAVLKVWSKRHRDLARLRNQAACRLHAVLCDLVPGGHPKEISAAQAARILEQASPSGAVDQARAELAAEFLEDMRHLDAQLRGTRKKLAAAVRASGTTLTEVFGVGPVIAGTIIGDIADVSRFPGRDHFAAYNGTAPVEVSSGNRKTHRLSLRGNRRINHAIHMAAITQIRHKHSDGRAYYDKKVAEGKTHKEALRSLKRQISNAIYACLLADARRAGQQPAQRAREGNRGTTLTPARPAHTPNAGSSDKPLPDPGTTIRPGTRAATPSLPKPTSKKTPATT

SEQ ID NO: 267587 - protein, 387 aa, unidentified
MLPERTQVAWMSLVMGIDQHRAQITAEWLDTETGEVSRARVRPADRAGVRRFLARFAGQQLEVALEATTGWRFLVEELRAVGAVVHLAEPAETAALRGNKRRAKSDRADARHHRELLLAERLPESWIPPDHILDVRARVRLRHTLIEQHTEWQQRIQAVLYHHGCRQRRRLMEGDGREWLASQALSETAREQITVAMAIIDALDVQLAPLTKELCAWARRQAGCKALIDAYYGIGELCAVTVIAELGDCRRFQNSRDAVRYSGLDVTVYQSDRHRAPGHLSRQGPPALRWALYEAAQVARRPGSPDRGYYEQAAERLGGNRACLALARKLLKRCYHTLRELGDDALTPPVERPQPGPGSAAARRASSGSPRSLEPTTTNQRADVLAA

SEQ ID NO: 267588 - protein, 369 aa, unidentified
MEEGTTYVGLDAHQASTNGAIIFATGEVVEDGFATTPDGIRRWVRRLKRRCPGRIVCGYEAGPLGYGLQRTLIGFGVDCIVIAPSLIPSKPGDRIKTDRRDALKLAELLAAGLLTEVHVPTPEQEAIRDLCRARASVKGDHKRIQHRLSKFLLRRAIRWTGGRKMWTRAHHEWLRGQRLEHAADQDILDDHLLALEQNEGRLVTLDEKLAHWSTQEPYAQAVAWFRCFRGIDTLTALSIVAEIHDWRRFPSPRSLMAYLGMVPSESSSGGRFQRGGLTKAGNSRVRRLLVESAWHYRHRPSVGYRLAKRRVGQPAEIIAIADRAQQRLHRRYARLSARGKSQNLVIAAVGRELVGFLWAAMQRTEIRSA

SEQ ID NO: 267589 - protein, 436 aa, unidentified
MEGAGDEPLFCERAAGIDIGKAVVSVTIRVPSDTRRGGRQQETREFGTTRRQLLELADWLRCWGVERAGMESTSDYCKPVYFLLEREGFDCVLYHSSQVKALPGRPKTDKLGSVWLAKVTEQGSLAGSFVPPEEIRRLRTHTRYRRRLIQARTAEKQRCEKLPEDGHLKLSSVISDIHGACGRDMLRAIIAGERNPRVLAGLARGVMRRKTARLEEALDCSFFTGEHAFVLQMMLDEIDHFTARIAGLDERIAVLCEPYGRQIAQLDAVPGFGVTAAQELIGEIGTDMTAFPTPGHLCSWARVAPRVTRVCGQAQRQERHRQGQPLHRRHPRRRGRGRGPHPDIPPGQVPAHVHPHAEEESPGCPHENPARHRPRPPVRPPGRVPRTRPRLLRAPGRHPPPGPQPRAQPRTPRLQGHHRARPRSRSRDRGTDHPHR

SEQ ID NO: 267590 - protein, 350 aa, unidentified
MSQNLNSAVAVIGIDIGKNSFHVVGLDDRGAIVLRQKWSRGQIEARLANMPPCLIGMEACVGAHHLSRKLKALGHDARLMPAKYVRPYSKGQKNDFRDAEAIAEAVQRPTMKFVATKTADQLDLQALHRVRERLVSQRTGIINQIRAFLLERGIAVRQGQRFLRAELPRILATPPEVLSARMVRVISDLAEDWRRLDQRIDCLSSEIAVLARQDAGCERLMSVPGIGPIISSAMVAAIGTGDAFSKGRDFAAWLGLVPKQISTGDRTILGKISKRGNRYLRVLFVQAAWVVLIKPMSWERHGLKHWIEAARKRLHRNVLAIALANKLARIAWGVLAGSGRTFEASKLQAA

SEQ ID NO: 267591 - protein, 392 aa, unidentified
MVISVGIDVSKDKHDCFIVSSEGEVLADVFTIPNTMDGFNLLLQRVRECTTPQDKIKVGLEATGHYSYNLLGFLLDNGLATYVLNPLCTNLYRKSLSLRKTKTDRVDARTIAFMLLSDAGLKPYTDTAYHNEELKSLTRYRFDKVKERAKLKSSIARLICILFPELEKLVPSLHIASVYSLLEEFPGAQQIAATHLTRLKALLETASKGRYKRDMALEIRDAARNSIGSSMPAKSLELQHTIRLIRELDNEITEIEEQIQAIMDELNSPITTIPGLGFRMAAMIFAEVGDFTRFDSPDKLLAYAGMSPSTYQSGQLKNCYPHMEKRGSRYLRYALYNATKYVCHWNPTFADYLAKKRAEGKHYNVALSHATKKLVRLIFALEKSRETYRLAV

SEQ ID NO: 267592 - protein, 343 aa, unidentified
MSEITAVVLDLAKRVFQVHAADRDGRAVSRKRLRRNQVLGFFAELPPCLIEVEACAGSHYWARELQALGHEVRLIPPQYVKPYVKTNKNDATDAEAICEALTRPTMRFTAVKSAEQQSVLMLHRTRELLVRQRTMLINALRGHCAEFGIVAAQGRSRARELIELVEDPADDRLPSIARQALQCLTSQVQSIQMQIASLEKKLLAWHYSCEASRRLAKIPGVGLITATAVVACAGNATQFRSARQFAAWLGLVPQQRSSGGRERLGHISKRGDGYIRRLLVHGARARLAWSRRKKEVRSAWLTGLLARRPANVVLLAMANKTARVAWAMLNRGERFDNRIGAAA

SEQ ID NO: 267593 - protein, 402 aa, unidentified
MNAVGIDVSKGKSMVAIMRPFGEIVSTPFEIKHTTSDINSLVELINSVEGESRIVMEHTGRYYEVLAHQLSEANLFVSAINPKLIKDFDNDSLRKVKSDKADAVKIARYALDKWQNLKQYSVMDELRNQLKTMNRQFGFYMKHKTAMKNNLIGILDQTYPGVNTYFDSTARSDGSQKWVDFASTYWHVDCVRKMSLNAFTCHYQNWCKRKKYNFSKSKAEEIYGKAKELVPVLPKDEITKLIIKQAADQLNSTSTTVESLRTLMNETASKLPEYPIVMAMKGVGLSLGPQLMAEIGDVSRFTHKGAITAFAGVDPGVNESGTYEQKSVPTSKRGSSDLRKTLFQVMDALIKTKPQDDPVYQFLDKKRAQGKPYYVYMTAGANKFLRIYYGRVKEYLSSLPEF

SEQ ID NO: 267594 - protein, 354 aa, unidentified
MKRAKKELQPGDEIFVGIDMHKLKWHVTARTADFELFCGGIPGKWEALQRILDRYKGHQIQTVYEAGYFGFWLHDNLIEYGAECVVTPPSLIPQEYGNRVKTDRRDSRKLAHFLAKGMLKRVWVPTEKERYHRQVIRRRRQLIGDRIRTQSRIKAELRLYGIDIPEPQSKWTKIYLGNLGRIRFNNRWMQESFKRLLELYYFLDKQIIKQTELLRKLSETKLYQERVKILTTTPGIGMIAAMELLLELQDVSRFQRADQIAAYVGLTPSQYSSADKVRMGRITCVGKNSLRAMLVQASWALIRKDGVMREKYDRLKSRSGGKRAIVAVARTLLIRMRRMLLDNNPYVIGLVATN

SEQ ID NO: 267595 - protein, 330 aa, unidentified
MKTWNVILGVDVSKLTLDISCTERNIHIQIENGSKGFEVFKKWCKTHEIDLQETLIVMEYTGGYEYRFLQFCDAKSIPYCRVPGLEIKQSMGMVRGKSDKADSFRIGQYGEEKRNRLTPSKPLDDNILKLKQLLSFRKRLVRDNAGLKSTEKERKHMYPVKQSDTIIGICKAKIKANEKFTHKVEQEIRELIKSNEAMWQNYRIITSIKGIGEVNGWMTIAHTENFTSFPDARTYGVYVGVIPFGHTSGTSIKGSKRVSYLAKKELKSELTQAAKAAVAHDQEMYAYAERKLKNKDYGLVLNNVKFKLILRMFSLVKRGEMYVENYKRSA

SEQ ID NO: 267596 - protein, 343 aa, unidentified
MEYFAGLDISVKESSVCIVDDTGRIVREAKVASEPEALLPVLTNPAYHFKRIGLEAGPLSQWLFSALAEAGLPVICVETRHMRAVLKAQINKTDRNDARGMAQMMRAGLYRPVHVKTLRNQKLRMLLTHRKLLQSKAIAIDNELRGTLRNFGLKVGVVGRVKFESRIKELVENMPDLAVLVEPLLVVRRVLREQLGILHRRLLTIVRDDEVCRRLMTVPGVGPVVALTYRATVDVPARFRNSRAVGAVFGLTPSQYQSGEINRTGAISRCGDEMMRVMLYEAAPIVLVRSVKWSWLKAWAMQIARRRGMKKAIVALARRLAVIMHRIWVDGTEFRWTREVAAA

SEQ ID NO: 267597 - protein, 387 aa, unidentified
MAQVNDLSRSLTAFDPISTLVVVVEMSKASWLVSGVVPGIERQPLKKLEPDATALLRLIERWRNEAMRSGRPISRITLAYEAGRDGFWLARWLITRGIEAHVIHSASVAVSRERKRAKTDRLDAAMLMRVFLGWLRGERGHCGMVVIPTMEEEAARRPSRERESLVNERSRITNRMKSALARLGIRGFKPHLRKAPERLAGLRTAEGTGLPANVIEEFRRDMARLALVREQISSIEKTRAERLERAPDTGPHAMVRLLARVIGIGIETADMLVREILSRRLRDRRAVARYAGLTGSPDESGLKRREKGLAKAGNARVRRGLIQLAWRFLMFQKDSALARWYRTRTEGPSGARKTTMIVALARKLLIALWRLVTTGEVPDGVELRPAA

SEQ ID NO: 267598 - protein, 434 aa, unidentified
MAYRIAGIDVHKKKLAVVVADVEVDDAYQFERRWFGSNPEQLQRLAEWLIEQRVEEVVMESTAQYWKPLWSALERYWKPSCQNREGAGKMSGTLHLAQALSNRGRRGRKKDFPDAERLVKRLVSQELTLSFVPDTEQRLWRTLTRTKYQRTRDKVRLQNQLEALLEEAHIKLSSLVSDLLGVSARRVSDLLGVSARRMLHALADGETDPAAVAALAHQCLRATSAELRDALGACTELNPVYRRLIRLALDDLQLIEQQIGQLDQEIASLLREHQDAVQRLAEVPGLGVDSAQQIIAEVGAKAATFASAKNLVSWVGACPGEEESAGVNRSKRSPKGNRQMRRILNQAANAAVKHKGSIFEIVYRRFVSRLGHNKTIGAIAHRLCQLIWIILHKGVRYEERGPSVCEKAKRVRTSRMIRTLRALGYRVEPAVIPA

SEQ ID NO: 267599 - protein, 379 aa, unidentified
MRRVCGLDVHKDSIYMCILYENGSKIESVFGVLTPELDKLRDLLVSHHVCEVALESTSIYWIPIWNILSVDFSLKLVNPYFIKQLPGRKSDVKDAEWIATVLQKGLIRGSYVPDCMIQCLRQYERRNHELSKNIVHAEQRMDMILQRCNIRISNYVSCISCKGYQKVVNAIISGESNPKVLVTLIHKRTLNKHGRQVVEDSLNGFVSDTDRDILRQYRDERMQMEQHKSENKAKMQAICEAHYCEELELLQTLPGIKEESAANIIAEIGVDMKMFLTASAIVGWAGLKPRNDQSAGKIKSRKITHGNKYLRKILVEAAWSAARTKDSRFMKMYQRLLARGKSKQKALIAVARKLLVLIWNMLSKKEAFNPEYKRRIQAA

SEQ ID NO: 267600 - protein, 361 aa, unidentified
MENIRRISAERTIALGLDVDLARSTVVAIDVATGSIEFEGHVAHTEQAWRKVLKRFPDAALWACYEAGNRGFGLCRMLRRMGVDCQIVAPSAMPKSPVHKQTKNDRRDALALAQLYFNRPRSFVRVPTEQEEADRQLMRTRIQLVNDKVRVMNRIKSFLNNYGFQPPVGKGKATWSKAFRDWLKSFDTGHPGLRTALDAKLRQLDFLEEEIRRITAEITALSRTEAYHDRCQRLCRIRGVGTLTAMAFLLEVYRPHEFSTAEKLASHLGLTQCEYSSGGKVRRGHITHWGPSHLRRLLVEAAWIWVSKDENARQRYASIRFGKERKRAIVAMARRLAIAMWAMTVKEQDYDYHWVKAPQAA

SEQ ID NO: 267601 - protein, 345 aa, unidentified
MTKLIAGMDLHSNNVVIGLMDMDGKRVAHQKVECRLSEVVKFLAPYKKRLEQVAVESTYNWYWLADGLQALRYPVVLANPAGMEQYSGIKHADDTNDAFFLAELLRLKILPTGYIYDPHLRPVRDLLRRRLTLVHQRTALMLSFKSLYTRTTGLEMSLGELKELEIKAAQELYDHPAIQLIAGMQIKHIEQLTESIEKIEKAVLGCARELPLYTKLTTLPGVGTILGMTITMEVGDIKRFAEAGHFASYCRTVEAKRTSNNKKKGPNNSKCGNKYLAWAFVEAANFARRYDEQCRKWSERKAAKRGKVIASKALACKLAKAAWHLMALGTDYDAKRMFGQPATTQ

SEQ ID NO: 267602 - protein, 458 aa, unidentified
MSKRSKKTKSQSFKAPSLPRHLQHINLNAAGIDIGSERHLVAVPEGRDEISVREFGTFTADLEVLAAWLKQCGVTTVAMESTGVYWIPLFELLERRGFEVKLVDARHVKNVSGRKSDVLDCQWIQQLHTYGLLAGAFRPPAEVCVLRSYLRQREMLIQTASMHIQHMQKALQQMNLLLHNVVSDITGLTGMKIIKAILAGERDPRVLAGNRHERCQNNAATIAKSLVGNYREEHLFALRQAVDLYETYQAKIADCDQAIIKQVEKQPDISDDEPPTPEKQVQARDRIRDGVDVRDLLFKKSGVDLFAIPGLAADTLLTLVSEVGFDMKPWKTEKHFASWLGLCPGTKKSGGKVLNNKTKRNPNRATQAFRMAAASLYRSQTALGAFYRRIKSRAGGQQAVTATAHKIARIYYAMLTKGTSYVELGQQAYEQRYKQRRIDHIMTQAKSLGFQLVPCVTS

SEQ ID NO: 267603 - protein, 337 aa, unidentified
MLYTGMDVSADKISVAVKNNSKLFKFKEFNNNASGHKQIIKYISSKKCKTRVCLEATGVYHFDLAVAISNIQHFEIMVINPRQAKHYATVINAKLKTDKADAEILSDFALRMKFVPWQRPSENRLRLRYYARRIEALVHQKAQSKNQLHALEFSEYTPKEVIKSVQAMIAIYEQEIDRMQKIALEQINQQEDLREYFQLMISISGVGERSAILLLGELLVLPDDLTNKQLVAFAGLNPKIVSSGKSVLKQTKISKSGNKQLRMALYMPALTAVNCDPFMKAYYWHLIEDNGLKKLQALCAVMRKLLHAMNQMLKKKEIFCPARFYRLPVVANQLIAS

SEQ ID NO: 267604 - protein, 401 aa, unidentified
MDPQIRVGIDVGCKAHRVAISDSDGSILEEFDISHTDAGFCDFFRRIDHHRQELDLPVAVAMEGFNGYARPLDRLIQERGYTLYNVNNLKLARFKEVFPAAAKTDPIDTRKILELFHLKDHLPLAKDALQKVVSAPLVNDKLKRLSRRRRQLVNEKVRVANRIQSDLQAVCPELLAITNKVSNLRFLRFLTCRDDLTQLAHLRHTTLLKIPSVGQKYARVIQEWQRKASFSAEVEYVGPMIIQDARRILELLSQIHILDEAMAELADQSELACRIGSIGGFGKTCVAELAGEIGTTQRFAGERSLALYVGMSPLSKDSGQHHGSKRPRQVNHRAKAAMMTAVARHINFVPQSRVYYDRKRAEGKSHNQAVRALGRHLVRVIWSMLKNERDYELREVIPSVT

SEQ ID NO: 267605 - protein, 413 aa, unidentified
MEATAVPCRVLAGIDVHKKMLAVVVRRDQNGETSYQKRAFGTTRSEIEHLTAWLQHNFVTEVVMESTAQYWRPVWYGMEAHFTLHLSHPLQTRAPRGRKRDFRDAQRLADRLSAGDLEESFIPGAEQRAWRWLARTRVDLQRKITRVRNQVEGVLEEGGIKLAAVVTDLFGISGWCMLERMAAGETDTEALVELAQGKLLKKKAQLREALKGSLPSHCRLLLRQHMEQVTLLRRQVVELTAELGRALKQHAGIVERLCKLPGVDHCAAQALPAEIGPRAAAFATPEQFASWIGVCPGSQESAGVSYSTRSAKGNRYLRRVLCQIAWAAVHSKGTFFKQLFNRLKPKIEGKGAVWAVAHRIAKVIWLMLAHEVDYIEKGPAPPNQRTLMRKLRRLARDFALLGIDINKAALASV

SEQ ID NO: 267606 - protein, 343 aa, unidentified
MEYYVGLDVSLKQTSICVVDQSGSVVREGVVDSDPEAISVYVRSKAPGAVRIGLETGPTSTWLWTELKRLGLPVICIDARHAKAVLKMQINKSDRNDAIGIARIMQTGWFKEVHVKDIDSHTVRALLASRALLVKIKRDLENHVRGLLKNLGLVIGRAKFNVFAVRAEELIEGRPELIAAIRPLLEARTAVEQQVSELDRKVMKLARHDAQVRQFMTVPGVGPITALAFKATIDDPARFARSRSVGAYVGLTCRRHASGEVDWSGRISKCGDAMLRRYLFEAAGVLLTRVPKWSAVKAWGVKLVKRNGLRKAKVAVARKLAVILHRMWIDGTEFNWSKKEIAA

SEQ ID NO: 267607 - protein, 307 aa, unidentified
MAACVGIDVAKHTLEWSLGTEGKIQHLRNEPRPIAALVRRMVTLDPERIIVESTGGYERKLVLKLAEAGLPVVVVNPRRVRSFGEGMGFLAKTDAIDARLLALFGEKAEPPVRPILQGTDRLLADLVARRRQVVSMVVAEKNRCETASATLRRTIEPVLRTLAKLLRDLERRIDTLLMQDADKAELFALLQSVPGVGPTVARTLLIDLPELGHLGRREIAALVGVAPFARDSGTVRGVRRIRGGRAAVRTVLYPAAMTAARFNPVLKDVYDRLREAGKPPKLAFIAVARKLLVILNAIARERTAWQS

SEQ ID NO: 267608 - protein, 360 aa, unidentified
MAGTMTWAAMDVHARSTHATSLDVMSGELTRRRFDTGAVDPVVAWLVSLPGPVRCCYEAGPTGFGLYRAAGAAGIDCQVIAPSKTPRASGERNKSDQRDSELLLRQLMAGALTAIAVPSATFEAARDLARAREQVRADLMRCRHRLSKLLLRHGRVYDRKAWTQAHARWLASQSFEQPNTELAFIDNLAACDGLLARKQALDERLSRIAREPEFWPLVSRFRCFRGLDTLSALIIVLEVADFTRFARAVQLGSWLGLVPSREQSGEHDRHGAITKTGSRYARRILVEAAWHYTRPPRIGQTLAERHDGQPDHILQIAWRAQHRLHRIHKRMRERKKPGNVITVACARELACFLWAAATAP

SEQ ID NO: 267609 - protein, 448 aa, unidentified
MTATSVLAVLDPLAAFVDVGSEHMHVSIAGGPPEVFGTVTGELHRLRDWLQERGVKSVAMEATGVYWLPLYGVLEAARFQVSMVNGKQTRNLPGRKTDMKDCQWGATLQAHGLLQAGFVPPAQIRRLQDYLRLRADHLSSAAACVQHQQKALERMNVKLHDVISSLVGDSGIRVIQAILAGERSPERLLALCDVRIQNKKAQRVKESLRGTWAEEHLFALRQAVENWQHYQGQIAACDRQIEAVLREMSALDQPHDKEVKTSPVKRTGANAPQIEGLHKILAKLCGGKDLTVLPAHTDYSLLQLIGEVGTDLGKWPTEQHFTAWLGLAPGSHQSGKRNGSVRRKRNRAGRLFCLMARSLARSKNIALGGFYRRLAARRGGLVANLALARKLAALFWRVMVKGLDYAESGLKAYEEQVLETKRRALCHLAKQLGRVVLPSLAELQTVKN

SEQ ID NO: 267610 - protein, 342 aa, unidentified
MSEIITVGLDLAKNVFQVHGADGAGRGVLRKKLRRAQVLEFFGQLPPCVVAMEACGGAHFWGREIGKLGHDVRLIPPAYVKPFVKRQKNDAADAEAICEAAVRPTMRFVPVKSEETQGAAMVFRVRELLIRQRTQAINALRGHLTEFGQIVPQGAANTSKLIAVVEDPDSGIPADAIATLKVLVMALAHLEAEIGKLNAEIARRAKENDVARRLMTVPGIGPLIATAIAVLAPPPETFRKARDFAAWLGLVPRQHSTGGKQRLGATTRMGERSLRRLLIIGANSVIIKRHAHAAAKPGTWLGGMLTRKPPMLVRVALANKMARIVWALMARGGVYQSPAAAA

SEQ ID NO: 267611 - protein, 394 aa, unidentified
MILVGIDIGKSSHYFSVIRKKDGEVLLEPSKIANDHEGFESLIRSVRSYRKEDILFGMEDTGHYHFALLKYLLDRKFKVALINPVITDFTRKANGGISKTDRLDTLTICDVLSSNRQKKPYRIFRVSRFDLYEQRSLTRHHHNLKEELNVYTNRLQKCIDIVFPEYNGLFSSRYGIVYNNVLKVYGSAANIASADIRSLRKCFEFKGRGRRISLTAEKLRQAAINSIGMDSAADTIQIRHLIQMVEQLSDQIEETDKKIEEFSIRLNSPILSIPGISHFSGTSILSETGDINNFTHHAQIIKYAGVAPLVYESSQYRAEHTRITKSGSRYLRKTLYQIIIPVIKSNEAFRRYYDLKISQGKSPRCAQGHCVRKLLRVIFHILKTDQQFDPTLLR

SEQ ID NO: 267612 - protein, 331 aa, unidentified
MKIKETVGIDISKLSFDARVHTSQEHQVFDNQEDGFKDLISWAYGKTAFSTDEVIFVFEHTGLYSHQLALYLESKGIPFLMVPGLEIKRSLGMARGKDDKKDATKIAQYAYRLRDEIEPSALASEEVMSMKRLLSLRERLVRQRAGYKSSLKEQKRVLPKKGNEALLGTQAKMIAYLSKQIGTIEEQLMAMIKGNESMLRNYELITSIKGVGQQTALFMIAYTANFTKFKNSRKFASYSGIAPFPNTSGTSIRGRNKVSNLANKKIKSLLDLCAKTSIQHNQEMKKYYKERVDAGKNKMSTINIIRNKIVSRMFAVVNRNEPYIDLMKYAA

SEQ ID NO: 267613 - protein, 423 aa, unidentified
MSKKKQTVAGLGAIYARVCGMDVHKEVVVACVRILDMQDGTVQSTLRRFGTMTADLLELRYWLAQEQVTHVAMESTGVYWQPIFNILEGHFEVWVVNAQHIKKVPGRKTDMKDAEWIAQLLQCGLLKPSFVPDREQRELRDLTRQQTKLVQQRNAVANRIQKVLETANIKLGSVASDVLGVSGRNMIEALIGGERDVSKLADLAEKRLRHKIPQLQRALEGEVREHHRFLLRRLLDQYDFLEKEIPRISERLAAIAPPSFRGAVERLDEVAGVAERGAQALLAETGTDMTRFPSHKHFASWAGRCPGNRESAGKRKSGKTPSANRHLDAVLTEIAHAAVRKKDSYFKSQYHRLAGRRGKKRAIGAVKHSILVTIYFMLRDNKSYTDLGPDHFDKLNPQQQIRYHVRKLNELGQNVELSLRPAA

SEQ ID NO: 267614 - protein, 591 aa, unidentified
MKGLYKYTHLHRQPRPKGVPSRGHSWGKIAGPLRGPVAQARYPPRNPSPSPRPYSNSRVMNQAGRRACEAPRTRLFITLPLRTFLLQKRMDSGLMKLETRVTTATNTLPIHAMNGERGSSGSDALAITTNTQDVGRHQASSIRFSQIPSSRVSINTIMEDRRMSKTEAVTETAEYAALIGLDWATEKHDVWVWDTRTGEGRHRVVEHTPEALSEWLTELQTRYPGQRLAVCLEQSRGALISALMGHAFLTLYPVNPATLARYREAFTPSRAKDDPNDAQLLAEILRLHRDKLAVWKPDDIQTRTLTFLNEERRKAIDLRTKLTLRLQAALTLYFPQAIEWVGVHLYTPLACDWLLKWPTLAAIQKAKPQTIRAFYYAHNCRRPDQVEDHLQTIARAQPLTQDAAVISAYQLTVQMLAKQLRTLHHSIAEYDRQIAQLFAHHPDAPIFNSLPGAGPVLAPRLLSALGTNRDRYLSVQHLQTYSGIAPVIERSGKECWTHWRWNCPKFIRQTFHEFAKNSIPYSAWAKAYYESQKKKGKGHNAAIRALAFKWIRILYRCWKDRIPYDEARYLKMLKQRGSELANVIAQQPQMA

SEQ ID NO: 267615 - protein, 438 aa, unidentified
MSNKVIFNLDELFISVGIDVGADFSWMSIALPNQQFVGKPYKILHNSIDSLTTAVSKIKEAEELYSLESRIFLESTGIYHYPLFCYLRDKGFNCSVINPIITKNSTNINIRKVHNDRFDSKKAALVGLKPDLKVSLMPSDLALNCRNLCREYYDLMDNRSAYVNKLQGELRMAFPQYLGIFSKVTINTSLTLLETYTSPSAFLKADKQEIIDIIKSTARFGLTYAQNKYNAIIQAATDANQFGYIIDSNIKRIRLYISFIRKYDEEINSILESLHELVDANEDADFVKQIHLIETFKGAGFLSSVSIMGEIGDFSAFSKPKQLFAYFGLDPAVKQSGKFEGTKVQMSKRGSAIARRVIHTLTLQSISISRNREAKNPVLREYYLKKCDSKPKLVAMGAVSHKVCNMIFAILRDNKPFEIITPQEHIKQYNAAKCDIAA

SEQ ID NO: 267616 - protein, 403 aa, unidentified
MNNVAGIDVSKGKSMVSVLRPFGEVVAKPFSIGHTGSELKELADYLKSLDGETRVVMEHTGRYYEPVARFLHEEGVFVSAVNPKLIKDYGNNTLRKVKTDKADARKIARYGLDNWAELRQHTPMDTIRMQLKTLNRQQSLYAKTKTMMKNNLIALLDQTYPGVNALFDSPVREDGSQKWVDFATAFWHVDCVRNMSLTAFAERYRKWCKRHGYNFSQSKAVEVHTGAQDLIAMLPKDALTKTMVRQAIDALNAVSASLERLKAEMQALAAQLPEYPVVMAMHGVGYSLGPQLMAELGDVARFTHRNAITAFAGVDPGADQSGTHEAKSTRVSKSGPPELRRALFLVMDCLLKTQPQDDPVYRFMDKKRAEGKPYLVYMTAGANKFLRIYYGRVKEYLASLEEN

SEQ ID NO: 267617 - protein, 465 aa, unidentified
MKTDKRLWRNRNTRKELARRLQSENPGLEVVHPRAAGIDVGNSAHYVAVRPDCDPEPVRRFECFTADLHRLANWLQSCGVKTVAMQSTGVYWIPLYDILEEHGFEVYLVNARHTKNLPGRKSDVQESQWLLKLHTYGLLNNSFQPASKIRVLRTYWRQRAQHVSGAATCIQRMQKALTQMNIQLANVISDLSGVTGQMIVRAIVGGERDPQKLAELSHPRIQASRGQIAESLEGNWRQELIFVVQQEIEMYDTYQRRISECDQQLQKHLAAFADTVPPPAKQELPPKKKGKQNKNNPHFHLADELQRIAGVDLTRIDGVDVMVAQTLVSEVGLDMSRWKTEAHFASWLGLCPDNRISGDKVLARGTRHVVNRAATALRMGASTLLRSQTYLGAQYRRLRSKLGAPKAITAMAHRLARLVYRMLKYGQQYVDKGAEYYEQRNRQQQIEFVRKKAAQLGLQVTLAHA

SEQ ID NO: 267618 - protein, 330 aa, unidentified
MTSVNPDRRRGRVVIGVDTHKYLHVAVVLNDFGAIVGTGKFSADSAGYEELIDWALQFGHLLTFAIEGTGSYGAGLMAAVRRRDIGVVEVMRTDRRDRRLRGKSDTLDAENAARAVFAGNANAVPKTADGVVEMIRTIKVAKDVAVKARTSAMISLKAVLVNAPPQLREQLQPLSKMALIHRCAGLRPGDVTTVEAAAKHTLRSIARRRQQLNDEITAHEKLLGELTTQLAPQLTAAFGVGADTAAEMLIVAGDNPQRVRSEPAWVRLCGVAPIPASSGMANRHRLNRGGHRQANAALYGTVIVRMQHHQPTKAYLVRRTTESIYGSTPP

SEQ ID NO: 267619 - protein, 412 aa, unidentified
MDVLVERCAGLDVHRDSVMATVRVPAGRRRQREQHTRRFGSTIGGLEALADWLAGFGVTLLGMEATGVYWKPVFYVLEPRFECWLLNAQHLHNVPGRKSDVIDSAWICQLVEHGLVRPSFIPPPLIRELRDLTRLRTAQIEERTRTLQRLEKVLQDVGIKLTSVASSGYSVSARAMLEALLAGATDPAELAELARGRLRAKIPQLQEALRNRFRVDHHGVLVAGLLAHVDSLERSLARLDARIEQHTAPYAEVVELLCTIPGVGKRTAQVLIAECGLDMSVFPTVGHLASWAGICPGTNQSGGKRRSGRTSHGNRWLRAALTEAAKAAARSKGTYLASHYWQIRGRRGDAKAIGATRHDILVAYYHIVRDRVPFRELGADWLARRYSPEHRARRLVRQLEALGYTTTIEAAA

SEQ ID NO: 267620 - protein, 367 aa, unidentified
MKKISTAAAKQTRNFQDQKLTIGLDLGDRSSWYCVLDGAGEVLLEQKLGTTPKAMKEVFGGMPRSRIALETGMHSPWVSRLLSELGQEVIVAHARNVRLIGESRKKDDRLDARTLARLVRIDPQLLAPVKHRSAQAQAHLMVIRARAGLVRARTSLINTARGLTKSYGERLRGCNPRNMNPEKAQGLSPELRAALEPLLGEIESLSERIGEYNEQIEHMGKESYPEVARLKQVQGVGTLIALTYVLTLEDAHRFGKSRDVGCYVGLQPGRRNSGQSEPQLHISKEGDAYLRTLLVQGAHHILGPFGADSDLRRWGLKLAERGGKNGKKRAVIAVARKLAVLLHRLWVSGEAYEPLRNHAQVGLATAA

SEQ ID NO: 267621 - protein, 419 aa, unidentified
MKIVFPVCCGVDVHKNVIVATIAITDKSNITHHIAESFSTINADLYRFRTWLLEHRCFNVCMESTGKYWIPVFNILEEAGIKVLLTHPKYVRAIKGKKTDKKDSKWIANLFKFDMVRSSFIPPKDIRALRELARYRYKLVCMRSSEKNRYQNCMTVSNIGLASVLSDPFGKSASGIMQYVLSSDVFSEEHCKSLIQKSAKKKTELILASIRDSRIESDQRFKMKEASAHMDYLEQAILRTEVELYARIQPHYHFVEHLSNQLPGVTPLSAALIISEIGVDMSVFESDKHLNSWAGLAPANNESAGKKKSVRISKAGQFLKPLLVQCALAAVMSKKQPYFATKYQRIKKRRGHKKAIIAIARMMLTCIYHMIQSGEAFNPSDYESFNNPMPRKVALTDENAIAFLAAQGYDVSALIKVAI

SEQ ID NO: 267622 - protein, 392 aa, unidentified
MVVSVGIDVSKDKHDCFILSSEGEVLADVFTIPNTMDGFNLLLQKIRECTTPQGKIKVGLEATGHYSYNLLGFLLDNGLATYVLNPLRTNLYRKSLSLRKTKTDRVDARTIAAMLLSDVGLKPYTDTAYHNGELKSLTRYRFDKVKERAKLKSSISRLVCILFPELEKLVPTLHMASVYALLEEFPGAKQIAAAHLTRLKALLETTSKGRYKRDMALEIRDAARISIGSWMPAKSLELQHTIRLIRELNAEITEIEQQIQSIMDELHSPITTIPGLGFRMAAMILAEVGDFTRFDSPDKLLAYAGMSPSTYQSGQLKNCYPHMEKRGSRYLRYALYNATKYVCHWDPTFSAYLAKKRTEGKHYNVALSHAAKKLVRLIFAMEKSRTPYRLAV

SEQ ID NO: 267623 - protein, 340 aa, unidentified
MSEITFYTVDLAKRVFQVHGFTGHARRVSARRLSRARFMRFFECEAVAGVPVIMEACATSHYWGRWLAARGYQPVLLPAHRVRAMSPGNKTDAVDADALALAWCCGRVKAVAVKSEAQQTLQFLHRLRERRVRTRTAVINQLRALLRERGSVAARGSAALRRVLAEQLDPVAGLDPTTRRIAEELREEWRTLDAGIQRIETELRACYRDDEACQRLGEIPGIGLITATALVAAIADPQVFRRGRSMAVWLGLTPREHSSGDTRRLGPITKRGDTDLRRLLIHGARAVVTRASTRDDATGRWIQRLVARRGHNRAVVALANKNARIAWALLAHGTRYRAVS

SEQ ID NO: 267624 - protein, 465 aa, unidentified
MKKTTNLSKTRRGVPTALRAIRPMVAGIDVASREHWVCGPAREDGEPNVRVFGTTTAQLEELVAWLAKQGTESVAMESTSVYWIPLYELLESRGIEAVLVNAHQMRNVPGRKTDLHDCQWLQLLHSCGLLRGSFRPGPAITAMRATHRQLANLVEERGRCVQWMQKALDQMNVQVHRAVTDLSGTTGLAIVRAIVAGERDPGQLSALRDPRCQKTAEEIARYLTGTWRDEHLFNLDCALQLYDKTDALIAAYEARLLAAIASLQPEQRKDAPVPKHPNRTKQKSIVTRGDEPMRAALWRTAGVDLTRIDGISVGAAKTIVTEVGLDLSAFPSEPHFVSWLRLCPCRPISGGKLLKPKHNGLGAHRIANALRMAAVSLHHSKTALGAAYRRIARHKGAGVAVFAMARKLAQLVYRMLRYGQDYIDVGEATYESRFQARRLAGLKESAKSMGYCLTPAPVESATSTG

SEQ ID NO: 267625 - protein, 296 aa, unidentified
MLIIGCDFHPRYQQIAMMDTETGELVERRLEHENGEARAFYASLPKPVLVGMEAPGYAQWFERMLAEFGHELWIGHASEIRAGVVRKQRTDARDAQHLLRLLLEKRFPRIWIPSPAERDARQLLRHRYKLVCFRVSVKNQLHGLAMSQGVCRKKKLFTAQGREELEKLSLGPWGSCRRQELLGMLDQLNPVIDELDRAVRQEAESRADAARLMIHPGVGPVTALAFVLTLGPVARFRRSKQVVSYLGLNPKERSSGDKQHTYAISKQGRRNAVELARGRAVNFSESRREPHKFGQR

SEQ ID NO: 267626 - protein, 480 aa, unidentified
MNVKATRTKKQVNVENQAIKLLSKEELGIKIEVIKKELRSYTWRDLETNGKFAKNDKLSFITDDMLIAGCDIGSETHYIRAIDVRGRELSSGAFEFSNTSEGFANAKAWVLALAAKNDKKQIVLGLEPTGHYWFALAAWMVSNGISVVQVNPYAVKQSKEIEDNSQLKDDRKDPKLIANLVKDGNYGMPYLPEKVYADMRRLSMFRDQLTEDRIRNINRLHRELKIYFPEYMDAFGKIDGAFTLEVLKVSAIPSDITALGAEGIKNIWHNEKLRGRGYSRANEIVSYAEKSVGLTDGTDAGREAVKWYAEQILKLDEQLAVIESTLHEKCREIPYAENILEIRGVGENILAGILAEMGDISRFDDVKEIQKLSGMGLVACSSGKHKGQTKISHRGRKRLRYWLFQAAKSAVSHADEFKQLHEYYTTRTNNPLKKMQSLVVIACKILRVSYTILKTGTTYDPQKLLKDIKRPTASQAPMAA

SEQ ID NO: 267627 - protein, 408 aa, unidentified
MNAVGIDVSKGKSMVAALRPMGEVALLPQEFLHTEVGLEQMAYAIIALGEDTRVIMEATGRYHEPVAAALHEYGIYVCVLNPLFIKQSGGGSIRKVKTDKADAMKIAKYGLDNWVDLREYTPMDTVRQQLKLCSRQYNLYMKTVVSLQNNLISLTDKTFPGVNELFSSPERADGHQKWVDFVMTFWHCDCICRVSENAFAERYQKWCKRKGYHFSAEKAQDVYLGSCGHFTTLPKNDNTKLLITTAAQQLLAGKMTLAALRTEMTRLAKQLPEYDIVRAMYGVGETTAVQLMAEIGDVRRFPRRSSIVGFAGVDPAVDQSGKHSAKSVPTTKRGSPHLRKTLYQIVCTYLKKSPVDEPVYQFLDKKRSEGKPYFVYMTAAQNKLLRIYYARVKECLEAFDAQQDTSQR

SEQ ID NO: 267628 - protein, 417 aa, unidentified
MMRVGIDAHKKSCTTCVFQDTDVLSSSPSETFVFKTSRQGVVEFMEKIPGGAMVAIESSTTGKAISKLLSGKYEVHMIAPPERKPSIKTNKRDAERIIKEDMLGYVRRSYIPSQQIEELRLIVSKQMDVGGKISAVKNQIHALLERNLLQSEFEELSDIFGVEGLERLGSLELPKHEKLTLAMHLEELKLYASQHRQIETEIAKTAEADVDCKNLMSHPGIASFVAVAIKARTGDASRFPTKKQFCSYAGVVPKADNTGEHVSEHNRVKHGDDVLKYALTCGVNAAVHANADSAVKRFYLKHLAKGKSPQDAEVAAARKLACIVWKILTSKQRYVEEDRYLTARKMRRLSQTARRPLKHATNPEDVSTLTASLKSETDVLERYPEEMHVMSMRERSRSKHNPSRIKGASEAGGAVAN

SEQ ID NO: 267629 - protein, 323 aa, unidentified
MSKHITICAGIDTGKYKLDVAIDGCVDQLQVDNTIDGHAALSAWLKRHRVSRIGIEASGGYEQNVVAHLRRDGFVVVVFQPAQVRAYARFLLQRAKNDQIDAALIAACTAAIKKIHAPPDSRLAPFAARMTLIEQLTDRVACWKNYREGHREPQLREFCKKEIARFNKLLRTELKALAAAIRQHGDLAERLNLIESVDGVGLKTAVAILVRMPEIGRLTREQAAALAGLAPYDDDSATHLGIRHIAGGRERLRSSLYKAALAAAFHWNRQLIALYRRLTQAGKPHKVALIACARKLLIFVNTVVERGMPWGTVAPPSAASNAV

SEQ ID NO: 267630 - protein, 337 aa, unidentified
MKKKENSFKTFVGIDISKKTLDICILTEGNNVAYLKETNDKNGIKAIFTYLKVKKIELVSVLFCCENTGVYTMPLSLYLSEKQQSYWVAPAIEIKRSKGISRGKSDKIDAKDIAFYAMTNLYKYKPYALPERDLQELKVLFTEREKVIQCIKQLDTSSENEGFYGKDILKSVLKINMSAVEGLKKSLAHIEKRMKEITSKNEVIKEQMSLITSIPGIGQNTAWYLIVTTNGFKNFSEWRKLACYAGVAPFEYSSGTSVKGRTKVHSLADKKMKSLLHMCALTTIKNNAELKEYYTRKREEGKPSMLVLNNVKCKLLSRVFAVVKRKQPFVNIFKYAA

SEQ ID NO: 267631 - protein, 415 aa, unidentified
MLKIVYPICCGLDVHRDFVYTCIATTENGVTAYKSHRFSTFTRGLRELLSWLLQNNCRDVCMESTGKYWIPVYNILESDCKIVLAHPKYVKAIRGKKTDKKDAKWIADIFKHDLVSGSFIPPADIRQLRDLVRYNVKLTSYTTGEKNRAQNCLTVSNLKLDSVFSDVFGKASSGIIGQILANPSEKISDVSVFRIKGMKATDEEVLEAVDGEMCPEQAEKLRIIRSHMDGLELCKANLMSLILTTAEKYLPEINLVSTAPGLTAHSAISVIGEVGVDMSVFPSSKHLCSWAGLAPQNDQSAGKKKTTRISRAGVYIKPLLVQCALAAIKSKNKHPEIVSRYNALKKRRGHKKAVIAIARMLLTAIYNILKKHEPYNPELYRKSDTPPEHRNVTVEEAVFILQRQGYIVSSPTPVG

SEQ ID NO: 267632 - protein, 342 aa, unidentified
MYYIGLDVHKKTISYCVKEANGHIYAEGKVGATRWELDDWMKTLPRPWTVAMEATIFTGWIYDHLLPHAAQVKVAHPVMLRAIAAAKKKNDRIDAGKIADCLRCDFLPECHMVSTEIRDRRRTLRYRHLLVHQIVQMKNRISGLLLETGVSHNKQKLHKVGYFRELLSNKSEVHESIRPLLRLSRETIVRFEKTEYALVSSLQRDPLLAERIKRLRTVPGVGPITALTWALEIGDVTRFRSIKQAISYCGLSSDEKSSADKVMRTPLSKQRNKHIQRALVEAAKLAPRQDHQLAVVYEKEKEKGHANRATLAVARKMVAYMVAVDRAKRDFVAKEDLNQAIA

SEQ ID NO: 267633 - protein, 341 aa, unidentified
MTSVATDSTTTQTHWYVGIDVSKDSLEIVWLAEDQDQTHRLCLPNSPEEFQGLLELCQQRPCKCILLEASGGYEQRLVLALALAKLPVVVINPKRARDFAKAAGRLAKTDRIDAQVLALMAKTLPPEIRPLPDEQLLLLKELTTRRDQLVQFQTAEKIRLQQEPNRIVWQSIQRLLQNLQRQIARIEAEIRQLIQQSPVWQAKEQLLRSVPGVGEQTAACLLAHLPELGQLNRRQIAALVGVAPLNRDSGRFHGHRAIWGGRLKVRNVLYMATLTATRFNPVIQQFYHRLCEAGKPAKVALVACMRKLLILLNAILRTGQPWNPHLPENPPAQETRNRPEK

SEQ ID NO: 267634 - protein, 334 aa, unidentified
MENIALIGIDLGKNSFHIHCQDHRGKAVYRKKFTRPKLIEFLATCPATTIAMEACGGSHFMARKLAELGHFPKLISPQFVRPFVKSNKNDFVDAEAICEAASRPSMRFVQPRTESQQAMRALHRVRESTVQDKVKTTNQMHAFLLEFGISVPRGAAVISRLSTLLEDSSLPLYLSQLLLKLQQHYHYLVEQIKDLESQLKRKLDEDEVGQRLLSIPCVGTLTASTISTEIGDGKQYASSRDFAAATGLVPRQYSTGGRTTLLGISKRGNKKIRTLLVQCARVFIQKLEHQSGKLADWVRELLCRKSNFVVTCALANKLARIAQALTARQQTYEA

SEQ ID NO: 267635 - protein, 377 aa, unidentified
MLYLGIDQHARQITISLRDEGGDVVQARQVSTQPEKVHAFFQQLTRERLHDGESFVAVLEVCGFNDWLIGLLHEYRCHKVILIQPEERKLRKTDRRDAAALSELLWVNRDRLLQDKPVRGLRQVDIARTADQEDRRLTTLRKDAGRARTRLVNRVRHILRRHNLQWQMPTKKFPSKSGLAWLKQLALPEIDRLEMNHLLADLEQVQGRRQELEQVIAQRCGVSAEAVLLSSMPGVGYFTAVALACRVGRVERFPRAASLANYWGLTPGCRNSGESNQRLGGITKAGSSMARWLLAEVTIKVLRRDARLREWFKRLKRRRGASIARVAVMRKLATVIWHMLSKRLTYAACRDAGEAGTKARQEQGAEGSRPGGAVGRV

SEQ ID NO: 267636 - protein, 376 aa, unidentified
MKLFVGLDVSSFDIKVCFLNSKGEQLSTFTVENDLPSATKLRDEILHAVQGDSVSELRIGLESTSVYSFHPSMFLHNDEFIQSLGGQVFVVNPKQIANFKKSYSDMDKTDEIDAFIIADYMRFGRLPMTVVKEEQYVALQQLTRARYQIVQQITQEKQRFLQYLSYKCNTFTENVESSVFGKAMMDLFLESYSLEELSQMPLEDLADYLRIEGRNRFPDAKQVAKSIQKAARSSYRLDKVVEDSLYAILGTSITLIRSFEKQIKELDKTIEKIMKGIPQTLQTIPGVGLVFTAGIIAEISQVERFANEAKIAKYAGLYWRKHQSGRFTADDTSLSRNGNQYLRYYLDRAANSVRRQKPEYREYYAKKVLRGTEAST

SEQ ID NO: 267637 - protein, 344 aa, unidentified
MEHYAGIDVSMECSSVCVVNASGKIVREAKVASEPEMLIGWFGPLGLGLARIGLEAGPLAQWLYAAMKQAGLAVELLETRHVYEAFKSMPVKSDRNDARKIAQLMRLGWFRPVHCKSITAQEIRAMLTARKLVQSKLLDVENSLRGILRGFGLKVGNTTRTNFAGRIDELVKAHPNLQTIAQALLRARAVLLAEFSGFEKRVRTMSRLHDQARLLMSTPAVGPIVSLTFACAIDDPCRFSSAKQAGPHFGLTPKKYQSGETDYTGRISRHGDASVREALYEAAHIMLTKPIRHCSERKSWAMRIARRAGVNKAKVALARKLAVIMLRMLKDNVPFNPAAKATMA

SEQ ID NO: 267638 - protein, 429 aa, unidentified
MEEVDEVELVVQRVAALDLGKATLEACMRVPHSSKPGRRMQEIRGYATTTAALLEMAIWLRQWGIERVVMESTSDYWKGVYYLLESEGFDCWLVNAREVKNVPGRAKTDRADAVWLAKVAERGMCRPSLVHPPPIRRLRDLTRYRRALVSDRSREMQRVEKLLEDAQIKISSVLSDIHGVSGRAMMEALIAGQRDPWSLARLAKGNARKKIDRLEEALRGFFTDHHATILQMMLDNIDRIGAQIAALDARIAEAMGPFSRPVAQLADIPGVDTVAGAELVAEIGVDMARFPTAAHLVSWAKFCPQIHQSAGKSRSKGRGKGNPWLAGAVGRIVFSASRTDTFLGARYRRLARRRGKSKAIIAVGNSVLTIVYHLLSDADLDFCELGPAHYESRINKNRRARDLATQLQALTGQRIVIRDGKAIITDNAA

SEQ ID NO: 267639 - protein, 331 aa, unidentified
MNYSHFVGLDVGKKTFDASLMSADEKELSHKSFDNTPTGIQSLLDWIAGYHLSLSKLLFCAENMGSYVTELSVSSVSMGFSLALVCSLTIKKSIGLQRGKNDRIDAKRIANYAVLHYRKLELYKLPDKDLVRLRGWIIIRDNLVKQKVSSIKLLETFSWMAKLADVTESISFLEEQLKSIKERILEVEEDMEQLIAASTSLYTNYLLLRSIKGIGIINAIVLLCVTDNFQRFDNPRKFACYCGVAPFEHTSGISIRGKTQTSSLANKEVKVYLTRAAITAISWDPQMKAYYKRKIAEGKHKASVINAVRAKIIARSFAVIRRQTPFVTLAV

SEQ ID NO: 267640 - protein, 359 aa, unidentified
MRTITIGVDLAKQVFSVCSVDAAGRVQDRRELRREAFRQWLPSVPAGTIVAMEACSGAHHWARRCQDSGLQPRLMAAQFVAPFRKSRTAKNDRNDAEAIATAARQGNMRFVPVKTVDQQVRLSWHRVREGYKAEALATSNRLRGLFAEFGVVIAQSDAALRRALADLDELALPCALVELLRDVDAHWQKLQARIADADRRINAHAKADDACTRLRAIIGVGPITADAVVATIGSAQDFKNGRQFAAWLGLVPMQHSSGGRSRLGRISCRGDGYLRTLLIQGARSSLQRAKAVPWEKASPEQRWIQDLGRRLPFGKVLVAIANKHARQLWAMLARGEHYDADAWLKHPMVQRPARRSAAR

SEQ ID NO: 267641 - protein, 453 aa, unidentified
MRQPSSLPQINPHAAGVDIGAHSHFAAVPAGSDPKGQDVREFEAFTADLYALADWLAACAVTTVAMESTGVYWIPLFQILEERGFDVKLVDPRRMKHVPGRKTDVLDCQWIQQLHSFGLLDGAFRPSADIVLLRGFLRQRAMLLRSCAQHIQHIHKSLEQMNLKLHLVVSNIVGVTGLRIIRTLLAGERDPLKLAALRDRRCKNDLATIARALHGHYRPDLLFALRQAVELFDLYQTKVAECDKEIEAVLASFEDASKGKTLPPSRRKGGTYRNAPGFDARSALFRISGTDLTRVEGIDTSIALTVISEIGLDMARWPSEKHFASWLGLCPGSKVSGGKVLSSRTKLCANRAATAFRLAANGLHNSHSALGAFFRRMKAQLGAPKAITATAHKIARLVYRLLRFGEDYIQVGEQEYERRHRARTIRSLERRAHSLGFVLHPAPRSLGLSAVPA

SEQ ID NO: 267642 - protein, 391 aa, unidentified
MAGVRNQTGEPDTMPSENTVHIAIELSFSSWLVAARLTGAKKSRLHRIEGGDTGALLALIAELRSRALTQLGGAAEVACCFEAGRDGFWLHRLLTAHGKLVYVLEPTSILVNRRSRRAKTDRLDAEGMLRVLAAWLGGDRQVCSMVRVPTPEEEDGKRPHRERERLVQEKLRIENRIEALLFTQGIRARPSLRSWERELTELRTGDGRTLPPLLRAELDRLRRRLVLILELIRELEAERAAALAAAPDEAMAQKITSLQRVRGIGANFSAVLVREVLYRSFANRRQLASYVGVAPMPYQSGGMDRDRSISRAGNPRARTTLIQLAWLWLRYQPGSALATWFRERVGTLQGRTRRIAIVALARKLLIALWRYVEAGVLPAGVEIRTGTVPAA

SEQ ID NO: 267643 - protein, 361 aa, unidentified
MIADKDIVLVVDYHSQNIEFRWFNEANGEERTGTYATTKAGILRQVEQAVGELERGGRVVWVMESTTGWSRVKDLLGDRVKFVLANVLQMPLPPKAKRRKTDKIDTARMLREYLHGDLPESFQPSAWWREVRRVVDCRQDLVERQTAIKNWIGSLLHHETWEDRENLWSAKGLRRLRAMKLSPSDQSLVELKVQQLEQLAKQLEQVEAKMQTIYKGWPEAQWVDEVRGIGLVTAVSLLAHIGPIWRFATAEDLISYAGLAPGMRESDGTCRHGRIGGGGTDSHLRYLLIEATTWLCQIPRYRPTYERVVKKRGKKIGRIVVARLLLRSMHKMLTAKVRFNAMPRPASQTTTKATATACCSR

SEQ ID NO: 267644 - protein, 425 aa, unidentified
MQKDERIEFVIDKLIVGIDIAKHKHWARIIDCHGRDLRKPFRFENNKEGFDRLAAEIQLVQQKAGMTGVVVGMEPTGHYWKPLARWLQGLGYTVVMVNPMWVKRHKEDYDNSPSKSDRKDTGVVAGLVKDGKYMQVMLPTGVYADLRELIVVRRQQKQALNSVLNRLETVLDEYFPEFHTVFKGTLGLAAQCVLTECPFPSYITALNVKELTDKLKRASNNRVGQKRAQLLRDVAARSIGVTEGLQGARERLESTLAEIRFLKDRLRKTETAMAEKLYQTGLAESLLSIPGVGVATAAGFLGEIGDPHNYENWRQIRNLAGLNLKENSSGNRESRTEITKRGRPGLRSLIYQIAVTAVACNPQLRALYRYFLARDVNPLTKKQELIAVGLKLVRIMHALMMRGQRYDPALALGEVREFQLEKQAA

SEQ ID NO: 267645 - protein, 317 aa, unidentified
MERVKTSTKVAGIDVSKAKLDVAAYGFDEVVQFANLAAGFEQLGRWLGSREISRVGLEATGGYERAVVGWLQANGFEVVVHQPLEVKLFARLKRRRAKNDRIDARLIAAATAQVDSVKAAADPLLVELAERLTAYEQASDQLARLRTCLEQVRLPDLRASYEAQIQQAKTWKLERLADVIGCLKTRPDLVRRYDLLKSLPGVSVVVAASLVIRMPELGALEHGQAASLLGVAPFDRDSGPFRGERHIAGGRTRPRKLVYLAALVASQHDPALRSLTERLKDKGKKPKVAIVAVMRKLIEAANLVLARDAPWRPSIAY

SEQ ID NO: 267646 - protein, 449 aa, unidentified
MASKKKGTKKTTPLAPVNRRAAGVDIGSTFHVVAVPQELDAEPVRSFRSFTTDLNALADWLGRLGVTTVAMESTGVYWIPLFEILQARGLDVVLVNARDAKNVPGRKTDINDAQWIQQLHSYGLLRASFRPEGEIVALRAYLRHRERLLEYAAAHVQHMQKALMQMNLQLHHVVADIAGVTGMKILRDIVAGETDPEVLAAYRDMRCKSSIETIRDSLTGNYRPEHVFTLKQALELYDFYQARLSDCDVEIERALHALPKRAAPGPARSRQRGKNEPQFEIRLVMNALLGVDLTEIHGLGPYSVLRIFAECGSDMTRWPTAKHFTSWLTLAPGNKISGGKVLSAKTRRSANRATVLLRLAAVSVSRTATALGAFFRRLAARVGKAKAVTATARKIATVLYNTMRHGKAYVDPGAMYYEERYRERALSNLRRRANAMGFALVASAVEGAS

SEQ ID NO: 267647 - protein, 385 aa, unidentified
MSHPNDLSRSLSCLEQDSTIIAVIEMSQSSWLVAGIVPGIDRHPLKKLEPNEEDLHRLLMRWRAEATNSGRMIIRIAVAFEAGRDGFWLARWLRARDIEAYVIHPTSVAVSREHRRAKTDRLDTALLKRVFIGWLRGEPDHCHMAAIPTLEEEDAKRPNREREGLVCERTRIVNRIKSCLVRFGVRNFKPTLRNAPERLSMLCTPEGVPLPPNTLLELRRDMARLRFVIEQIKEIEETRAQRLEQTPQENSHAMVRLIARVIGVGVETADMLVHEILARNLRDRRAVARYAGLTGSPDESGSRRREKGLAKVGNARVRRGMIQLAWRFLLFQKNSALAQWYRTRTEIDGRKRKTMIVALARKLLIALWRLATTGETPAGVVLRAS

SEQ ID NO: 267648 - protein, 355 aa, unidentified
MQPTQANDFTPDEEVLAVALELSKGSWKIALHDGKRDKPAIHTVSDEEAQKRLAHAAAVIEEVKKKWKLAEQVRVVVMYEAGQDGFWINRALVGLGYETLVIDPASIPVERHARRAKTDRLDAIKLVSCLRAWLRGERDRMHVIQVPSPEAEAQRHLVRDRGELQKESGQHRDRMRKLLRTVGCWDNVEGDFAERLARGEVRCHDGTALAAALQERLSRECERLRFVDQQLAALEKGLVKQLPEPVQERITDLTRLKGVGEVGAMRLVLELFWRDFANRRQVGSCVGLVPQPYDSGESRVDQGISKQGNRRVRALLIEMAWMWLRYQPESALARLFGPLPCVRCANQRARALSGW

SEQ ID NO: 267649 - protein, 395 aa, unidentified
MYSLLVGIDVSKDFFVTAGIDSEGKGSFSRSYSMDSNGFDDFLKTITSHGEDLSKVIVAMESTGCYHINLFSFLASQGVRTVVVNPLLIANFAKLSLRKTKTDKKDAMTIARFLLDHHEEVSHLSLSQDHQDLRDLSREREPLCHLIAAAKVEIKRVLKVTFPEFQSIGNLYTGAMLRFLQQYPSARLARAAKSKAIVKALKQPYVGNKLTYSAEDILRAANTSIGTVSPAKEIILEGKIATLLHLQGRLDEMTKLLTDLCKATRIDDLKILRSIKGVGPKTAAPFLAEMGEVQNYSSHKKLIAFTGIDPSLHESGNYVGMSKLSKRGNRHLRRAVYLMTAAVVSKNPFFKAYFLRRKREGLPPQKALFATAHKLLRVIFAMLTQRTYFNPKEVI

SEQ ID NO: 267650 - protein, 369 aa, unidentified
MQIHSVGIDLGKTTFHLVALGAAGKVIVRKKFNQKQLLVYTANVPASLIGLEACSGAHFLGRALRQQGHDVRLIPAQFVKPFVKSNKNDFVDAEAIAEAVERKNMRFVPIKTDDQLDLQAIHRVRDRLISRRTAVINQVRAFLLERGLVFAKTPAKLRAALPDILENADLDLTPQMRSLIDLLWREWKTVEDQIEGLSLELERISAADPGCTRIRQIPGIGPIVATAIVAAIGNGAAFRKGRDFAAWLDVVPRQYSTGGKARLLGISKRGNVYLRKILIHGARAACCGLSGIGRRSEPGSMHSMPELPKMLLWSRWQTSSRGSHGLCCRAGRTTGQWAILLPHERVRKRRLRLGSADALPLSRTTTTTD

SEQ ID NO: 267651 - protein, 316 aa, unidentified
MFIGIDVGLKSLEVAATPAAPSLPRRVPNTAAGIARLVAALGGLTPTLVVLEATGNYHRPVLAALLTAQPPVSVANPAQVAAFRQSRLGRHKTDRADAHLLARFADLHHDELRRATPDEPDLARLRALVGYRDDLVNRKTRLRNQHHAAGWTDEPSVLAWLEADLAEVEARLREVEGAITALLATLPQSALLTEQIGVGSLVAAAVLAYLPAGVLGNAKAAAYAGLHPRQEQSGQRDRSRLSKQGCPALRRYLYLAALVAGRRDPELAAFRQRLLDRGKAARSATCAVAHKLLRRLMGRIRQARTHHHPDLLPLAA

SEQ ID NO: 267652 - protein, 361 aa, unidentified
MKKPSQHLIAEVPRMQAKVEITIGIDLGDVWSHYCTLNQDGGVVDRGRFRTTPKAIEKWFTDVAPARVAMEAGTHSIWISAQLQELGHEVIVANVRELRAISHSDRKSDQVDAEKLARYARLDPNILRPIAHRTVQQQEALTLVRSRALLVRLRTAAVNAVRGLTKSCGYRMPASATTCFAQRSLAVMPPGLAQALGPVLQQIADMTLKIKQYDRQIQQLGQTDYPETQALLKVHGVGHLTALTFVLTLGSKERFGRSRDVGCYLGLRPRRSQSGDHDPQLGITHAGNAYLRSLLIECSNHILRPHGRDSALRQWGLHLAARGGKQAKSKAVVAVARKLAVLLHHLWSTQEPYMPFYEQAA

SEQ ID NO: 267653 - protein, 344 aa, unidentified
MHIASIGIDLGKTTFHLVALGEHSKVLVRRKFSRAQLLAYTANLPCSLIGLEACAGAHFMGAALRAPGHEVGLIPAQFVKPYRESNKNDFIDGEAIAEAVTKQNLRFVPIKTQEQLDVQALHRVRDRLVQRRTALINEIRGFLLERGITFPAQPIHLRKNLATVMEDAEQNLSPRLRWLLDRLWQEWKQTEIDIQTITDEIERISIEDERCQRLRQIPGFGPLVSTATVAAIGNGAGFHRGRDFAAWVGVVPRQYSTGGKQRLLGISKRGNIYLRRMLIHGARAVLFRIQYDTAGLGQWVHRLSQRAPRHKVIVAIANKLARIAWAVLSSGRDYHHQPLSSAAA

SEQ ID NO: 267654 - protein, 398 aa, unidentified
MPITNLQKTNDFNGQNFYVGLDVHKKSWAVTIRSLGIEVSHFTQPPGAEALSNYLKREFPGGTYYSAYEAGFCGTDTHEQLCKLGIKNILVHAADIPSTDKQKKNKTDLHDSRAIAWHLERGNLHGNHVLTQEQQELRSLFRLRESKVNDATRANNRLKSFLMYYSIKVPETVCKNEFLSGKALAWLSMELGSAAGTFTLQQYIEELKYQRQQLCHITKSLRGQVQAFHGKTYENLLSVPGIGAVTSMGLITEVADFARFNDPDEYCSYLGLCPWEDSSGDTIKTKGMQPRCNSHLRPLLVEASWQAIRRSRTLFAYYSKHAGKNGKKAIIKVARKLALIARGVATTGQPYQEDYLKKKQQEQQNKKEQKAKRFSSGITEQHINKQPGDRLQIATMPG

SEQ ID NO: 267655 - protein, 368 aa, unidentified
MRTSVLYVGLDVHKMSMDVAIAATGGEVRHYGKIGGDLEALDQVVRKLQASGAALRFAYEAGPCGYQVYRHLTGQGYPCLVAAPSLIPRRPGDRLKNDRRDAVTLARLFRAGELTPVKVPDPEDEAMRDLTRAREDAKSVERRAKQRTAAFLLRHGHRFSGRTTWGRGYWRWLLGLSLEHPAQQIVLQEYLDAVREATARVQRLTAQIRELIPQWRRAPFVRAYQALRGVSLIVAATVTAETGDLGRFANPKELMAYLGLVPSEHSSGATVRRGRITKTGNGHARRVLVEAAWAYRLRARITRPLAKRQEGLSKSVREIAWKAQLRLCARYRRLFARGKTKPMIVTALARELAAFLWAIGQAVQPGEA

SEQ ID NO: 267656 - protein, 344 aa, unidentified
MFYAGIDAHMKSSTIWIVDRKGRKVSSSTVMTSAEGFAAGLGRWVRRGLKAAVEASGITPWVCQLLKDLGVRVVVVNPNRVRLIAESRKKADRVDAETLAELLRLGGLPEVHQPSLEARRLRTELSVRRQLVRQRTGLINQARGLLRGWGVMLPVRFFQSRGGWKDLQAKRLPEYLRSLLETMKGVYEQLTQAIRQVEMTLKQREHSDERVARLETIPGVGRVSALTLVAAVDKIARFGRAKQLTAYNGIVPTVRSSGEREQQGSITRQGRSEVRAVWIQAAHSLVRSRAPGARPLQKWFWKVARRRGVRTAIVALARKMLSLAFYLLRDGTRYEPLRLRQAAA

SEQ ID NO: 267657 - protein, 347 aa, unidentified
MEKISRIGMDTSKQIFQLHGVDEAEQVVLRRKLKRREVLVFFGKLAPTVVGIEACGGAHYWARELTRLGHEVKLIAAQLVKPYVKRGKNDAADAEALCEAMSRPTMRFVPVKSADSQAALMLAGLRDRLVRNRTQLANAIRGYAGEFGLVAAKGKAKIEPLLSRLQADEAVPALARELFAEHAKEYAQLEAQLKAIDGKLMAWHRANALSRNLARIPGVGPVIASLLVMKTPNPHAFRSGRQFAAWLGLTPKDHSTAGKVRLGVITRAGDEVLRSLLVVGATAVVWQVRRGTGRNPSPWLVELLKRKPPKLAAVALANKIARIAWKLMTTGEIYDARRTLTATPAAA

SEQ ID NO: 267658 - protein, 379 aa, unidentified
MSKIRFVGLDVHADTIAVAVAEPDGEVRPLGIIPNRLDSIRKLVAKLGPAKQLKVCYEAGPTGYVLYWQLTALGVACEVVAPSLVPVKAGDRVKTDRRDAAKLARSYRAGDLTPVWVPDADHEALRDLVRAREDARQDQHRARHRLSKFLLRHGRRPPEDVKKHWTLKYMTWIQEHVHFDQAALEATLLDYVHEVEHMAERIQLLEKAITEAIQKAPLEMRTVIEALQALRGVAQLTAVTVVAELGSLSRFPSPRQLMGYSGLVSSEYSSGNRIHRGRITKTGNAHLRRVIIESAWAYQHRPWIGGFLLKRQQGLNLSQEVKEIAWKAQWRLHTRYKKFSAAGKKKPQIVTAVGRELLGFIWAIAVQTEAKFGAQSNAA

SEQ ID NO: 267659 - protein, 314 aa, unidentified
MAYNRYKFYVGIDVSKSKLDSFMSTTNSLLQFSNDQDGLKELIKILPSKKNSLIIVEATGGYEKFAANYLRHKKFNVAVVNAKRVRAFAKAGGKLAKTDGIDAEVIMMFGRSFNPTAQPLASEDEEKRLQSINRRAQLVRMMSMEKQHLEHAPKQMVKAIRKHIIFLEKALSVIEAELLEQFNKDPILNDKLARLDEIKGVGAVTAMNILSHMPEIGKVTSKEISALAGVAPFNKDSGQKKGKREICGGRSQVRAALYMAVLSAKKSNLALKRFYDRLIAKGKLKKVAIVACMRKLIIIMNAMLRDNTRWNSMC

SEQ ID NO: 267660 - protein, 422 aa, unidentified
MKTLLHEKFSAYISMDWADSKHDVRLQAADGGQCELSVIDHTPQAIERWALDLHKRFPGLIAVAVELSKGPLIAALLKYDFVRIFPINPATVAQYRKTFVRSGAKDDPTDARWILELLLKHPEKFPQLEQQSPAMRSLASLTEHRRTLVQERVKISNRLVSTLKEYYPLALELFHDHGTAVFCDFLIRWPTFEKIKRVQPERLQRFLNEHNVRRSRCNQARMDQIAKAMPLTEDRGIIEPMSLYTVVLAEQLKAMVNAIKRFDTQIESVAAALADYPIFQSLPGAGPQLAPRLMTALGEQRNRFENASAVQKYVGVAPVMERSGKTKIVRWRYQCSTFIRQTFVEWAAQSINKSAWARAYYDKQRAKGCSYQAALRALAFKWIRIVYRCWKTSTPYDEAAHIQNLKRRGSSLAEAFDEAKAV

SEQ ID NO: 267661 - protein, 362 aa, unidentified
MMIIGCDFHPSGQQVFGIETATGEVFAHGWIAHGGQELDQFYGSLAAGAVVGVEASGNLLWFERKLGQYGHQLRIGDAAQIRARETRQQKHDRRDAELIARLLVRDQFPDLRWVPSLGERDLRQLLLHRDKLVRMRTQVKNQLQSIAMNQGQQKKRQLWTKLGRELLEQLPLEPWTARRRDDLLRWLDQLQAECATLDEAVRQQAEANAEARLLMTHPGVGPVISLGFVLTIGPRERFARSRELVSYLGLNPREDSSGERQRWGRISKQGNGFLRRLLIQGAQTAVRGDAELGRQYRRLAARKHRAIAKVMVARKLAVRLFWMRKTQQTYPELVRMRGSSSHFGVSTTDHLSERPASLQDRG

SEQ ID NO: 267662 - protein, 350 aa, unidentified
MMIIGCDLHTRYQQIAMVDTETGEMLECRLEHANGEARAFYAALQGPVRVGVEATGYTHWFEALLAELGHELWMGDAAKIRAAVVRKQKTDARDAAHLLDLMREGRFPKIWRPSPAERDLRQLVWHRQKLVWMRGAVKNQLHALAMGEGVCRKKQLFTVKGRKELEGLALGPWSSYRRQELLRMYDEMAAATAKLDLEVERAAKSLPLAVRLMTHPGVGPVTSLAFVLILGPVARFERSKQVVSYLGLNPQEHSSGGKQRMGSISKQGNPMMRSLLVEAGHTAARLDPELKRMYQRLKFRRGASVAKVAVARKLAVRMYWMLRSTADYAQLVRMQGSPPATLVESSPSLG

SEQ ID NO: 267663 - protein, 312 aa, unidentified
MDAIYVGIDVSKDRLDVAVRPSGESFTVGRTGAGIDDLIERLKPLSIKLVAIEATGGFETVVAAGLAGAGLPVVVVNPAQVRAFAQALGKRAKTDPIDAAVIAHFAEATKPRLRQLPDATTQLLADLVARRRQIVEMIAAESQRARHVTLPRLKKSIARLRKALEKELSELDDDISDHVRGSPAWAEKEDLLASVPGIGPTIARTLIAELPELGSLDRRQIAALAGLAPWTRQSGKWRGKSFIGGGRASVRRALFMGAMVAARHNPTLKLFRDKLVAAGKNKLAAIVAVARKLLTILNAILRDKTPWQPKIA

SEQ ID NO: 267664 - protein, 328 aa, unidentified
MSRVLSRVLGRCIGLDVHLDFIEIAICEEGRVYSAGRVSSTPEGIKTLAESLAPTDRVALEVTGSSREIARLLEPHVKKVIVVSPGDTGISQARAKTDRLDARTLAKLLWTGELEAVWMPPEWIARMRRRLARRDQLVRARSRVKNELHAVLMRCLKGRPPVSDLFGVKGRDWLRGLELPDVEDETVKAGLRHIEFLDAEIEQVERLIAQQALESAQIKRLMTVPGVNVICAAIFLAAVGDIRRFKGSRPVVAYLGLDPRVYQSGSGPARGGRISKQGSPRARWALVEAARSVAQQPGPMHAFYERLRARKGHNSAIVAVARKLVVLF

SEQ ID NO: 267665 - protein, 444 aa, unidentified
MVFFGMILIREVADAPVIMGISKPAGLKSPCGEVKIVNPLFVGIDVSSKNNVAYLMKPDGSKHSSFSVQNNLGGAKLLSERIVSALGSMQLERVVIGLEATSIYGDSLVYALREDGRLGRFQRKIHVLNPKQVRKFKEAYSDLPKNDWVDAFVIADHLRFGRINREVYMDDYRYKALQTLTRARFDVIQNLTREKQRFANYLFLKCSGMAQDKDIQNTSATTIALMEHFETVDDLANADLDELTAFIAETGRGRFADPNAVAKVIQTAARGSYRLPKTVNDTVNQAMSVSIASMRALKEQAKVLDKAIEQQFEIIPNTLTSIPGIGKVYSAGIIAEIGDIHRFDSQASVAKFAGLVWTQHQSGEFEAEHSQMIKSGNRYLRYYLLEAANSVRRCDSEFRRYYDLKFKEVNKYQHKRALALTARKLVRLVFRLLKDNRLYIPPEG

SEQ ID NO: 267666 - protein, 382 aa, unidentified
MLYIGIDQHSKQLTVCIRNEAGDTVLRRQVSTRPAKISAFLEEIGQLDQEFTAILEVCGFNDWLIDTLRQAGCHDVLLIHPDSRSKRKTDKRDANKLGEMLWLNRGRLAQNEKPQGLRRVYFPTQRERENRRITASRKRVGQQRTRTINKIKGLLHRHNLMWEYPTKTFQTKRGRVWLEEVSLPPIDRLELDMLLAQWKLWEEQLTALEVEIGNRASQREPGEISSKCELLMTAPGVSHYSGLAMVSLIGPIERFPRPRSLANYFGLTPGCRNSGNTTDRLGSITKEGSAMARFLLGQLVLHVLKKDKEMRQWYRRIKIRRGSKIARVAMMRRLATIYWHMLKHNEPYYPGGPPRLRLAQEQHRENGRSNSTQRSMRKQTVS

SEQ ID NO: 267667 - protein, 325 aa, unidentified
MSNILGIDVSKDKLDLVLLSEEGKYHKVIRNDLSGFKELDQWLISRHIDRVHVCLEATGQYGDEVSEYLYERGHDVSVVNPTRIKRYGESKLHRNKTDKADADLIAEFCLKEKPALWEPLNPDLKHLRALVRRLTDLQANYRQEGNRLTSGEKDDWVIRDISVHLEYLKASIEATEAEIQNFTNQTPGLKAKQELLVSIPGVGKKTSARLLAEIGEINRFENAPQLAAYAGLNPKGFSSGSSVHKKTRISKQGRSELRACLYMPAIVAMTHNPVVRALKERLQKKQLPTMAIIAACMRKLLHIVYGVLKSQMPFDPDYDRQFNFW

SEQ ID NO: 267668 - protein, 405 aa, unidentified
MNAVGIDVSKGKSTVTIRRPGDEIVLPPRDVRHTRSGIDALIDQIKSLDGETKICMECTGRYYEPMATWLTEAGLFVSTVNPALIKAFGDDSLRAPKTDKADSKKIARYTLDRWAKLKQYGRMDETRNQLKTMNRQFGFYMDQKTSMKNNLIALLDQTFPGANDFFDSPARSDGSQKWVDFVYTYWHVDCVTGRTLDAFTEHYRNWCSRKGYNFSAAKAKTIYDVSKDLIAVFPKDDVTKMIIHQAVDLLNAASKTVETLRAKMDETASKLPEYPIVMDMNGVGPTLGPQLMAEIGDVMRFEKRGSLTAFAGVDPGKNESGQYVQKSVPTSKKGSPHLRKTLFQIMDGLIQRSPVGDAVYDFMDKKRAQGKPYYVYMTAGANKFLRIYYGRVKEYLASLAANKSE

SEQ ID NO: 267669 - protein, 473 aa, unidentified
MSKGSGISRTDRRRNARRALLRGLVPRDGVVLGIDLGEDKQALALVDHDVQVLWRKSARVKVHELGPVIDAAVAAARKAGPVPVTVACEPTGPRWLQVQRLCRERGLALVCIQPLMSHASRRQQDLTGHKRDESDAVMIARLASELHCYVPEELDEAWALLRDLGRRREQLARAETASVLRVRDFLSVAWPSALAACAGPFRSRTWLAAVEVVTRECGPDPARLAGMSEDELTALVREALPGWGVQRPSLRIIRSLLAVLDDPDAVAWTRRGRFRRIREELADLKRCRALLADAGDEMEALVTGELGLARLAEVPGLTLKGAAVILAEAGDPRRYDTSKSLVKHAGLSPADHASGASEGESHISRRGRPGLRLAAWRAVTALLKHNPVMAAKYQALVADAEEAARAAQARAKPGSAQAAQAARALRGTRAKARVACAASLLRWIYYMTVHDAGWDPAAASGGRLAPAALEEAA

SEQ ID NO: 267670 - protein, 346 aa, unidentified
MMIIGCDFHPNWQQVSWLDTETGETGERKLVQASGDAERFYRQVAAPALIGMEATGNCHWLVDLLSELGHELWVGDAAQIRASYVRQQKTDKRDAAHILKLLVEGRFPRIWMPSSEVRDLRQLLLHRYKLVIMRARVKNELQHLCLNKGVQRKHKLWSAAGQQILRELPLQPWAGRRRDDLLKLMAMLDQQIEPLDQAVKAEAQRDKMALLLQTQPGVGPITALAYVLTLGDVSRFPRGKQVASYLGLIPREHSSGGRQKLGAITKQGNRMLRMLLVEAAQIAVRYDPQFRREYLHRCHKKPKAVAKVAAARKLAVRLYWMLRTQRPYPAVVRIESSPRVPLVGAS

SEQ ID NO: 267671 - protein, 389 aa, unidentified
MKIFVGIDIAKLNHFAAAISSDGEILIEPFKFTNDADGFQLLVSKLESFDKNSIIIGLESTAHYGDNLVRYLVAEFYQVCVLNPIKTCQMRKNNIRKTKTDKVDTFVIAKTLMMQDDLRFITFFDLDMMDLKALGRFRQKTIKQRTRLKIQLTTYVDQVFPEIQYFFKSGLHQHAVYALLKEAPSPKEIASMHMTHLANLLKVNSHGHFTKELAKELRVLAQKSVGANDSAISIQITQTIQQIELLDSQLEKIEAEMTDIMKFNDSVIMTIPGIGYINGGMILGEIGDIHRFSNPNKLLAFAGLDPSVYQSGNFQAKTTRMSKRGSRVLRYALVNAAWNVVRNNATFKAYYDAKRAEGRSHYNALGHCSGKLVRVIWKMLTDNVEFNLK

SEQ ID NO: 267672 - protein, 346 aa, unidentified
MNQIIRIGMDTSKHIFQLHGVDAAEQPVLRKRLRRKQVLAFFAKLPPTVIGMEACGASHYWARELGRLGHEVRLIAPQHVKPYVKRNKNDGRDAEGTCEAMSRPTMRFVPVKTAEQQAALMLAGIREQLIARRTQLSNTIRGYAAEFGLVAAKGLDKIEPLLAQIAQEEDLPALARELFATEGREYARLQAELKAIDARLMAWHRANACSRRLAQIPGVGPIGATALVMKTPDPRAFSSGRHFAAWLGLTPKDHSTAGKTRLGKITRAGDEVLRRLLVAGATAVIQQVRNGRGRPSPWLLAVLKRKPPKLAAVALANKIARIAWKLMVTGENYDGARMLGASTLAA

SEQ ID NO: 267673 - protein, 390 aa, unidentified
MPEIVDDLSRALVAFDQDSTLAVVVELSQSSWLVAGMVPGLERRPLKKLEPGAAGLLSLVHRWRDEAERCGRRIGRLVVAFEAGRDGFWLARWLMKRGVEVHVIHAASVAVSREHRRAKTDRLDTQLLMRALLGWLRGEAGHCKMARVPTLEEEDDRRPGREREALVAERTRLVNRAKAVLVRFGIVGFKPMLRKAADKLAGLRTPDDEALPVHTLAELSRITERLALIKAQIAAIEAARLEPAPPTESQAQARLMQAALARVIGVGTETAEVLTQELFRRPLRDRRAVARFAGLTGSPDESGARRREKGLARAGCARVRRSMIQLAWRFLRFQAESDLAKWFQQRAQAASGHQRKRLIVALARKLLIALWRLAATGQVPEGVRLRPAEA

SEQ ID NO: 267674 - protein, 419 aa, unidentified
MTAQQCTPPQAALVAIDIAKNRHEVLIDPGPGMRRRRLTMLNTRAEHDRLVATLADLGKPVIVGFEPTGNYHRGLVHRLIAAGFEARLISSMALARTREALHNGWDKNDPKDAQVILHMLRIGASTVYSDPGYGRLNDLQELSKTHDMVSRAKTELWHRLLTHYLPLYFPEAERFQGNSRSDWFLALLEQFPTPASITALSKDAFVEAAWDLVGRKVSKARLLADIYETARSSMALPVRPDSPAIAMFRLVLAEGRSLIRQRDQIEAQAEALLACDADAARLRQLPGIGPIIALTILAEAGDLRRFGHHRQFLKFCGFDLATHQSGMFRGQTRLSKFGNARLRRSFWLAAQVAIRQRENSFQARYSRYIVKDCDNKHLRRKAITAVAAKMARVAHAIVCSGTDYRPFYERPVPSGRTSL

SEQ ID NO: 267675 - protein, 419 aa, unidentified
MRIVYPRCCGLDVHKRSISACLLTPHEDGGTQQQVRRFGTVTRDLLELCDWLTSNQVTHVAMESTGVYWKPVWNILEASFTILLVNAQHAKAVPGRKTDTKDCQWIADLLQHGLLSGSFVPPSPIRQLRDLTRTRASLRQDHTAVANRMQKILEDANIKLASVATDWLGVSGRVILSRMLDGEQDAGKLAGLCRGRLRDKIPEMQLALEGRMTEHHRWMLRLQREQLEFLEAQIVKLETKIQEEMQSYQEAVDLCITVPGIEAIAAANLVAEMGVNMDQFPSAAHLASWAGLCPGNNESAGKRLSGKARNGSVWLRRSLCQAAWAASHSKNTYLSAQFRRLAARKGKKRAIVAVGHTILVILFHMLKNHQPYRDLGADYFDPRNAEQLKRVLIRRLERLGLQVTVVQSPACSSSAVQTA

SEQ ID NO: 267676 - protein, 346 aa, unidentified
MNYIGTDSHISTLDFKVVSETGKIKKAQKVATSAHNFLAFIKSVPKPRQVIIEEGPLASWLLEICDRNGEKLVITDPKRNRWIGSSGKKEDAVDAEKLAQLARGGYIKEIHHPVGERRRFRELMQAYHDTVRNTVRLKNKIKAKFIQNGINCSGETVYLPQYRQKWRQQLPQAAVLLVILDSLWEQLDQIQQTEETILSEARLQAKKYPEIKLLDEIPGLGFINAATIVAIMETPHRFADKKKIWMYAGLGIDKDSSGGKVYAEKLGREYNRLLKYTAKQAALAALKSDNVFRRAYLEMTLRKGIASHLAESTIARDILATAWAIWKKGEHFNPEIDKNVKKDAKA

SEQ ID NO: 267677 - protein, 354 aa, unidentified
MTKRKVTVKSTKDNSYPDQIDQYEHYLALDWSMINMSIARLTKKMKHPVVIDVPANLKNLKDYIKNLNGKKIMTIEETTTSQWLFVELVDYLDKIIICDPYRNRLLSDGPKTDKIDASKLCLLLKNGLLKEVYHTTDSLYDLRMLVSAYDDQVRAGVRLLNQKSAFYRAEHKSHKKNESLKENEIKNFVLTCIDEGIASYHEKKDSYEKVFEKISRQNKTLRNLKTIPGIGPISSVTILSIVIDAKRFKSPNHYLSYCGLVSHEKLSGGRSYGKRKPRYSRRLKGVYKSAAIRAVNHDNPIRDYYDYLITEKKVTEQNAVNSVARYIAKVSLGIMKSGNKYKPYKKGFKAKEAA

SEQ ID NO: 267678 - protein, 380 aa, unidentified
MVAIAYTTIRAQSKGGLMTATTYQPNDYDVFIGIDVDKKSFAFTAQDHNIMSRSKKIPSNPEQLYNYIRNNFDNRRVLCAYEAGPTGYGLYDYLVQREQPCVMVSPAAIPKASNERVKNNRLDSERIARYLKSGELQPIRVPSEPYRQLRQLISMRENYSSQSTVAKQRIKSLLLFEHIDDSPIDIVQHWSRAYINYIKTLPCSDIIRRKLDMLLEDLDYAREHILKVLEELKALCVAYPDINSYRCYLQSIPGIGFVVALTILARIGDPQHLTNVREIGAFTGLVPRERSTGDTVRYGSITHIGNNKLRRLLVEASWITIRHDAELAQFYYRIKSRHHPQAAPKKAIIAVARKLTQRIYKVLKERRMYEIRQSRETLSS

SEQ ID NO: 267679 - protein, 472 aa, unidentified
MTRHRIRHPRRRKNRRPPRLPRGLERVNLHAAGIDIGSRSHYVAVPPGSSPNGEDVDEYGAFTADLRDLAEWLKMCQVDTVAIESTGVYWIPLYEMLESYGFEVLLVDPKQLKRVPGRKTDVLDCQWLQELHTFGLLAGAFRPDEDICRLRGYSRQRDMLIKVSSQHILHMQKALTQMNIKLREVVREVTGKTGMKIIRSILDGERDPKKLASHRDGRCKNDEQTIALALEGNWREEHLFALKQAVELRDYYEERIRECDLEIERVMGEFVDISFDKELPPKPANPKRRHEPDFDLRCSLFRMTGVDLTQIEGIEAVSALKIVSEIGTDMSRWPSPKHFGSWLGLAPGSKKTGGKNLSGKTKPSANRAATAFRLAAQSLWRSKSALGAFLRRIAARHGMPKAITATAHKLARLVYAMLKHGTEYVAHGHDEYEKRYRQRRIANLKRHARDFGLIIVDPSDLKQLNPNNASST

SEQ ID NO: 267680 - protein, 370 aa, unidentified
MKTQTTSIEALSSNGADTITAVVGIDLGDKHSAYCALDRAGAVIGDGVVKTSPEALEAVFGGTGRMRIAVECGTHSPWVSRLLQELGHELIVANPRRLRLISESDRKNDKADSRTLARLAQAAPDLLAPVHHRSKEVQIDLATIKARDAIIRSRTALISAIRGIIKSSGSRLAVCSTGVFAKTAMDNCPAALRDALLPLMRIVQELTNEIRAYDRAITTKAEREYPETAAILTIPGVGPLTALTFVLLLNNNPQRIPKSRDLGCYFGLQPRQQDSGKHVSQLGITKAGDGLMRKLAVQCAHFMLGKFGKDCALKRWGLALAVRGGKNAKKRAIVAVARKLLILMHRLWKTQESFAPFYGCVIEPQGSLTA

SEQ ID NO: 267681 - protein, 350 aa, unidentified
MMIIGCDLHTRYQQIAMVDTDTGELVERRLEHESGEARAFYAGLKGAVRVGIEATGHTAWFEALLSELGHELWMGDAAKIRAAVVRKQKTDARDAAHLLDMLCTNRFPTIWRPSLQERDLRQLLWHRQKLVWMWGAVKNQMHALAMGEGVCRKKKLFTAKGRIELQGLRLGPWASYRRQELLRMFDELQNSVKKLDQAVELAAQSQPLAARLMTHPGVGPITSLAFVLIIGPVERFDRSKQVVSYLGLNPQEHSSGGRQRLGSISKQGNPMMRSLLVEAGHTAARLDPQLQRTYQRLKFRRGAAVAKVAIARKLAVRLYWMLRSTADYAQLVRMRGSSWATLVEDSPSLG

SEQ ID NO: 267682 - protein, 351 aa, unidentified
MMIIGVDYHPSFQAIAFLIEETGECGEQELNHSDGQAEKFYRDLKQRGICVRVGMEATGYSRWFERLLAELGFEVWMGDPAEIKAKRVKKQKFDREDARLLLRLMRENNFPQIWVPGPENRDLRQLLWHRHRLVQMRTRIMNQLQALAMNEGYRWKKKLFSEQGRAQLEKLALAPWASRRRQELLELLDRMNPTIEELTAAVEREARKRPEAMRLMTHPGVGPLTALAYVLIIGTPTRFQRGKQIGTYVGMIPSEDSSAGKQRLGHISKQGNSLLRFLLVEAAQAAARIHPDWRRRYMHLAMRRHKGIAKVAMGRRLAIRLYWMWRNGCEYSRSLEFGSYAGQLEIGHGAK

SEQ ID NO: 267683 - protein, 409 aa, unidentified
MERIIERGCGLDVHKKSIAACVRIPGANGQRTQEVRTFGTTATELLALRDWLQGHGVTHVAMESTGVYWKPVFYVLEEVLTCVLVNPVHMRQVPGRKTDVQDCAWIAQLLEHGLLRGSFVPPVPMRELRDLTRYRKTIVQERSRAINRLHKVLEDADIKLASVATDVLGVSGRAMLDALVGGTTDPDALADLARGALRKKLPALRQALSGRFRAHHAFLLSQILAHIDYVEEAIEAISQQVGLLLAPFVEELERVTTIPGVKQRTAEVVIAEIGVDMSVFPSAGHLASWAALCPGNNESAGKHRSGKTRRGNPWLRTALTEAALGAIRHGRGALAARYRRIMRHRGHKKAVIAVAHAMLVAIYHMLTRRTTYQDLGDDYYDRRHAERAKHRALQTLERQGYRVSLEPVA

SEQ ID NO: 267684 - protein, 363 aa, unidentified
MQNSITWVGMDVHAENNVLAAVRGSSEAVLFRAEFPNTPKGRERLAGKLAENAPVRCVYEAGPCGYELRRFLEGRGIECDVAAPALIPRKPGDRVKTDRKDAEKLARLHRLGELATVFVPTPAQEALRDLLRTREDAREDLLRRRHRLSKFLLRLGRRYAEGVRWTTRHWDWIRAQTFTDHNTETVFREYIVAIEQEVERIRRIEQQIVEESRSPEVGKTIARLRALRGVDTITAMTIITEVIDLNRFRSPRELMAFIGVVPREHSSGGRERRGSITKTGNAHIRRVLIESAWHYQRLPAGTPKTILVRREGQPPEVIETARKAELRLHRKFMKLLGRGKPKGIAAVAVARELAGFIWALGRG

SEQ ID NO: 267685 - protein, 465 aa, unidentified
MKKTRKKTQRSMSKKNLVTSGGRVVEARASGELNRVNEHAAGIDVGGERHYVAVPPGSTEHPVREFGVFTKDLYAIADWLRECGVETVAMESTGVYWVPLYEVLEERGFKVKLVDARKVKNVSGRKSDVLDCQWLQQLESYGLLQAAYRPADEIVVLRSYVRQREMLVKSAATHIQHMQKALQQMNLRLDNVVSDITGQTRMRIIKAVLAGERDAKKLGEMRDFRCHASAEEIAQSLVGNYRQEHLFSLKQAVELFEYYQEKIAECEAEMEKYLANLPHVTEEEPPELPFKEKRNLMSFNVQDHAYKMLGVDLFRIRGLNSETVLRIVSEVGVDLKAFPSEKHFASWLCLSPNRRVSGGKVLSSHTNPSSNRAAAAFRQAAVSVKGSQSELGAFYRRKRSQKGPASAATATAHKIARLYYSLVKNGTEYQEQGARAYEERERERVVANLKKRAKSLGFELVAKAA

SEQ ID NO: 267686 - protein, 398 aa, unidentified
MDLPVYYELETNNGNRDYRIQIGGHYMNYNTVYVGMDVHKESFTLCSCRYEDEKASHYQRTPASYKNVLRYLAFLRTIYGEDTRFVCGYEAGCLGYSLYHQLENFNVECVILAPTTMLEQRSKRRIKTDKRDAEIIARSLAQHNYSPVHIPTETDNQTKEFIRMRDDHKAELKKIKQQILSFCLRQGYQYDGSGNWTAKHVKWLRSLKPAGLYKEILDEYLLTYTILTDKLNRLDQRIEELASKEEYTESVSKLTCFLGIKIHTALSVIVEVGDFQRFVSARKFAGYLGLVPGQHSSGDDRNGLGITKAGNTHVRRLLVESAQSYTRGKIGYKSRVLRSRQAGNSPQVINYADRANERLRRRYYKMVLKDGKKYNIAKTAVARELACFIWGMMTDNIY

SEQ ID NO: 267687 - protein, 475 aa, unidentified
MLFNNQLKGRLHIMPAQKQPKKPSGKTTKPSGLRRLNSNTAGIDIGATMHYVAVPPERAETPVRCFGTHTAALHAIVAWLQECRVTSVAMESTGSYWIALYQVLERAGFTVLLCNARHVKNLPGRKTDVADSQWLQELHSYGLLSGSFRPADQVCVLRAYLRHRDNLTRASGAHIQHLQKALTEMNLKLHHVLSDITGLSGMAILRAIVAGERDPHRLAALRHERVKKSAAEIVQALEGEYRDEHLFTLRQALELYDFYLARIAECDQAIDQTLRSWDKKLDPSTAPLPGHAKRKTAFAQGQYELRTQLYALTGVDLTTLPGMEVLSVQALLSETGTDMTRWKSEKHFCSWLRLCPDNQITGGKRARSKPHRGHNRAAQILRLCAQSALKSKTALGAFGRRLRARMDAPRALKALAHKLARLIYRMLSAGVAYKDIGEHYYEERYRTHLIARLHKQAAHFGFQLAPKPSTEASVS

SEQ ID NO: 267688 - protein, 412 aa, unidentified
MKPILESCCGMDVHRDQVTACIASGPLDRAKEKLIVKEFSTMTYGLRELSSWLKDHNVKTVAMESTGVYWKPIFNILEDDFEVILANAARIKNVPGLKTDKKDARWIARLLRYGLVPASFIPPRNIRYLRDLTRTRKKLTEERTRHKNRIHKILQDANIKLSSVATDVFGVSGKAMIMALLEEDEPSPDEIKSMTKGKLRKKIGLLIKAMDGRVTDHHRFLLKMHFEHIESLSSQINELDEEISRKLEPYEKEFGLIRTHPAISEVTGASVIAEIGVDMSQFPDELHLSSWAAISPGNNETAGKRKSGRTRRGNNYLKTTLVEAAWVASRTKDTFLSARYYNIARRRGSKRAAVAIGHQILKDIYHILSTGEPYKEIGAEASRNRKSDARECSMIRELERLGYSVRKIEAST

SEQ ID NO: 267689 - protein, 326 aa, unidentified
MCERRLEHTEEAEQFYREVGKHGEVVRVGMEASGHARWFERLLHNLQFELWIGDAAEIRTKRVRKQKTDRQDAQLILQLMLENRFPRIWVPDAENRDLRQLLWHRHRLVQMRTRVMNQLHVVALNEGLRRKKALWRPEGRAELQALSLAPWAGRRRQDLLDLLDRLTPKIHELNGKLEQIVERRPVTRQLSTHPGVGPLTALAFELVIGTPERFACAKQIASYVGLAPSEESSGDRRRLGHISKQGNVLLRFLLVEAAQVTVRSDAQWRSQFFHLAMRRGRKIAKVAMARKLAVELYWMWRRGWDYRQMQQLGSHAGEPGNPHGVQ

SEQ ID NO: 267690 - protein, 367 aa, unidentified
MSHIIYCGVDFHARQQTICCLKTETGELTCHELKHDDKEALRQFYAELGGPVIVGLEASGYTPWFEQLLEELGHQVWLGDATEIRRRARRRQKNDRRDAELILELLCHGEFPRIHRPSPESREILRMLRYRHKLVKVRTLIKNSLQSLSIQAGLSLQAHLFTRQGTQQLAALAMSPVMRQQRQQWLELLQELNQRITATEEWLKQQALSDPRISLLRTHPGLGLLSSLGIVHTLIPVSRFPNTRKVAAYGGFEPMERSSADKKRYLGISKAGSRLLRFLLIEATQTAVRTDPDLQRFYRRLVPRRGKPKAKVAVARKLLIRSFIMLRDEINYAEFQQRAIAARLAREFARPNVPVSLIGQPASPAKG

SEQ ID NO: 267691 - protein, 451 aa, unidentified
MGALELWGETVPRLVLRRADGWWDVVPVSTAIRAPQVLLWLADGRSEQRRMAVLFVGVDWGERHHDLCLVDQDGGVLATRRITDGLAGVGALHALVAAHAQDPAQVVVGIETDRGLLVGVLLAAGYQVYAVNPQVVSRYRGRHGSSRAKSDRGDAKVLADLVRTDRHNHRQVAGDSSLVEAVKVLARAHQSLIWARQRHVNALRSALRDFYPGALAALGTHLAEPEALAVLELAPTPEQGRRLTRAAVRRALIQAGRRRNLPGRVVAVHDALAAPQLAAPEQLEAAYREVVGALVTVLGCLNVQVAALEHQLTLRFAVHRDAGIVQSLPGLGVVLGARVLAEFGDDPHRYATAKGRKAFAGTAPVTRASGLRTTVVARAACNQRLVDACYLWAFAALTASPGARRCYDAHRARGASHHQALRALGNRLVGILHGCLARRVTYQEQVAWPAA

SEQ ID NO: 267692 - protein, 317 aa, unidentified
MANVTFPQLIQRACGIDVHSKVVVATINGDGLQRETRTFNTFTSSLTELKEWLLFNEVTHVAMESTGVYWKPVYKVLEGSIPNVWIVNARHIKNVPGHKTDKMDSEWICKLLLAGLLKPSYIPPKEQRQLRDLTRYRNKLIQQIASEKNRMMRVLEDCNIKLSCVVSDTTGSTATSLINMICDGKTLTLEDIKSVYHGKLSASPEELLEACTGFVEEHHIYLLQMIRKDIAKTQELVNELSERIKSILSKYENAIELLKEIPGFSTKVVEDLVAEIGLDMSHFPSEKHLASWAGVCPGNNESAGKKKAEESLTETSK

SEQ ID NO: 267693 - protein, 367 aa, unidentified
MKKVSTAATKRNRNFSQPNLTIGLDLGDRSSCYCVLDETGRIVMEQKVSTTAKALQAAFGAMPRSRIALETGMHSPWVSRLLSGLGHEVIVAHARNVRLIGESRKKDDRLDAQTLARLARIDPQLLCPVRHRSAKAQADLTVIRARAGLVRARTALVNTARGLAKSYGERLRGCNVRNLNPEKAEGLSPELQAALQPLLVALESLSEQIGEYNDRIEKLAQESYPQVALLKQIKGVGTLIALTFLLTLEDPHRFRKSRDVGCYLGLQPGRRNSGQSQPQMHISKEGDPYLRTLLVQGAQHILGPFGIDCDLRRWGLKLAERGGKSGKKRAIIATARKLAVLLHHLWVSGEAYEPLHNSDQAAMPAAA

SEQ ID NO: 267694 - protein, 454 aa, unidentified
MRKPQVIPDEDHEVVYERVAAVDVAKASGVVCLRTPDPQRPGRFVNRIWEDVPATRARIAELGGELLRCRVQMVTLESTSGYWRIWHYVLEGIGLAVQLVSASQARNLKGRPKTDRLDAMWLARLTQWGMLRPSFVPPAAIRRVRDFTRARTDLVRERTRVLQRLEKLLEDAMIKITSVVTDGLKAKSPVAMVAALVAGERDPRTIADLAKGSLRGKRDQLAEALDGMFDSHHGVIARMLLDQVAFLDQRITAMEDQAIAALAQVEESWGVDATGETGPGRGTTPESPVLAAAHRLAEVPGISVWLAIVIIAEIGLNMAVFPTPAHLVSWLGLCRSAAQSGTRHGKGRQKKGNSYARGAAGQAALADRGTATFLGERYRRIARRRGGAVAQVAVARSIMIIVWHLLNDPAARYRDLGPDWHARRTNRDKKIRTHIQGLKALGVTVAITDDDQAA

SEQ ID NO: 267695 - protein, 337 aa, unidentified
MKNTNTIAVDLAKSVFQICILSANNKVTKHLRLNRAKFKEFLLTTNASTVYMEACYSAHYWGRFAEQAGHTVGLIPAQHVTPFVRGNKNDRNDALAIAEASRRPGIKFVQVKSVAQQDIQALHRIRERCVAARTALMNQMRGLLSDYGHVFPVGINAFLTELKSIDFSEVMSEIIQREISRTLMEYDFLTRRIEHIQKELTSYANKNAECQRLQSIPGIGPHIASAIVSSIGKGNSFESARCFAVWTGLTPIQKASGFKSVMSGITKRGDGYIRKLLVQAARHTVLWAKRNPDTKLGHWINQIMQRRGMQKGTVAVAHKLARISWILLQREQEFKVL

SEQ ID NO: 267696 - protein, 396 aa, unidentified
MNPLSIRVGVDVGSARHRVAVGLPDGKVLDEFDIDHNAGGFNEFFRRVETIEKRHRLPVAVAMEGYNGWARPLDGHILRHGYRLYSVNNLKLARYKEIFPAPAKTDAIDARRILELFRLSEHLPLAKDALHEVAPTPEENDKLKRLTRRRKELVWERVRVVNRLQSDLHAVCPGLLAITAQADNLWFLNFLTCRDALLKLARLRIAGLLAIPGVGKTYAERIQAWQPHAQFAPEVEWVGDMIQQDARRILALGKDIKAMDQAIAAVAADSELAQCVGSIPGFGQTSMAEFAGEVGTLDRFETESALALYVGMAALDNSSGKKSGAKAPRHVNTRAKATMMVAVARHIACVPASRAYYDKKRAEGKRHNQAIRALGRHLVRVIWSMVKQGRKYEIRE

SEQ ID NO: 267697 - protein, 399 aa, unidentified
MKTSLFNELRVSVDVGCHSHSVAIGLSNGEILDEFSITHEPEGFRQFFSRIEKQERKFGYPVCVAMEGFNGYARPLDTLVRAHDYRLFNINNLKLARFKEIFPGAAKTDPIDARKGLELFQLRDHLPMAKDVLQEVHKTPRENEVLKRLSRRRRRLVDERVRVLNNLQSDLQAVCPGLLEITGDAGNLWFLRFITSTDDFRKLARVREATIRKIPGIGAKYAGLILSWQKKTQFSHEVEWVGEMIQEDASRILELHDKIQTLELRMEEVAQGSEIALTLSTIPGFGNICTAELAGEIGTVERFGSEASLALYLGMTNLDNSSGRQKGSKPPRQVNTRAKAAMMIAVDRHRKRVHQSQEFYEKKRSQGKKHNQSLRALGRHLCRIIYKMLKENRGYLLSS

SEQ ID NO: 267698 - protein, 393 aa, unidentified
MLLDHPSDGLTAIRTQFGAIFASLELSRSNWLITSLSPGKGEKMSKHSVTAGDVAGLMTLFADLRRKAEARTGQSYPIITIQEAGLDGFWLHRVLQQNGIESHVVDPASIAMPRRRRRAKTDRLDGETLLRALLAYKRGEPRVCAMVVAPSPEEEDRRRLCRERATLIAERITHVNRIKGLLFSQGISDYVPLRRDRRSRLETLRTGDGRELPSHLRAQIGRELDRIELLLEQIKAVEAERDVLLAAARKPAEKPADKKAAPDPVTMLLALKGMGANFAAVLWSEAFYRQFANRRQVAAYAGLAATPWQSGGIRHEQGVSKAGNPRLRTTMIQLAWLWIRHQPQSALTRWFKERSQQGRKRAIVALARKLLVALWKYVTAGVVIEGAVMKPAA

SEQ ID NO: 267699 - protein, 428 aa, unidentified
MDELNRNRLEEFRQLRQEIRHSEEYLIVGMDIAKDRHHAFFGSATGRTLLRRLVFDNNYEGFRKLLDQTEALRVRHGLKKVVYGMEPTANYHKPLGEYLLSLGRTVVLVSGVTVKQNRESLDGRWDKHDVKDSANVADLISQGKCLYYDYPTARLRGLRGLLSFKRRLKKQEHGYRVRIRNHLIAQYYPEMDREYERMGAEGLATMRWCFPPSEITGLDVEQYIDRVTSGRIRREKRERLERVWEQAGETIGCDGVPGVQHEARWMVEGLKQVRKMIRETEDEIEELCEGFSEYGYLLTIPGYGPDVSSKVLGAVGEADRFQNGRQVLKLAGYDLSANRSGKDSEKAIPEISKRGKADLRYALYQAALIASTKNREFMRYYTSKLRGREKEKGIHRKVLVKLSAKMLLIAWTLMKKKEAFDPTYLNRA

SEQ ID NO: 267700 - protein, 350 aa, unidentified
MAKAPLQHVSTLGIDIGKNSFHLVGLDARGAIVLRQKLSRGQVEQRLANMPSCLVGMEACVGAHHLSRQLLALGHEVKLIPAQFVIPFRKSHKNDFRDAEAIAEAVLRPTMRFVPTKTVEQLDLQALHCVRSRLVRERTAVVNQIRTFLLERGIAVRQRLRSLRQALPDILAQRTDVLTPRMTHMIEGLMQDWHHLDERIEAVTGEIEALVAADEACQRLMSVPGVGPVIASAMVASIGNGAAFRRGRDFGAWLGLVPRQISTGDRTVLGRLSKRGNSYLRSLLIQAAKVLLLWPAKWRQHGFGEWLAAASMRLHHNVLAAALANKLARIAWSVLSQNRVYEPRAAAVAG

SEQ ID NO: 267701 - protein, 342 aa, unidentified
MHNPDVCGLDVSAQELVVMVRRDGKTEPCRSFPNTQPGHQELRRYLTRSAERVRVCMESTGMYGLDAALALQADTRIELMVANPRAVKSFSRALLQRSKTDPLDALVLLEYAARMPFQRWQPPPAQALQITALARRIHALTQQCTMEKNRLHAVAATATTLRVIVQDLRRSVRGLETAIAKLSREAHKILAATPELERRFLLLQSTPGIGPVSALQLLGELVLIAAHCDVRQWVAYAGLDPRHHESGTSVHQKARISKVGNRHIRRALFLPALTAVRFAPPLRAFYLHLQARGKCKMVALVAVMRKLLHAIFGMFKYDAPFDGAKLCPALTLAMPPEVACAA

SEQ ID NO: 267702 - protein, 357 aa, unidentified
MESQEVKYVGVDCGKKSIEVVRINSENSLERRQFSTTESGINNLLQWLTLNDIVGLEAGSQSFRIAKSILNKGVQVIVLNPGNLATIYQSLKKTDKEDSLKIARLIQRFPIEELPTVPIPNDEEEDNRRLCTEQENWTRQLTQSKNRLHSLFTQAGLTQITKKHLRTKVSREASVTLLSDRYKKEAERILKVLDLVEQNLKLIEKEIQEALKKNKAYVQTIMSMPGIGMITSLAIMSYMGDCKRFSSAKQAAYYAGLVPRVDISGDTVRYGRIINRGCHSIRRVIVQAAWSLVRCQHGGKVKEFYQRLYLKKGAKKSIIATSRKMIEVLYVMIRTGKLFDSMPENILNRKLTQYGLM

SEQ ID NO: 267703 - protein, 343 aa, unidentified
MNKVTTIGIDLAKNVFQVHGADDNGQVVFRKQLRRGQLLEFFANMNPVLIGMEACSSSHHWARELCAQGHHVKLMAPQFVKPYVKSNKNDVTDAQAICEAVTRPTMRFVPVKTIDQQSILALHNARQGLMKARLAQTNQLRSTLAEFGIFLAQGGHHLRKGWGHAIEQLQSVVPQFLIGVLSSLYEMVKHYDQLIDQVDDQIKQWAGQSPQAQALQTIPGVGVLGATALAASIGDVADFKNGRQLAAWLGLVPKQHSSGGKSRLLGISKRGDKYLRMLLIHGGRSLIATNSLRKQPLTWLSEKLQHKHHNILAVALAHRNVRIAWALLSKGQVYEAKPVQGGL

SEQ ID NO: 267704 - protein, 346 aa, unidentified
MKKRSAKGEVKVLGIDLAKQSFQLHGVDQSGQTVLRKKLTRNKLSAFVANLPPCVIGLEACGGAHHWVRVFKEFGHTVKMMAPQFVKPYVKSNKNDSVDAEAICEAVQRPNMRFVPEKSIEQQDMQSLHRIRSQLVDRRTAQSNQIRGLLLEYGIIVPQGIHHVRNQLPLILEAADNGLSDLSREFLHELYEELVHLNERIDALEKKLLRLSAQNEDCQRLLTIPGVGLLSATALVAAVGDVSNFKNGRELAAWLGLVPRQHSTGGKATLMGISKRGDCYLRTLLIHGGRTVVRVAHRHQDRRSRWVSELEQRRGKNISAVAVANKNARIAWALLSKKTTYQATAA

SEQ ID NO: 267705 - protein, 323 aa, unidentified
MPGDGHVTKAIKEGGDMDVIIERGCGLDVHKETIVACVMGEGIKKEIRTFSTMTEDLFRLKSWLSDKGITHVAMESTGPYWKPVFNVLEDSFEVILANARHIKNVPGRKTDVKDSEWICKLLRSGLLAASFVPPKAIRELRDLTRYRRKLTQSISAEKNRVQKVLEDANVKISSVVSDTFGVSASRMIEAILAGNLDTEAISDLAVGKLKGKKEELKKALVGNFQEHHRFMIQASLNHIGSLEKIIAEFDQEIARKLKDYHKEYELLQTIPGVKEQGAASILAEIGADMDIFPSEGHLSAWAGMSPGNNESAGKKKRKDDPRQ

SEQ ID NO: 267706 - protein, 318 aa, unidentified
MDGSVGIDVSKAKLAVVLIAPTGKAFHKSCANTPAGHAELLRWLARQTDARLRIGLEATGGYQEAVALALHDAGYHISVLNPSAVEAYGRSQLRRAKTDPTDAAIIADFMRTQTPPRWVPAPPEARQLQALVRRLDALLEMRTQEGNRLDLAAPIVRSSIEATVAHLDSEVVAIKRQIATHIDQFPTLRTQRDLIVSIPGIGETTAAIVLGELLDIARFTSARELAAFSGLVPHVRQSGTSTRGRGTLSRLGAARLRKALYFPALTAIRHNRPLQRFAARLRAAGKPKMVIVAAVMRKLMHQIFGVLRSRRRFDPTCA

SEQ ID NO: 267707 - protein, 345 aa, unidentified
MEPIIIRQSVGIDVAKNDFKACYGYVNSKMQQKVIAEATFENTPKGMSSLILWLSQKLVSSNDLYVIMEATGVYHEAICHFLYDQGFNVSVMPSGRVKKYAESLQQRSKTDLLDAKMLCVLGLERMVDLWKPARPVLQGLKNLSRERGQLVKEQSALKCKLHALEYSVGIKARVISRLKSRLELIKDQIKEVELEMRELVISDEELKQKIHQLTSIPGISFISATVVIAETRGFQGIRSAKQLTSYTGYDVVHRESGLYKGKTTISKRGNSHIRGALYMPSLTAVRCNPTLRPFYLRLKEKKAKPIIGLVAVQRKLLCLMYTLWKTDSIYDPNYEQKSAEAIASA

SEQ ID NO: 267708 - protein, 341 aa, unidentified
MKNKSFIGIDISKNVIDVSIFCEGASIKDFPHAVFNNSRKGFGEMCTWLKKNHVVLSNCLFGMEFTGSYSMELEKFLNARKYQFCMLSTHVVKHYPMGPKDKSDKIDSAKIADFLYRYNGTECVKPYKMPDKTMQRLKALMNERKFLVEQRTCFMNRRQLCTTKEDAQLYDGYIKKFDHDIENIELEIQKLLETDDSLSTTYKNLLAIPGIGFVNAMNVIVITRNFTAFTTARQYASYVGVAPHFHTSGTSVKWRPRPSARCDGQAKADLSMAASVAVQYDAELQSFYNRKLGGKQDSDTKRKALNAVKFKLILRMFAIGKQNRKWEPLDSKSSNEKLAIS

SEQ ID NO: 267709 - protein, 369 aa, unidentified
MDKDTTYVALDDSKRKIVAGILRPSDTQPELREIANDARQIRRLFERLKREGPVAACYEAGVSGYDLHRQITGLGVACAVIAPALTPRRPGQRIKTDRRDAAKLVRLFRAGELTAIHVLDESEEAVRDLVRCRDDIRRDVLRWRHRVLKLLARHGRAYLTGKNWSHAHWRWIREQRFELPPLQRAFEATVFALEQALARQAELDKELEALAATAPYREPVGWLRCFRGIDTLSAIILLAEVVDFQRSRRPRELMAYLGLVPSEDSSGETQRRGALTKAGNSHARRVLVEAAWHYRHRPTIGRALANRSQGQPDEIVSHAWRAQQRLHRRYRHLLGHGKRTPVAVAAIARELVGFIWAAMTRHESRRQAA

SEQ ID NO: 267710 - protein, 316 aa, unidentified
MPNDKEHFVGIDVSKDKPDVAVLGRKPIEPFASTKRGIASLVRAMKECKPKLIVVEATGGYEEALVLALFEASLPVALVSPQRVRQYAKAKGLLAKTDQLDAQVLAEYGKTIHPRLFVGKSEERKRLSALVGRRKQFNDMLEAEKNRLRTTSVQVKNSLKRIIVCLQAEMKELEEEIRQFMKTHEEMGQQEQLLRTARSIGPVTAATLLADLPELGTLDRKQIAALVGVAPMNRDSGRKRGYRKTKGGRPDVRRALYMATLTGIRYNPLLKPQYEQLVKRGKEKKVAISACMRKMLTILNAMLRDQPRPEQTLATT

SEQ ID NO: 267711 - protein, 390 aa, unidentified
MYIVGIDIGKRNHEASIMNAAGKQYGKPIRFANSHTGFNKLMDWVKNISGADDVVFGMEATGHYWLALYTHLCHEGYAVHVINAVQSDALRGMYIRQAKNDSRDSFIIAEVIRFGRFCETAVSAPELHALRELCRHRFWIVDSVSDLKRKVIALLDQVFPEYENLFTNTFGKTSLQLLSEYTTPEELLAVDTAKLAETIYTASRGHHGIEKAQEIQNTARNSFGILLASDSIALLIRQYIEQIRFVEKQVDRIDTEIARLLSAFDNQLTTITGIGPTLAATILSEIGDIRKFASSGKLAAFAGIDPTMKQSGNFVGSHVHMSKRGSPYLRRAIWLAATIAAFKDPSISVYYQRKRSEGKSHLTALGHVSRKMVNIIFAVLRDNTPYSPAI

SEQ ID NO: 267712 - protein, 373 aa, unidentified
MPKYSTAFGMDVHLRSTTVCALDADTGEAVTRRFPGNPWGEIAGWMGGFPGPSLAAYESGYPGFAPQRELAGLGVECVVAAVSKIPRSAADSASKNDRNDAARMAKAILAHDISPVWVPSPEVEGIRDLAGAYDGATARLATAKQRLLAFLAKRGFAYGGTTPAGNPRKYWTYDFLRWLDKVRPEDDGGVRTLAALRSEVEAAAEARADLLSEYRAAVDASPIAAEAAALQSIKGCAFALAAAFSAEVGDFTRFRSGRQVTAYFGLAPSQRSSGDSVRLGGISGAGNALVRKLAVEGSWCYAAARHQPKLMPRDTGVPLEIRMHGRKGSERLLRRREEMLARGMPAAKANAATAAELVRWLWALGMMCREGAE

SEQ ID NO: 267713 - protein, 471 aa, unidentified
MAKAARKPASRPSRLTSARPRFSKRYPRLEDLPVVHRHAAGIDLGGDVSHFVALEVGDEVEVREFGGMTPDLHSLVAYLTTHGVTTVAMEATGVYWMPVYDLLEAAGFEVYLVNPSHVKNVPGRRKDDKLDCRWLQKLHTYGLLSASFRPGEEIRPLRSFYRQRTRLVQLCADETRRMQKALDVMNVRIHKTISDLCGVTGLRIVRAIVAGERDPAVLAAMREPTCQCREEELRQALTGHYQADQVFALRQALARYDFFVAQLAAVDEEIEAYLTALIPLPEAEITAKVTAATQPRPKGTHVPAYNVAAYVELFTGHDATVLPGIGPQIALGLLAELGRDMTKWKTQRHFGSYLALAPQPKISGGKVLATRTRHGSHPAAVLFRQAAAAVIRSDSALGAFYRRLAVRIGTAKALTATAYKIARMYYHLMREGRAYVELGEHVYAERYRQQQIAALEKRAKRLGFQVTPVAA

SEQ ID NO: 267714 - protein, 405 aa, unidentified
MVVYIGIDWSEQKHDVAFLNEKGGIIERFTIAHTWEGLMQIDTMRQRIGVGEQECLVGIETMHNLLLDHLLSRGYSNIYIIPPSMVKDSRGRFGSSKARTDQSDAHLLADIVRTDLKRLHRWQVDSLLTRQIRAQVSQITFLTEQIVRTCNRLRAILLRYYPAALHVFSSLDSAICLAFIQAFPNPELAAQLSFSSFQAFAKQHRYPFPKRLPACFARLQQSYPQPSQSTTLIYQPQACLLAGLITEWIQAKNTTLIELKATFQDHPDYSIFNSLPGAGKFLAPALLAKFGDDRMRFPSPQALQAVAGTCPVTFSSGKRHIVAFRRACDQEFRTIAQQWAMESLFVSSWAYSYYQMVLPHARSKSQAYRCLANRWLAIAWKLWQERVSYDEDFHLRQRALRSLPR

SEQ ID NO: 267715 - protein, 316 aa, unidentified
MAEGKTFVGVDVSKQCLEVAVRPNGEVWSESNDRMGVHRLVRRLKAMASTLIVIEATGGYQNLLSAALRDAELPVRVVNPRWVRDFARAHGQLAKTDKLDANLLALYAERAELELRVVPDEQTLELRALCTRRDQLMDMLVAEQNRLEHAPKRLRRAIDDHIDYLREQLKHLDDDIDHAVRHSKLWQEKHELLRSVPGVGPVLCAGLIARLPELGETNRGEIAKLVGVAPLNWDSGKLRGIRAIAGGRASLRRTLYMCAVAATRCNPILRTRYRQLRAQGKPVKVALVAIMRKLLLILNAIIKTRTPWRQPCGDLA

SEQ ID NO: 267716 - protein, 351 aa, unidentified
MNYIGVDYHKKYSYIVVKNEDGCVGGRGTVNNNKEEIQRFLEPYRPGMAVVEATRNWWLIYDWLDEVLDDVTLAHPLKVKAIAEAKIKTDKISADILADLLRADLLPRAYAPSKQTRELKNILRQRMFFVRVQTMMKNRLHDILDRHPEMLSQAPEASDLFGAAGMQWLSQTALPGEDNKLLTSELGFLKFLKEEISQSNGTVKKLAKKDRRARLLQSIPGIGPFFSVLILYEIDDISRFRDEKKLCAYAGLVPSTHASGGKVFHGRITKTGSKWLRWAAIEAAQTAVRSDSEFHAYYQRIRIRKGTNAAKVATARRLLTIVYRLLRQGRFYERRTTNTRKIVTPAALVTD

SEQ ID NO: 267717 - protein, 346 aa, unidentified
MEHYVGLDVSLKLTAICIVDRTGKIEREGVVASDPEIIAAFVKSHAPHVARVGLETGATSTWLWTELNKMGLPVICIDARHAKAALKLQINKSDRNDAVGIARIMQCGWYKEVRVKDLDSHAIKALLVSRALLVKIKRDLENQIRGLLKNLGLVIGQAKMNVFSVRAAELAEARPELAAAVEPLLKAREAVERQIADLDRKVMRLARNDAQVRRFMTAPGVGPITALCFLATIDDPTRFKRSRSVGAYAGLTTRRYASGEIDWTGRISKCGDKMLRSYLYEAANVLLTRVAKWSALKAWGVRLAKRSGLRKAKVAVARKLAVILHRMWIEGTEFNWSSKEAANQPA

SEQ ID NO: 267718 - protein, 415 aa, unidentified
MKKNTNSPLKKEPKGKRAKAQRPVQRDTKEVLAELVEKLKGKLEPKATSASPAEAGPRGELSPNVDRLTVGVDLGDRWSNYCILGLQGETLSEGQVQTREAEVAEFFQALPPARVVMEVGTHSPWMQEIVAGEGHEVLVANPRLMEGSKRRKRKNDRIDAKKLARLGRVDPQSLHPIRHRSREVRQDLVVLRAREALVAARTGLINATRGLVKSMGTRLPQCSSPSFGQKVKDAIPEKVGEALLPLVQLADALSDCIQSYDQKIEELGEKYGQTKLLRQVKGVGPITALGYMLTLENPEWFGKSRDVGPYFGLVPKQEDSGDSQPQLGISKTGDTMVRKLLVGSAHYILGPFGPDTDLRRYGLRLCERGGKNAKKRAAVAVARKLAVLLHRLWVSGEVYEPLGYAASRAIVQQAA

SEQ ID NO: 267719 - protein, 347 aa, unidentified
MMQGRGTRPECNREKRMEKLNYVGVDVSAKTITMIIDQQGKRTEPLDLPNDTRGHKKLIGMITKSRSHARVVLEATGVYSLDLSLALHRANRVEVMVANPRAINQFAEAYMRRSKTDFLDARILLEFAMRMDFKLWSPPERHIFDLRAISRRIEGMVKTATQEKNRLHAADHFDEMTDVVRADIEDNLEQLKNRIARLRSQALELIDEHPDLARSFGHITSVKGIAEAAGIQILAELSVLPSDMDVRQWVAHAGIDPRQFQSGTSVNRPARISRRGNAHLRKALFMPALVAVQSEPHVKAFYDKLVARGKTKMQANVAVMRKLLHAIYGMLKHDQDFDGEKFYMLGT

SEQ ID NO: 267720 - protein, 335 aa, unidentified
MTLYTGIDYHKRTSTICFLKSCGNKELKTIKSERLVAELANRSDLLVGIEASCGVNHVVDQLKAHNIEVKIINPNKFRGIGIGGKKTDLKDAEALAECLKVNFIPEVFHKSIGARRLKSLLRVREQYVQSRVRLTNHVRGILREYGITIPAGTESFWEEISVKLELVDFTPLREHLQGAIFEARKLITKEKDVERTLKEQLDGDIRAVNLMSVPGIGLMTTAAFIAVADDLTRFKNAKAFASYVGLTPREFSSGDKRRMGSVSKAGQEILRRYLIHGARSVLRYSNENSKEPLRRWAYKLKLKSGANKATVALAHRLARICFRAALEERAYRKVM

SEQ ID NO: 267721 - protein, 348 aa, unidentified
MAHFVGLDVSVKETSVCVVDEAGQVISQQQVPTEPADIIALLTSLGVPFGRIGIEAGPLSQWLVNALTAADLPVICVETRHMKALLTAQQINKTDRNDARGIAQMMRVGLFKPVHVKMLVAQQQRLLLTNRKLLQRKLLDLESELRGTLRNFGLKVGVVSGGRYEARVHELVAGFPGLAAITEPLLNVRRVMRQQFAVLHKMLLDTVRGDQVCRRLMTAPGVGAVVALTYRATIDQPQRFVHSRAVGAHIGLTPKRYQSGEVDYDGRVSKCGDALLRTMLYEAAHSLLIQSRKWSWLKAWGMRVAQRRGIRRAIVAVARRLAVVLHRMWVDGSEFRWSKDNAAVPAVA

SEQ ID NO: 267722 - protein, 345 aa, unidentified
MTTMNYIGLDVHKKTISYCVKDVSGRIQQEGKIRSTRRELDCWMKTLPQPWTVAMEATIFSGWIYDHLLPHATQIKVAHPLMLRAIAAAKKKNDQIDASKLADCLRCDFLPECHMMPRAIRDRRRTLRYRHLLVRQMVQMKNRVSGLLMETGVEYNKQRLHKVSYFRELLSANGEVDPSIRPLLKLSRETIERCQKTEYALVSSLQRDPVLADRIKRLRTVPGVGPITALTWALEIGDVSRFGSIKKAISYCGLCGDERSSADKAMRMPLSKQRNKHIQRALVEAAKLAPRQNHEMAVIYDQERQKGNSNRATLAVARKMVAYLLAVDRQQRDFVPAEERRTSAA

SEQ ID NO: 267723 - protein, 570 aa, unidentified
MVVVGTDAHKYSHTFVATDEVGRQLGEKTVKATTAGHATAIMWAREQFGLELIWGIEDCRNMSARLERDLLAAGQQVVRVPTKLMAQTRKSARSRGKSDPIDALAVARAVMRETDLPLATHDETSRELKLLTDRRDVLVAQRTSAINRLRWLVHELDPERAPAARSLDAAKHQQALRTWLDTQPGLVAELARAELTDIIRLTGEINTLAQRISARVHQVAPALLEIPGCAELTAAKIVGEAAGVTRFKSEAAFACHAAVAPIPVWSGNTAGQMRLSRSGNRQLNAALHRIALTQIRMTDSRGQAYYQRLQDAGKTKRAALRCLKRRLARTVFQALRTVHQPSSEHTQPAAACHRSYCSSHLGEPPRLTDMTQKTRIQPLPPKRAGLLIRALYRIAKRRFGEVPEPFTVTAHHRRLLIANVVHEALLQRASRKLPPSVRELAVFWTARSIGCSWCVDFGAMLQRLDGLDVDRLTDIDNYAASSKFSDDERAAIAYAEAMTADPHSVTDEQVADLRARFGEAGVIELTYQIGVENMRARMNSALGITEQGFNSGDACRVPWAAPDVPSAESR

SEQ ID NO: 267724 - protein, 319 aa, unidentified
MGELWVGIDVSKRRLDVAIRPDGGTLICDNDTAAIKKLAGMLALKSPRLIVMEATGGHEYAAAVILSKAGLPVAIANPRQVRAFARAKGKLAKTDPIDAETLAHFGEAMEPPVRAVRDQQLEEIGQLVTRHRQLIEILVAERNRRLSCVGTAQRDVDATIRFLEGRLDKVDRQIKALIAEHPDWRSKAELLDSVPGVGPVLISSLVAELPELGTLNRKQIAALVGVAPFNNDSGQSRGRRRIWGGRSHLRAVLYMSAVSGVRFNATIRAFYKHLRERGKAPKVAMVACMRKLLIILNAILKTQQPWRSPAVEMPIALPA

SEQ ID NO: 267725 - protein, 400 aa, unidentified
MRVVFGIDVSKVSSEVAILVNGEKVHGYTMPNDAIGFARLLGDLKTVHKPEIIFEATGVYSRRLQAFLEDNGYAYTRLNPLEAKKQLDSLRVRKTDQIDAEKLAQSQFVLNRKPTYVQEEVYQNLRDLSRFYQNLTEDIVRAKNRLHKVLQVTFPELENILATPTGEQYWKLVMTFPCKELVLDRDGNELLDSIRQSTSKRISDKRVVYLAEKLTALANQSYCAVKKTSPMFEEIRYYAQELLRLSERRKAVLDQMVTLAKPLPEYEILLSIPGIAETTATSIIGELGDIRRFHSANQINAFIGIDLRHYESGNFLAQEHITKRGNPYARKILFKCIHNIASASHTNPCHIADFYEKRKRQSQTTSTKPHTIASIHRLIRTMYYLITHNKLYDYTSTKNQ

SEQ ID NO: 267726 - protein, 418 aa, unidentified
MDVVVERCAGLDVHRDNVVATVRVPSEDRRRWERETRTFKATLGGLAELREWLVGFAVALVGMEATGVYWTTVFQALEDRFECWLLNAQHLRNVPGRKTDVKDSEWICDLIAHGLVRPSFVPPPEIRRLRDFTRLRKAQINERSRAIQRLEKVLQNAGIKLTSVASQAYSKSARAMLEALLSGVSDPDQLAELAKARMRSKIPQLREALANRFRIEHHGILVAQLLAHIDTLDQAIALLDEKIEALLAPHQKVVELLCTIPGVAVRTAQVLIAECGLDMSRFPTAGHLASWAGICPGHNESAGRRRSGRTRPGPKWLTEALTESAKAAARTKDTYLAAHFWQLRGRRGEPKAIGATRHDILIAYYYIVRDQVPFRELGPDWLRRRYSPEHRARRLQLQLEALGYKVTLEQTKEAEQAA

SEQ ID NO: 267727 - protein, 401 aa, unidentified
MNAVGIDVSKNKSTIAILRPFGEIVAKPFDVKHTSSDITYLISQLKSLNGDTRIVMEHTGRYYEPMAQWLSDAGLFVSAINPKLIKDFGNNTLRKVKTDKADAIKIARYTLDNWCELKPYNNTDELRRQLKNMNRQFDFYMKQKTAMKNNLIALLDETFPGINTFFDSPARNDGSQKWVDFVTIFWHVDCVRRQSISSFSERYQSWCKKKKYNFQSQKPNDIYEFSHDLIATLSKDNVTKLLIQQAVDQLNIASKNVESLRLLMNQTAAKLPEYPIVLDMAGVGTTLGPQLIAEIGDVSRFSHKGALTAYAGVDPGANQSGDYEQQSVRTSKRGAPQLRKTLFLIMDSLMKLAPPDDPVYGFMMKKRAQGKDYYVYMTAGANKFLRIYYGRVNEYLSSLTS

SEQ ID NO: 267728 - protein, 337 aa, unidentified
MVYGAIDLHMRYSQVRMIDAEGQCLREARVATTPERLIAAFAAHGPMRILLGTGTESEWVAQTLEAAGHEVVVADPNFAPMYGEVRRRVKTDSRDVTALAEANRRGWYRAAHRTSGPQRARRQVLSARRQLVQMRTGTISVIRALLRQSGYRAGAGGSEAFGDRLARLALPEALAATIAPLVRTLATLRTEIRALDAQLEQVAAIDPVVRRLQTVPGVGPVVAVTFRAFIDDVTRFGSAAQVSAALGLVPREDSSAERRHRGHITKTGPTELRSLLVQAAWVCWRSCRQGPLRAWTDQLAARRGKRIAVVALARRLSRILFAIWRDDAVFDRSRVAA

SEQ ID NO: 267729 - protein, 386 aa, unidentified
MQTVAALIPAAVDYERTLVLAIEVSNESWVLAAQVPGLPHTKAKRTINPDAESLMTAIAGYRARAAATGHSVERVITVYEAGWSGFWLARWIMRQGMEAYVIQPSSVPVDRRMRRAKSDGIDAELLLRTLLAWLRGEPRVCSMVPIPDEADEDARRCVRERTELISERVGLTNRIGAVLATLGVSDYNPLLRNRHRRLTELRTGLGEPLPRNAQAKIERLLARLELVLAQIAELERERDAVVEAEASDKASKMIQQLINLRGIGVQSATVLVREAFVRRFANGKTLGSYAGLASSPYSSGGIDREQGIGKAGNRRVRTVMVELAWLWTRYQPGAAQVRWFRERVGSTGRRARKIMVVALARKLLIALWRFVIDGVVPEGAILKPAA

SEQ ID NO: 267730 - protein, 315 aa, unidentified
MASFLGIDVSSRSLDALVRPQGIKIHVSNDRAGFEELRRSLGGRSIKRVLLEATGGYERDVMHFLQDGGYKVIRVNPRRARAFAESIGVKAKTDAIDAEVLAHYAEVIPDQSTLRISPERALLRELLQQRDRLVQQRDDDLRRLKQAQSRVVSDFLKANLQHFKSQIKLVEQAISQQAEALKDERVTQLVQVKGIGLVTAGKLVTLLPELGRVESREIASLVGVAPFNHDSGKFVGKRSISGGRFEARRSLYMSCLVAMKYNPALKARYEALRERGKVAKVAIVACMRVFLVRLNAMLRTGEPWLDLVLPQPKRT

SEQ ID NO: 267731 - protein, 366 aa, unidentified
MKKPSTTALRRIKKLQDGQLTIGLDLGDRSSFYCVLNNAGEVILEERVTTNPETMKKTFEKMPASRIALETGTHSPWVSRLLTELGHEAIVAHSRNVRLIGESRRKDDRLDAQALARLARIDPRLLSPIQHRSAQAQADLTVIRARYALVRARTALVCAARGLTKSFGERIRGRNPKGFGSATTETLGPQLQVALAPLLSALETITARIREYNVQIETLAEESYPETALLKQVKGVGTLIALTYVLTLEDPRRFRKSRDAACYVGLQPGRRNSGQSEPQLHITREGDSYLRMVLVQGAQHILGPFGEDSDLRRWGLKLAERGGKRGKRRAIIAVARKLAVLLHHLWISCEEYEPLHNTRKRRPAAA

SEQ ID NO: 267732 - protein, 317 aa, unidentified
MAEVTFPQLIQRACGIDVHLKVVVATIDGAGIQRETRSFKTFTSSLNELKEWLLSNGVTHVGMESTGVYWKPVYKVLEDSIPNVWIVNARHIKNVPGHKTDKMDSEWICRLLLAGLLKPSYIPPKEQRQLRDLTRYRNKLIQQIASEKNRMMRILEDCNIKLSSVVSNTSGTTATSLIDMLCEGKVLTLDDINSVYHGKLSASPEELLEACTGFVEEHHIYLLQMIRKDIDQTQTLVDDLSERIKRLLSKYENVLELLREIPGFSTKVVEDLVSEIGLDMSHFPSEKHLSSWAGLSPGNNESAGKKKAHESLTETNR

SEQ ID NO: 267733 - protein, 356 aa, unidentified
MLKRNKLDFTGQPIYVGLDVHKKSWSVSIWTQHGPYKSFSQPPEVGKLVHYLRHHFPGAQYYSTYEAGYCGFWIHNQLREKGVDCLVVNPADVPTKNKERKTKRDRIDCRKLSRSLRNGDLEGIYVPPRGKVEDRSLIRTRLSMVRKQTRCKNQIKAMLLFYGVVIPEQREMGHWSRRFIRWIEGIRMERVSGDMALQIHLEELCHLRQIIAKLNRAILALSRTDEYRSWVLLLRTVPGISTLTAMILLTEIGEIGRFPSIDELTNYVGLIPDTDGSGEKEHVGGVTQRSHSQLRWVLIEASWRAIQKDPALMMAFEQYCKRMRKTKAIIKIARKLLNRIRYVLKNRSEYVAAVLE

SEQ ID NO: 267734 - protein, 341 aa, unidentified
MQNVTLVGIDLGKHFFHLHGQDKAGKAVFRKKLSRKQLIEFMATFHSCTVAMEACAGAHWMARKLSEFNHVVKLISPQFVRPFVKSNKNDFVDAEAICEAASRPSMRFVTPKTESQQTLAALHRVRQALVRDRVSTTNQMHGFLLEFGVSLPVGHAVVKRLSVVLAEHQLPPRLVAILERLHAHFKYLTEQIGEIEKELDRQLAEDPIGQRLLTIPGVGPITASLLASELGDGKQYRHGRDFAAAVGLVPRQFSTGGKANLLGISKRGDKNIRYLLVQCARAFMLRLDKQSGRVADWVRTLLTRRHSSVVACALASKLARIAWAIVSCNTVFESQPSAPVL

SEQ ID NO: 267735 - protein, 355 aa, unidentified
MTSTKYIGMDVHKESISIAVRNAAGKIVMECVIETKASTILQFFDGLRGDVHVTFEEGTWAAWLYDLLKPHVTKVVVCDPRRNALLQEGNQNDRVDARKLAELLHNNQLRSFYHGDHGLRTLKELVRSYLTITQDLSWVMTRVKAIYRSWAILCTGKQVYASRHRAEWLAKISEPGVRRRAEFYYQQLDALRCLRQEVRRDLLAESKKHKAWKLLCQIPSIGPIRAAALLGILQTPHRFRTKRQLWTYGGVGIETSSSADHHLVKGQLERNKKQVEIRGLNRNYNHDLKNLFKGAAVVAATKPGPFAEFYAELLARGMRPEMARLTLARKIATIVLIVWKRGVCFDAQHLKPQTA

SEQ ID NO: 267736 - protein, 339 aa, unidentified
MNEVTVIGIDLGKHSFHLHAQDAAGRMVFRKKLSRQQLLRTLANVPCCRVVMEACAGSHWLARQLAGMGHEPRLISPQFVRPFVVGNKNDFGDAQAICEAACRPSMRFVSPRNEAQQTVSAMHRLRERLVRERTATVNQIHGFLLEFGISLPRGAALMSRLPTVLDHETLPPRLVGLVVRLRAQVHYLEEQLRQVEQDLKAALREDDKSRRLLEIPGIGPITASALAVELGDARQFANARQFAASIGLVPRQYSTGGKPTLLGISKRGDRNLRRLLVQCARAVMQHTASRTDALSLWVKTLSTRRHSNVVACALANKLARIAWAVLARDTHYKAHALTT

SEQ ID NO: 267737 - protein, 357 aa, unidentified
MEEYIALDAHKQYSWAAVERADGTLVREGRIEHTRGAIVEFLAGCTPGSPVAVETIGNWYWIVDEIEAAGMVPRLVHARKAKLMMGLINKTDKLDARGLNRLQRNGTLPTVWIPPGELRDVRDLPRARMVFSRQRTQLKNRLHATLAKYGLPGPEASDAFAPGARAELRQALGQLPENTRFAAERELSQVDALQEQVELFEARMEQACARTPAVELLDSLPGVGFILATVLALEIGEVERFATAEKLAAYAGTTPRVHASGGRVRYGPLRSDVNRYLKWAFVEAANVISRNRRHWPERHVVRLYERIRGRKGHAKAIGAVARHLAEAAYWMLKKQEVYREPQGKSGFVHAGASATVS

SEQ ID NO: 267738 - protein, 341 aa, unidentified
MKNLFIGVDFSKEKVDVAILFADGLVETAARVFNEFKTTVSGYRQLVKWVEQNSCGIDSSLWLFCGENTGDYSKGLCNFLYGKGYDMWLENAKSIKDASGLRRLTSDRADASMIAEYAMRNYDKAVMYEPLSESLTQLRELFLYRQMIVRHRCSFQVRRGEKRLTMEKSPVKTMISQSGRHIVSELNKEIEKIDKRIADLIKSDEELTKVFTIVTSVPGIGTQNAVCLMVYTDNFRRFNYDSRKIACYYGLAPFGKDSGTSVHSDPHVHYMANRQIKAMLTQAALAAVNFNPIMARYYMRLVERGKKKQVALNNVKNKLVHLVTAMVRNRQTFTPEYKISA

SEQ ID NO: 267739 - protein, 356 aa, unidentified
MVNSNKLDFTGQPIYIGLDVHKKSWSVSIHSALCEHKTFTQPPEVDILVNYLRKNFPGASYYAVYEAGYSGFWLHDQLTEKGVACTVANPADVPTKDKERRSKRDRIDCRKLARNLRAGEIKGIYVPCRKKLEDRSLVRTRQSMVRKQTRCKNQIKSLLLFYGIGLPEEWAERRWSGPFVKWLESLSMERASGEVALRMHLEELKHLRQIIARLDWEVRVLAQSGEYAVQVRLLRTIPGISTLTAMILLVELQEISRFASLDELAAFVGLIPDTHSSGEREHTGSITQRRHAQLRACLVEAAWVAVRKDPALLRAFQESCQRMRKTRAIVKIARKLLNRVRFVLKNQTPYRMGVVQ

SEQ ID NO: 267740 - protein, 365 aa, unidentified
MEITTIEIDLAKSAFAVSGADSSGRVVVRRQLRRAQVLSFMRGLPQCTIGMEASGGAQYWARQLTALGHAVRLMSPALVMPYRKGNKTDRNDADAILEAVTRPSMRFVTVKSVAQQDLLALHRVRAQLVKSRTALCNQLRGLLRERGVAVRVGVAALKRSLPAALTDESSELSGEMRELLSEMSQWLRTLEQRIASCEARITRKFKHDERCVRLAEVPGVGPLTATALVAAVGNAQRFKNGRELSAYLGLVPRQHSSGGKTVLLGITKRGDRYLRTLLIHGARSALRQCKLGDARNRWVARISAARGPNVATVAMANKNARILWALLSRGDRYRSSRVLTRAVLRPGSPPPVERARGAKLRVPKD

SEQ ID NO: 267741 - protein, 383 aa, unidentified
MRIVCGLDVHKDSVFVCILSENGDKFESKYGVLTPELEELHQLLVNHGVKEVTMESTSIYWHPIWRILEDIEELKLVNPYFIKQLPGRKSDVRDAAWIAECTMKDLIRGSFVPAPLVQRMRQYNRRIFDLNKEKVYKLTKLDAVLQRCNIRISNYVSSTDSKSYKEVVRLLSEGVTDAILLADTIHGRTVNRVGKDVIIASLTGVVSEVDIDLIRQYREEIELDDRHLQECQEKLTAICKKEFPKEFENLQTIPGVKERSATSILSEIGADMKMFITASALVSWCGLKPRNDESAGKIKSRKITHGNKYIRKTMIECAWGASRTQDCFYSQFSYIQTVVRRKNAMKVKVAVARKMLVAVWHVLNEGVPYRDYKMLQAQAGGNS

SEQ ID NO: 267742 - protein, 375 aa, unidentified
MTTIARLGVDTSKSLFQLHGVNEREEVVLRKQVRRGQFLAYLAKLAPTVVALEACGASHYWAREVRALGHEVMLLPPQHVKPYAGHNKNDKIDAEAICEAMSRRRVAERLVAVKSAEQSAAQMLLGTREGLLQRRTQLGNIIRGHAAEFGQVTPKGLAHVKPLLERIAADQSVPALARELFATLGEEFAALAPRIAQLDKKLKAFQRSNEVCRRLVEVPTIGPVIASSMVVKISDPAAFRSGRRCAAWVGLTPKDHSTAGKMRHGGITRAGDEGLRAALVSGATAYIQQVKRGRTKPSPWLAGLLKRKPEKLVAVALANKTVRIAWKLMTSGQRYDPAKAEAREGFGATQGAGSAPSPSLHPRTAAHGTTAVTAA

SEQ ID NO: 267743 - protein, 344 aa, unidentified
MPIITVGIDLAKTVFAVHGVDEAGKATLVKPKVARDHLVPLIAQLPPCLIGMEACSGAHHWARVFAEHGHTVKLMAPKLVSPYRMPGKRGKNDAADAAAICEAVTRPSMRFVPVKDEHQQATLCLHRTRQGFIEERTSTYNRLRGLLSEFGVVLPQSPERLRKDIGPCLDSLPGWARRCMSELLEHTSHIEDRLVELYRAINQIAREDDRSRRLLQLRGVGSTTASALVASIGDGHDFRNGRQVAAWLGLTPSQYSSGGKQRLGSITKAGDAYLRSLLVLGARSVMANLGNKQDPLSRWIRNLMERRGYWRAAVAIAAKNARMAWAVLHYGDTFKPEQAEPTGA

SEQ ID NO: 267744 - protein, 434 aa, unidentified
MMRGNEQEPSLKEKRRCAMKMPPPAPSSEGAVIKYVCGIDIGSQCCVGCICRPDKSVVIKSITFANAREGWQIWEEKLKQLDAPAGEILIGMEATSRYGENLYQELEQRGYVLRLFHPGQTHHFHQQRGLRAKTDRLDAMTIARALLSGEARMGYVPDEQVATYRELVRLHTQLSDTAASYQNEIQALVVVLFPEFTQVFADPCLPTALAVLKAFPSAQALVEAGVEALVQVLRAQPAAHYGRPTAKKLVALANQSVSSGRARAGRSTSLRILCDQLEHTQANLARLNTEIEQLLNTDPGVKGLQQVPEFGPKTLAVLRAELGDVQRFSRIDEVIAYGGMDIEIKESGHRIGKAKLSKHGSGLLRRVLYMSALRCIHRKESAFGAYYQRLVQRGLKKGSALMAVMRKMLAVAAHLLMHEDEEYDRSLVCGSAAG

SEQ ID NO: 267745 - protein, 444 aa, unidentified
MARWVGLDLHKRVLEVCIVNDAGAVESRHRVTVTREQLKTFAQERLHSDDRVAVEATTNTWPVVELLRPFVAEIVVSNPMRTAAIAEAKVKTDKVDAATLAQLLRAQYLPGVWQPDAATAQLRQLTGRRSALVGDATAIKNRIHSILHQRLIPNPSCKLFSQQGKEWLQTILLELEPDDRAAIQRDLHLLDEVEAGVAELEQRIFTSGGADRRLKLLITLPGVDVLCAQTLLAALGDVSRFPDGDHAASYLGLVPSTKQSAAHIYHGPITKAGRGHARWMLVEAAQHVASHPGPLGVFFRRIASKKGRNVAVVATARKLVVLAFELLRRQEPYRYALPRPTAKKLSRLRMRSGGPRLATGCAKGTYATAKLANGEPCRTVKALPTIYADEHLPSLPPPPHGELRFQRHAKLTAFVAGLAEPQVQPIRRRADKSATPMRADKAKA

SEQ ID NO: 267746 - protein, 444 aa, unidentified
MLRFVGCDVHKRTAVFTILLQDGTVFATYTVPVTREALAAFAERQLTAEDRLAMEATTNTWAVAGVLRPFVKEIVIGNPLKVRAIAEAKIKTDKVDSRVLAELLRSNYLPVVWQPDGETQRLRRLTHRRAALVSDRTRLKNRLHSILHHTLVPLPGYELFSKKGIVWLRQVPLAQEEALARESDLRLLELTELEIAELDQLLVREAWQDEKVRLVMSIPGIDYTVAQTCLAAIGEISRFPNAKKLSAYLGLNPSTRQSGPHCYHGPITKQGNAHARWLLVQAAQHLAQYRGPLGQTMRRIVKRKNRNVAVVACARKLAVLLWHVLSSGEPFRYAEPRTLQAKYSRLRVRATGQRRRGGVAKGTPRSPRYGHGRTRAVPSLPRVLAENGLPEVAPLSKGERVMLDRKRLDTFYRELQTPSHIEANTPTPQVKEPEEDFKSELTQS

SEQ ID NO: 267747 - protein, 343 aa, unidentified
MEEVSIIGVDLAKNVFQLHGAAADGSIVFRKKLSRLQFARFMADHPACEVAMEACPSAHHWARELSAYGHSVRLIAPHYVKPFIKRQKNDAADAEAIAEAATRPTMRFVEPKTEDQQARAVAFRAREQIVKQRTEAINALRAHLYEFGHVAPEGVGYIPRLAKVVDDPGSGLPDLARDICRMVLEQIDLLSSRLAAVSAKLAAASRAAAIPRQLQTMPGVGPITALAVETFAPPMDQFRRGRDFAAWLGLVPRQHSSGGKQRLGKTSKMGQRDIRRLLVTGAMAVVRWALRRGAPHNPWLERMLERKPPMVAAFALANKMARGIWAMLTRGEGYRDPVIASAA

SEQ ID NO: 267748 - protein, 351 aa, unidentified
MNDAKYIGLDVHQATISAAVLDSTGKLVFECIMETKAATILQFIHGLRGSLHVTFEEGTCAAWLHDLLKPHVTQVLVCEPRKNALLKAGNKSDRIDARKLADLLYLNKLHPVYHGETGIRALQEVARSYLAWTRDTTRVMNRLKALYRSWAIPCAGQRVYAPRYRSEWLAKISEAGVRRRAEIYYQQLDALRSLREQVRRDLLAEGRKHSAMKLLRQIPSIGPIRAVLLIALMQTPHRFRTQRQLWAYCGLALKTSTSGEYRIVEGQLKRSKKFLAIRGLNQNHNHDLKNIFKGAATRAAAVPGPFQEFHAGLVARRMKPTMARLTLARKIAAITLIVWKKGATATPLGWL

SEQ ID NO: 267749 - protein, 414 aa, unidentified
MADETHVWFAGIDWGSQKHQVCVLDAQGTIIGEQEFPHSGKGLAELSDWVLSITGTAEAVAVGIEVPHGPVVDALLDRGFAVYSINPKQLDRLRDRFSVAGAKDDRRDAYVSADCLRTDQHLFRRVQVSDPRLTELRAWSRLTEELQEERVRLSNRIHQQLWRYYPQMLELTDDVSATWFLELWTKAPTPANARSLRKSTVERLLKQYRIRRVDANTVIRTLRQTAIKVPDAVVEAAGIHMRSLIARLHVVNSELRHGERKLDELCTAIGETSPAPGQGIEWHDVAILKSLPGIGRINLATLLAEASGPLSRRDYQGLRTLSGVAPVTKRSGKSHIVVMRNAAHVRLRNTVYHWARVATQHDHKSRIRYAALRKRGHSHGRALRGVADRLLALTCILLARQTVFDPHFDQAVAS

SEQ ID NO: 267750 - protein, 318 aa, unidentified
MNVIGLDVSKDTIDATLIKTKGSKDYIKISNDTEGFENLINWIKTKRIRKIAISMEATGIYYEQAAEYLSALYTVYVINPLKIKEYAKSQFSHTKTDKADSKLIAEFVCRHLDKLTPFRPSENPILYKLVNLLQQLKEQQKETQNRLHTAKDIYIKSTHEAIIELLEEKIDQTSKRIEGMIKQKESLNIEYQNLQTIPAIGKETAVILLRHLTDKNFETANKFVAFAGLSPKIEQSGTSVNKKGRLSRYGHRQLKRALFMPALVAYRMNAFPQLVRNLEAAKKPKMIIIVALMRKLAKIAFYIHKTKKPFDKARHQTV

SEQ ID NO: 267751 - protein, 388 aa, unidentified
MEAQTVDSLPPVAADHDPVRCLLAIELSKKSWIVAITTALSDKISRYTLDGCDWKGLMELMERIRTRVAREVSRPVEMISCYEAGYDGFWLHRLLERHGVRSHVIDPASVQVDRRARRAKTDHIDAKRLLRSLMAYLRGEPKVWSVSRVPSVAEEDDRRLHRERDRLIAERGQHVNRIKGLCAIHGIYDYEPMRRDRMLRLEQLHTGDGRELPSRLKAEIARELQRLELILGMLKEIEAERDAVALTEKVSEHTNSKKIQNLVKLKAIGAEIATVLTGEVFYRPFNNRHQVASYVGLTPSPFQSGSKCRDQGISKAGNPKARSTMIELAWLWLRHQPDSPLSIWFRERVGTRKGRIRRITIVAVARKLLIVLWRYLETGMVPTGAVLN

SEQ ID NO: 267752 - protein, 309 aa, unidentified
MTIAACIVGIDVSKQWLDCFVSPAERHCRFSNDGTGHAALVALLAEQDGFCVLEATGRYDQALCSRLHEAEQPFHRANPRKARQFARAAGFLAKTDRVDAVMLARYGAVMALPAQARPEPEREQLRDLTDRRDQLVEMRKSERIRLAQPHADWLEESIHQVIAMLDRQIATLEARMEELLASARALAARKAILCSAPGVGPVTAAVLLAHLPELGQRDRRAISALAGLAPIACDSGTLRGKRCIWGGRKRVRDALYMAALAACRTAPFKAVSKDMRDRGKPAKLVIIAIARRLLVALNAAIRDNTLFRA

SEQ ID NO: 267753 - protein, 364 aa, unidentified
MKIVGCDLHARQQSIAMVDSETGELTEKRLMHEGNAVRDFYASLEGPVVVGIEASGAMQWFLELLEELGIECRVGHPAKIRAAETRKQKHDRRDAEVILDLLVMKDRFPDIWMPSTEQRDLRTLLRDRQQWVKMRARLQHTLQAIALNHALREGRALWTAAGRRALQDLALPPYSDQRRDELLALYTQLEKRIQQLDKQVESEAQQRPGARRLLTHPGVGPVTALATEVFLGDPTRFATANQVASYIGMIPCEHSSGKRQRLGKLTKEGNAPLRYLWIEATLHAVIKDAELKRFYRRKLIQKGMGKARVAAARKLGIRLWIMLRDEIDYEEFCRRGKLRQKGEAHAGMPDYNTGPARAMTGSTE

SEQ ID NO: 267754 - protein, 429 aa, unidentified
MNCTQNKKIEQVKETTMIVGIDVGSEKHYFRAFNWRGIELTRKPVAFSNSMEGFNSFYNTIVELMQKSELEEALVGIEPTGHYWFDLGQFMGEKNIKFVMVNPHHVHKTKELDDNSPSKNDRKDPRVIAGLVRDGRYFYSYMPTGAYAELRNASNRRFVLVEEQTRAKNRLQKWIAVYFPEYKGIYTHIDAKGGMLVLKKAPTPEEIVRLGVEGIIKIWKDAKLRGNGHKKAMLILAAAMRSIGLKAGLTEARMEIQDLIEDYELQTKRLERVNDLIKGLCQQVRYADKLLEIKGIGITTVAGFIAEVGDITRFDSTKELQKLAGLELVADSSGKHNGKTKISKRGRKRLRYLLFEAAISVVGKNEEFKEIHRYYTTREKNPLKKMQSLIVVACKLIRVFHAILTKGIRYDASKMLKDIRHPGEQLKAV

SEQ ID NO: 267755 - protein, 384 aa, unidentified
MEKSSTVYVGLDVHKDSIDIAVADAGRDGEVRHVGTIGGDLVALDKALRKIVSKGHRLHVVYEAGPCGFVIWRHLAAKEIACEVVAPSSIPKRASDRVKTDRRDALMLARLSRSGDLTPVRVPGAADEAVRDLVRAREDAVRECRNARHRLKALLLRNGITYVGKSSWTAAHLRWLATLKLEHAAQQIGFQEYLHAITEASARIARLEQALRDTLPEWSLKPLVQALQAMRGVQLIAAMTLVAELQDFLRFDNARQLMAYVGLVPGEHSSGPKRRQGSITKAGNSAARRMLVEIAWHYQHSPRVSATIAARQDELPKAVTDIAWKAQLRLNAKFKRLVARRVMKNKAVVAVARELSGFIWAIGREVQVSGWNGINGALSTSSNA

SEQ ID NO: 267756 - protein, 424 aa, unidentified
MKVTYQTCCGVDVHKSFLVATIVKTTGGIEPSYQKKHFSTFNNSILEFKQWLLDNDCHDVCMESTGKYWVPVFNLLEDDINVVIANPKWVKAVKGNKDDTKDSKWIGDLFRLGLVKGSYIPCKKVRILREYTRYRYKLVSCRSSEKNRYQNALTVCNVALDSVVSDIFGKSSTSIIDYLLEQSGTSINHEEIASKLLRSLKSKEDAVIESVEGYQMTDAQKYRMRLVRAHMDYITAEINDVDKMIENMISSNTDFENAVQFLCTIPGVKRDSAITIISEISTDMSQFSSSKRLCCWAGLTPGSNESAGKKKSVRITRAGVYLKPALVQCAHAAVKSDKSPYYKKKYESLVKRRGKKRAIIAIARMIRTAIYQMLSTGEQWNPSDLYKIDMPVALVEKQKAKAIKQAKKLLQREGLLPPDEPLAS

SEQ ID NO: 267757 - protein, 412 aa, unidentified
MTDETTRWFAGIDWGSERHQACLLDAAGKVVGERAFAHGGAGLAALCDWLTSTAGHPSTVAVAIEVPHGPVVDTLLERGFAVHAINPKQLDRLRDRFSVAGAKDDRRDARVAASGLRTDPHLFRPVQAGDPAVVELREWSRLAEELQQERVRLANRIRQQLWRYYPQLLALADDVTAEWILELWTLAPTPAKAARLREATLARLLKQHRIRRLDAASALDLLRQPAITVAAGVTEAAVLHLRSLVVRLRVANAEFRQAECKLEELCAGLSQAAAAEENNPRDAEILRSLPGVGTVTLATLLTEAGDPLARRDYAALRTLSGVAPVTKRSGKTCIVVMRYAAQVRLRQAVFHWARVAILHDPKSRSRYDALRGRGHSYGRALRGVADRLLGLACVLLQRQVVFNPDHGAGKAV

SEQ ID NO: 267758 - protein, 440 aa, unidentified
MSKRAYRATRVNDVNWDQLAQGKDGLDIALGVDVGKYSLWAVCRWADGRFERPWRVQNPGEIPTLLTLLKRVSAGRKLVVAMESSGTYGDALRQALADNQLEVRRVGGKAAHDYAEVFDGVPSQHDGKDAAVVAELAALGKAMPWEYQPADPWEQELAYWVEWMVAHRQMLTIWQGRLEGLLARHWPEATQVLKLSSGTLLRVLKRYGTPQALAADGEAAKLLARWGGAFLATEKIEQLLAGAGASVGVRLGEWQQRQIQNYAQQALAARQEANRAQRRLRSLAAGHAVLQAQGKVVGVPTACVLWVSTGDPRKYHAAGAYRKAMGLNLVERSSGTYQGKLRISKRGSPRTRQWLYFAVLRLVQKCGVRPWYEAKKAHDEADARRVVVAVMRKLAVALYYVGVHNEEFQPGRLFGRIRRRRDSPGEQKSRTKRRSRAEQI

SEQ ID NO: 267759 - protein, 465 aa, unidentified
MKRPQRRPGETPASGPSLLERLTPNAAGIDCGAAEHYVAVPADRDATPVRSFKTFTTDLQRLADWLLACGVTTVAMESTGVYWIPLYEILEARGLDVVLVNARHVKNVPGRKSDVVDCQWLQQLHSVGLLRGSFRPTAAIAALRAYLRHRETLVQSAASHVQRMQKALVQMNLQLAIVISDITGVTGLRIVRSIVAGQTDPRALAQHRDPRCQAAEADIIAALTGHYRPEHIFVLRQNLELFDAYQRQLAACDAAIEAHVDALVAQAPAPAGPLPGPRTRRKPRDNEPRFDIRTPLHHLTGVDLTQIDAIGPYSALRLLAEIGTDMRRWPTEKHFTSWLTLAPHNKISGGRLLSSKTLPSANRAAGILRMAAMSLGRTETALGAFYRRLAYRVGKAKAITATARKLAILVYRTLKDGLVYHDPGAAAYDAQHRTRVLRRLRQRAANLGFSLVDRETGEVLEGAVS

SEQ ID NO: 267760 - protein, 352 aa, unidentified
MVTVGIDPHKHVHVAVAIGADGRRVSRPLTIKNDATMIGVLLKWIRSIADGMPVTWAIEDGRGFARRLADGLLLAGHEVVWVPTRLMAAHRKLHAATGSKSDPVDAVAVAHAAMATSGLDRHRIDERVRELRVLVDSRGDLVRRRTMVINQTKAYTHLWLDHAPGDLTRRPGMTSLTALLETTEMSAHVRRVLAEMITEIDELNKRVRGLEATIRELVAPLAPALLEITGISHVSAAVLLAEIGDITRFTSSAKLARYTGAAPIPVYSSDKERYRLHRGGNRRLNSVLYTTSIVQQRFHPGARALLARHEPAKGARGARRILKRHLIDVIHRAMTQDRASWQHHITQHQITA

SEQ ID NO: 267761 - protein, 427 aa, unidentified
MNYTQNERIMQITEKTLIVGIDVGSETHYARAFNFRGMEFGKLLIFRNSAEGFASLREWAEQVANRNGFTDITMGMEPTGHYWFNLAEYMKKSGMRIVLVNPHHVKKSKELDDNNPKKTDRKDPKTIAMLVKDGRYMEPYMPEGTYKELRTAMDSRWRLVQELTSIKNRVRRWLSIYNPEFLDVFKDWEGKAALLILHECPTPTKILEKGVEGIIAIWKKEKIRAVGKKRAEKLVETAAKSIGSCEGLVSAEIELKMLLEDYERKMQQYEKLMVLIESLALEIPGFDKLLGIKGIGLITAAGFVAEIGDVSRFSHPKQIQKLAGLSLKENSSGKHRGKTTICKRGRKRLRYYLTFGIMPLLSKNEEFRELHHYYTMRKENPLKKMQSLVALSNKVIRVFYALLTKNVAYDPQKMLSDIKREEVLKAA

SEQ ID NO: 267762 - protein, 387 aa, unidentified
MPKAFAQPEVPAAIQINLTAIFVSLELSRSTWIVTSLSPGAGEKMSKHSVPAGDVPALLLRFDELKRKAKARTRKSFQVIAIQEAGLDGFWLHRLLKSEGVESHVVDPASIATSRRRRRAKTDRLDGEALLRALLAFKRGEPRVCAMAVPPNPEEEDRRRLSRERKTLVAERVEHVNRIKGLLFSQGIANYEPIGRDRRKRLDELTTGDGRPLPDNLKSAITRELDRLELLLDQIKTVEAKRDALLADFRTDTPPLAGKMLLDFKGVGAEIAAVLWTEGLFRHFDNRRQIASYAGLAPTPWQSGSVSHEQGVSKAGNPRLRTTLIELAWLWLRNQPTSALSLWFKARVEGGRGKKTTIVAMARKLLVALWKYVMFGVVVEGAVMKNA

SEQ ID NO: 267763 - protein, 391 aa, unidentified
MLTSVMVKGSIVDEFCSKASVASRAAKLRRREIGRVQTPEVVAERDPRRHCGTSPNSRRNRRRPTRPASSNLQDWERTMNEQIFVGIDVAKDTFFVCSSPAVINLSLPNSVSGIRQLIKTLKPHDVKLVVLEATGGYERPIVAGLLESDFRVVVASPRQVRHFAQGIGELAKTDPIDARVLARFAQIVQPKPKLPFSPETDELADLVRRRRQLTDLRVQELNRSQTVRHPKVSKSVRKMIKTLDYQIAELDELIQQHIKSDDDFRKKDEILRSTPGIGPHTSATLLSQLPELGQLNRQQIAALVGVAPYDFRSGRFAGKSRIWGGRKEIRCVLYMAALTAMRCNPAIHRFANRLLEQGKVFKVVITACMRKLLIILNTMLRNQSLWRPEKN

SEQ ID NO: 267764 - protein, 459 aa, unidentified
MGNARKGKIPAQLVEDEDYQLRHERVAGIDIAKAKADVCTRLPPSRAGGRRASRVEEVPATAREILALAGRLLADGVELAVMESTSDYWRIWFYLLEGAGLRVQLVNPRHARQLAGRPKTDRLDAQWIARLAEMGLLRPSFVPPPEIRALRDLTRSRLQLVRDRTREWQRLEKLLEGALVKLSSVVHSLARTKTARVIVEAIASGESDPGTLAGLAAGRVKGGRGAIAGALEGMQVRDHHRTLIRVHLDHIALLDRSVAAVEDEIEAALDAIPAAWGADATGETGPDAGRGPDPAALPAAQRLAEIPGVSPALARAIIAETGLDMSIFPTAAHLASWAGLAPVASQSGPRTRKPGKGHGDAYLKGYCTQAATGAAGTGTFLGERIGRLSRRLGGNRARCAVARSILVIIWHLLSDPGARFADLGPGWHDSRADRDRKIRAHVRQLQALGLNVELSEAAA

SEQ ID NO: 267765 - protein, 350 aa, unidentified
MIIIGCDYHPSFQQIAFVDTETGELQERRLQHREEAEKFYRDLAAEGMKVRVGMEASGHARWFERLLAELQVELWIGDATVIRAKRGRKPKTDRQDAQHILKLMLKDDFPKIWVPSWENRDLRQLLWHRHRMVQARTRMMNQLQAVALNEGLRYKKRLWREAGREQLEAIQLAPWASQRRRDLLELLDRLNPTIAQLTQAIDREVEKCPAARRLQTHPGVGPLTALAFVLIIGKADRFQCGKQIAAYLGLVPLEDSSGERRRLGHITKQGNSLLRFLLVEAAQVTARSLPEWRSKYCHLTMRRGRKIAKVALARKLAVRLYWMMRKEWDYERLRKFGSHAGKPGSGDGVR

SEQ ID NO: 267766 - protein, 318 aa, unidentified
MNVIGLDVSKDTIDATLITTKGSKDYIKISNNTEGFENLINWIKTKRIRKIAISMEATGIYYEQAAEYLSALYTIFVINPLKIKEYAKSQFSNTKTDKADSKLIAEFASRHLDKLTSFRPSENPILYKLINLLQQLKEQQKETQNRLHTAKDIYIKSTHEAIIELLEEKIDQTSKRIEGMIKQKESLNIEYQNLQTIPAIGKETAVILLRHLTDKNFETANKFVAFAGLSPKIEQSGTSVNKKGRLSRYGHRQLKRALFMPALVAYRMNAFPQLVSNLEAAKKPKMIIIVALMRKLAKIAFYIHKTKKPFDKARHQTV

SEQ ID NO: 267767 - protein, 375 aa, unidentified
MKNIRYVGLDVHAETIAVAVAESSGEIRDLGIIPNRPEAIRKLAARLGPVGQLRACYEAGPTGYGLYWQLTQLGITCEVIAPTLIPTKPGERVKTDRRDAAKLARCYRSGDLTPVWVPDEDHEALRDLVRQREAAIQDRHRARQRFGKFLLRHGCHKPEKMTRWTQKYMAWIKSLQFDQFGLKATLEDHMQEIDHVDRRIERLEAKMDQAIALAPAKIQEVIAGLQALRGVAKMTAATVVTELGQLSRFDSPKQLMAYCGLVPSEHSSGSSIRKGGITKTGNAHVRRVIVEASWCYQHRPWLGGYLGQRQKHLQLDPELIEIAWKAQHRLHKRYVHMTAKGKNKPQTVVAVGRELLGFIWSIATKIEQQRFAVAA

SEQ ID NO: 267768 - protein, 362 aa, unidentified
MRQRALLEVEKQSSSSSTPFVIGLDLGDKWSRYCVLDSAGVILEEDRVRSNAESLLERFGSLASTRIVIETGTHSPWVSRALEGMGHSAVVANARKLRMIYESDRKNDRLDARMLARLGRVDLELLAPVQHRRAQTQADLAVIRGRDSLVAARTQLINSCRGMVKAMGGRLPKSTTSVFASKMKDAIPPELLAALKPLLLSIRSLSEQIKACDREIRKLAAEKYPETKLLQQVQGVGPLVALTYVLTVEDPRRFPKSRAVGSYLGLRPRQSESGCSAPQLGITKAGSGHLRRLLVQSAQYMLSSLAQDSRLRRWGLELASRGGKNGKRRAVIAVARKLAVLLHKLWSSGQVYEPLYGIKQAA

SEQ ID NO: 267769 - protein, 355 aa, unidentified
MNIVNKLDFTGQHIYVGLDVHKKSWNVSIHSAHLEHKTYSQPPDPQVLGNYLRRNFPGAQYHCVYEAGFCGFWIYDRLKEQGLDCLVVNPADVPTNDKERVTKSDRVDCRKLARCLRDGQLHGIYIPSRIKIEDRNLLRIHQNLVKKQTRCKNQIKSFLHFYGKAIPDDVVCSHWSRRYIQELENIPMEGPTGIISLQTLLAELIHLRGLISKITREIIALSRTEDYRESVKCLKSIPGISTLGAMTLLTELVDIERFACFNRLASYVGFIPDVHGSGEKERQTGLTNRRNPTLRVLLIEAAWVAVRKDPAMMMAFNRLCIRMKKTRAIVPIAKKLLRRVRFVLKNRTAYQLAVV

SEQ ID NO: 267770 - protein, 343 aa, unidentified
MDKISMIGLDLAKNVFQVHGVEASGRVVLRRQLRRGAVEKFFAQLPPCTVGMEACGSAHHWARVIGRHGHQMRLMPPAYVKPYVKRNKNDGRDAEAICEAVGRPTMRFVPVKSVEQQATLAVHGTRALLVKQRTMAANALRAALSEFGIVAAQGFAGLHELMAKLEAPSEEIPEMLRGALLVLARHWQALDADERAIERQIAKAARADREARRLMEVPSVGPMIASTVLAKVPDARVFGSGRDFAAWIGLTGRDHGTGGKHRPGRISKQGDRVLRALLISGASAHLRQQKRRGISDPWLRDLLARRPYKVAMVAFAAKTARILWAMLVKGEPYYDRASASAAA

SEQ ID NO: 267771 - protein, 522 aa, unidentified
MVDDVKMYLRMTFAKSVLSNGVFNPFKNLDGKLKLRYFGQRLMITLVSFSTSRYRKLEELSSFLQKFLIFNSLKMEQKKMMISEIHSHAAGIDAGSRSHFVAVGQEKEDVREFGVYDRDLRDCALWLQSCGIETVAMESTGSYWQNLYDVLIESGFEVLLVNGAHTKHMKGRKTDVQDCQWIQYLHSVGLLTGSFLPDIDTEELRTLYRHRDFLRKQAAKYINKMQKCLRLMNFRLDIVLNDITGVSGQAIIRAIISGETDPVILAGLANSRVRKSKEEIARALSYNGRKDYMYELADCFGIYHSYIEKIDTCDREIAKLMHHQIVKLGKPQTDPPPLDKPKKRSKNSPGIPLEKLSWQRNDGVNLMSIKGVSHSTVLAIDSEVGLSIGKFPTAKQWTSWLRLSPNNRKSGGKTLSSHVPKGSNRVATALRLAAESVGKQKDAPLYPFFQRILLRKGRCAAIIATARKLAVIIWNMLCKKEAYKPYDTAKIESQIRDRQIKKINKLLHTFDIKMSEINFALC

SEQ ID NO: 267772 - protein, 432 aa, unidentified
MKYKLKQKQNQRITRITEKTLVVGADIAKKIHVARAVDFRGIELGKECVFHNDQEGLTKLAAWMKELGRIHEKTDIVFGIEPTGHYWFPLAAFLKEQDIRVVVVNPHHVNKSKELEDNSQTKSDYKDAKVIADLIRSGKYSEPNLPTKEYAELRILMNFREKVMVSLNQVKARITNWFDRYFPEYPQVFKDWEGKASLMTMRQFPTPEEIVSIGARGVLTHWKTEIKRGVGIKRAEQLYAAATVSIGLTEGLTAARIELAALLQQYDLYCKQEESIMTEVLQILEKIPGTKQMLSIPGIGILTVAGFLAEVGDLNNYDHGQQIIRLAGLNLTENSSGKRKGKTGISKRGRSRLRGILFRCMLPMVAKNKEFKALHEYYTTRSQNPLKKKQSIIALCGKLVRVLYTLGTKQKEYNANEVLGPIRQAQLQQSAA

SEQ ID NO: 267773 - protein, 422 aa, unidentified
MLAESHDEEQIIARVAALDIAKAELVCCVRVPSPAGGKRRLQEVATYSTMTQALTELANRLVEMRVQRVVMEATSSYWKPVFYLLEAHGLDPWLVNARDVKHLPGRPKTDVLDAVWLCKVAERQMLRPSFVPPWPIRRLRDLTRYRTDLVAARTAEKNRVEKLLEDACIKLSVVASDIFGVSGRAMLAALVAGERDPKVLAQLARARMRGKIDRLEQAFDGHFDDHHRFLLSRMLARIEGLDADIAAVDAQIDVQLAPFAEAAARLDEIPGIGPVAAAAIIAEIGVDMSRFPTAGHLCSWAKFAPGINSSAGKSKGSASSGHGNPYLARILGEAAVGTTKTNTFLAARYRRIARRRGQPRAVVAIGRSILVIIWHLLHDPDTRYRDLGSDHYARHVDPTAKKRSHIRQLEALGYTVTLTPAA

SEQ ID NO: 267774 - protein, 272 aa, unidentified
MDHIGIDVHKRESQICLLAEGGELIERRIRTEPERFAAVLGDRPRARIVIEASTDSEWVARCLEALGHEVIVADPNFAPMYATRTRKVKTDRRDARALADACVLGAYRRAHRLSDPQRHVRGRLLVRDALVRTRTRYISVIRALLRQQGYRVPSGSAEAFVPRVRAVALPGPLLSLIAPLFAVMRHLNRQLAYSDETIERVAAHDERVQRLRTVPSVGPVTAAAFVATIDDVQRFHHAHQLEADLGLVPREFSSGDGQHRGAITKAGPGRTR

SEQ ID NO: 267775 - protein, 371 aa, unidentified
MDTIYIGVDFHARQQTICYLKTETGELVISELKHQDKEQLRAFYQQFQGQVIIGLEASGYSPWFEAMLERLGCEVWLGDATEIRRRARWRQKSDRRDAELIWDLMVHDEFPRLHRPTVESREVLRMLRYRQKLIKFRTMSKNSLQAIALQAGLAKGGRLFTVAGQQELRNAEMSPVLQWQRDHWFELLQPLNQQLLETMVWFKAQSKGDAAITRLRTHPGIGLLTALCILHTLQPLSRFRNQRKVVAYAGFDPMVRSSAERAIYLGISKAGSRMLRYLLVEAVHTAIRYDEDLKRFYKRLAERRGRPKAKVAAARKLLIRAYIMLRDEIDYAEFQRRAVAARLARRSQGPTNVPEVLIGQPASAERQEQAH

SEQ ID NO: 267776 - protein, 419 aa, unidentified
MKPQASKAFAAFIGLDWADAKHEVCLQAAGTAQREFRSLEHSPEEINAWVQTLRTRFNGQPVAVCLELTKGPIVSALRHYDFLGLFPVNPLTVAKYREAFTPSRAKDDPTDAELQVEILLKHRDRLMPLSPQSPTMRALVQLVEHRRRLVGDKVRLTNRLTSALKNYFPHVLRWFQDKDTAIFCDFLSRWPTLKAAQLARRTTLESFFRAHHVHSADVITTRIEAIKSAVALTTDEGVITPNALLVQALVAQLRVTLQVIADFDNAIAQRAQEHPDFSLFDALPGAGAVFAPRLLAAFGEQRERYASAEELQKYAGIAPVTERSGKKTWVHWRLQCPKFLRQTFVEWAAESTRHSFWAQVYYQQQRAKGKAHQAAVRALAFKWIRILSRCWQDRTPYDDSVYLQALNRRSAPLLHNLAH

SEQ ID NO: 267777 - protein, 442 aa, unidentified
MENNYILYVGMDVSKGKADAAILKVSDRRSVKPKFLRKKLSFKFVKSEVASFLETVRSYSDVNCTSICFALEVTGIYSTNVYDYIKANLYENESIKFLNTDFLNQWRIAHNIAKSDPLDAQTISTIIGTDLDVQYVNDNVFENKNGYQDLKALVHRHYQIKKIYSQEINRLIAQCDCLFPELQYVFEPKSAAFIAVLSSYPTTHDIINASRVEVFDVVYEATKHRCSMDKVDKLFELCQDTLVPDDISSYGKSIILDLVENIKNIKGQLKSIERYIKDIASLNPAYKLLLTITGCGPITAATVIAETGNIRRFKNADCFVSYSGTSPRNKRSGTSVETMGKISKKGSRYLRHAIYMIAEFARRHNPVLKHQFERIKNGNKKRHKLANIAIANKIARYIYSIMKNKSSFVILHDHIMRLPEETRDTFFNSCLLYTSPSPRDRG

SEQ ID NO: 267778 - protein, 355 aa, unidentified
MDNTKYIGMDVHKEAIAIAVLNAAGKLVMESIIETKANTILEFLKGLRGELQLTFEEGTWAIWLYDLLKPHVKRIVVCNPRRNALLKEGSKSDRVDARKLAALLYTKMLRPVYHRENGMRALKELARSYLAISKDQARVMTRVKALYRSWGIVCSGKQVYTVRHRASWLEKIKEPGVRRRAEFYYQQLDGLRSVRRQVRHELLVESGKHKASKLLRQIPSIGPIRAALLLALVQTPHRFRTKRQLWTYSGFGIETHDSAEYRYLGGQLQHSKKPQQVRGLNRNYNHDLKNLFKSAATNAVAKSGPLQEFYLTLVKRGIRPEMARLTVARKIAAITLAIWKKGVSFDAKHLKPQTA

SEQ ID NO: 267779 - protein, 435 aa, unidentified
MKSKDKFDIILSKGYDIMRVNEKLMRISEDTIVIGIDIAKYKHYARIIDYRGNLLYKTISIDNNKSGFDKLIDTISIVKEKTGKGDVIIGCEPTGHYWFNLKSYLERKKVELVIVSTYATKNAKEFDDNNPTKSDPKDALVIARLVAEGRYSIPVERDGIFNKIYHAQSILDDINNEIVRVKNKIHRWNDIYFPEIEKIYKITSREYEEFAKLGLTPSSVNIIEEEDLIKILKEKNHYASKNKIILIKKIAENSVGCEADDYSIKEIKRLINRLIELSNEKEQLEQEMESMASEIDYVKNLVQVTGVGYRQMTTIIAECGDLNNYNHYKQVMKMAGLGLKENSSGTKKGRKHINKRGRAQLRRILKLTALSLIKNNDAFKSLHKYYTEKREKCLEKLVSVNAIIHKFVRIMMAIVKSNEKFSKDKMIEESIINYS

SEQ ID NO: 267780 - protein, 356 aa, unidentified
MNKRSKLNFSGQPIYIGLDVHKKSWSVSIYTQFGEYKTFSQPAKAETLVQYLEHHFPSAQYHSVYEAGYCGFWIHDQLTENGIHNIVANPADIPTRDKERRNKRDRVDCRKLARGLRGKQIEGIYTPPRWRLEDRSLIRTRLSMGRKQARCKNQIKSMLLFYGVDIPEPREMGHWSRRFIQWIEGIRMQRASGDMVLQSHLEELCHLRQLIAKLNRAIVALARTEQYRSWISLLKTIPGISTLTAMIVLTELHEITRFGSIDPLCSYVGLIPDTQGSGEKEHVGGVTQRHHSQLRRLLIEASWIAVRKDPVMMEAFQEYCKRMRKTKAIIKIARKLLNRIRYVLKNQAEYVTGVIQ

SEQ ID NO: 267781 - protein, 429 aa, unidentified
MRTESTPGARGPVFCGVDTHADSHWLYVLDWRGRRVLSRRFPADAAGYEALAGAIAAAGEPACVAMEGTSSYGAGLTRHLASLGMPVREALSPARTQRRRPGQGKCDESDAERAARAAMSGSKLGTPKSQDGWVDGVRCMLAARSGAVKARTSAINTARSLLTTAPEGLRSRFRGMGGPRLMEELPSVRAEGALGAALGALADLWAAARDAALDMELAIEASLEENCPALLAMYGCGPVSAAKLAVAAGDNPGRLRSEASFAAICGACPIPASSGKTVRHRLNRGGDRQANSALHEIARQRVMRDPETAEYAERARGRGKSDREVMRCLKRYVARKAYRALMRPHEIRRPEDASGLVAARRAAKVSQVRAASILGTSEKYISMLERGQRELKPIRRAYEAWVEAGLPLDWDRQAFEAERKMDSKKHLAK

SEQ ID NO: 267782 - protein, 342 aa, unidentified
MKQYVGLDVSQKETAVCVVDQDGKVLFEGKAPSDPGALARIIRKRAPYAERIGFETGAMASWLWHELKRIGLPVVCVDARHAHAALSVRMNKSDPNDARGLAELIRVGWYREVRVKSDDSQAIRSLLVARSRLVSIRRDLENQVRSLLKEVGLLFPRAIGGQFRSHVRRLVDNKHVLRSIVDGLLAVHEQVEEQQAVLDKRVRQEAKADETTRRLMSVPGVGVVTAIAFRHTIDDPTRFRSAQSVGAYLGLTPRRKQSGEQDYNGRISKWGDRLLRTYLFEAASVLLHRTQRWSALKAWGTRLMKRVGANKAKVAVARKIAVILHCIWIDGTSFEWGAQKAA

SEQ ID NO: 267783 - protein, 328 aa, unidentified
MDSSSSPSKTENWVGVDVSKETLDVHCLQSGQASQYTNDASGIQQLQAFIAEQEQPAVVCEASGGYEREMVLLLSAAGVRVSVVNPLRVREFARAMGRIAKTDPLDAHCIAYFAQVFCPEAVVLASEVEQEIKALVKRREQLVEILSGEKNRRSQLQGSMADDVDAHLDWLKNRIEQLEQRFKALAADHHEWSERQALLQSTKGIGPVISIGLLVYLPELGRLNRKEIAALVGVAPFNRDSGRYSGKRRIWGGRAEIRSLLYMATVVAIRYNPPLRAYYQHLRDRGKLKKVAIVACMRKLLTCLNAMMRDNTPWHDDRVSAFFQPTNA

SEQ ID NO: 267784 - protein, 363 aa, unidentified
MKVEKAKEPRCVGIDLGKRTYEVAIVEKGGVTISNGKTCVAGRQALYKKLRPNDKVALEAGNLAFIIAKEIEASVGCKVYVLNPSHLALIYGSMKKTDKEDSLKLAHIIEDFQEERLPVVPVPSDKEMGRRKLLACYRRAQQSRIREINKLHGLFLAQGITTMTKENLSTGNSRKEAIAVLTGIELEESKYLVACLDLHEQQIQALQGQIKKESHGDEVIERLQSVPGVGPMVAFAFVSHVGAERFENASQVSNYLGLVPRVYISGETVRYGRITKRGNGYLRALLVQAAWALTRTKQGGKLKERFEYMTVEKSTSKKKAIVAVARRMAELLYALMRDGTNYENRPFTGEKKVEELAQLAMSA

SEQ ID NO: 267785 - protein, 390 aa, unidentified
MTAYRFYVGIDWATEAHRVVVLDADRRSLHDRTVRHEGVALETFAHWLAQDVAAGVASDVAVALEVPRGAVVDTLLARGFHVFALNPKQLDRFRDRYTVAGAKDDRRDAQVLASALATDQPAFRRLEPEDPLIVELRELSRLEDDLRQELGRLTNRLREQLHRYFPQLLQLVPAANEPWLWALLERAPTPSAAQHLPRATLRTLLTRHRIRRVDAETVRTLLRTPALAVAPGTVQAARRHLAVLWPRLRLVHQQQAECATLIDGLLERLAESQEHRDVPILRSVVGVGRVVAATMLAEASRLLAARDYHGLRAQAGVAPVTRQSGRRTLVAMRHHAIHGCVTRPTIGGSPPLGMIRSVGRITRNCGPAGTAMPGPYAASSIDCCGSSSPC

SEQ ID NO: 267786 - protein, 343 aa, unidentified
MKLQALGIDLAKNVFHLVGLDSSGQVVIRKRCSRRQVLAFTANVEVQVIGMEACSGAHFLGRALREQGHDVRLMPAQYVKPYVQTNKSDYIDAEAIAEAVQRPRMRFVPIKTEEQLDLQALHRVRERWVMRRTAVVNQIRSLLLERGLTLAKGRRHLEQALPRILEDAELKLSGSFRVLLAQLQQELEQLGARIEKMDAEIQREAHENEACQRLTAIPGVGPVTATALIGAIGNASTFRRGRDLSAWMGIVPGEYSTGGKQKLLGISKRGNKYLRRLFVQGARSVLQHREKQVPALSRWLAELLGRTHQNVVIVALANKLVRMAWAVLCKNECYRAPVLPATP

SEQ ID NO: 267787 - protein, 312 aa, unidentified
MNEIICGVDVSKDWLDAHVEPGGAAQRFRNDAAGIAALGAFCRAEGAGLVVMEASGGYERLAFLLLWQAGQPCGLVNARNVRRFAEAMGALEKTDRIDAAMIARFGQARRAAPTPPPSPAQQHLRALVTRLSQVTDDLVANRQRKGAADDPEAVESLEEVIALLLAQRRHLEGEIASLIDDDPLWACLDRAFRQIKGVAERSVARLLAEVPEIGSFSNRAVSKLVGLAPLADDSGQRSGRRSIRGGRAGPRSILFIVARIVAQHDPHFAAFQHRLQTAGKAKMVIRIALARKLLVILNAKARDARNQFAAAT

SEQ ID NO: 267788 - protein, 421 aa, unidentified
MNEFAAYVGWDWADREHQVSLREVGRVGVEASCVKGTPEELHGWASKTLARYGGRQIAVAIDAGRGAVISAFLGYPHIVIYPINPKSAADLRKALYPSGKKDDPIDSEMLLEMVEKHCDRLRPLKPADVMTRELVMLTEHRRKLDNDRKREINRLRDALKSYYPQVLELFEELSTLMVFDFLDRWSSLEVLKRAHESTITAFFRQHNSRSNVQIEARLSVIRAAVRLTDDAALVRSGAIRVRSLVLVLRALVEAIASVDRDIATTYAAHPEHDLIDSFAGLGSVLGPRMAAVLGCDRERFENAEALQRMTGVAPVTMRTGGREGTISVHRRLRRSKFMHQTLVEWAHCSLPHCAWAKAYYDMKKEQNPNLRHYTIMRAIAFKWLRIIYRCWADGTLYDEKKYLTELARRGAPLAKRLAAAA

SEQ ID NO: 267789 - protein, 416 aa, unidentified
MKLFVDIDVSSECLDTCFLTDDLDVLVEESYPNDTNGASNLKSKILVLNQTYGFSHIVIGMESTSMYSFHPAMFFQLDQELQEIEARTTIEDPHKIKQYTKMFDKDKTDSIDAFMIADYLRIQRFTNSPIREEKYMALQRLTRARYQMVKQLVETKQHFLENLSYKLNTLTKELRESNGSTSVFSTTLMDLLTEDMTLDTMAEMPLEDFSALLQQKGRGRFKAPEKLAKTIKKSIRDSYRLAKVMEDSIDIILGVLVREIRSLNQAIKDYDKAIEDLLQVIPEYQCLLSVPGVGPVYAAGLLAEIGQIQRFDDQSKLAKYAGLSWKRSQSGKKESENTPLTKKGNRYFRYYLIEAANSVRRYLPEYQEFYAKKFSETPKHQHKRAIVLTARKFVRLVDTLLHNHQLYTPPRSVREK

SEQ ID NO: 267790 - protein, 347 aa, unidentified
MNSYNQQHQYYCGIDLHARKMYVCILNQKGKTMVHENINTDPDLFFQLVSPYLKDIVVGVECVFCWYWVSDLCAKHQIPFVLGHALYMKAIHGGKTKNDKIDSYKIALLLKGGNFPTAYPYPAEWRATRDLLRRRMYLMRRCGELVAHIQNTKTQYNLPGFTKRLARKYNHDGVAEKFENPEVRKSVEVDLAAIASLNQILNQLEWHIEKTAEQHDYHTLYLLRSIPGVGLILALVFLYEIQDIRRFPTVQDFSSYARLIKPVKESDGKWAGKSNGKIGNHHLKWACNEAAVLMLRESEKAKQYVAKLERKYNKGKALGIFTHKIGRAVYFILKNKEAFNMDKFFSQ

SEQ ID NO: 267791 - protein, 413 aa, unidentified
MTEENFAWFAGIDWGSERHQACLVDAQGRIVGEREFPHGGKGLADLCDWLLSMCGAADTVAVGIEVPHGPVVDTLIDRGFVVHAINPKQLDRLRDRHSVAGAKDDRRDAYVVGDGVRTDRRLFRRVHVTDPRLVELRAWSRLAEELTEERVRLSNRVHHELWRYYPQMLKIADGDVAATWVLDLWDLAPTPARAHRLRAAPVEKLLKHHHIRRIDADTVLRNLQEPAIKVGKGVAEAASVHLRSLFTRLRVVNRELRQADAKLDALCAAIGETDADSGEGLQRQDVMILRSMPGIGRINLATLLCEGSGPLSRRDYPALRTLCGAAPVTKRSGKSHIVIMRYASHARLRNVVYHWARVATQHDPKSRERYAALRRRGKSHGRALRGVADRLLGLACVLLQRQTPFDPNFAQAK

SEQ ID NO: 267792 - protein, 342 aa, unidentified
MTYYAGIDVSLEYSSVCVVDGAGKIIREQRIASEPEALIAWFRGLGFGLERIGLEAGPMSQWLYAAMRAAGLAVELLETRHVRDAFKAMPVKSDRNDARGIAQLMRLGWFRPVHCKSMAAQEVRALLTARKLVQSKLLDVQMSLRGLLRGFGLKVGPTTPSRFAGRIRDLVEGNATLEVIAAALLVVHETLRRELAGLEKRVRSIAGSDGRVRLLMSTPGVGAIVALTYVAAIDDPARFKSSKGVGAHFGLTPKKYQSGETDITGRISKIGDEGVRTARYEAGHIILTQPLKGCTALKSWAMRLAKRAGMKKAKVALARKLAVIMHRMLVDGTLFASAAVAA

SEQ ID NO: 267793 - protein, 325 aa, unidentified
MDIVGIDISKAKFDAALLHGERVRHAVFSNTEAGFQQLLAWLTKHRPDPAASLHACMEETGNWGRELADFLHAQGVRVSVVNPARIKAYGESELARNKTDKLDAGLTARFCRAHVPPAWTPPLPHLRELRELVRRCDALKAARVQELNRQKSGFASSAVACSIADHIAWLDGQIEAVTVAVRRLIAADPALARNLALLRSITGFGEISATVLLAELPNIAEFSPKALAAFTGLSPQEHSSGTSVRRPSKTSRMGSERLRSTLYMCALSAKRSNKALAAFVGRMTAAGKPPKVILVAVARKLLVYAHAVIRTQKAFDPSPDAPFCA

SEQ ID NO: 267794 - protein, 342 aa, unidentified
MGQASTIGLDIAKRVFQAHGADASGRVMFRKRLTRGKLLEFFAAQPSCTVAMEACAGAHHWARELGKLGHTVRLIPPAYVKPYVKRQKNDVADAEAICEAAQRPSMRFVPVKSEGQQASAVVFRARDLLVRQRTQCLNALRGHLSEYGYVVPQGITHAGALIEHVEDPSTSLPESARTVLAVLVATFRALEAQVAELDTEITRRAKADPVARRLMTIPGVGPIAATAITALVPAPEGFRAGRGFAAWLGLTPLQKSSGGKQKLGAVSKRGERTIRRLLILGASAVIRWAAQRRAQAESWLARMLARKPKMLVTVALANKTARIVWALLVKGGVYRAPVVAAA

SEQ ID NO: 267795 - protein, 358 aa, unidentified
MQQTIRPENAQRSTHPTLYLAFELSNQEWKLGFTVGLGQPARQRKIAAGDTTALKHELALAKQRFGLPADAPVVSCYEAGRDGFWLHRFLASEHITNLVVDSASIEVSRRGKRVKTDRLDVEKLLTMLLRYHAGETRVWSVVHVPSLAAEDHRQLHRQLLALKAEHTRYVNRIKGLLVGQGIHLHVDADFLRQLAAVRLWDGAALPAGLENRLKREYCGWQFVHRQVIDLEGERRDILRSSQEPCIAPVRQLLRLKGIGDAKRSAWLYVMEFFGWRDFQNRREIGALAGLTPTLFQSGAADAQGISKAGNTLIRAMAIEIAWGWLRYQPDSAPSQWYQERFGAGSTRLHKTCGERIGG

SEQ ID NO: 267796 - protein, 400 aa, unidentified
MRVVFGIDVSKASSEVAILVNGEKVHGYTISNDAIGFSRLLGDLRTVHKPEIIFEATGVYSRRLQTFLDDNGYAYTRLNPLETKKQLDSLRVRKTDQIDAEKLAQSQFVLNRKPTYVQEEVYQNLRDLSRFYQNLTEDIVRAKNRLHKVLQVTFPELENILSTPTGEQYWNLVITFPCKDFVLDLSKNELSKSIRQSTSKRISDKRVAYLAEKLTALANQSYCAVKKTSPILEEVHYYAKELLRLSEQRQAVLDQMVELAQPLPEYDILLSIPGIAETTATSIIGELGDIRRFQSANQINAFIGIDLRHYESGNFLAKEHITKRGNPYARKILFKCIHNIASASHTNPCHIADFYEKRKRQSQTTSTKPHTIASIHRLIRTMYYLIMHNKLYDYASTQNR

SEQ ID NO: 267797 - protein, 413 aa, unidentified
MDVVHPRCAGIDISKKDAKVGVRIQASGGKRTVSTVTTWGSMTNQVLALREHLLAEQVTCVVMEATGDYWRPFYYLLEDGLKVMLVNARDVKNVPGRKTDVSDAAWLADLGAHGLVRASFVPPEPIRVLRDLTRTRTVITRERSREIQRLEKLLEDAGVKLSSVASDITGVSGRLVLDALIAGRQDPAGLAELAKGRMRSKIPVLTEALTGHFTAHHAFMTQLFLDRIDAHTADTDTLSARIEALMEPFLPARELLESIPGFSQRVAEVFIAETGADMSVFPTAGHLASWAGTSPGSHESAGRSKSTKTRPGNRYLKGALGIAALAASRSKDTYFSAKYRRIAPRRGPMKALVAIEHVMLITAWHMLTDCTFYRDPGADYFTQRQPTKSKARAVAQLQALGYHVDLQPLAATA

SEQ ID NO: 267798 - protein, 341 aa, unidentified
MQVTTIGIDLAKNVFQVHGVDANERVAFNKPLRRSQVLPFFAKLAPCLIGMEACASAHYWARELKKLGHNVRLMPAKDVMAYVKRGKNDAIDAAAGCEAVRRPTVRTVPVKTPEQQARLMQHRVRDLLIRQRTQAINALRSHLAELGIVAAQGYEGLRVLLAIVADASDTRLPEDARASLSALVAQIASCQAEIGTIDKRLLAQHRKNVDSKRLETIPGIGVLGASAIVATVPDATIFKKGRHFAAWIGIVSREDSTGGKQRLGPISKQGDRYLRRILIVGAFAVLRRARAHPEKYPWVTQLLARKPAKVVAVAIANKTARIAWAVLTKKEIYRVQTNAAA

SEQ ID NO: 267799 - protein, 425 aa, unidentified
MAYRIAGIDVHKKKLAVVVADVEVEEEYEFEGRWYGSVPQPLQLLCEWLIEQQVDEVVMESTAQYWKPVWGALERWWKPICEKREGAGRMSGSLHLAQALSNRGRRGRKRDFRDAERLVKRLVSQELNLSFVPDTEQRLWRTLTHTRYQRTREKVRLQNQLEALLEEAHIKLSSLVSDLLGASARRMLKALAEGETDPAALATLGDRRLRATPAELHDALGACTELNPVYRRLVKMTLEELHLIEEQIGQIDEDVASLLREHQDAVQRLAEVPGLGVNSAQMIIAEVGAKAAAFASAKHLSSWVGASPGEEESAGVNRSKRSPKGNRQMRRVLNQAANAAAKHKGSIFEIVYRRLVLRLGHYKTIGAIAHRLCQLVWIILHKGVRYEERGPAVREKSKRSHCAHDPNTSNPRLSSRTLGEPGMSN

SEQ ID NO: 267800 - protein, 321 aa, unidentified
MTYVGIDVSKATFVVAYSSAKAGKTKTFKNTTKGVHEFIQTLSVTEHHCVLEATGNYSALLVYLLSKAGITVSLENPLKIKNFARVMLSVNKTDETDARLIALYGERMQPSPYKLRSKSILILKQKRTVLRQLKKQLVATRNLKGSMEVLPLFDAKCKQTIEKTITFLEKQIKGMEEELASLAEDEYKKQMDLLTSIKGIGITLAAALIVATGGFTYFDNAKQLTRYLGLSPTYQLSGTSVHVKGHINRNGDPGLRSQLYVAAFSSLRCNTECKACFDRLRSNGKPGKVAVIAVANKLIRQAFAVVTQGKPYVDGFKSAKP

SEQ ID NO: 267801 - protein, 336 aa, unidentified
MKNLPVNVGLDYSNSGVQVCVLDEQGAMLCNRKVPDHWEAIRQVADQLGPVRVAVIEACTGSADLADELIGKAGWPVEMALPSVVRRMKSGPDKTDWGDARVLADLGRVNYVPRVWLAPQPVRELRLVVRLRQQLVDERRACKLRVGALLRQQRIVPAGRRWSQRWVGGLVQLKEFSEQGRWVVTQHVRKLLWLEQQIGGVEQHLAGLARTDWMVQALMTHKGVGLVTACVMRAEIGSFTRFATGKRLSRYCALTPCNASSGLRQADAGVVKAGNALLRRTLVEAAHRLARFDPHFRQLALRLRAAGKPGGVVAVAVANRWIRRIYHDLKLKEAAA

SEQ ID NO: 267802 - protein, 376 aa, unidentified
MTAIQNPVCQMAMAIEISAAKWIVASMANSASKIRRKSLDQRDAAARFEALLVEIAAARKHLHVPEMARVLVAYEAGQEGFWLVRALRGHGIAAEVIDPVSLPVDRRARRVKTDRVDAEALTAALWRYVTGDLRALRMVRVPDEASEDSREWQRERDRLERERRACTDRIGKKLRTQGIWPLPTTWRADLRADRLRVFSGKPLPAMLSAILCIELDRLEAAEAKLNELQDKLSLLDPAAQARIDALAQLRAVGPVGARGLATLLFWRQFNNRRQVGACVGLVGTPYDSGTMRQDQGISKAGDPKLRALLVEMAWMWLRYQPGSVISTWFAQRTQGGGKRARRVMIVAVARKLAIALWRYLKHGEVPQGAQLKACAA

SEQ ID NO: 267803 - protein, 383 aa, unidentified
MSDHSEAFVAFDTSKLRNAVAIADGGRGDEVRFLGEFDNTPAATAKLVRKLAAKYERLTFCYEAGPTGYGLYRQIKSLGHECIVGAPSLIPKKAGDRVKTNRRDAISLAKLLRSGDLSAVWVPDRQHEAMRELTRARETAMNDLRAKRQQISAFLLRRGVHYPPDKKTWGKMHINWLMSQKFEFTEERIVFEELMEAMRQAQGRLDRLEAAIRAAMPDWSLCKLVIALMAMRGLDIVSAATIVAEVGDLSRFRTPRELMAYVGIVPSEDSTGDKVKRGPITKTGNRRVRRMLVECAWSYQFPPRLSKDKQVKVEAVPQAVREIAWKAQSRLNQRYRALLRRGKLKNIAITAVAREFVGFIWAVAQAVGAAAAAANTKAPAVAS

SEQ ID NO: 267804 - protein, 323 aa, unidentified
MQSPSAVLNIGADVAKDAIVVACSEGSFPVREVANQRPAVLAFLKSLPAGSRIGVESTGTYHEFFAEAAHQLGFLVFLLNPKDTHHYAKAVGLRGKTDRVDAELIARMVAHEHAKLHTWTPPTPQQREIDRLIKRRATLISLREAVEMSLHELDGFAADLKALRTRFNQLIARIDLRVKALIDANPDRKQNFARLCTISGVGPVVGTALVNTLERVPVKSADAFVAFTGLDPRPDDSGQHHGKRRLSKRGPAELRRLLYLAALSAVKTKPWRSLYEHHRAKGLSSTATLVILARRIARTAWSIYTYKSDFDPTRLANPVLRTH

SEQ ID NO: 267805 - protein, 342 aa, unidentified
MESIHYIGLDVHKKTIAYCIKTVSGQAVRQGVVSAERKALGRWLNELPGPWMGAMEATLFTGWIYDFLKPHAVELKVAHPEMLKAITAAKKKNDRADAEKLADLLRVNLLPECIMMPSELRELRRILRYRNLVVRTAVKMKNKISGLLMEVGATYDKRRLYGRKYFNELLERVEDVPDSVKELLQLSRGNLELFTAIQKKLIKTLREQPLIRERVERLMSISGVGEIMALTWVLEIGDVSRFGSSRAAISYCGLCSAQRESAGKEQRGPISKKRNKHLQTMLIEAAKIAPHWNPQLAALHEKELGKGNRNRATLAVARKMVEYLVAVDRRGTPFEEVAPKVA

SEQ ID NO: 267806 - protein, 453 aa, unidentified
MRPTRPARKPARQRTAAIRPDAAGIDIGARRIHVAVAAERDSRPVREFQTFTQDLYALADWLEACGVRTVAMESTGVFWIPLFQILEARGLEVCLVNARHVKHVPGRKTDIADCQWLQYLHAVGLLTASFRPAQSICGLRSLLRHRESLIQSAAAHVQRMQKALDQMNLQLHHVISDITGVTGLAIIDAILSGERDPTTLAALRNWRVHASAETITKALVGDYRSEHVFTLRQSLGAYRYYQQLVADCDVEIERHLTALPDADAGVVSPPPSVARRKPRGNEPRFDLRAHLHRIFGVDLTTIPGIDVLTAHTLLTEVGPDLSKFPTPEAFASWLGLCPDNRISGGKVLSVKTRRVKNRAALALRMSAQAVQGSRAALGGYYRRMRAKLGGPKAITATAHKLARVVYHLIATGQSYDESVFLKYEASHRDRVQKRLHAQAAALGFTLVRETVVP

SEQ ID NO: 267807 - protein, 341 aa, unidentified
MSEVSIIGLDIAKSVFQVHGADASGRAVLRKKVSRAKLLPFFASQPSCQVVLEACGGAHHWARELTKLGHEVRLIAPAYVKPFVKRQKNDAADAEAICEAAQRPSMRFVPVKTEAQQAAALVFRARDLLVKQRTQISNAVRGHMTEHGWIAPQGLAHMKKLAALLEDPSAVPESARPVLEIMLDQMAVLSERIAELDREIARRAREDETARRLMTIPGIGPITATAITALAPPPGTFAKGRDFAAWVGLTPRQHSTGGKQRLGAISKMGERTLRRLLIIGSSAVVLQASRRGAPAGSWLEQMMARKPRMLVTVALANKTARIVWAVLTKNEDYRAPVSVAA

SEQ ID NO: 267808 - protein, 381 aa, unidentified
MTTPATCNVPESTTAGTLFVAFELSEKTWKLGFTTGHGQKPRERTVTARHQERVLEEIAHAKRRLGLPDTAPVVSCYEAGREGFWLHRFLQGHGITNHVVDSSSIEVNRRRRRAKSDGLDVRKLLSMLMRYAQGERQVWQVVKVPSVEAEDQRHLHRDLETLKQERASTTTRIQGLLSSQGIRVTSLSNLPEQLEALRLWDGSPIPPDLRRRVLRVYAHHTFLSEQIAAVEAERRAQLQASTDANIEKVRQLMQLKGIGINGAWLLVMEFFGWRAFKNRREVGGLAGFTPTPYQSGESAREQGITKSGNRHVRWMTTELAWSWLRFQPDSALSVWFRERFGGGGKRLRRIGIVAVARKLLIALWRFLETGVLPEGAVLKEG

SEQ ID NO: 267809 - protein, 370 aa, unidentified
MGKSALYVGLDVHKMSVDVAVAEPGPGAEVRFYGRIGGDLEALDKVTRKLQAKGAELRFAYEAGPCGYQVYRHLTAQGHSCLVAAPALIPRRPGDRLKNDRRDALALARLLRAGELTPIKVPDEDDEAMRDLTRAREDAICVERRARQRTVAFLLRHGRVYPGKTTWGRGHWGWLLEQVMDHPAQQIVLQEYLDAVREASARVLRLTGQIRDLVPQWHQAPFVAAYQALRGVSFIVAATVVAEVGDLDRFNNPKELMAYLGLVPSEHSSGASVRRGRITKTGNSHARRVLVEAAWAYRLRARVSRTLLKRQEGLPERVRQLAWKAQLRLCTRYRRLLARGKARQTIVIALARELAAFLWAIGRAVAPATA

SEQ ID NO: 267810 - protein, 402 aa, unidentified
MNAVGIDVSKGKSMVAIMRPFGEIVSTPFEIKHTSSDINSLVKLIKSIEGESRIVMEHTGRYYEVLAHQLSEANLFVSAINPKLIKDFDNDSLRKVKTDKADSVKIARYALDKWQNLKQYSVMDELRNQLKTMNRQFGFYMKHKTAMKNTLIGILDQTSPGVNTYFDSPARSDGSQKWVDFASTYWHVDCVRKMSINAFIDHYENWCKRKKYNFSKSKAEEIYGKAKELVPVLPKDDITKLIIKQAVDQLNSASITVESLRTLMNETASKLPEYPVVMAMKGVGTSLGPQLMAEIGDVSRFTHKGAITAFAGVDPGVNESGSYEQKSVPTSKRGSSDLRKTLFQVMDVLIKTHPQDDPVYQFLDKKRAQKKPYYVYMTAGANKFLRIYYGRVKEYLASLPES

SEQ ID NO: 267811 - protein, 369 aa, unidentified
MEQITRVAARGDAVRVGVDLAKRVIQVHAVDGAGQVLTTRALARDKFIAWGAQLPAGCIVAMETSSSSHHWARKLIALGLDARIIAAQLVSPYRKQGASGKNDANDAAAICEAASRPRMHFVPVKTIEQQSMLCVHRLREGLKADRVACINRIRGLLAEFGLVFAQGPAALEAVLTDTLEDASHEMNTLARLVVQQAQAQWRQLDAHIAWCDARIAAHAKDNAEVNKATTLMGIGPVTASATVATVGDFKQFRHAAQFGAWIGLVPRQHSSGGKNNLGGITKRGDNYLRSLLIQGAKSAVMTAHKRSDPISLWVTALRERAGWQKAAVALANKNARILWAVMTKGEAFDPRHVSVKPGASATTAAATAA

SEQ ID NO: 267812 - protein, 394 aa, unidentified
MKLVGIDVGKNSHHFCVMDKETGEFNVTPSSFSNSKEGFDFLINSLKPYSKKSILLGMEDTGHYHVALLKFLLSNGYTVALINPKTTDLTRKMEGGITKNDKLDTITICDVLDTPERKKQYRITKVDRFDLYEQRQLTRHHHNLKEELNIYCNRLQKSIDLVFPEFNTLFGSKYGVVYMNLLKTFGSAEAIASTDIRTIRKCFEIKGRGGRISLTAEKLKECAKNSIGISSEVETIQIKHLVSQIMLIKEQIAEIDKKIEEFSIKNNSPILSIPGISHFSGTSILAELGDIGNYSKPSRIIKFAGVAPYHYESSQYNAQHTAITKKGSKYLRKTLYQVILPVINNNPVFKKYYRLKISQGKGHRCAQGHCIRKLLRVIYHLLETGQSFDPALLR

SEQ ID NO: 267813 - protein, 318 aa, unidentified
MENISQWVGIDISKATLDVYLRPLGKAMKVANTKEDRSKLVETLKSYTVNLIVLEATGGLETELVIQLQEADLPVALINPRQGRDFAKATGKLAKTDAIDAQILAHFGEAMQPQILAVESEESRQLGDLISRRRQLVEMRTAEKNRRERARGKALVDIEAHLEYLDNCLEKLNQEIEELTQANQQWLEKVNLLKTVPGIGQVISTTLVSDLPELGQLTAKQISRLVGVAPINHDSGQHKGKRMIQGGRAQIRATLYMGAVVAMRHNPVIKTFYERLVGRGKSKKLALTACVRKILVILNAMVRQNQPWQLADNLPPCS

SEQ ID NO: 267814 - protein, 403 aa, unidentified
MNNVAGIDVSKGKSMVSVLRPFGEVVAKPFSVGHTGSELKELADYLKSLDGETRVVMEHTGRYYEPVARFLHDEGVFVSAVNPKLIKDYGNNTLRKVKTDKADSRKIARYGIDNWAELRQHTPMDTIRMQLKTLNRQQSLYTKTKTMMKNNLIALLDQTYPGVNALFDSPVREDGSQKWVDFATTFWHVDCVRNMSLTAFAERYRKWCKRHGYNFSQSKAVEVHAGAQDLIAMLPKDALTKTMVRQAIDALNAVSASLERLKAEMQALAAQLPEYPVVMAMHGVGDSLGPQLMAELGDVTRFTHRNAITAFAGVDPGADQSGTHEAKSTRVSKSGAPELRRALFLVMDCLLKTQPQDDPVYRFMDKKRAEGKPYLVYMTAGANKFLRIYYGRVKEYLASLEGN

SEQ ID NO: 267815 - protein, 338 aa, unidentified
MIAVGVDTHKDQHHAVALDGLGQVLGEIAIETTFAGYSQFVCWLRDLGESVLVGIEGAGSWGAGLCEFLQAEEIEVFEVERPQRRERRGGKSDRIDALMAAKKVLTREGLSTPRGSGKRLALQMLLAGYRSIVSERSRLYNQLQALQVSAPYALRERIGQARNGATLANRLTGMRTRPTASQQENLTLQVLRDIANRARALDAEAENYTRQIEQMVSSLAPALLQEPGVGPICAGRLIAFNPSRFTSEAAFARANGTAPQPASSGKTVRHRLSRGGDRQVNAAIYTIALSRSVHHPPSRAYIQRKITEGKTKREAMRSLKRHLSRHLYNQLAKTPLTT

SEQ ID NO: 267816 - protein, 346 aa, unidentified
MLYAGLDLSRKRLDFHLLDGEGGTVEVGASPPDADGLRGLTHRLERHGAPIRAAIESMNGARFVHDRLELDGWQVEIADAQKVKGLAPLACKTDRIDAWVLAELARRDLVPAIWLPDPLVRAERERARWRLHLVRHRSSLKQRVHAVLLTHGKPCPVSDLFGVRGRRLLANLGLPEPWQGTIEASLRLIDELDREIDACERELRRLGADHRYVPLLCTVPGISWVLAYTIAAEIGDIHRFPTPRKLAGYSGLCPRVYQSGERDLRGPLSKQGPRYLRWALVEAATHACTSATYRDRYQQTKARIGKQRGAKVAQIDLARRLAEAIWHMLSRDQPFAPKGATDPLAA

SEQ ID NO: 267817 - protein, 319 aa, unidentified
MTPQDTGVSVGIDVSKKHLDVALEPQKGEFRAANTEADIPRLMKRLQKLNPRLILLEATGGYEFLLVAALREAQFPVCFINPLRVRNFARSLGILAKTDTLDARVLARYAHTLRPEPRPLPEAQQQELKQLMTRRRQVLKMIQMEKNRLDTAPILSIRRSISQVLDTLQAQLQDLDRGLRDFVRQDPGWVEKDQIMQTVPGVGPVTSCAALAWLPELGDVNRQEVAALVGTAPFNRDSGALRGTRCIQGGRHQMRQALYMATLAALRWNPVIRNFYQRLLRAGKAKKLAITACMRKLLCILNAMIKNRQPWNPQMALST

SEQ ID NO: 267818 - protein, 341 aa, unidentified
MSDYSYFCGIDLAKNHFSLHAVDKNGKVILHKSVTRSKLLTTIANMPPMRIGVEACGGAHYWARTLNKLGHDARIMAVKYVIPYRTKGKNDLNDAVAICEAVQRPSTRFVPVKSPEQQAILSVHRMREHWVRERTALMNRMRALLSEFGLIIPVGRSSLMKQVPLMLEDAENELPHLARAVIADAYHHLGELNQRIADTEQVFDSFAKASTNVQRVMKVRGIGPQTATAILASIGNGSQFDKSRDFSAWLGLVPKQYSTGGKPRLGRITKHGDKYLRTLLVHGARTVIANLGDKQDKLSQWCRGVLERRGMNRAIVALAAKNARIIWSLLHNQTEYENYAS

SEQ ID NO: 267819 - protein, 422 aa, unidentified
MLAKTQDNEEIIERVAALDIGKAELMCCVRVPDEDRPGRRLQEVESYSTMTRPLLSLADRLACLGVTRVVMEATSDYWKPVFYLLEAAGFETWLVNAKDVKHLPGRPKTDKLDCIWLCKVAERQMIRPSFVPPPPIRRLRDLTRYRAGLVAARTAEKNRVEKLLEDAQIKLSVVVSDIFGASGRDMLAALVAGERNPKVLAQLARHTMRKKITVLEEAFTGYFTDHHAFLLGRMLGRVDAITADIAALDTRIEQQIAPFAAAVRQIDEVTGISLAAAHAVIAEIGLDMARFPTAGHLVSWAKYAPGVKESAGKKKGNNSTGHGNPYLARILGNAAAAAGRTDTFLGERYRRIARRRGAKKANVAIGRSILVIIWHLLSDPDARFHDLGPGHYASRIDPDRRRHNHVRQLEALGYTVTLERTA

SEQ ID NO: 267820 - protein, 276 aa, unidentified
MRTVAEEYDRVVGVDTHTMTLLTATGGVVEHLTFPSSAAGLHRALAWIRDRTQTRTCLVVVEGTGSYGAQLTEHFTQGGILVAEAPTVPAARRRGKDDVLDSARIARAVLGLRLDQLCWPRAGGTRTAIRVLVSARDQMSTERTKIINSLTALVRGVDLGVEARKALTSAQITTIAGWRTRDEDPATAACRREAIRLASRIRTLGRYLSANMAELRRFTAAEVPELLNLPGVGPVVAGTILLAWSHPGRVRSEAAFAALAGTSPIPASSGHTIRIG

SEQ ID NO: 267821 - protein, 437 aa, unidentified
MEKQPIWLAGVDWASAAHLVCLLDADGNKMGERTFAHDGAGLAAMADWLVATSGGQPDAIFVAIEVTHGPVVETLLERGFKVYGINPKQLDRFRDRFTLAGAKDDSRDAEVLADALRTDRHRLRSLTLGDPLVIELREWSRLAEDLTAERNRLTNRLREQLWRYYPAILELTDDFGAEWFLELWETAPTPDKARRVRATTIAKILKRHRIRRCDAAHVLDRLRQRPITVADGTIVAATAHIHTLVARLRLINRQLKDAYNQLDRLLERLAAAQGDAPGQSGGQLDDVTIIMSSPGIGRINAAKLLAEGYDPLQRRDYQALRCLCGVAPVTKRSGKSKHVVRRYACHPRLREVAYHWARVAVQHDEPSRAKYRALRDRGHSHARALRSVADRLLAVLCAMLENRTLFNPSLPSRHAPSEVVSTGAERRGCGREALKIA

SEQ ID NO: 267822 - protein, 387 aa, unidentified
MIYLGVDIAKLNHVASASNSDGEVLFHNLCFTNDHKGFQKLLDSISSFNKDELLIGLESTAHYGENLICFLFLRHYNICIINPIQTAALRKTNIRKTKTDAVDTLLIIKALIMNKYRIFSQQDLDTMKLKNLCRFRQKLIKARTKVKIQLGTYVDLLFPELQYFFKSGIHGKAVYALLKETANPDKIANMHLTRLYNLLNKTSKGHFKRSHAVHLKELAAQSVGTKNDTLSLQIRQSIIQIELYTQQLQEVEESIHTIMDEIDSVIKTIPGIGALNGAMILGEIGDIRRFEKPCQLLAYAGLDPSVYQSGNFQAARTRMSKRGSKLLRYALINAAWQTTLVNQTFQDYFDLKMSQGRRHYNALGHVAHKLVRVIHKMMTDDVEFNLA

SEQ ID NO: 267823 - protein, 417 aa, unidentified
MSMNPSASSQEEAPLKYICGIDVGSQSCAGCVYRLDKSLVVKPLAFANAKEGWNVLLDKLTQLDALPKQILIGMEATARYSENLYHALEQRGYRLCLLHPGQTHQFHERQGLRAKTDRLDAITIARVLLSGEARAGYIPDEQVATYRELVRLHSQLSEQVARYQNQIHALVVVLFPEFTQVFADPCLPSALSVLKVYPSAQAMAQAEEAALYALLRMHKHAHYGHPTAKKLLSLASTSVSSQRAEAGRSLSLRILCGQLEQTQKYLEELQVELEQLIANDPATKSLQQIPEFGTQTVAVLRAELGDVDRFARTDQAIAYAGLDVQIKESGLWKGKAKLSKRGSGLLRQMLYLAALRSLHLQGSAFGAYYQRLVARGLKKGSALMAVMRKMLAVTVHLLKHVQEDYDRSLVAVGNLAG

SEQ ID NO: 267824 - protein, 370 aa, unidentified
MLDTTTFVGLDVHARSIKAVSLDVMTGEVRAATFGYDAGAVAEWVRSVDPGARCVYESGVTGFDLQKRLSGLGVDCVVGAVSKMIKPSADRRRKNDRNDAEFLARMLSVGNVVEVWVPDDECEAARDLTRALEDARDDLSRSKQRLSKFLLRHGLVFDERTPTGRRKGNWTRAHWSWIESIRFAEGADNDALAYYVDAVRRAAEEKARLEGLVEAEARKPRWRKRVDSLRCLKGVDTASAADLVFEAGEFSRFRNARSFAAWVGLTPSEHSSGESDRRGAITKAGNKHLRKTLVEAAWHYLTCSGRPKDLAKGQAPDRGARRHAAKGVRRPVERREALLARGVHGNKANVATARELACWVWAVGLMAEEA

SEQ ID NO: 267825 - protein, 309 aa, unidentified
MKEELVYLGVDIAKAYLDTAIGNEKSRFSNDALGHRQLINWIKQMPAKVQVICEPSGGYERALVRALVGVQLKISLVPANRVRQFARAKGILAKTDRIDAKLLCAFGEAMQPGTISASQLEQQHLRELESQRRHLTHLLVMEQNRAARMSDLCVCKMNRRLITQIKKQIEQLERLIQGQIKASPELSTKAEKLTAISGVGARTAALLLAQMPELGQLNRRQVAVLVGVAPFNRDSGRMRGKRAIYGGRRPVRHGLYMAALVAARHNPVLRQFYLRLRAAGKPAKLALTATMRKLLIVLNSALKPDLSYA

SEQ ID NO: 267826 - protein, 479 aa, unidentified
MAKREQSTYERLNNKNLNRKERRELQRRISSDDPGMEILHPDAAGIDIGNESHFVSVPPGRDPEPVREFGSWTADLQQMAAWLKSCGVKTVAMQSTGVYWLAAHDVLEKHGFEVFVVNARNTKNLPGRKTDVQESQWLRKLHTYGLLRNSFIPPEEIRAVRTIWRVRDRLVKDASRYVQHMQKALTTMNVQIANVISDIIGVTGQAIIRTILEGERDIYALADLRDPHVKASREEIARSLEGTWREDVLFELKQAVDAYDFVQKQLGECDKKLEKYMAALPTRTVPESAAEAAEDGGKKKSKKKRGRNNLPKFDLHAELNRVNGVDLTTIDGIDVMTAQTILSEIGVDMSRWTDEQHFVSWAGLTPRQDVSGGKVIRTRTKQVSNRVGNALRMAANSLFRSESYLGARFRKLRARRGAPKAIKGMARYLGCLVYRTIKYGQAWVDRGVKMFEEKNRQRELDQLQRKAAALGLQLSPLAA

SEQ ID NO: 267827 - protein, 374 aa, unidentified
MRMMQHRRVRYIGLDVHKATIAVAIADEEGSPSSYGTIANDPDAVRKLTTQLGGKGVALRVAYEAGPTGYALHRQLTKMGIECIVVAPSLIPIRPGDKIKTDRRDALKLARLLRSGDLTAIWVPDRQHEALRNLVRARADAKVDELRAKHRLSKFLLRLGVHPAVGMRNWSQRYFQWLRQVEFEHLADRIVFADYLAEVTAAGERIKRLEAALRQCAESSHQVALIRALQAFRGIGFLSAVTIVAEVGSLRRFRTAPQLMAYAGSVPSETSSGSKQHRGAITKSGNSLLRHVLGEAAHHARHAPRVGNLLQQRQRDVPREVIELAWRAQVRLHHRYRHLSARIGVHKTLTAVGRELAGFVWALGQLLEELPAAA

SEQ ID NO: 267828 - protein, 396 aa, unidentified
MSANDSVICAFCRQTTKSFAQEKIYHDETSINRANALLQKAERLFFSKPVIVMESTSHYHLILFQFFSEHGYDVIVVNPLQSNSMKDFSIRKRKTDRVDAFKLAMMYRTKTLRPSQIPQTATRALRQLCRHRAELLNDVSSYKNRLTALLDQTFSGYDKVFSDVGGVTSCAVLVRFPTPTILLVEEESELVEVIAAASKSGYSFAKKKAGLLISAAQKAQTLGIHSCADETLIVCTIQMLRTLSESVLQIETAIDNLLAQIKEMRNNVSLLQSIPGIGSHSAALLLGEIGDISLFKKPKQLAAYFGLDPTERQSGSFRGTKNKLSKRGSSYARAALHMGIVNSICKRGKDSAANPVLLSYYEKKCKNKPAKVAQAASMHKLVFIIFAVLRDQKPSN

SEQ ID NO: 267829 - protein, 345 aa, unidentified
MNTRKVMQNPSKGKSPCSDGYDHFVAVDWSLRVMAIAHMTRRSKQPKVFERPSDIRQLKEYLDAMQGRKVVAIEETTTAQWLYLELVDHVDKIIVCDPYRNRLLAEGPKTDKIDAGKLCLLLRAGLLKAVFHSASDLYELRRLVSAYDDLVKAGVRAQNQQTALVQGHSDTGKSAPFILEHLTNSIELYRSSKEHYEEKFWELSRHNKHLRNLLDVTGIGIIGAVKIVAIVVDARRFPRSGHYLSYCGLVEHEQISGGRSYGRRRPRFNHTLKTVYKLAAMSVINSKNNALRAYYEYLLANGVAEHNARHALARYIARITYGMLKTGKRYRPFQQRSHITARQVA

SEQ ID NO: 267830 - protein, 338 aa, unidentified
MALYCGIDLHSRDCWLAILDDGLKVVREAKIGNDLGAILEALEPYREDLEGIAVESTFNWYWLVDGLEEAGYQMHLVNTWAVKQWEGLKYSDDRHDARWLAHLLALGILPEGYIYPKQERSVRDLLRRRAFMVRKRTSFLLAMRGAFECRTGLRTTSSEVRQWTAEEIESYLDDPAEALGITCLLEPMRSLDGQIRIIEKGALTRARLRDEFAPLLTVWGIGKILALTTMYEVGEIARFKKVGNFASYCRLVKSARLSAGKRKGSGNRRNGNPYLSWAFSEAAHFAVRYHPPAKKYFQRKRSKTNGIIAIRALAHKLARASYYVMKDQVDFDSERVFG

SEQ ID NO: 267831 - protein, 346 aa, unidentified
MNITTIGIDLAKSCIQVHCVDVHGKRLLNKKLKREQVVPFFSNRPACLIGMEACGSAHFWANKLQALGHTVKLMAPQFVKPYVKTDKNDAADAEAICEAVSRLNMRFVPIKNSEQLAVLAMHRARQGFVKARTAQANQLRGLLAEHGIIIPKGIRHINQHLPDILEAGDNGLPGRFRQLLDSLSAHFKELDKQVRELDVQLQSWHQDSPANQKLTKIPGIGPLTASALVATIGDAKQFQNCRQLAAWLGLVPRQHSSGGKPTLLGISKRGDTYLRTLLIHGARTVLRVVKSKAQHAGSWLEGVMARRNHNVAAVAQANKTARIVWALLANDRECDAQYGTGTILAA

SEQ ID NO: 267832 - protein, 343 aa, unidentified
MSIVILGVDLGKNACSVVGVDAAGAVVVRRSMRRQTLVDYVAKLPVCVVAMEACCGAHYLGRLFAAHGHEIRLMSPEYVRPYVKAQKNDDRDAEGIAEAASRPTMRFVELKTQEQLDIQTLHRVRSRLVAERRSLTNQLRAILLERGTIFTVGRRKLELGIDALLADEDTTLSPRLRQLVAELRAEWRELDTRVEALNGEFVELARNDAAARRLTSIPGVGVLNATALIAAVGDASSFAKARDLGAWLGLVPRQHTTGGKPRLLGISKRGNTYLRTLLIHGARAALPSLARSETPLGRWLTGMIERGVHRNAIVVALANKLARIAWAALRKDATFERGYQVAA

SEQ ID NO: 267833 - protein, 362 aa, unidentified
MSHYKIGCDAHRRYSQFAILDHEGRFLQQVRVNHMPGSIRDFLEDYPPGTPVALESVGNWYWIVDEIEAAGCIPLMAHAAKAKVMMGNVNKTDKLDARGLATLLHLGSLPTVWLPPSEIRDERELHRTRMAISKIRTALKNRIHSTLAKYAQSLDTDSDIFAPKWRPELTKACNTLPPETQRCMQQHLIALDHVQGQIKELEERIKQRVEITPNIQLLKTLPGVANILAIVIEREMGTVDRFPSSAHFASYAGTVPTVKSSGGKTRYGRLRKQSNQYLKWAFIEAANVVVRQRRHPNWRIKHVTILYERIRQRKGHSVAVGAVARHLSEAAFWMLRKQEPYKDPARKVVTRGKGQREPNMVR

SEQ ID NO: 267834 - protein, 367 aa, unidentified
MEKGITFVGMDAHKVAIKQAVLLPEQTKPIEWQLANEKAAVRRMVRKVQRLAPGNEVRFCYEAGPCGYALQRWIQEAGAVCVVIAPSLIPRKPGDRIKTDRRDARKLAELYRAGLLTEVHPPTPEDEAVRDLCRAREDAHEDLVRCRHRLSKMLLRRGWIWNGSKRAWSQGHRLWLRSLRFEQQADQVVLDDYLLAIEHVEQRLRCLEQHIEAASQLPAYAEAVGALRCFRGIDTLTAMGLVAELHDFMRFDSARGLMAFLGLVPSEFSSAESERRGAITKAGNRHARRLLIEAAWHYRHHPNASSLKRRRQGQPPEVVALADKAMHRLHRRFNRLLAKGKPRPKAVVAVARELAGFVWAALHSKAA

SEQ ID NO: 267835 - protein, 360 aa, unidentified
MSDIVRVGVDLAKNVLHVHAVDAAGKVIATRALPRGKFAEWCSQLPANCLVAMEACSGAHFWSRKLIAMGLDARIIPSQLVTPYRVQGRGGKNDANDAAAICEAASRPHMHFVPTKTVAQQGMLCVHRLRESLKEERTACINQIRGLLSEFGVVLPQSAKVLRERLIEVIEDATNEIASMARLVVQRAADRWRELDEHITWCDQRIAAHNKDDQQVRRAAQVKGIGPITASALVATVGDFKQFRNAAQFGAWLGLTPKQNSSGGKTCLGGITKRGDMYLRSLLIQGARSAVLSADKRDDPISRWVQRLCDRSGWQKAAVALANKNARILWAMLTREQRFNCHHVSVKPSGQQCAPDGLAS

SEQ ID NO: 267836 - protein, 403 aa, unidentified
MERYAGIDLASEEHRFSIVDGEGGQLEQRRIGHDEQGIAALCRRLRALSVGRVALERPDGLVVERLLDAGLTVVAVHPNQLAAARDRYRVAGGKSDGFDSYVLAELCRTDMHRLRALEPDGDETKALRALTRTREDLVQARVALANQLRAQLEAFWPGARRVFSELDSPIALAFLERYPSPVDARGLGEKRLQGFLARQGYCGRKSAAELLARLRAAPEGRAGELELEARRAAVLGLVAALKPLVEQIKLLTSQIAGALRDHDDGAIFLSLFRDPKSVVTAAELLAEIGDCRNRYPSAEALAADAGMAPVAVESGKRKVACFRWACDKRLRNAVACLADSSRHRHPWAHSVYQSALARGHDHPHAIRVLGRAWLRVIWRIWQDQSPYDPARHGNLQRLLAAGG

SEQ ID NO: 267837 - protein, 351 aa, unidentified
MPATAQTAVAVIGIDIGKNSFHIVGLDSRGAIVLRQKWSRGQVEARLANMSPCLIGMEACVGAHHLSRKLKALGHDARLMPAKYVRPYSKGQKNDFRDAEAIAEAVQRPTMKFVATKTAEQLDLQALHRVRERLVSQRTGVVNQIRAFLLERGVAVRQGLRFLRAELPRLLATPPDVLSPRMVRVIEGLAEDWHRLDERIDHLSDEITALARQDAGCERLVSVPGIGPIISSAMVAAIGNGDAFSKGRDFAAWLGLVPKQISTGDRTILGKISKRGNRYLRVLFVQAAWVVLIKPQSWERHGLKPWIEAAKKRLHRNVLAIALANKLARIAWSVLASGRSFEARPAMASAA

SEQ ID NO: 267838 - protein, 309 aa, unidentified
MLTAEADKCKTKVVVNTAAGVQALLAWCAKHGAQPAQLHAILEPTGLYHEQAATALPQVRVSLVNPAQARDFAKALALRSKNDALDSYVLARYGQTLSPALWHPAPLHARQLRALLTRREALSKDLLRELNRKEKSQFSPSAPLVDGSIDKAIAFLREQIKQIERAIDQHIDNHPDLKQDCELLNSIPAIGPQAGNAILAVMHNRHIDSAQSLAAYLGVVPVQRQSGSSLNSCARLSKAGPSQVRATLYMAALVGPRHNPHIRALYQRLLKAGKSKKAALGAAMRKLVHLCFGVLKNRIPYQPNYAIDA

SEQ ID NO: 267839 - protein, 381 aa, unidentified
MKTNSDTTRTLYIGLDVHKEQTVIAILESGRDEEPRAYGSITTAQHALERAMRRIAKAQNRRLSDLHVCYEASGCGFWIARRLLQMGVRCEVIAPSLIPTRSGDRIKTDKRDAAKLAKNLRSNDLVAVHIPDSVDEAIRDLCRARTDAVDDLRRARTRLLALLRRLGYHYDGKTHWTQSHQNYLRGLKLPDAAHNRVLEDCITTIDFHVARVARLEDEMLQLLANWQRGPLVEALMAFKGFQLVAAMVTVSEIGTFSRFEHPKKLMAFLGLVPSENSSGKSRKQGGISKCGNPHARWLFVEQATHYRVPPKVSPQLSERQRNTPRWIKELSWKAQTRLSHRFSMLRKRGMHHNKIKAAIARELTGFVWELGTRFESQATQS

SEQ ID NO: 267840 - protein, 337 aa, unidentified
MDYFAGLDISMDETHICVVDREGMVIHESKAASTAQAIADELAKAPSCRRIVFETGRMAPILFHGLSQLGLPVVCVESRQAHQALKSLATHKTDRNDARGLAHLARTGFFKPVHVKSLSAHALRSLIIARKKLVGQRVTLENQIRGLAIVFGIRLPRALTAAFIDQALKTSEGVAGLSAAMRGLIAARTAVMTAVAAIDADMRRMARASAACSRLMTIPGVGQLTALAFVAAIDEPSRIRRSRDVGAYLGLVPRRYQSGEVDYVGGISKCGDRRVRTLLYEAANVMLTRYKGQLKLKDWAFAIARRSTMRKARVALARRLAIIMHAMLRDGTEFTSA

SEQ ID NO: 267841 - protein, 424 aa, unidentified
MKVTFQTCCGVDVHKAFLVATIIKTTGGIEPSYQKRRFSTFNNSILEFKRWLLENECLDVCMESTGKYWIPVFNLLEDEINVTIANPKWVKAVKGNKDDTKDSKWIGDLFRLGLVRGSYIPCKKIRILREFTRYRYKLVSCRSSEKNRYQNALTVCNVALDSVVSDIFGKSSTSIIDYLLEQSGTSIDHEVIASKLLKRLKAKEDAVIESIEGYQMTDSQKYRMHLVRTHMDHITAAINDVDSEIESLITSDPDYQNAIELLCTIPGVKHDSAVTIISEIGIDMSQFCTSKRLCCWAGLTPGSNESGGKKKAVRITRAGVYLKPALVQCAHAAVKSDKSPYYKKKYESLVKRRGKKRAIIAIARMILTAVFQMLTTGEAWNPCDLYKIDMPEILLEKQKQKTIKQAQKLLIREGLLPPIETVAS

SEQ ID NO: 267842 - protein, 1012 aa, unidentified
MKKIDGSPKSLKQLLLNTKYSIHYYQREYMWQKKHMEELIDDLTSEFLDFYRPDHTRHDVDDYGVYFMGSIVLAGRENAIIDGQQRLSSLTLLLIYLNNRLKAIGEKNTTIEGMIYSESHGTASFNISVEDREECIKALFEGKDFDPTNYGESVKNLYDRYTELLESSLGEVITNDNLQHFCDWLCDKVFFIEIVANTEQDAHKVFVTMNDRGLSLTPTEMLKGYILSEISNDTNRENKNNLWKEKVLMLRKDDDQGDDTFIKAWLRAKYAITIRETKAGAVNQDFDIIGGPFHKWVRDERSKLRLNNSEDYEHFIDEFSKFAEVYTLIKNAENTYTEELKYVFYNAQLNFTLQPMLLLAPIKYEDKLDIIKEKINLTARFIDLYITSRVTRYWSVDYSTIKNAVFNYVKELRNLDVSELKSKLLELNSKLNYNPDEVIPSFGLNNFTKKYIKNIIARITGYIEEQTGVSSNYINYMDTKTRNPFEVEHIITNHYEWFTDEYTDQLDFRRWRNDIGALLLLRKSINSSLSDERYGYKLQKYCSTEGNIFTESLGPAAYINNPQFIKFINNNHLDFKPYETFGKKEIAERNKLISTLIKTICNGLPQLVAPRIIPIYLCWSTKQREVALIQERKAITMTVYNVGIDAHTTNFTLATWGKDDLRATNVNTYSPSVESIIKYCNAITKQHGDDAKIIVGYEAGCLGFQLYRQLKDRGIECVVMAPSTIVGTEVNRRRKVKTDKRDAIAIAESLKNNQYKAVYVPDEEDEAVRDFIRMRTDHKQALKRIKQQICALCHRHGYHYTEGRNYWTQKHLNWLNSLPLTGVLKETLDEYLLSYEHAVEKLTQLDARIVEIAETDKYREKVHKLICFKGIKEITALALIVEIGDFSRFIKAKGFASFLGLVSGRLDSGDHNTALPITRQGNTFLRRLLVEASQSFSRARQSKSAALKKRQEGCEEAVIAYADKANERLRKRYYKLVLTNKKSHNKAVTAVARELACFIWGMMTGNIHTALA

SEQ ID NO: 267843 - protein, 362 aa, unidentified
MPKMIWLGMDVHAASITVAQYEDQAPTATVQTIANDPAQVRRLVRRLPAGSDVRACYEAGSCGYGLHRQLTALGVHCDVIAPALIPRRPGERIKTDRRDAEKLGRFYRSGELTTITVPTPSQEGVRDLVRAREDVRRDRTAARQRLAKFLLRHGHRYPGSHWTKRHWEWVCGHTFDGPARTVFVHYCDHVLALNERLAHLERELRTLAESAAYQPVVTRLSCLRGLATLSALVLIAELYDLRRFRTPRELMAYLGLVPSEHSSGARERRGRITKTGNALARRLLIEAAWAYRHPARQTRRVHQALTTQPPEVHAISDRALHRLTARYRRLLSRGKTPHHAVTAIARELCGFVWAIALVPDLT

SEQ ID NO: 267844 - protein, 342 aa, unidentified
MEHYAGIDVSLESSSVCVVDGSGKIAREGKIASEPGALIAWFGSLGLELSRLGLEAGPQSQWLFAAMREAGLAVELLETRHVRDAFKAMPVKSDRNDARGIAQLMRLGWFRPVHCKSVPAQETRAMLTARKLVQSKLRDIESSLRGILRGFGLKAGRTTSTRFGGRIKELVAGNASLEVIAEALLAVHAVLLREFKSFEKRVRTMARSDARTRLLMTTSGVGAVVSLTYASAVDDPGRFKSSKKVGAHFGMTPKRYQSGETDVTGRISKIGDKSVRTALYEAAHIILTKPVKGSALKSWAMRLAKRAGMKKAKVALARKLAVIMHRMLVDGTPFNFAAAAAR

SEQ ID NO: 267845 - protein, 405 aa, unidentified
MRKFNPAQHRIETASALGPVDEAVRQAGAVDRHAAYVGLDVHKETIAVAVAEPGRAAPIYRGEIANKPKSVAKLLAKLSEDYAGGLLLFCYEAGPCGYVLYRQILASGHDCQVVAPSRIPKAPGERIKNDRRDALKLARLLRGGDLTAVWVPDQEQERMRDLSRARDDMKGQERKARQQLNAFLLRHGYHWPRDKSRWTPAHESWLAGLKMEHPWQQVVLEEYIAAERAAGERVAQLNDQLMRALPEWSLAPVVDSLIALRGVDKLAAIVLLAELGDISRFDSPRQLMAFLGLVPSEHSSGGRRRQGGITLTGNAHARRMLVESAWSYRFPARQTKHLKGKARHASKEAKQIAWKAQTRLCGRYRTLTRTGKSTKLVCVAIARELAGFLWDIVRQEMPRLAVQEG

SEQ ID NO: 267846 - protein, 441 aa, unidentified
MKKEISFEQIYESAAGIDIGSEMIYVSVDGIKVESFGTCTADYRKCIEYLVTEKIVRIGMEATGVYWIAFYNMLEVSGFKVSLINPTEIKQRKGKKTDVSDCKWIQKIFSAGLTKESFIPEGKLYEVRFLVRERLDIIDMGATYVNKMHKCLELMNIKIGHAISQIHGASGMKMLKAIIGGERDAEKLLALCDKRIITNKGDAVKKSLEANYNDTWLFMLSKNIELWEEHEKRIAQIDERISKLLTELTKGKELIDYKPNEEKKIRHHKPKINGLQDVLVNLYGVDVSRISGINNYTLLRLLGETGIDMSRFETRKHFVSWCSLSPGRNQSGKSSKFVKRAPCNKAGQIFKEVAQSLENSKFIAIGQFIRNLKHKRGASVAYKAGARKVAEAYYDSITKGSEYVEYGIKKYQEQKKQKEIALLKKLAKKHDMQITETQQRA

SEQ ID NO: 267847 - protein, 339 aa, unidentified
MDNHTQYLGFAGVDLAKKVMQIHFVTEDGEITDKSAKRAEFLDFFRNRGKCLIGMEACGSSQDWARKLEAMGHEVHLLPPKAVKPFVSGQKNDHNDAIRIYKAMFNGVRRVPVKSTEIRDLQTLRRIRSQVTKDKVKEINHVRGLLAEYGIVMGKSLNAFNKDISSALEILTEGGDVSPLVAEELRTTVQAIKAKIERQKKLDQEIEQLARGCKNYENFLKTPGVGPFTAAMLCVLLCDPSIFANGRQFAAYIGLAPRSRGSGGKNYVTGIPSNESRAVLVECAQAIARCKNKSLWVEEILRRKPKKVALIAIANKLARQVWAMANKGESFKQMAVLTA

SEQ ID NO: 267848 - protein, 344 aa, unidentified
MKFTRCGLDIAKQVFQVHGVNEHGVVKGRKALPRAKVLEFFVQLPPCLIGIEACGGAHYWGRELTKLGHTVKLMATQYVTAYRKRGKNDVNDAEAICEAMGRPNMRFVAIKSDEQQAVLMVHRARTLAMANRTAQVNQIRGLLSEFGLVVPKGVARLRRELPGVLEDAENALPTLAREVLSGLLEQLRAADVRISAYDRQIRALAEASEPARRLMRVESIGPQTATALVATVGDPHVFKNGRGFAAWLGITPRQHSSGGKQRLGHITHQGDCYLRTLLVHGARAYLRVVDKKTDAKSAWARRLKERRHMNIAAVALAAKHARVAWAILAHGTEYRPADPQTVEA

SEQ ID NO: 267849 - protein, 355 aa, unidentified
MERYIGMDVHAASCTLAVISEKGRKLRDFPVETNGQALVEAIRMIPGHKHLVLEEGLQSAWLYETLSPHVDELVVAAITQSRGQKSDKRDAYGLAEKLRVGNREKPVFKSPRQFTRLREFSRIHMTLVGDVVRGQSRIKSLYRSRGIFVAGVNVYGVRHREQWQAQLPSSAQARATRLYDHLDFLLEQKKQAEADWLREAKKHPIVRVLETAPGFGPIRAARLVPIVVTPHRFRTKRQFWSYCGLGIVTRSSSDWVQTADGGWIRARVPQTRGLSRQHNHFLKSLFKGAATTVITQVNKDPIHARYERLLDGGTKPTLAKLSLARMIAATVLRMWKDEKEYDPGRASPPAKTRES

SEQ ID NO: 267850 - protein, 363 aa, unidentified
MQVRHIFVGIDLGDKNSVARIAVDRDKSERFGFLNSRRGRARLFREVKRRSEQADGAKMVMAYEASSCGFVLSDEAEALGIKCWVLAPTKMEKSVEQRQHKNDDRDANDVLEKLRGHVLAGNRLPTVWVPDLQTRDDRELIRTRLDLTEKQTQIKAQIRMLIKRYGLEKPSGLGAGWTIGYRRWLQALGESEQLLGWSTRQALDSLLRQLQFLEAEIDRVQKPLEELANEPRHKPIIEELRQEAGVGLLTAMVYRTEIGQAGRFGRGRQVGKFVGLTPTSHESGQQSDRKGHISRQGPPRLRKVLCQASWVHIVHDDRAGQIYQRLVSRNPKKKKIALVAVMRRLAVRMWHRMRKIELQQVQV

SEQ ID NO: 267851 - protein, 421 aa, unidentified
MNALDKKLEMVGAGTLIVGVDIAKKVQWARFCDHTGRELGKPLRFENTTSGFESLALRIEELRKAKILFRVVVGMESTGHYQKPLIHYLTRKKYTVVLVNPYHTKRAQELDDNSQTKHDQKDALTIARLVKDGRFYECYQPEGCWAELRVLSTTRLDVKRQENGCKNRIHAIMDEYFPEFETVFKYPLKGKASLHLLKTCPFPSDIRTLGVDGVLAVIKAAVKRTVGRKKAEQLVSVSKSSIGVTYGREAARLRLRILLEEHEQYQQRLEEIEAAMDVELEKTGLKDRLLGIQGIGVVSLAGFLGETGDLSRFTNGQQLVRLAGYNLTENSSGKSKSQRGISKRGRKILRSVLYKMALVMVAKNAEMKRIYQRLKTRECNPLKKKQALIAVACRIARMIFSITRHGEEYNADRVTENLKAA

SEQ ID NO: 267852 - protein, 338 aa, unidentified
MGQVVRIGLDLAKSVFQVHGVDEAGEIVVRRKLRRSQLLAFFAKQPACLVGMEACASSHHWARELIALGHEVKLMPAQYVKPYVKRSKNDAADAEAICEAVTRPTMRFVAIKSPEQQCAMMLHRVRLVLCRQRTQLSNALRSHLAEFGIVAPVGRLGLERLIEIVADPADRRLPAGARISLRMLVAQLAVVKEQILENDRRIMADARSTELGRRLMTVVGPLLASALTATVADPCIFRSGRDLAAWIGLVPRQNSSGGKERLGSISKAGHRYLRQMLVVGSMAVIRYAERSARQRPWLAQLLARKKAKVAAVALANKIARIVWAMMITGDRYREPVAA

SEQ ID NO: 267853 - protein, 344 aa, unidentified
MARSFAHYRLFVGIDIAASTCAVSWMRPNAQPTRAITIKQTPAGFADLQWQLLAIEPDPHAILIVMEATGTYWMRLASSLVAASFAVSVINPAQAHHFANALLKRSKTDAIDAQTLTELGARLQPERWTPPPQVHTELQQRLVHRDGLVAARTQFRNQLHALVQQPVVIASVRTRLETLIASLTAEIATVEQEIAAALQQDEAWAAAAARLATISGFGTLTVAWILTTTINFTLTATPEAAANYAGLAPQLRQSGSSVRGRPRVGHGGNAHLRRALYMATLSAVQHNPVIAAFYQRLCAAGKPRKVALCAAAHKLLRIAWAVVNTNQNFDPAYATRRCAEQAPG

SEQ ID NO: 267854 - protein, 426 aa, unidentified
MNYTQNRKISQITPSTLIIGIDIAKDKHVARAQDDRGIEFGKRLIFENRIHGFQMLLDWVNRHQQENDKNHVIFGVEPTGPYWLNLAYFLTAKGYDFVLVNPMHVKKSKELDDNSPTKNDTKDARVIAQLIKDGRYSVPNLLDGIYAELREGVKIRDQLTQQLAITEGRIQNLIQRYFPEFFDVFGDWKGKAALCTLKLFPFPSQMKEMTPEEVLSKWKPFVQRAVGMKRATKLVETAKKSIGIQIGIQFAKREMEYLIDQYELYQTQLEELDQELEALVETIPGAKQMMNIPGLGVTTVALFFAEVGDLTKYSHPQQLVNLAGLSLREHSSGTFKGQTRITKRGRSRLRKAMYLAIRPLVAHNPTFKALHQYYTKRSERPLKKQQSLIALCCKLLRVLFVIGQKQCEFDGSKLLRGLPQITLQVA

SEQ ID NO: 267855 - protein, 335 aa, unidentified
MTYLGIDISKSTFVVAYPKEKGYTIREFKNTPAGIHSFMHTLNKDEHHCIMEATGNYGVTLLYMLDKGGYRVSLINPLKTHNFAKTELSVTKTDAEDAKLLSRYGQEKQPPVYKMPTETILILKQKRTVLRQLKKQHTMLTNMQQSLDVLPVQDQLSKNAVKKVIISIEKQIRALEEDMTNITKKEYKHQLELLTSIKGINNKIASALITATGGFTYFDNAKQFSRYLGLCPTIIQSGSSVNVKGHINRNGDSYLRSQLFISAMPTMRFNKACRELYERLRANGKSGKVALIAVANKLIRQAFAVIKSGSPYIDGFVSQPPLLKPATKAIYTSSL

SEQ ID NO: 267856 - protein, 351 aa, unidentified
MKLTKYIGMDVHKAMTVIVILDSEGKILAEAIIQTKGSTILDFLKSQRGSLHVAFEEGTQAAWLYDLIAPHVASVTVCNARKIVRQGNKTDKVDAKLLAELLRTGTLKPIYHGEKSTRAIKELALSYASVVADGTRIKNRLKALFRGRGIDCNGTSVYDPDERKNWEAKLDSKAACARADIQWQQLDLIERLSEKAEQDLMEEARKHAATRILRSVPGIGPIRAAVILGIAATPHRFRTKKQFWGYCGLGVVSEISAEYELLNGRVRKSKKRPLLRGLNTNYNRAMKEVFKGAAKTVSEGAWKNQFEAMIANGSLESMARLTLARKVASITLAIWKKGERYDDRKLKMHAA

SEQ ID NO: 267857 - protein, 370 aa, unidentified
MQFIGVDLHTNKFTCSYRDEHSPPDAKKGKRTETFELNSIGLSDFYRTLTGDTYVLVEATITTFAFVRLIRPLVQEVIVANTYELKQISLARNNTDKIDANILSRTIKMQVLSGEQAVSPVVVPPEDIQELRGLFTTYRLYRKQTTQIKNRIHSLLKEKLYGFTQEEIFDRKSREKIRKIENGTPLAFQLNELFDMLEYIEGRIDPLKDQIMAQAEPYMGEIEILTSMKGVSVFIAIAVIADIIKVDRFKNSKTFTSYLRSAPRVSNSNTSVSVKGTNKKGRKMSATLITQSLNHVLAASEKLNRWYTRLTEYKKAGLVRTGLRRRVFAEMYQMLKKGEYHYARDEQNHESKLLQYRRFLKKRKILLETA

SEQ ID NO: 267858 - protein, 375 aa, unidentified
MYYVGLDIHQRSTSVEILDCNGKLVKRSEWKLPWPQLADQLKKDAPAPFAVCFEASCGYGYLFEEFSKVAQMVKAAHPGSLRLIYKAKRKNNRVDAGKLARLLYLDAVPSVYVPGRETRLWRQTIEFRQTLLTRLVTLKNQIRASLRERGIAAPKGLWTVKGTAWFKTQGESDDAWALRRDLLIEELCELRKKIKRVELQLKSMSSPRPGVALLMTIPGIGPRTAEALAAYIDNANRFSSTRKAGSYFGWDPCQDASADKNRLGHITRDGPATVRKLMVEAAWQSVRRSPTIKAFYDRVTRNDPDRRKIAIVATAHYLTRVAVSMLKSGEVWREDPRLKKDPSENQSGSTHDVPGGSAPKPPPRKPLPPEGGAAS

SEQ ID NO: 267859 - protein, 341 aa, unidentified
MRKNLYGGVDLHSNNAMYVITDERDKQLLRQRLPNELSVVLAALAPYRPRLKVVAVESTYNWYWLVDGLQAQKYPVVLAHPSEMEQYDGIKEADDLTDAAFLARLARLGVLPTGYIYPKADRPVRDLLRRRMLLVQQRTGIVLSLQNMAPRQTGQAVGWRALRKLRVEERAELLGDHDCLTFVTAEQVDLIERFTEKIRRFEQKVLEHTQVRPTYACLQTLPGVGTILALTIMLETGDIGRFKTVGDYTSYARGVRARHLSNGKKKAHNNAKNGNPYLAWAFVEAVHHALRTCPQAKSFYDRKRAQRNGALATKALAAKWSKAAYYMMQRQENFDLTRVFG

SEQ ID NO: 267860 - protein, 346 aa, unidentified
MTKISMIGLDLAKNVFQIHGIDAAGKVVLRRQLRRGQMEKFFAQLPPTVVGMEACGGAHHWARVFQKLGHEVRIMPAAYVKPYVKRNKNDGRDAEGVCEAMGRPTMRFVPVKSLDNQAVQVMHRTRRLLVRQRTMSANALRSALTEFGIVAAQGLKGLRQLMQVLEDPTSAIPEKARMPLQVLARQWERLTADIDKLEQQIVRGAKTDEVARRLMAIPGLGPLGATAILAAVPDARMFKTARDFVAWLGLTPRQLSTGGKQRSGHISKQGDRTLRSLLTNGATAHLRSQRARGFNDPWLRDLLARRPFKVAAVAYAAKMARIIWAMLVTGECYRVRDRSAPKLVAA

SEQ ID NO: 267861 - protein, 356 aa, unidentified
MQTIVRVGVDLAKNVLQVHAVDAQGRMVTNRAIQRSKFLAWCAQLPAGCLVAIEACGGAHHWCRQLLRMGLDARMMAAALVAPYRMQGKSGKNDANDAAAICEAASRPQMRFVPVKTPEQQGILCVHRLRERFKEERTACINRIRGLLAEFGIVLPQSPKVLRTYLHDILEDATNDIAGAARIALQRALMHWQELDEHLHWCEQRIAAHCKEDAQVQRAAAIKGLGPLTASAMVATVGDFRQFKNGAQFAAWLGLTPRQNSSGGKSNLGAITKRGDSYLRTLLVQGAKAAVLTGKHNLDPISQWVMALRQRSGWQKAAVALANKNARILWALMTQERTYEAAHISERPRPPVSAVA

SEQ ID NO: 267862 - protein, 450 aa, unidentified
MQKHMGQGKSLSLECIEPNAAGIDVGATEIFVAVPPERDPRPVRCFPTFTADLRAMAAWLVQCRIMTVAMESTGVYWIPPHEILEEVGLRVCLVNSKHVKHVPGRKTDVQDCQWLQYLHSVGLLRASFRPDDEICALRSLSRHRASLVESAAMHVQHMHKALTQMNLQIHHVLSDITGLSGMAIIDAIVAGERAPEKLAALCHARVRSDQQTVMKSLVGNYRSEHLFTLKQSLQAYRNYQQLLADCDQEIERLTQKLEGKIDPEQKPPSFGPGTQKRSKNQFQLDMRSELYRIFGADLTAIPGISALTAHTLLAEIGPDLSRFANVAAFASWLTLCPANKKSGGKVLSSKTRQSNSRASRALRLAAQSLARSRTPLGNFYRSMRARLGGPQAITATAHKLARIVYHILTTRQAYDESVFVMEAQKQAQRHEKRLRKQAKTLGFELVPIAA

SEQ ID NO: 267863 - protein, 309 aa, unidentified
MKQSVVYIGIDVAKAHLDVAWAGTFRRLPNERSGHAALVRWIKQSTTPVQLICEASGGYEQALLESLEKSEVKVTLVQAVPVRQYARAAGILAKTDRIDAKVLAAFGSAMQPQPTSPLSAEQKRLRQHEAQRRQLSRILVAEENRLAQLSCTELRTLSRSLISKIKTQIKTLDRGISDLIAQDQTLCVKAQKLTAISGVGVRTAALLLAQMPELGQLNRRQAAALAGLAPFNHDSGSVRGKRAIFGARPALRSGLYMAALSAARFNPILSSFYQRLRTKGKPHKLALTAVMRKLLLALNQTLKPLPCST

SEQ ID NO: 267864 - protein, 420 aa, unidentified
MKVVYQTCCGVDVHKSFLVATIIKTTSGVQPSYLKKRFSTFNNSILQFKEWLLLNECRDVCMESTGKYWVPVFNLLEDDINVTIANPKWVKAVKGNKDDTKDSKWIGDLFRLGLVPGSYIPCKPIRILREFTRYRYKLTSCRSSEKNRYQNALTVCNVALDSVVSDIFGKSATSVIDYLIEQSDNSINHEEIASRLLRSLKKKSVSVIESIEGYQMTDSQKYRMRLVRAHIDYITSAINDIDTMLDSLVAPYENAVQLLCTIPGVDRNSAITVISEIGTDMAPFSNSKRLCCWAGLTPGNNESAGKKKSVRITRAGVYLKPALVQVAHAAVKSDKSPYYKQKYERIMKRRGKKRAIIAIARMILTAIYQILSTGEVWNPTDLYKIDMPEPLKEKQKEKAIKQAKKLLISEGIIFESQLVS

SEQ ID NO: 267865 - protein, 318 aa, unidentified
MPSEKTSPCFVGIDVSKDTLDVFIRPLEKSLKVDNKAFGPLVKKLKKLNPELIVLEATGGYEIGVLEALSQAGLKVYREHPLKVYHHAKGRGKLAKTDRLDASTLAHYAECFVKDITIRDLPSQEHRQLQQLVARRKQLVDQRTMEINREKHPALFLAIKASCRSVIELLDAQIQQLEEMIQGLVQANQDWQRKKELLQSIAGVGETTATLLLVSLPELGQVNRKVIAALAGVAPYRYESGTFKGQQHIRGGRKDVRTGLYMATLVAKRYNPELKAFYEKLLAQGKKKKVALVACMHKLLRMLNAMLAKNEPYHSANT

SEQ ID NO: 267866 - protein, 340 aa, unidentified
MKIATIGLDIAKNVFQVHGVDDAGRVVLRRKVRRDKLLALFASLDPCLVGMEACATAHHWARELSALGHEVRLMPPAYVKAYVKRNKNDAADAEAICEAVTRPTMRFVPVKSAEAQSILMLHRARHLLVRQRTAQVSALRAHLAEYGVVAPKGRAHVADLVTVLESDLGLLPELARQTLLLIARLIESLSQQIRKIEIELLAWHRANAASRRLETIPGIGFITATALVATVGDARVFRSGRQFAAWLGLVPKQHSSGSKERMGGISKMGDRYLRHLLVVGATAVVRYTRRKATPVSIWANRLLDRKSARLVTVAVANKTARIAWAVMAREENYRPMPAAA

SEQ ID NO: 267867 - protein, 348 aa, unidentified
MALTIVETRAITGGVDTHADTHVAAALDPVGGLLGVQEFPVTPAGYARLLGWLGGFGTVCLVGIEGTGSYGAGLARHVTAAGVRVVEVDRSDRQDRRRQGKSDPLDAVSAARAAQSGRARGAPKGRDGQVEAIRALMVAKRSAAGERTRTINQARALIVTGPDDLRARFTRHAPAALITALASLRPRPGDVTGYPTRIALRELGRRAQFLGSQLERLDELIIPLVTARAPGLLAVYGAGPNTAALLLIAAGDHPGRLRSEAAWAHLCGVAPIPASSGKTVRHRLNPGGDRQANHALWRIVFTRLGSHPATRAYVERRTAEGKSKTEIIRCLKRYVAREVYPHLRPPAG

SEQ ID NO: 267868 - protein, 362 aa, unidentified
MSYRNRNDAQWREKPERTVGLDLGDRFSHYCILNAHGEVIEEGRIATTEKGLRQQFANVPRQRIALECGTHSPWVSRRLQQWGHQVIVANPRAVPSITHSVSKNDRHDAEQLARLAHSDPELLKPIQHRRQTRQQDLNGLRARHTLVRARTLVINSLRGLAKSAGGRLPNCSSESFPKRVAQHIPASLTPLATPLLEQVAALNTHIAALDQQIETLAQRYPEIALLRTAPGVGPVVAAAYVLTLDRPDSVAHSRQMGARLGLRPKQHQSGDRDPQQGITKISNRYLRSLLVQSAHYVLGRFGPDSALRRWGLQLAGTGNQGAKKRAVVAVARKLAVLLHAMWRTGQSYRPFPPVRAVPHSNL

SEQ ID NO: 267869 - protein, 462 aa, unidentified
MEKNLMARKPKNTQPAFSPLNPHAAGIDIGSASHFVAIPADREGETVREFQCFTADLHRLAAWLQSHGISTVAMESTGVYWLPLYEILDAQGFEVKLVNARHVSTVPGRKSDVLDCQWLQQLHSFGLLQGAFQPAHEITPLRAYTRHRANWVQCAGTHIQHMQKALRLMNLNLDAVVADITGATGTKIITAILAGERDPLALACLRDSRCQKPEQAIAQALDGHYRAEHLFALKQAKDLYDYYQQQIADCDQQIESCLKTLNQQTAHGRQEAVPPKPAKPQKKSKKAPGFELRTELYRLTGVDLTTIDGIQSHTALKILSETGTDMGRWQSAKHFCSWLGLAPGCKISGGKRLGGKTKRTANRAAAALRMAAQSLSNSQSALGAFYRKKRYHLGAAKAITATAHKLARILYAMLSQGTAYEDPGENAYEQQYQQRARKNLQQKAKKMGLVLVYADTGEAVMD

SEQ ID NO: 267870 - protein, 392 aa, unidentified
MYIVGIDIGKNHHEASIVSPEGKQIGRSLRFATTHKGADSLMSFIFKNIGNSPCVFGMEATGHYWYPIYSFLKAKGYTIYVINPIQSDSLRKMYIRQTKNDSIDSFLIAKVIRFGQFGTTSMADENILAMRQLCRYRDSVISSRTEIKLRIGTIMEQIFPEYEKQFSSLWVSTSMGILEKYLTPENIENAPIDELFEIIKDKSHNRLTRAKAISIKEAAADTFGIKIAQDAFSFQLKQLIDRMNFLDKQIEALDCQILEYYEKFDCYLHTIPGIGMIAAATILAEIGDINRFKSSSALVAFAGIDPTVRQSGEFSSTHNHMSKRGSPYLRHAIFLAATTRSFHNSPLNAYYKKKRDQGKHHLTATGAVARKLTTVIYAVLRDSKPYEPKKFC

SEQ ID NO: 267871 - protein, 314 aa, unidentified
MDDTATVPTRFIGCDVGKAEIIVFDSASGKTTSLPNRADALAAFAASLDPAALVVCEATGGYEAALLDAMVAAGRAAHRADARKVKAFIRSLGILGKSDAIDAKALAQYGRERHDRLTRWQPREQHRDQLQLLVSMRRDLVRQRVAHRNRRQAPGAAPVAARLQRIIATLDAEIAGIDADIRALIDACDTLAQTVHTHTDIAGIGQTTAAQLTALMPELGSLNRKQAAALAGLAPHPKQSGSNNAYRRTRGGRPEVKHTLFMAALAAARHNPTLNTFYKRLISNGKKPIVALVAVMRKLITIANARLRDNLASI

SEQ ID NO: 267872 - protein, 345 aa, unidentified
MKIIGCDFHPSFQQVAICDLETGEVQERKLSHADGQAERFYRELGEPVLIGIEATGNSQWFLDLVQRLGHEVRVGDAAKIRASYVRRQSTDKRDAAHILTLLLEKRFPQVWRPDAAMRDQRQLLRHRDKLVEIRTKVKNSLQHLAMNRGMQKKSRLWTRLGMEQFQQLAMPGWAGVRREDLLHLLKQLNRQVEQLDQAVKQAAEQHPQAQLLMTQPGVGPVTALAFVLTIGDVARFAGSKQLTSYLGLVPSEHSSGSKRRLGAITKQGNCFLRKLLVEAAQTAVRKDEGFRKEYQHRCHHRPKAVAKVAAARKLAVRLYWMLRSNVGYPEIAHIESNPRVPLGDV

SEQ ID NO: 267873 - protein, 355 aa, unidentified
MKYYTSTTEFNCGIDLHARQMYVCVMDRQGKKRVHTNVKDNDFSFFLKLIEPYKHDLTVCCECMFGWYWLADACQASGLTFVLAHALYVKAIHGGKNKNDRVDSEKLTHLLRSNLIPPAYVYPADKRPLRALLRQRIFYVWRRSELLARIHSHQLAHNRIPARQTRRTRDPWEEQLLGAEDNPLRQIALKNDLTMIRHFDQQIFALEEELQRQTKKVASRDYALLQSVPGIGENLGLTILYEIGDIERFPTVKDFLSYCRLVKGTVASAGKIKGLRGARLGNPYLRWAFGEAAVIAKRDHFRIRPLAQRLEEQMNGNKFKANTVVAIKLARAVYFMLKNKTVFDPDRLVAALARN

SEQ ID NO: 267874 - protein, 373 aa, unidentified
MKKVRFLGLDVHADTIAVAVAELDGEVRSLGIIPNREESIRKLVKKLGPAEQLQACYEAGPTGYVLYWQLTALGVKCEVVAPSLVPVKAGDRVKTDRRDATKLARSYRAGDLTAVWVPNQEHEALRDLVRAREAAKQDQLRARHRLSKFLLRQGRRAPSGFKVWTQRYQDWVKEHVHFEQPAQEYTLLDYLHEVEHMDDRIRRLDLAIAEAVKLAPPGMQEVIQALQALRGIAQISAVTVVAELGKISRFDRARQLMGYSGAVSSEHSSGKRKQRGQITKTGNAHLRRIAMEAAWAYRHRPAIGPRLRKRQEGLSEEVKEIAWKAQHRLHKRYRNLSAAGKEKQKVVTAIGRELLGFIWAIGVQAERNSKRVA

SEQ ID NO: 267875 - protein, 416 aa, unidentified
MNAVGIDVSSRKSTVAVLRPLGEVVCLPFDVTHDIVGLASLAEKLKTIDGETRVVMEHTGRYYEAVAKALHEAGFFVCAVNPLLIKEYGANSLRRVKTDKADAIKIARYALDNWADLRDFTPMDAIRYDLKTLNRQFQLASKQRTASANNLIAPLEQSFPGIRKCFDSPVRSDGTQKWVDFAHSFWHVDCVRKQPFAAFCERYRKWCKRHAYLFKLSNAEEVYALAKRAVVLTPKSKVVKVLVQEAANQLISISRSVEVYRAEMDRLAAMLPEYPVVMAMYGVGKSYGPQLMAEIGDVRRFERKQALVAFAGIDPMPNQSGDKNVRSNKSSKRGSPYLRKTLFNVIRTYLQCAPQDEPVFQFLNRKRAEGKPFYVYMLAAANKFLRRYYAKLRDFFASLDTLQPVAPIPTILKATL

SEQ ID NO: 267876 - protein, 327 aa, unidentified
MQTTSRVVGVDVSKATLAVCHQPGSSPQHLEVRNTPAGFRELVRRCGTGSLYVLEATDTYYLGVAYHLVAAGAEVAVLNPVVVRRFIQMHLGKGKSDRKDAQWLLRFGQQQATPRWQPEEQALVECRQLQQAAELLIRQQTMIRNALEALLHQPLVCAEVRRQLQRTLRRLEQQVQHLEAALLARVEQRYAAEVPLLCSIPGIGRKTAALLLLFARGFAGLDNYRQLIAKAGLCPHEYTSGTSVRGQTRITKTGGNLIRSKRYLCSWSACRANAACKALYERLVAKGKHKKLALIAVCNKLLKQAFAIVRSGVAYQSNFAQKTVHMT

SEQ ID NO: 267877 - protein, 522 aa, unidentified
MAFKRSRHSSKSGAAEFLQQPNGVVHARVQKVGPEHFGIISVDCAKARSKWMLADFYGNILIPPTEVAHNRVELAAAVKQVRTGLVKHHLRDCLVAVERTGRYHHPVKNAFRKADFETRLVHPFTTKQFRQPADPDNKTDDTDLKAIHRAAVNGFALLEAAPVESWRQLQLFIRHRRDLVRKSSALACQIREHLDAALPGYAACFDKLWESNVAFRLVQQFGSAQGMLEAGETALGEFLYQQKVRFQQRTLVTVLTWAKRAADPDVAADLHRQIALAYHDDHARKSLEIIRLEREIAHRLAQTPYILLLSCPGINVVSAADFAGEMGPIENYANSRSITGRAGLFPARHQSDRVDYTGHLARRSNRALRAAILGIADNLILCNAHFHNLANLWKLAGKDPRMTHVKVAARFCRIAFQMVAGRQVFCHPCLRQRGYILDKLLAFHVEQQTPMQETMRDLHYAITHIPKSEHAAEAKPLHERMQTTRERGKKGPQPIRELIAIVLARLGVGVINSNPSGEEDLT

SEQ ID NO: 267878 - protein, 414 aa, unidentified
MELLHERCAALDIGKKDLKACVRTPSPTRKRSRRQEIRTFATTTNALLELRDWLLGERVSLVVMEATGDYWRGAFYLLEDDLNVILVNAAHAKGLPGRKTDVSDAAWLCQLGECGLLRASFVPPEPIRQLRDLTRYRTTLTTERTREAQRLEKELEDAGIKLSSVATDILGVSGRAMLTALIDGERDPRVLAELARARMRPKIPHLVQALTGNFGDHHAFLCRLHLQRIDSLSAAIGELSARIEEQMRPFARQLQQLATIPGVGQSIAEVIVAETGADMSRFPSAGHLASWAGVCPGHHESAGRRRSGKTRHGNRWLVGALGTAAMAAARTKDTTYLGARYQRLAHRLGKKKAIVAVEHSILTAVWHMLTNDADYTDLGGDYFARLDPQRAMRRIVRQANILGFTVRFDPIQAA

SEQ ID NO: 267879 - protein, 393 aa, unidentified
MQNILAIDVAKGKSMVTLISSSGEVLINPYEINHSINDFSILLNRINNLKLENISVIMESTGIYHKPIERFFLENNFKVYTINALYSKIYKRNLRKTKTDKLDCISLSELFFTNDFKQYVRPDEIYLNMNALSRQYFALDELCSNLKNRYRNLVYLCFPEYENLFKGEAIYSDIALSFISNYPHADIISNTRIDCLQNYFKNNNFRYWRRKATLIKETAKLSYPSVSKNDELVNDLSQMATLIKTYQSEINKIKFKLIEYGRQTKYFNKINSIFGIGEFTTSIIIAELGDINRFNNIKEITAYCGLDPSIKQSGKSIDIHGPISKSGNKYIRKLLFISCLNIVRLSSKCHIENDIEIYYRKKRSEGKHHYAAIIACTTKLLRQILALCKQLDN

SEQ ID NO: 267880 - protein, 342 aa, unidentified
MSVMIGIDPHKGSHTAVVVNQDEVVIDEIRVKATANQLVELQTWASGHQDRRWAVESARGMGYLLAQQLVGAGERVIDVPAMMASRVRVLGSGKSQKNDPNDARSVAIAALRHPSLAVVSVDDHTRVLGLLAKRHRDVARLKNKAACRLHALLVELTPGGLATEMTVNKANLVLAGVAVTDEVTRQRVVIATELVDDIGRFDAQMRASKKRIRVAVAASGTSLCDIRGIGPIGAAIILGSVGDIRRFPTAGHFASYNATAPIEASSGDKTRHRLNPRGNRKLNHALHIAAVTQLRYPNEGRDYYDKKLAEGKTSKEAIRALKRRISNVVYRHLVADTRHHIS

SEQ ID NO: 267881 - protein, 458 aa, unidentified
MRKKASKAKATVTDPQWSTLNADAAGLDIGAAEIWVAVPPDRDPNPVRAFGTFTPDLQALAAWLAACRVTSVAMESTGVYWIPIFELLEARGFEVYLVNASHIKNVPGRKSDVQDCQWIQRLHSYGLLSASFRPEAEIVVLRAYLRQRAMLIEHRAPHIQHMQKALHQMNLQLTQSLSDITGVTGLQIIRAIVAGERDPLTLARFRQPTCRSTEDEIAKALTGHYRAEHVFALKQTLVLYDTYTSQLTDCDRQIEAQYAASRPRFDPDDPDHPLGPDPKPNSHSKNAPDFDVRTPLFKLAGVDLTAVAGFNESTAQTVLAEIGTDMSAWPSAKHFCSWLGLAPHNDITGGRVKRSRTLKTRNRAAQALRMAAEAAGREKSGIGAYYRQMRARIGPKQAITATAHKLARIVYHMLKEHQSYQALTAEAYDERHHQRELKALQRRAAKLGLSLQPQPSGG

SEQ ID NO: 267882 - protein, 346 aa, unidentified
MMIIGCDFHPSWQQVCWLDTETGETGEQKLVQASGDAERFYRQVPAPALIGMEATGNCHWLVDLLAGLGHELWVGDAAQIRASCVRQQKTDKRDAAHILKLLVEGRFPRIWMPSSEVRDRRQLLLHRHKLVIIRARVKNELQHLCLNQGVQKKHKLWSRAGQQMLRELPLKPWAGRRREDLLRLMAMLDQQIEPLDQAVKTEAQRDKMALLLQTQPGVGPITALAYVLTMGEVSRFPRGKQVASYLGLIPREHSSGGRQKLGAITKQGNRMMRMLLGEAAQSAVRLDPQFRKEYLHRCHSKPKAVAKVAAARKLAIRLYWMLRTQKRYPAVVRIESSPRVPLVSAS

SEQ ID NO: 267883 - protein, 318 aa, unidentified
METAAVFVGIDVAQARLDIAVRPSGEQWTSPHDEAGIAVLVTRLQALGPTLGVLEATGGRELALAGALAAAQVPTAIVNPRQVRDFAKAIGQLAKTDALDAQVLARFAEALRPEPRALPDAQAQELAAVLTRRRQVVAMLTAERQRLSTLLPAVRPRVEAHGRWLRQELRALDAELQERIRPSPLWCEQAALLRTVPGVGPVLALTLLAHLPELGTLDRKPLAALVGLAPRPADSGTRRGRRVIWGGRAQVRATLYMGTLVAVQHNPVLRRFYERLLAAGKPKKLALVACMHKLLLILNAVLRQRTPWQPPASPAQSS

SEQ ID NO: 267884 - protein, 318 aa, unidentified
MNTRITQEEINVGVDTGKYQLDIYIRPLEIFFSVSNDEKGIKEALTEIKKHSPQRIIIEATGRLEHAFIFACSNANLPFVVANPLHIKRFAGAIGRLAKTDPLDAQLIAHYGEAVKPNLSQLKPENIRLMSDLLSRRRQLITMQTMEKNRLKIMPKVLASSITPLLTTLKNQIEKVDKKLLKIIEECPEYQLKNDIIQSIPGVGNIVAFSLLSDMPELGTISNKQAAALIGVAPFNKESGSYKGTRRIRGGRYKVRTVMFMAMMSAIQCNPVFKQKYEQLLAQGKPKKLAIIACVRKMIVVLNSMLRNGAKWEVNYAK

SEQ ID NO: 267885 - protein, 347 aa, unidentified
MRFYKQQHQFYCGIDLHARKMYVCIIDQKGKTRLHKNIPTEAEMFFELIFPFLDDIVIGVECVFCWYWIADLCAQHSLPFVLGHALYMKAIHGGKTKNDKIDSFKIAALLRGGNFPLAYTYPAHMRATRDLLRRRMYLSRRCGELVAHIQNTNTQYNLPEFAKKISRKYNREGVAERFENPVVRKSVEVDLSMIDALNQTLRQLEWYIEKTAREHDYKTLYLLRSIPGVGQILALVILYEICDIKRFATVQDFSSYARLIRPVKESDGKWAGKGNKKIGNRHLKWAINEAVILMLRESEQAKNFVDRLTKKHNKGKALGILTHKLGRAIFFMLKNNEAFNMKRFFSS

SEQ ID NO: 267886 - protein, 418 aa, unidentified
MDVVVQRCAGLDVHRDDVVATVRVPGTGRRRWDQQTRTFPATLAGLSALANWLAEFEVALVGMEATGVYWKTVFQALEHRFECWLLNAHHLRNVPGRKTDVKDSEWICQLVQHGLVRPSFVPPPEIRRLRDLTRLRKAQVNERGRSIQRLEKVLQDAGIKLTSVASHTYSQSARAMLEALLSGVTDPEQLAELAKSRMRSKIPQLREALASRFEIEHHGVMVTQLLAHIDTLDAAIANLDERLELVLAPHAELVELLCTIPGVQTHAAQVLIAECGLDMTQFPTVGHFASWAGACPGHHESAGRRRSGQTRPGPRWLTDTLTECAKAAARTKNTYFAAHFAQLRGRRGEPKAIGALRHDILVAYYHIVRDRVAFRELGPDWHRKRYSPEHRARRLQRQLEALGYTVTLQATAEAASAA

SEQ ID NO: 267887 - protein, 345 aa, unidentified
MDHFAGLDVSVKETSVCIVDDTGRIVREVRVASEPEDLLQILSNPAYHFKRIGLEAGPLSQWLFSALAEAGLPVICVETRHMRAVLKAQINKTDRNDARGMAQMMRAGLYRPVHVKTLRSQKLRMLLTHRKLLQSKAIAIDNDLRGTLRNFGLKVGVVGTVKFEARIKELVENLPDLADLVEPLLVVRRVLREQFVIQHRRLLAIVRDDEVCRRLMTVPGVGPVVALTYRATVDMPARFRKSKAVGAVFGLTCSKYQSGEIDRSGRISRCGDEMMRVMLYEAAQVMLLRTAKWSWLKAWAMQIARRRGMKKAIVALARRLAVIMHRLWVDGTEFHWTREQAAAAA

SEQ ID NO: 267888 - protein, 354 aa, unidentified
MELHTIGIDLGKTVFHLVGLNPCGEVVVRKKFSRKQLLHFTANLKVKLIGMEACGGSHFLGRALREQGHEVRLMPAQYVKPYVKTNKSDYIDAEAIAEAVGRPKMRFVPIKSDEQLDLQSLHRVRERWVMRRTAVINQIRGLLLERGITLRQGRCHVDAALPGILEDASAKLSGAVRLLLAQLRLELDHLQMRIDEADAVIQKIAGENEACRRLVAIPGIGPVTATAIIAAIGNGAAFKKGRGFSAWLGIVPGEYTTGGKQKLLGISKRGNSYLRRLFVQGARAVLQQSAKQSSGLSAWLAQLTSRTHRNVAAVALANKLARMAWAVLAKNEPYRPPDVGRCGDNVTGLQMTPG

SEQ ID NO: 267889 - protein, 406 aa, unidentified
MITVGIDIGKERHAVAAIAASGEVLMQPRLFGQNAEGFAALLGQLGKLGKAEGIRIGMEATGRYWLPLRHALAEKGYRVESVNPLITSAEIAKDVRGRKTDKADALAIAFALLRNRHNPAPAEDAAADALKSLTRHRTFLVRQRSNVKRCVHAALDATFPEAGATFGALFSATALAVLEAFPSARLLAGANLRTLSAVVSKSSRGRLGAGYSRSVRDAARASVSAGIVNEGDEAALISLIEQIRFLGGQIAKSEARIQSMPAPETAASLASVKGVGPLLSRVIASEIGDMERFRNPPSGKPPRDMDKRVLAYAGCEPRLRESGKWKGRTKISKRGSPSLRTALWQAASMCRLHNPLFTQVYARQTERGKPHSVAIFYVVRKLIEVLCGMYKTGKPFTPQPSGGAAC

SEQ ID NO: 267890 - protein, 353 aa, unidentified
MKRDKYIGMDVHQATTVVAVLDANGKVIWETIIATQAGPIIELLESLSGPLHVTLEETTQAEWLYEVVRGYVAEVVVCDPRRNKLLSEGSKADKVDARRLAELLRVGLLRSVYHGNEGTRKLKQLARGYQTLLSDMQRTMARIKAMYRSRGIATPGRGVYQAKQREQWLSLLTDPGVRQRTAWLYEQLDQLGGLRRQAKLAMLVESRKHRAVTLLRTIPQLGPIRSALIVAILDTPHRFRTRQQLWSYSGLAVVTHMSSEYEIKEGRVVRSRKPIATRGLNRNCNRVLKDVFIGAATGGGSREPYRQYLQGLQDRGMRKEMARLTLARKIASIALTIWKKGEAFDPKKLNWAT

SEQ ID NO: 267891 - protein, 412 aa, unidentified
MEVVYERCAGLDVHKKSITACVLWALPKGKKKQEKRRFATFTQDLLAMADWLRECGVTHVAMESTGVYWKPVWNILEGQFEILLVNAPHIKAVPGRKTDQKDSEWIADLLQHGLLRGSFVPPTPVRELRDLTRYRVSLAQECNRIANRIQKVLEDANIKLASVATDALGASGRAMLDAMIEGETDSGELAEMSKGLLRKKRAALRLALQGRVTEHHRFLLNQLMTPLRFTEDRMDDVEREIARRMEPYQDDVQRLCTIPGVERVTAWGLLAEIGFNMDQFPSAAHLASWAGLCPGNCESAGKRLSGKTRKGSAALGRCLSQAGWAVSTKGDNYLTAFYRRVAARRGAKRVIIAVAHQLLVIAYYLLKRKAEYRELGANHFDNINADRVRRSLVKRLERLGHVVTLQPAVQSA

SEQ ID NO: 267892 - protein, 343 aa, unidentified
MKAARIGIDLAKNVFEIHGVDERDIAVIRKTLRREKVGLFFANIPSCLVAMEACSGAHYWARKLTDLGHEVRLTSPQFVKPYVKTNKSDLNDAEAICEAASRPSMRFVSIKSGEQLTIQATHRVRSRLVGNRTALANQIRGILAEFGIVVARNLAALRRRLPEILGSDMAALDPMTRSLILDLQEELVVLDRQVRAFDKKIRQISAASEACQRLERIEGIGPLTATALVAAAGNGASFRNGRQFAAWLGLVPRHHSSGGRTRLLGISKRGDRYIRTLLIHGARSALGRIQHKKDPRSRWLRKLCAHKPYNVAAVALANKNARIAWAVLRHGESYDQKRTVSAA

SEQ ID NO: 267893 - protein, 421 aa, unidentified
MNQLTDAGYTAYVGIDWATAKHDICVQAAAGGAREFARISSQPEGIEAWAQDLYRRFGGPIAVALELNKGPIVSALQKYDFMVLYPINPATLAKYRETFTPSGAKDDPTDAELAVDLITRHPERFMPLKPQSVTMRKLIGLVEQRDKFASDQGRLVNRLGHALKQYYPQVLEWFNEHHTVVFCDFLNRWPTLTQVKRARKASLERFFKSHHVHSAELIEKRITAIKAAMPLTLDPAVIEPHRLQVEILIEQLRITIKALKRFDDEIAATANKLPDYNLLFNPLPGAGHILAPRLLAAFGEDRQRYQHADALQMYSGIAPVTKRSGKMTWVHWRWQCPTFVRQTFVDWASQTINKSAWAGAYYRQQRAKGCSYQVAVRALAFKWIRILHRCWQDRTPYDESKYLEALRRKGSPLLKYLAEPA

SEQ ID NO: 267894 - protein, 427 aa, unidentified
MSYRIAAVDAHKKMLAVVVADVEGEGAYQFERRKFGATPGELHVLAQWLDQQEVEEVVMESTAQYWRPVWGTLEQYWRPARQQREGASQMSGTLHLCQAKSNHGPRGRKNDFLDGERMVKRLVAEELVLSFVPDPEQRLLRTVTRRKHQLTRAKVGFKNQLESLLEQGHIKLSSFVSDLLGVSARRMLKALAEGESDPAVLAAMADRGLHATPEQLRDALGASAHLSKVYRRLLKLALEELQLIETHIEQLDREAMELLKGHEDVVQRVAEVPGFGPDSAVQMIAEVGTQAANFPAAKKLSSWVGVCPGNEESAGESQSTRSPKGHRHMRRLLNQAAQSAVKVKGSIFEVTFHRLLPRLGYKQAIWAIAHRLCQLLWLILHKGVRYEERGPAVSAKSKRTRAARMIRELKKLGYRVDGGPIPAAARA

SEQ ID NO: 267895 - protein, 419 aa, unidentified
MTKSNIARQLAQVQPGTLHVGVDLALEKNVVVVINDKAQRLDRFSFPQDRGGYDYFLQRLAGLRQKHQAAQVVVTMEPSNYFWKLLAGELEEKEVPYRLVNAYTVKKHREGNQLDRSKDDRRDAGQIAELSRNGHYTETHLQKGAYEELRQYATLYDQLMQGLSREKHVLWGLVGQVFPELSREFKDLTGETCLSFLESFATAASLRQLKTDDFIAQVRTSFSGNKLCVSKLRRVYELAASSIGVTEGLQAIHLAIQVHLAELQAFQKQLNRVTTAMSDCLACLPEAPYLLSMRSLQTVSAAVFLAEVGDPRRYRAAAQWVKLAGIQPAPDTSGKKQHSKTPMSHHGRSRLRTMLYFTCLRLVQQDQHFAQLYAYYQRRSKDPLTKMQALGVLMNKLLHILWALIHNQTFYNPSFDQSI

SEQ ID NO: 267896 - protein, 347 aa, unidentified
MTIVDSTRPLVGGVDTHLDVHVAAVVDSNGGVLGIRSFPTTTAGYAELSSWMGSFGPMERVGVEGTGAYGAGLARHLAGHGLVVIEVDRPNRQARRLNGKSDELDAVEAARGALSGRVTGHAKAGTGNVEALRVLLIAKRSARSQRIATIVQLRHLIFTAPDDLRQRMAGLAAAGLVTEAARLRPRSGSDPVTHAFKTTAVVLARRVHALDDELRLLDAQIEPLVKATAPALLNIYGVGFDTAAVLLTAAGDNAARIRSEAAWAKLCGTAPIPVMTGKRDNRYRLNPGGNRHANNALWRIVLTRLGQHEPRTTAYMQRRLAEGKTKPEIIRCLKRYVAREVFRALPR

SEQ ID NO: 267897 - protein, 412 aa, unidentified
MKVVHEICCGIDVHAKMLVACLLMANGEKKIRTFSTMTDELLQLRDWLVAAQCRQVAIESTGVYWKPVFNILEDALTVILINPEHAHALRGRKTDVKDAEWLADLLRHGLLQPSFIPPPVIRELRELTRYRESVVREQSSVANRIQKLLESGNLKLGQVASDALGVSGRMILKALAKGESDPRKLAALARGKLKEKSLSLEQALHGRLTVNQRFVLGELLSRWEQLEAADARVTSEIDKYVQANPKLARARELLDSIPGIGPRVAEVIMAEIGIEMASVFADAAHLASWAGICPGNKATGGKRLSGRTRKGNTYLRSALVQAAWGASLKKHCYLNSQFQRLVKRLGRKKALVAVGHSLLVIIFHVLQNDQTYTELGGDYFDRRHVEQQRDYYVRRLQMLGLKVTLEELPQAA

SEQ ID NO: 267898 - protein, 412 aa, unidentified
MIHGDGEVLPATFSSGGLTMFIVGIDIAKRSHEAIVLEDSGKVAHKAFSFKNDVSGFKRLLDILLSLSADPDHFVVGMESTGHYWLALYSALRKQGFSVCVLNPIQSNALRNLYIRQVKTDQRDCLIIADVLRFGRYQQGNVPPSELYELRELCRARSFLVDTTADLKHKVIALLDQAFPEYETLFTNIFGLTSSELLLNCSTPEEILAIDTDKLAKILETPSRKRFGRAKAEQIKETAANSFGVILEFGSAGFLIKQYMEHIRYTESQIAQLEEKIAELFSHFDTQLTTIPGIGPTLGATIFSEIGDISRFPSPAKLAAFAGIDPSVKQSGEFQSSHAHMSKRGSPYLRRAIWQASVIAAMHDPAIRAYFEKKRSQGKSYMVAIGHVTRKMNNIIFAVLRDNKPYYSSLDS

SEQ ID NO: 267899 - protein, 431 aa, unidentified
MCFAPAFGDQEESMGKINERCGGIDVGKRFLLCCVLTGAAHEDPRSQTRRFDATVSDLVGLREWLAAERITHVVMEGTGSYWVPVFNILEGHFIIVLANPEEVKNRKGHKTDRKDAEHLADLLRHDHIRAGFIPPKPIRDLRDLTRRRLQLTQDATRERNRVEKLLEHVNVEIGNVLSDVFGVSGQSMLLVLLDGKTTAEAIAHLARGQAKRKIPQLTEALEGHGMLDHERFLIRSCLRHLACLEEEVEQMDCEILQRMQEPPFQGAFQRLQTIPGIGQFAAASILAETGVDLTTFPTAEKMASWAGLCPGNRESAGIKKGSQTTQGNSYLRTTLVQCAWSATRKTGCIFQARFRELSPRRGQKRAIVAIAHQMLMVLHFILKNDVPFNGAANAPTQRRRQRRAHHHLRCLRRLGISVQIVEPTEFAPQTG

SEQ ID NO: 267900 - protein, 394 aa, unidentified
MKKMYEKVACGGMDVHYKFSTVTFRDCQGKVVCREVLDHRNWPDLVRRFSEWPRGVPIAMEGSFGWGWICDLMMQLGLSPQLANSLKVAGMRKARGDVKTNKKDAELVSLLPLEKGDWWKVWMPPAEVRDRREWTRFRSDLVQTQTRTKNRIHAIFHRHGIFHGFSDLFGAAGRRFLEAAVEEGAGLLSGGALWALRGQVSILTQTRKEIAAVLQETHKYLQRTPVTHHLRQTIPGLGAVLTHVVVAETGDMARFGYNHRRFASYCLLAPRADDSGEATEEPAVGRRLGHRGNRVLKWAFIEAARAAVRRGGIWRAMYDRYTQGGTKQRNRGYIKVARALAKLTVREWTKAIGGVEEGSSVPTTAAERKHRRGRRGRGSTRSGTGTPNHPMVKV

SEQ ID NO: 267901 - protein, 347 aa, unidentified
MASIADWCCFVGFDYHDCFVQVCILDEAGEVLGNQRVANDMSSILEYVDNTRDGRIIRGAAVETCCGASHFAEQLRNHDWPVELAHAGICSKMKQSPDKSDLADAHLLADLCRVGYLPRVWLPPAEIRDLRRLGRYRQQLVEQRRDVKLRMRAMLREERIAAPREVGNVWTKAWLIWLKSTESLNGHSRWVMDQHLADLERLVAKVREVERRMEEATTDDPVVQKLRETKGVGLVTVVVMRAEIGSFDRFACGKQLARYCAVTPKNASSGKRQADGGLVRAGNLTLRTMLIEAAHRLARFQPTWKQMKEGLKQRGKPGSVAAATVANRWIRKLFWEMRQVEQQSQVA

SEQ ID NO: 267902 - protein, 443 aa, unidentified
MSLRKSVAPLTLAHPDAAGIDIGSASHFVAVPADRDEQPVREFKSFTADLYRLAQWLKDCGITAVAMESTGVYWIPLYELLDSQGFTVYLVNARHVKNVCGRKSDVLDCQWLQQLMSYGLLASAFRPSDQICVLREFSRQRQMLLASQVRHVQHMQKALTQMNIQLTQVLSDVVGVTGQAIIRAIVAGERDPHVLARLKKRQVKASEDDIAAALQGTWRHEHLFALRQALALYDAYQSQLDECDQLIQTELHKLQRHDGDPGKSQRRWPKKAMAFDLRTHLFAMCGVDLTRINGVDEMTAFKVLAEVGPDMTRFPTSKHFASWLGLCPGTRISGGKVLSSATKRSPNRAAQALRLAAAALRTSQSALGAYYRRLCARLDKPRAITAAAHKLARLIYAMLTKGTEYVDQGELYYEERYKQRVMHHLTKRAQAMGYSLTPLPETA

SEQ ID NO: 267903 - protein, 317 aa, unidentified
MTPPQVFIGIDVAKRQLDIAARPAGTVWAAANDEAGIADLVKCLGRLRPTLIVVEATGGYELAVVLALAKAQLAFAVANPRQVRHFAKGLGLLEKTDKLDAKVLAHFAEVVRPNPRALPNDATQEFNALVVRRRQLVSDLTREENRRATAPQGIRGRIQTHIDWLKQDLAELEKELRQAIKADPVWHEEDCLLRSAKGVGPAFSTTLVGGVPELGQLNRRQIAKLVGTAPLAHDSGNFKGRRTIWGGRSAVRAVLYMAALSATRYNPVIRALYLRLLAAGKPKKVALVACMRKLLTILNAMVRDKKPWQDQPIPQTS

SEQ ID NO: 267904 - protein, 412 aa, unidentified
MQTLVERGCGLDVHQATVVACLLVMQKDGRIQKQTRTFGTTTRELVGLRDWLRAEGCTHLAMESTGVYWKPVYAVLEGALEIVVANAQHVNKVPGRKTDVKDAEWLADLLCHGLLRPSFVPPPPIRQLRDLTRYRRKLVQSQAAERNRLLKLLESANIKLASVATDVFGVSGRLMLRALIEGQASPKEMAQLAKNKLRNKIPELELALEGRIEEHHRFLLKLQLDRLESVEKPIEVLQQHIQQKLQPYTAKLALLDEIPGVDCILAAVIIAELGVDMSVFESVSQLASWAGVCSGNNESAGKRKSSRIPKGNVYLKTALVEAAHSAAKTKGTYLRDKFYRLKARRGYKRAAVAIAHKILVAIYHMLSQQVSYNDLGDLYLDNLNKHHLTRNLVHRLERLGYAVTLTLQDKAA

SEQ ID NO: 267905 - protein, 330 aa, unidentified
MKNYVDVIGIDVSKQTIDAHIHHKAKHRKFSNTSKGFNALLLWVEKYLEGQSYFLCFENTGHYSTNLSVYLSERDIDYVEESPLAIKRSVGIVRGKTDRLDAAMIARYAWLHKEELALSTPKQQDVQELGRLLATREQLVRDRTGKMSSLNEMQSLLSSPSTDDCCKILTKSIHYLTKQIDALEQCIRGLMKRDESFDRNFKLLNTLKGVGLILASQIIYHTGNFKRFDSWRQFSSYCGVAPFEHSSGTSIRRRNRIHHIGDRKMKPLLTMASVSAIQCDKELKHYYKKKLAEGKPKMVALNNIRNKILSRAFAVVKRGTPYVELQQYAA

SEQ ID NO: 267906 - protein, 345 aa, unidentified
MEQISRIGMDTSKHIFQLHGVNAAEQPVLRKKLRRKEMFAFLEQLAPTVIAIEACGASHHCARLLQSFGHSVKLIAPQLVKPYLKRGKNDAADAEALCEAMSRPTMRFVPVKTAEQQAALMLVGVRDRLIRNRTQLTNAIRGYAGEFGLTAAKGRAHLASLLDRIQADESLPALARELFAAQAKEYAQLQAQIDEVDARLMAWHRADECSRRLAKIPGVGPIGAVLLTMKTPEPELFRSGRQFAAWIGLTPKDHSTAGKLRLGGITRAGDAGLRSVLVVGATTVIQHAQRGGRPSPWLTQLLKRKSPKLAAVALANKTARVAWKLMVTGENYAATAAPAALPGAA

SEQ ID NO: 267907 - protein, 478 aa, unidentified
MRADKRWRTRKEKKEWARRLQSNDPGLDVIHPQAAGIDIGNASHYVAVRPERDAEPVRRFECFTADLHRLADWLNRCGVTTVAMQSTGVYWIPLYDILEERGFEVYLVNARHTKNLPGRKSDVQECQWLLKLHTYGLLNNSFQPTSQIRVLRTYWRQRAEHVRAAASCIQRMQKALTQMNVQLANVISDLSGLTGQLIVRAIVGGERDPQKLAELRDPRIQASPEAVAKSLEGDWRPELLFLVKQEVDTYDTYQKRIAECDEQLQLQLASFASVAPEVAAAPLTPVQGDDQPKQAKAKRKKPAKNAPRFNLEQELHRVAGVDLTRIDGIDVMVAQTILAEVGLDMGRWKTESHFASWLGLCPDNRITGDKVVGRGTRHVVNRAATALRMAANALLRSHTYLGAQYRRLRTKLGAPKAITAMAHRLARLVYRMLKYGQAYVDKGAEYYEQRYRNQQLQFLRKKVAQLGFQLTEAEAQTA

SEQ ID NO: 267908 - protein, 438 aa, unidentified
MSNKVIFNLDELFISVGIDVGADFSWMSIALPNQQLLGKPYKILHSSMDSLATAVSKIKEAEELYSLESRIFLESTGIYHYPLFCYLRDKGFNCSVINPIITKNSTNINIRKVHNDRFDSKKVALVGLKPDLKVSLMPSDLALNCRNLCREYYDLMDNRSAYVNKLQGELRMAFPQYLGIFSKVTTNTSLTLLDKYTSPNAFLEADMQEIIDTIKSTARFGLTYAHNKYNAIIQAAHDANEFGHIIDSNIKRIRLYISFIRKYDEEIESILDAMHELVDTNEDTDFVKQIHLIESFKGAGFLSAISLMGEIGDFSAFSKPKQLFAYFGLDPAVKQSGKFEGTKIQMSKRGSSIARRVIHTLTLQSISVSRTGEAKNPVLRDYYLEKCKSKAKLVAMGAVSHKVCNIIFAILRDNKPFEIITPQEHIKQYNAAKCDMAA

SEQ ID NO: 267909 - protein, 370 aa, unidentified
MLNTTTFVGLDVHARSIKAVALDAMTGEVRSATFGYDAAEVAGWVSSVDPSAKCVYESGVTGFDLQKRLSSMGIDCVVGAVSKMIKPSADRRRKNDRNDAEFLARMLSVGNVVEVWVPDDECEAARDLTRALDDAREDLKRCKQRLSKFLLRHGLVFSETNAKGQRKKNWTAAHWAWIRSISFPDKADDEVLAYYIDAARQAMEDKARLERLVEAEASKPRWKKRVDSVRCLKGIDVTSAADLVFEAGEFSRFKSARSFAAWIGLTPSEHSSGESVRQGGITKAGNKHLRRVLVESAWHYLGCSPHSKDLAKGQVPDPAARRHAAKGVRRLVGRRAAMLERGVHKNKANVATARELACWCWAIGRMVENG

SEQ ID NO: 267910 - protein, 376 aa, unidentified
MRKVALDLGARKTAYCEVRDGKVVLRGTENAVRDFEAQLGPEQPEAIVAIEACREAWHVHDLLTSWGNQVVLVDTTRSRRLGIGQHGRKTDRIDAEVLALALDRGGIPAAHVLSPHRRELRRWLGVRRALVESQAQLVTTARGIAREYGAPLPRCATDRFISNVRKLKSDRDLDAVLEPLLKMLETISAELVGVEQALAKLCASEPVVTLLATAPGVGPIVAASFISVIDEAKRFTSAHHVQSYLGLVPSEDSSGGKRRLGAISKKGNKYMRALLVQSAWIILRKSDTSDPLRLWAQAVAARRGKHVAVVALARRLVGVLWAMWSKGNAYEASRLAVASSRGLTEAAQNLEFRAEALKKASKKPSMKRFTAAATPI

SEQ ID NO: 267911 - protein, 481 aa, unidentified
MKIKSIYPARNSSQLREVLGKYSPGELLYAPIDVAKYNHKACAVNFFGDILTPAFEFSNNAHGVKFFISKITEATRNAKAKKIFIGLEATGHYHQNLTLHLRSLGYEVAVINPFDSWKERLNKSSKTDKIDLGSIAKSLISRKFSSSTVPEGVYYNLQRATRTRRKFVNRRTSSKNIITGLLDNLFPGLWDKEDTIFSDRWGKASLSVLEHYPTPQMVLRLGEKRLTRFLKKGTTKLGEKTARKIISAAKVALTRSPYEQTMDILALRSHLQAYRLYEEIIFHLEKEIAYLLVQTPGTYLLSVPGISVTYAAEVTAEIGDISRFAYANQIISLAGTCSKKDQTGEHDPQNLPISKKGNKFLRTVLNQAGLSLNTWCPDFNAYYSRKVEEKKGRCGIARTATGNKFARLAFALMKHESLYHPRSFNTLVQDPGNYYLSVYGEILKKLRAFSSEKILPQSNYLEKIKQKLEKEYAINLSEVKG

SEQ ID NO: 267912 - protein, 432 aa, unidentified
MKAWNEIKHYAGFDWAKDHHDVIVLDAGGKTVADFRFDHTAGGWDEFSKNLAEFPDVAVAVETNHGGVIERLLERECCVFPVHTRSAKGYRQRKVPSGNKTDKVDAWSLADALRLDGAHWKQLSAQDPLIKELRLLCRDEVALIRDRTALITQLRQSLYDYYPAALEAFDDWTMPAAWAFIIAFPTPDVLAKAGKRKWEKFLHVHKLARPATYQRRLEIFARAHQFAGSEATIRAKSKLAVARAKQLQLLETQIAEYRQEIRRLFVQHPDAKLFGSLPGAGDKIAPRLLAEIGDDRALFPDAQGLQCLAGTAPVSYQSGQIHRVYLRRQCNKSLRNVVHLWANLSREFCPWAATYYAALRAKGKSHACALRALGQRWLKIVWKMWQTRTLYDADLHARNQLKHGSWVLQLVNQPAVVKAEKSSGKESPARNP

SEQ ID NO: 267913 - protein, 339 aa, unidentified
MPQIWAGVDIGKTHHHCVVLDGEGKRLLSRRVLNDEPELLALLADVLALDEDAVWAVDVADGMATLLISVLLNHGQQLLYIPGLAVNRASAGYRGTGKTDAKDAPVIADQARMRRDLTVLRPDDEGAIELRVLTNRRADLNADRTRRINRLRGQLTSVFSALERSLDLGNVGPLILLTGYQTPAALRRTGRKRLETWLRNRHVRSPEALATVALEAAERQHTAVPGEKITAQVIHTLAKEVMGLNEQITEIDKLIAARFREHELAEVISSMPGIGPLLGAEFLAATAGDMGRYGTPDRLASLAGVAPVPRDSGNVSGNLHRPRRYHRGLVGGRGKSSYM

SEQ ID NO: 267914 - protein, 371 aa, unidentified
MKEYNTVIGIDLGDKKHHFCVLNESAEIEQEGAVTNSQAGLKRIFGGYEPSLIAIETGTHSNWVSSLLEKLGHTVLVANARKLRAIYSNERKCDRLDAEMLARLARSDPKLLSPITHRGDEAQTDLSVIRSRDSLVTARTQLINHVRGVVKSHGERVRLASAASFHKVAREVLPGALRPALFPVLEIIEKLTEQIKEFDRDIERLSKDKYPETELLRSVPGVGPITALCFVLTLETPERFTTSRNVPAYIGLVPERCQSGDSDPQKRITKCGSTHLRCLLVSSAQYILGVHGPDTQLRQWGERIMARGGANARKRAVVAVARKLSVILHRLWESGMLYKPFPNAPEEDALNSPTETGPERTAELTAALVAT

SEQ ID NO: 267915 - protein, 450 aa, unidentified
MSRPQVIDDEEHERVHERVAAIDVAKDSGMVCTRTPHPSRPGARRSTVWTVTARMKAIRGLGRQLKKDGIEIVTLESTSDYWRIWFFVLEACGLAVQLVNAAQARNLPGRPKTDKLDAQWLARLTEMGLLRASFVPPKAIRDLRDYTRARTRLVHERTRCWQRLEKLLESALVKVSSVASKLTTLSAQDMIKAMIAGQRDPKVLAGLARGRMKARHDDLVEALDGMFDDHHGELAGLLLDQIAFLDTPIAALTARAAELTAAMPAAWGVDPDGTTGPGAGTTPGAPVLNAVARLAEIPGISEDLARTIIAETGLDMSRFPTAARLVSWAGLCPSARQSGPRTRAGKKGQGNGYLRGALGQAAIGAARTDTFLGERYHRIARRRGKAKAQVAVARSILIIIWHLLADPGARFTDLGPGYYQARTDKDKKIKNHIRQIEALLGHPITITNAA

SEQ ID NO: 267916 - protein, 433 aa, unidentified
MKVMYERVAGIDVHKDMVKVAIRSPGEKPWTRKTEILEFRTFYGVLQEMARELRKRGVTHVVMEASGVYTEPVYYALVEQDFTQVAVINPAHAKALKGHKTDARDCARLAELFECGLLRGSYIPPAELKEVRDLTRYRMKTVQARTSEIQRLGKALESAGIKLGSVASSITGTASTAMIEALIDGERRGGVLADLAIGRMRAAGKLTDLSMALAGRFTEHHALLCRLHLDRIAVFDDAVDGLDKRITGKAARWQREAGLLTSVPGFGNVVAQAWLGEIGPAPHRHFATCDKLASWVTLCPGNNISARKRKHGRTGDAGTYIKPMLVQAAWAAIRVRGRLQARYNRLVRRFGGDKNPGAKKKAITAIAHTLLKIAYQVLKSGTPYQEPGADFYTRRESPEHKQAWLERQLQKLHPGCTITVTISPPEAALPPRG

SEQ ID NO: 267917 - protein, 338 aa, unidentified
MTTFQSFVGVDIASTSFMACVGTMPWKLTVKPVQFDNQEDGFVSFLGWLQEHNLSPKHTVVCMEATGVYSEGLAYFMYASNYTVAVEPPLNIQRKFPVSASKTDELDCQYIAEYACRYVDKLSFWQPRAEILEQVKVLLTTRQHFSVQLTGHKNALHAVNRKKVSSTLAKQAHQSMIEQIAKQITAIDKEIRRLIDSDPTFKQTLLLLLSVPGIGLQLAAHLLIHMQTTLDPKVLAAFIGICPIQHKSGSSVFSTPTSRHYGPSVLRKLLYLAACSVRTHKKQFQQYFFRKVAQGKHKKLVLNNIQNKILKIACAVVRSNQPYIPNYVSVNPLVFKNH

SEQ ID NO: 267918 - protein, 423 aa, unidentified
MKSASNTPINTTLPEEPPNDVTAGLDWARDDHAVSVVNGRGREVARSTVPHTAAGLRELVAFLGRHGVGEVAIERPDGPVVDTLLGAGLTVVVISPNQVKNLRGRYGSAGNKDDRFDAYVLADTLRTDRARLRPLVPDTDATVAIRRTCRARKDLVNHRVAVANQLRAHLRNVLPAAVGLFTDLESAISLAFLTRFDTQDKINWLTPQRLGDWLAKQGYSGKVDPAVLHQRILDAPPGATGGHGATQAHITASYIALLHTLVAQIKALSTHIDRQLDAHADAHIFTSLPRSGRVRAARLLAEIGDCRARFPTPESLTCLAGAAPSTRQSGKSRIVGFRWSCDKQLRDAVTDFAADTRLANPWAADLYNRARARGHDPPPRRTHPRPGLAAHHLALLARQHRLQPQQTPRTATHPRSTRGGGLT

SEQ ID NO: 267919 - protein, 369 aa, unidentified
MGENTTFIGLDVHKETITVALAESGERGEVCEYGRIANSPEALKGLLRKLQRTGRQLQFCYEAGPCGYGIQRQLTAAGHECVVIAPSLIPRKPGERIKTDRRDAVSLARLHRAGELTPVWVPDPAHEAMRDLVRARLAAVRALRQARQQLSGFLLRHGRHYGRPAWTLMHRRWLSGLRFEQAVHHVVLEDLIAAVEAATERRDRLTRQIEAVLPEWSLASVAQALQALRGVALVNAVTLVAELGDITRFASPRQLMAYLGLVPSEQSSGQSRRQGAITKAGNGAARRMLIEAAWSYRFPARVSRDLLLRQEGLPQPVRATAWKAQLRLCRRYRRLAHAGKPATVVTTAIARELAGFVWAIAHQFASRTA

SEQ ID NO: 267920 - protein, 386 aa, unidentified
MPQLNDLSRSRVILKRDATLIAVIEMGQSSWLVAGIVPGVERQPLKKLPVDESALLKLLNRWREEAEKAGHRIERIAIAFEAGRDGFWLARWLRARNIEAHVIHASSVAVSREHRRPKTDRLDTELLKRAFLGWLRGERDHCKTVAIPTLAQEDAKRPNRERESLVGEQSRIVNRMKAALARLGIRGFNPKLKKAVERLDGLRTPEGEPIPPNTLAELKHDMERRRLVRSQIRDIEGTRLERLEQAPGDGPHVMVRLLARVIGVGVETADMLVQEVLSRNLRDRRAVARYGGLTGSPDESGKKRREKGLARSGNARVRRGMIQLAWRFLMFQKDSALAHWFYARTKNAPQTRKTMIVALARKLLIALWRLVREGAIPEGIVLRPAL

SEQ ID NO: 267921 - protein, 340 aa, unidentified
MEHVTNPQPLETTGEAPAFALGIDTSSNKLDLALLSAAGKLRTKRISNDETGFETLLSWLSRSAKDFHTVHVCLEASGGYEEAVALFLVEAGLRVSVVNPRQIKAYGEAQLKRSKTDRSDAVLIARFCQREQPLLWQVPARELRQLRQMTRGLQALKQDRDRTRNRLDRMEQGPARKALETVLATYEAQIEALEREIGAHLDEHAELSRQRDLLVSIPGVGSLTAALVLAELGDITRFESARQAAAYAGLTPSHHESGTSVRRRSRLSKLGNSRLRHMLYFPAMSAMRHNEVVKRFAERLLGQGKKKMVVLGAAMRKLLHLCYGVLHSGRPFDASLHPTT

SEQ ID NO: 267922 - protein, 369 aa, unidentified
MIDYFTLTFYFMKAIKQAVGIDVAQDELVCSYGILFEDLSWQIKSRKTFANHSSGFKACLKWVESMRDVNSEVLFAMEATGVYHEKFAHWLVDMEQNLSIVLPNKISNYMRTLSIKTVTDSTCADAITQFGLERKLDYWAPPKPIFRTLKQLTRERDQIVAERVTIDNQLHAEKTEAFPNANSLKRLDARRRLLCKQEQEIKCEIRQLVKSDQELDQEVKRITSIPGVGELTAVIVLAETNGFELVRNKRQLSSYAGLDVREKQSGTSVKGKPRISKKGNRSLRKAMHLPALAAIRHCEINKATFARLVGRHGIKMKAVVAVQRKLLELIYILFKNKTTFDPAYEEKREDGKNHTPLYSLADADLSNEI

SEQ ID NO: 267923 - protein, 462 aa, unidentified
MPKQDRKKKSPRGKRSQDWEALPALNQNAAGIDVGNTEHYVAVPAGRDAEPVQNFGSFTADLHRMARWLKACGIQTVVMQATGVYWIALYQILEEHGLQVNVVNARHTKTLPGRKTDVLECQWLQKLHTFGLLNNSFQPAEEIRVLRTYMRQSEKLVAAASTCIQHIQKALTEMNVQLANVISDISGLTGMAILRAIVSGERNPQALARLKNERIQASREEIAQSLEGNWRQELLFVLEQSLALYDTYQIKIAECNLGLEAHLKRMESKTTVEQQPAPKASNTRSHRKQMPGLDMGSQLYRIAGVDLTQIDGIQVQTAQTVISEVGVDMSRWKTEKQFASWLGLCPDNRISGGKVLKRGTRHVVNRAATALRMAAWSLFRSQSALGANFRRLRRKLGAPKAVTAMAHKLARLVYRMLKFGQGYVDKGMEHYEAKYRQDQIKWLAKSAAALNLQLTPLTEVVD

SEQ ID NO: 267924 - protein, 430 aa, unidentified
MNYTQNQRISQITESTLIVGVDIAKHKHVARAQNDRGLMYGKAFSFSNTRQGFDAFCHWMKSLMTEHEKTEVIVGMEPTGHYWMTLAAFLRSRGVPVVVVNPMHVKKSKELDDNSPTKNDPKDARVIAQLVKDGRYSAPYFPTGVYAELREAVKIRDHLASELQRTQAKVHNWLDRYFPEFLTVFTSWEGKAALETLKRFPLPQDILQAGVSGILTTWKEIIKRGLRPKRAHELVEQARQSVGLREGTKMARLELRTLLTTYEVMQQQLEQVMKEIEDFLNDIPGVAHILTIPGMGIITVASFFAEVGDLSRYQHPRQLQKLAGLNLKENRSGKHRGKTRITKRGRPRLRALLYRVIRPLVAKNPAFQALHVYYTTRQQNPLRKQQSLIALCCRLLRIMFVLARKQVDFDVNKMMKATPLCSQGLSFFAA

SEQ ID NO: 267925 - protein, 371 aa, unidentified
MESIIYVGMDVHKDSYSICCYKADEDRFYYEKKVNAESKRVLKYLESVNKEFGEDCLLMCGYEAGPTGFGLYRDLIKAGYICVVIAPTSLKHSSNHKIKNDKVDARFLAKTLFTKDYSSVHVTTEHEEAIKEYCRMRLNLKKELTRAKLVLQSFLLRHDKKFTEGNSWTLKYRDWLNKIHFEEDYLNEALNEYIISVNTYEARIKSIENRLKQISLDPAVKDKVEKLVCFCGIETVSAVTIVSKVGDFNRFEKAYHFSNYLGLTCGEKSSGQKEKHLGITKSGDRELRCLLSECAKSIKKTSIKGKKSKRLLDRQKEKDPKVIAYADKCRYRLRSKIAYLELRGKSANVATTAAARELACFIWGMMTDHIA

SEQ ID NO: 267926 - protein, 466 aa, unidentified
MDQMTLGIDVACRAAHQASLADASGKFAWSGRRFRTTAADLDRLWESLPAGIELTVVMEPTRNAWVPLAAWFRRHGAGVILVPPEQSADLRDYYSKHAKSDHLDSRMLARLPLLHPDGLRPAEGLGPADALRRATKLRASLVKRRSAILARLDAYLELLGPAWHAAFGGDLALNTPLRFLAAGYADPHALRRLGRARLTKFIWRYSHGAWGDEHATRLLAAAAETIALWAEEISYPDLAEDIAAEARLALALSTEIRDLEQKIAALLHHLDPAGIMQSVPGVGSVNAAQILSRLGDPARFRSLAGARSFTGLVPSLTASGTSGRHGPPTKSGDAPLREALFIAADHARRADPALAARYHRLMVTCGKHHNSALCHIATALLTRIIACWRAGTPYQVRDTDGTPLTTAQGRQIIAQRYQVSAELRAQRRTSHTRTGTSRRHQESPGAPTPARPHANATTPARPLDTT

SEQ ID NO: 267927 - protein, 340 aa, unidentified
MNFYNRQHQYYCGIDLHARKMYVCILDQKGKTMVHQNINTEPEAFLQSISPYMEDIVVGVECVFCWYWVSDLCAKHQIPFVLGHALYMKAIHGGKTKNDKIDSYKIALLLKGGNFPTAYSYPAPWRATRDLLRRCGELVAHIQNTKTQYNLPGFTKRLARKYNHDGVAEKFENPEVRKSVEVDLAAIAALNRILNQLEWHIEKTAEQHDYHTLYLLRSMPGVGLILALVFLYEIEDIKRFPSVQDFSSYARLIKPVKTSDGKWAGKSNGKIGNHHLKWACNEAAILMLRESQQAKQYVAKLERKYNKGKALGIFTHKIGRAIYFILKNKEAFDMEKFFSQ

SEQ ID NO: 267928 - protein, 344 aa, unidentified
MSIKVVGIDMAKNLFQVCMLSSDGQILSNRKVKCDKLLDTVRQLPEKTDIAMESCATSHHWGRIFQELGHSVALIPAQHVKPFVGRQKNDANDARAICEAFSRPDIHFVPVKSVEQQDLKAIRSVRKRLVENRTALSNQIRGLAAEYGVVFPLSIKALRSHLPIALEDAENALSPVMRNLLQTLYCDFVSLSEEIDEMTQRVTMLSQQDPRYEALRNIPGFGPILTAALISEVGAGHQFQNGRQFSAWCGLVPKQNSTGGKSCLGSLSKNGNRELRALLIHGARAVARCGANKADSMGTWLRGLIARRGKAKAIVALANKLGRVAWRILVKNSEYDINQAFKPV

SEQ ID NO: 267929 - protein, 376 aa, unidentified
MENDSTLYVGLDVHKDSITVAYALGSGEVELLGKIGTTQTDIDRLCKRLQSKARRIRIVYEAGPCGYGLYRQLVQKGFDCMVCAPSLIPKKPGERVKTDRRDAVKLVRSLRAGDLSAVYVPTVDDEAFRDLARAWVSAKDDLKRARQRLKAFLLSHGVRYAGRADWGPAHRRWLSAFSFDSLWQQLAFDELRRTIEDRLAQCARLEAALREAVVNWRFYPVVLALQTMRGVQFTTAVGILAELGDLSRFAHPRQLMAWLGVTPCEHSSGDKRRQGSITKNGNSYARKLLIEAAWSYQHPARVSPEIQRRHEGIPKPIVDRAWDAQVRLCRRYRKLVARGKQKNIAVVALARELSGFIWDISRLAMSLAIPREELTA

SEQ ID NO: 267930 - protein, 339 aa, unidentified
MQENQEYVGVDVSKDTLDMLVYSTSEIRSYTNNDAGIAGATTWLKQLKPAITVMEATGGMEVSLYIALQEANLPVAVINPRQIRDFAKSVGILAKTDKVDAKVLARYAATIQPEARPLPDEEARRLDTLVTRRRQLVGMITAEGNRFATTRDKMMKQRIHAHIDWLKQELAAIDKDMSQMMKDNPRWRAKDKLLRSVPGVGPVLSTTLIAELSELGRLNRKRIAALVGVAPLNRDSGKHQGKRSIWGGRCSVRQPLYMATLTAVRFNPKIRSFYEHLLANGKEKKVALIACMHKLLTILNAMVKHGSYWSCTYSDLNNSVIPVPAKTVARWERIKVRVK

SEQ ID NO: 267931 - protein, 345 aa, unidentified
MNTIIVPQKQAKGKSVCLSAFDHFLALDWSMKVMAIGHMRRRSKEPETFERPSDLKELKQYLATLKGRKILTIEETTTAQWLYVELIDHVDQIILCDPYHNRLLSNGPKTDKIDAGKLCLLLRAGLLKEVFHSLSGLYELRRLVSAYEDIVKAGVRVLNQKASMEQGHFESGKHAPFILEHVAKSIELYQRSKEQYERKFSDLSKRNKLVKNLMEVSGIGSIGAVKIIAIVVDARRFARAGNYLSYCGLIKHEKISGGRSYGRRRPRFNHTLKAVYKLAAMSVISGNNNPIREYYEYLLAKGIAEHNARHAVARYIARLTYGMLKTGKRYQAYQWSNQVGGHQAA

SEQ ID NO: 267932 - protein, 307 aa, unidentified
MEYFAGLDVSLRSCAGCVFDRKGAIVSERELPCEIEEIARYLTALAIPIERIGFSSGTLSQHLFHGLTAERFDVVCMEARQVSAALSAMSNKTDRTDAHGIAQMLRTGWFSPVHMKRREAHGVRALLSIRKALLSKTIDLAKEVRGLLKIFGIRLPKTVKHGSFDGVVRPMIEMDEVLAHAMLPLLDARLVLYQHFLELDRRVKQAARQDDVCMRMMTVPGVGPIAALTFKAAVDDPARFKRSRTVAAHFGLTPRRYQSGEQDTPGRISKAGDRDVKVDTLRRRKRLADANYGGAQIKSCSARQAIA

SEQ ID NO: 267933 - protein, 369 aa, unidentified
MLIIGLDYHPGFQQIAFVDTETGELQERRLQHREEAEKFYRDLAAQGVRVRVGMEASGHARWFERLLAELNFELWMGDAAEIRTKRVRKQKTDRQDAQLLLRLLLEDRFPRIWVASWENRDLRQLLWHRHRMVQARTRIMNQLQAVALNEGLRCKKRLWGEAGRKQLESFPLAPWASRRRRDLLELLDRLNPTIAELSQAIEQEVEKSPEAQRLMTHPGVGSLTALAFVLILGTAERFRSGKPIASYLGLVPAEESSGDRRRLGHITKQGNSLLRFLLVEAAQVTVRSDPEWRSKYFHLAMRRGRKIAKVAMARRLAIRLYWMWRKEWDYEQFTKFGSHAGQPGNRFGVPLNTEITIGHPAPLLRGSSN

SEQ ID NO: 267934 - protein, 406 aa, unidentified
MTSCSYFAGIDWASQSHVLCVIDAAGGVALRLEIAHSREGIEHLIRQLKSFAGNGGLAIAIERPSGVLVDALVEAGLRVVPIHPNVLKASRPRYRSAGKSDPGDAYMLADLLRTDGHRFRALEPQNDKIRALRALVRTRDDLVAERVALANQLRSLLESFWPGAAEIFFDIDSPIALAFVARYPTPQSTTHLGEKRLAGFLAQHGYCGRRPAGALLERLRSAATGCTGELEAEAKGELARSLASILERLVAELAKLTARIEHTVASLPDGQIIMSFPRSGRICAAQILAELGSVRERFPTEAQLAAEAGVAPVTYQSGKQRSVTFRWACNHRLRRAITCFADQSRHANTWAADVYHRARSRGCDHPHAIRVLARAWVRVLWRAWFTKTPYQPHLHHTAAAFAATTG

SEQ ID NO: 267935 - protein, 346 aa, unidentified
MNQIIRIGMDTSKHIFQLHGVDAAEQPVLRKRLGRKQVLAFFAKLPPTVIGMEACGASHYWARELGRLGHEVRLIAPQHVKPYVTRNKNDGRDAEGTCEAMSRPTMRFVPVKTAEQQAALMLAGIREQLIARRTQLSNTIRGYAAEFGVTAAKGLDKIEPLLAQIAQEEDLPALARELFATEGREYARLQAELKAIEARLMAWHRANACSRRLAQIPGVGPIGATALVMKTPDPRAFASGRHFAAWLGLTPKDHSTAGKTRLGKITRAGDEVLRRLLVAGATAVIQQVRRGRGRPSPWLLAVLKRKPPKLAAVALANKIARIAWKLMTTGESYDGARMPGASAIAA

SEQ ID NO: 267936 - protein, 409 aa, unidentified
MRYYLGVDWADQTHAVWVVDEGGTKVAMRTVPHTAEGLTEWGRELDEWRAQGIELWAAIERPEGRVVDFLLDHGVVVYAVNPKTLDRARDRFRQSAAKSDPFDARVLADFLRTDHAHLRAVQPSSEAAQELKLLTDDYQRQIRQQTRLVNQLTTTLKAYYPRGLEVAELTTGLAREFLQAYPTPATVTALTERQWQRWAHAHRLSETRTQQLWVVLQRPQLPVPPHVVRAKARLMQSLVAQLMVVMEGVGAYREAIEDFFARIPAAQWIRTLPIGDHGITAPTLWARLGDAPGRWESFRHLQAQAGTVPVTIRSGKQQVVRFRFACDKSLRYIIDHVAFLSLRWSEWAHAYYAGQRARGHSYRQALRALSAKWLKIIFVMWERQIPYDEQYHLAMMTRQQLRQRQEKVA

SEQ ID NO: 267937 - protein, 346 aa, unidentified
MNKHDLCGIEVSAAHLLAGLEREGASGTRREFPNTPQGHQALVNWLAAPGRTVRVVMEATGLYGLDLALRLDAETGLELMIANPRAVRHFAHALMKRSKNDPIDVGVLLELVRRMHFQTWVRPSPAALALHALAHRLESLTEMRAAEKNRLHAAQLSLALPAAVVRDLQRSLRSLERALVRITRQAVEVIRQDPGLNLRYQLLLSACGIAPTSAVQILAQLAVLAPDLDVRQWVAQAGLDPRQYSSGSSVHRKTRISKTGNRHLRRALYMPALVAIRHQPHLRAFYLRLLARGKTKMQALVAVMRKLLHAIFGMFKHQQPFDGSRLCPLPDENSCAQPSFSTTEAA

SEQ ID NO: 267938 - protein, 364 aa, unidentified
MKAQKEAVTRYVGIDLGKRTYEVAIVEKGKVKKSNGKTFSAGRQALYKKLRSSDKVALEAGNMAFIIAKELEGSVGCRVYVLNPGNLALIYGSMKKTDKEDSMKLAHILEDFQEERLPVVPVPSDKEMQRRKLLAAHRRVQQSRSREINKLHALFLAQGITTMVRADLSTNEKRKEAIKELSGLEREESEYLVSCLELHEQRIEVLNRQIKKESSGDEVIERLQSVPGVGPMVAFAFVAHVAAERFENASQVSNYLGLVPRVYMSGQTVRYGRITKRGNGYLRALLNQAAWALIRTKKSEKLKERFEYMTIEKSISKKKAIVAISRRIAELLYAMMRDGTWYASRPFIREKKGLEELAQVALSA

SEQ ID NO: 267939 - protein, 389 aa, unidentified
MIYVGIDVAAEKHACCILTESGKVLKQFTFSNDMPGFEKFHKALLTPSETKIGLESTGVYGNNLAEFLRRNGYETHIFNPLLVKKSIQATTLRKTKTDKSDAKHIAQYTKEHSQPNPKISYHTSELKSLSRGRFSLVRERSKVKAQAKGLLVQLFPEFSQIFSDIFGAAASAVLRQLPSARMIAQCPVGVLTDLLRTASHGRLGKVKAELLIDLAEHSVGIQSMALELQMQMLLQQIDLFTLQINRYEAAIKSEMETIQSPITTIPGIGCVLGAAILSEIGDIRRFTTPAKLQAYAGVDPSVGESGTSVSTPGRMVKHGSHYLRWALCQAARCVSLYDPIFAAYMKAKRDEGKHYCVACSHVAKKLTRVIYSILKNNTAYSLTYSQIGA

SEQ ID NO: 267940 - protein, 409 aa, unidentified
MKVFCGIDWAESHHDIALIDGAGDLVAKRRIKDTADGYGELLQLLADAGDDPADPIPVAIETPRGLLVAALRGTGRKVYSINPMAVARYRERHTVSRKKSDHLDAMTLANILRTDAHAHRPLPDDTELARAITVLARAHQDATWRRTKASNELRSLLREYFPTFLAAFAGRTTNLTSREARAVLAIALTPTAAAQLTRPRIAAALRRAGRQRGIDVLAGQLHQALRQPQLHHPPLVERAMGEQARALLAVLDTECANADRLGETVAEAFHQHPDHKVITSFPGLSDQLGARVLAEIGDDRDRFADARALKAYAGSAPVTRASGRSISITHRTIKNDRLAGAGFVWAFAASTNHEPARAHYQRRRNQGDRHSAALRHLFNRMLGQLFHCLQTSQTYDPDKAFTPTLMTAA

SEQ ID NO: 267941 - protein, 366 aa, unidentified
MKQVTTFVGIDAHKKDLFIAMLIGDQSTPVTWQLANEPNAVRRLVRKLEREAPGPVRACYEAGPCGYALQRQMTTTRVSCQVIAPALVPRKPGERVKTNRRDARKLVELLRAGLLTEVRPPTPEEEAVRDLCRARDDARTDLQRCRHRLGKLLLRRGLHYSGRNWTRAHRQWMASLTWTHAAERVVVEDYLLAIDQVAARLSELDVRLTAIAQTDPYREPVAWLRCFRGIDTLTAILILAELHDFRRFQAPRALMAYLGLVPGEDSTGEKHRRGPITRTGNSVVRRLLVETAWHYQHRPAVGVGLARRRKGQPGRVIAIADKAQQRLCRRFRKLAAEHKPAPKIVVAIARELAGFLWAALQPVAAN

SEQ ID NO: 267942 - protein, 416 aa, unidentified
MQPTLFVGVDVHRQQNVFCVMDQDGQELSERFSFDNNRPGTQELVGRLAHLMQEGDYEQLQLGAEATGLYWLHFCMTLSQDPMLNQWPLTLYAVNPRLTANYKRSFSDLDKTDDIDAFVVADRLRMGRGLPHPFVYDERYLPLRFLTRYRYHLVHNLAREKAYCLAMLYLKASEYTRRDVKPFSDVFGAASRAVLQEFASLEEIAALPFDDLVEFIDVKGKRRFPDPTDNARRLQQVALDSYSLPEPFHAPIQLVLNMSLQHIAHMERQQKRLNSAIAEQMASLPQTLDTIPGIGPVFVAGIVAEIGDIARFQFNQAKVAKYAGFKWRKSQSADFVADETPLARTGNRFLRYYFCEAANIARMHDADYRAYYDRKFREVRKHAHKRALVLTARKLVRLVVRLLTTNQPYRPRRMTA

SEQ ID NO: 267943 - protein, 327 aa, unidentified
MQGWAREGAHSITIAVGVDVSKRELVVVVSGHAALRRYTNDAAGRRRVCHDLAKVAGSGMLRIGLEASGGYERKAVSALRKAGFEVIVFQPIQVRAYAQYLGKRAKTDPIDAHVIALATAAYNGVVRHSDDRLAPLAEHMTLVEQIEEDVVRLKTRRDGFTVTALKARLEAEIKRLTTRRNAEIRSLLKSLRQHHDLAHRLDLVASIDGIGERTALTLIIRMPELGTLSREEAASLAGLAPLDDQSGSIDRPRHIMGGRAKVRRSLYAAALPAAFKWNKPLVDLYHRLIARGATHKKALIACARKLLIFANTVLTRGTPWIKSAAPS

SEQ ID NO: 267944 - protein, 315 aa, unidentified
MSEVDCFAADVSKRELVIAVYPGEVGVKRIANQDAAISAWLDTLPAGSVIGMEATGTYHRRLADLAYERGLVVYVVNPRDVYYYARGMGARGKTDPSDAKLLARYVAHERAHLHPYVPPTALCERLTTLLERRAVLVRTRQALTQSLADLPALAGEKRNLFEAVAALLCGIDRELAALTSSDASTAKLVTRLKTISGVGPLVASLLCALFKRFAFRHADALIAYLGLDPRPDESGQHRGRRRLSKRGHPEWRRLLVAAAMSAARTKAWRDYVNLQRAKALPATAVHVILARKMLRTAFAMFKNGQEFIPPSVQPT

SEQ ID NO: 267945 - protein, 394 aa, unidentified
MKLVGIDVGKNSHHFCVMDKETGEFNVTPSSFSNNKEGFDFLINSLKPYSKKSILLGMEDTGHYHVALLKFLLSNGYTVALINPKTTDLTRKMEGAITKNDKLDTITICDVLDTPERKKQYRITKVDRFDLYEQRQLTRHHHNLKEELNIYCNRLQKSIDLVFPEFNTLFGSKYGVVYMNLLKTFGSAEAIASTDIRTIRKCFEIKGRGGRISLTAEKLKECAKNSIGISSEVETIQIKHLVSQIMLIKEQIAEIDKKIEEFSIKNNSPILSIPGISHFSGTSILAELGDIGNYSKPSRIIKFAGVAPYHYESSQYNAQHTAITKKGSKYLRKTLYQVILPVINNNPVFKKYYRLKISQGKGHRCAQGHCIRKLLRVIYHLLETGQSFDPALLR

SEQ ID NO: 267946 - protein, 316 aa, unidentified
MRRLLSLTVAASAAGVGRMVAWADAHTAGQRRAWVIDGSRSHGIGLTRCLREAGETIIEAPRWLGRDRRGKSDSLDAANVARAALAAQHVATPRADGDREALRILTVCRRHYTDTRTATVNLFKSLILTADDELRQQLRALETGPQVRLAAHLIDADGMDAPSKVRRQQLRTLAAQIGVLDRLMAENLKQIRALVRKVCPALLEQPGIGPITAAIAYTAWSHRGRCRNEAAFAALAGVNPIPASSGRTNRHRLNRGGDRILNSAIHTIAKIRRRCHQPTRDYVARRTADGRNPREINRCLKRYIARQLFRIMEATT

SEQ ID NO: 267947 - protein, 346 aa, unidentified
MHYIGMDCHITTLEFAVVNEGGRLVKAHSVATGVNGFMEFVKTVPPPRTIYMEEGTLAAWALETCVRFKEKLVITDAKKNHWISSSGQKDDPVDALKLAQLARGGYIKEINHPVGQRRRFRELMIAYHDTVRSTTRIKNKIKARFRQNGIQCTGATVYSETYREEWKGKLPQEATLLLILDGLWRQLEQSEQTEKELLAAARAQAKHYPEIKLFRDIPGIGFIHAATISAILENPHRFADKRKVWMYAGLGIMTRSSGGKVYSEKLSTDYNRLLKYTLKQAAEAAIQTKDSPFRRKYLDMTLLHGIAPHRAKLTIARDMLATMWAMWRKGEKYSPEIREKAAHKQG

SEQ ID NO: 267948 - protein, 466 aa, unidentified
MENNYILYVGMDVSKGKADAAILKVSDRRSVKPKFLRKKLSFKFVKSEVASFLETVRSYSDVNCTSICFALEVTGIYSTNVYDYIKANLYENESIKFLNTDFVNQWRIAHNIAKSDPLDAQTISTIIGTDLDVQYVNDNVFENKNGYQDLKALVHRHYQIKKIYSQEINRLIAQCDCLFPELQYVFEPKSAAFIAVLSSYPTTHDIINASRVEVFDVVYEATKYRCSMDKVDKLFELCQDTLVPDDISSYGKSIILDLVENIKNIKGQLKSIERYIKDIASLNPAYKLLLTITGCGPITAATVIAETGNIRRFKNADCFVSYSGTSPRNKRSGTSVETMGKISKKGSRYLRHAIYMIAEFARRHNPVLKHQFERIKNGNKKRHKLANIAIANKIARYIYSIMKNKSSFVILHDHIMRLPEETRDTFFNSISLDFPKNTRKQIYQYSDINGELHRFVYIKTDEMIPA

SEQ ID NO: 267949 - protein, 351 aa, unidentified
MLIIGVDYHPSDQQIAFTDTETGECGEQRLNHSDQEAEKFYRDLKQKGVRVRVGMEATGYARWFERLLAELGIELWIGDAAEIKTKRVRKQKTDRQDAQLLLKLLLEDRFPRVWVPDPENRDLRQLLWHRHRLVQMRTRIMNQLQAVAMNEGKRWKKRLWSEQGRAQLEKFVLAPWASRRRQDLSELLDRLNPTIEQLTAAVEQEAKKRPEVLRLMTHPGVGPLTALAFVLIIGTPERFRCGKQIGSYVGLIPCEDSSAGRQRLGHISKQGNALLRFLLLEAAQAAVRYDPDWRRRYLHLVMRRERRIAKVAMARRLAVRLYWMWRKGWEYSQTVEFGSYAGQLVTGHGAN

SEQ ID NO: 267950 - protein, 334 aa, unidentified
MEKITTAGIDLAKRVFALHGVDGAGRVGLRKTVRREQLMQTVAALPPCLIGMEACSGAHEWARRFQELGHTVRLMAPVFVAPYRKSGKNDGNDAEAICESVSRPNMRFVPVKSAEQQAILALHRVRQGWIAERTATINRIRALLTEFGVVLPNRAQHVRRGAMAAAEALPALARRALEDLRSHLGTLDERIGAYDRELEAQARASEAAQRLMQIRGIGPITAVAIVATVGNARDFESGRQFAAWLGLTPRQHSSGGKQRLGHISRRGDAYLRCLLVQGARSVLYTAMRHRDRLSRWVCTLRARRGDHKTLVAIAAKNARIAWALLAKNQTLQTV

SEQ ID NO: 267951 - protein, 346 aa, unidentified
MKQYAGIDVSLECSSVCIVDASGKILREARVASEPEALIAWFGSQGLRYERIGLEAGPLSQWLFAAMKDAGLAVELLETRHVRDAFKAMPVKSDRNDARNIAQLMRLGWFRPVHCKSMSAQETRAMLTARKLIQAKLQDVENSLRGILRGFGLKVGKTTKRSFAARIGELVAGHPALEAIAAATLAVHTVLLREFNQFEKRVRTMSLLDAKARLLMSMPAVGPIISLTYASAVDDPSRFTSSKQAGPLFGLTPKKYQSGETDYSGRISKNGDASVREALYEAAHIILTKPIKGCAQLKSWAMRIARRAGMNKAKVALARKLAVIMLRMLKDNVPFNPAAKTIVAVS

SEQ ID NO: 267952 - protein, 393 aa, unidentified
MRFIGIDIGAETHVVAAVDEASTLLVPATPVSEDTVGYERLRALLGSPGETLVAMEATGHYWKNLFVMLAAEGFDIALLNPLRTHRFAGEDLQRTKTDAIDAVGIARFAAQKRPPATCLPDAATEELRELVRLRDRLRQDFDDRVRQLHRLVDLGFPEFTRYVKDLGSMRATAILATYPTARAFHSVHPKTLAKICYDGRHHVGDELARQLLEAARHSVGQHHAPAYRIQVHYICEDLDLLRRRLRDLERDIETTLAHHEVGTLLTSIDGIGPQTAARLVAELGDPARFPSAKALAAYVGVVPGLKHSGKRAPMRAGLSPLGHAQLRRALWMPTLSAVRCNPWLKAYYQHLRSRGKIPKVALVAAMRKLLIAVYWVAVHRQPFRPQPQIYGSP

SEQ ID NO: 267953 - protein, 345 aa, unidentified
MDNFAGLDVSVKETSVCIVDDTGKIIREVKVASEPDALLAVLADTAYHFKRIGLEAGPLSQWLFSALAEAGLPVICVETRHMRAALKAQINKTDRNDARGIAQMMRVGLYRPVHVKTLRSQKLRMLLTHRKLLQSKAIAVENDLRATLRNFGLKVGMVGTARFEVRIKELVQNLPDLAALVEPLLIVRRVLREQIAILHRRLLVIVRDDDVCRRLMTIPGVGPVVALTYRATVDVPARFRKSKSVGAVFGLTCSKYQSGEVDRSGAISRCGDEMMRAMLYEAAHIMLVRSTKWSWLKAWAMKIARRCGMKKAIVALARRLAVIMHRIWVDGTEFRWTREQATAAA

SEQ ID NO: 267954 - protein, 437 aa, unidentified
MSDKKSVQIRVSVDVGYRRHSVAIGLPSGEVLEEFEIAHRPEGFAEFFSRIEKHQKVRDCEVAVAMEGFNGCARPLDAMVRRRGYRLYNINNLKLARFKEIFPGAAKSDRIDARKGLELFQLSDHLPLAKEVLQEVKGTPQANEVLKRLTRRRRRLVDERVRVISNLQTDLQAVCPGLLEITKNAGNQWFLNFLVSAATLPQLARLRPATVQKIPAVGRKYAVLIEDWQKRAHFSEEVEWVSEMIQEDAQRCLDLDEKIKALKAKIKDVAKDSKIAKVLLSIPGFGTICTAELAGEIGTIERFSKEGSLALYLGMSTLDNSSGKHQGSKQPKHVNTRAKAAMMVALDRHRKYVPQSQRYYEKKRSEGKKHNQAIRALGRHLSRIIYKMLTEEREYEMRPERGNTQSKVSPRSLIKTQIRKPKISAKGENHKIYQQST

SEQ ID NO: 267955 - protein, 346 aa, unidentified
MKHYAGIDVSLELSSVCVMDAEGKIVRESKLASEPEALVGWFAAQGLALERIGLEAGPLSQWLYAALKQAGLSVELLETRHVRTALETMPIKTDRNDARGIAQLMRLGWFRPVHCKTLSAQEMRAQLTARKLVQSKLHDVQMSLRGILRGFGLKVGKTTNAGFEQRIAELISGHPALEAIAKSLLAVHAVLARELRGFERRVYAMARDDERVKLLMTAPGVGAIVALSYVAAIDDPSRFQSSKRTGAYFGLTPKRYQSGQTDISGRISKIGDSQVRTALYEAANVILTRPVKASHLKSWAMKIARRAGPKKAKVALARKLAVILHRMWVDGAPFRAQTASQSANAQ

SEQ ID NO: 267956 - protein, 367 aa, unidentified
MKKVSTAVSKGTKNFPEQKLTIGLDLGDRSSWYCVLDEAGDVLLEQRVSTTPKAMKQVFERMPRSRIALETGMHSPWVSRVLSGLGHEVIVAHARNVRLIGESRRKDDRLDARTLARLARIDPQLLAPVKHRSAKAQADLTVIRARAGLVRARTSLINTARGLTKSYGERLRGCNSRNMKPEKASGLSPELQAVLEPLLAGIESLSEQIREYNEQIEHLAQESYPQVALLKQVKGVGTLIALTYLLTLEDAHRFRKSRDVGCYLGLQPGRRNSGQSEPQLHISKEGDPYLRTLLVQGAHHILGPFGADSDLRRWGLKLAERGGKNGKKRAIVATARKLAVLLHRLWVSGEVYEPLRNSSQAMLPAAA

SEQ ID NO: 267957 - protein, 372 aa, unidentified
MVANFTFDEYAVQCVGIDISMDKFTACLFTYNTASDLGWWTDVIEFRNNKTGFNQLVRWSRKNANKDYPIRYLMEPTSTFHEPLAYHLNAIGCTVFLIFPAKAKEFAKYEGIRSKTDEIDARTLSTIGCTNRKLKPWTPPKPIFRKLKQMCRFNNRMERMRTELTNQQSALKSGANAEASLMNRYEALLNELGKQVENNKKLIKKTVESDSDLKERVARITTIKGVGYLTAVAIIAETDGFSLIGNRRQLASFAGLDVIAYKSGTIDTNHRISKKGSSYIRAALYWPSIAASMHNPQMKVLYNRIASKNTRTKMIAITAVMRKLLLLIFTLWKSGEEYDSKRSFSCTDVVTLSLDQMYKDEPGATLKESALV

SEQ ID NO: 267958 - protein, 347 aa, unidentified
MLYAGLDLSRQRLDVHVLDEEGRTIEVTAATPEVFGLRELVARIARHGDEVSAVIESMNGARFIHDQLELAGWDVEIADAVKVKGLAPLAAKTDKIDAWVLAELSRRDLVPAIWLPDPAVRAERERARFRLHLVRHRTALKNRIHATLIAFGHPVPVSDLFGVRGRELLASLAIPEPWATTLASSLRMVDELEAEIERCTADLQTAGVDHPYVPLLMTVPGIAWVLGYTIAAELGDIGRFASPKKLAGYTGLCPIVRQSGRRDDRGPLAKNGPKYLRWALIEAATHAARNPAYRDHYERTKKRLGRQRGGKVARVELARELSTAIWHMLTKNEPFAPGRPHARPLVA

SEQ ID NO: 267959 - protein, 320 aa, unidentified
MAQRSFCGIDVAKDRLDVMVLPEELCWSVANDAAGWAELVAKLRGLRIAASGIEASGGYERGVVRALLAAGMSVRQINPFKLRQFAKACGVLAKNDRLDARMIALFVATLPTRSAQRYAPVERLAELVTARRQLSDDKVAAENASRLFEDAALRRLYGGRIARLAADIALLDKRLAEILAGDAMLARRYALLVSMPGVGPVLAVTLLALLPELGQMNRKQVAALVGVAPYDFDSGRLRGMRCIWGGRAPVRRVLYMAALIGCRCNPQLRAFHDRLAAAGKKAKVVLVAVMRKIITILNAMLRDNVPWVDHSIGRHILPAA

SEQ ID NO: 267960 - protein, 342 aa, unidentified
MLIIGCDYHPGMQQIAWFDEPSGECGEQPLEHCTGEAERFYRELKRRGVQVRVGIEASGHTRWFERLLAELEMELWIGNPAKIAAPRVRKQKTDRGDARLLLQLLREGHFPKLWVPSPENRDLRQLLWHRHRLVQMRTRVKNQLHAIALNEGVPRKSRLWSKAGRAQLESFALAPWTARRRHDLLELLDQLTPQIAELSQAVEQEAQRRPEVQRLMTHPGVGPITALAFVLVLGTPDRFRCGKQVGSYLGLIPCEDSSAGKQRLGHLSKQGNTLLRFLLVEAAQAAVRCDPQWRRCFVHLALRRQRNIAIAAMARRLAVSLYWLWRNAEDSPAASQSGSHVG

SEQ ID NO: 267961 - protein, 400 aa, unidentified
MRAVFGIDVSKASSEVAILVNGEKVHGYTISNDAIGFSQLLGDLKTVHKPEIIFEATGVYSRRLQAFLDEHGYAYTRLNPLEAKKQLDSLRVRKTDQIDAEKLAQSQFVLNRNPTYVQEEVYQNLRDLSHFYQNLTEDIVRAKNRLHKVLQVTFPELENILSTPSGEQYWNLVIAFPCKDFVLDLSKDELSESIRQSTSKRISDKRVAYLAEKLIALANQSYCAVKKNSPMLEEVRYYTKELLRLSEQRQAVLDEMVELAQPLPEYDILLSIPGIAETTATSIIGELGDIRRFQSANQINAFIGIDLRHYESGNFIAKEHITKRGNPYARKILFKCIHNIASASHTNPCHIADFYKKRKRQSQTTSTKPHTIASIHRLIRTMYYLIMHNKLYDYASTQNR

SEQ ID NO: 267962 - protein, 339 aa, unidentified
MKITSIGIDLAKNVFQVHGVDEHGKAVFNKPLKREQMAAFFVNLPACLIGMEACGSAHHWARKLQAMGHTVRLMAPQFVKPYVKTNKNDAADAAAICEAVTRPSMRFVPIKNVEQQGVLALHRVRQGFVKARTAQANQIRGLLAEFGLIVPQGIGHISERVPQLIEDACNELPGAFRCLIQRLLEHLKELDRQVQGLEAQIVAWHRQSDLSRKLEQIPGIGPITACALVASLGDAKSFKDGRQVAAWLGLVPRQHSSGGKQNLLGISKRGDTYLRTLLIHGARAVLTSAKEPGQWVSELRQRRPINVAVVALANKMARTIWALVAHERTYQKCPVSQPA

SEQ ID NO: 267963 - protein, 415 aa, unidentified
MKFEKDTSGIKRYIGFDIHKEYALVGGQNGRQEWVLAPRRIGLEKFREWAQANLHPGDAAVIETTTNVWDVYDIVAPLVSYVVVAHAGGVRQIAEARVKTDKKDIECLLKLLIADIVPEVWVPPVHVRELRGMISYRNRLVKTSTMIRNRLQSLIHRHNLILPKGTLTDKAWWAAQMLSPLEKIQICQELALLEGLDKNKAEVDAELGRQCLGEAWGKQAVRLLQLSGFGVIISMTVLSAIGDISRFENAKKLVGYSGLGAGVHDSGKEHRQKPITKSGRKELRWALVEAAWRAIRISPYWKEQYEKYQRRMRKPNQAIVVIARKLLVVVWHVLTKQETDEHVGEEDLAYKMLVLAWDLDESVRMGLTYKQFAKYALMKLGVETDITRFVRKEVPRRIAPRAEVLARMAELGLNC

SEQ ID NO: 267964 - protein, 340 aa, unidentified
MQIAVLGIDLGKNSCSIVGFDDGGAVVLRRRMHREGVIKVAGKLSACVVAMEACCGAHHLGRVLRAQGHEVRLMSPEYVRPYVKSQKNDDRDAEAIAEAATRPTMRFVELKSEEQLDMQTLHRARDRLVGERTALINQLRAVLLERGITVAQGRRKLERHLAGLDAQGGLSQRMRVLIEDMRLQWCELDRRIAELDKELTEWVRNEEAARRLMTIPGIGVLNATALIAAIGQGESFARGRDLAAWLGLVPRQLTTGGRPRLVGISKRGNKYLRKLLIHGARAALPTLLESPTSLGAWLRGLMTRMHKNAVVVALANKLARLAWAVLRHGEMFRFAVSAAA

SEQ ID NO: 267965 - protein, 404 aa, unidentified
MAVGKVWVGIDVGKGFHHACAVDAAGKIVFSRKVANGQAAIEQLITRTTGKAAEVVWAVDMTSGAAGLLITLLLATGQPVVSVPGRLVNRMAGAFAGEGKTDAKDARTIAETARMRGDLAPITSPDAVVTDLQVLTARREDLMADWVRGVNRVRELLASIFPALERAFDYSTRSALVLLTGFQTPAGIRAAGVAGVSAYLSEHGAWAKGIPSMADKAVAAAGEQTVALPGESVTAPLIARLARQLLDLDREIKDLSKQLGERFAEHPDAGPITSLDGFGPILGAQLLAGTGGDLQTAFRSSAHLAAYAGLAPVPRDSGRVRGNLRRPQRYHRGLRRVFYLAALSAIKRPDSPSRAFYLRKRGEGKRHTQALIALARRLVDVIWALLRDGREFHPSPPGTAAAVA

SEQ ID NO: 267966 - protein, 407 aa, unidentified
MQVFLGIDWSHTHHDACWLNERGQVLNRLTVPHTLEGLTQLDVACQQLGVSRSECWIGLETAHTLLIDFLWEQGYSQVFVIPPGAIKGARRRYRQTNAHTDQSDAWVIADVLRTDLATLQPWRPDGVIVRQLRAKVSLLHFLTQEIRRYSNRLRAVLARYYPAALHIFYDPASPIALRFVQAFPTPQAATALTRQAFGQFARGQRYRQSDYVLAAAYARLQAAYPVASATTVAAYQEEAVWLAQHLLAAIEHKKAELAQLQDLFLQHPDHELFASLPGTGDFLAPALLAKFGDDRDRFPDPQSLQCLAGTCPVTEQSGKAHHVHFRQACDHEFRQIAQQWARASVGQSSWAATYWHGVLAHSRSLSHAYRCLANRWLAIAWKCWQSHHAYDEAIHLQNRARRLVTRA

SEQ ID NO: 267967 - protein, 238 aa, unidentified
MIDLVGRVLGTEQFRATASGYAALLAWMHRHGRLSRVRVEGTGAYSAGLVRLLRDEQVQVIEVDRPDRKTRRFQGKSDPIDTVQAARAALAGERTHPKQRNGQVEALRNLRVTQRSAVDQRADAAIPAVAVALRSLARRHQHLSTEIANLDELLEPLVAAINPALLAANSVGPDVTGQLLISAGENHDRLASEAAFAMPCGAAPIPATSGKTTRHRLDRDGDRQANAALYRVVLVWLR

SEQ ID NO: 267968 - protein, 352 aa, unidentified
MIKYSVGIDISKSDFHACLSTIDARQQVKVIRSGSFKNNKTGFSELTGWLKSSCTQKDIPVSILMEATGVYYENCALYLFQKKFSVSVVLPNKSKKYIAALGIKTKNDKVDAKALSCMGAQQSLSLWEPMGEFFYVLRSITRHGQALKESKTIFTNQLEAATHCMYTCKETIASLNKMIEMVELQLEANEKAMFTQINSNAEVKAKIANITALKGLGDLTVAVILAETNGFELFESISQLTSYAGYDVIENQSGNHTGKTKISKKGNSRIRRALHMPSLCMVTHKVTIFKNLYDRTFEKHGIKMKSYVAIQKKILSIIYTLWKKNERFDENYNTQPKVITLPTAQQIAAVAG

SEQ ID NO: 267969 - protein, 355 aa, unidentified
MDREKYIAMDVHQASISVAVRDAAGKLIVESIIETKAATILAFIRGIQGSLWITFEEGTSAAWLYDLLKPHVTKVIVCDPRKNALLNAGNKNDRVDARKLSDLLRAGLLTPVYHGESGVRTLRELCRGYLTINKDLTRVMNRLKALYRSWAIPCAGDKVYSPRHRNTWLEKLSEAGVRRRAEQLYQQLDALVQIRREARRELLAESQKHSATPLLRQIPRLGPIRVALLIALIQTPQRFRTKRQLWAYCGLALQTRASGEYRFTGGELQHSKRVPAMRGLNVNHNHDLKNVFKSAAMHVSTSTDPLGDFYRGLLAKGMKPTMARLTLARKMAAIVLSVWKKGARFDPGKLKQQAA

SEQ ID NO: 267970 - protein, 342 aa, unidentified
MYYIGLDVHKKTISYCVKDAAGCVHREGKLGSTRRELDAWIRTLPQPRTIAMEATIFTGWIYDHLRPHASAVKVAHPLMLRAIALAKKKNDKMDASKIADCLRCDFLPECHMASTEIRDRRRILRYRHLIVRQMVQTKNRVSGLLMETGVEHTRSRLHKVGYFRRLMTTNNEIDDSIRPLLRLSRETIERCQKTDYALVSSLERDPLLKERIRRLRTVPGVGPITALNWALEMGDISRFRSIKEAVSYCGLCGDEHSSADKVMRMPLSKQRNKHIQHVLVEAAKLAPRQSAELALIHQKAIEKGNRNRATLAVARKMVAWLLAVDRENREFIPAEQREIRAA

SEQ ID NO: 267971 - protein, 356 aa, unidentified
MSRDIKYIGMDVHKEAVVIAVVNDTGKLVMESIVETEASSILQFIHGMRGELHVTWEEGTWAAWLYDLLKPHVQQVLVCDPRRNALLKEGNKSDKIDARKLADLLRTGMLRPVYHGEHGLRTLRELGRSYQTISQDLNRVMNRIKALYRGWSIPCAGTQVYAPRYRQQWLHKIEQVGVRRRAELLYQQLDGLQTLRRTLRPELLAESRKHKATKLLRQIPCIGPIRAARLLALMQTPHRFRSKRQLWTYSGLGIETRDSAQYRFVCGQLQRSKKPQQLRGLNRNHNHEMKEIFKGAATRASCGVGPLREFYVALLDKGMKPEMARLTLARKIAAITLTLWKKEEGFDAELLKKQAA

SEQ ID NO: 267972 - protein, 412 aa, unidentified
MQVVYPRCCGVDVHKRSVVACVLITDEAGAATRRVRTFGTMTADLLALSDWLRQCGVTHVAMESTGVFWRPVFNLLEEDGRTLILVNAQHLARVPGRKTDIKDSEWLADLLRHGLLRPSFIPPAPIRALRELTRYRRTLVQERTQEVNRVQKLLEDANLKLAAVASDVLGVSGRNMLLALIGGEHDPAVLADLARGKLRAKLPTLRLALEGRVQEHHLVLLTRLLAHVEFLEESLAALQQEIDQRLAADAEALELLRTIPGVGAVAAATLIAEIGTDMSRFPSAKHLASWAGVCPGNHQSGGKRLSGAVTKGDPWLRGVLCEVAQAIGHTKQNYLSAQYQRLARRRGKHKAILAVAHSVLVIVYHVLRDRQPYRDLGAQYFERLDAARIERHHIHRLEQLGYIVTLSPRQAA

SEQ ID NO: 267973 - protein, 486 aa, unidentified
MSQRKLSTFERLRKGKMNRKQRKELARRLYCEDPGLEVVHRNVAGIDVGNESHFVAVASGCDPQPVREFGSWTADLMGMAEWLKSCGVKMVVMQSTGVYWIALYEVLEKAGFEVWLTNARDTRNLPGRKSDVQESQWLLKLQTYGLLRNSFRPPEEIRRLRTVWRLRERHVREAGRAIQHMQKALTTMNVQLANTLSDISGVSGQAIIRAILQGERDPYKLAQLRDYRVQASVEEVARSLEGNWQEDVLFELQQAVDGYDFCQQQIRQCDLHLQKYLAAVNSRPQVPSQAAQTVSSAPVQPGQKPQKKKSGKKPRKNHPQFDLDAELNRICGVDLRAIDGIDVMTILTWVSELGTDMTPWPSEDHLVSWMKLCPLRQVSGGKLIKHEQTKVKNRTAEALRMAASTLAHSDSYLGARFRSLRGRLGPGKAIKAMAAYLARLIYRMLTRGQAWVDRGAQQYEIKRQAHETRSLQRRATALGFLLVPAA

SEQ ID NO: 267974 - protein, 341 aa, unidentified
MSIITVGIDLAKNVFAVHGVDETGKAVLVKPRVARDRLLELIAQLRPCLIGMEACSGAHHWARLFRAHGHTVKLMAPKFVTPYRMSGKRGKNDAADAAAICEAVTRPNMRFVPIKDIDQQATLCLHRTRQGFVTERTAVYNRVRGLISEFGIVLPQKVERLRHDILEHLEALPGWANRCVGDLLAHTDQLDARIAEYDKAISQVARQDERSRRLMKLPGIGPNTASALLASIGAGHDFKHGRQVAAWIGLVPGQYSSGGKIRLGWITKAGDAYLRSLLVMGARAVLAGLGDKQDRFSRWARSLVERCGYWKAVVAIAAKNARLAWAVLRYGEDFRLNASAD

SEQ ID NO: 267975 - protein, 344 aa, unidentified
MTYHTALDVSLRSVSICIVDDEGTIHFEGKAASEVNQIVACLKRFSPSIHSVGFEAGALTQYLTYGLQAAGYEVICLEARQVNAALSAMRNKTDKNDARGIAQILRTGWYSRVHVKSMESHLIRALLSSRKTVLKKCVDLENEIRGLIRLLGIKLPGTLKHGAYDAFVRQLVDTHVTFSRTLIPLLDARLVLYKTYLKLDNQVKALVREDPVCQRLMTVPGVGPITALTFKAGVDDPTRFKRSRTVAAHFGLTPRRYQSGEVDSPGHISKAGDADVRSALYVAAHALVTRSSEWSSLKVWGLRLAKTKGHRRAVIAVARKLAVILHKMWMDGSDFRYGSTEAMT

SEQ ID NO: 267976 - protein, 387 aa, unidentified
MTHLPVPCPVPAAPDYDCTLVLAIELSNASWVLAAQVPGLPRVKAKRTIEPTAEALLAAIQGYRERSHAAGRQIERVVATYEAGWSGFWLARWLATYGIETHVVQPSSVPVDRRARRAKSDGIDAELLLRTLLAWLRGEPRVCSMVPVPDEADEDARRCIRERTELVAERVALVNRIGAVLATLGAGEYNPLLRDRRERLDALRTALGTSLPPHAHAKISRMLDRLDLVRAQIAALEQERDAVLENEAPDRAGEMIQQLATLRGIGVQSATVLVREAFVREFANSKALGSYAGLCATPYSSGTEREQGISKAGNRRLRTVMVELAWLWQRYQPGSAQVSWFRERVGGTGARMRKVMVIALARKLLIALWRFATQGVVPEGVVMKPES

SEQ ID NO: 267977 - protein, 367 aa, unidentified
MYQTIVHHEGAAALTAADQNSRTQPATIKLGVDVHQERYVSVAQHDHATPQPPRRCRPEEFVPFVERLLARGHRVYVVYEACGFGFGLCRQLLTLGATCYVVAPCKLDEQNKRVKTDALDAGALCQRLSRYVDGNRKELAVIRIPTEEEERQRHIHRQRIALVRARTKLQAQGRSLLVNHGQPTLPHWWRRVGWGALERRLPAWLLERLSVYRPLLELLDEQIATLTAQIEAAAPQTLPTGLGKLTSVVITREVCDWRRFQNRRQVSSYTGLCPGEYSSGNKRVPGSVTKHGNPRLRAALVELAWRLVRFQPTYPPIRKRLEVLRRGAKAPGSARKKAIVAVARQLAVDLWRFHTGQCSAEKLGFHS

SEQ ID NO: 267978 - protein, 341 aa, unidentified
MQITTIGLDIAKNVFQIHGIDAAEKVIVRKQLRRGQVTAFFEALAPCLVGMEACATSHHWARELTKLGHEVRLMPAKDVKAYVKRNKNDAADAEAICEAVRRPTMRFVRIKSTEQQGQLMLHRARDLLMRQRTQVINALRAHLAEFGITAAQGREGIKELLAIVAQEEGSRLPSDAHASLTVLATQLQAVQTMIGSLEERIVAQHRSNEASRRLETIPGIGVIGATTIAAVVPDPRAFRSGRDFAAWIGIVPRQDSTGGKQKLGPISKQGDQYLRRILIVGAHAVLRRARQQPETYPWLTQLLARRPFKVVAVALANKMARIAWALLAKGGTYRAPQLVAA

SEQ ID NO: 267979 - protein, 333 aa, unidentified
MNFVGIDVSGKSFLMQVNTEHKRGTARCFDNTPSGHKAALKALRGVKGPARVCLEATGTYHFDLAVALSEAPKVELMVVNPRAARRFGEALMKRAKTDPVDTDMLTEFAQRMPFERWRRPDDNRLKLRAFARRVAALNKHKVQAKNQLHALTTTAYTPKALLSDVRLSIRQLEHQIATLRRHAMALIDGDERLVRAFTLITSVKGIGEASAIQLLGELLVLPADMTPRQWVAFAGLDPRHFRSGDTIEKATRISKAGNRYLRVALYMPALVASRHEPQVCAYYHHLIDDRGLKKMQAVCAVMRKLLHAIHGMWASDSTFDGARFYAGATAQTV

SEQ ID NO: 267980 - protein, 359 aa, unidentified
MVETMTYVGLDVHARSTHAAAIDVASGELRRARFGGGSEEPIAWLRMLPQPLKGCYEAGPSGFALYRAAEAAGLQIEVIAPSKTPRAPGDRIKTDRKDAQLLARLLLAGQLKAVTVPPLAFEAARHLARAREQVRGDLMRCRHRVSKLLLLHGRVYEGSAWTKTHRRWLEAQRFDETATELAYLDCLAAVDGLIARKTALDERLSRLAFEGDWSETVARLRCFRGIDTLTAFVLCLEIGDFGRFPRPAKLAGWLGLVPSLDQSGESRRQGAITKTGSGYARRLLVEAAWHYLPQPSVGPALAERRAGQPDHVLQIALRAQRRLHRLYSRLRARGKPGNVTTVAVARELACFLWAAAVAE

SEQ ID NO: 267981 - protein, 312 aa, unidentified
MTCWVGIDVSKQTLAVWVLPQEASIEVSNTTAGHRQLVALLADKAVERVVLEATGGYERGVMSTLSAAGLCVVRINPRRARAFAIALGKLAKTDPIDACVLARMAQVLKTPAQVSASPQREALRDLVQRREQLVQQRDDERRRLAQGHSARVQESLRACIEHLKSQIQQLDRAIAQAARAADAERTEQLTAIAGIGPVTVSSLLAYLPELGQLNRQQIAALVGLAPYNNDSGKYAGKRSIQGGRPAIRRVLYMAALSVIRKQDDFKRRYEQLRTRGKCAKVAIVACMRVLLIRLNAMIRSQTTWKTEPVPQT

SEQ ID NO: 267982 - protein, 337 aa, unidentified
MIVIGVDVHKQTLTAVAVDEVGRPLSERSCAVDDGVVAWARSLGGERLWALEDCRHVTRRLEQALVAAGETLIRVPPRLTAPQRRRNRTRGKSDGIDALAVARAALQEPQLDGPRDGEETLRELKLLVDHRDDLVAERRRVQQRLRWHLHDLDPQLQVPAGALDRAVWIDRVGRKLARLEQTTQTRIARDLLGRCRSLTRTIGELDHELQTITQTLVPSLLQLPGCGPVSAAKLLSEIGPISRFPSDAKLARHAGVAPLDASSGKHQRHRLDRGGNRQLNCALHRVAVTQGRVHPPAKAYLERKQAEGKTRREALRCLKRQLARTVYTTLRNEPLLT

SEQ ID NO: 267983 - protein, 301 aa, unidentified
MDKDSMLFVGLDLGDRWCHLAVLDQEGQMLEESRVPTTPEALRRRFSTLSHSRVAMEVGTHSRWVSQALQELGHEVLVANARKLRVIFDNPRKGDRVDAHTLARLARLDPKLLSPIEHRSPQTQADLTVLHSRDALVRTRTLLINHVRGVVKSTGARISLCSANSFPSRAATSVPESLRPALGPILDTIGALSLEIHGYDRQIEDLCAAKYPDCQRLRSIHGVGPITALAFVLTLENPKRFQKSREVGPALGLVPRQDQSGGSNPQLHITPGLPQGRQDGQDVPASSLGQLSPVHPWALWS

SEQ ID NO: 267984 - protein, 336 aa, unidentified
MSHYCGIDLHSNNHVVVVIDERDKRVFDKRLNNDLSSTLEVLAPYQETLKGVAVESTFNWYWLVDGLQEHGFGVQLVNTAAVKQYDGLKYSGDHQDAFHLAHLMRLGILPTGYIYPKEQRAIRDLLRRRMSLVRSASTQLISVQSQIWRSTGIRIKSGDLRKLEFISPMMDKYTLQAVHAGLMVYQAIQQEINVLEKSAFEAIKLTQSFKILQTITGVGKILGLTIMLETGDIHRFAGAGNFASYCRCVDSSRTSNGKKKGVGNAKAGNKYLSWAFSEATHFAVRFEPLAQRFYERKKAKTNGIIAIRAVARKLARATWMMLKHQVPYDAKLMFPN

SEQ ID NO: 267985 - protein, 391 aa, unidentified
MIFVGIDVAKDKHDCFILNSEGTVLADVFTIANNRIGFETLLSRIQSCSQGESKIKVGLEATGHYSYNLLGFLLDSGLTTYVINPLHTNLYRKSLSLRRTKTDRIDARTIAMMLMSDVDLKSYSNTAYHNEELKSLTRYRFDKVKERAKLKSSVARLVNILFPELEKLVSSLHIAVVYALLSNYPGASYIANANTEELAETLCTASKGRYTKSKTAEIQVAAGVSIGSKMPAKSMELKHTIALIRELDKEISEVESSIDKITSQMDSPIFTIPGIGRHMGAMILAEVGDFSNFASADKLLAYAGLSPSTYQSGQLQNCYAHMEKRGSRYLRYALFNAAKYVCLWCPTFSAYLEKKRSEGKHYNVAISHAAKKLVRLIFAMQRSGKAFLADY

SEQ ID NO: 267986 - protein, 343 aa, unidentified
MPIVGGLDIHRKQLTFDYLDTSTGEVKRGQIAPADRAHLRAWLARFAGHGDVAFALEGCTGWRYVAEELAAAGVSPHVAEPADTAFARGRKRHAKTDKTDSRHLRELLAEGRLPECWIPPSHILECRALLETYHDLRAEHTAWVQRIHAVFFHQGAPALGALRTGHDIEVVRAAATCHLSPAGQLQVATALRVLAGLEADLDVLRHRLLAAARGLTGARVLAARLYGVGPVTALAMTCWLAGAGRFSSSRKAVRFAGLDITVYSSDSRRSPGRLSRQGPAVLRWAVYEAGKTHARASAPDHAYYAAVKDRKDGKRAALSEARKILRQAVHILAGLGDDALGAA

SEQ ID NO: 267987 - protein, 338 aa, unidentified
MTIVNWARLFVGLDYHQDFVQVCVLDEAGKIVSNRRVENDWRKIIAAVPNMAAVQAALEACCGAADLADELLKAGWSVSLAHPGFVARMKQNPDKTDYSDARLLADLMRVGYLPKVWLAPAELRELRRLVRFRQQKVNERRNVKLRIRAILRDHRIQDLDGNPWTRKWLKCLATLTHIGPDTEWILQQHLTHLSRLNGEIRQVDRRLEERVADDAVVQKLRQQKGIGLVTSATMRAEIGRFDRFQTGKQLARFCGLSPRNCSSGNKQADAGLIKAGNPQLRAVIVEAVHRIMHHHPRWMKLAQQLKSRGKHNCLVVAAIANRYMRWLHHRMQPEALAA

SEQ ID NO: 267988 - protein, 349 aa, unidentified
MNKKLFVGIDFSKETFDAAILKVSEESSIDLKIIGNEQFKNDVPGCKRFVKWLNKTCALSGDYSSVLVGGEDTGNYSTTLPKQLYVLGIDCSLQNAYSIKCGSGKIVRDKTDKMDAEKIAYYFYRFRDQIRLYKPLSKDMESLERLYSYRYGQVRESARLQCQIKEYEHILKSEPNDETLKFMIQRLEEQERFLKEEIKTIEAKMVEMIEADEELNEIHECLLSIPGVGKITSLLLIVVTRGFTRFDNPKQLACFLGVSPHPNQSGTSVQNGNHRSWFADPYFGSLLHMTALTASIHNPKFKAYDERLKSKGKPKLLIMNNIKNKLLTVAFTIATRRTKFYSDYEAKRA

SEQ ID NO: 267989 - protein, 339 aa, unidentified
MQLYAGLDLHSRNTYIGIMDKEFKRIFSKRVSNSLPLILTTLGPFQDQLKGIVVESTFNWYWLIDGLMDAGYQRVHLANPSAMKQYEGIKHTDDQHDAFFLAQMLILGILPQGYIYPKEKRPVRDLARKRLFLVRHKTSHILSLQSLIARCCAKRFSANEIRRFTAADLQQLLEDEHIVLSAQANLDTIVFLKQQIRQLEKAIQKKVKLNKAFQQLMTVPGIGLILAMTIMLEVGDIGRFPQVGNFASYSRCVSSQRLSDGKSKGHGNRKNGNRYLSWAFTEAAHLSRRYNEHFRSYYNRKVAQANTSLATKALSNKLARICYYIMRDQVAFRKELVSH

SEQ ID NO: 267990 - protein, 389 aa, unidentified
MRYLIGIDVSKFKHTASVIDNDGVVYVEPFDFNNDIIGFQLFLSTVSSFTNDDYIIGMEDTGHYGDNLQRFLLSKELKVAMLNPLATNHIRLAFGKAKNDKLDSVTIGSALAMPRLYRIIKDDHFSYHEIRELTRYRLHLTKSSNIYKNRLKKLIDITFPEFDSLFSTAYSNTYLKVLHDFQSAENIASTDIRTLRKALIVDRGRCVSITAEELKSAAKQSIGHSNFAMEIEIRQTVEMIEKINSNLEAVEKKIEEFSRQLNSPILAIPGISHISAMSILAEIGDFSKYESAKQIIKLSGTNPFVYESGTYSMARTRLEKKGSKYLRATLYKTIQAVILFNPVFNQYYAKKRAEGKSHLCAQGHCVRKLLRIIYHILTTGKEFDPALLR

SEQ ID NO: 267991 - protein, 301 aa, unidentified
MALPTLPDPAALVTLGVDTHAETHVAAALDHAGRLLGTHSIPTTPAGYAALLAWASTLGRVDRVGVEGTGSYGAGLARWLRAHGHVVVEVDRPDRAARRRQGKADDLDAHAAARAVQAGTATTTPKAADGQVEVIRSLRLARRSAVKARTQAANQLNALLVTAPDGLRAQLRGLPLAELVTTAARLRPDQAPATPTDAAKFALRSVAGRWRRLTGEVTELDVQLERLVATAAPALAAVKGVGTQTAAALLVAAGDNPERLRSEGAFAHLCGVAPIPASSGKTTRHRLSPTKCWSKSRQMCS

SEQ ID NO: 267992 - protein, 445 aa, unidentified
MQVIHERCAGLDVHKKAIVACRMWTKQNGHVVRETCSFGTTTAELLRLQDWLLAWECSHAALESTGGYWKPVYNIPEGQVEILLVNARHVKNLPGRKTAVGDAEWLADLLRHGLLCASFVPPCGQRELRDLTRQRSNLVRERAAVVNRLQKVLEDANIKLASVATDVLAVSERAMLEAIVGGETDPTVLAKLACGRLRDKHEELEQALTGRVRDHHRFLLETHLRRIDFLDEQIEQFNQRIVSHIEQLSPAPAQVTSPDPATVPATASEKPALSWNNAIELLDTIPGIDRQLAEVLIAGIGIDMGRSPSEHHLSSRAGVAPGDNESVGKRRSGKTMPGNPPLRKALVQAAHAARRKNDCYLGAQYHRLAARRGKKRATLAVVHSILVIAYQVLSRQEPYQGLGGNYFDERKRESVANRLVRRLEKPGCRVALEMQPNSTGSAAAT

SEQ ID NO: 267993 - protein, 316 aa, unidentified
MENPHPFVGIDVSSERLDVDNAPVRQPCSEANNDSGIASLTAHLKALNPQIVLLEATGGYEIPVAYALYEAGLPVVIANPKAVRHFAKALGKLAKTDKLDAQILALFAQKVQPPVLPLRDQEQLELANLMSRRRQLQGMIIMEENRRRTCTPRVRANIDRSLAHLRQLLKDLDREIHDAIRRTPLWLENAKILQSCTGIGPKVSACLIADLPELGTIPGTKASSLAGLAPMNQDSGKHRGKRMIKGGRPAVRKALYMAALVAAHHNPVIKEFYQRLRLAGKPAKVALTACMRKLLIILNAMLKNRTYWNPKLPITA

SEQ ID NO: 267994 - protein, 456 aa, unidentified
MAKAAKTKKKTKGEWDEGLFALNRNAAGIDVGNADHYVAVPIGRDPEPVQTFGSFTSDLHRMAQWLKACGVETVVMQATGVYWIALFQILESYGFQVNVVNARHTKTLPGRKTDVLECQWLQKLHTFGLLNNSFRPPEEIQILRTYLRQRENLVTAASTCIQHMQKTLTQMNVQLANVISDISGVTGMAILRAIIAGERDTERLATYKHNRVRASREEIARSLEGNWREELLFVLEQSLQLYDLYVEKIAACDQQIERHLKTMTSKLEPVQPSDPIALSAPREQPRFNLKDQLCRITGVDLTRVAGLEVQTVQTIISEVGVDMSRWKTEKQFASWLGLCPDNRISGGKVLKSGTRHVVNRAATALRLAAWSLIRSQSALGANFRRLRSKLGAPKAITAMAHKLARLIYRMMKFGADYVDKGMAAYESKYRQQQMKWLAKQAASLNLQLIPAQEITS

SEQ ID NO: 267995 - protein, 347 aa, unidentified
MEKASQAEVQGFAGIDVSARELTVAVQCGIEEGIAVTTFSNKAAGHKALLGYLLRANARVRVCLEASGNYSLDLALTLQAHPQVEISVVNPRRARRFAESLGERSKTDPVDARVLCEYALRMPWVPWVPPSLAALRLRSITRAIEDLVAMQTQEKNRKHSLLASDALPALLIRELEQHLRYLKLRITRLRREALRLIARNPELNRRFHLMLTTPGLGETSSLQILGELAVLPDTLDARQWVAFSGLDPGQFSSGTSVEKKPRISRGGNRHLRRALYMPALVAMRHEPFLRGFYQRLLRRGKAPLQAVVAVMRKLLHALFAMFHLDEAYDGSKLCPAEFACDSAVVCA

SEQ ID NO: 267996 - protein, 437 aa, unidentified
MVPHAGGAVEEEKTMDILHERVAGLDVHKNTVVACVRIMTGKETTRECRTFATTTDGLLALRAWLSECRCTHVAMEATGVYWTPVWRILSEGDFELIVANAAHIKNVPGRKTDMNDAMWLADLLAFGLIKASFVPTEPMHELRSLTRTRKQLVREQTRHVQRIQKTLAEANIRLDSVISDIMGASGRRIIEAMIAGVRQPHKLADLAGKQIKATPKELYDALHGRLTDHHRFLLDLHLRQWDGLDTTIRTIDLEIDQRIDRMDEDRAAGESPFRTLIGNADTVPGVSAVSAPAILSEIGCNMSRFPSAGHLLAWAGMCPGQNESAGKRKPSHLRKGAPWLKTMLVQCAWAAIRKKGSYYQAQFLRLRHRRGPQKAICAVAASILTAIYHMLKDGTEHHDLGADYFDRRSTETKAKHLVARLTKLGFTVQLQPSAKAA

SEQ ID NO: 267997 - protein, 424 aa, unidentified
MRSIALDVHRDFCEVAIKEGAELRSAGRIKTSRAELELFARSLGADDQVALEATGPALQIKRLLEPHVGRVVIANTRKLRAIAEAKVKTDKVDARTLCELLAAGFLPEVFGPAEETRALRRRLQRRAALVRQRTRAKNELHAVLNRNLKGRPPMSDVFGVRGRQWLKGLALPADERETVAGCLRQVDFLDQEVSETERVLAQSALASEEIRRLMSVPGVNLVSAATFWATVGDARRFETPRKLVSYVGLDPRVRQSGEGPARHGRISKQGSPAARHMLCEAAWIAVRTPGPLRAFYERVRARRGAQIALVATARKLCVLFWHLLTKQEDYAFGRPSLTRHKLRRLELLAGDPSRRGRRSGSAASKREQSHERELSEQFEAAYRRLTDDWQPKRSGAGATRGRASLKASRKSQAARQGSAPKPAL

SEQ ID NO: 267998 - protein, 365 aa, unidentified
MLYLGIDQHKRQLTVNLRSEDGSVILQRQVSTEWEKVRAFFADLAEKAQPEGGFLAILEVCGMNPWLLKMLEEYGCREIVVIQPTERSKQKTDRRDAGKLGHLLWVHRQQFLEDKHPLGLRRVRPATPQEADDRQLTALRARLTKKRTAVLNGIHKILRKHNLEQARPTKLFQTQKVRRWLAEMELSAVDRLEMNLLLPQWELLDEQLETAEAKIAERAVADEQVKLLESVPGLGHYSAVAISSRIGSIDRFQRPDSLANFFGLTPGCHNSGEATQRLGSITKQGSRMVRFLLNQAVVKVLRFDGVMRTWFKRIKKRRGSKIARVAVMRRLTTILWHMLKKKQKYRYDSPIKKHQEFEAFEGTAV

SEQ ID NO: 267999 - protein, 404 aa, unidentified
MNCNTQNAKIASITEKTLIVGIDVGSETHFARAFDWRNYEYTKKPLEFSNTEAGFMMFKAWVEDIAEKQGKTAVIPGMEPTGHYWFALGKFLQDSGMKPVHVNPHHVKKSKELDDNNPNKNDRKDPKTIAALVNEGRFSYPYIPTGIYAEIRSLSNLRFQTQEELTRIKNRIARWFAIYFPEYKDVYGDLMAVSGRMILKEAPLPEDIRILGVNGVNQIWRNAKLRGTGMKRAKILVSAAEHSVGSKEAPEAARIELKNLLNDMDVYVSRMEELLQTIEEKLKTIPYVDKLMEIKGIGLITVSGFIAEVGDIGRFDNPKQLQKLAGYAIVANDSGKHNGESRISYRGRKRLRYVLYEAAISLVGKNAEFKEIHEYYRTRKENPLKKMQSVVAVACKIIRYSTQS

SEQ ID NO: 268000 - protein, 428 aa, unidentified
MHTSGIDQHQRDSVVTTYNEAGERVRQERLPNRPAALVRYFAAFPSPHQAVVESTGRWYWLADVLAAQGVTLPLAHAKALKAIAYAKVKTDAIDSDTLAVLCRAGLIPQAHMIRPELRGQRDLLRTRLRLVAKSTSCRNSLHRLLEKFNVPTVAELALIYQLQAACHAEQLVLLATQIKRLERELHPTVLAIPEVQRLLWIPGIGELIACTLYLEIDEMQRFPTAKRFVSYCRLVPGADNSAGRVRHRSGSKDGNRYLKIAFSHAAVRAMTETCLMVLGGTSRIPPNYLLVGALGEKVRAAPVTATTEPTIRMAHDGSSGGVKVARDVAAASREVVDHLAPVIVPRDGGRGIGDGLSLKLVGERCQPRRKGLVVRRPLRHAGGAKSEREKHRRNPSCHRLLPSFEVPPCISILLQNVSKLGRAIVRAA

SEQ ID NO: 268001 - protein, 408 aa, unidentified
MAEQPLPAVFVGLDVGKSDHHAVAVTSTGKTVYDKALPNDETRLRAILEELAAEHGPVLMVVDQPATIGALPVAVAEATDQVEVAYLPGLAMRRIADLHPGTAKTDARDALIIAEAARTMPHTLRDIRVDEAQIAELAVLAGFDDDLAAQITATSNRLRGMLTQIHPALERVLGPRVTHPAVADLLTRYPTPAKLAAAGRGHVRARLKKHAPRLAEALTEEIFDALGQQSVVVAGTEAAATVIPILAGQLAALIHQRATVATQVESLVEAHPLSAVLTSMPGVGVRTAARILTEVVGKDFRDAGHLASYAGIAPVTRRSGTSIRGEHAAKGGNKRLKRALFLSAFASLNHPPSRAYYDRKRAQGKRHNQAIIALARRRTDVLFAMLRDGTLYQDPTEPRTPSPVALAA

SEQ ID NO: 268002 - protein, 447 aa, unidentified
MPYSNLALDADRENGPAARSFAADAHDCIMVRIKRSYRIQILCSGRQNSGKSTSRITEPRERPMHQATTLPERTCSRGDCATLLVSLELSRSTWVATALAPGSGKMSKYTLVGGDGHKLLDLLARLKSRAEQRIAAPVKVVAIHEVGLDGFWIHRLLEANGVESHVVDPASIAVPRRHRRAKTDAIDGETLLRTLMAWQRGEPRVCAMTVPPSPSEEDRRRISRERATLLQERVRHTNRIRGLLFGQGITNYNPLHKNRRENLEALRTGDGRSVPAHLKSQILREIDRLELVLRQIGEVETERDQMLQLAQPSSPAALLMRLKGIGAEFATVLYLEGLFRQFENRRQLAAYAGLAPSPWKSGSIDQEQGISKAGNPRLRTTMVELAWMWVRYQPASALSCWFRQRVGSERGRTRRISIVALARKLLIALSRYVSHGEIPAGVVMKAG

SEQ ID NO: 268003 - protein, 331 aa, unidentified
MRYVGIDLHKRFLVASVQDDVGSTLALERIDCRDQAHIARFFDTHRPFRAVIEASSSYRWLYDLFSPMGEVVLAHPLQLRAIVAGRAKTDKLDAALLAKLLRAGLIPESYVPPASYQHLRELTRARARLSRQATAAKNEVHALLRRRNIPTPFVVLFGPRGRRWLASLEVGPVDGLLRDELLTRLQHYDAALAMHDRLLDELAEGFPQAEALTCLHGIGVYSALLIIAEIGEPWRFPSGRKVGAYAGLTARVHQSGSQSYTGRITRQGSPWLRWILVQAAMKLVRRDGKLGNFYQRIRKRSGVKVARVAAARKLAGICWLRLMRWHRTAAA

SEQ ID NO: 268004 - protein, 410 aa, unidentified
MEVLYPHCAGLDVHKDTVVACVRHMVNGSVRREVRRFKTTTKELLALSDWLAGEGCTHVAMEATGVYWKPVWHVLSDGDFTLVLANAAHVKNVPGRKTDVNDATWLADLLAHGLIRGSFVPDEQTQEMRTLLRTRKQLVRECSRHVQRLQKTLEDANIKLDSVISDIVGLSGRRMIEALIAGETEPGALAAMAHRRIKATPDELEAALRGRVTRHHRFLLQLHLQQIDAVNAAIDQLDREVDAYVEPFRATVRLLTTIPGIDELSACVILAEIGRDMSRFPTAGHLISWAGLCPKNDESAGKRRSTRMRKGAPWLKTTLVQCAAAAARKKASYLQTQFHRLRARRGAKKALGALAASILTSVYHMLISGELYRDLGPHHFDQRAKAVNTRRLVMRLQNLGYAVQITPLAA

SEQ ID NO: 268005 - protein, 351 aa, unidentified
MYYVGMDIHKKYSSVAVIDEQGALVNRHRVDHCHREELVGYFNQFPLKTQVVMEATCGWGWLSELLQDLGLEVKLANPSKVKIIAESQIKTDKVDALVLAQLLRTNFLPEAYLAPKEQREARDLLRYRISLVHLRSGVKNRIHALLTRIGTYHTYSDLFGKKGRRFLSSLELPSVHRQTLDGYLCLIDTTNKLIGEAEVEIRMVVKESSDGKLLLSLPGVGFILAYLILVEIGDINRFSSYKKLCSYAGLVPSVYQSGAKSYHGHLSKKANRYLQWGMIEAAQKAKVMDPFLRRKAERIERKKGARVATVAVAHHLLIMVYHLLKEHREYYSSKLRPNLSGRPVLTLVTKS

SEQ ID NO: 268006 - protein, 321 aa, unidentified
MKEPVSSEHVYVGVDISSETLQVYLMGKDLSFSNDAKGIKKLVKVLSVISNVRVVCEATGGYENLLKVALQKASIALCIIPPHRTHAFSKAIGQKAKTDMEDARMLTLFGEKFSPDPIKPLSSEDKELKALGRARAQVIKSYVAAKLRLEICLDSIEEHFQKQAVTLFTKQLEQIDQRMRELIDKVPSLKNKVDRLLQIQGVGFTTASAMLAYMPELGTLDAKSVASLSGLAPRNRDSGKYVGKRFIGGGRRQVRYSLYMPALTAITHNPVLKDYYKRLVQRGKNKKVALVAVMRKLVVLMNHVLKHPDFKLIDTKVTRKK

SEQ ID NO: 268007 - protein, 315 aa, unidentified
MANGVCIGIDVSKASLDVAFGSQGEVRSVANESGAIEQLAAELKQLQPDRVVMEASGGYERLLAGLLWDAGLKVVIANPRQLRQFREGMGQHAKSDRLDARMIALWAEHKRPEVRPLPDAEARELSELLGRRRQLIEMLVAERQRLASALSRPLRKELKASVGSLERRLKQLESEIETRIGKSDLWRRTRELLESVPGVSKATSFMLIAELPELGSIDRRRLASLIGLAPFVRQSGQWRGRQMIGGGRAKVRNVLYMAALSAAHWNPTLRVFYQRLLQRGAAKKKALIAVARKLLVILNAIVRDRTPWRPPCPAA

SEQ ID NO: 268008 - protein, 416 aa, unidentified
MKGTGKAREIQDRYIGLDIHKEYVLAGGQNVAQEWVMQPRRISMERFQEWAIANLREGDAVVLETTTNVWDLYDIIAPLVSRTVVAHAGGVRQIAEARVKTDKKDIERLLRLLIADIVPEVWVPPAHVRELRGMISYRNRLVKTSTMIRNRLQSLIHRHNLILPKGALTDQAWWEAQQISGLEKIQIRQELAMLEEIAKHKAEVDAELGRQSLGETWSKQAVRLLQLSGFGVVISMTVLSAIGDVTRFESAKKLVGYAGLGAGVHDSGKEHIEKRITKSGRKELRWALVEAAWRAIRISPYWKEQYEKYLRRMRKPNQAIVVIARKLLVAVWHVLSKEETDVHASEEDLAYKMLVLAWDLDDNVRMGLTYKQFAKYALMKLGVETDITRFVRKNVPRRVAPKAEVLARMEELGLAC

SEQ ID NO: 268009 - protein, 377 aa, unidentified
MKNCTRYLGLDVHAETITAAIAEGRDRIRNLGKFPNRPEAVRKLIEKLGGGKNLKVCYEAGPTGYALYWQLTKLGIDCEVIAPSLIPKKPGDKVKTDRRDAEKLARSYQNGDLTPVWVPTPEHEALRDLVRQRAAAKHDESRAKHRLITLLLRHASREPNGSRAWTHPWWRWVQALKFEHEARQVALADCIAEVLHMGERLARLDQAIDRMVESAPPHMRAVIEALQALRGVAKLTAVTVVTEVGTFQRFHRPTQMMGYTGLVPCEHSSGSRQAQGGITHTGNAHLRSVLVEAAWHARHRPWLNRRLKQLLPTLPADVAEVAWKAQERLHRKFSKMIYSRKHAGVVAAAVARELVGFIWAIGTMVEAKQTNTVARAA

SEQ ID NO: 268010 - protein, 344 aa, unidentified
MFTFGVDAHKRTHTIVAVDEHGKAVGQTTVGTTSQDHLGLLRWAARFGVERRWAVEDCRHLSRRLERDLLAAGELIVRVPPKLMAHTRDSARTYGKSDPIDALAVARAAQREPDLPTARLDGPDRELRLLGDHRESLVGERTRLICRLRWHLHELDPAWEPKARSLDAKRTLDQVDAHLQDLPGVVARLARELTSRCAELTITINALEREISQITEQLAPALLAMPGCGALTAAKIIGETAGVDRFKSRDAYARYNGTAPLPVWSSNKTRHRLSRTGNRQLNAALHRIALTQARWHPPARAMIERRRAGGNSGREAMRILKRRLSDAVFQALRADQIEVLLAAA

SEQ ID NO: 268011 - protein, 347 aa, unidentified
MAMVVLGIDAHKRTHTVVAVDEAGRQLGMRVTKSTSTGAHLDLVRWADQFGSARRWAVEDCRHLSRRLEADLLAAGEQITRVPPKLMAHARDSARTYGKSDPIDALAVARAALREPGLPTARLDGPERELRLLVDHREDLVAERTRVINRLRWHLHELDPGWDPAPRSLTRKNTIAAITARLAALDGLVARLAADLITRISELTAQADAVEKEIAVLVRQLAPSLLAVCGAAELTAAKIVAETAGVSRFRSKDAYARHNGTAPLPAWSANRTRHRLSRTGNRQLNCAIHRIAVTQIRCHPDAQAYLTHRIASGDTKTEALRALKRRLSDIVYKALHADGTAVLAAAA

SEQ ID NO: 268012 - protein, 353 aa, unidentified
MISLGVDAHTRVHAAAALDDAGREVGRWRGPNSPDGWRDLRRWACALGDPRQWGVEGAWNYGRGLAQHLVAADEVVYEVNPRWTAKGRRGARRPGKSDALDARAVALTVVREAAGLPRVQPDDETAVLDLLVTEREAAVAEATRLRNQVHALLQQLDPEYRTRVPNLQTQAGLAAIGGYAVPEDAATLDQERAGAIRRLAQRLRLALDQAEELADRIRERAEARFSPLTRLCGVNLLTAGALAGLLGPGRRWRTDAQLAAHAGVAPLEASSAGLTRHRLNRGGNRRLNAILYRIALTQARHSPEGRAYLDRRVAEGKTSREAFRALKRFLVRAIWRLWQECLDSQATTPAVAA

SEQ ID NO: 268013 - protein, 353 aa, unidentified
MKKEKEKKEKREFISLGIDVASEKLDVFLREKEEVNEEEKREKRNGKKKAKGIDKTFANNFQGISRLISFLKGKDFKGRIVMESTGRYHSLSAVLLQEANFKVFVINPLIVKKYRTSQIRKTKTDRIDARLLSLAALIEKNLLLFESSREDLVLRQKISLLNCLEKSIQRLKASFLNYESSVLSLERETTEVEEELKKTIKKLGKNKGKLEKEIAEIISQKKGNQNKIEILRSIPGVSEFLASLILFFYKENIGHKSSQWIAYSGMEITVSESGKFKGKGKISKRGNRYLRKRQFSGAWGAYMHSEEFKNYYQELKEKGRTHREALNILARKIIRISFSLLKHNKRFDAAKCF

SEQ ID NO: 268014 - protein, 342 aa, unidentified
MKDTMIGVDLAKSVFQLHGATMTGHLQFRKKLTRTQFRQFMSVQPSSVVVMEACGSASYWAREMVKLGHEVKLIAPQYVRPFVKRQKNDAADAEAIVVAAQRPEMRFVEPKSEDQQACAVLFRTRERLLHQRTELVNVLRSVLYEYGHVFPKGIGHIKRIEAVLEASNSDLPELVREECQDLIDQISEKTARIDTKTKKAKTLSLVTDTARRLQTMPGVGPQTALAISGFAPPMESFKRGRDFAAWLGLVPRQYTSGGKERLGRISKAGQTDIRSLLIIGAMSRLTCQARKKIVEGSWLARMLHRKPLMLVAIALANKMARAIWAMMTKKEDYRDPARAVAA

SEQ ID NO: 268015 - protein, 305 aa, unidentified
MISWVGIDISKSNLVVWVQPQNQGFDVANTSQGFDELIECLSRYQVGRVLLEATGGYERKVMAALQSANFNVLRINPRRARAFAVAMGKNAKTDPIDAAVLADFAEVLNAPCDKATCAEREALRELVQLREHFVQQRDDNKRRLQQVQLPAAVATIKDHIRYLQTQIKLLEKSINQSMRDLDAEKADRLISVKGIGTVATASLLVYLPELGELDRREIAALAGIAPYNEDSGNHSGKRQISGGRARVRRALYMSCWVVIRHQADFKARYEALRERGKSAKVALIACMRILLIRLNAMLRDGTEWR

SEQ ID NO: 268016 - protein, 422 aa, unidentified
MLQEIQDHEEIIARVAALDIGKAELVCCLRLPGPGGSGRRVQEVSTYSTMTRSLQGLADRLRELGVTRVVMEATSDYWKPPYYLLEAHGFEVWLVNAKDVKHLPGRPKTDRLDAVWLCKVAERQMLRPSFVPPKPIRRLRDLTRYRVALVTDVGAEKNRVEKLLEDAQIKLSVVASDIFGVSGRDMMAALVAGERDPKVLAQLARTRMRVRIPQLEEAFVGHFDDHHAFLLTQMLDRIDAMTANIDTLDARIEEQIAPFADAVARLDQIPGVGATAAAVIIAEVGVDMTRFPTPAHLASWARFAPGVKESAGRKKGNGATGHGNRYLARVLGEAAVPASKTDTFLGERYRRIARRRGKKKAIVAVGRSILVIAWHLLSNPDTLFHDLGSDYYENRNGTRAATLNHVRRLQALGYRVTLEPVA

SEQ ID NO: 268017 - protein, 320 aa, unidentified
MNATQQGGVRVGIDVSKRTLDVCLLPDGEPFVLPNDQEGVEELLSRLEDSPPELVVLEATGRYERLAATSIAAAGIPVAVVNPRQARDFAKAIGRLAKTDRIDAFVLARFAHAVDPSASVIPDEEASALQAILARRRQILSMLVAENNRFQMAPKPLQKRIRAHVEWLGKELSRTDGDLDEAIEASTTCIKENEALLKSVPGVGPILARTLLAELPELGEITHKRLCALVGVAPFNRDSGQSRGKREVWGGRAPVRAALYMGALVATRHNPILKEFYERLLAAGKPKKVALVACMRKLLSILNAMMRDRVPWHLAHLRTP

SEQ ID NO: 268018 - protein, 370 aa, unidentified
MIMIGCDFHPGLEEIALLDTSTGRRWQSWLSHAFGLDRVRKFYGELSKPVLVGLEASGYSLWYEEMLEELGIELWVGDPGQIRKAAPGKQKTDRNDARLLLQRLEEKRFPRIWVPDKATRDLRPLLMHRHKLVTMRRAISNQLQAIAINRGLQKKRALWSKEGREQLRSLELPHWTRRRRDELLALREQWDAEIAELDEVVEHQAERNTDARYLMHHQRGEGPITALAVVLSLGPVERFASARKVASYAGLIPAEYSSGGRQRLGHISKEGNPFLRWVLVESATVAVQHDPEFKHRYWRLVERRGKSIAKVAMARKLLVRLYWMLRRRHLSRVGRPKKSQCTAVEALGSATAPQGSSRLDMADGMNRSLQ

SEQ ID NO: 268019 - protein, 361 aa, unidentified
MRNHRTLVGLDVHARATVAAVLELESGELRFRRVGGPPRSVVNYLEELPGPVLAVYEAGPLGYGLARATTLGIEVVVCAPGSIPRKPGDRVKTDRRDAERLVRSLLAGELSFVRVPTVEEEQFRDLARCREAARGDLMRARHRLGRFLVRRELEFPGPGGSWTEAHRRWLGSLEFADHASRSVFADYLAGVAFLEQRRGGLDAQIEIAAPCSPWAVTIANLRCLRGISTTTAYGLCSEVGDFRRFERPSGLSAYLGIVPSEHSSGESINRGPITKAGSPHARRLLIEAAQHYRHKPSVSATLARRQRGHDPRACEIGWRCQQRLYRQWQRLRFDRGKPGNVVITALARELSNFVWEIGQLN

SEQ ID NO: 268020 - protein, 343 aa, unidentified
MGVFAALDVSQVETAICVVDQHGAILAEAKVPSCPDAIAEWLAERTEDLERVGMETGPLAVWLWNALTERQVPIVCLDARHANGVLKMMPNKTDRHDARGLAQIVRTGWFKTAQIKSHDAYVNRAMLTAREALVGMRVRLENEIRGLLKTFGIMFGRRVGGFKRRAEEIVGGELAVAPELMPIFEALMQARRDILARIAALDSRIRAVAKRHATVRLLMTAPGVGPITAMAVVAAFDDASRFRRSSSAGAYLGLTPRRYESGEISRNGRVSKRGDAFTRKCLFEAANAIYCRNLGGPRLRDWAKAIAERTGPRKAKVALARKLAVTLHAMWRSNTPFQEAAMA

SEQ ID NO: 268021 - protein, 330 aa, unidentified
MDGTSIGIDVSKERFVIAVAPTHDRWTSETTPAAVDVLVARLVQLQPTIIVVEATGGYERAVVAQCAAAGLPVAVVNPRHVRAFAQAMGRTAKTDDIDAAVLADFGARINPPTRVIADAETRALAALVVRRRQLIEMIVMERQRLGQAPPTGKITRDLRNHIRWLERRVEDVDDEIGTAIQASPVWRVHEDLLRSVPGIGPTTARTLLAELPELGRLERRTIAALVGVAPVNCDSGQHRGQRHIWGGRGSVRAALYMAALSAIRCNPVLAAFYHRLRTAGKPGKVALVATMRKLLTILNTMMKHQLAWNPKAASTPASPSGPARAAAVLV

SEQ ID NO: 268022 - protein, 423 aa, unidentified
MDVMFERVAGLDVHKAMVIATVRIMLGGKVKRECRSFETTTSGLLELLAWLTASGCTHVAMEATGVYWKPVWNILSDGEFELILANAAHIKNVPGRKTDVNDATWIADLLACGLIKASFVPTAEIQDLRSLQRARKQLTREQTRHTQRIQKTLEEANIKLDTVISDIMGLSGRKMIEAMIDGVRNPSRLAALADRRLKATPKQLYDALHGRLTDHHRFILKLYLSQYDALDKAITEIDQEVAAAIQRMDAEVEAGTATFRSRINLLSTMPGISALSATAILAETDTDMSRFATAGHFVAWAGLCPGQNESAGKRKSSRLRKGAPWLKTMLVQCAWSAAKKKDSYYRAQFNRLKARGGAKKAICAVAASMLTAIYHMLTNGVQHQDLGANHFDRRASDFKAKRLVTQLNKLGFEVELQPREKAA

SEQ ID NO: 268023 - protein, 457 aa, unidentified
MKTIRLKKAKVNKSNDKMITMPTVNPHAAGIDLGSKSHFVCVAQDNVKEFGVFTSDLHAIAAHLKSYGVKTVAIESTGFYWRSIYLILLDYGFEVFLVNAAHLKNVKGHKTDVVDSRWLQLLHSIGLLSNSFQPDALTHELRTYTRHRKNMITDASHLISKMNKVLVLMNIQLHGVLRNITGVSGLKVIRAILQGERDPKVLSSLVSLRAKASREDIEKALTGDIRKEYLFELDQCFQLYNFYWQKIEEADKQIEAWLKDHVSNMPPNDGYKKPKNKNRGTNDPTFNVGKYVHRISGGVELLDINGVGSNTILTLVSETGLDMSKFPTAKHFASWLGFVPNRKVTGGREISSHTRKKTNPLAKVIRDAANSTGNSKSKLGDFFRHLAYRKGRTAAIGATARKIAVIIYKMLTEGKPYSYEYAQDQTEYMKVSKLKNILKTMDKFNISRDELQLAWSM

SEQ ID NO: 268024 - protein, 360 aa, unidentified
MQVRTWAAFDVHVSGVVAATLDRDSGQLEVRRLPGRSEEVAAFAATLPGPVRATYEAGPTGFVLARRLEAAGIDCLVCAPGLIPRGPSDRVKTDRRDAERLVRLLAAGELHRVAVPAVAEEALRDLVRAREDLRGDLMRARHRLAKLLLRHEVRFEGPQANWTQAHLRWVAEVQMPEPASQTALEDYRGAVDALMIRRQGLEAEIARALPESPWAQTARRLVCMRGIDTLTAAGLCAEIGDFRRFSHPAQLMSYLGVVPSEHSSGEKRRRGPITRSGSRHARRLLVEAAWHYRRPPRVAGSLARRQQGAEPQAIALAWKAQRRLHHLWGRMERRSKRRTVIAVAAARELSGFCWALATAD

SEQ ID NO: 268025 - protein, 367 aa, unidentified
METTKFYVGLDVHKDSIAIAYAQSASREAPPRFLGTTRHSLISLTKALANLGSPSELNLCYEAGPCGYGLVRALRQRGYACEVIAPSRVARHPADRVKTDRRDALLLARLHRAGELTAIRIPEPEDEAIRDLVRTRADMVGEQRRARQRLRSFLLRQGHAYTGRRWGPKHELFLSKIQFEDPAHHIVFTEYRLAVRFATERVVRIEDALRQQAAAWRWLPVVKALMTLRGISFLAAVTVVAELGDLRRFPHPRELMGYLGLVPSEYSSGNTQRRGGLTKTGNTHARRILIEAAWNYRFPARIGESLQPRLEGQPQSIIDLAWKAQLRLCPRFRRLRAKGLHQNKVCAAIARELSGFIWDIARQVRPA

SEQ ID NO: 268026 - protein, 400 aa, unidentified
MSEPRARVWAGVDAGKGHHWVAVVDETGATLWSKKVDNDESAILTALGEVLGLANQVHWAVDISGTSSALLLALLAAHGQRAVYVPGRTVNRMSGAYRGEAKTDARDAYVIAETARHRSDFATIDVPAQLAADLALLTAHRADLMADRVRMINRLRDVLTGVFPALERAFDYSAHKGALVLLTGYQTPAAIRRRGRARLTAWLAGRSVRGADAVAATALEAAQAQQTALPGEDAAAQIVADLAVQILALDDRLKRIDKQIRETFRSHPQAEIIESLPGMGPILGAEFVVAAGDLSADADAGHLASAAGLVPVPRDSGRRTGNLHRPKRYSRRLRRVFYMSAQTSIIREGPNRDFYLKKRGEGCKHVQAVIALARRRASVLWALLRDNRVFTPAPPIAQTA

SEQ ID NO: 268027 - protein, 337 aa, unidentified
MQPTVPLFVGLDYSQHKVQVCALDPQGKVLGNRAVPDSADAIDQAVRRLGAVQGAALEACTGAADLAEELADRFGWPMHRGHPGFVSRMKQSPDKSDFSDARVLADLERVGYLPRVWIAPKQLRELRTRVRDRQQLVAQRRNLKLAITALLREHRQRCEHQRWTAAWRAWVAQQAQLPEQARWVMTQRLRRLEWVVAEVHAVERRLEEVTKDDSTVRRLRAIKGLGPVTAWTVRAEVGRFDRFRTGKQRARFCGLSPCNRSSGDKAADAGLIRAADPERRRVCVEAAWVLIRCQPRGRQRAQRLRAQGKPRTVVTAAVANRFVRWLDHEGVRQQAVA

SEQ ID NO: 268028 - protein, 355 aa, unidentified
MNSEKYIGLDVHQATIVVAVMDSTGKLVMESILETKGATILQFFAGLRGTLAVTFEEGTWSAWLYDLLHSRVDKLVVCNPRKNALLKDGNKSDRIDARKLAELLRGNQLKPVYHGETGVRMLRELSRSYLTIVKDLSRVMNRLKAVYRSWAIPCAGRDVYYTRHRAQWLAKIREAGVRRRAERLYEQLDMLQHLRQQARRELLAESRKHTITAKLRQIPYLGPIRVALAVALIQTPHRFRTKRQLWAYSGLALETRTSAEYRFVEGQVRRSKKLLSIRGLNKDHNHDLKGLFKGAATMASVRPGPFQDFYQAALAKGIKPTMARLTLARKIAAITLTLWKKGENFDAEKLKSQAA

SEQ ID NO: 268029 - protein, 400 aa, unidentified
MTKEDFIYVGIDLHKETHTAVMIDCYNQKLGEITFPNSPADFPKLVTKVKKCNTDAKEVVYGLENAYGYGRPLAVWLIDKGYFVKDVNTAISHRQAKHRGAMYRKSDSDDAEAIALATLNMLDKLPDACPNDAYWSLGQLVHRRDNIMKQRTRLVNQLHEQLCIAYPSYKQFFNDISRPTALYFWEHYPSRKYLKGKSVEDLRTELVPVSHNRCSTKNCEKILDAVASDKVKNNAYQDARDMVTLSIVSDLQHYDSQLAEVDKMLEQMYKMLGCTLTTIPGVNVITAVKILAEIGDISRFKNSSSLIAFAGIDPTVRQSGEFNSTHNHMSKRGSPYLRHAIFLAATTCSFHNSPLNAYYKKKRDQGKHHLTATGAVARKVTTVIYAVLRDSKPYEPKKFC

SEQ ID NO: 268030 - protein, 455 aa, unidentified
MSHGSGVSRGDRNRNARLSRLREAVPTANAIVGIDLADRKQMLVVTDHDSKVLARRTFRCKAWDLGTALDWAADRATRAGFAGVTVACEPTGHRWMVLAQLAAERSMPFVCIQPALSSWVRKTEDLTTDKTDEKDAVLIARLTVQLRCYLPEPVDEAHATWARLRHLGARREELITEHVSCVQTIRDLLECVWPAALEVAAQPFKSTTWVAALSVVVRRDGGDLDRTRRLGLARFERAVRAEVTRRGRVRPCLRIVRRLFAALTDPAGVIAHRPAVFERLEWTLTDWDDARAKLANVEARMVSVLDELGLATLVTSIDGLSPVGAAAILAQTGDLTRFTSARAVVKHAGLAPRERKSGTFTGKARVTGAGRPGLRVAAWRAVWGCLQTNRVYAARYRYLTTREHNRLTPTQAQTAVAGAILRQLYAVITQQRAWDPVIATHGTPGWKGAAATTAA

SEQ ID NO: 268031 - protein, 338 aa, unidentified
MYYTGIDLHKKTSFLTTVDEKGHIVTRANLLNVESDIMDYFVELDHETKIVIESTASWYWLYDLLVGNGFDVVISNPLKTKAIASAKIKNDKVDSHMLAQLLRSDLISTVYVSSLEVRKLKELLRHRERLVRDATRMKNRIHNLLMKNNEQVPFSDLFGVQGLRYLNEIGLPPYHRVQVETYLSLYQDLVTEIEPLTETVHALAEEQPMANLLMSIPGIGAIVAMSLVAEIGDISRFPSYRHLASYAGLVPSLDASGGKERRGSITKRGSRYLRTALIQSAHAIPRMKKCRLNLFFRRRIVKAGYKKAIVATAHKILQIVFYVLKNQTPYREEYPACA

SEQ ID NO: 268032 - protein, 362 aa, unidentified
MAKVRSWVGLDVHARSVLAVSIDGETGELSSRRLSGVTAEVVEFCSSLPGPTRVAYEAGPTGYGLSRTLTLAGMGCVVAAPGKIERPSADKVMTDQRDAERVLRLLMIDGLHPVRVPTGEEEALRDVVRAREAIRGDLMRARQRLSKLLLRHDVRYEDTASAWTVAHRGWLTSLDLGQRGAQFTLLEYLGAIDAIVIRRDALEKTIAELIPGSPWEQTVARLRCLRGVDTLTAVGLCAEVGEFQRFQKAGQLMSYLGLTPSEDTSGEKRRQGAITKTGSRHARRLLVEGAWHYRRAPAKGQTLKRRQEGQPAHIIEIAWQAQRRLYRVWQRLDTKRGKRRTIVAVAVARELSGFCWALANAD

SEQ ID NO: 268033 - protein, 459 aa, unidentified
MSAIVTAGEAEYAAFVALDWADQEHAWALEVAGSGKREHGKLEQTPEAIEAWAVELATRFGGRPVAVGLEQARGALIYALQKYSHLVLYPIHPSTSSAYRTAMFPSGGKDDPMDADLQLDLLTHHRDRLRRLQLDTEETRKLQLLTENRRQLVEERKAQTNRLTNLLKTIFPQVLKWFDALYSPIAVAFLQRWPTLPQVQQEDEETLRQFFHQHGSRSDSRIEKRLNEIRAAQPAIQDPAIIEPGVLMLHALLPVITALREGIAKLEEAGASVFAAHPDAAIFTSFPGAGAVLAPRLLVAFGTRRDRWNSVEEFQPYTGIPPITVRSGKSEWIHFRWGCSKFLRQSFHEFAEQSILQSEWAREFHHHQREVKKLDHHAAVRSLAYKWQRILFACWKNGTPYQESSHQERLLSRHATQSQPKPAAGQGKGKTPRRTGSSNPVAFQFKKVAGFSKLSDATS

SEQ ID NO: 268034 - protein, 338 aa, unidentified
MIGVDLAKSVFQLHGASMTGDVKFRKKLTRAQFMAFMTAHPAAVVVMEACGSASYWARELSKAGHEVKLIAPQYVKPFVKRQKNDAADAEAIVVAAQRPEMRFVPPKTEEQQARAVLFRARERLVHQRTELINALRATLYEYGYVVPQGTAHLKRLVEIIETETSDFPELAREEARDLIEQIAEKTDRIDAKARKIAAQAALTPTARRLQTMPGVGPMTALAVEAFAPAMETFKCGRDFAAWLGLVPRQMSSGGKERLGRVSKAGQSDIRRLLIIGAMSRLNWMGLKSIREGSWLDRLRARKPKMLVAIALANKMARMVWAMLTHQQDYKDPIPAGAP

SEQ ID NO: 268035 - protein, 352 aa, unidentified
MVVAVPYRRPSLNKNVMVQIYGIDLGMSSFDVSFLSESGSVRHLSGVKNTVHGISKFLLSLPSSAVLCAEHTGVYGDLLLRLCTLNRTCLCFVPGYQIKHSLGLQRGKSDPLDACRIREYAERFYDLLRPCFYPGEEMSELQELYRTRSLLVDSRKRLDTLNIGDNCKSSVSLAADHARRAVLAELNTQISGLDHEIEALIQNSSEFSRNYQILTSIVGVGPVTSCELIIKTENFRKLDTAKKCAAYAGIAPYPKESGKMKCGHKISPMGDKQLKTLLFLCARSAKEHNKEIRLYFLKKHKVEKKHFFVAMNNIANKLLRLIYSLIHKQQTYDRDYIQRDPRCVVISDTHKC

SEQ ID NO: 268036 - protein, 447 aa, unidentified
MDTESATQYAAYIGIDWADKDHAYALRATEGKKVEQGKVEAKPEAIEEFVARLRQRFGGKAIAVALEQSRGSLLFTLSKYDHLVLYPVHSSTLDSYRKACHPSGAKSDPDDAALILDLLQKHPEWLQPFAPDTVPTRTLQFLTEERRDAVNDKTRYLNQLTAALKTYFPQMLEWLDVDSKVMCEMLQRWPTLEQLQQQKPSVVEEFLREHRYPVVRVKPLQEAMEKAIPATTDQAVIEAKKFTVQRTIAQLEALRENIAELDRRIEQITRLHEDYRVFASLPCAGKVMVPRLIAAMGTQRDRFQTASELQCQTGIAPVKEASGQREWIHWRWACPKFLRQTFVEWAWLSTRKSQWAREFYDRQRAKDKSHHAAVRALAFKWQRIIFRCWKDRCPYDEARYLATREQRARTAKASTDGSPQLKSSQAGGVEITWKNVSGFSRPDSISC

SEQ ID NO: 268037 - protein, 444 aa, unidentified
MTKTSQMPVVRQTEVEPEFAAQIGIDWADQKHFWAMRTADGKRHRGELDNTPEAVEVWATELAQRFAGRPIAVALEQARGAVVAKLSKYAHLVLFPVHPNTLNNYRKAFYPSGAKSDPGDAELVLELLLTHQEKLRRLEPDTVETRQLQFLTEERRKLVNQHTSEAQRLIGWLKQVFPQILQWFDDPACALVGALLLRWPTLLALQKAQPKTLRTFFHQHNCRREERIQQRLDQIRQAAPATNDAALLETALLCIQNSVRLLVVLREGITVLDRRIAEVYRDHPDRAIVASFPGAGTALEPRLIAAVGSRRERFDSASSMACFVGIAPVKAASGNGLWIHWRWACPKFIRQTFHEWAGCSIRTCDWAREYYERQRSKGKGHHAAIRALAFKWIRIFYACWRDRKPYSDQGYLQALSRGAPSTATTGDVQWKSCAGFSKLVKVSS

SEQ ID NO: 268038 - protein, 344 aa, unidentified
MSQVSTIGLDIAKNVFHAHGADERGVTVFSRKLTRGKLLDFFAGQPACVVALEACGGAHHWARQLQTMGHEVRLIPPAYVKPFVKRNKNDAIDAEAICEAAQRPGMRFVAVKSEEQQAAGLVFRTRDLAVRQRTQLINAIRGHLAEYGWVAPRGTAHMTMLADLLEDDEMASTLPEAARPMFKLMVDMLAELDRQISVLDREIARRAKEDETARRLMTIPGIGPIAATAIIALAPPIETFRKGRDFAAWLGLAPRQHSTGGKQRLGSISKMGERTIRRLLIIGGSSMVRQACRFGAPAGSWLERMLARKPRMLVSVALANKMARMVWALLTKNEDYRAPAAVAA

SEQ ID NO: 268039 - protein, 314 aa, unidentified
MACSIGIDVAKATLVVATEPAQSLGPFPNDDSGHAALVTALTPLAPTRIVLEATGGYERAVTGALAAAGLPVVVVNPRQVRAFAQATGQLAKTDALDARVLAAFAQRVAPEVRPIPDATTQELRDWVTRRRQLVAMLGQERTRLLQAQGPAHRALRRDLEQHIRWLERRLRASDDEVGRLIEASPLWRVRDQLLQSVPGIGPVVAHTLLASVPELGTLDRKQIAALVGVVPRNRDSGQWQGRRQIWGGRAAVRQVLYMGALVATRHNPVLRAFYLRRRAAGKPAKVALVAVMRKLLIMLNAMLAHQRPWRATAA

SEQ ID NO: 268040 - protein, 333 aa, unidentified
MNQVRVHIGVDVGKEWLDICYPDGEKETVRNIKSCRTKVIKRAARANAIVCFEATGPYEEPLADECLAKGVRAVRLDAWGARRFAESQGRIEKTDRIDCEMIRDYAASLKDEKLHFIKPRSEAQKRLKKSVSVRRNLMKARAIVYNQLEHIRDRDSRRHLESSIARLDREIARIEAGCDKAIADDERMKHLSDRFLKVKSVGPCLVRAVLACCPDIGDFNSKSIAKMCGNAPIDHESCTVRHKARPRRGRPDLKKALYMAAVSASRCNHVLREFCQRLVAKGKARKLALTAVARRIAILLNCIARYPDFVPAQDPKDIARAESRKRRRHSENA

SEQ ID NO: 268041 - protein, 347 aa, unidentified
MKFYTQTHQHVCGIDLHTKTMFLCILNQSGDIILHTNIPARAKAFLEVIQPFRDDLVIGVECMFSWYWLADLCLQENIHFILGHALYMKAIHGGKAKSDKIDSEKIARLIKGGTFPLAYVYPPELRPTRDLLRRRRMLVRMRSEVLAHIKLTHYQYNAEFFQKNINKKGNREGIDSLFSDPTIRKNIEVDLSVADHLQEEIVQLENYIIRKTKAFDPRTFYRLQTVPGIGPVLALTILYEIGDIKHFPTVQSFASYARLVKCSKESAGKLYGYGGGKIGNPQLKWAFSEAMCLFMRESERAKAYVAKLEKKHGKGKAMSILTHKLGRAVYFVLKRKDAFDEKYFFNA

SEQ ID NO: 268042 - protein, 414 aa, unidentified
MFKPNSLFIGIDLGGSHNAVIVLNERRQLLARFSFFATHTGFEQLANRRLELIRKYGAGDAIVGMEPSGGHWMLLAADLEQRDVPYVLVNPYTVRVFRQAVNLDRSKDDFRDAYAIADLVRIGKFTRTRLQHGDYAELRVLTHHFGQLRDEIARVKNQLRSTLMCVFPELNHLLPNLDTLVAKSILCTCAVASSIRQMTREEFSDRVRAAYQGHLFPVTRVGRIYLAAQSSIGLQDSTTTTQMMLNHEMQLIDLLTVQQQEVQKQLETVFLRTPEARPMLSLPWLGACTAARILGEIGDPRHYDTGKQLVKLAGLQPTPNTSGNRTQSESPISRQGRAGLRTALYFVILRLLRHDATFRRRYLYLQQRPVNPLTKMQAIAALMAKLLRVLWALIYHQATYVLGDSSMHMPTLAS

SEQ ID NO: 268043 - protein, 468 aa, unidentified
MRLVSKTNTLEAVWTTRLYYKAFAETRSCLPCALTRLKEAELNIMSTRETGQTPPAVAPPAFAAHIGLDWADQKHFWTMLVDGKKTRGQLDNTPEAIEVWAAELAQRFGGRPVALALEQARGAVIVVLSKYAHLVLFPVHPTSLANYRKSFSPSGAKSDPVDGDLILDYLVKHPEQLRGLQPDTVATRSLQFLTSERRALVDQHTAVVQSLTHWLKQVFPQVVRWFGDLSTPLVADLLLRWPTLQELQKAKPKTLLRFLHQHNCRSAERNQERLEEFRQAVPATDDPALLQTGILSIHNAVRILAIMRQGIAEFDRQIALTYQDHPDRFITESLPGAGPVLEPRLIAAAGSLRERFESAHNMECCFGIAPVTEASGKSVWIHWRWSCSKFVRQTFHEWAACSIRSCDWARQHYAGQRDRGKGHHAAVRSLAYKWIRIFFRCWRDRVAYSENRYLEARRVAAAAAGGKP

SEQ ID NO: 268044 - protein, 315 aa, unidentified
MKYHIGIDISKRDFHVCFDEVGIIEKFSTDIAGIDEFLKGLQEKKMTKGKTLIGMEATGSYHLPVAYRCTKAGYTVHVINPLITKKQNQTNLRRVKTDSADAKLVRLCLMQGAGYPFFETAETIKLKTLVRQRARFSMLRHHTRLKDEEVVNRERYLDVKITALDRELYDFLDEKIRGLDAQLRTYDFATQKLLQSIPGVGPQTATTCLSEIADIKRFPDGQKLTAWLGLDPRVHQSGTSINGKGYITKRGNKLLRTRLFNAASVAVLHENMFQKFFLQKRSEGKAYRVALCAVMRKMVHVIHAVWSRGTPFINS

SEQ ID NO: 268045 - protein, 422 aa, unidentified
MEAFNVSDFAALIGIDWADRKHDICEINRDTNTQHLSVISSEPKSINAWALELKQRYNGRSVAVACELKKGPLIYALSKFKHIVLFVINPSSVAKYRAAFTHSGAKDDPTDAIIQVEILQLHMDKLTVIRPDSEDVRCLAQLVEYRRKLVQDRVNLTNKIATTLKNYYPHVIDWFKEKDTQIFCDFLLRWPSLAHAKKARKQTLLDFFNQHNSRYPLVNEKRIKEIKDAEILTEDMAVITPNLLLIECLVPQLKQLMLAITRFDDEIKTLYKQHKDRAIFDSLPGAGPQLAPRLLAAMGSNRDRYKCAADIQKYAGIAPVTERSGKKEWIHWRYSCTKFLRQTFVEWAGLSVRYSFWAKAYYRQQEAKGKPHNTIIRSLAFKWIRILFRCWKTHTPYDESTYLTALKSKGSPLLKFAVESEL

SEQ ID NO: 268046 - protein, 325 aa, unidentified
MRKVGQTGVRRSDVPCVVGIDVAKAQLDIALRPAGERWAVPHDASGVATLGDRVQPLHPTLMVLEATGGLERAATSALAAAGLPVVVVHPRQARACARATGPWATTEALEARALAHCADVIRPLPRPLPDAQTQELRALLGRRQPLIVLRTAEQHRLAGTSARLTQALAAHMTWLKADIATLDDDLETRLRASPLWRENDDVLQSAKGIGPVCAPTLLLELPELGTLTRQHIAALVGVAPLHGDSGTLRGRRTMWGGRAPVRTVLSMGTLVATRFTPQITVFYERLVAAGKGKKVALTACLHKFLTILNAMLKHRTPWKPQEVQN

SEQ ID NO: 268047 - protein, 310 aa, unidentified
MERIYIGIDVAKDRLDVHIRPADEAFAVARDGEGLSVLIERLTGLDPALVVLEATGGFEQVVAAALAGAGLSLAVVNPRQVRDFARATGQLAKTDALDAKAIARFAEAVRPEPRPLADAEARAFSELVARRRQIIEMMTAERNRRRRLTSKPLIKGIDRVLAALEKELAKLDGDLDGAIRSSPVWRECEQPLTSVPGVGPTSARTLIAELPELGTLDRKKIAALVGVAPLNRDSGTFRGRRVTWGGRAKVRAVLYMAALVGSRHNPVLNAFYRRLLDAGKPKKLALVALMRKLLTILNAILRDKSPWQIA

SEQ ID NO: 268048 - protein, 406 aa, unidentified
MFYLGIDVALNTHRLVMLDDNGERVSSGISFQNNTADFEKVLNKLKELSINPDNSIAGLEATGNNWENLYCFLTSNKFKTIVLNPHQTNKFREALRKKAKTDDIDAFVIAGLLRSNEFASSYVPKDKIQALRELVKLRYEFIKDHKNYQRQVLALLNIIFPEYKQTALKNPFAISSTAIFKSFATAKHLSIVKPKHIEKIVRSIKGNNFNIKEIENLISIAKTSVYSGRCQESRALTLNILLTQIENFSKAIQQLDEQTNQILSPESNDDINSFPGSNLLTIPGVGPKTLAAILSCVGESGQAFSTGVKLIGHIGFFPQIYESGETRRANKISNKGPAYLRQALYISSVACIKHNLQLRNLYHTKISQGKKPKQALICVAKKLAHLCLSMLHSGQDYNPARVFSYV

SEQ ID NO: 268049 - protein, 355 aa, unidentified
MDSKKYIGMDVHKESISIAVMNGAGKIVMECVIETKASMILQFFDGLRGDLQVTFEEGTSAAWLYDLLKPHVTKLVVCDPRKNKSMREGNQSDKIDARRLAELLRLDHLTPVYHGEHGLRTLKELVRTYLTVTKDLTRVMSRVKAIYRSWAIPCTGKQVYARRHRAEWLGKINEPGVHRRAEFYYQQLDALRVVRQEVRRDLLAESKKQKAWKRLCEIPSIGPIRAAVLLGILQTPHRFRTKRPLWNYGGLAIEMHSSADHRRVNGQLQRSRKNVLVRGLNRNCNHDLKNLFKGAAAVASSKSGPFQEFYTALVAKGMRPEMARLTLARKIATIVLIVWKRGVCFDAQHLKPQTA

SEQ ID NO: 268050 - protein, 410 aa, unidentified
MRYYLGVDWADQTHAVWVVDESGMKVTAGAVSHTAEGLGAWGRELDEWRAQGIDLWAAIERPDGRVVDLLLDHGVVVYPVNPKALDRARDRFRQSGAKSDSFDARVLADFLRTDHAHLRALQPSSEAAQELKLLTEDCQRHIRQQTRLVNQLTATLKAYYPRALEVAELTSALAREFLPAYPTPAALTALTERQWQRWARAHRLTEARTGELWNVLRQPQLPVPVHVVRAKARLMQALVKQLMPVMAAVAQYRRAIDDFFASMPAAQWARTLPIGKHGITAPTLWARLGDAPGRWEAFRHLQAHAGTVPVTKRSGKQQRVVQFRFACDKALRYVVDQVAFLSLLSSAWARAYYDQQRARGHSHRQALRALGAKWLKIIFVMWERHVPYDERYHLATMTRQQLRPRQKQIA

SEQ ID NO: 268051 - protein, 276 aa, unidentified
MKTYAGIDLHSSNNYIGVIDAKDKRLYSKRHDNRIEDVLKVLGKFKASLQGVVIESTYNWYWLVDGLMDQGYTVHLANPNAIQTYNGLKHTDDKWDSFWLAHLLRLGILPEGYIYPKHQRPLRDLLRRRLIFVRQRTSQILSLQSMITRNRGLNFSGAQIKRFRDEFIDKLFSDRHLVFTAKRNIATIRFLDQIVSEIEIEVASQIKLKKEFISLLTTPGIGNILGLTIMLEVGNIGRFPKAGNYSSYSRCVESKKTSNGKKKFDSPMPAAAKGLV

SEQ ID NO: 268052 - protein, 337 aa, unidentified
MEYFAGLDISMKETHICVMDRDGKVALEAKTATSAAAIAATLAKAPTAQQIAFETGRMATTLYHGLAALDLPVVCIESRHAHQALKSLATHKTDRNDARGLAHLARTGFYKPVHVKSLPAHAVRALIIARKKLVGQRVTLENQIRGLALVFGVRLPRGLSPAFAEQVTSGSSEVPALAGALRGLLAARNALLGAIAAINRDIKRLVRSSEACQRLMTIPGVGHVTALAFVAAIDEPDRFRSSRDVGPYLGLVPRRWKSGEIDYTGSISKVGDRRVRTLLYEAANVMLTRYRGDLALKDWALRIGKRSTMRKARVALARRLAIIMHAMLRDGTDFQVA

SEQ ID NO: 268053 - protein, 417 aa, unidentified
MGGNSCFNHAMMGGGADMDKTQQFRWFLGIDVSKETFDACCINRKGERLFSLSTSMNRKGFEELIKPFSSLSIPQESLLVGMESTACYHINLYSFLVSSGYTVIVMNPLLISNFVKLQLRKTKTDKKDAYVIAQFLLLNRDSLSQTIVSSDISDLRDLSRQRESLVDQMSSTKSEIKRLLTITFPELEHIAGVFTKSMLRLLCQYPSAASMRQVKRSKIAKILIPGSYGKQTDASVDRIVKAAQVSVGTASPTKEILLKQKASILIQLEEYLQELTEVLMELCQAKIQEDMDILTSMKGIGEKTAMNFLIEMGGDIKQFESHKKLIAMAGLDPALYQSGKMDRKGRISKRGNRHLRRVIWLMTTKVIQFNGRFKQYYMKRIKDGLPYKMAVLATAHKLIRVMFAMLTNRTLFNPRMN

SEQ ID NO: 268054 - protein, 414 aa, unidentified
MERLYTCCAGLDVHKQTVVACLLRPEREAEQKEIQTFGTTTAALIALREWLLAAGCTHVAMEATGSFWKPVHNILEGHCTLLVVNAAHMQAVPGRKTDVRDAEWIATLLQHGLLRASFIPSREQRELRDLTRTRTSLIDERSAAVNRIQKVLEDANIKLAGVATDIMGKSGRDILAALLGGEMAASTMANLARGKLRRKRDALEQALQGRMAAHHRMLIALHLEHIDLLEEQIAPLSAEIAERLRPCEAVLVRLETIPGVGRRTAEILAAEMGLDMARFPSAGHLASWAGMCPGVHESAGKRKSGKRREGNKALRRALTEAARAAARTKKKDRMYLRGQYRRLVVRVGKKKAAVAVGHTILRLAYHLLMNETTYQEHVMIQLDERRRAQTQRRALDQLKALGYEVTLTPKEPAA

SEQ ID NO: 268055 - protein, 334 aa, unidentified
MAFDQHREQIAFDALDTATGELSRGRIRPADRDGFRRWLRRWDGEEIEVALEATTGWRFMVEELEAVGAQVHLAEPAETSALRGPKKRAKTDRQDARRLRELLQAGRVPESWIPPEHILELRSKVRLRHTLIQQRGEWQQRIQAQLYHHGVPRRRQLLVGERRAWLEGLELPDAARRQIQVALAMIDAVDEQLGPLDRELRALARRQPGCRALQAHYGIGAITSLAILAELGDARRFSSSRHAVRYAGMDITVSESDRKRAPGHLSRQGPPTLRWALFEAAQVARRQGSPDRDYYEQAAHRLGGNRACLSVARKLLQRAYHTLRELGEEALQPA

SEQ ID NO: 268056 - protein, 438 aa, unidentified
MSNKVIFNLDELFISVGIDVGADFSWMSIALPNQQFVGKPYKILHNSIDSLTTAVSKIKEAEELYSLESRIFLESTGIYHYPLFCYLRDKGFNCSVINPIITKNSTSINIRKVHNDRFDSKKAALVGLKPDLKVSLMPSDLALNCRNLCREYYDLIDNRSAYVNKLQGELRMAFPQYLGIFSKVTINTSLTLLETYTSPSAFLKADKQEIIDIIKSTARFGLTYAQNKYNAIIQAATDANQFGYIIDSNIKRIRLYISFIRKYDEEINSILESLHELVDANEDSDFVKQIHLIETFKGAGFLSAVSIMGEIGDFSAFSKPKQLFAYFGLDPSVKQSGKFEGTKVQMSKRGSAIARRVIHTLTLQSISISRNREAKNPVLREYYLKKCDSKPKLVAMGAVSHKVCNMIFAILRDNKPFKIIAPQEHIQQYNAAKCDIAA

SEQ ID NO: 268057 - protein, 349 aa, unidentified
MIIGCDYHPGFEQIAFVDTETGELQERRLEHREEAEKFYRDLAAQGMKVRVGMEASGHARWFERLLAELQFELWIGDAAAINAKRVRKQKTDRQDAQLILRLMLKDDFPQIWVPSWENRDLRQLLWHRHRMVQARTRIMNQLQAVALNEGLRCKKKLWREAGRGQLEAFKLAPWASQRRVDLLELLDRLNPTIGKLTQAIDMEVEKCPAARRLKTHPGVGSLTALAFVLIIGKADRFQCGKQIASYLGLVPLEKSSGNQRRLGHITKQGNSLLRFLLVEAAQVTVRSLPEWRSKYCHLTIRRGRKIAKVAMARKLAVRLYWMLRKEWDYEQLRKFGSYAGKPGHRDGVK

SEQ ID NO: 268058 - protein, 346 aa, unidentified
MEHYAGIDVSLELSSVCVVDAQGKIVKEAKVASEPEGVVAFFEALGFAVKRIGLEAGPLSQWLHAGLKEAGFETVLLETRHVKAALSAMTVKTDRKDARGLAQLLRMGWFQQVHAKSMASREVRALLVGRKQLLGRLIDVELSIRGILRGFGLKVGAVTRKGFEARIRELVTGQATLERIAEAMLSARAALKAEYEKLHQAVLAIVREDAVCRRLMTVPSVGPLVAITYKSALDDPSRIAKSKAAGALFGLTPKKYQSGEKDVTGGITRTGDEMVRTALYEAANVLLSRITRFSKLKRWGMDVAKRRGSKRAKVALARKIAVILHRMWIDGTTYRWAEAKPIAAQA

SEQ ID NO: 268059 - protein, 344 aa, unidentified
MSIVILGVDLGKNACSVVGVDAAGAVVLRRSMRRQTLIDYVAKLPSCVIAMEACCGAHHLGRLFAARGHEIRLMSPEYVRPYVKAQKNDDRDAEAIAEAASRPTMRFVDLKSEEQLDLQTLHRVRSRLVAERTSLINQARAILLERGMIFPAGRRKLEAGLDVLLADGADACLSPRMRQLVGELRAEWQVLDARIETLNGEFVETARHDETMRRLTSIPGIGVLNATALVAAVGNGSGFNKARDLGAWLGLVPRQHSTGGKARLFGITKRGNKYLRTLLIHGARAALPSLSQSDTPIGRWLKAMIERGVHRNVVVVALANKLARIAWAALRKDVRFEHSYPVAA

SEQ ID NO: 268060 - protein, 422 aa, unidentified
MEGPVEVIFRRCAGLDVHKKTVTVCVRILDETGRLQKQTRTFGTTTGELEIMATWFVALEITHVAMESTGVFWKPIYNILEGRFELLLCNAQHVKRVPGRKTDVKDSEWLAQLLQHGLLRGSFVPERPLRDLRDLTRHRAQLVGEQTRAANRIHKVLEDANIKLGAVASDILGVSGRAILNAIVGGENDPKRLAGMAVGQLRKKIPDLEKALRGNLTEHHRFMLSTLLGQVDYLEGLIAKLSQRIAELTPTLPLEGDVLPFDEAVRLATTSPGFAETGAQNVLAEIGTDMKRFPTAAHLASWSGICPGNHESAGKQRNGRARKGSRWLRRALVQAAWAASRTKNTYLSVQFWRLSRRRGRKRALVAVAHSLLVILYHMLERRQPYGDLGPMHFDELHPERLTRNLVRRLEALGHKVALEKIA

SEQ ID NO: 268061 - protein, 429 aa, unidentified
MESQEIRFTQVVEIGCGLDVHKDLVTATIRKSNDDLETREYNAYTSSLKSLRDWCKKEKVTHVAMESTGVYWKPVFNVLERDFEVILVNARHVKNVPGHKTDKKDSRWLSKLLLSGLLKGSFIPPVDIRELRDLTRYKKKVTGQAASEKNRIIKILEDANIKLSSVLSNVDGSVGTKIINSLIEGQTDIDELMKFYHGKIKTSRKEFRLALEGKVTKHHQFMLQLHKDSIAEKERLIERIDAEIEEATKAYQVEIDLLQTIPGVGKDSAIRIISEIGVDMNRFPDETHLSSWAGMSPGNNETGGKKKNARTVHGNKYLQSTLVECGWGATRKKDGFLKRKYESLVGRRGKKKALVAIGHKIIIAAYHIIKNKEPYKEPELHNSPRKERKQIKNHLNRLKELGFDVSKMQNQLEGRFFTEPFESSSMKLI

SEQ ID NO: 268062 - protein, 398 aa, unidentified
MTAGIDWASEDHAVAIVDQHGRAVDRFSVTHTTPGLRRLVTRLRRAGVCEVAIERPDGPVVDALLDAEFTVFVIAPKQMKSLRGRYCSAGNKDDRFDAYVLADVLRTDRARMQPLTRDSEQTITLRMTVRARQDLVHARVAMGNQLRAHLEITLPGAIGLFRDLDSGISLAFLRRFPSQHSADWLSEVRLANWLRSVGYNHQANADRLWAKLRDAPRGSTGVDAAARAQITLALVAAITALKDQIRALEDLIADQLATHPDAVIFTSLPRTRTVRAARLLAEIGDARGRFPTPEALTCLAGAAPSTRQSGKVKVVTFRWAVDKQLRGAVIDFAGDSHHANPWAADLHTRARDRGHDHPHAVRVLARAWLHVIWRCWQDGVPYDPAKHGALQALLARTA

SEQ ID NO: 268063 - protein, 342 aa, unidentified
MPTPTPSERLFVGVDIAATSFAAAWSVNGAPPQRARTFAQTPDGFAAFQAALATTGVATAHILIVLEATGSYWITLAVTLHQAGYVVSIGNPAQVHACAGSLPRRAKTDLLDAQLLTPFAAERQPPCWTPPAQVYHEVRQRVLVRDGLLTMRQQARNQRHALHQWPVQIAGALDQLDAVIADLDRRIATLDAELTIVLRDGAWAQSAALLRSITGIGLVTTAWLLVATLNFEACASAERAAAYAGLVPLAHESGTSVRGRAQIGHSGHARLRTALYMATLSAARRNPVIRAQYERLRAAGKPPKVARCAAARKLLHLAYAVATKGEPFNPHYGTARGAAAGG

SEQ ID NO: 268064 - protein, 310 aa, unidentified
MEITVGIDVSRARLDVHVHPVGESFALGNDEAGVAELGERLGRIEGLCSIGIEASGRYERLAVAQLAAAGLPVVVLNPAQVRHYAQAIGLRAKTDPIDARLIALFVAAVRPEPRPLPDARTAELEALMARRRQLVQMLVAERQRRQQAAPGQVRVSLARVVATLEDALRDLDGHIDKTVRGTPVWRDKEDLLASVPGIGKTISRTLLAELPELGALSPRQIAALAGLAPYTRQSGKWRGHSFIGGGRPAVRAALFMGALVACRHNPILKAFHDRLLAKGKPKLVALIATARKLLTILNAIIRDQTPWQTT

SEQ ID NO: 268065 - protein, 322 aa, unidentified
MASEKFDVSFIDEDGRARHIVVKNTFAQIEKFLDKLPAEAHLVAEHTGVYGDLLLYLADSRGVAVSYVQAYAIKHSMGLVRGKSDPLDCARIREYGERNTDRLVPTHFPSESLYRLKELHATRRLLVDMRKLALTSQRGDRMRPLHSTVAESAKAAAIEELNARIDEVEKEMQRIIDQDPALKKTSEIVQSIPGIGPVTTTQLIIKTDNFTRVATPKKCATLAGISPWPNSTGKSDRGCHVSLMGDRELKSLLYMCARSASVYFEKMRIYRMKKQDVEKKHFFVVMNNIANRLLKIIYALVRKGEMFDPNFVTIDPRLKTCI

SEQ ID NO: 268066 - protein, 400 aa, unidentified
MSTRQAQIWVGIDAGKGHHWAVAVNTDGETLFSTKVINDEAQILTLIDMAREKADEVRWAVDISGRASALLLALLIAHGQQVVYVPGRTVNRMTGAYRGEGKTDAKDALVIADQARMRRDFAAIETPPELVSTLQLLTGYRRDLIADRVRLINRLRDLLVGICPALERAFDYSAAKGPVVMLTEYQTPAALRRIGVKRLTTWLERRKVRGADAVAAKAFEAAQSQVTALPGEGRAAKLVRGLAHQLLALDERIKDNDREIRETFRADDRAEIIESMPGMGPILGAEFVAIVGDLSGYRDAGRLASHAGLAPVPRDSGRRTGNYHRPKRYNRRLRWLFYMSAQSAMMRPGPSRDYYLKKRGQGLLHTQALLSLARRRVDVLWAMLRDKRLFTSAPPVTHAA

SEQ ID NO: 268067 - protein, 364 aa, unidentified
MLYVGIDQHRKQLTVNVREESGNIILRRQVSTEWKKVRAFFDEVRELAQVHDGYISVVEICGFNDWLLKLLPEHGCRETVVVQPGDQSSHKTDRRDASGLSETLWINRDRISRNLPVRGLRRIQVAGPEEQADRRLTSQRHDVGRELTRSINRTKAVLRRHNLEQECPTKGIQTQRARKWLNQLLLGPVERAELNHQLARQDLLRKQLKELQTAILQRYEINHTAQLISTMPGAAAYSSLGLACRIGDIRRFKHPRSLANYWGLTPRSRNSGETDQRLGSITKQGSALARFLLGQLVLHVLRKDAWMRMWFRGIKRRRGSKIGRVAVMRRLATILWHMVTKNEPYVYGGPPRAPLARPAAADRT

SEQ ID NO: 268068 - protein, 320 aa, unidentified
MNQKATAQWVGIDVSKASLDVFVQPTGERWRVGTRQAQLDALVEQLAALAAERIVLEASGGYEAPLVAALVSRDLPVVVVNPRQVRDFARATGQLAKTDRIDAQVLAQFGEAIRPQLRPLGDATTRALRALVSRRRQLQEMLTAEQNRLMSAAVQDAPEPLRDQLGEHIDWLRRQLAQVDDDLQHHLQDSPVWRARENLLRTIPGIGPVTSATLLSHLPELGQLDRKAIAKLVGVAPLNHDSGTLHGRRRVWGGRSTVRAVLYMAALVATRCNALIRDFYVRLCAAGKPKKVALVACMHKLLLLCRSVLRSATPWRPVTP

SEQ ID NO: 268069 - protein, 343 aa, unidentified
MLHAGLDLSRARLDVCLVDESGEFVAHTAAPPDADGLRHLADRLRGHRVRAVIESMTGARFVHDALEEFGWEVLVADAQKVKGLAPLACKTDKIDARVLAELSWRDLVPVIWLPDPSIRRERELARYRLHLVRHRTTLKNRIHATLMTGHPCPVSDLFGLAGRELLDRLALPDPWRRNVDASLELIDDLELQIAQLTVEMRRQGADHRYIPLLVTAPGFGWINAFTVASEIGDIERFASPAKLCGYTGLCPRVYQSGNSDRRGPITKNGSRYLRWALFEAAMHACTHPVYKERYQRTKRRLGRQRGPKVAQIDLSRKLTEAIWHMLTRNQPFAPAGAAFRLAA

SEQ ID NO: 268070 - protein, 364 aa, unidentified
MAQDTMIEAAVTGGLDVSDRYTYVCVLNFSGGVVDEGRVPTTPEALRRRFSGHGPMRLVLETGTHSPWISRLLEACGHEVLVANARQLRLIAQSDSKNDRADAETLARVGRLDPALLKPIRHRGAEAQLDLALIRARDALVQARTQLVNHVRGAVKAVGGRLPACSTASFPMKVGEAIPAGLRPALGPVLDVIAAVGKELGHYERLVEDLATTRYPETAALRQVPGVGALTALSYVLTLEDPARFAKSRAVGSYLGLRPKQRDSGAGAPQLRITKTGDAYLRRLLVGSAHYVLGPFGPDSDLRHWGSALAARGGKNAKKRAVVAVARKLAVLLHRLWVTGAVYEPLRVAEQRPAATPVLTASNC

SEQ ID NO: 268071 - protein, 356 aa, unidentified
MSYDVKYIGMDVHKEAIVIAVLNEGGKLVMESVIETRASSILQFLHGLRGELHVTWEEGTWAAWLYDLLQPQVQHIVVCNPRRNALLKEGSKSDKVDAHKLADLLRTGMLRPVYHGENGLRTLRELGRSYQTISKDLTRVMNRLKALYRGWGIPCAGTQVYAARCREEWLSKIPQAGVRRRAELLYQQLDGLQILRRDVRSEFLAESRKHKAAKLLRQIPCIGPIRAARLIGLMQTPHRFRSKRQLWTYSGLGVETHDSAQYRFVSGHVQRSKKPQQVRGLNQNHNHEMKEIFKSAATRASCGRGPFYDFYAGLLAKGMKPEMARLTLARKIAAITLTLWKKEERFDAEQLKTQAA

SEQ ID NO: 268072 - protein, 420 aa, unidentified
MVYIGIDISKSSFVAAYPSMNGYRTKTYPNTAAGVRKFIVTLSVAEHHCIMESTGNYGFLLLYLLHQSGIAVSLVNPKQIKHFARMMMTVTKTDEKDACMIAMYGEKMNPPIYKMPSQAIILLKQKKTVICQLRKQLVASKNLRESLIVLPYRDKACVRALDKTIDFLTKQIEQLEAELADIASAEFDKQLKALTSIKGIGITLATALILTTGGFTYFDNAKQLSRFIGICPTYQQSGTSINIKGHINRNGDEHLRSLLYVSSWTALRYNTACRETVSVIKTEEGHICYNCYSDKKNPPKQKQYHDNEEARIQSEFFSKVPLFFPNLPDRLLFAVPNGGSRHKIEAANMKRQGVKRGVADVILQIPKKGYASLCLEFKTSTGKQSAEQKEYQRQVEMAGSKYVIVRSVEQAIRELQLYLG

SEQ ID NO: 268073 - protein, 413 aa, unidentified
MAEETISWFAGVDWGSERHQVCLLDARGTTVGEREFPHSGEGLAELGDWLLSMASAASTVAVAIEVPHGPVVDALIDRGFVVYAINPKQLDRLRDRFSVAGAKDDRRDAYVQADGLRTDRRLFRHLQVADPRLIELRAWSRLAEELQAERVRLSNRVRHQLWRYYPQMQKLTNDLAAPWFLELWTIASTPAKAGRLRKSTVERLLKQYRIRRIDAETVLRILREPAIKVAEGVAEAASIHMRSLVARLRIVNRELREAERKLDELCTAVSEIEQTSGESLQRRDVAILRSMPGIGRINLATLLSEASGPLSRRDYEGLRTLSGAAPVTKRSGKSLIVVRRYAAHVRLRDTVYHWARVATQRDPKCRARYTALRKRGHSHGRALRSVADRLLALACVLLQRQTLFDPHFGRPTT

SEQ ID NO: 268074 - protein, 392 aa, unidentified
MVVSVGIDVAKDKHDCFIQSSEGEVLADVFTISNNMDGFHTLLEKIQACTTPQDKIRVGLEATGHYSYNLLGFLLDNGLATYVLNPLRTNLYRKSLSLRKTKTDRVDARTIAAILLSDAGLKPYTDTAYHNEELKSLTRYRFDKVKERAKLKSSVSRLVCILFPELEKLVPSLHMASVYALLEEFPGAKQVAGAHLTSLKSLLEKASKGRYKRDMALSIRDTARMSIGSRMPAKSLELQHTIRLIRELDAEIHEIEAEIETMTDEIRSPIMTIPGIGCRMGAMILAEAGDLSRFDSPDKLLAYAGMSPSTYQSGQLNNCYPHMEKRGSRYLRYALFNATKYVCLWDPTFAAYLAKKRAEGKHYNVAISHAAKKLVRLIFAMEKSRQPYCSAA

SEQ ID NO: 268075 - protein, 357 aa, unidentified
MKYIGCDFHPSFQQIAMLDKETGELVERRLLHTEEARAFYEGLQGPVVIGIEASGNMDWFESLLAGLGQEMWIGDAAAIARQEGRKQKHDRRSAALILRLMVENRFPRIWVPTVAERDLRQLLIHRHHLVRMRARIKNQLQHMALNQGWQKKSKLWSRAGLELLGNLKLEPWAGQRRDTLLAMREDLEEKIKPLDQAVAREAERNPMARLLATHPGVGPVTSLATVLTMGDVNRFADSRSWVSYVGLNPSEESSGQRRRLGSISKQGNPFLRQLLVEAALTAARGDKDLGRMNARLKARKHHGVAKVAVARKLAVRLYWMARTKRSYPDVVRMQGSQSHPVAEVKAETLNRPPASHQ

SEQ ID NO: 268076 - protein, 298 aa, unidentified
MLIIGCDYHPAFQPIAFVDTETGELQERRLQHREEAEKFYRELAAQGMKVRVGMEASGHARWFERLLAELNIELWIGDATEIARKRERKQKTDRLDAQHILKLMLKDDFPQIWVPSWENRDLRQLLWHRHRMVQARTRIMNQLQAVALNEGVHCKKRLWREAGRKQLEGFRLAPWASRRRHDVLELLDRLNPTIAELTQAIEREVEKCPEARRLQTHPGVGPLTALAFVLIIGKADRFQCGKQIASYLGLVPLEDSSGNRRRLGHITKQGNSLLRFLLVEAAQVRRAAFRNGAVSMST

SEQ ID NO: 268077 - protein, 369 aa, unidentified
MNTTTFVGLDVHARSIKAVALDAMTGEVRSATFGYDAAEVAGWVSSVDPSAKCVYESGVTGFDLQKRLASMGIDCVVGAVSKMIKPPADRKRKNDRNDAEFLARMLSVGNVVEVWVPDDGCEAARDLSRALDDAREDLKRRKQRLSKFLLRHGYAFSETTPTGRRKGSWTAAHWAWIKSISFPEKADDDVLAYYVDAVRQAMEDKARLERLVEAEASKPRWKRRVDSVRCLKGIDVTSAADLVFEAGEFSRFKSARSFAAWLGLTPSERSSGESVRQGGITKAGNKHLRRVLVESAWHYLGCSPHSKDLAKGQVPDPAARRHAAKGVRRLVERRRAMLERGVHKNKANVATARELACWCWAVGRMVENG

SEQ ID NO: 268078 - protein, 389 aa, unidentified
MRQQSIPTQLSRLFVGMDVHKDNHAAVAVNCFGDPLFKQELGNEVKDFNQLIARVQAITKERQLNPVFGLEDTSGSGEFLARFLFNHGYEVKTINPVLVKRERDYETHPEKSDLADALGVAKVLIQRIDSVPAYNISETTEVSRDIRALTKDRETIVLEQTRLKNQLHALLHHSFGSMYKSLFRDVFAKKALLFWHNFPSAQILKSSRKRNTAKPDWITRRSADELPHASETQANQIRRKVKRLLAIREELNEIEKELDGLLGQTGQKLDTLPGCGPTLSAVVLAEIKDINRFSSPAKLAKYAGCAPRKLESGKRRRHVKTRSGNRRLNKALYQIALTQISNQGILKAKAYFQKKVNEGKSKKHALTCLKRQIVDIIWSMLKEKRAYYS

SEQ ID NO: 268079 - protein, 377 aa, unidentified
MNESTTVFVGLDVHKDSIDIALADAPRDSDVRHLGTVAGGVDAVTKAMRRLVSAGHRLHIVYEAGPCGYALQRHFAGLGWHCEVVAPSSIPRPAGERVKTDRRDAMKLARLARVGELTPVRVPDEADEALRDLVRAREDAVREQRNARHRLKALLLRNGITYSGKSAWTAAHLRWLATLALPHAAQQIAFQEYLHAITESGARIARLEQALRDALPTWTLAPVVAALQALRGVQLIAAVTLVAEIQDFWRFASPRQLMAYLGLVPGENSSGPRRRLGAITKAGNAPARRMLVEIAHLYRHPARVSPVIARRQAKLPKTVTDIAWSAQTRLCARFRRLAARRVPHNRIVVAIARELVGFVWAIAREVTPAPATPQRKQ

SEQ ID NO: 268080 - protein, 317 aa, unidentified
MQTFLNIGVDVAKDAVVVACATQSFPVHSVTNQRAPLLAWLKSLPAGSRIGLESTGGYHELLADLAQSQGYTVFLLNPLDTRHYAKAMGNRAKTDRVDAELIARLIAQEHTRLRPYTPPTANQRKLDRLIRRRAKIVRIKSTLKLTMLNLGGFAAELKAVLCKLDALIAKIDAAMSAIAACSPQHVEAQQHLQTIVGVGPVVGMALANTLERVPFHNADAFVAFTGYDPRANDSGHKTGRRRLSKRGPGELRRLLYNAAMSAAKTKVWKPVYEHYRAQGWSTTASLVIIARKIARAAWSIHHYHSTFNPERITKCLT

SEQ ID NO: 268081 - protein, 350 aa, unidentified
MKKIVKQVLGIDVAQKELVVCLGRIYDDLTSELYASKTFANTTKGFVKLIEWVAKITDSAVPTRYVMEATGVYHESLAYFLEEKAIEVSVVLPNKISNYARSLDVKTVTDKTASEAIALFGLERQLERWHKPKELYKKIKQLTRERSQLIDERTTLKNQLHAEQSEAEPYKKSIDRVTKRIALINKQEKEIGVEIAALIKTDKETQETVTLIRSIPGVGLLTAAIVLGETNGFDLIRNKRQLTSYAGLDVKEKQSGTSVKGKPRISKKGNKHLRRAMHLPALAAIRFEERFKTIFVRLVSKHGIKMKAAVAVQRKLLEMIYTIYKTKKPYYKQFLNKQNNETLELVQAVK

SEQ ID NO: 268082 - protein, 410 aa, unidentified
MEVLVSRGCGLDVHQATVVACLLTGEPGKLPRKQVKTFSTMTSGLIELRDWLKAADCTAVAMEATGIYWKPVYNILEGHFDLIVANARHIKAVPGRKTDVKDAEWIADLLRHGLLQPSYVPPPELRELRSLLRYRVKLVNARSAERNRIIKLLESANIKLSGVISDPFGVSGRLMLDALKRGVASAEEMAELAKKRLRSKLPLLKLALDGRMEAHHRQLLSIQMDRLDRFDRDLKQMDAKLEAKLKPYARQMELLDGIPGIDWVVGATVIAEMGVKMSQWPTVGHLTSWAGLCPGQNESAGKRGKTSVRPGNPYLRSALVEASLAVTREKDCYFREKYYRLKARRGHKRAVVAIAHKLLVAIYHVLSSDTPYRELGADYLERLEPERLKLNLVRRLERLGFQVKLEPRRA

SEQ ID NO: 268083 - protein, 350 aa, unidentified
MSNHKFAAADVHAATTTFAVLDSSGKFVMETVVETKAESLLSVVKSMTGSVHLTFEEGTHAAWLYDLLRPHVAELVVCDPRKNRNDKGNKSDRIDARQLARWLRSGDLSPVYHGLDCTKVLKELVRGYENLVVDSVRVKNRLKAVYRSQGQSTPGGDVYSLEKQEEWLSKLQSSGLRSRAEWLYLQMESLHELRQEAEKAVLREAKKHRPCSLLKSVPGIGPIRSATIVAHVATPFRFRTKRQFWSYCGLAVVTRGSSDWEIEGEELRRKRQSVSTRGLNRNHNRHLKDAFKGAVRDARALRPHLDSLVESGMRKSMARLTVARKIAATCLAIWKKGEKFNLSKAVIRSE

SEQ ID NO: 268084 - protein, 350 aa, unidentified
MMRTVYCGVDFHARMQTIAYCDSADGEVKLAQLDHRNEDVRDFYSKLTGPVIVGLESGGYSSWFEEMLEELGHTVWTGHATEIRRRANWRQKNDRRDAELILEIMLKGDFPVVHRHSQESIEVLRMLRYRARLVKMRTMISNNLRAIAINSGLSERSRMLSRAGQQRLKDARMTPATRHQSENLISLLVPLNERIGKVDRWLKEQASTDDRVKLLMTHPGVGVLTALGVVHTLEPFDRFTRQRSVVAYVGLEPMERSSAERKRFLGISKAGSRLLRFFLGEAAHVAVRFDEDLKQFHERVGKRRGKSIATVAVARKLLIRCWIMLRENIDYAEFRSRGVEARLARQTHRP

SEQ ID NO: 268085 - protein, 353 aa, unidentified
MAVAEPDGTVVEYGAIPNDPSSVRRLVEKLSRDAQLRTAYEAGPTGYPLHRQLTGLGIENLVVAPSLIPRRPGDRVKTDQRDAVQLARLLRNGDLTPVWVPDEAHEALRDLVRARDDARAEGLRAKHHLSKFLLRQGVIAPARVGRAWSARHQAWLNTLTFHDRAAQVTFDDYLACVRAATERLRRLDAALLECGASSPHVELLRALQAVRGIGFLTAVTIVAEAGDLHRFRSAPAFMAYVGLVPSEHSSGGSRRRGHLTKTGNRLLRHVLGEAAHHARLQPALSKELSHRQQGVAPGVVEISWRCQQRLHHKYRHLGGRIGRQRAIGAVARELAGFVWAIGQALQPVAAVAA

SEQ ID NO: 268086 - protein, 445 aa, unidentified
MQKYYLGCDVSKGYADFVILDSAKRIVENNFQLDDTFKGHNKLYLILTDFYKTNPDSSILSAVESTGGYENNWFNTFSKLGEILNLNVVRLNPLGVNHSQKASMNRAITDEISAYNIAEYLINHQNKIRPNTKSYYSSLRKQWIFVKLLVKQRVQLLNQLESIVYTANTEVLSYCKHSTPNWLLQVLKKYPTSKRLSRANVSSLIKIPFVSREKAETLIAKAKLSISSSNDKTTETIIKATVEQILKLAKVIAYHEKQMSEGCNLPEVKLLESFTGIGTYSAVGLLLEIGAVERFATAKKLASFFGLHPTLKSSGDGRAFVRISKKGRREHRVILFNIARTSITYNPLIKEIYEKHVKRGMPKIAALGVVMHKILRIVYGMLKNNTAFDPEIDRINRERSETKKEKTIKISKARRYQSYDIQAPVSRRQGNIRKEEKMSQVFETA

SEQ ID NO: 268087 - protein, 334 aa, unidentified
MEYYAGLDLHKSMSVIVVKDKEGKLLKRGKVNNEPSALNEFFSDFKAGHMQVVLEATTNYSWMYDRLEEMGHGVVLAHPLKVKAIASAKVKTDKIDAGILSDLLRANLVPESYVPPPAIRDLRELIRHRIRLVKARTQSKHAISAMLSKLNLSSGQTDTFGKKGRLFLNNLNLNESFKIQRQDMLAHIDFISERVKSIDRLLALKTKEYPQTTKLVEIPGIGIFSALLILAEIGDIQRFDSPKKLASYAGLVPGVYQSAQTRHTRGITRQGSRYLRWILVEASQIIVRHPGPLREFYLRLFKTKGYGKALVAVARKMLVGIYFVLKENKEFCPN

SEQ ID NO: 268088 - protein, 364 aa, unidentified
MKKLPPRGFSVTMNPQEKEDRKEVAKMYYTGIDLHKKTSFITTIDNSGKVVFRRNFANQQEQILDYFINLDAPTKIVIEAMCSWHWLYDLLTAHHLNVVISNPLKTKAIASAKIKNDKVDSHMLAQLLRAELIATVHVCSLKTRKLKELLRHRRRLVADATRMKNRIHMLLMKNNITVPVSDLFGAKGMKYLKEIDLPIYHRQQLRSYLTLYGQLTKQIQPLTKRIGRLAKKDPMAQLLMTIPGIGPLTAMYIKAEIEDISRFPSYRNLASYAGLVPCLDASADKSRTGRITKQGSPYLRTALVEAAQIIPRMKKTRLNAFFRKRIVRAGYQKAIVATAHKILQYVYYVLKNQTPYREEYAVCA

SEQ ID NO: 268089 - protein, 350 aa, unidentified
MKIVGCDFHPSYQQVAVFDTLTGEVEERKLMHADGQAEQFYRKLEAPALIGMESVGNAQWLVRLVESLGHQLWIGDAAKIRASYVRKQKTDKRDAGHILKLLLENRFPRIWVPNQQQRDLRQLLLHRHKLVGVRTRLKTELQHLALNLGVQKKRQLWSVRGRAELEKLPLEGWTKRRRQDLLALLKVVEPQIEELDKAAAEAAAAHPQARLLMSQPGVGPLTALAFVLTIGEVARFARSKQLASYLGLIPSEHSSGSKRRLGSISKQGNVFLRTLLVEAAQSAVRHDPLFRKEYKHRCHHKPKGVAKVAAARKLAVRLYWMLKTSKPYPEVLHIEGSPRHPVAAKASPSC

SEQ ID NO: 268090 - protein, 379 aa, unidentified
MKKDIRFVGLDVHAETISVAVADPSGEVRSIGIIPNRPEAIRKLVKRLGPPDTLRACYEAGPTGYVLYWQLTELGVRCDVVAPTLVPVKAGDRVKTDRRDAEKLARSYRSGDLTPVWVPDAAHEALRDLVRAREAAKKDQMRARHRLGKFLLRHGRRPPNGIKPWTVKHLEWVKKEVDFDQQAQRAVLLDYISEVDHARDRIQRLERAIDEAVETAPERMRAVIEALQALRGVAQVSAVTIVAEVGELSRFARPRQLMGYSGAVSSEHSSGERTRRGAISKAGNSHLRRIVVEAAWAYRHKPSLGGALRSRQDGLSEEVKAIAWKAQHRLHSRYRRLAAKGKVRQQVVTAVARGLLGFIWAIGVTVEMNTKAAGKQPAR

SEQ ID NO: 268091 - protein, 373 aa, unidentified
MSNVEKDFGKGKPIYVGIDVHKQDWVVTVLCRGEELYHATVVPEPAALVRLLKRFEASEVHTVYEAGPTGYWLHDALEEAGFDSMVTPPSLVPRMGGKVKTDRRDSRKLASMLAGGFLRRVHVLTPEERAHRQLLRTRNQIEHHRRQTQNQIKSLLLFHGKKAPATLKERWSEEHVHWMETLSWDQPTLQASMGAMLKMYRYLTEQYKQLTQELGCLALTRKYRERAALLAQIPGIGIFTAMAILVELQNIERFRRADQLASYLGLTPSQHSSGERIRMGHITRCGNYEVRTRLVESSWTLIRYDAGAKETYERIKHQTGSGRKAITAIARRLALRIRRVLLDNVPYRLSDGGHMAEGRDKQREAKRFILRAV

SEQ ID NO: 268092 - protein, 380 aa, unidentified
MKKLYIGIDAHKVLNHIALAFPDMKAPTFYQKVSTDLSCTLVVVRKILKQYGLKKEEVQLCYEAGPTGFVLARRLIHLGYDCIVVAPSLIPTKSGDRKKTDRRDARKLAGYLRANELTAVHIPDVEDEVIRDICRGRTDAVNDKKSSKQQLLSFLLRNGYHYKEGTTWTQPHMRYLRELVMPHPTQKILLEEYIRCIDNAEEQIKRMEDHMETLLKTWKRKPLVDALMGLRGFKMVAAMVMVSEIGHFGRFKHPKQLMAYLGLIPSENSSGEKRRMGSITKCGNAHARWILIGCAGHYRMLPKISKELSRRQEGLSRDVKKVSWHAQNRLSKRWYKLALRGLHENKIKTAIARELSSYIWDIAMLIEQQDASCPSSTLNA

SEQ ID NO: 268093 - protein, 409 aa, unidentified
MRYYVGVDWADQTHAVWVVDESGTKITARTVPHTAAGFSEWGRELDEWRAQGIERWAAIERPDGRVVDFLLDHGVVVYPVNPKALDRARDRFRQSGAKSDPFDARVLADFLRTDHPHLQALQPSSDAAQELKLLTEDCQRHIRQQTRLVNQLTTTLKAYYPRALEVAELTTALAREFLHAYPTPAALTALTARQWQRWARGRRLSEARIGDLWAVLQQPQLPVPAHVVRAKARLMQSLVEQLTPVVVAVVQYRKAIDDFFARMPAAQWARTLPIGKRGITAPTLWARLGDAPGRWESFRHLQAQAGAVPVTKRSGKQRVVHFRFACDKSLRHVVDQVAFLSLLSSKWARAYYDQQRARGHAHHQALRALGAKWLKIIFVMWHRQVPYDEQYHLATMTRQQLRQRQKQIA

SEQ ID NO: 268094 - protein, 337 aa, unidentified
MGLYCGIDLHSNNHVMTVIDETDRRVYERRLPNDLAITKTALEPYRAELVAVAVESTFNWYWLVDGLMDAGYEVRLVHTGAVVQYDGLKHTDDEHDAFWLAHLMRLGILPTGYIYPRSERGLRDLARQRMRLVQHRASHITSVQNQVWRSTAVRLSSHTIKGEGKKPWPDLRDADLAMSVETGRAAIDALTVQIERLEEVLLKRVGLSPQFQVLKTVTGIGPILALTIALEVGNIKRFPGVGEFASYCRCVDSRRLSNAKKKGEANRKNGNPYLAWAFMEAAHFAIRYLPAARRFYERKCRQRNALRAVKALAHKLARACFYILRDQVPFAPERLFV

SEQ ID NO: 268095 - protein, 285 aa, unidentified
MRYIGIDVSKATFVVAYSSDKGGEIRTFNNTTTGIKQFIGALPKDGSIHCVMEATGNYSAMLLYLLNVAGIAVSMENPLKIKNFARAMLSTVKTDKIDARLIALYGEKMNPQPFKIQGEAILRLRQKRTVIRQLTKQITAMSNLRGSLACLPVPDKGATHTVDETIEFLEKRRDRLQSELTDLVEVEFSRQLALLTTIKGIGITLATALIITTGGFTYFQNAKQVSRYLGICPTYEQSGTSVNIRGHINRNGDVYTRGLLYVAAWTASRFNTKCCLLYTSDAADE

SEQ ID NO: 268096 - protein, 411 aa, unidentified
MNAVGIDVSKGRSTVAILQPMGEVIQTPIDVMHDAVSLERLAHQILALGEDTRVVMEATGRYHEPVARELHDHGIFVSVINPIAIHGYCTSGTVRKVKNDRKDALKIARFALDRWTELREYTPMDALRQQLKIFSRQYDLYMKSCVALQSNLISLTDKVFPGVNELFKSPQRADGHEKWVDFVTTFWHCECISTASENAFEERYQKWCKRMGYNFSRTKAADIYIGSLGHIVTLPKNSNTKLLIRTAAKELTAMNELIAVVRGEMTRLAKELPEYETVHAMYGVGDTTAAQLMAEIGDIRNFPRRSALVGFAGVDPAVDDSGKNVGNSKPATKRGSPHLRKTLFQIVSTYLRLAPQDEPVFQFINKKRSEGKPYYVYMTAGANKFLRIYYARVKECMAKLDEPAEDSVTVK

SEQ ID NO: 268097 - protein, 338 aa, unidentified
MIIIGCDYHPGVQQIAFVDTDSGEFQERRLQHREEAEKFYRDLAAQGMKDRVGMEASGQGRWFERLLGELNFELWTVDAAKIQAKRVRKKKTDREDARHILQLMLKDDFPKIWVPSWENRDLRQLLWHRHRMVQMRTRIMNQLQAVALNEGLRCKKRLWGQHGRQQLESFRLAPWASRRRCDLLELLDRVNPTIAELTQEIEQEVEKYPAAQQLMTHPGVGALTALAFVLIIGNPERFECGKQIAAYLGLVPEEDSSGERRRLGHISKQGSGLMRFFLVEAAQVTVRSDAEWRNKFFPPGHATRTEDRQSCDGPPISRLITTAYAGTNISFAPEQGIR

SEQ ID NO: 268098 - protein, 339 aa, unidentified
MQQERQYVGIDLHRRRSVIVRMTREGEKLDLVRIENDPVALAIEIAKAGPNPEVILEACYGWYWASDVLEACGARVHLAHPLGNNWGHRRVKNDERDAVDLVDLYRLGRLAEAWIAPPEVRELRELIRYRAKLVALRSGLKAQIHAVLAKEGVRVPMTDLFGVAGRVLLGTCPLGDAYAIRVESLLDLIDVYNREIEMLEGRIGQRLDGHRGYRAIQAIPGVGPVLGAVFVAEIGDVTRFPSPDKLTCWAGMTPSHRESDVLVRRGSITKQGSKLVRWAAIEAISRGRGGSFLQSQFRQLAERRDNRNVARVATARKLLTLVFYGLRDGEIRCIARHAA

SEQ ID NO: 268099 - protein, 326 aa, unidentified
MQSILGIDVSKSTLDVILITENGTYYKTIHNTPQGYQQLEKWLIDHKAQETRACLEATGQYGEAVAEYLFECGHQVSVVNPARIKHYGESKLHRNKTDKADAALIAEFCLKEKPALWQPLSPEIKHLRALIRRLEDQKANLRQEINRLKSGERDSWVVSDLQIHIDYLQERIAATEKEIQDFINKTPGLKSQQKLLTTIPGIGDLTANTLLAEIGDISAFDSAPQLAAYAGLNPQGHRSGSSVHKKARISKQGRSELRRCLYMPAVVAMSYNPVIQDLSHRMTERGSLKMEIVVAAMRKLLHIAYGVLKNQLPFDPYYGTQFDFSS

SEQ ID NO: 268100 - protein, 396 aa, unidentified
MPATTRHARVPALPESTTGQAPLLYLALDLGERHWTLAFTVGRGQRPRVRTIPAGDLERLTTELAAARRRFGLPPEARVVSCYEAGRDGFWLHRAFLASGVTNVVVDAASIEVPRRARRAKTDRLDARKLVTMLVRYTEGERPVWHVVHVPSEADEDRRHLERERETLVADQTGLVNRIQGLLATQGVRLALRGDVPAQLAAVRRWDGTPLPPELRARLEREWRRVEAVRTALRALTTARHRRVTTPTPPAADAAAVHLTRRLAALGAVGETTAWLLATEMFSWREFRNRRQVGGFVGLTGTPDQSGDRIREQGLTRNGSVELRARVIELAWGWLRYQPASALSQWYRQRYGGGNARLRRIGIVALARRLLIALWRYAMGGPPPAGAHLKDDVVAA

SEQ ID NO: 268101 - protein, 434 aa, unidentified
MQTKELHIGIDFSKLRADTGMFDGQGETIVSHQALSNTNTGFEKFKKLILEASATYDIETVNISGEATSLYWMPFFLEIAKDKELKEANTHLYLLNPRMVKWFKKSLPADHKTDAKDAQIIAERTRVMRPAHEWQPDYDWFRLRYYTRLRFHLVQDLTREKNYFQAYLFVLNNAYAQYKPFSDMFGAISCKFLKQLDKLDEIVAMETLDALQILQESSKTKLPDPLQNLRTLQKIAKERFVINDDFASTLQQILNLVLNHIQFIAGQIRELESMIVVEAARHPEVAALRSVPGIGPIFSSGISSEVGDLDRFLQGQKWDNKRNRYRPKNLRDAEASIAKISGLWWPRFASGSFEAEDRNLSKSGNRYLRYYLIEAAEHLRQHVPAYTEYYQKKYAEVNRHRHKRALVLTARKSIGLYVGLLHRKEPFCSKENAT

SEQ ID NO: 268102 - protein, 407 aa, unidentified
MDVIHAKCAGLDVHQKTIVACARVMTGKTVHHHLQTFGTTTDDLLALGDWLARHEVTHVAMESTGVYWKPVWHALEGQFELLLANPMHVRNVPGRKSDVNDATWIAALLAHGLVRSRFVPPEPIQELRDLIRTRKQLTREIARHTLRIQKTLDQANLKLTGLLTDILGVSGRAILDALVAGERDPERLADLATGRLKASRAELVAALHGRVTPHHVFMLQLHLTQVDALRAAVRDLEARLGDALAPFRAAVERLTTIRGIGPLAASVLVAELGVDMSRFPTAGHLRSWAGLSPRQDESAGKRRSTRTLAGNPWLKTTLVQAAWSAVRKDNTYFRAQFLRLKARRGPKKAIVAVAASILTAAYHVLQREVRYDDLGGDYFSRRDKAKLARRLIARLHDLGVMVEVKVA

SEQ ID NO: 268103 - protein, 339 aa, unidentified
MDDYIGLDVSLKETAISVRRDGKRTWRGKCSSDPRVLAEVIRRRAPMAKRVVFETGPLSVWFYHALSAEGLPAICIDARHAKAALDLAANKTDANDADGLAHLAEVGFFREVRVKGYDSMLVRTLVAARTKLVRITTELSNQIRGLMKTFGLIIPPAKGGKFEAHVQRLLIDQEALARIVLPLLHAWRNVRAQAVKLGRQLVAGARQSQACQQLMSIPGVGAVTATAFTAAIEDPANFRTSRSVGAWLGLTTRRYQSGEVDYDGHISRRGDAHLRGLLYEAATVILTRAYAQSDLRTWGLKLREKIGFKRAAVAVARKLAVIMHAMLKSGENFERALRV

SEQ ID NO: 268104 - protein, 353 aa, unidentified
MRKMQEYVLKGKRIFVGLEDSKRTWKVCVRSEGMIVDEASMPARYNVLKGYFDNRFPGCMIQLIYEAGFNGFWLHDLLEKDGIDCIVTPPNKVTIEKDNRVKTDKRDARRLAKNLENKDYASCNVPTRERRENRQLSRTLDQLNKVIKATKNRIRRMFDYHHPVEDLKDGAWTDKDYSNLRNVNLSEPLKITLEVYLETLEISLKNKERLEKELIALSKKEEYKEEATIKQSVPGIGKLTAIRLTLELGEMKRFETGKHFASYLGLTSSEFSTGDTIKRGRITGQGPSNVRTWFIETSWRAIHKDPALLEKFQNVWRNTGSKKKAIVAVARKLACRLWALETTGQTYLLGVIK

SEQ ID NO: 268105 - protein, 349 aa, unidentified
MKIIGCDFHPSYQQIAVLDLATGETEEKALSHERKEEVRAFYAGLGGSVRVGIEASGQSQWFERMLAELGQEVWIGDAAKIRASCERKQKTDRRDAELLLKLLAEDRFPRIWVPTAAERDGRQLLLHRHKLVRMRTQVKNQLQALALNQGVQQKQKLWSEAGRKQLESLPLLPWARRRRAELLQLLDQLEVPIGELDRAVAEQAHARPEAQRLMTHPGVGPVTALAFTLTMGPAERFQRGKQVASYLGLIPSEHSSGGRKQRLGHISKQGSPFLRGLLVEAAQSAVRHEPEMRRAYQRLVQRKCRALAKVAMARKLAVRLYWMLRLQVNYAQLIQGSHAGQLGTFCGRG

SEQ ID NO: 268106 - protein, 340 aa, unidentified
MFTNFVGIDVSKSKFDLALIKSQDKDHVIQGIFDNTRNGIKLMSKFLVKEHCVQLSDTIFCMEFTGIYCYPLTDFFVKQECHVRIEMPVNIIRSLGLQRGKNDRIDAHRIALYAFKNRDDVKLWKPQREAILKLRDLLALRERLIVAQKSLQMPINEKISMGDKKGAEMLRKGCQKSMSSLENEIGQIDKNLDDIIKGDPQLKELFNLATSVPGIGNLTALFMICFTNEFSMYTNPKQLACYCGVAPFEHKSGSSIRGRTRVSHMANKVLKRMLHMGAMSVISRDPELRDYYQRKVAQGKNKMLVINAVRNKIIHRLCAVIKRGYAYQSEIIFKERLVLS

SEQ ID NO: 268107 - protein, 330 aa, unidentified
MSHYRVGCDAHRRYSQFAVLDQNGQLRQQTRVDHEPGAIQAFLEALPEGTPVALESVGNWYWIADEIEAAGCLPLLTHAAKAKVMMGNVNKTDKLDAKGLAKLLHLDSLPTVWLPPGEMAKYGITTTDHSDIFAGAGRIWLQGTLGRLPPETGRCVAQEIEALDGLGDQISQLERRIRQRTALTPSIQLLKTLPGVADVLAIIIEREIGSIDRFDTAGQFTSFAGLVPTVHASGGKTRFGHMRKPCNQYLKWAFIEAANVIVRHRHHPAWKTKYVCQIYDQVSHRKGHAVAVGAVARHLAEAAFWIIKRQEPYRPPALRQASPKQVRGRA

SEQ ID NO: 268108 - protein, 448 aa, unidentified
MKQEPEEIPDTEHELVLERVCAIDVAKDSGKVCVRVSSRAGRRVSKVWDVPARSGAVAELAEHLLGEGIEKVTVESTSDYWRIWLYVLEAAGLSVQLVNARDVKNVPGRPKTDKLDAVWLAKLTEKGLLRPSFVPPAPVRELRDYTRLRIDLTRERSRYWQRLEKLLEDALIKVSAVASTLDTVSVRDMLEALIAGERDPRRLADLARGRMKPKHGALVEALSGRFDDHHAELARMLLDQIDALATQIGTLTTRIDELLTAMEPETRADEPDTPGGAGAVADGARELTTIERLDEIPGIGRGAAQIILAEIGFDMSRFPTAAHLVSWAKLCPRTIQSGAIQRGGKTGRGNPYLKGALGEAAAAAAKTNTFLGERYRRIVKRRGKLKALVAVARSILVIIWNMLNDPTARYADLGADYHATRINTERRTRNYVTQLMAMGYRVTLEPAA

SEQ ID NO: 268109 - protein, 418 aa, unidentified
MSILNSLFVGIDVSKNSNQVYAMNFDVKKLLSFSSPNDTEGASKIENKLLECLVKNNYENIVIVLESTGMYSFHIATYLSSSEALLKYNVLVYCIDPKTSCNYRKSFSEMDKTDPKDAYILADMARAGKVNKLNPVKGPQKLAMQRLTRHRRHISEQIVREKLYVLNNIFLKFSAFDRKYDGIQPFSDPFSATAQEILLEYKSPEEIINTPIEDLTSFISTASKNRFADPKKVAEILTKCARMSYRLDKTAYEPINTAIASSLAILRCLENEIKHIDKEITNLTKGYNSDEYTCLISIPGIGPVFAAGILSEIGSIKQFDNEEALAKYAGLTWRRHQSADAEYEDTPMTKTGNSYLRYYLCEAASMAVLHNPVYKEYYQKKFAEVKTHQHTRAIALTARKLVRLIYGLLSKNQLYKNQ

SEQ ID NO: 268110 - protein, 386 aa, unidentified
MSRPSNILLRAINYDHTLVLAIELSNKSWVLAAQVPGLPQTKAQRTIEPNKNALLAAIDGYRARAAAVGYAVDRVITTYEAGWSGFWLARWLVAQGMEVHVVQPSSVPVDRRLRRAKSDGIDAELLLRTLLAWLRGEPRVCSMAPIPDEADEDARRSVRERTELLSDRVGLTNRIGAVLATLGAGDYNPLLQSRRRRLTELRTGLGDPIPPNALAKIERLLARLELVLAQIAELERERDEVAAADAPDRAGKMIQQLASLRGIGVQSATVLVREAFVRHFSNGKALGSYAGLTSTPYSSGGIDREQGIGKAGNRRLRTVMIELAWLWQRYQPGAAQVAWFRDRVGSTGRRVRKVMVVALARKLLIALWRFVIDGVVPEGAVMKPSI

SEQ ID NO: 268111 - protein, 377 aa, unidentified
MKKELYLGLDVHKDNILTATAEEGRGGEVRDTGAISNDLHAVEKWIARLRKAHGKETLLHACYEAGPCGFGLARRLRQLGVQCEVVAPSMTPTRSGDRVKTDKRDARKLARLLRAGELTAVYIPEPTDEAMRDLCRARTDAVDDRRRSRHRLKGFLLRHGYRYQGKSSWSTAHERYLRELVLAHPAMKVILEEYLQGIVAAGERIERCEAGMRDLLENWRLAPAVRALMAMKGFQTVAAMILVSELGEVHRFAHPRQVMAYLGLVPTENTSSDNRRQGRITKCGNAHARWLLVECAQHYATPPKVSKELSRRQQGQPTQVRAISWRAQNRLHHRYNRLLARRLQRNKAMVAIARELCGFIWELLRTQSCYQAHSTFI

SEQ ID NO: 268112 - protein, 416 aa, unidentified
MDTENEIVCGADIHRDFLVATIVSKNGLRLQERFDMNQDGLLAFKKWILDHKCKKVALESTGSYWYPIFYILEGHVEFLLVNAYQIRNIDGKKTDRLDSERIGIYCLNGLIKPSRIYPKDYRDLRNLTRSREALVNARSKIKNQIHQLLATCCIKLSSVISDLFGKSGRYIIERLLEGKTIDQILSGIPSKRVSKKADKLKEAIKNSIDPNIVFLIKANLEVIDAISEKIKLLDAEISAKVKIFKEDLKIVLSVPGTGLISAATIIAEMGDFRDFPSADKMAMYFGIVPSVYQSAGKLRTGKITKRGSKHMRRILVEVAKAISKTKKDSKLKRFFQRVMAKSGRNVAAVALARKILCILYHLLMKCEDYQEPEVKKAKPKMPSCISAASMMDIDEMIRIISKAGYLVERDLKDGCG

SEQ ID NO: 268113 - protein, 433 aa, unidentified
MTTNRLQVGIDFSQKSADFGLFFPDGQPLEPHQAFDNSLTGYALAKPLLLDALETYSFDGLDVSGEATSYYWLPFFLQLAADPDLAPHDLNLFLLNPRWVHWFKKCFAQDDKTDAKDPFYIAERTRTRRPPVAWSPHLDTLPLRFYTRLRFHVIEGLAREKCYVSAFLFLKASSYRRLKPFADVFGVTSRLVLGEWPTLDELAALPVADLAQHLYELSGHHLREPLDNADKLHQVAQESFRLPTALVLPVQRVLDLTLAHITFLEGQVSLVDAWITAEAQPQPDVSILSTTPGIGPVFSSGLVAEIADLERFLQGRKWDKPRKRFRPKNLRDAEDAVAKTAGLWWPRADSGDFEAEDRRMAKTGNRYLRYYFIQAANRMRQSIPEYADFYARKYREASKHKHKRALVLTARKSVGLVVGLLHRHEAYRPRRAN

SEQ ID NO: 268114 - protein, 390 aa, unidentified
MLFGSPNQSDGAAAMQPNDINSPTILLAIELSASTWLVAARVPGSEKPRLHRIDGGDTVALLTLISSLQARVARRPGATINVVCCFEAGRDGFWLQRFLTAQGVDTHVLEPTSILINRRARRAKTDRLDAVGMLRVLAAFLQGDRQSCSMVRVPTPDEEDAKRMHRERESLVHERVRIENRIEALLFTQGIRKRPSLRSWERDLTLLRTGDGREIPRHLGAELDRLRRRLVMILELIREVEAERDETAAPRDHAYRKIAALGRIRGVGDNFAAVLTREVFYRSFDNRRQLASYVGITPMPHQSGGMDRDRRISRAGNPRARTTMIQLAWLWLRYQPGSDLAEWFRKRVGTLAGRTRRIAIVAMARKLLIALWRYVETGVIPAGAEVRAEA

SEQ ID NO: 268115 - protein, 443 aa, unidentified
MRPKARTHLRGERGQTFANQMRGLPPERILCVSLDIGKYFHVVMIHNGLGEIVTPTFEIDIFRSGFDRLCGALDEALTRTQAQLVWVGMEPTSHYFENLARHLVARPQPVRLMNTYAVKENRNQQMMRCEKTDEIDVAAIGDLLRRGEGTLFQPVAGVYLHLQHLDRVRLSKVKIQTMLKNQIIGHLDRIFPGLVLIGDEAKQRYTPLFATDFWECQTLQHLIRVCPEPHQLAAMSPHDLVAAFHQHRFALGPVTAAKIIAYTQKVLLPDPDLVAIRGELLQHDLALLEEVEGHRAALENRLRDLLAQTPYVVWTKLKGLTDIQVASLAAAMGDPAHYQQASQVFRRAGLVSGRNDSGTRQRRGKGKRILKTGDVYLRRALMNAIETLRLHQPVLQAYYQRLKQNKPEGVARVATARRGIGILWATLRDQQPKLLIFKREVAM

SEQ ID NO: 268116 - protein, 316 aa, unidentified
MDSNPEVHIGIDVSKASLDVAVHQTGAFSSLPNDAAGIRSLVARLRRLKPQLVLLEASGGYERKLLDALSSAGLPAALVNPRQLRDFARATGVLAKTDKIDALVLARFAATVRPELRRLSDARERDLSALQARRRQLVEMLTAEGNRLEKAPPIAAREIKGHIRDLERRLGTLDKTLQDLVRSNPDWQLKAQLLRSVPGIGPVLASTILANLPELGDLNRRQIAALVGVAPLNRDSGVLRGKRSVWGGRSHVRAALFMNALVASRYNPIIKAFYQRLCAAGKPKKVALVACMRKLLTILNSMLRNRTTWNADYAYQ

SEQ ID NO: 268117 - protein, 403 aa, unidentified
MIKDHDSIDVFIGVDVGKSDHHAVALNRAGKKLWDKSLPQDEAKLKTMIKVLSKHGRLLFVVDQPATIGALPVTVALASGIEVGYLPGLAMRRIADLHPGEAKTDARDALIIASAARTMPHTLRNVETADEQVAELTMLCGFNDDLTKEGTATSNRIRGLLTHIHPALERVIGKHLDHPAMLELLAKYPTPTALRRAGKARVETLLRKHAPRAFKRWVPELFEALDQQSVIVPGTEAAGTALAHQARSLAHNRAAQTDVLTLIQALVEAHPLHELLTSMPGVAIKTAARILTEVSGKDFASPGHLASYAGLAPVTWRSGTSIRGDHSSKKGNKVLKSALFLSAFASISSKDPASRIYYDKKRAQGKNHTQAVIALARRRCNVLFAMLRDGTIYDAAGQELAAA

SEQ ID NO: 268118 - protein, 385 aa, unidentified
MMNLDRTNTPAGDNYATVYVAFELSKAKWRLGIILPGAKKMSRYTIDGGDTAGLSARLSQARAKAATCGKPVRIQSCYEAGFDGHWLHRWLTEQGVISYEVDPSSIEVNRRARRAKTDRIDLDKLMRTFLAYIRGEPRVCSMLHVPTVEDEDRKRLTRERERLLKERTAHTNRIKGLLHAHGIRDAMPMKRGFIESLATVRTADGRPLSRWLKEEITREHERLCLVEKHICALEKTSTAELRAAAPGSADAKVIQLAELKGIGLTSGQKLVNEVFYRSFDNRRQVGSCFGLTDTPYHSGTSRHDQGISKAGNRRARTLAVELAWLWTIHQPDSELTRWFRERVGKIKGRIRRIAIVALARKLMVALWRYLTTGVVPAGAALHRAC

SEQ ID NO: 268119 - protein, 342 aa, unidentified
MTQYKRIGIDTSKAVFTLHGIDRNDKPVLRINLRRSQLVAFFRKLPPTEIVLEACGAAYHWARELSALGHQVRLIPPQYVKPFVKRGKNDRNDAGAICEAGGRPDMRFVPVKSIERQANGMMLKVRQRLLDQRTALTNALRGHAAEFGVIAARGLSRIEPLLAAIERETAIPAEAKEMFALLGEEIAHLDARVEQFDARLAAAHKANEMSQRLATIPGIGPVTGLTLALEIDPASFQSGRHLAAWAGLTPKEHSTGGRQRLGGISRAGHERLRALLVAGATSVINAAIRFGDHRVSEWLRGLLRRKPRKLAAVALANKMARIAWALLARGGTYRAPALTAAT

SEQ ID NO: 268120 - protein, 465 aa, unidentified
MELNRIYLGIDASKGYADFIFYTSKKVKLEKGFQLDDNIEGHQILKSKLREFIDQGYQIICGIENTGGYERNWVNAIRGLSEKLKTVEIYRLNPKAVKHQIESLMKRTINDSVSAEGIAIYMINNYDLFKEYWVKSMAETIAVTEEKMLNNMIHSLMKQRTMKKNQLEKVLYQTFPEILKDVSNGSNWVYTLLSKYPSAASVKRAKMSGLQSITKVTERKAKELKSKALRSVATLSGEIPSLMVSHHCKSIMQLNKEIEKLKGVLIAKYEDNEDVQRLINIQGIGAWTAVGFYIELGDPRRFDNTSQLAAFFGVNPTFKQSGDGKYKSKMSKQGSVRMRSTLYLMAHNLFMQNEYFKNLYAKYRSTGKSHRSTIGILMHKILRIAWGMMKSNTEFNPKIDIKNQDKNKESEKAKNPISEKSRLLQELTLEAPISKRNRKKRKAMLEPQSSTKDENTRSEHSQLQT

SEQ ID NO: 268121 - protein, 413 aa, unidentified
MRVFCGIDWAEDHHDIALVDADGSLLARRRISDDAAGLSQLLELLAEHGDTGDGQIPVAIETPRGLLTACMRATGRKVYPINPMAVSRYRDRHSAAGRKSDHGDAVVLANVLRTDAHAHRPLPADTELAQAIAVLARAQQDAVWTRTGAHNKLRSHLREYYPGFLAAFAQARGGIIRPEARAVLAGAPDPATAAQLTLSQLSALLREAGRSRGIDAEAARLREALRELQMRQLPLVEQAMGRQAVALLGQLNAACQAAADLEQAVIESFNQHPDAEIITSFPGLGPLTGARVLAETGDDRSRFADAKGLKAYAGAAPVTRASGKITAVLHRRIKNQRLAAVGYLWAFSALTASPGARHHYDKRRAAGDRHAAGQRNLFSRLLGCMHHCLATGQHYDENAAFPPPAPAGQAIAA

SEQ ID NO: 268122 - protein, 340 aa, unidentified
MQAIRFGIDLAKSVFQIHGVDAEGRVVVQRQLRRDQMLKFFSKHPPVLIGLEACGSAHYWGRELGRLGHEVKLMPASYVKAYLKRNKNDARDAEACCEAVGRPTMRFVPVKTVDQQSARAIHSARDLMVRQRTQLANAIRGLLYEVGEIAAKGAGGIGALLQRIEANDKSLPATLLTCLKPLAEQWRHLDAAISGYDDQIVAEVRKDPAALRLTKIPGVGPITAHAVIAAIGDGRQFSSARDLAAWIGLTRQNHDTGGKARLTGHISRAGDRSLRRLLTLGASAWLRHVRVKPEKGSAWVQGVLARRPVKVAVVAQAAKTARIIWAVLTSGKEYRAPAAA

SEQ ID NO: 268123 - protein, 357 aa, unidentified
MRKRLNADKVNVNGKTVNVGIDVHKLSWHVTVLVEGIVVESATIKPSYRVLRKLLAPYKGARIRSAYEAGFSGFNLYDELVADGMECIVVSPSLIPVESGNRVKTDKRDSRKLAQYLENNLLKRVYVLSKQERAHRQYVRTRRQLSDHRADVMRQIKSLLLFHGLPSIVGIKGFWTRPVLRTLRNVAPDEYVSRSLNILIDLYAYLTQQVKHMTREVRRLARTEKYARKVELLTSIPGVGVLSAMEILTELQDVSRFATADHIAAFLGLTPSQYSSGQHVRMGKITHAGNHRLRTRMVECSWIAIKKDPGLCKIYQAIKMRRGGKRAIVAVSRKLIIRIRRILLDEVAYRLEYATAA

SEQ ID NO: 268124 - protein, 429 aa, unidentified
MKIIYPRVCGIDVHKKFIVAVICISESVEPIYLKKRFSTFHNDLIRFREWLIQNDCQNVCMESTGKYYIPVYNVLESHISNIVVANPKWVRAVKGEKDDDKDAKWIADLFKFGIVRSSFIPQKDFRILRELTRYKYKLVNMRSSEKNRFQNALTSGNCKLDMVFTDVFGKSASNIIDLILSDNPYTDEDILSKVHKKCKASPDMILDSVNGTDLTPVQKARIELVNDHIKQLSSNIQKLDKLIDLMIEPYEDYISFLCQIPGVSRNSAIIILSEIGIDMNQFTTSRRITSWAGLTPSSNQSAGKKKSVRISRAGVYLKPCLVEAAHAAVKDKSHPYYANKFNKISKRRGKKRAYIAIARKILVAAYHMLLTGEIWNPADLSEVETPVEQRLKYVKNNLKSDIKQLLDIGLTVEELTLMIQQNANIIATQ

SEQ ID NO: 268125 - protein, 342 aa, unidentified
MEHYAGIDVSLEWSSVCVVDSSGRIIREAKVASEPEALVGFFGQLGLPVVRIGLEAGPLSQWLYAGLAKAGFEAVLLETRHVKAALSAMIVKTDRKDARGIAQLLRMGWFRPVHCKSPAAQEVRALLVGRKLLQAKLRDVELSIRGILRGFGLKVGEVSKGRFAARVNELVAGHEMLETVIGAMLQARDGLQIEFMRLHRRMLAIVRGDAVCRRLMTAPGVGALVAVTFKTAVDDPERFRTAKAVGAHFGLTPKRYQSGETDVSGGISKVGDAMVRTALYEAANAMLTRTVRISALKRWALEVARRRGMKRAKVALARKLAGVLHRMWANGTDFRWGKEAAA

SEQ ID NO: 268126 - protein, 361 aa, unidentified
MFSERTSVGLDVHARSVAVAAIDGVTGELFTARLTPARDHIRGWLRDLPGPIAVAYEAGPTGFGLARALGADGIRCVVAAPSKLQRPSGDRVKTDARDAMHLARLLRLDEITAVVVPSPDQEAARDLVRAREDCRGDLMRARHRLSKLLLRQGIVYSDGGAWTGAHDRWLRRQRFDTPATTLTFEADYEALLSTGARRDRLDTAIAGMAADSEFTPVVRRLSCLRGVSTLTAFALAVEIGDWHRFTGNSIGSFVGLVPSEYSSGASRVQGSITKTGNTHPRRLLVEAAWHHRARYLPGAVIRSRWELAPPSARARGDAGNRRLHARWTRFNERGKRPVIANVAVARELTGWCWSLAVLEPR

SEQ ID NO: 268127 - protein, 346 aa, unidentified
MNQEQFVGFDVSQAETSVCVVDGSGKVVWQGKCASTPEAMAATVRRRAPHITRIALETGPMSAWHYRSLTALGLPVVCIDARHAKAALAMQLNKTDANDAVGLAQIVRTGWYREVAVKSEQSHRTRGLLAARAKLVGMRKEIANQLRGLLKVFGHVIGAVGGEKFDARARELAAGDATLTITAEALLAARAALAVQIARLDKLLLSQARQDPACQRLMTVPGVGAITATAFIATIDDPARFKHSASVGAYLGLTPRRYQSGTMDVSGHISKAGDALLRCYLFEAATTLLSRVQRTSALKEWGTRLAKRIGHKKARVAIARKLAVILHRMWADKVEFSAMPRAAAAA

SEQ ID NO: 268128 - protein, 451 aa, unidentified
MKKGNIEMNIVNPNAAGIDIGSRSHFVAVGQADDEIEEFGVYAEDLTAICNYLQKFGVTTVALESTGDYWQNLFTELIKFDFEVILVNGKFTKNAKGKKTDVKDARWIQQLHSLGLLSSSFLPDHETEIIRTYYRQRSNIIRQIAGTSRRMQKFLKFLNFRLDVVVKDVCGLTGLKIIDEICKGNLDPSELAKNRHYNCRKSEQEIEKALHGNNRQDFLFGLKQEYEAFTFLQKQLIHCDKEIEKALKLFLNKHPEKKKLKFNSNPYKRKNKNAPEVKDFAKKAYQYFGGVDFMAIEGVSHATVLSIMSEIGFAGFSKFQTAKHFTSWLRLAPNNKISGGKILSNKLPKGSNRLKIALRQAANAIGNLKETHLSDFFKRVAYRRGRQAAVSATARKLAVIIWNMITKKEPYNPPSIYMYRDEKRKLGLIKKIRKQIAKFDINPADVGILTT

SEQ ID NO: 268129 - protein, 356 aa, unidentified
MSHDVKYIGMDVHKEAIVIAVQNESGKLVMESVIETKASSILQFLHGLRGELHVTWEEGTWAAWLYDLLQPHVQHIVVCNPRRNALLKEGNKSDKVDAGKLADLLRTGMLRPVYHGENGLRTLRELGRSYQTISKDLTRVMNRLKALYRGWGIPCAGTQVYAARAREQWLSKIPHTGVRRRAELLYQQLDGLLALRRNVRPEFLAESRKHKAAKLLRQIPCIGPIRAARLIGLMQTPHRFRSKRQLWTYSGLGIETHDSAQYCFVRGQVQRSKKPQQVRGLNRNHNHEMKEIFKSAATRASCGRGPFHDFYTGLLAKGMKPEMARLTLARKIAAITLTLWKKEERFDVEQLKTQAA

SEQ ID NO: 268130 - protein, 417 aa, unidentified
MEAIIERCCGLDVHQGTVVACVLIGDTKRKVHKEVRTFSTFTRELLALRDWLAEQGVTHVGMESTGVYWKPVYVLLEDHFTLVVGNAQHIKNVPGRKTDVRDSQWLAQLVRHGLIRPSFVPPKPLRELRELLRYRRKLVESRTAERNRLLKLLETANIKLASVASDVFGVSGMAMLRALVEGDANVQTMAELAKGSLRKKRQELELALDGRVEEHHRFMLRMQLHRLEEVHRDIEQMDERIDDKLTPYQPQRARLMQIPGVSAIVAAVMIAEMGVDMSVFTSVQNLASWTGICPGNHESAGKHRSGRIRKGNVALKTALIEAAHAAARAKGTYFKDKFHRLKARRGVKRAAVAIGHKILISAYIMLSRDVHYADLGETYLDRRDRSRTVANLRRRIERLGFAVQIAPAEAVLHGPSS

SEQ ID NO: 268131 - protein, 414 aa, unidentified
MRRVLFVGDDWAEDHHDVEVMDEAGRRLSAGRLPEGIAGMARFHAMIAAGLGPDADLDAEAGVLIGIETDRGPWVQALIAAGYRVYAVNPLQAARYRERFSVSGAKSDPADAHLLADMVRTDHHQLRGVAGDSELAEAVKVVTRAHKTLIWERTRHTLRLRSALREFFPAALVAFGDLTASDTLELLGQAPDPASAARLTTTQITAALKRARRHHRDRRAAEIQAALRTEQLGQPPAVTTAYGVAVRAQVAILGVLNEQIGLAQEQVEDHFGRHPDAEIYTSQPGLGQILGARVLAEFGDDPTRYGDTRARKNYAGTSPITRQSGKKKVVLARHVHNDRLLDALGGQAFAALTRSPGARAYYDTQRDRGLGHRAALRQLANRLVGILHGCLKTGTRYDETTAWSHYTKDQQAAA

SEQ ID NO: 268132 - protein, 400 aa, unidentified
MSERRAQVWASIDAGKGHHWAAVVDETGVTLLSKKIDNDESAILNVLGEILELADEVRWAVDISGTSSALLLALLAAHGQQAVYVPGRTVNRMSGAYRGEAKTDARDAYIIAETARHRRDFAAIEVPAQLAADLALLTAHRTDLVADQVRMINRLRDVLTGVFPALERAFDYSSHKGALVLLTGYQTPAAIRRRGRARLTAWLANRGVRGADAVAATALDAAQAQQTALPGEDIAAQIVADLAAQILALDDRLTRIDKQIRETFRSHPQAEIIESLPGMGPIRGAEFIVAAGDLAAYADAGHLASAAGLVPVPRDSGRRTGNLHRPKRYSRRLRRVFYMSAQTSIIREGPNRDFYLKKRAEGCKHVQAVIALARRRASVLWALLRDGRLFTSAPPVTQAA

SEQ ID NO: 268133 - protein, 415 aa, unidentified
MQFIILGGTNMYNAVGIDVSKGKSTVAVLQPGGAVVRNPFDVAHSSCELKSLTDYILTLEGETKVVMECTGRYHEPILHALSDAGIFVSAVNPHLIKNFGNNTIRKVKSDPVDSKKIARYTLDNWAELREYSSMDTTRAQLKTLNAQMTFFTNQKVAAKTNLISLLDMTYPGLNDLFDTPTRDDGSEKWVDYAASFWHVDCVRKIGIKAFTDRYQAFCKRHGYNFRKSKPEELFNASKELVAVFPKEQEYKDMIQMSIKQLNIISANVEHTRQEMNRLASTLPEYSTVMAMRGVGATFGPQLIAEIGDISRFSHREALTAFAGVDPGVNESGKFKSKSNNASKCGSSRLRKTLFLIMKSLIQTKPIDDPVYLFLDKKRSEGKPYHVYMTAGANKFLRIYYGKVKECLKAQSETKD

SEQ ID NO: 268134 - protein, 338 aa, unidentified
MALYCGIDLHARSSYVAIVDEQRKRIFKRNLQNDPKLILSFLAPYKQELAGIVVESTFNWYWLVDALMDDGHTVHLANPCAIKQYAGLKYVDDKHDAFWLADLLSLGILKEGYIYPKEQRPVRDLLRKRGLLVRLRTSLLLSLQNTVVNTFGIKIPAHRIKGKEDYVTTYDFGNESLALMGQVSKTSIDTLSRQIEAIESHVYQHCKLTAAYNPLVSLPGVGKILGTTIVLETGAVGRFPAVGNYVSYCRKAETVWTSSDRVKGKGNRKNGNRYLSWAFSEAAEHARRFDTASRNFYNRKLHERNSPVAHNALANKLARAAYYIMRDQVPYEEKKLFG

SEQ ID NO: 268135 - protein, 348 aa, unidentified
MDHYAGIDVSLEQSSVCVVDAGGKIVRESKVASEPAALIGYFASLGLAVVRIGLEAGPLSQWLYAAMKQAGLAVELLETRHVHDAFKAMPVKSDRNDARGIAQLMRLGWFRPVHCKSIAAQELRAVLTARKLLQSKLRDIENSLRGILRGFGLKVGKTTARSFPGRIRELVAGQANLEAIAQAMLSVHAVLLREFNGFEKRVRTMAREHVQARLLMTTPAVGPIVALTYAGAIDDPARFKSSKQTGAYFGLTPKKYQSGQTDITGRISKIGDAAVREALYQAAHVMLTKPVKGCTELKSWAMRIARRAGMRKAKVALARKLAVIMHRMLANHKPFNPSARTAPVAAAA

SEQ ID NO: 268136 - protein, 315 aa, unidentified
MDAIIERCAGLDVHQETVVACVMYGPLDRKPKQDTQTFPTTTKGLLALHDWLLQWECTHVAMESSGVYWKPVWNILEDSFTLVLANAQRIKNVPGRKTDVNDAAWIAQLLRCGLITPSFVPPEDIRDLRDLTRYRRRLLGHATSEKNRIHKILQDANIKLTTYVSDLFGVSGRALLEAVINGEVLTAEQVRDLVKTSLKRKVPELLDALNGRVRKHHRRMMRMHMDHLLYIENQIAELEQEIDRLLQPYRESVTLIQTIPGIKEDAAAVILAEIGNDMSCFPSDAHLASWGGLSPGNNESAGKKKAPEPPKGTRA

SEQ ID NO: 268137 - protein, 328 aa, unidentified
MENRAARVVRQERIPHARGAFGAFLSKCEAGSPVAVETVGNWYWVVDEVERAGGAPQLVNARLAKAMMGQFNKSDKLDTRGLNLLQRTGTLPTVWIPSAEMRDARELPRTRMALVGQRTQLKNRVHATLAKYGLTPPALSDLFGKAGRIALSALSKQLPPHTAQALGTVLTQLDGLEQAIVSIEKEIAAHFHPTPEVELLRTLPGVGPILSVVIQAEMGDVNRFLSHECFASYAGTTPRLQASGGKSYSGRTRPDVNNYLKGAFVEAANAAHLQGERCGHVHRLYERVRARRGHGKAIVAVARHLAEAAYWTLKKQQAYQEPRRSTRG

SEQ ID NO: 268138 - protein, 322 aa, unidentified
MDCSKSVEFLGIDVHKNTLVLDGRSLKLNVAKELANDQSGFETLIRALGKSPYCIQVVFEATGNYHLPLALALWQAQVPLSIVNGARVRQFANALGRAKTDAIDQELIRRFAESIKPAAQPAPSATMRELQQIVSRRLDLVASRVREQNRLGQCLHQTIKKQLKMSIEFLDKQLKQLDKLMRELVSAEPELEAKVALLMKTDGVGFLTAVELLVVLPEMGQLNRRQISRLAGVAPVNNDSGKGKHKRFLGKGRAIGPILYMAALTATRYNVVLKAFYQRLLNRGKPKKVALAAVMHKLLIYLNSVLKDFATQSSQPVPAQAG

SEQ ID NO: 268139 - protein, 341 aa, unidentified
MAIVGGLDLHRGQLTFDYLDQDTGEVTTGRIVPADRGQLRAWLERFTERQQVAFALEGCTGWRYVVEELQRAGIAAHLAEPAETAGLRGPKRRAKTDRADARHLRELLLGGRVPASWIAPTHVLEARATVRLYKDLLDERTAWLQRVHATLFHQGVPVIAKLTTPEGAARLAAAELSAAGRQAVAVGLRQIQRLSEEMGPLREQLADLSVRQVGCRAPREAHYGVGALTSVAIWAELGDCRRFGSSDDAVRHTGLDITVYASDGKRTKGHLARQGPAVLRWALYEAAVFAGRASSPDHRYFRQVKQRLDGQRALLSVARKLARRCYHTLRGLGDQAFAPAA

SEQ ID NO: 268140 - protein, 362 aa, unidentified
MKTNDIQNNIERAPVETGVMIKVGLDVHAEKIAVCVQVDGATPQPAQLMMRGGLLAWLAKLRGKHPGATMVSCYEAGPLGYALHRELLGMEVTNYVVAPQRLDDRGKRQKTDRLDARALLERLDRYVRGNRHALAIVRVPSPEQEQLRARVRLREQLAKTRRQFEARGRSALLLQGIRVNGPWWRPARWQVITAELPVWLKEMVSVWQQLAVTADAQERTVRAELEAAAPTALPRGIGALTWIVLAREILDWSRFKNRRQVASYTGLCPGISQSGSKSRDGCINRCGNRAIRHALLELVWRLVRWQPQYPPVRALVDGALSARQRRKQAVAAARHLAIDLWRLATGQCTPAQLKLDAAFAPI

SEQ ID NO: 268141 - protein, 354 aa, unidentified
MQKILYVGMDVHQACIVIVVLNVEGKTISEAIIETKTETVRDFIRSLRGELHVTFEEGAQAAWLYDLLRSLAAQVLVCNPRHNKLLGAGNKSDRIDAQKLAQLLRAGLLKPVYHGESGTRALKEMVRSYECLVSDTTRVMNRIKAIYRSRGITCAGHDVYREDRRAEWLQKLTERGVRLRAEVLYRQLTALRELRAEAKQVMLAESGKHGARKLLTGVPKLGAVRVAQIIASVDTPHRFRSKRQFWAYCGLAVVTKASAEYRIEDGRVKKAAKAAATRGLNGNYNHRLKSVFKSAAQSACASEPFKHQYETLVAKGINAALARLTVTRKLAAITLAIWKHGERFDAERAVKRAA

SEQ ID NO: 268142 - protein, 354 aa, unidentified
MSSILAGKVEFVVGVDTHRDSHTAAIVSATTGGVVDQLTVATDASGYRELQDFADRHAPGRRVWAIEGTGSYGSGLTTALLEHGQWVVEIDRPTRPARRDRAKSDDLDAVRAAREALGRDHLALPRARGDREALRVLTTARAGAVVAGTKAINQLKALIVNAPQPLREQLRHATSDQQLRRCARLRTQPTHSIEHRATIRAIRGTARRALALAAEAAEYETELKQLVVAICPALLERPGIGTITAAQFLISWSHPGRIRNEAAFAALAGAAPIPASSGTITRHRLNRAGDRQLNRALHTVAMTRLRIHEPTQAYTARRTAEGKTPREIRRCLKRAIAREVFRIMTHHAKDPVAA

SEQ ID NO: 268143 - protein, 343 aa, unidentified
MKHIGFDIDSTTTHISVFSDHGREIKRTKVATREADLVAFMMSVSGPKRVALEESQMADFVTRIIEPHATKVIRCLPQHNRLISQSEKKCDREDARNLAELLYLDKLKAVHHAPWGYRQLREGVRAYWTASRELARAKSRLKAFYLFNGVHCVGEKAYSSRHRVGFIQQIEKRSGNKQLLEQFYLYMDFCRTRKAAHIKILKELVQSFHQEVRYLKTHPGIGFIGSCTLLAYLENGWRFKNKRKLWQYCGVGVRMHESAGKGRRGASRKGNRYLKSVVMTAAAAIAARRKADNALTRMWRAGVEAGIPPDRLKRNLARKVAVLAQRSLRFKEGYHDDRVVTTQ

SEQ ID NO: 268144 - protein, 358 aa, unidentified
MKESYFIGMDIAKNVFQVFTADGKGREISNKKLSRSAMTQYFAQLPESVVGIEACGTAHHWTRTLTALGHTVKLINPQRTKAFLGSRNKTDAADAKAICEVLMHPGTTFIRAKSLEEQDIDHLLARRELLVQNRTQLINQIRAFLCERGIVIPQGRHRFMKNLPQIIAEKWDEFSEKFQVIFTDSYTDYQDLDEKIVRLDKRILTEAVNTESCKRLMQMNGVGPQTALALVAHVGNATHFKNGRQMSAYLGLTPREYSSGGKQRLLGITKRGNVRLRTLLLLGARAAILGIGRRRRGEDGQPGRLGYLDSWILGMVERIGLFKAAVALANKMCRIAWVLLARGEEFNPMRLCRLVKAA

SEQ ID NO: 268145 - protein, 416 aa, unidentified
MKYAQIRVLPETPPGGLSAGIDWGSADHAVCVVDPAGQVRARFAVAHDRAGIAKLIAGLRAAGVSEAAIERSDGVLVEALLEAGLTVVVVTSRQMRNLRSRYGSAGAKDDRFDAFVLADALRTDRARLRPLVVDTPATAALRAAVRARRDLVAHRIAACNQLRAHLAVAFPGAVGLFASLDSPISLAFLARFGSHDAAGQLTEDDLAAWLHTVPHRGKAARPGQLRARLQAAPRGATGPDGAALVPVTGALVATLATVSAQVQALEAEIAVQLAAHPDAHIFTCLPRAGTVRAARLLAEIGDCRARFPDPESLAGLAGVAPVTRRSGKHISIGFRWAVNRQLRDAVCDFAGDSRHASPWAAAIYDAARARGKDHPHAVRILARAWTYVIWRCWQSGSAYDPAKHAALQRVLEQRKS

SEQ ID NO: 268146 - protein, 337 aa, unidentified
MEDIIYDHYIAIDWAAINMAIARMTKKSNKITVIDVPSDIGELQFYLKNLKGTKILAVEETTTAQWLYTELKDHVDKIFICDPFRNSLLKEGPKTDKIDAAKLVQLLKAGLMKEVFHSTDKFIYLRRLVSGYEDLVKAGVRLKNQRYSLLRVSGKSGYEKEDVKLATQDEQYVLASLDRQIKNYEEEKKGYENEFERLSRKYPEIRNQRSIPGIGLIGAVKIVARVVTPYRFANKGNYLSYTGLIKLDQISGGRSYGKKNPRYCRMMKSVYKSAVMAAVGNNNPINDYYEYLVNEKGYPAYNARNKACRQIALTSYGVFKSGAKYKPPGKDRMKVGN

SEQ ID NO: 268147 - protein, 353 aa, unidentified
MKDCNAKAEGFVLGLDLGDRRSHYALLDQRGEVVEEGSVRTDQKWIRSLFANVPESRVVMEVGTHSRWVSRMSEEQGHETFVANARRLRWIFENDQKTDRVDAQSLGRVGRFDANLLYPIHHRSEPAQADLAILRSREAVVKARTQLINHVRGQVKAWGERLAKCAAKSFHKRVAGELPEELKPALETVVEIIGQLTVQIRNYEEQIEERSRDYPEIGQLQAIAGVGPLTSAAFVWTLEDPGRFRRSRQVGAYLGMVPRQDQSGERNPRLGITKAGDEALRRLLVQSAHYILGAFGPDCDLRRFGERLLEGEADKGKNRAVVAVARKLSVLMHHLWEAGQQYDPFYQENRKAA

SEQ ID NO: 268148 - protein, 404 aa, unidentified
MGAGPSDVSTPHRRMVTIPEFNRTVKLFFLTEDFMQFIGVDLHTNKFTCCYRDEESPAEGKRGKTTETFELTSYGMAQFSKTLTPETYVLVEATITTFCFVRLIQPLIKEVLVANTYELKQISLARKNTDKVDADILCRIIKMQVLSGEKAVSPVTIPPLEIQELRGLFTDYRLLKKQTTQIKNRIHSVLKEKLYGFTQEEIFDQKSRRKLREMKEDPVLSFQLDLHFTHLEQVERLIGTLEEKIKERAEPFMREIEILTSMKGVSVFIAIAIIADIIKVDRFKNSKAFTSYLRSAPRVSNSNTSVSVQGTNKKGRKTSATLLTQSLNHVLDASEKLNCWYTRLTKYKKKGLVRTGLRRRVFAEMYQMLKKEEYHYGREIQKHEAKMRQYRIFLKKRKILLEMA

SEQ ID NO: 268149 - protein, 332 aa, unidentified
MTCCIGIDVSKQSLELWDGTQEGEVPNEKGLKTLKKLLKKRYGGGWNQEVRFIYEPTGPYSNYLRVFASENELKVHEVNPTKSANFAKVLGNRSKTDVVDAKMLSTFHALLTEEDFRIPEIDEIAEQLGAELGSYEIIQKTRTMLSNHVQSLEYKSGVTKKLKESLEKELGRLGAMEDEFEKEMKAYAEDHQETREDLGNLLSIKGIRVISAINLLYLFRKYPDANRNEITVLAGLDPVRRQSGSSLNGGRKISRAGDPMLRKVLYLACMNCIQHNEDIRTFYKHLVSDNHKKPNVALVASMRKLLLIAHHLTVTKSQYRTLEHGATLCLSS

SEQ ID NO: 268150 - protein, 376 aa, unidentified
MNEKLRFLGLDVHAETIAVAVAEPNGEVRSLGMIANREDSIRKFIRKLGSPEHLRACYEAGPTGFVLYWQLTQLGVKCDVVAPSLVPKKPGDRVKTDRRDALKLARSHRSDDRTAVWVPDAGSEALRDLVRAREAAKQDQLRAKHRLTKFLLRTGQRPPLGVKAWTEKYVEWVQQVRYTHPAQEATLLDCLNEVQHMEERVKRLEQSIVEVIQLAPAPMQEVVRGLQALRGVAHISAVTIAVELGNITSRFERARDLMGYSGAFPSEDSSGKRIRRGGITKSGNAHLRRIVVESAWSYRHRPAIGARLRRRQEGLPAEIIEIAWKAQNRLHKRYMTLMARGKEQRKTMTAIARELLGFIWAIGIKAEAACKQQMAA

SEQ ID NO: 268151 - protein, 334 aa, unidentified
MEEAPSSSSNWAFSLGIDVSKTALELALRDGGKTVAETTFANNSDGHEQLVRWLRDQGAGPEKTGVCMEASGDFEKAIAQRLYEEDYRVSVVNPRRIKGYASSQLQRTKTDSADASLIARFGRREAPRPWEPASASESRLQELTRARQALKKEKTRTQNRLEEAEDEAVRKAHQNLLGEIERQIEDLENEIEEHIEEDSELNNQCSLLETIPGIGLQTSAIVVSELGSPEQFENARQAAAYAGLVPQHRESGTSVRGKPRMSKVGNGRLRRAMYFPAMTALRFNSAVKAFGDRLKERGKEKMVVIGAAMRKLLHICYGVLKSGRPFDASLHPGT

SEQ ID NO: 268152 - protein, 465 aa, unidentified
MYRELQHLRQALAEGMRATSPTLSEVDPDKLLATYLDRLTLYVGLDVADKTFSVGAIDAGGNSLGSLEDCPNQQKGFDHLRHWVDGLLAKHDLRLVAVPAETTGVYYWALWDYLADSTPFARVLFNPRTTSHMAAVLSVKVRDEQVDALLIAQQLRLGSTPEVQLFEDADLLSARLCSRAARDLACHINRKKNQLRSLLRAYSPAVNFTFPGAKLHHPAVAALLKQFLFADEFIAAGEDTLTKLLADSCRSAFGREDARTLIAYSQHVIARPIQRHALRLRVHFLLDDIQNLKRQQKQMLTTGFDLIKHQPETRLIYRRVPGAGISNTLALVSELADVSRFPDGEHLASFLGLTTSKHISGTSVYHAKRITKQGSPNARYAAVNMAGFLRRKVPRYQNMYQSICARRPARKGHYVAQVAVARDFITNILHDMFVNHRPFFLEVEGYRSYRQQLSTRPGSNALPDN

SEQ ID NO: 268153 - protein, 351 aa, unidentified
MQIIGVDLHTRQQTIAMLNVETGEVIEKTLRHEGESVREFYSTLPRPTRVGIEATGSMQWFLELMEELGIDCQVGHPAKIRAAEPRKQKHDRRDAALVLQLLVENRFPSIWMPSREQRDVRSLILYRHQWVRIRTRVQNALQAIALSHGLRRGSSLWSKAGQHAIAALSLTRYTAERRTALQSLYQHLEEQIKDLDGKVEELAWKRPQARRLMTHPGVGPITALATETFLGEPKRFVDGKAVASYVGLIPSEHSSGGRQRLGGLSKQGNPLLRFLWCEAVGHAVRKDAELQRFYQHKLVQKGLGKAKVAAARKLGIRLWILLRDQIDYQEFCRRGQLRQKHGGAHAGMPAR

SEQ ID NO: 268154 - protein, 372 aa, unidentified
MEKIIAYVGMDVHKNSYSLCTYLKKEDRVLYRTKMDADLHKLLTYIKEVQKELGIKEDEIICGYEAGCLGYSLKKALDDYDIKCIILAPTTMLNINNKRIKTDKRDAENIARNLGLKTYKEVKVLSERDEEVKEYIRMRDDHKIALTKIKQQINGLVLRHGKIYDGSKTKWTKAHIEWLKKIELREMVRVILDEYLFTYNQLTDKIERYDKEIERFSQEERYKENTNKLKCFIGINTLTAMSILSEVGDFNRFNTAKQFSSFIGLVPKEHSSSEIVKRSSITKAGNNHLRKILIESAHCYSRGSITQKSRTIKKRQEGNKQEIIEYADKANERMKRKFYRLIRNGKKYNIISTAIARELTCYIWGIMTNRIA

SEQ ID NO: 268155 - protein, 403 aa, unidentified
MKHVIAFDISMGKSYMVIYNAQKQCVFESEIKHSKPEFEKLQEKIHELTDKTGELPEIVFESTGIYSRQLERFMQDNQYTYCLLNPLEAKLQCDSLQIHKTDRSDAHRLALTHFTVTRRVSNGTINSHQLKSLSRWYSELDSELSIIRGRMHKVIQLTFPELERMFTSKSDLFLNFVQLFPHPDCVLGLSKTIIKNCIRANTNKKISKNITAEKKAIQIIEIAKTSYPAVPQNDVLCDQLKLYARYYQELLHQKECCINKMVYIAEQRAEYNIILSLPGIGPNTAVHLMAEIGDITRFNNNKQLNAFAGIDIRRFQSGKTFFKDKINKRGNKHLRKLLFLIIQNMIKQRRYGQNHIVEYYDKLKTQPYNKCHKVASIACVNKFLKLLFHLITHDIHYDYRLTA

SEQ ID NO: 268156 - protein, 481 aa, unidentified
MTIETTTESSKDKRLTRKQRRELGRQIWSGSPGLDVVHRDAAGIDIGSREHYVAVGPDRAAQPVRVFECFTTDLHRLAEWLKECRVKTVVMQSTGVYWIPVYDVLEQYGFDVWLVNARDTRNLPGRKSDVQESQWLLKLHTYGLLRKSFRPTPEIRALRTCWRERAEYVQHAGVCIQRMQKALTEMNLQLTTVLSDLSGVTGMNIIRSIVGGERDGMRLAEFREPGVKASKETIAKSLEGTWLPEQLAILKRQLADWEHVQKQMGACDLDLQALMREMPASEAESTPAPPDTTTGKGKGRRKKKKASKNEPNFDLAGELTRVSGVDLTRIDGIKTMTVQTIITEAGLDMSKWETEDHFVSWIGFSPRNEISGGKVLKKKTRKVKSRLATALRMAASTLRESDSYLGAQFRRFRARLGDPKAITAMGAKLARLVYRMLKYGQEYVDKGTALYEEKYRQQQVRLLAKKAAQHGYTLVLSTNQA

SEQ ID NO: 268157 - protein, 342 aa, unidentified
MNLPVRIGMDTSKSVFQLHGVDENEVVVVRRQFRRAEMIRYFERLPPVLVAIESCGSSHHWARLLQSFGHEVKLIPPQYVKAYVKRGKNDAADAEALCEAVTRPSMRFVPVKSKERQAACMLMTVRERLVSVKSQLSNAFRSYAAEFGIVGPAGRQNVAQLIKRVLEDDSLPEMAKDLFRLQAEEYATVEARLAKIEAKLMRWHRDDDVSRRIATIPGVGPIGSSMLSMKAPPPETFRSGRDFAAWLGLTPKDHSTGGRQRYGGITKAGDSMLRSTLIVGATALLRHIRKGRHKPTPWLASLLERKPPKLVAVALANKFARIAWRLMISGGVYNRPVAAMPV

SEQ ID NO: 268158 - protein, 387 aa, unidentified
MQRPHDDSKVCRAAFVQDSTLVVVIEMSLTGWLVAGMIPGVSREPLKKIDPKPEELLQLLSRWRDEAIKAGKEITRIAVAYETGRDSFWLARWLRSRGIDAHVIHATSVAISREHRRAKTDRIDTAMLRRGFLGWLRGEPGHCSMAIVPTVAEEDAKRPHRERESLVQERTSTVNRMKSILIQFGVRNFNPVLRKASEKLDAVRTPEGIPLPPNAAAALQRHMERFRVIKEQIKAIERTRLQRLQRDPTDKMNAMVFLLVRIIGLGVETAEQLVHEILSRNLRDRKAVARYAGLTGAPDESGSKRREKGLSRSGNGRVRVILIQLSWRLLKLQPGSELVLWYKKRTADAKGSRKPMIVAFARKLIIALWRYVNTGLLPEGFELKAAA

SEQ ID NO: 268159 - protein, 420 aa, unidentified
MTRIQTKKTQLVNHRNLIVAVDIGQKTNMGYYRFSHNRRFKPFPFGNHVHGFGLFWDRISQVQKQHQLDEIVVGFESTGSYGVPLIHFLKDKGVKLVQVNPMHTKRVKELTGNSPNKTDRKDPKVIADIMELGHALTVVIPEGSAAELRRLTQARERSVRRRTSLLNQLQDLVFQVFPEFMTSLKGVKSKTARYLLSRYTTPGDLVACGDLDLLCSSVKKISRGRIGRARIEQLYLSACSSVGIQEGRDSLVLEIRQILSWIELVDGFITQVEERMLSQLRQIPYSSSILSIKGVGPITAAGLIGEVGDFGSFRTIPEMEKLAGLDLFEISSGLHTGRRRISKRGRPLLRKLLYFGAINVVRTGGILHGWYHRALERGMPKTKALIAVARKLLRIVFAVVRDHREFTYDYRNQAGLRMTA

SEQ ID NO: 268160 - protein, 376 aa, unidentified
MTWGCQAGVETANLITVMKNYKITNTESYESIKLGIDAHAKWYYVARQLDGATPQPVQKMNFEGLLLFVARQKRMAREVHTCYEAGAFGYHLHHRLTALGVTNYVVQPQDWDERGKGVKNDRIDAQALCQRLDRYVRGNLKAFSVVRVPTAEEERERAISRQRQQLVRERQRLQAMGRSLLAMHGIHVSGKWWQGKTWSKIRSEAPEWVIERLEVFSRLIAPLEVESTKLTSQIEAAATDQKIPKGVGPLTFEVLRREVGDWSRFTNRRQVSSYTGLCPREHSSGGKRRSGSVSKSGNPRVRAMLVEMVWRMTRWQPGYHGLQKWLPVLVDPARGGAARKKAVVAIARQLAVDLWRVFTGQTTAENLGLVYLPDAA

SEQ ID NO: 268161 - protein, 374 aa, unidentified
MESASSAEVYVGLDVHRKSIVATALDPQGQRLSQAKLGVTPAELIEFLRGLPGHKQVALEAGSSWAPVFDAAESMGASVVLSNPLRTRLIADASLKTDKVDSEALATLLRVRALPTAYAPPAEVRDLRTVVSERVYYKRRAAAIKNRTYAVLLRRGMEYEDSILGQKRKREGLRALHLPEVDRGLDTIRFFEDTCKDLDRQIHQSWLKSEDAQLLSTIPGIGELTSVALVAFICPIERFSTPEKLSSYIGLCPSTRQSGESIQHGPLRRDSNGLLRWLLVEATWTHCRKVPRGAVAKVTRRVSRRRGKPQGTGAGAHKLVKIIHAMLKRKETFRHQAPGPSTSADSLRRPRTTAQLCVRRATLELPTANHPQAP

SEQ ID NO: 268162 - protein, 470 aa, unidentified
MCFDLTTHSQMLSFEDCTIRLAQDQSLNPFLSDIDQENQAMNHSDLKTIEFAAYIGLDWADQKHDICLQENHSHRVESLRLDHKSDAISNWAAELRQRFQGRPLAVALEQKRGALLYALMRFEFMVLYPINPKSLASYRDAFTTSGAKDDPTDALLLMEMIRLHRDKFQPWIPDDPLTREICLLVEYRRRLVDDRTRWTNRLTALLKQYFPQALNWAGKLGSLPAVNFLTQWPQLETIQRASSAEVQDFYRQHGFRLGKKIQTRLDEIKAARPLTTDQAVIAASASMMRAILGPLRGVIAGIEALDQQIAACYEQHPDRHIFDSLPGAGPALAPRLLAAFGADRERYRSAEEMQCFSGIAPVTKRSGKTTFVQRRLACPQFVRQSFHEFAKSSILQSSWARAYYDQQRQRGNKFHEAVRALAYKWIRIIYQCWRQRAPYNEAVYLARLELHGSLLAKLVSSDGCKSQELS

SEQ ID NO: 268163 - protein, 311 aa, unidentified
MVPVYAGIDVSKAMIDVAITGEKEVQSFSNDEVGVMKLVSYLKIKSPVLTIAEATGGLEKLLAGYLTEAGLQLAIVNPKRVRDFAKAKGKLAKTDNIDAHIMAEFALDIKPIVRPLADKDTEEIKAIMTRRHQVREMITAERNRLYLSNIAVKPSIEEHIEWMKNQLKDIDKNLEDQIKKSPIWKEKDALLRSVPGVGKITSITLMGSLPELGRLNRKEIASLVGVAPVNRDSGTMRGRRTILGGRARVRTRLYMAALSAAKHNPVIKSYYEHLLKKGKAKKVALTACMRKLLIILNAMVKNNQKWQCKTA

SEQ ID NO: 268164 - protein, 353 aa, unidentified
MRMVVALDVHRNQITYKALDQETGELSRGRIAPAARADMRAWLGQFAGCEAEFALEGTTGWRFVVEEIERAGHRAHLADPAETATKRGRKRRAKTDNADCDLQLRPLLAGELPESWIPPAHILELRTLVRLRKTLIDQRTAWQQRIHAQLFHQGVPAGLRLRTEAGRQALATAELSPAGGELVALGLRMLDALDRELAPLDRQLRAFARRQPGCRALIERLYGVGPVSATAILAELGDARRFSSSDDAVRHAGLDITVYQSDQKRAPGHLSHEGPAVLRWALFEAAQSAARASSPDRSYYLQVADRIDHNRACLSVARKLCRRAYHILRELGEEALAPIEQAVAEEEAIAAAA

SEQ ID NO: 268165 - protein, 340 aa, unidentified
MVHVGVDLDKHNSQIAVLTDDGEIVQQRLANEATLLEKFFAQLPRQTPVAIEASGTWWWLVDLLEQLGHRPVLSNPKQTKAIAAARLKNDRVDAERLALLLRGDLLPTVWIPPAALREARELVRHRIQLVWLRGVIRNRLQAMLARRNLQPTSGKSWLTQRGQRELQQLPLPEAPSRIREDCAALLPTLDAQIRRLDVDLVTRWGQDPRVQRLMTIPGIGPFIAIVLVLELGDIHRFATAKRVASYVGLTPRVRGSAGRVRAGHITKEGNRLLRWVLVLAATQAVRRPGPLRAWFHAVKKRRGKKVARVALARRLAEIVFHVGQQECDYFTVVRHGVVRG

SEQ ID NO: 268166 - protein, 386 aa, unidentified
MQKLNDLSRSLTPLKPDGTLIAVIEMSLSNWLVAGIVPGVERQPLKKLEADESSLLKLLNRWREEAKKSGHRIERIAVAFEAGRDGFWLARWLRARDIEAHIIHASSVAVSREHRRAKTDRLDTELLKRAFLGWLRGERDHCRMVAIPTIKDEDAKRPNRERESLVGEQSRIVNRMKAALIRLGIRGFNPKLKKAVERLDGLRTPEGEPIPPNTLAELRRDMARRRLVNDQIRQIEDTRLEGLEQAPSDGPHAMVRLLARVIGVGIETADMLVQEVLSRNMRDRRAIARYAGLTGSPDESGRKRREKGLARSGNARVRRGMIQLAWRFLMFQKDSTLAQWFRARTENARSARKTMIVALARKLLIGLWRLVREGVVPDGVVLRPVS

SEQ ID NO: 268167 - protein, 337 aa, unidentified
MATSAAMRMVGIDVSAGWIDVERAAADEPVAVRRVANTAAGHRAVGRWLTQGGRDARVVLEATGVYSWDLALALQRTARVEVMVLNPRVSKDFAGACGQRASTDATAARRLREYAARMPFVPWVPPSAAALELRALMRRVAAVVEMRTQEHNRWHALRATAALPAAVRTEVRTHIQSLGRQIARLERAARTVVQSAPALQARYDRLRSIPGVGVRSALGLLAELAVLPPTLTARQWVAQAGLDPRPVRSGSSVHPPVRISKRGNVHLRRVLFMPALVAVRRSPAVQRLATQLTAQGKAPLQVLVAVMRKLLHAIYGMLKANTDFDGERFRRSALAPT

SEQ ID NO: 268168 - protein, 344 aa, unidentified
MDHFAGLDVSVKDTSVCIVDDAGKIVREVKVASEPDALLAVLKNPAYRFKRIGLEAGPLSQWLFSALAEAGLPVVCVETRHMQAVLKAQINKTDRNDARGIAQMMRVGLYRPVHVKTLRSQKLRMLLTHRKLLQSKAIAIENDLRGTLRNFGLKVGMVGTVRFEARIRELVENFSDLAGLVEPLLIVRRVLREQIIILHRRLLAIVRDDEVCRRLMTIPGVGPVVSLTYRATVDAPARFRKSKSVGAVFGLTCSRYQSGELDWSGRISRCGDEMMRATLYEAAQSMMHSKKWCWLKAWAMQIARRRGMKKAIVALARRLAVIMHRIWVDGTEFRWTREQAAAAV

SEQ ID NO: 268169 - protein, 433 aa, unidentified
MRSRAYRATMVKRVNWEALGSGHDGQAVQLGMDIGKEEVLAVLRWDDGHFERPWLVKNPEETAELIDLLKRVEMGRVLRLAMEPTGTYGDVLRQAIADAGWRLDRVSTKASHDYAEVFDGVPSQHDGKDAAVVAELAALGKSREWPYESPSATDQEMAYWVDWMDAQQRQYVMWLGRLEGLIARHWPESRKWLTLSSGTLLRALHHYGSPAALGADREAAARLSRWGGPYLKAATIRGLIESARSTVGVRQGEIDLHRMQQYAGQALAARSEIARSKRRLEKLAHGNAVIQAQAEAAGMATACVLWVCLGPASAYHCGEAYRKAMGLNLAERSSGMYQGKLKISKRGFGQVRRWLYFAALRLTAQSPVSRWYRRKKAKDGERAKRAVIGVMRKLALALYAVGAEGATFQAGRLFPGRQLGQCRQRIQASVSRR

SEQ ID NO: 268170 - protein, 348 aa, unidentified
MTEAYDGREVVGMDLHRRRSVLVRMTPDGRKLETARITNSPAELRRAIAGAGTNPRVVLEATYGWYWAADTLSAAGAEVHLAHPLGVKGFAYRRVKNDVRDAADLADLLRMGRLPEAWIAPDQVRELRELTRYRVKLVRIRTSCKDQVHAILAKLGIPVTCTDIFGVWGSTWLDGLGLPQPYAGKMASLRKICAVLAGEIALLEAVIAGLLKDHPGYQAVRVLPGIGPVLGAVIVAEIGDVTRFPRPAELCSWAGLTPRHRESDTKVSRGHITKQGSRNLRWALIEAIQHVPAGHPLRQRKDDIMTRRGAQARNIAKVAMARQLLTCVFYAMRDGQVRSLAAAARQAA

SEQ ID NO: 268171 - protein, 350 aa, unidentified
MCSLPVFVGLDYHDASVRVCVLDTDGRELANADRCNDWKAIAEFADRFGRPVRAAIESCCGAADLAEELVSCAGWSVDLAHPGYVQRMKQNPDKTDYQDAQLVADLERIGYLPRVWLAPQHIRELRQVVRYRLQLTEQRRATKLRVRALLREQRCRAPQGVNTWTKAWDHWLRHTAELSAEGRWVANQHLQELACLATRIRQVEKRLERLTANDVEVQRLQQQVGIGPVTAWTIRAEIGHFDRFRTGKQLARFCGLSPRHASSGQRQADAGLIRAANPALRAVLIEAAHRLVNYDRYWQKFAQRLRAAGKPGSVVAAAVANRWIRRLYHEMKTPSGELAVAVRSARSEDS

SEQ ID NO: 268172 - protein, 343 aa, unidentified
MNEVITIGLDLAKNVFQVHGVDVEGNVVIRKQLRRRQVMPFFRKLAPCLIGMEACATCHYWARELEALGFEVRIMPAHYVKPYVKRNKNDAADAEAICEAVTRPSMRFVAVKGPAQQSLMMVHRTRALLVRQRTMVVNAMRAHLAEFGIVAPVGLRGLKALLAVIADSGDERLPSVARACLTSLATALVTIEREAASSERRIHAWHRSNAQSRNLESIPGIGPIIASALVASVADPSVFKSGREMAAWIGLVPKQNSTGGRDRMGRISKQGDPYLRWLLVAGAMAVIRHGRKTGFKGNPWLADLMGRKPAMVVAVALANKNARTAWALLARGEAYRRPAAAQA

SEQ ID NO: 268173 - protein, 386 aa, unidentified
MQHATTLPAPERTCSRGDCATLFVSLELSRSTWVATALAPGSSKMSKHTLVGGDGRKLLDLLARLKTRAEQRIGAPVKVVAIQEVGLDGFWIHRLLEANGVESHVVDPASIAVPRRHRRAKTDAIDGETLLRTLMAWQRGEPRVCAMTVPPNPGEEDHRRISRERATLLQERIRHTNRIRGLLFGQGITNYNPVHKNRRKNLEQLRTGDGRSVPAHLKSQILREIDRLELVLRQIGEVETERDEMLQLAQPSSPAALLMRLKGIGAEFATVLYLEGLFRQFENRRQLAAYAGLAPSPWKSGSIDQEQGISKAGNPRLRSTMVELAWMWVRYQPASALSCWFRQRVGSERGRIRRISIVALARKLLIALARYVSHGEIPAGAVMKAG

SEQ ID NO: 268174 - protein, 416 aa, unidentified
MKSLSQFVASIGIDWADQKHDLCIRSASGDLEFSTLIHSAESIDEWANSLRKRFDGKPVAICIESRKVPLVHALLKYDFFVLFPVNPQTLARYRNALRPSRAKDDPSDAQLLLDLVSRHPEKFNPWSPERPEIRALTHLVEMRRTLVADKVRCTNRLTAALKSYFPQALDWFEDKDTLVFCSFIEKWPSLQAAQRAREPTLRKFFTDHNVRYPEVIERRIKAIKKATPLTHDLGVITPNQMLVFALVHQLALLLGHIDNFDEAIAKRFKALEDAPLFNALPGAGKHLAPRLLVAFGEDRARYDSADSLCRYAGIAPVTERSGNKSWVHWRYSCPKFLRQTFVEWTKETIRYSFWAKAFYQLQREQGKTHNMANRALAFKWIRIIWRCWQDKKPYDEAKYLMALKAKGSPLVAELAK

SEQ ID NO: 268175 - protein, 319 aa, unidentified
MAQNDRVVVGIDVAKDKVDGCIRRFTLRQVFPNTAQGHRKLVAWLRKHKVDKAAMEASGGYERDWAKVLRQADIEVRIVDPKRVRSFALSAGRLAKNDPIDAEMIAWFAETFGEAPSQTHDAAREELVALVKARKGLMDIKIRLQSQNEHALPGPVQKANARVLKSLAAEIAKLEAAISATVKATPEFAERAEIIENVPGLAEATSAILVAGMRELGNVSDEIAAASIGFTPYDDDSGERRGERHIKGGRRSVRNAVYMPCLSAATQHNPVLKTFYQRLIAKGKAPKVALVACMRKLIVILNTLIARRQKWDPTRYAAA

SEQ ID NO: 268176 - protein, 378 aa, unidentified
MAYAFSFINISNNIIMAKKAKKVKTAKGAELRIVNPDAAGIDIADGIMQVCVPTDRTKDNNRAFGAYTSDLHAISEWLRECGIKTVAMESTGVYWIPLFCRLQDDGLDVVLTNARDVKNITERKTDESDAEWLMLLHQYGLLKASFQPHNDAKRMRTLTRHRDTLSREASSIVLHMQKAMQQMNIKLTLVLFDITGKSGIRIIEAILAGERDPKKLAELADIQCKTPKEEITKALEGNWEEDLMFVLRQNYDTFKHFCAQLDRCDTELEKLMENYRTEVAETGRPSYSPTKKRRNYHKRKRKRTVGFDVERKAYDMWGVNVFEIPGISHLTALELMSELGHYFTRKSLSTKQFCSWCNIAPNTKISGGKKDIKSCTTS

SEQ ID NO: 268177 - protein, 343 aa, unidentified
MDHFAGLDVSVKQTSVCIVDDTGKIVREAKVASEPEALLAVLTSGGHHFKRIGLEAGPLSQWLFSALGEAGLPVICVETRHMRAVLQAQINKTDRNDARGMAQMMRAGLYRPVHVKTLRSQKLRTLLTHRKLLQSKAIAVDNDLRGTLRNFGLKVGMVGAVKFERRIRELVESLPDLAILVEPLLIVRRVLREQITVLHRRLLAIVRDDEVCRRLMTVPGVGPVGALTYRATVDVPARFRNSKAVGAVFGLTPSKYQSGEINRTGTISKCGDEMMRVMLYEAAQSMLTRTVKWSWLKAWAIKIARHRGLKKATVALARRLAVIMHRIWVDGTEFSWTRQAVAA

SEQ ID NO: 268178 - protein, 354 aa, unidentified
MKRARKELQPGDRVFVGIDLHKKKWHVTARTSELELFSGSIPGCWKALQRILERYQGHQIETVYEAGYFGFWLHDHLVEYGAECIVTPPSLIPQEYGNKVKTDRRDSRKLAHFLAKGLLKRVWVLTEKERYHRQVTRRRRQLVGDRIRTQSRIKAELRLYGIDLPEPDGKWTKIYLGNLGRIRFNNRWMQESFKCLLEQYHFLDGQIVKQTKLLRELSKTEFYRERVELLMTIPGIGIIAAMELLLELQDVSRFQRADQLAAYVGLTPSQYTSADKVRMGRITRVGKNSLRATLVQASWALIRKDGVMQEKYDRLKSRSGGKRAIVAVARTLLIRMRRMLLDNNPYVIGLIAAN

SEQ ID NO: 268179 - protein, 320 aa, unidentified
MAEKTEKMTEKMYVGIDVSKIWLDIAVIPSGETWRTDNTEPAIRVLVERLKEVQPTRIVVESTGGFENGLVTTLHANMLPISRVNPARVREFARSIGQLAKTDTLDAKVLARFAEAIQPPLTQLPNEDEQALSALVARRKQLLEMLSAEQNRLETAAPGIRPSLHEHVQWLKNQCKKLEREIDQFIQQHPDLKQKNEILQSMPGVGKVTASTLIANLPELGEYDKKKIAALVGTAPFNRDSGFKKGKRSIQGGRPDVRQVLYMATLSATRHNVIIKAFYQRLLATGKKKKVALVACMHKLLIILNAMLAHHSCWKPTILA

SEQ ID NO: 268180 - protein, 407 aa, unidentified
MFTRTLWWPLFGSQVKREAKTFETPSSGLLKLLEWLGEQACTHVAMEATGVYWKPVWNILSDGNFELVLANAAHIKNVPGRKTDVSDATWISDLLAHGLIRSSFVPQQDQQQLRELLRTRKQLIRQQSSHIQRLQKTLQSANIKLDSFITDIVGKSGRAIISALIAGEANPTKLAALADWRIKASQQKLREALRGRTTHHHRFLLHLHLEHIKFADEAIADIDRRVDALIAEMDKEVKVDQAPFQSLIALLTTIPGIAPVAARAILSEIGLDMTRFRTAGHLLSWAGLCPSNNESAGKRGSTRLRKGNNWLKALLVQCAWAAKRKKDSYFRAQFYRLSSRRGPKKAACAVAASILTTVYHMLKNGTEFKDLGPGHFDRRSTDVKAKRLLAQLANLSFNAQLTPASVS

SEQ ID NO: 268181 - protein, 343 aa, unidentified
MQIARIGLDLAKYVFEIHGVDAHGKTVLRKTLRRHAVSTFFANLPPCLVGMEASNGAHFWAKTLLDLGHDVRLISPQFVTPYVKSNKNDRNDAEAICEAVGRPNMRFVPVKSAEQLAVQAVHRIRTRLVADRVRLVNQVRGLLGEHGIVVAKDIGNLRRALAGLGDNEDRALNPMVRALMGELRQELTELDARIVGYDRKIRELYRNSEICQRLGKVEGIGPVTATALVAAVGDRSSFKNGRQFAAWLGLVPKQRSSGGRARLFGISKRGDRYLRTLLIHGARAALGRVRDKQDPRSLWLGKMRQRRHPNVVAVALANKNARIAWSLLTSDNVYDASLSVDAA

SEQ ID NO: 268182 - protein, 403 aa, unidentified
MNNVAGIDVSKGKSMVSVLRPFGEVVAKPFSIGHTGSELKELADYLKSLDGETRVVMEHTGRYYEPVARFLHEEGVFVSAVNPKLIKDYGNNTLRKVKTDKADARKIARYGLDNWAELRQHTPMDTIRMQLKTLNRQQSLYAKTKTMMKNNLIALLDQTYPGVNALFDSPVREDGSQKWVDFATAFWHVDCVRNMSLTAFAERYRKWCKRHGYNFSQSKAVEVHTGAQDLIAMLPKDALTKTMVRQAIDALNAVSASLERLKAEMQALAAQLPEYTVVMAMHGVGDSLGPQLMAELGDVARFTHRNAITAFAGVDPGADQSGTHEAKSTRVSKSGPPELRRALFLVMDCLLKTQPQDDPVYRFMDKKRAEGKPYLVYMTAGANKFLRIYYGRVKEYLASLEEN

SEQ ID NO: 268183 - protein, 322 aa, unidentified
MAMHSFGGIDVSKDRLDVMVLPEEQCSSVPNDAAGWAKLVEQLRGFSISAVGIEASGGYERGAVRALLAAGMSVRQVNPFKLRQFARASGVLAKNDPLDARMIASFIAIMPTRPAQPHAPAVERLAEILTVRRQLSDAKVAAENASRLLEDAMLQRLSRRRIARLAADIDLLDGRLVEIVMADAALVRRYQLLTSMPGVGPVLACTLIALLPELGRMNRKQVAALVGLAPYAFDSGKLKGARCIWGGRASIRRVLYMAALIAMRCNPALKAFHNRLAATGKKPKVVIVAVMRKMIITLNAMLRNETPWVDRSSGRHSVLTAR

SEQ ID NO: 268184 - protein, 370 aa, unidentified
MEKDTTYVALDDSKRKIVAGISRPGDAQPELRESANDPRLIRRLFERLKREGRAVAACYEAGVSGYDLYRQITALGVECVVIAPALTPRRPGQRIKTDRRDAAKLVRLFRAGELTAIHVPAEAEEAVRDLVRCRDDLRRDVLRWRHRVLKLLARHGRAYLAGKNWSQAHWRWIREQRFDQPPLQRAFEATVFTLEQALARQAELDKELEAVAGTAPYREPVGWLRCFRGIDTLSAIILLAEVVDFQRFRRPRELMAYLGLVPSEYSSGETQRRGALTKAGNSHARRVLVEAAWHYRHRPTIGRALAGRSQGQPDEIVGQAWRAQRRLHRRYRHLIGHGKRTPVAVAAIARELVGFIWAAMTRHESRRQAA

SEQ ID NO: 268185 - protein, 349 aa, unidentified
MKYFAGLDVSLEETAICVVDETGRIVKELRAASEPEALVAALQETGLVLERIGLEACSLTAWLHEGLTQAGLPAICIETRQANAAMKTMPNKTDRNDARALAQIMRTGWFRQVHVKSRQCRLWRSLLVARRTILNEMRTIENVVRAILREAGIKLGTPCRTAFADRVREVAGSDASVMPLVAPLLAVLATMLREFGHLTKQVLTIVRQERVCRRLMSVPGVGPITALAYRATIDRPDRFRRSRDVGAHLGLTPARYQSGETDIQGKVSRCGDELARTALYEAAHSLLVRSRKWSSLRAWGMKIAKNRGMARARVAVARKLAVVLHRMWNDETEFRFGKEPSTIARPTAA

SEQ ID NO: 268186 - protein, 440 aa, unidentified
MQILYSRCCGIDVHKNSVTVCVLVYSGSPEPDVRKREFATHKKALGNLRLWLHAQKVTHVAMESTGVYWKPVWQALEGNFELILANPYQVKTVPGRKTDARDSQWIAELLAHGLIRPSFVPPRAVRNLRDLTRYRVKLVEEHNRIHNRIHKVLEDSCIKLDTVASDILGVSGHRVIKAILAGYDHPAHLAYEVRGTLRGKMPELRLALNGRITDHHRFLLGELMDDLERIEAKLQRIEKEIVERVDMRLVERLCSIPGVDVITAWTLLAELGSDMRVFDSPKHAASWAGLCPGNHESGGKRLSNRTRTGNRSLRRALVQSAWGASRKKDCYLAAFFYRHAARQGVRKAIVSLAHRILVIAFRLLQGGAEYQEFGGDFFDQLNPVRTRNRLIRRLQRLGLEVTLTPRPDLPPVPLPVPPARRKRGRPCKCAERLIHCIHKR

SEQ ID NO: 268187 - protein, 367 aa, unidentified
MDKIYDICCGIDVHKKLIVACLNHKRKKELREFGATTRELMELAEWLQKNECEIVAMESTGSYWKPLYNIMESYGLHAIVVNPAHMKAVPGRKTDVKDAEWIAELLQHGLLQPSYIPSKDQRELRELVQYRKSLVGERTRELNRLQKMLEGANIKLSGTVTNINGKSARKILEYILSGNEIDEKKYDEMYEEKLIAHNLKASKEQILDDLKGFMSPLQRRMLKELLQHLDELNVHIENLNDEIDNFMKPEEKQASQVIQDVTGIGNTSAQTIIAVIGTDMERFPSDRHISSWAGLCPGDNVSAKKRKSGKIRKGNALLKSTLVLCAHAAVRHKSSYFHAQFKRISTHRGKKRAYVACLLYTSPSPRD

SEQ ID NO: 268188 - protein, 350 aa, unidentified
MLIIGCDYHPGFQQIAFVDTDTGELGEQRLLHREQAEQFYREQKQRDLPVCVGMESSGHSRWFERLLHELGFELWIGDAAEIRTKRVRKQKTDRQDAQLLLRLMLEHRFPRIWVPDAENRDLRQLLWHRHRLVQMRTRVMNQLHVVALNEGLRRKKALWRPAGRKELESIALAPWASRRRQDLLDLLDELTPKIQDLTSALEEEVEKRPVTRQLMTHPGVGSLTALAYELVIGTPDRFHCGKQIASYVGLVPEEKSSGDRRRLGHISKQGNVLLRFLLVEAAQVTVRSQAEWRSKFFHLAMRRGRKIAKVAMARKLAVHLYWMWRQGCDYGQLQKLGSHAGEPGHPDGVQ

SEQ ID NO: 268189 - protein, 389 aa, unidentified
MTFFVGVDIAKYEHVATILDDSTGEFLVDSLHFDNNSKGFKLLLSNLSKLDRNDVVIGFESTAHYHQTLFSYLSGKKYRCFLINPFMTSRFRSLSLRNAKNDNIDSRAIASYLSFEYRHLLEENFFLNELKELCIHRDAIMKRSSRLKIQLLSYLDRVFPELESVVDKHGIHSRAIRAILKERPTAASISSTRIDHLLKLAKDASHNRFPQAKIKAVKEAAISSVGISSDAIGLKIRQSVQMLESLEKQIDEVEAAITSSPTVIDSPLHKVKGLNSIEIAYIMSAIINIDRFASPDKLIAYAGLDPIIRQSGTWQASQTRMSKRGNKLLRYALIWSANNIRKHPSKMKDYYDRKIAEGKSHYNALGHCASKLCRYIFFILNHPDDDFIN

SEQ ID NO: 268190 - protein, 350 aa, unidentified
MPTAPLQYVATLGIDIGKNSFHLIGLDARGAIVLRQKLSRGQVEARLANMPSCLIGMEACVGAHHLSRQLLALGHNVKLIPAQFVIPFRKSHKNDFRDAEAIAEAVLRPTMRFVPTKTVEQLDLQALHRVRSRLVSQRTAVINQIRTFLLERGIAVRQGLRSLRQALPDILAKRTDVLTPRMVHLVEGLVQDWHHLDERIEAVTREIEALVAADEACQRLMSVPGVGPIIASAMVAAIGNGAAFSRGRDFGAWLGLVPRQNSTGDRTVLGRLSKRGNSYLRSLLVQAARVLLLWPAKWHQHSFGKWLTAASTRLHHNVLAAALANKLARVAWSVLSQNRTYEPRTAAAAG

SEQ ID NO: 268191 - protein, 387 aa, unidentified
MPQVDDLSRSLVAFDQDASLIVVVEMSEASWLVAGMAPGVDRRPLKKLGPDPDALLRLVERWRDEAVKAGKMIERIALAFEAGRDGFWLARWLQARGIEVHVIHSTSVAVSREHRRAKTDRLDTAMLLRVFLGWLRSERGHCGMVAIPTLEDEDARRPSRERESLVGERTRIINRMKAILAWLGVRGFNPKLRKAPQRLDDLRTPENLPLPPNTVDELRRDMARLAMVCEQIKALEQARLTNLEQVPGTGPHAMVRLIANVIGVGIETADMLVQEVLSRNLRDRRAVARFAGLTGSPNESGSRRRERGLAKSGNARVRRGLIQLAWRFLRFQKDSALAQWYRARTEGPAAARRTKMIVALARKLLIAFWRMVTVGEIPAGFALRQPA

SEQ ID NO: 268192 - protein, 342 aa, unidentified
MEQSIRCGIDIAKLVFQIHGVNAKSGQTVMVKKLARHDMLRFFANKPSMLIGIEACGGAHYWARELTKLGHTVKLMSPQYVAPYRRGGKNDANDAEAICEAVARPNMRFVAVKSESQQAVLVMHRMRDQLVHERTALMNQIRSYLHEFGIVMAQGRAPLAKIFPIIDEDMQLPLLLRQSITELADRLADLERRIQTLDQRISAWSKQDNAAKALLTLCGVGPVTASAAVATAGNVSVFKNGREFAAWLGLVPKQNSSGGKSKLGAITKRGDRYLRTLLVQGARVVMIAAQKAKLTQKDNPMFDWIYKLLERRPSNVVAVAIAAKQARMLWAIMKKQQNMVMA

SEQ ID NO: 268193 - protein, 380 aa, unidentified
MVPLQHHRGTTMDHYAGIDVSLEYSSICVVDATGNIVREDKIASEPEVLIAWFGSLGYALTRIGLEAGPLSQWLYAAMKKAGLAVELLETRHVRDAFKAMPVKSDRNDARGIAQLMRLGWFRPVHCKSIGAQEIRAELTARKLVESKLRDIANSLRGILRGFGLKVGATTERSFPGRVRELVKGHPVLEAIAEALLSVHEVLLREFNGFQKRVQSAACSNVKARLLMTTPGVGPVISLTYAAAVDDAARFKSSKKAGSHFGLTPKKYQSGETDRSGRISKIGDASVRAALYQAAHVILTKPVKGCPELKSWGMRLAKRAGQEKAKVALARKLAVIMHRMLADGIPFNPNAKAERMAATATKATSKVLALPASGTTVAEAV

SEQ ID NO: 268194 - protein, 467 aa, unidentified
MSPRSGKKFRTSNPSKDIALTHPHAAGVDIHAAMHMVSVPVEDVPKGFVNPDDKLPVGVRKFGTTTGELEALAAWLKDCHVETVAMESTGVYWIPLYDLLASQGFEVYLVDPRQTKQAPGRPKSDVLDCQWIRRLHSYGLLTASFRPSDEIVKWRGFQRQREMLIRYAAQHVQHMQKVLEEMNVKLTEVVSDIVGQTGMKIIQDIVRGVRDPLKLAKHRHPSCKASEAEIASALCGTWREEHLFTLKQALKLYEFYQKQLRECETQIEACLRQMQDKSQGAMLPPNPRKRKPEKNEVRFGARELLFKMSGVDLTQIEGISETTALVILSEIGTDLSAFPHEKNFVSWLGLCPQHRGSAGKIFKRRTRRGANRVARALRMGAQGCHGAKNALGAFYRRVQSRGGGSKAIVATARKIAERVYRMLKYGQEYVRQSQEAYESAYRLRQEKALAKKAASLGYRLVPETMSA

SEQ ID NO: 268195 - protein, 342 aa, unidentified
MKNVTIIGVDLAKNVFQLHGAAADGSVVFRKKLSRPQVRKFMAAQPACIVAMEACGSAHYWAREIARLGHEPRLIAPRYVKPFIKRQKNDAADAEAIVEAAQRPTMRFVEPKTEGQQARAIVFRTREQLVNQRTELVNALRAHLYEFGYVAPQGIGYLNHLAEIVEDEDTELPDLVRDTCCDLLNLIVQLTGRIDMLERKIAALSRHGTMIRRLRTMPGVGPIGALAVETFAPPMETFKCGRDFAAWLGLVPLQKSTGGKQRLGKTSKMGQCDIRRLLIIGAMAVIRWACRKGAPEGSWLARMMAKKPRMLVAIALANKMARGIWAMLTKQEDYRGPAMVAA

SEQ ID NO: 268196 - protein, 341 aa, unidentified
MKKLFIGIDFSKEKVDVAIIFADGLSEMGNRVFNQFNTTTAGYGKLVKWVKQNSNGTDPSLWLFCGENTGDYSKGLCNYLYGMGCEMWLENAKCIKDASGIRRLKSDRADASMIAEYAMRNYDKAVLYEPLSDALNQLRELFLCRQMLVRHRSSFITRKGEKEYTMEKSPAKKTVSLCQKHVVATLDKEIETIDSKIKQLIASDSELSEVYSIVTTVPGIGAQNAVCLMVYTDNFRRFNYNARKIACYYGVAPFGKDSGTSVHSDPHVHYMANRQIKALLTQAALAAIRHNPVMFHYYNRLIARGKTMPVALNNVKNKLLHLLTAMVRNKLVFDPNYKISA

SEQ ID NO: 268197 - protein, 338 aa, unidentified
MTRFIGVDLHRNCFTVCVIAENGREYTSEYRLTHLPLFLRRLRPTDELAVEVTGNTRLFYDAVISHAARVVVVNPSQFRLIRQSLKKTDRHDARTLAFYLSKGMLPEVRMKDKLHAQIASLTQTRDTLVKQRTALKNKVNNILSAHGINLPKEAISSEKACQEILGMKFDPLVEVELRVIVGQIRGLKESIAQLDKTIKSEGSKLEGHANLKSIKGIGDLGATILLSVIGDVRNFEHEGKLAAYFGIVPRVNNSNEIERSGRITKRGTKLGRTALVQCSLIAMRYSPYLAKFYHKIQARRGTGKAIIALAKKFLGVIYHTLKNGWVFEDFPNFVLKRA

SEQ ID NO: 268198 - protein, 371 aa, unidentified
MEAITFVGLDVHKRMTSVAIAESGRGGEVRFLGEIPSTAEALHRLVERLEARHRRLSFCYEAGPCGYGVHRLLSGLGQDCSVVAPSLIPSRPGERVKTNRRDATTLARLHRAGELAPVWVPDAGHEAMRDLVRARATARRVLGKARQHLQGFLLRHGRIYRGVRGWTRAYRRWLTTVRFDHPAQQIVLQDYIHAVEDAEARLSRLEQQIRELLPSWSMAPVVEAVQAMRGIALIVAITVVAEVGDFSRFANPHQLMAYLGLVPSEHSSGTSVRRGGITKAGNAHARRVLIEGAWTYRMQARVSRKLLDRIERLPKAVREVAWKAQLRLCNRYRRLAPAGKPKVVVTTAIAREMVGFIWAIARIVQPRPAIG

SEQ ID NO: 268199 - protein, 337 aa, unidentified
MESRLFMGCDIAQDTFAFCLRDQAQLLLEGEILNSKTSIRKWLHELKRIHHVDLTNVIFCLEHTGIYGMLLMRTLHERSLTVCVEGASNIKLSLGLQRGKNDRVDARRIAEYAMRYTDRLKQWKPRREVLQKLQLLSGMRSRLIKARNVLSSHTQEVKRFMNKAEYMLLSKGTQEVLKAIERSINNADQKIAGLIRSDENLNHLSKLVTSVDNVGMVTCAAILIRTNEFQDFKESKKFSCTAGIAPFEHASGKSIRGKTRVSHQAHKDLKTLLHMCAVGAISREGELRDYYLRKVAQGKNKMLVLNAVRNKLVGRIFAVVRDGVMYQKDYQYNLVMS

SEQ ID NO: 268200 - protein, 329 aa, unidentified
MTTPNATDCIFAGVDVSKHKLDVAQSGLQQVASFTNDPGGIAQLVELFLKAPPKLIVVEATGGLERSLIDALLDASLPVHRANPKHVRYYALSLGILAKTDPIDAQVIERYAAQLSPRLLQKRSEKQVELEALVTRRRQLLHVRTQQSNQLEATSSKSARKSIAAVLKFLEKQIDSMNRQIRQLIESDDDMDDIDKLLRSVPGIGKVASSTLLCEMSELGKMDRGQAAALVGVAPFNHESGRFKGKRMIRGGRSAVRSVLYMAAVCAIRFNPVLKDFAQRLQKAGKLPKVIIAAAMRKLVCIMNAMVRDGLRWDELEIVKKLNGVESVA

SEQ ID NO: 268201 - protein, 386 aa, unidentified
MRIALGLDLADKKCAAYAVPVGKAKKAQREFLDGFNKDFRRVPTTKEDLQRMVDVLKDESDGIHVLIENSTITHKVYWLLVGMGCEVLVAQSADLLRITESVTKNDDNDAMELAAYMRRRLNGEDEFRTVVMTPPEIMAKKMFIRAIYVDKTYLSECKKRLRFRLKVMGADLRREYKDISCERSLTQLRETGDPYLCYEVAVIRATKSRIQDGERYISTLFKDDPYFDLLMTIPGFGLEISAYISTIIIDIDRFDDKKQLEAYSGLVPRQRSSADSDPNCRTTHHGDEWAREFLGYAVKAHVMWAKDSVVTIMYNRLRARGMPYKKVITACSRKMVGVVWSVLKNGRSFTSDQNVLRQARGAAAEIERMDSELSEQELDAKYAEAA

SEQ ID NO: 268202 - protein, 414 aa, unidentified
MDVVHPRCAGVDISKRDAKVCVRIADSGRGRARSTVTTWGAVTNQVLALRDHLIAEQVTLVVMEATSDYWKPFFYLLEDGPFEVMLVNARHVKNLPGRKTDVSDAAWLAQLGAHGLVRGSFVPPPPVRQLRDLTRTRTTITRERAREIQRLEKLLEDAGIKLSSVASDISGVSGRLMLNALIAGRHDPVELAELAKRRLRSKIPELTEALTGRFSEHHAFLARVHLDLIDQHAHAIDEITTRIEVVIEPFRGARDLIVTIPGISTLVADVIIAETGADMARFPTAAHLASWAGTCPGSNESAGRVKSTRTRPGNPYLKGALGIAAMSAARSRDTYLSVRYRRIASRRGPIKAIVAVEHTMLIAIWNMLTTGTFYADPGSDFYTRLNPDKAKHRAIDQLRKMGYDVTLNPLAQAG

SEQ ID NO: 268203 - protein, 342 aa, unidentified
MSEIIMVGLDLAKNVFQAHGADASGRAVLRKKLRRDQVLAFFSRMQPCVVAMEACGGAHFWGREIGKLGHEVRLIPPAYVKPFVKRQKNDAADAEAICEAATRPTMRFVPVKSEETQGAAMVFRIGELLIRQRTQAINALRGHLGEFGQIVPQGAANAARLIAIVEDPDSGLPADAIATLKVLVGALTHLETEIDKLDAEIARRAKENEVARRLMTVPGIGPLIATAIAVLAPPPETFRKARDFAAWLGLTPRQHSTGGKQRLGATTKMGERSLRRLLIIGANSVIIKRHVHAAARPGTWLGGMLTRKPPMLVRVALANKMARIVWALMARGGVYKSPASAA

SEQ ID NO: 268204 - protein, 330 aa, unidentified
MKKWDFILGVDVSKLTLDVHCAQLNEHVQIENGSEGFKVLKKWFKQFNIDVTKSIIVMEYTGGYEYKLIQFCESLSIAYTRIPGLAIKNSLGITRGKNDKIDAKRIAIYTEEKIKTINPSKPLNRQILKLKELLSFRKRMVRQRAGLMASLKERIAMFEVSTNDIIRTMTQDYIKKLDDDIKKLDITLQTLVKEDEKMFTNYQIITSIQGIGPVNALMTIAYTENFTSFTNPRAYAVYCGVMPFEYSSGTSIKSKKRVSHLANKELKQELNQAAKTAIIWDKDLCEYATRKLKYKPYALVLNNVKFKLILRMFSLVKRGEKSVDNYIKAA

SEQ ID NO: 268205 - protein, 410 aa, unidentified
MNQLAEIPFTLYVGIDWADAKHDICVQAAGSEEREFDRIVHKPEEIEVWAQALFQRFGGPIAVALELTKGPIVSALQKYDFFVIVPIDPIRLASYRKTFTPSGAKDDPTDAEFALDYMMRHPEQLKVLKPQSVPMRKLTYLVEARDRLKGDQSRFVNRLIQALKQYYPQTLDWFSDRNTVLFCDFLVQWPTLEKAKRARKKKLEAFFKNHNVRFAHLIEARIDAIKAATPLTHDEAIITAHRLQVEALVEQLRLTIQAMKRFDKEIVATAEQLSDYKLLFTPLPGAGKVLAPRLLAAFGEDRERYPCAEELQRRTGIAPVTKRSGQSEWVHWRWQCSKFLRQTFIDWSAQTINKSAWAGAYYRQQRAKGSSHQAAVRALAFKWIRILYRCWQDRSPYDESKYLEALRRTA

SEQ ID NO: 268206 - protein, 354 aa, unidentified
MQNDRQSSETVILGVDTHLDIHVGAVISQAGKLLGTHIIQTNQAGYLELLDWARSFGSLERAGIEGTGTYGAALTRYLIKNSIYVVEVNQPDRSKRRLEGKSDPLDAENAARTVLSGSSKAIPKMQSGACEALRIISVARRSAVKACTQAINQLRALLVSAPQDVRDKLWKSKPHECVTACINSEVSEHSPLRIALCSTLRSLAKRWMALTEELNELDESLDKLTRKYASNLRSQFGVGPQTAATLLAVAGDNPGRLKNEAALASLCGVNPLPASSGKTVRHRLNRGGSREANNALWTIALVRMRSDPRTRIYVDRRTGEGLSTKEILRCLKRYIVRELYPLILSDLAYANRRS

SEQ ID NO: 268207 - protein, 319 aa, unidentified
MQANAQFIGIDVAKAELVVGCAGQVSTLANEPADIEKWVRSVPAGSVLAVEASGGYEQAVLVAAHAGGLRCYLLNPADVRHYARAVGLRSKTDRVDALLLARYVQAEHAHLHPWQRPAALQRELDVLLKRRAMLVKTRQQVRLALADQHGLLRSAKALLAQYAKLLGAVERRIRDKIGLLSGGAQQLRLLRSIPGIGWLNAAYLTNLFNRIEFVRSDSLVAFAGLDPRACDSGTMRGRRRLSKRGPALMRQLLYNAAMAAARSETFKSMKQALAARGLPITAIYNIIARKLLRIALAVFKTQSPFDPAKLGPAGQGQPT

SEQ ID NO: 268208 - protein, 314 aa, unidentified
MSTSYRRCCGIDVHKKSVTVHVLPPQGQLEVKPLEREFRTFSRELRRLRGWLKRYQVSEVVMESTGQYWRAVWNVLEGEMPRLVLVNPQHVKALAGRKTDRIDSRRLARYLENHDLQGSFVPAREIRELRDLTRSRVHLLEEVNRVKNRIGQLCEAGNIKVSSVASDLFGVSGRRMLEAVAEGKRDAGWMADYARGTLRGKKKQLEQALEGSFTEHQRWMLREALSHLESLEAQIARVESEIERRIEPYEEHIRRRLTIPGVDRITSWTMLAELGPDMNVFPDARHAASWAGICPGNRESGGKRLNGRTRKANP

SEQ ID NO: 268209 - protein, 338 aa, unidentified
MTIDVLGIDLAKNVFQLHGVDRKGNPVFKRRVLRDQLLSVLAGIEPCTIAIEACTGAFCWARKFEELGHKVKIVSPQYVKPFVRRQKNDNNDAEAICTAVRQPHIPLVPKKTVEQQDVQALHRARQRMVNHRTAVVSQIRGLLLDRGIAFGKSITRARRMIPEVLADITNELTTMAREAIGELWDLLCDLDRRIAIFDKKIEAVFKASEVCQRVAKIKGVGPKTATAIVAAVGDGAEFKNGRHMAAWLGLVPRQHSSGDRQVMMGISKRGSQHLRSLLVHGARAVVRTRANKNDPMNQWVTQLQERRGFNRATVAVANKNARIIWAVLRTGEPYRPAT

SEQ ID NO: 268210 - protein, 361 aa, unidentified
MRAVFGIDVSKASSEVAILVNGEKVHGYTISNDALGFARLLGDLKTVHKPEIIFEATGVYSRRLQAFLEDNGYAYTRLNPLEAKKQLDSLRVRKTDQIDAEKLAQSQFVLNRKPTYVQEEVYQELRDLSRFYQNLTEDIVRAKNRLHKVLQVTFPELETILSTPTGEQYGNLVVAFPCKDFVLDLSKDELSESIRQSTSKRISDKRVAYLAEKLIALANQSYCAVKKTSPMLEEVRYYAQELLRLSERRKAVLDQMVELAQPLPEYDILLSIPGIAETTATSIIGELGDIRRFQSANQINAFIGIDLRHYESGNFLAKEHITKRGNPYARKILFKCIHNIASASHTNPCHIIVTPYQKIST

SEQ ID NO: 268211 - protein, 428 aa, unidentified
MNEVDRNRLEEFRQLRREIRQSEEHLIVGIDIAKDRHHAFFGTATGKTLLRRLVFSNDGEGFGKLLDQTEALRVRHGLKKVVYGMEPTGNYHKPLGEYLIHMGRMVVLVSGVTAKHNRESLDGRWDKHDDKDSANVADLISQGKCLYYEYPPAQLRGLRGLLSLKRRLKRQEQSYRVRIRNHLIAQYFPELDSHYGRSEAQGLAIVRWCFPASHITEIDVDPFIERVTSRRVRVEKRRRLEALWEKSGESIGCDEVPGLDHEVKVMVEGLRQVREMIQETKDRIEELCKRYPEYPFLLTIPGFGPDVSAKVLGAIGDPDRFENGKQVLKQAGLDLSANRSGKNSAQAIPQISKQGKADLRYALYQAAFIASTKNRGFMRYYTSKLRGREKEKGIDGKRLVKLSAKMLLIAWTLMKKKEAFNPAYLNAD

SEQ ID NO: 268212 - protein, 332 aa, unidentified
MNYIGIDVSKAKLDMALLDGKGRLLEHVVVRNTAQAITGRLRRWEREQGLLPYECLACLEPTGSYSDTALRTFVGVDIPTWRAHPLEIKRRMGMVRGKSDKVDALRIADYAMRYQDRKRLVTADTLAVMELKQLLAFRWRVVVDQGRHKGYRTEIYPGLHKDLAKFCNAYSQGRIKQAKAMVAQADRRIRELILSDPTMKRQYELLLSVERIGPLLAAHLIAATERFTRMREGRKLGCHAGVVPHEHSSGSSLRGRPRVSHQADKNLKSVLHMAVLGVAQGHGELGAYYTRKVAEGKNPMSVLNAVRNKVLHRACAVIKRGTPYQEKEPLST

SEQ ID NO: 268213 - protein, 378 aa, unidentified
MINRKYVGFDVHLATIAFCILDGAGKILWEGVFGNRAETIRDFLGGIRGEVHLTFEQGTQAAWLYDLVKPLISNVVVCNPRYNRVVLCGDKSDRIDARKLAEQLRLGALKPVYQTEYSLRPLKQLVLGYEALIRDSVRTMTRIRSLFSGRGISCQSGGLYNPAKHDFWLEKITEPGLHFRLQILFQQLDSLMPLREEGKKQLLLESRKYPAVKLLKRIPCLGPVRSAQIVAVVATPHRFRTKRQFWPYCGLAVVNRTTSDYEIVNGRVQRKIRKASTRGLNRNYCRILKRVYKSAALQGTTHKLLGPIYRALLQKGLNPAMARLTIARRLSSTSLAIWKKEAKFDRNLFLNQSLDTKNCKEEKRKKKLSLNKGKGTVQ

SEQ ID NO: 268214 - protein, 386 aa, unidentified
MKRNDLSRSLVAFDQASTMVAVVELSFRSWLVAGLVPSLSRQPLKKLGPDAQALLTLLRRWQHEATKAGSIINRIVVAFEAGRDGFWLARWLRARGIEVYVIHPTSIPVSREHRRAKTDRLDTGLLMRAVLGWLRGEPKHCSMAAIPTIAEEDARRPNREHQMLVQEQTRVVNRIKSTLIRFGIRNFKVKLRKAADRLATLRGLEDEPLPPNTVAELRRDMARLQLIREQIKAIEKAWLEHLKKATRKGTHPMLLMLAQIMGIGVETADMLVHEVLSRNLRDQRAVARYGGLTGAPDESGTKRREKGLARAGNARVRHGMIQLAWRWLMHQKNSELAQWYQTRTTGAKPSVRKTMIVALARKLLIALWRYVTTGVVPAGAVLRAAT

SEQ ID NO: 268215 - protein, 410 aa, unidentified
MDTIYPHCAGLDIHKDSVWACVRHMSSDGKVRQEVRVFGTATRSLLELSDWLAREGVTHVAMESTGVYWKPVYNVLEDRFVTMVVNARHIKNVPGRKTDCKDCQWIAQLLQYGLLTASFVPRRGQRDLRDLTRQRAQLIQERSRVANRVQKTLEDANIKLASVASDALGASGRAMIQALIEGDKTPEQMAELARRKLRAKIPELKEALRGTVTDHHRFMLRQLMDQIDRLERQVEDFDQRIEQVMSPLEQKATENLDQIPGIDVRAAQNIVAEIGADMSRFPSSGHLCSWAGMCPGNHQSAGKRKKGTMNQGNRWLKRTLMQCAWAASRTKNSYFQGQYRRLSARRGKKRAAAAVAHSQLVVAYHLLRDGTEYVDLGANHFDTLAESQRTAPLVKRLEKLGYRVTLDKAA

SEQ ID NO: 268216 - protein, 427 aa, unidentified
MNEIESNSIDRFRQFKKEIRGSKEHLIVGLDIAKRKHHGFLGDANGRTLLKGLIVENSAEGFRHLLTQVRFYMDREGLSEVVFGLEPTSVYHKPLAEHLIEQGHLVVYATNEAIKKNRSLIDGRWDKNDTKDSANVADLVAQGKCHYYDLPELRLRDLRSLLLFRKRLKKQLHSCRVRIRNNLVAQYFPELDWFWNNAAAENLAIVRWFLDPGSIRQLSCEQFIAKVTTHNGGLRQQRRLQHIWEAAGQSIGCRPGPAMALEAELVVEMLQSVQAQLSRVEHAIQEIADGFEEYDYLKSIPGFGPYVSAMALAAIGNPHRFENRAQLIRLAGFDLSANRSGEKSKAAVPVISKKGKADLRYALYQAALVASSLTSHFRAYYSRLLDGRQREKGIRTKMLVKIAAKMLVIAWTLMKRKEPFNPAHIQA

SEQ ID NO: 268217 - protein, 343 aa, unidentified
MQAITTIGLDIAKSVFQVHGVDAVGNVVVRRQLKRRYVVAFFQRLQPCLVGIEACASSHYWSRELQALGHTVRLMPPAYVKPYVKRQKNDAADAEAICEAVTRANMRFVPTKTPEQQSGLMLHRTRHLFIRQQTAVINAIRALLAEFGIVAPVGRNGVEQLLGVVADPNDKRLPDVARTCVAALGAQLKMLKERILEFDRLIMAWHRSSEASKRLDDIPGVGPALAAALVASVADPKAFRSGRDFSAWIGLVPKQRSSGGKEKPGNISKQGDRYLRSLFTAGALAVIRYAKIHGTRHRPWLTALLARRPTKVAAIALANKIARMAWAMMARGEHYKEPAALAA

SEQ ID NO: 268218 - protein, 344 aa, unidentified
MNTIRVVGIDIAKSVFQVCVWMVDGSIAYNKKISRSKLLDCVRHFEPGTLIAMEACSTSHFWGRTFRTLGYNVRLIPAQHVKAFVRSQKNDANDALAICETALRPGIHFVPVKTAEQQDIKALRNTRQLMVEQRTALANQLRSLLAEYALIIPVGIQCLQQHLPELMEDASNELTFTVRRLLSTLREDMQALNERVTGLDKVIAALSSQQATYRHLLTIPGVGPLIAAAFISEVDAGQFSSGRELSAWCGLVPGQHSSGGKQRLSSVTKNGNRSLRTLIIHGARSVMRCMKKRDDSLGIWLQRLEARRGFLKTTVALANKLTRIIWRVLTDGVDFNMQKAVAMN

SEQ ID NO: 268219 - protein, 338 aa, unidentified
MELSVIGMDIAKNVFQLHCVDRQTGEIERIKLRRNEVLPYFARRTPALVAMEACGGAHWWARQLQQLGHTVRLLPAKAVRPFVLRNKTDAADARAIWTAVQQPEMKTVAIKTEYQQIILALHRMRAQLLKFRHMQTNAIRGLLLEFGHPLPESYLALRKAFPTVMATLDKQLPGILIETLREQWARVQSLDNEIALIEGRLKRALAETPTCQMISDIPGVGLMTATAAVATMGDPASFKTGREFAAWLGLVPRQTGTGGRIRQLGISKRGDAYLRTLLMHGARAIIARRTYSDWVAGLIARRPYSVVIAAIANKLARTIWAVLATGKRYDGAAFAAAI

SEQ ID NO: 268220 - protein, 325 aa, unidentified
MRQPQSQVKPQTQVGLDVSSQTLDAHIRVDGKAFSVPNTDAGFDQLCDVLSAYSVSMILMEATGGYEDNVACYLQLQGFDVVVINPRFARRFAQSMGRLAKTDRIDAAILAQMAFMIDSGPDRDRYIKPVTDEQRKQLSRLSSRRRQVVDLITIEKQRLTHADDYARESINGVISLLNVELKRIESDILRYVKKNFSELANRLLSIPGVGEQAMIVLIADLAELGHVNRRRISALLGVAPFNHDSGKFKGQRRIRDGRQTVRNVLYMGVISATRFNPVIKAFYDSLLLRGKPRKVAIIACMHKLIRIINAMMRTGKPFDMSLHGV

SEQ ID NO: 268221 - protein, 230 aa, unidentified
MVSRGIDISKSSFVAAYPSTNGNPTKTFPNTTAGMRELIGTLAVAEHHCVMEATSNYGCCCTCYIRTVLPSVLPPPKKQIKHFSRMMMPVTKTDEKDAYMIAMYGEKMNPPIYKMPSQATIRILTTEGFTYFDNAKQLSRFIGICPTYQQSRTSVNIREHINRNDDERLRSLLYIAFWTALRYNSRECYIRLKANEKPFKVALIAVTNKLVRPVLTITTINSIYRWICPG

SEQ ID NO: 268222 - protein, 341 aa, unidentified
MRIVGGLDIHRRQITFDYLDERSGQSRRGRIAPADRQLLRRWLEANVAQAPAAFAVEACTGWRFVVEELRRAGIEAHLAEPADTAAARGPKRRAKTDRTDARHLRELLAGGRLPEAWIPPEQVLEMRARLQLFRDLGEEHTAWVQRIHAILLHHGAPAIAGDLLGADNRRRLEAAEYLSPAGREQVAAALRMLDALDAELTPLRRQIAAFARRQPGCKALQAHYGVGEITAVALWAELGDTRRFSSSRKAVRHTGLDITVYSSDGKRPPGHLSRQGSPLLRWALFEAAQCAARPSSPDYAYYRQVADRLGGNRAALSVARKIARRAHHTLRALGDQALAPV

SEQ ID NO: 268223 - protein, 348 aa, unidentified
MNTTTIGLDIAKNCFQVHGVDAHGKTTLQRQLRRAQVLTFFANLPACLIGIEACGSAHHWARKLGGLGHQVKLMPAQFVKAYVKANKNDARDAEAICEAVARPNMRFVAVKTVAQQELLMLHRVRQRLVMERTAKANQLRGLLGEFGIVVPQGLHRLRRVMPEILADAENGLSCRLRERFSHLFSHLRELDASISEWERQIVASHRESPLSQRLDKIPGIGPLGASALVASIGDIRTFKSGRQLAAWLGLVPRQDSSGGKTRLLGISKRGDRYLRTLLILGARSVLRQMQRHPARAAQSWLERLTARSHPHIAAVALANKSARIAWALLAHEREYQADYRRRVALAAA

SEQ ID NO: 268224 - protein, 365 aa, unidentified
MTSMTSPTGPVTVIGGVDTHGQTHHAAVIDQVGRQLGDREFPTTPAGYRALLTWLRGHGQLERVGVEGTGSYGAALARHLRSVGAGVVEVDRPDRKARRAKGKSDPLDAYAAARAALSGTATGTPKTRDGRVEAIRVLRVARSGAVKARTQGTNQLKALLLTAPAELREQLRHLSTTTLIATCARLRPSSELTDPGQATKTALRRLARRHQHLSEEIAEADTELRTLVTAAAPRLLALPSVGIEVAGQLLTSAGDNPDRLHSEAAFAHLCGVAPVPASSGRTHRHRLNRGGDRAANNALYIVVLGRLRYDSRTRVYADRRTKEGLSKPEIIRCLKRYVAREVFTVLTAPAVEDPVATTPTMSTAA

SEQ ID NO: 268225 - protein, 457 aa, unidentified
MSAPQKVKIKSTRKTNVQLPTLRPHAAGIDIGATQIQVAVPCDADPKPVRTFSSFTDELHALRDWLKKCGVQTVAMESTSVYWIALFQILEAAGLEVCLVNARHCKNLPGRKTDVSDCQWIQYLHSVGLLRASFRPPEQICAVRSLLRHRANLIRYAGSHVQHLQKALTQMNLQIHNVISDLTGVTGLAILDALLAGERDPQKLAALKDHRIKASRDTIARSLQGDWRPEHLFVIQQTLDTWRHYQRLIAQCDQQIELLLARFDSKVDLYQHPLSATRLQHKKPQRNEPHFDARSELYRLCGVDLTQVPGIQINTTLVLFTELGPDFVTRFPTAKSFASWLGLCPDNRITGGKIISVKTRDVKSRAAMALRLAAQSLWHAKDYLGDCFRRWKARLGTPKAITAMAHKLARIIWHLIKYRTPYDPAVWAQAEEKLKKKRLKFLQQTAAALGYTLLCAS

SEQ ID NO: 268226 - protein, 344 aa, unidentified
MEHYAGLDVSLELTSVCIVDMQGGIVCEAKVASEPEALIGFLRTSELQIARVGLEAGPLSQWLHAGLIAAGFEAVLLETRHVKAALSAMTVKTDRRDARGIAQLLRLGWYRPVHAKSASAQEVRSLLTARKLIQAKLLDVESGIRGVLRGFGLKVGAISRGRFEVRIRELVDGNPILETVIGSMLGARTALETEFKRLHRELLALVRADPVCRQLMSVPGVGAIVAITFKSGVDDPTRFKCSRDVGPHFGLTPRKYQSGELDVTGSITKVGDRMVRTALYEAASVMLTRSVRFSPLKAWAMAVAKRRGTKKARVALARKLGVILHRMWVDGTTFRWSNEETAIA

SEQ ID NO: 268227 - protein, 333 aa, unidentified
MFVAGIDAHATYSVTCVVSKEGQLVSGPTRIKNRDANQLSELLERYRPLEVVVETSPAWPWLFDRLAGNGVHFVLAHAKRLRIIAGSNYKSDDIDAELLARMRLAGLIPEVHPKSVEQRGQAVLLRHRARLVRQRTQMVNRIHAQLHNAGLYLERGRMLTEGGREWVRSQAWPVLGEEQRLFIQMQWALIDHLSPMIRTLDHRVEHVGRLIPAVALLETIPGIGPYRALLIATEVLPIERFRRPAHLVSYAGLAPRYSQSGLRPIRHGSIPAGGQPLAEGHVRSGRCQPRHACARQLAVSCERTNQRAARVAGRPRSDGPSTRTRRACDATHG

SEQ ID NO: 268228 - protein, 368 aa, unidentified
MSEIIRIGVDTSKSVFQLHGVDAAEQPVLRKKLRRRDMLGFFERLPATKVGMEACGGTYYWARELTALGHEVKLMPPQHVKPYVRRGKNDRNDADAICEAMSRPRMSFVAIKTAESQAAQMLMTTRERLVAYRTQLINTIRGHAAEFGLTAAKGPAHVEPLLTRIAEDGRMPELAKELFAMHGVELSRLKIELREIEAKLKAWHRQNEMSRRLAEVDAIGPIGGCLLAIKAPDPQAFRCGRDFSAWMGLTPKDHSTAGKMRLGVITRAGDEALRRTLVVGATSVIKQVSNGKGHPSPWLRDLVARKPPKLAAVALANKLARIAWRLMVSGERYDAARAGIVSPTARIAPCSRRQGRGAPPAAVACGQP

SEQ ID NO: 268229 - protein, 425 aa, unidentified
MSKQNVEIAAFVGLDWADQKHVVTLQEANSEQRQRFSLDQTPEALQSWIQLLRNRFAGRPVAIAVEQKRGALIYALMHVDFLHLYPVNPQMLSQFRKAFYPSGAKDDPVDADLLLEILMTHRQHLRVWIPDDVLTRSIQLLTEDRRHLVDERTALTNQLTAALKTYFPQALEWFGDLHTARACAFLQRWPSLQELKRASSSSIRKFHKAQGYRGEDKLKQLIANIKNAQPLTQDGAVVLAGTMKVHALVTQIALLTEAIERYDQQIASLFDQHDDSTLFGSFPGAGASLAPRLLAAFGSDRGRFEFAAEMQQLAGIAPVTEKSGTAIWIHWRLACCKFLRQTFHEFAGCSILQSDWARAYYDQHRKRGKSHHAALRALAFKWIRIIFRCWKTRTPYDEARYCKSLQLRRSPLATELTAAEKMALT

SEQ ID NO: 268230 - protein, 379 aa, unidentified
MTSTAAAAGSRETVYAAIELSKKTWVLGIAHPDRDRPSIHRVCGGNFAELVGRLRVAARNNRRILVCYEAGYDGFWLARALAKIGIECRVLDPASIQVNRRARRVKTDRIDVLALLRALIATDRGERHVCAIVRVPSVEEEDARRSHRERQRLVRERTGHINRIKGLLFAQGIRDIKPKLRRTRIDFAGLETAEGHQLPDRLRRELEREYARLALIETQLREVEKERDTADAQDPVVERKRQMLVALQGVGSTSAAILAREVFARSFASRRQLGSYLGLTPSAYDSGSTTRCQGISKAGNSWARRVLIEVAWLWRKYQPASPLSNWYLQKTTGQSGRIRRIMLIALARKLAICLWRYVETGLVPEGVVIARAEPRCTPA

SEQ ID NO: 268231 - protein, 417 aa, unidentified
MSEQPYAWYVGIDWASESHQVCVLDGAGARAGERAFEHTGPGLAALAEWLLEVTGAGPEHIAVAIEVPRGAVVESLVERGFAVFALNPKQLDRFRDRHTVAGAKDDRRDALVLGDSLRTDQPAFWPVRPDDPHIVELRELSRLADELQQETRRLANRLRDQLLRFYPQLLPLCPAADEPWLWALLSQAPTPAEGQGLSPRALARLLQAHRIRRLTPEAVHAALQIPPLPVQPGTVAAARTHISLLLPRLRLVHEQRGRIEQHIEVLLAAVGSEEGIEGPRPEHRDVEILRSLPGIGRLVAATLLGEAAQPLAARDYDTVRALAGAAPVTKKSGKRRVVSMRYACHQRVRQAVYHWARVSVQCDEHSQWHYRALRARGHNHARALRGVADRLLGILIAMLKTGTLYDPMRRRVATQTA

SEQ ID NO: 268232 - protein, 417 aa, unidentified
MAPEKENNQVLRIIHPICCGLDVHKRFVSACILKTLPDGSIEVEVREFETFTDDLIALREWLIEKDCPIVAMESTGVYWQPIHNILEGYVEVILVNARHIKNVPGRKTDVSDSRWLAELLRVGLLRASYIPPKQVRFWRELVRLRQKHVKTLADYKKRVQKLFESANIKLDNVVSDLFGETGRQIMRLLLETPKPSLEEVRACAKGKLKKKVEELYRSICGFFEEHHRFLLHSLLSIIETLEKEIGIMDIRIKEVMRHHEDLIERLKGIPGVSEVSARAILAEVGPDLRSFPNERALASWAGVCPGNNESGGKRISGKSPVKKHPLRSVLIEVSWAATRKKGTYYAAKYRQLRARRGPKKAIGAIAHKILKAVYFIIKEGQEYRELGANHLKQINRERLLTKIKEEAERLGYKVVAA

SEQ ID NO: 268233 - protein, 418 aa, unidentified
MKPWIEITHYAGFDWARDHHDVVIVDRQGQIVADFRIEHSLAGWQEFRDKVRHYPVLGVAIETNQGTAVDQLLSLEGIIYPVNPLSAKSYRERKAPSGHKTDRLDAWSLAEALRQDGQRWKALQPMDPLTQQLQLLCRDEIGLIEQRTALINQLQQALVEYYPAALEAFEDWTQPFCWDFIIQFPTPEKLVAAGQRRWEKFLHTQKLWRPETASKRIEIFQNARHFCGSAAVTSAKSLLAISLAKLLNALQLQLDQYRQQIEALFKQHPDHDLFGSLPGAAQTLAPRLLGEIGGDLQRFEDTEALQCVAGTAPVSFQSGQIHRVHVRYQCNKMLRHTVHLWAQCSLRVCPWADAYYRQKRAEGKSHACALRCLGQRWLKILWRMIQTRQRYDADLHARNQKQHGSWVLTLMKPAPQAG

SEQ ID NO: 268234 - protein, 400 aa, unidentified
MKSVLSVDVAKGKSMVMLSTEYGEVLIEPKEVKHNLKDFDNIKNQINNFKLEDLTIFMESTGIYHLPVERYFKENGFNTLVINSLTTKNNYDTLRKTKTDTKDCIRLAKLFFVNEVKYHDLSKKDLYANLKAMTRQYFYLTQLNVSCKNRYKRLINICFPEFEEIFKGSRIYEETALNFIKTFPHAYIVKEKRIDALYNNLYKTNSRHDYYYKRLANKIKEVSIDSYPGVAKDHSDVKNLSDMASILQENIKTINDLKEKMIETAKKSPYFDIINSFYGIGETLTTELLGELGDITRFDNHKQLIAFCGLDPTIIQSGKSINVRGTISKRGNKYARWILFNISQMVVKLGHQCPNHPVYNYYLIKKAEGKHYYESLTACSTKILRMLYTMCKNNTTFKIN

SEQ ID NO: 268235 - protein, 337 aa, unidentified
MIIIGCDFHPSFQQIAMLDTETGATEEHKLMHTSGEAESFYRKLASPAVVGIETVGNDQWFVQLLQKLGHEVRVGDAAQIRASYVRKQKTDRRDAKHILQLLVEGRFPRIWIPDAGMRDHRQLLMHRHKLVQIRTRVKNELQHLMLNQGMQKKQKLWSTEGRAALASLPLEPWTDRRRKDLLNLLAMLDAQLESLDDAVTRVAKEYPDVPLLMSQPGVGAVTALAFVLTLGDVHRFPRGKQVASYLGLVPREHSSGGKQRMGGISKQGNRLLRFLLVEAANIAVRFDPELRKEYLHRCHQKHFTVAKVATARKLAVRMYWMLRTQTPYPQVLSSRVA

SEQ ID NO: 268236 - protein, 392 aa, unidentified
MVVSVGVDVSKDKHDCFILSSEGEVLADVFTIPNNLDGFRFLLRRIRDCTHAQDKIKVGLEATGHYSYNLLGFLLDNGLPTYVLNPLRTNLYRKSLSLRKTKTDRVDARTIAAMLLSDAGLKPYTNTAYHNEELKSLTRYRFDKVKERAKLKSSIARLVCILFPELEKLVPSLHIASVYALLEEFPGAKQIAAAHLTRLKALLETASKGRYKRDMALEIRDAARNSIGSWMPAKSLELQHTIRLIRELDVEIAEIEEQIQSIMDELHSPITTIPGVGFRMAAMILAEVGDFTRFDSPDKLLAYAGMSPSTYQSGQLKNCYPHMEKRGSRYLRYALYNAAKYVCHWDSTFAAYLAKKRAEGKHYNVALSHAAKKLVRLIFAMEKSRQPYCSAS

SEQ ID NO: 268237 - protein, 343 aa, unidentified
MKRSYTIGIDLHKHSFTYVMLDPRGQISRREKVAIHAKSVEHFLQQLPQKSETTLEATASWGWLADALQDRGHRVHLAHPLKVKVIAECRAKTDKVDAEALARLTAVGWLPEAYLAPAAVRQYRRLLRHRAALVAQRTQLKNRVRALLAQYPFVAVDLSRAFSRKSRCALRQIQLPQGDQHCLDSLLDTMDALDERIKEAEGWIEEQMPQDAQVDRIRQIPGIGLILAHTILSEIGDIQRFKSAKALCAFAGLVPTVRASAEHVFYGRLTKQGSRWLRWALIEAAVHAGGRVPQWKDSFEALRARKGAKAARVEIARKIAKAIYHMLKEKRDFYTQQPGSACR

SEQ ID NO: 268238 - protein, 312 aa, unidentified
MEKLSYGGIDVSKDRLDVVVLPEGWFFSVSNDTAGWTELVARLRPLAVCAIGLEPSGGYERGIIRALLAARLSVRRINPNKLRQFARARGVLAKNDRLDARLMAEYVAIMPTRAVQRDDAVDRLAEVVTMRRQLCDEHVTVENQTAHLEDAMLRRLSKRRLVRLEADIRLLDKRLAEMVATNAAFARLYELLTSMPGVGPVLAFTLIALLPELGKMSRKQIAALVGLAPYNFDSGKLRGHRSIYGGRMPIRNVLYMAALSASRYNPALRAFSNRLADANKKSKVIIVAVMRKMITTLNAMLRDNAAWQPRSA

SEQ ID NO: 268239 - protein, 348 aa, unidentified
MIAIGADVHKQQCTLAVQRPDGKLSMLPSMDNTRENWLDLLTQLPPEAQIALEVSTSGHFVMSVLEEAGWRDRAHWVHTAGIDSLRKQKTDRLDAKRLARKLSVMEQDPLPEAWFPPRPIRELRLRARQRCWVAVLRTRVKNRVRSLLQMSGLCAGTNPFTASGRTWLKEQKLSEATRESVEQLLRFHDFLTTEREKSETSLRGMEKDFPEIVRLQTLPGLGHILSAVIWSEIGELKRFDSPRALVNYTGLAPSLYESGERSVRGGITRQGPVWLRWALITAVNAATRGDNAFARRYRRLRRHKLPNVAKTAVARSIARCAYGVLKHGVDYQEQRWGRKAGIEMEQEA

SEQ ID NO: 268240 - protein, 348 aa, unidentified
MAVAIVESTRPVTGGVDTHLDTHVAAALDANGGVLGVESFPATRAGYASLSSWLAGFGTIDLVGVEGTGAYGAGLARHLRSLGVGVIEVDRPNRQLRRAQGKSDTFDAIEAARAVLSGRATGVAKTADGNVEAMRALLIAKRSGREARITCLNQIRHLGFTAPDELRERFQSVPRTALAARAAALRPRPDRDAVLFATKLAMRSLGRRVLTIDDELAQLDAALAELVTATAPGLLGLYGVGVDTAAILCVAAGDNPQRVRSEAAWAHLCGVAPLEATSGKVTRRHRLNRGGNRQANHALWRIVFTRLGSDARTRTYVARRLDEGLSRPEIIRSLKRYVARETYRHLPR

SEQ ID NO: 268241 - protein, 470 aa, unidentified
MCSSDLKKSISVCVRQRVAGKKEAQIEEAVFGTFTQDLERLGQWLKERKVKQVAMESTGVYWIPVWNILERKKWKLELMLVNPATVRALRGQKTDRIDARRIAEYLQYGLLRASFIPPKPVRQLRELTRMRVHVQQDRNRIVNRIGRLLETVNIKLGSVASNIVGKSGHAILERLAQGSANAEELANLARGTLKKKIPDLVAALNGRPDEHFRWTLKRLLRRLESQDTELAELDARLCEKYAEHADLLQRLCTIPGVEITTARVLLAELGTDMSQFPTAAHAASWAGLCPGNAESAGKRFSGKTRKGDRYLRRILVQSAWAASRAKDCILAAAFRRTAQRRGRKKAALATAHRILRIVWSIIRNGTEYAERGGDHFDQLHPERTATKLLRRLERIGFDVEIKNRRGRPPGSKNKPKPPVANPVANPVANRVLRQECERCWRLAVRGHCICLLKRSKKNTPALLTPEQSAT

SEQ ID NO: 268242 - protein, 376 aa, unidentified
MKKDIRFIGLDVHAETIAVAVAEANGEVRSLGVIPNRLEPVRKLIKRLGPARSLRVCYEAGPCGYVLYWQLTELGVHCDVIAPTLVPVKSGDRIKTDRRDAQKLARSYRSGDLTAVWVPDAAHEALRDLVRAREAAKKDQLRARHRLQKFLLRRGLQPPEGIKSWTLKHLNWVKTLRLEQLALNATLLDYVTEVDHARERIERLERAIDQAIEVAPAAIRAVIEGLQALRGVARISAATIVAEVGQLSRFARPRQLMGYTGAVPSEHSSGECVRRGPITKTGNAHLRRILVEAAWAYRHRPNVGGELRRRQESASQEIKAIAWKAQHRLHHRYVRLAARGKSKQHIVTAIARELAGFIWAVGVEVESKLATSSRAA

SEQ ID NO: 268243 - protein, 420 aa, unidentified
MLVVDAKGDNGLTLFVGDDWAEDHHDVEIQDPGGRRLAKARLPEGIVGIARLHGLIGEYADADSGPEQVVVGIETERGPWVQALVAAGYRVIAVNPKQAARSREQQSVSGAKSDPADAHVLADLVRTHGHQLRPIAGDSALAAGIKVLARAHQTLIWDRTRHQLRLRAALREYFPAALAAFPDLDASDTLELLRKASSPEQAARLTIGQISAALTRARRRTIADKAATIQAALRTEHLTQPAVVTAAYAATVRSLVAIITALNTEISQLQVEVTAHFGRHPDAEIYLSQPGIGQITGARVLAEFGDDPHRYVSAKARKNYAGTSPITIKSGKRETHHARWIHNDRLVDALFRQAQSALNTSPGARSYYDQHRARGLDHPAALRQLANRLVGIQHGCLKTHTHYNETTAWAHHHHHQQTAA

SEQ ID NO: 268244 - protein, 412 aa, unidentified
MQPILKSCCGMDVHKKVIVACLLREIDNGEVKKEIKHFSTLTEDILKMERWLLENECTHVAMESTSVYWKPIFNILEDSLKVMVVNARLIKNVPGRKTDQNDSEWIATLLRHGLLRNSFIPTRDIRDLRDLTRYRVKLVQNATAEKNRLQKILEDANIKLSSVLSKTFSVSGTEMIKAIIEGESSPEEIAELARKRLRSKIPELIKALRGHVTDHHRFMMTESFEHLNYLAERIQEIEQRIEEKLEPHKAVYELLMTIPGVNKHCAASIIAEIGVDMSVFPSAKHLASWAGVCPGNNESAGKRMSGKTRKGDAWLSVTLTEAAWAASKTKDNYLSEKYRRLVHRRGQKRSIMAIAHKILCIAYNVIDKKEPYKDLGPDYLEQLHKENSKRNAVNRLKSLGYEVNLTPTKAIC

SEQ ID NO: 268245 - protein, 351 aa, unidentified
MPRATSSTNVIATIGIDIGKNTFHVIGLDDKGAIILRHKLSRGQVYARLANIPPCLIGMEACVGAHHLGRQLSALGHDTRLMPARYVRPYSKGQKNDFRDAEAIAEAVQRPTMKFVAIKTVEQLDLQGLHRIRERLVCQRTSVINQIRAFLLERGIAIRQGLRMLRTEMPIVLAKTDKLSQRMIYMIEDLCTDWRHLDRRIATVSKEIETLSEQDDGAKRLMTVPGIGPIISTATVAAIGTGEVFSKGRDFGAWLGLVPKQMSTGGRTILGPISKRGNRYLRMLFVQAARAVLLRPQSWEKHGLKLWIEAAARRLNRFKLAIALANKIARIAWGVLHGGRNFEVRPTNQAA

SEQ ID NO: 268246 - protein, 342 aa, unidentified
MEYYAGIDVSLECSSVCVVDANGKIVCEAKVASEPQALISWFGSLGFGLQRIGLEAGPLSQWLFAAMKAAGLAVELLETRHVRKAFEAMPVKSDRNDARGIAQLMRLGWFRPVHCKSMSAQETRSLLTARKLVQSKLQDVENSLRGILRGFGLKVGKTTGQTFAGRIEELVAGHPHLQIIAKALLAVRAVLRTEFAAFEKQTRRMVRSDRQARLLTSVPAVGPIVALTYASAIDDPARFKSSKQAGAHFGLTPKKYQSGETDYTGRISKIGDASVRTALYEAANVMLTKPVKGCSRLKSWAMRIKRRAGMSKAKVALARRLAVIMHRMLADGTPFNAAVAAA

SEQ ID NO: 268247 - protein, 342 aa, unidentified
MNNVAIAAIDLGKHTFHLHAQDDRGHEVCRKKFTRTALTQHLSNLAPCTVVMEACGGAHFMAQEVARLGHTPKLIAPHLVRPYVKSNKNDFADAEAICEAATRPTMRFVPPKTQAQQALAMLNSTRDAFIKDRTATVNRIHAALLEVGVSLAPGFKSIKDLPALLEASSFSECIKKILTTLYEHFDYLNGRIKNLDKDVECQAAEDDLAARLMTMPCVGPITSSALAAELGDGKQFKCGRGYAASIGLVPKQHSTGDKTVLLGISKRGDRNQRRLLIQCARVYLINLEHQKGALADWVRQLLASRHHSNLVVCALANKLARIAWAIAAHHSEFDAGPAAMNA

SEQ ID NO: 268248 - protein, 346 aa, unidentified
MLHVGLDLSRKRIDVCLISDQGELIDRFTATPDRDGLHGLARRVAVYAEPVRGVVESMNGARFVHDELVAHGWEVLVADAQKVKGLAPLACKTDKIDSGVLAELSFRDLVPAIWLPTFELRREREISRWRLHLVKHRSTLKNRVHSTLITFGHQRRMSDLFGVSGRRLLKELDMPEPWRSHVDASLVLIDDLEGRITQIAKELRRSGADHRYIPILMSAPGFGWITSFTVACEIADINRFSSPVKLTGYTGLCPRVKQSGQMDQRGPLSKHGPRYLRWGLMEAAIAASSHPLYRERYQRTRRRLGRQRGPKVAQIDLARQLTEAIWYMLTRNQPFAPAGATIRLAA

SEQ ID NO: 268249 - protein, 429 aa, unidentified
MRAESTPGARGPVFCGVDTHADSHWLCVLDWRGRKVLSRQFPADAAGYEALAGAIAAAGEPACIAMEGTSSYGAGLTRHLASLGMPVREALSPARTQRRRPGQGKCDEADAERAARAAMSGSRLGTPKSQDGWVDGVRCMLAARSGAVKARTSAINTARSLLTTAPEGLRSRFRGMGGPRLMEELPSVRAEGALGAALGALADLWAAARDAALDMERAIEASLEENCPALLAMYGCGPVSAAKLAVAAGDNPGRLRSEASFAAICGACPIPASSGKTVRHRLNRGGDRQANSALHEIARQRVMRDPETAEYAERARGRGKSDREVMRCLKRYVAREAYRALMHPHEIRRPEDASELVAARRAAKVSQVRAATILGTSERCISMLERGQRELKPIRRAYEAWVEAGLPLDWDRQAFEAERKMDSKKHLAK

SEQ ID NO: 268250 - protein, 311 aa, unidentified
MATSSEMYVGIDVSKGRLDVAVLGENQEKQVCNSQAGIKELVRWILEMQPKLIVVEATGGYQRAVVDALFHAGLSLAVVNPARVRQFARACGLLAKTDKLDAQVLAVFGQRVQPRQYEGKTEAEKQLSALLVRRKQVEEMLKAEQNRLRTVSPSLRDSVERIIAILKEEKKRLDEQIRELMNEQQAWQEQTEILTSAPGVGPVTTATLLADLPELGKMDRKRIAALVGVAPMNYDSGKKRGYRKTKGGRTDVRSVLYMSTLVATRYNPLIRAQYQQRLKRGKLKKVALTVCMRKFLTILNAMVRDQQPFRT

SEQ ID NO: 268251 - protein, 385 aa, unidentified
MTNQIQVPRFVPRDYDVFAGLDVDKKSMAVTFADHAGSRRALRMAYSATPLVNYVRKHFGGQRVAFAYEAGPTGFGLHDELVRRAYTCVVVAPSKVPRAPGERVKTNRLDSRKLAENLRGGQLQGIHVPSAVYRDLRHLVQMRDTHVRQLTSSKLRIKSLLLYEGIAFPDPHEKWTARALRELQTLPCSETVRFKLDDLLDTLHFHFQAAARATKQIRQHCLQEPELQQSVEVLLSLPGIGWIVASHLVARLGNPQEIKNGRQIAGFLGIVSSEHSTGDKENRGEITRSGDSRLRNKLIQSAWTAIRKDPELRAFYRRIYQRHPKKVAARKAIVAVARKLTNRIYVVLKEQRPYVIRPDSSIAPLTAEETVGPRERLDAAQNDQP

SEQ ID NO: 268252 - protein, 314 aa, unidentified
MATSTAMRMVGIDVSAGWIDVERAAADEPVAVRRVANTAAGHRAVGRWLTQGGRAARVVLEATGVYSWDIALALQRTARVEVMVLNPRVSKDFAGACGQRASTDATAARRLREYAARMPFVPWVPPSAAALELRALMRRVAAVVEMRTQEHNRWHALRATAALPAAVRTEVRTHIQSLGRQIARLERAARTVVQSAPALQARYDRLRSIPGVGVRSALGLLAELAVLPPTLTARQWVAQAGLDPRPVRSGSSVHPPVRISKRGNVHLRRVLFMPALVAVRRSPAVQRLATQLTAQGKAPLQVLVAVMRKLMDAI

SEQ ID NO: 268253 - protein, 460 aa, unidentified
MNRKQRREMTRKIQSEDLSLEVVHPDAAGIDIGNESHYVAVPPTRDSQPVRRFGCTTSELKEMAVWLKQCAIRTIALQSTGVYWIAVYDVLEEVGFEVYLVNARETKNLPGRKSDVQESQWLMKLHTYGLLRNWFRPSQEIRRMRTYWRQRNDLVRAAGRHIQRMQKALTQMNIQLANVLSDVSGMTGQAIVRAILAGERDPYQLAALRNWRVKSSEEEIARSLEGNWQEDLLFVLQQEQDGYEFCQKQMAECDQRLQQYLQQQEDRSHGASLPQEKRKERLRKKKKGNAPQFDLRVELFRMTGTDLTQIDGIDVTTTMTILSEAGWDMSKWKTEHHFVSWLRLCPDNRISGDKIIGKGRLPTNNRVTNALRMAASTLRLSNTYLGAQFRRLRTKLGAPVAIKAMAAKLARLVYRMLRYGMQFIDRGAEFYDAQHRKLQINYLKRKAANLGFQIIEAPAA

SEQ ID NO: 268254 - protein, 381 aa, unidentified
MRNVALDLGAKKIAYCEVSSGKVIDRATVSSLSSLAAMLGPQAKPARVAIEACREAWFVHSRLTEWGNEVLLVDTTRSRALGIGQHRRKNDWIDAEVMALAVERGGIPLAHLLSPHRQELRRQLNIRRALVETRAQYAMTIRGLAREQGCSLRSWDTEQFVANVRKAKLSDAVRATVEPLVAMLEPLEVQLAAVEQRLEDLCATEPVVAQLTTVPGVGPVVAACFVSVIDEARRFRTAHQVESYLGLVPSEDTTGGKRRLGTITKQGNSYMRAVLVQAAWALLRKPGRSDPLQRWALAIAERRGKRIAVIALARRLAGVLWAMWRDGTVYDPQLVARTGARGLRLAAQSVEYRAAALERAAVKIRRHRTRPAKTMEVSSST

SEQ ID NO: 268255 - protein, 322 aa, unidentified
MLYVGIDVAKNKHDVTALNVPGKTVLKPLTFSNNKAGFELLDLSLRQLNQDCLIALENTGHYAFNLLNFLHEQGYKVYTYNPLLIKEFAKSLSLRKTKTDKKDAHGIALKLLSDPNREQFQHDNRQVELKILARHIHRLKRKQSDWKKQSDWKVQYTRCLDIIFPELDKIVGKHSEYTYQLLTRYPNPQKRIEAGFDKLIEIKRLTASKIQDILSVAPHSIGTTSPAREFEIIENIKHYKRLIDKAEKCVNDLMAEFNSVITTVTGIGNRLGAVILAEIQNIHAFDNPAQLQAFAGLDSSIYQSGQIDLAGRMVKRGSPHLR

SEQ ID NO: 268256 - protein, 389 aa, unidentified
MSHSTPESDRIMIGIDPHKASWTAAAVGPGLQPLATVRVPVGPHGYRDLRRFVARWPDAMWAIEGAGGLGAPLAARLSADGIAAVDVPAKLAARVRVLSTGHGRKNDDADAISVAVAALSAAGLRTVTVDEEVTALRALVEHRDDVVKTRTQTVNRLHVLLTQLIPAGAPRQLTADTAAQLLRTVRPRSLGPRTLRRLAADLITEIRRLDRRITVANTEIAAAVQASRSTLSELRGIGNLTTGKILARVGDVHRFRSAAAFASYTGTAPIEVSSGDVVRHRLSRAGDRQLNCCLHTMAITQLQRDSPGRVYYLRKRADGKSHKEALRCLKRRLSDVVYRCLIRDADPQNGAGPRGHQGATTNSSATGSTPTAGSSDKSLPGPATTDSTT

SEQ ID NO: 268257 - protein, 381 aa, unidentified
MKPTKKLTPTSHQQTEATAEVIKLGIDIHKSKYVAIRQIDNQPPQSPQSFTPDEFLVWVQRQRLLAKRVVSCYEAGCFGFVLHRKLEEVGVENFVVRPRNWDEYGSSVKTDARDARELCGHLDRYLAGNDRALCVVRVPSLEQEQERSLSRQRETLAKERKRLQNVGTSSGLYHGVDVPSNWWKPKVFAKLCAEIPDFLKRILEPFQQILEVIDKQLRETTAREERKANRKIPVGLGALTASILDQEFVDYTRFNNRGQVSSFTGLCPGESSSGNKRQQGSINKHGNPRIRHMLLEAVWRMIQFQPDYKPIIHWKDRMANESFGAAKKKKMAVAIARQFSVDWWRIQTGRIQPEDVGLRIEYPSAYSTRALREGRISKVYA

SEQ ID NO: 268258 - protein, 365 aa, unidentified
MKERKQAGTRYVGIDLGKRAYEVAIVGKGGKTAMSNGKTYVEGRQKLYKKLLPTDKVALEAGNLAFIIAKEIEASVGCTVYVLNPHKLKMIYGSMKKTDKEDALKLAHIVEDFQEERLPVVPVPSEKEMNRRKILGGYRRVQQNRSREINKLHALFLAQGITTVTRKDLSTGEQRKGAIKVLTGLEREEAEYVVNCLSLHELRIEELKGKIEKESAGDEVVKRLQSVPGVGPITAFAFVSHVAPERFENPSQVSNYLGLVPRVYISGKIVQYGKITKRGNGFLRALLVQAAWAMTRTKNGGKLKERFEYMTEEKSVSKKKAIVAIARRLAELLYTLMRDGTMHEIKHFVRGKKVAEELAQLAMSA

SEQ ID NO: 268259 - protein, 344 aa, unidentified
MDHFGGLDVSVKETSVCIVDDTGRIVREVKVASEPEALLKVLGSPTYRFKRIGLEAGPLSQWLFSGLAEAGLPVVCVETRHMQAVLKAQINKTDRNDARGIAQMIRVGLYRPVHVKTLRSQKLRMLLTHRKLLQSKAIAIENDLRGTLRNFGLKVGMVGKVRFEARIQELVENMPDLAVLVEPLLIVRRVLREQIVILHRRLLAIVREDEVCRRLMTTPGVGPVVALTYRATVDVPARFRKSKSVGAVFGLTCSRYQSGEIDWSGKISRCGDEMMRTMLYEAAQSMLRSKKWSWLKAWAMQIARRRGMKKAIVALARRLAVIMHRIWVDGTEFRWTREQAAAAA

SEQ ID NO: 268260 - protein, 316 aa, unidentified
MVPSPLFVGIDVAKATLDIAVRPTAETWSASNDATGIDALVLRLGAWAPTLIVLEATGGSQGPLVAALVAAALPVVVVNPRHIRAFAQAVGILAKTDRIDARVIAHFAEAVKPAPRPLPDAETQELRALLVRRRQLVEMVSAERARLDTVPPSIQDAIQAHIAWLTTQIAGLDDALTRASQTHPVWQAKDDVLQSIPGVGPVLARTMLGQVPELGTLGPKPLAALIGVAPFNRDSGTLRGRRTVYGGRAEVRAVLYMGALVATRHNPVIKTFYERLLAAGKAKKVALTACMHKLLTIMNAMVRDLKPWQPQEVPSA

SEQ ID NO: 268261 - protein, 411 aa, unidentified
MSAPYCVGIDVALHAHRVGVLGPDGEAAGPSFAIAATQEGFTELVRTLQARGAVPAMALVGLEATGHYWENLEASLVQAGYRVLLLNALQTRRYRDVLRRKAKTDDIDAYVVAGLLRSGSAEGCFVPDDQIQSLRELARLRARLMRERQDYLRQLVGQLDVVFPEHRTALGDVSTVRARGLLAAFPTAHHLAQATPASLRRMAHRAHARGFSVEDATTLRDQARSSAYSGKAAQARGQVVRTLLTQYERLTTAIGELDEAVQTLLPPTEASGGPSDATLLQTLPGVGPHTAGTLLGELGSFTRFANARALVAYVGFYPVISQSGERTALPYLSPVGSRIARHVLYLAAVNAVRRSIEWRALYRRKTAQGKTAKQALIAVAVKWLHTAYAMLKHRAPYDPTRLAGLTATLST

SEQ ID NO: 268262 - protein, 386 aa, unidentified
MPQLNDLSRSLVILEQDATLIAVIEMGQSNWLVAGIVPGVERSPLKKLAVDESALLKLLNRWREEAEKAGHRIERIAIAFEAGRDGFWLARWLRARGIEAHVIHASSVAVSREHRRAKTDRLDTELLKRAFLGWLRGERDHCKMVAIPTLAQEDAKRPNRERESLVGEQSRIVNRMKAALARLGIRGFNPKLKKAVERLDGLRTPEGEPIPPNTLAELKHDMERRRLVRSQIRDIEGTRLERLKQAPGDGPHVMVRLLARVIGVGVETADMLVQEVLSRNLRDRRAVARYGGLTGSPDESGKKRREKGLARSGNARVRRGMIQLAWRFLIFQKGSALAHWFYARTKNAPQTRKTMIVALARKLLIALWRLAREGAIPEGIVLRPAL

SEQ ID NO: 268263 - protein, 345 aa, unidentified
MIPIGSDVHKGRCLMAEMESGGKVKMLPPLECTREAWLQRLAELPPEAEIALEVSTSGYFVMSVLEEAGWRERAHWIHTAGVDSLRKQKSDRLDARRLARKLAAHTVDPMPEAWFPPAPIRHLRLLARQRCRLARMRALTRNRLSSLVQMHGLRPPHPAVSLRGREWILQQGLPGPVVQCFEQWWRVHDFLDQERDLSEKHLAAHAAQFIEVQRLATIPGIGHMLAAVIWGEIGALDRFPRADALVNATGMVASLYQSAEVTIQGPITRQGSAWLRWAFITAANCLTHSKSPLGQRYWRLRRHKQPNVAKTAVACSVARCAYGVLKHGEPFQAERWGRRSGKLEP

SEQ ID NO: 268264 - protein, 473 aa, unidentified
MIPLSRLPSDHLRKEALMARRSKAKGTRRRTKLHIIYTRAAGIDVGSTFHVVAVPPELSAEPVQTFQSFTGDLYRLAHWLVDIGVTTVAMESTGIYWIPVFDILEAHGLEVLLVNAQHVKTVPGRKTDVNDAQWIQQLHTYGLLRGSFHPAQDWSALRVYLRHRERLVEYAAAHIQHMQKALMQMNLQLHHVLSDITGTTGMKIMRAIVAGQHDPAVLATYRDARCKASAETIRAALTGHYRREHVFALRQALELYDSYQARIEACDQEIQSTLESLQHDEISMDTLPAARHKKRQSHEPQFDVREALFRVLGVDLSQIDGFSAYTALKLVGECGMDMSRWPTEKHFTSWLTLAPGNKISGGKVLNTKTRRSANRAAAIFRLSAMNVGQTNTAFGAFYRRLASRSGKAKAVTATARKLAVLCYNTLRYGMAYEDPGAAYYEDRYRQRVLTGLHRRAKQFGYKLTEVSALEGVS

SEQ ID NO: 268265 - protein, 309 aa, unidentified
MIADQIVAGIDVSKERLDVHVLPMGQRLSVANSRAGLIGLVSRLRALQVQQVALEASGGYEREAVRGLSQAGFATHVVSPARVRALARALGHKAKTDPIDAAVIAQYLVLAPTAQAHQPDPARERLDELSSLRRQLVAERNKQVSRLDIASDPMVRRMLARMHLNIQANIARLDAEIARHIRSTHLKARYDLLIAVPGVGPVLAATLLCDLPELGHANPKQLASLVGVAPHARQSGKSTRPGRCTGGRASVRNVLYMATLSALKAKAPALRAFYERLRNNGKPFKLAITATMRKFLTILNAIVKQSTVA

SEQ ID NO: 268266 - protein, 347 aa, unidentified
MNHYAGIDVSLECSSVCVVDTSGKIVREGKVASEQEALIAWFGALGLELERIGLEAGPLSQWLYAGLKGAGLAVELLETRHVRDAFKSMPVKSDRNDARGIAQLMRLGWFRPVHCKSIEAQEVRAVLTARKLVQTKLLDVENSLRGILRGFGLKVGRTTARSFAGRIQELVAGHPSLEGIGEALLSVRAVLLREFNAFEKRVRLMARTDVKARLLMSTPSVGPIVALTYASAIDDPARFKSSKQAGPHFGLTPRKYQSGEIDRSGRISKIGDAAVREALYQAAHVMLTKPIKGCTELKSWAMRIAKRAGMSKAKVALARKLAVVLHRMLADNAPFNPIAKATRLAAI

SEQ ID NO: 268267 - protein, 345 aa, unidentified
MNRTTIAVDLAKSVFQVAVADGDWRVVSRQRLSGGQLLRFFSERQPCLVVMEACGTAHFWGRWLSSLGFTVRLLPPQYVRAFVRRNKTDRTDADALLEAARSTDLTTVPVKSEQQQALLSLHRLRSAWLASRTARINTVRGILREFGVNVPRGARRVTAAVETLLGEANSPVPVVLHPLLHQACAEVRDLQARMEQAEDELERFARDLPIVALLRSIPGIGPLTSTALVASIGDVLRFPSGRHLASWVGLTPRERSSGNTRRLGGISKRGDRYLRTLLIHGGRSLLAAASRSGGRDRLRQWGLEVERLRGHNRAAVAVANKLARICWALWRHGERYQGRPIQKAA

SEQ ID NO: 268268 - protein, 422 aa, unidentified
MLEETNDSEEIIARVAALDIGKAELVCCVRAPSPDTPGKRLQEVTTYATMTRSLLVLAERLGVLGVTRVVMEATSDYWKSPFYLLEAHGLEVWLVNAKDVKHLPGRPKTDKLDAVWLAKLAERQMLRPSFVPPPAIRRLRDLTRYRADLVAVRTAEKQRVEKLLEDAQIKLSVVASDIFGVSGRAMLAALVAGERDPKRLAQLARTRMRAKLGQLEEAFTGHFSDHHAFLLARMLGRIDQASADIAELEARIDQEVAPFAQAVDRLDEITGVGRTAAQVIIAEVGTDMGRFPTAGHLASWAKFAPGVKQSAGKPKGKATTGHGNSYLARVLGEAAVAASRTNTFLGERYRRLAKRRGTKKAIVAVGRSILVIIWHLLADPTARFHDLGAGFYDTRVNAERTKRNHVRQLEALGYKVTLEPAA

SEQ ID NO: 268269 - protein, 456 aa, unidentified
MPGSTSTRGRSSGQLATINPNAAGLDVGSTFHVVAVAADRDEQPVRTFRTFSGDLHRLADWLEATGITTVAMESTSVYWIPVFEILEARGLEVLLVNARDVKHVPGRKTDVQDAQWLQQLHQHGLLRGSFRPRDGVARLRAYLRHRERLVEYAASHIQHMQKALMQMNVQLHHVVSDITGATGMRIIRAIVGGNQAPERLAEFRDVRCAASESTIRAALTGNYRAEHIFALRHALELYDVHQTKIAECDAEIERVLRALNETRPTPREPLPAARHAKAKNEPEFDARPPLYTLLGADLTQIHGFGAYTVLRLVAECGDDMRKWPTAKHFTSWLSLAPRNKVSGGRLLSSKTRRSSNRAATLLRIAAVNVGRTQTALGAFYRRLAVRTGKAKAVTATARKLAILFYKALRFGMTYVDPGASYYEERYRQRVIQHLQRRARHFGFALVADPAAVGGVS

SEQ ID NO: 268270 - protein, 343 aa, unidentified
MTKLNVIGVDLAKNVIQVSVLSPTNRELRNSALTRRKFAEFLGRQRASLVAFEACATSHYWARVAQRHGHEVKIIPAKAVAPFRQGHKTDENDALAVAEAARRPNVKLAPLKTVEQQGMQAVQRSRELLVHERVALSNHLRGLLMEFGIVIPQGFASLYRQLPEILEDGENELPDLYRPTLNLLYGRLCNLREDLEQLNREIETLVRQNPMCQRLTELEGVGPIGSVLLYATLGTGEAFANGRQFSAYLGLTPKQFSSGGKVNLVGISKRVANKRLRAVLIQGARAYVYHMKEPKTTKDRWLWAIVERSGKCKAAVALANKNVRTAWAMLTQNTEYRRYPLAA

SEQ ID NO: 268271 - protein, 361 aa, unidentified
MKTNVRALVDGYDHFIGIDHHKRTSYVTIKDREGEIVKKGGIVSTKASIADFIEAIPCDGDSLEVPRRIAVIECGRTYRPMYRWLSEIVDDVVLAHPGGLKIISDTVYKDDKIDSGKLSDLLMLGMIPEAHAASDEAWERRMVLRHRIMLVKMATEVKNRIHVIVDLHPDALPRRPDVTDMFGKLGTTWLESLKIPDSDRRRLDELLEVLEFLGAMIKKSDSLVRKMVREDKTCALLKTIPGIGDFYAALIAAEIDDIDRFRGPKNFVSYTGLVPGRDSSGGKEASGSIHKRGNKYLRWALVEAAIPATRSDLALKNKYDSVVARKGGGKDAKKLAKVAVAGKLAWIVYRVLKDRRPYEIR

SEQ ID NO: 268272 - protein, 457 aa, unidentified
MVDKTQAQAIDWDSLPPLNVNAAGLDIGATEIYVCVPTGRDPQSVRRFGTFTVDLHSLAAWLTTCHIDTVAMEATGVYWIPVYEILEAAGFEVYLVNARHIKNVAARKSDVSDCQWIQRLHTYGLLRTSFRPPEEIAALRALVRHRETLIQYRAAHIQHMQKALQLMNVKLTHVISDITGVTGMTIIRAIVAGERNPKVLAQYRDPACKKSQVEIAKALEGHYKAEHVFVLRQALELYDFYDQQIQACDREIERRYQASEPRDPDGQPPTTAPQPTQRKPRKGQAHFDLASSLYRMVGVDLTRIAGIDALTAQTLISEIGLDMSKWRTVKHFTSWLGLAPNPKKSGGKVLTNHAPRAQNRAAQSLRIAAQTLARSQSALGGFYRRIRAKHGAAQTVVATAHKLARIVYHMLKYREDYHDLGTDYYEQQYKERVLRTLTRKAADLGFRLEPVLTPQVS

SEQ ID NO: 268273 - protein, 370 aa, unidentified
MPKTTPVFVGLDVHKETISVAYAAGGTAEPPQFVGEIGTRQCDIDKLVRRLQARSPQLVFAYEAGPSGYVLHRHLTGKGLDCRVVAPFLIPKKPGDRVKTDRRDAVELARLLRSGDLTGVYVPSVEDEAIRDVCRARDATRITLKAAKLRLKSFLLRLGFNYVGRADWNAAHRRYLAQVVCPTPAQQIVFQESLRAVDEQVERLARFEAQLLELAPAWRLYPVVEALQALRGVQWLVALTVVAELGDLTRFDNPRQLAAFVGLTPSEHSSGEKRRQGGITKTGNPRARRVLVEGAWAYRYPAKISANIQRRIDKLPKVAQDIGWKAQVRLCNRYRRLITRGKHANIVTTAIARELLAFMWAIAKEVPITA

SEQ ID NO: 268274 - protein, 392 aa, unidentified
MIFIGVDVAKDKHDCCVLAMDGSVLSDFSFTNDKHGYDSFLATVARYRDEHDPADAKVGLESTGIYSTNLTNYLLAKHLSVKIYNPLQVNMLRKAQSLRKTKTDKSDARFLAQLLFSDDSKPYSQPLYYISELKTLTRNRYRLVEMRSKLKVSVSRLITVLFPELPAVVWSVNQKSTHALLLEFPTARSIAEAHLTKLTNVLSDNSHGRYGRNKALEIRELAKQSIGLDSRATGFELKQAIRLIQNLQSEIDELEAEIKAVMIEIDSPVLTIPGVGFVLGAIILAEIGNIENFDNPSKLLKFAGLEPSVYESGKYKATDTPMVKRGSKYLRWALLQAARLVAYRDSTFGAYLLKKRGEGKHFYVAMSHVAKKLVRVVFHLLYSGETFAPQMA

SEQ ID NO: 268275 - protein, 370 aa, unidentified
MDERIKFFVGLDVHKDTISIAACEGGSREPARFVGTVSSDVRQVLKALAKAGESGEVSVVYEAGPTGFGLYRELRNRGYRCEVIAPSLTPRRAGERIKNDRRDCLRLAELSRAGELKAIWVPDQAHEAVRDLCRAREDAVAARLKARQQLKAFLLRHERRYPGKTSWNKSHERWIAEQRLEHAGERFALAEYQLAVQAAEQRVQRLTDALTEVIKGWRFEAVVAALRGLRGIDVVSAIGLVAEIGDINRFDSARRLMGYLGLVPSEHSSGNSVQRGSITKTGNAHARRLLTEAAWNYRFPARMSTTLRERSAGLPQAVRDHAWKAQLRLCRRFSQLSARGVQVNKVCVAVARELAGFVWAIARQAALAQT

SEQ ID NO: 268276 - protein, 360 aa, unidentified
MFSERTSVGLDVHARSVVAAAIDGQTGEVFKARLTPSHAEVLEWIGTLRGPCAVVYESGPTGFGLARALTAAGWRCEVAASSKLHRPAGDRVKTDARDAVHLARLLRLDEVVPVRIPTQAEEAARDLVRAREASRQDLMRARHRVSKLLLRHGIVYSGGKAWTELHDRWLRQQRFDSMPTQAAFDDAYETVVLAAARRDRLDEKITVLAGDSEFTAVTRRLACLRGISTLTGFALAVEIGDWQRFTGASIGAYLGLVPSEHSSGQSRVQGAITKTGNTHVRRLLVEAAWQHRTPYRPSIVLQRRWDQVPAAARARGHAGNQRLHARWVNLNLRKKRPVIANVAVARELAGWCWSLAVMPD

SEQ ID NO: 268277 - protein, 341 aa, unidentified
MAIKVIGLDIAKNVFQVHGVDEAGRVVLRRKLRRCDVLKLFTSIEPALVGIEACHTGHYWAREIMALGHEVRLMPPQFVKPYVKSQKNDAADAEAICEAVQRPTMRFVPIKSAEQQAALLLHRTRDLLIRQRSSLISAVLAHFAEFGIVVHRGTRDIDRMLALLGEAQRGLPELAREMLGILAAQLREIAVRVQVVEDQLMAWHRSNEVSRRLSTIPGIGPITASAIVATVADARQFKSGRQFAAWLGLVPQQRSSGGKERLGGISKRGDGYIRRLMIHGARAIVGWRKRSPRIRDRWIDGLLGRRHINVATVALANKSARVAWALMVRESSYNHRLARAA

SEQ ID NO: 268278 - protein, 388 aa, unidentified
MSYTSDELSPHTASDRSAVAELYISLELSPSKWLVTSLLSRSERMSRHILRGGDGDALLRLIAGLKAKVQRQAGTTVSVVAIQEAGLDGFSLHRLLEGEGIESWVVDPASVAVSRRMRRPKSDGIDGETLLRTLMAFRRGEPRVCSMVRPPTIEEEDRRRVTRERQRLLRERIEHTNRIKGLLMSQGIRGYNPLGKDRHACLETLSTPEGRPLPPRMKAEIRRELERLDLLARQIKQVEAERDALAVASPKAVETPAVLLMNLKGVGPETATRLWLEGLFRTFANRRQLAAYAGLAPTPWLSGRIQREQGISKSGNPRLRTAMVELAWLWLRNQPDAALSRWFIERVRAEGGRKRKLTIVALARKLLVALWRYVTHGEVPKGAVLKTA

SEQ ID NO: 268279 - protein, 349 aa, unidentified
MRFYTHHHKYYCGIDLHTSVMYVCITDAAGTILVHKNLRTNPDAFMRVIEPYREDLAVAVECVFVWYWIADLCARMGITFVLGHALYMKAIHGGKVKNDRIDSEKIAQLLRSGMLPQAYAYPEEMRSTRDLLRRRMYLVRKQAELQGHIQNTRHQYNMPAFEKRIDRAVNREGIAERFEDPMVAASIQIDSNLLDSLHQQILFVERQIADQARGHDPVAVQLLRTIPGIGKILALTILYEIGDITRFGQVGQFISYARLVKCAHESAGKRVNGRNNKIGNAHLKWAFSEAACLFLRESEQAKAWHQKLVSRYGKAKALSIIAQRIGRTAYFVLKRRTPFDREKFFASLK

SEQ ID NO: 268280 - protein, 347 aa, unidentified
MNFYKQQHTYYCGIDLHARKMYVCILYQKGKVKVHQNIKTDAELFFELIFPYLDDVVVGVECVFCWYWLSDLCAEHKIPFVLGHALYMKAIHGGKTKNDKIDSYKIASLLKGGNFPIAYPYPAKWRATRDLLRRRMYLSHRCSELVTHILNTNTQYNLPGFTKRLSRKYNHKGVAERFEDPEVRKSVEVDLAMIASMNEILKKLEWHIEKTARQHSYHTLYLLRSIPGIGQILALVILYEIHDIKRFPSVQDFSSYARLIKPVKESDGKWAGKSNGKIGNHHLKWAIKEAVVLMLRDSSDAKALAAKLERKYNKGKALGILAHKLGRAIYFMLKNNEAFDMKRFFAQ

SEQ ID NO: 268281 - protein, 430 aa, unidentified
MTNRKPTPADAVLVAIDISKLRNDVLIELSGSVRRKRLTVLNTKTEHDRFVGLLGDLARPVIAGFEATGNYHRPLAHRLLEAGFELRLVSSVALARTREALHNGWDKNDPKDAQVILHMLRIGATQTYCDPIRAGIHNIQELSKTHEVVSKAKTELWHRLLTHYLPLYFPEIARFAGHSRSDWFLAFLEQFPTPASITAFAKEEFVSAAWDVVGRKVSKARLLADIYETAGSSIGLPLELGSPAIAMFRMMLAEGRSLIRQRDVIEAQAHAVLSENADYNRLRQVPGIGPINAMTILAEAGDLRRFGHHRQFLKFCGLDLATHQSGQFRGRTMLSKFGNARLRRAFWMAAQVAIRQCDNSFRAKYERYIARDRDNADLKRKALTAITAKMARTVHAVIKSGSDYRPFFEGPIPSGRTSLGKGREGASATL

SEQ ID NO: 268282 - protein, 485 aa, unidentified
MAKRKQSTFERITLDQMNRKQRRELGRRLEKSDPGLEIVHLNAAGIDVGNQSHYVAVPGDRDSQPVREFGCWTSDLVRMAEWLKQCRIETVLMQATGVYWIALKDVLEQHGIEVVVANAQHTKNLPGRKTDVQESQWLMKLHTHGLVRGSFQLAEDMQGVRAVWRLRSRHVEEASRAVQHMQKALTQMNVQLANVLSDISGKSGQAIIGAILSGERDPFKLAELCDRRVQASAAEVAESLRGNWRDEMLFELGQARESYQFAQQQIQSCNQKLESYLKVLPTRQVEITLPPQGASPVPASKARKARKASRGNTPDIPGMSEELARIYGVDLTTIDGISVITAQTILAEIGTDMSRFPSEQAFVSWLGLTPSRDISGGKVIRMVPRKVANRAAQALRMAASTLRCSDSYLGARYRHLQKQLPSKASAVKAMARYLGVIVYRLLTKGQAWVDRGVAMFEQKRKTLNLASLEARALANGYRLVPVTAA

SEQ ID NO: 268283 - protein, 403 aa, unidentified
MNSVGIDISKGRSTVAVMRPFGEVVISPFEVRHTDSELSELARQLKSLDGETRVVMETTGNYHAPVAKLLHDAGLYVSVVNAKLVHSYGNNDLRRVKTDRKDAVKLANYGLDRWLTLPRYVPEENTRLLLKNCYRQYRQYSKVQTVLKNNLISLLDTVFPNANRLFSSPIRGDGSEKWVDFVAEFWHCRCVSEKSERTFTNKYQRWCKKHGYNFREAKAHTIYAEASGHIGVMPKSETTKLLVEQAASQLRATSAALAALKHEMQSLASMLPEYPVVMDMFGVGPTLGPQLIAEIGDVRRFYSKKALVAYAGLDAPPNDSGDVTGRHKSMSKVGASSLRRTLFLVMSVYLQNAPLDEPVYQFMDKKRAEGKPYRVYMMASANKFLRIYYATVKAYLESLERTA

SEQ ID NO: 268284 - protein, 306 aa, unidentified
MGHATEVFVGIDVSKMRNAVAVADGERGGEVRYLGEVDASPESMRRLVRRLAGQHERLHFCYEAGPTGYGLHRLITELGHSCSVVAPSLIPRKPGDRVKTNRRDAVALAKLLRAGELTAVWVPDQGHEAMRDLVRARAAAVESLRVHRQQVSAFMLKHGRVYPRKKGWTMRYLCWLQEQRFDHPAHQIALQELVEAVRIAKERVARIEAAIAEFVPTWSLGPVVRALQTLRGIDLIVAVTFATEVGDISRFESPRQLMGYLGLVPSERSAGDTVRRGGITKAGNGRVRHMLVESAWTYRHPPKVGA

SEQ ID NO: 268285 - protein, 353 aa, unidentified
MTYVGIDLHSNNMVNVAINSNGEVIREAKLPTSRRSLEDFFGTFEGPVKAVVECTSNWYWLSDWCRANGVELTLAHAKMVKAISYAKVKTDKVDAKTLVELLRADLIPEAYQINHDRRELRELTRGRLRLIQWRGKLQSTLWNQAIKYNVQISGSQWRQLEKLQRWLQPQLPPAANLQAQLLLEQISQLQEHVHQIEEEIEKQIPFEASAERLMAVPGLGKVGAWTILAEIGDIRRFPSAKQFVSYCRLVPGAKDSGGSHRHKSGNKDGNKYLRAAFGQAAVSAYTHYKVVKKFYRKIKRRSGRPVARAVVAKELAKGVWHMLTKDEEYKGFKGLPVRAASQTCWPQPISPFA

SEQ ID NO: 268286 - protein, 321 aa, unidentified
MSEPQAEVFVGIDVAKARLDVGLHPSGESWTVEHDEAGIATAVERLAALGPTLVILEATGGLEVPLVGALVAAAVPVQVVNPRQVRDFAKATGRLAKTDRLDALVLARFGAALRPEPRAIPDAALQEVRALVARRRQLQAMLLAEKNRRSSAPTRLHAQIDDHLAWLRRAVADLDRDLATTIHGTPAWQAAVGRWQSVPGVGPVVSATLLADLPELGTLTRQQIAALVGVAPLNHDSGAHRGTRSCWGGRAHVRTALYMGALVATRCNPAIRTFYLRLLGQGKPKKLALTACMHKLLTILNAITRSGSTWTDQTASVEIAA

SEQ ID NO: 268287 - protein, 360 aa, unidentified
MSWIVAVNTPLSEKISRHTLGACYWKELLKLCERIRTRIARELRKDVELVSCYEAGYDGFWLHRLLEAHGIRNYVIDPASLQVDRRARRAKTDRVDVERLLRSLMAYLRGEPKVWSVVCVPSVAEEDDRRLHRERGRLINERIQHVNRIKGLLAIHGIYDYPPLRHDRMQQLEGLRTADGRTLSPRLKAEILRELQRLELVIGMIKTIEAERDAIASAKIETEHGSAKRIQDLAKIKCIGPEFATTLAGEVFYRSFDNRKQLASYVGLTPAHFQSGETCRDQGISKAGNAKARRVMIELAWLWLRHQPASPLSVWFHDRVGKLKGRIRRITIVAVARKLLIALWRYLETGLAPEGAILKV

SEQ ID NO: 268288 - protein, 338 aa, unidentified
MARYIGVDLHRNRFTVCVLAENGREYLSEYRLEQLTQFVRKLRPTDELAVEVTGNTRLFYNAVASHVAKVVVVNPTQFKVIRDSVKKTDPHDARALALFLSKVLPEVRMKDTLHAQLASLTQTRDMLVKQRTALKNKVNNILSAHGINLPREKLSSDVALEEVLGMTFEPIVQAELRVVVGQIRALNQSIAELEKTIKAEGPKLPGYRNLRSIKGIGDLGATVLLSVIGDIEDFTHPGKLAAYFGIVPRVRNSNETEHFGRITKRGTKLGRTTLVQCALIAMRYSPYLAKFYYKIAGRRGGGKAIIALARKFLGVIYHTLKNNWVFEDFPNFVLAEAS

SEQ ID NO: 268289 - protein, 330 aa, unidentified
MKKVKQKEFVGIDVSKKTLDVHLHATNVHQKFQNESNGIAALLEWVSSKVDQYCFCFEHCGVYSATLCALLTEQHMEYYVVGGLAVKRSMGIKRGKTDKLDAKALARFAYLHREELSPYILVDESIASLKALLTQRNLFVKQLTAQKTYKREISPNLPIQVIDDCRRQIDDSIVLLKKLIKQVDELIQNVINQYAEVALTYKNLLSIKGVGPVLAVNMIVATNNFKNFDSWRKFASYAGIAPFDHSSGTSIKGKTRVSHMANKRLKGVLSQAAASAIQYNIEMKLYYNHKLAEGKHKMLILNNVKNKLVARMLAVAKRGTHYVVIAKYAA

SEQ ID NO: 268290 - protein, 335 aa, unidentified
MLYAAIDIHKRMFQAAVLDVETGETVERRFGATREELSDWAMPLQGKLAAVAIEATNGWRWVWRELSARGFDVRLVDPAQAKALRGRIKRAKTDRLDARWLCVLLAKEMLPESWLPPAEIQALRDQTRLRKALAEDRTRWAQRLHALLAHEGWPCQRARLLRVEGRRWVNALSLSPAARSQVERLLRLIEAVEDELRSLETELRRFARSDRRCIALQTIYGVGPILACHLLAELGEASRFRRARQAVRAAGLDPVVDESGETRRRGRLAKHGAPALRWALVEAAQHAQRANSPDRGLYTQAATRVGGKRAVLTVARKIGRRAYHVLNELETQAAA

SEQ ID NO: 268291 - protein, 387 aa, unidentified
MGQVVIGVGPHKRSATIEVMTTDESVAGGGRYGTDAAGYRAMLAAARRWPQRKWAVEGCQGIGGHIAHRLLADGEQVAGVPPKLPARTRVFATGQGRKTDATDAHSVALAAIRMSGLRPVVNDGQLAVLRILADRRRSLGEDHTRMTSQLHQLLLELIPGGAKKDLSAAQAKALLARVRPRDAAGKARRRVAAELIGDLERIYQRKKAASKELNALLKATATTLTALHGIGPSGAARLLVEIGEVTGFPTRAHFASWNGTAPIDASSGDQVRHRLSRAGNRQINRALHIMAIVQLRNPTEGRACYDRKVAAGKTPREAMRALKRRLPGIACHQMISDHRARQTGPGGHSGTTLTSSVTGLTPVAGSSDKPLPGPATRQPKTLSLTAR

SEQ ID NO: 268292 - protein, 363 aa, unidentified
MQYHNDTELSSLEETRCQFNGGKCVIKLGIDVHQEFYVVVEQVGGNNPKPPQRFGKGVFLGWAAKLKRPAAEVHAVYEACGFGFTLQRQLVALGIKCYVVCPQKLDERNKRVKTDSLDAKALCLKLDRFVEGNRDALALVRVPAEKEEQLRAIHRQREQLVKARKQLEAQGRSLMVNHAIEPVQQWWKRRAFAQLQVPQWMRTLLLNSQPILLVLEEKIRALTVQLQSAAAPNQPRGLGQMTSVVIDREIGNWHRFNNRRQVGSYTGLCPGEYSSGNTRLQSCVTKHGNPRLRAALVELAWRMVRFQPNYKPILKWRALLAKGRLASGAARKKAIVAVARQLAIDLWRFRTGRGTPEQVGLTI

SEQ ID NO: 268293 - protein, 362 aa, unidentified
MNDYMLCGIDAHDKTLVCRWAMGKQPPNRKTFEHSRGGLQKLFAQLRSDSGSLETPEVVLAYEASSLGFGLYDAITEAGFTCHVLAPHKMRSSSEDKKKKTDDRDAMKILEELRGHYLAGNSLPEVWIPDHQTRHDRQLVRARLDLSDEITRVKAKIRMFLKRNGLTVVYQTQKAWTVDYMRGLVKLQGEIEKSLSCVLGMLIKRLRELEEHRMDLDKALKELSQTDRYQKPVQTLVDELCGVEVLSAMVFLTELGDLSRFKNRGQVAAYLGLAPSSFESGERDDRKGHITRQGSCRVRKILCQCVWSQVSHGRGEAAAYRRIVEKNPKKKKIAIVACMRRLGVRMWHKAVEAALAPEVQPA

SEQ ID NO: 268294 - protein, 350 aa, unidentified
MLIIGCDYHPGFQQIACVDTDTGELSERRLAHREQAEEFYRERKQRNLDVRVGMESSGHSRWFERLLQELGFELWIGDPAEIRTKRVRKQKTDRQDAQLLLRLLMEDRFPRIWVPDAANRDLRQLLWHRHRLVQMRTRVMNQLHVVPLNEGLRRKKALWRPAGRKELESIALAPWASRRRQDLLDLLDQLTPKIQELTRALEEEVEKRAVTRRLMTHPGVGPLTALAFELVIGTPQRFHCGKQIASYLGLVPEEKSSGERRRLGHISKQGNSLLRFLLVEAAQVTVRSQPEWRNKFFHLAMRRGRKIAKVAMARKLAVHLYWMWRQGLDSTQLEKFGSHAGAPGNPDGVQ

SEQ ID NO: 268295 - protein, 394 aa, unidentified
MRFVGIDVAAERHVVASVDETEKVLLKPMPFTEDAEGYHTLLGVLGPAAETLVAMEATGHYWKNVFVALVAHGFAVALLNPLRTRRFAGEDLQRTQTDAIDALGIARFAAQKRPPTTRLPDPATEELRELVRFRDRLVQDFGDRVRQLHRLVDLGFPEFTRYVRDLGSELATALLRDYPTAAAFPGVSVRRLAGLRYDGRHKVGDELAAALLAAAARSVGRHHGEAYRIQVRYTCEDLDRLRRRRRDLERDIERLLDDHEVGRLLTTIEGIGPQTSARLVATFGDFTGFRSGAALASYVGAIPALRQSGKRTSVRAGLTPIGAASLRAKLWMPVLTAVRQNPWLRAYYAGLIARGKLPKVALVAAMRKLLHAVHSVATHRRPFVPRLAQQEARP

SEQ ID NO: 268296 - protein, 343 aa, unidentified
MAHCNLVAIDLAKNTFQAAQFKGNKLMSNKSVNRQTLLELLVQAKPSVVAMEACASAQHFARTAQSFGHDVILLDPLFVKAFRQGQKTDANDAIAIAVASRVPNVRSCKILTIEEQALQSLSKVRALADKQKIQLSNQIRGLLLEFGIVINQSEAAFKAAIPDILEDAENTLPLELKHALALSYSLYKQQCDNKVELQKQIERIAKQNDGCQRLMALEGVGPITAIEVLSFLGNTTQFNDGRSAAACAGVTPLQHSTGGKAKIGRIPKRRGGALRRNLFLGARSVVSKLKNREATTEKERWIKNLLIRKGVKCAAIALANKTMRTAYALLKNGTSYEARLLTA

SEQ ID NO: 268297 - protein, 348 aa, unidentified
MSQDHYIGLDVSARSVNLCAVDHEGRVVHEAKLTSEPEEVARHILALPFAVCRVGLEAGMLSQHIFGTLAEAGIPAICVETRHMKAVLAAQLNKTDRHDARGIAQMMRVGLFKEVHVKTPTSRRLRAVLTARQLLRNKLQDVENEIRGLMRDFGYHLGKVTARDFEPRVRELTADTELHVVSDTLLLVRRGLREQFGRLDDLLVKLARQDELTRRFMTVPGVGPLVALTFRATVDVPSRFARSRTVGAHFGLTPRKQQSGEVDRSGRISRWGDAMMRSLLYEGAQVLLTRVKRWSALKAWAMQVARRRGHKKAIIALARKIAVILHRMWVDGTEFEWGKRPETAASSV

SEQ ID NO: 268298 - protein, 404 aa, unidentified
MWYTGIDWADDHHDTVVIDEAGHQLASLRVTHTREGLDQLTSFLQGITGPDAKEQMACIIETTHGLLIAALLEAGFAVYPVNPRTVDRRRKPAGAKTDAIDAYLLAKTGRSDLPDLRRLQPDTAQIQELKALTRDQDALIQSQTRLVNQLTACLKAYYPVALELFTKVQQHSTLVFLQTYPTPDSAKAASLDEMTAVLKQAHHPNPTKAAQHIWHTLRQPHLQADAITTRTKARLMLALVSQLLPLVEQITAYDKEITRLFLSHPDRETFSSLPGAAKRLAPRLLAGWGDDRTRYSDAASIQALAGTSPVPYESGNYSKVHKRYACIKPLRNALHQFAWESTRQEAWALEYYRRKRQEGKSHSMAIRALANVWVRIIFAMWLKHESYESAQFLAARHAHGKLAA

SEQ ID NO: 268299 - protein, 417 aa, unidentified
MIRKVMEVIHQSVGGLDVHKKTVMACRRRLLGDGQVESEVLEFRTTTLGLSELSKWLSEWGCTQVAMESTGVLWIPVWNVLEGDFKLLLTNAQHLRKVPGRKKDVTDAEWIAQLMQCGLLKGSFVPSREIRQWRTLTRQRMKLVDQRTGVVNRLHKVLQQGNIKLSSVATDVMGVSGRAMILAMIEGEEDAERLASLAKGRLKSKHEQLVESLEGRLNDDDRWVMKELWEQMEYLEEEIARYDDQIKEKMSPYEESLERLMTIDLIERRSAENILAEIGPDMSFFPSDDNLVSWAGLCPGSEESAKKNRSGKTPKGNQWLRRALVEPAWGAARRKDGYLGAMYRGIAVRRGEKRAVIAVARTILQAAWHVLSKGVEYKERGGDYFDRINSEQTKNKLIRRLERLGYEVDLKPKPATV

SEQ ID NO: 268300 - protein, 345 aa, unidentified
MNEISTIGLDIAKSVFQVHGVDALGAVVVRRQLRRGELLKFVAGLPSCVVGMEACGSAHYWARQIGALGHEVRLLPPARVKPYVKRGKKNDAADAAALAEAVGRPRMSFVPVKSAEQQSVVMLHRTRDLLVRQRTMLICALRSHLAEFGCIAAQGKGGFGRLVASLDGPEGRMLPKTALAALRLIAAQIDDGNKKIQALETAILMQHRQCETSRRLASIPGIGPITASALVAAVPDASIFKSGRQLAAWLGLVPGQNSSGGKERLGGITKTGDRYLRRLLVIGATGLIRYKRKNIPGGVAWLSGLLNRKPARLVTVALANKMARIAWAVLCRGEIYRAVAAPAAI

SEQ ID NO: 268301 - protein, 399 aa, unidentified
MEVEDFDIWLGIDVGKIDHWATAVNTVGQQVYSHSLPNDEAKLRQIYADLAATGRVLVVVDQPATIGALAVAVAQAMGVSVAYLPGLAMRRIADLYPGNAKTDQRDAFIIAEAARMMPHTLRTLRALDEDEAELGMLTGFDNDLACQITQTRNRVRGLYTQIHPGLEKVIGPRLDHAGILAVLQTWPVPAQLKKAGRARIGAKLKKHGARRWQSWADEIVDALPTQTVTVTGTSAAAIVIPHLAATLDRLYKQRADVEVQIEALVTEHPLYPVLTSMPGAGVRTCAVIIAELAGKEFASAAQLASYAGLTPRTRQSGTSIKSETVSHTGNKRLKRALFLSAFATLRSDPASRRYYDKKRLAGKRHNQAIIAVAHRRLTVIHAMVRDGTYYETRPTKQAA

SEQ ID NO: 268302 - protein, 344 aa, unidentified
MEFYAGIDVSLKDSSVCVVDATGRIVREAKVASEPQALVAWFRGLGLEVTRIGLEAGPLSQWLHAGLSEAGLEAVLLETRHVKAALSAMVVKTDRKDARGIAQLLRMGWFRPVHRKTVDAQAVRALLVGRKLLQSKLRDVELSIRGILRGFGLKVGEVTKAKFAARVRELAAGQAMLETVTEAMLTARESLLAEFMALHRRMLALARADAVCRRLMTVPGVGALVAITFRTAVDDPGRFHSSKAVGAHFGLTPKRYQSGETDVAGGISKVGDAMVRTALYEAANAVLSRPVRFSGLKRWALDVAQRRGLKRAKVALARKLACILHRMWLDGTEFRWGKETTAAA

SEQ ID NO: 268303 - protein, 387 aa, unidentified
MTVLTVNNPPAATHGETVRCLFAIELSGMSWVIAFNTPLSEKISRRTLIGCKWKKLLELIEDVRARVSRETGRAVEVISCYEAGYDGFWLHRQLLAHGIRNYVIDPASLQVDRRARRVKTDRIDTDRLLRSLMAYLRGEPKVWSVVRVPSVAEEDARRLHRERDRLVSERVQHVNRIKGLCALQGIYDYNPLRPQAMARLEQLRTTQGGALPPRLKSEIKRELQRLELVVEMIATLEAERNTIVADEASTHPNAKKIQTLHKLKAIGPEFAAVLVGEIFHRDFNNRRQLASYVGFAPSPFRSGNVEHDQGISKAGNAKGRTTGIELAWLWLRYQPDSDLSVWFRTRVGTTKGRIRRIAIVALARKLLVALWRYLETGVVPQGAVLKS

SEQ ID NO: 268304 - protein, 332 aa, unidentified
MDNFYFIGVDVSKKKLDFCVLFEGKVLREEQVSNHQQAVARLIGELKNDLEMDNEQFLICAEHTGQYTFPLVCACKSVECKLWLENPSQIKYSSGMQRGKNDKVDAKRIAIYASRFGDKVKYYDRPSEEIERLKQLERERALYVTDLAKYKGQMYDQKDFMPAALYRKKTKRMKGLIQELQAAIDAITAEMEKIIGSTEVLARQMELLMSIDGVGKVVALNVIIETEAFSRFDNPRKFCCHAGVAPFSYTSGSSQHSKNKVSHRANKNIKKLLHMAGGSVTHRKEGELKAYYMRKVEEGKNKMSVINALRAKIVARMFAVIKRNEFYTPIYS

SEQ ID NO: 268305 - protein, 365 aa, unidentified
MQKISTMQTTGKNILEGRLTIGLDLGDRSSAYCVLNEAGEIVLEHKLATTPEAMEQVFGSMPRCRIAMETGTHSPWVSRLLTALGYEVIVGHAQKVRLITKSRRKDDRLDARTLARLARIDPELLSPVKHRSAQAQLHLTEIRARAGLVSARTALVNAARGLVKSYGERLRKCGTQQFDRETTSALNAGLRQALDPLVQEIESLNERIQEYDRRIAKMAKEEYPETALLKQVKGVGDLIATAYVLTVEDPQRFRKSRDAGCFVGLQPGRRNSGESEPQMRISKEGDEYLRTLLVQGAHYILGPFGEDSDLRRWGQKLSARGGKNAKKRAVVAVARKLAVLLHRLWVSGEVYEPLRNSQKAMSAAA

SEQ ID NO: 268306 - protein, 316 aa, unidentified
MTTESAVVQVGVDISKATLAISLPSDEYLVINNTLAAIKKWLSGFSKPIELAMEATGIYHLTLAQEAFRQGHTVYLINGYRLNRYRDSVGVRAKTDQNDARLLRRYLEREHDQLEPWKPAPPEQMRLQALLKRRACVVSARVKLEQSLADIPELKRTNTMLKRALESAEKQIMQKLVALVKEAGWDQDMKRCQAIEGIGPVTSVALTSIFHRGQFRSSDAFIAYLGLDVRVRDSGQMRGKRKLTKQGDSEIRRLLYLAAMHAKRQKTWQAFYQRYIDRGLSNVQVLTILARKLARVAFALMHNQSEYVPQNACIET

SEQ ID NO: 268307 - protein, 342 aa, unidentified
MISVGIDVSKGKSTVCLLKPYGEIICKPFEVQHTEKDLEELANLLQKLDGEIKIVMEATGIYHLPILTFLLEEGFFISVINPFMMKRFARDNSLRGAKNDRLDSVMIASYGIEKWHKLKKYEVNDGIYPELRFLGRQYHRFMQTHVKHVQELTHLLDHTAPGLKAMFNSWNEHSNRDKLSDFVERFWHFDLITSLSREEFVEQYLLWAKEKKYHQSRSKAEKIYDLASNGIPTLSSRTPSTQMIIQEAINVLRIVNNSLYRILSRMKELAKSLPEYATVRSMGGVGDALAPQLIAEIGDVRRLHNGHALVALAGIDPPPYESGQFVGTHRKISKRGSPICER

SEQ ID NO: 268308 - protein, 448 aa, unidentified
MPEPQVIDDQEHERVFERVAAIDVGKASGVVCARAPHPSRPGVRRGTVWTVAATMGAVRALAAQLAGLGVEKVTLESTSDYWRIWFYVLEEAGLDVQLVAASQAKQLSGRPKTDRLDAMWLARLTEKGLLRASFVPPPQIRVLRHYARARTHLTGDRTRCYQRLEKLLEDALIKVSAVASKLTTASARDMIAALIAGERDPHVLAGLARGRMKAKHAALADALTGAFGDHHGELAALLLDQITFLDERISQLSARISAQLAQIRDAWGIDADGTTGPAAGRGPDAAVLPAAARLDEIPGISAEMAAAIIAETGLDMTRFPTAGHLVSWAGLCPRAVQSGPRTRQARNQGSTYLRSQLGQAATGAAKTTTFLGERHRRIARRRGGAKAQVAVARSILVIIWHLLADPAARYTDLGPGHYDTTISKNRRTRSHIHQLQALGYTVTLTPAT

SEQ ID NO: 268309 - protein, 351 aa, unidentified
MVVVGADVHKRTHTFVAVNEVGKQLGQVTVPATGKGHARALGWAREQFGSELVWAIEDCRHLSARLERDLLSAGQQVVRVPPKMMAMVRASARTRGKSDPIDALAVARAFLREPDLPVASHDETSREAKLLVDRRETLVNTRTRTINSLLWRIHELDPARAPKPRSLDLAKHQLALRAWLVTLDGVVAEIALDELEDIIALTTRIKEFDRRIGRLARAQVPELLALPGCGELCAAKLLGESAGITRFRGEATFARHGGLAPIPVWSGNTAGRVRMTRSGNRQINCAIHRIAITQARMTGTLGKAYYDKKLAEGKSKTEALRCLKRRIARTVYNRLTTDHNNRHAPCLQAAA

SEQ ID NO: 268310 - protein, 357 aa, unidentified
MKILALDLGKYKTVACDYELASGEHEFETTTTTPQSLHDLLVEREPDRVVIEICSIAGWVCDLTRALEIEIEVANTNDERWRWKRIKKKTDRTDALKLASLSALQQIEPVHVPAREVRQWRALINYRQFLLRRRNRMKNHIRDLLAREAILLPRGRSAWNQEAMIALEQLARPLAAVECHELWRGELSIELGELRRAEEPLKQVEKKLDELAKANQNVQLLQTIPGVGPRLAEALVALIDDPGRFAHGKEVGAYLGMVPKQLESGETLRLGHITHHGNRLVRALLVEVSWLGLRYNPWVREVYERTRAGKSARRKIAIVAVGRRLLIRSWAMLRDQQPWHGPAKQTAAQKTKLKRAA

SEQ ID NO: 268311 - protein, 465 aa, unidentified
MGAGKMNRKQRKELGRRLQSANPGLEVVHPRAAGIDVGNGAHYVAVRPEQDAEPVRRFECFTADLHRMADWLEACEVKTVAMQSTGVYWIPLYEILEQRGFEVYLVNARHTKNLPGRKSDVQESQWLLKLHTHGLLNNSFQPTAEIRVVRTYWRQRGEHVRGASTCIQRIQKVLTQMNVQLANVISDLSGLTGQAIVRAILAGERDPRKLAELSHPRIRAGREQIAKSLEGNWRSELLFVLKQEMEMYDTYQHKIAECDRELEATLKQFAVSERASTEQPKIPNAKKTKRIQRNAPGFNLTSELHRITGVDLSRIDGVNAIVAQTIISEVGLDMTRWKTEAHFASWLGLCPDNRISGDKVLARGTRHVINRAATALRMAATTLIKSQSYLGAQYRRLRTKLGAPKAITAMAHRLARLVFRMLKYGQEYVDKGNQYYEQKHREQQLHLLKKKAATLGFQVVETGVA

SEQ ID NO: 268312 - protein, 350 aa, unidentified
MSIRNKPRDAAVFGIDIGKTVFHVVGLDAAHAPIQKATFRRETLLQFFERASPVLVGMEACPGSQWLARKLQKMGHTVRIVPAQFVKPFVKSNKNDIIDAEAIAEAVTRPTMRFVEIRTPEQIDLQALHRVRDRMIAHRTRLISQMRAFCIEYGIAIHQGAGKFKADMPRVLADMDNELSPAMRGMLTEVFGELGDLEQRIAAMNREIEAIAARSDTARRLMTIPGVGPLASTALLASAGTGRQFRKARDLAAWLGLVPREYSTGGKTRLLGISKRGNKYLRRMIIHGARSCVTHLDRSRDRLGPWLDGLERRMHKNKVTVALAAKIARILWVVLTKPGASYERRDPAFG

SEQ ID NO: 268313 - protein, 320 aa, unidentified
MSASSVVVGIDVAKAHVDVWVLGAKFDAQRLDNHAEAHSALAAALKPLDVALVVMEATGGYETELACALQAAGLAVAVVNPRQARDFAKSMGRLAKTDAIDARMLAELAAVLARREDLARFVRPLADEQQQWLAALVTRRRQLLTMLHSERQRLQITPVGLHPSIEAIVAAIKAQLDDIEGQMAAHVREHFGQLDRLLQSASGIGPVASATLIAELPELGRLNRREIAALVGVAPIANESGCTKGRRRIQGGRFEIRRVLYMAALTASRSNPSIKTFYERLITAGKLPKVALVACMRKLLITLNAIVRTNQPWDNSLHRA

SEQ ID NO: 268314 - protein, 383 aa, unidentified
MTNGKSKAKRSTTKAKNSTKRMVIKQNVGVDIAKKEFKACIYQLFDNQECRVKASRTFSNTAKGFEAFLIWVNQKCVSTVPIRVTMEATGVYYEGLTYFLDDYDIYVSVVLPNKAKFYAKSLGLKSKTDKIDAQMLGQMGLERDLPKWKAISSQMHTLKQLCRERVNIIEDKTALGNQLHALKASHQADDARIERLNERIDLCKKQLKAVETEIKILVKNDDKLSKHVDNISKVKGLGIITIATIFAETDGFNLIGSRKQLVSYAGYDVVQRQSGTSINGKTRISKKGNRFIRRALHFPAMVAVRHDKQINQFYQRTFEKSYIKMKAYVAVQRKLLLLIYALFKKNEAYNPDFLKTEDNDKSQKNNNIISKAIDNTIVEIISQ

SEQ ID NO: 268315 - protein, 342 aa, unidentified
MNITTLGIDIAKNVFHLHGTDQHGKVVLRKRLRREQLLTFMQNLPACLVGMEACGGAHYWARKFQSYGHTVKLMAPQYVKPYVKTNKNDYNDAEAINEAVGRPTMRFVGIKALWQQDIQTLHRTRSRLMQTRTALVNQIRGLLMEYGIVIPRQIGQLRRGLPLVLEDTGNELSADMRSLFAELYEELKGLDERINEQDKRITAIHRASELSRRLGEVEGIGPLTATAFVSAIGEANIFKRGRDCSAWLGLVPRQYSTGGKTVLGSISKRGDRYLRTNLIHGARSVISKAEGRTDPRSRWIQQLKSRVGMNKACVALANKNARILWALMASGEQYRANETANA

SEQ ID NO: 268316 - protein, 522 aa, unidentified
MTGFAMVLVCPYRSLVPRLSADPLAKFRGLWQARGTILFKRLQFFMPLLGRNHNHTNMKSKTPKSKKEKKKISVDQGWEAINPRAAGIDIGAREHFACVPARATPKNVRSFGTFTADLNALADWFKECGVTSVAMEATGVYWIPVFQILEERGFAVILVNARQTKNVAGRKSDVQDCQWIQRLHTYGLLQGSFRPKDPYCVLRTYLRYRDELVSARSTQCQHMQKALQQMNVQLVQVLSDVTGVSGMAIIQAILAGERDPVKLANMVDRRVRATPVQIQKALEGDYREEHLFVLQQAFSLYGTYEEKINACDEQIVRETATLSDKADPQLKPLPPRKEGRPASKDKMQGQDMREVLYRKFGADLTAIEGIGVTTALVILTEVGPNVTGFKTEKHFCSWLGLCPDNRISGGKVLSSHTRRVINRASDALRMAAVTLERSQSALGGFYRRMKGRLGAAEAITATAHKLARIIYRLIKYGEAYVRQGMEDYERKFRERKLHALRKTAISMGFNLIAKQQVAPGVS

SEQ ID NO: 268317 - protein, 343 aa, unidentified
MKLMRIGVDLAKNVFQIHGVDRHEQPVWRQRLPRDRWLQAVLEKIEPGCEIGMESCGGAHHWARQLQARGYRVRLIAPQFVKPYVKSNKNDANDAEAICEAMSRPSMRFVAVKTIEQQDIQATHRIRAGLIEQRTAKANQIRGLIAEYGLVAPKELLMLRRAIPCWLEDADNGLTARFRRLLNGLWNDLHALDERVSELDGEISAIAASEPTAVRLQQLRGVGPMIATALVAAIGDASQFANGRQLAASLGLTPKQHSSGGKDRLLGISKRGDAYLRTLMIHGARSALRTAKSKDDRLSQWGVRLAERSHPNVAAIALANKTARMAWAMLRNGTDYQPDRAAA

SEQ ID NO: 268318 - protein, 341 aa, unidentified
MREFIRIGVDLAKNVFQLHGIEREDGSPFQRKLTRVKFREFFSRLTPCRVGMEACGSAHYWARVLGAMGHEVVLIAPAYTKPYVKRGKNDAADAAAICEAMSRPEMRFVPVKSADQQAVLMLHKTRDLLVKQRTMSVNALRGHLQEFGLIAAKGIHRVQELVALALADEGLPEEAKEAATLLAGQSEQLDMKIDGLEKQIAKASSKNPMSRLLKEIPAIGPLISSAMAASHPDPNVFKSGSDFAASLGLTPSQHSSGGKERLGSITKKGNRYLRKMLVVGCTSVLRVAHKYKGALAEWIVAIKARKPERVAAVALANKLARICWAVLSTGESFRQELYTRA

SEQ ID NO: 268319 - protein, 325 aa, unidentified
MSEVWIGIDVSKEGLDVAVRPGDQAWSVRNDQAGIKVLTRQIKKLSPQRIVLEATGGYEYELALRLGRAELPVAVVNPRQVRDFARAVGRLAKTDPIDARILAHFAEAVKPPCRPVKDRLLDELDQLVTRHRQLVEMIVAERNRRMSLRGDAQNDIDVTVRFLKGRLKQVDERLKALIDKNPEWNRKAELLNSVPGVGPVLISSMIAELPELGTMNRKQIAALVGVAPFNNDSGKSQGRRHIWGGRAHLRALLYMSAVVGLRFNPTIRDFYQHLRKSGKPAKVALVACMRKLLVQLNAMVRSAQTWNAHILSALPVEDLSSASST

SEQ ID NO: 268320 - protein, 391 aa, unidentified
MHKGTVVACVMGTGIKKEIRTYLTMTNDLFRLKEWLKEKRVTHVAMESTGEKPVFNVLEDSFEVMLVNARHVKNVPGRKTDVQDSEWLCKLLRSGLVRGSFIPPKPVRELRDLTRYKRKLIQTITAEKQRVEKILEDANIKLSSIASNTFGASGVRIIQELLKGELGAEEMAELSKGRLRKRKEELKEALVGNVEEHHKRMIRTSLGHIQAMEKILFTVEQKIQENIGRHFREEYELLKTVPPMKDSALVIIAEMGVNMDLFPTEGHLSSWAGMSPGNNESAGKKKPGATPHGNKYLKTILTEFAWIASKMKGTYLWAKYQSLVGRRGKKKTLVAVGHKILIMCYHILKYKVPYKELGVNYLDERKKERIAKSCLRRLTNLGYTVSLKEAA

SEQ ID NO: 268321 - protein, 388 aa, unidentified
MLLDHPLSGQTAIHVQFGAIFVSLELSRSSWLITSLSPCKGEKMSTHKVEAGDMAGLLALFERFKRQAAQRTGENYPIISIQEAGLDGFSLHRVLEQAGVESHVVDPASIATPRRRRRAKTDRLDGETLLRALLAYKRGEPRVCAMVVVPSPEEEDRRRVCRERQILIGERTTHANRIKGLLFAQGISDYEPLRRDRRARLAALRTSDGRMLPCHLKAQIGRELDRLELLLEQIRAIEAEQAALLGAMPEAAPEEAQKPVAMLLGLKGIGANFASLLWSEAFYRRFSNRRQIASYAGLAATPWRSGSIRHEQGVSKAGNPRLRTTMIQLAWLWLRHQPQSALTQWFKAQSGRGRKSAIVAMARKLLVALWKYATQGVVIEGAVLKTAA

SEQ ID NO: 268322 - protein, 465 aa, unidentified
MSKLRKRNRARSSQGETRPFEGMRQVHPHAAGVDIGAHEIVACVPDGDDQQIVRTCGTDTVDLQTLADWFVDRGIQTVAMASTGVYWIPLCEELEARGLPCCLISAQSIKRVPGRKSDVLDCQWIQPLHSYGLRAASCRPAADLVALRTLLRHRAQLLEHRAPHVLHMQQALLQMHIPLSQALRDLTGDTGQRLIRAMVAGARAPQHWAALRNDRCKKDAHEIAMALTGTWREEHLFVLTQALALFDFSTTQLSACDAQVEHAFAVITPHVESTAAASVPARAAVPPRRKPHSPSKNAPEGNTRAHILRITGVDLVAVHGMSDSLAPTIVAEIGTDMSQWPDDTHLCSWLGLAPNNDISGGKVLKSRTMKHRNRAAQAFRMAAQSVIRSHCAFGAFYRRLTGRLGPAQALVATAHKIARTVYHMLKHRVPYYDIGAAEYNKRFREREMHSLQKQAAKLGYKLSPG

SEQ ID NO: 268323 - protein, 317 aa, unidentified
MAEAFHLGIDVAKDSFELASRPVGLHQALPNTPDGWRKLLECLQSHTIALIVLEATGGYERGLAAELLTAGYRVVVVNPRQVRDFARGVGQLAKTDPIDADILAYFAQVVQPKPRPAPSAQHADLAELVRRRRQLSALRTAESNRLPMARQALVRKSLQQSLRMLEKQIDQLDHEIHGRIRSDDPFRRKDDILRSAPGVGPQTSAMLLSHLPELGQLNRQQIAALVGVAPWDVRSGKYVGKARIWGGRKDVRSVLYMATLSAMNHNPIIRSFADHLRSKGKAFKVVITACMRKLLVILNSMLRNQTPWRHPVTTENA

SEQ ID NO: 268324 - protein, 354 aa, unidentified
MSQTVNAAIAVVGIDIGKNSFHIVGHDERGAIVLRQKWSRGQVEARFANMPPCLIGMEACVGAHHLSRKLRALGHDARLMPAKYVRPYSKGQKNDFRDAEAIAEAVQRPTMKFVATKTADQLDLQALHRVRQRLVSQRTGIINQIRAFLLERGIAVRQGQRFLRAELPRILATPPDVLSPRMLRIIEDLAGDWRRLDERVEGLSNEIEAIARQDAGCERLMSVPGIGPMISSAMVAAIGAGDVFTKGRDFAAWLGLVPKQISTGDRTILGKISRRGNRYLRVLFVQAAWVVLIKPKIWERHGLKSWIEAARKRLHHNVLAIALANKLARIAWSVLARGRAFEARKMDQAANQSA

SEQ ID NO: 268325 - protein, 344 aa, unidentified
MENGAIDLHTKESEVRIVTADGTVVVARRIATRPDRLTAVFAGRAPMRILLETGTESEWVAQHLEQLGHTVVVADPNYAPMYGARTRRIKSDRRDVAALAEANRLGHFRAAHRVSAAQRAVRQQLQVREALIAMRTQAINVIRTQVRSAGLRLPTGEAATCAARVRRPALPAALVVTVTPLLTLLDVLAPEIVAADTWAARAASTDPVTTRLMTVPGVGPITALHFRATLDDVHRFRSAGAATAYLGLVPREASSGERQRRGGITKAGPARPRSVLVQASWVIWRTARGPAAPLHAWVHRLAARRGRKIAVVALARRLARILFAIWRDDRPFTASRVSRLGVAA

SEQ ID NO: 268326 - protein, 347 aa, unidentified
MQMIGCDLHARQQTLAILDTETGVLEERVLEHTGNNVRDFYRSLPRPARVGIEATGSMHWFLEMMEELGIECRVGHPAKIRACEPRKQKHDRRDALLLLTLLSEDRFPSIWMPSLDQRDVRALLTYRHQWVRIRVRVQNALQSIALSHGLRRGRAMWSKAGLAAIRSLPLPPYSTERRDALVDLYLQLQEEIDELDKTVAECAAERERARLLMTHPGVGPITALATESILGDPARFADGKAVASYVGLIPSEFSSGGRRQILGRLTKQGSPMLRFLWCEAVGHAIRKDEQLKRFYRRKLAQKGFAKAKCAAGRKLGIRLWIMLRDNISYQEFCRRARQQTDVPCGDA

SEQ ID NO: 268327 - protein, 456 aa, unidentified
MRLDGNAIDPAVAPAVRLRVGIDAAITANHHVCLRRVDAHGAASTTRFLVPPTLAGLGLLSERLAAFPDVVAVAEPTSMTWLSLAVAVERAGGRLSLVGSRHAARLRGAISGKNKSDAIDADVLARAGEVFELTVVRLPDPAQLALRRAVTRRAAAVIDANRCLRRLISLARWAFPDVWNGFGGSLATAKAVLARWPHLEALAAARRPALTAVVAEHTRGVSDVPARVEQIRTAAGRWATFWAGRVDLDALAWDVSEQLADLAAAAARVDRAAGQATLHWERLFGEDPLLASLPGMGPVTAPTVRAFLGDGGGFPTAKAAACYVGITPSNWSSGTVTQPSRAITKEGPAALRLAFYQAANAARHVDPQLAAFYHRLMTERGHCHTSATVAVARKLVERTWTVLTEGRAYQLRDLDGKPITERAAKALIGERFTVGSDVRIRARAHSAATHRAKLTR

SEQ ID NO: 268328 - protein, 343 aa, unidentified
MQVTTIGLDIAKNVFQVHGVDAAGKTVITRQLRRGQVIGYFAKLPLCLIGMEACATAHHWARELTKIGHTVQLMPASYVKAYVKRSKHDAADAAAVCEAVTRPSMRFVPVKTIDQQAALMLHRCRDLLIRQRTQLINALRAHLAELGMIAAKGKEGVKDLAAIVTDAVKATVLPEPMRQALQALVKQLAALQQQIGELERNIHAQHRASDRSRRLETIPGIGVLGATAIAATITDPSVFKSGRECAAWIGLVPRQNSTGGKERLGGISKQGDRYLRRLLVMGATAVIRHARTHPDKHPWVTKLLAKKPYKVVAVALANKMARIAWAILAKGETYRAPALAATV

SEQ ID NO: 268329 - protein, 429 aa, unidentified
MKKQQPQQKTKRPPAEDRPENHETYLAPPPPSKGRIIGLDCHPDTFTAAVFRGSTPHDAVKLSSHPDMSLKKLLDWAAKEFTKNDLFLMEAGSNSFEIHRRLVDLGLRAAVMESCHVGKQAKTYADNDKMAAARIALVYLQGNAPCVWIPDAATCERRELLHAYSKAVADHTAAGNALKGYLNQYTVRLGSRQQPEAAKTEAWLLGQRDWTPLQRELLADHLAHLRIQSARRKSLLRLIGRQICAEPLMLRCMKLLGIGQINAFALLAIIGDVRRFEHPGKLVAYIGLNPGQRESGRGKHIKLGIGKRGRGDMRRLLVQGAHAILRSGRETPLGKWGWKLFARKGNRNIAVAAVARKLLVQVWHLLSGNPPEALETDKSLAIKLNKLAVTLGKEQRAGISLPASLTDCVNHLRERICAPSAAPPQESPA

SEQ ID NO: 268330 - protein, 344 aa, unidentified
MTIIHYIGFDIHKKVISFCEKKIDGEVVDKGLISATRSSLTTLVKSREVPWIGAMEATLFTGWIYDYLLPFAKELKVAHPEMLKAITASKKKNDASDAEKIADLLRCNLLPECYMAPSEYRDLRRILRYRNLLVREAIKMKNKTAGLLMEVGATYNKKRLYGKKYFDELLGTLDYIPDSVVDLLKITRSNLEIFTRLQKTLIAGLLADPQLNKRIELLMTIPGVGKITALTWALEVGEVQRFGRISQAVSYCGLCSAQNESAGKNKRGPISKKRNKHLQTILVEAAKLAPRWNPELAIIHERELSKGNRNRATLVVARKLVAYLLAVDKNQRKFISREVLKEAA

SEQ ID NO: 268331 - protein, 323 aa, unidentified
MIHSFHLGIDVAKAKLDCALRQPDGKIRHRVVDNTPAGFSALDVWLAKQGADAMHVCMEATGTYWEAVAEHLAARPDCRVSVINPAQIKAFGASQLIRTKTDKVDAKLIAQFCAERRPDPWVPATPAEQALRALVLRLDALQSMRIQESNRLEVARPTVRDGIVSHLKWLDEEIERVIKAIREHIDSDPSLRDKQRLLDSVPGLGERTIAVLLAFAAEPARFETARQLTAFAGLDPRQHESGSSVKGKPRLSKVGHAFLRKALYMPAMVALYRTDWGKLFRDRLAARGKPPKLVIGAMMRKLIHVAYGVLKSGKTFQPELHRA

SEQ ID NO: 268332 - protein, 369 aa, unidentified
MYDPTRIRSVGLDVHKETIAIAVADGTLPAKVLATIPNDFTTLLKSLRRLGPPETIVCCYEAGPTGYGLYRRLKAAGYTCHVVAPSMVPVKSGCRIKTDRRDAAKLAHYLRSGDLTFIHVPDEATEAIRDLERTRDDAKIAERVTRHQLSKFLLRHGRIYPKKTAWNPAHMAWIAEQVFEQPAQRQVLADYREAVELGGARVARLTAQMVTASEAWEKAPLVKALQALRGVDMVTAVTVVAEVGDFRRFATAGELMAFVGLVPSEHTTGETRRQGRITRTGNTHVRRVVVEAAWHYRRQPRMSKAIRSRNDFVSAGVRAIAWKAQKRLHERLKRLLGRNKPACQAVVAVARELVGFLWAISREEVLLAE

SEQ ID NO: 268333 - protein, 367 aa, unidentified
MKKNAYIGLDVHKETIAVAVAEDGISKEILFLGNISNAPHCISKMIRKIEDKHNILEVVYEAGPCGYGIYHQLQSMNIPCTVVSPAHIFKRPTDRIKNDRRDAIALARLARAGELTKVWVPDKRHEAMRDLVRARQVFSRDLKMSRQRILSFLLKYDRKYDKKNWTARHGLWLANQKFDHTAQQISFQNYINAMEQIKTRRGEIEQQIRDLLPEWQLGPLVEALQALRGVALIIAVNTIAEIGDLRRFSNPKQLMAFLGLIPGEHSSGATIRQRGITKTGNSGLRSLIYEAAWSYKTTPKIGAHMVLKAPDVSQAIKDIAWKAQLRLNKRYKKLVSQGKKSQVAITAVARELVGFMWAIANEVKIAA

SEQ ID NO: 268334 - protein, 348 aa, unidentified
MNFVADTYEYVIGVDTHAKTHTYAVVAASTGVLIDTETFPTTAAGMARAITWIGRRAAGERLAAVEGTSSYGATLTRALTAAGIPVCEVKPPGRQSRDGRGKTDQIDAAAAARTALGTDATALILPRADGLRSALRVLLVARRGMDTQRTADRNALTALLRTIDLGLDVRTALTNTQIDTIAAWRDRTGDDVTVAVARSEARRLATAIRHRTVALDTNQVALSTHVDELAPGIRDLSGVGPFTAAIILTAYSHRGRVRSEAAFAAMAGVSPIPASSGNTSRHRLNRHGDRQLNRAIHIIARSRMMTDATTKAYIERRTNEGKTRREIHRCLKRFIARSIYRSFTTLIT

SEQ ID NO: 268335 - protein, 477 aa, unidentified
MAHPTKGPPDLQAVPMLKYESLYVGIDVGKQRHVAGFVSTTLLERHQRFEACPALAFEQSREGFRSLMERIRSYVPLEQVSVLLEQTGHYHRTLVQYLQEFDIPVYIMPVQKRPPGILKTDKRDALSLANHLFNQLERGIQLADKTHLVRRLLTPTETALQLQGWMRHRYELVQECTRRKNKLTAICDELFPELTQVLKDPNLPTALALREHFPTPHALATAPFSALIALRAKSRPTLGQLEQLQQVASQSIGTKEMIRQRGLVLEQSQLIRELRMLQEHIEQLDTEIRRSIEQSREGKILTSIPGIGSIQAAAIIAAMGNVLNFERASRLKAYFGWAPQEERSGTSLDRVHLTHGGTRSMKQMLFLCVASAIQLDCEWARRDFRLVPKKCPYGERTQSYRGNVKVMGRIAGQMIEMVYALLKQDAEILSQLAPGKTPPDPILYDPEIHRRHRNGEYRPIKNVPCQRKVIRLAERLS

SEQ ID NO: 268336 - protein, 420 aa, unidentified
MPDDRCRLGSEDVVIGLDLASAGHQAVVLTAAGQRVTRFRIPHTRAGLEELLRRTTPAALGRAGGARVFAFEATGHLWEAVAYVLRGRGERYVVVNPLATFRVREARQLSREKTDLTDAEQIAELCRTGLVTRTQLETRPYLALRRAWGEYVRLREERARLKVLVAHQLYGLFPEFLCVWADLLQPGALAVLRTGLTPAAMAALSLTEFVAQVRAHGAGHRIWRFKLAQVHREAAQTIACPDGLAVLAREVQRAVARMDMLTAHMTAVVAEIDVMLAELEEVQYLRTIPGLGWASVAGLLAHVGAITKYQHGRQLIKLAGTNPSRRDTGQTVGRGQRMSHRGRAGLRELLYLATLSCLQHNLRIRAHYDRLIQRADRPLPKMQALGACMNKLLLYAFAVMSRREAFQLDHDWQRTAARVA

SEQ ID NO: 268337 - protein, 316 aa, unidentified
MSYDVKYIGMDVHKEAIVIAVLNESGKLVMESVIETKASSILQFLHGLRGELHVTWEEGTWAAWLYDLLQPQVQHIVVCNPRRNALLKEGSKSDKVDAGKLANLLRTGMLRPVYHGENGLRTLRELARSYQTIGKDLTRVMNRLKALYRGWGIPCTGTQVYAPRYREEWSNRIPHAGVRRRAELLYQQLDGLQGLRRTLRPELLAESRKHKAAKLLRQIPCIGPIRAARLIALIQTPHRFRSKRQLWTYSGLGIETHDSAQYRYVGGQVQRSKKPQQLRGLNQNHNHEMKEIFKSTATRASCSTGPFHDFYAALLA

SEQ ID NO: 268338 - protein, 400 aa, unidentified
MLSIGIDVSKGKSTVCGMKPGGEIVYTPFEIQHTREGMSELVSLLHNSGEEVRAVLESTGSYHCPVVAALLENGIFVSVVNSLRMKRFCSQSIRKVKTDRIDAMQIALYGLAYWQELQPTRLPEDTYRELQLLARQYYQMTSMLIKAKVDFNALCDQVLPGMQELMSDHAGRHKLSDFVLRYHHTTHILEMGETRFRKDYCKWAEKKGYRNCERMAALIFATAQNGIPVLPNAPSTQIVITEAIRVLRTVEASRDAILTQMQALAKTLPEYSLVREMPCIGDTLAPRLIAEIGDVRRFHSKRALIAYAGIDAPPYQSGKFCANNRHISKRGNRYLRKTGYEVMQSYVMHKPANDPIFTFIEKKRGEGKSGKLAMVAGLNKFLRVYYGKVTELYRSLPAIE

SEQ ID NO: 268339 - protein, 394 aa, unidentified
MILVGIDIGKNKHTFSIIDKNSGEILLSPSDFSNNLKGFLFLIQKLSSYTKSKLLIGMEDTGHYHFALLKYLLDRRYTVALINPTTTDLTRKLQGGITKNDPLDSLTICDVISSNHRNKPYRVTTLNRFDLYEQKQLTRHHHNLKEELNTYKNRLQKCIDIVFPEFNSLFHSKYGIVYMNILKIFSSAKAIANADIRSIRKCFEFKGQGKRISLSAEQLKLTAKSSIGIPSVAEEIQIRHLVSQIELLEKQLSEIDKRIEEFSLKNNSPILTIPGISHFSGTSIISELGDICNYTKASQIIKFAGVAPYHYESSQFTAHHTAITKKGSKYLRKTLYQIILPVISNNEVFYAYYTKKLNEGKGHRCAQGHCIRKLLRVIYHLLSTRQPFNSKLLV

SEQ ID NO: 268340 - protein, 411 aa, unidentified
MEKIYDICCGIDVHKKLIVACFKKGNKQEIREFGAATKDILELAEWLKAGGCQITAMESTGSYWKPLYNILEASDLKAIVVNAQHMKAVPGRKTDVKDAEWIADLVQHGLLKASFIPSKDQRELRELVTYRKSLVGERTRELNRLQKMLEGANIKLSGTVKDINGMSARNILEFLLTGKIFDEAKYDEMYANKTISHRLKASKEQIIADLNGVMSPLQRRMMKELLAHLDELNKHIENLDDEIDNFMKPDEKDAAISLQSIPGIGNTSAQAIIAVIGTDMDRFPDAAHLASWAGLCPSDNQSAAKRKSGKTRKGNALLRSTLVTCAHSATMNKSSYFSAQFARISAHRGKKRAYVAVAHSIMIAIYHMLKTGQAFEDLGADYYNQFNKERKINSYLKKLKALGWTAPVVVA

SEQ ID NO: 268341 - protein, 346 aa, unidentified
MLYAGLDLSRKRLDFHLLDREGATVEVGAAPPDADGLLGLTRRLDRHREPIRAAIESMNGARFVHDRLELAGWQVEIADAQKVKGLAPLACKTDRIDAWVLAELARRDLVPAIWLPDPLVRAERERARWRLHLVRHRSSLKQRVHAVLLTHGKPCPVSDLFGVRGRQLLARLGLPEPWQSTIEASLRLIDELDREIDNCERELHRLGADHRYVPLLLTVPGIGWVLAYTIAAEIGEVSRFASPRKLAGYTGLCPRVYQSGERDLRGPLAKQGPKYLRWALVEAATHACTAAIYRDRYQHTKARIGKQRGAKVAQIDLARRLSEAIWHMLTREQPFAPKGATDPLAA

SEQ ID NO: 268342 - protein, 349 aa, unidentified
MLTDEVDYVVGVDTHRDEHVLAIVAVPVGAVVAQRAVAANGRGYVQALRFARRHAPGARLWAVEGAGHYGAGLARYLSEQAETVLEVARVPRQERRSRGKDDQLDAARAARAALAGEPLPLPRSGQRREALRLLLVARRSAVDVRREALVQLRSVIVTAPDQLREELRGLPVQRLLDRCSRLRRSTTAKPDELATRLVLRTLARRIEAVTVEASELECEILAHVRMLAPQLLDEPGVGPIVAAQLLVAWSHRGRVRSEAAFARLAGVAPVPASSGQTKRQRLSRGGDRQLNRALHTVVLHRRQHDPATKDYIARRIGEGKSRREATRLLKRYLARHLYRVLDNQEPLMT

SEQ ID NO: 268343 - protein, 484 aa, unidentified
MKGCPSRRRVSTTPNWVALRSQPWGRTVPPPLGEERSGLLRMSCRWGRRWSRPGAEHCYWGVRTLLGLAKRLEQEVCAVVFVGIDWSEQQHEVELQAGSGKVLKRLRVSADIAGLSRLQEAITDAAEEPSQVVIGIESNHGLLVNALVASGYRVYPINPLTSARAREGEAPSRSKSDPGDAHVLANLVRTKRQDLRPLAGDSEQAQALQVRARSHLRAIRVQQRLRSQLRSTLAKFFVGALPLLGDESEDLRDALAVLSLAVSPEQGRGLSQNKIRSSLARHGRQRNLEVKAAEIQAQLRAPQLELNAPKVVSAYADEVSHLVRSLLLARSEVAQLEAQLAADFREHPDAEILLSQPGLGLVLSARVLGESGDDPTRYVNAKARKNYAGNAPVTKRSGKWKMVSRRLARNRLLADAGFLWANSALSASPGARRYYDQLRARGKTHNQASRALANRLVGILHGCLRRRCLYDEAVAWIQPLKEAA

SEQ ID NO: 268344 - protein, 358 aa, unidentified
MRRSPSHCLWPRLCENARVGIDLAKNVFQVHGVNEQGQLVWKRSLKRATWLGVFFKTVEPGCEVAMEACTGAHHWARALQARGYQVKLIPPQFVKPFVKSQKNDANDAEAISEAMSRPAMHYVAIKTVEQQDIQAVHRVRSELMSHRTAKANQIRGLVAEYGLVAPQQLGPLRAAIPCWLEDAQNDLTDRFRALLQGLWEDLANLDQRIKVLDTEVSAIAATHPDAKRLQQLRGVGPLVATALVAKFGDASHFKQGRQAAASVGLTPRHHGTGGKNRIFGITKHGDPYLRSILIHGARAVVSQAKRRDDRLSRWTTELAQRSHMNVAAVALANKTVRMAWAMLRNGTEYDPELAVAEV

SEQ ID NO: 268345 - protein, 350 aa, unidentified
MIIGVDYHPSFQTIAFFVEETGEYDEQELNHSDGQAEKFYRDLKQRGMCVRVGMESTGYARWFERLLAELGFELWIGDPAEIKAKRVRKPKTDKEDARLLRKLMLEDRFPKIWVPSPENRDLRQLLWHRHRLVQMRTRIMNQLQALAMNEGRRWKKKLWSAQGRAELEKLGLAPWASRRRKELLELLDRLNPIVEELTAAAEREARKRPDVLRLMTHPGVGALTALAYVLMLGTPERFHRGKQIGTYVGMVPSEDSSAGKQRLGHITKEGNGLLRFLLVEAAQAAVRTNPDWRRRYIHLAMRRHKSIAKVAMGRRMATRLYWMWRNRRDYSPSFEFGSYAGKLETSHGVK

SEQ ID NO: 268346 - protein, 330 aa, unidentified
MNYSHFVGLDVGKKSFDACLVSLDKELSHHTFPNTPGGIEELLHRVKQRGVEVETALFCAENMGSHVIDLCLSSYQFHFPLALECPLTIKRSIGLQRGKNDRIDARRIARYACLHYRKLRLYQLPDKDLVRLRNWMVIRDNLVKQKVSSRKLLELPRETSGLADLVTAMTFLEKQLSLVKEKISYVEQEMEKIISSNIALLTNYQLLTSIKGIGPINAIVLLCVTGNFHRFSDPRKFACYCGVAPFEHSSGTSIRGKTKTSNLANREVKVYLTRAAITAISWDPQIKAYYKRKTGEGKHKASVINAVRAKIIARCFAVIKRKTPFVTLRA

SEQ ID NO: 268347 - protein, 341 aa, unidentified
MEKLFVGIDISKDKFDVSYTKDGQNTFGHSTFLNSKSGIKKFFSKAIKILEKENLKQLHFCMEATGIYHCELCEFLQESPVHIVSVINPLKTKAFSRSLLLRTKNDKVDSSMLALYGFLHNPPQTPRLPETIKRFRNLVRYKETLTESRTQEIGRLKSSLDSEVKKLINKKILFIEKQTKEVISKIQDLVNTDEFLKKQISLLKTVDGIGDVVAWKLLSEIKFEDIENISPKAQVAHAGLSPREFSSGVSVRGRSHISRMGNSDLRKILFCPALGCIKNSNYFTSFYLRLLDNGKPKKLAVVAVMRKILLTAMGVLRNQQPFDPYWAEKAREQYINRLNIA

SEQ ID NO: 268348 - protein, 353 aa, unidentified
MSISTIGLDIAKSVFQLHGIDASGKAQLKRKLRRSELIAFFERQPRCTVVMEACGAAHHWARVPGGLGHEVKLIAPEAVRPFVKRGKKSDATDAAAICAAAARPDARFVAVKGLEQQGVLALHSARALLVKQQAMLADAMRGLAAEFGLVVPKGMGRLEELVALVEGDGTFPERARGVFAGLLGQRRATAGRIEDLEAEIVAHARGDDAARRLATVPGIGPITASLLAATVGDGIGDFKSARHFAAWLGLVPRQRPTGGRTVGGMPPTGRITKAGNREIRKLLVLGATSMVYRAEHWNSAAGARVRGLLERRPVRLATAALANKMARVAWALMARKEVYRAKGGVAAAAEAAA

SEQ ID NO: 268349 - protein, 403 aa, unidentified
MHVAATQEQAWVGVDIGKTHHWVCAVDPQGKTLLSVKVSNDEAEIRTLIARVAAIAEQLVWAVDIIGAPSALLMALLAQAGESVRYASGRVVAAMSNAYSGEGKTDAKDARVIAETVRIRSDLAVIDQDTDLIANLAVLTGHRCDLIADRVRMINRLRDLMTSVFPSLERQFDFSNCKGALVLLTGYSSPERIRRLGQTRLSAWLRQRKVRDYSGVAARAVTAARGQLTVLAGQDLAASIIAELATNILTLDERVKRLDGQIAETLDKHPQSAIIQSMPGFGPILGACLLVGAGDLRAFPSAGHLAAAAGLVPVPNDSGRRSGNLHKPKRYSRRLRHVFYLSAQTSMMRAGPNRDYYLKKREHGRTHTQAVIALARRRVDVLWALLRENRTWSATPPALAQAA

SEQ ID NO: 268350 - protein, 344 aa, unidentified
MNSTTIAVDVAKSVFEVAVSEYPGQVRERHRLSRGRFSRFLAEHPPATVVMEACGSAHHWAREAQSRGHRVILVPPHAARPYVLRNKTDRTDAKGLLEAFRNDDLRPVPVKSETQQALAGLHRLRSAWVATRTARLNTLRGVLREFGVVIPTGAHHVVPHVRALLEDAEAGVPGLLRVPLSEAIREIGELEERILAIERQLARTAEPALLIGRLRTIPGIGILTATALVAAVGDVQRFPSGRHFASYLGLTPREHSTGQRRHLGAISKQGDTYLRMLFIHGARSVLHHAKSKTAPATDRLRTWALQVERLRGHNKAAVALANKLARIAWAVWRSGNDFTAAAAV

SEQ ID NO: 268351 - protein, 341 aa, unidentified
MNYSLGIDAHKKFSFWTLIDKDGKIVFQGKIISRPEAIKEAIEKYLPPSTKAVIEPVESWPWYCQIFEEKNIEIVLAHPLEVKAIAHSKLKHDRIDSLILAQLLRSDFLPKAYLAPLKIRNLREILRLRCFLTKLRTQIKNRIHGILAKNAIFHNFSDLFGKKGIKWLKSLELREPFSKEIQTLLDLLEEINQKIKEINKTLQKIAKTDKEIEILTSIPGIGYFSALMIKAEIGDFSRFPKASRISSYAGLVPSSYSSGGKLRFGKITKKGSPYLRWIMVEAAQKVNPSWGKLYEFYQRIKLKKGTKTAKVALARKMLEIAWTLIKKKEFFKRDFKENKRP

SEQ ID NO: 268352 - protein, 337 aa, unidentified
MRDVGVDLHTNSITACFRLKSGKEKVAEYPLKNLEIFKNHLRKDDRVAVEATGNTRFFVEAIKDKVKEVKVIDPNKFNVIKSSVNKTDANDAKNIAFFLSKDMLPEARTKTQTQAQLSSMVGTRDKFVKLKTVLINKIHNILNARGIKSKKEAYSSDIGLRRVFNYDIDENAKFELEIIINQILSLNESIKKLNKKIEDVGSSFKGYSNLTSIKGIGAKSASILLSVIGNVKDFPTEDKLAAYFGIVPRVSSSNQTIHHGRITKRGSKIGRTTLVQCSLIALRYNPYLQKFYSRIQRKKGSGKAIIAVARKLLGIIYKTLMYNWTFTDFPNYKYVTV

SEQ ID NO: 268353 - protein, 410 aa, unidentified
MIKKEEYIYVGLDLHKEQHTAVIMDYMNKKLGEITFINKPSEFSKLVNKVKKYSNNKQAVYALENAYGYGRALAVWLIKKGYIVKDVNPALSYAYRKSVVQYKKNDSYDAECVAKVAINELDKLPDAIPEDKYWTLSQLVNRRANLKTHQVRLKNQLHERICVSYPSYKQFFSDIGRPTALYFWEHYPSPKYLEGAMAEELAKELIPVSHNRCSLNTCKKIIDAVKADGNTDGKYQKICDDMTVSLVKDVRHYNEQIAETEKVISEFLPEFKCTLNTIPGVNDITVANLLSEIGNIQRFPNADKLAKFAGIAPVCFSSAGKGTDKPSRQGNRKLQAIIYFLAIQMVQVSSKGTPRNSSFYAYFQKQLKRGKSKPQALILISRRLINIIYGMLKNKTEYVMPEVKETGEIK

SEQ ID NO: 268354 - protein, 320 aa, unidentified
MQTPSVVLNIGADVAKDEIVVACSEGSFPVRRIANQRAAVTAFLKGLPKGSRIGLESTGIYHELLAEAAHKLGFVVFVLNPKDARHYAKGVGLRGKTDRVDAELIARMIAHEHTKLHVWIPPTPEQREMGRLLKRRAKLSSLRQALAMSLSGLDGFGADLKALRARFDLVIARIDQRIKTLVEASPDRKEHVTHLRTIYGVGPVVSAALVNILERVPLNSADAFVAFTGLDPRPDESGKHRGKRRLSKRGPADLRRLLYLAAMSAIKTQAWKPLYEHYRAKGLSSTATFVILARRIARTAWSMYTYKTEFDPTRLTKTLT

SEQ ID NO: 268355 - protein, 370 aa, unidentified
MLNTTTFVGLDVHARSIKAVALDAMTGEVRSATFGYDAAEVAGWVSSVDPSAKCVYESGATGFDLQKRLASMGIDCVVGAVSKMIKPPADRKRKNDRNDAEFLARMLSVGNVVEVWVPDDGCEAARDLSRALDDAREDLKRCKQRLSKFLLRHGYVFSETTPTGRRKGNWTAAHWAWIKSISFPEKADDDVLAYYVDAARQAMEDKARLERLVEAEASKPRWKKRIDSIRCLKGIDVTSAAGLVFEAGEFSRFKSARSFAAWLGLTPSEHSSGESVRQGGITKAGNKHLRRVLVESAWHYLGCSPHSKDLAKGQVPDPAARRHAAKGVRRLVERRRAMLERGVHKNKANVATARELACWCWAVGRMIENG

SEQ ID NO: 268356 - protein, 296 aa, unidentified
MAELAEIQCVLGLDVSCNTVTLFDSCTGRCLTIANEADALRTALQPYQGTATLAVCEATGGHEDTLLCVLLELAIPAHRADPAKVNAYIKSFGKRAKNDPIDARWLSRYGRDRAAMLLRWQPANPTQQKLELLVARRLDLVAMRVQEQNRLKAPRSSLIGESRDLTLRAKSLRSVPGIGPVLVPLLLAVMPELGTLNRRQVASLAGVAPHPKDSGKASWHRSTTGGRRQIRPALFIAALAACRGNSPIATAYKALLKAAKPKRVALTAIMRKIITIANARVRDALQQQKQIMPVPA

SEQ ID NO: 268357 - protein, 338 aa, unidentified
MSIVMGLDQHRAQITAEWLDTDSGELHRRRVSPADRAGVRAFATRFAGQELDVALEATTGWRFAAEELAAAGARVHLAEPAEAAALRGTKRRAKTDRADAKHLRELLGTGRLPESWIPPEHLLELRARVRLRHTLVDQRREWQQRMQAVLYHHGVPARAWLLGVESRKWLAGLDLAPDAREQLTTALALIDAIETQLVPLDARLRDYAKRQPGCRALMHHFGIGPLTSVTIVAELGDARRFSNSGQAVRFAGLDITVHQSDARRSPGRLSRQGPAALRWALFEAAQCARRPASPDHDYYLQTAARLGGNRACLAVARKLLKRSFHTLRELGDEAISPV

SEQ ID NO: 268358 - protein, 402 aa, unidentified
MNCVGIDVSKGKSTIAVMRPFGEVVVSPFEVCHTASELSELARLLKSLDGETRVVMESTGNYHAPVAWLLHGAGLYVSVVNAMLVHDYGNNSLRRGKTDKKDAVKLANYGLDHWLTLPRYVPEEDARLMLKTCYRQYQQYSKVQTMLKNNLISLLDTAFPDANRLFTSPPRADGSEKWVDFVAAFWHCECVCGLSKKAFTTKYQKWCRKHGYNFSEDKALDIYVSACGRFGVMPKTKTAKLLVEQAISQLQATSAALAALKQEMQSLAASLPEYPVVMGMFGVGPTLGPQLIAEIGDVRRFHSKKALVAFAGIDAPPYQSGQIDVRSRSISKRGSASLRRTLFLVMGVLLQCAPMDEPVYQFMNKKRSEGKPYRVYMMASANKFLRIYYASVKNYLDSLEHN

SEQ ID NO: 268359 - protein, 365 aa, unidentified
METLHRRCAGLDVHQKEIVACRRIVSGRKAGSELGRFPTTTPGLLALSAWLAEARVTHVAMEATGVYWKPVWHVLCQDFKLLLANASHIRNVPGRKSDANDATWIADLLAHGLIRASFVPPQPIQDLRDLTRTRRELTREVVRHTQRIQATLEEANIKLTSVISDILGLSGRRILKAIVAGENDPRQLVELAHPRLACAREDLAAALQGRLRDHHRFLIGQHLKTIEQIEATIAEFDIRLEAALSPFRGAVERLTDIPGVGDNVAQTLMAEIGADMSAFPTADHLVSWAGLCPRLDESAGRKRSKRLRKGAPWLKPVLVQSALAATKVKTSSVCARDTSVSSLASATRRRSSPSPPQCCASPTTC

SEQ ID NO: 268360 - protein, 476 aa, unidentified
MSKGSGSGMTRGDRRRNARRERLRAMLPREGAVVGIDLAEDKQAIAVVDHDVRVLARKTVRVKAFRLGEALDWAVAQARAKGFAQVAVACEPTGPRWLQVQRLCAERGLPLVCIQPLVSHIAREQQDYTTHKSDESDCVMIARLAIELHCYVPEELDEAWAQLRHLGRRRAQLITAATASVQRIRDFLSVAWPVVTETCAYPLESTTWLAALQVVTSRCGGQPGRLAEMGPEAFTAAVRDAQRGWGGQKAWGPICRRVFAALTDTEGVVVSCRRGLLRRVADELGDLQRTRVQLRAVEADMVAVLAELGLARLADIPGLSAVGAAAILAETGDPRRYDSSSSLVKHAGLSPAENASGAMAGQAHISRRGRPGLRLAVWRVVWPMLQYNPVMAAKYAAMTRAAGAAADAAAAADAGSRQVSAAAAAARARRAKARVACAASLLRWIYSMTVHDTSWDAAIASGDACQHVPRRPAEAA

SEQ ID NO: 268361 - protein, 343 aa, unidentified
MNTTTVGLDLAKSVFHVVCFNKQFKEVKKRMLRRSQVLQFFTQLPSCLVAMEACASSHYWGRELRALGHDVKLIPPQHVKPYLRGNKNDYNDARAIAEASTRPSMPFVAIKTTEEQDMQAIHRMRSQCIRDRTALSNSTRGLLGEFGIALPKGLATLRKSLHGILEDADNGLSDRFRNMLARRYHQFVELDEHIAFYTNELEILSQQDDACQRLQTIPGFGPIVSSAFRSVIGDGRAYGRGRDASASLGLVPRQHSSGGKNVLLGISKRGDRYLRSQLVHGARAVVIQAARKDDPLSKWINRVREERGWNKAVVATANKMARIGWAILRHNTIYQPASEQSIH

SEQ ID NO: 268362 - protein, 345 aa, unidentified
MHTTIIGVDLAKDVIQVCVVKHNKVLSNEEMIPSEFISWLANHPRAMVVFEACAMSNYWKRRAAELGHDARLISAKLVAQIRQNQKTDKNDALAVAQASQLVDVNFINGKSFQQQELQSIGKMRALAVRQKVALDNQIRALLLEFNIRISTRNGGLKGVVQQVLEDAENGFSDYFRKALHESWLALLATIERINTYEKQLEKVMEIHPDCQKLMALEGVSTINALHLYTLLSCNEESTFKTARDASACVGVTPIQYSSGGKVKLGSIGKHVKNTLVRSHLISGAMTVVSQVCRRDPKTTKEKWLKELIERRGKKCAAVALANKTVRTAFAMLRDGTEYHAQALEA

SEQ ID NO: 268363 - protein, 448 aa, unidentified
MRARKVPRARKLKLPKHLQHINAHAAGIDVGCRSHFVAVPEGSCEQPVREFSSFTDDLYRMADWLLSCGVSTVAMESTGIYWIPVFEILESRGFEVRLVNARHVKNVPGRKSDVLDCQWLQQLHSYGLLAGAFRPNEQVCALRAYVRQRMNLVRYASSHIQHMQKALLQMNLQLSNVVSDISGVTGMRIIGAIIAGERNPKALARLRDPRCKRNESTIARSLHGNFRPEHLFSLKQAVELYEFYQSQIAECDREILAQLAGFDATDASGNGPPASVDEALQRMSGVDLTGIDGIDTTSAVKIIAEVGTDMSRWKSAKHFASWLGLCPGTKISGGKLLSAKSKPVANRAAATLRMAAFTLLRSKSALGAYLRRQRSRLGAPKAITATAHKMARLVYSMLKHGSAYVDLGQNYYEERYRDRTIKSLKRKAQTFGYLLVKEAETQPQPLLP

SEQ ID NO: 268364 - protein, 378 aa, unidentified
MSEITRSTMSAIVRVGVDLAKQVIQVHGVDRAGRRVVGRTLKRDQFCAWAAQLPPGCVLAMEACSSGHHWARRLRAMGLDARLIAAHLVSPYRMEGKSGKNDATDAAAICEAASRPSMRFVPIKNCEQQGVMSLHRTREGFKEERTACINRIRGVLAEFGLVFGKSPKVLRARLADVIEDASNELSTTARLVVQRAFEHWRELDEHMRWCDSQVGQHVRGSAQAKRAAKITGIGELGASAMVAGVGEFKQFRSGAQFGAWLGIVPSQNSSGGRASLGRITKRGDDYLRTLLIQGAKSAVMSAGKRDDPTSRWLVQLTARVGWQKACVAMANKNARILWAVMTREQGFEPQHVSVKPQAKVPLKERTVAPAQSAVTCPA

SEQ ID NO: 268365 - protein, 347 aa, unidentified
MAHFVGLDVSVKETSVCVVDDTGKVILEQKVPTEPADIITLLSSLGVSYGRIGIEAGPLSQWLVNALTVAELPVICVETRHMKALLTAQQINKTDRNDARGIAQMMRVGLFKPVHVKTLVAQEQRMLLTSRKLLQRKLLDLESDLRGTLRNFGLKVGVVSGGRYEVRVRELIAGFPRLAAIAEPLLKVRQVMRQQLAVLHKMLLDTVRDDPVCRRLMTAPGVGAVVALTYRATVDQPQRFVHSRAVGAHVGLTPKRYQSGEIDYDGGVSKCGDALLRTMLYEAAQVLLTRGSKWSWLKAWGVRVAQRRGMRRAIVAVARRLAVVLHRMWVDGSEFRWRRDGAVPAVA

SEQ ID NO: 268366 - protein, 309 aa, unidentified
MDSFVGIDVAKDKLDVHVRPGDEAFAVARDGKGLADLVERLRAQAPTLIVLEATGGFERTVAAALAAAQLPLVVVNPRQIRDFARATGRLAKTDALDAAVIAQFADAIRPEPRPVLDEEAQALDEMVSRRRQLIDMIVAETNRQKAMSNKRIAREIGRHILYLQTLLTDLDKDIDDAIRSSPVWREKEELLTSVPGVAQKTARVLIAELPELGRLDRRRIASLVGVAPMNRDSGSMRGKRRVQGGRATVRSALYMAAVAAVRWNPVLRETYQRLRQTGKPPKVALIAVLRRLLVILNAILRDQTPWRTA

SEQ ID NO: 268367 - protein, 391 aa, unidentified
MVCVGIDVAKDKHDCCILDSDGTIRADCITIPNNMDGFKQLLQTIRDCTKKSDKIKVGLEATGHYSYNILGFLLDNDLAVYVMNPLHTNLYRKSLSLRKTKTDRVDARTIATMLLSDVDLKSYTDTAYHNEELKSLTRYRFDKVRERAKLKQSVSRLVTILFPELEKLVPSLHIASVYALLSEYPGAKQISEIHLTKLTNLLATASKGRYGKDKAIQIRDAARTSIGSVMPAKFLELKHTIKLIRELTSEIDEIEVSIQKIMDELNPPILSIPGVGIQSAAMILAEIGDFSNFESPDKILAYAGCSPSTYQSGKLTNCYAHMEKRGSRYLRYALYNATKYVCHWNPVFVEYLAKKRAEGKHYNVALSHATKKLVRLIYALQKSGKAYLVAA

SEQ ID NO: 268368 - protein, 347 aa, unidentified
MTDVITTVSAIGIDLGDRDAYYVCLDEGGEKVEEGRVAMTRVAFERTFGSFEPTRIAIEAGAQSRWVAKLLRELGHEVIFANPRQVSLISANTSKNDPNDAELLARLARVDPSLLSPLEHRGDTEQRVLLAIRARAQLVKSRTALMHSARGMLKSFGIRLPQCDSEDFVERARQAVPAELLSQLEGLYRIIGEVTKEILKYDELVEETARTQYPAVQRLREVPGVGTLTALTFVTTLGDPGRFAKSRDAGAFLGLRPRQRQSGGQNPQLNITKAGDIYLRTLLVQSAHCVLRQHAPDTALKRWGLKLCERGGANAKKRAVVAVARKLAVLLHKLWVSGESFRPFPAR

SEQ ID NO: 268369 - protein, 401 aa, unidentified
MKRIKRIIAVGIDVSKDKLDVSIYDGKNHITKVYTNKEEGIENLIRDSKEASKKIIDSELHFVMEATGTYHTKVLFTLTNNNYPVYVLNPLISKRYSEEQLRRTSTDKIASKLLAEYAYSSISSHLLGIQNERYNILVSSKFDKSNEDRLNLKILLRTLEGLKKTKTRILNQLEALNQYPDQLGIDAIKSLKSILEEIDKEIKNLENKISEIVKKEENRNLYEKLKTIPGIGDRAASAIIAYFGSFSSFDSPKQAPSYAGLTPLIKKSGKSVGAKEIYHISKIGSPYLRQILFMASLSAARYNDQCHILYERLLKEGKAKKLIYVAISCKLLRQTFGIIKNGRVYDPNFGLMDVEKGNNSNNNNDNESIKDNKVNIPFPKNPCLYNPLINKQGTSRCVTGF

SEQ ID NO: 268370 - protein, 355 aa, unidentified
MNVKKYIGMDVHQETISIAVMTGAGKLVMESIVETKASTILQFVQGLHGDLHVTFEEGTWAAWLYDLLKPHVTELVVCDPRKNALLKEGNKSDKIDARKLADLLRGGYLRAVYHGENGLRTLKELARSYLTISQDLTRVMNRVKALYRSWGIACGGQRVYAPRHRAEWLNKIGEPGVRRRAEFFYQQLDAVRALRQVVRRDLLAESRKHGATKLLRQIPYIGPIRAALLIALIQTPHRFRTKRQLWTYSGLAIETRDSAQYRYVAGQLQRSKKPQQLRGLNENHNHDMKAIFKSAAAMASRREGPFQDFYLELLPKGMKPAMARLTLARKIAAITLILWKKGAHFDAEQLKPQAA

SEQ ID NO: 268371 - protein, 388 aa, unidentified
MLLDHPSDGPAAIRTQIGAIFVSLELSRSTWLVTSLSPGKGEKMSKHSVKAGDLAALLKLLAELKCKAQARTGEGYPIITIQEAGLDGFWLHRALQQEGIESHVVDPASIATPRRRRRAKTDRLDGETLLRTLLAYKRGEVRVCAMVVAPSPEEEDRRRLSRERRTLIAERIEHVNRIKGLLFAQGIFDYVPLRRDRRKRLEALRTGDGRALLPHLQAQISRELDRLELLLNQIAAVEREQDALLTASRPASEKTASDPVTLLLNLKSMGPNFAAVLWSEAFWRQFANRRQVAAYAGLAATPWRSGGIEREQGVSKAGNPRLRTTMIQLAWLWVRHQPQSALTQWFKAHSQRGRKRTIVALARKLLVALWKYVTAGVVIEGAVMKPIA

SEQ ID NO: 268372 - protein, 410 aa, unidentified
MHTVVERCCGLDIHQASVVACILIQEGRTARKEIRTFSTMTRDLEALRDWLMAQGVTHVAMESPGVYWKPVHAILYGSCELIVANAHHIRHVPGRKTDVKDAEWIAELVRHGLITASFVPPPAIAELRDLTRYRRKVVGSQATERNRTLKLLESANVKLSAVATDVFGVSGMAMLKALIAGDAAPADMADPAKGRLRRKLGPLAQALDGRLTETHRFLLKLQVNRLAEMERDILALDQLIAEKAKPYGRQVGLLIRIPGVDRQIALVIIAEIGVDLSHWPTAQKLAAWAGVCPGNHESARKARSGRTRQGNLYLKSALFLAATTAARTRGSYLKDKYHRLKARRGAKRAGMAIAHKILIAAYHMLTEGTDYVELGEAYLDKLAEKRITRGLVRRLSNLGYKVTLEQQQAA

SEQ ID NO: 268373 - protein, 423 aa, unidentified
MPATFSLSRTNDVERVMTAVMIGVDPHKGSHTAVVIGPAEEPLGELRVRASAGQAEKLVAWAAGWPDRTWAVEGAAGLGRLLAQQLVAAGERVLDVQPKLASRVRLLQAGDTNKNDPNDALSVAVAALRSKTARPVMAEDYPAVLKVWSKRHRDLARLRNQVVCRLHAVLCDLVPGGISKEISAAQAARILDQTSPSGAVELARAELAAEFLQDLRHLDAQLRGTRSKLTAAVKASGTTLTEVSGVGPVIAGTIIGDIADVSRFPGRDHFAAYNGTAPVEVSSGNRKARRLSLRGNRRINHAIHMAAITQIRHKHSDGRAYYDKKLAEGKTHKEALRSLKRRISDAIFARLLADARRAGQRPAQRAREGNGGTTLTPARPAHTPNAGSSDKPLPDLDTTIRPGTRAATPSPSKPASKETRTTT

SEQ ID NO: 268374 - protein, 439 aa, unidentified
MPQIWAGIDAGKGHHHCVVIDADGAKLHSARVANDEAALLELIATVTDLAGGDECLWAIDLSSGGAALILGLLAAHALPVVYIPPHAVHHAAKAYRGDGKTDAKDAAIIADQARMRRDLQVLTVEDETRIELRALTAHRKDLVCDRTRAINRLRGHLLEYFPALERAFNYSASRASLLLLTGYATPDAIRKMGESRLARWLRTQGCRTAVATAAAAVTAAKSQQSVLPGQAIAAELARRLALDVIALESRIAGIDQLIAARVESSRAAELLRSMPGFGPLLAAEFLASTGADLSVYVSADRLAGVAGLAPAPRDSGKISSNHHRPRRYDRRLLRACYLAAMVSVQQKTESRGFYDRKRAEGKSHKQAILALERRRLNVIWAMFRDDRPYDPPSLSDGAFEESAAPSLAPKARQTVAATAALAVDHMGLGLVVASYAARE

SEQ ID NO: 268375 - protein, 317 aa, unidentified
MTESVRVNVGIDVSKDFLDVHVGDVALRRVPNRSSGLSVLKRILSRYTVSLVLLESSGGYENLAVTYFQSLGYDVCVINPRQARDFARSMGRLAKTDKIDAQMLCRLADVVDASPERARFVKPLTDERRQRLVSMVRRRRQLCDLMIAERNRRAKTDAYGSESISTVLDFLTDEVARIDRDIAAHVGSCFSDISSLLQSFTGIGPVTASTLLGELPELGKLNRRQITALVGVAPFNRDSGYMRGRRRISGGRSGVRNVLFMAALSAVRFNPVLKAFFARLVSAGKPKKVALVACMRRMVCILNAMLRDGSRFEVAVR

SEQ ID NO: 268376 - protein, 387 aa, unidentified
MTVRTVNNLPAATHGETVRCLFAIELSKQSWVIGFNTPLSEKISRRTLSGCDWKGLLELIEDVRARVSREMGRAVAVMSCYEAGYDGFWLHRQLEAHGVRNYVIDPASLQVDRRARRVKTDRIDAERLLRSLMAYLRGEPKVWSVVRVPSVAEEDARRLHRERDRLVLERVQHVNRIKGLCALHGIYDYHPLRPQATARLEQLRTAQGGELPPRLKSEIKRELHRLELVVEMIATLETQRDAIVEDEASTHLNAEKIQNLHKLKAIGPEFAAVLVGEIFHRSFDNRRQLASYVGVTPSPFQSGSMAHEGGISKAGNRKGRTTGIELAWLWLRYQPDSDLSIWFRARVGIMKGRIRRIAIVALTRKLLVALWRYLETGLVPRGAVLKG

SEQ ID NO: 268377 - protein, 437 aa, unidentified
MKTLPVLDDRATGIDVGSEKLHVSIAGDTPRVFGTMTQDVSTLIDWLRDQGVRSVAMEATGVYWLYLYGALEAAGITVLVVNGRQVRNLPGRKTDMADCQWLATLHAHGLLHSGFVPPAEIRQLQDYLRLRQDHITLAASHVQHMQKALERMNVKFHAVISDLTGVSGLKVIDAILAGRRDPADLLTLCDAQIRKHKGDRVKESLRGMWKDEHLFALRQALQSWQHYQSQISECDRAIEQVLRALSGPPRDDDPASPAKPGGTHTPKIDGLHRMLLQLCGGNDPTQLPGLADYSLLLVIGEVGTDLSRWPTAKHFTAWTGLAPGSHQSGKRRSQQSRHRNRTGQLFCTMARSLANSVDKALGGFYRRLKARRGGLIANKALARKLAALFWQTMVKGSDYVEHGLRYYQTRTAQSEQRVLRKLAQKPGLDLVPAKTMG

SEQ ID NO: 268378 - protein, 375 aa, unidentified
MSKVRFIGLDVHADTIAASVAEPDGEVRPLGIIPNRLESVRKMVAKLGPVNQLKACYEAGPTGYVLYWQLTGLGVPCEVVAPSLVPVKAGDRVKTDRRDATKLARSFRAGDLTPVWVPDAAHEALRDLVRAREDAKQDQHRARHRLSKFLLRHGRRPPEDVKKNWTQKYLTWIKEQVHFDQPALEATLLDYVREVDHMAERIERLEKSIDEAIQKAPPEMRAVIEALQALRGVAKITAVSIVAEVGSLSRFEKPRQLMGYSGLVPSEFSSGNRIQRGGITKTGNAHLRRVIVEAAWAYQHRPWVGGVLLKRQQGLDPEIKEIAWKAQWRLHTRYKKLSARGKNKNQIVTAVGRELLGFIWAIAVRTEARGKARAA

SEQ ID NO: 268379 - protein, 341 aa, unidentified
MSIVGAFDVHRRQLTFEYLDTVTGELKRGRVMPADRPHLRAWLPRFAGQEDVQFALEGCTGWRYVVEELHAAGITPHLAEPADTAALRGKKRHAKTDKTDTRHLRVHLMAGDLPGCWIPPEQVLEARAVVRLYKDLLDERGAWHQRVAATLFHQGVPAAVSAAKPEGRAAAEQAFLSPAGRQAVETGLRQIDRLTAELEPLRRQLDMLSRRQPGCRALRAAHFGIGAVTSVAIWAELGDVRRFANSDDVVRHTGLDITVYSSDGKRSAGHLSRQGPELLRWALYEAAKCAARPAAPDYGYYTAARDDRGGGRATLSVARKLARRCYHTLRELGEDALAPAA

SEQ ID NO: 268380 - protein, 422 aa, unidentified
MHPEQAEQPIPYEWFVGIDWGSQQHQVCILDRDRRLVGERTVDHDGASLAQLAAWLWTVSAGHPQRVSVAIEVPRGAMVEGLVERGFHVFAMNPKQLDRFRDRHSVAGAKDDRRDAFVLADAVRTDQPSFRRLQLEAPQLLRLRELSRAEETLLEDFRRSANRFRDQLHRFYPQMLELCSAADEPWLWDLIDLAPTPAHVALLSEEQVQHVLKAHRIRRVTATEVLTCLQALALPVAPGAAEAAQAHCQFLLPCLRVLAEQLQACSQQVSALLHTLAEEPGDGEGPSDVALVLSLPGVGRKITAWLFAEAAQPLAERDYQVLRTHSGVAPVTKQSGKRRLVVMRRGCNPRLRHALYHMARVAMQRDAHFSSVYTALRAKGQRHGQALRSIGNRLLRILMAMLRNGTCYDASRIRRESVVQMG

SEQ ID NO: 268381 - protein, 357 aa, unidentified
MNRDKYVGMDVDQSTCVIVIEDKAGNFVMETYLPTKASDLRTFFKGLEGRIHVGFEEGTQAAWLYELIEPLVEEVVVCDRRGEKVRGNKGDRVDAYKLVRQLRQGELRRVYQGERGHRELKELIRGYDYLIQDIVRIKSRLKAAFRSRGISCAGQAVYRKAECEDWLRKIDVDSLRARVSSLYEQLECLTKLRKKAKDAMITGAKKHPSYKLLVKQPGLGAVRSAQILGIVGTPHRFRTKRQFWPYCGLGVVVHESSEYEIVDGQRRRRKRAVRTRGLNKNFNRTLKMVFKGAAKTVIAREPFKQYYQRLIDKNIRPEMAKLTVARKISAITLAILKSREEFDPIRVNQAVSDSGDQ

SEQ ID NO: 268382 - protein, 283 aa, unidentified
MPRKFDTAVVTIGIDPGKNTLHLVGLDARGEIVLREKVARTKIVSRLANVPPCLIGIEAGMGTHYVTRELLALDHDVRQVPPVYAKPFRQTHKNDFRDAHAVAEAVQRLQALHRVRYRLVGERTAIINQMRCFLLEHGLTVRQQLHWLRHALPDILAQRTDVLSPRMVRILEDLAQDWRRLDDRIEAVSGEIEALAQTTESCRHLMTIPGIGPIISSAVVAAIGNGIAFTRGRDFAAWLGLVPKQISTGDRTILGRITNAAIATFACSSCRPLASFCCDQGTG

SEQ ID NO: 268383 - protein, 342 aa, unidentified
MYYLGIDHHKRFSQVAVMDEKGKVHINCRMANEKVSFQMLKKRLNNHEPLRAVIEAGRNWGMMYDLLEEVGIDTKVAHPLKVRAIADAKIKYDSIDARTLAHLLRANLIPEVHVPPKEIREQKNLLRHRFWLVKLQTMIKNRIYQLIDRNHIETPNVTNLFGKTGRRFLNDLNLSGIDQKLLKDHLEILDEIHRHIKKTEAWIDEMLKDNPLIAILDTLPGFGKIFSALAALEIDDMNRFPTKAKFASYCCLIPSTFASGGKVYHGDLIPTGNRWLKYIFIEASWSALRSSPYCRGYFNRIKQRKGTNTAIVALARRLSEIAYKCLKEKRCYEERPYMPYSR

SEQ ID NO: 268384 - protein, 358 aa, unidentified
MQYRTSIGLDVHARSVAACALDHLTGEVVERMFIEPAPQDIVDWASQFEAPMRAVYETGPTGFVLARALNEGGLECVVAATSRMLRPSGERVKTDRRDARFLARMLSTNNIPPVHIPDAGQEAAKDLVRQREDARETLTRAKLRMSHFLLRKGHVWGKGRKSWSAAYVRWLSGLRFETELDKAVFDEFRADVTYHADRRDRIQRVIESEAKKEPWARTVDRLALLKGVSAYTAFAIAVEVGDFERFPSAKAFQAYLGLNVSEHSSGESSSRGGITLTGNALVRKLLVEAAWTYMRQRTFRSDCAAEGVPAQVVEHARKGCLRLRRRAEHLQRRGKKGCVVNVAVARELAGWVWALATM

SEQ ID NO: 268385 - protein, 410 aa, unidentified
MSQLYVGIDVSSKSNVAYLMKPDGSKHSTFLVRNSLDGSRQLVKRIHNAITSDSLTDVIIGLESTSVYGDNLVCFLREDGTLTPYNKKIHVLNPKQVAKFKLAYNDLPKNDYVDAFVIADCLRFGRINKEVYLDDYRYKALQNLTRARFFAVQNLTKEKQRFLNYLFKKYSTLAQEKVFFDTFSTTALAVYEEFDSAETLAEMDLQQLTVFIKEKGKNRFPDPDAVAKAIQKAARSSYRLPKTVNDSVNQVLSISISSMRAMEQQFKAFDKAIADQMELIPNTLTSIKGIGPVYSAGIIAEIGDINRFPNQASLAKYAGLAWQQRQSGDFESQNTRMIKSGNRYLKYYLGEAAMSLVRCDADYSRFYHLKYNEVNKYQHKRALALTARKLVRLVFRLLKDNCLYRAPESK

SEQ ID NO: 268386 - protein, 445 aa, unidentified
MTNTMPAAKSEPEWAAFVAFDWADQKHYWKLVPAGSQQQEQGELQNTPEAVETWAAGLQQRFRGRPIAVCLEQARGALVYMLTKYSHLVLFPVHPTTAARYRETFCTSGAKDDPNDTGFLLDLLLRHRERLRPLQPDTVETRLLQFLVEERRRTVNERTRQSNRLTDCLKQYFPQILLWFDGVDSPLVGDLLERWPSLDTLRRAHPGTLRQFLQKHNCRSAERNQERIDAIYAAVPATNDAAVLEAGTLTARGLVALLRTLRDNIAGLDRRIEQLVLAHPDGELFASLPGAGAVLVPRLIVAMGTRRERYDSAFEVQCYSGIAPVKESSGKTSWVHFRRTCPTFLRQTFHEFALHSIGQSEWAKAYYQHLREDQNKTHHAAVRSVAYKWIRIIFRCWKDGKPYDEEIYLQSLRRRGSLIVGALGLPTGAGWQTVAGFQKLSENNA

SEQ ID NO: 268387 - protein, 354 aa, unidentified
MAQASTLFVGLDVHKETIAVAYAADDREAEVVAFGTIGTRQCDIDKLIRKLQAKGKSLHFVYEAGPCGYWLYRYLTKKKLTCWVVAPSCIPKKASDRVKTDRRDALQLARLLRSGDLTPVYIPSVEDEAIRDVVRAREDALKEGKTAKVRLKAFLLRQDLRYEGRANWGPAHLRWLANVVCPTPAQQIVFQEYVRAVSEQTERLQRLEAELPALVQSWRWAPVVAASQALRGVQVLAAVTLIAELGDLTRFDQPRQLRSYLGLTPSEHTSGERRRQGRITKTGNSHARRVLVEGAWAYRYPAKVSRHLQLRLEKVPKAIQDLSWQAQGRLWKRYRRLVTRGKQVHQVVVARVCS

SEQ ID NO: 268388 - protein, 339 aa, unidentified
MRLYASFDLHSSNSYLGIIDEDGKRVFKKKLSNNRDIILSTLAPYKDNIAGIVVESTYNWYWLVDILMEEDYKVHLANTTKIQKYSGLKYADDQHDAFWLAEMLRLGILPEGYIYPKEDRPIRDLLRKRSHLVRLRTSLILSLQNILSRNNGVKLKANAVKTLTIDHVSPYLAGNEDLALAGKVSKDSIDFFTLQIKSLESIVGDRVALQEPYSKLLTEPGIGKILGLTIMLETGPINRFSDVGNFVSYCRKVSTAWISNEKQKGKGNRKCGNKYLAWAFSEAAELARRFDTDARTYYNCKAQKTNRMVAHNALAHKLARAAYYIMRDGVPFVPEKCFG

SEQ ID NO: 268389 - protein, 363 aa, unidentified
MTKIKQISEKKEKIDFSGQTINLGIDVHKKNWNVSVYLNQLFIRTFHQVSEGQVLLTHLKTNYPGATYKACYEAGFSGFSIQRELSDLGINCSVVNAADIPQTNKGMLSKTDTIDSRRIGEAFAKDMLNPIYVPAPEIEADRNLIRYRKRVQENLKAKRQSLKSCLSILGIKIPIQYDKPYWTNNFINWLKFLEIKNQSIKITINFLIDDVMLLRKRLFEINKDIRMLSQSDKYKDSYIILTSSPGIGLITAMTLITEIGDINRFSNFNKFNSFIGFCPSEYSSGECVYKGKMTTRGHKTLRALLLEAAWVAMRCDPALSLKYHDLIKTKTGKRAIIIIARKLLSKIFTIWKSKSQYKNGILK

SEQ ID NO: 268390 - protein, 430 aa, unidentified
MTKPQLTPTQGILVAIDIGKTRNEVLIEIPGQARRRRLTVLNTRADYDRLIDLLSGLGQPVTCAFEATGNYHRPLAWRLLQAGFTVRLISSLALARTREALHNGWDKNDPKDAQVALHMLRIGASQHYHDPLAAGLNDIQEVSKTHEAISKAKTEVLHRILTHHLPLYFPEIGRFRHNSRSDWFFAFLDRFPTPGSITALSKEAFIAAAWGVVGRKVAKERLLGDIYETARASIGLPIPIDAPAVRLFRLVIAEVRSLIEQRNALEAMAIELLHESPDYKLLCRIPGVGPITALTILAEAGDLRRFGHHRQFLKFCGLDLATHQSGAFRGQTKLSKYGNARLRRALWLAGQVAIRQKENSFRDKFERTIARDRHKADLRRKALTAITAKMARVVHAIIKSGADYRPFVEGPVPGGRTSLSMGREGATATL

SEQ ID NO: 268391 - protein, 338 aa, unidentified
MQIKHFFGIDVSKNTLDLTVLDIQGNLIAYEHLANDLKSIKKCFLGVLKRHQILMEDCLFCLEYTGIYNLPLVQWLTNLKAHIWLESGSQILKSQGIVRGKSDKVDSLRIAKYAFLNRNEVRLWKAPREIIQHLASLMSLRSRFIKNKKQLEVPVKELNGFLNKETIRSINKHNKAPLNAIKLQIDKIEKEILEVIKSDERIHQLYKIITSVDGVGLVTATQIIITTNEFINITEGRKYACYSGVVPFEHRSGTSIRGKNRVSHMANKKIKTLLHLAAISAIRVKGDIQDYYLRKVAEGKHKMSVLNAVRNKIILRIFACVTQERMFEKKINFCLEKP

SEQ ID NO: 268392 - protein, 391 aa, unidentified
MSMYFAGIDISKYKHDCCIIAAADQSIVAKFTFKNNKEGFDQLLTTINSLSSPEDIRIGFESTSHYALNLELFLENASLTFMEANPVLISEYKKSTTLRRTKTDSVDCESIARWLMTVEYKPHSKGFYHAYSLKSLTRLRDRLVRQRSLYLVKLTNVLDHTFPEFKPFFNEHFSKTALYLLENYGSAENMSAMNETDYNEIRRISHGKFSPQQFLELKRFATDTVGINNSIFDVELESLLSLYKSLAKEINTLESEIIRLINEVHPHFMTIPGIGPISAAVIYAEYGDISNFSSPAQMLAFAGIEPSVNDSGTESHGGKMVRHGSSSLRYILLNCCLPLIRFDMTFATYYAKKRHEGKPHRVAITHVAKKLLRVIFALEKQNIDFNSQKLR

SEQ ID NO: 268393 - protein, 482 aa, unidentified
MKSKTAKQSERPQRLTHRRRKELARRIWSDKPGLDVVHRDAAGIDIGSREHYVAVGPDRDAEPVRVFGCFTTDLRRMGEWLTKCGIKTVVLQSTGVYWIPVYDVLEQYGLEVWLVNAQDTKNLPGRKSDVQESQWLLKLHTYGLLRRSFRPTPEIRGLRTCWRERGEYVQQAGSCIQRMQKALTEMNIQLATVLSDLSGETGLRIVRSMVAGERDGKRLAEFRDPRVKASKETIAKSLEGTWLPEQLAVLQRQLGDWDHIQGQIAACDADLQALLKQLPSAEVKPQQSSAATAAPAGKRQRKKNGKSSKNEPNFNLQAELQRVTGVDLSRIDGIKAMTIMTVISEAGLDMSKWASEDHYVSWIGLSPRNDVSGGKVLKTKTRKVKSRLATALRIAATGLRASDSYLGAQFRRLRSRLGPPKGITAMAAKQARLVYRMLKYGQEYVDKGAVIYEQKYREPQIRFLEKKAAQNGFALVPVQKHA

SEQ ID NO: 268394 - protein, 317 aa, unidentified
MTESVKVNVGIDVSKDFLDVHVGDVALRRVPNRSSGLSVLKRILSRYTVSLVLLESTGGYENLAVTYLQSLGYDVCVINPRQARNFALSMGRLAKTDKIDAQILCRLADVIDASPERSRFVKPLTDERRQRLVSMVRRRRQLCDLMIAERNRRAKTDVYGSESISTVLDFLTDEVSRIDRDIAAHVGSCFSDISSLLQSFTGIGPVTASTLLGELPELGKLNRRQITALVGVAPFNRDSGYMRGRRRISGGRSGVRNVLFMAVLSAVRFNPVLKAFIARLVAAGKPKKVALVACMRRMVCILNAMLRDGSRFEVAVR

SEQ ID NO: 268395 - protein, 453 aa, unidentified
MAKKQRKNCKKVKMLHTIKPNAAGIDIGATEIYIAVPHERDPEPVRHFDTFTADLHKAAKWLEACGIDSIAMESTGVYWIPVFQILESYGFEVVLVNARHVKNVPGRKTDVQDCQWLQYLHSVGLLRGSYRPPQKICAIRSLLRHRDGLVRTSASHIQHIQKALTQMNLQIHNVISDITGVTGLSILDAILSGERDPKKLAALKNKRIKASKATIEKSLEGDYLPEHVFTLKQSLLIYRHYQQMIAECDQEIENHLNNIDSRIDVDKNPPPPPTSLYRGGKGNEPCFDLRTHMYRILGTDLTQIEGISAVTAHVFFSEVGNDVSKFSNAGNFASWLSLCSGNKISGGKVLSSRTLPGSNRLSQALRMSAMSLWHSQSYLGNYYRRKRARDGAPSAITDTAHKLARIIYHLVKTGKQFDESIFNAQEEAHQKRVFRGLESKAKRMGFQLVPCQQ

SEQ ID NO: 268396 - protein, 381 aa, unidentified
MTRATRSHQYSGEARRVLYVAFELGVSEWKVGFTPDLGTKPRVRVMPARDLRRLTREIAEAKKWCGLPAGAPVRSCYEAGRDGFWLHRYLTAETIDNLVVDSASIEVNRRLRRAKSDRLDARKLLAMLVRYHAGEQKVWSVVRVPTVEEEDRRQLHRELRTLKKERTRVTNRMKGLLANQGIRLPKGQDLGDGFEEVRVWDGSPLPAGLRARLQREWAHAQFLHGKILELERERQRAIEHGRGAAVEKVRQLLRLKAIGPSGAWVYVHEFFGWRRFRNRKEVGAAAGLTPTPYQSGDDNREQGISKAGSRHIRAVAIEMAWCWLRYQPGSRLSRWYQERFARGGARARKVGIVALARKLLVELWRFLEHGVIPDGAELKAY

SEQ ID NO: 268397 - protein, 392 aa, unidentified
MVYVGIDVAKDKHDCFILNSEGEVLANVFTIANNREGFETLLKTIRSCTCPEDGIKVGLEATGHYSYNILGFLLDKGLATFVLNPLHTNLFRKSLSLRKTKTDRIDARTIVSMLMSDMDLKSYTNTAYHNEELKSLTRYRFEKVQQRARLKTAVSRLVNILFPELESLVSELHLASVYAMLSELPGAKQIAGVHLTHLKTILTNASQGRYGREKAVEIREAARRSIGSVMPAKSLELQHTIRLIRELDEEIDEIEAAIKEIVDAMSPPILSIPGIGYRMGAMILAEIGDFSRFDSPDKILAYAGLSPSTYESGKLKATGAYSHMEKRGSRYLRYALYNATKGVCLNDPSFAAYLAKKRAEGKHYNVALSHATKKLLRLIFALQTTGKDFQAA

SEQ ID NO: 268398 - protein, 354 aa, unidentified
MSQQLNTTIAVIGIDIGKNSFHIVGLDKPGAIALRQKWSRGQVEAQLANMPPCLIGMEACVGAHHLSRKLKALGHDARLMPAKYVRPYSKGQKNDFRDAEAIAEAVQRPTMKFVATKTTDQLDLQALHRVRERLVSQRTGIINQIRAFLLERGIAARQGQRFLRAGLPTILTTPPDVLSPRMVRIIEGLASNWRRLDERIEGLSSEIKAIACQDSSCERLMSVPGIGPIISSAMVAAIGTGDTFSKGRDYAAWLGLVPKQMSTGDRTILGKISKRGNRYLRVLFVQAAWVVLIKPKSWQRHGLKPWIEAAKKRLHRNVLAIALANKLARIAWSVLAHGRGFEASTINDTATQPA

SEQ ID NO: 268399 - protein, 342 aa, unidentified
MSARALYIGVDVHEKESQVAVYEEGGELLQEKRLPTRGLPSFVSSLQGGKKHVGIESVGFIYPIYDALLKAGCDVAVANPNNIQLIARAKIKHDKVDARVLGELLRTSFFPRSHIPDAETREKRLLTRDRVRYAVKRAELNNSIKWFLKRREITVKRPLSIEGRAEIKSLALPELDYTLKELELVESIVDELDRRISAAASKDRGARLIDTIPGVGAYTALFLSSALDDVNRFPDSKLACAYLGLVPSLHQSGDLSYSGHITRQGNKWLRRNLIECARWSVRKDPHMQRFFLRIAHKRGRKKAHVAVARKIVSYAYWMLKRNLTYEELDPWTVDSGSSTSSE

SEQ ID NO: 268400 - protein, 410 aa, unidentified
MRIIALDVHRSFAQTAILENGKLRDAGKIDLEYSRLLRFARKLKPDDEIVIEATGNTSAIVRVLLPFVGRVVIANPILVRAIAWAKVKTDKIDAAVLAKLHASGFLPEVWMPDEETEARRRVVAERTQLVSQMTRLKNRIQSVLHANLIPPYKGVLFSQRGRAWLEAQPLAEDQRRVIVRHAGELDRLGAELAEVDKSLAQAALEEPRVKRLMTITGVNSTVAMSVLAAIGDIHRFSSPEKLVSYFGLNPRVRQSGDKPAYHGRITKQGRTHARSMLVEAAWVISGAPGPLRAFFIRIRDKRGKHVAAVATARKLAVIVWHILTKDEDYTWDRPALLQWKLRKLELKAGHPSRRGGKQKGSAAAYSNKSVRDSERETIVNAEDEYRRFVATWKPQSPKGRSGATNEVRRS

SEQ ID NO: 268401 - protein, 340 aa, unidentified
MRKYIRIGVDIAKNCFQVHALESEDCSATKRRLSRSGIVKFLAEVEPCAIGMEACGSAHYWARRFRAMGHEVKLTPPIYVKPYVKRGKNDAADAAAICEAMSRPNMRFVAVKSEDQQATLMAHKTRELLIKQRTMSVNALRGHLAEFGVIAAKGISHVEELVERAAAADLPAMVQATLGVLLAQLRSLDAAIDELERAIVADYRRDPVSRLAASVPGVGALAASASLASAPDPQAFKSGRDFAAWLGATSKQNSTGGKEKFGSITKQGNRYIRRLLVLGAISVLRAAPKRKGALCDWLAALRARKPAKVVAVALANKLARIVWAIITTGEVFRTSIYAKA

SEQ ID NO: 268402 - protein, 391 aa, unidentified
MESAQMLQPVFVPREFEVFAGLDVDKTRIAVTFTDHNRLLKSLQMPYSSQHLLNYTRKQFADRRVAFVYEAGPTGFGLHDDLLAAGHRCLVVAPSMVPRAPGQRVKTNRIDSRKLSEGLRGGQLNSIHVPSLAYRHLRHLVQLRDSHVRQMMAAKYRIKALLLYEGIPFPEAPASNQWSARVLHKLGTLPCTAAVGFKLNSLVASLYFHKLEAAATQKQIRRFCQQDPELSRSIQYLTTIPGIGWIVASHLVARLGDWRQIRNVRQIASFLGLVSWEHSTGDQVQRGSITRTGDVRLRNKLVETAWTAVRKDPELEEFYRRIYQRHPRPIAARKAIVAVARKLTTRIYSVLKQQRPFRLKTVIAQAPLTPEETACPRGRLDQPQNEGTHGS

SEQ ID NO: 268403 - protein, 350 aa, unidentified
MQTIYIGVDFHARQQTICYLTTDSGELLFHQLKHEDKALVRAFYAQFSGHVIVGLEASGYSPWFERLLEELGCEVWLGHATEIRRRARWRHKNDRRDAELILDLMVHDEFPRLYLPPLQSREVLRMLRYRQKLIKMRTIGKNSLQALALQSGLAKGPQLFTKAGLQELRSATMSPAMQWQREQWLQLLEPLNERLLETMRWLQQQSQADQRISRLRTHPGVGLLTALCLVHSLEPVRRFANTRKVTAYAGLDPVERSSAERQRFLGISKGGSRVLRFLLVEAAHTALRKDADLKRFYQRLAQRHGRPKAKVAVSRKLLIRAYIMLRDEIDYAEFQRRAVAARPVLPAHGL

SEQ ID NO: 268404 - protein, 421 aa, unidentified
MPAMVLTYPTAKESFMAAIMIGIDPHKGSHTAVAIDELEQPLGELRVRSSSTQVVELRSWAKRWPERIWAVEGAGGLGYLVAQQLLAAGERVVDIQPKLGARVRLLATGATNKNDPNDARSVAIAALRSTMLVEVVPEDHATVLKLWAKRARDLGRLRTQVVCRLHAVLAELTPGGFPGSISAAQATTLLEKIEPQGAIELARYELAHEFLADLTRIDEQMRQTKKRITVAVAASGTTVTEIYGVGPFVAAVVIGYVRDVSRFSDRDHFAAYNGTAPIEVSSGNRKVHRLSRRGNRRLNHAIHVAAVTQIRHRDSEGRTYYDKKIAEGKSGKEALRSLKRRISDALFTHLQADARAVTGRTTESGPGGQMGNDSVASATGLHPNTPALRPSHSRTRPKATTRPAPPPSRRSPAVKKVRQAS

SEQ ID NO: 268405 - protein, 313 aa, unidentified
MDIIVGIDVSKERLDISIAPLGTAFFVENSHAGLDDLIRRLKATHGAEASCVVALEATGGFEMLAAAGLSSAGFAVLVVNPAQVRAYANAIGRRAKTDPIDAEVIAAFVAATRPEIRPLRDAETQALSALVDRRRQIVQMIVAEQNRLRMVVETQAQQSIKRLLAALRRELDSLDADLDEHIRKSPLWRVRERLLVSVPGVGPATARTLLAEMPELGSLDRRQIAALAGLAPWTRQSGQWRGKSFIGGGRGKVRAALFMAALVASRHNPILKAFRDRLVAAGKPRIVAIVATMRKLLTILNAIIRDNKPWQNA

SEQ ID NO: 268406 - protein, 353 aa, unidentified
MTDNTSIAWLGLDAHSRNCVLAHLDDQGTELKWWRFPTDPQQLLKHVQSIPATDKRLMLEESNLARWITRTLQPHLQQLVVCDARRNRLISNDPNKHDRRDAFALARLLRLNEFKPVWQPTDDQRVLFKRAAQAYENSVLRQTRLKLQIKSLFQHWGLFPSGTTVFSKTGRTPWLKQLPYDALRSQALLLYHSLDQALASQSDTRRLMCHSARAFPEVQRLRSIPGVGLIGAHLFVAYVQDPKRFVKFSRLTRYCRLAIRDRTSDGKPLGFEQLDRQGNGTLKAITYRAFLQAAKRRSGPVWQFYQASLRHTGSTTHARLNTQRKILLTLWTLWLNGKNFDPNQFTRSQPIDV

SEQ ID NO: 268407 - protein, 430 aa, unidentified
MKSNTQNAKIEAITETTLVLGIDVGSETHYARAFDFRGIEYSKKPFKFSNNEAGFMTFKAWILNIKEKHGKDKVVPGMEPTGHYWFNLGKFLQDNEMKPVLVNPHHVKKSKELDDNNPTKNDRKDPKVIAGLVREGRYMIPYLPDGVYADLRTASNMRFQLQAELTRIQNRISRWFNIYFPEYKTVYGQPDAKSGMLILKIAPLPEDILTLGIDGVNQIWRNAKLRAVGKARAKTLIEAAEHSVGSKEGALSARMEIRMLLEDYESRNARLQEVMALIEELVKQIPMAEKLLEIKGVGIKTVSGFLAEVGDISRFDNPKELQKLAGLALVENSSGKHKGETTISRRGRKRLRYLLFEVAMSLVAKNPEFRELHVYYTTRKQNPLKKMQSLMAVATKLIRVFYAMLTKGVDYDPKKMISDIKRPAVYLQAA

SEQ ID NO: 268408 - protein, 361 aa, unidentified
MRIIGCDLHARQQTLEMLDTTTGEVATMTLKHEGNNVREFYSKLPRPVRVGIEATGSMQWFVSLMEELGMECLVGHPAQIRAAEPRKQKHDRRDADLILKLLVENRFPRIWLPSKELQDLRALLRHRHQWVRIRTRIQNALQAIALANGLRRGPSLWSQDGQSKIAALPLAPHTAYRRSELQAMYAKFEAEIEKLNQRVEEQACERPGARLLMTHPGVGPITALATEVFLGDAARFADSKALASYVGMIPSEYSSGGRQRLGGVSKQGNPLLQFLWGEAAAHAVRRDPELQRFYRRKLVQKGLGKSRVAVARKLGIRLWIMLRDEIDYNEFCRRGQKQQKSSEACAGMPDTGHGAKQSPAD

SEQ ID NO: 268409 - protein, 386 aa, unidentified
MQQNDLSRSLVAFDQDSTLVAVIELSQSSWLVAGLVPGVTRAPLKKQTPDAEALLALLQRWSGEAAKNGKRIARTVVAFEAGRDGFWLARWLRERGIEAHVIHPTSIPVSREHRRAKTDRLDTQLLLRAVLGWLRGERKHCSMAAVPTLAEEDARRPHREHETLVGERSRVVNRMKSALVRLGIRGFNVKLRKAAGRLAALRTPEGTALPPNTLAELTRDMARLELIREQIKEIEKARLQRLKKAPLQGVNPMLAMLARVLGIGIETADLLVHEVLSRNLRDQRAVARYGGLTGAPDESGSKRRDKGLARSGNARVRHGMIQLAWRWLMFQKGSALAQWYRARTEGGRRDLRKTMIVALARKLLIALWRYVNTGEIPQGAMLRPAQ

SEQ ID NO: 268410 - protein, 410 aa, unidentified
MQVVHERCCGLDVHKKVVAACVLTPGERGAARKEQRTFGTMTDDLEGLAGWLAERGVTHVAMESTGSYWKPVWNVLEDRFALILANAQHVKRVPGRKTDVKDAEWLAELLRHGLIQGSFVPDRAQRELRELTRYRTSLVEERTAAVNRLQKVLEGTNVKLASVASDVTGVSARAMLAEIVAGSTDAAALAELAQGRLREKIPALQRALAGRVGAHQRFLLAQQLAHVDFLDEQIARLDAEVVERTRPFEDAIARLDTIPGVSRRVAETLVAEIGVDMDRFPTPGHLASWAGMCPGNDESAGKRRSGKTRKGSPALRRALTQAGHAAGRSKATYLGAQYRRLAARRGAKKATLAVGHTILTIAYYLLTRSTVYQDLGSGYFDERDRDGVRPRLVGRLEKLGFKVTTEPVAA

SEQ ID NO: 268411 - protein, 458 aa, unidentified
MKQKRSKPKIDHKMPIVYPNAAAIDVGATMHMAAVRADRTSEPVRSFGTFTTDLHQLVDWFAECGVETVVMESTSVYWIPIFELLDARGFIVFLVNARDAKHVPGRKTDVSDAQWLQRLHSYGLLRASFRPKGQISELRAYVRQRERLLEYAASHIQHMQKALTEMNLQLHHVVADVTGATGLRIIRAILAGEHDPKVLACLRDYRCHASAETIEKALTGSYRAEHLFALEQALALYDAYHEKVSACDARIEAVMKELRIDRGRSSDALLSPRRRRTDQANGMAFDVRSALFALLGKDITQIDGLGPYLSLKLIAECGDDLSAWESAKHFTSWLGLAPNNKISGGKVLSSRTRRCGSRAAALLRLAAVAVGRTDTALGAFYRRLSARIGKAKAVTATARKIAVLFYNAVRHGMEYVDPGASFYEMRYRSRVIDNLHRRAKSFGFVLQPIEPTPGDTVS

SEQ ID NO: 268412 - protein, 338 aa, unidentified
MKLYAGIDLHSSNNFIGVIDENDKRRYSKRHYNNIDTVLKVLKPFKKSLQGVVVESTYNWYWLVDGLQEQGYRVHLANPSAIKQYEGLKHTDDRWDSFFLAHLLRLNILPEGYIYPKEKRAVRDLFRRRLRFVRHRTSTILSLQSMFARHKGSTPPGNLIKTFSQWEMEGRFDCSNLTFAAQADVAEIENLNAIIKSIEKKIRPQVQLAEEFELLLTIPGIGDILGMTIMLEVGDINRFEKVGNYSSYSRCVKSQRISNKKKKGEGNRKNGNRYLAWAYVEAAHFSIRYCAGAQKFYQRKKAKTNGAVATKALANKLARASYYIMRDKVPFDEEKLFR

SEQ ID NO: 268413 - protein, 327 aa, unidentified
MKKKWFIGIDISKKTLDVVIYDPAKKHADETNYKQVSNNKTGYQALFAWMKQKRISPKQTVICLENTGIYSYDLCLFLESCKQDYSSFTPLDLKRSLGLVRGKNDRVDAERIAYYGYLHRDELTYSKLSGSAVLILRDSSSERKRLVKHLTENKGFITDRKDRESTSTSRRAEEMVKILEKQIQSVEDEMHGIVSSDPTMNLNYQLLNSIKGIGSVNAINTIIHTNNFKAFETARQYACYLGIAPFEHSSGTSVKGKTRVCATGARLLKADLSQAARSAVVWDKELKEYYERKRKEGKEHGVVLNAVKFKLVCRMFAVVRRGTPFVD

SEQ ID NO: 268414 - protein, 343 aa, unidentified
MEKVSTIGLDIAKKVFQVHGVGENGQVVIRRQLRRRQVLKFFAKLSPCLIGMEACATAHHWARELRKLGHEVRMMPARYVKPYVKRNKNDAADAEAICEAVTRPTMRFVPVKTVEQQSVLMLHRTRQLFVRQRTTLINAIRAHLAEFGIVAGVGRNGVEVLLDLIRKGEDDRVPPAARECLMALAVQLELAKRQILEADRRVLAWHRQNETSKRLEAIPSVGPLIASALVASVPDVSVFRSGRDMSAWIGIVPKENSTGGKQRLGSISKAGNRYLRKLLFIGALSVIKRAKKLGSSRHPWLVSLMERRSVKIAAIALANKVVRIAWAMMTRNETYRASQPVSA

SEQ ID NO: 268415 - protein, 344 aa, unidentified
MSGVITVGLDIAKHVFHAHGVDDRGRALFSKRISRGKLLDFFAAQPSCTVALEACGGAHHWARQLTHLGHEVRLIPPAYVKPFVKRQKNDAIDAEAICEAAQRPNMRFVAMKSEQQQAAGLVFRTRDLLVRQRTQLINAVRGHLTEYGWIAPKGPSHVAELAHLIEEKRMAGSLPEAARAMFRLMLDQLASLNGRIAVLDKEIARRAREDEVSRRLMTIPGIGPISATAIAALAPPVETFAKGRDFAAWLGLTPVQRSTGGKQKLGATSKMGERTLRRLLIIGSSAVVQQASKRGAAKGSWLEQMLARKPRMLVTVALANKMARIVWALLVKREVYRAPVAANA

SEQ ID NO: 268416 - protein, 369 aa, unidentified
MTDVTLFVRLDVHKKTISVAMVEGSAGAVVRFYGTVTNTPDSLRTLCRKLSQSEQQLHFCYEAGPCGYGVQRQLTRLGHHCDVVAPALIPRKVGDKVKTDRRDAMMLAQTLRAGQLTAVWVPDEAHEAMRDLVRLRAQAMRDLRKTRQQLLSFLLRHGLVSPYGHWTKMHRRWLGELVFAHPAQHLAHEEMLQRIERAEALCDRLKAAIIELVPQWSLAPVVEAIQALRGVSLIVASVIVAEVGCFARFDNPRQLMAFLGLNPSEHSSGTTIRRGAITKTGNSLARTCLVEAAWTYRFPARVTQIIRNRLNGLPEPIRNVAWKAQVRLSARYRKLMAAGKPAPKAVVAIARELVGFIWAIARMLEPKFA

SEQ ID NO: 268417 - protein, 367 aa, unidentified
MKKSLRFVGLDVHKETITAALALAGRDPAEFVGTIAHDEQALLELLDALGPKARLRVCYEAGPTGYGLARRLNERGYCCEVIAPSMVPVQGGRIKTDRRDARKLAHFLRSGDLTPVRIPECQTEAMRDLERAREDAKAAERVVRQQLDKFLLRHGRAWSGGTKWTHKHWAWIRQQQFSEPAWRAVCDDGIDAVERATTRVERLTQAIAEHVEQWALRPLVQALQALRGVSLVTSVILAAEIGDFKRFASPRQLMAYLGLVPSEHSSGQTRRQGGITKTGNRHARWILTEAAWNYRFYPRGSKTIEARRRPVSARVRNIAERAEHRLHRRFDHLTKRGKDSRKAVTAVARELAGFVWAIAREEQKLVV

SEQ ID NO: 268418 - protein, 417 aa, unidentified
MENVQWFVGIDWGPRAHDVCIVDATGRVCERRQVEHTATALAAFVDALIARAEGRPERVAVAIEVPRGAVVELMIERGLAVWSINPKQLDRFRDRFTAAGAKDDRRDAWVLADSVRTDRQAFRRVRLDQPLIIALREWSRMDEDLRVEYGQLTNRLRDLGHRIAPEQLTLCPAADEPWFWALWRTAATPAAQARLSARRLTQLLATHRIRRLTAAEVREILQRPQVYTAPGVVEAVAGHCQLVLRRLELVWTQRRECERQMARLLDTLEAQAPAADDQREHRDAAIVRSMPGVGTRVAAAVLAEASQPLADRAYHTARAWFGVAPVTRQSGRRRTVVMRYACNHRLRDAAYHWARGALCWDPRSRAYYRALRARGLTHGRAFRTVVDRMLRVLFTLLEDGQLFDPQHGHDTLLPVGG

SEQ ID NO: 268419 - protein, 357 aa, unidentified
MTKVNQKVDFAGQTIFVGIDVHLKSWNISVYYGTQYLTSFNQPPTPQALVAYLQNSYPNAIYKCVYESGFCGYWIQRELVEKGINCIVVNAADVPQTDKAAKNKTDTNDSKRLAQALQAGLLQAIYIPDEEVEADRQLVRCNERFNNDLIRAKNRIKGLLYQLGIKLPDQFANTNWSNLFIQWLKELELKNVSAKIALQHQLKMVELIREEKLAVLKDIRCLLKKERYAATANCLMSVPGIGPITAASLVTEIDDMKRFSNFEQLNSFIGYYPSQFSSGENIHQGNIIGRKHKRLRSLLIESAWVAIRTDPAMTKAYNDFKIKVGGKRAIIKVARKLLSRIRYVWLNQTTYEKGIVQ

SEQ ID NO: 268420 - protein, 346 aa, unidentified
MYFDPKEAEMKYCGIDLHSNNSVVVVSDEGDRIVFNRRLPNDLGRIRAALESHQEELAGVVIESTYNWYWLVDGLMDTSYRVHLAHPAAIKKYEGLKHSGDFADAAYLAQLLRLGLLAEGYIYPREERGARDLARKRMQLVRYRTAQILSIEGILMRQTGARMKGEAVKRLTAEQVDAFAFAPDVALAVEANRAVSQALGQQIEALERRLKQRVSLRPEYRLLKTVPGIGDTLATTIMLETGSIGRFAQVGNFSSYCRCVDSLRESNGKKKGEGNTKNGNKYLAWAFVEAANFALRCCPRAKSFYERKKSKTNRILAIKALAHKLARACYHMLRDQKPFDVSRCFG

SEQ ID NO: 268421 - protein, 365 aa, unidentified
MWEAPVVVQRTNVGLDVHARSVVACGLDRQTGEVFEQRLTPSHEEIAAWIRSLPGPAAAVYEAGPTGFGLARSLRAVGIDCEVAAPSKLMRPSGDRVKTDTRDARHLARLLMLGNVTAVAIPSREQEAARDLVRAREDCRGDLMSTRHRLSKLLLRQGIVYSGGKAWTGKHELWLRCQRFDDPALQLAYDTSFEAMLATIARRDRLDRAIEQMAADSEFTAVVSRLCCVRGVATLTAFGLAVEIGHWHRLTGRSIGAYLGLVPTEYSSGASRVQGGVTRTGNGHARRLLIEAAWHHRARYRPGATLRRRWDAASAPARARGQLANQRLHARWQTFDARKKRAVVANTAIARELAGWCWSLAVLDG

SEQ ID NO: 268422 - protein, 344 aa, unidentified
MTPGQQTYALYVGIDIAAATASVALMEPHQAVDEVFTIEQTEQGITGLIAKLMTLGYSVDQIRVVMEATGTYWMRLASRLYQVGFAVSVVNPAQAYYYAKAWLQRAKSDELDAQTLAHLAYQMQPDLWVPDPVVYEELEQRLVERESLLSIQQQLRNQLHALRHRPTVVVAVEQRKQALLVSIQEQIDAIEREIKSLMGQEQMWSNSVQLLQGLPGVGMLTAAWLLVATHNFTACSSPEQLVAYAGLAPYKRESGTSVRRREQIGHAGHARLRHTLYMATLSATRHNPAIKTFYDRLRAKGKPMKVARCAAARKLIHIAWAVVTKQTPYDPHYQSHRQIQLPMT

SEQ ID NO: 268423 - protein, 351 aa, unidentified
MPRTSTVHAVTTIGIDMGKNTLHMIGLDTRGAIVLREKVSRGRIASRLANLPSCLIGIEAGLATHYVARELAALGHDVKQVPPTYAKPFRQGHKNDFRDAHSVAEAVQRPTTRFVPVKTDEQLDLQALHRVRSRLVSERTAVVNQIRGFLLERGIIVRQGLRFLRQALPDILAKRTDILSPRMVRIVADLASDWRWLDERIEPVTDEIETLAKSDDGCRRVMTVPGIGPIISSAMVAAIGNGAAFARGRDFSAWIGLVPKQMSTGDRTILGRITKRGNGYLRTLFVQAARVILLRPASWPKHGFGVWLARAAQRLHRNVLAAALANKLARIAWTVLAQERSYEARVTKAAV

SEQ ID NO: 268424 - protein, 383 aa, unidentified
MRIVCGLDVHKDSVFVCILSENGDKFESKYGVLTPELEELHQLLVNHGVKEVTMESTSIYWHPIWRILEDIEELKLVNPYFIKQLPGRKSDVRDAAWIAECTMKDLIRGSFVPAPLVQRMRQYNRRIFDLNKEKVYKLTKLDAVLQRCNIRISNYVSSTDSKSYKEVVRLLSEGVTDAILLADTIHGRTVNRVGKDVIIASLTGVVSEVDIDLIRQYREEIELDDRHLQECQEKLTAICKKEFPKEFENLQTIPGVKERSATSILSEIGADMKMFITASALVSWCGIKPRNDESAGKIKSRKITHGNKYIRKTMIECAWGASRTQDCFYSQFSYIQTVVRRKNAMKVKVAVARKMLVAVWHVLNEGVPYRDYKMLQAQAGGNS

SEQ ID NO: 268425 - protein, 347 aa, unidentified
MDHIGIDLHKRESQICLLAEGGELIERRIRTEPQRFAEALGGRAPAQVLLESSTESEWVARCLEALGHHVVVADPNFAPMYATRTRKVKTDRRDARALAEACLLGAYRPAHRLSDAQRHVRARLTVRDALVRTRTRYISLIRALLRQHGWRVPSGSAEGFPRRVLALPLPGRLRSEVAPLLAVMRHLQPPLAYSDERIAAVTATDERVRRLQSMPNIGPVTAAAFVAAIDEASRFRRGHEVEAYLGLVPRELSSGETQRRGRITKAGSSRVRWLLIQAAVSMLRLRDPRTAALREWAGRIAARRGKGIAVVALARRLAGILFALLRDGTVYEPRRRPACPVTRAVPA

SEQ ID NO: 268426 - protein, 311 aa, unidentified
MKSSECFVGIDVSKETLDVAIRPSGEGRRFAHNEEGLSQMAAWLQAVSPQLIVLEATGGFEVEPIRALVSRGLLPVLMNPRQIRDFAKATGTLAKTDKIDAQIIARFAEAVRPEVRPLPTPEAQELEALNKRRRQLVEMLTAEKNRLPMSPPSIRKEIQAHIGWLEKDMDRVNKKLRDWIKTNPLWRDKDEILRSTVGVGPKTSITLLSDLPELGTVNGKKISALVGLAPLNRDSGRFRGRRMIWGGRAVVRSALYMSALVAKRFNPVIRDFYNRLRAAGKSFKVAMTACMHKLLIILNTMLKNRTRWQTA

SEQ ID NO: 268427 - protein, 358 aa, unidentified
MQRNKISFKGQKIFVGIDVHAKNWEVAIAPEVGIVKRHSQKPSAKELFDFLKKNYPDGDYQSVYESGFSGYSTYYALKEVGIDCMVIHAADVPTTQYEEVMKTDRVDAVKLVRSLKAGLLKGNYIPEKQYIDDRSVVRIRKTIQRQLSGYKSRVKHLLHCHGVEFPERFSKKQTHWSRAFITWLMNDVRLMSDTRASLDLLIRQVEVLRGTLLEATRQLRMMSQTERYKHRLDLLRTIPGIGIIVTMSILTEVCDVKRFHNENEFAAYLGLIPTSHSSGEKIVHGEKTFRGNKQLGPMIVEAAWIAIGRDAGLGAQYFHYKKRMEPQEAIVRIARKLSNIIFSVLKNEKEYVPYQTGN

SEQ ID NO: 268428 - protein, 416 aa, unidentified
MNAAGIDVSSRKSTVAVLRPFGEVVKLPFDVRHSAEDLAALAAQLKSIDGETRVVMEHTGRYYESIAKVLHEAGLYVSAVNPLLIKEYGNNSLRKVKTDKADAMKIAKYALDNWTELRDYTPMDTIRYELKTLNRQFQLASKQKTATANNLIALQEQSFPGIRKLFDSPVRSDGTQKWVDFTHDFWHVDCVRSGSQNAFAERYRKWCKRNRYQFSMEKATEVYAVAKSAVVLVQKTSVTKTLVQEAANQLTAISRSVETYRSEMNKLASQLPEYPVVMEMYGVGESLGPQLMAEIGDVRRFERKQSLVAFAGIEPAPSESGDYCSRSNRTTKRGSPYLRKTLFNIMKVHLQRAPADEPVFQFLDKKRAEGKPYYVYMTAAGNKFLRRYYGKVMAYFSTLEGLPPVDMDSTGLHHAE

SEQ ID NO: 268429 - protein, 353 aa, unidentified
MTRTTKYVGFDVHQATIVTSVREASGRVLARSVLETHGPSIVEFLRGMRGAIHVAFEEGTQAQWLHDLLAPLVERVVVCDQRGQPRAGNKGDQSDADRLSELLRRGGLRAVYHGGARADLKELTQSYRNLVEDSTRVMLRLKALFRARAIRTPGTAVYQPRHRAQWLAQLPDRGARFRAEVLYAELDVLRALRPKVKAAMLAEARHDPAWPVLRTIPFLGPVRVALLLATMQTPWRFRSKRNLWAYAGLAVVTQSSADYTIVAGRPVRRRRAPLTRGLNRNHNRVLKDVFKGAATAATGRPGPLQDFYRAVLARGVREELARVTLTRKLAALTLRLWKKGTPYDPTQLTQQAF

SEQ ID NO: 268430 - protein, 372 aa, unidentified
MRADRKRGKVKGCRMNCLVAGIDLGDRESLATVLSPIGDVADRFSFPMNEEGYAYFASRVPKDARVAFESTIMAYPISRALRMHGYMDVTVAHPKTLTWIVRSKKKNDRVDSLKIAKLHMAGMLPESHLLDRDEQIVRDLLVQRVKLGVEIGRLKSSLIGYLKREDVYNSLPKSEDNFSVRRRRAIRSLRFEDKRDLILGTMMDRLEFLERQCIPLEDSVRGNARASDDVRLLMSITGVDYYLASLISSFIGSVDRFPSDDHLASFLGIVPTSRDSADVKRRGKMTKDGSSIARWALSVMVDTVMRHNDPIREYYLGVKKRAGSGKLAHVSTMRKLTRMLYHMLKTKQHWKWENPQLTERKMTRLEIGGDVS

SEQ ID NO: 268431 - protein, 399 aa, unidentified
MKSPCVAVDVSKGKSYYQGFIEIDKPANKATPIEHDLEGFKFVYELGQTLKETYSDVVYVFESTGIYHKALETFLMNHDEKCIILNPLEASKIRKTDLRSTKTDARDCKGIAKAYFMKDFRLHDQKDELYEKLQSMNGHYNFLIQQLREMKVHFRNALDIVYPRFDVVYPNPYLDIPMSILKRYAHPDELKNKRFETIVKYIMKDTKHRGPKAMDEAKKLKGFIDNVSSGCRSSAFEVTILKTMVNKISDQEVEIELCLDEMRELVSEVPLYHQLMSVPGIGDNLAIRLIGELGDLDRFERSEQLVAYAGIDPRVYQSGQMTGEHLHITKKGNKHLRTLLFLAMSSNVRIGKTNIILDFYNKKRQQTNPLVYKAALIACANKLLRIIFGMYKSGKNFHK

SEQ ID NO: 268432 - protein, 433 aa, unidentified
MASRTYSKIIAFRRARRDNFYKERLVMEVVYRCCCGIDVHKKVIIACLVNGGEQELREFGTTTSEIKTLANWLTESGCEMIAMESTGVFWKPLYNLFELMDLDAMIVNAAHMKALPGRKTDVKDAEWIADLLRHGLLKASYIPNREQRELREITRYRKSLTEERCREVNRLQKILESANIKLDSVVKDITGKSARKLLQRIIDDDIPDSDEVSKLVHGRMRPKLDQIVASIEGITTPLQRKLLAQIIDHIDDLNRRIGELDKLVQEYMAEYEAAIEAIDEIPGIARRSAEVILAEIGLDMGRFPSAAHLCSWAGVCPGNYQSAGRRKHGKTTKGNKALKTILTQCAKSAKTVKSSYFFAQYQRISARRGKNRATLAVAHSMLIAIYHILKNKTAFHDLGSDYYDSFNRDRKINSYLKRLKALGWEPDAIPSSA

SEQ ID NO: 268433 - protein, 347 aa, unidentified
MKRIAVDLAKSVYQVAESVRFGQVVQRKRLNREAFRRYIQEQAEPVEWVMEACGTAHYWGRLAQSLGHQVKLLHPRYVRPYRRRNKTDRNDCDAMLEAARCKDIHPVPVKSHDQQQLQQLHGLRETWKKSRTQRINLLRGMLREAGIEAPTSTAAFIRAASELVDQPELASLSRLLHIVLAEINLYEQCMAECEQQLKRWHADDDIVRKLDEVSGIGLLTASALTTAVGKPERFANGRQLSAWLGMTPREFSSGNSRKLGHISRQGNVYVRTLLIHGSRAALLAAQRCQARTPEKLTQLQRWAVQTAARIGHNKAAVALANKLVRICWAVWCHERRFSGNWQSVRPA

SEQ ID NO: 268434 - protein, 369 aa, unidentified
MNECITYIGLDVHKETIAVALAEGSRRGEVREYGQISNTPAALTRLSIKLSRPGSVLRFCYEAGPCGYGIQRQLAAAGHDCVVVAPSLIPRKPGDRIKTDRRDAINLAGLHRAGALTAVWVPDPAHEAVRDLVRARLAAVRSLRQARQQLSGFLLRHGRHYSRPAWTLMHRRWLAGLRFEQPAHHIVLEDCIATIEAATARRDRLTAQIEAMLADWVLAPVVHALQSLRGMALVSAATVIAELGDITRFANPRQLMAYLGLVPSEHSSGGTRRQGGVTKAGNSTARRMLIEAAWSYRFPARISREQLLRQEALPKPIRDTAWKAQVRLCGRYRKLSRAGKPATTVTTAIARELAGFVWAIACQLPRPTN

SEQ ID NO: 268435 - protein, 343 aa, unidentified
MKLTRVGVDLAKNVFQVHGVDEHGKLVWKRQLKRATWLQVLLDKAEPSCVIGMEACGGAHHWARELQSRGYTVKLIPPQFVKPYVKSQKDDAKDAEAICEAMSRPGMRFVSVKTVEQQDIQSIHRVRSLLMSERTAKANQIRGLVAEYGLIAPQHMGPLRQAIPGWLEDAENGLTDRFRSWLHELWNELLRLDQRRKALDAEIERISETHPGAKRLKQLRGVGPLVATALVARFGDGRHFKRGRQAAASVGLTPRHHGTGGKNRLYGITKQGDRYLRSILIHGARAVVWQAKSRDDRLSLWLTELAARSHPNVAAVALANKTVRIAWVMLRHGTDFDPQLAVA

SEQ ID NO: 268436 - protein, 426 aa, unidentified
MNCSQNKKLNQVTEETLVIGIDIAHETQWARAFDWRGVEFGKVFRFENSKEGFEAFGRWVEKLKHSTGKTAIMVGAEPTGHYWFNLASYLKESGMKLVLVNPHHVKKSKEMDDNHPSKSDRKDPKTIAKLVCEGRYNEPYIPEGVYADLRSMMECRRRVCKELNQIKNRIQRWLSIYFPEFVKMYCKIDTVSGLIVLENAPLPEDILALGAAGLNELWRKSKVKAVGMKKAMSLYEAAKNSVGCSGGNGARLELRLLLADYRIKMEQYAQIMAEVEKLVEQVPNANKLMEIDGVGLVTIAGFVAEIGDIGRFQSSKQVQKLAGLALRENSSGQNKGQTTISRRGRARLRAVLFQAVMPLVSKNQEFMEIHRYYTTRSKNPLKKKQSLIVLCCKLIRVFYALLTKGSAYDPIKLATDIRRTAQPLAA

SEQ ID NO: 268437 - protein, 331 aa, unidentified
MNYSHFVGLDVGKKTFDASLMSADEKELSHKSFDNTPTGIQSLLDWIAGYHLSLSKLLFCAENMGSYVTELSVSSVSMGFSLALVCPLTIKKSIGLQRGKNDRIDAKRIANYAVLHYRKLELYKLPDKDLVRLRGWIIIRDNLVKQKVSSIKLLETFSRMAKLADVTESISFLEEQLKSIKERILEVEEDMEQLIAVSTSLYTNYLLLRSIKGIGIINAIVLLCVTDNFQRFDNPRKFACYCGVAPFEHTSGISIRGKTQTSSLANKEVKVYLTRAAITAISWDPQMKAYYKRKIAEGKHKAAVINAVRAKIIARSFAVIRRQTPFVTLAV

SEQ ID NO: 268438 - protein, 391 aa, unidentified
MIAVGIDVSKDKHDCFIMDSEGNVLADVFTVTNDQIGFDRFYHVLCSVAQDLSKVKVGLEATGHYSYNLLGFLLDKGLTTFVLNPLHVNLFRKSTSLRRTKTDRVDARTIAAMMLSGIALQPYSVTSYHNEQLKSLTRYRFDKVRERAKLKQSVSRLVTILFPELEKLVPSLHMASIYALLSEMPSAKQIAGCHLTHLTHLLDSASKGHYKRFAAEAIREAARHSVGISMPAKSLELQHTIRMIRELDSEITEIEAEIKHMMDELDSPLLGISGVGFRMAAMILAEIGDISRFDSPDKLLAFSGVSPSTYQSGKMDNAYAHMEKRGSKYLRFALYQAAKYVSHWDPNFAAYLEKKRSEGKHYNVALSHVVKKLVRLIFALQTTGKTYCPVT

SEQ ID NO: 268439 - protein, 377 aa, unidentified
MEKDSRFVGLDVHAETMAVAVAEPGGEVRSLGTIPNTPEAVRRLMKKLGPPGMLRVCYEAGPTGYVLYRQLTALGVPCAVIAPTLVPVQAGDRVKTDRRDAEKLARSYRSGDLTPVWVPDADHEALRDLVRAREAAKKDQLRARHRLGKFLLRQGRRPPAGIKAWGVKHRAWLQGLRYAHPAQAATLLDYLTEIDHAADRIQRLERAIETAVETAPAPVRAVIAALQALRGIAKLSAVSIVTEVGALSRFAKPRQLMGYSGVVASEHSSGPHPRRGGITKTGNAHLRRIVVEAAWAYRHRPAIGGTLRLRQAGLSEAVKALAWKAQHRLHGRYARLLARGKAPTQVVTAIGRELLGFIWAIGVHVERQRDGASRAAA

SEQ ID NO: 268440 - protein, 345 aa, unidentified
METMYYIGLDVHKKTIDHCVKDSSGRIYAAGSIPATRLALDMWMKTLPRPWTVAMEATIFTAWIYDHLQPHAAAVKVAHPLMLRAIAVAKKKNDRIDAKKIADCLRCDFLPECYMASTEIRERRRTLRYRNLLVRQAVQMKNKIAVLLMEAGVSYNKQKLHKVGYFRELLATNQDIDEGLKPLLRLCRETVVRLGKTESALVRSLERDSLLVERVERLMTIPAVGPITALTWALEVGDVQRFSSIKKAISYCGLCGAERSSADITKRMPLSKQRNKHLQTVLIEAAKMAPRNSPELAMVYEQEKQKGNANRATLAVARKMVAYLVAVDRRQKGFLVVERENRTAA

SEQ ID NO: 268441 - protein, 375 aa, unidentified
MYYVGIDIAKRTHVACVLDEEGKVVVKPFKVENSKKGFQKFFDKITPFLEITVGLEATGHYWVSLYEALVLKKYKVVALNPLQVSAFRNQGIRGAKTDDIDCVLIAKVLRFGVHLETQLPNDTVLALRQLCCWRADLVHQMTGIRLKLQSVLDQVFPEFSDVFKDIMLPTSRTVLSEMSTPDEVLKTDYKKLYTLISKASRNVFGKKKAEELIEAAKDSVGIKTSREIFGFQIKLIVDQINHLKNQIKTIDKKVKNLYAKANTKLTSIPGINFRTAAAIVGEAGTDFSRFEHEKGGATAFVAFAGFDPMTAQSGKSMRREKCQREDLPIYVGPFGMQPSLQNNVILCSKGFMKNRNLVANITLWPWDMSPTKCVM

SEQ ID NO: 268442 - protein, 389 aa, unidentified
MIYLGIDVSKFKHNCYLADENNFDKGGHFEIKNSKDGFEYLLRKLSDFDKDKIRIGLESTGHYHLNLSRFLLDLNFNIHFFNPYQTSLYRKADSFRNTKTDKVDAFFIAKLLRATDSNPTHNELYHNYELKSLTRYKSSLKNDRIKLKNAIVGYIDLIFPELAKVCKDVFCKYTLEVLKEHPSADKIAKANLTRITNLIKKASNGNNSKERAIEIREAARKSIGINSPAVSFRLVQDIKALEFLIEQIDEVNEQIKLLLNEMDNPIMTMPGVGIEIGPSLIAEIENIDNFVSPSKLLAYAGLDPSINQSGTMNSSYSSMSKRGSSYLRDALFLAAFLICQNDETFRLYYEKKKSEGKHHYVALTHVARKLTRVIFHLLKTNQKFISQKN

SEQ ID NO: 268443 - protein, 389 aa, unidentified
MQSPRRGRSAKSSGRQTVKEPITSYVGLDIHKDSVAISIADAGRAAARFVGTINPYPAELCKTLRRQRCRPESTLVVYEAGPCGYGWVRYLRKQHWACEVIAPSRITRCPADQRIKTDRRDALLLARESRAGNLTSIVVPDERDEAMRDLSRAREDACAARLRVRLQMQALMLRHGRHYQGRSNWSQAHDRYLSTIRFEHPAQELAFNEYRLASKEACERVQRITDAMRELCNGWRMNPLVKALMCLKGFDFVAAVTFVAEMGDLSRFPHPKALMSYLGLVPSEYSSGASRRQGAITKSGNKHARRILVEAAWNNRFKAQVTRTLQVRQEGQPMILREISWKAQLRLSKRWRSLAMGRKLPQNKICVAIARELCGFIWDLARHVTIKAA

SEQ ID NO: 268444 - protein, 359 aa, unidentified
MNRNTGMNAGQIIGTMNGQQVIGLDIAKHVFQMHTVNMGTGEIVNVQIKRAKVAEHFANLAPCLVAIEACGGAHHWARELSKLGHTVRLLHAKIVRPFVSGNKTDATDARAIWLAVQQPGVKFVGTKTAVQQATLTLHRQRELLMKMRIMQTNALRSLLYEFGATFAKGKRALFKEIEATLEGLADTLPQLVRDSLHEQVARIKATIEVDMQAIEARLQLQLKQDPQMQRIAQIPGVGLLTATAAIATMGEASAFKSGREFCAWLGLVPKQTGSGGKVKLAGISKRGDAYLRCLLIHGARSVIAHAKEPGPWLQGIKARRPSNVVFVAQAAKMARTIWAITAKAQDYDRGFKSIRPQAA

SEQ ID NO: 268445 - protein, 345 aa, unidentified
MEHYAGIDVSLELSSVCVVDAQGKIVKEAKVSSEPGALVSFFKGLGFPMKRIGLEAGPLSQWLHTGLAQAGFETVLLETRHVKAALSAMTVKTDRKDARGIAQLLRMGWFRAVHAKSIGSQEVRALLVARKQLLGRLIDVELSIRGILRGFGLKVGPVTRKAFEPRIRELVTGQATLERIAGAMLSARAALKAEYEKLHKAVLAIVREDAVCRRLMTVPSVGPLVAITYKSAMDDPSRIAKSKAAGALFGLTPKKYQSGEKDITGGITRAGDEMVRTALYEAANVLLSRITRFSKLKRWGMDVAKRRGSKRAKVALARKIAVILHRMWVDGTTYRWSAEPTAAQA

SEQ ID NO: 268446 - protein, 411 aa, unidentified
MHERQKHFYVGVDLHKQHHVAVIINCWQEKLDEIKFENKPSAFSTFLLDIYKHMDDGLTPIFGLEDVGGYGRALAQFLDEHGQVVKEVNPALSYAERKSHMTTQKSDSWDAECVARILVNKLDQLPDAKPHDLYWSIQQLVTRRNALVKAQGALKNQLHIQLSHHYPSYKKFFSEVDGKTALAFWERYPSPPCLEGASVKQLTTFLLEASHNTCSVKKASEILKLFKEDGNTIKEHQEIRDFLVRSIVRDILFKKQEIRYVERELKGLMNLLDFQLDSMPGIELVTASALIAEIGDVRRFPNANKLARFAGIAPVYFGSGGKGREQKSKQGNRALHALFYNLAVQQVQVAKGSKLPRNPVFHAYYQRKLKEGKTKGQALVCIMRRLVNIIFGMLKHKTAYELPIIKEEEVV

SEQ ID NO: 268447 - protein, 350 aa, unidentified
MLIIGCDYHPSAQQIALVDTDTGELRERRLGHREEAEQFYRELKQQNVSVRAGMESSGHSRWFERLLQELGFELWIGDPAEIQSKRVRKQKTDRQDAQLLLRLMMEDRFPRIWIPDAANRDLRQLLWHRHRLVQMRTRVMNQLHVVAVNEGLRRKKALWRSAGRAELEAIALAPWATRRRQDLLDLLDQLTPNIQQLTQALEEEVEKRPVTRLLRTHPGVGPLTALAYELVIGTPERFHCGKQIASYVGLVPEEKSSGDRRRLGHISKQGNALLRFLLVEAAQVTVRSEPQWRSKFLHLAMRRGRKIAKVTMARKLAVHLYWMWREGRDYGQSQKFGSHAGQPGNLDGVQ

SEQ ID NO: 268448 - protein, 344 aa, unidentified
MDNHTQYSGFAGVDLAKKVMQIHFVTGDGEITDKQVKRAEFLDFFRNRTKCLIGMEACGASQDWARKLEAMGHEVHLMSPKAVKPFVSGQKNDYNDAIGIYKAMFNGVRRVPVKSTEIRDLQTLRRIRSQVTKDKVKEINHVRGLLAEYGIVMGKSITAFNKGIFSALESLKERGDVSPLVAEELQTTVESIKTKIERQKRLDREIEQLARGCKNYENFLKTPGVGPFTAAMLCVLLCDPAIFANGRQFAAYIGLAPRSRGSGGKNFIIGIPSKFNCDSESRAVFVECAQALARYKNKSPWVDGILRRKPKKVAVIAIANKLARQVWAMANKGESFKQMAVLTA

SEQ ID NO: 268449 - protein, 376 aa, unidentified
MIKHSLGIDVSASSLACCISSIDLQQQVKVLATRTFANSQSGFKSLIHWTKKHHKQTHIPLVCLLEATGVYYENCALALTTAGLYVSVILPNKSKKYMESLGLKSKNDKIDARGLARMGAEQSLPRWQPLSNYFFTLRTMTRQLESLQKTKTSISNQLHAAENSIYKVGMVTRQLKSLIRTLEKQMKTLEAAIASHLRSEAQMAEKVAHLCSIKGVGLTTAAVILGETNGFALIENVSQLVSYSGYDVVEDQSGKRVGKTKISKKGNSRIRRALYFPAISEVGCGVKPLYELFHRTHGKHHIKMKSYVAVQKKLLILIYTLWKKNEPYREPGPESKCLEKTQVIQTVSGQKRKFPTNGREPQGKLPHEMAVSSQME

SEQ ID NO: 268450 - protein, 404 aa, unidentified
MIFVGVDWSEDHHDIDIRDEAGERLATLRVSHGVEGIARVHAAIGEHAVDPGGVAVGIETDRGLLVAALVGADYQVYAINPRSVDRYRDRHGLSGAKSDAGDARVLAELVRTDRHHHRLVAGDSDELEGLRMLARNHQNLIWARVRHVNQLRSLLLEYYPAALEAFAGQLTSRDALAVLAAAPHPETGRRLRRSELVALLRAGGRVRNLEDRAEQIHAALTNPQLVPSPVFADACAASASALVGLITALNTQIDGLQALLAEHFEQHPDAEIVRSLPGLGNILGARVLSEFGDDPDRYTDAKARRNYAGTSPVTRASGKSKVVLARFVRNRRLADACDRWAFAALTASPGARRYYDEHRARGNTHRQALRTLSNKLVGILHGCLTTNTTYNEDTAWRRYHATAA

SEQ ID NO: 268451 - protein, 357 aa, unidentified
MSEGSWVGLDVHARSVVAGVLDAGSGELRSLRVPPGYEETVGWLQSLPGPVRVAYEAGPTGYGLARACSQAGIVCTVAAPSRIRRAAADKVKTDRRDAERLARLLRMGELVAVRVPEPHEEAARDLVRAREDTRSDLMRARHRLSKLLLRHGLVYDASAWTVAHDAWLRRQRFDSGPLRLAFDECYGTMLHTKTRRDALDQAIVELAATPPFAEIVGRLSCLRGVSTLTALALTVELGDWTRFRPQSLGPFLGLTPSEDSTGEKRRLGAITKTGNTHARRLLVEAAWHQRRPLRPSVTLERRRQGQPAAVKSQADRSARRLHARWHALENRGKRRTIVAVAVARELAGHCWALATME

SEQ ID NO: 268452 - protein, 370 aa, unidentified
MLDTTTFVGLDVHARSIKAVSLDVMTGEVRAATFGYDAGAVAGWVRSVDPRARCVYESGVTGFDLQKRLSGLGVDCVVGAVSKMIKPSADRRRKNDRNDAEFLARMLSVGNVVEVWVPDDECEAARDLTRALEDARDDLSRSKQRLSKFLLRHGLAFDERTPTGRRKGNWTRAHWSWIESIRFAERADNDVLAYYVDAVRRAAEEKARLEGLVGAEARKPRWRKRVDSLRCLKGVDTASAADLVFEAGEFSRFRNARSFAAWVGLTPSEHSSGESDRRGAITKAGNKHLRKALVEAAWHYLTCSGRPKDLAKGQAPDRGARRHAAKGVRRLVERREALLARGVHGNKANVATARELACWVWAVGLMAEEA

SEQ ID NO: 268453 - protein, 409 aa, unidentified
MTAYRFYVGIDWATEAHRVIVLDADRRALHDRSVRHEGVALETFAHWLAQDVAAGVASDVAVALEVPRGAVVDTLLARGFHVFALNPKQLDRFRDRYTVAGAKDDRRDAQVLASALATDQPAFRRLEPEDPLIVELRELSRLEDDLRHELGRLTNRLREQLHRYFPQLLQLVPAANEPWLWALLERAPTPSAAQHLPRATLRTLLTRHRIRRVDAETVRTLLRTPALAVAPGTVQAALRHLAVLLPRLRLVHQQQAECATLIDGLLERLAESQEHRDVPILRSVVGVGRVVAATMLAEASRLLAARDYHGLRAQAGVAPVTRQSGRRTLVAMRHACNPRLRHAAYHWGQSAARHDPVSRAHYAQLRARGHSHARALRGIVDRLLRVLIAMLTAGTLYDPTRRRVVADAA

SEQ ID NO: 268454 - protein, 452 aa, unidentified
MKQSSATIGIVHPNAAGLDIGAREIWGSVGPGREGETVKVFQTFTADLQGLADWLVGHGVDTVAMESTGVYWIPIFEILEARGLQVYLVNAQRLKNVPGRKSDVQDCQWIQKLHALGLLTASFRPDAEMCALRAYLRHRDQLLTHRAPHILHMQKALQQMNIQLAQVLRDITGLTGLAILRAIVSGERDGLKLAQLRDTRCKSPEAVIAKALTGDWKAEHLFALQQSLELYDFYTQQLVHCDRQIERHFAAMQPRWDSLPDSPPIVPSPSHPKTSKNSPAYDVQAELIRLVGLDLTAVDGIGACLAQTILSEIGTDMSKWPTDKHFASWLGLAPHNDISGGKVLKSRILPTHNRAGQAFRQAATAVARSQSAFGAFYRRKRAQSGPRFAQVATAHKMARTVYHLLKFRVTFNDIGAEGFESLQRERDVRALQKKAAKLGFLLIPPEPIPIST

SEQ ID NO: 268455 - protein, 384 aa, unidentified
MNKHSILFIGLDTHKEFNEVAYIEEHRGAKPVHLGRVSSSKVAVQKLVRQFESKYPGATLHFVYEAGPCGYWIYRLITSLGHCCYVVAPSLIPKKPGEKIKTDKRDALKLAKLLKSEDLTPIYVPEPEDEAVRDLSRAREVAMKDLKDAKYQLKALLLRNNINYRGIANWSQKHLRWLTELVLPHPAQHIVLQEFLHTINERISRLERLDNELTHHVHQWRYYPVVKAIQAMRGVRLLVATGVVAELGDLSRFDHPRKLMSYLGLVPSEHSSGGKRHIGAITKCGNGRARRLLVEGAHTYRYAANISTDMQKRQEGLPKDIIDIAWKAQLRLCKRYKKMIAKGKHYNLVVTAIAREMIAYIWAIAKEVVLTPVNTKLRLARVPA

SEQ ID NO: 268456 - protein, 340 aa, unidentified
MSEITTIGLDLAKHVFQVHGIDAEGTTVLRKRLRRGQVLAFFSRIPRCVVGLEACATAHYWARELGALGHEVRLMPAQYVKAYIKRNKHDAADAEAICEAVQRPTMRFVPVKTAEQQATALLHRGREQLVRQRTMLVNALRAHLAEFGIVAAQGLRNVGELIAIVRDDGDTRLPDVARQVLEVLANQIEQIETAVAGLERQLLAWHKTNPVSQRLASIPGIGPIIATAIATTVADPKVFRSGREFAAWLGLVPRQNSTGGKTRLGGITKRGNRYLRRLLINGASANLLRSKATKADPWVIGLRRRRPPLVVAVALANKTARIAWAVMLRQKEYQPRALAA

SEQ ID NO: 268457 - protein, 341 aa, unidentified
MQRPNFYVGIDVASATFTATIFTEPANPIKTKVEIANSVEGLNGFIQWLNEHHVTPNNAVLCTEATGVYGELLCHFLASQEYRIAVEPPLKVKRAFNTTGHKTDAVDSAQIAEYAHRFLDELNFWKPNDAIIEQIKVLLAAREQFSTQLIANITAFKTLDRKYIQIPIANQMYKETIEYLKANIKDIDKEIKRLIDQDPTFRQMIGLMLTIPGVGLLLASNLLVLTQGFTKPITAKQLAAHAGICPYQYVSGSSVFKRPRSRRYGPPMLRKLLYLAALSLRTHNDDFRKYFYRKVAEGKSKRLVINDIANKLLVIICAIMTSRTQFISNYRSINPALLNCA

SEQ ID NO: 268458 - protein, 343 aa, unidentified
MEKVYYIGLDIHKKTISYCIKLQDGTKVRQGVMAAERKALGQWLAEIPGHWKGAMEATMFTGWVYDFLKPHALELKVAHPEMLKAITSAKKKNDRADSEKISDLLRVNLLPECYMAPEDIRELRRILRYRNMIVRTAVKMKNKISGLLMEVGASYNKKRLHGKRYFNNLLETVEDVPPSVNELLNLSRAGLEMFQGVQRRLLDTLHDNTLIRERIERLMTIKGIGEVTALTWVLEIGDPMRFTSVRQAISYCGLCSAQKESAGKEQRGPISKKRNKHLQTVLIEAAKLAPRWNQQLAEIHAKELERGHRNRATLAVARKLVAYMLAVDKRQTGFEPLSIAKVA

SEQ ID NO: 268459 - protein, 276 aa, unidentified
MKQNHVGIDISAKTFTVMIDSEGERTEAFDLPNDAKGFKKLIRMITKKGSSAQVVLEATGNYSLDLALALHRAKRIEVMVANPRAVALFAGAYLRRSKTDALDANVIVEFSIRMPFEEWKSPEAHCFNLRAISQRIEALTKNATQEKNRLHAAMTFDEMSDVVRNDIEVNIRHLERRIERLREQAREHIAEYPELENAFLHITSVKGIAQAAGIQILAELSVLPKDMDVRQWVAHAGIDPMQFQSGTSVNKPSRISRRGNVHLRRALFLPPALVAA

SEQ ID NO: 268460 - protein, 396 aa, unidentified
MAVAVGIDVAKDFHWAAVVRADGNVLLSQRIDNDPDSIEDLINYLARVAADHGPVTVAIDLVGGVANLLTAMLLDAGIHLVHVPGLVVNRARKATRGGEHKSDPRDAKVIADQLRLRDDWRELEAPDELSLDLRLLVSRRRDLVVDQTRRLVRLRELLASVFPGLERVLDVTNLADLALLTRFATPGEISHAGRRRLTEHLTRHGARRPNATALVEAALKAAAAQRTSVPGENRLAEFAHEMAVEALTVKRRIAELDHQIAADLDLHPEAALVLSLPGMGATLAAEFLAEAANLSRFATADQLASAAGLAPVLHQSGKTRYLRRATSGSKTLKFVFYQSAFCSLRTDPASRAFYARKRAEGKRHHQAVIALTRRRINVLHALLRTRQPYRPDYPHA

SEQ ID NO: 268461 - protein, 314 aa, unidentified
MDKQELFIGIDVSQEKLDVGVWPTSQLWVEDNTDEGVAALVQKLTALQPTLVVLEATGGLERQVVRSLAAAGLPAVVMNPRPVRDFAKATGRLAKTDPIDALVLAHFGSAIRPPVRPLPAAEIEELDALISRRRQLVGMIAQEKNRLHRAPDSVISSIEAHIRWLEEQVDSIDKDSHGIIETNEGLKEKDALLQTFKGVGPGCSGTLIAKLPELGTLDRGKIACLAGLAPLNRDSGKYKGMRRIWGGRESVRSALYMSTIVAIRWNPTIKEFYDRLRGKGKKAKVAITACMHKILTILNAMLKSGEAWRPAQAR

SEQ ID NO: 268462 - protein, 357 aa, unidentified
MKKQTRNILRNEKVFVGLEDSKKTWVLCVRSGGMVVHETSMPADYEVLRNYFHNKFPECQVKVMYEAGFRGFELHDQLTVDGWECVVTPPHTVTEEKCQRKKNDRTDCRRLAKNLENGDYHSCFVPDKEQREDRQISRTYGQVQADIKRVCNRIRRMLEFHGLDNGLTAGRWSPAMYARVKLHLGELEISDSLRFSFQVMLHELEHLRQLRKELLQQLRRLARSDRYKESVELLQSAPGIGMLTAIRLMLEWGDVSRFERKEEFASFLGLTPSDYSSGEQERQGHITKQGNRGVRAWLVECSWVAIRKDPVLLDKFRRVFKSCGSKKKAIVAVARKLAIRLRRILLSREPYALGVVE

SEQ ID NO: 268463 - protein, 416 aa, unidentified
MNAVGIDVSSRKSTVAVLRPLGEVVCLPFDVSHDADGLASLAEKLKALDGETRVVMEHTGRYYEAVEKALHEAGLFVCAVNPLLIKEYGANSLRRVKTDKADAVKIARYALDNWADLRDFTPMDAIRYDLKTLNRQFQLASKQRTASANNLIALLEQSFPGIRKCFDSPVRSDGTQKWVDFAHSFWHVDCVRKQPFPAFCERYRKWCKLHAYFFKLRNAEEVYALAKRAVVLTPKSKVVKVLVQEAANQLISISRSVEVYRAEMDRLAAMLPEYPVVMAMYGVGKSYGPQLMAEIGDVRRFERKQALVAFAGIDPMPNQSGDKNVRSNKSSKRGSPYLRKTLFNVIRTYLQCAPQDEPVFQFLNRKRAEGKPFYVYMLAAANKFLRRYYAKLRDYFASLDTLQPAAPIPTILKATL

SEQ ID NO: 268464 - protein, 423 aa, unidentified
MKNIITEFTAHIGIDWADQKHDYCIQGQKHSKREFGILSHSPESIDEWVLSLHKRFGGQIAVAVELTRGPIVYALQKYNFITIFPVNPTLLAKYRDAFTPSGAKDDPTDAEFALDLMLNYPGKIKALTMQSEDMRKLGYLVEQRRKLVDDRNRFGNRLTNALKQYFPQLLKLFSHRDTALFCSFINRWPTLQKLKRARKETVRKFFLSSGGRAVALIEQRIEAINNAQHITEDRSIIETHQLLALSLTTQITATVKSIKIYDEEIDKLFNGMPDADLFKSLPSAGLCMAPRLLVAMGENRDRFKHASEVQMYAGIAPVTQRSGQKSWVHWRWQCSKFIRQSFIEWSAKTVYSSYWAGLYYAQQRQKGNTHQSAVRALSFKWIRILFRCWKSRTPYSESKYLKSLRDRNSPLLLLETVDERLRA

SEQ ID NO: 268465 - protein, 365 aa, unidentified
MNNNDTESSELSSHEETRFEFNRGTGAIKLGIDVHQDYYVVVKQEGGANPKPAQRFRKEAFVHWAAKLKSQGGEISAVYEACGFGFGLQRQLCALGIRSYVVCPQKLDERNKRVKTDGLDAKALCLKLDRFAQGNRDALALVRVPTEAEEQKRAIHRQREQLVKTRKRLEAQGRSLMVNHGMQPLSNWWKACTFAQLQVPEWMKELLSNSQPILLALEEKIRALTVQLQGAAISKQPRGLGLLSSVVMDREVGNWDRFKNRRQVGSYTGLCPGEYSSGNTRLQSCVTKHGNPRLRAALVETAWRLVRFQPNYRAVKKWRHLLAKGALATGAARKKAIVAVARQLAVDLWRIRTGRVSIETLGLIN

SEQ ID NO: 268466 - protein, 416 aa, unidentified
MDVLREKSAGLDVHRSMIVACVLVSAAGGRVTKEVRSFAAIASGLAELVAWLGGFGVTHVGMEGTGVYWMPVYAALEAVGGITPIVANARHIKAVPGRKTDVIDAEWIAKLIRYGLVRASFVPPQPIRDLRDLTRYRRTLVDAQASERRRLIKLLEAADMKLAEVLSDVFGVTGRAILRALIEGTSTPAQMAALAKGHARKKIAPLAAALAGQLAEHQRFMLQVQLGRIEGTEQQIARLDQQIEARLQPYRTQIALLISIPGIDRVGAVAILAEIGADMSVFATAGHLAAWAGVCPGNNESAGKKKAAAARTGNRHLKTALCNAAIAASRQKGSYFRAKYYSLKSRIGGGKAALAIGHKLLISIWHMLSDGCFYRDLGEAYLDQRNQQQTLKRYARKLDALGFAIIPKQEPAAMAA

SEQ ID NO: 268467 - protein, 388 aa, unidentified
MQIVVDRPQAPTAIRTDLGAIFISLELSRSTWLITSLSPGGGERMSKHSVRGGDVAGLLGRFAQIQEKARARTGRSFPIIMLQEAGLDGFWIHRMMQAQGIESHVVDPASIATSRRRRRAKTDKIDGEALVRALLAYKRGEPRVCAMVKAPTPEEEDRRRLCRERKVLTAERVRHVNRVKGLLFSQGIVGYEPLRRDRRARLEELQTGDGRPLPKHLKAQIRRELDRLELLLGQVKAVEAERDALLAAEHTVTPAPAAMLLDIKGIGPEFTAILWSEGFYRHFENRRQVAAYAGLAPTPWQSGSVDREQGVSKAGNPRLRTTLIQLAWLWLRHQPDSALARWFHERVNLNGARLRKTTIVALARKLLVALWKYVTAGVVIEGAVIKNA

SEQ ID NO: 268468 - protein, 337 aa, unidentified
MTLYCGIDLHSNNSVVAVLDEQDRTVYEKRLPNDIARITETLCIYQSELAACVVESTYNWYWLVDGLMDAGFPVRLAHTSALPEYSGLKYSNDFSDARHLAHLLRLGLLPTGYIYPKEERALRDLLRRRLLLVRQRSLHHVSLQSLIARHSGQRLNTLQIKQLTKGQLADYLQGHALLGGEITHQARCWLEAAVKRIEQELQRHIKPREDYQLLQSVPGIGSVLGTTIALETGTIERFASAGNYASYARCVKSEKISNKKYKGQGNKKNGNKYLAWAFMEAGHYGAIWDPRINRFYQRKKAKAHILVAKKAVANKLARACYHMLKRGEEFDVNRAFS

SEQ ID NO: 268469 - protein, 343 aa, unidentified
MTHYVGLDVSQEQTAVCIVDEAGEIKYEGMIATDPDDIIVYLGSTGEEYGRIGLEAGSFTPWLYHEMIAAGLPVICLETRHAKAVLKAQNVKTDRNDARALAQMMRTGWYRPVHIKSKESQKIRILLNNRKCLGSKRIDLENQIRGTLKIFGLKTGKVTTAQYEPRIRELINHDPELQTYILPLLESRRVMLEQGRLLDRQIRKLAAGDEVCKRLMTVPGVGPIIALMYKATIDNPHRFTKSHTVGAHLGLTPRKYASGEIDYDGHITKCGDAMMRTHLYEAAKVMLTRSAKWSRLRAWGMQIAQRSSMKIACVAVARKLAVVLHRIWIDGTEFQFGAQEVAA

SEQ ID NO: 268470 - protein, 338 aa, unidentified
MKTYAGIDLHSSNNYIGVIDAKDRRLYSKRHDNRIEDILKVLGKFKATLQGVVVESTYNWYWLVDGLMDHGYRVHLANPCAIKTYDGLKHTDDKWDSFWLAHMLRLGILAEGYIYPKQQRAVRDLLRRRLMFVRQRTSQILSLQSMITRNRGLNFPGSWIKRLTDEYIEKLFSDYHLVFTAKRNLATIQFLDRIISEIEQQVRSQVKLKKQFVKLLTTAGIGNILGLTIMVEVGDIHRFAKVGNYSSYCRCVESKKTSNGKKKGENNKKNGNRYLAWAYVEAANHAMRNCAKAQRFFQRKMAKTNRVVATKALANKLSKATYYIMRDQVAYDSEKLFG

SEQ ID NO: 268471 - protein, 428 aa, unidentified
MSNKEIIRREQYCQMIKEIYGSDEYLIVGVDVAKEKHHAFIGSSNGKVLMKRLVFENNIEGFSRLLRTVEEIKVQNGLSKIVYGIEPTGNYHKPLANHLIRNGYDLVLVAGQAVKNNRQLLDGRWDKNDTKDAANIADLVSRGKCHYYDVPSTSIIEIRSLLSLRRRLKKEEHSLRMRIRNTLLAQYFPEFDRYYGICENESLTITRWLLDPDIIAGMGFNKFFNTVTERHRGLDQKIRLRKIYHLSTESVGCPIGPAGMLESDILVEKLKQIRDQMKKTNDLIKDFCREFDEYSCLLTIPGFGPYISARVLASISDPFRFNNRKQVLKMAGFDLCANRSGKTSDKAVPVISKKGNGELRYALYQAAHVASSKVDIFRTYFTKLLRGRERERGIKTKMRVKLATKLLIIAWTIMKRKESFDPDYIKFD

SEQ ID NO: 268472 - protein, 416 aa, unidentified
MEHQHCWFAGIDWASEGHQVHVSDAAGVNRGARAFAHSGAGLAAMADWILKITGARPDEVHVAIETPHGPVVESLMERGFHLHAINPKQLDRFRDRFSPAGAKDDSRDAEVLASALRTDPHCLRHLDPVDPTVIELREWSRIADEITRERVRLGNRLREQLWRYYPQMIEVAEDLAADWVLELWKLAPTPATARRVRENTLAQLLKRHRIRRITAPELIQRLRAPAITVAPGTTEAASAHIQTLIRRLALVNRELRAAHARLDQLIERLSQAGDNEPGQKPEQRDVAILASSPGAGRMTLATLLAEAFEALQRRDYHALRCLCGVAPVTRQSGKSKTVSRRLAVNRRLQNAAYHWALAALQRDPRSRAKYDALRQRGHGHARALRSVADRLLALICAMLRTQTTFDPNRHAKPAAA

SEQ ID NO: 268473 - protein, 370 aa, unidentified
MQKTLYIGLDAHKASISVTAAEEGRDASVKFLGPISNNPTDIARLVKRLSKDGHRLEFCYEAGCCGYVIYRQLVDLGHGCMVVAPSKIPTSPGDRIKTDRRDSQRLAMLHRAGELTRVWVPDETHEAIRDLVRARMDAAKQLTCARQQLLAFLLRHGRTYPPGHKHWTKTHRLWLAAQIFSQPAHQIVFQDYTEAVLTATDRKAQLIARITAIISDWSMRPLVEALRGLRGMDLISAVTFVAAVGDLSRFENARQLMAYLGLVPSEHSSGDHVRRGGITKTGNNEARRMLVEASWNYRYPARVATGKSEIVDALPKPVRDITWKAQTRLCDRYRKLTAKGKKPTVVVTAIARELAGFIWAIGQEVRPVMP

SEQ ID NO: 268474 - protein, 366 aa, unidentified
MKKISTVAIEKIEIFKESQLTIGLDLGDRTSHYCILNEAGEVILESKIPTTPKGIEEVFSRFPSSRIALETGTHSPWISRQLMQLGHEVIVAHARNVRLIGESSRKDDQLDARTLARLARIDPGLLGPVRHRSAKAQIHLTVIRARAALVSSRTALVNAARGLTKSYGQRLRKCGTGQINREIANGLSQELRDALDPLLAEIESLNERIAEYDGRIEHIAKEVYPHVALLKQVKGVGPLIALTFVLTLDDPHRFRRSRDVGCFLGLRPGRRNSGMSEPQLHISKEGDRYLRTLLVQGAHYILGPFGEDSDLRRWGLKLAERGGKNAKKRAVVAVARKLAVLLHKLWVSGEVYEPLRNNPNAVAAVA

SEQ ID NO: 268475 - protein, 318 aa, unidentified
MSIKARIARKSQPMPTYIGLDISKAYLDVAMPSGPQRFPHTPTGHAGLLAALGAWPEAVVVCEATGGYERAIVQALHSAGRKACVVNPRRVRDYARACGDLAKTDRIDAAVLAAFGRHFQPRPTQPDADPRLRALLTHHRQLTRMLVTVRQHAVTEIEDLVAEQVALLRRQLRQLEKRLADALASCPALAHKAEQLQSVPGIGPRTATLLVVVLPELGTVGHRQIAALVGVAPKTRDSGQWRGQRHIGGGRAHLRHALWMPTLVAVRHNPTLKAFYQRLLQAGKPPKVALTACLHKLLHLLNAMARDNTPWTPPPLPA

SEQ ID NO: 268476 - protein, 326 aa, unidentified
METRLNTSTQYSHFIGVDISKYSLDIHILPNNKILKLPYTNQGMEILIAEIKRLGKDVIVGFESTGGYERQLLYVLSANNISFVLIKPTNIRNFAKAQGYLAKTDKIDSKIIADYLCKLKPKLQEYINKNHDKIRELVVRKLQLTKELSIEKTRLTQNNDIEVKESILRHIKYLKDEIKIIESKIDEMITSNEKLSQTSRILESFKGCGKQTSQLLVGLLPEIGRINTKQIASLCGLAPMNNDSGSYVGRRVICGGRKYVRNALYMAIISSIRYNPVIRSKYEYLIKKGKPKKVALVACMRKMIITLNAMVRDNSLFEPNKSFCCS

SEQ ID NO: 268477 - protein, 433 aa, unidentified
MLKINYMSTLFVGIDVSSKTNAVYAMDFEENKYISSSFGNNQPGADQLVTMIAECMHKHKNLDTVLIVLESTSVYSVHISSFLSTSEVLMPYKPYVFCVNPKATSNYRKSYIGMEKTDPTDAYLIADFGRVGRTKKLEPWRGGQFIALKRLTRHRMHLSECITREKTYMVSNLYLKFSELQLLEGDDKPFGSLYGAASSAVLTEFLSPQEIIDMPEEDLLTFLAQKSRNRISDLSKTSELLRKAARDSYRLGKCMYEPLNISLASSFNCIHAYQKEIKLIEQAIEKCINGMNPNALIILQSIPGIGPVWASGILSEIGDITAFHSSDALAKYAGLYWPKGDSGDFTSEDNKMSKAGNPYLRYYLGEAANSVRKHIPEYADFYARKYAEVTKHQHKRALALTSRKFVRLVFGLLVKNQLYTGEKLDTEYNIESN

SEQ ID NO: 268478 - protein, 326 aa, unidentified
MKKGYFVGADVSKEKIDFCFLTSNEDTKPKFVSLPNEINTIKAYFQSFVKDDIYVVFEHTNNYHLPLQSALSGLAVRYSALSPSKTSYFLKHLTLQKSDITDAYGLALYCRIFKSDLNPSVYNREYSLIKSYNSTILLLSKIQTQLKNFKKSQDFVTDTELSEIIKALTLQVKKTQEKLKLIAFEILKSFVPNCEEIIRNNKGFGIDLALNLFPQLHFNRAKSEKQFISFLGLSPRIYESGSSVHKTKRINKRGSSAIRRVLYLSALVSSRFNAKFKERYENLISKGKKKKVAIVAVMCAIVRYLKSLFPLNESYLNENLYNAHTS

SEQ ID NO: 268479 - protein, 354 aa, unidentified
MIIIGADYHPAFQQIAFVDTETGELQERRLQHREEAEKFYRDLAAQGIKMRVGMEASGQARWFERLLAELNVELWIGDAAEIRRKRERKQKTDRLDAQHILRLLLKDDFPRIWVPSWENRDLRQLLWHRHRMVQARTRIMNQLQAVALNEGLRCKKRLWGEAGREQLEAFRLAPWASRRRRDLLELLDRLNPTITELTQTIEQEVEKCPEAQRLMTHPGVGPLTALAFVLIIGTAERFQCGKQIASYLGLVPLEESSGNRRRLGHITKQGNALLRFLLVEAAQVSARSIPEWRNKYFHLAMRRGRKIAKVAMARRLAVQMFWMMRKGWDYEQVRKFGSHAGQPGNRDGVQSNTE

SEQ ID NO: 268480 - protein, 361 aa, unidentified
MKRHLKDTESAFAEQLFYVGIDVHQKQWTISIRNNQTAIGKTLSVEPSAEKLSNYLRRSYPGGNFSAVYEAGYSGFWPARELRTFQIPCMVVNPADIPAKQKELANKTDKVDSRKLARSLENQELKGIYIPDRSAEECRMLNRYRSRLVQEETRLKNRIKAMLAEFNYRPPVDLEGKRWSGAYLAWLASVRFETQYAQMAYDEQLSQLAETRGRQSRVVRQLKVMAKQDRSVGNQIQLLQTVPGIGFLTAILLVTELIDISRFRRLEELASFIGLVPSVHESDERSYSRGLSNRRHNELRSRLIESAWIAVRKDPVLTMKYGQLCKRMHRNKAIIRIAKVLVNRIRFVWKNQTPYTYGVVE

SEQ ID NO: 268481 - protein, 343 aa, unidentified
MRIVGITGGVDTHADNHVAAAVDHNGGLLGVESFPADEVGYEDLLAWLASFGELVRVGVEGTGSWGVGLTRFLTDHEIVVVEVDRPNRQTRRKQGKSDPTDAISAARAALSGEATVTPKSRNGPVEQMRVLLVARRSGREQRIQSLNQLRHLVFTAPEEIRARFKDRPKTGLISEAANMRPRKGSNPIVYRTNQVIRGLAKRIQGLNTEIKTIDQTLRLLIEEKAPGLVALHGVGTDTAASLLVAAGDNPDRLSSEGSWAHLCGVTPIPASSGKVTRRRLNRGGDRQANAALYRIVLTRMSSHEETRRYVARRRSEGLSTPEIMRCLKRYVARQTYKHLPHMI

SEQ ID NO: 268482 - protein, 352 aa, unidentified
MVIVIGADVHKATHTFVAVDGVGRKLGEKIVKATTAGHESALRWARREFGEEVRWGVEDCRHLTARLERDMLAAGQEVVRVPPKLMAQTRASSRERGKSDPIDALAVARAVLREPDLPVAVHDESTRELKLLVDRRDDLIGERTRQINRLRWHLHELDPEFDVPVKALRSQSQRARIAQWLDGRVGLVEEIARDVLADIIAGSGKIDELEKRITTLVTDRYPNLLAVPGCGPLTAAKLAGETANVTRFRSEACFAMNAGVAPLPVWSGNTKGRVRMSRTGNRQLNAALHRIAVTQIRLDSLGRAYYRKRLDSGDSTVEALRCLKRRLARIVFHALHADQQPIETPASLPLAA

SEQ ID NO: 268483 - protein, 341 aa, unidentified
MKTPENFVGIDVASLSFTAAVGKKPWQLVIRPAEFANDYDSFPKFLHWLQQHNLQPENAVLCMEATGVYGEALAYFVQANGYRIAVEPPLKVKRAFDTSGHKSDAVDSRQIAEYACRYFDELAFWQPKADILEQIKVLLTTREQFSAQLTAHRNALKTLRRKVVVTPLAEQLHQDSITQLKNHIKSIEEEIRRLIDQDPTYRQMVSLLMSVPGVGLLLAAQMLVIVENSPEPASAKSLAAYIGICPYEHLSGTSVFKRSSSRRYGPATVRKLLYLAAMSVRTHQAPFREYFLRKVAEGKSKKLVLNNIANKLLKIMCAVLRTQTPYIPNYRSVNPMLLKTT

SEQ ID NO: 268484 - protein, 344 aa, unidentified
MYFIGVDHHKQVSVMTVLDEDGRERKHGRVLNLRRSVEEFLEGFRPFTAVLESGRSTYVMADLLRELGGEVKIANALQVKAIAHARIKTDKRDSRTLAHLLRAGLIPEIYQRGAWNRRAQRVIRMRAYWVSKLTEVKNKIRALLAQQREEVRLEVEKRESNLFSLKGQAFMSRLPLEGKDKDILEDLVLGYQELGAHIKKSDGLVRALYGEMEEAARIDTVPGFAMTLSVLIAIEIADIRRFPRAADLHSYAGVIPSTHSSGERTYHGHITKQGSSWLRWAVLEAVYPAVKADLVLRTLYNRLARRKGPNVAKIAVARRLLTIIYRILTEKRDYYPDTMKQSAA

SEQ ID NO: 268485 - protein, 341 aa, unidentified
MKTFIRIGVDLAKNFFQVHGIEHEGGLALTRKLTRAKFREFCSRLAPCSIGMEACGSSHYWARELRAMGHDVVLIAPAYTKPYVKRGKNDAADVAAICEAMSRPEMRFVPIKSADQQAVLMLHKTRDLLVKQRTMSVNALRGHLQEFGLIAAKGIHRVKELVALALADESLPEEAKQAAILLAAHGDELDEKIDALERKIARASAKNPTSRLLDEVPAIGPLIASAMTASFPDPSAFKSGSDFSASLGLTPSQHSSGGKEKLGGITKKGNRYLRKMLVVGCTSVLRVAHKYKGALADWIAAMKAKKPERVVAVALANKLARICWAIMSTGESFRTELYTRA

SEQ ID NO: 268486 - protein, 346 aa, unidentified
MTNVTIGMDLGDKNHEVCVLDQKGRLMDRFAVGNTRKQLQKVFQPYAGALVAMENGTHSPWISRDLEALGCKVLVGNARKLRMIWARSQKTDVKDAEMLARIARFDRQLLYPIRHRSQQAQIDLEQIKARDLLVRLRTDLINHVRSTVKAIGERLPACSADCFHKRAQTFMPDSLRTALMPLVEQIASLTQQIRGYKCKIEQLALNVYPETACLQQIQGVGLITSLAFILTLESPDRFDKSRAVGPHLGLTPRQDQSGSCNKQLRISKEGDVYLRRLLVSCAQYILGRYGQDSDLRRYGERLIARGGRGAKRKAVVAVARKLAVLLHRLWSTGEVYQPLYNAGKVA

SEQ ID NO: 268487 - protein, 362 aa, unidentified
MTKNNRLGSGMASKMTIGLDLGDRHSYFCTLDSSGENLESGRVQTTKSTLEKRFRNCEAARVVIEAGTHSPWVSRLLAECGHEVLVANPRKLALITQNDSKDDPVDAELLARLGRVDPQLLSPIEHRGAQAQADLAVIRARDAVVAARTQLVNHVRGAVKSLGSRMASCSTRSFAKKAASQLPTDLRFALEPLLEVIAAMTQQINGYDRQIEDVCREKYPETELLRQVTGVGAVTSLAFVLTLENPHRFARSRSVGSFLGLRPGQDKSGEQDPELHITKGGDQLLRRLLVGSAHYILGPFGPDCDLRRWGLKLASRGRKSAKKRAVVAVARKLAVLLHRLWAGSEVYEPLHLVQPTALSAQA

SEQ ID NO: 268488 - protein, 355 aa, unidentified
MLAELVDAVVGIDTHRDTHQVEIALPNGAPIALTTISNDSTGYAELLAWIVDHAPGPRLALSIEGTRSYGVGLARAATAAGLTVLECEQPNRKARRGKGKSDPIDAHLAVLAALRLDADRLPIPRADGDREALRILLGARGELTTASTAQTNRLRALLLGGDDTDRTLARGTLTESRLAGLARRRPPREASREQAVRHAEIRRLALALREAARALKANRVQLQTIVNDVVPGMTERRGIGPVSAAQAIVSFSHPGRCRNDAAFAALAGASPLPASSGRTVRHRLNRGGDRALNRALHTIAVTRMRSCPTTQAYVARRTAQGKNPKEIRRCLKRYIARQLYRTLTPAMTPAVEVSG

SEQ ID NO: 268489 - protein, 348 aa, unidentified
MKFYTKQHKYYCGIDLHAKSMYICIIDKEGAIVKHKNIRANPDVFLKDIERYRNDIVVSVECMFTWYWLADLCDRENISFVLGHALYMKAIHGGKAKNDRIDAHKIAALLRGGMIPMAYVYPSEMRSTRDLLRRRNHLMRKRAELLAHIQNTNHQYNLPDFEKKIAYKGNRQGVAERFPDDSVCKSIEVDLTMLDHYDHLLMKLEHYISQAAKVHDADSLFRIRSIPGIGRILGMIILYEIHDIKRFPRVQDFVSYSRLVKSIRESAGKKYGTSGKKIGNAHLKWAFSEAAVLFLRRNPEAKKYKAKLVKKHGKAKALTILAHKLGRAVYYILKRKEVFNIEKFLKNR

SEQ ID NO: 268490 - protein, 370 aa, unidentified
MEKNSSMWVGLDAHKKSINVAAFRGAELVLEVVVANEPRAVRRLGKRLVKLASGGEVRCCYEAGPCGFILKRQLEEAAALVCEVIAPSLIPVKPGERVKTDRRDALKLAQLLQAGLLTEVQLPTEEEESARDLVRCREDIKEEQTRARHQLGKWLLRRGFRYTAGKKAWTQAHAQWLKSLEFEHATDRLTHRAYTERLDAVGRQLTDVDAEILKLSQGKKYAAPVGKLRCFYGIDTTTAMTIATELHGSMARFPSAPQLMSYIGVVPSEHSSSDRTRRGAITKTGNAHLRRVLVEAAWHYRHRPAVGKKLVERRLGQPTSAIRIADKAHHRLHRRYRRMTEAGKPANKVVVAVARELAGFIWAALKEDAA

SEQ ID NO: 268491 - protein, 385 aa, unidentified
MQDHKPEDQTAIRTDLGAIFVSLELSRSTWLVTSLSPGGGEKMSKHSVPGGDISGLLMLFSRLTERARKRAGEEFPIIAIQEAGLDGFWIHRALEQEGIESHIVDAASIMTSRRRRRAKTDRIDGEALLRALMAYKRGEPRVCAMVRVPTPEDEDRRRISRERNVLIAERVAHVNRIKGLLFSQGIRFEPLRRDRRARLEELRTGDGRVLPEHMKRQISREFDRLELLLAQIKAVEAERNTMLAKTNEANLAPAKMLMGFKGIGAEFAMALWSEGLFRHFDNRRQVGAYAGFAPTPWQSGMTDREQGIAKSGNPRLRTTMIQLAWLWLRHQPDSLLSHWFQQRVAGKGRRIRKIMITALARKLLVALWKYVTAGVVIERAVMKTA

SEQ ID NO: 268492 - protein, 467 aa, unidentified
MKEKEIAMQVVNPHAAGIDVGSKSHWVAVDQLHQHVREFGVYTKDHKELIEYLRAHQVTTVAMESTGSYWQTLFNALQKAGFEVFLVRGSNTKNVKGKKTDVLDCMWIQKLHSLGLLTASFILSDYLQHLRTYYDHRSHLIEQTTKYINKMQKALRLMNVRLDVAISDITGKSGRLMLDAILEGKRDPKFLASLADGRIKKSKEEIEASLQGQWRDDLLFELRSCLKFYDNYLREINDCDQKIEQLLHQYIPSRESLEFEQTPTSKANGKIRAKFAPSFNVRQLAFTHLKTDLFQIPGVSFTTVLSLLCNMGMDIKRFSSAKQFASWLRLVPDNKVSGGKTISSRTPKGKSTVANSLRLAANSIGNQKDHPLTPFFKRIAYRKGRSAAITATARKLAVIIWNMIIKSEPYRGYDYETINQKRKNAQIKNIRARLAKLKLSEDEIENLFQRTTIHSSYTLPIKPLKNP

SEQ ID NO: 268493 - protein, 320 aa, unidentified
MRNAVGLDISKLTFDATAIVGNAEYSAKFDNDSKGLDQFSDRLKSLGCQNLHICMEATGNYYEEVADYFAQYYSVYVVNPLKISKYAESRFKRTKTGKQDAKLIAQYCRSAQESELVKRQKPTDEQYRLLRMTAAYAQIKSECAAMKNRHHAAKDEEATKAYAQIIKAMNEQLEVLKEKIKEQTEKPNCKEGVKRLETIPAIGRMTAAVLFHHLTSSKFETSNKFAAFAGLSPQQKESGTSVRGKGKLTKFGNRKLRAVLFMPAMVAYRIRAFPGFIKRLEEKKKPKKVIIAALMRKLAVIAYHVHKKGGDYDPSRYKSA

SEQ ID NO: 268494 - protein, 257 aa, unidentified
MFYLGIDVSKAKLNATLLLQTQPPKFRSKTVPNTTAGVASLLAWSTRQAGCAVADLHVLLEATGIYHELAATACFDAGARVSVLNPAQVKEFARGLAVKSKTDALDSAVLARFGALLQPPPWQPEAREIRELKALLARLDSIETDLRRELNRREKTEVSSVPPQVLESIDASIAFLRQQQAALQQRIHDHIDGHPALRQDRELLKTIPAIGDKTAFRMLALLRSRTFTRATQAAAFVGLHPVEHQSGSSVHKRPRLD

SEQ ID NO: 268495 - protein, 322 aa, unidentified
MSVTVMGIDIAKQKFDVALLLDGKTKHKTCKNSAKGFETLMVWLEKQGIQKVHACLEATGNYGEDLAIYLHEAGHTVSIVNPARIKGFAQSELIRTKTDKIDAGVIARFCLAMKPDVWISPSPEIRSLRALVKRVDSLIDMRSQEKNRISTAHESVLLLIKEHIAYLDQEIEKIRKQIADLIGRNPHLKQRKELLDSIPGIGKATIPHILAELDDLDKFTHVREVVAFIGLAPKETISGSSIKGKPRLCKIGHARLRKALYMPALVSIQCNPVMIAFYNRLKEKGKNGKVIVCAIMRKLVHVIFGILKSGKKYDPNYKPAFA

SEQ ID NO: 268496 - protein, 360 aa, unidentified
MSHDVKYIGMDVHKEAIVIAVLNESGKLVMESVIETKASSILQFLHGLRGELHVTWEEGTWAAWLYDLLQPQVQHIVVCNPRRNALLKEGSKSDKVDAQKLADLLRTGMLRPVYHGENGLRTLRELGRSYQTISKDLTRVMNRLKALYRGWGIPCAGTQVYAARAREEWLSKIPNAGVRRRAELLYQQLDGLQALRREVRPEFLAESRKHKAAKLLRQIPCIGPIRAARLIGLMQTPHRFRSKRQLWTYSGLGIETHDSAQYRFVSGQVQRSKKPQQIRGLNRNHNHEMKEIFKSAATRASCGMGTVPRFLHGSAGQGDEAGDGASDTGAQDRGHYVNTLEEGGTFRRRTTEDASSLSIE

SEQ ID NO: 268497 - protein, 350 aa, unidentified
MAIADEGSQPQIHSTIRNEPGAVRSLVKALKGPGVRLVAAYEAGPTGYTLHRQLTRLGVESQVIAPSLTPRPKGNRVKNDRRDALLLARLLRSGDLTPIWIPDEAHEALRDLVRARADAKADQLRARHRLSKFLLRKDSRPPAGARAWSVKHQDWLRHLTFEHEPETVVFRDYCQQVEAAGERVKRLEAELRHCAESSPHLPLIAALQSMRGIAFLTAVTIVTEAGDLRRFKTARQFMGYTGLVPSEHSSGGSTHRGPITHTGNGPLRHVLVEAAHHARHAPRVEAALKQRQAGVPPRIVDISWKAQQRLNLRYRHLSARLGRPKAITAVARELAGFVWALGQEMEAPAA

SEQ ID NO: 268498 - protein, 338 aa, unidentified
MNIVFLGIDLAKNVFQLCGLNQAGKPVYTKRTGRKELLQTLANIPACLIGIEASTGAFYWQRVFEKLGHKVKVISPQYVKPFVRGQKNDGNDAQAIAVALMQPTMQFVPPKSPEQQDIQALHRARQRIVNHRTATVCQIRGLLLDRGIPIGSAVSRARRVIPLIPEDAENGLSSRMRRTIAELYDLFNDPGRRIHFFDKEIETVFRQSEACQRIAKVKGIGPETATAVVAAIGKGTEFKNGRHFAAWPGLVPRQHSSGDRQVLMNMTKKGDRHLRTLFIHGARAVVRVATNNNDGHMNQWVNQLKERRGFNKTTVAVANKNARIIWSMLRNETGYQVV

SEQ ID NO: 268499 - protein, 382 aa, unidentified
MNRIVKIGMDVHSTNYTLCAMEPVLDGEDRIFANIQVTPDYKNVLQFIENLKNKLGPDDSYSIECGYEAGCLGYSLYNQLTSAGVKCIILAPTTMLTQQGKRVKTDKRDAVMIAQCLSYGGYHAVHVPTDKDDSVKEYLQMRDDHKLALKKIKQQINAFCIRHGYFYPGTKWTIKHLQWLRELALKDLFREVLDEYLTSYDEQTAKIERFDKRIEELAADPAYKDNVRKLGCLLGIKVHTALSLIVGTGDFSRFKKGSTYAAFLGLAPGESSSGAHINRTGISKAGNTHLRRLLIEGAKGICKGQVGHKSKELRSRQAGNSAAVIAYADRGNTRMRSKYYRIMRHGKKKNVVVAATARELACFVWGIMTNNMEPRTSGKKAA

SEQ ID NO: 268500 - protein, 410 aa, unidentified
MMEDAMGGGVDIASIVRCEPMELPMQTLNDLSRSLIALEPASTLIAVIEMSLSSWLVAGVVPGIERQPLKKLAVDESALLRLLHRWREEAEKAGCRIERIVVAFEAGRDGFWLARWLKARSIEAHVIHAASVAVSREHRRAKTDRLDAELLKRAFLGWLRGERDHCKVVAIPTLKDEDAKRPSRERESLVGEQSRIVNRMKAALIRLGIRGFNPKLKRAAGRLDDLRTPEGEPIPPNTLAELRRDMERRRLISNQIRQIEEARLKHFEQASNDGPHAMVRLLARVIGVGVETADMLVHEVLSRNMRDRRAIARYAGLTGSPDESGRKRREKGLARSGNGRVRRGMVQLAWRFLTYQKESALAQWYRARTENALGVRKPMIVALARKLLIALWRFVWQGVVPDGVVLRPVQ

SEQ ID NO: 268501 - protein, 362 aa, unidentified
MNYVGVDIHKKYSVLCAVDERGRKLREARIEGNSGCGFAQFFASLEGPSKAVVEACWNWGLVHDELEEIEQVEEVVLAHPYKTRLIADAQIKTDRLDAHALGTLLRGNLVARAHVPRRETRVRKNLLRQRLYWARLRTMLRNRIHALLDRQRGLELPQCSDIFGVRGLSFLRRLELPETDAALLREQLALHDLIAQQMKAQEKRIGLEFGSEAMHRQLLSVPGIGPTLAAVIACEVDSIERFSSAEKLCAYAGVVPTTHSSGGKTSHGQLLPFCNKWLRWALIEASWVAIGCSPYFGALYKQHRARGKKANSAVLIVARRMCRIIWQLLHEKRDFEKRPLRPNFNFPGCSVVRLTAATAARP

SEQ ID NO: 268502 - protein, 404 aa, unidentified
MNAAGIDVSKGKSMVAVRRPFNETVAKPFEVRHTGSELKQLADYLKSLDGETRVVMEHTGRYYEQIAQYLHDAGLYVSAVNPKLILRHVKTDKADAKKIAGYALDRWAELRQHTPMDTIRYQLKMLNRQCGLYTKTKTMMKNNLIALLDQTYPGVNTLFDSPVREDGTQKWVDFAASFWHVDCVRGMSQTAFVQRYAKWCRQHRYQARAGRAEEIYEHSKDLIAVLPKSAMTQLLVRQAIDALNAVSATLERLKAEMLKLASQLPEFPVVMAMRGVGGTLGPQLMAEIGNVTRFAHRGAITSFAGVDPGANQSGTHEAKSVRTSKSGPPELRKALFLVMDCLIQTKPQDDPVYQFMDKKRAEGKPYLVYMTAGANKFLRIYYGRVKEYLATLEGDSASDSEEHT

SEQ ID NO: 268503 - protein, 410 aa, unidentified
MNPLFVGIDVSSRHNVIFIMKPDGSKFCSFSVDNNLGGAKSLSKRIVSALTKESLTDVIIGLEATSVYGDNLVCFLQEDGSLAPFHPKIHVLNPKQVKKFKESYPDLPKNDSVDAYIIADALRFGRIKNEVYIDDYRYKALQTLTRSRFFAVQNLTKEKQRFMNYLFMKCSSLAQEKVFSNTFGAAALSVYEYFSSPDELAYMNLNELTSFIQEKGKNRFPNPEGVAKSIQAAARGSYRLPKTVNNSVNQVLSLSISSMKAIERQIKSLDCAISEQLAIIPNTLTSIKGIGPVYSAGIIAEIGNINRFKGQASLAKYAGLAWTQYQSGSFEAENTRLIRSGNRYLKYYLSEAAFSLVRCDSEFKRFYNLKFKEVNRYQFKRALALTARKLVRLVFALLKDNRLYIAPEEY

SEQ ID NO: 268504 - protein, 458 aa, unidentified
MYRELIPLRQALSVELKANLPSDIPGLDPEHLLQAYLGRLTMYVGGDVADQTFTLFAVDAAGNELGHLLDVPNTPAGFDTAWAWLENLRCQHRLRIILLAIETSGVYYWAWWDFLAARPNLARVLYNPRTTEHMTEVLSKKVRTELVDAYALAEQVRLGSTPEVVLTEDADLLSARFCSRAAHDLAQQVNRQKNQLRSLLRAYNPALGQVFPGAKLHHPAVYALLQHYLFPDEFVAAGVDSITAILSEHCRTAFGRDHAHQLVTLCAQTLTHPIGRPPIHQRVQQLTQDILSDQQHKQNFLKTGYTLIQDRTETKLLRAASGAGFSNTLALVSELGGFSRFPDGEHMASFLGLTTSKHISGTTLFESKRITKQGSPNGRYAAVNLAQHLKRHVPKYQQMYERITNRKPPHKGHFVALVAIARDFIANVLYDMWRNQRPFFEKVEDYRAYRQTHPRSKD

SEQ ID NO: 268505 - protein, 341 aa, unidentified
MDKELYFGVDVSKKTLDLAYYDGETIDWKNAHIKVSNDDAGFKKIGSWVAKVGKDFDTFLFCMEYTGLYNQNFRLWLESKEYIYGMVEPRKMHRFEPDLDDDQRSLDRIKTDELDAFRIAIYCEQNHKKILRNPSKLPSPVYFKLKRLLAERKQNTKQSTLYKQQLHDICAYDTDLSVERIKLLLTNMQENQKAIDKEIDSYMNEDTSIRKNYNLLTSIPGIGRIIALETIVLTENFTAISNPRKYACYIGIAPFKKESGTSVRKKTGVSKKGFSEAKADLSIAVLSAIRNNPSIRDYWIRKRKEKCGGIVLNAVKFKLVLRMFAVIKRGTPYVETDAYKN

SEQ ID NO: 268506 - protein, 304 aa, unidentified
MEYFAAIDVSLELSSVCVVDGTGKIVREAKVASEPAALIALFDDTGFEFTRIGLEAGPLSQWLHAGLTAAGLPAILIETRHVKAALKAMTVKTDRNDARGMAQLMRMGWFRPVHVKTVPAQEIRVLLTGRKLLLGKLRDIELGIRGLLRGFGLKVGQVSRGRYEARIQELVTGHPMLEPVAAAMLHARASLRAEYGKLHRMLLGIVRDDTLCRRLMTVPGVGPVVAVTYKTAIDDPARFRKSRDVGPYFGLTASKCQSGEADRTGRISKVGDAMVRTALFEAANVMLSRATRVSTLKAWALRVA

SEQ ID NO: 268507 - protein, 350 aa, unidentified
MRIIGCDYHPGFQQIAFVDTETGEMQERRLQHPQEAEKFYRELAVQGTKARVGMEASGHARWFERLLAELQFELWIGDAAEIRTKRVRKQKTDRQDAQLILKLMLKDDFPRIWVPDWENRDLRQLLWHRHRMVQARTRVMNQLQAVALNEGLRCKKRLWREAGREQLEAFPLAPWASRRRRDLLELLDRLSPTIAELTQTIDQEADKCPAAQRLRTHPGVGSLTALAFVLIIGRAERFQCGKQIASYLGLVPSEESSGDRRRLGHISKQGNTLLRFLLVEAAQVTVRSLPEWRSKYFHLAMRRGRKIAKVAMARKLAIQLYWMMRKEWDYEQVNRFGPHAGQPENRRGVQ

SEQ ID NO: 268508 - protein, 355 aa, unidentified
MIKYVGADVHGQTTCFCVLDSSGQKIMETTVATTSSALESFVRALSGEVHVAFEEGTQAQWLYYLLSRQVKRVVVCDPKKLSQRRSGISKTDKIDAERIADLLRKDELSPVYHDYGGLDALRHFVRNHQTLTRDSSRVKLQLKALYRANGIPTPGVTVYSRTGREAYVDLLVGRGLRARAEAQYVRLDVLDGLVEQARTDMLGEAKKYKVRRLLQTVPGIGPVRSAMLIAQVGTPHRFPNKRAFWAYCGLAIVQHGTGLASVTKSGKIVLNAKALKTRGLNRNRNPHLKDLFKGAVLTAIQKPEFATYLESFTARGLHVNVAKVAVARKLATIVLTVWKKGERYDPSRLAVKKNA

SEQ ID NO: 268509 - protein, 346 aa, unidentified
MDHVGIDLHKRDSQICWLYDTGEVREVRIRTTPERFEALFGGQAPAQILIEASTESEWVARHLERLGHVAVVVDPNYAPMYPRRRRRQKNDQRDARALATASRTGTYRAVHRVSAAQRAVRQALTIRDTLVQTRTRGVSVVRSLVRGEGLRVASGQAEGFVGRVAAEPVPEPLATTLAPLLTLLTTLEAAIGAVETHVRTLTADDARVHRLQGVPGVGWITATAFVAAVDAAGRFADAGQLAAYLGLVPRDRSSGEGHRSGPITKTGPSRIRWLLVQAGWRVLRATTADAQPLRRWGLQVAERRGTRVAVIGLARRLARILYALLRDGTAFDPMQVAAGRAVRPAA

SEQ ID NO: 268510 - protein, 318 aa, unidentified
MSTEIFVGLDVAKDHLDVALRPSGEGWRVANDETGTSQLLARLRTLHPTLVVAEDTGGFERAAIAALAAAGIPVVVANPRQVRDFARATGELAKTDQLDAAILALFAERVRPAPRPLPDATTQLLDALLTRRRQLLEMLVAEKNRLGFAPKPLHRSIGQHIRWLERQLDDVTTALTDQVEQSPVWRAKDDLLQSVPGIGPVVSCTLLGELPELGTLSHKQIAKLVGVAPLARDSGTLRGKRMIWGGRASVRTALFQAALSARRWNPAVRVFYDRLRAAGTPAKVALIACARKLLVILNAMVRSNTRWQVLPASAQHSC

SEQ ID NO: 268511 - protein, 341 aa, unidentified
MGEVITIGLDLAKSVFQAHGADGSGGVVFRKKLRRDQLLTFFSSQPRCLVAMEACASAHYWAREIGALGHEIRLIPPAYVKPFVKRQKNDMADAEAICEAAQRPTMRFVAPKSAEAQGSAVVFRTRDLLVRQRTQLINALRGHLAEFGFVVRQGAAHSAKLMQVVDDPDTDLPAEARPVLAIIVESLKALQAQVAKLDTEIAARAKRDPVAKRLMTIPGVGPVAATALVALAPAACTFRRGRDFAAWVGLTPRQHSSGGKERLGRTSKMGERSLRRLLILGASSAARVSGRARAPGNPWLERMLARKPRMLVTVALANKMARIVWALMAHGGTYRAPALAV

SEQ ID NO: 268512 - protein, 392 aa, unidentified
MIYEGIDIAKDKHDCFIINSDGEILFHTFTISNNHEGFNTLFQRIESVSDDFTKVKVELEATGHYSYNLLGFLLDKGLPTYVINPLHTNLYRKSLTLRKTKTDKVDSRTIATMIMSNMNLKSYSDTSYHNEELKSLTRYRFDKVKERAKLKTSISRLVNILFPELEKLVPSLHLSSVYALLSEFPGAAQIAASHLTKLTNLLSQASKGRYGKETAILFRETARSSIGSVMPAKSLELKHTIKLIQELTAEIDEIEVAIKQIMDEEIHSPILTIPGISYRMGAMILAEIGDFNRFDSADQILAYAGMSPSTYQSGQLNNCYSHMEKCGSRYLRYALYNATKYVCQWDESFSAYLAKKRSEGKHYNVALSHATKKLVRLIFAMEKSGRTYQPAA

SEQ ID NO: 268513 - protein, 391 aa, unidentified
MFYIGIDIAKKNHEASIIDSSGKSLSKSISFPNSTKGIEKFNNFIAEFGVTTNNCIIGMEATGHYWISLFSYIVDLGFTCYVINPIQSDAFRKMYVRQTKNDSVDSFIIAQIMRFGEFSISNFSDENTFALRNLTRYRFALVDECSDWKRKLVAILDQVFPEYSSLFSNIYGVASKELLSKYPLPEDMLSIPAEELGNLLYECSKGRLGINKAEEIQSRARETFGIKFAKRSFSFQIKQIISQISFLEEQLKEIEIEISCLLEDICPIITTITGIGSVLGASIVSEIGNISRFERANQLVAYAGLDTRIKQSGDFSATNTKLSKRGSPYLRRSIWLAATVAAFKDPALSIYYQGLRARGKAHGTAIGAVARKLTNIIFAVLRDQKPYTPNI

SEQ ID NO: 268514 - protein, 553 aa, unidentified
MNVSRESGIGLPHSTTSRNEQRAIRRVSVLECGSPDIIPKVIQRRGKGSVKKPSPELVNNFAAAHNRGGERVATPEPRLGSPCPARARHRSPTPVPAPGPSAERTLPQEGSYIRSHPFRGPEPLSTATRMKTDWTEQTYFVGLDWAKDHHDVVVVDRLGTIVADFQFPHSAEGWNDFQERIQTFGRCPIAIETSNGPAVDQLLQRDYPVYPLNPKAAQRYRARKFPIGNKTDRIDAWSLADALRTDGQGWVQLIAQDEPTMTLRLICRDENVFIEQRTAMVNQLQAALLEYYPLALESFEDWTKPFAWAFIQSFPTPQALRHAGKRRWEKFLHLHKLWRPETASTRLEAWQKGQQLNASAAVAKAKALLALSLVNVLQSLQKQIDEYRQRIRAAFEQHPDHDIFGSLPGAKDKLAPRLLGEMGSQRAVFPDSQSLSCRAGASPVSFQSGQLRKARIRWACNDFLRHTVHLWADLSRRTCLWAQIYYAAKRKEGHSHASALRCLGKRWLKILWRMWQNRTAYDESIHLKSLHDHGSFVAKLLQTPLTTQSASSL

SEQ ID NO: 268515 - protein, 339 aa, unidentified
MKLYTGFDLHSTNNYLAIIDAKGKKVYKKKLRNDPDCILTALRPYKDDVTGITIESTYNWYWLVDLLMEEGYKVHLANPAGIQQYKGMKYRDDKDDAFWLAEMLRLGILPEGYIYPKEERPIRDLLRKRGHLVKLRTSLILSLQNIISRNNGFKMKANDMKALKTDRVAPFLSNNEDLALAGKVSKEAIDFFTRKIKVIEAAVQKRMTLEDPYTSLLTVYGIGKILSLTIKLETGPIERFKKAGNYVSYCRKVSSKWISNNKKKGKGNVKSGNKYLAWAFSEAAEIARRSYPEARAYYNRKMQKTNFMVAHNALSHKLAKAAYYIMKDGVSFMPEKIFV

SEQ ID NO: 268516 - protein, 398 aa, unidentified
MLSAGRSATWRNEEIVLSDQNIEFVAFLGLDWADRQHVVHVQTAGSNSRERFLLNQTPEALQSWIQDLRSRFGGQPVAIAVEQSRGALIYALMHVEFLHIYPVNPVMIAKLRQAFHPSGAKDDPRDADLLLDVLISHRHHLRILVPDDVLTRSIQLLGEGRRKLVDQRTALTNQLTAALKDYFPQALAWFGDLHTFRACAFLLRWPSLQLLKSATTSSIRKFYQSQGYRGQDKLQQLLQDLSNSRPLVDDEAVVLASSMMVQALVKQIPALTESIDQYDQQIAALFKKHDDFTLFTSFPGAGAALAPRLLGALGSDRNRFEFAAQIQQLAGIAPVTEGMPSRKRGGTSAARRAPVRKEAARGPHWPAGAARRAAQPMPAGPGASRSSRCRPDCARRGR

SEQ ID NO: 268517 - protein, 462 aa, unidentified
MTERREDESRSDGTRQIEGLPVVRAQVAGIDLGSQRHWVCAPGLEGKGREVADFGATTAELQRLVQWLKARQVESVAMESTGVYWIAPQEVLEAGGLEVLLVDTRQLARVPGRNKKTDPTDCEWIQRLHSCGLLRGAFRPPEQVSMLRTLVRDKANLVGEAGDWVRRMQKSLDQMNVRVHRAVSDLDGVTGLAMVRAIVAGERDARKLAQLRDRRCHQSEAEIAEQLSGHWREDHLFSLRQSLKMYEATQERITAYEQEIVRKLREMTPEERAGQTAPPLNNPHKAKAIRKRGEEARRQAWYRMSGVDVTQIDAIGVQTVEVVLSEYGPDLSRFPTEKQFTSHATLVPRVPRSGGKALKKKKRYSASTRVAAALRMAALALRHSPTALGAYYRSLARRIGGDVAVFATARKLATLIYRLLRWGQPYVDEGAQAFEERYRQQRIRSLTARAKELGYQMVPATT

SEQ ID NO: 268518 - protein, 348 aa, unidentified
MSQSNQYVGLDVSLKETSICVIDDADKIVWRGRVDSTPKAIASAVKQHAPHAVRIGLESGQLSSWLFHELKEAGLPVICVDARHAKAALSLKVNKTDANDALGLAQIMRVGWYREVTVKGLDCQAVRALLVARAQIVSQITTLKNCVRGILKTFGRVLPKGLRSQFPARVRAAIDGHPVLGAIIEPTLQVLEAARAQLLVYDKAVIQRARSDDTARQLMSAPGVGTVVALAYMTGVEDPARFKRSSSVAAYFGMTPRRYQSGRSIYAGRISKCGDGMVRGLLFEAAKVLLSRSARPSALKTWGEALGKRIGAKKATMAVARKLAVILHRMWTTGTTFQWNAEAGSPAA

SEQ ID NO: 268519 - protein, 347 aa, unidentified
MKILALDLGNFKSVACEYDTQNNTKPQYETIVSTKAAVRELLQRRQPDRVVIEICPLAGWVCDLARELGLEIQVAGTNEQRSRWRNVKRKSDRRDALKLAHRSALRELKLVHVPEQKIRQWRSLINYRQQLVRRRTRIKNHVRALLLRENLSWVRGKSGWTQQAVAKLEQLALSLNEVGADELWRGELGSELAALKATNSQLQQVEKKLNQIGKANEQVQQLQSAAGVGRRLAEALVAQFDQPRRLKNSKEVGPYLGLVPKQWQSGETERLGHVTRQGSRVVRALLVEASWAAVRYNPRIRELYQRIKRNNKNRRKIAIVAVARRLAVYCWAMLRDGTRWRDLPQTT

SEQ ID NO: 268520 - protein, 355 aa, unidentified
MIDTKSIGVDVHKESISIAVRNSAGKVVMECVIETKASMILQFIDGLRGDLQVTFEEGTSAAWLYDLLKPHVTKLVVCDPRKNKSMREGNQNDKIDARRLAELLRLDHLTPVYHGEHGLRTLKELVRSYLTITKDLARVMSRVKAIYRSWAIPCSGKQVYAARHRAEWLGKINEPGVRRRAEWYYQQLDALRVLRQGVRRDLLAESKKQKAWKRLCEIPSIGPIRAAVLLGILQTPHRFRTKRPLWNYGGLAIEMHSSADHRRVHGQLERSTKNVLVRGLNRNCNHDLKNLFKGAAVVASSKPGPFQEFYTALLAKGMRPEMARLTLARKIATIVLMVWKRGVNFDAQHLKPQTA

SEQ ID NO: 268521 - protein, 375 aa, unidentified
MQEKLRFLGLDVHAETIAVAIAEPDGEVRSLGTIANRAESIRKLVKKLGASEQLKACYEAGPTGYVLYWQLAELGVACEVIAPTLAPMKAGDRVKTDRRDAERLARSYRSGDLTAVWVPNEGSEALRDLVRAREAAKQDQLRARHRLSKFLLRSGQRPAMGVKAWTQSYMAWVRQLRFPQIAQEFTRLDYLHEVEHMGERVKRLEQAIAEAVKLASPELQAVIKGLQSLRGVAQISAVTIAAELGNISRFQCARQLMGYSGAVPSEDSSGQRTRRGSITKTGNAHLRRIAIEAAWSYRLRPGVGPALRKRQEGVPDEIKEIAWKAQHRLHKRSLRLAAAGKDQRKIITAVGRELLGFIWAIGVKAEAAVRQPIAA

SEQ ID NO: 268522 - protein, 321 aa, unidentified
MNKSTIFIGIDISKDVFDIYGPTQGHHQFTNNVKGFRSFLKALGTDHWCVMEATGCYHQQLALFLFDKAIRVTVMNPLVIKRFIQMKLNQVKTDKSDAKMICQYGQEQKMQLWHPSSEYVEECKQLQTITQLYFKQSTAIKNKLHALQTRGFNRGKMISSLRRQLKSVQKEIKLLGKEMEQLIKANQQDLYTRLNTIPGIGKKTAILLIISTDGFKDFQSSRQISSYLGLAPNERSSGSSIRGKTRISKTGNPIVRNHLFLCSFTASIHNPQCKALYERIVAKGKSKKLALIAVCNKLIKQAYGISKSGLPYDKNYVSKLV

SEQ ID NO: 268523 - protein, 406 aa, unidentified
MNGPVITVDVSKGSCHFQPYIENGKPMCKPKVLKDTIEGFDNLAKTMGKLMERSSNSTVPVVFEATGVYHRCLQKYLDDNKIPYYIISPLMSAAYRKTNINSNKTDDLDCGHIAKCFYGEQDLRVYKKQTNIYEELRHTNRYYESELNFLRQRKTSFRALLDIIYPLIDKCFKGHSSLYDEVPMTVLKLYPHPKLLLRHKEETIVNRVTSKVNHDKKFVEKIVSLMYKGASRCYSGCDEDDKEVNRLKETIMSLQEQVAKCDEILKELIEQARKVPYFKYVVSITGVGLNLASRLVAEIGDITRFENRKAITAYAGLNPKIRQSGDIDGTHLAISKKGNRHLRCLLYLGATCNYRLKKHDSLYEFNQKKRQQSTNPLKKKAANIATAHKLLVIIYALSKNNQEYNS

SEQ ID NO: 268524 - protein, 341 aa, unidentified
MKEAIRFGVDLAKSVFQVHGVAASGEVVIRKQLRRGQLLRFFADQPPALIGMEACGSAHDWARELIKLGHEVKLMAPLYVKPYVKRGKNDARDAEAICEAVSRPTMRFVPVKALAQQCDLAIHKVRDLLVRQRTQLGNAVRGLLYEVGVTAAKGEAGLEDLMRRVEQRNEAIPQAMQAPVAVLVEQFRVIEEQTHQLDKRIIGAAKAEPTMRRLMTVPGVGPVTAHAIVAKIGDGSQFASGRDLAAWIGLTRLNYNTGGKDRQAGHISRAGDKGLRRLLVLGASSWLRWVKAHPDKGSAWINGVMERRPVKVAAVAQAAKTARILWAMLRSGQDYRAPAMA

SEQ ID NO: 268525 - protein, 321 aa, unidentified
MENQKEHISFEQVIERGCGIDIHKSILVATIRGLGIVEETRTFDGFTQSIEALRDWLKENGITHVAMESTGVYWKPVYNILEADFEILLVNARHIKNVPGHKTDKKDSKWITKLLLSGLLKGSFIPPKHIRELRDLTRYKRKVIEQISSEKNRIHKLLEDANIKLSSVVSNLSGATATKIIDAMIEGEEDIDKLLKLRHGKMQSSVEDLAASLKGNLTDHHRFMLQTVKESIKSKEQIIVKLDTQIDILLKENELVLDAELLATIPGVGKEAAAYILAEIGNDMSQFPDEQHLASWAGMSPGSNESAGKKKAPESPMEMSI

SEQ ID NO: 268526 - protein, 358 aa, unidentified
MSTKTLLAYALWRLLAVKLFVKPGVLPMLRTLLSLSIIYQKTKVIKLLLGYEAGIWGYSLHNRLVELGYDCVILAPSTMYSNAKHQMVKNDHQDAQMIAHNLASGTYKVVYVPDQEDDEVKEFIRLIKAMKKELKQTKQRIRAFVLRNGFRFERTPWTGVYLEWLSQLQLPRIKKMVLDEYLIHYHELTDKIERLSRLLGDLSHQERYQEPISKLRCFKGIDTVAAMTIHVETSDFSRFPNARAYAAYLGLTPSEHSSGKNVSLGRITKQGNSTIRTTLVESAQGLVRGNPSKKSKKLKARQINQSGRVINYADRAVNRLHERYERMIHAGKPRNVAIIAVARELACFIWGMENGKIA

SEQ ID NO: 268527 - protein, 323 aa, unidentified
MSIFVGVDVAKRSFDIATTLPNGKKRTKAKLPNDSAGFAQFSDWLERHAGPGTWIVMEATGTYHEALAEHCHDQGYRVCILNPAVIAKFADVELRRVKTDRADAKVIAAYSQQNADSLRQWEPEPPAQRRLRALVRRLDDLKEMRQMEQNRLDVAQDAVKQSIQDVIGHIIKELEKTRKAIEQTIDDDPDLRGRRDLITSIDGLGETTAALLLAELGDPLKYQSPSAIVAFSGLNPVMQQSGEFTGQSTISRTGASRLRAGLWMSGTVSIRHNPVVKALAERLSSRHKAYKQIVCAAMRKLLHLVYGVVKSGKPFDPQIALAG

SEQ ID NO: 268528 - protein, 388 aa, unidentified
MQFAADRLEAPTAIRTDLGAIFISLELSRSSWVVTSLSPGGGEKMSKHTVQGGDVAGLLKRFAQLREKAKGRMGKVFPLIVIQEAGLDGFWIDRVVQNEGIESHVVDPASIATSRRRRRAKTDGIDGEALVRALLAYKRGEPRVCSMVRLPTPEDEDRRRLCRERKVLIAERVKHVNRIKGLLFSQGVSGYEPLRRDRRERLDALQTGDGRPLPPHLKAQVHRELDRLELLIAQIKTVEAERDALLAVEQTTAPVPPAMLLGVKGIGPEFAAVLWSEGLSRPFENRRQIAAYAGLAPTPWQSGSVDREQGISQSGNPRLRTTMIQLAWLWLRHQPDSALALWFHDRVKRNGGRLRKTTIVALARKLLVALWKYVTAGVVIEGAVMKTA

SEQ ID NO: 268529 - protein, 315 aa, unidentified
MTMLIAAGIDAGLRHLDVGLAPSGRGFRVSNTAEGIADLVRRLSAQHVRRVVMEAIGPYAQRLIQALGLAGFEVGVVNPRRIKAFRDAEGRRAKTDRLDAALIARFALKMEDAVQPLPDAAALELKALAARRRQLVEMIAIEKTRLKQACMPLIVDGHQRAIADLGEQRQAIEDELAARIGRDPELARVLAILRSIPGIGERVATLLITDLPELGRRDRKSIASLAGLAPQVSQSGNAPPRAAIAGGRPCVRAGLYMAALVACRHSPRFKPEYQAMVEAGKPKKVAIIAIARKLLVLANALVRDTQLDRKKQTSA

SEQ ID NO: 268530 - protein, 365 aa, unidentified
MQKISTMRTSGKNIFQGQLTIGLDLGDRFSAYCVLNEAGEIVLEHKLATTPEAMKQVFVSMPRCRIAMETGTHSPWVSRVLTALGHEVIVGHAQKVRLITKSRRKDDRLDARTLARLARIDPELLSPVKHRSAQAQLHLTEVRARAVLVSARTALVNAARGLVKSYGERLRKCDTRQIRREASSGLSAELRKALEPLLQEIESLNERIKEYDRRIEKMANQTYPETALLKQVKGVGDLIATTYVLTLEDPHRFRKSRDAGCFVGLQPGRRNSGESEPQMRISKEGDEYLRTLLVQGAHYILGPFGEDSDLRRWGQKLAERGGKNGKKRAVVAVARKLAVLLHRLWVSGEVYEPLRNSQKAMNAAA

SEQ ID NO: 268531 - protein, 319 aa, unidentified
MNKNTLIFGIDISKDVFDVYNETFGHKRYSNKEREIKSFISALPEDAHCVMEATGCYHYRLAMLLHDKSIGVSVINPLVIKRFIQMKLKRVKTDKSDALMIYNYGCNQQLEYWQPEAKYIEQGRELLSLIQTYLKQSTALKNKLHALQSRGTNKGKIVTSIKRQLRGLKKEQQLLENEVENLVKENEPSLFSRLKTIPGIGNKTAVLLMLHTANFKDFSSYKQVSSFLGLAPNERSSGSSIRGRSRISKTGDGLVRNHLFMCSFTACIHNPQCKALFDRIVAKGKSKKLALIAVCNKLIKQAFAIAKSGLAYDPQYAKK

SEQ ID NO: 268532 - protein, 455 aa, unidentified
MTVPKPARLRVDNLPTVFPNAAGLDIGSAEIVAALPPDRDVTVVRTFTTFTGDLKQLVTWLLAHHIDTVAMESTGVYWIPIYEMLEAAAIRVYLVNARHFKIVPGRKSDYNDAQWLQKLHALGLLEGSFRPDDEMCVLRSLLRHRAQLIEHRSPHVLHMQKALKLMNIQLPEVLSDVTGVTGMAILRAIVAGERRGDVLAKLRRPGCRRTEQDIIQALTGTWRDEHLFVLAQSLDLYDYYTAKITECDHRLDQQFSSMKPRFDVEGEPPAPPTSRTKKNSNSKNQPAYNVRAHLLRILGIDLVDIIGISESLAQTIISEIGTDMSRFPTSKHFCSWLGLAPHNDISGGKVLRSRVLKVHNRAGQALRQAAQSCSRSHSLFGAFYRARSARSSSEEAVVATAHKIARVIYHMLTAHEAFTPESIRAFDQKRQQREVTHLQKRAKALGFILLQPMTA

SEQ ID NO: 268533 - protein, 392 aa, unidentified
MDDDQNGVVIGMDPHKRSVTIEVMSGDEQVLGGGRFATDAEGFTAMLAYVAAWPDRVWAIEGCEGIGRHVAQRLLAEGEPVVDVPAKLSARVRVFATGQGRKTDDTDAHSIALVGGRMSGLRSVVNDEQLELLRLLVDRRRRIGEEHTRMVCQLHQLLLDLIPGGAKRDLSAVQARKLLAGVRPRDVVGKTRKRHAMELVVDLERIYQRKKAANKELVELIKTTGTGMLDLHGIDPSGAARLLVEVGDITRFPDRGHFASWTGTAPIDASSGDRVRHRLSRGGNRQINMVLHIMATVQLRNPTEGRAYYDRKIAAGKSPNEAMRCLKRRLSDVVYRTMLNDLVANKATGPGGHRGASLQSSAAGSHPHTGSSDKSLPGPAKTQPRTPLPTAS

SEQ ID NO: 268534 - protein, 409 aa, unidentified
METLHERCAGLDVHKDTVVSCVRIATGRSAKREVKTFSTTTSGLLELHDWLQGDGVTHVAMEATGVYWKPVWHLLEDTFTLILANASHIKAVPGRKTDINDATWIADLLAHGLIRASFVPPTPIQELRDVTRARKQLVQERTRYIQRIQKVLEDANLKIDSFITDLLGKSGRAILNALVEGYTSPEVLVSLTTGRLKASRAELLEALRGRVTKHHRFMLKLHLRQIDQLDRSIQELEAQAREATAPFRHRVEQLTAIPGISETAASVLLAEIGTDMSVFPSAAHLLSWAGMCPRSDQSAGKRRSTRLRHGAPWLKATLVQIAWPATRKKDSYFRALFHRLKARRGPKKAIVAVAASILTTVYHMLRDGTLYQDLGPGHFDSINRDRAAHSLVRRLKALGFDVDVRPAAA

SEQ ID NO: 268535 - protein, 340 aa, unidentified
MGIVGALDLHRSQITYHWQDLATGEVHRGRIVPGAREPLRAWLAGFHGADAHFALEATTGWRFVVEELERAGCTPHLGDPAEISTRRGPKRRAKTDRADCEHMTALLLEARLPECWIPPPDILEARTLSRLRKALVDERREWMQRIQAQLYHQGVMPVTSLGAAGRARLNDAELSPAGRRVLAVGLRALEHIEAELSTLDRDLAIFARRQPGCRVLRTLYGVGPVTSVAILTELGDCRWFSSSDHAVRYAGLDVTVYESNDRRASGHLSRQGPGVLRWALYEAAQCAARPASPDHAYFAEVAGRLGHNRACLSMARKLCRRAHHLLRELGDDVFLPARAA

SEQ ID NO: 268536 - protein, 462 aa, unidentified
MPSPEKPSKRKKTKTPTAPAVLPIIQPLVAGIDVGSTQHWVCGPPRDGKPNVRVFATTTDDLNALADWLSKQGVKSVAMESTYIYWIPIFELLESRGIEVVLVNARTLHNVPGRKTDFSDCQWIQLLHSCGLLRGSFRPSDAITRLRTLHRQMANFVVERGRCTQWMQKSLDQMNVQVHRAVSDLTGTTGMAIIRAIVAGDRSPASLAKHRDPRCRKSIEEIARYLTGNWREEHLFNLAAALHHYDSLERTIASYEARLLEELKSLQPPERQNEPVPPHPNPIKEKTIRQRGGPEARATLWRFAGVDLTRIDAISTTTAQTALTEVGPNLAAFPSEDHFVSWLRLCPRTSVSGGKPLKKKKNGLGANRLAAALRMAATTVRNSKTALGAAYRRIARHKGAGVAVFATARQLARLVYRMLRFGQDYVDIGEQAYEDQYKVRRLASLKESARSLGFTLQEVASD

SEQ ID NO: 268537 - protein, 412 aa, unidentified
MSDDTVSWFAAVDWGSEQHQACVLDAAGKIKGERAFPHGGAGLAALCDWLASLAGHPGFVAVAIEVPHGPVVDALLDRGFAVHAINPKQLDRLRDRFSVAGAKDDRRDARVAAAGLRTDPHLFRPVQAGDPAIIELREWSRLAEELQQERVRLGNRIRQQLWRYYPQLLELADDVSAEWILELWAMAPTPAKAARLREATLARLLKQHRIRRIDAAAALGILRQPAITVALGVAEAAVLHLRSLIARLRLANCEFHQAERKLGELCAVLTQAEPAQGGEPSDAAILASLPGVGRSTLATLLTEAGGPLARRDYAALRTLTGVAPVTKRSGKTCIVVMRYAAQARLRQAVFHWARIAVQHDPKSRSRYEALRARGHSYGRALRGVADRLLGVACVLLKRHTLFDPAHGTAAEP

SEQ ID NO: 268538 - protein, 348 aa, unidentified
MLHVGMDMHKRYSVVTVVDDGGRELVKGAKLLNDEREILSFLKGLEEEQGEKVRVVIEAGPSWMWMCDLFDDYAIDNVLCHPQKTKAIASARIKTDRLDSEILAQLLRMDFIPKAYKPDRRTRNLREILRFRAFLARKRAGVKNAIRALLARGNINLPAAGLFGKEGLAQLGALDLPEPQRTILDVYLDILSLLSREIERVEGLIGEEFKRSERGRLLSTVPGAGEFLSLLILSEIGDVERFPDAKHLASYAGLVPSVRQSGGSERRGRITRQGSPWLHFPLVEAAIHAVRKPGPLREHYLRIKGRKGTRAARVAVAWKLCTYVYHMLREGKTYEELVSCLPSCGDLG

SEQ ID NO: 268539 - protein, 390 aa, unidentified
MSKKNTRNALDTSLSYAVIGLDLAKADCAVAAVPCADDELGLIDRMDYESLFEQAEKLGPTLFAMEPCCGYSQISLRLQNMGHEVKVISGHAVKNWIATHKSNQKTDLNDATALAKLALYDHDLQPIRVKNVEECRIASVQAIRIQLRTQATKSLVCFKSLCQCWGIVIRRGAAVKKLLGVEVASSLMILRDAYKFTMKQINALDKLLDALVEANEQARTMKTVLGIGTQTAARLAVTTGDIKRFPMPRSYVAYFGLAPRNIITGHSGTPSPSKRGALKPVSSRGQGKVSRRGDRVARSFIIQGAATIYMLYCKDMLPECQLRRWLHEQIKRGKPYGKIIVSLAAKLLRIVWALLTYGEKFDSHKAGVPRSVLAAMEKPLKHDAAAESAA

SEQ ID NO: 268540 - protein, 316 aa, unidentified
MSHAATPISRVLGCDVGKTTIAVFDDATGRSLAIANEPGALSDFAAGLEATCLVVCEATGGYESALLAALLAAGVPAHRADARKVKAFIRSFGTLGKTDAIDAKALARYGKDRCAELARWQAKDRERLRLQTLVLIRRDMVTDRLAYANRRAAPGAEPAHARLDALLESFDAQIKAVDADINASIAQCEPVARAVKTLVAIKGVGQKTAAALIALMPELGSLARRQAAALAGLAPHPKQSGGTEAYRRTRGGRPEVKRVLFMAALSARKHNPNLKAFFERLVQAGKKPLVAITAIMRKLVVIANAKLKTANALQLS

SEQ ID NO: 268541 - protein, 343 aa, unidentified
MQNDTRISVDVAKAVLEVAISDRPGHVVRRERLARAHFLPFMAQQPLAMVVMEACGSAHYWGRKLQALGHRVILLPPHHVRPYVRRNKTDRADAKGILEASRNEEIRPVPVKSVDQQVITALHRLRSGWMRERTARLNALRGLLRELGLFIPVGAREVVPAVWALIEDADSEMPEALRPVFADACREIREIEARVKTVERQLESMAEQLPGVTHLRTIPGIGLLIATALVAFIGDIRRFPSGRHLASYLGLTPREYSSGLKRNLGRISKRGDGYLRTLLIHGARSVLVHAQRQQPDRLRQWAHDLAKTHVHNKVAVAVANKLARLVWAVWTHGQPFEGMPKAA

SEQ ID NO: 268542 - protein, 323 aa, unidentified
MNSTTFSITIGVDIAKKKFDVASLMNDKYKHKTFDNNESGFSAFITWFLPLCGDSKPLICMEATGAYSLPLADFLVNQGYFVSLINPAKIHAFAKSELSRTKTDKADAKLIARYAFIMQPPLWSPPPANIRELQALVRRVEHLLEMIGMERNRQDTAHTKIVGSINTVLETLEAELKATRQAIHDHIDNHPDLKQRGDLLSTIPGIGDASVAHLLIALSEHHGFSHAKQVVAFAGLAPSLRESGQWRGNTHIAKNGNALLRKALYMPALCALRFNPLIRTFSERLKANGKNGKAVACAAMRKLIHIAFGVLKSGKAFDPNYAA

SEQ ID NO: 268543 - protein, 334 aa, unidentified
MENIALIGIDLGKNSFHIHCQDHRGKAVYRKKFTRPKLIEFLATCPATTIAMEACGGSHFMARKLEELGHFPKLISPQFVRPFVKSNKNDFVDAEAICEAASRPSMRFVQPRTESQQAMRALHRVRESLVQDKVKTTNQMHAFLLEFGISVPRGAAVISRLSTILEDNSLPLYLSQLLLKLQQHYHYLVEQIKDLESQLKRKLDEDEVGQRLLSIPCVGTLTASTISTEIGDGKQYASSRDFAAATGLVPRQYSTGGRTTLLGISKRGNKKIRTLLVQCARVFIQKLEHQSGKLADWVRELLCRKSNFVVTCALANKLARIAWALTARQQTYEA

SEQ ID NO: 268544 - protein, 419 aa, unidentified
MSFKILKFNCCGLDVHKTWIYACIGITDSNNRTEYKQARFSSFTKGLNELCDWLAKYNCKDVCMESTGKYWIPVFNILEQHEIWGTLSHPKYTKPMKGNKTDRKDAKWICDLYMCGMVKPSFIPPADIRALRDLVRYRFKLTCMITSEKNRAQNCLTVSNLKLDDVFSDVFGKSSRSITEQILQHPGEKFDVSPFVDGRCKTPIEEIQAAVDGAISKEQAVKLRQCLDHIDELQKHISEVEREILRLSDKYEAALNLIRTVPGFDKNPMTAIQVLSEIGGNMSVFPTAKHLVSWAGCCPRNDKSDRKIKSTRISRAGSYFKPVLVQVANALIKSKKHPEFTTRYKRIKTRCGHKKAIIAVCRMILTAIWHIFTDLKPYTPGGFLESRTVNKEKVLTTSQALNLLKQRGYLIKDDPSIAS

SEQ ID NO: 268545 - protein, 419 aa, unidentified
MTQKKYTESVSIVHPVCCGLDVHKRKISACIIYLHDGEVIFDVKEFGTFTRELLDLKEWLLQHECPVVALESTGVYWRPVHNILEDCMQIVLVNARHYKNVPGRKTDISDCQWLAELLRHGLLRGSFIPQPEVRQWRELVTMRNHFVATESDYRRRVQKLFETANIKIDSVVSDLFGVSGRNLMHLVLTVPTEEICFDDVQQCLRGRLTPKAKELFAAIQGFMTDHHRFLLNGYLDLIASCQQSIGRIEDKIAEVLKPHQDIMSRLQEIPGIGFIAAAGILSRLSTKVDAFPNSAALCSWAGVCPGNNESAGKRHSGRSPVYKHPLKTLLVEVAWAAVKKKGSYYRDKFYRLKARRGAKRAIIAIAHKILKAVYAIIKDGVHYQELGEDYLGERNKKAQILRLKKMAEKYGMELVAKAV

SEQ ID NO: 268546 - protein, 424 aa, unidentified
MKVTFQTCCGVDVHKSFLVATIIKTSSGIEPSYQKRRFSTFNNSILEFKKWLLENECLYVCMESTGKYWIPVFNILEDEINVTIANPKWVKAVKGNKDDTKDSKWIGDLFRLGLVRGSYIPCKKIRILREFTRYRYKLVSCRSSEKNRYQNALTVCNVALDSVVSDIFGKSSTSIIDYLLEQSGTSINHEEIASKLLRSLKSKEDAVIESVEGYQMTDSQKYRMHLVRAHMDYITAEINDVDKMIENMISSNPDFENAVQFLCTIPGVKRDSAITIISETGTDMSQFSSSKRLCCWAGLTPGSNESAGKKKSVRITRAGVYLKPALVQCAHAAVKSDKSPYYKKKYESLVKRRGKKRAIIAIARMILTAIYQMLSTGEQWNPSDLYKVDMPEALLEKQKQKAIKQAQKLLIREGLLPPTEPIAS

SEQ ID NO: 268547 - protein, 343 aa, unidentified
MNEISMIGLDLAKNVFQVHGVDASGKVVLQRRLGRKAVEKLFAKLPPCAVGMEACGSSHHWARVIGRHGHDVKLMPPAYVKPYVKRNKNDGRDAEAICEAMSRPTMRFVAVKSVEQQAMLSVHTTRALLVKQRTMVANALRAQLSELGLVAAQGHEGLHELMARLEVPSEEIPEMMRSALLMLVEQWQALDAKERVLEKQIVKAVRCDQEARRLMAVPGVGPIIASAVLAKVPDARLFRSGRDFAAWVGLTGRDHGTGGKHRPGRISKQGDRALRTLLINGASAHLRQQKRHGVSDPWLRELLARRPYKVTMVAFAAKTARIIWAMLAKGEDYRDRTSAPAAA

SEQ ID NO: 268548 - protein, 316 aa, unidentified
MRDPQVFVGIDVSKAQLDVALRPTDDRWHVSNDESGIAGLSERLQAVQPTLVVLVATGGLEVPVTGALADAGLPVVVVNPRHARDFAKATGRLAKTDPLEAQGLAHVAEAVRPTPRPLPEAQAQALSALLTRRRPLVQRLTAERRRLPTAPQRIRADIQAHMAWLARRLARTDADLAAAIRSSPLWRTNDESLQSTPGVGPKLSRTLVAEVPELGALNRQEIAALIGVAPFTRDSGTLRGKRAVWGGRAHVRAVLSMSTLAAVRHNPVLKAFDERLRAVGNAPKVALTACRRKLLTILNAMLKPRTPWRENYADHS

SEQ ID NO: 268549 - protein, 406 aa, unidentified
MEVIYERCCGLDVHKKTVVACLRAPGGSRRQSEVRTFGTTTDELETLAEWLQRGGCTHAAIESTGVYWQPVFNVLEHVCTVVLVNAQHVKAVPGRKTDVRDAEWLAQLLEHGLLRPSFIPPLRIRELRELTRYRLTLKRTRADETNRVQKLLEGANIKLGNVATDVLGASGRAMCRALIAGETDPIRLAELAKGALRRKRPALLAALRGRFTPHHAVLLQMLLDHIDDLTRHIATCDAQIRACRGPFAAEVELLESIPGLSATTVETVIAEIGVDMGRFPTAAHLASWAGLCPGNHESAGRRQTGRIRPGNPWLRAALVQAAWAASRTSSTHLRRFHERIARRRGAKRATIAVAHRLLVAIWHILTRRTPYVDSGPTPKEDRTIARLRRYYLRRLDHLGAGAAPAT

SEQ ID NO: 268550 - protein, 346 aa, unidentified
MELHTIGIDLGKTVFHLVGLNLRGEVVVRKKCSRKQLLHFTANLQVHLIGMEACGGSHFLGRALREQGHEVRLIPAQYVKPYIKTNKSDFIDAEAIAEAVARPTMRFVPIKTDDQLDLQSLHRVRERWVMRRTAVINQIRGLLLERGITLRKGRCHLDAALPGILEDAAMKLSGAVRLLLAQLKVELDQMVIRLEAADTLIKQIAEESEVCRRLEAIPGIGPLTATALIAAVGNGTAFRKGREFAAWVGLVPREHSTGGKQKLLGISKRGNGYLRRLFVQGARAVLQFREKQSSGLSAWLAQLAARAHHNVVGVALANKLARMAWAVLAKGEVYRPPVLASGLACR

SEQ ID NO: 268551 - protein, 404 aa, unidentified
MRFIGIDVHRDFCEVCVVDQATGEEQRRRVLTRPAELEAFANELDGGDLVALETSSPSTAVARVLEPHAGRVIVIDPRGMVRAGARAKTDRLDARTLARLLAAGVLTEIWTPDESTRALRRLVARRAAVVRARTRLKNEVHAVLARNLCPRPPVSDAFGKAGRRWLETLELSEDEQLTVRGCLRQIDVLDLDVAELEQALANRLAGSPELRRLLSVPGVNLVVAATFLAYVGDIRRFPNPKQLVGYLGLDPRVSQSGNDPARGGRISKQGAAEVRHVLSEAAWRGARVPGPLRGFYERVRVRRGPQIAITATARKLAVLFWHLLTRDEDYAFAMPSTVQRKRRALELRAGAPTHGGRPGPDGPCRPAATIIAREREIAIAAEQAYQRMLADWQRQPPRREHART

SEQ ID NO: 268552 - protein, 450 aa, unidentified
MERRQPQIKNWEGLKVIHPNAAGLDIGSEEIWAAVAPASAPAAVRQFGTFTPDLHALADWLATCGVDTVAMESTGVYWIPVYEILEARGLQVYVVNARHLKNVPGRKSDIQDCQWIQGLHSVGLLRGSFRPEGEIVALRAYLRHRATLIEYRGAHIQHMQKALQQMNVQLTQVIADITGVTGLAIIRAIVAGERNPQQLATLRQHGCKRSEETIAKALTGNYRLEHLFALQQALALYDFYTEQLRACDVEIERQFVNLKPIDDDLPPLPPTTKTDSHSKNGPAYDARTLLYQLTGIDLVAITGLNASTVQTIIAEIGRNVNAFPTEKHFSSWVGVAPHNDISGGKRLRSRTLKTNNRAGQAFRIAAQSAAKSPDSAFGAYYRRMKARLGAKQAIVATAHKIARTFYFVLKHRVPFHDLGGEEYERLANERERKNLQKRAAKLGMVLVPAT

SEQ ID NO: 268553 - protein, 386 aa, unidentified
MEGETFTPRDYDVFAGLDVDKKSIAATFSSPQGFIRSLHMPYSVDYLLNHVRKHFGDQKVAFVYEAGPTGYGLYDGLVAQGYRCLVAAPSMIPRAPGQRVKTNRLDSRGLSESLRGGQLKSIHVPSPIYRELRHLTQLRDTVVREAAAHKQRIKALLLLEGIGFPSATAGRQWTLRVKAQLRKLRCSRTVRFKLDQLLDSLEFCEKQVVSSTKEIRRFCKEDVELFQSIEYLMSIPGIGWIVASQLLARMGDWREIDNVRQLGSFLGLVPTENSTGDSVDRGSITRAGDGRLRSKMIQAAWSAIRQDGELREFYRSVCQRNPRGKGARIAIVAVARKLSTRIYAVLKKQRPYIVRKQVHSAPLTQEETSPQGTTRRCAEPGETDNS

SEQ ID NO: 268554 - protein, 328 aa, unidentified
MVAKVSDAIVGIDVSKETLDAYCAKGQRKQGRTFANSSDGWKLVRTWLKVMGSKQAHVCMEATGRHSLGVALALHEAGHVVSVVNPAQIRDFARTKLGRNKTDKVDAALIREYTELFKPEPWTPPSPAMRRLCELQTVRAGIIRSRAEWKNRIGSGLGDTTATKLAAATIEHFTTQLEAIDRAISETIDQDAELHARCDLLVSVIGVGDTLAALLMAKMPEPGVLHRSGEIVAYAGLNPSHHRSGTSIDRPTRISKIGNAELRSALYMPALSAMRFNPAVAALVARLKSAGRLKPRQIVVAAMRKLLVLCFGVLKTGKRFDPAIAMPA

SEQ ID NO: 268555 - protein, 348 aa, unidentified
MNQVTTIGLDIAKSIFQLHGVDAAGRSVLRRRLSRSRVLEFFGKLPRCLIGLEACASSHYWARELIKLGHEVRLMPAQYVKPYVKRGKNDAADAEAICEAVARPTMRFVDVKTTEQQSIMMLHRVRRILTRQRTQLSNALRSHLAEFGIVSPIGREGLDRLLKIVADTDDGRVPAEARASLDMLAAQLEGVKARILENDRRIIANARATEVGRRLLEVPGIGPVLASAFVASVANPAIFKSGRDLAAWIGLVPRQNSSGGKERLGGITKAGNGYLRQMLVVGAMAVIRYAQRDSTRRPWLVQLVSRRPTKVAAIALANKTARTVWALMTSGERYRTPQAIQAAVSAMA

SEQ ID NO: 268556 - protein, 387 aa, unidentified
MARKRTLSTLDTSIAYEAVGLDLAKTDVALAAFDSDHKEPYLIDRIPYDKLYELLADMAPTLVAMEPCSGAHQIAEQIQELGHEVMMISGRHVQAWVKDHCNGQKTDLNDAFAILNLAYDRWLTPIRGKTREECRLLALQASYRQLKGQRTKTMVHVKATLHAWGFPIRAGSFNQKVLHELIDTNREAFGDEVVETLHLMINRVRDLDHDIATVLKLLTEATKRDPRASLLRSIPGFGILTMSRWCAVIGDIARFDSPKQTMAFVGLVPNNRITGHHTETSSGREARGQGRMSKRGDKMLRSLCILGAASLCLMVRNDRLPDCPFVASIKERLASPRPWFKVLVYVAAKLVRIATALLKYGETFSYEKAGISKAVLKQWELEQAKAA

SEQ ID NO: 268557 - protein, 365 aa, unidentified
MDECTHIGLDVHKETIAVAVLRPGATACEERVIPNTPEALRKLFARFPDRASLRTCYEAGPTGYDTHRLLTSLGVPCEVIAPSLIPRRSGAHVKTDRTDARNLARLYRAGELTAVRVPSPAEEALRDLVRTREDLKSDRRIAQQRIRSFLLRYGRRYPTGSGRWGVRYELWLQTLRFEEPAAQAAFDHLMGAASVRAAQLAAIEREIEQAALRGSLAEPVARLRAFRGIDTLTAVTVITETCDFRRFGSARGYMAFTGLVPREHSSGAVRRQGAITKAGNAHVRRVLIEAAWAYRHRPAVRGKLAVRQEGLPPELLAYSWKAQTRLHATYRKLATRRGANKAAVAVARELSGFVWGAMTGRTDVR

SEQ ID NO: 268558 - protein, 340 aa, unidentified
MKLCGAIDLHSNNNVTVLSNEKDEVVYRKRLPNDLKLILQQLAPYQSEIEGIVVESTYNWYWLVDGLMEQGYRVHLANTAAIQQYNGLKYTDDDSDARWLAHLLRLGVLPEGYIYPREQRPVRDLLRKRGQLVRQRTANLLSIQNLYTRNTGSSMSANEIKGLQVEEIDRRVAENDLALAIKANLAVMGSADEQVEVLEQTVIGRVKLREEFRFLKTVPGIGQILALTIMLETGDIRRFASVGNFASYCRCVGSQKISNGKRKGSGNTKNGNKYLSWAFVEAANFAIRFSPKIKSFYQRKKSKTKGIVALKAVAHKLCRACYYIMRDRVAFNVTKAFGQN

SEQ ID NO: 268559 - protein, 409 aa, unidentified
MEVLYPRCCGIDVHDDFVVACFSRIEQGQRKKEVQRFRAVTGDLIALRNWLLERGCTHVAMESTGVYWRPVYDRLFGFFELTVANAQHMKAVPGRKTDKQDAEWIADLLQHGLLKKSFVPHREQQDLRGLTRLRTTLVQERARLANRLHKVLQEANIKLSGILSDILGVSGKAILYALATGETDGHRLARLAHPSVRCTQEQLADALESEIGEHHQFLIQELLTLIEGLDHSITHLEHQIEERLQPFEKTLARMEEITGVSWLVLQVLFAEVGTDMSRFPDDAHLASWAGMCPGQHESAGKRLSGRTRKGNRWLRAALIQAAHATGRTQTYLGEQYRRISKRRGKKRAAVAVGHSILVIYYHMMLTGEHYQEKGGEFFQQRDKQHNERRLVQRLEHMGYQVTLQPRPAA

SEQ ID NO: 268560 - protein, 371 aa, unidentified
MSANQNSIFVGMDVHKAAINVAVAARGRREPEAEWQLANEPRAVKKLMKKLKEMTCGAVMAAYEAGPCGYALQRQMCEQGINCVVVAPSLIPVKPGEHVKTDRRDARKLASMLQAGLLTEVHPPTPEDESVRDLTRAREDTKQDQMRARHRLAKMLLRHGFVFHSGKNWTKRHGEWLGQIRFEDGVSQRVFDGYLLVAQQVEERLKRIDEQLEEVARSERYRERVGWLRCLRGVDTVTAMTLLAELHDFRRFTNPRELMSFLGLTPSEHTSSSRVRRGSITKAGNSHVRRILVEAAWHYRHRPSASAYMRRRRDGQPSKVLAIADRAQERLHHRYFKLKEGYKKPHNVVAVAVARELVGFVWAVLHHGEAA

SEQ ID NO: 268561 - protein, 379 aa, unidentified
MPSENIVHIAIELSASSWLIGARLPDSDKVRLHRVDGGDTNALLALVDELRTRATSKSNGMAKVTCCFEAGRDGFWLHRVLTARGIATYILEPTSILVNRRARRAKTDRLDAEGMIRVLRAWLAGDRQACSMVQVPTPEEEDAKRPHRERQQLVQEKLRIENRIKALLFTQGIRKRPSLRSWDRDMAALRTGDGRAVPPSLRAELDRLRRRLVLTLELIGELDADRTNAVEEARSTDGMVRKIIALQRIRGIGENFAPVLVREVFYRSFVNRRHLASYVGITPMPYQSGGMDRDRGISRAGNPRARTTMIQLAWLWLRYQPGSALAIWFHERVGNLQGRTRRIAIVAMARKLLIALWRYVEAGVGPDGIELKAEIAATA

SEQ ID NO: 268562 - protein, 377 aa, unidentified
MKNVRFVGLDVHAETIAVAVAEVGGEVRSLGVIPNRAESIGRLVRKLGKSEQLRVCYEAGPTGYVLYWQLSELGVKCEVVAPTLVPVKSGDRVKTDRRDAEKLARSYRAGDLTPVWVPDAAHEALRDLVRARLAAKRDQLRARHRLSKFLLRHGRRAPEGTSPWSEKYLQWVKSQVQFEYAAQEITLTDYLHEVDHAAERIARLERSIDTAIESLPVKMRAVIEALQSLRGIAQISAVSIMAELGKMSRFEHPRQLMGYSGAVACEHSSGPRIRRGRISKAGNAHLRRIAIEAAWAYRHRPAIGKTLAARQQRSSAEVTALAWKAQQRLHQRYVRLIARGKNKQQTVTAVGRELLGFIWAIGVHVEREGKLPLRQAA

SEQ ID NO: 268563 - protein, 348 aa, unidentified
MNNMHYVGLDIHKKTISYCVRQSDGTILRENTIAATRPALEIWMRHLPQPWTAGMEATMFTGWIYDYLGESGATVKVAHSAMLKAIAAGKKKNDQIDARKIADLLRCDYFPECHMAPREIRDRRRVLRYRNLLVRQAVQMKNKVSGLLMEVGVQYNQQKVHGKKYFAELLHEQRKEMPPSLPELLQLSRSTIESLTGMERQLMRALEQDDLLAARVERLATIPGVGRVLSLTWALEIGEISRFSSVKDAVSYCGLCGAEKSSGGKAERTSLSKQRNKHLQSMLIEAAKLAPRWNAELALVYEREKLKGNSNQATLAVARKLVAYLMAVDRRKQGFTKTAPKVGEKQAA

SEQ ID NO: 268564 - protein, 319 aa, unidentified
MNTQSVGIDVEKEELVACIRSTDDKTAIPAPFPNNSIGLKKLVVHLKANEITDQKPILLESTGPYHWKAARTLADAGFFVKVANPLHTKQIARLSIRKRKTDKVDAAHLAFLASQAYGYRFIETEEMARKKALVRHFWKLRRVATNLLVHERYLKEYRGVSRASVSAILVKRCEKLKKEIVAEWSGGNDIKYLDSIPGITPFLASTLLAELLPLERFERIDQIIAFAGLDPSVKQTGGKKGTHGPISKRGSPTLREVLFLAAFGSFSKEPMRTVYKRYKDRGLHHNAILCVMARKILRIAVSLLKKRRIFDPNKFLTGT

SEQ ID NO: 268565 - protein, 363 aa, unidentified
MDHYVGIDVSLEQSSVCVVDASGRIVREAKAASEPEALVQFLRGLALPLARLGLEAGPLSQWLYTGLAAAGFEVVLLETRHVKAALSAMVVKTDRKDARGIAQLLRMGWFRPVHCKSPPAQEIRALLVARKQLQAKVRDVELSLRGLLRGFGLKVGEVSKGQFAARVRDLVAGHPMLEQIATAMLQARAGLQEEFAKLHRAMLAIARVEPVCRQLMTVPGVGALVAVTFTAAIDDPHRFAKSKAVGAHFGLTPKKYQSGETDVTGAISKDRRCAGAHGPVRGGAHHAHAGWAFLGPQALGAGSCQAPRHEASQDRPGAQTGRGHACDVARRRGLPVGQAERGPGGVTSRRSSGLGQGRAALSL

SEQ ID NO: 268566 - protein, 417 aa, unidentified
MEPQISFNQVVSRGCGIDVHQKVVVATIGGEGLTKATREFGTFTRSLTELKDWLLENGVTHVAMESTGIYWKPVYHVLEPTTLKVWIVNARHIKYVPGHKTDKQDSAWICKLLLAGLLKPSYIPAKEQRELRDLTRFRTKMIQDVASEKNRIVRILEDCNIKLSSVLSNTQGVVATKLIDKLCEEGTITMSDIEEVYHKRLEASKEDLYEACQGLIDKHHIYLLGLIRQDIASTEAVIKNLNGRIKEVLSGYDNVLENLKAIPGLSTKTVEDLVAEIGLDMSVFPTEKHLASWAGMCPGNNESAGKKKSGRTTHGNKQVKAVITEAAWAATRTKNTFYSARYHRVAARRGKKRALIAVGHSILKSVYHVINGMEGYKELGADYVTQRVEKRRKLYLKKELEKLGYAVQLIQPVPQAG

SEQ ID NO: 268567 - protein, 416 aa, unidentified
MNDSRKRYIGLDVHKHYLIALGVDANLKVVLPARRVELFRLEAWMKKSLTKQDEVVLEMTTNTWQLYDEIIQYAGSVTVVHPPHVALITRSQVMNDKIAASILARLLAKGLLVGIWIPPQEIREARGLVAQRQKLVRLATQAKNRLHAVIQRHHLVPPTGNPFGAKNKEWWMSLSLGKLEKLNLQSDLETLQFAEKQVRDMTEIMEGMAAEQEEIGRLLHLAGFGVVTAMTVWAAIGDIQRFAEPKKLVGYAGLGARVHDSGMTSRSGKTLAPGASAGVTKAGRRDLRTVLVEAANAAANSHPHWKAELARLEPRLGRNKAIVAIARKLLIAVWFVLQGKTDKYAEPEAVAQKMLKFAYVVGKANRPKGQTAAQFARIRMDALGVGSELTSIPWGSKKPIPLPPSKLKERSDVPNM

SEQ ID NO: 268568 - protein, 368 aa, unidentified
MQVRQKQMPDRLRQQRRLIVSFRCLDGSLRNAVPCIENIDLVIDDDGELLAEGKTDSEVVDIIAFLDDLHVEITEAGLEAGTLTQCLTYGLQSAGFEVVCMEARQVKAALSAMRNKTDKNDARGIAQLLRSGWYSRVHVKSIESHQVRALLSSRRAVLAKCIDLEQEIRGLFKVFGIKLPKRLGHGAFDPKVRPLIEADEALSHALLPMLDARLVLYHSFRELDNRTRHMPNDDPTCQRLMTAPGVGFVTALTFKAGVDDPTRFKRSRTVAAHFGLTPRRFQSGEIDFDGHISRAGDANVRSTLYVAANSMLTRSSKWSPLKAWGMKLAKSRGHKRAVIAVARKLAVILHRMWIDDTQFQWSTEAARS

SEQ ID NO: 268569 - protein, 412 aa, unidentified
MNPVVGLDVAKGESQVQAFLEKKKPYQGSFKVTHTIEGLETLFQFLRKIENKTGIKPPIVLESTGHYHTPVVQYFEERGYLLIVVNPLISYRAKSSSLRKVKTDIIDARHLCELYYKEDLEPYKKRGIQLLNLRNLSRQHENITGIYVQTKLQFQAVLDQVFPEYRGVFGDLYSVVSLLTLLEFPTSEDILAVGEETVANRINELCPSRSKKWANTQAEKLTAASARNPFQRTLYQSHILSLEMYIKMLLEYQKHLSKFEDEIDALAKEIKEYKIIQSIPGIGEKIAATIISEIGEIERFNHPKKLVAFAGIDPSIFESGKFKGTVNRITKRGSGRLRHALYMAVKCAIRDCRKKKTTDEIIPRNKRLREFYDKKREEGKPFKVAVIACANKLLHWIYALLKSNSPFQDSLV

SEQ ID NO: 268570 - protein, 338 aa, unidentified
MKLTPQQLNTVTFIGIDAHPTTHTAVAMNRFKETKGYLTFPNTLVGISQFIRWLAKIEQQKENVVIGIEGGGNERHALVLAILATYDLVFEVNPLYTKHKRGFGTRGDKTDLRDAKLIAGVLTTELEELPRITPGQLTSSMLCLKKTVWFYEEITVQGARLKNQLHKLLRESNLTKDTKEKQILAAIMKTRKQELSFVQKTQKKIEQDLKALSINCGLNLTGIRGIGTITAARLVAHTNGIERFRNRNAYVRYTGIAPLERSSGKGRKFVNTTRGNRKLNSILYYAALTRIVHSPEVKKLYQEKISSGKTKQEAILYLMRKTAILVYSMLKSGEAYRG

SEQ ID NO: 268571 - protein, 342 aa, unidentified
MQAITVGLDIAKSVFQVHGVDCNGQVVIRRQLKRRYVLTFFEKLAPCLIGIEACASSHHWSRQLLALGHDVRLMPPSYVKPYVKRQKNDATDAEAICEAVSRTNMRFVPTKTPEQQSGLVLHRTRHLFIRQQTSLINAIRAHCAEFGIVAPVGRQGVEELLNVIADAEDEQIPEIARACLSALGDQLHRIKAQILEFDRMIGAWHRSCEASRRLDEIPGVGPALATALVASIADPRTFRSGRDFSAWIGLVPKQSSSGGKPRLGSISKQGDRYLRGLFTAGALAVIRYAKIHGIGHRPWLTALLARRPTKVAAIALANKIARIAWAMMARGERYREPVALAA

SEQ ID NO: 268572 - protein, 391 aa, unidentified
MPMYFVGIDISKYKHDCCIISAADQQIISKFTITNDKDGFEQLLTALNSLSNPEDIKIGFESTAHYALNLELFLENAHHSFMEVNPVLIKEYKKSTTLRRTKTDSVDCESIARWLMTVEYKPHSKGFYHSYSLKSLTRLQDRLIRQRSFYLVKITNVLDHTFPEFKPFFNERLSKTAIYLLENYGSAEKMAHMNSASYDKLRCASRGKFSIQQFLRLKELAANTVGVNNSIFDIELNSLLTLYNSLCKEIKTLEAEITKLIEEVHPHYMSIPGIGPISAAVIYAEYGDISNFSNPGQMLAFAGIEPGINESGTESHGGRMVKRGSSQLRYALINCCLPLIRFDMTFATYYAKKRAEGKPHRVAITHVAKKLIRVIYALERQNTDFCVQKLR

SEQ ID NO: 268573 - protein, 357 aa, unidentified
MGKSIRNFATVTRVGLDLAKRAFQVHAVDAKGEIVVARKLTRNQLIPFFAELPPCVVAMEACSSAHHWGRALIELGHEVRLLPPAHVKPYVRRNKSDQVDAAAIYEAMSRPGQRFVPVRSIDNQAELMRHRARELLAGQRTAALNALRGHLAEIGLVAPQGAQHAYGLKRMVADGFNENGEIVVPDCVRGALRSLVGQIDALDEAIGAIDRELAASVKADETAKRLMTIPGVGPVTASAIMATIQDASAFASGREFAAFLGLTPRQNSTGGKTRLGRITKMGDRYLRKLLVVGACATLRHRKGHNDALRLWASGMLERKTVKYKFNLTAVALANKVARIVFVLMTRGGQYDGRPVAA

SEQ ID NO: 268574 - protein, 357 aa, unidentified
MKKNYRLQDHVVKGKDIFVGLEDSKKTWKLAVRSEKMLIQQASMEARYPVLIRYLRNKFPECTVHLIYEAGFKGFNLYDQLTEDGIDCVVIPPHVVTEPKVNRVKTDKRDARRLAKVLENHDFKDGCYVPDKERREDRQVSRTLIALQKDVVRTRNRIRKFLDFHGIEVSFTGRWDRQEFRALKKLELNEPLRISLDILLTQLEELWAHQVTLRAALKKLCKKERYHKAFTIARSLPGIGWFTAIRLVLELGEDLSRFGSGKKIASFVGLTPSENSSGETEHRGRITGMGPGFIRAILIENSWIAIRKDPVLLAKFTRVWHASGNRKKAIVAVARMLIVRLRACVMSGTPYKVGIAA

SEQ ID NO: 268575 - protein, 343 aa, unidentified
MDHFAGLDVSVKDTSICIVDDTGRITREVKVASEPGALLAVLMNASHRFKRIGLEAGPLSQWLFSALAEAGLPVICVETRHMRAVLKAQINKTDRNDARGIAQMMRVGLYRPVHVKTLRSQKLRMLLTHRKLLQSKAIAVENDLRATLRNFGLKVGMVGTVRFEARIRELVENVADLVVLVEPLLVVRRVVREQIGILHRRLLAIVRDDEVCRRLMTVPGVGPVVALTYRATVDVPARFRKSKSVGAVFGLTCSRDQSGERDRPGAISRCGDEMMRAMLYEAAQAMLLRSAKWSWLKAWAMQIARRRGMKRAIVALARRLAVIMHRIWTDGTEFKWTREAAAA

SEQ ID NO: 268576 - protein, 346 aa, unidentified
MTVKYMAGIDLHSNNLFCAIVDLAGKRVFEKRLPCDLESVLQALKPFKKRLEKIVVESTYNWYWLVDGLQDHGYTVVLANPAAMEQYNGLKHADDKSDGFFLAEMARLNILPTGNICDRTIRPVRDLLRRRMGLVHHRTSLVLSLKSLHTRMTGRDLETGRLKRLEPQDAEKLFAHPADQLITRLDLQLVEQLGRSIQEIETRILAEAKRMPDYQVLQTMPGVGKILGLTILLETVDPRRFAGPGHYASYCRCVDSRRLSNGKKKGENNSKCGNKYLAWAFVEAAQFARRHDLACRKFHDRKSAQANGIVATKALACKLAKAAWHMMSENTHYDGGRIFPQVKMNK

SEQ ID NO: 268577 - protein, 361 aa, unidentified
MLQVALPSSTHELEEKGYVMAVVIGVDPHKASNTVAVIDEATRQVIGRERFPNDMKGNRAMLVFAHQFESRLWAVEGANGIGSSVAQRLVAAGEPVVDVPAKLAARVRVFSSGHGRKTDDTDARSVALAAISSERPTPVKPDGVTVGLRLLADRRNDLVSLRTQAVCRLHRLLRELIAGGVPRRLSAERARQALNRVRPSNVAERIRKQLATELIGDIRVLDRRIKTVTATITTEVRASNSSLIELFGVGPVIAARILGEVGDVARFPTRNHFASYSGTAPIEVSSADTTRHRLSRAGNRRINHAIHMAAVSQIRNPGPGHDYYQRKLTEGKSRKEALRCLKRRISDAIYRQLTNDAKQTT

SEQ ID NO: 268578 - protein, 353 aa, unidentified
MQRFIGIDVHGQSCTLVVMGPSGRRLGEYVVETNAKVLIERMRSIAGDKYVCMEEGTQSEWLCEILNAHAKEVVVTQPLRRAGSKNDAIDAWALADLLRRNAVERSVFKSPRTLTQLRQAARGYAAMRQDMIRAKCRLNALYRSRGIQPTAEIYDPDARETWLSKLPPSHRPLGELLSEQVDRLSQSHQTAETLLLEQAKLTPVTHRLATAPGIGPIRAALLTAIVVTPDRFRTTRQFWSYSGLGIVSHSSSDWMRDKTTNTWARKPTVQTRGLNRNRQPELKAIFKGAATTVIQQMPNHPLHQDFQRMTDAGIKPNLAKLTLARRIAAATLAMWKHQEDYDPSKARRMPQSQ

SEQ ID NO: 268579 - protein, 367 aa, unidentified
MKKISTVATKQKKNFPPQKLTIGLDLGDRWSWYCVLDEAGKIRLEQRVSTTPKAMGEVFGGMPRCRIALEIGTHSPWISRMLSALGHEVIVANARKVRLIAESRKKDDRLDAQTLARLARIDPELLYPVKHRSAQAQADLMMIRARAGLVRARTALVNTARGLAKSYGERLRGCNVRNMNPEKAEGLSPELQAALEPLLNAIESLSERIVEYNERIEGLAQHSYPQVALLKQIKGVGTLIGLTFLLTLEDAHRFRQSRDVGGYLGLQPGRRNSGQSEPQMHISKEGDPYLRTLLVQGAQHILGPFGPDCDLRRWGLKLAERGGRNSKKRAIVATARKLAVLLHHLWVSGEVYEPLHNSNPTTVAAAA

SEQ ID NO: 268580 - protein, 465 aa, unidentified
MTRQTRRRAPKPRQSPAALERLHPHAAGIDCGSAEHFVAVPPDRDPTPVRSFPTFTGDLHRLADWLTTCRVTHVAMEATGVYWIPIFEILDARGFHVILVNARHVKNLPGRKSDVSDCEWLRDLHILGLLRGSFRPADGIVALRGYLRHRTTLIESAGALVQRMQKALVQMNVQLPVVVSDITGVTGLRILRDIVAGQRDPQQLAQHRDYRCHASQAEIVAALTGNYRPEHLFALQQNLELFDIYQRQLTACDVAVEAHLAHLAATTTPPPAPLPAARRRQKPRDNEPRFDVRTPMHQLTGVDLSQIDGIGPYNALRLLSEIGTDMTRWPTEKHFTAWLTLAPQNKISGGRLLSSRTQPSANRAAAIFRLGAMNLGRTRTALGAFYRRVAFRIGKAKAITATARKLAVLVYRTLKDHLVYVDTGADAYDAQDRSRLVRRLRHRAEHLGFGLVNLATGEVVEGSVS

SEQ ID NO: 268581 - protein, 443 aa, unidentified
MIKTSQNERRAAGIDVGSEQLFVAVGCGCVRVFSSFSASLVELKDYLLQQKVTTVAREATGVYWLPVYEVLEAAGLEVYVVNAAHARNLPARKTDMKDCQWLAELHNKQMLNSGFIPPATIRELREYTRLRQDHIEMSSPHILHIQKALDQMNIKIHEVLSDITGATGQRMVQAIIDGVRNPELLLALCDPQVLKNKRQRLLAALEGRWKESQVFALRQAYENWLHYQKQIAACDQKIGRVLERLAANTPTREPVEPPAAKAKSKRLHKNAPDISNLDQLIVRISGGCDLSRLPCLTSYSIMQILAEVGTDMTRWKSAKHFTAWLGVAPGSRQSGKTKKSQPRFRGKAGRLFCVVSQSLAQSKYLALGGFYRRVRGRRGGQVANIAAARKLAVLFYNTLRFGWAYVEQGLAEYEKKYKEQYLKRLRAAAKHLGMQLVPEPTSA

SEQ ID NO: 268582 - protein, 330 aa, unidentified
MERQYIGVDLHKQFFQACAMSDAGVRLWEMRFPRTEGGFLLFRARCTGNTALAVEACGPTWAFVDAVQAAVGTVCAVDPRKTRLKAGFAAKTDRLDARRLADALRRDSVVSIYVPPAAIRELREVCRGRHQVIRLRTRLAQMIRALLLRSGVADVPVRRVYSASGLQWLATVTLPDDAAANLARYRRLAIAIQAEAVAAEAAVTARAAVDPIARALDALVGIGPILALTLRAEIGHITRFARGAELASYAGLVPRVDASAGRYWSGRITRQGSPWLRWALVEAAMHAIRRPDAIGRWARQLALRKGAFKARVALARRLCDDIVTVWPRHA

SEQ ID NO: 268583 - protein, 363 aa, unidentified
MEYIAFDAHKHYTLASVTRPDGQLVREERIEHERGALRQFLERCERGSPVAVETIGNWYWIVDEIEAAGCLPRLVHARKAKLMMGEINKTDRLDARGLNRLQRNGTLPTVWIPPGELRDQRDLPRTRMVLVRQRTQLKNRIHATLAKYALHDLEVSDFFGVRGRALLRQRFDLLPPHTAYASQQLLEQVEELDRRVREFEQRIQAVFKPTPAIQLLLTLPGVGLTLAAVIALEVGDVARFASAEKLAAYAGATPRVHASGGKTRFGPSRPDVNRYLKWAFVEAANAICIGRGRAPHCHVSRLYERIARRKGHAKAIGAVARHLAEATFWILRKHEPYREPKASAVSPTGDKRGWPLSSRKLDR

SEQ ID NO: 268584 - protein, 319 aa, unidentified
MVKYIGIDLSKDTLDVDLPGGVVCYAQTAADHTRLLAALPAGVIVVVEATCPYGLRLLGALHQAQRPVCVVNPLQARRFAQSQLRRSKTDRSDARVLTAFGDAFKPRLTEAKSVEQQQLAQRQALLELLKKQLAALDNHAQALALARWPDPVSEAALQEQMTRLKEQIVQLEAELDASVQAAFPAYERLRSIPGLGPKTVAALLLAGAGLGAFPGWRQAVAYAGLCPRHYQSGTSVKAPTRLSKLGDSRLRRLLYMGSWSACRVNPACKALYERLIERGLAKQQALCAVAARLLRQAWAIFNDPEKRLFDPKFHLPTGN

SEQ ID NO: 268585 - protein, 391 aa, unidentified
MIFVGIDVAKDTHYAAVSDDSGAVLVKPFAFQNNAEGFCLLLKKLSEFDRSKLLIGLESTGIYSENLICFLYESGFRLAVINPIQTATLRKTAIRKTKTDKVDTMLIIKSLMVNSYRLYSQRDADFLKLRTLCRFRQNVKKSKARLKIQLAGYVNLVFPEFGKFFKSGIHIAASYALLKKHSSPKEIAALRTSILCTLLSKASHGRFGKDTAEALKSLALSSVGVKNPYISIQIAQTIAQIELLEQQIKDLNSAIEEAMESLNSVLMTVPGIGAVNAACILGEIGDIKRFSKPCKLLAYAGLDPTVRQSGQFTAKSTRMSKRGSALLRYALINSAWQLTLNDTTFKAYYDLKRSQGLNHYGALGHVAHKLTRVIFKLLTSDTPFNPAKLVA

SEQ ID NO: 268586 - protein, 343 aa, unidentified
MQITTIGLDLAKHWFQVHGVDGNGHVVVRRRLWRSGVIAYFRSLEPCLVGMEACATAHHWARELTALGHTVKLMPPAYVKAYVKRNKNDAADAEAICEAVARPSMRFVPMKDAEQQSLLMLHRARSLLVRQRTMLVNALRAHMAEFGIIAPQGLRHVEILTKSIAHEQERLPELARSILQTIVDQLNGTMARIREIEVRLAKWHRQSRVSRLLATVPGVGIMGASAIAATVADPTLFRSGREFAAWLGMTPRQNSSGGKERLGRTSKRGDKYIRSLLTAGAVAVLRHARNRPTRDGEWVRALLARKPTKLAAVALANKTARIVWAVMMRGDGYQPKEVFGQPA

SEQ ID NO: 268587 - protein, 459 aa, unidentified
MPKKREGKGKSRGMLVTLEPHAAGVDIGAEEIYVAVPADRDESPVRCFGTFTRDLYEAADWLRACRIRTVAMESTSVYWIPLYQILEERGFSVFLVNAQHVRNVPGRKSDVSDCQWIQYLHSVGLLKASFRPPAEICAIRSLWRHRESLIQMASQHTMHIQKSLSQMNLQIHHVLSEVTGVSGLAILDAILSGERDPMTLAGLCNWRVRSPREVVAKALVGDYRPEHLFTLRQSLRGFRYYQLMIAEVDRELEKLLQGLPRCEGAPEQMPPRTKACIYQRASNEPAFDLRGELYRIAGVDLTDIPGVSTNTAQTILTEVGPNVSRFRNASAFASWLGLSPEKQVSGGKTLYTKTRRVKNRAAIALRLGASCLYHAKNYLGEFFRRMKFRLGAPQAITATAHKLARIIYHMLRTKEAYAESILAKCDELAITRAQARLRRQAARLGYVLTPQTPPKGVVL

SEQ ID NO: 268588 - protein, 485 aa, unidentified
MESFIKPIRDRAESVELHFWETDDMAKQPGKRTKDGTKVDATEGLPPLNLHAAGIDVGSAEHYVAVPPDRDAEPIRKFGSFTADLHRMARWLKDCRIKTVVMQSTGVYWMALYDVLESHGLEVNVANARHTKTLPGRKTDVQECQWLQKLHTFGLLNNSFRPTEEIRTLRGYLRQRENLVAAAATCIQHMQKALTEMNIQLANVISDISGTTGLAILYDIVRGERNPYKLAMHKHSRIRASRQEIARSLEGTWRQEHLFVLEQSLDLYQTYQQKIQTCDERIDGQLRSMEPRIDPMSKPIPEPRRGKDARGHQSGFDLRGQLYRITGVDLTRIDGIEVQNAQTIVSEVGVDMSRWKTEKHFASWLGLCPDNRTSGGKVLKRGTRHVVNRASTALRLAASALLRSQSALGAKFRRLRSKLGAPKAITAMAHMLARLVYRMLKFGHDYVDRGVEFYETKYQQQRLQWVTRQAAALRMQLVPLTTVTH

SEQ ID NO: 268589 - protein, 363 aa, unidentified
MTGQRTSVGLDVHARSVVGRGLDEHTGEVLAARLTPAHEDVIGWLRSLPGPVRATYEAGPTGFGLARALEAAGIDCVVAAPSRLLRPSGERVKTDAKDALHLAQLLAVGQVTAVTVPDEETEAARDLVRARDDARGELMSTRHRVTHLLLRQGIVYSSGTPWTGIHQNWLRSQHFGRPALQLAYDAALAALAAAEDRRDRLDEAITQLADGSRFTPIVDRLACLRGISTLTGFGLAVEIGDWSRLAPATIGAYLGLVPGEHSTGENRRQTGVTKTGNSHARRLLIEAAWHHRPPYRPSARLQRRWQHASGAVAAHAAKGNRRLHARWRAFDARHKRPVVANTAIARELAGWCWALAVMDPDNH

SEQ ID NO: 268590 - protein, 342 aa, unidentified
MDVSLESVCVCVVDGSGRIVREAKLASEPDALIGWFTALDFPVARIGLEAGPLSQWLYAAMAQAGLAVELLETRHVRDAFKAMPVKSDRTDARGIAQLMRLGWFRPVHCKSLPAQEVRALLTARKLVQAKRHDLEMSLRGILRGFGRKVGKTTPRMFEGRIRELVAGHATLTIIADALLAARAALARELRGLEKRVRETARTDERTRLLMSTPGVGAIVALTYVAAIDDPGRFRSSKQVGAHFGLTPRKYQSGETDVTGRISKIGDGSVRTVLYEAANIILTRPVKGSTLKRWAMAVARRAGPRKAKVALARKLAVVLHRMLADGTPFVAEPATRAPIGAAA

SEQ ID NO: 268591 - protein, 342 aa, unidentified
MSIVTVGIDLAKNVFAMHGVDAAGKPVLVRPSVARDKLLELIASLPPCLIGMEACSGAHHWAREFDKLGHTARLMAPKFVAPYRLSGKRGKNDAADAAAICEAVTRPQMRFVPLKSADQQGQLMVHRARQGFIEQRTATLNRIRGLLSELGIVLPLKAATVRRQALQHLEDLPGWANTVIGDLLSEVSHLDERIAQYDRHIGLMARHSTQAQHLMQLAGIGETTATAIVSTVGNGHDFVCGRSFSAWLGLVPGQYSSGGKQRLGRITKAGDAYLRSLLVMGARVVLAAAMNSKAPKQDPLSRWARALAERRGYWRAVVAIAAKNARLCWAVLQRGDNFKIPA

SEQ ID NO: 268592 - protein, 354 aa, unidentified
MAPPVPIIGIDPHKRSHTAVVLDDCEEVIAHLRIDAGHCQADQLLDWAPPDPARVWAIENANGLGYLLAQQLIARGETVVDVPATMAARARKLSGKSGTKTDAHDARSVAIAAAHHRSLRQIIPEDLTTVIGLLLDRRWQLVSQRQRTICQLHATLTDLTPAGAKTHLTCDKTVALLRRIRPVTAVEASRKQVAQELLEDWRWLNRRIPPAEDRLFRAVAAHGTTLTSIYGVGDVGAATIISIVGDVTRYPTAGHFAAFCGTAPLQASSGDVIRHRLSRRGNRQLNKVLHVAARCQVRNGAPGRAYFLRKIEEGNGHLEALRKLKRQLATVVYRRLLADQAVRGGQVGTRPKSA

SEQ ID NO: 268593 - protein, 409 aa, unidentified
MRVIGLDVHRNFAQVAIVENGQVSQHGRFAMDRVAVLKFAETLTKKDDVVLEATGNTAAIVRLLEPFAHRVVIANPLQVRAIAWAKVKTDKIDAATLARQHAAQFLPEVWMPTEEVCERRRVIAERTQLVSQMTRLKNRIHSILHANLMPQETGRIFSAKGRAILEGLPLALDQMRMALRHHDEIQRLAAELALIDQDVARHALDDPEVRRLMTIGGVNVVVAASVLAAIGDIKRFSSSQRLVAYLGLNPSVHQSGDRPAYHGHITHQGNGHARSMLVEAAWVIGMGPGPLSAFFHRISLKRGQPVAAVATARKLAVLVWHMLTKEQDYTWVRPALLQYKLRALELISGRPSRRGGKTPGPARDYSIKPVRDAERDRVREAEKAYENFVASWKEQPPVKRNPPVKGESL

SEQ ID NO: 268594 - protein, 316 aa, unidentified
MKIVGIDVSKESFDCVWEAEGRTRHQRFEYRDAGMEALLEQTPPDAHYVMEATGIYHARLALKLYESGRCVSVVNPLVIKRFAQMRLSRVKSDKADADLIRRYGEGHTLSPWAPAAAEVLELQQAHGWLDDLIGERTRLLNRRQAHTCHTKPSSFVAHQMSAQLRQLDKQIKDCERHLEETVKKSFLAIYERLLTIPSMGPKTAIELIIVTEGFSRFEDVKALCAYIGVSPTTFRSGTSIHGKGSIAKMGQGRMRQLLYLCSWTAKRCNPACKALHARLKAAGKPPKVINIAIAHKLLRQAFAVATMNRPYSAEYP

SEQ ID NO: 268595 - protein, 346 aa, unidentified
MEHYAGIDVSLERSSVCVVDALGKIVKEAKVSSEPAALVAFFEALGFAVRRIGLEAGPLSQWLHAGLKGAGFEAVLLETRHVKAALSAMTVKTDRKDARGLAQLIRMGWFRPVHAKSMRSQEVRALLVARKQLLGRLIDVELSIRGILRGFGLKVGPVTRKGFDARIRELVTGQATLERIAGAMLSARVALKAEYEKLHKTVLAIVRDDAVCRRLMTVPSVGPLVAITYKSAMDDPNRITKSKAAGALFGLTPKKYQSGEKDVTGGITRAGDEMVRTALYEAANVLLARITRFSKLKRWAMDVAKRRGSKRAKVALARKIAVILHRMWVDGSTYRWTETQPIAAQA

SEQ ID NO: 268596 - protein, 310 aa, unidentified
MFSYPAGIDVSKGSLEVRVNQLERGVSCRNAESDFPGLIGWLKLHQVGSVLLEATGGYERNVMKALQAADFEVIRINPCRAKAFARAMGQQAKTDPIDAQCLAQFAAVIDSPGSRVTSPEQDELRALVQQRENFVHQRDDDKRRLKTASSEAVKPALQSHIDYLNQAVKSIEQLIRQSAEKLDSEKAARLCSVKGIGIVTAASLMAYLPELGEVGKRPIAALAGLAPYNNDSGNHKGARHISGGRFAARRSLYMACWVVIRDQPEFQARYKALRDKGKCAKVALIACMRVLLIRLNAMLRDGTEWKAHAA

SEQ ID NO: 268597 - protein, 339 aa, unidentified
MNRIVVGVDIAKRVFQLHWVEPETGEIVALQLKREKFLEHFANRSSCLIGMEACGGSQHWARSLQKLGHEVKLLSGRMVKPFVVGNKNDAADARAIWTAVQQPKIKAVAIKGEEQRAVLALHRMREQLVKFRTAQINGLRGLLTEYGEVMPQGRAGIKRDIPGALGRLSDRLPAMVIETLREQYARLGEIDEQISQIERRLRQWQREDSATMRIAVIPGVGLLSATAAVATMGDAKAFKSGREFAAWLGLVPRQTGTGGRVRLLGISKRGDKYLRTLLIHGARAVLTHSKSPPEWLSELMKRRPKNVAVVAMANKMARTIWALIAHERAYKQGYVSRPA

SEQ ID NO: 268598 - protein, 365 aa, unidentified
MAEVTRGAAARVGVDLSKRVFQVHAVDRSGRVVLAKALSPDRFFAWCAELPAGCLVAMEACGGAHHVARRLRVLGLDARLIAGHFVTPYRMAGKGGKNDANDAAAICEAAGRPHMRFVPVKTAEQQGQLSVHRLREGYKAERTALINRIRGVLAEFGLVFPQSPEALRRVLADVLEDASNELTGIARLVLQRAQLHWIDLDLQMKWCDERIEAHARSDDRAARAAALQGIGPIGASALVASVGDFRQFSSAKQFGAWLGLVPSQNSTGGKARLGRITKRGDDYLRTLLIQGAKSAVMTAAKRSDRISQWLVQLKERVGWQKAVVALANKNARILWAVLTRDGAFDPNHVPEAPAPHCALSQRPAI

SEQ ID NO: 268599 - protein, 343 aa, unidentified
MKLSRVGIDLAKNVYQLHGVDRTGKTIWKRRLKRHQWLKVLLDNTAPGCVIGMEACASAHHWGRQLQSRGYTVKLIPAQFVKPYVKSNKNDARDAEAICEAMSRPNMRFVTVKTIDQQDIQATHRVREDLKVRRTAKGNQIRGLVAEYGLVAPKHMSSLRAAIPCWLEDAENGLTHYFRSLLHGLWDDLLALDDRMSEMDKTINRLAKGNEDCVRLQQLRGVGPMISTALIATVGDARQYRKSRQMAAAIGITPKQHSSGDRDRLLGISKRGDVYLRTLMIHGARSAVAAAKHKDDPLSRWVTGIANRSHLNVAAVALANKNARMAWAMLRNKTDYDPAFAMS

SEQ ID NO: 268600 - protein, 469 aa, unidentified
MKPNHRRCCGIDVHKNSVTVCVLPPVGQARTEVKRRKFRTFTRDLKQLRIWLQKCQVTEIAMESTGQYWRPLWNLLEGQCARLILVNPQHIKGLNGYKTDPKDAQWIADLLESGKLKGSWVPTRPIRELRDLTRQRVNLMEDLNRVKNRIEQLCQSGNIKVSSVATDLFGVSGRKMLKALVESQRDGGWMADYAVGKLRAKRQELELALEGTFTAEQRWLLDRELRQVEWLEKEIAALEQEIERRVAEYEEPIQRLVTIPGIDRKTAWTIVAEVGVDLKAFPDAKHLASWAGLCPGNRESGGKRMSGRVRKANRYIKRAMCQAAWAAAHTKNTYLSAFYRRMSIRKGAPKAVIALAHHVMVVVHQVLSRKEEYVEFGSDYYDQRNKPRTVARLAARLARLGYEVELKLIQNPVTPVGPNVQTPPQSHQGNQPSVGPEEQKRRRGRPCKCAARGIICQHRGATAANVLIQ

SEQ ID NO: 268601 - protein, 429 aa, unidentified
MNNTTITDKTTIPTAFAAWIGLDWGDREHAYCLALGREGEPEKGKLLHSAENLHGWLKGLEARFAGRPVALGLESNRGALFHVLAQYPWLEVFPINPVTSARYRKAFIPSGAKDDLPDALILLDLVRFHAHKLRRLLWDDASTRKLAALVQARRDTVDRRTQGLNQLTGVLKSYYPQALELVGEDLSAPMALEFLRRWPDLIELKSARPATLRSFYYRHNVRRPQRVEKRLQSLPGMVALTTDDAVVSVARLQLKLLLELITTFNKHIAVFDAQIAAAFAAHADQALFRELPGAGKVLAPRLAVAFGSERTRYADAASFQKHAGLAPVREKSGGQLWTHWRWQAPVFVRQSLVEWAGQTVVWCPWAKRYYQRMKAKGKKHHVILRALAFKWSRILWKCWQTHTPYDDARYLKALKQPKSPNLPLTQAAA

SEQ ID NO: 268602 - protein, 312 aa, unidentified
MNTNEGLYLGIDVSKDSICVCLYPQNEVLTVNNEPRDISKWIKTLPKGIELAVMEATGCWEETVAAQLHAAGIPVCIMNPHRIRSFAIGAGQLAKTDKIDAKIIAFFASVIKPTPQKLPDEQEAALKELVIRRIQIVDLIVIEKNHLLMAKNKIIKKDIEKNIKWLTKNLTEINLKIKTMVKNSPIWSEKEKILTSVKGVGPVTSSVLIATLPELGTITGKEISSLVGLAPITRQSGKWSGISFTLGGRKKTRDVLYMAALSAIRSNAVIKEFYQRLIANGKPFKIAITACMRKLLTILNALLRDNSLWRLA

SEQ ID NO: 268603 - protein, 344 aa, unidentified
MDFIGFDLGKVSSQICIITSDGELLEHRIKTDREQLNRLLGSRPQARIVIEAGTESEWVARLLEALGHEVIVADPNFAPMYATRSRRVKTDKRDARTLAEACRLGAYRPAHRTSDQQRHVRAQLAVRETLVRTRAKYISLMRSLLRRDGLRIATGAARSFHVRLAAVPLSAELQEAIKPLLVLMDALNEQIKRADDALAQLVKADPVVKRLTSVPGVGAVTATCFVATLDNVSRFPDAKQARAYLGLVPSEYSSGERQQRGHINKAGPNRARYLLVEAALAILRRRNSQTAALHDWALKIKERRGMKIAIVALARKLAGVLYAMWRDGTDFKALAASDNAAVAA

SEQ ID NO: 268604 - protein, 320 aa, unidentified
MQEPSLSKLCIGVDVAKAELVISVGAEHRACSVVNDEAHIAAWLRAVPAGALIAMESTGRYHGLLAHLACQAGFTVYVLNARDVYFYARALGTRGKTDGVDAAVIARYLTEHHTRLHPWQAASAAQHQLQDLLTRRAQVVVQRSALRQIFTDVDIQELAMQTLQEGFDALLQSMDDKVQALIASDTQMAQGCQRLCSITGIGPQTSALLATLLSRFDFANADALVAYCGLDPRPNDSGTKRGRRRLSKKGPPLLRRQMYLAGFAASHSKALKPLYLAIRAKGFASTEAFLILGRKLLRVAFAVWKGTQMFDPARLSPTTA

SEQ ID NO: 268605 - protein, 429 aa, unidentified
MQNESTPGARGPVFCGVDTHADSHWLCVLDWRGRKVLSRQFPADAAGYEALAGAIAAAGEPACVAMEGTSSYGAGLTRHLASLGMPVREALSPARTQRRRPGQGKCDEADAERAARAAMSGSKLGTPKSQDGWVDGVRCMLAARSGAVKARTSAINTARSLLTTAPEGLRSRFRGMGGPRLMEELPSVRAEGALGAALGALADLWAAARDAALDMERAIGASLEENCPALLAMYGCGPVSAAKLAVAAGDNPGRLRSEASFAAICGACPIPASSGKTVRHRLNRGGDRQANSALHEIARQRVMRDPETAEYAERARARGKSDREVMRCLKRYVAREAYRALMRPHEIRRPEDASELVAARRAARVSQVRAASILGTSEKYISMLERGQRELKPIRRAYEAWVEAGLPLDWDRQAFEAERKMDSKKHLAK

SEQ ID NO: 268606 - protein, 343 aa, unidentified
MLTNNVIAIDLAKNVLQVCHISIHGEMLSNRPLSRQKMKEFLAKAKPSIVAMEGCCGCHYWGQLAEKYGHEVRIINPKKVKGYLEGHKTDHNDALAIANAAIQIGIKFSRPKSLEQQSMQSLESSRRFLSRTVASLGLHIRSTILSYGVANPRGEKGLKASVHAALDGKTQIPKTVVSVLSMLWEQYKELKAQLISFEKEKNALTRQIEPCQRLMKIEGVGEATAAMLYNTLGDGKQFKNGRQASAFVGLTPKQHSSGGKVIMIGIDKCGGVKELRSLLYLGAMSYVGRLPERPKTQKDKWLRSIIDRIGFKKACIALANKVVRTAWAMLRHDTEYKPVLLTE

SEQ ID NO: 268607 - protein, 312 aa, unidentified
MTEKPSSVHAGLDIAKASLQLHLQSKSYDLPNTTEGQAQLIKRLATIPGVHIICEATGGYERAVVAALHAATIPVSVLNPARVRQFARASGELAKTDPIDAARLTAFGQAFTPEPTAARTATELKLAALVTRRVQLLELRVAEVQRADTCADLDLRKLFTPWLAQMEKQITKVEALIEALLKTQAPLADQVQRLDDIMGVGRITAVTVLATMPELGQLNRRQAAALAGLCPYNRDSGQWAGKRCISGGRAEVRRALYMAALSASRSNHLLKPFYDRLIAAGKPAKVALTAVMRKLIVLMNHLLKNPNFSLAH

SEQ ID NO: 268608 - protein, 444 aa, unidentified
MELVYERCCGLDVHKKLVVACLIVPDGQGQRSKEMRTFRTTTQELLRLRDWLVLAGCTHLAMEATGVYWKPIYNLLDGAVELLVVNARHIKAVPGRKTDVRDAEWIADLLQHGLLKGSFIPPAVQRELRELTRYRTNLVQERARAVNRLQKTLEDTNLKLGDVVSDMMGQSARAMVEALLAGETDPAVLADLARGRLKAKRAQLEEALVGTLKPHHHFLLTEQLVLIDTLDEAIRRVSQEIEARMGPPASEPNGQDHAEETVSQGERAEQERQAQSPLNWAEAVRVLDSIPGINPRAAQGILAEIGTDMTRFPSARHLASWAGMCPGNHESAGKRLSGKTRKGSPWLRQLLVESAQAAAHSKNTYLSALYRRIAARRGAKVAMIAVGHAILVMIYHMLSEHVVYADLGGNYFDERDRQATQRRLVHRLEQLGFQVSLQPAAQVA

SEQ ID NO: 268609 - protein, 420 aa, unidentified
MKYVGIDIAKKFHIACVLDESNSYLKKNYRIESELTDFDMFYQVLELIDKDKSQFLIGMEATGLLFENLYIFLQGLGYNVVLLNPYQTTRFREMQTMKYVKNDNIDSQMIAALLKSGRYSEGYVSEDLYQAIKSLYRHKATLMQEMKNAKRQVSTTLVVVFPEFEQIIKDPFSVSGMALLNKYPTAKHYKGASGERILKLFRNIKGNNFNLQKANDLLDLARLTIYQGNASDERAYVIHSNLRRISFLKEEIEACESQMFKLLNESVDAVSTSISADEEVYIADLVDNLRSIDGVGDKTIFALLSECGDISRFHSGQAFIGFLGLYPTLYQSGNSTKYGKLAKRGAKLAKLALYQAAVACVRHNDELKKIYLDKKSGGRAPKECIIIVARKLAMIIYSIYKNNTPYNPARVFNTMASLSH

SEQ ID NO: 268610 - protein, 426 aa, unidentified
MINAAIERCAGIDVGKKFLAVCILTGPLKGEPRVERRRFGTTTAELESLREWLKAEGVTDVVMESTGSYWKPVFNVLEGSVKVSLANSQEVRNRKGHKTDDKDGWWLAHLLRHAMIYPSFIPPRPIRELRDLTRRRKRLLSDGTSEKNRVQKVLEDANVKLGSVLTDIFGVSGQLMLEALLEGKAGPAEMAQLAKHRAKKKIPEIVQALEGHRMSDHHRQMIRYSLQHLLFLEDQIAELDRAIEAKIEEAGLRAAWQLMQTVPGIQDRSAASILAETGADMRQFPSAKHLSSWAGVCPGNNRSAGKNKSSHTTGGNPWLRGAVTECAWAAAATKNCSLRDKFWSLTSRFGGKKAPALVAVSHVLLMLIYHVLETRQPFEDRKAPLLGESQKQRLIRHHIRRLGKLGVAIPRLVCRPPTQPAPHSTP

SEQ ID NO: 268611 - protein, 378 aa, unidentified
MRFYTKQHPFYCGIDLHARTMDVCILSQDGEVMLHRNMQASPDALLKAIAPYRDDMVIAVACLFTWYWLADLGAQDGLPFVLGHALSRKAIHGGKTTNDTIDSQNIAVLLRGGMLPQAAVSPAAMRATRDLLRRRTHVMRKRAEVLAHIHNTHSQYTRPEIGKKIAYKANRNGVAERFPDPAVQKSMEVDLALMGHSDQLLRDVELSILTTAQQQNAQTLYLLRTVPGIGEILSVVLLYDIHEITRFPRVQDFLSSCRLVKCTKASAGKRDGTSGTKIGNAPLTWAFSAAAGLCLRAHPAGHKSLTTLEKKHGSGTALTLLGQKLGRTVYDMLQRPTAFDMGKFLNGEGRGADEPHAELDNHGLSRRACSARRVSLRH

SEQ ID NO: 268612 - protein, 326 aa, unidentified
MEHELHYIGIDTAKEKLDVDVLRPDGRHRTKKFANTTKGHDELVSWLKGHKIDHAHICIEATGTYMEPVAECLYDAGYIVSVINPALGKAFAQSEGLRNKTDTVDARMLAEFCRQKRPAAWEAPHPLERALRALVVRHQALTDMHTQELNRTETAREVQRPSIDAHLLWLEAELKRLEKQIKDLTDDDPDMKHRRKLLESIPGIGEKTSAVLLAYIGLKDRFAHARQFAAFAGLTPRRYESGSSVRGTSRLSKAGHVSLRRALYMPAMVATSKTEWGRVFRDRLAANGKKGKVILGAMMRKLAQVAYGVLKSGVPFDAARHNPVAA

SEQ ID NO: 268613 - protein, 380 aa, unidentified
MVPLQHHRGTTMDHYAGIDVSLEYSSICVVDATGNIVREDKIASEPEVLIAWFGSLGYALTRIGLEAGPLSQWLYAAMKKAGLAVELLETRHVRDAFKAMPVKSDRNDARGIAQLMRLGWFRPVHCKSIGAQEIRAELTARKLVESKLRDIANSLRGILRGFGLKVGATTERSFPGRVRELVKGHPVLEAIAEALLSVHEVLLREFNGFQKRVQSAACSNVKARLLMTTPGVGPVISLTYAAAVDDAARFKSSKKAGSHFGLTPKKYQSGETDRSGRISKIGDASVRAALYQAAHVILTKPVKGCPELKSWGMRLAKRAGQEKAKVALARKLAVNMHRMLADGIPFNPNAKAERMAATATKAASKVLALPASGTTVAEAV

SEQ ID NO: 268614 - protein, 403 aa, unidentified
MNAVGIDVSKGKSMVTILRPFGEIVSSPFEIKHTSSDIHSLIKLIHSIEGESRVVMEHTGRYYEALAHQLSAADLFVSAVNPKLVKDFNNDSLRKIKSDKADSVKIARYALDKWQSLEPYSITDELRAQLKVMNRQFHFYVKQKTAMKNNLIGLIDQTYPNANTYFNSPTRSDGSQKWVDFVSTYWHVDCIRKMSLNAFVEHYQNWCKRKKYAFNKSKAEEIYTKTKELVPVFPKNEITKHIIRQAIDQLNSTSVTVETIRTLMNETASKLPEYSIVMQFKGIGPSLGPQLMAEIGDVTRFTHKGALTAFAGVDPGVNESGSYAQKSVPTSKRGSSNLRKTLFQVMDVLIKTMPQDDPVYQFMDRKRTQGKPYYVYMTAGANKFLRIYYGRVKEYLSVFPDPS

SEQ ID NO: 268615 - protein, 356 aa, unidentified
MTSTTKYIGMDVHKESISIAVRNAGGKIAMESVIEAKANTILEFIDGLRGEVHVTFEEGTWSEWLYDLLKPHVRKLVVCDPRRNALLKEGNQNDRVDARKLAELLQNNQLRPVYHANHGLRAMKELVRSYLTITKDLSRVMTRVKAIYRSWGIPCSGTQVYSSSHRSEWLEKIGEAGVRRRAEHYYQQLDALRLLRIEVRKDLLAESKKHAIWKRLRQIPSIGPIRAAVLLGIVQTAHRFRTKRQLWTYSGLGVEGHSSADHQVINGQLQRRKKPIEIRGLNKNCNHQLKNLFKGAAIVASTKPGPFQECYTVLVAKGMRPEMARLTLARKIATIVLIVWKRGVCFDANHLKPQTA

SEQ ID NO: 268616 - protein, 438 aa, unidentified
MRAKCNDDLSTVNFSTIGLDVHKNRLVACAVHVQHDAKGREVHEKEYFESTGTYSGRQRLTEWCSSQNADLILMESTGIFWKAPFRDLEKADLHPVLINPRIFNRGSDKRKTDKSDATWLANLARLGLYRASFIPAEPYRSLRLVQSQIKSLVAERQRLKNRLVKVLDDSGFRFTVAFADIGGASSQSLIAGILEDAPREELALMIDPLCKKSIEEILDAVSGELSQINKDIVQSILRLIETHTKEIETLEQTVIRELKKCEKVKQNILLMTTIPGVSEKSAQLLMSMIGPDFVENFSSPHAFARWLGVCPGNNESAGQIKSGRTPHGQRLIKKVLTECAQAACHTKGSHLAVLFGGWKHKGFCKAVMAVAHKLALLIHWVVVNQKPYIDKEFDYTGVFKQDGQRRPRWIRALRRYGLMTLADVEKEKAVRGWIIAKA

SEQ ID NO: 268617 - protein, 367 aa, unidentified
MAKRSTTEGLDVHKESIDVVVAEPGADGEVRHFGKIGGDLASVDRMVKQLRAVGRHLHFVYEAGPCGFHLYRHLQAQGLECTVVSPSMTPKRSGDRIKTDRRDAEALARRQRAGELRAIYIPGPDDEAFRDLVRAREDAVTSQSRARHRLKALLLRHGYRYEGRAAWTFRYRQWLSNLKFPTAAQQITFQEYIDTIGEAERRVERLTEQIRELLPEWRRAPVAAALQALRGVSMVTAVTLVAEIGDITRFANPRELMAYLGLVPSEYSSGPKTRRGAITKAGNGHVRRVLAESAWAYRGQARVGQALMCRQNGLPGPIVEIAWKAQLRLTGRFRRLVARGKSTPKVATAIARELTGFVWDIARHVTA

SEQ ID NO: 268618 - protein, 388 aa, unidentified
MKVLADRPEAPSAIHTDLRAIFVSMELSRSSWLITSVSPGGGEKMSKYAVAAGNIAGLLEWLAQLREKAHARTGRDYQIITIQEAGLDGFWIHRVLQSRHIESHVVDAASILTSRRRRRAKTDKIDGETLVRTLLAHKRGEPRVCAMVKVPTPEEEDRRRLCRERKTLVAERVEHVNRIKGLLFTQGIYDYEPLKRNRRAQLEDLQTGDGRPLLAHLKAQICRELDRLEMILTQLKTIEEERDALLGPVSDKALATPASMLLQLKGIGTEFAAVLWCEGFFRHFDNRRQLAAYAGLAPTPWQSGSLAHEQGVSKAGNPRLRTTMIQLAWLWLRNQPDSALSHWFQDRVKRNGGRLKKTTIVALARKLLIALWKYASHGVVIEGAVMKA

SEQ ID NO: 268619 - protein, 457 aa, unidentified
MTRRKHSRPARDIAPVHPHAAAVDIGATLHVAAVRPGCDPEPVRTFGTFTTDLHRLADWFEQCGVETVAMESTGVYWIPLYEILDQRGFEVVIVNARDAKHVPGRKTDVSDAAWLQRLHEYGLLRASFRPKGEIATLRSYLRQRERLLDQAAAHIQHMQKALTEMNLQLHHVVADVTGVTGLRILRALVAGERDPDTLAAYSDPRCKAPAETLRAALVGNDREEHVFALAQALELYDIYQAKVAACDQRIEAVLERLKAANPPPAAALPPARPRRRQANEPGFAVREALHAILGADPTQIDGIGPSLALTLVGECGTDLSAWPSAKHFTSWLSLAPHNKISGGKVLSARTRRSGSRAAALLRLAAVAVGRTATALGAFYRRLAARVGKAKAVTATARKIGVLFYNMLRHGMDYADPGASAYEARYRQRVLSNLRRRAKSLGYVLQRADPASAAIAVS

SEQ ID NO: 268620 - protein, 283 aa, unidentified
MLTAEADKRKTKVVVNTAAGVQALLAWCAKHGAQPAQLHAILEPTGLYHEQAATALPQVRVSLVNPAQARDFAKALALRSKNDALDSYVLARYGQTLSPALWHPAPLHARQLRALLTRREALSKDLLRELNRKEKSQFSPSAPVVDGSIDKAIAFLREQIKQIERAIDQHIDNHPDLKQDCELLNSIPAIGPQAGNAILAVMHNRHIDSAQSLAAYLGVVPVQRQSGSSLNSCARLSKAGPPRCAPRYTWRPWLGPATTPTSAPFTSACSKQEKAKRPRWARP

SEQ ID NO: 268621 - protein, 385 aa, unidentified
MKPPPRHVRRRSALLPLQPKGDQVIVVGVDPHKRTHTAVAIERASGELRAELTVSARAAGHEELLLWARQQSQVRLFALEDCRHVSGALERFLIGRGERVVRVAPKLMGQSRRGSRSYGKSDSIDALAVARAALSEPRLPEARLAGAELEVKLLLSHREDLVGEANRTSNRLRWHLHDLDPEIALARGRLDRTAWMERLSRRLQRGEQTVRVRICRQQLRRLKALAREIKGAEAELDALIRTQAPELLELPGCGTLCAAKLVAEVAGVERFPDDAKLAMLAGVAPLDASSGRQQRHRLNRKGNRQLNLALHRIAVTQARFHQPARVFLERKRAEGKGRREALRCLKRHLVRVVWRTLRAASSERMISISPNLQEIKMPTPEPVLT

SEQ ID NO: 268622 - protein, 433 aa, unidentified
MTTDSAAVRATKGKSMKPWIEITHYAGFDWARDHHDVVIVDRQGQIVADLRFQHSLAGWQQFKAQVKPYPALAVAIETSQGAAVDQLLQLDGSVYPVNPLSAKSYRERKAPSGHKTDRLDAWSLAEALRLDGQQWKALRPLDPLTQQLQLVCRDEICLIEQRTALVNQLQQALVEYYPAALEAFEDWTQPFCWDFVIQFPTPEKLTLAGRRRWEKFLHTQKLWRPQTADKRLEIFQNARAFCGSAAVTGAKSLLALSLAKLLTALQLQLDQYRQQIEALFKQHPDHDLFGSLPGAAQTLAPRLLGEIGGDPQRFEDTEGLQCVAGTAPVSFQSGQIHRVRIRYQCNKVLRHTVHLWTQCCLRVCPWAEVYYRQKRAEGKSHACALRCLGQRLLKILWRMVQTRKPYDADLHARHQKQHGSWVLALMKPDAKAS

SEQ ID NO: 268623 - protein, 431 aa, unidentified
MKYKQSKKQNQRITRISDKTLVVGADIAKETHVARAIDFRGIELGKDCVFTNTRTGFEQLVQWMKELQQEHTKSDVLFGIEPTGHYWFNLAEYLGQQGIPLVIVNPHHVHKSKELEDNSPTKNDYKDAKVIADLVRNGKYSEPKLPTSIYADLRILMNLREKIMVNFGQVQRRVQNWLDRFFPEYPQVFKDWEGKASLITLGEFPTPGEIVELGSEAIVQRWKKDVKRAVGIKRAQHLMEMASRSMGLTEGLPAAKIEIKTLLEQYEMFARQLEEILSEVERILMQITGTKEMLTVPGVSVVTLAGFLSEVGNLNGYEHGQQIIRLAGLNLKENSSGKKKGKSSITKRGRARLRALLFRAVMPIVAKNAEFKALHQYFTRRSQNPLKKKQSLVALCGKLIRVLHTLGTKQIPYDANDVLGPVRRAQLQMVA

SEQ ID NO: 268624 - protein, 334 aa, unidentified
MENIALIGIDLGKNSFHIHCQDHRGKAVYRKKFTRPKLIEFLATCPATTIAMEACGGSHFMARKLAELGHFPKLISPQFVRPFVKSQQNDFVDAEAICEAASRPSMRFVQPRTESQQAMRALHRVRESPVQDKVKTTNQMHAFLLEFGISVPRGAAVISRLSTLLEDSSLPLYLSQLLLKLQQHYHYLVEQIKDLESQLKRKLDEDEVGQRLLSIPCVGTLTASTISTEIGDGKQYASSRDFAAATGLVPRQYSTGGRTTLLGISKRGNKKIRTLLVQCAGVFIQKLEHQSGKLADWVRELLCRKSNFVVTCALANKLARIAWALTARQQTYEA

SEQ ID NO: 268625 - protein, 344 aa, unidentified
MDIVIIGIDLGKNSCSLAGMDASGRVVLKRRMRRSSLERFTKGLRYCIIAMEACCGAHHLGRLFAAQGHEVRLMSPEYVRPYVKAQKNDDLDAEAIAEAATRPTMRFVEVKSQAQSDIQALHRARERLVSERTALINHLRALLLERGIVAPQGRRKLEEELSVFADEDGIEALSPRIRLLIEDLRAEWRTLDERIAAFDGEFVRMARDDEAVRRLTKIPGIGTINATALAAAVGNARAFRRGRDMAAWLGLTPRQMTTGGKPCLLGISKRGNRYLRKNLIHGARAVLPYLVERETPLGRWARGLLARAHKNVAVVALANKLARIAWAILAHGCAYDAGYEMVSA

SEQ ID NO: 268626 - protein, 346 aa, unidentified
MTIVELDRAVTGGVDTHLDVHVAAALDPVGGLLGVESFDVDVRGYRRLLEWMSSFGPVSKIGVEGTGAYGAGLARYLGGKGIEVVEVDRPNRQARRKKGKSDPADAIEAARAALSGRAEGKPKSKDGRVEAMRALVVAKRSARQARIAALCQMRHLSFTAPDALRERLKGLSPTALWAECAALRPRPGADVVGYATKVALCALGRRVEALEAEISGIDELLRELVAQTAPGLLDLYGVGVDSAATLLVTAGDNPERLHSEAAFANLCGVAPIEASSGKVVRFRLNRGGDRHANSALWRIVMVRISSDPRSRAYMERRTKEGRSKLEVIRILKRYVAREVYRQLPRP

SEQ ID NO: 268627 - protein, 340 aa, unidentified
MPLYGGIDLHANNSVVVLLNEQDQVVYQKRLPNDLPTILEVLAPHHAEIKGLVVESTYNWYWLVDGLMEAGYRVHLANPAAMQQYSGLKYSDDHSDARWLAHMLRLGVLPEGYIYPKAARAVRDLLRKRAHWVRQHTANVLSVQNIMVRNTGARLSVKRIRELPKKELEGLLPEADQVLAITSSLAVLDCLSQQIKALEKIVHQRLHHTPSYEQLLTVNGIGTILAQTITLETGDINRFPTVGNYASYCRCVDSNKISNGKRKGQGNVKNGNPYLGWAYMEAAQFALRFNPSAQRFYQRKLAKSNNNTTLARKAVAHKLSRACYYVMRDLVPFEATKAFG

SEQ ID NO: 268628 - protein, 314 aa, unidentified
MNQTITVGVDTGKLQLDIHIRPLKLFFSVENSDIGIQYALKIIKLHQPDRIVIEATGRLEMPFVLACAKAKQPIVRANPIHIKRFAGAIGRRVKSDRLDAELIAHYGEAIQPPLTSIKPNDLRLMSDLIARREQLLSMRTMEKNRIQILPKPLHSTIKPVLTALNRQITKLEEKLVSLIDQCQEYRGKSEILKSVPGIGDIAAASLICNLPELGYITNKQAASLVGVAPITKESGGYKRRRVTQGGRAQVRTTLYMAMMSAMQCNPIFKTFYTRLVDAGKPKKVAIIACVRKMVVILNSMLKNDTMWQEERVIT

SEQ ID NO: 268629 - protein, 322 aa, unidentified
MAKRITVCAGIDTGKRKLDVAIEGHREQLQVENTPEGHEVLMAWLRQHRVKRVGIEASGGYEQPVVAELRHKRFVVVVFQPAQVRAYAKFHSQRAKNDKIDAALIAACTTAVRKIHAAPDPRLLPFAEQLTMIDQINEDTARLKNRIESCRNARIKKLWQEDIARLEQREKAELKTLVASIRKHPDLAKRLELINSVDGIGLPTAVAILVRLPEIGRITREQAVALAGLAPYDDDSGEQVGVRHIEGGRKRLRRALYTASLAASFRWNRQLIQLYQRLTAAGKEHKRALVACARKMLIFANTVVARGTPWCDEPPVGSLSVS

SEQ ID NO: 268630 - protein, 345 aa, unidentified
MKITTVGIDLAKNVFQVHAVNERGAVVLRKQLRRDQVTAFFANLPPCVIGMEACGSAHHWARTLKSLGHDARLMSPQFVKPYVKSNKNDVADAEAICEAVARPNMRFVPVKSVEQQAVLSLHRVRQGFVKARTAQANQIRSLLGEFGLIMPAGICHVAKRVPRLLEDASNALPGSFRQLITRLTERLKELDSLVDEFEAQIKAWHRSSELSMKLEKIPGIGPLGASALVASIADANSFANGRQLSAWLGLVPRQHSSGGKPTLLGISKRGDVYLRTLLIHGARSAILAAQRKAVNTNVWLAGLLERRHPNIAAVALANKNVRTVWALLAHGREFKPNYAAQLLAA

SEQ ID NO: 268631 - protein, 376 aa, unidentified
MKTTQNEKLERITTNTVIVGIDIAKEEHWARITDYRGKELSKPIKIINNIDGFEKLFALVEKVKQKNESDRVILGFEPSGHYWRAFGWYSKLHKSAPIITGVNPYHVKQSRELDDNSQSKSDKKDALTISHLIKDGRYFDMYLPEGDYAELRVLNEERQRIMKQQNRATNTIIAVLDEYFPELSKIWKDVTCKEALAILKKASFPQEILSLSKSDLTAIVKEASKGTESDKMTEKLMKSAKVSIGVREGARAARSRLLRLIGELEFYQLRLLDVESELEAVMDKSEHSEILRSMKGIGVVISAAFLGEVGDVTRFDDWKQVRRLAGLNLVENSSGKQKSGTKISKRGRPYLRHMLYMAGNSCLLHNPVLPVSAKTH

SEQ ID NO: 268632 - protein, 311 aa, unidentified
MSQPTIGVDVSKDALDACRLPERRARRFANNQSGRAALLRWIGRDVACVVFEATGHYSKPLERALADSGLPAAKVNPKRARRFAEAVGKLAKTDRIDAETLAAMARQLDLEPSVPVGQIIEMLKEFVLARRALVKDRTAALNRAKRLVLPVLVTQNQERLAHIERDIEAIDAEIEALLEADPQLRRRAEILESIPGLGHASAVAILAEMPELGALEPKAAAALAGLAPQTRQSGTWKGRARIKGGRAEARRALYMPALVAARFNPDLKRVYDRLVDAGKPPKLVITALMRKLVVLANALLRQDRCWTPTIA

SEQ ID NO: 268633 - protein, 403 aa, unidentified
MQTLVERGCGLDVHQATVVACLLIVGKDGKVQKQMRTFGTTTRELLNLREWLLSQGCTHAAMESTGVYWKPVYAILEGGLEIVVANAQHVKKVPGRKTDVKDAEWIADLLCHGLLRSSFVPPKAIRELRDLTRYRRKLVESQAAERNRLLKLLESANIKLASVATDVFGTSGRLMLRALIAGKATAQEMAELARRKLRSKIPQLQLALEGKLEGHHRFLLKLQLDRLERAEGDLAVLEQRIQEKLEPYAAQLALLREIPGVDWTLAAVIIAELGVDMSVFQSVSQLASWAGVCPGNNESAGKRKSSRIPKGNVYLKTALVEAAHAAARTKGTYLRDKFYRLKARRGYKRAVVAIGHKILVSVYHMVSQNVSYNDLGDLYLDKLNKNHLTRNLVHRLAPQQKAA

SEQ ID NO: 268634 - protein, 451 aa, unidentified
MAKTKRKKHRKLDRTLPVMRPNAGGIDIGATEIFVAVPADRDTESVRSFPTFTEDLHALADWLQQCRVDTVAMESTGVYWIPLFQILEARNIEVHLVNAQHVHHVPGRKSDVLDCQWLQYLHSVGLLRASFRPEQAVCEIRSLMRHRENLVQMACVHVQHMHKSLDQMNLQIHHVISDITGITGLAIVDAIVAGITEPKELAKLRDYRIKASIETVKKSLVGDYRPEHIFTLKQSVTAYRQYQQLISDCDQEIQQRVQTFQTKDDRPSATADASGATTPSQSSFDLGTHLERIFGVDLTLIPGFDTLRVQTIFSELGADLSSKFPSDDSFCSWLNLCPKDGTSAGRRIPGPKLKIKNRVTQAFRMAAQCLHNNKSFLGDYYRSQRARFGALKAIKNTAHKLARIFFHLVTTRKPYDETVFAELEARNQKRRLHNLQMRARQMGYTLVEAHA

SEQ ID NO: 268635 - protein, 319 aa, unidentified
MSSVVRDHGVVHLGLDVHKNTISAGILEPDAETAVVDKISSDQESVARLIARFDDPRRVRACYEAGPTGYALARQLAALGVRCEVIAPSLIPTAPGDRVKTDRRDARRLARLHRGGELTAIRVPTVAEEAVRDLCRARADMVIDQTRARHRLGKFLLRHGRVWRGGDNWTMKHQAWIAAQRFDHAALTATFGHYRATLSAREAAVAAIEADLVSWFDRAPFADPVARLAAYRGITHLGALTLASEVCDWRRFPSAGAFMGFCGLVPSEYSSGSGPAAGTSPTPGTCTCAPSWSSPRGPTSPVPRSARRSHAVMPSCHRR

SEQ ID NO: 268636 - protein, 451 aa, unidentified
MSRPQVIDDTEHDRVHDRVAAIDVAKDTGMVCTRTPHPSRPGVQRATVWTVRARIGAVRVLGRQLRKDGIEIVTLESTSDYWRIWFFVLEACGLAVQLVNAAQAKSLPGRPKTDKLDAMWLARLTEMGLLRASFVPPKAIRDLRDYTRARARLIRERTRCWQRLEKLLEGALVKLSSVASKLTTLSAQDMIKAMIAGQRDPEVLAGLARRTMKAKHDALVEALDGMFDDHHGELAALLLDQIAGLDAKIAQLGTRAGELTAAMPGAWGIDPDGTTGPGAGTSPDAPVLNAVDRLAEIPGLSPDLARTIIAETGLDMSRFPTAAHLVSWAGLCPSARQSGPRTRAGKKGQGDTWLRGALGQAAVNAARTATFLGERYGRIARRRGKAKAQVAVARSILIIIWHLLADPAARFTDLGAGYYQAHTDKDRKIKNHIRQIEALLGHPITITPKAV

SEQ ID NO: 268637 - protein, 355 aa, unidentified
MSQEKYIGMDVHQATISAAVMDAQGKLIMECLLETKAATIVEFVRGLQGPLSLTFEEGTSAAWLHDLLKLHVDRLVVCDPRKAVLLKDGNKSDRIDARKLAEMLRTNQLKPVYHGEHGVRTLKELGRSYLTITKDVTRVMNRIKALYRSWAIPCSGTTVYAPRHRVEWLAKIGEPGVRVRAERLYQQLDVLQPVRQQARHDLLLESHKHPAVKLLRQIPSIGPIRAALLVALLQTPHRFRTKRQLWAYSGFAVETHDSGEYRCVRGKLQRNRERITVRGLNDNHNKDLKNLFKSAAISASTRPGPLHDFYAARIAKGMRPTMAHLTLARKIAAITLALWKKGVGFDPQQLPRQAA

SEQ ID NO: 268638 - protein, 430 aa, unidentified
MKSNTQNAKIEAITEKTLVLGIDVGSETHYARAFDYRGVEYSKKPFKFSNTEAGFVTFKAWVLDIKEKHGKDKVIPGMEPTGHYWFNLGKFLQDNEMKPVLVNPHHVKKSKELDDNHPTKNDRKDPKVIAGLVREGRYMIPYLPDGVYADLRTASNIRFQLQAELTRIQNRINRWFNIYFPEYKTVYGKPDAKSGILILKEAPLPEDILTLGIDGVNQIWRDAKLRAVGKARAKTLIEAAEHSVGSKEGAVSARMEIRMLLEDYESRNIRLQEVMTLIEGLVKQIPMAEKLLEIKGVGIRTVSGFLAEVGDISRFNNPKELQKLAGLALVENSSGKHKGETTISRRGRKRLRYLLFEVAMSLVAKNPEFRELHNYYTTRRLNPLKKMQSLMAIAAKLLRVFYAILTKGVGYDPKKMVNDIRRPAAYAQAA

SEQ ID NO: 268639 - protein, 383 aa, unidentified
MQKLNDLSRCLTALELDVTLIAVIEMSLSSWLVAGVVPGVERQPLKKLAVDESALLKLLHRWREEAGRRIERIVVAFEAGRDGFWLARWLNARGIEAHVIHASSVAVSREHRRAKTDRLDTELLKRCFLGWLRGERDHCKMVAIPTIKDEDAKRPNRERDSLVGERSRIVNRMKAALVRLGIRGFNPKLKKAAERLDGLRTPEGEPIPPNTLAELRRDMERRRLVNNQIRQIEEARLERLEQTPSDGPHAMVRLLARVIGVGIETADMLVHEVLSRNMRDRRAVARYAGLTGSPDESGRKRREKGLARSGNARVRRGMVQLAWRFLMYQKDSALAQWYRARTENARGTRKPLIVALARKLLIALWRLVRQGVVPDGVVLRPAQ

SEQ ID NO: 268640 - protein, 344 aa, unidentified
MNIATIGIDLAKNVFQLHGVNGHGKVVLRRQIHRGQMRGLFVNLSPCLIGMEACASAHYWARTLQSYGHAVRLIAPHFVKPYVKTHKTDATDAEAICEAVNRPNMRFVPIKSIEQQSALSLHRVRAGFVRARTAQACQIRSLLAEFGLVMPRGIGNIKQVPKLLQVAGKELPAPFCRLIERLLAHLKELDRQARELEEQIVDWHQRSEPSRRLAKIPGIGPITASALVASISDVRSFKSGRELAAWLGMVPRQHSSGGKPTLLGISKRGDRYLRTLLVHGARSVIVQVLKRDDDKGSWLKRLLERRHVNVATVALAHKTVRTVWAMLAHDREYCPNYKSLPVAA

SEQ ID NO: 268641 - protein, 346 aa, unidentified
MSRHSVPGGDVAALLARLADLQGKAHARTGRRFPVVVIQEAGLDGFWIHRALRKEGVESHVVDPASIAVQRRRRRAKTDRIDGEALVRALLAYKRGEPRVCAMVRVPTPEEEDRRRLCRELKSLIGERIRHANRLKGLFFAQGITGYEPRRHDRRERLEELCTGDGRSVPAHLKALALREIEVLELLTRQIDTVKAERNALLAAERAADTTPGRVEMLLRLKSIGPGIAGALWSEGLFRHFDNRRQLAAYAGLAPTPWQSGSVDHEQGVSKAGNPRLRAMMVELAWLWLRHQPGSALSRWFHGRVRHNGGRLKKTTIVALARKLLVALWKYATAGIVIEGAVMKPA

SEQ ID NO: 268642 - protein, 348 aa, unidentified
MKILALDLGKFKSVSCCFDSEQQTTEYWTLSTDRDYIVTILRKYQPELVVIEACSIAAWVHDLCREVGVPILVCNPNQEAWRWKNVKRKTDRDDALKLAKLAALGQLIPVHIPAVSTREHRWLVKYRKTIVGRLNRTQNILRALFQQHGLSLPVGARCWTLASLEAMHAQSKPLADCGLTELWRGQLAQELAVYQQLRSELKLLEAKLTALAQQDERIRLLETIPGVGRVTAEVVATHLDLPERFASARHVSSYAGLVPRRYQSGLMDRQGGITRRGSRLLRTALVECAWQMLRYNPWARAHYERLCHGQRNRKKKAITALARKLLVRCWAMLRDRCPWRKEKQEEAA

SEQ ID NO: 268643 - protein, 340 aa, unidentified
MVHVGVDLDKRSSQIAVLSEDGEIVQHRLANDAARLEKFFADLPPHTPIAIEASGTWWWLVDLLEELGHQPVLSNPKQTKAIAAARLKNDRVDAERLALWLRGDLLPRVWIPPTTLREARELIRHRIQLVWLRGVIRNRLQAMLARRNLQPTSGKSWLTQRGQRELQRLPLGETPSRIREDCGALLPTLDAQIRRLDADLVTRWGADARVRRLTTIPGIGPFIAIVLVLELGDIERFASAKRVASYVGLTPRIRGSAGRVRAGHITKEGNRLLRWVLVLAATQAVRRPGPLRAWFHAVKKRRGKKVARVALARRLAEIVFHVWKQECDYFTVVRHGVVRG

SEQ ID NO: 268644 - protein, 354 aa, unidentified
MMIIGCDYHPGFQQIAFVDTETGELQERRLEHRQEAEKFYRDLGAPGVKVRVGMEASGHARWFERMLSELQFELWIGDAAAIRAKRVRKQKTDRQDAQLILRLMLKDDFPHIWVPSWENRDLRQLLWHRHRMVQARTRIMNQLQAVALNEGVRSKKRLWRDSGREQLEAFRLAPWASRRRRDLLELLDRLTPTIAELTAAIELEVERCPVAQRLQTHPGVGPLTALAFRLIIGQAERFECGKQIASYLGLVPLEDSSGQRRRLGHITKQGNSLLRFLLVEAAQVTVRSLPEWRSKYCHLALRRGRKVAKVAMARKLAVRLYWMMRKEWDYEQLRKFGSHAGKPGNRDGVKMNTE

SEQ ID NO: 268645 - protein, 436 aa, unidentified
MSNLVSFEQHNACAAAIDIGSKKIFVSCDGITVKSYDTFTFSYRKCIEDLRSQQVKNVCMEATGVYWIALHELLEQAGFCVCLVNPKEVKQVKGRKTDVADACWMQKMFSAGLVRQSYIPAGRLKELRMLMRKREDIISMGSSYVNKMQKALELMNIKLTEVISQITGVSGIRMIEAILRGERDGKVLLSLCHKSIKDKKADEVLMALEGNYNESWLFLLEQNLKLWKIHEQQILIVDQRMEVLLSFLEQGSSFVAPVHKEKPVRHHKPMIKDLNQKLLNIYGVDAGCLPGVTNYSMLKLLGETGTDLSRFPTEKHYVSWCGLSPGHNQSGSRSRKAKMKNSSRVGQIFREIAQSLLNSKHIAIGTFIRRIRTRKGPAIAIKAGARKIAIAFYNLLTKGTAYLEQGAAKYEQQLKQREQQYLLKLATKHNLKLVEI

SEQ ID NO: 268646 - protein, 383 aa, unidentified
MGAVARTLLRETPVQRNRTCVGLDVHARSVWACAVDDESGEMRTQRISPKTAEIVKWARGLPGPTLVAYEAGPTGFGLARALIAAGVACEVLAPSKMDRPSGDRVKTDRRDAEWIARLVRIGELPVVVIPSEPQEAARDLVRAREDVRGDLMRARHRLSKLLLRQGFVYEDTAWTGTHEKWLRGMSFDRPGVQFAFDEAFDAVLTTTARRGRLDKQIELMAAEPAWSPVVSRLGCLRGVSTLTGFGLAVEIGDWHRFTGNSIGSFLGLTPSEYSSGDSRKVGSITKAGNGHARRLLVESSWHHKKRLRLSADMRRRRDGQSPEVRARADLANRRLHHRWQQLEARKKPPTIAAVAVARELAGWCWSLAVMDGANNNSAMNRQG

SEQ ID NO: 268647 - protein, 346 aa, unidentified
MGYFAGLDVSLEETAICIVDDAGLIVREARTASEPEALVAFFRASGMAMERVGLEACSLTAWLHQGLTEAGIVAICIEARQAKAAMGAMPNKTDRNDARGIAQIMRTGWYRMVHVKTPSCRTWRALLTARRMVVNKRRDVENGVRALLREAGLKVGTVSRKNFATRVGELVADDPVLAALAASLLSVIDVMTREVDRLTKRVLDEVRIEPTCRRLMTVQGVGPFTALAFRATIDRPDRFRRSRDVGAHLGLTPRRYQSGETDVQGRISRCGDELARTALYEAAHSLLIRSTKWSPLRAWGMHVAKRRGMARARVAVARKLAVILHRIWADGSEFRWGKQAAVSLTA

SEQ ID NO: 268648 - protein, 332 aa, unidentified
MNRQFTLGVDLAKDSFVVTLLDSQGNTILPVKTFVNNAQGYLQLLAAIPQPQHTQVILESTGVYGKLLIKALSASTLEIFELNPLIIKRLSSSMVQTKTDQADAVRIARVGKLLAESQPETLGKYRVQHDADRENLALWIAEYKRLSEARARLKQQIKNLAFHAASEAQVILQRREQELQQLTQQMKTTKQEIEALLRDQADEQSQCLMSITGVGPLTTATALVSIQNINRFPSADSLKAYWGVYPRRRQSGKQEARSRMANHGNKLMRHMLWNAAKSAARHNPVCRALFERLIAKGKCAPAAYGAVARKLVQIIYGVLKTLTKFNPSPKCT

SEQ ID NO: 268649 - protein, 369 aa, unidentified
MGDRITYVGLDVHKEGIVVAVAEGGERGEVRDYGRIANTPPALRRLAGKLGQEGVRLRFCYEAGPCGYGIQRQLSAHGHECIVVAPSLIPKRAGDRVKTDRRDAASLARLHRAGELTAVWVPDPGHEAMRDLVRARLDAVRALRRARQQLSGFLLRQSCHYGRPAWTKLHRRWLAGLKFEQAVHHIVLEDYIAAVEAAKARRDRLTAQIAAMLPDWALAPVVAALQTMRGMALVNAATLIAELGDLSRFANPRQLMAYLGLVPSEYSSGASVKRGSLTKAGNSAARRLLIEAAWCYRFPARVSRELLLRQEGQPRPIREIAWKAQLRLCARYRKLARSGKPANVVTAAIARELAGFIWAIARRVSPTAG

SEQ ID NO: 268650 - protein, 317 aa, unidentified
MGEQDVFVGIDVSKENLEVCLRPGEERIGFSQSEDGWGSMGQWVESFSPRLVVLEATGGLERGAVAALVSKGLPVVVVNPRQIRHFAISQGILAKTDKIDARVIAQFGESIRPEIRPLKDEEAQELDSLVTRRRQIVQMLAAEKNRFQSAVGRAREDIGVHLEWLQKRLEKIEKDMDRMIQKSPVWRVKAELLCSMKGVGPGLCRTIISDLPELGTLKRQKIAALVGVAPLNRDSGKFRGRRTTWGGRSEVRSILYMATVAAIRWNPVIRGFHDRLMKAGKPPKVAIVACMRKLLSILNAMMKNQTPWQPPVLQKTA

SEQ ID NO: 268651 - protein, 346 aa, unidentified
MRILALDLGKYKSVACDYEAETGRHCFTTIPTNPQTLHDLIVDREPDRVVIEICSIAGWVSDLVRALGIEIQVANPNDERWQWRKVKTKNDRADALKLAQLWAMNQLRLVHVPQSEIRQWRALIAYRQHLVQRRTKIKNHIRDLLLREGQLLPRYRSAWTQEGIANLEAMSKPFSEVSLDELWRGELGVELAQFRAVQKQLAEVVTKLDELGAANHSVQLLRTIGGVGPRLAEAVVTMFDDPHRFRTAGQVSSYIGMVPKQFDSGETQRAGRITRHGNRLVRSLLVEVAWCALRHNPWARETYKRISGGKKSRKKIAVVAVGRKLLVRCWAMLRKQTEWRPELSVA

SEQ ID NO: 268652 - protein, 337 aa, unidentified
MKFSGIDLHSNNSVVVVSDQEDRIVYQKRLPNNLEQIQAALAPYRDELVGVVVESTYNWYFLVDGLMDAGYRVHLANTTAIKKYEGLKYSGDFADAPYLAQLLRLGLLPEGYIYPREERAGRDLGRKRMQLVRCQTMQILAIESILARQTGGRMSSERIKRLTAQQIKELGLVPDVALALEANRAVSEVLQRQIEALEKRLKERVKLRPEYRLLKTVPGIGETLATTIMLETGTITRFAGVGNFSSYCRCVDSRRESNGKKKGEGNAKNGNKYLAWAFVEAANFALRYCPEVKRFYERKKRKTNGIVAIKAIAHKLARACYHMLREQKPFDVQRCFV

SEQ ID NO: 268653 - protein, 405 aa, unidentified
MHDLNRQREYNLIGFLKGKLCGWSGQARRERLSSDDQFVGQMDCPSTSLHSIRSQRNISFELAFLRGEAIRKGTPVTNSPYTMRRFHMNYIGIDVAKEELVVYDGKNEYVCKNTRGLPELEKCLTVLFPSFDDMVIIFEATGPYSHFLREFCAHAGIRAWIVNPLKSASFTKALGNRSKTDAIDAKMLYELHKVIQPEYIIIPKIDETAQTLSMYISSYELIIKTRTALSNHLHALAHTPNAPEELKGLVNEQLQGLKKAETTLLDTMEQYVKNDRDIAKDYENLLSIKGIGRISALSLLMFFRTYKDTSRSEITALAGLDPTRIESGISVRGRRKISKGGNGTVRKILYFPVLNCIQHNRKIRIFYERLIMNHKVKKLAVIAAMRKLLLIAHAVYKSKIPYQDA

SEQ ID NO: 268654 - protein, 410 aa, unidentified
MEVIHRNCAGLDVHKKVVVAAILVEGRLKEIRSFGTMTADLLELSDWLMSCGATHVAMESTGEYWKPIFNILENNFEVMLVNAQRISKVPGRKTDVSDAEWIADLLRHGLLTASFIPPVGQRELRELTRFRSTFVKERATLVNRVQKVLESANIKLSSVASDVVGVSGRAMLEAIIAGTATPEQMAELSKGKLRNKREELSRALEGRVKPHHRFVLTELLSQIDSLEETIARFNLEIEEYCRPFEEAVVLLDTIPGVARQTAENIVAEIGTDMSRFPTANHLASWAGVAPGNNESAGKKRSGKVKKGNKPLGVVLNQAAHAAAHTKDTYLSAQYHRLAGRRGKKRALVAVAHSILVISYFMIQRHVPYYELGSDYFDKRRPETTAKRLVTRLEHLGYQVSLQQLCDPVSL

SEQ ID NO: 268655 - protein, 322 aa, unidentified
MIEEAVYVGVDVAKSTLDVAVTDSEEARQFANDDKGISQAVSYIAGLKPAVIILEATGNLEMPLAAALQASRMPVAVINPRQVRDFARATGALAKTDTIDARILALFGARVKPEIRPLLNQKAREMRNFLTRRRQLIDMLTAEHNRVSQAGDGIRPCIETHIKWLEIALSNINDDLDNQIRSSPSWLEKDNLLKSVPGVGKVVSSSLLIELPELGKLNRRKIAALVGVAPLNRDSGTMRGRRTVWGGRAKLRAVLYMAALVASRRNPIIAAFYQRLVDAGKAKKVALVACMRKLLTILNAMMRTMTVWQPEIILRRVSVEAS

SEQ ID NO: 268656 - protein, 365 aa, unidentified
MSEVSTIGLDIAKHVFQAHGADTSGRVVFRKKITRSKLIEFLAAQPRCMVALEACGGAHYWGREIGKLGHTVRLIPPAYVKPFVKRQKNDAADAEAICEAAQRPSMRFVAVKDEEQQANGVVFRARDVLVRQRTQCINALRGHLAEYGWVVPKGTAHVATLIGQIEDPNSSLPESARAVFRVMVTSLTSLEESIAVLDSEISRRSKEDPVARRLMTIPGVGPITATAITALAPPIEMFATGRDFAAWLGLTPLQKSTGGQTAARRYLEDGRANAAAASDHRRQCCCQPRLPTGRARWVMARAHAGPKAAHAGDGGIGQQNGSDCLGLVGQGRGLSSSGRGGVSHPRLRGRRGRRGGRKESMAQRS

SEQ ID NO: 268657 - protein, 392 aa, unidentified
MLFVGIDVSKSKHDCCILDSDGVIHSDSLRIPNTLEGFELLISTIDSFLPSSDISNVKIGLESTGHYSTNITNYLFAKGFQVVTLNPLATNLFRKAHTLRKTKTDKTDAKVIATMLFTDESKSYSPVSYQISELKSLSRQRYRLIGYRSRLKISIARLVDLIFPEYPDLVWSIHQASSYAVLLELPSPVAISECHLTRLTNLLSKSSRGKYGKDKASEMKALASRSIGTSNRSLSFELQQTIRLIQSVQFEIKLLDQQLKELMLEIDSPILSIPGISYTLGAIILSEIGDIQNFSSPAKLLAFAGMEPSTWQSGNFNAGNTPMVKRGSTYLRWALMQAARLIAMRDDTFHNYLEKKRSEGKHFFVALRHTGKKLIRVIFYLLKNNTQYEPQI

SEQ ID NO: 268658 - protein, 401 aa, unidentified
MRCTDQPAQPKAALCEEDSSLFVALELSKSVWLIATSAPGSEKVSKYRVAAADVAALLALLARLKAHAERYRGGPVQVVSIHEAGLDGFWVHRMLEANGVKSHVVDAASIAVDRRSRRAKTDRIDVEKLLRTLMGWARGERRICSMVRPPSPADEDERRLTRERGTLVTERTRHVNRIKGLLATQGVFGFEPVHKNRRQRLQELKQWNGQPLPPRLKTELTRELDRLELVMSQLAALEAERDRALQARRTAVRNTTMKAPSSGTASAGEVGSQLLRLRSVGPQIASVLSLEAFYRNFNNRREVAAYSGLAPSPWKSGGIDVEQGISKAGNARLRTTMIQLAWLWVRHQPGSALSRWFYERVGGKRGKIKRIAIVAMARKLLVALWRYVTQGVVPEGAELTT

SEQ ID NO: 268659 - protein, 410 aa, unidentified
MTVITIAQNTPVLVAIDIAKARHEVLIAVPGKKRRRRLTVLNELADFTRLIAALKDYGHPVRAAFEATGNYHRALAYHLATAGFEVKLVSSVALARTREALHNSWDKNDPKDAQVILHMMEIGNEQFYHDPLVRGTNDIQELSKTHDIVSKSKTELWHRILTHYLPLYFPEADRFHRSSRSDWFFAFLKRYPSPHFISAMSKDAFIADAWDVVGRKVAKERLLADIYETSKVSVGLPVGLDSDAISMFRLVLGEGRSLIAQRNQIEDRAVALLKDLPDYQLLTSIPGIGPINALTILAEAGDLRRFGHHRQFLKFCGMDLATIQSGTFRGQTKLSKYGNARLRRTLWMAGQVAILQRANSFRDKFERYITKDRHNTHLRRKAYTAIAAKMARTVHGIIKNGEPYRPFFEG

SEQ ID NO: 268660 - protein, 346 aa, unidentified
MDYCGIDLAGVSSYVYVTDARGKKLTSGEVATDKAAFERRLKRFVRGGLSIAIEAGNQTAWVYEALIEMGATVTVVNPTKVKLIAESRRKTDKIDAKILCELLRLDGLPHPVHVPGRETRALRGLLVARRQLISARTKVCNVVRGMLRQEGIRLPARGLSSFVAWRRLLARGFEQAHLSIVVATYADVFVSLTDAIRDIEHELAKYERVDNRASRLQTMPRVGRIASLTFLAAVDDVHRFPSSRKLVGYSGLAPTVRSSGERTEYGSISREGRRELRAVWVQIAHQVANDTTRATRPLRTWFNKVARRRGKKTATVALARRLLVIAYQILKEEAVYDAARLKRQAA

SEQ ID NO: 268661 - protein, 402 aa, unidentified
MNCVGIDVSKGKSMIAVMRPFGEVVVSPFEVRHTASELSELARLLKNLDGETRVVMESTGNYHAPVAWLLHGAGFYVSVVNAMLVHDYGNNSLRRGKTDKKDAVKLANYGLDHWLTLPRYVPEEDTRLMLKTCYRQYQQYSKVQTMLKNNLISLLDTAFPDANRLFTSPPRADGSEKWVDFVATFLHCECVCGLSKKAFTAKYQKWCRKHGYNFSQDKALDIYASACGRFGVMPKTNTAKLLVEQAISQLQTTSAALAALKQEMQSLAASLPEYPVVMEMFGVGPTLGPQLIAEIGDVRRFHSKKALVAFAGIDAPPYQSGQIDVRSRSISKRGSASLRRTLFLVMGVLLQCAPMDEPVYQFMDKKRSEGKPYRVYMMASANKFLRIYYASVKAYLDSLEHD

SEQ ID NO: 268662 - protein, 410 aa, unidentified
MTYTIAGIDVHKKVLMVVVADVSAPDLRFERRRFGATTSELEALAAWLDQHAVKEVVMESTAQYWKPVWLALEPHFQLHLAQAQSNRAPGGRKSDFRDAERLLRRLVADELFLSYVPAPEQRVWRTLTRSKLQLVRERVRLQNQIEALLEEGRIKLSSVISQLLGDSGLRILHALAAGESDPHRLAALGDRRLRASERELADALNGDLRPAHRAILTLFLQRLDLLDRQIAQLHQLAAEQLHAHQNAVARLAAVPGLGLDSAQQIIAEVGPQAQAFPTPQQLCSWVGVCPGRNESAEHNRSGHCAKGNRYLRRILCQAAQAAVKKNGSYVQSLFRRLLPRLGYLKAIWAVAHRLCLIVWKILHEGAEFIEHGQLGTPLQQQRRTRNLITQLRKLGYAVQLSPLPPAPQAG

SEQ ID NO: 268663 - protein, 367 aa, unidentified
MKKISTVGTKQSKNFREQKLMIGLDLGDRSSWYCVLDEAGDVLLEQKLGTTPKAMREVFGGMPRSRIALETGMHSPWVSRVLSELGHEVIVAHARNVRLIGESRRKDDRFDARTLARLARIDPQLLSPVQHRSAQAQAHLMVIRARAGLVRTRTSLINTARGLTKSYGERLRGCSPRNLNAETARQLSPELQAALEPLLGAIESLSQRIYEYNQQIAKIAKESYPQVARLEQVKGVGTLIALTYMLTLEDPQRFRKSRDVGCYVGLQPGRRNSGQSEPQLHISKEGDPYLRTLLVQGAHHILGPFGADSDLRRWGLKLAERGGKNGKKRAVIATARKLAVLLHRLWVSGEAYEPLRNSRAVRLPAAA

SEQ ID NO: 268664 - protein, 357 aa, unidentified
MAALSIADVPAKVTVGVDTHKHSHIARAKDGLGRHLGQLEIETDPRGYASLLAWAQGFGPVVTFGIEGTSSYGAGLTRFLRAQGQAVIEVLRPVRRDRRFGGKSDPIDADAAAGAVLAGRATAVPKAGDAGVEMIRALKIAKQSAIKARTQAVNAVKGLVVMAPDPIREQLRNLKTPALVRTCSAYRVDRASDPTSAIKLSLRSLCRRYVALDQEVRSLEKELDALTIRLVPQLRQLFGVGQDVAATLVLAAGNSGDRLRSEASFSMLCGASPIPASSGMVQRHRLNRGGDRQANAALHHVIIVRLRHDKATRAYFAKRKADGKSKKEIFRCLKRYVAREVYRTLVDPREEAARSAA

SEQ ID NO: 268665 - protein, 414 aa, unidentified
MDLIHACVAGLDVHKATVVACVRRIGEGGRVWKEIRTFETTTRHLEALRAWLQAEGVTHVAMESTGVFWKPVYNCLEEHCEQVLLVNARDIKQVPGRKTDVKDSEWIAQLLQFGLLRGSFVPPRQQRELRDLTRHRTTLVQEHNRVVNRLHKVLQDANIKLSSVMSDILGVSGRQMIEALGSGEDDPNVLAELARRRLRGKIPQLRMALEGQVRAHHRFLLRMLLEQLDFVSKAIDELSQRIAEVSGPPVQAAVALLTTINGVGQRVAETIAAELGTTMTPFPSHKHCASWAGVCPGNNESAGKRKTGKTSKGNRWLRRALAEAAWAASHTKGTYLAAHFRRIARRRGSKRAIVAVSHTLLVAVYHMLSKQLPYSELGADHFDRLQPERLTRYYLTKLRALGFKVTLAPLEEAA

SEQ ID NO: 268666 - protein, 446 aa, unidentified
MAKRKRTNRKMDRSLPMMRPNAGGIDIGATEIFVAVPADRDVEWVRCFATFTQDLHMLADWLQQCRVDTVAMESTGVYWIPLFQILEARGIEVHLVNAQHVHNVPGRKSDVLDCQWLQYLHSVGLLRASFRPEQAVCEIRSLMRHRENLVQMACVHVQHMHKSLDQMNLQIHHVISDITGQTGLAILDGIIAGNTDPEELAKHRNYRIKASPETVKKSLVGDYRAEHIFTLKQSLTVYRYYQQLIGDCDREIQQRIQSFENSDGDSSRKSEQSSPTPRADFDLHTHFERIFGVDLTRIPGFDVLRVQTIFSELGADLSAFPTVESFCSWLNLCPKDGTSAGRRIRVYLKTKNRVTQVFRMAGQSLHNNKSYLGDYYRSQRARHGGLKAVKNAGHKLARIFYHLVRTRQPYDETVFAKLEVRNHQRRLHKLQFMAKQLGYSLLQAHA

SEQ ID NO: 268667 - protein, 370 aa, unidentified
MRIIGCDLHARQQTLAMLDTETGEVVNLTLMHEGNNVREFYSKLPRPVLVGIEATGSMPWFLNLMEELGIECRVGHPAQIRAAEPRKQKHDRRDADLILKLLAQNRFPAIWLPSKELLDLRALLLHRHQWVRMRVRMQNALQAIALANGLRRGPALWSYDGQAKIAFLPLLPHAAYRRSALQSMYKNMQSEIENLTRRVAEQAGNRCGARLLMTHPGVGPVTALATEVFLGDPQRFTDSKTLASYVGIIPREYSSGEHQRLGGVTKQGSPLLRFLWGEAGAHAARRDPELKRFYRRKLVQKGLGKARVAVARKLGIRLWIMLRDEIDYQEFCRRGQIQQKTVRPVVGMPETGNGAKSHRPSDEATRLPES

SEQ ID NO: 268668 - protein, 330 aa, unidentified
MNAIGIDVSKGKSTVAVLRPYGEVVVSPFDVAHTGSDLRALADLIKKLPGETKVVMEATGNYFESIARYLHEQNIFVSVVNPVLISDFGGNTLRKPKTDKKDSVKIASYALTYWLDLKEYTSQEDLRKSLKLMNRQYQQSIKLKTMMNNNLISLLDLTFPGINKLFTSPSRESDGHEKWVDFVLEFSHCDMISKLTIKAFAKKYKKWSDKNSYHFTESSCEKIYAFAKDCVSSVSSDKAIVFSVVQAAKMLISATENCHAIQSEMNRVASKLPEYDTVMNMYGVGKAVGPQLMAEIGDPRRFHSRKAITAYFGYDSENNDSGQKLSLIHI

SEQ ID NO: 268669 - protein, 419 aa, unidentified
MSFKILKNNCCGLDVHKTWIFACIGITDSHRRTEYKHARFSSFTKGLQELCDWLAKYNCTDVCMESNGKYWIPVFNVLEKNNIWVTLSHPKYTKPQKGNKTDRKDAKWICDLYMCGMVKPSFIPPADIRQLRDLVRYRFKLTCMITSEKNRAHNCLTISNFKLDEVFSDIFGKSSRSITEQILQHPGETFDVAQFVDGRCKTPIEEIQAAVDGAISTEQAVKLRQCLNHIDELEKHQAEIEREIFRLSDKYEEVLNLIRTVPGFDKNPMTAIQVLSEIGGDMSVFPTAKNLVSWAGCCPRNDQSNQKIKSTRISRAGSYFKPVLVQVANALIKSKKHPEFTTRYRRIKARRGHKKAIIAICRMILTAIWHILTDLKPYTTEGFLESRPVNDSKILTTSQALNLLKQRGYVIKDDIVSVP

SEQ ID NO: 268670 - protein, 455 aa, unidentified
MRQKKASTKRDLDSAFPLIRPNAAAMDIGSREHVVAVPEERSTPSVRSFGCTTSELREMTAWLKSCGVDTVAMEATGVYWVPVYEVLEDAGIEAFLFDGRQARRMNGRKSDVDDSQWSQKLHSYGLLTRAFRPAKDIATLRAYWRHREGIVESCSRQIQLMHKALEQMNVQLHKAVSDLTGQTGMRILRAIVAGERDRYALARLRDRRVKASEEDVARALEGTYREEHMFALKQALEAYDFFQQQLAACDSVLEQCLGQMGSASQQPSVPPSAKKRRKNQPHFDLRRELARIAGVDVCQIEGIDALTAQTLISECGTDMTPFPSEKNFASWLGLCPNNRKTGGRIRSRRTRHVKNRAARAFRIAAQALHRSNSALGSYARQMKARLGAGKAITATAHKLARLYYRLMKNGEPYFAQTQAQYDALRRDRDLRALQRRARHFGLQLLNPATGELMAS

SEQ ID NO: 268671 - protein, 351 aa, unidentified
MDRYIGLDVHASSCTVAVIGPSGRKLQCQVIETNAKALINFIRTIPKNRRLIFEEGTHSNWLYEVLAPHVQEIVVVGVRQSRGPKDDKSDAFALAEDLRIGNVKVRIYKKRGEFATLSHLTKAHGTLVADTVRTQNRIKSLLRSRGLPTSGTQVYSANGRESWVSKLPTPALGRAELLYSQYDALLELRKSAEKQMLVEARKHAVYRMIKTCPGFGKIRTAQLLPIVVTPYRFANKRQFWSYCGLGIVMRSSSDWVRTQDGQWIKAAVQRTRGLNRNFNHTLKHIFKGAATTVISRAGKDDPLYQHYQQLLDGGTKPNLAKLTISRQIASIVLAVWRSQEEYDRKKLSPTT

SEQ ID NO: 268672 - protein, 404 aa, unidentified
MSQINLTNEPLFAAVVGIDWGDKKHAWSLQPVGSDQRERGEIEHTPEAVESWASMLSARFHGQPIAVALEQSRGALVFMLAKYAHLHLYPIHPRAAAQFRAALYPSGAKDDPVDGDMLLELVLHHRAHLRPLQPDTEQTRLVQHLVEARRRLVNEKTRQVQRLTDKLKLYFPQMLDWFEKVDSPLVGALLLRWPTLEELQKARPATLRSFLTQHNCRSQELIDERLKEIPQGIPAIRDAAVIQSAVGMTQILVALIATLRQGIDKLEKQIEQAARAHPDFPIFDSFPGAGPALAPRLLAAFGSLRDRYAVASDVQKFSGIAPVMERSGKSEWVHFRRACPKFLRQTFHEWAGHSIAFCDWARVYYDQQKRAGKDHHAAVRSLAFKWIRIAFRCWQDRVPYDDAR

SEQ ID NO: 268673 - protein, 419 aa, unidentified
MSKSLFCGCDIASDNNTIWLMLDDGSQPVKLFGVDNNQLGAEVLVERVYSIAKEHCVSDILIGTEATSMYDWHLLEYLAESKLALEFNLKLYRFNAKWIKNFKKSLAPRGKTDPIDSFAIAERLRMGRLPKEYVPDVKYQPLRKLTRFRYHLMQQITREKDFFLANLFLKASAYSSVKPFGSTFSATSLAVINDFFSVDELAAMPIEELTEFILEKGKAHFSKPDEIVDNLKRVARESYRLKPELTPTVNLILASTFNNIHCYKEQVKLVDSAIAENLKAFKHTLESISGIGPVYAAGILAEIGDVHRFPNDSALAQFTGLTWPKHQSGKFQAEETRMSHTGNQYLRYYLVEAANSVKRCDATYKAFYEKKYKEATKHHHKRALVLTARKLVRLVWTLLTRQALYQPGYCSFEDLSKIG

SEQ ID NO: 268674 - protein, 368 aa, unidentified
MGEITRAIPARVGADLAKSVIQVDGVDAAGRRVVAKALRREQFVRWCAQLPPGCMVAMEACSSAHHWARKLRALGVDARLIAANFVSPYRMEGKSGKNDATDAAAICEAASRPNMRFVPIKSCEQQGVMSLHRVREGFKEERTACINRIRGVLAEFGLVFGKSPKTLRSVLPDVLEDAANELSTQARWVLQRAFEHWRELDEHLRWCDRQVGAHVRSDPAAKRAARITGIGELGASAMVAGVGDFKQFRRADQFGAWVGLVPRQNSSGGKTSLGCITKRGDDYLRTLLIQGAKSAVMSAHKRDDPISRWLVQLRQRVGWQKACVAMANKNARILWTVMTREHGFDPQHISVKPLAKQPPAQALSCCAT

SEQ ID NO: 268675 - protein, 383 aa, unidentified
MPTAATRPTAPVPTLHLALDLGNTTWKLAFATTIAHAPRLRTMPARDLGQLAAEIAAANRRFGLAADTPVVSCYEAGRDGFWVHRALTALGVASHVVDSASIQENRRKRRAKSDRLDATALVRLLVRHQGGERGMWSVCRVPSIAEEDRRHLHRELFTLTRERTRQVNRIKGLLALHGVVLPRLRGLPATPPVLVGWDGAPLPAGLIARLGREWTRLRATHRELLALQAERRRLLAAADAADDPTRGMVERLLALKGIGEVSAWLYTTEFFSWRQFRNRRQVGGLAGLTATTRESGDTTREQGISKAGNALIRALAIELAWSWVRRQPTSALTRWYRRRFATGGPRQRRIGIVAVARKLLIALWRYLETGVLPEGALLKELKT

SEQ ID NO: 268676 - protein, 344 aa, unidentified
MVCSSSHYRLFVGIDVAATTCAVAWMHATAQPSRAISIDQTATGFAALQHKLRSIEPDPQAILIVMEATGTYWMRLASSLSAAGFAVAVINPAQAHDFAKALLKRSKTDAIDAQTLAELGARLQPECWTPPPQVFTELQQRLVHRDGLVAVRTQFRNQLHALVQQPIVIASVQTRLETLITTLDKEIATLEQEIAAALQQEDAWAAAAARLATVTGLGTLTIAWILTTTINFTLTITPEAAANYAGLAPQQRQSGSSVRGRPRVGHGGNARLRRALYMASLSAIQHNPVIKAFYTRLRAAGKPRKVAVCAAARKLLRIAWAVANKKEDFDPAYAMCSRQEVTVR

SEQ ID NO: 268677 - protein, 408 aa, unidentified
MNAVGIDVSKGKSMVAALRPMGEVALLPQEFLHTEVGLEQMAYAIIALGEDTRVVMEATGRYHEPVAAALHEYGIYVCVLNPLYIKQSGGGSIRKVKTDKADAMKIAKYGLDNWVNLREYTPMDTVRQQLKLCSRQYNLYMKTVVSLQNNLISLTDKTFPGGNELFSSPERADGHQKWVDFVMTFWHCDCICRVSEKAFTERYQKWCKRKGYHFSAEKALDIYAGSCGHFTTLPKNDNTKLLITTAAQQLLAGKMTLAALRAEMTRLAKQLPEYDTVRAMYGVGETTAVQLMAEIGDIRRFPRRSSIVGFTGVDPAVNQSGKHSTKSVPTTKRGSPHLRKTLYQIVCTYLKKSPADEPVYQFLDKKRAEGKPYFVYMTAAQNKFLRIYYARVKECLEAFDARQSSTQS

SEQ ID NO: 268678 - protein, 316 aa, unidentified
MNSQVFVGLDVSKQHLDVAVRPQGRHFITPNNDRGIKQLVKRLVALKPQLIVLEASGGYEFLATAALAEAQLPVALINPLTVRKFAGATGKLAKTDKIDAQVLAHFAEAVRPELRPLPDQEQQLLKAALQRRVQMVKMIGQEKNRLEKTFIPALRQDIQAHLAWLQQRLAQLDRDLNDQIRRSPLWRDRDRLLQTIPGIGPAVSRAVMAQLPEAGRLPGKKAAALVGVAPYNRDSGRFRGKRMIRGGRSYLRRMLYMAAVVAARWNPVIRTFYQRLLAAGKPKKLALTACMRKLVLILNAMLKNNQPWNQFINQVP

SEQ ID NO: 268679 - protein, 342 aa, unidentified
MNKVAIAAIDLGKHSFHLHAQDDHGHELYRKKFTRAALTQYLAKLEPCTVVMEACGGAHFMAQEVAKLGHTPKLIAPHLVRPYVKSNKNDFADAEAICEAASRPTMRFVPPKNQAQQALAMLNSVRESFIKDRTATVNRIHAALLEVGISLAPGFKSIKELPALLEMSSFSGSIKKILMGLHEHFNYLDGKVKALDKEVECQAAEDDLAARLMTMPCVGPITSSALAAELGDGKQFKCGRGYAASIGLVPKQHGTGDKTVLLGISKRGDRNQRRLLIQCARVYLIQLERQKGALADWVRQLLATRHHSNLVVCALANKLARIAWAIAAHHTEFDAGPAAMNA

SEQ ID NO: 268680 - protein, 312 aa, unidentified
MANLVYAGIDVGKDKLFVNIHLDSQVRDFPNTHSGLERLSRFLIKNAVNLVVMEASGGYERLPASDLRARGLSVAVVNPTYVRRFAQGMGTLAKTDTIDARLIAHFASVKQPKPQQAKTVEEEELAALVERREQLVSLLSVEKNRLSKASDYSKASLQISIQFLTGQIASIETEIKALVAKSPERLARMRCMCSFIGVGDITAVTLLTEMPELGMESGKHIAALAGVAPINRESGKMKGKRRTYGGRARVRRTLYLAALSASRHNPIIRAFYERLLAAGKEKKVALVACMHKMLTILNAMFKKGELFNPEYS

SEQ ID NO: 268681 - protein, 339 aa, unidentified
MMEHFVGIDLHKDVSQMAVLRESKSPSQLRLANDVVAVERVLKKLPKGSKIALEAMGSWWWMVELAQKTGHEVFLSHPKQTKAIASARLKSDKVDALMLAKLLKADLLPTVWIPPENQRHIRELLTHRVRLVRQRTAVINELRAVYAKRNIDPQARLQRLHPVVTAANELGGYGPRIVDEDLKLLGFINGQVGGLDTELKNIAHEDGQAKRLMTIPGVGPVSAVAVSCWIGEIARFSNAKKLASYFGLAPRVRQSADQERHGHITKEGNRMVRMLVIQAALVHTRAGKAPSRKHYLGVLKRRGKQIARVAAANKLLGAIFHMMRERIDYQEFLRRSGAQ

SEQ ID NO: 268682 - protein, 397 aa, unidentified
MYIVGIDIAKRKHEAAVIDGEGAVIIKPFSFTNNCSGYNRLLAMLAKAKLPLDEVSFAMEATGHYWLALFTRLQKEGFRVQVINPVQTNSIRSFYIRQAKTDPRDALLIAEVIRFGHFSESTLHPENIYELRELCRGRHAIVSMQADVKRKVVALLDQVFPEYETAFTNMFGDTSMAILQTCPTPKELSEMPLEELCHLIEVSSHKRFRMAKAQELQALARNSFGFAMAGDVFSTMIRLYAKHLVFLKQQVQEMDRKIAEIMDTLDTPITTITGIGPTLGAYILSEIGDISRFSSAAKLAAYAGIDPTMRQSGEYNGVRNRMSKRGSPYLRHAIWLAASSAVLHDPALKLYFQKKRDEGKPYMASVGHACRKMVSIIYAVMRDNKAYTPYIPNEISA

SEQ ID NO: 268683 - protein, 415 aa, unidentified
MEATVERCAGLDIHQASVVACVLVGPPGCKPRKETRSFGTSTRELEALRAWLEGLGVTHVGMESTGVYWKPVHAVLEGGFELIVGNAHHIKAVPGRKTDVKDAEWLADLVRHGLIKPSFVPPPPIRELRDLVRLRRSLTEARSTERNRTLKLLETANIKLASVASEVFGVSGMAMLRALVEGEAAPAEMAELARGKLRSKRERLTLALEGRLTEHHRYVLAFHLRRLAAIEEDLRALDARIEAKAEPFQAQRRLLQEIPGVDALVAVTIIAEVGVDMSVFGNAKRLAAWAGVCPGNHRSAGKRRSGATRRGNVHLKTALVTAAVSGSRRRGSYYKDKYHRLKARRGRLRAAVAIAHKILVAAYHMLAGGVPFRELGEAFLDRQARQRNVRHLLNRLNHLGYDVLLQPRAVEAAGP

SEQ ID NO: 268684 - protein, 346 aa, unidentified
MLYAGLDLSRQRIDVHVLDASGRTVEMIAVRPDADALRMLVERLAGHGHAVRAAIESMNGARFIHDQLEQAGWDVLIADAQRIKGLAPLACKTDRIDARVLAELGRRDLVPAIWLPDPRVRAERERARFRLHLVRHRTALKNRIHATLITFGRPNPMADLFGVGGRRLLARLDLPEPWAGTLTAGLRLIDELETEIEACEAELRRLGADHQYVPLLRTVPGIGWVLAFTIASEIGDIGRFPSPTKLAGYTGLCPRVYQSGERDRRGALAKNGPAYLRWALIEAATHAGHHPVYRARYERTKRRLGRQRGTKVARVAIARELTTAIWHMLSRNQVFCPAGPTQRLVA

SEQ ID NO: 268685 - protein, 334 aa, unidentified
MLYVGLDVHSRQSSLCILNSGGGTVNQIQLKGPRSVVVDRLRQLEEPFSICYEASCGYGHLYEQLRPLAHHVAVAHPGKLRLIYGSKRKNDRVDAQKLAKLLLLDMVPPVHVPSIDVRAWRSLILLRQRLLQQVVRAKNQIRGVLREHDIVGAKWLWSKKQLAWLETLELHPIARLRLELAVEEFKSLQQKIKRLEAELQKYADRHPAVKVLMTIPGVGIRTAETFVAWVDDITRFGNNRQVGAYFGLVPCQDASADRNRLGHITRDGPPVMRKLICEATWTAIKKCPRFKRFFEQVMGGKSERKKIALVATMHRMTKVMGAMLRSGETYDSAR

SEQ ID NO: 268686 - protein, 351 aa, unidentified
MSEHYAGRQIVGMDLHRRRSVLVRMTDTGERLETVRISNDPEYLKAVMARAGEAPEVVLEAAYGWYWAADTLAELGATVHLAHPLGVKMFSYRRVKNDQRDAADLADLLRMGRLPEAWIAPPATRELRGWVRHRAKLVGLRSSLKCQVHGVLAHAGVWVPMSDLFGVAGQQLLAELSAGDRLSIESRSRLDSALRVIGALEFEIELFAKLVNGRLRTDPGYRTIQQIPGVGRVLAAVFVAEIGDITRFHRPAQLASWAGLTPKHHESDTTVHRGRITKQGSRLVRWAAVEAVQRVGAHTRLGQHRDRVAARRGRNIGVVAAARELLTLVFYGLRDHHIRALRPPAAGRPAA

SEQ ID NO: 268687 - protein, 401 aa, unidentified
MPLFAGLDWGGAGHAVCVVDETGRTVGRIEAGHDAAGLATLLARLKRLASPADLPIAIERPSGLIVDVLVEAGHPVIPIHPNVLKACRPRYRAAGGKSDPGDAYMLADILRTDGHRFRPLALLSDEIRALRALVRGRDDLVAQRVALANQLRALLEGFWPGAAAIFAAIDSPIALAFIRRYPTPDSAARLGEKRLASFMAQNAYCGRRSAAELLARLRAAPAGLAGEAEADAKGEIVRALAGLLERLGAEIARLSSRIEHAVAELPDGRIVMSFPRAGRICAAGILAELGDVRERFPTEEQLAAEAGVCPVTHASGKSRGVVFRWACNKNLRAAVTCFADNSRHASAWAARIYDSARARGCKHAHAVRILARAWLRILWRAWQDRAKYDPAKHLAAANITT

SEQ ID NO: 268688 - protein, 424 aa, unidentified
MEIVHERAAGLDVHKDSVVACVRVMCGGKVNRECRTFNTTTAGLEALREWLIACQCTVVAMEATGVYWMPIFKILDDEDAYQLIVANARQVKGLRGRKTDVNDATWIADLAAHGLIRPSFVPHDDFHELRTLMRSRKQFVREQTGHVQRIQKTLTEANIRLDSVMSDIMGFSGRRMINAMVEGVDDPDKLAALGTRGLKATKQQLRAALHGRLTGHHRFMLQLHLKQYDALEEMIGLVDKEAEARVARMDKQVKDQEAALSALIVLLATIPGVSQLSAMTILSEIGRDMSRFPTAEHLVAWAGLCPGQNESAGKRRNGRLRKGAPWLKTMLVQCAWAAKRSTNSYYKAQYYRLKARRGSQKAICAVAASMLTAIYHILKDGVPHQDLGVDYFDKRKPEAKVKRLVAQIAKLGFEATLRPIAEAA

SEQ ID NO: 268689 - protein, 372 aa, unidentified
MKQNIIYVGLDVDDTQYHGSALDQSTGEVIDFRCRPTLKGLLGQLNKLGTHFPRCLLKLCYEASYIGYTLQRDLAQKGYHCDVVAPTSIPSPRGKQIKTDRIDAGQLAQFYANGLVSIVCIPDAELEQDRDLMRSRQNLLQQQTQLRKHLQALLRRNGLHYKAQTQNKTHWTKHHYCWLERTVEASSGSLKVNLDLLLRQLKGLNTILAEYGQQIDMLAKTQRYEKPVQALTCYKGIKNLFALTMITEIGDVKRFSHPRQLVSWIGMDIREYSSGGKHRRFGITKQGNRYLRTAFIEANQRGYRTAHLSKAIKARRAHTGAEFIDIADRCLRRLNKKGNRLLLAGKHPNKVKVACAREMVGFVWESLHQAAA

SEQ ID NO: 268690 - protein, 414 aa, unidentified
MDEQQPADRQIVGMDLHRRRSVLVRMNQDGERLETVRIVNDVDRLAEVIARAGESPEVVLEATYGWYWAADALAELGANVHLAHPLGVKGFSYRRVKNDERDAADLADLLRMNRLPEGWIAPPATRELRELVRHRAKLVHLRTSLRQQVHALLAARGVAIPVSDLFGVAGNQLLDRVSLSPAARTRVVSLRSLLDALDVEIDAFTKLTAKRLRGDPRYKAVQTIPGIGPVLGAVFLAEIGDITRFPGPTQLASWAGLTPKHHQSDTTVHRGRITKQGSVLVRWAAIEAAQCAGKYTRTGQRRERSGHVHAANLDRERSWAGRHRCLRDGCRRPRWFRTCLVVAHETGTHDEGDDDQQEERQDRGPTPPFCPARLVPSSTETLVRVHRSVKHGHRITERTASSPPGRGNRSRGLG

SEQ ID NO: 268691 - protein, 415 aa, unidentified
MVVCRANNTSCRTEKDVAQPTLWAGIDAGKAAHHCVAINTGGQRVLSERVINDEGALLDLIRAVKELADGGSVQWAIDLNSGGAALLITLLLDDDQDLLYIPGRTVHHASGAYRGDGKSDAKDAAIIADQARMRRDLLPFRHRDKTAVDLRILCARRTDLASDRNRAINRLRAQLLEYFPALERAFDYAHRKAALILLTGYQTPDGLRRMGAPRLERWLRDRQAYNAGDLAARAIEAANLQRTTVIGQHVAAAVVARLAQTILDLNTELADVDTMIKETFQQHRLAAIIVSMPGFGSLLGAELLAATNGDLGSFNTADRLAGIAGLAPVPRDSGRISGNLKRPRRYDRRLLRVFYLAANNSIKTCPESRNYYDRKRSEGKRHSQTILCLARRRLNVLWAMQRDNTNYQPGLPRAA

SEQ ID NO: 268692 - protein, 350 aa, unidentified
MLIIGCDYHPSFQQIACVDSQSGEFSERRLVHRAEAEQFYGELKQQSVGVRVGMEASGHAGWFERLLRELQFELWIGNAAEIRTKRVRKQKTDRQDAELLLRLMIEDRFPRIWVPDDENRDLRQLLWHRHRLVQMRTRVMNQLHVVALNEGFRRKKALWRAAGRQQLESIALPPWARRRRQDLLDLLDQLTPKIQELTRALEEEVEKRPVTRRLMTHPGVGPLTALAFELVIGTPQRFHCGKQVASYVGLVPTEASSGERRRLGHISKQGNVLLRFLLVEAAQVTVRTQPEWRSKFFHLAMRRGRKIAKVAMARKLAVHLYWMWRRSWDFGELRKFGSHAGEPGNRDGVQ

SEQ ID NO: 268693 - protein, 350 aa, unidentified
MSTSMTIAVDLAKTVFEIAVSDGNGKIIERQRLSRSQFQCFFQNREVATVVMEACGTAHFWGRKLARQGFTVRLLPAQYVRPYRRRNKTDRADAEALLEAARCGEILDVAVKTEHQQAIQGLHRIRSQWMAARTARINALRALLREQGIELPRGAGNAVKAAPQAIDDERVPYALRIALLDVVGDILSLEARIERTEQQLDAFARSNSAAQTLMAIPGVGLLSATALVAAVGSPHQFSNGRHLAAWLGLTPRENSSGMRRRLGRISKRGDPYLRTLLTHGARAVLSRAKQLAAQGKPLNHLQAWALALEQRTNHNKATCALANKLARICWAVWIHQRPFNGNYQPHAVAA

SEQ ID NO: 268694 - protein, 375 aa, unidentified
MTKSNILFIGMDVHKESIEIAIADDGPQGEVRRYGRIGGSMDALKKTLRKLESTGKSLHFCYEAGPCGYELYRYLIDAGHICIVVAPSLIPKKPGDKVKTDKRDAVQLVRLFRAGELTPVYVPDREDEAMRDLSRAREDAMIIQKSARQRLKSFLLRHNIRYQNRANWGEKHLRWLANEVRLPIPPQQVVFQEYVNTVTEAAYRMERLVAEIHHHAKVWRLYPVVQALMAMRGVRMIVAVTVIAELGDLTRFHNPQQLMSYLGLTPCEYSSGERQRRGAITKTGNHHARRILIEAAWSYRFSPKVSPEIQKRQQNLPLSIRDIAWKAQLRLTRRYKMMTQRGKVPNIVVVAIARELAGFMWAIAQVVPLSNESTD

SEQ ID NO: 268695 - protein, 319 aa, unidentified
MDVVLGIDVGKADFHCALLSEGRCRSNSFPNSAVGFERLVSWLGHRKVERVHACLEATGGWSEDLAAFLHDRGHAVSVVNPSTIKSFGQSELSRTKTDKADAALIARYCSAMKPRLWTPPSPSQRRLQRLGRRRVALDEMRTQERNRLQGPGIDEIRPSIEATLAFLSRQIADLDAEMAQLIEDDPELRAKRDLLKSIPGIGERVATTLLGELPQMTEFRNGKALSAFVGLCPREFRSGSSVGASWLSKMGARPVRRVLYMPSITAMRCNPVLSAFAARLRANGKRPKQIIAAVMRRLLVLAYGVLKSGRPFTPRLAPA

SEQ ID NO: 268696 - protein, 320 aa, unidentified
MNKEQKYVGVDISKDSLDIAVFDSNQRWRLNNNPGGIKRAIGMFQAMKAELVVFEATGGLEIPFWAALFQAGIKTAPINPRQIRDFAKAKGRLAKTDIIDAQVIAHYGQAIQPRPLSFPDTQELKEVMARRSQLVGMISAEKNRLRATRQESIKQGIKAHIEWLETGLDSVDKELRKAIEASPIWREKDQLLRSTPGVGPILSAVLLTQLPELGTLNRHQVAALAGVAPLNRDSGSMRGKRSVWGGRGRVRGALYMAALVATRCNPVIRAFYQRLCSQGKPKKLALTACMRKLLAILNSMVKHHTPWIYRSAPTLIGPCQ

SEQ ID NO: 268697 - protein, 406 aa, unidentified
MMTPVDRRVTGGVDTHDDVHVAAVCDSATSRELATASFPTTTAGYADLLAWMNGHGTLDKVGVESTGSWGAGLTRHLSAARVVVVEVDRPDRKARRKHGKTDSVDAVAAARAVIAGRATATPKSRDGGVEAIRQLEIVYHAAAKDRTRSINQFKAIIVAAPAVLRHRLRDGLSLRNQLARARRFTDNHADPVEQQTRFALREIARRIEFLDAHTARLETRIRVLVTAHCPALLGLSGVGPHSAAQLLAAAGDNPHRIRSEAAFAKLCGVCPMPASSGKTNRHRLNRGGDRRANNALFTIVLVRMQHDPTTRAYVERRTAEGMTKKEIMRCLKRYVAREVYNTLINPPTDLPTGSEIRELRNQRGLTLADVSEQFSIVQNTLSRLERGIAHDTRLARRIREWLQQTP

SEQ ID NO: 268698 - protein, 316 aa, unidentified
MEAPVAGIDVSKDKLIMYFQGKLYEFPNDRQGFEEIRKILPKGCKVGIESTGVYHVNLAKYLNNEYDVRIINPFILKKFKGFRGKKSDKNDAKKLAELVVSMGSGFTTSDARELTSQWDFVTRSIARVKNRLRRDLVLLGYRDSLSKKNLEEVLRGGDSIVLAEVRFLLEELERLKTRKREIEKELENVVSKDSLIFTIPGIGKTLGCIILARVGDVRRFSDKKRFVAYCGLDPLVESSGKSVVSRGISKRGDAVLRRAFYLAALTAIKVNPVIKRFYEEHKGRLRGKKLIVACARKLAVITWAVLYYNKPFDASE

SEQ ID NO: 268699 - protein, 450 aa, unidentified
MSRPQVIDDQEHERVHERVAAIDVAKDTGMVCTRTPHPARPGARQATVWTVKARMNAIRALGRQLKTGGIEIVTLESTSDYWRIWFFVLEACGLAVQLVNAAQAKSLPGRPKTDKLDAMWLARLTELGLLRPSFVPPKAIRDLRDYTRARTRLVQERTRCWQRLEKLLEGALVKVSAVASKLTTLSAQDMIKAMIAGQRDPRTLAALARGRMKAKHDDLVEALDGMFDDHHGELAALLLDQITSLDAKIAQLSARAAGLTAAMPAAWGTDADGVTGPGAGTTPDAPVLNAVARLAEIPGVSEDLARTIIAETGLDMTRFPTAAHLVSWAGLCPSARQSGPRTRAGKKGQGDTWLRGALGQAATGASHTATFLGERYSRIARRRGKAKARVAVARSILVIIWHLLADPQARFTDLGPGYYQARTDKDKRIKNHIRQVEALLGHPITIIKAV

SEQ ID NO: 268700 - protein, 312 aa, unidentified
MDQPSCFVGIDVSKDQLDVHLRPSGETLALPRSGPGLEQLVERLRRELPALVVLEATGGFEITVAAALAAAKLPLAVVNPRQIRDFARAIGTLAKTDRLDAEVIALFAERVRPEPRPVADLEAQALGELVARRRQLIEMIGMESNRQHQVRDRALKTRIHEHLAWLQQALADLDREIDGLVRRSPAWRETEELLTSVPGIGKITAQALLADLPELGLLGRREIAALVGVAPLNRDSGQWRGHRAIAGGRFDVRRALYMATLAAIRFNPVIRNHYRQLRERGRPAKVALIACLRRLLTILNAMLRERTTWQPA

SEQ ID NO: 268701 - protein, 382 aa, unidentified
MDASHLKRGVSRERVKKWTLRADGIKVPKVEGVQSSQATGGSEMNRIVVGVDIAKRVFQLHWVEPQTGEIVALQLKREKFLEHFANRSSCLIGMEACGGSQHWARSLQRLGHEVRLLSGRMVKPFVAGNKNDAADARAIWMAVQQPGIKVVALKSEEQQAVLALHRMREQLVKFRTAQINGLRGLLTEYGEVMPQGRAGIKRDIAGVLGRLSERLPAIVVEALREQYARVGELDAQIGQIERRLGHWQSQDRATQRIAAIPGVGLLTATAAVATMGDAKAFRSGREFAAWVGLVPRQTGTGGRVRLLGISKRGDKYLRTLLIHGARAVLTHSKSPPEWLTELLKRRPKNVAVVAMANKMARTIWALTAHERAYQSGYVGRPA

SEQ ID NO: 268702 - protein, 344 aa, unidentified
MGEVSTIGLDIAKSVFQVHGVDVDGAVVIRKRISRPRLLEFFAALPPCLIGIEACPTAHHWSRGLQALGHTVRLMPPSYVKAYVKRSKNDANDAAAICEAVTRPSMRFVPTKSEQQQSALMLHRSRQLLVRQRTMLSNAIRGHMAELGIISAKGRNGTAELLEIIGNQEDDRIPAAARLSLAVLARQYAAITTEIGAIEKHIHAWHRSCEESRRLEEIPGVGPIVATALVAEVGDWTAFSSGRSLAAWIGLVPRQHSTGGKERLGRISKQGNRHLRWLLVAGAMAVIRYARQHGTKRLWLARLMGRRPTKVAAVALANKIARMAWAMMVRGERFEESKLLPAAA

SEQ ID NO: 268703 - protein, 397 aa, unidentified
MTSCTSTSGQDFDFAAFVAFDWADREHAWALQVAGSQQREHGTLPHKPEAIEAWAQQLHVRFGGRPVAVALEQSRGALIYALRQFPHLVLYPIHPSTSYSYRLAMFPSGSKDDPKDADLILDLIVQHRERFRALQPDTEQTRKLQMLVEKRRQMVDDKTAQRNRITDLLKLYFPQVLGWFDEIDSPIAAAFLQRWPTLEKLQREDPEVVRTFFYEHHSRSAARIEQRLGEMRQARPALTDAAVIEPAVILTQALLAVVAAVREGIAHLDQAIDQTAAAHPDYVLFASFPGAGKVMAPRLLVAFGSQRERFASAQEMQSFSGIAPVISRSGTSQRWIHFRWACPKFLRQTFHEFAALSIAQCAWAKEFYDKKRSEKKGHHAAVRALAFKWIRILFRCW

SEQ ID NO: 268704 - protein, 425 aa, unidentified
MSQPKQSLDRECEFAAYVGIDWADKKHAWSLQVATTGKREEGEVEHSPEAVEEWIQGWMVRFPGQLLAVCLEQSRGALLNLLSKYQQLVLFPVHPATVSRFRAALYPSGAKDDPKDADLLLDLLVHHRERLRRLEPDTVETRTLRFLVEQRRHLVDQRTAHSNRLTSALKQYYPQVLCWFEDPAAPLVTAFLARWPTLDMLQKARPETLLRFFHQHNCRSEELIQERLQQIRKAVPATRDPAVLESGMVQTHWACQMLSLLSQAIADLDQRIQPIAQAHPDYAVFDSLPGAGEVMVPRLIAAFGTKRERFSNASQVQNFSGIAPVRESSGRTEWIHMRWACPKFLRQTFHEWAGHSIAHSSWAQAYYHQQIARGNGHHAAVRSLAAKWIRIVYRCWVNHMPYDERIYLDSLRRHGSPLAAAIPAH

SEQ ID NO: 268705 - protein, 390 aa, unidentified
MILVGIDVAKDKHDCCITNTDGEMLFDIFTITNNSEGFDILYERIRSVAPDLSKVKVGLEATGHYNYNILSYLLDKHLTAYVINPLHTNFYRKGLSLRKTKTDRIDSRTIALMLLTDLSLKPYSVSSYHRENLKSLTRYRFSRVQERSRQKSSISRLVTILFPELSQLVPCIHISSIYTMLEELPGASYVASVHLTRLTNILSKASKGRFGREMAITFREAARTSIGAKIPAKSLELRHTIADVRVIESEIREVETEIQKLMDEETTTITSVPGIGTQMGAIILAEIGDFSRFDSPDKILAFAGMSPSTYQSGKMISSYAHMEKRGSRYLRFALFNVTKHVCNYDPGFAAYLAKKRAEGKHYNVAISHAAKRLVRMLYAMETNGTLYEAA

SEQ ID NO: 268706 - protein, 432 aa, unidentified
MNNRLQVGIDFSQKRADFCLLFPDGRPLESHIAVDNSSPGYSLAKRLLLDALDSHSFDGVDVSGEATGYLWLPFFLQLAADPELELHDLKLYLLNPRWVKWFKKCFAQDHKTDERDPFYIAERTRTRRPDVTWSADPSILALRFYTRLRFHLVQSLAREKCYFSTFLFLKASSYRRLKPFSDVFGVTSRLVLTQQPSLDELAELPVEDLAMHLHEMSGHHLRDPFKNARKLKRVSQESFPLDDRLALPVQRILDLTLEHIRFLEGQVEQVNRWIATERQVHPSIAQLATIPGVGPVFSSGIGAEIGRTQRFLQGHKWDKKHKRHRPRNLRDAEDAVAKIAGLWWPRTSSGDFEAQDRRMAKTGNRYLRYYLIQAANLMRNRIPEYAKFYDRKYQEASKHHHKRALVLTARKSVGLVVGLLHRNEPYRSLERR

SEQ ID NO: 268707 - protein, 344 aa, unidentified
MSKLDTCGVEVSAKELVVALRREEALEPLRSFANTAEGQQAVIRYLRRAGRVVRVCLEATGLYGLDLALALSAQAGMEVMVANPRAVRHFATALMQRSKNDQLDAGVLEQFAARMPFQPWTRPSPAALALHALARRLGELVEMQTAEKNRQHAAELSQAIPAAIRRDLARSLRAQERAIARLTREARKVIAPEPELTERFALLDSVPGIAETSALQILAELAVLAPDLEARQWVAYAGLDPREYSSGTSVHKKTRISKAGNKHLRRALYMPALVAVQHDPHLRAFYQRLLERGKFKMQALVAVMRKLLHAFQGMFKTHQPYDGAKLFRPVVSPLQEVARAHAAS

SEQ ID NO: 268708 - protein, 427 aa, unidentified
MKKADLLSTLFVGIDISSRSNVVALLDFESQKPLQSFAVGNNQSGAVELAKRLAAYLRSRKNLAHLVVALESTSFYGVHVANYLSSCEVLAPFHTAVYCLNPKAIRNYKKSFIDLGKNDYVDAFVIADFARANRITTKPWRGSQFLALQRLTRHRLHLAKALTREKAYMLSNIFLKFSEFSLLDAQEQPFSNSFGAAASSVLTDFLSTEEIIEMPTKDLIRYICEKGHNRFPDPEKTASLLQQAARNSYRLDKCLYEPLTVSIASSFTLLSTYETEIKAVNKAIEKTLKGIDPSAYQSLLSIPGIGPVMAAGILSEIGDIHAFNSQEALAKYAGLVWRENQSGNFQADDTPLSKAGNTYLRYYLIEATSHVKNHCSEFAAFYQKKYDEVKIHQHKRALALTARKFVRLIFGLLANHQLYSSSRVVQA

SEQ ID NO: 268709 - protein, 343 aa, unidentified
MTRYVGLDVSQRLTAICVVDDSGRRLWRGQWPSDPEQIERTVRRHGGDDARIGIETGPMTPWLVHELRGRGLAVTCLDARHARAALKMQINKTDQNDAEGLAQIMRTGWYRSVHVKSFDSHRARALLGARAQLVGMTTRLSNHIRGVLKTFGMLPGAGRNLAFDRRVETLLADRAEVAPIVQPMLAAWRQLRQQTATFDKAVRVLVKSSPTCRHLMGVPGIGVLSVLAYVSMVEDPARFGRSRSVGAHHGLTPKQYQSGEIDRSGRISKCGDALARTLMYEAAVVLMTRVKRAHGLKDWAQAIARRSGAGKARIALARKLAVILHSMWRSGEPFRWSEQPAAV

SEQ ID NO: 268710 - protein, 485 aa, unidentified
MATRAHPHPDLKAVPMLLNESLYIGIDIGKGKHVAGFLSQTLLERHERFEACPALVFENSREGFRLLIERIGSYSPLEHVFVLMERTGHYHRALEQYLQELDIPVYVMHVQSRSAGMLKTDKRDALTLANQLYSQLELGVQVANKVQLNKVQLIRRLVPPTEAAAQLKGLIRHRYELIRESTQRKNKLTALCDELFPELTRVVKDPNALVALALREKYPIPQALATASLTTLQQIRGGARSLSDAKLLELQRLAAQSIGTKDLARQRGLVLEQTQLIKELRLLREHVEQLETEIVSIVEHAREGQILLSFPGIGPVMAATTIAAVGSIHNFPSASALKSYFGWAPVVVQSGSTLDHSRLTRGGTRTMKQMLFLAVFQAIRLQDNEWAKLYDRLVKAKCPYDERTQSYVGKTRVIGRVAGQMTEAIYALLKRDAEILSKVLPGEVPPAPLLYDPEVHRKHRQGQYRPLKSTPLPNTITVLHPRSPE

SEQ ID NO: 268711 - protein, 407 aa, unidentified
MASHDFRYTKTAQKARRRYLAVTDIASKKHDCCILSSDGEILAPFFTFENNAEGFDILLKNIRNHCRDFDDVRVGVESTGHYSNNLISFLQGKGFCLTVFNPLQVNLFRKAQTLRKTKTDKADARFLAQMLMSSEHPIYAPQSLEISELKVLVRHRHRLVAMRTKLKISVSRLVAILFPELHTAVSSIHQATSYALLLELPTAKAVADCHLTRLTNLLYDNSKHRYGREKAVLIKSIAAKSIGTNSIATGFELQQTIKLLNNLRTEIDTLDKLVKKVMLTLNSPILTIPGISFTLGAIILAEIGNIDNFANPNKLLAFAGLEPSTHQSGKFTADNNSMVKRGSSYLRFALLQAALLITKYDGEFKSFYHKKRNEGKHHFVALNHVGKKLCRVIFHLLRNNLTFSLSA

SEQ ID NO: 268712 - protein, 387 aa, unidentified
MIYVGIDIAKQKHFAAAMTADGEVLIPPFGFSNDAEGFKLLLSKIKSFKKENTLIGLESTAHYAENLICHLFELSYNICVINPIQTSTLRKTNIRKTKTDKVDCLLIIKSMIVNKPRIYSKTDIDSLRLKSLCRFREKIKKAKAKLKIQLVTYVDIIFPELQYFFKSGIHTNTCYQLLKKHSSPDDIAALHLTYLANLLQKASHGRFGKEEAIALKGLAKSSVGTGNTAVSIQITQSIAQIELLEQQLADLDRAIESIMLEMDSIILSIPGIGFLNGAMILGEIGNISRFSNPSKLLAYAGLDPTVNQSGKFNAKSTKMSKRGSKLLRYALINAAWNVSLNNKTFNDYFNLKRSQGNNHYAALGHVAHKLVRIIFKMLKDNVAFNLD

SEQ ID NO: 268713 - protein, 387 aa, unidentified
MFYCGIDVAKHTHTVVVLDEQGQVVKAAFAVSNDRAGFDGLLGQLAEYAGQVQIGLEATGHYWLALYDTLTHRGYPVAVINPLQIRAYRKLDLRKRKTDRVDARHIAAFLRFAQPRCTDPTLPVIMRLRELTRFRFNLVQQKGDAKRRVLCVLDRVFPEYEQLFSDVFLRSSRALLAEAVTPDEFAAFDLSELEQLLHRVSRGRFGQERAEAIQRAACQSVGVSFLTDAAQIEMRCLLAQIDLLEQQVADVEAAIEQVMAEIPQYITTIDGIGPVTGAALVAEIGDVQRFDTLEKLVTFAGIDATVFKTGQFEGNQRHMSKRGSPYLRCALWQAAGASLQHNPELKTYYDKKRAEGKIHGVALGAVCRKLLARVYVILREQRPYVNH

SEQ ID NO: 268714 - protein, 435 aa, unidentified
MEEVEDEPLFCDRVAGIDIGKATVMVTIRVPSEARAKGRQQETREFGTTRRELLALADWLRCWQVERAGMEATSDYWKPVLFTLEQEGFDCLLYQASQVKALPGRPKTDKLDSVWLARITEQGSLAGSFVPPEEIRRLRTHTRYRRKLVQMRTAQKERCEKLLEDAHLKLSSVISDIHGVSGRDMLRAIAAGERNPKVLAQMARGVMRSKIARLEQALDCSFFTGEHAFILTMMLDSIDSLTAQAGVLDARIADMCQPYQRQLEQLDEIPGFGITTAQDLIAEIGTDMNVFPTAGHLASYARQAPRVKESAGKRKGKNATGRGNPYIGGALGEASISAGRTQTFIGEKYRRLTRRMPKRKAQVAIMRSQLVIAHALLSDPDARYQDLGPDYYERKADIRRRARNHARALERLGYKVTLEAIDPGTGELHLVATAG

SEQ ID NO: 268715 - protein, 304 aa, unidentified
MTGSSSTVEVGAVIVGVDTHKDVHVAVAIDALGRRLAERSVPSTPAGLAQLRRWSRDMGSKRVWGVEGTGSYGAGLARSLQAAGETVHEVSRPDRRVRRERGKSDPIDAEIAARSVLAEQALGTPKASGGASEALRQLRATRRAAVKARTQAANLLQALLVTAPEDLRADLDHGTLRERIARCARLRPGAAIAQPREACKLSLRSTARRWQHLSDEITNLEAAIASITAAAAPDLLDQFGVGPDVAAALLIAAGGNTDRMRHEASFASLCGVSPLPASSGKTRRHRLNRGGDRQANAVSTLAEN

SEQ ID NO: 268716 - protein, 368 aa, unidentified
MIRRFHGIDRHKNFSTISVLDLEGKEIGFKSICLNLRSYIDGLGPEDAVIMEASTGTFYWADLVEATGALCFVLNPYRFKIIKDSWNKTDKQDARNMGKALWVYMVTEEFGIPTVYKPDAVIRELRKLFSQYVLLNKQIRMLKNNIQAILADNGIALPKVEKNHLLSPKYGLSVLEKLEVSPASRISIQVSLELLWKIEEAKGEISKEIILTGEPLRDDVNLLITIKGITPLTALAFLADVADINRFKKLRKMNAYLGLVPRSKDSGGKSRPGHINRESRKLTRTLLTQSVRHMPDSSWYLRNYYSDLVKKRGAGRARIALIRKICGVMRRMLLNREEYRSIKADNFERKSKKYAKELEKIKEERKSA

SEQ ID NO: 268717 - protein, 318 aa, unidentified
MIDEKDDRVFEIKLENDSTLTLKSLSKYKRRLKGIAVESTYNWYWLVDALMESGYHVDLVNTAKVVQYEGLKHTNDKYDAFHLAHLMRLGILPTGHIYQKETRGLRDLLRKRMQLVQTRSAALIRFKSMIQLHSGNTIRADTIKTRKFKIPIVGDSNVQLALQSELQLIRALIDQIKLLEKSILDQVEPLAQYQLLKSIPGIGDILASIIWLEIGDINRFKSPGNFASYCRCVNSRRESNGKKKGENNRKNGNKYLAWAFIEAANFCVRRCEPARRFCEKKTTQRNNIIARKALAHKLSRACYWVIKNQEPFQLSKLF

SEQ ID NO: 268718 - protein, 271 aa, unidentified
MKILKQSAGIDVSKSDFKVCLGKLDEQLSVAFSFQKAYDNNLKGVTLFLKEVSHLFTAEVTVQFILEASGVYHELLAHKIYQHGYEVSIILPSKSKAFFKSITQKVKTDKVDARLLSQLALERQLDNWVPADPIYTQMRSLTRERESLIKEQTVIINKIHAQQSAYQIAKSTLRRSKQRLKLLQKQITSIDLELKTLVESSEMLCSKVNRITKVKGLSLLTVATVIAETNGFGIIRNRRQLVGYAGLDVIINQSGQKSSKGRLSKKRKSPY

SEQ ID NO: 268719 - protein, 312 aa, unidentified
MDPVYVAIDVGKRQLEVAFGSAGELFSLENEPRAIAGLRKRLTGLNCQRVLLEGGSYQNLLVAALRAAELPVVIVNPRRLRDWARGIGQLAKTDRLDARLLALYGERNQPPLRELPDPQTQQLRALWVRREQLIEMVVMEQNRLEHAPKALHHDLNAHIDYLRKQIKRADDDLDREVRNSALWDKYELLSSVPGVGRVLSVALLSDLPELGRLNRAEAAALAGVAPFNQDSGAWRGQRKIAGGRQRLRRVLFMATIAATRCNPTIQAFYRRLRATGKPFKVALIAAAHKLLLILNSMLKSHTPWRPPCRVTP

SEQ ID NO: 268720 - protein, 365 aa, unidentified
MKEQKTLTRYVGIDLGKRTYEMAVVGKGGKVTKSNGQTYPYARQGLYNKLRPGDKVALEACSLAFIMAKEIEAAVRCKVYVLNPGRLSIIYKSMKKTDKEDALKLAHILEDFSEDRLPVVAVPSDKEMERRKILANYRRTDRDRTRNINLLHALFVSQGITTIKKKDLATGEDRKEAVKALSEIERDEAEYLLESLDLIEARREKLDRLINKEASNDEEMKRLQEVPGVGPKVAFAFVSHVGASRFENASQLSNYLGLVPMVYMSGDTVRYGPITKRGNSYVRALLVQAAWSMVRAKKGGKLKDMFEYMTVEKSKGKKKAIVAVARRIAELLYLLMRDEVRYVPRSFISPEKKKDGEKAQLKLSA

SEQ ID NO: 268721 - protein, 344 aa, unidentified
MEYFAGLDVSLRSCAICVVDTKGQVALERELPCEVGDIADCLNSFGHPIERIGFEAGTLSQHLFYGLTREGFDVVCMEARQVNAALSAMRNKTDKNDARGIAHVLRTGWFSPVHVKSREAHGVRALLSTRKALLNKTIDLANEVRGLLKIFGLRLPKTVQHGSFDGLVRPMIEMDEVLAHAIIPLLDARLVLYQHFLELDRRVKRAAARDEVCLRMMTVPGVGPIAALTFKAAVDDPSRFKRSRTVAAHFGLTPRRYQSGEHDNPGRISKAGDRDVRATLYAAANALLMRTMAGSQIKSWGMRLMRTKGRRRAVVAVARKLAVLLHRMWADGTEFRPALVEGTA

SEQ ID NO: 268722 - protein, 338 aa, unidentified
METYAGIDLHSSNNFIGIIDGNDKRLYGKRHCNRLEEVLKALEPFKENLKAVVIESTFNWYWMVDGLQDNGYEVHLANPSAIKQYEGLKHTDDPWDAFWLAHMYRLNLLAEGYIYPKENRAVRDLLRRRLLFVRQRTAQILSLQSMVSRNLGFKISNNEIKKLSAIDVADLFDCPDLVLMATNSWATIEFLKHIIRGIEKRVMSQAKLRKEFAKLLTIPGIGKILALTIMLEVGDIGRFATVGDYSSYCRCVQSKRISNGKKKGENNKKNGNKYLAWAYVEAANFAKRYCPKAHSFYQSKKARSKNVVAIKALSNKLSRASYYIMRDQVAFDEDKLFS

SEQ ID NO: 268723 - protein, 343 aa, unidentified
MQTITTIGLDIAKSVFQVHGIDAEGKVILRRQLKRRYILAFFEKLPPCLVGIEACASSHHWSRELQALGHTVRLMPPAYVKPYVKRQKNDMADAEAICEAVTRANMRFVPTKTPEQQSGLVLHRTRHLFIRQQTSVINAIRAHLAEFGVTAPVGRNGVEELLNVVGNPNDKRVPEIARRCLLALGAQLRRLKEQILEFDRLIRAWHRSSEMSMRLDDCPGVGPALATALVATVADAKAFRSGRNFSAWIGIVPKQHSSGGKDRLGSISKQGDRYLRSLFVAGALAVIRYAKIHGTKHRPWLAALLARRPTKVAAIALANKIARMAWAIMAKGERYKEPVALAA

SEQ ID NO: 268724 - protein, 340 aa, unidentified
MLYIGLDVHKEFCQACVIDESGRALSNERFSSTSEELDRFLDRFQDAKFVLESTGIWEFIYEGIEKRGFEAVLAHPLKVRAIAEARVKTDKVDAETLAQLLRADLIPRSWIPPKDIRDLRQLVRQRAYLVRDASRFKNRIHAEILRRGVRRPENLKTPFAQRSIRWMRSLGIPTVTSCLNCLENVQAQVEEINIQLLEEYNRRPDAQLISTVPGIGFYGALLILAEVDDVRRFHHPEKLCAYAGLVPTVRQSASSVKYGSISKDGSAYLRWILTESVHVHTRYDPESQLSRFHSRVAMRRGRRVATVATARKLLRIIYWMLVRHEPFHSHGFNPVKRLHS

SEQ ID NO: 268725 - protein, 423 aa, unidentified
MAKQTTVALSVVNPHAAGIDIGSRFHWVAVDQNKENVRSFGVYTNDHWQLILYLREHGITSVAMESTGSYWQTLFNALQEAGFEVYLVGGSQTKNVQGRKTDVIDCMWIQKLHSLGLLAGSFLLSDTLQELRTYYYHRQHLIEQLATYTHKMQKSLRLMNIRLDVAIRDITGKSGLAIIEAILAGNRDPHYLASLVDVRMKKSKEEIAQSLEGWWRQELLFELQASLAFYKIYQNSLAECDRVIEQALRRCMPVEPVAEPAQKKYRENKKKSSKNAPDFDVSTIAYQYFQTDLFSISGISHSTVLCLLTTLGNDIHKFTSAKKFAGWLRLVPNNKISGGRIISHRTPSGKSYIASALRQAANSIGNQTNHELSPFFKRIAYKKGRVAAITATARKLAVIIWNMITKAEPYRKNQAKETSQPLR

SEQ ID NO: 268726 - protein, 410 aa, unidentified
MNLDEGSVVVGIDWADRTHVCCLVNPKATARQMVQVGASAEAFGTWLDTIEQQYPEGKIVVAVERSEGALVEMLLARSRLVVVPVNPVVLHRFRQAFVPSGAKDDPGDAALLADIVRTHPERFAALRPAAALLAELAALVRERRHWVDTRTKLVEQLIAVLKKYYPQGLQLVGQIVGSPMTLEFLQRWPDLPAAQRAKWSTLERFYRQHHSGRDDVLQERHERLRTARCVSENEAYLRPCRLHMLAIVHQLEAVNESIAQFEAAITELYAQAPGHEVIDSLPGAGEALAPRLWVACASEGNDLSAETMQLRSGIAPVQKQSGNSKAVCFRWARPRFLHQTWTEFAHHSIKTCSWAGAYYHARKAKGHGDGAILRALAFKWIRIVARLWKDQAPYNEAFYLAHCSARLATA

SEQ ID NO: 268727 - protein, 410 aa, unidentified
MKMAGIDVHKKVLMVVVVDTSVPEEKPVRRRFVTLPSELQRFRIWLQEQGVEEAVMESTAQYWRSVWLELEPHMSLHLAQAFSNRAPRGRKHDFKDAERLVRRLMADELILSFVPKGEQRIWRSLTRMKVQLTRDRVRLQNQMECLLEEMRIKLSIVVSNLLGASGLRILHALAQGETDPKRLAELGDERLHCTEEQLVDALTGRVQPMHRGMLALQLQRLQLIDQQMAQLNSMIAQAMKSHQDAVIRLAEVPGLGVDSAQQIIAEVGAQASTFSSAAELTAWVGTCPGKEESAEQNHSSRSTKGNKYLRRVLNQAAHAAVAKKGSYFQVVFRRLMPRLGYKSAIWAIAHRLCRVVWKILHEGVRYIEQGRDVGPREKKQRAQMLARALRKLGYEVTITPINELAPKPAI

SEQ ID NO: 268728 - protein, 408 aa, unidentified
MQVYIGIDWSENKHDVVFMNEAGADLACLVIAHTPEGFAQLDARRRKLGLAVEDCQIGMETAHSILIDYLWSQGYTQLYVLPPNQVKSNQGRFRQSGAKDDPADARLIADILRTDRRPLQPWKPDTLLTRQIRSQVSLIIHLNRHILRLSNRLRAILLRYYPAALHIFSAGLRTQILPEFICAYPTPQAAQRLTFAEFEAFARHHHYPALGRLPACFANLQADYPAASPEVVLTYQSEAGMLAEMLLLATRDKTLCLRQLLQLFSQHPRHATFASLPGAGDFIGPALLAKFGDDPLRFPSAASSQSLAGTAPVTRRSGKRKTVSYRWACDKEWRFIAQEWAIALVHQSHSPIAAAYFQTIRPHCHSDAHAYRCVANRWMAVAWKLWQTGQTYDEAYHFQQRTLRSKPR

SEQ ID NO: 268729 - protein, 397 aa, unidentified
MYIVGIDIAKRKHEAAVIDGEGTIIIKPFSFTNNCSGYNRLLAMLAKAKLPLDEVSFAMEATGHYWLALFTRLQKEGFRVQVINPVQTNSIRSFYIRQAKTDPRDALLIAEVIRFGHFSESTLHPENIYELRELCRGRHAIVSMQADVKRKVVALLDQVFPEYETAFTNLFGDTSMAILQTCPTPKELSEMPLEKLCYLIEVSSHKRFRMAKAQELQEIARNSFGFAMAGDVFSTMIRLYAKHLDFLKQQVREMDRKIAEIMDTLDTPITTITGIGPTLGAYILSEIGDISRFSSAAKLAAYAGIDPTMRQSGEYNGVRNRMSKRGSPYLRHAIWLAASSAVLHDPALKLYFQKKRDEGKPYMASVGHACRKMVSIIYAVMRDNKAYTPYIPNEISA

SEQ ID NO: 268730 - protein, 349 aa, unidentified
MQITTIGLDIAKNVFQVHGIDAAEKVAVKKQFRRVQVTKFFEALPPCLVGMEACATAHYWARELAKLGHEVRLMPAKDVKAYVRRNKNDAADAAAICEAVRRPTMRFVAVKSADQQGQLIQHRTRDLLVRQRTQVVNALRAHMAELGIVGAQGHEGLKKLLAIVADEKDERLPVDARASLIVLTAQLQALQTMIRVIEKRIIAQHRASEASKRVATIPGIGPLGASAIVATLTDPSAFRSGRDFAAWIGLVPRQDSTGGKQKLGPISKQGDRYLRRLLVVGAHSALRRAKQSPQNHPWLVQLLARRPFKVVAIALANKMARVAWALLARGSRYRARGGSTYRAPQLAAA

SEQ ID NO: 268731 - protein, 386 aa, unidentified
MQHATTLPAPLRTCSRGDCATLFVSLELSRSTWVATALAPGSSKMSKHTLVGGDGRKLLDLLARLKTRAEQRIAAPVKVVTIQEVGLDGFWIHRLLEANGIESHVVDPASIAVPRRHRRAKTDAIDGETLLRTLMAWQRGEPRVCAMTVPPSPSEEDRRRISRERATLLQERVRHTNRIRGLLFGQGITNYNPLHKNRRKNLEQLRTGDGRSVPAHLKSAILREIDRLELVLRQIGEVETERDEMLQLAQPSSPAALLMRLKGIGAEFATVLYLEGLFRQFENRRQLAAYAGLAPSPWKSGSIDQEQGISKAGNPRLRSTMVELAWMWVRYQPASALSCWFRQRVGSKRGLIRRISIVALARKLLIALARYVSHGEIPAGAIMKAG

SEQ ID NO: 268732 - protein, 417 aa, unidentified
MKCFVGLDVSSTKLDVCIMLSDTTTPFTASLPNDLVGAQEIKKQILELNDTYSFERIVIGMEATSLYSFHPAMFFHEDSDLKALMVEVMVEQPNKIKKYREAFEESKNDTIDAFYIADYFRIERFSPAFLKEEKYMALQHLTRTRLQLIEQLTRTKQHFIENIYYKCNTLSTEIKNENLSTSLWSSTIISLMTEDYTLDELANVPLKDLADFIQKLGRGRFKAPEKLAKAIQSAVRGSYRLPKLQQDSVNVILGLLAREIRNLEQMIKDIDKAIEEMVEVIPEYQCLTSVPGVGKVYAAGIIAEIGQIDRFKDHPQVAKYAGLNWKQNQSGNTNSQNTELVKRGNRYLRYYLVEAANSVRRHDSEYQTFYKKKYHEVPKHQHKRAIVLTARKFVRLVDALLRNRQLYTPPRRLMEDK

SEQ ID NO: 268733 - protein, 404 aa, unidentified
MPELWAGTDAGKAEHHCTAIDTDGKTVLSRRVPNNEAELLELLSDVLELADGNPVTWAVDLNAGGAALWIALLVNHSQKLLYIPGRTVHHASAAYRGNGKTDAKDAFVIADTARMRRDLQPLDQAGEIAVDLKILTARRMDLSADRTRAINRLRAQMLEYFPALERAFDYSVSKSALVLLTGYRTPTALRRIGRARLAAWLKSHGVRTAPTAKSTAEAAVTAAEAQFTAVPGEKTAARMVHTLAREVMSLDQEIAELEALIEGRFREHPHAEVITSMPGIGDMLGAEFIAATGGDMAAFGSPDRLAGVAGLAPVPRDSGKVSGNLRRPRRYSRRLLRMFYLSAQVAAVHCPVSKAFYRRKRDEGKSHKQAVLALARRRLNVLWALIRDSRTFDAVAPKNAAPAQ

SEQ ID NO: 268734 - protein, 429 aa, unidentified
MNDADTNRLENFRQLRKEIRGSNEHLIVGIDVAKDNHHAFFGTARGETLLKRLVFNNNLQGYEKLYTYVEATKVKNNLNKVVFGLEPTANYHKPLGEHLIKCGFDVVLVAGTAVKRNRELLDGRWDKHDTKDAANVADLVSQGKCLFYEYPIMLFRELRNLLSFKRRLKKQEHGTRVRIRNHLLAQYFPELDPYFSRMSVCSLSVVKWCLEPSVIAGLEYEEFLRLVAPGKRTIRQREHVKLIWEKAFESIGCNAGETVQFEAKMMVGELQHVRESISEVEEKIEEICLNFPEYTYLLTMPGFGKDISSKVLGAIGDPFRFDNAKQVIKLSGWDLNANRSGKSSGYATAVISKKGKADLRYALYQAALVASSRNQLFVAYFTEKLRQRSREKGIKTKMRVKLAAKLLVIAWTLMKKREPFNPEYLKVTL

SEQ ID NO: 268735 - protein, 410 aa, unidentified
MESLHAHCAGLDVHKDSVVACVRHLRNGTAVASVKTFKTTTQELLKLSDWLSAEGITHIAMEATGVYWKPVWHILADGEFDLLLANAAHVKNVPGRKTDVKDAVWLADLLAHGLIRASFVPDEPTQHLRDLLRTRKQFTRERTSHVQRLQKTLEDANIKLDSAVTDILGLSGRRMIEALIAGQTDPQTLAALAHRNLHATPTMLEDALRGRVTGHHRFLLQLHLGHLDAVDAAIAAIDREVDRTVGPFRAAIALLNTVPGVSSLSAEVIVAEIGIDMSRFPTDAQLISWAGLCPGNDESAGKRRSTKLRQGSQWLKTALVQCAWAATRTKGSYLQAQFLRLRSRRGAKKAICAVAASLLTSIYHMLKKGVAYTDLGAEHFDRRSKDRKALSMVQRLRNLGYAVQIQALPA

SEQ ID NO: 268736 - protein, 367 aa, unidentified
MKKGSTTLARQSRKNSQQKLTIGLDLGDRNSWYCVLDEAGHIQLEQRVRTTAKALREVFSAMPRSRIALETGTHSPWISRLLRELGHEVIVANARKVRLIGESRKKDDRLDAQTLARLARIDPELLCPVKHRSAKAQADLMMIRARAGLVRVRTGLVNTARGLAKSYGERLRGCNVRNMNAEKAEGLSPELQAALQPLLAALESVSERITEYNERIEKLAQARYPQVAVLKQVKGVGTLIALTFLLTLEDPHRFSKSRDVGGYLGLQPGRRNSGQSEPQMHISKEGDPYLRTLLVQGAQHILGPFGVDCDLRRWGLKLAERGGRNGKKRAIVATARKLAVLLHHLWVSGEVYEPLHNSCRVAVPAAA

SEQ ID NO: 268737 - protein, 355 aa, unidentified
MNQEKYIGMDVHAATISAAVINAQGKVLTQCVMETKASTILEFIQAQRGTLAVTFEEGTLAAWLHDLLKPHVSRLVVCDPRKNALMRDGNQNDRADARNLAELLRTNQVHAVYHGKHGIRALRELGRSYSTLTQDSTRVMNRIKSVYRSWAIPCAGTSVYSRRHRAEWLAKLVEPGVRIRAEHLYQQLDSLEPVRQAARRELLRESRKHAAVKLLRQIPTIGPIRSALLVAILQTPHRFRTKRQLWAYSGFAVQTYDSGEFRFERGKLKRNRERITVRGLNRNHNHDLKNLLKGAAISAIERPGPLQDFYAALVGKGMRPSMARLTLARKIAAIILITWKKGVSFDPKQLQRQTA

SEQ ID NO: 268738 - protein, 319 aa, unidentified
MTGIICGVDVSGSSLEARLGPHGASASFPNTAAGIAALSQFCHAHQVSLVALEATGGYEQQAVAQLSDQELAVAVLNPRAVRQFAQSMGRLEKTDAIDAGMIAWYAEVKKPRPVTLAPHTQRHLRALVTRLRQLTELRTAQKNQQRLITDAVVQNSFAQLLALLAEQMTLLEQTIAALIEEDPMWRELNLAMRSIKGVAGRTVARLMADLPELGTLPNKTISKLAGVAPIAADSGQHQGRRRVRGGRSSVREILFIVASVVGRHEPDFIAFQQRLRAAGKPPKVVRIALAHKLLVRLNAKARQVRTLMQTTLPNQRVSA

SEQ ID NO: 268739 - protein, 346 aa, unidentified
MTIVDPARAVTGGVDTHLDLNVAAALDPIGGLLGVAEFATTTSGHKDLLAWLENFGKVARVGVEGTSSYGAGLARYLRVAGVEVVEVDRPNRQARRRTGKSDPADAVEAARAALSGRAQGAGKTKDGNVEAIRALVVAKRSARSTKIKTLNQIRNLVVTAPEDLREQLKEVSRQDLAAKAAALRPRSSTDPVGFATRTAICMLGRRVLALDAEKDELDDMLCRLVEKTAPALLGLLGVGVDTAATLLVTAGDNAERLRSEAAGAHLCGVAPIAASSGKVVRLRLDRGGDRQANAALYIIVITRMSADKPTRAYVEQRLAEGRTKPEIIRMLKRYVAREVYRYLPRG

SEQ ID NO: 268740 - protein, 355 aa, unidentified
MIMIGADSHKRSHTVVALNEVGRRLGQKTVSTDIDGHLALLQWSGQFDDVQFALEDCRHLTRRLEGDLLAAGQRVVRVPTRLMADARRAGRDRGKSDPIDAEAVALAALRHPGLPVASLDGASREVKLLSDFRRDLVRQRTQVCNKIRWYLHELEPSFHIPSRGLRHRCVVDRIGRELDRFDGVVARLARELVARCAELNRQITGLESELRILVRQLAPSLLAVPGCGVLSAAVLVGETAGVDRFKSKGHFARFTGTAPIPVWSGASQGKVRLNRGGNRLTNTALHMIAITQSRTDGPGRTYLEKVQARGKTRTEAIRLLRRRISDAVFAALRADIELIKLAVPSTPHHTMPSAA

SEQ ID NO: 268741 - protein, 386 aa, unidentified
MEQSIIYVGLDVHKDTIVVALAEAGLRGEVRQHGTIANTADALKAVAVKLAGKNRALRFCYEAGPCGYGIQRHLSAIGHECAVVAPSLIPRKPGDRIKTDRRDAINLAKLHRAGELTPVWVPDQAHEAIRDLVRARQAAVRTLRQARQQLSGFLLRHGHHYHRPAWTLLHRRWLASLKFDQANHHIVLEDCIAAIEAATARRDRLEAHIEAALPGWSLAPVVQALQALRGVGLVAAATLMAELGDITRFSNPRQLMAYLGLVPSEHSSGRTRRQGGITKSGNGAARRMLIEAAWSYRFPARISREQLLRQERLAQPIRDIAWKAQERLCRRYRTLARAGKLPTVITAAIARELAGFIWATVAKVPARAAGGMPAEGIAKQIQSAAF

SEQ ID NO: 268742 - protein, 342 aa, unidentified
MTITIGIDPHKASHTAVAIDNTEHVLDEIRVRACSAQTDQLRCWATPFPDRVWAIESARGLGYLLAQQLVAAGETVVDVPAVLSTRTRLLGSGRAQKNDPNDARSVAITALRNDALSRVRVDDHAQVLKLLVKRHRDLGRLRSKAACRLHVLLMELHPGGMAKEMTVTRANELLDRAVIVDAMTEHRVAVGREFVADIDRYDQQMKASRKRLRTAVAASGTTLVDIRGVGVVVAAMIIGHVGNIERFASPAHFASYNATAPIEASSGENKRHRLNKRGNRQLNWAIHTAAVSQLRYPCDGREYYDRKRAEGKNTKEAIRALKRQLSNVIYRTMVADAHRLEQ

SEQ ID NO: 268743 - protein, 366 aa, unidentified
MKKTSTVRVNGNMIFKGHKLTIGMDLGDRWSNYCVLDEAGEILLEQRLATTPEAMKQTFERMPRSLMAMETGTHSPWVSRLLKELGHEVLVAHAQRVELISKSTRKDDRHDARTLARLARIDPELLGPVRHRSAKAQIHLTVIRARAELVSARTGLVNAARGLVKSYGQRLPKCGTQQVSRELATELSAELREVLEPLLKEVESLNERIKEYDVRMEKIAREGYPQVELLKQVKGVGTQIALTYVLTIDDPHRFPKSREVGCFLGLRPGRRDSGQSQPQMHISKEGDPYLRTMLVQGAHYILGPFGADSDLRRWGLRLAERGGKSAKKRTVVAVARKLAVLLHRLWVSAEVYEPLRNSQKAMRAVA

SEQ ID NO: 268744 - protein, 403 aa, unidentified
MEGPLISLDVSKGKSNYRFFENGTDRKGKKGVIRHDIQGFDSIRDEAEKMEERLRIKPSVIFESTGVYSDVVEKYFTDKGFDVYVISPLLSASMRKEGVRPAKNDSLDTLSIAKVFYSKDDLRKCSENDKKAERLREMFYELDMMNRRIRPMKCQFLRLLDKVWPCLDEVSDYSSRFMLDFIIAFGHPENIKTVKGVLSVIRKSEMGTAGRKDKIAQDLFDYCHTHLSAVSKDSSYVELLKRMAVELKAMAKKKSELIDRMAEEARNKDEFAGLLTIPAVAKTTALKIMARVGDISRFRNAEALVAYCGLDPRVYQSGKMTGEHRTITKKGDCILRSTLFLAVKLMVMLYPDTKVARFVAAKAKNGLSYKQAVVAGSAKLARIIYSMLTHHENYVEFNADIVA

SEQ ID NO: 268745 - protein, 522 aa, unidentified
MAVRTARKGKRSSCTEVLHRPRGLFHSRVQQVGPEHFGIVSVDCAKARSKWMLADFYGRVLIPPTVVAHNRVELDATIAQIRQALTTNDLHDMLVAIERTGRYHHVIRDAFVRAEFEARLVHPFATKRFRQPADPSTKTDDTDLAAIHRAAVNGFALLEPKLSEDWLSLQMLVRHRRNLVQKNAALRCQIREHLEAAWPGYAACFDELWDSHIAQALIRRYATPLELLAERTPAIDHWLRQQGVRFQRPTLDTILAWAQRATPGDPLTELHRRLALAYDDDRLQKTQEIQALERDLAHRLAQTPYVLLLSFPGINVVSAAEFAGEMGPIEHYANPRNITGRAGLFPSRYQSDQVDRPHGPLVRRGNRKLRAAILGVADNLLACNQHFKVLATRWKALGKHTRHTHVKIALRFCRIAFHMVAGRQVFHHPSLRERHYILDKLLAFHTEHQTPWEQTLRDLHHAIDQVPTKEHRGEAQPLADRLQRWRQRRRGPQALAEILAIVLARLGVGIVQSQESGEQDPS

SEQ ID NO: 268746 - protein, 348 aa, unidentified
MELHTIGIDLGKTVFHLVGLDPRGEVVVRKKFSRTQLLRFTANVRVGLIGMEACGGSHFLGRALREQRHEVRLIPAQYVKPYVKTNKSDYIDAEAIAEAVARPTMRFVPIKTDDQLDMQSLHRVRERWVMRRTAVINQIRGLLLERGITLRKGRHHVDAALPLILEDADANLSGAVRLLLTQLKLDLDQLSVRIDEADAVIQKAAHENEACRRLVAIPGIGPVTATALIAAIGNGGAFHKGREFAAWMGVVPREHSTGGQQKLLGISKRGNSYLRRLFVQGARAVLQQRTKQSSGLSAWLAQLTSRTHRNVAAVALANKLARIAWAVLAKNEPYRPSVVAVVADVAAA

SEQ ID NO: 268747 - protein, 348 aa, unidentified
MVAEVVDYVVGVDTHRDEHTLALVEAATGAVVAQQTVASNGRGYAQALRFAQQQVDAARVWAVEGAGHYGAGLARYLSERGETVLEVGRSPRGERRLRGKDDELDAVRAARAALRSEPLPRPRSGERREALRLLLVARRSAVDVRREALVQLRSVIVTAPERLREELRGLPVQRLLGRCSRLRRSTTVTPDQVAARLVLRALARRIEAASVEADELEREILVHVRALAPELLDEPGVGPIVAAQLVVAWSHRGRVRSEAAFARLAGVAPVPASSGQTSRQRLSRGGDRQLNRALHTIVLHRRQHDPTTKHYIAQRIAEGKTKRDATRLLKRYLARHLYRLLQQEPLMT

SEQ ID NO: 268748 - protein, 415 aa, unidentified
MSEKSFAAFIGIDWADEEHTYSLAASASTRIERGRLQHTPEALHRWAEQLHKRFAGQPVAILLEQKRGALVWALQEHPFITLFPINPLTSAKLRQAFFPSGAKSDPLDSDLLLDILRHHRDRLRPFQLDEVQTRLLERLTQDRRGAVEQRKSCVQQITAALKEYFPLALEVLGKLECNLAARFLLKWATLEELQVAQPHLVRKFFHGNNGRFQIEQRLKRIKQAQPLTSDPAIIEAGRSKVQMLAQLIITLNEYIADYQKRIETLFQRHPDRHIFQSFPGAGAALAPRLIAAFGMDRSALADALSVQNRSGIAPVRVSSGKTASEKMRVVCPKFLRQTFHEFAATSVRYCAWARRYYQAKLAAGKKHHAIVRALAFKWIRIMWACWQNHEPYEDTRYLRALDRSGSPFAAILKKV

SEQ ID NO: 268749 - protein, 383 aa, unidentified
MRQIEQMPSAWDAAVFVAMELSKSAWLLAAQGSPSGKASSHRLEGGDIAGLLGLLRRLQAREQQACGRPVQIILGYEAGYDGFWLQRRLAAEGISCWVMDPGSLQVDRRARRAKTDRLDAAMLLRALMAWWRGDRAACHMVQVPSVEREDARRTHRERQRLIAERVQHVNRIKGLLATQGIYDYRPLRRDRWERLEDLRTGDGRELPPRLRREIEREFRRLELVLEQIAATEAERDATVAAPAAEDADAAMVAQLARLGGIGPELATVLVREALYRPFANRKEVAAYAGLTPSPYASGDRHRDQGISKVGNPLLRKAMVELAWLWLRYQPDSALARWFTERVGSVRGRIRKIMAVALARKLLVALWRYLTTGLLPEGARLKVV

SEQ ID NO: 268750 - protein, 322 aa, unidentified
MQSVIGIDVSKEKLDICALFDGKSRKKIVENSVSGFKSLRNWISKNNIDDPHICMESTGCYSEGVAEFFHELGFKVSVVNPLQIKAFRSSKLIRQKTDSVDAQIIAEFCLQNAPAPWNPRSPEQKELHNLNVRISALKSELHRSSNALENRNLSKVILKSIHAEIKFLKKQIDLLENEARKIINSNKNLKEQFDRITEIKGVGEKLALAIIADMPDVSNFKKAGQFAAFAGVSPSHFQSGSSVRGKSHISRLGSKSIRKVLYMSALVVKNYNPHFRKFVQKLQKKGKAPKVIIVAIMRKLMAILFGMLKNSSDFDPKLAFGD

SEQ ID NO: 268751 - protein, 365 aa, unidentified
MDKEYYTTIGMDVSDRTTKVCVMAKQGVNPKIVMETTIPTSKDGLAKFLATQDKSSPVVFETGMHCRWMNEVAEGIGFKVYIANPCRLRMITESKAKNDVNDARMLARIALSDPGLLHPVRLRGKEHQKMLNLHEMRNLLVKQRTGIIVQLRAIAKSMGFRIERSSTAHFHAIDTRAWPKEFRDIAWPMLKNLEQLAVTIKTYEKQIRELAQTPTFKAQVERLMEIRYVGLYVATGFVAVTGGDMDKFEKSRDVGPWLGLVPKQDQSGDIDRQCHITKTGSPFMRRLLVESAQMIVRDSATDTDLKVKGMRFCRRGAKIAKRKAIAAVARSLAVLMVAMLKHPNTPYAPLSERCKMELLTMKASA

SEQ ID NO: 268752 - protein, 358 aa, unidentified
MVDKVTEAAVVGGVDTHKDLHVAAVVDQNNKVLETQYFSTTRQGYRQMLAWMTSFGTLKRIGVECTGTYGSGLLRYFQNAGLEVLEVTAPDRMERRKRGKSDTIDDECAAHAAFSGIRTVTPKTRDGMIESLRVLKTCRKTAISARRVALQIIHSNIISAPDELREQLRNMTRMQLIRTLGSWRPDASEYRNVTNVYRISLKSLARRYLELHDEIADLDVMIAAIVDELAPELIKRNAIGYESASQLLITAGDNPQRLRSESGFAALCGVSPVPVSSGKTNRYRLNRGGDRAANSALHIIAIGRLRTDAKTKEYVARRVAEGHTKMEAIRCLKRYISREVYTLLRNQNRRINSIPITA

SEQ ID NO: 268753 - protein, 460 aa, unidentified
MNRKRSKSRVDRTLPMMHPNAAAIDVGATIHMAAVRADRVPEPVRCFGTFTTDLHRLVDWFTECGVETVVMESTSVYWIPIFELLDARGFTVFLVNARDAKHVPGRKTDVSDAQWLQRLHSYGLLRASFRPKGQIAELRAYVRQRERLLEYAASHIQHMQKALTEMNLQLHHVVADITGSTGLRIIRAILAGERDPEVLACLRHYRCHSSAETIAKALTGSYRTEHLFALEQALALYDAYHEKASACDVRIEAVLKELSIHRGRDIGSVPPASRRRHRTDQANALAFDVRAALFALLGKDITRIDGLGPYLSLKLIAECGDDLSSWPSAKHFTSWLGLAPSNKVSGGKMLSSRTRRSGGRAAALLRLAAVTVGRTDTALGAFYRRLSSRIGKAKAVTATARKVAVLFYNAMRHGMEYVDPGASSYETRYRMRVVNNLHRRAKAFGFVLQPLEPKADAVVS

SEQ ID NO: 268754 - protein, 387 aa, unidentified
MTKNKGRVVGLDVHPDSFAGAVVQGRDPASAVVLSTSTRVELERLEEWARRHTSTEDTLVLEASGNAFAVAARLRAIGREVEILDSHHAGKVGKVYCANDRVDAVKIARIYLSALSPIVWQPDQKTLERREIFSAYQAVVKESTRAKQQLRSMLNEHCVRLEKGFRLCHPQAITRLLKLREWTPARRMLLQQLHGSLLAARARRTMLRRHMAQEIVAEEALLRLTRLCGINLITLYGVVAAVGDVHRFTQSKKLVAYLGLNPSVSQSGNFQGNGALKRHGRGALRALLIQSGKKLLEVNNPLQKWGPAVAARRGRNKAAVAVARKLCVALWHVMMGHAIGTLERLDTLQTKLSKFATEIGPAALTAFGYHNKADFVQKKLYVLRSYP

SEQ ID NO: 268755 - protein, 315 aa, unidentified
MTYFAGLDVSVKETSVCVVDDAGKIVREARVASEPEALLQVLTNTIDRFKRIGLEAGPLSQWLYSVLAEAGLPVICVETRHMRAVLKAQINKTDRNDARGLAQMMRVGLYRPVHVKTLRSQKLRVLLTHRKLLQSKAIAIENDLRATLRNFGLKVGMIGPVKYEMRIRELVENLPDLAVLVEPLLIVRRVIREQLGILHRRLLVIVRDDDVCRRLMTIPGVGPVVALTFRVTVDVPARFRNSKAVGAVFGLTPSKYQSGQNDRTGAISRCGDEMMRMMLYEAAQSMLVRSTKWSWLKAWAMKVARHRGMKIGIAG

SEQ ID NO: 268756 - protein, 428 aa, unidentified
MNQTELSRVKEFRQLKNEIQASDTYLIVGIDVAKERHHAFFGTATGKTLLKKLIFNNTSAGFSELIARAEALRAQSGLSEIVFGLEPTSNYHKPLGRYLISKGCHVVLVGGKAVKNNRELLDERWDKHDTKDAANVADLVSRGKCFYYDTPSREIEELRELHSLRARLKKEEHSLSLRIRNNLLAKHFPELDSFYSACERETLAIVRWCLNPRKIAAMPFDQFFKLVATNGRGIAQKLRLQKIHRLAHESIGCPVGCAVELQAALLVEKIKQVREQISEVDHLIGQVCAQFPSYEYLLSIPGFGPYVASKVLATLADPRRFDTAKQVVRTAGYDLCADRSGKSSDQAVPVISKKGNSQLRYALYQAAMVASSRHRFFIAYFARMLQGRERERGIRTKMRVKLAAKMLVIAWTLMKKGEPFNPEYLNAQ

SEQ ID NO: 268757 - protein, 507 aa, unidentified
METRTNLNEVGKKKLVLGIDVALKNHWAAIGDNKGQEMVKPFQFSNNAEGMSLLEGMIKQTGRAEDKGDVIIGMEPTGIYWKPMGHYLREAGYRVVLINPSHTHKTKELEDNSQTKNDRKDSRVIQTLTREGKYLEPIILCGIYGELRRLGQAHKSVLKRGNVISNKVKMIADEYFPEMRGIIKSINGKTAMGLLAEIPFPDDIIRLGKTKFYKKLKKWSNKRFGKKKSLKLWEAAKKSIGVKVGQEAAKIELRQLVEEMELVKRHREELVKEIEEKAKVTEEGKSLIKLPGLGYLSIGKLIGETGSIKSYKGARSLEKLAGLNLIESSSGERHSGKKISKRGRKLMRTTLYQMALASIKNNRAIKYEYQYRIKTKKQKKMKALTAVACKMLRVIYALVSANKEYDERKISRHYYESEIKREENICEWVTPIIPPSGPGYNSGDTVMKNTGHPLPMTLNEVMSGAPVQYRDDTGRNDRVRHRKSGGTNPLVNIEKSWAEENQEVVCK

SEQ ID NO: 268758 - protein, 417 aa, unidentified
MKVVYPVCCGVDVHKTFLIATIITTTGMIQPHYKKKRFSTHNGELRAFAAWLKENECTEMCMESTGKYWIPVFNILEDEGINITLANPKWVKAVKGHKDDVKDSKWIGELFRLGLVPGSFIPEKPIRILREFTRYRVKLTSISSSEKNRFQNAFTVCNVTLDSVVCDMFGVSATKITDYLMSNSSYDPEYCASLIHWRMKDKTEAVLASIDGCVIETEQKVRMKVIRKHIAQIDKLMESLDKRIDRIVKPYESAISLMESIPGIQRRTAITLLSEIGADMSQFGSAKRLCCWAGLTPGNNQSAGKKKSSKITKAGVYIKPALVEAAHGAVSCKSNPYYKQKFERISKRRGKKRAYIAVARMILTAIYHVLLTGELWNPTDLKKSDNFAAAREETIIKRAIKLLEKQGYAVQPLVSVP

SEQ ID NO: 268759 - protein, 415 aa, unidentified
MSDERRWYAGVDWASESHCVLLTDGEGRAIGEKVFKHGGEGLAELAAWLMAASGAAAPTQIQVAIEVPHGPVVETLIERGFAVHAINPKQMDRFRDRFTMAGAKDDSRDAEVMASALRTDPRCFRRLAAADPVIVELREWSRIAEELGVERNRLANRLREQLWRYFPAMLELEDDLGAEWLLDLWQAAPTPDKARRLREATIAGVLKRNRIRRFEAAAVRDTLRKPPLCVAAGTVEAASARVASLVPRLRLLNRQIKDAERRIDALTARLASSKEAEPGQIKQHDAAILASLPGVGRIVLATLLAEAWDALQRRDYAALRSLTGVAPVTKRSGKSRIVVRRQACHDRLANALYHWARVAVQHDPRSRTKYAALRARGHSHGRALRSVADRLLNVACAMLKSGATFNPALAVPKTA

SEQ ID NO: 268760 - protein, 343 aa, unidentified
MQTITTIGLDIAKSVFQVHGVDAGGQVIIRRQLKRRQVVAFFQKLPPCLIGIEACASSHHWSRELQALGHTVRLMPPAYVKPYVKRQKNDMADAEAICEAVTRANMRFVPTKTPEQQSGLMLHRTRHMFIRQQTAVINSIRAHLAEFGIVAPVGRKGVTELLHIVADPNDKRMPEVARACLAALGTQLLALKEQILEFDRMILAWHRSNQTSKRLHYIPGVGPMLATALVASVADPRTFRSGRNFSAWIGLVPKQHSSGGKERLGGISKQGDRYLRSLFVAGALAVIRYAKIHGTGHRPWLTALLGRRPTKVAAIALANKIARMAWAIMAKGERYKQPAALAR

SEQ ID NO: 268761 - protein, 288 aa, unidentified
MPIVGGLDIHRKQITFDYLDTATGQVQRGQIVPADRVHLRAWLARFAGREDVAFAVEACTGWRYIAEELAGAGIAVHLAEPADTAFARGRKRHAKTDKTDSRHLRQLLAEARLPECWIPPGHILEARALLELYHDLRAEHTAWVQRIHAVLFHHGTPALGQGTLRTERGLAALRAAAAGCLSPAGQLQVATALEVLEALETRMHVVRHQLLAVARHLTGAKVLAARLYGVGPVTGLAMTCWLGGEGRFSSSRKAVRFAGLDVTVWSSDRKGPPGRLSRQGPPVLRWAV

SEQ ID NO: 268762 - protein, 269 aa, unidentified
MSMTEHFIGIDVSKTQWDLAIHMTGKPWQVAYDTAGVKQVVKYLRTLAPTLIVLEATGGLETCVVSALAAAQLPVAVVNPRQVRAFAHATGTLAKTDRLDAHVLAHFAAAVQPTPRPLPDAATQQLSAVLTRRKQLVDMMTAESNRLGAQPNPAVRKRVRAHLAWLTKEGGRTEKELTQLIQQSPLWRVQDDLLQSAQGVGTVLSQTLLADVPELGHLTHKKMAALIGVAPFNRESGGYRGKRRIWGGRAPAWGPSCIWGPWWPRATIP

SEQ ID NO: 268763 - protein, 338 aa, unidentified
MVLYAGIDLHSNNNVVVVQDSDDNVVGRQRLPNDLSTVCDWLEPYREKLAGVVVESTYNWYWLVDGLMEQGYTLHLANTVAIQQYDGLKYRDDTSDARWLAKLLRLGQLPEGHIYPRAERAIRDLLRKRSQLVRQATMNLLSIQNLFARNRGQGISANRVKQLTSDAVSAVFEDTNVALAIQSNVRVLDCLQEQISVVEQAVHGQVKLRRGYQKLLTVPGIGKILALTIMLETGDINRFPTVGNYVSYSRLVGSSYLSNRKRKGAGNTKNGNAYLCWAFIEAANFAIRHSERIRRYYQRKLARTKRIVALKAVAHKLGRACYHMIKEEVAFDLRRAFG

SEQ ID NO: 268764 - protein, 310 aa, unidentified
MEQTYIGIDVSKDRLDVHVRPDGEVFVVSRDGKGLEELIDRLRTLTPMLIVVEATGGFETVVAAAIGGAQLPLVVANPAQIRHFAQAVGKRAKTDPIDAEMIARFAEAVKPTPHQVPDEAARLLGELVARRRQIIEMLVAERQREGRAGNVRVHKSLVRHIKVLERELQDISDDISGLIRGSPVWRETEDLLVSVPGIADKTSSSLLAELPELGRLTRRQIASLVGVAPFTQQSGRWKGKSMIAGGRAAARSAIYMAALSASQHNPVLKAFYRRLLAAGKPKMVALIAVARKLLVIINAMIRDKTPWRYA

SEQ ID NO: 268765 - protein, 374 aa, unidentified
MTSIIYVGMDVHTTNYTLCCYSMEDDRFFAEVQVEPDVKNILKYLARVEKQQSRDCRIVCGYEAGCLGYSLYHQLHTHGIDCVILAPTTMMTMPGKRIKTDRRDARLISKCLAFHTYSPVHIPTEMDDAVKEYIRMRDDANSALIRVKQQIISFCIRHGKIHDGKSYWTNKHLEWLSSLDLGNKVLSEVLQEYLIRYYQLREQVDTYDMRINELAQAEPYRQKVEKLGCFRGIAAHTALSFCVEIGDFHRFATAQQFASYLGLVPGECSSGDKQQYTGITKAGNAHLRRLLVETAQVFGRSATKSGKSVALRERQAKCDSLTIAYADKANARLKKKYFKIAMRSKANIAKTAVAREMACFIWGMMTDNLIERIA

SEQ ID NO: 268766 - protein, 343 aa, unidentified
MKRRTLGVDLAKDCFQVSVSHGDGRVIERHRFNRAQFTEFMAQSPASRVLLEACGTAHHWARTCNALGHQVELLPAQHVRPYRRGNKNDRRDADALLEAGRCDDIVPVPIKNENQQAVIQLHRLREQWKTTRTARINSLRGALREFGLDLPAGAVNAIKHAPRHLDHLPGHLRTALQAVLQEIETLQLRLLAVERSLEEIAAEDAAVKRLRQVEGIGLLNATAMVATAGSASHFPSGRQFAAWLGITPRESSSGFRRNLSRITKRGDVYLRTLLIHGARSVLARAKQVNRIDPTRLSRLQQWGLQLQRRIGHNKAAVALANKLARICWAVWRTETRYEPGYGA

SEQ ID NO: 268767 - protein, 403 aa, unidentified
MINIGIDWSDKHHDFCILDEVGERLDLFNITHGQDGFELAHRRIAKHASPEQVKVAIETKDSLLVDFLCEMGYTLYFLNPKQTDRFRDRHRMSRSKSDAFDAYVLADAVRTDAHLFNALSPLDEESLRLRILTRTRAGLVGRKVAVQNEITTYLKRYFPVASELFGGIDNLEAISFLLQYPTYEQAKTVSQTRIASILGKHADVSKAIAARHAEQAHAKLRQAQPVPAAGVSRSYPLAVKSLLRQLKSILLEMEALEADIRDSYDKHPNKDLVGSLPGVADTLGPVIAAEIGADVTRFSDLRTLKAFGGSSPVTIQSGKFRSVHFRRACNVHLRRALHLAAQGAIRKAGWARELYDRLRAEGKSYGRALRAVADQLLEMLYVILIRRTPYDEAYHLRMKALHG

SEQ ID NO: 268768 - protein, 401 aa, unidentified
MQENQQHDSVDVFVGVDVGKGHHHAVALDRTGKRLYNKALPNDETKLRALITELKAHGQLLFVVDQPSTIGALPLAVARDEGVLVAYLPGLAMRRIADLHAGEAKTDARDAAIIAEAARSMPHTLRSLRLADEPLAELTMLCGFDDDLAAQITQTSNRIRGLLTQIHPALERVLGPRLDHPAVLDLLERYPSPAKLASTSEKTLANRLTKLAPRMGKSLAAEILQALSEQAVIVPGTQAATIVMPRLAQQLASLRKQREEVASEVERLVHAHPLWPVLTSMPGVGVRTAARLLTEVAHKAFASAAHLAAYAGLAPVTRRSGSSIRGEHPSRRGNKVLKRALFLSAFAALRDPVSRDYYARKVQQGKRHNQALIALARRRCDVLFAMLRDGSFYQPKSAPNA

SEQ ID NO: 268769 - protein, 388 aa, unidentified
MFFLGIDIGKNTHVASLLDEKAKIIFKAYSFANTLDAAEALLVKLEPYKDSLEIGMEATGHYWLSLYSFLAEHKFIVHVLNPIQTDGWRKGIEIRKRKTDVIDSVLIADLIRYGNFLETSLADEDILSLRNLSRFRVYLVNSVSDLKRKAIAVLDQIFPEYASVFSNVFGQTSKELLKSLSLPSDYENLSATKIEEVLSNITQKKKASKTISTLSDKASRSFGISFCKDSFAFQLKLIIEQICFIEEQIASVELEIDQLMSKLGTNIKTIPGVGSVIGAVILGEIGDIERFDNPSKLVAYAGLDASVSQSGEYEASSGKLSKRGSPYLRKALYMAAQRAEFCDPVFHAYYEKKRNEGKHHLVATNAVARKLCHTIYAILKKDVPYEVQ

SEQ ID NO: 268770 - protein, 372 aa, unidentified
MSVLSCARIGNDFASFLEQEFIMDAQLEVVLGVDTHLNVDVGVVIDTVGRVLGTLSVPTNSEGYNQLLSWTRSFGCLRRAGVEGTGTYGSGLARLLTTNGIAVFEVNRPNLARRRLRGKSDPTDAENAARAVLAGEATALPKSQSGVVEALRVLAVTRRSAVKARTQAINQLRSLLVSAPDDVRARLLKTSPDECVAKCRRIRLLGNSPVFVALSQALRTLAKRWTSLSCEIKSLDRTLKQLTEHVAVRLLQQFGIGTQTAATLMVTAGDNPERLHSEAAFAALCGASPLQASSGKTVRHRLNRGGDRAANNALWTIAMVRMRSEERTSAYVARRTAEGMSHKEIQCCLKRYIAREIYLLLLADLHDASLPS

SEQ ID NO: 268771 - protein, 363 aa, unidentified
MEYIAFDAHKHYTLASVVRPNGNLVREERIEHDRGSLREFLERCERGSPVAVETIGNWYWIVDEIEAAGCVPKLVHARKAKLMMGEINKTDRLDARGLNRLQRNGTLPTVWIPPGELRDQRDLPRTRMVLVRQRTQLKNRIHATLAKYALHDLEVSDFFGVRGRALLRQRFDLLPPHTAYASQQLLEQVEELDRRVREFEQRIQAVFKPTPAIQLLLTLPGVGLTLAAVIALEVGDVARFARAEKLAAYAGATPRVHASGGKTRFGPSRPDVNRYLKWAFVEAANAICIGRGRAPHCHVSRLYERIARRKGHAKAIGAVARHLAEATFWILGKHEPYREPKASAVSPTGDKRGWPLSSRKLDR

SEQ ID NO: 268772 - protein, 368 aa, unidentified
MKQYHKYVGLDVHKERNEVALAESDGEVRLYGSISNDLHALEKLVVKLRVNGAVLHFVYEAGPCGFVIYRRLRQLGEDCVVVAPSLIPRKAGDHVKTDRRDAMMLARLHRAGELTGVHVPDERDEALRDLVRARTDAVTDRRDNRHRLKAFLLRHGYKYSGTSSWTEAHLRYLRELVLAHAAHKIVLEEYLLAITQVTERIQRLEEHLATLAASWRMKPVVDALQGLRGVQLLTAVALVAELGDLNRFAHPRQLMAYLGLVSREYSSGSTRRQGSITKAGNSHARWFVVEAAQHYRLPPKVSKELAPRQEKLPARLKEISWNAQVRLHKKYWAMMLRGKRVQTVQVAVARELVGFIWATARAVKPLSD

SEQ ID NO: 268773 - protein, 323 aa, unidentified
MSQPNLQYMGIDVAKLSLDIATTDTIEPFTVGNDEDGFAVITDKLKHTKINLILMEATGGLEAAIACKLQSEGYDVVVINPRQARDFARSMGYLAKTDKLDAAMLAQLALVIDRHPDRSRYIRHLPDEARAVLAAMVVRRRQLNHMLVAERNRLYPSHPQSRKSIDNIIDALQNELDRINEQMKQHMTAFFQEQARLIGSVKGVGDITVASLIAELPEQGKLNRREISALTGVAPLNRDSGKMRGKRTTFGGRAGVRATLNMAALVATQFNPAIKLFYQRLLAAGKPKKLALVACMRKLITILNTMLRKGEEWNASFQSQVIS

SEQ ID NO: 268774 - protein, 357 aa, unidentified
MSHSAPMTARMPKVTIGLDLGDRTSRTYEVNAEGECEREATVATTVAGITRYFEGRDRCRVVLEVGTHSPWVCRRLEQLGYEAIVANPSAMFAGAPRRRRNDRLDARFLARQGRADVELLYPMTHRSADAQRDLEYLRARDQLVAVRTKLINHVRGTVKSSGARLSRCSSEAFAKRAAGEVPTALAPALTPLLEVIADLTRRIAQAETQLAAVTRERHPVALRLQQPAGVGPLTALAFVLLIEDPSRFRKSRDVGAYFGLVPRLDESGDSTPQLRISKAGDEFGRRLLVSAAQYILGPFGPECDLRRYGTAIAQRGGKNAKKRAVVAVARKLAVLLHHLWVSQAAYDPDYQLKRRAA

SEQ ID NO: 268775 - protein, 343 aa, unidentified
MLSNNIIAIDLAKNVLQVCHISVHGEMLSNKPLSRQKTKEFLAKAKSSIVAMEGCCGCHYWGQLVEQFGHEVRIINPKKVKGYLEGHKTDHNDALAIANAAIQIGIKYSRPKSLEQQSMHSLETSRRFLSRSVVSLALHIRGTILGYGIANSRGEKGLKASVQTVLDGETSIPTNVVSVLSMLWEQYKELKAKLIAFEKEKNALTRQIEPCQRLMEIEGVGETTAAMLYTTLGDGKQFKNGRQASAFVGLTPKQHSSGGKVFMIGIDKCGGVKELRSLLYLGAMSYVGRLPEKPKTQKDAWLRSIIDRIGFKKACIALANKVVRTAWAMLRYETEYKPVLLTD

SEQ ID NO: 268776 - protein, 274 aa, unidentified
MLAATTVVAIDVSRDWLDGFCLPDLHRFRLANSPEGHEELISMICQMPAPVHVGFEATGGQEWILWTELVEAGIQTRQLPPAQIKAFAMSRGTRAKTDRIDAELIARFMVFWPEAGRTLPGENLRVLRTLTSRRAQIVEMRKRLAAQISARRKQGFAANVEDLDDALKAMLDAQISDLEQRIECAIASEQTSATKAGLLRSIPGIGPVSAAMLVAEMPELGRMTAGEAAAMAGLAPVPQTAGPCAADGPLLEGGVPYDRCASKPHSLPHATTRR

SEQ ID NO: 268777 - protein, 358 aa, unidentified
MQVQIRNLDFTGQNIYAGIDVHKKSWQVSIYSEVLYHKTFSQPPKPEVLYHYLEKHFPKGTYYSVYEAGFCGFWIHDRLQSLGINNIVVNPADVPTTHKEKKQKTDKVDSNKLARQLRNGDLEAIYTHKRDVLEDRSLLRMRRTLVKDLTRYKNRIKSELNFFGIEIPEQFKKTQSYWSKRFLGWLSEVEFKQGSGTDSFKILTEQVKALRTNLLEVNRKVKVLSRNEYYQKKETLLRSIPGIGLITAMVILTEIDDIHRFANLEKFRSYVGLTPTSNSSGDKSIHGEMINRGNKFLKSAIMESAWTAARVDPVLHMDYIGFCKRMQKNKAIVRIACKLLNRANYVLKNEVPFKNGIK

SEQ ID NO: 268778 - protein, 400 aa, unidentified
MMTPDDIDVWVGLDVGKSAHHAHALDHDGNTLYDKPLKQDEKAIRTMLGKLSKHGRVLLVVAQPNTIGSLPLTVARNMGIAVAYLPGTAMRRTAQLLPGDAKTDRRDAHVIAWAALKLPETLRDAGPDDETLAALKLLAGHDEDLAHESTRHVNRLRSLLLQTHPAFERALKGERITRDATLALLERYGGPMGVKRAGIEDVKDWAKSNGLRAGRIIDDMFKAIGEQTVTVPGTLMAETIIPSIAHDIKTIRDRRREVGRQVEKLLEDHPLLTVLTSMPGIGVRTASNILLGIGGDIANFKSSAHLAAYAGISPVTGQSGTSIKGERPSRRGNKRLKNALWQTAFVASTKHPPSVAYYKRKREQGKHHNAAIICLARRRCDVIYSMLKNGTLYQEPALVA

SEQ ID NO: 268779 - protein, 387 aa, unidentified
MSPTIAACRPAAVDYERTLILSIEVSNQNWVLAAQVPGLPHTKAKRTVDPEAEALMAAIAGYRSRAAAMGRSIERVIAVYEAGWSGFWLARWLTRHKVEVYVIQPSSVPVDRRMRRAKSDGIDAELLLRTLLAWLRGEPRVCSMVPVPDEADEDARRCIRERTELISERVGLTNRIGAVLATLGVTDYNPLLRNRRYRLAELRTGLGEPLPPNAHAKIARLLARLELVLAQIAELERERDAVVETETPDHASKMIQQLISLRGIGVQSATVLVREAFVRRFANGKALGSYAGLTSSPYSSGGIDREQGIGKGGNRRLRTVMVELAWLWTRYQPAAAQVCWFRERVGSTGRRVRKIMVVALARKLLIALWRFVIDGVVPEGAVLKPAA

SEQ ID NO: 268780 - protein, 387 aa, unidentified
MTNTFDSRKSCIPFHQSNTLVAVIELSKSSWLVGGFVPGIERSPLKKLQPEKAELLKLLLRWRDEAVKAGREIKRIAVACESGRDGFWLVRWLKAQGVEAYVIHAASVAVSREHRRAKTDRLDVELLKRAFLGWLRGELGHCGMVAIPSREEEDAKRPSRERETLMGERTRLINGMKGDLARLGICNFNPKLRKAPQILEALRTPEDVPILPNTLAKLRRDMERLRLVVAQIKAIEAVRLERLEETPQDKPHAMILLLARVMGVGIETADMLVREVLSRALRDRRAVARYAGLTGAPDESGSKRREKGLAKAGSARVRRGMIQLAWRLIKFQKESALVQWYRARTADNRGVTRKTMIVALARKLLIALWRLVTTGEIPHGFILRPAM

SEQ ID NO: 268781 - protein, 404 aa, unidentified
MDVIYERCCGLDIHKASITACILVGKKKEICTFGTMTDDLLRLTAFLKERNVQMTAMESTGSFWKPIFNIMEVEGVAAILVNAAHIKAVPGRKTDVKDAEWIADCLKHGLLRPSFVKPRDQRELCELIRYRGSLIEERAREYNRMGKVLEGANIKLTSVASKMDTVSGTNMIRALSEGVVDPALLASMAKGSLRKKTDELKRALNGLVQPHQQMILKAMLGHIDQLSRLIDTLDTEIEIRMSQDVELVEALDEITGVGKVSAQTILAELGTDMTRFPSAKHLASWACICPGNNESAGKKKSGKTRKANSTLKKTLIQCGRGAANSKDTYLSSLYHRIASRRGAKRATVAVGHAILVVCYHMIQNRSRYNDLGSDYFHKRNKDALVRQSVKRLEALGYYVSLNAA

SEQ ID NO: 268782 - protein, 349 aa, unidentified
MGIIGGLDVHRSQITFDWIDSDSGQRERGQLAPAHREHLRMWLEQFAGRQAAFALEGCTGWRYVVEELTRAGIEAHLAEPADTSAARGPKRRAKTDQLDARHLRELLAAGRLPESWIPPAHVLEVRTLVRCYKALGDEHTAWLQRVHATLFHHGVPAQRNLLAPDRRERLERGSGLSPAARQLVAVALRMLDQLDAELDLLRAELARVARRQPGCRALDELYGIGPVTAVAIWAELGDVRRFTSSRFAVRHTGLDVTVYSSDGKRTPGHLARQGPPVLRWALFEAAKCAARASSPDHAYYLQVKQRLGGNRATLAVARKLARRCYHTLAALGDQAFAPPVDTQPVGQVA

SEQ ID NO: 268783 - protein, 433 aa, unidentified
MVKQEPEIKGCWVLGVDCGEQKHRFVMLDESRARQGALWVTNRMDKVRESLVKMLTKLPEGYELEIVTEGLRSIGGMLMQGATELGLRIYQVNPKALDSYRSLEGQPRKDDDRDAELLAIMRLNSVKGCRLALDTRPEERVLCRFTRLHTQLVGQKRRAVNRVRSRLLELSPEVVDSQWDGPGYSSTGMRAVLERWPGFEGMGNARVSTVERVLRPVTRQGKACTKMAKAVLEMARRITLGAQERQVISMELDMAMQLLRLTETSLAKVDKEIKTAVEVHPKGRNLLEMSGVGQFTAGVLIGEILPLARNQSEGKSATYGGITPLSRRSAKSEGRSKLARGVNKHAVRALYLSAVSARQCSALDSAYFQKQLERHKGHPKAHVKSFLSLARQRFKVMYKILTTDARYDKETLIRSHLKRQELERTKKEGHLIA

SEQ ID NO: 268784 - protein, 433 aa, unidentified
MLKINGILPKINLSAIDIRKEHMYKCFVGIDVAKATHVLAVRNAEGEPVGNTLKFANSLIGFAIAEDRIDKLGASKDDILIGLEVSGNFWESIYDYLHSKGYQVVLLNPYSTDKYRKMSGSKIKTDKIDAYAIAGYLRLNDFTPAHVAEGDSKRLRELTRMKANLSSYLKKLKREGYALLHVIFPEFSDHFSSPFSIVSGAILRKYPNAFSLRRAKSEDLMKIARKVQGNNFSQKKAQELIKAAKTSVATDRVINTRSFNLQILLDQMETTEKSMAAIDEEIGKILVNPLGENDRGIGKKLSTIPGVGVNTIATIVGELGDIDRFSNAKQVVKYFGLFPKHSESGVSKKANPSMAKCGSSYARHAIYLAAVACLKHNPNLKGVYDRKLAEGKSPVQALIVVCHKLLHIIYSMLKYDTAFDPQRLFVNRCSATS

SEQ ID NO: 268785 - protein, 444 aa, unidentified
MVCSGMILIREVADAPVIMGISKPADLKSPCGEVKIVNPLFVGIDVSSRSNVAYLMKPDGSKHSSFSVQNNLGGAKLLSERIVSALNSMRLSDVVIGLEATSIYGNNLVYALREDGSLGQFQRKIHVLNPKQVKKFKEAYPDLPKNDFVDAFVIADHLRFGRIAKEVYMDDYRYQALRTLTRARFDVIQNLTREKQRFANYLFLKCSGIAQEKGIQNTSATTIALMEHFETVDDLANADLDELTDFIAQAGRGRFADPDVVAKVIQTAAKGSYRLPKTVNDTVNQAMSVSIASMRALKEQAKVLDKAIEQQFEIIPNTLTSIPGIGKVYSAGIIAEIGDIHRFASQASVAKFAGLVWTQHQSGEFEAEHSRMIKSGNRYLRYYLLEAANSVRRCDSEFRLYYDLKFNEVNKYQHKRALALTARKLVRLVFRLLKDNRLYIPPEN

SEQ ID NO: 268786 - protein, 371 aa, unidentified
MEKPTPLFVGLDVHKDSIAVAHAQGQSADPPVFVGAIGSRQADLDKVIRRLQSKTPDLVFAYEAGPCGYGLHRHLTGRGFRCDVVAPSLIPKKPGDKVKTDRRDAVELARLLRSGDLTAVYVPTVEDEAIRDLCRARDAARLTLKNAKLRLKAFLLRLGRHYVGRADWNDAHRRYLAKVVCPTPAQQIVFQESVRAVDEQVDRLQRLEAELLERAPAWRLYPVVQALQALRGVQFLVAITVVAELGDLTRFANPRQLAAFVGLIPSEYSSGSARRQGGITKAGNGRARRALVEGAWAYRHPAKVSQHIQTRIDGLPKPIQDLGWKAQVRLCKRFRRLVARGKHPNVAVTAIARELVAFMWAIAKEVPITTT

SEQ ID NO: 268787 - protein, 341 aa, unidentified
MKNLFIGIDFSKEKLDVAVITAVGLSETAQRECYEFKNSVLGFRQLVKWVERNSNGIATSSWLFSGENTGDYSKPLCNFLYGKGYDIWLENAKSIKDASGIRRLKSDRADALMIAEYAMRNYDKAFMYEPLSASLSQLRELFLYRQMVIRHRCSFQVRRGEKRLAMEKSPVKTIISQSGRHIVSELNKEIEKIDKRIAELIDSEEELKEIYHIVTSVPGIGCQNAVCLMVYTDNFRRFNYDARKIACYYGIAPFGKNSGASVHTDPHVHYLANRQIKAMLTQAALAAINHNPVLSQYYLRLVERGKKKQVAMNNVKNKLIHLVTAMVRNRQVFSPEYKISA

SEQ ID NO: 268788 - protein, 341 aa, unidentified
MEIDILGIDLAKQVFQLHGADRRGRVLHRAKVSRGSLFESVRTLKPRLVVMEACSSAHHWARRFQSLGTEVRLISPQYVAPFVKTNKNDRNDAEAIVEAASRPTMRFVPVKSVEQQDIQAAHRMRAILLRHRTALINQMRGLLGERGFAISRSPEEFKRAVPELLRANADELTSFCRTLLTELLVHLRAIEERIHFIEISIHSFMKRSALCAKIAQIPGIGPITATAIVAAVGDARQFRNGRHLAAWLGLVPRQYSSGGRSRLYHISRRGDTYLRTLLIHGARAVLRFVKTKTDVRSVWLQQLIARRGYNCTAVALANHNARVIQALLSSDASYVARGITA

SEQ ID NO: 268789 - protein, 320 aa, unidentified
MMAQNDLVVVGIDVAKDKVDACIRRFTLRQTFPNTAQGHRKLVAWLRQYQVGKAVMEASGGYEREWRNVLHNAGIEVRVVDPRRVRSFALSAGRLAKNDPIDAEMIAWFAETFSQAPGQIPDAAREELAALAKARKALVDVKIRLQAQDEHAAPEPARKAYARVLKSLAAEIDKLEAAISAKVKATPEFAERAEIIESVPGLARATSAILIAGMPELGQVSDEVAAALIGVAPYDDDSGKRRGERYIKGGRRWVRNAIYMPCLGAATQYNPVLKAFYQRLLAKGKEPKVALVACMRKLIIILNTMLARRQKWNPGRPATA

SEQ ID NO: 268790 - protein, 355 aa, unidentified
MNVNVNHYIGFDVHKKSISYCVKLADGRIVEEGKLAARRATLCQWASKRAEPWHGAMEATLFSGWIYDTLKPFAAKLEMGHPARMKAIGASKKKNDKLDARTICDLMRANLLPACWVAPSEMRELRRILRYRNLVLEQAVRMKNKISGLLMESGVEYNKKRLHGEKYFHELLENLAAEVPESVKDLLKLSRGWLESFQATQQQLLVKLQKHPILMERLKRLKSIRSVGEVTALTWALEIGDPHRFSSIGDAVSYCGLTSALVESADKQKRGPISKQRNAHLQTVLIEAAKLAPRWNPRLAELHQAEIDNGRHRNRATLEVARKLVAYLLAVDKSGKDFEVRTPSAQPEGEVKPAA

SEQ ID NO: 268791 - protein, 355 aa, unidentified
MSQEKYIGMDVHQATISVAVMDAQGKLIMECLLETKATTILEFIQGLQGTLSLTFEEGTSAAWLHDLLKPHVDRLVVCDPRKAALLKDGNKSDRIDARKLAELLRTNQLKPVYHGEHGVRTLKELGRSYLTLTKDVTRVMNRIKALYRSWAIPCSGTTVYAPRHRAEWLAKIAEPGVRVRAERLHQQLDVLQPVRQAARHDLLSESHKHAAVKLLREIPSIGPIRAALLVALLQTPHRFRTKRQLWAYSGFAVETHDSGEYRCVRGKLQRNRERITVRGLNDNHNKDLKSLFKSAAISASTRPGPLHDFYAARIAKGMRPTMARLTLARKIVTITLTIWKKGVSFDPQQLHRQAA

SEQ ID NO: 268792 - protein, 358 aa, unidentified
MNANKERPPLTAGLDLGDKYSYLCLLDTEGGEVIEEGRVRTTPEALRRRFASERPLRVAIEAGTHSPWVSRLLEECDHEVLVANARKVQLIYANKRKTDEVDAENLARLARLDPKLLYPLKHRGEDSQAHMAIVRSREALVSARTQLVNHVRGAVKSFGGRLPKCPARSFHKRAAEHIPQALMPALGPILEQIGSLTERIRDYDRQLETISEERYPETKLLRQVEGVGALTALTFVLTLEDPHRFEKSRSVGPYLGLVPASDQSGDRDPQKRISKEGDEMLRKLLVSCAHYILGPFGKDSDLRRHGEKIASRGGKNAKKRAAVAVARKLSVLLHHLWVTGEVYDPLYNAHRRTQQEAA

SEQ ID NO: 268793 - protein, 391 aa, unidentified
MIYVGIDVAKDKHDCFITNFDGEVLFKAFTISNNLDGFSELYQKIESVMDDVTKIKVGLEATGHYSYNLLGYLIDKGLPAYVINPLHTNLYRKSLSLRQTKTDKVDARTIASMLMSDVNLKSYSDTFYHNEELKSLTRYRFDKVKERAKLKTSVSRLVCILFPELEKLVPTLHIASVYALLSEFPSAKHVATAHLTRLTNLLSESSKGRYGKDTAITFRDAARASIGSNMPAKSLELKHTIKLIQELDSEIDEIENEIKIIMDKINSPILSIPGISYRMGAMIIAEIDDFSRFDSPDKILAYAGFSPSTYQSGQLDGAYAHMEKRGSRYLRYALYNATKYVCHWDPTFAAYLAKKRAEGKHYNVAISHAAKKLVRVIYHLEKTKQQYIKAA

SEQ ID NO: 268794 - protein, 410 aa, unidentified
MLFVGDDWAEAHHDIEIVDGDGRRLARRRLPEGVEGLAALHALVADHLAEDAAADQVVVGIETDRGPWVQALIAAGYTVYAVNPLQVARYRERHGVSGAKSDPGDAHTLAEMVRLDRAHHRPVAGDSEVAEHVKVLARAHQSMIWSRQRQTNALRSMLREFYPGALAAFGEDLAGRDALAVLTIAPSPETGRRLSLSKIAATLRRAGRQRNLEATAERIQTALRAPQLAAHAGVIGAYTAAVKSLVAVITELVAQTKVLRTEVEAGFGRHPDAEIYLSQPGLGPILGARVLAEFGDDPHRYADPKARKNYSGMAPITRASGTKRVVLARYARNRRLADALYQQAFAALTASPGARGYYDRQRDRGATHHQALRALANRLVGILHGCLHRHTHYDENTAWPAEPLSTPLAA

SEQ ID NO: 268795 - protein, 348 aa, unidentified
MRFYTNQHKFYCGIDLHAKTMYLCILNQEGKIVLHRDIKTSPDIFLKTIAPYREDIVVAVECIFTWYWIADLCSEENIPFVLGHALYMKAIHGGKAKNDKVDSHKIAVLLRGGMMPMAYVYPSDMRSTRDLLRRRTHLARKRAELIAHIQNTNHQYNFADMGRIARKCDRTKIGVADRFTDPSVQKSIELDIALIEHYDKLLNHLEHELSLIAKVHDADSYFRLRSIPGIGRILGLVILYEIHDINRFPSVQDFVSYCRLVKSAKESAGKIIGSSGKKIANAHLKWAFSEAAVLFLRRNPEAVKYRAKLERKHGKAKSLTILAHKLARAVYNILKKKEVFHPKVFFAK

SEQ ID NO: 268796 - protein, 372 aa, unidentified
MKDLLEISCGLDVHKEKIVACILTGPLGKPTRSEIREFSTLIPDMIALRNWIVSKNCHHVAMESTGIYWMPIYEILEDAFSGDITLLVVNARHMKNVPGKKTDMRDSEWISTLLRAGLLNGSFIPEKRIREFRDLNRYRKSVIRDITSQKNRIEKFLQSSGFRLSSFISDIFGASGRNIILHLIEHGQIDKTALDSCLKTKTRNRIDEILMSVNGTLSEHQKAFLRILMTHYDSLKKHLAEIETSLEEDMAPFALQVEQLNSIYGISTTASCAIIAEIGIDMKPFKTAEHICSWAGLCPGNNESAGKRKSTSVTKGNPYIKSMLCEIAWVIAGKRNTYLSAWYWSCLSNRKKEPKKRLSHLPENFLSSSTQC

SEQ ID NO: 268797 - protein, 344 aa, unidentified
MATYYIGADVHVNNTELAVEYRRKIVARYSVPTTIPAISTVLDSIQGKKILAMEEGPMAGWLFRNLSEKVDRFVVSEPRRNKLISSEGDRDDKIDSGKLASLLRGNFLKAVHHTTDSHRAHLKHWINLYHDRVRDAVRSINKIRACCRMHGVRIPRKVVRNHVHRHERLCGLDNPALKAQLQMLWIGYDATKEQVEIAKKQFSSYARKYPIIKSWCKLPGVGIIRATTIFAYLDTPWRFKNRAKLHRYCGVGLVRATSGKDKKGRPRPPRLKLPWAVNRRLKNAVMGAATSAIERTDNAFKDYYERMLSNGITPANAKHSVARKMVSTMSAMWKTDREYDEKLL

SEQ ID NO: 268798 - protein, 407 aa, unidentified
MLFVGDDWAEEHHDVEVQDESGRVLGRARLPEGVEGIARLHALLGKHLGDDDELEVVVGIETDRGPWVQALIAAGYQVFAINPLRVARYRESHRVSGAKDDTADAHVLAEMVRTMRAQLRPVAGDSAEAGAVKVVARAHKTLIWERTRHLLRLRHALREYYPAALVAFDDLTATDALELLAAAPQPAAGAALTVDQITAALTRARRRNRAGKAAAIQTALQAEYLGQPAVINTAYAATVQAQVAILTVLNTQVATMEAQVEAHFGKHLDAEIYLSQPGLGAILGARVLAEFGDDKTRYADAKARKNYAGTAPITRQSGKRKTVLARHIHNDRLIDALGLQAFAALTRSPGARAYYDLIRARGAGHRAALRQLGNRLVGILHGCLKTGHLYDEEKAWQHHHQDHQVAA

SEQ ID NO: 268799 - protein, 342 aa, unidentified
MTTIKYSVGVDIASSTFTTAVGELPWKVVLKPETFENTEDGYQALLVWFAQHHLSVSETVVCMEATGVYSEGLAYFLYAKGYRVAVQSPLEVKRTFKPYGPKSDAVDSLQIAEYACRHTDKLSFWKPRSEILEQVKALLAVREQFVSQNTAHQNVLKAIQRKVVRTPFAEQAYQQLIEQVKKQIQAIDSEVRRLIESDPTFKEMLLLLISIPGVQLLLAAHFILLAQFSLEYKVLASFLGIAPNEHSSGTSVFKHATSRHFGPPAVRKLLYLAACSICTHRPQFGRYLVRKTKAGKPARLVLNNVENKLVRIMCAVVQSKTAFIENYHSVQPLVFQKTLTAS

SEQ ID NO: 268800 - protein, 348 aa, unidentified
MNSIDYIGFDIHKKTISFCAKAQDGRILDEGTIPARRTDLNAWAERRSRPWWGAMEATLFTGWVYDHLKPLAQELKVAHPAMLKAITASKKKNDKVDARKIADLLRCDLLPECYMAPRATRDLRRVLRYRNLVVRQATRMKNRIAGLLMETGTLYNKERLHGKAYFCELLGSLRETPASVIDLLKLSRAQLELFVTIQQRLVKGLRADAGLRERVERLQSIRSVGEILALTWALEIGEVNRFASIAEAVSYCGLTSAQHNSAGKEQRGPISKQRNKHLQTILIEAAKLAPRYNPQLAAVQEREEKRGDCNQATVAVARKLVAYLMAVDKGGKPFQVPASVREEVCAHG

SEQ ID NO: 268801 - protein, 367 aa, unidentified
MKKVSTRAAAQSRNISQQKLTVGLDLGDRNSWYCVVDEAGQIQREQRVHTSGKALQEVFGTMPRSRIALEIGTHSPWISRLLSELGHEVIVANARKVRLIGESRKKDDRLDAQTLARLARIDGELLYPVKHRSAQAQADLTLIRARAGLVRARTGLVNTARGLAKSYGERLRGCNVRNMNPEKAEELSPELQRALEPLLNAIAALSERIVEYNERIEQLTQQSYPQTALLKQVKGVGTLIALTYLLTLEDPHRFQKSRDVGCYLGLQPGRRNSGRSEPQLHISKEGDPYLRTLLVQGAQHILGPFGIDCDLRRWGLRLAERGGKSGKKRAIVATARKLAVLLHHLWVSGEAYEPLHNSSRTTVAAAA

SEQ ID NO: 268802 - protein, 318 aa, unidentified
MSNDTIGVDISKDHLDTHRISDGESHRFANDRAGHKAFMTWLGKRASPQSLAGLRVVYEPTGPYHRAFERRLADAGLDLVKVNPRQARRFAEATGKLAKTDRLDAAMLARMGALLGLEARAVRSPLLNDLKDLHIAREALVKMRTAVKNRARTQTLALLKRQNGEQLRQIERQMAAIDQEILALIKADPDLARRFAILVSIPGVAAITACALLIDMPELGTIQNAQTASLAGLAPIARQSGRWTGRAFIRGGRANVRQAPYMPALVAMRFNPDLKRKYDQLIATGKPAKVAITAIMRKLIVLANALLRDNRMWQEIRA

SEQ ID NO: 268803 - protein, 342 aa, unidentified
MNNTQSIKILGIDLAKSIFQLHGNDQDGHCVLSKRLTRSKLAEFLATLPRCIVAMEACGSAHHWGRKFREYGHEVKLIAPQFVKPYVKGNKNDMQDAEAIAEAASRPTMRFVGIKSVEQQEIQSIHRVRERLVRDRTALGNQIRGILQEYGIIFNEGLHHLRKELPQMLSMADSGLGVRTCALIQDLVSELLRLDERIGYYEHEIKTVSRDSELCQRLEGIPGIGPITSTALIASVGDARVFKNGREFAAFLGLVPKQRSSGGRSLLLGISKRGDGYLRKLLVHGARSVVSHNGRRLDKDRRSQWISSLEERRGMNRTAVALANKNARIAWALMVSGAQYRQ

SEQ ID NO: 268804 - protein, 357 aa, unidentified
MRFHTSTTRYHCGIDLHSRQMYVCVMDSQGNKLLHMNIRNNDFEFFLEKIAPWRHDITVCCECLFCWYWLADACKEAGLEFVLAHALYLKAIHGGKNKNDRIDSEKLAHLLRSNMIPPAYAYPAARRPIRALLRQRTSFVWQRVELLQRVSTMQMAQGKTPVSKFSNNRRKWLEALLEAHDDPCHRFSLEQDAALVVHFDNAIAAIEKELLDITKRTEARDFALLRTIPGVGKVLALTILYEVEAIERFASVQRFLSYSRLVKGTVASAGKIKGLRGAKLGNPYLRWALGEAAVPGKRHHPELDAYSRHLEKKHGKFKANAILASKLGRAVYFMLSNGTGFDVGKLTGLPPRRTSSS

SEQ ID NO: 268805 - protein, 363 aa, unidentified
MKRGHFIGLDTHCEFAELAVVTHGGRTTKHARRAMTIPAIVEELQSIARPRYLVIEEGPLADWLWRNLRSQVDEMQVCDPRRNRLVCQEGDKDDPIDAEKLAQLYRGGYTKAVHHAESSYRSVFKQHVMLYHDRVRHRVAEGHRLVSLLRRHGVVVRERNFANPQERDGLLRRLPNSRTLRADVRVLWKGYDVAVLQEEWMRRRLVQLAKKEEVLQRMVTLPGIGWVRAATLWVWLDTPWRFAKKQALWKYLGIGLERRRSGNGPEKVRVPVHVNRVLKSMILGAAKSAAAQGKNPFADQYRRWLAAGLSPKMARRNVARSLALTWWGMWKNGSAYRPEWVGVAAAAVHAAKGFTAAAGCALV

SEQ ID NO: 268806 - protein, 340 aa, unidentified
MSLGKTAVCVVDRDGAVLWQGKVTSEPGPLIARLAEWSGKIDLAGIEACPLSEWLHRGLREVGIPVVCVETRHAQRFLSTRPVKTDRNDARGLAEMMRLGHYRPVHVKSPAAQSVRTTLVARMQLVSAQLQIENTIRGLLRLYGLKIGAIHRNRFAARVAELLEMAGMPDLSAAIEPLIRVRESMRIERKAQDRTLAAQSRRDEVTRRFMTVPGVGPVTSLAFKATIDDFGRFDFSKAVGAHLGLTPRVYQSGEVDRSGQISKCGDRMMRHLLYEAASVLMTRTRKWSRLRAWGIAVAKRRGMKRATVAVARKLAVIMHRMWVTGTNFEFGCQPAASNAA

SEQ ID NO: 268807 - protein, 372 aa, unidentified
MVWTPPLPNGIVMCQSGRCYDHFNEEEESGMKTTTIGLDIAKSVFQVHGVDAKGKVVLRKVLKRRQVLEFFANRAPSLIGMEACAGAHYWARELGKQGHEVKLISPQFVKPYVKGNKNDANDAEAICEAVGRPNMRFVPVKTAEQQDLLALHRVRSGLVKERTAQANRLRGLLGEYGIVIGKGLAQLRKRLPEILEDAENDLSDLMRALFADLHGRILALDQQVAAYGDKLKTLNQMSAVCRKIGQVPGVGPITATAMAASLGDGQAFETGRQVSAWLGLVPGQQSSGGKPKLMGISKRGDTYLRTLLIHGARAVVRAAAKKHDAKSRWINALVQRRNANIAAVALANKNARVIWALLRRGENYRAPVSANA

SEQ ID NO: 268808 - protein, 348 aa, unidentified
MSTYYIGADVHSNSTELAIEKRGKIVARYSVPTSIPAIVNVLDSIQGKKYLAVEEGPMSGWLYRNLHDKLEQFISSDPRRNKLIASDGDKDDKIDAGKLASLLRGGFLRAIHHSDDDGRAELKHWVSLYHDRVRDAVRGINKIRARCRMHGIKIPRAVLRDPASRIDWLLKTDHNALANQLKMLWIGYDATVQQVKFAKRQLSTLSKKYEIIQQWSLLPCIGPIRATTIFAFLDTPWRFKKKNKLWKYCGVGLQRTTSGTDKKGNSKPARLKLPWAVNRTLKNAVLGAALSAINQKDNVFKDYYERMLKDGIITSNARHAVARKMLTAMWAMWKTNSRFNEKLVFLSN

SEQ ID NO: 268809 - protein, 388 aa, unidentified
MIQVDDLSRSLIAFEQISTLVIVVELSQSSWLAAGVVPGIERRPLKKLDPDPTALLHLVEGWRDRATKAGRAITRTVLAFESGRDGFWLARWLRVHGVETFVMHSTSVAVSREPRRAKTDRLDTEMLIRVFLGWLRGEPRHCKMVAIPTLEEEDARRPSRERESLVGERTRIINRMKAALVRLGIRGFKPGLLTAPQKLDALRTPEETPIPPNMLDEMRRDMARLAWVREQINAIEQARLERLERAPATGRHAMVRMLARVIGVGVETADMLVQEALSRNLRDRRAVARYAGLTGSPDESGSKRREQGLSKAGNARVRRGLIQLAWRFLRFQKDSALAQWYRGRTEDAAGKRKKTMIVALARKLLIALWRLATIGEIPVGVALRPAVA

SEQ ID NO: 268810 - protein, 323 aa, unidentified
MSKFTGIDISKQTFDCSITMEGGKIELRKLSNNLKGFEKLKSLLPADAQVVMEASGPYYFKLATYLYEQKIAVSVVNPLVIRRFCQMRMIRTKTDKKDASMIRAYGETEKPTRWQPDEPNITKLKQLNAAIELMDKAITASSNQIQAFKEMPDTDTKLIKALEKNRTANIKAKEKLEKEMEQVALTHYATSYKALQTIPGIGPKSSAILIAVTGNFKKFSTYKQLIAYVGLNPRIFESGTSVKGRGHICKMGTSRLRKLLYLCSWSAKRHNIYCKEMYLRLKAKAKPERVIKIAMACKLLRQAFAVGKHQTTFNINYQKTIAY

SEQ ID NO: 268811 - protein, 458 aa, unidentified
MKSTLVLGVDVSKGYGDFVLLDAHKRVVEPPFRLDDNKQGHDILKKQLLEWKKNYRVSRLLLVTESTGGYEDNWLRISKDKALSFVESYRINAKIIFHEYQAQRRNSIDDGVSAITIAEHVVKNLENFTVTSSFEETPYTSSRSLIRHYVSLQEESSSHKNALVKLLYQYLPSLEALKPREWPIYWIEIFVRYGSRKSIQIAASKGFRQLKRVPPGKAKKIAEALANGIDMRETPAMVVYAIRSKARQIKRLMEEIKEVKKMIIEVAPVDAQQVSLLKSIKGMGDITPVILLSFIEEVGRFGDAKQMACFFGVQPRVKKSGDGAYRAKMSKQGAGLVRRELYLLAFRTLNKEPYLRAIYAKSRAKGMVHNAAIGVLMHKILRMIYGMLISNTPFNVGIDQLNQHQVADKPKEKRQKKDTSRRFQPPSMAAPISGRQRRKRKKDYELQADGISESTESS

SEQ ID NO: 268812 - protein, 369 aa, unidentified
MKKHITFVGLDVHKNSINVALADGDRNGDIRYYGAIGGTLDDLDRVVKKLASSSRELHFVYEAGPCGYDIFRSLTDKGYTCAVASPSHIGKKPSERIKTDRRDAMMLARLHRAGELTYVFVPHAEDEAMRDLTRAREDALKAQRVARQQLGGLLLRLGFRYQGKTAWNPAHFRWLAAQKMPTPSQQVVFQEYINAIDETTKRVERHTQQVENLVPSWRMASVVKALHTLRGVSLIVAASMIAELGDLTRFENPGKLMAFLGLVPSEHTSGQKRRQGAITKCGNGHARRVLVEAGQAYSYQARITPLLLKRQEGVSKEVKDISWKCQVRLCARFRRLSATGKNRNTVITAIARELAAFMWSIAKQVPIAA

SEQ ID NO: 268813 - protein, 291 aa, unidentified
MQPTSETRTFTTLIHDIEELKNWLESHGCKHVAMESTGIYWQPVYEVLELAFNGDMSLVVVNARHMKNVPGKKTDMKDAEWIATLLRAGLLNSSFVPAKEIRELRHLTRYRKSIISDITSQKNRIEKFLQSSGFRLSAFLSDIFGASGRSIINHLATHGSITLQDLDGYLKTKTRHKINDIMMAMNGRLSSHQKLFLKMLLKHLEQLESNLSEVESEIATEVQKYEHQLELIDSIPGIDKTAASSIIAEIGIDMSKFKTAEHICSWAGLSPGSNESAGKKKELSPIGGIPT

SEQ ID NO: 268814 - protein, 364 aa, unidentified
MDPPLKDGVIMRQHRISIFKKRRRSMKDIKILGVDIAKDVFQLCGIDEWGKVIYTRRVKRAQYVSTVASLKVGCVVMEACGGANHWYRTFMGMGIPTQLISPQHVKPYVKSNKNDRNDAQAIAEAASRASMRFVRGKTVEQQDVQALLKIRDRLVKSRTALINEIRGLLQEYGLTMARGAKRFYEELPLILASEAVGLTPRMKRVLNCLYTELLNRDEAIGDYEEELKAVAKANEDCQRVQSIPGVGYLTALSVYASVGDIHQFHRSRQLSAFIGLVPRQHSSGNKEVLLGISKRGNVMLRTLLIHGARALLRHVKNKTDKKSLWLKALIERRGMNRACVALANKNARIIWALLTRQETYRCGA

SEQ ID NO: 268815 - protein, 347 aa, unidentified
MTTIVESERAHVGGVDTHADVHVAAVIDPQGGLLGVESFRANPDGYKELSGWMRNFGTIGLVGVEGTGSYGAGLSRHLRSVGLVVVEVDRQNRQARRRQGKSDPLDAVEAARAAQSGRAFGTAKTRDGSVEAIRALMVARRSARESRTKAMNQIRQLIYTAPDELRERFVGTPPWRLAQSVAVLRVHADADPVRMATKTALATLGRRAVALDEEGSRLDVLIARLVDSVAPELVELVGVGYDTAALLLIAAGDNPSRLRSEATWAKLCGVSPLEASSGKVTRHRLNRGGDRQANHALWRIVLSRMSCHPPTKAYVARRTVEGKSKKEIMRILKRYVAREVYHYLPRE

SEQ ID NO: 268816 - protein, 408 aa, unidentified
MNAVGIDVSKGKSMVAALRPMGEVALLPQEFPHTEVGLEQMAYAIIALGEDTRVVMEATGRYHEPVAAALHEYGIYVCVLNPLFIKQSGGGSIRKVKTDKADAMKIAKYGLDNWVDLREYTPMDTVRQQLKLCSRQYNLYMKTVVSLQNNLISLTDKTFPGVNELFSSPERADGHQKWVDFVMTFWHCDCICRVSEKAFTERYRKWCKRKGYHFSAEKALDVYAGSCGHFTTLPKNDNTKLLITTAAQQLLAGKMTLAALRAEMTRLAKQLPEYDTVRAMYGVGETTAAQLMAEIGDVRRFLRRSSIVGFAGVDPAVDQSGKHEAKSTPTTKRGSPHLRKTLYQIVCTYLKRSPADEPVYQFLDKKRAEGKPYFVYMTAAQNKFLRIYYARVKECLEAFDARQSSTQS

SEQ ID NO: 268817 - protein, 369 aa, unidentified
MNKTLYVGLDVHKDTIAVAVAEDGRCGEIRFHGTIVNSSNALLRLTKTLTKNGHTPSFCYEAGPCGYGLHRHLTKLGFECAVVAPTMIARKSGDRVKTDRRDAEMLARLWRAGELTPIWTPDEEQEAMRDLIRARKQAMDAVKTAKQQLLSFLLRHGLRYENGKYWTQRHRRWLAEMRKFRFPHQQLAFEEYKRALAQAEDRVETLNAAIEVAVTDWHFAPVVDALRALRGVNTTIAATVVAEIGDITRFENPRQLMAWLGLVPSEHSSGTTTRRGRLTKTGNALARTMLVEAGWSYRHPPKEGYPYLKRSAHLPQHIKDIGWKAQTRLCKRYRALSRTGKPQPRVLAAIARELAGFVWDIARKTPLKA

SEQ ID NO: 268818 - protein, 430 aa, unidentified
MDEVNRNRLEEFRQLRKEIKHSEEYLIVGMDIAKDRHYAFFGTATGKTLLRRIVFSNDHEGFRRLLDQAEVLRVQHGLKKVVYGMEPTANYHKPLGEYLIKLGKIVVLVSGVTVASNRESLDGRWDKHDGKDSANVADLISQGKCLYYEHPSVELRGLRGLLSLKRRLKKQEHGYRVRIRNQLIAQYFPEMDRYYERLGAEGLSMVRWCLAASEIAQLEVDPFIERVTSRRVRMEKRRRLEEIWEKAARSIGCDGVPGLEHEAKVMVEGLRQIREMIKETEDKIEELCKQFPEYHYLLTIPGFGPDVSAKVLGAVGDPDRFEKGKQVLKLAGYDLSGDRSGKSSDKAIPEISKRGKADLRYALYQAALVGSTQNREMMIYYTNKIRGRERERGIQVKMRVKLAAKLLVIAWTLMKKKEVFNPAYLKAELS

SEQ ID NO: 268819 - protein, 373 aa, unidentified
MQRIYIGVDFHARQQTICYLTTETGELVTCELKHQDKEAVRAFYAAFRGHVIVGLEASGYSPWFERLLEGLGCEVWLGHATEIRRRARWRQKNDRRDAELILDLMLHDEFPRLHRPTLQSREVLRMLRYRQKLIKIRTMSKNSVQALALQAGIAKRSALFSREGKQELEAALLSPAMQWQREHWWQLLQPLDQQVLEAMVWLKAQSKDDVCIARLRTHPGIGLLTSLCLVHTLQPVTRFRNSRKVAAYAGFDPVERSSAERKCFLGISKAGSRLLRHLMVEAANVAVRKDEDLKRFYQRLADRRGRPKAKVAVARKLLIRAYIMLRDEIDYAEFRRRAVAARLARLGHRPNVPAVVIGQPASTEGQKATHSRD

SEQ ID NO: 268820 - protein, 403 aa, unidentified
MNSVGIDISKGRSTIAVMRPFGEVVISPFEVRHTGSELSKLAKQLKSLDGETRVVMEATGNYHASVAKLLHNAGLYVSVINAKLVHGYGNNELRRVKTDRKDAVKLANYGLDRWLTLPRYIPEEDTRLLLKNCYRQYRQYSKVQTVLKNNLISLLDTVFPNANRLFSSPIRGDGSEKWVDFVAEFWHCRCVSEKSQKAFTNKYQRWCRKHGYNFSEAKAHTIHAETCGHIDVIPKSETTKLLVEQAVSQLRATSTALAALKHEMQSLASQLPEYPVVMDMFGVGPTLGPQLIAEIGDVRRFYSKKALVAYAGLDAPPNDSGDVTGRHKSMSKIGASSLRRTLFLVMSVYLQTAPLDEPVCQFMDRKRAEGKLYRVYMMAFANKFLRIYYATVKAYLESLEHTA

SEQ ID NO: 268821 - protein, 431 aa, unidentified
MTTDSAAVRATKGKSMKPWIEITHYAGFDWARDHHDVVIVDRQGQIVADFRIEHSLAGWQEFRDKVKPYPALAVAIETNQGAAVDQLLPLDCAIYPVNPLSAKSYRERKAPSGHKTDRLDGWSLAEALRLDGQQWKALQPLDPLTQQLQLLCRDEIGLIEQRTALINQLQQALVEYYPAALQAFEDWTQPFCWDFIIQFPTPETLAAAGPRRWEKFLHTQKLWRPETASKRMEIFQNARQFTGSAAVTSAKSLLALSLAKLLNALQLQLDQYRRQIEGLFNQHPDHDLFGSLPGAGRTLGPRLLGEIGGNPQRFEDTEALQCVAGTAPVSFQSGQIHRVRVRYQCNKILRHTVHLWAQCSLRACPWADVYYRQKRAEGKSHACALRCLGQRLLKILWRMIQTRKLYDADLHARNQKQHGSWVLTLTTPKAG

SEQ ID NO: 268822 - protein, 343 aa, unidentified
MNKLNAIGVDLAKNVIQISVVSPSNRELRNSALTRRKFAEFLGCQRPSLVAFEACATSHYWARVAQRHGHQVKIIPAKAVAPFRQGHKTDENDALAVAEAARRPNVKVAPLKTVEQQGMQAVQRSRELLVHERVSLSNHLRGLLMEFGIVIPQGFASLYRQLPEILEDGENELPDLYRPTLNLLYGRLCDLRDDLEQLNREIETLVRQNPMCQRLTELEGVGPISSVLLYATLGTGEAFVNGRQFAAYLGLTPKQFSSGGKVNLVGISKRVANRRLRAVLIQGARAYVYHMKEPKTTKDRWLWAIVERSGKCKAAVALANKNVRTAWAMLTQNTEYRRYPLAA

SEQ ID NO: 268823 - protein, 345 aa, unidentified
MTSMNFIGLDIHKKTISYCVKDVSGKVLSEGKINATRQGLNEWMATLPKPWTVAMEATMFPGWIYDYLRPHAAAVKVAHPLMLRAIAVAKKKNDRMDASKIADCLRCDFLPECYMAPMEIRQRRRTLRYRKLLVRQNVQLKNKIAQMLMESGVSYNKDKLHQQGYFHQVLPANPEIDPSLWPLLKLSREMIERTQKTERALLRSLEADPLLAARVERLMTIPAIGHVTALTWVLEVGEVDRFHSVKQVISYCGLSSGEKTSADHSRRMPISKQRNRHLQTVLLEAAHLAPRLNPGLAVLYEREAARSNRNQAAITVARKLAAYLLAIDRGERAFATREVQNSVAA

SEQ ID NO: 268824 - protein, 359 aa, unidentified
MKAQVKQIDFTGQNIYTGFDAHLKSWKVTVMAEDIVYKTFTQPPDPETLYNYLKNNFPGGTYHSAYEAGFCGYWIHNKLVSFGIKSMVVNPADIPTTDKERVQKEDKRDSRKIAKSLSSGTLTPIYIPSIKTQRDRSLLRTRAMLVKDMARYKNRIKSFLLFYGISISDPFSNPQSHWSNRFIKWLESIDIDGGSGKEALLILISECKNLRASILKVTKQIRELSQTTTYQEQFTLLKSIPGIGLITAMTILTELETIDRFNNLDKMCGYIGLIPSTKSSGEKDRTGDITSRGHGVLRCAIIESSWTAIKYDPALMKSYIIYCRRMDSNKAIVKIAKKLLSRIRFVLANKKPYECLIEK

SEQ ID NO: 268825 - protein, 342 aa, unidentified
MPITVLGIDLGKNSCSLVGLDATGRVVLRRRMRRESVIAFGAQLPCCVVAMEACCGAHHMGRTLAAQGHTVRLMSPEYVRPYVKAQKNDDRDAEAIAEAATRPTMRFVALKTEAQLDMQTLHRVRDQLVGERTALMNQIRAILLERGHVVPQGRARLAARLASLLDDEAATDLTPRMRTLVTDVRERWQFLDQRIAALDAEFSEQACSDESARRLTTIPGIGALNATALVAAIGDVTTFARGRDLAAWLGLVPRQVTTGGRPKLVGITKRGSKYLRKMLIQGARAAMPTLRQSETRLGQWLRGLLARAHANKAVVALAAKMARTVWALLRHERVYEAAVIAA

SEQ ID NO: 268826 - protein, 345 aa, unidentified
MQSMYYIGLDVHKRTISYCVKDGSGKIHAEGMIPATRFDLDRWMKTLPQPWTAAMEATVFTGWIYDHLLPHAAALKVAHPLMLRAIAAAKKKNDRIDANKICDCLRCDFLPECYMASTAIRERRRTLRYRNLLVRQMVQMKNKISGLLMEAGVSYNKQRLHKACYFRELLATNPDIDEGLCALLRVCRETVVRLQKTESAVVRSLERDALLVERVERLMSIPAVGPITALTWALEIGDVQRFSSIKKAVSYCGLCGAEKSSANTVQRTPLSKQRNKHLQTTLIEAAKMAPRNSPELAMLYDKEKQKGNANRATLAVARKLVAYLMAIDRGQRNFQVAETSDCIAA

SEQ ID NO: 268827 - protein, 417 aa, unidentified
MKNWNEITHYLGFDWAKDHHQVVIVDRQARIVAEFQFEHSLEGWNTWRERIGDYPALAVAIETNQGAAVEQLLQSSVSIYPINPRSAKAYRQRKVPTTNKTDRLDAWSLAEALRMDGQSWRPLQPLDPLIQELRLLCRDELNLIAQRTSLINQLQQALMEYYPSALEAFDDWTVPATWKFLERFPTPDALTAAGLQKWNAFLHCHKLYRQNTHERRLAAFSKASQWHIAPALQRAKSFLVLSLVQCLIVLEKQLQQYRKRIEELFASHPDHDLFGSLPGAGPKMAPRLLSELGDDRTLFPDADSLRCYAGTAPVSYQSGQVHKVYLRRQCNKPLRCAIHLWADLSRRWCQWAQTYYQQLRKRGKSHAQALRCLGHRWLKIIWKMWQTRTPYDEALHTRNQTEHGSWVLQLMDQKPSE

SEQ ID NO: 268828 - protein, 405 aa, unidentified
MRVFIGVDPHKLSVTIEVVDDRETVLTTGRFGTDKSGYAAMRRHVAAWPERTWAVEGSNGAGRPLAQRLLADGEHVVDVPAKLAARARLFDTGHNRKTDAHDAHAVAVVAVRTEGLRVLSYDVELEALRMLADRREELTRQRVQTVNRVQRQLSELTPGRAKKHITALQAKGILASVRPRDLAGKTRRRLAVEQLTELVAVEKKIKALTKELNAMVHARGSTLMDLPGVGPVVAARILADVADVARFADRNRFASWTGTAPLDASSGEQIRHRLSRAGNRKMNHMLHIAAATQARLDTEGRVYYRRKLAEGKTRMEAMRCLKRRISDAVYRQLLADAQAAAIATENQQADRSPTEVGTGPGGHCGASQESSAVDLPPHIDTSDQPLPGPAHTTLPAPTSRRKSAL

SEQ ID NO: 268829 - protein, 318 aa, unidentified
MDGKRVIGVDVGKRWLDVAREGGARVERHANDATGIATLVASLDPAGDVIVFERTGGYERGLEDALAAAGLAWAVVHSQRVMAFRQLQAIKAKTDCIDARLLKAFGRDRLNAGALRLGRSEDVTLGALLTRRRQLKASLHAERCRLDTAALDAVRASLARMIAHMEAEIAALEAELAAHEANNAELSAKQAVLVRRIGVGHATARALLAELPELGRLDRKQITALGGLAPRVHQSGGSEKRRGLAPGRAAVKTILFNPARTAIRHDPEIAAFCRRLRLKGKPGKLVLTAVMRKILVQLNAMLRDALATTHLGAAALAA

SEQ ID NO: 268830 - protein, 448 aa, unidentified
MSKSKTKKEEVKRISQLTVINPTAAGIDVSDTEMMVAYPINSEQLEVRVFGCFTRDLHSIARTLKAKGITTIAMESTGVYWVALYLMLEEYGFEVYLVNAKHVKNVTGRKDDESDAEWIQKLHSCGLLHASFQPDKMTRTLRSIVRHRKNLVQTSSTYLNRMQKALELMNIKLHTIISDIDGKTGVLIIEAILAGERNTEVLADMRDKRIKASREDIIKSLEGYWTTEHLFELKQCYQLYCIHKQMIEDCEKEIEKQLYEQIASKNEGVIPNIPNVKRKASGKHKVSFNLTSHLQEILEIDVTKVVGINEVSALTIMSEIGTDMTKWKNHHHFTSWLGLAPNTKISGGKVISSRIKKKKHYAGQAFRIAANSLYKSQSPLGDYFRRLKAKVGAGKAVVATARKLAIIYYNMVANKEAYDPTAIEAYQQKYKEKKINQLKKKIALLEAA

SEQ ID NO: 268831 - protein, 309 aa, unidentified
MTLPSPVVGIDISKHRLDCHVHPAGQSRRFANTAEGIQALVAFVEELAAFCVLEATGIYDAALRQALHAKDIAFHRANPRKARQFAKVAGFLAKTDRIDARMLAAYGASLPLAPEPRPDRDRQKLQALVSRRDQLVELRKIERTRLAQAGETWLVRSHQQVIAMLDEQIAALDKAVGSLLAASQRLAAHRAILCSAPGVGPVTASVLLAFLAELGQRDRRAIAALAGLAPLAFESGAMRGRRHLWGGRKRVRDALYMAALAASRSGPFNAAYRAMRDKGKPAKLAIIAIARRLLVALNAAIRDQKPFHA

SEQ ID NO: 268832 - protein, 327 aa, unidentified
MAKRTTICAGIDTGKRKLDIALDGSSEQLQIDNTPEGYKTLLVWLRRHRVKRIGIEASGGYEQAVVAELRRQRFVVVVFQPAQVRAYAKFHLQRAKNDKIDAALIAACTAAVKTIHDAPDARLLPFAEHLTMIDQIGEDIARLKNRIETCRNLRFRQNWKEDIARLQNRQKVELKALVAAIGEHRDLAERLELIGSVDGIGPPTAVAILVRLPEIGRISREQAAALAGVAPYDDDSGEHAGTRHIEGGRKRLRRALFTAALPASFRWNPQLIALYRRLKAAGKEHKRALIAGARKLLIFANTVVARGTPWDHARPPVPSMTTVPQPG

SEQ ID NO: 268833 - protein, 324 aa, unidentified
MVTDVSSAVFIGIDVSKANLDVAIRPSGESWQESNDLEGIGRLVEKVLQASPVLIVLEATGGYEAACASALAVADLPVAVINPRQARDFAKSLGKLAKTDRIDAAVLARFGEAVRPEPRKLADEQTAQLQALMGRRRQLIEMLVAEKNRLGLSHRAVRPGLIEHVRWLESQLAEIDKELRDQLQQSPIWREKDDLLRSVPGVGMVTSTTLLVELPELGQLDRKKIAALVGLAPYNCDSGNMHGKRAIWGGRADVRTVLYMATLSASRYNSVIRAHYQHLKQQGKPTKVALVACMRKLLTILNAMIRSRTLWKEALALPKSLATA

SEQ ID NO: 268834 - protein, 391 aa, unidentified
MISVGIDVAKDKHDCFIVSSEGEVLADVFTIPNSIDGFHCLLQRIRNCTSPQDKIKVGLEATGHYSYNILGFLLDNGLATYVLNPLHTNLYRKSLSLRKTKTDRVDARTIAAMLLSDVGLKPYTDTAYHNEELKSLTRYRFDKVKERSQLKQSISRLVCILFPELEKLVPTLHMVSVYALLEEFPGAQQIAQAHLTRLKSLLHDASKGHYGPDVAVDIRETARISVGSVMPAKSLELRHTIHLIRELDAEIDEIEAEIQKIMDNLHSRITTIPGVGYRMGAMILAEVGDFSRFESPDKLLAYAGLSPSTYQSGQLKNCYAHMEKRGSRYLRYAIFNAAKYVCLWDPTFSAYLAKKRAEGKHYNVAISHAAKKLVRLIYAMEKSREPYRLAA

SEQ ID NO: 268835 - protein, 348 aa, unidentified
MDHIGIDVHKRESQIYLLAEDGEIIERRIRTEGERFAAVLGDRPRARILIEASTDSEWVARCLEALGHEVIVADPNFAPMYATRTRKVKTDRRDARALAEACLLGAYRPAHRLSDPQRHMRGRLGVRDALVHTRTRYISLIRALLRQQGYRVPSGSAGSFSDRVRSLPLPGRLLSVVAPLLAVMGHLNQQLAYSDATIEHLAVQDPRVPRLRSVPSVGPVTAAAFLAAIDDVGRFPHAHQLEAYLGLVPRESSSGDTQRRGPITKAGHSRVRWLLVQAALSILRRRPPAAEALWTWALRIAGRRGKHVAVVALARRLAGILYALLRDDTVYAPRGPAALPDSVAALHA

SEQ ID NO: 268836 - protein, 333 aa, unidentified
MNTIGIDVGCKELVVVIMVNGKARKAKSFDNTPSGHQTIIQYFKKIKGETRVCIEATGVYHFDLAVALSRADGIEVMVINPKAAHNFAKVLMKRSKTDAIDAENLAIYAEKMLFEAWKRPADECISLRATARRIAALGKQKTQTKNQLHALESTLETPKLVIEQTKDLINILEEQIKVLRDSALVLIQQYEELEQAYALITGIKGIAQASAVQILSELMILPKDMTARQWVAHAGLDPRVFDSGSSVSKKPRISKVGNKYIRQALYMPALVASRFDPNIKGYYHHLIDDNGLKKVQAVCAVMRKLLHAIHGMLRTNKEFDGARFYTLPVCTNS

SEQ ID NO: 268837 - protein, 338 aa, unidentified
MKLYAGIDLHSNNSVIAVIDEQDRVVFQKRLPNELERILLALASFKRWLVGVVVESTYNWYWLVDGLMQAGYVVHLANPAAIVQYQGLKYSGDEHDARWLAHLLRLKILREGYIYPREARAVRDLMRRRMQLVQTRSAQLACMHTQFTRSTASSPSSDALKRMLPEELETLLEEPNVASGVRANLEVVGTLNREIARLEREVIEQVRLAGQFAPLLSIPGIGRILALAIMLETGAIERFVKVGNFSSYARCVESKRLSNDKKKGEGNSKCGNKYLAWAFVEAAHFAVRYNPRIKRFYERKAAKTNKIVATKAVAHKLARAAYHVMRERVPFDETRAFA

SEQ ID NO: 268838 - protein, 423 aa, unidentified
MQRVEDSEEIIERIAAIDVGKAEVVVCIRIPDPARPGRRQQEIVHSSTLTPRLLVLADRLVELGVTRVVMEATSDYWKPVFYLLESRGLDPWLVNARDVKHLPGRPKTDRLDAVWLAKVAERQMLRPSFVPPGPIRLLRDLTRYRAGLVKVRTAEKNRVEKLLEDAQIKLSSVVSDIFGVSGREMLAALLAGERRPTVLAQLARTRMRPKIPLLEEAFVGQFTEHHAFLLRLMLARIDEAGADIAALEDRIRQLVAPFATVVTRLDEIPGVGATAAWTVIAEIGLDMSRFPTPAHLSSWARFAPGVNQSAGKTKGRGATGHGNRYLGQALGEAAVAAAHTHTFLGDRFRRLARRRGGPRATVAVGRSILVIIWHLLSQPDARYHDLGPDYTRRRADPNRATRNHVQHLEALGYTVTLTPVALA

SEQ ID NO: 268839 - protein, 477 aa, unidentified
MAASNKKNVMGAAAPLAGPAQPGGEATEVAEERVEVVTYAAAIDVAKASGMVCTRVPGSRSDRKRQTVWQVDATYASVIALMDHLRCEGIQRLVLESTSDYWRCWYYLAEAAGLEVWLVNAKDVKHLPGRGKSDRKDCVWLCKLNERGMLRRSFVPPEEIRDLRALTRTRSRLAHDQVRHQNRVEKVLEDALLKISGVISDLFGTSGRRFLDALVAGERSPAALAALGDRRLKASPQRLADALTGRFRDIHAFEIATHLRLIDTINDEIARLDERIEQQLAAVAGVAPACTACGLIGGGHAPGCASDGTPVLSLIERLDEITGVGVRNAQVIIAELGTDMSVFPTAGHAAAWARLTPRTFQSGNTTRPGRTGKGDPYLRGALGQSVMAAARTDTRIGEQYRRTARRRGKQKGIVAVSRVICEIAWLLISDRGARFTDLGPDYYSIRSPHSQTRSRIREIERLNPGMKVTLTPAATAA

SEQ ID NO: 268840 - protein, 453 aa, unidentified
MAKTKKPRKHRKLERSLPEMRPNAGGIDIGATEVFVAVPADRDTDSVRSFSTFTQDLHELADWLQRCRVDTVAMESTGVYWIPLFQILEARDIDVHLVNAQHVHHVPGRKSDVLDCQWLQYLHSVGLLKASFRPEQAVCEIRSLMRHRQNLVEMSGVHVQHMHKSLDQMNLQIHHVISDITGVTGLAIVDAIVAGKTNPKELAQLRDYRIKASAETVTKSLVGDYRPEHIFTLKQSLTAYRHYQQLIADCDQEIHQRIQTFHKDDGPIAPALVDSSNSKTATPPKFDLNSNLERIFGVDLTRIPGFDSRLIQIIFSELGVDLLSKFATGDRFCSWLNLCPKDGSSAGRRIRGPKIRTKNRVTQCFRLAAHCLHHNQSYLGDYYRSQRARHGAVKAIKNVAHKLARIFFHVVTTGQPYDETVFAKLDACNQKRRLHKLQSQAKQMGYSLMPANA

SEQ ID NO: 268841 - protein, 421 aa, unidentified
MTQPSHDTFAAFIGIDWADAKHDGCLQAAGTAKREHFQLVHTPEAIDAWVTTLRTRFNGQPVAVCLELDKGPLVSALRKYDFLVLFPVNPLMLARYREAFTPSRAKDDPTDAELQLELLLTHRDKLHPLTPQSPTMRALAQLVEHRRRVVGDKVRITNRLTSTLKNYFPHVLHWFQDKDTPIFCDFLSHWPTLKAVQLARRATLETFFRDHHVRAPEVIANRIQAIKAAIPLTTDDGVIAPNTLLVQALVAQLRVTLQAIADFDTAIAQRAQSHPDFPLFQALPGAGPVFASRLLVAFGEQRERYPSATALQKYAGIAPVTERSGKKSWVHWRLQCPKFLRQTFVEWAAESIRHAFWAQVYYQQQRDKGKTHQAAVRALAFKWIRILYRCWQERTSYDESVYLRALKRRGSSLLHHLAKEA

SEQ ID NO: 268842 - protein, 316 aa, unidentified
MRFYTKQHRHYCGIDLHARTMYVCVLDQAGQVLVHENLRASPEELLAAVAPYRDELVLAVECIFTWYWVADLCAQEGIAFVLGHALYMKAIHGGKAKNDRIDALKIATLLRGGMLPQAYVYPAGMRATRDLLRRRLHIVRKRGQLLAHIQNTSHQYNLPPLGKRIAYPSNREGVAEHFEDRVVRKSIAVDLALLERYDALVTDLESYLVRQAKQHDPQAFQRLRSIPGVGKVLALTILYEIHDVRRFDRVQQFASYARLVKCAKESAGKKHGTSGAKMGNVHLKWAFSEAAVLFVRHCTEGKKLLVRATGCGGLAA

SEQ ID NO: 268843 - protein, 347 aa, unidentified
MRFYTQQHGYYCGIDLHARTMYVCIISQNGTVLVEKNIRARPGPFLELIAPYRDDLVVAVECIFTWYWLADLCHEKGIHFVLGHALYMKAIHGGKAKNDRIDAGKIAALLRGGMIPQAYVYPSPMRSTRDLLRRRLHLVRHRARLLAHIQNTNHQCNHDDFRKKLTYKANREGVAEQFDDPSMRKSVEVDLALIAHYDGIIRDLELFIVRMAKQHDADMFHRLRSITGVGKILALTILYEVHDIARFETVQQFASYSRLVKCSRESAGKRMGTGGAKIGNVHLKWAFSEAAVLYLRKNPVGQKYLARLTRKHGKGKALSILAHKLGRATYFVMTRSRNFDEKKFLAA

SEQ ID NO: 268844 - protein, 352 aa, unidentified
MNKLKYIGMDVHKAMTVIAVLDSTGKVLAEAIIETKESTILDFFKSQRGTLHVGFEEGTQAAWLYDLLQPRVANVVVCNPRKIVRQGNKDDKVDAKLLAELLRTGALKPIYHGEKSTRAVKDLTRSYLSIVADGTRIKNRLKSLFRGRGIECRGAGVYSPDERKDWLAKLDSAAVCSRALRLWEQLDLVERLSEEAAKELVAEARKHAATKILRTVPGIGPIRAAVILGVANTPHRFRTKRQFWAYCGLAVVTETSAQYEMVNGRVRKSKKKPLLRGLNDNYNRALKGVFKSAAKTVAAGLWKSRFEAMVANGTPESLARVTLARKIAAITLAVWKKGERYDHKKLKTMHAA

SEQ ID NO: 268845 - protein, 462 aa, unidentified
MKNKPSPERAHKRLTKHLEQINLYAAGIDIGSESHYVAVPEGLGDEPVRCFPCFTGDLESLADWLVQIGIQTVAMESTGIYWIPCFEILEERGLEVLLVNARHVKNVTGRKSDVLDCQWLQQLHTYGLLAGAFRPQEQVTALRAYMRQRGTLVRYAGSHIQHMQKALRQMNLLLDNVVTDITGKTGMTIIRAIMKGERDPNRLAAYRDPRCKKSEQEIAQSLKGHYREEHLFALRQSVELYDTYQAKITACDEAIEQQLNHFDAQGDLEQLPVSKKKQAANAPAFDVRGELYRMCGVDLTAIDGVSDITALKVLSEIGTDMSRWKSEKHFASWMGLSPGNKVSGGKILSSKTKPTNNRAAAALRMAAFTLSNSRSALGAYYRRMRSRHGSPKAITATAHKLARLIYSMLKHGTEYVDQGQDYYEQQYQDRIMKNLKRRAAQMGFALVPSSGENRLVSENSIA

SEQ ID NO: 268846 - protein, 402 aa, unidentified
MWYAGIDWANDHHDALVIDEKGHQVGSLRIDHSPSGLSKLNTFLEQVIGSQPKDQMACIIETTHGLLIAALLEAGWPVYPVNPRTVDRRRSASGAKTDTIDAYLLAKTGRADLADLHRLTPDSEKIAELKLLTRDQDALIQMQTRLVNQLTACLKAYYPVALELFAKLQQKSTLRFLQTYPTPQAAMAVSAEQIQEVLRQAKHSNPTPVAVKIFERLHQPHLQADAVITRTKSRLMLVSQLVPLIEQIAQYDKEIETLFLTHEDHEIFASLPRAGKRLAPRLLAEIGDDRKRYQDASSLQALGGTSPVLFQSGMYSKAHRRFGCIKPLRNALHQFAWQTTQSEAWARDYYQRKRAEGKSHTVAVRALANVWVRIIFAMWVHHQCYESATFAQAQRQHARKVA

SEQ ID NO: 268847 - protein, 373 aa, unidentified
MKKHIYIGMDVHKEDNVIAVADGHRGGEVREYGKITNDLRSLKRLVERLKKAHPDAVQHYAYEAGPCGFVIYRQMVKWKLDCIVVPPSNIPKRPGERVKTDRRDAIKLARLHRAGELSEVNVPDAEDESIRDLCRARTDARKAVNAWKQRLKSFLLRNGYRYKGEATWSDKHLAYLRELVMPHPAHKFILEEYLVAIDEGLERMSRMEERIQALTVDWRWMPVVKALMCMRGIAWLGATVLVSELGDLGRFDHPRKLMAYLGLVSSENTTGTRRRQGSITKAGNTHTRYFLVESAQHCGLPPKVSKILTARQQGQPLNIRKKAWDAQLRLNKRYWALMTRGVKRNIALVAVAREMVGFIWDIYQMAEPLPKKA

SEQ ID NO: 268848 - protein, 420 aa, unidentified
MKVVYQTCCGVDVHKSFLVATIIKTTSGVEPSYQKKRFSTFNNSILQFKEWLISNHCLDICMESTGKYWVPVFNLLEDEINVTIANPKWVKAVKGNKDDTKDSKWIGDLFRLGLVPGSFIPAKPIRILREFTRYRYKLTSCRSSEKNRYQNALTVCNVALDSVVSDIFGKSATSVIDYLIEQPNNSINHEEIASRLLRSLKKKSDSVIESIEGYQRADSQKYRMRLVRAHMDYITSTINDIDSMINSLIKPYENAVQLLCTIPGVDRNSAVTIISEIGNDMTQFSSSKRLCCWAGLTPGNNESAGKKKSVRITRAGVYLKPALVQCAHAAVKSDKSPYYKQKYERIMKRRGKKRAIIAIARMILTAVYHMLSTGETWNPSDLFKIDMPEPLKEKQKEKAIKQAKKLLIREGVLTESQLAS

SEQ ID NO: 268849 - protein, 340 aa, unidentified
MTITTIGIDLAKNVFAVHGVDQNGKTVLVKSRVIRAALPGLIAGLPLCVIGMEACSGAHYWARLFRQYGNEPRLMAAKFVSPYRMAGKSGKNDAADAQAICEAVRRPHMRFVPVKDESRQAMQCLHRPQQGFIEEKIATYNRLRGLISEFGVIAPQGTDALRHIVSAQKNSLPLQVQQCVDDLLEHVDRIEANITEYDQILPRIAKTDHRSQRLMKLKGVGPTTTCALVACIGNAHDFKNGRQLAAWLGLIPSQYSSGRKSKPGRITKAGDSYLRTLLVQGARSVLIGAEKRTDSFSRWVCSLVERRGYWRAVVAIAAKNARLCWASLHYGDDFRLYSAS

SEQ ID NO: 268850 - protein, 324 aa, unidentified
MDAWIGIDVSKDTLDVCLLRPAGKFKDREFDNDPAGFQKLLGWANSLVGPDRHFCMEATGAYSHAIASFLVEKGELVSVENPARIKYFGMGEGILNKTDKVDARVIAKYTKEKNPEPWRLSRPEVLHLTALMRRVQVVETHLGQERNRLGEPVIDPEVACSINTIVKALEQEIHRLEAQVREHIDQHPDLRKDKELLTSIKGIGEKLAHWIMAEMPDPGQFQSAKSASAYAGLSPMEYTSGRTVKRRTRISKAGNNNLRRALYMPAIAASRYNPIVADLYKRLIERGKCKMVALCAAMRKLLMLAYGVLKTRQPFNPEFANSKA

SEQ ID NO: 268851 - protein, 410 aa, unidentified
MYPLYVGIDVSSKNNVIHFMKPDGSKHSQFSVKNSLDGARELSKRIVSAMNSEALTDLIIGLEATSVYGEHITMFLREDASLASYNHKVFVLNPKQVNKFKAAYPDLPKNDYVDAFIIADALRFGRINKDVYTDDYRYIALRNLTRARYFAVQNLTREKQRFLNYLFMKYSSFTQEKVFSNTFGTTAISVFEEFDSPDELAYMDLHDLTDYIIKKGKNRFDDPEAVAKAIQKAARSSYRLPKTVNDSVNQVLSLSISSIRALESQIKEFDKAIAEQLALIPNTLQSIKGIGPVYAAGIVAEIGDINRFSNQAALAKYAGLAWTQHQSGNFESEYTRQIQSGNRYLKYYLCEAVLSLVRCDTEYKRFYQLKYNEVNRYKHKRALALTARKFVRLVFRLLKDNRLYIPAVQK

SEQ ID NO: 268852 - protein, 422 aa, unidentified
MNDVLKLAAFVGIDWADTEHAVCLRIEDGSKVETCVLAQKPEDLTAWAVGLKERFGDCPVGICLEQSRGALIYALMQYPWLVLYPINPKSLARFRESLYPSRAKSDPADAVLLSEFLAKHQDRLRPWRAEDVETRKLRLLLENRETLVDDRTRLSNRLRDALKLYFPQSLEWGGPLTKPMSWAFLLKWSALQDVQKVNKKKLLNFFYDHHVRRGDQIDGLYEQVQSAKALVTDAALVDTSVLMVRSLCQQLQTIQVYIDQHDAEIEALYASHPEKSLFDNLPGAGDVIGPRLVAAFGRDRERYEDAGEVQKISGVAPVVEASGKATWTHWRWAAPVFLRQTFHEFAAHSIPRCAWAKAFYKLQRQRGKGHNAAVRSLAFKWIRILFRCWKNNVPYDENRYVQQLIAHSSPLLKFLIQQPLEA

SEQ ID NO: 268853 - protein, 406 aa, unidentified
MKTPAGERNVTGGVDTHLDFHVAAVLDSTSARLLDTGSFPATSDGYVELHAWMTSFGELDDVGIESTGSYGAGLCRHLAAESVSVIEVNRPDRSERRFNGKDDTIDAEAAARAVLSGKATTTPKSGDGIVAAIRSLEVVYHSAVKDRTRAINQFKALLVTAPTGLRERLERETLRRQLDLARRFNNAHPDPVERQIRFAFKTLARRIGFLDEQTKELEERINTLTAEANPTLVGISGVGPHVAAQLLSTAGDNPDRIRSEAAFAKLCGACPVPASSGKTSRHRLNRGGDRRANRALFTIVLVRMRHDPRTKAYVSRRTSEGKTRKEIMRCLKRFVAREIYHALTKPDPDLITGPQIRGLRTAAGITLTELATGLGRPPIQISRIERGLDHNTTLANQANTWLQTTA

SEQ ID NO: 268854 - protein, 308 aa, unidentified
MHYLYYVGLDVSKETFDASLVAFEDANEMAHRKFANSRKGICSCLHWVEKRHGIRLVDVIFCAEDMGSYISEMAVCASDRTLNFNFSLISPLVIKYSMGIARGKTDRVDARRIAEYAITHYRKIALYLPAEKELCQLRTWLILRAHLAKQRVAKLVLLEKLDYKEKFADVSIQRSMLQEEIAYAETHMKTIEREMKELIAADSNICRNYKLLTSIKGVGPITAIVMLCSTLNFTKITDHRKFACYCGLAPFEHSSGTSVRGGCHTSSMANRDIKVQLNRRALIAIRCDPQLKAFTNAKWLKVNINSAS

SEQ ID NO: 268855 - protein, 375 aa, unidentified
MATIARLGIDTSKSLFQLHGVDEREEVVLRKQVRRGQFLGFVAKLAPTKIGVEACGASHYWARQLQALGHEVVLLPPQHVKPYVGRNKNDKIDAAAICEAMSRPRVRERFVAVKSAEQSAAQMLLGTRDGLLHRRTQLSNTIRGHAAEFGLVTPKGLAHIKPLLERIAADDTVPALAKELFATLGEEFAELGPRIARLDKKLKAFQRSDELCRRLVEVPAVGPVIASSMVVKIGNPAAFRSGRRCAAWLGLTPRDHSTAGKMRHGGITRAGDEGLRAALVSGATAYIQQVKRGRTRPSPWLAQLLKRKPEKLAAVALANKTARIAWKLMVSGERYDRARAEAREGLGATQHRGSTPSPSLHPHTADQGASTMTVA

SEQ ID NO: 268856 - protein, 424 aa, unidentified
MKVTYKTCCGVDVHKSFLVATIITTTGGIEPSYQKKRYSTFNNSILEFKQWLLDNDCHDLCMESTGKYWIPVFNLLEDEINITIANPKWVKAVKGNKDDTKDSKWIGDLFRLGLVKGSYIPCKKIRILREFTRYRYKIVSCRSSEKNRYQNALTVCNVALDSVVSDIFGKSSTSIIDYLLEQSGNSINHEEIASKLLKSLKSKEDAVIESIEGYQMTDSQKYRMHLVRAHMDYITAEINDVDREIEKLISSDPDFENAIQFLMTIPGVKRDSAITVISEIGIDMTQFSSSKRLCCWAGLTPGSNESGGKKKSVRVTRAGVYLKPALVQCAHAAVKSEKSPYYKKKYESLMKRRGKKRAIVAIARMILTAIYQMLSTGESWNPSDLYKIDIPEALLEKQKAKAIKQAMKLLQREGLYPPPEPIAS

SEQ ID NO: 268857 - protein, 420 aa, unidentified
MKAQDTLCPYTVTIGIDWADSKHDVFERYLDGSICQHQIASAPEAVREWLWALRSRAKGGRVAIGLETSRGPLFHSLSQHVDWIDIFPINPQSLARYRQAFYPSRAKDDPVDSQLLEELIRSHPDRLRIYRPGPEMERKLDLLCQQRRKVIGMAVELENQLRATLKEYFPLAIDLCASNGLRNKLALDFLQRWPTYALLMKARPQTLRSFYYAHNARNQALIEARLARFSSSVPLTEDPAVIEPLSIVAKMLVCAIRAIERTVEQLQDKIATLFGQHPDHLLFENLPGAGKNLAPRLLCVFGSDRSRWPDAIAIQKYSGIAPVIERSGKSSWVHRRLFRPKFLCQTFHEFAGQSIHQSKWAAAFYERQRGKGKSHTCAIRALAFKWIRIIFRCWKSRKSYDETLYLRSIENQYKRSLKII

SEQ ID NO: 268858 - protein, 419 aa, unidentified
MSQEDLEEIQYACACGLDVHFASVSACLIKPGSAKRKKVEERSFPTNLSGLKQLNAWLTESGCEAVGMEATGVYWMPVYAILEGSFKLLVANPQHIKALQGQKTDRKDARWIANHTRFGRIKPSFVPPPEFRDARKLARFRRQIINARTGIRNEVQRTLAESGITLAALVSDVFGASGMDILEALAQGKSIHEVLPTCLRRQLKQKLAPIAAALEAPLGQTSRFILAKQLERLERVEQDLADTEAELFEILKPHAAKLRLLETIPGIARISAAIILAEIGVDMTAWPTEKHFSVWAGVAPGCRETGGKAKNAPVRKGNPYLCSILMECAGPAVLSKTCHLRPRYYRFCSQLGSKKKARMAIAHKLAVILYRNLGAGRTYQEPTPRPPSERTKRKIMQKRVADLERLGFKVSLEPKEAPL

SEQ ID NO: 268859 - protein, 352 aa, unidentified
MRWVGLDLHKHYITACAVDDAGDVVAEHRRLPADVGPLVAWLQAVGDAVTVAMEATLYWAWLHDQLSAAGIAAVAAHPYQVKLIWQARCKTDPIDARKLAELLRTNLLPVIWVPDTEVRARRKLLRGRAYLVRVRTQFKNRIHGQLTAENRQTTVTDLYGRAGRAWLATVALSPAARVQVDLLLELVDALDVRIHSLDDRVKRLVHGDPVAQRLQTWPGIGTFGAALLLAEIGSMHRFRSAHELAAYAGLTPSTQSSGDKTRHGSVGRAGSPWLKWILIEIVQSLKLAPGPVGQQYQKLLRSKGKAKATVAAARKLCCYLYWCLKEEWSYEEWLQQHNKLEVRPRQALGSAA

SEQ ID NO: 268860 - protein, 364 aa, unidentified
MKAEKRRFVGIDLGKREYTMAIIGTNGKMSIHHGKTSTQGRQALYLKLEAKDKVALEAGNLAFIMAREIQERVGSCVRVLNSGKLPFIWDAPTKTDREDAMKLAHLIEERRDEKLPIVPLPSEEEMERRKVLANYSREMKGRVKNINLLHAMFLHQGHTTIARRDLATAEKRQEAVKLLKGQELEEASWILKHLELYEQRIKELKGKITKEAKKDEGMKVLQSIAGVGPVVAYAFVAHVGDGSRFSTGKQVSNYLGFVPRLDYSGTIQRQGHISKRGNGYLRGLLVQAAWSTVRSKKGGALKERYVYKTKEKGYSKKKTIVSIGRRLAELMYSVLRSKTKYEPRPWAGVREDTAAALAEKALCA

SEQ ID NO: 268861 - protein, 328 aa, unidentified
MFIIGIDVSKSKLDCALIDNSNHEKFKFKVVSNSEEGFVTLIAWLAKHTKSTVSEHHFFMEATGVYHEKCAYWLFDSGAKVSVVNPARVKYYGQSLGVRSKNDKKDSVVLARYGLTQKPIAWQPEAPEIRILKALSSRLDAIEKDILREKNRYEKSSINTCSDLVLISIETLLVALNNEKVHLEKLIDNHISRHEYLKNNYALLQTIPGVGPVVSRYMVIVLGSRTFQSASQCAAYIGLVPIQNESGSSLRGRSRISKAGNPVIRAKLYMAAISALQYNPDIKKQNQRLLKNGKSKMSALCAAMRKLVQICFGVIKHQQPYQVQANLL

SEQ ID NO: 268862 - protein, 343 aa, unidentified
MKISRVGVDLAKNVFQLHGVDRNGETVLKRRLSRDKWISVLVSSAEPGCEIGMEACGGAHHWARLLMTKGFRVKLIPPQFVTPYVKSNKNDAKDAEAICEAMSRPTMHFVKAKTVEQQDIQATHRIRSELMCHRTAKANQIRGLVTEYGLVAPLQMTSLRVAIPRWLEDAGNGLTDRFRALLHGLWDDLLTLDQRIETLDGDIESIAKSDPVAQRLQQLRGVGPLVATALIATVGNGDQFTKGRQMAASLGLTPRQHSSGGKDRLLGISKRGDAYLRTILIHGARSVVATARHKEDRLSRWVTGLAERRHPNVAAVALANKTVRMAWAMMNRDADYDPECAVS

SEQ ID NO: 268863 - protein, 355 aa, unidentified
MKVTHILGIDISKDKFDVCLQPVGMEDTPGHHAAFDNTPAGFKKLRRWLAQQQAPYVHACLEATSRYGDALALFLHQQSHTVSIVNPRRIHHYAKSLLVRTQHDALDARIIARFCATQKTTAWQPTPPALRQLQDLTRLRHFLVSQNQRLQNRAHTESPALRRFLQRHLGQLEKSIAELEAQIAEHLQAHASLAQQVALVDSIAGIGPVTAAAAVAELPPIERLEHAGQAVALAGLDPQKKDSGSSVRGVAHLSKMGSRPLRAALYMAAVSAQTHNPIVRALAERLRAKGKTGKTVVCAAMRKLMRLIFGVLKTGKPFDPNYPAPARAVPCERARASGGDELPSLQLASPPVATA

SEQ ID NO: 268864 - protein, 343 aa, unidentified
MQTITTIGLDIAKSVFQVHGIDAAGRVVIRRQLKRRHVLAFFQKLSPCLVGIEACGSAHHWSRELQALGHTVRLMPPAYVKPYVKRQKNDAADAEAICEAVTRANMRFVPTKTPEQQSGLVLHRTRHLFIRQQTSVINAIRAHLAEFGIVAPVGRHGVEELLTVVADPNDRRVPEMARACLLALGTQLRRMKEQILEFDRLIRAWHRSNEMSMRLEGAPGVGPVLATALVAAVADAKSFRSGRNFSAWIGMVPKQHSSGGKNRLGNISKQGDRYLRGLFVAGALSVIRYAKIHGTKHRPWLTALLARRPTKVVAIALANKIARMVWAMMVRGERYKEPVALAR

SEQ ID NO: 268865 - protein, 334 aa, unidentified
MQNITLIGIDLGKHSFHIHCQDKSGKALLRKKFTRTKLMQFLATCPPSVVVMEACAGAHFMARCISDFGHETKLISPQFVRPFVKSNKNDFVDAEAICEAASRPSMRFVQPRTETLQAMRALHRVRESLIRDKVKTTNQIHGFLLEFGISLPIGDAVIKRLSLVLAEHEIPEYLSRLLVRLHTHYFYLVEQIAELESELSQSINADDTAQRIMTIPGVGPITASLLSSQLGDGKQFSCSRDFAASTGLVPRQYSTGGKSTLLGISKRGDKNLRRLLVQCARSFIMRLERKHGKLAEWVREQLNKKHSNVVTCALANKLARIAWAITTQKKEYQA

SEQ ID NO: 268866 - protein, 424 aa, unidentified
MKTNSDYAAYVGLDWADRVHQVCLRAAGSTRDEQTELPNTPEALHGWAYGLRARFPAGPIAVAVEQTRGPVIYALNQHAHLVLFPLNPAMAAKYREAAKAASGTKNDPLDASLQCELVRLHRDWLRPLVPLPAATRELQLLVEARRGWVDQRTALCNQLKAALKGYYPQALTLVGEDVGTPLAWAFLRRWPTLAAVQRTRPQTLRDFYHVQHVRSAELIAQRVALIPTATALTDDAAVLAALPVLVAALVGQLEALQPVLVDYDKRIAACFIRQSDATLFTSFPGAGSQLAPRLLVAFGPDRGRYQRAQQLQQYSGVAPVKTQSGHTCTTHWRWHCPKFLRQSFHEFARCSIRQSVWARAFYQLQIEHGKKQHQALRALAFKWQRVMFRCWQTGQPYDEAVYLAALRQHGSPLVARIEALATAA

SEQ ID NO: 268867 - protein, 353 aa, unidentified
MASQQNSFANVATIGIDIGKTTFHLIGQDRRGAIIMRAKLSRTQLMRRLVNVPQCVIGMEPCAGAHHIARRLAELGHDVRLVPAQYVKPFLKGHKNDYRDAEAIAEAVQRPTMDFVAIKTPEQCDLLSLHRVRSRLVRQRTGTINQIRGLLLERGITAPRGPAPLRKTLNEIFAEPPADLSSRMLCLIGDLALDWRTLDARVEAVSREIEMLAENDEACQRLMTIPGIGVIISSAVVGAIGNGGAFKQGRDFAAWLGLVPKQDSTGGKTKLGGLSKRGNKYLRTLFVQAAHIVLIRKPAAAQRALWSWIERASQRLPHRNLLAIALANKLARIAWAVLARDHDYHPTANTDAA

SEQ ID NO: 268868 - protein, 412 aa, unidentified
MLKIVYPICCGIDVHKKFLVACIAFTNDKGVTTYKSRRFSTFTNNLRKLSEWLSSNSCTHVCMESTGKYWVPVYNILEATCKITLAHPKYVKAIRGKKTDKKDAKWIADLFKHDLVAGSFMPPFPIRQLRDLMRYRFKLTNFSSSEKNRIQNCLTVSNIQLANVVSDTFGKSSMRIIDYLLENPDDKDFDFVPLLHSSMLHKVDDIRLALDGMITPEQRQKMNIILQHYDGLEKCKSNLKSLILSLSEPYAKERTLVSTVPGIKNPFSAIAIISEIGADMSVFPTAKHLCSWAGVTPQNNESAGKKHSVRISRAGVYIKPLLVQCANAVVKSDKHPEIKGRYLSIKKRRGHKRAIIAIARMLLTAIYHILKKAEPYNPELYKKAQPFPASREITVEQAILIARRHGYSVVKD

SEQ ID NO: 268869 - protein, 425 aa, unidentified
MGVYCGVDWAEGHHDIALVDDEGRLVGKRRIVESLDGLAELTAMLAAAGDSAAEPIPVAIETPRGLLVAALRATGRPIYPINPLAVARYRERTSVSGKKSDHVDAMALANILRTDAHLHRMLPDDTSLARSITVLARAYQDAVWRRTKTVQELRARLREYYPGFLAAFAAGTGSGGGLSTTRLASRDARAVLAIAPSPAEGLRLSTARVEKALRRAGRQRRIAAVAGQVVAALRVPQLRQDPVVEHAMRIEALALLAVLDAVCASVADLETALVAAFTEHPDHEIITSFPGLADVSGAIVLAEIGDDRSRFADDRALQAFAGSAPVTRASGKSRTVTRRRTKNNRLASIGYSWAFTASARPSPAREHYLRRRDRGDGHPAALRHLFNRMLGQLFHCLQTGQPYDPVKAYPHSTTITGAPATTVAA

SEQ ID NO: 268870 - protein, 294 aa, unidentified
MTNDIQFSSFCGIDIAKSVMQVYKVSSDGVVSNKAVKRADFLNEFRNIPPALIGMEACGGSQHWARELQSLGHTVRLMPPKLVKPYVTGLKNDKNDARGIYTALEMSVREVPVKSAAIRDLALLQTMRAKRQREKVAKINHIRGILTEYGLVMGKSLNAFLAKAGSLIVELKDRADVSPYVVSELIALFEEVKEAIAKIKELETNIESIAKTLKQYDLFRSAPGVGPITAATMLVLLCNPAVFKNGREFAAYIGLAPKSSGSGGKNFVTHIPKKCECNNAVSYTHLTLPTNSRV

SEQ ID NO: 268871 - protein, 342 aa, unidentified
MEYYVGLDVSLKQTAICVVDGDCEVVWQGCADTHPEMILSALDRWVGEIARLGLETGSITPWLARALKARGLPVIVMDARRASDAMKARPVKTDRADARALAEMLQTGWYWEVYLKSEESHRRKALLSARDQLVRNKRSFFGQIRGMLRPFGIRLGGRMGTSKFDQAARAATRHDDILYLSVNALLEALAAIESQIAVLDKAVGRLCDRSAACWRLMTVPGVGPITALAFEAAIEDPARFKRSRDVGAYLGLTPRRYQSGDRDVSGGISKQGDAMARHCLYEAANCILTTWSGRSALKSWGLKLVRRVGAKKARVAVARKLACLLLRLWKDNTPYEGDLRTA

SEQ ID NO: 268872 - protein, 366 aa, unidentified
MKKISTVQVFGNEIFKEQKLTSGVDLGDRWSFYCVLDEAGKIILEQKVSTTTEAMKETFERIPRSLMALETGTHSPWVSRLLKELGHEVLVAHAQKVELISKSNRKDDRHDARTLARLARIDPELLGPVRHRSAKAQIHLTVIRARAELVRARTGLVNAARGLVKSYGERLPKCGTKQVSRELAAELSAELREVLEPLLNEIESLNERIKEYDARMEKIARESYPQVELLKQVKGVGTQIALTYVLTLDDPHRFRRSRDAGCFLGLCPGRRDSGQSQPQMHISKEGDRYLRTMLVQGAHYILGPFGEDSDLRRWGLRLAERGGKNAKKRAVVAVARKLGVLLHRLWVSAEVYEPLRNSHKAMRAVA

SEQ ID NO: 268873 - protein, 331 aa, unidentified
MKNKLIVGIDVSKNTLDVSFYKSNISFQVTNNPEGFVKLLQHSVQISGKPRDLLHFCFENTGCYCRQLCVFLQDAGVSFSTLDALDLKRSMGLTRGKSDKKDASKIAQYAYRRKEDLICSKMPAPSLDQLKALLSHRELLIKHRTALKNANKGFYDCYTETEYKFIKDAQIRIIHLLSDEINQVETQILSLIKANPALYKNYNLLLSIKGIGKILAAYFISITHNFTRFENPRKFACYAGIAPFEYSSGSSVKGRTKVHPCANKQIKSLLNMAAMAAIQLHGEYQLYYSRRLAIGKNKMSTLNIIRNKLVFRAFAIVRRGTPYVDLSRFAA

SEQ ID NO: 268874 - protein, 340 aa, unidentified
MELYTGFDLHANNSYVGVINADGKREARKRLPNDIGQILQFLEPYKAQMVGIVVESTYNWYWLVDGLMEAGYQVHLANTTAIQKYSGMKHSDDKDDAFWLAEMLRLKILPTGHIYPKDERPIRDLLRKRGHLVKLRTSLILSLQNIIDRNCGTRISVNDIKRLKENKVTPYMEGNQDLEFVGQVSKDTIDFLSAKIRALESFVEDRAKLNDSYENLLTIPGVGKILGLTIMLETGSIDRFEKVGNYASYSRKVSTKWTSNEKKKGRGNKKNGNKYLAWAFSEAAEFARRYDQQARGYYNRKLQQTNFMVAHNALAHKLARAAYHVMKEQTPFIPARLFAS

SEQ ID NO: 268875 - protein, 388 aa, unidentified
MQTVADRPEAPTAIRTNLGAIFVSLELSRSTWLITSLSPGGGEKMSKQVVRGGDVAELLERFARLREKARARTGKVFPFVVIQEAGLDGFWIDRALQNEGIESHVVDPASIATSRRRRRAKTDGIDGEALVRALLAYKRGEPRVCAMVKAPTPEEEDRRRLCRERKVLIGERVQHVNRVKGLLFSQGISGYEPLRRDRRERLDTLQTGDGRLLPDHLKAQVCRELDRLELLLEQIKAVEAERDVLLAAQQVAAPAPAAMLLDIKGIGPEFAAILWSEGLFRHFDNRRQVASYAGLAPTPWQSGSVDREQGVSKTGNPRLRTTLIQLAWLWLRHQPQSALTLWFEERVRRNGGRLKKTTIVALARKLLVALWKYVTAGVVIEGAVMKRT

SEQ ID NO: 268876 - protein, 448 aa, unidentified
MAVIEGSAAVAVGIDAAVVANHHIVVRRPEAGRPGTVIDDFVVPPTLVGMDRLTKRLASWPGAVAVAEPTSMTWLPLSIALAAAGVELSLVGNRHSARLRSALAGKNKSDPIDAAVLSRAGEFFELCPARIPAVAELALRRAAQRRGKTITDANRCLRRVISQARWAFPDLWNAFAGSRPTALGVLGRWPHLDALARARVSSITEVVAAHTRGVAGVEERAQQIRATARAWAEFWEGHLDLDALGWETAELLADLAAAEARVDRATDQTRRYWEQLWGDDPVLLSVPGMGPVLAPTVRAFLADGAHLDDAKAAQSFVGLNPSNWSSGQMESPSRAITKEGPPVLRLAFYQAANVARTHDPQLAEFYRRLMVERGHCHTKANCAVARKLVARTWATITSGTPYQLRDLDGTPVTRRQATTLAAALAVPDDVRRRTRAHSAATHRARLTR

SEQ ID NO: 268877 - protein, 370 aa, unidentified
MKKDTLFVGLDTDKKHIDVAVAEPLPRGEVRYWGRTANTPASVDRMVKKLGRGGRELVVCYEAGPCGYGLYRQLTGKRGVSCLVVAPSMTPQRPGDRVKTNRRDALKLAKLLRAQELTEVWVPDAAHEAMRDLVRARSSVVSALTRCRQHISSFLLRQGIAYAGKPWTHKHRVWLGTLKFEHAAHRLMFAELLSALDQVQARRDRLTDHIRELVPSWSLAWLVEALQALRGYDLIHAVVVVAELGDPRRFAKPRQLMGFVGLNVSEASSGETVRRGHLTKTGNKRARKALIEAAWTYSRPAATTSKPAAVRLPMAVQQIADKARHRLSRRYRHLLARGKLKQVAIAAVARESLGFIWAIAHAAAPIPAQS

SEQ ID NO: 268878 - protein, 340 aa, unidentified
MLYVGLDVHSKFTVVCVLNADGKVIERQCSRRIDQLLDFLKRLPEFAVCYEASCGYGWLHEALSKLAARVVVAHPGHLALIYRSKRKHDRIDAERLAKLLYLDEVPTVHVPAAEVRAWRELINFRRRLIQTRTRAKNGVRALLRSVGVQPPARPGLWTKRGLDWLKRLEFPQPLSALKRDLLVDEIQNVSGRVLRVERELARFSEDQAAVAQLQSIPGVGLRTAEAMVAFLDDPHRFPNAKAVGAYFGLVPCQDQSGPHNRLGHITRDGAPVVRQLLVEAVWQAVRRSATVQAYFARLERNDPDRKKIAVVGTAHYLARVMWAMLRDGTLWRETVSSAAA

SEQ ID NO: 268879 - protein, 481 aa, unidentified
MGKRKKSTFERLTRGRLNRKQRRELERRLCSNDPGLEVVHANAAGIDVGNESHFVAVAPGRDPEPVREFGSWTMDLERLAHWLKSCGVETVALQATGVYWIALYDVLEQHGMQVYLVNARDTKNLPGRKSDVQESQWLLKLHTYGLLRNSFRPPDEIRCIRTIWRWRDRLVKDAGRHIKHMQKALTTMNVQLANVISDVSGVTGQAVIRAILKGERDPYRLADLRDTRVQASREEMARSLEGNWREDVLFELKQAVDAYDFAQKQIRECDQQLQKYLAILPTQSQAGTDGPKDNSAKRTSHRSRKPKGNMPRFDLQPELKRICGADLTSIDGMDVVTALTILSEIGTTVSQWTDEQHFVSWAGLTPNRDISGGKVIRQRRRPGNNRVGTALRLAASSLLRSQTYLGARFRALRTRLGAPKAIKAMARYLGCLVYRMLTHGQDWVDQGAQAFERKNHQRTISLLQRKAAALGFQLLPVPTNP

SEQ ID NO: 268880 - protein, 306 aa, unidentified
MNTIYIGIDICKLSLDIDSEPFTGQIPNTPAACRRFLKKLPSGIHVLYEATGGYERVLARSLKAAGIDSTRLNPRQVRDFARAKGLLAKTDKIDAEVIRHFGEALTPEPDAEQPDWAEPLASLVGERDHLLGRLIAERNRLKDIHGAEVLRLAKARIQSLERQLNRILILMRRLAEQHEELKHRVQRLCLIKGVGEVSAFAALGHMPELGNLKKGQAAALAGLAPFNRDSGPWRGQRRISAGRPSARRAIYMSALVASRHNPVLKAFYERLLENGKPKKLALIAVMRKLINLFNSLIKYPDFTPAT

SEQ ID NO: 268881 - protein, 357 aa, unidentified
MKKVSTATAQQSRKISERKLTIGLDLGDRNSWYCVLEESGAVVLEQKLSTTPKAMKEVFGGMPRSRIALETGMHSPWVSRLLSELGHEVIVAHARSVRLIGESRKKDDRLDAQTLARLARIDPKLLCPVKHRSAKAQADLTLIRARAGLVRARTALVNTARGLAKSYGERLRGCNVRNMNPEKAEGPLLVALESLSEQIAEYNERIEQLAQQSYPQVGLLKQIKGVGTLIGLTFLLTLEDPHRFRKSRDVGCYLGLQPGRRNSGQSQPQMHISKEGDPYLRTLLVQGAQHILGPFGVDCDLRRWGLKLAERGGKSGKKRAIIATARKLAVLLHHLWVSGEVYEPLHNSSRAVLRTAA

SEQ ID NO: 268882 - protein, 415 aa, unidentified
MEQIFMIKENYIYVGIDLHKETHTAVMIDCYNQKLGEITFPNRPADFPKLVTKVKKCNTDAKEVVYGLENAYGYGRPLAVWLIDKGYFVKDVNTAISHRQAKHRGAMYRKSDSDDAEAIALATLNMLDKLPDACPNDAYWSLGQLVHRRDNIMKQRTRLVNQLHEQLCIAYPSYKSFFNDISRPTALYFWEHYPSKKYLKGKSVEDLRAELVPVSHNKCSTKTCEKILDAVASDKVKNNAYQDARDMVTLSIVSDLQHYDSQLAEVDKMLEQMYKMLGCTLTTIPGVNVITAVKILAEIGDIKRFSNANKLAQFASIAPLHLSSSGKGKDVATKQGNRRLQATIYFLAIQMVQVSSKGTPRNPVVRAYYEKRKAEGKTSQQALICISRRLISVIYGMLKNGTEYRMPVVESAGEK

SEQ ID NO: 268883 - protein, 350 aa, unidentified
MKICTIGIDLGKTVFHLIGLDEHGKVIAKKKCSRSQLLAYTANIPAALIGMEACCGSHHLGAALAVQGHQVRLIPPQFVKPFVKSNKNDYNDAEAIAEAVLRPRMRFVPIKTNDQLDLQALHRVRDRLVRRRTGIINQIRAFLLERGIAFRAGRVYLRSHMAAILEDAELNLSPLLRGLLEQLWEEWKITESRIEEVTDQLEVIADQDTSCKRLQSVPGVGPLVSTALVAAIGNGSAFAKGREFSAWLGLVPRQASTGGKPKLLGISKRGNSYLRRLFIHGARAILIRERKKYAFGGWMTQLESRAHTNVVAVAVANKLARIAWAVLVKGVNYRQTPTLSVSNCEGNMAA

SEQ ID NO: 268884 - protein, 343 aa, unidentified
MEYYAGIDVSLESSSLCVVDATGRIVREAKVASEPEALIAWLQSLGFDLARIGLEAGPLSQWLYAGLKQAGLAAELLETRHVRNAFKIMPVKTDRKDARGIAQLMRMGWFRSVHCKSLPAQETRSLLGARKLLQSKLHDIELSLRGTLRGFGLKVGKTTAKTFEARIRTLVADHPTLTLIAEALLRARAVLLDEFIKLDKKVHALARQDPRARLLTTAPGVGSMVALTYAAAIDDPARFRSSKTVGALFGLTPKKYQSGETDITGRISKTGDAAVRTALYEAANIILERPVKGGWLKAWALGVAKRAGMRKAKVALARKLAVVMHRMLVDGTPFDLNRVTATA

SEQ ID NO: 268885 - protein, 311 aa, unidentified
MFVGVDISKARFDVAIRPTGELFSQPNSPAGITEMVQHLQGLGPTLVVLEATGGLEQLLVIALAECGLPVVVVNARQVRDFARATGRLAKTDKLDAMALALFAEAVRPQLRPLPDAAQRALGALVARRAQLVEMTVAERNRLHASHDPAVREDIQSHLAFLEGRLSQMDRELLEAIVANSALKTRFDLMVSAPGVGKVLAFTLLSELPELGRLNRRQIAALVGVAPLNRDSGQLRGHRGIWGGRASVRRALYMAAVAALRWNPVVSRLYRRLVAAGKPVKVALVACMRKLLVILNAMLRSGTSWMPRAAVA

SEQ ID NO: 268886 - protein, 442 aa, unidentified
MKKRSLRKKQMKLPKHLEHINRYAAGIDIGSKSHFVAVPEGTDEQPVREFSTFTADLERLAEWLISCGITTVAMESTGVYWIPVFEILESHGLEVKLVNARHVKNVPGRKSDVLDCQWLCQLHTYGLLHGAFRPADEVCTLRAYVRQRSTLINSCASYIQRMQKALAQMNIQLHNVVTDITGATGMRIIKAILNGERNPDTLAAMRDPRCKNSSYTIARSLKGNYRPEHLFSLQQAFELYEIYQTKIADCDRQILEQLKSFDDSTNNMPPTTVDDALVRMSGVDLTAIDGIDTTTALKIISEIGTDMSRFKSAKHFASWLGLSPGTKVSGGKVLSSATRQVANKAAAALRMAAFTLFNSKSSLGAYLRRQRARLGTPKAITATAHKLARLIYAMLTHGTAYVDAGQEYYEERYRVRVIQNLKKRAHEMGFELVNIQKEITAV

SEQ ID NO: 268887 - protein, 340 aa, unidentified
MNVTTIGIDLAKSVFQVHGVDAAGQVTVTKKLRRAEVIKIFQAIPACLVGMEACATAHFSAREISALGQQVRLMPPSYAKAYLRRQKNDAADAEAICEAVTRPTMRFVPIKSAERQGVLVLHRTRELLVRQRTMLINAIRGHCAEFGIIAPQGARLADELVKHIRQAEPAELPELARSALLRLAEQLDTLAAEIHGLERRLLVWHRQDQASQRLATIPGIGIITATALSAAVTDPGLFRSGREFAAFLGLVPRQNSSGGKDRLGRISKMGDAFLRKLLVVGATSVIRRARTGASASASWVNALLERRPTRVVTVAMANKNARIAWAVLKRGEVYRPPVTV

SEQ ID NO: 268888 - protein, 360 aa, unidentified
MDGSKERPPVTAGLDLGDKYSYLCLVDTDGGKVIEEGRVRTTPEALRRRFASERPMRVAIEAGTHSPWASRVLEECGHKVLVANARKLRLIYANKQKTDEVDAENLARLARLDPKLLYPLKHRGEDSQAHMAIIRSREALVGCRTQLVNHVRGAVKSFGGRLPKCPARSFHKKAAEHIPEALMPALGPILETIASLTERIHEYERQLETICQEHYPETELLRQVEGIGTLTALTFVLTLEDPHRFEKSRSVGAYLGLVPARNQSGDRDPQRRISKEGDEMLRKLLVGSAHYILGPFGSDSDLRRHGEKIASRGGKNSKKRAVVAVARKLAVLLHSLWVSGEVYDPLYNTHRRQELEEGAA

SEQ ID NO: 268889 - protein, 339 aa, unidentified
MAIYAGIDLHSNSNFLSVVDGAGKIIEKRKLANDVQAILHPLAAYRDQLQGIAIESTFNWYWIVDALMDEGYQVHLANPAAIQKYSGLKHSDDASDAAWLAEMLRLDVPPEGYIYPKAERPIRDLLRKRGHLVRLRTSLITSLQGIVSRDNGHSLPGRMIKQLKTNHVAPLCAANEALALCGEVSKDTIDYLGRQIKKIEKQAEERIELRPTYKALLSMPGVGVILGLTIMLKTGPIDRFAKAGNFSSYCRKVPSTWISNGKRKGRGNTKNGNKYLAWAFSEVAEFARRYDDASRSWYDRKMARSNRMVAHSALAHKLARAAYFIMREGVNFDHEKCFA

SEQ ID NO: 268890 - protein, 372 aa, unidentified
MPTMTQSGPAPQHDPAAMSIVEITGGVDTHKDTHTAAALDAAGQLLGSRQFPTTTAGYDELLAWLRTFGTLVLVGIEGTGVYGAGLACHLRLASVAIVEIDRPDRKMRRWQGKSDPVDAEAAARAAQAGRRTGTPKHRDGTVEALRVLRVARRSAIAGRADAQRQMKALVVTAPDALRAVLRELGDRHLVKLCAARRPDRAAAGDPAAAAVIALRSLARRHQQLSAEIDDLDTLISSLTTAVNPTLCGLLGVGPDVAGQLLVTAGQNPDRMRSEAAFAMLCGAAPLPASSGRTHRHRLNRGGDRQANAALYRIVLCRLRWDPRARSYAQRRTTEGMSKKEIIRCLKRYVAREVYTALLNPHPSSIPANPSAA

SEQ ID NO: 268891 - protein, 386 aa, unidentified
MRPTGNPTLSTAALDYDSTMIGALELSSKKWVFAVQLPGVKKHSRHVVEPNGPALAELIERLKSRSKAAGRLIARVIMTHEAGRDGFWVARFLERRGVEVHVMQSSSLPVDRRARRAKTDVIDVEMLLRTLMAWLRGEPRVCSMVPVPSEADEEARRAHREREDLIGSRRSILNKIDGILATLGIEGYRGLRRDRRTQLADLRQPDGALVPPAALARIERLLDRLELVMTQIKGVEKARDAVMTKEAAEDDNDRMIRDLVGLRGIGVEGATLLVREAFAREFRNRRALGAYAGLTGTPFASGGMQREQGIGKDGNRRLRALVVEIAWLWLRFQPDSALALWFRERVGQARGRVSKIMIVAMARKLLIALWRFARDGVIPEGAAMKA

SEQ ID NO: 268892 - protein, 345 aa, unidentified
MFYVGIDLHKSFSQVYGFNNDTGEEIEERVNNKDGEIRDVILRFGRDVRVVLEATRNWYWFVDLLQDMGIDVVLSNPVQTKAIAYAKVKTDKVDAKMLSHLLKADLIPFAWIPSREERRLREMLRTRLTLVRIRSRFKNIIRSILAKLNIVLSYGDIWAGKGREELERLNLPSPYNEILPQYLSLIDNLDKYIEEWKVKIERIAKETQEVSLLKRVPGIGAISALTILYETGPIDRFPSAKRYSSYAGLVPRVRGSGGKFKTGHLSKQANMYLKWIYVEIATTIVRIRKGYLYEYYKKQMYKKGKNIAKIALARKISKMVYHLLKQHITYKEFVERNLKLMRRTG

SEQ ID NO: 268893 - protein, 338 aa, unidentified
MKTHVGVDLHQRFCYVTAMNASGKIFRQAQVVNEGEALRAWLRQLPGPRQVVVEASGFWPAFARAAGPESERLVMVHPQRVKAIASAKLKNDRVDSETLAHLSRCDLLPEAWMADAATQQLRLLVRLRITMGRQRARAKNQLQAVLHQEGFKKPVTDVFGKRGRAWLKGLELSPSGRAVVDTWLREVDHLDVELAAQTRELERLAGADARARFLRTVPGIGAYAAMVILAEVGDVARFESKRALASYAGLTPVVRESAGKRKRGGITHQGSNTLRWIMLQVAQVAARCSPGARNYYAGLRARKPAQVARIALARKMLTVVWAMLRHGVCFDEEQFARG

SEQ ID NO: 268894 - protein, 354 aa, unidentified
MLIIGCDFHTRYQQIAMAREETGEVLVERRLDHESGEAHAFYRSLQSLQEPVRVGIEATGPIHWFERLLGELGHQLWIGDSAKIRASEVRKQKTDERDARLILDLMLAKRFPKIWVPTPAERDLRQLLWHRHKLVRLRTMMGNQLHFLAMSQGLCRKGKLFTKKGRAELVSLGLAPWARRRREELLQLLDQLDSPIAELDRAVLEEAKRRDDAVLLMTHPGIGPVTSLAFVLAVGPVTRFHRSRKLVSYFGLNPTEESSGGRRRLGAISKQGNTMVRWLLIETVHHAVRQDPELKQDYQRLKFRRGHAVAKVAIARKLAVRMYWMLRSGADYARLVRRQGSPGATLVDASPSLG

SEQ ID NO: 268895 - protein, 430 aa, unidentified
MKSNTQNAKIEAITEKTLVLGIDVGSETHYARAFDYRGIEYSKKPFKFSNTEAGFATFKEWILDLKERHEKDKVVPGMEPTGHYWFNLGKFLQDNEMKPVLVNPHHVKKTKELDDNNPTKNDRKDPKVIAGLVREGRYMIPYLPNGVYADLRTASNIRFQLQAELTRIQNRISRWFNIYFPEYKTVYGKPDAKSGMLILKAAPLPEDILTLGIDGVNQIWRDAKLRAVGKARAKTLIEAAEHSVGSKEGAVSARMEIRMLLEDYESRNTRLQEVMVLIEELVRKIPMAEKLLEIKGVGIRTVSGFLAEVGDISRFNNPKELQKLAGLALVENSSGKHKGETTISRRGRKRLRYLLFEVAMSLVSKNQEFRGLHNYYTTRRLNPLKKMQSLMAIAAKLIRVFYAMLTKGVDYDPKKMVSDIKRPAVYLQAA

SEQ ID NO: 268896 - protein, 341 aa, unidentified
MQITTIGLDIAKNVFQVHGVDGDEKVVVRKQLRRSQVISFFQELSPCLVGLEACATAHHWARELAKLGHEVRLMPAKDVKAYVKRNKNDAADAAAICEAVSRPTVRFVPVKSAEQQAQLMQHRARDLLMRQRTQLINAIRAHMAELGITAPQGREGIKQLLAIIGDNGDTRLPIDARASLMVLAAQLQAMQTTIGSLERRIVARHRSNQDSKRLQTIPGVGVIGATAIVATVTDPTAFRSGRDFAAWVGLVPRQDSTGGKPRLGPISKQGDRYLRRILVGGAVSILRRAKLNPQRYPWVTRLLARRPFKVVAIALANKMARVAWALVAKGGTYRIPRLAAA

SEQ ID NO: 268897 - protein, 478 aa, unidentified
MAAKKKDARTGPDRTTADAAAEHGGEGAEVAEDRVQVVEYAAAIDVAKGSGMVCTRVPGSRPDRRRQTVWRVEATYAQVTALMDHLRCEGIQRLVLESTSDYWRIWFYLAEAAGLEVWLVNAREVKHLPGRGKSDRLDCVWHCKLNERGMLRRSFVPPEPVRDLRALTRTRARLAQDQARHQNRVEKILEDAQLKISVVISDLFGASGRRFLDALVAGERSPKALAALGDPRLRATRQQLEDALTGRFRDIHAFEISTHLRIIDAINEEITRLDDKIEEQLALVPRTAPACTACGLAGGGHAPGCADEQVPLLGLAARLDEITGIGECNARAIIAELGTDPSQFPTPGHAAAWARLTPRTRQSGETARPGRTGKGNRYIRGALGQAAMTAAKTDTRLGAMYRRIARKRGKQKAIVAVSRIICEIAWILICDPAARYHELGPDYYTPRSPARQTRDKIREIERLNPGKKVILADADAAA

SEQ ID NO: 268898 - protein, 351 aa, unidentified
MSPVTPPATTVGELWDLRHVTYDRTVAWVPIAWTRQVTVKKTICGVDVSKAKLDVCIEPGHRFTSFDNDTAGIAKLAAFCREHAVELVVMEASGGYERKPFVELWERGISCALTNPRSVRRYAEAMGILEKTDRIDSSVIARFADAKNLAPTPLPSGAQQRLKALVARLRQVTDDLTVQKQRRASLFDNTEMRESIDEVIALLKRQSRKLEGEIASMIDDDPLWAKLAETWREVKGVAGRTVARLHAELPEIGILSNKAAAKLVGLAPIANDSGRRKGKRSTRGGRAGVRSILFLVAAIAARYDKSLGEFRDRLIKAGKEKMVIRIALARKLLVRLNAKARDARAAYANAT

SEQ ID NO: 268899 - protein, 365 aa, unidentified
MNYIKVGIDAGKEKVVCAYRGNGVGEVRVVTLANRREALKPWVEKLQEQGVVQACYEASSVGYEIYRWLTGLGAECEVVAPSLIPKKPGNHVKTDTRDAKELLSLFEAGLLTAVRVPTDSEEALRDLARSRGDIQKTLTMNKHRLNQFMQRHGRIYAGKSHWTQGHFGWLAQQTFLEEASQKTAENYRRWVDQVQGELERVEGMIREIAPRHKDTYALAERMMSFHGIDVMSGVSLASELLDLRRFPSAPEIMSFTGLTGREYSSADVVRRGSITKTGNAQVRHILIQAAWKYTRKPSESKRLREHWKTQPAAVATIAQKAKDRLYKRFCHLTNNGKLRQKAVVAVARELAGFLWAAAQVESNAV

SEQ ID NO: 268900 - protein, 363 aa, unidentified
MNESTTVAVGLDVHARSIRLAAVRADELLEERTLPYDEEAVERVLRRWPLVRCCYEAGPTGFGLYRYLVERGFECQVVAPGLVPQRPGDRVKTDPRDARKLARLLAGGLLEPIHVPTPEQEAARDLVRAREAARLDRMRDRHRLSKFCLRHGRLLPTSSWTVARRTWLSEQRFDFPAEQLAFDTYLHALDLVDARIGALEQAIRETAEQEPWHELVARLRCLRGVDTLTALALVTEIGDFDRFATAEEFMAFVGLVPCERSSGEKRRQGSISKVGNAHVRRLLVESAWHARRRPTVGYELARRQRGQDAIVLERAWRCQRRLYARWCRMAARGKPSQKIVVACARELAGFVWAIATEQPLRSA

SEQ ID NO: 268901 - protein, 405 aa, unidentified
MDAIYQRCCGIDVHKKLIVACLRVGRKEEIRSFGTSTDEICQMITWLEENRCEITAMESTGSFWKPLYNLLELCGLTTIVANAQHIKNVPGRKTDAKDSQWIAELLQHGLLKPSYIPSRDQRELREISRYRKSLTEERARELNRLQKVLEGGNIKLSSVVKDINGTTSRELLELMLKEGVNETNIDEHLYGSLREKRDELLKACKGFLTPLQCRLIRAILDHIDDMTKRIAEISRIIDDYMHDYEDAVKRLDEIPGISKQSAQVVLAEIGLDMSRFPTAGHLARWIGLAPGNNESAHRRKSGRTTKGNMTAKTAMIQCAKSAKRNKDSYFKAQFDRLAVRRGKNRAVVAVAHSMIIAIYHMLRDGEEFKDLGVNYYMEHNPERKIRYHLKKLASLGWVMPTVPAA

SEQ ID NO: 268902 - protein, 326 aa, unidentified
MTTTYTGIDVSSDNLHIAWQDNQRWTARKITNQMPSIDAWIEQLPAGSHVVFEYTGTYSHRLAHCLSLAGRPFSIVTPGQSKGFADSLRRQAKTDQQDAGSLCLFGSSMRPDPTELAGESLHQKRQLHGRYHALKSQRQAIANQLHALSFDPRANAQVVDSLRGQMDFCQMQIDGIGQQLFDLDAQDFEAIKKQLLAVKGIGPVVATEPVVATDGFRNFCSAKQLAKFVGLAPSVSQSGTSVRKHGKIPRTACGVLRAKIHSAARSAARFNRDCHELYVRLRAKGKPYKVAIIAVAHKLLRQAFAVVKNGTTFDNDFQKTKEYSLA

SEQ ID NO: 268903 - protein, 403 aa, unidentified
MSMNAVGIDVSKGKSMVAILRPYGEIVSKPFEVKHTVSGIRSLIKQIQSIDGESRIVMEHTGRYYEPLVRELSQANLFVSAVNPKLIKDFSDNSLRKVKSDRADALKIARYTLDSWTELRQYSLMDEIRNQLKTMNRQFDFYMKHKTAMKNNLIGILDQTYPGANTYFDSPARDDGSQKWVDFAITYWHVDCVRKLSLNAFIDHYQKWCKRKKYNFSESKAEEIHRTAKELVPVLPKDDLTKLIIKQAVEQLNTASQTVEQLRIMMNEAASKLPEYPVVMAMKGVGKSLGPQLIAEIGDVSRFTHKGAITAFAGVDPGVNESGSYEQKSVPTSKRGSSTLRKILFQVMDVLIKTKPQDDPVYLFMDKKRAQGKPYYVYMTAGANKFLRIYYGRVKEYLSSLPK

SEQ ID NO: 268904 - protein, 350 aa, unidentified
MDKELYIGVDVSKQTLDLAYYDGESIDWKKAHIKVSNNNAGFKKIGSWVAKVSKGVDMVLFCMEYTGLYTQNFRLWLEEKHYIYRMVEPRKMHRFEPDLDDGLRSLDRIKTDELDSFRIAIYCEQNHRKILRNPSKLPPPVYFKLKRLLAERKQTVKQSVLYKQQLHDICAYDTDLSVERKNGQLKTLNDALKGIDNEIDMYIKEDADISKNFSLLTSIPGIGRVVALETIVLTENFMAIDNPRKYACYIGVAPFKKESGTSVRKGSSVSKKGFKQAKADLSIACLVCMQHIPNIRDYWERKRKEKCSGIVFNAIKFKMILRMFAVIKRGTPYVETDNYRNGKNKQPGVN

SEQ ID NO: 268905 - protein, 372 aa, unidentified
MDESIKFFVGLDTHKDSIAVAICEAGREPSRFVGTVRPDVQVVLKALRKYGLPGQVSVVYEAGPTGYGLYRALSAQGYCCEVIAPSLVPRRAGERIKTDRRDCARLAELSRAGELKAIWVPDEAHEAMRNLWRAREDAVNLRLKTRQQLKAFLLRHERRYPGKTSWTKMHERWITQQRFDHPADQIALTEYQLAAQAAHERVQRLGAALAQAIKGWRFEAVVAALRALRGIDTVSSIGLVCEIGDIHRFASARQLMGYLGLVPSEHSSGGSVRRGSITKSGNAHARRLLTEAAWNYRFPARMSQELRDRSKALSPGIRTHAWKAQVRLCARFARLSSRGVQANKVCVAVARELTGFIWAIAQLSAAESTSQQ

SEQ ID NO: 268906 - protein, 333 aa, unidentified
MNKITLIGIDTAKAVFHLVGVDSHGHYTWRKQLRRSRLLSALAQLERCEVVLEACGASHHWARRIKALGHKVRLIAPQHVKPYRRGQKNDYRDAEAIISAALAPGMHFVGVKRVDQQAEQALHRVRSRLMSHRNAAANALRGLLGEYGVVFGHGFKPLREGARRFAETAEAEALGLVELVSDVLEEISDLQRRMDHYERLIEQRVQADETSQRLREELNGVGKLGASALRVKVADVRDFGGGRQFAAYLGLAPGHSGTGGKVHIGHIKRGHDRYLRQLLIHGARSALCHLGDKQDAQSRWLRGLLERRGFNIASVALAHKNARQAWAIMARQQ

SEQ ID NO: 268907 - protein, 328 aa, unidentified
MKNYQEVIGIDVSKNKLDAYAYNRSSHREFSNDVKGYKALLQWANGKEQKVFFCFENTGHYSLKLALYLSSKKQVYVQENPVVIKRSSGVIREKNDVVDAMMIARYGWLHREELSPSELKDNELLEVGRLLALRDQLVRSRTGLKNTLSELKKLLSSSSTDTCCKTLVSSITHLTSQINKIEKQLKSLIKTSEALSQNYKLISSLKGVGLVVGAQLLYHTNNFERFNSWRQFSSYCGTAPFGHSSGSSIHKKRKCHPMGDRQMKSLLSMAACTAIQYDSELRQYYKKKREEGKLKMIALNNVRNKLLSRVFAVVKRVTPYVELQRFAA

SEQ ID NO: 268908 - protein, 367 aa, unidentified
MMGWMAPLRHLSAKLLSDRISSEWEPSMGEVTTIGLDLAKHVFQVHGVDAEGATVLRKQLRRVQVLAFFSRLPPCLVGLEACATAHYWGRELRALGHEVRLMPAQYVKAYIKRNKHDAADAEAICEAVVRPTMRFVPVKTADQQAAVLLHRGRERLVRQRTGLVNALRGHLAEFGVIAPQGLRNVGKLIAIVRDEGDARLPDLARQVLQVLAAQIEQLAAAVAAIEKQLMAWHKSNPVSQRLASVPGIGPIIATALAATVVEPSGFRSGREFAAWLGLVPRQNSTGGKHRLGGISKRGNQYLRRLLINGASANLLRSKATKADPWVIGLRRRRPPLVVAVALANKTARIAWAVMHRHENYQRVAAAA

SEQ ID NO: 268909 - protein, 351 aa, unidentified
MPRKSSVCTVTAIGIDMGKTTLHMVGLDSYGAIVLREKVSRGRIASRFANLPPCLIGIEAGMATHYVARELAALGHEVKQVPPAYAKPFRQGHKNDFRDALAVAEAVQRPTTRFVPPKSNEQLDLQALHRVRSRLVSQRTAVINQIRGFLLERGIIVRQGLRFLRQLLPDILAKRTDVLSPRMVRIVSDLAGDWRQLDDRIETVTDEIETLAKADDSCRRVMTVPGIGPIISSAMVAAIGNGSAFSRGRDYSAWLGLVPKQMSTGDRTILGRISKRGNSYLRMLFIQAARVILLRPANWPKHGFGAWLVRAIQRLHPNVLAAALANKLARIAWTVLAQERSYEARVTKAEA

SEQ ID NO: 268910 - protein, 307 aa, unidentified
MFVGIDVAKDRLDVHVRPAGESFVISRDDEGIEELAKRLSAMVPTLVVLEATGGFETVVAAGLAAADLPVAVVNPRQIRDFARATARLAKTDALDAAVIAHFAEAVNPPVRRLADPQQRLLGELMARRRQLIEMMVAEGNRRRLLTARRTLKTVDRVLATLKAQLEEIDHDIDIAVRGTPAWREAEDLLISVPGIGHKIARTLLAEMPELGRLDRRQIAALTGVAPFNRDSGTRRGRRAISGGRIVVRSALYMSVLVAIRRKLPLAQTYHRLRASGKPAKVAIVACMRKLVTILNAILRDKKPWQIA

SEQ ID NO: 268911 - protein, 284 aa, unidentified
MPTFYLGIDVAKAKPDRALRLPNGKFRSKAVSNNSQGYADLVDWLASHGALESPVCMEATGVYWEDCAQFLATQGISVSVVNPAQIKAYSASRLARTKTDAVDARLIAEFCAERKPPPWQPRADAEVALRALVLRLDALQTMRTQESNRLGVAREAVRAHIQEHLDWLDQHIKTLTQTISQHIDSNAGLKGKRELLDSIPGLGERTIAILLAFYADPSRFANSRQAAAFAGLDPRQHESGTSVKAKPRLSKVGHAFLRKSLYMPAMVTLYKTAWGKQFKESSVP

SEQ ID NO: 268912 - protein, 343 aa, unidentified
MEQYIGLDVSMKETAISIRQDGKRIWRGKCASDPQLLAAVIRKRAPYAQRVVFETGPLSVWFYHALTAESVPAICIDARHAKAALDMAANKTDANDADGLAQLAEVGFYREVRVKGFDSMLIRTLVTARRQLLKMRLQISNQIRGLMKTFGLVVPKGAGSVFERNVLARLQGEDKLARIVLSMLQAWRDIRLRVAELSKQLVTMASEDRRCRLLTSIPGVGTVTATAFVAAVEDPANFRNSRAVGAWIGLTTRRFQSGEVDHDGHISRRGDSHLRSLLYEAAAVILNRSSDTSTLRTWALDLKERLGFKRAAVALARKLAVIMHTMLKTGELFDPQAGPSNAG

SEQ ID NO: 268913 - protein, 400 aa, unidentified
MNRTRTVAGLDVHKDSIYLCIMGYDQAIIWENTYGVLTPDLRQMHHDMRAHGVTEAAMESTAVYWVPVWTELCESMELRLVNPYFIKQLPGRKSDVKDARWIAECLLKNLIKGSFVPEPIVQDMRKLNRRIMDLCEDTTYNSNKLDAALQRCGFRLSNYVATTKSKSYRSVLKAIIDGQTDPDELLRLVHGRILNKHGRERVKAALTGSFSETDLIVLRQLKETLDLIEKQTADCQQELVRLCKEHYPKPYERLQTIPGVKERAATAIIAETGVDMKMFATAASLVGWCGLKPRNDVSNGRFKSRKVTHGNRYLRQILIEIAWAASRTRNSFFSHFSYLQTTVKKKNKMKIQVAIARKILVAVWHMLSKEEDFIDIYLKRQEELKRTEGQIKLLESYMAD

SEQ ID NO: 268914 - protein, 411 aa, unidentified
MHEKQKHIYVGVDLHKHQHVAVIINCWQEKLDEIKVENKPSAFSTFLLDIDKLTAEGLTPVFGLEDVGGYGRALAQYLTDHGQVVKEVNPALSYAERKSHVTVQKSDSWDAECVARILFNKLNQLPDAKPHDLFWSIQQLVTRRNALVKAQGALKNQLHIQLSHHYPSYKKFFSEVDGKTALAFWERYPSPSCLEGMSIKQLTTFLLEVSNNTCSVKKANEILKLVIEDGNTTKEHQETRNFLVESIVRHILFGKQEIGKVERELKELMSLLDFQLDSMPGIDLVTASALIAEIGDVRRFPNANKLARFAGIAPVYFGSGGKGKEQKSKQGNRALHALFYNLAVQQVQVAKGSKLPRNPVFHAYYQRKLKEGKTKGQAMVCIMRRLVNIIYGMMKHKTAYKLPIVQEKEVV

SEQ ID NO: 268915 - protein, 443 aa, unidentified
MSRKKHTHLRGERGQAFADKLRGIPVEQILCVSLDIHKYFHVVMMHNALGEIVTPPFEIDIFQAGFERLCQAIDEAVARMKAQVVLVGMEPTGHYFENLARHLHQRPQAVTLINSFAVSRNREQQMMRREKDDEIDVAAIGDLLRRGEGTPFQPISGLYLEMQHLSRVRLSKVKIQAALKNQIVGHLDRIFPGLVIQGKVARERYEPLFVADFWSCQTLQRLIRICPDPRRLATVTPHELRTAFHDRGFALGIKMAAEIISYAQKVLLPDPEVIAIRVELLARDLAFLEEVERLISELEDRLHVLLQQTPYWVWTKVRGLSETQVASLAAAVGDPTHYTHAAQVFRRSGLVSGRNDSGTRRHKGKGKRVVKNGDVYLRRALMNAIMSLIRHQPTLHDYFNELHRSKHAGVARVATARRAVGILWAMQRDQQSRTLVLKRGAKM

SEQ ID NO: 268916 - protein, 375 aa, unidentified
MGHHSEAFIGIDTSKLRNAVAVAEAGRKGEVRYLGEIDTSETGTRKLVAKLAATYDKLTFCYEAGPTGYGLHRLIESLGHTCIVVAPSLIPKKAGDRVKTNRRDAEGLAKLLRAGELTGVWVPDERHEAMRELARARDAARQDLTRKRQQVSSMLLRMGLHYPGIKTWGARHRTWLANLKLEHGEQRFVLEELLQAERQAGERIARLEQAIRSAVTDWSLAAMVPALMAMRGVDLVSAVTILAEIGDLTRFKNPRQLMAYLGLVPSERSTGDSVKRGPITKAGNGRARRVLVEAAWAYRHPPRVGSEKQALVAAAPRAAREIAWRAQVRLCARFRTLSRKGKKSTVVATAIARELAAFIWAINREVAVSRQACRP

SEQ ID NO: 268917 - protein, 365 aa, unidentified
MLYLGIDQHKRQLTVNLRSEDGTVILKRQVSTQWEKVRAFFADLAEKAQPEGGFLAILEVCGMNPWLLDMLKQYGCRETVVIQPTERSRQKTDRRDAGMLSHLLWVHRQQFLDGRHPVGLRRVQPPTAQEADDRQLTALRARLTKKRTAVLNGIHKILRKHNLEQGQPTKLFQTQKVRRWLAEMELPALDRLEIDLLLPQWEMLDGQLEIVEAKLAERAEADEQVKLLESVPGIGHYSAVAISSRIGNIERFKHADSLPNFFGLTPGCRNSGEATQRLGSITKQGSKMVRHLLNQAVIKVLRFDGAMRTWFKRIKKRRGSKIARVAVMRRLATILWHMLKKKQKYRYASPIKKHREFEGFEGAEA

SEQ ID NO: 268918 - protein, 411 aa, unidentified
MNAVGIDVSKGKSTVAILRPMGEVVQTPIDVPHDAVSLERLADQILSLGENTRVVMEATGRYHEPVAMELHDRGIFVAVVNPLAIHGYCSSGTVRKVKNDQKDSLKIAKFALDHWVDLREYTPMDAVRQQLKIFSRQYNLYMKSRVALQSNLISLTDKVFPSVNDIFSSPERSDGHMKWVDFVTTFWHCECISQVSENAFTERYKKWCKRMGYRFSASKASDIYIDSLGHIVTLPKNNNTKLLIQTAAKELTAMNELLAVVKAEMIRLAKELPEYETVHAMFGVGDLLAAQLMAEIGDIRNYPRRSSLVGFAGVDPEVNQSGKMNSGSNPSTKRGSPHLRKTLFQLMTVYLRLSPADEAVYQFLDRKRSEGKPYYVYMTAGANKFLRIYYARVKECMAKLESPVETADENG

SEQ ID NO: 268919 - protein, 356 aa, unidentified
MSHEVQYIGMDVHKEAIVIAVLNGSGKLVMETILETKASSLLQFLHGLRGELHVTWEEGAWAAWLYDVLQPQVQEVVVCNPRRNALLKEGSKSDKVDARKLADLLRTDMLRPVYHGENGLRTLRELARSYQTIGKDLTRVMNRLKALYRGWGIACAGTQVYVRRCREEWLSKIPQAGVRRRAELLYQQLDGLQALRRNLRPEFLAESRKHKAAKLLRQIPCIGPIRAARLIALMQTPHRFRSKRQLWTYSGLGIETHDSAQYRYVGGQVQRSKKPQQIRGLNQNHNHEMKEIFKSTATRASCGAGPFHDFYAALLAKGMKPEMARLTLARKIAAITLTVWKKEERFDAEQLKTQAA

SEQ ID NO: 268920 - protein, 396 aa, unidentified
MQAIIERCCGLDVHQETVVACLLVGAPGAQPTKEVRTFRTVTRDLEALRDWLREAGVTHVGMESTGVYWRPVYAVLEGHFELIVGNARHMRNVPGRKTDVKDSEWIADLVRHGLIEKSYVPPQPLRELRELLRYRRKLVESQAAERNRLLRLLETANIKLASVASDVFGVSGRAMLRALIEGEASPEAMADLARGQLRRKRTDLILALDGRVEEHHRFLLAVQLRRLEAIEADIAALDLRIGERLEPYSAPHALLMQIPGVDWVVAAVLIAEIGVDMSVFLSIYHLSAWAGVGPGSHESAGRQKSGRARKGNIHLRAILVGAAMSAAAVAPLVPEAQKPHATSTYVGERGRYYHHHVRHYAYRPYYPYYYGRPYYYSPGPFLLPVPPSWGYGWEWW

SEQ ID NO: 268921 - protein, 364 aa, unidentified
MASIALQRSDVIVGVDTHKDEHVAVAIDGLGGLLGDALFVPATNGGYAALLAWAIGLGDVHVFAVEGCGSYGIGLARFLRRNGHPPVEVSRPPRKGERRMSGKSDAIDAEHAARTALSGVGVVTPKLADGQVEAIRLVKIARDTAVKAHTTAIITLKAVLVTASDELRAELEPMTDHKLLTACAVLDTTGDMADPDVAMRHTLVALAKRWLDLHAEIKVHSAHLKALTRAAAPQLLDAFGVGLDIAAQMLITAGDNAERVHSEAAFAKMCGVCPVPAGSGKTNGRHRLNRGGNRQANAALYRAVIVRMRWHPPTIAYVEKRTADGLSKKDIIRCLKRYLARELYQLLPNTSASNAPAVDLSKAA

SEQ ID NO: 268922 - protein, 513 aa, unidentified
MDRRGGFFLFGSFSFFKTSCGNVEKSTDRQASVTNRRPDRNDGYPETFEPRPMSGDEMHTQMMSFEDSTIRDAGFRAESEESKEKEEVKQDDEMMAWIGVDWADEKHEVWEYEVQSGQKRSYEIQQTAESLQDWVGQLRSRYRSGRVAVVLEQSRGGFIYALMSTDFIHLYRVNPKSLAKYREALYPSGAKSDPSDAELLGEMVRQNPERFRSWKPGDEQTRSLQLLVEGRRKLVDDMTGLTNQLGSVLKTYYPQALEWAGELSGEQACSFLEKWPTLQELRKTRAFRIREFYERHGRPSREVLDERVKQIQKSQPLTSDTAVMLSGVMMVKALVGRIRPLAAAIERYDQEIERIFRQHPDRAVFESFPGAGKALSPRLLAAFGADRDRFQTAVHMQELSGTAPVTERSGKSIWIHRRWACPKFMLQSFHEFADQARRFCTWSKLYYQHQRAKGKEHHAAVRALAYKWIRIMFRCWKDRQPYDDSRYTQSLIKRKSFLAERLTATSSEMLPST

SEQ ID NO: 268923 - protein, 370 aa, unidentified
MEKDTTYVALDDSKRKIVAGISRPGDAQPELRESANDPRLIRRLFERLKREGRAVAACYEAGVSGYDLYRQITALGVECVVIAPALTPRRPGQRIKTDRRDAAKLVRLFRAGELTAIHVPAEAEEAVRDLVRCRDDLRRDVLRWRHRVLKLLARHGRAYLAGKNWSQAHWRWIREQRFDQPPLQRAFEATVFTLEQALARQAELDKELEAVAGTAPYREPVGWLRCFRGIDTLSAIILLAEVVDFQRFRRPRELMAYLGLVPSEYSSGETQRRGALTKAGNSHARRVLVEAAWHYRHRPTIGRALAGRSQGQPDEIVGQAWRAQQRLHRRYRHLIGHGKRTPVAVAAIARELVGFIWAAMTRHESRRQAA

SEQ ID NO: 268924 - protein, 357 aa, unidentified
MDTISDDGPEVTLGIDTHLDQHAAAVLDQLGRVLATTSAPATPDGYEQLLSWASGFGLVTRAGVESTSCYGAGVTRFLQAAGVEVIEVTRAPRADRRHRGKSDPVDAENAARAVLAETATAIPKQHDGIVESIRLLRIARQTAVKSRSQAMIQLRTIIVSAPDALRTELSALKARQLIARLAASRPGDGRDPLTVCRRVLRSIARRHRALDEEIRGLERELGELVTLAAPRLTAQHSVGRETAAKLITLAGDNPERLRSQSALAALCGASPVEASSGQITRHRLNRGGDRQANNALYTIAMVRMQHHPETKAYVARRTAEGKTRREIRRCIMRHLARRLYPLLIADLNDARTIPLLT

SEQ ID NO: 268925 - protein, 427 aa, unidentified
MKYKQNFKIMQITDKTLVIGVDIAKKVHFARGFDWRGIEVAKTFNFKATSTGFSEFKEWAREIAKKNGKDKIVVGFEPTGHYWFTFAQAILEEGMMVVQVNPYHVKSSKELDDNSPSKSDRKDPKTIAMLVKDGRYQIPYMPKGRYAELRKANNLREEWLKKIWTIKNKVQRWLDTYFPEFLDVFSDWEGKAAVMTLEKIGLPDKISSKTAAEIVSIWREEVKRAVGIKKAQKLIEIAGSSVGIREGLKMAEYEIKLLFREYREVRTIMDELEEHLEEIVLTIPGAERMLEVKGIGVKTVAGFLAEVGDITRFSHPDQIIKLAGLNLKENSSGDHKGETTITKRGRSRLRALLFRVILPMTAKNAEFNALHKHNTTRKENPLKKKQSLIALCNKLIRIAYTLITKNVKYDPAKMLSDIHRNAEQSAA

SEQ ID NO: 268926 - protein, 367 aa, unidentified
MKKVSTAVAKQSRNISRQKLTIGLDLGDRNSRYCVLDEAGRIRLEQRVRTTAKGLQEVFGAMPRSRVGLEIGTHSPWISRLLSALGHEVIVANARKVRLIGESRKKDDRLDAQTLARLARIDPELLYPVKHRSAQAQADLMMIRARAGLVRARTGLVNTARGLAKSYGERLRGCNVRNMDREKAEGLSPELQRALEPLLAAIEEVSERISECNERIEALAQASYPQVELLKQIKGVGTLIALTFLLTLEDPHRFRKIRDVGSYLGLQPGRRNSGQSEPQMHISKEGDPYLRTLLVQGAQHILGPFGIDCDLRRWGLKLAEHSGRNGKKRAIVATARKLAVLLHHLWVSGEVYEPLHNSSSVSVAAAA

SEQ ID NO: 268927 - protein, 357 aa, unidentified
MEYFAGLDISLEETSVCIVDEHGKIIRESKVATDPDALMKELNSLRVTYKRVGLEASSLGGWLHVELTARGFAAIVVEARHMRSSLNAQRNKTDRNDARGIAQMMRMGWFRAVHVKSAEAQRLRLLLANRRLLKRKMIDIENHIRGALRAFGLRMGTVARGGFEARVNELTAESDGAMKAFVVTMLEVWKAMRVGYNALHKTLIAVVAADPLCRRFMEIPGVGPIAALSFRAGVDDPLRFTSSRVVGAHFGLTPRKWQSGTIDVDGSISKQGDVDVRTALCEAAASMLLRSKKWTALRAWGLRIAKRSSMKNAMIAVARKLAVIMHRMWIDGSDYIFGKGAAIPEKRILIGTVVEQE

SEQ ID NO: 268928 - protein, 338 aa, unidentified
MRYVGLDVHWRQSTICVLDSRGRKLSMQTVRGGWSKLLEELGKTKKPFAICFEASSGYGYLFERLATVARRVIVAHPGQLRLIFRSKRKNDRVDAEKLAKLLFLDEVPPVHVPSADVRSWRSMIEHRRKLVAEQTRTKNGIRSLLRSQGVEAPRGLWTRRGLTWLASVQLATDLDVLQRDIMRERLESIASMIQRVERVLNRKATAHPGVQLLRTIPGVGPRTGEAVVAYIDKPGRFHHNKAIGCYFGLIPKQDASGRSNRLGHITREGPSVVRSLLVEAAWQGIRLCPRIREVYERIMRGDKERKKIALVATAHYLLRAMLAMLQTGEVWRESAEAA

SEQ ID NO: 268929 - protein, 408 aa, unidentified
MRIIGLDIHRAFAEAVAWEDGKLRRLRRVDMRRDRLDAVAATLSKGDVVVVEATGNAAAVAAVIAPHVTRVVIANPKQVRIIAHAKIKTDTIDAGVLAQLYASGFLPEVWIADEATQALRRQVTRRNQIVRQRSRLKNIIQSILHAHLIPSCPHQDLCGPRGRAWLSEQVVPEDERLAVERHLREFDRLGEDLKVIERDLARSALADESITRLMTIPGIDMVVALALKAAIGDIQRFERSQKLVSYLGLNPSVRQSGPGPAYHGRITKQGRGHARGMLVEAAWAAARAPGPLRAFFLRVRARRGQHVAAVATARKLAVLIWHVLRKGESYLWARPALHAKKVRDLELKAGHAPSRGQKGAAHAYNLRSHREQERRWVEQAETAYARFVAGWNPRGPKARTGAAKEGRR

SEQ ID NO: 268930 - protein, 306 aa, unidentified
MKRERETREGRYIGLDVHKQYITVGGMNAQQEIVLRPRDVAMERFARWAGENLRDTDEVVLEATTNTWEVYDLVGRLVKRVVVAHPAEVKQIANARVKTDSQDVLRLVRLLVADLVPEVWVPPMEVRELRALISYRWRLVKMSTAIQNRMHSLLHRHNIQAPEGKIDVGENRAWWEQLRLSELETLRLKQELKSLRMVREHILEVEKELGCLSTSQRWNAQTVHVMQLPGVGIVVAMTILSAIGDIRRFESPKQLVGYAGLGAGVHDSGQKHRDKGITKSGRKELRWALVEASWQAIRSNSRLRTQ

SEQ ID NO: 268931 - protein, 438 aa, unidentified
MQVVYRRCGGLDVHKDTITATVLVFGEEGQRDVRKKEFGTHWKELQRLGQWLRSSKVERVAMESTGVYWKPVWNVLERTLPMILANPYQVKNIPSQKTDRRDSEWIADLLAHDLIRPSFVPAPEIRHLRELTRYRVQLTGERNRVHNRIHKVLEDANIKLDTVLSDLLGVSGRAMLQAIVQGHCDPGWLADYARGSLRGKREQLELALRGDIQDHHRYLLGELLADLEFIESKILRLDQELFCRMQPYQDSVERLCTIPGVDVLTAWTLIAELGADVQAFPDAAHAASWAGLCPSNRESAGKRLSCRTKKGNRWLRRALCQSAWAVTRKKDCYLTAHFYRRAAQHGVKKAIVATAHQLLIIAYYLLRDRTVYRELGGNFYDQLHPQRTQNRLIRRLERLGLQVVVHPQPPLPEPPPQPRPRGRPCKCSERGIDCKHRH

SEQ ID NO: 268932 - protein, 387 aa, unidentified
MPQQNDLSRSLVPFEHTTTLVAVIELSKSSWLIAGTIPGIERQPLKKIVPDETELLRVLHRWRDEAVRKGHSITRISVAFEAGRDGFWLARWLTGNGIEAHVIHSSSVAVSREHKRAKTDRLDTAMLMRVFLGWLRGEPGHCGMVAIPTIEEEDAKRPCRERENLVGERTRIINRLKSDLARLGIRGFKPQLRKAPQLLASLRTPEDQPIPPNTLDEMQRDLTRLALIREQIKAIEQARLTRLEQAPQTGPNAMIRMLASIRGVGIETAEMLVQEVLSRNLRDRRAVGRYAGLTGAPDESGSKRREKGLAKSGNARVRRGLIQLAWRFLLFQKDSALAEWFRSRTEGVKGAHKTKMIVALARKLLIALWRMVTTGEVPHGVVLREAA

SEQ ID NO: 268933 - protein, 361 aa, unidentified
MNGSSEQPSMTAGLDLGDKYSYLCLIDTQSGEVIEEGRLRTTPEALRRRFASEQPLRIAIEAGTHSPWVSRVLEECGHEVLVANPRKTRLIYATKRKTDELDAENLARLARLDPKLLYPLNHRGEDSQAHMAIIRSRQALVGCRTQLVNHVRGAVKSFGGRLPKCPARSFHKKAPEHIPEALWPALGPILETIGSFTERIRDYDRQLETISEEHYPETELLRQVEGVGVLTALIFVLTLEDPHRFERSRSVGAYLGLVPARDQSGDRDPQRRISKEGDEMLRRLLVGSAHYILGPFGSDSDLRRHGEKIASRGGKNAKKRAAVAVARKLSVLLHRLWVTGEVYDPLYNTHRRQEQKQEEAA

SEQ ID NO: 268934 - protein, 320 aa, unidentified
MPQQGRIVGLDIAKQKVDACIRSLRLRLSQPSTAAGQAAMIAWLHAHQVTTAVVEASGGYERGWAAALRAAGIAVRVLDPKRVRHFAKSAGRLAKNDPIDAEMIAWFGETFADAPSQSHDPDREELDGLLMARALLVKIATQIGNHGEHAPPPVVAEAFAAIAASLAGQRARLEAAIAAKLASTQRFADQAEIIQSIPGLARQAAAGVIAWLPELSRIGHKPAAALVGAAPYDDDSGRRQGERHIKGGRAEIRELLYIVTLGCVTRHNPVLKAYYQRLRARGKAFKVALIACLRKLVVILGAMLRRGEKWDVSRYAAAAV

SEQ ID NO: 268935 - protein, 452 aa, unidentified
MAKKKKRNREKTIKHLHVLQPNSAGIDIGATEIYIAVPDERASKAVRRFDTFTDDLHDAAKWLKKCGIESIAMESTGVYWIPIFQILDIYGFEVILVNARHVKNVPGRKTDVIDCQWLQYLHSVGLLRGSFRPAQDICAVRSLLRHRDNLVKAAASHIQHLQKSLTQMNLQIHNVISDITGVTGLAIIDAILAGERDPKILAELRDPRIKADKQTIVKSLIGDFRSEHVFTLKQTLQSYRNYRQLIQGCDREIENHLKKFESRVDLNSLPPLPPGTPTRKPKGNEPDFDLREHMYRLLGTDLTQIDGISGLTAHVFFTEVGPDLSMFKNVKHFCSWLGLCPNNKISGGKILSSHTRPGSNRFAHSLRISANSLWNSKSYLGNYFRRMRSRHGAPKAITATAHKLARVIYHLVKTQKMFDDTVFAEQEKNHQKRFEKRVLRQAKALGFQLVPA

SEQ ID NO: 268936 - protein, 433 aa, unidentified
MSELDPAGTVAGFGGFTHFGGLDWARYQHQLVVVDPAGRIVLSLAFANDAEGWALFRQKVAGFPRLAVAIETNCGPAVERLLEAAMAVYPMNPKAATRYRDRKAPAGAKDDELDAWSFADALRTDGHGWRELAAQDPLTAELRLLCRDEVKLISQRTALVNQLQAALCEYYPAALDAFDDWTGASGEGPWRFLLAFPDPQTLVKAGKRKWEKFLHAHKLYRPQTTEKRLAIFADAARSASPNPAVTRAKSLLAVSLAKQLCLLQSQLDEYRDRIASLFRDHPDHDCFGSLPGAGPKIAPRLLSELGSNRQVFCSAEALQNYAGASPLTRQSGKVRIVSVRYACNKMLRSTVHLWAELSRRSCAWAEAYYQKKREEGMAHAAAIRCLGQRWIKILWKMWQENKPYDEARHTLDQVKHGSWVVKLLPEKSAAATA

SEQ ID NO: 268937 - protein, 403 aa, unidentified
MSINGASVMAASVVAVDVGKNKAALSVTSAERHRLFGPAEFAMTAPALAAVLQRVCAVLPTGPVKVGVEAAGHYHRPLLGSGVWPAGWEVLELSPARVAEQRRVQGRRRVKTDVIDLEAITELVLAGHGVLVTARAAAVTELTGWAMQRGRRVLARTATKNQLLAQLDRCFPGLAMVLPDVLGTKVGRLVAAEFADPHRLAVLGVARFIRFAANRGLRVRRSAAERLVAAARAALPSPQAQVARQVLADDLVLLACLDAQIFAAEAKLAQLLPDTPFAPLTTVPGWGTVRAANYGAAVGDPGRWPGARQLYRASGLSPAQYESAGKRRDGSISREGSVALRRALIDLGIGLWHADPAARHYGQQLRARGKKGGVIGCAMAHRANKIAYAMVRDQSGYDPDRWA

SEQ ID NO: 268938 - protein, 414 aa, unidentified
MGLDVHKASCTATLIDTRGSDHRTWKFETSPEELDRFVRELPPATAVALEASTVGKAVYRFLSQRGLDVHMGNPRALSVIATAEVKTDARDSYHLAQLLRTNYFPECYVPPMDVDEVRQLVRYRMDLGESAAAVKNKTHALVSRNLFDSFLAEYSDTFGREGLERLVTLPWPESDREVLTAYLERLQFLLRQAEAAERRLARLAQGNREVELLMTIPGIGFYAALGILGEIGEIRRFPTKKHLYSFAGVVPRADNSGEKVALHRHVKRGDSVLKFFLALAVQGTLRAKHSNAVAQFYRKKAKQLGRPKALVAATRKMAGVVWAVLTRSEPYAEEDPRLTLRKAEDLAIKAHRPLPPATSAEELRTLASELGSKKELLDRLLEDPKRTMVLEEITSGEEGGFEKWVLPGFGWVVS

SEQ ID NO: 268939 - protein, 351 aa, unidentified
MSPRNAPRPAAVYGIDIGKNIFHVVGLDTDGEPVQRARFRRDSLLQFFERTAAPVIVGMESCAGSQWIARRLQALGHKVRLIPAQFVKPYVKSNKSDIIDAEAIAEAATRPTMRFAAIKSEEQADLQALHRVRDQMIGTRTRLINQMRAFCLEYGIALRQGAGLFKLDLPRVLDNLSNDLSPAMRKLLTDLFADLRRLEQRINDVTREIEAIADREDVARRLMTIPGIGALGATALLAAVGSGRQFQKTRDLAAWLGLVPREYSTGGKQKLLGISKRGNRYVRKLLVHGARSCFRHLDRTRDRLGSWLDGLQSRMHPNKAVVALAAKMARIVWVVLTKPGALYERRDPAFA

SEQ ID NO: 268940 - protein, 345 aa, unidentified
MNTTTHYAGMDIHASNTVIQSIDPTGEQVQQREVPTRADKLINWARNYPHDQLQVILEQGTHARWVASALGQWVDRLVICDPAENALVHRGGNKNDRTDAHKLARLLRLGEYKSVWWQPLEARHVFKSRMKMYLRQRRAKAAAIQRLTHYLRHIGVRIPTGSSRFSFQRGERWISQISSQAHRSLAEQKLGFITYHHEQSLEIFRGIREQGKDYWEIAEFAKIPGIGPVGSHLFSALLEDPHRFCKRSQVYKFCQLAVVSRSSAGQSVSRKRLDKKGYGELKAMSYRAWLSAANTSGDNEVKQFWKESCRRASSERNARLNTQRKIINVMWSLWKNGRIYDPDKF

SEQ ID NO: 268941 - protein, 324 aa, unidentified
MSDGMLGIDVSKNTLDVSLSSCNKVRARSFPNSSDGWRHLLDWLINQKVRRVHACLESTGRYSLGVACVLYEIGHVVSIVNPAQIRDFARTKLGRNKTDGVDASHIREYCELFKPQPWAPPSEAHRRLGELQTIRAGVVAGLTEWNNRKNSGMVDAAALSLADATISHFTSQLGAVDEAIAKTIDNDSELRCKRDLLVSISGVGETLAGVVLTELPGPDVLRSSAEVVAYAGLNPRRHQSGTSIDRMTRISKIGNAVLRAALYMPAMSAMRYNPAIVALVTRLKSRGRLKPMQIVVAAMRKLLVLCFGVLKTGKRFDPELAMGC

SEQ ID NO: 268942 - protein, 270 aa, unidentified
MKITTAGIDLAKNLQQVYGVDERGKAVLKKQLKRSQVLSFFVNLPPCLIGMEACGSAHHWARKLQKLGHTVKLMAPQFVKPYVKTNKNGEADAEAICEAVSRPNMRFVPIKNGEQQAVLALHRARQGFVRARTAQANQIRGLLAEYGIVIPQGICHISKRLPGILEDGESDLPGMFRQLLQRLGEHLKELDRQVGELELQIQLWHQEHDASRKLAQIPGIGPITASALVASIGDAKSFKNGRQLAAWPGPSPQAARKCGQVQVAGHQQTR

SEQ ID NO: 268943 - protein, 288 aa, unidentified
MLIIGCDYHPSFQQIAWVDTDSGECGEQQLQHSNGEAEKFYRDLKLRGMQVRVGMEATGHARWFERLLAGLQYELWVGDPAQIKAARVRKQKTDRRDAGHILKLMLEDRFPRVWVPGAENRDLRQLLWHRHRLVQMRTRVMNQLQAIAMNEGVRRKKGLWSKSGREQLESFPLAPWAQRRRQDLLELLDRLKPRIGELTTAIEQEAERRPEARRLMTHPGVGPLTALAFGLIVGPVERFGCSKQVSSYLGLVPCEDSSADRQRLGHISKQGNTLLRFLLVEAAQAVVR

SEQ ID NO: 268944 - protein, 341 aa, unidentified
MKNLFIGVDFSKEKVDVAILFADGLVETAARVFNEFKTTVSGYKQLVKWVEQNSYGIDSSLWLFCGENTGDYSKGLCNFLYGKGYDMWLENAKSIKDASGLRRLKSDRADASMIAEYAMRNYDKAVMYESLSESLAQLRELFLYRQMVVRYRCSFQVRRGEKRLTMEKSPIKTMISQSGRHIVSELNKEVEKIDKRIAELIKSDEELTEVFTIVTSVPGIGTQNAVCLMVYTDNFRRFNYDSRKIACYYGIAPFGKDSGTSVHSDPHVYYMANRQIKAMLTQAALAAVNFNPIMARYYMRLVERGKKKQVALNNVKNKLVHLITAMVRNRQLFSPEYKISA

SEQ ID NO: 268945 - protein, 355 aa, unidentified
MLKSFIGIDVHKHRCVYTEIDTKGKILRRGAFCNTFAEVSDFASTLQGREGIVVEPVLNYLWLLDQLESYAGSIHVATPHKVRVIAESKCKTDKYDSRILADLLRTNFLPESYIAPDWIRSLRELLRQRSHLIKNRTMLKNRIRHLLFLNGSKIESADVSSAKARRELRMMYLPDMVSSSIQQCLLLIEQLDRMVEPLEAEIVIRTRDVKEVQLLQTIPGIAFLLSAIIYAEVVDIGRFRSRKAFASYTGLIPTVRASGGSAHYGSITRHGSRPLRTALVEAAIKVVRYSEALNRLHKRIQYRSNVQKARVAVARKLATIIFVMLKREEPFRCEKKLKHARAFDINQGMSKSQGC

SEQ ID NO: 268946 - protein, 376 aa, unidentified
MYSITKYVGFDVSKEKIAVSVADFGIAPARFFGLIENSPEKIRKILKRLGKPEELYVCYEAGVMGYELARFLKGLGVKCMVVAPSKIPQAPGPKVKTDRRDSMRLAELLRAGELISVWVPGEDDEALRDLSRARKARKEDLKRAKQRVKMFLLRHGIRKPDGMKAWKEPYRAWLRSIEFPFRATQMAFQEYLIVVEEIEQSVRRLDLELHEVATDSPHAPMIKALQALKGVQETAAVTIVAEIGDFTRFSNPEELMAYAGLVPREYSSGNKTWRGNITKTGSSCLRWILTECAWSYRYKPRISRELMKRMEGLSPHIQAISWKAQVRLNKKFTKLLIRGKSGSVAVTAVARELLGFIWAIARQVNYEMEGGQGEVA

SEQ ID NO: 268947 - protein, 400 aa, unidentified
MISVGIDVSKGKSTVCILKPYGEIVSKPFNITHTQKDLSELSSMLFRLNDEVKIVMEATGIYHLPVLTYLQEKGFFVSVINPYLMKSYRNESLRKAKTDKIDSRIIANYGIDHWFKMKEFQTSGEIYEELKLLGQQYRHYMKLHLLSLAELTHLLDLTMPGIKNLLASWNETNRKDKRSDFVERFWHYDVITSMSEQEFTEEYILWAKEKKYVPSQEKAKVIYTLAQESIPTLPSETSSVKILVTEAVRVLKEVDATLGLILSRMQEIAKTLPEYSVVREMGGVGNTLAPKLIAEIGDVRRFRNGKALVAFAGIDPPPYESGQFVGCNRKISKRGSASLRKVGYETIRSLKMRSRPEDPVYRYVVKKESEGKSKKSAKIAGLNKFLRIYYARVTELYKNI

SEQ ID NO: 268948 - protein, 347 aa, unidentified
MEKASQAEVQVFVGIDVSARELSVAVQCGIKEGIAITTFPNKAAGHQALLAYLLRAKGRARVCLEASGNYSLDLALTLQAHPQVEISVVNPRRARRFAESLGERSKTDPVDARVLCEYALRMPWVPWVPPSLAALRLRSITRAIEDLVAMQAQEKNRQHALLASDALPALLIRELEQHLRYLKLRITRLRREALRLIARNPELNRRFHLMLTTPGLGETSSLQILGELAVLPETLDARQWVAFSGLDPKQFSSGTSVEKKPRISRGGNRHLRRALYMPALVATRHEPFLPDFYQRLLRRGKAPLQGVVAVMRKLLHALFAMFRRDEAYDGSKLCPAEFARHTAVVCV

SEQ ID NO: 268949 - protein, 327 aa, unidentified
MKSIYVGIDISKNTLDFCVRSSGVASFHKIGNKTKSIRKLLKSIAKIDSKAFIAMENTGYYNYNLYQTLKDFDFNVYVIDPKHIKRSIGLVRGKNDKVDAKRIAIFIERNHQDFECWEPCSEAIRSLKILMGQRRSKIKQRKGIKQQMADLKDIVFNGSTRKLIKINQKAIKELDRHIHEIETLIRAEIKSDPVLQEQLKRIKTVPGIGDVTAWMIAIKTEGFQRLTDPRKLACFAGVVPFEQQSGTSLKTRPRVSKMADMALKSVLQMAAMRAVRMQNDLQVYYLRKVEEGKNKMSVLNAVRNKLLHIAMALIKNQTNYKNRLELS

SEQ ID NO: 268950 - protein, 394 aa, unidentified
MKLIGIDIGKNKHFFCIMDQQTGEIISQPVSFSNDKEGFDFLIQKIKSYPKDSILIGMEDTGHYHFALLKYLLDLQYTVALINPKTTDFNRKMQGGITKNDKLDTINICDVLDTPERKKQYRITKVNSFDLYEQKQLTRHHHSLKEEENVYKNRLQKCIDIVFPEFNKLFNSKYGTVYMNILKTFGSAENIANTDIRTIRKCFEIEGRGNRISLTPERLKECARSSIGISSSAEVIQIKHLTAQIELIEEQLTEIDKKIEEFSIQNNSPILSIPGISHFSGTSILAELGDISNYSKPSQIIKFAGVAPLHYESSQFNAQHTSITKKGSKYLRKTLYQIILPVIRHNQVFYKYYQLKISQGKGHRCAQGHCVRKLLRIIYHLLKTNQQFDPQLLR

SEQ ID NO: 268951 - protein, 415 aa, unidentified
MSLKIVYKICCGIDVHKTFVVACIASTNDIGVTSYESHRFSTYTSGLKTLLQWLLKRNCKDVCMESTGKYWIPVYNILENDCSIVLAHPKYVKAIRGKKTDKKDAKWIADLFKHDLVAGSFMPPADIRQLRDLMRYRFKLTCFQSSEKNRLQNCLTVSNIQLGNVVSDTFGKSAQAILDKLLENPADTSFDLEPLVYKSLKKKLPELRDAIDGYITPEQVGKLKVIKAHYESLESRKAELEELILALAAPYQQELAILQTAPGIRSDFTAIGIISEIGTNMEAFPSAKHLCSWAGLTPTNNESAGKKKSVRVSKAGCYIKPLLVQCANAVVTSKKHPEIRNRYLRLKKRRGHKKAIIAIARMLLTALYHMLKNGENYNAELYRKSDLPPANREITVEQAIIIARNQGYKIKSATA

SEQ ID NO: 268952 - protein, 451 aa, unidentified
MAKTKKRKQRKLDRSLPAMRPNAGGIDIGATEIFVAVPADRDTGSVRSFPTFTEDLHALADWLQQCRVDTVAMESTGVYWIPLFQILEARNIEVHLVNAQHVHHVPGRKSDVLDCQWLQYLHSVGLLRASFRPEQAVCEIRSLMRHRENLVQMACVHVQHMHKSLDQMNLQIHHVISDITGVTGLAIVDAIVAGITDPKELAKLRDHRIKASIATVKKSLVGDYRPEHIFTLKQSVTAYRQSQQLIADCDREIQQRVQTFETKDDHPSPANDSSSATTPPPSSFDLRNHLKRIFGVDLTLIPGFDSLRVETIFSETGADLSSKFPSDDRFCSWVNLCPKDGTSAGRRIRGPKMKTKNRVNQEFRMAAQCLHNNKSYLGDYYRSQRARYGALKAIKNTAHKLARIFYHVVTTRQPYDETVFAKLEARNQKRRLHNLQTRARQMGYTLVEAHA

SEQ ID NO: 268953 - protein, 480 aa, unidentified
MNVKATRTKKQVNVENQAIKLLSKEELGIKIEVIKKELRSYTWRDLETNGKFAKNDKLSFITDDMLIAGCDIGSETHYIRAIDVRGRELSSRAFEFSNTSEGFANAKAWMLALAAKNDKKQIALGLEQTGHYWFALAAWMVSNGISVVQVNPYAVKQSKEIEDNSQLKDDRKDPKLIANLVKDGNYGMPYLPEKVYADMRRLSMFRDQLTEDRIRNINRLHRELKIYFPEYMDAFGKIDGAFTLEVLKVSAIPSDITALGAEGIKNIWHNEKLRGRGYSRANEIVSYAEKSVGLTDGTDAGREAVKWYAEQILKLDEQLAVIESTLHEKCREIPYAENILEIRGVGENILAGILAEMGDISRFDDVKEIQKLSGMGLVACSSGKHKGQTKISHRGRKRLRYWLFQAAKSAVSHADEFKQLHEYYTTRTNNPLKKMQSLVVIACKILRVSYTILKTGTTYDPQKLLKDIKRPTASQAPMAA

SEQ ID NO: 268954 - protein, 406 aa, unidentified
MAGVIIGVDPHKGSHTAVALDESENKLGQLRVRATPGQVQQLRRWAAAWPDRTWAIEGARGLGQLLAQQLLGAGEHVLDVQPKLAARVRLLNTGQVNKNDPNDARSVAVAALRTHAAREVVAEDDTAVMKLWARRYHDLGSLRTQLVCRLHAVLCDLVPGGFAREISAAQAIQVITDITAHGPVAAARLELAYDLVADLHRIDEQRRELKRRITRTVAASKTTLTELYGVGPIIAATVLGYVGDVGRFASRDHFAAYNGTAPIEASSGNRNIHRLSRRGNRQLNHAVHIAAVTQIRNHGTTGRIYYDRKVAEGTAKKAALRALKRKVSDAIYARLIIDARAAGSAPARDPGGQTRNDSASSATGSHPETPALRRSHSRANTNSRTSETAATADPSMRASKQTRRAT

SEQ ID NO: 268955 - protein, 396 aa, unidentified
MSVVVGIDVGASKHVAAVCRADRQRAERSLLRYRNNRSGFEELDHWLQSQGTVERVVMESSGHYWLPLASHLRHSGHQVAVVNPLEAKYFAKSRLRRTKSDPADARTLAELGVRDQPPAREPLVGVEVREAARFCIRLVEDQARVCQRIRRLVEISFPELGEIFEDPTCETALAVLRQAPTARSAARRRLDTLANSVRPGGRRRLGQVKAKHLQELARETIAPPELDAQAALEVQLLIEQYDLLGRQIEVAERRVAEMLDGELARRLQTIPGVGPATAATLMAEIGDIRRFDDVDQVAALSGVHPAEKSSGRKGAREGTSWHMAKTGNPYIRAALYRIAVSGIKHNPVLRQHYAKKRAAGRSPMNAIGHCMGKALDLVWGVWRSDRDFDPNYRVRT

SEQ ID NO: 268956 - protein, 338 aa, unidentified
MAIIATGIDLAKNVFAVHGVDRGGRVLLRQPKVGRAKLNALMAAQPPMVIGMEACSGAHYWAREFERHGHTVRLMAPKLVTPYRMTGKRGKNDAADAAAICEAMQRPNMRFVPVKSEDQQARLMVHRARQGFVTERTACINRIRGLLSEFGIVLPLKAEVVRREARNHLEDLPGYANLVIGDLLSEVAHLDERIKQYDVHIRTMAHDCTPAQQLMQLMGIGEITATALVAMVGNASEFNCGRQFAAWIGLVPGQYSSGGKARLGRITKAGDAYLRSLLVMGARAVLNAAKGKTDSLSRWALAVQERRGYWKAVVAIAAKNARMCWAVLSRGEAFKLPA

SEQ ID NO: 268957 - protein, 355 aa, unidentified
MNDAKYIGMDVHQATISVAVRDSRGNLVMEAILETKAETILQFIRGLRGSLYVAFEEGTWAAWLHDLLQPHVARVLASDPRKNALLKAGNKSDRIDARKLSELLYLNKLSPVYHGEQGIRALKELARGYITITRDLTRVMSRLKAIYRGWGIPCAGQQVYAPRYRAEWLAKISEAGVRRRAELYYQQCDALAALRRGTRRELLAEARKHPAMRLLRQIPAIGPIRAALLIALIQTPNRFRTKRQLWAYCGLALRTYTSGEYRFVGGQLKRSKKVLAVRGLNINHNHDLKNIFKGAATRAAATAGPFQDFYQATVARGMKPHLARLTLARKIASITLLVWKKGARFDAEHLKQQAA

SEQ ID NO: 268958 - protein, 416 aa, unidentified
MKKNDNSSTKSEPCRKQPKSRVSVERDTKEVMAELLGKLAEKLDAKAISASAGKEQQRGGLRPNLDRLTVGVDLGDQWSVYSILGLEGEALIEGRLQMTKETVAEFFQGLPAARVVIEVGTHSAWVREEISGYGHEVLVANPRLMEGSKRRKRKNDRIDANKLARLGRMDPQSLHPIQHRSAEVRQDLVILRARDALVAVRTELINTTRGLVKSVGARLPKCASPSFPQKVAESIPAEIREALLPLVQLVAAISDSIQEYDKQVEELGSEKYGHTKLVRQVTGVGPVTALAYVLTLENPNRFVKSRDVGPYLGLVPNQEDSGDIQPQLGISKAGDMMLRRLLVGSAHYILGPFGPDTDLRRYGLRLCERGGKNAKKRAAVAVARKLAVLLHHLWVSGEVYEPLRNGWSATTRPAAA

SEQ ID NO: 268959 - protein, 355 aa, unidentified
MNVSVNHYIGFDVHKKSISYCVKLADGRIVEEGKLAARRVTLCQWASKRAEPWHGAMEATLFSGWIYDTLKPFAAKLEMGHPARMKAIGASKKKNDKLDARTICDLMRANLLPACWVAPSEMRELRRILRYRNLVLEQAVRMKNKISGLLMESGVEYNKKRLHGEKYFHELLENLAAEVPESVKDLLKLSRGWLESFQATQQQLLVKLQKHPILMERLKRLKSIRSVGEVTALTWALEIGDPHRFSSIGDAVSYCGLTSALVESADKQKRGPISKQRNAHLQTVLIEAAKLAPRWNPRLAELHQAEIDNGRHRNRATLEVARKLVAYLLAVDKSGKDFEVRTPSAQPEGEVKPAA

SEQ ID NO: 268960 - protein, 338 aa, unidentified
MEVYGGIDLHSNNNVVVLLDEEDRIIYRKRLPNDLKAVLQELSPYRNRIVGLVVESTYNWYWLVDGLMDAGYALHLANTAAIKQYEGLKYTDDNSDAAWLAKLLRLDLLPEGYIYPKHERAVRDLLRKRMQLVHQKVSNILSIQNLVARNTGMGLSANRVKRLDDADVDALLPDCDLALAVKANVSVLTCLRQQIGQLERAVKGRAKMKPPFTYLQTVDGIGLILSLTIMLETGDVRRFAGVGNFASYCRCVDSKKLSNGKRKGEGNRKCGNKYLAWAFVEAAHFAIRNNGKIMRFYQRKQARTNKIVAIKATAHKLARACYYIMRDQVDFDVNKAFA

SEQ ID NO: 268961 - protein, 388 aa, unidentified
MDVLYQSCAGIDVHQATVVVCILHGPLTSTRPKREMAQFDTTTKGLKACHDFLSQFHVEAVGMESTGVYWRPVWHELCDDFELILAQPAHMKSIPGQKTDKKDAHWIAQLTRIGLLPRSFVPDETIQELRELTRQRKHYVESRNRETNRIHKILQSGGIMLTTYIEDIMGASGRNLLQLLIDETPLTPRMIHQSVYTSLKRKVPQLLEALDGYFSAHHRFMLDQSLEMYDFYQKQIDCLEERINGYLNLYERPVEILDSIPGIDLITASVIIAEIGVDMSQFPTAGHLASWAGLCPGNNESAGKKRSTKIRHGNSYLKRCLCQAVFAAKKQKGSPLAERYYQIQSRRGPQKATIALAHQLLKIVYILLKENLTYQEFVLQKRLLETSQ

SEQ ID NO: 268962 - protein, 351 aa, unidentified
MKEYIAFDSHKHYTLMEREDRQTARTVQLRVAHQPGAIRSCLRNCESGTDVAVEATGNWYWIVSEIEQAGLKPQLVHPRKAKLMMGLINKTDKLDVHGLNRLQRNGTLPTVWIPPAELRDQRELTRTRLVLVAQRTRLKNRLQSTLAKYGLAVRDCSDAFGTVARSQWPELLAQLPEQTQWVSQQLLKQLDVLEEQIGQCEKRLNPLLKITPQIERLKSLPGVGLILGASIALEIGGVSRFASAEHLASYAGTTPRVHSSGDKLRFGRLRPDINRYLRWALVEAANVVALHHQQRPERHVSHLYWRLKQRKGHAKAIGAVARHLAEATFHILSRQEDYVDPALRKGRSKPV

SEQ ID NO: 268963 - protein, 312 aa, unidentified
MTKIICGVDVSKRRLDAHVVPSGAFESFDNDATGIAALATFCHRHRVALAAMEATGGYERVPFLLLWEAGIACGLTNPRSVRCYAEAMGILEKTDRLDASVIARFAVAKELRTTSPPTQSQQRLTALVARLRQVTDDLVVQKQRRSSAMNAEMTTSIDEVIALLKRQARTLEGEIASLIDDDPLWSQLDAALRTVKGVANRTVARLLAELPEIGIYSNKAVVKLAGLAPIAHDSGAKTGQRHIRGGRAGIRSILFLVADIARRFDASLAEFHQKLTKAGKPKMVVRIALARKLLVRLNAKARDARELYALAT

SEQ ID NO: 268964 - protein, 482 aa, unidentified
MTLVSSDDDLDWEFVFDSRLGHPTGSSEEPMVKRSKKRCEELPILHPHAAGIDVGASELFVAVSADRDPQPIRSFPTFTRDLNALADWLQQCGVRSVAMESTSVYWIPVYQILESRGLEVCLVNAQHVKNVPGRKTDVSDCQWLQYLHSVGLLRASFRPPGFICAIRSLWRHRSSLIQMAAEHVLHMQKALDQMNLQIHRVLNDITGLSGLRILEAILAGERDPVTLARLCHGGVKNSEDTIAKSLEGDYRPEHLFALRQSLAAFHYYQQLVVEVDQEIQGQLGSLETATTAEPTVPKRTKASAYQRRRYEPKTFDLRGELYRIFGVDLTNVPGISAITAQTVLCEIGTDVSRFRNASAFASWLGLCPENKISGGKVLYTKSRRVRSRVATALRMAANSLHHAKDYLGEFFRRITRKLGKPQAITATAHKLARIVYHLLSTKEAYNETVFHRCDEEAIKRAQYRLRKQAAHLGFQVIPLQNG

SEQ ID NO: 268965 - protein, 410 aa, unidentified
MSVQESPEPVYVGLDWAAVIHAVCVMSAAGEVLAQLAIEHTAEGIASLIRRLAKYGEPADVQIGIERPNGRLVDLLLDAGHPVVPVTPNAIKTWREGEVISGAKSDAGDAIVIAEYLRLRHHRLHPVQPYSVETKALRTVVRTRDEIVDMRVAATNQLAALLDDHWPGAKEIFADIESPISLTFLRRYPTAAAAARLGHKRLAAFLVKHGYSGRRSAAVLLARLRHAPAGTTDPVLTEAIHDAVLALVTVLEALNTAGKNLDRSVAAHLGEHPDGVVFTSLPRSGQINAAQMLAEWGDSRAAYDHPDAVAALAGVTPVTKASGKQRAVHFRWACNKRFRQAMTIFADNSRHASPWAAHIYAQARARGHDHPHAVRILARAWIRVIYRCWHNNQPYNPDLHGGAQKLPTAA

SEQ ID NO: 268966 - protein, 325 aa, unidentified
MHILGIDISKATFDTGLTEDNRRYQREKFSNEPDGYANLVEWLSAKQVTELHVCLEATGRYGDALASFLYSQGYKVSVVNPAQIHAYGKSKLRRNKNDQLDAQLIADFCFTQHPSAWTPPSPIQRESQEISRHISALKGDRQRKRNQLQSGISSPRLRKSIEKTIRFLDKEIHLLKKELQELLSRDETRAEDVRLLVSIPGIGLLTACLFLAEVDVSRFAQASQLAAYAGLAPTEHTSGSSVHKKSRMSKVGNRHLRTLFFMPALSAHRFNPIIANLRQRLTERNKPKMAVVGAVMRKLLHLAYGVLKTRKPFDPHHLQSIPAAG

SEQ ID NO: 268967 - protein, 318 aa, unidentified
MNKQVVGIDISKGWFDGSWEANGRERQQRYSQDPAGYASLVAATPAGSVYVMEATGVYYLALASYLHAHGQRVAVVNPLVIRRYGQMKLLRAKTDAADARLIAAYGRSETLPEWRPAAKVISQLQQLESWLESLTREQTRLMNQQEALAQRPDADEFVRAAQAHLVCSVHEQVVACERQLQQLAQSHFGELYQRLLSIPGIGPKTAVKLIGVTEGFTRFVAVKSLISYLGLSPRVFTSGSSVKGRSHIAKLGMGRLRQLLYLCSWTAKRCNAACRVLYDRLKAKGKPERVIKIAIAHKLVRQAFAVATKNEMYSEAYG

SEQ ID NO: 268968 - protein, 445 aa, unidentified
MSESMITAVSEPEWVAFAAIDWADQKNFWRLLPVGSQRQEQGELDNTPEAVEVWAAGLQQRFSGRRIAVILEQSRGALVYMLAKYPHLVLFPVHPTTAARYRETFCPSGAKADPSDTASLLDLLLRHRERLHQLRPDTVETRLLQFLVEERRRTVDERTRQSNRLADCLKLYFPQVVQWFDDLTSPLVGDLLERWPGLDELQRAHPGTLHKFFHEHNCRGEKRMEERIQAVYQAIPATQDAAVLEAGAMRARGLVRLLATLRDQIAAFDQRIAELVRAHPDGGLFGSLPGAGPALIPRLIVAFGTQRDRYQAAYQVQCYSGIAPVKEASGKTKRVHFRLACPKFLRQTFHEFATHSIRRSEWARAYYEHLRDDEKKSHHAAVRTLAYKWIRIIFRCWKDGKPYDERVYLDSLRRRGSLLGAGLQAATRPEWTTVGGFQKLSENNA

SEQ ID NO: 268969 - protein, 343 aa, unidentified
MEHYVGLDVSLKLTAICIVDQTGRIEREGVVASNPEAIAAFIKSHAPHVARIGLETGATSTWLWTELNKMGLPVICIDARHAKAALKMQINKSDRNDAVGIARIMQCGWYKEVRVKDLDSHAIKALLVSRALLVKIKRDVENQIRGLLKNLGLVIGRAKMNVFALRAAELTEDRPELAGAVEPLLKAREAIERQIADLDRKVLRLARNDAQVQRFMTAPGVGAITALCFLATIDDPTRFKRSRSVGAYVGLTTRRYASGEVDWTGRISKCGDKLLRSYLYEAANVLLTRVAKWSALKAWGIRLAKRSGLRKAKVAVARKLAVILHRMWIDGTEFNWSTKKAAA

SEQ ID NO: 268970 - protein, 414 aa, unidentified
MNTLVSNTSLSGTLIALDIAKKHHDAKIRHPDGRTSYLRIENTLEGFNRLLALTASPHDDIIAAFEPTADYHRNIAWWLHKQGVKCHLVSSVRCARAREMLFKTWDKNDRKDASVIMYLLEQGLSSPFYDPLANGIIDIQEISNTYHQVTLARTRCLNSLVNHYLTLYFPEAEQFLHMSRAEWFCQFLLQFPTPSCITSLNRDLFVKQSWDVVGRKQYKKQFLEHLYDVAADSIALPLSEDSLAVTTFRLQLHRYVGLSAQRLQLEKQAENYLQERSDYRHLRTIPGIGAIIALMIIAESGDLTRFAHYRQYLNFCGFNLSASQSGQKHSGYRLSKRGNARLRYAFWLAATVAVRTRENSFRYKYERYIRENGDKPDQKRKAMTAVATKVARVAHAIVKQDIDYKGYYEISYRT

SEQ ID NO: 268971 - protein, 385 aa, unidentified
MQKPNDLNQSRIVLKQDSTLIAVIEMSLSSWLVAGIVPGVERQPLKKLAVDESALLKLLNRWREEAEKAGRSIERIAVAFEAGRDGFWLARWLRACGIEAHVIHASSVAVSREHRRAKTDRLDTELLKRAFLGWLRGERDHCKMVAIPTTKDEDAKRPNRERQSLVGEQTRIVNRMKAALIRLGIRGFNPKLKKAAGRLEDLRTPEGEPIPPNTLAELRRDMERRRLIGDQIRQIEEARLERMEQAPGDGPHAMVRLIARVIGVGIETADMLVHEVLSRKLRDRRAVARYAGLTGAPDESGSKRREKGLAKAGNARVRGGMIQLAWRFLLFQKDSALAQWYRTRTEGAGRNRKTMIVALARKLLIALWRLVTTGEVPAGVVLRAA

SEQ ID NO: 268972 - protein, 417 aa, unidentified
MLKIVNRNCAGIDVHKKIIVVTIAKTNEQDITEYQTKSFTTFTDDLINCREWLVSNDTLDVCMESTGKYWIPVFNILEKKCHCIITHPKYVRTIPGKKTDKKDSIWIADMFKHGLVEPSFMPPADIRQLRDLMRYRNKLVNVRSSEKNRFQNSLTMSNVQIANVVTDVFGKTSQSILKLMLTNPNLTLNDITPLLRKNLKSSPEEILKSINGNFDESQSSKMNIILKHYDSINECIDELEEQILKLALKYSTEINQILTIPGINEISAIFIIAEIGTNMNNFIDDKHLVSWAGLTPRCNESAKKKKSVRITKAGIYIKPLLVQCALCAIKDKSCPYIKARYESIKRRRGHKKAIIAIARLLLTSIYHILLTGEVFDYERFENLMSRNFNFHNKIKNTPEEMISYLTNLGYYITLQNT

SEQ ID NO: 268973 - protein, 385 aa, unidentified
MKEQNFVPREFDIFGGLDVDKKTIAVTFMNQEGILRSFSVPYRAEHLLNYVSKHFAGKKVAFAYEAGPTGWGLYDRLTAEGHPCVVAAPSMIPKVPGQRVKTNRLDSQKLSEHLRGGQLKSVHIPSEPYRQLRHLTQLRDTFVKDVVAMKLRIKGLLLFEGIEFPPAPPGSQWSFLVKDKLRKLSCSASVRFKLDRLLESLEYSEKQALQTIKEIRRFYKQDAELCQAMAHLKSIPGIGEIVASHLLARIGDPQKIGNVRQLAGFIGLAPSEHSTGERIARGRITRTGDGRLRSKLIQAAWSAIRQDAELREFYRSVSQRHPRDRAARKAIVAVARKLTTRIYAVLKQRRPYVVREKVHSAPLTQEETVPQGTTRRHAEPGENLS

SEQ ID NO: 268974 - protein, 501 aa, unidentified
MSINHFPQEKLATFHAMNQSAIGIDVHSNLIVGVYQSSRFNSTRASIDGDTWNGDSTKKGLEDFAKWCKERKPEVLLMESTGVYWQSLYESLENEGFSNKDIVVVNARDVKNRRGNKTDLSDAIHLAEIALNGDYRASFVPKKEVRQLRCLWRSYHTLKNTRKRLLNVLHKQLCQVGCRASSVFSDIRGKIATQVIELLIGGKSGDEIKEAIASVIKRSRGRLKATPDMVYEALRADMDSKVWYSIRQHLEHIKFIDKQLEAAFANLTIQSAPYEKTIQLLQTIPGIKYLIALGIVCELGDDLSAFKSVRKFSKWIGHAPGNNESAGKRYSGRTTPGNKYLKILLVECAAGIGLMKKGFLHEIHQRFKERIGTKRANVALAHKLCRIIYSILKNRTPYQERYKPILKEHRLGKAIKAVDDLRNVGLSCDDIEVTDTETGNSTIIYGANKYRRKLMKNKWYTEGKQSEMCFSHLLNSIRPVSAGNRLRLTLNLLRYLCYLTY

SEQ ID NO: 268975 - protein, 329 aa, unidentified
MFVGLDLHKNYLQAAVMDDQGRVLSQERIPNKDDSIEEFTRKTLKDSHAEIVIESSSTWYHVYELLSQKENCHVVLSNPVKIKAIASAKVKTDKVDALTLANLLRTGYIPESYIPPRHIMDLREMVRYRTSLVRMRVEAKNKIHAILLQNGTRIKEKPFTIAFVEELRRLGDYRIDGYLNIIQSLSQQILTVSSTIKREAREDESTRLLMTIPGVGYFSALLILSEIGDINRFPDSHHLCSYAGLTPSTHSSGGVTYHGSITRSGSRYLRWILTECAKAHIRTRRDSQLTRFYTRLAKRRGGSKATVAAASKLLRIVYWVLKEKRPYHS

SEQ ID NO: 268976 - protein, 426 aa, unidentified
MSITQNEKISQVKNTTLVVGIDISSETHYARAFDWRGLELSKIFKFESTSYGFENFSEWLAEICKTNQKDNIIIGAEPTGHYWFTLAEYLKEHDIKFVFVNPMHVKRTKELDDNHPSKNDRKDPKVIAKLVIEGRYLIPYIPEDIYAELRIMNENRMRINREMIAIENRIKRWFAIYFPEYKNVFGNWECDSSIEVLINAPLPADAVNMGAEAINGLWRAKKIRAVGMKRANLLVETAKSSVGVKHGASAARCEISMLIEDYLRKKEQMQRVVEILETLCIQVPNAEKLLNIKGVGILTVASFFGEVGDIRRFDSPKQIQKLAGLAITENSSGKYKGRSCISKRGRKLLRYTLFQAVMSMTMHLPEFRELHRYYTTRDKNPLKGKQSKVALCCKVIRVFYTLLKKGVEYDSQKLMKDIVRPELMAA

SEQ ID NO: 268977 - protein, 451 aa, unidentified
MSDLPVLDARAAFVDVGSEQMHVSVAGGPPKVFGAVTAQLHVLRDWLEAQGVRSVAMEATGVYWLPLYGVLEAAGFEVRMVNGRQTRNLPGRKTDMQDCQWGATLHSHGLLRAGFVPPAHIRRMQDYMRLRADHISMAATHVQHMQQALERMNVKLHDVIAKLTGVSGLAVVRAILGGERDPQRLLALCDTQIQRAKAERVKESLRGTWTEEHLFALSQALQSWEHYQAQIAECDRRVEALLHDIDPGPPPSARALAARPSRPGVNAPDIPDLRAILAQICGGQDLTQLPAHTEYGVLQVIAEVGTDLTKWRTEKHFTSWMGLAPGSHQSGKRKRSAKRSRNRAGRLFCVIARSLARSKDIALGGFYRRMAARRGGLVANIALARKLAALFWRVMVKGMDYVELGLQQYEAKVLETKQRSLRRLARQLGQQLLSMTTPLPTRGPSTNNATS

SEQ ID NO: 268978 - protein, 317 aa, unidentified
MNNSKVQISINIGVDVGKANLDIALHPSGQFYSIPNSEAHIRKFVKILKGYSIERIVVEATGRYEHALVRACDQAGLPIIVVNPTSVRRYAQAIGVLAKTDRIDAQVIAKYAATLKPEFKPIPDKTSQKIKDLLTRRSQLLEMSTMEKNRLQILPKTLHRSIKSLLKMLQSQIETITKQIEQEVAKVDHWRIKAEILTSVPGVGKVLTYTLLSELPELGSLNRKEIAALVGVAPINRDSGKLNGKRRIRGGRHRVRTVMFMAMLSSIQCNPVFKRFYEHLKAQGKIPKVALVACMRKMIVVLNTMVKNQEPWRENMA

SEQ ID NO: 268979 - protein, 341 aa, unidentified
MTNYIGLDAHSKTCTAVVVDSSGKIKVKASFPTSEKHLLDFIKGVKRPRHLAFEEMNMAQWLFVLLKDQVDDLAIAHPADLPKHRGPKNDDVDAMRLADELRRDTITRVFHETGKEWDLRMLVHSYLELTTDLVRSKNRYKSFLRAHGLFVTGSSVYTDRETLNSITKDPDRFVAVNMFEQLTDQQDAKNCYEEKFAKFAGLWPVVGNLCTIPGIGTIRASIIAAIVCAPHRFANKHKFWAYSMLVRYTDESDGRIYGSRKAHGRRELKSVFMGAATAVLQSNSGLRRYYDRLRSKGVADKHAKKAVARRIAAIALMIMKTGAKYDDLHEEGRRKLDTVKS

SEQ ID NO: 268980 - protein, 343 aa, unidentified
MQTITTIGLDIAKSVFQVHGVDAGGQVIVRRQLKRRYVLTYFQKLSPCLVGIEACASAHHWSRELQALGHTVRLMPPAYVKPYVKRQKNDATDAEAICEAVTRANMRFVPTKTSGQQSGLLLHRARHLFIRQQTSVINAIRAHLAEFGIVAPVGRHGVEELLNVVADPNDKRVPEIARACLSAFGAQLRMIKEQILEFDRLISAWHRSNELSMRLDEAPGVGPVLATALVAAVADPKSFRSGRNFSAWIGLVPKQHSSGGKNRLGNISKQGDRYLRGLFVAGALAVIRYAKIHGTTHRPWLTALLARRPTKVAAIALANKIARMVWAMMARGERYKEPFALAR

SEQ ID NO: 268981 - protein, 434 aa, unidentified
MRILYERCCGLDIHKVSIAVCVVITRDGQTEQETRRFGTMTADLLELAAWLKARGIQQVAMESTGVYWKPVWNILEAEGFDLLLANAQEVKIVPGRKTDQKDSQWIADLHQHGLLRKSFVPPRQVRDLRDLTRTRATLAQEHSSTCNRIQKVLEDANIKLGTVASDVFGASGRAMLLAMMKGESDAEALAELSKGRLRSKIPELRRALEGRVTGHHRFLIDRHWRQMESLENQMRQFEEEIAERMKPTAEEIARMRESLPAEAPLPPSPREEAILLWMELPGVGLTTACSMVAELGVNMEQFPSSAHVASWAALCPGNNESAGKRMSGKTRKGNVWLRRTMCEAAWAAAHSKKTYFAAQFGRIAARRGKKRALLAVAHSLLVAAYEMLKHKEHYREFGADFFEGLNKDQVKRRLVQRLAKLGFQVTVTQTPTAE

SEQ ID NO: 268982 - protein, 412 aa, unidentified
MYYVGIDIAKRTHVAVIMNEDNSLEIKPFSFNNDKSGFKKLLIHLQTLCCDLSDIVIGMEATGLLFENLYRHLQSLEYNVVLLNPYQTAKFREMDTMKRVKNDNIDSVMIAALLKSGRFSEGYVSQEQLQSLRELYRHRSSIEDQIKSLKRRTSAILTVVFPELETVIRDPFNVTGLALLDKYPTAKHYTNASIERILKTFRGIRGNNFNRNKAQALLDASKRTIYSGIAKDARAFNIRTNLEQIRLLQKQLDQTLEMMQDLFNSKEVKQENQEVMEDIIDNLRTIPGVADKTILALLAECGNLDRFYAPKALIGFLGLYPTLSQSGDSTRNGRLAKRGASLAKKAIYLASIAAIRHNDEMRTIYMNYRSKGRAKKEAIIIIARKLLTIIYTIYTRNIQYDPQRVFVAKPNQ

SEQ ID NO: 268983 - protein, 382 aa, unidentified
MHASNICTPIADHIGTIFVAIELSQKTWLAVVRSPDRDRISRHKLEGGNDAGLLALIESVRARAARALGSAPAVMSCYEAGYDGFWLHRRLVAAGITNFVFDPASIAVEQRRRRAKTDRIDGELLLRTLMAYCRGEPRVVRIVRVPSPEQEDVRRGSRERERLIKEQTGHSNRIKALLRTLGLAAGNPRRRDWLRWLAEQRDWQGQPVPPHYLAELKREHARLMLVGEQLRGLSQTPDATDVPAAARMAKQKTQMRQLKSLGPASAGTLIDEALYKDFANRRQVGSYFGLAPSPWASGRTHREQGISKAGNPRARHQAIELAWLWLRHQPDSALSRWFRQRTAGASARVKRIAIVALARKLMVALWRYLTTGLIPEGAVVKA

SEQ ID NO: 268984 - protein, 342 aa, unidentified
MLLIGCDYHPSVQQIAMLDTETGDYSEHRLKHSDGEAEKFYRNLKLQTPQIRVGLEATGHRRWFERLLTELDCELWVGDAARIATMRVRKQKTDRQDAQLLLKLMIEDRFPRVWISSLADRDLQQLLWHRHRTVQMRTRILNQLQSIAMNEGIQRRGGLRSVQGRKRLEQIPLGPWGRRRRDDLLVLLDQMNERVNELTTAVQQEAEKRPEAQLLMTHPGVGPVTALAFVLIIGYPERFQCGKQIGSYVGLIPTESSSGAHRRMGHISKQGNVLLRLLLVEAAQAAARFDPEWHKKFLHLAMRRERKIAKVAMARKLAVSLYWMWRRQRSSQMASNIGSYAG

SEQ ID NO: 268985 - protein, 340 aa, unidentified
MKLYGAIDLHSTNNVTVVIDEEDKIVYQKRLPNDLALILKELSIYQSELQGIVVESTYNWYWLVDGLMEQGYKVHLANTAAIQQYEGLKYTDDHSDARWLAHLLRLGVLPEGHIYPRAERPVRDLLRKRSQMVRQRTTNLLSIQNLLTRNTGSSMKASRVKGLDVQQVDELLPNEDLALAVKANLAVLSSADEQVELLEQTVTQRVKLRPQFSFLKTVPGIGEILALTIMLETGDIRRFLSVGNYASYCRCVGSQKISNGKKKGQGNTKNGNKYLAWAFVEAAHFAIQYNSRIKSFDQRKKAKSKAVVAIKAVAHKLCRACYYIMRDQVPFNITKAFGQK

SEQ ID NO: 268986 - protein, 476 aa, unidentified
MAQQRKARSALVPIPMLSQETLYIGVDIGKFRHVAGFLSRTLLARHGRFEGCPTFAFEQSREGFRSLVERIRELVPLEQVMVLFEHTGHYHRLLEQYLLELDITVYRVHVQERPKGMLKTDKRDALRLANLLYTQLELGAQVEDKMQLVRRAVAPTGAAAQLRGLIRHRYELSHHGTQLKNKLTAICDEIFPEFTQVFHDPNRPTALSFREQFPPPTALATASLSALQALRVRNFPSDAQLLKLQQLARETIGTKEVDRQKGLLLEQTLLLKELRLVQEHLALLQTEICAIVTNCREGQILLSIPPIGHVQAATIIATIGTIANFEKASELKSYFGWAPRRHQTGVTFDRTKLTRTGVRPVKQMLFLMATCATTMDCEWSRLYQRLLPRLASYDERIKGYRGKLKVIGRIAGQMASMIFALLKTDQELLSQVPAGQEPPPPMLYDPAVHRRHQEGHYRSLKPGTLPRKIIQLPKHT

SEQ ID NO: 268987 - protein, 354 aa, unidentified
MRIIGAFDVHRKQITYKWLDTETGEIQRGRIMPGVRKAVREFLVPFEGLDAHFALEATTGWRFVAEELSRVGLVAHLAEPADTAALRGSKRRAKTDRRDCDHMMDLLGTGRLPESWLPPAHVLEIRTLVRLRKALTDTRREWQQRVQAQLFHQGVPRIPAITTQGRAQLAAVDLSAAGRQVVTTGLAVIDHLDYQLAPLDTYLVRFAKVQPGCRALKQRLFGVGDLTAVFIWAELGDCVRFSSSDDAVRYAGLDITVYESADKRPPGHLSRQGPEALRWALYEVAQSAARSSSSDYAYYLAVKRRLNHKRACLSVARKVCRRAHHLLRSFGDDAFAPVKGSVLPSFDRPAMATA

SEQ ID NO: 268988 - protein, 323 aa, unidentified
MSQPNLQCMGIDVAKLSLDIATTDTIEPFTVGNDEDGFAVITDKLKHTKINLILMEATGGLEAAIACKLQSEGYDVVVINPRQARDFARSMGYLAKTDKLDAAMLAQLALVIDRHPDRSRYIRHLPDEARAVLATMVVRRRQLNHMLVAERNRLYPSHPQSRKSIDNIIDALQNELDRINEQMKQHMTAFFQEQARLIGSVKGVGDITVASLIAELPEQGKLNRREISALTGVAPLNRDSGKMRGKRTTFGGRAGVRATLNMAALVATQFNPAIKLFYQRLLAAGKPKKLALVACMRKLITILNTMLRKGEEWNASFQSQVIS

SEQ ID NO: 268989 - protein, 371 aa, unidentified
MNYNTKYVGLDVSKEKIAVAVADEGRSKPRYIGMINYTVEAIRKLIKRLGAPEQLEMCYEAGPTGYGLYRLLKSMDIKCEVIAPSLIPQKPGSRIKTDKRDAENLATLYRAGELTPIFVPTEDDEALRDLVRAREDVKEDELRAKHRLTKFLLRNEIRPPMGMKKWTVKYWEWLRQLKFPRSASRVVFQEYVHQLEEYQQRLGILGEEIKEQAENGVHAPLIQKLMTLRGIAVITATSVVAEVGSFERFLHPSGFMAYTGVVPSESSSGDARRQGSITKTGNRHIRKLLIEAAWSYRHKPTVGRDLKRRQKGQPPNILGVSWKAQHRLHKKYYRLMGRGKESGKAITAVARELAGFIWAIAQEPNGETELS

SEQ ID NO: 268990 - protein, 327 aa, unidentified
MFAVHCVDQHGKTVLVKPKVSRAALPELIASLPPSVIGMEACSGAHYWARLFRQYGHEPRLMAAKFVSPYRMAGKSGKNDAADAQAICEAVRRPHMRFVPVKDESQQAMQCLHRTRQGFIEEKTATYNRLRGLISEFGVIAPQSTDSLRHMVSEQKSSLPLQVQQCVNDLLEHIDLIEDNITEYDRILSLMAKTDHRSQRLMELKGIGPTTACALVASIGNAHDFKNGRQLAAWLGLTPSQYSSGGKSKLGRITKAGDSYLRTLLVQGARSVLIGAEKRTDSFSRWVCSLVERRGYWRAVVAIAAKNARLCWASLHYGDDFRLYSAI

SEQ ID NO: 268991 - protein, 387 aa, unidentified
MNRSNHRVVGLDVHPDSFAGAILEGSDPWQARVKSTSTRVALRLLEKWALRHTRESDCLVLESSANAFAVAERLGRLKRKVLILDSHRAGKVGQSYCATDRVDAIKIARIYLSALSPIVWQPDQKTRERREVFSAYQAVVKEGTRLKQQIKSMLNEHCVRLEKGFRLSHPTAIERLLQRRKWTEAQKMLLEQLHAGLVGARSRRQQLRRYMAREILAEKELLRLTRLCGINLITLYGLIAAIGDINRFANSRKLVAYLGLNPSVCQSGEWEGATALKRHGRGAIRALLIQSAKKLLQVNNPLQKWGLAIALRRGRNKAAVAVARKLCVTVWHVMQGHVIGAIERLDTLHAKLHKLATDLGVPAIKALGYETKEAFVQKKLYLLQSYP

SEQ ID NO: 268992 - protein, 345 aa, unidentified
MRYVGIDYHKHYSVLCATDERGQELKQRRIKGNTAAGFAQFFSELGEQNKVVMEACWNWGWLYDLLGQIDEVGEVVLAHPYKTRLIAEAQIKTDRIDAQALAKLLRGDLIAQSHAPSAPTRARKHLLRQRLFWVRLRTMLRNRIHAILDRQHGMERPQLKNFFSRRGQTWLEGVQLPCAEDQPLLKQDLEVAELLEQKIKQLDRAIGQSQSVEEKLLESIPGIGPLFSSVIATEIDGIERFNSAAKLAAYAGVVPTTHASGGRVFHGRLLWQCNKWLRWALIEASWTAIQFSGYFGAIYRNGRARVKNKHVAITMVAHRLAKIIWLLLKENGLTLKLSRIAPKIK

SEQ ID NO: 268993 - protein, 366 aa, unidentified
MPTIADTGRPVTGGVDTHAEVHVAGMVDQTGRVLGTREFPATTKGYAAALAWMRGHGDLAKVGVEGTGSYGAGLARYLATQGIEVAEVIRPNRQARRRRGKSDPADAVAAALAALNGEASGQPKSGDGAVESIRALLVARRGAVKARTQAGNQLRSLIVTAPQMLREKLAGLPAPDRVKAAARFRPGDLASPAEAAKAAMATVARRHQALAAEITQLDTALETLLAHAAPAGFRNRTGVGARVTATLLVTAGDNPSRLRTEASFAALCGASPVDASSGKQRRHRLNRGGDRQANSALWRIVFTRMATDPRTQAYVARRTSEGKTTREIIRCLKRYVAREVYKALTNHARQPNQDSATQIHSMITLT

SEQ ID NO: 268994 - protein, 421 aa, unidentified
MRGLMAKRVRTVKEGTLIVTVDIGVASNTGYCATVDGRDAKTFTFANTREGFEKFWYMIVASKSRFICNEVIVGYESTGPYAEPLVHFLGNKPVRIVQVNPMHTKRMKEVNDNSPLKTDDKDPRVIADIIRLGRALSVIVPEGDTAYLRRLNNARERHIREQTALLNQLQQLVFLIFPEFMSVFKDMKGKTARGILRNYTTPQRIGALDRDKLGDEMRKQSMGRFRRKDAEHLISLAQNTVGIKEGLAGIALDVHHILMQLEAEARFIGEIETEMAETLERIPFSPRLLSIKGLGIVSIAGIIGEVGDFSKFKTQSEIMKLAGLDLYEISSGNRKGQRRISKRGRSLLRKILYYAAIQMIRKNGIMHRYYTRLTSTGMLRIMALVAVARKLLRIIYAIVRDNRDYAGEYQAPTRRVIKRAA

SEQ ID NO: 268995 - protein, 440 aa, unidentified
MIDTNQNTEIEFAAFVGIDWADQKHAWALQIPGHLEVERGDLDHTPQAVEAWATELGRRFGGRPIAVALEQSRGSLLFMLTKYVHLVLFPVHPTTLSDYRKGFRPSGAKSDPSDAGLLVDLLVRHREKLRRLNPDTEQTRTLQFLVEARRKFVSDKTRYSNRLTAYLKMYFPQVLGWFSEVTSPIAGDFLERWPSLQKLQKARPETLRKFFIQRHSCTLDNVDRRLEEIRSALPATHDAAVACSCSAAVLGLVRIVRTVRDAILSYDQQIETLARKHPDFAIIDSLPGAGPALVPRLIAALGTQRDRYRSASELQSYSGIAPVLASSGKQHWVHWRWACPKFLRQTFHEWAAHSIGSSTWARAYYEQQRAKGKPRNTVVRALAFKWIRILFRCWKERKLYSEEVYRQSLVRRHQLAAKSSPVQLQWKTCAGFSKIAAITP

SEQ ID NO: 268996 - protein, 409 aa, unidentified
MEAIRERVAGLDVHRDVVVACALSLAGRKRRTDKASFATTTAGLGELASWLADHDVEAVAMEATGVYWKCVYYALEGLFDDVMLCNAQHVKNVPGRKTDLSDAEWLADVVAHGMVRASFVPPPPVRELRELTRYRKTQISIRGQEVQRLDKVLQDAGIKLSSVTSKVLGRSTRDMVEALIAGERDPERLAQFARTRMRTKIPALEQALVGHFGAHHAVVARRALAHIDFLDATIEELTGEVLARLGPFQTAVELACTMPGIEQLTAQVFVAETGGDMSQFPTPKQLAAWVGFAPANHQSAGKRRAAGTRKGGQWLRRAMIEAAWAATRSRGTYYAAQFRRLSARIGPNKAIIAVAHSMTVALWHMLSTGTPHNDLGADWFRRQDPDAQTRRLVNQLQALGHRVTLTPAA

SEQ ID NO: 268997 - protein, 386 aa, unidentified
MGTQTFIPRDYDVFAGLDVDKKSISVTFTDHQGFLKSVTMPYSVEHLVNHVRKHYGDKKVAFAYEAGPTGYGLYDGLEAQAYTCVIASPSMIPKAPGQRVKTNRLDSRGISENLRGGQLKGIHVPTPLYRELRHLTQLRDTLVSEMVGMKQRIKSLLLLEGLEFPPAPAGSQWSFLVKKKLRKLPCSSTVRFKLDRLLDSLEFDEKQVLKTTQEIRRFCQTDPELSQCINYLKSLPGIGWIVSSQMMARVGDWRQIKNIRQLPAFLGLVPTERSTGERIERGSITHTGDGRLRSKLIQASWSAIRQDGELREFFRTVAKKHPRHCAARVAIVAVAHKLCVRASVVLMQQRPYEVRQKVKSAPLTQEETVPQGTTRRRAEAGESRTP

SEQ ID NO: 268998 - protein, 341 aa, unidentified
MDKELYFGVDVSKKTLDLAYYDGETIDWKNAHIQVSNDDAGFKKIGSWVAKVGKDFDTFLFCMEYTGLYNQNFRLWLESKEYIYGMVEPRKMHRFEPDLDDDQRSLDRIKTDELDAFRIAIYCEQNHKKILRNPSKLPSPVYFKLKRLLAERKQNTKQSTLYKQQLHDICAYDTDLSVERKKLLLKSMKENQKAIDREIDSYMNEDASISKNYDLLTSIPGIGRIIALETIVLTENFTAISNPRKYACYIGIAPFKKESGTSVRKRTTVSKKGFSEAKADLSIAVLSAIRNNPSIRDYWIRKRKEKCGGIVLNAVKFKLVLRMFAVIKRGTPYVETDAYKN

SEQ ID NO: 268999 - protein, 401 aa, unidentified
MISVGIDVSKGKSTVCILKPYGEIVASPFEVLHTESELKNLIQMIQRMDGEIRIVMEATGIYHLPMLSSLQDQNLFVAVINPFEMKEYASRGLRRVKTDKQDSITIANYGIDNWYRLENHQGRDDVYSELKLLGRQYCHYMELHVKALHELTHMLDYTMPGVKKEFNSWSESNGKDKLSDFVERYWHFDNITAMTKEEFIEDYVSWAVEKKYHQNRSKAAELYDLASDGISTLSANTPSTKMLVLEAVRVLREIDSTLLKIITRMKELAKTLPEYNTVRAMGGVGDVLAPKLIAEIGDIRRFHSGKALVAFAGIDAPPYESGQFVGTNRKISKRGSKVLRKIGYETMRVLKTHKAPEDDAVYRFILKKEAEGKSKRQAKIAGLNKFLRIYYARVSEVYKAL

SEQ ID NO: 269000 - protein, 356 aa, unidentified
MITNAQVVPSYNVFVGIDVDSKSYSFTIMNTETATTKSKKTSAHPQLFVKHLQERLPGARILCGYEAGGTGYALYDTLMAHNIECFVVSPNTIPKTAKDMVKNNRIDSLKLSEALHANRVHSIRVPTAEYRHLRHLIRIYDDHAEQQKKAKQRIKALLLFESVPMADDLTRTRWSYRSIEALKHIALPMGAKERMQSLISDLQYGRTKLAETLRLIKQYCFTTPAIKEYMDCLISIPGIGIRVASYILGKIGDPQHLRNPQEIGSFFGIVPTEYSTGDTVARGSITHTGNAIARDLLVEAAWVAIRHDTELRQFYHRIKSRNSRQSGAPKAIVAVARKLTTRIYAVLKNKRFYEPR

SEQ ID NO: 269001 - protein, 388 aa, unidentified
MIYVGIDIAKLNHFAAAISSDGEILIEPFKFTNDDDGFHLLISKLASYDKNSIIIGLESTAHYGDNLVRYLVTELYHVCVLNPIKTCQMRKNNVRKTKTDKVDTLVIAKTLAMQNTLSFISFFDLDMMDLKSLGRYRQKTIKQRTRLKIQLTTYVDKVFPEIQYFFKSGLHQHAVYALLKEAPSPKEIASMHMTHLANLLKSNSHGRFSKEQAKELRVLAQKSVGANDSAISIQITQTIQQIELLDSQLDKIEAAMTDIMKYCDSVIMTIPGIGYINGGMILGEIGDIHRFSNPNKLLAFAGLDPSVYQSGNFQARRTRMSKRGSRVLRYALVNAAWNVVRNNDTFKAYYEAKKNEGRSHYNALGHCAGKLVRVIWKMLTDNVAFNLE

SEQ ID NO: 269002 - protein, 466 aa, unidentified
MYSGPLAPRSGSSLSKSLSRNQPFSAVRSFSEPVQNIRQPGLWSPFRPVKLPLSTAPRPVPCISNRTGLGDRISDDAQTLKGIDSRPRERERDKNNRHDRPLTLRSKRPWESVGRRVDSRKEPVQMPGRKARIRKAGPPRVPNSPRKETVNPTTEIFIGIDVCKARLDLHVLPTGESWSTKNEDRAVATLVSKLGALKPTLIVMEATGGLERRALAALLTKGLPAVAVNPRQVRDFAKAKGILAKTDSLDARVLAMFADGIRPAVRPASDKETEELDAVMVRRRQVVDMLSAEKNRLSANPPSKRVTRALRRSISHLEGELKDIDDDINSSIRKSPAWREKDELLQSVPGVGPILSRTLLAQLPELGTIDRKEVAALIGVAPMNCDSGKRQGRRVIWGGRAAVRAVLYMASMSAIRCNPVISNFHARMVKAGKKPLVAIVACMHKLLVILNAMARNNSPWKMEVFA

SEQ ID NO: 269003 - protein, 422 aa, unidentified
MCLPFILTRGLLWFWPEQSRTNGRDTRVPEALQCKQFELANTPMKSELYLGLDVDKEWIVITVAEWGRNGAVQDLGAISNDLHALEKLLARLRKRYGPEVIIRACYEAGPCGFTIARRLRQLGVECAVVAPSLTPTRAGDRLKTDKRDARKLARLLGAGELTEIYIPEPTDEAIRDLCRARSDAVDDRRRSRHRLKAFLLRHGYRYQGKSAWSAAHERYLRELVLPHPAMKVILEEYLISVQLASERIARCEAAMSDLLGKWRLEPAVRALMAMKGFQTVAAMIVVSELGALDRFTHPRQVMAYLGLVPSEKSSSDRRRQGAITKCGNAHARWLLVECAQHYAAPPKVSKELSRRQQNQSRAVRTLSWKAQNRLHQRYCRLMARRLLRNKVMVAVARELCGFIWELLRTQACYHAPCPSGIK

SEQ ID NO: 269004 - protein, 423 aa, unidentified
MNSVGIDISKGRSTIAVMRPFGEVAISPFEVRHTDSELSELARRLKSLNGETRVVMEATGNYHAPVAKQLHDAGLYVSVVNAKLVHGYGNNDLRRVKTDRKDAIKLANYGLDRWLTLPRYIPEENTRLLLKNCYRQYRQYSKVQTVLKNNLISLLDMTFPNANRLFNSPARADGSEKWVDFVAEFWHCECVSERPLKSFVNKYWRWCRKHGYNFSEEKAHAIYDEASGHIGVMPKSETTKLLVEQAVSQLSATSAALAVLKQEMQSLSSQLPEYPVVMDMFGVGPTLGPQLIAEIGDVRRFYSKKALVAYAGIDAPPNDSGDVIGRHKSMSKVGASSLRRTLFLVMSVYLQNSPPNEPIYQFMNRKRAEGKPYRVYMMASANKFLRIYWRPAEIASKGPARKANCGAKEKAITEFFQILYTEQ

SEQ ID NO: 269005 - protein, 341 aa, unidentified
MTIKVSGLDIAKDVFQVNCVNEMGEVVIRRRLRRSQVIGFFESLPPCLVGMEACATAHYWARELVALGHDVRLMPPRFVKPFVKSQKNDAADAEAICEAVQRPTMRFVPIKSTEQQAALLLHRTRDLLIRQRSGLISSIRAHFAEFGIVTHRRVRDIERLLRLLTASPTRLPMLAREMLDVLAAQLRDVAARVSAVEAKLLAWHRSSDVSRRLATIPGVGPITASAIAATAVDANQFSSGRQFAAWLGLVPQQRSSGGKERLGGISKRGDGYLRRLLIHGARAIVGWRKRSARTTDYWIGGLLNRRHMNVATVALANKSARVAWALMKYECEYDHRRARAA

SEQ ID NO: 269006 - protein, 336 aa, unidentified
MKVRTIGIDLGKAVFHVVGLDQPGNVVLKRRPSRSQLLRQLANTPACLIGMEACCGAHHLGTALIAQGHEVRLIPPQFVRPFVKSNKNDYKDAEAIAEAVQRPTMRFVPIKTQDQLDLQALHRVRDRLVSRRTAVVNQIRAFLLERGITFRRGRKYLQLRMPLILEQLWQEWKALSSQIEATSQQIERIAEQDAVCQRLQQIPGVGPLIATAMVAAVGNGSAFVKGRDFAAWLGLVPRQHSTGGKAKLLGISKRGNPYLRRLFVHGARSILTTPQRDKLALDAWMQQLEQRMHRNVAVVAVANKLARIAWAVLAKGANYHWPAKFCAHESGQPGTA

SEQ ID NO: 269007 - protein, 458 aa, unidentified
MQTCPPGTVAGFASVSGSSAHEVVERRDEVPTRPAMRQGPGCQGAPLVPHNTSTSASEVFAGIDWGGSFHQVCLINAHGEVIVQQRVQHDLAGLAELDRLLLVHRNAASRLRVAIERADGLLVEHLHTIEVEVFCVSPKISARARERYRLAATKSDAFDAFVLADTLRHEHRHWRALSPASPALAELRAISRDRDRVVIAQQATENRLRAVLEAYHPAPLHLFSSLDRDITLDFVTDYPTPEQAARVGEARMQQFCRRHGYSGRTDPTVLVERLRPHLLSAAEGTEAGKAFSANMFTEELRLLNAHLRAYDKRLVELLDQHPDAPIFTSFPGIGPVVAAALISEMGEDRGRFPAPEALLAEAGLSPVTRASGRTRQVRFRYAANRRMRHMIDWWAFVAAREDAWSRRIYDDARARRQGKYRALRGLGSRWTRILWRCWTDHTTYDPAIHHKQQEPAQA

SEQ ID NO: 269008 - protein, 343 aa, unidentified
MTVYVGMDVHRKRSQVAIVDDAGVQQRNRNLANDPAKLIPVLGALPTGTPVAFEAAYGWGWLVDLLEELELEPHLVHPSRCKAIASARLKNDKVDAATLAQLLRADLLPEAWIAPQATRDLRAVLRHRASLVRMGTACKNRVHAVLADRGIPDHSSLWTGPGRAWLADLELPATPRGIIQDCCGLLDALATPIGRLEREIAGLAKPDPRVQALMVLPGVGRLTAMTLVAEIGDIARFPTARKLCAWAGLTPQVRNSDRKVRHGHITKQGSPWVRGILQEAAQTAKRHPRFAPAYAQLARRRGTHIATTAIARRLLARSFHILTQLETAPAPEKASTGRARVSA

SEQ ID NO: 269009 - protein, 322 aa, unidentified
MTTHAHAIQTIIGADVAKAEIVICHHDLNQLQTIPNQPRALAQWLKTVPITACIAVEATNTYHLTLVELAHKRGHRVYLIDGYRLNHYRKGLGGRAKTDASDARLLARYLAHEHAQLRPWTPPPPAYRLLQRLLRRRAALVKTRVALTQSFGDDAAMRRLIKPVLLKLNQLIRQLEQQLMQTAAQADVDHDIRRCRAVEGIGPLTATALVMASLRGTFTNTDAFIAFLGLDVRVKESGTYSGRRKLTKQGDPEIRRLLHTAAMAASRQAAWKPFYQRHLARGLKPTQALVALARKLARVAFALITQKTEYQTKTFNEGCCAT

SEQ ID NO: 269010 - protein, 372 aa, unidentified
MQKILYIGLDVHKASISVTTAEEGRDGEVRFIGTIPNTPTDVAKLAKRLANEGRRLAFCYEAGACGYGIYRQLVDLGHGCTVAAPTLIARKPGERIKTDRRDSQKLALQHRFGDLTEVWVPDPVHEAIRDLVRARMDAVMQLMRARQQCLAFLLRHGRNYGPGKKNWTLRHRRWLATQKFDQTTHQIVFHDYVEAVWSAQDRRDQLEARISAMLSDWSVAPLVEALRTVRGIDLISSVIFVAAVGDLGRFESPRQLMAYFGLVPSEQSSGSRIRRGGITRAGNGEARRMLVEAAWSYRYQPRVSSGKTDVVERQPKPVRDIAWKAQVRLCGRYRKLAAAGKKPTVVVTAIARELSGFVWAIGQTVRPPMPMV

SEQ ID NO: 269011 - protein, 459 aa, unidentified
MSPRQKSKKKIRSATKSTPSLPVCHPHAAGIDIGAREIYVAVPPERDPQPVRVFATFTEDLLALRDWLQACGITSVAMESTGVYWIPLFQILEAAGLEVCLVNARHCKNLPGRKTDVQDCQWLQYLHAVGLLRGSFRPPEAVCAVRSLLRHRDGLVRAAATCVSRLHKALTQMNVQLQHVIADITGVTGLAIVEAILAGERNPLTLAKLKDGRIRATADVIAKSLRGDWRGEHLFTLRQCLDTWKHYQAQITACDTESAGLIQGFAAKVDVAAQPLPPRTSTHKTPQKNEPRFDARAQLYRTCGMDLTQVPGIQSGTALVLVAELGPDFADRFPTAKHFGSWLGLCPDNRITGGKIMSSTTRDVKSRAATALRLAAQGLNKAKNYFGDLYRRWKARLGTPKAITAMAHKLARILWHLFKYRQAFDPEVFKQEEEKMQRKKLARLHHNAAALGFKLVPNQ

SEQ ID NO: 269012 - protein, 474 aa, unidentified
MLLSSMEEPPVKNKRRRGQPRLSVLERINPNAAGIDCGSSEHYVAVPPDRDPTPVQSFRTFTSDLLRLADWLTTCGITSVAMEATGVYWIPIYEILEARGFEVHLVNARHVKNVPGRKSDVSDCEWLRELNIVGLLRGSFRPSDAIVALRAYLRHRQTLLETAGIHIQRMQKALLQMNLQLPVVVSDITGVTGLRILRDVVAGQRDPHRLAEHRDHRCHASTAEIVAALTGNYRPEHLFVLQQNLELFDTCQAQLAACDRAIEAHVQTLVAPLALPSTALPAPRVTRTPRARDNAPRFEIRPSLHHLTGGVDLSQIDGVAPYTALRLLSEIGTDMSRWPTEKHFTSWLTLAPKNKISGGRLLSSRTQPSANRAAGILRLAAMSLGRTQTALGAFYRRLAARIGKPQAITATARKLAILVYRALKGELVYQDPGADAYDHHQRTHALRRLRQRAATLGFALVNRETGELLSAGAS

SEQ ID NO: 269013 - protein, 341 aa, unidentified
MESVIGIDAHKATLTCSAVDELGRGVDSITAANDGRGFAKIVRFALRVGATRVGIECSGSYGLALAQHLVAAGFDVKEVPGQLVKQLRRALARGKDDAMDALLIARVVARDKNLPPPPLKGVTHDLKALVDHRETLLREATRHRNRAHAMLTQLRPGYWRMVPALTSARRLQAARRLVEGDTGVRAQLLLDTLARVEELQSSAKVMERQIEALVKASGTSLTDIVGVSAITAARILAELRDVGRVADQSAFGALTGTAPVPASSGKTDRWRLNRGGNRQLNRAIHTIALTQISHDPRARAYLERKREAGKSRKDAMRCLKRHLARVVYRQLVADRMLLLLT

SEQ ID NO: 269014 - protein, 423 aa, unidentified
MEVGRVEVAQDEQEIIARVAALDIGKAEVVCCVRVPGKGGSRLQEVRTFNTMTRSLLVLSDWLAGLGVTRVVMEATSDYWKPPFYLLENTFQTWLVNAKDVKHLPGRPKTDRLDAVWLCKVAERQMLRASFVPPAPFRELRDLTRYRVYLITARTAEKQRVEKLLEDALIKVTVVVSDVFGVSGRDMMAALVAGQRDPKVLAQLARGSMRGKTGRLEEAFTGRFTEHHAFLLRTMLARVDAITADIDMVQARIDEQIAPFAEAVTRLDEIPGIGITAAHTIIAEIGLDMSRFPTPAHLASWAKFAPGIAESAGRKKGNSGTGHGNRYLARALGEAAVGASRTHTFLGERYRRIARRRGSKRAIVAVGRSILMIVWHLLTDPEKRFVDLGPGYYESRINRNRSTRNHVRELQALGYNVILEPAA

SEQ ID NO: 269015 - protein, 361 aa, unidentified
MSATMTWVGFDVHARSTHAAAIDSMTGELSRMRFGAGIEGPLAWLAQLPGPVRACYEAGPTGFGLYRAATAAGIAMQVIAPGKTPRGPSDRVKTDAKDAELLARLLLAGSLQRVVVPPPEIEAAREMTRAHDACRRDLMNARHRVSKMLLRHGRVYPKPTTWTVTHRRWLAAQRFDEPASNLVFADLLAAVDGLTARKAAIALQLSRLATDPLWWPTVARLRCFRGIDTLTALSLHLELGGDWKRFPRPPALSAWLGLTPSLSQSGESSRQGSITKTGSMLARRLLVESAWHYGREPRLGAALAERQAGQPEHILAISNRAQQRLHKVNRAMKARGKPHNVVVAAGARQLAGFLWAAATAA

SEQ ID NO: 269016 - protein, 431 aa, unidentified
MARPAPTAPLPPVAAYLGIDWADAHHDVALQAADAAAVEMGRVAHTPNALAAWLATLGARFGGRPVAVALETSRGPLVHALLEVPWLILYPINPRSLRRFREAFTPSGAKDDGPDARLLLEFLVKHRERLTAWRPDDAATRHLRALVEQRRTAVELRSQLVLQLQATLKGYFPQALTWAGADLARPLALAFLKRWPTLAALQRARPATVRRFYTSHGCRRAARLDARLAEMATALPLTHDAAIIAPSVLGVQLLVGQLEALGVSLATLDDAIAAAFAAHPEAPLFQALPGAGAALAPRLLVAFGTDRRRYATAADLQQETGIAPVTLRSGQTCVVRWRWAVPTFLRQTFHEFAHHSVLHVPWARAFYHAQRARGKSHHVAVRALAFKWIRVLWRCWQDRTPYDDARYTRALASRGSPIAAHLDCAAMEAVA

SEQ ID NO: 269017 - protein, 481 aa, unidentified
MKTKPPEKIQKATSPSTRGHWNEMNRKQRREMMRQIQSEDLSLEVVHPHAAGIDIGNESHYVAVPPTRDSQPVRHFGCTTVELKALAEWLKQCGIRTVAMQSTGVYWIAVYDILETAGLDVYLVNARDTKNLPGRKSDVQESQWLMKLHTYGLLRNSFRPSQEIRTMRTYWRQRNDLIRAAVSHIQRIQKALTQMNIQLGNVLSDVSGVTGQAILKDILAGERDPHKLAALRDPRVKASEEQIARYLEGNWQEDLLFVLKQEQEAYEFCQQQMAECDRQLQQYLQQREDRSQGASLPQEMRKGRLVRKKGNKPMFALRPELFRITGTDLTQVDGIDVVTAATILSEAGWDMSKWEDEHHFVSWLRLCPDNRISGNKVLGKGRLPTNNRASNALRMAASTLRLSNTYLGAQFRRFRTKLGAPVAINAMAAKLARLVYRMLRYGMKYVDQGAKIYEAQHRQRQIGQLKWNAAKLGFRVVEAAT

SEQ ID NO: 269018 - protein, 314 aa, unidentified
MSYIGIDLHTTQLTVCYLKTAEEYEFKKYRLEEIEQFLADLTQTDQVAVEATGNTRWLVNPVKEKVGRVVIVNPREFEVIKQSVKKTDKQDALSLARFLAVDMLPEVRARSERAETVQRINETRSKLVRLKTALLNKIHALAVSTGRKLKKESLASERGLEKVLSFEWTASERVELEIIIEQIRSLKVGIGKLDKVLEEQSKQLSGFENIITVTGIGARSAGVLLSVIGEVEDFADENKLASYFGIVPKVANSNEKVSHGHITKRGSKTGRTTLVQCTLVAIRHNSYLKKYYEQVKARRGHGKAKIAAARKYLT

SEQ ID NO: 269019 - protein, 400 aa, unidentified
MLLFFEVITMIFVGIDVAKDTHYAAVSDDSGAVLVKPFAFQNNAEGFCLLLKKLSEFDRSKLLIGLESTGIYSENLICFLYESGFRLAVINPIQTATLRKTAIRKTKTDKVDTMLIIKSLMVNSYRLYSQRDADSLKLRTLCRFRQNLKKSKARLKIQLAGYVNLVFPEFGKFFKSGIHIAASYALLKKYSSPKEIAALRTSTLCTLLSKASHGRFGKDTAEALKSLALSSVGVKNPYISIQIAQTIAQIELLEQQIKDLNSAIEEAMESINSVLMTVPGIGAVNAACILGEIGDIKRFSKPCKLLAYAGLDPTVRQSGQFTAKSTRMSKRGSALLRYALINSAWQLTLNDTTFKAYYDLKRSQGLNHYGALGHVAHKLTRVIFKLLTSDTPFIPAKLVA

SEQ ID NO: 269020 - protein, 428 aa, unidentified
MDEKSENNWEQRRYYMGLDWAKEYHEIVVVDGDGRTMLDLRINHTAEGWHRLREKLVNLAGPDLSVVAATIETNRGPAVERLFELGCTIYPLNPKAAQRYRDSKAPGGGKTDHLDALSFADALRTDGHGWRQLKPEEPNIQELRLLCRDEVNLIEQRTAFVNQLQEALHEYYPAALDAFDDWTVPAPWAFIERFPTPQALKKAGKRRWEKFLHTHRLYRPATYQKRLDVFARATEFCGSQAVTNAKSMLAVSLAKQLRLLAQQLKVYRKRIEELFQEHPDYDLFGSLPGVGEKLGPRLLSECGEDRDRFADHQALQCYAGTAPVSFQSGQIHKVKFRHACNKNLRTAVHLWADLSRQESTWAQVYYQQKRLEGKSHACALRCLGQRWLKILWKMWQTKKPYNEQLHTRNQIKHGSWVLAMTPVSSSAK

SEQ ID NO: 269021 - protein, 355 aa, unidentified
MSQEKYIGMDVHQATISVAVMDGNGKLVMECLLETKAATILEFVQGLRGTLSLTFEEGTSAAWLHDLLKPHVSRLVVCDPRKNALLKEGNKSDRIDARKLAELLRTNQLKAVYHGEHGIRTLKELGRSYLTLSKDVTRTMNRIKSLYRSWAIPCAGTGVYAPRHRAEWLAKIVEPGVRIRAERLYQQLDGLQSIRQQARRELLQESHQHPAVKLLRQIPSIGPIRSALLVALLQTPHRFRSKRQLWAYSGFAVETHDSGEYRYVRGKVQRNRERITVRGLNDNHNRDLKNLFKGAAISASTRPGPLHDFYVARVAQGMRPTMARLTLARKVAAITLTMWKKGVSFDPQQLSRQSV

SEQ ID NO: 269022 - protein, 411 aa, unidentified
MEGLSPLHRRVAGIDVHRMLHVVTVLIEEDDGTISKHQREFGGFKRDMKAMSAWLQELGVELVVMESTGIYWKSAHAHIERVGIPALVVNAHFIKYVPGRKTDMGDSEWLAVLARFGLVRGSFIPPKDLRELRILSRYRRKVSQMLASETNRMHKVLEDGGIKLGAVVSDIKGVSAREMVAGLIEGKPLGEMLAMARGSLKNKRDDLAASLDGDLSPRHLFVLRQLHEHVTALERQLAQIDAELFQAMTPYHWAWVLLQTIPGMDAIASAMILIEIGDDMSRFGDADRLASWAALCPGNHESAGKRKSGKTRKGNAIVRYLLCECANAARMTKSSLASKYRNLKVRKSHNKCIVAIAHKMIRIIYFMLSRREPYRDPGVNYEAMSARKNAPRWIKALKNIGKLPEATAASA

SEQ ID NO: 269023 - protein, 392 aa, unidentified
MIYVGIDVAKDKHDCFAMNSNGEILIEKLTITNNSDGFETLYNSLISFSDSLDNIKVGLEATGHYSDNILNFLNKNGFNTYLINPLQTNLYIKGKTLRKTKTDKLDAHIIATMLISDNLKPYIPVSYHITELKSLTRHRFRLVKENSKFKTSLVRLVDIVFPEFPKIVSSVAQKSSLALLYELPNAKKIAECNLTHLTHLLSDSSYKHFGRDKAIEIRELARKSIGLNSDSISFELKQTISIIQFLQNQIDELDKRIKEILLEMDTPILSIPGISFKLAGTIIAEIGDISRFDSPAKLLAFAGLDPSIYQSGKFFSTHSVMVKRGSKYLRFALINAARMVCMNDATFNNFKDKKLSEGKHYRVTLGHVAKKLVRVIYYLLKTNNKYEANKVA

SEQ ID NO: 269024 - protein, 407 aa, unidentified
MKTTDRTAVAIGVDLHRRFSTVTARNAEGKIAWRQRLEHEDRDDLRKRLDTWPREIPVILESSFGWEWMCEELERTGLEPQLASSRKVAAWRDARGMAKSNRTDADLLSELGRQTDCWWQVWLPPAEVRDRREWMRYRMSLVRLQTGLKDRVHAILHRHGILHDFADVFGATGRRMLMRLARGADPRLRDSGRATLKGYLQLLDHLRRQIATVTRTLHRQLQTTPEAKRLQGLPGVGPILAHTILAEVGDFGRFRSAKHLASYSVLAPRAFDSGEETGEKPKGRHVGHMGRRTLKWAWIEAAHVAVRRGGRFRKVFDRYTDGGKRNRNRGYILVGHELCRTAYAISKKETEYRDDPPSRPGSSKNVAASRELDRRRKEKLQDSHPGTGQSDIGLVAAATMSGLQTSE

SEQ ID NO: 269025 - protein, 369 aa, unidentified
MKQYNEIFVGIDVAKTRNAIAVADGERGGEVRFLGEVDASADNMRRLVRRLGDKHGAVHFCYEAGPTGYGLYRLITGMGHHCLVAAPSLIPKKPGDRVKTNRRDAIALAKLLRAGELTAVWVPDDDHEAVRDLVRARTAAVETLRAHRQQTGAFLLKHGRQYPGKTTWGARYLRWLQSQRFEHAAHQIVLQEMVEAVRLAKERVVRLEKNIEEFVPHWRLAPVVEALQALRGISLIVAVSFVTEIGDLRRFENPRQLMGYLGLTPGERSTGDAVRRGAITKAGNGRVRQLLVESAWTYRYAPRIGAVKLARMERVSPKIREIAWKAQTRLTARYRALMARGKKSTVVCTAIARELAGFMWAVAREVPAN

SEQ ID NO: 269026 - protein, 465 aa, unidentified
MSRRSKSNRSHSDRVKKRIAGHLEKINLFAAGIDIGSESHFVAVPEELDEQPVRSFGCFTADLEAMADWLVKLGITTVVMESTGIYWIPAFEILESRGLDVKLVNARHVKNVAGRKSDVLDCQWLLQLHTYGLLNGAFRPDEQVCSLRSYRRQRDTLVGYRASHIQHMQKALRQMNLLLDNVVTDITGKTGMTIIRAILNGQRNPVELARYRDKHCKKSEEEIAKSLKGHYRDEHVFALRQAVELYDTYDEKIRACDKALEQKLNTFDSKDDKDSQKPSTPDKPSKKRKSRCAPDFDVRSELNRVSGVDLTDIDGIDENTALKIVSEIGLDMSRWPSAKHFASWLGLCPGTKISGGKVLNRKTKRLPGAAATAFRLAAYALANSKSALGAYYRRMRSKLGAPKAITATAHKLARLVYSMLKHGSQYVDEGQEYFEQRYRERVLKTLKQKAKDMGFTLTPVETAVG

SEQ ID NO: 269027 - protein, 410 aa, unidentified
MEAIVECCAGLDVHQATVVACLNSGPPTRRSRKEVRTFGTTRHELGKMRDWLLASGCTLVAMESTGIYWRPVYAELEGHFELIVGNAQHMKNVPGRKTDVKDGEWTSDLARHGLIAKSFVPPRPIRDLRDLTRYRRKLSQSQAAERNRLIKMLESANIKLSGLVSDVFGVSGRAMLQALIEGEESPAEMAQHARGRMRRKRQALELALDGNLDDHHRFVLRMQFERIKATEALIERLDERLREKLAPYSEPLGRLMQIPGVDWVIAATIIAEIGVDMSAFVNADHLASWTGICPGNHESAGKQRSGKTRKGNLHLKTALVTAAMGAAKTRGCYLSEKHRRLRARRGEMRAHVAIAHKILVIAYHMLATGSDYQDLGPTYLDRIDQRRTANQLTRRLRDLGYDVQITLKAA

SEQ ID NO: 269028 - protein, 321 aa, unidentified
MHKYNQIFGVDISKDVFDVMSSQGKHLQFENSSKGFNQLTKHLTKKDLIVMEATGYYHYCLAQYLYDLGYIVSVVNPLAVKRFVQMKLAKIKTDKSDALAICQYASSNEVPIFTSRDSNQAECLQLMSLIEIYLKQSTALKNKLHGEKTLGIPSKTVYHSLNRSLKMIQKEIQLLENKLLELVKEHQQKQLTLLKSIPGMGTKTSIILIVLTDGFTKFDNAKQLCSYAGTTPTIRMSGTSVRGKSRISKMGNQKLRNLLFLCAFSACKYNKACRELYERIVAKGKSKKLALVAVINKLLKQAFAVAKSGLPYDENYVSNLS

SEQ ID NO: 269029 - protein, 432 aa, unidentified
MKHKQYSTQTEKIKRITPETLVIGVDIASQKHCARGFNFRKMELGPQLYFQNDLAGFRTFIKWLERLTKANNCLDVIVGMEPTGHYYFALDHYLKEKGIEVVLVNPRDVKRQWEVENNASIKSDPRDAGIIGKLLTDGRYSPSIRYEGVKAELREVIKTRDMLIEEKTRLVNQIHQWLSTYFPEYRQVFKTGIGKWLITLLKEAPTPAEIARLKPDGIHRLMQTCRRSMSRSKVNKLYELARQSIGIQAGVQEAKERLKMLLKRLEQNQDDLRKKEKKIKTLTEQIKEAKLLTDITGIGNLTAATFLTEVGDIDQYETPKQIEKLAGLTLTSKSSGNKKGRGHISKMGRKKLRTVLYHIALTLSSKNDAFKKLYHYYKDIRKKPGTKALIKLCCKLIRVLFTILKKGEPFDPEKMLADIRWPENMTPGYSLS

SEQ ID NO: 269030 - protein, 347 aa, unidentified
MTLYIGVDFHPHQQTVSYCKSEEGEVHQTSLVHNVEQVRRFYGQLPKAVVGVEASCTAAWFEQMLIELGHELKVGNPTLIRARARSRHKSDKRDADLILDLLVKDEFPELWRRPLPSQSVLEQLRFRHHLVKLRTQICNRLQALAHAAGLPKKGIQTKLARIALMEARFSETQSYQRDQLFELLDDLSVKIKEVEKWLEEKAAGDRRVELLLTHKGVGLLSALAVVHTLGDIRRFASSKQAVAYTGLDPLEQSSAGKVRFGSISKAGSSVLRHLLGQAMHVASRYDGELKAFYKRLATRRTKSIAKVATTRKLLIRLFIMLRDEIDYAEFKRRGATVGMPVLSHGLK

SEQ ID NO: 269031 - protein, 357 aa, unidentified
MNIIGCDYHPRFQMIARLEEATGELTVRRLEHENGEAKRFYSSLSKGTLVGIEATGSTQWFERLMAECGHELWVGDPAEIRARRVRKQKTDERDALHLLDLLLTNRFPRVWVPSPEERDARQLLQHRQKLVRMRTAVKNQLHGLAMGQGLCRKQKLWSERGRKQLEGLELGPWASRRRQELLQLLDELDPQITELDQAVEAEARRRPEVRRLMTLKGVGPVTGLAFVLTLGPVERFPRSRQVVSYLGLNPREDSSGGHQRFGHITKQGNTMMRWLLVEAGQTAARLDPELRRVYKRLKARRGANVAKVAMARRLAVRMYWILRPDPDQAPPIRMSGSPTHSMMDHRSGTTGTTPSTF

SEQ ID NO: 269032 - protein, 420 aa, unidentified
MFSDTTLIVGVDVHQRRNVTLVMDGGGDAVDNHRHFANNRLGSDQFASYLADRAQRGSFTTIHIAAEATNNYWLPFFCHLAETPALAAWPVTLYPFNPRLVANFKKALGEEEKTDLRDAGVVAERLRFGKKLPRPFVMDELYLPLRTLTRYRYHLVRELVRVKSYCLSLIYLKATDYTDKKKKPFSNPFGATSQAVLRQFATLDEIVNTPLDELAEWLDVKGKRRFPNPEENARKLQQVATEAYQLPEEWTAVIHDLVSLNLRHIACLENLIGRVETAITQQMENIPHTLETIPGIGPVFAAGIIAEIGDLARFEYNEAKVASYAGLRWPRSQSDEFEADDRRMSRSGNHFLRYYFCEAAQLVRLQAPEYRDYYNRKYKEVRKHQHKRAIVLTARKLVRLVVRLLTTNEPYRLRRQVSNE

SEQ ID NO: 269033 - protein, 361 aa, unidentified
MHATTVAVDLAKSVFQIAIADDKWNVVEQQRLTRSQFERWFHNRDVGMVVMEACGSAHHWGRWFSQRGIPVKLLPAAYIRAYVKRNKTDAADACALLEAARCADIVPVQLKSLEQQALQGLHRIRSRWMATRTSRINTLRGFCREFGLVVPTGARTGIEAMSRALADPNSSVPLLIREPMKLLIEEIRLLELRIAQLEKELTTLARQSPACTELLTIPGIGLLTATAMVAATGGSVSHFKDARHFASWFGLTPKEFSSGNSRKLGRISKKGDRYLRMLLTHGARAILRAAELARRAGKQLDGLRTWATEIQARAHHNKATCALANKLARVCYAVLRDHTPYGNPQPRQEKKLNRTAFAIAA

SEQ ID NO: 269034 - protein, 387 aa, unidentified
MVDGGGREIGRRTIEHSAAGLRDLLGLLRRCRVEEVAIERPDGPLVETLLEAGITVVVISPNQVKNLRGRYGSAGNKDDRFDAFVLADTLRTDRARLVPLRRDSDATIALRRTCRARKDLVGHRVAAANQLREHLQNVFPGAVGLFADLDSPISLAFLARFDCQDRADWLSVKRLASWLASVGYSGGVHPAELYARLGSAPRGATGRHGTVQAHITAAMLAVLTTLNEQIKALAEQIGQQLDEHADQQIFTSLPRSGTVRAARLLAEIGDCRGRFPAPDSLICLAGVAPSTRQSGKSRSVSFRWACDKQLRDAVCDFAGDSRQANPWAADLYARARARGHDHPHAVRILARAWLFVIWHCWQDHTTYDPSKHRALQRLLNQDHQPAA

SEQ ID NO: 269035 - protein, 354 aa, unidentified
MMIIGCDYHPAFQQIAFVDTETGELQERRLQHPEEAEKFYRALAAAGQKVWVGMEASGHARWFERLLAELQFELWVGDAAEIRTKRVRKQKTDRQDAQLILKLMLKDDFPQIWVPSWENRDLRQLLWHRHRMVQARTRIMNQLQAVALNEGLRCKKRLWREAGREQLEAFRLAPWASRRRRDLLELLDRLNPTITDLTQTIEQEAEKCPEAQRLMTHPGVGPLTALAFVLIIGRAERFQCGKQIASYLGLVPLEESSGNRRRLGHITKQGNALLRFLLVEAAQVSVRSIPEWRNKYFHLMMRRGRKIAKVAMARRLAVQMFWMWRKGWDYEQVRKFGSHAGQPGNRDGVQSNTE

SEQ ID NO: 269036 - protein, 382 aa, unidentified
MNRIIKIGMDVHSTNYTLCAMEPVLDGEDRIFTNIQVTPDYKNVIQFIDNLKERLGSSDSYSIECGYEAGCLGYSLYHQLTKAGVKCTILAPTTMLTQQGKRVKTDKRDAAMIAQCLSYGGYHAVHVPTDQDASVKEYLRMRDDHKLALKKIKQQINAFCLRHGYIYDGHKWTLKHLDWLKKLNLSELYRETLNEYMTSYEEQTAKIERFDKRIEELAADSDYHENVRKLSCLLGIQTYTALSLIVETGDFKRFRKGNTYAAFLGLAPGESSSGEKISRTGITKAGNSRLRTLLIEAATGICKGRVGHKSKALCARQAGNPEEVIAYADRGNIRMRSKYKRMIRHEKKRNVAVAAVARELACYVWGIMTNHIEPREEGKKAA

SEQ ID NO: 269037 - protein, 422 aa, unidentified
MRSVALDVHLDFCEVAIVEDGEVRSAGRIETKPERIELFASSLGPDDRVALEVTGNAWEIARIIEPHVAQVLVVSPSDTGIRQARAKTDRLDARTLARLLAAGSLDAVWMPDQATWVMRRRLSRRGQLVWARSRTKNQIHAVLMRQLVGRPPVSDLFGVKGRKWLAELQLAFEERETVDGAMRQIEFLDSEIAEVERLIAQDALHSPEIRRLMGVPGVNVIVAASFLAAIGDISRFQNPRKLVGYLGLDPRVRQSGVGPATHGHISKQGSVRARHVLVEACWTAVRQPGPLHAFYERVRARRGHSVAIVAAARKLACLFWCLLTREEDYAYAQPSLTKKKLRRLEITAGAPRYSAKAAGIWSANDAVRQAERELARQGEVAYARTVRDWHAVQANKVGASATLGRASNKPSKGKAARQTTSP

SEQ ID NO: 269038 - protein, 341 aa, unidentified
MKKFIRTAVDLGKNYFQFHGLASESGVSVSRKLKRSKVLEFYAQIEPCRVGMEACGSAHHWARELIAMGHEVVLISPAYIKPYVKRGKNDAVDAAAICEAMARPDMRFVPVKSADDQAVLMLHKSRELLIKQRTMSVNALRGHLAEFGLVVAKGIGRVDELLALAQADARLPQIAKAMVTELARHLEGLDQSIDAIDDDIAKAHKQNQKSCLIDEVPGIGTLIASVVAASVPDPSVFKSGRDFAAWLGLTPRQNSSGGKEKLGAITKQGNRYIRKMLVVGSTSVLRVVGKRKGALADWINALRARKPERLAAVALANKLARICWALMTTGESFRTETYVKA

SEQ ID NO: 269039 - protein, 438 aa, unidentified
MSNKVIFNLDELFISVGIDVGADFSWMSIALPNQQFVGKPYKILHNSIDSLTTAVSKIKEAEELYSLESRIFLESTGIYHYPLFCYLRDKGFNCSVINPIITKNSTNINIRKVHNDRFDSKKAALVGLKPDLKVSLMPSDLALNCRNLCREYYDLMDNRSAYVNKLQGELRMAFPQYLSIFSKVTINTSLTLLETYTSPSAFLEADKQEIIDIIKSTARFGLTYAQNKYNAIIQAATDANQFGYIIDSNIKRIRLYISFIRKYDEEINNILESLHELVDANEDADFVKQIHLIETFKGAGFLSAVSIMGEIGDFSAFSKPKQLFAYFGLDPAVKQSGKFEGTKVQMSKRGSAIARLVIHTLTLQSISISRNGEAKNPVLREYYLKKCDSKPKLVAMGAVSHKVCNMIFAILRDNKPFKIIAPQEHIKQYNSAKCDIAA

SEQ ID NO: 269040 - protein, 361 aa, unidentified
MKKHTQDLIAEVPRGCSQVGITIGIDLGDVWSHYCTLNEDGEVVDRGRFRTNPSSVDKWFTDLPRVRIAMEAGTHSIWISEQLQELGHEVIVANVRELRAISHSDRKSDQVDAEKLARFARLDPKILRPIAHRTVAQQEALTLIRARNLIVRLRTAAVNAVRGLAKPCGYRLPASSTLCFAKRCMAVLPPGLVQALGPVLEQIADMTLKIKAYDRAIKKLTETEYPETMALTKVYGVGQLTALTYVLTLGSKERFQRSRDVGCYLGLRPRRSQSGERDPQLGITKAGNVYLRSLLVACANHVLGRHGKDSSLRDWGLHLASRGGKQSRNRAIVAVARKLAVLLHRIWVTQEPYVPFYAAAA

SEQ ID NO: 269041 - protein, 322 aa, unidentified
MDKITNFIGIDISKKVFDVWSTDFGYKQFKNSTSGFLEFLAYLSNNSWCVMEYTGSYYQQLAMFLYKNEVSVSVINPLVIKRFIQMKLQHNKTDKSDAKMITQYAQEQTVYKWQPSPEHIEYCKDMYTTINLYNKQSTALKNKLHSMNDKGFKGKIITSIKRQIRQVQIEIKLLEEEMENRIKQHEQELLSNLLSIPGIGKKTAIILIVCTNGFRSFENAKQLSAFFGLSPIEISSGSSIKGRSRISKKGNPLMRNYLFMCSFTACSKNKQCKDLYERIVSKGKSKKLALIAVTNKLLKQSFAIAKSGIRYQPEYKSLLCIQ

SEQ ID NO: 269042 - protein, 400 aa, unidentified
MNIIGIDVSQGESHATLITKEEEEIAFKFKHNKSGFQILNSYIKPGTIIIFETTGVYSAQLTTYLKNKNVKFYELNPLEAKLRMASLRRNKTDKNDSFKLALLGKTQLAEIKNHCNKQSNSLYESLRILSLRYKQLIKCRTRILNFLRSSSELTFPELNQIFKNAYAVLALQVFRMYCHPDFLVGLTLKEMTTRVYQSVSRRIHKDVIQSYCAQVWLAAKDSYPAVPADSLEIEIISEYCDEIESYNKEIAYIQSKLIKTAVGLDDFKVISSIPGAGQLNSALLLGFTGDIARFDNYKQLNAFLGLDLNRYQSGKYGKGDTINRRGSSQGRAVETDMIRSMLRNQGKIQNHLVDYYYKLKKPPFNKHDKVALIACANHLNRTIINLVHTHQLYNYSKAIH

SEQ ID NO: 269043 - protein, 343 aa, unidentified
MAIVNRIALDLAKDFIQVLALDENEQEVFNKKLRSNKVLAKLATLKRTDDCEVAVESCGMSHYWRRECEKLGYKTVALPPRFVKAYLQGEKNDANDARAIAEAASRPNRQTVRLKSIEQQDLALMVNQREGFVQTRTQFSNRLRGQLAEYGIILPKRVSTILQRVPEILEEDSNALTLQSRDLINRLYQMLRAVDEEVKALDKRLAAQADNNEDSRRLMTIPGIGPITATSLLALIGDVNEFKRGRNLSEYLGLVPRQNSSGGKDRLGGITKKGNTKLRTLLVHGARSALRVAQQRDDRLSLWAQDIAKRRGNNVAAVALANKHARIIWAMLKNQEDYRMTAA

SEQ ID NO: 269044 - protein, 432 aa, unidentified
MRIVYERCCGLDIHKASIAVCVVITRDGKIEEETRRFGTMTADLLELAAWLKARGIEHVAMESTGVYWKPVWNILEAEGFDLLLANAQEVKIVPGRKTDQKDSQWIADLHQHGLLRKSFVPPRQVRDLRDLTRTRATLAQEHSSTCNRIQKVLEDANIKLGTVASDVFGASGRAMLLAMMKGESDAEALAELSKGRLRSKIPELRRALEGRVTGHHRFLIDRHWRQMESLENQMRQFEEEIAERMKPTAEEIARMRESLPAEAPLPPSPREEAILLWMELPGVGLTTACSMVAELGVNMEQFPSSAHVASWAALCPGNNESAGKRMSGKTRKGNVWLRRTMCEAAWAAAHSKNTYFAAQFGRIAARRGKKRALIAVAHSLLVVAYEILKNKEHYRELGADFFEGLNKDYVKRRLVQRLTKLGFQVAVTPAAE

SEQ ID NO: 269045 - protein, 333 aa, unidentified
MPQSSTLYVGLDVHKESIAVAYVAQEHGAEVISLGTVGTRQCDIDKLLRHLQSKSPQLVLVYEAGPCGYWLSRSLMNKGYVCWVVAPSLIPKKPGDRVKTDRRDARQRARLMRSGDLTPVSVPAVDDEAMRDLSRAREDTLRDLQAAKLRLKAFVLRHAIRSTGRAHWSPAHLRWLSEVVCPTPAQHMVFQEYVQTVTEQTERLQRLAHALHEQVKTWRFQPVVEALQALRGVQCTVAGTTVAELGDLTRFGNPRQLMHDLGLTPSEYARGARRQQGSMTKTGNTHARRALVEGAWAYRYPAKVSRHLPLRLENLPKALQAIRWKAQVRLCTR

SEQ ID NO: 269046 - protein, 333 aa, unidentified
MDTESGELQERRLKHRDEAEHFYRALAAAGKKVRVGMEASGHAGWFERLLAELNIELWMGDAAKIAAKRVRKQKTDRRDAQHILTLMVKDDFPKIWVPNWENRDVRQRLWHRHRMVQTRTRIMNQLQAAALNEGLRYKKKLWRKSGRQQLESLPLAPWASRRRHDLLEVLDRINPTIAELTQAIEQQAEKCPEAQCLMTHPGVGALTAMAFVLIVGEAERFGCGKQIASYLGLVPEEDSSGERRRLGHISKQGNSLLRFLLVEAAQVTVRSDMRWRNWFFHLAQRRGRKIAKVAMARRLAVRLYWMWRRRWNYAQLESFGSHVGQPVNRHGVQ

SEQ ID NO: 269047 - protein, 340 aa, unidentified
MKRYLGVDLHRNCFTVCTLKEDGQSELRRWSIHSLSEFAHTIQATDAVAVEATGNTRYFCQSLKERGCRLVVVNPQQFQVISRSVKKTDAHDAKTLAQFLAKDLLPEVRLKEALQAEIASVLQTRDKLVKLRTTLKNKINNLLAGRGILIRRESLSSDKGLEQVLQAPVSDLERVELEVLVGQIRHLNDSIRKLEAAIKKQGPKLPGYQNLKSIKGLGDIGSSTLLSAIGDINDFASEGKLAAYFGVVPRVNNSNETERSGRITKRGNKLGRTALVQCALIAMRYSPYLANYYARIKAARGTGKAIIALARKFLGIIYKTLKNGWVFEDFPRFVIAPAGA

SEQ ID NO: 269048 - protein, 474 aa, unidentified
MARTRSRPASPPVPGDAGAEVTDEPVQVISRAAAIDVAKGSGMVCLRLPHESRAGRRTQKVWEVTATFASVVALLDHLVCQGVGRLVLESTSDYWRIWYYLAEAAGLEVWRVNARDVKHLPGRSKTGRLDCVWLCKLSEWGMLRRSFVPPEPVRDLRALTRLRANLTHDRVRHQNRIEKILEDALLKVSSVISDLMGGSGRRFLQALADAERSPAALAALGDYRLHASKAELREALTGRFRDIHGFEIGMLLELIDDLPAKITELDERIEAQLENVPGLGGVCTSCGQPGPDGPCTGCGEPVLGVIARLDEITGIGRGAAQVIVAELGTDMTQFPTPGHAASWAKLTPRAIQSGATSKAGRTGKGDPYLRGATGVAVMTAARTGTFLGARYRRHARRRGKQKAIVAGSRTIIEIAWRVIADPGFRYIELGPDYHDQLDPGRKTRDKIRQLEKLNPGMTVTLTPRPERGGQSPAA

SEQ ID NO: 269049 - protein, 438 aa, unidentified
MKVMHERVAGIDVHKKMIKVAIRSPGDKPWTRKTEILTFRTFYGVLREMARELRARGVTHVVMEASGVYTEPVYYALLEEDFTEVLVVNPAHVKALKGHKTDAKDCARLAELLECGLLQGSYIPAAELKEVRDLTRYRSKTVQARTSEIQRLDKTLESAGIKLGSVASDITGKGPAAMTGALIDGERRGKVMADLARGRARAAGKLADLSMALEGRFTEHHALMCRLILDRIRVHDTAIGGLDKQIAGLAAAWQREIDLLKTIPGFGDVVAWTWIAEIGPAPHQWFGSHEKLASWVSLAPGNYISAGKRKHSRTGDAGTYIKPVLVQAAWAAIRVRGRLQARYNRLVRRFGGPKNPAAKKKAIVAIAHTLLKIAYSVLKSGTPYQDLGEDFYTRRETPAQRQAWLERQIQKLHPGCTVTITISPPPGHAPEAALTPGA

SEQ ID NO: 269050 - protein, 347 aa, unidentified
MSYVGVDLHQNSITVCRREADGSEVFETLSLSPADIERFCLSLDADDELAIEATGNSAWFRDQVLPCVGRVVVVNPSQFKVIRKSVKKTDRNDAAALALFLAKDMLPETRAKTEAENELASLTHTRDLLVKQRTRLLNKIHALHVRKGLKLKKESLGSRRGLANIDLGLFSTCEAIEIEVLREQALSLSTSLARLDRDIETIASSFAGYDGLVSIKGVGPRSAAVLLSTIGNVHDFESADKLAAYFGMVPRVSQSNETDHRGRITKRGSKLARTTLVQCSLIAMRYSPYLKSFYQRIRQRRGTGKAIIATARKLLAIIYDTLKNGWVFSDFTHFQRRETSLPAGQLS

SEQ ID NO: 269051 - protein, 390 aa, unidentified
MIYIGIDVAKDKHDCCILGSDGEILFSPFTIQNSLQGFDELYEKIWPLTSDLTEIKVGLEATGHYHINLLRSLLDNGLPSFVINPLHTNLYRKAQSLRKTKTDKVDAASIAMMLLTDRTLQPYSDTSYHNEELKSLTRYRFDKVQERARLKTSVVRLVSILFPELEKLVPTLHMASVYALLSEFPGASFVASAHLTRLKHLLYDASKGRYGRDMAVSIRDAASSSIGSILPAKSLELKHTIHLIEILTSEIDEIEAAINSIMDTLDSPITTIPGLKNRMGAMILAEIGDFSRFDNPDQILAYAGLSPTTYQSGQLTSSYAHMEKRGSRYLRYALFNATQYVCIWDPTFKAYLARKRSEGKHYFVAISHACKKLVRVIYRMQLTGEPYRTA

SEQ ID NO: 269052 - protein, 422 aa, unidentified
MLAESHDEEQIIARVAALDIAKAELVCCVRVPSPAGGKRRLQEVATYSTMTQALTELANRLVEMRVQRVVMEATSSYWKPVFYLLEAHGLDPWLVNARDVKHLPGRPKTDVLDAVWLCKVAERQMLRPSFVPPWPIRRLRDLTRYRTDLVAARTAEKNRVEKLLEDACIKLSVVASDIFGVSGRAMLAALVAGERDPKVLAQLARARMRGKIDRLEQAFDGHFDDHHRFLLSRMLARIEGLDADIAAVDAQIDVQLAPFAEAAARLDEIPGIGPVAAAAIIAEIGVDMSRFPTAGHLCSWAKFAPGINSSAGKTKRSASSGHGSPYLARVLGEAAVGTSKTNTFLAARYRRIARRRGQPRAVVAIGRSILVIIWHLLHDPDTRYQDLGVDHYTRHVDSSDKKRGHIRQLEALGYTVTLTPAA

SEQ ID NO: 269053 - protein, 338 aa, unidentified
MNNSHIIGIDLGKNSFHLVGHDHAGNQLFKKKLTRQKLLEFLSCHEPVIIAMESCGGSHWLARKCTEFGHTAKLIPPQYVKPYVKTNKNDFIDADAIAEAASRPTMRFSSAKTESAQVISTIRKIRSGYFRERTACMNRIGSILLEFGISLPKGHASMKGLFQWLVDKNQNLPPLIIFELSELHEHYQNLNERIDSQADKVERILADNEQMKQLQSVPGIGPVIASACLSSVGNPNDFKNGRNFAAWIGLVPIQYSTGGKSTLLGISKRGNKELRTLFIHAARSILWRDKSVEKYFGSWLVELKKRKPFNVAVVALANKIARIAWAVLVSKKSFEIRT

SEQ ID NO: 269054 - protein, 359 aa, unidentified
METKIKKLDFTGHNIYVGLDTHKNSWNVTILTETLAHKTFSQSPLPSMLHDYLKRNFPGANYYSAYESSYCGYWIHYQLSALGFKSIIVNPADIPTTHKEKVQKEDKRDSRKIAKCLRNGELNAIYIPSWVQLEDRSLMRSRLALVKDVKRVKNRIRSHLFFYGITVPETFYGHGKHWSNRFIQWLENITDIERNGKVVLTSLLDQLKQLRAFELDILKKIRMLSKTETYKHQMKLLLTVPGVGHKTAILLLTEIIDIERFENLDQLCSYVGIIPSTHSSGDNEKVGEMTPRGHSVLRSAIIESAWIAAKVDPAMNLAYNDLCKRMKANKAITRIAKKLLNRIRYVLLNQKEYVKAVVS

SEQ ID NO: 269055 - protein, 337 aa, unidentified
MKNLSGHSISAVGIDVAKATLSVCCRTLTGTETALSLRNTDIDIRRKLLPLLTEFRGKIIMESTGHYHWLVALRLTEAGLDVRVVNPILAKQYTSSNIRKVKTDPADASGLARMAEVADNLPEKFSCTKEILILRKKLSLISSLGKQIQAMKASLKHLEEVHDIFGSQLSRFETETEGAIETLRKTKGRLEKEFETEAKKLEGDAGPSTLLETIPGVSSFCAHLVLHWCSRVDGLSAKSWIGFAGLDISSRESGSWHGRCRLTKRGNPYLRGRLYSAAWGAVMHDEAFANYYKHLKAEGRAHVEALLIIARKIVRIMFKVLETKSVYDPSKFSFGTN

SEQ ID NO: 269056 - protein, 357 aa, unidentified
MKKSIRNLSTVTTIGLDIAKNVFQVHGVDAAGAVVVVKSVRRGQLLAFFASLPSCLVGIEACSSAHHWARALIAIGHRVKLMPPAYVKPYVRRNKNDPVDAEAICEAVGRPNMRFVAVREVENQAALMHHRTRELLAGNRTRMLNALRGHLAEIGVVAPQGAQHAYGLKRLLTAGHDDSGEIVVPDSVRKALAPLAQQIDAIDDEIAAIDDQIKARVKADDTARRLMTIPGIGPITASAIVATVQDASAFASGREFAAFLGLTPRQNSSGGKERLGSITKMGDRYLRKLLVVGACAALVHRKGHNDALRVWADRLMARKPATYKFKLTAVAFANKVARIVFALMTRGGEYVERPVAA

SEQ ID NO: 269057 - protein, 343 aa, unidentified
MEYYAGIDVSLESSSLCVVDATGRIVREAKVASEPETLTAWFNSLGFALSRIGLEAGPMSQWLYAAMKQAGLTVELLETRHVRNAFKIMPVKTDRKDARGIAQLMRLGWFRPVHCKSLPAQEIRSLLGARKLLQGKLHDIELSLRGTLRGFGLKVGKTTPKTFEGRVRSLVTNHPTLTLIAEALLRARAVLLGEFLNLDQKVHTLARHDPRARLLTTAPGVGSMVALTYAAAIDDPARFKSSKTVGALFGLTPKRYQSGETDVTGRISKIGDAAVRTALYEAANIILERPVKGGWLKAWALGVAKRAGMRKAKVALARKLAVVLHRMLVDGTPFRMDRVATTA

SEQ ID NO: 269058 - protein, 410 aa, unidentified
MTMLDVALDPATVVVAVDPGKVTNRVWVSDGTGLLEQPVSLPVARVGIEGLEVMLAAHAGHEPVIAIEATGSLHRAWVSELERLHPGSIRLFAPSETKAARSQLGSGRFKTDDRDCAALTYLVRQGAGRRHADQSAVDTLRAAVRHRRGLVADRKKAQQRLHDQLNALCPGLSAPAGHGRSLAIEHSTGQAVLVCAVAFAGRAPTRRSLIARAPGRLTKRNADYWVQRWRGCLPPPPDAKQRAQRLGRDLDRYGRLQADIAFLEEEITGLLADTDGQVLTSLPGVAVNRAAAFAVHSLPITNFPDADHLYSATGLAPAMYESATLRRRGRISRQGLAEHRDALMGIAWGLSVCSPSFAQRDAELRARGMAPIQARVALARNACRLAYRLLMTQQPFDEEAYRRGRLSRGR

SEQ ID NO: 269059 - protein, 404 aa, unidentified
MTSPRRIVIGVDTHLDTIHVAAITDTGQLLGDAEFRTNPSGYYVALAWARSFGEVLSAGVEGTSSYGAGFTQALQDNDIHVVEVNRPDRAARRGQGKSDPLDAYSAARAVLAGHGLAVPKDPHTGALKALLIARRGAVKARTAAIQQIKDLLVTAPAELRERYRRHTTTLRLVQALARCRPTAHEDPVTRAVLIACKALAQRIEFLERQTDELTAEIDTLTTALNPALRAAYGVGPDTAAQLLITAGTNSHRLRSEAAFAMLAGVAPIPASSGKTTRHRLSRGGDRAANNALHRIALVRWSPDPRTRDYVARQLAAGRPKKDILRLLKRAITREMFKHLTAPCPIDDYNDLRPTRQAKNITLTNAAAHFGVWPNDISRLERGLKRDDVLAANYRRWLNTEIIAA

SEQ ID NO: 269060 - protein, 346 aa, unidentified
MKHISRVGVDLAKEVIQVCVVVRGKVTSNTEMTPQEFRCFLAKMKACIIVFEACATSNYWKQVSISQGHDARLISAKLVSQIRQNQKTDKNDALAIVQASQLTGVRFIQGKQFSQQELQSISRMRELAIKQKVATSNQIGALLLEFNIRISNRHGGINGVVKATLEDAENDFSAEFREALYETWQGYLALVTRIKKYDEHLNVSVENTPACKKLMALEGVSTINAVNLYISLACAEDRVFSSSKDASASLGLTPIQYSSGGQVKLAGIGRRVKNALVRSNLISGAMAVVRQVSLREPRTAKEKWLKALIERRGNKCAAVALANKTVRTAFAMLRDGTEYHAQALNA

SEQ ID NO: 269061 - protein, 340 aa, unidentified
MTQHKIIGIDLAKNIFFLFEINHKGKNLCRKKLQRSKLLSYIANKETCTIAMEACSGAHYWAREFSQFGHEVILYAPQHVKTQRRKQKNDYNDAEAIAEVALYKRPHPVPHKSVEQQDIQSLIRMRRLLVTERTRIVNQVRGLISEYGIIMPKGAAAFRKAIPEILENDENKLSCILRELLSHQYQRYLYIDEQVKWFDDKLNQTIKQFENAKRLMSIPGFGPLTSQAVAVWLGSGQQFKTGRDASAAMGLVPKQDTSGDKVTLLGITKRGNTYIRSLLVHGARAALRRAKFKSDNLSKWMLELQERRGPNRAAVALANKLMRIAWAVITKNEEYQPKQS

SEQ ID NO: 269062 - protein, 341 aa, unidentified
MSNANIYIGADLHKKTCYVTVMNHLGTIKKQVEISTDKDKVSMFFKKYADVPVAVESTMNWIPFYENLESLGCKVLLSNPLQTKAIASARIKNDKVDSKVLADLLRTNLLPTSYIQPRDIRDLKEVVRERANFVEMRTKIKNKIHSVLFKTDNKHCFTDLYGKAGMEWLKELELRSVYKQELNRYLETLKHLNEQIDEISKIIEETAKEDYDCKLLMTIPGISFYSALMIKSEIGDISRFRNANKLCSYAGLIPATYASADKVRHGRITKRGSKWLRKTLVDAITSGSRNPNRISVFYQKLKKNKGTGKAKVAAARKLCSVIFAMLTDKQPFREFTPVKQR

SEQ ID NO: 269063 - protein, 340 aa, unidentified
MSEITTIGLDLAKHVFKVHGIDAQGTTVLRKRLRRGQVLAFFSRIPRCVVGLEACATAHYWGRELGALGHEVRLMPAQYVKAYIKRNKHDAADAEAICEAVQRPTMRFVPVKTAEQQATALLHRGREQLVRQRTMLVNALRAHLAEFGIVAAQGLRNVGELIAIVRDDGDTRLPDVARQVLQVLANQIEQIQTAVAALERQLLAWHKTNPVSQRLASIPGIGPTIATAIATTVADPKAFRSGREFAAWLGLVPRQNSTGGKTRLGGITKRGNRYLRRLLINGASANLLRSKATKADPWVIGLRRRRPPLVVAVALANKTARIAWAVMLREKDYQPRAVAA

SEQ ID NO: 269064 - protein, 311 aa, unidentified
MSDKTTVGIDVSKFALDVWIDTSERLIHLENSASGMVQLLKEFEGLHISGVIMEATSRYHSLAESMLISAGLPVAVINPRQIKNFARAMGKVAKSDPIDARIICEYGRRMKPEFRPVRDKVLQDMALLLTRRRQLIQNRVMEITRLQEKSGAWIENDIAEHIAWLNIQIDALDKEIKDQLNQNAALSPKRKMLEKVKGIGPVTQAAILSQLPELGHLNRRQISALVGVCPYDRDSGQLRGKRAIWGGRSGLRATLYMAMLSAVLYNPQIKDFYTSLVARGKPKKVAITACIRKFITILNAMFRDQKDWTYN

SEQ ID NO: 269065 - protein, 308 aa, unidentified
MDVIVGIDVSKDRLDVHVLVEECFFVGNDHAGVDALIARLREAKADIVALEATGGYEMLAVAGLSSAGLAVVVVNPAQVRSYANALGKRAKTDPIDAAVIAAFVAATRPQIRPLRDEESETFSAIVSRRRQIVQMITAEENRSRMAQAKETQKSIKRLLAALRRELESLDGDLDGRIRKSPVWRVREALLTSVPGVGPTTARTLIAEMPELGTLDRRQIASLAGIAPFTRQSGKWRGRSFIGGGRGKVRAVLFMAALVAARHNPTLKTFRDRLVAAGKPKIVAIVATMRKLLTILNAIIRDEKPWQSA

SEQ ID NO: 269066 - protein, 348 aa, unidentified
MTTQPHIIGVDLGKHWFHVIGLDREGAIVLRKKLSRAQLRAFAATIPRSIVAMEACCGSQYWGRVFAHAGHEVRIMPAQFVKPYVKTNKNDFNDAEAIAEAASRATMRFVPLKTTEQLELQASHRIRRRLVHERTAVVNQLRALLLEYGIVTPVGRETFARRWSQTLGSASEQLSPRLLVLIQRLRAHWVTLDGQIAEATQELTAWADGSPLCQRVATVPGVGPMIATALVSAVGDARMFARGRDMAAWLGLVPRQHSTGGKSTLGRISRRGNGYLRQLFLQGAVSAYLWMKRDRSALGAWLQQLDRRRHRPVVITALANKLVRICWKVLTSDTPFRLHPARPVEHAV

SEQ ID NO: 269067 - protein, 343 aa, unidentified
MQTITTIGLDIAKSVFQVHGVDAGGQVIIRRQLKRRQVVAVFQKLPPCLIGIEACASSHHWSRELQALGHTVRLMPPAYVKPYVKRQKNDMADAEAICEAVTRANMRFVPTKTPEQQSGLMLHRTRHMFIRQQTAVINSIRAHLAEFGIVAPVGRKGVTELLRIVADPNDKRMPEVARACLAAQGTQLLALKEQILEFDRMILAWHRSNQTSKRLHYIPGVGPMLATALVASVADPRTFRSGRNFSAWIGLVPKQHSSGGKERLGGISKQGDRYLRSLFVAGALAVIRYAKIHGAGHRPWLTALLGRRPTKVAAIALANKIARMAWAVMAKGERYKQPAALAR

SEQ ID NO: 269068 - protein, 439 aa, unidentified
MLQTLPMLDPLAAFVDIGSEHMHVSVGGNRPEVFGTVTSQLHALRDWLLAQGVHSVAMEATGVYWLPLFGVLESAGLDVRMVNGRQTRNLPGRKTDMADSQWGATLHMHGLLHAGFVPPADIRRLQDYLRLRADHVAAAAGCVQLMQKAFERMNIKLHDVISSLAGVSGMAVTRAIVAGERSPEALVALCDVQIRRKKEQAVIEALRGTWADEHIFALGQALQSWDHYHRLIADCDGRIAAVLPPHDEAQPPLPRSTRQTGVNAPEISRLRETLAQMCGGRDLTKLPALSSYGVLQLIGEVGTDLSVWPTEKHFTAWTGLAPGSSDSGKRRKGVKRGRNRTGQLFCMMAQSLVRSRDIALGGFYRRLAARRGGLVATKALARKLAAWFWRVMVKGDDYVEKGLARYEEQVRKNREHALNRLARELGRQLVPVPAVSQTA

SEQ ID NO: 269069 - protein, 374 aa, unidentified
MNTIYIGVDFHARQQTICYLKIETGELVTCELKHQDKEQVRAFYKQFQGHVIIGLGASGYSPWFEAMLEQLGCEVWLGHATEIRRRARWRQKNDRRDAELILDLMLHNEFPRLHRPTVQSREVLRMLRYRQKLIKVRTMSKNSLQAIALQAGLAKGSRLFTTAGQQELRTAEMSPVLQWQRDHWFELLKPLNQQLLETMVWCKAQSKGDAAITRLRTHPGIGLLTSLCIWHTLQPVSRFRNARKVTAHAGFDPVERSSAERQHFLGISKAGSRLLRYLLVEATHTAVRHDEDLKRFYKRLAERRGRPKAKVAAARKLLIRAYIMLRDEIDYAEFRRRAVAARLARRGQRPEVPEVLIGQPASAGCQEQTHASEK

SEQ ID NO: 269070 - protein, 349 aa, unidentified
MRHIGVDLHKTNFVVCFLAADDTQRIETYPLTRDGLAGFKRRLRKVDEVAVEATQNVHYFYDQIRAHVSRVAVVDTYRFGVIARSKKKTDKADASALARFLKLGWLPEVPVPSEQVRTLRQLLQARETLVSMRTKLKNMAHAAFSRNGVALTRAAFASSAARARLSARAELPAADRLVLDVALRQIAQLDSEIKAVEEEVVRRGKSLRGVSRLLQVHGLNLLSAISLLAEVGDIALFETSKQLASYAGLATSTRQSSETTRHGGITKRGRKRLRTVCIQAVLAMVNRADTPLMSFYRKKKREKGAGKAICATARKLLTIIFVLLKKELDYWYLEDRLYNRKLRALNAAA

SEQ ID NO: 269071 - protein, 401 aa, unidentified
MFVGWDWASTTHDVTVLDDAGAVVDRWAFRHTEQDLAAALDRLARVSEPAALPVIIERASGLVVDRLLAAGHPVVPVHPTAFWAARPRWGASGAKSDAGDSYKLADYLRTDGHRLRRLDRSDPGLQELQALVRLREDHVRARTAASNQLGALLEAHWPGPKAVFYRLASPIALAFLADYPTPQAAARLGEARMASFCRRHSYRGGKPPAVLLARLRSAPTAPVGIPPATLATLVGAQVQLLHTLLVTIAELESRIATRVACHPRAKLLASLPGVGTINLAQLLAEVGPVLDRVDSAEHAAAECGAAPVTKASGKTSGVYFRWAANRRARKALTAFAHNSRLASPWAGRLYADARARGKHNPHATRIVARAWLRVIWACWQQDSPYNPALHTAALRAAALPT

SEQ ID NO: 269072 - protein, 457 aa, unidentified
MNPKRSKPKNDRTMPMIHPNAAAIDIGATMHTAAVRADRMPEPIRSFGTFTTDLHRLVDWFTECGVETVVMESTSVYWIPIFELLDARGFAVFVVNARDAKHVPGRKTDVSDAQWLQRLHSYGLLRASFRPKGQIAELRAYVRQRERLLEYAASHIQHMQKALTEMNLQLHHVVADVTGATGLRIIRAILAGERDSKVLACLRDYRCHSSAEAIEKALTGNYRAEHLFALELALALYNIYQDKASACDARIEAVLKELSISRGRDAGPLPSPRRRLHGKANGPDFDVRAALFKLLGKDLTQIDGLGSYLSLRLIAECGDDLSAWPSAKHFTSWLCLAPSNKISGGKVLSSRTRRSGSRASALLRLAAVTVGRTDTALGAFYRRLSARIGKAKAITATARKIAVLFYNAVRHGMEYVDPGSSYYETRYRTRVVENLHRRAKAFGFVLLPLESKAGAVS

SEQ ID NO: 269073 - protein, 267 aa, unidentified
MTFRPHALHLKAELFVKSSRVHVRDDGFTRCNFHLKFFIMVYRGIDISKSSFVAAYPSTNGNPTKTFPNTTAGMRELIGTLAVAEHHCVMEATSNYGCCCTCYIRTVLPPPPKKKQIKHFSRMMMPVTKTDEKDAYMIAMYGEKMNPPIYKMPSQATIRILTTEGFTYFDNAKQLSRFIGICPTYQQSRTSVNIREHINRNDDERLRSLLYIAFWTALRYNSRECYIRLKANEKPFKVALIAVTNKLVRPVLTITTINSIYRWICPG

SEQ ID NO: 269074 - protein, 347 aa, unidentified
MTLATISVLGVDLGKNVCSVVGLDASGAIVMRRKVRRETLIGLAEKLPPCVVGMEACCGAHHLGRLFAAHGHDVRLMSPEYVRPYVKAQKNDDRDAEGIAEAATRPTMRFVELKSQDQLDMQTLHRSRDRLVGERTALINQLRAILLERGMVAPQGKRKLEQFLAVLMDEQGGAGLSPRMILLVGDARAQWAELDRRISAFDAEFIRWVKENEEARRLTTIPGVGAIVASALIAAVGQAESFDRGRDLAAWLGLVPRQFTTGGKPKLLGISKRGNKYLRRQLIHGARAALPYVAERDTPLGRWAKGLMSRAHRNVAVVAFANKLARIAWAVLRRGERFAATGMPMAA

SEQ ID NO: 269075 - protein, 465 aa, unidentified
MTPKKGKHLRGTDRGTDLTITHRYAAGVDVHAAMHFVAVAAEDVPAGFINPDAKLPKGVRKFGANTGDLEALAAWLKDCGVTTVAMESTGVYWIPLYDLLASQGFVVILVDPRQTKHAPGRPKSDVLDCQWIRRLHSYGLLTASFRPADEIVQWRGFQRQREMLVRYAAQHVQHMQKALEEMNVKLTEVVSDVAGQTGMKIIKDIVRGERDPRKLAKHRHERCKATEAEIARALHGTWRREHLFALKQAVQMYEFYQRQLRACDEEIETCLRGFADKSQGTPLPARPKKQAPRRHEPRFGARALLFRMAGVDLTVIEGISETTALVVLSEVGTDLSRFASEKNFVSWLGLCPQHRGSAGKIFNRRVRRGANRAARALRMAAQGCHHAKNALGAFYRRIQARCGGAKAVVATARKLAERVYRMLKYGQQYVAQAEQVYEEAYRLRTLKAMARKAETLGYKLVPVDE

SEQ ID NO: 269076 - protein, 457 aa, unidentified
MYRELHSLRQALHHELEGTLPPLPGVEPNKLLQTYLDQLTLYVGVDVADQTVTLLALNANKEELGNLLDCPNTPKGHAQIGAWLEHLRSQHHLRIIAVACETTGVFYWGLWDYLATCSNVARVLFNPRTTEHMGEILSKRVRNELVDALLLAEQLRLGSTPEVRLTEDADLLTARLCSRAARDLAQQINRKKNQLRSLVRGYNPVLLQVFRGGKFHHPAVYALLEHYLFPDEYVAAGVGLLTQLLTEHSRSAFGREHAQALVDQCRDCLSRPIGRAIVHQRVNHLTTEILLARTHQKDLLQKGYALIHHRPEAQLLKAATGAGISNTLALVTEVGDIRRFPDGAHVASFLGLTTSKHISGATLYQSKHITKQGSPNGRYAAVNLAMQLSLRVPKYRAMYKAIKSRRPPRKGHFVALVAIARDWVTNVLYDMWRDQRPFFVEVEDYRQYRREHPRVAT

SEQ ID NO: 269077 - protein, 323 aa, unidentified
MNKDIKYFGLDISHLVFDVTDSEGNYYQFKNSISGFKKYVKLLDINSHSVMEATGYYHYQLAYYLFENGHKVSVENPLSVKRFIQMRLSKIKTDKSDSKLICDYAQHVELTLWKGSSKEVQECLQITRPLTVYTKQCTMLKNKLHGEAVLGEPSKAVVRSLKRSLKHTEKELENLEARLLHLVKETHKDLFTRIKTIPGIGRKTAIMLIVLTGGFERFSSASELCSYAGLTPVIRQSGSSVKGRPRISKMGNQKLRNLLFMCSFSACKYNKACKAIYERLVAKGKSKKLALIAVCNKLLKQAFAIAKSGLIFDKEYKSTLEKN

SEQ ID NO: 269078 - protein, 351 aa, unidentified
MLYAGVDTHKKYSRVVVTDSHGARVAQGTLQNTQGSFRDFFSQFNEQTKAVLEAGSTWGIIYDILEDIGADPVLANPLKTRAIAEAKIKTDTIDAHTLSTLLRADLIPTVHVPSQKVRSHKNLLRQRFWLVEMRTRIKNRTHNILDRNHVTLPDCSDLFGKAGRQLLDQIEIPHPDNHLLTANLELLDRINEQIRAAEKWAKEALEDHPGLAILHTIPGLGKILAALVAVEIDDISRFSTPDKLCAYAGLVPTTYASGGKVRHGNLLPTCNRWLRWAYVEAAWVAQRTSPYCHSYFEGIKRRKGANCANTALARRLCEITWHCLTEKRSYQERTPARKEINQPAAFVSSWS

SEQ ID NO: 269079 - protein, 372 aa, unidentified
MRHHTEAFVGIDTSKSRNAIAIADGGRGGEVRYLGDFAATAAAIRKLVAKLAAKFSKLTFCYEAGPTGYGLYRLIKSLGHECIVVAPSLIPKKPGDRVKTNRRDAVSLAKLSRAGELTAVWVPDERHEAMRDLSRARQAAKKDLQGKRQQISSLMLRLGRIYPGKTTWGPAHMRWLMAQKLEHREQRMVLEELLQGVRQEDERIERLEQAIREAMPDWSLAEVVTALQAMRGIDLIAAVGVLAEIGDLSRFQNPRELMGYLGLVPSESSTGDKVNRGGITKAGNGRARRILIEAAWAYRHPARVGRAKQPKVAAAPRRVREIAWKAQTRLCGRFRSLLRKSKNPPVAAAAIARELAGFVWAINREVMASRTA

SEQ ID NO: 269080 - protein, 431 aa, unidentified
MLQPDSQPEPREEEEPNFAAFVAIDWADQKHVWALQRAGSEAREHGELDQAPEAVEAWMQTLLERFGGRPVAVCPEQSRGALVYLLMKYPTLVLYPLHPATVGRLRAALYPAGTKDDPLDAELQLDLLVHHRQRLRAWKPDTVETRALQMLAEHRRQLVDQRTGESNRLTQALKLYYPQALGWFDKVVSPLAGAFLQRWPTLELAQKARPQTLRDFFYRHNCRNAELIQQRIQEIGQAMPATQDPAILRTSVLQVKHLIQSIALLRDSIAELEQEIDKLVQSHPDFAVFDSFPGVGEALAPRLIAAFGTRRERFSGAVDVQSFSGIAPVTCRSGKSERVHFRWACPKFVRQTFHEWASHSIGFCEWARVYYQQQRDKGAKHHAAVRSLAAKWIRIAYRCWKDRTPYDEQIYLDALRRHGSPLAAKLAPAKG

SEQ ID NO: 269081 - protein, 417 aa, unidentified
MNTMIMQPYAAFVGIDWADTKHDVCIQSADSLRREFAVIPHKVEEIDEWARSLHRRFPGPIAIALELSKGPIVYALQKYDYFVIFPINPSTLAKYREAFQPSRAKDDPTDAELALDLILRHPERFEPLQPQSVEIRTLAALVEQRRRLVSDRVRLTNRLRNTLKQYYPQTLEWFDRINTKLFCDFIERWPTLTQVKRARATTLTAFFRAGNTRNPALLETRLVSIRSSQHLTLDEAVIAPNKLHALMLVGMLRVILDAIKTYDQTIAELAPQHDDYDLFSSLPGAGPSLAPRLLVAFGEQRNRFKNAAELQKYSGIAPVTERSGTKHWVHWRWRCPNFVRQTFVEWAAQTINKSYWAGEYYRQQREKGSAHQSALRALAFKWIRILYRCWQTRTPYDEATYLKALQRRGSPLVAKAV

SEQ ID NO: 269082 - protein, 385 aa, unidentified
MQKRHDESKACLTAFVQDNTVIAVIEMSLANWLVAGLLPGVNREPLKKIAPDPEVLLRLLYRWRDEAVRAGKEITRIAVAYETGRDSFWLARWLQDRGIDAHVIHATSVAISREHRRAKTDRIDTAMLKRAFLGWVRGERGHCSMATIPTIAEEDAKRPHREREALVKERTRVINRMKAILTQFGVRNFKPALRKAAEKIAEVRTPEEVPLPPNAAAALRRHIEHFRLINGQIKVIEKARLQRLQQNPTDKFNAMVFLLVRIIGLGVETAEQLVHEILFRNLRDRKAVARYSGLTGSPDESGARHREKGLSRSGNERVRKILIQLSWRMLRFQPNSGLVRWFKARTASSRRSRKPMIVAFARKLIIALWRYANTGLVPEGFQLAK

SEQ ID NO: 269083 - protein, 337 aa, unidentified
MTPATVGLDLAKNIFHVHVVDASGCTIDSRRLTRRELLPFFEALSACLIGIEACATAHNWARQLQRLGHDVRLIPPGYVKPYVRRGAKNDAADAAAICEAVTRPNMRFVPVKSREDQAFLMLHRARGLLVRQRTMAACAFRAHLAEYGVIVAQGRHRVDTLVAKLDEIREDLPEDACFALDALVGQLNALNRQIDGIDARLTEIHKANAICRLLATIPGIGPITATAFAATVPDPSAFRSGREFAAWLGLTPRQNSSGGKNRLGGITKQGDRYLRHLLVLGARTVVRYPKARSRVDGPWIEAMLERRRPMVVAVAVANKLARTIWAMLTTGEAFRTA

SEQ ID NO: 269084 - protein, 296 aa, unidentified
MLPASHRFSETNAEDGIASLVARLKALNPKIVLLEATGGYEVSVAYALSEAGLPVVVMNPKALRHFAKAIGRLAKTDKLDAQVLALYAQTIQPEVRPLKNQEQLDLVNLMTRRHQLQGMIVMEENRRRTSAPRVRGNIDQSLAHLRQLLKDLDREIHDFIRRTPLWHHKAAILQEVIGIGPVVSSELIGHLPELGVISHKKVTALVGLAPMNRDSGQYRGKRMIQGGRPAVRRALYMAALVASRHNPVIRDFYQRLRLAGKPAKVALTACMRKLLVILNAMLKNRTHWNQQLPIAA

SEQ ID NO: 269085 - protein, 363 aa, unidentified
MLFVGIDQHKRHLTVCIRDEQGNVSLRRQVSTKWENVDPFLASLQERATVRGGYVAVVEVCGFNGWLVKRLEAWGCKRVYVISAPDRVRQKTDRRDAAKLSELLWINRDRIAAGQKLVHVSVVYQPTEEEQYDRQLTHLRLRLGQTLTRVKNSIKGILRRHNLEQECPTKGGFTQAALRWLRIVQLPQLDRQELDMRLTQYRVYAMQLADVALMIEKRAEQNAEVPRVRTMPRVGAYTALALVAHIGSIERFSHARSLSNYFGIAPGCRNSGDTDRPGAITKAGHPFIRFLLAQTVLHALRGDPGLRRWYQRVKRRRGSKVARVAVMRRLCESLWHMLSKKENYRFVDGTHAGDDKKTCRPAA

SEQ ID NO: 269086 - protein, 434 aa, unidentified
MLTRLSTGIDFGTAWVDVCLQAADGTPLVPHQRFGNSLPGFQDFKQLLLETKDACGAAGIDISGEATGMYWLPFFLALATDPELTAHDTHLYLLNPRWVKWYKLCFAEDNKTDPSDAYYIADRVRVNRPNSTWHPDLHALTLRFYTRYRFHLVQALTREKSFFCVYLFLKANAYHRLKPFSDLFGVASRTVLSESPNFEEIATLPVADLDAQLDILSKHHLPDSRAAATKLHQVAAESLPLPVALQQPVQRILDGTLAHIAFLESQVTLVEGWIAAELVHHPAIRQLQTIPGIGPACAAGIGAEIVPVQRFLDGSKFDKRRAQWCPRNLRDAEDAVAKIAGLWWPRMESGNFAAEDRHLAKSGNAYLRYYLIQAADQLRRHAPEYRQFYHRKFTEATKHHHKRALVLTARKSVGLIVGLLHRNQPYRSQEVRRT

SEQ ID NO: 269087 - protein, 416 aa, unidentified
MFAVGVDVANGRSMVAVLDGMRNMVAKPFEVVHTAQGFAALVEKLRQLDGEVRIVMEHTGRYYESFAMTMHRAGFFVSAVNPLLIKNYQGSINVRKVKTDKADAQKIAQFALDKWTILPHYTPMDTIRYNLKTLHRQFQLASKTKTALSNNLIALLEQSYPGANRYFDSPVRTDGSQKWVDFVDTFWHVDCVAMSSEHAFVERYRKWCKRHGYVFSEQKAIQLHADARQKIPLVPKSDTCKLLVREAVSQLNAVSRTVETYRAEMDRLASQLPEYETVMGMTGVGKSMGPQLMAEIGDLRCFAHQKSLVGFAGTDPIKEESGDKVSQSAPSSKRGSPYLRKTLFVIMTILLQLQPQEDPVYQFLDKKRSEGKPYYVYMTAGGTKFLRVYYGKVRDCLKAKGLWEVPASASQEVNPG

SEQ ID NO: 269088 - protein, 457 aa, unidentified
MSRKRPKLKTDRAMPMVHPNAAAIDVGATMHMAAVGADRTPEPVRSFGTFTTDLHRLVNWLKECGVETVVMESTSVYWIPIFELLDARGFTVFLVNARDAKHVPGRKTDVSDAQWLQRLHSYGLLRASFRPKGQIAELRAYVRQRERLLEYAASHIQHMQKALTEMNLQLHHVIADITAATGIRIIRAILAGEHDPKVLARLRDYRCHSSAETIEKALTGSYRAEHLFALEQALALYDAYHEKVSACDVRIEAVLKELAIDRGRRSDSLPSSRRRTDQANAIAFDVRAALFALLGKDITQIDGLGPYLSLKLIAECGDDLSAWPSAKHFTSWLCLAPSNKISGGKVLSSRTRRSGSRAAALLRLAAVTVGRTDTALGAFYRRLSARIGKAKAVTATARKIAVLFYNAVRHGMEYVDPGASFYETRYRARVVDNLHRRAKAFGFVLQPIEPTPGVAVS

SEQ ID NO: 269089 - protein, 379 aa, unidentified
MTRPAAIPTDEHTLYAALELSKNSWLLAIQFPGRDNPSLHPVKGGDAEGLVAKLDAACERLAKIAGQVPRVTLCYEAGYDGFWLARLLEQRGIDCFVMEPASLQVNRRARRVKTDRIDVEALLHTLIAWCRGERHVCSMVIIPSAEEEDLRRSHRGRDRLVRERTAHINRIKGLLFGQGIRGINVKRHYKTLTPADLVTGDGRPLPERLSREIAREIERLALVQEQIIETERERDQALNSCEATERKRHDLLRLKGIGPAFAAIFARELYYRRFANRRQVASYIGLAPSPYDSGEGRRSQGISKAGNGLVRYTMIQAAWLWLKHQPQSALSQWFHRRTQGHTGRMRRVMIVALARKLAIALWRYLELGLIPQGAILSAR

SEQ ID NO: 269090 - protein, 340 aa, unidentified
MPLYGGIDLHANNSVVVLLNEQDEVIYQKRLPNDLLMLLGQLAPYQAELKGLVVESTYNWYWLVDGLMEASYRVHLANPAAMQQYNGLKYTDDHSDARWLAHLLRLGVLPEGYIYPKAERGVRDLLRKRTHLVRQHTANVLSVQNIMARNTGTRFSGKRIQELTKQELTTLLADETQVLAVTSSLVVLDCLKHQIKTLEKTVHKHLHHTPSYEQLLTVQGIGTILAQTISLETGAISRFPTVGHSASYCRCVDSTKLSNGKRKGTGNVKNGNPYLAWAYMEAAQFALRFQPAAQRFYQRKLAKSRNNTILARKAVAHKLARACYYMMRDLVPYEATKAFG

SEQ ID NO: 269091 - protein, 361 aa, unidentified
MIAVLPEDAAAPTRVERLPNDFVKLRRFMDRIAREGNIQHEIRACYEASGAGYVLQRAMCEWGHKCEVIAPSLIPVKPGVKRKHDKHDAVQLARLYRAGELTVVHIPSEAEERVRDLVRCRETFQREIMKSRHYILKFLARRSFIYREGTHWKRAHMNWLKQLASNASPLAKEDLIVYQEYLALLEYELQRREELDRKIEELALTPSLAPVVQRLQCFRGISVHAAMVLATELVDWRRFGNPGQLAAYLGLVPTEHSSGDRERRGSITKAGNSHCRHVLVQAAWSYRHAPSVGAQLKARQQGQPVSVIAHSWKAQHRLHKRFMHLSYRKQSQIAVVAVARELVGFLWSVMQDMNQDMNKAA

SEQ ID NO: 269092 - protein, 338 aa, unidentified
MASRRPCPRDPNGHQGREARIQRNRVMDKAPTFVGIDVSKHRLDVHARPSGEGFATDYDDEGVAGLAERLATPGPALVVLEATGGLEVRLAAALAAAGLPVAVVNPRQVRAFARAAGRLAKTDRLDAEAIARFAEAVRPPVRPLPDEATRRLGALVARRRQLLEMLVAERNRRHAADPSLREGIDAHLRWLGEALDGVERDLDEAVRASPVWRTKEELLRSVPGVGPVSARTLLAELPELGSLTRRQAAALVGVAPFNHDSGKMRGKRAVGGGRAALRACLYMAAVAAVRAGNPAVAGFYGRLRTAGKPAKVALTACVRKLVVTLNAMLRTGTAWKQA

SEQ ID NO: 269093 - protein, 339 aa, unidentified
MQIRSVGIDLGKTTFHLVALSVAGKVLVRKKFTQKQLITFTANMQTALIGMEACSGAHFLGRLLRAQGHDVKLIPAQFVKPFVKSNKNDFLDAEAIAEAVDRQNMRFVPIKTDDQLDLQAMHRVRDRLVARRTSVINQLRAFLLERGMVFAKTPYKLKQAMPEILENANANFTPRMRHLASMLWSEWKDLEQQIVAMNEEVEQIASSDPACQRLRQIPGIGPLVATAIVAAIGNGSAFRKGREFSSWLGLVPRQHSTGGRARLFGISKRGNCYLRKLLIHGARSAVLRVKRERSPFGSWLDSLERRSPVKIVITAAANKLARIAWAVLSSGNDYRPVPA

SEQ ID NO: 269094 - protein, 439 aa, unidentified
MVRQHRWGSQEEKLARVAGATVIVGVDVGKDWHYVQMISAATGQAIGPARRIENTRAGFELLDRMLGEGGASEVVGRHVPAREVIVGLEPTGVYWMPLAYHLAQLGVQVVTVSPYATKQAKELADNSPTKSDAKDARVIADLVRSGHFLTARLPEGVYRDLRDLSGIYMQQRRDCNRVVNRLRTELARCFPESLGVFRCLDSQVALRWLEACPLPQDVLALGEEELEKELGRGPKRSRREHKRAKRLMAAAAESIGVLAGAPVRQRLRELAQDLRLAVARLKATQAQMAQTLKQAGPAAQLILSIPGVGPVIAAHILGRLGNPSDYRHPDQMLKMAGLNLTHKSSGHRDGRRHISKRGSAELRSVLYHASISMLAHAPEMRAMYEELHRRLRSGPAALCAMACKLLRMIWGMAQRGIPYDPRKALGRVRAERLLKDAAA

SEQ ID NO: 269095 - protein, 445 aa, unidentified
MEVVNPHAAGIDVGSRSHWVAVGQLEQDVQEFGVFNQDLFAMAQWLKERGVKTVAMESTGTYWQNLYAVLMAKGFHVILCNGKFTKNLKGKKSDVMDCQWIQKLHTLGLLSSSFLPDEQTEQLRTYCRHRSNLLHSAASTSKKMQKYLRLLNLRLDVVVKDICGLTGLSIIRAICAGESNAEKLASLRHGNCKKSEKEIALALQSNSRQDYLFALQQELETYDHLQVKIQQCDVEIEKALDRIINSDDDKKQHTIEAKIHKRVNKNTPKNIDLNLKSYQMFEGIDLLAIEGMSYSTVLALMSEVGAGGIKKFPTAKHFASWLRLAPNNKVSGGKVLSSKVPKGSNRLKIALRNAANAIGNLKDSTPLRDFFQRINFRKGRVSAISATARKLAVIIWNMVVKMVPYDNPEGYLFLDQKRKMGLVKRIRKQIDKFNLTNEELGLATI

SEQ ID NO: 269096 - protein, 416 aa, unidentified
MNAVGIDVSSRKSTVAVLRPLGEVVCLPFDVSHDADGLASLAEKLKALDGETRVVMEHTGRYYEAVEKALHEAGFFVCAVNPLLIKEYGANSLRRVKTDKADAVKIARYALDNWADLRDFTPMDAIRYDLKTLNRQFQLASKQRTASANNLIALLEQSFPGIRKCFDSPVRSDGTQKWVDFAHSFWHVDCVRKQPFPAFCERYRKWCKRHAYLFKLSNAEEVYALAKRAVVLTPKSKVVKVLVQEAANQLSSISRSVEVYRAEMDRLAAMLPEYPVVMAMYGVGKSYGPQLMAEIGDVRRFERKQALIAFAGIDPMPNQSGDKNVRSNKSSKRGSPYLRKTLFNVTRTYLQCAPQDEPVFQFLNRKRAEGKPFYVYMLAAANKFLRRYYAKLRDYFASLDTLQSVDPIPATLKASL

SEQ ID NO: 269097 - protein, 389 aa, unidentified
MKRANRRGPGPSHLLMTPDHAGNVVGVDPHKRTLTATVADARGGILASAHFRVSGGGHRELEAWARQFGQIARWGIEGSASWGWHTAVFLIDRGHDVRDVCANRTPRSDRARQRGKSDTLDSERIAREVLAHPLLPKAFKRAGQDQGPDETHQLLALWHNRRRSILTSRQHLVGEAEHLLCELPLELREQLPDTKAVKPRLAALGRRNRRRRYDAPTRLRLQLLDGYRAQIKALELEEKQVLAQLEALVRENGSTLGELSGLGTRSVAELLVEVGDPRRFTEGGFARFNGSAPLPASTAEGPGEPVRHRYNPGGNRRVNAILHRMAVTQLRCEPRAQRIYANARAGGHTNKEARRVLKRHLSDVIYRRMIRDLAAAERASLSAQPLLAA

SEQ ID NO: 269098 - protein, 337 aa, unidentified
MLFCGIDLHSNNCFVVISDDDDKVLYSRRLPNNLDQICAALDPYRTNLFGVVVESTYNWYWLVDELIEAGYPLHLANTTAIKQYDGLKHRGDESDARHLAHILRLGLLPEGHIMPRATRAVRDLARKRMQLVQQRTTQIVSIETCLAQQTGGRLSTNDVKQLTDAHVDAMSFGAADSMGLKANLAVMQALQTQIDTIEKALSKHCRSNPGYRLLKTVSGIGPILATVILLETGSIERFADVGNYASYCRCVDSVHVSNGKKKGEGNTKNGNRYLAWAYVEAANFAIRYCEPARKFYQRKKAKRNSIVAIKAVAHKLARACFHMLKTGEQFSIERCFA

SEQ ID NO: 269099 - protein, 360 aa, unidentified
MTVEKYVALDVDSANIVIGVYDRKGQQVMRSHVRTNGNNIRQFFKGLSGNVHVVFEEGTQAAWLYDLIRPLVTAVTVCDPRENKLLKSGNKSDDIDIDKLARLLRLGEVQAVYHGEETIQGLKHLVGAYENLVSDTVRAMNRLKAMFRGRGIGSRGTKVYSNEGRKERLTKLNIEGLRARAGYLYKQIDCLMKLRNEARKAMCGEAARHSAYKLIKGVPGIGPVRTAQIIATVGTPHRFRTKRQLWPYCGLAVVTRSSADYEWVGEQSRKRKRPAQTRGLNKNYNRRLKQVFKGAAVSAIRTNEQFKQYYQRLIDKGIRPEMAQLTVARKLSAITLAVWKKGEKFDPEKLNQAAQSTGNQ

SEQ ID NO: 269100 - protein, 391 aa, unidentified
MIYVGIDVAKDKHDCFISNSDGEVLFKAFTIPNNLDGFNNLYQKIESVMEDLSKVKVGLEATGHYSYNLLGFLLDKGLTTFVINPLHTNLYRKSLSLRQTKTDKVDARTIASMLMSDVNLKSYSDISYHNEELKSLTRYRFDKVKERAKLKSSVSRLVCILFPELEKLVPTLHMASVYAMLSEFPGAKYVANAHLTRLSNLLSEASKGHYGKETAITFREAARTSIGSNMPAKSLELKHTIKLIQELTSEIDEIENEIKIIMDEINSPILSIPGINYRMGAMIIAEIGDFSRFDSPDKILAYAGFSPSTYQSGQLDGAYSHMEKRGSRYLRYALYNAAKYVCHWDSTFAEYLAKKRAEGKHYNVAISHAVKKLVRVIYYLEQTNQQYSKTA

SEQ ID NO: 269101 - protein, 362 aa, unidentified
MSDGSTENIEMTAGLDLGDQYSYLYVLDTESGELVEEGRLRTTPDGLLRRFDSERKLKVAIEVGTHSTWVSRILEGCGHEVLVANPRKTRLIYAGKRKTDKLDAQKLARLARADPELLYPVGHRGEESQAHLALIHSRDALVRSRTQLINHVRGTVKSFGARLPKCSAESFHRKAADALPSKLAETLEEVVETIGSLTETIRDYERRIERLCEQSYPQETGLLRQVPGVGTITSLSFVLTLEDPDRFEKSRSVGAYLGLVPGKDQSGQSDPGRPISGEGDEMLRRLLVGSAHYILGPFGPDSDLRRHGEKIALRGGKNAKKRAVVAVARKLSVLLHRLWITGEAYDPLRNARSAGTLGEEAA

SEQ ID NO: 269102 - protein, 341 aa, unidentified
MTLYIGVDIHARQQTVSFLDTTDGTTGQVVLEHEGDDIKGFYGQFQGEVIIGIEACGYTNWFEELMEQLGHQLLVGDAAEIRRLARRRQKNDRRDADLLLDLLVHDEFPALFRYSKESREVLRQLRYRHKLVKLRTMVVNTLHALAINAGLSLRAQLLTRGGRKQLAGLQLSAISQQQRDELLSLVDELTRRSGTVERWLQEQAKNDTRVQRLQTHPGVGLLTSLCLVHTLGDLSRFSSTRKVAAYVGFDPMEDSSAERKVYGGISKAGSRLLRYLLVEAGQSAVKGDQHLKQFYRRLLPRRGKARAKVAVGRKLLIRCFIMGRAEIDYAEFLRRGKKETE

SEQ ID NO: 269103 - protein, 378 aa, unidentified
MPSETTIHVAIELSVSSWLVATRPPGAEKSRLHHIEGGNTTALLALIAELRTRASTKLGKPAEVVCCFEAGRDGFWLHRALTMHGVAAYVLEPTSILVNRRARRAKTDRLDAEGMLRVLAAWLAGDRQVCSMVRVPTPEEEDAKRPHREREHLVQERLRIENRIEALLFTQGIRKRPSLRSWERDVAELRTGDGRALPSLLRVELDRLRRRLVLALELIREVEAERAEALAVTADDEMTQKIAALQRIRGIGTNFAAVLVREVLYRSFANRRQLASYVGIAPMPYQSGGMDHDRSISRAGNPRARTTLIQLSWLWLRYQPGSALAAWFRERVGTLQGRTRRIAIVAMARKLLIALWRYVETGVMPDGVEIRAQADVTA

SEQ ID NO: 269104 - protein, 411 aa, unidentified
MEATVITAVGIDVSKSKSTVAVRRPGGEIVLRPFEVHHTNSDLKKLASTLKKLGGDIRIVMEHTSTYWRPIALTLKEAGFFVSVVNAMLIHDFSDNTIRKLKTDRADALKIANYALTFWDTLPPFNSEEETRLLLKMQSRANERITATATALRNGLIALADQIFPRVNIAFDPNTKNANGHEKWVDFFLRYWHKDCVCQYSMEAFTESYRRWCKRKNYKFRTDTAHKIYLLAQEGVATLPKCESTKMLITQACKSLNAVCEAKQSTQLEMQRLAAMLPEYEVVMQMEGAGPITGPALMAEIGDVRRFKNKKALVAFAGIDAPPFQSGAFESKSRHVSKRGSPHLRRTIFIVSNIILTRSNPENAVYCFMDKKRSEGKHYYVYTVAGSAKFLRVYYARVTEFLRSQPSSDAC

SEQ ID NO: 269105 - protein, 338 aa, unidentified
MSIVHVGVDLAKNVFAVHGVDESGKAALMRPSVSRAKLGELMAGLPPCTVAMEACTGAHHWARLFVSHGHTVRLIAPKFVTPYRMSGARGKTDAADAAAICEAVQRPAMRFVPLKSEQQQSQLMVHRARQGYVQARTACINRIRGFLAEFGHVLALRADTVRRQAAGLLEELPGWGNTVIGDLLSELHRLDERIAQYDRHVAQLAREDARARQLMQLPGIGATTATAVVAMIGNGHEFKCGRQFAAWLGLTPGQYSSGGKTRLGRITKTGDGYLRSLLILGARSVLALAKGRSDAISSWALALQQRRGYWKAVVAIAAKNARMAWAVLRRGENFKMPA

SEQ ID NO: 269106 - protein, 375 aa, unidentified
MFYLAIDQHSTQLTVNLRNEQGDVVLRQQVSTKPGAVKGFFENLSSECAADGGYVAILEICGFNDWLLALLKSSWSGCREVLLIQPEKRSKRKTDRRDANQLGEILWVNRQRLLVGKRVQNVRRVLPATPEEAADRQLTAHRRRLTQRRTRGINQVWRIIHKHNLHHGRPTKGIQTKRVRQWLSKLELPEIDRLQMDQLLVEWDMLEKHLAEVDKQIDARHLKNEKAQLISTVPGLSKYSGLAIASRASEIERFPRGASLANFFGLAPGCRNSGNTQDRMGAITKQGSTMVRFLLGQAVIHVLRKDAWMRQWYRQVKHRRGSKVARVAVMRRLVTILWCMLKYDIPYICGGPGEFRKVREREEMLRREFQAAAGA

SEQ ID NO: 269107 - protein, 413 aa, unidentified
MNDHSKHRYFAGFDWASDHHDIIVVDEFGRIVADFQIAHTTAGWREWREKITAWPDLAVAVETSFGIVVENLLDSGVTVYPINPKSAKCYRQRKCPSGTKTDRLDAWAMADALRSDGHSWRPLGPKDPLIELLRILCRDEVQLIEERTALICQLRQALRDYYPAALEIFDDWTAPHAWAFVERFPTADALAKAGKRQWEKFLHTHKLWRPQTSQARLEAMAKAGEWKTSAPVVEAKSLYACSKIRQLRTLESQLQQYRKRIEALFATHPDSGLFGSLPGAGPKLAPRLLGEIGSDRQRYDEPQGLQCVAGTAPVSFRSGQISKVYMRRACCPSLRHTIHLFADHSRHSSVWASTYYDEQRKHGKSHAQALRALGQRWIKIIWRMWHDRALYDANLHLKNQISHGSWLLKVNIT

SEQ ID NO: 269108 - protein, 377 aa, unidentified
MNNDNRFVGLDEHAETIAVAVAEADGEARSLGVIPNRSEAVRRLVKKLGPAESLQVCYEAGPCGYVLYWQLSELGVHCDVVAPTLVPVKSGDRIKTDRRDALKLARSYRSGDLTPVWVPDAEHEALRDLVRAREAAKKDQLRARHRLQKLLLRRGLRPPEGIKPWTVRYLTWVKTLQLEPAALAATLLDYIAEVDHAHERIERLERAIDQAIEAAPEAIRAVIEGLQSLRGVARISAATIVAELGQLSRFGRAKQLMGYAGVVSSEHSSGERIRRGAITKTGNAHLRRILVEAAWAYRHRPYLGGELRRRQKNASEKVKEISWKAQYRLHSRYARLMGRGKSKQLAMTAVARELSGFVWAVGVEVERQLASRPVRAA

SEQ ID NO: 269109 - protein, 391 aa, unidentified
MIFVGIDVAKDKHDCFILNSEGTVLADVFTIANNRIGFETLLSRIQSCSQGESKIKVGLEATGHYSYNLLGFLLDSGLATYVINPLHTNLYRKSLSLRRTKTDRIDARTIAMMLMSDVDLKSYSNIAYHNEELKSLTRYRFDKVKERAKLKSSVARLVNILFPELEKLVSSLHIAVVYALLSNYPGASYIANANTEELAETLCTASKGRYTKSKTAKIQVAAGVSIGSKMPAKSMELKHTIALIRELDKEISEVESAIDKITSQMDSPIFTIPGIGRHMGAMILAEVGDFSNFASADKLLAYAGLSPSTYQSGQLQNCYAHMEKRGSRYLRYALFNAAKYVCLWCPTFSAYLEKTRSEGKHYNVAISHAAKKLVRLIFAMQRSGKAFLADY

SEQ ID NO: 269110 - protein, 373 aa, unidentified
MKERSSSKRSPKRMAKAKQKQEPITIGMDLGDKNSCYCVLGEDGQVLREGQVATTRKAMTQVFNSIGRARIAIEVGTHSPWVSRLLQGLGHEVIVANPRQVKLISDSSRKDDRLDAQTLGRLARVDAQLLRPIQHRSEKAQADLMIIRVRSALVEARTGLVNTARGLAKSLGERLPVCDADQMGIKQAESLPAALQKALEPLLKEVESLTEKIKESDRKVEQIARKDYPETELLQQVSGVGPLIALTFVLTVEDKDRFQKSRDIGCYVGLRPRRGDSGESQPQLRITKEGDSYLRKMLVQGAHYILSHRGPDTDLKRWGLHLAERGGKRAKKKAVVAVARKLGILLHRLWVTGEVYEPLRNAEAKQERKKPAA

SEQ ID NO: 269111 - protein, 329 aa, unidentified
MKAILGIDIAKLSFDVALLIDKKFYCKKFSNNQSGFDKLGIWLQSRNIVLVHACMEATGSYGLRLAEWLSEREFVVSIVNPAIIKGFAQSQLTRNKTDKADAKLIARFTQALIPEAWIPPRVEVRELRDLVDRCENLKGMLVQEKNRLEMQRNEEVQKSIRMHITWLEKELVELEKAIQQKIDKDPKLKSQDELLQSIPGIGEKTSATVLAYVSFERFKSAKEISAFIGVNPRQRISGTSIRGRTRLSKTGNAYLRKSLYMPALSALRFNNTVKSFAKQLADNGKTKMVIIGAVMRKLVHIMYGVLKSGEVFDPAYKTHKNFRIEENVA

SEQ ID NO: 269112 - protein, 334 aa, unidentified
MKYIGLDIHKKDTQASVLDEKGKFVHGERIRTDVKDIGHFFEKIERMNDDDLLVVIEATGFYFWIYDVIVERGHQAKVVHPTRVKPLMRARTKNDRNDALMLAELLRMGCLEGIYVPDREVREMRELTRHRESLVRKKGDLKREIISALDQRGVKVPEEHRTNFSQKYNDWLRSLNDMIVSDKLDVLELVINKIKGIEQVIEERYGQDDDVKLMMTVPGVGLVTAAVIKAEIGDIARFSSPEKLAAYVGVSPTTYQSGEKEWGGPTRRGNNRAKHVLIEATLFHYHFCRDSKISSYYERKRDSIGRKKAVVASSRKLLEAMYFMVTRKESFHAH

SEQ ID NO: 269113 - protein, 443 aa, unidentified
MSRKKHTHLRGERGQAFADKIRGLPMEQILCVSLDIHKYFHVVMIHNALGEIVTMTFEIDIFQVGFDRLCRAIDEAVARTNAQVVLVGMEPTGHYFENLARHLDQRPQPVTLINSFAVSRNREQQMMRREKDDEIDVAAIGDLLRRGEGTSFQPVSGLYLEMQHLSRVRFSKVKMRTALKNQIIGHLDRIFPGLVIKGKEARERYELLFVTDFWSCQTLQHLIRVCPDPAKLATMAPQDLRSAFHKQGFALGPKTAAKIITYAQKVLLPDPEVIAIRCQLLAHDLALLAEVERLIAELEDRLHTLLQQTPYWVWTQVRGLSLTQVASLAAAIGDPTHYTYAAQVFRRSGLVSGRNDSGTRRHKGKGKRVVKTGDVYLRRALMTAIMSLIRHQPVLHDYFTELHRTKHAGVARVATARRAMGILWAMQRDQHSRTLVLKRGVEM

SEQ ID NO: 269114 - protein, 366 aa, unidentified
MKKRSSTTVRIKDAVETVCGLDVSDRHSRVCLISRESGEIVAEGRVATTRTALRGYFEPYPPMRIALEVGTHSPWMSRLLSELGHEVLVANARKVRLISQNRRKNDRIDAEYLARLARVDAKLLAPIRHRGPQAQVDLALLRSRGALVKTRTELINHVRGIVKATGQRLPAASTDNFATKARTALAPELMDALAPVLDTIAHVTATIRRYEEQLEALATTAYPQTALLRQVHGVGLLTSLAFVLTIEDPSRFRRSRSVGAYFGLVRARQQSGDSDPALHITKAGDPFVRKLLVGCAHYILGPFGHDCDLRRYGERLGAGGSKKAKKRAIVAVARKLAVLLHRLWVDQATYDPFYNLTRTGKHQHAA

SEQ ID NO: 269115 - protein, 419 aa, unidentified
MKIVYPICCGVDVHKSFLVATLITTEGIVPTYRKKRFSTFNKSILEFKQWLISNNCFDVCMESTGKYHVPIYNMLEDALRVTVANPKWVAAVKGNKDDKKDSKWIGDLFRLGLVPGSFIPEKRVRILREYTRYRSKLISCKSSEKNRFRNAFTVCNVALDSVVSDMFGKSALAVTDYLVNCDSFDPEHCVSLLHRSLKKKADAVVESIEGYQMTEEQKTRIRFVKEHHDFIQTMVGKIDQSIAALAAPFESAVALLCTIPGVDRNTAFTIISEVGTDMTQFSSSERLCSWAGLAPSNNQSAGKKKSVRISRAGVYLKPALVQAAHAAVKCKDSAYYRIKYEHISKRRGKKRAIIAIARMMLTAAFHMLSTGEVFNPSDLLQIDMPHELRDKQRDKAIKQAVKLLVSQGIVLPENLSLPA

SEQ ID NO: 269116 - protein, 367 aa, unidentified
MKKVSTAAAKQSSNFSQQKLTIGLDLGDRSSWYCVVDEAGNVRLEQRVSTTAKAMREVFSGMPHSRIALETGMHSPWVSRLLSELGHEVIVAHARNVRLIGESRRKDDRLDARTLARLARIDPQLLCPVKHRSAKAQADLTVIRGRAGLVRARTALVNTARGLAKSYGERLRGCNVRNMNPEKAEELSPELQAALQPLLAGIESLSDRIREYNERIEALAQQSYPQVALLKQVKGVGTLIALTFLLTLEDAHRFHKSRDVGCYLGLQPGRRNSGQSEPQMRISKQGDPYLRTLLVQRAQHILGPFGADCDLRRWGLKLAECGGRNGKKRAIIATARKLAVLLHRLWVSGEVYEPLRNSGCMTMATVA

SEQ ID NO: 269117 - protein, 309 aa, unidentified
MQEIFVGVDVAKDWLDIHHPGRGARRIENTPRAVRAFARSSARQGDWIIFEASGGYDRLLREALEVSAVRFTRVNPRQARDFARAMGVIGKTDRVDARMLSELGARLQPAQTLPLAASRRALQAQATRRRQRVEMRKQESTRLQQTADTEARADIRSLVAVLDRRIAKLEARIATLVAADAELAALDRRLQTVPGVGPIVSVTLIAELPELGQLDRRRIAALAGLAPIARDSGKRAGRRRIGGGRPIVRTMLYIAALHASRRCHTFRAFRGRLENSGKPVKAAITATARKLLTVLNAMLAAGADFRHEA

SEQ ID NO: 269118 - protein, 320 aa, unidentified
MEAVLGIDIAKAKFDVALQCSDGRVRRKSVPNTPAGFAALGVWLTQQRVTRVHACLEATGSYGEALATWLHDAGHRVSVVNPMTIHAFAASRLSRTKTDRTDAALIAQYCATQHPAPWQPAPREIRELQALIRRLEALQDMRIQETNRLSSGAVTPAVVRSLETVIATLSDEITAVQQQIRDHFTQHPGLRAQRDLLTSIPGIGDSTAAVLLAELFDKQYRSARQAAAFAGVVPRIAESGTLKRRGRLSKIGPSRLRKALYFPALAGLRFNPSLQALRTRLRAKGKVPMVIVGAAMRKLIHLAYGVLKSQRPYDLTIVRA

SEQ ID NO: 269119 - protein, 385 aa, unidentified
MAPIRMPEAVIGLDVGKSSHWACVATRDGEVLLSAPVANREDDLDSLFGRFPDALVVVDQSRNIGALALARARAAGMSAAYLPGLAAHGAARLFAGDAKTDERDAMVIAKTALGIPDALLPVGDPGPTIAAARALAAQRNFLTCENTRNKNRLRSILLESCPAFEALVDLSDGPQLRLMASLGGAWSVADAGPRRAAALTRGAARGRIEALVRSTTSSTRPDASVVAAEDRAVRLLARRISENSAEIEAITAEISALLEGDDTYRCLLTVPGIGPKTASELAISIDIEDFPSHDRLASYCGLAPRNRQSGTSISSVTASRQGNKRLKNLLIFSCNCLTRTEGRWGDYYTRCRERGMSHGKALKALARKRLKVIYAVMRDRVPYAA

SEQ ID NO: 269120 - protein, 354 aa, unidentified
MKRTTKYVGLDVHQATTVAAVREEGGRVIARSIVPTEAAALREFFRGMRGAVHVALEEGTQAQWLHDLLVPLVDRVIVCDRRGETPRGNKGDQGDAEQLAEALRRGGLRAVYHGSAERATVKELARAYRGVVEDSTRVMLRLKALFRARGIPTPGRQLYAAAQRPRWLRQLSEPGVRFRAEALGTELEVLHTLRLKAKRALVAEAQRDPAWGVLRTIPFFGPVRVALLLATMQTPRRFRTKRELWAYSGLAVVTRASAEYRLHEGRPVRRARAPMTRGLNRNHNPVLKDVFKGAATAATTRPGPLQQFYQGLLARGMRPELARVTLTRKLAAVTLRLWKTGECYDPAMLTVQAR

SEQ ID NO: 269121 - protein, 350 aa, unidentified
MSKVTLDLSSVTVVGLDLAKHVFQVCCVDAAGKVVINRALKRREVLGFFGKLPMCQVGLEACGSSHHWGRQLLALGHDVKLIPPAYVKPYVRRQKNDAADAAAIAEAVTRPSMRFVAVRSIENQALLMHHRVRETLVGQRTQLLNSLRGHMAEAGVIAAQGARNARALADLLSSGHPDIPLCVAQALLPLAGQIAELDTAIGTLDKEFAAAAKANAEARRLMTIPGIGPQTAHAIVATLGPDGIGQFSGPREFAAFLGLVPRQNSSGGKQRLGRISKMGNAYLRKLLVVGAHSVLHHRERHNDALRTWAKALLAGKPFKLVAVAIANKMARIVFAMLSAQTDYTTKAVAA

SEQ ID NO: 269122 - protein, 348 aa, unidentified
MVVLGIDAHKRTHTVVAVDEVGRQLGVRVTQATSTAAHLELVAWADRFGSERVWAVEDCRHLSRRLERDLLGAGERIVRVPPKLMAHARDAARTYGKSDPIDALAVARAALREPGLPTARLEGPERELRLLADHREDLVAERTRATGRLRWHLHELDPSWDPKPRSLSRRTHITAVEARLAGLEGMVARLAADLTARIAALTQDANALEREITIRVRALAPALLALPGVAALTAAKIVAETAGADRFKSKDAYARHNGTAPLPAWSANPNRHRLSRTGNRQLNCALHRIAVTQKRCHPPAQAYLQRRTTAGDTPTEALRALKRRLSDIIYRTLLADTADTTATSSQAA

SEQ ID NO: 269123 - protein, 412 aa, unidentified
MLDSSQVASTTSEGVFIGLDWGNSQHQLCILDPAGRLIHQGRFAHDVAGLGDLDKRLHAHGRVAGVAIERAEGLLVERLQQQGHRLFCVSPKMSARARERYRLAPTKSDAFDAFVLADSLRHEHRHWRSLAVPSPLLAELRALTRDRERLIWNQRDVENQLRAIVEVYHPAVLHLFSSLDRDISLAFLRDYPTPAQAGRVGTLRMTAFCSRHGYSGRTRAELPIQRLRANLLTASEGTSRGKGFTALMFTDQLELLNTQIRAISKRIREQLLTHPDAAIFLSFPGMGQITAAIMLAEMGEDRRRFPAADVLLAETGTAPVTRSSGRSRTVRFRYAANKRMRHAIDWWAFVSVRDNDWAHEAYEQARARGQLHNRALRGIGARWVRILWRCWTDSTTYDPARHLRNQPTPITA

SEQ ID NO: 269124 - protein, 357 aa, unidentified
MQPQIKELDFTGQNIYAGIDVHKNSWNVSIYSDDLYHKTISQPPRPEALYGYLSKHFPKGTYYSAYEAGFCGFWIHNQLQSLGINSLVVNPADIPTTDKEKKHKTDKVDSNKLAKHLRNGDLDPIYIHNVNILEDRNLLRTRRTVVKELTRYKNRIKSDLYFFGIEIPENFSNKSYWSKRFLNWLSSVKFRKDSGDAAFGVLLDQIILLRSQLLEINRKIRVLSRTEKYHKRVTLLLSIPGVGKITAMTFLTEVEDINRFANLEKLRSYVGLTPRSHSSGDKAIHGEMINRGNRFIKSSIIESAWVAARRDPALHLAYIRYRKRMDKNKAIVRIACKLLDRINFVLKNEKPYISGIE

SEQ ID NO: 269125 - protein, 342 aa, unidentified
MAYYVGLDVAVKSTSVCIVDEDGKVVKERSLVTEPESLADWLAKTGLPFERVGHEAGPMSAWLHEGLARKGLPVVCVEARHMQAALAAMRNKTDRNDACGIAQMMRTGWYRDVHIKSHAAQELRLLLVARRSMIDNRRNIENAIRGTLKVFGIKVGLVSRLKFSDRVRELVADKPAIADTVAAMLAARNALMTQYHVLHRRLKQAAREDVVCRRLMSAPGVGPVVAVTYRAGVDTPERFAKSSSVGAHFGITPKRYASGETDRQGSISKCGDGMVRTALYEAANALLTRSKRPSSLKAWGLAIAKRSCMAKAKVAMARKLAVILHRMWADGTEFNWAVEASA

SEQ ID NO: 269126 - protein, 427 aa, unidentified
MDFTQNERLNQINEQTLIIGIDIAKHKHVARAIDDRGIDLSKRLVFPNSLEGFQVLLEWARQLSADTSRPNLMLGMEPTGHYWMNLAYFLKSQGERPVVVNPMKVKKSKELDDDSPTKNDTKDAKVIAQVMRAGRYHEPTLPEGIYAELREGVKLFDIIQEDLSSIKAQIHNVLDRYFPEFLTVFKKWNGKMAMALLKLGYLPTDIRQKTEEELLYDVKALGTKNVGVARMRHLKKVADSSVGMTVGLRMAREELRYLVDQYEALNERLDNLKEELEELVLTVPGADLMMAINGVGAMTIVGFFAEIGDLSNYKDPRQIIKLAGLNLMMNQSGTHRGKTTITKRGRRRLRSILYQVARPLTFHNDAFKALHQYYKHRRTNPLKGKQSFVALGRKLIKVLFVIGTRKCAFSEERMLRDIPHMRDVQAA

SEQ ID NO: 269127 - protein, 316 aa, unidentified
MHTVHRFVGVDVSKLSLDVFTESLGSRRFSNTLEGVAELMVWLGEVSITVGFEATSSYHVLASEHMAGVGCSVHVYNPRQVRDLAKGLGLLAKTDRIDAQVIAQCVRLVESPLAVRSKLGKELRDVSRHIQYVTKLRADLRKKQGIPGLSQSVVDSMVRQIASLTEEIAILESQWRELVEKSPLHQERYNNLLTVPRIGQKSARVIVSELPEDLSKFSRKQLAAYFGLVPYDRQSGNSRGRSQLLHGNAHLRQPLFTIATLAAHLDPECRAFAQRLKAKGKHHLTVICAVMHKLARRAIAVVLRNTPWEKEMLLST

SEQ ID NO: 269128 - protein, 331 aa, unidentified
MTTEYIGIDLHKAFFQACAIGSAGERHWEGRFPRSPEGIAQLIVRGIGADVAVAVEASGPTWAFVDALAPTGARVCVVDPRKTRLKAGFAAKTDRLDARRLADALRRDSVASIYVPAPAIRDLRELCRGRHQVVRLRTRLAQMIRALLLRCDAGEPPGTRLYAPAAMAWLAHVRLPAAADRALHRFERLYGAVHVDVQAADREVRERAKTDPIAARLDDLVGVGAVMALTIRAEIGDIARFHSGPALASYAGLVPRIESSAGRVYHGRITREGSPWLRWALVHAARHAIRCDDARARWARRLAIRKGMNKARVALARVLCDEVIRIWPAAN

SEQ ID NO: 269129 - protein, 339 aa, unidentified
MQLYAGLDLHSRNTYIGIMDKDFKRLFGKRVSNELPLIVKTLDPFRDQLNGIVVESTFNWYWLIDGLMDAGYQCIHLANPAAMKQYEGIKHTDDQHDAFFLAQMLILGILPQGYIYPKDARPVRDLARKRLFLVRHKTSHILSLQSLISRCCAQRISANEIRKCTVDDLQRLLKEEHIVLSAQANLDTIMFLKGQIQRLEKAIKNKVKLNKAFQHLLTVPGIGLILAMTIMLEVGDIGRFPQVGNFASYSRCVSSQRLSDGKSKGHGNRKNGNRYLSWAFTEAAHLSRRYNEHFRNYYNRKVAQANTSLATKALSNKLARICYYIMRDQTPFRKELLSH

SEQ ID NO: 269130 - protein, 343 aa, unidentified
MAKHTLVAVDLAKSVFEVAVSHHPGQVARQKRYSRQQFPLALAQLPEATVVMEACGSAHFWARRIQALGHEAVLLPPHAVRPYVRRNKTDRTDTKGMLEAYRNEEIRHVPVKTIAQQTLASLHRLRSGWLAERTARINTLRGLLREFGIVIPLGAQHAVPSAWAQLEDAESEIPDPLRPALAEICLEIRELERRVKMIERQLAALATQTPAVSQLMTIPGIGLIIATALVAFVGDIHRFPSARHFASYLGLTPRESSSGLRRRLGAISKRGDVYLRTLLIHGARSVLLAAKRRTPDRLRAWALSRQAARGHNKAAVALANKLARIIWAVWKHDRPFHSVPNAA

SEQ ID NO: 269131 - protein, 404 aa, unidentified
MGTRNVYEKVAAGGMDVHHKFSQVTMRNEQGKVVRRERLDHPDRKAMRERLSQWPKDVPFVMEASFGWGWVADLMKELGLNPVLSNCLKVEQMRKARGDVKNNKKDADLLSLLPSELTEWWKVWMAPPEVRDMREWMRYRSGLVHISTQTQNRIHAIFHRHGVFHEFSDLFGTKGRAFLTGLCEDGRTPDVQLPAGALASLRGEVRLLDHVRKQLAEVAKNLRGQLHSDDLAKRLDGIPGIGLILSHTLIAEIGKIERFVNHRHLASYCLLAPRDNDTGENDPGRPPKGRRIGKCGNRTLKWALLEAAHGAVRSGGKWRKIFDRYTQGGKKDRNRGYIKVARELVKVVDVVWRKGVAYTATPPTRPKASKRSRAKEFFGSTRSGTGQPSPAMTAAQLQGLQVSV

SEQ ID NO: 269132 - protein, 405 aa, unidentified
MNAVGIDVSKGKSTVTIRRPGDVVLLPPCDIPHTQTAVNALIEKIKSLDGETKACMEHTGRYYEPVANWLSDAGIFVSAVNPILIRDFGDDSLRAPKTDKADSKKIARYALDRWGKLKQYGSMDKTRNQLKTMNRQFGFYMDQKTAMKNNLIALLDQTYPGANDFFDSRARSDGSQKWVDFVYTYWHVDCVRGKSLQAFTEHYQKWCKRKGYNFSASKAEKIYQRSSDLIAVFPKDDSTKTLIQQAVTMLNTVSQTVESLRIKMDQTASALPEYPVVLAMTGVGPSLGPQLMAEIGDVTRFTHREALTAFAGVDPGKNDSGKHSQKSVRTSKKGSPSLRKTLFQIMDGLIKRSPTEDPVYAFMDKKRSEGKPYYVYMTAGANKFLRIYYGRVREYLASLEKSQES

SEQ ID NO: 269133 - protein, 344 aa, unidentified
MTYYAGLDVSLRTVNICVIDEDGELVAETKLASDVQDIVAYLDDLDIEIESVALEAGTLTQYLTYGLQSAGFAVICMEARQVKGALSAMRNKTDKHDARGIAQILRSGWYSPVHVKSIESHHIRMLLSSRRAVLSKCVDLENEVRGLFKIFGIKLPPKLGHGAFDVTVRDIIEADEALSHALLPLLEARLVLYHNFRELDNRTRKMANKDRVCQRLMTVPGVGYITALTFKAGVDDPTRFKQSRTVGAHFGLTPRRSQSGEIDIDGHISKAGDPDVRCALYTAANAMLTRSAQWSSLKAWGMKIAKTRGHRRAVVAVARKLAVILHRMWIDDSQFRWGMEGARS

SEQ ID NO: 269134 - protein, 432 aa, unidentified
MKFNQSNKQNQRISRISETTLVIGTDIAKHNHVARAFNYRGIELGKRCLFQNDENGLLNLLAWAESIKQEHGMADVLLGVEPTGHYWFPLFYFLKQRGIEVVLVNPHHVRKSKELDDNSPTKNDIKDAKVVAKLVIDGRYTQPQLPEGVYADLRVLMNQRDRLCGDLNRVKGRIHNWLDRFFPEYRQVFKDWEGKASLITLQNFPLPQDVVAAGETALVATWKKSGVQRAVGPKRAGMLYQKAQKSIGLTEGATAARHELAMYLEQYAMLCRQIEELMEHVAALVEQIPGASHMMSIPCIGLVTVAGFLAEVGDLSGYDHSQQIVRHAGLSLRENSSGLHKGETTISKRGRCRLRALLYRAALTMVARNPEFRALHMYFTTRRDNPLKKKQSMIALCIKLIRILFELGRKQKNYDSSKVLGPHREAQLQAAA

SEQ ID NO: 269135 - protein, 327 aa, unidentified
MYVCSVGQDGEILLHRNMLAAPETFLKAIAPYRDGLVVAVECIFTWYWLADLCATEGIPFVLGHALSMKAIHGGKAKNDKIDSQKIAGLLRGGMIPQAYVYPAEMRATRDLLRRRTHLMRKRAELLAHVQNTNSQYNLPAIGKKIAYKTNRAGVAERFDDPAVQKTIEVDLALITSYDTLLTDLELAIVQTAKQHDAHTFYRLRSIPGVGKILALVLLYDIHDIHRFPSVQDFVSSCRLVKCARESAGKRYGTSGKKIGNAHLKWAFSEAAVLFLRNNPPGQQYLARLERKHGKGKALTILAHKLARAAYYMLKRDTVFDMDKFLHG

SEQ ID NO: 269136 - protein, 337 aa, unidentified
MKKNYQIFVGIDVSKSKLDYCVVNDPFSTKHHFGIISNNEKGIKQLITGLKNKYISSEVIFCLENTGVYSMPICYWAQHFKIDYWVVPALEIKKAKGISRGKNDKADAKDIASYCITHLHLVKLTALPQNDFIELKLLLAEREKLVKAIGMFKMTKEGHNFLPKEVLKITLAHNKKTTEGLQKQLYALEKIIQALIDNNPTFKEQQQLLITVPGVGKQTSVNLISATYAFTAFKNWRKFACYCGVSPFEYTSGSSIKGKTKLSHLANKKLKALLNMAALSAKKTDTEMKAYFEKKVSEGKNKMLVLNSIRCKIISRAFAVIQRNTPFVNVNKFKTAA

SEQ ID NO: 269137 - protein, 398 aa, unidentified
MNAVGIDVSKSTSTVAIARPFGEIVKMPFDVMHTNEELNKLARLILSLDGETRVVMENTGRYHEPMANALCDAGIFVSVPNAKILRNYNGDTIRYNKTDPIDSLKIATYYLDKWVKLRQYQPEDECRKTLKIYNRQLAEYTKMKVMLKNNLIALLDQTFAGVNKLFTSPARDNGHEKWIDFVAGFWHVDCVKALSETAFSQCYQAFCKKHGCYFSVNKANEIYALAKQIAPPLPKNDFTKMLVQQAISQLNCLCETVAVLKTEMNKLASTLPEYETVLTMHGVGKSLAPQLIAEIGDIRRFPKRTSLACFAGIEPPENQSGVYNQHSRRISKQGSPHLRRALFQAMRAVLVLKNDDEPTFQFIDRKRAEGKPFKVYMVAGCNKFLRHYYAKVSACYAA

SEQ ID NO: 269138 - protein, 416 aa, unidentified
MNKGQNTRGYQRYMALDIHREYLLVGAQNEDQVWVLTPRRVRTEKFPEWAKKNIRTGDIVVLETTTNVWVTYDIVAPLAGRVLVANAAEVKEIANARVKTDKEDVKKLLKLLIGGIVPEVWVPPMHVRELRAFVSYRGRLVATSTMIRNRLQSLLHKHNLKISETGLLDQAWWEEQKNISPLEQMQIRQELSLLQEVEKLKAAVDEELERQSTGEMWGKPALQLMQLPGVGYIVAMTVLSAIGDITRFEDASHLVGYAGLGAGVHDSGKTHQEKKITKKGRRELRWAMVEAAWRAVRMSPFWKAEYEKYLNRMRKPNQAIVVVARKLLIAIWHVLSKEETDVHASEEDLAYKMLLLSWSLNEEVRMGLTYKQFAKYALMKLGVEQDITRFVRRNVPRRLATREEVLVRMTELGLIA

SEQ ID NO: 269139 - protein, 369 aa, unidentified
MGEYHEAFVAFDVAKLKHAVAVAEGGRDGEVRFLGEIENRPKAIERTIKKLAGKYDRLHVCFEAGPTGYGLYRQVQDLGHDCMVVAPALIPKRPGERVKTNRRDAITLARLHRAGELTGVWVPDVVHEAVRDLVRAREAGSDDLRRKRQQLLSFLLRHGRIYDGGGHWTLAHRRWLAGQAFEHEAQQIVFQEKIDAIRDAAERLHRLDEQLAAIVPSWSMAPVVEAYQAMRGASFLVAVIFAAEIGDVRRFDTPPQLMAFLGLVPKERSTGDAVRRSGLTLAGNRRARRALVEAAWTYRFPARISETLRTRLEDLPKPVRDIAWKAQVRLCARYRRLSATGKKPPVVVAAIAREMAAFLWAIGREVAPS

SEQ ID NO: 269140 - protein, 339 aa, unidentified
MVHFVGLDVSVKETSVCVVDDAGKVIFEQKVLTEPADIIALLTSLGVTYGRIGIEAGPLSQWLVNALTAADLPVICVETRHMKALLTAQQINKTDRNDARGIAQMMRVGLFKPVHVKTLVAQEQRMLLTSRKLLQRKLLDLESDLRGTLRNFGLKVGVVSGSRYEARVRELVAGFPRLAAIAEPLLNVRRVMRQQLAVLHKMLLDTVRGDPVCRRLMTAPGVGAVVALTYRATVDQPQRFVHSRAVGAHIGLTPKRYQSGEIDYDGRVSKCGDALLRLLTQSRKWSWLKAWGVRVAQRRGMRRAIVAVARRLAVVLHRMWVDGSEFRWNKASAAVPTAA

SEQ ID NO: 269141 - protein, 394 aa, unidentified
MPVTREGPDLYGLVTVLSVHSVPAKPFVHDKPEAGMAIMEGQVRRIVGGVDTHKDLHVAAVVDDLDRVLGTNSFATTRQGYRQMLAWMRSFGQVQRIGIESTGSYGAGLLRFMQQAKVPVLEVTTPDKQDRRRRGKNDDLDAQNAAHAAFAGQRTVTPRSRDGMIESLRILMACRKTAVSARRVALQMIHNTIVCAPDGLRDQLRSLTRMQLVRTLASWRPDLTAYRDVDSAYRIGLRSLARRYLELHDEIADLDAMIAAIVDELAPNLVARNSIGHIGAAQLLLTAGDNPERLRSEASFASLCGVSPVPASSGKTVRHRLNRGGDRAANSALHIIAIGRLRTDHRTKDYVARRLAEGHSKLDAIRALKRYLAREVFTLITQRRREINATRIAA

SEQ ID NO: 269142 - protein, 370 aa, unidentified
MLDTTTFIGLDVHARSIKAVSLDVMTGEVRAATFGYDAGAVAEWVRSVDPRARCVYESGVTGFDLQKRLSGLGVDCVVGAVSKMIKPSADRRRKNDRNDAEFLARMLSVGNVVEVWVPDDECEAARDLTRALEDARDDLSRSKQRLSKFLLRHGLAFDERTPTGRRKGNWTRAHWSWIESIRFAERVDNDVLAYYVDAVRRAAEEKARLEGLVEAEARKPRWRKRVDSLRCLKGVDTASAADLVFEAGEFSRFGNARSFAAWVGLTPSEHSSGESDRRGAITKAGNKHLRKTLVEAAWHYLTCSGRPKGLAKGQAPDRGARRHAAKGVRRLVERREALLARGVHGNKANVATARELACWVWAVGLMAEEA

SEQ ID NO: 269143 - protein, 318 aa, unidentified
MSKIIAIDVSKQTLDVAYLIEEKWQHFSTTNDLKGFTKIAELVEIDDWFVMEASGPYYLPLASYLFNKSLNVSVINPLVIKRFSQMKLYRAKTDKKDAKAIAEYAMGNELKKWNKAGECIFELQQLLTAIELLHKQLTQSNGQLEAFTSSGELSKELSKYMKTMINGHKKMIAKLEVRLKEVANEHYKVTLECLKSIPGIGIKTAIQLTIITDNFKKFENYKQLTAYVGLSPRIFQSGTSVKGKGHICKMGNPQVRKLLYMCSWTAKRCNSSCKEMYDRLKAKGKPERVIKIAIANKLLKQAFAIASSQTMYQENYIR

SEQ ID NO: 269144 - protein, 344 aa, unidentified
MSKFNLFCSIDISKADFDAVYGSPTSYRHVKLSNDVKGISQLLKLLLALETDRSRILICCENTGSFMNKLASILKGEDIFLWAVHPLLLSYYSIEINRFKTDKADAHKIFNYAVSNQSRAVCFHLPSVAVQEIRDLFTCRKNLIETRSAYSCRNEDRQQRAITNPLVMEVEKQLMIILSNYINMIDKAIHTLIASDSKIKRMYQILVSIPCIGPVTAWHLLFITDCFEKFDNWRALACYIGSAPFPKQSGTSVKFKDRVSKKAYRPLKADLNQGIVSVCTRPGLLFYNYYQAMIKQNKPHLYILNMIKNVLLKLVFKLIQSNSIFDKEIFFKNKISWQEYLLMS

SEQ ID NO: 269145 - protein, 429 aa, unidentified
MQNESIPDARGPVFCGVDTHADSHWLCVLDWRGRKVLSRQFPADAAGYEALAGAIAAAGEPACVAMEGTSSYGAGLTRHLASLGMPVREALSPARTQRRRPGQGKCDEADAERAARAAMSGSRLGTPKSQDGWVDGVRCMLAARSGAVKARTSAINTARSLLTTAPEGLRSRFRGMAGPRLMEELPSVRAEGALGAALGALADLWAAARDAALDMERAIEASLEENCPALLAMYGCGPVSAAKLAVAAGDNPGRLRSEASFAAICGACPIPASSGKTVRHRLNRGGDRQANSALHEIARQRVMRDPETAEYAERARGRGKSDRGVMRCLKRYVAREAYRALMRPHEIRRPEDASELVAARRAAKVSQVRAASILGTSEKYISMLERGQRELKPIRRAYEAWVEAGLPLDWDRQAFEAERKMDSKKHLAK

SEQ ID NO: 269146 - protein, 322 aa, unidentified
MRYIGIDVSKATFVVAYSSDKGGEIRTFNNTTTGIKQFIGALPKDSSIHCVMEATGNYSAMLLYLLNVAGIAVSMENPLKVKNFAKALLSTVKTDKSDARLITLYGEKMNPRPFKVQGEAILRLRQKRTVIRQLTKQITAMSNLRGSLACLPVPDKGATHTVDETIKFLEKKRDRLQAELTDLVEVEFSRQLALLTTIKGIGITLATALIITTGGFTYFQNAKQVSRYLGICPTYEQSGTSVNIRGHINRNGDAYTRGLLYVAAWTASRFNTKCGETYTRLRQNGKPGKLAMIAVANKLVRQAFAVVTHDKEYVDGFVSNRP

SEQ ID NO: 269147 - protein, 383 aa, unidentified
MSKVIMIGCDLHDRSMLLRYAVDTGKPQQVSYDNDARGRQRMIRNLKSLAKEHQANRIVFAYEASGLGYGLSDLLHEHHIECHVLSPTHLPKTPKSAKQKTDARDAQMLLEQVRGFVLAGNSLPVVWTPPHRLRHDRELVRARVDVADEATRVKLKVTSMLKRHGITKPTWYTSRWSKRFVKWLREVAADLDRTVGAVLELLIDRHELYKQEQNNLDKAIKQLSQTDRYKAPSRKLCSITGVGILSAMTFLTEMGDLNRFRNRREVGAYLGLCPASYESGETNNRKGRITRQGPSRLRKMLCQSAWVSIIHCKKAAADYHRIKQKQSKRTKKALVAMMRKLGIKMWHVAQNCGVSVELAGRGGPHDVMPSGNAQPKGLVSFVR

SEQ ID NO: 269148 - protein, 452 aa, unidentified
MVRRTIGIDLAIRGDHVARVFDDGQPAGRPLRFRLTSASLTGFVARVTGDLAEGATITAVMEPTGMSWFPVAHWLRRAGIAVIRVKGQRVKALRRYLSEHTKTDAVDAYVLGAMPGFGSVALDPVYVPSAEQHALQRLTKQRHRLDSLVCSGKRRLIDLTRWACPALEAVLPDLRTTLSLALLERYLDPHEVLRVRRATLVRFVGENASGNHPHSGPFVETLVDGLRAAARETITLHGTAVDFALLQAEVGFEVAQLRLLETQIKQLDRRIEALYGALHPSDALRSIPGIGDRLAPLVLGVLHDRARFGNERHIRGFCGLFPTTSASGGAERPRQRITQAGNDRMKRALFLAADTARHIDPDLAAVYWRLMVGRGHHHKQALCAVATRLVNRISMVLRTGRAYELRDREGGPITGGAGPGNRERTLLHPRRDPADAPSQSRADRRLKPLGYR

SEQ ID NO: 269149 - protein, 402 aa, unidentified
MNAVGIDVSKGKSMVAIMRPFGEIVSAPFEIKHTASDINSLVELINSVEGESRIVMEHTGRYYEVLAHQLSEANLFVSAINPKLIKDFDNDSLRKVKSDKADAVKIARYALDKWQNLKQYNVMDELRNQLKTMNRQFGFYMKHKTAMKNNLIGILDQTYPGVNTYFDSPARSDGSQKWVDFASTYWHVDCVRKMSLNAFIDHYQNWCKRKKYNFSQSKAEEIYGKAKELVPVLPKDAITKLIIKQAVDQLNSASTTVESLRTLMNETASKLPEYPVVMAMKGVGTSLGPQLIAEIGDVSRFTHKSAITAFAGVDPGVNESGSYEQKSVPTSKRGSSDLRKTLFQVMDVLIKTHPQDDPVYQFLDKKRAQGKPYYVYMTAGANKFLRIYYGRVKEYLSSLPES

SEQ ID NO: 269150 - protein, 342 aa, unidentified
MVPAPGSTSIAKNVFQVHGIDAKEKVVVRKQLRRSQVIAFFAALPPCLVGMEACATAHYWARELRKLGHEVRLMPAKDVKAYLKRNKNDAADAEAICEAVRRPTMRFVQIKSAEQQGQLMQHRTRDVLIRQRTQIINALRAHLAELGIVAAQGDAGVSELRAIVADDRDERLPIDARASVIVLAAQLEALQTLIGSIEKRIKMQHRSNEASQRVETIPGIGVLGATAIVATVADPMIFRSGRDFAAWIGLVPRQDSTGGKQKLGPISKQGDRYLRRILVVGAIAVLRRARENPGKYPWLTQLLARRPFKVVAVALANKMARTAWALMAHGGTYRAPELAEAA

SEQ ID NO: 269151 - protein, 376 aa, unidentified
MREKLRFLGLDVHAETIAVAVAEPDGEVRSLGTIANREDSIRKLIKKLGPAEQLRVCYEAGPTGFVLYWQLAELGVDCAVVAPSLVPKKPGDRVKTDRRDALKLARSHRSGDLTAVWVPDEACEALRDLVRQREAAKQDQLRARHRLTKFLLRTGRRPPLGLKAWTERYWRWLEQIHYTPLAQEVTLRDCMNEVEHMSARVKRLEEAILEVVKLAPQPMQEVIRGLQALRGVAHISAVTIAAELGNISSRFESARKLMGYCGVFPSEDSSGKRIRKGGITKAGNAHLRRIVVESAWCYRHWPRVGARLRKRQQGIPAEITEIAWKAQNRLHKRYMKLSMAGKDQRKVMTAIGRELLGFIWAIAVKAEQAFQQPMAA

SEQ ID NO: 269152 - protein, 344 aa, unidentified
MKITTIGIDLAKNVFQAHGVNEHGKTEKKKQLKRGQVAEFFANLPPCLIGMEACGSAHYWARKLEGFGHTVKLIAPQFVKPYVKTNKNDAADAEAICEAVARPNMRFVPIKNVEQQAVLSLHRVRQGFVKARTAQANQIRGLLGEFGIIIPQGITNIAKRVPELIEDASNDLPGSFRLLVQRLMDHLNELDKQVDELEAQIKAWHRESAASCKLEKIPGIGPITASALVASIGNAKNFDDGRQLAAWLGLVPKQHSTGGKSKLLGISKRGDSYLRTLLIHGARSVILSASKKVDKSRWLRKLMERRNPNVAAVALANKNARIVWALLANEREFRSDYTPALAVA

SEQ ID NO: 269153 - protein, 420 aa, unidentified
MLTAQWFVGIDWATDAHDVCIVARDGRVCEQFTVKHTPEALQAFMENLWRRADGDPTRLAIGIEVPRGALVDLSVERGFPVYAINPKQVDRFRDRFTVAGAKDDARDARVIGDGLRTDPHAFRRVRLDQPVVIQLREASRIDDTLRDEFMRLTNQLRDLVYRSRPALLALCPAADEAWFWAVLTTAPTPAAQQRLSVRRLDRLLRTHRIRRVSATEVHQILQGPVVFTAPGVVEAVAAHVAVVLPRLELVARQRREITRQLDRLLDALAAEPSEGNQREHSDVAIVRSMPGIGTRVAARLLAEASQPLVDRAYHVLRTWMGVAPVTKRSGRRRAPLVQMRYACNQRLRDAAYHWARTGVQQDPRSRAYYAALRARGHGHARALRSVADRALRLLMMLLTRGQLFDPTHGLDEPGPVGAGA

SEQ ID NO: 269154 - protein, 338 aa, unidentified
MPHVTSIGLDVHARSVAAAAFNPFTGEVVRRSFGTDASEIAEWALGFEDPRACYESGPTGFHMARELRALGLDCAVAAVSKMQRPAADARRKNDRRDAEFIARMLATHNIVEVPLPDMAVEAARDLDRALDDATRELRRSRQRLNMFLIRLGHVWDERNADGARKKAWTRAHWRWVSEIRLEGPQRDALEYYVTAARCAESDRRQLERRVVALAGTDRWRATVEALSCIKGVDTLTAFRLAAEAGSFSRFRSAPAFASWCGLTPSEHSSGESERRGGITKAGNALARTALIESAWHYSTCSPRPKAPAPGTDVPPAIRSRADDCTARLHRRREVDWLH

SEQ ID NO: 269155 - protein, 342 aa, unidentified
MTLYIGVDIHARQQTLSYLDSSDGTTGQVVLDHEVDDVREFYAQFHGEVIVGIEACGYTNWFEELIEVLGHRLLVGDAAEIRRLARRRQKNDRRAAELLLDLLVQGEFPTLYRYPKASREVLRQLRYRHKLVKLRTIVANTLHALALNAGLSLRARLLTKSGRKQLSTLQLSASSQQQRDELLSLADELTQRINKVEQWLEAEAKADERVRRLQTHPGVGLLTSLCVVHTLGEVSRFSGTRKVAAYVGFDPMEDSSAERKAYGGISKAGSRLLRYLLIEAGRTAARADEHLKQFYRRLLPRRGKARAKVAVGRKLLIRCFLMWRAEIDYAEFLRRGSKQETE

SEQ ID NO: 269156 - protein, 328 aa, unidentified
MKTNFIGIDISKDSLDVAVCTDPTLDIDQVFKVKNSIQGINSMISKCKKAHQSLWFCLEHTGNYGLLLMCQLQAKGLVYSVVPALEIKQSQGMIRGKTDAVDAGRIAVYAATHAHKLVPFDLPGENLLKIKSLLTYRAQLVKIASQLQNSYKSHQITNKVVGVSSILEDIQKNLVQLKEKVKQLEKEIIELISADSKMKQNYVKACTVKGIGFVIAAYMLVYTNNFTAFDNPRKFNCYAGLAPFEYSSGTSVSRKTKTSRLRNKTMKKLLNNGANSASNFDHELRAYYKRKTKEGKPHQLIMNNIACKLVYRIFAVVNRDEPFVHLMN

SEQ ID NO: 269157 - protein, 351 aa, unidentified
MWIIGVDYHPSVQQIAFVKTDTGECGERRLNHSDGEAEKFYRELKAAGCSVRVGMEATGYARWFERLLAELGFELWIGDPAQIKAKRVRKQKTDRLDAELLLQLLLEDRFPRVWVPSPENRDLRQLLWHRHRLVQMRTRIVNPLQAVAMNEGVRRKKALWSKSGRAQLESLSLAPWATRRRHDLLELLDRLNPTIEELSATVEQEAKQRPEGLRLMTHPGVGPTTALAFVLIIDSAERFAGGKQIASYVGLIPCEDSSSDRRRLGHITKQGNTLLRFLLVEAAQAVVRRDPDWRRRYTHLAMRRDKRIAKVAMARKLAVRLYGMMRKEWNYEQSKKFGSYAGESDYGHGVQ

SEQ ID NO: 269158 - protein, 410 aa, unidentified
MGYETINRRAHVMTRKNTLKSLPTDTEFRVVGLDLAKSDVSVAAIPVDDNTPSLVDRMTYADLLDWAGKISPTLFAMEPCNGYSLLCLQLENLGHEIKVISGSTVSMWINTHLSGQKTDLNDAIALARLAVSDAELTPIRHKSITEIRIQTVQALRQQLMSQRSKSIVSFKALAQQWGIPCAAGHRNLKKLRESIEAKVDLITRPVANAMLFLLDAVKSLDRQIGQLNQTLQELVMSDERGRLLQSVLGVGTQISARVITVVGNIERFNSPRSLVAYVGVAPRNFITGHKNLTKKKHGNCPVLSHKGQGKISRRGDKLLRSLFIQGAACLYMQFCKDQLPECQLKRWILKQLASQKPYGKLIVSLAAKLIRIVWAVLTYGEKFNIQKAGMTRSMWSEMALETPLNKEVPA

SEQ ID NO: 269159 - protein, 425 aa, unidentified
MKSASNTPNDATATDIALPPEPPGGVTAGLDWARDDHAVSVVDDRGRELTRTTVDHTAAGLRELIAFLSRHGAGEVAIERPDGPVVDALLDAGLTVVVISPNQVKNLRGRYGSVGNKDDRFDAYVLADTLRTDRPRLRALVPDTDATIALRRACRARKDLVNHRVAVANQLRAHLRNVLPAAVGLFQHIDSLISLAFLTRFDTQDKIDWLSAKRLGDWLSKQGYSGKADPAVLHQRILAAPHGACGAHGTAQAHITASYVALLDTLAAQIKALSTQIEAQLYAHADAHIFTSLPRAGRVRAARLLAEIGDCRARFPNPESLTCLAGAAPSTRQSGKSRVVGFRWACDKQLRDAVTDFVADTRLVNPWAADLYDRARARGHDHPHAVRILARAWLHVIWHCWQDHLAYNPDKHRALQKTLTQKGAA

SEQ ID NO: 269160 - protein, 362 aa, unidentified
MTQVRSWAGLDVHAARVLVVTVDRESGEMCSRRLSGRTSEVVEFCVGLPGPTRVAYEAGPTGFTLARALADAGIECVIAAPGKIERPAQDRVKTDRRDAERLVRLLMVDGLYPVRVPSTEEEALRDLVRAREDVRGDLMRARHRMSKLLLRHDITFDGPGANWTARHREWLGRLELSDRAAQVTLLDYLGAIDALIVRRDTLETTIGELVPGSPWAQTVAGLRCMRGIDTLSAVGLCAEIGGWERFQRPGQLMSFLGVVPSENSSGEQRRQGAITKSGSRHARRLLVEAAWHYRRAPAKGLTLHRRQEGQPPHVIALSWKAQQRLHRTWRRLDSERGKRKTIVAVAVARELAGFCWAIANTD

SEQ ID NO: 269161 - protein, 385 aa, unidentified
MTATARSFDPTAFEDTLIVSFELGEGRWTLSFTSGFGEQVLRRSVRSRDRDAVVRVIEAMKECFGLSRGCRVVSCYEAGRDGFWLHRFLASQGVENLVVDSSSIEVSRRKRRAKTDRLDGESLLDLLLRHWAGSRKKVWSVVRVPTVEQEDRRHLHRELASAKKDRTRVTNRMKGLLANHGLTLDLKQGVPAQLSGLRQWDGSPLPAGLRSRLSREWERVQLYTNLVERLEAERRELLRQPGDPMIEKVLQLNHLKGIGVNSAWLYTMELFGWRELRNRREVGAIVGLTPTPNASGQQERERGMSKAGNRHVRAMAIEIAWGWLRFQPNSELSKWYQRRFGSGSKRVRKIGIVALARKLMIELWRFLETGALPAGAELKTDVRIR

SEQ ID NO: 269162 - protein, 407 aa, unidentified
MEVLIERACGLDVHKKTITACIVTPEGKEIKTFRTHTVFLIELIDWIKEHRCTHVAMESTGVFWKPIVNLLEAEDIEFLVVNAQHMKAVPGRKTDVKDADWICNLLRHGLLKASFIPGRTQRELRELVRYRRSLVQERSREHNRVQKVLEGANIKLASVVSDIMGLSSRDMLAAMIEGENDPEKLAGFARRSLKRKKEELELALQGNMSAHQRLMLKTMLTHIDFINEQILELDTEVAKRLDPFQEQLDRLDTIPGIARRTAEQILAEIGTDVGSRFPSAAHLCSWIGLVPGHNESAGKRKPSKSRKGNKYLRSALTEAANSIRGSDNYLGAQYRRIAARKGKHRAAIAVAHSMMTIAYYLLTRGEDYRDLGAHYFETRQQEMIVKQSVRRLENLGFTVTISNPTAS

SEQ ID NO: 269163 - protein, 281 aa, unidentified
MRFYTETHQHYCGIDLHARTMYVCILGREGQVLLHRNLPCDPERFLRTVAPYRQDLVVAVECIFTWYWLADLCAREGIAFVLGHALYMKAIHGAKAKNDKIDSKKTAALLRGGLLPQAYVYPPEMRATRDLLRRRLHFVRHRGQLLAHIQNTHHQYNLPTPGKRIAYRANREGIGEGFEDTSVTKSLEADVALIDHYDTVIRDLELTVLRCARGHGLDSFERLKTIPGIGKVLALTILYEIHDITRFSRVQEFASYSRLVKCQKGSAGKMLGTSGAKIGNG

SEQ ID NO: 269164 - protein, 342 aa, unidentified
MNIPVRIGMDTSKSVFQLHGVDENEVVVVRRQFRRAEMIRYFERLPPVLVAIESCGSSHHWGRLLQSFGHEVKLIPPQYVKAYVKRGKNDAADAEALCEAVTRPSMRFVPLKSKERQAACMLMTVRERLVSVKSQLSNAFRSYAAEFGIVGPAGRQNVAALIKRVLEDDSLPEMARDLFRLQADEYAAVQARLAKIEAKLMKWHREDDISRRIATIPGIGPIGSSMLSMKAPPPETFRSGRDFAAWLGLTPKDHSTGGRQRLGGITKAGDSVLRSTLIVGATALLRHVRKGRHKPTPWLASLLERKPPKLVAVALANKFARIAWRLMISGGVYNQPVAAMPT

SEQ ID NO: 269165 - protein, 355 aa, unidentified
MFQLKYATAIPAVTIGLDLGDKTSRVYEVNAAGERVREETIGTTPTALAKSFGKHAACRVVLEVGTHSPWVSRELAGLGHEVVVANPSAVYGKGRRRKRNDRLDAEYLARQGRADPRLLHPIQHRSAAAQEDLALVRARDQLVQTRTGLINHVRGAVKSFGARLTRCSADVFPRRVAREVPAALQPALAPLLEVITELTQRVASFDRQLAQAIRARHPVAERLQQPVGVGPLTALAFVLLIEDPRRFRQSRDVGAYFGLVPRLDESSQSTPQLRISKAGDALGRRLLVGAAQYILGPFGADCDLRRHGQGIAARGGKNAKKRAVVAIARKLAVLLHHLWVSETPYDPDYLLKRAA

SEQ ID NO: 269166 - protein, 343 aa, unidentified
MEQLTVIGIDLAKSVIQIHGSDSKGKCLIRKKLRRNQLLPFMAKLPHCLVGMEACGGSHYWAREIKQLGHDVKLIPPQFVKPYVKTNKTDVADAEAICEAVGRPTMRFVPIKGPEQQAVLLLHREREGLIKERTAVINRIRSSFSEFGVAIPAGPKRLRQWLSDSYGDVENDLPVTLNRLMFRMVDRLNYIESEICDLDKEINDQNKSDERCKRLIEIPGVGRLAASAIVASVGNAKEFRSGREFAAWLGLVPRQHSSGGKQNLQGISKRGDAYIRKMLIHGARAVIRHMNRNSAPVDWLEDLMKRRHHNVVIVALAKKLARTIWALLSKEQSYKRYEDTVVA

SEQ ID NO: 269167 - protein, 387 aa, unidentified
MPQLNDLSRSLVAFKQAATLIAVIEMSQSSWLVAGVVPGIERQPLKKLAADEEGLLRLLYRWRNEATQAGHAIKRIVIAYEAGRDGFWLARWLRAHRVEAYVIHPSSVPVSREHRRAKTDRLDTELLKRAFLGWLRGEPKHCSMAAIPAVEDEDARRPSRERASLVGECTRIVNRLKANLARLGIRGFKPALAHAAERLEALRTPEGTAVPPNTLAELRRDIGRMRFVKQQIKEIETARAERVERAPTEGHNAIVCLLDRVGGVGIETADMLVHEVFSRNLRDRRAVARYAGLTGAPDESGKKRRERGLAKSGNARVRRAMIQLAWGFLLHQKDSALAQWYRSRTADARGGTRKTMIVALARKLLIALWRLVTTGEAPAGLILRPAA

SEQ ID NO: 269168 - protein, 349 aa, unidentified
MKKIFIGIDFSKEKFDATVIKAEDLGEMQSIGHQEFINKATGYRKMLCWVCSLCGADTCEDWLFCGENTGGYSQMMSDYLYSKGYDLWIENALSIKRAFAMKRGKSDRSDSLMIAEYAMRYQDKARLYEPLSPALSQLREVFLYRHMLVRHKCSFEVRRIEKRFTQQKSSAKTMISQSSRHILTELKHEIQKCDQRIQELVRSDEELSRIFGIITSMPGVGTINAVCLMVFTNNFAKFDYNARKIACYYGVAPFARDSGTSVHSAPKVGYLANKMIKSLLSQAALAAVNFCPTMSMYYHRLLDKGKMPMVALNNVKNKMLTIITAMVKNECKYQPKYVSINAGSEMLNK

SEQ ID NO: 269169 - protein, 281 aa, unidentified
MAMVCGLDLHRRQITFDALEVGSGEEWRGRIWQPDRDRFRRWLREDMTRRGNGGPVALAVEGCTGWRYVVEEIEAAGFEPHLAEPADTQAARGRKHRAKTDRSDARLLRDLLAAGELPASWIPPEGVLEWRERVRLYVSLVNQRTVWCQRIHAELYQHGVAVPEGAIRTAQTRDMLADADLQLSPAGRQRITVGYRMIDATDAEAQPLRKELQRFGTRQPACRALANAQYGIGGLIAVAVWSELGDCRRFSRSEQAVRHTGLDVSVDASDRRRSLSILLCK

SEQ ID NO: 269170 - protein, 400 aa, unidentified
MLSIGIDVSKGKSTVCGMKPGGEIVYTPFEVQHTREGMSELVSLLRGSGEEVRVVLESTGSYHCPVVTALLENGIFVSVVNSLRMKRFCSQSIRRVKTDQIDAMQIALYGLAYWQELQPTRLPENTYRELQLLARQYYQMTSLLIKAKVDFNAICDQVLPGMQELMSDHAGRHKLSDFVLRYCHTTHILEMGETRFRKDYCKWAEKKGYRNCERMAALIFATAQNGIPVLPNAPSTQIVITEAIRVLHTVEASRDAILTQMQALAKTLPEYSLVREMPCIGDTLAPRLIAEIGDVRRFHSKRALIAYAGIDAPPYQSGKFCANNRHISKRGNRYLRKTGYEVMQSYVMHKPANDPIFTFIEKKRSEGKSGKLAMVAGLNKFLRVYYGKVTELYRSLPAIE

SEQ ID NO: 269171 - protein, 338 aa, unidentified
MKVYIGIDLHSSNSVVVVIDEKGQKLYEKRLKNDLTLIKAELKRFKKRCVGAVVESTFNWYWLVDGLMEEGYKTHLANPAAIDQYTGLKFSDDKSDARWLAEMLRLDILEEGYIYPKEDRPLRDLLRKRSQLKKHRTGQILSIQDMVARNSGIRISGNDVKKMKPKDLDRLLTDTLAVQAAQSNLRVYECVNKEMKALEKTILALAKDKIEFGNLLTVCGVGVILALTILLETGDINRFERPGNYASYCRCVNSKKLSNGKKKGVNNKRNGNKYLAWAFVEAANFAIRFNPKVNRYYQRKKAKTKGVVAIKAVAHKLARAVYHVLKDEVPFDVERAFA

SEQ ID NO: 269172 - protein, 464 aa, unidentified
MPRAPRQLSSRRRPGRLPKELRHVNLLAAGIDVGATSHFVAVPEGRDPEGRTVREFGAFTPDLYALAAWLATCGVTTVAMESTGVYWIPLFEVLSERGFDVKLVDPRQLKHVPGRKTDVLDCQWLQQLHTFGLLAAAFRPDDAICVLRGYLRQRAMLVSYAADHIQHMQKALEQMNVKLPEVVTDITGVTGMGIIRAIGKGERNPQVLAALRDARCKHDEATIARALTGTWRDEHLFALHQAVDLFDVYQGKIAECDASIETCLQGFEDKRDGDALPPAPRTSKRPRNTPAFDVRTQLHRLTGVDLTRLDGIDGHGALKIVAEIGLDMTRWPSEKHFASWLALSPGNKISGGKLLSSRTKASANRVAAALRMAASTLHHSRSALGAFFRRLKARLGAPKAITATARKLACLVYNMLKHGTAYVDQGQQYYEQRYQQRALSNLSRRAQELGYTLVKASAAGPLPA

SEQ ID NO: 269173 - protein, 355 aa, unidentified
MFYSGIDLHRDNSMITTINDSGTIINQQKLPNDQVSLLNYFLSMGNEHRAVVEATANWYWLSDLLNDHGIDLVLAHAKYLKAISYAKVKTDKVDSQTLANLLRIDMIPTAHQITPELRALRDLMRARLKLVHKNISCQNSIHRLMGKYNLNIPDDRKLHDLSTLDTLKDLPLPEEALLQLELLKEQMRLLHRQINDLEKSLHPKLIPNPDIQRLLWIPGIGKILAFTIYLEVDGIERFPGTPQFLSYSRLVPGADNSNRKAKHKSANKDGNRYLKMAFTEAAVRAIQYFKEVKAFYQSKERKKHKAIAKTLVAQELAKICYHVLEKKTDFNNTFKGKTLSRRKSMQWPRLASPDA

SEQ ID NO: 269174 - protein, 277 aa, unidentified
MLSSDVKYIGLDVHKEAVAVAVLNGAGKLVMESIVETKASTLLDFLQGLRGELHVTVEEGTWAAWLYDVLKPHVAELVVCNPRRNALLKEGSKSDKVDARKLAELLRSGMLRAVYHGEPGLGTLRELARSYLTISKDQRRVMSRLKALDRSWGIPCSGKQVYTPRHREQWLNKITQPGVRRRAELMYQQLDGLSVVRHTVRGELLAESRKHAAVKILRQIPLIGPLRATLLLALMQTPHRFRGKRQLWTYSGLAVETHDSAQHRYVDGQLQRSKKPQ

SEQ ID NO: 269175 - protein, 445 aa, unidentified
MICAAVERCAGIDVGKQTLSVCIMVGPLEGQPQVVKSQFLTLHADLIRLREWLKQERITHVVMESTGSYWKPVFNILEGTVQVYLANPQEVKNRRGHKTDDKDGWWLAHLLRHAMIHPSFIPPRPIRELRDLTRRRKRLLGTATSEKNRVQKILEDANVKLGSVLSDVFGVSGQLMLEKLLKGNASPQEIAALAKRKAKQKIPQIIASLEGHQMSKHHRRMIGYSLEHLRFLEEQLAELDRDIVAQIESAGLSQQWQDLCSIPGLQQTSAATVLAETGPNMDQFPSEKELSSWAGLCPGNNQSGGKKNKGGRTTGGNPWLRSALTECAWAAANTKDCFLKDKFWRITARHGGKKPPAIVAVAHMLLILVYQVLRNGKPYQESEAPVLTDHQKERLIRHHMRRLGKLGVGARSPPSSRRENSFRFAPQIKENVTIPHYFRKNPTSY

SEQ ID NO: 269176 - protein, 316 aa, unidentified
MSEPVYVGIDVAKASFEVAASGEAQTLSLGNDEAGHAELCQVLVPLAPRLILLEATGGHERLLALALAAAGLRVSVINPRQARDFARCMGKLAKTDRIDAQVLRGFAALLDAQGHEPRALLDEQQRELTALVTRRRQLVAMLVAERQRLALAHPKAKASILAIMDAIAAQLHDVDGQLREHVQAHHADLAKLLTSVKGVGPTTASTLLAQLPELGHLNRKQITSLVGLAPMNRDSGTLRGQRHIFGGRADVRRVLYVAALVGTRFNPVLKAFYAKLLAAGKPKKVALVACMHKLLIILNAIARTKSPWSHEIAGIA

SEQ ID NO: 269177 - protein, 328 aa, unidentified
MLTLGIDVSKLTLDCYLSEGIEKKARHSCQFQTSNSEAGFKELAEFLKTKKKGIEQMTIVLEPTSQYHKALLYWLYAHKARACLVNPADVRHFAKSLGKYSKSDGLDCFVLAQFAQTRELITWQPPARIIQNLDSLLHLRHQIVVQRAAAQVRLSELSSDALQTVKDCYSKTLEHFKAMEKEVNHEIQKLIDSDVSLKQKHKLLQTSPGIGPVVALLMLVIFETKQFTKSCQVPAFCGVTPKEFQSGTSVLGQSRMTKRGPAQVRAGLRMAATAIVCSKRRSTLKDFYESLLAKGKSKACALGAVMRKLTLVAYAIWRDGNAFNGFVS

SEQ ID NO: 269178 - protein, 329 aa, unidentified
MIIGIDVSKAKLDCLWIRDLSAMKVKSKVQPNTSRGHQALLDWAMKQTGEAVGDLHFVMEATGVYHEALAYALHDAGAQVSVVNPAQIHDYAKSLGAPSKNDKKDSVAIARYGMTQSPSLWEPEPAEIRQLKALIARHDAVKADVQREDNRLEKAVASGVSSEVHRSIETVRDQLEEERRRLESLIDDHIDKHPGLKNDRILLETIPGVGKVIARQMVAVLRSRRFEKASECAAFLGLIPVERQSGTTVYSPPRLSKRGDGRVRGKLYMAAVVATKYNADIREQYRRLLKRGKTKMSAIGAAMRKLVQICFGVLKHQVPYRPQLALYAG

SEQ ID NO: 269179 - protein, 492 aa, unidentified
MCETVLITHGESGRSGVGRTRNVVAPTSLAGQFEQPYGPRAAGPAGRPRGADFVHDPGVALHEDFRHPRESARACTHLAAKVSLSALGGGEGRGEGGSPPFRTSGATHLVSGIFGKVSGRAAVRSSRPSPDLSPFPPEAYPAGERGTDPVSSFNPNSCWGARAQTSKEGSGRMPQQGRIVGIDVSKLKAEACIRSLQQRRCEPSTPQGEAALIAWLRANAVTLAVMEASGGYERGWAEALRKAGIAVRVVDPKRVRYFAKSAGRLAKNDPIDAEMIAWFGETFTAEAEPAHDPERAALDQLVTARRRLIGLATQVAQLAEHRQPRVVAQAQQAIGKIVKIQLAKLEIAIDAKIAANAAFRARAAIIRSVPGLGPHFTAGAIAWLPELGRISSKAAAALVGVAPYDDDSGERQGERRINGGRREIRDLLYMATLAAASRHNPVVKAYYQRLRAKGKKAKVALVACMRKLIVILNTMLARGQNWNPPAAAGVLA

SEQ ID NO: 269180 - protein, 351 aa, unidentified
MKGNKKTNNNQIIRMYDYYIAMDWSLEGVSIAHMKSNSIEPKVRDKIQANIKVIKEYLKELKGTKILTIEETTGSQWLYVELKDSVEKLIICNPGRNRLLEEGPKTDKIDAKKLCRLLRAGMLKEVYHTDEEEKYKIRKMVSVYEDLVKAEVRIKNQISALYRAIGIKSKKERDQYNKGDETLNFILEHQTGTLEFLEEEKQKFEKKFRQITQKESVIKNIKNISGFGPILSVEAYGIVIDASRFNNKYKFWSYCGLVKNKRESGKTSYSKKNKLYNRKLKCIMKMATQAALSGKNDIREYYEYLLQNGYTQKDARNAVTRYLATSFYVVMKNGVKYEPYYWRKKLKNKAA

SEQ ID NO: 269181 - protein, 418 aa, unidentified
MNKHNNSGKKSEPTTKRAKPRDPMRRDTKEVLAELVGKLKEKLDPKKPAATSVGEKPKRGELRPNLDRLTVGVDLGDQWSNYCILDLEGETLAEGQLRTTREDIAEFFQALNAARVVFEVGTHSPWVQEVICGCGHEVLVANPRMMDGSKRRKRKNDRIDANKLARLGRVDPKSLHSIQHRSREVRQDLVVLRARDALVAARTELINATRGLVKSMGKRLPKSSSPSFAQKAEEAVPVEIREALLPLVRMAAALSDCIQGYDEKIEKLGREKYGHTALLRQVKGVGPITALAYVLTLENPDRFVKSRDVGPYLGLVPKQEDSGEIQPQLGISKTGDTMVRKLLVGSAHYILGPFGPDTDLRRYGLRLCELGGKNAKKRAAVAVARKLAVLLHCLWVSGEVYEPLRQGMSATIPPAVAA

SEQ ID NO: 269182 - protein, 409 aa, unidentified
MKLFVGIDVSSKDLVTSIISKEKHEVVFRGNFVNDLKDATELKKQTINTANSNQIDQVIIGMEATSIYSFHPAMFFQEDIDLKAFNTQSVVVDPKKTKRFHDVFAEDKNDQIDAYYIADYLRVGHYSIGIVRQENYIALQRLTRSRYEIVQSLVRAKQHFIENLYYKLNKLVISDELNTSIFGSTMMQLLTEDLTTDDLLNISINDLTDYLAEHGRGRFADPEALAKMIQKAVRSSYRLDKVVANSVDAVLSVYAEEIKAFQKMIKDLDKSIEKVVKVTDDEQILCSIPGIGPVYAAGILAKIGQIDRFDNEAKLAKYAGLSWREKQSGSYTSDNTPLKRTGNTYLRYYLVEAANLVRTHDPAFGEYYQRKYKEVKHTPSKRALVLTARKLIRVIYFLLKNHQIYQEKR

SEQ ID NO: 269183 - protein, 350 aa, unidentified
METAYDGRQVVGMDLHRRRSVLVRMTEDGRRLGTARITNSPAELRKAIAVAGTNPRVVLEATYGWYWAADVLAAAGAEVHLAHPLGVKAFTYRRVKNDEKDAADLADLLRMGRLPEAWIAPAEIRELRELTRYRLKLVQRRAGYKDQVHAVLAKLGIPVTCTDLFGVWGNTWLDGLALGQPYAGKVASLRTLIAGLGTEITVLDAVLADLLAGHDGYHALQALPGIGPVLAAIIVAEIGDIRRFPSPAKLCCWAGLTPRHRESDTKVTRGHITKQGSPALRWAVVEAIQRQPATSPIRDVKDRIIARRGKQANNIAKTAAARHLLTAVFYAMRDGQARSLATRTAARDAA

SEQ ID NO: 269184 - protein, 409 aa, unidentified
MSDLEPIVKRCAGLDIHKMIIVATVLVEQADGTFQKETREFGTFRKHRRQLCRWLINHEVELVIMESTGIFWKSVYDVLEKAGIKTYVVNARHVKNVPGRKTDVMDSEWLAVLGRAGLLKPSFIPPKDLRELRLIGRQRMKVKDMLAAEKNRLHKILDDAGIRLGGVVSDINGISAQEMIDGLIDGRPIKELVECARGRLKSKAHELMDSMDETLGESHRFLLQNIQSHIRYLEKEIQKMDDYLFAAMTPYAEQWGILQTLPGVDKFSAAMLIIEIGVDMDQFGSAGNLSSWAGMCPGNNESAGKKKSGRTRKGNGTVRRILCEVANAARKTNSQFKGKYKALVIRRGHKRTIVAVGHKILRVIFSMLKNKQPYRDPDIDYEAIVVERNAPRWLQALIKFGYLGEAVAN

SEQ ID NO: 269185 - protein, 357 aa, unidentified
MKNLKYSLGIDVSMKDFACCLSLINDQQEVKVKASHKFPNSLPGFKSLLEWVKRHRKEELPVIFVMEATGVYHEQLAWFLHGKGCTVSIMLPNKAKKYLQAGGAKSKNDQIDARGLAQIGAEKKLDIWTPPSENLFILRSYTRQHQNLNEFHTAISNQLHSIQHSQYQPKDIIKQLKSMLKMYEKQLKEMEQGMDKLIKSDPVLDHHRQNICSIKGVSTLSFAVIVAETNGFTLFDNAASLVSYAGYDVIENQSGKHTGRTKISKKGNSRIRRILHMPALCAVREDQPQFEQLFKRVYERTRIKMKGYVAVQKKLLVMMYYLWKRNEKYIPTYEKIIAPDKAEATHDELTKEILIKT

SEQ ID NO: 269186 - protein, 366 aa, unidentified
MKKYTICHSATAAPATAKSKVRRDGSLLKVGLDIHQEKFVAVVQYDHATPRPPQRFAPAEFVPWVEGRLREGFEVHVVYEACGFGYGLYRALLQAGAYCYVIAPQKLDEGNTRVKTDGRDGHALCLRLDRYLAGNKNSLAMIRVPSEEEERARHWGRQREQLVHHRQKLEAQGRSLLIGHGWPAPARWWRPQSWSRLGKLLPGWILSHLELYRPVLLALDRQIRILTVELEKAAPPTLPKGMGALSTVVISREICNWQRFNNRRQVSSYTGLCPGEYSSGTKRVGRSITRHGNSRLRAALVELAWRLVRYQPQYHAVQKRLSVLGKGAQATRAHRKKAIVAVARQLAVDLWRLHTGRCTPTILGFK

SEQ ID NO: 269187 - protein, 362 aa, unidentified
MKQNTTVKTTRKAQVWASVGIDLGDSTSRVCVLGADAKVLTEFELKTTRESIRARFQRKATLIAVEAGTHSHWVSHLLEELGHTVLVANPRQLHLISQSAKKSDRADALTLARLVKADAALLSPIQPRHPEQQQHLTLLRARAQLVEQRTALLNSARSLVKPHGVRLRARDAATPQAGLADELPAALGDIIRPMLEAVDVLSAHIKDYDLKLDQLAAGHYPVVQKFRQIHGVGRIVALTYALVIADPKRFRRSRQAGCYTGTTPRRDDSGQRSPQLGITKHGDAYLRAMLTQSAQFMLGPLGKDCDLRRWGLRLCERGGKNAKKRAVTAVARKLAVLLHKLWISEQPYDPFYNAKRQQAAAA

SEQ ID NO: 269188 - protein, 422 aa, unidentified
MSYCPVAGIDVSKRFSDMCILSPDNKIFAQEKIYHDETSINRANTLLQKAERLFFSKPVIVMESTSHYHLILFQFFSEHGYDVIVVNPLQSNSMKDFSIRKRKTDRVDAFKLAMMYRTKTLRPSQIPQTATRALRQLCRHRAELLNDVSSYKNRLTALLDQTFPGYDKVFSDVGGVTSCAVLVRFPTPTILLVEEESELVEVIAATSKSGYSFAKKKAGLLISAAQKAQTLGIHSCADETLIVCTIQMLRTLSESVLQIETAIDNLLAQIKEMRNNVSLLQSIPGVGSHSAALLLGEIGDISLFKKPKQLAAYWALDPTERQSGSFRGTKNKLSKRGFPYARAALHMGVVNSICKRGKDSAANPVLLSYYEKKCKNKPAKVAQAASMHKLVFIIFAVLRDQKPFELKTPEQHAVEQGFVKAA

SEQ ID NO: 269189 - protein, 310 aa, unidentified
MKQTIVYIGIDVAKAHLDVAWQKRLRRFDNDKAGRATLVKWIKQKQSDPVQVICEASGGYEQELLDALAEADLAFSLVQATRVRQYARAAGILAKTDKVDARVLARFGAAMRPEPTSPRSAAQKLLRELEAQRRHLSDLLVAEQNRLEQLNDEKLRRLTCALMGTLKKQIALIDSRIATLIMQDQELCQKAQKLTSVKGVGERTAALLLAQMPELGTLNRREAAALAGLAPFNRDSGTMRGKRLIFGGRRAVRHGLYMAALVASRRNPILSSFYRRLRIKDKPHKVALTAVMRKLLLALNQALTPNQSFT

SEQ ID NO: 269190 - protein, 393 aa, unidentified
MICVGIDVAKDKHDCFILNSEGEVLADVFTIPNNAEGFDRLLQTIRRCARPEDKMKVGLEATGHYSYNILGFLLNEGLPTYLINPLHTNLYRKSLSLRKTKTDRIDARTIAAMLMSDVDLKPYTDTAYHNEELKSLTRYRFDKVCERAKLKQSVSRLVTILFPELEKLVPTLHMASVYALLSEFPGAKQVAGAHLTHLKAVLYDASKGRYGRDMATTLRDAARCSVGSVMPAKSLELQHTIRLIRELDAEIEDIETAIQSMMDEIQSPITTIPGIGVRMGAMILAEIGDFSRFDSPDKILAYAGMSPSTYQSGQLSLSGTYSHMEKRGSRYLRYALYNATKYVCLWNPTFAAYLAKKRAEGKHYNVALSHAAKKLVRLIYAIEKSQKPYCSAA

SEQ ID NO: 269191 - protein, 402 aa, unidentified
MNAVGIDVSKGKSMVAILRPFGEMVSSPFEIKHTASDIHSLVELINSVEGESRIVMEHTGRYYEVLAHQLSKANLFVSAINPKLIKDFDNDSLRKVKSDKADAVKIARYALDKWQNLKQYNVMDELRNQLKTMNRQFGFYMKHKTAMKNNLIGILDQTYPGVNTYFDSPARSDGSQKWVDFASTYWHVDCVRKMSLNAFIDHYQNWCKRKKYNFSQSKAEEIYGKAKELVPVLPKDAITKLIIRQAVDQLNSVSTTVESLRTLMNETASKLPEYPVVMAMKGVGASLGPQLIAEIGDVSRFTHKGAITAFAGVDPGVNESGTYEQKSVPTSKRGSSDLRKTLFQVMDVLIKTHPQDDPVYQFLDKKRAQGKPYYVYMTAGANKFLRIYYGRVKEYLSSLPES

SEQ ID NO: 269192 - protein, 322 aa, unidentified
MKQKPFLGIDVSKAKAECGLLWADSKYRSKVVSNQAVGFAQLRQWLQKYDASQAHVCMEATGVYWEELALALSAHGMAVSVVNPAQIKAFGESRLVRTKTDKVDARLIAEFCRAMQPPLWQPPSPSEQALRALVGRLDALQRMHIQESNRLAVARDAVRSNIEAHLHWLDQQIKALTQQIDRHIDQDPGLRRKRDLLDTIPGVGSRTSALFLAFCSRTEAFANARQCAAFAGLNPQQHQSGSSVRHPARLSKIGHALLRKAMYMPALVTLYKTAWGKAFRSRLKAAGKPPKLIIGAMMRKLIHVAYGVIKSNKPFDPTLHAT

SEQ ID NO: 269193 - protein, 340 aa, unidentified
MKRLSSLTGLNLNSIEAIGLDVANEKIDICLFSSQQSLFYRIANNSQAISQFSTDLTKNGLLKTVPFVLESTWIYHLQCALQLTDDWWDVKEINPIITHQQIGYTIRWTKTDTTDSLLLAELWVTKWKKLHSFKRNRKIIELRKKISLLAWVEKTMQAIKAQYDSYIKSARILWINTNDVDFIRKSLDDLNKCKKELEKSIISESVDEGWTRRIEIIDSITWISPLIAKICYTTFASNDFESKKQMLAYVWLDPKLRQSWTKSWSYKMSKRWNAFTRKKLFQAAFCWIQHSKQYKYIYNREIEKWKHHFEAVLTVAKKMIYTIRSLIKKNEVFDPNYCAM

SEQ ID NO: 269194 - protein, 401 aa, unidentified
MMRIVVKRGAGLDIHKKTVVATRMRVGEDERLVWETKTFGTMTTELLGLYDWLQEWECSQVAMESTADYWKPVFNILEDAFEVLLVNAQHVKHVPGRKTDAKDSEWLAELLIHGLLKPSFIPPKPQRQLRDLTRYRATLVQERARIVNRVQKLLEGMNIKLSSVATDVLGVSGRAMLEALVGDRLSPAEMAQLARGRLRNKLPELEKALTGIVASHQRKLLALQLEHVDFLDEQVEELNADIRQHIEEMDHLPSSENQPPESGTTDETSTGAPLPPMSYGQALIVLDTAPGVNQNIAERILAELGADMRRFATPEQAAAWTGLAPGNNESGGKRYSGRIQKGNFALRTALVQAAWAAVRDKDTYLRALYNRVVVRRGKKRAIIAVAHSLLKTSISREIEAL

SEQ ID NO: 269195 - protein, 354 aa, unidentified
MKYFAGLDVSLEETAICVVDEVGRMIKEARATSEPDALHVTLASFNLSFERVGLEACSLTAWLHGELRSAGWPAICIESRHAKAAMGAMPNKTDRNDAHAIAQIMRTGWFKAVHVKTPICRSWRSLLVARRAVLNEMRTIENVVRAILRETGLKLGTPARKDFIVRARELIAGEQTLASMIEPLLEILGTMLREFARLTKQVLTIVRDEPICRRLMSAPGVGPLTALAFRATIDRPERFRKSRDVGAHLGLKPRRYQSGETDIQGHVSRCGDELVRTALYEAAHSLLIRSKKWSSLRAWGMKIAKHRGMARARVAVARKLATILHRMWIDNAEFRFGQEHNIAPTVKAIAGAAA

SEQ ID NO: 269196 - protein, 410 aa, unidentified
MDVFLERCAGLDVHQASVVCCVLIGAPGRKPQKLLRSFGTTTRDLETLRAWLAEHGVTHVGMESTGVYWKPVYAVLEGHVDLTVGNAHHIKNVPGRKTDVKDAEWIAQLVRHGLVAKSFVPPPAIRDLREMVRYRRTLIETRTAMRNRVLKLLEGANIKLSGVASDVFGVSGMAMLEALAAGTNNATEMAGLARGRMRRKHAALEAALDGRMREHQCFLLSMQLRSLEAIDRDLEALDARIEIQLEPYQAQHRLLMQIPGVDWVTAASIIAEVGTDMDVFASARRLAAWAGVAPGNYESAGKPKGDGTRRGNVFLKSALFAAASAAVRTKGSYYRDKYNRLRARRGPVRAIMAVAHKLLIAAFHMLSTGEAFRDLGEGYLDQVARKRSTTKLVQRLSNLGHDVMLVPKAA

SEQ ID NO: 269197 - protein, 410 aa, unidentified
MAYKVAGIDVHKKVLMVVVWDVSDPESEPQRRRFGTTTSELRQLSSWLREQGVQEAVMESTAQYWRPVWYELEPHMRLQLAQAFSNRAPRGRKHDFRDAERLIRRLVAGELTLSFVPEPEQRTWRTMTRMKVQLSEDKSRLHSQLECLLEEMRIKLSSVISDLLGVSGYRMLRALAGGETDPMKLAALGDDRLQCTEKQLIDALSGSPQPVHLQLLALYLDRHQMLVGQMAKLDGMIAQALKPHQEAVARLAVAPGFGADSAQQVIAEVGAEAGTFPSAAHLSAWVGTCPGRDESAEENHSSRSAKGNKYLRRVLNQAAHAAVKKKGSHFQAVFRRLLPRLGYKAAIWAVAHRLCRLVWKILHEGVTYVERGSEPDPKTKRRRAQKLVKTLRKLGYEVDLKPITPTFAVA

SEQ ID NO: 269198 - protein, 445 aa, unidentified
MLPIIYKRVAGLDVHKKTVVATRMRVTPEGRAEWETETFGTTTPDLLRLHDWLLAWSISQVAMESTGDFWKPVYNVLEDTFALLVVNAQHVHHVPGRKTDAKDSEWLAELMLHGLLRASFIPSRPQRALRETTRYRTTVIQERARLINRVQKLLEGANIKLSSVVTDIMGVSARAMLAEIVAGQTDGALMAELARGRMRSKIPALQKALTGFVQPHHRFLLAQQLAHIDFLDEQIEQLSAEIVRQMEEMSAPPADAGADAGTEASGFSAEGIEGEESLSWSEGVALLDTIPGVDKRAAEEILSEIGLDMGRFPTAKHLASWAGQAPGNNESGGKRFSGRRARGNRCLGRILTEVAHAAAHTKGTFLSARYHRLAARRGKKRAIGAISHSIIISIWHMLTYGQPYRELGGDYFDRRQKETKVGHLVRQLEQLTGGTVSIAIQPAGA

SEQ ID NO: 269199 - protein, 434 aa, unidentified
MKKRIYRAINVKEVDVEKIVLEMSGTRAVVGVDVAKEVMFAAISDKRRKVHCTVKWHHPGQTGLFIEKLEELRGYGAEVEVAMEPSGTYGDALRVGLWDACLPVWRVSPKRSHDAAEVHDGVPSLHDAKSSAIVAKLHLDEASEPWPIKSEEERTLVAALQALKVYQGQFQRNKNRIENLLARHWPGVTELLELDSATLLELLAAYGSPQAVVSNERQARKLMRRVGGRFLKGEKIEAVIDNAKHTIGMKLVEEERRLVMEIAREARRNQKESLKARRNVERLTEHHPSTEVMSEAIGKTTAAVMVAAVGDPLGYDNATAYLKATGLNLKEHSSGKNKKGGLHISKRGPGVARMFLYLAVLRLIRSNAVVRAWYAKKVARQGGKMKSKAVVAIMRKLVKALWYVARGSRFDATKLFDVRRLNLSEHVAVTVLGH

SEQ ID NO: 269200 - protein, 382 aa, unidentified
MTGTEPQAWGTGLMDDITFVGLDVHKATVCIAVAEGGRGGDVRQLGVFENRPEILSKVVSRLSKGGRRLSLCYEAGPCGYGLHRLLTGYGHECVVVAPSLIPMKAGDRVKTDRRDALMLAKLHRAGELTAIWIPDAAHEAMRDLVRARATAVRVLVKARQHLQGFLLRHDRIYRGARAWTLAYRRWLSTVRFEHPAQQIVLQDYIHAVQEAETRRDRLTQQIEELLPNWSMAPVVAALQSMRGVALIVAVTVVAEVGDFRRFANPRQLMAYLGLVPSEHSSGRSVRRGGITKAGNALARRVLIEGAWTYRMSARVSRKLHDRGEGLPAAVRDIAWKAQLRLCARYRRLAATGRPKVVVTTAIAREMVGFIWAIARLAQPALV

SEQ ID NO: 269201 - protein, 354 aa, unidentified
MPRKTTSLEAVATIGIDIGKNTFHLIGLDKVGAIVLRQKLSRSQVDTRLANMPPCLIGMEACVGAHHLSRQLKALGHDARLMPAQYVRPYSKGQKNDFRDAEAIAEAVLRPTMKFVSVKTVEQLDLQGLHRVRERLVCQRTSVINQIRAFLLERGIAVRQGLRALRTAMPNVLATTDKLSPRMIHMIEDLCTDWRYLDARIATVSNEIETLSEQDDGAKRLMTVPGIGPIISTATVAAIGSGDVFSKGRDFGAWLGLVPRQMSTGGRTVLGPISKRGNRYLRMLFVQAARSVLLRPQSWEKHGLKSWIEAAARRLNRFKLAIALANKIARTAWGVLHGGRNFEVRSMRTTPQAG

SEQ ID NO: 269202 - protein, 345 aa, unidentified
MAIVEVTCPVTGGVDTHLDTHVAAVLDGTGGVLGVESFPTTPAGFTELHDWMIRFGDIERVGVEGTGAYGAGLARFLRGCGLEVIEVDRPNRQARRQAGKSDPADAVEAARAVLSGRATGIAKTGDGAVEAMRALLIAKRSGREARISCLNQLRHLGFCGPDDLREAFRGVPRTALGARAAALRPRVGGDDVAHATKIAMRTLGRRVLALDADNDELDALLAGLVHTTAPDLLGVYGVGVDTAAILLVAAGDNADRIRSEAAWAHLCGVAPLPASSGKITRHRLNRGGNRQANHALWRIVFTRLRSEPRTRDYLERRLAEGLSKREIIRILKRYVAREVYRHLPR

SEQ ID NO: 269203 - protein, 392 aa, unidentified
MSQHCHFDASRSLTALEQDSTIIAVIEMSQTKWLVAALIPGVERQPLKKFDAHEETLLKLLHRWRREAGQAGRNIKRIVVAFEAGRDGFWLARWLRARDIEVYVIHPTSIAVSREHRRAKTDRLDTELLMRVFLGWLRGERRHCSMVAIPTIEEEDARRPNRERQTLVTEQTRIINQMKAIFARFGIRTLRPTMRKVAEKLEDLRTAEGTPLPQNTLAELRRHLARLRIVRDQIRAVEQERLRKLAVASAAEKKSPHAMVRLIARVLGVGVETADMLVNEIFSRHWRDRKAVARYAGLTGSPDESGSRRRERGLARAGNVRVRSGMIQLAWRFVRFQKNSALAQWFAARTADGRASTRKTMIVALARKLLIALWRLVTRGEVPQGVALRPAS

SEQ ID NO: 269204 - protein, 356 aa, unidentified
MQNDRQSSETVILGVDTHLDIHVGAVISQAGKLLGTHIIQTNQAGYLELLDWARSFGILEQAGIEGTGTYGAALTRYLIKNGIYVVEVNRPDRSKRRLEGKSDPLDAENAARTVLSGSSKAIPKIQSGACEALRIISVARRSAVKARTQAINQLRALLVSAPQDVRDKLWKSKPHECVTACINSEVSEHSPLRMALFSTLRSLAKRWMALTEELNELDESLDKLTRKYASNLRSQFGVGPQTAATLLAVAGDNPERLKNEAALASLCGVNPLPASSGKTVRHRLNRGGSREANNALWTIALVRMRSDPRTRIYVDRRTGEGLSTKEILRCLKRYIVRELYPLILSDLAYANRPLLT

SEQ ID NO: 269205 - protein, 345 aa, unidentified
MYRTKVGVDLAKEVIQVCIYSNKKVQSNIEMTPNEFLCWLVNAKPVTIIFEACGTSNYWKQKATNAGHDARLISAKLVSTVRQNQKTDKNDALAIVQAASLPDVTFIGGKTVEQQQLQLIKRMRELAVKHQGACQKQLVSLLLELNIRISNRKSGIICAIESVLEDAINDLSTECRAAIYTAKEHLKGLIAAVHSYDDCLEKSVVAHADCKKLLKLEGVGTMNAINLYLALGCAELGVFNKGKDASACIGLTPIQHSSGGLVKLGSIGKHCKNSMLRSQLVCGAMAAVHQVVIREAKTKKDVWIKGLVERRGKKCAAVALANKTVRTAYAMLTQGTEYKAELLAA

SEQ ID NO: 269206 - protein, 447 aa, unidentified
MPKTVRNAKPAPPAGTSAAPADASVRHVLEVVGGVDTHADTHTAVALDQIGGRLGTATFPTTATGYQRLLTWLRGFGPVGRVGVEGTGSYGAGLTRFLLDHDVVVLEVNRPNRQVRRVKGKSDPIDADNAARAVLAGVATALPKTHDGTVEAIRVLFNTRTSAVAARTAAINQLRSVLLTGPDPLRAQLNGLTATKLVRAAAALRPGPQLTEPVQATKTALRTLAQRILALDVEIKQVTALLDPMVADRAPQLVAEFGIGTLTAAQFLITAGDNPHRLHTADAFAALCGASPIPVSTGRTDRHRLNRGGDRQANRALYTIALSRMKHDEQTRTFIAARLTAGKTKKDAIRILKRYLARRVYQLLLQPPKPTSPPAATSTPAVTSPPPRRPGQASGLPTPPPARGHRGSGSRAVEDRRVAIAAATLDAENGPNTLNAAAPRRTHTPAA

SEQ ID NO: 269207 - protein, 342 aa, unidentified
MKLTTIGIDLAKNVFQVHGVDERGKAVLKKQLKRAQMLPFFANLTACRIGMEACGSAHYWARKLEGLGHTVQLIAPQYVKPFVKRNKNDAADAEAICEAMMRPNMPTVPIKTIEQQAILSVHRARQGFVKARTAQANQIRGLLAEYGIVIAKGIGHIAKRVPQILEDGENGLPGSFRLLIGRLADHLKELDRQVGELEVQIELWHKQSAASQKLAKIPGIGPMTASATVASVGDARNFKSGRQLAAWLGIVPRQHSTGGKSTLLGISKRGDSYLRTLLIHGARAVIRVAERKADADPWLRNLLTRRHKNVAAVALANKNVRTIWALLAHDRDYEAGYARTAA

SEQ ID NO: 269208 - protein, 353 aa, unidentified
MPSALPATPTPVVGIDPHKASWTAVAVDNRLQPLAAIRTGVGRDGYRRLRRFASRWPDAVWAIEGATGLGGSLTARLAADGVEVVDVPAKLARRVRLLSTGHGRKTDQADALSVGIAAHTATRLNTAVVDEATAALRALTEHRDDLVRTRTQTINRLHALLTQLIPAGLPRQLTAGTAAAALRSIRPRAVLARTLRQVAADLLSEVRRLDRRIAEATAALSTAVAASGTTLTGLHGIADVTAAKILARSGAVSRFRSEAAFASYCGVAPIEVSSGDVQRHRLSRAGDRQLNYALHVMVMAQIKRATPGRDYYQRKRAAGKTHKEAMRCLKRRLADVVYRTMIHDTEASLPPTP

SEQ ID NO: 269209 - protein, 411 aa, unidentified
MNPVVGLDVAKGESQIQGFLDKKKPYKTSFKVPHTLDGLEKLLHFLIEIENNTGVRPPVVLESTGHYQAPVVQYLDKKGYLTIIVNPLIPYKAKSSSLRKVKTDIIDARHLCELYYKEELEPQKKRGIQLLNLRNLTRQHDNITSLYVQTKLQFHSVLDQVFPEYRGVFGDLYSSVSLLTLLNYPTSKDVLETDKDILAERIHEFCPSRSLGWATSKADELIEAALRDPFQETLYQSHIISIEMYIKMLVEYQKHLSKLEKQIDALAKEIEECKIIQSIPGIGEKIAAMIISEIGEIDLFDNPKKLVAFAGLDPRVYESGRFKGTVNRITKRGSSRLRHALYMAVRSAIRDSRKQKTTDEVIPRNKKLRAFYDKKREEGKPYKVAIIACANKLLHWIYALLKSNTTFQDIA

SEQ ID NO: 269210 - protein, 318 aa, unidentified
MQIPGCFIGVDVGKFELQVAGHEGAIVSGSLANSRSSIVGWLKRLPAGSVIAMEATGGYQELLARLAHERGFAVYVLNPTHVHHYAISLGNRGKTDRLDAEVIAQYIAQRHATLHRYEPISPELQQVRALQALRSTVVRVGTSLRLSAQRHGCSSGHQKKALASLSAWAEQLERELIAQIKARSEWAKTYGLLTGICGIGPINGAALTTLFNRIHFASSDAAVAFCGLDPRPNESGRKVGRRRLSKQGDKAARTLLYNAASSAARTAHFKDYYAMLRARGLASTAALVVIARKLLRIAYGVWRTGQAFDPGRLNLKAA

SEQ ID NO: 269211 - protein, 355 aa, unidentified
MIVIGVDPHKQTHTAAVVDGRSGELVGERTVRARRRGHEQLLGWARALAVERLWALEDCRHVSLSLERFLLARGERVVRVPPRLMGASRKGVRTTGKSDRIDALAVARAGLREPGLPQAFLAGREREIKLLLDHHDDLVAERTRIQSRLRWHLHDLEPDLIVPTGALDRACWLERLERLLAGRAQTAQVRVAAELVARCRELTTRVRQLERELRPLVEREAAPLLALRGCGTLTAAKLVAEIAGVHRFKSDAQLAKHSGSAPLPASSGARQRHRLNRSGNRQLNCALHRIAVTQGRCHPPAQNYLARKQAEGKNRKEALRCLKRHLTRTVYRMLNSTEQENSASTRPTARTPALT

SEQ ID NO: 269212 - protein, 346 aa, unidentified
MEHHAGIDVSLELSSVCVVDGRGKIVREAKVASEPDALVSFFKGLGLPVKLIGLEAGPLSQWLHAGLMRAGFDAVLLETRHVKAALSAMTVKTDRKDARGLAQLIRMGWFRPVHAKSIGSQEIRALLVARKQRLGTLLDVEVSIRGILRSFAPKVGQGTRKTFEARIRELVTGHTMLERIAEAMLSARATLQAQYEKLHKAMLAFVREDAVCRRLMTVPGVGPVVAVTFKSGVDDPNRITKSKAVGALFGLTPKKYQSGEKDVTGGITRTGDEMVRTALYEAANVLLSRITRFSKLKRWGIDVAKRRGSKRAKVALARKIGIILHRMWIDGTTYRWAEAKPIAAQA

SEQ ID NO: 269213 - protein, 367 aa, unidentified
MTIYCGVDFHARQQLIKWCDTTDGEIHERQLRHTDLDQVRHFYQRFTGEVIIGLEASGYSTWFETMLHELGHQVWVGHALEIRRRARSRQKTDRRDAELLLDLLLKNEFPRIHRLTPESLEVLRQLRYRHRLVQLRTKAQNTLQALALGAGVSLKAKLRTRQGKERIKALALSPALKQQRQEWLDLIDELNTRIARVEKELAPLAAADERVRRVRTHPGIGLLTGLALVHTLCPVSRFANSRKVTAYVGLEPQEYTSSDKQRFGHITKAGSRLLRFLLVEAGNSAAASDEQLKKLYHRILHRRDRARAKVAVARHVLIHAYIMLRDEIDYAEFRRRGVSARSARSVHRPNLPDQLIERPATATVAQP

SEQ ID NO: 269214 - protein, 366 aa, unidentified
MKRIAYIGIDYHMETVSAAVIIENEKDFFDTIRMSNNDKIILKYLKKISKEFAIKACYEASCNGYDFQRKMEKWGFNCDIIAPSLIPKKPGDKRKNDFRDAQNLTKLYANGQLTIVHPPTEEQESIRNLIRCRLNLKENEKNVKLQINSFILSQGLRWPDSKWTVKHRAWLSGLKLQKSYSQQVLSEYLGHLEYLGARVNNLDATIKEISESEIYEPSVKKLKAFKGLDILGAMILIAEITDFRRFPNPGALMAFLGLIPSENSSGNKQKGGGITKTGNHRCRKQLIESVQHLMKKPIISYKMKKNLQEVDSGSANIAIKCMNRLHKRFWALMAKGKSRNKAKVAIAREFVGFIWAMMTQPESAPI

SEQ ID NO: 269215 - protein, 357 aa, unidentified
MKYIGCDFHPSFQQIAMLDLETGELVERRLLHASGEAQAFYEAVQGPMVVGLETSGNTHWFEALLTRLGHELWMGDATRIRREDLRKQKHDRRDARVILQLMVDKRFPKVWIPTVEERDLRQLLMHRHQLVRMRTRVKNQLQHIAMNQGVQRKYKLWTAAGMKVLRELELETWTRLRRDTLLEMLEELEQKIRPLEEAVEREAEARPAAQRLATHPGVGPVIALATVLTMGEVKRFANSRSWVSYLGLNPRERSSGEKRRMGGISKQGSPFLRFLLVQGAVSAARGDKDLARMYARLKAKKHHGAAKVAVARKLAVRLYWMARTQKPYPEVVRMQGSQSHLVAEVMAVRLNRPPASR

SEQ ID NO: 269216 - protein, 402 aa, unidentified
MFYAGIDISKSSARCVFLDNEGEKLKAFSVGTDKEGFDKLRIFINELKLNKENSLFGIEATGILWENLFSFLTKLGFKVILLNPYQTKRYREALRFKAKTDDIDAYVIAGLLRSKDFSSSFIPEDRIQALRDFTKLRYELVKDRTNYQRQALSLLTLVFPEYSNTALKHPFGIASLAVLKQFPTAKHLAATKVKQIEAIVRSIKGNNFSVDNIQQIIDTAKNSVFSGRASDARALNLKILLSQIESFDNSISSLDAQIEALLIDDQQNNTPGSNLLDIPGIGPKTVAAMLSAAGCDGKSFPAGSNFIGYIGFFPMISDSGETKFKRHIAKTGPKYLRWALYLAAVSCIKHNEQFKRIYQVKRSQGKSSKQALICVAVKLAHTMLSMLKSGKPYDPKRVFACS

SEQ ID NO: 269217 - protein, 387 aa, unidentified
MKKSNPRIVGLDVHPDSFAGAILAGRDPASAQVLSTSTRVELSDLEKWAGRHTRAEDVLVLEASGNAFAVAGRLRTLGRQVAILDSHQAGKIGKVYCANDRVDAIKIARIYLSGLSAVVWQPDEKTAERREVFSAYQGVVKENTRLQQQIKSMLNEHCVRLPKGFRLSHPSALTRLSKMKAWTPVQLMLLEQLHGGLVAARVRRQSLRRHMAGEILGEEKLLRLARLCGLSLVTIYGLEAAIGDIARFAQSKKLVAYLGLNPSVSQSGDYEGATALKRHGRGALRALLIQSAKKLLQVKNPLQKWGLAVAARRGRNKAAVAVARKLCVAIWHVLSGHAIGALEPLPRLRTKLGKLATELGVSPIKALGYKNKDAFIEQKLYLLKSYP

SEQ ID NO: 269218 - protein, 373 aa, unidentified
MSTTPVQFCPMLAIAVEMSGATWLVGSCAGTKLRRKAVSDEAPLVRMRSLLAEVETALKRFGAGEHTRVVVAYEAGQEGFWLVRELRARGIEAEVIDPVSLKVDRRGKRAKTDRLDVEALARALYAWMAGDTTALRMVRVPSKEDEDNREWQRERDRLTSERRSCLDRIAKKLRTHGIWRWDRVALTQGTLRCADGTPLGRMLQETLRMELDRVEKAEARLDVLNAQVGELTDAAHSRIERLALLRGIGEIGGRGLALKLYWRDFNNRRQVGACTGLVSLAYDSGTMRQDQGISKQGDPSLRALLVEVSWLWLKHQPTSAISAWFRRRTEGQGKRHKRSMIVAVARRLAIALWRYLKDGVVPEGATFKAGRPI

SEQ ID NO: 269219 - protein, 344 aa, unidentified
MTYYAGIDVSLRTVNICVVDDDGEQVAETKLSSDVQEIIAYFDELECSLDVVGLEAGTLAQYLTYGLQAAGFDVVCMEAQQVKAALSAMRNKTDKHDARGIAQLLRSGWYSQVHVKSMESHHIRMLLTSRRTVLDKCIDLENEIRGLFKIFGIKLPPKLGHGSFDKMVRAVIEADEKLSHALLPMLDARLVLYETFRVLDNRTRHLAWGDEICERLMTAPGVGYVTALTFKSGVDDPTRFKRSRTVAAHFGLTPRRSQSGEFDFDGHISKAGDADVRRTLYVAANSVLTRSSRWSSLKAWGMKLKKNRGHKKAVVAVARKLAVILHRLWIDETQFQWGMERVRS

SEQ ID NO: 269220 - protein, 339 aa, unidentified
MNATTFGLDLAKRVMQVHWVETGTGEICRRQLKRGQVLEFFARRAPAVIAMEACGSAHYWGRKLAALGHQVQLIAAQFVRPFVKTNKTDAADAQAIWEAAQRPAMRFVALKSEGQQAVLMLHRMREQLVKMRTMQVNQLRGLLYEFGAELPAGRSAGIERIPGELAKLEAVLPAMVIDTVREQLKRIEGLDQDIAEIERRLAAWKKDDAASRRLMAIPGVGLLTATAAVATIGDAKAFKSGREFAAFVGLVPRQSGTGGRVKLLGISKRGDVYLRTLLIHGARSVITHGKQREPWLEQLLARRPFNAAVVALANKMARTVWALLAHGRTYQKGYAAQAA

SEQ ID NO: 269221 - protein, 339 aa, unidentified
MNEDTVIGLDIAKQIFQVHAVDGRTGEIVRTRLRRNQVLEFFARQAPTRVALEACGSAHWWARQLSALGHRVTLLPPRAVRPFVLRNKTDAADAQAIWTAAQQPGLKAVAIKTPQQQSILALHRLRSQLLKMRIMQSNALRGLLYEFGVILPESYRALRQQLPARWADLERELPAFLLESLREHWTRVGELDTQIAALDRRLERICEHDPHCEALSAIPGVGVLTATASVAAMGDPRSFRSGREFAAWLGLVPRQTGTGGRIRQLGISKRGDAYLRTLLMHAARAVIVRKPHSPWLSALLKRRPFNVAVAALANKLARTIWAVLAHGRGYQPPTSAAVA

SEQ ID NO: 269222 - protein, 412 aa, unidentified
MQDILTCAMGLDVHRDIIVACLVKGAVDAEPEAETRTFSTLIPEMQKLRDWVIESECRNIAMESTGIYWQPIYEMLESCFDGEISILVVNARHMKNVPGRKTDMKDAQWIATLLRAGLLKGSFIPDKAFRELRHLTRYRKSIVHDITAQKNRIDKFLQSSGFRFTAFLSDTFGASGRNIIRHLIEHGSIDREALDKCLKTKTRNRIDEILVALNGSLSEHQRRFLNMVFRHLEDLEAHKHTVEDEITEEVLKHTDALNLLCSIPGIDVTAAAAIIAEIGTDMSSFPDSQHICSWAGLSPGNNESAGKRKSVHINKGNPYLKSMLCEVAWIMASHRKLYLSGWYWKVKQRKGAKRATIALARKILSIIYTMLKTGTPYNEECFEQRRLRCERKRANRLVNELQKLGYVVVAPD

SEQ ID NO: 269223 - protein, 460 aa, unidentified
MNQYFLGIDASKGYSDFVMLNAKKQPVIENFQLDDTFEGHARLYELLRSFNQDHPEATIYAAVESTGGYENNWFQSLLKFQGSLPIKTAHLNPLGVNYNHKADLKRNVTDKISAQNVAEYMIAHPEKVSYQHQDSLTSLRKQWGFITMLTKQSTQLLNQLESLVYNANPEILMYCKDGTPQWVLKLLTLYPTALRLSKAKVKSVARIPYVSKDRAQQLVATAKKSVASASDNVTQRLIVATVKQILHLNKTIKAQTKILTNECAVPEVELLKTFIGISDYSAIGLMLEIQSIQRFLLSKKLASFFGIHPAYKKSGDGTWKYRMSKKGRKEPRRILFMVAMSAIKSNPLIRSIYQQAVQRGMEKKAAVGLCMHKILRIIYGMLKHNKAFDPEIDRKNRQKKPLRQRRVRQDKNRRYQDFDSKAPISSRQKITRKERKQSQNVSNVECGISEASVPVTELAN

SEQ ID NO: 269224 - protein, 317 aa, unidentified
MTHTTTITAGIDTSKDKLDVAVQGTTRCFTVENQRTGWKQLATELAKHGVQRVGIEATGGYERGVTRHLQAAGFTMVVLQPLQAKAYARLHLRRAKNDRIDAALIAACTQAVNTPRIEPDARLDGLSDHLTFIEQIEEDMARCKTRLEHIADKRLRGIAAKDIARLERRRAGELQRIAKALRTHDDLAKRFDLVLSVPSIGERTAIALIVRMPELGRVSREEAAALAGLAPFDDDSGRHQGQRHIAGGRSRLRRSLYAAALPGAFRWNPALKALYARLIARGKPHKVALVACARKLLAFANAVVERGSPWLEKNAAS

SEQ ID NO: 269225 - protein, 407 aa, unidentified
MSKTCGIDWSERHHDVAIVDHQARVVGRGRVSDDAAGFTRLLELLAEHRDGEDGPVEIAIESDKGLFVAGLVAAGFTVFAINPRAVARYRERYGQAGGKSDPGDAGVLANILRTDRHVHRPLPADSDLVRAVKACARQHQEAVWARQQAMSRLRSLLRDYYPQALQAFPNLAHRAAANVLRAVPTPQAAQRLTPDRVVALLKKAGRRNDPGLAEAISTTLRAPALRQPAPVEHALGVAAVGLIEVITAMSDAIAALEAELATVFDEHQQAAVITSQPGLGPVLGARVLGELGDDPRRFADTAGLRSFAGTAPITRASGRSLIVTSRRICNRRLGDACHWWAFAAITKSPGARAHYDRRRAAGDTHNAALRNLANKLLAKLWHCLQTGTLYNEATAWPASPTPKQAAA

SEQ ID NO: 269226 - protein, 320 aa, unidentified
MKWLGVDIAKRKFDLAVLDNGKIRRKVFDNTPAGYDALLAWLAARGYAHEELHVCMEATSSYYEKLATFLHDAGIRVSVVNPLQIKAFGESLLSRQKTDRADAALIARFAEQHSPMLWRPAPREIRELQRLLARLEAVQQMSVQEQNRQHEAEGESLASVQRMLTQLKAEEEKLRRMIRDHIDQNPNLREQHALLTSIPGVGDQVSSHFIAWLRPERFDDARQAVAFVGLSPRHRESGDSVRGKSRLCKVGHARLRKILYFPAMSAIRYNTAAKALAERLKASHKNGKVVVGAVMRKMIHWMFGVLKSGQAFDPALALAK

SEQ ID NO: 269227 - protein, 398 aa, unidentified
MLSIGIDVSKGKSTVCGMKPGGEIVYTPFEVQHTREGMSELVSLLRGSGEEVRVVLESTGSYHCPVVAALLENGIFVSVVNSLRMKRFCSQSIRRVKTDQIDAMQIALYGLAYWQELQPTRLPENTYRELQLLARQYYQMTSLLIKAKVDFNALCDQVLPGMQELMSDHAGRHKLSDFVLRYHHTAHILKMGETRFRKDYCKWAEKKGYRNHERMAALIFATAQNGIPVLPNAPSTQIVITEAIRVLHTVEASRDAILTQMQALAKTLPEYSLVREMPCIGDTLAPRLIAEIGDVRRFHSKRALIAYAGIDAPPYQSGKFSANNRHISKRGNRYLRKTGYEVMQSYVMHKPANDPIFTFIEKKRSEGKSGKLAMVAGLNKFLRVYYGKVTELYRSLPQ

SEQ ID NO: 269228 - protein, 450 aa, unidentified
MGSNYAGVDWASEKHDVLVADETGEELLSATFAHDEKGLRSLCRALVRLDVGLVAIERPDGVLVERLLDAGLRVLALHPNQVAAARPRFRVSGGKSDRFDSFVLCELARTDSHRFRVLEPDSDLTKALRALTRGREDLVQTRVALTNQLRAELERCWPGAIRIFDKLDSPIALAFLLKYPSPIDARALGEKRLAAFLAKHGYSGGKTAAQLLGKLRSAPEGRAGEPELIARRQLVSALVAALGPLVRQIKVLDRQIATAVREHPDGEIFLSLFKDPRSVITAATLLAEIGDCRARYPTREALAGDAGQGAIAVESGKRKVACFRWACNKRLRGAFGTLADSTRHWHPWAADHYASAIARGHDHPRAIRTLGRAWCRVVWRCWHDGTPYDPARHRALQQHVSVTIPGASGPRPDTAATQRMLGTAVTSTAARRAEREALDGKPTTANTPGG

SEQ ID NO: 269229 - protein, 355 aa, unidentified
MMIIGCDFHPRFQQIAFVDQETGEFGERRLSHPEEAEGFYRSLAGKQVRLGTEATGNFRWFRRLMQELGHEFLLGDATAIRAACPRKQKTDKRDARHILTLLVEDRFPAVWQPPVENDELRQLLMHRCRLVRMHTRLKNQLDSMAKNEGILSSRVWSPKRRQQIEALPLPGWYARRRADLLGLLDELDKQIRPLDKAVCEAAEGNREACLLMTHPGVGPIVSLAYVLTVGDWRRFPRGKQVGSYLGLIPVEESSGDKRRLGHISKQGSTLLRWLLVEAATTAQRYDPSWHRQYLRLSISKHHGVAKVAIAHKLAVRLYWMLRSGEDYSKVMERGSSPQRQKFVAGDPGSHVGQSV

SEQ ID NO: 269230 - protein, 413 aa, unidentified
MEVKEKVKRYYLGVDWADEVHQVWVSDPQGNKVADMKVTQSPEGMSEWGRWLHERRAEGIELWAAIEKPEGRIVDFLLDDGVVVYPINPKAVDRARDRFRMSGSKSDLFDAYVLSEFLRTDHGHLRALRPNSEQAQELKMLTRDYQRLVTQRTRLLNQMVATLKEYYPRPLDLFTDISTEKALDFIKQYPTPEAVNELSRKQWNRFARAHRFSQDETEQLWKTVKAPQLSIPQHVVRAKAKLIAVLVEQLEVLVKATMRYAGEVQRFFASMPAAKLVSGLPGAKSGTTLASVWAEIGDAPGRWQSFRHLQAQAGSVPLTKESGKVRVVHFRFSCNKRLRHAVYWLAFTSLNQSEWAKVYYREQRSKGHNHHQAIRALGAKWLKIIFVLWKDHKPYDENYHLANITRQRMRQAA

SEQ ID NO: 269231 - protein, 386 aa, unidentified
MQTVADRPEPPCAIRNDLGAIFVSLELSRSTWLITSLSPSGGGKMSKHSVRGSDIAGLLERFAELQKKAQARTGRNFPIIVIQEAGLDGFWIDRVLQNEGIESHVVDPASVATSRRRRRAKTDSIDGEALIRTLLAYKRGEPRVCSMVKAPTPEEEDRRRLCRERKVLTAERVRHVNRIKGLLFCQGINRYEPLGRNRRERLEQVRTGDGRLLPDHLKAQVRRELDRLELLLKQIKAVEAERDALLAEQQVAAPASMLLDIKGIGPEFAAILWSEGLCRHFDNRRQVASYAGLAPTPWQSGSVDHEQGVSKAGNPRLRTTLIQLAWLWLRHQPQSALALWFEERVKRNSGRLKKTTIVALARKLLVALWKYVTAGVVIEGVVMKRT

SEQ ID NO: 269232 - protein, 315 aa, unidentified
MKETPTYAGIDVAKDRLDVVLRPSGQYVEATNDERGIRSVVRRLRKENVALAVLEATGGLEQSAAAALALAGVPVAIVNPRQVRDFAKATGKLAKTDRIDAAVLAHFAEAVSPEPRPLADEHARELSAVVLRRRQILAMTTAEANRARTAPKAVRKRIEAHLRWLRKELARIDGELERVVNESLVWKERVSLLMSVPGVGPTLSATLLAELPELEYLDRRRLAALVGVAPLNRDSGTLRGIRTVWGGRSGVRTTLYMATLCATRHNPTIREFYGRLVASGKPKKVALTACMRKLLSILGAILRNRTPWQPQLVAA

SEQ ID NO: 269233 - protein, 312 aa, unidentified
MPASRPEIGIDAAKDNLVIHHQGLNQTLTIDNTPQAIRQWLATLPEGCDIAIEATSTYHMDLTERAHAKGHRVYVVDGYRLSHYRKGVGGRAKTDLADAQLLARHLHKEKDELRPWSPPPKAYRMLQSLLRRRAALVKARTALRQSLSGEPELKAPLRALIAKMDRIDSLIQKRLKSAVSAAGLQTQVQRCDAIDGVGEITATALVMAFLRGDFKNSDAFVAFLGLDVRVRDSGKLTGKRKLTKQGDTEVRRLLHCAAMSASRHPVWRAFYQHYRDRGLHTTQALVILARKIARTAFALMKQQQEYCPAKLF

SEQ ID NO: 269234 - protein, 419 aa, unidentified
MDVVVERCAAIDVAKKELAVTVRVPAPGSGRVKRIRKMFGTTTRQLLALLDFLGEHEVSLVGMESTGDYWKPVYYVLEGGFDHDQIWLLNPRHLKAVPGRKTDLSDADWICDLLAYGLVRPSFVPPAPIRRLRDLTRRRTLLIRDATREKQRLEKILEDAGIKLGTVASDILGVSGRAMIEALIAGERDPHILADLALVKMRRKISALAEALVGHFDRHHARLCQQILTHLDLINEQVAELDLHILAELQPYADQITLLDTIPGVDVRTAQIILAEIGPDMRQFPTAGHLASWAGLCPGNNRSGGRTKSGKTRHGDRWLRGVLGTAARSLSRTHNTYLAAQFKRIAAKRGGKRAVVAVSHSILVSAWHMLDKNLAYHDLGPDYFLNRQDPDKRRKRLVGNLEAMGFQVTLTPIDQAGAA

SEQ ID NO: 269235 - protein, 282 aa, unidentified
MGMRMRISVLGVDLGKNVCSLVGFDASGAVVLRRRAKRETLIALAAKLPPCVVAMEACCGAHHLGRVFAAHGHDVRLMSPEYVRPYVKAQKNDDRDAEGVAEAATRPTMRFVELKSQEQLDMQTLHRSRDRLVGERTALINQLRAILLERGIVAPQGKRKLEQFLVGLMDEQGGAGLSPRMIMLVTDARIQWSELDRRITAFDAEFVRWTKENEDARRLATIPGVGATIASALIAAVGKAETFERGRDLAAWLGLVPRQFTTGGKTKLLGISKRATSIYVSS

SEQ ID NO: 269236 - protein, 320 aa, unidentified
MSGYIGIDVAKSELVVAISGIDGVRSFPNSEHGHAEVTKWLKKLDAPPVLIVLEATGGYERGITAALGNAKLPVVVVNPRQVRDFARGMGKLAKTDKLDAAVLAEFAARVRPEVRELPTEEQEDLRELLIRRDQLKQMLLAENTRLLHAAGKRYHRRRKEIKSHVSDLEKRMRMLESDLDDTLRRSSLWREHDDLLQSAPGIGKQTARSMIGFLPELGTVNAAQIASLVGLAPRNRDSGMMRGQRHIGGGRSRLRATLYMATLAAIRTDPVVKGWYEHLLAAGKPKKVAIIACMRKLLVILNAMTKTNTRWQPQTQPLPA

SEQ ID NO: 269237 - protein, 349 aa, unidentified
MNATTVAIDLAKDVFELAFADDAGHIVERKRLSRRAFAKALHNRPPLAVVMEACGSAHYWARRFQAQGHGVRLLPARDVRPYVRRNKTDRADAAGLLEAARCGQIDAVPVKTPRQQGWQALHRVREQLKGQRTATINLVRGVLREYGVALPAGASRLAPGVMAALEDGDNELPMALRATLADLLARIASLQQGMAAIESQLISEAEHDVAVQRYQGVPGVGPLTATALRAGAGELARFRSGRHLAAWLGLVPREHSSGHQRRLGAITKRGDAYLRTLLIHGGRAVLRSALMRRRAGRELEPLQAWALQVQQRQGHNKAAVALANKIARRLWAIDRHGMDFDPRYVSRKP

SEQ ID NO: 269238 - protein, 326 aa, unidentified
MSPTHVAFNHIVAFEVAKETLVIHVLPGDGQHTIANKPKAIRKLLMRELRRNALADLGSLLVVCEATGGYESHVLEICVELGLAAHKAHGARVRHFAKYLGLLAKTDPIDARVLALYGLKTQGLRLYVPLTPVVMALKDLKTRRDQVQQMLIAETNRLEHAHHASVTRSLKVHIASLRKALATLEADIAAHLKANDELARKARLMRSLKGVGPMTATTLLAYMPELGTFRKGEVTCLAGLAPIANDSGKSHAPRHIAAGRSNIRTALYMAALVALRHNAVMRRFAASLRQNGKPFKVVITAVMRKLIVTLNAILRSGEPWSHAKQA

SEQ ID NO: 269239 - protein, 405 aa, unidentified
MEIIVEKGCGLDVHKETVVGCIMGTGIKKEIKTYTTMTNDLLKLKGWLQESGITHVAMESTGVYWKPVFNILEDHFEVILVNARHVKNVPGRKTDVQDSEWLCKLLRSGLVSGSFIPPRDIRELRDLTRHKRKLIQAIVSEKQRVEKVLEDANIKLSSIASDTFGASGKKIIEELIRGELQAEAMAELSKGRLRQKRGDLKEALVGQVREHHKFMIKVSLKHIRAIEKILSDIERKIQEKINRHYKEEYELLQTIPGVKGEASTLIAEMGVDMGRFPSEGHLSSWAGMSPGNNESAGKKKPGSTTCGNKCLKTMLTEFGWVASKTKDTYLRSKYHSLVGRRGKKKALVALGHKILIMCYYILKDRVAYKELGVDYLDKRRKDKIARSCIKRLNHLGYEVTLKEAA

SEQ ID NO: 269240 - protein, 432 aa, unidentified
MEEVRDEPLYRDRVCGIDIGKASMAVTIRVPSEADPARRAAETREFGTIRREVLALADWLRAWQVPAVVMEATGDYWKPVFYRLEAEGFECVLADARQVKNLPGRPKRDKSDSRWLAACFERGAVTSCFVATPEFRVIRLHTRYRRDLIDERAREKQRAEKLLESAAIKLSSVVTDLHGVTGRDIMDHLIAGERDPKALAGLARGRARRKTGELRAALEGAEFFTPAHAALLKAMLDRIDRVSAEVSALTAVIEELLAPWEEQLAQAESMPGWGRRSAQDALAETGPDMTRFPTGAHLASWAGRAPLDNSSGKRAGHAKSKKGNRYLAGLLGETAAAAGKTQTREGARYRRITRRRGKARAIVALGNTQMKVYHALLSSPGTRYRDLGPDYYDRQADTRRQIAHHVGKLGALGFEVTLCRIPDPADASTEAA

SEQ ID NO: 269241 - protein, 437 aa, unidentified
MGNCAGVDWAGEKHDVRVCDEAGEELLAASFVHDEKGLRALCRTLLRLKVELVAIERPDGLLVERLLDAGLRVLPMHPKQVAASRARFRAAGGKSDRFDAFVICELARTDSHRFRVLEPDSDQTKALRALTRTREDLVHARVALSSQLRAELERFWPGPIGLFTKLDSPISLAFLERYPSPADARGLGAQRLAGFLTRQHYSGGQKPAELLAKLRRAPEGRVGDAEMIARRAIVLALVAAITPLVDQIKQLTEQIATALREHPDGEIFLSLFRDPRSVVTAAELLAEIGDCRARYPTRDALAADAGQAAVAVKSGKRKTANFRWGCNKRLRGAFCTLADSTRHWHPWAQDRYAAARARGHEHPRALRTVGRAWSRIVWRCWQDRTPYDPARHRALQQHIAGTIPTPSGPRPDLAATQRMAGEAVTETAGPQGRARSV

SEQ ID NO: 269242 - protein, 414 aa, unidentified
MCGELSAGFSEGQKRRASDGGDDGPSLGRRRRRQRVPLGSPALDASGTELLSRRVENDEADISRLIEEALSLAEEVVWAVDQPGGGAALLLALLWEGDQKVLYVPGISVDRARQTYRGESKTDARDARVIADQSRMRSDLGELAPGEQELSELRLLLGRRRDLITDRSRVIARLREMLLSLFPALERALDVNGKGPLILFTHYQTPAQLRRAGHKRVGAYLRNRSVKGSDKVARKALSAAGSQSVALPAQAVASRIVAQLAAEVLTLKERTESIDEEIGQRFFARPEARILNSLPGMGAILGAEFLVCVGDIRAFESADRLAAYAGLVPAARDSGKRVGNRRRMRGGNKALKRIFYQSAFASLRGCAESRAFYDRKRAEGKRHTQALVALARRRVNVVWAMLRDGTEFEERTAA

SEQ ID NO: 269243 - protein, 312 aa, unidentified
MTEHYYCGIDVAKDRLDVMVLPDRKSFSVDNNAAGYSELVKRLRGLAIAAIGIEPSGGYERAVIRALLAADLSVRRINPNKLRQFARARGVLAKNDRLDARLIAEYVAIMPTRVVQRDPATEQLAEVVTTRRQLCDEHVAVENQTAHLEDAILRRLNKRRLARLEADILLLDRRMAQIVASNANLTRRYELLTSMQGVGPTLAFTLIALLPELGQMSRKQIAALVGLAPYDFDSGRLKGHRCIYGGRLPVRNVLYMAALSACRYNPALKVFYRRLAATNKKPKVIIVAVMRKMITTLNAMLRDNVAWQPKSA

SEQ ID NO: 269244 - protein, 338 aa, unidentified
MTILTVGIDLAKNVFAVHGVDAAGTVLLRQPKVARAKLNALVAALPPCTIGIEACSGAHHWARQFQAHGHSVRLMAPKLVTPYRMSGKRGKNDAADAAAICEAVARPNMRFVPVKSQEQQSRLMVHRARQGYVAARTGCLNRIRGLLSEFGHVLPLKAEVVRAQAREHLEDLPGYANLVIGDLLSEVSHLDERIKQYDKHIHAMAKECTAAQQLMQLMGVGETTATAIVAMVGNGREFDSGRQFAAWIGLVPGQYSSGGKSRLGRITKAGDPYLRSLLVLGARAVLNAAQNKTDSLSRWAMALWQRRGYWKAVVAIAAKNARMAWAVLNKGETFKLPA

SEQ ID NO: 269245 - protein, 406 aa, unidentified
MEGPIITVDVSKGSCHYQPFIENGHPMRKPKQLSATIDGFQKLGQTIKDLEAKTEREDIPVIFEATGVYHRPLQKYLEDHKIRYYIISPLLSATYRKTDLHSNKTDALDCAHIAKAYYCEKELRQYQAQPQEYKRLYQLSRIYESELVHLRKRKVSLRSMLDIIYPRIDKTFKGNQNLYDPIPMEILKRYPHPSLLLSHREDTIVKTVGHRTGHLKGYTERIVHKIYEKAKECYSGCDIDDIEVVKLPSLIENVQEQKKKCDSLLKEMIEIARTCPYFASIVSIVGIGENLAARIIAELRDVNRFDNRAAIVAYAGLNPKIQQSGDIDGLHLKISKKGNKHLRCLLYLGAQCNYRLRKEDPLYEFTKKKRQQTQCPLSSKAAYTASAHKLLVIIYSLCKNGTLYHS

SEQ ID NO: 269246 - protein, 331 aa, unidentified
MSVNVGLDISAYSVDAVIRQGDKASQPKQYKQTVEGHAALISQLKKAKPALIVMEATGIYYFDLAVALADAGLPVAVINPKSFRHFAELKLQTSKSDGIDADLLAEYGQRMAPALWTPPDQQHQALRSLGRQINRLVGSRAQAKNRLHALKATRSTPALLIEDEQDGIATLESRIERLRQAALELMAEAPVLQRQYEHLLAAKGVGEATALSVLAELCVLPRDLKSSQVSRHAGLDVRQHQSGTSVNRPGRISKAGNVYLRSALYMPALSAVRYDPNAKAFYEALVARGKKKIQALVAVMRKYLTGLWACLKTDTPFDSSRLFQPQGLQNA

SEQ ID NO: 269247 - protein, 373 aa, unidentified
MNNNITYVAMDTHKKQHRVALVYPNDKQKVEFSVKNTPAEIRKMVRKIKRNAPGQVQFCYEAGVCGFTLQRRIVAEGCPCIVIAPSLTPKKPGERKKTDRRDAKKLLRLFMADMLTEVYPPDEKQESARELTRCREAAHENLKRIRHQLQKMLVRHGYVFIDGQHWTQKHYRWLEAIQFNEPLLQDVFECYFTEMRHCLQRVQTLDKELEKLAQSEDYREAVGILCCFYGIKTLTAISIIAEIFDFGRFASARDLMSYLGLTPSEYSSGEKENKGSITKTGNRRVRRLLTEVAWHHRHSYGISKVLRERREGQPQWAIDIADRAGLRLRRRYRRLVLKGKLPCKAVTAVARELAGFIWSALVEYETRKKRKAA

SEQ ID NO: 269248 - protein, 341 aa, unidentified
MDKELYFGVDVSKKTLDLAYYDGETIDWKNAHIKVSNDDAGFKKIGSWVAKVGKDFDTFLFCMEYTGLYNQNFRLWLESKEYIYGMVEPRKMHRFEPDLDDDQRSLDRIKTDELDAFRIAIYCEQNHKKILRNPSKLPSPVYFKLKRLLAERKQNTKQSVLYKQQLHDICAYDTDLSVERKKLLLKNMQENQKAIDKEIDSYMNEDTSIRKNYNLLTSIPGIGRIIALETIVLTENFTAISNPRKYACYIGIAPFKKESGTSVRKKTGVSKKGFSEAKADLSIAVLSAIKNNPSIRDYWIHKRKDKCGGIVLNAIKFKLVLRMFAVIKRGTPYVETDAYKN

SEQ ID NO: 269249 - protein, 485 aa, unidentified
MSYRNVGIDLSVTAKHEAQVRDEQGNKIVSNFSFYLSKDRLDALSQEALKGACQGTKLRFICEPTEMSWFPLAIYAKNNNHEIVRVKSHKTHDLRKYFTRHKKNDKLDANVLTVMPMIDSKAIEEIYLPDAQIFALEKRNRQKERISDQIAAIKNRLSSLYHWVMPGLLDCFKSHFDSRAREFYRHFSNPFTAKDAGVCGIRKVLQPAGRQKMKNDLPEKLYSVACSACELYTRALDHVDFTEIQDEVHIELQLLEAQEKALAHVKDRVKSLYEKVHPSKNIESLKGISKNLGPSLIGIIGDPNRFSSQSKLRCFSGMIPKQDDSGETNKKGLSMTQEGPSRLRRDLFLAGDVARRWDPQLAKIYYEEMVNKGHCHTQAVCAVGTHLLNRVLCVLKENRPYELRDPKGNPISPREAKQIIKQQFTVPEEIRQRTRSKRSRKNRKNKREERIRNLFKRQHNAPQNSYNIPPRDMLQNFEKFFKSTS

SEQ ID NO: 269250 - protein, 343 aa, unidentified
MGEVSTIGLDIAKSVFQIHGVDAGGAVVIRKRITRAKLLEFFASLPACLVGIEACPSAHYWSRRLQALGHTVRLLPPSYVKAYLKRSKNDANDAAAICEAVTRPSMRFVATKSAQQQSGLMLHRSRQLLVCQRTMLSNAIRGHMAELGIISAKGRNGTAKLLEMIADEQDDRIPAAARFSLAILPRQYAAIRAEIVAIEKRIHAWHRSSEESRRLEEIPGVGPIVATALVAEVGDWNTFSSGRSLAAWIGLVPRQHSTGGKERLGSISKQGNRHLRWLLVVGAMAVIRYARQHGTKRLWLARLMERRPIKVAAVALANKIARMAWAMMVRRERFKEPKLLPAA

SEQ ID NO: 269251 - protein, 328 aa, unidentified
MLYAAIDIHKQAFQAAVLDSDSGEVVEERFPADRDSLARWAEPWRGRVAAVAIEATTGWRWVWRELVANGFDVRLAEPVQTRALLGRRRSAKTDRLDARWLARLLAKEMLPQSWIPPAEIQELRDRTRLRKALAEDRRRWGQRLHAYLLHEGWPCSRSNLLRPPGLRWAAALQLPEHARLQVDSLLAVMAALQEQLDTVEGELRRFARNDQRCRALQSIYGVGPILACHLLAEIGEASRFQRAEQITRLAGLDPVVDESGETRRRGHLAKAGSPHLRWALVEAAVHAHRPTAPDLALYRATRERRDTTVARLTVARKIGKRELELTAA

SEQ ID NO: 269252 - protein, 397 aa, unidentified
MIAVGIDISKAKSTVAVIDSDGTVLASPFTMAHTQPEMEAFVTYLKGLGEPTTILMEYTGHYHYPVLKKLQDEGFPVCIVNPYQMKKYGDVEIHKAKTDKKDALRIAAYALEKSYKLVPYSSMEQKYEDLKFLSRQYSQRITYVAKLKVQLIALLDQTMPGITRILPLNSRNPEKCALLLFIERFKSFDEIQRIGKARFLASYDVLAKKASERSASSKGLSIYELAVDSITTRGEDPYIWLSQNQCVDLLSATQNAADEIISQMRNIAETIPEYKVLRAMHGVGDRLGPIILAEIGDVHRFHSGKALNSYAGNDAPPYQSGQFESRNRHISKRGSSTLRKACYEVMQALKLTKPQDDPVYLFMLKKEQEGKPFNVAKMAGVNKFLRIYYARAMELYK

SEQ ID NO: 269253 - protein, 366 aa, unidentified
MEEEYFVGIDLHRQYFTCYATNGKGDEILRERLPNCQEAVDYLVKHFPFPPKVVIEATRNWMWLVKALKEKGCQVSLAHPLKTKAIASARIKTDLLDAKTLSHLLRSNLVPSSYVASEEEQDNRELARGRIALVHYQTMIKNRIRAILGKENLSYSGSDLFGKGGRAWLKKQQLPETKRKMVKIYLERLDDLISAIRKVDELIQEKSSRLSEVKLLTSIPGVGTTTAFLLAAEIGDIKRFNTAKQFASYFGLVPRLHQSGNHQYYGRITKLGNPYVRWALVQTAHRLARMDRNYKWFVDRISYRGGKKKAIVALARKLATIIFCILKEKREYIIKDYQSNYQRVGRLKVCPAILPERTRKNLVALV

SEQ ID NO: 269254 - protein, 352 aa, unidentified
MQHFIGCDMHTRNQMVAWIEEGTGEIKKRRLEHENQQVKEFYAQFPRGTVVGIEATFPAHWFERLMGELGLELWVGDAARIRASEVRYQKNDYLDAELILDLLRTGRFPRIWVPSLAERDLRQLLVHRMKQVRARTQVKNQLHALAISQGVCRKGKLWSAKGRKELESLALLPWAGRRRKELLESLDRLDEQVRELDRAVEEAGREREEVALLRTHPGVGMVVGLAFVLTVGPVERFANSRKLVSYYGLNPRENSSGGRQRLGSISKQGNTMMRWLLVEAAQTAARLDPQLGRIYQRLKKKKTSGVAKVAVARRLAVRLFWMLRTRHNYAQLVHMSGSPSSAVVPPRGGPTV

SEQ ID NO: 269255 - protein, 317 aa, unidentified
MTYTNRFIGIDISKSSFDICVLPDTSLASFSNDASGIAQFLAFVSRLDNVARLVLEPTGGYERSVVDALLAAQLPVARINAKQIRQFARACGQLSKTDRIDAFVLADYARRMETKVLTQASAAQTTLVDLVSRYRQLSHMIVQEKNRRKKLRARNEDRAKAWIEETLDFLMRQRQSVVDAMEACLRSDKDLADKAQVLTSLKGIGLKTACFLIAWLPELGLLDKGQIAKLVGVAPVNRDSGLMRGKTMIAGGRKPVRDALYVAALPAIRFDPAMRAVFDRLKAKGKPGKVALVAVMRRMIIILNARMRDYRATVLDP

SEQ ID NO: 269256 - protein, 344 aa, unidentified
MKYMGIDYHKQYFVATTMDEKGRIISKEKVSTDRNSIKRYFKKAGSEGEMKAVMEACYGWEYFYDEVDELVDELIMAHPLKTRLIAEARIKTDSIDSETLAHLLRADLIPQAYAPSAETRDQKNLLRYRSSLTAMKVRIKNMVHSVLTRNHIEDKGFQELSDKFGKKGIAYMRAITLKGNDTAILHEYLDLLEETEKRINLAESRIRAVCRQDELCRLLDSIPGIGDILAVTIRYEIDDIERFISSGKLCSYAGLVPSTYSSGNRTYQGKITKQGNKWLRWAMIEAAQRAPLSDMWLSAFFNRVSTKKGRKIARVAVARKLLEIIYRIWTERRAYYKKPVTVAL

SEQ ID NO: 269257 - protein, 320 aa, unidentified
MSLNNRSIMIVKPSVVYAGLDVAKATLQLHLQSRLYDLANDPGGHAQLVKHLSAVPGVQLITEATGGYERQAVQALHAAALPVSVINPMQTRAFARATGQRAKNDPIDAASLTAYGTALRPGPTAAPTAVQTELAALVSWREQLKTTLTIAKNQAEHHEQKFVCVEHAKLVRHLESRLAAVAVELTALLARHPEPQKQVHRLAEISGVGLLTAVTVLAQMPELGTLNRGQAAALAGLAPWTRQSGPWEGQRHIGGGRAGVRRALYMSAVAAVRCNPPLKAFYKRLRAAGKQPKVALTAVMRKLIVLMNHALKNPTFSLAR

SEQ ID NO: 269258 - protein, 347 aa, unidentified
MKRIAVDLAKSVYQVAESVRAGEVIQRKRLNRGAFARYVQEQVEPVEWVMEACGTAHYWGRIAQARGHRVMLLHPRYVRPYRRRNKTDRNDCDAILEAARCQGIHPVPVKSHEQQQLQQLHNLRETWKKSRTQRINLLRGIFREMGIEAPAATAAFLRVASELLERPEVIALRGALQVVLGEINLYEQSMHECEAQLARWHAEDEVVRKLDEVSGIGLLTASALKTAVGNPERFANGRQLSAWLGMTPREHSSGDRRKLGHISRQGNTYVRTLLIHGSRAALLAAQRCQSSTPERMTALQRWATETAARIGQNKAAVALANKLVRICWAVWCHERRFSGNWQSMPPA

SEQ ID NO: 269259 - protein, 388 aa, unidentified
MPQVNDLSRCLAALDQDSTLIAVIEMSQSSWLVAGIVPGIERHPAKKLEPDQTALLRLLHRWRAEAERAGRAINRIAVAFEAGRDGVWLARWLRAREVDAQVIHPNSIAVAREHRRAKTDRLDVALLKRSFLGWLRGEPDHCQMIAIPTLEEEDARRPGREREGLVGERTRIINRIKSTLAWLGIRGFKPHLRNAAARLEMLRTPEGMPLPANTLAELHREMTRLQLIGRQIREIETARLERLRRQPNAGAHPMIRLLTQVRGVGVETADLLANEAFARPLRDQRAVARYGGLTGAPDESGSRRREKGLARAGNARIRRGMIQLAWRFLMFQKDSHLAQWYWRRTVDARGATRKTMIVALARKLLASLWRWQPPARFPRVSCCGRRCE

SEQ ID NO: 269260 - protein, 309 aa, unidentified
MLPNLTIGLDLGDRLSRTCGVDATGQEVFTDVVVTSPKGITEYFGQQKERCRVVMEAGTHSPWVSRAIEQLGHEVVVANPTLVYGPRRRKKRNDRMDAEFLARQGRADVELLHPIHHRSEAGQEHLASIRARDQLVRARTKLINHVRGAVKSLGARLPKCSAEAFSRRAVADIPSSVRTSLVPLLEVIEDLTRRIRSFDEQIRRVVSEQYPEAVRLQQPRGVGPITSLAFVLLIEDPHRFRRSRDVGAYFGLVPRLDESSGSSPQLRITKAGDELGRRLLVSAAHYILGPHGPECDLRRHREASARRGG

SEQ ID NO: 269261 - protein, 448 aa, unidentified
MTIIEGSAAVAVGIDAAVVANHHIVVRRPEAGRPGTMVDDFVVPPTLAGMERLTKRLVSWPGAVAVAEPTSMTWLALSIALRNAGVELSLVGNRHSARLRSALAGKNKSDPIDAALLSRAGEFFELHPARIPTTVELALRRAAQRRGKTIVDANRCLRRVVSQARWAFPDVWNAFAGSRPTALAVLDRWPHLEALARARVSSITEVVAVHTRGVANVEGRAQQIRSAARDWVEFWNGHLDLDALAWETAELLADLTAADARVDRATEATRRYWEQLWGDDPVLLSVPGMGLLTAPTVRAFLADGTHLDDAKAAQSFVGLNPSNWSSGQMESPSRAITKEGPPVLRLAFYQAANVARAHDPQLADFYRRLMVERGHCHTKANCAVARKLVARTWATIVSGTTYELRDLNGTPVTRREATKLAAALAVPDDIRRRTRAHSAATHRARLTR

SEQ ID NO: 269262 - protein, 383 aa, unidentified
MRTDQASTGIEERVLAVSLELAAAKWKVALHDGHREQPAVHTVAQPQPSARLQAVLDLIEHHNEKWSLPAGVRVVVSYEAGQDGFWISRALQARGIECYVIDPASIPVERHKRRAKTDRLDVIKLVINLRAWLRGERDRMHVVHIPSPQDEASRHLMRDRGQLQKEVLQHRDRMRKLLATFGCWDEVDHRHFAGRLARDEVKCHDGAPLPSEMRERLLRECERLALAQQQLAALEKTRQASLPAPARQRRDDLARLKGIGEVGASRLALELFWREFSNRRQVGACTGLVAQPYDSGESQVDQGISKQGNRRVRALLVEMAWCWLRHQPDSVLTRWFNARTQSTGPNRRARRIAIVAVARRLAIALWRYLKDGEIPEGARLKSA

SEQ ID NO: 269263 - protein, 437 aa, unidentified
MRITPNEYVLSFDFSLDALDVGLADPQGSWIIPHSAYDNNLPGFQALQKDVLAHLQGLDGVRLTAAGEYTALFWWHAFYQISTDPDFAPYDPTLALLNPCHVKNFRRALPEEEKSDPKDTRLNGLYYRTIGVEHHYTFDPRYLPLRQLSRAYSRLTHTLAAEKSFALTLIYLSASEYRRVEPFSDLLGVTSTYVLTEYPDISAIADVPSSQLAEAIDIIAQGHLKDADESASRLHQVAHNSYPLPEFLIPTVSTALRLTLEHVHFLEQQRKSYKRLIENELALLPEANLALAERGLGPILTAGVLGEIQDTRRFTTGRKFDHGKKQWRERNYRDGQAAVAKMAGLWWPRNASGRFEGDDRHLARERNPYLRYWFVQAAYSLKRHRDDYAAYYDRKHGEANKHPHKHALILTARKAVRLVFALLHEGQMARLEEQSMT

SEQ ID NO: 269264 - protein, 444 aa, unidentified
MEVIHERCAGIDISKIDVKVCIRVPSGTGTRRRSEVRTFSAVTSSLLAMRDWLLAEGITVVGMEATGVYWKPVFYLLEHDMECWLLNARHMKSVPGRKTDVKDSEWIATLVEHGLVRPSFVPPEPIRQLRDVTRYRTEIIRERTRETQRLEKLLEDTGIKLSATVSNILGVSGRAMLEALIAGERDPHDLADLAKGSMRRKTDALVEALTGNFTAHHAFLARAMLDRIDACTATETKLSEHIEVMLQPFRRRIELLVTIPGVDTRAAQVILSEIGADITRFPSAADLASWAGVCPGNHQSGGRTGSGKTRRRSLAEGRSRPGRRVRIADQGHLPRRPLPAHRRPPRQETRAGRPGALDPDRRLAHVHPRRRIRRPRRPLLHRTHRPGQADPTPGEPAQPTRLPSHPPNRRSCLTSRYRHGTVDFRIRRSRGGSRRARAVRCRAS

SEQ ID NO: 269265 - protein, 423 aa, unidentified
MDVVHQRVAGLDVHKETIVACVRIMVDAKVSRECRTFDTTTAGLQDLLAWLTASGCSHVAMEATGVYWKPVWNILSDGNLELLVANAAHIKNVPGRKTDVNDATWIADLMACGLIRGSFVPDQAFQELRTLLRTRKQLTREQTRHVQRLQKTLEEANIKLDTVISDIMGLSGRRMVEAMIAGERNPQKLAALADRRIKASPKALYDALHGRLTDHHRFRLRLHLAQYDVLAAAIEAVDQEVDAAIDQMDETMKAGQAFFRSLIRLLSGIPGVNTLSAATILAEITPDMTRFATAGHLVAWAGLCPGQNESAGKRKSSRLRKGAPWLKTTLVQCATSAVKKKDSYFKAQFQRLKSRRGPQKAICAVAAAMLTTIYHMLKDGTQFQDLGAHHFDRRPPEAKARHLVAQLTKLGYTVQLQPLAEAA

SEQ ID NO: 269266 - protein, 456 aa, unidentified
MSRKRRSSKKTGTPVLHSLNPNAAGVDIGATEIYIAVPADRDAQPVRHFSTFTEDLHAAADWLKSCNIETVAMESTGVYWIPFFQILEARGLQVFLVNAHHVKNVPGRKSDVSDCQWLQYLHSVGLLRGSFRPEQEVCTVRSILRHRDGLVQMASSHVQHIQKALDQMNLQLHHVISDITGMTGLAIIEAILAGERNPQTLAKLRDGRIKATESTIAKSLVGDYRREHLFTLGQSLAAYRHYQKLIGACDKEIEQYLETFESKADPPEDPKWKSQDGQNTCGGKPGFDLQSHLYRIFGVDLTQIPGVHTLTTQTLLAEIGPDLSRFANAAAFTSWLGLCPDNRISGGKILSVKTRKVKNRAATALRMAAQSLYRSQSYLGHYFRRMRAKLGAPKAITAAAHKLARVIYHMLTTRQAYDETICVQNELQNRQRLEARLRKQARDLGLEIIPAKTGAV

SEQ ID NO: 269267 - protein, 355 aa, unidentified
MSQEKYIGMDVHQATISVAVMDAGGKLIMEGLLETKAATIVEFVRGLHGPRSLTFEEGTSAAWLHDLLKPHVDRLVVCDPRKAALLKEGNKSDRIDARKLAELLRTNQLKPVYHGEHGVRTLKELGRSYLTLTKDVTRGMNRIKALYRSWAIPCSGTTVYAPRHRAEWLAKIVEPGVRLRAERLYQQLDLLQPVRQQARHDLLVESHQHPAVKLLRQIPAIGPIRAALLVALLQTPHRFRTKRQLWAYSGFAVETHDSGEYRYVRGKMQRNRERITVRGLRDNYNKGLKNLFKGAAISASTRPGPLHDFYVALIAKGMRPTMARLTLARKMITITLTIWKKGVSFDPQQLHRQAA

SEQ ID NO: 269268 - protein, 400 aa, unidentified
MISVGIDVSKGKSTVCIIKPYGEIVASPFEVKHTESELKGLSQMILRLEGDVHVVMEATGIYHLPILEFLKSKNIFVAVINPFEKKKYACRGLRRIKTDKQDSITIANYGIDNWFRLKNHQRSDETYSELKLLGRQYCHYMELHVKALLELTHMLDYTMPGIKKEFNSWNESNGRDKLSDFVERYWHFDNITGMTKSEFIDDYVKWAAEKKYHQNRSKAAIIYDLASDGIPTLSASTPSTKMLILEAVRVLREIDNTLYKIITRMKELAKTLPEYETVRAMGGVGDVLAPKLIAEIGDVRRFHSGKSLIAFAGIDAPPYESGQFTGINRKISKRGSKVLRKIGYETMQVLKSHKEPEDAAVYQFILKKEAEGKSKKQAKIAGLNKFLRIYYARVYELYKQ

SEQ ID NO: 269269 - protein, 347 aa, unidentified
MEKASQAEVQVFAGIDVSARELSVAVQCGIKEGIAITTFPNKAAGHQALLAYLLRAKGRARVCLEASGNYSLDLALTLQAHPQVEISVVNPRRARRFAESLGERSKTDPVDARVLCEYALRMPWVPWVPPSLAALRLRSITRAIEDLVAMQAQEKNRQHALLASDALPALLIRELEQHLRYLKLRITRLRREALRLIARNPELNRRFHLMLTTPGLGETSSLQILGELAVLPETLDARQWVAFSGLDPKQFSSGTSVEKKPRISRGGNRHLRRALYMPALVATRHEPFLRDFYQRLLRRGKAPLQGVVAVMRKLLHALFAMFRRDEAYDGSKLCPAEFARHTAVVCV

SEQ ID NO: 269270 - protein, 343 aa, unidentified
MIYVGVDLHLRFCYMTALDASGGKLRQERVANDSESLRQFFVGLKDSFKGEEKIAVAVEACGFWSAFVDGVEPLVDRVVLVHPARVKAIAHAKLKNDRVDSATLAQLLRGNLLPESWKADRATRDLRELLRLRTSLGRNRTRYKNQIHAVLHQYGQQAAVSDLFGREGRAWLVQVELRPAGRQAVDTYLRQLDTLEQEMGRLDQELRRHAQTDVDAQHLLSIPGIGAFSALVLKAEIGDIRRFGDKRSLYQYAGLVPVIRQSAGHCYRGGITRAGSPLLRWVLCEAALTAARYSPAARAYYDRLAKKKHPHVARVALARKLLGAVWALWTHGLCFDERVFAAM

SEQ ID NO: 269271 - protein, 404 aa, unidentified
MDVVFPYCCGLDVHKNSVVACVITPDEKEIRTFGTMTRDLLNLADWLTSKGCTHVAMESTGVYWKPIYNILEQYQLELLVVNAKHIKAVPGRKTDVKDAEWIADLLRHGLLKGSYIPDREQRELRELVGYRKSLVEERAREVNRIQKTLEGAGIKLSSVATDVVGVSGRAMIEGIISGIDDPAVLADFAQKKLKKKKEQLEQALFGLVGKHQRLLLAAQLRHIDYLDQEIARLDQQIEERMRPFEAELALLDTIPGVGRRTSQVILACIGADMSRFPSAAHLSSWAGVAPGNNESAGKRKSGKTTKGNTLLHTTLIQAARAASRTKNTYLSALYHRVAARRGANRAAVAVAHSILVSVYYMLIRRVPYHDLGGDYFEKRNSKAVVNRAVKQLEQLGYHVSIEVA

SEQ ID NO: 269272 - protein, 410 aa, unidentified
MEVMFDRVAGLDVGKETLTVCVRTPGPKGRRRAETRTFKTMSGSLRVMRNWLIEAGVTIAAMESTSTYWKPPFYCLEEVMEVWLLNAAHMKAVPGRKSDVKDAEWIAQLLEHGLLAPSFVPPPEIRRLRMLTRYRTQLMGDRAREIVRLELMLEDASIKLSSVASSLKTVSARAMLTAMIEGETNPLTLANLAKGKMRRKIPDLAQALTGTFDAHHAQLARSMLRRLELVESALAELNAVIVQACLPWQHQIELLQTIPGVGETVAQVIIAETGGDMARFPSAAHLAAWAGLAPAMHESAGKQTPAGKRHGNKWLTAMLVEAAGSVGRMHGKNHLAVQHARLMKRRGMGRAQVAVAHSMLVSAYWMLKRDEPYHDLGADWHHRRNDETHTRRIVTQLEHLGHHVIIDPAA

SEQ ID NO: 269273 - protein, 317 aa, unidentified
MKALKAVVGIDVSKDHFMVCYKSRDSKVIKGTRSFNNNESGFSELLDWCSKRSDIKPDFAMEATGVYHEKSTDYLYKNSCQVSVVLANKIKHYAKSQNIKTKTDKSDASVIANYGLERNPAAWKPMTPKFFLLRQMCREMLSFKLDLTRAKNQRHALEYAYGISEQVLKVKDEQILFLNKSIRIMEEDICRVSQEDKAFDARVKLLTSIPGLRVITIITILCETDGFASFNNLRQIVSCAGLDISEKESGQMKGRSKISKTENSHLRQCLYMPALSACSCNKPIKGLYERIVERNPTIKRKGIIAGMRKLLILVFVL

SEQ ID NO: 269274 - protein, 343 aa, unidentified
MEHHAGIDVSLERSSVCVVDATGRIVREAKVASEPEALARLFAQLGLPLTRIGLEAGPLSQWLHAGLTEAGFEVVLLETRHVKAALSAMIVKTDRKDARGIAQLLRMGWHRPVHRKSPPAQEVRALLVGRKLLQGKLLDVELSIRGLLRGFGLKLGETSKGRFAARVHELIAGQPMLERVVEPMLRARDALRAEFQVLHRAVLAIVREDAVCRRLMSVPGVGALVAVTFASAVDDPSRFRRSRDVGAHFGLTPKKYQSGETDVAGGISKVGDAMVRTALYEAANVMLTRAGKFSTLKRWALGVAQRRGMRRAKVALARKLATVLHRLWADGSEFRFGKEAAAA

SEQ ID NO: 269275 - protein, 366 aa, unidentified
MNTTTTATGLVGVDLAKNVFSICEVDGGGRVGRRQDLTRDAFGVWLVQRPAGTVVAMEACSGAHHWARRCEEYGLVPRLIAAQFVTPFRKRRTSKNDRNDAEAMATAARQGNMRFIPVKSVDQQARLSWHRVREGYKVESLAIGNRLRGLLAEFGIAVAKSESALRTALADLARNTGLPLGMKELIGDLTDHWKQIRDRIAACDARIEAHARADERCVRLRSIIGIGPLTADAMVASVGSARDFKNGRQLAAWLGLVPTQHSSGGHTRLGTISCRGDVYLRTLLIQGARSSLQRAKAVSTEKATPEQLWIGQLAARMPFGKVLVAIANKHARQLWTMLARDVDYDPSASLRHTMERSTTQPAIAAM

SEQ ID NO: 269276 - protein, 405 aa, unidentified
MEIIVDRGCGLDVHKETVVACIMGTGIKKEIRTYSTMTNDLLRLKQWLEEKEITHVAMESTGVYWKPVFNILEDSCEMMLVNARHVKNVPGRKTDVQDSEWLCKLLRSGLVRGSFIPPKEVRQLRDLTRYKRKLIQTMAAEKQRIQKILEDANIKLSSIASDTFGVSGMRILEELMKGELQPEEMAELSKGRLRKKREDLKEALVGTMEEHHTFMIQVSLGHVKMMEALLATVEERIQEKIDRHFKEEYKLLKTIPPVKDNASVIIAEMGVNMDLFPTEMHLSSWAGMSPGNNESAGKKKPGTTTYGNKHLKNILVEFGWVASRMKGTYLRSKYHSLVGRRGKKKALVAVGHKILIMCYHILKKKVPYRELGANYLDERKKDRIAKSYLRRLTNLGYTVVLNEAA

SEQ ID NO: 269277 - protein, 340 aa, unidentified
MEQYVGLDVSQKETAICVIDAEGKRVWQGTCRSTPEAMAEVVRTKAPLAVKVAMETGPLAVWHWHGLKAAGVPIVCIHARHAKAALSMQINKTDSNDAFGLAQIVRTGWYRPVDVKSMDSHRLRLLVAARTRVVSMRTGLYNQIRGLLKTFGVVLAPGKGSSFEQLVFRGIPDDHFVRVVIESQLSTWRHLSTELKKLNREIERAARAIPVCRRLMTVPGVGPLTAVAYATTVDEPSRFRRSKDLGPYLGLTPRKYQSGEVDRTGSISKCGDRTTRSLLFEAAGVLLFRNRHASALKKWGLNLSRRAGTRKARVAVARKLAVLLHRLWTNGRVFEAYSTV

SEQ ID NO: 269278 - protein, 317 aa, unidentified
MKKRPSRFVGIDVSKDDLDLACRPEDTRWRVAHDSAGIAQCLAQLRQLKPTLIVLEATGGWQGSLVAALAVSTRPFAVMNPRQIRDVAKATGALAKTDALDAGVMAHVAEAMRPTPRPLPDEMTPQIDALLQRRRQLLAMLVAERHRVALAHPAVRDSLARHMDALQGLINATDEEVAAIIRTSPAWREKDDLLQSAPGIGPVLSATLQAALPELGVLNQREIAKLVGVAPLNDDSGKRSGTRHIRGGRAAVRAVLYMATLTATRCNPVIKAFYQRLLGRGKSQKVAITAAMRKLLTILNAMVKTHTPWNARLQNCA

SEQ ID NO: 269279 - protein, 352 aa, unidentified
MEMIALDCQKRYSVASVQTPEGRCLAERRIEHRRGSIREFLGPYSPGCPVAVETIGNWYWIVDEIEQAGKVPRLVHARKAKLMLGSINKTDKLDVRGLNRLQQTGTLPTVWIPPASVRDQRELPRTRMVFAAARTRLKNRIHSVLDKYGFQDQFQGISDIFGWGVRELLEVCIRQLPPQAAYTSGLLLEQLDQIEETVQAMERRMAELFRPTVEIQRLDTLPGVGLILGVVIALEIGDIRRFRCAEHLASYAGTVPRVHSSGGKTRYGRTRPDVNHYLKWAYTEAANAVAVHREHLAQRHVGPLYNRIRSRRGHASAVGAVARHLAEATYWMLTKKEPYHERGIAEVSPQGV

SEQ ID NO: 269280 - protein, 338 aa, unidentified
MALYAACDLHSNNTVLAVVDDVGALRYRQRLPNDLSLLDAALTPFREELAGVAVESTYNAYWLIDGLQAQGYPMQMVNTLAVPQYAGLKHGDDDSDARHLAELMRLNLLPTAYIYPREQRPLRDLLRRRMLLVQQSVRLLQSVQGYWARATGQRLSANGFRHLTRQQLTDTFQDPTELFAVVSLIQMWRALQAKVAEIETWLAEDTRRRRELIALRTVPGIGAVLGLTIWLESGEITRFDAVGQYTSYCRLVPALRFSNGKKKGTGNRKCGNRYLAWAWMEAANFAIRFDSDIKRWYQRNTAKKPRLVALKAVAHKLARAGYHLLRDGGTFDVHRAFA

SEQ ID NO: 269281 - protein, 339 aa, unidentified
MQVTTIGIDLAKQVFQVHGITKDGEVVFNRAIRRAQLMPFFENLPSCLVGMEACGSSHYWARELSKIGHDVRLIPANYVKPYVKRGKSDAVDAEAICEAVTRPTMRFVAPKSEAQQAVLFLHRARDLIVRQRTQLSNMLRSLLVEFGIIIAQGTGSAVKYAKGILDGDKPDLPEVAIDVLKQLSHQLVAMQLRFRWYEMRMRLHSKLDKRVMLLRTIPGVGPVTASAIVATVGDAKQFKNGRQFAAWLGLTPLNRSSGGKERLGRITKMGDRYIRRLLVTGMTARLRQMKVNPDRVDPWAIDLLTRKPPRLATVAMANKTARIIWAVLTKNEYYRPHTA

SEQ ID NO: 269282 - protein, 343 aa, unidentified
MKEVTIIGVDLAKNVFQVHGAAADGSVVFRKKLSRPQFERFMAGHPPCTVAMEACPASHFWTRELTRAGHAVRMISPQYVTPYVKRQKNDAADAEAIVEAATRPSMRFVEPKSAEQQARAVVFRIRQKLVSQRIELINALRSHLYEFGYIAPVGLQHLPRLAEVVADEASVLPKAARVACRGLLDQIDNLSDHLEAMKDQIAELGKEGDASRTLQTMPGVGPITALAIEAFAPAMESFKRGRDFAAWLGLVPRQASSGGKARLGRISKAGQHDIRRLLIIGAMAAMVGACRRGVPEGTWLGKLMRRKPRILVAIALANKMARQIWAMLTKKQSYRDPASAAAC

SEQ ID NO: 269283 - protein, 373 aa, unidentified
MPRYSTAFGMDVHLRSTTVCALDAETGEAVTRRFRGNPWGEVAEWMSGFPGPSLAAYESGYLGFAPQRELSGLGVDCVVAAVSRVPRSAADLSSKNDRNDAARMAKAILSHDVTPVWVPSPEIEGLRDLAAAHDAATARLAAAKQRLLAFLARRGYAYGGTTPAGNPRKYWTYGFLRWLDGIHPDDDGGIRALAALRNEVEAADETREALLAEYRAAVAAGPLSAEVEALQSIKGCGFALAAAFASEVGDFSRFRSGRQVTAYFGLAPKQRSSADSVRLGGISGAGNALVRRLAVEGSWSYVQASHQPKLMPKGSGVPLEVRMHGRKGSERLLRRREEMLARGMPQAKANAATAAELVRWLWALGAMCREATE

SEQ ID NO: 269284 - protein, 333 aa, unidentified
MNQLTDAGYTAYVGIDWAAAKHDICVQAAEGGAREFARISSQPEGIEAWAQALYRRFGGPIAVALELNKGPIVTALQKYDFMVLYPINPLQLARYREAFTPSGAKDDPSDAELAVDLITRHPERFSPLKPQSVMMRKLIGLVEQRDKFLGDRGRLVNRLGHALKQYYPQVLEWFNEHNTVVFCDFLNRWPTLRQVKRARKASLERFFKSHHVNSSQLIEKRITAIKAAMPLTADAAVIEPHRLQVEILIEQLRITIKALKRFDDEIAATANELPDYDLLFSPLPGAAQVLAPRLLAAFGEDRQRYPYADALQMYSGIAPVTKRSGKKTWVHWR

SEQ ID NO: 269285 - protein, 343 aa, unidentified
MNHFAGLDVSVKETSVCIVDNTGRIVREVKVPSEPEALLAVLKNPAYHFKRIGLEAGPLSQWLYSALAEAGLPVICVETRHMRAVLKAQINKTDRNDARGMAQMMRVGLYRPVHVKTLRSQKLRMLLTHRKLLQSKAIAIENDLRGTLRNFGLKVGMAGTVKFEARIRELVENLPDLAALVEPLLIVRRVLHEQISVLHRRLLAIVRDDAVCRRLMTIPGVGPVVALTYRATIDVPARFKNSKAVGAVFGLTPSKYQSGEINRTGAISKCGDAMMRVMLYEAAQVMLTRTNKWSWLKAWAMKIARQRGMKKAIVALARRLAVIMHRIWVDGTEFRWTRKVVAA

SEQ ID NO: 269286 - protein, 418 aa, unidentified
MFKIFRKNCCGLDVHKTWIYACIGITDANSRTEYFQARFSAFSKGLQELSHWLDKYNCKEVCMESAGKFWIPVFNILEKTCLVTLAHPKYTKPQKGNKTDRKDAKWICDLFMCDMIKPSFIPPPAIRHLRDLVRYRGKLTNMLNGEKNRAQNCLTVSNLKLDDVFADVFGKSARSITEYILAHPGEPFDVAQFVDRRCKSPLSEIQAAVDGAVSPEQAVKLRQCLDHIDQLRLLRQRLEQEILRICEPFADILQLLRTVPGLGNDPMTAIAVLSEIGGDMSVFPTAKNLCSWAGCCPRNDQSGAKVKSTRISRAGSYLKPLLVQVANALIHSRKHPEFAERYRRIKARRGHKKAIIAVCKMLLTAIWNILSKLVPYSPAGFLSASHDLPPSKSLTVAQGLSLLRRRGFILTDDPLSAP

SEQ ID NO: 269287 - protein, 445 aa, unidentified
MSESLITPASEPEWAAFAAIDWADQKNFWRLLPAGSQRQEQGELDNTPEAVEVWAAGLQQRFSGRRIAVILEQSRGALVYMLAKYPHLVLFPVHPTTAARYRETFCPSGAKADPSDTASLLDLLLRHRERLHQLRPDTVETRLLQFLVEERRRTVDERTRQSNRLADCLKLYFPQVVQWFDDLTSPLVGDLLERWPGLEQLQRVHPGTLHKFFHEHNCRGEKRMEERIQAVYQAIPATQDAAVLEAGAMRARGLVRLLATLRDQIAVFDQRIAELVLAHPDGGLFASLPGAGPALIPRLIVAFGTQRDRYQAAYQVQCYSGIAPVKEASGKTEWVHFRLACPKFLRQTFHEFATHSIGRSEWARAYYKHLRDDEKKSHHAAVRALAYKWIRIIFRCWKDGKTYDERVYLDSLRRRGSLLAAGLKAATRPEWKTVGGFQRLSENNA

SEQ ID NO: 269288 - protein, 316 aa, unidentified
MHQEEVFVGIDVSKARLDIAVIPSGDASALPNNEEGISRLVDLMKSLSPTLVVLEATGGLEMASVGALAESGIPVVAVNPRQVRDFAKATGRLAKTDAISAQVIARFGQAIRPQVRPTKDLETQELAALSTRRRQIVGIMAAEKNRLSAAPKWTRKNIQEHLAWLEECLTKVNNDLSKAIKESSLWREKEDLLRSVPGVGLVLSATLLAELPELGKLDRRQIAALVGVAPLNRDSGLFRGKRTVWGGRANIRTAMYMSTLVATRFNPVIKDFYHRLCDAGKGHKVAITACMRKLLTILNAMLKNRTYWAPLASADS

SEQ ID NO: 269289 - protein, 386 aa, unidentified
MPKPNDLSRSLTAFEQDSTLIVVIEMSQASWLVAGIVPGVDREPLKKVEPNGDALLRLLQRWRDEATKAGRMLKRIAVAYEAGRDGFWLARWLRERGVEAYVIHPTSVAVSREHRRAKTDRLDTALLKRVFLGWLRGEPKHCSMVAIPTLTEEDAKRPNREHESLVGERTRLVNRIKSGLVRLGIRTFKPMLRRAPEHLDALRTPEGAPVPVNTLAELRRDLARLHLIRAQIKVIEAARLERLQQGPEQGPHAMVRLLARVIGIGVETADMLVQEVLSRNLRDRRAVARYAGLTGAPDESGAKRREKGLAKAGNARVRRGMIQLAWRFLMFQSESALAQWFRSRTAQAPKTRKTMIVALARKLLIALWRLVRTGAVPEGLALRPAI

SEQ ID NO: 269290 - protein, 357 aa, unidentified
MDRHKYVGMDVDQATCVIAIEDKAGNFVMETYVPTKASVLGPFFKGLDGRIHVALEEGTQAAWLYELIQPLVEEVVVCDRRGDKIRGNKGDRVDARKLARELRQGDLRPVYQGERGHRELKELVRGYDYLVQDVVRTKSRLKAAFRSRGISCGGQAVYRKTDHKDWLRKIDVDALRARVSSLYEQLDCLTRLRKEAKDAMITGAKKHPSYKLLVKQPGLGPVRSAQILGIVGTPQRFRTKRQFWPYCGLAVVVHDSGEYEIVDGQRRRRKRPVRTRGLNKNFNRTLKVVFKGAAKTVISRDPFKQYYQRLIDKNIRPEMAKLTVARKISAITLAILKSREEFDPNRVNQAVSDSGDQ

SEQ ID NO: 269291 - protein, 322 aa, unidentified
MRYIGIDVSKATFVVAYSSDKGGEIRTFNNTTAGIRQFIGTLPKDGSIHCVMEATGNYSALLLYMLNVAGITVSMENPLKVKNFAKALLSTVKTDKSDARLITLYGEKMNPRPFKVQGEAILRLRQKRTVIRQLTKQITAMSNLRGSLACLPVPDKGATHTVDETIKFLEKRRDRLQSELTDLVEVEFSRQLALLTTIKGIGITLATALILTTGGFTYFQNAKQVSRYLGICPTYEQSGTSVNIKGHINRNGDAYTRGLLYIAAWPASRFNAQCKETYTRLRQNGKSGKLAMIAVANKLIRQAFAVVAHDKEYIDGFVSNRP

SEQ ID NO: 269292 - protein, 423 aa, unidentified
MMKLKYSICCGLDVHKNVIVATIVTTNKDGISEYLQKSFSTINSDIQRFHNWLIENNCYHVCMESTGKYWIPIFNYLENDIDVCLTHPKYVKAIKGKKTDKKDSKWIADLYKFDLVRCSFIPPKDFRQLRELSRYRFKLVCMKSSEKNRIQNCMTISNVGIASVLSDPFGKTATEIISYLLEHTADSMDEKAVRKLIKKGAKSKSDEIIEAIKGYTIETDQAKKLELARGHLEYLDDMITQTEVELYDRIKPYYEFVEFVSTMPGMTELSSTIVLAETGVDMDIFDDAKHLCSWCGLSPANNESAGKKKSVRIAKAGDYLKPMMVQCALAAIKSKKQPYFAIKYGRIKKRRGHKKAIIAIARMMMVCIYHMVSEKKPFTPTDYEELMDPQNHVESVVLNENNVFAYLESLGYDSSKLVKRNDN

SEQ ID NO: 269293 - protein, 373 aa, unidentified
MSEFNKFVGLDVHKSTIAISIASDDGAEVRYFGEIKNTKEALINFANKISQGSLKLSFCYEAGGCGYEVYRHLRNIGHDCMVVAPSLIPKKAGQRVKTDRRDSLNLARLHRARELTGVWVPDAMNEALRDLTRAREDMKHLQRQAKQRLLAFLLRHGWTYSGKSNWTKDHFNWLETVKFQHAAQQIVFQEYVDTVKYCGKRVESVTQQIEICSRESACWPVIESLMALKGIDLISAATIMAEIGDLTRFDSAPQLMSYLGLVPSEHSSGSSVRRGGITKTGNSHVRRVLVEAAWTYRFPARKTAHTQKRAKVTTEAVQEISWNAQKRLCQRYKELNANGKIKVQTCTAVARELAGFVWAIGQTVPLKQSANVQ

SEQ ID NO: 269294 - protein, 359 aa, unidentified
MNTTTASATVTILALDLGKFKSVACAYDRATAQAHFDTLTTCRAELLRLFERHHPAVVVIEACTLAGWVHDLCAEHGVPCKVANTASEAWKFQHTKRKTDKDDALRLAQLEALGQLPTVTIPPHQTRQWRSLIAYRQTLVGRRVAVQNRLRALLVGQGLPAPRGHRAWTELGLQGIAQHARPLTDCGPDELWRGLLDLALTELHQARALLDQAEAKLDALAKDDAAVQLLETIPGVGPRTAEAVAAYLPDPGRFQTGKQVSAYAGLVPRQYQSGETDRRGRITKRGPALLRKLLVECAWVMLRYNSWARAVYQRLSRGKARKKQAIVALARKLLVRCWAMLRDGTSWRQEVATAPGAVT

SEQ ID NO: 269295 - protein, 345 aa, unidentified
MSGAYEGRQIVGIDLHRRRSVVVRMTETGERLETVRISNDPDYLRQVMVRAGEAPEVVLEAAYGWYWAADTLAELGATVHLAHPLGVKMFSLRRVKNDARDAADLADLLRMGRLPEAWIAPPATRELRGWVRHRAKLVALRSCLKNQIHAVLAGAGVAVPMSDLFGPGGRELLAATRLRVESGSRIDSLLRVITVLDFEIDLYARLVAGRLRSDPGYVAIQQIPGVGPVLAAVFVAEIGDIARFARPEQLASWAGLTPKHHESDTTVHRGRITKQGSTLVRWAAVEAVQRVSAHTRLGQTRDRIGERRGRNIGTVAAARELITLVFYGLRDHHIRCLAARDTTAA

SEQ ID NO: 269296 - protein, 342 aa, unidentified
MSVSYVGVDLGSSNFHQVALNHSGTHTLNREFTTSEANLIKVFADLHGEIHVHLEAGELAPWASEIIRPLVTRVVCSHPQTNAWIARDRDKCDRIDAYKLASLLRLNEFKEVHYPREQSRRDFKTLVQHYDELTQQQARLKTKLKARLRMQGVIVRGEEVFSARGRKAVLEQVKSNVVRTAIKQLYAVLDQSIASQTEAQTLMLRAAQALPEIKILRTAPGVGPIGACRYSAYIHTPQRFSSTRKLWKYCRLSVSHRSSNGKPLRRPRLDRMGCGRLKDVSRKAFAAALRARADNGFKRAYYRALETTHDATHARLTVQRKIVSTLRAMWINQTPYCDELMR

SEQ ID NO: 269297 - protein, 342 aa, unidentified
MTMIGIDPHKATHTAVAVDDDEVVLDEFTLRASTIQAQRLREWAAGFEKREWAVESANGLGYLLAQQLVAAGETVFDVPPMLASRVRVLGSGRSQKNDPNDARSVAIAALRSDRLALVRRDDHVRVLRLLAKRHRDMARLRNKHCTRLHALVLELTAGGIGSEITVNKANQLLNAVVVDGEVTRHRVLIAAELVDDIAQLDTALKASKKRISVAVAASGTTLTDIVGIGPVCAAIIIGYTADVTRFPTKGHYATYNATAPVEASSGNRPRHRLNPRGNRKLNHAIHIAAICQLRYDTEGRAYYDRKIAEGKTSKEAIRALKRRISDRVYRHLIADANRAATS

SEQ ID NO: 269298 - protein, 368 aa, unidentified
MSEITTIGLDLAKNVFQVHGIDEVGQVVVRKRLRRGQVLGYFSGLLRCLIGMEACATAHHWARELIALGHEVRLMPPQYVKAYVKRNKNDAADAEAICEAVKRPTMRFVAVKSAEQQSALMMHRARDLVVRQRTMLVNALRGHMAEFGFVAAQGLHNMAALIEIIRNGADESIPEVARQVLIVIADQIAEVGVKIAALEAQILAWHKSNWVSQRLATIPGIGPIIATAIAATVPDPGVFRSGREFAAWLGLVPRQNSTGGKARDIRHWELNNCDDEIAELQTSHFLALADVYSVAPPARMIQGNIPSEGWYQSQMFGRLLLTTGGRAQLRSAIRFERRERREGWLPYISAMTGLLGIVVAILALMLKH

SEQ ID NO: 269299 - protein, 387 aa, unidentified
MAQVNDLSRSLAVFDPISTLVVVVEMGKASWLVRSVVPGVERQPLKKLEPDATALLRLIERWRSEAVRAGRPISRVALTYEAGRDGFWLARWLIARGIEAHVIHSASVAVSRERKRAKTDRLDTAMLMRVFLGWLRGERGHCGMVAIPTIEEEDARRPSRERESLVNERSRIINRMKSALARLGIRGFKPHLRRAPERLACLLTAEGTSLPANIIEELRRDMARLALVREQISAIEKTRVERLERAPDTGPHAMVRLLSRVIGIGIETADMLVREILSRKLRDRRAVARYAGLTGSPDESGLKSREKGLAKAGNARVRRGLIQLAWRFLMFQKDRALARWYRIRTEGPNGARKTTMIVALARKLLIALWRLVTTGEIPDGVELRPAA

SEQ ID NO: 269300 - protein, 413 aa, unidentified
MEDVVEYCAGLDVHRDTVVATVRYPVGGRRSSTTKTFGTDTAELVALGDWLVSQSVTRVGLESTGVSWKPVFYQLEDRLEQVWLLNAQHLKNVPGRKTDVADSAWIAQLVEHGLVRPSFVPPPQIRQLRDFSRHRRVLCEERTRMVQRLEKVLQDAGIKLTSVASTVLSKSGRAMLEAMLAGQTDPVALAELAKGRMRSKIPQLVDALHGNFRLDHHGVLVAQILAQVDFLDRQLADIDEHITALVADLEPIIERVQTIPGVARKCAIGMIAEIGVDMTVFPTAAHLASWAGICPGNNASGGKARSGHTRRGPIALKTVLTEAAQAAGRTKNTYLGARYHAIRARRGTFKAVGAIRHDILIAYWHIVSEGDMTYHDLGPDWVVRRRSPEYQIAALAKQIEKLGATVTVTLPAA

SEQ ID NO: 269301 - protein, 341 aa, unidentified
MDYCGIDLHVEYSEVCILDEEGEVMETSRVRTSQKALERFFGRDPMRVAMEAGGTSPWVSRLLSSLGHEVVVCSPRRVRLIAESTLKNDRVDAEVLARLVRLDPEFLKPIQHRSEQAQLLRGNLKVRSAMVEARTKWINTIRGLLRSFGYKVSGKAPQTFAERVDRLKLPSELKAVIEPLLEQLDLLTGEIERRNEHLEEMVKDLPEVAHLREIPGVGPVVATYFVLTIDDPDRFKNSRDVASFFGLRPSMRESASVTRFGRITKEGDPEMRRLLVQAAHACLLTKADSELKRWALAVAERKGKGKAVVALARKLAVLMHRLWVTGEVYQAFPNNGAARAA

SEQ ID NO: 269302 - protein, 342 aa, unidentified
MYYIGLDVHKKTISYCVKDASGQVHREGTIGASRNELDWWLKTLPQPRIMAMEATIFTGWIYDYLLPHAEQVKVAHPLMLRAIAAAKRKNDRIDAGKIADCLRCDFLPECHMASTEIRDRRRTLRYRHLLVRQMVQMKNRISGLLLETGVSHNKQRLHKVGYFRELLSSNQEVHENIRPLLRLSRETIVRCQKTEYALVSSLQRDPLLAERLKRLRTVPGVGPITALTWALEIGDVARFRSLKQAISYCGLCGEEKSSADKVLRTPLSKQRNKHIQHVLVEAAKLAPRQSHELALIHERETQKGNRNRATLAVARKMVTYLLAVDRREREFVPAEVRSTGAA

SEQ ID NO: 269303 - protein, 337 aa, unidentified
MQTIAVVGLDLAKTVFQVHGVAADGTVVVRRQLRRGQVLAFFQSIGPCLIGIEACASAHHWARELMAIGHEVRLMPPAYVKAYVKRGKTDAADAEAIAEAVTRPTMRFVAVKSKVQQAVLMLHKTRDLLVRQRTMLINALRGHLGEYGLTAPQGPAGVQAALKALREEDQDLPDLARAALGGLAEQLEHLGEEIGRLERRILDWHRQDETSRRLATIPGIGPITASAMAASAPDPSLFRSGRQFAAWLGLTPRANSSGGKDRQGGISKMGDSYLRRLLVVGATAVLRMARQQRREGWVGNLLERKKPKVAAVALANKTARIAWTLMARQEDYKPTAA

SEQ ID NO: 269304 - protein, 320 aa, unidentified
MPSPTPVFVGIDVAKAELVIAIRPSEARWTVPNDPTGIQALVQRLRESAPGPTLIVLEATGGYEHAAVAALAAARLPLVVANPRQVRDFARATGQLAKTDRIDADILALFADRVRPAPRPLPDAAAQALDALLTRRRQLLEMLVAERNRLEHAGPPVRHGITQHIRWLERQLHDVDQDLDTTIQSSPVWRAKDDLLRSAPGVGPVLSRTLIGELPELGTLPRKQIAALVGVAPLARDSGTLMHKRLVWGGRAPVRAALFMAALVGTRYNPVLRAFYHRLLAAGKPKKVALTACMRKLLTILNAMMRTRTMWHHVDSFDTP

SEQ ID NO: 269305 - protein, 411 aa, unidentified
MNRKLTLLYIGVDLHKNHHTAIMMNCLHEKLGELKFDNKPSAFPVFLKEVNKIAKREGLTPVFGLEDVGGYGRGLAMFLIENKYEVKAVNPALTVSMRKSSPNNKKTDAWDAECVARILISNLDTLPNANPLDLYYAISQLVTRRANIVSVVTGIKLQLHQLLGYHYPSYKKFFSQVDGKTALAFWRKYPSPSCLKGVGVDELANFLYKKSNRYLSTKKAEEILSLVEQDGDTSKDYQEANDFLVKDVVRDIIIREHQLDQIDTELKKHMALLDYKLESMHGISTVTAAELIAEIGDISRFPNADKLANFAGIAPVQHSSGNKQKARKSKLGNRSLYDIFYNLAIRMLGVSRGEKKPNHPLYHAYYEKKLAEGKTKWQAIICVMRKLVNVIYSMMKYKTEYKMPVLPERAA

SEQ ID NO: 269306 - protein, 366 aa, unidentified
MKKTNTVRVNGNMIFKGQKLTLGMDLGDHWSCYCVLDEAGKIILEQKVAMTPEAMKQTFAKIPQSLIALETGTHSPWVSRLLTELGYKVIVAHAQKVQLITKSNRKDDRHDARTLARLARIDPELLGPVRHRSAQAQIHLTVIRARAELVRARTALVNAARGLVKSYGQRLPKCGTQQVNRELAAGLHAELREVLEPLLQEVESLNERIQEYEVRMEKIAKENYPHVELLKQVKGVGTQIALTYVLTLDDPHRFPKSREVGCFLGLRPGRRDSGESQPEMNISKEGDRYLRTMLVQGAHYILGPFGEDSDLRRWGLKLAARGGKNAKKRAIVAVARKLAVLLHRLWVSGEVYEPLRNSQKAMRAAA

SEQ ID NO: 269307 - protein, 342 aa, unidentified
MEITTVGIDLAKSIFQVHAVDAAGHVVVRKALRRAQVVPFFAKLPRCLVGIEACGTSHHWARELTKLGHEVRLMPPAYVKPYVKRGKTDANDAAAICEAVTRPSMRFVPVKSTEQQAALALHRTRDLLVKQRTQLVNMIRGLLAEFGIEMARGLRHALELAARLSAGDAAEVPPLAQRVVTGLADQIGALQIQLTRLEKELLAWHRENDLSQRLATIPGVGIVSATALAASVSEPERFRCGRQFAASLGLTPLQNCSGGKERLGRISRMGDRYLRRLLVVGMTSLVRRAKAAPTSVDPRLPALLQRKPVRVVTVAAANRTARVAWAIMTRGGTYRAPAATAA

SEQ ID NO: 269308 - protein, 377 aa, unidentified
MDSAHPTRHHKVPSVPDWLARENQERESEMNVTPKIIGLDIAKNVFVAVGRDEYGKVVWKRILSRGDVLSTFAKMPVTTIGIEACAGSHYWARKLNAMGHDTKLIAAQHTRAYVTGNKNDTNDAAAIAESRSRASTNYVPINTEAQQDLQMLHRARQALMQERIAMICRIRAFAGEYGQVFAMGVAKFCTGFVAWLSDAQNGLSGSAIATFTELKAQLDDKDARIAVYDQRLAQAAKEDARAVRLRAVPGIGNLTATAVLAAVADAHHFDNGRDFAANLGLVPREHSSGGKQRLFGITKRGDSYLRTLLIHGARSALRCAGDKPDKLLCWAQKLAERRGANVAAVALANKMARVIWALLAHGREYVPAWSKSMTIPA

SEQ ID NO: 269309 - protein, 464 aa, unidentified
MKGDKRRRQIKQRRISSHLDQVNLFAAGIDIGSQSHYAAVPEELDSEPVREFGCFTGDLNRMADWLVQIGIQTVAMESTGVYWIPAFEILEARGLVVLLVNARHVKNVPGRKSDVQDCQWLQQLHTYGLLEGAFRPPEETVALRTYMRQREMLVQRASDHIRHMQKALRQMNLLLDNVVSDIDGVTGMKIIRAILAGERDPAVLAQFRDKRCKQDKKTIAASLEGHYREEHLFTLKQSVELYDVYQQQIASCDATIQAQLDRMESRGDKDDLPPTKKRKTKSSLDFDVRGELYRMTGVDLTRIDGFNETSVLKILAETGIDITPWPTEKHFASWLGLSPGNKITGGKILTSKTKPSANRAAAAFRMAAFGLFNSKSALGAYYRRQRTRLGSPKAITATAHKLARTFYSMLKNGSEYVDQGQDYYEKQYRDRATKNLKKRAAFLGFDLVPNKEEKNMTDALLSTT

SEQ ID NO: 269310 - protein, 400 aa, unidentified
MRVVFGIDVSKASSEVAILVNGEKVHGYTISNDAIGFARLLGDLRTVHKPEIIFEATGVYSRRLQSFLDEHGYAYTRLNPLEAKKQLDSLRVRKTDQIDAEKLAQSQFVLNRKTTYVQEEVYQNLRDLSRFYQNLTEDIIRAKNRLHKVLQVTFPELENILSTPSGEQYWNLVIAFPCKDFVLDLSKDKLSESIRQSTSKRISDKRAAYLAEKLIALANQSYCAVKKTSPMLEEVRYYTKELLRLSEQRQAVLNEMVELAQPLPEYDILLSIPGIAETTATSIIGELGDIRRFQSANQINAFIGIDLKHYESGNFLAKEHITKRGYPYARKILFKCIHNIASASHTNPCHIADFYEKRKKQSQTTSTKPHTIASIHRLIRTMYYLIMHNKLYDYASTQNR

SEQ ID NO: 269311 - protein, 340 aa, unidentified
MNHYAGIDVSLEASSVCVIDASGNIVREAKVASEPEALIAWFGSLGLALTRIGLEAGPLSQWLYARMRDAGLAVELLETRHVRNAFKIMPVKTDRKDAHGIAELMRLGWFRPVHCKSMEAQETRALLTARKLVQKMLHEVEMNLRGVLRGFGLKVGKTTPVAFEARIQELVAGHPNLEVIAHALLASRATLRREFNGFEKRLRAMARSDTRARLLMSTPGVGTIVALTYAAAIDDPARFKSSKVVGAHFGLTPTRYQSGETDRTGRISKIGDGTVRAALYESAHVILTKPVKGCTGLKSWAMRIAKRAGMNKAKVALARKLAVIMHRMLADGTPFTTQPA

SEQ ID NO: 269312 - protein, 379 aa, unidentified
MKESTTFFVGLDVHKDFISVAYAPEDREAEVIFLGPIGTRQCDIDRLIRQLHSRASRLLFVYEAGPCGYWLYRYLKKKGQDCMVVAPSLIPRKPGDRVKTDRRDAVQLARLMRSGDLNPVYVPSLEDESIRDLCRLREDILCELRAAKRRLKSFLLRHDIRYAGRSDWSAAHLRWLADDVILPTASQSIVFHEYVHRVNHLVDRLRSIEEQLQQEVKGWRLEPLVAAYQALRGVRFQVAVTFAAEIGDPTRFEQPRQLMAYVGLHPSEYSSGNTRRQGGIAKTGNAHVRRVLVEGAWTYRYRPKVSRQIQLRQESLPQNLRDIGWKAQVRLCKRFRALVARGKHPNVAVTAIARELVAFLWAIGRQVQFPESSLVQLAG

SEQ ID NO: 269313 - protein, 336 aa, unidentified
METVCAVVGIDVSKKKLDIALLLNGKIKAKVVENSSDGYKLLLAWLNKSKVVKETLHICMEATGTYYEPVAFALHEAGMTLSVINPACIKGFGHSENIRNKNDTADAGLIARYCAAMKPTPWMPPPLEQRQLRAWSLRVQALKDIRQQEENRLEANSFTGMTDVAEHVKQHIAWLSAEIQKLESDIDDHIDRHPGLKRDAELITSIPGIGATTVAKILGQFGDIRKFDSAKAFAAFLGVTPKQRTSGSSIKGRTMMCRTGSSSMRAALYMPSLVACRYNPTLRRFAERLSANGMAKKAVVGAVMHKMTHLIYGVIRTGKPFDPNYLSNRLAIQDGI

SEQ ID NO: 269314 - protein, 397 aa, unidentified
MIAVGIDIPKAKSTVAVIDSDGTVLASPFTMAHTQPEMEAFVTYLKGLGEPTTILMEYTGHYHYPVLKKLQDEGFPVCIVNPYQMKKYGDVEIHKAKTDKKDALRIAAYALEKSYKLVPYSSMEQKYEDLKFLSRQYNQRISYVAKLKVQLIALLDQTMPGITRILPLNSRNPEKCALLLFIKRFKSFDEIQRIGKARFLASYDVLAKKASERSASSKGLSIYELAVDSITTRGEDPYIWLSQNQCVDLLSATQNAADEIISQMRNIAETIPEYKVLRAMHGVGDRLGPIILAEIGDVHRFHSGKALNSYAGNDAPPYQSGQFESRNHHISKRGSSTLRKACYEVMQALKLTKPQDDPVYLFMLKKEQEGKPFNVAKMAGVNKFLRIYYARAMELYK

SEQ ID NO: 269315 - protein, 341 aa, unidentified
MSLYAGLDISVKTTAICVVDGNGQILLETVVDSSPNAIADRLREFEQPLERIGLEAGPLSQWIYGGLVDIGLAAICVETRHMHAALSARINKTDRNDARGIAQMMRVGLFKAVHVKTPASQHRRLLLTSRKLLQRKIYDIENDLRGSLRNFGLKVGVVGAVKFEDRIRELVADHTLVAAIVGPLLEARAVLRIQFAKLHRMLLELVRTDPICRRLMSAPGVGPIVALTFRTCVDNPARFSRSKCVGAHYGLTPRLYQSGEVARTGRISRCGDVMLRSSLYEAALVVLTGPGRWNSLKAWGIAVARRRGMQKAIVAVARKLAIVLHRMWRDDTDFRWTAPSV

SEQ ID NO: 269316 - protein, 357 aa, unidentified
MAIVEQRIGVVGGIDTHKDTHAVVAITTTGEFLGSAQFATDPSGYRHLLKWLRAFGALVRIGIEGTGSYGASLTRYLRHQGVPLVEVIRPERQWRRRRGKSDPTDAEAAARAALSGEANGTPKDQDGQIEAIRLLRLARRSALLARTQAGNQLQSIIETAPAELRERLRHLRLAELVGLAKRFRVVAVDSPVAAARLALRSLSVRWEALDAEVALLDAQIEQLVHRAAPHLCAVWGVGPDTAASLLVAAGDNPQRLSSEASFAALCGVSPVDASSGRHHRHRLNRGGNRDANRALWVIAMVRMAKHPRTQAYVRKRTQQGLSKREIIRCLKRYIAREIYPVLSGGLVGLAHTAAPTT

SEQ ID NO: 269317 - protein, 349 aa, unidentified
MSQNLNSTVAVIGIDIGKNSFHVVGLNDRGAIVLRQKWSRGQIEARLANMPPCLIGMEACVGAHHLSRKLKAFGHDARLMPAKYVRPYSKGQKNDFRDAEAIAEAVQRPTMKFVATKTAEQLDLQALHRVRERLVSQRTGIINQIRAFLLERGVAVRQGLRFLRAELPRILAAPPDVLSARMVRAISDLAEDWRRLDERIDHLSGEIAVLARQDAGCERLMSVPGIGPIISSAMVAAIGTGDAFAKGRDFAAWLGLVPKQISTGDRTILGKISKRGNRYLRVLFVQAAWVVLIKPMSWERHGLKHRIEAAKKRLHRNVLAIALANKLARIAWGVLAGSRTFEASKLQAA

SEQ ID NO: 269318 - protein, 344 aa, unidentified
MNYCGIDLGKKSSCFHIVDGERKTVTAGKLANNTLAIRKVFGNRDRLKIVVEASCKAFWMADRLRELGHEVVVVDPGRTKAIGAARIKHDKLDARILAELCQTGLLAAVDIPTQAQRMARLPFTSRDTLVRSRIVMTNSVQSILDGEGVELPTKWVGGFSSVIRSAIPRMPPAMVALVERLLRGIDELSKLIDECDKEIEQVAENDPDIKLLRTVPGVGPLCAAAFVHVIRDPGRFKSSRVVGAYLGLVPSLYESGQTSVKGGITKHGNCQLRSLLHICATALMRTKRDTALKRWAVGLSTRIGRKKAKSAIARKLASVLWAIWRRRRPFEARLPIPQLAAQSS

SEQ ID NO: 269319 - protein, 403 aa, unidentified
MNMNAVGIDVSKGKSMVAILRPYGEIVSSPFEIKHTSSNIQSLIAQIRSIEGESRIVMEHTGRYYEPLAHQLSLAGLFVTAVNPKLIKDFGAHSLRKVKSDKADSVKIARYTLDSWTELKQYSLMDELRNQLKTMNRQFGFYMKHKTAMKNNLIGILDQTYPGVNTYFDCPAREDGSQKWVDFATTYWHVDCVRKLSLNAFVDHYQKWCKRRKYNFSKDKAEEIYGAAKELVPILPKDDLTKLIVKQSIEQLNTASRTVEELRTLMNDTAAKLPEYPVVMGMKGVGPSLGPQLMAEIGDVTRFTHKGAITAFAGVDPGVNESGTYEQKSVPTSKRGSSSLRKTLFQVMDCLIKTKPQDDPVYAFIDKKRAQGKPYYVYMTAGANKFLRIYYGRVKEYLMSLPE

SEQ ID NO: 269320 - protein, 343 aa, unidentified
MDIVVLGIDLGKNSCSLAGLDASGRVILRRRMRRSSVESFVKGLGRCIVAMEACCGAHHLGRVFAAQGHETRLMSPEYVRPYVKAQKNDELDAEVIAEAATRPTMRFVAVKSQYQSDVQALHRARERLVSERTALINHLRALLLERGIVAPQGRRKLQEELAVFADEDGIEALSPRIRLLIEDLRSEWRALDERIAAFDVEFVRMAREDEAVRRLTTIPGIGTINATALAAAVGNARAFRRGRDMAAWLGLTPRQMTTGGKPRLLGISKRGNRYLRKNLIHGARAVLPYLVERETPLGRWARGLLARAHKNVVVVALANKLARIAWAVLARGRTYEAAGEAAA

SEQ ID NO: 269321 - protein, 337 aa, unidentified
MEYFAGLDVSMAQTHVCVMNRDGAVVYEVKVPSMPADIAAALTQAPTCERIVFETGRMAPMLYHGLSQLGLPVVCIESRQAYQALKSLATHKTDRNDARGLAHLARTGFFKPVHVKSLPAHALRSLIVARKKLVGQRVTLENQIRGLAVVFGVRLPRALTAAFVRQALRASEGITGLSAAVRGLVAARTAVLAAVAAIDADIRQLVRASAACRRLMTIPGVGQLTALAFTAAIDDPGRFRRSRDIGAYLGLVPRRYQSGEVDYTGGISKCGDRRVRTLLYEAANVMLTRYRGTLKLKDWAFAIAKRSTMRKARIALARRLAIIMHAMLRDGTEFNPA

SEQ ID NO: 269322 - protein, 339 aa, unidentified
MKEIITIGLDLAKRVFEVHGVDERGETVVRRSLRRAQVLSWFGKQTPCLVGMEACATAYYWARELGKLGHTVKLIPPSYAKAYVRRNKNDAADAAAICEAVSRPSMRFVAVKTEVQQAAAGVHKVRELLMKQRTMTMNALRSQMAEFGIVVPEGSRHIAELARILDDPHDERIPALLRDALGKLSESLRGLEARIAAIDKQLVAWGRENANCRHLITIPGYGPILSSAMAAIVVNPHAFRSARDFAASLGLTPRQDSTGGKVKLGPISKRGNGYLRRLLVNGAMAVLCTRRAKEDPWLAKLLATKKRKLVAVALANKMARIGWALMTRQEDFRAMPLAA

SEQ ID NO: 269323 - protein, 455 aa, unidentified
MTRDKKKQKAIRVNEEMPVMNPNAAGIDIGSTEIWVSIPPDRDEQPIRQYETFTRDLYAMADWLKQRGIESVAMESTGVYWIPVFEILEGQGIHVVLVNAKYAKNVAGRKSDWLDCQWLRMLHAFGLLPASFRPAAEIAVLRSYLRHRQMLIDYAAAHIQHMQKALTQMNVQLANVVSDITGTTGMQIIRAILKGERDPHRLAAMRNYRTKNDEDTIAKALEGHYEAQHVFALKQAVEIFDFYQQQRLACDQEIAQHLKSLESRIDVDSHPSQPARAQKKNRRNSPGFNCRYEAYRISGADLTQIDGISESSALTILSEIGTDLTPWKTEKHFASWLTLCPNNRISGGKILQRRTRKSSNRVHDVLCVCAQTLLNSRSALGAYARRMRSRLGPQKAIVATAHKLALLIYRLIRFGKDYVDIGQDAYEHQYQQRTLKSLARKAKEFGFQLVALTET

SEQ ID NO: 269324 - protein, 458 aa, unidentified
MKIYLGGDASKGYTDWVMISETKKKLLDNFQLDDTFEGHHQLYNAIKGCVEKYPKAEIYAALESTGGYENNWLNTLRSYQKEFNIRVARVNPLGVAHDSKASMNRSITDAVSALSIAEYLINHPDKIRYEQDETWKSLRRHWNFVEMQKKQRVQTINQLDMLLYSANPILLSYKTDKLADWLLEVIIQYPTAKLLAKAKAEKLSKIPFLSLAKAEKIIASVQKSIASATDKDIGVLIKQIALQIRMFNQTIDSQMSLIEKELISSDIDLLKTFKGIDTTSAIGLVLEIGAVERFERVKSICAFFGLNPKFKQSGDKIIGVRMSKQGSKKMRKILFNIAFGAIVHNPLIKEIYQRKLSEGMTGMAAIGVCMHKILRIVYGMLKNKKSFDIQIDKLNTNRSAIKQAEKNQQNNAYISKNRRFQEYDKNAPISKRQTKKRKEHVLSQCEITSQSAGSICSS

SEQ ID NO: 269325 - protein, 405 aa, unidentified
MPSFVGIDWASAEHAVCVVDGAGKVQARFSVSHSAVGMQTLHRQLAQFGVPKDLAVAIERPSGLLIDTLVEAGFVVVPIHPNALKASRPRYSAAQGKSDLGDAFILADMLRTDGHRFRPLQPLSDQTRALRALVRSRDDLVHEKVALGNQLRALLESFWPGAAAIFAEVDSPIALAFLDRYPTPASAERLGEKRLAQFLAHHSYCGRRPTAVLLERLRRAPVGLCGEAEAEAKGEIVRALVRILDPLVAQLAKLSAAVEHAIADHPDGPIITSLPRAGRINAAQLLAELGDDRARFASDDQLAAEAGVAPVTRESGKHRSVSFRFACNKRLRQALICFADNSRHASAWAADVYARARRRGCEHAHAVRILARSWLRVLWRCWQVRRPYDPSLHRSAQRLTSEVAA

SEQ ID NO: 269326 - protein, 398 aa, unidentified
MKYVGVDLHKKTISGCVVVKERGKKKIAARKRLECLDEAGIKTWFSELGKFEVVVEATASYEWFVKLVEPLAHRVVLAHPKKLRVIAESKRKSDKLDAQVLAEFLASDEIPLAYRPSPRVREHRTLVRWRYYLQRRLTSVKNKLRHILAGYNADVPHLFTAEGREHLAAVQLSAADRFVSEQLVTELDQHHERLVAANRRLREFAASAPLAEREARAVLDSIPQVGSVTADVILAELGDWRRFRSQAQVVSYAGLAPGFRESAGKAKQLGITKEGSRLMRWVMIEFAWRMVRTSRKWGGHYHRLEARIGAKKAVVAIARRLLGVIFALLRTGQKYALALECPPPASCRSKSPRDTNPSDPACLRGQPRQASSLGAGVNYGGPLSVPGKERPSAKKVSK

SEQ ID NO: 269327 - protein, 318 aa, unidentified
MNRLIERCAMLDIHKSQITACVRVPDGDGGRRQEIREFAATTSGLLTLADWLRSFAVTVVGMESTGVYWRAVYYLLEDEFECRLYNARHLRHVPGRKSDVQDAEWGCQLIEHGLVRPSFVPPRPLRELRDLVRYRKAKIQERTREVQRVEKTLQDAEIKLSSVASEVLGVSARRMLDALISGTHDPEILAELAKGTLRKKIPALREALQGRFTGHHALLIGQMLAQVDFLDETIATLSERIEELTRPFSRELELLDTIPGVDRRAAEMLLGEIGPDMSQFPTEHHLASWAGLCPGQRESGGKQHSGKTRKGSKCCAAC

SEQ ID NO: 269328 - protein, 336 aa, unidentified
MHRAGLAFASMSQNNKTNNNITFYAGVDIAKATLELNVGGTSSSLTNEAKGHARILKLLAAAEAARPGYKIHVIVEATGGYEAALVEALHHAGRRVSVIQPSRVRHFANAKNKRAKSDPIDAAILAAFGEAIQPPPTPPPSAAQTHLVKLVGRRAQLLDTRTAELNRSAHYNDKLLRTQSRQLLALLTRQIAQCDRAIAAQLAADEAMKARAERVQQVPGIGPVVAAVLQAHLPELGSLKEGEAAALAGLAPYDRDSGPRKGPRRICGGRAPVRCALYMAALSAVRHDAILRDFYARLCAAGKKPLVALTAAMRKLVELLNHMLSKPTFKLAVRPN

SEQ ID NO: 269329 - protein, 346 aa, unidentified
MNVFIGLDVSLASTAICAVSESGKILQAVSADSEPEALVRALGQIEGSIASVGLEAGPLSQWLHKHLSDAGFNTVLLETRHVKGVLKAMPIKTDRRDAEGIARLLHMGWFRPVHCKSISAQETRALLTTRKALQQSVMNLESSVRGVLRNFGLKIGSVTKQRFEARVRELADGNMMLEAAVDAILASRRALREQYSEVDARLVALAKGDAVCELMMSMPGVGAIIALTVKSAIDDPQRFKSSKDVGPWSGLTPKRSQSGEMDIVGHITKAGDASLRAALYQAATVMLNIAKPNWLSAWALRVAHRRGKRRATTALARRICVVLHRMWRDGRVFATTRERAISTKLA

SEQ ID NO: 269330 - protein, 401 aa, unidentified
MVSDFRKGRYNLMKIYVGIDIAKLNHFAAAISSDGEIIIEPFKFTNDADGFQLLVSKLESFDKNSLIIGLESTAHYGDNLVRYLVTELYQVCVLNPIKTCQMRKNNVRKTKTDKVDTYVIAKTLMMQDNLRFVSFFDLDMMDLKALGRFRQKTIKQRTRLKIQLTIYVDQVFPEIQYFFKSGLHQHAVYALLKEAPSPKEIASMHMTHLANLLKVNSHGHFTKEQAKELRVLAQKSVGANDSAISIQITQTIQQIELLDSQLEKIEAEMTDIMKFNDSVIMTIPGIGYINGGMILGEIGDIHRFSNPNKLLAFAGLDPSVYQSGNFQAKTTRMSKRGSRVLRYALVNAAWNVVRNNATFKAYYDAKRAEGRSHYNALGHCSGKLVRVIWKMLTDNVEFNLK

SEQ ID NO: 269331 - protein, 461 aa, unidentified
MARNNKKRKKPVRSLKTIQPDSAGIDLGSREHWVAGPPLEDNTPNVQRFGTTTPELLRLADWLKEQKVKTVAMESTGVYWIPLFETLDSRGFEVILANARQVSHVPGRKTDMLDCQWLQLLNACGLLRGSFRPSDDICRLRALLRERNTMVDQRSDWVRRMQKSLDQMNICVHHAVSDITGATGMAIIRAIVDGQRDPRILAQMRDRRCKKSEDQIAEELTGNWRAEHLFNLRQALKMYDQFCKVVSEYDEQILAYIKSLQPGVDDDQSAPPPASKSKASDIAKKGQEPMRQALYQLTGFDLTTIGGIGVDTAAVIISELGFDFSAFPDEGHFVSYLRLAPNLSISAGKKVPSKIKGTTTSRVAAALRIAALAVRNSKTALGAFYRRISRRKGASVAVFATARKLAQIIYRLVCYGQAYIDIGAKAYEAQFNNRRLKYYTKALKDMGYKVKPLAAEQAKAA

SEQ ID NO: 269332 - protein, 365 aa, unidentified
MYIIGIDIGKNHHEASIVSPEGKQIGHSLRFATTHKGADSLMSFIFNNIGNSSCIFGMEATGHYWYPIYSFLKARGYTIYVINPIQSDSLRKMYIRQTKNDSVDSFLIAEVIRFGQFTTTSMADENILAMRQLCRYRDSVISSRTEIKLRISTIMEQIFPEYEKQFSSLWLSTSMGILEKYLTPENIENAPIDELFEIIKDKSHNKLTMKKAISIREAAADTFGIKIAQDAFSFQLKQLIDRMNFLDKQIAAATILAEIGDINRFKSSSALVAFAGIDPTVRQSGEFSSTHNHMSKRGSPYLRHAIFLAATTCSFHNSPLNAYYKKKREQGKHHLTATGAVARKLTTVIYAVLRDGKPYEPKSFC

SEQ ID NO: 269333 - protein, 387 aa, unidentified
MQKPHDDSKACPTAFVQDTTLVAVVEMSLSSWLVAGMIPGVSREPLKKIDPDAEELLRRLYRWRDEAIAAGKEVTRIAVAYETGRDSFWLARWLRARGIDAHVIHATSVAISREHRRAKTDRIDTAMLKRGFLGWLRGEPGHCSMAVVPTVAEEDAKRPHRERDTLVRERTSIVNRMKSILIQFGVRNFKAGLRKASEKLDAVRTPEGIALPPNAIAALRRYMERFRLINEQIKAVEQTRLQRLERDPADKMNAMVFLLVRIIGMGVETAEQLVHEILFRNLRDRKAVARYAGLTGSPDESGSKRREKGLSRSGNGRVRNILIQLSWRMLKFQPESVLVLWFKTRTESSQGSRKPMIVAFARKLIIALWRYVNTGVVPEGFALRPTA

SEQ ID NO: 269334 - protein, 351 aa, unidentified
MSLPASAPLLCVGIDIAAQTAQASWLRPDQAPSPAYGFPQTPEGFAALRQRLRATGVPPAATRVVLEATGAYWCRLAVDLHQAGYRVAVINPAQAHYFAKAHLRRSKTDALDAQLLAQFAAQLAPAPWTPPPPVYHELEQRLQLRQQLLDARQVARNQLHALQAGAVVIASVAARLTAVVQFYDEQIAQVEAELKVQLPPRATGEAGAWAQNLRLLRTIKGIGPWTALWLLVATVNFSSCASVEQAVGYAGLAPSQHESGTSVRGRAHLPRGGHARLRTALYMATLSAARYNPAVAQFYERLRAAGKPKKVARCAAARKLLHQAWAVVQKQQAYEPHYGQRAVPGAPASAA

SEQ ID NO: 269335 - protein, 359 aa, unidentified
MIADRTFVGLDVHARSVVACAIDAVTGEVSRARLTPDVEGLWRWLQGLAGPVAVAYEAGPTGFGLARFLTGRGMRCVVAAPSKITRAPGDRVKTDARDAMLLARLLKMDELTAVMVPSVEAESARDLVRAREDCRSDLMSARHRLSKLLLRQGIVWSGGQAWTGAHDAWLRRQRFTESARQLAFESAYETVAMTLARRDRLDAAIAAMAADSAFTPVVVRLGCLRGISTLTAFGLAVEIGDWRRLTGSTIGSYLGLTPTEASSGASRSQGSITKTGNTHARRLLVEAAWHHRRQNRAGKVMLDRWQQAPVAARLRGQEGNQRLHARWRRFDARGKRPVIANVAIARELAGWCWSLAVMD

SEQ ID NO: 269336 - protein, 367 aa, unidentified
MKKVSTAAVKASRNFSQSKLTVGLDLGDRSSCYCVLDESGRIVMEQRVSTTAKGLQAAFGAMPRSRIALETGVHSPWISRLLSGLGHEVIVAHARNVRLIGESRKKDDRLDAQTLARLARIDPQLLCPVKHRSAKAQADLTVIRARAGLVRARTALVNTARGLAKSYGERLRGCNVRNMNREKAEGLSPELQTALEPLLACLESVSEQICEYNERIEKLAQDSYPQVALLKQIKGVGTLIALTFLLTLEDPHRFRKSRDVGCYLGLQPGRRNSGQSEPQMHISREGDPYLRTLLVQGAQHILGPFGVDCDLRRWGLKLAERGGKSGKKRAIIATARKLAVLLHHLWVSGEVYEPLHNSNRVALAAAA

SEQ ID NO: 269337 - protein, 459 aa, unidentified
MTLPPPAFAGLQTGNRGTRRRAPVSDRPGASLAAAGPSLPLPLQGAELSLALPEALFFTGIDWAEVTHAVCVTDAAGKITAEFTIEHSADGIAMLIRRLARHGDPADMPIGIERPNGRLVDLLLEAGHPVVPVSPNAIKTWREGEVLSGAKSDAGDAAVIAEYLRLRQHKLRVATPYSGETKALRTVVRTRDDLVAMRVAATNQLSALLGAYWPGAKAVFADVESPISLAFLTRYPAPALAARLGEKRMTAFLVKNGYSGRRTAAELLARLHAAPAGTADETLTEALRDAVLALVAVLTALNTGVKDLGRSAAAHLGEHPDGKIFTSLPRSGQVNAAQMLAEWGDCRQAYDGPDAVAALAGVTPVTKESGKHRAVHFRWACNKRFRKAMTTFADNSRHASPWAATIYNDARASGKDHPHAIRILARAWIRVIWPCLLHGTPYDPARHGAAVALTKPIAA

SEQ ID NO: 269338 - protein, 344 aa, unidentified
MDHFAGLDVSVKETSVCIVDEIGKIVREVKVASEPDALLRVLRNPAHHFKRIGLEAGPLSQWLYGSLAEAGLPVICVETRHMRAMLKAQINKTDRNDARGIAQMMRVGLYRPVHVKTLLSQKLRMLLTHRKLLQAKTIAIENDLRSTLRNFGLKVGMVGKVKFEGRIKELVENLPDLATLAEPLLIVRRVLHEQLSILHRRLLDIVRNDDVCRRLMTVPGVGPVVALTYRATVDVPARFRNSKAVGASFGLTPSRYQSGESDRPGAISRCGDEMMRVMLYEAAQVMLTRTSKWSWLKAWAVRIARRRGMKKAIVALARRLAVILHRIWVDGTEFKWTREAVPAA

SEQ ID NO: 269339 - protein, 346 aa, unidentified
MEYFIGIDVSLEASSVCVMDQSGAVVKETKVLSEPDALIAFVHGLDHEVSCIGMEAGPLSQWLYKHLTEAGLTIVLMETRQVKGALKAMPIKTDRRDALGIAQLLRMGWFRPVHCKSVSSQEIRALLATRKTLQGGAIAIELSMRGLLRGFGLKVGLVSKGLLDARARELAEGNSTLKALVTSMLRGRAALRAELIRIDKRLRDVARTDGACRLMMSVPGVGPLVALTVKAGIDDPGRFRSSKMVGPHFGLTPRRNQSGERDVVGGISRAGDAGVRTALYQAATSMLYHSSKNSWLRAWGMRVAQRRGMKRAVVAVARRLGVVLHRMWADGTVFRFSLADHPAKSV

SEQ ID NO: 269340 - protein, 411 aa, unidentified
MDVLIERCAGLDVHRDTVVATVRRPGPGGVRRSETRTFTTMTGQLETLADWLTEQKVTLVGMESTGIYWKPVYYVLEDMFPVWVINAEHLRNVPGRKTDVADSMWIAQLIEHGLVSPSFVPPRNVRLLRDVTRHGRRLTEERTRAIQRLEKVLQDAGIKLTSVASTILGKTGRAILAALLAGEEDPVVLAELAKGRLRPKIPALREALTHRFRLEHHGALIAQMLAHIDFLESAILETHQRIEVLLRPVADLVELVMTIPGVGRRTAEVLIAEVGLDMTVFPTAGHLASWAGICPGNNSSGGKRRPGRTRHGSMWLRIALTEAAQVAARGKGTYLAAHHAQIRGRRGTQKAIGATRHDILIAYYHIVRDRVPYQDLGPDWNNRRRSTEQQTRRLLRQLERLGVNVTLEATA

SEQ ID NO: 269341 - protein, 399 aa, unidentified
MKRVAGLDVHKDIIFACVTKGKYQSQVKEFDTTTSGLEELFHWLIGERVSKVAMESTSIYWMPVWRALEQEFTLYLVNPYFIKQMPGRKSDVKDAQWIATLLDKDLLRSSVVPDKTIRVLRSYLRRYAQLQGQTTRCIQSLERQLSQCNIKIASLTSTIASKTTLNIVEAIINGEHSVDVLMEKVHGRIIKSKGKEKVRKALQGIIEEHDIFLLRQIYQDYLHIERQCAELLAQAEIIADEHYSEQIALLQTIPGIKKLSAVIIFAELGGNIGLFKSASHLSGWCGLRPKNDESAGKIKSTSIGKGNKYLRRILVQTAWAASRTKECYLKEKFETLSVRKGRKKALIAIARKQLVITWNVLSKEEVYKEPTIILSSKQIEQKMKYYQTKLEKLSTHKVG

SEQ ID NO: 269342 - protein, 459 aa, unidentified
MSPRYKGKKKIPSASKTAPSLPVLQPHAAGIDIGAREIYVAVPPTSDPKPVRAFATFTDDLHALRDWLKACGVTSVAMESTGVYWIPLFQILEAAGLEVCLVNARHCKNLPGRKTDVQDCQWLQYLHSVGLLRGSFRPPETVCAVRSLLRHRDGLVRAAATCVHRLHKALTQMNIQLQHVIADVTGVTGLAILEAVLAGERNPVALAKLKDGRIRASTDVIARSLRGDWRSEHLFTLGQTLATWKHYQGQITAGDEEVARRLQGFTAKVDVAAQPLPARTSTHKSPQKNEPRFAAREELYRTCGVDLTQVPGLQSGTALVLVGELGPDFAERFPTAKHFGSWLGLCPDNRITGGKIMSSATREVKSRAATALRLAAQCLNSAQNYFGDLYRRWKARLGTPKAITAMAHKLARILWHLLKYRQAFNPEVFRKEEEKMRRKKLARLHNTAAALGLKLVPAQ

SEQ ID NO: 269343 - protein, 393 aa, unidentified
MSVVGIDVGRSQHVAAVCRDQAQEAERGVLRVASGREGFDQLDAWMARQGEVALVVMESSGHYWMPLASHLWARGQPVAVVNPLRAKYFAKSRLQRTKSDPADARMLAVLGMSTQPTPREPLAGGELREASRFVMTLVQEQAKVCQRLQRLIDLGFPELGDVFEDPGCASALAVLRVAPTAAAVRRKRAASLAAAKAPGGRRSLGARKAAELKALAERSVAPPELEEQVAFEISVLIGQYDLLESQIKGAEARLASLLDDDVARRLQSIPGVGPATAATLMAEIGDIWRFDDVDQLLAYAGVHPREASSGQKGSNPETSWHMAKSGNAHLRTAVYRMALVGTQHNPVIAAHYRRKREAGKSKMNALGHCMSKSLSLVWGVWRNGQPFDPSYRA

SEQ ID NO: 269344 - protein, 353 aa, unidentified
MRTYYVGMDVHRASIVIVVLNGAGKVVMQSVIETGAERVRGFLKQLRGKVYVTFEEGTQANWLHDVVRALVTEVVVCDPRHNKLLQSGNKNDRVDAQKLAELLRNRSLKAVYHGDHGVRTLKELVRTYDCLVSDTTRVMNRLKAIFRGRAIACGGHDIYRQDRRNQWLEKLGEPGAKQRAGFLYEQLAALKPLRHKAKREMVKEVRRQTAYGWLMSVPKLGAVSVAQLIAVVGTPHRFRSKHQFWTYVGLAVVTRSTADHEVVDGVLRRSKRPVSTRGLNRNHNHLLKRVFKNAATSACHSGPFKAGYDVRVTQGMAPSLARLTIARQLAATTLAIWKRGEQFDPERKKQQAA

SEQ ID NO: 269345 - protein, 343 aa, unidentified
MIIKHVSGIDVSKDTLEVGFGTLLDTQEQTIINPITVSNNLKGFRELLSFVRKNKGKSKAPLYFVMEATGVYYENLAYFLSDHKQHLTVILPNKSKSFANTLSIKSKTDKLDARKLTQYGLEKQLKPWELPSPMMKALKALTREHYSIKQMIVQIKNQIHAKNYSHKPLKETLNRSKESLRVFEKQILAIEKQIKELIHNDEDLNNRIQKIEKIKGIGFMSIVSIIAETDGFALINNGKQLTSYAGLDVMLNESGLKKHKTSISKKGNKHLRSALYMPALSASRFEPKLKQLYIRLIIKKQIKKVALIAVARKLLLLVYTIYKTNVDYIPDYHPGLRPQHTMS

SEQ ID NO: 269346 - protein, 363 aa, unidentified
MEVAGRYVGIDLGKRTYEMCIVDRKGKITRTGGKTDFAGIDRLCEKLNADDAVAIEACNLAFRIERVIRKSVGCKVCIMNAGRLAVIYMSTRKTDKEDSLKLAKLLKNHDEDELPIVTPPSDEAWERRKLLSEYRSLKGMRTREINKLHAIFEHNGYTQFVRKDMSNEKNRANILPLLKGYEKEEAERLIERLSVLEKQIKQLLHKINAEVEKDTKIQKAMTVPGVGPITALAYVAHVGDVKRFKNAHQVSNFIGFVPKVDNSCTICRSGHTTKRGNPLLRSLLVQAAWSTVRSKAGGALREKYTYMAETRCIGKGKSIVTTARKLGELLYLILKTDQDYKPQKFTIPESKISKLTGEALNCS

SEQ ID NO: 269347 - protein, 340 aa, unidentified
MNVKTIGMDLAKNVIQIHGADGKGNTVLRKQIKRAQVLPFFANLVPCQVGMEACGSAHFWARKLVAMGHTVQLIPPQYVKPFVKRNKNDAADAEAICEAVVRPNMPGVPIKTVEQQAILSVHRARQGFVKARTAQANQIRGLLAEYGLVIPVGIRHIPSCVALIIDDDENDLPMSFRHLLQMLVEHFKALDEQVGKLELEIKYWHRDCAASTQLATVPGVGPITASALVASIGDAKNFKNGRQMAAWMGLVPRQHSTGGKTVLQGISKRGDSYLRTLLIHGARAVIRVSEHKIGADPWLKALVARRNKNIAAVALANKNVRVIWSMLTHERDYVPNYVHA

SEQ ID NO: 269348 - protein, 422 aa, unidentified
MSYCPVAGIDVSKRFSDMCILSPDNKIFAQEKIYHDETSINRANALLQKAERLFFSKPVIVMESTSHYHLILFQFFSEHGYDVIVVNPLQSNSMKDFSIRKRKTDRVDAFKLAMMYRTKTLRPSQIPQTATRALRQLCRHRAELLNDVSSYKNRLTALLDQTFPGYDKVFSDVGGVTSCAVLVRFPTPTILLVEGESELVEVIAAASKSGYSFAKKKAGLLISAAQKAQTLGIHSCADETLVVCAIQMLRTLSESVLQIEAAIDNLLAQIKEMRNNVSLLQSIPGIGSHSAALLLGEIGDISLFKKPKQLAAYFGLDPTERQSGSFRGTKNKLSKRGSPYARAALHMGVVNSICKRGKDSAANPVLLSYYEKKCKNKPAKVAQAASMHKLVFIIFAVLRDQKPFELKTPEQHAVEQGFVKAA

SEQ ID NO: 269349 - protein, 382 aa, unidentified
MQASTIDTPTAEHCGTIFVSVELSQKTWLVTLHSPDRDRISRHKLEGGDHVGLLGLLESIGTRAALRLGTVPKVVSCYEAGYDGFWLHRLLTAAGITNLVFDPASIAVEQRSRRAKTDRIDGELMLRTLMAHLRGEPRVVRIVRVPSVEQEDARRASRERDRLIKEQTAHTNRIKALLRLQGMAVGYPRRGNWLHWLAQQRDWQGQPLSPHVLAEVTREHARLMLVREQLAALEQAQATQATVVPAAMAERRDLLQRLKALGPAFAATLTNEVFYKDFRNRRQVGAYCGLTPSPWRSGGIDREQGISKAGNPRARLKAIELAWLWLRHQPESELSRWFRTRTASAGKRAKRIAIVALARKLIVALWRYLTTGLIPAGAIMKA

SEQ ID NO: 269350 - protein, 412 aa, unidentified
MKKNINRSQTKKLDSTSKSKLVHKPSLSLNVQMLKNKMARTDLTTAERLKRQVVKRKTVFFYIGIDLGDKKSNYCVMNDQAEILAEGILATTAEEFNAYFSALSRSRIALEVGTHSPWINALLEDLGHEVYVANPRKMESIQKSKRKNDKEDARKLARLVRADPELLYPIRHRGVEARQDLILLRARDAAVGSRTKLINCVRGLVKSIGGRVPKCSAESFGNHAEKALPESIRESLLPLVEQIAVLTAVIKKYDKAVSKKSSEQYPETMLLEQVNGVGPVTSLAYVLTLEKPERFRKSREVGPYLGLVPKQDDSGESSKQLRITKTGDVMLRRLLVGSAQYILGPFGADCDLRRFGLKLAERGGKNAKKRAITAVARKLGILLHRLWVTAEEYEPLRNTQLQEMALTSVVNL

SEQ ID NO: 269351 - protein, 341 aa, unidentified
MDPQGRIAHQARYDHDVAGLAGLTAQLGRHGPVTGIAIERGEGLPVEMLQDQGHWLFCVSPKMSARARERYRVAPGKSDAFDAFVLADSLRHEHRHWRPLAVPSPLLAELRALTRDRERLVWNQRDTENQLRAVVLAYHPAVLGLFSTAGKAFAMLLFIDQLELVNGQVRAITRRIGELLAGHPDAAVFLSVPGMGQITAATMLAEMGEDRARFPTPDTLLAETGTAPVTRASGRSRTVRFRYAANKRMRHAIDWWAFVSVREIDWARDAYDQARARGQQHNRALRGIGARWVRILWRCWTDSTPYDPARHLKGSTARRTATRKLPATPGRELRHHARRQH

SEQ ID NO: 269352 - protein, 406 aa, unidentified
MDKDNIVVFWIDVSSRKSNVCEMIGQDHVIKSYEISNDQVGFNILLNNLKVFAQKPEIIFEATGVYSERLQSFLDAYHFGYCRLNPLKAKQQLMRFRVNKTDKHDAYRLANSQYIFHRQPEYQMASIYKKLKTLGHYYDQLTHDLVIAKNRLHLVLQESFPDIERLFATLKGENYWQCIIKFTHPELVKTAGLDNITKQLMTLKGVGHHRSTYLVQRLLNLASTTYPSVPVDFPQVDQARDYAQHLITLTSKRKEVVTQMITMARQLKHDDLSILTSIPGISNTTAVLLLGTLGDIRRFRNPNALNAFVGVDLRHYESGQFITADHISKRSNTMVRKILYRTIGQMASASHYHQCHIADYYLQKKKSSQSWNSKKIAIAAVHKLIRTIYHLIIYGQKYDYQLAKHC

SEQ ID NO: 269353 - protein, 428 aa, unidentified
MTTQQLTPPQGVLAAIDVAKARNEVLIEIPGHARRRRLTVPNTRAEHDRLVALLSGLDQPVTCGLEATGNYHRPLAWRLRQAGFEVRLVSSVALARTREALHNGWDKSDPKDAQVILHMLRIGATQRYHDPLAAGINDLQELSKTHEAISRAKTEVLHRILTHYLPLYFPEIDRFRHNSRADWFFAFLDRFPTPASITALSKEAFVAAAWDVVGRKVAKQRLLGDIYETAQASIGLPVPLDVPAVRMFRLVIAEARSLIRQRDAIEAIADELLGGSSDYRLLRQIPGVGPITALTILAEAGDLRRFGHHRQFLKFCGLDLATQQSGTFRGQTKLSKYGNARLRRALWLAGQVAIRQKENSFRDKFERYITRDRHDADLRRKALTAITAKMARVVHAIIKSGADYRPFVEAARGSVPGGRTPLSRAVRA

SEQ ID NO: 269354 - protein, 368 aa, unidentified
MKKVSTAVAKQSRNISQQKLTLGLDLGDRNSWYCVLDEAGQIQLEQRVRTSAKALREVFGTMPRSRIALETGTHSPWISRLLGELGHEVIVANARKVRLIGESRKKDDRLDAQTLARLGRIDPQLLCPVKHRNAQAQADLMMIRARAGLVRARTGLVNTARGLAKSYGERLRGCNVRNLNPEKAEGLSSELQRALEPLLSAIEELSEQIREYNERIEKLAQESYPQVALLKQIKGVGTLIAVTFLLTLEDPHRFRKSRDVGCYLGLQPGRRNSGRSEPQMHISKEGDPYLRTLLVQGAQHILGPFGVDCDLRRWGLKLAERGGRNGKKRAIVATARKLAVLLHHLWASGEVYEPLHNSSSRAIVTAAA

SEQ ID NO: 269355 - protein, 339 aa, unidentified
MQLYAGLDLHSRNTYIGIMDKEFKRVFGKRVLNKLPVIVKTLAPFQDQLQGIVVESTFNWYWLIDGLMDAGYQCVHLANPSAMKQYEGIKHTDDQHDAFFLAQMLILGILPQGYIYPKEDRPVRDLARKRLFLVRHKTSHILSLQSLIARCCGQRVSANEIRKFTVEDLQRLLEQEYIVLSAQANLDTIVFLKQQIQQLEKAIQKKVKLNKAFQQLLTVPGIGLILAMTIMLEVGDIGRFPQVGNFASYSRCVPANRLSDGKSKGHGNRKNGNRYLSWAFTEAAHLSRRYNESFRSYYNRKVAQANTSLATKALSNKLARICYYLMRDQVPFRQELLSH

SEQ ID NO: 269356 - protein, 338 aa, unidentified
MSIKTLGVDLGKFGCHVIGQDQHGKVVEKRKMSLAKFAEYLANLPPCAVFFEACGGAHYWCRKAKSLGHRSEMIPANFVKPFVKSNKNDFNDAEAICEAAQRPTMRFANIRSEEQQAFGCLLKLREQIVDERTATSNQAHAFLLEFGIQQKKGRGFIGAVAQLITDEDNKLPQALRCTLSRLVERYKVIDKEVSEVDREIANFNRQSDNCKRMQSIPGVGLITSSFIEAWAGSCTQFKSARDFAAWAGLVPKQHSTGGKSNLQGISKRGNNTLRKYLIHGARSVIQWKLEENHAWSPWIKKLLCSKKKTVAVVAMANKLARIIWAVLTKEQNYAAQAA

SEQ ID NO: 269357 - protein, 338 aa, unidentified
MATYAGIDLHSSNNYIGIMDQDHNRLFGKRLPNSLDKILMVLEPFKPDLKGIIVESTYNWYWLVDGLQEHGHRVHLANPSAIKQYEGIKHTDDKWDSFWLAHMKHLNILPEGYIYPKEQRAVRDLLRRRLFFVRHRTANILSLQSTITRNLGIKMSSNAIKKLDMDDARKLFDCSNLAFMAQNNISTIKHLAKIIKGIEKQVRPQVDLRKEFEMLTTIPGIGLILGLTIMLEVGDIGRFAKVGNYASYCRCVESKRVSNGKKKGENNKKNGNKYLAWAYVEAAHFAKRYIPKAQRFYQQKMAKANGAVATKALANKLARASYFIMRDRVAFDEDMLFR

SEQ ID NO: 269358 - protein, 435 aa, unidentified
MQEVEDEPLFCERAAGIDIGKKMIMVTIRVPSESRKGGRQQETREFGTTRRELLALADWLRTWQVERTGMESTSDYWKPVLFLLEREGLDCLLYQASQVKALPGRPKTDKLDSVWLAKITEQGSLAGSFVPPEEIRRLRTHTRYRRKLVQMRTAQKERCEKLLEDGHLKLSSVISDIHGVSGRDMLRAIAAGERNPKVLADKARGVMRGKIKELEQALDCSFFTEEHAFILQMMLDSIDQLTAQVTVLDQKIAEMCRPYERQIEQLDGITGFGVTTAQDLIGEIGVDMRVFPTAGHLASWARQAPRVTESGGKRKGKNATGRGNPYIGGTLGEASISVGRTQTFLGAKYRRLCTHMPKKKAQGAIMRTQLVIAHALLSDPAAEYEDLGPDYYERKADIRRRARSHARALERLGYKVTIEAADPETGEYLPIATAS

SEQ ID NO: 269359 - protein, 407 aa, unidentified
MYNAVGIDVSKGKSTVAVLQPGGVIVKKPFDVAHSISGLKELTDYIVSLDGDTKAVLECTGRYHEPILRSLSEANIFVSAVNPHLIKDFGNNSIRKVKSDPADAKKIARYTLDNWADLQEYSSMDNTRTQLKTLNAQLDFFTRQKASAKTNLISLLDMTYPGLNDLFSSPARPDGSEKWVDYAASFWHVECVRGSGLKTFTERYKAFCKREGYNFSETRAKTLYENAKELVAVFPKDRSNKNLIEMAINQLRSLTECTIRLKNEMDELASTLPEYSTVMEMNGVGKVLGPQLIAEIGDVSRFTHREAITAYAGVDPGVDQSGKRASKSNRASKCGSARLRKALFLVMSVLLQTKPDDAVYHFLDKKRAEGKPYNVYMTAGANKFLRIYYGKVKAALAAQANSNSNQS

SEQ ID NO: 269360 - protein, 343 aa, unidentified
MEYYAGIDVSLESSSLCVVDATGRIVRESKVASEPEALIAWLQSLGFDLARIGLEAGPLSQWLYAGLKQAGLAAELLETRHVRNAFKIMPVKTDRKDARGIAQLMRMGWFRSVHCKSLPAQETRSLLGARKLLQSKLHDIELSLRGTLRGFGLKVGKTTPKTFEARIRTLVADHPTLTLIAEALLRARAVLLDEFIKLDKKVHALARQDPRARLLTTAPGVGSMVALTYAAAIDDPARFRSSKTVGALFGLTPKKYQSGETDITGRISKTGDAAVRTALYEAANIILERPVKGGWLKAWALGVAKRAGMRKAKVALARKLAVVMHRMLVDGTPFDLNRVTATA

SEQ ID NO: 269361 - protein, 389 aa, unidentified
MERPLQKLNDLSRSSSPLDPDRTLIAVIEMSLSSWLVAGIVPGVKRQPLKKLAVDESALLKLLHRWREEAAKAGYPIKRIAVAFEAGRDGFWLARWLSARDIEAHVIHASSVAVSREHRRAKTDRLDTELLKRSFLGWLRGERDHCKMVAIPTIEDEDAKRLHRERESLVGEQSRIVNRMKAALIRLGIRNFNPKLKKAAERLDSLRTPEGEPIPPNTLAELRRDMARRQLVSNQLRQIEHARLERLKQAPGDGPHAMVRLLARVIGVGVETADMLVQEVLSRSMRDRRAVARYAGLTGSPDESGRRRREKGLTRSGNARVRRGMIQLAWRFLMFQKESALAQWFRGRTESAHGTRKTMIVALARKLLIALWRLVRAGVVPDGVALRPA

SEQ ID NO: 269362 - protein, 387 aa, unidentified
MIYYVGIDISKYKHDFCIISNTGEIIVENSSFENNKKGFQFLLDQLKPYNKSNVHIAFEATGHYSLNLELFLIDQGYSFIKMNPLVIHQFLKARSLRRTKTDKADSITIANYLMSVPYKPNSDLLYHTYTLKSLCRSREQLIKERSKFEVLLTNELDKTFPELKPFFKDKISTTLLYIVDKYKNINHISLMKDYDSLRKISHGKFSYANFAKLKELAKNSIGHFDENTDLLISTYVSLINDFNNKIDPINKQISTIIKELNPRMLTIPGLGEISAATILSEYGDINNFSSPSKMLAFAGLEPSIIQSGTLASNGKMVKHGSGHLRYSIMNIAMTILRYSPQFYDYYLKKRSEGKSHRVALSHVCKKLIRVIYTLEKNNINFDSSLLK

SEQ ID NO: 269363 - protein, 424 aa, unidentified
MIPVPSLRALRHKLLYLEGILKIKHMDRSRTVPGLDVHKDTIYLCIMGHDEAIIFEKTYGVLTTELRQMCNDMVEHGVTEAGMESTAVYWVPVWNELCESMDLKLVNPYFIKQLPGRKSDVKDAQWIAECLLKNLIKGSFVPGPIVQDMRKLNRRIMDLNEDINYNSNKLDAAFQRCGFRLSNYVSGTNSKSYQKVLQAIINGERDPEVLVKMVHGRTTNKHGKGTIKAAVMGSFSQTDITVFRQLKEMLDTINRQIDECQKELTDLCEKHFPEEYKRIQTIPGVKERAATAIIAETGVDMKMFATAAMLVGWCGLKPRNDVSNGRYKSRKVTHGNKYLRRILIEVAWAASRKKNCFFSNFSYVQVTQKHKSKMKIQVAIARKILVAVWHMLSKGEDFIDIYHRRLEQQRQMEEQLKSLASKMA

SEQ ID NO: 269364 - protein, 413 aa, unidentified
MELDVIVERCAFLDVHRDTAMACARTPDGHGGRREEIVEFGTTTSQLLALADWLAERRVSLVGMEATGVYWKPVHWVLEASVPEVWVINARHMRNLPGRKTDVADAVWGASLLEHGLVRPSFIPPEPFRALRDLTRYRKSVIEERARESQRLHKVLEDAGVKLSSVASSVLTKSGREMIDALIAGQRDPEVLAEMAKGRMRSKIPQLQDAMAGRFNEHHALLCRAMLARIDQADATVATLTDRIDELLDPYEAAVTLLVTIPGVAQRNAQVILAEIGADMSRFPTAGHLASWAGMCPGNNESAGKHRSGRTRHGSKWLRKALVEAGQAAGRSKDTYLAAQYAQIRGRRGPQRAAVAVGHSILVIAWHLLSTGELYNDLGGDYFDKRRNSPARQRRLVAQLEAMGHKVTLEPAA

SEQ ID NO: 269365 - protein, 336 aa, unidentified
MDFDGLIDYYISTFQNKEDGDMEEVIIDKGCGLDVHKETVVGCVMGSGIKKEIRTFSTMTGDLFRLKAWLSEKGITHVAMESTGPYWKPVFNVLEDSFEVILANARHIKNVPGRKTDVKDSEWICKLLRSGLLAASFVPPKAIRELRDLTRYRRKLTQSISAEKNRVQKVLEDANVKLSSVVSDTFGVSGSRMIEALMAGNLSVDEISDLAIGKLKGKKEDLKKALVGNFQEHHRFMIQASLDHVRSLEKIIANLDQEIDRKLEDYHQEYELLQTIPGVKEQGAASIIAEIGVDMERFPSEGHLSAWAGMSPGNNESAGKKKVERRPMAIRTCGQY

SEQ ID NO: 269366 - protein, 406 aa, unidentified
MRVLYERCCGLDVHKQSITACALTPEGKEIRTFGTLTDDLEELVDWLKEKKVTHVAMESTGVYWKPVYNLLEAEPIEVLVVNAQHIKAVPGRKTDVKDAEWIADLLRHGLLKGSYIPHRAQRELRELVRYRRSLIEERARELNRIQKVLEGANIKLSSVVSDINGMSARLIIRALIEGKNDPAALAQLAKGRLKQKTEELRRALKGMIGPHQRMMLAEQWRHVEYLDEAIARLDREIEERTSPFHEALELIDTIPGVGRQSAEQIVAEIGTDMSRFPTAAHLASWAGMAPGNHESAGKRLSGRTRKGNKKLRSCLVECARAAARTKNTYLSAKYHRIAKRRGANRASVAVGRTILEMIYYILTRKEPYRELGADYWDRQQEARIVRQTVKRLEGLGYEVKLEKTSA

SEQ ID NO: 269367 - protein, 447 aa, unidentified
MSNTTSRARNVLTRGDRRRNAKLARLRSIVRADLAIVGIDLASAKQAAVVTDHDSITLARKMFDGDPWVIDDIIDWALPVAAEAGFAGIVVGCEPTGHRWKPVLERCRARDIEVVCVNPMLVHRGREEEDFTRDRSDFKDSTIIARRVADRHCYIPYALEGNWCRLRHLGARRNDQLVEAGAARQQLRDLLECVWPAVLTTAGQPLRSMTWRAAMAVSCDPAEIRAMGWDDFTAAVTVELGRWGGKRRNLGILRAVWAAAHTPGGVERERAAAVERAADAIRDWRRALDELDDVEARMVGVLDDLGLVELVCTIDGLSPVGAAAILAETGDPARFDCARTWVKHAGLCPRANESGTFAGTTKVSGRGRPALRTAAWRAVWGALPHNAVYAARYHHLRTRVDNPLRDGQARAAIAAALLRQLFVVVTRRVAWDPTIAAGHQEVTATAA

SEQ ID NO: 269368 - protein, 332 aa, unidentified
MKRTHSTTKKQAGKLGKAMAKSLNVGGVDVGKFELDAAIDGISSKPLRQKNTPQGRAAIIAFFIEHGVERVGIEASGSYEFEMVDAMREARLKVTVFQPAQVRAYARFRKLRAKTDPIDAALIAKCTAARGEELDTPDPRLPPLAERLTFIDQIAEDIGRLRTRLDRFRDERLIGTIKDEIARLTKLQKAERTSLRKEVRAHPDLLKRYRLLISIEGLGDPTALTLLIRMPELGHLTREEAASLAGMAPFTQQSGRWIGKARVAGGRSRVGKALFAAAQAASQRWNKALVALYQRLTESGKHHSVAVVACARKLVVYANTVLERGTPWLMQD

SEQ ID NO: 269369 - protein, 366 aa, unidentified
MNFIGIDLHTNRFTCSYRDEQVSAGKKKGVLKTFDLNERGLATFFQTLTAETYVLVEATIDTFCFVRLFNDRVKEVFIANTYELKQISLARNNTDKIDADILCRIVKAQILSGEQQISPVVMPPVEIQELRSLFTTYRLYKKQTTQAKNRVHSLLKERLYGFTQEEIFGKKDREKIRRISPGSPMQFQVNQLLDRLERDEADVEALEEQILMQAEPYMKEIDILTSMKGVSVFIAIAILADIIEVSRFKNSKAFTSYLRSAPRVANSNTSEKTRGTNKKGRKLAATLLTQSLNHVLDSSSKLRRWYEHLCEHKKPGMVRTGLRRRVLAEIFQMLKKGEYHYGMDEQNHEAKMKQYRNFLKKSKISA

SEQ ID NO: 269370 - protein, 343 aa, unidentified
MAQQTIIGIDLAKHVFQVCMVTPQGTIKTNTTVARGKLFALIARQPPALIFMEACGGAHDWARRFCALGHEVRLLAPQYVTPFRRGQKNDPNDALALTEAGQRPNLPTVPIKTIEQQDLQALHRVRERLVKHRTAVVNQVRGLLLEYGIVIPQGIARLRKRLPRVLEEADNGLSFLMRDLLQSLQSELSALDMRITDVTGQLTRLSHELEACQRLQAMEGIGPLSATALVAALGNGHDFQTGRQVAAWLGLVPRQHSSGGTTRLGGITKGGNSYVRRLLMHGARSVISHVRDKPDAKSAWIRQLVTRIGVNKACVAVANKMARVAWALLHTGESYRTSEVLAA

SEQ ID NO: 269371 - protein, 400 aa, unidentified
MISVGIDVSKGKSTVCILKPYGEIVSKPFNITHTQKDLSELSSMLFRLNDEVKIVMEATGIYHLPVLTYLQEKGFFVSVINPYLMKSYRNESLRKAKTDKIDSRIIANYGIDHWFKMKEFQISGVIYEELKLLGQQYRHYMKLHLLSLAELTHLLDLTMPGIKNLLASWNETNRKDKRSDFVERFWHYDVITSMSEQEFTEKYILWAKEKKYVPSQEKAKVIYNLAQESIPTLPSETSSVKMLVTEAVRVLKEVDATLGLILSRMQEIAKTLPEYSVVREMGGVGNTLAPKLIAEIGDVRRFRNGKALVAFAGIDPPPYESGQFVGCNRKISKRGSASLRKVGYETMRSLKMRSRPEDPVYRYVVKKESEGKSKKSAKIAGLNKFLRIYYARVTELYKNI

SEQ ID NO: 269372 - protein, 331 aa, unidentified
MKSKELIGIDVSKNVLDVFILGVSYHFVVENSPAGYAKLLETCCIKLTCKKDQLFFCFEHTGRYSWLLSIFLSESSIVYAKVPAMDIKQSRGLTRGKSDKKDAQMIARYAYRKRDELIPTELHAPEVGQLRQLLSLRNKLLRHRTAYKNSIKDLQDCFMEGETDFIRVTQERLIKNINVEIDNVEGQIDTIINSMPDWEKNYRLMQTVKGIGPVLSRYIIIYTENFTRFTDPKKFACYAGIAPFEYSSGTSIKGRTRLHPCANKQLKSLLNIAAMGAVRLKGEYKTYFDRRTEEGKNKMSTLNIIRNKLLFRVFAVVKRQTPYVDLTMFAA

SEQ ID NO: 269373 - protein, 370 aa, unidentified
MKETITSFIGLDVHKNSVAIAVAEAGRQAPRFVGTVPSSMSTLCKTLRGVCRAEHTLVVYEAGPCGYGWARHLRAHGWSCEVIAPARIARSPAEQRIKTDRRDALLLARESRAGNLVSVVMPDTSDEAIRDLSRTREDACAARLRARQQLKAMLLRHGHAYQGKSSWTAAHERHLSTIRFAHPAQQIAFEEYRQAVKEAHERVERLTEQLREQCAHWRMNPLVKALMCLRGFDFVAAVTFVAEVGDLRRFSHPRELMAYLGLVPSEYSSGETRHQGPITKTGNKHARRILVEAAWNYRHRAWVSRVLEVRQQGQSKASRDIAWCAQLRLTRRFAHLSMRRLPPNKVCVAIARELAGFIWDIARQLTPTLA

SEQ ID NO: 269374 - protein, 315 aa, unidentified
MAQNQLAVVGIDVAKDKVDLCIRALAVRQTCPNTAQGRRKLVAWLRRHQVGKAVMEASGGYEREWRKVLHDAGIEVRIVDPKRVRHFAQSAGRLAKSDTIDAEMIAWFAETPSQTHDAAQEELAALVKARLALVELKIRLQSQSAHASPGPVQKAQARVLKSLATEIEKLETAIAAKVKATPHLAERAEIIESVPGFAETTSAILVAGMPELGQVNDKIAAALVGIAPYDDDSGKRRGERHIKGGRRWIRNAIYMPCLGAATQNNPVAKAFYRRLIAKGKEPKVALVACMRKLICILNVMIARHQKWDTARYAPA

SEQ ID NO: 269375 - protein, 449 aa, unidentified
MDVTYTHCAGLDVHKKSVVACCITPGVKGEKQHEIRTFGTMTADLLALSDWLLSKKVTHVAMESTGEFWKPVYNILEGNFELLVVNARHIKNVPGRKTDVKDAEWIAELLRHGLLRGSFIPPQAQRDLRDLTRQRTNLVQDRATVVNRLQKVCEWSNIKLSSVATDITGVSARAMLEAILEGRTAPQALADLAKGRLRNKRSELERALNGVVRDHHRFMLAQHLTQIDFLDEQIALFDEQIALHMAQTDTDNAQQPPSLPAPPTDTPEGTTIDAPSLAAAPPSWEEAVELLDTIPGVNRRTAELLLAEIGADMSRFPSAAHLASWAKVAPGNNESAGKRYSGATGHGNRWLRTAIVQAAWAAVRVKNSYLSSVYHRIAGRRGPRRAIFAVAHRMLTAIYHMLTHREPYRDLGATYLDERNKANLLKRTVRRLEQLGYKVNVEPIQPATA

SEQ ID NO: 269376 - protein, 356 aa, unidentified
MNNLSKLDFTGQHLYIGMDVHRKSWSISILTDRFEHKTFTQPPDPHVLVNYLKRNFPGATYHAAYEAGYCGFWIHDRLRELGVECTVVNPADIPTKDKERAGKTDKIDCRKLARSLRNGELEAIYVPARVQVEDRSLLRTRRTMVWKQTRCKNQIKSMLAFYGIHIPEGFTQNYWSKRFINWIEEIRMERASGNVALQVHLDELNHIRRIITDLNRNIRALAMTDEYRANVRLLKTAPGISTLAAMTLLTELYHIGRFRSLDNLASYVGLVPNTDSSGEKDVTTGITNRRNSTLRGLLIESAWVAARKDPAMIIAFERLCKRMKKTKAIIHIARKLLNRIRYILKNQMEYVPAVVQ

SEQ ID NO: 269377 - protein, 433 aa, unidentified
MKVLYERVAGIDVHKDMIKVAIRSPGEKPWTRKTEILEFRTFYGVLQEMARELRRRGVTHVVLEASGVYTEPVYYALAEQDFTQVAVINPAHAKALRGHKTDAKDCARLAELFECGLLRGSYIPPAELKEVRDLTRYRMKTVQARTSEIQRLGKALESAGIKLGSVASSITGTASTAMIEALIDGERRGQVLADLAIGRMRTAGKLADLSMALAGRFTGHHALLCRLHLDRIAVFDDAVDGLDKQITGKAARWQRETGLLTSVPGFGDVVAQAWLGEIGPAPHRHFATHEKLASWVTLCPGNNISARKRKHGRTGDAGTYIKPMLVQAAWAAIRVRGRLQARYNRLVRRFGGEKNPAAKKKAITAIAHTLLKIAYQVLKSGTPYQEPGADFYTRRESPQHRQAWLERQLQKLHPGCTITVTISPPEAALAPGA

SEQ ID NO: 269378 - protein, 336 aa, unidentified
MDNIEACGVEVSARELVVARRGKSGVQLKCFANTAAGHRQLLRALTRGGQRVRVVLEATGLYALDLALLLSAHPQVQLMVANPRAVRHFAQAMMQRSKNDRLDAVVLLHFAERMPFTLWVRPQENTLALWAIARRLQALTKLCTAEKNRAHAMSLSEAIPATVRRDIARSLQFHQRAMKKLRQQTLQCIAADATLQQRYQLLRSVPGMGEISAVQTLAELLLVPADRDVRQWVAYAGLDPREYSSGTSVRKYTRISKVGNAHLRRALYMPALVASRVEPHLRGFYEHLLARGKRKRQALLAVARKLLHAIYGMFRSLRPYDGTRVYLPPCFAEKSS

SEQ ID NO: 269379 - protein, 408 aa, unidentified
MNEYAAYLGIDWADKKHDLCLFDVATGKKTKLVLPHTPQAIAEYFTGLRLRYPGQPIAVALEQSRGPLLFALLQYDFLVLFPINPTTLAKYREAFSPSRAKDDPSDAEYVAKLLLHHSDRLKAWHPDDDQTRTLRYLVEHRRRLIGDRTRITNRMTSLLKCYFPQVLSWFPDLSTLLVCDFLWRWPALERLRGVKRTTLLNFFRAHHSVRAVTLEKRLAAIKESVPLTTDRAIIDSSVLMITALAAQLKTTIAAVRQFDLEIEKLCAAHPDFPLFQSLPGAGQVYASRLLAVMGTDRTRWTTAADLACLSGIAPVMERSGQSGWIRWRYFCPKFMRQSFHEYAGESVKHSFWARTYYEQQIAKGKSRQAAVRALAYKWIRIIWKCWLTRTPYNEVKYLESLRKKGSAA

SEQ ID NO: 269380 - protein, 444 aa, unidentified
MPKARKRYVGLDVHKDVVEYCILDSEGKKLDGGNFICEQPILVNFAKNVLSPKDQVALEATMNTWTIVDILEPFVEKIAVGNPLKTKIIAEAKVKTDKVDAMILAQLLRSDFLPTVWIPDKPTRELRRICSFRKSLVQETTATKNRIKGILNHLLIKHAVAWSQRGLEELRSLALPPVERMIMDREIDILEHQELQVEKVELEIQKLAYAEDNIRLLMTLPSVGYNTASALLAVFGDISRFKDADHAASYLGLVPQVKQSAGTCYYGPITKTGSSLARGMLCEAAQTLFLNDGPLGVFVRRVREKKGGGKAVVAGARKLATIAYHILKNKEPYRYAMVNSTREKLRVLRRKAGGAKLASQQYHRDDKVRRNRPEGDFEVRYVPPLADVYKNEGLPPALTFAELSSGEQRVLKEMGVAEKVLANEKVGMIARPKKATSLSKQSGQ

SEQ ID NO: 269381 - protein, 366 aa, unidentified
MAITHVALDDSKRVIVAGILRAEATQPELREIPNDPRQVRRLFERLLHDGPVRACYEAGVSGYDLYRQLTGLGVECAVIAPALTPRKPGERVKTDRRDAAKLVRLFRAGELTEIHVPTEAEESVRDLTRCRDDIRADIVRWRHRVLKFLARHGRVYQTGKNWSQAHWTWIRAQRFEDIALERTLEASLDALEHAMRRRTDLDRVIEALAGDAPYRDAVNALRCFRGINTLSAMILVAEIVDFQRFRRPRALMAYLGLVPSEYSSGERHRRGALTKAGNSHARRVLVEAAWHYRHRPGLGNRLARHTADQPPVVVAEAWRAQQRLHRRYRHLLGHGKRPTVAVAAVARELAGFVWAAMTQAPARATA

SEQ ID NO: 269382 - protein, 408 aa, unidentified
MYNAVGIDASKFKSTITVIQPAGVVIRKPFDVLHTSGELNTLVTYLQSLEGETRAVIECTGRYHEPVVKSLSEAGIFISAVNPKLIKGQKQNSLRKVKSDPADARKIARYALDNWAELRQYSSMDTTREQLKTLNSQFDFFMKQKVAAKTNLISLLDNTYPGVNKLFDSPVREDGSEKWVDYAYSFWHVDCVRKIGLKAFTERYEAFCKKHHYNFQKGKPAELYEASKQLVAVFPKEKSYKLLIQQSIQQLNLASEHIEILRKEMNQLASTLPEYDTVMSIYGVGETYGPQLMAEIGDVSRFTHREAITAFAGVDPGVNESGQFKQHSNRASKNGSTRLRKTLFQVMSTYLQNKPVNEPVYQFLDRKRAEGKPYLVYMTAGANKFLRIYYGKVKECLRNLEQESNEES

SEQ ID NO: 269383 - protein, 411 aa, unidentified
MRLFVGDDWAEDHHDIEVMDEAGKVLAKRRLPEGVAGMTQLHALIGRFLPEDADDAEVVTGIETDRGPWVAALIAAGYTVFPVNPLQASRYRERLGVSGAKSDGGDAHMLADMVRTDSHQLRPAAGDTPEAEAIKVVARTHKTLIWDRTRAVQRLRHQLREYFPAALEAFEDLDASDVLELLAKAPDPARAAKLTRAQVAAALKRARRRDIAGKTDAILAALRGEHLGQPAALTAAYAATARSLIAVITTLNAQVKILEEQVREHFGRHPDAEIYQSQPGLAAILGARVLGEFGDDPRRYVTAKNRKNYGGTSPITRASGKKKVVAARFIHNDRLVDALMSWAFSSLKASPGARAFYDEQRAKGHDHSDALRRLANRLAGILHGCLKTRTLYDEATAWGHRENLPQSSAAA

SEQ ID NO: 269384 - protein, 369 aa, unidentified
MSKYDIPFPFEFKNNKEGFNKLASTIDPFKDYIVGFEDTGHYGDNLLFFLLNNNFKVGLINPITIKMKRKSKLKTAKNDKLDTMLIAQALIHKDEYRLVTMKTYHLRELKKLTRHHHDLKEDLNIYKNRLQKTIDLVFPEFNSLFGSKNGVTYMHLLERFRSARTISKTDIRTLRKALEPVGNGRSVSFSAEELKELASNSIGEKSSSSEFQVKHLIGSIQMMEEQIVEVDAKIKELSDQLNSPITSIPGIGTFSGMSILSEYGDISRFDSAAKLISFAGVAPYVIESGQFEAARTYITKKGNPYLRKTLYQIALPVIRFNPVFYEYYTLKRNQGKSHRCALGHVVRKLLRVIYHLVSNDILFDETKLI

SEQ ID NO: 269385 - protein, 323 aa, unidentified
MNKYKETFGVDIGKDVFDVHGSNSGHNQFKNDEKGFHSFLKILPQGSLVTMEATGYYHYRLAQFLYKNNVVVSVVNPLSVKRFIQMKLAKVKTDKSDAKAICDYALANEVPLYNALTDVQAECLQLFRLMDSYLKKRTAAKNKMHGEETLGVPSKFVYSSLKRNLKHLDKEIFGIEGRLLSLVKKEQQQQLTLLTTVPGIGTKTALFLIVVTDGFSKFETGAQLCSYVGITPTIRESGSSVRGRSRISKVGNKKLRNLLFLCAFNACKHNKACRELYGRIVNKGKSKKLALIAVANKLLKQCFAIAKSGLPYDAGFVSVLSVK

SEQ ID NO: 269386 - protein, 346 aa, unidentified
MHYIGMDCHITTLDFAVINEAGRLVKANGVATSVNGFMGFVKTVPPPRTIYMEEGTLAAWALETCVRFREKLVITDPKKNHWIGSSGQKDDPLDALKLAQLARGGYIKEIHHPVGQRRRFRELMMAYHDTVRSATRIKNKIKAKFRQNGIQCTGDTVYSETHREEWKRKLPQDSTLLLILDGLWLQLEQLEQTEKRILAAAKAHAKQYPEIRLFEDIPGIGFIHAATVSAILETPHRFADKRKVWMYAGLGLMKRSSGGKLYSEKLTTDYNRLLKNTVKQATEAAIQAKDNPFRQKYLDMTLLHGIAPHRAKLTIARDILATILAMWKKGEKYDPEIREKATHKQG

SEQ ID NO: 269387 - protein, 355 aa, unidentified
MGQVKQLNFSGQKIFCGIDVHKKSWKVCIRSEQMELKTFSHNPSAIELVRHLKKNYPSANYQVVYEAGFCGFSPQREFTKEEVSCIIVHPADLPTTDKEKQRKSDAVDCRKLSTTLSDGKLSGIYVPGIEQQDDRSVIRAYQQFIKDQTRCKNRIKGWLNFQGISIPDDDEHKYWSNNFIKWLKELSLTPSARISLDLLIKSYEQTRNMVLASTKQVRALSSQARYKEKIKLLRSIPGIGQIAALLFATEIGDINRFKTFDQLCDYIGLVPKVHGSGERQTVLGLIHRGHHKLRETLIEASWVAIRLDPAMTMAFNEITKTMKKNKAIIKIARKMLNRIRFVMKNQTEYVMAVVE

SEQ ID NO: 269388 - protein, 355 aa, unidentified
MNVNVNHYIGFDVHKKSISYCVKLADGRIVEEGKLAARRVTLCQWSSKRAEPWHGAMEATLFSGWIYDTLKPFAAKLEMGHPGRMKAIGASKKKNDKLDARTICDLIRANLLPACWVAPSEMRELRRILRYRNLVLEQAVRMKNKISGLLMESGVEYNKKRLHGEKYFHELLENLAAEVPESVKDLLKLSRGWLESFQATQQQLLVKLQKHPILMERLKRLKSIRSVGEVTALTWALEIGDPHRFSSIGDAVSYCGLTSALVESADKQKRGPISKQRNAHLQTVLIEAAKLAPRWNPRLAELHQAEIDNGRHRNRATLEVARKLVAYLLAVDKSGKDFAVRTPSGKSEGEVKPAA

SEQ ID NO: 269389 - protein, 336 aa, unidentified
MDRQYVGIDLHRRSATVHRMSADGEVLGVSRIAVQPLELMEAIDKAGPEPEVVMESTYGWYWAADVLSEMGARVHLAHALGNNWGNRRVKNDQRDAQDLAAMLRLGRLSEAWIAPPAVRELRELVRYRFRLTKFRTSCKAQVHAVMAKNGVLPTRLDMWGPGGTAQLDALELPGAYAYRIESLRDLIIYFDREITDLDGRIHAELKNDPGYKAVQNIQGVGRVLAAVFVAEIGDVSRFPDAEHLCSWAGMTPKHRESDEKVTRGKISKQGSPLLRWAAIEAISKYRGGPKLRADYDRIAATRGRFKARVAVARKLLTLVFYGLRDGEIRSLPPKAA

SEQ ID NO: 269390 - protein, 524 aa, unidentified
MAMLCWLQQLWPCSPMVPMCPYVSLVPSNASKSLVKLHTLVACGAIPFRRLPSSFILGLKPQNMKNKHAHPKNKKFKKIALDENWEKINPNAAGIDIGAREIFVCVPSDRDRESVRRFGTKTPDLEEMAQWLKDCRMETVAMEATGIYWIGPFQLLERKGLKVVLVNPRQIKNVTGKKSDVMDCQWIQKLHTFGLLGGSFRPADPYCVARTYMRLREDLIAGSTCQIQLMQKALHQMNIQLSHVLSDITGSSGMAILEAIIAGQRDPIVLAELASRRVKSTQEEIAKALIGDWREEHLFCLAQAHQMYLRYQGAIAECEIKLAAELEKLPNKVDPNSKPLPPKIDRKKDINEKLRLGLYCKFGVDVTALEGIGPTAALTLLSEVGADLSAFPSEKHFCSWLGVCPDNRISGGKVLSRRTRRVVNRMADVLRMSATTLKSSQTALGAFYRRMVARLGPAEGITAVAHKLARLLYSLIKHGHEYVRTGMEQYEKKNADRKMKVLRKMAESLGVQILEPQLVTTGVS

SEQ ID NO: 269391 - protein, 339 aa, unidentified
MAQVTTLGIDLAKNVVCVHGVDVHGNVVVKKRLARQKVLPFVAQLSPCLIGMEASGSAHYWAREFSQLGHTVKLMPPQFVKPYVQSQKNDPNDAAGICEAVGRPRMRGVPMKSVTQQDVQALHRIRERQIKARTALINQIRGLLAEYGIVIPQRASQVRHKLPFLLEDAENGLTATARDWLQALAEELQALDQRIAATDQQIERVFEADEACQRLAQLAGIGPLTATALVAAVGDATAFKNGRQFAAWLGLVPRQHSTGGKTTLLGMTKRGNRYLRTLLIHGARAVLRVVDRKTDPRSRWLQGVKARRGKHCASVAQANKTARIAWALLAKDDHYRQAA

SEQ ID NO: 269392 - protein, 408 aa, unidentified
MIFAGVDWAEAHHDLHVEDEQGRRLGGGRLADGMEGLTRFHELAAAHAEDPGEVVVGIETDRGLFVTALIAAGYQVFAVNPMPVARYRERHGSSGAKSDPGDAKVLADLVRTDRHNHRPVAPDSELAGAIKVVARAHQSMIWNRRRQANQLRSALREFYPAALAAFDDLTGAEACEVLRLAPGPALGAALSKAQITAALRRAGRVRRLPERAAQVQAALRAPQLQPPPVIAAAMAASVSALVAVTGEMTRQIAELERQLTADFEQHPDAEVIRSLPGLGTILGARVLGEFGDAPDRYLDARSRRNYAGTSPVTRASGRKRVVLARHVRNKRLADAIYLWAFSAISASPGARQYYDHRRAAGDGHDRALRALGNHLVGYLHGCLTNHSRYDEHTAWAHRPAPELSSTAA

SEQ ID NO: 269393 - protein, 359 aa, unidentified
MSKQKLNQKRSKDNLKFTKQNVLQSYDHYIALDWSIKNMAIARLKPKTNEPKIIDVPSDIKELKLYLKNLQGTKIITIEETTTSHWLYVELYDYADKIIICDPYRNRLLSDGPKNDKIDAGKLCLLLKNGMLKEVFHSNDRLYELRKLVSYYDDEVKAGVRLMNQKSALYRAENKSYKKKETIKDDSINKFIVSQLDEKINLYIDKKENYEKEFYKITKGNKVIKSLMSIPGIGIISGVTILSMVIDARRFKSSNHYLSYCGLANHKKMSGGRNYGKRLPRYSRKLKSVYKSAAVRVISTNNPIREYYDYLVKEKSLTEQNANNAVARYIARVSLGIIKSGKKYKPYNWRENKKRNDAA

SEQ ID NO: 269394 - protein, 480 aa, unidentified
MAFLSKQVTELSDERYFGVDLAKRETQLAVLNSSGEQVFAKRFDTSREQFLALASELREGDTLALEVTTNSTAIARLIRENSKAKLIVSNPIKTKVIAQAKIKTDKIDARVLVELARVGYLPEVWLPDEDTESLRQFISDRTSLVRRRTESKNTVHSVLHRNLVRQTRTDLFGTSGRQWLETLIAGTAPDAMLIPELDRMRIGSLLNEIDRIDALVADLESVIASYIALHPHLKEQLDRLMSVPGINLVTGVGIMAAIGDVRRFPDKKKLAAYFGVVPSTKQSGDSSRNGRITKQGRSEARWLLIEAAEALRKSPGPMRALYTRIYKKRGHNIAVVAVSRKLIELVHHLLLNKEDYIYRLPRLTQEKRARWRYLARRKLGLAIKSAVIRAGSRSALYGTGIGIQGRKLKSQIAKQAAVNAERLYQAIVEQRRVKLADPSIASIAASDLIFDPTRPTETDWEKILTTATASMLKKRRPKNN

SEQ ID NO: 269395 - protein, 423 aa, unidentified
MDVSYGNVPEGAVWAGIDTHADTNWLSVVDARGRELRSEQLPATADGCRQAAEIILAMGAPVSVGVECTGSYGAGIARELAGRGIPCYEVVTPGRPGRGRGCSKDDAADALRAALQALSGRDLAVPKARNGWVEGVRALCVVRESLVRACTSYANLGIAIVREAPDPVRSAFAGLGAAGIMRRCASSGMPAGCSGVAGAVMLALCRLGEAWLQAKKSADELERRIAEMVRAGNPALASMYGCGPIAAAALAIAAGDNPERMHSEAAFAALCGVSPLRASSGKTRRHRLSRGGDRRANRALHVIAIHRMRTDPRTIAYAERRRREGLSDREIRRCLKRYIAREAYRCLMHPFDLGEASAGPELRHERIAAGVTQKAAASALGVTASTLCDLELGHHQFRELAQRYRRWIDDGFPMDPDKGPNGD

SEQ ID NO: 269396 - protein, 347 aa, unidentified
MRFYNRQHRHYCGIDLHVKTMYVCILDAAGQVLVHRNMPSTPEAFLETVAPYREDLVVAAECMFTWYWLADVCAAEGLAFVLGHALAMKAIHGGKAKNDKIDSHKIASLLRGGLLPQAYVYPAGMRSTRDLIRRRLHLVRKRGQLLAHIQNTRAQYNMPAFARRLAYPANRDGVSAQFADASVRKSIEVDLALIDQYDTLIVDLELTIVREAKRHDADAFHRLRTVPGIGKVLALTILYEIHDVTRFDRVQEFASYARLVKCVHQSAGKKLGTGGAKMGNVHLKWAFSEAAVLFLRHTKDGKQILAGIEKKHGKGKALSILAHQIGRAVFYMLSRGTVFSMEKFRAA

SEQ ID NO: 269397 - protein, 348 aa, unidentified
MEHIAIDLGSRESQVCVRTTDGEILEERRVGTRSLGRYLAGRPKSRVVLEACAEAFPIADASLAAGHETVVVPASLAPSLGVGDRGVKTDVRDARNLSEASCRMSKLPAVHVPTKVSRDQKAMCGMREGLVQARTKLINTVRGWTRPQGLGVVRSGSPTTFPLRVKEHVTERGATIPIYVEQVLKAIQELSLQIGEADEAMKELAGTDPTCQLLMTAPGVGPTTAVRFAAAIDDVKRFPTAHKLEAYLGLVPGERSSSERKRRTGLTKAGPSKLRWVLVQASWAARRYYKEHPMVLWSREVEKRRGKQVAVMALARRLAGVLYAMWRDGRPYDQNHRQPVTRATNVDA

SEQ ID NO: 269398 - protein, 347 aa, unidentified
MRFYTRQHRHYCGVDLHARSMYVCVLDRDGNVLVSKNIASAPEPFVELIAPYREDLAVAAECMFTWYWLADLCVREGIVFVLGHALYMRAIHGGKAKNDRIDAHKIVGLLRGGMLPQAYVYPQAMRATRDLMRRRNYLMRQRAELLAHITNTNHQYNLPALGVRPARPAERSGLLEHFAEPQVRRSVALDLSFVEHYDRELPALERYLESNAQAHDPLALAIVRTVHGMGKVLGLSILYEIQDIGRFARVQQFLSYGRLVRPTKESGGKILGHSGRKIGNAHLKWAFSEAAVCFLRANKPAQALRARLMAKHGKGKSLAIIAAKLARAVYFMLKRGEPFQAERFFAH

SEQ ID NO: 269399 - protein, 325 aa, unidentified
MRVPSDDTLETGNEIFVGIDISKSTLDVAIWPSGKQWSVDNDATGIKELIEQLRGFNPALIVLEATGGLKVYSAGELAVSGFPVVVVNPRQVRDFAKAIGKLAKTDKIDAQVLAQFAQAVRPVPRPLPDASTQALGALVARRRQMMQMLVAEKNRLQSSPNPIRKEIQKHILWLQRHLTSLDEDLTGSIKQSPLWCERENLLKSTPGVGPVMSRTLLADLPELGTLNNKQIAALVGVAPLNRDSGKLRGKRSVWGGRAHVPSTLYRSTLAALRFNPVIKAFYQRLLVAGKAKKVALTACMRKLLVILNAMLKHGTPWKTNFIISP

SEQ ID NO: 269400 - protein, 361 aa, unidentified
MTATNIVGIDPHRKTFTATLLDASGGEIDHAHFTNNRAGHAEVLVWATEHGTVERWGIEGASGLGRPLAEFLVAAGGDVREVPPHKTSLRRRGRHEGKTDRLDSHRIAAETQTNPRLARAFKHAQPAQPDPVRDRIALWHNARTSLRKIRVQLLGEVDALVHELPEELRSQLPAKKTIRARVTSLDRLDASEVTDKTVLLRLRLIEHRVAMLRDVLEQDRIAARELAELVAQTKSTLTDLVGIAPRAAAEIIVEVGDIRRFTAAGFARFNGTAPIPASSAEGDGEPVRHRLCRGGNRRLNAAIHRVAVTQLRYEPRAREIYDNARANGHTRREAMRVLKRNLSNAIYRTMARDTRQPSLLT

SEQ ID NO: 269401 - protein, 390 aa, unidentified
MFFLGIDIAKLNHVASLVSDNGNIVFSNFMFKNSLEGFLSLIDKIKSIPKDDIVIALEFTGHYSDNFVNFFFNRKFNVTLVNPSNVANFRKSYGRDSKNDRIDSINIAKMLLSREYSLVTQSDIEYLSLKKLNRIRDSLVKQKSKCKILLTRNLDSIFPELQYLLPSGIHSKAVYALLKKYPSSEEIAALGIDVLTNILKTNSRGHFCEKTAYIIKSQARSSVGFEDISLSFHISQLISSIELLEEQIRNTEKQINAIIEKLKPVILSIPGISNVACACILGEIGNISRFRSPSKLLAFAGLDPKVRQSGQFRALSCRMSKRGSKYLRYSLIYTAWNAVRNNEVFSNYYALKRSQGKNHYKALGHVAHKLVRVIYKLMKDNISFDAEQLI

SEQ ID NO: 269402 - protein, 429 aa, unidentified
MNCTQNKKIEQVKETTMIVGIDVGSEKHYFRAFNWRGIELTRKPVAFSNSMEGFNSFYNTIVELMQKSELEEALVGIEPTGHYWFALGQFMGEKDIKFVMVNPHHVHKTKELDDNSPSKNDRKDPRVIAGLVRDGRYFYSYMPTGVYAELRNASNRRFVLVEEQTRAKNRLQKWIAVYFPEYKGIYTHIDAKGGMLVLKKAPTPEEIVRLGVEGIIKIWKDAKLRGNGHKKAMLILAAAMRSIGLKAGLTEARMEIQDLIEDYELQTKRLERVNDLIKGLCQQVRYADKLLEIKGIGITTVAGFIAEVGDITRFDSTKELQKLAGLELVADSSGKHNGKTKISKRGRKRLRYLLFEAAISVVGKNEEFKEIHSYYTTREKNPLKKMQSLIAVACKLIRVFHAILTKGIRYDASKMLKDIRHPGEQLKAA

SEQ ID NO: 269403 - protein, 330 aa, unidentified
MALKIVYQICCGIDVHKTFVVACIASTNKQGVTTYKRHRFSTFTQGLKELLQWLLDNHCKDVCMESTGKYWIPIYNVLEKDCNIVLAHPKYVKAIRGKKTDKKDAKWIADLFKHDLVAGSFMPPADIRQLRDLMRYRFKLTCFMSSEKNRLQNCLTVSNIQLASVVSDTFGKSSQRILDKILENPDDTSFDIEPLIHGSMKKKLPELELAIDGFITPEQAGKLKVIKKHFEDLESRKAELEKLILALASPYQQELDLILTAPSFKNKFTAIGIISEIGVNMEAFPSAKHLCSWAGLTPTNNESAGKKKSVRVSKAGCYIKPLLVYCIVDI

SEQ ID NO: 269404 - protein, 428 aa, unidentified
MTSHEDRLHRFHELRNTIRGDDSIMVIGVDVAKDRHHAFFGTANGKTLWKKLIFDNSIQGFNSLRTMADNLMTQHGLKRRVFGVEPTASYHKPLAEHLIQNDEQVVYVSNVVVKNNRASLDGRWDKNDTKDAANIADLISRGRCQFYDLAEGDVRELRSLLAYRAKLKKQEHALRMRIRNTLLAQYFPELDKQMPQGGQDGLILDILAQGFAPDQIAGLSLEAFRHQLRLQERHIVQEERLRTIWEASRKSIGCALPEAAAWEGQMLVEQLRQIRRIKQELEIQLKTVGKRFPSYRYLLTIPGFGPIVSTMTIAAIGDANRFTSRKQVLRLAGLDLCAYRSGNRSESAVPVISKQGKAGLRYALVQAAAIASYKDEVIRNYFTRLLKGRELERGIKLKMRVKLAAKLLVIAWTLMKRHEAFDPDYIRV

SEQ ID NO: 269405 - protein, 340 aa, unidentified
MKTLYAGIDLHSNNSVIVVTNAEDNVVYRKRLRNELDALLDALWPFSDSLRGVVVESTYNWYWLVDGLMDHGYRVHLANTGAIQQYSGLKYANDASDAHWLANLLRLDILPEGYIYPKEERPVRDLARKRSGLVRQSSANILSIKNLLARNTGRSMSASGVKRLTDEDVDTLFAGEDLALAVKSTLAVLRCIQEQIALLEQTILKRVRLRDEFRNLLSVRGIGDVLALTIMLETGDIRRFETVGDFASYARCVGSAHLSNGKKKGKGNTKNGNKYLGWAFIEAANFAIRYDETIQRYYQRKCAEGKHLLVAKKSVAHKLARACYHILRDQTVFDVARAFA

SEQ ID NO: 269406 - protein, 415 aa, unidentified
MALKIVYKICCGIDVHKTFVVACIASTDKHGVTSYERHRFSTYTKGLKNLLQWLLEHNCKDVCMESTGKYWIPVYNILEKDCSIVLAHPKYVKAIRGKKTDKKDAKWIADLFKHDLVSGSFMPPADIRQLRDLMRYRFKLTCFKSSEKNRLQNCLTVSNIQLGNVVSDTFGKSAQAILDKILENPEDTSFDLEPLVFKSLKKKLPELRDAIDGYITPEQAGKLKIIKAHYESLESRKAELEELILALAAPYQQEFAILQTAPGISSDFTAIGIISEIGTNMEAFPSAKHLCSWAGLTPTNNESAGKKKSVRVSKAGCYIKPLLVQCANAVVKSSKHPEMRNRYLRLKKRRGHKKAIIAIARMLLTALYHMLKNGENYNAELYRKSDLPPVDREITVEQAILIARNQGYKIKSATA

SEQ ID NO: 269407 - protein, 367 aa, unidentified
MNKSSKAFVGMDVHKESIDWAIAERDGEVRSFGRTGGDLTAVARTVRKLVASGKTLVFVYEAGPCGFGIHRWLKVQGHECWVVSPSLTPKKPGERIKTDTRDAVKLARLARAGELTAIYVPEAPDEALRDLVRTREDAVAMQRQARHRLQALLLRNDIRYVGKTAWTPAHQRWIARLKLPYAPQQIAFEEYVQAVQEATTRIDRLTAAIQAAVSTWRWQPVVAALQAMRGVQLIHAVRIVAELGDLTRFGTPRALMGFLGLVPTEHSSGGKRAQGAITKAGNSSARRAMVEAAWAYQHPARITPIIARRQGGVPKIVLDIAWKAQLRLCARFRKLAVRGVNRNKLVVAVARELAGFVWAIGQQVRPV

SEQ ID NO: 269408 - protein, 350 aa, unidentified
MSPRNTPRPAAVYGVDIGKNIFHVVGLDSDGEPVQRVRFRRDTLMTFFERAAPAIVGMESCAGSQWIARRLQALGHKVRLIPAQFVKPYVKSNKSDIIDAEAIAEAATRPTMRFAAIKSEEQADLQALHRVRDQMIGTRTRLINQMRAFCLEYGIALRQGAGLFKLDLPLVLDDLSNDLSPAMRKLLVDLFADLRQLEQRITDVTREIAAIADREDVARRLMTIPGIGALGATALLAAVGGGCQFQKARDLAAWLGLVPREYSTGGKQKLLGISKRGNRYVRKLLVHGARSCFRHLDRTRDRLGSWLDGLQSRMHPNKAVVALAAKMARIVWVVLTKPGALYERRDPVFT

SEQ ID NO: 269409 - protein, 344 aa, unidentified
MKITTIGIDLAKTVFAIHGVNEHGRVVLKKMLRRDQMAAFFANLPVCLIGMEACGSAHYWARKLQSMGHTVRLIAPQFVKPYVKTNKNDAADAEAICEAVARPNMRFLPVKNMEQKSVLSLHRVRQGFVRARTAQANQIRGLLSEFGLVVPQGITHIAGRVPALIEDAANELAGSFRLLIQRLIEHLKELDRQVRELEMQIQVWHRENEASRRLAGIPGIGPVTASALVASIGNARSFANGRQLAAWLGLVPRQNSSGGKNVLLGISKRGDSYLRTLLIHGARSVIHAATRREQKTGWLYNVLQRRNRNIAAVALANRNVRIVWALLVHGREFQPDYMAVPVTA

SEQ ID NO: 269410 - protein, 399 aa, unidentified
MQQGVAVGIDVAKDFHWVQAVDRRDSEVLFSGRVDNTPPALAAFVEHLEGLRDRGPLTAGIDVVGGIASVLTAMLLEAGIDVVHVPGLAVNRAREGTAGGEHKSDPRDAAVIADSVRHRRDLRPIEPLGELDAEIRLLVGRRRELVGDQTRRLNRLRDLLASIHPGLERVVDPTTKAAQQLLSRYVTPAEIRHAGRRRLVEHILRAGRISRRHADELADKALAAACEQTIAVPGERVAADLVRELAAEAARTRSRLSALDRDLGAALARHPDAALIQSLPGMGVTLAAEFIAEAGSIERFPTPDKLAAAAGLAPVLKQSGKVRYLQRAHGGNRALKRVFFQSAFCSLTHPDSKAFYRRKRNERKTHHQAVLALARRRVDVLHAILRNRTPYQLRHAKAA

SEQ ID NO: 269411 - protein, 391 aa, unidentified
MIYVGIDVAKDKHDCFITNSDGEVLFKSFTIPNNRDGFETLFQKIQSVSDDLTKVKVGLEATGHYSYNLLGFLLDKGLPTYVINPLHTNLYRKSLSLRKTKTDKVDAHTIASMIMSDVNLKSYSDTSYHNEELKSLTRYRFDKVQERAKLKTSVSRLICILFPELEKLVPTIHMASVYAMLSEFPSAHAVASAHLTRLTNLLSESSHGRYGKDTAVMFREAARNSIGSNMPAKSLELKHTIKLIQELTSEIDEIETEIKSIMDEVNSPILSIPGINYRMGAMILAEIGDFSRFDSPDKILAYAGMSPSTYQSGQLDNCYSHMEKRGSRYLRYALYNATKYVCHWDESFGTYLAKKRAEGKHYNVALSHATKKLVRTIYAMEKTGQSYSSAS

SEQ ID NO: 269412 - protein, 330 aa, unidentified
MKINNTIGIDMSKSKFDAYIYLNQAIGTFENTRSGYSELLRWAIKDNTIDINETLFVLEHTGLYSENISVYLAEKGISFLIVPGLAVKKSLGIARGKSDKIDARKIAKYAYQRRDELMPTQLSGKTITSLKKLLSLRDRMVVQRGGYKSSFKEQSLFLDKNEFKAVLQAQEKMIIFLSKQIDHLEKQMDELIKNDVQLKELFSLITSIKGIGTQTALYMIVYTDGFTKFKTWRKFASYCGTAPFPNESGTVIKRTKVSHFANKKIKCLLDLCSKSAIQHNREMRAYYKRRVEIGKDKRSTINVVRNKLLARMFAVVDRKTPYVELMKYAA

SEQ ID NO: 269413 - protein, 366 aa, unidentified
MKKISTMQAFSNEILKEQKLTIGVDLGDRWSFYCVLDEAGKIIFEQKVATTPEAIKQTFAKIPRSLVALETGTHSPWVSRLLTELGHEVIVAHAQKVQLITKSNRKDDRHDARTLARLARIDPELLGPVRHRSAKAQIHLTVIRARAELVSARTALVNAARGLVKSFGERLPKCGTYQVNEKLAEEVSAELRDVLVPLLREVESLNERIKEYDERMEKIAKESYPQVEMLKQVKGVGTQIALTYVLTIEDPYRFPKSREVGCFLGLRPGRRNSGESEPQKKISKEGDRYLRTMMVQGAHYILGPFGEDSDLRRWGLKLAERGGKNAKKRAVVAVARKLAVLLHRLWVSGEVYEPLRNSQKAMRAAA

SEQ ID NO: 269414 - protein, 340 aa, unidentified
MSLHGGIDLHANNSVIVLINEQDEVIYRKRLPNALPTILEQLAPYHMQIKGLVVESTYNWYWLVDGLMEADYRVHLANPAAIQQYSGLKYTDDHSDARWLAHLLRLGVLPEGYIYPKAERAVRDLLRKRAHLVRQHTANVLSVQNILVRNTGARFSVKRLQELTKQELKSLLAEEPQVLAVTSSLAVLDCLRHQIKTLEKTVHKRLHHTPAYEQLLTVDGIGTILAQTITLETGAISRFPTVGNSASYCRCVDSTKISNGKRKGTGNVKNGHPYLAWASMEAAQFAMRFQPAAQRLYQRKLAQSRNNTVLARKAVAHKLARACYYMMRDLVPYEATKAFG

SEQ ID NO: 269415 - protein, 309 aa, unidentified
MKEVYAGIDVSRDFLDVMVLPSQEKRRYANDEVGVSQLVVRLKKLSPVLIVLEPTGGLEAMVAAALAAEGIKVAVVNARQVRDYARATGKLAKTDKLDAQVMAEFASAVKPQTRQLRDEETEEIKAVVSRRRQLLEMLTAEKNRMAIARKNMKPSILTHIEWLKKEIADLDRDLRQRIEGSPIWRVKDDLLQSIPGVGKVLSATLLAELPELGKLNRRQIAALVGVAPFNRDSGNMKGKRCVWGGRASIRAALYMAALVSTRFNPVISSFYQRLLAKGKAKKVALVACMRRLLTIMNAILKHQRAWQHA

SEQ ID NO: 269416 - protein, 340 aa, unidentified
MENIHILGVDLAKRTFAICGADKNSYVVFRQKLTRPQFQKTLSNLPPCIIAMEACGSAHHWARVAQAAGHEVRLIPAQYVKAFVKRHKNDAIDAEAIVEAASRPSMQTVAVKDENQQAQGMIFRTREMFVKQRTQLINAVRAHLTEYGIVLPQQRRNGRLFAKRCRSEFDTAPEIVTSLIEIYLKQIEAVDVEVAALDVKIKKGALKNAEARRLQTMPGVGPMSAMAIQAFCPPAQNFRKGRDFAAWLGLVPRQHSTGGKDRLGRITKMGQRDVRKLLIIGAMSVISASERKGHCEDPWLERMLTKRPRMVVAVALANRMARRLWAMMTKERDYEIQVVA

SEQ ID NO: 269417 - protein, 358 aa, unidentified
MKKQREHILRNEEVFVGLEDSKKTWKLCVRSGGMVVHETSMPARYEVLRNYLNNKFPECQILVMYEAGFSGFDLHDQLVVDGWECVVTPPHTVTQEKVQRKKNDRTDCRRLAKNLENGDYSRCFVPDKRLREDRQISRTCGQVQADITRVCNRIRRMLEFHGLDKDLPAGPWDSGTAYTRLRQQLGKIELSDSLRFSFDVMFKELGQLRQLKKEILQQLRKLAKNNRYLESVRLLMTAPGIGKLTAIRLALEWGDVSRFRRKGEFASFLGLVPSDYSSGEEERLGHITKQGNRRVRSWLVECSWVAIRYDPALLEKFRLVLRNCGSKKKAIVAVARKLALRLRRLLLSKEPYIIGVVE

SEQ ID NO: 269418 - protein, 343 aa, unidentified
MTTDTMIGIDLAKSVFQVHGASMTGQVKFRKKLSRQQFRKFMAEHPASIVVMEACGSAHYWAREMAKYGHEVKLIAPQYVRPFVKRQKNDAADAEAIVIAAQRPEMRFIIPKVEEQQAKALLFRGRERLVRQRTELINALRSVLYEFGHPIPAGIGHLKRLETIIEGDNSDLPELVREECRDLSRQIAEKTQRIEAKAKQITSLATQTDMARRMQTMPGVGPMSALAVEAFAPPMDSFRHGRDFAAWLGLVPKQHSSGGKERLGRISKAGQADIRRLLIMGAMSRLNWLGRKTISESTWLFRMLMRKPRMLVAIALANKMARAIWAMLTKGEDYQNPTQTAAA

SEQ ID NO: 269419 - protein, 350 aa, unidentified
MEATTVAIDLAKSVFEIAVADKAWRITERRRFSRLQLERFFATRDVSHVVMEACSSSHHWGRWLQRRGIRVSLLPAQYVRAYVRRDKTDRTDAAALLEAARCAEIRPVYVKSLEQQALQGLHRVRSLWMKTRTSRINSLRALCREFGMTAPVGSRRGFQELVGRFAEDSEMIPTLLRPALCQLVEEIRELEGRIRTIETELRHLASQSEVCRRLQTIPGVGLLGSTALLGSVGDIHSFDNARRFASWMGLTPREFSSGNTRRLGRITRQGDCYVRMLLTHGARAVLHSGRVARRAGRPLDRLREWALRLEQRSCHNKAVIAIANKLARIVWATWHRERDYEFQSAPAQAA

SEQ ID NO: 269420 - protein, 417 aa, unidentified
MKKVYRSCCGIDVHKKLIVACFLQKSNKSEVREFGATTSELLKLSDWLTGGGCEMVAMESTGSYWKPVYNIFEAAGLKCMIVNASHMKNVPGRKTDIQDAEWIADLLKHGLLEASFIPDRQQRELRELVGYRSSLIGEKTRELNRLQKVLEGANIKISGTIKNINGKSGRCLLDAIADGRKLSIEDLEQMKNEHQIAHNLKATNEQLAEDLNGVINENQVFLLKEMLKRIDELDAHTATVSGLIDKLMIEEQLLAADKITQVTGIGLTSAQAIISVIGSDMSRFPTDASISKWAGLCPGNNESANKRGSGRTQKGNKLLRTTLTVCANSAVKNKDSYFYAQFKRISAHRGKKRAIIAVAHSMLIAIYHMLKDNVDFVDLGSDYYNRFNKEKKINAYIKKLQVLGVVVELKPTTTQVA

SEQ ID NO: 269421 - protein, 455 aa, unidentified
MYLPDWKWIPIRKGLLLMSNKVIFNLDELFISVGIDVGADFSWMSIALPNQQFVGKPYKILHNSIDSLTTAVSKIKEAEELYSLESRIFLESTGIYHYPLFCYLRDKGFNCSVINPIITKNSTNINIRKVHNDRFDSKKAALVGLKSDLKVSLMPSDLALNCRNLCREYYDLMDNRSAYVNKLQGELRMAFPQYLGIFSKVTINTSLTLLETYTSPSAFLEADKQEIIDIIKSTARFGLTYAQNKYNAIIQAATDANQFGYIIDSNIKRIRLYISFIRKYDEEINSILESLHELVDANEDADFVKQIHLIETFKGAGFLSAVSIMGEIGDFSAFSKPKQLFAYFGLDPAVKQSGKFEGTKVQMSKRGSAIARRVIHMLTLQSISIFRNGEAKNPVLREYYLKKCDSKPKLVAMGAVSHKVCNMIFAILRDNKPFKIIAPQEHIKQYNAAKCDIAA

SEQ ID NO: 269422 - protein, 388 aa, unidentified
MPAAETPVAYLGIDVGKSSHSACALDAGGDVAFRAELANRPDDIDRLLERAGSGALVVVDQKRNIGALVLARAHAHGNPCAYLPGYAEKQARGMFPGTAKTDAIDAEVIARTALGVPRALRPAPEEPEGAASLRILSSQREFASSARTRAKNRLRATLLEADPALEERVDPSSRWQVSMLAEFGGAAGCSAAGWRRFSNAARRAGAPAAGARRLWEALLASARSGRRLPAGEDVAVRMLAREIASLDADIEELDSLVADSLAGDEVYECLLTVPGIGPKTAAALVTSIDISAFRGHDELASYCGVAPSDRRSGSSIRSTSPQHGGNRQLKNLLIFSCNSLIGTDNRFGRYYGECRARGMRHGKALKAVARKRLKVIYAIMRDAVPYAA

SEQ ID NO: 269423 - protein, 340 aa, unidentified
MTIATIGLDLAKSVFQAHGVDENGATVLIKKLHRKQMLPFSSKLPPCLIGVEACGTAHYWARTLSAMGHEVRLIPPSYVKAYVKRGKSDALDAEAICEAVQRPTMRFVPAKTVEQQAILTVHRTRSLLVRQRTMLANALRAHLAELGHVANLGIANLAKLTKEVLADENALLPMARTALEMLMRQVMTVSGEIAALDRQLLAWHAQSEASRRLSGVPGLGILTATALAATVTDPNQFHSGRQFAAWLGLTPQQHSTGGKVHIRGISKQGDRYLRRLLVVGATAVIRHIKDNPTPVASWVRKLMEKKPFRLVSVALANKLARIAWVVLTRKETYQPYKLPA

SEQ ID NO: 269424 - protein, 391 aa, unidentified
MIYIGIDVAKDKHDCFITNSDSEVLFKAFTIFNNLDGFNDLYQKIESVMDDVTKVKVGLEATGHYSYNLLGYLIDKGLPTYVINPLHTNLYRKSLSLRQTKTDKVDARTIASMLMSDVNLKSYSDTSYHNEELKSLTRYRFDKVKERAKLKTSVSRLVCILFPELEKLVPTLHMASVYALLSEFPSAKHVATAHLTRLTNLLSKSSKGRYGKDTAITFRDSARASIGSNMPAKSLELKHTIKLIQELDSKIDEIENEIKIIMDEINSPILSIPGINYRMGAMIIAEIGDFNRFDSPDKILAYAGFSPSTYQSGQLDGAYAHMEKRGSRYLRYALYNATKYVCHWDPTFAAYLAKKRAEGKHYNVAISHAVKKLVRVIYHLEKTKQQYIKAA

SEQ ID NO: 269425 - protein, 316 aa, unidentified
MSAGPCFVGIDVAKAQLDIAVRPSDARWQIPNDPEGYAALVERLSRLAPALIVLEATGGFEAPAVAALAAAGLPVVVVNPRQVRDFGKARGQLAKTDAISAAILAHFADAMRPPVRPLPDATTQELHQWLARRRQLVEMMTAENNRLPGAARAVRPSIQAHLGQLRRQLKGIERRLKALIERSPVWRDREQLLSSTPGVGPVLATTLLADVPELGRLNRKEIAALVGVAPLNRDSGTLQGKRTVWGGRASVRAVLYMAALVASRKNPRIRAFYERLCAAGKPPKVALTACMRKLLTILNAMVKHGTAWKEPAALGA

SEQ ID NO: 269426 - protein, 364 aa, unidentified
MKTQTKTSREVIEFEQVVARGCGMDVHKDTVVATVAGVGIKQETRTFSTFTNSLEELRIWLTELGITHVAMESTGVYWKPVFNILESEVEILLVNARHVKNVPGHKTDKRDSRWLTKLLLSGLLKGSFIPPVEIRQLRDLTRYKRKLTQQVSAEKNRLQKILEDANLKLSSVVSDSFGVSATRIIDALIAGEEDIEELIKLCHGKLKPKEAAMKEALVGKLTEHHKFMLRTIKKSIKQIEEVIREVDQRIDEEVSRYEVEIDLLQTIPGVGRDSAIGIIAEIGVEMEQFPSELHLASWAGMSPGNNESAGKKKWKNNARKQILENGVSGSRMGSIADAPDIFEEQIREFSGQKRQEAGIDRDWT

SEQ ID NO: 269427 - protein, 360 aa, unidentified
MLYLAIDQHRKQLTVNLRNESGDVLLKRQVSTQWLRVRKFLEEVQKQGHSEGGFVAILEVCGFNDWLVKLLEEYGCRELILIQPEKRSKKKTDRRDANTLGELLWVNRGRLLAGKKVQGIRRIQLPTETEAEDRQITAVRKRLGQLRTRTINKIKYILRKHNLEQECPTKGLDTIKGKKWLSRLTLGAIDRLEMKQLLVQWQLWDEQIEKVAAEIRKRQAQSKTAAVLATIPGCAAYSSLALASRIGSIERFPRPSSLANYWGLTPGCRNSGQATDRLGSITKQGSAMARFILGQLVLHVLRRDPWMKAWYGRIKKRRGSKIARVAVMRRLATVIWHMVKHNEPYTVGGPPRRKLKVQAA

SEQ ID NO: 269428 - protein, 463 aa, unidentified
MKAKKKLGNKTPRQNRQPVAGLPALRANVAGIDLGSERHWVCAPALDGAGREVADFGGTTAELLRLAAWLKERRVESVAMESTGVYWIAPHEVLEGQGLAVLLVDTRHLAQVPGRDKKSDPSDCEWLQRLHSCGLLKGAFRPKEEVCMLRTLVRDRANLVAELGDWTRRMQKSLDQMNVRLHRAVAELDGVTGMAILRAIVSGERDPEKLAQLRNRRCQNSQQEIAEQLRGHWREDHLFSLKQGLEMYDEVAKRIAAYDEEILRRLAGMQLECAGGSAVPPVKNPQKAKAIRKLGQEPMREALYRMSGVDLTSIDAIGVGTVQVVLSEYGADLSCFETEKNFVGHLRLAPYQPTSGGKPLKKKRRTSASTRVAAALRMAATSLRNSQTALGAYYRHMARRIGADVAVFSTARKLATLIYRLLRWGQAYVDEGAEAYERRYEQSRLLSLKSKASQLGYQLVQSA

SEQ ID NO: 269429 - protein, 463 aa, unidentified
MKGQQRRGGKKGAGDQGANLPAIQSNVAGIDIGSREMYVCGPPQQDGRREIRVFATTTQEIQTCARWLQQCNVRSVAMESTGVYWIPVLEILESYGLETLLVDTRPLSRVPGRKTDVEDCQWIQTLHSHGLLQSSYRPTEAISELRSVVRQKAVLVREQADWVRRMHKCLDQMNVRVHHAVKDTQGTTGMLILRAIVNGERDPKKLAQHRDPRCHKSKEQIAEFLTGHWRSDHLFNLREGLKMYDTIDERIQAYEQEIQRRMEQLTPAGQQTAEAPPLKNPEKRKAMKRRDQEGKRQALYRMVGADLTTIDGVGVETAEVIISEYGIDVSKFPTEGEFVSHLQLSPHRPVSGGKVLKKPRQKPKGTRTGAALRHAAVAVRNSHSALGAYFRRIARRKDASVAVFSTARKIATLVYRMLRWGQAYVDIGQEAYEQQHQAVRLRTLISTAAQMGYKVIKETAASC

SEQ ID NO: 269430 - protein, 419 aa, unidentified
MNYVGFDWASRAHDVTVLDEAGGVLDRWAFPHSETGWVTTLDRLARHGLAAEVPVIIERTSGLIVDRLLAAGHPVVPVHPTAFYAARPRWGASGAKSDPGDSYKLADYLRTDGHRLRRLTPTDPGLHELQALVRLRDDQVRARTAATNQLTAILDNYWPGPKQLFMSLASQIALAFLTDYPTPTSAAHLGEARMAAFCRRHAYRGGKSPAELLSRLRAAPVAPVGLPPATLAAMVTAQVTVLKTLQTVISDVERLIAVRVVAHPRSNLFENLPGVGMINLAQLLAEVGPILDRVDSAEQAATECGAAPVTRSSGQTRGVYFRWAANTRARKAITSFAHNARMQDDWAAALYADARARGKRNPHATRIVARAWLRVIWACWTSGQRYNPDRHHSSRFLHRCHPAGAQARSRWSPPPEERS

SEQ ID NO: 269431 - protein, 341 aa, unidentified
MKDTVIGVDLAKNIFQVHGASRAGEVMFRKKLRRQQFMQFMATQSPALVVLEACGSAHYWARELAGAGHEVRLIAPQYVKPFVKRQKNDAADAEAIVIAARQPEMRFVEPRTEAQQARGVLFRARQRLVHQRTELVNALRAVLYEFGLVVPQGIAHIRHIEAMLGEAVLPEAVKQECLDLLRQISEQSVRIDVRTKKIRMLAQESENTCRLQSMPGVGPLTALAIEAFAPDLQSFRRGRDFAAWLGLVPRQYSTGGKTRLGRITKTGNRQIRTLLVLGATAMLHRAHKWDSAAGQWLCELMARRPRRLATVALANKMARIIWALLSRKEIYRPAGVSVSAG

SEQ ID NO: 269432 - protein, 323 aa, unidentified
MTLVVGIDIAKRTFDLAILQPNGKHRTKSKLSNDQAGFAVFEDWLQRHAEPGAWIVMEATGIYHEALAEHFHALGYRIAVLNPAQIARYAQSQLQRSKTDKLDAKLIATYGQRHLDHLRAWQPEPLSLRQLRALTRHLEDLQALRQMELNRLDVSRENVKDSIQAIVQRLNEQIEWTLKQIKQHIDDDPDLRGKRDLLVSIDGIADKTAALILAELGEIERFTHSRAVTAFAGLDPRLQESGAFYGRTRISRTGSARLRSALYLPAVVAMTYNPAIKAQVERLRARGKMGKQTVCAAMRKLLSIAYGVLKSGKPFDPALAIAH

SEQ ID NO: 269433 - protein, 310 aa, unidentified
MDTCFIGIDVSKDRLDVHVLPQGEAFAVPRSGAGVEALCRRLGGLSPSHVAVEATGGFETVVAAGLAGAGLPVVVVNPAQVRHFARALGERAKTDPVDAAVIARFVAATRPELRPLADAATQLLADLVARRRQIVEMIAAERQREKRATLRRVRKSLARLIAALEKELAEIDGEIGDHMRGSPAWREAEDLLVTVPGVGPITARTLIADLPELGRLGRGQIAALAGLAPHTRQSGQWKGRSFISGGRASVRTALFIAAQVAKRHNPVLKRFYQRLIDAGKPKMVATIAVARKLLVILNTIIRTKTPWQTA

SEQ ID NO: 269434 - protein, 339 aa, unidentified
MVFTIGIDPHKGSHLAAVLNENEELLEELRVRADRYQRERLLKFAAPYVPRVWAIEGARGLGALLAQQLVAAGETVVDVPAKLSARVRALDNECSDKNDSHDARSAAIVGMYNPRLSLVVPEDHAMVLRMLAKRHHDLQGRRTQSICRLHALLVTMVPGGLPRLLSADRAAKELRRLRPADAVGVARRQAGYELLDEVRDADRQLRDLHGRIVAAVRTADTTVTNVYGVGPIVAAYLIGYTGDVTRFASKDHYARYNASAPLNASSGPKPRHRLNNKGNRQLNHALHLAAVTQISHDTNGRDYYLRKLAQTNSKKEAMRALKRRISDAVYARLLADASR

SEQ ID NO: 269435 - protein, 379 aa, unidentified
MKAITLHLGLDVHKDSITIAIAEPGSKGELRLFGTITNDIDRLEKALSRIRKAHPGSQLEVAYEAGPCGFVIARRLKQLKVPCLVTAPSLIPKQPGSPFKTDKRDARAIARLLRAGELTGVYVPEPTDEAIRDLCRARTDAVDDQRRCRFRLKAFLLRHGYRYQGKANWSQPHMRYLRELVLPHPAMKAILEEYLQGIDAAHARVQRIEASMLTLLETWRLKPAVQALMAFRGFQLVAAMITVSELGDIHRFAHPRQLMTYLGLVPTESSSGPHQRRGGISRCGNGHQRWLLTECAEHYALPPKVSKELSVRQEGQPQQVRDLSWKAQNRLHRRFIKLLGRRLQRNKAKVAIARELCGFIWALLRTQPCYTQPSATTAS

SEQ ID NO: 269436 - protein, 469 aa, unidentified
MRVTLGIDVACRADHQASLADERGEFVWSGVRFRTKVADLQGLWSRVPAEAEVTVVLEPTRNAWAALAAWFTRQGARVVMVPSTQSADLRAYYSKHAKNDRLDSRVLARLPLLHPEGLRPVSGAGPADALRRATRRRGSLVARRTAVMARLDALVELLGPAWHGVLGSDYEKTAIAVLAHYPNPTQLLRLGPTRLEGFLRKHSRGHWGRVQADALRAAARESITLWDGGMDFAALADDIRAEAAQYLFLDDQIGQVDARIAALVAERDPAGILTSTPGVGAVVAGIIAGRIGDPHRFNSLAAVRKFAGLVPTVSASGTMTGTGKVAKAGDGLLRHGAFIAADSARRTDPQLAAKYAHLINDGHHHNDAVVHLAATLLTRIVACWRDGIPYVIRDLDGTVVTAAQGRAIVATQHQVDPATRKRLRANRTTQTLKGRDNSARTGRVRKESPGAPAHRPATTHPTKKSPATT

SEQ ID NO: 269437 - protein, 390 aa, unidentified
MADALDIIIGVDPHKASWTAAAVDRDHRVHGILRVASSAAGYRELRVFAAQWPGARWAIEGGAGLGRPLAHRLLEEHIDDVVDVPAKLSARVRALGHGHGRKTDAADAVSTAIAARTTATLQRISLEKPSDALRLLSDRRDDLVAARTQTVNRLHAALTALIPGGAPTTLTAPKAAELLRTVRPRELVAKTRRAVACDLLADLRRLDGQLKALDRQLAAGVKASATGLTDLYGLGPVLAARILGRVGDISRFPSAAHFASYCGTAPIDVSSGDTARHRLSRAGDRALNHALHIMAITQARGYADGRAYYLRKRQAGKSHNEALRCLKRRLSDVIYRQLQHDHRAIATGPGGQPGATLTSSAAGSTPTASSSDQSLPGPATADSTAVPHAS

SEQ ID NO: 269438 - protein, 413 aa, unidentified
MAMRKREEQVFPNAAGIDIGASSHWVAVPPDRTDAPVREFGVMTDDLNALADWLLACEVDVVALESTGVYWIPVYEVLEQRGLQVWLVDARQVKYVPGRKSDVQDCQWLQKLMSHGLLRAAFRPAADVCVLQAVVRSREVLLTEQASWVQRGQKALVQMNIQLTEVIRDVMGQTGQAIIRDRVAGERDPKALARHRHRRIKASEPDIVRALTGNWREEHLFVLKQALGMYDDIGAHLHECDAKLRELLAERSVVNVEIGKIPRTGSKAREAFDARQQLAHWAGADLTRINGLGIDSVMKILSEIGTDLSRFANVKHFCSWLGLCPATRISGGKVISARTKRLANRVRQALKMAAMCLSHSDSALGAFYRRRCSRMDKPRANTATAHKLARMVYFMLTRGEAFVDEGQPRYEEQ

SEQ ID NO: 269439 - protein, 316 aa, unidentified
MAARHVFVGSDVAKAHRDLAVRPSGERWEVANDAPGMAALVGRLQAVQPTLLVLEATGGSQRAVVAALAAAALPSVVVTPRPVRDFAKATGPLAKTDALDARAVAHCAEAVRPTPRPLPAAQTEELRARVARRRQLSARRTAEQNRLGGASGRLRADIQAHLTWLAQHLVALDDDFDTRLRARPVWRERDEVSRRVPGMGPVCARTLVLDLPEVGPLSRQRSAALVGVAPCKRASGPLRGRRTIWGGRAPGRAVLSMSTLVAVKHNPVLKAFYVRLCAAGKAKKVALTACMRKFLTILNAMVQPQTPWQPREVSIA

SEQ ID NO: 269440 - protein, 358 aa, unidentified
MTGSSDYESVQVFIGVDVGKDTHHAVAVNRSGKRLFDKALPNDENKLRSLISDLKQHGQILLVVDQPATIGALPVAVARSEGVLVGYLPGLSMRRIADLHAGEAKTDARDAAIIAEVGCELSMICGFDDDLAAQATQASNRIRGLLTQIHPALERVLGPWLDHSAVLDLLQRYPSPEKLASQGEKRLASQLCKLAPRLGKRLAADITQVLAEQTVVVPGTNAAVVVLPRLALQLITLRKQRDEVAMEVEQRVLTHPLYPVLTSMPGVGVRTAARLLTEVACRAFASTAHLAAYAGLAPVTRRSGSSIRGERPSRRGNKTLKRALFLSTRPDIQGLLHTQNEPGKATQPGAYRPGKAAL

SEQ ID NO: 269441 - protein, 365 aa, unidentified
MRKLARPVQKVNADVVGLDVHQRQITFTHLDPHGEEVEVGQVGCSEADVLALLARLPRPLHVAFEAGGSTFWLYDVLVKALGKGFVHVAQPKKIRAIANSTQKSDENDSWWLAYLTAEGRLPECFIPTGQLRELRIAVRERFEVVKLMTLAKVRLRAHLRQMGVKLPVRKLDSITGWNALVDLVEASDGVQARAINHHLVLLEHLQASLADWEQVVEDLAAGFPEVKTLEQEMPGVGPVLAAVLVAELGPIERFKSPKALGRFTGLTPADRSTDGKARPGSITREGAAHLRWALTQAAMGCLRSRSGPGLAVGNWIRAKQRRMNCKAKARTAGARKIGESIWRLFHLGECFDAAKPFGGIPAEAR

SEQ ID NO: 269442 - protein, 445 aa, unidentified
MEVVFSRCSGLDVHKASVVANVRIRHDDGRIEAVKQSFGTTTNELLKLAAWLSEHKVTHVAMESTGVYWKPVYNILHKQFDVWIVNARHLAQVPGRKTDDSDAEWIAKLMSHGLLERSFIPPEEQRDLRDLTRYRTRLLQEKGSTANRLHKVLEDANIKLTSVASSIQGVSVRLMLEALIADGQSPAEMAELAQKRLRNKIPQLVEALTGRVRPHHRFLLQELLTQLDSQNQRIEALNQQIAKLTQPYARIIQRLDAVTGIGLRTAEIILAEIGPSVENWSSAAKLASWACICPGNHESAGKRKSGTRRKGQRWLVSALVEAAWAASRSKDTYLASQFHRLRARRGAKRAAVAVAHSILTIVYHLLKDPTATFQDLGGDFLLKRNKEQEQRRALKTLRTLGYDVVLTPVTAYLSFEAHFLYSVDFPGSFLVPLVLCCLFSFSRLL

SEQ ID NO: 269443 - protein, 408 aa, unidentified
MNLFVGIDVSSEKLDTCFLNSEDHILLKVSLPNSLVGARKIKEHIFQFNELIRYDRIIVGMESTSVYSFHPATFLAEDPELKSLGIEVAVINPKTISRFKGIFDEDKTDEIDAYRIADFLRFDRFNTSLIKEEKYVALQRLTRSRYQLICQLTEMKQHFLENLYYKCNTLTQEVDTSVFGATMMHLLTDSITLDEIADMPLEDLVTLLQEKGRGRFSDPEKLAKSISKAIRDSYRLGKVMQDSVDIVLASYAMMIKAVNNQIKEISKAIEKLFEIVPESKSLLSIPGVGPVYAAGIIAEIGQIERFENEAKLAKYAGLYWKRKQSGNFESERTTISKTGNHYLRYYLIEAANSVARYEPVYNKYYSRKYKEVPKHQHKRALVLTARKFVRMVDALLRNHQFYAPERSA

SEQ ID NO: 269444 - protein, 341 aa, unidentified
MKKFIRIGIDLGKRYFQVHCLETEGGRSISRKLTRSKMLEFFSQIERCRVGMEACGSAHYWARELVAMGFEVVLIPPAYIKPYVKRGKNDAVDAAAICEAMSRPGMRFVPIKSDDQQAVLMLHKTREMLVKQRTMSVNALRGHLAEFGIVVAKGIGRVDELLALAQSDAALPQVAKSAVADQAQHLEGLDQSIEAVEDEIARAHGQNPTSRLLDEVPGIGTLIASVIAASVPDPGVFKSGRDFAAWLGLTPRQNSSGGTEKLGAITKQGNRYIRKMLVTGSTSVLRVAGRRKGALADWINALRARKPERVVAVALANKLARICWAIMTTGESFRVDTYVKV

SEQ ID NO: 269445 - protein, 409 aa, unidentified
MLFVGDDWSEEHHDIEIQDEAGRVLARARLAEGVAGIDRLHTLIAIHAADDDVDLEVAVGIETERGPWVQALVASGYRVHAINPLQVARYRETHHISGAKSDKADAHVLAQMVRTERAQLPTVAGDSELAAAIKVVARAHKTMIWEQTRHMLRLRSLLREYYPAALAAFPDLTTPDALELLAKASDPASGARLTITQITAALQHARRRKVAAKAKAIQAALRSPQLRLPERLTGAYAATVRSQVAILVTLNAQVQTLQEQVEAHFGQHPDAEIYLSQPGLAAILGARVLGEFGDDPHRYHDARSRKNYAGTSPITRQSGKTKLVAARHVHNDRLVDALGQQAFSTLTSSPGARAYYQQLRDREVDHNAALRQLGNRLVGILHGCLKTHTRYDEATAWSHRSQHELTNAA

SEQ ID NO: 269446 - protein, 409 aa, unidentified
MEQQLERCCGLDVHKETVAACVRIGGRSGKAEQHVQTFGTTVGELLVLRDWLVAHGVTHVAMESTGVYWKPVFYTLENDFTCLLVNAAHIKQVPGRKTDVKDCVWIAQLLEHGLLRGSFVPPAPIRDLRDLTRYRKALIHDRTRVANRLHKALEEAGIKLASVASDILGVSGRAMLAALVDGTTDPAVLADLARGCLRRKLPALRQALASRFRPHHAFVLGQLLAHLDYIDETIATLSAEIERVMVPLAEPLRRLDTIPGINQRTAEVILAEVGADLRAFPSARHLASWAALCPGHHESAGKHKSGKTRKGNRWLRTALIEAAAGASRAKNSALQARFRRVLRHRGPKKAVVAVAHALLRMVYHVLTDGTVYREAGADYYDRHHSQRVTRRALQALERQGYRVTLEPAA

SEQ ID NO: 269447 - protein, 387 aa, unidentified
MYFVGIDISKFKHDCAIIDEIGDTITPSWSFSNDCEGFSLLKELLDSLEGEKKIGFEATGHYGQNLKLFLENNGFTFMEFNPLLINRFVRSKSLRKTKTDSIDALMIAQYLMTVEYKPYPPSFYALEKLKSLTRFRDSLIRQRSKQLVELTNILDKVFPEFKPFFKGRFSATALYILSHYASTEKISNMNSKSYEPLRRLSRGKFSMVDFVELKTLARNTVGSTNDYLLQEMGITIDIYNQLQSKVEEIELQINDCVLGLAPPMLTIPGIGVASAAVILSEFGDLSKFCSPSKLLSFAGLEPGYFQSGTSESTGKMVKHGSSHLRYAIMNCAQTVINNEPTFATYYAKKRAEGKEHRVALTHVAKKLLRVIYTLQTKGLSYNPDLVR

SEQ ID NO: 269448 - protein, 352 aa, unidentified
MEMIAMDCHKRYSQACVQDEMGKIIFEGRIQHDPVEFRAFLGGRTPGSPVAIETVGNWYWIVDEIEKAGLQPLLVHARLAKLLMGLKNKTDKLDARGLNRLQRVGTLPTVWIASADIRDKRELPRTRMLFAQLRTRLKNRIHSVLEKYGLGRSLDAASDIFGKRVRKDLERALGLLPEHAGYTAGLLLGELDRVQRIIYDIEKLMKAVFEDTAQVRLLQTLPGVAWILSVVIWLEVGDIERFGGPDRFASYCGTVPRVHSSGGKTRFGPTCPDVNHYLKWAYAEAANSVGLNHRRLPDRHVSQLFGRIRSRRGSAKAVGAVSRHLAEATYWMLRRQEAYRERGVLAVSSKGA

SEQ ID NO: 269449 - protein, 341 aa, unidentified
MKNLFIGVDFSKEKVDVAILFADGLVETAARVFNEFKTTVSGYRQLVKWVEQNSCGIDSSLWLFCGENTGDYSKGLCNFLYGKGYDMWLENAKSIKDASGLRRLKSDRADASMIAEYAMRNYDKAVMYEPLSESLTQLRELFLYRQMIVRPRCSFQVRRGEKRLTMEKSPVKTMISQSGRHIVSELNKEIEKIDKRIADLIKSDEELTEVFTIVTSVPGIGTQNAVCLMVYTDNFRRFNYDSRKIACYYGLAPFGKDSGTSVHSDPHVHYMANRQIKAMLTQAALAAVNFNPIMARYYMRLVERGKKKQVALNNVKNKLVHLVTAMVRNRQTFTPEYKISA

SEQ ID NO: 269450 - protein, 392 aa, unidentified
MYIVGIDIGKNHHEASIVSPEGKQIGRSLRFATTHKGADSLMSFIFKNIGNSPCVFGMEATGHYWYPIYSFLKAKGYTIYVINPIQSDSLRKMYIRQTKNDSIDSFLIAEVIRFGQFGTTSMADENILAMRQLCRYRDSVISSRTEIKLRIGTIMEQIFPEYEKQFSSLWVSTSMGILEKYLTPENIENTPIDELFEIIKDKSHNRLTRAKAISIKEAAADTFGIKIAQDAFSFQLKQLIDRMNFLDKQTEALDCQILEYYEKFDCYLHTIPGIGMIAAATILAEIGDINRFKSSSALVAFAGIDPTVRQSGEFSSTHNHMSKRGSPYLRHAIFLAATTCSFHNSPLNAYYKKKRDQGKHHLTATGAVARKLTTVIYAVLRDSKPYEPKSFC

SEQ ID NO: 269451 - protein, 385 aa, unidentified
MDIRKSSTPAVTGDVATVFVAIELSGMEWLAALQSPRQERPCRRKLAAADAAGLWAMIERERSALQRAGWREVRVVTCYEAGRDGFWLHRFLVSQGAESFVVDPGSILVNRRARRAKSDRLDVESLLRVVIRHDAGDCSLGRMVVVPSIAEEDARRPGRERQRLLSERTAHSNRIQALLALHGVYGYRPLRSDRWVRLAGLRRADGEPLPAQLQEEIERELHRLEFVDGQIAAVEKQRAAALAAAADAAARQVKELRRLQGIDIEIGTTLVREVYYRQFANRRKVGSYVGLTSSPFRSGGIDHEQGIAKAGNRRARSMAIELAWLWLRHQPDSALSRWFHTRLGKSKSRRLKRILIVALARKLVVALWRYLTVGLLPEGARLKST

SEQ ID NO: 269452 - protein, 402 aa, unidentified
MNAVGIDVSKSKSGVAIMRPFGEIVSAPFEIKHTASDIHSLVELINSVEGESRIVMEHTGRYYEVLAHQLSKANLFVSAINPKLIKDFDNDSLRKVKSDKADAVKIARYALDKWQNLKQYNVMDELRNQLKTINRQFGFYMKHKTAMKNNLIGILDQTYPGVNTYFDSPARSDGSQKWVDFASTYWHVDCVRKMSLNAFIDHYQNWCKRKKYNFSQSKAEEIYGKAKELVPVLPKDDITKLIIKQAVNQLNSASTTVESLRTLMNETASKLPEYPIVMAMKGVGASLGPQLIAEIGDVSRFTHKGAITAFAGVDPGVNESGSYEQKSVPTSKRGSSDLRKTLFQVMDVLIKTHPQDDPVYQFLDKKRAQGKPYYVYMTAGANKFLRIYYGRVKEYLASLPES

SEQ ID NO: 269453 - protein, 502 aa, unidentified
MSNQTASVQERLQHLQNHYIDRVSAFRIRLAESGLDRVLIALLDIGKNAHWATAFLATGLELVQPHRLPTTRSGLNRFTAMVDQLIVEYDPKLVLLGHEPSGVYHEPWARALMSLYAAHIHGDAHPAFEYRFFNPYQVKLARQQTHLRHRKTDPRDLAAMLDLMLRGLGQPAFLPSHTELLVRQEVGFVRAQARLLGYMERQLRQFIDHLWPGAVVNVQQFQKAHPDLPKPTPIIQTRPLQRDRLRVLLRYCPNPHDLRALSDQHILDLYRQHVGRAGPALLHILRTWIHHAVLLPPDVSAPLAEQLQRLFTQYLNVETLIEEGRGRLMPLVPQTAARHLPAIPGLGNYDAACYLAGIGSAPRFSHAGQVWAFAGFDPIQDGSGDRPERVGHLSKRGDPAFRDALYQMGYRVAQNYAPLSLTFLDAFERGKCDVEATIHAAHRLNRICFHLVQNDEPFVSRSTDALEAERSRRWAQFTRLKKRRKSRRSRGKRRRKQRLARS

SEQ ID NO: 269454 - protein, 415 aa, unidentified
MERLIERCAALDIHKDSLVATVRVPSVEGGREQVTHTFRTTTAGLLALRDWLEGFGVTVVGMESTGVYWRPVYYLLEERFECWLLNAHHLRNVPGRKTDVQDAAWICQLVEHGLVRPSFVPPRPQRELRDLTRYRKAQIEERTREVQRLDKVLQDAGIKLSSVASKVLSVSGRAMLDALLAGTNDPEALAELARGRLRQKLPALREALSGRFSGSHALLVSQILAHVDFLDEAIATLSARIEEQLAPFAAKVELLDTIPGVDRRAAEVILAEIGPDMSRFPSHRHLASWAGLCPGQHESAGKRKSGRTRNGSKWLSATLAESAKAAARTKGTYLAAHNARIKGRRGASRATIATAHAILVSAYHMLDRNVPYAELGDDYFHRRERERADRYTHRLVRQLERLGHQVTLEPAAEAA

SEQ ID NO: 269455 - protein, 362 aa, unidentified
MQIIGCDLHARQQTLAMLDTGTGEVVNRTLRHEGNSVREFYSALPGPVRVGIEATGSMKWFLQLMEELGIDCQVGHPATIRAAEPRRQKHDQRDAELLLKLLVEKRFPSIWQPSKELLDLRGLLLHRHQWVRLRTRIQNALQAIALANGLRRGSSLWSESGQRDIASLPLATHTAHRRSELQAMYARFEAEIERLNQQVLEQAVQRPTAELLMSHPGVGPITALATDVFLGDPKRFSDGKALASYIGIIPRENSSGGRQRLGGLSKQGNPLLRFLWCEAAAHAVRRDPELRRFYRRKLVQKGLGKARVAAARKLGIRLWIMLRDQIDYNEFCRRGQMQQKSGDACAGMPGARYGAKSHRLID

SEQ ID NO: 269456 - protein, 408 aa, unidentified
MERVGERGCGRDVHKKSVTAGVRAPGAGGGRGQEVRTFGTTTAELMLLRDWLEAHGVTTVAMASTGVYWKPVFYGLEDGFHGVLANAGQIAQVPGRKTDVQDCIWIAQLLEHGLIRSSFVPPRPIRELRDLTRYRKAIIEDRTREVNRLHKVLEDAGIKLAAVASNVLGKSGRDMLQALVAGTTDPETLAQLARGALRKKLPALRQALAGRFRPHHAALLTHVMAHVEYLDEAIARGGIEIDAALRPFAEAMTALDSIPGVRRRTAEVLLAETGGDMAVFPSARHLASWAGLCPGQHESAGKRRSGKPRPGNRWLRATLLEAAWAATRTDTALAARYRRVMRRRGHKKAIIAVAPAMLVIAYHVLHDRTTYRALGANYDEQRQATRARRRAIHTLEAQGYRVVLEPAA

SEQ ID NO: 269457 - protein, 305 aa, unidentified
MDDAIGIDVSKATLDVAVHGRTQQTSFANTALGHRRLVKWLLALQPRQVVLEATGRYDQAALDALHSAGLPVVRMNPRQVRDFAKATGQLAKTDRLDAAVLARMAHALELPRYQPKADWQRRLGEWTQRRRQLVDTLATERQRAESLTDPVLRRFSRALVSQLERTVLQLEREIAAQVQARAELAALRTMKGVGPTLQATLASELPELGRLSGKAIAKLVGVAPLARDSGTLRGRRTTWGGRSQVRNPLYMAAMSAMRFDPRLKAFYEGLRARGKAGKVAIVAVMRKMLVILNARMRDQLALEPA

SEQ ID NO: 269458 - protein, 331 aa, unidentified
MFKNKSMKVFYLGVDVSKKKLDLCLRSNGKDILYDVIPNDLSSIKSWLTRTFEKFFLSEDSLVVCAEHTGQYTYPLVCATKSIGVYLCLEDAAKIKYCHGIPRGKNDKIDACRIAMYAERYNDCLQPYTASELIIQKLKNLSTERSMLVADRAKYQSQLKDQVDYMEHSIYIAKCNRVEGIINTFTDYIAQIDLEIKELINQAPVIAHQMDLLMSVDGVGERVALKMIMETDAFTSFTDPRKFCCHAGVVPFVYVSGSSQRSKNRVSNRADKSIKHLLHMAALSVSQVKNSPLKKYYDRKVEEGKNKMSVLNAVRAKLVTIMFAGVRADCF

SEQ ID NO: 269459 - protein, 361 aa, unidentified
MAAPNIVGVDPHRKTFTAAVLDSRGGELGHAHFPNARQGHDAGLAWAAGLGPADRWGVEGASGLGRHLAEFLVAAGCDVRDVPPHKTAVRQRGRHEGKTDRLDSHRVAAETQTNPRLARAFKHAVTAAPDSVRDRIALWHNARTSLTKVRVQLLGELDALVHDLPEDLRTQLRPAKTVSARVNSLRRLDTSGVTDPTVALRLRLIEHRVAMLRDVLEQDKAATAELTALVEETKSTLTELVGIAPRAAAEIIVETGDIRRFTEAGFARFNGTAPIPASSGEGENAPVRHRLSRGGNRRLNAAIYRIAMIQLRYEPRARQIHDQARAHGHTRREAMRVLKRHLSDAIYRTMLRDARRAGDLT

SEQ ID NO: 269460 - protein, 316 aa, unidentified
MTQKQCIGIDVSKAVLDWATWPQESEGQQAHTDEGIAQLVTYCLELDPERIVLEATGGYEVACATALMAVGLPVVVVNPRQVRDFAKALGRLAKTDRLDARVLAQFAGVIRPQLRRLADEPARELEALVARRRQLVVMQTMEQNRLKQALPKLRSGIRDHIDWLRRQIADTTDGMRQALQDSPAWQVKSDLLKSAPGVGDITALTLIAELPELGVLNRKQIAALVGVAPLNRDSGTLKGKRTTWGGRSTVRSALYMAALSAIRDRQKPLGAFYQRLVAAGKPFKVAITAVMRKLLTILNAMARDNQPWNPDKISLT

SEQ ID NO: 269461 - protein, 342 aa, unidentified
MQITTIGLDIAKNVFQVHGIDANEKVVVRKQLRRSQVIAFFKALRPCLIGMEACATAHYWARELTKLGHEVRLMPAKDVKAYVKRNKNDAADAEAICEAVRRPTMRFVRIKSAEQQGQLMQHRTRDVLIRQRTQIINALRAHLAELGIVAAQGNAGVNELRAIVADERETRLPIDARASVIVLATQLEALECVIGAIEKRIKMQHRSNEASQRVETIPGIGVIGATAIVATVADPTIFRSGRDFAAWIGLVPRQDSTGGKQKLGPISKQGDRYLRRILVVGAIAVLRRAMENPGKYPWLTQLLARRPFKVVATALANKMARTAWALLAHGGTYRAPELAKAA

SEQ ID NO: 269462 - protein, 346 aa, unidentified
MMLIGCDFHPSWQQVSWLDTETGETAEQKLVHAPGEAERFYRHLPAPALVGMESTGNCQWFVEMVTAAGHEVWIGDAARIRASDVRQQKHDKRDAALLLQLLMEGRFPRIWTPSSQQRDLRQLLIHRYKLVRLRAQAKNGLQHLAMNQGVQKKRRRWSEAGQKLLRELPLRPWASRRREDLLSVLALLDEKILSLNLAVKEAAEKDQNARLLMTQPGVGPVTSLAFVLTLGDVSRFPRGKQVASYLGLIPREYSSGGHQRLGSISKQGNRFMRMLLVEAAQGAVRYDPQFRSEYLHRCHQKPKGVAKVAAARKLAIRLYWMLRTHTAYPAIVSIESRSRVALVGAS

SEQ ID NO: 269463 - protein, 311 aa, unidentified
MATFAGIDIAKHTFDLALEPQQKIHQFDNDAQGIRQCARLLQKLDPQLIVMEPTGGYETNLQIHLQQAALPVAVVNARRIREFARADGKLAKTDTIDAQVMARFAEKMRPPAQQPLDAHSRKLKACVARRHQLVHMRAAEVNRTEHATDPFIKQSIRAVLKMLDKQIDKLEQQIQKLIQTVETLRHKAEKLRSVPAVGATTAALLVTELPELGQLNRKKIAALVGVAPINRDSGNYRGKRMTGAGRKDLRARFFMPTLCAIRSNPVIRDFYQRLCNNGKTKMTALIAAMRKLLTILNTMLKKNESWNPKIA

SEQ ID NO: 269464 - protein, 338 aa, unidentified
MEQQREYVGIDLHRRRSVIVRITESGEVLETVRVDNDPLSVVHAVMHEDPNPEVALEATYGWYWAADLLQAEGATVHLVHPLGLHWDSRRVKNDERDATELAKRLSRGDLPEAWIAPPQLRELRELVRYRAKLTALRTSAKAQVHAVMAKEGVLPAYGRMFGPAGQRLLDEMPVEGVYRDRVESLRHLLEIYERELLLVESHLSRRLKHHQGYSAIQAIHGVGPIMAAIFVAEIGDASRFPSARHLCSWAGITPSHRESDVKVHRGHITRQGNNLVRWAAIEAVARYHGGAPIEPTFQRIAKRRGTMIARVAAARKLLSLVYYGLRDGEIRCLTREAS

SEQ ID NO: 269465 - protein, 410 aa, unidentified
MYKICCGIDVHKTFVVACIASTNDKGVTSYESHRFSTYTSGLKTLLQWLIDRNCKDVCMESTGKYWIPVYNILEKGCSIVLAHPKYVKAIRGKKTDKKDAKWIADLFKHNLVAGSFMPPSDIRQLRDLMRYRFKLTCFKSSEKNRLQNCLTVSNIQLGNVVSDTFGKSAQAILDKILENPADTSFDLEPLVFKSLKKKLPELRDAIDGYITPEQAGKLKVIKTHYEDLESRKAELEELILALAAPYQQELAILQTSPGISSDFTAIGIISEIGTNMEAFPSAKHLCSWAGLTPTNNESAGKKKSVRVSKAGCYIKPLLVQCANAVIKSTKHPEMRNRYLRLKKRRGHKKAIIAIARMLLTALYHMLKNGENYNPELYRKTDLPPAGREITIEQALMLIRNQGYKIKSATT

SEQ ID NO: 269466 - protein, 349 aa, unidentified
MVMLGIDAHKRTHTVVAVDEVGRRLGEKRTTSTTTEANLEVLRWADRFGPERRFAVEDCRHLSRRLEADLLAAGEELVRVPPKLMAHARDAARTYGKSDPIDALAIAQAALRNPDLPVARLDGPSRDLRLMVDHREDLVRDRVAHINRLRWHLHELDPAWDPSPRSLIRFKQLDGVAARLQGLESILAEICRDLVALIRELTEKANALERRIIERVRSIAPNLVEVAGVGALTAAKIVAEVAGVRRFRSKDAFARHNGTAPLPVWSGNKVRHRLSRTGNRQLNTAIHRTAVTQIRIHEPAKAYLERRMSMGNTKTEAIRALKRKLSDVVYRALLADAEAVSAALLGEAA

SEQ ID NO: 269467 - protein, 341 aa, unidentified
MNYIGIDHHKQYSHMTVMDEKGKVIKTGKVGNFRCEVEEFLEGLGQEMEAVIEAGHSSYTMIDLLEELGVKVKIAHPLQVKAIAKAKIKTDKRDSKILAHLLRSDLIPEVYHRDKENRGFQRILRQRVFFVATRTRVKNRITSLIAQQSEEVRGPACQLNDLFNKTGMEFLQSIKLSSSDQKLLDELLKLNRHLERRIKESNDLVESLYTRMEEARLIRTVPGFGRFFSVLVATEIGDVCRFERAEKLHSYAGVIPSTYTSGERSYHGRMIKQGNKWLRWAAVEAVWPAVRSDFDLKLFYQRRVRRKSANSAKMATAKRLLTIIYSILKERREYIPYKRKK

SEQ ID NO: 269468 - protein, 334 aa, unidentified
MQNITLIGIDLGKHTFHVHAQDKDGHALLRKKFSRTQLTAFLSTCSAATVVMESCAGAHFMARHISQLGHQVKLISPQFVRPFVKSNKNDFIDAEAICEAASRPSMRFVTPRTEDQQAMGALHRVRDAFVKERVKTTNQMHGFLLEFGISMPRGIAVIRRLTAVLEEHPLPPYLTRLLLQLRQHYVYLSEQIEGVEQELKTHMADDEATQRLLSIPGVGMITASLLATKLGDGKNYAGSRDFAASTGLVPRQYSTGGKNTLMGISKRGDKNLRRLLVQCARAFMQRLEHNPGRLAEWVKVQLTRHHSNVVACGLANKLARIAWAITAHRTVFSQ

SEQ ID NO: 269469 - protein, 355 aa, unidentified
MALSSPCIAKPSYSLYCGIDIAAKTFTAKVCKGDEEPSKALNFKQTAEDFAQLKKFLLAPELPPDQILVVMEATGTYWTLLASYLDHNGFGVSVINPAALHDFAKSLLLKSKNDQLDAQTLARLGRSHKPTRWTPPPAIYRELSQRLSQRADLMEMRQQLKNQLHALSVCEAVPSVVARLELLIETLSQQLKELDKEIKKVVMEEPLWAASVELLETITGIGWLSACWLVTLTLNFTKCEKAESLVHYAGLAPTPRKSGTSVRNRPMIGHGGHGPLRAVLYMAASSAIRFNPVIKAYYLHLRENKGKAYKVARCAAARKLIHLAFAVVTSKQVFDPDYLVHLKAKKLAEGLAVAV

SEQ ID NO: 269470 - protein, 350 aa, unidentified
MSIIGCDLHSRYQIIAGLESESGEVVTRRLEHENGEAKAFYAGLPRPSLIGIEATGYTQWFERLLAELGHELWVGNPAEIRARAVRRQKTDRGDAEHLLDLLLTQRFPRIWIPSVEERDLRQLLKHRDKLVRMQTSVKNQLHFLAMSQGLCRKGKLWSVRGRAELEGLELGPWASWRRQALLEMLDRLKPQIEELHQAVAAEAERRPEVVQLMKQKGVGPVVGLAFVLTVGPVTRFPNSRKLVSYLGLNPSEDSTGGRQRLGGISKQGNEMMRWLLVEAGHMAAQFDPELRRKFQRLKFRRGPQVARVALARQLAVRLYWVLRQASVATPPVRMPGSPESRKVEATRSQL

SEQ ID NO: 269471 - protein, 402 aa, unidentified
MQVDDIDVFIGIDVGKSEHWATALTTAGECLHDRPLPNDEARLREVYEHLGEHGRLLVVVDQPATIGALAVAVAQDMGITVGYLPGLSMRRIADLSPGSAKTDQRDAAVIASAARTMPHTLRSITSSDEDAAALSMLTGFDLDLARQVNQVSNRIRGLYTQIHPALEGVLGPWLEHDSVLEVIATWPTPAALRKAGRARIDAKLKANGCRRHAAWAQAIVEALSKQTVTVAGTDAAGVVLPHLARQLIALHTQRADIAAQVEALVEAHPLYPVLTSMPGVGVRTAAVFLAGTLGKTFTTGAHLASYAGLAPVTRRSGSSIRGEHVSHGGNKRLKQAMFLSAFASLRTDPVSRAYYERKRAQGKRHNQAILALAHRRILTLHAMIRNGTLYNPQPAQPLTTTA

SEQ ID NO: 269472 - protein, 346 aa, unidentified
MNKITRIGLDIAKNIFVLHAVNEHGKLVKRQTLDRSKVLAFFAQTEPCLVGIESCASSQHWAREIAKLGHNVKLMNPKFVVPYRKSGKNDANDAEAICEALGRPTMRFVPVKSVEQQAVCALHTSRQFLVVQRTALINHCRGLLTEFGIVMPVGADKVRRLLAERLHHEADTVPSLLHTLMQDHLLDLARVEERIETIDKQLAQWAKHNQQALTLQQMRGIGMITATAFASGVCDATLFKNGRQFAAWLGLVPRQYSSGGKNKLGSITKAGDPYLRTMLTQGARSIVFHSKDKNDNFSLWIQRLIARVGMNKTVIAVAAKQARIMWAIMAKNIEYQPQRICSPLVA

SEQ ID NO: 269473 - protein, 337 aa, unidentified
MLFCGIDLHSNNCFVVVSDENDKVLYSRRHGNDLDQIRAALSPYRSELYGVVVESTFNWYWLVDGLQEQGYCVHLANTTAIKQYDGLKHRGDESDARHLAHLLRLGLLPEGHIMPKALRGARDLARKRMQLVQQRTTQILSIETSFDQQTGAHLSSNNIKKLSAEEVDGIGLGKMEALCIKANLAVMQAIQSQLDVLENELARYCRDNPAFRLLKSVNGIGDILATVILLETGNIERFADVGNYASYCRCVGSVHVSNGKKKGEGNTKNGNRYLAWAYVEAANFAIRYCDAAKKFYQRKKAKRNAVVAIKAVAHKLARACFHILKTGEVFSVERCFT

SEQ ID NO: 269474 - protein, 317 aa, unidentified
MRTEEVVYIGIDVSKETLDIDAGEFGVRKIANTPAQVRKALTAIARKAQGRPPHACFESTGAYHGTLAAECPAMGIAYSILNPCTVKCFAKSVAHAKTDAIDASVIRRYAEVRRPAPTPPPRKAIADLDERLLARESIMKGTVALRCVLATIKTPSARTPLKRLIASNEKKVAEYDRLIAAAVRADAEVAGLADALATVKGVGTLTAAKLVAWMPELGTLGRRRAAALAGLAPHTRESGKWKGKSRTGGGRKHVRVALYMCATSAICDNPEMKAFYGRLVARGVPKLVALTAVMRRLLCHLESVAKDYYARRREVPA

SEQ ID NO: 269475 - protein, 401 aa, unidentified
MKGENKRACIAIDVSKGSSHFQGFYSAGVPASEVTRFEHTKSGFARVTDLFNLLNEKNNQKPYIIFENTGTYSKPVEVYCQSNNFSYMAIPPLLSAKMRKSDIRPTKTDKIDCATIANVYYLKRLKVTKSGSHIYSDLKTLCSYYNFKMQLMVQMKVKYREHLDMVYPRIDTLFGVYTGTFLDLMTRYPSPHKLKQKSKKQLTDFFIKRDYCGLPKAQRLAILVKEYFKDVEIPVTEDDVLITIFSNHLKELRIMMVDLENHLERIITLGMKTKEYPYLMSIPGIQKNTAARIAAEIQGIERFESASKLCAYAGIDPTVHSSGNYLGKHLSITKKGNHRLRSLLYLVVAGTSKSQALNNPVRDFVQKKKSDGLAPKAAIIAGCTKLTRIIFAVCSKEEFFV

SEQ ID NO: 269476 - protein, 340 aa, unidentified
MVDGTKGSHRKEGTTKMSEDNINAAGIDTGKAKLDVALAGGKARLQIDNALSGWRELATWVKRHNVDRIGIEASGGYERGVVAYLREKGFTVILFQPLQIRAYAGFRLQRAKNDRIDADLIAVCTAATTTVRQAPDPRFQAFCEHLTLIEQIEEDVARAKTRLEAFRDSRHREILASEIKRLKAWRTAELKRLLDALRRHDDLANRLTLIESVPGIGSRTALALLIRMPELGSLSREEAAALAGLAPYDDDSGKHQGLRHIAGGRERLRRSLFAAALPAAFQWNPSLVALYARLTAAGKSHKVALIACARKLLIFANTVVARGTPWTEHHATVSWLLRMR

SEQ ID NO: 269477 - protein, 377 aa, unidentified
MTHFPVSTSNEQFIYAALELSKNSWLLAIQVPGRDNPSLHPIKGGDAEGLVAKLDAARDREAKVTGQVPKVTLCYEAGYDGFWLARFLKQRDIDCLIMEPASLQVNRRARRVKTDRIDVESILHTLIAWCRGERHVCSTVVIPSIEEEDLRRSHRERNRLVRERTAHINRIKGLLFGQGIRGINVKSRYKNLKPAELVTGDGRPLPERLGREITREIDRLAQVQAQIVEVERERDKAPTPCVATERKRHDLLRLNGIGPALSSTLTREVYYRQFVNRRQVANYIGITPSAYDSGDGHRSQGISKAGNRLARVAMVEAAWLWVRHQPDSALTQWFHHRTQGQKGRIRRVMIVALARKLAIAFWRYLETGLIPEGAAVK

SEQ ID NO: 269478 - protein, 391 aa, unidentified
MIYIGIDVAKDKHDCFITNSEGEVLFNAFTIPNNADGFHDLFQKISSLTNDFSNVKVGLEATGHYNYNLLGFLIDKGLPTFVINPLHTNLFRKSLSLRQTKTDKVDAHTIALMMMSGVNLQSYSNTSYHNEELKSLTRYRFDKVQERAKLKTSISRLVNILFPELEKLVPSLHMVSIYALLAEFPSSAQIASCHLTRLTNLPANVSKGHYNKEKAIEIRNAAKHSIGSNMPAKSLELKHTIRLIQELTSEIDEIECSIKSIMDEIRSPILSIPGINYRMGAMIIAEIGDFNRFSSPDKILAYAGLSPSTYQSGQLDGCYSHMEKRGSRYLRYALFNATKFVCIWDNQFSAYLAKKRSEGKHYNVAISHAAKKLVRVIYQLEKSGQLYHRAA

SEQ ID NO: 269479 - protein, 410 aa, unidentified
MEAIFPRCAGLDVHKETVEATSRICECRRVEQQTRRWGTMTHDRLAMSDWMAAQGVTHVAMESTGVYWKPIYNILESRFTVLLVNARHLKQVPGRKSDVRDCQWIAQLLQHGLLKPSFIPPQAQRELRDLTRHRTQLAEERTRTVNRLHKVLEDANIKLASVATDILGVSGRAMLSALMAGEESPVKLADLAERQLRGKIPELERALQGQVTKHHRFMLRLLWKQLAEQEELIAELDARIEAQTRPFADEIERLDAVPGVDRLVAEVVLAEVGADMNPFPSHRHLAGWAGLCPGNEESAGKRTRRRIPPGNRWLKRSLVQAAWAASHTKHTYLASQYRRLVGRRGRKRALVAVGHSLLVIFYHVLKRRTTYADLGGDFFDRLEPARLTRYFVRRLEALGHKVTLESAVAA

SEQ ID NO: 269480 - protein, 338 aa, unidentified
MLHSGIDLHKRTIAFSTVTPDGQSVRDAQLPTTRAAVRAYFAAMPGPHRAVVESTSNWYWLRDLLASEGVELHLGHSKYIKAISYAKVKTDAVDAATLAQLLRSDLIPEAHMVSAEWREARDLLRARLQLVGQQVRCKNTRAGLLAQYNVTVSEALPPLVQLRTTMLAEQHALLGTQAKQLAAALNPLLIPTPDVQRLLWIPGIGRLVAFTILLEVDGIARFPSARDFVSYCRLVPGAGNSGGKTRHKRTKDGNKYLKIAFSHAAIRAIQYFPEIRAFYRALARRKPPIVARAVVAKEIARIVYYVLTKQEAFNGTFKGKPLSRTKSPKWPRLASPDV

SEQ ID NO: 269481 - protein, 367 aa, unidentified
MKKGSIAATKQSGNISQQKLTMGLDLGDRNSWYCVLNEAGQIQLEQRVRTTAKTLREVFGAMPRCRIALEIGTHSPWISRLLSELGQEVIVANARKVRLIGESRKKDDRLDAQTLARLARIDPQLLYPVKHRSVQAQADLMMIRARAGLVRVRTGLVNTARGLAKSYGERLRGCNVRNMNPEKTEGLSPELQTALQPWLAAIESVSERIAEYNQRIEDLAQQNYPRVALLKQIKGVGTLIALTFLLTLQDPHRFGKSRDVGGYLGLQPGRRKSGQSEPQLHISKEGDPYLRTLLVQGAQHILGPFGPDCDLRRWGLKLAERGGRNGKKRAIVATARKLAVLLHHLWVSGEVYEPLHNRCRVAVTAAA

SEQ ID NO: 269482 - protein, 358 aa, unidentified
METRERRSTDYTNKKIYIGIDNHKKNWKVNILCETIDHKTFTMDPVPEILKKYLHKNFPNGNYFSAYEAGYCGFWAHEQLEQLGIKSIVVNPADVPTMDKERRTKNDKADCRKIARSLRSGELMSIYIPSREVQEDRTLLRLHVQLTKEQTRIKNQIKSILGFYGITIPEEKTNSNWSRAFIRWLETIEFKTESGRLALNIQIERLLSIRKTIASLLIQIRQLSKTDRYRESSELLMSISGIGILTAMHFLVEIVDINRFTNLDELSAYIGLSPGEHSSGEKIITGKMTKRGKSHLRYLLIEASWIAIKKDPALMMAYTDYKKKMIAQKAIIKIARKLLNRIRFVLKNKQRYEISVTN

SEQ ID NO: 269483 - protein, 417 aa, unidentified
MKSKTEKIRSINGKTLIVAVDIGKRVHYGYFRAPNGEDFKPFRFYNFKKSFEQFWAKICRFQRQQNLEDIVIGFESTGPYAEPLFHFLRKRPAKLIQVNPMHTKRLKELTGNSPNKTDKKDPRVIADVISLGHALTLVVPEGPAAQLRRLTQARERAMKSHTATVNQLQHLVFVIFPEFFSVMKTLTKSAMYLIKNHTTPESIFAMGFKSLAKVLKRVSRGKLGQGRAKELFEAARDSIGIYEGKESIILEIDHLVSKIENEDRFIDSLEKQMDDYLEQIPYSQSILSIKGIGRITVAGLIGEVGDFGKFNTISEIIKLAGLDLYEVSSGKHKGQRHISKRGRSLMRKLLFFAAINAVKSKGIMHERYQQMLDRGMPKIKALIAISRKLLRIIFALARDNTIYVNNYNQIHHFKLAA

SEQ ID NO: 269484 - protein, 406 aa, unidentified
MNMNAVGIDVSKRKSTVAILRPGGKAVGKPFDVPHLSADFQSLIKRIRELDGETRIVMECTGRYYEPVARELSQAGFFVSAVNPQIIRNFQGQDNPLRKVKTDKADSVKIARYTLDSWANLKQYSLMDELRSQLKTMNRQFDFYMKHKTAMKNNLIGLTDQTYPGANAYFDSPAREDGSQKWVDFIDTYWHVDCVRKLSLTAFIDHYQKWCSRKKYNFSKSKAEEIYGKAKELIPVLPKDSFTKRIIKQAVGQLNAASQTVEQLRSLMNETASKLPEYPAVMAMKGVGPSLGPQLMAEIGDVTRFTHKGAITAFAGVDPGVNDSGDYSQKSVHASKHGSPALRKTLFQIMDVLIKTKPDDAVYLFMDKKRAQGKPYYVYMTAGANKFLRIYYGRVKEYLAALPTSN

SEQ ID NO: 269485 - protein, 375 aa, unidentified
MKEKVRFLGLDVHAETIAVAVAEQDGEVRSLGTIANREESIRKLVKKLGPVEQLRACYEAGPTGYVLYWQLTQLGVECAVVAPTLVPVKAGDRVKTDRRDAAKLARSHRSDDLTAVWVPDEGSEALRDLVRAREAAKQDQLRARHRLSKFLLRTGRRPAMGLKAWTGRYLAWVQQIHFSQSAQEATLLDYLHEVQHMDERVQRLEQAIAEAVKLASPQVQEVIRGLQALRGVAHLSAVTIAAELGNISRFESARKLMGYSGAVPSEDSSGKRQRRGNITKTGNAHLRRIAVESAWSYRFRPAIGPRLRQRQEGVPEEIKEIAWKAQIRLHKRYLKLMAAGKDKQKIITAVGRELLGFVWAIGIKAETAGKLQMAA

SEQ ID NO: 269486 - protein, 417 aa, unidentified
MKIVYPVCCGIDVHKSFLVATIVSVTDLRTLKHKKERFSTFNKDLKRLKHWLIENNCYDVCMESTGKYWVPVLNVLEPELRVVIVNPKWVKAIKGNKDDVKDSKWIGELFCFGLVRSSFIPEKPIRILREFTRYRYKLVHMRSSEKNRFQNGFTVCNIALDAVVSDMFGKSASLITDYLLTDENPDAEHCTTFLQRSLKKKAVAVVESIEGFQLTEEQKFRMLQVRQHMDYLDSAIAAVDRKLEEMTSPYAAAIKLLCTIPGMKHDSAITVISEIGTDMSQFGSSKRLCSWAGLTPGNNQSAGKKKSVKITRAGVYIKPMLVEVAHAAVKCISQPYYKTKYESIMRRRGKKRAIIAIARMILTAIYHMFCTGEVFNPTDLRQIDMPEELKKKNVFNAIRLLKQQGVLPENFMQASYT

SEQ ID NO: 269487 - protein, 335 aa, unidentified
MYYSGIDLHSDNCYITTVGESDVVIKQQRVENIPELVVDYFQSLPGPHSAVVESTTGWYWLNDLLEANGVELVLAHAKYLKAITYAKVKTDKVDSHTLATLLRLNLIPRAHKISRELRDLRDTMRARLRLVHKRTACSLSLHTIGVKFNHPDTLPEPYQLQVSLFKEQIQMLTDHILTLEKSLHPTLIPNDDIQHLLYVPGIGKLSAFTLYLEIDGIERFSTDKHFVSYCRLVPAADNSNRRVHHRSSKDGNKYLKIAFSDIAVHAIQYYPEFRAFYQKMLRRSNPAIARTLVAKELAKIVYYILKNKTSYRGFKGQPISRQKSLQWPRLSSPDF

SEQ ID NO: 269488 - protein, 318 aa, unidentified
MDGCFVGIDVSKHRLDGCVRRGQTFQYDNAPAGVAAVVELLRRLPVTLVVVEATGGLEVPAVRALQQAQIPVAVINPRQARDFAKASGRLAKTDTIDAEGLAHLAEALRPEPRPLRDDQTHVLDALVTRRGQLIDMRTMERNRLGNCPDAKVRQNIQQHLDWLAEHLDAADKNLAEAVANHPEWEARDQLQQSVPGVGKVVSQTLLASLPELGQLSNRELTALVGLAPYADDSGRRQGKRRIFGGRAQVRAMLYMAALTAARSKSPLREFYQRLRAAGKAPKVALVALARKLLTVLNAVVRTQTAYNPAHLAVITCGA

SEQ ID NO: 269489 - protein, 338 aa, unidentified
MTTNPIRQCIGIDISKDEFVASLATLNEAFQVSIKSTKSFANTLDGFQKMDRWANQLATTQLPLHYVMEATGVYYESVAYWLYERSQSLSVILPKQFKAYANSLNIKSKTDRIDARILAQMGLERSLASWQPASPVMRQLKQLCREKNTLKDEKKTLKNQLHALTHSYQPNEATHQRMLRRLTTVEELIREVEAELIATMRTDEVLVERIQNVCTIKGIGLMTALALVAETNGFSLFTNKAQLVCYAGYDVVKNESGTSVKGLTKISKRGNSHLRKALHFPALTAIRYEPRFQQMSARITQKTSLKMKGIVAVQRKLLVLVYTLYRNNVPFKSNYEPA

SEQ ID NO: 269490 - protein, 347 aa, unidentified
MRFYNRQHRHYCGIDLHVKTMYVCILDGAGQVLLHRNVPATPDALLGTVAPYRDDLVVAAECMFTWYWLADVCAAEGIPFVLGHALAMKAIHGGKAKNDKLDSRKIAGLLRGGLLPQAYVYPATMRATRDLLRRRLHLVRKRGQLLAHIQNTRHQYQVPAFERSLVHAANRHGVTAHFPDPSVRKSIEVDVALLDQYDTLLSDLERTLVHDAKRHDPEAFYRLHSVPGIGHILALTILYEIHDITRFDRVQEFASYARLVKGQHQSAGKTLGTSGAKMGNVHLKWAFSEAAVLFLRHSPEGRKVLARLRKQHGKGKALSILAHKIGRAVFYILSRGTVFSMDKFLAA

SEQ ID NO: 269491 - protein, 409 aa, unidentified
MERLIERCSGLDVHRDTVAACVRVPGARGQREQHVRTFGTTTAELLVLRDWLEAHGVTHVAMESTGVYWKPVFYVLEEAFTCLLVNAAHIKQVPGRKTDVLDCIWIAQLLEHGLLRGSFVPPAPIREVRDLTRHRKVLIQERQRAANRLHKLLQDAGLKLASVATDILGVSGRAMLGALVDGTTDPEVLADLARGKLRKKLPALRQALAGRFRPHHAFLVGQVLAHVDYLDEAIATVSEEIEARLAPFEAHLTRLDTVHGIARRTAEVIIAEIGVDMTVFPNEHHLASWAGMCPGNNESAGKHKSGKTRKGDRWLRTALVEAAAAAIRTKDSALAARYRRVMRHRGHKKAVVAVAHAMLRAVYHVLADGTPYRDSGPDYYDRRHAQRVTRRAIELLERQGYRVVLQPAA

SEQ ID NO: 269492 - protein, 531 aa, unidentified
MTVKTNTNRRNRRKSTSKSKQRKTSTVQKASGVIGPRVKRVGGEKFAIVCVDPAKRRSEWMMADYYGNVLIQQQTLEHQAAFFKLAVAQIRETQQQHDIQDMIVVVERTGSYYLAPKRAFAKAAFDTRVVHPFVTKQYRMPANPGNKTDGTDLHAMHRAAVAGFGLCEWELESPYRELQLRARHRRNLVEKSAAMACQIREHLHLAMPGFAALFDHLLQNKSALAIARRCPSPAAVLDLGSAGLSRHLREQNVRHQIRTIDKVLAWATQAAASNTIQDGTLHHAIWTDLEELYQHARRRIRDHERELAGDLVQTPYIRLLAIPGINVVSAAELAGEMGPITRYANANAITGRCGLYPSRHQSDQTDNDRGPIIRQANRRLRCVLMRIADNLVCHCAYYRGLADVDKARKVDERAIRVKTAKKFSRLGLACVAGDQPMKHPAMREPDSIMEKLREFLRVHETPMDRGLADLKATVEQLPYHTRHREAELVAEVLRQHAGRRRGPVDVGTLLPAVLARLETRATEETKTRGRS

SEQ ID NO: 269493 - protein, 415 aa, unidentified
MYYIGIDVAKSFHIVTVINENEEKVISKPFRVENLNEGFAKLLTIINSISSDKREFLIGLEATGIYGENLWEYLNSNEYSVKLLNPFQTSRYREQITMKKVKNDNIDSLVIALFIKDGKYSSGYVTDDEYQSLRTLYRNRVSIQSDMKAIKKRILTQITVTFPEFEGFINPFTISGLALLDKYPTAHHYKRSSADRIMKLFRHIQGNNFNNAKALKLLSLAKDSIYSGKAKDARAIAIRSSIRLLKTYQSELDILESEISSLLQTHKMSTPIDEVGQEIEHNDRLIDNLKSIPGVSDKTIAAVISECGDLTRFPSVAKFIGYIGLFPTENSSGNTQRTGHLSKRGSAISKHALYMSASSCLIHNKQLKQLYDTKRSQGKSKKEGLIAVSRKLATIIYSIFKYNIPYDPSRVFAKS

SEQ ID NO: 269494 - protein, 433 aa, unidentified
MLKLNYMSTLFVGIDVSSKTNAVYAMDFEENKYISSSFGNNQPGADQLVNMIAECMQKHKNLDTVLIVLESTSVYSVHISNFLSASEVLMPYRPYVFCVNPKAASNYRKSYIGMEKTDPTDAYLIADFGRVGRTKKLEPWRGGQFISLKRLTRHRMHLSECITREKTYMVSNLYLKFSELQLLEGDDKPFGSLYGATSSAVLTEFLSPQEIIDMPEEELLTFLAGKSRNRISDLSKTSELLRKAARDSYRLDKCMYEPLSISLASSFNCIHAYQKEIKLIEQAIEKCINGMNPNALLILQSIPGIGPIWASGILSEIGDITVFHSSDALAKYAGLYWPKGDSGDFTSEDNKMSKAGSPYLRYYLGEAANSVRKHIPEYADFYARKYAEVTKHQHKRALALTSRKLVRLVFGLLVKNQLYTGEKLDTEYNIESN

SEQ ID NO: 269495 - protein, 336 aa, unidentified
MITEEFQNSALYVGIDAHREEHTAVMATRFEEERGNLTFANDRQGINQFLSWLRQTGEERKIIGIEGGGRTRNALVTCLLNQTYPVFEVNPLYTKQRRGYGTRGDKSDILDAKLVVEVLTRKLNRLSKLNPADYSPARLTLTKTTRFYEELAWQRTRLKNQLKSLLKERQLAQDGEERRTLDLIIREKKKELTRIGKLETKFKQRLSLLLERQGSGNLTTMKGISTVLAARIIAQTGDIRNFANLDKFIKYAGIAPLEESSGKTRGHRKNRTGNRRLNSAFYLLALNQLRWNTQAKEYFQKKIREGKTKKQALRCLMKRVACIVYGLLKSGESYRG

SEQ ID NO: 269496 - protein, 336 aa, unidentified
MLFVGIDLHKKTISVCVVSQARVVLQRKTFLCIDTERVRAFFAELRPFRAVVEATASYEWLWQLLEPLAERLLLAHPKKLRVIAESTRKTDRLDAQVLAEFLALDMIPEAHRPSPRLRQHRALVRQRCYVRRRAAGTRTKIRRILADYNADRRDLFTAQGQEALQALALSPADRFVVEQLTAEWQHHGRQVRAAEKRLREFAKEASTAEAEARAALRSVPGIGVVTVEVLVSEIGDIRRFRSAKDVAAYAGLVPKIRESAGKGKELGITKEGSRLLRWVLVEAAWRLVRRSQRWQTIFEQLRLRRGKKKAIVAVARRLLGVLVALWRNGVKYQLVV

SEQ ID NO: 269497 - protein, 333 aa, unidentified
MSKFSNFLGIDVSKEYFDAVIILNSDKNDTIHNQFSNDIKGLKELVKWLKSITSTNQNTLICLEHTGMYGKAIIQYLLSKEFSLWVEMSLKIIRSIGVQRGKNDKIDAERIAYYAMKNQDEVQIYQAPRKVIDQIKKLISLREHLTTTKAMLMRNSNELKGFEPELSKLHKKHSKATIKGIETDLKNIEKELDSMIKLDEKLSNVFEKVTSVTGVGKVTTLFLICYTNEFTMYETPRQLACYCGVVPFEYTSGKSVRAKPRVHFMANKKLKKQLHMCAISTIRADGELKEYYERKVAEGKNKMLVINNVRNKLIHRICACVKNDKLYEKRNVA

SEQ ID NO: 269498 - protein, 383 aa, unidentified
MKKDSMVSVRLTKPRQRKRTKGRSRVQLCSSGPPNQTIGLDLGDKTSRYCVLDAAGAVKSERSVATTKSGMRQTFARIGHSRIALEVGTHSPWVSRLLQSLEHEVIVANARRVRAITESSRKDDRMDAQMLARLARVDPGLLCPIRHRSERAQQHLAMIKARAALVEGRTALVNAARGLTKSSGERLASCDTDQMGVEKLEGLPAAMQTALQPLLEVVEGLTEKIQEYDRQLAEIARSEYPETALLEQISGVGLLIALTFVLTLEDPQRFQRSREVGCYLGLRPKRRDSGESQPQLRITKEGDVYLRKLLVQGAHCILGRRGPDTDLKRWGLKLAARGGKNAKKRALVAVARKLAVLLHRLWVGGEVYEPLRHSQAPAAQKIA

SEQ ID NO: 269499 - protein, 432 aa, unidentified
MEEVTDEPLYRDRVCGIDIGKAELYATIRVPSDNHPQRRMSETRSFATTRRGVLALADWLRCWQVPAAVMEATSTYWMGPFFRLEAEGFECVLADAKQVKNLPGRPKRDPSDSSWLAQCFERGAVRPCFVATKEFRVIRLHTRYRRDLINERTREKNRAEKLLETAAIKLSSVITDLHGVTGRDIMQHLIAGERDPKVLAQLARTRARAKITELQHALEGAEFFTGHHARLLKTMLERIDQIDAQISDLTAVTEELLAPYEEQLQQAESMPGWGRRSAEDAIAETGTDMTRFATGGHLVSWAGRAPLDKQSGKRKGQARHKKGNTYLGGVLGETAVCAGRTQTREGARYRKLARSRGKNKACVAVGNTQLKVYHKLLSSPGMRYEDLGPDYYQRRAQTRRNIDYHVRELQALGLEVTLCRPEPGQAATSPAA

SEQ ID NO: 269500 - protein, 389 aa, unidentified
MDYRTASTPTVAKDVATLYVALELSLKTWLVALRSSAGDKVSLKQLPAGDQAALFGLIDGAQDELHAAGYQEVRVVSCYEAGRDGFWLHRRLVEHGVESVVVDASSVAVPQRARRKKTDRLDVRALLRELMALVRGESDCRVLRVPTPENEDARRLGRERRQLVSERVSHVNRIKGWLATEGIVDYQPQRRDRRERLAEQRTALNQALPAQMKESIERELERLELVLAQLKQIEAKRDAIVADPPPDDVNAVKIQRLAQLRSIANETATSFTREVFYRHFDRGRQVGAFVGLDGSPWRSGRMDREQGISKAGNRRVRALCIETAWGWLRHQPDSALSQWFFKRVGAAKGAFKRKMIVALARKLMVALWRYLETGLVPTGAVLKPEAARA

SEQ ID NO: 269501 - protein, 309 aa, unidentified
MTANQKFSRFIGIDVSKAKLDIYDDATGEFLTVENTAKAIEKYVSALSPDPELLIVVDLTGGYEALCVNTFYNRGFTVHRAEGRRVKAFMRSYGEHAKTDRIDAYALALFGRKLHETLRMYTPLPLNLKPVTERISDLKTMLLQEKNRSTAPSLPPDMKKEIVRHIAYLEKEIERLYQKCLDIIKNDPPLAEAFYKIIAIKGIAEKSAVLLLTTLPELGCANRRQIAAIAGVAPYAKDSGTLSGYRRIRHGRTTAKSTLFIVTLVAIRHNAQIKEFYERLLKKGKSKMTAIIACARKLLIIVNATLKTC

SEQ ID NO: 269502 - protein, 433 aa, unidentified
MTLINFVAANQKYYAFNLLSVFIMVFWSVQYLLQHLLVQTQLSDQLLQPLILILQLPQTPQFRHARSGKFFLPVNGMDYLLPLRLTVRNVLTRRITMNIVFLGIDLAKNVFQLCGLSQAGKPVYTKRTGRKELLQTLANIPACLIGIEASTGAFYWQREFEKLGHKVKVISPQYVKPFVRGQKNDGNDAQAIAVALMQPTMQFVPPKSPEQQDIQALHRARQRIVNHRTATVCQIRGLLLDRGIPIGSAVSRARRAIPLIPEDAENGLSSRMRRTIAELYDLFNDLGRRIHFFDKEIETVFRQSEACQRIAKVKGIGPKTATAVVAIGKGTEFKNGRHFAAWLGLVPRQHSSGDRRVLMNMTKKGDKHLRTLFIHGARAVVRVATNNNDGHMNQWVNQLKERRGFNKTTVAVANKNARIIWSILRNETGYQVV

SEQ ID NO: 269503 - protein, 344 aa, unidentified
MSSQFFCGVDLAKHHFSLHAVDDRGKVILHKSVSRAKLLTTLANMSTMRIGIEACSGAHYWAREFIKLGHDARIMAAKYVAPYRTKGKNDLNDAIAICEAVQRHATRFVPVKSPERQAILSIHRMREHWVQERTALINRIRALLAEFGIVIPTGRHAIQRDVPLILEAADNGLPDIARAVLGDCFEHLQVLNQRIDDTELCFDMVTKASPNAQRILKVRGIGPQTATAIIATIGKGEQFDSGRDFAAWLGLVPKQYSTGGKPRLGRISKRGDKYLRTLLVHGARAAITNLGEKQDRLSVWGRNILERRGMNRAIVALAGKNARIIWQCSSLKRSRFAINRITGL

SEQ ID NO: 269504 - protein, 407 aa, unidentified
MEVVYPRCAGLDVHKDIVVASRRIQEGPKAEHAVATFGTTTKQLLALADWLAEGQVTHVAMEATGVYWKPVWHVLEESFALVLANAMHIKNVPGRKTDVNDATWIADLLAHGLIASSFVPPTQIQDMRTLMRTRKQLVRERAQHVLRIQKTLEDANVKFASVVSDITGTSGRAILHAIAEGETDPEKLLALTTGRLHASREALTDALRGRIRSSHRFLIKLHLGQVATIEKVIAELDVEVGSVLEPFRAKVSRLTTMPGVSDVTAEVVVSEIGTDMTRFRTAGHLVSWAGLCPRNDESAGKRRSTRIRQGAPWLKTTLVQAAWAAARAKSGYLHAQFLRIKSRRGPKKAIIAVAASMLTAAYYMLRDDVDYRELGDDYFDRADKAKAATRLVRRLHDLGYEVQIATG

SEQ ID NO: 269505 - protein, 287 aa, unidentified
MVPGTKALIEELKNHQVSLIVMEATGQYQLACACALQAAGFAVVVINPRQARDFAKAMGRLVKTDSVDARMLAELAQVLNLRPDRDRFIKPMPDQAQQYLHALVLRRRQLVRLLVSERQRKHMAHAEVAQDIAQLMDVLSRQLEALDRRIAEHLAQHQPNLAALLKSVKGVGPATAATLMSELPELGQLKARQICALVGVAPMNRDSGQARGKRFICGGRATVRSALYMAAIVAMRHNAVIRHCYERLLAAGKPKKVAIVACMRKLLIIMNAMVKSGRPWSDQLAQA

SEQ ID NO: 269506 - protein, 413 aa, unidentified
MSVTQQGVPARVCAGVDWAKDDHAVAIIDPDGQVLHRFAVTHDAAGLKSLVRRLLTAGVDEVGIERGDGPVVEALIQAELTVLVIPPGQLKNLRSRYGSAGNKDDRYDAYILADVVRTDRRRLRPLARDSAATTALRTTVRARHDLVEHRVAAANQLRAHLQIVFPGATSIFAKIDSAISLTFLERFTTQAQADWLSSKRLGAWLSSVSYSGHTDPEILHARLLAAPRGTTGADADTHSVTTLAFVAILRSLNTQIEALAHSIGEQLAIHPDAHIVTSLPRSGTVRAARLLAEIGDARGRFPTADSLACLAGVAPSTRQSGKVKAVTFRWGANKELRAAVCDFAGDSRHANPWAADLYAKARARGHDHPHAVRILARAWVHIIWRAWQDNVGYDPAKHGALQALLTSTTEKAA

SEQ ID NO: 269507 - protein, 358 aa, unidentified
MKGPTTSPIVVGGVDTHKEVHVAAVVDAHDVVIGTESFSTTRAGYRALLRWMRGFGDLARVGVECTGSYGAGLMRHLDAAGIDVLEVTAGDKADRRRRGKDDTIDAEQAAHAAFAGIRTVTPRTHDGMVESLRALKVVRSSAINARRIALQLIHATIISAPEELRDQLRTMTRMHLIRTLATWRPDSTGYRDPVTATKISLKSLARRYLELHDEIADLQVPMHALVDELAPDLLTRVGIGYESATQLLITAGDNPDRLASEASFAMLCGAAPLPASSGMTTRHRLNRGGDRAANSALHMIAVSRWRIDPTTQAYIARRKTEQHSNPEILRCLKRYIAREVYYLLRNQQRAINQVATAA

SEQ ID NO: 269508 - protein, 428 aa, unidentified
MSEKNCTRLEEFRQLQKQIRGSKEHLIVGIDVAKERHNAFFGTATGKTLFRRLVFQNDREGFERLLLQAEAMRIQHGLKKVVFGLEPTANYHKPLGEYLITGGHRVVLVSTKSVKRNRELLDGRWDKHDTKDSANVADLISQGKCLYYDYPELRLRELRSLLSLKRRFKRQEHGLKVRIRNHLIAQYFPEFDRYFGRSESESLAIVRWCLAPSGIAGLAYDEFVRLVAPGKRAMRQQERLKAILERASTSIGCEVGEAVRFEAKVMVEGLKQIREALRATEAKIADLCLQFPEYEYLLTIPGFGPDVSSKVLGAIGNPFRFTRGNQALKMAGLDLVADRSGKRSDGIVPVISKNGKADLRYALYQAAMVASSRDCEFIMWFTNKLRARQREKGIKVKMRVKLSAKLLIIAWTLMKKKEPFNPDYLRIE

SEQ ID NO: 269509 - protein, 343 aa, unidentified
MQTMTTIGLDIAKSVFQVHGVDAGGQVIVRRQLKRRYVLTFFQKLSPCLVGIEACGSAHHWSRELQALGHTVRLMPPAYVKPYVKRQKNDATDAEAICEAVTRANMRFVPTKTAEQQSGLVLHRARHLFVRQQTSVINAIRAHLAEFGIVAPVGRHGVEELLNVVTDPNDKRVPDIARACLSALGDQLQSIKQQILEFDRLIRAWHRSNEMSMKLEAAPGVGPVLATALVAAVADPKSFRSGRNFSAWIGMVPKQHSSGGKNRLGNISKQGDRYLRGLFVAGALSVIRYAKVHGTKHRPWLTALLARRPTKVAAIALANKIARMVWAMMATGERYKEPVALAR

SEQ ID NO: 269510 - protein, 377 aa, unidentified
MEAVNAYVGLDVHKDTIAVAIADAGRGSEVRFWGTVANDGDHLEKLARQLAAKHLRLEFVYEAGPCGYDVYRRLIAVGFACVVVAPSRIPRKPGDRVKNDHRDAVSLARLARAGELTAIWVPDGVHEAMRDVVRARHAANKDLKTARQRIQSYLLKYHMIYPGKAWTGRHLVWLANRRFEHAAQQIAFQGYVNGMEQAAARRSDVEAQIRQLLPEWSLAGVVDGLQSLRGVALIVAVSVVAEVGDLARFDSPKQLMAFLGLVPGEHSSGRTIRPRGITKTGNVGVRRLLFEAAWSYRQTPKVGAYKRQHMPKDIPQAAKDIAWKAQQRLCKRYRQLLGRGKKPQVAITAVARELLGFMWAIAGVIAAPSRPTVAAPV

SEQ ID NO: 269511 - protein, 351 aa, unidentified
MRTSQKITGIVTTIGIDIGKNTFHLVGFDQRGAIILQQKVSRSQLERRVANIPRCLIGMEACSGSHHIGRQLAEIGHDVRLIPAQYVKPFLKGHKNDYRDAEAIAEAVQRPTMHFVTIKTPEQMDLLALHRVRSRLVGRRTGVINQIRGFLIERGITVRQGPMPLRKALSEILSSDTGALSPRMVGLIAELAQDWRRLDERIAAVSAEIEALAEQDHNCQRLMTVPGVGPIISSAVVAAIGNGTGFKQGRDFGAWLGLVPKQESTGDRTILGKISKRGNKYLRTLFVQAAHVVLERRPSAAMRGLWPWAEQASKRLHRNMLAIALANKLARIAWAVLARGGTYQPRITHAA

SEQ ID NO: 269512 - protein, 387 aa, unidentified
MPQPNDQSRSLAALDQDSTLIAVIEISQSSWLVAGMVPGINRQPLKKLAADEVALLQLLYRWREEATRAGRTIDRVAVAYEAGRDGFWLARWLRGRGIEAHVIHPTSVAVSREHRRAKTDRLDTELLKRAFLGWLRGEQRHCSMAMIPTPEEEDAKRPNRERENLVSDRTRIVNRMKSSLARLGIRGFKPTLRKAPERLARLLTPEGALLPPNTLAELQRDMARLRFIMDQIREIEAARLVRLEHNPEQGSHAMVRLLAQVIGIGIETADMLVHEVFVRNLRDRKAVARYGGLTGSPDESGAKRREKGLARAGNARVRRGMIQLAWRFLMFQKESALAQWYRARTADARGATRKTMIVALARKLLVALWQLVTTGEVPEGVVMRRAA

SEQ ID NO: 269513 - protein, 481 aa, unidentified
MSQQEKRTNQPGEEKTAVSKGKRGRKRKGMCLEDRPILEANAAGIDIGAREIFVAVPPDRDEHPVRVFSTFTEDLEKMAEWLVSCGITTVAMESTGVYWIPPYDVLEQHGVKPCLVDARGMKNVPGRRTDWHECQWIQFLHSVGLLRAAFRPDGDVCAVRSVMRHRTELVEMTSQHIQHMHKALTQMNVQIQHVISDLTGVTGLAIVDAIIAGQRDPVALAKLRDPHIKASEEAIRKSLVGNWRPEHLFTLRQSRKSYQHYQEQIAACDEEIERLVLAFVPRVDPAERPLPPDRKRKQRGRKKKNVNPKTGFDLRTESYKLFGVDLTQIPGLMAMVLTLFSEVGRDMSRWPTAGQFVSWLALCPDNDISGGRVLWRGMRRVHNRAGDLFRMAAYALHHDQTPLGDYLRRMKSKLGPAGATTATAHKIAIIFYTMVKKQVEYDGTIWEQRDAQREKRFEAKLKRQAQQLGYKLVPIEEKPAA

SEQ ID NO: 269514 - protein, 346 aa, unidentified
MLYVGLDLSRKRLDFCLLDELGERVEVGAAPPDADGLRSLTTRVGRLGEPVFAAIESMNGARFVHDQLELAGWRVEIADAVKVKGLAPLACKTDRIDAWVLAELARRDLVPAIWLPDPQIRADRERARFRLHLVRHRTSLKQRVHAVLLAHGKPCPVSDLFGVAGRDLLERLALPEPWLGTVAASLQLIDELDQQIGNCERELHRLGAEHRYVPLLVTVPGIGWVLAYTNAAEIGDISRFATPTKLTGYTGLCPRVYQSGQSDRRGALAKNGPRYLRWALIEATMHASRHPLYRDRYQHTKQRLGKQRGAKVAQIDLARRLAEAIWHMLTRDQPFAPAGAADPLAA

SEQ ID NO: 269515 - protein, 423 aa, unidentified
MKKRIYRATKVKRLNLEKLQEQVDGREIVLAVDVAKEDFFAVIVGNDQQVYATIKWKHPVESHFFLNVILKELSWSSLEVVMEPSGTYGDSLRSQFLNAGIPVYRVSPKRCHDAAEVFDGVPSMHDAKASSIICRLHQQGLSKEWPMPDDAQRELTASIKTLEIYDSAYHRNINKLEGLVMRFWPELTQFLDLQSATLLELLIAYGVPGRVAANQTQARELMFKVGNNFLVESKKEAILESASSSLGVKSVKAEQEQIQELCVEIRRLQHLCRQAKRRVESLTQGIDSVRNMSEVLGKMTAAVLYIVLGDMQKYSNAASIVKTLGLNLKEHSSGRHKGQLRITKRGSGLARMYLYFAVLRLIQKDAVIKAWYQKKLQRDGKVKKKAIIAIMRKLASALWYVGQGAKFDSSKLFDVNKLTLQSV

SEQ ID NO: 269516 - protein, 352 aa, unidentified
MDVTTVAVDLAKDVFEIAAASMAGRIVERRRLNRRQFERYLAGLASGTEVVMEACGTAHYWGRRCYALGLAPQLLPTQYVRPYVRRNKSDRADAEALLEARRCRGIAAVPVKTMEQQALQSAHRVRIQWQRARIARINMIRGLLREYGISLRLGAVTIRRMVPALLDDERQALPDLVRRLLRPVLEELCELEQRLKLIDEQLAVVADRDPVARRLQTVPGVGVITATSLLGSVPHIQAFRRGRQFASWLGLTPREASSGMRQWRGGISKRGNVYLRCLLTHGARSVLFNAQRRARAHPDRLSAVQRWVIALAERRGYNKAVSALANKLARIIWAVWRTELDFSPTLGPHVTA

SEQ ID NO: 269517 - protein, 429 aa, unidentified
MQNSFISVGIDVGADFSFMSIALPDRTLVGKPFKIVHNNFNSLENAVLAIKEAEELHSMKARIVMESTGIYHYPLFCYLRDKGFDVTVINPIITKNSTNMNIRKVENDKASSKNLALIGLKPDLKTSVMPSDAVLDLRNLVREYYNLMDCRSAYVNKLSGILRVVFPRYLGVFSKVTVKTSLELLEKYPSPDDFLSARKSSVKHLISKTARFGKSYAEKKYQAIVEAAKSAAVFGHFVSSNSAQIKLCVSFIKKYDEEVASILALMHKLVDGQADETFVKQIRLIETIPGAGFLSAVTVMCEIGDFSVFKSQKQLFAYFGLDPAVKQSGNFTGTKVKMSKRGSAVARRAIYTIALVSIGTTRKGATNNPVLRDYYLRKCKSKPKMVALGAVMHKVCNIIFAVLRDNQPFSLITSEQHIQNYENSLLSAA

SEQ ID NO: 269518 - protein, 364 aa, unidentified
MQGREPMGSLLSLTLFLQANMSNLQLIERQSEPKQTLFAGIDVGSEELVLAVRKDGKPSEPQTFANTAAGRTQLTKKLVKLTGIKTCLEATGIYHFDLAIALHDAGVPLMVVNPKASHNFAKVLLKNSKTDAVDAQTLAEYAERMDFVPWTRPSDEKLAVRGFARRIHVLTEQRAAAKNHLHALCATSETPKAVLKDAQLAIAQLQKRIDRLTDGALALINKHPDLKQALALLVSIKGVGNTSAIALMGELLLLPPNLSHREWVKFAGLDPKAFDSGKSVHKKMRLSKAGNRHIRSALYMPALSAKQHDPHVSAYFQHLVANGKKPLQAICAVMRKLLHAIHGMLKHNQPFDNSRFYSIPIIAE

SEQ ID NO: 269519 - protein, 357 aa, unidentified
MKSICYAGFDIHKKVIAYCVKEADGTVIEEGVLAARRQVLREWAGRLGRPWIGAMEATLFTGWIYDTLLPHAQALKVAHPKMLKAITASKKKNDRVDARKIADALRADLLPECHMASARTRELRRLLRYRNLVVRQAVTMKNKMAGLLMEVGAEYNKRRLHGKRYFAEFLESVEEVPESVVGLLRMSRASVEMFESAQRLLLDALAKDKTLGERVALLRTIPGVGEVTALTWALEVGDVTRFASRNRLISYCGLCSAQRESAGKTIRGPLSKERNKHLQRVLIEAAKLAPRWNPALAALHEREVARGDKNRATLAVARRLACYLLAVDRRATAFEQRDEPALAGVRGAGRTKAATAA

SEQ ID NO: 269520 - protein, 413 aa, unidentified
MKKHSSFSKQRESVQGAKSVRRDSREVMSELVAQLRKQVDAESVTVRREDKEVSKGESPNLDRLTVGVDLGDQWSNFCILGLSGETLTEGQFRTRRQEVAEFFQGLARSRVVIEVGTHSAWVREVIAGLGHEVLVANARRMAGPKRRRRKNDRIDAARLARLGRVDPQSLYPIQHRSSEVREDLLLLRAREPLVESRTKLISAVRGLVKTMGARLSSYSSDAFPKKVVAEIPDELKKTLQPLLVLIAKLSEAIKSYDQRIEQLADEKYPHTQLLRQVKGVGPVTSLAYVLTLESPLRFPRSRDVGPYVGLVPRQEDSGDTQPQLNISKAGDRMLRKLLVGSAHYILGPFGPDTDLRRFGKKLCERGGKNAKKRATVAVARKLAVLLHRLWISGEVYEPLGHASFASMTQTAAA

SEQ ID NO: 269521 - protein, 446 aa, unidentified
MSSASLSVLDPLAAFVDVGSEHMHVSIAGGPPEVFGTFTTELHRLRDWLKAQSVKSVAMEATGVYWLPLYGVLEAAGLEVRMVNGKQTRNLPGRKTDMKDCQWGATLHAHGLLQAGFVPSADVRRLQDYLRLRADHLTSAAACVQHQQKALERMNIKLHDVISSLVSESGQRVIAAILSGERDAERLLALCDVRIQKKKAERVKESLRGTWAREHLFALRQAVENWQHYQRQIMACDQQIEEVLREMSGPEEPGAPPVPPATKRGGINAPQIDDLHRLVFKLCGSKDLTVLPAHTDYSLLQLIGEVGLDLSAWPSEKHFTAWLGLAPGSHQSGKRKGSVRRKRNRPGRLFCMMARSLVQSKNIALGGFYRRMAGRRGGLVANIALARKLASLFWRVMVKGLSYAEAGLKAYEEQVLETKRRALCRLAKQLGRVVLPSLAEFQAADT

SEQ ID NO: 269522 - protein, 344 aa, unidentified
MKIKLLGIDLAKNVFQLCALNQANKVLFNRTVRRAQLRSTIVKLEPTTIAMEACSSAHYWGRAFEAMGHQVLLVPAQHVTPFVRGGKSDARDALAICEAAERPGLHPVPIKSIEQQDIQLLHRLRQRQVQHSTALANQIRSLGREYEVIFPAGIKSLIKQLPEALEDGSNELSAVARYALADQLRCLIEVRQAMKTFLLQIEELACQHPAYGNLLPLPGIGPMVASAYIAAIGNGNQFKCGRQVSAWLGLVPRQYGTDGQIQLMGISKSGDRYLRTLMIHGARAAITGGLKNSPELAQWVQPIIDRQGFNKAVVATANKMARISWVIVTTGEAFDMKQAFKPVA

SEQ ID NO: 269523 - protein, 341 aa, unidentified
MKNVTLLGIDLAKNVFQLHGVDDKGNPVLRKRLTRGKLMEFIVKLQTCTIVMEACSGANYWCRKFKAMGHEVKLISPQFVKPFVKTNKNDANDSEAICEAASRPSMRYVSPKSVEQEDIQAVHRVRSRLVAERTALVNQIRGLLAEFGIVVPQGINKIRKALPEILEDAENELSHSGRQIFSALHEEIHEKDNRIKIYNIKLEALFKSNESCKRIGEIEGVGVIVATAIVSAIGDPKVFKNGRHFSAFLGLVPRQSSSGNKQRLFGISKRGDTYIRTLLIHGARSVVKCIGSKEDRRSCWIRGLKERGGSNMAAVAVANKNARVIWSLLAKNEQYRKVANG

SEQ ID NO: 269524 - protein, 444 aa, unidentified
MGKKGKLSVRYVGMDIHKEMAVSCIVDEKGKVVQRHRCRCTREELEQFGRRYLQAEDKVAVEATTNTWEVVGILKSFITEVVVSNPLKTKAIAEAKIKTDKVDAEVLAQLLRCDFLPRVWEPPVATQALRRLTARRAALVMDKTAIKNRIHAILHQRLIPCPFTDLFGVQGRQWLQTLSLDTDGRASVDSDLRLLVSLEAEIAQHDQELATVACAEPRVKLLMTLPGISLTVAQTLWAVLGEVDRFRDADHAASYLGLVPTTHQSGKHCYHGPITKQGHRQARALLVQAAQHVRTHPGPLGVFFQRVAKRRGYNVAVVATARKLVVIAWHMLKANEPYRYAQPHTVEAKLEQLRVTATGEKRKRGYAKGTPRPATYGSGQRVQRIRSLHQVCERTALPPPKGVAALPLAERRMLEQSGTLEFVQAIQHEKLKIRQVKKEGTRSE

SEQ ID NO: 269525 - protein, 339 aa, unidentified
MTQVIRIGLDLAKTVFEVHGVDGQETMVLRRSLRRRKVLAFFAQLPPCLVGMEACATGHYWARELTKLGHDARLIAPHYAKAYVRRHSNDAADAAAICEAVGRPSMRFVDVKTEAQQSAACLHKLREMLVKQQTMWINHLRGLMAEFGIVVAAGPQHVGELLAVLADPEDQRLPAAAREVLIQAAEALRDTQRRVEAIEKRIVAWGRDNETCRHLITAPGYGPILASAMAVFVVNPAAFTSGRHFAASLGLTPRLEGTGGKVWPGPISKRGNGYLRRLLVNGAMSVLCSRRAKEDPWLAQLLATKPRKVAAVALANKMARIGWALMMRQEDFRARPAAA

SEQ ID NO: 269526 - protein, 342 aa, unidentified
MLYVGIDIAKNKHDVTALNVPGKTALKPLTFSNNKAGFKLLDLSIRQLNQDCLIALEDTGHYAFNLLNFLHEQGYKVYTYTPLLIKEFAKSLSLRKTKTDKKDAHGIALKLLSDPNREQFQHDNRQVELKILARHIHRLKKKQSDWKVQYTRCLDIIFPELDKIVGKHSEYTYQLLTCYPNPQKRLEAGFDKLIEIKRLTASKIQDILSVAPRSIGTTSPAREFEIIEIIKHYKRLIDKAETCVNDLMAEFNSVITTVTGIGGRLGAVILAEIRNIHAFNNPAQLQAFAGLDSSIYQSGQIDLAGRMVKRGSPHLQWALIQAAKACARFSPAFKAYLKTTLE

SEQ ID NO: 269527 - protein, 353 aa, unidentified
MSKDITLTVDYHDRACVIRWLDHSTGKDQVFTEVLTTKEALNRIVDQARLAAGPKGRVVWIQESTTGWARVKELLLDRVDFRLANVLQMPLPPKGRRRKTDKIDTARIQREHLNGSLPLAYQPPAQWRQLRRLVAYREGLVNRRTALRNWINRYLAHETWFESMGRWSPTGLKRLRSLLKHLPRTDALVIGQKLDELSRLEEQLGVALKELLSAYGEYPEAQRLDAIKGVDVVSAISMVARIGPVERFHDADGLIAYAGLAPGISESDQTRRNGRIGGGGTDTHLRHYLIEATVWARKLPRYKHTYERMKKRRGSKVGRLVVARMLVRSIYKILKEGVEFDAGASTPAIAAVH

SEQ ID NO: 269528 - protein, 339 aa, unidentified
MDTVRFLAIDLAKNVFQVHGVDAAGRLVLRRRVGRAQLTELVLRLAPCTIGMEACSSAHHWALQFQQQGHTVKLISPQFVKPFVKGNKTDGNDAEAICEALQRPSMRFVPIKSVEQQDVQSLHRARSRLVSNRTGLVSQMRGILAERGIVFAQSITRARREIPAVLADTSNALTPLSREMLADLMDQLRELDKRITGFDRRIDAVFKASETCQRLAQIEGVGPKTATAIVAAVSDPKDFRNGRHFAAWLGLVPRQSSSGDRTHLLGISKRGDRHLRTLLIHGARAVLRTAPNKHDKKHAWALALQARRGANRAIVAIANKMARVIWSMLATGQSYQKAV

SEQ ID NO: 269529 - protein, 413 aa, unidentified
MELVHARCAGIDISKKDAKVCVRVQGTGRRRTAASVTTWGSMTNQILALREHLLAEKVTCVVMEATGAYWKPFYYLLDDGLDVMLVNARDARNVPGRKSDVSDAAWLADLGAHGLVRASFVPPPPIRELRDLTRARTVITRERSREAQRLEKLLEDAGIKLSSVATDITGASSRRMLEALIDGQQDPTVIADLVHWRMRPKIAALMEALTGRFSEHHRFMTRLFLDRIDAHSADIARLDARIEAAMEPFASARDLLMSIPGISRITAEAFIAETGADMSVFPTVGHLASWCGLSPGSNESAGRVKSTKTRPGNPYLKGALGVAALSVVRRKDTYFWAKYRRITVRRGPMRALVAVEHAMVVAAWHMLTNGEFYHEPGPDYFTRRMPAKTQARAVAQLESLGYKVTLEPLADTA

SEQ ID NO: 269530 - protein, 373 aa, unidentified
MPKYSTAFGMDVHLRSTTVCALDADTGEAVTRRFPGNPWGEIAGWMDGFPGPSLAAYESGYLGFAPQRELAGLGVECVVAAVSKIPRSAADSASKNDRNDAARMAKAILAHDISPVWVPSPEVEGIRDLAGAYDGATARLATAKQRLLAFLARRGFVYGGTTPAGNPRKYWTYDFLRWLDKVRPEDDGGVRALAALRNEVEAAAEARADLLSEYRAAVDAGPIAAEVAALQSIKGCAFALAAAFSAEVGDFTRFRSGRQVTAYFGLAPSQRSSGDSVRLGGVSGAGNALVRKLAVEGSWCYAAARHQPKLMPRDTGVPLEIRMHGRKGSERLLRRREEMLARGMPAAKANAATAAELVRWLWALGMMCREGAE

SEQ ID NO: 269531 - protein, 339 aa, unidentified
MSVIIGVDPHKASHTAVAIGGDEREVAKVTVRATCQQTPKLLAWAEPFAERTWAIESAGGLGYLLAQQLVDAGEVVLDVPPTLASRVRVLSTGRSEKNDPNDAFSVAIAALRSKNLRWVERADHTEIMRLLAKRNHDLGRLRAKLICRLHNALAELSPGGIAKELYVSDANRLLGSFEPATPIEHMRHQLALELVDDVARLDEQIKESHRRIRTAVRASKTSLTDLFGVGPVLACSVIGYSGDVGRFANRDSFAAYAGTAPVEHSSGGRVFHRLSLRGHRRLNNAIHMVAICQIRQPHSEGRAYFERKVAEGKTKREALRSLKRHVSNALYRQLVLDAR

SEQ ID NO: 269532 - protein, 348 aa, unidentified
MTMTIVEAVRGITGGVDTHRDVHVAAALDPLGGLLGTESFSTDPAGYKALFSWLASFGDVTKIGVEGTGSYGAGLARHLRRVGVEVIEVDRPNRQKRRSSGKSDPLDAVEAARAALGGRASGKPKSRDGAVEAIRVLVVAKRSARQARVKALIQMRHLGYSAPEQLRCRLKGLSVPALVAEGAKLRPTRSPDPVTAATKASLSSLAHRIEALDRELAELDERIEALLVATVPDLLDLFGVGPDTAAALVMAAGDNPERLRSEAAWAHLCGVAPVPDGSGRTSGRVKAHDGGDRQANSALWRIVMVRIAHDPETRLYFERRVKDGKTKHEVIRILKRYVAREVYRYLPR

SEQ ID NO: 269533 - protein, 362 aa, unidentified
MPNATRWVGLDVHASQTACAIFDSETGEVITRRVLGRPHEVMGVLLELERPVRAVYEAGPTGYGLARRARAAGIDMQVCAPGMIARSPTERIKTDKRDAMKLARLHAAGQLVCVHVPSVEHERLRDLARCREDARQDLMRAKHRIGKFLLRRELYYPGRGRAWTKGHRAWLASLRFADAASEATFCDYLHAHDTLAARRDELDRTIDTLARECSWAETIARLRCLHGIDTLGAFGLCGEICDFQRFTRPTALSAYLGLVPSENSSGDKRRQGSITKAGSTLARRLLVEAGYHYRRPPRIGGALLARQDGAEAWVLDLSWRAQRRLHGRWQRLRSERRKHNGIAAIAVARELAHLCWELATTD

SEQ ID NO: 269534 - protein, 314 aa, unidentified
MSKVFSIFCGVDVSKEWIDIALDKIVTQLPQDRKLIIGFIKKYFNQPNKSLVVLESTGGYELLAAECFDEMGVTVHIAHPNRVRAFAKAKGRLAKNDRLDAITLSEYGRFIDPSDIRPLRSKLLIKLSGLNSRLGQLKELHHKEACRLGTARIVEVKQTHKEMLKLLAKQIICIEIQMIALIKSEPELAEKYTRLQTMVGVGPTLALTLIAELPELGDANKKEIAALAGVAPITKDSGKQRGRAITQNGRNSLRKILYMGALSAIRYDKKIKEFYQRLINSGKAKKVGIVAVMRKMLVTMNAMITHSKDYCPTI

SEQ ID NO: 269535 - protein, 355 aa, unidentified
MEKLIRVGMDTSKQVFQLHGVNAAEEAVLRRKLRRKEMVAFFQRLEPTVVGIEACGGAHHWARVLHEFGHQVKLLPPKYAKAYVKRGKNDAADAEALCEAMSRPTMRFVPAKTAEQQAAQMLVGTRDRLIRRRTQLTNTIRGYAAEFGLIAARGVDKIEPLLARLQDEPRLPALARELFAWHATEYAELQAQLKTVEAKLMAWHRHNEPSRRLAKIPGIGPIGASLLVIKVAQPQAFRSGRHFSAWIGLTPKDHSTAGKTRLGGITRAGDEALRSALVIGATAVIQQVRRGKACPGKATGGHPSSWLVELLKRKPPKLAAVALANKMARIAWRMMVGGQHYNPAHVIATAIDKAA

SEQ ID NO: 269536 - protein, 595 aa, unidentified
MTVRVSIGLDLARRGSHQAVIVTNDGCAQPQARKVQSAAQSLDALLRAAGGPQGCRVVLEPCGLVWVSLAAYLAHRGCQVISADTRSAHQFRKFIKRTVKSDRLDAEALARMPAANPERSRPLHVPSVEHFRLQRLVRLRAQLVKDRCREVRRLLATLEAYVPALPAVLGSGEKVTALKALLLRRFLHPQRVLDAGVQGMQQAIAEAGLDVEGITSLLQRWYGAAQHAWSIWGPLDAAGCCPVDFSVAQMQVELHLERIGELDHHIAELERHIAQAYRKLDPKRVLETLPGFGPTIAPAVRAFIGDVRRFRNIKAFVSYFGIAPRKSQSGKSERSGQRISKAGNRLLRQYLFVAADVARRVDMQLAAYYQRRRAAGWHHNKIIVAIANKLARRLYAVLKREAEGDSSGYRFYDEQGAQLDPKQSARRTRSRYPSVRAVQQQHGRAPKATTRGSLQTPQCLIRSARPASIIANSPADTSSPAPRQPRSSATSHASTAAGRSSAPGQPTATSSAAAGSSPSPQRSTAARATATSSTSSSPNSARGQCTAATSAATGANSARGQPTAPTRSSQQLAAPPPVPTAHEGNPRRPRGAHSS

SEQ ID NO: 269537 - protein, 317 aa, unidentified
MTTSTIYIGIDVAKATIDVGSSERLLLRKVPNADAGHRQVIEHLKGLSVGVIVIESTGIYAVALVRALLLAGLPVAVVQPGRARHFAKSVNIRAKTDAIDAVMLARFGEATKPRLYALPPANLERVRALSNRRDQVVEDRVREQNRLEACQDAGIAKELTKSITRLEKAEGQLDKKIATAIDEDPILKAKSDVMQEVPGVGRQTAAILLAHLPELGEINRQEISALAGVAPYDHASGTHDGGRHIYGGRERVRQALYMATLAACRFNTQIAEFYQRLKKNGKKEKVARIACARKLLIRLNTILTQAAKPTEPPAALA

SEQ ID NO: 269538 - protein, 329 aa, unidentified
MFVGLDLHKNYLQAAVMDDQGRLLSQERIPNKDEYIEEFTRKTLKDSHAEIVIESSSTWYHVYELLSKNQNCHVVLSNPVKTKAIASAKVKTDKVDALTLANLLRTGYIPESYIPPRHIMDLREMVRYRTSLVRMRVEAKNKIHAILLQNGTKINEKPFTIRFVEELRKLGDYRIDGYLSVISSLSRQIRSVSTTIKKEAREDESTRLLLTIPGIHYYSALLILSEIGDINRFPDSHHLCSYAGLTPSTHSSGGVTYHGSITRSGSRYLRWILTECAKAHIRSQRDSQLTRFYTEVARRRGGSKATVAAASKLLRIVYWVLKEKRPYHS

SEQ ID NO: 269539 - protein, 364 aa, unidentified
MNATAALPIVGVDLAKSVFQLAIADANWRLVERQRLTRTQLERWFANRAVGLVVMEACGSAHHWARWLTGLGIEVRLLPAPYVRAYVKRNKTDAADAEALLEAARCAEIVPVRVKSVDEQALQALHRTRSLWMATRTARINALRGFCREFGIAITQGARTGLEQIARVLAEPNSVIPELVRPTMKLLVEEIRLLEARVGQLERELTQSARASAACTTLLTIPGVGLLTATAMVAATSGNVSHFRDARHFAAWFGLTPKEYSSGGTRRIGRISKRGDRYLRMLLTHGARSVLRAASAATQAGRAVDGLRAWALAVQGRTNHNKATCALANKLARICYACLRDGAPYGQVKRLEKKITRSAYPIPA

SEQ ID NO: 269540 - protein, 356 aa, unidentified
MNRPKYFVGIDIASETFTASIGQFKEQSGWEIVAKPTTFENDFDTFSQFRYWLATNQAIPTSCIVCMEATGVYGEAIAYFLVSNGYQLVIEAPLKVKRAFDPEGHKSDPVDSRQIAEYAYRFFDQLRDWQPKDVAIEQIGTLLTLREQLVVQKTGHKNANSAIKRKVVRTPLAEGVHQKAIKELEKHIKEIEAEIQRLIDEDPAAKELQKLLETVPGIGKTLATFLVVTMHSAPEPHNPKALAAYIGICPYEDSSGTSRHKKATSRHYGPSAMRRLIHLAAMSVRQHCPMYTHYFIRKVAEGKEKKLVINNIANKLLRMVCAIARTKTPYIAGYRSIHPQRLKQSFKTSQIPLTGS

SEQ ID NO: 269541 - protein, 332 aa, unidentified
MHLGLDVAKHTLRVLLLQSTGKRKQRSFANTPAGHQELLRWLDEHAEGPVHACLEATGTYAEAVATTLQTQGQRVSLINPCASANHARKQLRRTKTDPVDAAVLADYCQKEQPALWSPPPPAVRELQALVRRLESLREMRQMEANRLEALAALPPEAAAAVATVCTSLEAHVAYLETQIAATIQAIKDHLDQDPDLKQRRDLLLSIPGVGETTVAVLLAELGLVTQFRGARQVAAFAGTTPREYQSGTSVHKRARLSKIGSSRLRQALYFPAITALRYNPVIRELGERLAARGKAKLVIIGAAMRRLLHLVYGVLKTGQPFDPAWGKTAAAV

SEQ ID NO: 269542 - protein, 355 aa, unidentified
MNSEKYIGLDVHQATISVAVLDSTGKLVMESILETKAATILDFFAGLRGTLSVTFEEGTWAAWLYDLLKQHVAKLVVCNPRKNALLKDGNKSDRIDAHKLAELLYLNKLSSVYHGETGVRMLRELARSYLTIVKDLTRVMCRLKAVYRSWAIPCAGRDVYYTRHRAEWLDKIKEAGVRRRAERLYQQLDMLQYLRQQARRELLAESRKHAITVKLRQIPSLGPIRSALAVALIQTPHRFRTKRQLWAYSGLALETRTSGEYCYVKGGLRRSKKQISIRGLNKDHNHHLKGLFKGAATRASVLPGPFQDFYQRSLAKGIKPTMARLTLARKIAAITLTLWKKGENFDADKLKSQAA

SEQ ID NO: 269543 - protein, 350 aa, unidentified
MLYLGLDVHSKWMTVKGFDVDSGEGFEIRKQANDEESLAETFGTLEGPLYGVMESGTNSWAVYRFLERYFDKLIVVDPGTVWGKELRRGAKTDRRDAGKLALKMYRGELEGLYVPSVETQDQRALGRAKINASRHVTRLVNELGSLLRSWGIIVSCSLLSEEGQGLIEESKSRLPEYSLKVLEMWLTMLRTAQEAEAELEKDVATEAAKNENCQRLMSIPGVGPLTALVVSSEIGDISRFGSATQLVSYCGLSPSVSQSSDTLYYGKLNKACNKFLKYVLVLRAQRMGRSKVDNPMRQTYWRVILKGKNHAKIAVARQLVRVIFCMLKRKQSWDPSRITKRRGSPANRAA

SEQ ID NO: 269544 - protein, 341 aa, unidentified
MDKELYIGIDVSKKTLDLAYYDGETIDWKNAHIKVSNDTSGFKEVASWLAKIANRFDNLLFCMEHTGLYCQDFRMWLESHQYIYGMVDPRKMHRFEPDLDAGQRSLDRVKSDELDAFRIAIYCEQNHKKILRSPSRLPPAIYFKLKRLYAERKQDSKQSVLYKQQLHDTCAYDTESSMERKRLLLGSLKESIKAVDEEIACCLDEEASIRKNYDLLLSIPGIGHVVALETIILTENFTAITNPRKYACYIGIAPFPKESGTSVRKRTSVSCKGFSKAKADLSISAVSAITHSPTLREYWQRKRKEKCGSIVLNAVKFKLVLRMFAVIKRGTPYVETDAYKN

SEQ ID NO: 269545 - protein, 428 aa, unidentified
MRFVGLDVHQGFCEVAIREDGKTRSAGRVETARGTLELFARSLGPTDEVVMEATGPAMEIARIIAPHVARVVVANAQEVRAISHARVKSDRFDARTLAELLAAGMLEPVWVPDAATAGLRRGVARRAALVRQRTRSKNEVHATLSRCLLGRSPFSDLFGKKGRAWLAAQQLGIEESETVAGCLRQIDFLDAEVAAIDRKLSEWAVGSEDAKRLMSIPGVGAGVAVTLMAAIGDISRFSTPRQLVAYLGLDPKVRQSGDEPARHGRISKRGNAQARSVLVEAAWIAMRQPGPLNAFGERIRARKGSQVAAVAVARKLTCLCWHLLTKGEDYAFARPSLVRAKIRQTELRAGAAPHSTRHDGQRISASAAERDAERELVQRAETAYRQLIADWQATGPAKAGAGATRGRAPSRPPKRQATRQAPAQTPAL

SEQ ID NO: 269546 - protein, 328 aa, unidentified
MHFIGIDVSKLTLDLAYFEQQSERWSRPCKLDNNSKGWDTLIQWVEQQTRAPREDTCIVMEATGVYHLKVAAFLSREGLKVVVVNPQLASQYAKSQNQLNKSDKLDSRSLQQYGAQLKKRHLFIPDTPEISQLKALLSRMHQLGKDLQRERNRLEKCDFQEGSSWSRTSIQRLICFITSEQQLTQQQIDQLIKQNQVLKHNQKLLCSITGIGKLTSQWLLPLLSTQRFNSAREAAAFLGLVPCHKSSGTSLKTRGRLSGRGDANLRARLFMPALCAVRHDPAMKAFYLHLVAKGKPKKVALTAVMRKLVHVCYGVIKHQTPFIEHYAT

SEQ ID NO: 269547 - protein, 383 aa, unidentified
MQVIADQAEAPSAIRSNLGAIFVSLELSRSTWLITSLLPGGSEKMSKHSVPAGDICALLARFSERTGKSFPIIVIQEAGLDGFWIHRVLQNEGIESHVVDPASIATSRRHRRAKTDRIDGETLLRTLLAYKRGEPRVCAMVKAPTPEEEDRRRLCRERKVLIAERVQHVNRIKGLLLCQGVSGYEALRRDRRQRLDELKTGDGRALPDHLKAQISRELARLELLLEQIKAMEAERDALFAAAKATMPASGPVAMLLEIKGIGPEFAAILWMEAFFRSFANRKQVAAYAGLAPTPWQSGSVDREQGVSKAGNPRLRTMLIQLAWLWLRHQPQSALALWFKERVSRNGGRFKKTTIVALARKLLVALWKYVTAGVIIEGAVMKPA

SEQ ID NO: 269548 - protein, 344 aa, unidentified
MLIIGCDYHPRFQQIAMMDTDGGDYTQLRLEHIKEAEEFYRSVACRPVRVGMEASGHARWFQRLLAGLGIELWIGDPSAIRAAAPRQQKTDKRDAEHLLQLLCDGRFEQMRIWVPTVEARDVRQLVMHRHRLVQMRTRVQNQLQAVALNEGVGRKPGLWSRRGREQFEQLPLPAWTARRRQENWELLDELERRIEPLDQAVAQEAQRRPEVVRLMTHPGVGPVTGLAFVLTLGDPRRFASGKQVASYLGLIPAENSSGGRQRLGHLTKQGTALVRWLLVEAAHRAVQREPELGRWYRRLAMKKHRSIAAVAVARKLAVRLWWMWSRGLSYEQLRESGSHAGATR

SEQ ID NO: 269549 - protein, 406 aa, unidentified
MSAYRFYVGLDWATEAHRVVVQDAERQGVAERTVPHEGGALEAFAAWLSELAAGVPRDVAVALESPRGAVVDILLANGFHVFALNPKQLDRFRDRYTVAGAKDDRRDATVLATALATDQPAFRRLAPEHPLVIELRELSRLEDELQQELQRLTNRLREQLHRYFPQLLQLVPAANEPWLWALLDRAPTPSAAQHLSRAALRTLLTRHRIRRVDADAVRTLLQHPALPVAPGTVQAAQRHLAVLLPRLRLAHQQRAECATLIEDVLERLGEQQEHRDVPILRSLPGVGRVVAATMLAEASRLLAARDYHGLRTHTGVAPVTKQSGKHWVVLRRSACNRRLRDAVHYWGQSVVRHDPRSRAHYDRLRARGHSHGRALRGVVDRLLRVLIAMLTTQTLYDSNRRLPIAA

SEQ ID NO: 269550 - protein, 343 aa, unidentified
MQVSTIGLDLAKNVFQAHGVSAEGKVVLKKQLRRGQVLSTFAKLPPCLVGMEACAGAHYWARELRKLGHDVRLMPARDVKAYVKRDKTDAADAAAICEAVSRPSMRFVALKTPEQQGRLMQHRVRDLLLRQRTQTINALRAHMAELGLVAATGRQGLGLLLAILADARDERLPQDARASLKLLASQITALQAQIDSLDKRLHAQHRQCPASRRLETIPGIGVIGATALAATITDPKAFKSGRDLAAFIGLVPRNNSSGGKQRLGPISKQGDRYLRRILVVGAHSILKQARTRPDKHPWLARLMARKPGKLAAVALANKTARIAWAVLARGESYRAPTAPAAAG

SEQ ID NO: 269551 - protein, 323 aa, unidentified
MKQYVGLDVSLEQTAVCIVDEHGKALWRGKCASTPEAIAAVVKARAPHVERIGLESGPLSTWHWHELKKRGLPVICLDARHAKAALSLQVNKTDPNDALGLAQIVRAGWYREVTVKSLDSQVIRSFLSSRARLVEVRVDLINQIRGMLKPFGLVAGKGGRQPFIDRVRELVADGPLKDAVEALLSALQEVSRQIGILSRRLMGLARQDQAARRLMTAPGVGSLVALAYISVIDTPDRFSSSSSVGAYLGLTPRRYQSGEIDRSGRISKCGDPLLRSYLFEAAGIVLNRVSRWSALKAWGTRLAKKVGGKKATVAVARKLAVTC

SEQ ID NO: 269552 - protein, 343 aa, unidentified
MQVSTIGVDLAKNVFQVHGVDSAGKVVITRQLRRKQVIDFFSKIPACLVGMEACGTAHHWAREVSKLGHIVRLMPPSYVKGYVKRSKNDAADAAAICEAVTRPSMRFVPIKSADQQALLMLHRTRDLLIRQRTQLINALRSHLAEFGLVAATGREGLAQLAAIITDESNREALPSAMKQALQAIVDQLAALELQIGTLDRAIHTHHRANDVSCRLETVPGIGVIGATAIASTVTDPNDFKSGRDFAAWIGLVPRQHSTGGKERLGGISKQGDRYLRRLLVIGATAVVRHARQHPQKHPWIMRLLAKKPAKLVAVAVANKMARIAWAIMAKGGCYRAPELAAAA

SEQ ID NO: 269553 - protein, 364 aa, unidentified
MENVYYVGMDVHKDSIRMAVLQGEERSTVYEGTYENDVSKIIRRLKSYSQKGTVITAYEAGCMGYTLQRGLSQAGIECRVISPNKIDRMAINRIKTDARDAVLIARMIKHNEADTIQIPTQDDEAARDLLRCREDIKTELQRTRHQLSNFLLRQGHLYSGKTNWTGVHKTWMKQLAFPRAPQQEAFTQYFCHMMEIEARLERIEASIITLAQAEPYREKVARLRCFKGIDYLTALACICEVGDYRRFPSAGSFMSYLGLVPSEHSSGAKRCQGGITKTGNSHLRKLLIESSWHYRYRYAANAALKERRKGMDEMVIMYADKAIHRLQKKFSKIVYKGKSAKMAVTATARELAGFIWGMMTESYC

SEQ ID NO: 269554 - protein, 317 aa, unidentified
MGRERPSVGIDVSKAVLDVSLHPSGKSWQVEHDPAGINALAQELVALEPAVVVVEATGGLETALAVALGAVGLPVTVVNPRQVRDFARATGRLAKTDKLDAQVLAQFGAAVQPPVRPLPDEARLELRALVTRRQQLLEMITAEKNRMRRTTPGVRERIEVNIKWLQAQLKELDRDQGDFLRSSPLWREEAELLRSVPGVGPIVTATLIARLPELGSINGKEVAALVGVAPFNRDSGTLRGKRTVWGGRGPLRTALYMATLSATRHNPVLRDFYQRLCAAGKPKKVALTACLRKLLVILNSMIKHRRPWNPELYLRNS

SEQ ID NO: 269555 - protein, 311 aa, unidentified
MKRTVIGIDVGKYELSLFCKNKSYVVENSVECITKWFKKHTILKKENPLIVYEPTGGYERQLQNVLNKNNWSHKRIHANHIRSYAKALGVHAKTDKVDAKIIADYAERMEIKENETKINHPELKALLTRREQLVTMRAEEKNRLDTCDDLLINYINQHIDQLTTNIAEINNAIEQYEEANKEVKKAVSLYASVPGIGHTIALQSVVDLPELEKLDIKKLSALVGLAPWNRDSGLMSGKRRTYGGRTRIRGLLYMAAVVSSRCCPQIKQFYLKLKQKGKASKVALIAVAHKLLAILHSIAKRQTPWVEILDK

SEQ ID NO: 269556 - protein, 386 aa, unidentified
MRGKTFIPRDYDVFAGLDVDKRSISVTFSNHQGFISSLHMPYSAEHLIKHVRKHFGDQKVAFAYEAGPTGYGLYDGIVAQGYRCLIAAPAMIPRAPGQRVKTNRLDGVSLSENLRGGQLKSIHVPTPIYRELRHLVQLRDTVMSEGVATKQRIKSLLLFEGLDFPTAPAGSQWSLKVKRQLQNLACSKVVRFKLDELLDSLEFLEKKVVKSTREIHRFCNNDPELSQCIQYMMSVSGIGWIVASQLLARIGNWREIQNVRQMAGFLGLVPTEHSTGDRIRRGSITHTGDGRLRSKLIQASWSAIRQDGELRDFYRSVCRTHPRHLGPRVAIVAVARKLSVRIAVVLMQQRPYVVRKKIDSAPLTQEETVPQGTTRRPGEPGETDNS

SEQ ID NO: 269557 - protein, 337 aa, unidentified
MNYCGIDLHSNNCVVIVSNDEDRIMYQKRLPNELARIAAPLEPYRHELAGVVIESTYNWYWLVDGLMDAGYRVHLAHPAAIKKYEGIKHSGDFADAAYLAQLLRLGLLAEGYIYPREERGARDLARKRMQLVRYRTAQILSIEGTVMRQTGHTLKGEAVKRLSGSDVEQFGLAPDVAMAIEANRAVCQVLGQQIETLEKSLLECVSLRADYCLLKTVPGIGQTLATTIMLETGSISRFPKVGNFSSYCRCVDSRRESNGRKKGEGNTRNGNKYLAWAFIEAANFAVRSCPQARSFYDRKKSRTNRILATKALAHKLARACYHILHDHKPFDIHLCFG

SEQ ID NO: 269558 - protein, 322 aa, unidentified
MSVTVLGIDIAKQKFDAALLVDGKTKHKACKNSAEGFETLMVWLEKQGIQKVHACLEATGNYGEDLAIYLHEAGHIVSIVNPARIKGFGQSELIRTKTDKIDAALIGRFCLAMKPGPWIPPSPEIRSLRALVRRVDSLIDMRSQEKNRISTAHESVIFLIKEHIAYLNQEIEKIRQQIADLIGQDPNLKRKHDLLDSIPGIGKATIPHILAELDDLEKFDHVRQLVAFIGLAPKETLSGSSIKGKPRLCKIGHARLRKALYMPALVSIQCNPVMIAFYNRLKDKGKNGKVIVCAIMRKLVHVIFGVLKSGKKYDPNYKPAFA

SEQ ID NO: 269559 - protein, 377 aa, unidentified
MRRVCGLDVHKDSIYMCILYENGSKIESVFGVLTPELDKLRDLLVSHHVCEVALESTSIYWIPIWNILSVDFSLKLVNPYFIKQLPGRKSDVKDAEWIATVLQKGLIRGSYVPDCMIQCLRQYERRNHELSKNIVHAEQRMDMILQHCNIRISNYVSCISCKGYQKVVNAIISGESNPKVLVTLIHKRTLNKHGRQVVEDSLNGFVSDTDRDILRQYRDERMQMEQHKSENKAKMQAICEAHYCEELELLQTLPGIKEESAANIIAEIGVDMKMFLTASAIVGWAGLKPRNDQSAGKIKSRKITHGNKYLRKILVEAAWSAARTKDSRFMKMYQRLLARGKSKQKALIAVARKLLVLIWNMLSKKEAFNPEYKRRIP

SEQ ID NO: 269560 - protein, 315 aa, unidentified
MDRENRTRDFVGIDVAKERLDVFLRPSGEAFVVPRDDKGLAELVERLDRYDIALVVLEATGGLQLRAAAVLAEAGLPVAVVNPRQVRDFARAIGRLAKTDRLDAEAIARFAEALRPVPRPLADAEQQRLAALVARRRQLIEMRVAEKNRRQRLGQPQLRRRLDEHLAWLAKAIAEIDQDLDGAVRDSSLWRVEEDLLQSVPGVGPVLSRTLLAELPELGRLNRRQIAALVGVAPFNRDSGTLRGRRNVWGGRAQVRASLYMATLAATRANPPIAATYQRLLDAGKPAKVALTACMRKLLTILNAIRRDQQPWKTA

SEQ ID NO: 269561 - protein, 363 aa, unidentified
MRFYKNQHQFYIGIDLHARTMYICVINNIGETVFHKNMECSRDNLELVTNTFGKDIVVGVECIFTWYWVADFCAENGIDFALGHAYYMKSIHGGKTKSDKIDSEKIANLLRGGMFPIAYAYPKEKRAVRDLLRRRLFFVRQRAELSVHLQNTNHQYNINEPLASSRMRSEVYRNTIPLKFSDPATLKMVNADLAMFQSYHDIITKLEFQIEDSMEVQDPVSYSIINSVPGLGFILSLTILYEIDDIHRFSDVGKFISYCRLVKCSHESAGKKENGGHNKIGNVHLKWAFSEGAVLFLRNNERGQRWHDKLVQRYGKAKAMSIIAQKLGRTVYYMLKRREAFNPDKFYGDKKIENKDSGGEHLA

SEQ ID NO: 269562 - protein, 344 aa, unidentified
MILIGIDPHKSSHTAVAVDSAGRQVAQRRFVVNAGTFRQLTRWCEQWPDRRFAVEGAGGLGRSLAQHLSTAGENVVDVPSTLSARARLLATGGDRKTDAKDALHVAQVALFRHDLRLVVQEDQTTILRLLTERRDDLVHERTRVLNRLHAVLRDLLPGGAPTGLSADKAAALMKGIRPVTATDNCRRDIARDLLADLRRLDRQVKDNEAEMREAIAATRTTLTTLPGLGTVLAAKVIGHIGDISRFPTEHHFASYTGSAPLDASSGNNVRHRLNTGGNRALNSVLHTIAVCQIRDGGRGQDYYLRKIAEGKTPSEARRALKRRLSNVVYRIMKRDQRNHLAQAA

SEQ ID NO: 269563 - protein, 408 aa, unidentified
MEVLHARCAGLDVHQATVVACVRRATRKAVRRETREFGTSTRELLALGDWLRTHEVTHVLMESTGVYWKPVWHVLAGQFELVLANAMAVRNVPGRKSDVSDAAWLADLLAHGLVRPSFVPDAQTQELRGLTRTRTQLVREHTRHAQRVHKVLEDANLKLATVLSDVFGSAGRVILAALVAGETDPARLAALVTTRVTAPRAALMAALHGTVTDYHRFELRLHLDLMTQLERAIAEVEERITDALASFRLVVERLTTIPGISTTTAHILLAEIGRDMTRFATAGHLVSWAGLCPRLDESAGKRRSVRVRTGGRWLKTALVQAAWAAIKVKGSYLQAQYVRLKARRGPKKAIVAVAASMLVAAYHMLRDATDYRDLGAHYFDRRDKRRVAARLVRRLNQLGYAVELRSAA

SEQ ID NO: 269564 - protein, 349 aa, unidentified
MIRNAPRGAVVYGVDLGKNLFHIVGLDTDGAILQRVKFRRETLIAFFERADRAIVGMEACPGSQWLARKLQAMGHRVRIIPAQFVKPYVKSQKNDTIDAEAIAEAVTRPTMRFTEVRTTEQVDLQALHRVRDQLVSSRTRMVNQARAFCLEYGVAIRQGIGVFRRDLPRVLADEDNDLTPLMRRILAQSLEDIRRIDARIAETTREIEALAARDARARRLMTIPGIGPMTATALLAAIGDGRQFRRARDLAAWLGLVPRECSTGGKTRLLAVTKRGNRYVRRLLIHGARSCVTHLDRRRDRLGPWLDGLQSRMHVNKVTVALAAKIARIAWAILVRPGALYERRDPAAA

SEQ ID NO: 269565 - protein, 434 aa, unidentified
MRLMYPRCAAIDVHKRTAVVCPRQTERDGAVKSEVKTFGTTTPELLQMMDWLSGWEVTTVAIESTAEYWKPVFNLLEGEFEVILVNAKHVKQVPGRKTDVKDAEWLAELLSYGLLKASYIPAKPQRDLRDLTRHRVTLVQERARIVNRLQKVLEHANIKLASVASDIMGVSGRQMLEAIVGGETDAAAMADLAKGRMRNKMEALEKALTGVVRPHHRFMIGEHLAHIDFLDEQVERVSDKIGQQIETMSQPSEPDEMPPGDESSLTWAESVELLDSAPGVDKKAAEIVLAEMGIDMTQFATADHLTAWAGLAPGNNQSGSKRHKAKTREGNRNLRQIMVQVAWAAVRTKGSYAQALYRRLAGRRGKKRAIIAVARTLLSSFWYMLTRGEAYKELGGDYFDQRRKDVKVNILTKQLEKLGYAVQLEPVKFQLAPA

SEQ ID NO: 269566 - protein, 410 aa, unidentified
MPSSLFVGIDVSCKDNKVQLLHLDGAEITRFSVPNNHPGAKSLSEKITGVMGKNKFDSLVIGLEATSVYGHPLVYFLRQEPSIKALNPRIHVLNPKQVANFKKAYPELPKNDWVDAWVIADNLRFGRITKEVCMDEKFDALQKLTRERYHVAKNLTREKNRFLSNLFLKFSTLAQEDIFSDKFGATSTAIIEDFFSVDDIAYMDVDKLAEFLNKKSKGHFADPHELAETIKKAARSSYRLPKTVNDSVNQVLAVSLVAIKALKKQLETLDKAIETQFALIPNTLQSIKGVGPVYAAGIVAEIGNIKRFLNHAALAKFASLAWSEHQSGQFKAENTHMIRSGNRYLKYYLIEAANKVRVNDPEFKRFYELKYAKTPKTPHKRALALTARKFVRLVYALLHSNRLYTPPKGK

SEQ ID NO: 269567 - protein, 314 aa, unidentified
MNDSLYIGIDISKEWIDAYLHPTGETWHVKRTPQDIAAWIESLPSGIALTVMEATGGFESIVAALLVNVGIPAAIINPRQIRDFASALGTRAKTDELDARVIAHFAAMIKPVPRQLPSNQQAELAELVDRRRQLVEASTSEKNRLGTAMCKRVRTSIETHLRWLARQIDAIEDQIRTLIENSPIWNAKKQVLVSNTGVAEKTSFELIGNLPELGLLNRRKISALSGVAPFTHTSGKCRGKSFVQGGRESVRRALFMACRSAIRFNPVIRDFYQNLIARGKAPLVAHTACMRKLLTIMNAQIRDTIYAHAQPLSS

SEQ ID NO: 269568 - protein, 374 aa, unidentified
MPKYSTAFGMDVHLRSTTVCALDADTGEAVTRRFPGNPWGEIAGWMGGFPGPSLAAYESGYPGFAPHRELAGLGVECVVAAVSKIPRSAADSASKNDRNDAARMAKAILAHDISPVWVPSPEVEGIRDLAGAYDGATARLATAKQRLLAFLAKRGFAYGGTTPAGNPRKYWTYDFLRWLDKVRPEDDGGVRTLAALRSEVEAAAEARADLLSEYRAAVDASPIAAEVAALQSIKGCAFAQLAAAFSAEVGDFTRFRSGRQVTAYFGLAPSQRSSGDSVRLGGISGAGNALVRKLAVEGSWCYAAARHQPKLMPRDTGVPLEIRMHGRKGSERLLRRREEMLARGMPQAKANAATAAELVRWLWALGMMCREGAE

SEQ ID NO: 269569 - protein, 405 aa, unidentified
MRSIGLDVGRHVAEVAIAEPGRPTRSGGRIGASPESLEAFAASLSADDQVVLEATTNTWAIVDLLERHAGRVVVSNPLRTRAIADAKTKTDTIDARTLAELLAADYLPTVWQPDPDTRVLRRRVAARVALVAERTRLRNRIQAVLMRNLVSCPWSDAFGAGGREWLARVELPADEREQVDRTLRLLEGLDTEIQTAEAAIARDVVDDPRIRHLLSIPGVGVQTAVGLLALIGDVHRFGRPNKLVSYLGLDPRVHQSGGRPAWIGHISRAGQSHARRLLCEAAHAAIRVPGPLHAFYARVARRRGPGIAIIAVARKLAVLAWHVLSDEVDYRWAPVGLTAKKIRAVDRAAGAPRRPGGRSGISRAGAKAERERERQVVGRAEAAYVELVRARRAKGAAAPAKATTA

SEQ ID NO: 269570 - protein, 355 aa, unidentified
MTFVGLDLHKRYITACALDAGGAILGEVRRMPVSLEAMGDFLAALAAPVTVGMEATLCWQWLHDKLESAGYAVRVADARQVKLIWQARSKTDPIDARKLAELVRVNLFPAIWIPDPDTRRRRQLLHGRAFLVRQRTQIRNRIHGRLTSENLLFPRSDLYGRAGRAWLATIPLSPTFRDQVDRLLRLHDALTTEIRELDEEVKRLRRDHPAIERLHTIPGVGLFGALFLVAEIGAIERFGSSHQLAAYAGLVPSTRSSGGKTTHGGVGFASNRWLKWILVEIVQTLKQAPGPVGDQYRRLLRAKGKPKATTAAARKLCCYIYWMWKDGVGYEEWLARRGNKVWSEVRPGQRMGMVA

SEQ ID NO: 269571 - protein, 409 aa, unidentified
MRLFVGLDVSSFDMKVCFLDGEGNKLDKFSVSNDLPGAMTLKEKLLQCVTDKGIDTLKIGLESTSVYSFHPSMFFHHDEDLQRFGTKVFLLNPKQIANFKKSYSDMNKTDEIDAFVIADYLRFGRNQMSILKENQYVALQQLTRSRYQLVKMLTKEKQHFLQHLSFKCNTFSQEVDSSVFGTSMMELFLEKFSLEELADMPLEELAEFLQKKSKNRFGDPTCVASTIQKAARTSYRLDRIVEDFIDVLLGTSIEVIRAYQKQIKELEKITKRIMAGLTQTLESIPGIGPVFAAGIIAEIDQIERFDDETKIAKYAGLYWRKHQSGRFTAENTSLSRNGNHYLRYYLVEAANSVRKHVSDYQEYYVKKYNEVPKNQHKRALVLTARKLVRLVDALLRSHQLFTPESCVKV

SEQ ID NO: 269572 - protein, 407 aa, unidentified
MEILHARCAGLDVHKDNVVACVRIAEGTLAQEVRSFATTTSGLLSLLDWLTTHAVTHVAMEATGVYWKPVWHVLECNFELVLANPQHIRNVPGRKSDVSDAMWIADLLAHGLIRGSFVPTAATQELRDLTRTRKQLVREVAQHSLRLQKVLEDANLKVASVLSEILGSSGRAMIRALIAGETDPTRLADLAQGHARKKHDALVEALRGRVTAHHRAMLQLHMQIIEALEAAIREVEAAVGKALEPIQNLTQLLTTMPGVSDIVAQVLVSEIGTDMTRFTTAGHLISWAGLCPRSDESAGKRRSTRVRKGGTWLKTTLVTAAWAAVRTRGSYLRAQFLRLKSRRGAKKAILAVAASMLTAGYFMLRDGVEYKDLGPDHFDRHDKEKTISRLVRRLKDLGCEVKLPTAA

SEQ ID NO: 269573 - protein, 488 aa, unidentified
MKPDSPALYVGMDVSKGYADLHAINHARSVYATGRYDDTREGHERVLKVLVQWREQHPGAAMYVGVEASGGLERNWVRMFHERMPGVTVARLNPLAVKRSLAVKMHRSVTDKGSAAGIATYLAEGRPLHETRWDPRREGLQELYRDIRARIEHLQQTKNRLQSLLPRVHPGLVEFTRNDFPKWLLTVLTRYPTAPALARAQVEDLVHIPYFKDEARAVEMIAAAKVSVAGQTDTLTARTVVSLASEILHQQQQIKALQDAMYEELKDDPGIRAMISITGIGKWSAVCLRVEIGCVERFPTAEALTAYAGLDPVYHQSGDKTRVCRISKHGRRQIRVVLYMCVCSALQYNPVIDAFVNRLIVAGKPKMVALTAAMRKMLHLAYACWISETSFDPNHEQARRARRALAPRPDAAVPATNDEASHVANHPSNEETNTVVHDEATGGTAHAVTVTSAKPGTVLPRISAPVSRREAQRRRRNAKEQSRRQRPE

SEQ ID NO: 269574 - protein, 354 aa, unidentified
MTSTKYIGMDVHKESISIAVMNAAGKIVMECVIETKANMILQCIDGLRGDLHVTFEEGTSAAWLYDLLKPHVTELIVCDPRKNASMREDNQNDKIDACRLAELLRIDHLSPVYHGEHGLRTLKELVRSYLTVTKDLVRVKTRVKAIYRSWAISCNGKEVYAACHRAEWLEKINEPGVRRRAEFYYQQLDALRVLRQGVRRELLAESKKQKAWKRLCQIPAIGPIRAAVLLGILQTPHRFRTKRPLWKYSGLAIETCSSADHRSINGQLQRSKKNSVRGLNQNCNHDLKNLFKGAAVIASSKAGPFQEFYTALLAKGMRPEMARLTLARKIATIVLIVWKRGVCFDAQHLKPQTA

SEQ ID NO: 269575 - protein, 406 aa, unidentified
MAQRNPSISLKPGKSRVALTITHPNAAGIDIGSGSHFVAVPPDRDDEPVREFASFTVDLNALADWLKACGVDTVAMESTGVYWIPLFELLESRGFTVLLINARHVKNVSGRKSDVLDCQWIQQLMTYGLLRGAFRPADQVCVLRSLWRQRGMLLRNQSRHVQHMQKALTQMNVQLANVISDVAGETGQKILRALVAGERDGHVLAKMKNARIRASGDEIAKSLQGNWRAEHLFALKQALDGFDFIGTQLAECDREIEQQLQRLQTHEGEPAKGKQRGRARNAPKFDLRTQLFKMCGVDLTRIDGIDVTTALAVISETGVDMSRFPSAGHFASWLGLCPGTRITGGKVMSGKTKRCANHAAQALRLAAAALRASLTLGNLCSSRAWNSSPLSSSSAVGGTASASRSG

SEQ ID NO: 269576 - protein, 463 aa, unidentified
MPKARKSRKKLALKVDVTAGLEALHHHAAGIDVGNAEHYAAVPVGRDPQPVQTFGSFTADLHRLAKWLKACQIETVVMQATGVYWIALYEVLEGYGLQVNVVNAKYTKTLPGRKTDVLECQWLQKLHSFGLLNNSFLPPEEIRVLRTYLRQRENLVAAAGACIQQMQKVLTQMNVQLANVSSDLSGMTGMAILQAILDGQRDPQQLAALADPRVQASRKEIAQSLAGHWREDLLFVLRQVHGLYFTYLESITACDQRIEAHLKTMPAKVDVVAQPLPEARPKDRLPNRKHIPQFGLREELYRITGVDLTRIDGIQVQTAQVLVSEVGVDMTRWPTEHHFSSWLGLSPNNQITGGKVIRRGTKKVLNRAATALRLAAQTLHRSKSYLGAQYRRLRARLGAPKAITAMAHHLARLIYRLLRFGTQYHDKGVEYYERKYRETEMKWLQKQAAKLNMQLIPTGALTK

SEQ ID NO: 269577 - protein, 386 aa, unidentified
MPQLNDLSRSLVTLEQDATLIAVIEMGQSSWLVAGIVPGVERQPLKKLAVDEAALLKLLHRWRKEAEEAGHRITRITVGFEAGRDGFWLARWLRARDIEVHVIHASSVAVSREHRRAKTDRLDTELLKRAFLGWLRGERDHCKMVAIPTINDEDAKRPNRERESLVGEQSRIINRIKATLARLGIRGFNPKLKKAAERLEGLRTPEGEPVPPNTLSELHRDMERRRLVRDQIRQIESARLDRLEHAPGEGVHAMVRLLARVMGIGVETADMLVQEVLSRNLRDRRAVARYAGLTGSPDESGKKRREKGLARSGNPRVRWGMIQLAWRFLMFQKDSALAQWFRARTENARGSRKTMIVALARKLLIALWRLVREGVVPDGVILRPAQ

SEQ ID NO: 269578 - protein, 413 aa, unidentified
MEWVACVGIDWGDKKHAYMVQTADGKKQDGWFGSSPEEVHEWARGLGERFPGGTIIVAVEQGRGSLLYALMAYEYLVLVPINPRASKAYRESLRLSGASNDPSDAALIGDFAMKHLTELRVWRPDEERTRKIRLLCEQRRSLVDQRTALTHTLSATLKEYFPQVLQWFGDEASPYLREFLTHWETLEQASQASVDDITNVLKSRGRRKASAVSQELIEKIRVAVPLTRDTAILDACSMYARSFIALLDPLDEEIAKYDQAIAVEWADHPDRKIFDSLPGAGAVMAPRLAVAFGFERSRYDAAAELQQYSGIAPVTEQSGRHWWVHARWGYPTFLHQTFHEFAQASLPHSTWARAFYHEQRDRGAGHHAAIRALAFRWIRILFRLWKTGEEYDEQRYIEVLKRKRSPIVRRLAA

SEQ ID NO: 269579 - protein, 368 aa, unidentified
MQEICAFVGLDVHKETISVAVADAGRAGEVRHVGTIKNDPTAIGKLARSLARRHRGIEFVYEAGSCGYNVQRQLSAMGMICRVCAPSLTPRKPGERIKNDWRDAIALARLHRAGELTYVWVPDALHEALRDLVRARHAACQDVRRDRIRIQAFMLRCDLRFEGKAWSRRHRMWLCNRMFAHPAQQIAFQTYLNALEHNEARKAGIEQQIREVITDSPWAKQMQALQALKGVGPIVAATVLAEVGDFSRFAHPRQLVAYFGLAPGEHSSGGTVRPRGITKAGSSIARAVLCEAAWSYRTTPKVGQWMKERCPPVSQDIAALAWKAQLRLHKTYRKLTARGKRSVVATAAVARELLGFIWSIGQRVPLGA

SEQ ID NO: 269580 - protein, 401 aa, unidentified
MDTTYYLGIDIGKYHHQAILCDLEAKPIAPSVRFQTTIDGFRELFSYLKKYISDGDYSTVHAGFEATGIYWLTVYEQLLKQKIQVSVLNPMQVKAYRNEGIRGAKTDRLDARLIVKVLRFGDYRDSDIPPEDLFALRQLTRLRADLVDMASGIKLKVIGILDQVFPEYSDIFPDIFGTGSKALLQKALVPEAIAAIPTEKLTGLLRKASRGQYGVKQAESVKKAAEQTIGITLGIDAFSLSLEILLAQIIHLEKQVEKLEREIKKRTAIRAETLTSIPGIGTIQEATILAEIGDFERFRNDKNGAEKLVALAGIDPKVKESGKYKGQAKMSKRGSSYLRRTIRQSAFIASLGKGKDPMFSRIYEKKIAEGKPFEVALSHVENKMLHVIYSLLKSKKEYVPN

SEQ ID NO: 269581 - protein, 314 aa, unidentified
MKMAMLSFCGIDVSKDRLDVVVLPEGWFFSVSNDTAGWAELVVRLRPLTVSAIGLEPSGGYERGIIRALLAAGLSVRRINPNKLRQFARARGVLAKNDRLDARLIAEYVAIMPTRVVQRDAAVERLAEIVTMRRQLCDEHVAAENQAAHLEDAMLRRLSKRRQTRLEADIRLLDKRLAEMVAANVALAQRYELLTSMPGVGPMLAFTLIALLPELGKMTRKQIAALVGLAPYDFDSGKLKGHRSIYGGRMPVRNVLYMAALSASRYSPALKAFHKRLADADKKSKVIIVAVMRKMITTLNAMLRDNAAWQPQSA

SEQ ID NO: 269582 - protein, 324 aa, unidentified
MIPDLQGGVRKMSDRYVGIDVSKSRLDVACSEGRSWSVANDAPGQVQLCEQLRTQGAKLVVLEATGGLERGIAAQLTAAGLELRVVNARQVRDFAKALGRLAKTDQLDAQVLVRFGQAMKLESRALVSEQVTAMQALVARRIQLIEMITMERNRLSTAHKGVKRSHLRIIRTLEQQLAETDKDLDQGLRESGIWQEKVELLETVPGIARVTSLSLLASLPELGTLNRRQISALAGLAPFNRDSGAWRGTRSIYGGRASARRALYMATLVGTKHNAVLRVFYQRLRAAGKPAKVALTACMRKMLTIINRMLKERRAWDPQWSSAA

SEQ ID NO: 269583 - protein, 339 aa, unidentified
MKLTTVGVDIAKNVIQLHWVDPDTGEIVNKPIKRAAFLEHFVNRTQCLIGMEACGGAQHWARRLIEMGHEVKLMPAKFVKAFNTGNKNDAADARAILMATQMPSKAVAVKTEAQQAVLALHRMRQQLVKFRTMQINSLRGLLTEYGEVMGQGRAALDKAIPSVLERLIDRLPAILIDTLREQWNGLTPLDKQIAEIERRLQTWMKEDKACKAISVIPGVGLLTATAAVATMGDAKAFKSGREFAAWLGLVPGQSGSGGKVQLLGISKRGDTYVRTLLIHGARSVLFHAKEPGRWIEEMKKRRPLNVVTVALANKMARTIWAILAHDTPYQKDHLSVKPA

SEQ ID NO: 269584 - protein, 343 aa, unidentified
MDYFAGLDVSVKETSVCIVDNAGKIVREERVASEPEALLQVLTNAIYRFKRVGLEAGPLSQWLYSVLAEAGLPVICVETRHMRAMLKAQINKTDRNDARGIAQMMRAGLYRPVHVKTLRSQKLRMLLTHRKLLQSKAIAIENDLRATLRNFGLKVGMVGTVKFEARIKELVENLPDLAILVEPLLTVRRVLREQITVLHRRLLAIVRDDDVCRRLMTVPGVGPVVALTFRVTVDVPARFRNSKAVGAVFGLTPSKYQSGESDRTGGISRCGDEIMRAMLYEAAQILLLRSAKWSWLKAWAMKIARHRGMKKAIVALARRLAVIMHRMWVDGTEFRWTREVAAA

SEQ ID NO: 269585 - protein, 391 aa, unidentified
MFYIGVDIAKNNHEASIIDSDGKLVSESFSFSNSIRGLEKFQKFISSFSIDSNNCIIGMEATGHYWLSLYSFLIDLGFSCVVINPIQSDAFRKMYIRQTKNDSVDSFVIAQILRFGEFSVSHFSDEDTFALRNLSRFRFALVDEASDWKRKLVCILDQVFPEYSSLFSNIYGVASKELLSKYPLPEDMISIPADELAKMLSKCSKGRFGIDKAKEIQEKASNSFGVKFALKSFSFQIKQIIAQISFLEDQIADIEDEISSMINSLCPVITSITGIGDVLGAAIFSEIGDISRFERANQLVAYAGLDVAVKQSGNFNATDTKISKRGSPYLRRAIWLAACVATFKDPALSVYYQKLRQRGKAHGTAIGAVARKLTNIIFAVLRDNKAYIPNI

SEQ ID NO: 269586 - protein, 424 aa, unidentified
MKFKMQDKQNQLIERISDKHLVVGVDIAQQFHVARAVNFRGIVVGDPLTFENNEDGFTILLHWINNLKRTNNLVTTIVGMEPTGHYWINLSKWLFEQNIDVVTVNPYHVKRNKENRDNTQSKSDKKDALVIADMVKNGYYSIVRPTSESFEKLRVLMSNRDVIVKRLVSSINQLNRWVDVVFPELRQVFKDVKGKGAIATLRLFPTPMELRLMQPQNIVIGWKSQMKRQPGLKKAQLLIHLAKRSIGTRQALDAYKFHLQQLLEEFDLATTQLERVEEQVTEVLKQIPYANHLLTIKGISEISLAGILGEAGDLSGFAHGNSLLRHAGLHLAEASSGKWKGQIVISKRGRSRLRRFLYLATMSLVMNNPEFKALHTLNVKVKKIKKMKSIMKLVGKLARIFVGIAKRNESYCPEKLQPLTSLAA

SEQ ID NO: 269587 - protein, 404 aa, unidentified
MKHVIGLDVSKGKSTVTIYDSYRQCKYEGEINHTRRDFEQLHKRIVDITSLDDQAPDIVFEATGVYSKPIEAFLKDYGYAYCRMNPLEANLQMAKMRRHKTDISDAHELAKTHFKMEREPTYIQDDYYEQMRALTRYYDEIDEEMILLKNRMHSILQLSFPELEKILTPNSALFLNIVQLYPHPTLVLAHSKTVIKNRLKANTRKNLSLERAEKKAIALLEAAQNSYPAIRSTDVRCEQVRDYANRIAELKDKKEALVQQMITLSKDRKEYIVLRSIPGIGDSTACRLIGEMGDIRRFQNAKQLNAYAGIDIMRYQSGNTQYHDRINKRGNKHLRKLLYFMVCAMIMKKKDKPNHFVDYYYKLKTQPQRKPHKVAIIACINKFLKVTFQLLTHGILYDYETALS

SEQ ID NO: 269588 - protein, 372 aa, unidentified
MSKYDYYVGLDISQKSTAICVIDSEGKQVCRGSSSTRAEDIYGWLNNRIDITRPLKVGLEAGNMSSWLYTGLHKLGLEVVCMETFQAHRFLSTYRNKTDKNDARGLAQLLRMGGEDFLRVVVIRSQAAQETRALLVMRDNLVKQKISLENNICGILKPFGLIVQRGNPSPDTFFERVIDAIALAEDRGVNLRHIIKPSLTLYMEACDQIKPMTKKIEEIANSIDMVKRFMEIPGVGPITALSFYTAIDYPERFRKSADVAAYFGLTPKQFQSGETDYSGRISKRGDFCTRRALVNAATVMLMHTNEWNSIKAWGVRLAKRIGFSKARIAVARKLAVTMHKIWLNKDKFRPKKLDAKELAALKKEINPSLAAA

SEQ ID NO: 269589 - protein, 378 aa, unidentified
MYRILKIGMDVHTTNFTLCAVEPILGQEANVLARATVGPDYKNIIDFISKLKNTLKVTDKECDIQCGYEAGCLGYSLYMQLTKAGIKCVILAPSTMLTQQGKRIKTDKRDALLIAQCLCYGGYHAVHIPTDDDNAVKEYIRMRDDHKISAKKIKQQINAFCIRHGLIYTGNNWTGKHRAWLKAQKLDPINQETLNEYIVSLEEAEAKIARFDKRIEEIAVETKYVEKVKALRCLLGIQTHTALCLVVETGDFKRFAKGSIYAAYLGLAPGEHSSSTDINRLGISKAGNNHLRKLLIEAAGGICKGAIGHKSKALRAKQEGNTAEIIAYADKANTRMRSRYYHFIRRGKKRNIAVTAVARELACFIWGLMTNNIALNPT

SEQ ID NO: 269590 - protein, 328 aa, unidentified
MKLQTIIGADLSKDSIDLALYPGKNHLKIENNTAGFRLLIKWLRDLKINISSVLVVMEHTGLYSYHMEYFLHKRQISFTKVSALAIKRSMGLVRGKSDKIDAQRIALYGYEKRDRLIAASIPDEALQRLQMLHSTRERLVKHCSSLKCAVKLYRNILKQSDVIITGHLALIKNFTTQIKKIESEIKQVMSQNEVLHQNGKLLQSVIGVGPVLSVATVVKTKNFSQFTDPRKFACHCGTAPFEHSSGTSIRKKTRVSHLADKSMKTLLDQSAKSAIQHDKELKQYYQRRLEMGKSKKSTINIVRNKILYRMFAVIKRQTPFVKNYLQTT

SEQ ID NO: 269591 - protein, 341 aa, unidentified
MNNITIGLDIAKSTFHLVQMDKNGKLLKRKQLTRKKVADYFVNLAPGIVVMEACGSTHYWTRVLIRCGHVVKAIAPQFVTPYRKGNKNDYNDAEAIAEASQRKNMRFVPLKSLEQQDIQMVHRVRERLMKNRTALSNQIRGLLAEYGLVIPKGVHHLKSQLPGLIEAADNELSVNARRYFNDLYEELNKLEQEIKVVDKEILSICNKYDICKQLSTMNGIGPINATALYAGIGDGKDFNSGRHLSAWLGLVPRQHSTGGKANLMGISKRGNTYLRTQLINGARSALRHCDNKTDRVSLWAKAIKGRSSFNNATVALANKMARMAWAMLHHQENYKFSNTQK

SEQ ID NO: 269592 - protein, 409 aa, unidentified
MLFVGDDWAEDHHDIEIVNEEGRRLARRRLPEGLDGVTRLHALIASVMPEQWPDLPAGEAVARVKVGIETERGPWVTSLVAAGYEVFAINPMSTPRYRERHSTSKAKSDPGDAHVLAEIVRLDRSHHRPIAGDSAHGEAMKLVARSHQSMIWDRTRHVLRLRSALREYFPAALNAFDDLDALALLAAAPDPDRAARLSTGRISTALRKANRRDVPTKAVQIQAILQAPALRQPPAVQHAFAAIVTGEVRLIEALNAEINALGEVVAEHFGRHPDADLYTSQPGLGVILGARVLAEFGDDPKRYTDAKARKNYAGTSPITRASGTKKTVLARHVHNDRLADAVHQWAMGALRGSPGARAYYDAMRTRNIGHHAALRQLGNRLVGILHGCLKTRTAYNETRAWAHHSTASS

SEQ ID NO: 269593 - protein, 344 aa, unidentified
MTQRQPVVEVFAGLDVSAREIKVARVQGQDQKPTLATFANHTSGHKSLLAFLLEETERVRVCLEASGNYSLDLALFLHAQRQVEVSVINPRRARKFAESLGERSKTDPVDARVLCQYAARMPWEAWKPPSSTALRLRAITRAIESLGVMHTQESNRAHALGSSQALPALVLRERQRHQRYLENRMKQLRREARRLIARDPELERRYRLMLTVPGIGETSALQILGELVVLSDTADARQWVAFSGLDPCTFTSGTSVEKRPRISRGGSRHLRHALYMPALVALRREPHLKRFYERLLSRGKARLQAVVAVMRKLLHALFAMFRANQPYDGSKLCSLEPLVFRKVG

SEQ ID NO: 269594 - protein, 434 aa, unidentified
MITVVYPNCAGLDVHKKFVTVCRLTVTKQGQVQKELREYSTMTADLQAMADWLAEGGVTHVAMESTGVYWHPINNILEGRFEIFLVNAQAVKRMPGRKTDLKDAEWLATLMQHGLLQRSFIPDRQQRELRELARYRLSLVQERSRFASRLQKVLEDTNIKLAAVATDMQGVSAQAMIRALIQGEADPKVLAGMAKGRMRKKQAELERALVGQLTEHHRFMLNELLDQLDVLDQQIAKIEGRIEEQLAQMTPFRAAVILLDTLPGVDRQLAIAIVAEIGVDMSRFPSDRHITAWAGVAPGNNETGGKQRTGKTRKGNKYLRRALTLAAWGAVRSKRNYLRSQYYRLAARRGKPRAAMAVGRSILQAAYHMLLRGEPYQELGADYLDQLDRERTAKRLLKRLDILGYDISSVKDRLAALPPTEQPALPRQPLPIPA

SEQ ID NO: 269595 - protein, 342 aa, unidentified
MAIVGGIDIHRAQLTFDYVDLDSGEVFRGRIAPADRAQLRQWLDRFLGRTDVAFALEGCTGWRYVVEELHRAGITAHVAEPAETAARRGPKRRAKTDRSDAQLLRDLLLEGRIPESWIPPQPVLEARALVRLYKDLLDERTGWLQRVHASMFQMGVPDLDVSTMSAAGRDRITAAELSVATRTAVDVAMRQVDRLTAEMTMVREQIHAIGRRQPACRALQAAHYGIGPLTSVVIWAEMGDTRRFRSSDDAVRHAGLDVTVYSSDGRRSAGHLARQGPPMLRWALYEAAVYAGRPSSPDHAYFQQVKARLDGQLALLSMARKLARRCHHTLRNLDDQVLAPAA

SEQ ID NO: 269596 - protein, 347 aa, unidentified
MRRYIGIDVHSESCTVAVMGPTGKRLKEAKIETNGKALTDFIRTIAGQRHICFEEGTHSEWLYELLEPLADEVIVAIPEPVRGSKSDSRDAWSRADDLRCDRITRSVFKAPDRFTMLRAAVKAFVVSQRDMVRTKTRLANLYRSRGLSGMSSAIYDPEHRTTWLKRLPAAQAGYAMLLNTQLDALIQTHDRAHDWLLEESKKVPVVKLLMTAPGIGEIRAAQIVAVVISPYRFRTRRQFWSYCGLAVVTRSSSDWISDRHGGWQHRAVVQTRGLNRNRNAILKNAFKGAALSVLKTSEHPLRLAFERSIAAGTKPKLASLTLARRIAGAVLAIWKHNQEYDVTKQQP

SEQ ID NO: 269597 - protein, 398 aa, unidentified
MISVGIDVSKEKSTVCILKPYGEIVRSPYEITHTESQIAELVSMIKCLDDEVRVVMEATGNYHLPVLSFLKEHGIFVAVINPLIMKKYASIILRKGKTDKLDSIKIANYGLDNWFHLINHESSEEIYVQLRLLGRQYGHYIKLRIESKLSLTTMLDYTMPGIKTMLKSRSDKPEKDKLNDFIEEYWHYDNITKKSENQFISNYKNWAKKKGYQQSEAKAIKIYDLAQQGIPTLSSNAPSTKMLVLEAVRVLREIDKTLALILSQMQELAKSLKEYTVVREMAGVGDIIAPRLMAEIGDIRRFHSGKALIAYAGIDAPPYQSGQFTGTRRRISKRGSATLRKTGFEIMKCLKSNKPESDTVYLFVLKKEAEGKASKVAKIAGLNKFLRIYYARVKEVYK

SEQ ID NO: 269598 - protein, 357 aa, unidentified
MIITMIGLDTAKSVFQVHAVDGAGQVLIRRKLHRDELLTFFEEQGACTVAMEACGAAHHWGRALTDLGHTVRLIAPEAVRPFVKRGKKNDAADAAAICEAASRPGVTFVPIKSLEQQGTLAVHAARTLLVKQQTMLANAMRGLAAEFGLTVPKSMGKLGDLMTLVEADEAMPEEARQVLGALFGQCRALEESIGALEAKIVAHARRDDAARRLATVPGIGPITSSLIAATAQTFGFAEVADIGVFQSARHFAAWLGLVPRQHSTGGKTRLGRITKAGNREIRRLLVLGATSMVHRAAGWNSAAGAWTRGVLQRRPVRLVTVASANKMARIAWALMTRKEVYHAKGRPAAAAPAPAAA

SEQ ID NO: 269599 - protein, 345 aa, unidentified
MKITTIGMDLAKNVIQLHGVDERGKAVLKKQLKRAQVASFFANLPACLIGMEACASAHHWARKLQSFGHSVKLMAPQFVKPYVKTNKNDVADAEAICEAVARPNMRFVPIKNAEQQAVLALHRARQGFVKARTAQGNQIRGLLAEYGIVIPQGIGHIAKRLPEILEDGENDLPGAFRQLLDRLGDHLKELDRQVGELEVQIQSWHRENEASKKLARIPGIGPITASALVASIGDAKSFENARQLAAWVGLVPRQHSSGGKPVLLGISKRGDTYLRTLLIHGARAVIRVAERKAGYADSWLARLMGRRNKNVAAVALANKNARTVWALLTHGRDYQADYEREPAAA

SEQ ID NO: 269600 - protein, 345 aa, unidentified
MPIVGGLDIHRKQLTFDYLDTVTGEVKRGQVAPADRAHLRAWLARFAGRDDVAFAVEGCTGWRYVAEELAAAGVAAHVGEPADTAAARGRKRHAKTDKTDSRHLRRLLAEGRLPECWVPPTQILEYRALLETYHDLRAVHTAWVQRIHAVFFHQGAPALGEGALRTEPGLEALRAAAAACLSPAGQLQVATALDMLAAVEARMEMLRAQLRDAARHLTGAKVLAARLYGVGPVTALALTCWLGGAGRFSSSRKAVRFTGLDVTVWSSDRKGPPGRLSRQGPPVLRWAVYEAGKTHARSSAPDHGYYATVADRKNSKRAALSEARKIVRQACHILTELGDDALTAA

SEQ ID NO: 269601 - protein, 383 aa, unidentified
MEAPSLQQSAIHVDLSAIFVSLELSKSKWLITSLSPGGGEKMLKHSVNGGDVPGLDSLFSSLIEKARVKSGREYRIITIQEAGLDGFWIHRVLANKGIESHVVDPASLQVSRRRRRAKTDRIDGEKLLRALMAYKRGEPRVCAMVRVPSPDEEDVRRICRERKALIKARVGHVNRIKGLFSSQGISHYEPLRKDRHARLVGLRTGDGRALPTHMKAQVCRELGRIELVLEQIKVIEKERDALLAAQPAEAPVTRLLRLKGIGPEFAAVLWCEGLFRHFDNRRQVAAYAGLAPTPWQSGSIDCEQGVSKSGNPRLRATLIQVAWLWLRHQPNSALSQWFNARIEHNNGRGKKVAIVALARKLLVAIWKYVTSGVPIEGAILKSS

SEQ ID NO: 269602 - protein, 465 aa, unidentified
MKKTHKKSQRSKSKKKLVASGGRAVEVRASGELNRINEHAAGVDIGGERHYVAVPPGSTEHPVREFGVFTKDLYAIADWLRECGVETVAMESTGVYWVPLFEVLEECGFKVKLVDARKVKNVSGRKTDVLDCQWVQQLESYGLLQAAYRPTDEIVVLRSYVRQREMLVKSAATHIQHMQKALQQMNLRLDNVVSDITGQTGMRIIKAILSGERDAQKLGMMRDYRCHATAEEIAQSLIGNYRQEHLFSLKQAVELFEYYQEKIAECEAEMEKYLECLPHVTEEEPPELPFKEKRNLMSFNVQDHAYKLLGVDLFRIRGLNSETVLRIVSEVGVDLSAFPSEKHFASWLCLSPNQRVSGGKVLSSKTNPSSNRAAAAFRQAAVSVERSQSELGAFYRRKRSQKGPASAATATAHKIARLYYSLVKNGTEYQEQGARAYEERERERIVANLKKRARSFGFELVAKGA

SEQ ID NO: 269603 - protein, 405 aa, unidentified
MFVGIDWASERHAVCVVDDAGRKATAFQIAHTADGFDQLVARLCRYGDPAGLPVAIERPDGRLVDRLLEAGHPVVPVQPNAIKAWRDAEVLSGAKHDPGDAALIAEYLRLRSHRLRTLAPFSAETRALRAVVRTREDLVDQRVAASNQLGACLEAFWPGAKGIFADLASPIALDFLTRYPTPESAAGLGEQRMAAFLTKHGYCGRRRPDELLARLRAAPAGLTGTVEVEARRDTVLAMVKVLGALLAAIKDLDRSVIAHLGEHPDAEIFTSLPRSGRINAAQVLAEWGDCRPAYADAEAVACLAGATPVTKQSGKHTAVQFRWACNKRLRRAVCTFADNSRHGSPWAAKVYADALARGHDHPHAVRILARAWIRVLWRCWIDQVPYDPAKHGAARKLTEMATSAA

SEQ ID NO: 269604 - protein, 399 aa, unidentified
MTNQPHRVGGVDSHKDTIHVAVIADTGQPVADHEFPTTQVGYRRAVAWLIENGPLQVVGIEGTSSYGRGITTAVTEVGISVVEVSRTRPAERRRQGKTDRLDAYRAARSVLSGEANAVPKSESIEALRALTVARRSAVKAQQVTWRQIQSVLVNAPTALRDHYRALTQTKLVSALVNSRPCQMRDAQEADIMFALRSLARRFAVLGQEITVLEQRMGDRATATNPALMVIKGVGAVVGAQLLITAGDNPDRLRSSASFAALCGTAPIPVSSGRTDRHRLCRGGDRQANAALHHIVKVRLSYDLATQAYRDERLVKGWTIAAVFRALKRAIARQIFQALTGHCAVPDYTDLRPARRAKNLTLTAAAKHLGVWPARIGELELGRRPNNELADRYRQWLNAA

SEQ ID NO: 269605 - protein, 401 aa, unidentified
MEGPIVSIDVSNGNSHYMCFIKNNKRFGKVKKIDHDIEGFKRLLEDIQKLEAETNEKVCAVFEATGFYTKPLERFLSKNSIKTYMINPLESARKRKEEIHNKKTDKLDPISISKVYYDKEEMMELKKKDETYNWLRKKNRLYEDQLNHLRKYKVTFQNQLSICFPGYLDLFKDGYSDIPMTILKKYPHPDLLKNKKAETVARYLEKNTCHNHKVSLEYALKIIEFAKKTYPGCEKDDVEVEIFKILLDKVIETQRECEKTLNEMITVASTLEEYRYILSIDGIGTNLAARIIAEIGDIEEFKSREALVAYAGLDPHIYQSGDQDGKHLKISKKGNKYLRCLLFLAVGCSIRGAKDNPVNRFYQKKKQQSNPLNSKAAKTACTAKLLKIIYGICKNKTTYER

SEQ ID NO: 269606 - protein, 391 aa, unidentified
MYVGIDIGKTIHQAAFLDDHGHDLCSSLTFHNDDEGYQLFFETLDKNHDGSHVVIGMEATGHYWLNICSALLSRDFETHVINPIQTDAMRRMNIRKTKTDSVDCYYIARVLMIGEYSDVAIQDENIAELKQLCRYRYSLVDSVTAVKNQITGIMDRIFPEYHTLFSDIFSVTSIELLKRYTTPAEISKVTPKRLTALLAKYSRGSFGEEKAQQILSIARTSVGNANVNPAFILQLRQQIAQIEFMREQINIVEKRIELCYSRFPCFLHTIKGVGLISAATIFAEIGDIARFDSPKKLVAFAGIDPSIYQSGNYSSSHASMSKRGSPYLRRALWNTAEITSRMNPVFAEFYQRKRSEGKNHMTAIGAVARKMTYSIFAILRDQVPFNHDFGA

SEQ ID NO: 269607 - protein, 322 aa, unidentified
MHAFHLGIDVAKAKLDCALRLPDGKFFHKVVENKQTAFTQLLTFLGKHHAQGVHVCMEATGIYWEAIAEFLAAREGFTVSVMNPAQIQAFAASRLTRTKTDKVDAKLIAAFCAERRPEPWQAPSAPERNLRALVLRLENLQAIRIQESNRFEVARECVKDDIHEHLQWLDKKIEALIKDIRQLLHNDDDLGPKQKLLISIPGIGERTVAILLAYYAHPERFHNARQAAAFAGTDPRQHDSGSSVHGKPRLSKIGHAFLRKALYMPAMATLYKTAWGQRFRQRLAAAGKAPKLIIGAMMRKLIHVAFGVLKSGKPFDPARHGV

SEQ ID NO: 269608 - protein, 320 aa, unidentified
MRNTVGLDISKLTFDATAIVGNAEYSAKFDNDSKGLDQFSDRLKSLGCQNLHICMEATGNYYEEVADYFAQYYSVYVVNPLKISKYAESRFKRTKTGKQDAKLIAQYCRSAQESELVKRQKPTDEQYRLSRMTAAYAQIKSECAAMKNRHHAAKDEEAAKAYAEIIKAMNEQLEVLKEKIKEQTEKPNCKEGVKRLETIPAIGRMTAAVLFHHLTSSKFETSNKFAAFAGLSPQQKESGTSVRGKGKLTKFGNRKLRAVLFMPAMVAYRIRAFPDFIKRLEEKKKPKKVIIAALMRKLAVIAYHVHKKGGDYDPSRYKSA

SEQ ID NO: 269609 - protein, 346 aa, unidentified
MVIIGCDFHSDFQQISLLDTETGEERELTLQHREQARAFYSALPPGAVVGVEACGQTQWFEALLAEQRHVLRMGDPTAIRASMPRRQKTDRRDAEHIRVLLMENRFPEIWVPSPAERDVRQLIVHRHKRVQMRTAVKNQLHALAINQGLRLRWRLWTEAGRKQLESLPLLPYAAQRRQELLRLLQEVDRDLAALDAAVACEAQARPEVVRLMTHPGVGPVTALAFVLTIGPVERFARARQVASYLGLIPAEHSSAGKQRLGHISKQGSPLLRLLLVEAAHVAARHEPELKRCYTRLRHQHAAGVAKVAIARKLAVRLYWMLRNQSNYRPFRVGHMQVSPSHSVVEA

SEQ ID NO: 269610 - protein, 324 aa, unidentified
MIDGILGIDVSKNTLDASLSSRNRVRARSVANSSDGWRDLLDWLTSEKIRRVHACMESTGRYSLGIACALYEAGHIVSIVNPAQIRDFARTKLGRNKTDGVDAAHIREYCELFKPKPWAPPSAAHRRLGELQTIRAGIVAGLTEWKNRKSSGMIDAVAQSLANVTISHFTSQLRAVDEAIAQTIDNDSGLRRKRDLLLSINGVGETLAGVVMAELPGPDELRSSAEVVAYAGLNPRQHQSGTSIDRATRISKIGNAVLRAALYMPAMSAMRYNPAIVALVGRLKSRGRLKPKQILVAAMRKLLVLCFGVLKTGKPFDPAIAMGC

SEQ ID NO: 269611 - protein, 466 aa, unidentified
MKSFYLGIDVSKGYADFVIINQKKQPVVENFQLDDTFESHSRLYAILQEFLAKHPKANLYAAMESTGGYENNWYSSLTQFQASLNIKTARLNPYAVVHNSKADLKRNNTDKISAQNVAEYLVAHPEKVIYQQHDQMASLRKQWGFVKMLTKQCTQLLNQLNSLLYTANPELLSFCQNGVPAWVLKLLLKYPSAEQVKKARAKTLSKIPYVSMQRAQQLIANAKRSVASATDAVTAQLVSATAEQILHLKKTIAAQTDLMADQCALPEVDLLKTFVGIGDASAIGLMLEIQSVARFKTVKKLASFWGVHPVYKISGDGSGSFKMSKQGRKEPRKILFNVALTAIEHNPVIKSVYEYHLKQGKEKMDAIGVCMHKILRIIYGMLKNNTAFDPKIDRANRQRMVSGEIVNIKIGKERRFEGYDPLAPVSRRQRKKRMEREQSHSVNDTKCRISAPAHIKEILADVLAKV

SEQ ID NO: 269612 - protein, 366 aa, unidentified
MVTAEKANVYSAWFSTLRNEEKEMEAKRFIGIDLHRDCFTACVRLENGREYLKKWKLEDMPKFADKLRPADQVAVEMTGNTRLFHDQVAPLVDRVVAVNPTQFKVITHSVKKTDPNDARLLALYLAKDLLPEVRMKNKAQAQIASLTQTRDTMVKLRTALKNKVNNICSAYGVNLNRESLASEKGLRAVGQMPFDPLVDLELKIIVGQIRSLNQSIAELEQTIGKESQKLEGHKNLTSIKGIGKLSGGILLSIIGDIGDFADEGKLAAYFGIVPRVSNSNETEHSGRITKRGTKLGRTTLIQCALIAQRYSPYLKTYYEKMKARRGAGKAIVALARKFLGIIYRTLKNKWVFEDFPNFVLAEEATA

SEQ ID NO: 269613 - protein, 344 aa, unidentified
MPRGITGGVDTHLDVHVAAALDDRGALLGVESFTTTTDGYKLLLGWLSDFGPVELVGVEGTGSYGAGLTRHLQAERVRVVEVDRPNRQRRRRKGKSDPQDAITAARAALSGDAAGEAKTRDGNVESMRVLRVARASARKGRTQALNQMRGLISTAPEPIRAELRGLNVFRLLERASTYRPGSKRDILSLTKFSLRMLARRALTLEEEISEIDAILEPLVNETAPRLVGALGVGPDTASTLLVTAGDNPERLRSEAAFAHLCGASPIEASSGKQQRHRLNRSGDRQANSALWHIVITRMVYDPRTTEYIDRRIAEGLTKKEAVRCLKRYVATEVFSLLPHGEPGA

SEQ ID NO: 269614 - protein, 380 aa, unidentified
MLLTANSAVGVDGPQRHRLCQNEVVADLRQRRPSVEQISRVGMDTSKRFFQLHGVNAAEEVVLRKKLRRKEMVEFFQALAPTVIGIEACGSSHHWARLLRSFGHEVKLIAPQLVKPYVKRGKNDGADAEALCEAMSRPTMRFVPIKTAEQQAALMLIGLRERLIGNCTQLSNAIRGYAAEFGFTAAKGMAHLDPLLERIQADESLPLAARELFAVQSKEYAQLRGQINEVEAKLKAWHKSDECSQRLIKIPGVGPIGAVLLKMKTPAPELFRSGRQFAAWLGLTPQDHSTAGKVRHGGITRAGDEALRAVLVAGATAVIQQAVRYGGRASLWLDALLKRKPPKLAAVALANKMARVAWKLMVTGDSYSTKSAPAALASRV

SEQ ID NO: 269615 - protein, 342 aa, unidentified
MYYIGLDVHKKTISYCVKDAAGQIHQEGKIGSTRRELDAWVKTLPQPRMIAMEATIFTGWIYDHLLPHAEKVKVAHPLMLRAIAAAKRKNDKIDASKIADCLRCDFLPECYMTSTEIRDRRRTLRYRGLLVKQMVQMKNRISGLLMETGVSYNKQRLHKVGYFAELMSGNEEIDCVRPLLKLSRETISRSQKLDYALISSLERDPLLAERLKRLRTVPGVGPITALTWVLEIGDVARFQSIKQAISYCGLCGAEKSSADKVMRTPISKQRNKHIQQVLVEAAKLAPRYSHELALIYEKEKQRGNRNRATLAVARKMVAWMVAVERRKQDFVPAEKLGGTVAA

SEQ ID NO: 269616 - protein, 416 aa, unidentified
MSRKGKRTKGIEEAHPFAGMSRVNANAAGVDIGATEIVACVEGDENMQIVKGFGNYTVDLQAIGKWLQEHNVKTVAMESTGVYWIPLFEELERQGFECLLISSRSLRRVPGRKSDIQDSQWIQTLHSYGLLESSFRPQGDLVALRTLLRHRGQLVDHRSPHVQHIQKALLQMNIQLSQAVSDITGQTGQAILRAIAAGERDPQKLAALRDRNCKNSEEEIAKALTGRWQEEYLFILEQSLELFDYYTRQIEGCDAEVERMYALTRPEWEGGELQPRSTRKRNSHSKNAPPNQEELRAHLKRISGVDLSAVDGFGVSVAQMVVMECGTDMSKFPTEKHFCSWLGLAPKHEISGTKVLKNRTLKTKNRAGQAFRMAAQAVKRSDCVFGSFYRRLRGRLDKSQATVATAHMIARVVYLC

SEQ ID NO: 269617 - protein, 402 aa, unidentified
MTNQRTVLVGVDTHANTHHAAVLDAGTGELLADRQFRADRAGYAALAEFALAHGEPVRFGVEGTNSYGAGLARHLRQNGFDVAEIIRPNRAARRLRGKSDPLDAVAAAREALAHDDLPAPKHANGPVESIRVLHLVRDSAVQARANVLRQIKAVLVTAPAAQREKLARHTGKALLEALRRVRPGEVLAGTEAATMIALRHLARRHHGLTEEIDEATDQLRALVQATSPALLVAKGIGIVTAAQLLVTAGDNPERIKNEAAFAALCGTSPLPASSGKTTRHRLNRGGDRQANAALHRIALTRMNSEPRTRAYIQKRTSEGKGTKEALRCLKRAIAREVYRLLTNPPTTLATEDLRPARLQRAITLQTVANHFGVQPARISEIERGKLHDTALTTAYRQWLIAV

SEQ ID NO: 269618 - protein, 324 aa, unidentified
MQVTTLGIDLAKNVVQVHGVDAKRHVVLRKRFSRAKVLPFLAQLPPYLIGIEASGGAHHGARELSKLGHTVKLMSPQFVRPYVKNQKNDANDAEGICEAVSRPHMRFVPMKSVDQQDMQALHCIRERQIKARTALVNQMRGLLAEYGIVIAQGVSKVRHALPALLEDADHALTWNGREWLSALAGVLRLLEQHITETEQKMQRVFERDEACQRLAQLEGIGPLTATALVAAVGTATTFQNGRQMAAWLGLVPRRHASGGKPTLLGISKRGDSYLRKLLIHGARAVIRQVDKKKDPCSRWLQGVRERRGTNRACVAQANKTARIA

SEQ ID NO: 269619 - protein, 421 aa, unidentified
MSYRVAAIDIHKKVLMVAVAITASEVDDPMGAAVTFECRKFGALASERHHLVSWLQSLQVQEVVMESTAQYWKPVWLDLEPHFAKLHLAQAQSNRAPKGRKNDFKDAKRLARRLLAGELMLSYVPEPEQRTWRLMTRGRLQLVRERVGIQNKVEGLLEEARIKLSSVISDLLGVSGRRILEALCAGQSDPVKLAALGDERLKCSKEQLADALSGSPEPAHRKLLRIHLERLKLLDRQIQELSEMAAAALKPHQEAVVRLAKVPGFGPESAQQMVAEVGVDMEAFDSPQAFSSWAGVCPGSQISAEQNQSSRCPKGNRYVRRILAEAAHAAVKKRGSHFQSLFRRFVPKLGYNGAIGVVRHRLAQLVWKILHQGVNYIEQGQETNPGAKQRRAQKLARALRQLGYAVTLAEINAEPLPAAGA

SEQ ID NO: 269620 - protein, 331 aa, unidentified
MLYTGIDYHRSFSYLTTMNEKGEIISQKKLPSNGEIIDFLKSLGESMEIAIEATPSWYWLYDNLEDEGFEVKLSHPLKTKAIAYAKVKTDKVDSATLAHLLRSNLLPLSYVAEMPVRLNRELLRYRASLVKIQTGVKNKIHTILAKNNVSHDYTDLFGKEGMTFLHSLTVAENYKIALEGYLTILDAVRKEIQLASKKVQQLAEEDHDAVLLMTVPGMGYYSALLAKSEIGNVKRFRSAKQLCAYAGLVPSTYASGNTCFHGHITKQGSRWLRWILIEAAIHAVKRPGVLRHFYFKVERKKGGQIAKVAAARKLLEWTYLDLYTGTEVKAR

SEQ ID NO: 269621 - protein, 343 aa, unidentified
MKVIRIGVDLAKNVFQVHGVDRFEKPVWRKKLSRAGWIDAVREVAESGCEIGMEACGGAHDWARRLQAMGYKVRLLAPQFVKPYVKSNKNDANDAEAICEAMSRPTMRYVAVKTIAQQDLQAVHRVRSELSSHRKAKANQIRGLVTEYGLVAPKELVHLRIAIPLWLEDAENGLTDQFRRLLNGLWQDLLALDARMNELDREVAQMAAADPVARRLQEMRGIGPLIATALVATIGDANNFKNGRQMAAAIGLTPRQNSSGGKERLLGISKRGDSYLRMLLIHGARSALRTAVNKDDRLSRWAIKLTERRHHNVASVALANKMTRVAWAMMRNETTYNANMAAV

SEQ ID NO: 269622 - protein, 331 aa, unidentified
MFPVGIDVSKNTLDLCMLYDGIKGRIKTRKIQNNRHSVENILRWLRLQHCGPEDVHVVMEATGVYHEQLATELHDAGFRVSLANPHRSREFARGMGIMTKTDKVDAYMLACYAFLKKPHRWEPPAPEIRYLGALLRRRDVLLGDALREENRLEKYLSTDTPADIISSCRRMAQLLREEVSNIERQIKAHIKASPALRRDYTLLTSIKSVGPQMGMHMLVVLRSHNFVSAEQAAAFLGLVPIEKRSGTSVRRRPRMSKIGPPQLRAKLYMSALCGKIYNKRMRNIYDEMCLRGKPKMVAIGALMRKLVHWCYGVLKTGTVFNDEDLKPVLST

SEQ ID NO: 269623 - protein, 405 aa, unidentified
MFVGIDWASTEHAVCVLDQTGKTVRAFGIPHSAAGFDDLVARLRRLGAPAGLPVAIERPDGRLVDRLLEAGHPVVPVRSNAIKAWREGEVVSGAKSDTGDAKVIAEYLRLRHHQLRTLTPFSDATRALRAVVRARGELVRQRVAAINQLTATLDAFWPGAKAVFPDVEREIALAFLERYPTPESAAGLGEQRMAAFLTRHRYCGRTPAAELLARLRAAPAGVAGGAEATARRDAVLAFVGVLRALNQAIRDLDRSVIARLGEHPDSKVFASLPRSGQVNAAQMLACWGDCRDAYDGPEAIAALAGIVPVTRQSGKHAAVSFRWACNKRFRNAMTTFAHNSRLASPWAAKLYADAIARGHDHPHATRILARAWVRVIWRCWIDQVPYDPVKHRAAQRLAEEAAAAA

SEQ ID NO: 269624 - protein, 353 aa, unidentified
MDKHTKPDFTGQTIYIGLDVHKSSWSVSIVSEHLSHKSFTQPPEVSKLVNYLHRNFPGATYQAVYEAGFSGFWLHDQLQHHGINCTVVNPADVPTNNKEKRRKSDKVDCRKLAKRLRSHELKAIYVPTQTQMEDRGLLRTRKSMVRKQTRCKNQIIAILFLYGITIPEMKRWSGRFIKELQQIRLQTAVGNMSLQMHLDELVHLRHAIASLNKAILSLSRTHQYRDNMRLLKTIPGISTITAMTLLTELIDIHRFKKFDHLCSFVGLVPDIMSSGDNENVLGLTTRQNKLLRSMLIQSAWVATRKDPAMMLAFNRLCQRMKKTKAIVRIARKLLSRVHFVLKSQQGYELSVAA

SEQ ID NO: 269625 - protein, 391 aa, unidentified
MQPILEPILECCCGVDVHKNMIEACIIKGIYEPIFIRKRFSTFQNELIDFAHWLYEHDCYHIAMESTGVYWRPIYEAIEEYSPYYENIIVTNAHHMRNLPGRKSDVKDAEWLATLMQRGLLKGSFIPERTIRDLREFSRIYKNAVNEKSRCLNRLEKFLQTHGFKLSSVLSDINSVSGIKILTTLSQKGSLTIEDIQNAVGNRTKKSSEEIQLAVCGKLNANGCFLLADFLDQLKWIEEHIEKILNKMIEIAEPYRDILERLDSIVGIDITAALLILAEIGGNVQQNFQTAGHLCAWAGLKPRNDESADKFKSKKVLPGNPYIKSILCQCAWVAAKNRKNPFGHWFWSHQGKLGKKKAIIAVSRKILALAYYLIVTNQLYDNEIAMRPYLN

SEQ ID NO: 269626 - protein, 470 aa, unidentified
MAAEKGKADGAGVPGHGGDGAEVAEERTQVVGYAAAIDVAKGFGMVCTRVPGSRPDRRRQKVWRVEATYGEVTALMDHLRCEGIQRLVLESTSDYWRIWYYLAEAAGLEVWLVNARDVKHLPGRGKSDTADCVWHCKLNERGMLRRSFVPPEAVRDLRALTRTRSRLAQDQARHQARVEKILEDALLKISVVISDLFGASGRRFLDALVAGERSPAALAALGDTRLKASRQQLEAALTGQFRDIHATEIAVHLRLIDAINAEITQLDEQIGQQLAVVPGTAPACSACGLIGGGHAPDCDDLGILLLGLADRLDEITGVGAVNARVLIAELGTSPSQFPTPGHAAGWARLTPRTWQSGETARPGRTGKGNPYLRGALGQSAMTAAKTDTRLGAMYRRIARKRGKQKAIVAVARVICEIAWILICDPSARYTELGPDYYRPRSPARQTRDKIREIERLNPGKKVILADADAA

SEQ ID NO: 269627 - protein, 410 aa, unidentified
MERVIERCCGLDVHKKTVAACIRVPGSHGERVQEVRTFGTTAAELLVLRDWLEAHGVTHVAMESTGVYWKPIFYVLEEAFICVLANAAQIAQVPGRKTDVKDCAWIAQLLEHGLIRGSFVPPAPIRDLRDLTRYRKGIIQERTRQANRLHKVLEDAGIKLASVASDVLGVSGRAMLQALVTGTRDPEVLADLARGNLRKKLPALRQALAGRFRPHHGFLVAQILAHLDYLDEAIDAVSQQLDVVMAPFADEVARLDTIHGVNKRTAEVIIAEIGVDMRVFPTAGHLASWAGLCPGNNESAGKHRSGKTRKGDPWLRAALVEAALAASTRSNRSAFGARYRRIMPHRGHKKDVVAVARAILETAYHLLARQTTYQEPGRDYYERRHAEHVRRRAIQALQRQGYRVTLEPAA

SEQ ID NO: 269628 - protein, 323 aa, unidentified
MAKRITICAGIDTGKRKLDVALDGSSEQLQVENTPEGHQTLLEWLTRHKVRRVGIEASGGYEQAVVAELRRKRLVVVMFQPAQVRAYGVFHLKRAKNDKIDAALIAVCTAAVKKIHPAPDPRLQPFAEHLTMIEQITEDIARLKNRLESCRNAQARKLWKEDIARLAKRERVELKALAVAIREHHDLAKRLDLINSIDGIGLKTAIIILVRMPEIGQITREQAAALSGLAPYDHDSGNHVGVRHIAGGRERLRRALFNAALPASFRWNLQLIAFYKKLTGAGKEHKRARIACARKLLIFANTIVARGTPWQKQLPEVASRPAT

SEQ ID NO: 269629 - protein, 332 aa, unidentified
MSVYVGIDVHRKRSQVAVINEGGEVLANRNVPNGAKPILSVIGGLPAGTPAAYEAAFGWGWLLELLEGYGFEPHMVHPLQCKAIASARLKNDKVDAATLAQLLRADLLPEAWIAPPAVRQLRAMLRHRAQLVRLRTLLRNRVHAVLADHGHGRPAGCWSGPGRAWLASLELPAVSREVIDDALALMDALQQPIDRLDQEVRQRAKADPRVKVLTQLPGVGPFTALVLLAEIGDITRFGSARKLASWAGLTPTVRGSDRTVHHGHISKQGPAWARWVLCEAAQTAKRHPDFAPGYEALARRRGRKIATTAVARKLITRAYHLLTDASAVGEPG

SEQ ID NO: 269630 - protein, 392 aa, unidentified
MILVGIDVSKDKHDCFIVNSDGEILFDSFTILNNMEGFDDLFEKIKSCSKDFSKIKVGLEATGHYSYNLLGYLLNKGLPTFVINPLHTNLFRKSLSLRQTKTDKIDSHTIATMLMSNVNLKSYSIELYHNEELKSLSRYRFDKVKERAKLKVSVSRLVTILFPELEKIVSTIHLSSIYELLYQFPGAIQVANANLTKLSNLLANNSHGRLDKSKAIEIKHLAKNSIGSNMPAKSLELKHTIKLIRELDSEISEIESEIEKIMDEIDSPILSIPGIGTSMAAMIISEIGSFDNFDSPDKILAFAGLAPTTYQSGKLESSHSKMEKRDSRYLRYALFNATKFVCNWDPTFAIYLSKKRAEGKHYNIAISHAAKKLVRVMFALEKNKTVYDKAAA

SEQ ID NO: 269631 - protein, 412 aa, unidentified
MVELNKVCGVDVHTRFLAVTILCRSGERVFREFGTDVTSLLEFKDWVLKEGCERVAFESTGVYWTPVYNVLEGFVEVYLANAYHIKHIKGKKTDQSDSDWIAQLCLGDLIEPSRVFPVWERGLRDLTRLRASLVEDKTRCKNRVHKALQSCNIQVGRLLSDVFGISGRILLAGILEGSGLDEIVKRLPKKLRDKQEVLEEILGNNLDPANMTIMRENLDMIRLIEDKIQRVEAEIMGLSECKKEEMRILMSVPGVSRIGAFTILGELGDYTDFEDGDRLASWSGLTPSVYQSADKLRTGHITKQGNRRLRWIMTEVAQAAARTKNTRLSKVFHRLKAKKGYKIAVIALARKMLCIIHHLLKNRELYQEEDYQKKTRPLKTQQSQTPMTQEEMIKTLKEANYIIYKKPSRGCT

SEQ ID NO: 269632 - protein, 389 aa, unidentified
MKIFVGIDIAKLNHFAAAISSDGEILIEPFKFTNDADGFQLLVSKLESFDKNSIIIGLESTAHYGDNLVRYLVAEFYQVCVLNPIKTCQMRKNNVRKTKTDKVDTFVIAKTLMMQDDLRFITFFDLDMMDLKALGRFRQKTIKQRTRLKIQLTTYVDQVFPEIQYFFKSGLHQNAVYALLKEAPSPKEIASMHMTHLANLLKVNSHGHFTKEQAKELRILAQKSVGVNDSSLSIQITHTIEQIELLDSQLFHTELEMANLVTCLHSVIMTIPGIGFINGGMILGEIGDIHHFSEPKKLLAFAGLDPSVHQSGNFQAQRTRMSKRGSRVLRYALINAAHNVVKNNATFKAYYDAKRAEGRTHYNALGHCAGKLVRVIWKMLTDEVEFNLE

SEQ ID NO: 269633 - protein, 491 aa, unidentified
MKAAGTKKQEKAEKPAKKAAKEGLGSAKQQHLPARNRRKQRRELARKIQTQDVSLEVKHPDAAGIDIGNTAHYVAVPPARDSEPVRRFGCVTAELKEMARWLKQCGIRTVAMQSTGVYWLPVYDVLEEEGLEVYLVNARETKNLPGKKTDVLESQWLMQLHTYGLLRNSFRPAQEIRELRNYWRQRNDWIRSAVRHMQRIQKTLTQMNVQLANVISDLSGVTGQAILQAILGGERDGQKLAALRDGRIKASEEEIARSLEGNWREDLLFVLKQEQEGYEFCQKQIRACDLRLHEYLTRRPDRSAGADLPEETRKSRRKKKRGNAPQIPMREGMFRMTGVDLTRIDGIDVMTAATVVSEVGWDMSKWPTESHFVSWLRLCPDNRISGDRVIGKGRLATNNRLTVALKMAASGLKESDTYLGAQFRRLRMRLGAPVAIKAMAAKLARLIYRMMRYGMEYVDRGAEFYEKEHRQRQIQSVKRKAASLGLKIIAA

SEQ ID NO: 269634 - protein, 339 aa, unidentified
MSKPIQSPKSMVYCGIDVSAATLAVAVQQQDQRFEERVFDNTAGGHKTLIRWLHKRKARVRVSLEATGIYSLDLALALDKAEGIEVAVLNPKLIHRFAQTLRRSKTDSADAQVLAEYSARMPFTPWSAPGLNGLQLRSISRHIQSLVVEYARQNNRLHAAEKSALTPRCVVQDLKRSMASLQLRLARLRSAAIELVRRDKAMQESFELLIGMPGIAAISALQLLGELAPLSPEMSARQWVAHSGLDPSHRESGTSVHKPSRISRAGNRHLRRALHMPALVAVRHDPHLKAFYESLLGRHKAKMQALIAVERKLLHAIYGIFKSRMPYDGNKLFPQMQIA

SEQ ID NO: 269635 - protein, 335 aa, unidentified
MKYIGLDVHKINTAACVVNAGGKEVKSFSVRTQGGLQEIIDHMGEEDYMVLMEASSYSIPVYRFFQDRGVPVHAAHARYLKMITQSDKKTDKYDASALARYLRFWHRGEMPLSMSYIPSREEMALKDLCRLREELADGIGTEVRRIRAHMARNEQDLPYTFHDLKTQKSRAHISERFSEDAVLMRRIAKLSELLGHAKELDRELDAIARGNEDVQLLMSIPGVGARSAVQIMSMIIDIDRFPDSERLCSYFGLVPRVRSTGGKEIHGRLTKAGDPMMRRILDRVTYVHITHCDSSLTAFYERKASESKKKALTSASRKMLCLMHAVLKRRTPFTA

SEQ ID NO: 269636 - protein, 410 aa, unidentified
MDVLHTHCAGLDIHKDTVVACSRRVTAGKVIREVRTFKTTTSELLALSDWLGSLGATHIAMEATGVYWKPVWNILSDGDFELILANAAHVKNVPGRKTDVNDATWLADLLAHGLIRASFVPDTQTQEQRGLLRTRKQLTRERTSHIQRLQKTLEEANIKLDSVISDLIGASGRAMIEALIAGESDPLRLASLASSRIKASPAMLGEALRGRVTRHHRFLLRLHLQQIDALDRAIAEIDKEVEANLAPFRELIPVLTSIPGIGELAARVLLAEIGTDMSRFPTSGHLISWAGLCPRNDQSAGKRRSTRMRKGAPWLKTVLIQCAWAGARKKGSYLEAQFHRLRARRGAKKAVGAVAASILTAAYHMIAEGTFYQDLGADHFQRRAKPSQIKRLVAKIQSLGYNVEIKPLAA

SEQ ID NO: 269637 - protein, 339 aa, unidentified
MKNYCGIDLHSNNNVLVVINETDKILLERKLRNRLGAVLDALSIIQEPIDGIAVESTYNWYWLVDGLQEAGYQVHLVNTTAVKQYDGLKYSDDKYDAFHLAHLMRLGILPTGYIYPKEERAVRDLLRKRLQLVHQRTTHVLSIQNQLTRNTGRQFKCNDIKKLTSSIVKDRIKDENIQEAIFSNMSILAVLSSRIKILEKKVLKQVELKPEFQKLLKIQGIGMILALTIMLETGDILRFAKVGNYSSYCRCVNSKRMSNNKQKGSGNRKSGNKYLSWAFMEAANFAIRYNKKAKQFYQKKAAKTQRVVALKALSHKLARACYYVIKNNEDFDNERLFSS

SEQ ID NO: 269638 - protein, 352 aa, unidentified
MKKRNTIGMDMGDRSHSICTLDPQGEVVSRDTVSNTAVALRKCFKNQKPALFAIEAGTHSAWVSRLLEELGHEVLVGNPRKLRAIWSSNEKSDVRDAEMLARIARVDPNLLYPIQHRSRESHFDLLNIKARDLLVKTRKMQISHVRCVAKGFGERISKCSTKCFHRRSNEELSPELLEVLSPVLESIEELSLKITEYDKRIKHLSEEKYPETAGLRAVAGVGPITALAYILTLEDPKRFKKSRDVGPFLGLVPRRDQSGDMDKQLSITKAGDVALRRLLVGCAQYILGAFGPECELREFGLKLADRGGKNAKRRAVVAVARKLAVLLHRLWIDEAIYDPCHQQTRKELTQAA

SEQ ID NO: 269639 - protein, 480 aa, unidentified
MSVKCNVPSGKNQAAKYTKSLEVVNPRCAGLDIHKEKIWACTSPFRDGVVPEVSTFGTDTGSLEKLAAHLQERGITTVAMESTGVYWLPAFLMLRQANLNPILVNPCDIKNIKGRPKSDRADCVWICRLHSYGFLRASFVPPDTVLDLRSFYYAHEKLTVESAKIIQRMNDELVKMNIRVDLVLTDLTGASGVRLVEAILQGEHSPENLYQLLDKQIVKKGRDAILPHLHGNYRAGNISILRSWYRLYLAIRGEISCINEQIYGILQSLPKKADARDIPRAKKNYREDKLDFPYKLRPVFFEIYGVDLTQLPGIGAGTLLALVCMVGTDLSPWPSAKHFVSWLGLAPINKESAGYCKSSSTRRINNLLGNAFKMAAMAARRTTTYIGRTARQLASRILPKKAKVAMARKLAELVYHILQDGMELKVKTEEEYEQRRKQRDIRFFVKGLCKYIVNGKLLPEVEEAYHEYRRGTKVAPLANA

SEQ ID NO: 269640 - protein, 342 aa, unidentified
MDHYAGIDVSLECSSVCVVDASGKIARESKVASEPEALIAYFGSLRLSVVRIGLEAGPLSQWLYAAMKEAGLAVELLETRHVRTALETMPVKSDRNDARGIAQLIRLGWFRPVHCKSIGAQETRAVLTARKLVQSKLLDVENSVRGILRGFGLKVGHTTNRSFAGRVEDLVVNHASLHLIAAALLSVHAVLLRELKAFDKRVRSMARVDVKAKLLMSAPAVGPIVALTYASAIDDPGRFTSSRRVGAHFGLTPKKYQSGETDYTGRISKIGDATVRTALYEAAHIMLIKPIKGCAPLKSWAMRIARRAGMKKAKVALARKLAVILHRMLANATPFNAAMAAA

SEQ ID NO: 269641 - protein, 345 aa, unidentified
MELHTIGIDLGKTVFHLVGLNQRGEVVVRKKFSRKQLLHFTANLQVKLIGMEACGGSHFLGRALREQGHEVRLMPAQYVKPYVKTNKSDYIDAEAIAEAVERPKMRFVPIKSDDQLDLQSLHRVRERWVMRRTAVINQIRGLLLERGITLRQGRRHIDAALPGILEDASVQLSGALRGLLAQLRLELDHLQMRIDEADAVIQKIAGENEACRRLVAIPGIGPVTATAIIAAIGNGAAFKKGRGFSAWLGIVPGEYTTGGKQKLLGISKRGNSYLRRLFVQGARAVLQQSAKQSSGLSAWLAQLTTRTHSNVAAVALANKLARMAWAVLAKNEPYRPPMLADAATA

SEQ ID NO: 269642 - protein, 429 aa, unidentified
MSLPAEVRPSPKERESLQKQQLHYAYVGVDLHKSQHTAVILNYWNEKLGEIQFDNTPAAFPKVLAKVQSCLEPDMKAVYGLEDTGGYGWAFGLYLIQSNQWVKSVNPAFASEKRKGFPTVHKSDSWDAECVARVMRDDLNRLPDFKPDEHYWVMRQLSTRRSGIVKSLSAVIRQLHVQLSYTYPSYRRYFSEIDGKTALAFWRTFPSPRHLEKVTAERLAEFLRKHSNNACSTKKAEQILRCIEADGQASVHYVEEKELVIRSLVKQIRYYLKEITEFDAKLRDMLEQIGCQLHTITGVDVVTSAELVAEIGDVSRFANADKLARYAGIAPIFAGSGGKGKYYKSKQGDRSLHSIFMSLAIRQLAVHRGTKTPRNPLFHEYFHRKLSEGKTKRQAFICVMRRLVNIVYGILKSKTAYRLPEPLRRAENE

SEQ ID NO: 269643 - protein, 405 aa, unidentified
MYCVGVDWADDHHDIYIIDNSAKKISSFRVDHSPLGITELLTNLSELSPDKKDIVIAIEKPNGILVNDLLMAGYQVYSINPKAVARYRDRYKVSGAKSDDFDAMVLANILRTDRDRFRPLCFSSELMRELGILVKDQKELIETKTQISNMITSCLKEYYPLPLKLFSKLDQDLTIAFLEKYPTPQKADQLSKSNLDTFLKKQHYNRPSKLDELYATIQTENFLVDEITARAKSRLMNALLIQLQEIRKQLKLYEQEITRLFEEHPDHDIFNSLPGVGPKIGPRLMSCLGEDRNQYDNFSAVQCEAGTAPITRSSGNYRCVSIRRACQKFFRNSLYDFAFTSLTNSEWAREYYDEQRARGKTHPMALRALSNKWVKIIYTMWVKRTLYNESLHQLNRLKSHKLVAA

SEQ ID NO: 269644 - protein, 402 aa, unidentified
MSRCGSVYGRMHEALASSSRIARRAIKRLKGDGTMAKQTRKVFVLGGKSGSKGKTLKLLKGERVFVGLDVHKSTFTVALWSDKRDLVGGWSQPASYDTLISKLSVIAPQIARVVYEAGPTGYGLVRRLREAKLPADVIAPSKVPEAPGRNQKCDRLDAKKLAEYACKDLLKSVCVPTVEEEADRQVLRTREAVHKKLKRAKQQIKSFLLTHGLSEPDGLGTWAKRGVDALHEMELSCELRFSLDSLLRDLEHQCEELKRVNDKIEELAEQERHREDVRILRSMKGVVGVTTAMAFKTELYQASRFNTPDEVVAMVGFVPGVRQSGKTRREGGILKTGNSHLRAVLVEAAWRWIRHDESAKERFRRLCANTGDGKKAIVGVARHLLVVLWRMLTRKEEYRAAA

SEQ ID NO: 269645 - protein, 435 aa, unidentified
MSTLGIDLAVRAAHVATLTNDRGEVIWSRRRFQSHPPDLVALSEAAGPASELTVVIEPTRNAWVVVAAHFRATGARVVMVAPEKSADLRKYYKKHTKNDRLDSFVLSRVPLLHPEGLIEVNGLGPADPLRRAVRRRVRMVGERHGCHQRIDAMLDLLGPAYNEALGTRDTKTFAVILERHGSPISLRRLGLSRLTDLVRRTSGGHFGVEYATGLLDAANEAIELWKGGGLDFDELAWDLAQEIRIIGQLDVEIGRLDARIAELYGAVDPKGIVRSAPGVGPVLSAGIVGRLGDVNRFANLAGIRSFTGIVPGVNQSGLAETRPGITKQGDPGLRRDLFFAADLARHHDPQLAAKYHRLIVERRLHHYAAVCHVATTLITRIAACMRSGQHYVVRDIDGTPVTPVEARAIIADRYVIPPEARRRARVPDVKSEPTR

SEQ ID NO: 269646 - protein, 343 aa, unidentified
MDYFAGLDVSVKETSVCIVDDAGKIVREARVASEPEALLQLLTNTIYRFKRVGLEAGPLSQWLYSVLAEAGLPVICVETRHMRAVLKAQINKTDRNDARGMAQMMRAGLYRPVHVKTLRSQKLRMLLTHRKLLQSKAIAIENELRASLRNFGLKVGMVGTMKFEARIRELVERLPDLSVLVEPLLIVRRIIREQLGILHRRLLAIVRDDEVCRRLTTIPGVGPVVALTFRVTVDVPARFRKSKAVGAVFGLTPAKYQSGENDRTGAISRCGDEMMRIMLYEAAQSMLVRTAKWSWLKAWAMKIARHRGMKKAIVALARRLAVIMHRMWVDGTEFRWTRELPAA

SEQ ID NO: 269647 - protein, 427 aa, unidentified
MSAAGSLSAVSCRAVSSSAVSSSAVSSSAVSSSAVSSSAVSSSAVSSSAVLGSGVDLGLVVDVVVGVDTHADTHTAAFCDGRGAVLQVATVGTDVDGMSALLEVLEGVVAAVDCPRVVFAVEGSGSYGAGLAELVRRWGFTVIEVRKAGRPAGVAKNDANDAVQIARAALRQLSSPDLAERIAVPREGHIRAGLRALCVARDKHVAHKTAHRNQFRAVILTGPTPVRQRLRGLTERERLAAVARMRPRPVLPQPGKDLAAAAEAAQAYAVAQTYAVLAAVAATITHLDETIKKFDLAIDAVTARYAAPLRDQVGVGPITAADLLIGFSHDRFRNEAAFAALAGVAPLEASSGRTTRHRLNRGGDRHLNAALHRIVLTRRCRGHQPTLAYIARRAEHDRMNDKEINRCLKRAVARNMYRILHTLPELP

SEQ ID NO: 269648 - protein, 366 aa, unidentified
MTPRQRSTHSTSTGPPAWGEVVLGVDTHGEVHVAAVLCPLGQILGTKSFPATAVGYRRLLAWARKLGTVRRAGVEGTGTFGAGLSRYLLAQHVQVFEVNRPDRSARRLLGKSDPLDAQAAARAVLSGRARARAKTGDGPVQSARMFKIAKDSAVKARTQAINQLKAVLVIADPALRERLSDLGNRELFRTCACLSLPDGEGDEDAVAQATRITLRLLAERIEQLTGQIDELNQRLTGLVERHAPKLLAPIGIGPDSAVTLLITMGDNPERLSTEASFAALCGVSPIEYSSGRQSSRRLNHGGDRQANAALHRIVFTRLRHDPRTQAYYERRTQEGKTRREIIRCLKRYAAREAFNLVRTVSTDPPL

SEQ ID NO: 269649 - protein, 339 aa, unidentified
MKLYVGDDLHGNNNFLAMVDRKGKRMEQKKLPNDLSVILEYLKPHQKEIVGIVVESTFNWYWLVDGLMDAGYKVHLANPSAIQQYSGLKHVDDKHDAFWLAQMLRLEILPEGYIYPKEERPIRDLLRKRRHLVKLRTSLIISLQNIISRNCGVQFQANEMKRLKEDRVSPLLEGNEDLALAGKTSKETIDHLTRQIHKIEGAIVHRVELKESYRYLLTLPGVGKILALTIMLETGPIARFAQVGDYASYCRKVPSRWTSNEKTKGRGNKKNGNKYLAWAFSEAAEFARRYDAQARAYYTRKMRKTNFMVAHSALAHKLARAAYYLMKDQVPFMPEKLFS

SEQ ID NO: 269650 - protein, 445 aa, unidentified
MEVINPNAAGIDVGSRSHFAAIGQDKDDVREFGVYNEDLYVIAQWLLENGVKTVAMESTGTYWQSLFAVLQNAGLQVILCNGKFTKNIKGRKSDVQDCQWIQKLHTLGLLSGSFLPDEATEQLRTYCRHRANLLDQAADTTRKMQKYLRLLNLRLDVVVKDITGLTGLAIIEAICKGEVNAEVLASLRHGNCKKSEEEIAKALQTNGRKDYLFALTHEYNMYQNLQSAIKDCDIEIEKMLNEHISNNDDKRQHYIDKKAHKKVNKNSPKNIDINLMSYQYFEGVDLLAIEGVSHSTVLSVMSEVGLEGLKKFATAKQFASWLRLAPNNKISGGKVLSNKVPKGSNRLKIALRNAANALGNLKDTPLSNFFNRINFRKGRVSAISATARKLAVIIWNMVVKRQPYNNEHGYEFLDQKRKRKVQEMKKLIHKFDITADEVGLNINML

SEQ ID NO: 269651 - protein, 464 aa, unidentified
MKKKQNKPSPHGSEKEIEGFPVLRPNVAGIDLGSTTHWVCAPRPDGSGREVETFGATTPDLERLAEWLKQRHVESVAMESTGVYWIAPHEVFEQHGFEVLLVQTRELANVPGRKKSDRIDCRWIQRLHSCGLLHGSFRPAEEICMLRTLVRDKGTLIAERADWIRRMQKSLDQMNVRVHRAVTDIDGATGMAIIRAIVKGERDPARLAQLRDPRCKNSVEEITKQLSGHWREDHLFSLEQGLKMFDAISERIQVYEQEIFRKLSELERTECHGQTAPPLQNQNKANLVRKHGEEPMRQSLFRMNGVDLTAIDGIGVETVQVVVSEYGPDLSRFPTEKHFVSHALLAPRTAVTGGKPVKTRKKRGSASTRVSVALRMAALCLSHSQTALGAYYRQVARRSGGDVAVFATARKLATWIYRLLRWGHAYVDEGAAAYELRYQKAHLARLGTIAAQLGFELTPKANPV

SEQ ID NO: 269652 - protein, 310 aa, unidentified
MSMLTKSLMLGVDVAKEWLDLFDGAAHQRIDNTDAAIRAYFDRQASRMQIAIEPTNRYHIRFMQHALAAGHRVYLVDAYKLSRYRDAIGVRAKTDIADAQLLLRYLQAEGAHLQPCQPAPQAVQRLNDLLRARGKLARERASIRQSLGWIATLKETLETLLANLDQAMRDIDKQLEVYLEKAGYQSDYRRCQRIPGVGPVVSTALVSTYHRGPFRKADAFIAYLGMDVRVRESGKYTGQRKLTKKGNAEIRRLLFNGAMAGARTAYWRDYYDRLRERGLSSTAAYVAVGRKIARIAFALMRDQSDFVPER

SEQ ID NO: 269653 - protein, 312 aa, unidentified
MAQEICGVDVSSKVLDARVGRAGPSAQFARTAEGIAALAAFCQEHGGALVAMEATGGYEKLVHGLLWAQGVPAAIVNPRAVRRFGEAMGFLEKTDRIDAGLIAWYAEVKRIAAQPPAGETQERLAAVVTRLRQLTEMRTAQSNQCRLLSDPVVLASFDEILAVLRRQIRQFERVIAELIDGDPLWAALDAAFRSIKGVADRTVARLMAELPEIGTLSGKQASKLVGVAPLARDSGNIKGKRKVRGGRSGVRSILFVVAECVRRHEPDFAAFHKRLSAAGKPKKLIRTALAHKLLVRLNAKARDVRKKMLCPA

SEQ ID NO: 269654 - protein, 332 aa, unidentified
MYEHYIAVDWAQSNMAVARLTRHAKKAVVKDVPSSLDDLKAYLVSLKGRKILTFEETTTAHWLYVELRGLVDDILICDPYRNKLLSEGPKTDKIDACKLVELLRANMLKPVYHSCDELISLRKLVSAYDDLIKRGVRLKNQRSAVLRGVGQSKGETLAADKGVEGFVMANLERAISAYEAEKILYEEEFDRQLKKSLMLRWLKQIPGIGVIGAVKLGAAVVNGERFPDSQHFHSYAGLVRHDRISGGRSYGTKQPRYRRDVKAVFKTAALNATMHDNCFTEYYRYLTGKCRYPDYQARHAVARKIATAVYGVMKNKKKFNPEVLGATKTRGT

SEQ ID NO: 269655 - protein, 422 aa, unidentified
MSYCPVAGIDVSKQFSDMCILSPDNKIFAQEKIYHDETSINRANALLQKAERLFFSKPVIVMESTSHYHLILFQFFSEHGYDVIVVNPLQSNSMKDFSIRKRKTDRVDAFKLAMMYRTKTLRPSQIPQTATRALRQLCRHRAELLNDVSSYKNRLTALLDQTFPGYDKVFSDVGGVTSCAVLVRFPTPTILLMEEESELVEVIAAASKSSYSFAKKKAGLLISAAQKAQTLGIHSCADETLIVCTIQMLRTLSESVLQIETAIDDLLAQIKEMRNNVSLLQSIPGIGSHSAALLLGEIGDISLFKKPKQLAAYFGLDPTERQSGSFRGTKNKLSKRGSPHARAALHMGVVNSICKRGKDSAANPVLLSYYEKKCKNKPAKVAQAASMHKLVFIVFAVLRDQKPFELKTPEQHAVEQGFVKAA

SEQ ID NO: 269656 - protein, 325 aa, unidentified
MSHSILGIDIAKATYQVTLLHDGQRFRGEFANRAKEFGRLATWLKKHGASQVQACLEATGRYGDELAHYLHDAGHVVSVVNPLRIKSYARSRLIRNKTDPLDADVIADFCQTCQPPAWVPTPPEMRELQEFFCQYDALQDAITQTKNRLQSGFQSPLVLKQLQAQLDLLTQQLEMLKQSIRDHIDRSPGLKQQRELLDSIPAIGEITAARLLSYDLLRFKDARAVSAFAGVTPMQSRSGTSVHRKTKLSKFGDPDLRRALYLPAVAAMRWNPVIRNLAERLAARGKCKMSIIGAGMHKLLCLAYGVLKSGLPFDPTYSLTAQVAT

SEQ ID NO: 269657 - protein, 321 aa, unidentified
MNYVGIDVSKATFVVAYSSAKGSETKTFENTTNGVHKFIQTITPEDTHCVMEATGNYSMLLVYLLSKAGITVSMENPLKIKNFARVMLSVVKTDEIDARMIAMYGEKMNPAPFKLRSESLMVLKQKRTVLRQLKKQLTANTNLQESMEVLPFIDSVCKKILDKTVKFLRKQIQEMEEELSSLANIEYKKQMDLLTSIKGIGVTLATALIVATGGFTYFDNAKQLTRYLGLSPTYQQSGTSVNLKGHINRNGDSYLRSQLYVAAFSSLRCNTECKACFDRLRANGKPGKVAVVAVANKLVRQAFAVVTQGKEYVDGFISAKK

SEQ ID NO: 269658 - protein, 374 aa, unidentified
MNNIIRIGIDTSKSVFQLHGVDEAEKPVLRKKLHRRQLLEFLARLEPIKIGLEACGGAHHWAREIKKLGHEPLLLPPQYVKPYVQRNKNDDRDADAVCEAMSRPRMRFVPVKTVEQQAALMLVGTRDRLIRQRTQLTNAIRGYAAEFGLTAAKGLAKIEPLLARIAADETIPALAKELFVVHGKEYAQLKVQIAEIEAKLIAWHRDNELSQRLVEVPGIGPIAASLLAMKVPDPGAFRCARDFAAWLGLTPKDHSTAGKFRPGGITRAGDEALRSVLIVGATAVVQQIRKGRGHASPWLAQLVKRKPPKVAAVALANKTARITWKLMLSGEHYDRANQEPTTSREERALRYRGSAARSSLAPPIASLSVSQARG

SEQ ID NO: 269659 - protein, 405 aa, unidentified
MDSIVERGAGLDVHKHSVVACIMGTGIKKQIRTYSSMTNDLLRLRAWLQENEVTHVAMESTGVYWKPVFNLLEDAFEVILVNARHVKHVPGRKTDVLDSEWLCKLLRSGLVRGSFIPPKPVRELRDLTRYKRKLIQTITAEKQRVEKILEDANIKLSSIASDTFGASGKKIIGELLKGELRPDQMAELSKGKLRNRKEELKEALVGNMEEHHRRMIRTSLEHITAMEEILATVEQKIAEKIDLHFKEEFELLKTIPPVKDSASVIIAEMGVNMDLFPTEAHLASWAGMSPGNNESAGKRKSGATTHGNIHLKTILTEFAWIASKMKGTYLWSKYQSLVGRKGKKKTLVAVGHKILISAYHILKYRVPYKELGANYLDERKRDRIARSYIKRLSNLGYAVTLKEVA

SEQ ID NO: 269660 - protein, 331 aa, unidentified
MINKAAPFAGIDVGAKELLLVVRKNATSMKAQKFANTPAERARLVAKLVKLPGVSVCLEATGAYHLELAVALHDAGVRLNVVNPKAAHNFAKALMKHSKTDAIDADTLAQYAERMPFTVWVRPSPQAFTVRSFARRINALTRQKAMTKNHLHALSFGPDLPKAVLADAKLAIAQLEKRLAGLSREAQAFIGKHEELKRIFTLLLGIKGIAQTSAIALMGELLLLPKALTHKQWVKYAGLDPRAFDSGKSVHKAPRLSKAGNRHIRQALYMPALCAKQHDPYVKAFFQHLIEKGKKPLQALCAVMRKLLHAIHGMLRDNQPFDNTRFYATAA

SEQ ID NO: 269661 - protein, 369 aa, unidentified
MGDRITYVGLDVHKEGIVVAVAEGGVRGEVREYGRIANTAAALDRLVRKLGGTGVRLRFCYEAGPCGYGIQRHLSARGHDCVVVAPSLIPKRAGDRVKTDRRDAVGLARLHRAGELTAVWVPDVGHEAMRDLVRARLDAVHALRRARQQLSGFLLRQGCHYGRPAWTKLHRRWLAGLKFEQEVHHIVLEDYIATVEAAKARRDRLTAQIEAMLPDWTLAPVVAALQTMRGMALVNAATLIAELGDLSRFANPRQLMAYLGLVPSEHSSGASVRRGGLTKAGNSAARRLLIEAAWCYCFPARVSRELLLRQEEQPKPIREIAWKAQLRLCTRYRKLARSGKPANVVTAAIARELAGFIWAIARRVPPAAG

SEQ ID NO: 269662 - protein, 398 aa, unidentified
MSNYIIVGCDMSDRSMVLQLAHQENSPRKKAFSNDDSGRFRMIHYLHDQAGKAGGADIVFAYEAGPHGFGLHDVLTEHAITCHVLAPSKMPSSPKKRGNKTDEKDALDIFEALRGHLLAGNRLPSVWIPDPRTRQDREIVRARLDVGDKARRVRTQIRMLLKRAEVRKPKTLATNWTAKHLAWLRGLTGSASPLGDGSRLMLASLLRQLAWLDEETATLDAGVAALAHEERYRSKAAALQEEIGVGLVTTMVFLTEMGDLSRFSNRRQIAAYLGLAPRSDETGRRSDCKGHITRQGSARIRWALCQAAWVRVRNHPGEKAFYDQIVTRNPKKKKIALVACMRRLGIQLWHDGMETERSARTAPPSRPPRGGKRQFALPAPRRRHRRRSPEVEERRRAV

SEQ ID NO: 269663 - protein, 347 aa, unidentified
MRSINNLFMQVYGIDLSKEKFDVNFFDTDGKEKNKTVKNGLTAISKFLSKVPEGSVLCAENTGSYGDMLVFLCNQYSVKIALVPGYTVKHSLGLIKGKSDPIDAARLREYGERFFDKLTFKKYQSESVSELRQLYSLRSQLVKSRKKLRTGEHARENMPMQSISVNRVLQAALNALDEQIKAVEKEMALIIKSDAQLSENYELAVSVMGVGPVIATDLIIKTGNFKTIDTARKAASYAGVCPFPNASGNMVGKSRTSPFADKELKALLYMGAKSAVKHNKEYNLYYQKKQQEGKPHYLIMNNAMNKLLRTIYSVVSNKTPYRRDYICLDPREREINKNDNGSKKIVA

SEQ ID NO: 269664 - protein, 420 aa, unidentified
MHGERRWFVGIDWASQEHVVSLCDGQGKKIGQRNFAHGGTGLSDMIAWLLRASGGEPSEIHVAIETPHGPIVEALLERGFNVYSINPKQLDRFRDRFTVAGAKDDSLDAYVLADSLRTDMHLFRKLTIAEPLIVELREWSRIDEELKVERVRLANRLRDQLWRYYPQMLELGDLDEDWMLDLWEAAPTPEKAARASKAAIERVLKKHRIRRFDAAQVLSALRRPALSVAQGTIEAAIAHIKVTIERLRLVNRQLADAELQLDRLCKKLAEPVANDGENVPGQRQEHRDATILDSLPGVGRTVLVTMLAEAPHALQRRDYHALRNLCGSAPVTRRSGKSCLVTRRRACNRRLSNATLYWAQTATQCDPTSKAKYQALRARGHSHARALRSVVDRLLYVACAILEKGTLFDPSFAEQKDAAA

SEQ ID NO: 269665 - protein, 342 aa, unidentified
MESTTIAVDLAKSVFEVAVANGRGQIVERKRFGRASFRRCLETRPASRVVMEACATAHYWGRVAQEHGHRVTLLPPNYVRPYVRRNKTDQADAEALVDASRSERIPAVPVKRAEQQALIALHRMREQWMTTRTARINAMRGLLREHGLNLPCGAQTAVLAVPALLDSSTELPVALRRVLASVREEIRALEDRIAEVDRELGNLAAADPVCQQLQTIPGIGQLAATALVGTVGHIHAFRRGREFASWLGLTPREYSSGGRRRLGHISKRGDRYLRLLLTHGGRAVVLAAARGQRAGRPLPRLHEWALEVRARSHFNKAIVAVANKLARIVWAVWTRDVAFVAA

SEQ ID NO: 269666 - protein, 385 aa, unidentified
MQKAITYVGLDVHKDSIVVSLAEAGLRGRLREVREYGKVLNTPAALKAMATKLAAGGNELRFCYEAGPCGYGVQRQLSAMGHHCAVVAPSLVPRKPGERIKTDRRDAAKLAKLHRAGELTAVWVPDPAHEAMRDLVRARLAAVRNVREARQQLSGFLLRNGYHYHRHPWTLLHRRWMADLKFDQPLHYIVLQDCIAAVEASEQRRDRLEARIIAALPEWSLAPLVESLQALRGIALVSAATLVAELGDIARFGNPRQLMAYLGLVPSEHSSGRSRRQGGITKAGNATARRMLIEAAWSYRFPARISRYQLLQQERLPKLIRDIAWKAQERLCRRHRKLMRAGKPKTVVCAAIARELAGFVWAIATEMRPAGKKGTGKLATVVAES

SEQ ID NO: 269667 - protein, 414 aa, unidentified
MNTLVSNIGVSGTLIALDIAKKHHDAKIRHPDGRTSYLRIENTLEGFNRLLALTASPHEDIIAAFEPTADYHRNIAWWLHKQGVQCHLVSSVRCARAREMLFKTWDKNDRKDASVIMYLLEQGLSSPFYDPLANGIIDIQEISNTYHQVTLARTRCLNSLVNHYLTLYFPEAEQFLHMSRAEWFCQFLLQFPTPSCITSLNRDVFVKQSWDVVGRKQYKQQFLEHLYDVAANSIALPLPDDSLAVATFRLQLHRYIELSAQRLQLEKQAEKYLQERSDYQHLRTIPGIGPVIALMVIAESGDLTRFAHYRQYLNFCGFNLSAIQSGQKHSGYRLSKRGNARLRYAFWLAATVAVRTRENSFRYKYERYLRENGDKPDQKRKAMTAVATKVARVAHAIVKQDIDYKGYYEISHGT

SEQ ID NO: 269668 - protein, 414 aa, unidentified
MKVVYQICCGVDVHKKFLVATIITTTKGVQPHYQKKRFSTFNTELTRFVEWLKENSCADVCMESTGKYWVPVYNILEMHGIRTTIANPKWVKAVKGNKDDTKDSKWIGDLFRLGLVPGSFIPKKEFRVLREFTRYRYKLTSMKSSEKNRFQNAFTVCNVALDAVVTDMFGVSASSITEYLISSETFDEEYCKSLLRGSLKKKAETVIDSIQGYCIESEQKQRIQFVRKHLDFLENEISQVDMVIDSMVEKHEGLISLLCTIPGVSRNSAVTIISEIGNDMSQFGSSKRLCCWAGLTPGNNESAGKKKSVKIARAGVYLKPALVEVAHAAIKAKESPYYRIKYEKIAKRRGKKRAVIAIARMILTAIFKMISTGEVWNPTDLIKFDMPDELKQQQIQKQISQALSFLKKQGIPVG

SEQ ID NO: 269669 - protein, 361 aa, unidentified
MKRILKIGMDVHTTNYTLCAMEPIIGEDDRVFATIKVTPDYKNILLFIENLKTKLGLNDEYDIQCGYEAGCLGYSLYKQLTAAGVKCVILAPTTMLTPQGVRIKTDMRDAYMIAQCLSYGGYHAVYIPTEDDDSVKEYLRMRNDHKLALKKIKQQINAFCIRHGFCYDGTKWTQAHLKWLKKLEITNQLYRETLDEYMASYEEQEAKIERYDKRIEEIAEQTRYHDKVKKLECFLGIKTHTALSLIVETGDFERFAKGNQYASYLGLAPGENSSSDSIHRLGITKAGNSHLRQLLIEASGGICKGAVGHKSKDLRARQNGNTAEVIAYADKSHFITGRRVHHEITQITKKLKMVDFFWKIA

SEQ ID NO: 269670 - protein, 372 aa, unidentified
MSKTIVAYRSFIGVDLHKTTVTLVAVGPDGKMIARLTINTKCREKILAWLATLPRPTHLVVEAVGFVEWFIDEFRSRVDHIDIADATELSNRRGKRRKNDWRDALDMAQRLARGECPLGFIADDELMQLRKLGRHWRQLSGVMAKAKQSMKSILAAANLRGPKLDGASAQRWLLAHGKHLKPAQRQAFADFTNIIQLVELQREPLRLAIIMACRSERFDAITRLLQTVPGIGEIWACVIAAEIGPFDRFPNADALEFWAGLTSDLKESAGRTQPGKITKAGSKTLRWALCNAALTLCHSDAKQEAIRQRLIRKTGGIRAKANTAMGRRLLRLLYAMVRDNKPYQPGSPRNRTVAANKARAKRALRKTRKEAA

SEQ ID NO: 269671 - protein, 376 aa, unidentified
MSAIYIGVDFHARQQTICYLKTETGELVITDLGHQDKQAVRDFYAQFPRPVIIGLEASGYSPWFETLLEQLGCEVWIGDATEIRRRARWRQKNDRKDAELIWDLMMHDEFPRLHRPAVQSREILRMLRYRQKLTKLRTIGKNSLQALAIQAGVAKRNKLFSKAGQQELRTVEMSAVMQWQRDHWLQLLEPLNQQLLENMLWLKAQSKDDLLVKRLRTHPGIGLLTALCIVHTLQPVSRFRNQRKVVAYGGFDPMIRKSADRAIYLGISKAGSRLLRYLMVEAAHTAIRYDDELKHFYRHLAGRRGRPKAKVAVARKLLIRAYIMLRDEIDYAEFRRRAVAARLARRSQGPTNVPEVLIGQPASANGQDATHSPQSK

SEQ ID NO: 269672 - protein, 322 aa, unidentified
MAMLSFCGIDVAKDRLDVVVLPEQQCLSVRNDVDGWAELVEQLRSSAVAAIGLEATGGYERGIMRALLVAGMSVRQINPFRLRQFARASGVVAKNDPIDARMIASFVAVMPTRSAQRNAPAVERLTEMLAVRRQLSNEKVAAENAARLLEDPMLQRLSRRRIARLSTDIDTLDERLVEIVAADAALAHRYQLLISMRGVGPVLACTLIALLPELGRLNRKQVAALVGVAPYNFDSGLLKGVRRIWGGRAPIRHVLYMAAMSASQHNPVLKAFHNRLKAAGKEPKVVIVAVMRKMITTLNAMVRDDVAWADRSTGRHIVPTAR

SEQ ID NO: 269673 - protein, 408 aa, unidentified
MRVIGMDIHRTFAEAVMIDGDRLIRLGRIKMSRDHLAAFAAKLTSEDHLVIEATGNAHAVDEAVAPFVGRVILANPRQVHLIAKARIMTDVIDATVLARLYASGFLPEVWVPDQSTLRLRRQVTRRNQIVRQRVRLKTMIQAILHAHLVPQCPHADILGPKGRAWLLTQLLPDDESAAIERHIREYDRLTDDLRVVERELARDALGSAETKRLMTIPGIDMVVAIGLLAAIGPIDRFTSPGRLVAFLGLNPSVHQSGNSPARHGRITKQGPCHARTMLVEAAWQAVRGPGPLRAFYERVRGRRGTHVAAVAVARKITVIVWHLLTRGEDYAWVRPALHAKKLRDLELRSGFPARRGQRGAGYAYNLARSRREERQRGERAEAAYKRFTQGWTKRGRRVSADASKEERQ

SEQ ID NO: 269674 - protein, 425 aa, unidentified
MATKVREVAYVGLEAVLAYCCGLDVHKKRITACLLVGPVDQPPKELLSTFTTTTKGLTALRDWLASYDCTHVAMESTGIFWRPVFNILEGSVTILLANARHMKQLPGRKTDINDSQWIARLLRWGLLKPSLIPPKPIRELREMCRYRKKLTQEVGAEKNRVHKTLEDANIKIASVATEIFGVSGLAMIDALIAGNLSPQETAELARGRMRSKIPELVEALVGKIEEHHRLLLRKHLDHLSYLQQAIAEMNRLIEEKIKPYQSQIELLRTIPGIDTVAAQQAFVEMGGDITVFPSEGHFASWIGICPGNNESAGKQRKAKALKGNRWLCSLLVQSAHSVGRTKGTYAGAFYHRIARRRGNKRAAVATGHYLAKCIYHILQDGKPYQDLGANHFNRRGNDALKKQLLSRLERLGYQVELTPQLATVN

SEQ ID NO: 269675 - protein, 417 aa, unidentified
MFKIFRNNCCGLDVHKTWIYACIGITDANGRTEYRQARFSSFSKGLRELADWLAKYGCTEVCMESSGKYWIPVFNIIEASCFVTLAHPKYTKPRRGNKTDRKDAKWICDLFMCDMVKPSFIPPPEIRSLRDLLRYRAKLTNMLASEKNRAQNCLTVSNLKLDGVFSDVFGKSSRSITNHMLDHPGEKFDVAPFVDARCKTPVEEIQAAVDGAISPEQAVKLRQCLAHIDELEAHKEELEREILLLAEPFSAALDYLRTIPGLDSNPMTAIAILSEIGPDMSVFPSSKNLASWAGCCPRNDQSGGKRKSTRISRAGCYLKPLLVQVANGLLKSKKHPEFKERYHRIKTRRGHKKAIIALCKMFLTAIWNVLSKWEPYTPEGFLERRPVNESKVLTKAQALDLFRKRGYTIIDDIAVTT

SEQ ID NO: 269676 - protein, 400 aa, unidentified
MSGSRSPFQGFVGIDVSKDKFDACGIGEDGTKLFQFSAAMDRNGFEKLKSHLSSVPMGSVLIGMESTASYHVNLFSYLISEGYAAVVLNPLLISNYVKMQLRKTKTDKKDAWVIAQFLLANRNSLIRRATSPLISDLRELARQRESLVDQMTSLKNDIKRILNITFPELEHMAGIFTKSILKLLQRYPSAYALQEADPDHLTRMLIKDSYGRKRGAFAEALLKAARSSIGTPSPMKDVILKQKVSLHFHLEEALQEITEMLLQTSRGMMGDDMDILNSIKGIGEKSAASFLIEMGGDIQQFDDPNKIIAMAGIDPAVRQSGKHEGSSRITKRGNRHLRRIIWLMTTQVIHFCDVFRVYYRKRRKDGLPYKKAVLATSHKLIRVIYAMLTQRTVFCQAVNS

SEQ ID NO: 269677 - protein, 342 aa, unidentified
MQITTIGLDIAKNVFQVHGIDAKEKVVVRKQLRRDKVMGFFKALSPCLIGMEACATAHYWARELTKLGHEVRLMPPKDVKAYLKRNKNDAADAAAICEAVRRPTMRFVRVKSEEQQGQLMQHRTRDLLMRQRTQLINALRGHLAEFGIVAAKGDAGLKELLAIVADDRDERLPSDARASVIVLAAQLEAAQTMLRSLDKRIMKQHRANEASQRLESIPGIGIIGASAIAATVSDPMVFRSGRDFAAWIGLVPRQDSTGGKQKLGPISKQGDRYLRRIIIIGAHAVLRRAKENPHKYPWLTQLLARRPFKVVAVALANKMARTAWALLAHGDTYRAPELVAAA

SEQ ID NO: 269678 - protein, 343 aa, unidentified
MQTVTTIGLDIAKSVFQVHGVDAEGNVLIRRQLKRRYVLAFFEKLPPCLVGIEACATSHHWSRELKARGHNVRLMPPAYVKPYVKRQKNDAADAEAICEAVTRANMRFVETKTPEQQSCLMLHRTRQLFIRQQTSVINAIRAHMAEFGIVALVGRKGVEQLLDVVADARDRRVPEVARACIAALGAQLRLLKAQILEFDRRILAWHRSNETSRRLDELPGVGPALATALVASVADAKAFRSGRNFSAWIGLVPKQHSSGGKDKLGSISKQGDRYLRSLFTAGALAVIRYAKIHDTQHRPWLTALLARRPTKVAAIALANKIARMAWAMMARGERYREPVALAA

SEQ ID NO: 269679 - protein, 343 aa, unidentified
MDEYDGRQFVGIDLHRRGSVIVRQSESGEQLSAVRILNDPVALGLELERAGSDPEVVLEATYGWYWAVDVLQARGARVHLAHPLGVKGFCYRRVKNDVRDAGDLADLLRMGRLPEAWIAPPQTRELRELVRYRAKLVAIRSGLKAQIHAVLAKAGVLIAASDLFGVTGRQRLAKVPLGFAYAQRISSLLELIDIFDRHEARFAAMIANRFAGDRGYQAIQQLPGVGPVLAAVFVAEIGDAARFTDPPHLCSWAGLTPTHRESDTVVRRGHITKQGSKLVRWAAVEAIQRQPDTTKIARDRQRIEARRGRNIAKIAAARKLLTLVYYGLRDGHIRALAHRQTAA

SEQ ID NO: 269680 - protein, 334 aa, unidentified
MKHWIGIDVSKATLDVALLDEHGKVTAEEQVANTEKGLRSMWKRWTKAFGLAKGECLVCLEPTGHYSHLPLETLVQLEVLTWLAHPTDIIRSIGATRGKNDRIDALRIADYARRFHDKARLVTPDHLRTNKLKQLLTRRENLVRRKTMHHTQIRNLNKCMDKSLQTAFTRIDKAQITALGKSIKQIKALITEVIAADAEHQRIYDLLLSIDGVGPVLAAHLLALTEGFLRFKTARELSCHAGCAPFEHSSGSSIRGKTRVSRQAQSTLKYLLHMAAVGVTARKGELQDYWKRKVAEGKHKMSVLNAIRNKLIHRIYAVIDRGTPFVRRTEPVTA

SEQ ID NO: 269681 - protein, 429 aa, unidentified
MSYRIAGIDVHKRMLAVVVSDVEVDSEFHFERRKFSSSPEQLRSLAAWLLEQEAEEVVMESTAQYWKPVWEALERYWKPICEKREVARRKSGALHLAQALSNRGRRGRKRDFPDAERLVKRLVAQELTLSFVPDAEQRLWRTVMRKKYQLRCDRIRLQNQLESLLEEAHIKLSSFVSDLLGLSAQRMLKAMAQGETSPATLAALADKHLRATPEQLCDALGACTELNAVYRRLLGMALQELQLIDEQIGQLDQEMASLLSAHQDAVQRLAEVPGLGVDSAQQIIAEVGSTAATFPSDKCLSSWVGACPGDDETAGVNYSHRSPKGNRQMRRILNQAANAAARTKGSIFEIVYRRSVPRLGHNQAIGAIAHRQCRLIWLILHQGVRYEERGPAVTKRSKQLRTWKMIRQLRNLGYRIEPPNPQPSQAQAQ

SEQ ID NO: 269682 - protein, 416 aa, unidentified
MKIVRPICCGMDVHKNIIVATIGITNKKTRITEYIQETFSTLNPDLLNLKQWLINHKCFDACMESTGKYWIPIFNILEDEINIYLTHPKYVKAIKGKKTDKKDSKWICDLFKQDLIKFSFIPPKEIRALREISRYRYKLVGMRSSERNRYQNCMTVSNIGIGSVFSDPFGKSAQAIMKEVLESDIIEDEKILKCIHRSCKNKDKILDSIKHCNIETDQRFKMNESMTHMEELQVHINNCEIEMMKRAAPMFDQFMHITQLPGISTLSAILIISEIGVDMKQFESDKQLTCWAGLAPANNESANKKKSVRISKAGQYLKPLLVQCALGAIKDKDGYFGIKYSRIKKRRGHKKAIIAIARMMLVSIYHMILTGETFNPSDYESFKNPKPPIKQQVLTEESAIEFLKKSGFDVSKLAKP

SEQ ID NO: 269683 - protein, 353 aa, unidentified
MTSTKYIGMDVHKESISIAVRNDAGKIVMECVIETKANSILDFIHGLRGELQVTFEEGTWATWLYDLLKPHVTKLVVCDPRKNTRQGNKNDQIDARELADRLYMNKLSSVYHGGAGVRTLKELARSYLTISKDLARVMSRVKAIYRSWGIPCAGKQVYAPRHRADWLAKITEVGVLRRAEFYYQQLDALRSLRHEVRRDLLAESKKHKATKLLCQIPSIGPIRAALLIALIQTPHRFRTKRPLWKYSGFAIETHSSADYRSVKGQLQKTKKQVSVRGLNRDCNHDLKNLFKSAATIASVKPGPFQEFYAALVAKGMRPEMARLTLARKIATIVLIVWKKGVSFDAQYLKPQTA

SEQ ID NO: 269684 - protein, 354 aa, unidentified
MSVYVGIDVHRKRSQVAVIDADGEVLANRNVPNGVEPILSVIGGLPAGTPAAFEAAFGWGWLVGLLEDYGFDPHLVHPLQCKAIASARLKNDKVDAAILAQLLRADLLPEAWIAPPPVRQLRALLRHRAQLVRLRTLLRNRIHAVLADHGHDRPEGCWSGPGRAWLASLPLPAVSREVVEDDLALIEALQQPIDRLDWEVHQRAKAEPAVKVLTQLPGVGPFTAMVILAETGDISRFGSARKLAAWAGLTPTVRGSDRTVRHGHISKQGSAWLRWILCEAAQTAKRHPDFAATYQAIARRRGKKIATTAIARKLLARAWHLLTDAQITAPQALTPAVPTDPEGSPRPGRARKTA

SEQ ID NO: 269685 - protein, 314 aa, unidentified
MSSPSCYLGVDVSKDTLVVAGQNRRWQFANTKEGQRKFIVQIKKLSAAGHVVCESTGPYHLPMCLALQEAGIAFTIANAARIYYFGLSEGIIAKNDPIDAALIERFAQSKRPPADPPLCREQLALSESVTHRQQLVEMIKVLRTHRQQVLHAALVTEIDQSILVLEKRLAALDRQLRAKIDAHPLWKAKFERLTQTKGVGFVTALTLLAKMSELGTLNRGQCAALAGLAPYDNDSGKYAGKRTIHGGRQEVRRALYMAALSAATHNPILKTFYQRLRGQKKLFKVAITAVMRKLLLHLNTVLKTLTAPPQTAAS

SEQ ID NO: 269686 - protein, 311 aa, unidentified
MAQQKLFVGSDISKDLIDVAIWPTGESRQVRNDRDGWRELIRWLRPLAVEAIGIEASGGYERGPLRALLDASLPTRLVNPLRVRQFARGCGIMAKNDRLDAVAIARFIAIVPPHAVERSRAVEALAELVTARHQLTDELARAKNQAEHGCQPVVSRLAKRRILRLKADILLLDKAIAQAVAADAQLAHKNSLLRTVPGVGPVFAHSLLALMPELGSLTNRQAASLLGVAPFDFESGAFKGERKIFGGRRNLRDVAYMAAMVACSCNPIFKAFSDRLRAAGKRPKVAIVAVMRKLITTLNAMLRDNQPWRYA

SEQ ID NO: 269687 - protein, 345 aa, unidentified
MNIATIGIDLAKNVFQLHGVNGHGKVVLRRQIHRGQMRGLFINLPPCLIGMEACASAHYWARTLESYGHRVRLIAPHFVKPYVKTHKTDATDAEAICEALSRPNMRFVPIKSIEQQSALSLHRVRQGFVRARTAQACQIRSLLAEFGLVMPPGIANIPKQVPKLLQVAARELPAPFCRLIERLLAHLKELDRQARELEAQIVDWHERSEPSRRLAKIPGIGPITASALVASISDVRSFKNGRQLAAWLGLVPRQHSSGGKPTLLGISKRGDRYLRTLLVHGARSVIVRARKRDDEKGSWLKKLLERRHVNIATVALAHKTVRTVWAMLAHDREYCANYQSPPVAA

SEQ ID NO: 269688 - protein, 355 aa, unidentified
MKHYQSNRKGGNNQVLYVGIDVAKSIWSVTLLTEEMEIKTIPSAPSPKKLSEYLKREFEGYDIYSVYEAGYCGFWIHKELLRYGIKNIIVNPADVPKGDKEKKTKTDRIDSRTLAYTLRSQLINGIYVPEEEMITERNLVRLRATEVKDQTRIENRIKSLLNFLGIEVIDAGKSWSKGYIEKLSKLEIKGKEDRFKLDIFIEELKQKKATLLKVTREIRAISKSEKHKEDIKNLTSIPGIGLLGAMVIMTEICDINRFCRFDYLNNYAGLLPTEHSSGGIEKKGHIMPRGNKQIKNVIIEAAWVAVRTDTVLKHKFEELKKRMKATKAIIIISRKLLSSIYHIMKTKEPYKSLAA

SEQ ID NO: 269689 - protein, 412 aa, unidentified
MQVQYPRCCGLDVHKATVVACLLQMDADGRRSTAIRTFGTTTDDLLALGDWLRANSATHVAMEATGSYWKPVFNLLEGQFTVWVVNAAHIKAVPGHKTDVHDAEWIADLLQHGLLKPSFIPDRFQRELRDLTRSRTIVVDERSAVVNRVQQVLEDANLKLAGVATDIMGVSGRAMLAAIVAGTTDSATLANLAKGKRRTKREQLDRALSGRVGAHHRLLLSMHLTHIDFLDELVAQLTAEIAERLKPFEDELQRLDAIPGVGRSTAEVLLAEIGPDMTRFPTAGHLASWAGMCPGNYESAGKRKKGKTRKGSKFLRRALTEAARAAARKRGCYPAAQYRRLVVRRGPGKAAVAVGHTLLVTAYYLLLCHDTYRDLDPSLLDERLRKRTRQRALAQLQALGYDVALTEHQPAA

SEQ ID NO: 269690 - protein, 350 aa, unidentified
MTTFVSFVGVDIASASFMASVGTQPWKVTVKPTKFENDENGFVSFLGWLQEHNLKTESTVVCMEATGVYSEGLAYFLYASGYSVAVEPPLNIQRKFPVNASKTDELDCQYIAEYACRYADKLSLWKPRAEILEQVKLLLTTRQHFSVQLTGHKNALHAIHRKKVSSELAKHSHQNMIEQITKSIKEIDKEIRRLIESDPTFKQTLLLLMTVPGIGLQLAAHLLILMQETLDPRSLAAFIGICPIKHESGSSVYSAPTSRHFGPPKLRKLLYLAACSVRTHKSSFSNTFTAKSRMASTKTGPQQHPKQDPQDCLCCRPLATTLPSQLCCCQSPGFSKNLDGFIVFRMTWLY

SEQ ID NO: 269691 - protein, 373 aa, unidentified
MPKYSTAFGMDVHLRSTTVCALDADTGEAVTRRFPGNPWGEIAGWMDGFPGPSLAAYESGYLGFAPQRELAGLGVECVVAAVSKIPRSAADSASKNDRNDAARMAKAILAHDISPVWAPSPEVEGIRDLAGAYDGATARLATAKQRLLAFLAKRGFVYGGTTPAGNPRKYWTYDFLRWLDKVRPEDDGGVRTLAALRNEVEAAAEARADLLSEYRAAVDASPIAAEVAALQSIKGCAFALAAAFSAEVGDFTRFRSGRQVTAYFGLAPSQRSSGDSVRLGGISGAGNALVRKLAVEGSWCYAAARHQPKLMPRDTGVPLEIRMHGRKGSERLLRRREEMLARGMPAAKANAATAAELVRWLWALGMMCREGAE

SEQ ID NO: 269692 - protein, 582 aa, unidentified
MAVLASARESRSTAGREGRVKIGASCPSTNLVSGVLDVVIGGRRWLATTGDVTPLGRIIVLKPPRRRSSYFCPSLSLNDKETTVIVPPKDVVRNKLCGKARKKALARAQGRKSKKSAAPGNKPRGRVGKSHRGGQAIPTTPSLNQLEQVNRNAAGIDLAATVHYVAVPPGRDAEADVRCFETFTADLEAIADWLTSCRVDTVAMESTGVYWIPLYELLEQRGFEVLLINPADLKKFRRKTDVSDCQWLQTLHTFGLLRGSFRPEEKIVTLRAYLRHRDTLVKCATDEVRRMQKALEQMNVKLTQVISDITGMTGMAIIRAILAGERDPQRLAALRHVGCKNDVKTIALALQGNWRQEHLFALRQALELYEVYVEKLKDVDGKIGAYLQTFEDRSEGEQLQPSRRKRALDPYLNSRDLMCKMTGVDLTEVDGIGGNAALQIVAEIGMDMSKWDTEKHFVSWLCLCPELHLSGGRRKSTKSHTQPSKNRAAAIFRMCAQSLLNAHCALGAFGRRMRAKKGGAHAVTAVARKLAIIVYHMLKERRPYKDQGATYYEEKYHERVVANLRRRAKELGLELVPLALSE

SEQ ID NO: 269693 - protein, 342 aa, unidentified
MNIPVRIGMDTSKSVFQLHGVDENEVVVVRRQFRRAEMIRYFERLPPVLVAIESCGSSHHWARLLQSFGHEVKLIPPQYVKAYVKRGKNDAADAEALCEAVSRPSMRFVPVKSKERQAACMLMTVRERLVSVKSQLSNAFRSYAAEFGIVGPAGRQNVTALIKRVLEDDSLPEMARDLFRLQAEEYAAVQARLAKIEAKLMKWHREDDVSRRIATIPGVGPIGSSMLSMKAPPPETFRSGRDFAAWLGLTPKDHSTGGRQRHGGITKAGDSALRSTLIVGATALLRHIRKGRHKPTPWLASLLERKPPKLVAVALANKFARIAWRLMISGGVYNRPVADMPI

SEQ ID NO: 269694 - protein, 340 aa, unidentified
MNATTIGIDIAKSVFQVHGVDAAGQVTVTKKLRRAEVIKFFQSIPACLVGMEACATAHFWAREISALGHQVRLMPPSYVKAYLRRQKNDAADAEAICEAVTRPTMRFVPIKSAERQSVLVLHRTRELLVRQRTMLINAIRGHCAEFGIIAPQGARRATDLVAHIRQSEPAELPELARSALLRLAEQLDTLAAEIHGLERRLLAWHRQDQASQRLATIPGIGIITATALSAAVTDPALFRSGREFAAFLGLVPRQNSSGGKDRLGRISKMGDGYLRKLLVVGATSVIRRARTGASVSATWVSALLERRPARVVTVAMANKNARIAWAILKRGEVYRPPLTA

SEQ ID NO: 269695 - protein, 361 aa, unidentified
MKAVPLRFGILKKRNGSEEKKMIRFYVGVDLHRNNFTYCMRLKNGEEKMGKLAIRELKGFARMLGKHAAVAVEATGNTWMFCQEMKEKVGRLVVVNPTQFKVISRSTKKTDKHDARILAEYLEKDMLPEVRMKDGLQSKISSLTQTREKLVQLRTVLKNKINNLFASRFIELRREELSSEKGLLKVLTCRFDPITDTELRVMVNEIRSLNKSIEELDRTIEENGSKMDGFDNLKSIKGIGSKGAATLLSVIGKIEDFRSAKQLAAYIGIVPRVSNSNDTVCHGRITKLGSKIARTVLVQCSLVAKRYSPYLHRFHESVKSRRGGAKANIALARKFLEIIYKTLKNNWIFEDFTKFKLAENK

SEQ ID NO: 269696 - protein, 350 aa, unidentified
MKKIVKQVAGIDVAQKELVVCLGRMYNDWSPELYANKTFANTAKGIEALELWVKKQTDQQITIRFVMEATGVYHEMLAYFLEGKGYEISIVLPNKISNYMRTLDVKTVTDSTASQAITMFGLERKLDIWKRPKEIYRKLRQLTRERDQLVGERTMVKNQLHAEQTEAYPNKSSIKRIKDRIKMLDKQEKEIMKEVAAMIAQDSELQKMIIIICSLPGIGLLTAAVVLAETNGFDLVRNRRQLASYAGFDVIEKQSGTSVKGKPRISKKGNKYLRKVMHCPALTAIRHDERFKAIFARIVSRHGIKMKAVVAVQRKLLEMIFILYKTGKRFDKDYLMKTKAEKSEHELIKN

SEQ ID NO: 269697 - protein, 333 aa, unidentified
MNEITTLAIDLAKNVFQVHGVDAGGHALLRKQLRRTELQRLLISVPSCKVAMEACGSAHYWARVAARAGHQVHLIPPQYVKAFNRGQKNDRNDAQAIADASRIPDMARVAVKSEEQQAILALHRLRERVVKERTAIGNQLQSVLGEFGLLIPRARTKMGPALAAVLDGEQLPALLRPAIRGHWEHLLEIEQRLKQLTTQIERLAQLSVPCQRLMQRPGVGPIVATAFAAEVADAATFRNGRQVAAWLGLVPRQYSSGATHRLLGITKRGNQYLRRLLIHGARSAMQAAHRHPERPLYRWGLEVRARRGANRANVAFANKMARHLWASLRYETA

SEQ ID NO: 269698 - protein, 474 aa, unidentified
MIPKRMTSKGKQTPLKRRRQKRMHQRGTPQSMPVREAHAAGIDVGAREMYVAIPPDRDSEPVRVFPTFTCDLEALADWLVERGITTAAMESTGVYWIPLYQILEDRGVRVYLVNARHMKNVPGRRTDWHECQWLQYLHAVGLLRAAFRPEPEVVAIRSVVRHRRRLVEAAGVHIRHVHKALTQMNLQIHHVINDITGVTGTAIIESILAGQRDATELAKLRQPEIRADEETMRKSLEGDWRREHLFALRQSWELYGMYVRSIEACDQEICAMLGEREPKVDPEKKPMPSDTKRRTKLKHQRTGDFRFDVRTEAYKQFGVDVTRIPGLEGIALVLYSEVGNDMSRWSSASRFASWTALCPDNDKSGGQVLWTGVRQLKNRAGQLFRQAANSLHRSQTQMGEYLRRMKAKLGAEAGITAAAHKIARIFYAVVKNQVEYDDTIWHQHDLQRQRRLESKVRRQARGLGFQLVPIQPVP

SEQ ID NO: 269699 - protein, 399 aa, unidentified
MFVGIDWAAESHDICVVDSAGKIRGRATVAHSQEGFDELVKRLAGWARQEDVLVGIERPEGRLVDRILEAGYPIVVIPTFSMKDLRRRYAVGGAKSDPGDAHVIADVTRTDGHRLRRLEPLSEETRALRSVVRARDDLVDQRVALGNELRACLEAYWPGAAVIFADVCSEICLAFLERYPTPEAAARLGEVRLGSFLKKAGYSGRRPPAQLLDRLRAAPEGIRGVEAEARADAVRAMVRVMRSLNRSIKDLDRAVVAHLGEHPDAEVFTSLPRSGQINAAQMLAEWGDCREAYPEPDAVAMLGGLCPVTHASGKHRDVSFRWACNKRLRVALTTFADNSRHASPWAADVYRRAIARGCDHPHAVRILARAWVRVIWRCWQDRATYNPGLHGAAVHLEAA

SEQ ID NO: 269700 - protein, 326 aa, unidentified
MTDSNHVILGIDISKAKFDVALMVAGKVKKSHLFENAQDGFETLSGWLLKQGITSVSACMEATGCYGDALATYLHDQGFVVSVVNPAQIKSFSGAQLSRAKTDKADAKLIAQYYQQMCPAPWSPPPMHVRELQALVQRLSALAQMERQEQNRMGTAPAVIRTSIATMLATIKAEIKTVEAMIRDHIDRHPDLKNQSELLESIPGIGKATIFRVLAFIGDVQRFDHAKALAAFVGVNPTVHQSGSSVRGKPHLSKKGNSVIRKALYMPAIVARRYNPVIKEFADRLKKAGKPNMLIIGAVMRKLLHIIYGVLKSGMPFDPAWSANHA

SEQ ID NO: 269701 - protein, 409 aa, unidentified
MRYYLGIDWADEDDAVWVANEAGEKVMSRRIAHTVAARSEWARWLRERQAEGIELWAAIERPHGRIVDFLLAHGVVVYAINPKSLDRARDRYRVGRSKSDPFDAQVLALFLRSDHLQLRPLRPSSEAAQELQGLTRDYRRQVHLQTRLINQLTATLKEYYPRALELSDDLTAQWVQAFLAHYPTPAAVAALTQPAWQAFARAHRLAPARIAALWQTLQQPQLPLPAHVVRTKARLLQALLRELVPTLATVAEYRAAIDDFFAAMPTSEIARSLPIGKAGTTVPTIWAELGDHAERWDSVRRLQGYAGSVPETERSGSGGHRLIKFRFACNPVLRDALHQLAFLSLSHSLWARTYYARYRARNHTHHEALRALGAKWLKIIFVMWKRHVPYSEDHHLATMARQQLRQPAA

SEQ ID NO: 269702 - protein, 426 aa, unidentified
MEVQSGKQDPQFAAFVGIDWADKKHVWCLQAAGSRQRESEELEHNPEAVEAWVGQLCQRFSNRPIAMAVEQSRGALVFMLSKYEPLHLFPVPSTMAANMREALYPSGAKDDPRDADLLLDLLLQHRDRLRRLSPDTEATRRVQNLVEERRKLVDEKTAQTNRLTSHLKIYFPQILDWFEHLDSMLVCALLERWPTLEELQKVPPPKLRTFFRKHHCRDQELIERRIVAMRQAIPAIRDRAVIEAKSTVVKVIVQVIRSLVEGIADLDEKIEEAAAAHPDFFIFDSLPGAGAVMAPRLLAAFGSQRERFANAAEVQSYSGIAPVTERSGKKKWVHFRWACPKFLRQSFHEWASHSMMYSAWARSYYQQQRSKGQDHQAAVRALAFKWIRIAFRCWKDKVAYDESKYLAALARRGSALAALVATAKTL

SEQ ID NO: 269703 - protein, 314 aa, unidentified
MNTNTLQNINVGVDTGKTQLDIYIRPLDIYFHVTNDEKGIKQAVRTIAKYHPERIVIEATGRLEMPFILACEKANLPYVIANPLHIKKFSGALGNKAKNDRLDAALIAHYAEVIKPKLTQLKSENIRLMSDLVTRRNQLLSMQTMEKNRHQILPQSLASSIKPILTALKNQIAKVENRIEKLIETCPDYQAKNEILQSVPGIGKIAAASLISNVPELGYITNKQAASLIGVAPITRESGSFKGKRMIKGGRMQVRTVLYMAMMSAMQCNPVFKETYQRLLAAGKPKKVALIACVRKMVVILNSMLRDGCMWNGR

SEQ ID NO: 269704 - protein, 385 aa, unidentified
MSYRIAGIDVHKKMLAVVVSDVEIESEYQFERRMFGSNPEQLRSLAAWLVEQEAEEVVMESTAQYWKPVWGALERYWKPLREKREGARRRSGTLHLAQAQSNGGRRGRKRDFPDAERLVKRLVARELILSFVPDTEQRLWRTVTRKKYQLRCARVRLQNQLESLLEEAHIKLSSFVSDLLGLSARRMLKALADGETNPAALAALADGRLRATPEQLCDALGACAELNAVYRRLLKMALEELRLIDEQIGELDKEMASLLSQHQDAVERLAEVPGLGVDSAQQIIAEVGPTAATFPSEKCLSSWVGACPGDDESAGVNYSHRSPKGSRHMRRLLNQAANAAARAKGSIFEIVYRRSVPRLGHNQAIGAIAHRQCRLIWLILHQGVR

SEQ ID NO: 269705 - protein, 357 aa, unidentified
MGKSIKNLSSVTIVGLDIAKNVFQVHGVDAKGAAIVARLVRRGQLLKFFASLPPCLVGMEACSSAHHWARSLIELGHEVKLIPPAYVKPYVRRNKNDAVDAAAICEAVGRPNMRFVPVRSVENQAELMRHRARELLAGNRTRMLNALRGHLAEVGIVAAQGAQHAYGLKRLLTDGCDENGEIVVADCVRKALAPLVQQIDAIDEEIEAIDDHIKAQVKADDTARRLARVPSIGPITASAIVATIRDPSAFASGREFSAFIGLTPRQSSSGGKERLGRITKMGDRYLRKLLVVGACSVLNHRKGHNDALRVWADQLLARKAVKYKFKLTAVALANKVARIVFALMTRGGEYDDRPLAA

SEQ ID NO: 269706 - protein, 330 aa, unidentified
MTLVRCDLHARKQQVAVLDTITGELREEQLSHDGDAVERFYSTLPPPVTVAVESTGYAVWFHALIRQLGHTLLVGDASKIRAMVVRKTKTDRRDALHLLELLRHERLPLIWVPDPETRDLRALLVHRMRFVRLRTTVINGLQAIALSHRLVAGSRRLTRGRVAQLTRLPLSPHLARRRDESLELVSWLDQRIRGLDTLVDEAVEAEPAARRLLTHPGVGPVTALTTVVVLGPVSRFPGSKEVTSYVGLAPTLHASADKHHLGQITKQGSPLLRLVLVQAASIAARYDDDLKQVYVALLHRRGHAKAKVAVARIAALVRGAPSAGLRSGAE

SEQ ID NO: 269707 - protein, 349 aa, unidentified
MRIIIGCDFHPGYQQLAMMDRKTKEFTEKTLSHENQEEVRAFYAALPRPVLVGVETSGQSQWFERLLAELGHERWIGDAQKIRKAADRKQKTDRRDALLVLQMLVENRFPRIWVPTAEERDVRQLLLHRSKLVRMRTKVKNQLQALALNQGLRRKWKLWSEAGRKQLQALPMLPWTARRREELLALLDQLDRSIGELDREVAKEANTRPAARRLMTHPGVGPVTALAFVLTLGPPSRFARGKQVASYFGLIPSEHSSGGRQRLGHISKQGNTFMRWVLVEAAQSAVRHEPNLRRAYQRLAHRKCRALAKVAMARKLAVRWYWMLRGEMDYAQLIQGSCTGEPESSCGRG

SEQ ID NO: 269708 - protein, 415 aa, unidentified
MSSTLTKKLAQVKPGTLFLGVDLGLKQNVCVVLNDQARQLQRFSFATSRSGYEVFAERWERLQEKHPQADLLVGMEPTNFFWQLLAADLEQRQRPYRLVNPYTVKKHREGDNLDRSKDDQRDGFTIADLLRTGKFTQTQLQTGVYAQLRMYAPVYARLRTELARCKTLLWAAVGQVFPELTQVFGDFTGQTARAMLRRHACAYRVQQLSLPEFLQAVRQDLRCRKMSRKKLVLAHQLAAQSIGLREGLEALQHAIQVYLSLYETLETQFEALRHGLVEQFQRLPEAAVMLTIQGLGVVNAALILAELGNPQRYTSGRQWVKLAGSQPTPNSSGQQTASRTPMSKKGRARLRTWLFYACLRLVQTNPAFHRWYRRLCNREHHPLPPMQALGALMNKLLRILWALLKGQVAFDPDHA

SEQ ID NO: 269709 - protein, 350 aa, unidentified
MDKELYIGVDVSTHPLDLAYSDGESIDWKNAPIHVSTNNAGFTKIGSWVAKVSKGVDIVLFCMEYTGLYTQNFRLWLEEKHYIYRMVEPRKMHRFEPDLDDGLRSLDRIKTDELDSFRIAIYCEQNHRKILRNPSKLPPPVYFKLKRLLAERKQTVKQSVLYKQQLHDICAYDTDLSVERKNGQLKTLNDALKGIDNEIDMYIKEDADISKNFSLLTSIPGIGRVVALETIVLTENFMAIDNPRKYACYIGVAPFKKESGTSVRKGSSVSKKGFKQAKADLSIACLVCMQHIPNIRDYWERKRKEKCSGIVFDAIKFKKIHRMFAVIKRGTPYVETDNYRNGKNKQPGVN

SEQ ID NO: 269710 - protein, 456 aa, unidentified
MPRKTKSKKTTATLPVLHPDAAGVDIGATEIYVAVPPDRDPESVRSFQTFTEDLMALADWLLRCRILTVAMESTGVYWIPLMQILEARGVEVFLVNARYAKNVPGRRTDVSDCQWLQYLHSVGLLRASFRPAPEVCAVRSLLRHRDGLVELASHHVQHMQKALDQMNLQLHHVISDITGTTGLAILDAVVAGERDVNKLAHLRDPRIRATKETIAKSLVGDYRPEHLFTLRQSVNLYRTYQKEIAECESEIQRFLKLLETKVDPVAEPLPPAKDSVKKCTVMPPVRALALRDESYRVLGVDLTTIPGMSVLHVQAVVAEVGPDLSKFRSASAFSSWMGLCPDNDVSGGKILWTGTRKVKNRLAATLRMAAQSLQRSQSALGEFYRRMRSKLGAPKAITAAAHKLARIIYHMLKTRESYDEGVFARLEIRYRQRVENRLKAQAHALGFTLIPAPSHT

SEQ ID NO: 269711 - protein, 441 aa, unidentified
MAKLPILDPRAAFVDVGSEQMHVSIAGGTPKVFGTVTSQLHALRQWLIEQEVTSVAMEATGVYWLPLYSELERAGLKVIMVNGRQTRNLPGRKSDMMDCQWGATLHAHGLLRPGFVPPAHIRQLQDYMRLREDHIRSAASHVQHMQQALERMNIKLHDTISSLTGVSGLAVVRAILEGQRDPHELLALCDVQIRRKKAERVIESLRGTWSDEHLFALSQALQSWEHYQRQIAQCDQRIELLLEQAAPGGGADDAQARPRGPRKGCSENAPKIPGLRDKVAAMCGGKDLSVLPGFTEYSVLRIISEVGTDLSKWGLDKRFASWTGLASGSDQSGKRRRSTGRKRNRVGRMFCVMARSLARSKDSALGGFYRRLAARRGALVANIALARKLAVLFWRMMVKGTAFVEMGLAAYEAKVLKGKQRAVNRLAKELGLQVTAIPTAA

SEQ ID NO: 269712 - protein, 324 aa, unidentified
MIDGILGIDVSKNTLDASMSSCNKVRAKSFANSPDGWRHLLDWLIGQKIRRVHACLESTGLYSLGIACKLNEAGHVVSIVNPAQIRDFARTKLGRNKTDAVDASHHIRECELFKPPPWSPPSHAHRQLGELQTIRAGIVAGLTEWKNRKNSGMIDVVAQSLADATISHFTSQLGAVEKAIAQAIDNDTDLRRKRDLLLSISGVGETLASVVLAELPGPDVLRSSAEAVAYTGLNPRRHQSGTSIDRLTRISKIGNAVLRAALYMPAMSAMRYNPAIVALVTRLKARGRLNPKQIVVAAMRKLLVLCFGVLKTGKPFDPALAMGC

SEQ ID NO: 269713 - protein, 340 aa, unidentified
MSIVGGLDVHRAQITYDHLDTVTGEVEVGRIVPATRVELRDWLSRFEGREAAFATEGCTGWRFVVEELQHAGVEAHLAEPADTATLRGRKKRAKTDRADARHLRALLVEDRLPESWIPPAHVLETRIKGRAYVALMDHRRAWQQRIQAQLFHQGVEKRRGLLTEAGRSHLDEAELSGAGRQLIDVALRVIDALGAEADPLRRELQGFARRQPGCRALVDELYGVGALTAAVIWAEMGDTRRFSSSDQAVRHTGLDITVYESDGKRSPGRLSRQGPSTLRWALFEAALTATRNSSPDHGYYLEVAERLGPKRAYLSVARKLARRVHHILRGLGDTAFEEVT

SEQ ID NO: 269714 - protein, 343 aa, unidentified
MNGFYYIGLDIHKRTIAYCIKAIDGQLVDQGKIAADRQSLEEWAKGLPGPWIGAMEATIFTGWVYDFLKPHAVGLKVAHPAMLKAITVAKKKNDRADAEKTADLLRVNLLPECHMLSEEIRELRRILRYRNHIVRTAVKMQNKMSGLLMEVGVSYSKKRLHGKKYFHELLERVDEIPPSVKELLQLSRSSYEMFRSYQKRLIETLRTDSLIRERVQRLMTIPGVGEITALTWVLEIGDPGRFSSTRKAVSYCGLCSAQRESAGKEQRGPISKKRNKHLQTILIEAAKLAPHWNEHLAIIHERELKKGNRNRATLAVARKLVAYMLAVDRKQADFKLPAGILAA

SEQ ID NO: 269715 - protein, 318 aa, unidentified
MNTKTKQNVSVGVDTGKFQLDIYIRPLDIYFTVNNDEKGIKEAVKTIKKYSPDRIVIEATGRLEMPFIMACASANLPFVIANPIHVKRFAGALGQRAKTDKLDAQLIAHYGEAIQPNLSQLKPEAMQAMSDLVARRNQLLVMQTMEKNRLQILPKELAMTIKPILTAFKNQIEKIESKIVKLIESCPDYQAKNDILQSMKGIGKIASASIISNLPELGYMTNKQASALVGVAPMNRESGRYKGLRKIQGGRHQVRTVLYMAMMSAIQSNPVFKATYQRLVASGKPKKVAMIACVRKMVVILNSMLREGVMWEAPKPVI

SEQ ID NO: 269716 - protein, 359 aa, unidentified
MFKDSTSFIGLDLGDKHSHVVILDSEGDLIEETRLPTTRASFQRKFSSLAGCRVAMEVGAHSRWASHLLKELGHDVLVANARKLRAIYSNPRKGDRADAEILARLARLDPELLSPIHHRSPQAQADLAVLRSRDAVIRSRSLLINHARSIVKSCGARLPSCSADSFAHKVAPDIPESLRPALAPILDTITCLTQQIRAYDRKIEELCSERYPETKLLREISGVGPLTSLAFILTLERPDRFRKSREVGPALGLVPRRDQSGDRDPQLRITKTGDPYLRRLLVGSAQYILGPFGPDCDLRRWGLELAERGGKNAKKRAVVSVARKLAVLLHHLWKTGEIYDPSYQSRELANEPVVTLAAA

SEQ ID NO: 269717 - protein, 317 aa, unidentified
MTQKQTLVGIDVSKLKIDVAIRCGAQASFDDSPEGRRQLLAWLTEHDVYKAVIEATGGYERNWGSLLRQAGLEVLTVDPKRVRHFAKSAGQLAKNDPIDARMIAWFGEVFSDLRGQEHDVERQELDQMVTARLGVKRLKEQIDAWGEHEQPKAVQKVHQALLKAVAQQLAKLEATIAATIDNTPRFAERAEIIRSVPGLADIAAAGLIAFLPELGRVDRQAAAALVGVAPFDDDSGKRRGERHIKAGRQKLRNLLFMPIMGAATQHNPVLKACYNRLITRGKEAKVALMACLRKLIGILNTMLARGEKWDPTKHAIA

SEQ ID NO: 269718 - protein, 474 aa, unidentified
MRTRAKQRPDLQAIPLLKHEPLYIGIDVGKLKHVAGFVSTTLLERHQRFEACPVLAFENTREGFRALLERIQSLAPLEHVFVLLEKTGHYHFALQQFLQECDLSVYTVHVQTRPAGMLKTDKRDALGLANTLYNQLQLGVQVADKTQLVRRAEPPTAAAAQLKGLVRHRYELVRESTQRKNKLTAICDEIFPEFTRVLKDPNLSTALTLRERFPTPHAMATASLTALREARGYTRTLPESKLLELQQLAACSIGIKDLTRQRSLVLEQGQLIQELRLLQQHIEQLESEIKTIVDQAREGTILLSMGIGPIQAATIIATIGSILNFPNAGTFKAYCGWAPMREQTGTTFDRSHLTSRGSRPMRQMMFLIVASITRQDTEWAYLYKRLVQTRCPYDERTGERKGKLRIMGRVAGQMLETMYALLKKDAEVLGKVPSGQDPPPPILYDPALHRRHREGHYQPLKSSPHPSLIMLQPK

SEQ ID NO: 269719 - protein, 407 aa, unidentified
MDVVHVKCAGLDVHQRSVVACVRLGSGKAVTYTVRTFGTSTPDLLALSDWLTTHGCTHVALESTGVFWKPVWAVLDGAFELVLANAMHIRNIPGRKSDVNDATWIADLLAHGLIRASFVPPALIQELRDLTRTRKQLVREIAQHTLRLQKTLETANVKLTSVLTDILGVSGRAILAALVAGETDPAQLAALANDKVRASRAQLTAALHGRVTAHHRFMLQLHLGQIDALEAAVRDVEARLGTALAPFRAAVDHLITMPGVSETVARVIVAEIGFDMTRFPTAAHLVSWAGLCPRLHESAGKRLSTRTRSSNPWLKTTLVQAAWSAARTRDSYFRAQFLRIKSRRGPKKAILAVAASMLTAAYHMLQHGTDYRDLGADHFDRRDKAKLAKRLIARLHDLGLTVEVRAA

SEQ ID NO: 269720 - protein, 410 aa, unidentified
MAVLGVALDPSTVIVAVDPGKVFSRVWISNGSGLLADPMSLSVSRDGIAQLELVLNKHGPGVPVIAIEATGSLHRPWVTELERRHPGSVRLFAPSETKSARTQLGSGRFKTDDRDCAALTYMARQGGGRRYGQLFGVEALRTAVRHRRGLVADRKVARQRLHEQLNALCPGLSAPSGHGRSLALETSTGLAVLACAAAFAGRPPQLRSLMCRAPGPLTTTTARYWLQRWHRCLPPPADAEQRARRLTRDLDRYRRLREDIDAIDLEIGALLSETDGQILTTLPGVASIRAAAFAAHSLPIERFPDADHLYSATGLAPALYQSATLHRRGRISRQGLAEHRDALMGIAWGLSQFSPSFTERDAELRARGMAPIQARVALARHACRLAYRLLRTQQPFDEQRYRQGRLSGER

SEQ ID NO: 269721 - protein, 343 aa, unidentified
MKLFIGLDVSLAKTAVCVINEHGKIVKEAQVLSDPQAIVDFANTLEGSVAIIGLEAGPLSQWLHRGLADARLNVVLMETRQVKGALKAMPIKTDRRDAEGIARLLHLGWFRPVHCKSVSAQEVRALLSARKAIQQGMIALELSLRGLLRNFSLKVGAISRGQFDTRIKQLVEGNSMLQAASGPMLRARTSLRHELAGLGRQVRLLAKDDAACRLLMTMPGIGAVVALTFRSAVDDPARFSSSKKVGPWVGLTPSRNQSGERDVIGGITRAGDANLRRALCQAATVMINRGRSTWLRSWAAQVAKRRGAKRAMVALARCIGTILHRMWTDGTEFSSDQLLAKSA

SEQ ID NO: 269722 - protein, 315 aa, unidentified
MTKPLLALNVGVDVGKSQLDLYLLERDRALSVPNDEHAIASLVRRLRRYRLERIVIEATGRLEQPFVRAALAAGLPVVVVSPLKIRRFADAIGQLAKTDEIDARLIARFAAAVKPLARPAPDANAQIIKDLVVRRRQLVSLRTMEKNRRQVMPQELKAGIDRIIKTLDRELKRLEQLIDHAVDQHAPSRHKRELLTSMPGIGNSVAATLLGDLPELGSLNRREIASLTGVAPFNRDSGKLRGKRRIRGGRAHSRTALYLSAMVATRFNPDIKRFYERLVSAGKHKKVALTACIRKIVTALNAMLRDNKPWQSSFA

SEQ ID NO: 269723 - protein, 347 aa, unidentified
MRFYNRQHQYYCGIDLHVKTMYICILDAAGQVLVHRNVPSMPAALLEILAPYRGDLAVAAECMFTWYWLADVCAAEGITFVLGHALAMKAIHGGKAKNDKIDSHKIAVLLRGGMLPQAYVYPAAMRSTRDLLRRRLHLVRKRGQLRAHIQNTRAQYNLPAFEKRLAYPRNREGVVEHFPDPIVRKSIEVDVTLIDQYDALITDLELTIVREAKRHDADAFHRIRSVPGIGKILTLTILYEIHDITRFDRVQEFASYARLIKCAKESAGKKFGTSGAKMGNVHLKWAFSEAAVLFLRHTTEGKKLLTRLEKKHGKGKALSILTHKIGRAVYYMLSRGTVFSMEKFLAA

SEQ ID NO: 269724 - protein, 351 aa, unidentified
MDYGVYCGVDFHARQQTISCLTTEDGVVSTHELKHQNKAELKAFYAQFRGPVLVALEASGYSPWFEQMLEELGHEVWLGDASEIRRCARRRQKNDRRDAELILDLLLHDEFPRIHRPAVNSRELLRMLRYRHKLVQMRTIIKNSLQALSIQSGLSLRARLFTGMGLDQLRSLTMSPVMQYQRDQWLVALESLNQQIDAATNWLGEQAAGDARVQRLRTHPGSGLLTGLAIVHTLEPVTRFRNQRKVAAYVGFDPQERSSGEKKRYLGISKAGSRVLRYLLVEATHTAVKSDPDLKRFYLRLLHRHGKAKAKVAAARKLLIRSYILLRDHIDYAEFGRRAVAARLARLASKA

SEQ ID NO: 269725 - protein, 396 aa, unidentified
MISVGIDVSKGKSTVCIMKPCGEILESPFDIGHTADELDSLISLIKSFDEETRVVMEDTGHYHLPVATYLSSHNIFVCCVNALRMKKFCSQSIRRAKTDKIDSIKIASFGITYWNELVKAYPSNVIYDELKFLARQYYQVTGMLVKSKVNFSNLLDQVMPKINDVLSNQGENHKLTEFVSRYIHFQNILDMGEMKFTSDYCKWAKKKGYRLNERKAAEILALAQNGIPTLPNSQSVKIAVSEAVKLIHSIEESRNTILAQMQDLCNTLPEYSVVKEMDCIGDTLAPRIIAEIGDVRIFKNKHSLIAYAGIDAPPYQSGAFHASERHISKRGNSYLRKTGYEIMQSLIKHKPADNAVYDFIQKKRSEGKCGKEAMIAGLNKFLRVYYGKVMEFYSEH

SEQ ID NO: 269726 - protein, 385 aa, unidentified
MAKQIFKYSVGCDISKDTFNVCILEVDQEMESKVKASHKFNNETKGFKEFESWVKKHKKHDVQTGFYMEATGVYYENLAWYLFEQEYNVYVLLPYKTKHYLKSIGIKSKNDKIDAQGLAHMGAQQKHNPWRPHSKSIYTLRSLTRQHENVTKLKTGLENQLHAIEYSAVRNAIVKKQLKATIRLLEKQLDELADEISNLIDTDEKLNQKYSHIDPLRGISKLSWATIIAETSGFETFENQRQLVSYAGYDVVENQSGKHVGKTKISKKGNSRIRRILYMPSLVSVRLKEPVLYNLYQRVYNKTGIKMKGYVAVQKKLLVLIYHIWKNDKAFQSDYSKTFGEEESKLLFPFGFGETIKESSPDKRATQDEHSYELSSKVLFPLAQI

SEQ ID NO: 269727 - protein, 408 aa, unidentified
MKLFVGIDVSSEKLDTCFLDSEDQILLETSLPNNVVGASKIKEHIIQFTENIHYERIIVGMEATSVYSFHPSTFLAEDAELKSLGIEVAVINPKAIHRFKGLFEEDKTDKIDAYRIADFLRFGRFNTSLIKEEKYMALQRLTRSRYQLIGQLTEMKQHFLENLYYECNTLTKEIDTSIFGATMMDLLTDSMTLEDIANMSLEDLAAILQEKGRGRFSNPQKLAKSLSKAIRDSYRLGKVMQDSVDVVLASYAMMIKTIKKQIKELDKAIQQLLEILPESKSLLSIPGVGPVYAAGIIAEIGQIERFENEAKVAKYAGLYWKRKQSGNFESERTTITKTGNHYLRYYLIEAANSVMRNEPVYREYYLKKYHEVPKHQHKRALVLTARKFVRMVDVLLRNHQLYAPERSV

SEQ ID NO: 269728 - protein, 344 aa, unidentified
MQHYVGLDVSVKETSVCIIDMAGKVIREVKVATEPVAVLAFLTDEALAIERIGLEAGPLSQWLYSALAEAGLPVICVETRHMKAALSAQINKSDRNDARGIAQMMRVGLYRPVHVKTLASQKRRMLLTSRQLLQAKALDIENDLRGTLRNFGLKVGMVGTVKFEARIRELVADHPDLAAIVEPLLIARRVLREQLAVLHRQLLEAVRHDEVCRRLMTTPGVGPVVALTFRATVDVPSRFASSKAVGAAFGLTPRRQQSGEIDRMGGISKCGDGMMREMLFEAALVLMTHTRKWSWVKAWGMKIARHRGMKRAIVAVARRLAVIMHRMWVDGTEFRWTKEQAAVA

SEQ ID NO: 269729 - protein, 386 aa, unidentified
MQKLNDLSRSLAPLEPDGTLIAVIEMSQSSWLVAGIVPGVERQPLKKLAADEIALLKLLHRWREEAEKAGRRIERTAVAFEAGRDGFWLARWLRTRSIEAHVIHASSVAVSREHRRAKTDRLDTELLKRAFLGWLRGERDHCKMVAIPTSKDEDAKRPSRERESLVGEQTRIVNRMKATLIRLGIRGFNPKLKKAAGRLEDLRTPEDEPIPPNTMAELRRDMDRRRLVSDQIRQIEEARLDRLKQAPDDGPHAMLRLLARVIGVGIETADMLVQEVLARNMRDRRAIARYAGLTGSPDESGTKRREKGLARSGNARVRRGMIQLAWRFLIFQKNSTLAQWFRARTENARGTRKLMIVALARKLLIALWRLVREGVVPDGVVLRPTQ

SEQ ID NO: 269730 - protein, 321 aa, unidentified
MSNQINHNIVGIDVAKDKLDIYILGKYKHKPMQVINKPKHIKRLVRELLKLGDIKMVALESTGGYELALVKELAHHNISYHVAHPNRVHYFARSKGFFAKTDKIDAHILAQYAEQSEITPDTYDESKALLQELSSRKRQIKEIISGEKNRLSHPFLSPKLKRSIRRTLKSLELELGLIDKEINDEIKASAEKQQKMTLLKTFKGVGNEIAKTLVIELPELGHLNRASIASLVGLAPKNRDSGKKIGKRFIHGGRSHIRQHMYMAALVAMRHNPVMKKTYEELIAKGKACKVALIAVARKILITLNSMLQHNRAWICEGQFV

SEQ ID NO: 269731 - protein, 428 aa, unidentified
MNAVDSIRLEGFRQLKKEIRGSKDYLIVGIDVGKHKHHAFLGTTTGKTVSRRIIVENSASGFEYLLDMVQFYQTREGIPKTVFAVEPTSVYHKPLSEFLIEHGYMVVYVTNEAIKKNRVLLDGRWDKHDTKDAANIADLVSQGKCQYYDLPDITLRDLRSLLLIRKRLLKQQHSARVRIRNNLVAQYFPELDRYWNQAETENVAIVRWCLAPRSITHLKFEDFVQMVAPQYRRITQYQRLRKIWEIAPCSIGCRAGTALELEAKIMVEGLRYTQQQIDEVEEAIKAICRSFTEYELLLTIPGFGPYISAVVLAAIGNAHRFRNASEVLRLAGLDLSAHRSGTKSATAVPVISKKGKAELRYALYQAAVVATSFNRDVRAYYHRLLEGREREKGIRTKMRVKLAAKLLIIAWTLMKKKVRFDAQHLQID

SEQ ID NO: 269732 - protein, 385 aa, unidentified
MQKLNDPSRSLTPLKPDGTLIAVIEMSLSSWLVAGIVPGIERQPLKKLEVDESTLLKLLNRWREEAQKSGHRIERIAVAFEAGRDGFWLARWLRARDIEAHIIHASSVAVSREHRRAKTDRLDTELLKRAFLGWLRGERDHCKMVAIPTIKDEDAKRPNRERESLVGEQSRIVNRMKAALVRLGIRGFNPKLKKAVERLDGLRTPEGEPIPPNTLAELRRDMARRRLVSDQIRQIEDARLERLEQAPSDGPHAMARLLARVIGVGIETADMLVQEVLSRNMRDRRAIARYAGLTGSPDESGRKRREKGLTRSGNARVRRGMIELAWRFLRFQKDVLAHWFRARTENARGTRKTMIVAVARKLLVALWRLVREGVVPDGVVLRPVS

SEQ ID NO: 269733 - protein, 348 aa, unidentified
MYYAGIDYHKRCSFVSIQDEAGKIVLERQVPHNNPLMFEEIIREVGGPVAVVYEAGLNWTWLYEVLEKIGDVKSITLANAYKVRLIAEAQIKTDKIDARKLALLLRLGVVPVCHIPNRQTRDRKEVLRQRAYWVRQRTGLRNRVHRLIGRQHGLQMPQVSDIFGKKGKEALHKAVLPDPDGMLLKQDLAVLEQLDAVIKADEEKIKAESKPDRAVEIFTSIPGVGLIIASITAAETDGIGRFPSAERYTGYSGLSPTTHSSGGHTYNGRMMWMCNKWLKWAFIEAAWVAVGCSAYFGGLYRYHRRRGKKANTAITIVARRMCRIAYQLLKENRFYEERTFSPVALVKV

SEQ ID NO: 269734 - protein, 370 aa, unidentified
MMRFAGIDIGAERHMVAVLDEQGEVLCRSSPFGEDASGYARLFELLGPSADCLVALEATGHYWRNLFVALIAKDYAVAVLNPLRTARFAEEELRRTKTDAIDALGIARFAQQKRPRAAQLPDSVTEELRELERLRERVVEDFADRLRQLHRAVDLGFPEFTRYVRTLESQLAATILSRYPTAASFRGVSVKKLARIVYDGSHKIGEELARNLIEAAEKSVGAHHSEPYRRRIKYLCEDLDVLRRRLKDLARDVERKLDDHEVGKLLMTIEGLGPLTAACLIAELGDPARFDSPGAIASYVGVIPRIRQSGKKRFTKGPAIPLGTLACANRSSWWFYKWCGVIRGCGSITNGSEPQANQEKSPSSPQCENC

SEQ ID NO: 269735 - protein, 414 aa, unidentified
MIVAEEPTGARVCGGVDWAKDDNAVCIVGAQGEALQRFMVTHDRSGLKDLVRRLLRAGVDEVGIERPDGPIVDALLAAGLTVLVIPPGQVKNLRSRYGSAGNKDDRFDAYVLADVVRTDRRRLRPLERDTVATTALRTTVRARRDMVVHRVATANQLRAHLQIVFPAAAGLFDAIDSDVSLRFLERFSTQGQADWLSPKRLGSWLASIGYSGGTDPEVLFARICAAPRGTTGADATIHVATTHAYIAVLRTLSTQIRTLAASIAEQLDVHPDAKIFTSLPRSGCVRAARLLAEIGDARGRFPTASSLACLAGVAPSTRQSGKVKAVTFRWGADKELRDALCDFAGDSRHSNPWAADLYAKARAKQHDHPHAVRILARAWVNVIWRCWQDHTVYNPADHGALQRILNQDQQPVAA

SEQ ID NO: 269736 - protein, 342 aa, unidentified
MQITTIGLDIAKNVFQVHGIDAQEKVVVKKQLRRSQVIAFFAALPPCLVGMEACATAHYWARELRKLGHEVRLMPAKDVKAYVKRNKNDAADAEAICEAVRRPTVRFVRIKSAEQQGQLMQHRTRDVLIRQRTQIINALRAHLAELGIAAAQGDAGVNELRAIVADDRDERLPIDARASVIVLAAQLEALQTLIGSIEKRIKMQHRSNETSQRVETIPGIGVLGATAIVATVADPTIFRSGRDFAAWIGLVPRQDSTGGKQKLGPISKQGDQYLRRILIVGAISVLRRALQNPGKYPWLTQLLARRPFKVVAVALANKMARTAWALMAHGGTYRAPELAEAA

SEQ ID NO: 269737 - protein, 344 aa, unidentified
MNHYAGIDVSLESSTICVVDGAGKILREAKVASEPEALLAWFRLLGIPLDRIGLEAGPLSQWLYAALREAKFAVELLETRHVRDAFKSMPVKSDRNDARGIAQLMRLGWFRPVHCKSIEAQETRAVLTARKLLQSKLRDIENSLRGVLRGFGLKVGETTERTFAGRIKELVAGHPGLEIVAQALLEAHAVLQREFGGLDKRTQKLARLHPQAKLLMTTPAVGPIVALTYASAIDDPARFRSSKATGAHFGLTPKKYQSGQTDYTGRISKIGDASVREALYQAAHVMLTKPVKNCSALKGWAMRIARRAGMRKAKVALARKLAVILHRMLADATPFNPTAKAAAT

SEQ ID NO: 269738 - protein, 385 aa, unidentified
MTATTRHFDPTARRDTLYLSLELGEDGWTLSFTSGFGKPVLRRRIRSRDRDALRREIDAMKERMGLARDCRVVSCYEAGREGFWLHRFLTAHAIENLVVDSSSIEVSRRRRRAKTDRLDGESLLDLLLRHWAGSRKKVWSVVRVPTVEQEDRRHLHRELQSAKRDRTRLTNRMKGLLANQGLTLDLKKDVPAQLAALRQWDGSALPAGLKARLAREWERVTFCTVLIERLEAERRELLRDGDDPTLEKIRQLNLLRGIGTNSAWLYGMELFGWRELRNRKQVGAIVGLVPTPYDSGQAEREQGMSKAGNRHVRAMAIEIAWGWLRFQPESELSKWYQRRFGSGSKRVRKIGIVALARKLIIELWRFLETGVVPEGAVLKADVRIR

SEQ ID NO: 269739 - protein, 413 aa, unidentified
MQKNHIEFEQVVERGCGMDVHKEILVATIQGKGIKTVTKSYSTYTSSLIKLKRWLKKHGITHIAIESTGVYWKPVFNVLGEDFEILLVNARHVKNVPGHKTDKKDSRWLAKLLLSGLLKGSFIPNQAIRELRDLTRYKTKLTNQVSAEKNRVHKILEDANLKISVVLSDIFGVTGRKFLNEIIKGKYKPETLLYMVHGSVKASKGEIKEALTGYVTCHHRFMLQTILKNISRIEETLQELEDQIAKVTEEYGDIIELLETIPGVGHDGAIGIIAEIGLDMDKFSTHKHIASWAGMCPGNNESAGKNKSGRITYGNQYLRSLLVEQGWAASRTKNTYLSSKYKSLVGRRGKKRAVIAIGHKILIAAYFIIKDKVAFNELGEDHLNNFRKDQLVKYYKKQLEKLEPNLNFDNEVA

SEQ ID NO: 269740 - protein, 342 aa, unidentified
MDHFSGLDVSVKETSVCIVDDMGKIVREVRVASEPEALLQVLSDPAYHLKRIGLEASPLSQWLFSALAEAGLPVICVETRHMRAMLKAQINKTDRNDARGIAQMMRAGLYRSVHVKTLRSQKLRMLLTHRKLLQSKAIAIDNDLRGTLRNFGLKVGVVGTVRFEARIKELVVDLPDLAVLVEPLLIVRRVLREQLSILHRRLLAIVRDDEVCRRLMTVPGVGPVVALTYRATIDVPARFRNSKAVGAVLGLTPSKYQSGEINRTGAISRCGDEMMRVMLYEAAQSMLNTNKWSWLKASAMKIAKHRGMKKAIVALARRLAVIMHRIWVDGTEFRWTREVEAT

SEQ ID NO: 269741 - protein, 413 aa, unidentified
MEVLYPRCCGLDVHKSSITACALLREQGRIRTERRRFTTMTQDLGDLVAWLLELQVTHVAIESTGVYWKPVWNILEGHFTIILANAQHVKNVPGRKTDAKDSEWIAELLQHGLLRNSYVPPEAIRDLRDLTRGRATLSQEASRIANRIQKVLEDANIKLSGVASNVLGKSGRAMLDAIVGGQLDPEQLADLALGHLRAKIPQLRLALSGKVREHHRFLLNRLLHQLRFIENEIDVLDQRLEQLGRQDPVLAAAVARWTTIPGVDRVAAWSLAAEIGVAMEQFPTAAHLASWAGLCPGNCESAGKHLSGKRRKGSPWLGRMACQCAWAAARTKNTYLSVQFRRLAAKRGKKPAIVAVAHSILVIAYYLQKKESEYHDLGSNYFDRLNADGLRRYLVRRLEALGNKVTLEAASAA

SEQ ID NO: 269742 - protein, 357 aa, unidentified
MRCIPTDAVGITLGVDTHKDFHVAVALDCLGRRLGTLSIPTTPAGYEKLMDWANGFGALEGVGIEGTGSFGVGLARSLRAEGAKVLEVDRPKRRDQYRSGKSDPIDAELAARAVLAGTATGRPKGADGEVEMIRTLRVTRRSAVKARAQAINQLKNLLITAPEGLRSELRGLSTAKLVAKVSEFRPGTNPSDVEAATKFAMRSVARRHQRLSEEISELEEQLDRLVAEAAPELVAMEGVGTDTAASLLIAAGDNPERLKDEAAFAHLCGVAPIPASSGKSVRHRLNRHGNRDANRALYVVALCRMSRDERTRTYVAKRTAEGKTKKEIIRCLKRYIAREIYRVLASLSLNKPPILAP

SEQ ID NO: 269743 - protein, 345 aa, unidentified
MNQRVPTSPCMVFCGVDVSARSLAVALIKLDRSVSQREFANSASGHKQLLSWLGKQNAKVRVSLEATGIYSLDLVLALDAGAGIEVAVLNPKLVNRFAQTLRRSKTDAADAVVLAQYSQRMPFTAWQRPGVNTLRLRAMGRYIEALVVEQASLKNRLHNAESTTATPRAVLLDLKQAQAALLRRLAKMRREARKLIQAEALLRERFALLVSIPGIAEISALQILSELVLLSPGMTVRQWVAYSGLDPVHQISGTSVHRPSHISRAGNRHLRRALYMPTLSAVRYDPHLRTFYQALRQRHKTGLQALLAVERKLLHAIYGIFKSGRPFDGKILFPNLGSEVESIAG

SEQ ID NO: 269744 - protein, 357 aa, unidentified
MKKLFIGIDFSKEKLDATIILACGMNEIGSREYECFPNNTTGYRKLCNWVKTNAWNTIAEEWLFCGEDTGSCSIGLSKWLYGKGYDIWIENAYAIKHSSGIQRVKNDKADSAIIAEYAWRQQDKVVPFEPLNESLAQLREIFLYRHKLVGQRVAMELRKEDKSQSNKSKAISFINRKSKHLIAEINKTIAECDKAIDSIIEADEELKENYAIITSIKGVARQNATCMLVYTNNFKKFGYDPRKIACYYGVAPFGKQSGTSVNTPAHTSHFANKLIKSLLGQAAHIAKIYNPEIRDYYQRLISKGKKPQVALNNVKNKLIRIIVALVRKKVPYDQNTYKYYEEREVIERKKNEKLIYC

SEQ ID NO: 269745 - protein, 388 aa, unidentified
MLLDHPSDGPAAIRTQFGAIFVSLELSRSNWLVTSLSPGKGEKMSKHSVTAGDIAELLQLFAELRRKTEARTGQIYPIITIQEAGLDGFWIHRVLEQEGIESHVVDPASIATPRRRRRAKTDRLDGETLLRALLAFKRGEPRVCAMVVAPTPEEEDRRRLCRERGTLIAERIEHVNRIKGLLFAQGIGDYQPLRRNRRARLEALRTGDGRALPSHLKAQISRELDRLELLLEQIAQVEAEQDALLEAATNATAANAIPEPVAMLLALKGIGANFAAVLWLEAFYRHFANRRQLAAYGGLAATPWRSGGIEHEQGVSKAGNPRLRTTMIQLAWLWIRHQPQSALTRWFKAQSQRGRKSAIVALARKLLVALWKYVAHGVVIEGAVMKSA

SEQ ID NO: 269746 - protein, 401 aa, unidentified
MYNAVGIDVSKGKSTVAVLQPGGTVIRKPFDVSHTSHNLNELTDYLDTLDGDTRIVMECTGRYHEPVLKALSQAGLFVSVVNPHLIKNFGNNSLRKVKSDPADAKKIARYTLDNWAELRQYSDMDNTRTQLKTLNSQFSFFMKQKVAAKANLIALLDNTYPGVNKLFDSPTREDGSEKWVDYAYSFWHVDCVRKTGLKAFTERYRAFCKKHHYIFQPDKPEKLFNAAKELMAVFPKEKTYKLLIQQSIQQLNLASEHVERLRREMNELASTLPEYSTVMGIYGVGKTYGPQLIAEIGDVSRFTHREALTAFAGVDPGVDESGQHKSKSNRSSKVGSARLRKTLFQIMTTLLQNAPADDPVYRFLDKKRSQGKPYYVYMTAGANKFLRIYYGKVKECLRNLE

SEQ ID NO: 269747 - protein, 322 aa, unidentified
MQQESSSQPVAGIDVSKSKLDCFIDVIDKSFSVLNDQRGIAELIEQLRAANVRLVLIEATGRYHRRCAAELLDVGIEVAVVNPQRAREFARSMGKLEKTDHIDACILAAFARASNAHRRLVKPSANQAQIDDLVSRRRALVQMRIAEKNRLHDDLPRLARNQGNKLLRLIEQQIEDLDRAIARLIESDDDWQNKSNLISSVPGVGQSSAHQLIADLPELGKLNRQQIAKLVGVAPLNCDSGQHRGQRRIAGGRGPVRTTLYMAAFNAIHYCDRFRGYAARLKQAGKPFKVIMTACMRKLLITLNQMIKTNTAFNTSLTSSIA

SEQ ID NO: 269748 - protein, 389 aa, unidentified
MSQFFDASRSLTALEQDSTIIASIEMSQSKWLVAAVVPGVERQPLKKLNADEEALLKLLHRWRHEAGLAGRQIKRIVVAYEAGRDGFWLARWLRARDVEAYVIHPTSVAVSREHRRAKTDRLDTELLKRSFLGWLRGEKRHCSMVAIPTIEEEDARRPNRERGNLVTEQTRIVNQIKAILTRFGIRAFRSTLREVEEKLERVRTAEGTPLPENTRAELRRHLARLRVVREQIRAIEQERLRKLAATPAGEKGPHVMVRLIARLLGVGVETADMLVNEIFSRHLRDRKAVARYAGLTGSPDESGRRRRERGLARAGNARVRCGMIQLAWRFLRFQKDSALAQWFHARTADGRGSTRKTMIVALARKLLIALWRLVTTGEMPQGVVLRPAS

SEQ ID NO: 269749 - protein, 342 aa, unidentified
MEKIATVGLDIAKSVFQVHGVDASGELVVRKRLSRARVIPYFAKLPRCLVGIEACSTSHHWARELIALGHDVRLMPAQYVKPYVKRGKNDASDAEAICEAVTRPTMRFVAVKTPEQQSVMMLHRVRLMLNRQRTQLSNATRAHMSEFGIVAPVGRIGLERLLAIIADKDDESIPPDARICLEMLGAQLTVVKEQILENDRRIRASARDTEVGRRLMEIPGVGPLLASAFVASVADPQAFKTGRDLAAWIGFVPPQNSSGGKERLGGISRAANQYLRQMLVVGAMAATRHAERHGTKRAWLIELMKRRAKKVAAVALANKTARMVWALMTNGEHYREPQVAHA

SEQ ID NO: 269750 - protein, 314 aa, unidentified
MSNKVVMGIDVSKSRLDCFGLPLEQAWSCDNGPGGVERLVCRVRELGCELALMEATGGYETQAATALAAAGLRVAVVNPRQVRHFAKAMNKLAKTDRIDARVLAEFALSINPQVRPLPDEGTRELSDLLARRSQLVTMRTQEKNRMLQAAPALRAGIKTHIKWLDVEITKLEVDLTAKLRASEAWCDKRDLLLSVPGVGSTTTLALLAELPELGQLNRQRIAALVGVAPLNDDSGKRQGRRFTWGGRAAIRSVLYMAALSAMRHNPVIRVFYQRLRANGKPFKVAIVACMRKLLTILNAMVKQNKSWQPTSQLA

SEQ ID NO: 269751 - protein, 400 aa, unidentified
MLSIGIDVSKGKSTVCGMKPGGEIVYTPFEIQHTREGMSELVSLLRGSGEEVRAVLESTGSYHCPVVAALLENGIFVSVVNSLRMKRFCSQSIRKVKTDRIDAMQIALYGLAYWQELQPTKLPEDTYRELQLLARQYYQMTSMLIKAKVDFNAICDQVLPGMQELMNDHAGRHKLSDFVLRYRHTTHILEMGETRFRKDYCKWAEKKGYRNCERMAALIFATAQNGIPVLPNAPSTQIVITEAIRVLHTVEASRDAILTQMQALAKTLPEYSLVREMPCIGDTLAPRLIAEIGDVRRFHSKRALIAYAGIDAPPYQSGKFCANNRHISKRGNRYLRKTGYEVMQSYVMHKPANDPIFTFIEKKRGEGKSGKLAMVAGLNKFLRVYYGKVTELYRSLPAIE

SEQ ID NO: 269752 - protein, 422 aa, unidentified
MIPAVIERCAGIDVGRKFIEVCVMIGEAQGVPTEQKRSFSTLNEDLENLRHWLHNNGCTHVAMESTGSYWRPIYNVLDDGQIEVILANSQHVKNLRGHKTDRNDARWLAHLLRHGMIRASYIPDRATRELRDLTRRRKQMVGCAVDERNRVQRVLQEANVQVGAVLSDLFGESGLKMLEGLMNPDATPEEIADLAVKQARKKIPVLRKALEGHRMTEHHRTLIRHCMEHLAFLEEEIADLDREAAKHIKADTALHTATQLAQSVPGIRETAAAAIIAEIGPDMKQFPNAGKLSSWIGTCPGNNITGGKRKSGQTRKGNPWARRVLVECAWSASRKRDSETKRFYERMRPRLKHKPALVATAHLLTVKLHDVLLTAKPYAENPQSQLTASQANRLVRHHTRRIRHLGRWLASHKTRCAEKTET

SEQ ID NO: 269753 - protein, 372 aa, unidentified
MAKSIRYVGLDVHAETIAVAIAERRGEVRSMGTILNRAESVRKLVKRLEPISTVRVCYEAGPTGYALYWQLAKLGVKCEVVAPTLVPTKAGDRVKTDRRDAEKLARSYRAGDLTAVWVPDAAHEALRDVVRAREAAIKDERRAKHRLAKFLLRHGLRPPEGVKAWTTRFREWLDSVRFDYGAQNATLLDYRTEVERASDRIARLDKAIDEAVQGAPAQMKAVIDALQALRGVAKVTATTLVCEIGNFSRFTRAKQLMGYGGLVPSEYSSGASTRRGSITKTGNAHMRRVLVEAAWNYRHRPKLCGKQKRRQDLVSERVKDISWKAQQRLHARFWQLTAKGKVPGKAVTAVARELVGFIWAVGVQAEREAANA

SEQ ID NO: 269754 - protein, 410 aa, unidentified
MLDFKKLVFVGLDPHKSQHTGVMIDHWNHVLWSAQIPNLPSEFPAFLDQVDAATPKGFIAVFGIEDTGGLGRSLAQWLVAQDRLVKGVNPILSDERRNKRPHSDKNDTQDARSVARVLTEDFDTLPTVQEDAHFQALREGTRRRDQLVKDRTRCKNQLHGLLHTHYPDYKAFFSDPFGKTALAFWHAYPHPSELRHIGTTRLIRFLRKQARNMSTGRAELILQHVDKEKPVAADDAIRITVVRQLVEHLQQLGEHIATIEALLAKEVATVEAHLTTLHGVSNVTAAKIGGRIGPPDRFRSGDQIARHAGIAPQERTSDRRGRVRRSKSGDRQLNAAFHQIALNQICVTRDGQPRCPIAYHYYHRKIAEGKSKLSALTCLKRRLCDIVFAMLRDRSVYQPPDLAALRKPAA

SEQ ID NO: 269755 - protein, 381 aa, unidentified
MQGEWVAAGPLDPHWYGFLLLPETVFRNLGRSLQQGYGDKRRILDMREDNVISIDLAKNFVHVLVMSPKGVEKFNSRVASARLFAVVSKWRPKRVLMEACSSAHHWGRRFQAEGIEVFLYPPKAVAQLRQGEKNDANDALAIYETHFRPKVKAVPVKSEAHQYLQLYVRRRESLIHSCTEQINSMRGYLTEFGYSFGLGKSQLRKGVELLLGSEQLDERLREFLQADFSKLIQLYEQRKWYDQKLKEICRKDKVCQEFVKKGGVGPVTAVALRATIVDPRVFRNGRYFSAYLGLVPRQHSTGGKSRLGRITKKGNCYLRQLLIHGGRSFVWSCANKTDEKSLWATRKKKEIGFNKTCVAVANKNARQLWQIIAAHPEFKLA

SEQ ID NO: 269756 - protein, 376 aa, unidentified
MTKIIRIGVDTSKSVFVLHGVDAAERVVLRKRLRRRQVLELFAQLEPTKVGLEACGAAHYWARELQGLGHEVVLLPPQYVKPYVKRNKNDAADAEAICEAMSRPTMRFVPVKTAEQQAALMLVGTRDALVRRRTQLTNAIRGYAAEFGLIAAKGLDKIEPLLARIAAHAPLPGLAQELFAAHAKEHVRLQAQIREIEAKLRAWHKHNELSRRLAEVPGIGPIGATLAVMKVPNPKAFRCGRDFSAWIGLTPKDHSTAGKTRLGVITRAGDEALRSALVAGATAVIQHVRQGKGHPSPWLIELVRRKPAKLAAVALANKNARIAWKLMVSTERYNPAHSRAVAASGGRGPALRGGSAPRPPLAPHDKSREITATTRA

SEQ ID NO: 269757 - protein, 422 aa, unidentified
MGKTQRRCIGLDVHRDFAQVAIWQGGQVRQAGTFATTPEGVREFAAGLGPADEVALEATGNTWAIAALLASHAGRVVVSNPVKTRAIAEAKVKTDKVDAAILAQLLAADYLPAVWQPDAETSALRRQVLRRAHVVRQRTRLKNQVHAILARNLVPRCPAADMFGIKGRAWLAAQDLPPDEQAAAAALLRQLDFHAQELALIDRDLGQAALSRPEVLRLMTIPGVDATVALSIVAAVGDFTRFRSPERLVSYLGLNPKVRQSGGQPASHGRITKAGPAHARGMLVEAAWSASKAPGPLRAFYQRVRTRRGMQVAAVATARKLTVLCWHLIIKGEDYAFALPSLIAHKQRKLELRAGAPPARGRKGQAARYSLAAVRAAERDLAAQGEAAYRTMVAAWQPARPARKKATGAAASTGTRLIKPAG

SEQ ID NO: 269758 - protein, 388 aa, unidentified
MQVAADRRQTPTAIRTDLGAIFVSLELSRSTWLITSLSPAGGEKMSKHSMRSGDVPALLGRFAQLTEKAQARTGQRFPIIVMQEAGLDGFWIHRVLQKEGIESHIVDPASIATSRRRRRAKTDKIDGESLVRALLAYKRGEPRVCAMVKVPKPEEEDRRRLCRERKTLTAERVSHINRIKGLLFSQGITGYEPRRRDRRERLEELQTGDGRALPEHLKAQVRRELDRLELLLEQIKAVEAERDVLLAAEHAATPALAAMLLEVKGIGPEFAAILWSEGLFRHFDNRRQVAAYAGLAPTPWQSGSVDREQGVSKSGNPRLRTTLIQLAWLWVRHQPHSALTQWFEERVRRNGGRLRKTAIVALARKLLVALWKYVTAGVVIEGAAMKTT

SEQ ID NO: 269759 - protein, 455 aa, unidentified
MKNKSKGKSKSKKFVTIPVIHEHAAGIDVGSRSHYAAVGQQNEDVRQFGVYDCDLRECALWLKSHEVETVAMESTGSYWQNLYDVLIEFGFEVLLVNGNQTKHRDKTDVKDCRNIQFLHSVGLLSSSFLPDMETEELRTLHRHRSFLLKQAAKYICKMQKCLRLMNFRLDIVLSDITGLSGQSIIKAIISGETDAHALAAKTNYRVKKSKEEIARALSYNGRTDYMYELADSFDIYQSYVKKMEACDKKIEELMRNHIEKLNKPKTEPPVSNVRRKLGKNAPNIPLRTLSWQWNGEVDLMAIKGVSHSTILAINSEVGLSIDKFPTAKAFTSWLRLSPNNRITGGKIISSRVRKGSNRLASALRQSAENIGKQKDAPLFPFFQRILYRHGRCAAIIATARKLAVIIWNMLSKKQVYHPYDTTKIESQIRIKQIKKINKLVQIFNVNTSEIKFAYA

SEQ ID NO: 269760 - protein, 304 aa, unidentified
MMYVGLDVSQKSTAICVVNERGQRQWRGTCPSDPHVLASQLKRHAGADARIGIETGAMTPWLVHGLRQAGLTVDCLDARRVKAALQMRLNKTDQNDAEGLAQVMRTGWYRPVHVKSLDAHRARSLLGARAQLVGMRTRLTNIIRGILKTSGMLPGSGRGLRFDRRVEELIQDDQEVCMVVRPLLATLRHVGEQITTFDKAVLRQVRADPTCRLLMSVPGNGALSSLVYVSTVEDPKRFSRSRAVGAHLRLTPRRYQSGDIDRSGRISRCGDSLARTLMYEAAIVILHRVKRASQLSEWAQAIAQ

SEQ ID NO: 269761 - protein, 323 aa, unidentified
MQLATIGLDLAKNVFQVHGIPSEGKAVVRRTLRRREVLDFFARIEPCLVGMEACGTAHYWAREIARFGHDVRLMPPAYVKPYVKRNKNDATDAEAICEAVSRPTMRFVPVKTAEQQSVLMLHRTRSLLVRQRTMIANAIRGHLAEFGIVAAQGVGNVVALIERLISAPNQDEPLPDLVPTLLAPLLATMNDLRQRIKMLEVEIVKLHRANDVSRRLETIPGFGCITSTAIAAAVPDPSIFRSGREFAAWLGLTPRQNSSGGKERLGGITKMGDGYIRSLLVNGATAVIRFAKEEGSAKTIWIRRMLARKPARMEAGHRKQFCK

SEQ ID NO: 269762 - protein, 319 aa, unidentified
MEKKIYVGIDVSKDTLDVAVHGDKQRWSFPNNETGITKAVSKFKELSPELVVLEATGGFEVFLATELVVAKIPTAVVNPRQIRDFAKSVGMLAKTDILDARIIARFAATVQPNPHPMPDIEAQELGALTARRRQIINMITAEKNRLNTAGKTVKPGISAHINWLEKELNEINRNIKQKVKDSPIWREKDELLQSVPGVGTNLSAIILAELPELGTLNRKQIAALVGVAPLNRDSGTLRGKRTTWGGRATVRTALYMATLVATRYNPVIRRFYERLREAGKATKVALTACMRKLLTILNAMLKYQTSWNFGVSQIFGPCH

SEQ ID NO: 269763 - protein, 331 aa, unidentified
MFPVGIDVSKNTLDLCMLYDGIKGRIKTRNIQNNRHSVENILRWLRLQHCSAKDVHVVMEATGVYHEQLATELHDAGFRVSLANPHRSREFARGMGIMTKTDKVDAYMLACYAFLKKPHRWEPPAPEIRYLGALLRRRDVLLGDALREENRLEKYLSTDTPADIISSCRRMAQLLREEISNIERQIKAHIKASPALRRDYTLLTSIKSVGPQLGMHMLIVLRSHNFVSAEQAAAFLGVVPIEKRSGTSVRRRPRMSKIGPPQLRAKLYMSALCGKIYNKRMRNIYDEMCLRGKPKMVAIGALMRKLVHWCYGVLKTGTVFNDEGLKQVLST

SEQ ID NO: 269764 - protein, 311 aa, unidentified
MSAAEKELSHKSFDNTPEGIQSLLDWIAGYHLSLSKLLFCAENMGSYVTELSVSSVSMGFSLALVCPLTIKKSMGLQRGKNDRIDAKRIANYAVLHYRKLELYKLPNKDLVRLRGWIIIRDNLVKQKVSNIKLLETFSQMAKLADVTESISFLEEQLKSIKEKILEVEEDMEQLIAASTSLYTNYLLLRSIKGIGIINAIVLLCVTDNFQRFDNPRKFACYCGVAPFEHTSGISIRGKTQTSSLANKEVKVYLTRAAITAISWDPQMKAYYKRKIAEGKHKASVINAVRAKIIARSFAVIRRQTPFVTLAV

SEQ ID NO: 269765 - protein, 355 aa, unidentified
MSQEKYIGMDVHQATVSAAVRDRNGNLLMECILETKADTLLEFVQGLHGTLSLAFEEGTLAAWLHDLLKPHVNRVVVCDSRKAALLRDGNKNDRIDARHLSELLRTNQLKPVYHGEHGLRTLKELGRSYLTVSKEMTRTMNRIKSLYRSWAIPCAGTTVYAPRHRRESLAKIAEPGARVRAEHLYEQLDHLQPIRVRARRELLQESNKHDAVKRLRQIPSIGQIRAALLVALLQTPHRFRSKRQIWAYSGFAIETHDSGEYRYVRGKLQRNRERITVRGLNRNHNPDLKNIFKGAAISASSRPGPLQDFYETRVAMGMRPTMARLTLARKIAAITLTLWKKGANFDPQQLSRQAA

SEQ ID NO: 269766 - protein, 352 aa, unidentified
MITIGVDAHKHVHVALALDEAGREMDRWRGPNSPAGWREVSSWASQLSGDTQWGIEGAWGYGRGLAQHLVHEGEAVFEVNPRWTALGRRRARRPGKSDNLDARAVALVVRQEAPALPKVSSEDDTAVLDLLSNERDQVLSEATRIRNQIHALLVHLDPEYDRRLPALKSKAGLAALMKYSCHSHEPLPIERAAAVRRLAERLQLALAQAGDLATRIRELAQPRFERLTELCGVNLLTAGTLAGILGPGRRFRTDAQLAAYAGVAPLEASSAGLIRHRLNRAGNRRLNAILYRITLTQAHHSAQARAYLDRRVAEGKSRREGMRALKRFVVRAIWRLWLQCNSAPALPLATAA

SEQ ID NO: 269767 - protein, 472 aa, unidentified
MQFIGGGSQQNYVERTRGLDPSRCLAAGIDVGKYEALCLVADHHGEIVGEPLTFPLTEPGVRALEALFASAATARDAVRVRVGVETAGHYHRTVVARLVAAGHDVVELNPAHVKAARTQQGSRRLKTDLRDAAAIVDLVIRGSGRAPQQRTDALVEQLVWVGVRRRRVLARTALSNQLLGTLDLIFPGLDGCFDDLLGSKVGPVLLHDLADPGRLHRLGVAGLQAFTARRGVRLQRRKAEQLHQAAADALRLPAAERSCRAMVLAADLAVLDLLNNQIDQAEKHLAAVLPDTPAGVLTSLPGVGVVRASNYGAALGDPARFANADRAYRASGLVPASYESAGRTRPGQGISREGNAELRTAIIELGRGLAQRDPDFARYRASVGARMKPLMAAIAVGHRAHRLAFALMRSGEPYDPARLVESVATNGERRTMKAGRPVKKNSREAACRHDVTHPPVTTVPRSSPARKTLTRT

SEQ ID NO: 269768 - protein, 403 aa, unidentified
MYVGIDWASRAHELCVVDEQGTAVARFGFAHSERGISDALQRLAKLAEPAVLPVAIERPDGLLVDRLLEAGHPVVPIHANAFHAARPRWESAGSKSDPGDAYRLADLLRTDLHRLRPLRPLDLPTRELQALIRLRDDHVAARVAATNQLAALLGQHWPGAATIFGRLDSEIALRFLERYPTPESSNRLGEARLAGFLRRHSYCDRRTPAELLSRLRQAPRPAHPLDPEIVGELVRAQARLVRTLLASIADLDRAIAAALDQHAKAQLLRPLPRVGTISLGQLVADTGPLLERTTSADQAAALCGAAPLTKHSGQHHSVCFRHATNTKARKALTLYADNSRHASPWAERIYRDARARGCRHAHTVRILARAWPRVIRTSWNTNTPYDPARRRGHDPHLTTMTLT

SEQ ID NO: 269769 - protein, 338 aa, unidentified
MTIVMGLDQHRAQITAEWIDTETGEVSRQRVAPAHRAGVRRFAERFRGRELEVALEATTGWRFVVEEFGAVGARVHLAEPAETAARRGTKKRAKSDRADARHLRELLMVGRLPESWIPPEHLLDLRARVRLRHTLVDARREWQQRIQAVLYHHGAPPRSWLLGAESRAWLEALKLPRAAREQVTIALTLIDAHDAQLAPLDQELRNYAKRQPGCRALMRHYGIGPLTSITILAELGDARRFSSSREAVRYAGIDITVHQSDARRTPGRLSRQGPSALRWALFEAAQCARRPASPDHHYYLQTAERLGANRACLAVSRKLLKRSYHTLRELGEEAVQPA

SEQ ID NO: 269770 - protein, 345 aa, unidentified
MNYFAGLDVSLKLTAICVVDGDGNVVREGVADTQPEMLVSWLKDTGLAFSRVGLEAGQCSSWLHKGLALAGFPVVCVETRHAKGVMQAQSVKTDRNDARALAQMMRTGWFKAVHIKGEDSQKLRTLMGSRRCLLDKQRDLDNHIRASLRVFGFKVGLIGQSRFEERVRELIAGDGDLELGIVALLDARRALKGQVRLLTRMIEGFARKDEICRRLMTAPGVGPLTALAFKTAIDDPARFAKSRNVAVHLGLTPRKYASGEVDYNGSIIRCGDDFVRKHLYEAAHSLLVNTKRWFALKAWGVRLAKRSSFKNACVAVARKLAVILHRMWIDGTDFRWGREEQAAAA

SEQ ID NO: 269771 - protein, 343 aa, unidentified
MQIRSVGIDLGKTTFHLVALGTSGKVLVKKKFSQKQLLAFTANMQTSLIGLEACSGAHFLGRALRQQGHDVRLIAAQFVKPFVKSNKNDYVDAEAIAEAVERKNMRFVPIKTDDQLDLQAIHRVRDRLVSRRTAVINQIRAFLLERGMVFAQKPAKLKAAMADVLENAENALTPMMRNLIGMLWDEWKTVEQQIDELTDRLEQIAASDAGCCRIRQIPGIGPIVATAIVAAIGNGAAFRKGRDFAAWLGLVPRQYSTGGKAKLLGISKRGNIYLRKVLIHGARAAAMRIKRDRFTIGAWMNALEARAPRNVLVVAMANKLARIAWAVLSTGEDYRPAASATAA

SEQ ID NO: 269772 - protein, 456 aa, unidentified
MRKEQRTVKELNLECIEPNAAGIDVGAREIYVAVAGDRDAEPVRCFSTFTEDLRALAVWLKQCGITTAAMESTGVYWIPLYEVLEEAGLQVCLVNSRHVRHVPGRKSDVSDCQWLQYLHSVGLLRASFRPEAAICALRALSRHRSNLVEAAAVHVQHMQKALTQMNLQIHHVLSDITGKSGLAIIDAILSGKRDPEQLARLADGRIHAERETVIKSLVGNYRSEHLFTLRQSLEAYRHYQKMLVDCDREIEQHMSRLPNHPNSGHPPASLGSSPASKRRKNQFHMDMGKELYRVLGTDLTLVPGLSALTVHTLVTEIGTDLARFPTVAAFTSWLALCPGSKKSGGKVLSSRTRKSNSRLSNALRLAAQALHRSRSYLGAYYRRMRARLGAPQAITAAAHKLARIVYHLISTRTAYNESVFAQEEQKQSFRNQHRLRKQALALGFHLVPITLPEVVH

SEQ ID NO: 269773 - protein, 421 aa, unidentified
MTQPYGNTGGVALVAIDIAKKRNAVLIQLPDGARKKLTVTNDLQGYRELGQYLKKLKMPCKVGFEATGNYHRTLAYYLREQGFDLELISSVAASRTREAMFNSWDKNDPKDAQVILYMLQTGLTQTYHDPLVHQINDIQELSKTYCQVSLQKTRVQHSILTHYLPLYFPEAAKYFHASRAEWFTSLLLTFPNPASVLKHSQEGFIKAAQAVSGRKVNKAAWLKDFYETARESIGLPVPEDSEAIRMFRLVLQEHQDLCRMRRAIEARAELYLKDNADFLRLRTIPGIGPVIALIILAEAGDLRRFSHYKKFLKYCGLNLSTQQSGAFRGLSKLSKYGNSRLRYAFWIAGTSAIRMRENTFRRKYENFIKSDPLNPDLKRKAYTAVAAKIARVAYGLVKSGHDYRCYHESSVPSGIILSTGR

SEQ ID NO: 269774 - protein, 332 aa, unidentified
MKLYGGIDLHSNNSVISIKDEKGEIKARKKLPNDLCLIFQFLAAFKTNLVGLVVESTYNWYWLVDALMEAGFRVHLANTTAIQQYSGLKYADDNSDAYWLAEMLRLGILPEGYIYPKEERTVRDLMRKRMQLVQQSTKNLLSIQGIYTRHLNNRISNNKVKQLTEKQIEKDFSFSNIILAAQSNLVVMNCLKKQIKNIETSLVQQVKLRPEFKQLKSIDGFGNILSLTIMLETGSLSRFDKVGSYASYCRCVSGARYSNGKKKGKTNKKNGNKYLAGLLLKPPILLFDITKRLNVIIRKNQLKPIQPLQLKRSHTNWQELVFMFYVIKWSLM

SEQ ID NO: 269775 - protein, 402 aa, unidentified
MSATDLAWIGVDVGKVAHHVTAVDGDGRVLWSRQVTNEQAAIETVIARGGDTATDVRWAVDLTSASAALLLALLVAAGQTAIYVPGSVVNRMSGAFAGEGKTDAKDARIIAETARLRRDLSQINAPDELVAELSMLVGHRADLMADWVRGVNRLREMLTRVCPTLERALDYSTRSALILVAGYCTPAAIRAAGEAGLSQWLHAQKAHRPSIPGIVTKVLTAAQAQTVALPGEATSARLIQNLAKRLLELDREIKDLDKLLTARFRAHPQAAIIESMPGMGPILGAEFLAITGGDLAAFGTPARLATYAGLAPVPNDSGRRTGVLHRPRRYHRRLRHVFYMAAFSSLKTPGPSRAFYDRKRAERQRHTKAMIALSRRLVDVLWALLRDNRVFTQAAPLSATAA

SEQ ID NO: 269776 - protein, 332 aa, unidentified
MLYKNYVGIDVSKLSLDVFIREASLHRKFRNDSSGFALLVQWLKGHVTCSWQSLLICFEHTGLYSLSLAQFLEQEGITYAMVPPLEIKRSLGITRGKNDIVDAKRIAEFAYRFSDKILPTKLPSKDIQKLHFLLTMRDKMMVNIAGYTMAQKELFRVVSVSELPTIALSYQNTLITLKEEVRRIEREIRSTISSNNTLKTTFELITTVKGIGFIVASFLIVYTCNFTRFKDWRKFACYSGIAPFEHQSGTSVHGRTQVSAIANQQVKKLLHLAAMAAIHFDSELREYYMRRQAEGKSKMATINIVRNKLLARVFAIVKRGTPFVDIHRYAST

SEQ ID NO: 269777 - protein, 350 aa, unidentified
MNITHVGADLAKSVFSVCAMGPEGRVVERRDLKRDGFLAWLQRLPQGCIVGMEACGAAHHWARQLSLLCLVPKIMPAEFVEPHRKSRSMKNDRNDAEAIVLAVRDATMRFVPVKTLEQQARLSRHRMREGWKEERTALMNRMRGLLTEFGVVFPRSSTQLRKGLAEAMHDARVPEAVRELVAWAREDLERIEQRIAACDRAIGLACRADATAKRLQELMGVGPVTADAVIATAGNARDFRNGRQFAAWLGLVPRQFSSGGKARLGGITRRGDAYVRTLLVQGAKSSLKQALKASPENATRLQRWACQLHGRAGYHKTLVAIANKNARVLWALLARDEHYNPDAWKDYAKG

SEQ ID NO: 269778 - protein, 378 aa, unidentified
MLVTRLTHKAVTRRGRGIPTTNPLGGDPVSVIYVGIDVGKRKHEASILDETGKQIGGSLVFNNSHQGVEKLLHWVASLGASEVIYGLEATGHYWLPLYTFLTAASCTVKVINPIQSDSLRNLYIRVTKNDRKDSFLVAEVLRFGRFTETKIPDEPLVQLRELSRLRVEFMQTVGDIKRRILGILDRIFPEFPGCFGNAFGQAALQVLKTYPDPEQLANADLSELAALLKKYSNGRLSLDKAQQLKERAANSFGVRYGFDAFTLELRLLLEQLEFITGQVKQLDEAIINLMQEHQLILSVPGVGPVLGAAILGEIGDISRFENAKKLRAYAGLDATVYQSGTFEGSRAHLSKRGSPYLRRALWIAAGTARLRDPALKAY

SEQ ID NO: 269779 - protein, 356 aa, unidentified
MSEKLNSKIAVIGIDIGKNSFHIVGQDRRGALVLRQKWSRGQVEARLANLPPCLIGMEACTGAHHLSRKLQALGHDARLMPAKYVRPYCKGDKNDYRDAEAIAEAVQRPTMKFVATKTGDQLDLQALHRVRERLVSQRTGIINQIRAFLLERGIAVRQGLRFLRAELPDILAKRTDVLSPRMLRIVEDLSRDWRRLDERIEGLSSEIEALARQDQGCARLMSVPGIGPLISTAIVAAIGTGDPFSKGRDFGAWLGLVPKQMSTGDRTILGNISRRGNRYLRTLFVQAAWVVLVKVGPKQWERYGLKSWIEAAKKRLHHNVLAIALANKLARIAWAVLHNGRTFEHVKTNATASRSA

SEQ ID NO: 269780 - protein, 310 aa, unidentified
MTPTPVYLGLDVAKAFLAGFLAGQHFEIPNSPAGYAELRTRIAAHPAPVQVVCEATGGYERPVVAALRQANVAVSVLHPTRARSLMRGLGHLAKNDCLDAQALAQIGALLAPPPTVAPPPGVTELAALVERRDQLAELIRREKQHRETTASQVLLRDIDQNLAALQKRLAKGEALIAAHLAAHEELAQKAARLQQAPGVGFVGAVTLLARLPELGCGSKARISSLAGLAPRDHDSGSFRGLRHVHGGRPKVRRILYLCALSAVRHYPPLKTFYTRLRLAGKPPKLALTAAARKLLTHLHAALKNPQFALA

SEQ ID NO: 269781 - protein, 420 aa, unidentified
MTEEREEFRVCVGIDWASEAHQVCVLAASGQVLSERQVAHDAQALQGLATALIERAGGQAAAVAVAIEVPHGAVVETLLERGLAIFALNPKQLDRFRDRFTVAGAKDDRRDAHVLADAVRTDRRAFTRVRLPAAIVLELREETRIHDELRTEWSRTTNRWRQQLARFYPQLLEVGEVEEPWLWALYELAPTPAGAARLRRARLTQLLRTHRIRRHTADSVLAVLRTAALTVAPGTVAAAQRHIGLLLEQVRLLHRQRQECERRLATLLTREELAVRSSTEGPRREHSDLEILLSLPGAGNLVVATMLAEAAEALAARDYTTLRTRSGVAPVTRRSGTRLTVLMRYACNEPLRNACPYWAQGAIRWDPRSQQHYARLRAKGHSHGRALRGVADRLQAMLIAMLHTRTLYDPARRGVHYAAA

SEQ ID NO: 269782 - protein, 342 aa, unidentified
MTEHVEARTFVGVDAHSGHCNLKGVSRQGKVRLDVEVPTTMKDLRAAVTDLRGPVWAMLEASAIAPFVKWALETRVDRVVVCETRENRWIAKSEDKSDPRDAERLARLLRMGEFKEVHVPKRDRQELRELVYLCDKAVRDVSRLKNRLKAKFRAHGVPVKGETVYSMKGRQAWLDQVKRPTVRFMIESIYSAMDAAEAVRDGLLRRLRGMLSRNRDYRRVRSIPGVGPVTASLMVSIIDDPWRFPEKRKLWTYAGLGVSMPWTGSPEKARARGSKTGNRLLKYAAMTAAKCAVAGDNPLGRQYSRMKDRGMEPAMALKTIARKILATALAIWKAGTKYRAVG

SEQ ID NO: 269783 - protein, 343 aa, unidentified
MQITTIGLDLAKHWFQVHGVDANGQVVVRRRLWRSGVIAYFRSLEPCLVSIEACATAHHWRRELIALGHTVKLMPPAYVKAYVKRNKNDAADAEAICEAVTRPSMRFVPIKDAEQQSVLMLHRARSLLVRQRTMLVNALRAHMAEFGIVAPQGLRHVEMLTKTITHQQERLPELARSILQTIADQLNGTMARIQEIEGRLVRWHRQSRVSRLVATVPGVGIMGASAIAATVPNPSLFRSGREFAAWLGMTPRQNSSGGKERLGRTSKRGNKYIRSLLTAGAVAVLRHARNRPTRDGAWVRALLARKPTKVAAVALANKTARIVWAVMVREAGYQPHEVFRQPA

SEQ ID NO: 269784 - protein, 363 aa, unidentified
MKIIGCDFHPSFQQIAMVDLETGEETQLRLSHGNGEAKRFYESLSGPARVGVESSGNMRWFQRLLAGLGVELLIGDATAIQASNPRKQQTDKRDAQHILKLLLEKRFPAIWVPSMEEVDLRQLLKHRHTLVQMRTRVKNQLQHIAMNEGFQKKRKLWTEEGMEFLRHLELGSWTMRRRDDLLEMLGELNRHIRELSRAAEDQAEKQTRAWLLMSHPGVGPILALATVLTLGTVERFQSGKRVASYVGLIPREASSGMRRWLGAISKQGNSFMRFLLVQAGIVAARKDAELGRFYKRLAHKKHHGVAKVAVARKLLVRLYWMLRTNTPYPEVVVRMQGSSSHPVARKAQAEVLSGRPASRGKKQ

SEQ ID NO: 269785 - protein, 480 aa, unidentified
MNVKARRTKKQVNVENQAIKLLAKEELGIKIEVIKKELRSYTWRDLETNGKFAKNDKLSFITDDMLIAGCDIGSETHYIRAIDVRGRELSSRAFEFSNTSEGFANAKAWVLALAAKNDKKQIVLGLEPTGHYWFALAAWMISNGISVVQVNPYAVKQSKEIEDNSQLKDDRKDPKLIANLVKDGNYGMPYLPEKVYADMRRLSMFRDQLTEDRIRNINRLHRELKIYFPEYMDAFGKIDGAFTLEVLKVSAIPSDITALGAEGIKNIWHNEKLRGRGYSRANEIVSYAEKSVGLTDGIDAGREAVKWYAEQILKLDEQLAVIESTLHEKCREIPYAENILEIRGVGENILAGILAEMGDISRFDDVKEIQKLSGMGLVACSSGKHKGQTKISHRGRKRLRYWLFQAAKSAVSHADEFKQLHEYYTTRTNNPLKKMQSLVVIACKILRVIYTILKTGTTYDPQKLLKDIKRPTASQAPMAA

SEQ ID NO: 269786 - protein, 344 aa, unidentified
MSKHSIRAGDVAGLLVRLAQLKEKARGRTGRDFPIIAIQEAGLDGFWIHRVLQSEGIESHVVDAASILTSRRRRRAKTDGIDGETLVRTLLAYKRGEPRVCAMVKAPTPEEEDRRRICRERKTLVGERVEHVNRIKGLLFAQGVSDYEPLKRNRRARLEELKTGDGRPLPAHLKAQISRELDRLELVLPQLKAVEAERDALLKPVSEGCPAPAAMLAQLKGMGPEFTAILWSEGLFRSFSNRRQLAAYAGLAPTPWQSGSVAHEQGVSKAGNPRLRTTMIQLAWLWLRHQPTSALSVWFQERVQSNGGKMRKTMIVALARKLLVALWKYSTSGVVIEGAVMKTI

SEQ ID NO: 269787 - protein, 419 aa, unidentified
MNRIETKKQRIVNAKTLIVAIDIGQVTPMGYCRCPDGSDTKSFTFSNNAEGFKKLWDRICSMKIAHHLEEVVVGYESTGAYGEPLVHYLRQKPVKLVQVNPMHTKRMKDVEDNSPGKTDRKDPRVIADLMMLGRALSVVVPEGAAAELRRLSQARERKLRRRTASYNQLHSLVFLLFPEFLQVMKDLKTQSAQYLLKHFPTPQAIRECGGEALRLILRRVSRGKLGKQRAEALYEAAGESVGLREGCRGMVLDVEEILSEIEASNRFIEKIEQEMLHYLNQIPYSHCLLSVKGIGKVTVAGLIGEIGDFSQFHSIPQITKMAGLNLFEMSSGKHQGIRRISKRGRSLLRKLLYFAALNTVRKGGIMHGRYQSYLHRGMPKTKALIAIARKLLGILFALVRDHSHYLENYSVVERLKLAA

SEQ ID NO: 269788 - protein, 452 aa, unidentified
MPGVKEVIPVKKHTYRSIEIHKVTAAQILAWVLTPVVILALDVAKKRVLVAVANAAGEAARLVHFAMPVELPALLALGSELTRAGRTVQVILEPTGTYGDPIAARAHGAGLEVFLVSPKRTHDAAEMFDGVPSKHDPKDATIVARLHAQGLSRRWQPMPEERRELRALVAERELYAGPLDAHLGRVEARLASWWPELLQQVDVRTRISLQRWLTHYPDPALVRAQPQEAAAALRRESRGAFSAPTIDAIVQSAQRTQGMAMTAGERQMLKVTFEEVLRLHARCEEVEARIAQVLASKPTQAPLLEMLAPTTLAVLLAKVGDPTGYTSAHTFEKACGLNLKECSSGVRQNYGLHLTKRGPGLVRKYLYLLAMRMVGRNEVVRAWYQRRASFRSDHKLPALIAVMRKLVKAIWHVARGQAFDVTRLFDLRRLGMVPTTAAATTDPVSVGGAATA

SEQ ID NO: 269789 - protein, 436 aa, unidentified
MTLINSVAANQKYYAFNLLSVFIMVFWSVQYLLQHLLVQTQVSHQLLQPLILILQLPQTPQFRHARPGKFFLPVNGMDYFLPLRLTVRNVLTRRITMNIVFLGIDLAKNVFQLCGLNQAGKPVYTKRTGRKELLQTLANIPACLIGIEASTGAFYWQREFEKLGHKVKVISPQYVRPFVRGQKNDGNDAQAIAVALMQPTMQFVPPKSPEQQDIQALHRARQRIVNHRTATVCQIRGLLLDRGIPIGSAVSRARRAIPLILEDAENGLSSRMRRTIAELYDLFNDLGRRIHFFDKEIETVFRQSEACPRIAKVKGIGPKTATAVVAAIGKGTEFKNGRHFAAWLGLVPRQHSSGDRQVLMNMTKKGDKHLRTLFIHGARAVVRVATNNNDGHMNQWVNQLKERRGFNKTTVAVANKNARIIWSMLRNDTGYQVVCN

SEQ ID NO: 269790 - protein, 412 aa, unidentified
MEVINPIIAGLDVHERTVVACLRVQKGNRVQRSLRSFGTTTPALLELQRWLVENQCPRVVIESTGVYWKPIFNILEGSVEVILANAYQVKTLPGRKTDMRDAEWLAELGAHGLVKASFIPPEPIRELRELTRYRKSLIRQRTAEVNRIYKILETANIKLGSVASDVLGASGRAMLRALIAGERDAEILAGLAKGTLRKKMDQLIPSLTGRFLQRHAFLLRQMLDHVEFIDSQIATIDREVERLCVPFEVPLQLLKSTPGVGTRTAQVIVAEIGCDMNQFPTEHHLASWAAICPGNNESAGKRRTGKTRNGNPWLRAALVEAAWAASRARGTYLQSQFRHLAYARGKGSKKAIIAVAHSILIAAWYILKKNVPYQDLGPEHLRKTDPEKLKRHLVTKLETLGYRVSLEKKTAA

SEQ ID NO: 269791 - protein, 332 aa, unidentified
MSNCIGIDVSKASINIHIAKNKQDLVLENSIKGFRSLISKLKKIYKKEMENIVFIFEPTGSYSEALRKYSSEQNIKCFIINPKQFSNYAKALGVEVKNDIEDARVLSKALHLAKDNQIKVPVYNEDIEHIKELMSFYKFTKKQTTQQKNHLEALTSKDGDNFSIKELKKSIKESKEKELRIIEQVQTLIDSTDEYKIAYDNIISIKGVGQIGAIVLLHLFLKYPEANQRQITSLTGLNPIYRQSGTSIQSGYKIAKSGASLYRSVIFMSVLTAVQHDKNFKSFYERLKSKGKHTTSAQIAVMRKIILTAHSLYKNNRKYNENYNTHEASDME

SEQ ID NO: 269792 - protein, 417 aa, unidentified
MPVVYARCCGLDVHQKTVVACVLLTELDGRVRKDVRTFGTMTTDLLALSDWLCELGVSHVAMESTGVYWRPVFNLLEDDKRTVVLVNPQHLKAVPGRKTDVKDSEWLADLLRHGLVQPSFIPPAPIRALRELTRHRKALVQQRTQEVNRLQKLLEGANIKLGAVASDILGKSGRGMLDALAHGEQDPQTLAELARGRLRGKLPDLRRALHGQVQASHRVLLQQVRAHLDLLAAAIAHLQHEIAQRLEPSHEAVTLLQTIPGVGEIAASVLVAEVGTDLQRFPSAKHRASWAGVCPGNKQSAGKRLGGKTTGGNVWLKAVLSEVAWANARNPTSYLGAQFRRLAHRRGVYKALVAVAHSVLVIVYHVLTTNQPYHELGADYFDHLHQTPLERHHVRRLEQLGYTVSLTPQPNPPPSAG

SEQ ID NO: 269793 - protein, 425 aa, unidentified
MSCLLHPTRVIDLPESSRKASPIMTAPARPAPVVVGGADTHADTVHVAAITTLGREIDDREFPTTAAGYQAAVAFLTSHGPVDQVGIEGTSSYGAGLARAVTQAGLQVIEVNRPSRADRRRQGKSDPLDAYHAARAVLSGRATSDPKDQSTEAIRSLHNTRRSAVKASTAAINQITAMLITAPDPIRAKYRALKGQPLIKALARCRVPVTDPVDAAVLTALKALAHRHQFLTTQADELSTLIDGLVTTANPALRAAFGVGPDTAAQLLITAGANPDRLRSEASFAALCGVSPVPASSGKTTRHRLSRGGDRHANNALYRIAMSRMAHDPKTKQYVARHVAAGRSTKEILRMLKRAIAREIHRLLTHKVALPEYADLRPARQAKNITVTAAAKAFNMWPAAISRIELGQRRDDDLANRYRTWLLAA

SEQ ID NO: 269794 - protein, 458 aa, unidentified
MKRNRSKAKIDRTMPMVNPNAAAIDIGATMHMAAVRADRTPEPVRSFGTFTTDLHRLVDWFKECGVETVVMESTSVYWIPIFELLDARGFTVFLVNARDAKHVPGRKTDVSDAQWLQRLHSYGLLRASFRPKGQIAELRAYVRQRERLLEYAASHIQHMQKALTEMNLQLHHVVADITGVTGLRIIRAILAGERDPKVLTRLRDYRCHSSAETIEKALTGTYRAEHLFALEQALALYDAYCEKASACDARIEAVLKELSMGRGHSLDSLPSSGRDRSDQANALAFDARTLLFALLGKDITQINGLGPYLSLKLIAECGDDLSAWPSAKHFTSWLGLAPSNKISGGKILSSRTRRCGSRASALLRLAAVSVGRTDTALGAFFRRLSARIGKAKAVTATARKIAVLFYNAVRHGMEYVDPGASYYETRYRTRVVNNLHRRAKAFGFVLQPMDPAPGVVVS

SEQ ID NO: 269795 - protein, 323 aa, unidentified
MSDPIVLGIDISKQKFDAALLIGGKLKHKSCKNNTEGFETLSQWLRKQRMGCLHACLEATGSYGDELALYLHDSGHTVSIVNPARIKGFAQSELLRTKNDKVDAGLIARFCLAMRPEPWEPPSAEIRALQALVRRADALVNIRTQELNRLGTAAKAVAPSIQEHIAYLDEQIEKIKQQIAGHIDGNPELKGKRDLLHSIPGIGPATIAAILAEISIFERFDEVRKVVAFIGLAPKEAVSGSSIKGKPRLCKIGHARLRKALYMPALVSIRYNPMIVTFYRRLKNKGKNGKVIVCAVMRKLVHIIFGILKSGKPFDPNYTPHFA

SEQ ID NO: 269796 - protein, 330 aa, unidentified
MKNYADVIGIDVSKLTIDAHIHKKDVHRLFSNNTKGFKKLLSWAEKQLGLILYFYCFENTGNYSLNLSIYLDERSIDYVEENPLLIKRSAGIVRSKTDKLDSAMIARYAWLHREELGLSSVRDTRHQELGRILAFRDQLVRNRTGMKSSLKELKSLLSSSSTDLCCKSIHRSITYITKQILTLENRMKELIKSEDCLERNFTLLNSIKGVGLILSCQLLYHTSNFNRFNSWRQFSNYCGTAPFEYSSGTSIKRAHKCHHIGDRKMKTLLSLASVSAIQCDSELKLYYKRKIAEGKPKLIALNNVRNKILARVFSVIKRGTPYVELHQYVA

SEQ ID NO: 269797 - protein, 406 aa, unidentified
MIFVGIDWSEAHHDVCVLDEQGTVLAKGKVSDDVSGVGRLHAMAAEHAEDPSEVVVGIETDRGLLVGSLVQAGYRVYAINPLAASRYRDRHAVSRAKSDPGDAKVLADVVRTDRQNHREVADDSELAEAVKVLARAHQNLIWSRQRQVNALRNTLREFYPGALRAFTTSQLATIEACSVLAMAPTPTWARDKLTLQRLRRSLSASGRKRNLDRRAKQILHALQAPELSAPALVEQAYGDVVGWLVEVIDGLTHQIAKLEAELAERFEGHPDAEIITSLPGLSSVLGARVLAEFGDDPTRYQDARARRRYAGTAPITRASGTRLVVLARVARNRRLFDACYLWAFSSITTSAGARRYYEGHRARGKTHHQALRALANRWIGILHGCLTRHEPYRESVAWVAPVEAAA

SEQ ID NO: 269798 - protein, 313 aa, unidentified
MKNITEVYVGVDVSKSNLDIYIHPLEKLFKIPNTKSGIKAFTKELSKYNVAKVACEATGGYESLFANILRKKSYNIWIIDPRRVRGFIIATGCKCKTDKIDAQKIAEFAYKNSQGYTPILKNEIHEQLQALINRKKDLTIFLAAEKTRLKHPSHALSLVSIKKLIKTLGNEIKTIDGQIEGLVKNDKELHEKTIILESIPGIGKSSAALLLSFVPELGYLSNAKISALIGVCPYANESGKHKGKRYIRGGRAIPRRMLYMCALAAIKFNVPLKEFYDRLRTANKPFKVAITAIMHKLIIIVNSLLKKGELCKA

SEQ ID NO: 269799 - protein, 384 aa, unidentified
MDAIHVTEPHAEDVILAVSLELAVGKWKVALHDGMREKPAVHTVAQPHAAARLQAVLDVIEQQKLKWSLPAGVRIVVCYEAGQDAFWICRALLARGIECYVIDPASIPVERHRRRAKTDRLDAIKLVINLRAWLRGERDRMHVVHVPSPQDEASRQLMRDRSQLQKEVLQHRDRMRKLLATLDCWDEVDHRAFAGRLARDEVRCHDGTPLPLELRERLLRECERLALAQQQLAALEKTRQASVPAPARKRSDDLSRLKGIGEVGASRLALELFWREFSNRRQVGACVGLVPQPYDSGESQVDQGISKQGNRRVRALLIEMAWTWLRYQPDSALTQWFNQRTQGTGPNRRARRIAIVAVARRLAIALWRYLKDGVIPDGAQMKPV

SEQ ID NO: 269800 - protein, 344 aa, unidentified
MEISTIGLDLAKNVFQVHGVDREGNVVVRRALRRAQLLSFFAKLPPCLVGMEACGTAHHWARELIKLGHDVRQMPAAYVKPYVKRGKTDAADAEAICEAVTRPTMRFVPVKSSEQQAALSMHRARDLLVKQRTQLVNMMRALLAEFGINIPQGVRLALEMARKIVDGETPAVPSEAAKIVGRFSQQALDTHAQCQEIDRDLLAWQRTNDTARRLMSIPGIGPIGATALAASVTDASQFRSGREFAAWLGLTPRQHSSGGKERLGRITKMGDKYLRTLLVVGMTSLIKRVKHKPETADPRLVALLARKPVRVATVAMANRTARVVWAIMVRGETYQAGHQPRLAA

SEQ ID NO: 269801 - protein, 377 aa, unidentified
MKEVYRRCCGMDVHKDTVVVCVLPPVGGEGKAIRKTYGTFRNDLIRMRVWLKQLKVSEIAMESTGVYWRPLRNVLEEEGFRLLLVNPAQVKALAGRKSDGRDAQRIAEFLQDRRLDASFVPPAEIRQLRMMLRHRIALLEQRNEVHNQIRDLFETAGLKLSSVVSDLLGVSGRRILEALIAGEQSPEILCWKLRGRLRAKEKLVKESLKGYFTEFHRSMLESHYKHYRFLTSEIGIFEERIARAMKPYDSQIDLLVSIPGVDRIVAWHLIAELGMDHTTFPDADHCASWAGLVPGQNESAGKQKSTRCRKGNRTLRRVLTQAAWAASHCKAGYMPAFFRRVKSRRGWAKAIVATAHKILTIAFNVLRTGYALSRLGT

SEQ ID NO: 269802 - protein, 414 aa, unidentified
MELLHERCAAVDIGKKDLKACVRTPNPDRRRSRRQETRTFATTTNALLELRDWLVAENVTLVVMEATGDYWRGAFYLLEDCLNVMLVNAAHAKGLPGRKTDVADAAWLCQLGECGLLKASFVPPEPIRHLRDLTRYRSTLAVERTREANRLEKELEDAGIKLSTVASDILGKSRREMLAALIAGERDVHTLAGMAKGRMRPKIPHLVEALTGNFGEHHAFLCRIHLERIDQLTAAIEELSTRIEEQMRPFARQIQRLQTIPGVGQTTAEVIIAETGGDMTRFRTAGHLASWAGVCPGQHESAGKHKTGKTRHGNRWLCGALGTTAMAASRSKDTYLAARYRRLAPRLGKQKAIVALQHTILTAVWHMLTDDTDYQDLGADHFTRRDLQAAMRRIIRQANALGLTVRFDPIEPAA

SEQ ID NO: 269803 - protein, 347 aa, unidentified
MFPFYLGIDLHLKRSYMVLMNAEGEVIDKRRLKNTEMASYISKNIPKETYAVMEATRNWPFFYDLLEKHVDRVELAHAKGVRMIAAAAVKTDQIDATVLAHLARLNFLPIAYAAPKEIRDLRQHLRCREWLIDERRRAKNRIHAVLAGYNLASPVTDLFGRAGREWLQEVTEKELRPTSRKVVFETLIMIDQLDDQIKELAKDIPLPEELKPKAELLMSMPGIGKLISAVILAEIGDISRFNSPKALCNWAGLTPRVHKSDTVVRHGRISKQGSRYLRSAMVSAAMTACRISPRWYGVYEHLAQRIGRRGAKVAVGRRLLTVVYYMLKRNQPYDEDYEQRRAVEQGA

SEQ ID NO: 269804 - protein, 368 aa, unidentified
MMHTTTFIGLDVHARKIVAAALDTMTGEVHSATFGYDAAAVADWIRSVDPSAKCVYESGVTGFDLQKRLTGLGVDCAIGAVSKMIKPSADRRRKNDRNDAEFLARMLSVGNIVEVWIPDDECEAARDLVRALDDARDDLRRCKQRLSKFLLRHGLVFDETTPTGRRKGNWTAAHWAWIRSIEFSEKSDNDVLAYYVDAVRQAAEDKKRLERLVEAEASKPRWKKRVDSLRCLKGVDIMTAADIVFEAGEFARFGNARAFAAWLGLVPAEHSSGEKIVQGGITKAGNRHLRRVMVEAAWHYNHCSAHSKDLSAGQAPDPAAMRHAAKGVRRLVERRRGLLERGMQKNKDNVATARELACWCWAVGCMAE

SEQ ID NO: 269805 - protein, 482 aa, unidentified
MKSKRQEKTNKTTNHPTQHHWHEMNRKQRREMMRKIQSEDLRLEVIHPDAAGIDIGNESHYAAVPPGRDSQPVRRFGCTTAELKAMAAWLRHCGISTVAMQSTGVYWVAVFDILEQTGFAVFLVNARDTKNLPGRKSDVQESQWLMKLHTYGLLRNSFRPSQEIRVMRTYWRQRNDLVQSASRHILRIQKALTQMNLQLANVLTDISGATGQAIIKAILAGERNPHKLAEFRDPRVKASEEQIAQSLEGNWQPDLLFLLKQEQDGYEFCQRQIAECDRQLAQYLQQREDRSQGAPLPEEKRKGRLKKKRGNKPQFDLRKGLFRMTGTDLTRIDGIDVMTATTVISEAGYDMSKWKTENHFVSWLRLCPDNRISGGKVIGKGRLPTNNPISIALKMAATTLRQSKTYLGAQFRRLRTRLGAPIAIKAMAAKLARLVYRMLRYGMKYVDQGAAFYEVQHRQLQIKQLKWKAAKLGFQIVQAPAA

SEQ ID NO: 269806 - protein, 425 aa, unidentified
MSEKIVVGIDVSKAFSDICILSPNNDIIKRMKISNDVIGMQSLISVLEKVENEYEDRAVIIMEATAHYHQILANFFRKHNYEVIVINPIQSGALKNINIRKIKSDKTDAYNIALLYRIKNYNETITHSDTVNSIKKLCRQHKELTDEIVEHINRLIAFLDISFPDYKKVFPDLQGKTPLSLLEKYPTVQDVLSPENKQDMIQLIKENSHKSYSYAEAKYEKLLQAAEKSIEVCIVNLSSAVLIQTTVSVIFSLQEALKAINDEIKRLSLLDEKFHKEIVLLQSIPGVGEYTACVVLSELGDVSNFSKPKELVAFFGLDPGVSQSGTYNRKNNKISKRGSPHVRLILHMLAKSNVYPNRNREYLNPVMRAYFEKKIAEKPYKVVMCAIMRKMVQIIFAVLRNQKSFELRTPEEHQKLIRENSKLVA

SEQ ID NO: 269807 - protein, 394 aa, unidentified
MKLVGIDVGKNSHHFCVMDKETGDFNVTPTSFSNNKEGFDFLINSLKPYSKKSILLGMEDTGHYHVALLKFLLSNGYPVALINPKTTDLTRKMEGGITKNDKLDTITICDVLDTPERKKQYRITKVDRFDLYEQRQLTRHHHNLKEELNVYCNRLQKSIDLVFPEFNTLFSSKYGIVYMNLLKTFGSAEAIASTDIRTIRKCFEIKGKGNRISLTPEKLKECAKNSIGISSEVETIQIKHLVSQITLIKEQIAEIDKKIEEFSITNNSPILSIPGISHFSGTSILAELGDIGNYSKPSQIIKFAGVAPYHYESSQYNAQHTAITKKGSKYLRKTLYQIILPVINNNPVFKKYYRLKISQGKGHRCAQGHCIRKLLRIIYHLLETGQSFDPALLR

SEQ ID NO: 269808 - protein, 320 aa, unidentified
MIISTAAGIDVGRDWLDVAIATSASPAGGRHFRIANTPAAVAALPARLRRAGVERVVLESTGAPAARLVRTLAEAAMPMGVVDPRRIRALRLAEGRRAKTDRLDAGLIARFALIMTDAARPAPTPAMMELRALSTRRRQLVEMIAAEKTRLKQTFEPILLASLKETIRLLGEERARIEAMIEARTSATPEDQRKRQLLQSIPGFGRIICATLLADLPELGARDNKAIASLAGVAPHIQQSGVAQGHAHIQGGRPCVRAALYMAALTAVRSDPGLKADYQTMRAAGKPAKVALIATARKLVVAANAMIKHGRPWSTQHQRS

SEQ ID NO: 269809 - protein, 412 aa, unidentified
METVVERPAALDVHKGQVTGCVRVPGEGRGREQHIAEFPTTVRGLLTLRDWLAAHRVTQVTMEATGVYWKPVWAILEEDFECVLVNARHVKNVPGRKTDVSDSAWICQLAEAGLLRASFVPPKPIRRLRNLTRYRKTQIQERQREANRLHKALEDTGIKLDCVATNILGVSGRAMLAALCEGTTDPEVLAELAKGKLRKKIPALREALEGRFDRHHAMWIGAILNHIDFLDEQIDALSELIEEEIRPFVAAVELLCSHVGIQARSAECILAEIGVDMSVFPSEKHLASWAGQCPGNDQSAGKRRSGKTRKGSKWLDWTLEEAALAAVRANNNYLAAQYQRLRPRRGHKKALGAVKHTILTNLWHMLSTGQLYNELGDDYFRKRDPERITKRLVAQLENLGHKVTLQELPAAA

SEQ ID NO: 269810 - protein, 416 aa, unidentified
MSDQPALFIGIDWADQKHDCYVIDRDGRGFHQEISHSPESINDWVNEMLKVAGGKPIAIMLEQSRGPLVYALMFRENVLLYPVNPKQLARYCESYPGGGKDDPTDAKYLARMLSERITTLTASQPDDKNTRLLAHLSEQRRKLICSQIKLRQQLTAQLKLYFPVALELFGKDSQLSLLLGILSRWTDPRQLRRADRRLVRRVLDEHSVRNTERQNRIIDRIRSARLLTDDEALILPSAMSVKLLASQIRQSRQMIKEFEAKIAETMKQHPDGHLFTNIRGAGAALAPRLLCAFGSQRDRWKDADSLAAFSGIAPVTKKSGKMCQVHRRFACPKYLKQTFHEFADSARMYCPWSKARYRLLRDRGMKHNAAVRKLARSWIRILFRVWQTRIPFDCDRYIEQLKQRCPEIEPYLELQK

SEQ ID NO: 269811 - protein, 341 aa, unidentified
MKECIGLDVSMKETAVSIRRNGERVWRGKCVSDPAVIAQLVRKRAPAVDRIVFETGPLSVWFYHALRAEGLPAICIDARHAKSALDMAPNKTDANDADGLAHLAEIGFFREVRVKGFDSMLARTLIAARNRLVRITVDVSNHIRGFMKTFGLLIPSGKGSTFEAHVRRLLSDQPMLSEILLPMLDAWCATRLQAARLARQIAAEARQNDGCRILMSIPGVGAITATSFVTAIESPDNFRKSRSVGAWVGLTTRRYQSGEIDYKGHISRRGDHHLRGLLYEAASVILTRSSAESDLRTWGLKLRDRIGFKRAAVALARKLAVTMHAMLRDGTLFERGMNPTT

SEQ ID NO: 269812 - protein, 324 aa, unidentified
MFYLGIDVAKAKIDCCLILENSANKKKTKTFSNTPKGFEQLQIWLNQHAATSTQTIILMEATSIYHELLAKYLFDEGYQVSVTNPARARYFAQSMSKLNKTDKVDSEVLARFAMTANLHFWQPLPKHIQLLNALLDRRAVLCEDLQREKNRLEKAESTFTMEPVLQSLHKSIEQLNKHIQGIDQQIDDHIDQNPDLKNDKELLSSIPAIANRTSLLMLRFLRSHTFERASQAAAFVGLVPTQKQSGSSIHGRSHLSKAGSSKIRAGLYMAAIVATRHNPHIKGMNERLLANGKTKMMAIGAAMRKLVHLCYGVLKHQQPYQADY

SEQ ID NO: 269813 - protein, 356 aa, unidentified
MSRDVKYIGMDVHKEAIVIAVLNDGGKVVMESIIETKASSILQFIHGLRGELHVTWEEGTWAAWLYDLLQPHVHQVLVCDPRRNALLKEGNKSDKIDAHKLADLLRTGMLRPVYHGEHGLRTLRELARSYQTISQDLNRVMNRIKALYRGWGIACGGTQVYAARYHEEWLHKIEHAGVRRRAELLYQQLDGLQVLRRTLRSELLAESRKHKAAKLLRQIPCIGPIRAARLLALMQTPHRFRSKRQLWTYSGLGIETRDSAQYCFVRGQLQRAKKPQQIRGLNRNHNHEMKDIFKGAATRASCGVGPLRDFYVALLDKGMKPEMARLTLARKMAAIALTLWKKEERFDAEQLKTQAA

SEQ ID NO: 269814 - protein, 331 aa, unidentified
MNIDDRDAAPAAPVQTTLAAIFFSMELSKSSWLVTSLSPGGGEKMSKRALPAGDMAGLMALLGQIKEKARLRTGESYPFVSIQEAGLDGFWIHRMLEREGIDSHVVDPASVTTSRRRRRAKTDKLDGETLLRTLLAYKRGDPRICAMVRPPSPEEEDRRRNCRERRVLIGERVRLVNRIKGLLFCHGIVDFQPLHKDRRERFDALRTADDLPLPCHLSAELERMLDRVELLLEQMKANEATRDAMIAAAPCPPAPAGGAANLMVLKGVGPDFAQILWSEGLYRHFDNRRQLAAYAGLAPTPWQSGNVSREQGVSQSGNPRLRTIMVQLSWF

SEQ ID NO: 269815 - protein, 336 aa, unidentified
MTSSVFVGVDVAKERLDVAVRPSGEGWSEANDEAGIAALVARLQPLGPALIVCEATGGFERPAIAALAAAGLPVVVANPRQVRDFARATGQLAKTDVLDAGILALFAERVRPTPRALPDAAAQLLDAVLTRRRQLLEMLTAEKNRLGFAPKPLHRGIRAHIRWLERQLDDVTKELADLIEASPVWRAKDDLLQSVPGVGPIVSYTLLGELPELGTLSHKQIAALVGVAPLARDSGTLRGKTPRVGRPCECPDRAVHGGAVRSALESDTKGLLRPSQGGREADEGGADRLCAETADAVECDDEGQQPVDDSRIQNSIQLLARDGALPPGLRAARWPA

SEQ ID NO: 269816 - protein, 358 aa, unidentified
MDPKKYIGMDVHQASISVAVRDAAGKLVSESIIETKATSILEFVRGMRGSMCITFEEGTSAAWLYDLLKPHVTKVIVCNPRKNALLNAGSKNDRVDARKLSDLLRAGLLTPVYHGENGVRTLRELGRSYITITKDLTRVMNRLKALYRSWAIPCPGAKVYSRRHRNAWLEKLSEGGVRRRAEQLYQQLDALRKIRQEVRAELLAESQKHPAHQLLRQIPLLGPIRVALLIGLIQTPHRFRTKRQLWAYCGLALQTRASGEYRFNAGELQASKKAPALRGLNVNHNHDLKNLFKGVAMNVSTSTDPTGRFLSKLAGQRDEAISGASDVGSEDGGDRSSGLEERSRLRSRRTETKRSLSV

SEQ ID NO: 269817 - protein, 420 aa, unidentified
MGGSLTSKLSTVALAAANPAQAGSPPPPPCSRLDKLSKRGGRSLLPRLSCVEQSASKYWIGLDLGLRRTCVCIVDGAGAPVHQQECDSSLVALEQALGNVPQDRIEMISVESGSDFHIVRKLRSAGYPVTIFEAHKASKFLAIRRNKTDANDARGLADLARVGRHAVSHVYLKSRECQEIRGLLTLRSRVLRMNLAATATVRARFATYGRPFKPKRSRGGLRSEVEAQAACMYEEDGIDLRGDLLPLVNICETVAAYLTVLDNDVARRARSNPVCRLLMDVPGVGPVCALSFYSAIADPSRFKTSSDVGAYLGLIPRRRQSGSLSQTLGITKAGSRMTRSHLVTSAMVFASCAPDCDLKRWHKALRERAGTKRARVALARKLAVLLLAMWKTGARFDPGLGPRQASVAETIVANSPSSPA

SEQ ID NO: 269818 - protein, 331 aa, unidentified
MGEITRALIARVGVDLAKRVIQVHAVDAAGRRVVSRAFKRDQFIAWCVQLPAGCLVAMEACSSAHHWARKLRVLGLDARLIAANFVSPYRMQGKSGKNDATDAAAICEAASRPSMRFVPVKTCEQQGVMSLHRVREGLKEERTGCINRIRGVLAEFGLVFGQGPKLLRAELADVIEDASNELSAMARRVLQRAFDHWRELDEHMRWCDRQVGQHVRSSPAAQRAAKITGIGELGASALTAGVGDFNQFKGGHQFGAWLGIVPSQNSSGGKTVLGRITKRGDDYLRTLLIQGAKAAPMSAGKRDDPISHWLVQLVARVGWQKACVAMANKKE

SEQ ID NO: 269819 - protein, 343 aa, unidentified
MQVSTIGVGLAKNVFQVHGVDSAGKVVITRQLRRKQVLDFFSKLPGCLVGMEACGTGHHWAREISKLGHTVRLMPPSYVKGYVKRSKNDAADAAAICEAVTRPSMRFVPIKSTDQQALLMLHRTRDLLIRQRTQLINALRAHLAEFGLVAETGREGLAQLGAIITDESNHEALPSAMKQAPQAIVDQLAALELQVGALDRAIHAHHRANDMSCRLETVPGIGVIGATAIASTVTDPSGFKSGRDFAAWIGLVPRQHSTGGKERLGGISKQGDSYLRRLLVIGATAVVRQARLHPQKHPWIMRLLAKKPAKLVAVAVANKMARIAWAIMAKGGYYRVPELAAAT

SEQ ID NO: 269820 - protein, 394 aa, unidentified
MRFTGIDIASEMHVAAVVDEASQVVVRPTAFGEDATGYARLRELLGSPQDLLVAMEATGHYWQNLFAYLAAEGFAVALVNPLRTRRFAGEDLERAKTDAIDALGIARFAAQKHPAATRLPDSATQELRELVRLRDRLRQDFDDRVRRLHRLVDLGFPEFTRQVRTLDSELATAILHDYPTAAAFQGVSLRRLAALRYDGRHRVGEDLARALLEAARTSVGRHPGPAYRVQVRYVCEDLDLLRRRLRELDRDIEHTLREHEVGTLLTTIDGIGSQTAARLVGELGDPAHFHSGAALVSYVGIVPGTHRSGKRQPHRAPLSPIGHARLRRALWMPTLTAVRKNPWLKAYYEHLCSTGKPPKVALVACMRKLLLAVYSVAKHRKPFVPMLAAAEVPA

SEQ ID NO: 269821 - protein, 386 aa, unidentified
MQTLNDLSRSLIALEPASTLIAVIEMSLSSWLVAGIVPGIERQPLKKLAVDESALLRLLHRWREEAEKAGCRIERIVVAFEAGRDGFWLARWLKARSIEAHVIHAASVAVSREHRRAKTDRLDAELLKRAFLGWLRGERNHCKVVAIPTLKDEDAKRPSRERESLVGEQSRIVNRMKAALIRLGIRGFNPKLKRAAGRLDSLRTPEGEPIPPNTLAELRRRHGAPRLISNQIRQIEEARLKHFEQAPNDGPHAMVRLLARVIGVGIETADMLVHEVLSRNMHDRRAIARYAGLTGSPDESGRKRREKGLARSGNGRVRRGMVQLAWRFLTYQKESALAQWYRARTENARAARKPMIVALARKLLIALWRFVWQGVVPDGVVLRPAQ

SEQ ID NO: 269822 - protein, 280 aa, unidentified
MLDEAGQVVLEQKLGTTPKAMREAFGKMPRSRIALETGMHSPWVSRVLSELGHEVIVAHARNVRLIGESRRKDDRFDAQTLARLARIDPQLLAPVQHRSAQAQVHLMVIRARAGLVRARTSLINTARGLTKSYGERLRGCSPRNMNAEKARQLSPELQAALEPLLAAIESLSQRIYEYNQQIGKIARESYPQVARLEQVKGVGTLITLTYLLTLEDAQRFRKSRDVGCYVGLQPGRRNSGQSEPQLHISKEGDPYLRTLLVQGAHHILGPFGAAICGAGV

SEQ ID NO: 269823 - protein, 476 aa, unidentified
MGYGNVRRRENQVIRRAFVEAGDLSQVMLVGIDYAEAEHAVVICNGLGDQLGKVLTIRNDADGLAYLLKECDRHARANKIRPEQVIFGGESPGSWAENFAYGLLQADRQVVDLHPLRIKRYQEGESSTDHTSARTICMALQNREGYTRTGDDIYGALKAESHHRRRLVRQTTRVKNHIHGCCDVFFPGFLDSGILIAFGRSCRALLRRYSPGSLKKTRPSTIDKLLKKYHVTQTEQKAVRIRSFAGKVLMPSAPCQQARHEELCALLDQLDLLEHQIATCTTRLARLLRQTPGCLLTTVGGVGVVSAATLTAELGPEPHQWGADSKTCYFGLITTIFQSGGSGKAPINTGAPTGGNRIGKDILLRISDMLRRFGPEEYKIYGQQRIRNQANVRYALARKFLRFALSVFNAPHEYIPAPLRSLSDQTDPLWPLHFTSTAARLREVWHPFPTALPPEQDYLQQWQDMVNEHYHLNIQI

SEQ ID NO: 269824 - protein, 344 aa, unidentified
MDHYAGIDVSLECSSVCVVDASGKVVREAKVVSEPEALIGWFGSLGFELARIGLEAGPLSQWLYAAMKQAGLAVELLETRHVSDAFKAMPVKSDRNDARKIAQLMRLGWFRPVHCKSITAQEIRAMLTARKLVQSKLLDLENSLRGILRGFGLKVGKTTRTNFAGRIEELVKGHPNLQTIGQALLRARAVLLAEFNGFEKRVRAMSRLHDKARLLMSAPAVGPIVSLTFACAIDDPSRFTSSKQAGPHFGLTPKKYQSGETDYTGRISKHGDASVREALYEAAHIMLTKPIKGCSELKSWAMRIARRAGTNKAKVALARKLAVIMLRMLKDNVPFNPAAKAATA

SEQ ID NO: 269825 - protein, 416 aa, unidentified
MENTIAAYVGVDWASATHYAYALDVDGEKLGHRAFSHGGDGLAELASWIRSVTGQEPENVAVGIEVPHGPVVEHLMDAGFLVHAINPKQLDRLRDRFTVAGAKDDRLDAYVLADSLRTDARFYRFLRPVHPTVIELREWSRMVEDLSAERNRLANRFRHQLWRYYPQVIELSEDWARGWVLDLWELVPTPAKARNVRQATIARLLKRCRVRKWTADTLLAHLRSTPISVAPGVTEACVAHCEVILARLRLVMQQMKIGMKHLERLCAAVAELPSTEPTDPDTRCDPEILRSLPGIGPIVLAALLSEAPEAVRRRDANVLRALSGVAPVTRRSGKQYIVAMRQSCPYRLRTAVFHWARIAVLHDFHSRNRYSDMRKRGHSHARALRSVGSRLIGVACAMLESGELFDKDRKPQVLAA

SEQ ID NO: 269826 - protein, 505 aa, unidentified
MPRPRTAPPTRTKRSFVLQKPNGQLVPRVQQVGPEHCGIVAIDCAKARSRYVLADFYGRPLLEPTTWPHSRGDFQAAIDRIRHAVRQHNLGDLVVAIERTGEYHRPVQLAFRQAGFETRLVHPFTSQQYRQPADPGHKTDDTDLAAIWRATTHGFGLLEPTWPDDYVALQLLRRHRRDLVDKNAILQCQIREVLHAAMPGYAECFCHFWDDSPAPLIFARHTTAPEAVRQAGLAGLQRIADQAQLRCRRQTLHKILAWAEQAPPSLGPTLDRRRRLISLDDDRLAKTRQILELERDLAHRVVPLPYVLLLAIPGINIVTVADLAGELGPLALYLNANAITGRAGLMPTRYQSDQVDCANGPLRRRGNRRLRAVLMQTADNLVQCNHYFRARAERWTRAGKDPRWVRVKVAKIFSRLAYAVVAGRQLFPHACCQPRHAILGKLLAFHLEHGTDLPALRQDLEAAVAQLPAKPALPKPSRCKNTSTSAPGAAVRSRWRKASPWCWLG

SEQ ID NO: 269827 - protein, 361 aa, unidentified
MDVHTTNYTICAFQIDGEKVFGQTTLNPDVKELVKYLTRLQERLGKNTKFICGYEAGCLGYTLYHDLKGLGYECVILAPSTMAASPNEKIKTDKRDAVKIAKCLAYGTYSPVYVPTDEDNAVKEYIRMRDDAKIMLKQTKQQIIAFCTRHGKHFDGKSYWTQKHIAWLEALQMKDEILQETLKEYVLTYHQLSDKVDRYDKRIEEFAQKESYAENVKKLVCFKGIKTHTALSLLVEIGDFKRFPSAQKFASFLGLVPRENSSGDKQHRYGITKAGNSHLRRLLTESANCFNRGSVGKKSKALKARQAGNSSEVIAYADKGNERLRRRYIRIATRSKANIAKIAVARELACFVWGMMTGNLS

SEQ ID NO: 269828 - protein, 445 aa, unidentified
MSDVLVGVDPHKKSVTIEAIDEHERVISTGKFGTTTRDYKAMLGYVRQQWPRHRWAIEGAQGVGRPLAQRLLADGETVLDVPAKLAARIRVLDTGNARKTDAVDAHAVAVAARRTPTLRVLSFDEELVALRLLVDRRDELSARRVQTVNRLHRLLAELIPGGAGKDLTATKAKQLLATVKPRSVVGKTTRRMAVEEVTDLVATDARLKTLTKELAIAVKERGSHLMDLRGIGPAGAARILADVGDVARFPDRNHFASWTGTAPLDASSGEQIRHRLSRAGNRRLNHVLHMAAIAQIRVGGEGRTYYLKKINEAKTSKEARRCLKRRLSDMVYRQLLTDAQLAENTAAGAPKENAGAGPGGHSGATTESSAADLHTPVIGSSDQPQPEPAASTLPPQRRRRTPPAASASSPTRRRARAVKVERPTGRTTLTATSTGAPSRPPKPRS

SEQ ID NO: 269829 - protein, 368 aa, unidentified
MGNEAKRFVGIDLSKRTYEAVAITVNPQTITRWNGKLDLRGRKCLLDKLHSGDTIALEAGTASFKIAKEIQSKQGVMVVVLNAANVAIIHASLKKTDKEDALKLARLIEKYSPEELPVVPIPTDQEMERRALVAHETRFRQDRVRLINRLHAVFLRAGFPDHTKRQLGIAASREKLIVSELDGFNLVEAMNLDHMIVEYEKILEDLDKQINDTVVACGEDAEILLSIPGFGIKTTMAVLAYAGDMRRFENPSQLVNYIGFSPRLYASGDIERSGSITKRGNPQVRWLLIQSAWCMVQSKAANPLKDRFDAMLKRGKAKSVAIVALARKLLELVFILLTRREKYRFIDPSLYAIKLRRASFNLVGAGIG

SEQ ID NO: 269830 - protein, 338 aa, unidentified
MNKITTIGLDLAKNVFHVVCCNEHGKIIRKKMLKRSQILAYFANLPHCLVGMEACASAHHWARQLDTLGHRVKLIPPQYVKPYVRGNKNDYNDALAIAEAVIRPEMRFVPVKTPEQQDIQALHRLRERRLQERTALCNQLRGLLAEYGLIFPQGINVLHRRLPELLEDSENGLSDLFRRLLAQSYQQLQTLDKYIDFYTREMRRQSQQSEACRRLQTIPGYGPIVAGVFHSAVGNGEAYRRGRDVSASLGLVPRQHSSGGKEVLLGISKRGDRYLRSLLVHGARSVVIRAAKKDDRLSRWINKIRAARGFNKAVVALANKMARIGWAVLANKTVYQAA

SEQ ID NO: 269831 - protein, 406 aa, unidentified
MSFKILKNNCIGITDSNDRTEYKQARFSSFSKGLQELCDWLAKYRCTDVCMESSGKYWIPVFNILEKNNLWVTLSHPKYTKPLKGNKTDRKDAKWICDLYMCGMVKPSFIPPASIRHLRDLVRYRFKLTCMITGEKNRAQNCLTVSNLKLDDVFSDVFGKSSRSITEQILAHPGKTFDVTPFVHGHCKTPIEEIQAAVDGAISPEQAVKLRQCLDHIDELEKHIETVEQEILRLSDPYESALNLIRTVPGFHKNPMTAIQVLSEIGADMSVFPTAKHLVSWAGCCPRNDQSNKKIKSTRISRAGSYFKPILVQVANALIKSKKHPEFTNRYRRIKARRGHKKAIIAICRMILTAIWHILSDLNPYTPDGFLESRPVNESKTLTTSQALNLLKQRGYIIKDEPVTAS

SEQ ID NO: 269832 - protein, 360 aa, unidentified
MISRRMKTKIPAVEKLTIGLDLGDRRHHACVLDAEGEIVAEEVIVNTREVLSAFCARYPGATFVMETGMHSPWISRVLTALGHPVIVANARKLRAISQSQTKCDDEDAEMLARLGRADPKLLSPVRHRSEATQRALVRLKVREALVRNRVNLINSVRFLLKSLGVFVASSIKAMAFTRKVRAQLAAGDLALVAPLLAAVDALNVEIKQLDAELETLARETYPVTERLRQIPGVGPLTALCFVLTLESPERFAAARAAGPYLGLVPERDQSGQTDKQLGITKAGHVQMRCLLVNCAHYILGPFGPPCALRTAGERIAARGGKSAKKRAIIAVARKLAVTLLALWKTGADYQPQPLRLPQAA

SEQ ID NO: 269833 - protein, 349 aa, unidentified
MKKLSKMPTRMDETIGIDLGDKVSRYCIVDHNGNVAEEGSFRNQASSIEKHFGGEPRRIALEAGGQSAWISRELKQLGHEVIVANPRELKWITSSDTKNDPGDARKLALLARADVRLLAPVEHRNAEQQAELSVIRARDAILRARTLLINSARSIAKGFGVRLPKSITNTFGERAVEALPEFLRTALRGLLEQIDALGRAITGYDQTIGQLAEKHPELERLESIPGVGRLTAMTFMLTLGRVERFAHSRDVAGFLGLRPKQRQSGARDPQLGISKSGDPYLRKLLVQCAHHILGHYGKDSALRQWGLAKSEGGKKATLRAIVAVARKLSVLLHRLWVSGEFYKPFPKMV

SEQ ID NO: 269834 - protein, 311 aa, unidentified
MATYVGIDIAKHTFDLALEPKQKTRRFHNDASGIRQCCTTLKRLQPDLIVMEPTGGYEATLRDQLQAAGLPVAVVNARQIREFAKACGQLAKTDKLDAQIIARFAAIMQPTPQEPVDAQTRVLKALVARRRQLVQMHTAEANHREHALDQCIEQSVREMLELLEKQIDSVEQHIQEHLESMPKLKKKTEQLRSAPAIGTTTAALLVTELPELGQLNRRQIAALVGLAPINRDSGTYRGKRMTGGGRRDLRARLFMPTLCAIRCNPVIRDFYQRLCDKGKAKMTAVVAAMRKLLTILNAMLKKNEAWNPKTT

SEQ ID NO: 269835 - protein, 333 aa, unidentified
MLIVGCEYQPSFQQIAWVETDSGEVGERALLHSTGEAERFYRELKEQGVGVRVGIEATGHARWLERLLAELGFELWIGNAAEIKAKRVRKQKNDREDARLLRTLLIENRFPRVWLPDVSNRDLRQLLWHRHRLVQMRTRVKNQLQAVALNEGVRRKKGLWSEAGRAQLESFQLMPWATRRRKDLLEQAEQHREAQRLMTHPGVGPLTALAYVLIVGSPERFRCGKQIGSYLGLIPSEESSARRQRLGHISKQGNALLRFLMIAAAQAATRSNPAWRREFLHLTMRRGRQIAVVALARKLAVRLYWMWRNGWDYEKSLQFGSQVGQPGTGYGVK

SEQ ID NO: 269836 - protein, 319 aa, unidentified
MTTSDFFVGIDISKNRLDVALIPGDQTFTCPNNEAGIQKLVRRLQKLHPQIILLEATGGYEFLLVAALREAELPACFINPKLVRNFARGAGIAAKTDRLDAKVLALFASRMQPQVRPLPTARQQELKHLMTRRRQLLEMIQMEKNRLDPTPLPRIALSIQHTIKSLEDQLAALNRQIDDFFQQHPLWVALEQQLTSVLGIGHLSALLLIAYLPELGRLNRKEIAALAGVAPFNRDSGQWRGQRHIEGGRSRLRQALYMATLVATRFNPVIQTYYQRLLAKGKAKKVAIIACMRKLLTILNAMVKKHQPWCPPAPITIDC

SEQ ID NO: 269837 - protein, 461 aa, unidentified
MGAVGSAWESVTDFPLGGVVMAHVGGSLQAQFMARIRGRDLQRCLVVPVDVGKRTAKALVADHYGEILVSPFEFDLTEAGFARLAAAVARSDATREAEVLRIGVEAAGHYHRTLVARLRAGGYDVVELSPRAVKESRSQQLLARLKSDERDLGAMSELMIRGAGRAPALRSDALATQAVWVAHRRRKVHSRVALANQVVAELDLVFPGLDGCFSGLLESRGARIIVSEICDPDRVRHLGRDGLRRFVERRGVRLDRPHAQRVVDAAKVALRLPAGERAALSRVLAVDVALLVSIEAEIVAAEKALEEVLADTPAGVLTSLPGVAVVRASNYGAGIGDPSRFANAAGAYRASGLVPALYQSSKTTRPGLHISREGSVGLRQAIIDLGRGLVRHEPEFAAYRQRLLDREKKPAVASIAVGHRAHRLAFAMMRDQSTYQPEQWIKAVAAGKTAMAKAARPTRTT

SEQ ID NO: 269838 - protein, 417 aa, unidentified
MQVVRPICCGADIHKDIIVATIATSNQNGIAEYIQRKFCTQNYDLINLKSWLKEHNCFEFAMESTGKYWIPIFNVLEDEIKVYVVHPKYTKSIKGKKTDKKDSKWIAELFRHGILTFSFIPPREIRELREISRYRIKLVAMRTSERNRYQNAMTVSNIGLASILSDPFGKSSKAIMEEVLKSSSLSEGKIRSLLNKSAKKKAKEVFASLEGSRIEPDQRLKMTVSSEHMNQIDTHIDTLELDLVQRCLPYANLINLLIDIPGISYISAIAVIAEIGIDMSVFKSSKQLTCWAGLAPANNESANKKKSVRISRAGTYLKPLLIQCALSAIKSTSNPYYRIKYNIIKKRRGHKKAIVAIARMILVNIYAILSTGEAYNPCDFKEVTSPKPAKKEMTIENALSFLQAQGIDTSALVLNVS

SEQ ID NO: 269839 - protein, 404 aa, unidentified
MTATVAADTVGPDVFGGVDSHADTLHVAVISDNGGHLADAEFTTTAAGYAAALAFLNAHGRVIAIGVEGTSSYGAGFTRAARSASLHVVEVNRPDRAERRRIGKSDPIDAYAAARAALSGRASSAPKDDTVTGIRALHNAARSAVKARTAALNQIGHILISAPEAIRAKYGPLKGTARTDALARLRPSGDPVHTAVLTALKSLARRVKDLTAEHTALTKALDTDVTAHNPGLRAAYGVGPDTAAQLLITAGGNPERMRTGASFAALCGVAPVPASSGRTNRHRLSRGGDRAANAALYRIALVRMSSDPRTRDYVTRQTATGRTKKEIIRLLKRAIAREMFRCLTTTVAVPGVADLRPLRQSKNITLTAVADHFGVWPAVISTLERGIRRDDVLTNAYRDWLQTA

SEQ ID NO: 269840 - protein, 332 aa, unidentified
MSVYVGIDVHRKRSQVAVIDQGGEVLANRNVPNGVEPILRVIGGLPAGTPAAYEAAFGWGWLLELLEGYGFEPHMVHPLQCKAIASARLKNDKVDAATLAQLLRADLLPEAWIAPPEVRQLRALLRHRAQLVRLRTLLRNRVHAVLADHGHGRPAGCWSGPGRAWLAALQLPPVSREVADDALALMDALQQPIDRLDQEVRQRARSDPRVKVLMQLPGVGMFTALVLLAEIGDITRFGSARKLASWAGLTPTVRGSDRTVHHGHISKQGPAWARWVLCEAAQTAKRHPDFAPGYEALARRRGRKIATTAVARKLVTRAYHLLAEAASDGAPS

SEQ ID NO: 269841 - protein, 343 aa, unidentified
MSIVGGLDIHRKQITFDYADTETGEVRRGQICPADREHLAKWLARFAGQDAHFALEGCTGWRYVAEEIIAAGLTPHLADPAETAHLRGPKRRAKTDRADARHQRVLLEQGRLPECWIPPSHVLECRALLETYLDLRKQRTGWVQRIHAVLFHHGAPHIAGQRLGTAEGAAALRAAAAQCSPAGQLQLAIAAQMLSVYDERLHQVRRQLLDQARHIRGAAELTARLYGVGPITGLALTCWLGGAGRFSSSRKAVRFAGLDVTVRSSDGKGPPGRLSRQGPPVLRWCVYEAGKAHAHASAPGHAYYAQVKERIDGKRAAISQARKIIRQACHILTELGDDALTAC

SEQ ID NO: 269842 - protein, 405 aa, unidentified
MAKLFVGLDWSETHHDVFIEDDDGRRVDSGRVPEGVEGVARFHAMVADRVDNPAQVIVATETDRGLFVGSLIAAGYTVMAVNPMSTSRYRERHSTSGAKSDPGDAKVLADLARTDYHNHRPVAGDTDLVNSIKVLTRAHQSLIWTRQRQTNQLRSTLREFYPGALNAFSDLTHGDALEVLRVAPTPELGRRLSISKIGSALRRGGRQRRLDDRAAEIQQALRADQLAAPDLITESMGSVVTALVGVISELNTQITGLEADLADRFDQHPDTKIIRSLPGLGMTLGARVLAEFGDDPNRYADAKSRKNYAGTSPITRASGKHRVVLARYARNKHLADACYRWAFASITVSPGARAFYDNRRERGDTHNRALRALGNRLVGILHGCLRHHTPYDEHTAWAHRHDLAA

SEQ ID NO: 269843 - protein, 368 aa, unidentified
MNKRTYVGLDVHARSVKGCAIDRETGEILRQSLAANDAGIAEWVARLPSPVLVVYEAGPTGFGLARLLNAAGIECVVAAPSKLQRPPGDRVKTDARDAEHLARLALLGQITPVRVPGPSQEAARDLVRAREDVRADLMRARHRVSKLLLRHGLVYSGGQAWTDAHHTWLHRQHFDDPALQAAYEAGLEMAELTLDRRNRLDAKITAMAATEPYAPVVRALMCLRGVSVLTAFGLAVEIGDWNRFTGSTIGAYLGLVPSEHSSGASRSQGAITKTGYTHARRLLVEAAWHHRRPYNNASRDMRSRWDAADEASRVRGHQGNHRLHHKWEQFETRHKRRVIANVAIARELAGWCWSLAAPVQKEHPWTDD

SEQ ID NO: 269844 - protein, 414 aa, unidentified
MGSVYRLLVGIDWATEAHQVCVLDRRGGLLEQCRVEHRAEAIAAMIDRLIELSGGDPASIAVAIEVPRGAVVEALVERGLHVFAINPKQLDRFRDRHTVAGAKDDRRDAFVLGDSLRTDLAAFRRVHLDDAWTIQIRELTRVEENLNTEINRLANQLRDLLLRFYPQLLRLCPAADQPWLWALLKLAPTPAKAQRLRRSSIERLLHQYRIRKWTADQVRSELKTAPLAVAPGVTEATSAHVALLLPRMELLMAQLKLCSKAVQTALNERISSEQQRREHRDVEILLSLPGVGRVVAATMLAEASQLLAQRNYHALRALGGVAPVTRQSGKRLAIRRRYGCNHRLSNAFYHWARSSSQCDPRVKHHYQTLRRLGHSHGRALRGITDRLLALLVAMLRDQTLYDASRTHAPNPIAA

SEQ ID NO: 269845 - protein, 414 aa, unidentified
MKTCLFVGIDTHKDSHTAAVLDNYFNTACLITFANSYSGFDKFMEKVGSVAESRSITFGLEDSQGLGFFLADYLVQKGFSPFDVNPIYTDRARKATIYRDHSDEGDAVLIAKALIREKDKLSPAKIDKASIEIREMVCYRQMLVEESTKLKNRLHGLLFSQYMGAVNVFSDLFSKVALAFFSKYPSPHLLKGTGEDTLATFLKTHSRGRYGIEKARAMLNSLPISIDRNLSGTRAYIIDSHIKRFMDLQNELASANEKIKGLVEKSSYVCLTSVPGIDTVTAAKIISQVIDISRFSSASKLAKFAGIAPREKSSGRKKKYEKSKYGKKFLRSTIFFMALAHISRTRNGKDKNSVSRAYYLKKIAEGKTKKESLTCLSRRLIDLIFAVMRDRSIYNFSKSKFLARHTHVLDTVAS

SEQ ID NO: 269846 - protein, 343 aa, unidentified
MTHYAGIGASPETSGICIVDGAGTIVRELKAESEPGALAAALTATELPFSRVGLEAGPMSQWLHAGLAEAGLPVVLVETRRLRAATKAMPVRTDRIDARAIAQVVRTGWFRAVHVKSELSQETRALLTARKLLVAKLRDVDNGVRGLLRGFGLKVGTVGERAFPRRARGLAHSRPELAAVVEPLLQVREALLAGRERLHRLVLAAVRDEPTCRRLMTVPGVGPVTALTFCSAVDDPARFGRSRASGAHFGLTPRGYQSGETDRVGHISKQGDGLARQALYEAANVLLTRTSRWSALKAWGMSVARRAGMRRAKVAVARKLAVLLHRMWRDGTEFRWGRETAAA

SEQ ID NO: 269847 - protein, 431 aa, unidentified
MWFIGILALGVALRVEPQISQDGTTGSYRESVGYARDRLTVAQSYKRKEPVMEKDIRYVGLDVDSERVAVAVADSAVTEVRSLGMIPNAAESVRRLVKKLEPVHRLRFCYEAGPHGYGLYWQLTRLGAHCDVVAPTLIPVKSGDRVKTNRRDAEKLARLYRSGELTAVWVPDAAHEALRDLVRAREAAKKDQLRAKHRLGKFLLRRGLKAAVGLKSWTLKHLAWIKTLHFEHPAQEATFLDYLHEVEHASARIARLEGALDQAIETAPSTMRALIDGLQALRGVSSLSAATIVAEVGPLSRFARPKQLMGYSGMVSSENSTGNRVRRGAITKTGNAHLRRVIGEAAWAYQRRPSMYRALEKRQEGLSEEVKQIAWKAQHRLSGKYRRLLAKGKLHQKAVIAVGRELLGFVWAIGIQVEKEQRARASYGRVA

SEQ ID NO: 269848 - protein, 362 aa, unidentified
MSKATWLVSGAIPGVERQPLKKLESDSTALSRLIERWRCEAARAGRTISRVALAYEAGRDGFWLGRWLIARGIDAHVIHSASVAVSRERKRAKTDRLDAAMLMRVFLGWLRGERGHCGMVTIPTMAEEDARRPSRERENLINERTRIKNRMTSALVRLGIHGFKPHLRRASERLADLRTAEGTSLPTNMSEELRRDMARLALVRDQIDTIEKTRVERIERAPDTEPNAMVRLLARVIGVGIETADMLVREILSRNLRDRKALARYAGLTGSPDESGLKRREKGLAKAGNARVRRGLIQLAWRFLMFQKDSALAQWYRTRTQGPSGARKTTMIVALARKLLIALWRLVTTGEVPDGVELRPAA

SEQ ID NO: 269849 - protein, 337 aa, unidentified
MYSIGIDLHKETAWYCVFDAQGHRVSHGSLPADPESFKKYFEGVPRPFKMAVEATYNWYYVIDIAEEYAAEVYLADSYQVKAFAKKHKKTDKIDARLIAWLLHRGDLPTVAIPDKETRKNREMLRYRMRLVSDRTRNIVRLKAMLDRIGFKGTGNLATAKRRKEIGSTEISEPYGRIARGYLARIAQLSEELKICGSDLKVLAGRDQDVMHLMSVPGFQSFSALLVKTEIFDISRFRSFGALCAYSGLAPRVHASGGHCYHGPLNTNRRKELQWILLENAWHAMRKIPRLERKYAAIKKRKGCNTAKVAVARDILKIIYHILKEKRPFYPESERLSA

SEQ ID NO: 269850 - protein, 315 aa, unidentified
MYLGIDVSKLTIDCCLISDGLFFERKFKNSQVGFQDLKDWLKENGATERLHCCCEATGKYYEAVAEYLSKYYRMSVENPRKIKGFGTAVLQRSKTDRQDAKTIAQYCKALEPRPWQKPTEAQTKLQELTRYQHRLKRQKAAEQTKLQTAPAYLLPLIQSTITHLQQQIKAVQNQLNQFHKDNPDYKIQKERLKTITGIGEAAANSLLSVLTQTDRFKTAAQFVAYLGLDPKENQSGTSLKGRPRISKLGNTHLRTTLFIPAMHAYRSSTFAKYVSRLQKNGKRPKVIIVALMRKLAVIAFTLLKNGQDFQVERYK

SEQ ID NO: 269851 - protein, 454 aa, unidentified
MRKPRVIPDEDHEVVYERVAAVDVAKASGVVCMRLPDPARPGRYSNQIWDNVPAARARITELGRELLRHQVQMVTLESTSDYWRIWYYVLESIGLAVQLVSASQARNLKGRPKTDKLDAMWLARLTQWGMLRPSFVPPAAIRQVRDFTRARTDLVHERTRVLQRLEKLLEDAMVKITSVVSDGMKAKSAVAMVAALVAGERDPRAIADLAKGSLRGKRDALAEALDGMFDSHHGVIAQALLDQVAFLDQRITQMEAGAIAALAQVEESWGVDADGETGPGRGTGPDSRVLAAVYRLAEIPGVSVWLAIVIIAEIGLNMALFPTPAHLVSWMGLCRSAAQSGTRRGKGKPKKGNSYARAAAGQAAIGAAGTATFLGERYARIARRRGGAIAQVAVARSIMIIVWHLLADPAARYRDLGPDWHATRINRDKKIRNHIRGLQALGLTVTVTDDEPAA

SEQ ID NO: 269852 - protein, 318 aa, unidentified
MNTNTLQNINVGVDTGKSQLDIYIRPLDIYFTVPNNEKGIKEAIRSIAKHRPRRVVIEATGRLEMPFIFACDKAKLPYVIANPLHVKRFAGAIGRRAKNDRLDAALIAHFGEAIQPELTQLKSENIRLMSDLVTRRNQLLSMQTMEKNRQQILPQSLVSSIKPILTALKNQIVKVEEKISKLIDTCPEYQAKNEILQSMPGIGKIASASIISNVPELGFITNKQASSLIGVAPITRESGRLKGKRTIQGGRAQVRTVLYMAMMSAIQCNPVFKATYERLLAVGKPRKVAIVACMRKMVVILNSMLRDGVMWDKDSAKN

SEQ ID NO: 269853 - protein, 414 aa, unidentified
METGYRGLAAIDVHKSMLAVVVREDHNGQVVYSQRKFGTTQNEIQHLAAHLQQYQVTEVVMESTAQYWRPVWYGLEPHFRLHLCHPLRTRGRRGRKSDFRDARRLVDRLHSGDLEDSFVPGAEQREWRWMTRTRVDLKDKMGVVQSQIEGLLEQGGIKLSAVVSDTLGVSGWAMLQLIAKGETNLDVRIAEARGTVRKKKGVLREALAGRFSRVCQSLLKQYLQQVELLRQQIVEIDQLLMESMKAYALTLHRLCRMPGVDMTAAQQMLAEIGPEAEAFASASEFASWAGICPGTQESAGVNYSSRCPKGNRYLRRLFCQVAWAAVHTKETFFASLFARLKPRIEARGAAWAVAHRIAKLVWLMLHEGVEYQEKGPAAKNPKTLQRKFRRLLKDLRAMGIDPSTLDPSLAEVRA

SEQ ID NO: 269854 - protein, 353 aa, unidentified
MKTKATVLKQSIGNDFSKNEFVVCFWQHLSDNHKRIKSSRTFKNTLKGFQLFIDWVEKHRNPNLEVSIILEPTGVYHENFMYYLEEHTDYKQSLVVGNQTKAFAQSLGIQTKTDKVDAKVLGRLGLEREDLRIWRPFSPNLRIIKQLCRERVYLIEDKTALSNRKHALQNSFDPNGEELDRLLERIETIDQQVEEIESRIQQGVKTDKTLQEPIKKICAIKGLRLITVATIVAEMNGFVLFTNRSQVVSYCGYDVVQRQSGISINGKTKISKRGNRYIRRALYFPAIVAGRHEPTFIALYDRVLDRSGIKMKAAVAVQRKLLVLIYALFTKNEDFDPTYQHQTQKNLVPVATN

SEQ ID NO: 269855 - protein, 322 aa, unidentified
MSQPNPLCVGIDVSKATLDIAASSDVAQFTVSNDSDGFNAIITGLRRHSLALVLMEATGGLEVAVACSLQAEGFEVAVVNPRQARDFARAMGYLAKTDRIDARVLTQMAEVINRHPERKRFIRALPDAERQALAAMVVRRRQLIAMLVAERNRLHPFHPQNKKSINTIIKALEDELVRLEKEMDSHIRNHFKEIAERLSSIKGVGTMTVSAMLAEIPELGTLSRREISALIGVAPVNRDSGTMRGRRTIFGGRAGVRSALYMAALVATRFNPVIKTFYVRLLAAGKAKKVALVACMRKLLTILNAMLRKNEEWDESYHHVAP

SEQ ID NO: 269856 - protein, 352 aa, unidentified
MSSEVITVGVDAHKAVHVAIALDEAGHRIGEWSGANTVSEWARFGEWLRSLGGARQVGIEGAGSYGRGLAVSLVHAGEVVYDVNGRLTALGRRHARRRGKSDSLDAEAVAHTVRREADALPRVVCNDDARILSHLSEERETLVHEATRVRNRLHAVLLELDPEYKQWASLLSRQGLSALEALPTDPEDDALRQALRASVRRHAAHLAMLMRDINELAKEIETRAQPYAALTEITGVAPLTAGTLAGIIGSHAPFANDAQLAAYAGVAPLEASSAGNGRHRLNRGGNRRLNAIVYRIAIGQLRHPGEGRAFLDKKLCQGHTKKEAIRSLKRYIVRAIWRHWRRCPPQTSFACL

SEQ ID NO: 269857 - protein, 338 aa, unidentified
MTVEILGVDIAKNVFQLHGVNRNGRVILKRRVMRDQLLAVLAQIDPCTVVVEACTGAFFWARNFETLGHQVKIISPQYVKPFVRRQKNDGNDAEAICTAACQPHIPFVPKKTATQQDIQALHRARQRMVNHRTAVVSQIRGLLLDRGFAIAKSITRARRAIPEIISDLENELTTMAREAITELYDLFRDLDRRIASFDKKIDCVFRGNEDCQRIARIKGVGPKTATAIVAAVGDGSEFKNGRHLAAWVGLVPRQHSSGDRKVLMGISKRGNQHLRSLLVHGARAVVRTAPNKSDPDNQWVNQLRERRGFNRATVAVANKNARIIWAMLRTGKPYCAAC

SEQ ID NO: 269858 - protein, 355 aa, unidentified
MNEIKYIGMDVHQASTSIVVLNGAGRVVSSAVVETRASALLAFIQGQRGTLHVTLEEGTCAAWLYDLLVPQVSRLVVCDPRHNALLKAGSKDDPMDAHKLAELLRLNALRPVYHGQQSLATLKELSRSYTTLVRDSTRVMNRIKALYRSRAISCPGTKVYSTRHRTSFMEQLKQAGVQQRAQVLYQHLDLLSLLRRQAKLALVAESRKHSVSRILRALPGLGPVRIAVLLALVQTPFRFRNKRLFWAYVGLGLVTRISAEFAVVDGQLQRSRKAPAIRGLNPNHQRELKEIFKSAASAAVRRPGPWQQFYQQRVEAGRKPELVRLTVARKLAALTLHLWKKGERYDVKHLKSTTV

SEQ ID NO: 269859 - protein, 377 aa, unidentified
MSKVQFVGLDVHAETIAVAVAEAGGEVRSIGVIPNRLESVRKLVHKLGPVQHLRACYEAGPTGYVLYWQLTQLGVECAVIAPSLVPTKASDRVKTDRRDAEKLARCHRAGELTAVWVPDAAHEALRDLVRAREAAKKDQLRARHRLGKFLLRHGRQRPEGVKVWTKKHREWIKSHVRFEQPALEATLADYLEEVDHVGDRITKLETAIDKAIQQAPPAIRAVVEALQALRGVAQTVAVSIVAEVGSLSRFANPRALMGYSGLVPSEHSSGNRVQRGGVTKTGNGHLRRVIGEAAWAYQHRPNVIGFLAQRQKRLAIGEESKKIAWKAQQRLHKRYKALSARGKNKNQIITAVGRELLGFIWAIGVSVEKQHPVTTAA

SEQ ID NO: 269860 - protein, 402 aa, unidentified
MNCVGIDVSKGKSMIAVMRPFGEVVVSPFEVRHTASELSELARLLKNLDGETRVVMESTGNYHAPVAWLLHGAGFYVSVVNAMLVHDYGNNSLRRGKTDKKDAVKLANYGLDHWLTLPRYVPEEDTRLMLKTCYRQYQQYSKVQTMLKNNLISLLDTAFPDANRLFTSPPRADGSEKWVDFVATFLHCECVCGLSKKAFTAKYQKWCRKHGYNFSQDKALDIYASACGRFGVMPKTNTAKLLVEQAISQLQTTSAALAALKQEMQSLAASLPEYPVVMEMFGVGPTLGPQLIAEIGDVRRFHSKKALVAFAGIDAPPYQSGQIDVRSRSISKRGSASLRRTLFLVMGVLLQCAPMDEPVYQFMNKKRSEGKPYRVYMMASANKFLRIYYASVKAYLDSLEHD

SEQ ID NO: 269861 - protein, 411 aa, unidentified
MELLVERCAGLDVGKDEVVACVRVPDGRRGRRQETRTFTTFTSGLEALADWLTDEAITDVVMEATGQYWKPVWYVLEERSLDLLLVNARHVKILPGRKTDVGDAAWLAELLEHGLLRGSFVPPTAIRELRDLTRYRKRLVQTHSSEVQRIQKTLEDAGIKLDSVASQVTGVSGRAMLRALTDGERDPKVLAELARGRLRKKLPELREALRGRFREHHAVLVRLSLEHLEHLEHALEQLDAEVDRVMVPFARARDHLDTITGVGKRAAECVIAEIGVDMTRFPSAGHLASWAGLCPGNNITGGKRRSGKTTKGSVWLADILTECAWAAARSRNTYLSAQFWRLARRMGKKKAAVAVAHSILVIAWHLLTDDCDFQDLGGDYFNQRDTDRTRQRAIHQLEALGYHVTLKTDAA

SEQ ID NO: 269862 - protein, 406 aa, unidentified
MMTLTDRRVTGGVDTHGDVHVAAVLNSATGRPLDTASFPTTLSGYAALLGWLRGFGELDEVGVESTGSYGAGLTRFLQAEGVSVIEVDRPDRKARRLEGKTDTVDAAAAARAVISGRAASTPKSRDGIVEAIRTIEVVYHGAVKDRTRAINQFRSLLVSAPHALRDKLRGLTLTSQLARARRLGDIADDLVETETRRALKELARTIAFLDDQVDRLESRIAELTAQASPALMGLQGVGPHVAAQLLAAAGDNPGRMGSEAAFAKLCGVSPVSASSGKTSRHRLNRGGDRRANNALFVIVLVRMRYDDKTRAYVTRRTAEGKTRKEIMRCLKRFVAREVYQAIINPPDDIPTGATLRQMRNSRSLSLTAVCTAIGTTPTGLSRLERGLTHDTRLAHAAQKFLTESAA

SEQ ID NO: 269863 - protein, 414 aa, unidentified
MSYKIAGIDVHKKVLMVVVVDASTPEERPERRRFATMPSELRRLSTWLREQGVEEAVMESTAQYWRSVWLELEPYMRLQLAQAFSNRAPRGRKHDFKDAERLVRRLIANELILSFVPDGEQRTWRNLTRMKTQLTRDRVRLQSQMECLLEEMRIKLSIVVSDLLGVSGLRILRALAEGETDPRRLALLGDDRLRCSEEQLVDALTGRPQPMHREMLALQLERLQLIDRQIEKLNGLIAQAMKPHQETVIRLAEVPGLGVDSAQQVMAEVGVQASTFPSAAQLTSWVGTCPGKDESAEVNHSSRSAKGNKYLRRILNQAAHAAVKKKGSHFQAVFRRLLPRLGYKCAIWAIAHRLCRVIWKILHEGVRFIEQGSESDPKVREHRARNLARALRKLGYDVALTPIHPAVATNAVQT

SEQ ID NO: 269864 - protein, 337 aa, unidentified
MKTILIGIDLAKSVFQICGVNQAGKQVFNRAVKRAQLLSFLAHYPAVVIAMEACSGSNYWGRTLQGLGHKVLLIPPRHVKPFVTGNKNDRNDAFAICEAAKRPRMVFVQPRSVEQTDMILAHRVRERLVGQRTTLINQLRGLLQEYGIVLAQGKEKLRNQLPDILEDGQNQLSMAARACFQQMLNEWMTLDACIAEHERSIKRQCKDTPACQRLTGIKGVAEVTATALVAYAGNGAQFQSARHFAANLGLVPREHSSGGKQKLGGITKRGNRYVRRLLVQGAWSIIRHLDRSTDRLSMWAKQLIQRRGKHVAALALANKLARISWAMLYKQQQYRAA

SEQ ID NO: 269865 - protein, 364 aa, unidentified
MLRVAHFVDAVVGGDTHVDTTSLCVVSPVGAVLAEITIDNDEDGYAQAVTWVLQSVPSERFLVGLEGTRSYGAGLCRALQAVGIRVVEVERPSRGERGRRGKSDTGDAVLAANKVLAMPPDRVPAPRAGDGVREALRLLTVDREQMTTQRTRLVNQLYANLLTGNAEQHALRKKDLTSGTLRKLAGARGRSGRPIDEQARLVVLRRKAQDIVRLDQQIRENERQLNTILDEVAPQLLEQVGVGPVVAAQLIVSYSHHGRCRSEAAFAALAGVSPIEASSGRITRHRLNRGGDRRLNRALHVVAVTRVKHDPRTRAYIQRRSKDLTDREIRRMLKRYITRDLYGVLRTIDALHPKRTTSTVTPAA

SEQ ID NO: 269866 - protein, 343 aa, unidentified
MESIHYIGLDVHKKTIAYCIKTVAGKTVQHGTVRSERQALRQWQEEIPGPWMGAMEATLFTGWIYDFLKPHAVELKVAHPEMLKAITAAKKKNDRADAEKLADLLRVGLLPECTMMPEELRELRRILRYRNMVVRTSVKMKNKISGLLMEVGAPYEKRRLHSRSYFNQLLESVEDIPGSVKELLKLSRSNLELFEAVQKKLVKALRQESQIKERVECLMSIAGVGEITALTWVLEIGDPTRFKNSRQAVSYCGLCSAQKESAGKEHRGPISKKRNKHLQTILVEAAKLAPYWNPHLASVREKELERGNRNRATLSVARKLVEYILAVDRRCTPFVSEEPSPVD

SEQ ID NO: 269867 - protein, 457 aa, unidentified
MQSFYLGSDVSKGYADFVILDSRKQQVMKNFQLDDTFEGYCRLHDILSQFLAAHPDATLFAAVESTGGYENNWYNALVKFQSTLNIQTARLNPLGVMYNSKADLKRNNTDKISAQNIAEYLITHSEKVTYQQQDQMATLRKQWGFIKMLTKQSTQLLNQLESLLYTANTELLGYCKNGTPDWVLKVLLKYPTAAKLAKARVPALARIPYVTSERAQELAISAKRSVASASDRITEKLVAATVKQILNLKKTIDEQAELMVKECSMPEVDILKTFTGISDSSAIGLILEIQAIERFKTVKKLASFFGIHPVYKISGDGSGSFRMSKKGRKEPRKILFMVALTAIRSNPLIRNIYLERTEQGMEKMAAIGLCMHKILRILYGMLKHGKPFDPQIDLDNRQRSVKKKPAGRRDKSRRFQDYDSNAPISRRQNKKRLERKQSHSVNDTKFGINAPVPEFAS

SEQ ID NO: 269868 - protein, 452 aa, unidentified
MAKQKRQKSKNNIKPMHVLQPNSAGIDVGATEIYVAVPDDRSSKAVRRFDTFTEDLHGAAKWLKECGIESIAMESTGVYWIPIFQILDTYGFDVILVNARHVKNVPGRKTDVQDCQWLQYLHSVGLLRGSFRPDQDICAVRSLLRHRDNMVKDASSHVQHIHKSLTQMNLQIHNVISDITGVTGLAIIDAILAGEQDPYIWADLKRPRIKADRQTIVNSLTGDYRSEHIFTLKQTLQSYRKYCQMIQDCDAEIERHLKEFDSRIDLDDCPKPPEKKLKRKPRGNEPTFDLKSHMHRLLGTDLTRIDGISDLTAHVFFTEVGPDLSKFNNANHFCSWLGLCPIKKISGGKILSSHTRPGSNRVAQALRISANSLWNCKSYLGDYFRRMRARHGAPKAITATAHKLARIIYHLVKEQRAFNETIFSEQEKNHQIRLRKRVINQAKSLGLQLVPA

SEQ ID NO: 269869 - protein, 387 aa, unidentified
MQVAASRTASTAIQTDLRAIFVSLELSRSTWLITSLSPGAGEKMSKHSIRAGDVAGLLVRLAQLKEKARGRTGRDFPIIAIQEAGLDGFWIHRVLQSEGIESHVVDAASILTSRRRRRAKTDGIDGETLVRTLLAYKRGEPRVCAMVKAPTPEEEDRRRICRERKTLVGERVEHVNRIKGLLFAQGVSDYEPLKRNRRARLEELKTGDGRPLPAHLKAQISRELDRLELVLPQLKAVEAERDALLKPVSEGCPAPAAMLAQLKGMGPEFTAILWSEGLFRSFSNRRQLAAYAGLAPTPWQSGSVAHEQGVSKAGNPRLRTTMIQLAWLWLRHQPTSALSVWFQERVQSNGGKMRKTMIVALARKLLVALWKYSTSGVVIEGAVMKTI

SEQ ID NO: 269870 - protein, 301 aa, unidentified
MHKNLIVACLRKGGRQELREFGTMTGEIKVLANWLTEAGCEMTAMESTGPYWKPLYNLFELLGLDTMIVNAAHMKAVPGRKTDSKDAEWIAELLQHGLLRASFVPSREQRELRELTRYRKSIIEERSREPNRLQKMLEGANIKLGSVVADIHSKSARRLLERLAAGETMDDSEEISKLLHKSLLSKLDEIVAALDGIVTPLQRALLAQILDHIDDLDKRIQELDRMAETYMAQFQPAIAEVCQMPGIARRSAEVILAETGIDMSRFPSAAHLCSWAVGSARATTRVPGSGITARHARGIRR

SEQ ID NO: 269871 - protein, 340 aa, unidentified
MKHIGMDVHSTTTDACVRNGKGIIVLERRIRTTKSELIDFVESIRGQKRVVLEEDQMADWVTRVLQPHVDEVIRSQPQYNKLISGSEDKWDKMDAKSLSELLYLNRIKPVHHPEMIYRTLREAVRAYWTVSRDLTRAKNRLKGWYLFNGLHETGRSIYSLRNRSKHLKAIKQQGRNIELVELLYEQMDACRQLKAKYVRMLRNAAQPVKDLVRLATTIPAIGPISGYTLVSLLEDGWRVPNKRKLWRYAGLSLRRYESRDTGFKGASKTGNRILKRVVMSAAITIVSRGEPNSLLSLWERDIRKNVDPKRARRNLARKIVVIAQHLLRSRQEYINELIKV

SEQ ID NO: 269872 - protein, 353 aa, unidentified
MKKLFIGIDFAKEKFDAAIIEACGLKEFGNREYGTFTNDKKGYRQFFKWVKTNADKSVENEWLFCGEDTGSCSLGLSKWLYGKGLDISIENAYSIKHSSGIQRVKSDKADSSMIAEYAWRHQDKAVLFEPLSESLSQLREVFLYRHKLVQQHIAMDVRKQDKEAAEPSKAISFIKRKSKHLMSEIDNAIKECDLMIDRIIESDAELKENYAIITSIKGVARQNGACLLIFTNNFRRFDLDARKIACYYGVAPFGKDSGTSIHSPAKTSHFANKLIKSLLGQAAHCAKKFNPEIREYYNRLIGRGKKPQVALNNVKNKLIRIIVALVRKKVYYDPKTYMFYNAKFTDVKKMLNS

SEQ ID NO: 269873 - protein, 461 aa, unidentified
MVKSTGKATRRKPKLPAALQGVNLNAAGIDVGGSSHYVAVPADRDERPVRQFASFTGDLYEMAEWLKSCGIETVAMESTGVYWIPVFQVLEERGFDVKLVDPRQLKRAPGRKTDVADCQWLQQLHTFGLLAAAFRPDNQTCVLRAYMRQRAMLVSYAGQHVQHMQKALVQMNVQLQYVLDDITGATGLRIIRAILGGERDPQRLAALRDGRCKHPEATIAKALQGDWRAEHLFALEQALQLVDTYQAQIVACDARIQAHLQTFDDRSGGTPPPKGSKPRADRHDLGFDATAELYRMTGVNLTVVKGLQAHTVLKVLSETGVDMTKWKTSKQFASWLGLAPNNRVSGGRVLSRRTAPNANRAAAALRVAAQALHHSHSASGAFLRRIAARDGMPKAITATAHKLARIIYNMLRFGTEFVEPGQDYYERQYHTRVVKNLTRRAKELGYRLVKHDDSLPEPAPA

SEQ ID NO: 269874 - protein, 350 aa, unidentified
MLIIGCDYHPGFQQIAMVDSETGELGEKRLLHREEAERFYRELKPRGVSVRVGMEASGHGRWFERLLRDLQFELWIGDAAEIRTKRVRKQKTDRQDAQLLLRLLLEDRFPRIWVADAENRDLRQLLWHRHRLVQMRTRVMNQLHVAVLNEGLRRKKALWRPAGRKELESLTLAPWASRRRQDLLDVLDHLTPKIQQLTRALEEEVEKRPVTRRLMTHPGVGPLTALAFELVIGTPDRFHCGKQIASYVGLVPTEESSGERRTLGHISKQGNALLRFLLVEAAQVTVRSQPQWRSKFFHLAMRRGRKIAKVAMARKLAVRLYWMWRQGWDYGQFAKFGSHAGEPGNPDGGK

SEQ ID NO: 269875 - protein, 351 aa, unidentified
MHATTVGVDLAKNRFELAICEGAGRPLRRERLSRQRFARFFGNVPASLIVMEACGSAHHWARTLQAQGHEVQLLPAQYVRAYVRRNKTDAADAAALLEAARSPELCCVPVKTVEQQQLQQLHRVRELLKRTRTGRINLLRGILREFGITVPVGLARGRSAVREALQCADNGLPDLLRPMIAETLQEISALTERIARIEATLVALTRTDPVVQRLLALPGVGLLGASALRAAIGDIQRFPSGRHFASWLGLTATERSSGERRRLGRISKRGDIYLRTLLVHGARSALCAAAKAQREGRALDRLRRWALATEQRRGRNKATVALANKLARIIWATWRYQRPFNGDWSADHATA

SEQ ID NO: 269876 - protein, 393 aa, unidentified
MHNCLAIDVAKGKSMVTLISSCGEVLIEPYEINHSINDFSNLLNRINKLKLESISVIMESTGIYHRPVERFFLENNFKVFVINPIYGKMHKRNLRKTKTDKEDCFNLVNLFLTNTFKEYIKPEQLCLDLNGLSRQYFALDELCVNLKNRYRNLVYLCFPEYELIFKNNTIYSSIALEFIEKYPHADIIANTRIDCLQNFFKKHNFSYWKSKPIKIKEAACNSYPSVDMNDETVSNLSQISRLVNEYQKAIDIIKYKITCLAKKSKYFETINSIYGIGEFSASIIIAELGDINRFNNIKELTAYCGLDPSIKQSGRSIDIHGPISKSGNKYLRKILFVSCLNIVRLSPKCHIENDIEIYYRKKRNEGKHHYAAIIACTTKLLRKILALCKQLDN

SEQ ID NO: 269877 - protein, 352 aa, unidentified
MNSIDYIGFDIHKKTISFCAKAQDGRILDEGTIPARPTDLSAWAKRRSRPWWGAMEATLFTGWVYDHLKPLAQELKVAHPAMLKAIAASKKKNDKVDARKIADLLRCNLLPECYMAPSAVRELRRVLRYRNLVVRQATRMKNRIAGLLMETGTLYNKERLHGKAYFSELLGSLREIPASVIELLKLSRSQLEFFATIQKRLVKGLRADAGLRERVQRLQSIRGVGEILALTWALEIGEVKRFPSIAEAVSYCGLTSAQHNSAGQEHRGPISKQRNKHLQTILIEAAKLAPRYNPQLAAVHEGELKRGHRNQATLAVARKLVAYLMVVDKSGKPFQVRANAGEEVSKDEQPVG

SEQ ID NO: 269878 - protein, 460 aa, unidentified
MEQALAQRNPSISLKSGKSRAALTITHPNAAGIDIGSGSHFVAVPPDRDDEPVREFSSFTVDLNALADWLKTCGVDTVAMESTGVYWIPVFELLESRGFTVMLINARHVKNVSGRKSDVLDCQWIQQLLTYGLLRGAFRPADQVCVLRSLWRQRGMLLRSQSRHVQHMQKALTQMNVQLANVIADVVGVTGQKILRAIVAGERDGHALAQMKDVRIRASVDEIARSLQGNWRAEHLFALRQALNGFDFIGTQLAECDHEIEQQLQRLQTHEGEPASGKRRGRARNAPKFDLRTQLFKMCGVDLTRIDGIDVTTALAVISETGVDMSRFPSAGHFASWLGLCPGTRITGGKVMSGKTKRCANHAAQALRLAAAALRASQSALGAYFRRMCSRMDKPKAVTATAHKLARLIYTMLTKGEEYTDQGQDYYEERYRERVLRQLAQRATKMGMKLVAAEEPEAVL

SEQ ID NO: 269879 - protein, 429 aa, unidentified
MNCTQNKKIEQVKETTMIVGIDVGNEKHYFRVFNLRGIKLTRKPVAFSNSMEGFSSFYNTIVELMQKSELEEALVGIEPTGHYWFAFAKYVNDHQKRLVMVNPFSVKKIKELDDNSPKKTDSKDPKTIAKLVVDGRYSIPYMPEGIYAEIRDLVYSRDRIMKQHNISANRIQRWLAIYFPEYLGLYTRFDAISGLAVLEKAPLPKDVIALGVNGIRKIWHDKKMRGRGVTEDRAKTLVEAAHNSVGLDGGIGTKSELYMLLEEHRLWTSQLEAVNKVLEEMILKVPHVEKLLAIKGVGSITIAGFIAEVGDIRRFDSPKQIQKYAGLELVENSSGKHKGRTRISKRGRRKLRKILYQVMVPLLARNKEFRGIYDYYVTRVKNPLKRRQAMVAVSCKLIRVFYAVLTKGVEYDRFKMMSDIHRKSDIIAA

SEQ ID NO: 269880 - protein, 338 aa, unidentified
MGTYAGIDLHSSNNYIGIMDQDHKRLFGRRLPNRLDKILMVLQPFKSDLQGVVVESTYNWYWLVDGLQEHGYRVHLANPSAMKQYEGIKHTDDKWDSFWLAHMKHLNILPEGYIYPKEQRAVRDLLRRRLFFVRQRTANILSLQSTVTRNLGIKMSNNEIKKLDMDDACDLFDSSIIVFMAQNNISTIRHLAKIIKGIEKQVKSQIKLHKEFVMLTTIPGIGLILGLTIMLEVGDIGRFSKVGNYASYCRCVGSKRLSNGKKKGENNKKNGNKYLAWAYVEAAHFAKRYIPEAQRFYQQKMAKTNGAVATKALASKLARASYFIMRDQVPFDAQMLFR

SEQ ID NO: 269881 - protein, 336 aa, unidentified
MMYLGIDHHKHYSQVVVMDKDGITHLNRKINNDKESIETLKRRFNQPIKAVIEAGHNWGKMYDLLEESNIATEVAHPLKVRAIAEARIKTDSIDAKTLAHLLRTDLIPSVHVPSKEVREQKNLLRYRLWLVKLQTMTKNRIYNVLDRNSIDTKGLNIFAKKTREQIKNLSLKDIDKKLLKDHYDILEVIEQHIKDTESWIDSSLKDNQYIAILDSMPGFAKILSALAALEIDNVERFAHPGKFASYCGLIPSTYSSGGKTYHGRLICTCNSYLKYAFIEAAWASIRSSTYCRSCYEKIKESKGSNVAIVSLARRLSQIAYKCLKENRKYEERPYLQ

SEQ ID NO: 269882 - protein, 420 aa, unidentified
MKDSKPADFAALIGIDWADKKHDICELTVGAARYQYSVIPNTPAGIHNWANDLTKRYPKKRIAVACELTKGPLIYALAQHKHITIFPINPSTVAKYRQAFTHSGAKDDPSDAFIQAEILEHHMGKLRKIEPETADVRILAQHVVNRRKLVQERVKLSNKITAILKNYYPQVLDWFKEKDTHIFCHFIARWPSLPEAKKAQKRTLIKFFNDHNSRYADVNDCRLKAIKGAIALTNDRAVIEPNRMMVEVLIPQIEILMGAIDRLDIEIRRLYKQQPDSTIFDSFPGAGPKLAPRLLVAFGTNRDRYRTAAEVQMYTGVAPVIERSGQKSWTHWRYSCPKFLRQTFVEWAGQSVRFSFWAKAYYMQQMEKGKSHNTAIRSLAFKWIRIAFKCWKSKTPYDESRYLEALKSKGSPLLSYAVNG

SEQ ID NO: 269883 - protein, 341 aa, unidentified
MKHEMHVLGIDIAKRLFHAVGMDERGQIVYRKRLSRHNLMPCIAKLPPVRIGIEACGGAHYWARRFREHGHEVKLMAPQFVKPYVKSHKNDSRDAEAIAEAVTRPTMRFVPIKDVAQQDIQALHRVRERLIGERTALVNEVHGLMQEYGIVMPKGVAKFRQVVVDKLESEKDKRTPLSQEMFWKWVDEFAALEKQLAYYQEKLEALATTHPECQRLMTIPGIGPLTATALVAAISDASAFKNGRQFAAWLGLVPRQHTTGGKERLLGISKRGDTYLRKLLVHGARATIRWVGRKTDRRSQWIRQLLERRGKNRTAVAVANKNARIVWALLTSHQDYQSATS

SEQ ID NO: 269884 - protein, 436 aa, unidentified
MGADAHWVAVPPDRDERPVQCFGAFTADLYALAAWLRQCQIATVVMESTGVSWIALFEVLAERGFDVKLVDPHTVRHVPGRKTDVKDCQWLQELHTYGLLRGAFRPEDEVCVLRSSLRQRSMLVAMASRAVQHMQKALEQMHLKLTEVVSDITGKTGMTIIRAMLAGERAPQLLATYRDKRCTHDQGTIAKALTGHWRAEHLFALQQAVDQYDFLAQQLRACDGHIEACLQAFVPDVETDASQSVPARTWHSSRSNPLRFDVQAYLKAMTGVDLTQINGIDSLTALKVISEIGLDMTCWPTSKHCASWLGLCPGNKVSGSKRYRIRSKPSANRAATALRLAAQGVANSHSALGAYYRRIRIRLGAPKAITATAHKLARLVYSMLRYGAAYVDAGQQAYEQKYRERVLTNLQRKAKAFGYQLVHVEDTGSAQATATL

SEQ ID NO: 269885 - protein, 347 aa, unidentified
MEHFAGIDVSLEVSSVCVVDAAGRIVREAKVASEPEALTAWFRSLGLEVTRIGLEAGPLSQWLHAGLCGAGFETVLLETRHVKAALSAIVVKTDRKDARGIAQLLRMGWFRPVHRKSPGAQEVRALLVGRKLLQAKLRDVELSIRGILRGFGLKVGEVSKAKFAARVRELAAGHEMLETITGAMLAARESLLAEFARLHRRMLGIARADAVCRQLMTAPGVGALVSITFRTAVDDPGRFGTSKAVGAHFGLTPKRYQSGETDVAGGISKVGDAMVRTALYEAANAVLSRPTRFSALKRWAVDVAKRRGLKRAKVALARKLGTVLHRMWVDGTEFRWGKEAQAAAAAA

SEQ ID NO: 269886 - protein, 321 aa, unidentified
MVYIGIDISKSSFVAAYPSMNGYRTNTFPNTTAGVRKFIATLSVAEHHCVMEATGNYCFLLLYLLHQSSIAVSLVNPKQIKHFARMMMAVTKTDEKDACMIAMYGEKMNPPIYKMPSQSIILLKQKKTVIRQLRKQLVASKNLRGSLIVLPYRDKACVRTLDKTIDFLTKQIEQLEAELADIASSEFDKQLKALTSIKGIGITLATALILTTGGFTYFDNAKQLSRFIGICPTYQQSGTSVNIKGHINRNGDEHLRSLLYVASWVALRYNASCRECYLRLKANGKPSKVALIAVANKLVRQAFAIATTDSTYIDGFVSTKK

SEQ ID NO: 269887 - protein, 454 aa, unidentified
MGKPRVVPDEDHEVVYERVAAVDVAKASGVVCLRAPDPARPGRFTSRIWDHVPAMRAQIAALGAELAGHGVQMVTLESTSDYWRIWYYVLEGAGLAVQLVSASQAKNLKGRPKTDKLDAMWLARLTQQGMLRPSFVPPAEIRRVRDFTRARTDLVAERTRCLQRLEKLLEDAMIKVTAVAADGLKAKSVVAMVQALIAGERDPRTLADLAKGRLRARKDALAAALDGMFDSHHGVIAGMLLDQVAFLDQRITVMEDQAIAALAQVEESWGTDATGETGPAAGTAPGSPVLAAAHRLAEIPGISVWLAIVIIAEIGLTMAVFPTPAHLVSWLGLCRSASQSGTRRGKGKPKKGNSYARAAAGQAAIGAARTATFLGERHARIARRRGKAIAQVAVARSIMIIVWHLLNDPAARYRDLGPDFHATRTNRDKKIRTYLRGLKALGLTVAITGDEHAA

SEQ ID NO: 269888 - protein, 445 aa, unidentified
MGRYAGVDWASEKHDVLIEDEAGEELFAGSFAHDEAGLRSLCRTLVRFKVGLVAIERPDGLLVERLLDAGLRLLALHPNQVAAARPRFRVSGGKSDRFDSFVLCELARTDRHRFRVLEPDSDQTKALRALTRAREDLVQQRVALANQLRAELERFWPGPIGLFSDLDSRISLGFLKRYPGPKDAKALTAKRMQTFLAGQHYTGRQQPADLVAKLRRAPQGRAGELECDARRAVVLSLVGALEPIVAAISQLERQIALTVRAHPDGEIFTSLFKHPDSVVTAAIMVAEIGDCRARYPNRDALCGDAGQAAVAIESGKRKVACFRWACNKRLREAFCTLADSTRHWHPWAADHYARSIAKGHDHQRAIRTLGRAWCRIVWRCWQDRVPYEPERHRGLQQHITVIIPSSSGPGVVDQAATARMAAPLPLKRPNTKKLPDSHKEAVAAR

SEQ ID NO: 269889 - protein, 402 aa, unidentified
MDIGDIEVFIGIDVGKSEHWATALSRDGQKVLDKALPNDEDRLREVYQRLQAKGQVLVVVDQPATIGALAVAVAQDMGITVGYLPGLSMRRIADLTPGSAKTDAKDAAVIAQAARTMPHTLRAISTSDEDAAALSMLTGFDLDLARQVNQTANRIRGLYTQIHPALERVLGPWLEHDAVLEVIAAWPTPADLKRAGKARIDARLKKHGCRRHATWAGQIVSALEHQTVVVAGTDAAAVVLPHLARQLIALHAQRADVAAQVETLVQAHPLYQVLTSMPGIGVRTAAVFLAETLGKTFNTGAQLASYAGLAPVTRRSGSSIRGEHVSHGGNKRLKRAMFLSAFASLRSDPVSRAYYQRKRDQGKRHNQAVLALAHRRILTLHAMIRNGALYDPQPATKLPAAA

SEQ ID NO: 269890 - protein, 416 aa, unidentified
MNAVGIDVSSRKSTVAVLRPLGEVVCLPFDVTHDIAGLASLAEKLKALDGETRVVMEHTGRYYEAVAKALHEAGLFVCAVNPLLIKEYGANSLRRVKTDKADAVKIARYALDNWADLRDFTPMDAIRYDLKTLNRQFQLASKQRTASANNLIALLEQSFPGIRKCFDSPVRSDGTQKWVDFAHSFWHVDCVRKQPFAAFCERYRKWCKRHAYLFKLSNAEEVYALAKRAVVLTPKSKVVKVLVQEAANQLISISRSVEVYRAEMDRLAAMLPEYPVVMAMYGVGKSYGPQLMAEIGDVRRFERKQALVAFAGIDPMPNQSGDKNVRSNKSSKRGSPYLRKTLFNVIRTYLQCAPQDEPVFQFLNRKRAEGKPFYVYMLAAANKFLRRYYAKLRDYFASLDTLQPVDPIPTILKATL

SEQ ID NO: 269891 - protein, 409 aa, unidentified
MEIIVITEVVVRQQLWAGIDAGKTDHHCVVVDTDGQRLLSQRITNDETALRELITTVTALADGGDVTWAIDLNHGGAALLITLLIAADQRLLYIPGRAVYHASGGYRGDGKSDAKDAAVIADQARMRRDLQPLRPGDETAADLRVLTARRGDLVADRTRAINRLRAQLLEYFPALERAFDYSNNKAALILLTGYQTPDGLRRAGAARLETWLRKRKARNASAIAETAIAAADAQRATIPGQQLAAAMVARLAKEVMTLDTEISDTETMIEDRFRRHRHAEIILSMPGFGLTLGAEFLAATGGDMTAFDSVDRLAGVSGLAPVPRDSGRIHGNHKRPRRYDRRLLRACYLSAQIAIRNDPVSRTYYDRKRLEGKTHTQAVLALARRRLNVLWAMLRDHAVYQPATTTAAA

SEQ ID NO: 269892 - protein, 346 aa, unidentified
MSELKEFIIGVDVAKKTLEIAILEKATQKVIGTKSFPNTQNGYSELLHYVASKTKRCISTVVLESTGVYHENFVDYCHEIGWAVSVVLPTKIKNFTKVENIKTKNDKVDAKIIARYGCMFPLKLWSPMTGNYHEMRTLSRHILALKKERAMAMTRLSAYKSTKRTPKSIIESEQEHILCLGDMIEHEEAELKKLAYAEHDFKRRIQKVATIKGISELVAIQIICEVNGFEMFANNRQVTSFAGFDVVERQSGDYAGRTHISKKGNRYIRRLLYMPAMTAATHGTGKFVDLYQRIAERNTGTSKLKGLVAVERKLLIIIYTIWRKNENYDPDYGDASAKIASGIAEI

SEQ ID NO: 269893 - protein, 309 aa, unidentified
MDAVYVGIDVSKDRLDVHVRPTGESLAVARDGEGLAVLIARLQPLAPQLIAVEATGGFEIVVAAAIGGAGLPLVVVNPAQVRHYAQAVGQRAKTDAIDAEIIARFVEATHPSPRPLPDAATQLLADLVTRRRQIIVMMVAERQRATRLPEDLKKSCERVVRVLERELAELDRQLDTAVRGSPAWREREDLLASVPGIGPITARTLIAELPELGQLDRRKIASLAGLAPFARQSGKWRGKSFISGGRASVRTALFIATLSAARHNPIIRAFRQRLIAAGKPKMVAAIACMRKLLTILNAIARDHKPWQTA

SEQ ID NO: 269894 - protein, 310 aa, unidentified
MDAIYVGIDVSQARLDVHVLPGGEAFAVARDGKGLEELIERLRAFSPQLIAVEATGGFETIVAAAVAGASLPLVVVNPAQIRHFAHALGKRAKTDPIDAAVIAHFVEAVKPELRALPDEAQRLLAELVGRRRQIIEMMVAERQREKRAANVRVRKSILRHIRVLEKELSEIDEDIGTLVRGSPVWREKEDLLVSFPGIGNTLARTILAEVPELGELTRREIASLVGVAPFTRQSGHWRGKSMIGGGRGSARSALYIAALVASRHNPVLITFYRRLLAAGKPKMVALIAVARKILTTLNAMLRDKRKWQPA

SEQ ID NO: 269895 - protein, 468 aa, unidentified
MEPAYRRCCGIDVHKKSISVCVLPPAGNCSLPVREEKFRTFTRDLKRLRKWLLNLRVTDIVMESTGQYWRPVWNILEDAFPKMILVNPLHVKALQGHKTDRLDARWLATRLERDDLKGSFIPPRDIRELRDLTRLRVHWLEDLNRIRNRIGQLCEAGNIKVSSVATDLFGMSGRRMLAALVEGKRDAGWMADYARGALRGKKPQLELSLEGTFTAHQRSLLASMLKQMSALEAQIAELTREIEQRVACYEDVIRRLDTIPGIDRITAWTVLAETGTDMSVFGDARHLASWAALCPGNRESGGKRISGKTRKGNRYIRRALCQSAWAASHVRDSHLAGLFRRVRARRGEQKAIMAVAHQLLTIVFHVIRDGSVYKELGAAYYDRQNKPKVMRKLVERLQKLGYYVTLQPIEEPVETPSPAIPTPQPRRRGRPCKCAERGIECKHGRASTTAINPLQNSSHSEGAEAVCS

SEQ ID NO: 269896 - protein, 449 aa, unidentified
MPWSTLPRFVLVRLPTLMAQLVEEYAMEVMYERAAGLDVHKATIVGCVRIGTGRKVTRECRTFETTTDGLLALSAWLVECRCSHVAMEATGVYWMPVWKILGEGDFVLVVANASHIKNVPGRKSDMNDAMWIADLLACGLIKSSFVPEEDVQELRSLLRTRKQLGREQTRHVQRIQKTLAEANIQLDSVLSDIMGASGRRVIEAMIEGIRNPRQLAALASARIKATPKQLYDALHGRLTDHHRFLLKLHLRQWDGLDATIREIDLEVEARIARMDKEVKAGEAPFCDLIELLCTIPGVSTLSARTILSEIGRDMSRFQTAGHLVSWAGLCPGQNESAGKRKSARLRKGAPWLKTMLVQCAWAAKRKKDSYYRAQFFRLQSRRGPQKAICAVAASILTAIYHILRDGTEHQDLGADHFNHRSAEGQTRRLVAQLAKLGFDVQLQPTAEAA

SEQ ID NO: 269897 - protein, 361 aa, unidentified
MVYLGVDLHRKRSVVTALAEDGTVVLSRRIASRPEDFRRVFGELEPSSLSVTFEATYGWSWFADLLADAGIEAHMAHPLATKAIAAGRVKNDSVDARTLAHLLRTKLLPEAWIAPPAVRERRRLARTRTSLVRIRSRLRCQVHAILADHCVQPPVDSVFGPAGRRFLASVELPAVDRGRVDAALRLMDAITAEVISVDKELRAAFAGDERIRRLMAIPGIGFLSAAVVLAEVGELGRFHSPDQLASWAGLTPTERSSDEHTRRGHISKQGSRWLRWVMVEAASRRFRDPALRRFEERIARRRGKKIARVALARRLLTLSFYALRDQEGCRAFPVRARASRQIRSGALAGSHGLPVGDGRAY

SEQ ID NO: 269898 - protein, 367 aa, unidentified
MGLDVHKDTIAVAVAESGGEVRSLGTIPNLADSVRGLIRKLGGPAGLRVCYEAGPCGYVLYWQLAKLGVRCEVVAPTLIPVKAGDRVKTDRRDAEKLARLHRAGELTPVWVPDAEHEALRDLVRAREAAKSDQRRSRQRLLKFLLRRGCTPPAKMRSWTDKHRAWVMELKFEQRALEETLTDYATEVDHQAKRVARLERSLDEAVDKVPVKMRAVIDALQSLRGVSKLTATTIVAEVGELSRFERAAQLMGYSGAVPSEHSSGGKTRRGGITKTGNSHLRRVLIEAAWTYRHRPRIYGALRARQEGIEEPVKEIAWKAQHRLHRRYRRLADRGMPHQKVVTAVGRELLGFIWAVGVHVERKHLAAAS

SEQ ID NO: 269899 - protein, 462 aa, unidentified
MSRQRSTPRKVKGQARKIKPLAELTIIHPHAAGLDIGSRETWACVPASSSPEPVRAFGPFTPDLHALADWLIACGVDTVAMESTGVYWIPIFEVLEARGLNVYLVNSWHLKHVPGRKSDVLDCQWIQQLHSLGLLRGSFRPDAEMCALRSVLRHRATLIEHRSPHILHLQKALLQMNLQLPAVISDVMGETGQAIMRAIVAGERDPLKLAHLRFPGCKSSEDEIAKALTGTWQSEHLFELKQNLQLVDYYTQILRECDAELERRFAAIKPRWDAPAELPPLPKAKADSRSKNAPTYNARAELYRITGVDLVALHGISASLAQTIISEVGTDMSRFPTEKHFCSWLGLVPHHEISGGKILRNHTLKTDNRAGQAFRQAAACVIRSHSAFGAFYRRKRAQLGPMQAQVATAHKIARTVYHLLKFKTPYQDIGAKAYEQQVNDRELAHLRKKAAQLGYALTATTT

SEQ ID NO: 269900 - protein, 409 aa, unidentified
MPERTVYEMIDGEAPILAFDVSKGCSRCQGFVSFGEPLGRPSKVAHTKSGMAAAEGISETLERKTGAKPKVVMESTGVYSKPAIRWAESLGLEVCLISPLESAKVRKSRVRPTKTDALDCGVVAEAAYTRSLRRATPKSSLYSQLYSLSRRRAAIADRLVASKNQYRKSLDCVWPLLDEACDPFSGYAMWAVGKYKHPERLAKAKGESIAKAMDGARIRVGGVSRQDAASKLIAYAKDALSGCSPDDGEVDGLMSAMSDVKRDMEALDEATEKLIALAKELPHFAQILSIDGTGDVLAALLCAEIGEPSRFSCRNGLVAYAGPDPTILQSGRNGGLHYSIARKGNAFLRKYLYLVVENVAMRKASNAITEFYSKKKSSGLCHKAAATAACRKLLVCIWGMLRSGTFFDK

SEQ ID NO: 269901 - protein, 375 aa, unidentified
MDTIYIGVDFHAREQTICYLTTETGEFVTHELKHQDKDEVRTFYSQFGGRVIVGLEASGYSPWFEQLLEDLGHEVWLGDATEIRRRARWRQKNDRRDAELILDLLIHDEFPRLHRPSLESREILRMLRYRHKLVKMRTIIKNSLQALALQSGLSRRTKLFTKIGQQELRAAPMSPVMKQQQEQWLELLLVLNQRIVETTLWLKQQSLNDARIRLLRTHPGIGLLTSLGLVHTLDPISRFRNQRKVTAYAGLEPMERSSAERKRFLGISKAGSRLLRYLVIEAAHTAVKKDDDLKRFYRRLQERRGRPKAKVAVARKLLVRSFIMLRDEIDYAEFQRRAVAARLARQSSRPSVPDRLIGQPASSESQERVLSAAKK

SEQ ID NO: 269902 - protein, 336 aa, unidentified
MIAVGVDTHKHEHLARAVDGLGQILGGLTIRAELSGYIELTQWLRTLGEDVVVGIEGAGSYGAGLCEFLLAEGISVVEVERPRRQDRRRGKSDEIDALMAAKKVLAKDGLSTPRAGGTRQALAALLIAQRSCVSERTRLLNQLQALHTTAPVTLRERIGPGNGRKLAARLVKMRARSDASQSEQLIFTVLRDLARHAQELAAQADAYKHDLAELISSLDPTLLHEYGVGPISAAKLLVCDPGRLKGEAAFARCNGTAPKPASSGQTIRYRLSRGGDRQANNALHTIARIRARHDESTRTYLKRRQNEGKTPREAMRALKRHLSRSLHKKLITIPLT

SEQ ID NO: 269903 - protein, 374 aa, unidentified
MTEYSEVFVGIDTSKLRNAVAIAEGGRNGEVRYLGVIDNTEVATSKLVKKLAAQHRRLTFCYEAGPTGYGLHRLIKTLGHQCVVVAPSLIPKKPGDRVKTNRRDALNLAKLLRAGELTAVWVPDARHEAMRDLVRTREAALDDLKSKRQQVLSLLLRLGRHFTGKRTWTRAHMNWLLSQKLAHREQRIAFEEMLLAVRQANERVIRLERAIAAAVPDWSLAEVVTALMAVRGLDLISATIFLAEIGDLSRFASPRQLMAYLGLVPGEASTGDRVWRGGITKAGNHRARRILVECSWSYRHPPRVGKKKLAKVEAAPPAVQEIAWKAQARLTARYRALARRGKRPTLIVTAIARELSGFIWAVSRAAGAPMTPAK

SEQ ID NO: 269904 - protein, 369 aa, unidentified
MGDRIGYVGLDVHKEGIVVAVAEGGARGEVREYGRIANTRSALDGLARKLGREGVKLRFCYEAGPCGYGIQRQLSAGGHDCVVVAPSLIPKRAGERVKTDQRDAVSLARLDRAGELTAVWVPDPGHEAIRDLVRARLDAVHALRRARQQLAGFLLRQGCHYRRPAWTKLHRRWLAGLKFEQAMHHLVLEDYIAAVEAAEARRDRLTAQIAAMLPDWTLAPVVAALQAMRGMALVNAATLIAELGDLSRFANPRQLMAYLGLVPSEHSSSASVKRGGLTKAGNSAARRLLVEAAWTYRFPARVSRELLLRQEELPKAIREIAWKAQTRLCARYRRLARTGKPANVVTAAIARELAGFVWAIARQVTIPAR

SEQ ID NO: 269905 - protein, 289 aa, unidentified
MQNITLIGIDLGKHSFHIHCQDKFGKALLRKKFTRTKLMQFLATCPPSVVVMEACAGAHFMARRISDFGHETKLISPQFVRPFVKSNKNDFVDAEAICEAASRPSMRFVQPRTEPLQAMRALHRVRESLIRDKVKTTNQIHGFLLEFGISLPTGDAVIKRLSLVLAEHEIPEYLSRLLVRLHTHYLYLVEQIAELESELSQSINADDTAQRIMTIPGVGPITASLLSSQPGDGKQFSCSRDFAASTGLVPRQYSTGGKSTLLGISKRGDKNLRRLLVQCARSFMMRLER

SEQ ID NO: 269906 - protein, 409 aa, unidentified
MRIIGLDIHRAFAEAVAWDDGKLKRLGRVDMRRHLLEAFAKKLSKEDVVVVEATGNASSVAAVIAPHVKKVVIANPKQVRIIAHAKIKTDTIDASVLAQLYASGFLPEVWIPDEPTQALRRQVTRRNQIVRQRSRLKNIIQSILHSHLIPSCPHADLCGAGGRAWLFHQVLPEDERLAVERHLREFDRLGEDLKVIERDLARSALGNEGVKRLMTIPGVDMVVALAIAAAIGEVRRFDRPEKLVGYLGLNPSVRQSGPGPAYHGRITKQGRGHARGMLVEAAWAAARTPGPLRAFFLRVRARRGQHVAAVATARKLAVIIWHLLSKGESYAWARPALHARKLRDLELKAGYRAERGQKGAAHAYNIKSHRDQERRWVEQAEAAYARFVAGWNPRGPKRARTGAVNEVRG

SEQ ID NO: 269907 - protein, 312 aa, unidentified
MLQEVYIGVDVAKEWLDVHHPERGARRIGNTPAATRVFAANCAKKGERVVFEASGGYDRMLREALEAAEVWFSRVNPRQARDFARAMGVIGKTDRVDARMLSELGVRLEPPRTRQIAKSRRALQAQATRRRQLVEMRKQEATRLQQTADKDARADIQTLITVLERRTKKIEVRMAAIVAADLKLAEIDCRLRTVPGVGHIVSATLISELPELGQIDRRSIAALAGLAPIARDSGKSTGRRVIGGGRPVVRTMLYIAALHASNRDPDFKDFRHRLQERGKPVKAAITATARKLLVTLNAMIATKTDYGKPRTI

SEQ ID NO: 269908 - protein, 307 aa, unidentified
MNGIGAGVDVSKAYLDVAVFQQNEVRRFDNGAAGWRALVTWLKPYGPRQVVLEATGGYEQRALGALHEAGLPMRRINPRQVRSFARATGQLAKTDRIDARILAHVASVIDLVPFQPLDADAAKLRQYKARRDHLVQNIATEKQRRRQLDDPILRADLDAHIAYMEQALHRIEQVIADLIKDTPQARIARTIKGVGPAMVATMICDLPELGHLNRKAIAKLVGVAPLNRDSGFFVGQRSTWGGRAGPRSALYMSALTAAHHDPQLKAFYAALIGRGKPKKLALVAVMRKLIVILNARMREAISAAPAA

SEQ ID NO: 269909 - protein, 361 aa, unidentified
MRYVGIDYHKHYSVLCATDERGQELKQRRIKGNTAAGFAQFFSELGEQNKVVMEACWNWGWLYDLLGQIDQVGEVVLAHPYKTRLIAEAQIKTDRIDAQTLGKLLRGDLIAQSHAPSAATRARKHLLRQRLFWVRLRTMLRNRMHAILDRQHGLERPQLKNFFSRRGQTWLEGVELPCAEDQPLLKQDLEVAALLDQKIKELDRAIGQSQSVAEKLLESIPGIGPLFSSVIATEIDGIERFHSAAKLAAYAGVVPTTHASGGRVFHGRLLWQCNKWLRWALIEASWTAIQFSGYFGAIYRNARARGKNKHVAITMVAHRMAKIIWLLLKEKRPYTETLPDRSEDQVTVAPRRNALSLASSC

SEQ ID NO: 269910 - protein, 403 aa, unidentified
MIYAGIDIAKNDHVVGATDERGRDASKPMKFANSAGGFDRCVAYLEGLAESKSDLLVGMEATGHYWLPLFCRLQDAGYAVVVINPMRTDAMRRFKGSSRVKTDIVDCVLVAETLRCGGFQPSRLGDEAVIELRQLTRLHQALKESVADLKRQVIVALDQVFPEYDSVFSDTFGESSKAFLKRCPTPEECLAVRADSLAKTLERASHGKLGRSKADEIKGIAKASCGIGLATSAFSFQIKLLIDQIDFIEGQASEVEARIRAGIEKVEPLILTIPGIGYTLGAQIVSEIGDVRRFRNASSIVKYAGINPSISQSGKFSSGENHITKQGSPYLRRALYLAAMAQLKLKSPFHDYYAKKRADGKSHREALVAVARKLVHVIYAVLSKQEPYDPNAAKSPELASRSE

SEQ ID NO: 269911 - protein, 409 aa, unidentified
MTDSGKRYVGLDVHKHYLIALGVDQELEVVMPARRVELSNLESWMKKNLTKQDDVVLEMTTNTWQLYDELSAYAGSVTVVHPPHVALITRSQVMNDKIAASILARLLAKGLLVGIWVPPQEVRELRGLVAQRQKMTRLATQAKNRLHAVIQRHHLKPPEGNPFRASQNKWWLALSLGQLEKMNVQSDLETLQFAEKQEARLQAEMTGIAAENEEIGRLLHISGFGVITAVTIYAAIGDIRRFAEAKKLAGYAGLGARVHDSGMTTRTGKITKAGRRDLRVALVEAAHVAANTHPHWKAEFARLEPRLGYNKTIVAIARKLLISVWHVLTYKVADRFAEPEAVAQKMLRFAYEVGKENRPGRQTAAGFARERMDVLGLGQELTSIPWGAKKPIPLPPSKLLKEESAVPNK

SEQ ID NO: 269912 - protein, 356 aa, unidentified
MSQKLNSEIAVIGIDIGKNSFHLVGQDRRGSIVLRQKWSRGQVEARLANLPPCLIGMEACTGAHHLSRRLQALGHDARLMPAKYVRPYSKGEKNDYRDADAIAEAVQRPTMKFVATKSADQLDLQALHRVRERLVGQRTGIINQIRAFLLERGIAVRQGLHFLRAELPAILAKRTDVLSPHMLHVIEDLAGDWRRLDERIDALSDEIMTLARQDKGCERLMTVPGIGPIISSAMVAAIGSGDAFSKGRDFGAWLGLVPKQMSTGDRTILGSISKRGNRYLRTLFVQAAWVVLVKIKPEGWERYGLKSWIEAAKKRLHHNVLAIALANKLARIAWAVLHKGRAFECVKTNATAPRPA

SEQ ID NO: 269913 - protein, 351 aa, unidentified
MPSKKDTTVIRAIGIDTGKNTLHMVGLDEKGAIVLREKVSRNRITARLVNMPPCLIGIEAGMATHYMSRELVALGHKVKQVPPAYARPFRQGHKNDFRDAQAVAEAVQRPSTRCVPIKTDDQLDLQALHRVRSRLIGDRTAVINQIRGFLLEHGIPVRQGPRFLRQQLPQILATRTDVLSPRMVRIIGEIVDDWENLDERIERVTDEIEGLARADVSCGQLMTVPGIGPIIASATVAAIGNGTAFAKGRDFAAWLGLVPKQMSTGDRTILGRITKRGNRYLRTLFVQGARAILLHPASWAKHSFGPWLTSAARRLHRNVLVIALANKLARIALTVLVQGRSYETRVEPAAV

SEQ ID NO: 269914 - protein, 429 aa, unidentified
MIIIGVDFHPEFQQIASVDTDTGEFQEKRLAHLEEAEKFYRALPGQKVRVGMEASGHARWFERLVAELQFELWVGDAAEIRTKRVRKQKTDRQDAQLILRLLLEDRFPQIWVPSWENRDLRQLLWHRHRMVQARTRIMNQLQAVALNEGLRCKKRLWRERGRQQLESFQLAPWASRRRRDLLELMDRLNPTITELTQAIEQEVEKCPEARRLRTHPGVGALTALAFVLILGRAERFGSGKQVASYLGLVPLEESSGNRRHLGHITKQGSSMLRFLLVGAAQVTVRSVPEWRSQYFHLAMRRGRKIAKIAMARRLAVRLYWMMRRGWDYEQVKKFGSHAGQPGIGLVACDMVKVVQKSARHKAEDEPEPRLQECLEPGRHDCNHATGCIPKRGHDINIPTVISTVCFRPSSSSPARTIKWQRYERFPRFP

SEQ ID NO: 269915 - protein, 307 aa, unidentified
MNGIGVGVDVSKAYLDVAVFEQNQVRRFDNGAAGWRALARWLKPFEPRQVVLEATGGYEQRALGALHDAGLPMRRINPRQARFFARATGQLAKTDRIDAKTLAHVASVIDLVPFQPLDEDAAKLRQYKSRRDHLVQNIATEKQRRRQLDDPLLRADLDAHIAYMEQALHRIEQVIATLIKDTPQARIAHTIKGVGPAMVAMMICDLPELGRLNRKAIAKLVGVAPLNRDSGLSVGQRTTWGGRAGPRAMLYMSALSAAQHDPQLKAFYVSLVGRGKPKRLTLVAVMRKLIVILNARMRETMAVPATA

SEQ ID NO: 269916 - protein, 354 aa, unidentified
MSQILNTTIAVIGIDIGKNSFHVVGLDARGAIVLRQKWSRGQVETRLANMPPCLIGMEACVGAHHLSRRLKLLGHDARLMPAKYVRPYNKGQKNDFRDAEAIAEAVQRPTMKFVATKTAEQLDLQALHRVRARLVSQRTGVINQIRAFLLERGVAVRQGLRFLRAELAGILATRTDVLSPRMVRVIEDLAGDWHRLDERIEGLSSEIATLAHQDTACARLMTVPGIGPIISSAMVAAIGNGDVFSKGRDFGAWLGLVPKQMSTGDRTILGKISRRGNRYLRVLFVQAAWVVLIKPKSWERYGLKPWIEAAKKRLHHNVLAIALANKLARIAWAVLNKERNFEYVRRNAMASRPA

SEQ ID NO: 269917 - protein, 410 aa, unidentified
MNAVGIDVSSRKSTVAVLRPLGEVVCLPFDVTHDIAGLASLVEKLKALDGETRVVMEHTGRYYEAVAKALHEAGLFVCAVNPLLIKEYGANSLRRVKTDKADAVKIARYALDNWADLRDFTPMDAIRYDLKTLNRQFQLASKQRTASANNLIALLEQSFPGIRKCFDSPVRSDGTQKWVDFAHSFWHVDCVRKQPFPAFCERYRKWCKRHAYFFKLSNAEEVYALAKRAVVLTPKSKVVKVLVQEAANQLISISRSVEVYRAEMDRLAAMLPEYPVVMAMYGVGKSYGPQLMAEIGDVRRFERKQALVAFAGIDPMPNQSGDKNVRSNKSSKRGSPYLRKTLFNVIRTYLQCAPQDEPVFQAEGKPFYVYMLAAANKFLRHYYAKLRDYFASLDTLQSVDPIPATLKASL

SEQ ID NO: 269918 - protein, 413 aa, unidentified
MRVMIERCCGLDVHQETVVACLLIGAPGVRPTKEVRTFRTMTRELEALRDWLKAAGVTHVGMESTGVYWRPVYAVLEGHFELIVGNARHIRNVPGRKTDVKDAEWIADLVRHGLIAKSFVPARPLRELRELLRYRRKLVESQSAERNRLLKLLETANIKLASVASDVFGVSGRAMLKTLSEGNATAEEIAGLAKGQLRRKHDDLVLALEGRVEEHHRFLLAIQLHRLEAAEHDIEALDSRIAERLEPYRTQHALLMQIPGVDWVVAAVLIAEIGIDMSVFLSAYHLASWAGVCPGNHESAGRQTSGRARKGNVHLRTILVGAATSASRTKGSYLKDKYHRLKARRGALRAALAIAHKILVAAYHMLAKGLAYRDLGEAYLDQLHQTRTAANLKRRLERLGYTVALQLKEATTA

SEQ ID NO: 269919 - protein, 351 aa, unidentified
MVYVGLDVHKEFCQACVIDRSGRVLSNERFSSTQEELDEFLDQFKNAKFVLESTGIWEFIYEGVENRGFEAVLAHPLKVRAIAEARVKTDKVDAETLAQLLRANLIPRSWVPSKDMRDLRQLVRQRAYLVRQSTSLKNRMHAELLRRGVRRPDGMLKPFSNKHIDWMRSLNIPTVNSCLCCLESIQAQIEGLNAQLLVEFQRRPDAQLIATIPGIGYYSALLIHAEIDDISRFPNPEKLSAYSGLVPTVSQSASSVHYGGVSKEGSAYLRWVLTEAVYSHTRYNPDSRISEFHARIARRRGKQKATSATARKLIHIIYWMLVRKQPYQSHGSNPGTKPAPYECVKGIGASP

SEQ ID NO: 269920 - protein, 341 aa, unidentified
MEQVSTIGLDIAKHVFQVHGEDAAGHLLFRKRLTRTKLIGFLAAQTPCVVAMEACAGAHYWGREIGKLGHCVRLIAPAYVKPFVKRQKNDAADAEAICEAAQRPSMRFVPVKSEEHQANAIVFRVRDLLVRQRTQCVNALRGHLFEHGYAFPQGIGHVTALAALVEEAQSSLPPGVRPVLQLLVDTFTSLEGQIAELDAEISRRSRTDPTARRLMTIPGVGPIIATAVMALAPAAQGFAAGRAFAAWLGLTPLQRSTGGKQKLGAVSKRGERTIRRLLIIGASAVVRQACRRGAPKGSWLAQMLARKPKMLVSVALANKTARIIWALLVKGGVYQAPAAAA

SEQ ID NO: 269921 - protein, 276 aa, unidentified
MSVYVGIDVHRKRSQVAVVTADGKVQLNRIVVNGSEPMLRLIGDLPAGTPVAFEAACGWGWLVDLLEDYGFEPHLVHPLRRKAIASARLKNDKVDAAILAQLLRADLLPEAWIAPAEVRQLRALLRHRASLVRLGTQQRNRIHAVVADFGFDRSGSYLSGPGRGWLAGLDLPPVSREVVADCLAVIDGLAPVIDRIDGELRQHAKADPRVKTLTTLPGVGQFTALVMLAEIGDISRFPSARKLASWAGLTPTVRGSDLHVRHGHISGRARPGCGGC

SEQ ID NO: 269922 - protein, 315 aa, unidentified
MDEQRTVFVGIDVSKDRLDVHLRPSGEAFCVPREGKGMDDLVIRLQGLSVALVVLEATGGFEATVAAALAGVGLPLCVVNPRQIRDFARAMGRLAKTDTLDAEVIALFAERVRPQARPLREPERVHLAELVGRRRQIIEMIGMETNRGRQAIDKPLARRLARHVAYLQKELDAIDHDIGDAIKHSPAWREAEALLKSVPCIGDVTARTLLAELPELGTVSRHQVAALVGVAPINRDSGLMRGRRAIAGGRTSVRAVLYMAALTAIRRRSPFRAFYDQLTAHGRPKKVALVAVMRKLLTILNAILRDHTPWRPLNA

SEQ ID NO: 269923 - protein, 341 aa, unidentified
MQITTIGLDIAKNVFQVHGIDAIEKVAVRKQLRRGQVIPFFKDLAPCLVGLEACATAHYWARELAKLGHEVRLMPAKVVKAYIKRNKNDAADAEAICEAVRRPTMRFVQVKSAEQQAQLMQHRARDLLMHQRTQLINATRSHLAELGIIAPQGREGVKELLAIIANDADTQLPNDARASLIVLAAQLQALQTTIGAIEKRIVVQHRANKESKRIQTVPGIGVIGASAIAATVTNPRIFRSGRDFAAWIGLVPRQMSTGGKPKLGPISKQGDRYLRRLLVVGAVSVLRRAKNNPEKFPWITRLLARRPFKVVAVALANKMARTAWALLMYGKTCRAARFATT

SEQ ID NO: 269924 - protein, 371 aa, unidentified
MPPTSQQLQKNGWIERMNSLGIDVGKKKCRAALKDERGRIIREFFFSNNNEGISALIRSASYYGKCTAVLESTGNMWIRIHDTLEENGIDTILANPYKTKIIAEAKIKSDKLDARILADLLRADLVYQSYVPAREFREKRSLVRHRISLVRNRTMLENKVHSLLDKYDYKSELADIFGKSGIIWLKTLDVSTIDRLIMNTTLAAIENINIQVDTISKELAKYGWDSDDVKILLSITGIDVFSAMLIATEIADVRRFCTPWKLVSYAGLAPSTRESSGKTKTGRISKQGSPWLRWILVQCAMCAVRYDQRLKSFYERLKSRKGSAKAIVATAKEILVIIWYMLTRRELYRHMNKDRYEQKLSRLKKIKESAI

SEQ ID NO: 269925 - protein, 425 aa, unidentified
MNFKQNEKINQVTEKTLVVGMDIAKRTHFACFTDDRGRVLQKSFPVSQSHDGFEQFYQKILAALREHDKSEVIVGIEPTGHYWLNLAYFLEDLGISLVMTNPMHVKRSKELDDNLPTKHDRKDALVIARLVKDGRFSYPRILKDMEAELRAGSTFRSKLTEELGAVKNMMIRWLDRYFPEFTQVFPSFGKMALAVLECTPFPSDLHERQLEEVMTLYREVDGIKSPQKPKAMRLIEVAANSIGITEGRQMARYEITTLVQRYHQLEKKIDDITQQLVELVQTSVEYESLKTVPGLGDSTIVDLLAEIGSFSHYEDPRQLIKLAGLTLRENSSGQHKGQKRISKRGRRKLRALLFRVMMPMLRHNEAFRKLHEYYTNRSINPLRKKQSIVVLCGKLLKVLHGISTKHKAFDAQRMMRDIPSLVEAV

SEQ ID NO: 269926 - protein, 380 aa, unidentified
MSYIQNIQPGEKTKGDNYFIITKTSIMVKDILKHVLGIDVAQKELVVTLGRLAQNLSIDLYAYKVFKNNRKGFVSLIKWLKKQVDDVSEVIFVMEATGVYHQKFAYYLNSQSYKVSIVLPNKISNYMRTLDTKTITDKTASQAICQFGLERNLDYWEPPKEVYKELKQLVREREQIVQERSIVKNQLHAEKSEAYPGKRSIKRFEARIKFLNEQEKQIKDDIKEILNKEENIELKEEINRLSTIPGVGCLTAVIVLAETNGFELIRNKRQLTSYAGLDVKEKQSGTSVRKKPRISKKGNKYLRKAMHFPALTAIKYSERYKEYYKRLVSKSGIKMKGVVAVQRKLLELIYVMYKNKTVYQENYEQEKRAAVHLETATLGN

SEQ ID NO: 269927 - protein, 407 aa, unidentified
MRPIYERCCGLDVHKKTVVACRLTPEGSQTRGFGTMTGELIQLRDWLLEAGVTHVAMESTGVYWKPVFNLLEDQGMELMVVNARHVKAVPGRKTDVKDAEWLAELLQHGLLKASFIPDRESRERRELVRYRRSLVEQRAHLVQRIQKLLEGANIKLGDVASDVMGVSGRAMLQALAAGVDDPAAVAGMAKTALRNKIPELERALTGSVREHQRFLLRSQFRLLESIETEIAALDEEVAERMRPFQTALDRLDEIPGIGRRAAEQILVETGTEMSRFPTSGHFASWARVCPGNNESAGKRQYASIGGGNRWLRTALLEAAWTVSHSRKPTFFTARYRRLAARRGRKRAAVAIAHSLLIAVYHVLKDGVVFQDLGPTHFERRNQEAIVRRSLHRLEALGYKVTVEAMPA

SEQ ID NO: 269928 - protein, 461 aa, unidentified
MPDGGGENSSPRRTKQIEGLPVIRRNVAGIDLGSERHWVCAPVAGSISREVADFGATTPELIRMTKWLQACGVESVAMESTGVYWIAPHEVLEAAGLEVLLVDTRQLARVPGRDKKTDPSDCEWIQRLHSCGLLRGSFRPREEVCMLRTLVRDKANLVAECGDWLRRMQKSLDQMNVRVHRAVSHMDGITGMAILRAIAEGERDAQKLAKLRDTRCHKSEEEIAEQLSGHWREDHLFSLRQSLKMYDAIQQRLADYDREILQRLAAMQREEFRQQPPPPVKNPHKAKNMKKRGEEPMREALFRMSGVDLTGIDAIGVETVQVVLSEYGPDLSRFPTEKQFVSHVTLTPHKPMSGGKPVRKKRRSSASTRVAAALRMAAVSLRNSATALGAYYRKIARRLTGDVAVFATARKLATLIYRLLRWGQPYVDEGAEAFERRYQETRLKNLKAKAKELGYQLVASN

SEQ ID NO: 269929 - protein, 359 aa, unidentified
MIVIGIDPHMKSHTAVAVEAASGRTLAEKTVSADAQGHEQLLLWARGLGPERLFALEDCRHLTGRLERHLLPRGERLVRVPPKLMAGARSSARSYGKSDPIDAAAVARAALREPDLPVAVLAGPEQEVRLLADHRDDLVGERGRMQKRLRWHLHDLEVGLELPPRVLDRYVWLDRVAAALHGLPPGTRRRIALEQVRRCRELTAEIRALEREIDALMRALAPELLALPGCSALLAAQLVGQVAGAGRFSSEAAFAMHAGTAPLPVSSGKSTRHRLSRCGNRRLNAAIHMIAITQARMHPPAIAFMERKQGEGMSSREARRCLKRHIARTVFRALLSGERARAGEVVQAEFGAEELAVAV

SEQ ID NO: 269930 - protein, 342 aa, unidentified
MTIVMIGIDLGKNSCSVAALDELGAVVLRRRMRPTSIVEFASKYAPCIVAMEACCGAHHLGRQLVARGHTVKLMPPEYVRPYVKAQKNDDRDAEAIAEAATRPTMRFVELKSQEQLDIQSLHRVRSRLVGTRTMLINQMRALLLERGITVAQGRHKFEKALDKILMEEALLAPGRLRDLLCEMRDEWSVLDRRVEALDKEFAQLARTDEMARRLTSIPGVGPLNATALVAAVGKAEAFEQARDLGAWLGLVPRQYTTGGKPRLLGISKRGNTYLRTLLIHGARAALPSLARTNTALGAWLRGLQARCHPNTVVVALANKLARIAWVLIRRETLFSLERASTA

SEQ ID NO: 269931 - protein, 400 aa, unidentified
MIDTGDIDVFLGLDVGKGEHHATAVTPAGKKAFDKRLPNTEPKLRELFSKLQAKHGTVLVVVDQPASIGALPLAVAREMGCPVAYLPGLTMRRIADLYPGEAKTDARDAFIIADAARAMPHTLRAIAGEDETIAELEMIVGFDDDLAGEATRVTNRLHGLLTQIHPSLERVLGPRLQHPAVLTLLERFGSPAQIRKAGRRRLLTLLRPKAPRLAERLVEDIFTALDEQSVTVPGTDAAALIVPSLAASLSTVLDQRKLLAGRIEELLAAHPLSKVLTSLPGVGVRTGARILIEVGDGSTFPTAGHLAAYAGLAPATRNSGSSIRGEQPSRRGNKQLKRAFFLSAFAALGDPASRAYYDRKIAQGKHHTQALLCLARRRADVLFAMLRDGTFYEPQPAKAT

SEQ ID NO: 269932 - protein, 316 aa, unidentified
MDKMMIGVDVAKEWVDIAVAGESRVRRIENCEQAIDAWLAEIGPGTVYLVAFEPTGGYERVVRRCLNRAKVAFAQVHPNEVVAFRRRRGIKAKTDRIDAKLLAAFAAEELARRELAAVPEADELLRELTARRRQLQTLLHAETCRRDVVDSAVVRKSLRTIAATIERSLAAVDTAIAERIASSAYAETSRRLQTFCGVGPAIAETLIADLPELGHLSGKQIAALCGLAPHTRDSGRQRRRAAIGHGRPGVRKMLFNGARSAIQFNPVMKAFYRHLVDDNHRLGKVALTAVMRKMLVTLNAMVRDGSDWKHAAKPAG

SEQ ID NO: 269933 - protein, 342 aa, unidentified
MQIAILGIDLGKNSCSVVGLDVAGRVVLRRRLRRDGVIKLAAGMPGCVIAMEACCGAHHLGRLLREHGHQVRLMSPEYVRPYVKAQKNDDRDAEAIAEAATRPTMRFVELKSEAQLDMQSLHRARDRLVGERTALINQLRAVLLERGIVVPQGRRKLERYVDALLAEEEIRFSPRTRLLVEDLRAEWRELDRRISAFDDEFAAQARTDETARLLTSIPGIGPLNATALTAAIGNAQTFGRGRDLAAWLGLVPKQVTTGGKPKLLGISKRGNGYLRKMLIHGARAALPTLSKGETPLGAWLRGLLGRAHVNTVVVALAAKLARIAWAVIRSGKKFDMKAATAS

SEQ ID NO: 269934 - protein, 332 aa, unidentified
MNMHPQGRVAKREVRSNAGIDVSKQHLDVCCGSDERRLDNDASGWSELIADFKAKEVDLVVVEATGGFERGVVCALQAAGIEVARVNPRQARDFAKSMGVLAKTDRIDARCLRDFADVLARHADRAKYITAPVDAQRQLLAALMTRRRQLIDMRVAETQRLEQANTRAARSIRAVLKTLERQIADIDRDVDAQMDQHFKPQRKLLDSVKGVGAVTTLALLSALPELGSLGRRQISKLAGIAPLADDSGKRTGKRRIWGGRAEVRTALYMATLSAMRYNPAIAAMYQRLLEMGKPKKVAMVACMRKLLTILNAMLRDQASWNAAKHLHNPVSA

SEQ ID NO: 269935 - protein, 332 aa, unidentified
MKETRNEVKPKEACMIYVGIDVSKDTLAIDAGDLYTGTIRNSKSALGKAIRTIRKAAGGRNARITYVAEHTGCYSLLVHIELAKAGEAVSMVDPKRVRHFAKVMAVAAKSDPLDAVVIRKFAEFAKPEPTPLPSENLVESRETIRSRSLLMKVKVMLGALASVTISATCKAALKTVIAAIDRQVDNLDGKLLELFKRADATTRRKVVEMEKIRGVGRLTAFSIATAVPEIGTLGPQRAASISGLAPFVRQSGKWKGYQKISAGRSEVRRALYMPAVCAIVHNEVLRKVYRHLTIDLRKPKKVAITAVMRKLIIHMDRVCAALPSAEATVAGE

SEQ ID NO: 269936 - protein, 423 aa, unidentified
MKSMAHRARGSQVVPDGERGMVVGVDVSQETLDYGGFRPDWRGAVAAAGQDEAGFAKLRELVAELEGQGREVWVAFEPTGPYSTCLARWLRGHGARVVQVNPYHVKRTKEVRDNSPHKSDGKDPGVIADLVWQGCYQQVMGSEGVYAELRVATREWASLVKKRTAIRNELHAHLTVWFPELRTVFKDRLCQSVRGMVRRFGSPQEAAHKGVRSVRAALREASSGRTTKRAGAVWQAATATVAPPQGQQARRRSMLASLTLLEVVEARQAQLGGELEALLAPLPEAQSLVSVTGVGTITAAGLLGECGDLGAYATYAQVEKHLGLNLYSISSGKRQGRCHISKRGCSWGRYLMCHIGLMQTRRGGRYHEFAQRQKQQGKSTGQIRVAAGRKLLRLLYALARDRARYDPGRSLTGAGARDGQVIH

SEQ ID NO: 269937 - protein, 366 aa, unidentified
MTKSSTVVSNRVEIFKDDKLTIGVDLGDRFSHYCVLNGAGEVIWEDRLPTTPKGIDEVFSKIPPSRVALETGTHSPWVSRQLARLEHEVIVAHARNVRLIGGSSRKDDRLDARTLARLARIDPGLLGPVRHRSAKAQIHLTVIRARAGLVSARTALVNAARGLTKSYGERLQKCGTQQMNRESAKGLSQELRDALDPLLAEIESLNARIAEYDRRIEQIAKEVYPQVALLKQVKGVGTLIALTYVLTLDDPHRFRRSRDAGCFVGLRPGRRNSGMSQPQLHISKEGDRYLRTMLVQGAHYILGPFGEDSDLRRWGLRLAERGGKNAKKRAVVAVARKLAVLLHKLWVSGEVYEPLRNNHKVVGRVA

SEQ ID NO: 269938 - protein, 338 aa, unidentified
MAIIAIGIDLAKNVFAVHGVDAAGKAVLVRPAVRRDALLELIAKLPPCLIGMEACSGAHHWARQFQQFGHQVRIIAAKFVAPYRLSGKRGKNDAADAQAICEAVQRPQMRFVPIKSEDAQGRLSIHRVRQGFIEQRTATINRIRGLLSEYGHVLPQRAEVVRREAGQCLEDLPGWANTAIGDLLSELHRLDERIAEYDRHIAAMAKADDRCRKLMEVPGIGDKTATALMASIGSAHDFKCGKQLAAWLGLVPSQYSSGGKQRLGRITKAGDGYLRMLLILGARAVVAAAKKKEDRLSKWVTDLADRRGYWKAVVAVAAKNARMAWAMLSKGEAFKPVT

SEQ ID NO: 269939 - protein, 375 aa, unidentified
MSNLSEAFVGLDTSKLRNSVAIAEGGRTGEVRFLGEIDTTPAAIRKLVKKLATKYERLSFCYEAGPTGYGAYRQITGLGHDCIVAAPSLIPKKPGDRVKTNRRDAVTLAKLHRAGELTAVWVPDCGHEAMREVTRARETAMTDLRRKRQQVSAFLLRQGLHYAAEKKTWTKAHMDWLAGQKLEHVEQRIVFEEMMLAVREAQARLERLADAIRVAVPEWSLAEGVTALMAMRGMDLVAAATFLAEIGDLSRFQGPRELMAYLGLVPSEDSTGDTIKRGPITKTGNRRARRMLVECSWSYRHPPRVGRTKQEKVAAAPQAVREIAWKAQCRLHSRYRSLIRRGKLKTVANTAVARELAGFLWAVNRAITKTGAAAG

SEQ ID NO: 269940 - protein, 583 aa, unidentified
MTNKLLAISRLKPGQVKTFDLPLALGQFAAGCDIDKLIGTYCVLYATPEGFKAEVQQFANSPSGCQQALAWVLAHAQKHLPPAKKPLFIIESTGCYHQLPVKTFNDATTVVLVNPHRIKAILRADGKDDIKDALTLTKLVLSFDLKQSVLAVGGQKRLRKVLRIKRKLLDNRTQISNRIGSLLTENGIPLPNVVKVMTLSGRNICHAIAQGQTNRDLLMLLWKGKNLPAAGLELVVQGQPFLSVLATFAPTMKKNHVQRLKKIHDTLYYVDALDNSIRQLLGQQLRLLETYDQELELIEQQVIEAIAAYKIELPGGDQRTAQEMIDLIRTAPVFSEESARMLVAEAGLNFPEVYGNPDALVRNLGLTPGNSKSAGKVVAKEVVKGNQHFKPVIVQAATAFLRRRLDDDQPGWLLWLWARRYQQRSDAQHARIAVARKITRSVFFMCRNWEPYDDSQHRLIREDHALLTAQRLANTAKELSASHILGLEAAAQLKQASKAINQALGLQFNRYKLCPFDRDFSVDTLGLSTRVTNVLLKNDIVTVSQLVLRLVSGTLLSLKGLGQKAAQEIEDALVFKKLVELQD

SEQ ID NO: 269941 - protein, 345 aa, unidentified
MKHYAGLDVSVKETSLCILDETGKVCRELKVTSHPDDLVRVLQDPAWRLERVGLEAGPLSQWLYSGLAAAGLPVICIETRHTKAFLKAQVNKTDRNDARGIAQMMRVNLFRPVHVKTLASQHRRALLTARKLLQEKAIAIENDIRGLLRNFGLKVGIIGKVRFEDRIRELVAGLPELAEIMACLLEARQSLRERFAILHRKVLVTVRDDDVCRRLMTIPGVGPVVSLAFSATIDIPARFKTSKAIGPALGLTPVLNQSGESNRIGRVSLCGDAMMRALLYEAAQVLLTRVQKWSWSKAWAVNVARRRGLQKAIVALARRLAVIMQRLWSAGTEFRWTRESAVATA

SEQ ID NO: 269942 - protein, 321 aa, unidentified
MDAIGIDIAKRKFDLAWLSGGKLKTKVFDNTDKGHAELLAWLKKHNLTTENCHLAMEATSQYYEPVALALFDAGYMVSVVNPLQIKAFGESLMRRQKTDRADAELIARFCEVNKPEPWHAPPPKVRELQRLLARLEAVQGMHVQEQNRRHEAQGFALESIGRVIETLELEIAYLEGQIRDHIDRNPDLREQDELLQSIPGVGPVVSSYAIAWLRGERFDDVRQAVAFVGLSPRHNQSGSSIQGKSRISRLGHGRLRKILYWPAMSAMRYNAAAAALTQRLTAAGKNKKVAIIAVMRKLVHWMVGVIKSGKPFDVNLALARI

SEQ ID NO: 269943 - protein, 329 aa, unidentified
MSHLDFASIEVSKKELKVIVLRDGRILKPRDFTNAPRGHQAVCGHLERDGRTVRAVLEATGVYSRDLAVTLSRRPGIEVMVLNPQGSRNFARAMLKRGKTDKVDAEVLLEYARRMPFKPFKPPSEAAYKLRAISRKMQSLAKLRGEMYGQLEAERGTKTTPKIVIALTQKMIRVYNKAIEKLKGEAAKLIALAPDLARKFELLQTIPGVAELSAIYILGELATLPDYLGPKQLTAFAGLDPQQFQSGSSVNKKKGISKKGNVYLRTALYMPAMSASYHDPYISRFKQTLTGRGKKPLVALTAVMRKLLHSIYGMLKNDTPFEGRLFYRS

SEQ ID NO: 269944 - protein, 734 aa, unidentified
MIALLCLVLAVLTAPFKSRSRLEAENAVLRHQLIVLQRKVRGRVRLTNNDRRFLIQLYRWFPSILQVLTIVQPETLVRWHRAGFRCYWRWKSSSRGGRPQIETDLRALIRRMSIENPLWGAPRIHGELLKLGFEVAQSSVAKYMVKRRGSPSQGWRTFLRNHAPDIAAMDLFVVPTIGFDLLYAFIIVRLDRRDLVWINVTSHPTAEWIARQITEAFPWDDAPQYLIRDRDQLYGAIVTHRLRVMGIRDKPTAPASPWQNGFAERLIGSIRRECLDHIVVMGEEHLRRILRSYARYYNEIRTHQSLDKDAPVSRPAQQAGNTCGFRSHGEVDSNRYSGRVRLLPPTLEATMQTVAERPEAPTAIRTDLGAIFVSLELSRSTWLITSLSPGGGEKMSKHVVRGGDVTGLLERFAQLREKTRARTGKVFSFVVIQEAGLDGFWIDRVLQNEGIESHVVDPASIATSRRRRRAKTDRIDGEALVRALLAYKRGEPRVCVMVKAPTPEEEDRRRLCRERKVLIAERIRHVNRVKGLLFSQGISGYEPLRRDRRERLVTLQTGDGRLLPDHLKAQVCRELDRLELLLEQIKAVEAERDVLLAAQQAPAAMLLDIKGIGPEFAAILWSEGLFRHFDNRRQVASYAGLAPTPWQSGSVDREQGVSKAGNPRLRTTLIQLAWLWLRHQPQSALALWFEERVRRNGDRLKKTTIVALARKLLVALWKYVTAGVVIEGAVMKAA

SEQ ID NO: 269945 - protein, 438 aa, unidentified
MSNKVFFNLDDLFISVGIDIGADFSWMSIALPNQQFVGKPYKILHNSIDSLTTAVSKIKEAEELYSLESHIFLESTGIYHYPLFCYLRDKGFNCSVINPIITKNSTNINIRKVHNDRFDSKKAALVGLKPDLKVSLMPSDLALNCRNLCREYYDLMDNRSAYVNKLQGELRMVFPQYLDIFSKVTINTSLTLLETYTSPSAFLKADKQEIIDIIKSTARFGLTYAQNKYNAIIQAATDANQFGYIIDSNIKRIRLYISFIRKYDEEINNILESLHELVDANEDADFVKQIHLIETFKGAGFLSAVSIMGEIGDFSAFSKPKQLFAYFGLDPAVKQSGKFEGTKVQMSKRGSSIARRVIHTLSLQSISISRNGKAKNPVLREYYLQKCDSKPKLVAMGAVSHKVCNMIFAILRDNKPFEIITPQEHIKQYNAAKCDIAA

SEQ ID NO: 269946 - protein, 340 aa, unidentified
MQLYAGIDLHASNNYLAVIDENGKRIFKQRLTNKNEVILSKLEGFHEQMVGVVVESTFNWYWLVDLLQEAGYQVNLANPAAIQKYTGLKHSDDKHDAFWLAEMLRLGILPKGYIYPKEERPVRDLLRKRGHLVRLRTSLILSLQNIIVRNLSIHLNSNDIKNFRKTTFASIMESNEDLATACVVSKESIDFLTERIQAVESIIEQKVKLKDQYRHLLTIPGIGKILASTIMLETGPVERFPKVGDYVSYCRKVNTKWTSNDKKKGKGNKKNGNKYLAWAFSEAAEIARRYDTQCRDWYNRKRQKTNFMVAHQALAHKLARAAYCIMKENVAYMPGKLFSL

SEQ ID NO: 269947 - protein, 387 aa, unidentified
MIYVGIDIAKQKHFAAVMTADGEVVCDPFGFNNDAEGFKLLLSKISHLDRSNLLIGLESTAHYGENLICYLYDLGFKIVVINPIQTAALRKTGIRKTKTDKLDTLIIIKSMIVNKHRLFTKRDADSVRLKYLCRFRENLKRSRSRSKIQLRSYVDILFPEIQYFIKSGLHTSTCYEILKRYSNPNDIAALHLTLLSNLLHNASKGHFGKEEAIALKSLAKSSVGTRNTNVSIQITQTIAHVELLEKQITEIDKAIETTMIEMNSIILTIPGVGYLNGAMILGEIGDISRFSNPSKLLAYAGLDPTVNQSGKFNAKSTRMSKRGSFLLRYALINAAWNLSNKSKTFADYFNLKKSQGNNHYGALGHVAHKLVRVIFKMLKDNVAFNLE

SEQ ID NO: 269948 - protein, 466 aa, unidentified
MENNYILYVGMDSSKGKADAAILKVSDRRSVKPKFLRKKLSFKFVKSEVTSFLETVRSYSDDNCTSICFALEVTGIYSTNVYNFIKDNLNDNESIKFLNTDFVNQWRNAHNIAKSDPLDAQTISTIIGTDSDVQYVNDNVFKNKNGYQDLKALVHRHYQIKKIYSQEINRLIAQCDCLFPELQYVFEPKSAAFIAVLSSYPTTHDIINASRLEVFNVVYEATKHRCSMDKIDKLFDLCHDTLVPDNISSYGRSIILDLVENIKNIKGQLKMIERYIRDVASLNPAYKLLLTITGCGPLTAATVIAETGDIKRFKNADCFVSYSGTSPRNKRSGTSVETMGKISKRGSRYLRHAIYMIAEFARRHNPVLKQQFERIKNGNKKRHKLANIAIANKIARYIYSIMKNESGFVILHEHIMRLPEETQNTFFNSISLDFPENTRKQIYQYSDIDGEVHKFVYTKLEETMII

SEQ ID NO: 269949 - protein, 425 aa, unidentified
MKVTYLTCCGVDVHKSFLVATIVKTTGGIEPSYQKKRFSTFNNSILMFKQWLIENDCHDVCMESTGKYWVPVFNLLEDEINVTIANPKWVKAVKGNKDDTKDSKWIGDLFRLGLVKGSYIPCKKIRILREYTRYRYKLVSCRSSEKNRYQNALTVCNVALDSVVSDIFGKSSTSIIDYLLEQTDNSINHEEIASKLLRSLKSKEDAVIESIDGYQMTDSQKYRMRLVRAHMDYITAEINDVDSMIESMISSDPDYENAIRFLMTIPGVKRDSAIAIISEIGIDMSQFCSSKRLCCWAGLVPVSNESGGKKKSVRITRAGVYLKPALVQCAHAAVRSEKSPYHKKKYESLMKRRGKKRAIVAIARMILTAVYQMLSTGEEWNPSDLYKIDMPETLVEKQKAKAIKQAMKLLEREGLYPPPEEPLAS

SEQ ID NO: 269950 - protein, 352 aa, unidentified
MKKESVGCFSNKNLFVGIDVHKKRWVVTVRTYDLELKTYSMDPLAEELEKFLLDNYAGALLHIVYECCFSGFWIYDYFHQRGYSIIVTPTNRIYRDGSVVKTDKIDSRKLAFQHSRGLLKEVKVPEMKIREYRSLFRIYDKEKMRLGQILRQVRSILEAKNHPLKWERWNKEMVEKLSALKFQEEIFNKKFTSLLKEYEYVQEQIKDSEGRIKEISEDKELSRRIRRIEKINGIGIVSAVRLVVYLFDMKKRFESGEKLVHYLGLTPGEHSTGEQIIRSRTGLIGNKQLRSIIIQLAWVAVRKDGNLLNKFERVYKSSGCKQKAIVAVARKLMVKVHSITEKEEEYEVNIAA

SEQ ID NO: 269951 - protein, 349 aa, unidentified
MGEVSTIGVDIAKSVFQIHGVDADGTVVIRKRIGRAKVLEFFADLPLCLVGMEACATAHQWARELNKLGHDTRLMPPTYVKAYVKRGKNDAADAAAICEAVTRPSMRFVPIKSVEQQSALMLHRTRDLLIRQRTQLINALRAHLAELGLVAAKGHEGLQQLVMAVTESSDERLPSHARFACQAIVLQLHAVQTQINGLDKRIIQAHRANADSKRLEAIPGFGVILSTAVVATMTDPKAFRTGREFAAWIGLVPRQNSTGGKERLGSISKQGDRYLRRLLVLGAISIVGTARARPDKYPWVTELLARRPAKVVAVALANKMARTAWAVLARGETYRALTRSSSAAIAAAA

SEQ ID NO: 269952 - protein, 396 aa, unidentified
MAAIWAGIDAGKTHHHCVAIDESGHRLLSRRVANDEPELLELLTDVLALGDEVVWGIDMADGGAALTITILLNHDQPVHYISGRAIHRASESYRGEGKTDAKDAAVIADQVRIRRDLHPLRTGDETVTDLKILTGRRIDLVTDRTRTVNRLRSRLTGFFPGLERELDLTNTGPLILLTGYQTPAAIRRIGSRRLQTWLRNRHVIHAERLAGTAVQAAERQYTCLPGEKLAAELVRTLAMEVLALNQQVTDLDKAIEARFREHPAYDVITSMPGLGIILGAEFLAATGGDMTAFGTADRLAGFGGVAPVPRDSGKISGNLRRPQRYNRRLQRVLYISALFSIRTCEESRRFYDRKRAEGKRHTQAVLALARRRVNVLWALLRDRRRYEPTPPTALAA

SEQ ID NO: 269953 - protein, 411 aa, unidentified
MYVIYPRCAACDVHKKMVVVTVLITAEDGTVKKLTKTFPTMTANLLALDEWLRSLEIVHVALESTGVFWHPVYNILEEGRTIILVNPQHMKAVPGRKTDVKDSEWLADLLRHGLLKASFIPPKPIRELRELTRYRKTLVQERTQEINRLQKVLEGANVKLAAVATDILGKSGRSMVEALAGGEQDAEALAELARGRLRAKLPQLRLALQGRVQPHHRFLLERILAHIDFLEESLAQLQKEIEQHLLPFVEAMTLAQSVIGIQETSAAAILAEIGTDMSRFPSDKHLASWAGVCPGNKQSGGKRLSGATTSGNPHLRAVLAEVAWAISHTKDNYLSAQYHRLARRRGKRKAIVAISHSVLVILYHVLREKKPYQDLGADYFAKLDSSRQEHHHIRQLEQLGYTVTLTPKDAA

SEQ ID NO: 269954 - protein, 415 aa, unidentified
MNAVGIDVSKGKSMVAALRPMGEVALLPQEFLHTEVGLEQMAYAIIALGEDTRVIMEATGRYHEPVAAALHEYGIYVCVLNPLFIKQSGGGSIRKVKTDKADAMKIAKYGLDNWVDLREYTPMDTVRQQLKLCSRQYNLYMKTVVSLQNNLISLTDKTFPGVNELFSSPERADGHQKWVDFVMTFWHCDCICRVSEKAFTERYQKWCKHKGYHFSAEKALDVYAGSCGYFTTLPKNDNTKLLITTAAQQLLAGKMTLAALRAEMARLARQLPEYDTVHAMYGVGEITAAQLMAEIGDVRRFPRRSSIVGFAGVDPAVNQSGKHEAKSTPTTKRGSPHLRKTLYQIACTYLRKAPEDEPVYQFLNKKRAEGKPYFVYMTAAQNKFLRIYYARVKECLARVKECLEDFDAQQNSAQS

SEQ ID NO: 269955 - protein, 360 aa, unidentified
MVESTPVVAFDQHAVSVVAAVLLPGQRTPALHALPAELPAISRFVERLRLDRVQCCYEAGPCGFELQRHLRARGIGCDVIAPALIPRRAGNRVKTDRRDAAQLAVLYRAGALTAIHVPTEAEEAVRDLLRCREDIGTDLLRAKHRLSKFLLRHGRRCPATKPWSKRFWGWLAVQRWPLAALEQTFLSYRRAIDDLIARRCAIDADLREALTIEPLAGRVARLRCFRGIDDLTALTIATELGDATRFAAARQVMAFTGLVPSEYSSGASQRRGGITKTGNAHLRRVLVEAAWHYRHRPAVGTRLRGRLHGASPIAVRCAWTAQHRLHARYRRLIARGKSPQLAATAVARELSAFVWSVLTQ

SEQ ID NO: 269956 - protein, 395 aa, unidentified
MFIVGIDVAKRSHEVCMITSDGQTVQRPFSIRNNCTGYNLMLEKIRKHTNIKSQIVFAMESTAHYWLALFTRLRKDGYHVILLNPIQTSAMRDMFIRKIKTDAKDSFIIAELIRFGRYAENNVAQDRLLALKELCRNRFYLVDMAGDLKRKLIALIDRVFPEYEAQFDTIFCKSSVAVLKKYPTPQKLSNAHLDKLTELLWNSSNGHFGEWKARELKELARNSFGVEDCDGAYSTLILLMLDQIQSLSGKADALEKEISRLFQSFDTTVTTIPGVGPIIGAVILSEVGDISRFSSADKLAAYIGVDPSVNQSGEFQAAHAHMSKRGSPYLCRCIWMASQVAVQRDPMFRAYYEKKAAEGLKYMTIIGHVTRKMTAVIFAILRDHKVYEPVLPTAA

SEQ ID NO: 269957 - protein, 433 aa, unidentified
MKKTTMAAKVRTEPEPKFVAFVGIDWADQKHVWSLQAANSTQREQGELEHRPEVIEAWVRQLCRRFGPGPIAVAVEQVKGALVYRLRKYECWHLYPVPSTMSASMPKALYPSGAKDDPGDAELLLELLLLHRDKLRRLTPDNEATRLVQNLVEERRKLVDEKTAQLNRLIGYLKVYFPQMLEWFAKLDSKLVCDFLERWPSLEELQAVPAGEVKQFFHHRSGRHGELTGWRMKGMSQAMPAIRDRAVIEAKRTVVQVIAGLLRTLLEGIATLDRKIAEAAQAHPDFFIFQSLPGAGAALAPRLLAALGSQRDRYTSADEVQKYAGIAPVTETSGKKKWVHFRWAASKFLRQSFHEWAGHTIGHSIWARAYYQLQRERGQEHHAAIRSLAFKWIRIVFRCWQDRVAYDETRYLTVLAKRGSHLIPAFAAATGSK

SEQ ID NO: 269958 - protein, 343 aa, unidentified
MQNDTRIAVDLAKSVFEIAVSDRPGKVARRERLPRSRFLTFFAQQPAATVVMEACGSAHYWGRRIEQLGHRVTLLPPHQVRPYVRRNKTDRTDAKGILEASRNDDIHPVPVKTVAQQTLTSLHRLRSGWMAERTARLNTLRGLLRELGVFIPVGARQVVPAVWILIEDADSDLPDALRPLLAEACREIRDIEARIKQVERQLEAIAQQLPVVAHLLTIPGVGLLTATALFAFIGNIHRFPSGRHLASWLGLTPREHSSGLKRRLGGISKRGDGYLRTLLIHGARSVLLHARKEQPDHLRDWAHKLEHTHVHNKAAVAVANKMARIIWAVWSRLQDYGQAPKAD

SEQ ID NO: 269959 - protein, 362 aa, unidentified
MTILADPAAGRRRPSAWVIGVDTHTDTHAATLIDEVGAVVAQTEVPATPAGYARLQAWAQALTPTGRRVFWAVEGTRSHGHGLTRHLHTAGHRVVEAAKPDARRRRRGKSDPLDATHAAQAALATDRHPTARHAEPRADGPREALRMLLITRRHDTDMRTATVNLFKSLLLGAGDLRETLRPLTTTRQVHTVGSLPHDPTADLETQVRLQALHRAATTIRDLDQAITANEKQLRALVKQACPGLLDLPGVGPVTAAVLLTVWSHHGRVHSEAAFAALGGISPLQASSGRVTRHRLNRGGDRALNAAVHTIVTTRRRMGHTPTSDYITRRTTEGLNPKEILRCLKRYAIRNLYRFIETNAVTA

SEQ ID NO: 269960 - protein, 461 aa, unidentified
MKTRLQNRKNKKTRIKLDSLPVLEPNAAGIDIAHREHWCAVPPGRCEKPVRPFGTFTEDLEKMADWLRDCGITTVAMESTGVYWIPAFQVLERRGFKVCLVNARHVKNVSGRKSDVLDCQWIQRLHSCGLLNASFRPADAMCVLRSYLRYRDDLVCARSVQCQHMQKALQQMNVQLHQVLSDVTGASGRRIIEAILAGERDARKMAGLADRQVRASAATIEKALRGDYRAEHLFVLQSAFDLHQTCERKIHLCDEQIIAQLAQLPARVDLKDKPVPPPKPGRPRLLDMVAGTDLRAELYRCTGVDLTAIEGVGVLTAQVVISEIGLDMTRWPSEKQFASWLGLCPDNRISGGKVLSSHTRPVVNPVADALRIAATTLQHSKTALGAFYRRMRAKLGAASAITATAHKLARIVYRLLKYGELYVRQGMEDYEKKYRERVLHNLKKSAAGFGFQLTPTQQLAS

SEQ ID NO: 269961 - protein, 404 aa, unidentified
MYNAVGIDVSKAKSTVAVLQPGGTVLRKPFDVSHTSQSLHELSDYLGSLDGNTKIVMECTGRYHEPVVKALSEAGLFVSVVNPHLIKNFGNNSLRKVKSDPADAKKIARYTLDNWAELRQYSGMDNTRTQLKTLNSQFSFFMKQKVAAKANLIALLDNTYPSVNKLFDSPVREDGSEKWVDYAYSFWHVDCVRRIGLKAFTERYRAFCKKHHYIFQPDKPEKLFNASKELVAVFPKEKTYKLLIQQSIHQLNLASEHVERLRKEMDELASTLPEYSTVMGIYGVGKTYGPQLIAEIGDVSRFTHREALTAFAGVDPGVDESGQHKSKSNRASKVGSARLRKTLFQIMTTLLQNAPQDDPVYRFLDKKRSQGKPYYVYMTAGANKFLRIYYGKVKECLRNLEQAE

SEQ ID NO: 269962 - protein, 421 aa, unidentified
MGKLKIVYPICCGMDVHRDFLIACIASTNAQGVTEYQSRRFSTYTGNLRELRDWLLANDCKDVCMESTGEYWFPIHNILEDSCHVVVSHPKFVKAIKGKKTDKKDAQWIADLFKHDLVRGSFIPPKDIRQLRDLCRYWVKLSSYMTGEKNRAQNCLTVSNFKLDDVFSNVFGKSASAITTQLLDHPGEPFDVAPFVHGRCKTPIAQIQKAVDGIFIHEQAEKLKIIRSHMDSLEKRKAELESLILEIAQNYLPQIELLLTVPGIHDALTAIRILAEIGADMTVFDTSKHLCSWAGLTPQNAESAGKKKTTRIGKSGAYLKPLLIQVALAASRSEKHPEIYGKKQALQKRRGKKKAIIAIARRLLTAIYHILSKGEPYDPTAYRKEDKPPVARQISQEKAFVMLARMGYVVVLDSPPPPLPA

SEQ ID NO: 269963 - protein, 373 aa, unidentified
MTDYDAYIGLDVHKDSVSVAIADAGRSGEVRLFGAIPNEPDAISKLVKKLSSRHGRVEFVYEAGPCGYNVFRQIEALGFVCRVVAPSHTPVRPGNRQKNDTRDAVMLARLLRAGELTFVWVPDVVHEAMRDLVRARSVASHDARKARTLIQLFLLKHDLRYSAKSWTSRHRTWLRNRHFQHHAQQIAFQSYLNRLEQAEARKKELEDQIAVISQTWSLARTVMNLQAFKGIGLVIAATLVAEVGIFSRFDSPRKLMAYLGLVPGEHSSGGSVRPRGITKTGNSALRALLFEAAWSYRVQAKVGNWMHKRRPDVPQAINDIAWKAQVRLSARYRKLVGSGKKSNVAITAVARELVGFLWDVARKTEVETMSPAS

SEQ ID NO: 269964 - protein, 404 aa, unidentified
MNAVGIDVSKGKSMVAALRPFGEVALAPREFPHTAAGLENLGEEIMGLGEGTRVIMEATGRYHEPVAAALNEMGIYVCILNPIVIKQSGAGSVRKVKNDRKDAFKIAKYGLDNWTQLREHTPMDTIRQQLKLVSRQYNTYMKTSVALQNNLISLLEKTWPGVNELFDSPARADGHQKWVDFVADFWHCDCVNRVALKAFVDRYRKWCKRKGYNFSESKAESVFISSAGHFTTLLRNDNTKLLITSAASGLTSAMTVLATIKAEMIRLASLLPEYHTVLAMYGVGEITAAQLIAELGDVRRFANRGSIVAFAGIDPEVNESGSFFSKSNPASKRGSPHLRKTLFLVVSTYLKRSPADEPVYQFLDKKRTEGKPYYVYMTAAANKFLRIYHARVRDCLNVLDTSET

SEQ ID NO: 269965 - protein, 382 aa, unidentified
MQTIDTVNPTILLAIELSASTWLVAARVPGAEKPHLHRIDGGDTAALFALISSLQARAARRLDATISVVCCFEAGRDGFWLHRLLTAHGVVCHVLEPTSILVNRRARRAKTDRLDAEGMLRVLAAYLRGDHQACSMVRVPTPEEEDAKRTHREREKLVQEKLRIENRIEALLFTQGIRKRPSLRSWERDLAVLRTGDGREIPRHLRAELDRLRRRLVMTSELIREVEAERDQAAKTKPQDQACHKIAALCQIRGIGENFAAVLTREVFYRSFDNRRQIASYVGITPMPYQSGGMDRDRRISRAGNPRARTTMIQLAWLWLRYQPGSELAEWFRERVGTLAGRTRRIAIVAMARKLLIALWRYAETGVIPAGAEIRAETTVAA

SEQ ID NO: 269966 - protein, 405 aa, unidentified
MFYGLDIHKRFIQVCRLDANGGDRCDFRIDADRPSILTFAASLTCQDAAVMETTFHTWAIWSLLKEHGNGARIEVANSMQVKAIADARIKTDKIDAHILAQLLRTDFIPAVIMPDDQTWQLRQLMTHRQLLARHRTATRNAVCGILHRKLLSAPVRELFGPTGRRWLHEQHYSDIERLMLDGALAHLDSIETRIGAVDARLREMSCHSTQVKLLMTIPGVNVTVANGLIAAIGDIARFDSPQKLTAYFGLVPRVSQSADRCFYGPITKDGRSQARWLAVEAAHGLVTCGSPLTASYHRIRRKKCHNVAVVALARKLVIVVWHLLTHQEPYRYAPVVRTRAKLRRVSPAVPPAKIGCIPRTLEEIYAEIGLPQPRPASAGERRAAANNRRCVTRYRKTPVHAPMES

SEQ ID NO: 269967 - protein, 337 aa, unidentified
MNYSGIDLHSNNSVVTVIDDTDRVVAEKRLPNDLTKILTFLAPWQSELTGVVVESTYKWYWLVDGLQAAGFVVHLANTTAIKKYDGLKHSGDETDARYLAHLLRLGILPTGTILPPEARSVRDLARKRMQLVRSRTTHILAIENIAARQHGMRLSSAEVHRLTTEAIEQMGLPAEVALAMQANLAVIKTLSTQIKLVEERLEEKVQPRAEYALLKTVPGIGPILASVILLEVGSIERFASAGNFASYARCVDSQHMSNGKKKGEGNTKNGNKYLSWAFVEAANYALRFCVEAKRFYERKKAKTNSILARKALAHKLARACFHILKECKPFDTTRCFT

SEQ ID NO: 269968 - protein, 428 aa, unidentified
MADSANATPACNLVAIDVARYSNAVLVETTSGKRHRFKMANSAADFSRLLDFLGGLPGSCRVGLEPTGDYHRPLAHRLLSAGFEVVSINSVALSRYREAIFNSWDKNDPKDAGVILEMLRRGDVQRYVDPMAVGTHDLQELAKTYYQVSRARTKVQHSLINHGLPLYFPEMHRYWATTRNEWFVRFLLQFPTPAHVRSRSCAEFVDAAWDVVGRKVNKQAKLEEIWEMAGATAALPHATDSLAVETFRITLRRYQELNTLRAELESRAEQALATNADFGHLKTLPGIGSVIAMTILAEGGDLRRFGHHRQFLKYCGFDLAKSQSGTQRGKEQLSKRGNARLRLAFWLAAVAAVHMKENSFRAKYERYIRSAPDDPDLRRKALTAVAAKMARVAYGMIKKKQPYRQFFEQSLPSGSIPLSAAVGAHATP

SEQ ID NO: 269969 - protein, 415 aa, unidentified
MALKIVYKICCGIDVHKTFVVACIASTNSKGITTYERHRFSTYTSGLKDLLQWLLKRNCKDVCMESTGKYWIPIYNILENDCSIVLAHPKYVKAIRGKKTDKKDAKWIADLFKHDLVAGSFMPPADIRQLRDLMRYRFKLTCFQSSEKNRLQNCLTVSNIQLGNVVSDTFGKSAQAILDKILENPEDTSFDLEPFVYRSLKKKLPELRDAIDGYITPEQAGKLKVIKAHYESLESRKAELEELILALAAPYQQELAILQTAPGISSGFTAIGIISEIGTNMEAFPSAKHLCSWAGLTPTNNESAGKKKSVRVSKAGCYIKPLLVQCANAVVKSKKHPEIRNRYLRLKKRRGHKKAIIAVARMLLTALYHMLKNGENYNAELYRKSDLPPIDCEITVEQALIIARNQGYRIKSATA

SEQ ID NO: 269970 - protein, 404 aa, unidentified
MLFVGVDWAEDHHDICVMAQDGTVLGKRRVPDSVTGIGEIHGLVAEHAADDEPVVVGIEIDRGLVVWSLLAAGYEVYAINPMASARYRDRHATSGAKSDPGDAKVLADLVRTDRHNHRPIAGDSDLAEGVKLLARAHQSAIWSRQRQLNALRSSLREYYPGALVAFGTDLAGKDALAVLAIAPTPELGRGLSRSKIASALRKGGRQRNVEHRAEEIQEALRAEQLEAPALITKAHGLVTRSALALIATFNAQIVELEVALSEHFEQHPDAKVVLSLPGLGTVLGARVLGEFGDDRTRFSGPKSRKNYAGTSPVTKASGHSKVVLARFARNRRLGEACDQWAFCALTHSPGARSYYDQLRARGKTHRQALRQLANRLVGILHVCLERGDLYDEMVAWPVNSELAA

SEQ ID NO: 269971 - protein, 367 aa, unidentified
MKKVSTAVTKQSRNISRQRLTIGLDLGDRNSWYCVLDEAGTIQLEQRVRTNEKALREVFGSMPRSRIALEIGTHSPWISRLLSDLGHEVIVANARKVRLIGESRKKDDRLDAQTLARLARIDPELLYPVKHRSAQAQADLMMIRARAGLVRARTGLVNAARGLAKSYGERLRGCNVRNMDPEKAEGLSPELQRALEPLLSAIEEVSERIVEYNDRIEALAQASYPQVELLKQIKGVGTLIALTFVLTLEDPHRFHKSRDVGGYLGLQPGRRKSGESEPQMHISKEGDPYLRTLLVQGAQHILGPFGIDCDLRRWGLKLAERGGRNGKKRAIVATARKLAVLLHHLWVSGEVYEPLHNSNRMAVAAAA

SEQ ID NO: 269972 - protein, 315 aa, unidentified
MKMARSEVFVGIDVSLDKLDVALWPSGEVFQVPQDDQGHQALAERLKPLGPKVVGLEATGGYEREVLTALLQAGLTVRRVNGWRVRRFAQACGRLAKNDKIDAQMIARFVAAIPDRPVQPNLQAGQLAELVTTRRQLSDDLTRARNQAAHASQTLVKTLARRRIDHLKADIQALDQAIAQFIAQDPVMAHKNQLLQSVPCVGPVFAHTLLALMPELGQLTSRQAAALLGVAPMNRDSGLSRGEAHITGGRASVRCVLYMATLSALRCNPLVKTFYQRLRADGKPPKLAIVAAMRKLIVTLNAMVRDNVPWRSIAA

SEQ ID NO: 269973 - protein, 364 aa, unidentified
MGVGSRHRPRLDWKPAAASADRPRMSLALQSFLPFPNSCQGTSPHQQGRGTKMTEHYYGGIDVGKDRLDIQVLPHRQRFSVDNNATGWAELVERLHALPIAAVGIEPSGGYERGIIRILLAAGLSVRRINPSKLRQFARARGILAKNDRLDAQLIAEYVSIMPTRVVQRVATAERLAEVVTMRRQLCDQHVTIENQAAHVEDAILRRLNKRRLARLKADIHLLDKRLAEIVAADVILAQRYELLTSMRGVGPTLAFTLIALLPELGQISRKQIAALVGLAPYDFDSGKLKGHRCIYGGRMPVRNILYMAALSAARYNPALKVFHNRLAAINKKPKVIIVAVMRKMITTLNAMVRDNAAWQPRAA

SEQ ID NO: 269974 - protein, 389 aa, unidentified
MIAVMRPFGEVVVSPFEVRHTASELSELARLLKNLDGETRVVMESTGNYHAPVAWLLHGAGFYVSVVNAMLVHDYGNNSLRRGKTDKKDAVKLANYGLDHWLTLPRYVPEEDTRLMLKTCYRQYQQYSKVQTMLKNNLISLLDTAFPDANRLFTSPPRADGSEKWVDFVATFWHCECVCGLSKKAFTAKYQKWCRKHGYNFSQDKALDIYASACGRFGVMPKTNTAKLLVEQAISQLQTTSAALAALKQEMQSLAASLPEYPVVMGMFGVGPTLGPQLIAEIGDVRRFHSKKALVAFAGIDAPPYQSGQIDVRSRSISKRGSASLRRTLFLVMGVLLQCAPMDEPVYQFMNKKRSEGKPYRVYMMASANKFLRIYYASVKAYLDSLEHD

SEQ ID NO: 269975 - protein, 349 aa, unidentified
MDEGSWVGLDVHARSVAAGVIDRGSGEVRSLRVPPGCGATVEWLKTLPAPVRVVYEAGPTGYGLARACAGAGISCVVAAPSRIRAAADRVKTDRRDAERLARLLRLGEITPVRVPEPEQEAARDLVRAREDARGDLMRARHRLSKLLLRHGAVYDATAWTRAHDAWLRRQRFRSGPLAIVFDECYGRVLEAKTRRDALDEAIAELAASQPYVDVVGRLVCLRGVSTLTAFALTVELGDWSRFRPESLGPFLGLTPSENSSGERRRRGGITKTGNTHARRLLVEAAWHHRRPPRMSAVLARRRSGNPVAVQAQADRSARRLHGRWHALETRGKPRSIVVVAVARELAGHC

SEQ ID NO: 269976 - protein, 355 aa, unidentified
MNQLKNTPISFKGQHFFVGLDVHKKNWKVTIRINKTTIKRYTMDPSPEQLAKFLKTHYPDGIYHSVYEAGFCGYWIHRLLVELGIDNIIVNAADIPTSHKEKDRRDDKIDSAKLARELENGSLKGIYIPSRYQQSLRSISRLRYQHRNHTTRIKNRIKMFLHLHGIKIPEDFNNSYWSSVFIKWLKSLEFEYSFDNQYLSQYIQALEYQRGMMKDILLEMRDHCKQNNILKCIRSVTGLGVISAFTIYAELIDMKRFKDLDNLASYVGLVPSKDGSGDREGVKGLTPRHSRYVRYLLIECAWRAVGADPALTQAYATLTTKMSKQKAIIKIAKKMLNRIRYVWLNERKYITAIVK

SEQ ID NO: 269977 - protein, 410 aa, unidentified
MKIAGIDVHKKVLMVVVVDTSAPEEKPARRRFVTLPSELQRFRIWLQEQGVEEAVMESTAQYWRSVWLELEPHMRLHLAQAFSNRAPRGRKHDFKDAERLVRRLIADELILSFVPDGEQRIWRSLTRMKVQLTRDRVRLQNQMECLLEEMRIKLSIVVSNLLGASGLRILQALAQGETDAKKLAELGDERLHCTEEQLVDALTGRVQPMHRRMLGLQLQRLQLIDQQMAQLNGMIAQAMKSHQDAVIRLAEVPGLGVDSAQQIIAEVGAQASTFSSAAELTSWVGTCPGKEESAEQNHSSRSAKGNKYLRRVLNQAAHAAVAKKGSHFQVVFRRLLPRLGYKSAIWAVAHRLCRVVWKILHEGVRFIEQGHEVGPREKKQRAQMLARALRKLGYEVTITPINQLAAKPAI

SEQ ID NO: 269978 - protein, 316 aa, unidentified
MDNKSVVYGVDVSKATLAIGQDESEALRQIGNAPEPIVAWLASLPAGSVIAMEATGVYHRLLAHLAHAAGMVVYVLNPQTLKHYARAIGQRGKTDRCDARMIARYVAHECAKLRCWQPPAAPADALSRLLVRRQALVRARQMLCQSLSGMPMLKAQRQILLASFKRMIGGVDLLIYTELARVPEMAALHRRLMTIVGIGKVVAAQLVAALTALHFARAEAFIAYTGLDPRPDDSGQHRGKRRLSKHGPALLRCLLYNAGMSASNSKLFKPLYIQLRARGFESTEAIVILARKLARIAFALYKSGQTFNAQKHLQTA

SEQ ID NO: 269979 - protein, 361 aa, unidentified
MTGMVTYAGLDVHARSTHAAAIDVSTGELVRARFGPGVEEPVAWLQALPGPVRACYEAGPTGFGLYRAAIAAGVSVEVIAPGKTPRGPSDRVKTDRKDAELLARLLLAGSLTSVVVPPVEVEAARELMRSHDACRRDLMTARHRVSKMLLRHGRVYPESSTWTAAHRRWLAAQQFQETASELVFADLIASVDGLTARKAAIAERLSRLAEDEQWWPTVARLRCFRGVDTLTAFALHLELGGDWQRFKRANALSAWLGLTPSLHQSGESSHQGSITKTGSGFARRLLVEAAWHYGRDPRIGVTLKNRQLGQPDHVLQIANRAQHRLHRVHDRMRGRGKAHNVIVVACARELSCFLWAAATAD

SEQ ID NO: 269980 - protein, 326 aa, unidentified
MASMTSAIPTAQPDRVVIGGIDTHKDIDVAALLDCAGMVLGTAEFPTTRAGYRQLLGWMGSAGHLGRVGVEGTGSCGAGICRQLSAAGVEVVEVNRPDRSQRRRRGKSDALDAAAAAEAACGGQRLAIPKSRDGQVEALRVLRLTRASAVKAGTKALQLLQQLIVTAPEQLPDQVGELPRMELIGCCAAWRPHSHDAADPSVATRIALKKLARRYLQLAEEISDSDTLLDGLVTDLAPQLIAVTGIGTDTAGQFLLTAGDNPERVHSEPAFAMLCGVAPLPASSGKTQRHRLNRAGIGKPTGLCTSSPPPGTLRPPHPGVSEEEDR

SEQ ID NO: 269981 - protein, 351 aa, unidentified
MTELKLIAMDTSKHVFSLYGVNERGEVVLRRELRRQQLDAFFRKLPPTEIVLEACGSSHHWGRTLAALGHRVRLIAPQYVKPFVKRGKNDRIDAEAISEAALRPNMRFVPVKSVEAQADAMILSVRELLVKQHTQLVNALRGHASEFGVIAAKGTGHVEGLLERIAADPAVPAPAQAMFVELGERIDELRTRLAELDRRLAALHKACPWAGLQPDPRANPLSRQLAEVPGIGPIGALTLALTVDASQFHSGRHFAAWLGLTPRQNSTGGKTRLGGISRQGNERLRQLLVLGATSVVRLTKPDYRHANAWLLALLQRRPRKLAAVALANKMARVVWAMMTSGEAYRPQPAAG

SEQ ID NO: 269982 - protein, 414 aa, unidentified
MERVYERCAALDVHKAQVTACVHVPDRQGKRAELCAEFSTMTAELLALRDWLKGLGVTHVAMEATGVYWKPVYYLLEDDFELLLVNAQHVKNVPGRKTDVQDAQWLCQLLEHGLVRSSYVPPKPIRELRDLTRYRKSLVWERAREANRLHKVLEDANIKLDCVASRPFGASGKAMLKELCEGNNDPVALADLAKGKLRAKLPALHQALEGRFRDHHALLVGHLLAHIEYLDQTIAELSEEIEERMRPFEHKRELLCTIPGVAERTAEVIIAELGPDMERFPTHRHAASWAAICPGHHESAGKRHSGRTRKGDSWLRTALIEAAQSAAGRTKDTYLNSQYLRVKRRRGHKKAIVAVAHSILVAAYYILRDQVPYEELGGDYFVRREDQDRLTRRLVRQLERLGQHVALEPALEAR

SEQ ID NO: 269983 - protein, 350 aa, unidentified
MLIVGCDYHPGFQQIAFVDTETGEFEERRLQHRGEAEKFYRDLAARGVKVRVGMEASGHARWFERLLAELQLELWIGDAAEIRAKRVRKQKTDRQDAQHILTLLVQDRFPRIWVADWENRDLRQLLWHRHRMVQTRTRIMNQLQAVALNEGLRCKKRLWGKKGRQQLEGLRLAPWATRRRRDLLELLDRLNPVIAELTHEIEQEVEKCPAAQRLMTHPGVGALTALAFVLVIGTAERFQCGKQIASYLGLVPAEDSSGERRRLGHISKQGSAILRFFLVEAAQVTVRSVPEWRSKFFHLAMRRGRKIAKVAMARRLAVHLFWMWRKQWDYQQLNEFGPYAGKPGTGVDVH

SEQ ID NO: 269984 - protein, 368 aa, unidentified
MSKNIVEAALTASAEELKNEKSAKAKRILMGVDVHLRGYQSARKVDNGVIGAVETCRSEVELLLHIQRQRQRAEEVVVLYEAGPLGYTLYRKLTAGGVLCYVCAPDSSQQRRKRVKNNKIDARSLTSKLFNYLNGDQNALQLARVPSEAQEQLRLASRQHDQLVEERKRLGAKGNAMLLSQGFGSWSNWWRPKAWSRLSTVAPRWLLERLQIWVDVLKILDEKIGQAKAALARGCSGPRPKGVGALSLFQLQSEVLDWSLYPNRRKIACLGGMVPSEWSTGDKESRGSITKVGVPALRRIMIEMVWRIILFQPQYKPVQKWREVLQGTNPALRKKAVVAIGRQLMVDLWRLQTGRVTAQGLNLVMIDA

SEQ ID NO: 269985 - protein, 363 aa, unidentified
MLQHTTATHVGLDVSKASISVALLRPDGHLDEESIANTPEAVRRLVHRWPEPSRVRVCYEAGPTGYDLYHQLTALGIETTVIAPSLTPRRPGDRIKTDRRDARKLAGLFRADELTAVRVPTLEEEAVRDLLRARQDEREDILRARHRLSKFLLRHGRVYTDGSAWTGRHTAWLAKQHFDEPAAQRTLGHYRAELDMRLASLKLLDAELLDIAHRPPFAPVVARLCALRGIAELSALTIAVEVGDFTRFGSAPAFMAFVGLVPSEYSSGERRSQGPITKAGNAHLRRVLVEAAWHARRRPNIGPALAKRLAGQPPEVLAIAASSQRRLHDRYWRLVERRKPSNVAVVAVARELSGFCWALGRAA

SEQ ID NO: 269986 - protein, 326 aa, unidentified
MFYLGIDVSKAKFDCCLFLDDSSGKIKTKCFSNSNKGFHQLLSWLNRFGLVAEETRALMEATSVYHEMLAQFLFDLKFQVCVANPARTRYFAQSISKLNKTDKIDSEVLARFAMTVDLHLWQPTPDNIRLLNALLDRRSSLANDLKREQNRLEKANSTLIVVPILKSIKTNIKSLTRQIQNLDTQIQNHIDQDHELKRDQKLLESIPAIAERTSLLMLAFFRAHSFEKASQAAAFVGLVPIHRQSGSSVLGKSRLSKAGSPKIRSGLYMAAIVATRYNPHIKELSERLLAKGKTKMVAIAAAMRKLIHLCYGVLKNQQPYQANYKA

SEQ ID NO: 269987 - protein, 386 aa, unidentified
MQASTVDTPTAGHCGTIFIAIELSQKSWLVTLHSPDKDKISHHKLEGGDHAELLALIGRVRDRAARALGAVPAVVSCYEAGYDGFWLHRLLQAAGIANYVFDPASIAVDQRARRVKTDRIDGERMLRTLMAYLRGEPRVVRIVRVPSAEQEDARRASRERDRLVKEQTAHTTRIKALLRLLGMAVGNPRRRNWLSWLAAQRDWQGQAVPPRTMTELTHEHARLLLVRERLNALAKTPAQADPTPAVAQMTERSELLLRLKCLGPAFATTLTNEVFYKDFRNRREVGSYFGLTPSPWRSGGIDRDQGISKAGNPRARCAAIELAWLWLRHQPDSKLTLEYRKRTLDAGKRIKRVAIVALARKLVVALWRYLTTGLVPDGAVLKAVKV

SEQ ID NO: 269988 - protein, 343 aa, unidentified
MDQHIGLDVSLKDTSISVRQDGKRIWRGKCPSDPKLLAEVIRKRAPNAERVVFETGPLSVWFYHALTAEGLPAICIDARHAKAALDMAANKTDANDADGLAHLAEVGFYREVRVKGFDSMLMRTLITARRQLMKMRVQMSNQTRGLMKTFGLVVPKGAGSVFEGNVLTLLEGEDNLARIILPMLQAWRDIRLRVAELSKQLVAMANADQRCRLLTSIPGVGTVTATAFAAAVEDPTNFENSRAVGAWIGLTPKRYQSGEVDYDGHISRRGDGKLRTLLYEAASVILNRSSETSTLRTWALALKERLGFKRTAVALARKLAVVMHTMLKTGELFDPNAGATVPA

SEQ ID NO: 269989 - protein, 456 aa, unidentified
MTQKRSKPKIDRTMPMVHPNAAAIDVGATMHTAAVRADWTPEPVRSFGTFTTDLHRLVNWFKECGVETVVMESTSVYWIPIFELLDARGFSVFLVNARDAKHVPGRKTDVSDAQWLQRLHSYGLLRASFRPKGQIAELRAYVRQRERLLEYAASHIQHMQKALTEMNLQLHHVVADITGTTGMRIIRAILAGERDPKVLARLRHYSCHSSIETIEKALTGNYRAEHLFALEQALTLYDAYHEKVSACDVRIEAVLKELSVRRGRKSGSLPSSHRRTDQANGLAFDARAALFTLLGKDITQIDGLGPYLSLKLIAECGDDLSAWPSAKHFTSWLCLAPSNKISGGKVLSSRTRRGCRAAALLRLAAVTVGRTDTALGAFYRRLSARIGKAKAVTATARKIAVLFYNAIRHGMEYVDPGSSFYETRYRKRVVDNLRRRAKSFGFVLQPFEPTPSVPVS

SEQ ID NO: 269990 - protein, 347 aa, unidentified
MEVHAIGIDLGKTLFHLVGVDACGNVVVRKRCSRTQLLRYTANLRVQRIGMEACSGSHFLGRALREQGHDARLMPAQYVKPYVKTNKSDYIDAEAVAEAVQRPTMRFVPIKTEEQLDLQAVHRVRERWVTRRTAVINQIRGLLLERGVTLSKGRSHLEQALPQILEDANLKLSDSFRVLLAQLKLELEQLTARIEQMDSVIQHTVKENEACQRLTTIPGVGPVTATALVAAIGNGSGFRKGRDLAAWVGMAPREYSTGGKQKLLGISKRGNNYLRRLFVQGARTVMQHRAKQSPGLSSWLAQLLARTHQNVAIVALANKLVRMAWAVLCKNEVYRSPVLATSSLGQA

SEQ ID NO: 269991 - protein, 339 aa, unidentified
MNYLGIDLSKRDFHAVVMDQAGVILTSHKYQNTKEDVLAVLARCPEKPAAVIEATQNWMWLVNVLKQLNIPVTLAHPVKTKAIASARIKNDELDAATLAHLLRSNLVPPSYIATIEEQENRELSRARCQLVKQQTWCKNQVHSLLTKENLIPPVADLFGKKGREWLQTIVVSLPPAKQLVLKQWLTLLADTQERVKDLEAAIHERCRDDERVKLLQTIPGFGEITAFVLVSEIGDPTRFPTGKQFASYLGLVPSLYQSGKTKRLGSITKLGNPYARWILVQTAHRLVRSDEHYRLAYAALALRRGKKKAIVAIARKLAVLSWRILVDQRPYQAQAPNTG

SEQ ID NO: 269992 - protein, 342 aa, unidentified
MELHAIGIDLGKTVFHLVGLDSSGKVIVRKRCSRTQLLAYTANVCVQVIGMEACSGSHFLGRALRAQGHDVRLMPAQYVKPYVKTNKSDYIDAEAIAEAVQRPTMRFVPIKTEEHLDLQAVHRVRERWVMRRTAVVNQIRGLLLERGLTLPKGRSHVDHALPEILTDPTLRLSGSFRVLLGQLQLELEQLTARIEQMDAVIQQTARENEACQRLTAIPGVGPVTATALVAAIGTGAGFRRGKDLAAWVGMVPREYSTGGKQKLLGISRGNSYLRRLFVQGARVVMQYRTKQAPGLSVWLSQLMARTHQNVAVVALANKLLRMAWAVLCKNERYRVPLLATAP

SEQ ID NO: 269993 - protein, 331 aa, unidentified
MVHFVGLDVSVKETSVCVVDDAGKVILEQKVPSEPADLIALLTSLGVSFGRIGIEAGPLSQWLVNTLTAAGLPVICVETRHMKVLLTAQQINKTDRNDARGIAQMMRVGLFKPVHVKTLVAQEQRMLLTSRKLLQRKLLDLESDLRGTLRNFGLKVGVVSGGRYEARVRELVEGFPRLAAIAEPLLNVRRVMRQQLAVLHKMLLDTVRDDPVCRRLMTAPGVGAVVALTYRATIDQPQRFVHSRAVGAHVGLTPKRYQSGEVDYDGRVSKCGDALLRTMLYEAAQVLLVHGGKWSWLKMGHAGGAAARDTSSHRRGRQAPGRGAAPDVGRW

SEQ ID NO: 269994 - protein, 323 aa, unidentified
MPKTSDRSEVPAAIQTHITAIFVSLELSRKVWLVTSLSPGAGEKMSKPCVPAGDVAALLLRFAELKRKAQAGTGDSLPIVTIQEAGLDSFWLHRLLAGEGVESHVVDPASIAAPRRRRNAKTDRLDGEALLRALLAFKRGEPRVCAMAVPPTPEEEDRRRLSRERTTLVAERVEHVNRIKGLLFSQGISDYEPIERDRRKRLDELRTGDGRSIPIHLKSAIARELDRLELLIDQIKAVEAERDKLLAEPRADAIPSPGNLLLRLKSIGPEFANVLWSEGLYRHFDNRRQVASYAGLAPTPWQSGSVSHEQGSPKPETRASDRR

SEQ ID NO: 269995 - protein, 429 aa, unidentified
MTNPQSTPEAVVWVAIDVAKDRHEALIEVPGWKSRKKFRVQNTAEELRSFADFLHGLASKVRIGFEPTGNYHRALAYFLHSEGFQLELISSLALARTREAMHNSWDKNDPKDAQVILHLLKAGLTQHYHDPMVHNLNDLQELSKTHHQVSLEKTRTQHRLLTHYLPLYFPEIARYHSSARSEWLWNLLIEFPTPHSMRQLSKGEFVRRAWPLVGRKVSKERILTDVYLTAQTSVGLPVEESSEAVAMLRVVLRQLVMLCQLRDSIEDRADVLLSSNEDYQRLRRIPGIGPIAALTILAEAGDLRRFSHHRQFLKFCGFDLATEQSGQFRGLSRLSKRGNARLRAVFWMAASVAVRMRENSFRAKFERYMRSDPGSADRKRKAYVAVAAKIARVAFALIRSGADYRCFHEVAVPGGRTRSARAVEALPTS

SEQ ID NO: 269996 - protein, 347 aa, unidentified
MRFYTNKHPFYCGIDLHARSLYVCILDDDGQTVLHKEIKAKPEPLLDLLKPYLGNVVLGVECMHCWYWISDFCHEHNIVFILGHALYMKAIHGGKAKNDRIDSYKIAHLIRGGNFPLAYVYPAEMRATRDLLRRRTRIVRHGVDLKAHVKNTTSQYNLPPNNLNLRYPNAREQMRDKFADESVQKNIDLDLNIIEFYHRQLSAIECYIEKHAKHHNGRDYHILTSVPGMGRILALTILYEIGDITRFESVQRFASYSRLIKCRAESAGKVYGTQGNKIGNAHLRWAFGEVAVGYLRGNEKAQSYLARLHKRMGKAKALTALAHKLGRCVYFMLKNRQVFDEQRFLAG

SEQ ID NO: 269997 - protein, 367 aa, unidentified
MAPRERDRSQRSGSVLLKTVGQLGSSRSSVHQPGQLRGPRARIVQGRETRRCTMSAEIFVGMDVSQACVDVAVHPGTAFQIAHDERGIAQAVHRLHALQPTLIVLEATGGLEVPLTGALAAAGLPVVVINPRQVRDFARATGQLAKTDRLDAQILARFAEAIRPPVRPVPDEQTQALAALVARRRQLIEMLTAEKNRLRLAAQPIQKRLRAHITWLEKELASTNTDLEATIRLSPVWREKEEVLRSVPGVGPVLVTTLFANLPELGTLTRKEVAALAGVAPFPRDSGTLKGRRAIWGGRAHVRAVLYMAALVATRRNPVIRAFYQHLCQAGKAKKLALTACMRKLLTILNAMLKSGTPWRVTASQPA

SEQ ID NO: 269998 - protein, 406 aa, unidentified
MPITVGIDWAEAHHDVAVLDEAGRILGRRRIDTGVAGFTELMTLIAEHSEDPTAVPVAIETDKNLIVVALQSAGLTVHAINPRAVARYRERHGQAGKKSDPGDAALLADVLRTDRHQHRPLPELSERALAVKALARQHQEAIWAEHETLSRLRSVLLEFCPQALQAFPKLKHKAALTVLSAAATPALGERLSERRLVTLLHRCGRRNDPSLVEQILRDLHRPALRQSPAVEAALGTTTRTLIRIVLQMQAAVTELEAALAEVFDAHQLAPILTSAPGLGAVLAARVLAEVGDDRARFSTAGGLRAFAGTAPVTRASGRSHRVRARRVRNKRLADACHWWAFAMLTKSPGARAHYDRRRAVGDTHNAALRNLANKLLGRLWWCLLNEQPWNEHTAWTQARPAPAIAA

SEQ ID NO: 269999 - protein, 410 aa, unidentified
MELLHRRCCGLDVHKETVVACLRLVSDGKVTTEVRTFQTTTADLLRLSEWLAANDCTHVAMEATGVYWKPVWHVLDDGEFTLVLANAAHVKNVPGRKTDVNDAMWLAELLAHGLIRASFVPDTQTQEMRNLLRTRKQLVREQSSHVLRVQKTLEDANIKLDSVLTDLMGKSGRAIIGALIAGETNPTKLASLADRRVKASPEELREALRGRVTKHHRFLLRLHLNQIDALNAAMATVDAQVEANLGPFRTAVEQIMSIPGIKNLGAQAIASEIGIDMSRFPSDAHLISWAGICPRNDESAGKRRSNRLRKGAPWLKTTLVQCAWAAVKKKGSYLQAQFYRIKARRGPKKAIMAVAASILTAIYHMLKDGTMYQDLGCKHFDRRNKDQQKQRLVKRLADLGYAVEIKPLAA

SEQ ID NO: 270000 - protein, 356 aa, unidentified
MQTQVTKKIDFNGKPLFIGLDVHKKSWSVTIVVDGTEHRTFTQPPDPESLFSYLHRMFPGGTYHSAYEAGFCGYGIHRRLTDLGINNIVINAADIPTSQKDKLQKRDPVDSRKIARSLEKGSLHGIHIFDREMEELRSLNRTRFYLMRDLRRSKTRIKSFLQYYGEPIPPEFDNNQWTFKFVSWLKQVKMQTLSGQDAFLNLISSYEYHRSQLLTLSRQIRERIREYDRELYTLLKSISGIGPLTASALITELGDINRFKNIDQLGSYVGLIPRIRESGETTYTGGITFRCNTFLRTLLIESSWQAIRMDPALMQYYHAHLINNKGHKVVIKVARKLLNRIRYVMKNRQPYVTGVA

SEQ ID NO: 270001 - protein, 344 aa, unidentified
MKHYAGLDVSVKETSVCVIDETGKTIREVKVASEPEAILSVLVDEALTIGRIGLEAGPLSQWLYSGLAETGLPVICVETRHMKAALSAQLNKSDRNDARGIAHMMRVGLYRPVHVKTLASQKRRMLLTSRQLLQAKAVDIENDLRGTLRNFGLKVGVVGTAKFEARIHELVADHPDLAAITEPLLIARRALREQLGVLHRRLLAVVRKDEVCRRLMTVPGVGPVVALTFRATVDVPARFKNSKAVGAVFGLTPRRHQSGEIDRMGSISKCGDAMVRTMLFESAQVMLTRTIKWSWLKAWGMKIARHRGMRRAIVAVARRMAVIMHRMWADGTEFRWSNTNAATA

SEQ ID NO: 270002 - protein, 338 aa, unidentified
MTLYAAIDLHSNNHYLCVIDGNDKRLFEAKFDNDANLTIQALKPFKRRLKAIAIESTFNWYWLADALMEAGFEVQLVNTAKVIQYEGLKRTDDKYDAFFLAHLMRLGILPTGYIYPIEQRGLRDLLRRRMRLVQDRTRYINSLNTQYQRQTGLHLSCNKINSKLFCLPVVGDLNVQLAMKANLNMSKALKVQIKLLEKSIMSQVKECSEFNFLKTTNGIGDVLAETILLETGDINRFNSPGNYASYCRCVDSCKSSNGKKKGVGNRKNGNKYLAWAFIEAANFAIRYNVKAKKFYESKKRKTNNVIALKALAHKLSRACYYIIKQGVPFDENKIFGGV

SEQ ID NO: 270003 - protein, 362 aa, unidentified
MAIDDSKRTLVLGILQPGADAPETRSIPNEPRHVQRLFARVKREGPVRVCYEAGPSGYDLYRQLAALDIPCQVMAPALTPRKPGDRIKTDRRDAAKLVRLFRAGALTPIRVPDEAAEAGRALLRCREDVQEDLLRWRHRLGKFLARHGRVYREGRNWTQRHWAWIRSQHFTLPTLERTVVEYRCAVEPLLARVADLDREIAALAETAPYREPVGWRRCFRGIDALAAMTRLAELGDVPRFPPPRELMAYLGLVPSEASSGDRTQRGSITKAGNTHVRRILVEACWHYRHPPRLGAAVARRSQGQPPAIRAQAWKAQLRLHRRYRHLVGHGKRPPVAVVACARELVGFLWAALTQTEAVALAA

SEQ ID NO: 270004 - protein, 556 aa, unidentified
MPKQKRTRNARTLPVARVLEPNAAGIDIAATEVYVAVPTGRDPQPVRRFSTFTDDLHRLADWLQACRVQSVAMESTGVFWIPLFQILEDHGFRVCLVNARHVKNVPGRKTDVSDCQWLQYLHSVGLLRASHRPTQTICAVRSIWRHRESLVQMAAVHIQHMQKALDQMNLQLHHVISDITGTTGLAIISAVLDGERNPENLATLRDPRIVASRETIARALVGDYRVEHLFTLRQSLQAYRQYQQWIAACDSEIERQLQVLPSNLPDDPKPLSKPRDHHKPRRNEPRFDLRSQLYRVFGVDLTAVPGVSSLTAHTLLTEVGPDLRRFPNAAAFASWLGLCPDNRISGGRVLSVVTRKVKNRLTIALRMAAQSLHRSQSYLGQYFRRMRIRLGTPPAITAAAHKLARVLYHLITTRQPYEESTFAAMEERSATTTAPAPDQASRQIRFPISPRQKCSLGDGHGGAESSCQKHSSHDSDGYDAAYLVAAISFKSRTAISESGCCSNSSATCSQSNFSCLLFSSFEAIRRASPPSGGSRLEGMLLFIDNPAICRLKVMWG

SEQ ID NO: 270005 - protein, 443 aa, unidentified
MSDLAVLDPRAAFVDVGSEKMHVSIAGGQPAVFGTVTSQLHSLRDYLAEHQVRSVAMEATGVYWLPLYGVLEAAGMEVVMVDGRQTRNLPGRKTDMKDCQWGATLHAHGLLRAGFVPPADIRRLQDYLRLRGDHIAAAAGHIQHMQKALERMNIKLHEVISSLTGASGLAVIRAIVAGERDPQVLLGLCDIRIRNVKAERVVESLRGDWAEEHLFALAQAIQCWDHYQGLIAACDHQIEVVLRQMPDANTPPSAASTQTGKSRTRPGVNAPDIADLRGILARICGAKDLTTLPAHSEYSVLQLIGEIGTDLTKWRTEKHFTSWLGLAPGSAQSGKRKVPVKRRRNRAGRLFCVMARSLARSKYVALGGFYRRMAMRRGGLVANKALARKLATLFWRVMVKGLDFVETGVAQYEAKVLETKRRILHRLARQLGQQIVPSPADAV

SEQ ID NO: 270006 - protein, 338 aa, unidentified
MTLYCGIDLHSTNNFISVLNENDKPLFEKRIPNDLERILLALTPYQDELQGIVVESTYNWYWLVDGLMDAGFHVHLANTIAMRQYDGIKYTDDLSDARFLAHLLRLRILPEGYIYPKEERAVRDLLRKRLSLVQQRVTQHLSLQSHIARHTGKRLSAVKIKQLTHEDLQELLVEPNVYLAAEANLSVMQSLSETIEQIEQSVLDQCRTRSHFKCLTSIPGIGPILGMTIMLETGAIRRFPDAGHFASYCRCVKSEKISNGKRKGAGNRKNGNKYLSWAFIEAAVKAARFNAEIKAYYQRKMAKSHRFVALKAVANKLAKASYYVLRDQVPFDVKRSFG

SEQ ID NO: 270007 - protein, 337 aa, unidentified
MNYSGIDLHSNNSMIVVSDETDRVLCKRRVANRLDAVLVTLAAYRDEMAGVVVESTYNWYWLVDGLQAAGYQVHLANTAAMKRYEGLKYSDDGTDAAYLAHLLRLGILPTGHICPAKERGLRDMSRKRLQLVRSCTQHILAVESTIARHTGASISSRAVKALTEQALAAMALPAEVRYAVAANVAVIQTLGVQIEKLEERLRARVRPREEFGLLHTVPGLGEILATTVMLETHTIERFAAVGNFASYGRCVTSKRVSNHKKKGQGNIKNGNRYLAWAFVEAAHFARRYCPEAKRFYERKKARTNTTVATKALAHKLARACYHILKEKKPFDVKRCFA

SEQ ID NO: 270008 - protein, 381 aa, unidentified
MRQYVGLDVSQRETSVCVVNETGQPIFEGKAKSDPGDLSRLLSKHAPLAERIGFETGAMASWLWHELRRVELPVVCIDARHAHAALSVRMNKSDRNDARGLAELVRIGWYREAKIKSEESQKVRAILVARFRLVSMRRDIENQVRSLIKEYGLLFPRAIGRQFRNQVGELLGEDHQLLNVIDPLLSIHEHICQQQSKFDDEVRRLAKSDETTRRLMTVPGVGVVTALTFRHTIDDPSRFRSASTVGAYLGLTPRHNQSGETDTSGKISRWGDRLLRTYLFEAATVLLYRTKKWSSLKAWGMSSRSGRYEKGKGRHCPQDRRDPPLHLGRWHVVRLGPRAGLTLFCRFLARSAGPAMSRWDGGSGDLGQSAGGGSSARRCKR

SEQ ID NO: 270009 - protein, 385 aa, unidentified
MKNNGIVAQIGMDAHRRFSMVTARDAEGRILWRERLRHENRELLRAALAAWPKGVPVVLEATFGWGWLSDEVAAAGLEPHLASSTKVAAWRKARGLAKSDRLDSDLFTELPMRLDQRWWEVWLAPPVVRQQREWLRYRMTLVRLQTGLKNRVHAVLHRHGIVSEQSDLFGAAGRRMLSLLLGARDPRLPDSARAALKGYLQLLDHLRRQIAQVTRELRRQLQRSPAGERLRTIPGIGWILAYTILAEIGQLERFRSFRHLASYSLLAPRAYDSGQEAHEDSPRGRHVGYVGRRTLKWAWIEAAHSAVRHGGRFREIYDRRTNHGRRDRSRGLIAVAHELCRLGFVVWKKGVAYQDSPPLRPGSVAKDRSSCPGTGQPDVAMVVAE

SEQ ID NO: 270010 - protein, 337 aa, unidentified
MKKFFIGIDVSKPFFDASILVVNDHVKQPIQSQRFDNTKEGLKDFERWVKSFEVTFDNNTLLVIENTGIYHRLLWQFSNKKNLPIHIGNAAHIKWSFGIARGKNDKIDSIRLCNYACKQADELKSAAVLSPEILQLKDLWTARRKLLSQLTSMRNYLKELKEVNDKSSQEIIEKAHKQALNGMTKSLKDIEVQIARIIKENKEIKQNYKLLLSVPGIGQWTATYLICCTHNFASRVTGKQLACYAGVAPFGHSSGISIKGKDRVHKMANKELKKLLYMGAMSVINNCKEFSVYYQRKLDEGKKSMSVINAVKNKILLRAAAVVNKQRPYVDNRNIAA

SEQ ID NO: 270011 - protein, 345 aa, unidentified
MKPQQQYVGLDVSLEQTSVCVVDDAGATIWRGKCSSTPESIHAVVAKHASEAVRIGLETGQLSTWLFHELRARQLPVICIDARHAKAALSLQINRTDANDAHGIAQIVRVGWYREIGVKSMDTHAIRAMLVARAQLVTQKVKLMNCIRGLLKTFGIVLGGGKGRRFEAMVREQIAENPMLISILEPMLIVLLTTREQLAVFDRLVRQRARADGDVRRLMTAPGVGAVIALAYTTTVEDPARFKRSSSVAAYLGLTPRRFQSGEMDRTGRISRCGDAMLRTYLYEAANVMLRRSTRPSQLSIWGRALSERIGARKSLVAVARKLAVVLHTMWRHRMEFRFEQAAAR

SEQ ID NO: 270012 - protein, 344 aa, unidentified
MVYYTALDVSLRSVSICILDDSGTIQFEDKVVSEVDEIVSCLKRFSPEVKSIGFEAGTLTQYLSYGLQAAGFEVICMEARQVSAALSAMRNKTDKNDARGIAQILRSGWYSRVHVKSLDSHLTRALLTSRKTVLKKCVDIENEIRGLIRLIGIKLPGTVKHGSFDELVRPLIQPHATLADALVPLLDARQVLYQCYLKLDNQVLAMARKDAVCQRLMTVPGVGAITALTFKAGVDDPTRFKHSRTVAAHFGLTPRRFQSGELDNPGHISRAGDADVRSALYVAAHSLVCRSEHWTYLKAWGLRLSKTKGHRRAVIAVARKLAVILHRMWIDEVDFRYSSTEVKP

SEQ ID NO: 270013 - protein, 410 aa, unidentified
MLKIIYPICCGIDVHKKFVVACIASTDDRGITMYKSSRFSTFTSGLRKLSGWLCSNSCTDVCMESTGKYWIPVYNILEDTCQITLAHPKYLKAIRGKKTDKKDARWIADLFKHDLVAGSFMPPLRIRQLRDLMRYRFKLTNFASSEKNRIQNCLTVSNIQLASVVSDTFGRSSMKIIDYLLENPYDKDFDFVPLLHGSMTGKADSIRLAIDGMITVEQRQKMNIILCHYSEVQKCKVNLESLILSLSEPYARELSLVSTVPGIKNPFSVIAIISEIGADMSVFPTAKHLCSWAGLTPQNNESAGKKYSVRISRAGVYIKPLLVQCANAVVRSEKHPEIRGRYLSIRKRRGHKRAIIAIARMLLTAIYHILLKDEPYNPELYKKADVLPKTRSITVDQAILLAKRYGYSVA

SEQ ID NO: 270014 - protein, 318 aa, unidentified
MRCIGIDISKTTLDWAAVEAAAGAILAEQSVPNTAAGIAHLVTQLQTLTPEVLVLEATGAYHVPLLRALVAADLPVTLVNPAQIVAFRQISLGRTKTDRQDARLIARFGATYARELRRFVPRSALQETLRAWMRYRETLVADRTRLRGQQEANQWQGDPQVQRWLAATEETLLAHLAAVDDAIAKLLAQLPEAAVVQAIIGVGPRVAAAVLGALPVALWGDAKTASAFFGVVPRLAQSGRRSRSWLSKSGPGYVRRMLYMAARVAITHDPAIAAWYQAMVDRGKPKRLAQCAVMHKLLRHMMGRLKAWYRTQTPPLAA

SEQ ID NO: 270015 - protein, 475 aa, unidentified
MTSKRRTSKAKQTRLKRRRPKHTHQRGAPQQSIPVQEANAAGIDVGAREMYVAIPADRDAEPVRVFPTYTCDLEALADWLVERGITTAAMESTGVYWIPLYQILEDRGIRVCLVNARHMKNVPGRRTDWHECQWLQYLHAVGLLRAAFRPEPEVVAIRTVVRHRSRLVEAAGVHIRHVHKALTQMNLQIHHVISDITGVTGTAIIESILAGQRDAGELAKLRQPEIRADAETIRKSLEGDWRREHLFALRQSWELYGTYVRSIAACDQEICEMLGEQEPKVDPAKKPLPSDTKRRTKRKHQRTGDFRFDVRTEAYKQFGVDVTRIPGLEGIALMLYSEMGNDMNRWSSASQFASWTALCPDNDKSGGRILWTGVRQVKNRVGQLFRQAANSLHHSQTPMGGYLRRMKAKLGAEAGITAAAHKIARIFYAVVKNQVEYDQTTWHRQDLERQRRLEAKIRRQARGLGFQLVPIQPVA

SEQ ID NO: 270016 - protein, 406 aa, unidentified
MTLFIGDDWAEDHHDIHLMDAEGTRLASRRLPEGLAGIRGFHELVAAHAQDPTEVVIGIETDRGLWVEALAAAGYEVFAVNPLAVARYRDRHQVSGAKSDAADAKLLADLVRTDRHNHRPIAGDTPEVEAIKVLARAHQNLIWSRNRNTNALRSALREYYPAALEAFASLSDRDALAILGRAPTPTDAARLSVSKIRSALKAAGRQRNLDAKALEIQTALRSDQLAAAPAVTAAFGATTRAAVAIITELNHHIADLEAELAAHFETHPDADIYLSLPGLGVILGARVLGEFGDDPNRYTTAKSRKNYAGTSPLTIASGKKRAVLARHVRNRRLYDAIDQWAFCALTNSPGARTFYDQHRAAGDLHHQALRALGNRLVGILHGCLRHHTPYSEHKAWAHRQTDSRAA

SEQ ID NO: 270017 - protein, 367 aa, unidentified
MVSREAAVLQARVGARAAIHRTPSKPEQLTESKLEPHKRGRRGALSMFILHLREAIMSAYVGIDVSKATLAVAIRPGGPTFSVANTPEGHGELLHVLKNFEIERIVLEATGGYERDVMHTLAEAGYAVARVAPHRSRAFATALGKYAKTDPIDAETLARMAQSLELEPEAVPSTEELELRELVHRREQLVQWRDDERRRAHQARSPWVRRNLQSSITQTEAEIRRCTMEIQRLLQRVNAVACRRLLAIPGIGPVTAASLLAYLRELGHLKGRQIAALVGLAPFNADSGTASGKRRIRGGRPRIRRILYMATLGVIRAQPDFKARYQALRQKGKCAKVAIVACMRVLLVRINAMMRDQTEWNMTPVTR

SEQ ID NO: 270018 - protein, 358 aa, unidentified
MKIVGCDLHARQQSIAMLDTETGEFTEKIIGHEGNAVREFYAALEGPIVVGIEATGSMQWFLELLEELRIKYRVGHPARIRAAETRKQKHDRRDARLILDLLVMEDRFPEIWMPSMEQRDLRTLLRDRHPWVKMRARLQHTMQSMALNHGLRQGPGLWSVAGQSRLQALPLAHYTSQRRNALLTLYAQLQKRIQELDKVVEAEAQSRSQACRLLTHPGVGPVTALATEVFLGDPRRFRTGKQVASYIGMIPGEHSSGQRQRLGKLSKEGNALLRYLWCEATMHAVGKDPELKRFYRRKLIHKGMGKARIAAARKLGIRLWIMLRDQIDYQQFCRRGKLRQEGEAHVGMPGFNSGPALQ

SEQ ID NO: 270019 - protein, 362 aa, unidentified
MLGVVYVIYVDGRPTVEAYDGPQIVGMDLHRRRSVLVRMTPDGRRLGTARISNSPARLAAEVAKAGEAPRVVLEACYGWYWAADALREAGAEVHLAHPLGVKGFAYRRVKNDVRDAADLADLLRMGRLPEAWIAPAEIRELREVTRYRIKLVVLRTSCKDQVHGVLAKLGIPVTCSDIFGVWGSAWLDELALPQPYAGKVASLRSLIRGLTAEVAVLDQVIAGLLAGHDGYHAVQVLPGIGPVLGAVIVAEIGDIHRFARPQQLCSWAGLTPRHYESDTKVVRGKITKQGSRVLRWAMVEAIQRAPAGTPARRVKDAIIARRGKKARNIAKVAAARKLLTLVFYAMRDGHVRCLDPHAAQAA

SEQ ID NO: 270020 - protein, 443 aa, unidentified
MPLEHEHQTLSRKRLPIGEAKCPLREKGERLKRIVERCAGLDVHKASVTACVRTPGEGGEPHQEVRKFSATTRGLLQLRDWLASFEITLVGMEATGVYWKPVYYMLEDDFECWLLNARHLKNVPGRKTDVKDAEWICQLVEHGLVRPSFVPPKQIRELRNLTRYRKAQIEERTREVQRLEKVLQDAGIKLSWVATRALGVSGRAMLDALTSGTTDPEILAQLARGRLRSKIPALREALEGRFSAHHGLMVGRMLAHIDYLEESIAELSMEIERVMAPFSEEVKLLDTIPGVDRRTAEVLIAEIGADMSQFPTHRHLASWAGMCPGNDESAGKRRSGKTRKGSKWLRSALIEAAYAAARSRGTYLGAHYARLKGRRGPKKAAVAVGHSILVICYHILQRGEPYQELGEDYFNRRLSEEAYKKRLVRQLERLGHRVVLEALPQPA

SEQ ID NO: 270021 - protein, 382 aa, unidentified
MNRIIKIGMDVHSTNYTLCAMEPVLDGEDRIFTNIQVTPDYKNVIQFVDNLKKRLGSSDSYSIECGYEAGCLGYSLYHQLTKAGVKCTILAPTTMLTQQGKRVKTDKRDAAMIAQCLSYGGYHAVHVPTDKDTSVKEYLRMRDDHKLALKKIKQQINAFCLRHGYIYDGHKWTLKHLDWLKKLNLSELYRETLNEYMTSYEEQTAKIERFDKRIEELAADSDYHENVRKLSCLLGIQTYTALSLIVETGDFKRFRKGNTYAAFLGLAPGESSSGEKISRTGITKAGNSRLRTLLIEAATGICKGRVGHKSKALCARQAGNPEEVIAYADRGNIRMRSKYKRMIRHEKKRNVAVAAVARELACYVWGIMTNHIEPREEGKKAA

SEQ ID NO: 270022 - protein, 349 aa, unidentified
MIIIGVDFHPEFQQIAWVDTDTGELQEQRLTHREEAERFYRSLSSAGQQIRVGMEASGHGRWFERFLAELQIELWMGDAAAIQRKRVRKQKTDRQDAQLILKLMLKDDFPRIWVPSWENRDLRQLLWHRHRMVQARSRVMNQLQAVALNEGLRCKKRLWRTKRPQLESFPLAPWASRRRHDLLELLDRWNPVIAELSQAVEQQVEKCPEAQRLATHPGVGPLTAMAFVLIIGQAERFQCGKQVASYLGLVPLEDSSGNQRRLGHITKQGSSMLRFLLVEAAQVTVRSIPEWRSQYFHLVMRRGRKIAKVAMARRLAVRLYWMMRQGTEYQKSNKFGSYVGQPGHRHGVR

SEQ ID NO: 270023 - protein, 429 aa, unidentified
MNDSQNQRISQITDSTLIVGVDIAKHNHVARAQDDRGLMYGKAFSFRSTRQGFQAFCRWIESLKAEYQKTKVFVGMEPTGHYWMTLAAFLRNRQVSVVVVNPMHVKKSKELDDNSPTKNDPKDARVIAQLVKDGRYSVPYLPIGDYAELREAVKIRDHISCEIQRIQAKVHNWLDRYFPEFLQVFTSWEGKAALETLNHFPLPQDIIEAGATQILTTWQKKIKRGLRPKRAMELVEQAKHSVGLCEGINMARLELQTLLATYELKQQQLEQVMKEIEDVLTNIPGVEYILTIPGMGIATLAGFFAEVGDLSRYQHPRQIQKLAGLNLKENRSGKHRGKTRISKRGRPKLRALLYKVIRPLVAKNSVFKALHMYYTTRQQNPLCKQQSLVALCCRLLRIIFVLARKQVAYDMEKMMKDTPLCNRVQHLVE

SEQ ID NO: 270024 - protein, 444 aa, unidentified
MQYQKVLKMLESIPYLSVGLDVGADFTWMSIMLPNGTLIGKPFKIVHSDSQSRELAVAKIKEAQEAYSLKSRCFLESTGIYHIPLLCFLRDKGFDCSVINPIITKNSTNMNVRKLHNDKFDSKKAAKVGQDTSLKTSIVPEDAVIDLRNLVRDYYYFKDLQSAVVLKLHAELKVSFPAYLNVFSKVTAQTSLKLLEAYPLAADMLAAPRDELVETIRNTARFGEKYALSKYDAICAAAKDAAVFGRALPSNALRIRLYIKTYREYQAHLDSILEELHKAVDNLQGDPVYDRICLLQSLRGVGFLSAVVLIAEMGSFDLFPSPKKLYAYFGMDPGVNDSGKFHGDRVHMSKRGSSLARRILHMIAINNLKVDKAAKAPVNPVIYDYYIRKCANKKKIVAVGAVMHKICNIIFAMLRDNKPFELITPKEHCERYAAEHPGSVNIAA

SEQ ID NO: 270025 - protein, 423 aa, unidentified
MTKFAATIGLDWADQKHDLWIQPADGSKAEHRQLEHTPEALHEWVAKLRERFGNRPVAIGIETCRGAVISALMAYDFIVFFPINPKALKDYRAAFAVSGAKTDRVDASLLEEFVRLHGDKLHALEPDTELTRKLAGLVQNRRLLVDERTRLVNQLHATLKTYYPLAQSLLGAQMNTAMAAEFLARWPELQSLKKATIQTLRAFFYKHNSRGAQLMEERLEAVQKAKALTTDPAIIEPARALVTALAAMLKPLHKVIAFLDKQIELTMDQHPDAAIFRSFPSAGPALAPRLLVAFGTNRARFASATEVAQFYGLAPVVEQSGNSKTVRMRYRCPKFGRQSFHENAACAIRKEPWANCYYTQQKARHDDKHHLACRAQAFKLIRIYFACWRDRQPYDPARYLSALEKNGSPLLAKLEASTTTARE

SEQ ID NO: 270026 - protein, 346 aa, unidentified
MEHYAGLDVSLKEISICVVDRDGKTIARGGCPADPEGVAGWFRNRSLNPHRIVHESRMLSIWLQRGLAGLGLPATCIDARKAHKSLSARLNKSDAADAEGLAQLARTGWFTPVHIRSEEADRLRSLVGARERLIRLRKDLEGHIRGVLKTFGIRMTGIGQGRQRQAFRDQLAMAGETDPILRMIADGFIAAHSTLCQAADDLDKAVQRKAKAHPVARRVMTIPGVGPVNALSFIALVDDPNRFSRTSDVGAFLGHTPKRHQSGEIDWSGRVSKCGDGAMRGLLFEAASCVIRQVKRFSTLKSWAVRLAGRRGFRKAAVATARKIAVLMLTLWKNETDYQWTKEATA

SEQ ID NO: 270027 - protein, 302 aa, unidentified
MGVDIAKSYLDAAIGNEKRRFANERIGHRELIKWVKQLKVPVQVICESSGGYERGLVRELVGAQLKVSLVQGNRVRQFARAAGILAKTDRIDAKLLCDFAEAMQPGTISASQLEQEHLRELESQRRHLTHLLVMEQNRAARASDRCVRRLNRSLLGQIKKQIAKLDLLIKEYIETSPELSAKAQKLTAINGVGARTAALLLAQMPELGQLNRREVAAVVGVAPFNRDSGKMRGKRSIYGGRRPVRHGIYMAALVAAHHNPILRAFYLRLRVAGKPAKLALTATMRKLLIVLNSALKPDLNYS

SEQ ID NO: 270028 - protein, 402 aa, unidentified
MNFSIGLDWASQTHAVCVMEATGQVGWQGTVEHSAAGLAELLRRLARFGPPAALPVALERPSGLLVDTLLAAGHPVVPIHPNALKASRPRYSAAGSKSDPGDAFILADLLRTDGHRFRRLQPLSDETRALRALVRGRDDLVAERTALANQLRALLERVWPGAAALFAEVESPISLAFLTRYPTAQSAERLGEKRLARFLGQHSYCGRRSPAELLARLRAAPASDVSDLEAEASRDLVHALVAVLTPLGVQIQQLSAAIVAALAQHPDGPLLQSFPRSGGVNAAQILAELGEDRTRFPTDEQLAAEGGVAPVTRESGKHRQVAFRWACNKRLRLALTTFADHSRHASPWAATIYTAARRRGCAHPHAVRILARAWVRVLWRCWQDRRPYDVTLHRAAQRGAAA

SEQ ID NO: 270029 - protein, 305 aa, unidentified
MISVSPQIQSVLGLDVAQDSVTVHDSGTGRTVTVPNEAAALRALLATVPACRLAVCEATGGHEDVVLAVLDELGLPAHRADAAKVKAYIGSFGKRAKTDAIDARWLARYGLDRDARLPRWTPPAAAQQTLKALIARRADLVAMRVQEKNRLQAPRTRADLTRRIATLDAAIEACLNADRRLAARAATLRTVPGIGPVLAATLQAIMPELGRLNRRQAASLAGCAPHPRQSGTRNAYRATRGGRRQLRPLLFVAALVAARPQSPLATTYQALINAGKAKRLALTAIMRKIIVIANARLRDAQIQLT

SEQ ID NO: 270030 - protein, 484 aa, unidentified
MKKEKANQAERPKRLTHRRRKELARRIWSDQPGLDVVHRDAAGIDIGSREHYVAVGPDRDAEPVRVFGCFTTDLRRMAEWLKKCRIKSVVMQSTGVYWIPVYDVLEQYGFEVWLVNAQDTKNLPGRKSDVQESQWLLKLHTYGLLRRSFRPTPEIRGLRTCWRERGEYVQQAGSCIQRMQKALTEMNIQLATVLSDLSGETGMSIIRCIVAGERDGKRLAEFRDPRVKASKQTIAKSLEGTWLPEQLAILQRQLGDWDHIQRQIAACDADLQAMLKQIPTAKVQHQQSLTPVAAPVDQRKRKRKKNGKSSKNEPKFNLAAELQRVTGVDLSRIDGIKAMTIMTVISEAGLDMSKWATEDHFVSWIGLSPRNDVSGGKVLKRKTRKVKSRLATALRTAATTLRQSDSYLGAQFRRLRGRLGPPKATTAMAAKQARLVYRMLKYGQEYVDKGAVIYEQKYREQQIRFLQKKAAQNGFALVPVQKHA

SEQ ID NO: 270031 - protein, 365 aa, unidentified
MDEERTVCVGLDTHKAKIAVAVAEPGRLGEVRFQGEIANQPDAVRRLIERLGGKHGKLSICYEAGPCGYGLQRQITALGHDCTVVAPSLVPIRAGNRVKTNRRDAVTLARLHRAGELTAIWIPDPIHEAMRDLIRARTAAMETVRRSRQQLLGFLLRHDRVFTGRKTLPIAPARDRFPAGPDRCRRQRWSPAHRRWLAGLSFAHPAQQIVLQEQIDAIAEAEQRRDRLGEQIRELVSDWSMAPIVTALQAMRGIAFLSAVVLVAEIGDFRRFTNPRQLMAWLGLVPSEHSSGSKVERGCITKAGNSRARRVLVEGAWSYRFPARVTSLEREPGHHCSRSRDGGLCLGDRVRDQTCRRSRLSRSPS

SEQ ID NO: 270032 - protein, 339 aa, unidentified
MQTKKKCFIGVDVSKRWFDVCMMFMNEGRREVFRERFDNDVAGFKKLTQSLRLHKVPLNDNTLVVIENTGIYHRLIWEYCNQKGLPISIVNAAQLKWSLGITRGKDDVIDSERLCDYCYRHADKLKATALLDPTILQLKDLMTSRTRLLTQINSTRTYLQELKHANGKEVQAMMEQIHKSALMGMKKSLGLIEEQINKVIRQSAAIKNNYELLLSVPGIGHVTAVYIICCTANFASSITGKQLACYAGVVPFEHKSGSSIKGKARVHKMANKELKRLLYMGARSVVQHKREFKQYYKRKEQEGKHHLAILNAVKNKIILRAVAVIKNQTKYVDNYQKAA

SEQ ID NO: 270033 - protein, 467 aa, unidentified
MQLSLGIDIACRAAHQASLADGRGNFIWTGRRFRTSAEDLERLWSLLPEADEPKDITVIMEPTRNAWVVLAAWFRRKGARVVLVPPERSADLRAYYSKHTKTDRLDSRLLARLPLLHPEGLHEEQGLGPGDPLRRATRLHQTLTKRRSQSLARLDALLEILGPAWLEVFGADLSNKTPLRFLAAGYACPNTVKRLGKARLTRFLYRHSRGRWGQELAEAVLEAAAETLELWGDELDYGELAEDIAIEARLALHLGEELKDLDERIGIFFAEADSKGILTSVPGVGAILGAQILGRLGDPNRFRSLAGVRSFSGLVPSLDASGTSGRHGGPTKRGDACLREAIFMAADQARRTDPSLAARYHRLMVEAGKHHNSALCHVASTLLTRIVACWRAGEPYVIRDTDGTAVSVAEGRRIVAERYTVPAELRAQRRTVGRGVRNKGTDRRSKESLRAPSTGPSLDHAMAAGAA

SEQ ID NO: 270034 - protein, 354 aa, unidentified
MEQRTTIGIDLAKEVFAICVLSPGGAVVESRTMRRAAFERWLVGLQGELVVAMEACSSAHHWGRQLAAAGHMVRLMAPAFVVPFRKSGKNDANDAEAIAIAAKQPTMRFVAVKTVEQQSILSWHRAREGWIAERTALINRLRGLLTEFGFSIAQSAFRLRKALPALSTEAAVPAPIRALLLEAGEQLRCLDARVARCDEQIAAHGRDNDTARRLREMLGIGPLTSSALVATVPDAAALRNSRQFGAWIGLVPRQHSPGGKPHLGELTRRGDKYLRSLLVQGARSALQVALRVAPDKATRLQRWILALYCRKGYHRTLVAVANKHARIIWALMARGEHFDNNAWQRHPLQRAATA

SEQ ID NO: 270035 - protein, 326 aa, unidentified
MEHELHYIGIDTAKEKLDVDVLRPDGRHRTKKFANTTKGHDELMSWLKGHKIDHAHICIEATGTYMEPVAECLYDAGYIVSVINPALGKAFAQSEGLRNKTDTVDARMLAEFCRQKRPAAWEAPPPLERALRALVVRHQALTDMHTQELNRTETAREVQRPSIDAHLLWLEAELKRLEKQIKDLTDDDPDMKHRRKLLESIPGIGEKTSAVLLAYIGLKDRFAHARQFAAFAGLTPRRYESGSSVRGASRMSKAGHVSLRRALYMPAMVATSKTEWGRAFRDRLAANGKKGKVILGAMMRKLAQVAYGVLKSGVPFDASRHNPVAA

SEQ ID NO: 270036 - protein, 334 aa, unidentified
MENIALIGIDLGKNSFHIHCQDRRGKAVYRKKFTRPKLIEFLATCPATTIAMEACGGSHFMARKLEELGHSPKLISPQFVRPFVKSNKNDFVDAEAICEAASRPSMRFVQPRTESQQAMRALHRVRESLVQDKVKTTNQMHAFLLEFGISVPRGAAVISRLSTILEDNSLPLYLSQLLLKLQQHYHYLVEQIKELESQLKRKLDEDEVGQRLLSIPCVGTLTASTISTEIGDGKQYASSRDFAASTGLVPRQYSTGGRTTLLGISKRGNKKIRTLLVQCARVFIQKLEHQSGKLADWVRDLLCRKSNFVVTCALANKLARIAWALTARQQTYVA

SEQ ID NO: 270037 - protein, 347 aa, unidentified
MEQIIRIGVDTSKYIFQVHGVDAAERPVLCKRLGRKQMLEFFAKLPPTVIGMEACGTSHYWARELKRVGHEVKLIAPQHVKPYVKRNKNDGRDAEGLCEAMSRPTMRFVPVKTVEQQAALMLAGLREQMIARRTQISNTIRGYAAEFGITVAQGLNQIEPLLARLAQDESVPESARDLFALQGRDYAQLQIELKSIEARLMAWHRANADSRRLAKIPGVGPIGAATAVMKTPDPGAFASGRHFAAWIGLTPKDHSTAGKTRHGKITRAGDERLRSVLVAGATAVIQQARHGRGHPSPWLIALLKRKPPKLAAVALANKMARIAWKLMMTGESYDGARVSKASLAAAV

SEQ ID NO: 270038 - protein, 344 aa, unidentified
MEISTIGLDLAKNVFQVHGVDPEGHVVVRRTLRRAQVLPFFSKLPPCLVGMEACGTAHHWARELIKLGHDVRQMPPAYVKPYVKRGKTDAADAEAICEAVTRPTMRFVPVKSPEQQAALSMHRARDLLVKQRTQLVNMVRALLAEFGINIPQGVRLALEMARKIVDGDAPAVPAEAAKIAGRLSQQALDTHAQLREIDLDLLAWQRANDTARRLMSIPGIGPIGATALAASVTDASQFRSGREFAAWLGLTPRQHSSGGKERLGRITKMGDKYLRTLLVVGMTSLIKRVKRKPETADPRLVALLARKPVRVATVAMANHTARVVWAVMARGETYRAGHQPRLAA

SEQ ID NO: 270039 - protein, 353 aa, unidentified
MIIIGIDPHKSTHTATSLEPATNTDLGSLRIEATLAEYTRLLTWSKTWPQRTWAIENAEGLGHHLAQWLLAAGESVLDIPTTATARVRQLSKGSRRKNDRIDAAAAASVAAMQGDARAVHPESITDMLALLDERRNNLTAARTRTANQLHALLRQLFAGGVPTQLTASRAATAIRRMKPRTTIDSMRMRLCRDLIADLKRYDTQLADNHRELASLLDQLGTSLRDVPGVGTILAGRLIGRTGIAHRFPTTAAFATYNGTAPVQIASAQSNRHRLSRYGDRQLNSAIHTVAMVQIRMPDSAGRAYYDKKRAAGMAPKSAMRCLKRHLSNHLWRIMIADGQRQHTHRTSPVTMAA

SEQ ID NO: 270040 - protein, 304 aa, unidentified
MGSGFSYTRLFLNRTVVSVSNDGKGIQEAVSVIKKHKPERIVIEATGRLEMPFIMACAKAKLPFVIANPIHIKRFAGAIGQRAKTDKLDAKLIAHYGEVIKPALSELKPEAMQAMSDLVARRNQLMVMQTMEKNRLQILPKELVMTIKPILTTLKNQITKIENKIQALIESSPEYQAKDTILRSMKGIGKIASASLISNLPELGYMTNKKAAALVGVAPMNKESGRYKGLRKIQGGRHQVRTVLYMAMMSAIQSNPVFKEIYQRLVCAGKPKKVAIIACVRKMIVILNSMLRDGTMWEAPKVKN

SEQ ID NO: 270041 - protein, 342 aa, unidentified
MTQVTFFVGVDIASAAFMACVGTAPWKLMVKPVKFDNHEDGFASFLSWLKDHNLPPEKTVVCMEATGVYGEGLAYFLFASGYTVSVEPPLNIQRKFPVNASKTDELDCQYIAEYACRYQDKLAFWKPRAEILEKVKVLLTTRQHFSVQLTGHKNALIAVNRKKVSSELAQQVHQDMIEQINKHIKAIDKEIRRLIDDDPNFKQTLLLLLSVPGIGLQLAAHLLILMQETVDPRVLAAFIGICPFKHESGTSVYSAPTSRHYGPPVLRKLLYLGACSVRTHKKQFQQYFFRKVAEGKHKKIVLNNIENKILKIACAVVRSQKPYIPNYVSVNPLIFQKTLTAS

SEQ ID NO: 270042 - protein, 319 aa, unidentified
MNRVIIGIDISKRKFDAAYKNIDQKWQRGTFENTSEGFKIFLKFLSENKVKKCHVVMEATGRYGEDLTHFLYGSGHTISIVNPAQIKYYGRSLLKRSKTDKVDSQLIAEFAGRHELSEWKPLSPSLQTLKDQTRCLEAFKRDATQTGNRLEHAKDSIVKKMLQARLAHIRKQIDKLTLSLQNLAKEDSLIAHQMALLTSIPGVGEITALHLLGELPDLSTFKCAKQLAAFAGLNPSIKTSGTSVRGKEAISKTGRKELRTLLFFPSMTVMRGSSSIKLFVERLRGKGKKGKVIVTAVMRKILHIVFGVLKRQTPFQGAV

SEQ ID NO: 270043 - protein, 341 aa, unidentified
MRYIGLDVHKDNITACVLTSTGKPKFEKDFTKESGYWNLDELLSFGDKDGFCVMMESGTYAYAPFRFFSDRDVEVHVVHAKALKVITDSDKKTDRKDALTIAKMLKLWKKGDIDLQMSYMPTREQCELKDVCRYREEISRKIGDETRRIKSHMSRNCEFLPEEFTNFQTQKARDFVKSNYSKDMTLMRRMERLEDLFEERDLVAEDVESRLPLSKEVELLTGIPGIGRQTAVQIMSMIVDVNRFGDAEKMCAYFGLVPRVRDSGGKEHHGRMTKNGDRMMRMIMERVTESHVRNCKSSVTEYYRRKCQEMGTKKALITASRKMLSVIYAVLKSGKDFRLTA

SEQ ID NO: 270044 - protein, 401 aa, unidentified
MQDTQQHDAVDVFVGVDVGKGQHHAVALDRNGKRLYNKALPNDEVKLRALIAELKTHGRLLFVVDQPFTIGALPVAVARAEGVLVAYLPGLAMRRIADLHAGEAKTDARDAAIIAEAARSMPHTLRSLRLADEQLAELTMLCGFDDDLAAQVTQTSNRIRGLLTQIHPALERVLGPRLDHPAVLDLLERYPSPAALASTTEKTLANRLTKLAPRMGKGLAAEIVQALSEQAVTVPGTQAATIVMPRLAQQLAALRKQRDEVSAEVERLVLAHPLWPVLTSMPGVGVRTAARLLTEVAHKAFASAAHLAAYAGLAPVTRRSGSSIRGEHPSRRGNKVLKRALFLSAFAALRDPVSRAYYSREIQQGKRHNQALIALARRRCDVLFAMLRDGTIYQPKSASNA

SEQ ID NO: 270045 - protein, 352 aa, unidentified
MKYYIGDDAHKKYSVFSIVDEKGVMSSCERVPHDKETYRKYLSTLPENSPIAIESVGNWYWMVEAMEQAGHTPLLVHPRKAKLMMGRINKTDKLDARGLAMLKLNGSLPEVWIPPAEIRDQRELSRMRMALVSVRTKFKNRIHATLAKYAIVIDDVSDIFGVKGRVQLKEVIKELPFETRQSVEEQLILLDQVSGQIEKIEKHMREVVKATPMMQLIKSLPGVGDILAIVIALEIGDINRFASAEHIASYCGTVPRISSSGDRTYFGRVRVDVNHYLKWAYIEAANCIALQQNKMSGRHVCVLLKRIQKHKGYAKAVVAVGRHLAEATYCILKKNQPYKEPNLYKPVLSSRG

SEQ ID NO: 270046 - protein, 373 aa, unidentified
MPKYSTAFGMDVHLRSTTVCALDADTGEAVTRRFPGNPWGEIAGWMDGFPGPSLAAYESGYLGFAPQRELAGLGVECVVAAVSKIPRSAADSASKNDRNDAARMAKAILAHDISPVWAPSPEVEGIRDLAGAYDGATARLATAKQRLLAFLARRGFVYGGTTPAGNPRKYWTYDFLRWLDKVRPEDDGGVRTLAALRNEVEAAAEARADLLSEYRAAVDASPIAAEVAALQSIKGCAFALAAAFSAEVGDFTRFRSGRQVTAYFGLAPSQRSSGDSVRLGGISGAGNALVRKLAVEGSWCYAAARHQPKLMPRDTGVPLEIRMHGRKGSERLLRRREEMLARGMPAAKANAATAAELVRWLWALGMMCREGAE

SEQ ID NO: 270047 - protein, 348 aa, unidentified
MKKIAIGIDFSKETFDATIMLRDGDHYIELAYSKFDNDAKGFKAFEKWVRRTLKWQADVKDRCSWIFCGEHTGPCSLGLCDYLTAKGYFMWLEDARRIKVTKPLARQKNDRGDSRMIAEYALREFNSTVRPYKLDSLDLKQLRSLLTAHTILTQDKVAKINQLKSGALDNSPLAKEHIQRELDTIRASLKEVDKEINSLLRKSQEFQHHFEIANSFPGVGALTIAWLIVKTRNFQDMTDPRVLGCFIGVRPFGSQSGTSVNTPPKTSRFRDPMLNALLTTCATCAIMYKNPIVRPYYDRLVARGVHPNKAKNNCKYKIINVLMAMIRNNTKFSMEIHGKSKAQWKTAV

SEQ ID NO: 270048 - protein, 386 aa, unidentified
MQLQERVFSAQFIPAEYDVFAGLDVDKKSIAATFLDHYNQIKQVKIPYDAQALISYAQSRYPNKRIAFVYEAGPTGFGLYDNLTAENYFCMVTSASNIPREPGNRVKTNRIDSRNLSENLRGGQLRPVHVPTQIYRELRHLIKLRDTFVQQTKATKTRIKALLLLNGIPFPASEMEKRWTKSVVKKLKELKCPEAIHFHLNRLVLSLEFFHRNVIDTTRAIRNFCKNNEEIAQNIKYVTSIPGIGFITASQLIARIGDWRKLYRFDQIGSFLGLVPSEHSTGDNIRRGSITRMGNTNLRSKLIQCAWITIRIDAQLRDFYDKIYARNRNAYGAQKAITAVARKLTTRVYAVLTEQRYFERRSTTENKDKNLLKEKNALSGERLVDL

SEQ ID NO: 270049 - protein, 401 aa, unidentified
MIEQFRIDHTAAGVNRLVARCLELETDPADVRVVLETRHGLLVETLADAGFTVLPVNPDVVARRRGPAKKKDDAEDARICCLLALDQFLELRKLIPHGELAGELRTIARDDERAARDERRLLNRLRADLLATFPAALAIAGGNLGSPVMLKLLSRWPGHDELAAADPHDIAAFARAASHGWPDRFAARVADALAADRLPVKDYLARAKTGTIALTATQLLAIRDQRRAWERRMAELLLGTARRGHATQAKEPDPGKAVPGGDIYLSFPGLGDRLAARIAGEIGDDITQFATPNGLQCYGGTAPVTRRSGRSEFVVARRLAHNHYLGAAVHQWAFCSLSRSAWAREFYDGKIAAGKSHHSALRALANRWLEILWHCLVKRIRYDETIHIRNRQQAHQHPSAA

SEQ ID NO: 270050 - protein, 389 aa, unidentified
MLQPVGGDKEGERIAVGIDPCKEFLQLAILSPGRCVEYRKLPLLPSITEEIAKSTDPARTQIVIESYASCGRLFIHELLQRGYDIREINPSISSKLVDLFTEEHTDTRDAESFARALSIIPDLPRVSFSEEKLWLTKLSRSRKKLVKDLNGYLNRLHMALTESYGAVYRQIFRTLWSKKALAFFETYPTINEALAHPRKVRQVLGEAKWELLRQAGQWGEGFYLELLGKEVQSLTRLIRVLQATRKEIDEEIRRIGEKDEEVRRLRTFPGIDYLTASTLLGEIGDIERFENEARLSSYCGVSPVMWQSGTSRVKAKRRKRFSRRLKGILYFISLSQIRINPESRQYYWRKRHEGKSHWQAMNALSRQLIKIIYYMLKNRESYYRKEVVN

SEQ ID NO: 270051 - protein, 352 aa, unidentified
MIIIGVDFHPEFQQIASVDTATGEFQEKRLAHREEAENFYRALAGKKVRVGMEASGHARWFERLLAELQLELWIGDAAEIRTKRVRKQKTDRQDARLILQLLLEERFPQIWVPSWENRDLRQLLWHRHRMVQSRTRIMNQLQAVALNEGLRCKKRLWRERGRQQLESFRLAPWASRRRRDLLELMDRLNPTITELTQAIEQEVEKCPEAKRLTTHPGVGALTALAFVLIIGRAERFRCGKQVASYLGLVPLEESSGNRRRLGHITKQGSSMLRFLLVEAAQVTVRSVPEWRSRYFHLMLRRGRKTAKVAMARRLAVRLYWMWRQGWDYEQLTQFGSHAGQPGNRDGVPSNTE

SEQ ID NO: 270052 - protein, 328 aa, unidentified
MCTLGIDVSKNKIDLCLLTAGPGGKKKHKVLTNEPAVARKVVDWLNAQKCVPESVTVVLEATGIYHENLAYGLHEAGVSVCMANPCRVREFAHGMDILNKNDAVDAFVLACYGELKSPAVWVPPSPEVRKLRALLRQRDALREDVQRTVNRLEKANSTSTPQEVIRSLERMKSWLNEELARIEKLITDHTDNDPGLKADLDLLKSIKGVKDQVGREMLVLLKDGTFKSASQVAACLGLTPVEKTSGSSVRGRPHMSKTGPSGVRAKLYVAALTASRWNKQAKAIYERLVAKGKAKKAALGAVMRKLVHLCFGVLKTRLPWDENYVATA

SEQ ID NO: 270053 - protein, 338 aa, unidentified
MKLYGAIDLHSNNAICGAIDSHDHVKLRKKSPCETAAILDAFAPFKQDILGIAVESTFNWYWLVDGLMDAGYRVHLVNTSAVKQYEGLKYTDDNTDTFWLAHLLRLGILPTGYIYPKELRPVRDLLRKRHQLVELRTTNILSIQNLWIRNTGVRLTSNSTKKLTCEQIEKRFNDPNLVLAIDSNRLVMQALDDQIKRVEETVLKQSKLDPRYRYLLSIHGVGKILALTIMLETGDISRFEKVGNFASYCRCVGSTKLSNGKKKGTGNTKNGNKYLSWSFVEAANFAIRFYEPARRFYQRKMAKTKRVVAIKALAHKLARASYYVMRDQVPFDPAKIYR

SEQ ID NO: 270054 - protein, 343 aa, unidentified
MEHYVGLDVSLKQTSICVVNQVGSVVREGVVDSEPEAIAAFVRSKAPGAVRIGLETGPTATWLWTELKQLGLPVICIDARHAKAVLKMQINKSDRNDAGGIARIMQTGWFKEVRVKGPDSHSVRALLASRALLVKIKRDVENQNRGLLKNVGLVIGRAKFNVFAVRAEELIADRPQLIAVVGPLLKARQAIEQQTNDLNRKVLKLARYDAQVRRFMTVPGVGPITALCFKATIDDPARFKRSRSVGAYVGLTARRHASGEIDWTGRISKCGDAMLRSYLFEAASVLLTRVPKWSALKAWGMRLAKRNGLRKATVAVARKLAVILHRMWISQTEFNWSKKEVAA

SEQ ID NO: 270055 - protein, 377 aa, unidentified
MKEKLRFLGLDVHAETIAVAVAEPEGEVRSLGTIPNRAESIRKLIRKLGPVDKLRACYEAGPTGYVVYWQLAELGVECEVVAPTLVPVKAGDRVKTDRRDAEKLARCHRSGDLTAVWVPDEGSEALRDLVRAREAAKQDQLRARHRLGKFLLRSGQRPPTGVRPWTRPYLIWVAQLRFTQIAQESTRQDYLHEVEHMRERVARLEQAITEAVKLASPSLRQVINDLQALRGIADISAVTIAAELGQISRFDSARQLMGYCGTVPSEDSSGKRTRRGGITKTGNAHLRRIVVEAAWSYRRPPCIWYGLRKRQESISEEAKEIAWKAQHRLHKRYMKLSAAGKDQRKTVTAVARELLGFIWAIGTRAETVSKQQVAAWQ

SEQ ID NO: 270056 - protein, 345 aa, unidentified
MIIGCDFHPSWQQIAWLNTETGETGEQKLVHAAGDAKLFYQQLAAPVLIGMEATGNSQWFLELVQDLGHEIWIGNAAQIRASYVRKQKTDKGDAAHILKLVVESRFPRLWTPDREQRDLRQLVLHRHKLVEIRSRVKNELQHLSLNKGIQRKAKLWSQAGQKLLRELPLKPWAACRREDLLGLLAMLHQQIGKLDQAVQQAADEHPQAQLLMTQPGVGPNTALAFVLTIGDVSRFPRGKQVASYLGLIPREESSGGRQKLGAITKQGNRLVRSLLVEAAQIAVRFDPGMKKQYLHRCHQKPKGVAKVAAARKLAVRLYWMLRTQKPYPEIVRIESSPRVPLVGAS

SEQ ID NO: 270057 - protein, 311 aa, unidentified
MYYIGIDVSKKDLSVFDGKDLKFINQEGLTSFKKYLKKKYNLSEVAIIFEPTGVYSLYLKEFCAKNNIKAYIVNPKQSHNFTRALGKRSKTDKIDARILYQFHKLIDSKDIKVPKIDQQAKTLSSYLVSYEFALKQRISLSHHLESLRDQRLIALMRKELKRAKNLEDKIFDDIKEYLGKNQDLKEDYQRLSTIPGIGEKTAIALLTLFKTYQGTNRAQITALAGLDPVRRESGTSVKYKVKISKNGKGIYRKMLYLPTLCATVHNQKIRVFYQRLLANHKNKKLAVIASMRKILLIAHAIYRDKTEYVVA

SEQ ID NO: 270058 - protein, 378 aa, unidentified
MHYAGVDLHKQSITICVLDEDRKVVRRKRLLCCNENLILAFFQNLGQFEVAVEATSGYEWFAKLLEPLDCRFVLAEPNRLKKMMDSRFKSDRLDAHKIATVLAEGYMPQAYIPTDRQREHRGLVRHRCRLQRRITSLKAQLRNLASRYNADRTDLFTRGWVEFKKVKLSLADRFVRDQLWAQLQFMTRQLCAANKKLGRFADKAPALERERRVLLQTIPGVGFVTAEVVLCEIGDPERFRSIGRLSSYAGLAPGRHESAGRQKELPITKAGSRLLRWVMIEAAWQTIRYSRRWRCEFERIAKRRGRKKAIVAIARRLLGVMHTMMLTGKPYDPLYVPMRCAPDAAAQCCASPPSRGRQTATAAQEGKNDHRPSISSVN

SEQ ID NO: 270059 - protein, 287 aa, unidentified
MEEITTIGVDINQNVFQLHGINAEGQVVLRKALRRGQMQPFFEALSPCLIGMEACATAHHWARTLIASGHDVRLIPPNYIKPYLRRQKNDAADAAAICEAVTRPSMRFVPVKTEDQQATLMLHSARELLISQRTALINALRGHFAELGIVAPQGARNVRQLIAILEDERYSPQAVRTALAPLATVLIEIEGQITKLDKALLAAHRNNDVSIRLATVPGIGPVIATCLSASVSEPKLFEGGREFAAWLGLVPRQHSTGGKPRLVPFPKWATGTCVNSSWSGRTQPSTG

SEQ ID NO: 270060 - protein, 352 aa, unidentified
MLIIGCDFHPGFQQVAIFDNQTGEYQEKRLSHRQEAEQFYRSLAGQKVRVGMEACGHYPWFERLLADLGMELWLGDAAKIRASVVRKQKTDRRDAEHLQVLLREERFPRIWVPTLEERDARQLLVHRHKQVQARTRTKNQLHALALSQGVQKKRKLWTEAGRAELEKLELLPYAAIRRERLLETLDRLEAEIAALNRQVEAEVQQRPAAVRLMTHPGVGPVTALAMVLTLGPAERFASGRKVGSYFGLIPSEHSSGGRQQLGHISKQGSSFLRFLLVEAGQSAARYDAELGRFYRRLAVRKHRGLAKVAVARKLATRLYLMLRENWNYAQLCKAVVQVSPSHSVEGRQKPSA

SEQ ID NO: 270061 - protein, 405 aa, unidentified
MTVMIGVGPHKGSHTAVAIGAGEEPLGRLRVRASVAQAEKLVAWAADWPGRTWAVEGAGGLGHLLDWQLVAAGERVLDVPPEPAARVRLLQAGDTSKNDPDDALSVAIAALRSKAPRQVMAEDYAAVLKVWSKRHRDLSRARNQVACRLHAVLCELVPGGFAKEITAGQAARVLDTVTPAGAIAQARRDLAGQFPGDLRNLDARLRQAKKKLAAAVRASQTTLTEIFGVGPVIAGTVIGDAGNIARFASRDHFAAYNGTAPVEVSSGGRITGRLSLRGSRRASHAIHMAAITQIRNRHSDGRGYYDRKIAEGKTHKEALRSLKRRISNAIYARLRADARQAAAASAKGPGGQPGNDSDSSAAGSHPQRRLFGQATPGPAPTPRPATRRKPALSPKPSSKMTRRSP

SEQ ID NO: 270062 - protein, 370 aa, unidentified
MSKIDYITSVGMDVHKKTINVAVVLSGSSQVAEEWQLANEPRAIKRLVKKVKRLSPGEAVACYEAGPCGYALKRRLDDLGLPCVVIAPSLIPVKPGERVKTDRRDARKLATLFMAGLLTEVHPPNPAQESVRDLTRAREDAKQDQMRARHRLGHMLLRHGFMFTESNNWTKKHRAWLRKIRFDSVHAQRVFEQYLLSLEQIEERLITINVYLEEAADSEEYAEKVGWLRCLRGIGTVTAMTILAELHDFRRFDNPRELMSYLGLTPSEYTSGENTRRGGITKAGNSHVRRILVEAAKHYRHRPTVSVVLRKRRAGQPKAVIAIADRAHSRLHRRYYKLKEGSRKHSNVATTAVARELTGFIWAVMRHDEL

SEQ ID NO: 270063 - protein, 402 aa, unidentified
MSEQVQQVQRVVVGMDPHKRTVTVEVMAADETVLGGGRFDTTVEGYIAMLEYLTAWPDRVWGIEGCEGIGRHIAHRLLADGQDIVDVPAKLSARARVFATGQGRKTDATDAHSVALVATRMAGLRPVVSNDELEVLQLLVDRRRSIGEEHTRKVSQLHRILLEMLPGGAKKHLSAAQARAILSKVRPRDAVGKTRKRVAMELVLDLERIYTRKKAADKELTALVAATGTGLLGLHGIGPSGAARLLVEVGDLSRFPNRNHFASWTGTAPIDASSGEHVRHRLSRKGNRQINRVLHIMATVQLRTPTEGRAYYDRKKAGGKTSMEAMRCLKRRLSDVVYRTMLGDYTAGKIISPASQVTGPRGQRGNVSNSSATGSKPHPGPSDKPLPGPAKPQPTTPLRRAS

SEQ ID NO: 270064 - protein, 337 aa, unidentified
MELYAAIDLHSRNNFLAVMDREGKTMFNKKLTNDPENLLEVIERYREGLQGIVVESTFNWYWLVDALMEAGYKVHLANPAAIKKYEGLKHSDDNSDAVWLAEMFRLSILPEGYIYPRNERPVRDLLRKRMHLVQLRTSLINSLQNIIARNGGGSLRAAKIKQLTHNHVAPLLKDDLALSGEVSKQAIDDLTRLIIKVEKTVEGKVELKSEYACLKTIPGVGKILALTIMLETGPIGRFPAAGNYASYCRKVPTSWTSNGKKKGAGNKKNGNKYLAWAFSEASEMARRYDPKIRSWYNRKASRANRMVAHSALAHKLARAAYYIMRDHVPFEQERLVG

SEQ ID NO: 270065 - protein, 388 aa, unidentified
MFNNFIGIDVSKDTFNYCVINSQLTTVEQGSCEMNTKGFKGFKNIVDKYQDSIIALESTGSYHINILSFIASFKKEVYLVNPVLIKRFIQTISLRKTKTDEIDANLIAKFIFYHNASLKQFVPNNMNEILALSRVRESITRDVAKMKTKLKQDVNTVFPELVKHYNIFTKTILGILKAFPTTQSIKETNESKIKKVVKEIKGKKVYSTIKDVQKLAKESISNNNGIFSKIIEHDVKTLEFLNQQLEEITKTLLEEIKKEKEISMDILTSIDGISDVTAAHFIAEVRDIKNFENRNKLIAFAGTDPSIKESGTSLKQNGKITKKGSSSLRRIIYIMGMSLIRSNQLFKDYYYKKRQEGFKHRKAMTALGNKLLRVIFSLLKKEEKWVKK

SEQ ID NO: 270066 - protein, 415 aa, unidentified
MMEQRNKVCGVDIHKRFLIATILSRDGTKIQKRYSTDIDDLFGFRDWVLENNCDCVAIESTGVYWYPVNAVLENKIELILANARQIKHTPGRKTDSIDSEWIAEVALNNLIYPSRIFPKEERDLRRLTRTRERLMKIRSQIKNQVHQGLESCSIKLSSVLSDNFGKSGRHILDGLIKGENVDRIIEEIPSKRVKKNEDQIRAAIRTGLDETQIFLIQSHLNTIDSLTKKLDEIDSEIKDKISGRKKDLQIAMSVPGIGFTAAATILAEIGNYRDFSTSDKLASWCGIVPNVYQSADKLITGSITKHGSKHIRWMLVQVAQAALKKRGSKLRRFFLRIKARKGHNVAVVALARKILCILYHLLMNQEMYQEDGVTKSRQSKIDWSSARIDKMSLQTMIEIIAKAGYEVKKIEESGG

SEQ ID NO: 270067 - protein, 410 aa, unidentified
METIVKRAAGLDVHKAQVTACVRVPGRGRERTQEVAEFQTTVRGLLTLRDWLKAHRVSQVAMEASGVYWKPVWVILEDEFDCLLVNARHVKQVPGRKTDVSDAAWLCQLLEAGLLRRSFVPPKPIRALRNLTRYRKAQIGERQREANRLHKLLEDTGIKLDCVASDILGASGRAMLDALVAGTTDPQVLAELAKGKLRAKIPALREALVGRFDRQHALIVSAILAHLDFLDEQIQLLSDEIEAQLIPFAAAVELLCTIPGVQRRSAEVIVAEIGLDMSRFPTERHLASWAGQCPGNDRWAGKRRSGKTRHGSKWLDSALTEAAMAATRSNDVYLAAQYQRLRPRRGHGRALGAVKHSIITGCWHMLTTGELYREPGGDYFTRRDPERATRRLIGQLERLGHRVTLEAATA

SEQ ID NO: 270068 - protein, 320 aa, unidentified
MTASVEPVYVGIDVSKAKLDVCLLPSGQTAIFDNDAQGIRQLVKLLGKQPQIIRCLLEATGRYDRRCAADLMEAGFAVAVVNPRQARDFARSLGRLAKTDTIDARTLAEFAKLGHVRNSEKTPENRAILDDLITRRRQVTQMLAAEKTRREGLCHKIARASVDKVIRLLLQQREDLDREIARLIESDDDWKSRRELLTSVPGVGVTTASQLIADLPELGKLNRQQIAALVGVAPLNRDSGTLRGHRSIFGGRSAVRSGLYMATLSAMRFNPLIQPFAHRLIAAGKAFKVAMIACMRKLLTILNVMVRNNEHWRVPVPQNP

SEQ ID NO: 270069 - protein, 405 aa, unidentified
MIEATPTYAGIDWSWQHHALCIVDDDGQRIEEATVPHTRPGLAKITLLLRRHGVERVGIERGDGPVVEHLIHDGFEVVVISARQVKSLRARYGAAGNKDDRFDAFVLADALRTDAGRWAVVQPDSDETIALRMLVRARHDLIDHRIAVHNQLLAVLQHNFPGAIGLFSQLDIGISLAFLRRFPSEAKAAWLSELRMAHWLKANAYCGRHTPARLVGHLREAATGRITGAAAEASEVIVLTLVDLLTTLRQEQEQLEARIKEALLAHPDGPIFQSLPRAGVVRAATLLAEIGDCRARFPDPAALAAAAGVAPSTRQSGKHLNVAYRRGCNKQLRAALVDWAQDTPRANAWARDTYDRARARGCRHPHAARILAQGWTRILWRCWHDQVPYNPDLHGRLNSLLPEAA

SEQ ID NO: 270070 - protein, 425 aa, unidentified
MKISQIAEKIKLNQVMDISVDVHKDLLNFFFEVRGKEYSDECGNRTTVITKRLEAYHQIAAEHGMKTLRIICEPTGQYHNKLFRTARKMGFFTCFVNAESVAKFRVIETNDTGKTDTKDPRVIRTLGQLDKVIRHRMVSEEYLILRKLNKIYDEVDGTIVSLRCRLDRLLVELFCDYSFKKDFLYTASGLGLIEAYGCNPYRIIKGSYMGFCDRMRKAAPRIQRQTLRRLWEDAQSSVLNEQPEAYIETLEMHLRQLINDWLEQIRRKEEMVQKMVEVLNRLRGKDPKIPPSTPGVINDKNMARLLGETGPLGDFANGRMLMRYGGLNIRMRQSGKYQGQNKITKRGRPLLRKVLQHIVLPLVREGCLYGQYYYRKKEIERMPGNKAMTCVARHFLKKFYGWYNSGEAFNQQRFFSCESQYREAA

SEQ ID NO: 270071 - protein, 359 aa, unidentified
MYFSGLDAHLRYVTVAVLDRLGGVALETTVPTREPDRLLAVLAPFRPLEVVVETCPFWPWLYDLLVPAGIGFHLAHAKALRAIATAPQKSDAVDARLLARMLLSGLIPEAYPRSADQRELLRLLRHRTALVRFRTRLAGRIHSQLHQQRLSLPRENLLRRATRAWLEATAWPRLTVEQRAIVTTHSELIDHLTPLIRALERRIAAAAAGDATAPLLATIPGIGPYRSLLLAAELVPISRFPRAEHLVSYAGLAPVTRSSGGHTHHGSIPPAANRWVRGALVSAIPSHVRYAPTSPGTVAYEQLKARLGWRVARVAAARKLARVVYVMLTRRAPWHGVPAAGDVRDEVQNSHVAPTTSFC

SEQ ID NO: 270072 - protein, 329 aa, unidentified
MKKDWYVGIDVSKKWLDVAIFVENSELKGYSHTQVGNNKSGYKDLLRWLREHDVDASTCTYGMEHTGFYSDGLQHFLDKKGYKYTMLEPAVIKHYPIQPREKNDRLDAAKIADYLFRFKETIKLSRVPDKTMEELRNLHRERKFYVEDRVVYLNRKQVVGKEEAKRLDKIISLLDKQVESIEEKIRDIIRNDESLMESYLYLTSITGIAFVNAVNAIVITQNFTVFKTARDYASYIGVSPHTKKSGTTVRWKPKPYKHCDLTAKADISQAAKIAIVHDVELKRFFERKCNGKEDADTIRKAMNAVKFKLVLRMFAVVKQKHEYRQFTTK

SEQ ID NO: 270073 - protein, 431 aa, unidentified
MKVIYPIACGIDVHKSFIVAVICDSTTLKPTYTKKRFSTFHKDLIKFRDWLLEHGCDNVCMESTGKYWIPVFNILEGHISNVVLTNPKWVKAVKGKKDDNKDAKWICDLFKLGLVQGSFIPEKQIRILRELTRNLFKVTNMRSSEKNRFQNALTVDNCNIDQVFSDVFGKSASAIINLILADEPFTLQDISTSLHGHCKATAEEVSDAIIGFSLEHVQKQRITLIQAHMEYLDSMILNFQSLIDSIVSPYDPYVTLLSSIPGVKRQSAITIISEIGIDMSQFGSHHRLASWAGLAPGSNESAGKKKSVKISRAGVYLKPCLLQVAHAAVKDNKNPYYANKFNKIAKRRGKKRAYIAIARKILVAIYHMIDTGEFFNPRDLADTETTIKKRIQYTKNNLRNDINSLLNSGLSQEDLSILINSILPDNPQLST

SEQ ID NO: 270074 - protein, 351 aa, unidentified
MTMLAEVAGAVAGGGTHRDTHALEMLAPNGTTIAALAISNDDDGFAEAIAWIAGNVPGPRVVAGLEGTRSYGIGLARAVAAAGLIVVEVQAPRRADRRHRGKSDPIDAHLAGLQVLRMPAGGLPAPRADGDREALRILLSARRELTMARTRQINRLRALLPGGDDTGRDLSRGTLTGARLQAIARRRARASDTTGQSVRRAGARRLANAIRAAAAGLAANKRHLAGLVRGLAPALLDKTGVGPVSAAQAIVSWSHRGRCRSDAAFAALAGASPLQASSGRTTRHRLNRGGDRQLNRALHDITLTRWRADPRTHDYIARRRAAGKNDTEIRRALKRYVARELYRALQASPAA

SEQ ID NO: 270075 - protein, 341 aa, unidentified
MNDISTVGIDLGKNVFHLVCMDEAGQIVKRRKCSRPQLFAFFRGLEPILVGMEACASAHFIARTLVEMGHDARLMPAQFVKPYLRSQKNDFLDAEAIAEAVQRPRMRFVPIKTREQLELQAMHRVRDRLVGRRTAVSNQIRGLLVEHGITMRKGRGGFRGFVPDLLADDSPLSPSMRRLIAGLWEEWNATDNAVTQLTRDLERLAQEDPGCRRLMTVPGVGPLVATAMIAAIADGSAFGRGRDFAAWLGLVPRQMSTGGKTRLGSITKRGNTYLRRLFIHGARSFRLNGNRARHAIGAWLDDLDRRVHKNVATVALANKLARIAWSVLTGGQTYKETPIVG

SEQ ID NO: 270076 - protein, 341 aa, unidentified
MKKRYIGIDLHRNRFTCCIRLENERTYVTDWALEDLARFVNKQLRPGDEVAVEITSNTRLFYDRVAPQVARVVVVDTNQFRVISRSVKKTDTNDARLLALYLSKGLLPEVRMKDKELAQLASLTQTRDTLVKQRSALKNKVNNILSARGLNLPKEALSSEKKLREVLELPFDEIVRIELRVIVEQIRSLNQSIAELEKTIGEEGSKLEGHTSLSSIKGIGKITGAILLSVIGDVNDFADEAHLASYFGIVPRVSNSNASEHSGRIHKRGSKLGRTALVQSALIAANYSPYLKRFYEQVKARRGAGKAIIALAKKFLGIIYRTLKNQWVFEDFPNFVLAEAS

SEQ ID NO: 270077 - protein, 277 aa, unidentified
MKYVGIDLHRRFSMASVVDEKGKLIEQRKLPNGIESKEFLEGHSSSLQVVVEATGNWQWLYDLLEEAGVEVKLAHPLKTKAIASAKVKNDKVDSLTLAQLLRTDLLPFSYVPEKSVRMLRELLRYRASLVKIQTSLKNRIHTILAKNNIKHEFSDLFGRRGIEFLSSLNLIEAYNIPLKGYLSLIKKVSEEIKFIDGIIKSLSSEDKEARVLMSIPGIGYHSALLIKVEIGEVNRFPCAKKLCAYAGLVPSTYASGDFCYYGHITKQGSRYLEMDTP

SEQ ID NO: 270078 - protein, 428 aa, unidentified
MHGKDYNKQIANRQRIKRTTLVIGMDIGNEFNAMCLMNKEGEVLGKYPQIYNSRKGFAFFTKAVEGMKKKKGFKDVLIGMEPTGHYWRKIAYFAKDRGYEVRFVRTTALRHQRELDESSSAKSDVRDAVTIANITREGKYIDTVIEEGVFRQLRTLAHVRERIQRYNTGSKHALKAVLDDYFPELKNIFWSMKSKGLWAVLEDVPFPENVIDLGLKRLTELIAKSTRRKETAAKKAAELYEAARETVGLKQIGVADRYRLEMYLEEVKRSEAQLKEIEKEMGKLLEEIPYARNILSIPGVGVLSCAVLLGELGDPSNFKHPKQIIKYAGYDPQEHDSGQSIGRKRISKKGRWMLRKYLYFMSMRVLYRDEFFREYYERKLKSSNRFGQPLKKKEAICAVAIKLIKVIFALLRDGRMFTAKAPELALAA

SEQ ID NO: 270079 - protein, 417 aa, unidentified
MEKHNNSRKKSEPPSKRAKPRGPIRRDTKDVLAELVGKLKEKLDPKKLAATSAGEKHPRGELRPNLDRLTVGVDLGDQWSQYCILGLEGETLAEGQLRTTQDDIAEFFQALNATRVVFEVGTHSPWVQEVICGCGHEVLVANPRLMEGSKRRKRKNDRIDANKLARLGRVDPQSLHPMQHRSREVRQDLVVLRARDALVAARTELINATRGLVKSMGTRLPKCSSPSFAQKVEETVPVEMREALLPLVRLTAALSDSIQGYDEKIEKLGREKYGHTALLRQVKGVGPITALAYVLTLEKPDRFAKSRDVGPYLGLVPKQEDSGESQPQLGISKTGDTMLRKLLVGSAQYILGPFGPDTDLRRYGLRLCERGGKNAKKRAAVAVARKLAVLLHRLWVSGEVYEPLRQGRSATMTSMAA

SEQ ID NO: 270080 - protein, 392 aa, unidentified
MVVSVGIDVSKDKHDCFIVSSEGEVLADAFTIPNTIDGFHCLLQRIQDCTHAQDKIKVGLEATGHYSYNLLGFLLDNGLATYVLNPLRTNLYRKSLSLRKTKTDRVDARTIASMLLSDVGLKSHTDTAYHNEELKSLTRYRFDKVKERAKLKSSIARLVCILFPELEKFVPSLHIASVYALLEEFPGAKQIAAAHLTRLKTLLETTSKGHYKRDMALEIRDASRNSIGSWMPAKSLELQHTIRLIRELDHEIAEIEEQIQSIMDELHSPITTIPGLGFRMAAMILAEVGDFTRFDSPDKLLAYAGMSPSTYQSGQLKNCYPHMEKRGSRYLRYALYNATKYVCHWDPAFAAYLAKKRAEGKHYNIAISHAAKKLVRLIFAMEKSRQPYCSAA

SEQ ID NO: 270081 - protein, 340 aa, unidentified
MSLVLQPLLPFPDSCQGMSPHQQGRGTKMTEHCYGGIDVSKDRLDVMVLPDRKSFSVDNNAAGYSELVKRLRGLSIAAIGIEPSGGYERAVIRALLAADLSVRRINPNKLRQFGRARGVLAKNDRLDARLIAEYVAIMPTRVVQHDPATEQLAEVVTMRRQLCDEHVAVENQTAHLEDAMLRRLNKRRLARLAADILLLDRRMAQIVASNANLTRRYELLTSMQGVGPTLAFTLVALLPELGQMSRKQIAALVGLAPYDFDSGRLKGHRCIYGGRLPVRNVLYMAALSACRYNPALKVFHHRLAATNKKPKVIIVAVMRKMITTLNAMLRDNVAWQPKSA

SEQ ID NO: 270082 - protein, 344 aa, unidentified
MEITTIGLDLAKSIFQVHGVDATGQVVVRKSLRRSQMLPFFAKLPSCLVGIEACGTSHHWARELIKLGHEVRLMPPAYVKPYVKRGKTDAADAEAVCEAVTRPTMRFVPVKSPEQQAALSMHRTRDLLVKQRTQLVNMIRGLLAEFGIDIPKGLERALLKARQIVDGKAPDVPIEAGKIVGTLSQQALEIHARLRAIDRDLLVWQRGNDVARRLMTIPGIGAVGATALAASVTDPHQFRSGRQFAAWLGLTPLQKSSGGKERLGRITKMGDKYLRKLLIVGMTSLVRRAKYNPEKIDPRLADLLARKPTRVATVAMANKTARIIWALMARGETYLADHRPALAA

SEQ ID NO: 270083 - protein, 372 aa, unidentified
MNYSTVYVGMDVHKETFSLCCYTNEKEQAEYSQKVDGHYSKVLNYLEAMRFHYGDDAVFICGYEAGCLGFTLYHQLTSHNVKCVILAPTTMPKPAGKKKVKTDKRDAALIARCLAHRDYSPVHIPTEQDEQVKEYIRMRQDHKLALKKVKQQILAFCLRHNYRYDATKNHWTQAHLQWLRSLKPDGLYQEILSEYLSSYDQLTDKLERLDRRIEELAAQPEYQEKTRHMSCFLGIKTQTALSTLVEVGDFKRFASAQQFASYLGLTPGEDSSGGDQNRLGITKAGNSHIRTLLIETAQSYTRGQIGYKSKTLKARQYGNPADIITYADKANERLRRKYYRMVLNQGKKANVAKTAVARELACFIWGDRKSVV

SEQ ID NO: 270084 - protein, 360 aa, unidentified
MVPTISTIASSPVSLFAGFDTHKDTHAVVASTHSGDTVEEFEFPTTTFAYHKMLDKIQAHGKLTHVAIECTNNYGKTLADFFISQGIAVTEVNTTDKGMRRRIGKTDLSDARGALNTLVYGQSQGQAKQLTGVFFDLSALVMARNSAVRQRTETTNCIKALLVRCPFEVVTKYPQKDNKARFRAMSHARPSATNPDRVVLITLKQMAKRWLGLDEEADMYEGMMKEIVQAHFAELVTITGISYVSAAALLVRAGSNFSRIHSPEAFVRLAGCAPKPFSSGKNSTMILDRGGDRQLNNILYMITIVRMRFDEETRVFVKELEDKHKSKKATIRILKRYLARRLYRVLSDVILRYNAHLLAL

SEQ ID NO: 270085 - protein, 376 aa, unidentified
MTVYNVGIDAHTTNFTLATWGKDDLRATNVNTYSPSVESIIKYCNAITKQHGDDAKIIVGYEAGCLGFQLYRQLKDRGIECVVMAPSTIVGTEVNRRRKVKTDKRDAIAIAESLKNNQYKAVYVPDEEDEAVRDFIRMRTDHKQALKRIKQQICALCHRHGYHYTEGRNYWTQKHLNWLNSLPLTGVLKETLDEYLLSYEHAVEKLTQLDARIVEIAETDKYREKVHKLICFKGIKEITALALIVEIGDFSRFIKAKGFASFLGLVSGRLDSGDHNTALPITRQGNTFLRRLLVEASQSFSRARQSKSAALKKRQEGCEEAVIAYADKANERLRKRYYKLVLTNKKSHNKAVTAVARELACFIWGMMTGNIHTALA

SEQ ID NO: 270086 - protein, 399 aa, unidentified
MDEGYEVYCGLDVGKSEHHAAALNAAGERVFDKPLPQDEARLRELFTGLQQHGRVLVIVDQPNTIGALPIAVARDCGCTVAYLPGLAMRKAADLYPGKSKTDARDAFIIAETARAMPHTLRAVDRDSEVLAALKVLSGFDADLTHECTRAINRLRSLLLQIFPALERVFPGTVLTRSLVLELFIKYAGPTGLRVAGRSNVLRWARNHSRKDPVNLVDAIFAALGEQTVTVIGTEAVELVIPRVAAQIKELKHQRAIVAEEVEKLLDDFPLSRVLMSMPGVGIKTAATILLTIGDAGTFTSAGHLAAYAGIAPVTRRSGTSIRGEFPARSGNKQLKNALFRSAWIASCHHPASKAYYQKKRDQGKKHNAAVICLARRRCDVIYSMLKNGTLYEENPAQAA

SEQ ID NO: 270087 - protein, 409 aa, unidentified
MERVIERCAGLDVHRDTVAACIRIPGARGRPEQHIKTFSTTAAELLALRDWLEAHRVTHVAMESTGVYWKPVFYVLEEACPCLLVNAAHIQQVPGRKTDVQDCAWIAQLLECGLWRGSFVPPAPIRELRDLTRYRKVLIQERTREANRLHKVLQDAGIKLASVATDILGVSGRAMLEALVQGTTDPAILADLARGKLRAKLPALRAALAGRFRPQHAFLVSQLLAHLDYLEEAIDTLSERIEEVIAPFAAELARLDTMDGVNRRTAEGLIAELGVDIRPFPSDRPLASWAALCPGNNESAGKHRSGKTRKGNRWLRSALIEAALAAVNTKGSALAARYRRVMRHRGHKKAIVAVAHAILRTAYQLLSRGTTYQDLGADSFERRHAERVTRRAVALLERQGYRVTLDRAA

SEQ ID NO: 270088 - protein, 410 aa, unidentified
MEVLHSHCAGLDVHKDSVVACVRHMVDGKVTTGVKTFQTTTEALIALSDWLSAEGITHIAMEATGVYWKPVWHILSDGEFALVLANAAHVKNVPGRKTDVNDATWLADLMAHGLIRPSFVPDEPTQQMRDLLRTRKQFTRERSRHAQRIQKTLEDANIKLDSIITDILGVSGRRMIEALITGQTAPEALAKLADGRLHATRAELEASLRGRVTPHHRFMLRLHLNQIDALDTALACIDQEVDANVEPFRVAIEMLSTIPGLSSLSAEVIVSEIGIDMSRFPTEAQLIAWAGLCPKNDESAGKRRSNRIKKGAPWLKTTLVQCAWAATRKKGSYLQAQYLRLRSRRGPKKAIVAVAASILTAAYHMLKNGTLYQDLGANHFDQRAKGKHVLRLVNRLQNLGFAVHITPMAA

SEQ ID NO: 270089 - protein, 483 aa, unidentified
MISSVGIDLSRTGRHQARCLDEQARPCDSFTFDSTMEGLETLEKHVFSDGATPTIVFEPTGLAWIPLATYLRARHPDSRLVKARLQKVAALRKYIHGHAKSDRVDGVTLAKMPFIDAEQLEEAYLPPAEYHALQRLTRQRERLMKSITIRKNRIGAIVEGYLPGLRAAFTNEWSVHARAFYRSRLNPFAVVRDGKQSLQAFLAGVYARGSQSQSHRLYRTCQTLSEFYKRAEAAGMVNEDFFNDLQDEIASELRLMDAEETEVESVSKRVEELYRRLHPSDNLRTIPGIGVRTAQVFLAVIGDPHRFRSQSAFANWTGVVPGANQSSDSEGKGLRMTKAGPAMMKRALYQAGDIARRYDPQLAYLYYREMVHHGKTHLQAMGAVMSHLAARILTVLQNDRPYELRDIDGRPVSKTEAIKLIQSRFRVSEEIRQARRHRKSHEGRPQRRGTREAAEAPQSRHTPTSPMPVYSVTTGQSMGQMRT

SEQ ID NO: 270090 - protein, 320 aa, unidentified
MLFCGIDLHYNNCLVVVSNDNDKVVYSKRLPNDLATICTALSPYQQELFGVVVESTYNWYWLVDGLVAAGYSLHLANTTAIKQYDGLKHRGDESDARHLAHVLRLGLLPEGHIMPQADRAFRDLARRRMQLVGQRTSQIVSIETSMAQHIGATISGNAVKELAADDIDAMPIGPTEALGMKANLAVMQALQVQIDGIEATLSKYCRRDKDYRLLCSVAGIGPILATVILLETGDIGRFADVGNYASYCRCVGSVHMSNGKKKGEGNTKNGNRFLAWAYVEAANFAIRYCEAARKFYQRKKAKRNGIVAIKAVAHKLASTC

SEQ ID NO: 270091 - protein, 451 aa, unidentified
MKKYYVGGDVSKGYCDFIILDKATKVIEPIFQLDDTSIGYKSLKKILKNHSRDDQTIIFIGFESTGGYENKWIEAIYSFESTMNLKVTRLNPRVSSAAEKATLKRNKTDKTSALTIAKYLIRYADEIRYNSDNEWFHLRQRWTYISLLTKNKVHLVNYLEKLLYTYNPTLIQYYRSPISNWLLSVIEKYPTGDNLRKARLKTLAKIPYVTEDKAKILKQNAKINPGLKAKPIEIIISDSVQHIRMSKRNIENQISDLEQFLPPDQIQILISFIGIDKFSAIGLLIEIGNIDWFESSKKLVAYIGVHPVYGQSGDGTYGTFMSKAGRTEAKRILFMVTMSALKSNNDIRCYYLKKLLQGKKPMVALGACMHKTLRTLFAMLKNKTIFSSSIKDTEIKDLEEKLDKIKKKPDINILREIEKKRFYQDFDSTAPISAFQHKKRKDYRSYMVNKK

SEQ ID NO: 270092 - protein, 408 aa, unidentified
MNAVGIDVSKGKSMVAALRPMGEVALLPQEFLHTEVGLEQMAYAIVALGEDTRVIMEATGRYHEPIAAALHEYGIYVCVLNPLFIKQSGGGSIRKVKTDKADAMKIAKYGLDNWVELREYTPMDTVRQQLKLCSRQYNLYMKTVVSLQNNLISLTDKTFPGVNELFSSPERADGHQKWVDFVMTFWHCDCICRVSEKAFTDRYQKWCKRKGYHFSTEKALDLYAGSCGHFTTLPKNDNTKLLITTAAQQLLAGKTTLAALRTEMTRLAKQLPEYDTVRAMYGVGETTAAQLMAEIGDVRRFPRRSSIVGFAGVDPAVDQSGKHSAKSVPTTKRGSPHLRKTLYQIVCTYLKRSPADEPVYQFLDKKRVEGKPYFVYMTAAQNKFLRIYYARVKECLEAFDERQDTVQN

SEQ ID NO: 270093 - protein, 351 aa, unidentified
MKEYIAFDSHKHYTLMEREDRQTARTVQLRVAHQPGAIRACLRNCESGTDVAVEATGNWYWIVSEIEQAGLKPQLVHPRKAKLMMGLINKTDKLDVHGLNRLQRNGTLPTVWIPPAELRDQRELTRTRLVLVAQRTRLKNRLQSSLAKYGLAVRDCSDAFGTVARSQWPELLAQLPEQTQWVSQQLLKQLDLLEEQIGQCEKRLNQLLKITPQIERLKSLPGVGLILGASIAFEIGAVSRFASAEHLASYAGTTPRVHSSGDKLRFGRLRPDINRYLRWAFVEAANVVALHHQQRPERHVSYLYWRLKQRKGHAKAIGAVARHLAEATFHILSRQEDYVDPALRKGRSKPV

SEQ ID NO: 270094 - protein, 351 aa, unidentified
MAIADAGRAAPRFIGTINPAPAELCKAMRRVCTKETTLIVYEAGPCGYGWVRYLRKQGWACDVIAPSRITRQPAEKRLKTDRRDALLLARESRAGNLTSIVVPDERDEAIRDLVRAREDVRVARHRVRLQMQAMMLRHGRHYQGKRNWTQAHDRHLSTIRFEHPAQELAFNEYRLASKEACERVERITEALRVQCEDWRMNPVVKALMCLKGFDFVAAVTFVAEMGDLTRFAHPRALMAYLGVVPSEFSSGASRRQGGITKSGNKHARRILVEAAWNNRFKAQVSRELEVRQEGHPKIIRDISWKAQLRLSKRWRSLSMGRKLAPNKICVAIAREFAGFIWDVARHVKVSP

SEQ ID NO: 270095 - protein, 411 aa, unidentified
MEVLYERCGALDVHKKAVVVCVATRDGKQTRTFGTMTGDLLELADYLVSKGCTHVAMESTGVYWKPIYNILDGLGMELLVVNARDVKAVPGRKTDVKDAEWICDLLRHGLLRGSFIPDRSQRELRELVRYRKDLVQERAREVNRIQKVLEGANIKLGDVATDVMGKSGQAILESLVQGKTDPESLASLAKGRLKRKNEELARALQGLVGPHQRMMLSTQLGHIRFLDGQIERLNREVEERMRPFEKAVEAIDGIPGIGRRIAEEVLAETGTDMAQFPSAAHLASWAGVCPGNNESAGKRKSGRTRKGNPHLRQAVVEAAHAAARTKDTYLSSQYHRIAARRGSKRAAVAVAHTILIIIYHILKEHTTYRDLGADHFDKLNQDAAARRAIKKLEALGYKVTLEPLSALECSA

SEQ ID NO: 270096 - protein, 397 aa, unidentified
MYIVGIDIAKRKHEAAVIDGEGTVIIKPFSFTNNCSGYNRLLAMLTKAKLPLDEVSFAMEATGHYWLALFTRLQKEGFRVQVINPVQTNSIRSFYIRQAKTDPRDALLIAEVIRFGHFSESTLHPENIYELRELCRGRHAIVSMQADVKRKVVALLDQVFPEYETAFTNMFSDTSMAILQTCPTPKELSEMPLEELCHLIEVSSHKRFRMAKARELQELARNSFGFAMAGDVFSTMIRLYAKHLDFLKQQVREMDRKIAEIMETLDTPITTITGIGPTLGAYILSEIGDISRFSSAAKLAAYAGIDPTMRQSGEYNGVRNRMSKRGSPYLRHAIWLAASSAVLHDPALKLYFQKKRDEGKPYMASVGHACRKMVSIIYAVMRDNKAYTPYIPNEISA

SEQ ID NO: 270097 - protein, 404 aa, unidentified
MGYHAGLDWGGAVHAVCVVDEAGRIVVRFDVRHDAAGIAELIVRLARIAPSAEMPIAIERPSGLLVDALLEAGHPVVAIHPNVVKACRPRYRAAAGKSDPGDAYILADVLRTDGHRFRPLQPCSDEIRGLRALVRSRDDLVAERVALGNRLRSLLDGFWPGAAAIFADIASPIALAFMQRYPTPDSAARLGEKRLAAFLAQHSYCGRRSPTELLARLRATPAGHAGETEAEIKGELARSLAAVLSTLVAEIAKLTARLEHAVAALPDGRIVMSFPRAGRVCAAQILAELGDIRERFQTEQQLAAEAGVCPVTHASGKSRGVSFRWACNHRLRQAITCFADNSRHASQWAAHLYQRARARGCDHPHAVRILARAWIRVLWRAWIDRKPYDPSTHRAFQALTQASG

SEQ ID NO: 270098 - protein, 344 aa, unidentified
MEHFAGLDVSVKETSVCIVDDAGRIVREAKVASEPEALLAVLNNPSYRFGRIGLEAGPLSQWLYSALGEANLPVICVETRHMRAVLKAQINKTDRNDARGIAQMMRVGLYRPVHVKTLRSQKLRMLLTHRKLLQSKAIAIENDLRGTLRNFGLKVGVVGAVKFETRISELVEGLPDLAVLVEPLLIVRRTLREQLGILHRRLLELARDDEVCRRLMTIPGVGPVVALTFRATIDVPARFRNSRAVGAVLGLTPCRHQSGESDRTGAISKCGDEMMRVMLYEAAQILLVRSTRWSWLKVWAMQIAKRRGLKKAIVALARRLAVIMHRIWVDGTEFRWARQAAAAA

SEQ ID NO: 270099 - protein, 328 aa, unidentified
MTMNPALSAFNHVVAFEVAKDSLVIHVLPTEKQSIAANRPAAIRKALIAEMRRNAEASLGPLLVVCEATGGYERHVLEVCEELGIAVHKAHGSRVRHFARYLGLLAKTDPIDARVLALYGLKTADLRLYVPPTPEVLALKDLKTRRDQLQQMLFAETNRLEHARHVSVSRSLKAHIASLRKALAALEAEIAAHVKACETLARKARLMQTLKGVGPATVAAILAYMPELGSFTKGQAACIAGLAPINNDSGTFQGSRHIEAGRAAVRKTLYMTALVAIQHNPVMRLFADKLRRSGKPSKVVIAAVMRKLIVTLNAILRSGEPWSHAKAA

SEQ ID NO: 270100 - protein, 344 aa, unidentified
MTIVAETYDYVTGIDTHARTHTYAIINTRTGSREACQAFPTSPAGMNRTLAWIAKRTTGTLLAAVEGTRSYGATITHALTMAGFPVVEVKPPRKQARARVGKTDEIDATAAAMGILYQDTERLLTPRAESTRSALNVLVASRERIDAERTRNRNALTALAREIELGVDARKALTDMQVKQISGWREHPTDSVAQRYARAEASRLATAVLDADKLLAANKTQMAELDEQMAPGLAAEFGYGPVTVAWILIAYSHTGTVHSEAAFASMAGVAPLQASSGNTVRNRLNRHGDRMLNQAVDVIAKVRMQFDPQTKDYVEKRKAEGLSYREIKRYIVRKVFRRLRVLVP

SEQ ID NO: 270101 - protein, 387 aa, unidentified
MYFVGIDISKFKHDCAIIDELCDTVMPSWSFSNDREGFSHFKALLDSLEGEKKIGLESTGHYGQNLKQFLESNGFAFMEFNPLLVSRFVRSKSLRNTKTDSIDALSIAQYVMTVEYKPYPSSFYHLDKLKSLTRFRNSLVRQRSRQLVELTNVLDKLFPEFKPFFKDKFSVTALYILAHYQTPERIANMNARSYEALRKLSRGRFTLSNFTQLKALAKNTVETQTDYLLDQMNILLELYSQLDSKVDEFDAQIKECVRGIDPPCLSIPGVGELSAAMILSEFGDFSKFQNPSKMLAFAGLEPGYFQSGQSEYTGHMVKHGSSRLRYALMNCCLPLISNEPVFAAYYTKKRSEGKPHRVALTHVAKKLLRVIYTLQTKNIRYDPTMIH

SEQ ID NO: 270102 - protein, 386 aa, unidentified
MARPENNLPAAAHDGAARCYLAIELSKRSWVIAASTPLSDKISRYTLTSGSLQELVELIERLCARITRATGQVVEVISCYEAGYDGFWLHRSLEKRGVRNHVIDPASLKVDRRARGAKTDRIDAERLLRSLMAYLRGEPKVWSVVRVPSIAEEDARRLHRERDRLIGERVQHVNRIKGLCAIHGIYDYEPMRLDRLRRLEQLRTAQGEELPERLKGEIGRELQRLALVLEMIRALEAERDAIVTDAAPAQLNADKIRRLNELRALGPEISTVLVGEVFYRSFNNRRQVGSYVGVTPSPFASGTIAREQGISKAGNPKARRTMIELAWLWLRYQPDSALSVWFRERVGTMKGRIRRITIVAMARKLLVALWRYLETGLIPPGALLKA

SEQ ID NO: 270103 - protein, 310 aa, unidentified
MDSIYVGIDVSKDRLDVHVLPSGQAFAVARDGKGLNELIEQLVSVGPQLIAVEATGGFETIVAAAIAGAHLPLAVVNPAQVRHFAQAVGKRAKTDPIDAAVIARFAEAVKPEPRELPDEAARLLSELVGRRAQVIEMLVAERQREKRASAMRVRKSLARHIAALEKELPEIDRDIDTMVRGSPVWREKEDLLISFPGVANTIARGVLADVPELGKLTRREIASLVGVAPFTRQSGQWKGKSMIAGGRPFARSAIFMAALSAIRCNPVLREFYKRLLARGKPKMVALIAVARKTLTILNAMIRDKKQWQPA

SEQ ID NO: 270104 - protein, 341 aa, unidentified
MNEMPLYGGLDLHGDNVFCSLLNDTRQVVFERRLPNDLAVIREALAPYRQRLRALAVESTYNWYWLVDGLQQLQYPVKLANPARMQENLGLKQANDKTDARFIARQLVSGILPEGYIYPAATRGVRDLLRRRMRLVHARTGEWLSLESLVARHTGRDLNVAELAECDIGEVLREQPQALLLAQASFRHLEFLKKEIQALEKTVLAALPDTAAYQRLMTVPGIGRVLAWTILLETGPLERFPHAGNYASYCRAVKTEHTSNGKKKGAGNGKNGNKYLAWAFVEAANLSVRYSPELRAWFQRKLARSGQRVIAVKALANKLSKACYFMLRDGTDFAVQRLVGG

SEQ ID NO: 270105 - protein, 343 aa, unidentified
MSIMILGIDLGKNSCSVVGVDATGAIVTRRTMHRQTLIDYVTKLPACIVAMEACCGAHHLGRLFTGRGHEVRLMSPEYVRPYIKAQKNDDRDAEGIAEAASRPTMRFVDLKSQQQLDIQTLHRVRSRLVAERTNLINQLRAILLERGVIFPAGRRKLELGVDSMLAEDVKLLSSRVQQLVRELRAEWQELDTKIGALNTELIQLARNDAATRRLTTIPGIGVLNATALVAAVGNASSFAKARDLGAWLGLVPRQYSTGGKPRLLGISKRGNTYLRTLLIHGARASLPSLSKSDTPTGRWLKAMMERGVHRNVMVVALANKLARIAWAVLRKETGFDRSCPAVA

SEQ ID NO: 270106 - protein, 345 aa, unidentified
MKITTVGIDLAKDVFQVHGVDAHGKAVLRKQLKRKDVVSFFANLEPCLIGMEACGSSHYWARKLAALGHTVRLMAPQFVKPYVKTNKSDRNDAEAICEAVARPNMRFVPVKTGEQQAVLSVHRARQGFVKARTAQANQIRGLLAEFGIVIAKGMGHIAKRLPEILEDGENGVPGMMRELLQRLGENLKEMDKQVGELERQIKLWHRENEQSRKLEAIAGIGPITASAFVASVGDAKTFKNARQVPAWLGMVPRHEGTGGRATLGKISKRGDVYLRTMLIHGARSVIAQIERKPDQADGWLKKLLARRNKNIAAVALAAKNARIAWALLAHERSYQGDYVASRAAA

SEQ ID NO: 270107 - protein, 328 aa, unidentified
MCVLGTNGQILSNRKVKRDKLLDTVRQLPEQTALAMESCATSHHWGRIFQELGYTVALIPAQHVKPFVGRQKNDANDARAICEAYSRPNLHFVPVKSVEQQDLKAIRSVRKRLVESRTALANQIRGLAAEYGVVFPLSIKALRSHLPLALEDAENALSPVMRNLLQTLYCDFVSLSEEIDEMTQSVTMLSQQNPKYEAIRNIPGFGPILTAALISEVGVGNQFQNGRQFSAWCGLVPKQNSTGGKSSLGSLSKNGNRELRALLIHGARAVVRCGANKADAMGAWLRGLIARRGKAKAIVALANKLGRVAWHILAKNSEYDINQAFKPV

SEQ ID NO: 270108 - protein, 349 aa, unidentified
MVIIGTDSHKRSHTVVAVDGTGRKLAERTASTSPAGHLELMRWARRWRERTWALEDCRHLTRRLERDLLAAGETVLRVPPKLMAGARRSNREPGKSDPIDALSVARAALREPDLPAARLDGPERELRLLVDHREDLVVDRTGHQERLRWFLVELGIAEPPLRSLDRTVVLDRLDAELADRTEPVARFARDLLVRIRELTGAINGLEREVRSLAPSVAPSLLALTGCGHLTAAKLVGQTAGIGRFRSRAAFARHNGTAPVPVWSGNTIRHRLNRGGDRQLNVALHRIAITQLQREGPGRDYLAKRMAAGDTKTEAIRALRRRLSDEVFRRLLTDETERVRATTVLTAAAA

SEQ ID NO: 270109 - protein, 437 aa, unidentified
MVPHAGGAVEEEKTMDILHERVAGLDVHKNTVVACVRIMTGKETTRECRTFATTTDGLLALRAWLSECRCTHVAMEATGVYWTPVWRILSEGDFELIVANAAHIKNVPGRKTDMNDAMWLADLLAFGLIKASFVPTEPMHELRSLTRTRKQLVREQTRHVQRIQKTLAEANIRLDSVISDIMGASGRRIIEAMIAGVRQPHKLADLAGKQIKATPKELYDALHGRLTDHHRFLLDLHLRQWDGLDTTIRTIDLEIDQRIDRMDEDRAAGESPFRTLIGNADTVPGVSAVSAPAILSEIGCDMSRFPSAGHLLAWAGMCPGQNESAGKRKPSHLRKGAPWLKTMLVQCAWAAIRKKGSYYQAQFLRLRHRRGPQKAICAVAASILTAIYHMLKDGTEHHDLGADYFDRRSTETKAKHLVARLTKLGFTVQLQPSAKAA

SEQ ID NO: 270110 - protein, 307 aa, unidentified
MSYVGIDVSKRRLDVAIAGADVFQVAYDEAGLRALGERLSALAPQLIVLEATGGLQVRAAGELAAAGWPVAVVNPRQVRDYARATGQLAKTDRLDARIIAAFAAAVRPEPRPLDDETSQILKALVARRRDLIAMRTAEKTRLAQASALKVRASIAQVIAALDAQIVSLDEDLDRAVKASSLWRHTESLLRSVPGVGPTLARTLLAELPELGRLTRRQVAALVGVAPLARDSGFMRGRRTIWGGRASVRAVLYMATLAAVRVNPALAAAHQRLRAAGKPPKVALVACMRKLLTILNAILRDQTPYKPA

SEQ ID NO: 270111 - protein, 400 aa, unidentified
MLSIGIDVSKGKSTVCGMKPGGEIVYAPFEVQHTREGMSELVLLLHNSGEEVRAVLESTGSYHCPVVAALLENGIFVSVVNSLRMKRFCSQSIRKVKTDRIDAMQIALYGLAYWQELQPTKLPEDTYRELQLLARQYYQMTSLLIKAKVDFNAICDQVLPGMQELMNDHAGRHKLSDFVLRYRHTTHILEMGETRFRKDYCKWAEKKGYRNCERMAVLIFATAQNGIPVLPNAPSTQIVITEAIRVLHTVEASRDAILTQMQALAKTLPEYSLVREMPCIGDTLAPRLIAEIGDVRRFHSKRALIAYAGIDAPPYQSGKFCANNRHISKRGNRYLRKTGYEVMQSYVMHKPANDPIFTFIEKKRSEGKCGKLAMVAGLNKFLRVYYGKVTELYRSLPAIE

SEQ ID NO: 270112 - protein, 313 aa, unidentified
MFKSFVGVDVSSQWFDVVVTPGRSSWQFPYTEDGIAAFLSRLARLDVGLVVMEACGHLERPLARALQETGVPVAVVNPRNVRHFAQSIGQLAKTDALDARVLAQYAASIRPRPCSLPDPDEESLRALVTRRRQLVGMVSAEKNRLRRANPELVPGIRRHLEWLQDEISSLSKQIAQRQKEHPLWRERKRILETAPGVAETSSATLTAYLPELGQLDRKKIAALVGVAPLNRDSGQRQGTRSIWGGRREVRTALYMCTLTSIRCNPVIRDFYNQLRARGKKPKVAVVACMRKLLVALNAMVRDGTEWQPQPSSP

SEQ ID NO: 270113 - protein, 378 aa, unidentified
MQSMTQESTLVVGGVDAHADTHHAAALDERGALLSTKSFQTTTSGYRQLLDWLSSYGEIDVVAVESTGSYAAALVRYLREHDIAVVEVNQPHAHTRRRIGKSDPIDAEMAARLFQAGKAKAVPKQTNGIVESIRLLRVARSSAVKSHSAALVQVRDLLITAPQEIRDQLSDRKTLRGKVTVCARLRPSGRELRSPSQAAKFALRSIAQRIKALDQEITALDHELEQLVAAAAPRTVELLGISTGHAGRLLVTAGQNIDRLRSESSFSMLCGASPIPASSGKTNRHRLNYGGDRQANRALHLIAVCRLRYCERTRAYVKRRTAEGKTQREIMRCLKRYIAREVFNSLRADLADTNPPAPRQAVAIMCGNPGFGITRKRT

SEQ ID NO: 270114 - protein, 335 aa, unidentified
MKWRILETLGIDISKLDFHANLITEKGEAKKSFPNSLAGYKQLDVWLRNRRAQQVHACMEATGSYWEALALHLHELGYAVSVVNPARTKAYAQSELLRAKTDKVDAGMIARFCRAQKPPVWEPPAPEIRMLQAFSRHVQNLKETRAEQLTRVQTPHLPEFVVKSINEVIAALDVEIDETERLIDEHIDKDPGLKRKRDLLTSIPGIGVTTATSILSEMPNISDFRTASNVAAFAGLSPRIAQSGTSVRGRGALCKTGNARLRKALYFPAITAQRFNPVLKAFADRLAANGKHRMVILGAIMRKLLVLAWGVLKSGCPFDPNRPAETRSKIALSTA

SEQ ID NO: 270115 - protein, 368 aa, unidentified
MSETIVAYRSFVGVDLHKDTVTLAAVDPRGEALARLKIHTKSVGKIEAWLRALPRPSALAVEAVGFVEWFIERFRDCVDRIDIADATELANRRGKRRKTDPHDAVDVARRLARGECPLGYIADDDLMQLRKLGRHWRQLGSILARVKHSMRSILLAANLRGPKLDGAGAQRWLLAHGHRLKPVQRQAFRNFLEVIQLVELQREPLRHVILKTTRHERFAPLAELLQTVPGIGPIWACIIVAEIGPFDRFPNADALEFWAGLTADLKESAGRTQSGPITKAGSRTLRWALCQAAVTLCHCDARQEAIRQRLIRRNGGIKAKANVAMGRRLLTILYAMVRDNKPYKSGPRRNRTSAANKARARKKRKEAA

SEQ ID NO: 270116 - protein, 434 aa, unidentified
MEEVTDEPLYRDRVCGTGIGKAGLVATIRVPSDRDPARRMQETRSFGTTKREVLALADWLRCWQVPAVVMEAAGDYWKGPFYRLEAEGFECVLADAKQVKNLPGRPKRDPADSRWLAACFERGAITSCFVATPEFRIIRLHTRYRRDLTEERTRDKQRAEKLLESAAIKVSSVLTDLHGVTGRDIMDHLIAGERNPKVLAQLARAAARRKISQLEEAVEGAEFFTAEHAALLKIMLARIDRLTAGIDQLTADIEQLLAPYEEQLQQAESMPGWGRRAAQDTVAETGVDMTRFRTGPHLVSWAGRAPLDHQSGKRAGRAKAKKGNRYLGAITGETAVAAGRTQTREGARHRRLARRRGTAKACVATGNTQLKASPLLADPGMRYQDLGPDYYERQRDVRRQVAHHVGKLGSLGFEVTLCRIPEPDPDGTGPAQAG

SEQ ID NO: 270117 - protein, 339 aa, unidentified
MTVKTVGLDLAKDVFQVHCVSATGRRIVNKKIKRAKLLTFFETLPRCVVGMEACGSAHHWGRELRKLGHDVRLMPAAYVKPYVKRGKTDAADAEAICEAVRRPTMRFVEIKSEDQQAVLAIHRARDLVVRQRTQVVNMIRSILREFGHVLPTGIEAVSKFAREFGTEERLEIPEIADGILGVMCHQLNGLNARIDGLTKLIEQHAWLDADARRLMRMPGIGPITASAIVATIGDAKQFRTGRGLAAWLGLTPLNKSSGGKERLGRITKKGDRYIRKLLIVGMTSRALMAKNKPEKADTWTAKMLADKPFRLATVAMANKSARTIWALLTKREEYRQPIA

SEQ ID NO: 270118 - protein, 421 aa, unidentified
MRKADTGKVKVVKDDTLIVAIDVGMEMNRGYCTTPDGRSTKPFKFDNTREGLDTFWSMIMTSKDRSKCNEVIVGYESTGPYGEPMVHYLMKKPVRVVQVNPMHTKRVKEINDNSPLKTDDKDPRVIADIIKLGRALSIVIPEGDAAYLRRLNNSRERHVRERTALVNQLRQLVFLLFPEFKKVIKDIKCRTPLYLLKKYPTPEAISVLETHVLGEEMRKKSRGKFREHHADMLINLARNTIGIKEGVSGLSMDIRHILVQLEMLKNLIAEIEGEMEITLRRIPYSSKLLSIKGLGVVSVAGIIGEIGDFKKFGTQPEIMKLAGLDLYEISSGKMKGQRRISKRGRSLLRKILYYAAIQTIRKNGILHDYYTRLTDRGMKRMMALVAVSRKLLGIIYAIVRDDSEYSVNFESMKRQVIKKAA

SEQ ID NO: 270119 - protein, 459 aa, unidentified
MGRAKSQVSAWEGLKVIHPNAAGLDIGSEEIWAAVAPDRTAEPVRKFGTFTPDLQALADWLIACGVDTVALESTGVYWIPVYEILEAQGLQVYVVNARHVKNVPGRKSDIQDCQWLQGLHSVGLLRGSFRPEGEIVALRAYLRHRAGLIEHRAAHIQHMQKALQQMNVQLTQVVSDITGVTGLAIVRAIVAGQRDPQQLAALRQPGCQKSAAQIAQALTGNYRREHVFALQQALALYDFYTAQLAACDVEIERQFANLKPISADLPPLPPSEKRDSHSKNGPSYDARSYLYRLTGVDLVAIAGLNESTVQTIISEVGTDLNAFPSERHFCSWLGLAPHNDVSGGKRLRSRTLKTDNRAGQAFRMAAQSVAKSPDSAFGAFYRRLKARLGAKQAIVATAHKIARAFYHMLKHRTPFHDLGGDEYERRARERELKNLEKRAAKLGCSVIKNPAAVAIAGSF

SEQ ID NO: 270120 - protein, 364 aa, unidentified
MSNDSTLARKLQPQDYDVFVGMDVDKRSIALTQVDHLGLERSVSMPHEGAVLLRYVGKHLRGRRIAFVYEAGPTGFGLYDTLSQAGYPCLVVTPAAVPTARGRRVRTNRLDSRKLALQLRGGSLEGIRVPSEDYRMLREYVQLRKLHMTEAVRSKQRIKALFLRYSLGFPAATPGGHWSQEVIQQVREYPCAPPLQFKVGSLLTSLEMSRLQAAQAQAEMRRFVQASRELAASVRYAMSLPGVGWIVATYAVARIGNWRLLGKSSQTASFFGLTQCEDSTGDQADRGSITKAGDPVMRSLLIEAAWTAIRKDAELRGFYERVKASHAKDQAARIAIVAVARKLACRLHCVLKERREYETRPGKE

SEQ ID NO: 270121 - protein, 418 aa, unidentified
MNGEGNTRDSKRYVALDIHKHYCVVAAVDREGKVVLSPVRVEHADLEGWLKKNLRADDHVVIESTTNAWHVYDLLSPLVERVVVANSFKVKQIANARVKTDVRDTLILARLLAANLVPDVWVPPQHVRELRQLLSQRRPLVEAHTQMVNRMHSVAHRHHLKHERGKRFNEKNTGWQKDKRLSKMEQFQLELEMENRAYLEKQTERIGRAVAKLSHQKPWIESMTYLMQMPGFGVITAMTVLAAIGEIQRFETAQHLASYSGLTPGLEQSGTKHRGKGITKEGRKELRWAVVEVAQRAVKSDPYWKKRFEAMQKRMHRNQAIVAIARQILELVWHMLTRRQPYRHFSQERIAYKYLTWGWQMDEEARDGLTRQQFTRYYLMRLGIGHDLTRIALDPKHPRKIASEAEVLALRPELQRIE

SEQ ID NO: 270122 - protein, 412 aa, unidentified
MKDLLEISCGLDVHKEKIVACILTGPLGKPTRSEICKFTTLLPDMIALRDWIVSQNCHHVAMESTGIYWMPIYEILEDAFSGDITLLVVNARHMKNVPGKKTDMRDSEWISTLLRAGLLNGSFIPEKRIREFRDLNRYRKSVIRDITSQKNRIEKFLQSSGFRLSSFISDIFGASGRNIILHLIEHGQIDKTALDSCLKTKTRNRIDEILMSVNGTLSEHQKAFLRILMTHYDSLKKHLAEIETSLEEDMAPFALQVEQLNSIYGISTTASCAIIAEIGIDMKPFKTAEHICSWAGLCPGNNESAGKRKSTSVTKGNPYIKSMLCEIAWVIAGKRNTYLSAWYWRIKQKKGAKKAIVALARKLLVIIYTMLKQGTVFDESCFETRRKHCEQKQLSRYIRELEKHGYHVEAQS

SEQ ID NO: 270123 - protein, 345 aa, unidentified
MPIVGGLDIHRKQITFDYLDTGTGQVQRGQIAPADREHVRAWLARFAGREDVAFAVEGCTGWRYVAGELAAAGVAAHLAEPADTAFARGRKRHAKTDKTDCRHLRMLLAEERLPECWIPPSHILECRALLETYHDLRAEHTAWVQRIHAVLFHQGAPALGEGALRTEQGLAALRAAAAAHLSPAGQLQVATALDMTGMLESRLHELRHQLLDAARHLTGAKVLAERLYGVGPVTALAMTCWLAGEGRFSSSRKAVRFAGLDVTVYSSDRKGPPGRLSRQGPPVLRWAVYEAGKTHARSSAPDHDYYAQVKDRCNGKRAALSEARKILRQACHILAELGDDALAAA

SEQ ID NO: 270124 - protein, 372 aa, unidentified
MNYNTVYVGMDVHKESFTLCSCKYEDEKASHYQRTPASYKNVLRYLAFLRTIYGEYTRFVCGYEAGCLGYSLYHQLENFNVEYVILAPTTMLEQRSKRRIKTDKRDAEIIARSLAQHNYSPVHIPTETDNQTKEFIRMRDDHKAELKKIKQQILSFCLRQGYQYDGSGNWTAKHVKWLRSLKPAGLYKEILDEYLLTYTILTDKLNRLDQRIEELASKEEYKESVSKLTCFLGIKTHTALSVIVEVGDFQRFVSARKFAGYLGLVPGQHSSGDDRNGLGITKAGNTHVRRLLVESAQSYTRGKIGYKSRVLRSRQAGNSPQVINYADRANERLRRRYYKMVLKDGKKYNIAKTAIARELACFIWGMMTDNIY

SEQ ID NO: 270125 - protein, 340 aa, unidentified
MEKRYIGIDLHRNQFTCCIRLENDRTYLTEWRLEDLPRFVKKLRPGDEVAVEITSNTRLFHDAVAPQVARVVVVNTNQFRVISQSVKKTDPNDARLLSLYLSKGLLPEVRMKDKQHGQLASLTQTRDTLVKQRSALKNKVNNILSARGLNLAKEALSSAKKLAEVLELPFDEIVRIELRVIVEQIRSLNKSIAELEKTIGEEGSKLEGHKGLSSIKGIGKITGAILLSVIGDVNDFADEGRLASYFGIVPRVSNSNATERSGRIHKRGTKLGRTALVQSALIAANYSPYLKNFYERVKARRGAGKAIIALARKFLGIIYRTLKNKWVFEDFPNFVLAEES

SEQ ID NO: 270126 - protein, 403 aa, unidentified
MDKPSANSFLGGAFMYYVGIDVSKYKHDCFIVTSDGEIIRDAFSFGNDYDGFQTLLSALSALGDPPDIRIGFEATAHYTLNLKLFLENAHYSFMEFNPVLLSKFNKSQTLRRTKTDAIDCAAIARWLMTVEYKPYPIGFYHAYSLKSLTRLRDSLVRQRSFYLVKITNVLDHTFPEFKPFFGNRFSKTALFLLETYGSADKISRMNSQSYENLRRISRGKFSPKKFIELKALATGTVGESNEMFESQLSSLLSLYKLSVKEIDSLEQQITDLICQINPHSLSIPGVGPLSAAVIYAEFGDISRFASPQKMLAFAGLDPGYYQSGISAHAGHMVKRGSSHLRFTLMNLCMPLMQYNVVFAEYYAKKRAEGKPHRVACTHMVKKLIRIIYTLETRDIDFDPEKLR

SEQ ID NO: 270127 - protein, 379 aa, unidentified
MDHAITGTPAETILHGALELSKNSWLLALQLPDRAQPSLYSIRGGDTEGLMAKLMAARDRWAKVSGKSPSIVLCYEAGYDAFWLARFLKARGIECVVVDAASMQVNRRARRAKTDRIDVGMLLRALIAWGQGDRHVWSVVRDPSMDEEDLRRSHRERDRLVRERTAHINRIKGLLFGQGIRGINVKSKYKTLQIDKLVTGDGCPLPPRLASEITREIARLALIQEQIATLERERDQAPTPCKATEKKKVQLMCLTGIGPAIAAVVTREVYYRQFDNRRQVAGFLGLATSPHDSGDVERSQGISRAGRGQVRGTIIQAAWLWLKHQPKSAITRWFVQRTAGQSGRIRRIMIVAVARKLAIALWRFLEQGLVPQGAMLANR

SEQ ID NO: 270128 - protein, 354 aa, unidentified
MSQKLSSAIAVIGIDIGKNSFHIVGHDQRGAIVLRQKWSRGQVEARLANLPPCLIGMEACVGAHHLSRKLQMLGHDARLMPAKYVRPYSKGQKNDFRDAEAIAEAVQRPTMKFVATKTADQLDLQALHRVRERLVGQRTGVINQIRAFLLERGIAVRQGLRSLRSELPGILATRTDVLAPRMLRIIEDLAGDWRRLDARIEDLSSEIEALARQDKGCERLMTVPGIGPIISSAMVAAIGTGDVFSKGRDFGAWLGLVPKQISTGDRTILGKISRRGNRYLRVLFVQAAWVVLVKVKCWERYGLKSWIEAAKKRLHHNVLAIALANKLARIAWAVLNKGRAFECVKTDEMASRPA

SEQ ID NO: 270129 - protein, 400 aa, unidentified
MSGLKGHFDCFVGIDISKDKFDTCGITGEEAKLFQFSATMDRKGFEKLKGHLAAVSISSVLIGMESTASYHVNLFSYLVSEGYNVLLINPLLISNYVKMQLRKTKTDKKDAVVIARFLLTNGDTLIQRATPSLISDLRDLSRQRESLVVEMTALKIEIKRLLNITFPELEHMTGIFTKAILKLLLSYPSARTLRGADRDQLTKMLIENSQGHKRDVFAESLLKASQFSIGTDSHAKEMILKQKIALLLHLEDALQEITDMLIEMSRKLMDEDINIMTSIKGIGDKAAANFLIEMGGDINQFERSGKIIAMAGLDPAVYQSGKHEGKGRITKRGNRHLRRIIWLMTTKVIQYTDIFNVYYLKRRKEGLPYKMAVLATAHKLIRVIYAMLTQRTTFCAQVNS

SEQ ID NO: 270130 - protein, 337 aa, unidentified
MDTIGLDLHKRETQVCMLTEAGEIVERRIVTSRERFTAVLGGRAPARILVEASTESEWVAQHLESLGHEVIVADPTFAPMYATRRRGVKTDRRDARTLAEACRLGAYRAVHRASAAQRHVRAQLAVRDALIRTRTRYVSVVKALARRDGLRIPSGEPVHTEAKLAALPLSAALVAELAPLRVVLEPLNAEIVAADARLAAVAANDPLVARLQTAPSIGPVTAVAFIATLDDVTRFASAHHVEAYLGLTPREYSSGEHQHRGHISKTGNPRLRVLLVEAGWRLLRTNDAAAAPLRAWAERIAARRGRSIAAVALARRLAGILFAMWRDGVDYRVRATA

SEQ ID NO: 270131 - protein, 325 aa, unidentified
MHMADDGEVLGWARIANDPEALVAEVLKAGESPEVAIEATYGWYWAVDALQSAGANVHLVAPSKVGAFDNRRVKNDQRDCQLLGDLLRANMLPEAWISTPQVRQWRELVRYRAKMVGLRTGLKTQVHAVLAKHGIQVPVSDLFGVGGRELLGHLVRDDPRFRSAYGQRVESLLVLIDGFDHEIDEVSSSIAHTFRDHAGYRAIQAIDGVGPVIAAIFVAEIGDVTRFSSAAHLASWCGLTPRHRESDTTIKRGPITKQGCRLVRWAAVEAAQKLRTGSVLHQRREHLAEQRNSRKIAKVAIARRIVTLVYYGLRDGNIRCLQPAA

SEQ ID NO: 270132 - protein, 462 aa, unidentified
MEKAPKHPNTKSRNPAQTFLVVNPNAAGIDIGDTVHAVAVPPGSCPEDTETVRSFGTMTCDLKEIATWLKECHVDTVAMESTGVYWKPLFSLLNREGIAVCLVNARFAKNVSGRKTDESDAAWIQKLHSCGLLNSSYLPGEEQEVLRTLVRFRETLVADSSRFVLRMQKALELMNIKLHTVIRDITGKTGRAIVEAILAGEREPQNFLPLVHPRIQATKEEILKSLQGTWREEHLFTLRESYGFYCFFLNRIQITDVKIEEQLQAFEASQNDGELSEGSPGKRKPEIPKKKNKNNPKFDVRKYLHRILGVDAVAIYGMNELSGLRILAEIGVDMSKWPTEKHFISWLNLCPNNKISGGKLISSKVMKKTPSGAAQAFRAAANGLQRSDHWLGDYFRRMKAKGGNKYAIIATASKIATIYYKMVRTQTEFLPQNLEEYRIKNKQQKIRYLERKLRELKADEPD

SEQ ID NO: 270133 - protein, 398 aa, unidentified
MLSIGIDVSKGKSTVCGMKPGGEIVYTPFEVQHTREGMSELVSLLRGSGEEVRVVLESTGSYHCPVVAALLENGIFVSVVNSLRMKRFCSQSIRRVKTDQIDAMQIALYGLAYWPELQPTRLPENTYRELQLLARQYYQMTSILIKAKVDFNALCDQVLPGMQELMNDHAGRHKLSDFVLRYRHTTHILEMGETRFRKDYCKWAEKKGYRNHERMAALIFATAQNGIPVLPNAPSTQIVITEAIRVLHTVEASRDAILTQMQALPKTLPEYSLVREMPCIGDTLAPRLIAEIGDVRRFHSKRALIAYAGIDAPPYQSGKFSANNRHISKRGNRYLRKTGYEVMQSYVMHKPANDPIFTFIEKKRSEGKSGKLAMVAGLNKFLRVYYGKVTELYRSLPQ

SEQ ID NO: 270134 - protein, 360 aa, unidentified
MAKSTENMARVTRVGLDLAKNVFQVHGVDAQGEVVIVRKLRRAAVLPFFGRLKPCVVAMEACGSAHHWGREIAALGHEVKLIPPAHVKPYVRRNKTDAADAAAICEASLRPQQRFVPLRTVENQAEVMRHRIREQLVGQRTALLNALRGHLGEIGVIAPQGAQHAYRLKRLAAGEADDNGEIVVCAAVRVALAPLLKQIDALDEAIEAIDDELETQAKGNEKAKRLMTIPGIGPVTATAIAATMRDIEAFASAREFAAFLGLTPRLHSTGGKERSGGVSKMGDRYLRKLLVVGATTVLHHAAGHNDALRRWAKEMLKRKAAHKYAFKLTAVALANKLARIAYAILRSGGIYDDRPVAARA

SEQ ID NO: 270135 - protein, 406 aa, unidentified
MEVIYPRCAGLDVHKQTVVACVRIARDGAPLQEVRTFDATTSGLLALADWLESFGVEHVAMEATGVYWKPVWHVLEGHFELVLANAAHVKNVPGRKTDVNDAMWLADLLAHGLIRASFVPPVAVQELRTLTRTRKQFVRERAAHVQRIEKVLEDANLKLSVVLSDILGKSGRAVLQAIIDGQNDPERLLSCIGRVKASRAALLEALRGRISAHHRFMLKLHLGHIDALDKAIADIEKEVGLGLEPFRKAAKLLSTMPGLSSVSAHVIVAEIGIDMSRFATPGHLLSWACMCPRNDESAGKRRSTRLRRGGKWLKTTLVQAAWAAVKVKGGYLQAQFHRLRARRGTKKAIIAVAASMLTAAWHMLRDGTEWHDLGAAHFDRADAHKTAARLIRRLQQIGYTVHATPA

SEQ ID NO: 270136 - protein, 331 aa, unidentified
MSIVMGLDQHRGQITGEWLDTETGEVKRTRVVPADRAAVRKFLERFGGEELEVALEATTGWRFVVEELRRVGAVVHLAEPAETAGLRGPKKRAKGDRADARHLRELLMIKRLPESWIPPDHILDLRGRVRLRHTLSEQRSEWQQRIQATLYHHGCPQRRQLMTGEGREWLDAQPLPAAARETVTVALGMTDGLDRQMLPLDRKLRAYARRQAGCKALMAHYGIGELTAVTILAELGDCTRFSSSRQAVRYAGLDITVHQSDQRRSPGHISRQGPPALRWALYEAAQVARRGERSPDREYYLEAKERIGGNRAPDRRRAQAAQAQLSVRHER

SEQ ID NO: 270137 - protein, 388 aa, unidentified
MQVAADRTDASTAIQTDLPAIFASLELSRSTWLITSLSPGAGEKMSKHSIRAGDVAGLLVRLAQLKEKARGRTGRDFPIIAIQEAGLDGFWIHRVLQSEGIESHVVDAASILTSRRRRRAKTDGIDGETLVRTLLAYKRGEPRVCAMVKAPTPEEEDRRRICRERKTLVGERVEHVNRIKGLLFAQGVSDYEPLKRNRRARLEELKTGDGRPLPAHLKAQISRELDRLELVLPQLKAVEAERDALLKPVSEGCPAPAAMLAQLKGMGPEFTAILWSEGLFRSFSNRRQLAAYAGLAPTPWQSGSVAHEQGVSKAGNRRLRTTMIQLAWLWLRHQPTSALSVWFQERVQSNGGKMRKTTIVALARKLLVALWKYSISGVVIEGAAMKTI

SEQ ID NO: 270138 - protein, 412 aa, unidentified
MDVIYEVCCGLDVHKRTVTACLRTAGSHGERRGAVRTFGTMTRELLELSAWLTSAGCTHVAMESTGVYWRPVWHILEGSFELLLVNARHVKMVPGRKTDVKDCEWIARLLEHGLLRKSFVPEAPMRELRELTRYRKLLIEERAREANRVQKILETANIKLGDVATDVLGVSGRAMIEAMIAGERDTAQMAELAKRSLRKKREALREALSGRFTEHHGFILRQVLRHVDFLGEQIAEYDGRIEEQMRPFAKAIEQLDTIPGVGRRAGEQIVAELGVDMSRFPTAAQAASWTGICSGNNESAGKRRSGTTPMGNRWLRTALVECAKGAIRKKDSYFRAQYHHLAPRRGGKRATVAVAHSILVAAYHVLRDGTVYRDLGPRHFDTLQRDRLTRYHVRRLRDLGYQFEQKPNDTAA

SEQ ID NO: 270139 - protein, 442 aa, unidentified
MEVVYRRCCGIDIHKDFITACVLVNEPGKQREVRKKEFRTYWSDLQKLKLWLSASKVEQVGMESTGVYWKPVWNVLEGHFPLLLANPYHMRNIPGQKTDQKDSEWISDLLAHGLLRPSFVPPRPIQELRDLTRYRAKLTGECNRVHNRIAKILEDANLKLGSVASDILGLTGRRVIEAIIAGQEHPDWLADKACGTLRAKRDQLRLVLKGRITDHHRYMLRELMADLDQIEAKILRLETEIADQMRPYAGAIERLMTIPGFKLITAWSVVAEMGTDMSAFPDAAHAASWAGLAPGNHQSGGKRRSGRTNKGNRWLRRALVQSAWAVSHKKNCFLTAQFYRRAARRGAKKAIVATAHQLLVIAFHILRDGTVYREKGGNYFDQLNPERTKRKLMARLERMGFDVILRHSTTDRIPPPLAPPASAPRRGRPCKCVERGIDCKHR

SEQ ID NO: 270140 - protein, 355 aa, unidentified
MVTGLKHQMEKRSMDHFAGLDVSVKATSVCIVDDTGRIVREVKVASEPEALLAVLKNPAYRFKRIGLEAGPLSQWLYSALAEAGLPVICVETRHMRAVLKAQINKTDRNDARGIAQMMRAGLYRPVHVKTLRSQKLRMLLTHRKLLQSKAIAIDNDLRGTLRNFGLKVGMVGKVRFEARILELVENVPDLAVLVEPLLVVRRVLREQTVILHRRLLAIVRDDEVCRRLMTVPGVGPVVALTYRATVDVPARFRKSKAVGAVFGLTCAKYQSGEIDRNGRISRRGDEMMRVMLYEAAQSLLRSKKWSWLKAWAMQVARRRGMKKAIVALARRLAVIMHRIWVDGTEFRWTREAAVA

SEQ ID NO: 270141 - protein, 341 aa, unidentified
MKELLRKNYLGIDVSKPWFDVSLMPVIDHVKQPIITERFDNTSGGMKAFKSWLKAAGVTLDNNSLLVIENTGVYHRLLWSFCSKHNLPLHIGNAAHIKWSLGITRGKNDVIDSVRLCQYCCKQADELKATPVLNPVFMKLKDLMTSRSRLVTNLHSTKNYIKELQCSNDKVLQATLEKAHKAAIEGIKKSILQIEELINQIIQEDPVIYNNYLLVKSVPGIGHLTAVYIICCTNNFVSKVTGKQLASYAGVVPFEHSSGVSIKGRNRVHKMANKELKKMLHLCALTAIKYYPEFRDYFNRKKAEGKNGMLVLNAIRNKLILRVVAVVNKKQLYVDKASIAA

SEQ ID NO: 270142 - protein, 319 aa, unidentified
MTQNDLVVVGIDVAKDKVDACIRTVTERKTFPTTASGRRSLIAWLRKHQVGKAVMEASGGYERVWAKALRQAGLDVRIVDPKRVRSFAESAGRLAKNDKIDAEMIAWFAETFSAAPSQLEDPAHEEIKALVKGRKSLIDLRTRLEIQKEHETPRLVQKAHAHLLKKLADEIAAIETAIGAKIKAAPAFAVRAEIIQSVPGFAKATALTLLAGLPELGQVSNEVAAALVGVAPYDDDSGKRHGQRCIKGGRRWLRNALYMPCVGAATLNNPVFKAFYQRLIAKGKAPKAALIACMRKLIVILNTMIARGEKWDPKRYQLA

SEQ ID NO: 270143 - protein, 334 aa, unidentified
MEQITTVGIDLAKNVFSLHGVDAKGRTVLRRTVRRDRLGEAVAGLSPCVIGMEACSGAHEWGRRFQQHGHTVKLMAPKFVAPYRKSDKNDGNDAEAICEAVTRPSMRFVPVKSVEQQALLALHRVRQGFVVERTAIINRLRGLMTEFGVVLPLRSVTVRREAARAAEALPELARAAIDDLLEQLRLLDERIEAYDRRLEAQARLSQAARRLMKIRGIGPITALAIVATVGDAREFKNGRQFAAWIGLVPGQYSTGGKTRLGHISKRGDAYLRNLLVQGARSVLQTAAQHQDRLSRWAIELQTRRGYYRTLVAIANKNARIAWALLARDQTLRQS

SEQ ID NO: 270144 - protein, 418 aa, unidentified
MLKIVFPVCCGIDVHKKFVVATVGATNESGVTSYQTKQFSTFTENLHQLLDWLKSQSCINVCMESTGKYWYPVFNVLEEYCDVLVANPKYVKGIRGKKTDVKDSVWLCDLHKHGLVPSSFIPPLLIRQIRDLMRYRTKFINVKSSEKNRIQNSLTVSNIMISSVVSDTFGVSSMKIINHLLENPDDKDFDVLPMLHSSMQNKAETIVKSINGNLTKPQADKMRICLDHFDDIEKHIAAIESVVLGLVQPYLPQIEIILSLPSIKDIFTAIAIIGEIGTDMSVFQSSKHLCSWAGLTPQNNESAGKKKSVRVSRAGVYIKPLLVQCANAAIKSKKCTYFKVRYDQIKRRRGHKKAIIAIAHTLLNCIYHMLYRNETFNYDLYNIDSKPKQTYVAQLTEEMAIRYLQTLGYQIPDMCNTT

SEQ ID NO: 270145 - protein, 352 aa, unidentified
MKTKNKKETTIGIDLGDKKHDAYALSNDGELISRHEVTNTKLGLKELSDRYPGAVMVMEAGTHSPWVSRYLSELGHEVIVANPRKLRAIYESDNKTDERDAEMLARLGRFDRKLLYSVSHVSERHQRGLSLLRSRDVLVESRTKLINHARGTLKSLGVRLPKTIRAEAFATKVSAFLEATDRTLMEPILKGIQSMTDQIKALEKRLGELAESEFPVAKRLEQELPGVGPLTSLAFVLIIERPERFKKVRDIGPFLGLVPKRDKSGSIDKPMRISKAGNQLMRRLLVNCAQYNLGPFGPDTALRRAGERICKDRGKVAKRKAVIAVARKLSVVMLKLWQNPEAHFEAFPEKVA

SEQ ID NO: 270146 - protein, 390 aa, unidentified
MIYAGIDVAKDKHDCLIVDSDGVVLFDPFIISNNHNGFNDLFERLMECSKDLKTIKVGLEATGHYSDNLLEFLISKGLNTTVINPLHTSLFGKSLSFRKTKTDRVDANSIVTLLRTERLKPYSQSSYQIRELKSLTRYRFSLVQDCARLKTSYSRLCVILFPELEKIVPSLHMPSIYALLSELPNARAIANCHLTRLANLLSSASKGRYCKDKAIEIREAAITSIGTHSEVKSLELQQTLQLIKTMEVQIKQIEDKINPIVDSLESPIMTIPGISYRMAAIIIAETENFTNFTAAEKILAFAGLEPSVYQSGQLTSTHAKMVKRGSKYLRFALFNATKYVCFWDPAFKAFLAKKRAEGKAYNVAVSHAAKKLTRVIFHLVKTNQSFVTQA

SEQ ID NO: 270147 - protein, 388 aa, unidentified
MQVIADRPEAPSAIRTNLGAIFVSLELSLSTWLITSLSPGSGEKMSKHVVHGGDIAGLLQRFAQLREKAVAQTGRNFPIIVIHEAGLDGFWIDRVLKNEGIESHVVDPASVATSRRRRRAKTDKIDGEALVRTLLAYKRGEPRVCAMVKAPTPEEEDRRRLCRERKVLITERVKHVNRLKGLLFSQGVCGYEPLRRNRRLRLDELRTGDGRPLPKHLKAQISRELDRLELLLEQIKAVETERDALLAAQQIAAPAPAAMLLAIKGIGPEFAAILWSEGFFRHFDNRRQIASYAGLAPTPWKSGSIDREQGVSKAGNPRLRTTLIQLAWLWLRHQPQSALTLWFKERVVRNGGRLKKATIVALARKLLVALWKYVTAGVVIEGAIMKAV

SEQ ID NO: 270148 - protein, 336 aa, unidentified
MSELATVGIDLAKSVFQIHGVDENGLVLVRRQLRRSQLLAFFQNRPRCLIGMEACAGAYDWGLRLQQMGHDVRLMPPSYVKPYVKRGKTDAADAAAICEAVTRPSMRFVAIKSESCTLVMVLHRTRDFLVRQRTQIGNAIRAHMTEFGIITAKGAQNIERLKEQVDQLPQAARMLLILLFEQLSEADMRIERLTGEIEETYSQSETSQRLATIPGVGVLSATIIAATTPNVDNFDCARDYAAWLGLTPKPHSTGGKQRVGGISKMGNRYIWRLRYLGAMAQIMLRRRLERESGSDRLSGMLVRKKTKIVAIALAHRMARMIFAVLRDGSRYEPQAA

SEQ ID NO: 270149 - protein, 336 aa, unidentified
MRNIGVDLHKNNFQVCYLEAERRQFSQYSIHGLEEFKKSLKKDDRLAVESTGNTRYFMNQIKGCVERIVVVNPRQFKVISNSVKKTDKQDAEQLALFLSKDMLPEVRMKDEKRSQLKSLANTRDKLVKLRTALKNKVHNILNAHGIVTSREAFTSNKSLDGLKSYAVNELARLEIEVIVSQIRSLNDGIKKLYKQIEDAGKGLYGFENITSIKGIGKKSGTILLSIIGDINDFADSGKLASFFGVVPRVSNSNETIHQGRITKQGSKLGRTTLVQCTLIAIRYSDYLRSFYERLKSKKGSGKAIIATSRKLLDIIYMTLKEKLIFEDFPNFVVKSS

SEQ ID NO: 270150 - protein, 415 aa, unidentified
MALKIVYKICCGIDVHKTFVVACVASTSDKGITSYESHRFSTYTSGLKTLLQWLIDRNCKDVCMESTSKYWIPVYNILEKGCSIVLAHPKYVKAIRGKKTDKKDAKWIADMFKHDLVAGSFMPPSDIRQLRDLMRYRFKLTCFKSSEKNRLQNCLTVSNIQLGNVVSDTFGKSAQAILDKLLENPADTSFDLEPLVYKSLKKKLPELRDAIDGFITPEQAGKLKIIKDHYDNLESRKAELEELILALAAPYQQELTILQTAPGISSNFTAIGIISEIGTNMEAFPSAKHLCSWAGLTPTNNESAGKKKSVRVSKAGCYIKPLLVQCANAVVKSTKHPEMRNRYLHLKKRRGHKKAIITIARMLLTALYHMLKNGENYNPELYQKTDLPPVDREITIEQALMLIRNQGYKIKSATT

SEQ ID NO: 270151 - protein, 376 aa, unidentified
MERIAYIGIDVHKDTNTACLFARKEHEVLLQDIGTVPAGCEYMAKAIRKALKSYGLMDWDVLCGYEAGPTGYGLCKGLQKAGFKCEVMAPSTIRKASGERTKTDRRDARMLALALSTDSYHAVHILDDRDIATREFTRTRNARKGDLKRAKQHLQSFLLRMGRTYPEGGSHWTDRHWRWLGSLSFDDAYLDYSFRSYMQDIKDLEHKISMMDDMIEDIASKDGRYRDRVAKLKCFTGVETHTALSIVCEIGDFDRFPDAKSFSSYIGLVPGQDSSGKRQRYTEMTKTGNARVRTLLVEAAKGIKRASPFNKSKRLVQRQSGQDPDVIAYADRCRRRLKLRMKRLEESSGKNANVATAAAARELACFVWGMMTGNIA

SEQ ID NO: 270152 - protein, 356 aa, unidentified
MIYLAIDHGKKKSHAVALSDSGEVLFDAEVPTTFEGFASIKAALPPGPIQSICEASWNWGKVYDSLEALGLNPKLANTLKSRFIAESFTKTDRIDATTHAIMLRAGITPTVHVPPKEVRDQKNLLRHRFWLVQQQVMIKNRIHSIVDRNHIQPPARTDLFAGTGRAWLNALTLREPDDKLLKAHLALYDTLRADTRQTEKWVDVAIKDNKLLPILESFPGIGPILGALIALEVDTIDRFNSPSKFSAYCGLVPSTYSSSGKTVHGRMIPSNRHLKYAFIEAAWNASRSSPYFQAFFERLKARKGSCKAVSAVARKMSEIAYFCMKHNRPYQERAYRLGKTQAEALEQFSRVALTSH

SEQ ID NO: 270153 - protein, 316 aa, unidentified
MTNTPNFVGIDVSKAQLDVAVRPSDEHDTLVYDAAGIDTLIARLRPVAPTLIVLEATGGWERPLVRALVAAALPVIVANPRHVRDFAKATGQLAKTDRLDAGVLARFAEAVRPTLRPHPDAATDALAALLARRRQLLDMLTAEKNRLSTAPTRIQRRIRAHVTWLTAELARFNEELDAAIRQSPVWCEQEDLLQSTPGVGPVMSRTLLADLPELGTLNSKQIAALVGVAPLNRDSGTLRGKRQVWGGRAPVRAALYMATLVATKCNPVIRSFYLRLRGIGKAPKVALVACMRKLLTILNAMMKHRTPWRALVVQGA

SEQ ID NO: 270154 - protein, 350 aa, unidentified
MIVIGIDPHKSTHTATAVDPATNRDLGSVRIRSSFDDYAQLITWSKSWPDRIWAVENASGLGHHLTQWLISRGEAVVDIPSTATARVRELSRGGRRKNDRIDAAAAACVAFSQGDFRPVAPEGHTDVLRILDERRIDLVKQNGRLVNQLHALLRELFPGGMEREFDTDDAAGKLKAFLPETQADAMRKNVALDIVGDLRRARFQIEDITARIKTELAASGTKLLKIPGVGIVTAARILARTGDPNRFPTEAAFANYSGTAPVEIASADNQRHRLSRYGDRTLNSAIHIVAVTQARTPTSDGYAYHQRKMAEGKTSREAMRCLKRQVAKRLWRTMREDQGDRLVTHVPRFA

SEQ ID NO: 270155 - protein, 399 aa, unidentified
MDDITYVGLDVHKATVCVAIAEGGRGGEVRQVGVFENRPDILCKLAARLDKGNRRLSFCYEAGPCGYGLQRLLTSRGHDCIVVAPSLIPVKSGDRVKTDRRDAMMLAKLHRAGELTAVWVPDAAHEAMRDLVRARATAGRVLAKARQHLQGFLLRHERIYRGPRAWTLAYRRWLTTVRLDHPAQQIVLQDYIHAVEDAEARRDRLTRQIEELLPSWSMAPVVEALQAMRGVGLVVAVTVAAEVGDFRRFANARQLMAYLGLVPSEHSSGAAIRRGGITKAGNALARRVLIEGAWTYRMKARVSRKLHDRLEPLSTEIRDIAWKAQVRLCARYRRLAALGKPSVVATTAIAREMVGFIWAIARRVQSAVEDQRTHSAHAEAPMLTAAAKPCGFAAALGRR

SEQ ID NO: 270156 - protein, 407 aa, unidentified
MIYVGIDVSKRKSTVCFMAPGDKIICRPFDVKHTKEELQPLVDEIRVQAKYDEIKVVMESTGVYHLSIAYFLQQNGIFVSVVNALKVANFNKAENFRHTKTDSIDSTNIARYGIAYWAKLPQFDLNGDKYFLLKRLCDAYLNFSEERSRILLQLQSQLEQTMPGIFDLFGGFDINSGKDKLLDFLERYCHIEDIIAKSEAEFVASYREWAEEKGYRSNESKAATIYAQAKNGIPSIPNNPIVRETIMWYVGLLRRADEALMASLTRMEDIAKDLPEYELVGEMGGVGRVTRVALIAQIGDVRRFKNKHSLICFAGLTPSIHESGKFRASQNHIVKKGPARLRKVLYQVMMSLVMHKIPKDDAVYRFIKKKESEGKYKKVAKVAGMAKFLRIYYGRVMHLCRDLGLAA

SEQ ID NO: 270157 - protein, 315 aa, unidentified
MTKQRAAVNVGVDVGKSQLDLYLLERDRALTVPNEERAIHAVIRSLSRYRIERIVVEATGRLEQPFVRAAFAAGLPVIVVSPLKIRRFADVIGQLAKTDAIDARLIAQFAATVKPTARPPSDVNAQAIKDLVVRRRQLTALRTMEKNRRQVVPQDLKASIDRIINTLNQELKILDQLIDDAIDQHAASRHKRELLTSMPGIGNTVAATLIGDLPELGSLDRREIASLTGVAPFNHDSGKLRGKRRIRGGRAHSRTALFLTAMVATRFNPDIKRFYERLLSTGKHKKVALIACIRKIVTTLNAMIRDNSPWRTAAT

SEQ ID NO: 270158 - protein, 300 aa, unidentified
MALTIVEDTRAVTGGVDTHADMHVAAALDPVGGLLGVGEFPATAAGYARLLGWLGGFGTVCLVGIEGTGSYGAGLARHVTAAGIRVVEVDRSDRQDRRRQGKSDPLDAVSAARAAQSGRARGEPKGPDGAVEAIRALMVAKRSARSERTQTINQARALIVTGPDDLRARFARHTAAGLVSELAALRPRPGATVGYATRIALRELGRRAEFLDGQLGRLDELIVPLVTARAPALLALHGVGPDTAALLLIAAGDHPHRLRSEAAWAHLCAVAPIPASSGKRTATASTPAATARPATPCGGS

SEQ ID NO: 270159 - protein, 390 aa, unidentified
MEARTVNNLPSAAAHDGAVRCRVAIELSKKSWVVAVNTPLSDKISLYKLKPNDWKELLELIERIQKRVAQELKKPVEVISCYEAGYDGFWLHRLLEAQGVRNHVIDPASLQVDRRARRAKTDGIDVKKLLRSLMAYLRGEPKVWNVVRVPTVIEEDDRRLHRERSRLINERIQHVNRIKGLLAIHGIYDYEPMHPERMQRLERLRTTARHRLPPHLNAEILRELQRLELVLGMIQTIEAERDAIASAKSKSRHTSAKKIQHLVKLKSIGPEFATVLVGEVFYRTFDNRKQIGSYVGLTPSPFQSGSTSRDQGISRAGNAKARTTMIELAWLWLRHQPDSSLSVWFRERVGERKGRIKRIAIVAMARKLLIALWRYLETGLVPEGAALKSK

SEQ ID NO: 270160 - protein, 411 aa, unidentified
MRLYVGDDWAEDHHDVEVMNEAGKVLAKKRLPEGAAGMSQLHGLIGRHVPEDADDAEVVIGIETDRGPWVAALIAAGYTVYPANPLLASRYRERHGVSGAKSDPGDAHVLAEIVRLDRDHHRPAAGDSVLAEQVRLAARAHQSMIWMRQRAANTLRSLLRECYPAALEAFGDDLTGRDALAVLSAAPDPATGRRLTPYRVAVLLRKAGRQRNLDKQAEQIVAALRSEQLPVRVELASVHAASVSALVAVLATMVAQTGVLEEQVRLGFGQHPDATIYLSQPGLGTILGARVLAEMGDDPTRYADARARKNYAGMAPITRASGTKRVVLARYTRNRRLADALYQQAFSALNASPGARACYDRHRAVGATHHQALRTLANRLVGILHGCLRHHQPYNETTAWANQTAPTTIAA

SEQ ID NO: 270161 - protein, 371 aa, unidentified
MHQDSAVFVGLDASKLKISVALAEDGRQGEVRFLGDIEHTPGAVRRLVTKLAGKYRRLLFCYEAGPTGYGLQRQISDLGHDCAVIAPSLIPKRPGERVKTNRRDALTLARLHRAGELTAIWVPDPGHEAVRDLVRAREAAMEDLREKRQHLQAFLLRHGRIYPGLRPWTQVHARWLSNLSFAHPAQYLVLREYRQAIEDAEARLERLTQQVSEVVSSWSMAPVVEAYQAMRGVAFVTAVTFVAEIGDVRRFETPRQLMAYVGLVPSERSTGEQVRRGSITKAGNPRARRVLIEGAWTYRYPARLSRPLQVRQESLPQVVRAIAWKAQLRLCARYRRLTAAGKRQTLVTTAIAREMAAFLWAIGHAVEPRSA

SEQ ID NO: 270162 - protein, 445 aa, unidentified
MTTPSLPVLDPLAAFVDVGSEQMYVSIAGGPPEVFGTVTNQLHRLRDWLQERKVKSVAMEATGVYWLPLYGVLEAAGFKVVMVNGKQTRNLPGRKTDMKDCQWGATLHAHGLLQAGFVPPAQIRRLQDYLRLRADHVVSAAANVQHQQKALERMNVKLHDVISSLVGSSGSKVIAAILAGERNPDRLLALCDVQIQKKKAERVKESLRGTWAEEHLFALRQAVENWEHYQRQIAACDQRIEALLREINGPDQPEAPPSPTPPSKRAGINAPEIDDLHGMLVKLCGGKDLTVLPAHTDYSLLQLIGEVGTDLRQWVTEKHFTAWAGLAPGSHQSGKRKGSVRRKRNRAGRLFCVMARSLARSKHIALGGFYRRMAARRGGLVANIALARKLAILFWRVMVKGLSFAEAGLRAYEEQVLETKRRALQRLAKQLGQVVMPKPTTRKNA

SEQ ID NO: 270163 - protein, 309 aa, unidentified
MKEELVYLGVDIAKSYLDAAIGNEKRRFANERIGHRELIKWVKQLKVPVQVICESSGGYERALVQALVGAQLKVSLVQANRVRQFARAAGILAKTDRIDAKLLCHFAKAMQPGTISASELEQEHLRELESQRRHLTHLLVMEQNRAARASDGCVRRLNRSLLNQIKKQIEQLDLLIKEHIEASPELSAKAQKLTAINGVGARTAALLLAQMPELGQLNRREVAALVGVAPFNRDSGKMRGKGAIYGGRRPVCHGLYMAALVAARHNPILRAFYLRLRGAGKPAKLALTATMRKLLIVLNSSLKPDPTYA

SEQ ID NO: 270164 - protein, 341 aa, unidentified
MEKNGYFIGLDIACDDFVASIYESPEKKVTTKEAIENNPDGFSMLVSWLKEQGIDSSNSVICMEATGVYSEAVAHYLATYGFKVSVEPPLKVKRAFDPIGHKTDPVDSRQIAEYAYRYSDELRFWQPKQEIVEKIKQLLTAREQFTKQSIAIQNSIKAYEKHVVKVLLIINAHQETLKELKKHIKAIDKELDRLIRQNPTISQICSQLKSIPGVGLLLASDLIAITGAFNDISSHKTLAAFLGICPYQHQSGKSVYRQPRMRNFGPNYARKLLMLAARSCATHNIEFRKYYVRKLAEGKAKQLVLNNISNKIIKISCALIKNNAQYNETYRSVNPLCFNLA

SEQ ID NO: 270165 - protein, 344 aa, unidentified
MDTHRDAHVAAVLSLVGEVIGTEEFPATAAGYRDLLGWARASGTVRRAGVEGTGSFGAALSRYLLAQGVDVFDVNRFDRADRRRRGKSDPLDAENAARAVLSGRARAQAKAGDGPVEIARVYKLAKDSAVKARTQAINQLKAVLIRADPQLREELAGLGNAELLRTCAGLVDDSLNDEADEGVVLHATHITLCLLARRIRQLSEEVRELEGRLTRLVERHAPQLLEAVGIGPDTAVTLLITIGDNPERLASEASFAALCGVSPVERSSGSRQYRRLNRGGDRQANAALHRVVQTRLRVDPRTQGYCERRSKEGKTRREIVRSLKRYVAREVFHLVRPVQSQPPS

SEQ ID NO: 270166 - protein, 378 aa, unidentified
MQPTQRPNRIAALEASLEVAARSWKLALTDGRRLHPAVLNVKTDDLWRRLQELLERLQEFKRKWGLAAGCQVTLIYEAGQDGFWIARALQDAGVQVLVVDAASIPVPRQSRRAKTDRLDALKLLDVLRAWLRGERSGLRMVHVPSEQAEALRHMPRERGLLQKELQQHRDRCHKLLRTCGCVQQIDAGFPERLTAGQVRCADGRALPEQLWDRLMRECERIDLTHRQFAGLEKTLLERLPPNVQRCIATLAQWKGIGWVGAMRLVLELFWRDFANRRQVASCVGLVPQPYDSGESHTDQGISKQGNRRVRALLIEMAWMWLRYQPGSALAHWFARRTSGAAKRGKRIAIVAVARRLAIDVWRCLRDGVIPAGVELKNA

SEQ ID NO: 270167 - protein, 374 aa, unidentified
MYRVGLDVGQRHSSLCVLDCNGKMVRQEQVTGTWSELIQRIAQLPGPFEVCFEASCGYGYLNDRLSPLAHRVVVAHPGQLRLIFRTKRKNNRLYAQKLSKLLYLDAVPQVHVPSVNVREWRSLIEFRQKLLGRRVAVKNQVRALLRGLGMRPIKGLWSKKGSAWLKGLELSSLNGLRRQIMLDELQQVQGKIKQVEKELKKIADGHAGMTLLMSIPGVGIRTAEAFVAYIDNPARFGRIQQVGSYVGLVPCQDATGEANRLGHITKDGPATLRKLLCEAAWQAVRRDAGMKRYFERIMKEDPDRKKIAIVATAHRLARMMLAMLRNGEVYRKGQSSRRDERVAGKEGWRRTGPAGPPAPGASQPDGPIAVDGMD

SEQ ID NO: 270168 - protein, 318 aa, unidentified
MNTQSVYVGVDVSKENLDLAENPRKQIRRFHNTATGIGKAVDHIRGIGAILVVMEATGGLETMLAAALGEGGIPTAIVNPRQVRDYARSTGKLAKTDAIDAQILADFAATVHPEPHPLAEPQARELKDILARRQQLNEMITAEKNRLQRAQGVLRDHIRAHISWMEKEMSDMDSALRHFIEESPMWREKDTLFQSVPGIGPVLSTTLVAELPELGNLNRKQIAALVGVAPFNRDSGKMRGKRSIWGGRATVRAALYMGTLVATRYNPVISRFYQRLIAAGKAKKTAITACMRKLLVILNAMIKHRTPWHYAPELAVIS

SEQ ID NO: 270169 - protein, 350 aa, unidentified
MVANTEKELESFRRFLSYKTRTVVWDTKPAFTRKGKTDMSACFIGIDISKDQLDVAIRPINESIAFANDDEGIDLLIKRLQTLQPDLIVMEATGSYHQLVLGRLLASGFAAIAINPRQARDFARAIGRLAKTDRIDAHVLAEFAEKIRPELRAIADEATQQLDAICTRRRQLVGMIAAEKNRYHSGPASIRAQIKKHIIWLEKQVAELENDLDKLIRSTPAWREKDDLLRSCKGIGPTTSHTMLACLPELGSLSRHRIAALVGIAPFNRDTGKQRGQRHIQGGRSEVRCVLYMATLAAIRSNIVIRAFHKKLIAAGKPKKVAITACMRKLLTILNAMVRSNTRWNPDFAA

SEQ ID NO: 270170 - protein, 454 aa, unidentified
MAQRKKRSKKFQVTDLPPHLQHVNLNAAGIDIGSDQHWVAVPEGRDKVSVRQFAAFTSDLLALADWLAQCGITTVAMEATGVYWIPLFELLERRGFEVKLVDARRVKNVPGRKSDVLDCQWLQQLHTYGLLAGAFRPADQLCILRGYMRQREMLVQASSMHIQHMQKALQQMNLLLHNVVSDITGLTGMKILKAIIAGERDPKTLAKHRDARCRHSAARIAKSLVGNYREEHLFALTQAVSLYETYQAKIADCEAAVARHLSSQSQRTDDEPPASQKRSQAKDFMRAEVDMRAQLFKLTGVDLFSIAGLGADTLLTLAGEVGFDMTPWKSEKHFTSWLAVCPGTKKSGGKILTSKTRRSSNRAAAAFRIAASTLLRSKTALGAFYRRLRARIGAPAAITATARKIAVLYYSLLKNGTSYVEAGQAAYEHKYQQRRLKGMQKQALAMGYQLVPIN

SEQ ID NO: 270171 - protein, 318 aa, unidentified
MNTGQTYVGIDVSKENLDLAVNPKKQISRFTNTATGINKTVDYVIKTGSILVVMEATGGFEIPVAAALGESGIPTAIVNPRQVRDYARSTGKLAKTDALDAQILADFAATVHPEPRPLADTQAQELKDILTRRRQLNEMITAEKNRLQRARGVLREHIRAHIDWMEKELLDMDSELRRFIEESPMWREKDNLLQSVPGIGPVLSITLVAELPELGTLNRKQIAALVGVAPLNRDSGKKRGNRSVWGGRAGVRAALYMGTLVATRFNPVIKRFYERLLTVGKAKKAAITACMRKLLTIINAMVKHHTPWYYSPEPAVIS

SEQ ID NO: 270172 - protein, 364 aa, unidentified
MSSSVLKHPRKSRPALHGEGVILGVDTHKDVHVAAILTITGVLLATHSFPTTRDGYAATLEWAHRFGDVNAAGIECTGSYGSALMKYLQTQNVTVFEVNQPDRALRRKAGKTDAVDAEAAARAVIAGRSLATPKTGIGAAEELRQMRLVKSSAVKARTTAINQLKGLVVGAEPALRDQLRGLSTKALSRACALLLPSTVERMLMSELATRIHHLTEQLSRLETAMTRTVTACAPELLDRPGVGYDSAAALLIAVGDNPERMKNEAAFAALCGVSPVEFSSGKTTKRRLNRGGNRQSNAALYRIVLTRLRWDETTQNYLQNRTAQGKSKRDVIRCLKRYLAREIFTILKTIPDQHKNPAQHELTT

SEQ ID NO: 270173 - protein, 343 aa, unidentified
MQAVTTIGLDIAKSVFQVHGIDAEDNVIIRRQLKRCYVLTFFQKVPPCLVGIEACASSHYWSRELKALGHTVRLMPPAYVKPYVKRQKNDAADAEAICEAVTRATMRFVETKTPEQQSCLMLHRTRHLFIRQQTSVINAIRAHLAEFGIVASVGRNGVEQLLDVVADSSDKRLPEVARACLAALGAQLRMLKTQILEFDRRIMAWHRSNEASKRLDEIPGVGPALATALVASVADPKAFRSGRDFSAWIGLVPKQHSSGGKDKLGSISKQGDRYLRSLFTAGALAVIRYAKIHGTKHRPWLTALLARRPTKVAAIALANKIARMAWAMMAKGERYKEPVALAA

SEQ ID NO: 270174 - protein, 409 aa, unidentified
MAAVMIGVDPHKGSHTAVAIGMAEEMLGQVRVRACAAQAGQLLAWAGPWPQRTWAVEGAGGLGHLLAQQLVAAGERVLDVPPKLAARVRLLGSGATGKNDPDDARSVAVAALRPAACPPVRADDHAAVLKVRAKRHRDLSRARNQVVCRMHAVLCQLIPGGVSKRITAGQAARVLEAAEPLGAAGMARWLLAAQFLTDLRRIDAQRRDVQRKLAAAVRAPGTTVTEVFGVGPAVAAAVTGDAGDISRFASRDHFAAYNGTAPAGVSSGNRVVHRLSLRGNRRMNHAIHMAAVTQIRYRHTKGRAYYDKKIAEGKTAKEALRALKRQVSDAIYQKLKAGARRAASAAGPGGHPGNGSVASAAGLHPADRLFGQATPGPAPTLRPRPGPAKGTRPGSSRQGRRSTPAHTPA

SEQ ID NO: 270175 - protein, 392 aa, unidentified
MYIVGIDIGKNHHEASIVSPEGKQIGRSLRFATTHKGADSLMSFIFKNIGNSPCVFGMEATGHYWYPIYSFLKAKGYTICVINPIQSDSLRKMYIRQTKNDSIDSFLIAEVIRFGQFGTTSMADENILAMRQLCRYRDSVISSRTEIKLRIGTIMEQIFPEYEKQFSSLWVSTSMGILEKYLTPENIENAPIDELFEIIKDKSHNRLTKAKAISIKEAAADTFGIKIAQDAFSFQLKQLIDRMNFHDKQIEALDIEIMKYYEQFDCYLHTIPGIGIIGAATILAEIGDISRFKNSSALVAFAGIDPTVRQSGEFNSTHNHMSKRGSPYLRHAIFLAATTCSFHNSPLNAYYKKKRDQGKHHLTATGAVARKLTTIIYAVLRDSKPYEPKKFC

SEQ ID NO: 270176 - protein, 431 aa, unidentified
MAVVMIGVDPHKASHTAVAINAAEEPLGQVRVRASAVQAERLLAWAQAWPDRSWAVEGAGGVGHLLAQQLLSAGERVLDVPPKLAARVRLLATGDINKNDPNDARSVAVAALRSAGVREARRDDHAAVLKVWSKRYGDLGRVRTQVACRLHQVLCELTPGGVRGEITAGQAARILASITPAGAVEAARCQLAADLVEDLRGVDARIRETRKKAGAAVRASGTSLTGLFGVGPVVAAAVIGDVCHVSRVPSRDHFASYNGTAPIEVSSGGRKVYRLSRRGNRRLNHAIHMAAVTQIRYQHSPGRAYYDKKPADGKTRKEALRCLKRQISDAIFACLQADARRTAACAKSPGGQPGNHSSSRAAGSHPDHRRFGQATPGPATHPTTPAGADTAAPFPALLPSRASRRTGQGPGAARPRSGARRASSTRPPASR

SEQ ID NO: 270177 - protein, 404 aa, unidentified
MQRCYIGVDWADQAHALWVVDERGERVWSTEVEETEEGLSEVGQWLYTRRSEGVELWASIEKPEGRIVDFLLDHGVVVYPINPKALDRARDRFRMSGAKSDPFDARVLAEFLRTDHPHLRPLLPSSDQAQELKLLTRDHQRLLRHQTRLLNQLKATLKEYYPRPLKVFKDLSTASALDFLERYPTPKALTAQGWQEFAAAHRWPRSRASQAWELLSQPSIPVPAHVARAKSRLLRALVAQLRVMGATLGEYKAEIEDFFASMPVADVARSLPGGKSGVTVPSLWAELGDAPGRWESFQHLQGQAGAVPVTKRSGKSSVVLFRFACNKRLRYAVNQLAFLSLRYSTWAPAYYRQQRRKGHTHHQSLRALGAKWLKIIFVMWRDQTPYNEERHLANIARQTMYQAA

SEQ ID NO: 270178 - protein, 410 aa, unidentified
MWRSKGKRSASSIVGCAPRCAEPHAETPEGVLPQTFRGGRPVSKTITSFVGLDVHKDSTAIAEAEAGRENPRFIGTVGSDLGQLLKALKSLGKPETMLVVYEAGPCGYGVARQLRSRGYSCEVVAAGKIARRPNERIKTDRRDALTLARLARSGDLVKVRVPDERDEAMRDLSRAREDAVKARLKARQQLKALLLRHGHRYGGKSSWTLAHERYLATVGFAHPAQDIAFAEYRQAVREGHERVERVTQALRTQTEHWRLQPLVAALSSLRGIDFVAAVTLAAEIGDFSRFAHPTELMGFLGLVPSEYSTGDTRRQGDITKTGNGHARRVLVEAAWNYRFPARISRILQIRQEGQPKAVREIAWRAQLRLAHRYRRLSSRKLHPNKICVAIARELAGFLWDIARQVKVAEA

SEQ ID NO: 270179 - protein, 316 aa, unidentified
MPPPPLFVGIDVAKAECVVAVRPTGTTWTVPQTEAGWAALATRLQPLGPALVLCEATGGLELPLASVLAAAGLPLAIVNPRQVRDFAKAKGLLAKTDALDAAVLAHFAEALRPVPRPVPDATTQTLAALVTRRRQLVEMATAEENRLGSAPPCLRARLQAHLRWLQRELAALATDLDQTIRTPPGWRAQDDLLQSTPGVGPILSVTLLGGLPELGTLSRGAIAALVGVAPWNRDSGRRRGPRRCWGGRADVRAVLYMATLAAVRYNPVLRAFYRRLLATGKLKKVALVACMRKLLTILNAMVKTQTPWAPRIVGAK

SEQ ID NO: 270180 - protein, 344 aa, unidentified
MKFTRCGLDIAKQVFQVHGVNERGAAKGRKQLARAKVLEYFVQLPPCLIGMEACAGAHYWARELSKLGHTVKLMGAQFIIPYRKSGKNDANDAEAICEAVGRPNMHFVAVKTEEQQAVLMVHRARSLVVANRTAQVNQIRGLLGEFGLVVPKGIRKLRAQLPQLLEDAENGLPALAREVLAGLLEQLRELDRHAHRYDLKLRELAQQSEPARRLMQVEAIGPQTATALVASMGNPGVFKSARSYAASLGLTPRQHSSGGRTRLGQITKQGDRYLRTLLVHGARAYLRVVDKKTDGKSAWVRRLKERRHINVAAVALAAKHARIAWAMLAKGTEYRPAPALGAAT

SEQ ID NO: 270181 - protein, 392 aa, unidentified
MVVSVGIDVSKDKHDCFIVSSEGEVLADVFTISNTMDGFNCLLQRIQDCTTPQDKTKVGLEATGHYSYNLLGFLLDNGLTTYVLNPLRTNLYRKSLSLRKTKTDRVDARTIASMLLSDAGLKPYTDTAYHNEELKSLTRYRFDKVKERAKLKSSIARLVCILFPELEKLVPSLHIASVYALLEVFPGAKQIAAAHLTRLKALLETASKGRYKRDMALEIRDAARNSIGARIPAKSLELQHTIRLIRELDAEIHEIETEIENMMDEIHSPITTIPGIGYRMGAMILAEAGDLSRFDSPDKLLAYAGMSPSTYQSGQLKNCYPHMEKRGSRYLRYALYNATKYVCLWDPTFAAYLAKKRAEGKHYNVAISHAAKKLVRLIFAMEKSKQPYCSAA

SEQ ID NO: 270182 - protein, 341 aa, unidentified
MRLYAGLDVSLETTAICVIDQDGKIVQEAVASTDAGAIADVLERHRADLERIGLEAAPMSEWLMRGLEERDLQAVQMETRQVHLALSASAVKTDRKDARGIANLLRMGWFKPVHVKTASARERRVLLAARDCLVRRLKDLDNSVRGLLRCFGLRPPRALRGRWSAVVGELIKGHPILTDAIAPILAARDGIAEQLDRIDRRVRDEARNDTVCRRLMTVPGVGAIVALTYVATIDCPERFRSSKTVGACLGLTPRRYQSGETDRAGAITKMGDPAARVALFEAAHVIMTRVQRWFPLKAWAMRVAARRGAKRAKVALARKLAVILHRIWIAGTEFQSRPASA

SEQ ID NO: 270183 - protein, 341 aa, unidentified
MAKFIRMAIDLGKNYFQVHGLESEGGRSVSRKVKRSKMHEVFSQIEPCRVGMEACGSAHYWARQLTAMGHEVVLIPPAYIKPYVKRGKNDAIDAAAICEAMSRPDMRFVPIKSADQQAVLMLHKTRELLVKQRTMAINALRGHLAEFGIVAAKGIGRVDELLALAKADAALPPIAMAAVACLDQHLEGLDLSIATVEKEIARSHRQNPISRVLDEIPGVGTLIASVIAASVPDPGVFKSGRDFAAWLGLTPRQNSSGGKEKLGAITKQGNRYIRKMLVTGATSVLRAVGKRKGSFADWINALRIRKPERVVAVALANKLARICWAIMTTGEGFRTDTYVKA

SEQ ID NO: 270184 - protein, 360 aa, unidentified
MKAMSTESNPEAAKSNLTELTELTELAVGVDVAKDELVVAVWDRTAQKAQVMEPFSNDEAGLEQLAQQIEAWSQQTGAAVIHLTAEPTGGYELPLAYFAQQRGWQVSLVNPLLLRDWAKSQGRRAKTDRLDAIVLAQYTVERRPPAWQPPSPALRELDNLLSRRTDLLKMLQAEHNRQKQFTLRPDAQTVSHNVQFVLTALEQALADIDATLADWRDRYPPLDEQADLLDTLPGVGPKTVLRLMAVLMRWAILTGGRGSDKALTAFVGLDPKVHTSGTSVYKHPLISKQGDPDLRMALYMAVLGALRGRNALHDFYDSLVARGKPKMVALVACMRKLLIWAWHVFSTHTPYDPSLHLKSS

SEQ ID NO: 270185 - protein, 317 aa, unidentified
MAQNGTIVGIDVAKGKIDAAIRFGAEASFANSAEGCRELLAWLNEHGVCKAVMEASGGYEKSWARLLRGAAVEVVIADPNRVRHFAKSAGQLAKNDPIDARMIAWFGAVFGQASGQPHDEERQELDQIVTARLGIVRLKEQIESWREHEQPKAVQKAQRALLKAVALQLAKLETIIAAKIDKTERFAQRAEIIQSVPGLAGTAAAGLIAFLPELGLVDRQAAAALLGVAPFDADSGQRHGPRHIQGGRHKLRKLLFMPILSAATQHNPVLKACYQRLIAKGKKAKVALIACMRKLIGILNAMLARGAKWDPAKHAVA

SEQ ID NO: 270186 - protein, 351 aa, unidentified
MKTKDTTDSKLFIGIDVHKRSWKIRTATDLFDGSSLTIPPDAFSLKKYVDRHFKGYTVYCCYESGCCGFSHYRHFISFGWHSKVVNPADVHRPAKAQFQKTDKIDARLLCKELKDSRLKGIHVPSIEREQLRCLFRRRNELVKEHRKIKTQIKMQLLYLGIEIPKVFDNSHWSHNFRDWLRALSFEYPTMDYCFGTRLRTYEYIDRQKRDVSTKLRAYCRKYYKKDYYLLRSVPGVGGIVACGLLCELGDLRRFKNFKQLASYVGLVPWVHQSGDNLKTSGLTPRANRLMRSYLVEATWQALRFDPVMQAYYRSHSGKDVKRILVKVARKLLSRIHAVIRTEIPYEVGVVS

SEQ ID NO: 270187 - protein, 336 aa, unidentified
MSYIGVDLHTTQITVCYLKATSEFEIRKYQLCEIEKFVLSLRPTDEIAVEATCNTRWFAEQVAEKVRRVVVVNPRQFEVVKNSVKKTDKNDALNLARFLRADLLPEVRAKREEATTVQSLVNTRTKLVRLKTSLINKIHALYVSNGRKLKKTSLASEKGLDKVLLQEWSAIERIELEIIIEQIRSLKVSIKKLDTAIAAESEKLKGYESLVSMSGIGSLSAGILLSVIGEVKDFETADKLASYFGIVPRVSNSNETVNHGRITKRGNKTGRTTLVQCSLSAIKKNEYLKKYYEQVKARRGHGKAKIALARKYLGIIYNTLSNNWVFADFNNFELAE

SEQ ID NO: 270188 - protein, 321 aa, unidentified
MPIKKLQMIGVDVAKQKLDVSVDDNTALTIDNHEESFKNLLKIIPENGSACFVMEATGGYERKLVAFLQAREIAVAVVNPKRVRDYANAMGAYAKNDRIDANMIRHYAQTAYDKKRLQLRESLTEAARRRESLLRRRNQLVGQRSMEKQHLESATDKDTVRSIKRIMKQLDKEIEKIEAMIQTDINADEHLKKSMKQLLQVPGLGDVTVLTLLTQLPELGKLSNKEISALVGLAPYARDSGKKTGRRAIFGGRTQIRSTLYMATLSATRFNKPIRLFYQRLLAQGKLKKVALVACMRKLLTILNSMAKTGSEWNPDFANQA

SEQ ID NO: 270189 - protein, 419 aa, unidentified
MAKIDTNLTGYVLVAIDISKNRHDILIAAPGKKRRRRVTLMNTFEDYRRLIDILRDYGCPVRIGFEATGNYHRTLVYQLAMAGFELQLISSVAIARTREALHNSWDKNDPKDAQVILHMLEIGAVQVFYDPLIAQTNDIQELSKTHDIVSQSKTQLWHRILTHYLPLYFPEADRFHRNSRTEWFLAFLEKFPSPHMISALSKEEFISQAWEVVGRKVEKKLLLSDIYETAKDSIGLPIAADSDAIRMFRMVLAEGRSLIRQRDTIEARADELLSNQEDYKLLRSIPGIGPISALTILAEAGDVRRFRHHRQFLKFCGMDLATIQSGMFRGRSKISKYGNARLRRMLWVAAHAAVLKQANSFRDKFERYISKDRHNPDLRRKAHTAIAAKMARTVHAVIKSGAPYRPFFEGTSPGGKTSF

SEQ ID NO: 270190 - protein, 317 aa, unidentified
MNDLNEHCLGIDISKAKLDVATSDGKHTHSFDYDEKGMEKLFALLTAFRPKLVCLEATGGLERSIVSRLHADKRDVAVVNPRQIRDFARDTGQLAKTDRIDAAVIAEFARLIQPRRTLPLSVSQQKMRGLTARRRQVSKLLIQERNRLARAVEVEVREMIEQAIEFYAQQLSTIQLSMETLIEQNESMRETSRIIQSVPGLGPATAALLLSEMPEFGQLNRKQIARLIGVAPTNRDSGTLRGKRTTGGGRVDVRNGLYMPTVVAKTHNPRIKAFYDRLVANGKPKLVALIACMRKLVSILNVMIRERTIWNENLITT

SEQ ID NO: 270191 - protein, 412 aa, unidentified
MQRVIGMDIHRTFAEVVFWEAGRLRPAGRIDMTRSGLEGFGRGLSKEDEVVVEATGNAMAVVRVLGPYVARVIIANPLQVKAIAHAHVKTDRIDAGVLASLRAAGFLPEVWLPDADTERRRRLVARRNQVVRHRTRIKNEVHAILQAHLIPPCPHADLFGRLGRSWLGRQELPDDEIAAIERHLRELDRLAEDIELLDREIAEEVIEDPSVKRLLTITGINIIVAAGLVAAIGDIRRFSSPQKLVSYVGLNPRVRQSGLGLAQHGRISKRGRSHARAMLVEAAWAASKAPGPLRSFFLRIRARRGHQVAAVAVARKLAVLCWHLLTKDADYQWARPALVAHKIRAMGLQAGLPTRKGNTRGEAYAYNIKELRNREIDVARHAEHAYEQFVSRWQRRGPGKPRRTGAANEERR

SEQ ID NO: 270192 - protein, 391 aa, unidentified
MTAVMIGVDPAKRSHAMAVLDGKENELAALQIGNDNAGYREMLRLAKKWPQRTWAVEGAGGVGVQLAQRLVSDGETVLDVPPKLSTRARIFDTGHGRKNDPGDARTIAIVALRTKGLRQVVLDDERIALRLMSDRRRELVRSRTQTVNHLHQLLMELLPAGAEQKLTATKAKALLATIRPRHAAGKARRQLAVDLIDDLVTLDRKIKDINGRLKTAVEATGTTLTQIKGVAITTAAVVLGEVGDVRRFPSKHHFASYTGTAPIEVSSGEVERHRLSRAGNRKLNSALHHAAMSHKRTDDAGIAYYGRKLADGKGKKGALRCMKRRLSDAVYRALVEDQARVGVADREGHSGATLDSSATARSPMDSTSEKSLTRPAAANATPSRTRVKKAS

SEQ ID NO: 270193 - protein, 428 aa, unidentified
MSNQDIIRHELFCQIVKEIHKSNEYLIVGIDVAKNKHHAFMGTTTGKLLLRKLIFGNNINGFSRLLKTVEAIKVQNGLSKIVYGMEPTGNYHKPLARHLISCDCNVVLVAGQAVKYNRQILDGRWDKNDTKDAANVADLVSRGKCLYYDCPSQSIIDIRVLLSLRKRLKKEEHSLRMRIRNNLLAKYFPELDTFYSACESETLSIVGWCLTPDTIASMEFSKFFQLVTKTRRGTAQTLRLRKIHGLAMESIGCPMGPASEYEAELLVEKLKQVRNQIKETNDLIEDFCLKFPEYNYLLTIPGFGPYISARVLASIGDPFRFKNQKQLIKMSGYDLCANRSGKTSDTAIPVISKKGNSELRYALYQAAKVATAKVDLFRAYFTRLLTGRERERGIKTKMCVKLAAKMLVIAWTLMKKREVFNPDYITIE

SEQ ID NO: 270194 - protein, 351 aa, unidentified
MSLQINIRVAVVGIDIGKNSFHIVGQDRRGEIVLRQKWSRSQVEARFANMSPCLIGMEACVGAHHLSRQLRALGHDARLMPAKYVRPYSKGQKNDFRDAEAIAEAVQRPTMKFVATKTADQLDLQALHRVRERLVSQRTGTINQIRAFLLERGIAVRQGHRCLRAELPRILATPSDTLLPRILRIIEALAVDLRRLDERIEGLSSDIEQLAKQDAGCERLTSIPGIGPIISSAIVAAIGTGDAFAKGRDFAAWLGLVPKQISTGDRTILGKISKRGNRYLRVLFVQAAWVVLVKVKPTRWAGHGIQPWIEAAKKRLHHNVLAIALANKLARIAWSVLAHGRTFEASKLQVA

SEQ ID NO: 270195 - protein, 344 aa, unidentified
MECYVGLDVSLKQTSICVVNEKGLVVREGVVDSVPEAIAGFVRSKAPGAVRVGLETGPTATWLWTELARLDLPVICIDARHAKAVLKMQVNKNDRNDAAGIARIMQTGWFKEVRVKDLDSHAVKALLASRALLVKIKRDLENQVRGLLKNFGLVVGHGTFNVFAVRAKELIADRPELTSAVSPLLTARTAIEQQIGELDRQVLKLSRQDAQARRFMTVPGIGPITALCFKATIDDPARFRRSRSVGAYIGLTTRRHASGELDWSGRISKCGDAMLRMYLFEAAGVLLTRVPKWSALKAWGTRLTKRNGLRKAKVAVARKLAVILHRMWVDGTEFNWSNNKEVAA

SEQ ID NO: 270196 - protein, 354 aa, unidentified
MNEITTVGVDLAKEHIVACAADASGRPVYFKQFSFSGFAEWAANLPPCLIGLEACSSAHHWARFLSAHGHTARLIAAELVEPFRFSRAAKNDRNDAEAILRAVLQPHMRFVSVKSAAQQAMLAWHRTRSGYLEERKGLISRTRGLLAEFGVWLPRSPGKLTRALPDLSLDERLPALFRPILAHTLEHLRQIDQRVEECDRIIHVHAKEHPEARRVQAILGIGAITSSALIATISNPRDFRNGRQLSAWNGLVPSQHSTGGKSRLGNITKRGDTYLRGLLTQGARSTLQVALKREPLRRSRLEQWIVALHGRAGYHKTLVAIANKHMRIIWAILAHGEDYDPNAWRRHPRAALSA

SEQ ID NO: 270197 - protein, 412 aa, unidentified
MKDLLEISCGLDVHKEKIVACILTGPLGKPTRSEIREFSTLIPDMIALRNWIVSKNCHHVAMESTGIYWMPIYEILEDAFYGDITLLVVNARHMKNVPGKKTDMRDSEWISTLLRAGLLNGSFIPEKRIREFRDLNRYRKSVIRDITSQKNRIEKFLQSSGFRLSSFISDIFGASGRNIILHLIEHGQIDKTALDSCLKTKTRNRIDEILMSVNGTLSEHQKAFLRILMTHYDSLKKHLAEIETSLEKDMAPFALQVEQLNSIYGISTTASCAIIAEIGIDMKPFKTAEHICSWAGLCPGNNESAGKRKSTSVTKGNPYIKSMLCEIAWVIAGKRNTYLSAWYWRIKQKKGAKKAIVALARKLLVIIYTMLKQGTLFDESCFETRRKHCEQKQLSRYIRELEKHGYHVEAQS

SEQ ID NO: 270198 - protein, 269 aa, unidentified
MTNLKKSKSVVNVGVDVGKESLDIYIYEKGHYWQDENTPTGVKRILKRLAHYQVERLVMEATGRYESLLAEAAHNRHIPVCIAKPSSVRQYAKAINLAAKTDKLDAELIAEFAAIVQPEITPKKSKNLIAIKDLMSRRRQIMGMRTKELNRLKIMGKGFEVSCKRIIRCLDLEIKRLEKRLSKHVKDQADWTEKQTILKSAPGVGDTLIYTILADLPEIGSLNRKEISALVGVAPINRDSGKMRGKRRIKGGRYAVRTVLYMATLSATL

SEQ ID NO: 270199 - protein, 314 aa, unidentified
MISAAPIFTRILGCDVSKDSVAIYDTHTGQLFSVANTTEDLARFLVDLGSETLAVCEATGGYERVLLEALLGAGVPAHRADTVRVKAFIRSRGVRAKTDAIDARGLARYGQERGGELALWVAPDGERLRLQALVVRRSELVAVRTAEINRSKAPGAALLAASHHRLLAFLESELQELRREIDQLVAASERLQKTLQCLMSIPGIGALTAVALVALMPELGTLHGKQAACLAGVAPHARDSGTYRGYRTTGGGRRTIATLLFMPALAAARAKGPLRSWYQSLIARGKPKRLVLTALMRKIIVIANARIRDMNLQN

SEQ ID NO: 270200 - protein, 419 aa, unidentified
MPYRIAGIDVHKKMLAVVVADIELDEEYRFERLKVGTSPAELRTLADWLVQREVEEVVMESTAQYWRPVWEALELHWRPKRRAREGATPVSGTLHLAQAQSNRGAGGRKKDFPDAERLVKRLVAQELTLSFVPDAEQRLWRTVMRRKYQVTRNRVQLHNRLESLLEEAHIKLSSVVSDLLGTSARRMLDALANGETDPATLAALADQRLRATPDQLRNALDACGDLHPVYRRLVKLTLEELRMIEDHLGQLDQQMAALLSHHHDAVHRLAEVPGLGVDSAQQIIAEVGATAATFPSAKHLASWMGACPGTEESAGKNYSHRCPKGNRQMRRVLNQAANAAVKAKGTIFAIVYRRLVPRLGHGQAIGAITHRLCRLIWKILHQGMRYEERGPAVSAEAKKARARKMIRELRTLGYSVELL

SEQ ID NO: 270201 - protein, 391 aa, unidentified
MIYIGIDVAKDKHDCFITNSDSEVLFKAFTIFNNLDGFNDLYQKIESVMDDVTKVKVGLEATGHYSYNLLGYLIDKGLPTYVINPLHTNLYRKSLSLRQTKTDKVDARTIASMLMSDVNLKSYSDTSYHNEELKSLTRYRFDKVKERAKLKSSVSRLICILFPELEKLVPTLHMASVYALLSEFPGAKQVANAHLTRLTNLLSEASKGRYSKDTAITFRDAARTSIGSNMPAKSLELKHTIKLIKELDSEIDEIENEIKIIMDEINSPILSIPGINYRMGAMIIAEIGDFSRFDSPDKILAYAGFSPSTYQSGHLYGAYAHMEKRGSRYLRYALYNAAKYVCHWDPTFTAYLAKKRAEGKHYNVAISHAVKKLIRVIYHLEKTNQQYIKAS

SEQ ID NO: 270202 - protein, 418 aa, unidentified
MDIRSPFPYKATVGIDWADQKHDVFVRFANGDSYRRKIDSRPEALQEWLLELRSACAEGKIALALEQRRGALFYQLCTHLNWIDLYPINPHSLASFRLTFFSSRAKDDPIDSQLLEELVRTHSDRLRPYQPESTTERKLDQYCRHRRSLLDLATKTELKLISTLKQYFPLAVNLFAAVGLKSDIALSFLSRWPTLNELQRAKAHTVRSFFYAHNSRSRSRIEKRLQQIGQAHNVTDDLALIEPLVLTTKCLVGQLRQFNQAIKEFDHKIKELFKSHPDHFLFESFPGAGEQLAPRLLSVFGSDRARWADATDIQKYSGIAPVIERSGKSVWVHRRLSRPKFICQTFHEFAQQSVQHSSWAKQFYQRQRDSGKSHHSAIRALAFKWIRIICACWKANKPYDESFYVQALTGKNSPLPMT

SEQ ID NO: 270203 - protein, 411 aa, unidentified
MQVVYNRCAGLDVHKKTVVACVITPKSSSGWHKEIRTFTTMTQDLLKLSDWLTSHNCTHVAMESTGEYWRPVFNILEGNFEVMLVNARHIKAVPGRKTDIKDSQWIAELLQHGLLRASFIPPVEQRDLRDLTRHRSNFIRERVNLVNRVQKVLEAANIKLASVASDVMGVSGRAMLAAIVEGSASPELMADLAKGTMRKKHDLLIQALEGRVRPHQRFILAQLLCQIDSIDETIKCFDQQIEEYCRPFDQAVELVDTIPGVARRTAEIIVSEIGTDMSRFPSAEHLAAWAGVAPGNYESGGKKLCDGTRKGNRVLRTILVQAAHALARTKTYLAAQFRRLSARRGKKRAAVAVAHSILTIAYHLISRQEPYKDLGADYFDKHRHVSVKKRLIKRLEKLGYQVSVEPVPVAI

SEQ ID NO: 270204 - protein, 355 aa, unidentified
MNVYTGIHSYYCGIDLHARTMYVCVLDKDGQKVYHKNIACTPQRFLEAVEPFRGDLVVGVECIFCWYWLADVCEEEGIDFVLGHALYMKAIHGVKTKNDRIDSLKIARLIRGGNFPVAYVYPPEMRATRDLMRRRNHFVRKRAELLAHIQNTTMQYNLEPLGTLSRPHHRRDKDIVGHFPDPVVRLIVETDLTLIDHYDPIIKKLDKQILVLAQGHDATSLHLLQSIHGVGEVLSLTMLYEIHDIGRFPSRGEFCSYARLVKGQKSSAGKVYGTTGKRIGNAHLRWAFSEAAVLFLRKNKDAERYYNRLINRHGKSKALSIVAKRLGIAVYYMLKRGNPFNPKMFLQSNMTTKKA

SEQ ID NO: 270205 - protein, 339 aa, unidentified
MQNYYVGIDLHSNNCFIGIIDQDGKRMFSQRVLNDISRIIATLNPFKEKIKHIAIESTFNWYWLVDGLMSEGYSLKLANVPAMKQYEGIKHTDDQSDAFWLAEMLRLNILPTGYIYPKEQRPMRDLLRRRLQLVHHRTALSMSMSSMIQNCTSINLDRYEKKNLTHHEITCLLDHPYQVMSADTIQNVISEINKNIDAIEKEIFSKIKLTTRYKKLTSVWGIGEILASTIMLETGDIRRFKDVGDYASYCRCVPTIKLSNGKPKGKGNKKCGNQYLAWAYLEAAYCMQRAYPKAKQWFLRKLKAKGRFIAIKALASKIARACYLMMKNNIVFEPSKLFA

SEQ ID NO: 270206 - protein, 330 aa, unidentified
MKNYQDVIGIDVSKLTIDAHIYKRGLHRVFSNTPKGFKALLLWVDKCLGGQFYFLCFENTGHYSTSLSVYLSENTIDYVEENPLAIKKSTGIVRGKTDRLDAGMIARYAWLHKEELVLSTPKEQDIQELGRLLSFREQLVRDRTGKMSSLKEMQSLLNSPSTDSCCRIIIKTIHYLTKQIEALEDRMKILMKKEESLKKNFELLNTLKGVGLVLSCQLLYHTNNFKRFNNWRQFSSYCGVAPFEHSSGTSIRRINRIHHIGDRKMKTLLTLASVSAIQCDKELKYYYKKKVAEGKPKMVALNNVRNKILSRAFAVVKRGTPYVPMRQFAA

SEQ ID NO: 270207 - protein, 435 aa, unidentified
MEEVTDEPLYRDRVCGIDIGKAGIAATIRVPSEKNPARRASETREFATTRRGVLALADWLRCWQVPAVVMESTGDYWKPVFYRLEAEGFECVLADAKQVKNLPGRPKRDPSDSRWLAACFERGAIRSCFVPDPEFRIIRLHTRYRRDLTDERTREKNRTEKLLESAAIKLSSVVTDLHGVTGRDIMEHLIAGERNPKVLAQLARARARRKITELEHALDGAEFFAAEHAALLTTMLARIDRVNEEIARLSEVIERLLAPYEEQLQQAESMPGWGRRSAQDAVAETGVDMTKFPTGGHLSSWAGKTPLDHQSGKRTGRARHKKGNKYLGAVTGETAVAAGKTATREGARYRKLARSRGKGKAQVAIGNTQLRVYHKLLSNPGMRYQDLGPDYHQRQAALRRKIAYHVREIEALGLEVTLARIPEPGPEGPATTQAA

SEQ ID NO: 270208 - protein, 318 aa, unidentified
MDHFAGLDVSVKETSICIVDETGRIVREVKVASEPQALLKVLGNQAYRFKRVGLEAGPLSQWLFSALAEAGLPAVCVETRHMQAVLKAQINKTDRNDARGIAQMIRAGLYRPVHVKTLRSQKLRMLLTHRKLLQSKAIAIENDLRGTLRNFGLKVGMVGKARFEARIQELVENFPDLGVLVEPLLVVRRALREQIVLLHRRLLAIVREDEVCQRLMTTPGVGPVVALTCSKYQSGEIDWSGRISRCGDEMMRVMLYEAAQSMLHSKKWSWLKAWAMQIARRRGMQKAIVALARRLAVIMHRIWVDGTEFRWTREVAAA

SEQ ID NO: 270209 - protein, 419 aa, unidentified
MSFKILKNNCCGLDVHKTWIFACIGLTDSNKRTVYKQARFSSFTKGLQELCHWLAKYDCTDVCMESTGKYWIPVFNILEKNNIWVTLSHPKYTKPQKGNKTDRKDAKWICDLYMCGIVKPSFIPPADIRELRDLVRYRFKLTCMITGEKNRAHNCLTVSNLKLDDVFSDIFGRSSRSITEQILQHPGETFDVAPFVHGRCKTPIEEIQAAVDGAVSKEQAVKLRQCLNHIDELEMHKSEIEREIFRLSDKYEDILTLIRTVPGFDKNPMTAIQVLSEIGGDMSVFPTAKNLVSWAGCCPHNDQSNHKIKSTRISRAGSYFKPVLVQVANALIKSKKHPEFSTRYRRIKARRGHKKAIIAICRMILTAIWHILTDLKPYTAKGFLEPRPVSKEKVLTASQALNLLKQRGYVIKDEPIFIS

SEQ ID NO: 270210 - protein, 352 aa, unidentified
MQHFIGNDLHPRYQVVAWIDEETGEIRKRRLEHTGDEVRKFYAQFPAGAVVGIEATLPALWFERLLGEVGHELWVGDAARIRASEVRYQKYDERDAGDILDLLRTGRFPRIWVPSAEERDLRQLLVHRMKLVRARTQVKNQLHALAISQGVCRQSKLWSAQGRKELESLALLPWAARRRKELLEWLDRLDEQVRELDRAVEEAGREREAVALLRTHPGVGMVVALAFVLTVGPIARFLSSRKLVSYLGLNPRENSSGGRQRLGAISKQGNTLMRWLLVEAAQTAARYDPELRRFYQRLKSRRHSGVAKVAVARRLAIRLYWMLRTRHNYAQLVHTSGSPSSAVIPPSAEPTV

SEQ ID NO: 270211 - protein, 319 aa, unidentified
MDETRSEPCFVGIDVGKAHLDIFIHVVGHPSGEGFRLNRDPAGLDELLARLKPRAPALIVLEATGGFERVVTAALWGAGLPVAVVNPRQIRDFARASGRLAKTDRLDPQIIARFAAAIRPDQRPQPDAAACELADLLARRRQLVEMISAETMRSHQARLPAVRRRLAAHLDWLNKELSQLDADLDSAVRASPAWRERAALLLSVPGIGHASTRTLLADLPELGSLDRRRIAALVGLAPVAHDSGQHRGARHIQGGRGTVRAALYMAAWIASRCNPVLKDMYQRLRAAGKPRKVALVACMRRLLTILNAMVRDNTPWRAA

SEQ ID NO: 270212 - protein, 411 aa, unidentified
MEPLYRWVAGIDVHKKMLAVVVRAPQGEYVQRKFGTTKTEIGHLAAWLQDHQVSEVVMESTAQYWRPVWYGLEAHFKLHLTHPLKTRAPRGRKADFRDARRLADRWHSGDLEDSFIPGAEQRSWRWLTRSRVHLKRMLGVIRNQVEGLLEQGGIKLSAVASDIFGVSGWAILERIAAGESDVDKLVDEARGVLKRKKSKLREALQGKLDPIYHLLLKQHLAQAQLLCQQVEELNQALAEALKEHVAVLCRLTKVPGINLYAAQELLAEIGPGAVAFPSPEQFASWVGVCPGSQETAGVNYSRRSAKGNRYLRRLLCQNAWGAIHTKNTFFAGLFARLKPKIKGKGAAWAMAHRIAKLVWLILHEGVEYVEKGTAPLNPRTLVRKFRRLLREFDRHGIDAKSLLEQELVATS

SEQ ID NO: 270213 - protein, 339 aa, unidentified
MTHTIVGVDIAKRVMQVHWVDPESGEIVNRPVKRAAFLEYFANRSPCLIGMESCSGSQHWARRLIEMGHRVKLMPAKFVKAFNIRNKNDAADARAIWMATQMDSKEVAVKTEAQQAVLALHRMRQQLVKFRTMQINSLRGLLTEYGEVMGVGRAALDKAIVGVLEKLSGRLPAILIDTLREQWKGLEDLDRQIGQIERRLQEWMKDDQAAKLIAAIPGVGLLTATAAVATMGHAKTFKSGREFAAWLGLVPAQTGSGGKIELQGISKRGDTYLRTLLVHGARSIIYRVKEPGPWVTQMKQRRPLNVVIVAMANKLARIIWAILAHQLPYRKDYESIRPI

SEQ ID NO: 270214 - protein, 423 aa, unidentified
MKYALVRVLPDVPPGGVCAGIDWAAADHAVCVVDMAGRVTDRFTAAHDKAGICALIARLGEGGAGEVAIERGDGVLVDALLAAGLTVVVVGSRQVKNLRSRYLSSGAKDDRFDAFVLADTLRTDRVRLRPLVPDTPATVALRAAVRARKNLIAHRVAACNQLRAHLMLAFPGAIGLFSRLDSPISLAFLAAFPSQQAAARLDEQALARWLGAVGSRGNAAPAGVLHARLQAAAPGAAGADAALAAVTAGLAGTVAGLAARIKDISAQITAQLAAHPDGRIFTSLPRAGTLRAARLLAETGDCRARYPDPWSLAAVAGVTPVTRQSGKGTSHDFRYAANRQLRDAWCDFADGSRHASPWAAGIYHQARARGKDHPHAVRILARAWILIAWRCWHDRVPYDPAKHTALQRILTRSSPPAQGTTHG

SEQ ID NO: 270215 - protein, 513 aa, unidentified
MHHRRQRSGRSARIPKVVNNFAAADSGSGEQLATAETRLFEPCPTRADRRLPTPPPAPGPSAKRTSPLEGSHIRSRPSQVPAPLRAARIMNSNWNEQPYFAALDWAKDHHDVIVVDRVGTIVADFQFAHTAPGWEQFNCQMQPFGKCPLTIETSVGMAVDQLLQRGYPLYPINPLAAKEYRRRKTPSGSKTDRHDAWSLADALRIDGQGWRPLHAQDEATAILRVLCRDEIGLIETRTALVNQLQATLGDYYPLALDSFDDWANPAAWAFVRTFPTPAELAQAGKRKWQNFLHQHKLWRPQTAPQRLELWAQGQQLNASAATVTAKSLLALSLVKVLDTLQRQIQEYRSRITQAFKKHPDHDIFGSLPGAKQTLAPRLLGLIGSRRELFPDPDSLMCQAGVSPVAYQTGKLRKARIRWACDHFLRHTIHLWVDQSRRKCDWAQTYYQAKKDNGHDHASALRCLGKRWLKVLWRMWQDHTPYDEAKHLRALQHHASFVWQALQNTPTIPQPACE

SEQ ID NO: 270216 - protein, 313 aa, unidentified
MKPSPVFVGIDVSKDKLDVALWPTAECWSIVPDQPSLKALAARLLSLSPALVVLEATGGWENLALAVLGAAGLPVSRVNPRQVRDFARSTGQLAKTDRLDALILARFAQAVNPPLRTLPEQAAQELAGLISRRQQLLDMIVAEKARQGTSSRPIGRQIARHIAWMQKALQQVDEDLDRAVKANPAWEALDHLQQTVKGVGPVLSRTLLALLPELGHLNHKQIAALVGVAPFCCDSGQWHGQRRIWGGRAPVRRALYMAILSACRHNPKIQPFYARLLAAGKPKKVAQVACMHKLLIILNAIVKEHLFYCPAQP

SEQ ID NO: 270217 - protein, 408 aa, unidentified
MDVIVKRCAGLDVHKRTVVACIRIVSSGEVVREVRTFGTTTKELLDLFDWLSEHDCTHVVMESTGVYWKPVWHILESGFELVLANAKHVRNLPGRKTDVSDAVWLADLLAHGLIRGSFVPPLPIQDLRDLTRTRKQLRQEMSRHVLRIHKILEDANIKLCGLVSDILGKSGRAMLEAIIAGESSPEALVAVTNGRLKASRESLEAAALGTTRDHHRFLLQVHLKQIDELETAITSLEAHIEKVVQPFREHLERLVTIPGVSLIVALVILAEIGVDMSRFPTVLHLISWAGLCPRSDESAGRHRSTRLKPGDPWLKTILVQAAWAAVRVKDSYLRAQFLRLKARRGPQKAIIAVAASILTATYYILRDRTTYVDLTANHFNKADKHKTADRLVRQLSALGYSVRLEAAA

SEQ ID NO: 270218 - protein, 343 aa, unidentified
MEYYAGIDVSLEQCSVCVMDASGKIVRETKVASEPAALSRYFAEFELPIVRIGLEAGPLSQWLREGLVNAGFDVVLLETRHVKAALSAMTVKTDRKDARGIAQLLRMGWFRPVHAKSADAQAVRALLVGRKLLQAKLRDVELSIRGILRGYGLKVGEVSRGRFDARIRDLIEGHDMLTTVISAILKARAALWDEFTRLHREMLKIARADPVCHRLMNVPGVGALVALTYRSAVDDPERFSKSRTVGAYFGLTPGKYQSGETDRDGGITRVGDAMVRTALYEAAHIMLTRASRFSALKGWAMGVAKRRGMKRAKVALARKLATVLHCMWIDASAFRWGKEVVTV

SEQ ID NO: 270219 - protein, 355 aa, unidentified
MNDTKYIGLDVHQATISAAVLDSTGKLLMESVLETRASTILQFIHGLRGSVQVTFEEGTCAAWLHDLLQPHVANVLVCDPRKNALLKSGNKNDRIDARKLADLFRSGLLCPVYHGENGVRALQELARSYLALNRDVTRVMNRVKAIYRSWAIPCAGQRVYAPRYRSEWLGKITEVAVRRRAEIYYQQLDGLRSLRQQVRRDLLAESGKHGATKLLRQIPSIGSIRAALLIALMQTPHRFRTKRQLWAYSGLALKTSASGEYRFEEGQLKRSKKFLAIRGLNVNHNPDLKNIFKGAAIRAAAVPGPFQQFYAALVATGMKPTMARLTLARKIAAITLIVWKKGVRFDAQYLKQQAA

SEQ ID NO: 270220 - protein, 370 aa, unidentified
MKKYSEAFVGLDTAKKKHALAVADGGRNGEVRYLGELDSSPATVEKAIGKLADRYTRLHVCYEAGPTGYGLYRQVKALGHDCTVVAPSLIPKKPGERVKTNRRDAVTLARLHRAGELTSVWVPDATHEAVRDLARAREGGSEDLRKKRQQLLAFLLRHGRLFSGGRHWTLAHLRWLAHQSFEHPAQQIVFQDAIHAIEDAAARLQSLDRQLAAIVPDWSMAPVVAAYQAMRGVSFLVAVTFVAEIGDVRRFDNPRQLMSFLGLVPSERSTGEAVRRAGLTLAGNRRARRALIEGAWTYRYPARVSETLRARLEGLPKPVRDIAWKGQLRLCARYRRLVAARKKTPVVIAAIAREMAAFLWAIGHQVEPLT

SEQ ID NO: 270221 - protein, 348 aa, unidentified
MQFYTNLHPFYCGIDLHARMLYVCILDERGEILVHKKIKDSSEELLKLLSPYIGNIVVGAECMHCWYWLSDFCEHHNVDFILGHALYMKAIHGGKTKNDKIDAYKIAKLMRGGNFPLAYVYPKEKRAIRDLLRRRTHAVRHSAELKAFIKNSLSQYNLPVPEKSDLSYTTGRNAMRGYFPNPQVQRSIDMNLRLIEVYDHEVSSIECHVEKLTKHDNGRDYYLLRSLPGVGRVLALTILYEIGSIHRFDSVQKFASYSRLVKCKAESAGKAYGTQGNKIGNAHLKWAFSEAAVLFLKGNPSAQAYLLKLQKRMSKAKALSALAHKLGRCMYFMLKNQTVFDSERFLAG

SEQ ID NO: 270222 - protein, 342 aa, unidentified
MQDINRVAIDLAKNVFQVCALNSHNKVLFNKKLTRKKFTEFMAQLPASTVYMEACYSSHYWGRTLQDMGHRPFLIPAQHVTPFVRGNKNDHNDALAIAEAANRPGIRFVPIKTVQQQEIMAMHRIRSRLVKSRTQVSNQARGLLSDFGITFPLGAKSFIDAMAALQDNELLSLPFRQLMLDMSKEFHEITERINTIENRLKAYVQRTDNCTIVSSVPGIGVINASALVASIDKGQAFNNPRELGVWLGLTPRQYASGEKSRNGGITKHGDRYLRTQLIHAARAAKKWSRKRDDQLSLWIKQLEARVGTHKATVAIAHKLARIIWVLLRKQQTFVPQYPQKMK

SEQ ID NO: 270223 - protein, 345 aa, unidentified
MKYIGIDYHKQYFVATMMNEQGKVIRKDKASTDRASIRQYFQDADLSGGSKAVMEACYGWEYFYDEASDLVDELIMAHPLKTRLIAEARIKTDTIDSETLAHLLRADLIPEAYAPDSETRSKKNLLRYRSALVAMKVRIKNIIHSVLTRNHIEDHGFTSLSDKFGKQGLAYLRAVTLRDNDTAILHDYLDILDATESKIKEAEKRIRVVCREDKICALLQSIPGIGPILAVTIRYEIDDIERFMSSGKLCSYAGLVPSTYSSGNRTYQGKITKQGNKWLRWAMIEAAQQAPAKDLWLRGFYQRISKNGKKIARVAVARKLLEIVYRIWREEKPYYKKGTVALHFV

SEQ ID NO: 270224 - protein, 356 aa, unidentified
MTNAIPMDVIIGVDTHKDVHAAAAISGAGIYLATITVPASSNGYGALEAWAKSMGAVQAFGIEGTGSYGAGLSRFLRERGHTVVEVNRPNRQLRYQQGKSDAVDAESAARAVLSGQAVGQPKSGTGTVEMIRHLKIARDTAVKARTQAMQTLKAIIVCSPDALREQLDQVSGKMTLLRRLVALRPGPLTSTLASAKASLRAIARRWLLLDAEIKQHDAHLETLTAARAPELLKAHGMASGTAAEMLLLVGDNPERIHSEAAFAKLCGACPIPASSGKTIRHRLNRGGNRQANAALYRVVIIRMRGHRPTLDYVRRRTAEGKSKPEIIRCLKRYVAREIFGYLCRKPALADAAATSS

SEQ ID NO: 270225 - protein, 441 aa, unidentified
MQVPNPLDLPIINPHAAGVDVGSEKFFVSVGGKEPRVFLTVTSQMQEVCEYFKAEGVRTVAMEATGVYWINLHGALEEAGLEVVVVNGAHCRNFPGRKTDMQDCQWIAVLHAHDLLSGGFVPPSAIRRLRDYMRLRGDLVSMAAQHVQHMQKALDRLNVKIHVVISDITGWSGMRIIKAILAGERDAEKLVTLCDPQILKTKKAPMIEALRGLWRQEHLFALRLAVESYESYQQQISQCDAQIAEVIKELSEGRATPPLSPPKELRHNAIIIEGLQQQVAQIYSKDLTRLPCINESTAALLLSEIGNDMSRWPDWRHFGSWLALAPCSAQSGMKRRRVKRYLTRAGQILCRAVQCMAVGKHSWLASFYRRIRAKRGAKVAIKATAYKLAKLIFLVLTKGWEYVEQGIAKYEERIRQMRLKALQKLAKELDFVLLPKNMANS

SEQ ID NO: 270226 - protein, 326 aa, unidentified
MEKDTTYVALDDSKRTITAGILRPGEGEPELRQIPNEARLLRRLVERLTREGPVRVCYEAGVSGYDLHRQLTGLGVPCDVIAPALTPRRPGQRIKTDRRDAAKLVRLSRAGELTAIHVPNEAEEAVRDLLRCRDDIREDVVRWRHRLVKFLFRHGRVYRTGTHWRQAHWTWLRAQRFELPALQRTFDATLFAVEQAQARLVELDREVETLAERAPYCEPVGWLRCFRGIDTLGAMILLAELVDFQRFRTPRELMAYVGLVPREYSSGDTERRGAITKAGNTHVRRILVEAAWHSRHGPRLGRAKLVRTDLDSGAIGRLKEAGVPSR

SEQ ID NO: 270227 - protein, 333 aa, unidentified
MNYAGIDVSHKELVIVVSVKGKAHKAKTFENTASGHKAIIQLLSKLKGESKVCIEATGVYHFDLAVALSRAEGIEVMVINPKASHNFAKVLMKRSKTDAVDAEILAIYCERMPFEAWQRPADEHIALRAMARRIAALTKLKTQTKNQLHALKATEETPVLVIEYTEELIEVVDKQIQVHRESARQLIQQHDELADAFALITGIKGIAVASAVQMLGELMILPKDMSAKQWVAYAGLDPRQFESGSSVTKKPRISKAGNKFVRRALYMPALVATCHEPHIKGYYTHMIQDNGLKKIQAVCAVMRKLLHAIHGMLKAKKEFDGTRFYTFPVEANS

SEQ ID NO: 270228 - protein, 424 aa, unidentified
MKTESADQIDFAAFVGLDWADQEHAVCLEASGSTTVETRVIKQTAQALGEWANELRVRFEGRKVAVCLEQSKGALIYALMSYDFLVLYPVNPQTLAKYRKAFRTSGAKDDPDDAGSLRELVKLHRDRLRAWVPDDVQTRTLQMLVESRRRIVRERTRLTNRLTSLLKAYYPQALEWAGELKSLRACDFLKKWPTLEAVKRAKASELKKFYRQHGSRNEEVIEERIKQIRASDPLTRDQAVIRSSAMVVEAIVSQLPCVIRAVEQFDQEIARVFQQHPDHELFNSFPGAGSALAPRLLAAMGSDRTRYESAKEVQQFSGIAPVTQRSGKSKCVHRRFACPKFVRQTFHEFAKHSIVWSKWAHTYYDQQRLRGKHHHAAIRALAYKWIRIIFRCWMDRTIYNEQAYVEALRRRGSRLIPSPASSDS

SEQ ID NO: 270229 - protein, 474 aa, unidentified
MRNPGWNVKKPLVEFSATPKACDDFNGGSALTETPIRIVSMQRYILLKPFLITKNKKMAKKEIGMQIVNPNAAGIDVGSRSHFVAIGQRKDDVKEYGVYAEDHQNLIKWLLENQVKTIAMESTGNYWQNLFSALQDAGFEVLLANGKFTKNIKGKKTDVQDCQWIQKLHSLGLLSTSFLPDETTEQLRTYCRHRSNQLEMAASTSKKMQKYLRLMNFRLDVVVNDVCGLTGLGVIESICNGESNPQKLASLRHGNCKKSEEEIAKALQSNGRKDYLFALRQEYQIYRELQIKIMACDQEISKFTIDYVNSNQALKDLKTQDKIHKKVNKNCIKSMDLNQIAFKYFNGVDLLQIEGVSHGTILALMSEIGPNGFQKFSTARQFASWLRLVPNNKVSGGKILSSKIPRGSNRLKIALRQSANAVGNLKNANLYNFFIRISIRKGRSAAITATARKLAIIIWNMVVKKVAYNPPNQY

SEQ ID NO: 270230 - protein, 385 aa, unidentified
MIKLDRSDTPAVAEHATVYLAFELSKAKWKLGVLLPVSQKLSRYTIGGGDLVALAARLADMRKKAAAAGRPVRILSCYEAGLDGHWLHRWLTEQGVINHEIDPSSIEVNRRARRAKTDRIDLEKLMRAFLAYLRGEPRVCSLVHVPTVEDEDRKRRTREREHLIKERTAHTNRIKGLLHGQGIRDVKPLDRSFIERLTHLRTGDGRPLPPRLIEEITREHQRLCLAARQIKELEAKSKTELQTAMPGSPEARIMQLIDLKGIGPVGGQGLVNEVFYRSFDNRRQVGSYFGLTGTPYDSGQRNREQGISKGGNRRARGLAIELAWLWTVHQPDSALTRWFRERVGDIKGRIRRIAIVALARKLMVALWRYLTTGVIPVGAVLRPSS

SEQ ID NO: 270231 - protein, 307 aa, unidentified
MVDKVTEAAVVGGVDTHKDLHVAAVVDQNNKVLGTQYFSTTRQGYRQMLAWMTSFGTLKRIGVECTGTYGSGLLRYFQNAGLEVLEVTAPDRMERRKRGKSDTIDAECAAHAAFSGIRTVTPKTRDGMIESLRVLKTCRKTAISARRVALQIIHSNIISAPDELREQLRNMTRMQLIRTLGSWRPDASEYRNVTNVYRISLKSLARRYLELHDEIADLDVMIAAIVDELAPELIKRNAIGYESASQLLITAGDNPQRLRSESGFAALCGVSPVPVSSGKTNRYRLNRGGDRAANSALHRGRFRLRAK

SEQ ID NO: 270232 - protein, 429 aa, unidentified
MNYNTQNAKIASITEKTLIIGIDVGSETHYARAFNWRNYEYSKKPFAFSNDETGFAAFKKWMNDIAEKHGMEVIIPGMEPTGHYWLNLGAYLQEQGMKPVHVNPHHVKKSKELDDNNPSKNDRKDPKTIASLVNEGRFSYPYIPTGIYAEIRNLSNLRIQTQEEITRIKNRMARWFSIYFPEIKNVYRNPDAVSGLMVIKQAPLPCDIRELGVEGVNKIWRDARLKGAGIKRATTLVTAAEHSIGNTEAPRSARKEIRNLLEDYEGYKKRMDELMEEIEKTLSEIPYIDKLMEINGIGIKTVSCFIAEVGDIGRFDNPKQVQKLAGYAIVADSSGKHNGESRISHRGRKRLRYALYEAAISVIGKNKEFKEIHSYYRTREKNPLKKMQSVITVACKLIRIFYTILTKGVDYDGQKMLNDIVRPEIQPAA

SEQ ID NO: 270233 - protein, 401 aa, unidentified
MQQRLWAGIDAGKTAHHCMVVDADGQRVLSRRIDNDESALLELIRAVTSLAEGGHLTWAIDLNAGGAALLITLLLAHDQELLYIPGRTVHHAAGSYRGDGKTDAKDATIIADQARMRRDLHPLRRGDELVAELRILTSRRSDLSADRTRTINRLRDRLGEYFPALERAFDYSNNQAALILLTGYQTPAALRRIGTARLETWLQNRHARKVSSVAASAVAAAHTQYTVVPGEQLAADLVARLTQEVIDLDAALKEIDVMIEDRFRRHRYAEIIVSLPGFGPRLGAEFLAALGGDIALYDSADRLAGVAGLAPVPRDSGRVSGNLHRPRRFNRRLLRASYLAAQLSIRHDPASKHHYDRKRAEGKRHTQAVLALARRRNNVLWAMLRDRTHYQQPTGDPATAA

SEQ ID NO: 270234 - protein, 332 aa, unidentified
MKKVQFFVGIDVSKATLDVFIHGLNLYFVVENSLQGFVCLLEKVLTGTKCKKEDVFFCFENTGKYSRMLSVFLQSENILFTMESALQIKKSLGITRGKNDKIDAKRIAHYAYEKRENLMPTILPGAKIDQIRALISLREKLLKHRTAYKNGISDLHDCYEDGESELLKEIQLRLISNLNEEITRVEQKIESIIESVESISSNYKLILTIRGVGKILGFYMIGYTANFTSFANARAFACFAGIAPFSYSSGTVKGTPRVHPFANKMLKALLNLAAMAAIKYNGEYLQYFNKRVNELGKNKMSTLNIIRNKIVYRVFAVVQRQTPYVDLFKFAA

SEQ ID NO: 270235 - protein, 493 aa, unidentified
MNNFAATHNGDGEQLAAPKTRLPSPYATSVRERSPTSAAAPGPSAERTSPQEGSCIRSRPSRVPVRGRAFTSVNTNWNEQTYFGALDWAQDHHDIIVVDRLGTIVADFQFAHTAEGWKEFDQKMQAFGKCAVCIETSSGPAVDQLLQRDYPVYPINPKAAQRYRERKSPAGTKTDRHDAWSMADALRTDGHGWVKLLAQDEATSTLRLLCRDEHVLIEQRTALINQLQAALREYFPLALESFEDWTRPFAWAFVRAFPTPQALSKAGKRKWQKFLHTHKLWRPDTAEARLELWQQGQQLNSSAPVTRAKSLLALSLVNVLQSLQKQIDQYREQIRETFKNHPDHDIFGSLPGAKDKLAPRLLAEIGARRDVFPDSDSLNCRAGTSPVSFQSGQIRKARIRWACNGLLRHTVHLWADQSRKTCLWAQTYYAAKRASGHSHASALRCLGKRWLKILWRMWQDRTPYKESVHLESLKTHGSFVTELITGQSATACE

SEQ ID NO: 270236 - protein, 380 aa, unidentified
MKRVYDNCCGIDVHKKLIVACFKQGSEQEVREFGATTRELLELCRWLKDGDCKMVAMESTASFWKPLYNILEASELDAIIVNARHMKNVPGRKTDVNDAEWIADLLQHGLLQASYIPDKDQRELRELVRYRKSLVGERTRELNRLQKMLEGANIKLSGTVSNINGKSARAILEHVLTGESFDDAKYDEMYENNVISHRLKASKEEIIDDLNGVMSALQRRMMKELLIHLDELNIHIRNLDDEINNFMKPEAKTASVALQEMPGIGETSAQAILAVIGTDMSRFPTAGHLASWAGLCPGNNESAGKRKTGRTTKGNCLLRETLITCAHAAILKKDTYFYAQFQRISAHRGKKTSLCRCCSFHADSDIPHAQGWCSFQGSWS

SEQ ID NO: 270237 - protein, 349 aa, unidentified
MSHYAGLDVSLEETAICVVDSTGRIVRETRAPSEPEALIAALREIGLPLERVGLEACSLTAWLHDELRSTGLPAICIETRQANAAMKTMPNKTDRNDARALAQIMRTGWYRQVHVKSRQCRLWRSLLVARRTVLNEMRSIENVVRAVLREAGVKLGTPSRAAFAGRVRELAGDDVALKPLVEPLLAILATMLDQLAGLTKQVLDIVRGEEVCRRLMSVPGVGPITALAFRATVDRPERFRRSRDVGAHLGLTPARYQSGETDIQGKVSRCGDELARTALYEAAHTLLVRSKKWSSLRAWGMKVAQHRGMARARVAVARKLAVVLHRMWRDQTAFRSGKEPGGGAGLAAA

SEQ ID NO: 270238 - protein, 436 aa, unidentified
MSKSQNPTKEVIPIMKKRIYRRMPVNDFQPQSLSPADLGGKVVFAIDVAKVDMVAALAGADGRVLHTICWKAPEQNPTVLSILLSYRTAGITVEAVMEPSGTYGDVLRHQLEQNGFPIFMVSGKRTHDAKEIFDGVPSLHDAKAAAIIARLHADGLSTRLHEEVPERRQLRAALAIMDLHQERYLQLVHRLESWLARHWPELPSLLDLTSASLMALLARIGGPADVAAAPNQATKLLRGISHRLIADDDVAAIVASAKTSVGVPMVGLERDALMAIADEAYHAHRAFSTAKTKVEKLAAATPAAALAPVVGPTTAAAIFAEVGDARSYSCTRAFLKAMGLNLKEKSSGTVHGQIKITKRGPSRVRQLLWLAVFRWIQKDPIANAWYQRKKLRDGDRASRAAVALMRKLAKGLYHVGRGGTFDSSKLFDTRRLQVET

SEQ ID NO: 270239 - protein, 334 aa, unidentified
MKYQYIVGMDVAKDSVQASRFDGTTFSDFSFPNQEKSFLKEIQKSIPKSDPSQILFVMEATGVYHLKLATALYKKGYPVAVINPFIIKKYAEMLLKKAKTDKNDARLIAQFGFYQEVTLFVPKEGVAEEITQVLKGLDQLNKARTNLKNYHEALTHRSKINPVVRDIYQKQLEEVEKAIKTLEAEAKRLVSQYAPKEYQLLLSIKGIGKYSATALLGFLQKMDHFSRGKEVASFLGLAPQISQSGKDKGKAWLSKKGNGYLRRLLYLAALSASRSNAQCRELYQRLLAKGKPKKVALIAVANKLLRQAFAVLKSGCPYDPQYLNQKSNLEVVLT

SEQ ID NO: 270240 - protein, 393 aa, unidentified
MRFYTKSHRYYCGIDLHARRMYICVLDAEGQIRVHRNGPATPEHFLTTVAPYREELVVAVECIFTWYWLADLCAQEGIAFVLGHALYMKAIHGGKAKNDKIDAHKIAVLVRGGMLPMAYVYPREMRATRDLLRRRCHFTRKRAELLTHIQNTASQYLLPTLGKIAYHGNRVGVAEHFRDPEVRKSVETNLALIDEYDRLLTELELHLTQTAKVHDVNAFYRLRSVPGIGKILALVLLYEIHDIHRFPRVQDFVSYCRLVKCAKQSDGKHYGYSGTKIGNAHLKWAFSEAAVLCLRKNPPAQRYVARLAHKHGKGKALTILAHKLARAVYYMLRRGQAFEVTKFFSGTAGGDRLPRAPRMAATPAGNDLDGGAILTLPKSSGAGRPGAATNATA

SEQ ID NO: 270241 - protein, 348 aa, unidentified
MEQLYYVGLDIHKRTINYCVKDQLGEIVREGRIGASRPELEQWGRELPNNWVGAMEATLFTGWIYDQLTGQGAQVKVADPSMLKAITSSKKKNDRIDARKIADLLRCNLLPECYMAPPQIRELRRILRYRNLLVRQCVQMKNRIAGFLMETGTTYDSRRLHGRKYFQQMLKDLEGAVPESVNQMLGLSRSTVELLRKMERQLIQGLIAQPLLEERVQRLSSIPGIGVVTALSWALEVGEAQRFASVRQAISYCGLCSAQICSADKNYRNPISKKRNRHLQHVLVEAAKLAPRWNAQLAAVHNQALQHGNRNRATLAVARKLVAYLLAVDRSGKPFQMRAAIRSDFQAA

SEQ ID NO: 270242 - protein, 338 aa, unidentified
MQTGQTAQTYTLFVGVDIAATTAAVATQRPGAKASQSFIIDQTPEGYTSLLHTLQRTGHAPCQVLVVMEATGSYWISLATRLIHEGFGVSVINPAQAHHFAKALLKRAKTDVIDAQTLAQLAMVLQPEPWTPPPQIYYALQQRLAQRDDLLHLRQQVRNQLHALVQHPEVIAEVRARMDQLLATFEAQLTEVEREIATALTQDAAWAAAAARLQSIKGVGWVTAAWTLVTTLNLTSCDTVDSLTAYAGLAPMPRQSGSSVWHRPAIGHTGNGRLRTAFYMATLSAAQHNPVIKAFYTRLREIGKPEKVARCAAARKLLHIAWAVVKKDQQFDPYYAWG

SEQ ID NO: 270243 - protein, 310 aa, unidentified
MEQSFVGIDVAKDRLDVHIRPSGDTFALARDGEGVAALVERLRAAIPQLIVLEATGGFEQVVAGQLAAARLPLVVVNPRQIRDFARATGRLAKTDRIDAAVIAHFAEAVRPPVRPLPDKKAHVLDELVTRRRQVIEMMTAEGNRARQIDNKRLKKRIERLRSILQAELTAIDADLDEIIRGTPIWRESEELLKSVPGVGNVVARTLIAELPELGTLDRRKIAALVGVAPFSRDSGTMHGRRTVCGGRAPVRTALYMAALVASRRNPVIAAFYRRLVAAGKCKKLALTACIRKLLVILNAILREHAPWQAA

SEQ ID NO: 270244 - protein, 430 aa, unidentified
MNDSDGIRLQEFCQFKKVIRGSTDYLIVGLDIAKERHNAFFGTATGRTLHKGMFFDNTYEGFQKLLIQTDALKVQYGLRKVVFGLEPTANYHKPLGEYLIKGGHSVVLVSAAATSKNRELMDGRWDKHDTKDAANVADLIAQGKCLYYDCPGEDLRSLRGLLSLKKRLKKEEHGLRVRIRNQLLAQYFPEMDQHFGSVASLNVVQRCLDPSLISIMEYDEFCRTVAPGKVNMAQQRRLTQIWRAAKQSIGCIVGEAVSVEAQIMVMGLQRVRETIKTVEDKIEDICLKFPEYSFLLMIPGFGPDVSAKVLAAIGDPARFTSGKQVLKMAGFDLCASRSGKTSNSAMPVISKHGKSDLRYALYQAAIISSLNYKEFIVYHTNKIRGREREKGIGTKMRVKLAAKLLIIAWTLMKKKEPFDPKYLNLGDSKV

SEQ ID NO: 270245 - protein, 260 aa, unidentified
MRNYSESLVLDISKSPLDGVLHRKGLHRQFENNQSGFKALSKWIKSFKYSWNDILACFENTGYYSMDISYFLSDNDVDYIQEHGLQIKRSIGFRRAKSDKADAYDIAFYCWQNRSNAKLSSPPSILLSKLKQLNRSRDILIKQRVALKNQIQALSVVRDKAIYSEACRSLKKVTRSIDAQIKRLEATITKAIKSDTGIERNYRLCTSVKGIGPVLAIEMILHTHNFNCFDSWRKFAAYSGTVPYPYKSGSRINWKAKIHP

SEQ ID NO: 270246 - protein, 361 aa, unidentified
MNATTVAVDLAKSVFQLAVSDAHWRVVETQRLTRTQFERWFLNRDVNLVVMEACGSAHHWARWLNGLGIEVRLLPAQYIRAYVKRNKTDATDAAALLEAARCADIRPVRVKSVEQQALQGMHRIRSLWMGTRTSRINALRGFCREFGIAIPVGARTGVEAISRVLADPNTAVPELIRGTAKLLVEEIHLLEARIAQLERELARLAKLSPACNTLLSIPGIGLLTATALVAATSGDVSHFQDARHFSSWFGLTPKEYSSGNSRYLGRISKKGDRYLRMLLTHGARSVLRSAKVAEGAGKEVCGVRRWALDVQSRSNHNKAACALANKLARICYATLRDKEPFGEHTVRLNKKVNRESFVMPA

SEQ ID NO: 270247 - protein, 387 aa, unidentified
MHASAPASAQTAIHINLAAIFVSLELSRSTWLITSLSPGGGEKMSKHSVRSGDVAGLLDQLARLRAKAQARTGKNFPIIVIQEAGLDGFWIHRVLERESIESHVVDAASILTSRRRRRAKTDRIDGEALLRTLLAYKRGEPRVCAMVRAPTPYEEDRRRLCRERKTLVAERVEHVNRIKGLLFAQGISDYEPLHRDRRQRLEELTTGDGRRLPAHLKAQIERELDRLELLLGQLKAVEAERDALLAPGRDAAPTPVAVLAGLRGIGPEFAAMLWLECFFRSFSNRRQVAAYAGLAPTPWQSGSVQHEQGVSKSGNPRLRTTMIQLAWLWLRHQPKSELSLWFLDRVKRDGGRGKKTTIVALARKLLVALWKFVSSGVVIEGAVMKAA

SEQ ID NO: 270248 - protein, 319 aa, unidentified
MAMNTQAIQIGIDVAKEELVIYRQDLDRLDSLPNTIPSIRRWLKTLPEQAVLAVEATGTYHMPLTEQAHRAGHSVFVIDGYQLKHYRESVRARAKTDPCDARLLARYLAREGDDLRAWTPPPKAYRTLQSLLRRRSKLIQARVALQQSLGQERSLKAPLKRLVAQINRIDQLIQKRMDQAIRQAGLTEQVARCEAVEGIGPLSACALVMAFLRGDFRNSDAFVAFLGLDVRVRDSGKQVQRRRLSKRGDPEIRRLLHNAAMAARRHPYWASVYQRYRDRGLQTTQVLVILARKLARIAFALMKNQTTYQAKARQACGTT

SEQ ID NO: 270249 - protein, 429 aa, unidentified
MEEVDEVELVVQRVAALDLGKATLEACMRVPHPGKPGRRMQEIRGYATTTAALLEMAIWLRQWGVERVVMESTSDYWKGVYYLLEAEGFDCWLVNAREVKNVPGRAKTDRADAVWLAKVAERGMCRPSLVHPPPIRRLRDLTRYRRALVSDRSREMQRVEKLLEDAQIKISSVLSDIHGVSGRAMMEALIAGQRDPWSLARLAKGNARKKTDRLEEALRGFFTDHHATILQMMLDNIDRISAQIAALDARIAETIGPFSRQAAQLADIPGVDTVAAAELIAEIGVDMARFPTAAHLVSWAKFCPQTHQSAGKSRSKARGKGNPWLAGTLGRIVFSATRTDTFLGARYRRLARRRGKPKAIVAVGNSVLTVVYHLLSDADLSFCELGPAHYESRINKHRRARDLATQLQALTGQHIVIRDGKAIITDAAA

SEQ ID NO: 270250 - protein, 340 aa, unidentified
MEKRYIGIDLHRNQFTCCVQLENGRNYLSQWQLKDLPRFVRKLRPEDELALEITGNTRLFYDAVAPHVARVAVVDTNQFRVISRSVKKTDANDARLLALYLSKGLLPEVRMKNKEQGQLASLTQTRDTLVKLRTALKNKVNNILSARGINLPKEALSSEKKLEEVLSLPFDEVVRIELRVIVEQIRSLNKSIAELEKTIAEEASKLEGHKSLISIKGIGKIISAILLSVIGDVNDFPDESRLASYFGIVPRVSNSNETEHSGRIHKRGTKLGRTALVQSALIAANYSPYLKNFYQRVKARRGAGKAIIALARKFLGIIYRTLKNNWVFEDFPNFVLAETA

SEQ ID NO: 270251 - protein, 339 aa, unidentified
MTFIKKSWQVAIQTETGYEESFRMSSNHVEELRKHLTTNFPQANYHSVYESGFSGFSTHRELTSAGINNIIVNAADVPTMQKEQVTKTDVIDARKLVRALRKKSIEGIYVMTKQEESFRELERHRDSLTEDIGRLKSRIKHLLHRNGIRFEEKFGGSGHWTKAFVKWMKEEIELPQMTKRALDDELDLYLILRKKKLEISLEIRHLMKDEFASEHELLTSVPGIGLITAATLLAEIGNFDRFRNEKTLASYAGLSPTCHSSGEKETKGEITFRCNRRLRRCLIESSWVAIRTDSALSSSFLELRKRMPACNAIIRIARKLLNRVLYVMKNGAIYEKGIN

SEQ ID NO: 270252 - protein, 344 aa, unidentified
MENRNVIGLDLAKNIFQVHIADSRGKKVKTMRLRRNQLITTLGMQSPALIGVEASGGAHHWARELQKLGHEIKIMAPQHVKPYVKGNKTDARDAEAICEAAARPAVPKIRVRNVDQQQIQALHRTRELWMKQRIATSNQARGLLTEFGYIFPVSYRKLLNDIPVWLGQPDNPGILQQLIEELYQQLLHLDQKIQHIEARLKAFLKEDPKIRLIESIPGIGLLTATAFIASFGDASSYSSGRKLASAIGLTPREYSSGEKRVRMGISRRGNPYLRSLLVHRARAVLINRKKKPENDWIEQLVARRGYNVATVALAAKNVRRIWAILQSGEVYDPDHEIKRELQSA

SEQ ID NO: 270253 - protein, 331 aa, unidentified
MQAGESILGIDISKDSIDSVLRSPRGENHRVFPNNHKGFTSLVTWIHKQPEPVVHVCMEATGSYWEGLAEYLFEHGYTVSVVNPYQIKRYGDHLLNRNKTDKADASLIAEFCDKDRERLRLWKPISPEIKTLRSMERRLNELQDMKQQEQNRLQSGFSDPVVIESLQENIELLEEQIKNLKQKIKEHIDQHPELKRSQKLLISIPAIGEQTANKLIAEIGNIEDFASASQLAAYAGLAPKQFRSGSSVHKQTRISKQGRTELRRCLYMPAVVATSYNPIIIDLKKRMLDSGHAMMEIIVAAMKKLLHLVYGVLQHGKPFDPNYAKISEVNP

SEQ ID NO: 270254 - protein, 391 aa, unidentified
MFYIGIDIAKHNHEVSIIDDNGKALDKSFSISNSQKGVDKFNAYLASFNVTSENCVIGMESTGHYWINLFSFLVNSKFNVFVINPIQSDAFRKMYIRKTKNDSKDSYIIAQIMRFGEYSSSNISDENIFALRQLSRYRTSLVDECSSWKRKIISILDQVFPEYSDLFSDTFGVTSKELLSKYPLPEDMLELSTEELTNLLTKASKGRLGNEKAQEIKEFAKNSFGISFAKQTFSFQIKQIINQISFIENQLKELDNEISNMLKVLNSEITTITGIGDVLGACILSEIGDISRFEKASQLVAFAGLDVAVKQSGEFSGTEMKITKRGSPYLRRAIWLAATVASFKDPALSIYYKNLIARGKKHLTAIGAVSRKMCNIIFSVLKNKKAYTPNI

SEQ ID NO: 270255 - protein, 410 aa, unidentified
MEKIEKRYIGLDVHKHYLIALGVDENLEVVLPARRVELSHLEAWMKKTLTQQDDVVLEMTTNTWQLYDELSAYVGSVTVVHPPHVALITRSQVMNDKIAASILARLLAKGLLVGIWVPPQEVRELRGLVAQRQKMTRLSTQAKNRLHAVIQRHHLKVPEGNPFGKSNNGWWQALSLGRLEKMNLQSDLETLQFAEKQQARLQEEMTGIVAENEEMGRLLHLAGFGVITTLTVYAAIGDISRFVEPKKLVGYAGLGARVHDSGLTTRTGKITKAGRRDLRVALVEAAHVAANTHPHWKAELARLQPRLGYNKAIVAIARKLLISVWHILSKQEADRFAEPEAVAQKMLRFAYDVGKENRPGRQTAAGFARERLDVLGLGQELTSISWGSKKPIPLPPSALGKKERSDVPNR

SEQ ID NO: 270256 - protein, 359 aa, unidentified
MLVERTSVGLDVHARSVAAAAIDGVTGELRQARLTPSHEHIRSWIGDLHGPVAVAYEAGPTGFGLYRALTEAGIRCVVAAPSKLQRPSGDRVKTDAKDAVHLARLLRLGEVAAVAVPTVAEEAARDLVRAREDSRGDLMRARHRLSKLLLRQGIVYSDGQAWTERHDRWLRRQRFDNLATATTFESDYEAVLAVTARRDRLDKAILEMAADSEFTPLVRRLGCLRGVSTLTGFALAVEVGDWQRFTGNSIGSFVGLVPSEYSSGASRVQGSITKTGNTHARRLLVEAAWHHRAPYRPGKTMRERWELAPPEARARGDLGNRRLHERWVKFNLRRKRPVVTNVAIARELAGWCWSLAVME

SEQ ID NO: 270257 - protein, 415 aa, unidentified
MGLKIVYPICCGIDVHKTFVVACIASTKNKGVTTYKRHRFSTYTKGLRELSQWLCDNDCKDVCMESTGKYWIPVFNVLEDSCNITLAHPKYVKAIRGKKTDKKDAKWIADLFKHDLVAGSFMPPLAIRQLRDLMRYRFKLTNFTSSEKNRFQNSLTVSNIQLGNTVSDTFGKSSMNIIEKLLEDPTDTDFAIEPLIHGSMKDKIPELELAIDGFITPEQAGKLAVIKRHYDNLQARKEELEKLIRSLAEPYTEEINLILTVPSFKNVFSAIAVISEIGVDMDVFPTAKHLCSWAGLTPTNNESAGKKKSVRVSRAGVYIKPLLVQCATAVVKSDKHPEIRNRYLRLKKRRGHKRAIIAIARMLLTAIYHILKKKEPYNPELYQKADVLPVSREITVEQAISLAKSQGFRITEAVT

SEQ ID NO: 270258 - protein, 385 aa, unidentified
MSFKIFKFNCCGLDVHKTWIYACIGITDSNNRTEYKQARFSSFSKGLHQLCVWLAKYNCNDVCMESTGKYWIPVFNILEQHKIRVTLSHPKYTKPMKGNKTDRKDAKWIGDLYMCGMVKPSFIPPADIRELRDLVRYRFKLTCMITGEKNRAQNCLTVSNLKLDDVFSDVFGKSSRSITEQILQHPGEKFDVSPFVDSRCKTPIEEIQAAVDGNISKEQAVKLRQCLDHIDELQKHISEVEQEILRFSDKYEAALNLIRTVPGFDKNPMTAIQVLSEIGGDMSVFPTAKHLVSCAGCCPRNDKSDRKIKSTRISCAGSYFKPVLVQIANALIKSKKHFEFTTRYKRIKTRRGHKKAIIARCRMILTAIWHILTDLKPYTLSLIHI

SEQ ID NO: 270259 - protein, 449 aa, unidentified
MPKKRTKVVSLPMIEPNAAGIDVGATEIFVAVPADRDPEPVRCFPTFTVDLERLADWLQQCRIRTVAMESTGVYWIPLFQILEKRKIDVRLVNAHHVKNVPGRKTDVEDCQWIQHLHSVGLLRGSFRPDEEICAIRSLWRHRDNLIQLATLHLQHMQKALDQMNLQIHHVISDLAGTTGLAIVDAILAGERDPHKLAQLRNRHIRASTETIMKSLVGDYREEHLFTLRQSLKSYRHYQELIQEVDLQVKQMVQRLPSKIAAGEKPPKGDKIRRTPWRNEPPQLRNDLYRAFGVDLTEVPGINSLTAQMLLTEIGPNLSRFPTAAAFCSWLRLCPDPKISGGQVLSSRTRPTKNRAALALRMATQGLHRSNTFLGDYFRRMKARMGAPKAMTATAHKLARIVYHMVTTQQEYDTTVFQQQEQRRRLHKSARLHAQARELGFQLVPINVVP

SEQ ID NO: 270260 - protein, 401 aa, unidentified
MKRLSGGIDVGSESHHVTILDEEDNVLYNKKISHKINEFAESINLFKKIEKKEKGEISFALEGKNGYGAPFDQLLINQGFTLYNVDNLKLKRFRQAFAGEWRDDQRDALMLSKMLKLKDHIDSQREKVFIKIEKPSPVTESLKLLSRHQQTLIDEKVRLTNRLSKKLLEICPQILELGKAKNKKLIAILVKYPDFSKYKRITLKSLLKTKGIGKKQAPFLLKRLNNIEYMPGLTDIYKTIILSYAKRISELQKEIEDIDKSLDEIGEKNKGVNHLKTLPGVATKLASRFIGEIGSIHRFPSEKQLAIYCGIACVDNNSGKVTKTKAVYKANKICKQTLITMAGGSIRLSLQCKAYYLKKRAEGKSHNHTLRCLARQLIKVIYKMLTEDRDYITKKELKKVA

SEQ ID NO: 270261 - protein, 320 aa, unidentified
MNPAPIYLGIDVAKDRLDVAQRPGTEAWCVSNDERGIADLVARFKVLRPALVLVEATGGIELALVGALAVASLPVVVVNPRQTREFARATGRLAKTDAIDAQVLAKFAEAVRPPLRPLPDAATQELSGLVTRRRQVIEMLTAEKNRLRTAAPAVRAHIKEHIRWLERSLSDLDSELGQVIHSSDIWRAQDDLLQSTPGVGPVLSITLLAELPELGSLNRKEIAALVGVAPLNRDSGRLRGRRSVWGGRSQVRTALYMAALVATRFNPAIRAFYQRLQAAGKPKKVALTACMRKLLTILNAMKRHQTPWQYALHLDRQDSC

SEQ ID NO: 270262 - protein, 433 aa, unidentified
MLLTPYNSIEPLVPKGVPMALKIVYQICCGIDVHKTFVVACISSTNKQGVTTYKRYRFSTFTQGLKELLQWLLDNHCKDVCMESTGKYWIPVYNVLENDCTIVLAHPKYVKAIRGKKTDKKDAKWIADLFKHDLVAGSFMPPADIRQLRDLMRYRFKLTCFRSSEKNRLQNCLTVSNIQLGNVVSDTFGKSAQAILDKLLENPADTSFDLEPLVFKSLKKKLPELRDAIDGFITPEQAGKLKVIKGHFEDLESRKAELEELILALAAPYQQELAILQTAPGISSVFTAIGIISEIGTNMEAFPSAKHLCSWAGLTPTNNESAGKKKSVRVSKAGCYIKPLLVQCANAVVTSKKHPEIRNRYLRLKKRRGHKKAIIAIARMLLTALYHMLKNGENYNAELYRKSNLPPVDREITVEQAIIIARNQGYKIKSSTA

SEQ ID NO: 270263 - protein, 393 aa, unidentified
MVYVGIDVAKDKHDCFIANSDGEVLYDVFTIQNDMDGFEDLFFKIKTSSKDLSKVKVGLEATGHYSCNILGFLHNKGLTTIVINPLYTSLSRKSVSLRKTKTDKVDARTIASMIMSDVSLKPYSDTLYHNEDLKSLSRYRFDKVSDRSKLKQSVSRLVNILFPELEKLVSTLHAKAVYALLSEFPGAHQVASANLKHLTALLSTASKGHFGREKANEIREAARRSISSYLPAKSLELRHTIKLIHELNAEIAEIETEIKKIMDSIDSPTLSVPGISYALGAVIVSEVGDFSRFDNPDKLLAFAGCSPSTYQSGQLYSTHAKMEKRGSKYLRWALLNAAKYVCKWEPTFAVYLRKKLAEGKHYNVAVSHAAKKLVRLLYHLETTGEKYIPQTLS

SEQ ID NO: 270264 - protein, 378 aa, unidentified
MVAGQIIFNRFANTNPTQHQPYSRMRKRKSYMKTSAGIAPQPTLAGLCGAVGIDVSKSKFNVCYLADGQSRGQNGEFTSDASGHAKFLAWLERVGAGQSVHLCLEETGCYGQALAAFLHGAGHHVSIVNASLIKNYGRSLNVRTKNDVVDARLIAQYTLERVPQRWIPLDPQHQALRNASRRRDQINEFILKEKNHLEASPSPEMSELLRRQIEHLEACKVEITKLMARLVAQDPQLARNIELLMTIPGIGRISAINLLAELPSLDGFTSARQLCAYAGLTPRENTSGSSLQGKPRLCKQGRGVLRRIMFMPALSLMNSKSGPLRVFADRLLNKNKKPACVVGALMRKITALVFAILRSGKPFDPHYASSFRQAVPQN

SEQ ID NO: 270265 - protein, 340 aa, unidentified
MKKVSTIGLDLAKNVFQAHGADASGAVIFRKKLRRAQVLEFFATQPACTVAMEACGGSHFWGREIGNYGHRVRLIPPAYVKPFVKRQKNDAADAEAICEAAQRPTMRFVAVKSEAAQGAAVVFRTRDMLVRQRTQIINALRGHLAEFGLIVAQGPAHVAKLIMAVQDPKQPLPEAARPILCVLVDMLGLLDQRIKLLDIAIARRAKEDEVGRRLMSIPGVGPVIATAMAALAPPAETFKRGRDFAAWLGLTPLQHSTGGKQRLGATSKMGERTLRRLLIIGASSVVRWAARKGAPAGSWLASMIARKPAMLVRVALANKMARVIWALMAKGGTYRAPVVA

SEQ ID NO: 270266 - protein, 367 aa, unidentified
MARYMGLDVHSKNCVFAIQDENGRMLGEGSVPTTPEGLLDLRNRHDLPAGTRIGLETGTVAFHVSRMLARMGLDPVVIDAHEVRLKARRPGQKCDRRDALELCEGVRRGMYSTIVHVPPEPITTLRETLGRRRHFVRLQTAEINAVKRLLRASGLHDMARRHLGTGTAWERLVNGLAYDPPLQGHVECHRAVWSVVGSQIALLEARLTEQGKAFSADLERLQTVLGVGPIVALTAVAVFSEVRRFPSAKHAASYAGLIPSTHQSGERDAHGRITRRGSPELRAVLCQAVHHARRPDHPLHPYFRSLCARRGYKMAVVAVAHRLCRILWAMLRHGTSFDVTRLGIETGPFEKTVTQLYRRKRAAVASA

SEQ ID NO: 270267 - protein, 427 aa, unidentified
MTPDPQFAAFVGLDWEDQRHAVCLLPPAGGAPEHGEVAQTPEGIAAWVTELRERFGGRPVAVCLEQSRGALVYALMQYDFLVLHPINPKQLSDYRAALYPSGAKSDPNDAELLARFLRDHTDKVRAWQPDDPITRGLRLTTEQRRKWVQDRVALTNELQQRLKESYPLALEWGGEILGSEWFLALLEKFPSQRELQRASPRQLEKWLPKRRRVSDDPPAEQILRDRIAAIRKAPPITTDGPVLDHARLAVGHLAVMIQTVNRAVAECERKIDELFAKHPDGQLFASFPGAGKAMAPRLAAAFGTDRDKFRDAQEMQQFSGIAPVTRASGKTKTVSMRWACPKFLRQTFHEFARCSIRYSGWAKAYVDMRKARGDRYQEIVRGLAFKWQRILFRCWKNRQAYDEERYLQRLLATGTRLALTPNQVPTT

SEQ ID NO: 270268 - protein, 328 aa, unidentified
MCIIDESGKVCRETKVPSHPEDLARALHDRAWCLERVGLEAGPLSQWLFSGLAATGLPVVCIETRHTKAFLQAQVNKSDRNDARGIAQMMRVNLFRPVHVKTLTSQKRRALLTARKLLQEKALAVDNDIRGLLRNFGLKVGPIGASRFETRTRELVDGMPELAEIIDPLLEARRKLRELFAVLHRKLLVIVRDDTVCRRLMTVPGVGPVVSMAFTATIDVPARFKSSKAVGAALGLTPILNQSGESKRLGRVSLCGDGMTRTLLYEAAQVMLTRTTKWSWLKAWAMKVAARRGIQKAIVALARRLAVILHRIWVSGTDFRWTREVQST

SEQ ID NO: 270269 - protein, 310 aa, unidentified
MERIFVGLDVAKDRLDVHVRPTDEQFAVPYEEAGVATLVPRLVGLRPTLIVLEATGGYESTGAAALAHAGLPVAVVNPRQVRQFALATGQLAKTDRLDARANARFAELVQPAARPLATEQAQALGELVARRRQLVDMLGAEQTRPRQARTRGLQQRIRVHVTWLTRAIAEVDQEIARLIRTSSVWRETENLLTSAPGIGDITAHALIADLPELGQLNRRRIAALVGLAPWNRDSGRWRGRRMIGGGRAAVRRALYMPTIVAIHHNPVIREVYRRLTTAGRPKKVAVIAAMRKLLTILNAMLRDRRPWQPA

SEQ ID NO: 270270 - protein, 391 aa, unidentified
MYFVGIDIAKRQHEACIMDDAGALAAKSLRFANNQAGGQKFLAWVQKAIGESRDLCIGMESTGHYWLALYSFLRREGYVVQVINPIQSDAFRNLYIRQTKTDTKDAFIIAELLRFGRYSAAALPEEKLFALKQLCRFRFSVTDTIGDLKRRAIGLLDMTFPEYETLFADVFGKTSSALLLEYTTPDELVAVDTEKLALFLARQSRNRLGMEKALEIQKAAESTFGVDIALDAFRLQLRLLIEQIRFAEAHLALLDEEIETRLAALNTNLVTIPGVGPVLAATMLAEIGDISRFPTSAKLVAFAGIDPSVHQSGDFKGTRSHMSKRGSPYLRRALWLAATSARRYNPPLQEFYQQKLVEGKHVHTATGAVARKLTNIVHAMLRDNTVFSLHP

SEQ ID NO: 270271 - protein, 361 aa, unidentified
MFRERTSVGLDVHARSVVAAAIDGQSGEVFKAKLTPSPAEILDWVGKLPGPCAVTYESGPTGFGLARAFAVAGVRCEVAASSKLHRPPGDRVKTDARDALHLARLLRLDEVTPVRIPAAAEEAARDLVRAREASRQDQMRARHRLSKLLLRHGIVYSGGKAWTTVHDRWLHQQRFDAAATQDAFDDAYEAVALATARRARLDGKITTLAQGSEFTPVMRRLACLRGISTLTGFALAVEIGDWERFTGSSIGAYLGLVPSEHSSGQSRSQGPITKTGNTHVRRLLVEAAWHHRTTYRGPGVTLQRRWDAAPAAARARGHAGNQRLHQRWVNLNLRKKRPVIANVAVARELAGWCWSLAVLPD

SEQ ID NO: 270272 - protein, 322 aa, unidentified
MNESIALGIDVAKAKLDCALRLPDGKFKSKAVENNLKGFKILTEWLEKHGATTAHVCMEATGVYWEAVAEYLVNRGMTVSVVNPAQIKAFGQSQLVRTKTDTVDARLIAGFCAERNPEPWQAPTPSEQALRAMVLRLESLQVMRTQESNRLEVARDAVKPGIASHIEWLDKEIKALAKKIGEHMDGDADLKDKQALLDSIPGLGERTIAILLAFYADLERFGNARQAAAFAGLDPHHHESGTSVKMKPRMSKVGHAFLRKSLYMPAMVALYKTAWGRRFRERLAAAGKPPKLIIGAMMRKLVHVAFGVLRSGKNFDPMLHGC

SEQ ID NO: 270273 - protein, 333 aa, unidentified
MKNEPIKEFVGIDVSKLTLDVHLYVKNLHCVFSNDSKGHRLMFSWIRKQCIKNEELRFCFEHTGIYSLELAMFLKKNSQVIYIVSGLAIKRSMGLKRGKSDKTDAKEIAKYLFQNHYAIKPTELASDAIQELQMHLSFRSNLVKKLASFKMHRKEFGKIVESKGYDQIEQVTAEIMDALKKGIKEIEKQIQEIIYTDEALKNTFENISSIKGVGPILAATMIVITRNFTSFETSRQLACYAGIVPFEHSSGTSYRGKNRISSLGNRDLKSLLTMAAISSITYNPELKIYYQRRISEGKSKMSTINIVRNKLVSRIFACANRNSKYVEIYKFAA

SEQ ID NO: 270274 - protein, 346 aa, unidentified
MLYAGLDLSRKRLDFHLLDEAGETVEVGAAPPDADGLHRLAARFERFGEPVRAAIESMNGARFVHDQLGQLGWRVEIADAVRVKGLAPLACKTDRIDAWVLAELSRRELVPAIWLPDPAVRAERERARFRLHLVRHRSSLKQRVHALLLAHGKPCPVSDLFGASGRALLERLALPEPWAGTLAASLRLIDELDEEIAACEAELRRLGAEHRYVPLLMTVPGIGFVLGYTIAAEIGAIERFASPRKLAGYSGLCPRVYQSGASDRRGALAKNGPRYLRWALVEAATVACRHPVYHERYQRTKRRLGRQRGAKVAQVDLARRLAEAIWHMLTRNQPFAPAGATGPLAA

SEQ ID NO: 270275 - protein, 480 aa, unidentified
MNVKTNKTKKQANVENQAVNLLSKEELCKRIEDVEKELKSYTWRELETNGKFAKNDKLSFIKDDMLIVGCDIGSETHYIRAIDIRGRELSRKAFEFSNTAEGFEAAKAWMLELAVQNRKSQIVLGLEPTGHYWFTLAAWLITAGISVVQVNPYAVKQSKEIEDNSQLKDDKKDPKLIANLVKDGNYGMPYLPEEIYADMRRLSMLRDQLTEDRIRNINRLHRELKIYFPEYMDAFGKIDGTFALEVLKVSCIPSEITELGTEGLRNIWHEAKLRGRGYSRASEIVEYAEKSVGLKDGSSVGRETVKWFAKEIMKLDEQLAWIENTLHKKCMEIPYAENILEIKGVGENILAGIVAEMGDISRFDDVKEIQKLSGMSLVACSSGKHKGQTKISHRGRKRLRYWLFQAARLAVSHAEEFKELHVYYTARADNPLKKMQSLIVIACKILRVIYTILKTGKDYDPQKMLKDIKRPKAALAAKAA

SEQ ID NO: 270276 - protein, 338 aa, unidentified
MTIVMGFDQHREQITWDALDSSTGELRRGRIRPADRLSFRHFLGQFDGERLEAALEATTGWRFMVEELKAVGAEVHLAEPAETKILRGPKRRAKTDRADAKHLRELLQQRRVPESWIPPEQILELRSLVRLRRALVEQRTAWLQRIHAQLFHHGHPARRDLLVRERRAWVEGLELPHAARTQIEIALRLIDHLNVQLVPLDRELRQIANSWPGTKALQAHYGVGPLTAVAFLAELGDARRFSSSRKAVRYAGLDITVSQSDSKRAPGRLSRQGPATLRWAAFEAAQSAHKPSSPDRDYYLQAADRLGGNRACLALARKLVQRAFHTLRELGEEALQPA

SEQ ID NO: 270277 - protein, 360 aa, unidentified
MGNERTFVGLDVHARSVTGHALDAVTGEVWQRKLCPDPGEVLRWVSGLPGPVKVGYEAGPTGYGLYRCLNDHGTLCVVAAPSKLHRPHGDRLKTDARDAELLAHLLKLGEIVEVNVPSVEQEAARDLVRAREDARADLMRARHRVSKMLLRQGIVYSGGDAWTKVHDGWLRGQRFDQQSRQLAYDSAYEAMVLTVDRRDRLDRAIDEMAGKSSYTPVVRRLSCLRGISTLTGFALAVEIGDWQRFTGATIGAFVGLVPTESSSGQSRSQGSITKTGNTHARRLLVEAAWHHAKPYRVPGKTMRDRWELAPPAARLRGHEGNRRLHQRWQRFNARKKRPAVADVAIARELAGWAWSLAVLE

SEQ ID NO: 270278 - protein, 341 aa, unidentified
MKKFIRIGVDLAKNYFQVHALESENGPAVTRKLKRSKMHEFFSQIEPCLIGMEACGSAHYWARELKAMGHEVLLMPPAYTKPYVKRGKNDAVDADAICEAMSRPGMRFVPIKSAEQQATLMLHKTRELLIKQRTMSVNALRSHLSEFGIVAAKGIGRVDELLDLAESDATLPAAARAGVKVLAQALEGLDKAIDDLEDEITSADAQNEMVLLLDKVPGIGKLIASVIAASVPDPSVFKSGRDFAAWLGLTPRQNSSGGKQTLGGITKQGNRYIRKLLILGGTSLLNVLGKRKGALRDWIVGLLAKKPARLVTVALANKLARILWAMMKTGECFRTEMFAKA

SEQ ID NO: 270279 - protein, 418 aa, unidentified
MAEVTFPQLIQRACGIDVHLKVVVATIDGAGIQRETRSFKTFTSSLNELKEWLLSNGVTHVGMESTGVYWKPVYKVLEDSIPNVWIVNARHIKNVPGHKTDKMDSEWICKLLLAGLLKPSYIPPKEQRQLRDLTRYRNKLIQQIASEKNRMMRILEDCNIKLSSVVSNTSGATATSLIDMLCEGKVLTLDDINSVYHGKLSASPEELLEACTGFVEEHHIYLLQMIRKDIDQTQTLVDDLSERIKRLLSKYENVLELLREIPGFSTKVVEDLVSEIGLDMSHFPSEKHLSSWAGLSPGNNESAGKKKSARITHGNKQVKAVITEAAWAATRTKNTFFSERYHRIAARRGKKRALIAVGHSQLISVYLILSTGSRYHELGAQYMQSKIEQKRKVYLSSELKKLGYNVSLTKVPQAVTPN

SEQ ID NO: 270280 - protein, 377 aa, unidentified
MKRVKFVGLDVHAETIAIAIAEQDGEVRSLGVIPNREDSIRKLVRKLGPVEELRFCYEAGPTGYVLYWQLSKMGAKCAVVAPTLVPVKAGDRVKTDRRDALKLARNYRAGELTAVWVPDAAHEALRDVVRAREAAKQDQLRARHRLSKFLLRHGRRPPIGVKVWTIKYLEWVKREVRFEQMAQEATLLDYLHEVEHAAARIARLDGAIEEAVKVAPRKMRAVIEALQALRGVAHVSAVTVVAELGELSRFARAKQLMGYGGIVASEDSSGERTRRGNITKTGNAHLRRVVVEAAWAYRHRPDVGATLRKRQEHVSEEVKEIAWKAQQRLHQRYRKLLAKGKNKVVVVTAIGRELLGFIWAIGIKVETAQKEPLQRAA

SEQ ID NO: 270281 - protein, 482 aa, unidentified
MTLVSSDDDLDWEFVFDSRLGHPTGSSEEPMVKRSKKRCEELPILHPHAAGIDVGASELFVAVSADRDPQPIRSFPTFTRDLNALADWLQQCGVRSVAMESTSVYWIPVYQILESRGLEVCLVNAQHVKNVPGRKTDVSDCQWLQYLHSVGLLRASFRPPGFICAIRSLWRHRSSLIQMAAEHVLHMQKALDQMNLQIHRVLNDITGMSGLRILDAILAGERDPVTLARLCHGGVKNSEDTIAKSLEGDYRPEHLFALRQSLAAFHYYQQLVVEVDQEIQGQLGSLETATTAEPTVPKRTKASAYQRRRYEPKTFDLRGELYRIFGVDLTNVPGISAITAQTVLCEIGTDVSRFRNASAFASWLGLCPENKISGGKVLYTKSRRVRSRVATALRMAANSLHHAKDYLGEFFRRITRKLGKPQAITATAHKLARIVYHLLSTKEAYNETVFHRCDEEAIKRAQYRLRKQAAQLGFQVIPLQNG

SEQ ID NO: 270282 - protein, 387 aa, unidentified
MTKVDDLSRSLTPLDQSSTLVCVVELSRSSWLIAGMVPGVQRQPLKKVELDAPALMRVIERWRSEATKANRAIGRLVLAYEAGRDGFWLARWLRARGVEAHVIHSTSVVVSREHRRAKTDRLDTAMLMRVFVGWLRGERGHCTMVAVPTIDEEDAKRPGRERESLVGERTRIINRMKAALARLGVRGFKLELRNASAHLETLRTPENIVIPPNTLAEIRRDVARLAVIREQIKAIEQARVERLRRDPHRPAHVMVRLLAHVIGVGIESADMLVREVLLRNFRDRRAVARYAGLTGAPDESGLKRREKGLAKSGNSRVRRGLIQLAWRFLVFQKDSALARWYVERTSGAKGARKTTMIVALARKLLIALWRLATTGVVPDGFVLRSAV

SEQ ID NO: 270283 - protein, 343 aa, unidentified
MQSISTIGLDIAKSVFQVHGIDAAGQVVLRRQLKRRHVLAFFQKLPPCLVGIEACASSHHWSRELQALGHSVRLMPPAYVKPYVKRQKNDTTDAEAICEAVTRPSMRFVPTKTIEQQSCLMLHRARHLFIRQQTAVINSIRAYLAEFGIVAPVGRRGVEQLLEVVADPADCRLPELARTCLAALGSQLRALKVQILEFDRRIIAWHRSNATSKRLDAIPGIGPALATALVASIADPKAFRSGRDFSAWIGLVPKQNSSGGKEKLGSISKQGDRYLRSLFTAGALAVIRYAKIHGTGHRPRLTGLLARRPTKVAAIALANKLARMAWAMMARNERYQEPAALAA

SEQ ID NO: 270284 - protein, 345 aa, unidentified
MMVIGIDAHKRSHTAVTVDDMGRQGFVKTVGTTTQDHLRLLKWAVGLAGERLWAIEDCRHLTRRLERDLVAAGESVVRVSPKLMARVRDSARSYGKSDPIDALAVARAALREPDLPIARLDGIEREIRLLVDHREDLVAERTRIIARLRWHLHELDPSWTAPTKLERHSAFDKVKAHLSGHNDGAMVRRLALRLVEHLRLLTDEINELTAEITVRVTTIAPSLLAIVGCGALSAAKIVGETAHAGRFRSKDAYARHNGTAPLPVWSSNKQRHRLSRTGNRQLNAALHRIALTQARCYPPARELLDRRKNGGDGGREALRILKRRLSDVVYRAMLTDETGSLPRTA

SEQ ID NO: 270285 - protein, 342 aa, unidentified
MQIAILGIDLGKNSCSVVGLDVAGRVVLRRRLRRDGVIKLAAGMSGCVMAMEACCGAHHLGRLLRDHGHQVRLMSPEYVRPYVKAQKNDDRDAEAIAEAATRPTMRFVELKSEAQLDMQSLHRARDRLVGERTALINQLRAVLLERGIVVPQGRRKLERHVDALLAEEEIRLSPRTGLLVEDLRAEWRELDRRILAFDDEFAAQARTDQTARLLTSIPGIGPLNATALTAAIGNAETFGRGRDLAAWLGLVPKQVTTGGKPKLLGISKRGNRYLRKMLIHGARAALPTLSKGETPLGAWLRGLLARAHVNTVVVALAAKLARIAWAVIRRGEKFNIKAATAS

SEQ ID NO: 270286 - protein, 371 aa, unidentified
MTNYSIFIGMDVHKNSIDIAIAEEGRKGQIRHYGKIDGTLAALDKVVRRLVSTDKKLHFVYEAGPCGYEIYRHLAAQGLDCSVVAPSRIPKPSGKRIKNDRRDAMMLARLHRSGDLTAVYVPRAEDEAIRDLTRAREDAKGDEKRSKQRLLSFLLRNGTRYTGGSPWSKAHIRWLSDIKMPHRSQQVVLQEYIGTVNQCKERVQRLTEQIQQLLPDWQLFPIVQALQSMRGVSTIVAATTVAEIGDLKRFHTPSELMSYLGLVPSEHSSGQKTKRGSITKAGNGHVRRVLAEAAWSYRLPARVSRALLKRQEDLSESVCDIAWKAQLRLCSRYRHLWNKGKAKQVIVTAIARELCGFMWAIANEIEAPANA

SEQ ID NO: 270287 - protein, 441 aa, unidentified
MSNKAAPFWEAPDSGVYGGRRGAIPDYPEQLYPREEQRLARYHVGIDVGKARHHACVHDTQADTYSKVLSFSVDRPGFQGLLTFLERQAPKEEVLVGVEASGPYALTISYFLLEGCYQVVELNPGQASQFRKAQGKKAKTDRVDARSLAAFLGVGSYKPLSLTDPVLENLRELTRFRADLLQDRTRQLNRLQENLALAFPELASHLASFGSPTVLALLETYPGPQALVEAGVEEISAFLVQHSRGRLNRSQAQAILGAAVTTVGLLRRQRSLELKLALLAQSIRALNSQLERVEGEIQELFGQLPYDPKDFPVGGVQALAAILSEIQDIHRFPTLKQFLSHLGWCPKTFQSGSFRLEHPRMSHAGNPYVRRMVWMLAIQAVRSVPAYRDYFQRRTAAGKKKMHSMVAVGRKLLSAIYAILKTGKPYEAVTGVSGHLAVVNS

SEQ ID NO: 270288 - protein, 366 aa, unidentified
MRKPSTTALRRRGKLQVEQLTIGLDLGDRSSFYCVLNGAGEVILEAKVATNPEAMRKTFEKMPSSRIALETGTHSPWVSRLLTELGHEAIVAHSRNVRLIGESRRKDDRLDAQALARLARIDPQLLSPIQHRSAQAQADLSVIRARYALVRARTALVCAARGLTKSFGERIRGRNPKGFSLATSEALSPPLQVALAPLLSALAAITARIREYDAQIEKLAEESYPETALLKQVKGVGTLIALTYVLTLEDPRRFRKSRDAGCFVGLQPARRNSGQSEPQLHITREGDSYLRMVLVQGAQHIIGPFGEDSDLRRWGLKLAERGGKRGKRRAIIAVARKLAVLLHHLWISCEAYEPLHNTRKRRLAAA

SEQ ID NO: 270289 - protein, 425 aa, unidentified
MNSKVNHKINQVTEKTLVVGIDIAKYKHYATFVDERGREIKKAFLVPQSLEGFEELYQAILDAMKVFEKSEVLVGVEPTGHYWLNLAYFLEDRGIPLVIVNPMHVKRVKELDDNLQTKNDKKDALTIARLMKDGRYSHPKLLRNQAAEIRTGYSLRESLMKERSMLKNKLHRWIDKYFPELFHVFSDFGAMLLAVLEETPLPVDIVDMTPTELADICAKAGNMKQRRPTKAAELIQAAQSSIGITIAPWGARREVASMMRQYRLIEEELEAIEAELEERITQTADYEFLISVPGISHGTISGLLAEIGSFDDYESPRQLIKLAGLTLRENSSGTHQGQKKISKRGRKRLRSLLFKAMLPILRNNEAFLTLHHYYTQRQVNPLRKKQSMVVLCGKLLKVLHALCTKKRRFDSQQMLTDLHCLQLAS

SEQ ID NO: 270290 - protein, 343 aa, unidentified
MKLTRIGVDIAKQVFQLHGTDRSERAVWRRRVSRERWLHALHEVAEPGCEIGMEACGGAHHWARQLQAMGYRVKLIAPQFVKPYVKSNKNDANDAEAICEAMSRPGMRFVTLKSTRQQDIQALHRVRASLMEQRTAKGNQIRGLVAEYGLVAPRELSSLRRAMPCWLENADNGLSACFRQLLDGLWRDLRGVDDRILELDHTLADLAQADPDARRLQQLRGVGPLVATALIAAVGDAKQFASGRQMAASLGLTPRQHSSGGKDRLLGISKRGDAYVRSLLVHGARSALRTAPAKDDRLSQWVVRLAKRAHPNVASVALANKTARLAWALLHHQCEYQPALAAA

SEQ ID NO: 270291 - protein, 352 aa, unidentified
MRYLGMDVHAKSTVWCLVDTQGAVVREGRVPTTAPALAALVQELSQEDEVLAGQEVGTLTYLVHDAVTAAGTRLLSFNAQQLRMIAASRKKTDRRDAYWLAKALQAGMYPHPVYIPTGEIRELRALLSQRRVVHADYNRWRYRARTYLRAGGYAVAPGVAALRAALAPGHASTQGAPPSLRAALALCQRQETALRAELVQLDAALRARTEAVAAMQRLRTVPGIGPLTAATIYAWVGDVRRFPHAKQLAAYAGLVPAVRQSGGAVHRGGITKQGAPALRATVVQAAQVLLSRCRSAEATPLQAIGLRIQGTRGRRKIAVVAVARHLLRIAYYILRDGTTYDAHRLGTLTDAA

SEQ ID NO: 270292 - protein, 412 aa, unidentified
MTLMIGVDPHKGSHTAVAVDETEQALAELKVRPGPAQLEQLLSWAQRFPERSWAVENATGLGYLLAQQLVAGGERVIDVQPKLAARVRLLDSKSVNKNDPHDARSVAIAALRSPTPVEVRPEDHSAVAKLWSKRQRDLARARNKVACRLHSLLCELVAGGVPDEIYAAKAAKLLASISPDGAVAAARVELAEDLLEDLRRLDAQIKESRRRLEAVVTASRTSTTKIFGVGPVVAATAIGITGDVTRFPNRDHFASFNGTAPIDVSSGGKKVYRLSRRGSRQLNHAIHMAAVTQIRHRHSEGRAYYDRKVAEGKSHKEALRCLKRRVSDALYACMVEDAKRDDRLVKKGPGGQPGNVSVASAAGSHPGTPALRLSHSRTRRQAITARRSSPAQKTRARARSVTTTRKATRSGS

SEQ ID NO: 270293 - protein, 417 aa, unidentified
MNTENYAALVALDWGETEHAFATQVGEGPIETGTMPATPETLHGWLEQLHERTDERPVAIALEGGKSAVVHALLAHPWLVIYPVHPATSERFRKAFTPSGAKDDVPDALVLLDILSQQRNKLRPLRLDSPETRKVAGLVAARRRAVDQRTKLACELGSTLKSYYPQALELCGREPATSLALDFLTRWPELKSLKAARPATLQAFYAAHNSRRSDVLTERLALIAHARALTEDRAVIEPAIFQVRMLVDILRPLQKNIALIEEHIAKAFETHPEAALFQGLPGAGPATAPRLLAAFGTDRSRYPNASSLQKYAGIAPVKQKSGRQLWIHWRWNAPKFLRQTFVEWAGQSVPKCAWAKAYYRQQRAAGKHHQATLRALAFKWIRILWRCWQDRVPYDETRYVASLRQRKSPLAAHLSTA

SEQ ID NO: 270294 - protein, 343 aa, unidentified
MQTVTTIGLDIAKSVFQVHGIDAAGQVVIRRQLKRRYVLAFFQKLPPCLIGIEACASSHHWSRELQALGHTVRLMPPAYVKPYVKRQKNDATDAEAICEAVTRANMRFVVTKTPEQQSGLVLHRARHLFIRQQTAVINAIRAHLAEFGIIAPVGRHGVEELLNVVADPNDKRVPEIARACLMAFGAQLRRLKEQILEFDRMIRAWHRSSETSRRLDDCPGVGPALATALVATVADPKSFRSGRNFSAWIGLVPKQHSSGGKNRLGSISKQGDCYLRGLFVAGALAVIRYAKIHGTKHRPWLTALLARRPTEVAAIALANKIARMAWAMMAKGERYKEPIALAA

SEQ ID NO: 270295 - protein, 442 aa, unidentified
MSNRTVNRLSRGDRRRNAKLRDLRSLVRPDLAICAVDLADANQAAVVADHDSVVLGRRMFRCSAWGIDQILDWAIPIAQQAGFAGVVVACEPTGHRWKPVAERARARALNVVCVQPLLVCRAREAEDFTRDRSDYKDATIIARLTSERRCYRPEVTTPTWARLRHLGQRRVAVLQAATAARQTLRDLLGVGWPSVLDAAAQPLDSLTFRACLAVATDPTPIVAMGYDAFAGAVAAELPRWGGKRRRHQILRAVFAAAQAPGGVAAERVGAAERASFAVADWHRALQELGEVQGRMVAVLDQLHLTRLVTTITGLSAVGAAAILAETGDPARYDIARTWAKHAGLCPRDNTSGRFQGQTTTSGRGRPGLRTAAWRAIWGLLPHNPIFAARYAHLTGRAHNPLNDGQARAALAAGLLRQLHAVCTHRVAWDPKIAAGEVTATAA

SEQ ID NO: 270296 - protein, 445 aa, unidentified
MTPCAPLLSTAEPDWAAFAAIDWASRKHFWSLAPCDGGPPESGTLDNTPEAIELWAMALRQRFAARPIAVAIEQKRGAVIYLLAKYAHFVVYPVPPSMAASYRQAFFPSGAKNDPGDAGLLLEILLHHRQRLRPRQPDTPATRLLQFLVEQRRQLVQQKVQQVQRLTDCLQQYFPQLRLWFDSLDSPLVTALLDRWPVLPQLQRAHPGTLHRFFVEHNCRREELIQQRIQAIYTAVAAIDDPVVIEACTRKTETLLHLIRCLRQEVAGLEKRIRTLTEEHPDAPIFASFPGAGPATVPRLIAAFGTCRDAYANASDVQRISGVAPVNITSGNAKSTRMRRACPKFLRQTFHEFAAQSIPYSTWAKAYYQHYLRQNKSQHHAAVRSLANKWIRILYRCWKDHRLYDESIFLESQRRRGSLLGAELASLGTVQWRSQAGFQKLDDQP

SEQ ID NO: 270297 - protein, 461 aa, unidentified
MKEKKNASVKNEKTQGIGLPVLQPHAAGIDIGSQEHWVCCPPKPDGSVNVRRFGSRSCDLEEMAAWLKSEGIETVAMESTSVYWIPLYELLEVKGFDVLLANAKQLANVPGRKTDMQDCQWIQLLHACGLLRGSFRPGQEICALRALMRECSNLADERRRCVQRMQKALDQMNVQVHRAVSDITGFTGMGIIRAIVDGERDPLVLAGLRDRRCKKDVKAFAEHLRGTWREEHLFNLKMSLELFDKLNEMIDVYERKVEQLMRELTPEERRHAPKPEHPSKTKARSIRKTGQEETRESLWRFSGVDLTRIDGINTGAANTVLTEIGLDLSDFPTEKHFVSWLRLSPRYSISGGKVLKKKRNAVGATRVATMLRTCATCLERSQTALGAQFRRTSRRKGRAVAVFALARKLAILIYRMLRYGQDYVDQGVEAYEEQFKQKRIQNMISAAKQMGYELTPISIAA

SEQ ID NO: 270298 - protein, 268 aa, unidentified
MKYVGLDWAYRTAQWCALDPGGEIAGEGRFAADRDGLARLVLELGDEVTACLEMMSGALWARDELVACGWQVQVADARKVKTVAPLAAKTDKVDARLLAELSRRQLVPALWLPSLDERELRERLRRRMHLVRLRTSAKGRIFGLQTQWGIRISLRRLRRADGMTLLERAGMPAVWRHSISECLALIDFLDARIVALDAELRPFAQADKRAVLLDTIPGVAELLALTIAVEIGEISRFAGPQKLVSYGRLAPRVRQSGQGRPHTGPLNK

SEQ ID NO: 270299 - protein, 355 aa, unidentified
MKYYTSTTEFNCGIDLHARQMYVCLMDRQGKKLVHTNVKDNDFAYFLKLIEPYKHSLTVCCECMFGWYWLADACQAAGLTFVLAHALYVRAIHGGKNKNDRIDSEKLAHLLRSNLIPPAYVYPAQQRPLRALLRQRIFYVWRRAQLLARIHCHQLAHNRIPAKQSRWTRDDWEEQLLKAEIHPLRQLALQNDLAMIRHFDHQIFEVEKELYRQTKQVAAREYALLQTVPGIGENLGLTILYEIGDINRFPTVKDFLSYCRLVKGTVASAGKIKGLRGAKLGNPYLRWAFGEAAVIAKRDHFRIRPLAQRLEARMEGNKFKANTVLAIKLARSVYFMLKNKTVFDPDRLVAALARN

SEQ ID NO: 270300 - protein, 386 aa, unidentified
MAHSTNIPQHSIDYDQTLILAIELSNKSWVLAAQVPGLSQTKAKRTIEPDKNHLLAAIEGYRIRAATAGRSVKRVITSYEAGWCGFWLARWLMAHGIEVHIVQPSSVPVDRRMRRGKSDGIDAELLLRTLLAWLRGEPRVCSMVPIPDEADEDARRCVRERSELVSERVGLVNRIGAVLATLGADGYNPLLQSRRRRLTELRTGLGDPIPPNALAKIARLLTRLELVLAQIAELELERDAVARTDAPDQAAKMIQQLVSLRGIGVQSATVLVREAFVRRFANDKALGSYAGLTSTPYSSGSIDREQGIGKAGNRRLRTVMVELAWLWQRYQPGTSQVVWFRQRVGSTGRRVRKVMVVALARKLLIALWRFVIDGVIPEGAITKPSI

SEQ ID NO: 270301 - protein, 413 aa, unidentified
MQVVHERCAGLDVHKKSVVACVLTPEGKEIRTFSTTTADLLRLAEWLKEQGCRAVAMESTGVYWKPIYNLLEAEDFEPMVVNAQHIKAVPGRKSDVRDAEWIANLLRHGLLSPSFIPDRGQRELRELVRYRRSVVQERAREANRLQKVLEGANLKLSSVASDVLGRSGREMIRAICRGTEDPAALAALARGRLKEKSAQLQEALRGLTGPHQRFLLQEQLSHIEELESRIDRLNAEIEARLTPFAPILQLLDTIPGVGQRTAEDLVAEIGTDMGRFPTHRHLASWAKICPGNRRSAGKAKHEHIGGGNPWLRSLLVEAARGAVRRKDTFLAAQYRRLVGRLGDARAIVAVAHSILVIAYHIIRDGKPYQELGATFHEQRSQKAVVRRLTQRLEDLGFSVNLQLKEDPPTAQAA

SEQ ID NO: 270302 - protein, 351 aa, unidentified
MHYIGVDYHKKYSYVVVKDKEGKVERRGKVDNTKEEFRQLLKPYHSGKAVLEATRNWGLVYDWLEEILDDVALAHPLKVRAIAEARIKTDKISADILCDLLRSNLLPEAYVPNKETREAKNTLRQRMFFVRVQTMVKNRIYTILDRHPEMVSQSPDVSDLFGASGMEWLRKTVLPGQDNQLLASELELLEVLKQKISESNGIVKELARGDKRVKLLRSIPGLGPFLSVLVAKEIDDISRFRDEKKLCAYAGLVPSTYASGGKVFHGRITKLGNKWLRWAFIEAVQPAISCDADLFAYYQRLKVKKGANAAKVATARRLLTIVYRVLRQERLYERRNRRARSRVAPAALVSS

SEQ ID NO: 270303 - protein, 316 aa, unidentified
MKTQTFVGLDVSKQKLDVAVRPQGRHFVTPNSDRSIKQLVKRLIALKPQLIVLEASGGYEFLVTAALAEAQLPVALINPLAVRKFAGATGKLAKTDKIDAQVLAHFAEALRPEPRPLPDQDQQLLKAALQRRLQVVKMIGQEKNRLEKTFIPALKQDIQAHLAWLQQRLAQLDRDLHDQIRRSPLWRDRDRLLQGIPGIGPVVSRAVMAQLPEGGTLPGKKAVALVGVAPYNRDSGRFRGKRMIRGGRSYLRRVLYMAALVASRFNPVIRAFYQRLLAAGKPKKLALTACMRKLVLIINAMLKNNQPWNQFLTQVP

SEQ ID NO: 270304 - protein, 351 aa, unidentified
MMIIGVDYHPSFQAIAFCMEETGECGEQELSHSDGQAEKFYRDLQQRGIRVRVGMEATGYSRWFERLLAELGFELWIGDPAEIKAKRVKKQKFDREDARLLRRLMLENNFPQIWIPSSENRDLRQLLWHRHRLVQMRTRIMNQLQALAMNEGYRWKKKLFREQGRTLLEKLALAPWASRRRQELLELLDRMNPAIEELTAAVEQEARKRPEVMRLMTHPGVGPLTALAYVLIIGTPARFHRGQQSGTYVGMIPSEDSSAGKQRLGHISKQGNSLLRFLLVEAAQAAARINPEWRRRYMHLAMRRHKSIAKVAMGRKLGVRLYWMWRNGCEYAQSLEFGSYVGQLGTGHGVK

SEQ ID NO: 270305 - protein, 338 aa, unidentified
MTNNVVGLDIAKNIFHLYSLAADGTVLKKKLKRDDLLTFIANLPISLIGMEACGGAHYWAREFAKLGHEVVLLNARFVKGFVMGNKNDFNDAEAIYTAVTRPNKRVVAVKNEAQQDIQMLHRLRQQCIDQRTALVNQIRGLLSERGITVPQGIRKIRQELPRLLEDAENALTPLSRELFAEQYQQLKALDDDIKTQDGRINRLCQQNTLSRRFLEVPGIGPIIATIMASDIGDGKGYTKSRDYAASLGIVPRQHSSGDKQVLLGISKRGNAYLRTLLIHGARAVVKCCSDKNDPLSRWLQALVDRRGFNKAAVALANKNARILWAMARQDRPYETVAA

SEQ ID NO: 270306 - protein, 343 aa, unidentified
MDKISMIGLDLAKNVFQVHGVDASGGVVLRRQLRRGAVEKFFAQLPACTVGMEACGSAHHWARVIGGYGHQVRLMPPAYVKPYVKRNKNDGRDAEAICEAVGRPTMRFVPVKSVEQQATLAVHGTRALLVKQRTMAANALRAALSELGIVAAQGLEGLHELMAKLETSSKEIPEMLRGALLVLAEHWRALDANERAIERQIAKAARADREARRLMEVPGVGPIIASTVLAKVPDAKVFRSGRDFAAWIGLTGRDRGTGGKHRPGHISKQGDRMLRALLISGASAHLRQQKRRGISDPWLRELLARRPYKVAMVAFAAKTARILWAMLVKGEPYHDRASASAAA

SEQ ID NO: 270307 - protein, 343 aa, unidentified
MVDETGAVLLHFKVAHDAAGLAELRKKLDRLAPAGDIPIAIERPSGLIVDALVEAGHTVVPIHPNVVKACRPRYRAAGGKSDPGDAFMLADILRTDGHRFRPLAPCSDEIKALRALVRGRDELVAERIALANRLRSLLDSFWPGAAAIFADVDSPIALASGLAAEAEAEAKGEMVGALAAVLERLVGEIAKLTSRIQNTVAELPDGQIVMSFPRTGRICAAQILAELGDVRQRFPSADYLAAEAGVCPVTHASGKSRGVVFRWACNHRLRRAVTCFADNSRHASPWAADIYKRARSRSCDHPHAIRILARAWIRVLWRAWNDGTLYDQKLHNAAVSHNQALAA

SEQ ID NO: 270308 - protein, 340 aa, unidentified
MQITTIGLDIAKNVFQVHGIDAAEKVVVRKQLRRGHVMKFFAALPPCLVGMEACATAHHWARELTKLGHEVRLMPAKDVKAYVKRNKNDAADAEAICEAVRRPTMRFVHPKSAEQQGRLMQHRARDLLMRQQTQVINALRAHLAELGVVAAQGREGLKQLLAIIADKKDARLPIDARASLIVLAAQLQALHTMIGSIEKRLMVQHRANEASKRLQSIHGIGMIGASAIAATVTDPKVFRSGRDFAAWIGLVPRQDSTGGKQKLGPISKQGDRYLRRILVVGAHSVLRRAKQNPEKYPWLTQLLARRPFKVVAIALANKLARIAWALLASGGHYRPRLAAA

SEQ ID NO: 270309 - protein, 359 aa, unidentified
MQDILTCAMGLDIHRDMIVACLAKGDLDTQPEVETRTFSTLIPDMQRLRDWVVEAECYHVAMESTGIYWQPIYEILESCFDGEIQILVVNARHIKNVPGRKTDMRDAQWIATLLRAGLLKGSFIPEKPFRELRHLTRYRKSIVHDITAQKNRIDKFLQSSGFRFAAFLSDTFGTSGRNIIRHLIANGSITREALDKCLKTKTRNRIDEILVALNGTLSKHQRDFLQMIFNYLEQIEAHKQTIESAIDTEVTVHTDALIALCSIPGIDVTAASAILAEIGTDMSAFPDSQHICSWAGLSPGNNESAGKRKSTHINKGNPYLKSMLCEVAWITASHREFYLSGWYWRVKQRKGAKRATIAL

SEQ ID NO: 270310 - protein, 388 aa, unidentified
MRPTGKARKQDLARGQSDDSTLYVSLELSRSTWLVTSLSPGGDKMSKHTTVAGDASKLIALLARLRGRAERLAGGSLDIAVIQEAGLDGFWVHRSLEAKGIESHVVDPASIAVSRRRRRAKTDAIDGETLLRTLLAWKRGEPRVCEMVVPPTPEQEDRRRLSRERAILLRERVQHVNRIKGLLASQGITGYDPLRKDRRIRLDGLTTGDGRPLPGRLKAELLRELARIELLLLQIADLEAERDAAIEPDAEGRPSPVALLVQLKAIGPQIGSVLYHEGLYRSFTNRRDVAAYAGLVPTPWRSGSIDREQGISKAGNRRLRHVMIELAWLWLRHQPGSALSSWFRARVGNERGRIRRITIVALARKLLIALWRYVTHGEVPEGAVLKAA

SEQ ID NO: 270311 - protein, 408 aa, unidentified
MEILYCRCAGLDVHQQSVVACARLVEGRKVRQEVATFETTTKGLAVLRDWLRGHGCTHAAMESTGVYWKPVWQVLEGSLELILAHAQEVRNLPGRKSDVSDAMWLADLMAHGLIRGSFVPPTTVQALRDLSRTRTQLKNEVSRHTLRLQKTLETAGLKLTGLISDVLGVTGRAIVEAVIAGETNPGTLSKLRRRGIKASQEQLCDALQGRIQEHHRILLRVHLDQIDALQQAIFQLESRMGDLLEPFRNSVELLKTVPGIQETTARIVLAEIGFDVARFDTPGQLVSWAGLCPGSDESAGKRRSTRLRPGNSWLRTALVQAAWAASRKKDSYLRALYLRLRSRRGAKKAIVAVAASMLTSIYFMLQRQQRYADLGPAHFDQRHRQRVARRLVRRLEDLGLKVEVKEAA

SEQ ID NO: 270312 - protein, 462 aa, unidentified
MNRKEKSKAAASGMALVHPNAAAIDIGSTMHMAAVGADRTSDPVRSFGTFTADLHRLADWFAECGVTTIVMESTSVYWIPIYELLDERGFEVFLVNARDAKHVPGRKTDVSDAQWLQRLHSYGLLRASFRPKGEIVELRAYLRQRERLLDTAASHIQHMQKAMTEMNLQLHHVVSDITGATGMRIIRAIIAGERDPAVLASMRDTRCHSSAEVIEKALTGHYRGEHLFVLEQALALYDVYQQKVAACDIRIESVLKELSSIRGRKEDARADGSGSPRRRSRQSNGPDFDVGKALHSLLGKDLTRIHGMGPYLALKLVSECGDDLSAWPSAKHFTSWLCLAPSNKISGGKVLSSRTRRSGSRAASLLRLAAVTIGRTDTALGAFYRRLSARAGKSKAVTATARKIATLFYNALRHGMDYVDPGASYYEIRYRERVVKNLHRRAKAFGFILQAAEMPAAEQAVS

SEQ ID NO: 270313 - protein, 478 aa, unidentified
MACRRLVGIDLGIASAHTVRVLDETGETVAKRKCWPTTDSLTQIEAAALSGAEEGTRLEVIMEPTGPAWLPLAVFFASRGHAVFRVSSQKASDLRKFFSKHTKTNGIDADTLARLGIVDRAGLLELVLPDAPRAALDRRVRATDRLTTQAGQHKVRIKDLVRQVLPVSPLAGDLGVADLAMLEHFADPNRLVKAGLKRVTAVIAKASRNHLGEARAAEWIAAAETSLELYAGHPAVAFAEIAAEIATEVRLLRAITAELAVHADAREVAYQQVDPAGLARSLPGLADVGGPALVATLGDPARFQRGKQARSFTGLTPKASETGDTDRKGQSMSKAGSSLLRTTLVRAADTARKQDPQLARIYYVQMVERGKDHLGATCVVAANLAERAWTVLRRGEPYIIRDTDGRAVTSAEATAIIAEHWTVPAEVRARRRSKKGGKAPHKVLREHVKSHAQGVDGTRRPSPTTTPARSATGVKRTA

SEQ ID NO: 270314 - protein, 316 aa, unidentified
MQPLCVAGIDAGQRFLDLGLAPSGQTARFHNPQADIARLVARLRQAGVARVVLEAIGHYAQPVVQALVEAGLQVGIVNPRRIKAFREAEGRRAKTDRLDAGLIARFALVMSDAVRPLPDADAQALKALSVRRRQLTELIAIEKTRLKQATEPLVLESHKATLAALAEACAAIEAEISGRLARDPERAAAQRLLRSVPGIGARVCAVLITELPELGQRDRKTIASLVGLAPQVSQSGAAPPRAAIAGGRPCVRAALYMSALVAVRHDPVQKAAYQALRAQGKPAKIALVAIARRILVTANAILKTKQPYNPNFRLDP

SEQ ID NO: 270315 - protein, 354 aa, unidentified
MRSTTKYVALDVHQATTVASVREERGRVIARSVVPTEEAALLEFFRGMRGSIHVAMEEGTQAQWLHELLAPRVDRVVVCDRRGQARRGNKGDQVDADRLSEELWRGGLRAVYHGGGRRAALKELTRTYQNLVEDSTRVMLRLKALFRARGIRAPGQRVYQPAGRAQWLAQLPEDGARFRAEVLGAELDVLRALRPKAKTAMVAEARRDPAWELLQTIAFFGPVRVALLLATMQTPWRFRTKRHLWAYAGLAVVSRSSADYQLMAGRPVRRRRAPLTRGLNQNHNRVLKDVFKGAATAATARPGPLQDFYRAMIARGMREDLARVTLARKLAAIALRLWKKGERYDPTQLTMQAQ

SEQ ID NO: 270316 - protein, 414 aa, unidentified
MTQTLIVGVDPHRKKNVMQLMDSQGQKLGPPFRADNNRPGTEAFVQHLTEQLASGDYESVQLASEATGWYWFHFFQHLSQEPELNQWPLELYLFNPRLTANFKRSYGARDKTDPNDAFIVADRFRFGRDLPAPFQYDETYLPLRFLTRYYYHVTHNLAREKSYAMAILYLKVSEYSHPQKRPFQNIFAAASRAVLQEFASIEEIAALDFAELVEFIDAKGNRRFANPEDNARKLQQVADLSYPLAPALQQPLNDILTLSFKHISFLEAQQKRLNSAIAQQLTTIPHTLDTIPGIGPVFSAGLIAEIGALDRFDFKETKVAKFAGFMWRKSQSDEFQAQHTPIIRNCNHYLRYYFCEAANSVRMRDPEYAAFYDRKYHEVPKHKHKRALVLTARKLVRLVVRLLTTNQPFRPRRT

SEQ ID NO: 270317 - protein, 409 aa, unidentified
MERLLERCAGLDVHKRTVAACVRVPGPGGKRVHHVHTFGTTAADLLALGDWLATHEVTHVAMESTGVYWKPVYAVLEERFTCVLVNAAHVKQVPGRKTDVADCAWIAQLVEHGLVRGSFVPPRPIRDLRDLTRYRTTLTHERVRHANRLHKVLEDAGIKLATVASDILGVSGRAMLGALVAGTTDPAVLAELARGRLRTKLPALRAALAGRFRGHHAFLVSQMLGHLDYLDEAIATVTTQIEEVLRPFAAVVARLDTIPGISRRVAEVVVAEIGTDMTAFPSARHLASWAALCPGHHESAGRQKSGRTRKGNRWLRAALVQAALGAIGTRDCALGARYRRLVRHTGHNKAVVAVAQALLVTIYHVVARETAYTEQGAAYFDARHAERVTQRAVRALERQGFRVVLERSA

SEQ ID NO: 270318 - protein, 355 aa, unidentified
MVGSISEAKSSVSGVTDPYRRTEHCEKIHPYRCDKEVGVLGIDVSKDNLITSRRGKYENNLKGYEKILDMKPCTIVLEPTGVYAIKPSQYFKEKGIRVLQVSPNMLSREKDFREKKTDFYDAEKLENMVDKAKEYEYNVLRELVTLYMFLKDMEVKQKNRLKRALFLVSDNDKINKERLERLASGDFAQEVLYQLEYTPIVLEEVKILAKALFETQEKLKEVKEMIESQVPEDHVLLTIPGVGKLAAGIIIGVVGDIRRFPKPESFVAYCGLDPVVERSGKAVVSKGISRRGNKYLRSLFYFLAQMNCSKNPTLLRFYESHKDKLHGRKLYTALARKLAKVVWSVWYNNKPYEPK

SEQ ID NO: 270319 - protein, 349 aa, unidentified
MDHIGIDVHKRESQIYILAEGGEVVEQRIRTEPERFAAVLGTRPRARILIEASTDSEWVARCLEALGHEVIVADPNFAPMYATRSRKVKTDRRDARALAEACLLGAYRPAHRLSDPQRHVRGRLGVRDALVHTRTRYISLIRALLRQQGYRVPSGSAERFVDRVQALSLPGRLRSVVAPLLAVMRHLNQQLAYSDATIEHLAVQDPRVPRLRSVPCVGPVTAAAFLAAIDDVGRFHHAHQLEAYLGLVPREHSSGDTQRRGPITKAGHSHTRWLLIQAAVSILRRHPPQAEALRTWALRIAARRGKQVAVVALARRLAGILYALLRDGSVFQPQRVRPPRPTAAALVDV

SEQ ID NO: 270320 - protein, 324 aa, unidentified
MYKYTGIDISKQDFDAFSMDGNGEGLSLKCKNGTQGFKKLLKNYGKKSIYVMEASGPYYLRLANFLYQKGVKVCVLNPLVIRRYSQMRLLRAKTDKKDAQTIFEYSNHNLLSLWEPTPASIKEMQQVLTALELLNRQLTALTNQLGAFKSSGELFGHVKASLKKTIVGVKEQKEKLEQRLQQIARGHYNQTKELLESIPGIGPKASAVLIAITNNFNKFVHYKQLIAYVGLSPRIYLSGTSVKGKGHIAKIGKAQVRKQMYMSAWSAKFHNRACVLLYERLSAKGKKERVIKIAIANKLIKQAFSIVKNKREYDVNFISKLNIV

SEQ ID NO: 270321 - protein, 401 aa, unidentified
MVSIGIDISKEKSTVCILRPYGEVVESPYDVAHNESELNALIEHIQSFDEDVKVVLEATGGYHHVVVSKLISVGIFTVVVNPYIMKKYCAATLRKAKTDKIDSVKIAHYGIDHWFSMTAYCPPDEVYAELKLLGRQYEQYVRLKVGCKIHLADLLDGVMPGIKKILTGNVPAFSTKDKLCDFVEKYWHYDHIKKLSEKQFLASYEKWSKKKGYRYNNESQAIAIYQLSKNNIPTLKSSTSSTKMLVLQAVKSVRDAELTLSLIISQMQEIASALPEYSVVNEMKGVGTVLSVRLIAEIGDVRRFHNGSALVAFAGIDAPPYESGAFVGTNRHISKRGPATLRKIGYEIMHALKVTKPTEDSAVYDFMIKKENEGKPKRVAKIAGLNKFLRIYYARVMEVYC

SEQ ID NO: 270322 - protein, 410 aa, unidentified
MNRLVERCAGLDVHKATVTATVRVPGEGEREQETETFPTTTRGLLVLLDWLQSYKVTLVGMESTGVYWKPVYYALEGHFECWLLNAQHLRNVPGRKTDVADSAWICQLVEHGLVRPSFVPPKPIRALRDLTRYRKSQIEDRTREVQRLDKVLQDAGIKLTSVASKTLGASARAMLDQLIAGNHDPKALADLAKGRLRVKLAELEDALEGHFITEHHGLMTREILSHIDYLDATIARLSARIEEVIAPFSAKVDLLRTIPGVDQRTAEVIVAEIGVDMGQFPSAAHLASWAGMCPGNNESAGKHKSGRTRNGSKWLRKGLTEAAQAAARTKDTYVRVRHARIRARRGPSKATGATRHHILVAAYHILSEEVPYQELGLDHFERRHSDEQRTKRLVRQLEQLGHNVVLEPAA

SEQ ID NO: 270323 - protein, 333 aa, unidentified
MDTETGEFQERRLQHRGEAEKFYRDLAARGVEVRVGMEASGHARWFERLLAELQLELWIGDAAEIRAKRVRKQKTDRQDAQHILTLLVQDRFPRIWVADWENRDLRQLLWHRHRMVQTRTRIMNQLQAVALNEGLRCKKRLWGKKGRQQLEGLRLAPWATRRRRDLLELLDRLNPVIAELTHEIEQEVEKCPAAQRLMTHPGVGALTALAFVLVIGTAERFQCGKQIASYLGLVPAEDSSGERRRLGHISKQGSAILRFFLVEAAQVTVRSVPEWRSKFFHLAMRRGRKIAKVAMARRLAVHLFWMWRKQWDYQQLNEFGPYAGKPGTGVGVH

SEQ ID NO: 270324 - protein, 355 aa, unidentified
MKVTTVGLDLAKNVFQVHGVDAHGKKLFNRQLRVAQVAEFFVKLEPCLVAMEACASAHHWVRRLRAMGHEVRLIAPQYVKAYVKTNKNDAADAEAICEAARQASMRFVSPKSLEQQAVMALHALRAGAMKTRTAQANRLRGLLLEYGIAIAQGIANVYKRVPEVLADESNELPDFLRCALRAEYDQLKLHEQHAKALEALVQQWHRECAASRAVERVPGIGVLSASALVASMGDANGFSNGRQASAWVGIVPKQHSSGGKQRLLGISKRGDAYLRTLLIHGARSVIAAIQKRLKAGLDPHLLSRRERWVLALVQRRNANVAAVALANKNVRTAWAILAHGTPYEADHVSQSPVMA

SEQ ID NO: 270325 - protein, 474 aa, unidentified
MSKKTQQPEVRGSRGPVPAKSKRNKQPSQPDRSVFESNAAGIDIGAREIFVAVPADRDEHPVRKCETFTGDLHQMAEWLVRCGITTAAMESTGVYWIPVYEVLEQHGIKPCLVNPRNMKNVPGKRTDFHECQWIQHLHSLGLLHSAFRPDADVCAVRSLMRHRNDLVMMASEHIQHMQKALTQMNVQFQHVISDITGLTGLAILDAIVAGERNPEALAKLRDPSIKASEETIRKSLEGNWRAEHILALKQRLSLYRSHRGLIDECDKEIEKLMAAFEPRVDPDDKPMPEDRKQKQRKRKKKSGSPDFNMRTEAYKLFGVDLTQIPGLMALVFMLFSEVGRDMSRWPTAAHFVSWLGLCPDNDISGGKVLWRGGRKTKNRAGTLFRLAAHSLHRDQTPMGDYLRRMKAKLGPAAATTATAHKIAIIFYTMVSKQREYDASLWAKRDETREKRLEARFQKQAAQRGYKLVPLEPAA

SEQ ID NO: 270326 - protein, 344 aa, unidentified
MPSNFYLGIDVSKASLSVVLMSSNSKVLWSSKKIANQPSGFKQMVEHASKIASKHADGDDYSIAAGMESTGVYGEQLSYYLADNNMSGRISLYVLNPFAVKSYRKATMQLNKNDAADARLIASYLLSMITTGQITPWQAPSLAERLLRELTRRRAELVTLREAEYNRLEKFRAGGSHPHPVIESVQELIAHLEQQIREIDEAIEKHIDDAGLRDTAELLRSIDGIGKVSSASFIGEAGDISRYRSVKQLVSRLGIAPCENQSGTSVHKKPVMSRMGSAVLRHAMYMAALVATRKNKVISAFYNRLLARGKCKKLAVIASMRKLLHIIWGVLTHGVKFDPEYAPA

SEQ ID NO: 270327 - protein, 354 aa, unidentified
MVTIISDELPRIVVGVDSHKETHQAAVLDITGAILGNESFAASSAGYRELEAWLATLGTIERVGIECTGSYAAGLTRFFRERQVDVFEVNTTHRATRARRGKDDAIDAEMAARKVLSGEASARAKDTTGDIESIRLLKLSRESAIKARTIALLQIRDVLITAPAELREWIESAGGARHRVNRAWALRPDLERLGEPLQAAKFTLRQLSRRVKFLDEEIAGVDRQLAALVERCAPHLLQCRGIGTQHAAQLLITAGQNLERLHSDGAFARLCGVAPVPVSSGKTNRMRLHRGGDRQANRALHLIVIARLRLDPKTQVYMARRQAEGLSKMDAVRCLKRFVAREVYKELKRDLLQN

SEQ ID NO: 270328 - protein, 402 aa, unidentified
MNCVGIDVSKGKSMIAVMRPFGEVVISPFEVQHTASELSELAKLLKSLDGETRVVMESTGNYHAPVAWQLHDSGLYVSVVNAMLVHDYKNNSLRRAKTDKKDAVRLANYGLDHWFTLPRYVPEEDTRLLLKNCYRQYQQYSKVQTMLKNNLISLLDAVFPEVNRLFNSSPRADGSEKWVDFVSTFWHCQCVSTLSLKSFSARYLKWCRKHGYYFSQEKAFEIHSKAQSCIGVMPRNETTKLLVQQAIAQLKATSAALAALKQEMQSLAACLPEYPVVMEMFGVGSTLGPQLMAEIGDVRRFHSKKALVAFAGIDAPPCQSGQMDIHSRSISKRGSAALRRTLFLVMGIYLQSAPLDEPVYQFMDKKRSEGKPYKVYMMASANKFLRIYYASVTAYLNTLARI

SEQ ID NO: 270329 - protein, 459 aa, unidentified
MKKRKSKRTKGIEEARPFDGLSKVNKNAAGVDIGATEIVACVSGGDEVQLVKAFGNYTVDLLSIGEWFRKHEVKTVAMESTGVYWIPLFEELERQGFQCLLISSRSLRKVAGQKTDVEDAQWIQTLHSYGLLKGSFRPEGDLVGLRTLLRHRTQLVEHRAPHIQHMQKALLQMNIQLSQAVTDVMGMTGQMIIRAIVAGLRDAEELASLRDPGCKHSEEEIAKALTGTWREEHLYVLKQSLELYDFYTEKIEACDAEISRQYGMTRLDWGSRELPLVPDKKRHTHSKNAPKDVREIREHLYRINGVDLSLVDGFGISLAQTVTMEVGSNVGEKFPTEKHFSRWLGLAPKHDITGGKVLSNHTLKTKNRAGQAFRMAAQAVKKADCPFGALYRRLRSRLGPAQATVATAHAIARTVYKMLKYKVEYDPLSVNEYQVKYEEQQVKYMKKKAAKLGYQLVPA

SEQ ID NO: 270330 - protein, 361 aa, unidentified
MTNASNRTALPWAGIDVAKATFEAALHPAWVRGKEIPLAELPGANFPRTAGGVARLLAWLDGMQAPVGVCAVMETTGRYSVELAELLLVARPSLAPAIADAKSASHFGRSLRLRNKTDRVDATTLARFGAERCPAPWCPPAPEYGALQEMSRQRRSLVESLVTARNRLGEIESIAAVAKIQQQVIASLEKAIERIEALMRKHVVKHAGLADAVRRLDTMPGVAFVTATTVCGELGDLARFLTSRRLSTFAGLSPRDFESGTSVHRKPRICKQGCPRLRQVLYLAALAAIRNPGTASHARDGAERPVSTHSGGGRIMVPMRLVVHGLWEGLRIHGGNARPLVLASAQSGRPQYPRQRTCRRD

SEQ ID NO: 270331 - protein, 369 aa, unidentified
MKHVTTYVGIDAHKKELFIAMLVGQEAKPVTWTVPNEPGAILRLTRKLERDAPGAVRVCYEAGPCGYALQRRMATPRVSCQVIAPALVPRKPGERVKTNRRDARKLAELLRGGLLTEVRPPTPEEEAVRDLCRARDDAREDLQRCRHPLGKLLLRRGLHYSGRNWTRAHRDWIHSLEWTQPAGRVVVDDYLLAIDHADARLIELDARLTEIAQTEPYRQPVGWLRCFRGIDTLTAILILAELHGFRRFHSPRALMAYLGLVPGEDSTGAKHRRGRITRTGNALVRRLLVETAWHYQHRPTVGIALARRRKGQPGRVIAIAEKAQQRLCRRFRQLAHRHKPLPKIVVAISRELSGFLWAALQPAPVPAHS

SEQ ID NO: 270332 - protein, 414 aa, unidentified
MEVIHNRCAGMDVSKKDAKVCVRVAGAGRRKTVETVRTWGATTNQVLALRDHLVAEQVSLVVMEATSDYWKPFYYLLEDAGFELMLVNARHVKNMPGRKTDVTDAAWLAQLGAHGLVRASFVPPAPIRELRDLTRARVMLTRERGREIQRLEKLLEDARIKLSSVATDITGVSGRLMLQALIDGHRDPGALADLAKRRLRTKIPELTEALTGRFTEHHAFLAGIFLETIDQRTRQIDELNQRIDQAMTPFRAFCDLICTIPGKGRRTAEVVVAETGADMTVFPSPKHLASWAGVCPGSNESAGRVKSTQTRPGNPYLKAALGTAALSIAATHGTFLAAKYRRLAARRGGKKALVAIEHTLLTTIWSMGNTGAEYDDPGPDYYIRHNPERVLRNATRQLERLGYSVTLSPTAQTA

SEQ ID NO: 270333 - protein, 359 aa, unidentified
MQTKSEITNHPAFFLGIDVGKADLFCHLIGPDEALSERFDNTVKGIKSLLVWLSKASASKTFVACLEQTGHYGDAIAQALYDTQSTGIHVVNPQRIKAFGMQKLRRNKSDTADAKLIARFIKSEHLELRPWQPKSITQKRITALSRFADSLTQDAARLKTMLESQTEKTIIASLKRQIKGAQKEIKALREEIAKLVKEDPQLLTKNKLIQSIPGLGVIASQIVIAELPNLEQFDDARQLAAWAGLTPRHHSSGTSGKTQTPITKIGSVHLRRGLFMPAMTARVYNPLLKEFGDRLQANGKTPKQVIIAIMRKLLHQIYGILKSGMPYNPNKRGFQNALAIAPSTPSKMPLPPALKACKS

SEQ ID NO: 270334 - protein, 396 aa, unidentified
MEKVYDKCCGIDVHKKLIVACFKCGKKQEVREFGATTRELLKLADWLGSGGCEMVAMESTASYWKPLYNILESSGLNAMVVNARHMKAVPGRKTDVKDAEWIADLLQHGLLQASYIPDKDQRELRELVRYRKSLVGERTRELNRLQKMLEGANIKLSGTVSDINGKSARSILEYILTGESFDDAKYDEMYGNKIIAHNLKATKEQIIDDLNGIISPLQRKMMRTLLKHLDELNSHIHELDDDIDSFMKPEEKQASAAIQDVTGIGNTSAQAVISVIGTDMGRFPDDAHIASWAGLCPGENESAGKRKSGKTRKGNALLRETLVNCAHAAVKNKKSYFYAQFMRISAHRGKKRAYVAVAHSMLVAIYHILKDGVVFKDLGADYYNQPESVKLTVPAH

SEQ ID NO: 270335 - protein, 363 aa, unidentified
MFESTMVSVGLDVHARSVRFAAVRADELLEERTLPYDEEAVERVLRRWPAVRCCYEAGPTGFGLYRYLVDRGIDCWVVAPGLVPQRPGDRVKTDSRDARKLARLLAGGLLEPIHVPSRQLEAARDLVRAREDARLDRMRDRHRLSKFCLRHGRTLPTRSWTVVRRKWLGEQRFEFAAEQCTFETYVHTVDLVDARIEQLERAIRETAEQGPWSQLVARLRCLRGVDTLTALALAAEIGDFNRFESAEEFMAFVGLVPTQRSSGDQRRQGSITKVGNSHVRRLLVESAWHARRHPKVGYDLARRQRGHDAAVIERSWRCQQRLHQRWQRMAGRGKPQQKIVVACARELAGFVWAIATDQPLRTT

SEQ ID NO: 270336 - protein, 344 aa, unidentified
MPTEAATTLYAGLDLHKRNVFCAIKDQEGKPIYRHRLPTELPAILQALDPYRAQLKALAVESTFNWYWLVDGLQAADYPVRLANPAAMQAYSGLKQTDDESDALWLAEMLRLGILPEGYIYPKAERPIRDMVRRRLLIVRQATQMLLSLQSMVTRHTGQGVSGAKLEQWTAHEVATAFADPYSQATATAMLELLAEQRRLQHSLEKQVVAVMKLHGPFVRLLTIPGIGNILGITIALETGPIERFGSAGQYASYCRTVNSRCESDGKKKGENNRKNGNKYLAWAYVEAAYFAQRYHLLAKSWFARKAARAGRVVAVKALACKLSKAAYYVVRDEVDFDEEKMFR

SEQ ID NO: 270337 - protein, 394 aa, unidentified
MILVGIDIGKNKHTFSIIDKSSGEILLSPSDFSNNLKGFLFLIQKLSSYTKSELLIGMEDTGHYHFALLKYLLDRRYTVVLINPTTTDLTRKLQGGITKNDPLDSLTICDVISSNHRNKPYRVTTLNRFDLYEQKQLTRHHHNLKEELNTYKNRLQKCIDIVFPEFNSLFHSKYGIVYMNILKAFSSAKAIANADIRSIRKCFEFKGQGKRISLSAEQLKLTAKSSIGIPSVAEEIQIRHLVSQIELLEKQLSEIDKRIEEFSLKNNSPILTIPGISHFSGTSIISELGDICNYTKASQIIKFAGVAPYHYESSQFTAQHTAITKKGSKYLRKTLYQIILPVISNNEVFYAYYTKKLNEGKGHRCAQGHCIRKLLRVIYHLLSTRQPFNPKLLV

SEQ ID NO: 270338 - protein, 356 aa, unidentified
MKQISYLDFSNQHIYVGLDVHHKQWNVSIVSGNILLGRMSREPNTASLVKYLRTNYPGGEYHCVYEAGFCGFWPYYELTEAGVDCIVVNPADVPTTHKEKDRKNDKIDSRKLARSLSNGELEGIQILDPQSYEHRALLRTREALVKDQTRCKNRIKGLMKFFKIEIKDKDIKSHWSNKYINYLEQIDTLNVSLKISLISYLGQLRHLRSAISDITKQIRNLAMTEKYSKNVELLCSIPGISVLSAMILQLEIGDISLFRNLDKIRSFVGLVPSEHTSDKKKIQNHMTRRGKGILKKIIIEASWTAIRKDPGLLMVYENLIKRVRGSRAIITIARKMIGRIMFVLKNNEPYKFLSVK

SEQ ID NO: 270339 - protein, 353 aa, unidentified
MRMYYVGMDVHQASIVIVVLNGAGKVVMESILETGAETVRGFLKQLHGKVYVTFEEGTQATWLYEVVRALVTEVVVCDPRHNKLLQSGNKSDRVDARKLAELLRNGSLQAVYHGDKGQRTLKELVRNYDCLVGDTTRVMLRLKAIFRGRAIASGGHEVYRSDRRGQWLGKLSEPGVKQRASFLYEQLTALQGLRHEAKLVMLKEARRHPAYQLLLSIPRLGRVSVAQLIAVVGTPFRFRSKRQFWAYVGLAVVTRTSAEYVLVNGVVRRSSRPVATRGLNRNHNHLLKKVFKSAATSACVSGPFKAAYDARVAQGMDPSLARLTIARQLAAVTLVVWKRGEQFAPERMKQPVA

SEQ ID NO: 270340 - protein, 370 aa, unidentified
MKSIIYVGMDVHKASFTLSCFSVTTQETFATVKISPDAKAIKKYLDGVSLSRSEECEFVCGYEAGCLGYALYHQLTAMNIRCVIMAPTTILRNGKRVKTDRIDAENLARCLAYGGYKSVYIPTAQDEAVRDYLRMRDDHKLMLKKIKQQINAFCLKHNKIYPGNKSKWTQAHVKWLNVLEFDGYLQDAFNEYMITYRELADKVERLESQIEQLAELEEYRDKVKKLICIKGIKTHTALSLIVETGDFSRFQSAERYASYIGLVPGEHSSSEDQNRLGITKAGNRHMRMLLTEAAQCYSRGVPAKKSKNLKSRQKGASPEVIAYADKASIRLRRKYIRMELVNKKKANVAKIAVARELACFIWGMMTDNIA

SEQ ID NO: 270341 - protein, 416 aa, unidentified
MKKHSNSPRKSEPTSKRAKSRGPAQLDPKEVLAELVRKLREKLDPKGVAASTREEHQGRGLRPNLDRLTVGVDLGDRWSQYCILDLEGETLAEGQLRTTQQDIAEFFQALNAARVVVEVGTHSAWVREVICSCGHEVLVANPRLMERSKGRKRKNDRIDANKLARLGRVDPQSLHPMQHRSAEVRQDLVMLRARDALVAARTELINATRGLVKSMGTRLAKCSSPSFAQKVEETVPAEIREALLPVVHMTAALSDCIKGYDEKIEKLASEKYGHTALLRQVKGVGPITSLAYVLTLENPKRFVKSRDVGPYLGLVPQQEDSGDSQPQLGINKAGDTMVRRLLVGSAQYILGPFGPDTDLRRYGLRLCERGGKNAKKRAAVAVARKLAVLLHRLWVTGEVYEPLRHGISATVQAAAA

SEQ ID NO: 270342 - protein, 412 aa, unidentified
MQTLVERGCGLDVHQATVVACLLIVVNNGKVQKQVRTFGTTTRELLSLREWLLGEGCTHVAMESTGVYWKPVYAILEGALQIVVANAQHIKKVPGRKTDVKDAEWIADLLCHGLLRSSFVPPPPIRELRDLSRYRRKLVESRSAERNRLLKLLETANIKLASVATDVFGASGRLMLGALVEGEATPQQMADLAKGPLRKKIPHLELALEGKMEEHHRFLLKVQLHRLQAAEEDLAVLEQRLRERLEPYATQLALLDEIPGVDWTLAAVIIAELGVDMTVFQSVSQLASWAGVCPGNNESAGKRKSSRIPKGNVHLKTALVEAAHSAAKAKGTYLRDKFFRLKARRGYKRAAVAIAHKILVAIYHMLSQQVSYNDLGDLYLDKLNKHHLTRNLVHRLERLGYTVTLTAEQKAA

SEQ ID NO: 270343 - protein, 350 aa, unidentified
MRIIGCDFHTRYQQIAMLDEETGERVERRLDHENGEAQKFYAELPKPARIGVEATGYMQWFERLLAELRHELWIGDAARIRALVVRKQKTDTRDALHILELLLRKQFPRIWIPSPENRDVRQLVAHRVKLVQWRTRVMNQLHAMAMGQGLRRKKKLWSTVGRQELEALRLGPWASRRRAELLQLLGQLDGSIKELERAVEQEAARDTAAVLLMTHPGVGPVTSLAFVLTMGPSSRFQRGKQVGSYLGLNPSERSSGGQQRLGAISKQGNSMMRWLLVEAGQTAARYDAELRRVYQRLKFRHGSSSAKVAVARKLAVRLYWMLRSQADYAQLVRVRGSSSTAVVPETGSGR

SEQ ID NO: 270344 - protein, 268 aa, unidentified
MAKIVLGIDVSKRTLDVALIFDNRTLCKQFKNSLEGFKLLAAWLASLQITRVHACLEATGTYSEAVALFLHEQGHLVSVVNPLRIKGYAVANMQRNKTDRLDARLIASFCQTQKPDQWQPPSEAVKHLQSLVRRVEVLEEMRQSEENRLANAAPRIKPSIERMIALIKEEIREFERQIKQHIDRNPNLKEQSELLQTIPGIGERTANVLLSEVEFERYSSARALAAQAGVVPRKKQSGTSLKQTSLSRTRQRTNQTSIVFSGDSRPSV

SEQ ID NO: 270345 - protein, 388 aa, unidentified
MPQSNDLSRSLAAFDQDRTLIAVIEMSQSNWLVAGLVPGLERRPLKKLSPDEDALLKLVQRWRNEAAQAGREITRIVVAYEAGRDGFWLARWLRRRGIEAYVIHPSSVAVSREHRRAKTDRLDTELLMRAFLGWLRGEKRHCSMAAIPTIEDEDAKRPSREHEKLVGDRTRLVNRMKAMLARFGIRTFKPTLRKAEERLDRLRTAEGTPLPENTRAELRRDMMRLRMVREQIKEIEQERLRKLTAAPAEKGPPTMVRFIARIIGIGIETADMLVSEILSRGLRDSKAVARYAGLTGAPDESGRRRREKGLAKAGNARVRRGMIQLAWRLLIFQKDSALAQWYRARTANARGATRKRMIVALARKLLIALWRMATTGEIPEGISLRAAP

SEQ ID NO: 270346 - protein, 424 aa, unidentified
MITDRVPCRKFTQEVPLWIEFTTIVVVLMCIKNSSLPAFEKAISRRYGSLAQLLEMADWLKDGGCEMAAMESTASYWKPLYNILESSGLNAMVVNARHMKAVPGRKTDVRDAEWIADLLQHGLLQPSYIPDKEQRELRELVRYRKSLVGERTRELNRLQKMLEGANIKLSGTVSDINGKSARNILEYLLTGASVDGPKYDEMYEQKIIAHNLKATKEQIIDDLNGVMSPLQRRMMKELLAHLDELNIHIKNLNDEIDSFMKPEEKQASHAIQDVTGIGNTSAQAIISVIGTDMGRFPTDRHISSWAGLCPGDNESARKRKSGKTRKGNSLLRTTLITCAHSAVKNKKSYFHAQFMRISTHRGKKRAYVAVAHSMLIAIYHILKDGVVFKDLGADYYNQFNKERKINAYLKKLKALGWEATVVAA

SEQ ID NO: 270347 - protein, 360 aa, unidentified
MKEDTGEGSGLTVGVDLGDRWSRYCVLDQQGQILEEDTIATTGPAFRKLFGDRRAARVVIEVGTHSPWVQRLLHELGHETITANPRHVRLIYSSRNKNDQLDAERLARLARVDPKLLHPIQHRGEAAQADRALLRSRDALVVCRTKLINHTRGIVKSMGGRLPTCSTSYFHKRVRQDLPDELKPALTPVLDTIAALSAKILRLDTRIEHLASKRYPETGLLRQVSGVGSLTALSYVLTLEDPQRFKSSRAIGPYLGLRPRQSQSGDIDPELRITKAGDSDLRRLLVGSAHYILGPFGPDTDLRRWGLALAAKGKKNAKKRAVVAVARKLAVLLHRLWVTAEVYEPLRTHRPGTAAEAISA

SEQ ID NO: 270348 - protein, 335 aa, unidentified
MALYCGIDLHSNNHVIVINDEHDKTVFEKRIGNELALSLKYLEPFRDELVGIAVESTFNWYWLVDGLMEHGYKLHLVNTAAVKQYEGLKHSGDVKDAFHLAHLMRLEILPTGYIYPKEQRMIRDLLRRRMQLVQTSSKQLLSIQNQIWRSTGVRVSANQIKKKGFEITQLSGHLKMAADTNLRIYRSIREEIRLLECEVEKAVKEPESLELLQTMVGIGPILGLTILLETGTVERFKDVGNYASYCRCVQSLRESNGKKKGEGNAKSGNKYLSWAFSQVAHMAVRYEPKIKAFYDRKYHKRNGIVAIRAVAHKLARAAYFMLKNKERFDVQKAFG

SEQ ID NO: 270349 - protein, 345 aa, unidentified
MKQITTIGLDLAKHVFQVHCADAEGSPVLSRKLRRAEVLRFFQKTPPCLVGMEACGGSHYWAREIAAFGHDVRLIPPIYVKPFVKRGKTDAADAEAISEAVTRKTMRFVPVKSAAQQAAGMVLKTRALLVRQQTQVINALRAHMSELGIVAAIGTAKASALIAIVRDETDSRLPKAAHFALAEIANQIDALTSQIEKLEREIVAEAKRDEDMRRLVTIPGVGAITAASMKALVPDPYGFKSARHFAAWLGLTPKPHSSGGKERLGGISKMGNPMLRSLLVLGATSVLRRARGNANAPQWLIALLARRPFKVVAVALANKMARIIWALLTKGGTYRNTGAATAASA

SEQ ID NO: 270350 - protein, 313 aa, unidentified
MMALQDVFVGIDVSKDRLDVHVRPLGIGFSVSNEAAGYAVLIARLRPLRTKRIVLEATGGYERALWLALSEAGRVAAVVNPRQVREFARAAGRLAKTDRLDAAVIAHFAETFVPRIGKPDPVADRLGEHVLYRRSLQEEIVGLQHRLRRLETPALRERGERRDAALRAEVKEIEAAMRAIVDSDPAKKALFACLTAFKGVGLVLACTLIANMRELGSLTRHQAAALIGVAPLNHDSGARHGHRAIAGGRRRVRNVLYVATLSAVRCNGPIKEFYRRLSAGGKPAKVALVACMRKMVVMLNGRVRDQLAAAATA

SEQ ID NO: 270351 - protein, 373 aa, unidentified
MPKYSTAFGMDVHLRSTTVCALDADTGEAVTRRFPGNPWGEIAGWMDGFPGPSLAAYESGYLGFAPQRELAGLGVECAVAAVSKIPRSAADSASKNDRNDAARMAKAILAHDISPAWVPSPEVEGIRDLAGAYDGATARLATAKQRLLAFLARRGFAYGGTTPAGNPRKYWTYDFLRWLDKVRPEDDGGVRTLAALRNEVEAAAEARADLLSEYRAAVDASPIAAEVAALQSIKGCAFALAAAFSAEVGDFTRLRSGRQVTAYFGLAPSQRSSGDSVRLGGISGAGSALVRKLAVEGSWCYAAARHQPKLMPRDTGVPLEIRMHGRKGSERLLRRREEMLARDMPAAKANAATAAELVRWLWALGMMCREGAE

SEQ ID NO: 270352 - protein, 410 aa, unidentified
MIYVGIDWADDHHEVAITDDSAQTLSQFHISHDSSGFAVLHGQLARFHQPPDQILVALETSRGLLVHELLRSGYSVYAINPKALNRYKDRYVLSQAKSDPIDALALAHLLRTDRNRFRVLSPLPEDYRLLDRLCQDLRKLVDEKARVCNQITSLLKEYYPKALELLSVDSKIGTAFLRAFPDPQALRACSKKTFMAFFKKHRYSRPNRVKDLWALAQAPTVRPDGVILKAGRLRLSALLDQLVPLKEHIASYEKEVKAILDKLPEAQSIGSLPGVGNRLGAELTAALGPKEPDGQSRFQSAEEIMKLSGSVPVTRQSGKWKTVSVRYACVKSLRRTFRDWAFASLKRSVWARAYYDFHKAMNMPHSTILRNLGKKWTRILFILWSQGATYDEALYIQGLKRRKVPWAMSL

SEQ ID NO: 270353 - protein, 355 aa, unidentified
MNVYTGVHAYYCGIDLHARTMYVCVLDKDGKKVYHKNIPCRPDRFLQAIEPFRGDIVVGVECIFCWYWLADLCEEEVIDFVLGHALYMKAIHGVKTKNDRIDSLKIARLIRGGNFPVAYVYPPEMRATRDLMRRRNHFVRKRAELLSHIQNTTMQYNLESLGTLSRPHHRRDKDIVGHFPDPVVQLIVETDLQLIDHYDPIIKNLDKQILALAKGHDPTSLHLLRSIHGVGEVLSLTMLYEIHTIDRFPSRGEFCSYARLVKGQKSSAGKNYGTAGGRIGNAHLRWAFSEAAVLFLRKNKEAERYYNRLINRHGKSKALSIVAKRLGIAVYYMLKRQQPFNINMFLQSHMATEKA

SEQ ID NO: 270354 - protein, 356 aa, unidentified
MATYYIGADVHSNSTELAIEKRGKIVARYSVPTSIPAITNVLDSLQGKKYLAVEEGPMSGWLYSNLNKKLDQFISSDPRRNKLIASDGDKDDTIDSAKLASLLRGGFLREVYQCDDDSRAELKHWVSLYHDRVRDAVRGINKIRARCRMHGVTISRSTLRDPVYRLKWLLKKNHSPLDSQLKMLWIGYDATVQQVMFSKRQLSKLSKKYNIIEQWSQLPGIGFIRATTIFAFLDTPWRFKKKNKLWKYCGVGLQRTTSGTDKKGRPKPARLQLPWAVNRALKNAVLGAALSAINQKNNVFKDYYERMLKNGIIISNARHAVARKMLTVMWAMWKTNSPFDEKVVCNKLNMPTVSVI

SEQ ID NO: 270355 - protein, 344 aa, unidentified
MDNHTQYSGFAGVDLAKKVMQIHFVAGDGEITDKQVKRAEFLDFFRNRSKCLIGMEACGASQDWARKLEAMGHEVHLMSPKAVKPFVSGQKNDYNDAIGIYKAMFNGVRRVPVKSTEIRDLQTLRRIRSQVTKDRVKEINHVRGLLAEYGFVMGKSITAFNKGISSALEILKERGDVSPLVAEELQTTVESIKTKIERQKKLDREIEQLARGCKNYENFLKTPGVGPFTAAMLCVLLCDPDIFANGRKFAAYIGLAPRSRGSGGKYFVTSIPLKFNCDSESRAVFVECAQAIARYKNKSPWVEDILRRKPKKVALIAIANKLARQVWAMANKGENFKQMAILTA

SEQ ID NO: 270356 - protein, 393 aa, unidentified
MLFVGIDVAKSHHDVAVLDDSGLVVLRHLRILNNRQGFSTLHQFLIQLSADTKDDIRIALEATGHYHLNLLLFLQSNAYSAFAYNPFLIKEFARTLTLRKTKTDKADALTIAKKLATDLSPDLFKPDFNMQELKFLTRHRNRLTDTRSKLKTQYIRLLDILFPELAGFIGKTNLHHQYVYDLLTKYPSPAKLSRAHTNALVKLLHNHGNRLDIAQQLKALAKQSIGLSSPANAFELVQTISAIRLYDEQINAIDQEITQIMNSLDEAAIVTSITGISNRLGSVILAEVNNINNFHSPDQLLAFAGLEPSVYQSGQMSATGKMVKRGSTSFRWALFQAAEYASHWSPTLRQYRQKKLGEGKHYYVVMTHVAKKLVRIIYYLLKHHQYYDESKLI

SEQ ID NO: 270357 - protein, 408 aa, unidentified
MLEVKVERCAGIDVHKKFLAVCVMIGLADQKPETEVRRFGTSVTELEKLRAWLVEKGCTEAVMESTGSYWKPVFNVLEGAVKLILANPEQVKALRGKKTDPKDCRWLASLLRHGLVQPSFIPPRDIRELRDLTRRRRTLMQEGARERNRVQKLLEDANVKIGNVLTNVFGMSGQAMLEALLENKLNAEEIANLAQGRLRPKIPQIVEALEGHHMNEHHRILLKQILKHMAFIEEMVTELDLEISNKLQPYEKQMKLACTVPGIGRDAAASILAETGMDMGDDGPFPTCHHLASWAAICPGNNESGGRRKNGKTRKGNRWLRATLAQTAWAGAAKKDSAFRNRYYRLKARRGPQRAATAVSHAQLIALYWVIRNGVPYQEQAHQLKEQQRDSLIRHHLRRLAELGFKTA

SEQ ID NO: 270358 - protein, 346 aa, unidentified
MEHHVGIDVSLELSSLCVLDVTGKVVWEAKVASEPEALVAFLRGLGVTIVRVGLEAGPLSQWLYDGLQAAGFEAVLLETRHVKAALSAMAIKTDRRDARGIAQLLRMGWYRPVHRKSVPSQEVRALLAARKQMQIKAMDLEQTLRGLLRGFGLKVGDVSRNKLAARIRELVSGHAMLERIAEPMLTAREALWSEFAKLHREVLAIVKEDQVCRRLMTVPGVGAVVSLTYRAGVDDPGRFAKSKSVGAFFGLTPKRYQSGEIDVIGAITKVGDVGVRTALHDAANVLLTRATKFSTLKRWALDVAKRRGMRRAKVALARKLATVLHRIWADGTEFVWGKDPAAAAAA

SEQ ID NO: 270359 - protein, 410 aa, unidentified
MPLYCGIDWATDHHDVAVVDDDGRVVARGRVGNNAAGFAQLLTLLADAGDSATHPIPVAIETDRGLWVAALRETGRAIYPINPLAASRYRPRYALSGAKSDATDAVLLANIVRTDADAHRPLPADTELAQVIRVLARAQQDAVWARQQIGNQIRDLLKDFYPAALVAFDQLPNGGLARADARTILAVAPTPEAAARLTPARLRRLLAKAGRQRRLDRDIERLCAIFTDTYLHQPPQVENAMGIQLSALLRQFDAACAAAEELAEAAIAHFERHPDAEIITSFPGLGNLAGARVLAEIGDDRTRFADARGLKAFAGSAPITRASGKKTVVLHRHIKNRRLAVVGAIWALGSLRASPGARRHFDARRATGDWNRQAQRHLFNKFLGQLHHCLQTGQLYDEHRAFPPPLPLAS

SEQ ID NO: 270360 - protein, 327 aa, unidentified
MSTIEQVRSGHVVIGVDTHKYVHVAAAMDTVGGIVGTLTIPTDTGGFQQLLDWAGTFGQVLAFGIEGTGSYGATLTSFLRRSGHKVVEAGRPDRRLRRMNGKSDTLDAQNAARAVLAGLATATPKSAEGEAEMIRQLKIAHDQAVEQRSSAMVTMKAMLVHAPDDLRRQTARKSQSALAKQLASLRPRDLTDPNDALRHALRALARRWQYLDAEAKDLTALIATLVRRAAPQLLEPFGIGVDTAAEILIVAGDNPERIHSEAALAKLAGISPVPTGSGLTSGRHRINHGGHRQLNAAIYRTVIVRMRFHQPTIDYVARRTAEGKTKR

SEQ ID NO: 270361 - protein, 344 aa, unidentified
MTMTTVGIDLAKNVFQLHGVDQHGKTVLKKKLKRHQLSTFFANVEPCLIGMEACSGAHFWARTLGNLGHTVKLMAPQFVKPYVKTNKNDAADAEAICEAVTRPNMRFVSIKSPDQQALLSLHRARAGFIKTQTAQINQIRGLLTEFGIVLPTGKVAIHKHVPTILEDAENALPDTFRQVLSRLYDHLTELSEHIEQFDQSLKAHFKHCELSQRIASLPGIGLISATAIVGTIGDGSEFKNGRQLSAWLGLVPRQHSSGGKNILLGMSKRGDAYLRTLLIHGARSVLIARSHQVPPESWLGGLINRRNKNVAAVALANKNARTLWAMLTRGEDYNPKRYPDAFAG

SEQ ID NO: 270362 - protein, 343 aa, unidentified
MDHFARLDVSVKETSVCIVDDTGKIVGEVKVASEPEALLAVLKNPAYRFKRIGLEAGPLSQWLFSALAEAELPVVCVETRHIQAVLKAQINKTDRNDARGIAQMMRVGLYRPVRVKTLRSQKLRMLLTHRKLLQSKAIAIENDLRGTLRNFGLKVGMVGTVKFEARIRELVENLLDLAALVEPLLVVRRVLHEQINVLHRRLLAIVRDDAVCRRLMTIPGVGPVVALTYRATVDVPARFKNSKAVGAVFGLTPSKYQSGEINRTGAISKCGDEMMRVMLYEAARVMLTRTNKWSWLKVWAMKIARQRGMKKAIVALARRLAVIMHRIWVDSTEFRWTRKVVAA

SEQ ID NO: 270363 - protein, 403 aa, unidentified
MGAVAGLDWAAEKHDVLIADGRGALLDARVVEHSEHGVRELVCLLVDHRVQRVALERPDGLLVARLLDAGIEVLAIHPNQVKAARERFRPAGGKSDPFDAFVLCELARTDHHRLPRLAPSGDETVALRALSRSREDLVAMRVELANRLRAELDAFWPGARSIFADVDSKIALAFLERYPSPLEAKALGPKRLGGFLARNGYCGRRSAQELLERLRRAPVGCAGEAELEARRAIVLALVAALRPLVEQIGLLTSQIRGALAAHPDAAIFGALFCDPKSAVTAAGLVAEIGDNRARYPSADALAADAGMSPVAVESGKRRSAAFRRGCDHRLRSHFACLADSTRHWHPWAGEVYRRARARGCDHPHAIRVLGRSWARVLWRCWQDEAPYDPARHGNLRRLQTQGG

SEQ ID NO: 270364 - protein, 343 aa, unidentified
MSISMIGLDTAKSVFQIHGVNEAGKVELKRKVRRSDLITFFEKQERCTVVMEACGAAHHWARILTGLGHTVKLLAPEAVKPFVKKGKKNDAADAAAICEAASRPDVKFVPVKTVEQQGILALHTVRSLLVKQQTMLANAIRGLASEFGHVVPKGLNNLEPLVDLVDADEDMPKQARQAIAELHERFGELAKGIQSCEAEIVKHARNDVTARRLATIPGIGPITASLIAATVVDISLFKTARQFAAWLGLVPRQNSTGGKTRLGRISKAGNREIRKLLVLGATSMVGRADGWNSAVGAWLRDILQRRPARLVTVALANKMARIAWAVMTRKEVYRPKGGIAIAA

SEQ ID NO: 270365 - protein, 325 aa, unidentified
MTFIHFIGIDISKNFFDVAYHAAGARSAKAKESQHQAQKFANTPKGYRDFCATYSDMLPDALVVLESTGGYETALVAALVKDNVAVHRADPLTAKHFIRSLGKRAKTDALDAAALARYGAERHTHMTLCKIEDKSQTLMNALLARRGDLVAMRVAEQARLKHPRYVLLKDSLGAVLATLDNEINQIEKQMHSLIVRSPKLAATVQVLTSVKGVGKQTAYALLGGMPELGTLTRRQAASLAGCAPHPRDSGNTVGYRRTIGGRAIVKRALFMAAMAARNFHPELRPFYEHLIKQGKKPMVALTALMRKLITILNAKLRDEIYAKTW

SEQ ID NO: 270366 - protein, 409 aa, unidentified
MKYTTGIDWGQEAHAVCVVDEQGSVVLHLAVQHTADGLADMLRKLAKVSPPGELAIAIERPNGLVVDTLVEGGHPVVPIHPNALKACRPRYRAAGGKSDPGDAYILADVLRTDGHRFRSLRPASDEGRALKAMVRTRDDLVAERVALANQLRAQLDSFWPGAAQIFADVASPIALAFLDRYPTPKSAERLGEKRLAAFLATNSYCGRRSATDLLARLHAAPVGLAGEAEAGARGGLVRALVAVLRVLVEQIQKLTATVEHAVAQLAVGQIVMSFPRSGKVCAAQIVAEFGEDPARFATDAQLAAEAGVAPVTHASGKSRGVTSRFACNKRMRQALTCFADNSRHESVWAASIYRRARARGCDHPHAVRILARAWVRILWRCWHDGVQYDPALHGGAKGIKPPTEPAVAA

SEQ ID NO: 270367 - protein, 391 aa, unidentified
MIYVGIDVAKDKHDCFITKSDGEVLFKAFTITNNLDGFNELHQKITSVMDDVTKVKVGLEATGHYSYNLLGYLIDKGLPTYVINPLHTNLYRKSLSLRQTKTDKVDARTIASMLMSDVNLKSYSDISYHNEELKSLTRYRFDKVKERAKLKTSVSRLVCILFPELEKLVPTLHITSVYALLSEFPGAKHIATAHLTRLTNLLSEASKGRYGKDTAITFRDAARASIGSNMPAKSLELKHTIKLIQELDSEIDEIENEIKIIMDEINSPILSIPGINYRMGAMIIAEIGDFNRFDSPDKILAYAGFSPSTYQSGQLDGAYAHMEKRGSRYLRYALYNATKYVCHWDPTFAAYLAKKRAEGKHYNVAISHAVKKLVRVIYHLEKTKQQYIKAA

SEQ ID NO: 270368 - protein, 342 aa, unidentified
MKLFIGLDVSLAKTAVCVVSEHGQIVKEAETESEPEALAHWLDELDGSIAAIGLEAGPLSQWLHRGLTKAGLEAVLMETRQVKGALKAMPIKTDRRDAEGIARLLHLGWFRPVHCKSVSAQETRAVLGARKAIQQNMIALEMSLRGLLRNFGLKVGAISRGKFETRIRELADGNPMLEAATEPMLRARASLRQELAGLEKCVRRLAWDDPVCQRLMSMPGIGVVVALTFRAAVDDPTRFRSSKRVGAWVGLTPSRNQSGERDLSGGITKAGDVNLRRALCQAATVMMNRGRSTWLRTWGAQLAQRRGRKIAMVALARRIAVILHRIWVDGTTFQPDAAPRVA

SEQ ID NO: 270369 - protein, 451 aa, unidentified
MKSASTTPNNTTGRKLPDQLPEELPGELPGELPGELPEELPEELPEELPEEPVNSVTAGVDWASEDHAVSIVNDRGLEIARKSVDHTSPGLRALVKFLGQHGVGEVAIERGDGPVVDALLEADMTVVVISPNRLKNLRSRYGSAGNKDDRFDAYVLADTLRTDRTRLRPLTHNSEATKTLRATVRARRELVKHRVALCNQLRAHLQAAFPGAVGLFSDLDSQISLKFLARFDCQERADWLSVKRLAAWLGSVGYCGRKDPADLFAHLQNAPRGPVGPDGAARAHVTRAMLSVLTEIVEQIATLEAQIAEQLALHADAHIFCSLPRSGTVRAARLLAEIGDVRSRFPDAASLACLAGVAPSTRQSGKHKAVTYRWAVNKELRDAVCDFAGDSRRANPWAAKIYNDAIARGKDHPHATRILARAWLGVIWRCWQDGTTYQPDQHNALQAVLAA

SEQ ID NO: 270370 - protein, 413 aa, unidentified
MRHRKEQFIYVVGVDLHKRTHTAVVINCWNEKLEVIEFENKPSAFPAVVNKVKKHVQEGMTVVFGLEDVGGYGRSLAVFLVENHLEVKEVNAALSNWKRKSYAMTEKHDSWDAENIAKLLLDELDRLPNAHPHDDYWILKQLVMRRYSLRDTLVMLKNQLHTQLSYNYPSYSKFFSEVDGQTALAVWHEYPSPYLLEGVTIEALAEFLRKNSRNVCSTKKATLILETVQADGNTKRNGQEYRDFLVRSHVNQIRDVQREMNDVEDNIHHIMQKLDFKLNTFTGIDDVTASAIVAEIGDIARFTSADKLAKYAGLTPSQMSSGGRGKDRNQRQGNRALNKILWGLAVRQVHTARTSSKPLNPVFRSYYEKRLSEGKKKKQAIICIMRRLVTILYSMLKNKTEYRLDALPERAAS

SEQ ID NO: 270371 - protein, 415 aa, unidentified
MSLKIVYKICCGIDVHKTFVVACIASTNDKGVTSYESHRFSTYTSGLKTLLQWLLKRNCKDVCMESTGKYWIPVYNILENDCSIVLAHPKYVKAIRGKKTDKKDAKWIADLFKHDLVAGSFMPPADIRQLRDLMRYRFKLTCFQSSEKNRLQNCLTVSNIQLGNVVSDTFGKSAQAILDKLLENPADTSFDLEPLVYKSLKKKLPELRDAIDGYITPEQVGKLKVIKAHYESLESRKAELEELILALAAPYQQELAILQTAPGIRSDFTAIGIISEIGTNMEAFPSAKHLCSWAGLTPTNNESAGKKKSVRVSKAGCYIKPLLVQCANAVVTSKKHPEIRNRYLRLKKRRGHKKAIIAIARMLLTALYHMLKNGENYNAKLYRKSDLPPANWEITVEQAIIIARNQGYKIKSATA

SEQ ID NO: 270372 - protein, 431 aa, unidentified
MQLKQRARKLALVRGEPTVVVGIDIAKRKHWAWVVDGRTEVPVGSPFHFQNSREGFDRLLGKIARAKEKAGATRVVVGMEPTGHYWKPLAWYLQQAGFTVVIVNPAHVKASKELDDNSPTKNDRKDAWLSAQLVLQGRFSVPYLPDGVYAELRILTQARQQHRRKLNAALNQLQALLDEYFPEYTEVFADPLGQASLYVLQYRPFPQDVLAVPVTQLAAELRAASNRRVGLRRAQDLQEAARRSIGVPYGLDAARLQLRQILQEVIFWKERLAETEAAMAEALEKTGLAQYLLSVPGVGVVTAAAFLGEVGDLRRYADWRQLRKLAGYNLTENTSGQRDRSRTPISKRGRPGLRHVLYQMAMTAAAKNREFRALYKHFRTRQQNPLKGKQALVALACKLLRVLFTLVRKQCSYDPARALGAWRAEQLGLAA

SEQ ID NO: 270373 - protein, 322 aa, unidentified
MSAPILGIDIAKQRVEVALLVEGKIKNKSFKNASDGFEALALWLRKLGIQQVSACLEATGNYGEDLAIYLHKAGHTVSIVNPARIKGFAQSELTRTKTDKVDAGIIARFCLAMKPESWIPPSPEIRSLRALVRRADSLIDMRSQEKNRLGTAHESVTPLIKEHIDYLDKEIEKVRDQIADLIDRDPNLRQKKDLLASIPGIGKATIAALLADLDNLGKFTHVRQLVAFIGLAPRETLSGSSIKGKPRLCKTGNARLRKALYMPALVSIRYNPVMIAFYNRLKEKGKNGKVIVCAIMRKLVHVIFGVLKSGKKYDPNYKPIYA

SEQ ID NO: 270374 - protein, 347 aa, unidentified
MRSINNLFMQVYGIDLSKEKFDVNFFDTDGKEKNKTMKNGLTAISKFLSKVPEGSMLCAENTGSYGDMLVFLCNRCGVRIALVPGYTVKHSLGLIKGKSDPIDAARLREYGERFFDKLTFKEYQSENVSELRQLYSLRSQLVKSRKKLKTGEHARGQMPMQSINVNRVLQASLNALDEQIKAVEEEMALIIKSDEELSENYQLAVSVMGVGPVIATDLIIKTGNFKTIDTARKAASYAGVCSFPNASGNMVGKSRTSPFADKELKSLLYMGAKSAVKHNKEYRLYYQKKQQEGKPHYLIMNNAMNKLLRTIYSVVNSKTPYRRDYICLDPREREINENDKGSKKIVA

SEQ ID NO: 270375 - protein, 319 aa, unidentified
MTPTPVFVGLDVAKATLDVALRPSGEQWSVPNDEAGAGALVERLRPLHPTLIVCEATGGFERAAIAMLAAAGLPVVVANPRQVRDFARATGQLAKTDRLDADTLALFAERVRPTPRPLPDEAAQLLDALLTRRRQLLEMLVAEKNRLGFAPRPLHQGIQQHIRWLERQLDDVTKGLADQIERSPVWRAKDDLLQSVPGVGPIVSAVLLAELPELGALSHKQLATLAGVAPLARDSGTLRGKRMVWGGRAGVRTALYLAALCGRRWNPQLRVFYERLIAAGKPKKVALIACARKLLTILNAMLRDNTRWGTPPSAIQHSC

SEQ ID NO: 270376 - protein, 344 aa, unidentified
MGHYVGVDVGLRSSSLCIIDEQGKLCLEREVASEIDEIADAIRRFSEHIDGVGLETGNLTPWLTAGLRAEGFRVVVMEARQVKTTLSSLRNKTDRNDARGIAQILRTGWYREVHVKSLESQRLKTLLAARKALLRRRIDLENEVRGLLKVYGFKLPAQIYHARFDDMARQAVMADPALAEALGPLLDARGHLYRAFLDIDKRIRSIAHDDPICQLLMSAPGIGFIAALTFKAAVDDPRRFRRSKTVAAHFGLTPRRYQSGEKDNPGHISKAGDVEVRSALFLAANTIMNGRGKPSSLRSFGARLARRKGRKRAMVAVARKLAVVLHAMWTDGALFCNVEKEALA

SEQ ID NO: 270377 - protein, 436 aa, unidentified
MKPVRKRYVGLDIHKDVVEYCILDAAGGKIDGGRIMCELSVLEHFATETLAANDHVALEATTNTWAVVDILEPHVARVVVGNPLKTKAIAEAKVKTDKIDARILAQLLRCDFLPGVWIPDAKTRVLRRLSSFRKSLVKEMIAAKNRIKNIFNHHLIKHEVAWTKAGLDELKRIELPPHERTILCCEIEMFRNFQAQIAKVEKEIKRLAYEEENVRILMTLPGVDYNTATAVLAAFGDITRFKDADHAASYLGLVPSTNQSANACHHGPITKTGSGLARSCLCEAAQHLSRNEGPLGIFVRRIIQKKGWNKAVVAGARKLATIAFHMLKNHEPYRYAGVARTRVKLQRIRMAATGERVYMPRYVDPAESLNSSVTIRHVPPVSDVYEKEGLPPAKSVDELPPGERRFLEEAGLLEGIRLREKVRTICTPKKSSRNSG

SEQ ID NO: 270378 - protein, 338 aa, unidentified
MGQTTTIGLDWAKNVFHVVCCDNRGKLIGKKILKRSHVLNYFANFSACLVGVEACASAHYWARELGALGHQVKLIPPQYVKPYVRGNKNDYNDALAIAEAVIRPEMRFVAVKAPEQQDIQALHRLRERRVQDRTALCNQLRGLLAEYGLILPQGIRTVRQCIPELLEDGDNGLSDLFRQLLAQSYQHLQELDRHIEYYTQEMKCQSQQHEACRRLQTIPGFGPIVASVFHSMVGNGEGYQRGRDVSASLGLVPRQHSSGGKDTLLGISKRGDRYLRSLLVHGARSVVIQAAKKDDKLSRWINKVKEQRGFNKATVALANKMARIGWAVLANNTTYHLA

SEQ ID NO: 270379 - protein, 422 aa, unidentified
MKEDKAKTQQDNRCWVGLDWGGEAHAVSVVDDTRKVVETFKVGASLADLEQLGQRLRKLGTVAGVAIEATHKPVVIYLMSAGFTIYPINPKMSKSWRECNSVASIKNDERDGLVLAMELARRHESLRTLKQQEPSVAELAGLCEKLRALIDERTALVQRLEEILGQYHPCALGFFSEWTSPAAWRFVKRFPRPESLAHARKDTLIRFLRANRIGLRPIWLERIEARGEAERWPHPADSAALEIMALALVGQLLALQPYIDKCDRLIAERMRDFSETPVLESLPGAGERLAPALTAITAVAASEGEGVEGLRCLSGVGPAEDKSCKRQRVRIRRRCNKHWRNIMHLFAWCSTNSCAWARAFYDIHREQGDTHAGALRKLADKWLKIINRMLKTGEAYDDQRYVDALRKNGSPVYARLCGKACG

SEQ ID NO: 270380 - protein, 331 aa, unidentified
MSRATHELEFTRKGSTMKPCSVAGVDVSKLQLDVCTRPADAVSSVPNDLDGIHRLIRQFQQDNVQLVCVESTGGLEALLVRQLHEAGIPVAVVNPRQIRDFAKALGRLAKTDRLDAQTIALFAEKIEPQPTPPRSENAEKLRALTTRRDQVRRLLTQEQNRLDRTADKLVRKLIEKALGFYQKQLQTLDKEIAQVLEADEELQATARIVQSVPGIGATTAALLVAELPELGSITRGQVAALVGVAPRNRDSGTMRGKRTTGGGRKSLRCALFMPTLVAARYNPVIQAFYRHLLNQGKAKMTALIACMRKLLVILNSLVKSQTSWTPTPQTS

SEQ ID NO: 270381 - protein, 348 aa, unidentified
MEYIGLDLGKTSSQICILSEDGELIERRIKTERESFAQLFGQRPQSLILVEASTESEWVARCLEGFGHQVIVADPNFAPMYATRSKKIKTDKRDARALCEAARLGAYRRAHRSSDKQRHIKAELAVRETMVTTRTKYIVLIKSLLAREGWRLMGGSSESFGERVKLLPLPPELISEIEPLLILLKALNEQIKAADRKLEELVETDQTAKRLTSVPGVGRVTATAFVAAIDEVERFSDARAVRSYFGLVPREFSSGEKQLRGHISKAGSRRIRTLLVEVGWGIINRESNALTKSLRDWAMKIATRRGKKIAAVALARKLAGILYAMCRDRTEFSPPSKQGESLPMGLAA

SEQ ID NO: 270382 - protein, 367 aa, unidentified
MKQYHKYVGLDVHKERNEVAIAESGGEVRLYGSISNDLHALEKLVVKLRTDGVVLHFVYEAGPCGFVIYRRLQQLGEDCVVVAPSLIPKKSGDHVKTDRRDAVMLARLHRAGELTGVHVPDERDEALRDLVRARTDAVTDRRDNRHRLKAFLLRHGYKYSGTSSWTEAHLRYLRELVLAHAAHKVVLEEYLLAITQTTERIQRLEAHLATLAASWRMKPVVDALQGLRGVQLLTAVALVAELGDLTRFAHPRQLMAYLGLVSREYSSGGTRRQGSITKAGNSHARWFVVEAAQHYRLAPKVSKELAPRQEKLPARLKEISWNAQVRLHKKYWTMLLRGKRVQTVQVAVARELVGFIWAMARQVKVTD

SEQ ID NO: 270383 - protein, 357 aa, unidentified
MGACRNVGIDLGKETYEMKIIGTDGKVSGTNGRTNNAGRESLYKKLLPSDRVAIEVCALGMVMAKEIKEKVGCEVALLNPSQVALIYRSVKKNDKEDALKLARLVQRYPTEELPAVELPTEHEENLRQTLTELRQLKKDRTRAINRLHATFVECGITDIKKKDLGSGENREESIKVLKGIALAQARRALKMIALIEEQIEEVEKVLDEEIAGDENVERLMSVPGVGKQLASAYTAYLGDGSRYHSASSIGAAVGLVPRLDMSSKVCRLGHITKHGNSGLRSLLILAAWSHVRSRNGGALKDKFIHMTDVQSKGRKVAIVAVARKLAEMMYSMLRNGTSYEKRTSVPVSNLAEEALAS

SEQ ID NO: 270384 - protein, 428 aa, unidentified
MAGPGNPTTPCNLVAIDVARYWNAVLIETPGGKRHRFKIANTAADFDRLLGFLRKLQGRCCVALEPTGDYHRPLAHRLLVEGFDVVGINSVAQARYREAMFNSWDKNDPKDAAVILEMLRRGAVQRYVDPMLAGNHDLQELAKTYYQVSRARTKVQHSLINHCLPLYFPEMHRYWATTRNEWFIRFLLQFPTPAHVRSLTRDQFVEAAWEVVGRKVDKRAKLEEMWEMAGATAALPHAPDSLAVETFRVTLRRYQELNTLRADLEARAELALSANADFAHLKTLPGIGSVLAMTILAEGGNLRRFGHHRQFLKYCGFDLAKTQSGTQRGREQLSKRGNARLRLAFWLAAVAAVHMRENSFRAKYERYIHTAPDDADLRRKALTAVAAKMARVAYGMIKKNQPYRQFFEQSLPSGSIPLSVAVGALATP

SEQ ID NO: 270385 - protein, 348 aa, unidentified
MTTMTERKRRVTGGVDTHRDVNVVAALDERGSELGVQSFATTPAGYRTALRWLRRFGTLEKVGVEGTGSYGAGLTRYLHSEGIEVIEISCPNRQRRRSHGKSDPVDAIAAAKAVLSGEAVIEPKTRTGEVEAIRALRTSDRSARHARVKALNQMRALLLTGPEELREQFRGTTPWRMVRIAARLRPGDPTTAVGATKYSLRLLARRVLELEAEMAELKSILRPLVASTAPELVSRYGVGTDTAGALLVAAGDNPERLSDERSFAHYCGVSPVDASSGTIVRKRLNRGGNRFANEALWRIVMVRMVSDPATRLYMERRVKEGKSKREAMRCLKRYVARELYPLVASIGP

SEQ ID NO: 270386 - protein, 407 aa, unidentified
MPAAQTQSTTPRPRTLYLAFEMGWEKWKLAFATEAADNPRIRSVNGRDTAAVLREIAAAKEKFNLPADAPVVCCYEAGRDGHWLYRFLTAQSFTCHEVDSASIEVNRKQRRAKTDNLDAAKLVSMLIRFANGERRVWRTVRVPSVAEEARRHLHRELEDWQDQRKQHGNRIKGLLAGLGLSAELNKDFPEELQKLRTWDGQAVPEELQTRLLRQFEAWQFADRKIKDLENQRARTIRTGTDSCLDMVRRLLQFKGIGAGSAWLFVMEVFAWRQIESGRQMGAIAGLTPTPYTSSGSSREQGISKAGNRRLRAMAVEIAWAWVWHQPKSELTKWFLRRFGTGQRLRKIGIVAVARKVLVALWRYLHDGTVPPGAELVDWKQKMCRGRCQVEPAAVAEPAAVAEPAAVA

SEQ ID NO: 270387 - protein, 349 aa, unidentified
MRCYKGQHQFYCGVDLHARSMYLCVLDSQGTIMLHRNLPAEPKAFLKALTPFRADVVVCCECLFAWYWLSDLCRAEKIPFVLGHALGMKAVHGGKTKNDQLDSETIATLLRGGNIPLAYAYPQGLRETRDLLRRRCYLVHKRAQLVTHIQITNAQYNHPPFAKKLIYARNRAELDVVQRFTNPQVRKSIGADLAVIACLDEVIGDLELYLEKTVKVEDGQTYQLLRTIPGVGKILALILLYEIHDIRRFETVGDFISYARLVRPRHESAGKKCGYGNRKMGNAHLRWAFGEAVCLLLRESDQAKRFAARKEQKHGKAKAMGLLAAKLGRAVYWLLRRGEAFDEATFWSR

SEQ ID NO: 270388 - protein, 320 aa, unidentified
MSTGERATYVGIDVSKATLDVAILPTEEHFVVANDEGGIDGLLDKLAERVAGVLVVLEASGGFERPAVAALAASGVALFVVNPRQARDFAKATGKLAKTDRIDAFVLARFAEAIRPTPRAIPDAEAREFQEILARRRQIVRMTTAEKNRLGASSAGAVRGRIKAHVKWLEKELSRTDRDLDETIEGSPTLKENEALLRSVPGVGPVLCRTLLAELPELGSLSPRELSALVGVAPLNRDSGTLRGRRTVWGGRARVREALYMGALIASRFNPAIKEFYERLVAAGKPKKVALVACMRKLLTILNAMMREGTPWRCPHALNS

SEQ ID NO: 270389 - protein, 342 aa, unidentified
MTYTMIGVDLAKSVFQLHGASLTGEVKFRKKLSRPQFRKFMEDHPACIVVLEACGGAHYWAQEMQRLGHQAKLIAPQYVKPFVKRQKNDAADAEAIVIAAQRPEMRFVEAKSNEQIARGVVFRARDRLVRQRTEQINALRSVLYEQGQVFPKGVHQLKKIAMFLELADNGLLALVREECEELLTSITDLTARIQGKTLKLKKLSEQSELSRRLQTIPGVGPLTAMAVEAFAPPMDIFRCGRDFAAWLGLVPKQHSSGGKERLGKVSKAGQVDIRRLLIIGAMTRIAWAGRKPCEDGSWLDRMLKRKPKMLVAIALANKMARTIWAVLTKEEDYRDPAKTAAA

SEQ ID NO: 270390 - protein, 466 aa, unidentified
MKHNRRRRLSKPRTSPSVLERINPNVAGIDCGSAEHFVAVPPDRDSMPVQSFPTFTSDLRRLAEWLTACRVTSVAMEATGVYWIPIYEILDARGFDVHLVNARHVKNVPGRKSDVSDCEWLRELHSVGLLRGSFRPTDGIVALRAYVRHRQTLIESAGAHIQRMQKALVQMNLQLPLVVSDITGVTGLRILRDIVAGRRDPGQLAEHRDHRCRASKAEIIAALTGNYRPEHVFVLQQNLELFDACQAQLAACDTAIEAHLQTLTTLITAPTTPLPPPRVTKKPRDNEPRFELRTPLRQLTGGVDVTQIDGITPYTALKVLSEIGTDMGRWPTEEHFTSWLTLAPRNKVSGGRLLSSRTQPSANRAAAVFRMTVMSLGRTQTALGAFYRRLAARIGKPQAITATARKLAILVYRALKGELVYRDPGADTYDAQQRTRVLRRLRQRAATLGFELVSRETGEILERVVS

SEQ ID NO: 270391 - protein, 355 aa, unidentified
MNTLNQDSIVIGVDVHKYTHTAVAMNAWGEEKGIIDFSNNNLETYTDWLLQMGLKENIIVGLEDVNSYGIHLVERLRNDNFHIRYVPAILTERERKVSTKREKSDSVDAKRVGKVLLYKYEQTLPAKESIAEKRELETAQSLDLLLMERGDLVRQKTVVKNQLHGLLHQHYTERYRLHCPRSFSKKAIKWFLDDLRENKTILATSITRRLGRLLFIESQIYVISKEVIEIGKTSKEVLSLATIHGCGMVTACSIMSEVITIKRFENKHHFSSYAGITPTPHSSGRKNTMHTNPFGNRKLNKCLHTIALSQIAIKGDPKGKEYYAKKLKEGKTKLWAIRCLKHQLAKVVFQKLRYV

SEQ ID NO: 270392 - protein, 420 aa, unidentified
MRENDKVVCGIDIHKKFLVAALMTAMGECVIERFPNNTPGLISLKDWLKFHNCELVAAESTGIYWFPLFLMLEGWIDIIIANAYQIKAIPGRKTDILDAQWILTLALNGLIKPSRIFSRTDRELRKLTRERQKLVQDRTVQKNRIHKILESVGIKLSSVLTDIFGKAGQYIMRELLEGTSIDEIVAHIPVARVRKKKESLLEALNNNLGTIDKLLLEQHLDTIKRIDCQIAEIDAELLYGFKDRKEDLEILISIPGIGQTSAVTILAELGNLKDFSSAEKLAAWTGIVPSIYQSAEKFRTGSITKHGSRQLRWILTEVAQSAARTKDTHFHQYFIRMKRKVGYQKAVVALAHKILRIIWHLLQYREHYVDPINSTTPKPEFPNPANLQRRTRSAIKLLTALNYVVTKPKNELVVQEGCRK

SEQ ID NO: 270393 - protein, 391 aa, unidentified
MIYAGIDVAKDKHDCFITNSVGEVLFKSFTIPNNREGFETLFQKIQSVSDDLTKVKVGLEATGHYSYNLLGFLLDKGLPTYVINPLHTNLYRKSLSLRKTKTDKVDAHTIASMIMSDVNLKSYSDTSYHNEELKSLTRYRFDKVQERAKLKTSVSRLICILFPELEKLVATIHMASVYALLSEFPSAHAVASAHLTRLTNLLSESSHGRYGKDTAVMFREAARNSIGSNMPAKSLELKHTIKLIQELTSEIDEIETEIKSIMDEVNSPILSIPGINYRMGAMIIAEIGDFSRFDSPDKILAYAGMSPSTYQSGQLDNCYSHMEKRGSRYLRYALYNATKYVCHWDESFGTYLAKKRAEGKHYNVALSHATKKLVRTIYAMEKTGQSYSSAS

SEQ ID NO: 270394 - protein, 346 aa, unidentified
MKHDNAKGDIVVLGIDLAKMSFQLHGVDKDGNVVLRKKLSRSKLSGLIANLAPCLIGLEACGGAHHWMRTFNEMGHTVRMMAPQFVKPYVKSNKNDAVDAEAICEAVQRPSMRFVPVKNIEQQDIQSLHRIRSQVVARRTALANQIRGLLLEYGIVIPQGIGYVRKAIPGILEDAENTLTPRFRELLSELYDEMVHLDERVMTLEQKLEVVCAQSEECQRLLTIPGVGLLTATALVAAIGDITVFKNGRELAAWLGLVPRQHSTGGKPTLMGISKRGDSYLRTLLIHGGRTVVRVAHKHQDKRNRWVGEVEQRRGKNISAVAVANKNVRIAWALLSKKESYHAALA

SEQ ID NO: 270395 - protein, 389 aa, unidentified
MFYVGLDVASEKHDCCILNEKKRILQSFSIPNSSVGFDSLLAALAEFSSDEVKIGLEATGIYSENLSVFLRRKGFNVTTINPLLIKKHQCATTLRKTKTDKADAKGIALFIAEEGFQPDLPISYHIQELKSLTRARFSVVQDRSALKNKVKRLVVLLFPELLGEFTDIFGSSATALLKQYPSAAKLAACHCDTLAALLRKTSRGRFGRAKAEHLKQLAQNSVGNHSAARAMELRMLLKRIDLLSEQIDEYDSQIKVIMGQIDSPILSIPGIGYTLGAIIIAEIGNISRFSSPAKLLAFAGLEPSIYQSGKFIPTSGKMVKRGSPFLRWALLQAAGYAPNYSSTFALYRAKKIAEGKPTAVVRSHVAKKLVRIIYSLLTHSTAFSDQLSA

SEQ ID NO: 270396 - protein, 391 aa, unidentified
MRKDTLYVGLDTDKKHIDVAVAEPLPGGEVRYWGKIANAAPSVDRLIRKLGQDGRPLVVCYEAGPFGYGIYRQLLGKPGVTCEVVAPSMIPRRSGDRVKTNRRDALALARLRRAEELTAVWVPDEAHEAMRDLVRARAAAVTAVVRCQQQIGSFLLRQQIAYVGGKPWTKKHRQWLGTLTFEQAAHRLMVAEALLALDQATARRQRLGEHIEELVASWSLAWLVQALQALRGYQLINAAVLVSEIGDPRRFESPRQLMGFLGMNVSEHSTGDTIRHGHLTKTGSKRGRKALIEAAWTYRTAARHPKAAAARQPAAVQQIADKASHRLNRRYRHLVARGKPTQLATAAVARESLGFIWAITHAAAPTPHQAAARTAVGLQGMRKSSTSSSRP

SEQ ID NO: 270397 - protein, 400 aa, unidentified
MLSIGIDVSKGKSTVCGMKPGGEIVYTPFEIQHTREGMSELVSLLHNSGEEVRAVLESTGSYHCPVVAALLENGIFVSVVNSLRMKRFCSQSIRRVKTDQIDAMQIALYGLAYWQELQPTRLPENTYRELQLLARQYYQMTSLLIKAKVDFNAICDQVLPGMQELMNDHAGRHKLSDFVLRYRHTTHILEMGETRFRKDYCKWAEKKGYRNCERMAALIFATAQNGIPVLPNAPSTQIVITEAIRVLHTVEASRDAILTQMQALAKTLPEYSLVREMPCIGDTLAPRLIAEIGDVRRFHSKRALIAYAGIDAPPYQSGKFCANNRHISKRGNRYLRKTGYEVMQSYVMHKPANDPIFTFIEKKRGEGKSGKLAMVAGLNKFLRVYYGKVTELYRSLPAIE

SEQ ID NO: 270398 - protein, 378 aa, unidentified
MNTNKYSTIFGMDVHARSTTVCAVVRETGETQTKKFSNCPTPAEIASWMQTFPGPHYAAYESGCTGFHLCRELGTLGINCDVVAVSSIARSAEDKKKKNDKRDARRLASEIVKPLSDLSRVWLPDPDLEGARDVGRAYKSAVKSLNAEKKRLMSLLLRNGHVWNERTASGELKKTFTQAYWKWVDSITLASPGANDTLAFYKRSVKDATERVNRAKQILDTSIKDPRYKPYVDALCCLKGVSDIGAYTYTVEIGTFSRFSSGRTLPCWAGITPAERSSADTTRQGHITKAGNTYVRLNLAEGANALLLAKPTDKPLRKGACVSDEVRAHARCGNHRLIERAQTIKQAKKPHNVSKIAIANELIRWIWAIGCMVEEEQK

SEQ ID NO: 270399 - protein, 345 aa, unidentified
MTESKIVAFDLAKRIVQACVIDGTGAVIAEERMGPERVLSFTARHPHATVALEACGGAHHWGRALERQGHRVLLLPPQRVKSYGDPACKDDRRDARAIAEAASRSYLRPVPVKSEGQQALQSLDRVAALLARQRTQTVNALHGHLSEFGITLPKGPHLLKRRFTELEASPRWRELPEELRAAMGELFAAFLALEERLSAIKARLAKGAKQSKLGRLLLEIPGIGPMTAVSLEAAIGDDPGRFASGRQFAAWLGLTPRVSASGERRQLARITKRGSARLRSLLVVCAQAMLRQYRQGRHGDPLACWARHLLARKRWNVAVVALANKLARIVWKVASSGAAYQARTA

SEQ ID NO: 270400 - protein, 342 aa, unidentified
MYYIGLDVHKKTIRYCVKDASGRVHQEGKLGATRSELDGWMRTLPQPWTVAMEATIFTGWIYDHLHPHAAQVKVAHPLMLRAIAAAKKKHDRVDASKIADCLRCDFLPECHMASTEIRDRRRTLRYRCLLVRQMVQTKNRISGLLMETGVTYNKQRLHKVGYFRELLASNEEVNESIRPLLRLSRDTIARLQKTERALVSSLQRDPLLNERIKRLGTVPGVGPITALTWALEMGEISRFRSIRQAISYCGLCGDERSSAEKSIRTQISKQRNKNIQFVLIEAAKLAPRQDHDLALLYEREKQKGNANRATLAVARKMVAYLLAVDRGHWDFLPADDCRCDAA

SEQ ID NO: 270401 - protein, 320 aa, unidentified
MSKKKSKSFVGIDVSKRLLEVAAYGSDYQFRCANKAGAFVELIAELIALRPALIVLEATGGLEIPVTAALHAAGLPVVVINPRQVRDFAKATGQLAKTDRLDARVLAHFAAAIKPPQRPIKSNDELELDALVGRRGQLIEMLTAEKNRRASAATDTVRDEIKQHIDWLNERIAELDEQLQSLLKTSSLWQNKDDILQSVPGIGPVVSFSMIADLPELGTLNRQQISKLVGVAPLNNDSGQQSGIRHIYGGRARVRCMLYMAALSATRYNPVIKEFYQRLMARNKLFKVAITACMRKLLAIINVMVRDNTPWKTTDEPVSA

SEQ ID NO: 270402 - protein, 265 aa, unidentified
MSDIKYIGLDVHKEAIAVAVLNGSGKLIMESIIETKADSLLQFLHGLRGELHVTLEEGGWAAWLYDQLKPRVQEVLVCNPRRNALLKEGSKSDKIDARKLAELLRAGMLRPVYHGEHGLRTLRELGRTYQTISKDLIRVVNRLKALYRAWGIPCGGTQVYAQRYREQWLQKIPQVGVRRRAELFYQHLDGLRALRHQVRGEFLAESRKHKAAKLLRRIPFIGPIRAAMLIALMQTPHRFRSKRQLWTYSGLGVETHDSAQYRYVG

SEQ ID NO: 270403 - protein, 334 aa, unidentified
MLYAAIDIHKRAFQAAVLDPESGEVVEERFAADRESLARWAEQWRGRVEAVAIEATTGWRWVWRELVERGFEVRLAEPVQTRALLGRRRSAKTDRLDARWLARLLAKEMLPQSWIPPEQIQQLRDRTRLRKALAEDRRRWGQRLHAYLLHEGWPCSRSNLLRPPGLRWAAALQLSEHARLQVDSLLAVMAALEAQLETVDAELRRFARNDQRCQALQSIYGIGPILACHLLAEIGEARRFRRAEQITRLAGLDPVVEESGESRRRGHLAKAGSRHLRWALVEAAVHAHRPTAPDLELYRATRARRDPSVARLTVARKIGKRAFHVLRELELASA

SEQ ID NO: 270404 - protein, 367 aa, unidentified
MKKNIVHSQGVAARAVTGTQHKTQPATIKLGLDIHQERYVVVAQEDHATPKPARALRPAEFVPWVETLLARGHRVFIVYEACGFGFGLCRRLTAAGATCYVIAPQKLDEARKGVKTDALDAGVLCQRLSRYVAGNTKELAVIRVPSEEEEQRRHVHRQREALVRARTKLQAQGRALLVTQGQPPVQRWWRRQGWAALEKLLPGWLRARLEIFRPVLQVLDTQIAALTTELEAAAAPELPAGLGKLTSVIVTREVCDWRRFQNRRQVSSYTGLCPGEYSSGGKRMPGAVTKHGNPRLRAALVELAWRLVRFQPGYPPVHKRLPILAKGARATGAARKKAIVAVARQLAVDLWRWQTGQCSAAQLGLQA

SEQ ID NO: 270405 - protein, 417 aa, unidentified
MEHFVAYLALDWSDAKHDVCLVDAATGKKESFVLKHTLEALNEWATALRARFAGEKIAVCLEPSRGPLIYALLKYDFFVLYPINPTTLAKYREAFSPSRAKDDPQDAEDLVELLIQHRDRLKAWLPDDEKTRTLQVLVEHRRRLVNDRTRISNRMTALLKAYFPQVLLWFDDIRTILVCDFLLCWPTLESVKRVKPKTLEKFFHEHNSVRRETNEKRLAEIKEAVPLISDRAVINSSVLMIKALAAQMKTTIEAIREFDSEIEALCQSHQDFFIFDSLPGAGAVYSSRLLAALGTDRNRWTSVDELLCFSGVAPVIERSGKSTWIRWRYFCPKFFRQSFIEYAGESIKHSFWAKAYYSSQRERGKSHQAAVRALAFKWIRIIFRCWQTKTAYNEVTYLESLRKKGSPLLSFAANNPS

SEQ ID NO: 270406 - protein, 334 aa, unidentified
MVREYIGIDLHKAFFRVCAVAPSGERVWEARFARTADGIARCVARGIDAGSVIAVEASGPTWAFVDALQSTGARIVVVDPRKTKLKAGYAAKTDRLDARRLADAVRRDSVVGIYMPPVAIRELREACRGRRQVVRVRTRLAQAIRALLLRCDAGEPPATKLHAQRALAWLSMQRLAPDADAALHRLERLYRVAHAEARAADQEVRARAKTDAIAQALDRIVGVGPIMALTLRAEIGDIGRFTTGAALACYAGLVPRVEASADRIHRGRITRDGSRWLRWVLVEVAGHAIKRDDARARWARRLAVRKGIQKARVALARVLCEEVVTTWRATVVGA

SEQ ID NO: 270407 - protein, 408 aa, unidentified
MKVFVGDDWAEAHHDVHLMGETGEKLAAKRLPEGLDGIAGLHALIAEHTTDPTEVIVGIETERGLWVQALIAAEYQVYAINPLSVSRYRDRHNVAGAKSDPGDAKLLADLVRTDRHNHRPVAGDTDQADGLKVLARAHQNLIWDRTRHTNRLRNDLREFFPAALLAFESLADRDTIAVLTKAPHPDQARRLSIAQIRSALRKGGRQRNLDRRASEIQQALRTPQLDAPPAVTTAFAATTKALVEVIAGLNTSIAELETELAAHFDEHPDADIYLSLPGLGVVLGARVLAEFGDDPDRYDNAKSRRNYAGTSPLTIASGKKHAVLARHVRNRRLYDAIDQWAFCAITASPGCREFYDQHRAAGDLHHQALRALGNRLVGYLHGCLRTRTHYDEHTAWAHRQPAQTQIAA

SEQ ID NO: 270408 - protein, 327 aa, unidentified
MSQNTIKNMQTNHHTVYAGIDVAKATLELHLQGHRAEFANQPEGLAQLCKKLQSVPHLQVICEATGGYERALVQALHQAQIPVSVANPAQVRAAAQAKGQRAKTDRIDAALLSDYGQRFQPKLTPANSVSQDKLIALTQWLKQLIQGQALAKTQSEHHQDPFVRRQHTKLLTHLQTQIAAVEKQIKALLATDAALQQRVDRLDEIQGVGPRTAWRVLAHMPELGRLNRQEVAALAGLAPWTRESGTMKGMRCIGGGRPEVRLALYMASLSSVRSNPVLRSVYQHLRSKQKPAKVALTAVMRRLLIYMNYQIKNLADNKPTEKIHEPR

SEQ ID NO: 270409 - protein, 313 aa, unidentified
MQQPSHVGIDVSKHHLDVAFPGVSKVWRTPNDASGIAALIRRVQRLNSPHVVCEATGGYTRRLTSDLAAGAVPLSRVNPRQVRDFTRATGRLAKTDEIDAAAILRFADAMQPPASPAPSPEQVRLTDLVRRRRQLVDAAAQEKQREPIPGQPLVTSSVERHLAFLVGEIGAIDQAIADAIEADGMLARRAELLRSIPGVGVVTAATLVAELPELGTTGNKQIAALTGVAPMNRDSGMSRGQAHIAGGRMSARCCLYMATVVAIRCNPAIRPFYKHLREQGKPPKVAIVAAMRKLITTANSMLAHDRPWRADPA

SEQ ID NO: 270410 - protein, 359 aa, unidentified
MKKEQRKQISFKGQRIFIGIDVHLKSWSVTIASEHAVLKRFTQSPSPEALHSFLTREYPDAEYKSVYEAGFCGFWIHERLMELGIDNIVVNPADVPTTTGEKLRKTDAIDSGKLARSLRAGELKGIYIPDKVSLEIRSLTRLRDSVTKDQTRQKNRIKSHLRYLGIEIPQEYCERGRCWNKSFVAWLRSVESACEYGKQTLDQLICQYEDLRKRRLEMIRLLRRLSRTERFSEPLGWLMSVPGIGQLTGMTFMSEIDDISRFKNADQLASYIGMIPMCHSSGEHDGTGDITLRCHSKLRSVLIEAAWVAIRQDAAMTQAYTEYCRRMKPSKAIIKIARRLVNRIYFVMKHKRKYVNNVA

SEQ ID NO: 270411 - protein, 345 aa, unidentified
MELMYYIGLDVHKQKISYCVKDSGGKVYAEGSLPATRIDLDLWMKTLPQPWSAAMEATMFTGWIYDHLKPHAAALKVAHPLMLRAIAAAKKKNDRIDANKICDCLRCDFLPECYMASTAIRERRRTLRYRNLLVRQMVQMKNKTSMLLMEAGVSYNKQRLHKAGYFRELLATNPDIDEGLVPLLRLCRETVVRLQRTESALVRSLERDSLLMDRVERLMTIPAVGPITALTWALEVGDVQRFSSIKKAISYCGLCGAEKSSANTVQRTPLSKQRNKHLQTTLIEAAKMAPRNSSELAMLYDTEKQKGNANRATLAVARKLVAYLMAVDRRQRDFQVVETSSGIAA

SEQ ID NO: 270412 - protein, 355 aa, unidentified
MKYYTSTTEFNCGIDLHARQMYVCVMDRQGKKLVHTNVKNNDFNFFLKLIEPYKHDLTVCCECMFGWYWLADACQAAHLTFVLAHALYVKAIHGGKNKNDRIDSEKLTHLLRSNLIPPSYVYPAEKRPLRALLRQRLFYVWSRSELLARIHSHQLAHNRIPPRQTRRIRDPWEEQLLAAEDNPLRQIALKNDLAMIRHYDHQIFQLEEELQRLTKKVAGREYTLLQTVPGIGEGLGLTILYEIGQIDRFPTVKDFLSYCRLVKGTVASAGKIKGLRGAKLGNPYLRWAFGEAAVIGKRDHHLLRPLAQRLEAQMNGNKFKANTVVAIKLARAVYFMLKNNTVFDSERLVAALAKN

SEQ ID NO: 270413 - protein, 379 aa, unidentified
MEVFIERCAGLDVHAETIVACVISGSREDDLLKVTETFPTLTKDLYRLLKWLEHHEVTHIAMESTGIYWKPVFNILEDYFDITLANAQRIKNVPGRKTDVSDAEWIAKLLRHGLIEKSFVPPVDIRELRDLTRLRKKWIGHLTAEKNRIQKVLECSNVKLSSVISDVFGVSGRKLLKKLIEQGYVDEVDVENSIHGKMAGKKQRITDSLFGTLNGHQIFLIRQSWQHIIYLESLISEIEERVDSLLNNYTEEMELLLTIPGIKKDTAAIIIAEIGVDMGQFPTSQHLASWAGVSPGNHESAGKRKSTRTTKGNPHIKSAMCEAAWAVSRCRNRWLAAKYWSLAARRGKKKALVAISHRMLRIIYSMLLNKEPFKEMQIS

SEQ ID NO: 270414 - protein, 355 aa, unidentified
MSVTMIGLDTAKSVFQAHAVNAAGQVVTRRKLRRNELIAFVEKQAACTVVMEACGAAHHWARVLTGLGHEVKLIAPEAVRPFVKRGKKNDAADAAAICEAASRPGARFVPIKSLEQQGVLALHSARSLLVKQQTMLANAIRGLATEFGLTVGLGMGKLGELMALVDADEAIPEKAQQALSALFDQCRALDESIEAFEAEIVAHARHDDTARRLATVPGIGPITSSLIAATAQTFGFAEVADIGVFQSARHFAAWLGLVPRQHSTGGKTRLGRITKAGNREIRRLLVLGATSMVHRAPGWNSAAGVWTRGVLQRRPVRLVTVALANKMARIAWAVMTRKEVYHAKGRVAAAAEAMA

SEQ ID NO: 270415 - protein, 388 aa, unidentified
MLLLGIDIAKLNHVASLVDSTSGELIFSNFKFQNNFIGFSSLLEKISKFPVTEIIIGLESTGHYGENFINFFFQKGFKIAVINPLQTSHLRKANIRDSKNDRLDSINIAKTLLFNEHRYVTQKNLTNFALKKLTRFRKNLIKQKTKFKIQLVSLLDIIFPELQYFFKSGVHSNAVYTLLKKYPSTEKIAALREKTLFSILNKASKGHYKEEHASQLKSLAKSSVGIKDTSVSMHIPQLIKLIEMLDSQINSIEEEIKSSIDKEFVVLSIPGINFVAAASILGEINDIDNFDLPSKLLAFSGLDPKVRQSGNFNASSCRMSKKGSPYLRYALIITSWNLVRNSETFNKYYLSKRAQGKSHYSALGHTAHKLVRIIYTLLKKNILYQEIK

SEQ ID NO: 270416 - protein, 346 aa, unidentified
MDHYAGIDVSLECSSLCVVDASGKIVREAKVASEPEALIAWFSELGLGLARIGLEAGPLSQWLYAALRQAGLAVELLETRHVRKAFEAMPVKSDRNDARGIAQLMRLGWFRPVHCKSMGAQETRTLLTARKLVQSKLRDVENSLRGILRGFGLKVGATTERSFAGRIRELAAGHPSLETITEALLAVHTVLLREFNGFEKQVRSMARSDTGARLLMSIPAVGPIVSLTYVSAIDDPARFKSSKQVGAHFGMTPKKYQSGETDYTGRISKIGDASVRTTLYEAAHIMLTKPVKGCSALKSWAMRIAKRAGMSKAKVALARRLAVIMHRMLVDGTPFNPTNKPSAAAA

SEQ ID NO: 270417 - protein, 433 aa, unidentified
MESEFAAFVAIDWADQKHAWALEVNPSSDREYGNIDHTPESVDAWVAELALRFPGGPIAVALEQSRGPLVFMLTKYDHLVIFPIHPSTLANYRKSFRPSGAKDDPNDAGLLLDILGRHRDKLRRLDPDTPETRTLQFMVEERRKLVHEKTRYSNRLTAHLKLYFPQVIGWFDEIGSHIVADFLERWPNLERLQKARSATIERFFIEHNSRNAERIAERLEQIRKTIPGTKDTAVLRSCSAAVVAWAGLLKQLLKAIKAYDEQIDTLAQQHPDYALIKSFPGAGPALTPRLIAALGSQRDRYQTAHEIQCYSGIAPVVASSGKQRWVHWRWSCPKFLRQTFHEWALHSVAYSEWARRYYEEQRAKGKRRHTAIRTLAFKWIRILFRCWKDHKPYDERTYQQALAVRRKRPAAGQLVEVTWENVAGFMKITASEA

SEQ ID NO: 270418 - protein, 363 aa, unidentified
MKEEKRRFVGIDLGKREYTMAIICTNGKIKNSHGKTSTHGRQALCRILEKSDKVALEAGNLAFIFTYEIQETVGCEVRVLNSAKLPFIWDAPTKTDKEDARKLARLIEERRDEKLPIVPLPSKEEIARRKLLANYAREVKFRTRYLNLLHAMFVHQGHTTIVKKNLATAEKRLEAVSLLTGQEREEAEWILKHLDLYDQRIKELKSRMTKESKENEDMKNLQTIPGVGPVVAYAFYAHVGDGSRFSAGAQVSNYIGFVPRLDYSGTIQRHGHITKHGNAYLRGLLVQASWSMVQSSRNFSLKDRYICLTTFGGKSKKKTIVSIARRLTEMMYSVLRDKSKFEERIWAGRREYLGNIKELKKCA

SEQ ID NO: 270419 - protein, 337 aa, unidentified
MKLYCGIDLHSSNNVVAVSDEQDRPLYEKRLSNDLGTILDVLKPFKGELVGCVVESTYNWYWLVDGLMEAGFPVRLAHTGAMAQYAGLKYTNDFSDARYLAHLLRLGILPTGYIYPKAQRGLRDLLRRRLLLVSQKTVHHLSLQSLIARHSGQRLTANEIKQLETTQIAAYLDAPILLGGQITLQARCWLDEAITRIERELQKHIQPREDYQLLQSIPGVGPVLGTTIALETGTIQRFPSPGNYASYARCVKSEKISNGKYKGQGNKKNGNKYLAWAFMEAAHYGAIWSTPIKRYYQRKQAKSHILVAKKAVANKLARACYHMLKRGEVFDVTRAFG

SEQ ID NO: 270420 - protein, 389 aa, unidentified
MKIYVGIDIAKLNHFAAAISSDGEIIIEPFKFTNDADGFQLLVSKLESFDKNSLIIGLESTAHYGDNLVRYLVAEFYQVCVLNPIKTCQMRKNNVRKTKTDKVDTFVIAKTLMMQDVLRFITFFDLDMMDLKALGRFRQKTIKQRTRLKIQLTTYVDQVFPEIQYFFKSGLHQNAVYALLKEAPSPKEIASMHMTHLANLLKVNSHGHFTKEQAKELRVLAQKSVGANDSAISIQITQTIQQIELLDSQLEKIEAEMTDIMKFNDSVIMTIPGIGYINGGMILGEIGDIHRFSNPNKLLAFAGLDPSVYQSGNFQAKTTRMSKRGSRVLRYALVNAAWNVVRNNATFKAYYDAKRAEGRSHYNALGHCAGKLVRVIWKMLTDEVEFNLE

SEQ ID NO: 270421 - protein, 385 aa, unidentified
MIKLDRSDTPAVAEDATVYLAFELSKAKWKLGVLLPVSQKLSRYTIGGGDLVALAARLADMRKKAAAAGRPVRILSCYEAGLDGHWLHRWLTEQGVINHEIDPSSIEVNRRARRAKTDRIDLEKLMRAFLAYLRGEPRVCSLVHVPTVEDEDRKRRTREREHLIKERTAHTNRIKGLLHGQGIRDVKPLDRSFIERLTHLRAGDGRPLPPRLIEEITREHQRLCLAARQIKELEAKSKTELQTAMPGSPEARIMQLIDLKGIGPVGGQGLVNEVFYRSFDNRRQVGSYFGLTGTPYDSGQRNREQGISKAGNRRARELAIELAWLWTVHQPDSALTRWFRERVGDIKGRIRRIAIVALARKLMVALWRYLTTGVIPVGAVLRPSS

SEQ ID NO: 270422 - protein, 328 aa, unidentified
MTPTQQTYNHVVAFEVSKEALVVHTLPADEQCTIANKPQSVRRLLKSQLKHNRKQHLGPILIVCEATGGYERHVLDAAIDLGLPVHRAHGARVRFFARYCGLIAKTDPIDARVLAHYGVKTDKLRLYVPPPPETAALRALHARRTEIQQMMIAETSRLDQTHHKSIVKSLKAHIAQLKSALEAIEDEITHLLQENASLKKKVELMRTVIGIGPVSAMILLAYLPDIGSMTKGEVARLSGLAPINNDSGKKRGARHVEAGRTAIRRALYMAAVVAMRANPVIKRFADRLRGKGYPFKYVAVAVMRKLVVILNAVLRDGQPWKGAQAACA

SEQ ID NO: 270423 - protein, 389 aa, unidentified
MKIYVGIDIAKLNHFAAAISSDGEIIIEPFKFTNDADGFQLLVSKLESFDKNSLIIGLESTAHYGDNLVRYLVTELYQVCVLNPIKTCQMRKNNVRKTKTDKVDTYVIAKTLMIQDNLRFVSFFDLDMMDLKALGRFRQKTIKQRTRLKIQLTTYVDQVFPEIQYFFKSGLHQHAVYALLKEAPSPKEIASMHMTHLANLLKVNSHGHFTKEQAKELRVLAQKSVGANDSAISIQITQTIQQIELLDSQLEKIEAEMTDIMKFNDSVIMTIPGIGYINGGMILGEIGDIHRFSNPNKLLAFAGLDPSVYQSGNFQAKTTRMSKRGSRVLRYALVNAAWNVVRNNATFKAYYDAKRAEGRSHYNALGHCSGKLVRVIWKMLTDEVEFNLE

SEQ ID NO: 270424 - protein, 313 aa, unidentified
MIHDLPFVGIDVCKTRFDVFVHPAGTRFSCPASQDGIGALVQRLSGLGRCAVAVEASGGYERKLIAPLHAAGMTVYVVAPARVRQLAGALGQLAKTDAIDAAMIARYLAVAQENLTPWRPDAARQRLSAVLAHRRRLVAERSGLASLLDTEDEPLVRSLVQERLDAIARDIEQLDRAVRVLLVEHTHLRQRYDRLRDVKGVGPVLASTLLADLPELGFVSAKAIAALVGVAPHARQSGASNRSGRCSGGRKHLRDIAYMAVLSAIKAKDPVLAGFYQRLRGRGKPFKLAMVATIRKLMTILNAIARSQTALSQ

SEQ ID NO: 270425 - protein, 332 aa, unidentified
MENFYFIGVDVSKKKLDFCVMFEGKVVHEEETVNHQGAIISLLHQLEEDYGIAGCQMLVCAEHTGQYTFPLACACKAVECKLWLENPAEIKYSSGVQRGKNDKVDAKRIAIYAKRFQDRVQYYERPTEEIERLKQLESERTLYVTDLAKYKGQMKDQKDYMPRKLYERKMKRLQALMDDLEEAIQAITDEMDEVIASCSVLSRQRELLMSIDGVGRVVATNMIITTEAFTRFDDPRKFNCYAGVAPFSYSSGSSQHSKARVSHRADKAMKRLLHLAAVAVTHRVGGELKKYYERKVAEGKNKMSVINALRAKIVARMFAVIKRNEKYKPILS

SEQ ID NO: 270426 - protein, 404 aa, unidentified
MIFVGVDWSEHHHDICVLDEQGTQIAKVRVPEGIDGVVRLHETIADHAEEAERVIVGIEIDRGLLVGALVAAGYRVFAINPLSVSRYRDRHATSGAKSDPGDAKVLADLVRTDRHLHRPVAGDSELAEEIKLIARTHQSFVWERQRHVNRLRNALREFYPQALEAFGTGLASADAVAVLKIAPTPDLGRRLSRSKIAAALRRAGRQRNLDFKAEQIQRALRSEQLQAPKGIERTYGVIVSSLIGLIEGLNTQIAGFDDELKGSFEQHPDAEILRSLPGLGIVLGARVLGEFGDDPTRYADARARRNYAGTSPITKASGTRRVVLARFARNERLFDACYLWAFSTLTKSPGARCYYDRQRARGKTHSEALRAIGNRLVGILHGCLRRGEVYQEDVAWPSRESLAA

SEQ ID NO: 270427 - protein, 346 aa, unidentified
MALFVGLDVSLRTISACIVEAKGKVVWEGKVLCEGPALIAALAPYRKKIKSVGIEAGPLSEWLFGILTECHFNAVCIEARHAHRFLSSRPNKTDRNDARGIAEMMRLGHFKAVHVKSRASQLLRTMLAARKTFVDHMLEIEQAIRGFLKVYGLKLGQVHRYNFSAKVKALVADTPELAAAIAPLLEARDMMRKKKKEIDRELEKRARQDAVCKRLMTIPGVGPIISLAYKATIDDPARFRSSRAVPAHLGLTPRVYQSGEMDRSGHISKCGDGLLRHCLYEAANAHLRVTRKWSALRAWGVKLAKRVGSKKACVAVARKLAIIMHRMWREDIDFQYGTAPQRLAKA

SEQ ID NO: 270428 - protein, 360 aa, unidentified
MPIQSNELNFKGQNIYIGIDVHLKSWNVCVYVGGLKIKPFSQTPSAAVLKSHLETNYPGGTYCSAYESGFCGFSVHYELLRHGINNIVFNAADISDTSKERMRKTDSTDSSKIARNLSKGELSAIHVPSEQEISDREVLRTRMTHVKMCVQTKMRIKSLLYVKGIRYPDTFEKPGTHWSRNFVSWIENEASSLPYEGGRSLLIQIENLRFIHNQILKATRELRKIMTQPRYQDSYKLLMSIPGIGFLTAATFLLEAGDISRFASNDHLASFVGFVPDTRSTGEKDIAIGVTSRSNHRLRTMFIESAWSAIRQDPALTLAYTKLVSRMEPNKAIIRIGRKLLNRVAYVLRTRKPYVKAVVQ

SEQ ID NO: 270429 - protein, 414 aa, unidentified
MRIVYQNVAGLDVHKKVVVAAIIVQRADGSWYQEKRSFETMTVNLLALSDWLQSHGVTHVAMESTGEYWKPIFNILENNFEIILVNAQHVSKVPGRKTDQSDAEWLAELMQYGLLKASFIPPLGQRELRELTRYRSSFVRERSNLMNRVQKVLESANIKLGSVVSDIMGISSRSMLEAIIDGQASPTEIAELAKGRMREKREALAKALEGRVKAHHRFVLTELLCQIDSLEETISRFDQEIEEYCRPFKAAVVVLDTIPGIACATAETIVSEIGTDMSRFPSADHLAAWAGMAPGNNESAGKRRSGKTRKGNKALGAALTQAAQAAAHTKNTYLAAQFQRIAARRGKKRAIIAVAHSILIMAYHMIQRNQTYQELGGNYFDKKDVEKVSQRLVGRLEKLGFEVSLQPSSTSATP

SEQ ID NO: 270430 - protein, 343 aa, unidentified
MEHYVGLDVSLKRTSICVVNHTGSVVREGVVDSDPEAIASFVRSNAPGAVRIGLETGATATWLWNELKRLGLPVICIDARHAKAVLKMQINKSDRNDAAGIARIMQTGWFKEVRVKDLDSHAARALLASRALLVKIKRDLENQVRGLLKNLGLVIGRATFNVFSARAGEPIEDRPDLVAAIGPLLEARKAIEQQVRDLDRKVLELARHDVQVRRFMTAPGVGPITALCFKATIDDPTRFRRSRSVGAYVGLTTRRHASGEVDWSGRISKCGDAMLRMYLFEAANVLLTRVPKWSALKAWGMRLAKRNGLRKAKVAVARKLAVLLHRMWIDGTEFNWSTKNATA

SEQ ID NO: 270431 - protein, 392 aa, unidentified
MDSPPPRHHSATVAFEEANGSEGETMKKHSSKHDSLSSTDVELCTTICVDLAKQVFQLAGEDATGRVIYEDRIKSRQAFHDFLIRLPTTVAVLMECGPGAQAWARLLQTKGNPVRILPAQRVAEHRSGAKNDRNDAHAILRAGRDTSIASVPIKSTTALAIQALHRIRRGNIKRHTALGNQIRGLLLEHGVSMPQGDAAISQQVPRALEDASLPLPDLLRELLDELLTDWLSLGERIAALSGRLEVTAQQDKVAQRLITIRGVGPIIATAIVAKQTEPSRFASGRMYSAFFGIVPDQHSSGNKIRLGRMSKRGDGYIRSLMIQGAHAVLSQLRPDSDQPDDRRLLRWLSRLGRKEAAIRLANRNLRIIWALLQSNQVYQRKPNSNPEAAMSL

SEQ ID NO: 270432 - protein, 411 aa, unidentified
MEAAVITAVGIDVSKSKSTVAVRRPGGEIVLRPFEVHHTNSDLKKLASTLKKLGGDIRIVMEHTSTYWRPIALTLKEAGFFVSVVNAMLIHDFSDNTIRKLKTDRADALKIANYALTFWDTLPPFNNEEETRLLLKMQSRANERITATATALRNGLIALADQTFPGVNIAFDPNTKNANGHEKWVDFFLRYWHKDCVCQYSMEAFTESYRGWCKRKNYKFRTDTAHKIYLLAQESVATLPKCESTKMLITQACKSLNAVCEAKQSTQLEMQRLAAMLPEYEVVMQMEGAGPVTGPALMAEIGDVRRFKNKKALVAFAGIDAPPFQSGAFESKSRHVSKRGSPHLRRTIFIISNIILTRSNPENAVYCFMDKKRSEGKHYYVYTVAGSAKFLRVYYARVTEFLRSQPSPDVC

SEQ ID NO: 270433 - protein, 332 aa, unidentified
MTRTTTTTPSASEPVYVGIDVAQHKLDLARSDAPGPVLNFDNDTAGIAAIVRLLLSARPAVIVVESTGGLERPLLDALLEACLPTALVHPGRVRYFAKGLGILAKTDRLDANVLMRFARLAAPRLMQRRSAGQAELVALVVCRRQLTLVRAEQTNRRHATANKAALRCINAVLTALDKQVESLDKQIRNLLNADDDFKHMDTQLRSAPGVGPVLSATLTAELRELGQADRREIGALVGVAPFNHDSGKLKGKRAIRGGRTAVRCVLYMATLAAIRCNPVIKAFSDRLKAAGKQKKVVVVACMRKLLSLLNAMLRDGLTWEQLDVVKKFVPTH

SEQ ID NO: 270434 - protein, 343 aa, unidentified
MVHYVGLDVSLKQTSICVVSETGSVVREGAVDSDPEAIAAFVRSKAPGAVRIGLETGPTATWLWTELKRLDLPVICIDARHAKAVLKMQINKSDRNDAAGLARIMQTGWFKEVRVKGLDSHAIKALLASRALLVKIKRDLENHIRGLLKNLGLIIGRAKFNVFSVRTEKLIEDRPELIAIVGPLLKARKAVEQQIGDLDRKVMKLARYDAQVRRFMTVPGVGPITALCFQATIDDPTRFKRSRSVGAYIGLTTRRHASGEVDWSGRISKCGDAMLRSYLFEAAGVLLTRVPKWSALKAWGMRLAKRNGLRKAKVAVARKLAVILHRMWIDGTEFNWSKKQAVA

SEQ ID NO: 270435 - protein, 414 aa, unidentified
MEVLYPRCAGLDVHKESVVACIRIASGGEVVTEVQTFNTTTASLVSLSEWLASNGCTHVAMEATGVYWKPVWHILSDSAFTLVLANAAHVKNVPGRKTDINDATWLADLLAHGLIRASFVPESETQDMRALLRTRKQLVREKASHIQRLQKTLEDANIKLDSVVADIVGKSGRAIIDALIAGDSDPAKLAALADTRIRSSQNKLREALSGRIRRHHRFMLNLHLQQINALDAAITEIDREVDVNLAPFRTGVELLTSIPGISTLSAQVILSEIGTDMSRFPTAGHLISWAGLCPGNDESAGKRRSTRLRKGAPWLKTTLVQCAWSASRKKASYTQAQFHRLRARRGAKKAVCAVAASILTAAYHMLKDGTQYRDLGPDHFNRRSKQQQTNRLLKRLADLGFAAELTPIPIAVSL

SEQ ID NO: 270436 - protein, 425 aa, unidentified
MGIAKPVDLKSNPKEGENVNQLFVGIDVGSRNNAVYIMLPDGSKHSSFELQNNLGGAQNLLKRVMSVLSENKLSSVVIGMEATSVYGDNLLCFLREDGNLGRFDRKLFVLNPKQVKKFKDSYSDLPKNDPVDAFVVADSLRFGRIGFPVYMADYRYKALQNLTRARFHAVQNLTREKQRFMNYLFMKCSGLAQEKIFSDSYGATALAVFEEFETPDDLANMDIEELTAFIVEKGKNRFPNPDEVAKSVQAAARGSYRLPKTVIDSVNQMLSISISSMRTMQVQIKSLDKEIGRQFENIPNTLISVPGIGPVYSAGIIAEIGDINRFDGQARLAKYAGFVWKENKSGMFEGQNTRLIKSGNRFLKYYLGEAAFALVRCDTEYKRFYDLKFKEVNKYQHKRALALTARKLVRLVFRLLKDNRLYIPA

SEQ ID NO: 270437 - protein, 351 aa, unidentified
MGKSNAVFVGCDLGDKFTEVAVLDDTGAVVETARVRTTRCALEKCLGKYKRARVVVEVGVHSRWVREVLSALGHEVIVANPRQVRLIWKRRTKTDRTDAMVLARLGRFDVSLLAPVQHRSRSSQLDLAAVRSRDLIVGVRTKLMNHVRGTLKQFGFRVPTCSANTFPRHAEAALPDELVPALAPALAIIRVMNDHIAAHDKQVTELATQVYRHTERMSQIPGVGDLSALTFALTLDDPTRFKKSRFIAAFLGLTPAKEQSGSSDPQRHITKAGDPLVRKYLVQCAQHVLGRTTADSDLRRWGLHLAARGGKNGKKRAVIAVARKLAVLMHRLWISGERYQPFGYAAPAMTP

SEQ ID NO: 270438 - protein, 413 aa, unidentified
MKTEKAYLYVGIDIGKLEHYVTILNRRHQVIKKAFCIKETKAGFEFLLKQLENLKQENSNIEFIIGMESTSIYTRNLENYLNKNLLSCKTIMIINPIQIKQFAKMLLSRTGTDKISSELIAKYMLMLGKPKYMPIKLSEESMNLRKLTKIRYKLVKSKTQISNSLIQELDCAFPELKEVIKDVTCIKALSILEQYPTALKLSRGHINTIAKIRYGKSGHKIGMKLAEKLKNKTKESINSTSYEVIINMYVKQLQQILEEINTIETEINSIMKTHFAGHKLTTISSLGVITAATLIGKLGKDITENFKTPKQFTAYLGIEPVIKVSGKSVKKQPKMSKAGDKLCRQAIYLSTLSAIKSNEIIRKYYHKMLKNNKKKMVAVGACMRKMCHLIFAIWKKNEEFVIDYEKIRRKKAA

SEQ ID NO: 270439 - protein, 348 aa, unidentified
MDHIIRIGMDTSKHVFQLHGVNAAEEPVLRRKLRRNDMVVFFERLAPTIIAIEAAGASHHWARLLRSFGHEVKLIAPQLVKPYVKRGKNDAADAEALCEAMSRPTMRFVPVKTAERQAALMLLGLRDRLVRNRTQLANAIRGYAAEFGLAAAKGIAHLAPLLARIQSDESLPGLARELFAAHAQEYAQLQAQIDEVEGKLMAWHKTNPGSQRLAQIPGIGPIGAAMLIMKTPAPETFRSGRQFAAWIGLTPKDHSTAGKVRLGVITRAGDEGLRSALVVGATAVIRHLRNGKGRSMLSAWVEQLLKRKPPKLAAVALANKLARIAWKLMVTGETYAAKPRPVASAGIA

SEQ ID NO: 270440 - protein, 375 aa, unidentified
MSTAATRMDQDTRTLYVAFELGEKDWKLAMSPGLEARPRLRALRARDTSRLLEVLERERKRLGAERVASCYEAGRDGFWLDRFLRAQGIDNRIVDAASIEVRRRSRRVKTDRLDAQKLLTMLQREALGETGVWSVVRVPSVADEDARSLQREYRTLVKERSRSSNRMKGLLASQGLVAPRIDGRFLAWLASARLWDGSPLPSGVRARVAREYERWRFTHDQVLALQKERRERTKDETDRSLQKVRALFALKGIGLGAAWTWGLEFFSWRNFRNGKEVGSLSGLAPTPYQSGASEHELGISRAGNRWVRGLAIEIAWGWLRHQPDSALSRWYQERFARGGPRARKIGIVALARKLLVALWRYVETGVLPEGALLKA

SEQ ID NO: 270441 - protein, 392 aa, unidentified
MYYIGIDIAKKRHEVCFLDESGNVLDGNSFQIPNTASGLDKLQNYLDKYGLTAVNSLVGMEATGHYWLVLYSWLIEQGFDVKVINPIVTDAYRNMLIRKTKNDRIDAEVVARVLKMGEYQETSVLDDDTLSLRQLCRYRLSQTQTTSDLKRKVIALLDQVFPEYDTLFSDVFGLSSKELLKNYTTPEEIASIHTRKLANILNKASRGRFGKEKALEVKAVASQSIGITVAIDAFVFQIRQLIEQIEFVEMQIESLDREIANYMDSLDSPITTIPGIGPVYGATILAELGDIKRFPSAKQIVSYAGLDASVHESGDFKGSQSRMSKRGSAYLRRAIYGAAFIASWSDPELSAYYKRLKARGKHHYVAVGAVARKLCYIIYAVLIENRPFEDRS

SEQ ID NO: 270442 - protein, 442 aa, unidentified
METLDLFVVPRDGRTPAPSATGKDRIAVDVLHERAAALDIGKRDLKACVRTPHSSRRNARQSEVRTFDTTTNSLLQLRDWLVAERVSIVVMEATGDYWRPPFYLLEDILNVILVNAAHAKNLPGRKSDVADAVWLAQLAECGLLRASFVPPQPIRQLRDLTRYRSTLLAERSREAKRLEKELEDAGIKLSSVATDILGVSGRLMLQALINGERDPAVLAELAKARMRRRIPDLIEALVGNFGEHHAFLCRLHLQRIDQITATIEELSARISEAMAPFRDQLKLLDGIPGVGPGVAEVIIAETGGDMTRFPTAGHLASWAGVCPGMNESAGRHKPSHTRHGNRWLTGALGTAAMAAARTKDTTFIGARYRRLAGRIGRLKALVAIEHTIITAVWHILSATTEYHDLGGDHHLRRDPDRARHRAIRALNQLGYTVTLNPIQGAA

SEQ ID NO: 270443 - protein, 347 aa, unidentified
MIFYTNSHPYYCGIDLHARSLYVCIIDQSGETIVHKDIKANSEALQNLLEPYIGNIIVGVECMHCWYWVADWCEDNGIDFILGHALYMKAIHGGKAKNDRIDSFKIAKLMRGGNFPLAYHYPKEMRATRDLMRRRMHIMRHGAQLKAHVKNTTSQYNLPTNKLNLRYPGAREQMRDRFPDPAVQKSIDLDLNLIDFYNKELSSVEWYIKKQAKQHNARDFNLLKTISGVGDILALSILYEIGDIKRFESVQKFASYSRLVKCKAESAGKTYGTQGNKIGNAHLKWAFSEAAILFLRNNDSAKHYIAKMEKRMPKSKALSALAHKLGRAIYYMLRNKTVFDENKFLAV

SEQ ID NO: 270444 - protein, 353 aa, unidentified
METAYGGRQVVGMDLHRRRSVLVRMTEDGRRLGMARITNSPQELRAQIARAGRCPRVVLEATYGWYWAADTLAAAGAEVHLAHPLGVRAFSYRRVKNDERDAADLADLLRMGRLPEAWIAPPAVRELRELTRYRQKLVHLRTSCKDQVHGVLAKLGVPVTCSDIFGVAGSAWLDSLRLPQPYAGKVTSLRQLAGELTTEITMLSDVIADLLAGDRGYQVIQQLPGIGPVLAAVVVAEIGEVHRFKKAAQLCSWAGLTPRHRESDVKVARGHVTKQGSPMLRWALIEAIQRVPRDSVIGSVKHAIIARRGKEARNIAKVAAARELLTLIFYGLRDGQIRCLSKPADAHQPARAA

SEQ ID NO: 270445 - protein, 353 aa, unidentified
MRTYYVGMDVHQASIVIVVLNGTGKVIESTILKTGASAVRSYLQRLKGRVYVTFEEGTQAQWLYEVVQPLVTAVIVCDPRQNRLLGSGNKSDRIDAQKLAELLRNGSLKAVDHRDHGVRVLKELVRNYECLVQDTTRVMSRLKAIYRGQAIACKGHEIYRQDKSAKWLRKLKEPGRRARAGSLYEQLAALRPLRQKAKLAMLREARRHAAQRWLLSVPRLGPVSVAQLLAVVGTPHRFRSKRQFWTYVGLAVVTRTTADQEVINGVLRRSRRPVATRGLNRNHNHLLKRVFKTAATSACHSGPFAAAYEARVERGMDPALARLTIARQIAAITLSLWKRGELFKVERMKLATT

SEQ ID NO: 270446 - protein, 371 aa, unidentified
MVKIAKYVGLDVHKDTIAVASCTGGPGSAARDEGVLPHDLSKLRRKLLSLAPAEHLHVVYEAGPTGFGLCRDLKAHGISCIIVAPNRVPLMPGPRIKTDKRDARHLAWQLRMGTLAGIALPDEELEALRDLIRAREDALHTRRRTRQQLAGLLLRHGARWPGKSTWSVKYLEWVHSLRLGSEAQELAKQQYLGEVKHFDERIEMLTEQIERLAGMLRGEHGELYRALQGLRGVSTIVAATLVCELGDLRRFKTASQLMSYVGMVPREHSSGARVWRGSITKAGNPHVRRVLIEGAWSGRLHPAMPERLKRRQQGLDQAVIDIAWKAQKRLYARYVRMRARGKPQNIAIVAMARELLGFVWSIGQQVGKKSA

SEQ ID NO: 270447 - protein, 410 aa, unidentified
METIVERCAFLDVHRDTVMACARTPDVAGRREEVVEFATTTSQLLLLADWLCERRVTLVGMEATGVYWKPVHWVLEDAIEQVWVINARHMRNVPGRKTDVADAQWGAQLLEHGLVRPSFIPPKPFRQLRDLTRYRRVVIEERGRESQRLHKVLEDAGIKLSSVTSKVLTKSGREMIEALIAGQRDPNVLAEMAKGKMRSKIPQLQDALAGRFDEHHALLCAAMLARIDQADTTINQLTDAIDVLLDPYEAAVTLLVTIPGVARRSAQVILAEIGADMSRFPTAGHLASWAGMCPGNNESAHKHRSGSTRHGSKWLRITLIEAAHAAARTKNTYLAAQYARLRSKRGPARASVAVGHSILVIAWHLLSTGETYNDLGADYFEKRRNSTARQRRLVAQLEAMGHKVTLAPAA

SEQ ID NO: 270448 - protein, 355 aa, unidentified
MSHDSHNSLPNVTIGLDLGDRMSRTYEVDAGGACLREGAVPTTVAGITHYFAKRERCRVVLEVGTHSPWVSRLLEQLGHETIVANPSAMFARAPRRRRNDRLDARFLARQGRADVELLYPMTHRSADAQQDLEYLRARDQLVGVRTKLINHVRGTVKSSGARLSRCSSEVFAKRAAAELPPALAPAVTPLLEVIADLTRRIAQAEAQLAAITRERHPVALRLQQPAGVGPLTALAFVLLIEDPSRFHKSRDVGAYFGLVPRLDESGDSTPQLRISKAGDEFGRRLLVSASHYILGPFGPDCDLRRYGTAIAQRGGKNAKKRAVIAVARKLAVLLHRLWVSEAPYDPDYQLKRRAA

SEQ ID NO: 270449 - protein, 411 aa, unidentified
MEDYKVAGIDVHKRMLAVVITNAAAVGEFRFEQRKFGAAETDLEELKQWFTSQGVREVVMESTAQYWKPVWQSLEDDFELHLAQAQSNKGPKGRKRDFTDAQRLVRRYIAGELILSFVPDGEQRMWRTLTRTRKQLIRDRVQLQNQLEGYLEQIRIKLSGHVSDLLGLSGRRMLTALAEGEADAGRIVDLAAKGLKATREDLVRALAAARSLSAMERNILRLYLERLELLERQIETLERATAEALREHEDAVCRLAEVPGLGAESAHQIIAEVGPKAASFSSAAQMASWVGCCPGREESAGISASDASPKGNRYVREVLVQAANAAVKAKGSVFEVLYRRLAARRGHFKALWAVAHRICRIAWKILREGVHYEERGVRTNPQAARKRANRLVLTLRRLGYKVEITPMTGPA

SEQ ID NO: 270450 - protein, 351 aa, unidentified
MKYYTSSTEYNCGIDLHARQMYACVMDRQGKKLVHTNIKGNDFGYFLKRVEPYRQDLTVVCECIFNWYWLADACFEADIEFVLAHALYLRHIHGGKNKNDRIDSEKLAHLLRANLIPPSYIYPSERRPVRALLRQRMSYVWERATLKTKLSMAQTAEGLVPARKCGHNRDVWEERILAQYTNPLHKFAAICDMNMIRAYNVQIEKLEDEIVRRAKKCLGRDFHLLLSVPGIGRVLAMTILFEIDTIGRFPTVKDFLSYCRLVKGSVASAGKVKGLTGGKMGNAYLRWAFGEAAVIAKRNHPLLTPYAEKLTSRHGKFKGNAILANKIARAVYFMLQKGTAFDAERLIATSL

SEQ ID NO: 270451 - protein, 368 aa, unidentified
MNNHTLEAALTAGAKELKNQKAAKAKRIVMGADVHLRSYQGARKIDNGPIGAVANFRSQAELLLYVEKQMEQAEEVVVVYEAGPLGYVLYRALKARGVKCYVCAPDSGEQQRKRRKNNAIDTRNLTSKLFNYLNGNEGALQLVRVPTETQEQARLASRQHDQLVEDRKRLGAKGNALLLSQGFGSWKNWWRPKAFSRLSQLVPEWLKEMLQSWVDLLRGLDEKIRPAKAALAKRCRGPRPKGAGAISLVQLQSEVLDWGLYPNRRKIGCLAGMVPSEWSTGDNQWRGSITKVGVPAIRRIITEMVWRMILFQPQYKAVQKWQEVLRGTNRALKKKAVVAIGRQLMVDLWRLQTGRVNAQELNLVMIGG

SEQ ID NO: 270452 - protein, 412 aa, unidentified
MEPIIERCAGVDIGQATVVACVLVGGPHQRARKEVRTFRTVTKELLVMRDWFSEKGVTHVAMESTGVYWKPVYALLEDGFELIVGNAQHIKAVPGRKTDVKDSEWLADLVRHGLIPKSFVPPPPIRVLRDLMRYRKKLVDSRTAERNRLLKLLETANIKLSSVVCDVFGVSGMLMLRALLRGSSNPQVMAQLAKGRLRRRVDDLELALDGRMDEDHRFLLSLQLARLKALDRHMAQLDIRIDQRLEPYREKHALLMQIPGVDRILAATLIAELGVDMTVFRGPRAVAAWAGVCPGNNESAGRRRGAKTRKGNVHLTTALVEAAAGASRKHGSYLRDKFFRLKARRGHNRAAIAIGHKILIAAYQMLATGVDYKDLGAAYLDHLDKTKVASQLVRRLNRLGYEVTITENGARA

SEQ ID NO: 270453 - protein, 412 aa, unidentified
MQDILTCAMGLDIHRDVIVACLAKGELGTDPEIEIRSFSTLIPEMRKLRDWVLEAECRYVAMESTGIYWQPIYEMLEPCFDGQISILVVNARHMKNVPGRKTDMRDAQWIATLLRAGLLKGSFIPDKTFRELRHLTRYRKSIVRDITAQKNRIDKFLQSSGFRFTAFLSDAFGASGRNIIRHLMEYGNISREALDRCLKTQTRKRIDEILIALNGSLSEHQRGFLRMIFGHLEALEQHRHTVEDAITKEITKHEEALSLLCSIPGIDVTAAAAIIAEIGTDMSAFPDSQHICSWAGLSPGNNESAGKRKSAHINKGNPYLKSMLCEVGWVISGKRSLYLSGWYWRIKQRKGAKRATIALARKLLALIYTMLKTGSPYNEECFEIRRKQSERKRASRMVNELQKLGYFVVAPG

SEQ ID NO: 270454 - protein, 333 aa, unidentified
MKTKFYIGLDVHKKQTTYAVKDKNGVTVVKGRCSTQFEDLYKALSSYLKRGSVIMEACTHYYHLYRKMKEAQIDVHVANVIQLRKVIGKNDVLDAERLADMYRLNALPESYIPDEKVQDLRILVKVYHNEVVTGVRISNQIIACLDRNGIVLPVEDPLSKKGLIFINDYLQKNKNYALQMLIGSYNSSEQRKAEIQLSITEYLKVHFLEEYGLLKGIRGVGEVIVGYLIAEICPIDRFLNKKKLRRYAGVIPIKEQSDRKTYATYLPKHSSRKLLRYALVLAANCAVRSDCRLRDYYLKKKKGSIHSHAIMCVASSLCDIIYSVLKTKQPYIG

SEQ ID NO: 270455 - protein, 351 aa, unidentified
MSQNPDSAVAVIGIDIGKNSFHVVGLDTRGAIVLRQKWSRGQVEARLANMSPCLIGMEACVGAHHLSRKLKAFGHDARLMPAKYVRPYSKGQKNDFRDAEAIAEAVQRPTMKFVATKTADQLDLQALHRVRERLVSQRTGIINQIRAFLLERGVAVRQGLRFLRAELPRILATPPDVLSPRMVHVIEGLAGDWRRLDARIDHLSGEIAAVARQDAGCARLMSVPGIGPIISSAMVAAIGTGDAFSKGRDFAAWLGLVPKQISTGDRTILGKISKRGNRYLRVLFVQAAWVVLIKPKSWERHGLKPWIEAAKKRLHRNVLAIALANKLARIAWSVLALGRSFEARPATAAAA

SEQ ID NO: 270456 - protein, 388 aa, unidentified
MTQTPVSLPHPAAPDHNNTLVLAIELSNKSWVLAAQVPGLTRVKAKQTIEPRAEALLAALQGYRERAKAAGRHVERVIAIYEAGWSGFWLARLLATHGVEPYVVQPSSVLVDRRARRAKSDGIDAELLLRTLLAWLRGEPRVCSMVPIPAESDEDARRSVRERTELVAERVALVNRIGAVLATMGCGDYDPLLRNRRQRLGELRTALGTSLSPHAHAKINRMLDRLDLVRTQIAELEQDRDAVLQEEIPDKAGEMIQQLAKLRGIGAQSATVLVREAFVREFANGKALGSYAGLCATPYSSGGTDREQGISKAGNRRLRTVMIELAWLWQRYQPGSAEVNWFRARVSGAGARMRKVMVVALARKLLIALWRFATQGVIPEGAVMKPAS

SEQ ID NO: 270457 - protein, 341 aa, unidentified
MRIVGISGGVDTHADSHVAAAVDRNGGLLGVESFSADSSGFEELLGWLVGFGQVVRVGVEGTGSWGVGLTRFLTAGGVEVVEVDRPNRQTRRKQGKSDPTDAISAARAALSGTATTVPKHRNGPVEQMRVLLVARRSARQQRIQTLNQLRHLVFTAPEPIRVRFKDRYKTGLVTEAANMRPRKGTDPIIYTTNLVIRSLARRIKSLDAEIRTIDGALTQLIEETAPSLLGLHGVGTDTAASLLVAAGDNPDRLHNEGSWAHLCGTTPLPASSGKVTRHRLNRGGDRQANAALHRIVLTRMSSDEKTRRYVTRRRAEGLNTAEIMRCLKRYVARQTYKHLPT

SEQ ID NO: 270458 - protein, 337 aa, unidentified
MSYLGVDLHTNSFTVCYRSSKGKERITTFEVRKIGQFRKTLRKRDELAVEATGNTAWFVEQISDRVSRLVVVDPHQFKVIRKSVKKTDKHDAKTLAFFLSKDMLPEARMKSKENAQLHSLAGTRDKLVKQRTALINKIHNILNGHGMKYKKESLSTDKHLKIVLSFDWDVIVRVELEVLAEQIRSLTKSIRKLDDELSERGKNLKGHKNLASIKGIGERSATVLLSVIDDVNDFADEDKLAAYFGMVPRVSDSNETVRHGRITKNGSKIGRTTLVQCTLVAKRYSPYLRRYYERIKRHRGSGKAIIATARKLLGIIYQTLKNDWIFEDFPNFVIANT

SEQ ID NO: 270459 - protein, 525 aa, unidentified
MPYHVRRPSRRAHRKSNPNKRQSLQKPNGVISPRVQKVGGERFAIVCVDPAKHRSEWMMADYFGNLLIEPRTLDHRGAFFKLAVEQIRATQQQHDIQDMIVVVERTGTYYLAPKRAFANAGFDTRVVHPFATKQYRMPADPGNKTDETDLYAQHRAAVAGFGLCEFELESPYRELQLRARHRRNLVEKAAAFACQIREHLHLAMPGYANLFDRLFERPTALALAHHCDSPARLLELGQAKLRKHLRKNKVRHQVRTIDKVLAWASQTVNAPIQDGPMHHAIWTDLHDLYTHCQRQISILEQHLAIDLVQTPYVRLLAIPGINVVSAADLAGEMGPMKRYANANAITGRAGLYPSRYQSDETDIDSGPIIRQANRRLRCALMRIADNLACHCSYYRGQAGMDEARGVDKRSSRVRIAKRFSRLALACVAGDEPMRHPCFQEPDSILEKLRKFHHEHLSSIERTLADLETAVGQLPCHTQDHEAKIVADILQQHANHRRGASAIGDLLPAVLARLGIDTTKERRDRS

SEQ ID NO: 270460 - protein, 337 aa, unidentified
MKYSGVDLHSNNSVVTVTDDTDRVVAEKRLPNDIAKIVGFLLPWRDELAGVVVESTYNWYWLVDGLQEAGFDVKLANTGAIKKYDGLKHSGDESDARQLAHLLRLGILPTGTILPPEHRATRDLARKRMQLVRSRTSHILAIENILARQRGATINSNAIKRLTATDVNQMGLPEDVALAVESNLAVVTTLGAQIELLERRLQERLGERPEYALLTSVPGIGRILAAIILLETGPIERFHAVGNYASYARCVDSQRLSNGKKKGEGNVRNGNKYLVWAFVEAANFALRFNAEAKRFYERKKARTNNVVATKALAHKLARACFHILKERTPFDVRRCFA

SEQ ID NO: 270461 - protein, 346 aa, unidentified
MLHAGLDLSRKRLDFCLLDESGERIEVGATPPDADGLRSLAQRLARHDQPVQAAIESMNGARFVHDQLELAGWQVEIADALKVKGLAPLACKTDRIDAWVLAELCRRDLVPAIWLPDPSVRAERERARFRLHLVRHRSSLKQRIHATLLAHGKPCPVSDLFGVSGRALLERLALPEPWSGTLAASLQLIDELDRQITTCEAELRRLGADHHYVPLLMTAPGIGWVLAYTIAAEIGDIARFPAPRQLVGYTGLCPRVYQSGNSDRRGPLAKNGPRYLRWALIEATAHACKHPLYRDRYQRTKTRLGSQRGAKVAQVDLARRLAEAIWHMLTRDQPFAPAGATDPLAA

SEQ ID NO: 270462 - protein, 460 aa, unidentified
MKKKTQKQSNRKQKIDRSLPLLHPDAAGIDIGHREHWCAVPADRCEQPVRAFGTFTQDLEEMARWLQECGVKTVAMESTGVYWIPAFQILERHGLEVRLVNARHVKNVSGRKSDIKDCQWLQRLHSYGLLNASFRPPDHICVLRTYLRYRDDMVGSRSMQIQHMQKALQQMNVPLHQVLSDVTGVSGTRIIEAILQGERDPARLAALADKRVRASQATIQKALRGDYRPEHLFLLQTAFDLYQIYGQKIHLCDQQALAQMAQLPTQESKPLTERKAGRKPIHDMVAGTDLRAELHRWAGVDLTAIEGFGVLTAEIILGEIGTDMSRWPSEKHFTSWLGLCPDNRISGGQVLSSHTRHVINHVSDALRRAAVTLQNSKTALGAFYRRMRGRLGAASAITATAHKLARLVYRLLKHGELYVQQGLEDYEKKYRERILHHLKKTAATFGLELTQKQPLATGVS

SEQ ID NO: 270463 - protein, 343 aa, unidentified
MDRLYYIGLDIHKRTISYCIKAIDGRLIGEGKIEADRKSLGEWVKALSGPWVGAMEATIFTGWVYDFLKPYAVDLKVAHPEMLKAITAAKKKNDRADAEKIADLLRVNLLPECHMLSEEIRELRRILRYRNHIVRTAVNMQNKISGLLMEVGVSYSKKRLHGKRYFRELLERVEDIPPSVKELLKLSRSGYEMFRSFQKRLVETLHTNNLIHDRVERLMTIPGVGELTALTWVLEIGDSGRFTSIRKAVSYCGLCSAQRESAGKEQRGPISKKRNKHLQTMLIEAAKLAPHWNEQLAIVHERELKKGDRNRATLAVARRLVAYMLAVDKKQADFKLPAAMQAA

SEQ ID NO: 270464 - protein, 355 aa, unidentified
MKTKIPPHTIGIDLGDKRHAICVLDNDGDIGEQRSITNHKESIRRLSRKYPKARMIMETGTHSPWISRMLQDLDHEVVVANARKLRMIYTNHRKSDEADALILARIGRFDPELLYPIQHGSEKHQRDLLQIKLRDTLVRQRVTIICSIRGVLKSLGIKTTSPSSACFTRRLRDTLSSQENSDIFEILEPSLEVIDLISKKIKIFDEKLTELAEKEYPESKRLRQISGVGIITALSFILIIDDPARFKNSRSVGAYLGLTPKRDQSGDTDKQLRISKAGNTYLRRLLVGSCQYALGKFGKECELRTRGLRLAERGGPRAKKKAVIATARKLATIMHSMLLNKSDYIAEPTQVSEAA

SEQ ID NO: 270465 - protein, 458 aa, unidentified
MRTIGIDLAVTATHKAVVVDDTGQFVTPVLSFRSCWEEIAHLVARAREGVEADHPLQAVMEPTGMAWFNIAVPLSRLGITVYLVNGRKVAALRRYYKQHAGSDRISARVLAKLPLVDAESLYPLAIPTPVQLACQRGCKQDDRLQTWITAIQNRLLDTDRFTWPGLEQVLPDPFGPTARFFRQDWYDPVRVIEAGSQRLSLVFAAVVGPKDDLSWVKGLVELAIDVLKLYGLEALDYARLQEEIRRDQELLAKLEQQQSELQKDTVQPLYRQLHPSGHLQTLYGVGKKGAPVFASFIGQADRFVDNRHFRGWHGLVPDSRQSGESESKGLRISQAGPDLVKKFGFMGANTARRFDPQIAAIYYDQMVNKGKHHTQAVCACATHLLDRILVVLREDRPYELRDVDGAPVTPAQAKAIIAERYQVPEEVRQRTSKRARRERAEQQLERRQPKQKGSRPRR

SEQ ID NO: 270466 - protein, 348 aa, unidentified
MKQVTTIGLDIAKSIFQVHGVDAAGQPVLRQRLSRSRVLEFFGRLPRCLVGLEACASSHYWARELIRLGHEVKLMPAQYVKPYVKRSKNDAADAEAICEAVARPTMRFVGVKTTEQQSIMMLHRVRLILMRQRTQLSNALRSHLAEFGIVSPIGREGLDRLLKIVADTDDARVPAEARASLDMLAAQLEGVKAKVLENDRRIISSARATEVGRRLLEVPGIGPVLASAFVASVADPAIFKSGRDLAAWIGLVPRQNSSGGKERLGGITKAGNRYLRQMLMVGAMAVIRYAHRNSVRRPWLVQLMGRRPAKVAAVALANKTARTVWALMTSGERYRDPQVVQAAVSATA

SEQ ID NO: 270467 - protein, 321 aa, unidentified
MTYIGIDVSKATFVVAYSSAKTGRTKTFKNTVKGVREFIRTISATEHHCVLEATGNYSALLVYLLSEARITVSLENPLKIKNFARAMLSVTKTDEIDARLIALYGERMQPVPYKLRSDSILILKQKRTVLRQLKKQLVATRNLKGSLEVLPSFDPECKKTIEKTIVFLEKQIKAMEEKITSLAQGEYKKQMDLLTSIKGIGVTLAAALIVATGGFTYFDNAKQLTRYLGLSPTYQQSGTSVNVKGHINRNGDSNLRSQLYVAAFSSLRYNTECKACFERLRSNGKPGKVAVVAVANKLVRQAFAVVTQGKPYVDGVKSERL

SEQ ID NO: 270468 - protein, 461 aa, unidentified
MQNEGNRKTPGSSTQSLEGLPVIRRNVAGIDLGSERHWVCAPTADGAGREIADFGATTPELVRMGMWLQDRHVESVAMESTGVYWIAPHEILEAASFEILLLDTRQLARVPGRDNKADPTDCEWIQRLHSCGLLRSSFRPKEAVCMLRTLVRDKANLVAESGDWVRRMQKSLDQMNVRVHRAVSDIDGATGMAILRAIVEGERDARNLAKLRDRRCHKSEEEIAEQLSGHWREDHLFSLRQSLQMYDAIQQRIADYDQEILRKLSQMEREENRGQSTPPVKNPQKAKAIKKRGQEPMREALYRMSGVDLTTIDAIGVETVQVVLSEYGPDLSRFPSEKAFVSHVTLAPRRPTSGGKPIRKKRRNTASTRVAAALRMAALSLRNSATALGAYYRKLARRIGGDVAVFATARKLATLIYRLLRWGQQYVDEGAEAFERRYQQMRIATLKTKAEELGYELLQKA

SEQ ID NO: 270469 - protein, 312 aa, unidentified
MAQIVLTAGTDVSKEWLDTGLWPKKLELRVRRNREGYAELGSWLRQHGVTRVGLEASGGYEIEVIDALEDMGFEVVRLNAQRVRMFAKAKGRLAKNDRVDALTIAQATVILVEQLPGKRRRDLDPLIEHLTYRRQLNDWKTDCANQLEHLTDEALRDKTMAHKAALAVEIAQLDKVIAALINGHLEWCAIARRLRSVPGVGPVLAATLIAFLPELGRLPRRAIAALVGLAPYDQDSGYHSGERHIKGGRDTVRNVLYMATVSAIQHNAMIAAFAERLTSKKPKVIIVACMRKLLVILNAMVRDGKDWQTRAA

SEQ ID NO: 270470 - protein, 343 aa, unidentified
MKITRVGVDLAKKVFQVHGVDRAGRRVWQRQLKRSNWLSMLTEAVEPGCEIGMEACGGAHHWARELKSRGYQVKLISPQFVKPYLKSLKNDVNDAEAICEAMARHHMRFVAVKTVEQQDIQAMHRVREGLMNHRKAKANQIRGLVAEYGLVAPRQMAPLRRAIPCWLEDAENGLRQPFRVLLHGLWEDLQRMDERLKVLDKEILMLSESHPDAKRLKQLRGIGPLTATAMVAQFGDGRHFKRGRQASASVGITPRHAGTGGKNYLFGITKKGNPYLRSILIHGARSVVSKAKHKDDRLSRWVTELAERKHVNVAAVALANKTVRIAWAMLRNGTDYDPELAMA

SEQ ID NO: 270471 - protein, 438 aa, unidentified
MSNKFIFNLDDLFISVGIDVGADFSWMSIALPNQQIIGKPYKILHNQMNSLATAVSKIKEAEELYSLESRIFLESTGIYHYPLFCYLRDKGFNCSVINPIITKNSTNINIRKVHNDRFDSKKAALVGLKPDLKVSLMPSDLALNCRNLCREYYDLMDNRSAYVNKLQGELRMAFPQYLGIFSKITANTSLTLLETYTSPSAFIEADPQKIIDTIKSTARFGVAYAASKYNAIIQAAHDANEFGYILDSNIKRIRLYISFIRKYDEEIKNILDAMHELIDANEETDFVKQIHLVETFKGAGFLSAVTLMGEIGNFSAFSKPKQLFAYFGLDPAVKQSGKFEGTKIQISKRGSAIARRAIHTLTLQSISTSRTGEAKNPVLRDYYLKKCESKPKLVAMGAVSHKVCNMIFAILRDNKPFEIITPQEHIQQYNAAKCDIAA

SEQ ID NO: 270472 - protein, 318 aa, unidentified
MESQVSFNQVVSRGCGIDVHKKIVAVTIDGEGLKKETREYGTFTRSLTELRDWLLENGITHVAMESTGVYWKPVYHVLEPSGIKVWIVNARHIKYVPGHKTDKQDSAWICKLLLAGLLKPSYIPAREQRELRDLTRYRTKMIQHIASERNRIIRVLEDCNVKLSSVLSNTQGAVGTKLIGKLCEGKNITMADIDEVYHRKLEASKEDLYEACQGLLTDHHIYLLQTIQKDIASTETVIESLNTRIRDMLKDYENVVENLKAIPGLSTKTVEDLVAEIGLDMSAFPSEKHLASWAGMCPGNNESAGKKKADAPATGISR

SEQ ID NO: 270473 - protein, 400 aa, unidentified
MRAVFGIDVSKTSSEVAILVNGEKVHGYTILNDAIGFNRLLGDLKTVHNPEIIFEATGVYSRRLQAFLEEYSYAYTRLNPLEAKKQLDSLRVRKTDKIDAEKLAKSQLVHNRKPTYVQEEVYQHLRDLSRFYQNMTEDLVRTKNRLHKVLQVTFPELETLLSTPTGEQYWNLVMAFPCKEFVLSLSQSNLCEIVRQSTSKRISEKRIAYLTDKLIKLAKQSFCAVKNTSPMLEEVRYYAQELLRLSERRQVVLNDMVALAQPLPEYDILRSIPGIAETTATSIIGELGDIRRFQSTNQINAFIGIDLRHYESGNFLAKEHITKRGNPYARKILFKCIHNIASASHTNPCHIADFYEKRKRQSTIASTKPHAIASIHRLIRTMYYLITHNKLYDYSLTQNR

SEQ ID NO: 270474 - protein, 335 aa, unidentified
MHRARLAFASMSQNNITTLYAGIDIAKDTLQLSLCGASENLPNNSKGHTRILKLLGAAEAAQPGGKVHIILEATGGYEAALCAALHAAGKVLSIIQPLRARHFARARGEQAKTDPIDADVLTAFGEAMQPAPTPAPSAAQTHLGELVGRRAQLIETRTAETNRAAHYTDRLLCRQSRSLLALLNRQVGQCDAAIAAQLATDAPMKARAERVQQVAGIGPVVAAILQAGMPELGTLDEGQAAALAGLAPYNRDSGPRQGVRSIRGGRASVRCALYMAALSAVRHDRILREFYGRLRAAGKKPMVALTAAMRKLIVLLNRMLKNPQFQLVTSPAGDQ

SEQ ID NO: 270475 - protein, 349 aa, unidentified
MRFYTQQHRFYCGIDLHARLLAICIVDQAGNVVVRKQIPDDKQLLLDVLAPFRPDVAVCVECLFAWYWVADLCQAEGIPFILGHALYMKAIHGGKAKDDDIDAEKIGRLLRGGNIPYAYVYPKGMRETRDLLRRRNYFVRQRAAMITHIQITNAQYNLPPFGKKLIYAKNRQELQVAEQFPDAHVQKSIALDLAVIDSLDQQIADVELYLKRTVKVEDPHGYFLLQTIPGVGPILGLVLLYEVHRIDRFADVGDFLSYARLVRCQQRSAGKTLGTGGKKIGNAHLKWAFSEAVCLLIRCCPAVKAWQVRQEKKRGKKKALAILAAKLGRAVYWMLRRQLAFAPKRFLGQ

SEQ ID NO: 270476 - protein, 322 aa, unidentified
MTKHTTICAGIDTGKRKLDVAIEGCRAPLQVDNTPEGHKVLLAWLRQRRVKRVGIEASGGYEQPVVAELRRKRFVVVVFQPAQVRAYAKFHLQRAKNDKIDAALIAACTAAVRKIHAAPDPRLLPFAEQLTMIDQINEDIARLKNRIESCRNARIKKLWQEDIARLEMRQKAELKALVASIRKRPDLAKRLELINSVDGIGLPTAVAILVRLPEIGRITREQAVALAGLAPYDDDSGEQAGVRHIEGGRKRLRRALYTASLAASFRWNRQLIQLYQRLTAAGKEHKRALVACARKMLIFANTVVARGSPWCDEPPVGSLSVS

SEQ ID NO: 270477 - protein, 280 aa, unidentified
MNARFAAVIGLGVGKTGHRACALDPDGNRLFDKPLPQDEAQLRDLFTHLQEHGDVLMVADQPNTIEALPIAVPRDVGCAVAYLPGLAMRKAADLYPDRSRTDARDAFIIANSARTMPHTLRTIDRDSDVLSALKVLAGFDEDLAHETTRALNRIRSLLTQIHPADPEVLVDRLFTALSEQTVVVPATAAVELVIPRVAGQVKELKEQRATVAREVEAMLEDFSLAGVLMSMPGIGIKTAQILLAFGDGSAFETAGHLAAYAGVAPVTRRSGTSIRSEFPA

SEQ ID NO: 270478 - protein, 412 aa, unidentified
MEVLYPRCAGLDVHKDTVVASARLAAGREVVVEVRSFATTTAGLLALSAWLAERGCTHVAMEATGVYWKPVWHVLADGDFTLVLANAAHVKNVPGRKTDVADATWLAELLAHGLVRASFVPDAPTQTLRALLRTRKQLVRERASHVQRLQKTLEDANLKLASVLTDITGTSGRAILEALIAGETEPATLAALANQRVRAPRGTLEEALRGRVTSHHRFLLRLHLRQVDALEAAVAEIDREVEADLEPFRAAVRLLSSIPGVSALSAEVIVAEIGTDMGRFPTAGHLLSWAGLCPRSDESAGKRRSTRLRKGAPWLKTTLVQCAWASTRKKASYLQAQFRRLRARRGPKKAICAVAASIPTAAYHMLRGGTFYQDLGPDHFDRRAKGDRTARLVKQLTALGYTIKPSACPAPA

SEQ ID NO: 270479 - protein, 368 aa, unidentified
MKKNTSKTKKRTTTAEAREKFASFVGIDLGDKHCEVCVFNGAGEVQERLRLPMKGKDLEGYFGKLGRSRVALEAGGQSRWVAEVIERCGHEVYVSNVRKVAYISASDDKDDPGDAYKLAELVHFKPQLLHPIQHRSREAQADLSWIRAREALVESRTQLVNTVRGMSKAFGERLGKCSVEAFPAKRAEQVPEEIRGAVAPLLEMIDQLNEKIAYYDQMEEHIARQRYEKHGLLRQVDGVGVHTALSFMLTIGEAERFEKSRMVGPFLGLRPRKQDFGESRPQLGITKAGDEYLRKTLTNCAHHILGPLGKDSDLRRAGQRICERGGKNAKKRAVIAVARKLAVLLHRLWITGEVYEPLRNSKKKAVAA

SEQ ID NO: 270480 - protein, 479 aa, unidentified
MESKSKEKNNHPTQPHWREMNRKQRRETMRKIQSEDLSLELVHRDAAGIDIGNESHYVAVPPSRDNQPVRRFGCTTAELKAMAAWLKQCGIRTVAMQSTSVYWIAVYDILEQAGLEVYLVNARDTKNLPGRKSDVQESQWLMKLHTYGLLRNSFRPSQEIRTMRTYWRQRNDLVQSASRHIQRMQKAMTQMNIQLANVLSDVNGATGQSIIKAILAGERNPHKLAEFRDPRVKASEEEIARSLEGNWQPDLLFVLKQEQDGYEFCQKQMAECDRQLNQHLDQSEDHSRGASLPEEKRRGRLRKKKGNAPQFDLREGLFRLTGTDLTRIDSIDVMTATTVISESGYDMSKWQTENHFVSWLRLRPDNRISGEKIIGKGRLPTNNRATVALKMAATTLRKSNTYLGAQFRRLRTKLGAPCAIKAMAAKLARLIYRMLRYGMKYVDQGAAFYELRHRELQIKHLKSKAEKLGYRVTPIPAAA

SEQ ID NO: 270481 - protein, 425 aa, unidentified
MSEKIVVGIDVSKAFSDICILSPNNDIIKRLKISNDINGMKSLIYVLEKVEDEYKDRAVIIMEATAHYHQILANFFRKHNYEVIVINPIQSGALKNINIRKIKSDKTDAYNIALLYRIKNYNETITHSDTVNSIKKLCRQHKELTDEIVEHINRLIAFLDISFPDFKKVFADLQGKTPLSLLEKYPTIQEVLSPENKQDIIKLIKENSHKSSSYAEVKYEKLFKAAEKSIEVCIVSLSSAVLIQTTVRVIFSLQEALKAIDDEIKRLSLLDEKFHKEIVLLQSIPGVGEYTACVVLSELGDISNFSKPKELVAFFGLDPGVSQSGTYNRKNNKISKRGSPHVRSILHMLAKSNVYPNRNREYLNPVMRAYFEKKIAEKPYKVVMCAIMRKMVQIIFAVLRNQKSFELRTPEEHQKLIREKSKLVA

SEQ ID NO: 270482 - protein, 347 aa, unidentified
MRFYTRQHRHYCGVDLHARTMYVCVLDRDGNVLVSKNIASAPEPFLELIAPYREDLAVAAECMFTWYWLADLCAREGLVFVLGHALYMRAIHGGKAKNDRIDAHKIAGLLRGGMLPQAYVYPQAMRATRDLMRRRNYLMRQRAELLAHITNTNHQYNLPALGVRPARPAERSGLLEHFAEPQVRRSVAVDLSFVEHYDRELPALERYLESNAQAHNPVALAIVRTIHGMGKVLGLSILYEIQDIGRFARVQQFLSYGRLVKPTKSSAGKVLGHSGKKIGNAHLKWAFSEAAVCFLRANKPAQALRARLMAKHGKGKSLAIIAAKLARAVYFMLKRGEPFDAERFFAH

SEQ ID NO: 270483 - protein, 410 aa, unidentified
MEVLHQRCAGLDVHKKTVVACVRLASEGKVVTEVKTFATTTQGLLALSDWLSENGCSHIAMEATGVYWKPVWHVLSDGEFELILTNAAHVKNLPGRKTDVSDAAWLAELLAHGLIRASFVPDGQTQELRALLRTRKQLIRERTRHIQRIHKTLEDANIKLDAQLSDVLGKSGRAILNAMVAGETDPIRLAALAHANVKSTQAELREALRGRVTSHHRFLLQLHLGQIDSLDAAIVKIDREVDDNLAPFRTAVDLVRTIPGVGALSAEVIVSEIGTDMSRFPTAGHLLSWAGLCPRNDESAGKRRSSRLRKGAQWLKTTLVECAWAAKNKKGSYLQAQFLRLRSRRGPQKAICAVAASILTAVYHMLKDGTVYQDLGSEHFNRRSKMTKTQRLVRHLEHMGYAVKIQPIAA

SEQ ID NO: 270484 - protein, 330 aa, unidentified
MHFYLGIDVSKAKLDCALRLSNGKYRNKVIDNNPVGFKDLQTWLHKHKVQPVNAIHVCMEATNIYWEAIALHLANLGMKVSVVNPAQIKAFGASRLVRTKTDKVDAQLIAEFAAERDPKAWEAPSKSEQQLRALVLRRDALQAMRTQESNRLGVAQETVRSGIEEHLLWLEEEIKAINKKIRDHINKDPDLKAKKDLLEGIPGIGKSSSASLLSFYADTKRFDNARKAVAFAGLDPRQHESGSSVRGKAKLSKVGHSFIRKAMYMPAVVALYKTAWGIAFYERLKTSGKCNMVIIGAMMRKLIHVVFGVLKSGMPFDVSKHMKVSEKALA

SEQ ID NO: 270485 - protein, 347 aa, unidentified
MSEQHHVGLDVSVKETAICIVDPHGKVVHRATVESHPEAIGRHLIDLGHSYARVSLEAGPLSPWLYAGLVEAGLPAICVETRHMHAALSARINKTDRNDAMGIAQMMRVRLFKLVHVKTPASQQRRLLLTSRKLLQRKAYDIESDLRGQLRNFGLKVGVVGAVGFEQRVRDLVLDLPFVAAVVLPLLEARAALRTQLAKLHKMLLDQVRTDPVCRRLMTAPGVGPVVALTYRTCVDNPARFGRSQCVGAHYGLTPRLYQSGETMRVGRISKCGDTMMRAALYEAALVLLTGPRVRWSSLKVWGLAVAKRRGMQKALVAVARKLAIVLHRMWRDEKDFRWSTGAATAA

SEQ ID NO: 270486 - protein, 464 aa, unidentified
MARKEQTQPHLKAVPMLLHESLYVGVDVGKQRHVAGFVSKTLLQRYERFEACPALAFEQSREGFRTLIDRIRELVPLEQAYLLLESTGHYHRALVQYLQELDIPVYIMPVQKRPVGLIKTDKRDALGLANQLYNQLELGVQLADKTHLVRRLLHRYELMHESTQRKNKLTAICDELFPEFTWVLKDPNGTAALKLREHFPTPHAIATTPLTALAQHRVSSHPSMEQLVELQRLASQTIGTKDVVRQRGLVLEQQQLIRELRMLQEHVQQLDVEIVKLVEQSREGQILTSMPGIGPIQAAAIMAAIGNVLNFENGATLKAYFGWAPKREQSGSTLDRDQLAHTGTRTMKQTMFLVVANAIQRKECEWAKLYERLVPRMCSYDERKRTYRGKLKVLVRIAGQMTEMIYALLKQDAEVLSKTPPGETPPDPILYDPELHQRHRNGEYRPLKNTPPHRKVLQLPERTS

SEQ ID NO: 270487 - protein, 412 aa, unidentified
MLVGIDWADAEHTYCLMDDTGATLATGTIDHTAEGLERFMTLVRARAQDPQDILVALETSQGPLVGALLDQQFTVYAINPKAVDRHRDRFRVAGAKSDLRDAWVLANLLRTDRMLYRPLLPDSEVAQELRALTRDRAELVQTRTMLSNQLTSCLKAYFPEFLTLFADPDRPVALALLQAFPTREALQAVSPTRLEAFLRRRHCPHSHDRAVEIHTQMQARGFHIAPPLVRAKARLAGTLVSQLQALAEHLEAYDREIQRVLRLHPDGELYHSLPGAGDFLAARMVGELGDNRDRYRDASSAQCEAGTAPVTRKSATVRTVHVRRACSHPLRSTMWQFAFASKRHCEWAQAYYLRARKRGKKHAEAVRMLGNVWLRIIIAMRRNRRPYDEALFLSRSSHPSLALCPSMRVKVA

SEQ ID NO: 270488 - protein, 438 aa, unidentified
MSMTFARLLDPCLEDEDDPFRHYDYRGEPLEDRLYLPCGIDPHKKVCHAAFVHPLPHRQEILSHRQVQNQHLPDALWLVEEGQRLAVSFQATPLYIFEASGPYWRPYRLFLHQFGLPTATVSGRQTKRAGGTGTRKTRNDLQTAFLVAKVFKQGESHASRIPPEPLATLREYTRLHLFFVQQSVAIQNRMFDLRYQIHPGFDDLFSKPVMPTTLALAQEELVHPVKLLQADPERLTQMIHQASNGKLGAPRAEAILRSARHTFYMPYAPAAQSFNLKLMAQAHEYISHHLLPPLQDRILECLDQIPFPQHLTEIPYFGPIVTATFLAELGSPFWFRTVDSVVAWFGLDPSVSESADHTTGISHLTRRGTKYGRRIMWLVARNWSRYVSQGNRMFRKERDENKLSYDGAICVIAAKLVRMAFAMARDGSHFHMSKAFPN

SEQ ID NO: 270489 - protein, 421 aa, unidentified
MTPPNEVVWAGIDTHTDTHTIALLDERGRPLGAETFTADPDGYDRLIGMPPGPGRVAAVGVEGTNSFGAALARRLTAAGYEVREVLRPRRSVRRRAGTSDPLDTVAAASSVMAGDGTSLPKSSDGWVEALRHLNAQRSQLVSAMTAIPDSTNGLLAAAPEPIRERYRGLRSETRMNRLAECRPAGGLVERSVPAALKSAAKAWKALKRQAGLLEERMRLILEEHARPLLDMYCAGAVIAATLAIVAGDNPERIRSEAAFAKLCGVCPIPASSGRTNRHRLNKGGNRQGNMALHRIAIVRLRYHKPTRDYMAKKTREGKGKLEIIRCVKRFIAREAYRALISIRNGEVGRGTPAERGAKLRELRVSRNITQQQIGEALCVPSSRISEIERGARDLPELEQRAIQWIHSTTNPKQHTQTLDNV

SEQ ID NO: 270490 - protein, 341 aa, unidentified
MKIVVLGIDLGKNLFSLAGLDRTGAVVFRRRMKRESILPFTAQLESCTVAMEACCGAHYLGQRFMAQGHVVRLMSPAYVRPYVKAQKNDERDAEAIAEAATRPTMRYVELKSEGQLEVQSLHRVRGRLVSERTALINQLRALMLERGITVPQGRCKLERHLPEILSNESNGLGPRLRRLIEDMREEWRSIDRRIKGFNDELAQRARNEEAAERLTRVPGIGVLTATALIAAVGNARTFTCGRDLAAWLGLVPRQATTGGKLRLLRISKRGNGYLRMLLIHGARTALPGLAKKNTPLGHWLRGLLARTHRNVVIVALANKLARIAWAVLARDRQYITIQAAG

SEQ ID NO: 270491 - protein, 375 aa, unidentified
MKEKVRFLGLDVHAETIAVAVAEADGEVRSLGTVANRAESIRKLVKKLGAVEQLRACYEAGPTGYILYWQLAELGVKCEVIAPTLVPMRAGDRVKTDRRDAERLARSYRSGDLTAVWVPDAGSEALRDLVRAREAAKQDQLRARHRLSKFLLRMGQRPTAGVKAWTAPYMAWVRQVHFTQWAREATMLDYLHEVDHMGERVKRLEQSITEAVKLASPQMQEVVRGLQAMRGIAQISAVTIVAELGELSRFQNARQLMGYSGAVPSEDSSGQRTRRGSITKTGNAHLRRIVVEAAWSYRYRPAIGPRLCKRQEGVPEEIKEIAWKAQHRLHKRYMKLAAAGKDQRKIITAVGRELLGFIWAIGIKAEAASKLWTVA

SEQ ID NO: 270492 - protein, 350 aa, unidentified
MNATTVAVDLAKNVFELALADGRWKIIERARLTRAQFERWFDNRSVGLVVMEACGSAHHWARLIRSRGIEVRLLPAQYVRAYVKRNKTDRADAQALLEATRAGDIRPVAVKSIEQQGLQALHRTRSGWMSTRTRRINTLRGFCREFGLVVPEGAATGLAQIARYLAGEHSGLPALLRPSMRLVLEEIRLMEARIGELERQLLQLAKASPACQVLQSVPGIGLLTSTAMVAAVADPGSFASGRRYSSFLGLTPREYSSGNSRYLGRISKRGDRYIRMLLTHGARSILRAATVARRAGRQIDRLKSWALAVQARTNHNKAACALANKLARIAWAVWVKHEAYRSEPAPTTPL

SEQ ID NO: 270493 - protein, 356 aa, unidentified
MRQETMVYVGLDVHKEFCQAAVIDDSGRVLSNEKFSSTREELDRFLAGFKDAKFVLESTGMWEFIFEGIEKRGFEAQLAHPLRVRAIAEAKVKTDKVDAETLAQLLRADLIPRSWVPSRDIRDLRQLVRQRAYLVQQSTSFKNRIHAELLRRGVRRPQNFVMPFSKKSIDWMRSLEIPTVISCLNCLESVQVQIEEMNIKLLDEFNRRPDAQLIATVPGIGFYGALLIHAEIDDIKRFSHPEKLCAYAGLVPTVRQSASSVHYGAISKDGSSYLRWMLTEAVHTHTHCEPGSRLSRFHAKVARRRGKQKATIATARKLLLIIYWMLVRHEPYHSQGLDPGFPPARNECDIGIGAGP

SEQ ID NO: 270494 - protein, 411 aa, unidentified
MEVVHERCCGLDIHKKLIVACAITPGSSGQPRRQVRTFGTMTDELQQLSGWLSEQGVTHVAMESTGSYWKPLFNVLEESFELLLVNAQHLKAVPGRKTDVKDAEWIADLLRHGLLTPSFIPEREQRELRELVRYRTSLVQERTAAANRLQKVLEGANIKLASVATDILGRSGREMLEALVAGETNTAVMAEFARGRLRDKRPTLERALAGRFGPHQRFLVAEILGHIDFLDETIERLSAEIGERERPFEAVLERLDTIPGVGRRIAEIIVAEVGPDVRRFPSAGHLASWAGLCPGQDESAGKRRSGKTRKGNRWLRTALVEAAQAARRTKTYLAAQFRRLTTRRGLKRAMVAVAHSILRIVYHLLIDEHPFEDLGEAYFDQRQRQHVSRHLKQRLERLGYRVQLEPLTSAA

SEQ ID NO: 270495 - protein, 351 aa, unidentified
MKLATIDYSGKKVFVGMDVHKKTYAIAAYCDGEIVKKWTTKADPVATAAQLNRYFAGAEIHSAYEAGFSGFKLHRVLSDVGVLSRVIHAASVEVKSNDRVKTDKRDAKKIAEQIAVGKLRAIDVPSEEVEQRRALTRGREQVVERRKAIGNQLKMKLSYLGIDYPDKFKISENFMKWVEKLEINGSHRFAIKELIDAWRQESKRIKRFEQELAKQAANDPLEKIYRSAPGIGAISARTLSNELGDMTRFDNERQLFSTTGLTPGEYSSGDRVRKGHISRQGSSRIRGLLTEVAWRAISEDHSLKAFYKRVAQTRDGKRAIVAVARKLLGRLRYCLKHKVEWKDLAASNVAA

SEQ ID NO: 270496 - protein, 392 aa, unidentified
MQVGIDAHKRSCTVCVIEEGTVTDSFSFPTTREGVGEFMGRIHGKATVIIEASTTGKVLSRMLLDKYEVHMVAPPERKRSVKTDRRDAERIVREDTLQYLRRCYIPSPYIEMLRSLVMQQIQVGRKISRVKNQVHGLLDRNMIHDLDEFSDIFGVQSLRTLAEIKLPSLDTNALARYLEELKLHVAHHRQLETELAKITESDEDALLLMTIPGIDFFTALAIKSRIGDVGRFPTKKHLCSYAAVAPGASNSGEYISTHNHVKHGDMVLKYALTCAVRGAVLAGKNSAVKRFYLKHCKRMGAQKAEVAAARKMACVVWKALSTHQPYREEDERLTAKKRRVLAWKAKREEKNVSSDLRQLAEILLGETVTLERYPADFDQQFVGSLPMESEQA

SEQ ID NO: 270497 - protein, 344 aa, unidentified
MQTLVERGCGLDVHQATVVACLLIVLKSGKVHKQVRTFGTTTRDLLGLREWLLSEGCTHVAMESTGVYWKPIYAILEGAFEIVVANAQHVKKVPGRKTDVKDAEWIADLFCHGLLRASFVPPKPIRELRDLTRYRRKLVESRSAERNRLLKVLETANIKLASVVSDVFGASGRLMLLALAEGKDTAQEMAQLAKKQLRKKIPELQLALEGKVEEHHRFLLSVQLHRLGAVEKDLAIVEQRIEEKLKPYEAEIKLLDEIPGVDVARAGAIIAELGADMRVFENVSQLASWAGVCSGNNESAGKRRSGRIPKGNVYLKTALVEAANAAAKAKGTYLRDKFYRLKAR

SEQ ID NO: 270498 - protein, 448 aa, unidentified
MRTRKPARAKKMKLPKDLQHINPHAAGIDVGSRSHFVAVPEGSCEQPVREFTSFTDDLHRMADWLLACEVTTVAMESTGIYWIPVFEILESRGLEVRLVNARHVKNVPGRKSDVLDCQWLQRLHSYGLLEGAFRPTEQVCTLRAYVRQRMNLVRYAAAHIQHMQKALSQMNLQLANVVADITGVTGMRIIKAVLAGERNPLVLARLRDRRCKSSESTIARSLHGNFRPEHLFSLKQAVDLYEFYQGQIVECDRQILDQLASFDGADASGNGPPESVDEALQRMAGVDLTQINGIDTNSALKIIAEIGTDMNRWRSAKHFASWLGLCPGTKISGGKVLNARSKPVANRAAATLRMAAFALFNSKSALGAYLRRQRARLGAPKAITATAHKLARLVYSMLKHGTAYVDEGQKRYEERYRTRVVQNLKRKAKELGFALVEAVEKQPKLETT

SEQ ID NO: 270499 - protein, 410 aa, unidentified
MDVLIPRCCGLDVHQKTVVASVRILGPTGEVTRDTRTFGTTTRELEALAAWLRPWQITHIAMEATGVLWKPVWHILEPEWQLLLVNPQHLKRVPGRKTDVKDAEWIAQLLQCGLLRGSYVPPAAIQELRDLTRTRTTLADETTGVVNRIHKVLEDANIKLSTVATDIMGVSGRAMLRAIIAGNTDPQSLADLARRRLRRKHAALVEALHGRVTAHHRFLLERLLTQVEFLEAEIGRFDQRIAELIRPFAAVLDRLDGIPGINRRAAENVIAEVGTDMAPFPSAPDIVSWAGICPGKHQTAGKTRSAPKRKGNRWLSRALTQAAWGARNKKQCYLAAQFRRIAGRRGDKRAAIAVAHSILVATYFIVRDGVEYRDLGPDHFHRLTPDKVVRDLVKRLEKLGHRVTLEKTAA

SEQ ID NO: 270500 - protein, 350 aa, unidentified
MKTKVTATAKLYIGIDIHKRSWKIHTSTVLFDGRSFSMKPDAIELKKYVDKYYSDYDVYTAYESGSCGYAAHRSFESFGWHSIVVNPADISKIGKSSHQKTDQLDARQICRELKDGRLFGIEVPDKQREELRSLFRRRNDLVKKFRKIKTQIKMKLLYFGIEIPSEYDNPNWSHAFRNWLKSVDFEYDPGKLSISSMLLEYKFIDSQVREVSNKLRAYCRKYYKDDYYLLRSIPGIGGIVACGILSEIGDLRRFSLKQLAGYVGLCPNMFQSGDSFRTKGMSYRANRLIRSYFVEATWQAIRFDPVMQSYYRKHQGKDTKKILVKVARKLLSRTLAVIKSGVPYEIGVVE

SEQ ID NO: 270501 - protein, 356 aa, unidentified
MSRDIKYIGMDVHQEAIVIAVLNATGKLVMETILETKASSLLQFIHGLRGELHVTWEEGTWAAWLYDLLQPQVQQVLVCNPRRNALLKEGNKSDKVDARKLAELLRTGMLRPVYHGENGLRTLRELGRSYQTISKDLTRVMNRLKALYRGWGIPCAGTQVYGARYREGWLNKIAQVGVRRRAELLYQQLDGLQALRRNLRPEFLAESRKHKAAKLLRQIPCIGPIRAARLIALMQTPHRFRSKRQLWTYSGLGIETHDSAQYRFVGGQLQRSKKPQQLRGLNQNHNHEMKEIFKGAATRASCGRGPFRDFYAALLAKGMKPEMARLTLARKIAAITLTLWKRGERFDAEQLKTQAA

SEQ ID NO: 270502 - protein, 468 aa, unidentified
MTPRKRQRLSPEPLRVTNPHAAGIDVHANVHWVAVSPADAPAPLADHPANLPAHVRYFGACTADLIAIADWLAQCGVTTIAMESTGIYWIPLFELLESRGFEMFLVDPRQSRHAPGRPKSDVLDCQWLQRLHSYGLLTASFRPADQVVVLRSYLRQRQMLIRYAGQHVQHMQKALEQMNVKLAEVVSDITGVTGMAIMAGILGGQRDPLQLAKLRHDYCKRTEAEIARALYGNWRAEHLFALKQALTLYEFYRQQLQECDVQLQAHLGIFPDRSKGKPRPKRQRRYGQRSGKRTNEPAFDLGTALYQMSGVDLTVLEAIDVTTALVILSEVGSDVSRFPTVKQFTSWLGLSPQHQGSAGKIRSRRVPRGANRAGRALRMAVQGCYHAKHALGAFYRRVQARAGAPKAIVATARKLAERVYRLLKYGAEYVRQEIEVYEAAYRARVVKGLARRAAEMGYRLEPAMAAGT

SEQ ID NO: 270503 - protein, 352 aa, unidentified
MERKYVAMDVHFATTVSVVVDSDGKQLMNTVLKTEGGPIRDYLKGLSGPVWLTFEEGTMAAWLYEITEPLVEKLVVCNPRQNRLLKKGNKSDKIDAAKLAELLRLGALKPVYHKRHSVSELKERVAIYGQLTEDRTRVINRLRAVFRSQSMKMTLEEEKREETLKQLVSEAGRERAELLFAELDGLDKLQLAARKKMEQEAKKHPDYRLLQTMPGVSTIRAAQLLAWGVTPHRFRTKRQFWSYCGLSVVTRSTADHEVREGGIVARRRKAPATRGLTPDYHHGLKGLFKGAALDCLKNKEIRPLYDRLVARGLNDSIARVQLARKLAAGCLAIWKSGKEFNNERLIQVSDKK

SEQ ID NO: 270504 - protein, 345 aa, unidentified
MSESYAGQQIVGIDLHRRRSVIVRMTEAGEHLETVRILNDPERLAAVMARAGETPEVVLEATYGWYWAADTLAELGANVHLAHPLGVKMFSYRRVKNDERDAADLADLLRMGRLPEAWIAPPATRELRQLVRHRAKLVGLRSNLKCQVHAVLAGAGVQVVMSDLFGVEGQKLLARVELPIAARARVNSVLGLIAAMDVEVELFAKLVAARLREHPGYRAIQVIPGVGPVLAAVFVAEIGDVTRFPGPAQLASWAGLTPKHHESDTTVHRGRITKQGSRLVRWAAVEAVQRVPVHTRLGQTRDRVAQRRGRNVGVVAAARELIVLVFYGLRDHHIRCLTPARTRTA

SEQ ID NO: 270505 - protein, 408 aa, unidentified
MEVVHPRCAGLDVHKKTVVACRLTPGSGPDPVREVRSFGTTTRELLRLADWLAEADVSHVAMESTGSYWKPVYNILETGFELLVVNAAHMKAVPGRKTDVRDAEWIAELLRHGLLRASFVPTRPERELRELTRYRTTLIRDRASEVNRVQKVLEGANIKLASVASDVAGVSGRLMLRALVEGEADPAALAGLARGRMRSKRAALEDALTGSIGPHQRFILATMLRRLDELEGHIATVSAEIEDRLRPFDEAIARLSTIPGVARRTAETLLAEVGTDMTRFPSARHLASWAGMCPGNHESAGKRSTGRTRKGSPWLRRTLVDAAHGASRTSTYLGAQYHRIAARRGANRAAVAVGHSQLVIAYHVLRDGQPFEDLGANYFDERDREQVRRRLTRRLQALGFEVATALPA

SEQ ID NO: 270506 - protein, 370 aa, unidentified
MLDTTTFVGLDVHARSIKAVSLDVMTGEVRCATFGYDAGAVAGWVRSVDPKARCVYESGVTGFDLQKRLSGLGVDCVVGAVSKMIKPSADRRRKNDRNDAEFLARMLSVGNVVEVWVPDDECEAARDLTRALEDARDDLSRSKQRLSKFLLRHGLVFDERTPTGRRKGNWTRAHWSWIESIRFAEGADNEALAYYVDAVRRAAEDKARLEGLVEAETRKPRWRKRVDSLRCLKGVDTATAADLVFEAGEFSRFRNARSFAAWVGLTPSEHSSGESDRRGAITKAGNKHLRKALVEAAWHYLTCSARPKEPARGQAPDPGARRHAAKGVRRLVERRGALLARGVHNNKANVATARELACWVWAVGLMAEEA

SEQ ID NO: 270507 - protein, 315 aa, unidentified
MMNCIEQFVGIDVSKAKLDVCIAPCEASMQVAYDESGVERLTQHLHDLRPTLIVLEATGGMETLIATRLAGRGLPVAVVNPRQVRDFAKASGRLAKTDRVDATVLATFAQAIRPQARPLKDEDSRALEEMLNRRRQLIEMRVQESQRLDTAASKAMKESLMDHIQWLDKQIDDVDRDLKRRLRESAVWRAKDDLLKSIPGVGPVTALTMLAKCPELGALNRRQIASLVGVAPLANDSGRYRGKRFIWGGRADVRAVLYMATLSAMRCNEVIKAFAERLKQAGKPPKVIIVACMRKLLTIMNAMIKNNTPWTPKMA

SEQ ID NO: 270508 - protein, 425 aa, unidentified
MGKNNKSSPAGLGALYERVCGLDVHKKVIVASLRILDPRAGTVHITRRSFGTMTADLLELRGWLAEARVTHVAMESTGVYWQPVFNLLEGHLETWVVNAQHIKKVPGRKTDMKDADWIAQLLQCGLLKPSFVPDRQQRELRDLTRQQTKLVQQRNAVDNRIQKVLETANIKLGSVASDVLGVSGRKMIEALIAGEKDVTVLAELAQKKLRDKIPQLQRALAGDLTEHHRFLLQQLLGQYDFLEKEIARTSERLGAVAPPWFRAAVEQLDAVAGVGERGAKALLAETGTDMSRFPTHKHLASWAGQCPGNHESAGKRRSGKTPAANRHLDAVLTEMAHAAVRTKNSYFKAQYHRLAGRRGKKRAIGAVKHSLLVTVYFMLRDDKPYKDLGVDYFDKLNPQQSIRYHVRKLQELGQEVELSPMADAA

SEQ ID NO: 270509 - protein, 387 aa, unidentified
MGQVIIGVDPHKRSATIEVIDQHERVLGKGRFGTDHDGYKAMLAAGRKHTDRIWAVEGCNGIGRHVAQRLVADGETVLDVPAKLSARARVFSTGQGRKTDPVDAHSVAVVALRTPDLRQVTIDDTTVALRLLVDRRDQLGRARTEIVSRLHHLLLELVPGGAKKFLSAQQARALLNTVRPRDVVGKTRRWLASELIHELVTTDKKIKIANAELTELVASTGSRLQELHGIGPSGAARLIGDIADISRFTSRAHFASWNGTAPIDASSGDQNRHRLSRAGNRRINRVLHIMAVVQLRNDTEGRRYYRRKLAQGKTTMEAMRALKRRLSDVVYRQMTADAKRLRTGPGGQAGATLQSSAADSNPNIGTSEKSLPGPAEPQPRTPLLTAS

SEQ ID NO: 270510 - protein, 380 aa, unidentified
MGVIIGMDPHKRPATIEVIDERAVVLAAGRYGTDKAGYTQMLAAARTFAGRVWAVEGCNGIGRHLAHRLVHDGEVVVDVPPELSAQVRVFAAGNGRKTDEVDAHAVALRTPGLVQVQVEEDLVVTGMLADRRDEQGRTRTQVVNRLHRLLPELLPGGAEKFLSARQARALIASVRPRDLAGKTRRRLAVELEMIDKKTRALDKELTGLAAARGSALMDLHGIGPSGAARLLADAGDIHRFASRDRFASWNGTAPLDASSGSQARHRLSRAGNRRINRVLHIMAAGWLRNQTKGRAYYDARRAGGMPSMMAMRALKRRLPNVAFSCMLADQKRREAGPGGQSGTPADSSVAGPDPRTPALRTSHVPGPPHSLNAGHNTALT

SEQ ID NO: 270511 - protein, 431 aa, unidentified
MNADGKLPSKEVLSLPEYEMSQRSKVCGVDVHKQFFVAALLSQTGGSIIKRFLSNKQGLLEFKEWVLNEGCELVALESTGVYWYSLYSTLEDHIEVMVANPYFIKNIPGRKTDIADAQWIAQFALNNLIKPSRIFPKKQREIRNLTRSREHLVNNRTMLKNRIHRVLESASIKLSSVLADIFGKSGLHIVQGLLAGTDLDTIIASIPHEKVRAKEPELRNAIQHNLESSQIIIIDQCLSLMEQITSRIDELDEEIGARMNDRKKDLEIATSIPGIGKVSAMTILAEIGSYEEFVTPEKLAAWSGLIPSIYQSADHLKTGPITKRGSPHLRRIMVEVAQAAVKTKNCRLRSFFLRLKMKKGYNKAIVAVARKILCILWTILKKRELYCEENLPRKKVSISLKSPPTSRTIQEAIEILGRAGYMIQKLDSNGG

SEQ ID NO: 270512 - protein, 355 aa, unidentified
MERYIGMDVHAASCTLAVISEKGRKLKDFPVETNGQALVEAIRMIPGHKHLVIEEGLQSAWLYETLSPHVDEFVVAGITTSRGPKSDKRDAYGLAEKLRVGNLEKHVFKAPRQFTRLREFSRTHMTLVSDVVRTQARIKSVYRSRGVLVTGIDVYGSRRRKEWLEQLPSATQHRAKRLYDQLDFLLEQKKQAEADLLREGKKHSIVKVLETAPGFGPIRAARLVPIVITPHRFRTKRQFWSYCGLGIVTRSSSDWIQTADGAWIKGRVPQTRGLSRHHNHFLKNIFKGAATTAITQRNKDPIHARYERLLDGGTKPTLAKLSLARMIAATVLRMWKNEEEYDPGRAGLPTKTRKG

SEQ ID NO: 270513 - protein, 347 aa, unidentified
MRFYTKPHQYYCGIDLHARSMYLCILDQQGEIVFHRNMHTMSEMFLRAIDPYREDIVVAMECIFTWYWLADLCAQQGIPFILGHALYMKAIHGGKAKNDKIDAHKIAALLRGGMIPTAYVYPPEMRATRDLLRRRMHLMHKRSELLSHIQNTNSQYNLPEIGKKIAYKANREGVAERFDEQSVQKSIEMDLLLIDHYDKLLTDVELYITRTAKEHDAQNFFLLRSVHGIGKILSLVILYEIHDIERFPTVQDFASYARLVKCSKESAGKRYGVSGAKIGNVHLKWAFSEASVLFLRGNPKGQKYVEKLTSKHGKGKALSILAHKLGRAVYYMLKRQKAFDMNKFLSS

SEQ ID NO: 270514 - protein, 321 aa, unidentified
MHILGIDVAKAKLDLALRRPDGKWRSTVVQNTPEGFARLDAWLAAHGVGPVHACLEATGLYWQAAAEHLADAGHTVSVVNPAQVKAFGGAGLTRSKTDRVDARLIGAFCAAQRPPPWQAPPPSVRTLRALIARREALDAMRTQERNRLPVADEAVRDGIQAHLTHLEQAIQDIDAAIRQTIDDDPGLRRQGELLVSIPGLGDKTVAALLAYYGGPLRFESAKQAVAFAGLDPRQHQSGSSVRGKPRLSKVGHARLRKALYMPAMVATTRTAWGRALKQRLAVAGKPPMLILGAMMRKLLCVAYGVLKSGRPFDPSLHSVAG

SEQ ID NO: 270515 - protein, 407 aa, unidentified
MRDKSFFGVDVSKDWIDIARHGDNDTRRIDNTEAAISAWISGLPPPPAALICFEPTGGYERVLQRCLRRAGQRFARAHPNQVSQYRKASGVKAKTDARDARLLARFAAVELANRAAPAEVEADETLRELAARRRQVMAMRHAEACRAEHCEIQAVRDSHAAIAEALRDSQRRIEAAIASHIAASPVSRQTEALLRSLTGVGPITAMTLLADLPELGRLSGKQIAALVGLAPQQRDSGKYKGQARTGFGRPGVRAVLFNAARAAIRHNPDMRTVYERLVRVNGRNGKVALCAVMRKMLVILNAIMRDQQPWRGAATGETLADAQEVVAPTVPNAAPTDTTAAAAGPARATVQSLAPAGHAVTASEPARRTVRHRSGKQTPVMPSSRHPADARTSTKGDIIANKQRISA

SEQ ID NO: 270516 - protein, 379 aa, unidentified
MKQFSRYLGLDVHSREINVAVVEEDGKERYLGAIPNRPESVRDLIDRLGAKEQLRAVYEAGPTGYGLYWELERMGVSCEVAAPSLIPTKAGDRVKTNRRDALKLARYHRSGDLSYVWIPDEELEALRDLIRAREAGKRDEKRARLRLKSFLLRHGLRAPKGVRAWTAKYRAWLDAMTFERAALTGTYQDYLHEVHHQELRVKRLEAAIEEAVEQAPEQFREVVGALQSLRGVGKTTAIGVTAEVGSFSRFPHPQQLMGYSGTVPSEQSTGDKHRRWAITKTGNSHLRRLVGESAWSYRHRPALRYALKKRQEGQAAEVVEISWRAQVRLCGRFHRLVARGKTKQKVVTAIARELLGFMWAIGVEVERRRTNTTAQEKLG

SEQ ID NO: 270517 - protein, 346 aa, unidentified
MAIVETRAITGGVDTHADLHVAAALDPVGGLLGVREFPVSAAGYAGLLGWLGGFGTVCLVGIEGTGSYGAGLARHMSAAGVRVVEVDRSDRQDRRRQGKSDSLDAVSAARAAQSGRARGAPKGRDGAVEAVRALMVAKRSARSERTQAINQARALIVTGPEDLRARFAAHATADLVTDLASLRPRPGAVVGYHTRIALRELGRRAEFLDSQIVCLDALIVPLVTGHAPGLLALHGVGSDTAALLLVAAGDHPERLRSEAAWAHLCATAPIPASSGKTKRHRLNPAGDRQANHALWRIVITRMSSHPPTRAYAGRRTAEGLSKKEIMRCLKRYVAREVYPHLRAAAD

SEQ ID NO: 270518 - protein, 343 aa, unidentified
MQAVTTIGLDIAKMVFQVHGVDAEGKVIIRRKLKRRYVAAFFQKLPPCLVGIEACASSHHWSRELKALGHTVRLMPPAYVKPYVKRQKNDAADAEAICEAVTRANMRFVETKTPEQQSCLMLHRTRHLFIRQQTAVINAIRAHLAEFGIVAPVGRNGVEALLDVVADSSDKRVPEIARGCLAALGAQLRMLKAQILQFDRLIMAWHRSNETSKRLDEIPGVGPALATALVASVGDARAFRSGRDFSAWIGLVPRQNSSGGKEKLGSISKRGDRYLRSLFTAGALAVIRYAKLHGTEHRPWLTALLARRPTKVAAIALANKIARMAWAMMAKGERYKEPVALAR

SEQ ID NO: 270519 - protein, 423 aa, unidentified
MKVVYTICCGVDVHKTFFVATIITTEGIQPKYQKRRFSTFNNQILAFKSWLLENNCRDVCMESTGKYYVPVYNLLEDSINVTVANPKWVRAVKGCKDDVKDSKWIGDLFRLGLVPGSFIPKKDVRILREYTRYRFKLVSCKSSEKNRYQNVFTVCNVALDAVVSDMFGKSASSITDYIVNSDTFDPDYCVSLLQKSLKKKADEVVDSITGFQMTLSQKHRAKLVREHYDYLENQIQKLDDAIDELAKPFEPSVNLLCTNPGIRRLSAIMVLSEIGDDMSQFDSSKRLCSWAGLTPGNNQSAGKKKSVRINRAGVYLKPTLVQIAHAAVKDTKNTYYRTKYERLTKRRGKKRAIIAIARMILTAIYHMLSTGEVWNPRDLDQIDMPLEMREKEMQKSIRRAAKLLVAQGVVDPNAIMIPLSDTA

SEQ ID NO: 270520 - protein, 313 aa, unidentified
MKKTICGVDVSKAKLDVCIEPGHRLASFNNDTAGIAELAAFCREHAVTLLVMEASGGYERRAFVELWEKGISCALINPRNVRRYAEAMGILEKTDRIDASVIARFADAKNLAPTPLPSQAQQRLKALVTRLRQVTDDLTVQKQRRSGLLDNPEMLTSLDEVIALLKRQSRSLEGEIASMIDDDPLWAKLAEAWREVKGVAGRTVARLHAELPEIGLLSNKAAAKLVGLAPIANDSGKRKGKRPTRGGRAGVRSILFLVAATAARYDRSLGEFRDRLLKAGKEKMVIRIALARKLLVRLNAKAREVRAQYANAT

SEQ ID NO: 270521 - protein, 365 aa, unidentified
MKKSNTCRQSSGRQRKSVAESVTIGMDLGDKMSRCCTLNSSGEVVEEERVATTKQGMTQAFGTRKRSRIAMEVGTHSPWVSRLLSRFGHEVIVANARQLRLISQSSRKDDRMDARSLARLARADPELLRPVRHRSEEAQQDLAKIRIRAALIEARTALVNAGRGMVKAFGERLAKCDADQMSWERSEDLPVGLRETLKPLLKQVESLSEQIRECDEEIEEMGRRKYPEIAVLQQVSGVGTLIALTFVLTLEDKERFQKSRDVGCYLGLRPKRSQSGESEPQLGISKEGDVYLRKLLVQGAHYILGWRGPDTDLRRWGMKLAARGGKNAKKRALVAVARKLAVLLHRLWVTGEVYQPLRRAQGVAA

SEQ ID NO: 270522 - protein, 348 aa, unidentified
MTMTIVEAARAVTGGVDTHLEVHVAAALDPLGALLGTERFETDPGGYKALLTWLESFGQVTKVGVEGTGSYGAGLARFLRRADVEVIEVDRPNRAERRRSGKSDPLDAVEAARAALGGRATSISKSKDGAVEAIRVLVVAKRSARGARVKAVVQMRHLVITAPDQLRCRLKGLSVAGLVAESARLRPSRSGDPVMAAHKASLCSLARRIQGLEDEIAELDERIERLLVRTAPELLSRFGVGPDTAAALLVSAGDNPERLHSEAAWAHLCGVAPIPASSGKSNRHRLDRGGDRHANSALWRIVMVRIAHDPETTAYFERKVKEGRSKRDVIRLLKRYVARELYRYLPRG

SEQ ID NO: 270523 - protein, 343 aa, unidentified
MQTITTIGLDIAKSVFQVHGIDAEGNVIIRRQLKRRYVLPFFQKLPPCLVGIEACASSHYWSRELQALGHTVRLMPPAYVKPYVKRQKNDTADAEAICEAVTRANMRFVATKTPEQQSCLMLHRTRHLFIRQQTAVINVIRAHLAEFGIVAPVGRNGVEQLLDVVADAGDKRLPELARACVAALGVQLQTLKAQILNFDRRIMAWHRSNATSKRLDEIPGVGPALATALVASVADPKAFRSGRDFSAWIGLAPKQHSSGGKDRLGSISKQGDRYLRSLFTAGALAVIRYAKIHGTKRRPWLTALLARRPTKVAAIALANKMARMAWALMAKGERYKEPVAVAA

SEQ ID NO: 270524 - protein, 413 aa, unidentified
MEAYYVAGIDVHKAMLAVVVSEVKPGEVEFRRRRFGTRRSQLRELNQWLIEVGVQEVVMESTARYWRPVWVALEETGIRKHLAHAHSNGARRGRKSDFRDAERLVHRLVAGELVLSYVPEDEQQGWRWLTRTRYQLVCERGRVQSQIEGLLEDAQIKLSSVITDLLGASGRRILEALVREQGQHNPAKLAELGHAKLRASREELTDALDGRWLDRHRFLLGLHLDRIRQLDSQIEQIQQQTALAMQSCQEAVARLIRVPGIRTEGALQMLAEIGPTAAAFPSPEQLASWVGVCPGQQESAGQSSSQRSAKGNWQMRRLLSQAAHAASHAKGSFFESLYRRLLVKIGPQKAIWAVAHRLCRLIWKILHQGVSYQEQGSPTASPKSIQRRQHKLAAEFRKLGFQVQFTPINPSHP

SEQ ID NO: 270525 - protein, 404 aa, unidentified
MKGPIVSIDVSKGKSDYQAFKNLNVKYTGSRSIKHTKEGFDEIVNLVREMEKKLETEVCVVYEATGVYHRVLKKVLEDNNIKQFIINPLLSAKTRKNDSLRSPKTDKLDPKSIAKTYYSHSLHNSHKPETIYHELRELSRYYEDILVHIRKDKVAFRAQLDVVFPGYDALFDDLYGPVALAVIEKYPHPEMLQKKKINTVSKVIQNKTCHRQAVSDTMADKAIEYSKTIYSGCDKDDIEVLILQRLIKKLNEDMAEAERTIGEMIKLAQELPDFSIIKSIPGIGDNLAARIIAELGDMTRFKKKNELVAFAGLDPRISESGKNDGDHMHITKKGNKRLRCLLYLAVTCSIRLKRDDNSIKEFYIKKKQQSNPMCSKAAKTACASKLVRIIYSMCKTGELYQYNK

SEQ ID NO: 270526 - protein, 340 aa, unidentified
MDMTTLGIDIAKSVFQLHGIDADGAVVVQKKLRRGAVLNFLGKVGPCLIGMEACATSHYWAREIAALGHEVRLIPPVYVKPYVKRQKNDAADAEAICEAVTRPNMRFVPIKTEEQQSVLVLHRARDLLMRQRTMILNAIRGHLAEFGIIAAQGPRQVMGMIAQLRDDGDASLPEIARSALLALGAHLEALAGEIRALERQLMVWHRADPTSQRLETIPGVGLITATALAASVSDPSVFKSGREFAAFLGLVPRQNSSGGKDRLGRISKMGDRYLRKLLVVGATSVIRRAGSNPTKTGAWVRSLMERKPARVVTVAMANKTARISWAVMTRGEAYRASPIA

SEQ ID NO: 270527 - protein, 404 aa, unidentified
MLLDHDRTAIHTQFGAIFVALELSRSKWLVTSLSPGSGEKMSRRSLEAGDMAGLMCLFADLKRKAAIRTGRTYPIIVIQEAGLDGFWIHRVLQEQGIESHVVDAASIAVPRRKRRAKTDKIDGEKLLQVLLAYKRGEPRVCSMVVAPSPEQEDARRLYREREVLIAERIAHVNRIKGLLFAQGIGDYEPLRRNRRARLEELRTGDGRALPAHLKAQIGRALDRLELLLVQIKAVEAERDARLAAAREAAPNDKPHPIAMMFELKGIGPDFANGIWSEGLYRHFDNRRQVGAYAGLAGTPWQSGSIAREQGISKAGNPRLRTLMIQLAWLWLRHQPQSALARWFHAQGLRGRKTWRKTAIVALARKLLVALWKYVTHGVVIEGAVMKSLANKAAASKRARVPAAA

SEQ ID NO: 270528 - protein, 346 aa, unidentified
MKHNNPKKTVAVLGIDLAKSSFHLHGVNNHGNVALTKKLTRSKLYEFVAQLPVCLIGIEACGGANYWKRVFERYGHTVKMMSPQFVKPYVKSNKSDVIDAEAICEAVQRPNMRFVPSKTIAQQDIQSLHRIRSQLVARRTAQANQIRGLLMEYGIILPKGISYVRKKIPGVLENADNELTGLFRALLSDLYEEMVHLDERVEKLEDGLKTICKENSDCQRLLTIPGVGLLSATALVAAIGDIRVFKSGRELAAWLGLVPRQHSTGGKPTLLGISKRGDTYLRTLLIHGGRSIVRVAEKYQDKRSQWMGTLEQRRGSNIAAVGVANKNARIAWALLTRQSIFQADMV

SEQ ID NO: 270529 - protein, 341 aa, unidentified
MKNKSFIGIDISKNVIDVSIFCEETPIKDFSHDVFNNSRKGFGEMCTWLKKNHVVLSNSLFGMEFTGSYSMELEKFLNTRNYQFCMLSTHVVKHYPMGPKDKSDKIDSAKIADFLYRYNGTECVKPYNMPDKTMQRLKALMNERKFLVEQRTCFMNRRQLCTTKEDAQLYDGYIKKFSRDIDNIELEEQKLLATDDSLLATYKNLLTIPGVGFVNAINVIVITRNFTAFETARQYASYVGVAPHSHTSGTSVRWRPRPSARCDGQAKADLSMAATVAVQYDAELQSFYNRKLGGKQDSDTKRKALNAVKFKLVLRMFAIGKQNRKWEPLDSKSSNEKLAIS

SEQ ID NO: 270530 - protein, 344 aa, unidentified
MGYFAGLDVSLEETALCIVDDAGRIIREARVVSEPEALVAFFGACGMTMERVGLEACSLTAWLHAGLTEAGIPAICIEARRAKAAMGAMPNKTDRNDARGIAHIMRTGWYRAVHVKSPSCRSWRALLTARRMVLNKRRDVENGIRALLREVGLKVGTPSRKDFPARVRELAVDEPVLMSLTESLLSVIEVMTREVETLTKRVLDEVRVEPTCRRMMTVPGVGPLTALAFRATIDQPDRFRKSRDVGAHLGLTPRRYQSGETDVQGRISRCGDELARTALYEAAHSLLIRSTKWSALRAWGMSIAKRRGMARARVAVARKLAVILHRMWADGSEFRWGKQACAAA

SEQ ID NO: 270531 - protein, 341 aa, unidentified
MQVTTIGLDIAKNVFQIHAIDSEDKVVVRKQLRRCQVLRFFQELPRCLVGLEACATSHYWARELTKLGHEVRLMPAKDVKAYVKRNKNDAADAEAICEAVRRPTMRFVQVKSAEQQAQLMQHRARDLLMHQRTQLINALRSHLAELGITAPQGREGIKELLAIIADDANTHLPNDARASLMVLAAQLQALQTTIGAIEKRITVQHRATKESKRLQTIPGIGVIGASAIAATVTNPKIFRSGRDFAAWIGLVPRQMSTGGKPKLGPISKQGDRYLRRILVVGAVSVLRRAKHNPQKFPWVTRLLARRPFKVVAVALANKMARIAWALMISGKTCRSAWFAAA

SEQ ID NO: 270532 - protein, 424 aa, unidentified
MNLTQNDRLNQVTSDTLIVGVDVGSQTHFCRAFDWRGFELSRRVFKFSNTRMGFLTFLRWTEELMKKTEMKKVIVGCEPTGCYWLTFQKFLHEHDILLVTVNPFTVNRSKELDDNSPEKSDLKDPKTIALLVKDGRFSTSYLPSGVYAEIREASVCRDQIMKQHVRLSNQIQGWLQKFFPEYFECYSGWDSTSGLLLLKEAPLPQDILKIGAGGINQIWREAKVRAAGLKRAQTLIEAAQNSVGLEAGEAARLEIWILVNDYLLKEEQLRRLDEYLEEKVKEVPNVEKLLAIKGVGMSTVIGFVAEVGDIGRFTDPKQIQKLAGLEIVKKSSGKKKGQPRISKRGRRKLRRTMYESARVLMNWNPAFQDVFLYYRNRQRNPLGGMQAKIAVACKAIRVFYIVLQTGCDFDEEKFRKDIIHPEAA

SEQ ID NO: 270533 - protein, 346 aa, unidentified
MERPQNYVGIDVASATFTSAVGRIGEQWQIVVRPAQFANAYDSFAQYLHWLQEHEIQPDNSVICMEATGVYNEVLAHFLVANRYRVAIEPPLKVKRAFKPAGHKSDPVDSCQISEYAYRYWDELSIWAPRQELLEQIKTLLTTREQFVTQKVGHHNALLALKRKAVRTPLAERAHEKAISELKAHIQRLEDEIVRLIDQDPDFHNMVDLLTSIPGVGLLLAAHMLLTLHSTPQPLSPKRLAAFIGICPYEESSGSSLHAPATSRHYGPPGLRRLLFLAAMSVRNHNVQFKTYFLRKQQEGKPKKLILNNIANKLLKIMVAVVRSNTPFIPNYRSVNPGLLLIFAKE

SEQ ID NO: 270534 - protein, 351 aa, unidentified
MGTYEPNSRNETVFLGIDLHRRTWYVSARTSDQELFTTGIPGRWEALERLLLKVNSQNIKVVYEAGYFGFWLHDKLTLWGVDCIVTPPSLIPQEYGNRVKTDRKDSRKLAHLLAKDLLKHVYVPTQEELYHRQVLRRRTQLIQDRVRTQNRIKAELRFYGIDIPAPHGKWSLIYLGNLKRIRFGNRWIQESFNRLIEMYEFLSGQIQEQTRLLMELAKKTLYQQRVDILTSIPGIGVLTAMEILLELIDMERFSKPEQLAAYVGLTPAQYSSGDKVRMGRITGIGKSHLRASLVEASWYLISRDGSMRSTYERIKSRAGGKRAIVAVARRVLLVIRKMLNENKMYQKTIPA

SEQ ID NO: 270535 - protein, 295 aa, unidentified
MTETTIYVGLDVHKKTIAVATVEGRASADVRFYGTIANTPEAIRSMLRKLGKGGQRLHLAYEAGPLGYNLYRLSTGLGHRCDVVAPSLIPRKAGDKVKTDRRDAMSLAQLLRAGQLTEVWVPDEAHEAMRDLVRMRAQATKDLRKTRQQLMSFLLRHGRSFPGAHWTKAHRRWLGEQKFAHPAQHLVLEELLARIERAEELNDRLKTAIVELVPAWTLAPVVAAVQALRGVSILVAATVVAEVGNFSRFESPRQLMAYLGLNPSEHSSGATIKRGAITKTGNSLARTHQAHHYKK

SEQ ID NO: 270536 - protein, 427 aa, unidentified
MNENEFSRIEQFRQFRKRIRGAKAYLIVGIDIAKSKHHAFFGTANGRTVLKGLVVENSASGFEHLLTMVQFYMDRDGFKQLVFGVEPTGVYHKPLSEFLIEHDHLVVYVTNEAIKNNRKLLDGRWDKNDTKDAANVADLIAQGKCHYYDFPDHGLRDIRGWLLFRKRLKKRLHACRVRIRNNLVAQYFPEMDKHWNKAESENLAIVRWCLSPRKVNDTSFEKFYEMVTTRNRGMRQYRRLHKIWEMAPHSIGCRASAASQLEARLLVENLYYLKEQIGEVERTIFDISRSYQEYKCLLTIPGFGPYVSAVVLGAIGNPYRFENASQVIRLAGFDLNAHRSGKTSATAVPVISKKGKADLRYALYQAALIASSLTIHFREYYHRLLDGRQKEKGIRTKMRVKLATKLLVIAWTLMKKKESFDPVYLKT

SEQ ID NO: 270537 - protein, 350 aa, unidentified
MRYAQINTKYYCGVDMHSKTMYARIKDKEGTTLLHGNMPNDFDTVKEFIGPYLPDIAVGVESTCFYYWLADACRKEGIPFYLGHALYMKAISGGKVKNDKIDAGKIADLLRANLFPLAYPYPKEMRATRDLLRRRHRFVSKRAGTYVHLQILCQQYAIIDLPPNLMKKKRERQKLLKLFDNQDLRMIIEADLQYIEALDPIIDGLEKQIIAQANTHNRIDYQLLMTTPGIGPIIALIILYETHNIRRFKTVQRYSSYCGVVKCQRISAGKEYASKNHKIRNAYLKWAFGEIILKAQQDKRIERLYQRLKAKYGKGRAKSIIAHRFCVAIYFMLKNQQPFDVDRFVQSSKY

SEQ ID NO: 270538 - protein, 335 aa, unidentified
MKKEMKFYLGMDVSKLWIDITLMCVADPIAERFDNDAAGMKALHKWLKKHKVSFDENSLLVIENTGVYHRLVWEYCSTHGLPLYIGNATHIKWSFGIARGKNDKIDSERLCTYAFKNADELKATPVLNPVFLKLKDMMTARSRLLAQKNSIKVYLGEMKLSNSKETQLIIEQAHKAALEGITASLKNVEKQIHQMIEQDAAIKNNYELLLSVPGIGHLTAVYIICCTNNFICKITGKQLASYAGVAPFGNTSGTSIKGRDKVHKMANKDLKKLLHMGAISAITNYPEFKDYYERKVKEGKHEQSVINAIRSKIALRAVAVINKQQKYVSNYKKTA

SEQ ID NO: 270539 - protein, 345 aa, unidentified
MEHYVGLDVSLKLTAICIVDRTGKIEREGVVSSDPEAIAIFIKSHAPHVVRVGLETGATATWLWTELNKLGLPVICIDARHAKAALKMQINKSDRNDAVGIARIMQCGWYKEVHVKDLDSHAVKALLVSRALLVKIKRDLENQIRGLLKNLGLVIGRAKMNVFAVRAAEMTEDRPEPAAAVVPLLSARAAIEQQIADLDRKVMRLARKNAQARRFMTAPGVGPITALCFLATIDDPTRFKRSRSVGAYLGLTTRRYASGEIDWTGRISKCGDKMLRSYLYEAANVMLTRVARWSALKAWGIRVAKRTGLRKAKVAVARKLAVVLHRMWIDGTEFKWSKEAANQPA

SEQ ID NO: 270540 - protein, 314 aa, unidentified
MEVILGVDVSSQKLDACLESPKHAKPMFKTVAYTSEGCKKLLTWANRHKVSRCAMEATGGYEFTIAQLIMKAGIKLYIANPNRIRHFAKGDGILAKTDKIDAFVIAEFARKSNLPTAYEASPVQIELKQLIGRRIELKKSLQVEKCRMNLASGAILQSHENLVAAINLEVEQIDSLIDALEMQHPDIEQKTRILCQQKGVGKATARILIALIPELGQIDRRKIASLVGLAPIAKESGKMKGKRFISGGRYEARRCLYMPAWVATQYDPEIGAFYQRLVENGKPKKVAIAAVMRKLLVRLNAQMRNYLSLSTKST

SEQ ID NO: 270541 - protein, 430 aa, unidentified
MKSNTQNAKIEAITEKTLVLGIDVGSEMHYARAFDYRGIEYSKKPFKFSNTEAGFATFKEWILDLKERHEKDKVVPGMEPTGHYWFNLGKFLQDNEMKPVLVNPHHVKKSKELDDNNPTKNDRKDPKVIAGLVREGRYMIPYLPEGVYADLRTASNIRFQLQAELTRIQNRISRWFNIYFPEYKTVYGKPDAKSGMLILKAAPLPEDILTLGIDGVNQIWRDAKLRAVGKARAKTLIEAAEHSVGSKEGAVSARMEIRMLLEDYESRNTRLQEVMVLIEELVRKIPMAEKLLEIKGVGIRTVSGFLAEVGDISRFNNPKELQKLAGLALVENSSGKHKGETTISRRGRKRLRYLLFEVAMSLVSKNQEFRELHNYYTTRRLNPLKKMQSLMAIAAKLIRVFYAMLTKGVDYDPKKMVSDIKRPAVYLQAA

SEQ ID NO: 270542 - protein, 359 aa, unidentified
MNATTVAVDLAKNVFELAVADEHWRVVERHRLSRGQFERWFANRAVSLVVMEACGSAHHWGRWLKSLGIEVRLLPPRYVRPYVKRNKTDAADAAALLEALRCADIAPVRIKSVEQQALQALHRTRSLWMATRTARINALRGFCREFGITIVAGSRVGLEQIGRVLADPQSAVPTLLRETLSLLIEEIRLLEARIARLETQLSAAARESSSCTTLLSVPGIGLLTATAMVAATGGTVSHFQDARHFASWFGLTPKEHSSGSTRHLGRISKRGDRYLRMLLTHGARSVLRAATVAQRTGRSLDGLRQWALAVQSRSNHNKATCALANKLARICFAALRDQEPFASDRVHRKLIRQAYPMPA

SEQ ID NO: 270543 - protein, 460 aa, unidentified
MNKAIGIDPDSKGYICYLVDTGEQRGVRKGFLITVPDLGSLIRWIKTEREVIVALEGSNGYSRPLEKALREAEVVFYSFRPSDVSKFRKAVLGQNKNNEKDAESVARYALALQAQGKLEQFRRVWFADEPLRLLTRSFERKSKELTMELNRMWKLLRLASPDLYLALGGFNPEVEISENVLKNQGILSLLEQIPNLFEWKSLSTEDFGAAMGGAQYRGREKLIDALQKLSPVFPPVPQAVSLMIRNSAQTIRQIKRQMSEIQKMIAQMTAENPAVKALEEYKGISVITAATLVAEIIDIRRFVNDDRLASYAGLGRREYSTGDRSMMIPSQQFSHRLKDIFMTAARNFVRYNPDSHLAGYFRNLVKKGMKPNEARKRVARALVRMIFRKLRSLVGEGSEQEKRSESDMASGLESRGDLGRMSNISLSAPIEDDTEPVGKIKRRSRGKGAEEKNAVLVDKL

SEQ ID NO: 270544 - protein, 426 aa, unidentified
MNATTSFAATIGLDWADQKHDLWIQPSDGSKAQHVQLEQTPEALHAWVAKLRERFGNRPVAIGIETSCGPVISALLAYDFIVLFPLNPKALKDYRAAFSVSGAKDDRTDAQLIEQFVRLHRHQLRALEPDTEMTRQLAGLVENRRRLVDERTRFVNQLHAVLKTYYPLAETLLHRQIKQPMAAAFLARWPDLESLQKSQPRTLRAFFYRHHCRRAAKIEENIAQIQKAQPLTTDPAIIIPARCLVGALVGMLKTLHQVVADLDQQIVQLMDQHPEAPIFRSFPGAGPALAPRLLVAYGTHRDRFQNADQVAQLYGVAPVTIQSGNSKTTHLRYRCPKFGRQTFHENAACALKQEPWAQLYYLQHKKRHDNKHHQACRALAYKLNRIYFACWKQREKYDPNRYLEALKQNASPLHQQLQTPTPSSCE

SEQ ID NO: 270545 - protein, 357 aa, unidentified
MKIVGCDLHARQQAIAMVDTETGEFTEKTLDHEGNAVRAFYAALEGPVLVGIEATGAMQWFLELLEELGIECRVGHPAKIRAQETRKQKHDRRDARLLLNLLSEGRFPEIWMPSSEQRDLRTLLRDRDQRVRMRTRLQHTLQAIALNHAMRQGRALWSARGRCTLEALPLPPYTSQRRSELLGLYEQLQKRIQELDQEVEAQTRQRPQARRLQTHPGVGPVTALATEVFLGDPSRFATANQVASYIGMIPCEHTSGKRQRLGKMTKQGNSLLRYLWTEATMHAVAKDPELKRFYRRKLIQKGMGKARIAAARKLGIRLWIMLRDQIDYEEFCRRGKSRQSGEAHAGMPDNNSGPALQ

SEQ ID NO: 270546 - protein, 406 aa, unidentified
MIYVGIDVAKDKHDCCILGPDTEELFPVFTIRNNSDGYGELFHKIESVSKDKSQIKIGLEATGHYSYNILGSLLDHGYHTFVINPLHTNLYRKGQSLRKTKTDKVDARSIAEMLVTDKTLKPYTGTSYHSEELKSLTRYRFELVKERAKLKTSVSRLVNILFPELESLVPTLHMNSVYRLLQELPGAYFIASSNLTHLKALLADASKGHYGREKAIEIRETAKSSIGSLMPAKSMELRQTIRRIDTLTSDIKEVEQSIQKIMDECGSPITTIPGIKYRMGAMILAEIGDFARFSNADQVLAYAGLSPSTYQSGQLISSYARMEKRGSKYLRYALFNAAIYASVWDERFRLYLSKKRAEGKHYYVAISHVVKKLVRTIFRMASSLMLYSSYSFQCTNLSKIRFRILF

SEQ ID NO: 270547 - protein, 362 aa, unidentified
MKKGIREMESEWKQRPERTVGIDLGDRFSRYCVLNRDGEVLEEGQVRTGAEGFRRHWEGELRQRIVMETGTHSPWISRLLQSFGHQVIVANARKLRAISQNESKNDRQDAEMLARLGYCDPKLLAPIRHRSAERQRDLNLLRARDTLVRARTMLINATRGLVKSAGGRLPAAASDYFVARVTAAVPAELEAATQPLLHQIAALSAAIRRLDQAIEKLGERYPEIIRLRTVPGVGPVIAAAYVLTLDGVDAVERSRSVGAFLGLRPRQSQSGNSDPEHNISKTGNQYLRRLLVQAAHYTLGRFGPDSALRRWGLKLAAGGKRAKQRAVVAVARKLAVLLHHLWRTGQDYRNFPEAAAVAGSAV

SEQ ID NO: 270548 - protein, 342 aa, unidentified
MKYVGVDLHKQSITLCVMVKDGDQRKIEQRRTLMCADTPAIRKFFEQLGAPFRLVVEATSSYEWFLLLVEDLADRCVLAHPKKLRVIAGSKQKSDKIDARILAEFLLLDMIPEAHRPTPRIREYRVLVRHRNRIQRQITSVKCKLRHKAAFYNADIARLFTARGLDHLARIAMSHADQFECQALREQLLFLQEQLKAAEKELALFAQSAPVAEQESRAVLATMPTVGTVTVDVVLSEAADVRRFRSAKKLVAYAGLDPGFRESAGKGKELHITKEGSRLLRWALIETAWRLVQTSPRWRRLFIKLRGSTGHIKKAIVGVARRVLCVMYAMLRDGKAYRLAAD

SEQ ID NO: 270549 - protein, 347 aa, unidentified
MNFYTRQHKHYCGIDLHARAMYVCILDQHGTKLVHKNLPTTPDAFLRVIAPYRDDLVVGVECMFTWYWLADLCAKEGIAFVLGHALYMKAIHGGKAKNDKIDAHKIAVLLRGGMLPQAYVYPAEMRATRDLLRRRCHLVRKRAELLAHIQNTNSQYNLPEIGKKLAYKANREGVEEHFPDPSVRKTIEVDIALIDHYDQLLGEVELYITRTAKAHDVQTFSRLQSVPGIGKILALVILYEIQDIARFPRVQDFVSYCRLVKCAKESGGKRLGTSGKKIGNVHLRWAFAEAAVLFLRQNQPGKEYFAKLEHKHGKAKALTVLAHKLARAVYYLLSREQAFDLHRFVTA
